United States Patent Application Publication US 2006/0003322 A1 - sequence listing, part 8

SEQ ID NO: 285015 - RNA, 21 nt, Human
cacacagaauagcaaacaaaa

SEQ ID NO: 285016 - RNA, 23 nt, Human
caccaaguacauagccucaaucc

SEQ ID NO: 285017 - RNA, 22 nt, Human
cacucuggaacaaacacacuug

SEQ ID NO: 285018 - RNA, 19 nt, Human
cagcugcaaaauucagaua

SEQ ID NO: 285019 - RNA, 18 nt, Human
ccaaauagucccugagca

SEQ ID NO: 285020 - RNA, 23 nt, Human
ccgucuggcgccgauccggcugc

SEQ ID NO: 285021 - RNA, 22 nt, Human
cgccgauccggcugcgucacgc

SEQ ID NO: 285022 - RNA, 20 nt, Human
cgucuggcgccgauccggcu

SEQ ID NO: 285023 - RNA, 27 nt, Human
cucuccauuacacucguugguucugac

SEQ ID NO: 285024 - RNA, 20 nt, Human
gaaggucauggcacagacaa

SEQ ID NO: 285025 - RNA, 23 nt, Human
gccccaacgggaaaagccaauuu

SEQ ID NO: 285026 - RNA, 24 nt, Human
gccucaauccaaaaggagaaagcu

SEQ ID NO: 285027 - RNA, 22 nt, Human
ggaagguaccuucggccccaac

SEQ ID NO: 285028 - RNA, 21 nt, Human
ggacaucccccccuucccaaa

SEQ ID NO: 285029 - RNA, 20 nt, Human
guaauucgcgcccgaccacc

SEQ ID NO: 285030 - RNA, 19 nt, Human
uaagagaugaccugcccuc

SEQ ID NO: 285031 - RNA, 23 nt, Human
uaauauauucccuccccugcccc

SEQ ID NO: 285032 - RNA, 19 nt, Human
uagcaaacaaaaccaauuu

SEQ ID NO: 285033 - RNA, 22 nt, Human
ucagauguaaacacaacacuuu

SEQ ID NO: 285034 - RNA, 18 nt, Human
uccaaaaggagaaagcug

SEQ ID NO: 285035 - RNA, 19 nt, Human
uccagcaagaagucuccag

SEQ ID NO: 285036 - RNA, 23 nt, Human
uccauuacacucguugguucuga

SEQ ID NO: 285037 - RNA, 24 nt, Human
ucccugagcacacuguucauucca

SEQ ID NO: 285038 - RNA, 24 nt, Human
ucgcgcccgaccaccggggaggua

SEQ ID NO: 285039 - RNA, 22 nt, Human
ucugacacacagaauagcaaac

SEQ ID NO: 285040 - RNA, 20 nt, Human
ucuucccaaucuacaccuuu

SEQ ID NO: 285041 - RNA, 19 nt, Human
ugaaaggcacauuuucucc

SEQ ID NO: 285042 - RNA, 23 nt, Human
ugccaaccuuuuaagguacuaca

SEQ ID NO: 285043 - RNA, 24 nt, Human
ugccaaccuuuuaagguacuacac

SEQ ID NO: 285044 - RNA, 21 nt, Human
ugcccccaccaaguacauagc

SEQ ID NO: 285045 - RNA, 22 nt, Human
ugucuuuauacuuccacacucu

SEQ ID NO: 285046 - RNA, 19 nt, Human
uguuuuauuuuuuguuguc

SEQ ID NO: 285047 - RNA, 23 nt, Human
uuaagguacuacacauucugcag

SEQ ID NO: 285048 - RNA, 21 nt, Human
uucaacuagaggaguggcagc

SEQ ID NO: 285049 - RNA, 23 nt, Human
uuccugugcuuucuaggcugggu

SEQ ID NO: 285050 - RNA, 23 nt, Human
uuuuuuuuuuuuuuuuuuacaag

SEQ ID NO: 285051 - RNA, 20 nt, Human
aaacaggcuccucuaauaua

SEQ ID NO: 285052 - RNA, 20 nt, Human
acacauuuaucuucucaaca

SEQ ID NO: 285053 - RNA, 18 nt, Human
acuggucaccuuuuucuc

SEQ ID NO: 285054 - RNA, 18 nt, Human
caacaaaacaggcuccuc

SEQ ID NO: 285055 - RNA, 22 nt, Human
cacauuuaucuucucaacaaaa

SEQ ID NO: 285056 - RNA, 18 nt, Human
uaaacaucaauggggguu

SEQ ID NO: 285057 - RNA, 18 nt, Human
uacaugccuguuuggggu

SEQ ID NO: 285058 - RNA, 21 nt, Human
ucucuuaagcuaaaugugaua

SEQ ID NO: 285059 - RNA, 18 nt, Human
uggaaaguacaguaaaau

SEQ ID NO: 285060 - RNA, 19 nt, Human
uggagucuaaaguacucca

SEQ ID NO: 285061 - RNA, 25 nt, Human
uuuuuuuuuuuuuuauacuccugga

SEQ ID NO: 285062 - RNA, 20 nt, Human
aaaaaaacacugcagcaaac

SEQ ID NO: 285063 - RNA, 21 nt, Human
acaagggauucugauguggau

SEQ ID NO: 285064 - RNA, 20 nt, Human
accaucuucugacuaagcug

SEQ ID NO: 285065 - RNA, 22 nt, Human
agaaaagguacaguaaaaauau

SEQ ID NO: 285066 - RNA, 19 nt, Human
aggaaucgcuucaccgaau

SEQ ID NO: 285067 - RNA, 18 nt, Human
aggcaagacacagccaag

SEQ ID NO: 285068 - RNA, 21 nt, Human
aguaccacauuuugagauguc

SEQ ID NO: 285069 - RNA, 18 nt, Human
caagacacagccaagaca

SEQ ID NO: 285070 - RNA, 18 nt, Human
caagggauucugaugugg

SEQ ID NO: 285071 - RNA, 21 nt, Human
caccgaaucgccuggccgcgu

SEQ ID NO: 285072 - RNA, 23 nt, Human
ccaaaguugaagucacugguuau

SEQ ID NO: 285073 - RNA, 18 nt, Human
cccuuuauacaaugucau

SEQ ID NO: 285074 - RNA, 25 nt, Human
ccuaaaacagucauauuuuauucuu

SEQ ID NO: 285075 - RNA, 20 nt, Human
cugggauagaauccaaaauu

SEQ ID NO: 285076 - RNA, 22 nt, Human
cuuggccuuuuucuuccaugga

SEQ ID NO: 285077 - RNA, 21 nt, Human
gaaguaugaaugaaaugccaa

SEQ ID NO: 285078 - RNA, 23 nt, Human
gcagcaaaccugcuguuguccga

SEQ ID NO: 285079 - RNA, 21 nt, Human
ggcaagacacagccaagacag

SEQ ID NO: 285080 - RNA, 20 nt, Human
uaaaaggcaagacacagcca

SEQ ID NO: 285081 - RNA, 20 nt, Human
uacaaugucauugaccaaaa

SEQ ID NO: 285082 - RNA, 18 nt, Human
uauagaauguuuagcaua

SEQ ID NO: 285083 - RNA, 23 nt, Human
uaugagaccacccuuuauacaau

SEQ ID NO: 285084 - RNA, 26 nt, Human
uauuuuauucuucugaacagcuacuu

SEQ ID NO: 285085 - RNA, 19 nt, Human
ucaccgaaucgccuggccg

SEQ ID NO: 285086 - RNA, 22 nt, Human
ucaccgaaucgccuggccgcgu

SEQ ID NO: 285087 - RNA, 21 nt, Human
uccaggucaaagaggggaacc

SEQ ID NO: 285088 - RNA, 19 nt, Human
ugaccaaaauguuacgugg

SEQ ID NO: 285089 - RNA, 18 nt, Human
ugagaugucuagaagaaa

SEQ ID NO: 285090 - RNA, 20 nt, Human
ugggauagaauccaaaauuu

SEQ ID NO: 285091 - RNA, 18 nt, Human
uguaaagacaucuagcug

SEQ ID NO: 285092 - RNA, 23 nt, Human
ugucauugaccaaaauguuacgu

SEQ ID NO: 285093 - RNA, 27 nt, Human
ugucuagaagaaaaaucuucaaacucc

SEQ ID NO: 285094 - RNA, 23 nt, Human
uguggacagaaaaaaacacugca

SEQ ID NO: 285095 - RNA, 18 nt, Human
uguggaugguaugaguac

SEQ ID NO: 285096 - RNA, 18 nt, Human
uuccauggaaccaucuuc

SEQ ID NO: 285097 - RNA, 21 nt, Human
uuguuuuuuuuacuccuuugg

SEQ ID NO: 285098 - RNA, 20 nt, Human
uuuuuuacuccuuugguuua

SEQ ID NO: 285099 - RNA, 23 nt, Human
aacacguugcuuccaaauacucc

SEQ ID NO: 285100 - RNA, 23 nt, Human
acggagccucucccgagucuggc

SEQ ID NO: 285101 - RNA, 23 nt, Human
agacggagccucucccgagucug

SEQ ID NO: 285102 - RNA, 19 nt, Human
agccaaagaacuccucucc

SEQ ID NO: 285103 - RNA, 22 nt, Human
caaagaacuccucuccuuggcc

SEQ ID NO: 285104 - RNA, 19 nt, Human
caagacggagccucucccg

SEQ ID NO: 285105 - RNA, 22 nt, Human
cacaagacggagccucucccga

SEQ ID NO: 285106 - RNA, 18 nt, Human
ccaugcugggccagcacc

SEQ ID NO: 285107 - RNA, 22 nt, Human
cccugguaaauagucuucugcu

SEQ ID NO: 285108 - RNA, 18 nt, Human
ccucuccuuggccagcua

SEQ ID NO: 285109 - RNA, 24 nt, Human
ccuugcacaagacggagccucucc

SEQ ID NO: 285110 - RNA, 21 nt, Human
cuccuuggccagcuaaguagc

SEQ ID NO: 285111 - RNA, 18 nt, Human
ggccagugcagccagccc

SEQ ID NO: 285112 - RNA, 28 nt, Human
uaaaacaguggccuuaggaaaaucugcu

SEQ ID NO: 285113 - RNA, 19 nt, Human
uaaacaagggcugcuggca

SEQ ID NO: 285114 - RNA, 20 nt, Human
uaggaaaaucugcuuuggca

SEQ ID NO: 285115 - RNA, 18 nt, Human
uauaaacaagggcugcug

SEQ ID NO: 285116 - RNA, 21 nt, Human
ucacauccacccagaccaauc

SEQ ID NO: 285117 - RNA, 22 nt, Human
ucugcucacauccacccagacc

SEQ ID NO: 285118 - RNA, 22 nt, Human
ugcagccagcccacaggacccc

SEQ ID NO: 285119 - RNA, 21 nt, Human
ugcucaaacccugcuguuuau

SEQ ID NO: 285120 - RNA, 20 nt, Human
uggcaagcgacugcagaggc

SEQ ID NO: 285121 - RNA, 22 nt, Human
uguuuauaauuaacacguugcu

SEQ ID NO: 285122 - RNA, 22 nt, Human
uguuuggacaaauccaauagag

SEQ ID NO: 285123 - RNA, 18 nt, Human
uuaaaacaguggccuuag

SEQ ID NO: 285124 - RNA, 21 nt, Human
uuccaaauacuccaggguccc

SEQ ID NO: 285125 - RNA, 24 nt, Human
uuccaugcugggccagcaccuguu

SEQ ID NO: 285126 - RNA, 21 nt, Human
uugcacaagacggagccucuc

SEQ ID NO: 285127 - RNA, 19 nt, Human
uugugcucaaacccugcug

SEQ ID NO: 285128 - RNA, 20 nt, Human
aggaggcacguggagccagg

SEQ ID NO: 285129 - RNA, 20 nt, Human
aggcagugcugguggcugca

SEQ ID NO: 285130 - RNA, 20 nt, Human
augcaagugagggaaaaagc

SEQ ID NO: 285131 - RNA, 20 nt, Human
caagucucuguccugaucca

SEQ ID NO: 285132 - RNA, 24 nt, Human
cagugcugguggcugcagggugca

SEQ ID NO: 285133 - RNA, 23 nt, Human
cucuguccugauccaaggcugug

SEQ ID NO: 285134 - RNA, 18 nt, Human
gugcugguggcugcaggg

SEQ ID NO: 285135 - RNA, 25 nt, Human
ugaugcaagugagggaaaaagcuga

SEQ ID NO: 285136 - RNA, 18 nt, Human
ugcagucaccuuuauaau

SEQ ID NO: 285137 - RNA, 20 nt, Human
aggaagaccccgcggauauu

SEQ ID NO: 285138 - RNA, 22 nt, Human
auccucuguccucuucuccauu

SEQ ID NO: 285139 - RNA, 20 nt, Human
ccacacauccucuguccucu

SEQ ID NO: 285140 - RNA, 20 nt, Human
cccacacggcuaccgcauca

SEQ ID NO: 285141 - RNA, 24 nt, Human
cccacacggcuaccgcaucagcca

SEQ ID NO: 285142 - RNA, 23 nt, Human
ccccacacggcuaccgcaucagc

SEQ ID NO: 285143 - RNA, 24 nt, Human
ccccgcccggccagccgcggggag

SEQ ID NO: 285144 - RNA, 22 nt, Human
ccgcccggagcgccccacacgg

SEQ ID NO: 285145 - RNA, 20 nt, Human
ccgcgcagcguccccgcccc

SEQ ID NO: 285146 - RNA, 18 nt, Human
ccgcggggaggagggcuc

SEQ ID NO: 285147 - RNA, 19 nt, Human
ccgucgccgcccggagcgc

SEQ ID NO: 285148 - RNA, 21 nt, Human
ccuggggugggacgcguccgc

SEQ ID NO: 285149 - RNA, 18 nt, Human
cgcccagugagagccugg

SEQ ID NO: 285150 - RNA, 19 nt, Human
cgcgcagcguccccgcccc

SEQ ID NO: 285151 - RNA, 21 nt, Human
cugcuguuuccgccauucauu

SEQ ID NO: 285152 - RNA, 20 nt, Human
cuuuuuuguuacugccguuu

SEQ ID NO: 285153 - RNA, 24 nt, Human
gcggauauuggcauuucucucggg

SEQ ID NO: 285154 - RNA, 18 nt, Human
ggugcuuuccugaaguuu

SEQ ID NO: 285155 - RNA, 21 nt, Human
ucacaacuuccagcuuuccca

SEQ ID NO: 285156 - RNA, 23 nt, Human
ucccacacauccucuguccucuu

SEQ ID NO: 285157 - RNA, 19 nt, Human
ugucacuugaggaagaccc

SEQ ID NO: 285158 - RNA, 21 nt, Human
uuccgccauucauuucaguuu

SEQ ID NO: 285159 - RNA, 18 nt, Human
aaaguucuccaggucccc

SEQ ID NO: 285160 - RNA, 22 nt, Human
acaauccucuuguaagacagaa

SEQ ID NO: 285161 - RNA, 19 nt, Human
acagagcgcugauuggucc

SEQ ID NO: 285162 - RNA, 19 nt, Human
acccucugucuucuggcuu

SEQ ID NO: 285163 - RNA, 23 nt, Human
agcaggacuguggggcugcagga

SEQ ID NO: 285164 - RNA, 21 nt, Human
aggcaacaucagaaaaccaga

SEQ ID NO: 285165 - RNA, 21 nt, Human
caaagcucccacagcguggaa

SEQ ID NO: 285166 - RNA, 18 nt, Human
cagccagcaggacugugg

SEQ ID NO: 285167 - RNA, 18 nt, Human
cagcguggaagcagacuc

SEQ ID NO: 285168 - RNA, 20 nt, Human
cagcguggaagcagacucuu

SEQ ID NO: 285169 - RNA, 19 nt, Human
cagcuucuccgccacucag

SEQ ID NO: 285170 - RNA, 19 nt, Human
cagugaguagacggcagug

SEQ ID NO: 285171 - RNA, 26 nt, Human
caucagaaaaccagacccagauccuc

SEQ ID NO: 285172 - RNA, 19 nt, Human
cccagggucccagcuucuc

SEQ ID NO: 285173 - RNA, 23 nt, Human
cccucugucuucuggcuuggaag

SEQ ID NO: 285174 - RNA, 18 nt, Human
ccgcggagcucagccagc

SEQ ID NO: 285175 - RNA, 22 nt, Human
ccucugucuucuggcuuggaag

SEQ ID NO: 285176 - RNA, 18 nt, Human
ccucuuguaagacagaaa

SEQ ID NO: 285177 - RNA, 21 nt, Human
ccucuuguaagacagaaaagu

SEQ ID NO: 285178 - RNA, 27 nt, Human
cggagcucagccagcaggacugugggg

SEQ ID NO: 285179 - RNA, 21 nt, Human
cuccagguccccauucaaccc

SEQ ID NO: 285180 - RNA, 19 nt, Human
cuggaaagaagcuacagca

SEQ ID NO: 285181 - RNA, 19 nt, Human
gagaacaaagcucccacag

SEQ ID NO: 285182 - RNA, 20 nt, Human
ggaagucucgggcugcagug

SEQ ID NO: 285183 - RNA, 21 nt, Human
ggagcucagccagcaggacug

SEQ ID NO: 285184 - RNA, 26 nt, Human
ggagcucagccagcaggacugugggg

SEQ ID NO: 285185 - RNA, 24 nt, Human
ggcaacaucagaaaaccagaccca

SEQ ID NO: 285186 - RNA, 19 nt, Human
ggcuccaucuuuguucugc

SEQ ID NO: 285187 - RNA, 24 nt, Human
gguuggaagucucgggcugcagug

SEQ ID NO: 285188 - RNA, 23 nt, Human
guagagcaagagaacaaagcucc

SEQ ID NO: 285189 - RNA, 21 nt, Human
guccaucuuacagagugcuga

SEQ ID NO: 285190 - RNA, 20 nt, Human
guguagagcaagagaacaaa

SEQ ID NO: 285191 - RNA, 25 nt, Human
uaagacagaaaaguucuccaggucc

SEQ ID NO: 285192 - RNA, 18 nt, Human
uacagcacagggcacagc

SEQ ID NO: 285193 - RNA, 19 nt, Human
ucauuuacggaagagagua

SEQ ID NO: 285194 - RNA, 20 nt, Human
uccagguccccauucaaccc

SEQ ID NO: 285195 - RNA, 25 nt, Human
uccagguccccauucaacccaggaa

SEQ ID NO: 285196 - RNA, 19 nt, Human
ucccuuauuguccccgccc

SEQ ID NO: 285197 - RNA, 21 nt, Human
ucccuuauuguccccgcccau

SEQ ID NO: 285198 - RNA, 18 nt, Human
uccgcggagcucagccag

SEQ ID NO: 285199 - RNA, 19 nt, Human
uccgcggagcucagccagc

SEQ ID NO: 285200 - RNA, 19 nt, Human
ucuccgccacucagguugg

SEQ ID NO: 285201 - RNA, 24 nt, Human
ugacugugucauagcccuauggca

SEQ ID NO: 285202 - RNA, 21 nt, Human
ugaggcaacaucagaaaacca

SEQ ID NO: 285203 - RNA, 21 nt, Human
ugcaggaaaggacaguccagc

SEQ ID NO: 285204 - RNA, 18 nt, Human
uggaaagaagcuacagca

SEQ ID NO: 285205 - RNA, 19 nt, Human
uggaaagaagcuacagcac

SEQ ID NO: 285206 - RNA, 25 nt, Human
uggcuucacgucucacuacuaccuu

SEQ ID NO: 285207 - RNA, 21 nt, Human
uggggugccgcgcucgccagc

SEQ ID NO: 285208 - RNA, 25 nt, Human
uguaagacagaaaaguucuccagga

SEQ ID NO: 285209 - RNA, 21 nt, Human
uguagagcaagagaacaaagc

SEQ ID NO: 285210 - RNA, 19 nt, Human
uugguccauuuuacagagc

SEQ ID NO: 285211 - RNA, 21 nt, Human
uuuuuuuuuuagcagcagcaa

SEQ ID NO: 285212 - RNA, 24 nt, Human
aaacacggaaaggaggaagucugg

SEQ ID NO: 285213 - RNA, 24 nt, Human
aagagaaaacagguccacagaggu

SEQ ID NO: 285214 - RNA, 23 nt, Human
aagucaugagagggaaggaccgg

SEQ ID NO: 285215 - RNA, 20 nt, Human
aagucggucccgcguggccc

SEQ ID NO: 285216 - RNA, 18 nt, Human
acaugaugaggcauagga

SEQ ID NO: 285217 - RNA, 21 nt, Human
acccccggaucagggcuccug

SEQ ID NO: 285218 - RNA, 21 nt, Human
agaccccugaaucaagacccu

SEQ ID NO: 285219 - RNA, 19 nt, Human
agagaaaacagguccacag

SEQ ID NO: 285220 - RNA, 24 nt, Human
agcgaggacccaagacgggcuucc

SEQ ID NO: 285221 - RNA, 19 nt, Human
aggaccggcaggccucggg

SEQ ID NO: 285222 - RNA, 21 nt, Human
aggcauaggaggccagcucag

SEQ ID NO: 285223 - RNA, 19 nt, Human
aggcauaggaggccagcuu

SEQ ID NO: 285224 - RNA, 20 nt, Human
aggcugugaccuccccuuca

SEQ ID NO: 285225 - RNA, 21 nt, Human
agggcuccugggacacccugc

SEQ ID NO: 285226 - RNA, 21 nt, Human
caccagggggagcagccagca

SEQ ID NO: 285227 - RNA, 20 nt, Human
caccggcaaggggugcucuc

SEQ ID NO: 285228 - RNA, 21 nt, Human
cagccagcagcgaggacccaa

SEQ ID NO: 285229 - RNA, 18 nt, Human
cagccugacucugucucc

SEQ ID NO: 285230 - RNA, 23 nt, Human
cagcgccauuugcaccaccuguc

SEQ ID NO: 285231 - RNA, 22 nt, Human
cagcugccuaaagugaggucac

SEQ ID NO: 285232 - RNA, 18 nt, Human
ccagcagcgaggacccaa

SEQ ID NO: 285233 - RNA, 18 nt, Human
cccccggaucagggcucc

SEQ ID NO: 285234 - RNA, 19 nt, Human
cccgcguggcccgcccggc

SEQ ID NO: 285235 - RNA, 22 nt, Human
cccggaucagggcuccugggac

SEQ ID NO: 285236 - RNA, 24 nt, Human
cccuggacccccggaucagggcuc

SEQ ID NO: 285237 - RNA, 23 nt, Human
ccggccaugagucagccuguguc

SEQ ID NO: 285238 - RNA, 21 nt, Human
ccuuguacagccucuaacucc

SEQ ID NO: 285239 - RNA, 20 nt, Human
cucccagcgccauuugcacc

SEQ ID NO: 285240 - RNA, 23 nt, Human
cuccguguacaccucccagcgcc

SEQ ID NO: 285241 - RNA, 18 nt, Human
cucgcaguuucugagacc

SEQ ID NO: 285242 - RNA, 21 nt, Human
cuucccggcgcugggaggugg

SEQ ID NO: 285243 - RNA, 18 nt, Human
gaccuccguguacaccuc

SEQ ID NO: 285244 - RNA, 19 nt, Human
gagaaaacagguccacaga

SEQ ID NO: 285245 - RNA, 21 nt, Human
gccagcucaggcugugaccuc

SEQ ID NO: 285246 - RNA, 22 nt, Human
gcgaugguuccucucauccaca

SEQ ID NO: 285247 - RNA, 18 nt, Human
ggccugggaccugagcuc

SEQ ID NO: 285248 - RNA, 21 nt, Human
gggcugaggugggagcgcaac

SEQ ID NO: 285249 - RNA, 21 nt, Human
ggggcuggccugggaccugag

SEQ ID NO: 285250 - RNA, 20 nt, Human
gggggcagucagcccggcca

SEQ ID NO: 285251 - RNA, 20 nt, Human
gguccacagagguaaaguga

SEQ ID NO: 285252 - RNA, 18 nt, Human
uacagcugccuaaaguga

SEQ ID NO: 285253 - RNA, 28 nt, Human
uagcuucacaaagagaaaacagguccac

SEQ ID NO: 285254 - RNA, 18 nt, Human
ucaugagagggaaggacc

SEQ ID NO: 285255 - RNA, 20 nt, Human
uccacagagcaccugccgca

SEQ ID NO: 285256 - RNA, 21 nt, Human
uccaccuuacgucagggaauc

SEQ ID NO: 285257 - RNA, 20 nt, Human
ucuuaaagugcacuucucaa

SEQ ID NO: 285258 - RNA, 23 nt, Human
ugacucugucucccagccuggag

SEQ ID NO: 285259 - RNA, 22 nt, Human
ugcccgugcuccggcccgcgcc

SEQ ID NO: 285260 - RNA, 24 nt, Human
ugccuaaagugaggucacccagac

SEQ ID NO: 285261 - RNA, 22 nt, Human
uggacccccggaucaggacccu

SEQ ID NO: 285262 - RNA, 23 nt, Human
uggacccccggaucagggcuccu

SEQ ID NO: 285263 - RNA, 20 nt, Human
ugggggccuuguacagccuc

SEQ ID NO: 285264 - RNA, 24 nt, Human
ugggucugcuuuuacagagaccuc

SEQ ID NO: 285265 - RNA, 19 nt, Human
ugguuugggacaugaugag

SEQ ID NO: 285266 - RNA, 18 nt, Human
uucccuggacccccggau

SEQ ID NO: 285267 - RNA, 24 nt, Human
uuuacagagaccuccguguacacc

SEQ ID NO: 285268 - RNA, 25 nt, Human
aaaaaaaaaaaacaaaacucuaagg

SEQ ID NO: 285269 - RNA, 27 nt, Human
aaaaaaaaaaacaaaacucuaagguaa

SEQ ID NO: 285270 - RNA, 22 nt, Human
aaaacaaaacucuaagguaagc

SEQ ID NO: 285271 - RNA, 21 nt, Human
aaaagaaaaagaaaagcuaag

SEQ ID NO: 285272 - RNA, 24 nt, Human
aaaagaaggagaaaccccagccca

SEQ ID NO: 285273 - RNA, 23 nt, Human
aaagaccaaacauuucacaaaua

SEQ ID NO: 285274 - RNA, 21 nt, Human
aacaaaacaagaacacaguuu

SEQ ID NO: 285275 - RNA, 18 nt, Human
aacagagauacgcaugug

SEQ ID NO: 285276 - RNA, 20 nt, Human
aacucgguaggguuacuagc

SEQ ID NO: 285277 - RNA, 23 nt, Human
aagggggugccugagagcagcuu

SEQ ID NO: 285278 - RNA, 18 nt, Human
acaaaaaaagaaaaagaa

SEQ ID NO: 285279 - RNA, 21 nt, Human
acaaaacaagaacacaguuua

SEQ ID NO: 285280 - RNA, 21 nt, Human
acagagugaugcugccacccc

SEQ ID NO: 285281 - RNA, 22 nt, Human
acagccgccgccgccgccgccg

SEQ ID NO: 285282 - RNA, 20 nt, Human
accucacugauuauucacau

SEQ ID NO: 285283 - RNA, 28 nt, Human
acggcggcagcggcucgcgguccucccu

SEQ ID NO: 285284 - RNA, 19 nt, Human
agaaagaccaaacauuuca

SEQ ID NO: 285285 - RNA, 23 nt, Human
agaaagaccaaacauuucacaaa

SEQ ID NO: 285286 - RNA, 25 nt, Human
agaaagaccaaacauuucacaaaua

SEQ ID NO: 285287 - RNA, 23 nt, Human
agaaggcaggccucucuggccca

SEQ ID NO: 285288 - RNA, 23 nt, Human
agagcaaugaagaagggggugcc

SEQ ID NO: 285289 - RNA, 21 nt, Human
agccccucugucccgcccucc

SEQ ID NO: 285290 - RNA, 19 nt, Human
aggaaaaaagaaaaaucaa

SEQ ID NO: 285291 - RNA, 21 nt, Human
aggaagacaggggacauauga

SEQ ID NO: 285292 - RNA, 25 nt, Human
aggaaucuccacuuauugguacauc

SEQ ID NO: 285293 - RNA, 19 nt, Human
aggcaggaugaggaagccc

SEQ ID NO: 285294 - RNA, 22 nt, Human
aggcaggaugaggaagcccgag

SEQ ID NO: 285295 - RNA, 18 nt, Human
aggcaggccucucuggcc

SEQ ID NO: 285296 - RNA, 24 nt, Human
auccaucuccucucuuccucccca

SEQ ID NO: 285297 - RNA, 29 nt, Human
aucucaccuacucuccuccuaacucccaa

SEQ ID NO: 285298 - RNA, 19 nt, Human
aucuccacaaagaaugcua

SEQ ID NO: 285299 - RNA, 23 nt, Human
augaaguaaguuuacuaacggaa

SEQ ID NO: 285300 - RNA, 23 nt, Human
caaauccuuuagucguuuagaaa

SEQ ID NO: 285301 - RNA, 21 nt, Human
caacagagauacgcaugugug

SEQ ID NO: 285302 - RNA, 20 nt, Human
caacagugcuggaaagggcu

SEQ ID NO: 285303 - RNA, 18 nt, Human
caacugaaauccaucucc

SEQ ID NO: 285304 - RNA, 21 nt, Human
caagaacacaguuuaggcugc

SEQ ID NO: 285305 - RNA, 23 nt, Human
caauucuacuucagugguaaaga

SEQ ID NO: 285306 - RNA, 19 nt, Human
cacaaagaaugcuagaaca

SEQ ID NO: 285307 - RNA, 19 nt, Human
caccagaccaucuccacaa

SEQ ID NO: 285308 - RNA, 25 nt, Human
caccccagccccacgcacgggccaa

SEQ ID NO: 285309 - RNA, 24 nt, Human
cacugcacaagccagcaaagggag

SEQ ID NO: 285310 - RNA, 19 nt, Human
cacuucucagauggaggaa

SEQ ID NO: 285311 - RNA, 19 nt, Human
cagagugaugcugccaccc

SEQ ID NO: 285312 - RNA, 23 nt, Human
cagcacacagagacccccuccaa

SEQ ID NO: 285313 - RNA, 19 nt, Human
cagcagcagcgacagaagc

SEQ ID NO: 285314 - RNA, 20 nt, Human
cagcagcagcgacagaagcu

SEQ ID NO: 285315 - RNA, 20 nt, Human
cagcggggguucagagcucc

SEQ ID NO: 285316 - RNA, 19 nt, Human
cauacccauuuccucacga

SEQ ID NO: 285317 - RNA, 21 nt, Human
caucucaccuacucuccuccu

SEQ ID NO: 285318 - RNA, 25 nt, Human
caucucaccuacucuccuccuaacu

SEQ ID NO: 285319 - RNA, 18 nt, Human
ccaaaaaaaggaggaaaa

SEQ ID NO: 285320 - RNA, 23 nt, Human
ccaaacauuucacaaauagcauu

SEQ ID NO: 285321 - RNA, 23 nt, Human
ccagaccaucuccacaaagaaug

SEQ ID NO: 285322 - RNA, 21 nt, Human
cccacagcccaucuuugugua

SEQ ID NO: 285323 - RNA, 20 nt, Human
ccccaacagccgccgccgcc

SEQ ID NO: 285324 - RNA, 21 nt, Human
ccccagcccaauucuauuugc

SEQ ID NO: 285325 - RNA, 19 nt, Human
cccgcccuccaccccagcc

SEQ ID NO: 285326 - RNA, 20 nt, Human
cccgcccuccaccccagccc

SEQ ID NO: 285327 - RNA, 27 nt, Human
cccuccaccccagccccacgcacgggc

SEQ ID NO: 285328 - RNA, 21 nt, Human
cccucugucccgcccuccacc

SEQ ID NO: 285329 - RNA, 19 nt, Human
ccgcagcagcagcgacaga

SEQ ID NO: 285330 - RNA, 18 nt, Human
ccgccgccgccgccgccg

SEQ ID NO: 285331 - RNA, 18 nt, Human
ccgccgccgccgccgcgc

SEQ ID NO: 285332 - RNA, 20 nt, Human
ccgccgcgcccccaccaauc

SEQ ID NO: 285333 - RNA, 21 nt, Human
ccgcgcgucuccccaccccca

SEQ ID NO: 285334 - RNA, 18 nt, Human
ccggcggaccucgccucc

SEQ ID NO: 285335 - RNA, 18 nt, Human
ccguccccccuccacaaa

SEQ ID NO: 285336 - RNA, 23 nt, Human
ccuagcagggcaaacaaugaacu

SEQ ID NO: 285337 - RNA, 21 nt, Human
ccuccuggcucagcaggcucc

SEQ ID NO: 285338 - RNA, 22 nt, Human
ccucgccgcgcgucuccccacc

SEQ ID NO: 285339 - RNA, 22 nt, Human
ccucggccuccgcagcagcagc

SEQ ID NO: 285340 - RNA, 23 nt, Human
ccucuccguccccccuccacaaa

SEQ ID NO: 285341 - RNA, 22 nt, Human
ccucucuuccuccccaacaucc

SEQ ID NO: 285342 - RNA, 20 nt, Human
ccugggcccagccccucugu

SEQ ID NO: 285343 - RNA, 21 nt, Human
ccuguccucggccuccgcagc

SEQ ID NO: 285344 - RNA, 18 nt, Human
ccuuguuccucuccgucc

SEQ ID NO: 285345 - RNA, 18 nt, Human
cgccgccgccgccgcgcc

SEQ ID NO: 285346 - RNA, 23 nt, Human
cggcacaugugguuucacuuucc

SEQ ID NO: 285347 - RNA, 19 nt, Human
cgucucggaacagccacgg

SEQ ID NO: 285348 - RNA, 19 nt, Human
cuagaauucacaucaggua

SEQ ID NO: 285349 - RNA, 19 nt, Human
cucagaaugaaacaaaagg

SEQ ID NO: 285350 - RNA, 19 nt, Human
cuccacaaaaaaagaaaaa

SEQ ID NO: 285351 - RNA, 26 nt, Human
cuccaccccagccccacgcacgggcc

SEQ ID NO: 285352 - RNA, 20 nt, Human
cuccaccccagccccacgcc

SEQ ID NO: 285353 - RNA, 22 nt, Human
cuccccacccccaacagccgcc

SEQ ID NO: 285354 - RNA, 27 nt, Human
cucccccuuuccagggacccacagccc

SEQ ID NO: 285355 - RNA, 18 nt, Human
cuccucucuuccucccca

SEQ ID NO: 285356 - RNA, 20 nt, Human
cuccucucuuccuccccaac

SEQ ID NO: 285357 - RNA, 19 nt, Human
cucgccgcgcgucucccca

SEQ ID NO: 285358 - RNA, 19 nt, Human
cugaacaaucaauucuacu

SEQ ID NO: 285359 - RNA, 18 nt, Human
cuggucaaucuucuuuuc

SEQ ID NO: 285360 - RNA, 26 nt, Human
cugucccgcccuccaccccagcccca

SEQ ID NO: 285361 - RNA, 22 nt, Human
cuuugccugggcccagccccuc

SEQ ID NO: 285362 - RNA, 19 nt, Human
gaaacaccaugaacaaaac

SEQ ID NO: 285363 - RNA, 23 nt, Human
gacagaagcuuugccugggccca

SEQ ID NO: 285364 - RNA, 19 nt, Human
gacuaaaacuaaagacuca

SEQ ID NO: 285365 - RNA, 19 nt, Human
gagcaggugaagaaagccc

SEQ ID NO: 285366 - RNA, 22 nt, Human
gauggguuugaaaaaaaaaaaa

SEQ ID NO: 285367 - RNA, 21 nt, Human
gcaaaacgcuuagaaacacca

SEQ ID NO: 285368 - RNA, 19 nt, Human
gcacacagagacccccucc

SEQ ID NO: 285369 - RNA, 21 nt, Human
gcagaaggcaggccucucugg

SEQ ID NO: 285370 - RNA, 22 nt, Human
gcagagcagcggggguucagag

SEQ ID NO: 285371 - RNA, 22 nt, Human
gcaguaaaauacaaaguccaaa

SEQ ID NO: 285372 - RNA, 20 nt, Human
gccaauagaagcaacagaga

SEQ ID NO: 285373 - RNA, 25 nt, Human
gccgccgcgcccccaccaaucgucu

SEQ ID NO: 285374 - RNA, 21 nt, Human
gccuccaucugaggcugugcu

SEQ ID NO: 285375 - RNA, 19 nt, Human
gcgcggcagagcagcgggg

SEQ ID NO: 285376 - RNA, 20 nt, Human
gcugggacguugaacuccgg

SEQ ID NO: 285377 - RNA, 20 nt, Human
gcuggucaaucuucuuuucu

SEQ ID NO: 285378 - RNA, 25 nt, Human
gcuuagaaacaccaugaacaaaaca

SEQ ID NO: 285379 - RNA, 24 nt, Human
ggaaaaaagaaaaaucaaccucac

SEQ ID NO: 285380 - RNA, 21 nt, Human
ggccaauagaagcaacagaga

SEQ ID NO: 285381 - RNA, 21 nt, Human
gguaaugaugggcuagagaaa

SEQ ID NO: 285382 - RNA, 23 nt, Human
guaaagggcaacucucccccuuu

SEQ ID NO: 285383 - RNA, 24 nt, Human
uaagcaaaaacccaacaaccccgg

SEQ ID NO: 285384 - RNA, 27 nt, Human
uaagguaaaacaaccuuguucaucaga

SEQ ID NO: 285385 - RNA, 18 nt, Human
uaagguaagcgguaagcc

SEQ ID NO: 285386 - RNA, 21 nt, Human
uaauuccuagcagggcaaaca

SEQ ID NO: 285387 - RNA, 20 nt, Human
uacaaaguccaaaaaaagga

SEQ ID NO: 285388 - RNA, 21 nt, Human
uacagucagauguuuugcacc

SEQ ID NO: 285389 - RNA, 19 nt, Human
uaccaagacugcugggacg

SEQ ID NO: 285390 - RNA, 24 nt, Human
uagaaacaccaugaacaaaacaag

SEQ ID NO: 285391 - RNA, 23 nt, Human
uagcauuggcacauauuacuuug

SEQ ID NO: 285392 - RNA, 19 nt, Human
uaggccaauagaagcaaca

SEQ ID NO: 285393 - RNA, 20 nt, Human
uaggccaauagaagcaacag

SEQ ID NO: 285394 - RNA, 23 nt, Human
uaggccaauagaagcaacagaga

SEQ ID NO: 285395 - RNA, 24 nt, Human
uaucacugcacaagccagcaaagg

SEQ ID NO: 285396 - RNA, 20 nt, Human
ucaccgcgcggcagagcagc

SEQ ID NO: 285397 - RNA, 18 nt, Human
ucagauggaggaagacag

SEQ ID NO: 285398 - RNA, 23 nt, Human
ucagguacaaagaaaaaacauua

SEQ ID NO: 285399 - RNA, 24 nt, Human
ucagugguaaagagauaucccaag

SEQ ID NO: 285400 - RNA, 18 nt, Human
uccaagagaaaauaaggu

SEQ ID NO: 285401 - RNA, 21 nt, Human
uccacaaaaaaagaaaaagaa

SEQ ID NO: 285402 - RNA, 22 nt, Human
uccauauccuggcagguguggg

SEQ ID NO: 285403 - RNA, 21 nt, Human
uccccaacauccaucucuuuc

SEQ ID NO: 285404 - RNA, 26 nt, Human
uccucuccguccccccuccacaaaaa

SEQ ID NO: 285405 - RNA, 21 nt, Human
uccugggaccuagucaaagag

SEQ ID NO: 285406 - RNA, 19 nt, Human
uccuuguuccucuccgucc

SEQ ID NO: 285407 - RNA, 22 nt, Human
ucgccgcgcgucuccccacccc

SEQ ID NO: 285408 - RNA, 21 nt, Human
ucuauaccucauuccuaccuc

SEQ ID NO: 285409 - RNA, 22 nt, Human
ucuccacaaagaaugcuagaac

SEQ ID NO: 285410 - RNA, 20 nt, Human
ucuccuccagauuauuaaau

SEQ ID NO: 285411 - RNA, 18 nt, Human
ucuggggaugcuggccac

SEQ ID NO: 285412 - RNA, 23 nt, Human
ucuguagaaaaucaaaugaacac

SEQ ID NO: 285413 - RNA, 22 nt, Human
ugaaaaaaaaaaaacaaaacuc

SEQ ID NO: 285414 - RNA, 22 nt, Human
ugaaaagaaggagaaaccccag

SEQ ID NO: 285415 - RNA, 25 nt, Human
ugaaauccaucuccucucuuccucc

SEQ ID NO: 285416 - RNA, 18 nt, Human
ugaacaaaacaagaacac

SEQ ID NO: 285417 - RNA, 25 nt, Human
ugcagaagaaguaacacuguccugg

SEQ ID NO: 285418 - RNA, 20 nt, Human
ugcuggaaagggcucgagug

SEQ ID NO: 285419 - RNA, 21 nt, Human
ugcugggacguugaacuccgg

SEQ ID NO: 285420 - RNA, 20 nt, Human
uggcaaaauucacauuuaca

SEQ ID NO: 285421 - RNA, 24 nt, Human
uggcaggugugggggaacaggcag

SEQ ID NO: 285422 - RNA, 22 nt, Human
uggccacuagugauccaacuuu

SEQ ID NO: 285423 - RNA, 19 nt, Human
ugggccaucauuggaguaa

SEQ ID NO: 285424 - RNA, 20 nt, Human
uggguuugaaaaaaaaaaaa

SEQ ID NO: 285425 - RNA, 18 nt, Human
uguaaaaacaauccaaag

SEQ ID NO: 285426 - RNA, 24 nt, Human
uguagaaaaucaaaugaacacugg

SEQ ID NO: 285427 - RNA, 18 nt, Human
ugucccgcccuccacccc

SEQ ID NO: 285428 - RNA, 21 nt, Human
ugucccgcccuccaccccagc

SEQ ID NO: 285429 - RNA, 23 nt, Human
ugugcuuuuuccuaacaaagguu

SEQ ID NO: 285430 - RNA, 23 nt, Human
uguuccucuccguccccccucca

SEQ ID NO: 285431 - RNA, 18 nt, Human
uuacgugcuguuccaccu

SEQ ID NO: 285432 - RNA, 22 nt, Human
uucaaaacuuaagcaaaaaccc

SEQ ID NO: 285433 - RNA, 20 nt, Human
uucacaaauagcauuggcac

SEQ ID NO: 285434 - RNA, 19 nt, Human
uugauuaaaaaugaagaaa

SEQ ID NO: 285435 - RNA, 23 nt, Human
uuucucccuccuggcucagcagg

SEQ ID NO: 285436 - RNA, 28 nt, Human
uuuuacaucuuccauaaccuagcauaca

SEQ ID NO: 285437 - RNA, 22 nt, Human
aaaaacaaauagaagugcccug

SEQ ID NO: 285438 - RNA, 19 nt, Human
aagcaaaguuaagcacgua

SEQ ID NO: 285439 - RNA, 19 nt, Human
aauuggcacugcaaaaaca

SEQ ID NO: 285440 - RNA, 22 nt, Human
acaauggcaaagcauaucguac

SEQ ID NO: 285441 - RNA, 18 nt, Human
agcgggggccaccuaaaa

SEQ ID NO: 285442 - RNA, 18 nt, Human
aggugaguagaaguaacu

SEQ ID NO: 285443 - RNA, 25 nt, Human
caaaaacacagauguagaugugaca

SEQ ID NO: 285444 - RNA, 25 nt, Human
cacagcaaguuagccagcgggggcc

SEQ ID NO: 285445 - RNA, 19 nt, Human
cagaaaaugcaaauuggca

SEQ ID NO: 285446 - RNA, 19 nt, Human
cccauaccacguguuaggg

SEQ ID NO: 285447 - RNA, 25 nt, Human
ccccugguuagagauacugcagggc

SEQ ID NO: 285448 - RNA, 20 nt, Human
cccuggaagcuauuuugggg

SEQ ID NO: 285449 - RNA, 20 nt, Human
cuggcugcugugaaggugag

SEQ ID NO: 285450 - RNA, 25 nt, Human
uauaugcaaggcacugcgguacugg

SEQ ID NO: 285451 - RNA, 26 nt, Human
uauuuauacugucacacgcauguaca

SEQ ID NO: 285452 - RNA, 19 nt, Human
uccacaaaaacaaauagaa

SEQ ID NO: 285453 - RNA, 24 nt, Human
ucuaugcccuugaaaacuccacag

SEQ ID NO: 285454 - RNA, 19 nt, Human
ugacaaguacucauugagg

SEQ ID NO: 285455 - RNA, 21 nt, Human
ugccuggccuccucauuuuuc

SEQ ID NO: 285456 - RNA, 20 nt, Human
uguacaaaaucaauugacaa

SEQ ID NO: 285457 - RNA, 23 nt, Human
uuuagauucucuucucuuuuccc

SEQ ID NO: 285458 - RNA, 18 nt, Human
uuuccccauaaaccaacu

SEQ ID NO: 285459 - RNA, 21 nt, Human
uuuuuuuggaagaaauccuga

SEQ ID NO: 285460 - RNA, 24 nt, Human
aaggccccaggguuucccugcccu

SEQ ID NO: 285461 - RNA, 21 nt, Human
agaguucuguggcuuaacugg

SEQ ID NO: 285462 - RNA, 19 nt, Human
agauggucacacuguagaa

SEQ ID NO: 285463 - RNA, 20 nt, Human
caacacaggacgaugcgcuc

SEQ ID NO: 285464 - RNA, 22 nt, Human
caacacaggacgaugcgcucag

SEQ ID NO: 285465 - RNA, 20 nt, Human
cacauguuggccagcugcuu

SEQ ID NO: 285466 - RNA, 18 nt, Human
caggacgaugcgcucagg

SEQ ID NO: 285467 - RNA, 23 nt, Human
caggccacucaccacaggagcuu

SEQ ID NO: 285468 - RNA, 20 nt, Human
ccaggcaauugacacacuac

SEQ ID NO: 285469 - RNA, 22 nt, Human
ccaucuggagcauccugucucu

SEQ ID NO: 285470 - RNA, 24 nt, Human
cuguggcuuaacuggucucagcuu

SEQ ID NO: 285471 - RNA, 19 nt, Human
gggaagggugucccaccau

SEQ ID NO: 285472 - RNA, 22 nt, Human
uaagugguugcugguuucacuu

SEQ ID NO: 285473 - RNA, 20 nt, Human
ucaggccacucaccacagga

SEQ ID NO: 285474 - RNA, 21 nt, Human
ucaguggagaaccaggcaauu

SEQ ID NO: 285475 - RNA, 21 nt, Human
ucccauaagauggucacacug

SEQ ID NO: 285476 - RNA, 20 nt, Human
ucccugcccuagaugagggu

SEQ ID NO: 285477 - RNA, 20 nt, Human
ucucugcugucuauggauau

SEQ ID NO: 285478 - RNA, 21 nt, Human
ucugcugucuauggauauccu

SEQ ID NO: 285479 - RNA, 21 nt, Human
ucuuuuggugcaugcugcugc

SEQ ID NO: 285480 - RNA, 22 nt, Human
ugcauuuucaccaucaaggccc

SEQ ID NO: 285481 - RNA, 22 nt, Human
ugcugcugcuacuguuugcugu

SEQ ID NO: 285482 - RNA, 18 nt, Human
ugcuuggggcaacacagg

SEQ ID NO: 285483 - RNA, 22 nt, Human
uggcuuaacuggucucagcuug

SEQ ID NO: 285484 - RNA, 20 nt, Human
uguuguguucuuuucacuuu

SEQ ID NO: 285485 - RNA, 22 nt, Human
uguuguguucuuuucacuuucc

SEQ ID NO: 285486 - RNA, 22 nt, Human
uguuguguucuuuucacuuucc

SEQ ID NO: 285487 - RNA, 24 nt, Human
uugcuauuuuuucucugcugucua

SEQ ID NO: 285488 - RNA, 20 nt, Human
aaacagccaacagaaaccca

SEQ ID NO: 285489 - RNA, 23 nt, Human
aaacagccaacagaaacccagac

SEQ ID NO: 285490 - RNA, 18 nt, Human
aaagaguccaagccacug

SEQ ID NO: 285491 - RNA, 26 nt, Human
aacccacaggcaggacaggggaaagu

SEQ ID NO: 285492 - RNA, 18 nt, Human
aagaaaagaaaaacagcc

SEQ ID NO: 285493 - RNA, 19 nt, Human
aagcaggaggcaggcucgg

SEQ ID NO: 285494 - RNA, 26 nt, Human
aagcaggaggcaggcucggcccaagg

SEQ ID NO: 285495 - RNA, 20 nt, Human
aagccauggaaacccacagg

SEQ ID NO: 285496 - RNA, 20 nt, Human
aaggagcuuuuugaccaugu

SEQ ID NO: 285497 - RNA, 21 nt, Human
aagugagaggagccaagugga

SEQ ID NO: 285498 - RNA, 20 nt, Human
acagggugugcccgggaugg

SEQ ID NO: 285499 - RNA, 21 nt, Human
accccauccaaggcuccccag

SEQ ID NO: 285500 - RNA, 20 nt, Human
acuccaagaaaagaaaaaca

SEQ ID NO: 285501 - RNA, 26 nt, Human
agaaaaacagccaacagaaacccaga

SEQ ID NO: 285502 - RNA, 24 nt, Human
agaaaagaaaaacagccaacagaa

SEQ ID NO: 285503 - RNA, 23 nt, Human
agcaggaggcaggcucggcccaa

SEQ ID NO: 285504 - RNA, 24 nt, Human
agccacugaaaggaaaugcggcag

SEQ ID NO: 285505 - RNA, 21 nt, Human
agccugggccugaagaagggu

SEQ ID NO: 285506 - RNA, 19 nt, Human
aggaaaugcggcagggcug

SEQ ID NO: 285507 - RNA, 23 nt, Human
aggaggcaggcucggcccaaggc

SEQ ID NO: 285508 - RNA, 23 nt, Human
aggcaugaaaaguggacgcuggg

SEQ ID NO: 285509 - RNA, 23 nt, Human
agggggcaggggugggaagacag

SEQ ID NO: 285510 - RNA, 21 nt, Human
caacagaaacccagacacagg

SEQ ID NO: 285511 - RNA, 23 nt, Human
caacagcgccagcacgaucuuga

SEQ ID NO: 285512 - RNA, 23 nt, Human
caagaaagacccauuccaggucc

SEQ ID NO: 285513 - RNA, 21 nt, Human
caccacuccaagaaaagaaaa

SEQ ID NO: 285514 - RNA, 20 nt, Human
caccccauccaaggcucccc

SEQ ID NO: 285515 - RNA, 20 nt, Human
cagacacaggcaggggcagc

SEQ ID NO: 285516 - RNA, 22 nt, Human
cagcucccaccugcagcugaaa

SEQ ID NO: 285517 - RNA, 19 nt, Human
cagcuccucagcugggccu

SEQ ID NO: 285518 - RNA, 22 nt, Human
caggagucuuccucuggagccu

SEQ ID NO: 285519 - RNA, 21 nt, Human
caggcaggacaggcgaccccc

SEQ ID NO: 285520 - RNA, 20 nt, Human
cauccaaggcuccccagccc

SEQ ID NO: 285521 - RNA, 24 nt, Human
ccaacagaaacccagacacaggcc

SEQ ID NO: 285522 - RNA, 23 nt, Human
ccaaggcuccccagcccacaggc

SEQ ID NO: 285523 - RNA, 19 nt, Human
ccagacacaggcaggggca

SEQ ID NO: 285524 - RNA, 21 nt, Human
cccaacaugagcagccccaac

SEQ ID NO: 285525 - RNA, 23 nt, Human
cccaacaugagcagccccaacua

SEQ ID NO: 285526 - RNA, 21 nt, Human
cccaaggcaugaaaaguggac

SEQ ID NO: 285527 - RNA, 23 nt, Human
ccccaccccauccaaggcucccc

SEQ ID NO: 285528 - RNA, 22 nt, Human
cccccgcaagcaggaggcaggc

SEQ ID NO: 285529 - RNA, 19 nt, Human
cccccugggaagugagagg

SEQ ID NO: 285530 - RNA, 18 nt, Human
cccgcaagcaggaggcag

SEQ ID NO: 285531 - RNA, 22 nt, Human
cccucugcugcuucucacagcu

SEQ ID NO: 285532 - RNA, 18 nt, Human
ccgcagccuggggcagug

SEQ ID NO: 285533 - RNA, 21 nt, Human
ccucagcugggccuggaggcg

SEQ ID NO: 285534 - RNA, 24 nt, Human
ccugcagcugaaagggccgggguc

SEQ ID NO: 285535 - RNA, 22 nt, Human
cuccaagaaaagaaaaacagcc

SEQ ID NO: 285536 - RNA, 24 nt, Human
cuccaagaaaagaaaaacagccaa

SEQ ID NO: 285537 - RNA, 27 nt, Human
gaaaagaaaaacagccaacagaaaccc

SEQ ID NO: 285538 - RNA, 20 nt, Human
gaaagggcuggaagggcaag

SEQ ID NO: 285539 - RNA, 19 nt, Human
gaaccuggagauguuggug

SEQ ID NO: 285540 - RNA, 19 nt, Human
gaagaagccaccucugggg

SEQ ID NO: 285541 - RNA, 19 nt, Human
gagcagccccaacagcgcc

SEQ ID NO: 285542 - RNA, 21 nt, Human
gagcagccccaacagcgccag

SEQ ID NO: 285543 - RNA, 23 nt, Human
gaggcaggcucggccccccaagg

SEQ ID NO: 285544 - RNA, 24 nt, Human
gaggcuguagaggaagagccccaa

SEQ ID NO: 285545 - RNA, 20 nt, Human
gaggguuucaggagucuucc

SEQ ID NO: 285546 - RNA, 20 nt, Human
gcaguggcagaaacauccgc

SEQ ID NO: 285547 - RNA, 30 nt, Human
gcgggacugggcaagccgcagccuggggcc

SEQ ID NO: 285548 - RNA, 25 nt, Human
ggaagagccccaacaugagcagccc

SEQ ID NO: 285549 - RNA, 21 nt, Human
ggagaugggaaagaguccaag

SEQ ID NO: 285550 - RNA, 18 nt, Human
ggcaggggugggaagaca

SEQ ID NO: 285551 - RNA, 20 nt, Human
ggcaggggugggaagacagg

SEQ ID NO: 285552 - RNA, 20 nt, Human
ggccugggcagaacucacgg

SEQ ID NO: 285553 - RNA, 18 nt, Human
ggcggccuucaugcccca

SEQ ID NO: 285554 - RNA, 22 nt, Human
gggaagacagggugugcccggg

SEQ ID NO: 285555 - RNA, 23 nt, Human
gggcaggggugggaagacagggu

SEQ ID NO: 285556 - RNA, 23 nt, Human
gggccagcucccaccugcagcug

SEQ ID NO: 285557 - RNA, 21 nt, Human
ggggcaagaaagacccauucc

SEQ ID NO: 285558 - RNA, 22 nt, Human
gguguucauggggguucuucag

SEQ ID NO: 285559 - RNA, 24 nt, Human
guuaauuucacuaaagcuucaauc

SEQ ID NO: 285560 - RNA, 20 nt, Human
guucauucuuuuuaaagccc

SEQ ID NO: 285561 - RNA, 25 nt, Human
ucaccacuccaagaaaagaaaaaca

SEQ ID NO: 285562 - RNA, 20 nt, Human
ucaucaauuucccagguucu

SEQ ID NO: 285563 - RNA, 21 nt, Human
uccaagaaaagaaaaacagcc

SEQ ID NO: 285564 - RNA, 30 nt, Human
uccaagaaaagaaaaacagccaacagaaaa

SEQ ID NO: 285565 - RNA, 22 nt, Human
uccccagcccacaggcaggggu

SEQ ID NO: 285566 - RNA, 21 nt, Human
uccccucugcugcuucucaca

SEQ ID NO: 285567 - RNA, 21 nt, Human
uccgcgcugggacuugugggc

SEQ ID NO: 285568 - RNA, 18 nt, Human
uccucaggcuccccaggg

SEQ ID NO: 285569 - RNA, 23 nt, Human
uccuugguuaauuucacuaaagc

SEQ ID NO: 285570 - RNA, 21 nt, Human
ucggcccaaggcaugaaaagu

SEQ ID NO: 285571 - RNA, 26 nt, Human
ugaaaggaaaugcggcagggcugggg

SEQ ID NO: 285572 - RNA, 18 nt, Human
ugaccauguagccaggga

SEQ ID NO: 285573 - RNA, 24 nt, Human
ugagaggagccaaguggagcccag

SEQ ID NO: 285574 - RNA, 25 nt, Human
ugagcagccccaacagcgccagcac

SEQ ID NO: 285575 - RNA, 19 nt, Human
ugcagcugaaagggcugga

SEQ ID NO: 285576 - RNA, 24 nt, Human
ugcugcuucucacagcuccucagc

SEQ ID NO: 285577 - RNA, 25 nt, Human
uggagauguugguguucaugggggu

SEQ ID NO: 285578 - RNA, 25 nt, Human
uggcagaaacauccgcgcugggacu

SEQ ID NO: 285579 - RNA, 21 nt, Human
ugggaaagaguccaagccacu

SEQ ID NO: 285580 - RNA, 23 nt, Human
ugggacuugugggcagggucugg

SEQ ID NO: 285581 - RNA, 20 nt, Human
ugggcugugagucuguggcu

SEQ ID NO: 285582 - RNA, 22 nt, Human
uggggagcggcuggcgggagcu

SEQ ID NO: 285583 - RNA, 22 nt, Human
ugguuaauuucacuaaagcuuc

SEQ ID NO: 285584 - RNA, 22 nt, Human
uguucauggggguucuucaguu

SEQ ID NO: 285585 - RNA, 23 nt, Human
uucuguucucagaaccuggagau

SEQ ID NO: 285586 - RNA, 19 nt, Human
uuucaggagucuuccucug

SEQ ID NO: 285587 - RNA, 24 nt, Human
uuuuuuuuuuuuuucagugcuuga

SEQ ID NO: 285588 - RNA, 18 nt, Human
aaaccugcauccuccuca

SEQ ID NO: 285589 - RNA, 25 nt, Human
aaauauuaaaaguaacaaaaauacu

SEQ ID NO: 285590 - RNA, 25 nt, Human
aacucuucuucccccaacagcuuua

SEQ ID NO: 285591 - RNA, 23 nt, Human
acaaagaaaaacucaugacuaca

SEQ ID NO: 285592 - RNA, 24 nt, Human
acaaauucuuaaaacgucagucca

SEQ ID NO: 285593 - RNA, 21 nt, Human
accacaaaaccugcauccucc

SEQ ID NO: 285594 - RNA, 19 nt, Human
accccuaagcccuugcucu

SEQ ID NO: 285595 - RNA, 20 nt, Human
agaaguaaauugaucauuua

SEQ ID NO: 285596 - RNA, 24 nt, Human
agacaaaugaguagaaaacaucau

SEQ ID NO: 285597 - RNA, 18 nt, Human
agagaaaauaaccuacag

SEQ ID NO: 285598 - RNA, 22 nt, Human
aggaagaggaaauucaaaguug

SEQ ID NO: 285599 - RNA, 23 nt, Human
auaaccuacagacuuuuuuuuuu

SEQ ID NO: 285600 - RNA, 21 nt, Human
caaaaucaaagcauauuucca

SEQ ID NO: 285601 - RNA, 23 nt, Human
caaagaaaaacucaugacuacau

SEQ ID NO: 285602 - RNA, 24 nt, Human
cacaaaaccugcauccuccucaga

SEQ ID NO: 285603 - RNA, 26 nt, Human
caccuccaaccccuaagcccuugcuc

SEQ ID NO: 285604 - RNA, 18 nt, Human
cagaccaggccagcagga

SEQ ID NO: 285605 - RNA, 20 nt, Human
ccaaccccuaagcccuugcu

SEQ ID NO: 285606 - RNA, 23 nt, Human
ccacaaaaccugcauccuccuca

SEQ ID NO: 285607 - RNA, 25 nt, Human
ccacaaaaccugcauccuccucaga

SEQ ID NO: 285608 - RNA, 18 nt, Human
ccauuaaaaauauuucca

SEQ ID NO: 285609 - RNA, 23 nt, Human
ccccaacagcuuuaccuccaaaa

SEQ ID NO: 285610 - RNA, 21 nt, Human
cccccaacagcuuuaccucca

SEQ ID NO: 285611 - RNA, 18 nt, Human
cccccuguaagaggagau

SEQ ID NO: 285612 - RNA, 19 nt, Human
cccuaagcccuugcucuuc

SEQ ID NO: 285613 - RNA, 20 nt, Human
cccuugcucuucuguaaggu

SEQ ID NO: 285614 - RNA, 19 nt, Human
cugccaccuccaaccccua

SEQ ID NO: 285615 - RNA, 19 nt, Human
cuguuauaugcaucccccu

SEQ ID NO: 285616 - RNA, 21 nt, Human
cuguuuuaacuugaacucuga

SEQ ID NO: 285617 - RNA, 18 nt, Human
cuuuuaucugccaccucc

SEQ ID NO: 285618 - RNA, 26 nt, Human
gacuuuuuuuuuucugggucuuuuga

SEQ ID NO: 285619 - RNA, 18 nt, Human
gcaaacaaagaaaaacuc

SEQ ID NO: 285620 - RNA, 20 nt, Human
gcucuuuucuuuauuuuugg

SEQ ID NO: 285621 - RNA, 22 nt, Human
ggaccacaaaaccugcauccuc

SEQ ID NO: 285622 - RNA, 24 nt, Human
gucaguccaaaauuacagacaugc

SEQ ID NO: 285623 - RNA, 26 nt, Human
uacacauacaugaucuguuauaugca

SEQ ID NO: 285624 - RNA, 26 nt, Human
uauauuaauaacacaaaaucaaagca

SEQ ID NO: 285625 - RNA, 21 nt, Human
uaucacacuugacuagaggaa

SEQ ID NO: 285626 - RNA, 21 nt, Human
uaugcaaacaaagaaaaacuc

SEQ ID NO: 285627 - RNA, 25 nt, Human
uaugcaaacaaagaaaaacucauga

SEQ ID NO: 285628 - RNA, 20 nt, Human
uauggcaaaucaaagagcug

SEQ ID NO: 285629 - RNA, 18 nt, Human
ucaaaguugaaauagaag

SEQ ID NO: 285630 - RNA, 26 nt, Human
uccaaaaacucuucuucccccaacag

SEQ ID NO: 285631 - RNA, 24 nt, Human
uccaaacaucuauggguccaaaaa

SEQ ID NO: 285632 - RNA, 18 nt, Human
ugacauuaaguagaggca

SEQ ID NO: 285633 - RNA, 20 nt, Human
ugaucuguuauaugcauccc

SEQ ID NO: 285634 - RNA, 23 nt, Human
ugaucuguuauaugcaucccccu

SEQ ID NO: 285635 - RNA, 28 nt, Human
ugcaaacaaagaaaaacucaugacuaca

SEQ ID NO: 285636 - RNA, 21 nt, Human
ugcacaggaagaggaaauuca

SEQ ID NO: 285637 - RNA, 20 nt, Human
uggcaaaucaaagagcuggg

SEQ ID NO: 285638 - RNA, 20 nt, Human
ugggcagaccaggccagcag

SEQ ID NO: 285639 - RNA, 23 nt, Human
uggucucaauuuacccauuugag

SEQ ID NO: 285640 - RNA, 21 nt, Human
uuaucugccaccuccaacccc

SEQ ID NO: 285641 - RNA, 18 nt, Human
uucuuucuauuugcaguu

SEQ ID NO: 285642 - RNA, 25 nt, Human
uugguguuuucuuucuauuugcagu

SEQ ID NO: 285643 - RNA, 21 nt, Human
uuuccccgcucuagcucgugg

SEQ ID NO: 285644 - RNA, 23 nt, Human
uuucuggucucaauuuacccauu

SEQ ID NO: 285645 - RNA, 21 nt, Human
uuugaguugaaaauccucuuu

SEQ ID NO: 285646 - RNA, 24 nt, Human
uuugcucuuuucuuuauuuuuggu

SEQ ID NO: 285647 - RNA, 20 nt, Human
uuuggccacuuuugcucuuu

SEQ ID NO: 285648 - RNA, 23 nt, Human
uuuggccacuuuugcucuuuucu

SEQ ID NO: 285649 - RNA, 25 nt, Human
uuuugcucuuuucuuuauuuuuggu

SEQ ID NO: 285650 - RNA, 19 nt, Human
uuuuuggccacuuuugcuc

SEQ ID NO: 285651 - RNA, 18 nt, Human
uuuuuuuuuucugggucu

SEQ ID NO: 285652 - RNA, 23 nt, Human
aaacaaccaagggcacagagcag

SEQ ID NO: 285653 - RNA, 18 nt, Human
aaacagaaaaggaagcaa

SEQ ID NO: 285654 - RNA, 22 nt, Human
aaacagaaaaggaagcaaacaa

SEQ ID NO: 285655 - RNA, 28 nt, Human
aaacagaaaaggaagcaaacaaacccca

SEQ ID NO: 285656 - RNA, 26 nt, Human
aaacagaaaaggaagcaaagggaccc

SEQ ID NO: 285657 - RNA, 22 nt, Human
aacaagaaugcuuuaucuacac

SEQ ID NO: 285658 - RNA, 18 nt, Human
aagaaugcuuuaucuaca

SEQ ID NO: 285659 - RNA, 25 nt, Human
aagacagaaacagaaaaggaagcaa

SEQ ID NO: 285660 - RNA, 21 nt, Human
aagcaaacaaaccccaguccu

SEQ ID NO: 285661 - RNA, 21 nt, Human
acacucucacacaguugugcu

SEQ ID NO: 285662 - RNA, 20 nt, Human
acagagcagcgagaagacag

SEQ ID NO: 285663 - RNA, 21 nt, Human
acagagcagcgagaagacaga

SEQ ID NO: 285664 - RNA, 24 nt, Human
acagagcagcgagaagacagaaac

SEQ ID NO: 285665 - RNA, 28 nt, Human
acagagcagcgagaagacagaaacagaa

SEQ ID NO: 285666 - RNA, 22 nt, Human
accaccacaaaacaaccaaggg

SEQ ID NO: 285667 - RNA, 20 nt, Human
acccaauccacugucacguu

SEQ ID NO: 285668 - RNA, 19 nt, Human
agaaacagaaaaggaagcc

SEQ ID NO: 285669 - RNA, 18 nt, Human
agaaagacaggagcuugg

SEQ ID NO: 285670 - RNA, 27 nt, Human
agacagaaacagaaaaggaagcaaaag

SEQ ID NO: 285671 - RNA, 19 nt, Human
agacggggcgaaggccggg

SEQ ID NO: 285672 - RNA, 24 nt, Human
agaggggaccggaggggaggcggc

SEQ ID NO: 285673 - RNA, 26 nt, Human
agcgagaagacagaaacagaaaagga

SEQ ID NO: 285674 - RNA, 22 nt, Human
agcugauuguguuucucuguac

SEQ ID NO: 285675 - RNA, 21 nt, Human
aggccggggcgggacggggcc

SEQ ID NO: 285676 - RNA, 18 nt, Human
aggcggaggggaggccuc

SEQ ID NO: 285677 - RNA, 19 nt, Human
aggggaccggaggggaggc

SEQ ID NO: 285678 - RNA, 23 nt, Human
auaaaauaaaaauaaaagcguua

SEQ ID NO: 285679 - RNA, 18 nt, Human
auaucacaaauugaccag

SEQ ID NO: 285680 - RNA, 25 nt, Human
caaaccccaguccugaaggauccag

SEQ ID NO: 285681 - RNA, 23 nt, Human
caaccaagggcacagagcagcga

SEQ ID NO: 285682 - RNA, 27 nt, Human
caagaaugcuuuaucuacugucguaga

SEQ ID NO: 285683 - RNA, 21 nt, Human
caagagagggcugcacggaug

SEQ ID NO: 285684 - RNA, 21 nt, Human
cacaaaacaaccaagggcaca

SEQ ID NO: 285685 - RNA, 23 nt, Human
caccgugucugugcgcgcgcgug

SEQ ID NO: 285686 - RNA, 24 nt, Human
cagaaagagcugauuguguuucuc

SEQ ID NO: 285687 - RNA, 21 nt, Human
cagagcagcgagaagacagaa

SEQ ID NO: 285688 - RNA, 20 nt, Human
cagauccugagucgacuccc

SEQ ID NO: 285689 - RNA, 20 nt, Human
cagcagggaggccagggugg

SEQ ID NO: 285690 - RNA, 22 nt, Human
cagccacccaauccacugucac

SEQ ID NO: 285691 - RNA, 23 nt, Human
ccagaaaagagauguggcuuuug

SEQ ID NO: 285692 - RNA, 23 nt, Human
cccaguccugaaggauccagaaa

SEQ ID NO: 285693 - RNA, 18 nt, Human
ccccggggcggugcuggg

SEQ ID NO: 285694 - RNA, 18 nt, Human
ccccggggcggugcuggg

SEQ ID NO: 285695 - RNA, 20 nt, Human
cccucagaugaggcgguugg

SEQ ID NO: 285696 - RNA, 26 nt, Human
ccgggguccgggugcgcgccggaagg

SEQ ID NO: 285697 - RNA, 19 nt, Human
ccuccuuuaagacaaaaau

SEQ ID NO: 285698 - RNA, 21 nt, Human
ccuuauaaagacuuaucaaaa

SEQ ID NO: 285699 - RNA, 21 nt, Human
cgacaggaccaccacaaaaca

SEQ ID NO: 285700 - RNA, 24 nt, Human
cgagaagacagaaacagaaaagga

SEQ ID NO: 285701 - RNA, 24 nt, Human
cgcgccggaagggccucggggcgg

SEQ ID NO: 285702 - RNA, 19 nt, Human
cgggaaggauacuuuuugc

SEQ ID NO: 285703 - RNA, 19 nt, Human
cggggcggcccccggggcg

SEQ ID NO: 285704 - RNA, 21 nt, Human
cggugcugggggcggagcggg

SEQ ID NO: 285705 - RNA, 24 nt, Human
cuccagccacccaauccacuguca

SEQ ID NO: 285706 - RNA, 25 nt, Human
cuguucccccccaaauuuuagcggc

SEQ ID NO: 285707 - RNA, 20 nt, Human
cuucuacacucucacacagu

SEQ ID NO: 285708 - RNA, 18 nt, Human
gaagggaagaggggcggc

SEQ ID NO: 285709 - RNA, 19 nt, Human
gacagaaacagaaaaggaa

SEQ ID NO: 285710 - RNA, 18 nt, Human
gagaggaaagaaagacag

SEQ ID NO: 285711 - RNA, 19 nt, Human
gagcacggccagcgccagc

SEQ ID NO: 285712 - RNA, 19 nt, Human
gaguguguguguuucugcc

SEQ ID NO: 285713 - RNA, 20 nt, Human
gcagggcgccgggguccggg

SEQ ID NO: 285714 - RNA, 18 nt, Human
gcggagcgggccggggcg

SEQ ID NO: 285715 - RNA, 18 nt, Human
gcggccgggagacggggg

SEQ ID NO: 285716 - RNA, 19 nt, Human
gcggccgggagacggggga

SEQ ID NO: 285717 - RNA, 22 nt, Human
gcggcuuuaaguuauuuaaaau

SEQ ID NO: 285718 - RNA, 19 nt, Human
ggaaagaggggaccggagg

SEQ ID NO: 285719 - RNA, 22 nt, Human
ggagcuuggagaguacaaggau

SEQ ID NO: 285720 - RNA, 27 nt, Human
ggcggcccccggggcggugcugggggc

SEQ ID NO: 285721 - RNA, 20 nt, Human
ggcggugcugggggcggagc

SEQ ID NO: 285722 - RNA, 19 nt, Human
ggggaaagaggggaccgga

SEQ ID NO: 285723 - RNA, 20 nt, Human
ggggcggagcgggccggggc

SEQ ID NO: 285724 - RNA, 20 nt, Human
gugcuuaagaaaaugaaaau

SEQ ID NO: 285725 - RNA, 21 nt, Human
guggcgggaagggugggcuga

SEQ ID NO: 285726 - RNA, 18 nt, Human
guugcaggguuguagaug

SEQ ID NO: 285727 - RNA, 23 nt, Human
uaaaauagauauaagcuauaagc

SEQ ID NO: 285728 - RNA, 22 nt, Human
uaagacaaaaaucccuaacauu

SEQ ID NO: 285729 - RNA, 22 nt, Human
uacacaaaacauccuauuucac

SEQ ID NO: 285730 - RNA, 19 nt, Human
uagaaagcgcuucuguucu

SEQ ID NO: 285731 - RNA, 24 nt, Human
uagaucaccuaaaugaaagaaaau

SEQ ID NO: 285732 - RNA, 19 nt, Human
uagauguccgagugccccc

SEQ ID NO: 285733 - RNA, 19 nt, Human
uagcaaugcuuguccuccu

SEQ ID NO: 285734 - RNA, 24 nt, Human
uauauagaucaccuaaaugaaaga

SEQ ID NO: 285735 - RNA, 19 nt, Human
ucacauacugaaaaugauu

SEQ ID NO: 285736 - RNA, 18 nt, Human
ucccugguacguaaaaug

SEQ ID NO: 285737 - RNA, 19 nt, Human
uccgggugcgcgccggaag

SEQ ID NO: 285738 - RNA, 19 nt, Human
ucgaaggugugggugggaa

SEQ ID NO: 285739 - RNA, 21 nt, Human
ucuacacaaaacauccuauuu

SEQ ID NO: 285740 - RNA, 26 nt, Human
ugaccagcacaugcagaaaggguuuc

SEQ ID NO: 285741 - RNA, 23 nt, Human
ugaggcgguugguagcaaugcuu

SEQ ID NO: 285742 - RNA, 21 nt, Human
ugcaagccaagagagggcugc

SEQ ID NO: 285743 - RNA, 25 nt, Human
ugcagaaagagcugauugaucagug

SEQ ID NO: 285744 - RNA, 19 nt, Human
ugcgcgcgcguguguagcg

SEQ ID NO: 285745 - RNA, 20 nt, Human
ugggaagggaagaggggcgg

SEQ ID NO: 285746 - RNA, 19 nt, Human
uggugggagaggaaagaaa

SEQ ID NO: 285747 - RNA, 24 nt, Human
uggugggagaggaaagaaagacag

SEQ ID NO: 285748 - RNA, 18 nt, Human
ugugcgcgcgcgugugua

SEQ ID NO: 285749 - RNA, 20 nt, Human
uugccgggcgcgggaggagg

SEQ ID NO: 285750 - RNA, 20 nt, Human
uugugcugucccuugaacac

SEQ ID NO: 285751 - RNA, 22 nt, Human
uuucugcccacaaaccagucca

SEQ ID NO: 285752 - RNA, 20 nt, Human
uuuuuuuuuuuuuuuuucac

SEQ ID NO: 285753 - RNA, 21 nt, Human
aaagacuggaaggggaggcuu

SEQ ID NO: 285754 - RNA, 21 nt, Human
agccgaagcaccggucccccc

SEQ ID NO: 285755 - RNA, 21 nt, Human
aguucaaccaaccaacagcaa

SEQ ID NO: 285756 - RNA, 20 nt, Human
aguuuaguaggggcugaagg

SEQ ID NO: 285757 - RNA, 19 nt, Human
auauauguauauauauaua

SEQ ID NO: 285758 - RNA, 19 nt, Human
auauauguguauauauaua

SEQ ID NO: 285759 - RNA, 20 nt, Human
auauguauauauauauauau

SEQ ID NO: 285760 - RNA, 19 nt, Human
auauguguauauauauaug

SEQ ID NO: 285761 - RNA, 18 nt, Human
auguauauauauauauau

SEQ ID NO: 285762 - RNA, 27 nt, Human
caagauauguucaguucaaccaaccaa

SEQ ID NO: 285763 - RNA, 25 nt, Human
cagcagcaacaggaucgggaccacg

SEQ ID NO: 285764 - RNA, 18 nt, Human
cagcguucccgccgaggc

SEQ ID NO: 285765 - RNA, 19 nt, Human
cagcugccggggccguuca

SEQ ID NO: 285766 - RNA, 18 nt, Human
ccgccgggcagccaaccu

SEQ ID NO: 285767 - RNA, 19 nt, Human
ccuccggcgggccuagccc

SEQ ID NO: 285768 - RNA, 18 nt, Human
cgaagcaccggucccccc

SEQ ID NO: 285769 - RNA, 20 nt, Human
cgccaguuagugacuccagu

SEQ ID NO: 285770 - RNA, 18 nt, Human
cgccgggaggcucuggcc

SEQ ID NO: 285771 - RNA, 20 nt, Human
cgccgggaggcucuggccgg

SEQ ID NO: 285772 - RNA, 19 nt, Human
cggcagugcaggcaaugga

SEQ ID NO: 285773 - RNA, 18 nt, Human
cgggaggaacucuuagug

SEQ ID NO: 285774 - RNA, 22 nt, Human
cgucugggggccuggccugccc

SEQ ID NO: 285775 - RNA, 20 nt, Human
cuauguacagcguucccgcc

SEQ ID NO: 285776 - RNA, 24 nt, Human
gcaggcguggagcaaaaucgaggg

SEQ ID NO: 285777 - RNA, 23 nt, Human
gccuagcccuggcgcgccccagc

SEQ ID NO: 285778 - RNA, 19 nt, Human
gcgucugggggccuggccu

SEQ ID NO: 285779 - RNA, 20 nt, Human
ggauccagggggcccggggc

SEQ ID NO: 285780 - RNA, 18 nt, Human
gggaggcucuggccggca

SEQ ID NO: 285781 - RNA, 22 nt, Human
guauauauauauauaugugcug

SEQ ID NO: 285782 - RNA, 24 nt, Human
gugcaggcaauggacaucuuuuug

SEQ ID NO: 285783 - RNA, 19 nt, Human
uaacagcuggguggaggcg

SEQ ID NO: 285784 - RNA, 20 nt, Human
uaaguggucccuggaacgga

SEQ ID NO: 285785 - RNA, 23 nt, Human
uacagcguucccgccgaggcgga

SEQ ID NO: 285786 - RNA, 18 nt, Human
uauauauauauguauaua

SEQ ID NO: 285787 - RNA, 20 nt, Human
uauauauauguauauauaua

SEQ ID NO: 285788 - RNA, 23 nt, Human
uauauauauguauauauauauau

SEQ ID NO: 285789 - RNA, 21 nt, Human
uauauauaugugcuguauaua

SEQ ID NO: 285790 - RNA, 20 nt, Human
uauauauguguauauauaua

SEQ ID NO: 285791 - RNA, 21 nt, Human
uauauguauauauauauauau

SEQ ID NO: 285792 - RNA, 23 nt, Human
uauauguauauauauauauaugu

SEQ ID NO: 285793 - RNA, 18 nt, Human
uauauguguauauauaua

SEQ ID NO: 285794 - RNA, 18 nt, Human
uauguauauauauauaua

SEQ ID NO: 285795 - RNA, 19 nt, Human
uauguauauauauauauau

SEQ ID NO: 285796 - RNA, 22 nt, Human
uauguguauauauauauguaua

SEQ ID NO: 285797 - RNA, 24 nt, Human
uauguguauauauauauguauaua

SEQ ID NO: 285798 - RNA, 19 nt, Human
ucaaacagcggaucagagc

SEQ ID NO: 285799 - RNA, 22 nt, Human
uccagcgcagggcggggcggga

SEQ ID NO: 285800 - RNA, 22 nt, Human
uccccccaagcaaguggcacaa

SEQ ID NO: 285801 - RNA, 24 nt, Human
uccccccaagcaaguggcacaaaa

SEQ ID NO: 285802 - RNA, 22 nt, Human
ucccuggaacggaccugacuau

SEQ ID NO: 285803 - RNA, 24 nt, Human
uccugggugcuaagacaagauaug

SEQ ID NO: 285804 - RNA, 22 nt, Human
ucuugcucgguuguuuagguga

SEQ ID NO: 285805 - RNA, 21 nt, Human
ugcccucagcugccggggccg

SEQ ID NO: 285806 - RNA, 18 nt, Human
uggccggcaggcguggag

SEQ ID NO: 285807 - RNA, 21 nt, Human
uggggggugaaaauucaguuu

SEQ ID NO: 285808 - RNA, 18 nt, Human
uguauauauauauauaug

SEQ ID NO: 285809 - RNA, 22 nt, Human
uguauauauauauguauauaua

SEQ ID NO: 285810 - RNA, 22 nt, Human
uguguauauauauauguauaua

SEQ ID NO: 285811 - RNA, 18 nt, Human
uucccgccgaggcggaag

SEQ ID NO: 285812 - RNA, 25 nt, Human
uuggagaagacgaggcaaaggcggg

SEQ ID NO: 285813 - RNA, 18 nt, Human
uugggcucaaacagcgga

SEQ ID NO: 285814 - RNA, 26 nt, Human
uuuuauauauguguauauauauaugu

SEQ ID NO: 285815 - RNA, 20 nt, Human
uuuuggggggugaaaauuca

SEQ ID NO: 285816 - RNA, 30 nt, Human
uuuuuuauauauguguauauauauauguaa

SEQ ID NO: 285817 - RNA, 23 nt, Human
uuuuuuuauauauguguauauau

SEQ ID NO: 285818 - RNA, 18 nt, Human
aaugcaaaaaugagcaga

SEQ ID NO: 285819 - RNA, 25 nt, Human
acacacacacagcagugcacacaca

SEQ ID NO: 285820 - RNA, 18 nt, Human
accugggcuggucccucu

SEQ ID NO: 285821 - RNA, 20 nt, Human
agaagagaggguccagcggg

SEQ ID NO: 285822 - RNA, 24 nt, Human
agagcccuccagaacccugagcau

SEQ ID NO: 285823 - RNA, 22 nt, Human
agagggcagcugggccaccaca

SEQ ID NO: 285824 - RNA, 21 nt, Human
agcagugcacacacacaagca

SEQ ID NO: 285825 - RNA, 20 nt, Human
aggaccgaacugcccugcca

SEQ ID NO: 285826 - RNA, 22 nt, Human
aggagcacccccagggcucgag

SEQ ID NO: 285827 - RNA, 24 nt, Human
aggagcacccccagggcucgagcc

SEQ ID NO: 285828 - RNA, 21 nt, Human
aggcagccuugccucaucccu

SEQ ID NO: 285829 - RNA, 19 nt, Human
aggcucagaacagccucgg

SEQ ID NO: 285830 - RNA, 23 nt, Human
auuagaagcccugccaggugggg

SEQ ID NO: 285831 - RNA, 24 nt, Human
caagcacacgcacacacacggcug

SEQ ID NO: 285832 - RNA, 22 nt, Human
caagcgccacugcccgcugagu

SEQ ID NO: 285833 - RNA, 23 nt, Human
caauuaucccuccggaguuuucu

SEQ ID NO: 285834 - RNA, 26 nt, Human
cacacaagcacacgcacacacacggc

SEQ ID NO: 285835 - RNA, 24 nt, Human
cacacacagcagugcacacacaca

SEQ ID NO: 285836 - RNA, 19 nt, Human
caccacacagcccgggggc

SEQ ID NO: 285837 - RNA, 20 nt, Human
cagacaggugagaggcuugg

SEQ ID NO: 285838 - RNA, 23 nt, Human
cagacaggugagaggcuuggugg

SEQ ID NO: 285839 - RNA, 18 nt, Human
cagagcccuccagaaccc

SEQ ID NO: 285840 - RNA, 21 nt, Human
cagcacaugugugccucuccu

SEQ ID NO: 285841 - RNA, 23 nt, Human
cagccccugcccugugcugagag

SEQ ID NO: 285842 - RNA, 21 nt, Human
cagcugggccaccacacagcc

SEQ ID NO: 285843 - RNA, 21 nt, Human
caggagggugggcuggccagg

SEQ ID NO: 285844 - RNA, 29 nt, Human
cagugcacacacacaagcacacgcacaca

SEQ ID NO: 285845 - RNA, 22 nt, Human
ccacugcugcaccgccuucccg

SEQ ID NO: 285846 - RNA, 18 nt, Human
ccagccaagcgccacugc

SEQ ID NO: 285847 - RNA, 22 nt, Human
ccaggcucagaacagccucggc

SEQ ID NO: 285848 - RNA, 20 nt, Human
ccccaccugggcuggucccu

SEQ ID NO: 285849 - RNA, 18 nt, Human
ccggaaggacagagcccu

SEQ ID NO: 285850 - RNA, 23 nt, Human
ccuccagaacccugagcauuaga

SEQ ID NO: 285851 - RNA, 19 nt, Human
ccugcagccccugcccugu

SEQ ID NO: 285852 - RNA, 18 nt, Human
ccuggagacuccgucccu

SEQ ID NO: 285853 - RNA, 21 nt, Human
ccugugcugagaggcgggggc

SEQ ID NO: 285854 - RNA, 22 nt, Human
ccuugccucaucccuucucuug

SEQ ID NO: 285855 - RNA, 18 nt, Human
cucccgguagggcugugg

SEQ ID NO: 285856 - RNA, 20 nt, Human
cucugugggcggcugcuucu

SEQ ID NO: 285857 - RNA, 20 nt, Human
cuucuuggcaccuuguaguu

SEQ ID NO: 285858 - RNA, 19 nt, Human
cuuuaaaaaauaaaaggaa

SEQ ID NO: 285859 - RNA, 20 nt, Human
gacggcuggaaccuggagac

SEQ ID NO: 285860 - RNA, 20 nt, Human
gaggcuugguggagaagaga

SEQ ID NO: 285861 - RNA, 24 nt, Human
gcacacacacggcugcagcacaug

SEQ ID NO: 285862 - RNA, 21 nt, Human
gcacaugugugccucuccuug

SEQ ID NO: 285863 - RNA, 23 nt, Human
gcacaugugugccucuccuugcc

SEQ ID NO: 285864 - RNA, 22 nt, Human
gcagcugggaggcaauccugga

SEQ ID NO: 285865 - RNA, 22 nt, Human
gcagugcacacacacaagcacc

SEQ ID NO: 285866 - RNA, 19 nt, Human
gcgccacugcccgcugagu

SEQ ID NO: 285867 - RNA, 21 nt, Human
gcgugcacacacacacagcag

SEQ ID NO: 285868 - RNA, 20 nt, Human
gcugugguggcagaagccca

SEQ ID NO: 285869 - RNA, 21 nt, Human
ggaaggacagagcccuccaga

SEQ ID NO: 285870 - RNA, 21 nt, Human
ggccacagaggguuccggcuc

SEQ ID NO: 285871 - RNA, 22 nt, Human
gggcaggaaggggguucggcca

SEQ ID NO: 285872 - RNA, 23 nt, Human
gggcugccccgaccaccacugcu

SEQ ID NO: 285873 - RNA, 20 nt, Human
gggcuuccaggagcaccccc

SEQ ID NO: 285874 - RNA, 22 nt, Human
ggggagagaacagacaggugag

SEQ ID NO: 285875 - RNA, 23 nt, Human
gggguucggccacagaggguucc

SEQ ID NO: 285876 - RNA, 25 nt, Human
ggugggcuggccaggcagcugggag

SEQ ID NO: 285877 - RNA, 27 nt, Human
gugcacacacacaagcacacgcacaca

SEQ ID NO: 285878 - RNA, 23 nt, Human
gugcacacacacacagcagugca

SEQ ID NO: 285879 - RNA, 25 nt, Human
gugcacacacacacagcagugcaca

SEQ ID NO: 285880 - RNA, 18 nt, Human
uagagucucgaaggcuca

SEQ ID NO: 285881 - RNA, 21 nt, Human
ucagaacagccucggcccaua

SEQ ID NO: 285882 - RNA, 21 nt, Human
ucgcauuggcaccaaaaauau

SEQ ID NO: 285883 - RNA, 21 nt, Human
ucggccacagaggguuccggc

SEQ ID NO: 285884 - RNA, 19 nt, Human
ucucuugacauagguacau

SEQ ID NO: 285885 - RNA, 18 nt, Human
ugacuggggagagaacag

SEQ ID NO: 285886 - RNA, 21 nt, Human
ugacuggggagagaacagaca

SEQ ID NO: 285887 - RNA, 19 nt, Human
ugagcagaggucauugcug

SEQ ID NO: 285888 - RNA, 23 nt, Human
ugagugagcacgugugcccaggg

SEQ ID NO: 285889 - RNA, 27 nt, Human
ugcacacacacaagcacacgcacacac

SEQ ID NO: 285890 - RNA, 27 nt, Human
ugccaggcacacagugugucucugugg

SEQ ID NO: 285891 - RNA, 24 nt, Human
ugcccugugcugagaggcgggggc

SEQ ID NO: 285892 - RNA, 28 nt, Human
ugcgugcacacacacacagcagugcaca

SEQ ID NO: 285893 - RNA, 19 nt, Human
ugcugagaggcgggggcag

SEQ ID NO: 285894 - RNA, 23 nt, Human
uggaugcucuuggggcuuccagg

SEQ ID NO: 285895 - RNA, 22 nt, Human
uggcaccaaaaauauauuaaca

SEQ ID NO: 285896 - RNA, 22 nt, Human
ugggauccuagcucgaaccucc

SEQ ID NO: 285897 - RNA, 26 nt, Human
ugucucugugggcggcugcuucuaau

SEQ ID NO: 285898 - RNA, 23 nt, Human
uucccuagccaugagacggcugg

SEQ ID NO: 285899 - RNA, 18 nt, Human
uuuaaaaaauaaaaggaa

SEQ ID NO: 285900 - RNA, 18 nt, Human
aaaacuaauaaaaaacca

SEQ ID NO: 285901 - RNA, 22 nt, Human
aaaaugagaaaacugagaagaa

SEQ ID NO: 285902 - RNA, 23 nt, Human
aaacaagagccugaaaguaaaac

SEQ ID NO: 285903 - RNA, 21 nt, Human
aaagucugaaacacaagaaaa

SEQ ID NO: 285904 - RNA, 19 nt, Human
aaaugaaaaacacgcagcc

SEQ ID NO: 285905 - RNA, 18 nt, Human
aacaaucaugacagcaac

SEQ ID NO: 285906 - RNA, 19 nt, Human
aacuaauaaaaaaccaccu

SEQ ID NO: 285907 - RNA, 23 nt, Human
aacuaguuauuucucccugcccu

SEQ ID NO: 285908 - RNA, 23 nt, Human
aagcaguaugggaggaaggggga

SEQ ID NO: 285909 - RNA, 18 nt, Human
aaggcugaauuaaaggca

SEQ ID NO: 285910 - RNA, 19 nt, Human
aaguagccuuggcagaaga

SEQ ID NO: 285911 - RNA, 18 nt, Human
aaugcuccuuuugcuuuu

SEQ ID NO: 285912 - RNA, 18 nt, Human
acagcaugccuagagaac

SEQ ID NO: 285913 - RNA, 19 nt, Human
acucauaaaaagccugucc

SEQ ID NO: 285914 - RNA, 23 nt, Human
agcaacucuccuaaccacaaaaa

SEQ ID NO: 285915 - RNA, 21 nt, Human
aggaagggggauguucuaggg

SEQ ID NO: 285916 - RNA, 19 nt, Human
aggcaggaggaggcugcgg

SEQ ID NO: 285917 - RNA, 23 nt, Human
auaaaaacaaccuucucagccuu

SEQ ID NO: 285918 - RNA, 18 nt, Human
aucaagaauauaaaguca

SEQ ID NO: 285919 - RNA, 26 nt, Human
augacagcaacucuccuaaccacaaa

SEQ ID NO: 285920 - RNA, 22 nt, Human
auggcugcauaaagucugaaac

SEQ ID NO: 285921 - RNA, 29 nt, Human
augggaggaagggggauguucuaggggga

SEQ ID NO: 285922 - RNA, 18 nt, Human
auuguagcuacaccugaa

SEQ ID NO: 285923 - RNA, 22 nt, Human
caaaacaagagccugaaaguaa

SEQ ID NO: 285924 - RNA, 19 nt, Human
caaauccuagacuugucca

SEQ ID NO: 285925 - RNA, 22 nt, Human
caagaaaacuaauaaaaaacca

SEQ ID NO: 285926 - RNA, 19 nt, Human
caauuucuagggcccuucu

SEQ ID NO: 285927 - RNA, 22 nt, Human
caccugaaaagaagugaguuuc

SEQ ID NO: 285928 - RNA, 23 nt, Human
caccugaaaagaagugaguuuca

SEQ ID NO: 285929 - RNA, 23 nt, Human
cagaggaggcugaagaaaaaaca

SEQ ID NO: 285930 - RNA, 18 nt, Human
cagugaaaaugcauucaa

SEQ ID NO: 285931 - RNA, 19 nt, Human
cagugaaaaugcauucaau

SEQ ID NO: 285932 - RNA, 24 nt, Human
cauguuuauucccugacacuaaaa

SEQ ID NO: 285933 - RNA, 23 nt, Human
cauuuuccccccaguacugggaa

SEQ ID NO: 285934 - RNA, 20 nt, Human
ccacaggguuucaauaacag

SEQ ID NO: 285935 - RNA, 27 nt, Human
ccagaaaggcuguuuuauauauggugg

SEQ ID NO: 285936 - RNA, 21 nt, Human
ccgggaugcuucugaagucau

SEQ ID NO: 285937 - RNA, 25 nt, Human
ccuaaaaacaugaauaaguuuguau

SEQ ID NO: 285938 - RNA, 19 nt, Human
ccugcccucccccacaaga

SEQ ID NO: 285939 - RNA, 22 nt, Human
ccuguucuucagggugccuaga

SEQ ID NO: 285940 - RNA, 21 nt, Human
cuguucuucagggugccuaga

SEQ ID NO: 285941 - RNA, 19 nt, Human
gaaaaaacaaucaugacag

SEQ ID NO: 285942 - RNA, 20 nt, Human
gaaaacuaauaaaaaaccac

SEQ ID NO: 285943 - RNA, 18 nt, Human
gaaccaaaacaagagccu

SEQ ID NO: 285944 - RNA, 22 nt, Human
gaaccaaaacaagagccugaaa

SEQ ID NO: 285945 - RNA, 18 nt, Human
gaagaaaaaacaaucaug

SEQ ID NO: 285946 - RNA, 25 nt, Human
gaagccccaaaagaaaagucagagg

SEQ ID NO: 285947 - RNA, 22 nt, Human
gaggcauuccugcuugccuucu

SEQ ID NO: 285948 - RNA, 19 nt, Human
gcgacugcgaaggaaaccc

SEQ ID NO: 285949 - RNA, 23 nt, Human
ggcagaagaaaaaccguuguucu

SEQ ID NO: 285950 - RNA, 24 nt, Human
ggugaggcaggaggaggcugcggg

SEQ ID NO: 285951 - RNA, 20 nt, Human
guaaucauaaaaucugaagc

SEQ ID NO: 285952 - RNA, 22 nt, Human
uaaaaucuccucugaaccaaaa

SEQ ID NO: 285953 - RNA, 21 nt, Human
uaaaaugaaaaacacgcagcc

SEQ ID NO: 285954 - RNA, 19 nt, Human
uaaaaugucacagcaugcc

SEQ ID NO: 285955 - RNA, 20 nt, Human
uaaauuaucccacagcccuu

SEQ ID NO: 285956 - RNA, 19 nt, Human
uaaccacaaaaaucacaua

SEQ ID NO: 285957 - RNA, 25 nt, Human
uacacaauuaugauuauugaugucc

SEQ ID NO: 285958 - RNA, 21 nt, Human
uacuggaaugauaaguuugaa

SEQ ID NO: 285959 - RNA, 24 nt, Human
uagcccacaggguuucaauaacag

SEQ ID NO: 285960 - RNA, 22 nt, Human
uauuucucccugcccuccccca

SEQ ID NO: 285961 - RNA, 21 nt, Human
ucacagcaugccuagagaaca

SEQ ID NO: 285962 - RNA, 22 nt, Human
ucagccuuaacaaaugagauaa

SEQ ID NO: 285963 - RNA, 21 nt, Human
ucccaugggccccugucaggu

SEQ ID NO: 285964 - RNA, 18 nt, Human
uccucugaaccaaaacaa

SEQ ID NO: 285965 - RNA, 23 nt, Human
ucggugcgcgacugcgaaggaaa

SEQ ID NO: 285966 - RNA, 24 nt, Human
ucucccugcccucccccacaagag

SEQ ID NO: 285967 - RNA, 19 nt, Human
ucugaaccaaaacaagagc

SEQ ID NO: 285968 - RNA, 20 nt, Human
ucugaagccccaaaagaaaa

SEQ ID NO: 285969 - RNA, 18 nt, Human
ugaaaaacacgcagccug

SEQ ID NO: 285970 - RNA, 23 nt, Human
ugaagccccaaaagaaaagucag

SEQ ID NO: 285971 - RNA, 21 nt, Human
ugacacuaaaaguucacugac

SEQ ID NO: 285972 - RNA, 19 nt, Human
ugacagcaacucuccuaac

SEQ ID NO: 285973 - RNA, 18 nt, Human
ugagaagaaucaguuagg

SEQ ID NO: 285974 - RNA, 23 nt, Human
ugagaggagguacaguacaagua

SEQ ID NO: 285975 - RNA, 19 nt, Human
ugagauaauuauaaaugcu

SEQ ID NO: 285976 - RNA, 21 nt, Human
ugaggauacaaaggaauacug

SEQ ID NO: 285977 - RNA, 25 nt, Human
ugaggcaggaggaggcugcggguug

SEQ ID NO: 285978 - RNA, 23 nt, Human
ugcauaaagucugaaacacaaga

SEQ ID NO: 285979 - RNA, 22 nt, Human
uggaaugauaaguuugaagaug

SEQ ID NO: 285980 - RNA, 23 nt, Human
uggauaaggcugaauuaaaggca

SEQ ID NO: 285981 - RNA, 19 nt, Human
uggcagaagaaaaaccguu

SEQ ID NO: 285982 - RNA, 23 nt, Human
uuaaaaucuccucugaaccaaaa

SEQ ID NO: 285983 - RNA, 24 nt, Human
uuuaaccauguggucagccagaaa

SEQ ID NO: 285984 - RNA, 26 nt, Human
uuucaaaaucauaucaauauauuacu

SEQ ID NO: 285985 - RNA, 23 nt, Human
uuuuauauaugguguguguuacu

SEQ ID NO: 285986 - RNA, 23 nt, Human
uuuuuuuuuuuuuuuuucaucag

SEQ ID NO: 285987 - RNA, 24 nt, Human
aaacaguauaccugacacaguaug

SEQ ID NO: 285988 - RNA, 24 nt, Human
acucaguggucuaugaaguaugua

SEQ ID NO: 285989 - RNA, 23 nt, Human
agagaauguuguagugugaauaa

SEQ ID NO: 285990 - RNA, 23 nt, Human
auacagguucaacaaaagagcac

SEQ ID NO: 285991 - RNA, 21 nt, Human
auguaaauaguauguuuucuu

SEQ ID NO: 285992 - RNA, 22 nt, Human
auguccaaauguuaccugugcc

SEQ ID NO: 285993 - RNA, 21 nt, Human
caacuucacagauacagaagu

SEQ ID NO: 285994 - RNA, 21 nt, Human
cacuguauugcuucuugaacu

SEQ ID NO: 285995 - RNA, 22 nt, Human
caugauuugaaaaauaaacucc

SEQ ID NO: 285996 - RNA, 23 nt, Human
cauguccaaauguuaccugugcc

SEQ ID NO: 285997 - RNA, 26 nt, Human
cauuuuucuuaaaaggaaauugagaa

SEQ ID NO: 285998 - RNA, 22 nt, Human
ccaaauuauaaaacaguauacc

SEQ ID NO: 285999 - RNA, 19 nt, Human
ccuaaagaacucugggaca

SEQ ID NO: 286000 - RNA, 22 nt, Human
cuuccuaagaauaagaugaaca

SEQ ID NO: 286001 - RNA, 19 nt, Human
gccaacuucacagauacag

SEQ ID NO: 286002 - RNA, 22 nt, Human
gccccaauuagacuguucuagu

SEQ ID NO: 286003 - RNA, 20 nt, Human
guaacaugugaaaaugaagu

SEQ ID NO: 286004 - RNA, 23 nt, Human
gugauacagacuaauuuuaaagc

SEQ ID NO: 286005 - RNA, 23 nt, Human
uaaaacaguauaccugacacagu

SEQ ID NO: 286006 - RNA, 25 nt, Human
uaaccuaaagaacucugggacaaga

SEQ ID NO: 286007 - RNA, 26 nt, Human
uaaccuaaagaacucugggacaagaa

SEQ ID NO: 286008 - RNA, 25 nt, Human
uaacuuuaucagauaauuuaaugau

SEQ ID NO: 286009 - RNA, 19 nt, Human
uacagaaguauccagucuu

SEQ ID NO: 286010 - RNA, 21 nt, Human
uacagacuaauuuuaaagcac

SEQ ID NO: 286011 - RNA, 22 nt, Human
uauaaucaaaauguugcccaaa

SEQ ID NO: 286012 - RNA, 19 nt, Human
uauguugaggaaauaugca

SEQ ID NO: 286013 - RNA, 21 nt, Human
uauuagggaacugaguaacau

SEQ ID NO: 286014 - RNA, 26 nt, Human
ucaauauaguuaaaaaaaaaaaaaaa

SEQ ID NO: 286015 - RNA, 22 nt, Human
ucauuauaaucaaaauguugcc

SEQ ID NO: 286016 - RNA, 20 nt, Human
uccaaauguuaccugugcca

SEQ ID NO: 286017 - RNA, 19 nt, Human
uccuaagaauaagaugaac

SEQ ID NO: 286018 - RNA, 21 nt, Human
ucuccucacauuucauuuuuc

SEQ ID NO: 286019 - RNA, 20 nt, Human
ugcccaaaccugcagaucau

SEQ ID NO: 286020 - RNA, 21 nt, Human
ugggacaagaacaugauuuga

SEQ ID NO: 286021 - RNA, 24 nt, Human
ugggaguuggugugcaauaaggcu

SEQ ID NO: 286022 - RNA, 24 nt, Human
ugucagguuugggccauucuccug

SEQ ID NO: 286023 - RNA, 21 nt, Human
ugugcaauaaggcuaaaacaa

SEQ ID NO: 286024 - RNA, 21 nt, Human
uguugaggaaauaugcaucug

SEQ ID NO: 286025 - RNA, 22 nt, Human
uugcccaaauucuaacaaaccc

SEQ ID NO: 286026 - RNA, 20 nt, Human
uauuuucaccauuucugggg

SEQ ID NO: 286027 - RNA, 19 nt, Human
uggguccaggguccgugac

SEQ ID NO: 286028 - RNA, 24 nt, Human
aaaaagaaaccccaaacccuuagu

SEQ ID NO: 286029 - RNA, 20 nt, Human
aaacccuuaguagucaugcc

SEQ ID NO: 286030 - RNA, 19 nt, Human
aaagaaaccccaaacccuu

SEQ ID NO: 286031 - RNA, 25 nt, Human
aaaugucuauucaaaccguuagccc

SEQ ID NO: 286032 - RNA, 19 nt, Human
aacuuuguucuuuuucaag

SEQ ID NO: 286033 - RNA, 25 nt, Human
aagcaggugcaccauuuacauuccc

SEQ ID NO: 286034 - RNA, 18 nt, Human
aagccacucacugcccag

SEQ ID NO: 286035 - RNA, 21 nt, Human
accgcuuuucacaauauccca

SEQ ID NO: 286036 - RNA, 22 nt, Human
acggccccagugacgcgugcgc

SEQ ID NO: 286037 - RNA, 24 nt, Human
acuagcuuaucaauuucuguaaaa

SEQ ID NO: 286038 - RNA, 19 nt, Human
agcaccacccuucccaucu

SEQ ID NO: 286039 - RNA, 21 nt, Human
agcaccacccuucccaucuga

SEQ ID NO: 286040 - RNA, 24 nt, Human
agcaggugcaccauuuacauuccc

SEQ ID NO: 286041 - RNA, 25 nt, Human
agcuucuuaaacauuuuuaacccaa

SEQ ID NO: 286042 - RNA, 21 nt, Human
aggagaaaaaacaagccacuc

SEQ ID NO: 286043 - RNA, 24 nt, Human
aggcaaauacacuuugaggucagg

SEQ ID NO: 286044 - RNA, 18 nt, Human
aggcucauccauguugug

SEQ ID NO: 286045 - RNA, 23 nt, Human
aggcugcagcccuggcccuggcu

SEQ ID NO: 286046 - RNA, 24 nt, Human
agggcagcaguggguucagggugg

SEQ ID NO: 286047 - RNA, 18 nt, Human
aggggcgcccggggcucc

SEQ ID NO: 286048 - RNA, 18 nt, Human
agugaaauuacaagucca

SEQ ID NO: 286049 - RNA, 25 nt, Human
auacgccaucaccuaggagcagagc

SEQ ID NO: 286050 - RNA, 21 nt, Human
caaagcaggugcaccauuuac

SEQ ID NO: 286051 - RNA, 22 nt, Human
caaauacacuuugaggucagga

SEQ ID NO: 286052 - RNA, 26 nt, Human
caagcccagagcccccagcgugccag

SEQ ID NO: 286053 - RNA, 26 nt, Human
cacaauaucccagaaugaagaaguaa

SEQ ID NO: 286054 - RNA, 21 nt, Human
cacagccuccaggcccuggcc

SEQ ID NO: 286055 - RNA, 19 nt, Human
cacagccugagccucaggc

SEQ ID NO: 286056 - RNA, 22 nt, Human
cacccgaaaaagaaaccccaaa

SEQ ID NO: 286057 - RNA, 21 nt, Human
cacugcaccgaguccgcaggc

SEQ ID NO: 286058 - RNA, 19 nt, Human
caggagaaaaaacaagcca

SEQ ID NO: 286059 - RNA, 26 nt, Human
caggaggcgagcgaggagcgccuccc

SEQ ID NO: 286060 - RNA, 22 nt, Human
caggugcaccauuuacauuccc

SEQ ID NO: 286061 - RNA, 23 nt, Human
caguuccucgggauguucagcgg

SEQ ID NO: 286062 - RNA, 26 nt, Human
cauacgccaucaccuaggagcagagc

SEQ ID NO: 286063 - RNA, 18 nt, Human
ccagagcccccagcgugc

SEQ ID NO: 286064 - RNA, 21 nt, Human
ccagauggucuuacaagguaa

SEQ ID NO: 286065 - RNA, 22 nt, Human
ccagcacagccugagccucagg

SEQ ID NO: 286066 - RNA, 21 nt, Human
ccaggcccuggcaaacgcuaa

SEQ ID NO: 286067 - RNA, 22 nt, Human
ccccuuaucauauauaugacuc

SEQ ID NO: 286068 - RNA, 24 nt, Human
cccgaaaaagaaaccccaaacccu

SEQ ID NO: 286069 - RNA, 20 nt, Human
cccuggcccuggcugguggg

SEQ ID NO: 286070 - RNA, 23 nt, Human
ccucaggcugcagcccuggcccu

SEQ ID NO: 286071 - RNA, 26 nt, Human
ccucaggcugcagcccuggcccuggc

SEQ ID NO: 286072 - RNA, 27 nt, Human
ccucaggcugcagcccuggcccuggcu

SEQ ID NO: 286073 - RNA, 22 nt, Human
ccucaucucucacagccuccag

SEQ ID NO: 286074 - RNA, 24 nt, Human
ccuccaggcccuggcaaacgcuaa

SEQ ID NO: 286075 - RNA, 21 nt, Human
ccuccggagcggagcugguuc

SEQ ID NO: 286076 - RNA, 22 nt, Human
ccucugagccacugcaaaugag

SEQ ID NO: 286077 - RNA, 26 nt, Human
ccugagccucaggcugcagcccuggc

SEQ ID NO: 286078 - RNA, 22 nt, Human
cgaggccagccgcgcagacccc

SEQ ID NO: 286079 - RNA, 19 nt, Human
cgcccggggcuccacuccc

SEQ ID NO: 286080 - RNA, 18 nt, Human
cggccacaagcccagagc

SEQ ID NO: 286081 - RNA, 23 nt, Human
cggcugggccggauccggcgugu

SEQ ID NO: 286082 - RNA, 18 nt, Human
cgggcgaggccagccgcg

SEQ ID NO: 286083 - RNA, 18 nt, Human
cucaucucucacagccuc

SEQ ID NO: 286084 - RNA, 20 nt, Human
cucaucucucacagccucca

SEQ ID NO: 286085 - RNA, 22 nt, Human
cucaucucucacagccuccagg

SEQ ID NO: 286086 - RNA, 18 nt, Human
cuccucugagccacugca

SEQ ID NO: 286087 - RNA, 21 nt, Human
cugcagcccuggcccuggcug

SEQ ID NO: 286088 - RNA, 22 nt, Human
cuuaaaccaguaacacacugag

SEQ ID NO: 286089 - RNA, 18 nt, Human
cuuagcaccacccuuccc

SEQ ID NO: 286090 - RNA, 23 nt, Human
gaaaaagaaaccccaaacccuua

SEQ ID NO: 286091 - RNA, 24 nt, Human
gaaaagacucuccuuucucuauug

SEQ ID NO: 286092 - RNA, 21 nt, Human
gagcccccagcgugccaguuc

SEQ ID NO: 286093 - RNA, 23 nt, Human
gaucugcuggguccacccuccuc

SEQ ID NO: 286094 - RNA, 21 nt, Human
gcagcaguggguucagggugg

SEQ ID NO: 286095 - RNA, 23 nt, Human
gcccagagcccccagcgugccag

SEQ ID NO: 286096 - RNA, 18 nt, Human
gcccggggcuccacuccu

SEQ ID NO: 286097 - RNA, 24 nt, Human
gcccggggcuccacuccuggagac

SEQ ID NO: 286098 - RNA, 19 nt, Human
gcggagcugguucgcccag

SEQ ID NO: 286099 - RNA, 21 nt, Human
gcggcgcugugccuggggcug

SEQ ID NO: 286100 - RNA, 20 nt, Human
gcgugcgcucccggcccgag

SEQ ID NO: 286101 - RNA, 19 nt, Human
gcuugugucuuugguauca

SEQ ID NO: 286102 - RNA, 23 nt, Human
ggacagaccacauuuuauuuccc

SEQ ID NO: 286103 - RNA, 22 nt, Human
ggcuccacuccuggagacucca

SEQ ID NO: 286104 - RNA, 22 nt, Human
ggugguagaaguacguguagga

SEQ ID NO: 286105 - RNA, 22 nt, Human
gguuguuuccacuuuuuggcua

SEQ ID NO: 286106 - RNA, 21 nt, Human
gugugugugugugugugugug

SEQ ID NO: 286107 - RNA, 18 nt, Human
uaaaaaagccagcuauga

SEQ ID NO: 286108 - RNA, 23 nt, Human
uaaauggaauuauuuaacuucgu

SEQ ID NO: 286109 - RNA, 22 nt, Human
uaagaaaccacugccuaauuca

SEQ ID NO: 286110 - RNA, 21 nt, Human
uaauuucgaacauuuucauca

SEQ ID NO: 286111 - RNA, 19 nt, Human
uaccccaaguccagaacac

SEQ ID NO: 286112 - RNA, 21 nt, Human
uaccggccacaagcccagagc

SEQ ID NO: 286113 - RNA, 24 nt, Human
uaucuaagaaaccacugccuaauu

SEQ ID NO: 286114 - RNA, 18 nt, Human
uccacccuccucugagcc

SEQ ID NO: 286115 - RNA, 27 nt, Human
ucccaaccccacugcuuaccccaaguc

SEQ ID NO: 286116 - RNA, 23 nt, Human
ucccaaccccacugcuuaccccc

SEQ ID NO: 286117 - RNA, 23 nt, Human
ucccaaccccacugcuuaccccu

SEQ ID NO: 286118 - RNA, 21 nt, Human
uccgcuagggggcgggcgagg

SEQ ID NO: 286119 - RNA, 20 nt, Human
uccugacccaauuggucacc

SEQ ID NO: 286120 - RNA, 25 nt, Human
ucgcuggauggguacaggaggcgag

SEQ ID NO: 286121 - RNA, 23 nt, Human
ucuauccuuaaaccaguaacacc

SEQ ID NO: 286122 - RNA, 22 nt, Human
ucucacagccuccaggcccugg

SEQ ID NO: 286123 - RNA, 20 nt, Human
ucugauccaugaacacagga

SEQ ID NO: 286124 - RNA, 21 nt, Human
ucugauccaugaacacaggau

SEQ ID NO: 286125 - RNA, 18 nt, Human
ucuuuuucuuucccaaau

SEQ ID NO: 286126 - RNA, 19 nt, Human
ugaagaaguaaaaauauac

SEQ ID NO: 286127 - RNA, 21 nt, Human
ugacgcgugcgcucccggccc

SEQ ID NO: 286128 - RNA, 22 nt, Human
ugacucgcaaauauuuucuccc

SEQ ID NO: 286129 - RNA, 22 nt, Human
ugaggucucucacuggagccuc

SEQ ID NO: 286130 - RNA, 20 nt, Human
ugaguauuuuucaugugcuu

SEQ ID NO: 286131 - RNA, 20 nt, Human
ugauuguaaacuggaaucuc

SEQ ID NO: 286132 - RNA, 18 nt, Human
ugauuuauuuuucuccuu

SEQ ID NO: 286133 - RNA, 18 nt, Human
ugcccagggcagcagugg

SEQ ID NO: 286134 - RNA, 20 nt, Human
ugccuggggcugaggcugca

SEQ ID NO: 286135 - RNA, 25 nt, Human
ugcgugugugugugugugugugugg

SEQ ID NO: 286136 - RNA, 27 nt, Human
ugcuaagcugaggucucucacuggagc

SEQ ID NO: 286137 - RNA, 21 nt, Human
uggaauuauuuaacuucguuu

SEQ ID NO: 286138 - RNA, 18 nt, Human
uggagaaaugucuauuca

SEQ ID NO: 286139 - RNA, 18 nt, Human
uggaugcggcgcugugcc

SEQ ID NO: 286140 - RNA, 21 nt, Human
uggcaaacgcuaaucuauauu

SEQ ID NO: 286141 - RNA, 19 nt, Human
uggccugccggcugcaccu

SEQ ID NO: 286142 - RNA, 21 nt, Human
ugggaaccuugucaaaaauca

SEQ ID NO: 286143 - RNA, 22 nt, Human
ugggaaccuugucaaaaaucaa

SEQ ID NO: 286144 - RNA, 19 nt, Human
ugggauggccugccggcug

SEQ ID NO: 286145 - RNA, 24 nt, Human
ugggccggauccggcgugucggag

SEQ ID NO: 286146 - RNA, 20 nt, Human
ugggcuuuugcaccuggcuu

SEQ ID NO: 286147 - RNA, 22 nt, Human
ugguaucauaucuaagaaacca

SEQ ID NO: 286148 - RNA, 24 nt, Human
uguaucuugaaaccuugcggaacu

SEQ ID NO: 286149 - RNA, 24 nt, Human
uguauguacguuuucauuucucuu

SEQ ID NO: 286150 - RNA, 20 nt, Human
ugucaaaaaucaauugaccg

SEQ ID NO: 286151 - RNA, 19 nt, Human
ugugugcgugugugugugu

SEQ ID NO: 286152 - RNA, 22 nt, Human
ugugugugugugugaguuccuu

SEQ ID NO: 286153 - RNA, 18 nt, Human
ugugugugugugugugug

SEQ ID NO: 286154 - RNA, 18 nt, Human
ugugugugugugugugug

SEQ ID NO: 286155 - RNA, 18 nt, Human
ugugugugugugugugug

SEQ ID NO: 286156 - RNA, 21 nt, Human
ugugugugugugugugugugu

SEQ ID NO: 286157 - RNA, 21 nt, Human
ugugugugugugugugugugu

SEQ ID NO: 286158 - RNA, 22 nt, Human
ugugugugugugugugugugug

SEQ ID NO: 286159 - RNA, 23 nt, Human
ugugugugugugugugugugugu

SEQ ID NO: 286160 - RNA, 22 nt, Human
uguguguguguguguguguguu

SEQ ID NO: 286161 - RNA, 24 nt, Human
uguuuccacuuuuuggcuauuaca

SEQ ID NO: 286162 - RNA, 24 nt, Human
uuaguagccauuugcauaucuucu

SEQ ID NO: 286163 - RNA, 19 nt, Human
uucccaucugaggucccaa

SEQ ID NO: 286164 - RNA, 19 nt, Human
uuccucgggauguucagcg

SEQ ID NO: 286165 - RNA, 23 nt, Human
uucuuucccaaaugcuucuuaaa

SEQ ID NO: 286166 - RNA, 19 nt, Human
uugcauuucaaugcaguca

SEQ ID NO: 286167 - RNA, 19 nt, Human
uuguuaaguugauuccuau

SEQ ID NO: 286168 - RNA, 20 nt, Human
uuuggagaaaugucuauuca

SEQ ID NO: 286169 - RNA, 23 nt, Human
caaaagcuuuaaauacagaaugg

SEQ ID NO: 286170 - RNA, 24 nt, Human
caaaggcaacgaguggagcggcug

SEQ ID NO: 286171 - RNA, 21 nt, Human
cagaaugggcuggccagagcg

SEQ ID NO: 286172 - RNA, 18 nt, Human
cagcagcgggacacggag

SEQ ID NO: 286173 - RNA, 19 nt, Human
cgggacggacucgccgggc

SEQ ID NO: 286174 - RNA, 24 nt, Human
cucacaggagcagcagcgggacac

SEQ ID NO: 286175 - RNA, 20 nt, Human
gagcagcagcgggacacgga

SEQ ID NO: 286176 - RNA, 22 nt, Human
gagcagcagcgggacacggagc

SEQ ID NO: 286177 - RNA, 19 nt, Human
gagucgaggcgaggggcag

SEQ ID NO: 286178 - RNA, 19 nt, Human
ggcaggcuggcuaccagcu

SEQ ID NO: 286179 - RNA, 19 nt, Human
ggugucgguguuggugaaa

SEQ ID NO: 286180 - RNA, 19 nt, Human
uauugggccucaaaagcuu

SEQ ID NO: 286181 - RNA, 19 nt, Human
ucgccgggcgcucacagga

SEQ ID NO: 286182 - RNA, 19 nt, Human
uggacguaucagaaaaauc

SEQ ID NO: 286183 - RNA, 21 nt, Human
aaaaaacaaacagguugaaaa

SEQ ID NO: 286184 - RNA, 19 nt, Human
aagccuuuuaaaaaacaaa

SEQ ID NO: 286185 - RNA, 23 nt, Human
aaucauuuggaucaauacaguga

SEQ ID NO: 286186 - RNA, 22 nt, Human
aauguacagacucucaagcaac

SEQ ID NO: 286187 - RNA, 24 nt, Human
aauuauugaagucgacacuaagcc

SEQ ID NO: 286188 - RNA, 18 nt, Human
aauugccuaggaccucaa

SEQ ID NO: 286189 - RNA, 18 nt, Human
acacagagccacucagac

SEQ ID NO: 286190 - RNA, 25 nt, Human
acaccuggaacacugacaagucauc

SEQ ID NO: 286191 - RNA, 20 nt, Human
acagagccacucagacacca

SEQ ID NO: 286192 - RNA, 23 nt, Human
acagcaacaccuuuauuacuagc

SEQ ID NO: 286193 - RNA, 22 nt, Human
accucgggccccagaauccaac

SEQ ID NO: 286194 - RNA, 23 nt, Human
accuggaacacugacaagucauc

SEQ ID NO: 286195 - RNA, 26 nt, Human
acuuugcagaagcaggcugcauugug

SEQ ID NO: 286196 - RNA, 18 nt, Human
agcagguuaccaguaagg

SEQ ID NO: 286197 - RNA, 21 nt, Human
agccuuuuaaaaaacaaacag

SEQ ID NO: 286198 - RNA, 19 nt, Human
agcugacuuaaaauugccc

SEQ ID NO: 286199 - RNA, 18 nt, Human
aggaaauaaaaaauccaa

SEQ ID NO: 286200 - RNA, 21 nt, Human
aggaauucucucaauuaugaa

SEQ ID NO: 286201 - RNA, 24 nt, Human
aggcgacggcggcagcggcgggcu

SEQ ID NO: 286202 - RNA, 23 nt, Human
aggcugcauugugaacggggcag

SEQ ID NO: 286203 - RNA, 20 nt, Human
agggcucgccugugcuuccu

SEQ ID NO: 286204 - RNA, 22 nt, Human
agguuaccaguaaggugucagc

SEQ ID NO: 286205 - RNA, 18 nt, Human
auccugaaggauaacacc

SEQ ID NO: 286206 - RNA, 18 nt, Human
caacacagaggcgauggg

SEQ ID NO: 286207 - RNA, 26 nt, Human
caacauaaaauugaucuguccguucu

SEQ ID NO: 286208 - RNA, 19 nt, Human
caacugccucucacaggcu

SEQ ID NO: 286209 - RNA, 23 nt, Human
caauccugaaggauaacaccaga

SEQ ID NO: 286210 - RNA, 26 nt, Human
cacacagagccacucagacaccaccg

SEQ ID NO: 286211 - RNA, 19 nt, Human
cacagcaacaauucucuuu

SEQ ID NO: 286212 - RNA, 19 nt, Human
cagaauccaacaaggccga

SEQ ID NO: 286213 - RNA, 18 nt, Human
cagacucucaagcaacaa

SEQ ID NO: 286214 - RNA, 22 nt, Human
cagagaaacgaucaaaauuaga

SEQ ID NO: 286215 - RNA, 20 nt, Human
cagcaacaccuuuauuacua

SEQ ID NO: 286216 - RNA, 24 nt, Human
cagguugaaaaauggguuaaagua

SEQ ID NO: 286217 - RNA, 22 nt, Human
cagugacauuguggggugacac

SEQ ID NO: 286218 - RNA, 20 nt, Human
cauguuguucaucaucucag

SEQ ID NO: 286219 - RNA, 18 nt, Human
cauuccauggcaguggau

SEQ ID NO: 286220 - RNA, 20 nt, Human
cauugugaacggggcagggg

SEQ ID NO: 286221 - RNA, 20 nt, Human
ccaguggagacucuaacguc

SEQ ID NO: 286222 - RNA, 19 nt, Human
cccagaauccaacaaggcc

SEQ ID NO: 286223 - RNA, 19 nt, Human
ccugcagucaggcuguugg

SEQ ID NO: 286224 - RNA, 21 nt, Human
ccugcagucaggcuguugggc

SEQ ID NO: 286225 - RNA, 21 nt, Human
cgaccucgggccccagaaucc

SEQ ID NO: 286226 - RNA, 20 nt, Human
cggcggcagcggcgggcucg

SEQ ID NO: 286227 - RNA, 24 nt, Human
cucacaaccacuacuacuucuguu

SEQ ID NO: 286228 - RNA, 19 nt, Human
cucaguggcuccaccucug

SEQ ID NO: 286229 - RNA, 26 nt, Human
cucgaccucgggccccagaauccaac

SEQ ID NO: 286230 - RNA, 27 nt, Human
cucugcuucuaagaaaaaucacucauu

SEQ ID NO: 286231 - RNA, 20 nt, Human
cugaaucaucuucccagucu

SEQ ID NO: 286232 - RNA, 22 nt, Human
cuuacugccagcaccaacugcc

SEQ ID NO: 286233 - RNA, 18 nt, Human
cuucacacagagccacuc

SEQ ID NO: 286234 - RNA, 25 nt, Human
cuucacacagagccacucagacacc

SEQ ID NO: 286235 - RNA, 22 nt, Human
gaaaaaucacucauuccauggc

SEQ ID NO: 286236 - RNA, 23 nt, Human
gacuaaauguacagacucucaag

SEQ ID NO: 286237 - RNA, 19 nt, Human
gaucaugggacugggaagg

SEQ ID NO: 286238 - RNA, 21 nt, Human
gcgacggcggcagcggcgggc

SEQ ID NO: 286239 - RNA, 20 nt, Human
ggaaggaggggcgugggcgg

SEQ ID NO: 286240 - RNA, 24 nt, Human
ggacugggaaggaggggcgugggc

SEQ ID NO: 286241 - RNA, 18 nt, Human
ggcuggggugaucauggg

SEQ ID NO: 286242 - RNA, 19 nt, Human
gggaccagugagcacgugc

SEQ ID NO: 286243 - RNA, 27 nt, Human
gggcgggccucucuggcggcggcugcu

SEQ ID NO: 286244 - RNA, 20 nt, Human
ggggcgugggcgguagagcu

SEQ ID NO: 286245 - RNA, 22 nt, Human
uaaaaaacaaacagguugaaaa

SEQ ID NO: 286246 - RNA, 23 nt, Human
uaaaaaacaaacagguugaaaaa

SEQ ID NO: 286247 - RNA, 18 nt, Human
uaaaguaggcaaauacag

SEQ ID NO: 286248 - RNA, 20 nt, Human
uaaaguaggcaaauacagca

SEQ ID NO: 286249 - RNA, 20 nt, Human
uaagagauguaaaagcuuaa

SEQ ID NO: 286250 - RNA, 24 nt, Human
uaaggugucagccaauuuguucca

SEQ ID NO: 286251 - RNA, 20 nt, Human
uaaguagacgggagcaagug

SEQ ID NO: 286252 - RNA, 22 nt, Human
uacagcauaucugccuuuagag

SEQ ID NO: 286253 - RNA, 20 nt, Human
uacagcuuucuucguccucc

SEQ ID NO: 286254 - RNA, 19 nt, Human
uacauccucaucaccaccc

SEQ ID NO: 286255 - RNA, 18 nt, Human
uagcugacuuaaaauugc

SEQ ID NO: 286256 - RNA, 18 nt, Human
uaugaagaaaaggagacu

SEQ ID NO: 286257 - RNA, 24 nt, Human
uauuuuucuuucucaaaauccagg

SEQ ID NO: 286258 - RNA, 26 nt, Human
ucacacagagccacucagacaccaca

SEQ ID NO: 286259 - RNA, 22 nt, Human
ucauuugccauacugacagugc

SEQ ID NO: 286260 - RNA, 20 nt, Human
uccaacaaggccgacucgau

SEQ ID NO: 286261 - RNA, 21 nt, Human
uccagucacuuuugaauccau

SEQ ID NO: 286262 - RNA, 22 nt, Human
ucgcggccucuucucgcuuccc

SEQ ID NO: 286263 - RNA, 21 nt, Human
ucuacauccucaucaccaccc

SEQ ID NO: 286264 - RNA, 20 nt, Human
ucuucaucugaaucaucuuc

SEQ ID NO: 286265 - RNA, 21 nt, Human
ucuugugaaucaucaucugcu

SEQ ID NO: 286266 - RNA, 21 nt, Human
ucuuuuguuaaccuuggccau

SEQ ID NO: 286267 - RNA, 24 nt, Human
ugacagugcaaauacaaaucugga

SEQ ID NO: 286268 - RNA, 20 nt, Human
ugacuggccagauucuccuu

SEQ ID NO: 286269 - RNA, 23 nt, Human
ugcauugugaacggggcaggggg

SEQ ID NO: 286270 - RNA, 19 nt, Human
ugccuaggaccucaacagc

SEQ ID NO: 286271 - RNA, 21 nt, Human
ugcuggggagggcucgccugu

SEQ ID NO: 286272 - RNA, 21 nt, Human
uggaacacugacaagucauca

SEQ ID NO: 286273 - RNA, 22 nt, Human
uggaucaauacagugaaaaaga

SEQ ID NO: 286274 - RNA, 18 nt, Human
uggugggcgggccucucu

SEQ ID NO: 286275 - RNA, 21 nt, Human
ugucaugaacauaaauugagg

SEQ ID NO: 286276 - RNA, 20 nt, Human
ugugaacggggcagggggac

SEQ ID NO: 286277 - RNA, 21 nt, Human
ugugaacggggcagggggacg

SEQ ID NO: 286278 - RNA, 23 nt, Human
uuaacauccuuacugucuucaac

SEQ ID NO: 286279 - RNA, 21 nt, Human
uuaaccuuggccaugacuggc

SEQ ID NO: 286280 - RNA, 19 nt, Human
uuccaggaguuucuuauau

SEQ ID NO: 286281 - RNA, 21 nt, Human
uuccugcagucaggcuguugg

SEQ ID NO: 286282 - RNA, 19 nt, Human
uucuguuuucucucucuca

SEQ ID NO: 286283 - RNA, 23 nt, Human
uugcccgggagggugcgauaagg

SEQ ID NO: 286284 - RNA, 18 nt, Human
uuuuuuuuuuuuuuuuug

SEQ ID NO: 286285 - RNA, 22 nt, Human
uuuuuuuuuuuuuuuuugacgg

SEQ ID NO: 286286 - RNA, 19 nt, Human
aaacaacuucacuacaaga

SEQ ID NO: 286287 - RNA, 19 nt, Human
aagcuucuauaaacaguuc

SEQ ID NO: 286288 - RNA, 21 nt, Human
aauuagaauguauacaaagua

SEQ ID NO: 286289 - RNA, 22 nt, Human
acacaacuccaaguggcccgag

SEQ ID NO: 286290 - RNA, 19 nt, Human
acauuuaaaauacauagaa

SEQ ID NO: 286291 - RNA, 20 nt, Human
caaaaugcuucaaagauuaa

SEQ ID NO: 286292 - RNA, 21 nt, Human
caacuucacuacaagaaauac

SEQ ID NO: 286293 - RNA, 23 nt, Human
cauuuuuauuucuaaaugcugag

SEQ ID NO: 286294 - RNA, 22 nt, Human
ccacacugauagcaacaaugac

SEQ ID NO: 286295 - RNA, 18 nt, Human
ccuccgguggccacugcc

SEQ ID NO: 286296 - RNA, 19 nt, Human
ccuuagcuuuggaguacac

SEQ ID NO: 286297 - RNA, 21 nt, Human
cgccaugaggagggacugcuc

SEQ ID NO: 286298 - RNA, 23 nt, Human
cgccaugaggagggacugcucca

SEQ ID NO: 286299 - RNA, 23 nt, Human
cgguggccacugccaucuuccuc

SEQ ID NO: 286300 - RNA, 19 nt, Human
gaacuugauuuugcuagca

SEQ ID NO: 286301 - RNA, 19 nt, Human
gccaucuuccucaucacug

SEQ ID NO: 286302 - RNA, 22 nt, Human
uaagcccaaaaugcuucaaaga

SEQ ID NO: 286303 - RNA, 22 nt, Human
uacaaaguagauuacaaaacaa

SEQ ID NO: 286304 - RNA, 20 nt, Human
uacaugaucagaucauggaa

SEQ ID NO: 286305 - RNA, 24 nt, Human
uagacucuaucaaauuccacacug

SEQ ID NO: 286306 - RNA, 24 nt, Human
uauccaagcacaaaaauguggaag

SEQ ID NO: 286307 - RNA, 21 nt, Human
ucaucacuguccuuagcuuug

SEQ ID NO: 286308 - RNA, 23 nt, Human
ucuuccucaucacuguccuuagc

SEQ ID NO: 286309 - RNA, 18 nt, Human
ugagaaggcauggacuac

SEQ ID NO: 286310 - RNA, 19 nt, Human
ugagugagaaggcauggac

SEQ ID NO: 286311 - RNA, 23 nt, Human
ugauagcaacaaugacugcaucu

SEQ ID NO: 286312 - RNA, 22 nt, Human
ugccaucuuccucaucacuguc

SEQ ID NO: 286313 - RNA, 22 nt, Human
ugcuccaguccuccgguggcca

SEQ ID NO: 286314 - RNA, 21 nt, Human
uggaaggauagcuccacuccu

SEQ ID NO: 286315 - RNA, 26 nt, Human
uguccuuagcuuuggaguacacaacu

SEQ ID NO: 286316 - RNA, 18 nt, Human
ugugcugcuggcaaucuu

SEQ ID NO: 286317 - RNA, 18 nt, Human
uucaaagauuaaacagcc

SEQ ID NO: 286318 - RNA, 26 nt, Human
uuccacacugauagcaacaaugacug

SEQ ID NO: 286319 - RNA, 24 nt, Human
uucucaagcuucuauaaacaguuc

SEQ ID NO: 286320 - RNA, 18 nt, Human
aggaagccagaguaucaa

SEQ ID NO: 286321 - RNA, 23 nt, Human
aggaagccagaguaucaagagca

SEQ ID NO: 286322 - RNA, 19 nt, Human
aggcaggguccucuguggc

SEQ ID NO: 286323 - RNA, 19 nt, Human
cagaagggggcccaguggu

SEQ ID NO: 286324 - RNA, 20 nt, Human
cagaagggggcccaguggug

SEQ ID NO: 286325 - RNA, 18 nt, Human
ccccauuccuccaacccc

SEQ ID NO: 286326 - RNA, 19 nt, Human
ccucaggagagggaggucc

SEQ ID NO: 286327 - RNA, 19 nt, Human
ccucaggagagggaggucc

SEQ ID NO: 286328 - RNA, 22 nt, Human
gaauucgauuucccaugccccc

SEQ ID NO: 286329 - RNA, 24 nt, Human
ggacaggaagccagaguaucaaga

SEQ ID NO: 286330 - RNA, 22 nt, Human
ggacaggcuccccauuccucca

SEQ ID NO: 286331 - RNA, 23 nt, Human
gugguggccucaggagagggagg

SEQ ID NO: 286332 - RNA, 27 nt, Human
uaucaagagcagagaaucucacuagga

SEQ ID NO: 286333 - RNA, 18 nt, Human
ugaguguggggcccugga

SEQ ID NO: 286334 - RNA, 18 nt, Human
uguggggcccuggaaaga

SEQ ID NO: 286335 - RNA, 21 nt, Human
agaaauuucucuggggugaug

SEQ ID NO: 286336 - RNA, 19 nt, Human
auggggcuguggagagccc

SEQ ID NO: 286337 - RNA, 18 nt, Human
caaacagauccugcacac

SEQ ID NO: 286338 - RNA, 19 nt, Human
cagauccugcacacaacac

SEQ ID NO: 286339 - RNA, 21 nt, Human
cagauccugcacacaacacac

SEQ ID NO: 286340 - RNA, 20 nt, Human
caggagcugcuggggaaccc

SEQ ID NO: 286341 - RNA, 19 nt, Human
cccuccuccuccucucugu

SEQ ID NO: 286342 - RNA, 21 nt, Human
ccugcacacaacacacaggag

SEQ ID NO: 286343 - RNA, 18 nt, Human
cgagugggcaaacagauc

SEQ ID NO: 286344 - RNA, 23 nt, Human
cuccugggccgagugggcaaaca

SEQ ID NO: 286345 - RNA, 19 nt, Human
gagcugcuggggaacccug

SEQ ID NO: 286346 - RNA, 19 nt, Human
ggccgagugggcaaacaga

SEQ ID NO: 286347 - RNA, 22 nt, Human
ggcuguggagagcccaggugug

SEQ ID NO: 286348 - RNA, 18 nt, Human
guggagagcccaggugug

SEQ ID NO: 286349 - RNA, 19 nt, Human
ucucccuccuccuccucuc

SEQ ID NO: 286350 - RNA, 24 nt, Human
ucuguucuuugauggggcugugga

SEQ ID NO: 286351 - RNA, 18 nt, Human
ugcacacaacacacagga

SEQ ID NO: 286352 - RNA, 19 nt, Human
aaagcgcugggauuacaga

SEQ ID NO: 286353 - RNA, 24 nt, Human
aaagcgcugggauuacagacguga

SEQ ID NO: 286354 - RNA, 26 nt, Human
aagcgcugggauuacagacgugagcc

SEQ ID NO: 286355 - RNA, 21 nt, Human
acgugagccacggugccuggc

SEQ ID NO: 286356 - RNA, 24 nt, Human
agcgcugggauuacagacgugagc

SEQ ID NO: 286357 - RNA, 24 nt, Human
aggugaucugccugccucggccuc

SEQ ID NO: 286358 - RNA, 18 nt, Human
aguagcugggauugcagg

SEQ ID NO: 286359 - RNA, 24 nt, Human
agugauucuugugccucagccucc

SEQ ID NO: 286360 - RNA, 21 nt, Human
auugcaggugcaugccaccau

SEQ ID NO: 286361 - RNA, 22 nt, Human
auuuuuguauuuuuaguacaga

SEQ ID NO: 286362 - RNA, 24 nt, Human
caaagcgcugggauuacagacgug

SEQ ID NO: 286363 - RNA, 22 nt, Human
caagugauucuugugccucagc

SEQ ID NO: 286364 - RNA, 28 nt, Human
caagugauucuugugccucagccucccg

SEQ ID NO: 286365 - RNA, 24 nt, Human
caccaugucuggcugauuuuugua

SEQ ID NO: 286366 - RNA, 21 nt, Human
cacuacaaccucugccucccg

SEQ ID NO: 286367 - RNA, 23 nt, Human
cacuacaaccucugccucccggg

SEQ ID NO: 286368 - RNA, 21 nt, Human
cagagcucuacucuuccugac

SEQ ID NO: 286369 - RNA, 22 nt, Human
caggugaucugccugccucggc

SEQ ID NO: 286370 - RNA, 24 nt, Human
ccaaagcgcugggauuacagacgu

SEQ ID NO: 286371 - RNA, 21 nt, Human
cccgaccucaggugaucugcc

SEQ ID NO: 286372 - RNA, 23 nt, Human
cccgaccucaggugaucugccug

SEQ ID NO: 286373 - RNA, 23 nt, Human
cccgaguagcugggauugcaggu

SEQ ID NO: 286374 - RNA, 24 nt, Human
cccgaguagcugggauugcaggug

SEQ ID NO: 286375 - RNA, 19 nt, Human
ccucccaggcuggagagca

SEQ ID NO: 286376 - RNA, 22 nt, Human
ccugacagggccacagcaagcc

SEQ ID NO: 286377 - RNA, 23 nt, Human
ccugacagggccacagcaagccc

SEQ ID NO: 286378 - RNA, 21 nt, Human
ccugccucggccucccaaagc

SEQ ID NO: 286379 - RNA, 24 nt, Human
ccugccucggccucccaaagcgcu

SEQ ID NO: 286380 - RNA, 18 nt, Human
cgaccucaggugaucugc

SEQ ID NO: 286381 - RNA, 20 nt, Human
cgaccucaggugaucugccu

SEQ ID NO: 286382 - RNA, 24 nt, Human
cgccuuguuagccaggcgggucuc

SEQ ID NO: 286383 - RNA, 24 nt, Human
cgcugggauuacagacgugagcca

SEQ ID NO: 286384 - RNA, 23 nt, Human
cuacaaccucugccucccggguu

SEQ ID NO: 286385 - RNA, 24 nt, Human
cuacaaccucugccucccggguuc

SEQ ID NO: 286386 - RNA, 24 nt, Human
cucacuacaaccucugccucccgg

SEQ ID NO: 286387 - RNA, 24 nt, Human
cucagccucccgaguagcugggau

SEQ ID NO: 286388 - RNA, 26 nt, Human
cucccgaccucaggugaucugccugc

SEQ ID NO: 286389 - RNA, 20 nt, Human
cucccggguucaagugauuc

SEQ ID NO: 286390 - RNA, 23 nt, Human
cugccucccggguucaagugauu

SEQ ID NO: 286391 - RNA, 25 nt, Human
cuugugccucagccucccgaguagc

SEQ ID NO: 286392 - RNA, 18 nt, Human
gacaggauuucgccuugu

SEQ ID NO: 286393 - RNA, 23 nt, Human
gaccucaggugaucugccugccu

SEQ ID NO: 286394 - RNA, 24 nt, Human
gaccucaggugaucugccugccuc

SEQ ID NO: 286395 - RNA, 21 nt, Human
gagcaguggcacaaucugggc

SEQ ID NO: 286396 - RNA, 26 nt, Human
gaguagcugggauugcaggugcaugc

SEQ ID NO: 286397 - RNA, 18 nt, Human
gauuacagacgugagcca

SEQ ID NO: 286398 - RNA, 19 nt, Human
gauuacagacgugagccac

SEQ ID NO: 286399 - RNA, 19 nt, Human
gauuacagacgugagccac

SEQ ID NO: 286400 - RNA, 24 nt, Human
gauugcaggugcaugccaccaugu

SEQ ID NO: 286401 - RNA, 21 nt, Human
gcucacuacaaccucugccuc

SEQ ID NO: 286402 - RNA, 24 nt, Human
gugauucuugugccucagccuccc

SEQ ID NO: 286403 - RNA, 22 nt, Human
gugccucagccucccgaguagc

SEQ ID NO: 286404 - RNA, 22 nt, Human
uacagacaggauuucgccuugu

SEQ ID NO: 286405 - RNA, 24 nt, Human
uaguacagacaggauuucgccuug

SEQ ID NO: 286406 - RNA, 24 nt, Human
ucacuacaaccucugccucccggg

SEQ ID NO: 286407 - RNA, 25 nt, Human
ucacuacaaccucugccucccgggu

SEQ ID NO: 286408 - RNA, 20 nt, Human
ucagccucccgaguagcugg

SEQ ID NO: 286409 - RNA, 18 nt, Human
ucccaaagcgcugggauu

SEQ ID NO: 286410 - RNA, 23 nt, Human
ucccaggcuggagagcaguggca

SEQ ID NO: 286411 - RNA, 23 nt, Human
ucccgaguagcugggauugcagg

SEQ ID NO: 286412 - RNA, 24 nt, Human
ucccgaguagcugggauugcaggu

SEQ ID NO: 286413 - RNA, 20 nt, Human
ucccggguucaagugauucu

SEQ ID NO: 286414 - RNA, 20 nt, Human
ucccggguucaagugauucu

SEQ ID NO: 286415 - RNA, 23 nt, Human
ucgccuuguuagccaggcggguc

SEQ ID NO: 286416 - RNA, 20 nt, Human
ugauucuugugccucagccu

SEQ ID NO: 286417 - RNA, 24 nt, Human
ugccucagccucccgaguagcugg

SEQ ID NO: 286418 - RNA, 22 nt, Human
ugccucccggguucaagugauu

SEQ ID NO: 286419 - RNA, 21 nt, Human
ugccucggccucccaaagcgc

SEQ ID NO: 286420 - RNA, 24 nt, Human
ugccucggccucccaaagcgcugg

SEQ ID NO: 286421 - RNA, 23 nt, Human
uggagagcaguggcacaaucugg

SEQ ID NO: 286422 - RNA, 24 nt, Human
uggcacaaucugggcucacuacaa

SEQ ID NO: 286423 - RNA, 18 nt, Human
ugggauuacagacgugag

SEQ ID NO: 286424 - RNA, 19 nt, Human
ugggauuacagacgugagc

SEQ ID NO: 286425 - RNA, 21 nt, Human
ugggauuacagacgugagcca

SEQ ID NO: 286426 - RNA, 22 nt, Human
ugggauuacagacgugagccac

SEQ ID NO: 286427 - RNA, 23 nt, Human
ugggauuacagacgugagccacg

SEQ ID NO: 286428 - RNA, 27 nt, Human
ugggauuacagacgugagccacggugc

SEQ ID NO: 286429 - RNA, 21 nt, Human
ugggauugcaggugcaugcca

SEQ ID NO: 286430 - RNA, 22 nt, Human
ugggauugcaggugcaugccac

SEQ ID NO: 286431 - RNA, 24 nt, Human
ugggauugcaggugcaugccacca

SEQ ID NO: 286432 - RNA, 24 nt, Human
ugugccucagccucccgaguagcu

SEQ ID NO: 286433 - RNA, 23 nt, Human
uucaagugauucuugugccucag

SEQ ID NO: 286434 - RNA, 20 nt, Human
uuuuuguauuuuuaguacag

SEQ ID NO: 286435 - RNA, 23 nt, Human
uuuuuguauuuuuaguacagaca

SEQ ID NO: 286436 - RNA, 22 nt, Human
uuuuuuuuuuuuuuuuuuuggg

SEQ ID NO: 286437 - RNA, 22 nt, Human
aaaaugucuucugcccacccca

SEQ ID NO: 286438 - RNA, 20 nt, Human
aaacaauaaaggcuagauaa

SEQ ID NO: 286439 - RNA, 20 nt, Human
aaacccaaacaagcuaagug

SEQ ID NO: 286440 - RNA, 22 nt, Human
aaaguacuugauucuguuaagc

SEQ ID NO: 286441 - RNA, 24 nt, Human
aacagccccaguacucaugugcac

SEQ ID NO: 286442 - RNA, 18 nt, Human
aagacacugaaaaaaaca

SEQ ID NO: 286443 - RNA, 24 nt, Human
aagacacugaaaaaaacaccccgc

SEQ ID NO: 286444 - RNA, 20 nt, Human
aagcaaacccaaacaagcua

SEQ ID NO: 286445 - RNA, 21 nt, Human
aagcaaacccaaacaagcuaa

SEQ ID NO: 286446 - RNA, 20 nt, Human
aaguugcagggggcuaguuu

SEQ ID NO: 286447 - RNA, 18 nt, Human
acaaggaaaauacaugca

SEQ ID NO: 286448 - RNA, 22 nt, Human
acacacuuuaaacagaaaagcc

SEQ ID NO: 286449 - RNA, 18 nt, Human
agaaaagccugcacauuu

SEQ ID NO: 286450 - RNA, 23 nt, Human
agaaauaacuggaaaacaaucac

SEQ ID NO: 286451 - RNA, 27 nt, Human
agagacugugaaagcaaacccaaacaa

SEQ ID NO: 286452 - RNA, 23 nt, Human
agagagguguuuggagauucuug

SEQ ID NO: 286453 - RNA, 21 nt, Human
agagggcagcggcggccaggg

SEQ ID NO: 286454 - RNA, 18 nt, Human
agauaaaccacaaacuca

SEQ ID NO: 286455 - RNA, 19 nt, Human
agauaaaccacaaacucaa

SEQ ID NO: 286456 - RNA, 25 nt, Human
aggcaaaagagaaaguaaagggacc

SEQ ID NO: 286457 - RNA, 22 nt, Human
aggcuuuuaaauucauuagcuu

SEQ ID NO: 286458 - RNA, 22 nt, Human
aucaaaaacagccccaguacuc

SEQ ID NO: 286459 - RNA, 24 nt, Human
aucaaaaacagccccaguacucau

SEQ ID NO: 286460 - RNA, 19 nt, Human
caccccgcucagagaucca

SEQ ID NO: 286461 - RNA, 22 nt, Human
cacugaaaaaaacaccccgcuc

SEQ ID NO: 286462 - RNA, 20 nt, Human
cauugcacagcaguggggca

SEQ ID NO: 286463 - RNA, 23 nt, Human
ccaguacgauaauauaugcaggc

SEQ ID NO: 286464 - RNA, 18 nt, Human
cccaauauauaaugagac

SEQ ID NO: 286465 - RNA, 18 nt, Human
cggccaggggcgcagcaa

SEQ ID NO: 286466 - RNA, 25 nt, Human
cuaaaaugucuucugcccaccccag

SEQ ID NO: 286467 - RNA, 20 nt, Human
gaagagagacugugaaagca

SEQ ID NO: 286468 - RNA, 18 nt, Human
gagagggcagcggcggcc

SEQ ID NO: 286469 - RNA, 24 nt, Human
gcaucggaaaagccagcgagcgga

SEQ ID NO: 286470 - RNA, 19 nt, Human
gcuaaguguggaugugggc

SEQ ID NO: 286471 - RNA, 23 nt, Human
gcucagagauccauugaucugau

SEQ ID NO: 286472 - RNA, 24 nt, Human
uaacuagguaguauuguuuuauua

SEQ ID NO: 286473 - RNA, 21 nt, Human
uaagcauccuaccauauuaca

SEQ ID NO: 286474 - RNA, 21 nt, Human
uaauauaugcaggcuuucccc

SEQ ID NO: 286475 - RNA, 18 nt, Human
uacagaugugagugaaca

SEQ ID NO: 286476 - RNA, 24 nt, Human
uacuguggauuuuaaaaaaacaau

SEQ ID NO: 286477 - RNA, 27 nt, Human
ucaaacauuuagcacccaauauauaau

SEQ ID NO: 286478 - RNA, 25 nt, Human
ucauacauuugagaguauacuugga

SEQ ID NO: 286479 - RNA, 19 nt, Human
ucggaaaagccagcgagcg

SEQ ID NO: 286480 - RNA, 18 nt, Human
ucuaaaaugucuucugcc

SEQ ID NO: 286481 - RNA, 22 nt, Human
ucugcccaccccaguugcuuca

SEQ ID NO: 286482 - RNA, 24 nt, Human
ugaaaaaaacaccccgcucagaga

SEQ ID NO: 286483 - RNA, 24 nt, Human
ugaacugaugaguuuaguguuuug

SEQ ID NO: 286484 - RNA, 19 nt, Human
ugacugucaaccucuccuu

SEQ ID NO: 286485 - RNA, 19 nt, Human
ugagaguauacuuggaggc

SEQ ID NO: 286486 - RNA, 23 nt, Human
ugaucugaugccggaugaacuga

SEQ ID NO: 286487 - RNA, 23 nt, Human
ugcacauuuuaaaggcaaaagag

SEQ ID NO: 286488 - RNA, 24 nt, Human
uggaaaacaaucacuuuucaggcu

SEQ ID NO: 286489 - RNA, 18 nt, Human
uggaacacaaacaaaguc

SEQ ID NO: 286490 - RNA, 21 nt, Human
uggaacacaaacaaaguccua

SEQ ID NO: 286491 - RNA, 20 nt, Human
ugguggaagcaagagucuuc

SEQ ID NO: 286492 - RNA, 27 nt, Human
uguccaauauccuucaacuuacuaaca

SEQ ID NO: 286493 - RNA, 20 nt, Human
ugugggcauuucuacuucua

SEQ ID NO: 286494 - RNA, 23 nt, Human
uucugcccaccccaguugcuuca

SEQ ID NO: 286495 - RNA, 18 nt, Human
uuuaaaggcaaaagagaa

SEQ ID NO: 286496 - RNA, 24 nt, Human
uuugcaauucuuaaaauuguuuuu

SEQ ID NO: 286497 - RNA, 22 nt, Human
uuuucaggcuuuuaaauucauu

SEQ ID NO: 286498 - RNA, 24 nt, Human
cugcagaguggcaucugguauuuu

SEQ ID NO: 286499 - RNA, 22 nt, Human
cuggacaugagaaaguguucug

SEQ ID NO: 286500 - RNA, 18 nt, Human
gagaaaguguucuguucu

SEQ ID NO: 286501 - RNA, 18 nt, Human
uagaggauuuccugaguu

SEQ ID NO: 286502 - RNA, 24 nt, Human
uaguuuaguugccaaaccucuuug

SEQ ID NO: 286503 - RNA, 21 nt, Human
ugagaaaguguucuguucugc

SEQ ID NO: 286504 - RNA, 24 nt, Human
ugagugcucuuguaaucugacccu

SEQ ID NO: 286505 - RNA, 22 nt, Human
ugaguuuucgucaguaaagucu

SEQ ID NO: 286506 - RNA, 19 nt, Human
ugauucuggaggguuugaa

SEQ ID NO: 286507 - RNA, 20 nt, Human
uuagagucauuauuauuaac

SEQ ID NO: 286508 - RNA, 22 nt, Human
uuccugaguuuucgucaguaaa

SEQ ID NO: 286509 - RNA, 24 nt, Human
uucuguucugcagcuccugucuuc

SEQ ID NO: 286510 - RNA, 19 nt, Human
uuuuuuuuuuuuuguuucu

SEQ ID NO: 286511 - RNA, 22 nt, Human
uuuuuuuuuuuuuuuuuuguuu

SEQ ID NO: 286512 - RNA, 27 nt, Human
uuuuuuuuuuuuuuuuuuuuuuugggg

SEQ ID NO: 286513 - RNA, 22 nt, Human
aaacaggaaaaacaggucccca

SEQ ID NO: 286514 - RNA, 18 nt, Human
aaacagguccccaggccu

SEQ ID NO: 286515 - RNA, 23 nt, Human
acaggaaaaacagguccccaggc

SEQ ID NO: 286516 - RNA, 25 nt, Human
agcuaaguccaccguggcacccagu

SEQ ID NO: 286517 - RNA, 23 nt, Human
aggaugcucagcgccugcacggg

SEQ ID NO: 286518 - RNA, 18 nt, Human
caccccagguagcucagc

SEQ ID NO: 286519 - RNA, 18 nt, Human
cacgcccagccuccagca

SEQ ID NO: 286520 - RNA, 21 nt, Human
cacugcgcugcgcuucuccuc

SEQ ID NO: 286521 - RNA, 23 nt, Human
cauuccagaccacugugcaaacu

SEQ ID NO: 286522 - RNA, 21 nt, Human
ccacaaggggcuccucucgcc

SEQ ID NO: 286523 - RNA, 22 nt, Human
ccaccuuccucucugggccugu

SEQ ID NO: 286524 - RNA, 21 nt, Human
ccacugugcaaacucagcccu

SEQ ID NO: 286525 - RNA, 25 nt, Human
ccaggguuuucuggccaaccuguga

SEQ ID NO: 286526 - RNA, 18 nt, Human
ccccagguagcucagcuc

SEQ ID NO: 286527 - RNA, 24 nt, Human
cccccaacuuauacacacaaacga

SEQ ID NO: 286528 - RNA, 22 nt, Human
cccugaccagccccugcucucc

SEQ ID NO: 286529 - RNA, 27 nt, Human
ccuccagcauuuuucuggggggccgcc

SEQ ID NO: 286530 - RNA, 19 nt, Human
ccuggaccgggcugcaggg

SEQ ID NO: 286531 - RNA, 22 nt, Human
cugcacaggcugaaguguucug

SEQ ID NO: 286532 - RNA, 20 nt, Human
cugcgcugcgcuucuccucu

SEQ ID NO: 286533 - RNA, 20 nt, Human
cugggccuguuucuccauuu

SEQ ID NO: 286534 - RNA, 27 nt, Human
cuuggcccccaccccagguagcucagc

SEQ ID NO: 286535 - RNA, 22 nt, Human
gaaaaacagguccccaggccug

SEQ ID NO: 286536 - RNA, 19 nt, Human
gcccaugggagccuccagg

SEQ ID NO: 286537 - RNA, 22 nt, Human
gccuccagcauuuuucugggca

SEQ ID NO: 286538 - RNA, 24 nt, Human
ggaccuggaccgggcugcagggaa

SEQ ID NO: 286539 - RNA, 22 nt, Human
ggggucauccagcaugagucac

SEQ ID NO: 286540 - RNA, 24 nt, Human
ggggucauccagcaugagucacug

SEQ ID NO: 286541 - RNA, 19 nt, Human
ggggugucauugaccuuga

SEQ ID NO: 286542 - RNA, 18 nt, Human
uagcaggcaacacaaccu

SEQ ID NO: 286543 - RNA, 21 nt, Human
uagcucagcuccagacucugg

SEQ ID NO: 286544 - RNA, 21 nt, Human
ucacacugcuccuagcccaug

SEQ ID NO: 286545 - RNA, 21 nt, Human
ucacugaugguccauaucugg

SEQ ID NO: 286546 - RNA, 28 nt, Human
ucagcccucauuacuuaccaggguuuuc

SEQ ID NO: 286547 - RNA, 18 nt, Human
uccagcauuuuucugggc

SEQ ID NO: 286548 - RNA, 21 nt, Human
ucccaauauaaaccugcacag

SEQ ID NO: 286549 - RNA, 28 nt, Human
uccccaggccuggggccacgcccagccu

SEQ ID NO: 286550 - RNA, 20 nt, Human
ugaaugcacacgccuggacc

SEQ ID NO: 286551 - RNA, 19 nt, Human
ugacuuggcccccacccca

SEQ ID NO: 286552 - RNA, 26 nt, Human
ugacuuggcccccaccccagguagcu

SEQ ID NO: 286553 - RNA, 19 nt, Human
ugcacacgccuggaccugg

SEQ ID NO: 286554 - RNA, 21 nt, Human
ugcacggguuccucacucaug

SEQ ID NO: 286555 - RNA, 19 nt, Human
uuaccaggguuuucuggcc

SEQ ID NO: 286556 - RNA, 22 nt, Human
uucccaauauaaaccugcacag

SEQ ID NO: 286557 - RNA, 18 nt, Human
aaacagggucuuacugug

SEQ ID NO: 286558 - RNA, 22 nt, Human
aaagugcuccccacuucugcuu

SEQ ID NO: 286559 - RNA, 23 nt, Human
aaauaugaaggcugcccaggacc

SEQ ID NO: 286560 - RNA, 24 nt, Human
aaauugcugagauuacaggcauga

SEQ ID NO: 286561 - RNA, 22 nt, Human
aaccaacacaggccugagcaca

SEQ ID NO: 286562 - RNA, 21 nt, Human
aaggccauguguccucugcuc

SEQ ID NO: 286563 - RNA, 26 nt, Human
aaucaucccucaaaacccagcucaaa

SEQ ID NO: 286564 - RNA, 18 nt, Human
acccccuccccccagcca

SEQ ID NO: 286565 - RNA, 22 nt, Human
acccugauguugcugugccagu

SEQ ID NO: 286566 - RNA, 21 nt, Human
acuccaugcccagcugagcug

SEQ ID NO: 286567 - RNA, 18 nt, Human
acucguggagcagccccu

SEQ ID NO: 286568 - RNA, 21 nt, Human
acucuugcccuugacuggagg

SEQ ID NO: 286569 - RNA, 24 nt, Human
acugucuguguacccccucccccc

SEQ ID NO: 286570 - RNA, 24 nt, Human
acuguguugcccaggcuggucuaa

SEQ ID NO: 286571 - RNA, 22 nt, Human
agaaccaacacaggccugagca

SEQ ID NO: 286572 - RNA, 18 nt, Human
agaagcucucaccucccc

SEQ ID NO: 286573 - RNA, 18 nt, Human
agagcucuuuccugacuc

SEQ ID NO: 286574 - RNA, 22 nt, Human
agauuacaggcaugagccacug

SEQ ID NO: 286575 - RNA, 24 nt, Human
agauuacaggcaugagccacugca

SEQ ID NO: 286576 - RNA, 21 nt, Human
agcucaaaugccccuucccag

SEQ ID NO: 286577 - RNA, 18 nt, Human
aggcugcccaggaccugg

SEQ ID NO: 286578 - RNA, 21 nt, Human
auggagcauaccuggguugcc

SEQ ID NO: 286579 - RNA, 24 nt, Human
caaaugccccuucccagaagcucu

SEQ ID NO: 286580 - RNA, 24 nt, Human
caaauugcugagauuacaggcaug

SEQ ID NO: 286581 - RNA, 24 nt, Human
caaguucccacucagcccucaaca

SEQ ID NO: 286582 - RNA, 19 nt, Human
cacagcacagagcuggcaa

SEQ ID NO: 286583 - RNA, 18 nt, Human
cacaggccugagcacaag

SEQ ID NO: 286584 - RNA, 22 nt, Human
cacccgcuucauuggugacuca

SEQ ID NO: 286585 - RNA, 20 nt, Human
cacugcacuucgcccccugc

SEQ ID NO: 286586 - RNA, 19 nt, Human
cagaagcucucaccucccc

SEQ ID NO: 286587 - RNA, 21 nt, Human
cagagagcucuuuccugacuc

SEQ ID NO: 286588 - RNA, 19 nt, Human
cagagcuggcaagcagcag

SEQ ID NO: 286589 - RNA, 20 nt, Human
cagcuggauaugcauggagc

SEQ ID NO: 286590 - RNA, 21 nt, Human
cagggaggccaagaguuagca

SEQ ID NO: 286591 - RNA, 24 nt, Human
cagggucuuacuguguugcccagg

SEQ ID NO: 286592 - RNA, 22 nt, Human
cauuggcuucccacugccugga

SEQ ID NO: 286593 - RNA, 23 nt, Human
ccaaauugcugagauuacaggca

SEQ ID NO: 286594 - RNA, 24 nt, Human
ccaaauugcugagauuacaggcau

SEQ ID NO: 286595 - RNA, 23 nt, Human
ccacucguggagcagccccugcu

SEQ ID NO: 286596 - RNA, 20 nt, Human
ccacugcacuucgcccccug

SEQ ID NO: 286597 - RNA, 22 nt, Human
ccacugcacuucgcccccugcc

SEQ ID NO: 286598 - RNA, 20 nt, Human
cccacugccuggagcaucug

SEQ ID NO: 286599 - RNA, 24 nt, Human
cccccagccaugcuucccucuguc

SEQ ID NO: 286600 - RNA, 21 nt, Human
ccccggacacaauggcaaaua

SEQ ID NO: 286601 - RNA, 19 nt, Human
cccucaaaacccagcucaa

SEQ ID NO: 286602 - RNA, 21 nt, Human
cccuccauuggcuucccacug

SEQ ID NO: 286603 - RNA, 25 nt, Human
cccuccucagagagcucuuuccuga

SEQ ID NO: 286604 - RNA, 24 nt, Human
cccucugucacaacccugauguug

SEQ ID NO: 286605 - RNA, 25 nt, Human
cccuugacuggaggguagcugaagc

SEQ ID NO: 286606 - RNA, 23 nt, Human
ccuccauuggcuucccacugccu

SEQ ID NO: 286607 - RNA, 20 nt, Human
ccuccuuccuuggccuccca

SEQ ID NO: 286608 - RNA, 21 nt, Human
ccuugaugacaguacacguca

SEQ ID NO: 286609 - RNA, 25 nt, Human
cgcuuaaucccuccauuggcuuccc

SEQ ID NO: 286610 - RNA, 23 nt, Human
cucaaaugccccuucccagaagc

SEQ ID NO: 286611 - RNA, 21 nt, Human
cucccaaauugcugagauuac

SEQ ID NO: 286612 - RNA, 23 nt, Human
cucuugggcucaagcauuccucc

SEQ ID NO: 286613 - RNA, 19 nt, Human
cuggguccugugagggauc

SEQ ID NO: 286614 - RNA, 22 nt, Human
cugucacaacccugauguugcu

SEQ ID NO: 286615 - RNA, 21 nt, Human
cuucccagaagcucucaccuc

SEQ ID NO: 286616 - RNA, 22 nt, Human
cuuuacaccaaugcugacccuc

SEQ ID NO: 286617 - RNA, 18 nt, Human
gaagcucucaccuccccc

SEQ ID NO: 286618 - RNA, 21 nt, Human
gaaggcugcccaggaccugga

SEQ ID NO: 286619 - RNA, 20 nt, Human
gacacaauggcaaauaugaa

SEQ ID NO: 286620 - RNA, 23 nt, Human
gacacaauggcaaauaugaaggc

SEQ ID NO: 286621 - RNA, 18 nt, Human
gaccuggggagaggaagu

SEQ ID NO: 286622 - RNA, 22 nt, Human
gagaacccugaagcuccagucc

SEQ ID NO: 286623 - RNA, 21 nt, Human
gaggaaaccgagagaccuggg

SEQ ID NO: 286624 - RNA, 18 nt, Human
gauuacaggcaugagcca

SEQ ID NO: 286625 - RNA, 22 nt, Human
gauuacaggcaugagccacugc

SEQ ID NO: 286626 - RNA, 21 nt, Human
gcccagcacgaggcuggccca

SEQ ID NO: 286627 - RNA, 18 nt, Human
gcuaacucuugcccuuga

SEQ ID NO: 286628 - RNA, 20 nt, Human
gcucucaccucccccucuca

SEQ ID NO: 286629 - RNA, 18 nt, Human
gcucuggcccucugccug

SEQ ID NO: 286630 - RNA, 18 nt, Human
ggagaggcagcagaugag

SEQ ID NO: 286631 - RNA, 23 nt, Human
ggagcauaccuggguugcauuaa

SEQ ID NO: 286632 - RNA, 24 nt, Human
gggccaggacucgaaucccgagaa

SEQ ID NO: 286633 - RNA, 22 nt, Human
uaaauggaauaucacuccucuc

SEQ ID NO: 286634 - RNA, 21 nt, Human
uacaggcaugagccacugcac

SEQ ID NO: 286635 - RNA, 21 nt, Human
uacuguguugcccaggcuggu

SEQ ID NO: 286636 - RNA, 22 nt, Human
uacuguguugcccaggcugguc

SEQ ID NO: 286637 - RNA, 22 nt, Human
uagaaacagggucuuacugugu

SEQ ID NO: 286638 - RNA, 21 nt, Human
uagcugaagcacagcucccau

SEQ ID NO: 286639 - RNA, 20 nt, Human
ucaaaacccagcucaaaugc

SEQ ID NO: 286640 - RNA, 21 nt, Human
ucaacaucuggcucagaugcu

SEQ ID NO: 286641 - RNA, 20 nt, Human
ucagggaggccaagaguuag

SEQ ID NO: 286642 - RNA, 18 nt, Human
ucaugggcacugucugug

SEQ ID NO: 286643 - RNA, 21 nt, Human
uccagagagcucauaaucauc

SEQ ID NO: 286644 - RNA, 24 nt, Human
uccaugcccagcugagcugaacuc

SEQ ID NO: 286645 - RNA, 24 nt, Human
ucccaaauugcugagauuacaggc

SEQ ID NO: 286646 - RNA, 23 nt, Human
ucccgagaacccugaagcuccag

SEQ ID NO: 286647 - RNA, 19 nt, Human
ucccucaaaacccagcuca

SEQ ID NO: 286648 - RNA, 20 nt, Human
ucccucaaaacccagcucaa

SEQ ID NO: 286649 - RNA, 20 nt, Human
uccucugcucuggcccucug

SEQ ID NO: 286650 - RNA, 18 nt, Human
ucucaagagccaggccca

SEQ ID NO: 286651 - RNA, 22 nt, Human
ucuccagagagcucauaaucau

SEQ ID NO: 286652 - RNA, 23 nt, Human
ucuccagagagcucauaaucauc

SEQ ID NO: 286653 - RNA, 20 nt, Human
ucuccaugcccacagggucu

SEQ ID NO: 286654 - RNA, 19 nt, Human
ucuuacuguguugcccagg

SEQ ID NO: 286655 - RNA, 23 nt, Human
ucuuacuguguugcccaggcugg

SEQ ID NO: 286656 - RNA, 24 nt, Human
ucuuacuguguugcccaggcuggu

SEQ ID NO: 286657 - RNA, 24 nt, Human
ugaagcuccaguccuuuacaccaa

SEQ ID NO: 286658 - RNA, 21 nt, Human
ugacugggaccucucaagagc

SEQ ID NO: 286659 - RNA, 21 nt, Human
ugagauuacaggcaugagcca

SEQ ID NO: 286660 - RNA, 22 nt, Human
ugagauuacaggcaugagccac

SEQ ID NO: 286661 - RNA, 22 nt, Human
ugagauuacaggcaugagccac

SEQ ID NO: 286662 - RNA, 24 nt, Human
ugagauuacaggcaugagccacug

SEQ ID NO: 286663 - RNA, 24 nt, Human
ugagauuacaggcaugagccacug

SEQ ID NO: 286664 - RNA, 20 nt, Human
ugauguugcugugccagucu

SEQ ID NO: 286665 - RNA, 25 nt, Human
ugccacagcacagagcuggcaagca

SEQ ID NO: 286666 - RNA, 20 nt, Human
ugccagucuguacuuccagc

SEQ ID NO: 286667 - RNA, 24 nt, Human
ugcccaggcuggucuaaaacucuu

SEQ ID NO: 286668 - RNA, 20 nt, Human
ugcugagauuacaggcauga

SEQ ID NO: 286669 - RNA, 19 nt, Human
uggcccagcuggauaugca

SEQ ID NO: 286670 - RNA, 23 nt, Human
uggcccucugccugucugcccag

SEQ ID NO: 286671 - RNA, 23 nt, Human
uggcucagaugcucccuccucag

SEQ ID NO: 286672 - RNA, 24 nt, Human
uggggagaggaaguaacuugccac

SEQ ID NO: 286673 - RNA, 20 nt, Human
uggguugcauuaaagugcuu

SEQ ID NO: 286674 - RNA, 21 nt, Human
uguacccccuccccccagcca

SEQ ID NO: 286675 - RNA, 20 nt, Human
ugucacaacccugauguugc

SEQ ID NO: 286676 - RNA, 20 nt, Human
ugucuguguacccccucccc

SEQ ID NO: 286677 - RNA, 23 nt, Human
uguguugcccaggcuggucuaaa

SEQ ID NO: 286678 - RNA, 18 nt, Human
uguugcccaggcuggucu

SEQ ID NO: 286679 - RNA, 19 nt, Human
uguugcccaggcuggucua

SEQ ID NO: 286680 - RNA, 22 nt, Human
uucacacacgcaaggccaugug

SEQ ID NO: 286681 - RNA, 21 nt, Human
uucccacucguggagcagccc

SEQ ID NO: 286682 - RNA, 21 nt, Human
uuccgccgcuuaaucccucca

SEQ ID NO: 286683 - RNA, 23 nt, Human
uucuggguccugugagggaucuu

SEQ ID NO: 286684 - RNA, 19 nt, Human
uuguagaaacagggucuua

SEQ ID NO: 286685 - RNA, 27 nt, Human
uuuuuuuuuuuuguagaaacagggucu

SEQ ID NO: 286686 - RNA, 28 nt, Human
uuuuuuuuuuuuuuuuguagaaacaggg

SEQ ID NO: 286687 - RNA, 19 nt, Human
uuuuuuuuuuuuuuuuugu

SEQ ID NO: 286688 - RNA, 20 nt, Human
uuuuuuuuuuuuuuuuuugg

SEQ ID NO: 286689 - RNA, 23 nt, Human
aaaaaaucaguaaaaaaauaagc

SEQ ID NO: 286690 - RNA, 30 nt, Human
aacgcgcggcggcggcggcggcccuucccu

SEQ ID NO: 286691 - RNA, 19 nt, Human
acgcgcggcggcggcggcg

SEQ ID NO: 286692 - RNA, 23 nt, Human
agcgcccaccuaccuaacucagc

SEQ ID NO: 286693 - RNA, 21 nt, Human
augaaagcuugacccagaggc

SEQ ID NO: 286694 - RNA, 21 nt, Human
caguaaaaaaauaagccugga

SEQ ID NO: 286695 - RNA, 20 nt, Human
cauggccucuuuggcacuga

SEQ ID NO: 286696 - RNA, 21 nt, Human
ccucugcggcuuaggagaaca

SEQ ID NO: 286697 - RNA, 22 nt, Human
ccuuacgccauuccugggcccc

SEQ ID NO: 286698 - RNA, 23 nt, Human
cgaucgcggagcagggucggggc

SEQ ID NO: 286699 - RNA, 22 nt, Human
cggaggcucucaccugccacag

SEQ ID NO: 286700 - RNA, 20 nt, Human
cggcggcggcggcccuuccc

SEQ ID NO: 286701 - RNA, 21 nt, Human
cucuuuggcacugaaagcugg

SEQ ID NO: 286702 - RNA, 26 nt, Human
cugcagcgucugccuggcaggcaguc

SEQ ID NO: 286703 - RNA, 19 nt, Human
gcagggcugucccugggag

SEQ ID NO: 286704 - RNA, 20 nt, Human
gccauuccugggccccgcgg

SEQ ID NO: 286705 - RNA, 18 nt, Human
gccccgccaggccucgca

SEQ ID NO: 286706 - RNA, 20 nt, Human
ggcccuucccugccaggccc

SEQ ID NO: 286707 - RNA, 21 nt, Human
ggcccuucccugccaggcccg

SEQ ID NO: 286708 - RNA, 18 nt, Human
gggagggaggaaaggaag

SEQ ID NO: 286709 - RNA, 20 nt, Human
gggcuggggcugaugaaagc

SEQ ID NO: 286710 - RNA, 21 nt, Human
ggucggggccagaggccgccu

SEQ ID NO: 286711 - RNA, 25 nt, Human
uaacucagcauggccucuuuggcac

SEQ ID NO: 286712 - RNA, 21 nt, Human
uagcugcagcgucugccuggc

SEQ ID NO: 286713 - RNA, 18 nt, Human
ucccaguccugugcuguc

SEQ ID NO: 286714 - RNA, 23 nt, Human
ucccaguccugugcugucuuccu

SEQ ID NO: 286715 - RNA, 18 nt, Human
uccugggccccgcggccc

SEQ ID NO: 286716 - RNA, 21 nt, Human
uccugugcugucuuccuugau

SEQ ID NO: 286717 - RNA, 20 nt, Human
ucucggagucugggggggcc

SEQ ID NO: 286718 - RNA, 18 nt, Human
ucugcggcuuaggagaac

SEQ ID NO: 286719 - RNA, 19 nt, Human
ugagaacuuugguggagug

SEQ ID NO: 286720 - RNA, 19 nt, Human
ugagaaggguucaugggug

SEQ ID NO: 286721 - RNA, 21 nt, Human
ugggccccgcggccccgccag

SEQ ID NO: 286722 - RNA, 22 nt, Human
ugucccugggaguccggaaguu

SEQ ID NO: 286723 - RNA, 18 nt, Human
ugugggggcuggggcuga

SEQ ID NO: 286724 - RNA, 23 nt, Human
uuacgccauuccugggccccgcg

SEQ ID NO: 286725 - RNA, 19 nt, Human
uuccuugauggcagggcug

SEQ ID NO: 286726 - RNA, 20 nt, Human
uugauggcagggcugucccu

SEQ ID NO: 286727 - RNA, 25 nt, Human
aaaaaaaaaaaucgaaauauuuuaa

SEQ ID NO: 286728 - RNA, 22 nt, Human
aaaaaaacaggcuaagugggga

SEQ ID NO: 286729 - RNA, 23 nt, Human
aaaaaaaucaacuuagaagauca

SEQ ID NO: 286730 - RNA, 22 nt, Human
aaaaagacuugggaggaaaaaa

SEQ ID NO: 286731 - RNA, 22 nt, Human
aaaacagcaaaauuccugaaca

SEQ ID NO: 286732 - RNA, 26 nt, Human
aaaauuccucacuuuaaacucugccu

SEQ ID NO: 286733 - RNA, 20 nt, Human
aacaauaggagaaaaaggga

SEQ ID NO: 286734 - RNA, 22 nt, Human
aaccaaaaaguucuuuaaauau

SEQ ID NO: 286735 - RNA, 23 nt, Human
aagaaaaagacuuuuaaaaaaaa

SEQ ID NO: 286736 - RNA, 20 nt, Human
acaaaguaagcaauugucca

SEQ ID NO: 286737 - RNA, 22 nt, Human
acaaaguaagcaauuguccaca

SEQ ID NO: 286738 - RNA, 18 nt, Human
acuuccuacccucagccc

SEQ ID NO: 286739 - RNA, 18 nt, Human
acuuuuaaaagaacccac

SEQ ID NO: 286740 - RNA, 28 nt, Human
agaaaaacagcaaaauuccugaacaaaa

SEQ ID NO: 286741 - RNA, 23 nt, Human
agacacuagguaaacagaacacc

SEQ ID NO: 286742 - RNA, 23 nt, Human
agaggagcuaaaagaaaagagag

SEQ ID NO: 286743 - RNA, 23 nt, Human
aggaaaaaaaucaacuuagaaga

SEQ ID NO: 286744 - RNA, 22 nt, Human
aggucauuguugucacaacaca

SEQ ID NO: 286745 - RNA, 19 nt, Human
cacaccuggaaagugggac

SEQ ID NO: 286746 - RNA, 19 nt, Human
cacaguauuuaaucagaau

SEQ ID NO: 286747 - RNA, 21 nt, Human
caccuaggcacaucuguaagg

SEQ ID NO: 286748 - RNA, 21 nt, Human
cauucuagcuuaacacccacc

SEQ ID NO: 286749 - RNA, 21 nt, Human
cgaaauauuuuaacucaagua

SEQ ID NO: 286750 - RNA, 19 nt, Human
cuacuuccuacccucagcc

SEQ ID NO: 286751 - RNA, 18 nt, Human
cuuuuaaaagaacccaca

SEQ ID NO: 286752 - RNA, 19 nt, Human
gaaaaacagcaaaauuccu

SEQ ID NO: 286753 - RNA, 27 nt, Human
gaaaaacagcaaaauuccugaacaaaa

SEQ ID NO: 286754 - RNA, 18 nt, Human
gaaaguuaagacuaugga

SEQ ID NO: 286755 - RNA, 21 nt, Human
gggcggcgcgcucuucagccc

SEQ ID NO: 286756 - RNA, 22 nt, Human
uaaaagaaaagagaggggguug

SEQ ID NO: 286757 - RNA, 18 nt, Human
uaaacagaacaccuaggc

SEQ ID NO: 286758 - RNA, 21 nt, Human
uaaacagaacaccuaggcaca

SEQ ID NO: 286759 - RNA, 24 nt, Human
uaagaaaaacagcaaaauuccuga

SEQ ID NO: 286760 - RNA, 21 nt, Human
uaagacacuagguaaacagaa

SEQ ID NO: 286761 - RNA, 23 nt, Human
uaagacuauggaaauguguauau

SEQ ID NO: 286762 - RNA, 18 nt, Human
uagcaggaauaagaggca

SEQ ID NO: 286763 - RNA, 18 nt, Human
ucagauccagaaaacaga

SEQ ID NO: 286764 - RNA, 20 nt, Human
uccagaaaacagaguaagac

SEQ ID NO: 286765 - RNA, 22 nt, Human
uccauuaaaaaaaaaaaaaaaa

SEQ ID NO: 286766 - RNA, 26 nt, Human
uccauuaaaaaaaaaaaaaaaaucga

SEQ ID NO: 286767 - RNA, 18 nt, Human
ucuuaaaaaaacaaacau

SEQ ID NO: 286768 - RNA, 21 nt, Human
ugauaccaacagaacuuuaag

SEQ ID NO: 286769 - RNA, 22 nt, Human
uguagcaggaauaagaggcaag

SEQ ID NO: 286770 - RNA, 22 nt, Human
uguccacagaugaaacauggga

SEQ ID NO: 286771 - RNA, 21 nt, Human
uuaaacuuccagucuccuaag

SEQ ID NO: 286772 - RNA, 24 nt, Human
uuaguguccuaguuuauuacuagu

SEQ ID NO: 286773 - RNA, 24 nt, Human
uuuaaucagaaugccaauauuacc

SEQ ID NO: 286774 - RNA, 24 nt, Human
uuucagaaucuuaaaaaaacaaac

SEQ ID NO: 286775 - RNA, 21 nt, Human
aaaaaugcaagagccaugauc

SEQ ID NO: 286776 - RNA, 18 nt, Human
aaaaugcaagagccauga

SEQ ID NO: 286777 - RNA, 18 nt, Human
aaaugucuaaaaauccca

SEQ ID NO: 286778 - RNA, 23 nt, Human
aacaaauacccugaugucgaaaa

SEQ ID NO: 286779 - RNA, 25 nt, Human
aacacgguagcaagcacucuggaca

SEQ ID NO: 286780 - RNA, 19 nt, Human
accgaaaagcagaaggaag

SEQ ID NO: 286781 - RNA, 23 nt, Human
aggagaaaccucccgcgggaggg

SEQ ID NO: 286782 - RNA, 19 nt, Human
aggaggaggagcccuggcu

SEQ ID NO: 286783 - RNA, 21 nt, Human
aggaggaggagcccuggcuug

SEQ ID NO: 286784 - RNA, 19 nt, Human
aggcagcgagacuccgaac

SEQ ID NO: 286785 - RNA, 20 nt, Human
caagguggaacaaauacccu

SEQ ID NO: 286786 - RNA, 24 nt, Human
caagguggaacaaauacccugaug

SEQ ID NO: 286787 - RNA, 22 nt, Human
cacuucagagagguucccuggg

SEQ ID NO: 286788 - RNA, 20 nt, Human
cagaaggaagagacgggggu

SEQ ID NO: 286789 - RNA, 22 nt, Human
cagcgagacuccgaacacggua

SEQ ID NO: 286790 - RNA, 23 nt, Human
caggcaugggggacacccugaca

SEQ ID NO: 286791 - RNA, 21 nt, Human
ccacaggccgugcuguagaga

SEQ ID NO: 286792 - RNA, 22 nt, Human
ccaggccugugccgggccccag

SEQ ID NO: 286793 - RNA, 22 nt, Human
cccagggcuggcagccaccagc

SEQ ID NO: 286794 - RNA, 23 nt, Human
ccucccgcgggagggaggcagcg

SEQ ID NO: 286795 - RNA, 18 nt, Human
ccucuuccaggcaugggg

SEQ ID NO: 286796 - RNA, 24 nt, Human
ccugacaggauccggaagucucca

SEQ ID NO: 286797 - RNA, 18 nt, Human
ccuggcuugagggaaggg

SEQ ID NO: 286798 - RNA, 19 nt, Human
ccugugccgggccccaggg

SEQ ID NO: 286799 - RNA, 22 nt, Human
cgacacugcaggcgguacugag

SEQ ID NO: 286800 - RNA, 22 nt, Human
cgaggggucucggcagcgcccg

SEQ ID NO: 286801 - RNA, 21 nt, Human
cggaagucuccauuuacccaa

SEQ ID NO: 286802 - RNA, 22 nt, Human
cggaagucuccauuuacccaaa

SEQ ID NO: 286803 - RNA, 24 nt, Human
cuccgaggaggccuggccaaggug

SEQ ID NO: 286804 - RNA, 19 nt, Human
cuggcuugagggaagggga

SEQ ID NO: 286805 - RNA, 23 nt, Human
gaaaagcagaaggaagagacggg

SEQ ID NO: 286806 - RNA, 19 nt, Human
gaacaggccacaggccgug

SEQ ID NO: 286807 - RNA, 27 nt, Human
gcccacgacaggaggaggagcccuggc

SEQ ID NO: 286808 - RNA, 20 nt, Human
gccgggccccagggcuggca

SEQ ID NO: 286809 - RNA, 18 nt, Human
gccugugccgggccccag

SEQ ID NO: 286810 - RNA, 18 nt, Human
ggugucacuucagagagg

SEQ ID NO: 286811 - RNA, 23 nt, Human
gucgaaaaaugucuaaaaauccc

SEQ ID NO: 286812 - RNA, 18 nt, Human
gugcgcugcugcugggug

SEQ ID NO: 286813 - RNA, 18 nt, Human
uagagaggccagugguca

SEQ ID NO: 286814 - RNA, 19 nt, Human
uagagaggccaguggucac

SEQ ID NO: 286815 - RNA, 21 nt, Human
uagcaagcacucuggacagac

SEQ ID NO: 286816 - RNA, 18 nt, Human
ucaaaaagaggagaaacc

SEQ ID NO: 286817 - RNA, 18 nt, Human
ucaagggucgugguucug

SEQ ID NO: 286818 - RNA, 24 nt, Human
ucacaaugagcccacgacaggagg

SEQ ID NO: 286819 - RNA, 20 nt, Human
ucagcgucugauucagcucc

SEQ ID NO: 286820 - RNA, 23 nt, Human
ucagcuccagcauccuuggccac

SEQ ID NO: 286821 - RNA, 24 nt, Human
uccaaaaaccgaaaagcagaagga

SEQ ID NO: 286822 - RNA, 21 nt, Human
uccccacccgggagucaaggg

SEQ ID NO: 286823 - RNA, 25 nt, Human
ucgaaaaaugucuaaaaaucccaca

SEQ ID NO: 286824 - RNA, 24 nt, Human
ucuggacagacucauguaugaaag

SEQ ID NO: 286825 - RNA, 22 nt, Human
ugacaggauccggaagucucca

SEQ ID NO: 286826 - RNA, 22 nt, Human
ugaggugucacuucagagaggu

SEQ ID NO: 286827 - RNA, 23 nt, Human
uggccaagguggaacaaauaccc

SEQ ID NO: 286828 - RNA, 24 nt, Human
uggccaagguggaacaaauacccu

SEQ ID NO: 286829 - RNA, 20 nt, Human
ugugaaauagaaaugccuga

SEQ ID NO: 286830 - RNA, 21 nt, Human
aaaaccuuucugccuccuaga

SEQ ID NO: 286831 - RNA, 19 nt, Human
aaacucaaaaaacccuaug

SEQ ID NO: 286832 - RNA, 20 nt, Human
aaagaacagacauaaaccgg

SEQ ID NO: 286833 - RNA, 20 nt, Human
aaccuagccacccaacuggc

SEQ ID NO: 286834 - RNA, 20 nt, Human
aagcaggauccgggguggac

SEQ ID NO: 286835 - RNA, 18 nt, Human
aaggcacaucauuauucu

SEQ ID NO: 286836 - RNA, 22 nt, Human
aaugcauggccccugcauccuu

SEQ ID NO: 286837 - RNA, 22 nt, Human
acaauccauuguaaggcacauc

SEQ ID NO: 286838 - RNA, 20 nt, Human
acaccugggcccugcaccuc

SEQ ID NO: 286839 - RNA, 21 nt, Human
acagaccagggauaaaaacaa

SEQ ID NO: 286840 - RNA, 19 nt, Human
accacucuuaaguguaccg

SEQ ID NO: 286841 - RNA, 19 nt, Human
accagggauaaaaacaaca

SEQ ID NO: 286842 - RNA, 18 nt, Human
acccuaugucguuaccug

SEQ ID NO: 286843 - RNA, 19 nt, Human
agaaaaccuuucugccucc

SEQ ID NO: 286844 - RNA, 19 nt, Human
agacagcaaaucagcccaa

SEQ ID NO: 286845 - RNA, 25 nt, Human
agacagcaaaucagcccaaagaaca

SEQ ID NO: 286846 - RNA, 19 nt, Human
agacaggaaaaaaaaucuu

SEQ ID NO: 286847 - RNA, 20 nt, Human
agaccccgcagccuggcucc

SEQ ID NO: 286848 - RNA, 22 nt, Human
agagaauuuacucuuugcaaaa

SEQ ID NO: 286849 - RNA, 23 nt, Human
agccuggcuccaugcucucaaca

SEQ ID NO: 286850 - RNA, 23 nt, Human
agcugagcucaaaugcugacccc

SEQ ID NO: 286851 - RNA, 19 nt, Human
aggaggaggagggcuggcc

SEQ ID NO: 286852 - RNA, 18 nt, Human
aggaugcaaaaugaggca

SEQ ID NO: 286853 - RNA, 25 nt, Human
aggcuggagugcaguggcgugaucu

SEQ ID NO: 286854 - RNA, 19 nt, Human
agugcaguggcgugaucuc

SEQ ID NO: 286855 - RNA, 20 nt, Human
agugcaguggcgugaucucg

SEQ ID NO: 286856 - RNA, 23 nt, Human
agugcaguggcgugaucucggcu

SEQ ID NO: 286857 - RNA, 24 nt, Human
agugcaguggcgugaucucggcuc

SEQ ID NO: 286858 - RNA, 19 nt, Human
auccagacaguugcugagg

SEQ ID NO: 286859 - RNA, 20 nt, Human
auggaagacugcucauucca

SEQ ID NO: 286860 - RNA, 20 nt, Human
caaaacuaagggaucugaaa

SEQ ID NO: 286861 - RNA, 21 nt, Human
caaagaacagacauaaaccgg

SEQ ID NO: 286862 - RNA, 25 nt, Human
caaccuagccacccaacuggcccag

SEQ ID NO: 286863 - RNA, 21 nt, Human
caagauccagacgagacugac

SEQ ID NO: 286864 - RNA, 18 nt, Human
caaggggggaaaugaggu

SEQ ID NO: 286865 - RNA, 19 nt, Human
caaggggggaaaugaggug

SEQ ID NO: 286866 - RNA, 21 nt, Human
caccuacacugagacucaggc

SEQ ID NO: 286867 - RNA, 18 nt, Human
cagccaggcaccaccuuc

SEQ ID NO: 286868 - RNA, 19 nt, Human
cagccaggcaccaccuucc

SEQ ID NO: 286869 - RNA, 24 nt, Human
cagccuucccuccccaugcgcucc

SEQ ID NO: 286870 - RNA, 19 nt, Human
caggaggaacaaaaggcuc

SEQ ID NO: 286871 - RNA, 21 nt, Human
cauaaaccggcgcuuccuccc

SEQ ID NO: 286872 - RNA, 24 nt, Human
cauaaaccggcgcuuccucccucc

SEQ ID NO: 286873 - RNA, 21 nt, Human
caucuggacaaaagcaggauc

SEQ ID NO: 286874 - RNA, 23 nt, Human
cauuguaaggcacaucauuauuc

SEQ ID NO: 286875 - RNA, 20 nt, Human
ccaaagaacagacauaaacc

SEQ ID NO: 286876 - RNA, 24 nt, Human
ccaagacaggaaaaaaaaucuuua

SEQ ID NO: 286877 - RNA, 21 nt, Human
ccacacccaugaauucacuaa

SEQ ID NO: 286878 - RNA, 26 nt, Human
ccaguggccugucucuaagggcgacc

SEQ ID NO: 286879 - RNA, 21 nt, Human
cccaaagaacagacauaaacc

SEQ ID NO: 286880 - RNA, 21 nt, Human
cccaagacaggaaaaaaaauc

SEQ ID NO: 286881 - RNA, 23 nt, Human
cccacacagugaaucugugagau

SEQ ID NO: 286882 - RNA, 19 nt, Human
cccaugcgcuccacaugcg

SEQ ID NO: 286883 - RNA, 21 nt, Human
cccauguacacacagcuccua

SEQ ID NO: 286884 - RNA, 25 nt, Human
ccccagcacaccugggcccugcacc

SEQ ID NO: 286885 - RNA, 18 nt, Human
cccccuccucagagccca

SEQ ID NO: 286886 - RNA, 21 nt, Human
ccccgcagccuggcuccaugc

SEQ ID NO: 286887 - RNA, 19 nt, Human
ccccugcauccuuaccccc

SEQ ID NO: 286888 - RNA, 20 nt, Human
cccugcaccucagacgcugc

SEQ ID NO: 286889 - RNA, 18 nt, Human
ccggagcccugcacccca

SEQ ID NO: 286890 - RNA, 24 nt, Human
ccggagcccugcaccccagccuuc

SEQ ID NO: 286891 - RNA, 19 nt, Human
ccgugaacuugggcaccca

SEQ ID NO: 286892 - RNA, 18 nt, Human
ccuauuguccagcauccu

SEQ ID NO: 286893 - RNA, 21 nt, Human
ccucccaucaccacagcucgg

SEQ ID NO: 286894 - RNA, 18 nt, Human
ccucccucccaucaccac

SEQ ID NO: 286895 - RNA, 24 nt, Human
ccucuugggacuauugaucagggc

SEQ ID NO: 286896 - RNA, 21 nt, Human
ccugcacaucugugcugcugu

SEQ ID NO: 286897 - RNA, 21 nt, Human
ccuggcccaggccuggccugu

SEQ ID NO: 286898 - RNA, 20 nt, Human
ccugggcccugcaccucaga

SEQ ID NO: 286899 - RNA, 24 nt, Human
cgcccaggcuggagugcaguggcg

SEQ ID NO: 286900 - RNA, 19 nt, Human
cggcucacugcaaccucac

SEQ ID NO: 286901 - RNA, 26 nt, Human
cuaaaacacaauccauuguaaggcac

SEQ ID NO: 286902 - RNA, 19 nt, Human
cucagagcccacaagcuuc

SEQ ID NO: 286903 - RNA, 23 nt, Human
cuccagggagguguaggcgcucc

SEQ ID NO: 286904 - RNA, 22 nt, Human
cucggcucacugcaaccucaac

SEQ ID NO: 286905 - RNA, 24 nt, Human
cucucucugucgcccaggcuggag

SEQ ID NO: 286906 - RNA, 24 nt, Human
cucucugucgcccaggcuggagug

SEQ ID NO: 286907 - RNA, 18 nt, Human
cugcaccucagacgcugc

SEQ ID NO: 286908 - RNA, 18 nt, Human
cugcauccuuacccccuc

SEQ ID NO: 286909 - RNA, 24 nt, Human
cuggacaaaagcaggauccggggu

SEQ ID NO: 286910 - RNA, 20 nt, Human
cuggcuccuggcagacuccu

SEQ ID NO: 286911 - RNA, 19 nt, Human
cuuaaguguaccguuaccu

SEQ ID NO: 286912 - RNA, 21 nt, Human
cuuccggagccaugcgcugcc

SEQ ID NO: 286913 - RNA, 21 nt, Human
gaaaccaaacugggacaggag

SEQ ID NO: 286914 - RNA, 21 nt, Human
gaccuagaccaaggccucagu

SEQ ID NO: 286915 - RNA, 24 nt, Human
gagacagcaaaucagcccaaagaa

SEQ ID NO: 286916 - RNA, 18 nt, Human
gagcaggcccggagcccu

SEQ ID NO: 286917 - RNA, 24 nt, Human
gagcaggcgagcccgagcacggcc

SEQ ID NO: 286918 - RNA, 19 nt, Human
gagcucaaaugcugacccc

SEQ ID NO: 286919 - RNA, 21 nt, Human
gagcugagcaggcgagcccga

SEQ ID NO: 286920 - RNA, 23 nt, Human
gagguggccgcuagucccgaccc

SEQ ID NO: 286921 - RNA, 18 nt, Human
gaucauagcugagcucaa

SEQ ID NO: 286922 - RNA, 19 nt, Human
gauuccgaggaggaggagg

SEQ ID NO: 286923 - RNA, 20 nt, Human
gcacaccugggcccugcacc

SEQ ID NO: 286924 - RNA, 19 nt, Human
gccaggcaccaccuuccuu

SEQ ID NO: 286925 - RNA, 20 nt, Human
gcccaggcuggagugcagug

SEQ ID NO: 286926 - RNA, 24 nt, Human
gcccaggcuggagugcaguggcgu

SEQ ID NO: 286927 - RNA, 25 nt, Human
gcccugcaccccagccuucccuccc

SEQ ID NO: 286928 - RNA, 19 nt, Human
gcuccuggcagacuccugg

SEQ ID NO: 286929 - RNA, 19 nt, Human
gcuggagugcaguggcgug

SEQ ID NO: 286930 - RNA, 23 nt, Human
ggaaaggccuggagagaccuaga

SEQ ID NO: 286931 - RNA, 21 nt, Human
ggacaaaagcaggauccgggg

SEQ ID NO: 286932 - RNA, 19 nt, Human
ggacaggaggaacaaaagg

SEQ ID NO: 286933 - RNA, 20 nt, Human
ggaccaagauccagacgaga

SEQ ID NO: 286934 - RNA, 20 nt, Human
ggcaccaccuuccuuccaaa

SEQ ID NO: 286935 - RNA, 26 nt, Human
ggcccggagcccugcaccccagccuu

SEQ ID NO: 286936 - RNA, 22 nt, Human
ggcuggagugcaguggcgugau

SEQ ID NO: 286937 - RNA, 18 nt, Human
gggagguguaggcgcucc

SEQ ID NO: 286938 - RNA, 20 nt, Human
gguauucauggcauccaggg

SEQ ID NO: 286939 - RNA, 18 nt, Human
gugaacuugggcacccaa

SEQ ID NO: 286940 - RNA, 22 nt, Human
gugaacuugggcacccaaaacu

SEQ ID NO: 286941 - RNA, 21 nt, Human
gugcaggucugagcagaggcu

SEQ ID NO: 286942 - RNA, 30 nt, Human
uaaaauacauccacagcaguuuacaacucu

SEQ ID NO: 286943 - RNA, 22 nt, Human
uaaauaaaauacauccacagca

SEQ ID NO: 286944 - RNA, 21 nt, Human
uaagugacuggugcuccgagg

SEQ ID NO: 286945 - RNA, 24 nt, Human
uaauucuaucacggcccacaccca

SEQ ID NO: 286946 - RNA, 18 nt, Human
uacagacaccuacacuga

SEQ ID NO: 286947 - RNA, 22 nt, Human
uagaaacccaggauuccgagga

SEQ ID NO: 286948 - RNA, 21 nt, Human
uagcugagcucaaaugcugac

SEQ ID NO: 286949 - RNA, 18 nt, Human
uagcuuggcuguagugac

SEQ ID NO: 286950 - RNA, 19 nt, Human
ucaacggugcuuuuuucug

SEQ ID NO: 286951 - RNA, 19 nt, Human
ucaaggucaguggugcaaa

SEQ ID NO: 286952 - RNA, 20 nt, Human
ucacugcaaccucaacgggg

SEQ ID NO: 286953 - RNA, 23 nt, Human
ucacugcaaccucaacgggggcc

SEQ ID NO: 286954 - RNA, 23 nt, Human
ucacugcaaccucaacggggguc

SEQ ID NO: 286955 - RNA, 18 nt, Human
ucagccucuccauuuagc

SEQ ID NO: 286956 - RNA, 22 nt, Human
ucagccucuccauuuagcucuc

SEQ ID NO: 286957 - RNA, 23 nt, Human
ucagccucuccauuuagcucuca

SEQ ID NO: 286958 - RNA, 22 nt, Human
ucaggagagggucaaacucaaa

SEQ ID NO: 286959 - RNA, 18 nt, Human
ucaggauuugaacccaga

SEQ ID NO: 286960 - RNA, 18 nt, Human
uccaaaagccuuguuucu

SEQ ID NO: 286961 - RNA, 23 nt, Human
uccagcauccuauggcccauucc

SEQ ID NO: 286962 - RNA, 23 nt, Human
uccccuagguauucauggcaucc

SEQ ID NO: 286963 - RNA, 19 nt, Human
ucccuaagggacugccucc

SEQ ID NO: 286964 - RNA, 21 nt, Human
uccguggaaauggucuccucc

SEQ ID NO: 286965 - RNA, 18 nt, Human
uccuaggagucggagggu

SEQ ID NO: 286966 - RNA, 23 nt, Human
uccucagagcccacaagcuuccg

SEQ ID NO: 286967 - RNA, 24 nt, Human
ucgcccaggcuggagugcaguggc

SEQ ID NO: 286968 - RNA, 23 nt, Human
ucggggcuuugucaccccagcac

SEQ ID NO: 286969 - RNA, 19 nt, Human
ucucagaaaaccuuucugc

SEQ ID NO: 286970 - RNA, 18 nt, Human
ucucuaagcacuguggcu

SEQ ID NO: 286971 - RNA, 23 nt, Human
ucucucucugucgcccaggcugg

SEQ ID NO: 286972 - RNA, 24 nt, Human
ucucucucugucgcccaggcugga

SEQ ID NO: 286973 - RNA, 24 nt, Human
ucucucugucgcccaggcuggagu

SEQ ID NO: 286974 - RNA, 19 nt, Human
ucucugucgcccaggcugg

SEQ ID NO: 286975 - RNA, 25 nt, Human
ucucugucgcccaggcuggagugca

SEQ ID NO: 286976 - RNA, 24 nt, Human
ucugucgcccaggcuggagugcag

SEQ ID NO: 286977 - RNA, 22 nt, Human
ucugugcugcugugacugggug

SEQ ID NO: 286978 - RNA, 23 nt, Human
ucuguuuguuuguuuguuuuugu

SEQ ID NO: 286979 - RNA, 19 nt, Human
ugacagagcuucuauuccc

SEQ ID NO: 286980 - RNA, 21 nt, Human
ugacuggugcuccgaggccca

SEQ ID NO: 286981 - RNA, 22 nt, Human
ugagauggagucucucucuguc

SEQ ID NO: 286982 - RNA, 22 nt, Human
ugagcagaggcuuucggaguga

SEQ ID NO: 286983 - RNA, 21 nt, Human
ugagcaggcgagcccgagcac

SEQ ID NO: 286984 - RNA, 21 nt, Human
ugcagccaggcaccaccuucc

SEQ ID NO: 286985 - RNA, 22 nt, Human
ugcaguggcgugaucucggcuc

SEQ ID NO: 286986 - RNA, 19 nt, Human
ugccaugaugucauuuugu

SEQ ID NO: 286987 - RNA, 24 nt, Human
uggaauaaacaaaauaugcuaaug

SEQ ID NO: 286988 - RNA, 19 nt, Human
uggaauggaagacugcuca

SEQ ID NO: 286989 - RNA, 19 nt, Human
uggagugcaguggcgugau

SEQ ID NO: 286990 - RNA, 23 nt, Human
uggagugcaguggcgugaucucg

SEQ ID NO: 286991 - RNA, 24 nt, Human
uggagugcaguggcgugaucucgg

SEQ ID NO: 286992 - RNA, 19 nt, Human
uggaugcagccaggcacca

SEQ ID NO: 286993 - RNA, 18 nt, Human
uggcccaggccuggccug

SEQ ID NO: 286994 - RNA, 22 nt, Human
uggcccaggccuggccuguguc

SEQ ID NO: 286995 - RNA, 22 nt, Human
uggccccugcauccuuaccccc

SEQ ID NO: 286996 - RNA, 20 nt, Human
uggcgugaucucggcucacu

SEQ ID NO: 286997 - RNA, 18 nt, Human
uggggagagaaguguggg

SEQ ID NO: 286998 - RNA, 20 nt, Human
uggggagagaagugugggcc

SEQ ID NO: 286999 - RNA, 24 nt, Human
uggggagagaagugugggccucca

SEQ ID NO: 287000 - RNA, 20 nt, Human
uggucaaggggggaaaugag

SEQ ID NO: 287001 - RNA, 22 nt, Human
uuagcuuggcuguagugaccac

SEQ ID NO: 287002 - RNA, 24 nt, Human
uuauucuucucuggcagguuuucc

SEQ ID NO: 287003 - RNA, 19 nt, Human
uucacuaaguaauuaucac

SEQ ID NO: 287004 - RNA, 21 nt, Human
uuguccugcccauguacacac

SEQ ID NO: 287005 - RNA, 21 nt, Human
uuguuuguuuguuuuuguuuu

SEQ ID NO: 287006 - RNA, 19 nt, Human
uuuacagacaccuacacug

SEQ ID NO: 287007 - RNA, 21 nt, Human
uuuacccacacagugaaucug

SEQ ID NO: 287008 - RNA, 24 nt, Human
uuucucagaaaaccuuucugccuc

SEQ ID NO: 287009 - RNA, 19 nt, Human
uuugaacccagaccccgca

SEQ ID NO: 287010 - RNA, 18 nt, Human
aaaacgccuuuccaccuc

SEQ ID NO: 287011 - RNA, 24 nt, Human
aaagugcugggauuacaggcguga

SEQ ID NO: 287012 - RNA, 23 nt, Human
aagagcaacaggucacuccugaa

SEQ ID NO: 287013 - RNA, 19 nt, Human
aaguagcugggacuauagg

SEQ ID NO: 287014 - RNA, 20 nt, Human
aaguagcugggacuauaggc

SEQ ID NO: 287015 - RNA, 19 nt, Human
aagugcugggauuacaggc

SEQ ID NO: 287016 - RNA, 19 nt, Human
aagugcugggauuacaggc

SEQ ID NO: 287017 - RNA, 26 nt, Human
aagugcugggauuacaggcgugagcc

SEQ ID NO: 287018 - RNA, 24 nt, Human
aaguuuucauuuucaguccauacu

SEQ ID NO: 287019 - RNA, 20 nt, Human
acaggguuucgccauguugg

SEQ ID NO: 287020 - RNA, 21 nt, Human
acaggguuucgccauguuggu

SEQ ID NO: 287021 - RNA, 23 nt, Human
acaggguuucgccauguugguua

SEQ ID NO: 287022 - RNA, 24 nt, Human
acaggguuucgccauguugguuag

SEQ ID NO: 287023 - RNA, 19 nt, Human
acccaggcuggagugcagu

SEQ ID NO: 287024 - RNA, 25 nt, Human
acccgccucagccucccaaagugcu

SEQ ID NO: 287025 - RNA, 24 nt, Human
accuccaucucagacuuguagagg

SEQ ID NO: 287026 - RNA, 22 nt, Human
acuccaccacacccauccgagc

SEQ ID NO: 287027 - RNA, 18 nt, Human
agacaggguuucgccaug

SEQ ID NO: 287028 - RNA, 18 nt, Human
agacaggguuucgccaug

SEQ ID NO: 287029 - RNA, 21 nt, Human
agcgggcaggcaggcgagagc

SEQ ID NO: 287030 - RNA, 21 nt, Human
aggcacaaaccaccaggccug

SEQ ID NO: 287031 - RNA, 22 nt, Human
aggcaggcgagagcgagaagcu

SEQ ID NO: 287032 - RNA, 25 nt, Human
aggcuggagugcaguggcacaaucu

SEQ ID NO: 287033 - RNA, 24 nt, Human
aggugauccacccgccucagccuc

SEQ ID NO: 287034 - RNA, 21 nt, Human
agugcaguggcacaaucucag

SEQ ID NO: 287035 - RNA, 18 nt, Human
agugcugggauuacaggc

SEQ ID NO: 287036 - RNA, 25 nt, Human
auucugucacccaggcuggagugca

SEQ ID NO: 287037 - RNA, 23 nt, Human
auuuuuguaguuuuuaguagaga

SEQ ID NO: 287038 - RNA, 24 nt, Human
caaagugcugggauuacaggcgug

SEQ ID NO: 287039 - RNA, 24 nt, Human
caaccuccaccucccggguccaag

SEQ ID NO: 287040 - RNA, 22 nt, Human
caagcaacucuccugccucagc

SEQ ID NO: 287041 - RNA, 27 nt, Human
caagcaacucuccugccucagccuccc

SEQ ID NO: 287042 - RNA, 18 nt, Human
caccacacccauccgagc

SEQ ID NO: 287043 - RNA, 19 nt, Human
caccacacccauccgagcc

SEQ ID NO: 287044 - RNA, 24 nt, Human
caccaggccuggcucauuuuugua

SEQ ID NO: 287045 - RNA, 23 nt, Human
cacccgccucagccucccaaagu

SEQ ID NO: 287046 - RNA, 23 nt, Human
cacuccaccacacccauccgagc

SEQ ID NO: 287047 - RNA, 21 nt, Human
cacugcaaccuccaccucccg

SEQ ID NO: 287048 - RNA, 23 nt, Human
cacugcaaccuccaccucccggg

SEQ ID NO: 287049 - RNA, 19 nt, Human
cagaguccccucgauccuc

SEQ ID NO: 287050 - RNA, 24 nt, Human
caggguuucgccauguugguuagg

SEQ ID NO: 287051 - RNA, 24 nt, Human
cauucugucacccaggcuggagug

SEQ ID NO: 287052 - RNA, 20 nt, Human
ccaaagugcugggauuacag

SEQ ID NO: 287053 - RNA, 22 nt, Human
ccaaagugcugggauuacaggc

SEQ ID NO: 287054 - RNA, 22 nt, Human
ccaaagugcugggauuacaggc

SEQ ID NO: 287055 - RNA, 24 nt, Human
ccaaagugcugggauuacaggcgu

SEQ ID NO: 287056 - RNA, 26 nt, Human
ccacccgccucagccucccaaagugc

SEQ ID NO: 287057 - RNA, 21 nt, Human
ccaccucacugaagaaggcac

SEQ ID NO: 287058 - RNA, 26 nt, Human
ccaccucccggguccaagcaacucuu

SEQ ID NO: 287059 - RNA, 19 nt, Human
ccauguugguuaggcuggu

SEQ ID NO: 287060 - RNA, 19 nt, Human
ccauguugguuaggcuggu

SEQ ID NO: 287061 - RNA, 18 nt, Human
cccaaguagcugggacua

SEQ ID NO: 287062 - RNA, 24 nt, Human
cccaaguagcugggacuauaggca

SEQ ID NO: 287063 - RNA, 19 nt, Human
ccccugagccgccgccgcc

SEQ ID NO: 287064 - RNA, 19 nt, Human
ccccugagccgccgccgcc

SEQ ID NO: 287065 - RNA, 20 nt, Human
ccccugagccgccgccgccu

SEQ ID NO: 287066 - RNA, 23 nt, Human
ccccugagccgccgccgccucug

SEQ ID NO: 287067 - RNA, 23 nt, Human
cccggguccaagcaacucuccug

SEQ ID NO: 287068 - RNA, 19 nt, Human
cccugagccgccgccgccu

SEQ ID NO: 287069 - RNA, 24 nt, Human
ccgccucagccucccaaagugcug

SEQ ID NO: 287070 - RNA, 21 nt, Human
ccucuccugagcugacgagac

SEQ ID NO: 287071 - RNA, 22 nt, Human
ccucucggccgccagacucuag

SEQ ID NO: 287072 - RNA, 23 nt, Human
ccuuuagcucugcauccuggacc

SEQ ID NO: 287073 - RNA, 21 nt, Human
cgcagggcacgcugggacaac

SEQ ID NO: 287074 - RNA, 23 nt, Human
cgccauguugguuaggcugguuc

SEQ ID NO: 287075 - RNA, 24 nt, Human
cgccucagccucccaaagugcugg

SEQ ID NO: 287076 - RNA, 22 nt, Human
cgcgcgggcugaggcgcagggc

SEQ ID NO: 287077 - RNA, 21 nt, Human
cgcgggcugaggcgcagggca

SEQ ID NO: 287078 - RNA, 21 nt, Human
cgugaccucaggugauccacc

SEQ ID NO: 287079 - RNA, 24 nt, Human
cucacugcaaccuccaccucccgg

SEQ ID NO: 287080 - RNA, 24 nt, Human
cucagccucccaaguagcugggac

SEQ ID NO: 287081 - RNA, 24 nt, Human
cucauucugucacccaggcuggag

SEQ ID NO: 287082 - RNA, 21 nt, Human
cuccugaaaacauggaguaga

SEQ ID NO: 287083 - RNA, 27 nt, Human
cucuccugccucagccucccaaguagc

SEQ ID NO: 287084 - RNA, 23 nt, Human
cugagccgccgccgccucugucu

SEQ ID NO: 287085 - RNA, 23 nt, Human
cugcaaccuccaccucccggguc

SEQ ID NO: 287086 - RNA, 24 nt, Human
cugcagccucguuuccccugagcc

SEQ ID NO: 287087 - RNA, 23 nt, Human
cugccucagccucccaaguagcu

SEQ ID NO: 287088 - RNA, 20 nt, Human
cugggacaacuaguccucuc

SEQ ID NO: 287089 - RNA, 24 nt, Human
cuuccuacuaccaccacugcagcc

SEQ ID NO: 287090 - RNA, 24 nt, Human
gaccucaggugauccacccgccuc

SEQ ID NO: 287091 - RNA, 21 nt, Human
gagaaagggaauauuaagagc

SEQ ID NO: 287092 - RNA, 23 nt, Human
gagaacauccacagcauauacuu

SEQ ID NO: 287093 - RNA, 18 nt, Human
gagagcgagaagcugcga

SEQ ID NO: 287094 - RNA, 18 nt, Human
gauuacaggcgugagcca

SEQ ID NO: 287095 - RNA, 20 nt, Human
gauuacaggcgugagccacc

SEQ ID NO: 287096 - RNA, 22 nt, Human
gauuacaggcgugagccaccgc

SEQ ID NO: 287097 - RNA, 18 nt, Human
gcagggcacgcugggaca

SEQ ID NO: 287098 - RNA, 24 nt, Human
gccauguugguuaggcugguucug

SEQ ID NO: 287099 - RNA, 20 nt, Human
gccucagccucccaaguagc

SEQ ID NO: 287100 - RNA, 21 nt, Human
gccuuuagcucugcauccugg

SEQ ID NO: 287101 - RNA, 19 nt, Human
gcuggagugcaguggcaca

SEQ ID NO: 287102 - RNA, 24 nt, Human
ggcugguucugaacucgugaccuc

SEQ ID NO: 287103 - RNA, 25 nt, Human
gggaauauuaagagcaaccgguacc

SEQ ID NO: 287104 - RNA, 22 nt, Human
ggguuucgccauguugguuagg

SEQ ID NO: 287105 - RNA, 24 nt, Human
gugauccacccgccucagccuccc

SEQ ID NO: 287106 - RNA, 25 nt, Human
uaaacugggcaacaaauucaccccc

SEQ ID NO: 287107 - RNA, 19 nt, Human
uaaaguaaacggcauggca

SEQ ID NO: 287108 - RNA, 20 nt, Human
uaaauagugguucucugucc

SEQ ID NO: 287109 - RNA, 23 nt, Human
uacaggcgugagccaccgcgccc

SEQ ID NO: 287110 - RNA, 23 nt, Human
uaccucaaauucagcuuuuucau

SEQ ID NO: 287111 - RNA, 19 nt, Human
uagaaaaaaaccugaugac

SEQ ID NO: 287112 - RNA, 22 nt, Human
uagagacaggguuucgccaugu

SEQ ID NO: 287113 - RNA, 24 nt, Human
uaguagagacaggguuucgccaug

SEQ ID NO: 287114 - RNA, 22 nt, Human
ucacccaggcuggagugcagug

SEQ ID NO: 287115 - RNA, 23 nt, Human
ucacugcaaccuccaccucccgg

SEQ ID NO: 287116 - RNA, 24 nt, Human
ucacugcaaccuccaccucccggg

SEQ ID NO: 287117 - RNA, 25 nt, Human
ucacugcaaccuccaccucccgggu

SEQ ID NO: 287118 - RNA, 27 nt, Human
ucacugcaaccuccaccucccgggucc

SEQ ID NO: 287119 - RNA, 20 nt, Human
ucagccucccaaguagcugg

SEQ ID NO: 287120 - RNA, 24 nt, Human
ucauucugucacccaggcuggagu

SEQ ID NO: 287121 - RNA, 25 nt, Human
ucauuuuuguaguuuuuaguagaga

SEQ ID NO: 287122 - RNA, 24 nt, Human
uccaagcaacucuccugccucagc

SEQ ID NO: 287123 - RNA, 21 nt, Human
uccacccgccucagccuccca

SEQ ID NO: 287124 - RNA, 24 nt, Human
ucccaaagugcugggauuacaggc

SEQ ID NO: 287125 - RNA, 24 nt, Human
ucccaaguagcugggacuauaggc

SEQ ID NO: 287126 - RNA, 23 nt, Human
ucccagccacaggcuguggucag

SEQ ID NO: 287127 - RNA, 24 nt, Human
uccccucgauccucgaggagaggg

SEQ ID NO: 287128 - RNA, 19 nt, Human
ucccggguccaagcaacuc

SEQ ID NO: 287129 - RNA, 21 nt, Human
ucccggguccaagcaacucuc

SEQ ID NO: 287130 - RNA, 24 nt, Human
ucccggguccaagcaacucuccug

SEQ ID NO: 287131 - RNA, 18 nt, Human
ucgccauguugguuaggc

SEQ ID NO: 287132 - RNA, 22 nt, Human
ucgccauguugguuaggcuggu

SEQ ID NO: 287133 - RNA, 23 nt, Human
ucucauucugucacccaggcugg

SEQ ID NO: 287134 - RNA, 24 nt, Human
ucucauucugucacccaggcugga

SEQ ID NO: 287135 - RNA, 18 nt, Human
ucugucacccaggcugga

SEQ ID NO: 287136 - RNA, 24 nt, Human
ucugucacccaggcuggagugcag

SEQ ID NO: 287137 - RNA, 20 nt, Human
ucuguccugcauccuuggcc

SEQ ID NO: 287138 - RNA, 19 nt, Human
ucugucucccuucccagcc

SEQ ID NO: 287139 - RNA, 24 nt, Human
ucuuuuuuuucuuuuucuggguuu

SEQ ID NO: 287140 - RNA, 20 nt, Human
ugaccucaggugauccaccc

SEQ ID NO: 287141 - RNA, 21 nt, Human
ugaccucaggugauccacccg

SEQ ID NO: 287142 - RNA, 24 nt, Human
ugaccucaggugauccacccgccu

SEQ ID NO: 287143 - RNA, 20 nt, Human
ugcagcaguucauguuuggc

SEQ ID NO: 287144 - RNA, 22 nt, Human
ugcaguggcacaaucucagcuc

SEQ ID NO: 287145 - RNA, 24 nt, Human
ugccucagccucccaaguagcugg

SEQ ID NO: 287146 - RNA, 24 nt, Human
ugcugggauuacaggcgugagcca

SEQ ID NO: 287147 - RNA, 18 nt, Human
uggagugcaguggcacaa

SEQ ID NO: 287148 - RNA, 23 nt, Human
uggagugcaguggcacaaucuca

SEQ ID NO: 287149 - RNA, 24 nt, Human
uggagugcaguggcacaaucucag

SEQ ID NO: 287150 - RNA, 24 nt, Human
uggcacaaucucagcucacugcaa

SEQ ID NO: 287151 - RNA, 24 nt, Human
ugggacuauaggcacaaaccacca

SEQ ID NO: 287152 - RNA, 18 nt, Human
ugggauuacaggcgugag

SEQ ID NO: 287153 - RNA, 19 nt, Human
ugggauuacaggcgugagc

SEQ ID NO: 287154 - RNA, 21 nt, Human
ugggauuacaggcgugagcca

SEQ ID NO: 287155 - RNA, 22 nt, Human
ugggauuacaggcgugagccac

SEQ ID NO: 287156 - RNA, 23 nt, Human
ugggauuacaggcgugagccacc

SEQ ID NO: 287157 - RNA, 24 nt, Human
ugggauuacaggcgugagccaccg

SEQ ID NO: 287158 - RNA, 20 nt, Human
uggggccauugggcaugaga

SEQ ID NO: 287159 - RNA, 21 nt, Human
ugguuaggcugguucugaacu

SEQ ID NO: 287160 - RNA, 18 nt, Human
ugugguagaagguaauaa

SEQ ID NO: 287161 - RNA, 24 nt, Human
uuaguagagacaggguuucgccau

SEQ ID NO: 287162 - RNA, 22 nt, Human
uuccccugagccgccgccgccu

SEQ ID NO: 287163 - RNA, 20 nt, Human
uuucaugguccuucgacaca

SEQ ID NO: 287164 - RNA, 24 nt, Human
uuucgccauguugguuaggcuggu

SEQ ID NO: 287165 - RNA, 19 nt, Human
uuuuguaguuuuuaguaga

SEQ ID NO: 287166 - RNA, 22 nt, Human
uuuuuaguagagacaggguuuc

SEQ ID NO: 287167 - RNA, 23 nt, Human
uuuuuaguagagacaggguuucg

SEQ ID NO: 287168 - RNA, 23 nt, Human
uuuuucgacuugcagaacucugg

SEQ ID NO: 287169 - RNA, 21 nt, Human
uuuuuguaguuuuuaguagag

SEQ ID NO: 287170 - RNA, 24 nt, Human
uuuuuguaguuuuuaguagagaca

SEQ ID NO: 287171 - RNA, 24 nt, Human
uuuuuuuucuuuuucuggguuuuu

SEQ ID NO: 287172 - RNA, 27 nt, Human
aaaaaaaauaaaagucuccggcggggg

SEQ ID NO: 287173 - RNA, 24 nt, Human
aaauguguguuccgagcccggagc

SEQ ID NO: 287174 - RNA, 22 nt, Human
aagcaagaauuuuauaauccaa

SEQ ID NO: 287175 - RNA, 20 nt, Human
agaccuggcauuugcucggu

SEQ ID NO: 287176 - RNA, 22 nt, Human
agaggaagaaaaaaaauaaaag

SEQ ID NO: 287177 - RNA, 27 nt, Human
aggaagaaaaaaaauaaaagucuccgg

SEQ ID NO: 287178 - RNA, 22 nt, Human
cacaaguuucuuuucauggucc

SEQ ID NO: 287179 - RNA, 21 nt, Human
ccacaguaaagaauuacaaaa

SEQ ID NO: 287180 - RNA, 21 nt, Human
ccgagcccggagcacacacuc

SEQ ID NO: 287181 - RNA, 19 nt, Human
ccggggcugggggccggag

SEQ ID NO: 287182 - RNA, 22 nt, Human
cgcagagggacaaaaaucaacc

SEQ ID NO: 287183 - RNA, 18 nt, Human
cggggccgcgggcgggcg

SEQ ID NO: 287184 - RNA, 20 nt, Human
cggugucggguccgggcagc

SEQ ID NO: 287185 - RNA, 19 nt, Human
cuagaccuggcauuugcuc

SEQ ID NO: 287186 - RNA, 24 nt, Human
cuuaaaacagaacugacauucuga

SEQ ID NO: 287187 - RNA, 20 nt, Human
cuuggagcugcugcggggcc

SEQ ID NO: 287188 - RNA, 23 nt, Human
gaaaaaaaauaaaagucuccggc

SEQ ID NO: 287189 - RNA, 24 nt, Human
gaccuggcauuugcucgguacaua

SEQ ID NO: 287190 - RNA, 21 nt, Human
gacuagcauuauguuugcuag

SEQ ID NO: 287191 - RNA, 19 nt, Human
gcccggagcacacacuccg

SEQ ID NO: 287192 - RNA, 23 nt, Human
gccggggggaggggagcggggag

SEQ ID NO: 287193 - RNA, 21 nt, Human
gcggggagcgaggguggcggu

SEQ ID NO: 287194 - RNA, 19 nt, Human
gcugcggggccgcgggcgg

SEQ ID NO: 287195 - RNA, 20 nt, Human
gcugcugcggggccgcgggc

SEQ ID NO: 287196 - RNA, 20 nt, Human
ggagcacacacuccgcacuc

SEQ ID NO: 287197 - RNA, 24 nt, Human
ggagcacacacuccgcacucucag

SEQ ID NO: 287198 - RNA, 19 nt, Human
gggcagcgggaaggccucg

SEQ ID NO: 287199 - RNA, 18 nt, Human
ggggaggggagcggggag

SEQ ID NO: 287200 - RNA, 24 nt, Human
ggggccggagccggggggagggga

SEQ ID NO: 287201 - RNA, 20 nt, Human
gggucgauccacugccgcug

SEQ ID NO: 287202 - RNA, 18 nt, Human
uaaaacagaacugacauu

SEQ ID NO: 287203 - RNA, 21 nt, Human
uaaaacagaacugacauucug

SEQ ID NO: 287204 - RNA, 24 nt, Human
uaaaacagaacugacauucugagc

SEQ ID NO: 287205 - RNA, 18 nt, Human
uauguuugcuagaccugg

SEQ ID NO: 287206 - RNA, 20 nt, Human
uauguuugcuagaccuggcc

SEQ ID NO: 287207 - RNA, 19 nt, Human
ucaaaguuuccuuuccuuu

SEQ ID NO: 287208 - RNA, 24 nt, Human
uccaaauuacguuuccuugcucag

SEQ ID NO: 287209 - RNA, 30 nt, Human
uccacaguaaagaauuacaaaauuaaagaa

SEQ ID NO: 287210 - RNA, 23 nt, Human
ucggugaagcacaaguuucuuuu

SEQ ID NO: 287211 - RNA, 22 nt, Human
ugaaaacuacucaacggccgca

SEQ ID NO: 287212 - RNA, 23 nt, Human
uggcggugucggguccgggcagc

SEQ ID NO: 287213 - RNA, 21 nt, Human
uuacaaaauuaaagaaaggaa

SEQ ID NO: 287214 - RNA, 18 nt, Human
uucauggucccugaucaa

SEQ ID NO: 287215 - RNA, 24 nt, Human
uucccagggucuauaaaacauuaa

SEQ ID NO: 287216 - RNA, 19 nt, Human
uugguuccuucuuggagcu

SEQ ID NO: 287217 - RNA, 22 nt, Human
uugguuccuucuuggagcugcu

SEQ ID NO: 287218 - RNA, 20 nt, Human
uuguguuuuuuuguuuuuaa

SEQ ID NO: 287219 - RNA, 24 nt, Human
uuuauaauccaaauuacguuuccu

SEQ ID NO: 287220 - RNA, 20 nt, Human
uuuuguguuuuuuuguuuuu

SEQ ID NO: 287221 - RNA, 22 nt, Human
aagcaagaauuuuauaauccaa

SEQ ID NO: 287222 - RNA, 21 nt, Human
aauuuuauaauccaaaccaug

SEQ ID NO: 287223 - RNA, 21 nt, Human
acaaauuucuuuucguggucu

SEQ ID NO: 287224 - RNA, 24 nt, Human
gaccuugcauuugcucgguacaua

SEQ ID NO: 287225 - RNA, 21 nt, Human
gauuuugcaauuuuuuuuccc

SEQ ID NO: 287226 - RNA, 18 nt, Human
uagaccuugcauuugcuc

SEQ ID NO: 287227 - RNA, 21 nt, Human
uccacaguaaagaauuaaaaa

SEQ ID NO: 287228 - RNA, 24 nt, Human
uccccagggucuacaaaacauuaa

SEQ ID NO: 287229 - RNA, 23 nt, Human
ucggugaagcacaaauuucuuuu

SEQ ID NO: 287230 - RNA, 18 nt, Human
uucguggucucugaucaa

SEQ ID NO: 287231 - RNA, 24 nt, Human
uuuauaauccaaaccauguuuccu

SEQ ID NO: 287232 - RNA, 18 nt, Human
aaaccaaaucuuuguggg

SEQ ID NO: 287233 - RNA, 20 nt, Human
agggcacggcgggccgggcg

SEQ ID NO: 287234 - RNA, 29 nt, Human
agggguuauuuggcuuuugaaucgguuuu

SEQ ID NO: 287235 - RNA, 23 nt, Human
auccccuuccgaaggguaaaaau

SEQ ID NO: 287236 - RNA, 21 nt, Human
auuuuuuuuaucuuuuucucu

SEQ ID NO: 287237 - RNA, 21 nt, Human
caaaaggcucuccgcacaaua

SEQ ID NO: 287238 - RNA, 25 nt, Human
cacagcagaacccaaagaacauauu

SEQ ID NO: 287239 - RNA, 19 nt, Human
caccccgagccccgccaga

SEQ ID NO: 287240 - RNA, 22 nt, Human
caccccgagccccgccagagga

SEQ ID NO: 287241 - RNA, 22 nt, Human
cagaggacuucuuaucgggccc

SEQ ID NO: 287242 - RNA, 19 nt, Human
cagcaccgcagacaaaagg

SEQ ID NO: 287243 - RNA, 23 nt, Human
cagcaccgcagacaaaaggcucu

SEQ ID NO: 287244 - RNA, 18 nt, Human
caggccggggcgcggggc

SEQ ID NO: 287245 - RNA, 20 nt, Human
ccaaagaacauauucguaua

SEQ ID NO: 287246 - RNA, 22 nt, Human
ccaaauuucaaaaaaucaaagu

SEQ ID NO: 287247 - RNA, 22 nt, Human
ccacagcagaacccaaagaaca

SEQ ID NO: 287248 - RNA, 23 nt, Human
ccacagcagaacccaaagaacau

SEQ ID NO: 287249 - RNA, 21 nt, Human
cccaccaccccgagccccgcc

SEQ ID NO: 287250 - RNA, 23 nt, Human
cccacggccgcagcaccgcagac

SEQ ID NO: 287251 - RNA, 23 nt, Human
ccccaccaccccgagccccgcca

SEQ ID NO: 287252 - RNA, 20 nt, Human
cccccaccaccccgagcccc

SEQ ID NO: 287253 - RNA, 20 nt, Human
ccccccaccaccccgagccc

SEQ ID NO: 287254 - RNA, 26 nt, Human
ccccccaccaccccgagccccgccag

SEQ ID NO: 287255 - RNA, 23 nt, Human
cccccggaccgacggacggagac

SEQ ID NO: 287256 - RNA, 25 nt, Human
ccgcagacaaaaggcucuccgcaca

SEQ ID NO: 287257 - RNA, 19 nt, Human
ccgcaggacaaaggggcgc

SEQ ID NO: 287258 - RNA, 27 nt, Human
ccgccccccaccaccccgagccccgcc

SEQ ID NO: 287259 - RNA, 21 nt, Human
ccgcgguccuggugcgaaggc

SEQ ID NO: 287260 - RNA, 20 nt, Human
cgaccccgggcgggcggcga

SEQ ID NO: 287261 - RNA, 21 nt, Human
cgacucggcgaccccgggcgg

SEQ ID NO: 287262 - RNA, 22 nt, Human
cgccccccaccaccccgagccc

SEQ ID NO: 287263 - RNA, 20 nt, Human
cgcggcgaggacgagcugga

SEQ ID NO: 287264 - RNA, 25 nt, Human
cgcugcggcggcgggcgcggggcag

SEQ ID NO: 287265 - RNA, 22 nt, Human
cggaccgacggacggagaccga

SEQ ID NO: 287266 - RNA, 19 nt, Human
cggagaccgacggacgcca

SEQ ID NO: 287267 - RNA, 21 nt, Human
cggcgguuuaagauuacaacc

SEQ ID NO: 287268 - RNA, 21 nt, Human
cuccgcacaauacggcccucc

SEQ ID NO: 287269 - RNA, 18 nt, Human
cuuuuucucuuuuuuucc

SEQ ID NO: 287270 - RNA, 23 nt, Human
gagggcacggcgggccgggcggg

SEQ ID NO: 287271 - RNA, 21 nt, Human
gauucguuuuuucuuuuccuu

SEQ ID NO: 287272 - RNA, 19 nt, Human
gcagcaccgcagacaaaag

SEQ ID NO: 287273 - RNA, 22 nt, Human
gcgcggcgaggacgagcuggag

SEQ ID NO: 287274 - RNA, 23 nt, Human
gcggcgaagggcagcacggacac

SEQ ID NO: 287275 - RNA, 21 nt, Human
gcugcggcggcgggcgcgggg

SEQ ID NO: 287276 - RNA, 23 nt, Human
ggacgagcuggagucggcgggcu

SEQ ID NO: 287277 - RNA, 18 nt, Human
ggcucggggcccgagcgg

SEQ ID NO: 287278 - RNA, 18 nt, Human
gggaaacguaagacuugg

SEQ ID NO: 287279 - RNA, 23 nt, Human
ggggggagggcacggcgggccgg

SEQ ID NO: 287280 - RNA, 21 nt, Human
uacaucaaauaaaaccaauuu

SEQ ID NO: 287281 - RNA, 22 nt, Human
ucaaaguaggaaaaaaauuaaa

SEQ ID NO: 287282 - RNA, 18 nt, Human
ucuccgcacaauacggcc

SEQ ID NO: 287283 - RNA, 25 nt, Human
ucugggccacagcagaacccaaaga

SEQ ID NO: 287284 - RNA, 19 nt, Human
ucuuuuccuuuuuuuuuuc

SEQ ID NO: 287285 - RNA, 19 nt, Human
ugaguugaauuccauaagg

SEQ ID NO: 287286 - RNA, 23 nt, Human
ugcccacggcgggccucggggac

SEQ ID NO: 287287 - RNA, 19 nt, Human
ugcggcggcgggcgcgggg

SEQ ID NO: 287288 - RNA, 18 nt, Human
uggagauuuuuuuucuuu

SEQ ID NO: 287289 - RNA, 21 nt, Human
ugggccacagcagaacccaaa

SEQ ID NO: 287290 - RNA, 23 nt, Human
uuccccgcggguucuccgaggau

SEQ ID NO: 287291 - RNA, 21 nt, Human
uucggagccggagcccgggcc

SEQ ID NO: 287292 - RNA, 18 nt, Human
uuuguaauccuugguguu

SEQ ID NO: 287293 - RNA, 26 nt, Human
uuuuuucuuuuccuuuuuuuuuuuuc

SEQ ID NO: 287294 - RNA, 21 nt, Human
aaaaaaaaacaaaaaaacaaa

SEQ ID NO: 287295 - RNA, 22 nt, Human
aaaaaaaacaaaaaaacaaaag

SEQ ID NO: 287296 - RNA, 24 nt, Human
aaaaaaaacccuccuaccacccac

SEQ ID NO: 287297 - RNA, 19 nt, Human
aaaaaaaauucccaccccu

SEQ ID NO: 287298 - RNA, 22 nt, Human
aaaaaaaauucccaccccugga

SEQ ID NO: 287299 - RNA, 26 nt, Human
aaaaaaacccuccuaccacccacgcc

SEQ ID NO: 287300 - RNA, 27 nt, Human
aaaaaacaaaaaaacaaaacaacugaa

SEQ ID NO: 287301 - RNA, 23 nt, Human
aaaaaacaaaacaacugaaaaac

SEQ ID NO: 287302 - RNA, 21 nt, Human
aaaaaacccuccuaccaccca

SEQ ID NO: 287303 - RNA, 20 nt, Human
aaaaaaggcaaaggaaaaaa

SEQ ID NO: 287304 - RNA, 21 nt, Human
aaaaacaaaacaacugaaaaa

SEQ ID NO: 287305 - RNA, 20 nt, Human
aaaaacaccccuaaaccccc

SEQ ID NO: 287306 - RNA, 21 nt, Human
aaaaacaccccuaaacccccc

SEQ ID NO: 287307 - RNA, 26 nt, Human
aaaaagaaacacaaaaggaaacaaaa

SEQ ID NO: 287308 - RNA, 22 nt, Human
aaaacaaaaacaccccuaaacc

SEQ ID NO: 287309 - RNA, 23 nt, Human
aaaacaaaaacaccccuaaaccc

SEQ ID NO: 287310 - RNA, 24 nt, Human
aaaacaaaacaacugaaaaacaaa

SEQ ID NO: 287311 - RNA, 20 nt, Human
aaaacaccccuaaacccccc

SEQ ID NO: 287312 - RNA, 25 nt, Human
aaaacagaaaaagaaacacaaaagg

SEQ ID NO: 287313 - RNA, 23 nt, Human
aaacaaaaaaacaaaacaacuga

SEQ ID NO: 287314 - RNA, 27 nt, Human
aaacaaaaacaccccuaaaccccccaa

SEQ ID NO: 287315 - RNA, 23 nt, Human
aaacacaaaaggaaacaaaauag

SEQ ID NO: 287316 - RNA, 26 nt, Human
aaacaccccuaaaccccccaaaacaa

SEQ ID NO: 287317 - RNA, 19 nt, Human
aaacagaaaaagaaacaca

SEQ ID NO: 287318 - RNA, 22 nt, Human
aaacagaaaaagaaacacaaaa

SEQ ID NO: 287319 - RNA, 31 nt, Human
aaacagaaaaagaaacacaaaaggaaacaaa

SEQ ID NO: 287320 - RNA, 24 nt, Human
aaacagagcagcaguuucaggaaa

SEQ ID NO: 287321 - RNA, 22 nt, Human
aaaggaaacaaaauagaucacc

SEQ ID NO: 287322 - RNA, 24 nt, Human
aaauaaacaaaauccaccucccac

SEQ ID NO: 287323 - RNA, 21 nt, Human
aacaccccuaaaccccccaaa

SEQ ID NO: 287324 - RNA, 24 nt, Human
aacugaaaaacaaaaacaccccua

SEQ ID NO: 287325 - RNA, 23 nt, Human
aagaaacacaaaaggaaacaaaa

SEQ ID NO: 287326 - RNA, 25 nt, Human
aagaaacacaaaaggaaacaaaaua

SEQ ID NO: 287327 - RNA, 18 nt, Human
aagcagcccccugcccca

SEQ ID NO: 287328 - RNA, 19 nt, Human
aagcugccugcccgucacc

SEQ ID NO: 287329 - RNA, 23 nt, Human
aagggaaaaaaggcaaaggaaaa

SEQ ID NO: 287330 - RNA, 21 nt, Human
aaugaagcauuccaggaggga

SEQ ID NO: 287331 - RNA, 22 nt, Human
acaaaacaacugaaaaacaaaa

SEQ ID NO: 287332 - RNA, 24 nt, Human
acuagcucucccgcaccagaaagc

SEQ ID NO: 287333 - RNA, 18 nt, Human
acugaaaaacaaaaacac

SEQ ID NO: 287334 - RNA, 23 nt, Human
acugaaaaacaaaaacaccccua

SEQ ID NO: 287335 - RNA, 21 nt, Human
acugugaaaggcgaggagaag

SEQ ID NO: 287336 - RNA, 18 nt, Human
agaaaaagaaacacaaaa

SEQ ID NO: 287337 - RNA, 20 nt, Human
agaaaaagaaacacaaaagg

SEQ ID NO: 287338 - RNA, 21 nt, Human
agaaagacacucaaaacagaa

SEQ ID NO: 287339 - RNA, 20 nt, Human
agaaagaggggugggguggg

SEQ ID NO: 287340 - RNA, 20 nt, Human
agagcuacuagucacaaguc

SEQ ID NO: 287341 - RNA, 18 nt, Human
agcagcaguuucaggaaa

SEQ ID NO: 287342 - RNA, 21 nt, Human
agcccuggguaaaaaaaaccc

SEQ ID NO: 287343 - RNA, 22 nt, Human
aggaaaaaaaaaaaacaaaaaa

SEQ ID NO: 287344 - RNA, 23 nt, Human
aggaaaaaaaaaaaacaaaaaaa

SEQ ID NO: 287345 - RNA, 21 nt, Human
aggaggggacugugaaaggcg

SEQ ID NO: 287346 - RNA, 19 nt, Human
aggcaggaggggacuguga

SEQ ID NO: 287347 - RNA, 19 nt, Human
aggcauuuguauuggggcu

SEQ ID NO: 287348 - RNA, 21 nt, Human
aggcccaaaacagagcagcag

SEQ ID NO: 287349 - RNA, 23 nt, Human
caaaaaaacaaaacaacugaaaa

SEQ ID NO: 287350 - RNA, 26 nt, Human
caaaaaaacaaaacaacugaaaaaca

SEQ ID NO: 287351 - RNA, 18 nt, Human
caaaaacaccccuaaacc

SEQ ID NO: 287352 - RNA, 22 nt, Human
caaaaacaccccuaaacccccc

SEQ ID NO: 287353 - RNA, 22 nt, Human
caaaacaacugaaaaacaaaaa

SEQ ID NO: 287354 - RNA, 22 nt, Human
caaaauccaccucccaccuccc

SEQ ID NO: 287355 - RNA, 24 nt, Human
caaaggaaaaaaaaaaaacaaaaa

SEQ ID NO: 287356 - RNA, 19 nt, Human
caacacgcgucccaccucc

SEQ ID NO: 287357 - RNA, 18 nt, Human
caaugucaccccuccaau

SEQ ID NO: 287358 - RNA, 18 nt, Human
caccccuaaaccccccaa

SEQ ID NO: 287359 - RNA, 21 nt, Human
caccccuaaaccccccaaaac

SEQ ID NO: 287360 - RNA, 23 nt, Human
caccucccaccucccuguuccca

SEQ ID NO: 287361 - RNA, 19 nt, Human
cacggccuggcaauaugcu

SEQ ID NO: 287362 - RNA, 22 nt, Human
cacugcaaaccccagcuucccc

SEQ ID NO: 287363 - RNA, 18 nt, Human
cagacuggggcccgccgc

SEQ ID NO: 287364 - RNA, 22 nt, Human
ccacucccugggccuuccccua

SEQ ID NO: 287365 - RNA, 19 nt, Human
cccaagggggugaaggggg

SEQ ID NO: 287366 - RNA, 23 nt, Human
cccacuuccucccauucccucca

SEQ ID NO: 287367 - RNA, 25 nt, Human
cccacuuccucccauucccuccaaa

SEQ ID NO: 287368 - RNA, 20 nt, Human
ccccaaaacaagguagugca

SEQ ID NO: 287369 - RNA, 21 nt, Human
ccccaaagcaggucccuccuc

SEQ ID NO: 287370 - RNA, 22 nt, Human
ccccaaagcaggucccuccuca

SEQ ID NO: 287371 - RNA, 21 nt, Human
ccccagcuuccccucauuucc

SEQ ID NO: 287372 - RNA, 18 nt, Human
ccccccaaaacaagguag

SEQ ID NO: 287373 - RNA, 19 nt, Human
cccccgaaaggacugccgg

SEQ ID NO: 287374 - RNA, 23 nt, Human
cccccugccccacucccugggcc

SEQ ID NO: 287375 - RNA, 21 nt, Human
ccccuaaaccccccaaaacaa

SEQ ID NO: 287376 - RNA, 22 nt, Human
ccccuaaaccccccaaaacaag

SEQ ID NO: 287377 - RNA, 22 nt, Human
ccccugccccacucccugggcc

SEQ ID NO: 287378 - RNA, 23 nt, Human
cccggcauguggagagcugcgcc

SEQ ID NO: 287379 - RNA, 22 nt, Human
cccuggaaaugagcuaaaaaaa

SEQ ID NO: 287380 - RNA, 18 nt, Human
ccgaucgccucaccgcag

SEQ ID NO: 287381 - RNA, 18 nt, Human
ccgggugaggcccaaaac

SEQ ID NO: 287382 - RNA, 18 nt, Human
ccuauguccacggcgcgc

SEQ ID NO: 287383 - RNA, 23 nt, Human
ccucccuguucccacuuccuccc

SEQ ID NO: 287384 - RNA, 21 nt, Human
ccuucuuuccucuuuuuuucc

SEQ ID NO: 287385 - RNA, 21 nt, Human
ccuucuuuccucuuuuuuucc

SEQ ID NO: 287386 - RNA, 25 nt, Human
cgagguaaagucucaaaaccguaaa

SEQ ID NO: 287387 - RNA, 23 nt, Human
cgcccaccuacccuugagcaggc

SEQ ID NO: 287388 - RNA, 22 nt, Human
cgcucagacuggggcccgccgc

SEQ ID NO: 287389 - RNA, 20 nt, Human
cucaaaacagaaaaagaaac

SEQ ID NO: 287390 - RNA, 23 nt, Human
cucaaaacagaaaaagaaacaca

SEQ ID NO: 287391 - RNA, 30 nt, Human
cucaaaacagaaaaagaaacacaaaaggaa

SEQ ID NO: 287392 - RNA, 19 nt, Human
cucccaccucccuguuccc

SEQ ID NO: 287393 - RNA, 28 nt, Human
cugaaaaacaaaaacaccccuaaacccc

SEQ ID NO: 287394 - RNA, 20 nt, Human
cuuccaaugucaccccucca

SEQ ID NO: 287395 - RNA, 21 nt, Human
cuucucguuccuuugggugua

SEQ ID NO: 287396 - RNA, 23 nt, Human
cuugcguaggccuucugcucccc

SEQ ID NO: 287397 - RNA, 22 nt, Human
cuuuccucuuuuuuuccucucu

SEQ ID NO: 287398 - RNA, 20 nt, Human
gaaaaaaaaaaaacaaaaaa

SEQ ID NO: 287399 - RNA, 25 nt, Human
gaaaaacaaaaacaccccuaaaccc

SEQ ID NO: 287400 - RNA, 20 nt, Human
gaagcauuccaggagggagc

SEQ ID NO: 287401 - RNA, 22 nt, Human
gacacucaaaacagaaaaagaa

SEQ ID NO: 287402 - RNA, 19 nt, Human
gacgauauuccugcuucuc

SEQ ID NO: 287403 - RNA, 20 nt, Human
gagagucgaaggggugacac

SEQ ID NO: 287404 - RNA, 20 nt, Human
gcaaaggaaaaaaaaaaaac

SEQ ID NO: 287405 - RNA, 25 nt, Human
gcaaaggaaaaaaaaaaaacaaaaa

SEQ ID NO: 287406 - RNA, 21 nt, Human
gcagcccccugccccacuccc

SEQ ID NO: 287407 - RNA, 19 nt, Human
gcccuggguaaaaaaaacc

SEQ ID NO: 287408 - RNA, 23 nt, Human
gcgaauccccagagugaauaagc

SEQ ID NO: 287409 - RNA, 19 nt, Human
gcuaaaaaaauaaacaaaa

SEQ ID NO: 287410 - RNA, 19 nt, Human
ggaaacaugggcaagcagc

SEQ ID NO: 287411 - RNA, 23 nt, Human
ggaggacucauuagcucaagcug

SEQ ID NO: 287412 - RNA, 18 nt, Human
ggagguugugaaugaagc

SEQ ID NO: 287413 - RNA, 20 nt, Human
ggcagggagccggagaaaga

SEQ ID NO: 287414 - RNA, 22 nt, Human
ggcgaggagaagacgggaggga

SEQ ID NO: 287415 - RNA, 25 nt, Human
ggcuacagaaaccugcaaagaaaga

SEQ ID NO: 287416 - RNA, 24 nt, Human
ggcuucaaacuugggaaacccgag

SEQ ID NO: 287417 - RNA, 23 nt, Human
gggagccggagaaagaggggugg

SEQ ID NO: 287418 - RNA, 23 nt, Human
gggcagggaaacaugggcaagca

SEQ ID NO: 287419 - RNA, 21 nt, Human
gggcagggagccggagaaaga

SEQ ID NO: 287420 - RNA, 22 nt, Human
ggggugggugguagaccuggcu

SEQ ID NO: 287421 - RNA, 18 nt, Human
gguaaagucucaaaaccg

SEQ ID NO: 287422 - RNA, 24 nt, Human
guagugcauuuccccagggggaag

SEQ ID NO: 287423 - RNA, 19 nt, Human
guccauggcgaauccccag

SEQ ID NO: 287424 - RNA, 22 nt, Human
uaaaaaaaacccuccuaccacc

SEQ ID NO: 287425 - RNA, 23 nt, Human
uaaaaaaaacccuccuaccaccc

SEQ ID NO: 287426 - RNA, 21 nt, Human
uaaaccccccaaaacaaggua

SEQ ID NO: 287427 - RNA, 24 nt, Human
uaacagacuggccccccuuugcuu

SEQ ID NO: 287428 - RNA, 19 nt, Human
uaagcagcccccugcccca

SEQ ID NO: 287429 - RNA, 24 nt, Human
uaaggcgggcacugcgccaaauuc

SEQ ID NO: 287430 - RNA, 25 nt, Human
uaccgccacgcugugacgauauucc

SEQ ID NO: 287431 - RNA, 22 nt, Human
uaggccuucugcuccccaguuc

SEQ ID NO: 287432 - RNA, 19 nt, Human
uagugcauuuccccagggg

SEQ ID NO: 287433 - RNA, 18 nt, Human
uaugcuaccacauagaug

SEQ ID NO: 287434 - RNA, 22 nt, Human
ucaaaacagaaaaagaaacaca

SEQ ID NO: 287435 - RNA, 23 nt, Human
ucaaaaccguaaaucacggccuu

SEQ ID NO: 287436 - RNA, 25 nt, Human
ucacggccuggcaauaugcuaccac

SEQ ID NO: 287437 - RNA, 18 nt, Human
uccaaauaaaagggaaaa

SEQ ID NO: 287438 - RNA, 20 nt, Human
uccacuagcucucccgcacc

SEQ ID NO: 287439 - RNA, 23 nt, Human
ucccaccucccuguucccacuuc

SEQ ID NO: 287440 - RNA, 25 nt, Human
ucucacggccuggcaauaugcuacc

SEQ ID NO: 287441 - RNA, 23 nt, Human
ucucagaugccgauuggcuugcg

SEQ ID NO: 287442 - RNA, 20 nt, Human
ucuuuuuuuccucucucucc

SEQ ID NO: 287443 - RNA, 23 nt, Human
ugaaaggcgaggagaagacggga

SEQ ID NO: 287444 - RNA, 24 nt, Human
ugaaaggcgaggagaagacgggag

SEQ ID NO: 287445 - RNA, 19 nt, Human
ugaagggggcagggaaaca

SEQ ID NO: 287446 - RNA, 28 nt, Human
ugaauaagcagcccccugcuguaaugac

SEQ ID NO: 287447 - RNA, 18 nt, Human
ugaaugaagcauuccagg

SEQ ID NO: 287448 - RNA, 21 nt, Human
ugacaggugaaccuugccccc

SEQ ID NO: 287449 - RNA, 21 nt, Human
ugagcaggcccaaggggguga

SEQ ID NO: 287450 - RNA, 19 nt, Human
ugauuggcccuagcuaggc

SEQ ID NO: 287451 - RNA, 22 nt, Human
ugcacccagucugugccucuaa

SEQ ID NO: 287452 - RNA, 25 nt, Human
ugccccacucccugggccuuccccu

SEQ ID NO: 287453 - RNA, 18 nt, Human
ugccucuaacauguaguc

SEQ ID NO: 287454 - RNA, 23 nt, Human
uggcgagguaaagucucaaaacc

SEQ ID NO: 287455 - RNA, 23 nt, Human
uggggugggugguagaccuggcu

SEQ ID NO: 287456 - RNA, 23 nt, Human
uguaccugcacccagucugugcc

SEQ ID NO: 287457 - RNA, 20 nt, Human
ugucccgcccucuugcguag

SEQ ID NO: 287458 - RNA, 19 nt, Human
uguugcugaaaauggaggu

SEQ ID NO: 287459 - RNA, 21 nt, Human
uuauuggcaccaucauccacu

SEQ ID NO: 287460 - RNA, 26 nt, Human
uucccacuuccucccauucccuccaa

SEQ ID NO: 287461 - RNA, 21 nt, Human
uucccaggacaagugggccua

SEQ ID NO: 287462 - RNA, 23 nt, Human
uuccuucuuuccucuuuuuuucc

SEQ ID NO: 287463 - RNA, 19 nt, Human
uucgugacaggugaaccuu

SEQ ID NO: 287464 - RNA, 26 nt, Human
uucuuuuuuuuuuuuuuaauucuuuu

SEQ ID NO: 287465 - RNA, 21 nt, Human
uugguguccuuccagagcccu

SEQ ID NO: 287466 - RNA, 20 nt, Human
uuuccaucaaggucaucuuc

SEQ ID NO: 287467 - RNA, 22 nt, Human
uuucuuuuuuuuuuuuuuaauu

SEQ ID NO: 287468 - RNA, 20 nt, Human
uuuguggauguuguuuccuu

SEQ ID NO: 287469 - RNA, 24 nt, Human
uuuuuuuccuucuuuccucuuuuu

SEQ ID NO: 287470 - RNA, 24 nt, Human
uuuuuuuuuuuuuuuuuuuauuuu

SEQ ID NO: 287471 - RNA, 22 nt, Human
aaaaaucacugugcaccaaccc

SEQ ID NO: 287472 - RNA, 25 nt, Human
aaacacagaugucagccugccccuc

SEQ ID NO: 287473 - RNA, 21 nt, Human
aaacagccccugagaucccca

SEQ ID NO: 287474 - RNA, 21 nt, Human
aacagccccugagauccccac

SEQ ID NO: 287475 - RNA, 23 nt, Human
aagaaaaaaaucacugugcacca

SEQ ID NO: 287476 - RNA, 22 nt, Human
acaaaaccagccgggcuggcca

SEQ ID NO: 287477 - RNA, 21 nt, Human
accacccacccaggggcucca

SEQ ID NO: 287478 - RNA, 20 nt, Human
accccucuugccucccagcu

SEQ ID NO: 287479 - RNA, 20 nt, Human
accucagguggccagguggg

SEQ ID NO: 287480 - RNA, 19 nt, Human
accugccuugccuuggucc

SEQ ID NO: 287481 - RNA, 21 nt, Human
accugccuugccuuggucccu

SEQ ID NO: 287482 - RNA, 18 nt, Human
agaaaaggggacucccag

SEQ ID NO: 287483 - RNA, 18 nt, Human
agagcugggggacagggu

SEQ ID NO: 287484 - RNA, 19 nt, Human
agagguggccuccucccuc

SEQ ID NO: 287485 - RNA, 22 nt, Human
agauaucuccuaggccagcccc

SEQ ID NO: 287486 - RNA, 18 nt, Human
agccagggaggagcaggg

SEQ ID NO: 287487 - RNA, 20 nt, Human
agcugcggccugggucagga

SEQ ID NO: 287488 - RNA, 19 nt, Human
agggcagccagggaggagc

SEQ ID NO: 287489 - RNA, 24 nt, Human
agggcagggggaugggagaggagg

SEQ ID NO: 287490 - RNA, 23 nt, Human
agggcucgggagggugaagagug

SEQ ID NO: 287491 - RNA, 19 nt, Human
aggguagaaaagaaaaggg

SEQ ID NO: 287492 - RNA, 21 nt, Human
aggguucagccagagcuucgg

SEQ ID NO: 287493 - RNA, 23 nt, Human
aggucugugagugccaacagccc

SEQ ID NO: 287494 - RNA, 24 nt, Human
agugaaaauauauccucaaacagc

SEQ ID NO: 287495 - RNA, 24 nt, Human
auaaucacaaagugaaaauauauc

SEQ ID NO: 287496 - RNA, 20 nt, Human
auauauccucaaacagcccc

SEQ ID NO: 287497 - RNA, 22 nt, Human
caaaaggcacgucagaagagga

SEQ ID NO: 287498 - RNA, 21 nt, Human
caagcaagggcugccccucuu

SEQ ID NO: 287499 - RNA, 22 nt, Human
cacaggggaaagcagcaucggg

SEQ ID NO: 287500 - RNA, 22 nt, Human
cacaggguucagccagagcuuc

SEQ ID NO: 287501 - RNA, 19 nt, Human
caccagcacaggguucagc

SEQ ID NO: 287502 - RNA, 18 nt, Human
caccauccagcuccagag

SEQ ID NO: 287503 - RNA, 30 nt, Human
cacccaggggcuccaggucugugagugccc

SEQ ID NO: 287504 - RNA, 18 nt, Human
caccccucuugccuccca

SEQ ID NO: 287505 - RNA, 19 nt, Human
caccucagggccagggcag

SEQ ID NO: 287506 - RNA, 19 nt, Human
caccucuggcacuuggaga

SEQ ID NO: 287507 - RNA, 28 nt, Human
caccucuggcacuuggagagccagugac

SEQ ID NO: 287508 - RNA, 19 nt, Human
cacugugcaccaacccagc

SEQ ID NO: 287509 - RNA, 21 nt, Human
cagagcuucggccuuggcugc

SEQ ID NO: 287510 - RNA, 18 nt, Human
cagccccugagaucccca

SEQ ID NO: 287511 - RNA, 22 nt, Human
cagccgggcuggccacgagggc

SEQ ID NO: 287512 - RNA, 19 nt, Human
caucuaaagugaaauaauc

SEQ ID NO: 287513 - RNA, 24 nt, Human
cauggggccgagacgggcagggcu

SEQ ID NO: 287514 - RNA, 18 nt, Human
ccacaggggaaagcagca

SEQ ID NO: 287515 - RNA, 24 nt, Human
ccaccacccacccaggggcuccag

SEQ ID NO: 287516 - RNA, 22 nt, Human
ccaccaccugcccaccucuggc

SEQ ID NO: 287517 - RNA, 19 nt, Human
ccaggcagcccgggcucag

SEQ ID NO: 287518 - RNA, 20 nt, Human
ccagucccaagauaaaaaaa

SEQ ID NO: 287519 - RNA, 23 nt, Human
cccaaggaggggauuggcuugag

SEQ ID NO: 287520 - RNA, 23 nt, Human
cccacugggacccccuuuccuug

SEQ ID NO: 287521 - RNA, 22 nt, Human
cccagcugggguccaaacccag

SEQ ID NO: 287522 - RNA, 18 nt, Human
ccccaccacccacccagg

SEQ ID NO: 287523 - RNA, 25 nt, Human
ccccacgccccagcugguccugggc

SEQ ID NO: 287524 - RNA, 18 nt, Human
ccccagcugguccugggc

SEQ ID NO: 287525 - RNA, 20 nt, Human
ccccagcugguccugggccc

SEQ ID NO: 287526 - RNA, 22 nt, Human
ccccagcugguccugggcccac

SEQ ID NO: 287527 - RNA, 21 nt, Human
cccccauuaaaaauacaaaaa

SEQ ID NO: 287528 - RNA, 22 nt, Human
cccccggcauggcgagccccac

SEQ ID NO: 287529 - RNA, 18 nt, Human
ccccuccccaccacccac

SEQ ID NO: 287530 - RNA, 19 nt, Human
cccggggcugacugguggg

SEQ ID NO: 287531 - RNA, 21 nt, Human
ccgcaggaacucuggcugggg

SEQ ID NO: 287532 - RNA, 19 nt, Human
ccucaaacagccccugaga

SEQ ID NO: 287533 - RNA, 23 nt, Human
ccucagggccagggcagccaggg

SEQ ID NO: 287534 - RNA, 22 nt, Human
ccucagguggccaggugggccc

SEQ ID NO: 287535 - RNA, 24 nt, Human
ccucccagcugggguccaaaccca

SEQ ID NO: 287536 - RNA, 18 nt, Human
ccuccccaccacccaccc

SEQ ID NO: 287537 - RNA, 23 nt, Human
ccuccccacgccccagcuggucc

SEQ ID NO: 287538 - RNA, 25 nt, Human
ccuuucuccacauggaaggggugcu

SEQ ID NO: 287539 - RNA, 21 nt, Human
cgagccccacuugaaacacag

SEQ ID NO: 287540 - RNA, 23 nt, Human
cgggugcaagagaggggagggug

SEQ ID NO: 287541 - RNA, 25 nt, Human
cugcagcccccacaccucagggcca

SEQ ID NO: 287542 - RNA, 21 nt, Human
cugcucacugccuguggcccg

SEQ ID NO: 287543 - RNA, 20 nt, Human
cuggcuggggccggggccgg

SEQ ID NO: 287544 - RNA, 21 nt, Human
cuuggagagguggccuccucc

SEQ ID NO: 287545 - RNA, 25 nt, Human
cuuggccuggucacagggccucggc

SEQ ID NO: 287546 - RNA, 18 nt, Human
cuuggggcucaacuauuc

SEQ ID NO: 287547 - RNA, 18 nt, Human
gaaccagcaaugcugggc

SEQ ID NO: 287548 - RNA, 26 nt, Human
gagcugggggacaggguggagggugc

SEQ ID NO: 287549 - RNA, 26 nt, Human
gcacaggguucagccagagcuucggc

SEQ ID NO: 287550 - RNA, 19 nt, Human
gcaccugccuugccuuggu

SEQ ID NO: 287551 - RNA, 25 nt, Human
gccagcgccccuccccaccacccac

SEQ ID NO: 287552 - RNA, 22 nt, Human
gcccaaggaggggauuggcuug

SEQ ID NO: 287553 - RNA, 25 nt, Human
gccccucuucacuccgcaggaacuc

SEQ ID NO: 287554 - RNA, 20 nt, Human
gcgccccuccccaccaccca

SEQ ID NO: 287555 - RNA, 18 nt, Human
gcugcagcccccacaccu

SEQ ID NO: 287556 - RNA, 20 nt, Human
gcuggcccgccucuucagga

SEQ ID NO: 287557 - RNA, 22 nt, Human
ggaaagcagcaucgggugggag

SEQ ID NO: 287558 - RNA, 23 nt, Human
ggaggggauuggcuugagggggu

SEQ ID NO: 287559 - RNA, 26 nt, Human
ggaggggauuggcuugaggggguggg

SEQ ID NO: 287560 - RNA, 19 nt, Human
ggccacgagggcaggggga

SEQ ID NO: 287561 - RNA, 22 nt, Human
ggccagagaggccggcugggcc

SEQ ID NO: 287562 - RNA, 19 nt, Human
ggcccggggcugacuggug

SEQ ID NO: 287563 - RNA, 19 nt, Human
ggccggggccggggcaagc

SEQ ID NO: 287564 - RNA, 22 nt, Human
gggaggccagagaggccggcug

SEQ ID NO: 287565 - RNA, 25 nt, Human
gggauuggcuugagggggugggcag

SEQ ID NO: 287566 - RNA, 23 nt, Human
gggcagggggaugggagaggagg

SEQ ID NO: 287567 - RNA, 22 nt, Human
gggccagggcagccagggagga

SEQ ID NO: 287568 - RNA, 24 nt, Human
gggccagggcagccagggaggagc

SEQ ID NO: 287569 - RNA, 19 nt, Human
gggccgagacgggcagggc

SEQ ID NO: 287570 - RNA, 25 nt, Human
gggccgagacgggcagggcucggga

SEQ ID NO: 287571 - RNA, 21 nt, Human
gggcggacggugggugugaga

SEQ ID NO: 287572 - RNA, 20 nt, Human
gggggaugggagaggagggg

SEQ ID NO: 287573 - RNA, 19 nt, Human
gguaccaggaauggcuagg

SEQ ID NO: 287574 - RNA, 18 nt, Human
ggucccuuccuaugaugg

SEQ ID NO: 287575 - RNA, 21 nt, Human
guggugguggaggcacggagc

SEQ ID NO: 287576 - RNA, 25 nt, Human
uacaaaaccagccgggcuggccacg

SEQ ID NO: 287577 - RNA, 20 nt, Human
uaucuccuaggccagccccc

SEQ ID NO: 287578 - RNA, 20 nt, Human
ucacuccgcaggaacucugg

SEQ ID NO: 287579 - RNA, 25 nt, Human
ucagggccagggcagccagggagga

SEQ ID NO: 287580 - RNA, 23 nt, Human
uccaaacccagucccaagauaaa

SEQ ID NO: 287581 - RNA, 18 nt, Human
ucccaagauaaaaaaaua

SEQ ID NO: 287582 - RNA, 19 nt, Human
ucccacugggacccccuuu

SEQ ID NO: 287583 - RNA, 23 nt, Human
ucccaggugccugcucacugccu

SEQ ID NO: 287584 - RNA, 21 nt, Human
uccccaccacccacccagggg

SEQ ID NO: 287585 - RNA, 22 nt, Human
uccuaggccagcccccgacugc

SEQ ID NO: 287586 - RNA, 18 nt, Human
uccuaugauggcugcugc

SEQ ID NO: 287587 - RNA, 20 nt, Human
ucuccacauggaaggggugc

SEQ ID NO: 287588 - RNA, 19 nt, Human
ugaaacacagaugucagcc

SEQ ID NO: 287589 - RNA, 21 nt, Human
ugaaacacagaugucagccug

SEQ ID NO: 287590 - RNA, 23 nt, Human
ugaacccccggcauggcgagccc

SEQ ID NO: 287591 - RNA, 24 nt, Human
ugaacccccggcauggcgagcccc

SEQ ID NO: 287592 - RNA, 23 nt, Human
ugaauuaaaaagugcccaaggag

SEQ ID NO: 287593 - RNA, 19 nt, Human
ugagggggugggcaguggg

SEQ ID NO: 287594 - RNA, 21 nt, Human
ugcaagagaggggaggguggu

SEQ ID NO: 287595 - RNA, 22 nt, Human
ugccaccaccugcccaccucug

SEQ ID NO: 287596 - RNA, 22 nt, Human
ugcccuaaagguuucacuccuu

SEQ ID NO: 287597 - RNA, 19 nt, Human
ugcugccgccaagacucac

SEQ ID NO: 287598 - RNA, 20 nt, Human
uggaaggggugcugagggug

SEQ ID NO: 287599 - RNA, 18 nt, Human
uggaggcacggagcacag

SEQ ID NO: 287600 - RNA, 18 nt, Human
uggccaggugggcccgag

SEQ ID NO: 287601 - RNA, 20 nt, Human
uggccaggugggcccgaggg

SEQ ID NO: 287602 - RNA, 18 nt, Human
uggcccggggcugacugg

SEQ ID NO: 287603 - RNA, 19 nt, Human
uggcugcgccagccuggug

SEQ ID NO: 287604 - RNA, 24 nt, Human
ugggacccuggagcgcccgucucc

SEQ ID NO: 287605 - RNA, 21 nt, Human
ugggagaggagggggcacccc

SEQ ID NO: 287606 - RNA, 19 nt, Human
ugggaggccagagaggccg

SEQ ID NO: 287607 - RNA, 21 nt, Human
ugggaggccagagaggccggc

SEQ ID NO: 287608 - RNA, 24 nt, Human
ugggaggggacugauuguccuaau

SEQ ID NO: 287609 - RNA, 22 nt, Human
ugggguccaaacccagucccaa

SEQ ID NO: 287610 - RNA, 18 nt, Human
ugguuugcauagucugca

SEQ ID NO: 287611 - RNA, 22 nt, Human
uguccauuaaauagaaccagca

SEQ ID NO: 287612 - RNA, 21 nt, Human
uuggagagccagugaccuaug

SEQ ID NO: 287613 - RNA, 24 nt, Human
uuggagagguggccuccucccuca

SEQ ID NO: 287614 - RNA, 18 nt, Human
uugggcccugacgggaga

SEQ ID NO: 287615 - RNA, 20 nt, Human
aaaagcacggggagaagagu

SEQ ID NO: 287616 - RNA, 20 nt, Human
aaacaagguucaugcuugca

SEQ ID NO: 287617 - RNA, 20 nt, Human
aaaggaacuuaauaaagagc

SEQ ID NO: 287618 - RNA, 19 nt, Human
aaaggcagccaaaguucua

SEQ ID NO: 287619 - RNA, 18 nt, Human
aacauuguacuugcuuca

SEQ ID NO: 287620 - RNA, 25 nt, Human
aagagcaucuacaaaaaauauacag

SEQ ID NO: 287621 - RNA, 25 nt, Human
aagcaauccuccugccucaacuucc

SEQ ID NO: 287622 - RNA, 22 nt, Human
aagcacggggagaagagugaug

SEQ ID NO: 287623 - RNA, 19 nt, Human
aaggggaaagcauucaguc

SEQ ID NO: 287624 - RNA, 19 nt, Human
aagguggacggauggaugg

SEQ ID NO: 287625 - RNA, 19 nt, Human
aauugaucaagcagaucug

SEQ ID NO: 287626 - RNA, 18 nt, Human
acacagacacaggaguuu

SEQ ID NO: 287627 - RNA, 23 nt, Human
acacagccgcagaaaagcacggg

SEQ ID NO: 287628 - RNA, 18 nt, Human
accuccuuaagagccacc

SEQ ID NO: 287629 - RNA, 18 nt, Human
acucaaauuccugggcuc

SEQ ID NO: 287630 - RNA, 23 nt, Human
acucuuaucuuagaaaugaagau

SEQ ID NO: 287631 - RNA, 18 nt, Human
acucuugugaccugaggg

SEQ ID NO: 287632 - RNA, 24 nt, Human
acugcugcaguuucagaaguagcu

SEQ ID NO: 287633 - RNA, 21 nt, Human
agaaaggaacuuaauaaagag

SEQ ID NO: 287634 - RNA, 26 nt, Human
agaaaugaagauuagcucaaaagaga

SEQ ID NO: 287635 - RNA, 21 nt, Human
agacagaacacgguaacaagg

SEQ ID NO: 287636 - RNA, 18 nt, Human
agacucuggccgacaguc

SEQ ID NO: 287637 - RNA, 19 nt, Human
agaguuguagauucaauaa

SEQ ID NO: 287638 - RNA, 18 nt, Human
agaugucaauaaaacaca

SEQ ID NO: 287639 - RNA, 23 nt, Human
agcaauaaaaugagaacaguuau

SEQ ID NO: 287640 - RNA, 20 nt, Human
agcacaggauagauugagcc

SEQ ID NO: 287641 - RNA, 22 nt, Human
agccaacaagcagcauuugaga

SEQ ID NO: 287642 - RNA, 18 nt, Human
agccgcuccgcgccgggg

SEQ ID NO: 287643 - RNA, 19 nt, Human
agcugcgagugcgccgggg

SEQ ID NO: 287644 - RNA, 22 nt, Human
aggagaguuuuggggaaaggcg

SEQ ID NO: 287645 - RNA, 20 nt, Human
aggaggaggcggccgcggcg

SEQ ID NO: 287646 - RNA, 20 nt, Human
aggaggcggccgcggcgcgu

SEQ ID NO: 287647 - RNA, 22 nt, Human
aggcaaaugcacugucgucaaa

SEQ ID NO: 287648 - RNA, 18 nt, Human
agggcgccgcuccugaaa

SEQ ID NO: 287649 - RNA, 23 nt, Human
agugccugcccucugugggcagc

SEQ ID NO: 287650 - RNA, 19 nt, Human
auagaguauaggagacccc

SEQ ID NO: 287651 - RNA, 21 nt, Human
augcuuucuacuggagauaca

SEQ ID NO: 287652 - RNA, 22 nt, Human
auggucccagaagcugcuccaa

SEQ ID NO: 287653 - RNA, 18 nt, Human
auguagaaaaguguaaag

SEQ ID NO: 287654 - RNA, 21 nt, Human
auguccaaagugcugagccuc

SEQ ID NO: 287655 - RNA, 24 nt, Human
caaauuccugggcucaagcaaucc

SEQ ID NO: 287656 - RNA, 22 nt, Human
caacaagcagcauuugagagga

SEQ ID NO: 287657 - RNA, 23 nt, Human
caagcaauccuccugccucaacu

SEQ ID NO: 287658 - RNA, 23 nt, Human
caagcgccuuucuuuucugcuuu

SEQ ID NO: 287659 - RNA, 22 nt, Human
caaggcaaaugcacugucguca

SEQ ID NO: 287660 - RNA, 21 nt, Human
cacacgcauucaugcagucaa

SEQ ID NO: 287661 - RNA, 21 nt, Human
cacuucgcaccugucucuuca

SEQ ID NO: 287662 - RNA, 24 nt, Human
cagaaccgacuaaacaauacuggu

SEQ ID NO: 287663 - RNA, 23 nt, Human
cagaaugccuccuguugccucuc

SEQ ID NO: 287664 - RNA, 18 nt, Human
cagauugcaaaaucucaa

SEQ ID NO: 287665 - RNA, 18 nt, Human
caggguucgccagcuggg

SEQ ID NO: 287666 - RNA, 18 nt, Human
caggugcagggcgccgcu

SEQ ID NO: 287667 - RNA, 22 nt, Human
caucugucccucugcaguauuu

SEQ ID NO: 287668 - RNA, 21 nt, Human
cauuguacuugcuucauugau

SEQ ID NO: 287669 - RNA, 20 nt, Human
ccaaaguucuaaauguggug

SEQ ID NO: 287670 - RNA, 21 nt, Human
ccacccaccuggcuugggugc

SEQ ID NO: 287671 - RNA, 23 nt, Human
ccaccgccgccgccaacaccgcc

SEQ ID NO: 287672 - RNA, 21 nt, Human
cccccgggcccgcgcuccugc

SEQ ID NO: 287673 - RNA, 18 nt, Human
cccgaaacgccccccacc

SEQ ID NO: 287674 - RNA, 18 nt, Human
cccgagcugcgagugcgc

SEQ ID NO: 287675 - RNA, 21 nt, Human
cccucugugggcagcuaggcu

SEQ ID NO: 287676 - RNA, 22 nt, Human
ccgccaacaccgccgcgggcgg

SEQ ID NO: 287677 - RNA, 22 nt, Human
ccgcccccgggcccgcgcuccu

SEQ ID NO: 287678 - RNA, 21 nt, Human
ccgccgccaacaccgccgcgg

SEQ ID NO: 287679 - RNA, 19 nt, Human
ccgccgccaccgccgccgc

SEQ ID NO: 287680 - RNA, 22 nt, Human
ccgccgccaccgccgccgccaa

SEQ ID NO: 287681 - RNA, 18 nt, Human
ccgccgccgccaacaccg

SEQ ID NO: 287682 - RNA, 19 nt, Human
ccgccgccgccaacaccgc

SEQ ID NO: 287683 - RNA, 23 nt, Human
ccgccgccgccaccgccgccgcc

SEQ ID NO: 287684 - RNA, 25 nt, Human
ccgccgccgccaccgccgccgccaa

SEQ ID NO: 287685 - RNA, 18 nt, Human
ccgccgccgccgccaccg

SEQ ID NO: 287686 - RNA, 24 nt, Human
ccgccgccgccgccaccgccgccg

SEQ ID NO: 287687 - RNA, 19 nt, Human
ccgcgcuccugcgaccggg

SEQ ID NO: 287688 - RNA, 20 nt, Human
ccgcggcgcguucccgcccc

SEQ ID NO: 287689 - RNA, 25 nt, Human
ccuccugccucaacuucccuaguag

SEQ ID NO: 287690 - RNA, 21 nt, Human
ccuccuuaagagccaccaccc

SEQ ID NO: 287691 - RNA, 22 nt, Human
ccucuccucagaaggcucugca

SEQ ID NO: 287692 - RNA, 19 nt, Human
ccucugugggcagcuaggc

SEQ ID NO: 287693 - RNA, 21 nt, Human
ccugcgaccgggcuccggggc

SEQ ID NO: 287694 - RNA, 23 nt, Human
ccugggcucaagcaauccuccug

SEQ ID NO: 287695 - RNA, 22 nt, Human
cgaggagaguuuuggggaaagg

SEQ ID NO: 287696 - RNA, 20 nt, Human
cgcacacgcauucaugcagu

SEQ ID NO: 287697 - RNA, 19 nt, Human
cgcccgagcugcgagugcg

SEQ ID NO: 287698 - RNA, 23 nt, Human
cgccgccgccgccgccaccgccg

SEQ ID NO: 287699 - RNA, 19 nt, Human
cgcggcgcguucccgcccc

SEQ ID NO: 287700 - RNA, 19 nt, Human
cggcacagaaggcaugugc

SEQ ID NO: 287701 - RNA, 23 nt, Human
cuagauguaguacaguuuccuuu

SEQ ID NO: 287702 - RNA, 24 nt, Human
cucaagcaauccuccugccucaac

SEQ ID NO: 287703 - RNA, 23 nt, Human
cugaaaggaaaucaagaauucau

SEQ ID NO: 287704 - RNA, 18 nt, Human
cugcgggucacuucgcac

SEQ ID NO: 287705 - RNA, 18 nt, Human
cuguguuguccaggcuag

SEQ ID NO: 287706 - RNA, 20 nt, Human
cuuaagagccaccacccacc

SEQ ID NO: 287707 - RNA, 18 nt, Human
cuuagaaaugaagauuag

SEQ ID NO: 287708 - RNA, 20 nt, Human
cuucgcaccugucucuucac

SEQ ID NO: 287709 - RNA, 28 nt, Human
cuucuggucuggcuuuggaaggaaaacc

SEQ ID NO: 287710 - RNA, 18 nt, Human
cuuuaaaucugucuuccu

SEQ ID NO: 287711 - RNA, 21 nt, Human
cuuuaaaucugucuuccuuuc

SEQ ID NO: 287712 - RNA, 26 nt, Human
gaacaccuccuuaagagccaccaccc

SEQ ID NO: 287713 - RNA, 24 nt, Human
gaagguggacggauggauggaugg

SEQ ID NO: 287714 - RNA, 25 nt, Human
gacugcuggcccuuugucacaugug

SEQ ID NO: 287715 - RNA, 18 nt, Human
gagaaagacgaggucgaa

SEQ ID NO: 287716 - RNA, 21 nt, Human
gagaaagacgaggucgaaaag

SEQ ID NO: 287717 - RNA, 20 nt, Human
gagaagagugaugugugaug

SEQ ID NO: 287718 - RNA, 18 nt, Human
gagcaggacaauauggag

SEQ ID NO: 287719 - RNA, 19 nt, Human
gagccggggaggaggaggc

SEQ ID NO: 287720 - RNA, 19 nt, Human
gagccucugggggcgggag

SEQ ID NO: 287721 - RNA, 23 nt, Human
gaggaagguggacggauggaugg

SEQ ID NO: 287722 - RNA, 18 nt, Human
gaggagaguuuuggggaa

SEQ ID NO: 287723 - RNA, 21 nt, Human
gaggaggaggcggccgcggcg

SEQ ID NO: 287724 - RNA, 19 nt, Human
gaggguucuuccguaaugu

SEQ ID NO: 287725 - RNA, 21 nt, Human
gauggcuagcaauaaaaugag

SEQ ID NO: 287726 - RNA, 23 nt, Human
gauucauaaaugugcacagcagc

SEQ ID NO: 287727 - RNA, 20 nt, Human
gcccccgggcccgcgcuccu

SEQ ID NO: 287728 - RNA, 19 nt, Human
gcccgcgcuccugcgaccg

SEQ ID NO: 287729 - RNA, 18 nt, Human
gccgcagaaaagcacggg

SEQ ID NO: 287730 - RNA, 21 nt, Human
gccgccuuuuaaagccgcucc

SEQ ID NO: 287731 - RNA, 20 nt, Human
gcugagccucugggggcggg

SEQ ID NO: 287732 - RNA, 18 nt, Human
gcugcgagugcgccgggg

SEQ ID NO: 287733 - RNA, 18 nt, Human
gcugcgagugcgccgggg

SEQ ID NO: 287734 - RNA, 20 nt, Human
gcuggccacagaaugccucc

SEQ ID NO: 287735 - RNA, 21 nt, Human
ggagaagagugaugugugaug

SEQ ID NO: 287736 - RNA, 18 nt, Human
ggauguuaacucuuuuau

SEQ ID NO: 287737 - RNA, 21 nt, Human
ggccgacagucuggaggaagg

SEQ ID NO: 287738 - RNA, 24 nt, Human
ggccgcggcgcguucccgcccccg

SEQ ID NO: 287739 - RNA, 23 nt, Human
gggauacuuuucuuaaauagcug

SEQ ID NO: 287740 - RNA, 22 nt, Human
gggcucaagcaauccuccugcc

SEQ ID NO: 287741 - RNA, 18 nt, Human
ggggguggagugccgccu

SEQ ID NO: 287742 - RNA, 24 nt, Human
guagugggggaaguaauuuuuuuu

SEQ ID NO: 287743 - RNA, 19 nt, Human
gugagccauguccaaagug

SEQ ID NO: 287744 - RNA, 23 nt, Human
gugccgccuuuuaaagccgcucc

SEQ ID NO: 287745 - RNA, 24 nt, Human
gugccgccuuuuaaagccgcuccg

SEQ ID NO: 287746 - RNA, 20 nt, Human
uaaaaaaaacuccucggacc

SEQ ID NO: 287747 - RNA, 20 nt, Human
uaaaaugcauauauaucggg

SEQ ID NO: 287748 - RNA, 19 nt, Human
uaaacaacaucuggguucu

SEQ ID NO: 287749 - RNA, 20 nt, Human
uaaggggaaagcauucaguc

SEQ ID NO: 287750 - RNA, 31 nt, Human
uaauaaagagcaucuacaaaaaauauacagg

SEQ ID NO: 287751 - RNA, 19 nt, Human
uacacagccgcagaaaagc

SEQ ID NO: 287752 - RNA, 21 nt, Human
uacacagccgcagaaaagcac

SEQ ID NO: 287753 - RNA, 26 nt, Human
uacagcugaagacagaaccggggucc

SEQ ID NO: 287754 - RNA, 25 nt, Human
uaccaugguaguaaaaguccuagcc

SEQ ID NO: 287755 - RNA, 23 nt, Human
uacuacacagccgcagaaaagca

SEQ ID NO: 287756 - RNA, 19 nt, Human
uagcaauaaaaugagaaca

SEQ ID NO: 287757 - RNA, 22 nt, Human
uaguaaaaguccuagccaguac

SEQ ID NO: 287758 - RNA, 24 nt, Human
uaguagcugcgacuauaggcacac

SEQ ID NO: 287759 - RNA, 20 nt, Human
uauguacagcugaagacaga

SEQ ID NO: 287760 - RNA, 21 nt, Human
uauguacagcugaagacagaa

SEQ ID NO: 287761 - RNA, 21 nt, Human
uauucaagggaauugaucaag

SEQ ID NO: 287762 - RNA, 23 nt, Human
ucaagggaauugaucaagcagau

SEQ ID NO: 287763 - RNA, 22 nt, Human
ucaggucgagguggucguucag

SEQ ID NO: 287764 - RNA, 22 nt, Human
ucauugauuucucuuucagagu

SEQ ID NO: 287765 - RNA, 22 nt, Human
ucccagaagcugcuccaaagcc

SEQ ID NO: 287766 - RNA, 20 nt, Human
uccggggccgagagccgucc

SEQ ID NO: 287767 - RNA, 19 nt, Human
uccugcuguguuguccagg

SEQ ID NO: 287768 - RNA, 18 nt, Human
uccugggcucaagcaauc

SEQ ID NO: 287769 - RNA, 21 nt, Human
uccugggcucaagcaauccuc

SEQ ID NO: 287770 - RNA, 22 nt, Human
uccugggcucaagcaauccucc

SEQ ID NO: 287771 - RNA, 22 nt, Human
uccugggcucaagcaauccucc

SEQ ID NO: 287772 - RNA, 24 nt, Human
uccugggcucaagcaauccuccug

SEQ ID NO: 287773 - RNA, 22 nt, Human
ucuccccgagauaaguggggau

SEQ ID NO: 287774 - RNA, 19 nt, Human
ucugcuuuggucuugaaga

SEQ ID NO: 287775 - RNA, 20 nt, Human
ucuucugaagggcagaggcu

SEQ ID NO: 287776 - RNA, 22 nt, Human
ucuuuuuuucucaaacgaggag

SEQ ID NO: 287777 - RNA, 18 nt, Human
ugaaagagaaaaggaggu

SEQ ID NO: 287778 - RNA, 20 nt, Human
ugaaaggaaaucaagaauuc

SEQ ID NO: 287779 - RNA, 18 nt, Human
ugacaaacuugaaagccg

SEQ ID NO: 287780 - RNA, 20 nt, Human
ugacaacaguguguauggug

SEQ ID NO: 287781 - RNA, 19 nt, Human
ugaccaaaccguccccaga

SEQ ID NO: 287782 - RNA, 20 nt, Human
ugaccaaaccguccccagac

SEQ ID NO: 287783 - RNA, 21 nt, Human
ugaccaaaccguccccagacu

SEQ ID NO: 287784 - RNA, 18 nt, Human
ugaggugagacaaagguc

SEQ ID NO: 287785 - RNA, 19 nt, Human
ugaguuuagcaagguugca

SEQ ID NO: 287786 - RNA, 23 nt, Human
ugauauuuuuuuuucucaccagu

SEQ ID NO: 287787 - RNA, 18 nt, Human
ugaucaagcagaucugug

SEQ ID NO: 287788 - RNA, 20 nt, Human
ugauggaugauuaacaaugc

SEQ ID NO: 287789 - RNA, 23 nt, Human
ugauggaugauuaacaaugcaug

SEQ ID NO: 287790 - RNA, 22 nt, Human
ugcacgcacacgcauucaugca

SEQ ID NO: 287791 - RNA, 24 nt, Human
ugcagggcgccgcuccugaaacag

SEQ ID NO: 287792 - RNA, 21 nt, Human
ugccaagcgccuuucuuuucu

SEQ ID NO: 287793 - RNA, 20 nt, Human
ugccucaacuucccuaguag

SEQ ID NO: 287794 - RNA, 19 nt, Human
ugcgaccgggcuccggggc

SEQ ID NO: 287795 - RNA, 20 nt, Human
ugcgccgggggguggagugc

SEQ ID NO: 287796 - RNA, 24 nt, Human
ugcuguguuguccaggcuagacuc

SEQ ID NO: 287797 - RNA, 22 nt, Human
ugcuucauugauuucucuuuca

SEQ ID NO: 287798 - RNA, 26 nt, Human
ugcuugcacgcacacgcauucaugca

SEQ ID NO: 287799 - RNA, 21 nt, Human
uggaugauuaacaaugcaugg

SEQ ID NO: 287800 - RNA, 18 nt, Human
uggcuuuggaauuggacu

SEQ ID NO: 287801 - RNA, 19 nt, Human
uggcuuuggaauuggacuu

SEQ ID NO: 287802 - RNA, 18 nt, Human
ugggaaaaaagacauugu

SEQ ID NO: 287803 - RNA, 24 nt, Human
ugggcucaagcaauccuccugccu

SEQ ID NO: 287804 - RNA, 18 nt, Human
ugguauagguggugucuc

SEQ ID NO: 287805 - RNA, 22 nt, Human
ugucucuucacccuucguuuca

SEQ ID NO: 287806 - RNA, 19 nt, Human
ugugagcaccuugcuauuc

SEQ ID NO: 287807 - RNA, 24 nt, Human
ugugagcaccuugcuauucugcuu

SEQ ID NO: 287808 - RNA, 23 nt, Human
ugugcacagcagcaguugguugc

SEQ ID NO: 287809 - RNA, 23 nt, Human
uguguuguccaggcuagacucaa

SEQ ID NO: 287810 - RNA, 24 nt, Human
uguguuguccaggcuagacucaaa

SEQ ID NO: 287811 - RNA, 23 nt, Human
uuagaaaaaauacguaacuacau

SEQ ID NO: 287812 - RNA, 22 nt, Human
uucacuuccuguugcuggagcc

SEQ ID NO: 287813 - RNA, 22 nt, Human
uucagaguuguagauucaauaa

SEQ ID NO: 287814 - RNA, 21 nt, Human
uugaaguaaagggccugcggg

SEQ ID NO: 287815 - RNA, 19 nt, Human
uuggagaguccuuuuaagg

SEQ ID NO: 287816 - RNA, 19 nt, Human
uuggucaucugucccucug

SEQ ID NO: 287817 - RNA, 21 nt, Human
uuucugcuuuggucuugaaga

SEQ ID NO: 287818 - RNA, 21 nt, Human
uuuuaauaauuauggauuugu

SEQ ID NO: 287819 - RNA, 22 nt, Human
aagagccuugcagguacaaggc

SEQ ID NO: 287820 - RNA, 20 nt, Human
aagcagggcaggggaggaag

SEQ ID NO: 287821 - RNA, 18 nt, Human
aagcccccgcacccucuc

SEQ ID NO: 287822 - RNA, 22 nt, Human
aagcccggccgacuucccgggg

SEQ ID NO: 287823 - RNA, 19 nt, Human
aagcucggagaccagacag

SEQ ID NO: 287824 - RNA, 21 nt, Human
aaggaagggggugcugacggc

SEQ ID NO: 287825 - RNA, 23 nt, Human
aagggcugccagcagggagaaug

SEQ ID NO: 287826 - RNA, 19 nt, Human
acaaaacaggugcauugcu

SEQ ID NO: 287827 - RNA, 20 nt, Human
acacaaucauguacaaaaca

SEQ ID NO: 287828 - RNA, 20 nt, Human
accaucggcggcgacucggg

SEQ ID NO: 287829 - RNA, 19 nt, Human
accccaagccccagcaccc

SEQ ID NO: 287830 - RNA, 21 nt, Human
accccaagccccagcacccca

SEQ ID NO: 287831 - RNA, 23 nt, Human
agaccagacagugauaaggaagg

SEQ ID NO: 287832 - RNA, 21 nt, Human
agacgagagugggaggggagg

SEQ ID NO: 287833 - RNA, 18 nt, Human
agacggcgggcggugggg

SEQ ID NO: 287834 - RNA, 22 nt, Human
agcaggugggcccuuugcuccc

SEQ ID NO: 287835 - RNA, 19 nt, Human
aggaagaagagguuaggaa

SEQ ID NO: 287836 - RNA, 19 nt, Human
aggaagggaagcagggcag

SEQ ID NO: 287837 - RNA, 22 nt, Human
aggaggccuuugagagcagggu

SEQ ID NO: 287838 - RNA, 19 nt, Human
aggagggaggagggcaucu

SEQ ID NO: 287839 - RNA, 21 nt, Human
aggagggaggagggcaucugc

SEQ ID NO: 287840 - RNA, 18 nt, Human
aggcccaggaggccaggu

SEQ ID NO: 287841 - RNA, 19 nt, Human
aggcccaggaggccaggug

SEQ ID NO: 287842 - RNA, 23 nt, Human
aggcccccaaccccaacuccugc

SEQ ID NO: 287843 - RNA, 20 nt, Human
agggaagcagggcaggggag

SEQ ID NO: 287844 - RNA, 20 nt, Human
agggagaguggggggccagg

SEQ ID NO: 287845 - RNA, 25 nt, Human
agggggauggacaagugcggagcug

SEQ ID NO: 287846 - RNA, 22 nt, Human
auggcaaggggcguggccccca

SEQ ID NO: 287847 - RNA, 21 nt, Human
auggggcaggugccggcagcc

SEQ ID NO: 287848 - RNA, 18 nt, Human
auucacccuccuguaccc

SEQ ID NO: 287849 - RNA, 21 nt, Human
auucacccuccuguaccccag

SEQ ID NO: 287850 - RNA, 23 nt, Human
caagccccagcaccccagccucc

SEQ ID NO: 287851 - RNA, 23 nt, Human
caagguaagcgaugagggacaga

SEQ ID NO: 287852 - RNA, 19 nt, Human
caccaugacuuccuccagc

SEQ ID NO: 287853 - RNA, 18 nt, Human
caccccaagccccagcac

SEQ ID NO: 287854 - RNA, 21 nt, Human
cacccuaggccaggggacuuu

SEQ ID NO: 287855 - RNA, 18 nt, Human
caccucaggcugcagccg

SEQ ID NO: 287856 - RNA, 22 nt, Human
cacuggagcugggaggacugca

SEQ ID NO: 287857 - RNA, 23 nt, Human
cagagguccccaagagacuuuuc

SEQ ID NO: 287858 - RNA, 21 nt, Human
cagcaggagcaaaggaggacu

SEQ ID NO: 287859 - RNA, 20 nt, Human
cagcaucgugggugcaggca

SEQ ID NO: 287860 - RNA, 18 nt, Human
cagcucaggcccugccag

SEQ ID NO: 287861 - RNA, 23 nt, Human
caggagggaggagggcaucugcg

SEQ ID NO: 287862 - RNA, 25 nt, Human
caggccccaaggugcagauugccag

SEQ ID NO: 287863 - RNA, 19 nt, Human
caggcccugccagaguguc

SEQ ID NO: 287864 - RNA, 19 nt, Human
caggcugcuacuguugcug

SEQ ID NO: 287865 - RNA, 20 nt, Human
caggcuggaguccagcuggg

SEQ ID NO: 287866 - RNA, 20 nt, Human
ccaagccccagcaccccagc

SEQ ID NO: 287867 - RNA, 23 nt, Human
ccagguggcccugcaaaugcucu

SEQ ID NO: 287868 - RNA, 18 nt, Human
cccacaugaagaagguca

SEQ ID NO: 287869 - RNA, 22 nt, Human
cccacaugaagaaggucagagc

SEQ ID NO: 287870 - RNA, 19 nt, Human
cccaggugcugggaagccg

SEQ ID NO: 287871 - RNA, 21 nt, Human
ccccaaagguccuuucacucu

SEQ ID NO: 287872 - RNA, 19 nt, Human
ccccaagagacuuuucuuc

SEQ ID NO: 287873 - RNA, 18 nt, Human
ccccaagccccagcaccc

SEQ ID NO: 287874 - RNA, 18 nt, Human
ccccaagccccagcaccc

SEQ ID NO: 287875 - RNA, 19 nt, Human
ccccagcaccccagccucc

SEQ ID NO: 287876 - RNA, 21 nt, Human
cccccaaccccaacuccugcc

SEQ ID NO: 287877 - RNA, 23 nt, Human
cccccaaccccaacuccugccug

SEQ ID NO: 287878 - RNA, 18 nt, Human
cccggccucaagcccggc

SEQ ID NO: 287879 - RNA, 22 nt, Human
cccggccucaagcccggccgac

SEQ ID NO: 287880 - RNA, 23 nt, Human
cccgugcagcaucgugggugcag

SEQ ID NO: 287881 - RNA, 20 nt, Human
cccgugcggccuucacgggc

SEQ ID NO: 287882 - RNA, 22 nt, Human
cccuggggccaccccaagcccc

SEQ ID NO: 287883 - RNA, 23 nt, Human
cccuggucugcuucccaagcccc

SEQ ID NO: 287884 - RNA, 19 nt, Human
ccucagggcucaggagacu

SEQ ID NO: 287885 - RNA, 21 nt, Human
ccuccagcucaccccucuuuc

SEQ ID NO: 287886 - RNA, 25 nt, Human
ccuccagguggcccugcaaaugcuc

SEQ ID NO: 287887 - RNA, 19 nt, Human
ccuggcccugagggaggcc

SEQ ID NO: 287888 - RNA, 20 nt, Human
cgacucggggcgaagcggga

SEQ ID NO: 287889 - RNA, 18 nt, Human
cgcugccgccgccaccgc

SEQ ID NO: 287890 - RNA, 19 nt, Human
cggagggagugaggcgggg

SEQ ID NO: 287891 - RNA, 22 nt, Human
cguuccuccuccagucccaccg

SEQ ID NO: 287892 - RNA, 19 nt, Human
cuacaggaggaggccgugg

SEQ ID NO: 287893 - RNA, 23 nt, Human
cucaccccucuuucaugucuggg

SEQ ID NO: 287894 - RNA, 21 nt, Human
cuccuguaccccagugacacc

SEQ ID NO: 287895 - RNA, 19 nt, Human
cucucucucuuuaccugga

SEQ ID NO: 287896 - RNA, 19 nt, Human
cugcagccgaagcucggag

SEQ ID NO: 287897 - RNA, 18 nt, Human
cugcaggacuucucagcu

SEQ ID NO: 287898 - RNA, 19 nt, Human
cuggaggcccaggaggcca

SEQ ID NO: 287899 - RNA, 18 nt, Human
cugggcccuggagcucag

SEQ ID NO: 287900 - RNA, 23 nt, Human
cuggugcugcaggacuucucagc

SEQ ID NO: 287901 - RNA, 24 nt, Human
cuucauucacccuccuguacccca

SEQ ID NO: 287902 - RNA, 23 nt, Human
cuuugccguagguuugggggucc

SEQ ID NO: 287903 - RNA, 26 nt, Human
cuuuguuuuguucuguuuugacuuuu

SEQ ID NO: 287904 - RNA, 18 nt, Human
gaacccgaagagcagaug

SEQ ID NO: 287905 - RNA, 23 nt, Human
gaagggaagcagggcaggggagg

SEQ ID NO: 287906 - RNA, 19 nt, Human
gacgagagugggaggggag

SEQ ID NO: 287907 - RNA, 21 nt, Human
gacggagggagugaggcgggg

SEQ ID NO: 287908 - RNA, 23 nt, Human
gagaagcagcaggagcaaaggag

SEQ ID NO: 287909 - RNA, 19 nt, Human
gagcaaaggaggacugagg

SEQ ID NO: 287910 - RNA, 20 nt, Human
gagcccaggacacaccucag

SEQ ID NO: 287911 - RNA, 24 nt, Human
gaggagcccaggacacaccucagg

SEQ ID NO: 287912 - RNA, 22 nt, Human
gaggggaaacagggcugggcug

SEQ ID NO: 287913 - RNA, 19 nt, Human
gaggggcggcaguggggag

SEQ ID NO: 287914 - RNA, 20 nt, Human
gaggucugccuguccccggg

SEQ ID NO: 287915 - RNA, 19 nt, Human
gauguugggcuaaguccua

SEQ ID NO: 287916 - RNA, 19 nt, Human
gccagcuucccaccuuucc

SEQ ID NO: 287917 - RNA, 18 nt, Human
gccccagcaccccagccu

SEQ ID NO: 287918 - RNA, 21 nt, Human
gcccuggagcucagggggacu

SEQ ID NO: 287919 - RNA, 22 nt, Human
gcccuuugcucccacccacccc

SEQ ID NO: 287920 - RNA, 19 nt, Human
gccucauggaggcugaugu

SEQ ID NO: 287921 - RNA, 18 nt, Human
gccuggggcugggagggc

SEQ ID NO: 287922 - RNA, 19 nt, Human
gcgcugccgccgccaccgc

SEQ ID NO: 287923 - RNA, 21 nt, Human
gcggagcugcgguuagcaggc

SEQ ID NO: 287924 - RNA, 18 nt, Human
gcggcagacggcgggcgg

SEQ ID NO: 287925 - RNA, 21 nt, Human
gcucugggaucucgccggggc

SEQ ID NO: 287926 - RNA, 21 nt, Human
gcugcagccccucccaggugc

SEQ ID NO: 287927 - RNA, 22 nt, Human
gcuggcuuugccguagguuugg

SEQ ID NO: 287928 - RNA, 19 nt, Human
ggaacccagugauuuuaug

SEQ ID NO: 287929 - RNA, 22 nt, Human
ggaaggagacgagagugggagg

SEQ ID NO: 287930 - RNA, 22 nt, Human
ggaaugguuaggccaagagccu

SEQ ID NO: 287931 - RNA, 20 nt, Human
ggacugaggggaaacagggc

SEQ ID NO: 287932 - RNA, 24 nt, Human
ggagacauccaucccucagggcuc

SEQ ID NO: 287933 - RNA, 19 nt, Human
ggaggaagggaagcagggc

SEQ ID NO: 287934 - RNA, 22 nt, Human
ggaggagggggcuggcgcugcc

SEQ ID NO: 287935 - RNA, 23 nt, Human
ggagggagaguggggggccaggg

SEQ ID NO: 287936 - RNA, 18 nt, Human
ggagggagugaggcgggg

SEQ ID NO: 287937 - RNA, 18 nt, Human
ggaguauggagggagggg

SEQ ID NO: 287938 - RNA, 21 nt, Human
ggcaggggaggaagaagaggu

SEQ ID NO: 287939 - RNA, 18 nt, Human
ggcuggcacagcccgggc

SEQ ID NO: 287940 - RNA, 21 nt, Human
ggcuuccaaaagcuugcuuca

SEQ ID NO: 287941 - RNA, 24 nt, Human
gggaaggagacgagagugggaggg

SEQ ID NO: 287942 - RNA, 23 nt, Human
gggagggcuggcacagcccgggc

SEQ ID NO: 287943 - RNA, 22 nt, Human
gggaggggaggggcggcagugg

SEQ ID NO: 287944 - RNA, 23 nt, Human
gggcaggggaggaagaagagguu

SEQ ID NO: 287945 - RNA, 18 nt, Human
gggccguggggacaagga

SEQ ID NO: 287946 - RNA, 19 nt, Human
gggcgguggggcagcccug

SEQ ID NO: 287947 - RNA, 20 nt, Human
gggcgguggggcagcccugg

SEQ ID NO: 287948 - RNA, 18 nt, Human
gggcuggcgcugccgccg

SEQ ID NO: 287949 - RNA, 21 nt, Human
gggggagcccaggccccaagg

SEQ ID NO: 287950 - RNA, 19 nt, Human
gggggaggagggggcuggc

SEQ ID NO: 287951 - RNA, 24 nt, Human
gggugcugacggcaggaaggaggu

SEQ ID NO: 287952 - RNA, 21 nt, Human
ggugccaucgccccuggcccu

SEQ ID NO: 287953 - RNA, 24 nt, Human
gguggaggaagggaagcagggcag

SEQ ID NO: 287954 - RNA, 19 nt, Human
gugacgggaguauggaggg

SEQ ID NO: 287955 - RNA, 24 nt, Human
gugggaggggaggggcggcagugg

SEQ ID NO: 287956 - RNA, 25 nt, Human
uacacaaucauguacaaaacaggug

SEQ ID NO: 287957 - RNA, 19 nt, Human
uacaggaggaggccguggg

SEQ ID NO: 287958 - RNA, 27 nt, Human
uacccuggggccaccccaagccccagc

SEQ ID NO: 287959 - RNA, 18 nt, Human
uacuguugcuggcuuugc

SEQ ID NO: 287960 - RNA, 18 nt, Human
uagaagggugcuccccgg

SEQ ID NO: 287961 - RNA, 18 nt, Human
uagcuggaaagaagggcc

SEQ ID NO: 287962 - RNA, 20 nt, Human
ucacucugacccagguuugg

SEQ ID NO: 287963 - RNA, 18 nt, Human
ucaggcugcagccgaagc

SEQ ID NO: 287964 - RNA, 21 nt, Human
ucaugggguuuuguccaaccc

SEQ ID NO: 287965 - RNA, 23 nt, Human
uccaaaagcuugcuucaggcucu

SEQ ID NO: 287966 - RNA, 20 nt, Human
uccaggggucuggagaggag

SEQ ID NO: 287967 - RNA, 21 nt, Human
uccaggggucuggagaggagg

SEQ ID NO: 287968 - RNA, 22 nt, Human
uccccaagagacuuuucuucca

SEQ ID NO: 287969 - RNA, 20 nt, Human
uccuaacagugggcuguugg

SEQ ID NO: 287970 - RNA, 19 nt, Human
uccuccagcucaccccucu

SEQ ID NO: 287971 - RNA, 18 nt, Human
ucgccggggcugcgggaa

SEQ ID NO: 287972 - RNA, 22 nt, Human
ucggaacuaauggagucaggaa

SEQ ID NO: 287973 - RNA, 22 nt, Human
ucuauggcgaggggaaggagac

SEQ ID NO: 287974 - RNA, 21 nt, Human
ucucaggcuggaggcacccgu

SEQ ID NO: 287975 - RNA, 24 nt, Human
ucuccccugaugucucaggcugga

SEQ ID NO: 287976 - RNA, 18 nt, Human
ucugcacuggagcuggga

SEQ ID NO: 287977 - RNA, 21 nt, Human
ugacuuccuccagcucacccc

SEQ ID NO: 287978 - RNA, 18 nt, Human
ugagagcaggguggugga

SEQ ID NO: 287979 - RNA, 21 nt, Human
ugaggcgggguggaaggguca

SEQ ID NO: 287980 - RNA, 19 nt, Human
ugaggggaaacagggcugg

SEQ ID NO: 287981 - RNA, 24 nt, Human
ugaggggaaacagggcugggcugg

SEQ ID NO: 287982 - RNA, 23 nt, Human
ugcacuggagcugggaggacugc

SEQ ID NO: 287983 - RNA, 21 nt, Human
ugcagccgaagcucggagacc

SEQ ID NO: 287984 - RNA, 20 nt, Human
ugcaggcaggagcuacagga

SEQ ID NO: 287985 - RNA, 21 nt, Human
ugcaugcccuucauucacccu

SEQ ID NO: 287986 - RNA, 18 nt, Human
ugcccuggagugggcagc

SEQ ID NO: 287987 - RNA, 18 nt, Human
ugcccuggagugggcagc

SEQ ID NO: 287988 - RNA, 18 nt, Human
ugccggcagccuggagug

SEQ ID NO: 287989 - RNA, 20 nt, Human
ugccuguccccggggugcca

SEQ ID NO: 287990 - RNA, 20 nt, Human
ugcuacuguugcuggcuuuu

SEQ ID NO: 287991 - RNA, 18 nt, Human
ugcugagaccacagcacu

SEQ ID NO: 287992 - RNA, 24 nt, Human
ugcuucaggcucugaggagcccag

SEQ ID NO: 287993 - RNA, 23 nt, Human
uggaacccgaagagcagauguug

SEQ ID NO: 287994 - RNA, 21 nt, Human
uggacauggagggagaguggg

SEQ ID NO: 287995 - RNA, 19 nt, Human
uggagacauggaagggcug

SEQ ID NO: 287996 - RNA, 26 nt, Human
uggcaaggggcguggcccccacacuc

SEQ ID NO: 287997 - RNA, 19 nt, Human
uggcacagcccgggcugag

SEQ ID NO: 287998 - RNA, 22 nt, Human
uggcgaggggaaggagacgaga

SEQ ID NO: 287999 - RNA, 25 nt, Human
uggcucucucucuuuaccuggaggc

SEQ ID NO: 288000 - RNA, 22 nt, Human
ugggaagccgcuggcacagaga

SEQ ID NO: 288001 - RNA, 18 nt, Human
ugggagaagcagcaggag

SEQ ID NO: 288002 - RNA, 19 nt, Human
ugggaucucgccggggcug

SEQ ID NO: 288003 - RNA, 21 nt, Human
ugggccuggggcugggagggc

SEQ ID NO: 288004 - RNA, 24 nt, Human
ugggccuggggcugggagggcugg

SEQ ID NO: 288005 - RNA, 21 nt, Human
uggggacaaggaagaaaaaca

SEQ ID NO: 288006 - RNA, 22 nt, Human
uggggcugcagccccucccagg

SEQ ID NO: 288007 - RNA, 19 nt, Human
ugguggaggaagggaagca

SEQ ID NO: 288008 - RNA, 22 nt, Human
uguggaacccagugauuuuaug

SEQ ID NO: 288009 - RNA, 26 nt, Human
uuccaggggucuggagaggaggccuu

SEQ ID NO: 288010 - RNA, 18 nt, Human
uugcuggcuuugccguag

SEQ ID NO: 288011 - RNA, 22 nt, Human
aagcccaccccaggaaccccaa

SEQ ID NO: 288012 - RNA, 20 nt, Human
aagggacagaggagcagcca

SEQ ID NO: 288013 - RNA, 18 nt, Human
acaaaggccccuccccuc

SEQ ID NO: 288014 - RNA, 20 nt, Human
acacgcuagaacaagccaca

SEQ ID NO: 288015 - RNA, 24 nt, Human
acacgcuagaacaagccacaagag

SEQ ID NO: 288016 - RNA, 18 nt, Human
acacucaccccaagccca

SEQ ID NO: 288017 - RNA, 23 nt, Human
accccaagcccaccccaggaacc

SEQ ID NO: 288018 - RNA, 19 nt, Human
agagaucacuucaaggacc

SEQ ID NO: 288019 - RNA, 18 nt, Human
agaggucaggaacugagu

SEQ ID NO: 288020 - RNA, 23 nt, Human
agcgacgguucagggcccugagg

SEQ ID NO: 288021 - RNA, 23 nt, Human
aggaaccccaaagcagaggucag

SEQ ID NO: 288022 - RNA, 19 nt, Human
caaagcagaggucaggaac

SEQ ID NO: 288023 - RNA, 23 nt, Human
caagcccaccccaggaaccccaa

SEQ ID NO: 288024 - RNA, 18 nt, Human
cacagcuccuggggaggc

SEQ ID NO: 288025 - RNA, 23 nt, Human
caccccaagcccaccccaggaac

SEQ ID NO: 288026 - RNA, 22 nt, Human
cagcuccuggggaggcccaggc

SEQ ID NO: 288027 - RNA, 18 nt, Human
caggaaccccaaagcaga

SEQ ID NO: 288028 - RNA, 19 nt, Human
caggaaccccaaagcagag

SEQ ID NO: 288029 - RNA, 25 nt, Human
caggaaccccaaagcagaggucagg

SEQ ID NO: 288030 - RNA, 26 nt, Human
ccaaagcagaggucaggaacugaguc

SEQ ID NO: 288031 - RNA, 21 nt, Human
ccaagcccaccccaggaaccc

SEQ ID NO: 288032 - RNA, 29 nt, Human
cccaggaaccccaaagcagaggucaggaa

SEQ ID NO: 288033 - RNA, 18 nt, Human
cccaucuugcccucagcc

SEQ ID NO: 288034 - RNA, 24 nt, Human
ccccaagcccaccccaggaacccc

SEQ ID NO: 288035 - RNA, 26 nt, Human
ccccaagcccaccccaggaaccccaa

SEQ ID NO: 288036 - RNA, 22 nt, Human
ccccugaacgcuucugucaccu

SEQ ID NO: 288037 - RNA, 27 nt, Human
ccccugaacgcuucugucaccucugac

SEQ ID NO: 288038 - RNA, 22 nt, Human
cccugggucccaggacuuccuc

SEQ ID NO: 288039 - RNA, 26 nt, Human
ccucccaucuugcccucagccuagac

SEQ ID NO: 288040 - RNA, 22 nt, Human
ccuggggaggcccaggcacccc

SEQ ID NO: 288041 - RNA, 22 nt, Human
ccugggucccaggacuuccucc

SEQ ID NO: 288042 - RNA, 22 nt, Human
cgacgguucagggcccugaggg

SEQ ID NO: 288043 - RNA, 21 nt, Human
cuacacucaccccaagcccac

SEQ ID NO: 288044 - RNA, 19 nt, Human
cucaaugcugccaccguga

SEQ ID NO: 288045 - RNA, 21 nt, Human
cucagccuagacucgucccuu

SEQ ID NO: 288046 - RNA, 18 nt, Human
cugggcucugaaccaggg

SEQ ID NO: 288047 - RNA, 21 nt, Human
gaacaagccacaagagggugc

SEQ ID NO: 288048 - RNA, 20 nt, Human
gcggauuuggggcuggggcc

SEQ ID NO: 288049 - RNA, 19 nt, Human
ggccccucggcgggugggg

SEQ ID NO: 288050 - RNA, 21 nt, Human
gucccaggacuuccucccuca

SEQ ID NO: 288051 - RNA, 21 nt, Human
guccucccugggccccucggc

SEQ ID NO: 288052 - RNA, 19 nt, Human
ucagccuagacucgucccu

SEQ ID NO: 288053 - RNA, 22 nt, Human
ucaggaacugaguccacagcuc

SEQ ID NO: 288054 - RNA, 24 nt, Human
ucccuagacaaaggccccuccccu

SEQ ID NO: 288055 - RNA, 24 nt, Human
ucccugggucccaggacuuccucc

SEQ ID NO: 288056 - RNA, 25 nt, Human
ucccugggucccaggacuuccuccc

SEQ ID NO: 288057 - RNA, 21 nt, Human
ucccuucccuagacaaaggcu

SEQ ID NO: 288058 - RNA, 20 nt, Human
ugaccucccaucuugcccuc

SEQ ID NO: 288059 - RNA, 21 nt, Human
ugacucugccgcguccucccu

SEQ ID NO: 288060 - RNA, 22 nt, Human
ugcccucagccuagacucgucc

SEQ ID NO: 288061 - RNA, 22 nt, Human
ugguggcggauuuggggcuggg

SEQ ID NO: 288062 - RNA, 25 nt, Human
ugguggcggauuuggggcuggggcc

SEQ ID NO: 288063 - RNA, 19 nt, Human
ugugugggugugugucaag

SEQ ID NO: 288064 - RNA, 19 nt, Human
uucagggcccugagggucc

SEQ ID NO: 288065 - RNA, 23 nt, Human
uucccuaccagucccuucccuag

SEQ ID NO: 288066 - RNA, 18 nt, Human
uuugugugugggugugug

SEQ ID NO: 288067 - RNA, 21 nt, Human
uuuuugguuuugugugugggu

SEQ ID NO: 288068 - RNA, 18 nt, Human
uuuuuuuuuuuuuuuuug

SEQ ID NO: 288069 - RNA, 24 nt, Human
uuuuuuuuuuuuuuuuuugguuuu

SEQ ID NO: 288070 - RNA, 24 nt, Human
acagaccagggccacgcccagggu

SEQ ID NO: 288071 - RNA, 23 nt, Human
aggcacagcauggcugcggcugu

SEQ ID NO: 288072 - RNA, 25 nt, Human
cagcauggcugcggcuguggguggc

SEQ ID NO: 288073 - RNA, 19 nt, Human
caggaggaagucccacugc

SEQ ID NO: 288074 - RNA, 20 nt, Human
caggaggcacagcauggcug

SEQ ID NO: 288075 - RNA, 20 nt, Human
ccagagacucugcccccagg

SEQ ID NO: 288076 - RNA, 19 nt, Human
ccccagggagcagccuccc

SEQ ID NO: 288077 - RNA, 21 nt, Human
cgcccagggugagcaggaggc

SEQ ID NO: 288078 - RNA, 19 nt, Human
gacacagaugaccacguca

SEQ ID NO: 288079 - RNA, 18 nt, Human
gagcucuggagccagagg

SEQ ID NO: 288080 - RNA, 18 nt, Human
gcacagcauggcugcggc

SEQ ID NO: 288081 - RNA, 23 nt, Human
gcaggugugcagcaggaagggga

SEQ ID NO: 288082 - RNA, 22 nt, Human
gcugugguuauucuuugaaagg

SEQ ID NO: 288083 - RNA, 21 nt, Human
ggaagucccacugcucuggag

SEQ ID NO: 288084 - RNA, 18 nt, Human
ggagguguggaagggugg

SEQ ID NO: 288085 - RNA, 21 nt, Human
gugagcaggaggcacagcaug

SEQ ID NO: 288086 - RNA, 20 nt, Human
uaauaaccucugccagagac

SEQ ID NO: 288087 - RNA, 22 nt, Human
ucugccagagacucugccccca

SEQ ID NO: 288088 - RNA, 21 nt, Human
ucuggucuuccuggaggcgga

SEQ ID NO: 288089 - RNA, 21 nt, Human
ugccagagacucugcccccag

SEQ ID NO: 288090 - RNA, 22 nt, Human
uggaagggugggagucuggucu

SEQ ID NO: 288091 - RNA, 18 nt, Human
uggcgacacagaugacca

SEQ ID NO: 288092 - RNA, 19 nt, Human
uggcucugagcucuggagc

SEQ ID NO: 288093 - RNA, 20 nt, Human
uggcucugagcucuggagcc

SEQ ID NO: 288094 - RNA, 26 nt, Human
ugugcagcaggaaggggauggcgaca

SEQ ID NO: 288095 - RNA, 23 nt, Human
uguggguggcucugagcucugga

SEQ ID NO: 288096 - RNA, 19 nt, Human
aaaaaaauccaaaaccuuu

SEQ ID NO: 288097 - RNA, 18 nt, Human
aaaaacaaacaagcaaaa

SEQ ID NO: 288098 - RNA, 22 nt, Human
aaacaaacaaaaagacacaagc

SEQ ID NO: 288099 - RNA, 28 nt, Human
aaacaaacaagcaaacaaaccggacccc

SEQ ID NO: 288100 - RNA, 19 nt, Human
aaacagggcucauuacaug

SEQ ID NO: 288101 - RNA, 20 nt, Human
aaacuuucccuuccagagac

SEQ ID NO: 288102 - RNA, 20 nt, Human
aaaggggacauuuaaaaaau

SEQ ID NO: 288103 - RNA, 21 nt, Human
aacaaaaagacacaagcuaga

SEQ ID NO: 288104 - RNA, 20 nt, Human
aacaaacaagcaaacaaaca

SEQ ID NO: 288105 - RNA, 28 nt, Human
aacaaacaagcaaacaaacaaaaagaca

SEQ ID NO: 288106 - RNA, 22 nt, Human
aacaucuucagagugagcuuua

SEQ ID NO: 288107 - RNA, 19 nt, Human
aaccuguugguuagcuaag

SEQ ID NO: 288108 - RNA, 23 nt, Human
aagcagcagugaaccucuaaacc

SEQ ID NO: 288109 - RNA, 19 nt, Human
aaggaugaucgagccaccg

SEQ ID NO: 288110 - RNA, 19 nt, Human
aagggcaucaacaggacag

SEQ ID NO: 288111 - RNA, 18 nt, Human
acaaacaaaaagacacaa

SEQ ID NO: 288112 - RNA, 24 nt, Human
acaaagcagcagugaaccucuaaa

SEQ ID NO: 288113 - RNA, 18 nt, Human
acacagaaccuucucagu

SEQ ID NO: 288114 - RNA, 18 nt, Human
acacauuucaggaaaagc

SEQ ID NO: 288115 - RNA, 21 nt, Human
acagaaaauagcagcaaacaa

SEQ ID NO: 288116 - RNA, 21 nt, Human
acagggcucauuacaugugga

SEQ ID NO: 288117 - RNA, 22 nt, Human
acaggggaaaaugauucuuuca

SEQ ID NO: 288118 - RNA, 21 nt, Human
acaguacaagcaagcagcuac

SEQ ID NO: 288119 - RNA, 22 nt, Human
accacacacagacgaaccagga

SEQ ID NO: 288120 - RNA, 21 nt, Human
agaaagaggcgaacgggagag

SEQ ID NO: 288121 - RNA, 23 nt, Human
agaauaauuuacaugaaaggaca

SEQ ID NO: 288122 - RNA, 20 nt, Human
agacagcagacagagaaaac

SEQ ID NO: 288123 - RNA, 18 nt, Human
agaggaaaagagggagga

SEQ ID NO: 288124 - RNA, 21 nt, Human
agaggaaaagagggaggaggg

SEQ ID NO: 288125 - RNA, 24 nt, Human
agaggaaaagagggaggaggggcc

SEQ ID NO: 288126 - RNA, 19 nt, Human
agaggcgaacgggagagca

SEQ ID NO: 288127 - RNA, 23 nt, Human
agagggaggaggggccgaaggag

SEQ ID NO: 288128 - RNA, 24 nt, Human
agaggggagggaggaaggagggag

SEQ ID NO: 288129 - RNA, 24 nt, Human
agcaaacaaacaaaaagacacaag

SEQ ID NO: 288130 - RNA, 18 nt, Human
agcagugaaccucuaaac

SEQ ID NO: 288131 - RNA, 18 nt, Human
agcucggcgcucgcgguu

SEQ ID NO: 288132 - RNA, 22 nt, Human
agcucuuuauuucuuaaguggc

SEQ ID NO: 288133 - RNA, 24 nt, Human
aggaauuagcuuaagauguaauuu

SEQ ID NO: 288134 - RNA, 21 nt, Human
aggagggagggagggaaggag

SEQ ID NO: 288135 - RNA, 22 nt, Human
aggagggagggagggaaggagg

SEQ ID NO: 288136 - RNA, 22 nt, Human
aggagggagggagggaaggagg

SEQ ID NO: 288137 - RNA, 24 nt, Human
aggagggagggagggaaggagggg

SEQ ID NO: 288138 - RNA, 25 nt, Human
agggaggaaggagggagggagggaa

SEQ ID NO: 288139 - RNA, 20 nt, Human
agggaggaggggccgaagga

SEQ ID NO: 288140 - RNA, 18 nt, Human
agggagggagggaaggag

SEQ ID NO: 288141 - RNA, 23 nt, Human
aggggaggggagcgggcgggcuc

SEQ ID NO: 288142 - RNA, 26 nt, Human
agggggaggggaggggagcgggcggg

SEQ ID NO: 288143 - RNA, 20 nt, Human
agugucuuccacacagggga

SEQ ID NO: 288144 - RNA, 21 nt, Human
aucccuaaaaaacaccaaaaa

SEQ ID NO: 288145 - RNA, 23 nt, Human
auggcgcgcugggcccgggcccg

SEQ ID NO: 288146 - RNA, 24 nt, Human
auuaagaccaaaaugaaauaaaug

SEQ ID NO: 288147 - RNA, 24 nt, Human
caaaaaaaaccuguugguuagcua

SEQ ID NO: 288148 - RNA, 22 nt, Human
caaaaacccaggacuaaggaca

SEQ ID NO: 288149 - RNA, 21 nt, Human
caaaaagacacaagcuagaca

SEQ ID NO: 288150 - RNA, 26 nt, Human
caaacaagaacaaagauauuuuccau

SEQ ID NO: 288151 - RNA, 23 nt, Human
caaagcauuaagaccaaaaugaa

SEQ ID NO: 288152 - RNA, 24 nt, Human
caacucagcagcaggcuguggcaa

SEQ ID NO: 288153 - RNA, 23 nt, Human
caagcaaacaaacaaaaagacac

SEQ ID NO: 288154 - RNA, 21 nt, Human
caauuugauugagaaagugac

SEQ ID NO: 288155 - RNA, 22 nt, Human
cacagaaacagaaagaggcgaa

SEQ ID NO: 288156 - RNA, 18 nt, Human
cacauugcacaucccuaa

SEQ ID NO: 288157 - RNA, 21 nt, Human
caccacuuuuccccaaaugag

SEQ ID NO: 288158 - RNA, 22 nt, Human
caccgaugucaacaaaauaucc

SEQ ID NO: 288159 - RNA, 20 nt, Human
caccggagcgcugcaccgcc

SEQ ID NO: 288160 - RNA, 20 nt, Human
cacgcuugcuuccuccugca

SEQ ID NO: 288161 - RNA, 22 nt, Human
cacucccauccaccggcggggg

SEQ ID NO: 288162 - RNA, 21 nt, Human
cagcaaacaagaacaaagaua

SEQ ID NO: 288163 - RNA, 23 nt, Human
cagcuaggauuucuugggcacgg

SEQ ID NO: 288164 - RNA, 21 nt, Human
cagcuugcccuccccccaccc

SEQ ID NO: 288165 - RNA, 22 nt, Human
caggaaaagcccuaauaaccac

SEQ ID NO: 288166 - RNA, 23 nt, Human
caggaaaagcccuaauaaccacc

SEQ ID NO: 288167 - RNA, 21 nt, Human
caggacuaaggacauggaggu

SEQ ID NO: 288168 - RNA, 23 nt, Human
cagugaaccucuaaaccaauuaa

SEQ ID NO: 288169 - RNA, 24 nt, Human
cauauacuuacaaacauuuacaua

SEQ ID NO: 288170 - RNA, 27 nt, Human
cauuuaaaaaaucacauaguacacaaa

SEQ ID NO: 288171 - RNA, 20 nt, Human
ccaaaacaaauauauccuac

SEQ ID NO: 288172 - RNA, 20 nt, Human
ccaaagcuuccaaagacuac

SEQ ID NO: 288173 - RNA, 19 nt, Human
ccaccgaugucaacaaaau

SEQ ID NO: 288174 - RNA, 24 nt, Human
ccacuggaaaaaaaauccaaaacc

SEQ ID NO: 288175 - RNA, 21 nt, Human
ccagcccagguuuuuaaaccc

SEQ ID NO: 288176 - RNA, 23 nt, Human
ccccgccgcuccagcuccgucug

SEQ ID NO: 288177 - RNA, 18 nt, Human
ccccuccuucuccuucuc

SEQ ID NO: 288178 - RNA, 18 nt, Human
ccccuccuucuccuucuc

SEQ ID NO: 288179 - RNA, 21 nt, Human
cccggggagggggaggggagg

SEQ ID NO: 288180 - RNA, 18 nt, Human
cccgugucgcugcuccuc

SEQ ID NO: 288181 - RNA, 19 nt, Human
cccgugucgcugcuccucc

SEQ ID NO: 288182 - RNA, 18 nt, Human
ccgccgccgccccgccgc

SEQ ID NO: 288183 - RNA, 20 nt, Human
ccgccgccgccccgccgcuc

SEQ ID NO: 288184 - RNA, 21 nt, Human
ccgccgccgccccgccgcucc

SEQ ID NO: 288185 - RNA, 22 nt, Human
ccgccggacuccgccgccgccc

SEQ ID NO: 288186 - RNA, 28 nt, Human
ccgccuccgccgggccucuuccguccuu

SEQ ID NO: 288187 - RNA, 19 nt, Human
ccuccccccaccccacugg

SEQ ID NO: 288188 - RNA, 22 nt, Human
ccuccuucuccuucucgcuccc

SEQ ID NO: 288189 - RNA, 19 nt, Human
ccuucuccuucucgcuccc

SEQ ID NO: 288190 - RNA, 19 nt, Human
cggacugcucucccccacc

SEQ ID NO: 288191 - RNA, 22 nt, Human
cucacucgcucucccggccgcc

SEQ ID NO: 288192 - RNA, 20 nt, Human
cucgcgcccgagcgcucccc

SEQ ID NO: 288193 - RNA, 22 nt, Human
cucggcgcucgcgguuucucuc

SEQ ID NO: 288194 - RNA, 24 nt, Human
cugauauagugguaugucccuccu

SEQ ID NO: 288195 - RNA, 18 nt, Human
cugcaccgccgccuccgc

SEQ ID NO: 288196 - RNA, 18 nt, Human
cugcucucccccaccccu

SEQ ID NO: 288197 - RNA, 19 nt, Human
cuggggaacuguuuuccuc

SEQ ID NO: 288198 - RNA, 22 nt, Human
cuuauaauuuaaauaugccacu

SEQ ID NO: 288199 - RNA, 20 nt, Human
cuugcccuccccccaccccc

SEQ ID NO: 288200 - RNA, 24 nt, Human
gaaaaugauucuuucacaaaugaa

SEQ ID NO: 288201 - RNA, 21 nt, Human
gaagauauucaacaaguaaga

SEQ ID NO: 288202 - RNA, 20 nt, Human
gaaggagggagggagggaag

SEQ ID NO: 288203 - RNA, 21 nt, Human
gacaguacaagcaagcagcua

SEQ ID NO: 288204 - RNA, 19 nt, Human
gacuugcuaacacuaguga

SEQ ID NO: 288205 - RNA, 19 nt, Human
gaggaggggccgaaggaga

SEQ ID NO: 288206 - RNA, 18 nt, Human
gagggaaggaggggggag

SEQ ID NO: 288207 - RNA, 20 nt, Human
gagggaaggaggggggagga

SEQ ID NO: 288208 - RNA, 25 nt, Human
gagggaaggaggggggaggauggcg

SEQ ID NO: 288209 - RNA, 24 nt, Human
gcacaccauuggucacaccacaca

SEQ ID NO: 288210 - RNA, 21 nt, Human
gcacaucccuaaaaaacacca

SEQ ID NO: 288211 - RNA, 19 nt, Human
gcccauauacuuacaaaca

SEQ ID NO: 288212 - RNA, 18 nt, Human
gcccuccccccaccccac

SEQ ID NO: 288213 - RNA, 22 nt, Human
gccgccgccccgccgcuccagc

SEQ ID NO: 288214 - RNA, 27 nt, Human
gcgcuccccuccuucuccuucucgcuc

SEQ ID NO: 288215 - RNA, 20 nt, Human
gcuugcccuccccccacccc

SEQ ID NO: 288216 - RNA, 25 nt, Human
ggagaggggagggaggaaggaggga

SEQ ID NO: 288217 - RNA, 19 nt, Human
ggaggaaggagggagggag

SEQ ID NO: 288218 - RNA, 21 nt, Human
ggagggaaggaggggggagga

SEQ ID NO: 288219 - RNA, 24 nt, Human
ggagggaaggaggggggaggaugg

SEQ ID NO: 288220 - RNA, 24 nt, Human
ggagggggagggagaggggaggga

SEQ ID NO: 288221 - RNA, 24 nt, Human
ggaggggggaggauggcgcgcugg

SEQ ID NO: 288222 - RNA, 21 nt, Human
ggcacuggcagcggggaggcg

SEQ ID NO: 288223 - RNA, 19 nt, Human
ggcccggggagggggaggg

SEQ ID NO: 288224 - RNA, 19 nt, Human
gggcccgggcccggggagg

SEQ ID NO: 288225 - RNA, 20 nt, Human
ggggaggggaggggagcggg

SEQ ID NO: 288226 - RNA, 21 nt, Human
ggggaggggaggggagcgggc

SEQ ID NO: 288227 - RNA, 21 nt, Human
ggggaggggaggggagcgggc

SEQ ID NO: 288228 - RNA, 20 nt, Human
ggggagggggagggagaggg

SEQ ID NO: 288229 - RNA, 18 nt, Human
ggggagggggaggggagg

SEQ ID NO: 288230 - RNA, 22 nt, Human
gggggaggauggcgcgcugggc

SEQ ID NO: 288231 - RNA, 18 nt, Human
gggggagggagaggggag

SEQ ID NO: 288232 - RNA, 21 nt, Human
guaagugaaacacaguuuaaa

SEQ ID NO: 288233 - RNA, 23 nt, Human
gucacaccacacacagacgaacc

SEQ ID NO: 288234 - RNA, 24 nt, Human
gugaaccucuaaaccaauuaauaa

SEQ ID NO: 288235 - RNA, 26 nt, Human
uaaacaaaaggugaaaacaggggacc

SEQ ID NO: 288236 - RNA, 19 nt, Human
uaaccaccacuuuucccca

SEQ ID NO: 288237 - RNA, 24 nt, Human
uaaccucaucauuguccuuauccc

SEQ ID NO: 288238 - RNA, 19 nt, Human
uaacucaacucagcagcag

SEQ ID NO: 288239 - RNA, 19 nt, Human
uaaggaauuagcuuaagau

SEQ ID NO: 288240 - RNA, 24 nt, Human
uaauaauccaacauaaaaugacac

SEQ ID NO: 288241 - RNA, 19 nt, Human
uacaaacaaauguuaagau

SEQ ID NO: 288242 - RNA, 22 nt, Human
uacaaacaaauguuaagaugca

SEQ ID NO: 288243 - RNA, 22 nt, Human
uacaggacgcuaacucucaccc

SEQ ID NO: 288244 - RNA, 24 nt, Human
uacauguacaaacaaauguuaaga

SEQ ID NO: 288245 - RNA, 22 nt, Human
uacccacuuacagauaggccca

SEQ ID NO: 288246 - RNA, 18 nt, Human
uacggcgaacgcucccca

SEQ ID NO: 288247 - RNA, 21 nt, Human
uagacagcagacagagaaaac

SEQ ID NO: 288248 - RNA, 20 nt, Human
uagcagcaaacaagaacaaa

SEQ ID NO: 288249 - RNA, 21 nt, Human
uauaccacuagccucugcgug

SEQ ID NO: 288250 - RNA, 22 nt, Human
uauguaaauuuacaguauacaa

SEQ ID NO: 288251 - RNA, 21 nt, Human
ucacuguuaucucauuguucu

SEQ ID NO: 288252 - RNA, 19 nt, Human
ucagaagagcuaagggaaa

SEQ ID NO: 288253 - RNA, 18 nt, Human
ucagaagauucugaauug

SEQ ID NO: 288254 - RNA, 18 nt, Human
ucagaagauucugaauug

SEQ ID NO: 288255 - RNA, 23 nt, Human
ucagaauuuuaucuuuguuaaac

SEQ ID NO: 288256 - RNA, 20 nt, Human
ucagacagcagugcaggaaa

SEQ ID NO: 288257 - RNA, 19 nt, Human
ucaggcaccaacagauagc

SEQ ID NO: 288258 - RNA, 19 nt, Human
ucaguauuucugucauuau

SEQ ID NO: 288259 - RNA, 18 nt, Human
uccaccggcgggggaggg

SEQ ID NO: 288260 - RNA, 22 nt, Human
uccccagagucagaccuaguuu

SEQ ID NO: 288261 - RNA, 18 nt, Human
ucucauuguucuguuaac

SEQ ID NO: 288262 - RNA, 19 nt, Human
ucugccuucuuaggccugg

SEQ ID NO: 288263 - RNA, 23 nt, Human
ucugguaacucaacucagcagca

SEQ ID NO: 288264 - RNA, 21 nt, Human
ucuuacuguaaaacacgagag

SEQ ID NO: 288265 - RNA, 23 nt, Human
ugacacacucaauggggagauua

SEQ ID NO: 288266 - RNA, 30 nt, Human
ugaccuguaaauccagcuugcccuccccuu

SEQ ID NO: 288267 - RNA, 22 nt, Human
ugauguguaugauacacacaua

SEQ ID NO: 288268 - RNA, 20 nt, Human
ugauucuuucacaaaugaau

SEQ ID NO: 288269 - RNA, 21 nt, Human
ugcaagaugccgugacaacag

SEQ ID NO: 288270 - RNA, 22 nt, Human
ugcaggggaagacacgcuugcu

SEQ ID NO: 288271 - RNA, 20 nt, Human
ugcaucgguaccauucuccu

SEQ ID NO: 288272 - RNA, 19 nt, Human
ugcaugaauacuuugugug

SEQ ID NO: 288273 - RNA, 23 nt, Human
ugccaaaacaaauauauccuacu

SEQ ID NO: 288274 - RNA, 18 nt, Human
uggaaaaaaaauccaaaa

SEQ ID NO: 288275 - RNA, 19 nt, Human
uggaaaaaaaauccaaaac

SEQ ID NO: 288276 - RNA, 20 nt, Human
uggcaugcacucucaagagc

SEQ ID NO: 288277 - RNA, 22 nt, Human
uguagaaaaauccagucagaag

SEQ ID NO: 288278 - RNA, 18 nt, Human
ugucaacuauucaguuua

SEQ ID NO: 288279 - RNA, 25 nt, Human
uguggcaaucucccaaguaaggaua

SEQ ID NO: 288280 - RNA, 25 nt, Human
ugugugcugcaggggaagacacgcu

SEQ ID NO: 288281 - RNA, 22 nt, Human
uguuuuccucaauuaccacuua

SEQ ID NO: 288282 - RNA, 20 nt, Human
uuaaguggccaauuugauug

SEQ ID NO: 288283 - RNA, 26 nt, Human
uuacccuuaaacaauucaugcuaaaa

SEQ ID NO: 288284 - RNA, 19 nt, Human
uucaccaugcaugaauacu

SEQ ID NO: 288285 - RNA, 21 nt, Human
uucucaaaauaggacagaaaa

SEQ ID NO: 288286 - RNA, 21 nt, Human
uucuugggcacguuacagaua

SEQ ID NO: 288287 - RNA, 26 nt, Human
uuuacagaguaaucguuuccuccucc

SEQ ID NO: 288288 - RNA, 27 nt, Human
uuuucacacacacacacagucaauaau

SEQ ID NO: 288289 - RNA, 27 nt, Human
aaaaagccaaguagaauggugggcacc

SEQ ID NO: 288290 - RNA, 21 nt, Human
aaagagaaggauucuguagug

SEQ ID NO: 288291 - RNA, 23 nt, Human
aaugcaaagugccuuaagaaaga

SEQ ID NO: 288292 - RNA, 24 nt, Human
accaguuuaaaucccuccuccccu

SEQ ID NO: 288293 - RNA, 24 nt, Human
caaacaaaccuucuauguacagga

SEQ ID NO: 288294 - RNA, 23 nt, Human
ccacagaaaggccaagaaaagaa

SEQ ID NO: 288295 - RNA, 19 nt, Human
ccaguuuaaaucccuccuc

SEQ ID NO: 288296 - RNA, 20 nt, Human
ccuucuauguacaggaccag

SEQ ID NO: 288297 - RNA, 18 nt, Human
cggcugaggcgucggcgg

SEQ ID NO: 288298 - RNA, 20 nt, Human
cuccuccccuucaaacacua

SEQ ID NO: 288299 - RNA, 20 nt, Human
uagauaugaacauccaggaa

SEQ ID NO: 288300 - RNA, 22 nt, Human
ucaaacacuagauaugaacauc

SEQ ID NO: 288301 - RNA, 21 nt, Human
uccacagaaaggccaagaaaa

SEQ ID NO: 288302 - RNA, 19 nt, Human
ucccuccuccccuucaaac

SEQ ID NO: 288303 - RNA, 21 nt, Human
uccgugcgggccccaagcggc

SEQ ID NO: 288304 - RNA, 21 nt, Human
uccgugcgggccccaagcggc

SEQ ID NO: 288305 - RNA, 23 nt, Human
uccgugcgggccccaagcggcug

SEQ ID NO: 288306 - RNA, 22 nt, Human
ucuuccuuggcuaauuuuucuc

SEQ ID NO: 288307 - RNA, 21 nt, Human
ugauaauuauuauauaugaca

SEQ ID NO: 288308 - RNA, 22 nt, Human
uucaguauuuaggcuugauguu

SEQ ID NO: 288309 - RNA, 21 nt, Human
uuuaggcuugauguuguccca

SEQ ID NO: 288310 - RNA, 20 nt, Human
aaccuucgcuucccccacga

SEQ ID NO: 288311 - RNA, 21 nt, Human
agggcgccgccuccucuccag

SEQ ID NO: 288312 - RNA, 25 nt, Human
caaaggaccgucccaacgcuagcac

SEQ ID NO: 288313 - RNA, 25 nt, Human
cacuccuaccccucgcggcaacaaa

SEQ ID NO: 288314 - RNA, 19 nt, Human
caggaaccuucgcuucccc

SEQ ID NO: 288315 - RNA, 21 nt, Human
cagugggcucgcccggcgcuu

SEQ ID NO: 288316 - RNA, 24 nt, Human
cccacgacggccgcacagugggcu

SEQ ID NO: 288317 - RNA, 22 nt, Human
ccccucgcggcaacaaaggacu

SEQ ID NO: 288318 - RNA, 21 nt, Human
cgccacgcccacuccuacccc

SEQ ID NO: 288319 - RNA, 18 nt, Human
cgcggaggacgaaggccg

SEQ ID NO: 288320 - RNA, 18 nt, Human
cggcccgggaguguuccg

SEQ ID NO: 288321 - RNA, 21 nt, Human
gcuccgccacgcccacuccua

SEQ ID NO: 288322 - RNA, 22 nt, Human
ggaggacgaaggccgauacagg

SEQ ID NO: 288323 - RNA, 21 nt, Human
ggcuccgccacgcccacuccu

SEQ ID NO: 288324 - RNA, 20 nt, Human
ucccaacgcuagcacacccg

SEQ ID NO: 288325 - RNA, 18 nt, Human
uggcgccgcagcuccugc

SEQ ID NO: 288326 - RNA, 24 nt, Human
uuaggagguagguggaaucaggaa

SEQ ID NO: 288327 - RNA, 23 nt, Human
uuuuuuuuuuuuuuuuuucacug

SEQ ID NO: 288328 - RNA, 24 nt, Human
aaaaagucacagaugucacaaggg

SEQ ID NO: 288329 - RNA, 20 nt, Human
aaagagaugauuaaauucaa

SEQ ID NO: 288330 - RNA, 20 nt, Human
aaagaggaaaaacagcaaga

SEQ ID NO: 288331 - RNA, 19 nt, Human
aagaaggaacaaagacaga

SEQ ID NO: 288332 - RNA, 23 nt, Human
aagacacuucauccucccaauua

SEQ ID NO: 288333 - RNA, 19 nt, Human
aaguacuuuggggagaggc

SEQ ID NO: 288334 - RNA, 20 nt, Human
aauggaauuaugacacuuuu

SEQ ID NO: 288335 - RNA, 23 nt, Human
accacaggaaucuggacauuuca

SEQ ID NO: 288336 - RNA, 23 nt, Human
accuauauugagggcaaaggcca

SEQ ID NO: 288337 - RNA, 19 nt, Human
acuacagcauucacaaugc

SEQ ID NO: 288338 - RNA, 20 nt, Human
acucugcaaugucagacaug

SEQ ID NO: 288339 - RNA, 21 nt, Human
agaaggaacaaagacagaaga

SEQ ID NO: 288340 - RNA, 19 nt, Human
agacagaagagacuccagg

SEQ ID NO: 288341 - RNA, 22 nt, Human
agcaaagcagugcuuaugagag

SEQ ID NO: 288342 - RNA, 19 nt, Human
agcaagauuauuaaaucca

SEQ ID NO: 288343 - RNA, 22 nt, Human
agcagacagagaaaaggaaaga

SEQ ID NO: 288344 - RNA, 21 nt, Human
agcccacacucauaauagcac

SEQ ID NO: 288345 - RNA, 19 nt, Human
aggaacaaagacagaagag

SEQ ID NO: 288346 - RNA, 20 nt, Human
aggaagaagauuccaauagg

SEQ ID NO: 288347 - RNA, 22 nt, Human
aggcagagagcuguguccuugg

SEQ ID NO: 288348 - RNA, 20 nt, Human
aggcaggggcacacucaggu

SEQ ID NO: 288349 - RNA, 27 nt, Human
aggcaugaaaugaaacaaaagggaccc

SEQ ID NO: 288350 - RNA, 24 nt, Human
agucaguagcagacagagaaaagg

SEQ ID NO: 288351 - RNA, 23 nt, Human
aucauuguacauaaaaucaaaau

SEQ ID NO: 288352 - RNA, 22 nt, Human
auggaaaauacugaaaagauuc

SEQ ID NO: 288353 - RNA, 23 nt, Human
caaguaccauuuaaaaaggugag

SEQ ID NO: 288354 - RNA, 22 nt, Human
cacaggcuacccaggguugucu

SEQ ID NO: 288355 - RNA, 23 nt, Human
cacuacagcauucacaaugcuag

SEQ ID NO: 288356 - RNA, 25 nt, Human
cacuucaacuaggcuccuuugaaaa

SEQ ID NO: 288357 - RNA, 20 nt, Human
caggagcaggcacuggcacc

SEQ ID NO: 288358 - RNA, 25 nt, Human
caggagcaggcacuggcaccagccg

SEQ ID NO: 288359 - RNA, 24 nt, Human
caggcugagcucuuacucugagcu

SEQ ID NO: 288360 - RNA, 23 nt, Human
caucuaaaacugacuucaaguac

SEQ ID NO: 288361 - RNA, 19 nt, Human
caucuggcaggcaggggca

SEQ ID NO: 288362 - RNA, 24 nt, Human
caugaaaugaaacaaaaguuuuga

SEQ ID NO: 288363 - RNA, 24 nt, Human
ccaaaauaagaaggaacaaagaca

SEQ ID NO: 288364 - RNA, 21 nt, Human
ccacagaagaaacgucuccag

SEQ ID NO: 288365 - RNA, 23 nt, Human
ccagacacugaucacaggcuacu

SEQ ID NO: 288366 - RNA, 21 nt, Human
cccaauuauauucuuugucau

SEQ ID NO: 288367 - RNA, 21 nt, Human
ccucccaauuauauucuuugu

SEQ ID NO: 288368 - RNA, 22 nt, Human
cgcaggguccagauccccaggu

SEQ ID NO: 288369 - RNA, 23 nt, Human
cguccaaauauguggucuguguc

SEQ ID NO: 288370 - RNA, 23 nt, Human
cuaaaacaccuauauugagggca

SEQ ID NO: 288371 - RNA, 19 nt, Human
cuccagggacgucccuccc

SEQ ID NO: 288372 - RNA, 25 nt, Human
cugauugcaaaauaaugacaaccaa

SEQ ID NO: 288373 - RNA, 22 nt, Human
cugggcuuaaacaagucuagaa

SEQ ID NO: 288374 - RNA, 23 nt, Human
gaaaagcugucuuuccauagccc

SEQ ID NO: 288375 - RNA, 19 nt, Human
gcagaaagcagcagccaug

SEQ ID NO: 288376 - RNA, 22 nt, Human
gcagacagagaaaaggaaagag

SEQ ID NO: 288377 - RNA, 20 nt, Human
gcagcagggagaugugcuug

SEQ ID NO: 288378 - RNA, 20 nt, Human
ggaaauacacauucaugucc

SEQ ID NO: 288379 - RNA, 21 nt, Human
gggcagaaagcagcagccaug

SEQ ID NO: 288380 - RNA, 22 nt, Human
uaaaaaggugagucuuuaaaaa

SEQ ID NO: 288381 - RNA, 24 nt, Human
uaaaauaaagcaucuaaaacugac

SEQ ID NO: 288382 - RNA, 23 nt, Human
uaaacaagucuagaaguaccaca

SEQ ID NO: 288383 - RNA, 24 nt, Human
uaaagcaucuaaaacugacuucaa

SEQ ID NO: 288384 - RNA, 18 nt, Human
uaacacaaagcagugaaa

SEQ ID NO: 288385 - RNA, 19 nt, Human
uaagaaggaacaaagacag

SEQ ID NO: 288386 - RNA, 21 nt, Human
uaagaucuaaagagaugauua

SEQ ID NO: 288387 - RNA, 19 nt, Human
uaaggcaugaaaugaaaca

SEQ ID NO: 288388 - RNA, 19 nt, Human
uaaggcucucuguuuugaa

SEQ ID NO: 288389 - RNA, 22 nt, Human
uaccuuaggguagcaguuaacu

SEQ ID NO: 288390 - RNA, 21 nt, Human
uagaaguaccacaauacucau

SEQ ID NO: 288391 - RNA, 22 nt, Human
uagcccacacucauaauagcac

SEQ ID NO: 288392 - RNA, 23 nt, Human
uaugcacacgacaucuucauggu

SEQ ID NO: 288393 - RNA, 18 nt, Human
uauuccauuuauuucucu

SEQ ID NO: 288394 - RNA, 19 nt, Human
uauucuuugucauaaagag

SEQ ID NO: 288395 - RNA, 18 nt, Human
uauuuuguucuucuuucc

SEQ ID NO: 288396 - RNA, 21 nt, Human
ucaaagguggugacauggagg

SEQ ID NO: 288397 - RNA, 23 nt, Human
ucaaagguggugacauggaggca

SEQ ID NO: 288398 - RNA, 20 nt, Human
ucaaauauugcaauauugcc

SEQ ID NO: 288399 - RNA, 18 nt, Human
ucaugggagagaccaggc

SEQ ID NO: 288400 - RNA, 22 nt, Human
uccaaaaagucacagaugucac

SEQ ID NO: 288401 - RNA, 20 nt, Human
uccccaucccuucacccgca

SEQ ID NO: 288402 - RNA, 21 nt, Human
uccuugggaugaaccacagga

SEQ ID NO: 288403 - RNA, 25 nt, Human
ucgaaugccaaaauaagaaggaaca

SEQ ID NO: 288404 - RNA, 21 nt, Human
ucucugucucagaaacugaac

SEQ ID NO: 288405 - RNA, 21 nt, Human
ucugcugugaucuucuaauca

SEQ ID NO: 288406 - RNA, 18 nt, Human
ucuucucuuccacagaag

SEQ ID NO: 288407 - RNA, 21 nt, Human
ucuuuuguggguggugagggu

SEQ ID NO: 288408 - RNA, 23 nt, Human
ugaacaacugggagaacagucga

SEQ ID NO: 288409 - RNA, 24 nt, Human
ugacuaaagcagcauaugaaguau

SEQ ID NO: 288410 - RNA, 19 nt, Human
ugagaugccacacuguugg

SEQ ID NO: 288411 - RNA, 19 nt, Human
ugagaugccacacuguugg

SEQ ID NO: 288412 - RNA, 23 nt, Human
ugaugcgcaacucuuuggggagg

SEQ ID NO: 288413 - RNA, 21 nt, Human
uggaaaaacauuccagugagc

SEQ ID NO: 288414 - RNA, 21 nt, Human
uggcgagcugggcagaaagca

SEQ ID NO: 288415 - RNA, 21 nt, Human
ugucagacaugcaguguagag

SEQ ID NO: 288416 - RNA, 23 nt, Human
ugucucagaaacugaacaacugg

SEQ ID NO: 288417 - RNA, 24 nt, Human
uguggguggugagggugcagcagg

SEQ ID NO: 288418 - RNA, 18 nt, Human
uguggucugugucccaac

SEQ ID NO: 288419 - RNA, 18 nt, Human
ugugucacuucuucucuu

SEQ ID NO: 288420 - RNA, 24 nt, Human
uuaccauguacuaaagaaccccau

SEQ ID NO: 288421 - RNA, 19 nt, Human
uucaagggggaaaaagccu

SEQ ID NO: 288422 - RNA, 24 nt, Human
uugacuagaaaaauaaaauaaagc

SEQ ID NO: 288423 - RNA, 21 nt, Human
uugcaaaauaaugacaaccaa

SEQ ID NO: 288424 - RNA, 22 nt, Human
uuuaagacacuucauccuccca

SEQ ID NO: 288425 - RNA, 20 nt, Human
uuuuguggguggugaggguu

SEQ ID NO: 288426 - RNA, 20 nt, Human
aaacagacuugauaauuaau

SEQ ID NO: 288427 - RNA, 23 nt, Human
aaaucaaagaugaccccaaaaga

SEQ ID NO: 288428 - RNA, 22 nt, Human
aacauuuccugaauaucuacca

SEQ ID NO: 288429 - RNA, 19 nt, Human
aagaagccagggagcgacg

SEQ ID NO: 288430 - RNA, 19 nt, Human
aagcaggucccaaauuuua

SEQ ID NO: 288431 - RNA, 18 nt, Human
aauccgccccccuuaccc

SEQ ID NO: 288432 - RNA, 23 nt, Human
acgggccacccaagccccgucga

SEQ ID NO: 288433 - RNA, 20 nt, Human
agaagccagggagcgacggg

SEQ ID NO: 288434 - RNA, 18 nt, Human
agccugggaagcgaguuc

SEQ ID NO: 288435 - RNA, 26 nt, Human
aggaggccagggcagccugccggaug

SEQ ID NO: 288436 - RNA, 19 nt, Human
aggggaggggcugagggag

SEQ ID NO: 288437 - RNA, 21 nt, Human
augggauuaucaucucuaaau

SEQ ID NO: 288438 - RNA, 22 nt, Human
auuuguuguuucuccaucuugu

SEQ ID NO: 288439 - RNA, 22 nt, Human
caaacagcacguggggcugaag

SEQ ID NO: 288440 - RNA, 19 nt, Human
cagaagccugggaagcgag

SEQ ID NO: 288441 - RNA, 23 nt, Human
caggaggcaccacuucgcugccc

SEQ ID NO: 288442 - RNA, 22 nt, Human
cagugaacauuuccugaauauc

SEQ ID NO: 288443 - RNA, 23 nt, Human
caucucuaaaucaaagaugaccc

SEQ ID NO: 288444 - RNA, 23 nt, Human
ccacuucgcugcccgcccugggu

SEQ ID NO: 288445 - RNA, 21 nt, Human
ccagggagcgacgggccaccc

SEQ ID NO: 288446 - RNA, 18 nt, Human
ccaggucaccugcccagg

SEQ ID NO: 288447 - RNA, 22 nt, Human
ccucaaaguguuucccaaaaca

SEQ ID NO: 288448 - RNA, 19 nt, Human
cgccccccuuacccccagc

SEQ ID NO: 288449 - RNA, 21 nt, Human
cucagaagccugggaagcgag

SEQ ID NO: 288450 - RNA, 22 nt, Human
cuccccgggagugaggucucug

SEQ ID NO: 288451 - RNA, 23 nt, Human
cuccccgggagugaggucucugg

SEQ ID NO: 288452 - RNA, 21 nt, Human
cuccgcacaguaacgccccuc

SEQ ID NO: 288453 - RNA, 18 nt, Human
cugaauaucuaccaacca

SEQ ID NO: 288454 - RNA, 18 nt, Human
cugcccaggacgggccgg

SEQ ID NO: 288455 - RNA, 18 nt, Human
gcgacgggccacccaagc

SEQ ID NO: 288456 - RNA, 18 nt, Human
gcuccaggucaccugccc

SEQ ID NO: 288457 - RNA, 20 nt, Human
gcuggcuccccgggagugag

SEQ ID NO: 288458 - RNA, 19 nt, Human
ggaagcgaguucucugcaa

SEQ ID NO: 288459 - RNA, 18 nt, Human
gggaagcgaguucucugc

SEQ ID NO: 288460 - RNA, 21 nt, Human
gggaggggcugagggagggug

SEQ ID NO: 288461 - RNA, 21 nt, Human
gggcugagggagggugugggg

SEQ ID NO: 288462 - RNA, 22 nt, Human
ggggaggggcugagggagggug

SEQ ID NO: 288463 - RNA, 22 nt, Human
uaauacaaauaaaaauuucaca

SEQ ID NO: 288464 - RNA, 20 nt, Human
uacagcaguauuuaugauua

SEQ ID NO: 288465 - RNA, 21 nt, Human
uacauuuagccuuauaugcuc

SEQ ID NO: 288466 - RNA, 21 nt, Human
uacuaaagaaguucaaugcuu

SEQ ID NO: 288467 - RNA, 24 nt, Human
uacuaauacaaauaaaaauuucac

SEQ ID NO: 288468 - RNA, 23 nt, Human
uaguaauuggaaucauaguuaac

SEQ ID NO: 288469 - RNA, 23 nt, Human
uauaugaauaauccgccccccuu

SEQ ID NO: 288470 - RNA, 21 nt, Human
uaugaagcuugaaugaagcag

SEQ ID NO: 288471 - RNA, 24 nt, Human
uaugaagcuugaaugaagcagguc

SEQ ID NO: 288472 - RNA, 23 nt, Human
ucaacagauucacagcugacaga

SEQ ID NO: 288473 - RNA, 21 nt, Human
ucagaagccugggaagcgagu

SEQ ID NO: 288474 - RNA, 19 nt, Human
ucagugaacauuuccugaa

SEQ ID NO: 288475 - RNA, 21 nt, Human
uccaggucaccugcccaggac

SEQ ID NO: 288476 - RNA, 23 nt, Human
uccaucaacagauucacagcuga

SEQ ID NO: 288477 - RNA, 18 nt, Human
ucuccgcacaguaacgcc

SEQ ID NO: 288478 - RNA, 22 nt, Human
ucugcugcaucauaaauguccu

SEQ ID NO: 288479 - RNA, 23 nt, Human
ugaauaucuaccaaccaagccuu

SEQ ID NO: 288480 - RNA, 21 nt, Human
ugauacuggaaguuaugggga

SEQ ID NO: 288481 - RNA, 22 nt, Human
ugcuccaggucaccugcccagg

SEQ ID NO: 288482 - RNA, 25 nt, Human
ugggcuucugaccuaaagaaaauuu

SEQ ID NO: 288483 - RNA, 19 nt, Human
ugguauaacaauuauauga

SEQ ID NO: 288484 - RNA, 19 nt, Human
uguaaaggauuuaaggcug

SEQ ID NO: 288485 - RNA, 21 nt, Human
uuaacuaaaauagaaaauaaa

SEQ ID NO: 288486 - RNA, 19 nt, Human
uuaaucuugaugaaaugcg

SEQ ID NO: 288487 - RNA, 21 nt, Human
uugaguauguacucauauccu

SEQ ID NO: 288488 - RNA, 19 nt, Human
uuggaaaaugauacuggaa

SEQ ID NO: 288489 - RNA, 20 nt, Human
aaaaaaaaaaaaaaugcaag

SEQ ID NO: 288490 - RNA, 26 nt, Human
aaaaaaaaaaaaaaugcaagucugga

SEQ ID NO: 288491 - RNA, 24 nt, Human
aaaaaaaaugcaagucuggagaaa

SEQ ID NO: 288492 - RNA, 18 nt, Human
aaaaaugcaagucuggag

SEQ ID NO: 288493 - RNA, 25 nt, Human
aaccugggugacauagugagagcuc

SEQ ID NO: 288494 - RNA, 22 nt, Human
aagagaaaugagguuaaguccg

SEQ ID NO: 288495 - RNA, 18 nt, Human
aagagcuacaggcuugga

SEQ ID NO: 288496 - RNA, 26 nt, Human
aagcaauucucaugccucagccuccc

SEQ ID NO: 288497 - RNA, 23 nt, Human
aagugcugugaucguagguguga

SEQ ID NO: 288498 - RNA, 22 nt, Human
aagugggcugagggcugcgacc

SEQ ID NO: 288499 - RNA, 21 nt, Human
aaugauaaaggcuggcugaaa

SEQ ID NO: 288500 - RNA, 18 nt, Human
aauuuguaguuuuucccc

SEQ ID NO: 288501 - RNA, 21 nt, Human
acaaaaaauaaaauuagcucg

SEQ ID NO: 288502 - RNA, 19 nt, Human
acagaggaugagaagacgg

SEQ ID NO: 288503 - RNA, 18 nt, Human
acaggguuucaccauguu

SEQ ID NO: 288504 - RNA, 23 nt, Human
acaggguuucaccauguuggcca

SEQ ID NO: 288505 - RNA, 24 nt, Human
acaggguuucaccauguuggccag

SEQ ID NO: 288506 - RNA, 18 nt, Human
acagugagacccugucuc

SEQ ID NO: 288507 - RNA, 18 nt, Human
accauguuggccaggcug

SEQ ID NO: 288508 - RNA, 22 nt, Human
acgccacugcacuccagccugg

SEQ ID NO: 288509 - RNA, 24 nt, Human
acgccacugcacuccagccugggc

SEQ ID NO: 288510 - RNA, 19 nt, Human
acugcacuccagccugggc

SEQ ID NO: 288511 - RNA, 24 nt, Human
acugcacuccagccugggcgacag

SEQ ID NO: 288512 - RNA, 21 nt, Human
acuugaggcuuuuguacagag

SEQ ID NO: 288513 - RNA, 22 nt, Human
acuuuuuguauuuuuaguagag

SEQ ID NO: 288514 - RNA, 20 nt, Human
agacaggcacaguggcucau

SEQ ID NO: 288515 - RNA, 21 nt, Human
agauagcuaagcauagcacau

SEQ ID NO: 288516 - RNA, 22 nt, Human
agcaauuuuuuuuuuccccuuu

SEQ ID NO: 288517 - RNA, 19 nt, Human
agcacuuugggaggcugag

SEQ ID NO: 288518 - RNA, 23 nt, Human
agcacuuugggaggcugagauag

SEQ ID NO: 288519 - RNA, 24 nt, Human
aggaaaaaggauaaaguaagagga

SEQ ID NO: 288520 - RNA, 19 nt, Human
aggaaugauaaaggcuggc

SEQ ID NO: 288521 - RNA, 24 nt, Human
aggcacaguggcucaugucuguaa

SEQ ID NO: 288522 - RNA, 24 nt, Human
aggcugaggugggagaacugcuug

SEQ ID NO: 288523 - RNA, 21 nt, Human
aggugugagccacugugccca

SEQ ID NO: 288524 - RNA, 20 nt, Human
agguuggagugcaguggcau

SEQ ID NO: 288525 - RNA, 25 nt, Human
aguagcugggauuacaggugccugu

SEQ ID NO: 288526 - RNA, 19 nt, Human
agugaguauaccaagagcu

SEQ ID NO: 288527 - RNA, 24 nt, Human
agugaucugcuugcuucagccucc

SEQ ID NO: 288528 - RNA, 20 nt, Human
agugcaguggcaugauccag

SEQ ID NO: 288529 - RNA, 23 nt, Human
agugcaguggcaugauccaggcu

SEQ ID NO: 288530 - RNA, 24 nt, Human
agugcaguggcaugauccaggcuc

SEQ ID NO: 288531 - RNA, 21 nt, Human
aguggcucaugucuguaaccc

SEQ ID NO: 288532 - RNA, 24 nt, Human
aguggcucaugucuguaacccuag

SEQ ID NO: 288533 - RNA, 20 nt, Human
auaaagcucuacuagcuaac

SEQ ID NO: 288534 - RNA, 24 nt, Human
aucacgccacugcacuccagccug

SEQ ID NO: 288535 - RNA, 22 nt, Human
auccuaagugggcugagggcug

SEQ ID NO: 288536 - RNA, 22 nt, Human
augccucagccucccgaguagc

SEQ ID NO: 288537 - RNA, 19 nt, Human
augucuguaacccuagcac

SEQ ID NO: 288538 - RNA, 23 nt, Human
auuagcucggcauggugcugcaa

SEQ ID NO: 288539 - RNA, 20 nt, Human
caagcuucugacuugcaaca

SEQ ID NO: 288540 - RNA, 22 nt, Human
caagugaucugcuugcuucagc

SEQ ID NO: 288541 - RNA, 21 nt, Human
caauaguagugaccaccaaua

SEQ ID NO: 288542 - RNA, 21 nt, Human
caauguguggcaguccaaaau

SEQ ID NO: 288543 - RNA, 21 nt, Human
caccauguuggccaggcuggu

SEQ ID NO: 288544 - RNA, 24 nt, Human
caccauguuggccaggcuggucuc

SEQ ID NO: 288545 - RNA, 27 nt, Human
caccauguuggccaggcuggucucaaa

SEQ ID NO: 288546 - RNA, 21 nt, Human
cacugcaaccuccgccucccg

SEQ ID NO: 288547 - RNA, 23 nt, Human
cacugcaaccuccgccucccggg

SEQ ID NO: 288548 - RNA, 19 nt, Human
cacugcacuccagccuggg

SEQ ID NO: 288549 - RNA, 20 nt, Human
cacugcacuccagccugggc

SEQ ID NO: 288550 - RNA, 22 nt, Human
cacugcacuccagccugggcga

SEQ ID NO: 288551 - RNA, 23 nt, Human
cacugcacuccagccugggcgac

SEQ ID NO: 288552 - RNA, 24 nt, Human
cacugcacuccagccugggcgaca

SEQ ID NO: 288553 - RNA, 25 nt, Human
cacugcacuccagccugggcgacag

SEQ ID NO: 288554 - RNA, 22 nt, Human
cacuugaggcuuuuguacagag

SEQ ID NO: 288555 - RNA, 24 nt, Human
cagagucuugcucugcugcccagg

SEQ ID NO: 288556 - RNA, 24 nt, Human
caggguuucaccauguuggccagg

SEQ ID NO: 288557 - RNA, 20 nt, Human
caggugccugucaucacggc

SEQ ID NO: 288558 - RNA, 24 nt, Human
caugccucagccucccgaguagcu

SEQ ID NO: 288559 - RNA, 20 nt, Human
caugucuguaacccuagcac

SEQ ID NO: 288560 - RNA, 24 nt, Human
cauguuggccaggcuggucucaaa

SEQ ID NO: 288561 - RNA, 20 nt, Human
ccacugcacuccagccuggg

SEQ ID NO: 288562 - RNA, 20 nt, Human
ccacugcacuccagccuggg

SEQ ID NO: 288563 - RNA, 21 nt, Human
ccacugcacuccagccugggc

SEQ ID NO: 288564 - RNA, 21 nt, Human
ccacugcacuccagccugggc

SEQ ID NO: 288565 - RNA, 23 nt, Human
ccacugcacuccagccugggcga

SEQ ID NO: 288566 - RNA, 24 nt, Human
ccacugcacuccagccugggcgac

SEQ ID NO: 288567 - RNA, 20 nt, Human
cccaugggacagacagggag

SEQ ID NO: 288568 - RNA, 23 nt, Human
cccgaguagcugggauuacaggu

SEQ ID NO: 288569 - RNA, 24 nt, Human
cccgaguagcugggauuacaggug

SEQ ID NO: 288570 - RNA, 23 nt, Human
cccggguucaagcaauucucaug

SEQ ID NO: 288571 - RNA, 20 nt, Human
cccuaaaaaauucaauggca

SEQ ID NO: 288572 - RNA, 19 nt, Human
cccugucucaaaaaaaaaa

SEQ ID NO: 288573 - RNA, 24 nt, Human
ccgaagugcugugaucguaggugu

SEQ ID NO: 288574 - RNA, 21 nt, Human
ccgaguagcugggauuacagg

SEQ ID NO: 288575 - RNA, 27 nt, Human
ccgccucccggguucaagcaauucuuu

SEQ ID NO: 288576 - RNA, 19 nt, Human
ccgcgccgggaagcgaggc

SEQ ID NO: 288577 - RNA, 22 nt, Human
ccucccggguucaagcaauucu

SEQ ID NO: 288578 - RNA, 20 nt, Human
ccugaccucaagugaucugc

SEQ ID NO: 288579 - RNA, 23 nt, Human
ccugucucaaaaaaaaaaaaaaa

SEQ ID NO: 288580 - RNA, 25 nt, Human
ccugucucaaaaaaaaaaaaaaaaa

SEQ ID NO: 288581 - RNA, 18 nt, Human
cgacagugagacccuguc

SEQ ID NO: 288582 - RNA, 26 nt, Human
cgccacugcacuccagccugggcgac

SEQ ID NO: 288583 - RNA, 18 nt, Human
cucaaaaaaaaaaaaaaa

SEQ ID NO: 288584 - RNA, 23 nt, Human
cucaagugaucugcuugcuucag

SEQ ID NO: 288585 - RNA, 24 nt, Human
cucacugcaaccuccgccucccgg

SEQ ID NO: 288586 - RNA, 24 nt, Human
cucagccucccgaguagcugggau

SEQ ID NO: 288587 - RNA, 25 nt, Human
cucaugccucagccucccgaguagc

SEQ ID NO: 288588 - RNA, 24 nt, Human
cucaugucuguaacccuagcacuu

SEQ ID NO: 288589 - RNA, 21 nt, Human
cucccauuacgcuacuguugg

SEQ ID NO: 288590 - RNA, 26 nt, Human
cuccugaccucaagugaucugcuugc

SEQ ID NO: 288591 - RNA, 18 nt, Human
cucugaaagagaaaugag

SEQ ID NO: 288592 - RNA, 18 nt, Human
cucugcugcccagguugg

SEQ ID NO: 288593 - RNA, 23 nt, Human
cugcaaccuccgccucccggguu

SEQ ID NO: 288594 - RNA, 24 nt, Human
cugcaaccuccgccucccggguuc

SEQ ID NO: 288595 - RNA, 18 nt, Human
cugcccagguuggagugc

SEQ ID NO: 288596 - RNA, 24 nt, Human
cugcccagguuggagugcaguggc

SEQ ID NO: 288597 - RNA, 18 nt, Human
cugcuugagcccaggagg

SEQ ID NO: 288598 - RNA, 23 nt, Human
cugggggaagcaugcagggaagg

SEQ ID NO: 288599 - RNA, 19 nt, Human
cuguaacccuagcacuuug

SEQ ID NO: 288600 - RNA, 21 nt, Human
cuguaacccuagcacuuuggg

SEQ ID NO: 288601 - RNA, 21 nt, Human
cuugcucugcugcccagguug

SEQ ID NO: 288602 - RNA, 24 nt, Human
cuuuuuguauuuuuaguagagaca

SEQ ID NO: 288603 - RNA, 24 nt, Human
gaagugcugugaucguagguguga

SEQ ID NO: 288604 - RNA, 20 nt, Human
gacauagugagagcucaucu

SEQ ID NO: 288605 - RNA, 25 nt, Human
gaccaccaauacuuaaggaaaaagg

SEQ ID NO: 288606 - RNA, 23 nt, Human
gagaucacgccacugcacuccag

SEQ ID NO: 288607 - RNA, 23 nt, Human
gagcccaggagggaaagcagcag

SEQ ID NO: 288608 - RNA, 18 nt, Human
gaucguaggugugagcca

SEQ ID NO: 288609 - RNA, 19 nt, Human
gaucguaggugugagccac

SEQ ID NO: 288610 - RNA, 21 nt, Human
gaucguaggugugagccacug

SEQ ID NO: 288611 - RNA, 24 nt, Human
gaucguaggugugagccacugugc

SEQ ID NO: 288612 - RNA, 22 nt, Human
gccacugcacuccagccugggc

SEQ ID NO: 288613 - RNA, 24 nt, Human
gccacugcacuccagccugggcga

SEQ ID NO: 288614 - RNA, 21 nt, Human
gcgacagugagacccugucuc

SEQ ID NO: 288615 - RNA, 23 nt, Human
gcuggucucaaacuccugaccuc

SEQ ID NO: 288616 - RNA, 18 nt, Human
ggacagcgaacauaaagc

SEQ ID NO: 288617 - RNA, 23 nt, Human
ggauaauguugaauuugacccuc

SEQ ID NO: 288618 - RNA, 25 nt, Human
ggcacaguggcucaugucuguaacc

SEQ ID NO: 288619 - RNA, 19 nt, Human
ggcugagggcugcgaccgc

SEQ ID NO: 288620 - RNA, 24 nt, Human
ggcuggucucaaacuccugaccuc

SEQ ID NO: 288621 - RNA, 22 nt, Human
gggaagcgaggcagaacucaag

SEQ ID NO: 288622 - RNA, 22 nt, Human
ggguuucaccauguuggccagg

SEQ ID NO: 288623 - RNA, 18 nt, Human
guccuuuuaauuguucuu

SEQ ID NO: 288624 - RNA, 24 nt, Human
gugaucugcuugcuucagccuccc

SEQ ID NO: 288625 - RNA, 24 nt, Human
uacuuuuuguauuuuuaguagaga

SEQ ID NO: 288626 - RNA, 22 nt, Human
uagagacaggguuucaccaugu

SEQ ID NO: 288627 - RNA, 18 nt, Human
uagcacuuugggaggcug

SEQ ID NO: 288628 - RNA, 24 nt, Human
uaguagagacaggguuucaccaug

SEQ ID NO: 288629 - RNA, 25 nt, Human
uaguagagacaggguuucaccaugu

SEQ ID NO: 288630 - RNA, 23 nt, Human
ucacgccacugcacuccagccug

SEQ ID NO: 288631 - RNA, 23 nt, Human
ucacugcaaccuccgccucccgg

SEQ ID NO: 288632 - RNA, 24 nt, Human
ucacugcaaccuccgccucccggg

SEQ ID NO: 288633 - RNA, 25 nt, Human
ucacugcaaccuccgccucccgggu

SEQ ID NO: 288634 - RNA, 26 nt, Human
ucacugcaaccuccgccucccggguu

SEQ ID NO: 288635 - RNA, 24 nt, Human
ucacuugaggcuuuuguacagagg

SEQ ID NO: 288636 - RNA, 20 nt, Human
ucagccucccgaguagcugg

SEQ ID NO: 288637 - RNA, 22 nt, Human
uccagccugggcgacagugaga

SEQ ID NO: 288638 - RNA, 23 nt, Human
ucccgaagugcugugaucguagg

SEQ ID NO: 288639 - RNA, 23 nt, Human
ucccgaguagcugggauuacagg

SEQ ID NO: 288640 - RNA, 24 nt, Human
ucccgaguagcugggauuacaggu

SEQ ID NO: 288641 - RNA, 21 nt, Human
ucccggguucaagcaauucuc

SEQ ID NO: 288642 - RNA, 24 nt, Human
ucccggguucaagcaauucucaug

SEQ ID NO: 288643 - RNA, 24 nt, Human
uccgccucccggguucaagcaauu

SEQ ID NO: 288644 - RNA, 21 nt, Human
ucuacuagcuaacaaauaggg

SEQ ID NO: 288645 - RNA, 21 nt, Human
ucuagacaggcacaguggcuc

SEQ ID NO: 288646 - RNA, 25 nt, Human
ucuagacaggcacaguggcucaugg

SEQ ID NO: 288647 - RNA, 24 nt, Human
ucugcugcccagguuggagugcag

SEQ ID NO: 288648 - RNA, 23 nt, Human
ucuugcucugcugcccagguugg

SEQ ID NO: 288649 - RNA, 24 nt, Human
ucuugcucugcugcccagguugga

SEQ ID NO: 288650 - RNA, 21 nt, Human
ugaaauaucuuggugucuagc

SEQ ID NO: 288651 - RNA, 22 nt, Human
ugaccucaagugaucugcuugc

SEQ ID NO: 288652 - RNA, 23 nt, Human
ugaccucaagugaucugcuugcu

SEQ ID NO: 288653 - RNA, 24 nt, Human
ugaccucaagugaucugcuugcuu

SEQ ID NO: 288654 - RNA, 18 nt, Human
ugagaaaaacaucaauga

SEQ ID NO: 288655 - RNA, 23 nt, Human
ugagaaaaacaucaaugaugaaa

SEQ ID NO: 288656 - RNA, 26 nt, Human
ugagaaaaacaucaaugaugaaauca

SEQ ID NO: 288657 - RNA, 18 nt, Human
ugagacagagucuugcuc

SEQ ID NO: 288658 - RNA, 22 nt, Human
ugagacagagucuugcucugcu

SEQ ID NO: 288659 - RNA, 23 nt, Human
ugaggugggagaacugcuugagc

SEQ ID NO: 288660 - RNA, 24 nt, Human
ugaggugggagaacugcuugagcc

SEQ ID NO: 288661 - RNA, 22 nt, Human
ugagugcccaugggacagacag

SEQ ID NO: 288662 - RNA, 22 nt, Human
ugcaagucuggagaaauauagc

SEQ ID NO: 288663 - RNA, 18 nt, Human
ugcccagguuggagugca

SEQ ID NO: 288664 - RNA, 21 nt, Human
ugcccagguuggagugcagug

SEQ ID NO: 288665 - RNA, 22 nt, Human
ugcccagguuggagugcagugg

SEQ ID NO: 288666 - RNA, 24 nt, Human
ugccucagccucccgaguagcugg

SEQ ID NO: 288667 - RNA, 22 nt, Human
ugcuucagccucccgaagugcu

SEQ ID NO: 288668 - RNA, 25 nt, Human
ugcuucagccucccgaagugcugug

SEQ ID NO: 288669 - RNA, 23 nt, Human
uggaagaugaauaaaguugggag

SEQ ID NO: 288670 - RNA, 19 nt, Human
uggagugcaguggcaugau

SEQ ID NO: 288671 - RNA, 22 nt, Human
uggagugcaguggcaugaucca

SEQ ID NO: 288672 - RNA, 24 nt, Human
uggagugcaguggcaugauccagg

SEQ ID NO: 288673 - RNA, 24 nt, Human
uggccaggcuggucucaaacuccu

SEQ ID NO: 288674 - RNA, 19 nt, Human
uggcucaugucuguaaccc

SEQ ID NO: 288675 - RNA, 23 nt, Human
uggcucaugucuguaacccuagc

SEQ ID NO: 288676 - RNA, 24 nt, Human
uggcucaugucuguaacccuagca

SEQ ID NO: 288677 - RNA, 20 nt, Human
ugggaggcugagauaggaga

SEQ ID NO: 288678 - RNA, 22 nt, Human
ugggauuacaggugccugucau

SEQ ID NO: 288679 - RNA, 24 nt, Human
ugggauuacaggugccugucauca

SEQ ID NO: 288680 - RNA, 24 nt, Human
ugggggaagcaugcagggaagggc

SEQ ID NO: 288681 - RNA, 23 nt, Human
ugggucacaucagcaauuuuuuu

SEQ ID NO: 288682 - RNA, 24 nt, Human
ugugaucguaggugugagccacug

SEQ ID NO: 288683 - RNA, 23 nt, Human
uguuagucgagaggcugaggugg

SEQ ID NO: 288684 - RNA, 26 nt, Human
uuaaggaaaaaggauaaaguaagagg

SEQ ID NO: 288685 - RNA, 20 nt, Human
uuacaggugccugucaucac

SEQ ID NO: 288686 - RNA, 18 nt, Human
uuacuaggguucaggagu

SEQ ID NO: 288687 - RNA, 21 nt, Human
uuacuaggguucaggaguuug

SEQ ID NO: 288688 - RNA, 23 nt, Human
uuacuaggguucaggaguuugag

SEQ ID NO: 288689 - RNA, 20 nt, Human
uuagcucggcauggugcugc

SEQ ID NO: 288690 - RNA, 24 nt, Human
uuaguagagacaggguuucaccau

SEQ ID NO: 288691 - RNA, 18 nt, Human
uucccuucaugggucaca

SEQ ID NO: 288692 - RNA, 24 nt, Human
uugcuucagccucccgaagugcug

SEQ ID NO: 288693 - RNA, 23 nt, Human
uugggaggcugagauaggagaau

SEQ ID NO: 288694 - RNA, 24 nt, Human
uuucaccauguuggccaggcuggu

SEQ ID NO: 288695 - RNA, 24 nt, Human
uuuuuaguagagacaggguuucac

SEQ ID NO: 288696 - RNA, 21 nt, Human
uuuuuguauuuuuaguagaga

SEQ ID NO: 288697 - RNA, 20 nt, Human
aaaaaaagacaauuugguaa

SEQ ID NO: 288698 - RNA, 23 nt, Human
aacaaagcaaggaaaagcaccac

SEQ ID NO: 288699 - RNA, 23 nt, Human
aagacuaacaaaaacuuuggcaa

SEQ ID NO: 288700 - RNA, 24 nt, Human
acuaacaaaaacuuuggcaaugca

SEQ ID NO: 288701 - RNA, 23 nt, Human
agcuuuuuacuuaguaacagucu

SEQ ID NO: 288702 - RNA, 23 nt, Human
aguuggaacucaaauuaaaugua

SEQ ID NO: 288703 - RNA, 22 nt, Human
auagauuagccucaaaaaaaga

SEQ ID NO: 288704 - RNA, 19 nt, Human
caaagcaaggaaaagcacc

SEQ ID NO: 288705 - RNA, 21 nt, Human
caaagcaaggaaaagcaccac

SEQ ID NO: 288706 - RNA, 23 nt, Human
caaagcaaggaaaagcaccacuc

SEQ ID NO: 288707 - RNA, 28 nt, Human
caaagcaaggaaaagcaccacucaaauc

SEQ ID NO: 288708 - RNA, 20 nt, Human
ccgccucccuucuccagucc

SEQ ID NO: 288709 - RNA, 23 nt, Human
ccgcggaucuccacaggcagcgc

SEQ ID NO: 288710 - RNA, 20 nt, Human
ccucaaaaaaagacaauuug

SEQ ID NO: 288711 - RNA, 20 nt, Human
cggaaaaggcuggacuggca

SEQ ID NO: 288712 - RNA, 20 nt, Human
cuuuuaauuuggugcuuguu

SEQ ID NO: 288713 - RNA, 25 nt, Human
gcaagacuaacaaaaacuuuggcaa

SEQ ID NO: 288714 - RNA, 26 nt, Human
gcccgccgccucccuucuccaguccc

SEQ ID NO: 288715 - RNA, 18 nt, Human
gcucgacgugcgcuucgc

SEQ ID NO: 288716 - RNA, 19 nt, Human
gguauuggucauauguuag

SEQ ID NO: 288717 - RNA, 18 nt, Human
uaacaaagcaaggaaaaa

SEQ ID NO: 288718 - RNA, 19 nt, Human
uaacaguuggaacucaaau

SEQ ID NO: 288719 - RNA, 19 nt, Human
uaacccaaugcacagcagc

SEQ ID NO: 288720 - RNA, 21 nt, Human
uaacccaaugcacagcagcgg

SEQ ID NO: 288721 - RNA, 20 nt, Human
uagccucaaaaaaagacaau

SEQ ID NO: 288722 - RNA, 22 nt, Human
ucaguaaauguuugacagcuuu

SEQ ID NO: 288723 - RNA, 25 nt, Human
uccacaggcagcgccgcucccccgc

SEQ ID NO: 288724 - RNA, 18 nt, Human
uccaccaaaagagggccc

SEQ ID NO: 288725 - RNA, 18 nt, Human
ucgacgugcgcuucgccc

SEQ ID NO: 288726 - RNA, 23 nt, Human
ucucaaauuaacuaacagaccuu

SEQ ID NO: 288727 - RNA, 30 nt, Human
ucuccacaggcagcgccgcucccccgcucu

SEQ ID NO: 288728 - RNA, 23 nt, Human
ucugagaaauaugcuuaacaguu

SEQ ID NO: 288729 - RNA, 18 nt, Human
ucuuuuuuuuuuuuuuuu

SEQ ID NO: 288730 - RNA, 18 nt, Human
ugacaagagugcuuuuac

SEQ ID NO: 288731 - RNA, 20 nt, Human
ugacuggugcuucuuuccuu

SEQ ID NO: 288732 - RNA, 18 nt, Human
ugccuucacaguguggaa

SEQ ID NO: 288733 - RNA, 18 nt, Human
ugucuucacaucaagcca

SEQ ID NO: 288734 - RNA, 24 nt, Human
uguucagcuggauuauggguuggu

SEQ ID NO: 288735 - RNA, 19 nt, Human
uguugguugucguuuuuaa

SEQ ID NO: 288736 - RNA, 19 nt, Human
uuacuuaguaacagucuca

SEQ ID NO: 288737 - RNA, 21 nt, Human
uugugcuacauccaccaaaag

SEQ ID NO: 288738 - RNA, 21 nt, Human
uuucuaacaauaacauaccgg

SEQ ID NO: 288739 - RNA, 18 nt, Human
uuuucaacuuaaacacua

SEQ ID NO: 288740 - RNA, 22 nt, Human
uuuuuuuuuuuuuuuuuuucag

SEQ ID NO: 288741 - RNA, 25 nt, Human
uuuuuuuuuuuuuuuuuuucuuuuu

SEQ ID NO: 288742 - RNA, 21 nt, Human
aaagggaaugagaguccaagg

SEQ ID NO: 288743 - RNA, 21 nt, Human
accuucacuuucucccuccug

SEQ ID NO: 288744 - RNA, 19 nt, Human
aggcaaggagaagagggca

SEQ ID NO: 288745 - RNA, 18 nt, Human
aggcaggaggugguaacu

SEQ ID NO: 288746 - RNA, 20 nt, Human
aggcaggaggugguaacugg

SEQ ID NO: 288747 - RNA, 21 nt, Human
aggcaggaggugguaacugga

SEQ ID NO: 288748 - RNA, 21 nt, Human
aggcgucuguggccuucgugg

SEQ ID NO: 288749 - RNA, 19 nt, Human
agggaagggaugauggggg

SEQ ID NO: 288750 - RNA, 18 nt, Human
augaugggggggcgggag

SEQ ID NO: 288751 - RNA, 25 nt, Human
cacccucauauccaugaauugggag

SEQ ID NO: 288752 - RNA, 21 nt, Human
cagcagcagcuacuuccgcgc

SEQ ID NO: 288753 - RNA, 21 nt, Human
caggaaaugggagaagcaagg

SEQ ID NO: 288754 - RNA, 24 nt, Human
cccgcugucgcugccguggcgggg

SEQ ID NO: 288755 - RNA, 19 nt, Human
ccgcgggggggcaaggggg

SEQ ID NO: 288756 - RNA, 21 nt, Human
ccuccugcccgcugucgcugc

SEQ ID NO: 288757 - RNA, 21 nt, Human
ccugcccgcugucgcugccgu

SEQ ID NO: 288758 - RNA, 23 nt, Human
cggcuccuccucuccuccccccu

SEQ ID NO: 288759 - RNA, 21 nt, Human
cucaggacaggggaacugcga

SEQ ID NO: 288760 - RNA, 22 nt, Human
cugcucagcucucucggcuccu

SEQ ID NO: 288761 - RNA, 22 nt, Human
gaacugcgagggaagggaugau

SEQ ID NO: 288762 - RNA, 21 nt, Human
gaauugggaggaaauuccuua

SEQ ID NO: 288763 - RNA, 22 nt, Human
gaugaugggggggcgggaggga

SEQ ID NO: 288764 - RNA, 26 nt, Human
ggaaauuccuuauuuagaaauggcca

SEQ ID NO: 288765 - RNA, 21 nt, Human
ggcgucuguggccuucguggc

SEQ ID NO: 288766 - RNA, 19 nt, Human
ggcuccuccucuccucccc

SEQ ID NO: 288767 - RNA, 20 nt, Human
gggaaugagaguccaagggg

SEQ ID NO: 288768 - RNA, 20 nt, Human
gggcaaggggggacugaggg

SEQ ID NO: 288769 - RNA, 22 nt, Human
gggcaaggggggacugaggggc

SEQ ID NO: 288770 - RNA, 21 nt, Human
ggggcuccguggaaaagggaa

SEQ ID NO: 288771 - RNA, 25 nt, Human
uaaacccuuaaucauaaaccacccu

SEQ ID NO: 288772 - RNA, 18 nt, Human
ucaaugcuggacacacgg

SEQ ID NO: 288773 - RNA, 19 nt, Human
ucacuuucucccuccugcc

SEQ ID NO: 288774 - RNA, 24 nt, Human
ucagcucucucggcuccuccucuc

SEQ ID NO: 288775 - RNA, 26 nt, Human
ucaggacaggggaacugcgagggaag

SEQ ID NO: 288776 - RNA, 23 nt, Human
uccguggaaaagggaaugagagu

SEQ ID NO: 288777 - RNA, 18 nt, Human
uccuccucuccuccccgu

SEQ ID NO: 288778 - RNA, 23 nt, Human
ucucacagagcuuggcacaauga

SEQ ID NO: 288779 - RNA, 25 nt, Human
ucucacagagcuuggcacaaugagg

SEQ ID NO: 288780 - RNA, 19 nt, Human
ucucucggcuccuccucuc

SEQ ID NO: 288781 - RNA, 22 nt, Human
ugagaguccaagggggaaggcg

SEQ ID NO: 288782 - RNA, 18 nt, Human
ugccguggcggggcuccc

SEQ ID NO: 288783 - RNA, 20 nt, Human
ugccguggcggggcuccccu

SEQ ID NO: 288784 - RNA, 22 nt, Human
ugcgagggaagggaugaugggg

SEQ ID NO: 288785 - RNA, 24 nt, Human
uggaaaagggaaugagaguccaag

SEQ ID NO: 288786 - RNA, 20 nt, Human
uggaauuucugaaaugugca

SEQ ID NO: 288787 - RNA, 23 nt, Human
ugggagaagcaaggcaaggagaa

SEQ ID NO: 288788 - RNA, 27 nt, Human
ugggagaagcaaggcaaggagaagagg

SEQ ID NO: 288789 - RNA, 21 nt, Human
uucacuuucucccuccugccc

SEQ ID NO: 288790 - RNA, 24 nt, Human
uucucuucaaugcuggacacacgg

SEQ ID NO: 288791 - RNA, 22 nt, Human
aaccugguucuucaggcagugg

SEQ ID NO: 288792 - RNA, 19 nt, Human
aagaacaugggggagggcc

SEQ ID NO: 288793 - RNA, 21 nt, Human
aagucacgagaucaaaacugg

SEQ ID NO: 288794 - RNA, 29 nt, Human
acacaugcacacucacacgcgugcacaca

SEQ ID NO: 288795 - RNA, 20 nt, Human
agcaaggaggguggugccac

SEQ ID NO: 288796 - RNA, 20 nt, Human
aggaaccugguucuucaggc

SEQ ID NO: 288797 - RNA, 18 nt, Human
aggcaggggugggcgggc

SEQ ID NO: 288798 - RNA, 22 nt, Human
aggcaggggugggcgggcuggg

SEQ ID NO: 288799 - RNA, 23 nt, Human
aggcaggggugggcgggcugggg

SEQ ID NO: 288800 - RNA, 28 nt, Human
aggcuguccaggugcaguaggacccagu

SEQ ID NO: 288801 - RNA, 21 nt, Human
aggggcuggagaggguggggg

SEQ ID NO: 288802 - RNA, 20 nt, Human
agggggcgcagggcuacggg

SEQ ID NO: 288803 - RNA, 19 nt, Human
aggggugggcgggcugggg

SEQ ID NO: 288804 - RNA, 19 nt, Human
agugcccucaggcagguga

SEQ ID NO: 288805 - RNA, 24 nt, Human
augcacacucacacgcgugcacag

SEQ ID NO: 288806 - RNA, 23 nt, Human
augcacacucacacgcgugcagg

SEQ ID NO: 288807 - RNA, 31 nt, Human
cacacacacacacaugcacacucacacgcgg

SEQ ID NO: 288808 - RNA, 26 nt, Human
cacacgcgugcacacacucauacaug

SEQ ID NO: 288809 - RNA, 23 nt, Human
cacccccagcgacccccacugca

SEQ ID NO: 288810 - RNA, 19 nt, Human
caccccuugcgggcuggag

SEQ ID NO: 288811 - RNA, 18 nt, Human
caccgccaccaccgcgga

SEQ ID NO: 288812 - RNA, 23 nt, Human
caggaaccugguucuucaggcag

SEQ ID NO: 288813 - RNA, 19 nt, Human
caggacagggaccaucugu

SEQ ID NO: 288814 - RNA, 24 nt, Human
caggacagggaccaucuguccccc

SEQ ID NO: 288815 - RNA, 18 nt, Human
ccagccacagaaaggggg

SEQ ID NO: 288816 - RNA, 25 nt, Human
ccagcgacccccacugcagacuucc

SEQ ID NO: 288817 - RNA, 24 nt, Human
cccacaauggcucagggggagagg

SEQ ID NO: 288818 - RNA, 18 nt, Human
cccacugcagacuuccag

SEQ ID NO: 288819 - RNA, 18 nt, Human
ccccagcgacccccacug

SEQ ID NO: 288820 - RNA, 19 nt, Human
ccccagcgacccccacugc

SEQ ID NO: 288821 - RNA, 21 nt, Human
cccccacaauggcucaggggg

SEQ ID NO: 288822 - RNA, 19 nt, Human
cccccagcaaggagggugg

SEQ ID NO: 288823 - RNA, 19 nt, Human
cccccagcgacccccacug

SEQ ID NO: 288824 - RNA, 30 nt, Human
cccccuacuggccucaguggggcggggguu

SEQ ID NO: 288825 - RNA, 25 nt, Human
ccccuugcgggcuggaggacggggu

SEQ ID NO: 288826 - RNA, 21 nt, Human
cccuguguuuuucuaaaaguc

SEQ ID NO: 288827 - RNA, 23 nt, Human
ccucagcucucuugcaccgccac

SEQ ID NO: 288828 - RNA, 25 nt, Human
cgcgugcacacacucauacauguuc

SEQ ID NO: 288829 - RNA, 20 nt, Human
cgcucgcggccuaacugcuc

SEQ ID NO: 288830 - RNA, 22 nt, Human
cggacauucaugaucgaccccc

SEQ ID NO: 288831 - RNA, 19 nt, Human
cggccuggucugaugcugg

SEQ ID NO: 288832 - RNA, 21 nt, Human
cucgcgccucccucagcucuc

SEQ ID NO: 288833 - RNA, 19 nt, Human
cugcaggggcuggagaggg

SEQ ID NO: 288834 - RNA, 20 nt, Human
cuuugguugaggggaagggc

SEQ ID NO: 288835 - RNA, 25 nt, Human
gaacaugggggagggccugucccag

SEQ ID NO: 288836 - RNA, 24 nt, Human
gcagacuuccagugaugggagggc

SEQ ID NO: 288837 - RNA, 18 nt, Human
gcaggaaccugguucuuc

SEQ ID NO: 288838 - RNA, 23 nt, Human
gccaccaccgcggacgaauucca

SEQ ID NO: 288839 - RNA, 22 nt, Human
gcccucgcgccucccucagcuc

SEQ ID NO: 288840 - RNA, 23 nt, Human
gcggccuggucugaugcuggugg

SEQ ID NO: 288841 - RNA, 18 nt, Human
gcucagggggagaggggg

SEQ ID NO: 288842 - RNA, 19 nt, Human
gcucagggggagagggggc

SEQ ID NO: 288843 - RNA, 20 nt, Human
gcugaccgggcaggaaccug

SEQ ID NO: 288844 - RNA, 21 nt, Human
gcuugcucccacgagucccug

SEQ ID NO: 288845 - RNA, 21 nt, Human
ggagggccugucccagagggu

SEQ ID NO: 288846 - RNA, 24 nt, Human
ggagggccugucccagaggguggg

SEQ ID NO: 288847 - RNA, 21 nt, Human
ggcugggaggagugggaggcc

SEQ ID NO: 288848 - RNA, 23 nt, Human
gggcaggaaccugguucuucagg

SEQ ID NO: 288849 - RNA, 18 nt, Human
gggcgcagggcuacggga

SEQ ID NO: 288850 - RNA, 21 nt, Human
gggcuggagaggguggggggc

SEQ ID NO: 288851 - RNA, 21 nt, Human
ggggugggcgggcuggggcug

SEQ ID NO: 288852 - RNA, 24 nt, Human
gucauuugcugcaggggcuggaaa

SEQ ID NO: 288853 - RNA, 24 nt, Human
gucccccaauaagggcaggggcug

SEQ ID NO: 288854 - RNA, 25 nt, Human
guucaccucuuaguguucucuccac

SEQ ID NO: 288855 - RNA, 23 nt, Human
uaacucgaggcaggggugggcgg

SEQ ID NO: 288856 - RNA, 18 nt, Human
uaauuguaaaacuaacuc

SEQ ID NO: 288857 - RNA, 21 nt, Human
uacuggccucaguggggcggg

SEQ ID NO: 288858 - RNA, 21 nt, Human
ucaggcagugguucugccagg

SEQ ID NO: 288859 - RNA, 21 nt, Human
ucauuugcugcaggggcugga

SEQ ID NO: 288860 - RNA, 20 nt, Human
uccacccccagcgaccccca

SEQ ID NO: 288861 - RNA, 22 nt, Human
ucccagaggguggggguccugg

SEQ ID NO: 288862 - RNA, 20 nt, Human
ucgcuugcucccacgagucc

SEQ ID NO: 288863 - RNA, 19 nt, Human
ucuccacccccagcgaccc

SEQ ID NO: 288864 - RNA, 21 nt, Human
ucuuugguugaggggaagggc

SEQ ID NO: 288865 - RNA, 23 nt, Human
ucuuugguugaggggaagggcgc

SEQ ID NO: 288866 - RNA, 19 nt, Human
ugaggggaagggcgcuggg

SEQ ID NO: 288867 - RNA, 27 nt, Human
ugcacacacacacacaugcacacucac

SEQ ID NO: 288868 - RNA, 25 nt, Human
ugcacacacucauacauguucaccu

SEQ ID NO: 288869 - RNA, 23 nt, Human
ugcaccgccaccaccgcggacga

SEQ ID NO: 288870 - RNA, 20 nt, Human
ugccagggccaccccgcagg

SEQ ID NO: 288871 - RNA, 24 nt, Human
ugcggccuggucugaugcuggugg

SEQ ID NO: 288872 - RNA, 22 nt, Human
ugcuggugggacagaagugccc

SEQ ID NO: 288873 - RNA, 23 nt, Human
uggagacagaagaacauggggga

SEQ ID NO: 288874 - RNA, 21 nt, Human
ugggaggagugggaggccugg

SEQ ID NO: 288875 - RNA, 24 nt, Human
ugggaggccuggcccccuacuggc

SEQ ID NO: 288876 - RNA, 25 nt, Human
uggggcgggggugacccggggggcu

SEQ ID NO: 288877 - RNA, 22 nt, Human
uggggggcccugaccugucucc

SEQ ID NO: 288878 - RNA, 27 nt, Human
uguucucuccacccccagcgaccccca

SEQ ID NO: 288879 - RNA, 20 nt, Human
uuaguguucucuccaccccc

SEQ ID NO: 288880 - RNA, 18 nt, Human
uuccuggagacagaagaa

SEQ ID NO: 288881 - RNA, 19 nt, Human
uucucuccacccccagcga

SEQ ID NO: 288882 - RNA, 28 nt, Human
uugcacacacacacacaugcacacucac

SEQ ID NO: 288883 - RNA, 18 nt, Human
uugcaccgccaccaccgc

SEQ ID NO: 288884 - RNA, 22 nt, Human
uugcugcaggggcuggagaggg

SEQ ID NO: 288885 - RNA, 19 nt, Human
uuugguugaggggaagggc

SEQ ID NO: 288886 - RNA, 18 nt, Human
aaaaacacaccaacugaa

SEQ ID NO: 288887 - RNA, 19 nt, Human
aaacagaagccaacuuaac

SEQ ID NO: 288888 - RNA, 24 nt, Human
aaacagaagccaacuuaaccaaaa

SEQ ID NO: 288889 - RNA, 18 nt, Human
aaacgugcuaaagggaaa

SEQ ID NO: 288890 - RNA, 21 nt, Human
aaagaaagacacuggcaauga

SEQ ID NO: 288891 - RNA, 24 nt, Human
aagacacuggcaaugaaagugcua

SEQ ID NO: 288892 - RNA, 23 nt, Human
aagacaucccaaaaacacaccaa

SEQ ID NO: 288893 - RNA, 23 nt, Human
acacaccauccgccagcgagagc

SEQ ID NO: 288894 - RNA, 24 nt, Human
accaucuaaaaauaagacauccca

SEQ ID NO: 288895 - RNA, 19 nt, Human
acuagaaacagaagccaac

SEQ ID NO: 288896 - RNA, 21 nt, Human
acuagaaacagaagccaacuu

SEQ ID NO: 288897 - RNA, 19 nt, Human
agaggaccgggcagcgcag

SEQ ID NO: 288898 - RNA, 21 nt, Human
agaggaccgggcagcgcagcg

SEQ ID NO: 288899 - RNA, 19 nt, Human
aguguguacagucccacac

SEQ ID NO: 288900 - RNA, 19 nt, Human
auaaaguguguacaguccc

SEQ ID NO: 288901 - RNA, 25 nt, Human
caacuagaaacagaagccaacuuaa

SEQ ID NO: 288902 - RNA, 24 nt, Human
cacacaccauccgccagcgagagc

SEQ ID NO: 288903 - RNA, 23 nt, Human
caccaaagaaagacacuggcaau

SEQ ID NO: 288904 - RNA, 24 nt, Human
caccaaagaaagacacuggcaaug

SEQ ID NO: 288905 - RNA, 21 nt, Human
caucccaaaaacacaccaacu

SEQ ID NO: 288906 - RNA, 24 nt, Human
caucccaaaaacacaccaacugaa

SEQ ID NO: 288907 - RNA, 19 nt, Human
ccacgccgauacgaccccg

SEQ ID NO: 288908 - RNA, 18 nt, Human
ccgcaggcggaagcuuuc

SEQ ID NO: 288909 - RNA, 23 nt, Human
ccuccagcgccgcucgcgugccc

SEQ ID NO: 288910 - RNA, 19 nt, Human
ccugcggcggccacacacc

SEQ ID NO: 288911 - RNA, 19 nt, Human
cgagagcagcgagcuggcc

SEQ ID NO: 288912 - RNA, 24 nt, Human
cgcagcgcggggcuggggcuggcg

SEQ ID NO: 288913 - RNA, 25 nt, Human
cgccagcagccgcuacuucauggcc

SEQ ID NO: 288914 - RNA, 22 nt, Human
cgggagaggaccgggcagcgca

SEQ ID NO: 288915 - RNA, 19 nt, Human
cgugcuaaagggaaaggaa

SEQ ID NO: 288916 - RNA, 22 nt, Human
cuagaaacagaagccaacuuaa

SEQ ID NO: 288917 - RNA, 20 nt, Human
cucaacuagaaacagaagcc

SEQ ID NO: 288918 - RNA, 22 nt, Human
cuccagcgccgcucgcgugccc

SEQ ID NO: 288919 - RNA, 22 nt, Human
cuccucaacuagaaacagaagc

SEQ ID NO: 288920 - RNA, 24 nt, Human
cucgcgugcccuggcgcuggggcu

SEQ ID NO: 288921 - RNA, 23 nt, Human
cuuaaccaaaacgaaguaaauaa

SEQ ID NO: 288922 - RNA, 22 nt, Human
gacgguuucucuagucuauguu

SEQ ID NO: 288923 - RNA, 18 nt, Human
gagagcagcgagcuggcc

SEQ ID NO: 288924 - RNA, 18 nt, Human
gcgcagcgcggggcuggg

SEQ ID NO: 288925 - RNA, 21 nt, Human
ggaaacuccucaacuagaaac

SEQ ID NO: 288926 - RNA, 23 nt, Human
ggacgguuucucuagucuauguu

SEQ ID NO: 288927 - RNA, 20 nt, Human
ggcgguugggcagcggcgcc

SEQ ID NO: 288928 - RNA, 20 nt, Human
ggcuggcgguugggcagcgg

SEQ ID NO: 288929 - RNA, 20 nt, Human
gggagaggaccgggcagcgc

SEQ ID NO: 288930 - RNA, 21 nt, Human
gggcagcggcgccgccagcag

SEQ ID NO: 288931 - RNA, 25 nt, Human
gggcaggcgggacuuuuguccggcc

SEQ ID NO: 288932 - RNA, 22 nt, Human
gggcuggggcuggcgguugggc

SEQ ID NO: 288933 - RNA, 19 nt, Human
uagaaacagaagccaacuu

SEQ ID NO: 288934 - RNA, 21 nt, Human
ucaacuagaaacagaagccaa

SEQ ID NO: 288935 - RNA, 18 nt, Human
ucugaaaacacuuuauua

SEQ ID NO: 288936 - RNA, 20 nt, Human
ucugaaaacacuuuauuaca

SEQ ID NO: 288937 - RNA, 23 nt, Human
ucuggguaaaucuuacucaaucu

SEQ ID NO: 288938 - RNA, 20 nt, Human
ugacaggggcugugaggggu

SEQ ID NO: 288939 - RNA, 21 nt, Human
ugacaggggcugugaggggua

SEQ ID NO: 288940 - RNA, 21 nt, Human
ugacaggggcugugaggggua

SEQ ID NO: 288941 - RNA, 19 nt, Human
ugccacaggcuaagaaugc

SEQ ID NO: 288942 - RNA, 21 nt, Human
ugccacaggcuaagaaugcug

SEQ ID NO: 288943 - RNA, 21 nt, Human
uggcccgggcacggcgggcgu

SEQ ID NO: 288944 - RNA, 20 nt, Human
ugugagggguaucacccaaa

SEQ ID NO: 288945 - RNA, 21 nt, Human
ugugagggguaucacccaaac

SEQ ID NO: 288946 - RNA, 20 nt, Human
uuaaacgugcuaaagggaaa

SEQ ID NO: 288947 - RNA, 22 nt, Human
uuuuuuuuuuuuuuugcucuga

SEQ ID NO: 288948 - RNA, 22 nt, Human
aaacacaggcugcugacuuccc

SEQ ID NO: 288949 - RNA, 23 nt, Human
aaacacaggcugcugacuucccu

SEQ ID NO: 288950 - RNA, 23 nt, Human
aaacagaagaaagauaagaauga

SEQ ID NO: 288951 - RNA, 25 nt, Human
aaacagaagaaagauaagagggacc

SEQ ID NO: 288952 - RNA, 26 nt, Human
aaacagaagaaagauaagagggaccc

SEQ ID NO: 288953 - RNA, 19 nt, Human
acacagauaccccacugcc

SEQ ID NO: 288954 - RNA, 21 nt, Human
acucucccauccccgagcccu

SEQ ID NO: 288955 - RNA, 27 nt, Human
acucucccauccccgagcccucccagg

SEQ ID NO: 288956 - RNA, 30 nt, Human
acuggucucaugcccaugaugaguugcacc

SEQ ID NO: 288957 - RNA, 22 nt, Human
agaaacagaagaaagauaagaa

SEQ ID NO: 288958 - RNA, 19 nt, Human
agagacugaaaugacagcg

SEQ ID NO: 288959 - RNA, 20 nt, Human
agauaagaaugaggugguca

SEQ ID NO: 288960 - RNA, 20 nt, Human
aggaagaaacagaagaaaga

SEQ ID NO: 288961 - RNA, 22 nt, Human
aggaagaaacagaagaaagaua

SEQ ID NO: 288962 - RNA, 24 nt, Human
aggaagaaacagaagaaagauaag

SEQ ID NO: 288963 - RNA, 21 nt, Human
agguggucagguugggggaau

SEQ ID NO: 288964 - RNA, 31 nt, Human
cacuggucucaugcccaugaugaguugcacc

SEQ ID NO: 288965 - RNA, 27 nt, Human
cagcggggaggaagaaacagaagaaag

SEQ ID NO: 288966 - RNA, 23 nt, Human
caggacacccuugcugagucuca

SEQ ID NO: 288967 - RNA, 23 nt, Human
cggggaggaagaaacagaagaaa

SEQ ID NO: 288968 - RNA, 25 nt, Human
cuuccagggugaguccucacacugg

SEQ ID NO: 288969 - RNA, 20 nt, Human
gaaagauaagaaugaggugg

SEQ ID NO: 288970 - RNA, 20 nt, Human
gacaaaaugaagagacugaa

SEQ ID NO: 288971 - RNA, 19 nt, Human
gagguggucagguuggggg

SEQ ID NO: 288972 - RNA, 20 nt, Human
gagguggucagguuggggga

SEQ ID NO: 288973 - RNA, 18 nt, Human
gccguaugacaaaaugaa

SEQ ID NO: 288974 - RNA, 27 nt, Human
guggucagugggagaacacacagauac

SEQ ID NO: 288975 - RNA, 19 nt, Human
uaagcgaauauucucuucc

SEQ ID NO: 288976 - RNA, 23 nt, Human
uaugacaaaaugaagagacugaa

SEQ ID NO: 288977 - RNA, 22 nt, Human
ucacacuggucucaugcccaug

SEQ ID NO: 288978 - RNA, 28 nt, Human
ucucagaguuccugugcuccucauuuga

SEQ ID NO: 288979 - RNA, 22 nt, Human
ugaagagacugaaaugacagcg

SEQ ID NO: 288980 - RNA, 21 nt, Human
ugaaucuguguacucucccau

SEQ ID NO: 288981 - RNA, 19 nt, Human
ugacaaaaugaagagacug

SEQ ID NO: 288982 - RNA, 20 nt, Human
ugcccaugaugaguugcaca

SEQ ID NO: 288983 - RNA, 20 nt, Human
ugccucaugucauuuuccuu

SEQ ID NO: 288984 - RNA, 18 nt, Human
ugucugcgacuugaggag

SEQ ID NO: 288985 - RNA, 18 nt, Human
ugucugcgacuugaggag

SEQ ID NO: 288986 - RNA, 18 nt, Human
accgccgccgcugccgcc

SEQ ID NO: 288987 - RNA, 18 nt, Human
accgccgccgcugccgcc

SEQ ID NO: 288988 - RNA, 21 nt, Human
aggcgggagggaggggggggc

SEQ ID NO: 288989 - RNA, 19 nt, Human
caaccccucucccgcaccg

SEQ ID NO: 288990 - RNA, 23 nt, Human
caaccccucucccgcaccgcucc

SEQ ID NO: 288991 - RNA, 20 nt, Human
cagcccuggguccaaccccu

SEQ ID NO: 288992 - RNA, 23 nt, Human
cagucacuucccccccgcaaccg

SEQ ID NO: 288993 - RNA, 24 nt, Human
cccccgcaaccgccgccgcugccg

SEQ ID NO: 288994 - RNA, 25 nt, Human
cccccgcaaccgccgccgcugccgc

SEQ ID NO: 288995 - RNA, 19 nt, Human
cccucucccgcaccgcucc

SEQ ID NO: 288996 - RNA, 18 nt, Human
ccgccgccgcugccgccc

SEQ ID NO: 288997 - RNA, 22 nt, Human
ccgcucccgccgcuuuaagcgc

SEQ ID NO: 288998 - RNA, 23 nt, Human
ccggcgccggcaccgcccaguca

SEQ ID NO: 288999 - RNA, 24 nt, Human
cgccgcuuuaagcgcuucuccucc

SEQ ID NO: 289000 - RNA, 20 nt, Human
gaggcgggagggaggggggg

SEQ ID NO: 289001 - RNA, 20 nt, Human
ggagggaggggggggccugc

SEQ ID NO: 289002 - RNA, 21 nt, Human
ucuccggcgccggcaccgccc

SEQ ID NO: 289003 - RNA, 23 nt, Human
ugaggcgggagggaggggggggc

SEQ ID NO: 289004 - RNA, 24 nt, Human
ugaggcgggagggaggggggggcc

SEQ ID NO: 289005 - RNA, 21 nt, Human
aaaaaagcuccucuuaagacu

SEQ ID NO: 289006 - RNA, 22 nt, Human
aagcuccucuuaagacugaucc

SEQ ID NO: 289007 - RNA, 20 nt, Human
acguuccccccgcccccccc

SEQ ID NO: 289008 - RNA, 21 nt, Human
aucccugguguggagaggcca

SEQ ID NO: 289009 - RNA, 18 nt, Human
ccccccgccccccccuuc

SEQ ID NO: 289010 - RNA, 19 nt, Human
cccccgccccccccuucgc

SEQ ID NO: 289011 - RNA, 22 nt, Human
cccccgccccccccuucgcccc

SEQ ID NO: 289012 - RNA, 24 nt, Human
ccccuaacagcugguugccuuccu

SEQ ID NO: 289013 - RNA, 25 nt, Human
ccgccacccggagcugccagcuuug

SEQ ID NO: 289014 - RNA, 19 nt, Human
ccugcaccgccacccggag

SEQ ID NO: 289015 - RNA, 22 nt, Human
cuaacagcugguugccuuccuc

SEQ ID NO: 289016 - RNA, 21 nt, Human
cuccaaaaaaaagcuccucuu

SEQ ID NO: 289017 - RNA, 24 nt, Human
cuccccgcuccuuuaucugccuua

SEQ ID NO: 289018 - RNA, 23 nt, Human
cugguuggcaauuaauuucucuc

SEQ ID NO: 289019 - RNA, 24 nt, Human
ggaggcucugggacugcacacugu

SEQ ID NO: 289020 - RNA, 20 nt, Human
guggguccuggcguugggaa

SEQ ID NO: 289021 - RNA, 18 nt, Human
uaaaauuaaaggcagacc

SEQ ID NO: 289022 - RNA, 20 nt, Human
uaaaauuaaaggcagaccgg

SEQ ID NO: 289023 - RNA, 19 nt, Human
uaacagcugguugccuucc

SEQ ID NO: 289024 - RNA, 18 nt, Human
uaauuucucuccccgcuc

SEQ ID NO: 289025 - RNA, 19 nt, Human
uccgcugaauucccucccc

SEQ ID NO: 289026 - RNA, 20 nt, Human
ucgcuucuucacccuucuug

SEQ ID NO: 289027 - RNA, 24 nt, Human
ucugggacugcacacuguauaugc

SEQ ID NO: 289028 - RNA, 22 nt, Human
ugauccgcugaauucccucccc

SEQ ID NO: 289029 - RNA, 21 nt, Human
ugggaauucuuugacaacuuc

SEQ ID NO: 289030 - RNA, 22 nt, Human
ugggaugggaauccauuucauc

SEQ ID NO: 289031 - RNA, 18 nt, Human
uggguaaaauuaaaggca

SEQ ID NO: 289032 - RNA, 18 nt, Human
ugugcuccacucucccca

SEQ ID NO: 289033 - RNA, 24 nt, Human
uuccccccgccccccccuucgccc

SEQ ID NO: 289034 - RNA, 18 nt, Human
uugaaaaauacagcccaa

SEQ ID NO: 289035 - RNA, 22 nt, Human
uuuuuugcugugguugugugac

SEQ ID NO: 289036 - RNA, 22 nt, Human
aaagauacauuaaaaccaucag

SEQ ID NO: 289037 - RNA, 23 nt, Human
aagcauguccagacagacaccac

SEQ ID NO: 289038 - RNA, 19 nt, Human
acaaagaaaugccaacaga

SEQ ID NO: 289039 - RNA, 21 nt, Human
acaaagaaaugccaacagaga

SEQ ID NO: 289040 - RNA, 21 nt, Human
accacaaagaaaugccaacag

SEQ ID NO: 289041 - RNA, 25 nt, Human
agacagacaccacaaagaaaugcca

SEQ ID NO: 289042 - RNA, 18 nt, Human
aggaagcauguccagaca

SEQ ID NO: 289043 - RNA, 21 nt, Human
cacagaagcauaaauauaaua

SEQ ID NO: 289044 - RNA, 18 nt, Human
caccacaaagaaaugcca

SEQ ID NO: 289045 - RNA, 21 nt, Human
caccacaaagaaaugccaaca

SEQ ID NO: 289046 - RNA, 20 nt, Human
cagcuugaaaaaaucaugaa

SEQ ID NO: 289047 - RNA, 21 nt, Human
ccagacagacaccacaaagaa

SEQ ID NO: 289048 - RNA, 20 nt, Human
gaaaaaaucaugacacagaa

SEQ ID NO: 289049 - RNA, 24 nt, Human
gaccgcggagcgcgcugagcagcc

SEQ ID NO: 289050 - RNA, 20 nt, Human
gcggagcgcgcugagcagcc

SEQ ID NO: 289051 - RNA, 22 nt, Human
uaacuauaauaaguggaaaaga

SEQ ID NO: 289052 - RNA, 20 nt, Human
uauaauaaguggaaaagaua

SEQ ID NO: 289053 - RNA, 18 nt, Human
ucaaagguggagugacug

SEQ ID NO: 289054 - RNA, 20 nt, Human
uccagacagacaccacaaag

SEQ ID NO: 289055 - RNA, 21 nt, Human
uccagacagacaccacaaaga

SEQ ID NO: 289056 - RNA, 23 nt, Human
uccagacagacaccacaaagaaa

SEQ ID NO: 289057 - RNA, 24 nt, Human
ugaaaaaaucaugacacagaagca

SEQ ID NO: 289058 - RNA, 21 nt, Human
ugucaaagguggagugacugg

SEQ ID NO: 289059 - RNA, 23 nt, Human
uuaaugugaauacuacugguuac

SEQ ID NO: 289060 - RNA, 24 nt, Human
uucaaaacagaacucauaaggcag

SEQ ID NO: 289061 - RNA, 26 nt, Human
uuuaaggggaaaaaaagcaagauuua

SEQ ID NO: 289062 - RNA, 19 nt, Human
uuuuuuuuuuuuuaagggg

SEQ ID NO: 289063 - RNA, 22 nt, Human
aaaaagacagacaaaccauuac

SEQ ID NO: 289064 - RNA, 25 nt, Human
aaaaagacagacaaaccauuacaga

SEQ ID NO: 289065 - RNA, 22 nt, Human
aaaagaaauaaacaucaaagaa

SEQ ID NO: 289066 - RNA, 22 nt, Human
aaacaaaacauaucuaagucca

SEQ ID NO: 289067 - RNA, 22 nt, Human
aaagaaacuauuuuaaccuagg

SEQ ID NO: 289068 - RNA, 21 nt, Human
aagaaaaaaguaccaaggaaa

SEQ ID NO: 289069 - RNA, 22 nt, Human
aagaaaaaaguaccaaggaaac

SEQ ID NO: 289070 - RNA, 22 nt, Human
aagacagacaaaccauuacaga

SEQ ID NO: 289071 - RNA, 18 nt, Human
aaggaaacaaaaaaaauc

SEQ ID NO: 289072 - RNA, 23 nt, Human
aagugauuuauuaaugaaaauuc

SEQ ID NO: 289073 - RNA, 23 nt, Human
aauagaaacaaaacauaucuaag

SEQ ID NO: 289074 - RNA, 30 nt, Human
aauagaagaaaauagaaacaaaacauaucc

SEQ ID NO: 289075 - RNA, 22 nt, Human
aauuuaaaaacuuaaacaaugc

SEQ ID NO: 289076 - RNA, 18 nt, Human
acaccacaucaggaaaac

SEQ ID NO: 289077 - RNA, 26 nt, Human
accucaaaaguacaauuucuggaaau

SEQ ID NO: 289078 - RNA, 24 nt, Human
acgugagucaggauggagggaguu

SEQ ID NO: 289079 - RNA, 20 nt, Human
agaagaaaauagaaacaaaa

SEQ ID NO: 289080 - RNA, 26 nt, Human
agaagaaaauagaaacaaaagggacc

SEQ ID NO: 289081 - RNA, 21 nt, Human
agacagacaaaccauuacaga

SEQ ID NO: 289082 - RNA, 26 nt, Human
aggaaaaccuccuuuuauuccacauu

SEQ ID NO: 289083 - RNA, 20 nt, Human
aggaagaaagagacccgaca

SEQ ID NO: 289084 - RNA, 19 nt, Human
caaaagaaacauuaguccu

SEQ ID NO: 289085 - RNA, 18 nt, Human
cacauguguggaagagau

SEQ ID NO: 289086 - RNA, 19 nt, Human
cacuauauaaccuuugaau

SEQ ID NO: 289087 - RNA, 22 nt, Human
cacuauauaaccuuugaauacc

SEQ ID NO: 289088 - RNA, 21 nt, Human
cagaggaaaaaagacagacaa

SEQ ID NO: 289089 - RNA, 24 nt, Human
cagaggaaaaaagacagacaaacc

SEQ ID NO: 289090 - RNA, 22 nt, Human
cauauauuacaccugacagcuc

SEQ ID NO: 289091 - RNA, 19 nt, Human
ccccccaaagugcagagau

SEQ ID NO: 289092 - RNA, 19 nt, Human
ccucaagcaccacaaaaga

SEQ ID NO: 289093 - RNA, 25 nt, Human
ccucugccaggcagagacgcuccuc

SEQ ID NO: 289094 - RNA, 22 nt, Human
ccugccuuggccccccaaagug

SEQ ID NO: 289095 - RNA, 23 nt, Human
ccuuccaugggauuucacaagag

SEQ ID NO: 289096 - RNA, 18 nt, Human
cuggaaauuauucuaucu

SEQ ID NO: 289097 - RNA, 19 nt, Human
cugguauaaaaaaauacug

SEQ ID NO: 289098 - RNA, 19 nt, Human
gaaaaacugaaauagaaga

SEQ ID NO: 289099 - RNA, 18 nt, Human
gaagaaaauagaaacaaa

SEQ ID NO: 289100 - RNA, 21 nt, Human
gaggagaugcuauucgcucgg

SEQ ID NO: 289101 - RNA, 23 nt, Human
ggacaaaagaaauaaacaucaaa

SEQ ID NO: 289102 - RNA, 20 nt, Human
ggcaggaagaaagagacccg

SEQ ID NO: 289103 - RNA, 21 nt, Human
ggcaggaagaaagagacccga

SEQ ID NO: 289104 - RNA, 19 nt, Human
gggcaucugcgggcugcag

SEQ ID NO: 289105 - RNA, 21 nt, Human
uaaaaaaauacugaucagagg

SEQ ID NO: 289106 - RNA, 28 nt, Human
uaaccugagagagauggacugcgcgucc

SEQ ID NO: 289107 - RNA, 26 nt, Human
uacaccugacagcucaaacaggacgu

SEQ ID NO: 289108 - RNA, 21 nt, Human
uagcaaaaucaguuaaagaga

SEQ ID NO: 289109 - RNA, 23 nt, Human
uaugcaacacauaugaaaaaaac

SEQ ID NO: 289110 - RNA, 21 nt, Human
ucaguuaaagagauuccuggg

SEQ ID NO: 289111 - RNA, 22 nt, Human
ucaucucaggcagucuccaaaa

SEQ ID NO: 289112 - RNA, 21 nt, Human
uccacauuuccuuucaucuca

SEQ ID NO: 289113 - RNA, 19 nt, Human
ucgcugggcaucugcgggc

SEQ ID NO: 289114 - RNA, 19 nt, Human
ucuccaaaacugguauaaa

SEQ ID NO: 289115 - RNA, 23 nt, Human
ucuggugggaggugggaggagau

SEQ ID NO: 289116 - RNA, 22 nt, Human
ugaaaaacugaaauagaagaaa

SEQ ID NO: 289117 - RNA, 21 nt, Human
ugaaauagaagaaaauagaaa

SEQ ID NO: 289118 - RNA, 18 nt, Human
ugacaacugcacaugugu

SEQ ID NO: 289119 - RNA, 18 nt, Human
ugagagagauggacugcg

SEQ ID NO: 289120 - RNA, 23 nt, Human
ugcagccucugccaggcagagac

SEQ ID NO: 289121 - RNA, 18 nt, Human
ugccaggcagagacgcuc

SEQ ID NO: 289122 - RNA, 19 nt, Human
ugccaggcagagacgcucc

SEQ ID NO: 289123 - RNA, 28 nt, Human
ugccaggcagagacgcuccucacuuccc

SEQ ID NO: 289124 - RNA, 22 nt, Human
ugccuuggccccccaaagugca

SEQ ID NO: 289125 - RNA, 21 nt, Human
uggacaaaagaaauaaacauc

SEQ ID NO: 289126 - RNA, 22 nt, Human
ugggaggugggaggagaugcua

SEQ ID NO: 289127 - RNA, 18 nt, Human
ugggcaggaagaaagaga

SEQ ID NO: 289128 - RNA, 23 nt, Human
uggugggaggugggaggagaugc

SEQ ID NO: 289129 - RNA, 21 nt, Human
uuacaccacaucaggaaaacc

SEQ ID NO: 289130 - RNA, 22 nt, Human
uucaucucaggcagucuccaaa

SEQ ID NO: 289131 - RNA, 27 nt, Human
uuuaaaaagaaaaaaguaccaaggaaa

SEQ ID NO: 289132 - RNA, 23 nt, Human
uuuucagaauuuaaaaacuuaaa

SEQ ID NO: 289133 - RNA, 23 nt, Human
uuuuuuuuuuuuuuuuuucuggg

SEQ ID NO: 289134 - RNA, 20 nt, Human
aaaaaaaagcugaaaguuug

SEQ ID NO: 289135 - RNA, 24 nt, Human
aaaagcugaaaguuugauugaacu

SEQ ID NO: 289136 - RNA, 23 nt, Human
acugcaguucauuuuacagagaa

SEQ ID NO: 289137 - RNA, 19 nt, Human
agauagugguuguacuuuc

SEQ ID NO: 289138 - RNA, 21 nt, Human
aguucuggaaaggcuccucuu

SEQ ID NO: 289139 - RNA, 26 nt, Human
caaaaugaauacucagaaucaaacua

SEQ ID NO: 289140 - RNA, 19 nt, Human
cagauuggacagagagggu

SEQ ID NO: 289141 - RNA, 18 nt, Human
caggagcuucuucuguaa

SEQ ID NO: 289142 - RNA, 19 nt, Human
cauccggaggcugagaacg

SEQ ID NO: 289143 - RNA, 19 nt, Human
cauuuuacagagaaacacc

SEQ ID NO: 289144 - RNA, 25 nt, Human
ccagcggucuccuggguaauccucc

SEQ ID NO: 289145 - RNA, 22 nt, Human
ccaggaguuucuucugcaauuu

SEQ ID NO: 289146 - RNA, 25 nt, Human
cccaugcgcgcagcggcgccagccg

SEQ ID NO: 289147 - RNA, 27 nt, Human
cccaugcgcgcagcggcgccagccgcg

SEQ ID NO: 289148 - RNA, 21 nt, Human
cucuaaauccaaaagggccuc

SEQ ID NO: 289149 - RNA, 20 nt, Human
cugaaaaaaaagcugaaagu

SEQ ID NO: 289150 - RNA, 24 nt, Human
gacacuggguaugcucccccagga

SEQ ID NO: 289151 - RNA, 24 nt, Human
gacuugcagauuggacagagaggg

SEQ ID NO: 289152 - RNA, 18 nt, Human
gagaacucucucuccagc

SEQ ID NO: 289153 - RNA, 23 nt, Human
gcgcgcgcgcgugugugugugug

SEQ ID NO: 289154 - RNA, 24 nt, Human
gugaauggcugaaaaaaaagcuga

SEQ ID NO: 289155 - RNA, 19 nt, Human
guuguacuuucucuucugc

SEQ ID NO: 289156 - RNA, 22 nt, Human
uaacuugauuucuucccuguaa

SEQ ID NO: 289157 - RNA, 20 nt, Human
uaagagaaggucucuccugg

SEQ ID NO: 289158 - RNA, 22 nt, Human
ucagugcuacaucuaaaaagag

SEQ ID NO: 289159 - RNA, 21 nt, Human
ucccuguaauucaaacauuca

SEQ ID NO: 289160 - RNA, 23 nt, Human
ucuagugaguuuacuguccuaag

SEQ ID NO: 289161 - RNA, 22 nt, Human
ucuccaaguugcaaaaugaaua

SEQ ID NO: 289162 - RNA, 19 nt, Human
ucugcguaguguggguaag

SEQ ID NO: 289163 - RNA, 21 nt, Human
ucugcguaguguggguaagag

SEQ ID NO: 289164 - RNA, 22 nt, Human
ucuguaauuuuacucugcuguu

SEQ ID NO: 289165 - RNA, 19 nt, Human
ugaaaaaaacuugaagagu

SEQ ID NO: 289166 - RNA, 25 nt, Human
ugaaaagagaauuagaaaaugaagg

SEQ ID NO: 289167 - RNA, 21 nt, Human
ugaacugaaauccaauccaug

SEQ ID NO: 289168 - RNA, 23 nt, Human
ugaauggcugaaaaaaaagcuga

SEQ ID NO: 289169 - RNA, 24 nt, Human
ugcccucaguuauguucacgaucu

SEQ ID NO: 289170 - RNA, 18 nt, Human
ugcgcgcgcgcgcgugug

SEQ ID NO: 289171 - RNA, 22 nt, Human
ugcgcgcgcgcgcgugugugug

SEQ ID NO: 289172 - RNA, 20 nt, Human
uggaaaggcuccucuuuaaa

SEQ ID NO: 289173 - RNA, 20 nt, Human
uggagagagucgggcguguc

SEQ ID NO: 289174 - RNA, 22 nt, Human
uggcggcugcgggccaggaaca

SEQ ID NO: 289175 - RNA, 19 nt, Human
uggguagguggcggcugcg

SEQ ID NO: 289176 - RNA, 22 nt, Human
uggguagguggcggcugcgggc

SEQ ID NO: 289177 - RNA, 21 nt, Human
ugucgcagauggcucugcugu

SEQ ID NO: 289178 - RNA, 22 nt, Human
ugugaauggcugaaaaaaaagc

SEQ ID NO: 289179 - RNA, 18 nt, Human
ugugcgcgcgcgcgcgug

SEQ ID NO: 289180 - RNA, 24 nt, Human
ugugcgcgcgcgcgcgugugugug

SEQ ID NO: 289181 - RNA, 24 nt, Human
ugugugcgcgcgcgcgcgugugug

SEQ ID NO: 289182 - RNA, 24 nt, Human
ugugugugcgcgcgcgcgcgugau

SEQ ID NO: 289183 - RNA, 25 nt, Human
uucauaauuucucacuuugugacaa

SEQ ID NO: 289184 - RNA, 19 nt, Human
uucugauggagagagucgg

SEQ ID NO: 289185 - RNA, 21 nt, Human
uucuuugggaauagaugcuuu

SEQ ID NO: 289186 - RNA, 21 nt, Human
uuguacuuucucuucugcgua

SEQ ID NO: 289187 - RNA, 22 nt, Human
uuuacugaagguaaaaggcagg

SEQ ID NO: 289188 - RNA, 19 nt, Human
aaaaccuguuuucuccccc

SEQ ID NO: 289189 - RNA, 18 nt, Human
aaagcagcgccaugagcc

SEQ ID NO: 289190 - RNA, 18 nt, Human
aaaggccagggcauacgg

SEQ ID NO: 289191 - RNA, 19 nt, Human
aaccuguuuucuccccccc

SEQ ID NO: 289192 - RNA, 18 nt, Human
aaccuuuuuacucguaca

SEQ ID NO: 289193 - RNA, 18 nt, Human
aacuugguuuccaacccc

SEQ ID NO: 289194 - RNA, 22 nt, Human
aacuugguuuccaaccccuccc

SEQ ID NO: 289195 - RNA, 23 nt, Human
acacacacacacacacacacaca

SEQ ID NO: 289196 - RNA, 23 nt, Human
acacacacacacacacacacaca

SEQ ID NO: 289197 - RNA, 23 nt, Human
acacacacacacacacacacaca

SEQ ID NO: 289198 - RNA, 23 nt, Human
acacacacacacacacacacaca

SEQ ID NO: 289199 - RNA, 23 nt, Human
acacacacacacacacacacaca

SEQ ID NO: 289200 - RNA, 23 nt, Human
acacacacacacacacacacaca

SEQ ID NO: 289201 - RNA, 23 nt, Human
acacacacacacacacacacaca

SEQ ID NO: 289202 - RNA, 24 nt, Human
acacacacacacacacacacacag

SEQ ID NO: 289203 - RNA, 33 nt, Human
acacacacacacacacacacacagacacguagu

SEQ ID NO: 289204 - RNA, 31 nt, Human
acacacacacacacacacacagacacguacg

SEQ ID NO: 289205 - RNA, 29 nt, Human
acacacacacacacacagacacguacgca

SEQ ID NO: 289206 - RNA, 25 nt, Human
acacacacacacacagacacguacg

SEQ ID NO: 289207 - RNA, 25 nt, Human
acacugggucaugacaggaaaggcc

SEQ ID NO: 289208 - RNA, 20 nt, Human
acagccacaaaaauaaaacc

SEQ ID NO: 289209 - RNA, 26 nt, Human
acagccacaaaaauaaaaccuguuuu

SEQ ID NO: 289210 - RNA, 21 nt, Human
agaaaggaacucuacauaaaa

SEQ ID NO: 289211 - RNA, 22 nt, Human
agagacucuggaaagugaacac

SEQ ID NO: 289212 - RNA, 21 nt, Human
agcaacacggaauucacuggu

SEQ ID NO: 289213 - RNA, 25 nt, Human
agccacaaaaauaaaaccuguuuuc

SEQ ID NO: 289214 - RNA, 22 nt, Human
aggaacucuacauaaauaugcc

SEQ ID NO: 289215 - RNA, 19 nt, Human
aggaaggacaagcuugaga

SEQ ID NO: 289216 - RNA, 21 nt, Human
aggagaaaggaacucuacaua

SEQ ID NO: 289217 - RNA, 18 nt, Human
auaaauaugcccaaaggc

SEQ ID NO: 289218 - RNA, 20 nt, Human
auacaaaaaugugaaauauc

SEQ ID NO: 289219 - RNA, 27 nt, Human
caaaaauaaaaccuguuuucucccccc

SEQ ID NO: 289220 - RNA, 18 nt, Human
caaagcagcgccaugagc

SEQ ID NO: 289221 - RNA, 21 nt, Human
caagagcaacacggaauucac

SEQ ID NO: 289222 - RNA, 20 nt, Human
cacacacacacacacacaca

SEQ ID NO: 289223 - RNA, 20 nt, Human
cacacacacacacacacaca

SEQ ID NO: 289224 - RNA, 20 nt, Human
cacacacacacacacacaca

SEQ ID NO: 289225 - RNA, 20 nt, Human
cacacacacacacacacaca

SEQ ID NO: 289226 - RNA, 20 nt, Human
cacacacacacacacacaca

SEQ ID NO: 289227 - RNA, 20 nt, Human
cacacacacacacacacaca

SEQ ID NO: 289228 - RNA, 20 nt, Human
cacacacacacacacacaca

SEQ ID NO: 289229 - RNA, 20 nt, Human
cacacacacacacacacaca

SEQ ID NO: 289230 - RNA, 20 nt, Human
cacacacacacacacacaca

SEQ ID NO: 289231 - RNA, 20 nt, Human
cacacacacacacacacaca

SEQ ID NO: 289232 - RNA, 22 nt, Human
cacacacacacacacacacaca

SEQ ID NO: 289233 - RNA, 22 nt, Human
cacacacacacacacacacaca

SEQ ID NO: 289234 - RNA, 22 nt, Human
cacacacacacacacacacaca

SEQ ID NO: 289235 - RNA, 26 nt, Human
cacacacacacacacacacacacaca

SEQ ID NO: 289236 - RNA, 26 nt, Human
cacacacacacacacacacacacaca

SEQ ID NO: 289237 - RNA, 26 nt, Human
cacacacacacacacacacacacaca

SEQ ID NO: 289238 - RNA, 26 nt, Human
cacacacacacacacacacacacaca

SEQ ID NO: 289239 - RNA, 26 nt, Human
cacacacacacacacacacacacaca

SEQ ID NO: 289240 - RNA, 26 nt, Human
cacacacacacacacacacacacaca

SEQ ID NO: 289241 - RNA, 28 nt, Human
cacacacacacacacacacacacagaca

SEQ ID NO: 289242 - RNA, 18 nt, Human
cacacacgcugccguacc

SEQ ID NO: 289243 - RNA, 19 nt, Human
cacacacgcugccguaccc

SEQ ID NO: 289244 - RNA, 21 nt, Human
cacagcgccacgcauaagaac

SEQ ID NO: 289245 - RNA, 24 nt, Human
cacagcgccacgcauaagaacaga

SEQ ID NO: 289246 - RNA, 21 nt, Human
cacguacgcacacacgcugcc

SEQ ID NO: 289247 - RNA, 23 nt, Human
cagagacucuggaaagugaacac

SEQ ID NO: 289248 - RNA, 19 nt, Human
cagcagcuggaaugucagc

SEQ ID NO: 289249 - RNA, 31 nt, Human
cagcagcuggaaugucagcucuuuuugcagg

SEQ ID NO: 289250 - RNA, 23 nt, Human
caggaaaggccucacaagagcaa

SEQ ID NO: 289251 - RNA, 21 nt, Human
caggcaggacaguacaccccc

SEQ ID NO: 289252 - RNA, 20 nt, Human
caguuagauuaaaaagggga

SEQ ID NO: 289253 - RNA, 19 nt, Human
ccaaacaaacgaacagaga

SEQ ID NO: 289254 - RNA, 28 nt, Human
ccacaaaaauaaaaccuguuguccggac

SEQ ID NO: 289255 - RNA, 24 nt, Human
ccaucaggcagguucuuaagcaca

SEQ ID NO: 289256 - RNA, 19 nt, Human
ccccacccgggcccgcgcc

SEQ ID NO: 289257 - RNA, 23 nt, Human
ccccacccgggcccgcgcccgcc

SEQ ID NO: 289258 - RNA, 23 nt, Human
ccccacccgggcccgcgcccgcc

SEQ ID NO: 289259 - RNA, 22 nt, Human
cccccaggagacaacuugguuu

SEQ ID NO: 289260 - RNA, 25 nt, Human
cccccaggagacaacuugguuucca

SEQ ID NO: 289261 - RNA, 23 nt, Human
ccccgagaccgccauccaaacaa

SEQ ID NO: 289262 - RNA, 24 nt, Human
ccucaaaaucucagugcgagaaga

SEQ ID NO: 289263 - RNA, 24 nt, Human
cuaucugaagcggguggagcaaag

SEQ ID NO: 289264 - RNA, 21 nt, Human
cucccccccaggagacaacuu

SEQ ID NO: 289265 - RNA, 21 nt, Human
cucguacaucccccaugagaa

SEQ ID NO: 289266 - RNA, 23 nt, Human
cucuacauaaauaugcccaaagg

SEQ ID NO: 289267 - RNA, 19 nt, Human
cuggaaagugaacacagcg

SEQ ID NO: 289268 - RNA, 18 nt, Human
gagaccgccauccaaaca

SEQ ID NO: 289269 - RNA, 23 nt, Human
gaucuguuucaacggagaauggg

SEQ ID NO: 289270 - RNA, 21 nt, Human
gcccgcgcccgccucagcggu

SEQ ID NO: 289271 - RNA, 21 nt, Human
gcugccguaccccgagaccgc

SEQ ID NO: 289272 - RNA, 25 nt, Human
ggaaaaaaccacagccacaaaaaua

SEQ ID NO: 289273 - RNA, 18 nt, Human
ggaaggacaagcuugaga

SEQ ID NO: 289274 - RNA, 18 nt, Human
ggccagggcauacggcaa

SEQ ID NO: 289275 - RNA, 25 nt, Human
uaaaaccuguuuucucccccccagg

SEQ ID NO: 289276 - RNA, 18 nt, Human
uaagaacagaaguuaacc

SEQ ID NO: 289277 - RNA, 18 nt, Human
uacggcaagcccucucau

SEQ ID NO: 289278 - RNA, 20 nt, Human
uaucugaagcggguggagca

SEQ ID NO: 289279 - RNA, 21 nt, Human
ucacacacacacacacacaca

SEQ ID NO: 289280 - RNA, 23 nt, Human
ucagcucuuuuugcagauuucac

SEQ ID NO: 289281 - RNA, 22 nt, Human
ucaugacaggaaaggccucaca

SEQ ID NO: 289282 - RNA, 19 nt, Human
uccaaacaaacgaacagag

SEQ ID NO: 289283 - RNA, 21 nt, Human
uccaaacaaacgaacagagac

SEQ ID NO: 289284 - RNA, 22 nt, Human
ucucaugggugggcaugagugg

SEQ ID NO: 289285 - RNA, 24 nt, Human
ucugcagaguggccggaaccuugg

SEQ ID NO: 289286 - RNA, 19 nt, Human
ugagaaacucacgucuuag

SEQ ID NO: 289287 - RNA, 23 nt, Human
ugaguggacaucuuccugaagga

SEQ ID NO: 289288 - RNA, 19 nt, Human
ugguuuccaaccccuccca

SEQ ID NO: 289289 - RNA, 20 nt, Human
uucacacacacacacacaca

SEQ ID NO: 289290 - RNA, 21 nt, Human
uucacacacacacacacacac

SEQ ID NO: 289291 - RNA, 26 nt, Human
uucaugacagccuacaaccgugauga

SEQ ID NO: 289292 - RNA, 19 nt, Human
uuuccaaccccucccauac

SEQ ID NO: 289293 - RNA, 24 nt, Human
uuugucguugcugugaucuguuuc

SEQ ID NO: 289294 - RNA, 21 nt, Human
aaaagcugugaaagcuuccac

SEQ ID NO: 289295 - RNA, 27 nt, Human
aacaucacuuacuaacagaugagcagc

SEQ ID NO: 289296 - RNA, 22 nt, Human
aaccauaguugcucuaauaccu

SEQ ID NO: 289297 - RNA, 24 nt, Human
acaaaagcugugaaagcuuccacu

SEQ ID NO: 289298 - RNA, 19 nt, Human
aggcaaaagaagauaaugg

SEQ ID NO: 289299 - RNA, 25 nt, Human
aggcaaaagaagauaaugguacuag

SEQ ID NO: 289300 - RNA, 21 nt, Human
auaaguagauuaauguguaga

SEQ ID NO: 289301 - RNA, 22 nt, Human
augaaggaaauaugagcaagga

SEQ ID NO: 289302 - RNA, 18 nt, Human
augauuuuuaauuugaau

SEQ ID NO: 289303 - RNA, 20 nt, Human
caaggaagcugugauuuuuc

SEQ ID NO: 289304 - RNA, 22 nt, Human
cacagagaauguacaaaagcug

SEQ ID NO: 289305 - RNA, 27 nt, Human
cacaggcugaagaaaauaaauguaaac

SEQ ID NO: 289306 - RNA, 20 nt, Human
caccuggaauggaguuaaua

SEQ ID NO: 289307 - RNA, 18 nt, Human
cagcugagauugccaagc

SEQ ID NO: 289308 - RNA, 19 nt, Human
caggggacagucuguaacu

SEQ ID NO: 289309 - RNA, 22 nt, Human
cagugcagcccuuucagcuuuc

SEQ ID NO: 289310 - RNA, 22 nt, Human
caugucaccuggaauggaguua

SEQ ID NO: 289311 - RNA, 19 nt, Human
ccagaaccugcuaauacaa

SEQ ID NO: 289312 - RNA, 27 nt, Human
ccauugcuuuguuuugcacaggcugaa

SEQ ID NO: 289313 - RNA, 22 nt, Human
ccccagaaaaaugucgaguccc

SEQ ID NO: 289314 - RNA, 22 nt, Human
cccugcuaugugacagcuccaa

SEQ ID NO: 289315 - RNA, 25 nt, Human
ccuuugguuucugggacggcucggg

SEQ ID NO: 289316 - RNA, 22 nt, Human
cuccaaggacuaaagauuucaa

SEQ ID NO: 289317 - RNA, 23 nt, Human
cuccagguguagcugcguuuucc

SEQ ID NO: 289318 - RNA, 20 nt, Human
gaaggaaauaugagcaagga

SEQ ID NO: 289319 - RNA, 20 nt, Human
gaaggcagcagcacucaggc

SEQ ID NO: 289320 - RNA, 24 nt, Human
gaggcauuggcuccaacugucagc

SEQ ID NO: 289321 - RNA, 19 nt, Human
gcugugauuuuucucuggc

SEQ ID NO: 289322 - RNA, 20 nt, Human
gcuuguuuuccaucucagcc

SEQ ID NO: 289323 - RNA, 20 nt, Human
ggcuggcacugugaaaauaa

SEQ ID NO: 289324 - RNA, 18 nt, Human
uaaauguaaacagcauau

SEQ ID NO: 289325 - RNA, 20 nt, Human
uaagaugaaggaaauaugag

SEQ ID NO: 289326 - RNA, 22 nt, Human
uaauaaugggacaucacuuccu

SEQ ID NO: 289327 - RNA, 19 nt, Human
uacaaguccugaugaauug

SEQ ID NO: 289328 - RNA, 19 nt, Human
uacacuaugaggcauuggc

SEQ ID NO: 289329 - RNA, 18 nt, Human
uagccagaaccugcuaau

SEQ ID NO: 289330 - RNA, 19 nt, Human
uaggaggggaagagcagug

SEQ ID NO: 289331 - RNA, 23 nt, Human
uauccaugucaccuggaauggag

SEQ ID NO: 289332 - RNA, 20 nt, Human
uaugagcaaggacugcacuc

SEQ ID NO: 289333 - RNA, 24 nt, Human
uauuuuucuuucaguuuacacuau

SEQ ID NO: 289334 - RNA, 25 nt, Human
ucaccagaaaacauuaauugaucgu

SEQ ID NO: 289335 - RNA, 20 nt, Human
ucagaaaaagguucaguuuc

SEQ ID NO: 289336 - RNA, 21 nt, Human
ucagcaguucccuaccaggaa

SEQ ID NO: 289337 - RNA, 26 nt, Human
ucagcaguucccuaccaggaaacugg

SEQ ID NO: 289338 - RNA, 19 nt, Human
ucagggagccaggggacag

SEQ ID NO: 289339 - RNA, 20 nt, Human
uccagugcagcccuuucagc

SEQ ID NO: 289340 - RNA, 23 nt, Human
uccccagaaaaaugucgaguccc

SEQ ID NO: 289341 - RNA, 24 nt, Human
uccugagcaauuuuucuuuuauug

SEQ ID NO: 289342 - RNA, 20 nt, Human
ucggaguuguaggaggugaa

SEQ ID NO: 289343 - RNA, 21 nt, Human
ucuagccagaaccugcuaaua

SEQ ID NO: 289344 - RNA, 18 nt, Human
ugacaggagauagucucu

SEQ ID NO: 289345 - RNA, 19 nt, Human
ugacguggugcauuaguaa

SEQ ID NO: 289346 - RNA, 20 nt, Human
ugcagcccuuucagcuuucc

SEQ ID NO: 289347 - RNA, 23 nt, Human
ugcagcccuuucagcuuuccaga

SEQ ID NO: 289348 - RNA, 22 nt, Human
ugccccugcuaugugacagcuc

SEQ ID NO: 289349 - RNA, 24 nt, Human
uggacaaaaauacaaaugaaauga

SEQ ID NO: 289350 - RNA, 23 nt, Human
uggcucaggguggauaauaaugg

SEQ ID NO: 289351 - RNA, 20 nt, Human
ugguggcucaggguggauaa

SEQ ID NO: 289352 - RNA, 23 nt, Human
uuaguaauuuuaggcaaaagaag

SEQ ID NO: 289353 - RNA, 18 nt, Human
uugcuggugacggucuug

SEQ ID NO: 289354 - RNA, 22 nt, Human
uuuagaguauuguuggcuuugu

SEQ ID NO: 289355 - RNA, 24 nt, Human
uuuauuaaggagaugagaagcagg

SEQ ID NO: 289356 - RNA, 24 nt, Human
uuuauugggaucaucuuaauucuu

SEQ ID NO: 289357 - RNA, 24 nt, Human
uuugguuucugggacggcucgggu

SEQ ID NO: 289358 - RNA, 18 nt, Human
uuuguuaagaugaggcag

SEQ ID NO: 289359 - RNA, 24 nt, Human
aaacuacccuuuccuccuuuucug

SEQ ID NO: 289360 - RNA, 18 nt, Human
aaaucagccucuacccuu

SEQ ID NO: 289361 - RNA, 19 nt, Human
aacccccagccccaaacag

SEQ ID NO: 289362 - RNA, 23 nt, Human
aagaagacuugagccacuucuuu

SEQ ID NO: 289363 - RNA, 23 nt, Human
aagaaggauaacacagaaaggaa

SEQ ID NO: 289364 - RNA, 24 nt, Human
aagaaggauaacacagaaaggaaa

SEQ ID NO: 289365 - RNA, 24 nt, Human
aagaggaagggauucuuuuuugaa

SEQ ID NO: 289366 - RNA, 19 nt, Human
aaggguuuguagcaaccug

SEQ ID NO: 289367 - RNA, 19 nt, Human
agaaaggaaaaaaauuuga

SEQ ID NO: 289368 - RNA, 21 nt, Human
aggaaggaaagcagcagagga

SEQ ID NO: 289369 - RNA, 19 nt, Human
auccucuucuguagugugu

SEQ ID NO: 289370 - RNA, 21 nt, Human
augaacaaacuccaagaagac

SEQ ID NO: 289371 - RNA, 22 nt, Human
augcaguuuccuuucuaugucc

SEQ ID NO: 289372 - RNA, 18 nt, Human
auguugcuacuccccauc

SEQ ID NO: 289373 - RNA, 19 nt, Human
auguugcuacuccccaucc

SEQ ID NO: 289374 - RNA, 19 nt, Human
caacaaccucacccagaaa

SEQ ID NO: 289375 - RNA, 30 nt, Human
caacccccagccccaaacagaucugauucu

SEQ ID NO: 289376 - RNA, 22 nt, Human
cacaaggguuuguagcaaccug

SEQ ID NO: 289377 - RNA, 23 nt, Human
cacagaaggaaggaaagcagcag

SEQ ID NO: 289378 - RNA, 22 nt, Human
cagguacuauuucuagaauccc

SEQ ID NO: 289379 - RNA, 22 nt, Human
cauuucucagcuuccucuaugc

SEQ ID NO: 289380 - RNA, 22 nt, Human
ccagacucaaauggcuuccuca

SEQ ID NO: 289381 - RNA, 29 nt, Human
ccagccccaaacagaucugauucuagaaa

SEQ ID NO: 289382 - RNA, 21 nt, Human
cccagccccaaacagaucuga

SEQ ID NO: 289383 - RNA, 21 nt, Human
ccccaucccuucaggccacag

SEQ ID NO: 289384 - RNA, 19 nt, Human
cccuugugaacagguucgg

SEQ ID NO: 289385 - RNA, 23 nt, Human
ccucagaccccacauuucucagc

SEQ ID NO: 289386 - RNA, 25 nt, Human
cucaaauggcuuccucagaccccac

SEQ ID NO: 289387 - RNA, 26 nt, Human
cuccaacccccagccccaaacagauc

SEQ ID NO: 289388 - RNA, 21 nt, Human
cugcuuuuauucuccaacccc

SEQ ID NO: 289389 - RNA, 30 nt, Human
cuucuguagugugugugugugugugugugg

SEQ ID NO: 289390 - RNA, 21 nt, Human
cuuuuuauguugcuacucccc

SEQ ID NO: 289391 - RNA, 24 nt, Human
gaacaaacuccaagaagacuugag

SEQ ID NO: 289392 - RNA, 27 nt, Human
gaacaaacuccaagaagacuugagcca

SEQ ID NO: 289393 - RNA, 19 nt, Human
gagguaagggugggagagg

SEQ ID NO: 289394 - RNA, 25 nt, Human
gauaagaaggauaacacagaaagga

SEQ ID NO: 289395 - RNA, 22 nt, Human
gcaacaaccucacccagaaauu

SEQ ID NO: 289396 - RNA, 20 nt, Human
gcagaagauggagccaugug

SEQ ID NO: 289397 - RNA, 21 nt, Human
gcuacuccccaucccuucagg

SEQ ID NO: 289398 - RNA, 18 nt, Human
gcucaagugugugagaug

SEQ ID NO: 289399 - RNA, 23 nt, Human
ggauaagaaggauaacacagaaa

SEQ ID NO: 289400 - RNA, 23 nt, Human
gugacagagacuguagaaaagga

SEQ ID NO: 289401 - RNA, 21 nt, Human
gugugugugugugugauuuuu

SEQ ID NO: 289402 - RNA, 20 nt, Human
gugugugugugugugugugu

SEQ ID NO: 289403 - RNA, 19 nt, Human
uacagaguggcaagcucaa

SEQ ID NO: 289404 - RNA, 18 nt, Human
uagaaagucauugugaag

SEQ ID NO: 289405 - RNA, 21 nt, Human
uagaaggcagacaaucuuucu

SEQ ID NO: 289406 - RNA, 20 nt, Human
uagaaucccauagacuucuc

SEQ ID NO: 289407 - RNA, 21 nt, Human
uagaaucccauagacuucucc

SEQ ID NO: 289408 - RNA, 21 nt, Human
uauacagaguggcaagcucaa

SEQ ID NO: 289409 - RNA, 24 nt, Human
uauguugcuacuccccaucccuuc

SEQ ID NO: 289410 - RNA, 21 nt, Human
uauuuuaaggggcgugacaga

SEQ ID NO: 289411 - RNA, 20 nt, Human
ucaagugugugagauggagg

SEQ ID NO: 289412 - RNA, 21 nt, Human
ucacucuuuccaggcuucauu

SEQ ID NO: 289413 - RNA, 19 nt, Human
ucccauagacuucuccugc

SEQ ID NO: 289414 - RNA, 21 nt, Human
uccccaucccuucaggccaca

SEQ ID NO: 289415 - RNA, 22 nt, Human
ugacagagacuguagaaaagga

SEQ ID NO: 289416 - RNA, 23 nt, Human
ugaggcaacaaccucacccagaa

SEQ ID NO: 289417 - RNA, 22 nt, Human
ugaguuuggcagggaagcugga

SEQ ID NO: 289418 - RNA, 24 nt, Human
ugcagguacuauuucuagaauccc

SEQ ID NO: 289419 - RNA, 23 nt, Human
ugccacagaaggaaggaaagcag

SEQ ID NO: 289420 - RNA, 19 nt, Human
ugcugcugguggcucuguc

SEQ ID NO: 289421 - RNA, 25 nt, Human
ugggaucagcauucaugaacaaacu

SEQ ID NO: 289422 - RNA, 24 nt, Human
uguagaaaaggagagggacuuucc

SEQ ID NO: 289423 - RNA, 20 nt, Human
ugucuagagguugaugucuc

SEQ ID NO: 289424 - RNA, 18 nt, Human
ugugugugugugugugug

SEQ ID NO: 289425 - RNA, 19 nt, Human
ugugugugugugugugugu

SEQ ID NO: 289426 - RNA, 24 nt, Human
uguucuuucucucaagguuauuua

SEQ ID NO: 289427 - RNA, 21 nt, Human
uucuccaacccccagccccaa

SEQ ID NO: 289428 - RNA, 22 nt, Human
uugaucuuguucuuucucucaa

SEQ ID NO: 289429 - RNA, 19 nt, Human
uuugcugcugguggcucug

SEQ ID NO: 289430 - RNA, 22 nt, Human
uuuuauguugcuacuccccauc

SEQ ID NO: 289431 - RNA, 20 nt, Human
aaaaagaaguauuuugaaaa

SEQ ID NO: 289432 - RNA, 20 nt, Human
aaaaccaauaaugaaaaaga

SEQ ID NO: 289433 - RNA, 24 nt, Human
aaaauguacuaccaagauaaaaua

SEQ ID NO: 289434 - RNA, 22 nt, Human
aaacaucuguuugcuagaaaua

SEQ ID NO: 289435 - RNA, 20 nt, Human
aaguauuuugaaaacaaaca

SEQ ID NO: 289436 - RNA, 24 nt, Human
acacaaaaccaaaaaggcauuauc

SEQ ID NO: 289437 - RNA, 20 nt, Human
accacacaaaaccaaaaagg

SEQ ID NO: 289438 - RNA, 23 nt, Human
agauaaaaggauaaugcuuuuuu

SEQ ID NO: 289439 - RNA, 23 nt, Human
auguauuaguugaauaccacaca

SEQ ID NO: 289440 - RNA, 25 nt, Human
cacacaaaaccaaaaaggcauuauc

SEQ ID NO: 289441 - RNA, 22 nt, Human
cagccggcggggcuuggaggag

SEQ ID NO: 289442 - RNA, 27 nt, Human
caucccaaaaguauuggaagguccuuc

SEQ ID NO: 289443 - RNA, 21 nt, Human
cauguaaacaaagacuaugua

SEQ ID NO: 289444 - RNA, 21 nt, Human
gaauaccacacaaaaccaaaa

SEQ ID NO: 289445 - RNA, 19 nt, Human
gcugccuccucuuccuucc

SEQ ID NO: 289446 - RNA, 19 nt, Human
ggauccggcucccaagugu

SEQ ID NO: 289447 - RNA, 20 nt, Human
ggccccgaggaugccaggag

SEQ ID NO: 289448 - RNA, 18 nt, Human
ggcggggcuuggaggagc

SEQ ID NO: 289449 - RNA, 21 nt, Human
ggggacgaggcguagggcugg

SEQ ID NO: 289450 - RNA, 22 nt, Human
ggucgggcucucaccucaggcc

SEQ ID NO: 289451 - RNA, 21 nt, Human
uaaaaccaauaaugaaaaaga

SEQ ID NO: 289452 - RNA, 19 nt, Human
uaaaaggauaaugcuuuuu

SEQ ID NO: 289453 - RNA, 21 nt, Human
uagcauugaccauuaacauuu

SEQ ID NO: 289454 - RNA, 21 nt, Human
uauuuugaaaacaaacaucug

SEQ ID NO: 289455 - RNA, 19 nt, Human
ucaacacauaaaagguggc

SEQ ID NO: 289456 - RNA, 24 nt, Human
ucaucaacacauaaaagguggcac

SEQ ID NO: 289457 - RNA, 28 nt, Human
ucccaaaggggccggucgggcucucacc

SEQ ID NO: 289458 - RNA, 23 nt, Human
ugagucaucaacacauaaaaggu

SEQ ID NO: 289459 - RNA, 18 nt, Human
uucaaucaguaguuuaaa

SEQ ID NO: 289460 - RNA, 22 nt, Human
aaaaugccccccucccccagga

SEQ ID NO: 289461 - RNA, 22 nt, Human
aaaaugccccccucccccagga

SEQ ID NO: 289462 - RNA, 21 nt, Human
aaacauccggcgcgcaccagc

SEQ ID NO: 289463 - RNA, 21 nt, Human
aaacauccggcgcgcaccagc

SEQ ID NO: 289464 - RNA, 18 nt, Human
aaagagccaacaaacagg

SEQ ID NO: 289465 - RNA, 18 nt, Human
aaagagccaacaaacagg

SEQ ID NO: 289466 - RNA, 23 nt, Human
aaagggagggacggugggggagg

SEQ ID NO: 289467 - RNA, 19 nt, Human
aagcagcagccuggugggc

SEQ ID NO: 289468 - RNA, 19 nt, Human
aagcagcagccuggugggc

SEQ ID NO: 289469 - RNA, 19 nt, Human
aagcccguuccuagagccg

SEQ ID NO: 289470 - RNA, 19 nt, Human
aagcccguuccuagagccg

SEQ ID NO: 289471 - RNA, 21 nt, Human
aagcgaaaacacggaauuaca

SEQ ID NO: 289472 - RNA, 22 nt, Human
aagcgaaaacacggaauuacag

SEQ ID NO: 289473 - RNA, 24 nt, Human
aagucguuuucuucuuaaucuccu

SEQ ID NO: 289474 - RNA, 24 nt, Human
aagucguuuucuucuuaaucuccu

SEQ ID NO: 289475 - RNA, 22 nt, Human
acacaccgucuuuccacaaagc

SEQ ID NO: 289476 - RNA, 22 nt, Human
acacaccgucuuuccacaaagc

SEQ ID NO: 289477 - RNA, 20 nt, Human
acagaaacauccggcgcgca

SEQ ID NO: 289478 - RNA, 20 nt, Human
acagaaacauccggcgcgca

SEQ ID NO: 289479 - RNA, 22 nt, Human
acagacaagagcgacagagacg

SEQ ID NO: 289480 - RNA, 22 nt, Human
acagacaagagcgacagagacg

SEQ ID NO: 289481 - RNA, 20 nt, Human
acagagaaagagccaacaaa

SEQ ID NO: 289482 - RNA, 20 nt, Human
acagagaaagagccaacaaa

SEQ ID NO: 289483 - RNA, 18 nt, Human
acccggaaggcgagggca

SEQ ID NO: 289484 - RNA, 18 nt, Human
acccggaaggcgagggca

SEQ ID NO: 289485 - RNA, 23 nt, Human
acuucaggacuugaggagaaaag

SEQ ID NO: 289486 - RNA, 18 nt, Human
agagaagcggagaggaga

SEQ ID NO: 289487 - RNA, 18 nt, Human
agagaagcggagaggaga

SEQ ID NO: 289488 - RNA, 25 nt, Human
agagacagagacagagggggagaga

SEQ ID NO: 289489 - RNA, 25 nt, Human
agagacagagacagagggggagaga

SEQ ID NO: 289490 - RNA, 23 nt, Human
agagccggacccccacaccccca

SEQ ID NO: 289491 - RNA, 23 nt, Human
agagccggacccccacaccccca

SEQ ID NO: 289492 - RNA, 21 nt, Human
agaggagagaggggcagaggg

SEQ ID NO: 289493 - RNA, 21 nt, Human
agaggagagaggggcagaggg

SEQ ID NO: 289494 - RNA, 19 nt, Human
agaggcgguggucggagag

SEQ ID NO: 289495 - RNA, 23 nt, Human
agcaggaggugccgggcccuggg

SEQ ID NO: 289496 - RNA, 23 nt, Human
agcaggaggugccgggcccuggg

SEQ ID NO: 289497 - RNA, 21 nt, Human
agcgacagagacggagagaga

SEQ ID NO: 289498 - RNA, 21 nt, Human
agcgacagagacggagagaga

SEQ ID NO: 289499 - RNA, 23 nt, Human
agcgacagagacggagagagaca

SEQ ID NO: 289500 - RNA, 23 nt, Human
agcgacagagacggagagagaca

SEQ ID NO: 289501 - RNA, 19 nt, Human
aggaaaaagcgaaaacacg

SEQ ID NO: 289502 - RNA, 19 nt, Human
aggaaaaagcgaaaacacg

SEQ ID NO: 289503 - RNA, 21 nt, Human
aggaaaaagcgaaaacacgga

SEQ ID NO: 289504 - RNA, 21 nt, Human
aggaaaaagcgaaaacacgga

SEQ ID NO: 289505 - RNA, 18 nt, Human
aggcagggccggcgggcg

SEQ ID NO: 289506 - RNA, 18 nt, Human
aggcagggccggcgggcg

SEQ ID NO: 289507 - RNA, 21 nt, Human
aggcggggaggggcggcaggc

SEQ ID NO: 289508 - RNA, 24 nt, Human
aggcggggaggggcggcaggcggg

SEQ ID NO: 289509 - RNA, 18 nt, Human
agggagagaggggcaggg

SEQ ID NO: 289510 - RNA, 19 nt, Human
agggaggaggaugcagggc

SEQ ID NO: 289511 - RNA, 19 nt, Human
agggaggaggaugcagggc

SEQ ID NO: 289512 - RNA, 18 nt, Human
agggagggacgguggggg

SEQ ID NO: 289513 - RNA, 21 nt, Human
aggggcagagggagagagggg

SEQ ID NO: 289514 - RNA, 21 nt, Human
aggggcagagggagagagggg

SEQ ID NO: 289515 - RNA, 24 nt, Human
aggggcagagggagagaggggcag

SEQ ID NO: 289516 - RNA, 18 nt, Human
agguaggggcaaggcagg

SEQ ID NO: 289517 - RNA, 18 nt, Human
agguaggggcaaggcagg

SEQ ID NO: 289518 - RNA, 20 nt, Human
agguaggggcaaggcagggc

SEQ ID NO: 289519 - RNA, 20 nt, Human
agguaggggcaaggcagggc

SEQ ID NO: 289520 - RNA, 21 nt, Human
aguuccugccggaggaggagg

SEQ ID NO: 289521 - RNA, 21 nt, Human
aguuccugccggaggaggagg

SEQ ID NO: 289522 - RNA, 22 nt, Human
auaaaaaaugccccccuccccc

SEQ ID NO: 289523 - RNA, 21 nt, Human
caaacaggccagaggagucac

SEQ ID NO: 289524 - RNA, 21 nt, Human
caaacaggccagaggagucac

SEQ ID NO: 289525 - RNA, 21 nt, Human
caaagcagcagccuggugggc

SEQ ID NO: 289526 - RNA, 21 nt, Human
caaagcagcagccuggugggc

SEQ ID NO: 289527 - RNA, 24 nt, Human
caaccuuggaaagaccugacgccc

SEQ ID NO: 289528 - RNA, 24 nt, Human
caaccuuggaaagaccugacgccc

SEQ ID NO: 289529 - RNA, 23 nt, Human
cacacaccgucuuuccacaaagc

SEQ ID NO: 289530 - RNA, 23 nt, Human
cacacaccgucuuuccacaaagc

SEQ ID NO: 289531 - RNA, 19 nt, Human
cacccccauuccaucuucu

SEQ ID NO: 289532 - RNA, 19 nt, Human
cacccccauuccaucuucu

SEQ ID NO: 289533 - RNA, 19 nt, Human
caccgucuuuccacaaagc

SEQ ID NO: 289534 - RNA, 19 nt, Human
caccgucuuuccacaaagc

SEQ ID NO: 289535 - RNA, 24 nt, Human
cagacagacaagagcgacagagac

SEQ ID NO: 289536 - RNA, 24 nt, Human
cagacagacaagagcgacagagac

SEQ ID NO: 289537 - RNA, 20 nt, Human
cagagaaagagccaacaaac

SEQ ID NO: 289538 - RNA, 22 nt, Human
cagagacagacagacaagagcg

SEQ ID NO: 289539 - RNA, 22 nt, Human
cagagacagacagacaagagcg

SEQ ID NO: 289540 - RNA, 22 nt, Human
cagcagaauggccccggggcgg

SEQ ID NO: 289541 - RNA, 25 nt, Human
cagcagaauggccccggggcggugg

SEQ ID NO: 289542 - RNA, 20 nt, Human
cagcaggaggugccgggccc

SEQ ID NO: 289543 - RNA, 20 nt, Human
cagcaggaggugccgggccc

SEQ ID NO: 289544 - RNA, 19 nt, Human
cagccccccacuuccaccc

SEQ ID NO: 289545 - RNA, 19 nt, Human
cagccccccacuuccaccc

SEQ ID NO: 289546 - RNA, 22 nt, Human
cagccccccacuuccaccccgg

SEQ ID NO: 289547 - RNA, 22 nt, Human
cagccccccacuuccaccccgg

SEQ ID NO: 289548 - RNA, 21 nt, Human
caggcggggcugggggcggug

SEQ ID NO: 289549 - RNA, 21 nt, Human
caggcggggcugggggcggug

SEQ ID NO: 289550 - RNA, 25 nt, Human
cccacuuccaccccgcagcagcuca

SEQ ID NO: 289551 - RNA, 25 nt, Human
cccacuuccaccccgcagcagcuca

SEQ ID NO: 289552 - RNA, 18 nt, Human
cccccacacccccauucc

SEQ ID NO: 289553 - RNA, 19 nt, Human
cccccacacccccauucca

SEQ ID NO: 289554 - RNA, 19 nt, Human
cccccacacccccauucca

SEQ ID NO: 289555 - RNA, 21 nt, Human
cccccacacccccauuccauc

SEQ ID NO: 289556 - RNA, 21 nt, Human
cccccacacccccauuccauc

SEQ ID NO: 289557 - RNA, 19 nt, Human
ccccccacuuccaccccgc

SEQ ID NO: 289558 - RNA, 19 nt, Human
ccccccacuuccaccccgc

SEQ ID NO: 289559 - RNA, 19 nt, Human
cccccccuucccccccagc

SEQ ID NO: 289560 - RNA, 19 nt, Human
cccccccuucccccccagc

SEQ ID NO: 289561 - RNA, 23 nt, Human
cccgcagcagcucagacgccagc

SEQ ID NO: 289562 - RNA, 23 nt, Human
cccgcagcagcucagacgccagc

SEQ ID NO: 289563 - RNA, 22 nt, Human
cccgggagagcguccgaugggg

SEQ ID NO: 289564 - RNA, 23 nt, Human
ccgaagcugucggccugaagcuu

SEQ ID NO: 289565 - RNA, 19 nt, Human
ccgcggggcgggggcgguc

SEQ ID NO: 289566 - RNA, 22 nt, Human
ccggcagauugagagucugugu

SEQ ID NO: 289567 - RNA, 21 nt, Human
ccuccggguuggccggagcuu

SEQ ID NO: 289568 - RNA, 27 nt, Human
cgaaggacuggcaggaggggaaacugg

SEQ ID NO: 289569 - RNA, 27 nt, Human
cgaaggacuggcaggaggggaaacugg

SEQ ID NO: 289570 - RNA, 23 nt, Human
cgagcugggccgaaucccccuca

SEQ ID NO: 289571 - RNA, 23 nt, Human
cgagcugggccgaaucccccuca

SEQ ID NO: 289572 - RNA, 19 nt, Human
cgcgcugcagcugcagcca

SEQ ID NO: 289573 - RNA, 19 nt, Human
cgcugcagcugcagccagg

SEQ ID NO: 289574 - RNA, 22 nt, Human
cggcagauugagagucuguguc

SEQ ID NO: 289575 - RNA, 19 nt, Human
cgggagcagcgcggcgccg

SEQ ID NO: 289576 - RNA, 20 nt, Human
cgggaggggagcgcgcggcc

SEQ ID NO: 289577 - RNA, 24 nt, Human
cgggggagggggcaucaaguaacu

SEQ ID NO: 289578 - RNA, 24 nt, Human
cgggggagggggcaucaaguaacu

SEQ ID NO: 289579 - RNA, 22 nt, Human
cguccgaggcgggugcccgggg

SEQ ID NO: 289580 - RNA, 22 nt, Human
cguccgaggcgggugcccgggg

SEQ ID NO: 289581 - RNA, 18 nt, Human
cuagagccggacccccac

SEQ ID NO: 289582 - RNA, 18 nt, Human
cuagagccggacccccac

SEQ ID NO: 289583 - RNA, 22 nt, Human
cugaagcuugaugugguccccg

SEQ ID NO: 289584 - RNA, 19 nt, Human
cugcugggccccccgaucc

SEQ ID NO: 289585 - RNA, 19 nt, Human
cugcugggccccccgaucc

SEQ ID NO: 289586 - RNA, 22 nt, Human
cugggggcggugggcccgggcc

SEQ ID NO: 289587 - RNA, 22 nt, Human
cugggggcggugggcccgggcc

SEQ ID NO: 289588 - RNA, 19 nt, Human
cuuccaccccgcagcagcu

SEQ ID NO: 289589 - RNA, 19 nt, Human
cuuccaccccgcagcagcu

SEQ ID NO: 289590 - RNA, 18 nt, Human
cuugaggagaaaagggag

SEQ ID NO: 289591 - RNA, 21 nt, Human
cuuggaaagaccugacgcccc

SEQ ID NO: 289592 - RNA, 21 nt, Human
cuuggaaagaccugacgcccc

SEQ ID NO: 289593 - RNA, 23 nt, Human
cuuggaaagaccugacgccccca

SEQ ID NO: 289594 - RNA, 19 nt, Human
cuuggcccagccccuccag

SEQ ID NO: 289595 - RNA, 19 nt, Human
cuuggcccagccccuccag

SEQ ID NO: 289596 - RNA, 20 nt, Human
gaaaaagcgaaaacacggaa

SEQ ID NO: 289597 - RNA, 20 nt, Human
gaaaaagcgaaaacacggaa

SEQ ID NO: 289598 - RNA, 23 nt, Human
gaauggccccggggcggugggcc

SEQ ID NO: 289599 - RNA, 19 nt, Human
gacggagagagacagagac

SEQ ID NO: 289600 - RNA, 19 nt, Human
gacggagagagacagagac

SEQ ID NO: 289601 - RNA, 26 nt, Human
gacuugaggagaaaagggagggacgg

SEQ ID NO: 289602 - RNA, 19 nt, Human
gagagcgccgcggggcggg

SEQ ID NO: 289603 - RNA, 19 nt, Human
gagcuugcaacugcaguag

SEQ ID NO: 289604 - RNA, 22 nt, Human
gaggaggaggcugggaggggau

SEQ ID NO: 289605 - RNA, 22 nt, Human
gaggaggaggcugggaggggau

SEQ ID NO: 289606 - RNA, 25 nt, Human
gaggggcagagggagagaggggcag

SEQ ID NO: 289607 - RNA, 25 nt, Human
gaggggcagagggagagaggggcag

SEQ ID NO: 289608 - RNA, 21 nt, Human
gaguacggcaggguggcuggc

SEQ ID NO: 289609 - RNA, 21 nt, Human
gaguacggcaggguggcuggc

SEQ ID NO: 289610 - RNA, 19 nt, Human
gcagauugagagucugugu

SEQ ID NO: 289611 - RNA, 20 nt, Human
gcagccuggugggcuuuugu

SEQ ID NO: 289612 - RNA, 20 nt, Human
gcagccuggugggcuuuugu

SEQ ID NO: 289613 - RNA, 24 nt, Human
gcaguccaggcaggcggggagggg

SEQ ID NO: 289614 - RNA, 24 nt, Human
gcaguccaggcaggcggggagggg

SEQ ID NO: 289615 - RNA, 22 nt, Human
gcggcaggcggggcugggggcg

SEQ ID NO: 289616 - RNA, 21 nt, Human
gcgggcuucggggcuggcuug

SEQ ID NO: 289617 - RNA, 21 nt, Human
gcgggcuucggggcuggcuug

SEQ ID NO: 289618 - RNA, 25 nt, Human
gcugcagccagggcugaagcugggc

SEQ ID NO: 289619 - RNA, 21 nt, Human
ggaacuaggcaggccaggagg

SEQ ID NO: 289620 - RNA, 21 nt, Human
ggaacuaggcaggccaggagg

SEQ ID NO: 289621 - RNA, 24 nt, Human
ggaauuacagagaaagagccaaca

SEQ ID NO: 289622 - RNA, 24 nt, Human
ggaauuacagagaaagagccaaca

SEQ ID NO: 289623 - RNA, 20 nt, Human
ggagaggagagaggggcaga

SEQ ID NO: 289624 - RNA, 20 nt, Human
ggagaggagagaggggcaga

SEQ ID NO: 289625 - RNA, 25 nt, Human
ggagcagcgcggcgccgccgccgug

SEQ ID NO: 289626 - RNA, 19 nt, Human
ggaggaggaggcugggagg

SEQ ID NO: 289627 - RNA, 19 nt, Human
ggaggaggaggcugggagg

SEQ ID NO: 289628 - RNA, 25 nt, Human
ggaggaggaugcagggcgucaaggg

SEQ ID NO: 289629 - RNA, 25 nt, Human
ggaggaggaugcagggcgucaaggg

SEQ ID NO: 289630 - RNA, 21 nt, Human
ggcagauugagagucuguguc

SEQ ID NO: 289631 - RNA, 19 nt, Human
ggccccggggcggugggcc

SEQ ID NO: 289632 - RNA, 24 nt, Human
ggcggggaggggcggcaggcgggg

SEQ ID NO: 289633 - RNA, 24 nt, Human
ggcggggaggggcggcaggcgggg

SEQ ID NO: 289634 - RNA, 25 nt, Human
ggcugggggcggugggcccgggccu

SEQ ID NO: 289635 - RNA, 25 nt, Human
ggcugggggcggugggcccgggccu

SEQ ID NO: 289636 - RNA, 19 nt, Human
gggaaacugggaggccagc

SEQ ID NO: 289637 - RNA, 19 nt, Human
gggaaacugggaggccagc

SEQ ID NO: 289638 - RNA, 23 nt, Human
gggaggcagaggagcgggagcag

SEQ ID NO: 289639 - RNA, 25 nt, Human
gggcggcaggcggggcugggggcga

SEQ ID NO: 289640 - RNA, 22 nt, Human
gggcggggcggagggggagggg

SEQ ID NO: 289641 - RNA, 22 nt, Human
gggcggggcggagggggagggg

SEQ ID NO: 289642 - RNA, 18 nt, Human
gggcucggggcugggcgg

SEQ ID NO: 289643 - RNA, 21 nt, Human
gggcugaagcugggcggggga

SEQ ID NO: 289644 - RNA, 22 nt, Human
ggggagcgcgcggccaggcccc

SEQ ID NO: 289645 - RNA, 22 nt, Human
ggggcgcccgggggcggggggc

SEQ ID NO: 289646 - RNA, 18 nt, Human
ggggcggagggggagggg

SEQ ID NO: 289647 - RNA, 18 nt, Human
ggggcggagggggagggg

SEQ ID NO: 289648 - RNA, 19 nt, Human
gggggcgcauggcucgcgc

SEQ ID NO: 289649 - RNA, 20 nt, Human
gggggcggugggcccgggcc

SEQ ID NO: 289650 - RNA, 20 nt, Human
gggggcggugggcccgggcc

SEQ ID NO: 289651 - RNA, 20 nt, Human
ggucagcagaauggccccgg

SEQ ID NO: 289652 - RNA, 22 nt, Human
ggugaggcuggggcgguggccg

SEQ ID NO: 289653 - RNA, 22 nt, Human
ggugaggcuggggcgguggccg

SEQ ID NO: 289654 - RNA, 21 nt, Human
guaacauaaaaaaugcccccc

SEQ ID NO: 289655 - RNA, 21 nt, Human
guaacauaaaaaaugcccccc

SEQ ID NO: 289656 - RNA, 21 nt, Human
gucccgccccgcggcuccacc

SEQ ID NO: 289657 - RNA, 21 nt, Human
gucccgccccgcggcuccacc

SEQ ID NO: 289658 - RNA, 24 nt, Human
gucccgggagagcguccgaugggg

SEQ ID NO: 289659 - RNA, 21 nt, Human
uaaaaaaugccccccuccccc

SEQ ID NO: 289660 - RNA, 21 nt, Human
uaaaaaaugccccccuccccc

SEQ ID NO: 289661 - RNA, 22 nt, Human
uacagagaaagagccaacaaac

SEQ ID NO: 289662 - RNA, 22 nt, Human
ucaaguaacugcuggaggaaga

SEQ ID NO: 289663 - RNA, 22 nt, Human
ucaaguaacugcuggaggaaga

SEQ ID NO: 289664 - RNA, 20 nt, Human
ucagaaccgguucuuaccac

SEQ ID NO: 289665 - RNA, 20 nt, Human
ucagaaccgguucuuaccac

SEQ ID NO: 289666 - RNA, 19 nt, Human
ucaggacuugaggagaaaa

SEQ ID NO: 289667 - RNA, 20 nt, Human
ucaggacuugaggagaaaag

SEQ ID NO: 289668 - RNA, 23 nt, Human
uccaccccgcagcagcucagacg

SEQ ID NO: 289669 - RNA, 23 nt, Human
uccaccccgcagcagcucagacg

SEQ ID NO: 289670 - RNA, 19 nt, Human
uccaggcaggcggggaggg

SEQ ID NO: 289671 - RNA, 19 nt, Human
uccaggcaggcggggaggg

SEQ ID NO: 289672 - RNA, 20 nt, Human
uccaggcaggcggggagggg

SEQ ID NO: 289673 - RNA, 20 nt, Human
uccaggcaggcggggagggg

SEQ ID NO: 289674 - RNA, 18 nt, Human
ucccccccuuccccccca

SEQ ID NO: 289675 - RNA, 18 nt, Human
ucccccccuuccccccca

SEQ ID NO: 289676 - RNA, 21 nt, Human
uccgcagucuauggaaacugg

SEQ ID NO: 289677 - RNA, 21 nt, Human
uccgcagucuauggaaacugg

SEQ ID NO: 289678 - RNA, 24 nt, Human
ucugggacagggcacacccggaag

SEQ ID NO: 289679 - RNA, 24 nt, Human
ucugggacagggcacacccggaag

SEQ ID NO: 289680 - RNA, 19 nt, Human
ucugugucgggggaggggg

SEQ ID NO: 289681 - RNA, 19 nt, Human
ucugugucgggggaggggg

SEQ ID NO: 289682 - RNA, 18 nt, Human
ugcgggaggggagcgcgc

SEQ ID NO: 289683 - RNA, 20 nt, Human
ugcggggcgcccgggggcgg

SEQ ID NO: 289684 - RNA, 21 nt, Human
uggaaagaccugacgccccca

SEQ ID NO: 289685 - RNA, 19 nt, Human
uggaagagacgcugaggua

SEQ ID NO: 289686 - RNA, 19 nt, Human
uggaagagacgcugaggua

SEQ ID NO: 289687 - RNA, 21 nt, Human
uggaggccgggacgagcuggg

SEQ ID NO: 289688 - RNA, 21 nt, Human
uggaggccgggacgagcuggg

SEQ ID NO: 289689 - RNA, 22 nt, Human
uggcacugggggaaaagaauuu

SEQ ID NO: 289690 - RNA, 22 nt, Human
uggcacugggggaaaagaauuu

SEQ ID NO: 289691 - RNA, 18 nt, Human
uggcagagaaguagcaau

SEQ ID NO: 289692 - RNA, 23 nt, Human
uggcagagaaguagcaaucccgg

SEQ ID NO: 289693 - RNA, 28 nt, Human
uggcagagaaguagcaaucccggggaug

SEQ ID NO: 289694 - RNA, 20 nt, Human
uggcaggaggggaaacuggg

SEQ ID NO: 289695 - RNA, 20 nt, Human
uggcaggaggggaaacuggg

SEQ ID NO: 289696 - RNA, 26 nt, Human
uggcaggaggggaaacugggaggcca

SEQ ID NO: 289697 - RNA, 26 nt, Human
uggcaggaggggaaacugggaggcca

SEQ ID NO: 289698 - RNA, 21 nt, Human
uggcgggcuucggggcuggcu

SEQ ID NO: 289699 - RNA, 21 nt, Human
uggcgggcuucggggcuggcu

SEQ ID NO: 289700 - RNA, 18 nt, Human
uggcucgcgcugcagcug

SEQ ID NO: 289701 - RNA, 21 nt, Human
ugggaggggaugggaggagug

SEQ ID NO: 289702 - RNA, 21 nt, Human
ugggaggggaugggaggagug

SEQ ID NO: 289703 - RNA, 23 nt, Human
ugggauggggugaggcuggggcg

SEQ ID NO: 289704 - RNA, 23 nt, Human
ugggauggggugaggcuggggcg

SEQ ID NO: 289705 - RNA, 27 nt, Human
ugggccccccgauccuugggucccaag

SEQ ID NO: 289706 - RNA, 27 nt, Human
ugggccccccgauccuugggucccaag

SEQ ID NO: 289707 - RNA, 21 nt, Human
uggggcugcgagucagggagg

SEQ ID NO: 289708 - RNA, 21 nt, Human
uggggcugcgagucagggagg

SEQ ID NO: 289709 - RNA, 20 nt, Human
ugggggagggaggaugagug

SEQ ID NO: 289710 - RNA, 21 nt, Human
uggggucagacggggacgaug

SEQ ID NO: 289711 - RNA, 20 nt, Human
ugucccccccuuccccccca

SEQ ID NO: 289712 - RNA, 20 nt, Human
ugucccccccuuccccccca

SEQ ID NO: 289713 - RNA, 22 nt, Human
uguguuguuuuguuccuuuuug

SEQ ID NO: 289714 - RNA, 22 nt, Human
uguguuguuuuguuccuuuuug

SEQ ID NO: 289715 - RNA, 21 nt, Human
uuaaugggcguguagcugugu

SEQ ID NO: 289716 - RNA, 21 nt, Human
uuaaugggcguguagcugugu

SEQ ID NO: 289717 - RNA, 20 nt, Human
uuccuagagccggaccccca

SEQ ID NO: 289718 - RNA, 20 nt, Human
uuccuagagccggaccccca

SEQ ID NO: 289719 - RNA, 21 nt, Human
uugcgggggucgugggauggg

SEQ ID NO: 289720 - RNA, 21 nt, Human
uugcgggggucgugggauggg

SEQ ID NO: 289721 - RNA, 20 nt, Human
uuguuuuguuccuuuuugca

SEQ ID NO: 289722 - RNA, 20 nt, Human
uuguuuuguuccuuuuugca

SEQ ID NO: 289723 - RNA, 21 nt, Human
aaaacagaaaaacuaagcaga

SEQ ID NO: 289724 - RNA, 22 nt, Human
aaaacagaaaaacuaagcagaa

SEQ ID NO: 289725 - RNA, 27 nt, Human
aaagaaagauuuacaaaacagaaaaac

SEQ ID NO: 289726 - RNA, 24 nt, Human
acaaaacagaaaaacuaagcagaa

SEQ ID NO: 289727 - RNA, 21 nt, Human
acaacagagcacaauucacag

SEQ ID NO: 289728 - RNA, 23 nt, Human
acccucuaucccaggcccuacaa

SEQ ID NO: 289729 - RNA, 20 nt, Human
acggaaaggcgagugcggcg

SEQ ID NO: 289730 - RNA, 18 nt, Human
agagcuuccccugccccc

SEQ ID NO: 289731 - RNA, 18 nt, Human
agaguacucucucucucc

SEQ ID NO: 289732 - RNA, 18 nt, Human
aggcagccaauguggggg

SEQ ID NO: 289733 - RNA, 19 nt, Human
aggcagccaaugugggggc

SEQ ID NO: 289734 - RNA, 19 nt, Human
aguacccucuaucccaggc

SEQ ID NO: 289735 - RNA, 25 nt, Human
auauuuauaaggcagccaauguggg

SEQ ID NO: 289736 - RNA, 25 nt, Human
auauuuauaaggcagccaauguggg

SEQ ID NO: 289737 - RNA, 20 nt, Human
augucguuacucaggcgcag

SEQ ID NO: 289738 - RNA, 19 nt, Human
caaaacagaaaaacuaagc

SEQ ID NO: 289739 - RNA, 19 nt, Human
cacacagacauauuuauaa

SEQ ID NO: 289740 - RNA, 22 nt, Human
cacacagacauauuuauaaggc

SEQ ID NO: 289741 - RNA, 21 nt, Human
cacaguucuagaaucccaggg

SEQ ID NO: 289742 - RNA, 22 nt, Human
cacaguucuagaaucccagggg

SEQ ID NO: 289743 - RNA, 25 nt, Human
cagagcacaauucacaguucuagaa

SEQ ID NO: 289744 - RNA, 25 nt, Human
ccaaugugggggcaauuuuggaggg

SEQ ID NO: 289745 - RNA, 25 nt, Human
ccaaugugggggcaauuuuggaggg

SEQ ID NO: 289746 - RNA, 22 nt, Human
ccccaaaacggcuggagagaga

SEQ ID NO: 289747 - RNA, 21 nt, Human
ccccuccccaaaacggcugga

SEQ ID NO: 289748 - RNA, 23 nt, Human
gagcguggagagccccuccccaa

SEQ ID NO: 289749 - RNA, 19 nt, Human
gagugcggcgcggaugacc

SEQ ID NO: 289750 - RNA, 23 nt, Human
ggagcguggagagccccucccca

SEQ ID NO: 289751 - RNA, 25 nt, Human
guacucucucucuccuuuaaugcga

SEQ ID NO: 289752 - RNA, 24 nt, Human
uaauggcaacagagugagagcuuc

SEQ ID NO: 289753 - RNA, 22 nt, Human
uacaacagagcacaauucacag

SEQ ID NO: 289754 - RNA, 29 nt, Human
uacucucucucuccuuuaaugcgaggaaa

SEQ ID NO: 289755 - RNA, 19 nt, Human
uccggagcguggagagccc

SEQ ID NO: 289756 - RNA, 19 nt, Human
ugaagauucaaguacccuc

SEQ ID NO: 289757 - RNA, 23 nt, Human
ugguaagaaagaaagauuuacaa

SEQ ID NO: 289758 - RNA, 30 nt, Human
uuaauggcaacagagugagagcuuccccuu

SEQ ID NO: 289759 - RNA, 24 nt, Human
aaguuucuuguuuuuuggggaugc

SEQ ID NO: 289760 - RNA, 21 nt, Human
aaucacaggaaggaggaagga

SEQ ID NO: 289761 - RNA, 26 nt, Human
acacauacauacauaauacacauaua

SEQ ID NO: 289762 - RNA, 28 nt, Human
acgcaugcacacauacauacauaauaca

SEQ ID NO: 289763 - RNA, 23 nt, Human
agacugcauccuugcugccccca

SEQ ID NO: 289764 - RNA, 19 nt, Human
aggcaucgaggcagggcca

SEQ ID NO: 289765 - RNA, 27 nt, Human
auaucaauguguguguguguguguggu

SEQ ID NO: 289766 - RNA, 23 nt, Human
augcacacauacauacauaauac

SEQ ID NO: 289767 - RNA, 19 nt, Human
augugugugugugugugug

SEQ ID NO: 289768 - RNA, 22 nt, Human
caaaauacauaugcaaauacaa

SEQ ID NO: 289769 - RNA, 20 nt, Human
caaugugugugugugugugu

SEQ ID NO: 289770 - RNA, 20 nt, Human
cacaggagggagcaaucaca

SEQ ID NO: 289771 - RNA, 19 nt, Human
cacucuguuugcugcuaug

SEQ ID NO: 289772 - RNA, 21 nt, Human
cagccccuccaaucaggugau

SEQ ID NO: 289773 - RNA, 18 nt, Human
caggugaugcgccagaga

SEQ ID NO: 289774 - RNA, 19 nt, Human
cauacauaauacacauaua

SEQ ID NO: 289775 - RNA, 23 nt, Human
cauauagaugcauacauagagua

SEQ ID NO: 289776 - RNA, 20 nt, Human
cauaugacaaaauacauaug

SEQ ID NO: 289777 - RNA, 19 nt, Human
caucgaggcagggccaggc

SEQ ID NO: 289778 - RNA, 18 nt, Human
caucuccuucccacuccu

SEQ ID NO: 289779 - RNA, 21 nt, Human
caucuccuucccacuccugcc

SEQ ID NO: 289780 - RNA, 22 nt, Human
ccaccaccgagugcauccucuc

SEQ ID NO: 289781 - RNA, 18 nt, Human
ccaccucucccacugccc

SEQ ID NO: 289782 - RNA, 20 nt, Human
ccaccucucccacugcccug

SEQ ID NO: 289783 - RNA, 20 nt, Human
cccacugcccugcccgccug

SEQ ID NO: 289784 - RNA, 18 nt, Human
ccuccagccuggcuuccc

SEQ ID NO: 289785 - RNA, 23 nt, Human
ccucucccacugcccugcccgcc

SEQ ID NO: 289786 - RNA, 22 nt, Human
ccuggcuucccaccaccgagug

SEQ ID NO: 289787 - RNA, 22 nt, Human
cgaggcagggccaggcaacguc

SEQ ID NO: 289788 - RNA, 25 nt, Human
cgcacgcaugcacacauacauacau

SEQ ID NO: 289789 - RNA, 23 nt, Human
gaggcagggccaggcaacgucca

SEQ ID NO: 289790 - RNA, 22 nt, Human
gcaaauacaaaauacauaugac

SEQ ID NO: 289791 - RNA, 21 nt, Human
gcaaauacaaaauacauaugc

SEQ ID NO: 289792 - RNA, 22 nt, Human
gcaggacgguaaggacaauggg

SEQ ID NO: 289793 - RNA, 19 nt, Human
gccagagaggcaucgaggc

SEQ ID NO: 289794 - RNA, 24 nt, Human
ggagacugcauccuugcugccccc

SEQ ID NO: 289795 - RNA, 22 nt, Human
guagauacauagauguaaauaa

SEQ ID NO: 289796 - RNA, 23 nt, Human
gucacucaggccccuccagccug

SEQ ID NO: 289797 - RNA, 30 nt, Human
gugugugugugcgcgcacgcaugcacacag

SEQ ID NO: 289798 - RNA, 18 nt, Human
uaaaaugccaugauauaa

SEQ ID NO: 289799 - RNA, 25 nt, Human
uacauacauaauacacauauagaug

SEQ ID NO: 289800 - RNA, 22 nt, Human
uagggaaaacaugauggacaac

SEQ ID NO: 289801 - RNA, 24 nt, Human
uaugcaaauacaaaauacauaugg

SEQ ID NO: 289802 - RNA, 24 nt, Human
uaugcaaauacaaaauacauaugg

SEQ ID NO: 289803 - RNA, 22 nt, Human
uccagccuggcuucccaccacc

SEQ ID NO: 289804 - RNA, 22 nt, Human
ucccugggcgugagacagaggu

SEQ ID NO: 289805 - RNA, 26 nt, Human
ucgaggcagggccaggcaacguccac

SEQ ID NO: 289806 - RNA, 20 nt, Human
ugaaaaauggcauuucacuc

SEQ ID NO: 289807 - RNA, 27 nt, Human
ugauauaauaucaaugugugugugugu

SEQ ID NO: 289808 - RNA, 19 nt, Human
ugauggacaacagaacuac

SEQ ID NO: 289809 - RNA, 26 nt, Human
ugccuacauacaugcauagauuagau

SEQ ID NO: 289810 - RNA, 25 nt, Human
ugcgcgcacgcaugcacacauacau

SEQ ID NO: 289811 - RNA, 24 nt, Human
uggaagauuuaggaauaaaaugcc

SEQ ID NO: 289812 - RNA, 21 nt, Human
ugggagacugcauccuugcug

SEQ ID NO: 289813 - RNA, 20 nt, Human
ugugagaagugggugggugu

SEQ ID NO: 289814 - RNA, 30 nt, Human
ugugugugcgcgcacgcaugcacacauaca

SEQ ID NO: 289815 - RNA, 19 nt, Human
ugugugugugugcgcgcac

SEQ ID NO: 289816 - RNA, 23 nt, Human
uuacaguaaauuuucuuagaugu

SEQ ID NO: 289817 - RNA, 18 nt, Human
uuaccagccccuccaauc

SEQ ID NO: 289818 - RNA, 22 nt, Human
uuguuuagauacauguauugcc

SEQ ID NO: 289819 - RNA, 18 nt, Human
uuucuuguuuuuugggga

SEQ ID NO: 289820 - RNA, 18 nt, Human
uuuggggaugcaugcugg

SEQ ID NO: 289821 - RNA, 21 nt, Human
aaaaagcguccgaaggcaccg

SEQ ID NO: 289822 - RNA, 18 nt, Human
aaaccaggacaucucccc

SEQ ID NO: 289823 - RNA, 22 nt, Human
aagaggggagcuucaggcaagu

SEQ ID NO: 289824 - RNA, 22 nt, Human
acaagcauccagaaguccaacg

SEQ ID NO: 289825 - RNA, 25 nt, Human
acacagcagcuccucacugcucucc

SEQ ID NO: 289826 - RNA, 18 nt, Human
acccagggcagagaggau

SEQ ID NO: 289827 - RNA, 21 nt, Human
acccugcugcaccaaggcagg

SEQ ID NO: 289828 - RNA, 25 nt, Human
acgccgcgcccccagcgcgccgccc

SEQ ID NO: 289829 - RNA, 19 nt, Human
acuaaagagcuucucgcca

SEQ ID NO: 289830 - RNA, 22 nt, Human
agaaauagacaagcauccagaa

SEQ ID NO: 289831 - RNA, 21 nt, Human
agagacuaugcaaggaauuaa

SEQ ID NO: 289832 - RNA, 21 nt, Human
agagucccuggaggaagagag

SEQ ID NO: 289833 - RNA, 22 nt, Human
agaugcaucauggguggagcag

SEQ ID NO: 289834 - RNA, 22 nt, Human
agcaggaggcuggggcccaagg

SEQ ID NO: 289835 - RNA, 18 nt, Human
agcugaucacugagcuga

SEQ ID NO: 289836 - RNA, 21 nt, Human
aggcaagugggggaugcuggg

SEQ ID NO: 289837 - RNA, 19 nt, Human
aggcagccaaggcucaaag

SEQ ID NO: 289838 - RNA, 25 nt, Human
aggcagccaaggcucaaagagguga

SEQ ID NO: 289839 - RNA, 18 nt, Human
aggcaggcugggcugggg

SEQ ID NO: 289840 - RNA, 20 nt, Human
aggcaggcugggcuggggcu

SEQ ID NO: 289841 - RNA, 22 nt, Human
agggccccagagucccuggagg

SEQ ID NO: 289842 - RNA, 22 nt, Human
auggcagguguccgaagugacc

SEQ ID NO: 289843 - RNA, 23 nt, Human
caagccuuccgcucccccgccga

SEQ ID NO: 289844 - RNA, 20 nt, Human
cacacugccggcccggagcg

SEQ ID NO: 289845 - RNA, 22 nt, Human
cacagcaaagacauguggccag

SEQ ID NO: 289846 - RNA, 27 nt, Human
cacauucaaaguccacaauguaaucaa

SEQ ID NO: 289847 - RNA, 19 nt, Human
cacccagggcagagaggau

SEQ ID NO: 289848 - RNA, 19 nt, Human
cacccccaugucaaaauca

SEQ ID NO: 289849 - RNA, 19 nt, Human
caccggaacaggcuugccc

SEQ ID NO: 289850 - RNA, 19 nt, Human
cacugcucuccugccccuc

SEQ ID NO: 289851 - RNA, 21 nt, Human
cacuugcugggguccuggagg

SEQ ID NO: 289852 - RNA, 22 nt, Human
cacuugcugggguccuggaggg

SEQ ID NO: 289853 - RNA, 23 nt, Human
cacuugcugggguccuggagggu

SEQ ID NO: 289854 - RNA, 22 nt, Human
cagcagcuccucacugcucucc

SEQ ID NO: 289855 - RNA, 21 nt, Human
cagcauccuccaucuugagga

SEQ ID NO: 289856 - RNA, 24 nt, Human
cagccccagcaccuccaugcccag

SEQ ID NO: 289857 - RNA, 20 nt, Human
cagcugccugcuaagcucca

SEQ ID NO: 289858 - RNA, 24 nt, Human
caggaccaggacaagaccugccug

SEQ ID NO: 289859 - RNA, 20 nt, Human
cagggcagagaggaugcucu

SEQ ID NO: 289860 - RNA, 23 nt, Human
cauggcagguguccgaagugacc

SEQ ID NO: 289861 - RNA, 23 nt, Human
caugucaaaaucacucccagguc

SEQ ID NO: 289862 - RNA, 21 nt, Human
cauucaaaguccacaauguaa

SEQ ID NO: 289863 - RNA, 19 nt, Human
ccagacaguuuucuuugag

SEQ ID NO: 289864 - RNA, 18 nt, Human
ccagcccagugagacucc

SEQ ID NO: 289865 - RNA, 22 nt, Human
cccacagcaaagacauguggcc

SEQ ID NO: 289866 - RNA, 27 nt, Human
cccacagcaaagacauguggccaggac

SEQ ID NO: 289867 - RNA, 19 nt, Human
cccagacacgccgcgcccc

SEQ ID NO: 289868 - RNA, 19 nt, Human
cccagcgcgccgccccaca

SEQ ID NO: 289869 - RNA, 19 nt, Human
cccaucugcuugcuuggaa

SEQ ID NO: 289870 - RNA, 18 nt, Human
ccccaaagugugcuccuc

SEQ ID NO: 289871 - RNA, 19 nt, Human
ccccacacugccggcccgg

SEQ ID NO: 289872 - RNA, 20 nt, Human
ccccacacugccggcccgga

SEQ ID NO: 289873 - RNA, 19 nt, Human
ccccagcaccuccaugccc

SEQ ID NO: 289874 - RNA, 26 nt, Human
ccccagcaccuccaugcccagcugcc

SEQ ID NO: 289875 - RNA, 27 nt, Human
ccccagccccagcaccuccaugcccag

SEQ ID NO: 289876 - RNA, 27 nt, Human
cccccucucaucacugucauucagccc

SEQ ID NO: 289877 - RNA, 19 nt, Human
cccugcaugguccuggccu

SEQ ID NO: 289878 - RNA, 19 nt, Human
cccuggaggaagagaggaa

SEQ ID NO: 289879 - RNA, 18 nt, Human
cccuuggccguggcccug

SEQ ID NO: 289880 - RNA, 18 nt, Human
ccggugaugcaccaagag

SEQ ID NO: 289881 - RNA, 20 nt, Human
ccuacagaugacccugcugc

SEQ ID NO: 289882 - RNA, 22 nt, Human
ccucaggaggccuuccucuguc

SEQ ID NO: 289883 - RNA, 19 nt, Human
ccucaggccccuccuuggc

SEQ ID NO: 289884 - RNA, 23 nt, Human
ccugaccaucgcggccccuuaga

SEQ ID NO: 289885 - RNA, 21 nt, Human
ccugcagcacaaccagcccag

SEQ ID NO: 289886 - RNA, 23 nt, Human
ccugccccagaugauccucucac

SEQ ID NO: 289887 - RNA, 18 nt, Human
ccugccccucccucagga

SEQ ID NO: 289888 - RNA, 19 nt, Human
ccugcgucccauccagccc

SEQ ID NO: 289889 - RNA, 20 nt, Human
ccuuggccguggcccugacc

SEQ ID NO: 289890 - RNA, 25 nt, Human
ccuuuuuuuuucuuuuuuuuuuuuu

SEQ ID NO: 289891 - RNA, 22 nt, Human
cgaagugaccugaaccugggca

SEQ ID NO: 289892 - RNA, 22 nt, Human
cgccaacaucacaagauguccc

SEQ ID NO: 289893 - RNA, 22 nt, Human
cgccgccccacacugccggccc

SEQ ID NO: 289894 - RNA, 24 nt, Human
cgccgcgcccccagcgcgccgccc

SEQ ID NO: 289895 - RNA, 18 nt, Human
cgcgccgccccacacugc

SEQ ID NO: 289896 - RNA, 19 nt, Human
cgcggccgggccugcucag

SEQ ID NO: 289897 - RNA, 26 nt, Human
cggaacaggcuugcccagaauccacu

SEQ ID NO: 289898 - RNA, 21 nt, Human
cucacugcucuccugccccuc

SEQ ID NO: 289899 - RNA, 25 nt, Human
cucaggaggccuuccucuguccccc

SEQ ID NO: 289900 - RNA, 18 nt, Human
cucaggugcccaccccca

SEQ ID NO: 289901 - RNA, 18 nt, Human
cuccuucccaggcugggg

SEQ ID NO: 289902 - RNA, 23 nt, Human
cucuccuucccaggcuggggugg

SEQ ID NO: 289903 - RNA, 21 nt, Human
cugaccacccuagcccacagu

SEQ ID NO: 289904 - RNA, 19 nt, Human
cugcagcacaaccagccca

SEQ ID NO: 289905 - RNA, 28 nt, Human
cugccccagaugauccucucacagcccc

SEQ ID NO: 289906 - RNA, 18 nt, Human
cuggaggacaggcaggcu

SEQ ID NO: 289907 - RNA, 27 nt, Human
cuuggccguggcccugaccaucgcggc

SEQ ID NO: 289908 - RNA, 23 nt, Human
gaaauggaggcaggaaaccagga

SEQ ID NO: 289909 - RNA, 18 nt, Human
gacagggaaaaguuucca

SEQ ID NO: 289910 - RNA, 24 nt, Human
gaccugccuggccugcugauccca

SEQ ID NO: 289911 - RNA, 24 nt, Human
gagccugcagcacaaccagcccag

SEQ ID NO: 289912 - RNA, 19 nt, Human
gaggaugcucugccauagg

SEQ ID NO: 289913 - RNA, 21 nt, Human
gaguucuccaagcucccucuc

SEQ ID NO: 289914 - RNA, 24 nt, Human
gcacccccaugucaaaaucacucc

SEQ ID NO: 289915 - RNA, 19 nt, Human
gccaagcccccucucauca

SEQ ID NO: 289916 - RNA, 23 nt, Human
gcccccucucaucacugucauuc

SEQ ID NO: 289917 - RNA, 21 nt, Human
gcccuggcucucugccauccu

SEQ ID NO: 289918 - RNA, 20 nt, Human
gcccuuggccguggcccuga

SEQ ID NO: 289919 - RNA, 21 nt, Human
gccucagggggagccugcagc

SEQ ID NO: 289920 - RNA, 18 nt, Human
gccucaguuucccacaag

SEQ ID NO: 289921 - RNA, 19 nt, Human
gcgcgccgccccacacugc

SEQ ID NO: 289922 - RNA, 20 nt, Human
gcugaagcaacaaaagcaag

SEQ ID NO: 289923 - RNA, 18 nt, Human
gcuggggcccaagggcag

SEQ ID NO: 289924 - RNA, 22 nt, Human
ggagcuucaggcaaguggggga

SEQ ID NO: 289925 - RNA, 21 nt, Human
ggaggcuggggcccaagggcc

SEQ ID NO: 289926 - RNA, 21 nt, Human
ggcccggagcgaggaaagggu

SEQ ID NO: 289927 - RNA, 22 nt, Human
ggccucagggggagccugcagc

SEQ ID NO: 289928 - RNA, 19 nt, Human
ggcuggggcccaagggcag

SEQ ID NO: 289929 - RNA, 19 nt, Human
gggagggucugccccgaga

SEQ ID NO: 289930 - RNA, 20 nt, Human
gggaguagggagagccucag

SEQ ID NO: 289931 - RNA, 21 nt, Human
ggguggcccuacagaugaccc

SEQ ID NO: 289932 - RNA, 23 nt, Human
gggugugggggaaaguccucugu

SEQ ID NO: 289933 - RNA, 23 nt, Human
gguccuggagggugggugaagug

SEQ ID NO: 289934 - RNA, 23 nt, Human
gucccauccagcccucacauuca

SEQ ID NO: 289935 - RNA, 21 nt, Human
guccuggccuuccccaagcug

SEQ ID NO: 289936 - RNA, 20 nt, Human
gugccaggggccgcucacag

SEQ ID NO: 289937 - RNA, 21 nt, Human
uacaugggugcugcugaagca

SEQ ID NO: 289938 - RNA, 19 nt, Human
uaggcaucugccccagccc

SEQ ID NO: 289939 - RNA, 24 nt, Human
uaggugccaucaguguuuggugcc

SEQ ID NO: 289940 - RNA, 20 nt, Human
ucagaaaacaccguuccagg

SEQ ID NO: 289941 - RNA, 19 nt, Human
ucaggcccacagaaaagca

SEQ ID NO: 289942 - RNA, 21 nt, Human
uccacgaggacggggaggguc

SEQ ID NO: 289943 - RNA, 22 nt, Human
uccacuugcugggguccuggag

SEQ ID NO: 289944 - RNA, 23 nt, Human
ucccaaguccagucucucucugc

SEQ ID NO: 289945 - RNA, 21 nt, Human
ucccaggucacacagcagcuc

SEQ ID NO: 289946 - RNA, 22 nt, Human
uccccaagcugggccucaguuu

SEQ ID NO: 289947 - RNA, 21 nt, Human
uccccagacacgccgcgcccc

SEQ ID NO: 289948 - RNA, 23 nt, Human
uccccagacacgccgcgccccca

SEQ ID NO: 289949 - RNA, 27 nt, Human
ucccccagaucuucccugcuggcuucc

SEQ ID NO: 289950 - RNA, 19 nt, Human
ucccucaggaggccuuccu

SEQ ID NO: 289951 - RNA, 21 nt, Human
ucccucaggaggccuuccucu

SEQ ID NO: 289952 - RNA, 19 nt, Human
ucccugcaugguccuggcc

SEQ ID NO: 289953 - RNA, 19 nt, Human
ucccuggaggaagagagga

SEQ ID NO: 289954 - RNA, 20 nt, Human
ucgggagaagcucauagauu

SEQ ID NO: 289955 - RNA, 24 nt, Human
ucucagucggaccuucaggcccac

SEQ ID NO: 289956 - RNA, 23 nt, Human
ucuccaagcucccucuccaaguu

SEQ ID NO: 289957 - RNA, 19 nt, Human
ucuccugccccucccucag

SEQ ID NO: 289958 - RNA, 18 nt, Human
ucucucugcccuggcucu

SEQ ID NO: 289959 - RNA, 20 nt, Human
ucugaggucccacagcaaag

SEQ ID NO: 289960 - RNA, 19 nt, Human
ucugccccagccccagcac

SEQ ID NO: 289961 - RNA, 21 nt, Human
ucugccccagccccagcaccu

SEQ ID NO: 289962 - RNA, 18 nt, Human
ucuuuuuuuuuuuuuuuu

SEQ ID NO: 289963 - RNA, 18 nt, Human
ucuuuuuuuuuuuuuuuu

SEQ ID NO: 289964 - RNA, 21 nt, Human
ugaguucuuugaucuggaaaa

SEQ ID NO: 289965 - RNA, 20 nt, Human
ugaucuggaaaagagcugcu

SEQ ID NO: 289966 - RNA, 18 nt, Human
ugcaccaagagugcgaga

SEQ ID NO: 289967 - RNA, 20 nt, Human
ugcaggguuuugucugaggu

SEQ ID NO: 289968 - RNA, 23 nt, Human
ugcccuggcucucugccauccug

SEQ ID NO: 289969 - RNA, 18 nt, Human
ugccuggccugcugaucc

SEQ ID NO: 289970 - RNA, 21 nt, Human
ugcuccucuuggagaggggcc

SEQ ID NO: 289971 - RNA, 20 nt, Human
ugcucuccugccccucccuc

SEQ ID NO: 289972 - RNA, 21 nt, Human
uggaaaaaaagcguccgaagg

SEQ ID NO: 289973 - RNA, 23 nt, Human
uggacagggaaaaguuuccacuu

SEQ ID NO: 289974 - RNA, 21 nt, Human
uggagagaggaggggaaggaa

SEQ ID NO: 289975 - RNA, 20 nt, Human
uggaggaagagaggaagagg

SEQ ID NO: 289976 - RNA, 22 nt, Human
uggccugcugaucccaagucca

SEQ ID NO: 289977 - RNA, 18 nt, Human
uggcuuccucugaccacc

SEQ ID NO: 289978 - RNA, 27 nt, Human
ugggccucaggugcccacccccaucug

SEQ ID NO: 289979 - RNA, 18 nt, Human
uggguggagcagucuucu

SEQ ID NO: 289980 - RNA, 18 nt, Human
uguccuguucucgccaac

SEQ ID NO: 289981 - RNA, 21 nt, Human
uguggccaggaccaggacaag

SEQ ID NO: 289982 - RNA, 23 nt, Human
uuccucugucccccagaucuucc

SEQ ID NO: 289983 - RNA, 18 nt, Human
uugugaucuggguguggg

SEQ ID NO: 289984 - RNA, 24 nt, Human
uuuagaaauagacaagcauccaga

SEQ ID NO: 289985 - RNA, 23 nt, Human
uuuugugccuuuuuuuuucuuuu

SEQ ID NO: 289986 - RNA, 30 nt, Human
uuuuuuucuuuuuuuuuuuuuuuuuuuuuu

SEQ ID NO: 289987 - RNA, 31 nt, Human
uuuuuuuucuuuuuuuuuuuuuuuuuuuuuu

SEQ ID NO: 289988 - RNA, 26 nt, Human
uuuuuuuuuuuuuuuuggugccaggg

SEQ ID NO: 289989 - RNA, 18 nt, Human
uuuuuuuuuuuuuuuuug

SEQ ID NO: 289990 - RNA, 20 nt, Human
uuuuuuuuuuuuuuuuuggu

SEQ ID NO: 289991 - RNA, 23 nt, Human
aaugugugugugcggcgccggcc

SEQ ID NO: 289992 - RNA, 23 nt, Human
acucucacaauaaaaggccucac

SEQ ID NO: 289993 - RNA, 20 nt, Human
ccucgccuccaccgcuccuc

SEQ ID NO: 289994 - RNA, 20 nt, Human
cggaugucuguccacucucu

SEQ ID NO: 289995 - RNA, 20 nt, Human
cucacacaucugcgcgcccc

SEQ ID NO: 289996 - RNA, 22 nt, Human
cucacacaucugcgcgccccua

SEQ ID NO: 289997 - RNA, 22 nt, Human
cucucacaauaaaaggccucac

SEQ ID NO: 289998 - RNA, 19 nt, Human
gcucaaguguguuaaugug

SEQ ID NO: 289999 - RNA, 18 nt, Human
gugcugcuguuguugcuu

SEQ ID NO: 290000 - RNA, 20 nt, Human
ucaagaguuuuguuugguug

SEQ ID NO: 290001 - RNA, 18 nt, Human
ucacuggcccauuagcga

SEQ ID NO: 290002 - RNA, 20 nt, Human
uccacggggcucgaauaugg

SEQ ID NO: 290003 - RNA, 25 nt, Human
uccacucucacaauaaaaggccuca

SEQ ID NO: 290004 - RNA, 21 nt, Human
ugagaguuuucuccacggaug

SEQ ID NO: 290005 - RNA, 23 nt, Human
ugcgcgccccuaguuaaagucuu

SEQ ID NO: 290006 - RNA, 20 nt, Human
ugcuggguuggugugugaga

SEQ ID NO: 290007 - RNA, 20 nt, Human
ugcuggugagaguuuucucc

SEQ ID NO: 290008 - RNA, 24 nt, Human
ugggggccgcgggauuccacgggg

SEQ ID NO: 290009 - RNA, 24 nt, Human
ugucaagaguuuuguuugguuggg

SEQ ID NO: 290010 - RNA, 18 nt, Human
ugugcggcgccggccucg

SEQ ID NO: 290011 - RNA, 19 nt, Human
uguugcuugaagaccacaa

SEQ ID NO: 290012 - RNA, 21 nt, Human
uucucagauuccuaugcugau

SEQ ID NO: 290013 - RNA, 21 nt, Human
uugcuggugagaguuuucucc

SEQ ID NO: 290014 - RNA, 25 nt, Human
uugggguuuuuugugcugcuguugu

SEQ ID NO: 290015 - RNA, 23 nt, Human
uuguuugguugggguuuuuugug

SEQ ID NO: 290016 - RNA, 21 nt, Human
uuuuugugcugcuguuguugc

SEQ ID NO: 290017 - RNA, 19 nt, Human
uuuuuugugcugcuguugu

SEQ ID NO: 290018 - RNA, 19 nt, Human
aaacaaacaaacacuccaa

SEQ ID NO: 290019 - RNA, 19 nt, Human
aaacaaacacuccaacccc

SEQ ID NO: 290020 - RNA, 25 nt, Human
aaacaaacacuccaaccccaagucc

SEQ ID NO: 290021 - RNA, 20 nt, Human
aaccucuucucccuccccuc

SEQ ID NO: 290022 - RNA, 22 nt, Human
aaccucuucucccuccccucca

SEQ ID NO: 290023 - RNA, 23 nt, Human
aaccucuucucccuccccuccac

SEQ ID NO: 290024 - RNA, 18 nt, Human
aagcagaggcuuagccag

SEQ ID NO: 290025 - RNA, 19 nt, Human
aagcagaggcuuagccagg

SEQ ID NO: 290026 - RNA, 20 nt, Human
aagcagaggcuuagccagga

SEQ ID NO: 290027 - RNA, 25 nt, Human
acacacacucccuacccccaccccc

SEQ ID NO: 290028 - RNA, 22 nt, Human
acacucccuacccccacccccc

SEQ ID NO: 290029 - RNA, 19 nt, Human
acccccaccccccaccccu

SEQ ID NO: 290030 - RNA, 22 nt, Human
acccggagaccaggccccgcgg

SEQ ID NO: 290031 - RNA, 22 nt, Human
acucccuacccccaccccccac

SEQ ID NO: 290032 - RNA, 21 nt, Human
agaacccggagaccaggcccc

SEQ ID NO: 290033 - RNA, 19 nt, Human
agccaggagauguccuggg

SEQ ID NO: 290034 - RNA, 19 nt, Human
aggagauguccuggguuuu

SEQ ID NO: 290035 - RNA, 21 nt, Human
caaacaaacacuccaacccca

SEQ ID NO: 290036 - RNA, 25 nt, Human
cacacacucccuacccccacccccc

SEQ ID NO: 290037 - RNA, 20 nt, Human
cacacucccuacccccaccc

SEQ ID NO: 290038 - RNA, 23 nt, Human
cacacucccuacccccacccccc

SEQ ID NO: 290039 - RNA, 18 nt, Human
caccccccaccccuggcu

SEQ ID NO: 290040 - RNA, 20 nt, Human
cacucccuacccccaccccc

SEQ ID NO: 290041 - RNA, 20 nt, Human
cacucccuacccccaccccc

SEQ ID NO: 290042 - RNA, 24 nt, Human
cacucccuacccccaccccccacc

SEQ ID NO: 290043 - RNA, 26 nt, Human
cacucccuacccccaccccccacccc

SEQ ID NO: 290044 - RNA, 18 nt, Human
cacucgcuucucccucca

SEQ ID NO: 290045 - RNA, 27 nt, Human
ccaaccccaaguccgccucugccggcu

SEQ ID NO: 290046 - RNA, 18 nt, Human
ccacacacacucccuacc

SEQ ID NO: 290047 - RNA, 21 nt, Human
ccacacucgcuucucccucca

SEQ ID NO: 290048 - RNA, 23 nt, Human
ccaccccuggcugcagucaaacg

SEQ ID NO: 290049 - RNA, 19 nt, Human
ccaggagauguccuggguu

SEQ ID NO: 290050 - RNA, 24 nt, Human
cccaccccuggcugcagucaaacg

SEQ ID NO: 290051 - RNA, 24 nt, Human
cccccaccccccaccccuggcugc

SEQ ID NO: 290052 - RNA, 20 nt, Human
cccuccacacacacucccua

SEQ ID NO: 290053 - RNA, 18 nt, Human
cccucccucuucuccacg

SEQ ID NO: 290054 - RNA, 21 nt, Human
cccugcugcgaucucuuucuu

SEQ ID NO: 290055 - RNA, 22 nt, Human
ccgccucugccggcuggccucg

SEQ ID NO: 290056 - RNA, 18 nt, Human
ccucugccggcuggccuc

SEQ ID NO: 290057 - RNA, 20 nt, Human
ccucuucucccuccccucca

SEQ ID NO: 290058 - RNA, 28 nt, Human
ccuggcugcagucaaacgcguccagaag

SEQ ID NO: 290059 - RNA, 22 nt, Human
cgaggaaguucaaacaaacaaa

SEQ ID NO: 290060 - RNA, 19 nt, Human
cgcggacggaggggggccg

SEQ ID NO: 290061 - RNA, 22 nt, Human
cggcuggccucggccagaaguu

SEQ ID NO: 290062 - RNA, 20 nt, Human
cggggccaaaguuuccgagc

SEQ ID NO: 290063 - RNA, 21 nt, Human
cguccgcucccuucaccccug

SEQ ID NO: 290064 - RNA, 21 nt, Human
cuacccccaccccccaccccu

SEQ ID NO: 290065 - RNA, 20 nt, Human
cuccaaccccaaguccgccu

SEQ ID NO: 290066 - RNA, 21 nt, Human
cuccacacacacucccuaccc

SEQ ID NO: 290067 - RNA, 19 nt, Human
cucccuacccccacccccc

SEQ ID NO: 290068 - RNA, 20 nt, Human
cucccuccccuccacacaca

SEQ ID NO: 290069 - RNA, 18 nt, Human
cucccucccucuucucca

SEQ ID NO: 290070 - RNA, 21 nt, Human
cucccucccucuucuccacgc

SEQ ID NO: 290071 - RNA, 26 nt, Human
cugcgaucucuuucuuuccgucuucu

SEQ ID NO: 290072 - RNA, 23 nt, Human
cugcugcgaucucuuucuuuccg

SEQ ID NO: 290073 - RNA, 21 nt, Human
cuuuccgucuucuucgucuuc

SEQ ID NO: 290074 - RNA, 24 nt, Human
gcgaucucuuucuuuccgucuucu

SEQ ID NO: 290075 - RNA, 20 nt, Human
gcgcucuggcgcucggggcc

SEQ ID NO: 290076 - RNA, 19 nt, Human
gcucccucccucuucucca

SEQ ID NO: 290077 - RNA, 21 nt, Human
ggaaucgaggccgccagccuc

SEQ ID NO: 290078 - RNA, 21 nt, Human
gggggugaggugggguggagg

SEQ ID NO: 290079 - RNA, 18 nt, Human
gggguggagguugggggg

SEQ ID NO: 290080 - RNA, 22 nt, Human
ggguggagguuggggggaggga

SEQ ID NO: 290081 - RNA, 21 nt, Human
uaaccucuucucccuccccuc

SEQ ID NO: 290082 - RNA, 22 nt, Human
uacccccaccccccaccccugg

SEQ ID NO: 290083 - RNA, 22 nt, Human
ucaaacaaacaaacacuccaac

SEQ ID NO: 290084 - RNA, 23 nt, Human
uccacacacacucccuaccccca

SEQ ID NO: 290085 - RNA, 19 nt, Human
uccagaagcuggggagggg

SEQ ID NO: 290086 - RNA, 20 nt, Human
ucccguccgcucccuucacc

SEQ ID NO: 290087 - RNA, 19 nt, Human
ucccguccgcucccuuccc

SEQ ID NO: 290088 - RNA, 23 nt, Human
ucccuacccccaccccccacccc

SEQ ID NO: 290089 - RNA, 21 nt, Human
uccgucuucuucgucuucuuu

SEQ ID NO: 290090 - RNA, 21 nt, Human
ucuucuuuuuuuuaaccucuu

SEQ ID NO: 290091 - RNA, 19 nt, Human
ucuuucuuuccgucuucuc

SEQ ID NO: 290092 - RNA, 18 nt, Human
ugcuguguauuuuauuuc

SEQ ID NO: 290093 - RNA, 24 nt, Human
uucgucuucuuuuuuuuaaccucu

SEQ ID NO: 290094 - RNA, 24 nt, Human
acuacagauggucaaaggccgugg

SEQ ID NO: 290095 - RNA, 19 nt, Human
cagcccgccgagggcucgg

SEQ ID NO: 290096 - RNA, 20 nt, Human
cccguagguccgggccgcgc

SEQ ID NO: 290097 - RNA, 18 nt, Human
cccugggcccggugucuc

SEQ ID NO: 290098 - RNA, 22 nt, Human
ccgagggcucggggcuuccucc

SEQ ID NO: 290099 - RNA, 25 nt, Human
ccgccgagggcucggggcuuccucc

SEQ ID NO: 290100 - RNA, 21 nt, Human
ccugccgcugcccuggccggc

SEQ ID NO: 290101 - RNA, 21 nt, Human
cgagggcucggggcuuccucc

SEQ ID NO: 290102 - RNA, 28 nt, Human
cugggcccggugucucuccuccuucuga

SEQ ID NO: 290103 - RNA, 19 nt, Human
gcccggugucucuccuccu

SEQ ID NO: 290104 - RNA, 18 nt, Human
gccgcgccugccgcugcc

SEQ ID NO: 290105 - RNA, 19 nt, Human
gccgcgccugccgcugccc

SEQ ID NO: 290106 - RNA, 22 nt, Human
gccgcgccugccgcugcccugg

SEQ ID NO: 290107 - RNA, 18 nt, Human
gccuugauguggaacugu

SEQ ID NO: 290108 - RNA, 21 nt, Human
ggcaguggugggcggugcacu

SEQ ID NO: 290109 - RNA, 18 nt, Human
gggcggugcacucggccu

SEQ ID NO: 290110 - RNA, 23 nt, Human
guggcaguggugggcggugcacu

SEQ ID NO: 290111 - RNA, 21 nt, Human
ucccguagguccgggccgcgc

SEQ ID NO: 290112 - RNA, 18 nt, Human
ugccgcugcccuggccgg

SEQ ID NO: 290113 - RNA, 22 nt, Human
ugggcccggugucucuccuccu

SEQ ID NO: 290114 - RNA, 23 nt, Human
aaaaggggcggguccgagggcaa

SEQ ID NO: 290115 - RNA, 19 nt, Human
aaacuccuuccgcugucuc

SEQ ID NO: 290116 - RNA, 23 nt, Human
aaggaagaaguaaaaggagggac

SEQ ID NO: 290117 - RNA, 21 nt, Human
accaacccggccccaguuccg

SEQ ID NO: 290118 - RNA, 20 nt, Human
agacagaaacuuuccgcacc

SEQ ID NO: 290119 - RNA, 18 nt, Human
aggaaacuccuuccgcug

SEQ ID NO: 290120 - RNA, 23 nt, Human
aggaagaaguaaaaggaagucug

SEQ ID NO: 290121 - RNA, 22 nt, Human
aggaggaggcgagagggcaaaa

SEQ ID NO: 290122 - RNA, 24 nt, Human
caccaacccggccccaguuccgca

SEQ ID NO: 290123 - RNA, 24 nt, Human
cacucccagacagaaacuuuccgc

SEQ ID NO: 290124 - RNA, 22 nt, Human
caggaaacuccuuccgcugucu

SEQ ID NO: 290125 - RNA, 19 nt, Human
cagggcagggcggcuccgu

SEQ ID NO: 290126 - RNA, 18 nt, Human
caugucaguuuuucugca

SEQ ID NO: 290127 - RNA, 22 nt, Human
ccaacccggccccaguuccgca

SEQ ID NO: 290128 - RNA, 22 nt, Human
ccaggaaacuccuuccgcuguc

SEQ ID NO: 290129 - RNA, 22 nt, Human
ccaggaggaggaggcgagaggg

SEQ ID NO: 290130 - RNA, 18 nt, Human
ccaguuccgcacucccag

SEQ ID NO: 290131 - RNA, 21 nt, Human
cccggccgaccggccggcgcc

SEQ ID NO: 290132 - RNA, 18 nt, Human
cgggucggugagcgacag

SEQ ID NO: 290133 - RNA, 21 nt, Human
cuccgagcaguacaccaaccc

SEQ ID NO: 290134 - RNA, 23 nt, Human
gaccugggaauugggggaggagg

SEQ ID NO: 290135 - RNA, 18 nt, Human
gagggcaggagggguggg

SEQ ID NO: 290136 - RNA, 18 nt, Human
ggaaacuccuuccgcugu

SEQ ID NO: 290137 - RNA, 18 nt, Human
ggaggaggaggcgagagg

SEQ ID NO: 290138 - RNA, 22 nt, Human
ggcgagagggcaaaaggaagaa

SEQ ID NO: 290139 - RNA, 21 nt, Human
ggugaagcugcuggagacgga

SEQ ID NO: 290140 - RNA, 21 nt, Human
gugggcugggcugagcagggc

SEQ ID NO: 290141 - RNA, 22 nt, Human
uaaaaggggcggguccgagggc

SEQ ID NO: 290142 - RNA, 26 nt, Human
uaagugucauuagcacaaaggaugug

SEQ ID NO: 290143 - RNA, 21 nt, Human
uacagccagcuuucaaggcag

SEQ ID NO: 290144 - RNA, 18 nt, Human
ucggugagcgacagcgca

SEQ ID NO: 290145 - RNA, 22 nt, Human
ucugcaagagaaaaguuauggc

SEQ ID NO: 290146 - RNA, 18 nt, Human
aaaagucacccucaacua

SEQ ID NO: 290147 - RNA, 22 nt, Human
aaagccacccucccuccugcuu

SEQ ID NO: 290148 - RNA, 20 nt, Human
aacacagaucucagguuucc

SEQ ID NO: 290149 - RNA, 20 nt, Human
aacacugaacuggggaacau

SEQ ID NO: 290150 - RNA, 19 nt, Human
aacagcacaauuaaugcaa

SEQ ID NO: 290151 - RNA, 24 nt, Human
aagcaaacagcacaauuaaugcaa

SEQ ID NO: 290152 - RNA, 21 nt, Human
aagcagagcgugcagccggga

SEQ ID NO: 290153 - RNA, 25 nt, Human
aagggaccagagugacauacugaug

SEQ ID NO: 290154 - RNA, 25 nt, Human
acaagcaaacagcacaauuaaugca

SEQ ID NO: 290155 - RNA, 19 nt, Human
agcaaagccacccucccuc

SEQ ID NO: 290156 - RNA, 24 nt, Human
aggcagaggcaaccaaucuuuuuu

SEQ ID NO: 290157 - RNA, 20 nt, Human
agggaccagagugacauacu

SEQ ID NO: 290158 - RNA, 18 nt, Human
auaaaggccaggcagcag

SEQ ID NO: 290159 - RNA, 21 nt, Human
aucuauuauacaugcaacacu

SEQ ID NO: 290160 - RNA, 23 nt, Human
augaccccaucacaguaccaaaa

SEQ ID NO: 290161 - RNA, 23 nt, Human
auuaaugcaacauucagcaacuc

SEQ ID NO: 290162 - RNA, 20 nt, Human
caaaauaccccccaaaauga

SEQ ID NO: 290163 - RNA, 19 nt, Human
caacaacagcaaagccacc

SEQ ID NO: 290164 - RNA, 20 nt, Human
caacaacagcaaagccaccc

SEQ ID NO: 290165 - RNA, 24 nt, Human
caacaacagcaaagccacccuccc

SEQ ID NO: 290166 - RNA, 21 nt, Human
caacacugaacuggggaacau

SEQ ID NO: 290167 - RNA, 25 nt, Human
caagcaaacagcacaauuaaugcaa

SEQ ID NO: 290168 - RNA, 30 nt, Human
cacaguaccaaaauaccccccaaaaugaag

SEQ ID NO: 290169 - RNA, 26 nt, Human
cagaggcaaccaaucuuuuuuuuuuu

SEQ ID NO: 290170 - RNA, 19 nt, Human
cagagugacauacugaugc

SEQ ID NO: 290171 - RNA, 20 nt, Human
cagcaaagccacccucccuc

SEQ ID NO: 290172 - RNA, 23 nt, Human
cagcaaagccacccucccuccug

SEQ ID NO: 290173 - RNA, 19 nt, Human
caggaucacaaaggcagag

SEQ ID NO: 290174 - RNA, 22 nt, Human
caguaccaaaauaccccccaaa

SEQ ID NO: 290175 - RNA, 23 nt, Human
ccaaaauaccccccaaaaugaag

SEQ ID NO: 290176 - RNA, 20 nt, Human
ccaacaacagcaaagccacc

SEQ ID NO: 290177 - RNA, 21 nt, Human
cccaacaacagcaaagccacc

SEQ ID NO: 290178 - RNA, 27 nt, Human
cccccaguuuuuucuuuuugggccgcc

SEQ ID NO: 290179 - RNA, 18 nt, Human
ccccccaaaaugaaguuc

SEQ ID NO: 290180 - RNA, 24 nt, Human
cccucaacuaccaucugacugguc

SEQ ID NO: 290181 - RNA, 20 nt, Human
cccucccuccugcuucuucc

SEQ ID NO: 290182 - RNA, 18 nt, Human
cgcggagagcucagcaca

SEQ ID NO: 290183 - RNA, 18 nt, Human
cgggcgacagaggcgacg

SEQ ID NO: 290184 - RNA, 27 nt, Human
cuacaagcaaacagcacagcgcgaguc

SEQ ID NO: 290185 - RNA, 21 nt, Human
cucgggaagacgcagaccccc

SEQ ID NO: 290186 - RNA, 19 nt, Human
cuuggggccuccaggacag

SEQ ID NO: 290187 - RNA, 24 nt, Human
cuuuuuuuuuuuuuuuuuuuuuaa

SEQ ID NO: 290188 - RNA, 22 nt, Human
gaucaaaacauaaaucagagug

SEQ ID NO: 290189 - RNA, 20 nt, Human
gauugcucuuuaaagggacu

SEQ ID NO: 290190 - RNA, 22 nt, Human
gcaacacugaacuggggaacau

SEQ ID NO: 290191 - RNA, 24 nt, Human
gcaacuccagaccagcuuuucuua

SEQ ID NO: 290192 - RNA, 18 nt, Human
gccagccucugguugucu

SEQ ID NO: 290193 - RNA, 23 nt, Human
ggcaaccaaucuuuuuuuuuuuu

SEQ ID NO: 290194 - RNA, 18 nt, Human
ggcgacagaggcgacgcg

SEQ ID NO: 290195 - RNA, 22 nt, Human
ggcgacagaggcgacgcggaga

SEQ ID NO: 290196 - RNA, 18 nt, Human
ggcgaggccaagcagagc

SEQ ID NO: 290197 - RNA, 21 nt, Human
ggggaacauggcuuggggccu

SEQ ID NO: 290198 - RNA, 25 nt, Human
ggggcaggaagaggagaaaucuauu

SEQ ID NO: 290199 - RNA, 21 nt, Human
gucacccucaacuaccaucug

SEQ ID NO: 290200 - RNA, 20 nt, Human
uaggccaggcgcgggcgaca

SEQ ID NO: 290201 - RNA, 23 nt, Human
ucccaacaacagcaaagccaccc

SEQ ID NO: 290202 - RNA, 22 nt, Human
ucccaagcugucagcgaggcgc

SEQ ID NO: 290203 - RNA, 21 nt, Human
ucucagguuuccucccaagcu

SEQ ID NO: 290204 - RNA, 23 nt, Human
ugaagaacgaucaauuuaaaaaa

SEQ ID NO: 290205 - RNA, 25 nt, Human
ugagugaguaaaauuauaaaggcca

SEQ ID NO: 290206 - RNA, 18 nt, Human
ugccgcgguaggccaggc

SEQ ID NO: 290207 - RNA, 18 nt, Human
uggcucgggaagacgcag

SEQ ID NO: 290208 - RNA, 24 nt, Human
uuauaaaggccaggcagcaggaaa

SEQ ID NO: 290209 - RNA, 24 nt, Human
uucagauuaauaauuugaugaccc

SEQ ID NO: 290210 - RNA, 22 nt, Human
uucagguccccaagcuaacccc

SEQ ID NO: 290211 - RNA, 23 nt, Human
uucuuccaggauugcucuuuaaa

SEQ ID NO: 290212 - RNA, 20 nt, Human
uugaugcuuugcucuaucac

SEQ ID NO: 290213 - RNA, 22 nt, Human
uuuccccccaguuuuuucuuuu

SEQ ID NO: 290214 - RNA, 25 nt, Human
uuuuacauucuggguugcuauuuuc

SEQ ID NO: 290215 - RNA, 20 nt, Human
aacccucccuccugccccug

SEQ ID NO: 290216 - RNA, 19 nt, Human
aagaagagaagagaaggag

SEQ ID NO: 290217 - RNA, 18 nt, Human
agcuggaggcagggaagg

SEQ ID NO: 290218 - RNA, 21 nt, Human
aggcagggaaggguggcuucu

SEQ ID NO: 290219 - RNA, 18 nt, Human
cagaggcacaggggcagg

SEQ ID NO: 290220 - RNA, 25 nt, Human
cagaggcacaggggcagggaagaug

SEQ ID NO: 290221 - RNA, 21 nt, Human
ccaaagaagagaagagaagga

SEQ ID NO: 290222 - RNA, 19 nt, Human
ccagaaaaaaaagggaaga

SEQ ID NO: 290223 - RNA, 20 nt, Human
cccaaagaagagaagagaag

SEQ ID NO: 290224 - RNA, 19 nt, Human
ccccaacuggggcagaggg

SEQ ID NO: 290225 - RNA, 26 nt, Human
ccuccugccccugccccaacuggggc

SEQ ID NO: 290226 - RNA, 19 nt, Human
ccugccccugccccaacug

SEQ ID NO: 290227 - RNA, 24 nt, Human
cuacggcagcccccggcucuuccu

SEQ ID NO: 290228 - RNA, 23 nt, Human
cuccaaaggcuacggcagccccc

SEQ ID NO: 290229 - RNA, 23 nt, Human
cucccuccugccccugccccaac

SEQ ID NO: 290230 - RNA, 20 nt, Human
cuccucggcucggcuccugg

SEQ ID NO: 290231 - RNA, 23 nt, Human
cuugggagagaaacccucccucc

SEQ ID NO: 290232 - RNA, 25 nt, Human
gaaacccucccuccugccccugccc

SEQ ID NO: 290233 - RNA, 22 nt, Human
gagaaacccucccuccugcccc

SEQ ID NO: 290234 - RNA, 22 nt, Human
ggcagagggucagccgggaugc

SEQ ID NO: 290235 - RNA, 20 nt, Human
ucagugauaugagagagggc

SEQ ID NO: 290236 - RNA, 18 nt, Human
uccucggcucggcuccug

SEQ ID NO: 290237 - RNA, 20 nt, Human
ucuuauuguguuugcugauu

SEQ ID NO: 290238 - RNA, 26 nt, Human
ucuucaaauccuuuucaggauaaaca

SEQ ID NO: 290239 - RNA, 19 nt, Human
ugaaauagcaucccaaaga

SEQ ID NO: 290240 - RNA, 19 nt, Human
ugacagcuggaggcaggga

SEQ ID NO: 290241 - RNA, 20 nt, Human
ugccccugccccaacugggg

SEQ ID NO: 290242 - RNA, 26 nt, Human
aaaaaaaaaacagauggaucccaggg

SEQ ID NO: 290243 - RNA, 24 nt, Human
aaaaaaaaaaguucaaccccaaag

SEQ ID NO: 290244 - RNA, 18 nt, Human
aaaaaagacaagaaauca

SEQ ID NO: 290245 - RNA, 22 nt, Human
aaaacaagcuacuuccccaaac

SEQ ID NO: 290246 - RNA, 19 nt, Human
aaaacagauggaucccagg

SEQ ID NO: 290247 - RNA, 21 nt, Human
aaacaagcuacuuccccaaac

SEQ ID NO: 290248 - RNA, 22 nt, Human
aaacagauggaucccaggguuu

SEQ ID NO: 290249 - RNA, 21 nt, Human
aaagacagaggagaaaaaggg

SEQ ID NO: 290250 - RNA, 18 nt, Human
aaaugcggcagaaaccug

SEQ ID NO: 290251 - RNA, 21 nt, Human
aacaacaaaaacaacaacaac

SEQ ID NO: 290252 - RNA, 24 nt, Human
aacaacaaaaacaacaacaacaaa

SEQ ID NO: 290253 - RNA, 30 nt, Human
aacaacaaaaacaacaacaacaaaaaaaaa

SEQ ID NO: 290254 - RNA, 24 nt, Human
aacaacaacaaaaacaacaacaac

SEQ ID NO: 290255 - RNA, 20 nt, Human
aacaagcuacuuccccaaac

SEQ ID NO: 290256 - RNA, 19 nt, Human
aagggggaugagaggccag

SEQ ID NO: 290257 - RNA, 20 nt, Human
acaaaaacaacaacaacaaa

SEQ ID NO: 290258 - RNA, 21 nt, Human
acaaaaacaacaacaacaaaa

SEQ ID NO: 290259 - RNA, 23 nt, Human
acaacaaaaacaacaacaacaaa

SEQ ID NO: 290260 - RNA, 26 nt, Human
acaacaacaaaaaaaaaaacagaugg

SEQ ID NO: 290261 - RNA, 27 nt, Human
acaacaacaaaaaaaaaaacagaugga

SEQ ID NO: 290262 - RNA, 29 nt, Human
acaacaacaaaaacaacaacaacaaaaaa

SEQ ID NO: 290263 - RNA, 20 nt, Human
accaccaccaccaccaccaa

SEQ ID NO: 290264 - RNA, 21 nt, Human
accaccaccaccaccaccacc

SEQ ID NO: 290265 - RNA, 23 nt, Human
accaccaccaccaccaccaccaa

SEQ ID NO: 290266 - RNA, 20 nt, Human
accccaaagcccagucaaua

SEQ ID NO: 290267 - RNA, 22 nt, Human
accccugugacccugaggggca

SEQ ID NO: 290268 - RNA, 20 nt, Human
acuagccccccggcccaugc

SEQ ID NO: 290269 - RNA, 23 nt, Human
acugcauuuuguuuuuuuucugu

SEQ ID NO: 290270 - RNA, 22 nt, Human
agaaagcgagagaggaaaaaga

SEQ ID NO: 290271 - RNA, 24 nt, Human
agaaauaaaaaaaaaagacaagaa

SEQ ID NO: 290272 - RNA, 18 nt, Human
agagagaaagacagagga

SEQ ID NO: 290273 - RNA, 19 nt, Human
agagaggaaaaagauggaa

SEQ ID NO: 290274 - RNA, 23 nt, Human
agagagucucguuagggagggga

SEQ ID NO: 290275 - RNA, 22 nt, Human
agaggaaaaagauggaaaaaag

SEQ ID NO: 290276 - RNA, 20 nt, Human
agagggagagagaaagacag

SEQ ID NO: 290277 - RNA, 27 nt, Human
aggaaaaagauggaaaaaaggggaccc

SEQ ID NO: 290278 - RNA, 19 nt, Human
aggagaaaaaggggucuga

SEQ ID NO: 290279 - RNA, 18 nt, Human
aggccuggagccaggggg

SEQ ID NO: 290280 - RNA, 22 nt, Human
agggaaagugggggagcccagg

SEQ ID NO: 290281 - RNA, 21 nt, Human
aggggggccucuuuaccaguu

SEQ ID NO: 290282 - RNA, 25 nt, Human
aguaagaaauaaaaaaaaaagacaa

SEQ ID NO: 290283 - RNA, 21 nt, Human
aguccugcccggaucuuuaau

SEQ ID NO: 290284 - RNA, 23 nt, Human
auaguugcaagugggaguaugug

SEQ ID NO: 290285 - RNA, 20 nt, Human
aucccaggguuucuuuuucu

SEQ ID NO: 290286 - RNA, 21 nt, Human
augguagcuaguucagggcug

SEQ ID NO: 290287 - RNA, 20 nt, Human
caaaaaaaaaaacagaugga

SEQ ID NO: 290288 - RNA, 26 nt, Human
caaaaacaacaacaacaaaaaaaaaa

SEQ ID NO: 290289 - RNA, 25 nt, Human
caacaaaaaaaaaaacagauggauc

SEQ ID NO: 290290 - RNA, 20 nt, Human
caacaaaaacaacaacaaca

SEQ ID NO: 290291 - RNA, 32 nt, Human
caacaaaaacaacaacaacaaaaaaaaaaaag

SEQ ID NO: 290292 - RNA, 30 nt, Human
caacaacaacaaaaacaacaacaacaaaag

SEQ ID NO: 290293 - RNA, 21 nt, Human
caagcccuucacugccuccac

SEQ ID NO: 290294 - RNA, 19 nt, Human
cacacuuccaaccuguccc

SEQ ID NO: 290295 - RNA, 22 nt, Human
cacagauuccagagcauacaag

SEQ ID NO: 290296 - RNA, 24 nt, Human
caccaacaacaacaaaaacaacaa

SEQ ID NO: 290297 - RNA, 24 nt, Human
caccaccaccaacaacaacaaaaa

SEQ ID NO: 290298 - RNA, 18 nt, Human
caccaccaccaccaacaa

SEQ ID NO: 290299 - RNA, 27 nt, Human
caccaccaccaccaacaacaacaaaaa

SEQ ID NO: 290300 - RNA, 22 nt, Human
caccccaacccauauuuaacau

SEQ ID NO: 290301 - RNA, 19 nt, Human
cacccccccacccaucaca

SEQ ID NO: 290302 - RNA, 21 nt, Human
cauauacaagcaccccaaccc

SEQ ID NO: 290303 - RNA, 18 nt, Human
caucacacuuccaaccug

SEQ ID NO: 290304 - RNA, 23 nt, Human
caucacacuuccaaccuguccca

SEQ ID NO: 290305 - RNA, 19 nt, Human
cauuggcccuucucugucu

SEQ ID NO: 290306 - RNA, 23 nt, Human
ccaccaccaccaccaacaacaac

SEQ ID NO: 290307 - RNA, 25 nt, Human
ccaccaccaccaccaacaacaacaa

SEQ ID NO: 290308 - RNA, 25 nt, Human
ccaccaccaccaccaccaacaacaa

SEQ ID NO: 290309 - RNA, 25 nt, Human
ccaccaccaccaccaccaccaacaa

SEQ ID NO: 290310 - RNA, 18 nt, Human
ccacccccccacccauca

SEQ ID NO: 290311 - RNA, 22 nt, Human
ccacccccccacccaucacacu

SEQ ID NO: 290312 - RNA, 23 nt, Human
ccaccgagcgauucuauugguuu

SEQ ID NO: 290313 - RNA, 26 nt, Human
ccagcccugcccaaggguugugggaa

SEQ ID NO: 290314 - RNA, 23 nt, Human
cccaugccucccacccccccacc

SEQ ID NO: 290315 - RNA, 21 nt, Human
cccauguccucuguccagaag

SEQ ID NO: 290316 - RNA, 22 nt, Human
ccccaaagcccagucaauaauu

SEQ ID NO: 290317 - RNA, 25 nt, Human
ccccaacccauauuuaacauauuug

SEQ ID NO: 290318 - RNA, 23 nt, Human
ccccacaucuggcuuuuugcaac

SEQ ID NO: 290319 - RNA, 18 nt, Human
ccccauucuuccugccau

SEQ ID NO: 290320 - RNA, 23 nt, Human
ccccccacccaucacacuuccaa

SEQ ID NO: 290321 - RNA, 23 nt, Human
ccccggcccaugccucccacccc

SEQ ID NO: 290322 - RNA, 21 nt, Human
cccugcccaaggguugugggg

SEQ ID NO: 290323 - RNA, 22 nt, Human
ccggcccaugccucccaccccc

SEQ ID NO: 290324 - RNA, 22 nt, Human
ccuccacaucaaaugcggcaga

SEQ ID NO: 290325 - RNA, 22 nt, Human
ccucccacccccccacccauca

SEQ ID NO: 290326 - RNA, 23 nt, Human
ccucccacccccccacccaucac

SEQ ID NO: 290327 - RNA, 22 nt, Human
ccucccucucccuaccccuuga

SEQ ID NO: 290328 - RNA, 27 nt, Human
cggcccaugccucccacccccccaccc

SEQ ID NO: 290329 - RNA, 19 nt, Human
cuagccccccggcccaugc

SEQ ID NO: 290330 - RNA, 21 nt, Human
cuucccauucuucccccucca

SEQ ID NO: 290331 - RNA, 23 nt, Human
cuuggugcccuguaaaauuuacc

SEQ ID NO: 290332 - RNA, 21 nt, Human
cuuguaaaauccugagaaugu

SEQ ID NO: 290333 - RNA, 21 nt, Human
gaagaagggggaugagaggcc

SEQ ID NO: 290334 - RNA, 23 nt, Human
gaagauacauauacaagcacccc

SEQ ID NO: 290335 - RNA, 20 nt, Human
gagagcccccaccccuguga

SEQ ID NO: 290336 - RNA, 19 nt, Human
gagcccaggagagaaacag

SEQ ID NO: 290337 - RNA, 21 nt, Human
gaggccccauucuuccugcca

SEQ ID NO: 290338 - RNA, 23 nt, Human
gagggguuccccacucugacagu

SEQ ID NO: 290339 - RNA, 23 nt, Human
gcagaaaccugccugcaugaaca

SEQ ID NO: 290340 - RNA, 22 nt, Human
gcggggguggggaugcaugggg

SEQ ID NO: 290341 - RNA, 24 nt, Human
gcggggguggggaugcaugggggc

SEQ ID NO: 290342 - RNA, 23 nt, Human
ggagagacagaccccacacuccc

SEQ ID NO: 290343 - RNA, 19 nt, Human
gggaaagugggggagccca

SEQ ID NO: 290344 - RNA, 26 nt, Human
gggcggggguggggaugcaugggggc

SEQ ID NO: 290345 - RNA, 18 nt, Human
gggggaugagaggccagc

SEQ ID NO: 290346 - RNA, 18 nt, Human
gggguggggaagggaaag

SEQ ID NO: 290347 - RNA, 22 nt, Human
gggguggggaagggaaaguggg

SEQ ID NO: 290348 - RNA, 21 nt, Human
gggguggggaugcaugggggc

SEQ ID NO: 290349 - RNA, 20 nt, Human
ggguugugggaagaaggggg

SEQ ID NO: 290350 - RNA, 18 nt, Human
ggguuucuuuuucuuucu

SEQ ID NO: 290351 - RNA, 18 nt, Human
ggugugggagagggagag

SEQ ID NO: 290352 - RNA, 19 nt, Human
guccucuggaagccugcgu

SEQ ID NO: 290353 - RNA, 21 nt, Human
gugggaagaagggggaugaga

SEQ ID NO: 290354 - RNA, 26 nt, Human
uaaaaaaaaaaaaguucaaccccaaa

SEQ ID NO: 290355 - RNA, 21 nt, Human
uaaaaaaaaaagacaagaaau

SEQ ID NO: 290356 - RNA, 24 nt, Human
uaaaaaaaaaagacaagaaaucaa

SEQ ID NO: 290357 - RNA, 19 nt, Human
uaaaauuuaccuuccugau

SEQ ID NO: 290358 - RNA, 25 nt, Human
uaaaguagcagaaacucccuccgag

SEQ ID NO: 290359 - RNA, 22 nt, Human
uaacucccuucccauucuuccc

SEQ ID NO: 290360 - RNA, 24 nt, Human
uaacucccuucccauucuuccccc

SEQ ID NO: 290361 - RNA, 24 nt, Human
uaagaaauaaaaaaaaaagacaaa

SEQ ID NO: 290362 - RNA, 18 nt, Human
uaagaaccaccaccacca

SEQ ID NO: 290363 - RNA, 21 nt, Human
uaagaaccaccaccaccacca

SEQ ID NO: 290364 - RNA, 22 nt, Human
uaagaaccaccaccaccaccac

SEQ ID NO: 290365 - RNA, 21 nt, Human
uaagaugagcugcguaugagg

SEQ ID NO: 290366 - RNA, 19 nt, Human
uacaagcaccccaacccau

SEQ ID NO: 290367 - RNA, 23 nt, Human
uagccccccggcccaugccuccc

SEQ ID NO: 290368 - RNA, 22 nt, Human
ucaaaugcggcagaaaccugcc

SEQ ID NO: 290369 - RNA, 20 nt, Human
ucccacccccccacccauca

SEQ ID NO: 290370 - RNA, 21 nt, Human
ucccauucuucccccuccaau

SEQ ID NO: 290371 - RNA, 21 nt, Human
ucccauucuucccccuccaau

SEQ ID NO: 290372 - RNA, 20 nt, Human
uccccaaacuaaauuaaaaa

SEQ ID NO: 290373 - RNA, 22 nt, Human
uccucuguccagaagucauguc

SEQ ID NO: 290374 - RNA, 18 nt, Human
ucugaggggaucagaugg

SEQ ID NO: 290375 - RNA, 21 nt, Human
ucuguuugucccccuuucucu

SEQ ID NO: 290376 - RNA, 23 nt, Human
ucuuuaaaaaaaaaaaaguucaa

SEQ ID NO: 290377 - RNA, 23 nt, Human
ugacaaaaagauaccucauuuau

SEQ ID NO: 290378 - RNA, 21 nt, Human
ugagagcccccaccccuguga

SEQ ID NO: 290379 - RNA, 24 nt, Human
ugagagcccccaccccugugaccc

SEQ ID NO: 290380 - RNA, 19 nt, Human
ugaggaugggacaguguug

SEQ ID NO: 290381 - RNA, 20 nt, Human
ugaggugugggagagggaga

SEQ ID NO: 290382 - RNA, 23 nt, Human
ugagucagacacucucguccacc

SEQ ID NO: 290383 - RNA, 19 nt, Human
ugaguccagcccugcccaa

SEQ ID NO: 290384 - RNA, 18 nt, Human
ugcccggaucuuuaaugg

SEQ ID NO: 290385 - RNA, 20 nt, Human
ugccucccacccccccaccc

SEQ ID NO: 290386 - RNA, 24 nt, Human
uggaaaaaagggagagacagaccc

SEQ ID NO: 290387 - RNA, 28 nt, Human
ugggaaaguaagaaauaaaaaaaaaaga

SEQ ID NO: 290388 - RNA, 23 nt, Human
ugggaagaagggggaugagaggc

SEQ ID NO: 290389 - RNA, 24 nt, Human
ugggagagggagagagaaagacag

SEQ ID NO: 290390 - RNA, 21 nt, Human
ugggguggggaagggaaagug

SEQ ID NO: 290391 - RNA, 22 nt, Human
ugugugaggugugggagaggga

SEQ ID NO: 290392 - RNA, 18 nt, Human
ugugugugagguguggga

SEQ ID NO: 290393 - RNA, 23 nt, Human
uucccauucuucccccuccaauu

SEQ ID NO: 290394 - RNA, 19 nt, Human
uuccucaaaauuacugagu

SEQ ID NO: 290395 - RNA, 21 nt, Human
uugcaaccuccucccucuccc

SEQ ID NO: 290396 - RNA, 23 nt, Human
uuuauaaaaaaaaaaacaagcua

SEQ ID NO: 290397 - RNA, 22 nt, Human
uuucucgguauguguauguuuc

SEQ ID NO: 290398 - RNA, 24 nt, Human
uuuucuuucuuuaaaaaaaaaaaa

SEQ ID NO: 290399 - RNA, 21 nt, Human
aaacagauuuaccaaguucuc

SEQ ID NO: 290400 - RNA, 22 nt, Human
aaagagacaaacuacagcguga

SEQ ID NO: 290401 - RNA, 22 nt, Human
aaaucuuggccuaauuggauaa

SEQ ID NO: 290402 - RNA, 21 nt, Human
aauguuuccacacucgguuuu

SEQ ID NO: 290403 - RNA, 20 nt, Human
acaaacgugacgaggaagau

SEQ ID NO: 290404 - RNA, 19 nt, Human
acaacaguuuuaccgaucc

SEQ ID NO: 290405 - RNA, 21 nt, Human
agaaagagacaaacuacagcg

SEQ ID NO: 290406 - RNA, 20 nt, Human
agagagagaaacgaugcuac

SEQ ID NO: 290407 - RNA, 20 nt, Human
agagguaguaagugagcacu

SEQ ID NO: 290408 - RNA, 22 nt, Human
agauaagaaagagacaaacuac

SEQ ID NO: 290409 - RNA, 21 nt, Human
aguaauggaaauaugcaagaa

SEQ ID NO: 290410 - RNA, 22 nt, Human
agucaguaauggaaauaugcaa

SEQ ID NO: 290411 - RNA, 21 nt, Human
auauacaacacuccagagagc

SEQ ID NO: 290412 - RNA, 20 nt, Human
augaagggaaacaaagaguu

SEQ ID NO: 290413 - RNA, 20 nt, Human
caacacuccagagagcaggg

SEQ ID NO: 290414 - RNA, 24 nt, Human
caacuccauuagugauaugaaaga

SEQ ID NO: 290415 - RNA, 23 nt, Human
cacaccguaaaaccccagacgga

SEQ ID NO: 290416 - RNA, 18 nt, Human
cacuccagagagcagggc

SEQ ID NO: 290417 - RNA, 24 nt, Human
cagcagcaaguaucuucgucucuc

SEQ ID NO: 290418 - RNA, 19 nt, Human
cagcucuuuauuccaacuc

SEQ ID NO: 290419 - RNA, 23 nt, Human
caugagguaauaaagcuguguuu

SEQ ID NO: 290420 - RNA, 18 nt, Human
ccagugcacaccguaaaa

SEQ ID NO: 290421 - RNA, 21 nt, Human
ccagugcacaccguaaaaccc

SEQ ID NO: 290422 - RNA, 22 nt, Human
cguaaaaccccagacggaucaa

SEQ ID NO: 290423 - RNA, 22 nt, Human
gacccaauguuuccacacucgg

SEQ ID NO: 290424 - RNA, 19 nt, Human
gacucugggcacuggugcu

SEQ ID NO: 290425 - RNA, 18 nt, Human
gcaagaaguucaauuuag

SEQ ID NO: 290426 - RNA, 21 nt, Human
guugcaagugcaacccugauu

SEQ ID NO: 290427 - RNA, 22 nt, Human
uaaaucuuggccuaauuggaua

SEQ ID NO: 290428 - RNA, 20 nt, Human
uacaaaaacgcuuuccuuuu

SEQ ID NO: 290429 - RNA, 18 nt, Human
uacaagaugcaaaaagau

SEQ ID NO: 290430 - RNA, 22 nt, Human
uaccaaguucucgaauaagaca

SEQ ID NO: 290431 - RNA, 23 nt, Human
uagcucaggaaaaguguggccag

SEQ ID NO: 290432 - RNA, 20 nt, Human
uaugaaagaaagacaaucca

SEQ ID NO: 290433 - RNA, 24 nt, Human
ucucucagaacaaucuggauccau

SEQ ID NO: 290434 - RNA, 18 nt, Human
ucugaucuaauuauaaca

SEQ ID NO: 290435 - RNA, 21 nt, Human
ucugggcacuggugcuuucag

SEQ ID NO: 290436 - RNA, 23 nt, Human
ugacgaggaagauucuuaaacac

SEQ ID NO: 290437 - RNA, 19 nt, Human
ugagcacucuaagcuacag

SEQ ID NO: 290438 - RNA, 21 nt, Human
ugcaaaaagauaagaaagaga

SEQ ID NO: 290439 - RNA, 19 nt, Human
ugcccagaggacguagcaa

SEQ ID NO: 290440 - RNA, 20 nt, Human
uguguugaauuaagacccaa

SEQ ID NO: 290441 - RNA, 19 nt, Human
uuaaaagauuacaauguac

SEQ ID NO: 290442 - RNA, 22 nt, Human
uuaccgagcagacucugggcac

SEQ ID NO: 290443 - RNA, 20 nt, Human
uucaccucuaucagcagcaa

SEQ ID NO: 290444 - RNA, 24 nt, Human
uucucgaauaagacaagguuuuac

SEQ ID NO: 290445 - RNA, 20 nt, Human
uugaagaacauucaaaaugu

SEQ ID NO: 290446 - RNA, 19 nt, Human
uuuuugcaucugcuuuaac

SEQ ID NO: 290447 - RNA, 26 nt, Human
acaucuuagaucuccccuucccccag

SEQ ID NO: 290448 - RNA, 24 nt, Human
accccuaaaccuccccuggguccu

SEQ ID NO: 290449 - RNA, 22 nt, Human
accuccacggcccggccuuccu

SEQ ID NO: 290450 - RNA, 19 nt, Human
aguaaacuucccaggaccu

SEQ ID NO: 290451 - RNA, 22 nt, Human
aguaaacuucccaggaccuggg

SEQ ID NO: 290452 - RNA, 24 nt, Human
aucuuagaucuccccuucccccag

SEQ ID NO: 290453 - RNA, 23 nt, Human
augaagcaagcuuuucauucggu

SEQ ID NO: 290454 - RNA, 24 nt, Human
caccgcaggcggugucucuccugu

SEQ ID NO: 290455 - RNA, 20 nt, Human
cacggcccggccuuccuggc

SEQ ID NO: 290456 - RNA, 19 nt, Human
caggcggugucucuccugu

SEQ ID NO: 290457 - RNA, 23 nt, Human
caucuuagaucuccccuuccccc

SEQ ID NO: 290458 - RNA, 19 nt, Human
cccaagucugggccugagg

SEQ ID NO: 290459 - RNA, 20 nt, Human
cccccaggagauaggacccc

SEQ ID NO: 290460 - RNA, 19 nt, Human
ccccuaaaccuccccuggg

SEQ ID NO: 290461 - RNA, 21 nt, Human
ccccuggguccuaggaccacc

SEQ ID NO: 290462 - RNA, 24 nt, Human
cccuggguccuaggaccaccugac

SEQ ID NO: 290463 - RNA, 21 nt, Human
ccugccguggcagcacagcuu

SEQ ID NO: 290464 - RNA, 25 nt, Human
ccugccguggcagcacagcuucugu

SEQ ID NO: 290465 - RNA, 20 nt, Human
ccuggccucgggcacuggcc

SEQ ID NO: 290466 - RNA, 21 nt, Human
cggaggcaaauggaagaaagg

SEQ ID NO: 290467 - RNA, 18 nt, Human
cuguccagcuguggacag

SEQ ID NO: 290468 - RNA, 19 nt, Human
gcagaguuccagagaggcc

SEQ ID NO: 290469 - RNA, 18 nt, Human
gcuuggggauggccaggc

SEQ ID NO: 290470 - RNA, 19 nt, Human
ggaccccuaaaccuccccu

SEQ ID NO: 290471 - RNA, 24 nt, Human
ggcacuggcuggccugggccugcc

SEQ ID NO: 290472 - RNA, 18 nt, Human
ggccucgggcacuggcug

SEQ ID NO: 290473 - RNA, 26 nt, Human
ggccucgggcacuggcuggccugggc

SEQ ID NO: 290474 - RNA, 23 nt, Human
gguggaaucauauuagagagucu

SEQ ID NO: 290475 - RNA, 19 nt, Human
guuccuguaacacccaagu

SEQ ID NO: 290476 - RNA, 23 nt, Human
ucccccaggagauaggaccccua

SEQ ID NO: 290477 - RNA, 22 nt, Human
ucuccagugaggaggggacccu

SEQ ID NO: 290478 - RNA, 26 nt, Human
ucuugaacgccaagaugaagcaagcu

SEQ ID NO: 290479 - RNA, 21 nt, Human
ugaaaggaaugaaccaccgca

SEQ ID NO: 290480 - RNA, 22 nt, Human
ugauguucuagguuaauccccu

SEQ ID NO: 290481 - RNA, 20 nt, Human
uggacaggaccuccacggcc

SEQ ID NO: 290482 - RNA, 21 nt, Human
uggccaggcugccggucuggg

SEQ ID NO: 290483 - RNA, 23 nt, Human
uggccaggcugccggucuggggc

SEQ ID NO: 290484 - RNA, 25 nt, Human
ugguuuauucuuuuggccauuuccc

SEQ ID NO: 290485 - RNA, 22 nt, Human
uguggacaggaccuccacggcc

SEQ ID NO: 290486 - RNA, 21 nt, Human
uuggccauuucccaucuucca

SEQ ID NO: 290487 - RNA, 18 nt, Human
aaaggucuaaauuccugg

SEQ ID NO: 290488 - RNA, 19 nt, Human
aacagagcccccaggauga

SEQ ID NO: 290489 - RNA, 19 nt, Human
acacuggcacaucccacag

SEQ ID NO: 290490 - RNA, 23 nt, Human
agcccccaggaugaagagagugg

SEQ ID NO: 290491 - RNA, 23 nt, Human
aggguaagggcuccucagcuccc

SEQ ID NO: 290492 - RNA, 22 nt, Human
cacaucccacagcaaggacuca

SEQ ID NO: 290493 - RNA, 19 nt, Human
cagcaaggacucagcccuc

SEQ ID NO: 290494 - RNA, 19 nt, Human
cagcucccucccuggacuc

SEQ ID NO: 290495 - RNA, 22 nt, Human
cccacagcaaggacucagcccu

SEQ ID NO: 290496 - RNA, 23 nt, Human
cggaagaauucaaagaggaaggg

SEQ ID NO: 290497 - RNA, 19 nt, Human
cuccucagcucccucccug

SEQ ID NO: 290498 - RNA, 19 nt, Human
cugggaaguugcaaagaaa

SEQ ID NO: 290499 - RNA, 20 nt, Human
gacucagcccucaacggcgg

SEQ ID NO: 290500 - RNA, 23 nt, Human
gaggggaguggugggaggguaag

SEQ ID NO: 290501 - RNA, 18 nt, Human
gcccucaacggcggcggc

SEQ ID NO: 290502 - RNA, 20 nt, Human
ggggaguggugggaggguaa

SEQ ID NO: 290503 - RNA, 25 nt, Human
gucaccccuucccccggaagaauuc

SEQ ID NO: 290504 - RNA, 22 nt, Human
ucaacggcggcggcugggucuu

SEQ ID NO: 290505 - RNA, 21 nt, Human
ucaccccuucccccggaagaa

SEQ ID NO: 290506 - RNA, 24 nt, Human
uccucagcucccucccuggacucc

SEQ ID NO: 290507 - RNA, 24 nt, Human
uggacucccaguucagucaccccu

SEQ ID NO: 290508 - RNA, 22 nt, Human
ugggaggggaguggugggaggg

SEQ ID NO: 290509 - RNA, 21 nt, Human
ugggaggguaagggcuccuca

SEQ ID NO: 290510 - RNA, 26 nt, Human
uggugggaggguaagggcuccucagc

SEQ ID NO: 290511 - RNA, 24 nt, Human
uguaacagagcccccaggaugaag

SEQ ID NO: 290512 - RNA, 19 nt, Human
uuauuguugcugggaaguu

SEQ ID NO: 290513 - RNA, 27 nt, Human
aaaaaacccaaaacaaaacuaaaaaca

SEQ ID NO: 290514 - RNA, 24 nt, Human
aaaaacagggaaaagcuuauaaaa

SEQ ID NO: 290515 - RNA, 24 nt, Human
aaaaacccaaaacaaaacuaaaaa

SEQ ID NO: 290516 - RNA, 24 nt, Human
aaaacaaaacuaaaaacagggaaa

SEQ ID NO: 290517 - RNA, 21 nt, Human
aaaaccuggaaucacugacca

SEQ ID NO: 290518 - RNA, 25 nt, Human
aaacagaaauaaaauucaugagcca

SEQ ID NO: 290519 - RNA, 24 nt, Human
aaccaauccguuuuuuaauucuua

SEQ ID NO: 290520 - RNA, 24 nt, Human
aagggguuauugagggaaccuaca

SEQ ID NO: 290521 - RNA, 20 nt, Human
acuaaaaacagggaaaagcu

SEQ ID NO: 290522 - RNA, 19 nt, Human
agaaagggguuauugaggg

SEQ ID NO: 290523 - RNA, 24 nt, Human
agcggcgggcggcguuccucgcgg

SEQ ID NO: 290524 - RNA, 21 nt, Human
aggcccaaaacuaccggcgcg

SEQ ID NO: 290525 - RNA, 23 nt, Human
agggguuauugagggaaccuaca

SEQ ID NO: 290526 - RNA, 18 nt, Human
augagccaaaaaacccaa

SEQ ID NO: 290527 - RNA, 18 nt, Human
caaaaaacccaaaacaaa

SEQ ID NO: 290528 - RNA, 23 nt, Human
caaaaaacccaaaacaaaacuaa

SEQ ID NO: 290529 - RNA, 23 nt, Human
caaaaaacccaaaacaaaacuaa

SEQ ID NO: 290530 - RNA, 20 nt, Human
caaaacaaaacuaaaaacag

SEQ ID NO: 290531 - RNA, 25 nt, Human
caaaacuaaaaacagggaaaagcuu

SEQ ID NO: 290532 - RNA, 19 nt, Human
cagcagaaagggguuauug

SEQ ID NO: 290533 - RNA, 23 nt, Human
cagggaaaagcuuauaaaacuaa

SEQ ID NO: 290534 - RNA, 22 nt, Human
ccaaaaaacccaaaacaaaacu

SEQ ID NO: 290535 - RNA, 23 nt, Human
ccaaaaaacccaaaacaaaacua

SEQ ID NO: 290536 - RNA, 26 nt, Human
ccaaaacaaaacuaaaaacagggaaa

SEQ ID NO: 290537 - RNA, 27 nt, Human
cggcgcgaggcgagcgaggaccgcggg

SEQ ID NO: 290538 - RNA, 24 nt, Human
gaacacuuacaaauuauuuaaaac

SEQ ID NO: 290539 - RNA, 24 nt, Human
gagccaaaaaacccaaaacaaaac

SEQ ID NO: 290540 - RNA, 25 nt, Human
gagcgagcgggagcgggcgggaguc

SEQ ID NO: 290541 - RNA, 23 nt, Human
gcgggagcgggcgggaguccgca

SEQ ID NO: 290542 - RNA, 21 nt, Human
ggagguguaggcccaaaacua

SEQ ID NO: 290543 - RNA, 25 nt, Human
ggcggggggaggggagguguaggcc

SEQ ID NO: 290544 - RNA, 21 nt, Human
uaaauucuugacauuacagaa

SEQ ID NO: 290545 - RNA, 21 nt, Human
uagaaacugaacacuuacaaa

SEQ ID NO: 290546 - RNA, 22 nt, Human
ugagccaaaaaacccaaaacaa

SEQ ID NO: 290547 - RNA, 22 nt, Human
uuaaauucuugacauuacagaa

SEQ ID NO: 290548 - RNA, 24 nt, Human
uucaugagccaaaaaacccaaaac

SEQ ID NO: 290549 - RNA, 18 nt, Human
acugguugggggugaaag

SEQ ID NO: 290550 - RNA, 18 nt, Human
agaaagggauuauggaug

SEQ ID NO: 290551 - RNA, 18 nt, Human
cagcagaaagggauuaug

SEQ ID NO: 290552 - RNA, 20 nt, Human
ccuggaaucgcugacuguuc

SEQ ID NO: 290553 - RNA, 23 nt, Human
cgcugacuguucagaaacuacac

SEQ ID NO: 290554 - RNA, 19 nt, Human
guagaaacugaaaauuuac

SEQ ID NO: 290555 - RNA, 20 nt, Human
gucacugguugggggugaaa

SEQ ID NO: 290556 - RNA, 19 nt, Human
uacacagauggaucauggg

SEQ ID NO: 290557 - RNA, 24 nt, Human
uagaaacugaaaauuuacaaacua

SEQ ID NO: 290558 - RNA, 20 nt, Human
ucaugggugguggugaacag

SEQ ID NO: 290559 - RNA, 19 nt, Human
ugaaagccaaaaacugcag

SEQ ID NO: 290560 - RNA, 22 nt, Human
uugaguggucaagucuuugguc

SEQ ID NO: 290561 - RNA, 22 nt, Human
cgccguccggcagcgaccagcg

SEQ ID NO: 290562 - RNA, 25 nt, Human
gugaugacugaaagguuauaaaucc

SEQ ID NO: 290563 - RNA, 23 nt, Human
uggaauaaaugacgacguaaacg

SEQ ID NO: 290564 - RNA, 20 nt, Human
aaaacauucagaaugucccc

SEQ ID NO: 290565 - RNA, 21 nt, Human
aaaagcccuucagggagccac

SEQ ID NO: 290566 - RNA, 21 nt, Human
aacccaauaauucacaagcac

SEQ ID NO: 290567 - RNA, 19 nt, Human
aaggggaaggggccccugg

SEQ ID NO: 290568 - RNA, 18 nt, Human
aaggggccccugggcugg

SEQ ID NO: 290569 - RNA, 19 nt, Human
agaaguacgcugcccaccc

SEQ ID NO: 290570 - RNA, 20 nt, Human
agagaaugucgaauagagag

SEQ ID NO: 290571 - RNA, 20 nt, Human
agagcuggaagaguuaggug

SEQ ID NO: 290572 - RNA, 21 nt, Human
aggaggcagugagauuugguu

SEQ ID NO: 290573 - RNA, 22 nt, Human
agggagccacugguggucaaga

SEQ ID NO: 290574 - RNA, 18 nt, Human
agggggugcucccuggaa

SEQ ID NO: 290575 - RNA, 19 nt, Human
agugaggcccuggaauggg

SEQ ID NO: 290576 - RNA, 20 nt, Human
auucagaaugucccccaccc

SEQ ID NO: 290577 - RNA, 22 nt, Human
caagaguuuccucugggagcuc

SEQ ID NO: 290578 - RNA, 21 nt, Human
cacccccgucccuaccccacc

SEQ ID NO: 290579 - RNA, 21 nt, Human
caccccuuaaauuuaccuuuc

SEQ ID NO: 290580 - RNA, 21 nt, Human
cacgggaaaacaaggccuccg

SEQ ID NO: 290581 - RNA, 19 nt, Human
cagaaugucccccaccccu

SEQ ID NO: 290582 - RNA, 22 nt, Human
cagcaagucuccaaugcugcca

SEQ ID NO: 290583 - RNA, 24 nt, Human
caugauggaucuaucaucuaucaa

SEQ ID NO: 290584 - RNA, 23 nt, Human
ccaaugcugccagccugggagau

SEQ ID NO: 290585 - RNA, 19 nt, Human
cccacccuugacuccacca

SEQ ID NO: 290586 - RNA, 20 nt, Human
ccccugggcugggagaugga

SEQ ID NO: 290587 - RNA, 23 nt, Human
ccccugggcugggagauggaaau

SEQ ID NO: 290588 - RNA, 28 nt, Human
cccgucccuaccccaccuuugguaacaa

SEQ ID NO: 290589 - RNA, 21 nt, Human
cccucuugggcaucagcuggg

SEQ ID NO: 290590 - RNA, 19 nt, Human
cccugcaugggagaagggc

SEQ ID NO: 290591 - RNA, 23 nt, Human
cccugcuucagggcuaaaauugg

SEQ ID NO: 290592 - RNA, 18 nt, Human
ccugacugaagcauagga

SEQ ID NO: 290593 - RNA, 19 nt, Human
cgcccuggucggccaugag

SEQ ID NO: 290594 - RNA, 18 nt, Human
cuccaccaucugcccaaa

SEQ ID NO: 290595 - RNA, 19 nt, Human
cugcccacccuugacucca

SEQ ID NO: 290596 - RNA, 26 nt, Human
cugcccacccuugacuccaccaucug

SEQ ID NO: 290597 - RNA, 22 nt, Human
cugcccuuuacugacauugucc

SEQ ID NO: 290598 - RNA, 20 nt, Human
cuggccggcgcugggggagg

SEQ ID NO: 290599 - RNA, 21 nt, Human
cuuagagcaaaaccaaggaaa

SEQ ID NO: 290600 - RNA, 21 nt, Human
cuugggcccuggcaggaaguc

SEQ ID NO: 290601 - RNA, 18 nt, Human
gaaacagaugacaguuuc

SEQ ID NO: 290602 - RNA, 18 nt, Human
gagaggaccuggacccug

SEQ ID NO: 290603 - RNA, 19 nt, Human
gagauuagcagaaccacag

SEQ ID NO: 290604 - RNA, 20 nt, Human
gagcaaaaccaaggaaagga

SEQ ID NO: 290605 - RNA, 21 nt, Human
gcucccuggaagucaagggaa

SEQ ID NO: 290606 - RNA, 18 nt, Human
ggaagggugauuuuucaa

SEQ ID NO: 290607 - RNA, 19 nt, Human
ggagauggaaaugagggga

SEQ ID NO: 290608 - RNA, 19 nt, Human
ggccuccgcuccacuccca

SEQ ID NO: 290609 - RNA, 21 nt, Human
gggaaggggccccugggcugg

SEQ ID NO: 290610 - RNA, 21 nt, Human
gggagauggaaaugaggggag

SEQ ID NO: 290611 - RNA, 24 nt, Human
gggcuccccaguucagcccugcuu

SEQ ID NO: 290612 - RNA, 22 nt, Human
ggggaaggggccccugggcugg

SEQ ID NO: 290613 - RNA, 21 nt, Human
gggguggagagugaggcccug

SEQ ID NO: 290614 - RNA, 18 nt, Human
ggguggagagugaggccc

SEQ ID NO: 290615 - RNA, 22 nt, Human
gucaagggaaggagcccaguca

SEQ ID NO: 290616 - RNA, 24 nt, Human
uaaaaacauucagaauguccccca

SEQ ID NO: 290617 - RNA, 18 nt, Human
uaaaaagaacuaucagug

SEQ ID NO: 290618 - RNA, 26 nt, Human
uaaaaagaacuaucagugaucaaagg

SEQ ID NO: 290619 - RNA, 24 nt, Human
uaacccaauaauucacaagcacaa

SEQ ID NO: 290620 - RNA, 22 nt, Human
uagcaaaacaauccaaagagaa

SEQ ID NO: 290621 - RNA, 24 nt, Human
uaggacuuagagcaaaaccaagga

SEQ ID NO: 290622 - RNA, 18 nt, Human
ucagggagccacuggugg

SEQ ID NO: 290623 - RNA, 21 nt, Human
uccaccaucugcccaaaucga

SEQ ID NO: 290624 - RNA, 21 nt, Human
ucccacccccgucccuacccc

SEQ ID NO: 290625 - RNA, 23 nt, Human
uggaaaugaggggagaggaccug

SEQ ID NO: 290626 - RNA, 19 nt, Human
uggaaugggcauuugggag

SEQ ID NO: 290627 - RNA, 18 nt, Human
uggcggaaacagaugaca

SEQ ID NO: 290628 - RNA, 20 nt, Human
ugggagaagggccagcgugg

SEQ ID NO: 290629 - RNA, 20 nt, Human
ugggagcucccagggaaagg

SEQ ID NO: 290630 - RNA, 23 nt, Human
ugggagcuggccggcgcuggggg

SEQ ID NO: 290631 - RNA, 23 nt, Human
uguccuaaaaacauucagaaugu

SEQ ID NO: 290632 - RNA, 26 nt, Human
uucaagauauaaaaagaacuaucagu

SEQ ID NO: 290633 - RNA, 20 nt, Human
uucagaaugucccccacccc

SEQ ID NO: 290634 - RNA, 22 nt, Human
uucagggagccacuggugguca

SEQ ID NO: 290635 - RNA, 18 nt, Human
uugggagcuggccggcgc

SEQ ID NO: 290636 - RNA, 19 nt, Human
uugguaacaaaagcccuuc

SEQ ID NO: 290637 - RNA, 20 nt, Human
uuucaggugaaaagaguggg

SEQ ID NO: 290638 - RNA, 25 nt, Human
aaaaaaacugaaaacaacaaacaaa

SEQ ID NO: 290639 - RNA, 20 nt, Human
aaaaaacugaaaacaacaaa

SEQ ID NO: 290640 - RNA, 23 nt, Human
aaaaacaacaaaaaauacuguac

SEQ ID NO: 290641 - RNA, 24 nt, Human
aaaaacaacaaaaaauacuguaca

SEQ ID NO: 290642 - RNA, 19 nt, Human
aaaaaggcuuccgcccgcu

SEQ ID NO: 290643 - RNA, 22 nt, Human
aaaaaucccuuagucuuauaga

SEQ ID NO: 290644 - RNA, 19 nt, Human
aaaacacaagaaaaaaucu

SEQ ID NO: 290645 - RNA, 18 nt, Human
aaaaucccaaauauccaa

SEQ ID NO: 290646 - RNA, 28 nt, Human
aaacaaaaaucaaaaagaaagcccaaaa

SEQ ID NO: 290647 - RNA, 27 nt, Human
aaacaaaauccuuuuuaaaacagaacc

SEQ ID NO: 290648 - RNA, 23 nt, Human
aaagaaacaaacaaaaaaaacua

SEQ ID NO: 290649 - RNA, 24 nt, Human
aaagaaacaaacaaaaaaaacuaa

SEQ ID NO: 290650 - RNA, 19 nt, Human
aaagcccaaaaaaaggcua

SEQ ID NO: 290651 - RNA, 20 nt, Human
aaaggcuuccgcccgcucca

SEQ ID NO: 290652 - RNA, 24 nt, Human
aaagugcugggauuacaggcguga

SEQ ID NO: 290653 - RNA, 24 nt, Human
aaagugcugggauuacagguguga

SEQ ID NO: 290654 - RNA, 24 nt, Human
aaauuuuaucaacaauauaguauu

SEQ ID NO: 290655 - RNA, 25 nt, Human
aacaaaaaucccuuagucuuauaga

SEQ ID NO: 290656 - RNA, 24 nt, Human
aacaaaaguuuagguaaacuaaag

SEQ ID NO: 290657 - RNA, 18 nt, Human
aacaacaaaaaaacugaa

SEQ ID NO: 290658 - RNA, 23 nt, Human
aacaacaaaaaaacugaaaacaa

SEQ ID NO: 290659 - RNA, 18 nt, Human
aacauagauaguaaccau

SEQ ID NO: 290660 - RNA, 25 nt, Human
aacauuuuuuucuuuuuggggggcc

SEQ ID NO: 290661 - RNA, 19 nt, Human
aaccaagaagagggugccc

SEQ ID NO: 290662 - RNA, 25 nt, Human
aacccgcacaacacugaccaaaaga

SEQ ID NO: 290663 - RNA, 18 nt, Human
aaccgcccccauuaaaca

SEQ ID NO: 290664 - RNA, 21 nt, Human
aacuaucaugugaaaagggga

SEQ ID NO: 290665 - RNA, 20 nt, Human
aagaaagcccaaaaaaaggc

SEQ ID NO: 290666 - RNA, 18 nt, Human
aagaagaaagauaagaaa

SEQ ID NO: 290667 - RNA, 19 nt, Human
aagaagaaagauaagaaau

SEQ ID NO: 290668 - RNA, 20 nt, Human
aagaagaaauuauuaagaag

SEQ ID NO: 290669 - RNA, 18 nt, Human
aagaagcagucaugugcc

SEQ ID NO: 290670 - RNA, 20 nt, Human
aagaagcagucaugugccuu

SEQ ID NO: 290671 - RNA, 18 nt, Human
aagaagccaacccuaaac

SEQ ID NO: 290672 - RNA, 24 nt, Human
aagaggaagaagaaauuauuaaga

SEQ ID NO: 290673 - RNA, 29 nt, Human
aagaggaagaagaaauuauuaagaagcca

SEQ ID NO: 290674 - RNA, 23 nt, Human
aagccaacccuaaacaugcaugu

SEQ ID NO: 290675 - RNA, 22 nt, Human
aaggccugguagaguauggggg

SEQ ID NO: 290676 - RNA, 18 nt, Human
aagugcugggauuacagg

SEQ ID NO: 290677 - RNA, 19 nt, Human
aagugcugggauuacaggc

SEQ ID NO: 290678 - RNA, 19 nt, Human
aagugcugggauuacaggc

SEQ ID NO: 290679 - RNA, 26 nt, Human
aagugcugggauuacaggcgugagcc

SEQ ID NO: 290680 - RNA, 19 nt, Human
aagugcugggauuacaggu

SEQ ID NO: 290681 - RNA, 26 nt, Human
aagugcugggauuacaggugugagcc

SEQ ID NO: 290682 - RNA, 21 nt, Human
aaguguccaccauugauaaau

SEQ ID NO: 290683 - RNA, 19 nt, Human
aaguuccuuccugauauuc

SEQ ID NO: 290684 - RNA, 23 nt, Human
aauaacagacaacagaagaaaac

SEQ ID NO: 290685 - RNA, 20 nt, Human
aauacauacucacaagugug

SEQ ID NO: 290686 - RNA, 20 nt, Human
aaugaaauaagauaccuaca

SEQ ID NO: 290687 - RNA, 21 nt, Human
aaugugugugugugugcacgu

SEQ ID NO: 290688 - RNA, 23 nt, Human
acaaaaaaacugaaaacaacaaa

SEQ ID NO: 290689 - RNA, 18 nt, Human
acaacaaaaaauacugua

SEQ ID NO: 290690 - RNA, 30 nt, Human
acaacaaacaaaaaucaaaaagaaagcccu

SEQ ID NO: 290691 - RNA, 18 nt, Human
acaacacuugaaauaucu

SEQ ID NO: 290692 - RNA, 22 nt, Human
acaugcaccuggaaaaccagua

SEQ ID NO: 290693 - RNA, 19 nt, Human
acccaggcuggagugcagu

SEQ ID NO: 290694 - RNA, 25 nt, Human
acccgccucggccucccaaagugcu

SEQ ID NO: 290695 - RNA, 22 nt, Human
acgccaggcuaauuuuuuguau

SEQ ID NO: 290696 - RNA, 22 nt, Human
acgugugugugugugugugugu

SEQ ID NO: 290697 - RNA, 23 nt, Human
acguguguguguguguguguguu

SEQ ID NO: 290698 - RNA, 20 nt, Human
acucccccccccaccccaac

SEQ ID NO: 290699 - RNA, 18 nt, Human
acucugauaguuaaaagu

SEQ ID NO: 290700 - RNA, 25 nt, Human
acugaaaacaacaaacaaaaaucaa

SEQ ID NO: 290701 - RNA, 19 nt, Human
acugaaccagaguguuuug

SEQ ID NO: 290702 - RNA, 18 nt, Human
acugcaagcuccgccucc

SEQ ID NO: 290703 - RNA, 23 nt, Human
acuggucuugaacuccugaccuc

SEQ ID NO: 290704 - RNA, 21 nt, Human
acuguagauuugaugcaccaa

SEQ ID NO: 290705 - RNA, 20 nt, Human
acuguuucugcuguugucaa

SEQ ID NO: 290706 - RNA, 23 nt, Human
agaaaaacaagaauagcuauuaa

SEQ ID NO: 290707 - RNA, 27 nt, Human
agaaacagcaugagaguaccgguaccc

SEQ ID NO: 290708 - RNA, 23 nt, Human
agaagaggagagagagaagagga

SEQ ID NO: 290709 - RNA, 21 nt, Human
agaaggaaggcauaggggaga

SEQ ID NO: 290710 - RNA, 25 nt, Human
agaaugaagagguaaacgaaaggga

SEQ ID NO: 290711 - RNA, 20 nt, Human
agagcagcugaggcaaaacc

SEQ ID NO: 290712 - RNA, 24 nt, Human
agaggaagaagaaauuauuaagaa

SEQ ID NO: 290713 - RNA, 25 nt, Human
agauauugacucccccccccacccc

SEQ ID NO: 290714 - RNA, 18 nt, Human
agcagcugaggcaaaacc

SEQ ID NO: 290715 - RNA, 20 nt, Human
agccaccacacccagccaaa

SEQ ID NO: 290716 - RNA, 21 nt, Human
agccagugccgagccagcccu

SEQ ID NO: 290717 - RNA, 24 nt, Human
agcuccgccucccggguucacgcu

SEQ ID NO: 290718 - RNA, 21 nt, Human
aggaagaagaaauuauuaaga

SEQ ID NO: 290719 - RNA, 22 nt, Human
aggaagaagaaauuauuaagaa

SEQ ID NO: 290720 - RNA, 20 nt, Human
aggaaggcauaggggagaau

SEQ ID NO: 290721 - RNA, 20 nt, Human
aggaaucauuauaaaggagg

SEQ ID NO: 290722 - RNA, 21 nt, Human
aggaaucauuauaaaggaggg

SEQ ID NO: 290723 - RNA, 21 nt, Human
aggauuuaagaaccucccuag

SEQ ID NO: 290724 - RNA, 24 nt, Human
aggcaaaaccucuccgguaugugg

SEQ ID NO: 290725 - RNA, 25 nt, Human
aggcuggagugcaguggcgccaucu

SEQ ID NO: 290726 - RNA, 24 nt, Human
aggugauccacccaccucggccuc

SEQ ID NO: 290727 - RNA, 18 nt, Human
aguagcugggacuacagg

SEQ ID NO: 290728 - RNA, 22 nt, Human
agugaaaaaaaauugaucugga

SEQ ID NO: 290729 - RNA, 20 nt, Human
agugcaguggcgccaucucg

SEQ ID NO: 290730 - RNA, 24 nt, Human
agugcaguggcgccaucucggcuc

SEQ ID NO: 290731 - RNA, 18 nt, Human
agugcugggauuacaggc

SEQ ID NO: 290732 - RNA, 19 nt, Human
agugguuuucuucaguaag

SEQ ID NO: 290733 - RNA, 24 nt, Human
aguuuauguuacaaaauuuacaca

SEQ ID NO: 290734 - RNA, 23 nt, Human
auaaaguuugauuugaagaagag

SEQ ID NO: 290735 - RNA, 27 nt, Human
auaagaaaaacaagaauagcuauuaau

SEQ ID NO: 290736 - RNA, 24 nt, Human
auacaucacaauagccacuugugu

SEQ ID NO: 290737 - RNA, 18 nt, Human
auagaacaauuaauacaa

SEQ ID NO: 290738 - RNA, 22 nt, Human
auagauuuaguauaugguuuua

SEQ ID NO: 290739 - RNA, 20 nt, Human
auaucugaauuaaaacccac

SEQ ID NO: 290740 - RNA, 18 nt, Human
aucauggcuguugauuca

SEQ ID NO: 290741 - RNA, 23 nt, Human
augaaaaagaaacaaacaaaaaa

SEQ ID NO: 290742 - RNA, 18 nt, Human
augaaaagaaacuuucuc

SEQ ID NO: 290743 - RNA, 21 nt, Human
auggacacaaaauagaauaac

SEQ ID NO: 290744 - RNA, 20 nt, Human
augggguuucaccguguuag

SEQ ID NO: 290745 - RNA, 19 nt, Human
augguuuuuguucugugug

SEQ ID NO: 290746 - RNA, 22 nt, Human
augugugugugugugcacgugu

SEQ ID NO: 290747 - RNA, 24 nt, Human
auuuaaaucuuccugaguuucucu

SEQ ID NO: 290748 - RNA, 22 nt, Human
auuucauucucuggcuuaaaga

SEQ ID NO: 290749 - RNA, 25 nt, Human
auuucauucucuggcuuaaagauga

SEQ ID NO: 290750 - RNA, 19 nt, Human
caaaacacugaaccagagu

SEQ ID NO: 290751 - RNA, 19 nt, Human
caaaaccucuccgguaugu

SEQ ID NO: 290752 - RNA, 28 nt, Human
caaacucugauaguuaaaaguuaagaag

SEQ ID NO: 290753 - RNA, 24 nt, Human
caaagugcugggauuacaggcgug

SEQ ID NO: 290754 - RNA, 24 nt, Human
caaagugcugggauuacaggugug

SEQ ID NO: 290755 - RNA, 23 nt, Human
caacaaaaaaacugaaaacaaca

SEQ ID NO: 290756 - RNA, 25 nt, Human
caacaacaaaaaaacugaaaacaac

SEQ ID NO: 290757 - RNA, 22 nt, Human
caacacgaaggagaaaaaacau

SEQ ID NO: 290758 - RNA, 23 nt, Human
caacacugaccaaaagaagagga

SEQ ID NO: 290759 - RNA, 19 nt, Human
caaguaauugcauguuuca

SEQ ID NO: 290760 - RNA, 26 nt, Human
cacaacacugaccaaaagaagaggag

SEQ ID NO: 290761 - RNA, 22 nt, Human
cacccaccucggccucccaaag

SEQ ID NO: 290762 - RNA, 23 nt, Human
cacccaccucggccucccaaagu

SEQ ID NO: 290763 - RNA, 19 nt, Human
cacccagccaaaaauaacu

SEQ ID NO: 290764 - RNA, 24 nt, Human
cacccaggcuggagugcaguggcg

SEQ ID NO: 290765 - RNA, 22 nt, Human
caccccaaccgcccccauuaaa

SEQ ID NO: 290766 - RNA, 23 nt, Human
caccccaaccgcccccauuaaac

SEQ ID NO: 290767 - RNA, 23 nt, Human
cacccgccucggccucccaaagu

SEQ ID NO: 290768 - RNA, 18 nt, Human
caccguguuagccaggau

SEQ ID NO: 290769 - RNA, 24 nt, Human
caccguguuagccaggauggucuc

SEQ ID NO: 290770 - RNA, 24 nt, Human
caccucggccucccaaagugcugg

SEQ ID NO: 290771 - RNA, 22 nt, Human
cacgcuauucuccugccucagc

SEQ ID NO: 290772 - RNA, 18 nt, Human
cacggagacugcgacugc

SEQ ID NO: 290773 - RNA, 24 nt, Human
cacgugugugugugugugugugag

SEQ ID NO: 290774 - RNA, 23 nt, Human
cacgugugugugugugugugugu

SEQ ID NO: 290775 - RNA, 23 nt, Human
cacgugugugugugugugugugu

SEQ ID NO: 290776 - RNA, 19 nt, Human
cacuaacaacaacaaaaaa

SEQ ID NO: 290777 - RNA, 20 nt, Human
cacuaacaacaacaaaaaaa

SEQ ID NO: 290778 - RNA, 25 nt, Human
cacugaaccagaguguuuugguuuu

SEQ ID NO: 290779 - RNA, 26 nt, Human
cauacaucacaauagccacuugugug

SEQ ID NO: 290780 - RNA, 26 nt, Human
cauucaaaauaguuucuaauggucau

SEQ ID NO: 290781 - RNA, 21 nt, Human
ccaaagugcugggauuacagg

SEQ ID NO: 290782 - RNA, 21 nt, Human
ccaaagugcugggauuacagg

SEQ ID NO: 290783 - RNA, 22 nt, Human
ccaaagugcugggauuacaggc

SEQ ID NO: 290784 - RNA, 22 nt, Human
ccaaagugcugggauuacaggc

SEQ ID NO: 290785 - RNA, 24 nt, Human
ccaaagugcugggauuacaggcgu

SEQ ID NO: 290786 - RNA, 24 nt, Human
ccaaagugcugggauuacaggugu

SEQ ID NO: 290787 - RNA, 28 nt, Human
ccaacccuaaacaugcauguuaacaaaa

SEQ ID NO: 290788 - RNA, 25 nt, Human
ccaagacagccuuauauuacaucau

SEQ ID NO: 290789 - RNA, 22 nt, Human
ccaccgcgcccggcccacucaa

SEQ ID NO: 290790 - RNA, 19 nt, Human
ccccaccccaaccgccccc

SEQ ID NO: 290791 - RNA, 20 nt, Human
ccccccaccccaaccgcccc

SEQ ID NO: 290792 - RNA, 26 nt, Human
ccccccaccccaaccgcccccauuaa

SEQ ID NO: 290793 - RNA, 19 nt, Human
ccccccccaccccaaccgc

SEQ ID NO: 290794 - RNA, 20 nt, Human
cccccccccaccccaaccgc

SEQ ID NO: 290795 - RNA, 22 nt, Human
cccccccccaccccaaccgccc

SEQ ID NO: 290796 - RNA, 23 nt, Human
cccgaguagcugggacuacaggc

SEQ ID NO: 290797 - RNA, 24 nt, Human
cccgaguagcugggacuacaggcg

SEQ ID NO: 290798 - RNA, 22 nt, Human
cccgcacaacacugaccaaaag

SEQ ID NO: 290799 - RNA, 24 nt, Human
cccuuuguguugaaguuuuuuuca

SEQ ID NO: 290800 - RNA, 18 nt, Human
ccgggcugccugugcugc

SEQ ID NO: 290801 - RNA, 24 nt, Human
ccugaccucaggugauccacccac

SEQ ID NO: 290802 - RNA, 20 nt, Human
ccugaccucgugauccaccc

SEQ ID NO: 290803 - RNA, 23 nt, Human
ccugccucagccucccgaguagc

SEQ ID NO: 290804 - RNA, 21 nt, Human
ccuuauauuacaucauggcug

SEQ ID NO: 290805 - RNA, 20 nt, Human
ccuuggaacauuaacaacac

SEQ ID NO: 290806 - RNA, 18 nt, Human
cgaaagggagaaaaaagg

SEQ ID NO: 290807 - RNA, 18 nt, Human
cgacaguucgccgacugc

SEQ ID NO: 290808 - RNA, 18 nt, Human
cgcccgcuccacggagac

SEQ ID NO: 290809 - RNA, 19 nt, Human
cgccucccggguucacgcu

SEQ ID NO: 290810 - RNA, 21 nt, Human
cgcuccacggagacugcgacu

SEQ ID NO: 290811 - RNA, 20 nt, Human
cguucaguccucauagugcu

SEQ ID NO: 290812 - RNA, 25 nt, Human
cuacaggcgcccgccaccacgccag

SEQ ID NO: 290813 - RNA, 24 nt, Human
cucagccucccgaguagcugggac

SEQ ID NO: 290814 - RNA, 23 nt, Human
cucauagugcucugcaaucagcc

SEQ ID NO: 290815 - RNA, 23 nt, Human
cucaugcacacaaugguacugag

SEQ ID NO: 290816 - RNA, 24 nt, Human
cucccccccccaccccaaccgccc

SEQ ID NO: 290817 - RNA, 21 nt, Human
cucccggguucacgcuauucu

SEQ ID NO: 290818 - RNA, 24 nt, Human
cucccucugcauuuuuccuuaaaa

SEQ ID NO: 290819 - RNA, 24 nt, Human
cuccugaccucgugauccacccgc

SEQ ID NO: 290820 - RNA, 21 nt, Human
cucgcaguccgcagagcagcc

SEQ ID NO: 290821 - RNA, 26 nt, Human
cugaaaacaacaaacaaaaaucaaaa

SEQ ID NO: 290822 - RNA, 21 nt, Human
cugaaaagcuuuaaugugaug

SEQ ID NO: 290823 - RNA, 21 nt, Human
cugaagcccuagaaguaacag

SEQ ID NO: 290824 - RNA, 18 nt, Human
cugcacugucucuuccau

SEQ ID NO: 290825 - RNA, 23 nt, Human
cugccucagccucccgaguagcu

SEQ ID NO: 290826 - RNA, 21 nt, Human
cugugcugccugugucgccgc

SEQ ID NO: 290827 - RNA, 20 nt, Human
cuuaaaaaugucucuugccc

SEQ ID NO: 290828 - RNA, 18 nt, Human
cuucccacaauacaaaca

SEQ ID NO: 290829 - RNA, 24 nt, Human
cuugcucugucacccaggcuggag

SEQ ID NO: 290830 - RNA, 22 nt, Human
gaaagcacaagguucacuagga

SEQ ID NO: 290831 - RNA, 21 nt, Human
gaaauaacagacaacagaaga

SEQ ID NO: 290832 - RNA, 18 nt, Human
gaaucauuauaaaggagg

SEQ ID NO: 290833 - RNA, 24 nt, Human
gacacaauauuaguuaaaacacag

SEQ ID NO: 290834 - RNA, 24 nt, Human
gaccucaggugauccacccaccuc

SEQ ID NO: 290835 - RNA, 22 nt, Human
gaccucgugauccacccgccuc

SEQ ID NO: 290836 - RNA, 22 nt, Human
gaccucgugauccacccgccuc

SEQ ID NO: 290837 - RNA, 24 nt, Human
gaccucgugauccacccgccucgg

SEQ ID NO: 290838 - RNA, 24 nt, Human
gacuggucuugaacuccugaccuc

SEQ ID NO: 290839 - RNA, 24 nt, Human
gagacucacuaacaacaacaaaaa

SEQ ID NO: 290840 - RNA, 18 nt, Human
gagaugggguuucaccgu

SEQ ID NO: 290841 - RNA, 24 nt, Human
gagaugggguuucaccguguuagc

SEQ ID NO: 290842 - RNA, 20 nt, Human
gaguagcugggacuacaggc

SEQ ID NO: 290843 - RNA, 25 nt, Human
gaguagcugggacuacaggcgcccg

SEQ ID NO: 290844 - RNA, 18 nt, Human
gauuacaggcgugagcca

SEQ ID NO: 290845 - RNA, 22 nt, Human
gauuacaggcgugagccaccgc

SEQ ID NO: 290846 - RNA, 22 nt, Human
gauuacaggcgugagccaccgc

SEQ ID NO: 290847 - RNA, 18 nt, Human
gauuacaggugugagcca

SEQ ID NO: 290848 - RNA, 21 nt, Human
gauuacaggugugagccacca

SEQ ID NO: 290849 - RNA, 22 nt, Human
gauuacaggugugagccaccac

SEQ ID NO: 290850 - RNA, 22 nt, Human
gcaaacagagaaacagcaugag

SEQ ID NO: 290851 - RNA, 18 nt, Human
gcaccuggaaaaccagua

SEQ ID NO: 290852 - RNA, 26 nt, Human
gcacuaaccauuuauuauuauuuucu

SEQ ID NO: 290853 - RNA, 18 nt, Human
gccaggcuaauuuuuugu

SEQ ID NO: 290854 - RNA, 25 nt, Human
gccucccggguucacgcuauucucc

SEQ ID NO: 290855 - RNA, 23 nt, Human
gccucggccucccaaagugcugg

SEQ ID NO: 290856 - RNA, 18 nt, Human
gccugguagaguaugggg

SEQ ID NO: 290857 - RNA, 25 nt, Human
gcucugucacccaggcuggagugca

SEQ ID NO: 290858 - RNA, 18 nt, Human
gcugagguuguuucugag

SEQ ID NO: 290859 - RNA, 20 nt, Human
gcuggagugcaguggcgcca

SEQ ID NO: 290860 - RNA, 19 nt, Human
ggacuacaggcuuaaaaug

SEQ ID NO: 290861 - RNA, 20 nt, Human
ggagaggagagggguugaug

SEQ ID NO: 290862 - RNA, 19 nt, Human
ggagaugggguuucaccgu

SEQ ID NO: 290863 - RNA, 24 nt, Human
ggauggucucaaucuccugaccuc

SEQ ID NO: 290864 - RNA, 22 nt, Human
gggguuucaccguguuagccag

SEQ ID NO: 290865 - RNA, 24 nt, Human
ggguugaugugacuaaugccuaaa

SEQ ID NO: 290866 - RNA, 19 nt, Human
ggucuugaacuccugaccu

SEQ ID NO: 290867 - RNA, 18 nt, Human
gguucauuccuauaucau

SEQ ID NO: 290868 - RNA, 18 nt, Human
gguuuuguuuuuuguuug

SEQ ID NO: 290869 - RNA, 24 nt, Human
gugauccacccaccucggccuccc

SEQ ID NO: 290870 - RNA, 24 nt, Human
gugauccacccgccucggccuccc

SEQ ID NO: 290871 - RNA, 30 nt, Human
gugugcacgugugugugugugugugugugg

SEQ ID NO: 290872 - RNA, 18 nt, Human
guuaaauuccuuuucuuu

SEQ ID NO: 290873 - RNA, 21 nt, Human
guuauugugcugcacugucuc

SEQ ID NO: 290874 - RNA, 18 nt, Human
uaaaacacagguaaaguu

SEQ ID NO: 290875 - RNA, 21 nt, Human
uaaaacagaaccauuuuuuga

SEQ ID NO: 290876 - RNA, 19 nt, Human
uaaagaaagcacaagguuc

SEQ ID NO: 290877 - RNA, 25 nt, Human
uaaauacacauucugaauuaaacaa

SEQ ID NO: 290878 - RNA, 21 nt, Human
uaaaugugugugugugugcac

SEQ ID NO: 290879 - RNA, 20 nt, Human
uaacagacaacagaagaaaa

SEQ ID NO: 290880 - RNA, 24 nt, Human
uaacagacaacagaagaaaacuaa

SEQ ID NO: 290881 - RNA, 21 nt, Human
uaacagguuuccaaggccaga

SEQ ID NO: 290882 - RNA, 19 nt, Human
uaacauagauaguaaccau

SEQ ID NO: 290883 - RNA, 21 nt, Human
uaagaaaaacaagaauagcua

SEQ ID NO: 290884 - RNA, 18 nt, Human
uaagaauacacaaaauua

SEQ ID NO: 290885 - RNA, 20 nt, Human
uaagaauacacaaaauuacu

SEQ ID NO: 290886 - RNA, 19 nt, Human
uaagucugauuauaaaauc

SEQ ID NO: 290887 - RNA, 19 nt, Human
uaaguguauacaccaagac

SEQ ID NO: 290888 - RNA, 22 nt, Human
uaauaaacauucaaauaucauc

SEQ ID NO: 290889 - RNA, 20 nt, Human
uaaugugauguaucuagccc

SEQ ID NO: 290890 - RNA, 24 nt, Human
uaauuuuuuguauuuuuaguggag

SEQ ID NO: 290891 - RNA, 25 nt, Human
uaauuuuuuguauuuuuaguggaga

SEQ ID NO: 290892 - RNA, 23 nt, Human
uacaggcgugagccaccgcgccc

SEQ ID NO: 290893 - RNA, 24 nt, Human
uacaggugugagccaccacaccca

SEQ ID NO: 290894 - RNA, 23 nt, Human
uacaguaucaaaaaugacacaga

SEQ ID NO: 290895 - RNA, 23 nt, Human
uacaguuuguuguauuaacccgc

SEQ ID NO: 290896 - RNA, 23 nt, Human
uacaguuuguuguauuaacccgc

SEQ ID NO: 290897 - RNA, 18 nt, Human
uaccauagcuagaaaauu

SEQ ID NO: 290898 - RNA, 23 nt, Human
uaccaugaaaaagaaacaaacaa

SEQ ID NO: 290899 - RNA, 24 nt, Human
uaccaugaaaaagaaacaaacaaa

SEQ ID NO: 290900 - RNA, 20 nt, Human
uaccuaaacuaacuauaaau

SEQ ID NO: 290901 - RNA, 22 nt, Human
uagaauaacaaaaaucccuuag

SEQ ID NO: 290902 - RNA, 21 nt, Human
uaguggagaugggguuucacc

SEQ ID NO: 290903 - RNA, 24 nt, Human
uaguggagaugggguuucaccgug

SEQ ID NO: 290904 - RNA, 26 nt, Human
uaguggagaugggguuucaccguguu

SEQ ID NO: 290905 - RNA, 25 nt, Human
uauguuagugaauauuuucaaaaca

SEQ ID NO: 290906 - RNA, 21 nt, Human
uauuaagaagccaacccuaaa

SEQ ID NO: 290907 - RNA, 19 nt, Human
uauucuccugccucagccu

SEQ ID NO: 290908 - RNA, 24 nt, Human
uauucugcauccaauuuuccuaaa

SEQ ID NO: 290909 - RNA, 26 nt, Human
ucaaagugaaaaaaaauugaucugga

SEQ ID NO: 290910 - RNA, 21 nt, Human
ucaacaucaacaauagccaca

SEQ ID NO: 290911 - RNA, 22 nt, Human
ucaacaucaacaauagccacaa

SEQ ID NO: 290912 - RNA, 21 nt, Human
ucaaccuucuuacuuccaaag

SEQ ID NO: 290913 - RNA, 24 nt, Human
ucacccaggcuggagugcaguggc

SEQ ID NO: 290914 - RNA, 24 nt, Human
ucaccguguuagccaggauggucu

SEQ ID NO: 290915 - RNA, 18 nt, Human
ucacugcaagcuccgccu

SEQ ID NO: 290916 - RNA, 19 nt, Human
ucacugcaagcuccgccuc

SEQ ID NO: 290917 - RNA, 24 nt, Human
ucacugcaagcuccgccucccggg

SEQ ID NO: 290918 - RNA, 19 nt, Human
ucacuuacaaucacuaaac

SEQ ID NO: 290919 - RNA, 19 nt, Human
ucagagaguaguuuggcua

SEQ ID NO: 290920 - RNA, 23 nt, Human
ucagccucccgaguagcugggac

SEQ ID NO: 290921 - RNA, 20 nt, Human
ucaggugauccacccaccuc

SEQ ID NO: 290922 - RNA, 21 nt, Human
ucaguaauaccaugaaaaaga

SEQ ID NO: 290923 - RNA, 23 nt, Human
uccaacuuugaguccuauuugau

SEQ ID NO: 290924 - RNA, 23 nt, Human
ucccaaagugcugggauuacagg

SEQ ID NO: 290925 - RNA, 24 nt, Human
ucccaaagugcugggauuacaggc

SEQ ID NO: 290926 - RNA, 18 nt, Human
ucccagaaguaaagaccu

SEQ ID NO: 290927 - RNA, 27 nt, Human
uccccaaguuuaaaauuuucaaccagg

SEQ ID NO: 290928 - RNA, 28 nt, Human
uccccaaguuuaaaauuuucaaccaggc

SEQ ID NO: 290929 - RNA, 24 nt, Human
ucccgaguagcugggacuacaggc

SEQ ID NO: 290930 - RNA, 21 nt, Human
ucccggguucacgcuauucuc

SEQ ID NO: 290931 - RNA, 24 nt, Human
ucccggguucacgcuauucuccug

SEQ ID NO: 290932 - RNA, 21 nt, Human
uccuaaucugaaaacgacacu

SEQ ID NO: 290933 - RNA, 18 nt, Human
uccucaccaaugaaauua

SEQ ID NO: 290934 - RNA, 21 nt, Human
uccucaugcacacaaugguac

SEQ ID NO: 290935 - RNA, 23 nt, Human
ucgcaguccgcagagcagccgga

SEQ ID NO: 290936 - RNA, 18 nt, Human
ucggccucccaaagugcu

SEQ ID NO: 290937 - RNA, 24 nt, Human
ucuaccaaacuuaauugaauccau

SEQ ID NO: 290938 - RNA, 24 nt, Human
ucuccugccucagccucccgagua

SEQ ID NO: 290939 - RNA, 19 nt, Human
ucucuggcuuaaagaugag

SEQ ID NO: 290940 - RNA, 22 nt, Human
ucucuggcuuaaagaugagaau

SEQ ID NO: 290941 - RNA, 18 nt, Human
ucucuuggcaaugaauaa

SEQ ID NO: 290942 - RNA, 24 nt, Human
ucugucacccaggcuggagugcag

SEQ ID NO: 290943 - RNA, 23 nt, Human
ucuugaacuccugaccucaggug

SEQ ID NO: 290944 - RNA, 22 nt, Human
ucuugcucugucacccaggcug

SEQ ID NO: 290945 - RNA, 23 nt, Human
ucuugcucugucacccaggcugg

SEQ ID NO: 290946 - RNA, 24 nt, Human
ucuugcucugucacccaggcugga

SEQ ID NO: 290947 - RNA, 21 nt, Human
ugaaaacgcuacuuaaccugc

SEQ ID NO: 290948 - RNA, 22 nt, Human
ugaauacauacucacaagugug

SEQ ID NO: 290949 - RNA, 22 nt, Human
ugacagcagagagacacaaaca

SEQ ID NO: 290950 - RNA, 21 nt, Human
ugaccucaggugauccaccca

SEQ ID NO: 290951 - RNA, 24 nt, Human
ugaccucaggugauccacccaccu

SEQ ID NO: 290952 - RNA, 18 nt, Human
ugacucccccccccaccc

SEQ ID NO: 290953 - RNA, 19 nt, Human
ugacucccccccccacccc

SEQ ID NO: 290954 - RNA, 18 nt, Human
ugagacagagucuugcuc

SEQ ID NO: 290955 - RNA, 22 nt, Human
ugagacagagucuugcucuguc

SEQ ID NO: 290956 - RNA, 26 nt, Human
ugagcuagaauaacaaaaaucccuua

SEQ ID NO: 290957 - RNA, 19 nt, Human
ugaguacaaucaacauaaa

SEQ ID NO: 290958 - RNA, 22 nt, Human
ugauaaaaacaacaaaaaauac

SEQ ID NO: 290959 - RNA, 24 nt, Human
ugauccacccaccucggccuccca

SEQ ID NO: 290960 - RNA, 20 nt, Human
ugaucuguggaauccuucuu

SEQ ID NO: 290961 - RNA, 23 nt, Human
ugauucagagcaaacagagaaac

SEQ ID NO: 290962 - RNA, 20 nt, Human
ugauuuguuuagucuauuuu

SEQ ID NO: 290963 - RNA, 20 nt, Human
ugcaauacagaaccugaaau

SEQ ID NO: 290964 - RNA, 22 nt, Human
ugcacauacauuuuucugagca

SEQ ID NO: 290965 - RNA, 21 nt, Human
ugcacgugugugugugugugu

SEQ ID NO: 290966 - RNA, 18 nt, Human
ugcagagagaaaauguga

SEQ ID NO: 290967 - RNA, 19 nt, Human
ugccaucuacagacaaaau

SEQ ID NO: 290968 - RNA, 24 nt, Human
ugccucagccucccgaguagcugg

SEQ ID NO: 290969 - RNA, 18 nt, Human
ugcgacugcuguagcggg

SEQ ID NO: 290970 - RNA, 24 nt, Human
ugcucugucacccaggcuggagug

SEQ ID NO: 290971 - RNA, 24 nt, Human
ugcugggauuacaggcgugagcca

SEQ ID NO: 290972 - RNA, 24 nt, Human
ugcugggauuacaggugugagcca

SEQ ID NO: 290973 - RNA, 22 nt, Human
ugcuguugucaacuugaacugc

SEQ ID NO: 290974 - RNA, 20 nt, Human
uggaacagcaugaguacaau

SEQ ID NO: 290975 - RNA, 20 nt, Human
uggaagaaaauuaaguuggu

SEQ ID NO: 290976 - RNA, 18 nt, Human
uggacuacaggcuuaaaa

SEQ ID NO: 290977 - RNA, 28 nt, Human
uggagugcaguggcgccauccuagcacg

SEQ ID NO: 290978 - RNA, 23 nt, Human
uggagugcaguggcgccaucucg

SEQ ID NO: 290979 - RNA, 24 nt, Human
uggagugcaguggcgccaucucgg

SEQ ID NO: 290980 - RNA, 18 nt, Human
uggauaccuuucagagag

SEQ ID NO: 290981 - RNA, 24 nt, Human
uggccagacuggucuugaacuccu

SEQ ID NO: 290982 - RNA, 21 nt, Human
ugggacuacaggcgcccgcca

SEQ ID NO: 290983 - RNA, 22 nt, Human
ugggacuacaggcgcccgccac

SEQ ID NO: 290984 - RNA, 24 nt, Human
ugggacuacaggcgcccgccacca

SEQ ID NO: 290985 - RNA, 20 nt, Human
ugggagaggagagggguuga

SEQ ID NO: 290986 - RNA, 18 nt, Human
ugggauuacaggcgugag

SEQ ID NO: 290987 - RNA, 19 nt, Human
ugggauuacaggcgugagc

SEQ ID NO: 290988 - RNA, 21 nt, Human
ugggauuacaggcgugagcca

SEQ ID NO: 290989 - RNA, 22 nt, Human
ugggauuacaggcgugagccac

SEQ ID NO: 290990 - RNA, 23 nt, Human
ugggauuacaggcgugagccacc

SEQ ID NO: 290991 - RNA, 24 nt, Human
ugggauuacaggcgugagccaccg

SEQ ID NO: 290992 - RNA, 18 nt, Human
ugggauuacaggugugag

SEQ ID NO: 290993 - RNA, 19 nt, Human
ugggauuacaggugugagc

SEQ ID NO: 290994 - RNA, 22 nt, Human
ugggauuacaggugugagccac

SEQ ID NO: 290995 - RNA, 23 nt, Human
ugggauuacaggugugagccacc

SEQ ID NO: 290996 - RNA, 24 nt, Human
ugggauuacaggugugagccacca

SEQ ID NO: 290997 - RNA, 24 nt, Human
ugggguuucaccguguuagccagg

SEQ ID NO: 290998 - RNA, 19 nt, Human
ugguucauuccuauaucau

SEQ ID NO: 290999 - RNA, 19 nt, Human
uguaacugcuaccauuaca

SEQ ID NO: 291000 - RNA, 20 nt, Human
uguaggacuacauacaucau

SEQ ID NO: 291001 - RNA, 21 nt, Human
uguauuaacccgcacaacacu

SEQ ID NO: 291002 - RNA, 21 nt, Human
uguauuaacccgcacaacacu

SEQ ID NO: 291003 - RNA, 21 nt, Human
uguauuuuuaguggagauggg

SEQ ID NO: 291004 - RNA, 21 nt, Human
ugugcacgugugugugugugu

SEQ ID NO: 291005 - RNA, 21 nt, Human
ugugugcacgugugugugugu

SEQ ID NO: 291006 - RNA, 24 nt, Human
ugugugcacgugugugugugugug

SEQ ID NO: 291007 - RNA, 21 nt, Human
ugugugugcacgugugugugu

SEQ ID NO: 291008 - RNA, 21 nt, Human
ugugugugcacgugugugugu

SEQ ID NO: 291009 - RNA, 21 nt, Human
ugugugugcacgugugugugu

SEQ ID NO: 291010 - RNA, 21 nt, Human
ugugugugcacgugugugugu

SEQ ID NO: 291011 - RNA, 24 nt, Human
ugugugugcacgugugugugugug

SEQ ID NO: 291012 - RNA, 20 nt, Human
ugugugugugcacgugugug

SEQ ID NO: 291013 - RNA, 20 nt, Human
ugugugugugugugcacgug

SEQ ID NO: 291014 - RNA, 23 nt, Human
ugugugugugugugcacgugugu

SEQ ID NO: 291015 - RNA, 23 nt, Human
ugugugugugugugcacgugugu

SEQ ID NO: 291016 - RNA, 19 nt, Human
uguguguguguguguguag

SEQ ID NO: 291017 - RNA, 18 nt, Human
ugugugugugugugugug

SEQ ID NO: 291018 - RNA, 18 nt, Human
ugugugugugugugugug

SEQ ID NO: 291019 - RNA, 25 nt, Human
uuaacaaaaacuguuuuaaauuaaa

SEQ ID NO: 291020 - RNA, 24 nt, Human
uuaauugaauccauauaucuauug

SEQ ID NO: 291021 - RNA, 24 nt, Human
uuacacacaguuuaaucauaaauu

SEQ ID NO: 291022 - RNA, 18 nt, Human
uuacugaacacccuuugg

SEQ ID NO: 291023 - RNA, 19 nt, Human
uuacuguacaaggggaugc

SEQ ID NO: 291024 - RNA, 18 nt, Human
uuaguggagaugggguuu

SEQ ID NO: 291025 - RNA, 22 nt, Human
uuaguggagaugggguuucacc

SEQ ID NO: 291026 - RNA, 24 nt, Human
uuaguggagaugggguuucaccgu

SEQ ID NO: 291027 - RNA, 21 nt, Human
uucaaaacacugaaccagagu

SEQ ID NO: 291028 - RNA, 22 nt, Human
uucaauauauucucuagcaaga

SEQ ID NO: 291029 - RNA, 21 nt, Human
uucacgcuauucuccugccuc

SEQ ID NO: 291030 - RNA, 18 nt, Human
uucagagcaaacagagaa

SEQ ID NO: 291031 - RNA, 19 nt, Human
uuccauugccagauuacag

SEQ ID NO: 291032 - RNA, 21 nt, Human
uucccagaaguaaagacccaa

SEQ ID NO: 291033 - RNA, 21 nt, Human
uuccugaguuucucuacaaaa

SEQ ID NO: 291034 - RNA, 21 nt, Human
uucuuuguuauaauauggguu

SEQ ID NO: 291035 - RNA, 20 nt, Human
uugacucccccccccacccc

SEQ ID NO: 291036 - RNA, 24 nt, Human
uugcucugucacccaggcuggagu

SEQ ID NO: 291037 - RNA, 22 nt, Human
uuggaacauuaacaacacgaag

SEQ ID NO: 291038 - RNA, 24 nt, Human
uuggaacauuaacaacacgaagga

SEQ ID NO: 291039 - RNA, 23 nt, Human
uuguaaaguucuacaucaacuga

SEQ ID NO: 291040 - RNA, 23 nt, Human
uuguauuuuuaguggagaugggg

SEQ ID NO: 291041 - RNA, 23 nt, Human
uuuaaaacagaaccauuuuuuga

SEQ ID NO: 291042 - RNA, 24 nt, Human
uuuaauuucaaaucaaacaaaauc

SEQ ID NO: 291043 - RNA, 19 nt, Human
uuucaccguguuagccagg

SEQ ID NO: 291044 - RNA, 22 nt, Human
uuucaugacugauauauuaacc

SEQ ID NO: 291045 - RNA, 20 nt, Human
uuugcagagagaaaauguga

SEQ ID NO: 291046 - RNA, 26 nt, Human
uuugggagaggagagggguugaugug

SEQ ID NO: 291047 - RNA, 22 nt, Human
uuuguuuuuuguuuguuugggg

SEQ ID NO: 291048 - RNA, 20 nt, Human
uuuugcaguuguaggacuac

SEQ ID NO: 291049 - RNA, 19 nt, Human
uuuugguuuuguuuuuugu

SEQ ID NO: 291050 - RNA, 18 nt, Human
uuuuguuuguuugggguc

SEQ ID NO: 291051 - RNA, 24 nt, Human
uuuuuaguggagaugggguuucac

SEQ ID NO: 291052 - RNA, 20 nt, Human
uuuuucuuuuugagacagag

SEQ ID NO: 291053 - RNA, 21 nt, Human
uuuuuguauuuuuaguggaga

SEQ ID NO: 291054 - RNA, 20 nt, Human
uuuuuguuacuguuucugcu

SEQ ID NO: 291055 - RNA, 24 nt, Human
uuuuuucuuuuugagacagagucu

SEQ ID NO: 291056 - RNA, 24 nt, Human
uuuuuuguauuuuuaguggagaug

SEQ ID NO: 291057 - RNA, 24 nt, Human
aaaaacaacaaaaaauacuguaca

SEQ ID NO: 291058 - RNA, 19 nt, Human
aaaaaggcuuccgcccgcu

SEQ ID NO: 291059 - RNA, 22 nt, Human
aaaaaucccuuagucuuauaga

SEQ ID NO: 291060 - RNA, 19 nt, Human
aaaacacaagaaaaaaucu

SEQ ID NO: 291061 - RNA, 21 nt, Human
aaaaggcuuccgcccgcucca

SEQ ID NO: 291062 - RNA, 18 nt, Human
aaaaucccaaauauccaa

SEQ ID NO: 291063 - RNA, 30 nt, Human
aaacaaaaaucaaaaagaaagccccaaaag

SEQ ID NO: 291064 - RNA, 27 nt, Human
aaacaaaauccuuuuuaaaacagaacc

SEQ ID NO: 291065 - RNA, 24 nt, Human
aaaccacaaacaaaaaucaaaaag

SEQ ID NO: 291066 - RNA, 23 nt, Human
aaagaaacaaacaaaaaaaacua

SEQ ID NO: 291067 - RNA, 24 nt, Human
aaagaaacaaacaaaaaaaacuaa

SEQ ID NO: 291068 - RNA, 19 nt, Human
aaagugcuggaauuacagg

SEQ ID NO: 291069 - RNA, 24 nt, Human
aaagugcuggaauuacaggcguga

SEQ ID NO: 291070 - RNA, 24 nt, Human
aaagugcugggauuacagguauga

SEQ ID NO: 291071 - RNA, 24 nt, Human
aaauuuuaucaacaauauaguauu

SEQ ID NO: 291072 - RNA, 25 nt, Human
aacaaaaaaacugaaaaccacaaac

SEQ ID NO: 291073 - RNA, 23 nt, Human
aacaaaaacuguuuuaaauuaaa

SEQ ID NO: 291074 - RNA, 24 nt, Human
aacaaaaguuuagguaaacuaaag

SEQ ID NO: 291075 - RNA, 18 nt, Human
aacaacaaaaaaacugaa

SEQ ID NO: 291076 - RNA, 20 nt, Human
aacagauuuccaaggccaga

SEQ ID NO: 291077 - RNA, 18 nt, Human
aacauagauaguaaccau

SEQ ID NO: 291078 - RNA, 18 nt, Human
aacauuaucugaacaaaa

SEQ ID NO: 291079 - RNA, 25 nt, Human
aacauuuuuuucuuuuuggggggcc

SEQ ID NO: 291080 - RNA, 19 nt, Human
aaccaagaagagggugccc

SEQ ID NO: 291081 - RNA, 18 nt, Human
aaccgcccccauuaaaca

SEQ ID NO: 291082 - RNA, 21 nt, Human
aacuaucaugugaaaagggga

SEQ ID NO: 291083 - RNA, 21 nt, Human
aagaaagccccaaaaaaggcu

SEQ ID NO: 291084 - RNA, 18 nt, Human
aagaagcagucaugugcc

SEQ ID NO: 291085 - RNA, 20 nt, Human
aagaagcagucaugugccuu

SEQ ID NO: 291086 - RNA, 26 nt, Human
aagugcuggaauuacaggcgugagcc

SEQ ID NO: 291087 - RNA, 18 nt, Human
aagugcugggauuacagg

SEQ ID NO: 291088 - RNA, 19 nt, Human
aagugcugggauuacaggu

SEQ ID NO: 291089 - RNA, 26 nt, Human
aagugcugggauuacagguaugagcc

SEQ ID NO: 291090 - RNA, 21 nt, Human
aaguguccaccauugauaaau

SEQ ID NO: 291091 - RNA, 19 nt, Human
aaguuccuuccugauauuc

SEQ ID NO: 291092 - RNA, 23 nt, Human
aauaacagacaacaggagaaaac

SEQ ID NO: 291093 - RNA, 20 nt, Human
aauacauacucacaagugug

SEQ ID NO: 291094 - RNA, 20 nt, Human
aaugaaauaagauaccuaca

SEQ ID NO: 291095 - RNA, 23 nt, Human
aaugugugugugugcacgugugu

SEQ ID NO: 291096 - RNA, 18 nt, Human
aauuacaggcgugagcca

SEQ ID NO: 291097 - RNA, 22 nt, Human
aauuacaggcgugagccaccgc

SEQ ID NO: 291098 - RNA, 23 nt, Human
acaaaaaaacugaaaaccacaaa

SEQ ID NO: 291099 - RNA, 26 nt, Human
acaacaaaaaaacugaaaaccacaaa

SEQ ID NO: 291100 - RNA, 18 nt, Human
acaacaaaaaauacugua

SEQ ID NO: 291101 - RNA, 22 nt, Human
acaugcaccuggaaaaccagua

SEQ ID NO: 291102 - RNA, 19 nt, Human
acccaggcuggagugcagu

SEQ ID NO: 291103 - RNA, 25 nt, Human
acccgccucggccucccaaagugcu

SEQ ID NO: 291104 - RNA, 25 nt, Human
acccgccucggccucccaaagugcu

SEQ ID NO: 291105 - RNA, 23 nt, Human
acguguguguguguguguguguu

SEQ ID NO: 291106 - RNA, 19 nt, Human
acugaaccagaguguuuug

SEQ ID NO: 291107 - RNA, 18 nt, Human
acugcaagcuccgccucc

SEQ ID NO: 291108 - RNA, 23 nt, Human
acuggucuugaacuccugaccuc

SEQ ID NO: 291109 - RNA, 20 nt, Human
acuguuucugcuguugucaa

SEQ ID NO: 291110 - RNA, 23 nt, Human
agaaaaacaagaauagcuauuaa

SEQ ID NO: 291111 - RNA, 27 nt, Human
agaaacagcaugagaguaccgguaccc

SEQ ID NO: 291112 - RNA, 21 nt, Human
agaaagccccaaaaaaggcua

SEQ ID NO: 291113 - RNA, 25 nt, Human
agaaugaagagguaaacgaaaggga

SEQ ID NO: 291114 - RNA, 21 nt, Human
agccaccacacccagccaaaa

SEQ ID NO: 291115 - RNA, 21 nt, Human
agccagugccgagccagcccu

SEQ ID NO: 291116 - RNA, 20 nt, Human
aggaaucauuauaaaggagg

SEQ ID NO: 291117 - RNA, 21 nt, Human
aggaaucauuauaaaggaggg

SEQ ID NO: 291118 - RNA, 21 nt, Human
aggauuuaagaaccucccuag

SEQ ID NO: 291119 - RNA, 25 nt, Human
aggcuggagugcaguggcgccaucu

SEQ ID NO: 291120 - RNA, 24 nt, Human
aggugauccacccgccucggccuc

SEQ ID NO: 291121 - RNA, 18 nt, Human
aguagcugggacuacagg

SEQ ID NO: 291122 - RNA, 19 nt, Human
aguagcugggacuacaggc

SEQ ID NO: 291123 - RNA, 23 nt, Human
aguagcugggacuacaggcgccc

SEQ ID NO: 291124 - RNA, 22 nt, Human
agugaaaaaaaauugaucugga

SEQ ID NO: 291125 - RNA, 20 nt, Human
agugcaguggcgccaucucg

SEQ ID NO: 291126 - RNA, 24 nt, Human
agugcaguggcgccaucucggcuc

SEQ ID NO: 291127 - RNA, 19 nt, Human
agugguuuucuucaguaag

SEQ ID NO: 291128 - RNA, 23 nt, Human
auaaaguuugauuugaagaagag

SEQ ID NO: 291129 - RNA, 27 nt, Human
auaagaaaaacaagaauagcuauuaau

SEQ ID NO: 291130 - RNA, 24 nt, Human
auacaucacaauagccacuugugu

SEQ ID NO: 291131 - RNA, 18 nt, Human
auagaacaauuaauacaa

SEQ ID NO: 291132 - RNA, 22 nt, Human
auagauuuaguaugugguuuua

SEQ ID NO: 291133 - RNA, 18 nt, Human
aucauggcuguugauuca

SEQ ID NO: 291134 - RNA, 24 nt, Human
auccugaccucgugauccacccgc

SEQ ID NO: 291135 - RNA, 23 nt, Human
augaaaaagaaacaaacaaaaaa

SEQ ID NO: 291136 - RNA, 18 nt, Human
augaaaagaaacuuucuc

SEQ ID NO: 291137 - RNA, 21 nt, Human
auggacacaaaauagaauaac

SEQ ID NO: 291138 - RNA, 18 nt, Human
augggguuucaccauguu

SEQ ID NO: 291139 - RNA, 19 nt, Human
augggguuucaccauguua

SEQ ID NO: 291140 - RNA, 20 nt, Human
augggguuucaccauguuag

SEQ ID NO: 291141 - RNA, 24 nt, Human
augggguuucaccauguuagccag

SEQ ID NO: 291142 - RNA, 19 nt, Human
augguuuuuguucugugug

SEQ ID NO: 291143 - RNA, 22 nt, Human
augugugugugugcacgugugu

SEQ ID NO: 291144 - RNA, 21 nt, Human
auucuccugccucagccuccc

SEQ ID NO: 291145 - RNA, 24 nt, Human
auuuaaaucuuccugaguuucucu

SEQ ID NO: 291146 - RNA, 19 nt, Human
auuucuucuugacugcaag

SEQ ID NO: 291147 - RNA, 19 nt, Human
caaaaaaacugaaaaccac

SEQ ID NO: 291148 - RNA, 26 nt, Human
caaaaaaacugaaaaccacaaacaaa

SEQ ID NO: 291149 - RNA, 19 nt, Human
caaaacacugaaccagagu

SEQ ID NO: 291150 - RNA, 22 nt, Human
caaaacuucacaaguuuccaga

SEQ ID NO: 291151 - RNA, 27 nt, Human
caaacaaaaaucaaaaagaaagcccca

SEQ ID NO: 291152 - RNA, 28 nt, Human
caaacucugauaguuaauaguuaagaag

SEQ ID NO: 291153 - RNA, 24 nt, Human
caaagugcuggaauuacaggcgug

SEQ ID NO: 291154 - RNA, 24 nt, Human
caaagugcugggauuacagguaug

SEQ ID NO: 291155 - RNA, 23 nt, Human
caacaacaaaaaaacugaaaacc

SEQ ID NO: 291156 - RNA, 25 nt, Human
caacaacaaaaaaacugaaaaccac

SEQ ID NO: 291157 - RNA, 29 nt, Human
caacaacaaaaaaacugaaaaccacuauc

SEQ ID NO: 291158 - RNA, 19 nt, Human
caacaggagaaaacuaaug

SEQ ID NO: 291159 - RNA, 19 nt, Human
caaguaauugcauguuuca

SEQ ID NO: 291160 - RNA, 18 nt, Human
caccauguuagccaggau

SEQ ID NO: 291161 - RNA, 22 nt, Human
caccauguuagccaggaugguc

SEQ ID NO: 291162 - RNA, 24 nt, Human
caccauguuagccaggauggucuc

SEQ ID NO: 291163 - RNA, 19 nt, Human
cacccagccaaaaauaacu

SEQ ID NO: 291164 - RNA, 24 nt, Human
cacccaggcuggagugcaguggcg

SEQ ID NO: 291165 - RNA, 23 nt, Human
cacccgccucggccucccaaagu

SEQ ID NO: 291166 - RNA, 23 nt, Human
cacccgccucggccucccaaagu

SEQ ID NO: 291167 - RNA, 22 nt, Human
cacgccauucuccugccucagc

SEQ ID NO: 291168 - RNA, 18 nt, Human
cacggagacugcgacugc

SEQ ID NO: 291169 - RNA, 24 nt, Human
cacgugugugugugugugugugag

SEQ ID NO: 291170 - RNA, 25 nt, Human
cacguguguguguguguguguguaa

SEQ ID NO: 291171 - RNA, 20 nt, Human
cacuaacaacaacaaaaaaa

SEQ ID NO: 291172 - RNA, 25 nt, Human
cacugaaccagaguguuuugguuuu

SEQ ID NO: 291173 - RNA, 21 nt, Human
caggcgcccgccaccacgccc

SEQ ID NO: 291174 - RNA, 26 nt, Human
cauucaaaauaguuucuaauggucau

SEQ ID NO: 291175 - RNA, 20 nt, Human
ccaaagugcuggaauuacag

SEQ ID NO: 291176 - RNA, 22 nt, Human
ccaaagugcuggaauuacaggc

SEQ ID NO: 291177 - RNA, 24 nt, Human
ccaaagugcuggaauuacaggcgu

SEQ ID NO: 291178 - RNA, 20 nt, Human
ccaaagugcugggauuacag

SEQ ID NO: 291179 - RNA, 21 nt, Human
ccaaagugcugggauuacagg

SEQ ID NO: 291180 - RNA, 21 nt, Human
ccaaagugcugggauuacagg

SEQ ID NO: 291181 - RNA, 21 nt, Human
ccaaagugcugggauuacagg

SEQ ID NO: 291182 - RNA, 22 nt, Human
ccaaagugcugggauuacaggu

SEQ ID NO: 291183 - RNA, 24 nt, Human
ccaaagugcugggauuacagguau

SEQ ID NO: 291184 - RNA, 25 nt, Human
ccaagacagccuuauauuacaucau

SEQ ID NO: 291185 - RNA, 22 nt, Human
ccaccgcgcccggcccacucaa

SEQ ID NO: 291186 - RNA, 22 nt, Human
ccaguuaagaggauaaaagaag

SEQ ID NO: 291187 - RNA, 24 nt, Human
ccaguuaagaggauaaaagaagga

SEQ ID NO: 291188 - RNA, 27 nt, Human
cccaaccccaaccgcccccauuaaacu

SEQ ID NO: 291189 - RNA, 28 nt, Human
ccccaaccccaaccgcccccauuaaaca

SEQ ID NO: 291190 - RNA, 22 nt, Human
cccccaaccccaaccgccccca

SEQ ID NO: 291191 - RNA, 20 nt, Human
cccccccaaccccaaccgcc

SEQ ID NO: 291192 - RNA, 23 nt, Human
cccccccaaccccaaccgccccc

SEQ ID NO: 291193 - RNA, 23 nt, Human
cccccccaaccccaaccgccccc

SEQ ID NO: 291194 - RNA, 23 nt, Human
cccgaguagcugggacuacaggc

SEQ ID NO: 291195 - RNA, 24 nt, Human
cccgaguagcugggacuacaggcg

SEQ ID NO: 291196 - RNA, 21 nt, Human
cccgccaccacgcccagcuaa

SEQ ID NO: 291197 - RNA, 18 nt, Human
ccgggcugccugugcugc

SEQ ID NO: 291198 - RNA, 19 nt, Human
ccuagaaaguuacaucuca

SEQ ID NO: 291199 - RNA, 22 nt, Human
ccugaccucaggugauccaccc

SEQ ID NO: 291200 - RNA, 23 nt, Human
ccugaccucaggugauccacccg

SEQ ID NO: 291201 - RNA, 20 nt, Human
ccugaccucgugauccaccc

SEQ ID NO: 291202 - RNA, 23 nt, Human
ccugccucagccucccgaguagc

SEQ ID NO: 291203 - RNA, 24 nt, Human
ccugccucagccucccgaguagcu

SEQ ID NO: 291204 - RNA, 21 nt, Human
ccuuauauuacaucauggcug

SEQ ID NO: 291205 - RNA, 20 nt, Human
ccuuggaacauuaacaacac

SEQ ID NO: 291206 - RNA, 18 nt, Human
cgcccgcuccacggagac

SEQ ID NO: 291207 - RNA, 19 nt, Human
cgccucccggguucacgcc

SEQ ID NO: 291208 - RNA, 24 nt, Human
cgccucggccucccaaagugcugg

SEQ ID NO: 291209 - RNA, 21 nt, Human
cgcuccacggagacugcgacu

SEQ ID NO: 291210 - RNA, 22 nt, Human
cguagaaguaacagauuuccaa

SEQ ID NO: 291211 - RNA, 19 nt, Human
cuaacgccuaaacauggua

SEQ ID NO: 291212 - RNA, 24 nt, Human
cucagccucccgaguagcugggac

SEQ ID NO: 291213 - RNA, 18 nt, Human
cucauagugcacugcaau

SEQ ID NO: 291214 - RNA, 21 nt, Human
cucccggguucacgccauucu

SEQ ID NO: 291215 - RNA, 24 nt, Human
cucccucugcauuuuuccuuaaaa

SEQ ID NO: 291216 - RNA, 21 nt, Human
cucgcaguccgcagagcagcc

SEQ ID NO: 291217 - RNA, 23 nt, Human
cugaaaaccacaaacaaaaauca

SEQ ID NO: 291218 - RNA, 23 nt, Human
cugaggcaaaaccgcucugguau

SEQ ID NO: 291219 - RNA, 18 nt, Human
cugcacugucucuuccau

SEQ ID NO: 291220 - RNA, 23 nt, Human
cugccucagccucccgaguagcu

SEQ ID NO: 291221 - RNA, 18 nt, Human
cugucacccaggcuggag

SEQ ID NO: 291222 - RNA, 19 nt, Human
cugucacccaggcuggagu

SEQ ID NO: 291223 - RNA, 21 nt, Human
cugugcugccugugucgccgc

SEQ ID NO: 291224 - RNA, 20 nt, Human
cuuaaaaaugucucuugccc

SEQ ID NO: 291225 - RNA, 18 nt, Human
cuucccacaauacaaaca

SEQ ID NO: 291226 - RNA, 21 nt, Human
cuugcucugucacccaggcug

SEQ ID NO: 291227 - RNA, 18 nt, Human
gaaaaacaagaauagcua

SEQ ID NO: 291228 - RNA, 22 nt, Human
gaaagcacaagguucacuagga

SEQ ID NO: 291229 - RNA, 25 nt, Human
gaaagcacaagguucacuaggaaag

SEQ ID NO: 291230 - RNA, 24 nt, Human
gacacaauauuaguuaaaacacag

SEQ ID NO: 291231 - RNA, 24 nt, Human
gaccucaggugauccacccgccuc

SEQ ID NO: 291232 - RNA, 22 nt, Human
gaccucgugauccacccgccuc

SEQ ID NO: 291233 - RNA, 22 nt, Human
gaccucgugauccacccgccuc

SEQ ID NO: 291234 - RNA, 24 nt, Human
gaccucgugauccacccgccucgg

SEQ ID NO: 291235 - RNA, 24 nt, Human
gacuggucuugaacuccugaccuc

SEQ ID NO: 291236 - RNA, 18 nt, Human
gagaugggguuucaccau

SEQ ID NO: 291237 - RNA, 24 nt, Human
gagaugggguuucaccauguuagc

SEQ ID NO: 291238 - RNA, 20 nt, Human
gaguagcugggacuacaggc

SEQ ID NO: 291239 - RNA, 25 nt, Human
gaguagcugggacuacaggcgcccg

SEQ ID NO: 291240 - RNA, 18 nt, Human
gauuacagguaugagcca

SEQ ID NO: 291241 - RNA, 21 nt, Human
gauuacagguaugagccacca

SEQ ID NO: 291242 - RNA, 22 nt, Human
gauuacagguaugagccaccac

SEQ ID NO: 291243 - RNA, 22 nt, Human
gcaaacagagaaacagcaugag

SEQ ID NO: 291244 - RNA, 18 nt, Human
gcaccuggaaaaccagua

SEQ ID NO: 291245 - RNA, 26 nt, Human
gcacuaaccauuuauuauuauuuucu

SEQ ID NO: 291246 - RNA, 23 nt, Human
gcccagcuaauuuuuuguauuuu

SEQ ID NO: 291247 - RNA, 25 nt, Human
gccucccggguucacgccauucucc

SEQ ID NO: 291248 - RNA, 23 nt, Human
gccucggccucccaaagugcugg

SEQ ID NO: 291249 - RNA, 25 nt, Human
gcucugucacccaggcuggagugca

SEQ ID NO: 291250 - RNA, 18 nt, Human
gcugaggcaaaaccgcuc

SEQ ID NO: 291251 - RNA, 18 nt, Human
gcugagguuguuucugag

SEQ ID NO: 291252 - RNA, 20 nt, Human
gcuggagugcaguggcgcca

SEQ ID NO: 291253 - RNA, 19 nt, Human
ggacuacaggcuuaaaaug

SEQ ID NO: 291254 - RNA, 24 nt, Human
ggauggucucaauauccugaccuc

SEQ ID NO: 291255 - RNA, 19 nt, Human
ggauuacagguaugagcca

SEQ ID NO: 291256 - RNA, 22 nt, Human
gggguuucaccauguuagccag

SEQ ID NO: 291257 - RNA, 24 nt, Human
ggguugaugugacuaacgccuaaa

SEQ ID NO: 291258 - RNA, 22 nt, Human
ggguuucaccauguuagccagg

SEQ ID NO: 291259 - RNA, 19 nt, Human
ggucuugaacuccugaccu

SEQ ID NO: 291260 - RNA, 24 nt, Human
gguuucaccauguuagccaggaug

SEQ ID NO: 291261 - RNA, 18 nt, Human
gguuuuguuuuuuguuug

SEQ ID NO: 291262 - RNA, 24 nt, Human
gucuugcucugucacccaggcugg

SEQ ID NO: 291263 - RNA, 24 nt, Human
gugauccacccgccucggccuccc

SEQ ID NO: 291264 - RNA, 24 nt, Human
gugauccacccgccucggccuccc

SEQ ID NO: 291265 - RNA, 23 nt, Human
guggagaugggguuucaccaugu

SEQ ID NO: 291266 - RNA, 18 nt, Human
guuaaauuccuuuucuuu

SEQ ID NO: 291267 - RNA, 21 nt, Human
guuauugcgcugcacugucuc

SEQ ID NO: 291268 - RNA, 18 nt, Human
uaaaacacagguaaaguu

SEQ ID NO: 291269 - RNA, 21 nt, Human
uaaaacagaaccauuuuucga

SEQ ID NO: 291270 - RNA, 19 nt, Human
uaaagaaagcacaagguuc

SEQ ID NO: 291271 - RNA, 25 nt, Human
uaaauacacauucugaauuaaacaa

SEQ ID NO: 291272 - RNA, 24 nt, Human
uaacagacaacaggagaaaacuaa

SEQ ID NO: 291273 - RNA, 21 nt, Human
uaagaaaaacaagaauagcua

SEQ ID NO: 291274 - RNA, 20 nt, Human
uaagaauacacaaaauuacu

SEQ ID NO: 291275 - RNA, 19 nt, Human
uaaguguauacaccaagac

SEQ ID NO: 291276 - RNA, 22 nt, Human
uaauaaacauucaaauaucauc

SEQ ID NO: 291277 - RNA, 24 nt, Human
uaauuuuuuguauuuuuaguggag

SEQ ID NO: 291278 - RNA, 25 nt, Human
uaauuuuuuguauuuuuaguggaga

SEQ ID NO: 291279 - RNA, 24 nt, Human
uacaggcgcccgccaccacgccca

SEQ ID NO: 291280 - RNA, 23 nt, Human
uacaggcgugagccaccgcgccc

SEQ ID NO: 291281 - RNA, 24 nt, Human
uacagguaugagccaccacaccca

SEQ ID NO: 291282 - RNA, 23 nt, Human
uacaguaucaaaaaugacacaga

SEQ ID NO: 291283 - RNA, 18 nt, Human
uaccauagcuagaaaauu

SEQ ID NO: 291284 - RNA, 23 nt, Human
uaccaugaaaaagaaacaaacaa

SEQ ID NO: 291285 - RNA, 24 nt, Human
uaccaugaaaaagaaacaaacaaa

SEQ ID NO: 291286 - RNA, 20 nt, Human
uaccuaaacuaacuauaaau

SEQ ID NO: 291287 - RNA, 22 nt, Human
uagaauaacaaaaaucccuuag

SEQ ID NO: 291288 - RNA, 19 nt, Human
uagaaugaagagguaaacg

SEQ ID NO: 291289 - RNA, 27 nt, Human
uaggagauauugacucccccccaauuc

SEQ ID NO: 291290 - RNA, 24 nt, Human
uaguggagaugggguuucaccaug

SEQ ID NO: 291291 - RNA, 22 nt, Human
ucaaaaagaaagccccaaaaaa

SEQ ID NO: 291292 - RNA, 24 nt, Human
ucaaaggaaauccucaccaaugaa

SEQ ID NO: 291293 - RNA, 26 nt, Human
ucaaagugaaaaaaaauugaucugga

SEQ ID NO: 291294 - RNA, 21 nt, Human
ucaacaucaacaauagccaca

SEQ ID NO: 291295 - RNA, 22 nt, Human
ucaacaucaacaauagccacaa

SEQ ID NO: 291296 - RNA, 21 nt, Human
ucaaccuucuuacuuccaaag

SEQ ID NO: 291297 - RNA, 24 nt, Human
ucaccauguuagccaggauggucu

SEQ ID NO: 291298 - RNA, 22 nt, Human
ucacccaggcuggagugcagug

SEQ ID NO: 291299 - RNA, 24 nt, Human
ucacccaggcuggagugcaguggc

SEQ ID NO: 291300 - RNA, 18 nt, Human
ucacugcaagcuccgccu

SEQ ID NO: 291301 - RNA, 19 nt, Human
ucacugcaagcuccgccuc

SEQ ID NO: 291302 - RNA, 24 nt, Human
ucacugcaagcuccgccucccggg

SEQ ID NO: 291303 - RNA, 19 nt, Human
ucacuuacagucacuaaac

SEQ ID NO: 291304 - RNA, 19 nt, Human
ucagagaguaguuuggcua

SEQ ID NO: 291305 - RNA, 23 nt, Human
ucagccucccgaguagcugggac

SEQ ID NO: 291306 - RNA, 21 nt, Human
ucaguaauaccaugaaaaaga

SEQ ID NO: 291307 - RNA, 23 nt, Human
uccaacuuugaguccuauuugau

SEQ ID NO: 291308 - RNA, 24 nt, Human
ucccaaagugcuggaauuacaggc

SEQ ID NO: 291309 - RNA, 23 nt, Human
ucccaaagugcugggauuacagg

SEQ ID NO: 291310 - RNA, 18 nt, Human
ucccagaaguaaagaccu

SEQ ID NO: 291311 - RNA, 23 nt, Human
uccccaaguuuacaauuuucaac

SEQ ID NO: 291312 - RNA, 24 nt, Human
ucccgaguagcugggacuacaggc

SEQ ID NO: 291313 - RNA, 21 nt, Human
ucccggguucacgccauucuc

SEQ ID NO: 291314 - RNA, 24 nt, Human
ucccggguucacgccauucuccug

SEQ ID NO: 291315 - RNA, 18 nt, Human
uccucaccaaugaaauua

SEQ ID NO: 291316 - RNA, 23 nt, Human
ucgcaguccgcagagcagccgga

SEQ ID NO: 291317 - RNA, 18 nt, Human
ucggccucccaaagugcu

SEQ ID NO: 291318 - RNA, 18 nt, Human
ucggccucccaaagugcu

SEQ ID NO: 291319 - RNA, 24 nt, Human
ucuccugccucagccucccgagua

SEQ ID NO: 291320 - RNA, 18 nt, Human
ucucuuggcaaugaauaa

SEQ ID NO: 291321 - RNA, 24 nt, Human
ucugucacccaggcuggagugcag

SEQ ID NO: 291322 - RNA, 23 nt, Human
ucuugaacuccugaccucaggug

SEQ ID NO: 291323 - RNA, 23 nt, Human
ucuugcucugucacccaggcugg

SEQ ID NO: 291324 - RNA, 24 nt, Human
ucuugcucugucacccaggcugga

SEQ ID NO: 291325 - RNA, 22 nt, Human
ugaaaaccacaaacaaaaauca

SEQ ID NO: 291326 - RNA, 23 nt, Human
ugaaaaccacaaacaaaaaucaa

SEQ ID NO: 291327 - RNA, 21 nt, Human
ugaaaacgcuacuuaaccugc

SEQ ID NO: 291328 - RNA, 22 nt, Human
ugaauacauacucacaagugug

SEQ ID NO: 291329 - RNA, 22 nt, Human
ugacagcagagagacacaaaca

SEQ ID NO: 291330 - RNA, 21 nt, Human
ugaccucaggugauccacccg

SEQ ID NO: 291331 - RNA, 24 nt, Human
ugaccucaggugauccacccgccu

SEQ ID NO: 291332 - RNA, 18 nt, Human
ugacucccccccaacccc

SEQ ID NO: 291333 - RNA, 18 nt, Human
ugagacagagucuugcuc

SEQ ID NO: 291334 - RNA, 22 nt, Human
ugagacagagucuugcucuguc

SEQ ID NO: 291335 - RNA, 26 nt, Human
ugagcuagaauaacaaaaaucccuua

SEQ ID NO: 291336 - RNA, 19 nt, Human
ugaguacaaucaacauaaa

SEQ ID NO: 291337 - RNA, 22 nt, Human
ugauaaaaacaacaaaaaauac

SEQ ID NO: 291338 - RNA, 20 nt, Human
ugaucuguggaauccuucuu

SEQ ID NO: 291339 - RNA, 23 nt, Human
ugauucagagcaaacagagaaac

SEQ ID NO: 291340 - RNA, 20 nt, Human
ugauuuguuuagucuauuuu

SEQ ID NO: 291341 - RNA, 20 nt, Human
ugcaauacagaaccugaaau

SEQ ID NO: 291342 - RNA, 22 nt, Human
ugcacauacauuuuucugagca

SEQ ID NO: 291343 - RNA, 21 nt, Human
ugcacgugugugugugugugu

SEQ ID NO: 291344 - RNA, 22 nt, Human
ugcaguggcgccaucucggcuc

SEQ ID NO: 291345 - RNA, 24 nt, Human
ugccucagccucccgaguagcugg

SEQ ID NO: 291346 - RNA, 18 nt, Human
ugcgacugcuguagcggg

SEQ ID NO: 291347 - RNA, 24 nt, Human
ugcucugucacccaggcuggagug

SEQ ID NO: 291348 - RNA, 24 nt, Human
ugcuggaauuacaggcgugagcca

SEQ ID NO: 291349 - RNA, 24 nt, Human
ugcugggauuacagguaugagcca

SEQ ID NO: 291350 - RNA, 22 nt, Human
ugcuguugucaacuugaacugc

SEQ ID NO: 291351 - RNA, 21 nt, Human
ugcuucaguaagacguuuugc

SEQ ID NO: 291352 - RNA, 20 nt, Human
uggaacagcaugaguacaau

SEQ ID NO: 291353 - RNA, 20 nt, Human
uggaagaaaaucaaguuggu

SEQ ID NO: 291354 - RNA, 22 nt, Human
uggaagaaaaucaaguugguga

SEQ ID NO: 291355 - RNA, 18 nt, Human
uggaauuacaggcgugag

SEQ ID NO: 291356 - RNA, 19 nt, Human
uggaauuacaggcgugagc

SEQ ID NO: 291357 - RNA, 21 nt, Human
uggaauuacaggcgugagcca

SEQ ID NO: 291358 - RNA, 22 nt, Human
uggaauuacaggcgugagccac

SEQ ID NO: 291359 - RNA, 23 nt, Human
uggaauuacaggcgugagccacc

SEQ ID NO: 291360 - RNA, 24 nt, Human
uggaauuacaggcgugagccaccg

SEQ ID NO: 291361 - RNA, 24 nt, Human
uggaauuacaggcgugagccaccg

SEQ ID NO: 291362 - RNA, 18 nt, Human
uggacuacaggcuuaaaa

SEQ ID NO: 291363 - RNA, 28 nt, Human
uggagugcaguggcgccauccuagcacg

SEQ ID NO: 291364 - RNA, 23 nt, Human
uggagugcaguggcgccaucucg

SEQ ID NO: 291365 - RNA, 24 nt, Human
uggagugcaguggcgccaucucgg

SEQ ID NO: 291366 - RNA, 18 nt, Human
uggauaccuuucagagag

SEQ ID NO: 291367 - RNA, 24 nt, Human
uggccagacuggucuugaacuccu

SEQ ID NO: 291368 - RNA, 25 nt, Human
uggccaguuaagaggauaaaagaag

SEQ ID NO: 291369 - RNA, 21 nt, Human
ugggacuacaggcgcccgcca

SEQ ID NO: 291370 - RNA, 22 nt, Human
ugggacuacaggcgcccgccac

SEQ ID NO: 291371 - RNA, 24 nt, Human
ugggacuacaggcgcccgccacca

SEQ ID NO: 291372 - RNA, 20 nt, Human
ugggagaggagagggguuga

SEQ ID NO: 291373 - RNA, 18 nt, Human
ugggauuacagguaugag

SEQ ID NO: 291374 - RNA, 19 nt, Human
ugggauuacagguaugagc

SEQ ID NO: 291375 - RNA, 22 nt, Human
ugggauuacagguaugagccac

SEQ ID NO: 291376 - RNA, 23 nt, Human
ugggauuacagguaugagccacc

SEQ ID NO: 291377 - RNA, 24 nt, Human
ugggauuacagguaugagccacca

SEQ ID NO: 291378 - RNA, 24 nt, Human
ugggguuucaccauguuagccagg

SEQ ID NO: 291379 - RNA, 19 nt, Human
ugguaugugaucuguggaa

SEQ ID NO: 291380 - RNA, 20 nt, Human
ugguucauuccuauaucuau

SEQ ID NO: 291381 - RNA, 19 nt, Human
uguaacugcuaccauuaca

SEQ ID NO: 291382 - RNA, 21 nt, Human
uguauuuuuaguggagauggg

SEQ ID NO: 291383 - RNA, 21 nt, Human
ugugcacgugugugugugugu

SEQ ID NO: 291384 - RNA, 21 nt, Human
ugugugugcacgugugugugu

SEQ ID NO: 291385 - RNA, 21 nt, Human
ugugugugcacgugugugugu

SEQ ID NO: 291386 - RNA, 21 nt, Human
ugugugugcacgugugugugu

SEQ ID NO: 291387 - RNA, 24 nt, Human
ugugugugcacgugugugugugug

SEQ ID NO: 291388 - RNA, 21 nt, Human
uguguguguaugugugugugu

SEQ ID NO: 291389 - RNA, 22 nt, Human
uguguguguaugugugugugua

SEQ ID NO: 291390 - RNA, 20 nt, Human
ugugugugugcacgugugug

SEQ ID NO: 291391 - RNA, 30 nt, Human
ugugugugugcacgugugugugugugugug

SEQ ID NO: 291392 - RNA, 20 nt, Human
uguguguguguaugugugug

SEQ ID NO: 291393 - RNA, 21 nt, Human
uguguguguguaugugugugu

SEQ ID NO: 291394 - RNA, 18 nt, Human
ugugugugugugcacgug

SEQ ID NO: 291395 - RNA, 21 nt, Human
ugugugugugugcacgugugu

SEQ ID NO: 291396 - RNA, 21 nt, Human
uguguguguguguaugugugu

SEQ ID NO: 291397 - RNA, 21 nt, Human
uguguguguguguguaugugu

SEQ ID NO: 291398 - RNA, 23 nt, Human
uguguguguguguguaugugugu

SEQ ID NO: 291399 - RNA, 24 nt, Human
uguguguguguguguaugugugug

SEQ ID NO: 291400 - RNA, 21 nt, Human
uguguguguguguguguaugu

SEQ ID NO: 291401 - RNA, 21 nt, Human
uguguguguguguguguaugu

SEQ ID NO: 291402 - RNA, 18 nt, Human
ugugugugugugugugug

SEQ ID NO: 291403 - RNA, 18 nt, Human
uguuauugguauuucuuc

SEQ ID NO: 291404 - RNA, 25 nt, Human
uuaacaaaaacuguuuuaaauuaaa

SEQ ID NO: 291405 - RNA, 21 nt, Human
uuaacagagggggagaaaggg

SEQ ID NO: 291406 - RNA, 19 nt, Human
uuacaguuuaaucauaaau

SEQ ID NO: 291407 - RNA, 18 nt, Human
uuacugaacacccuuugg

SEQ ID NO: 291408 - RNA, 19 nt, Human
uuacuguacaaggggaugc

SEQ ID NO: 291409 - RNA, 18 nt, Human
uuaguggagaugggguuu

SEQ ID NO: 291410 - RNA, 22 nt, Human
uuaguggagaugggguuucacc

SEQ ID NO: 291411 - RNA, 24 nt, Human
uuaguggagaugggguuucaccau

SEQ ID NO: 291412 - RNA, 21 nt, Human
uucaaaacacugaaccagagu

SEQ ID NO: 291413 - RNA, 18 nt, Human
uucagagcaaacagagaa

SEQ ID NO: 291414 - RNA, 19 nt, Human
uuccauugccagauuacag

SEQ ID NO: 291415 - RNA, 21 nt, Human
uucccagaaguaaagacccaa

SEQ ID NO: 291416 - RNA, 24 nt, Human
uucccagccaauugagccaguugg

SEQ ID NO: 291417 - RNA, 21 nt, Human
uuccugaguuucucuacaaaa

SEQ ID NO: 291418 - RNA, 24 nt, Human
uugcucugucacccaggcuggagu

SEQ ID NO: 291419 - RNA, 22 nt, Human
uuggaacauuaacaacacgaag

SEQ ID NO: 291420 - RNA, 24 nt, Human
uuggaacauuaacaacacgaagga

SEQ ID NO: 291421 - RNA, 23 nt, Human
uuguauuuuuaguggagaugggg

SEQ ID NO: 291422 - RNA, 24 nt, Human
uuuaauuucaaaucaaacaaaauc

SEQ ID NO: 291423 - RNA, 23 nt, Human
uuuauguuacaaaauuacaguuu

SEQ ID NO: 291424 - RNA, 19 nt, Human
uuucaccauguuagccagg

SEQ ID NO: 291425 - RNA, 20 nt, Human
uuucaccauguuagccagga

SEQ ID NO: 291426 - RNA, 22 nt, Human
uuucaugacugauauauuaacc

SEQ ID NO: 291427 - RNA, 20 nt, Human
uuugcagagagaaaauguga

SEQ ID NO: 291428 - RNA, 26 nt, Human
uuugggagaggagagggguugaugug

SEQ ID NO: 291429 - RNA, 22 nt, Human
uuuguuuuuuguuuguuugggg

SEQ ID NO: 291430 - RNA, 19 nt, Human
uuuugguuuuguuuuuugu

SEQ ID NO: 291431 - RNA, 18 nt, Human
uuuuguuuguuugggguc

SEQ ID NO: 291432 - RNA, 24 nt, Human
uuuuuaguggagaugggguuucac

SEQ ID NO: 291433 - RNA, 21 nt, Human
uuuuuguauuuuuaguggaga

SEQ ID NO: 291434 - RNA, 20 nt, Human
uuuuuguuacuguuucugcu

SEQ ID NO: 291435 - RNA, 24 nt, Human
uuuuuucuuuuugagacagagucu

SEQ ID NO: 291436 - RNA, 24 nt, Human
uuuuuuguauuuuuaguggagaug

SEQ ID NO: 291437 - RNA, 26 nt, Human
aaaagacucagagcugcuuacaaggg

SEQ ID NO: 291438 - RNA, 19 nt, Human
aaacaagcaggaccccaag

SEQ ID NO: 291439 - RNA, 20 nt, Human
aaacaagcaggaccccaagg

SEQ ID NO: 291440 - RNA, 20 nt, Human
aaaugauggacaagagcugg

SEQ ID NO: 291441 - RNA, 18 nt, Human
acccuaaaguucucaggc

SEQ ID NO: 291442 - RNA, 20 nt, Human
agacucagagcugcuuacaa

SEQ ID NO: 291443 - RNA, 22 nt, Human
agagcuggucuaagagggaccu

SEQ ID NO: 291444 - RNA, 22 nt, Human
agcaaggcggcugcugagggaa

SEQ ID NO: 291445 - RNA, 22 nt, Human
agcccccugacuccugcuaccc

SEQ ID NO: 291446 - RNA, 24 nt, Human
agcccccugacuccugcuacccaa

SEQ ID NO: 291447 - RNA, 21 nt, Human
agcuggucuaagagggaccug

SEQ ID NO: 291448 - RNA, 23 nt, Human
aggccccugguucuuggauccag

SEQ ID NO: 291449 - RNA, 18 nt, Human
aggcuggggaaacagaga

SEQ ID NO: 291450 - RNA, 22 nt, Human
aggggcugcuuuggucagucag

SEQ ID NO: 291451 - RNA, 23 nt, Human
aucugcacaacuugucacacccu

SEQ ID NO: 291452 - RNA, 18 nt, Human
augaaacaagcaggaccc

SEQ ID NO: 291453 - RNA, 18 nt, Human
auggaaaccccaccuaca

SEQ ID NO: 291454 - RNA, 22 nt, Human
auucagaaaccacuagaguucu

SEQ ID NO: 291455 - RNA, 22 nt, Human
caaacgccgaucaagaauugcc

SEQ ID NO: 291456 - RNA, 19 nt, Human
caagugagcagaaaacuug

SEQ ID NO: 291457 - RNA, 21 nt, Human
cacaaaccgucccuguccucc

SEQ ID NO: 291458 - RNA, 26 nt, Human
cacagauccucaggccccugguucuu

SEQ ID NO: 291459 - RNA, 18 nt, Human
cacauauguuuugccagg

SEQ ID NO: 291460 - RNA, 20 nt, Human
cagagaagcagcuuuuuccu

SEQ ID NO: 291461 - RNA, 20 nt, Human
cagauccucaggccccuggu

SEQ ID NO: 291462 - RNA, 19 nt, Human
cagcggugucaucugggac

SEQ ID NO: 291463 - RNA, 23 nt, Human
caggaaacacuuaucucagccac

SEQ ID NO: 291464 - RNA, 23 nt, Human
caguugcuaggcuggggaaacag

SEQ ID NO: 291465 - RNA, 22 nt, Human
caucugggacaagucacuuaac

SEQ ID NO: 291466 - RNA, 21 nt, Human
ccaaggcaaggccaucuucau

SEQ ID NO: 291467 - RNA, 24 nt, Human
ccacgcagcaaggcggcugcugag

SEQ ID NO: 291468 - RNA, 19 nt, Human
cccaagaaggccacccuuu

SEQ ID NO: 291469 - RNA, 25 nt, Human
cccaagaaggccacccuuuccugcc

SEQ ID NO: 291470 - RNA, 23 nt, Human
cccagagcugccggcacaaccuu

SEQ ID NO: 291471 - RNA, 24 nt, Human
cccauaguuagaugauuaugaaac

SEQ ID NO: 291472 - RNA, 21 nt, Human
ccccaaggcaaggccaucuuc

SEQ ID NO: 291473 - RNA, 19 nt, Human
ccccauuguuccccucuca

SEQ ID NO: 291474 - RNA, 19 nt, Human
cccccugacuccugcuacc

SEQ ID NO: 291475 - RNA, 23 nt, Human
cccugacuccugcuacccaagaa

SEQ ID NO: 291476 - RNA, 18 nt, Human
ccugacuccugcuaccca

SEQ ID NO: 291477 - RNA, 21 nt, Human
ccugacuccugcuacccaaga

SEQ ID NO: 291478 - RNA, 22 nt, Human
ccugacuccugcuacccaagaa

SEQ ID NO: 291479 - RNA, 26 nt, Human
ccugggccuggccccgagucacaggc

SEQ ID NO: 291480 - RNA, 18 nt, Human
ccuggggcucuugccucc

SEQ ID NO: 291481 - RNA, 23 nt, Human
cucccgggcaagucauguuuccu

SEQ ID NO: 291482 - RNA, 23 nt, Human
cugggccuccauuaccucaucug

SEQ ID NO: 291483 - RNA, 19 nt, Human
cuguagaguggggauggga

SEQ ID NO: 291484 - RNA, 20 nt, Human
gaaacagagaagcagcuuuu

SEQ ID NO: 291485 - RNA, 24 nt, Human
gaaagcagcugugauuaacagagc

SEQ ID NO: 291486 - RNA, 22 nt, Human
gagcagccaucagagguaaacu

SEQ ID NO: 291487 - RNA, 19 nt, Human
gcaucagucacccuaaagu

SEQ ID NO: 291488 - RNA, 25 nt, Human
gcccuggggcagucccugcccacac

SEQ ID NO: 291489 - RNA, 23 nt, Human
gcggcugcugagggaaagggagc

SEQ ID NO: 291490 - RNA, 18 nt, Human
gcuccacauauguuuugc

SEQ ID NO: 291491 - RNA, 18 nt, Human
ggaaacagagaagcagcc

SEQ ID NO: 291492 - RNA, 21 nt, Human
ggcccuggggcagucccugcc

SEQ ID NO: 291493 - RNA, 20 nt, Human
ggcuggacaaguccuccagu

SEQ ID NO: 291494 - RNA, 23 nt, Human
uaacagagcagccaucagaggua

SEQ ID NO: 291495 - RNA, 20 nt, Human
uaagaauaguagcccuuucc

SEQ ID NO: 291496 - RNA, 25 nt, Human
uacaagauuuuagaaaccagcucuu

SEQ ID NO: 291497 - RNA, 21 nt, Human
uacagcccccugacuccugcu

SEQ ID NO: 291498 - RNA, 22 nt, Human
uagaaaccagcucuuguccaca

SEQ ID NO: 291499 - RNA, 21 nt, Human
uagcuagugaguuacaagauu

SEQ ID NO: 291500 - RNA, 18 nt, Human
uaguccuggggcucuugc

SEQ ID NO: 291501 - RNA, 19 nt, Human
ucagcaaaugauggacaag

SEQ ID NO: 291502 - RNA, 22 nt, Human
uccacagauccucaggccccug

SEQ ID NO: 291503 - RNA, 23 nt, Human
uccccaacucucuuuguuccuau

SEQ ID NO: 291504 - RNA, 22 nt, Human
uccuggauggcuugaucagccc

SEQ ID NO: 291505 - RNA, 19 nt, Human
uccugggccuccauuaccu

SEQ ID NO: 291506 - RNA, 24 nt, Human
uccuguuucucuccccuuccccaa

SEQ ID NO: 291507 - RNA, 18 nt, Human
ucuaagagggaccugacc

SEQ ID NO: 291508 - RNA, 18 nt, Human
ucucaggccgccgcuagc

SEQ ID NO: 291509 - RNA, 22 nt, Human
ucugcacaacuugucacacccu

SEQ ID NO: 291510 - RNA, 27 nt, Human
ugaaacaagcaggaccccaaggcaagg

SEQ ID NO: 291511 - RNA, 19 nt, Human
ugaccguguggcucuccuc

SEQ ID NO: 291512 - RNA, 19 nt, Human
ugagcagaaaacuugagcc

SEQ ID NO: 291513 - RNA, 22 nt, Human
ugagggaaagggagccucugca

SEQ ID NO: 291514 - RNA, 21 nt, Human
ugaugccccucccgggcaagu

SEQ ID NO: 291515 - RNA, 18 nt, Human
ugccagaggacugacccu

SEQ ID NO: 291516 - RNA, 24 nt, Human
ugccagaggacugacccuuugugc

SEQ ID NO: 291517 - RNA, 22 nt, Human
uggauccagaggcgucugaggu

SEQ ID NO: 291518 - RNA, 26 nt, Human
uggcacccccaggguacagcccccug

SEQ ID NO: 291519 - RNA, 18 nt, Human
uggcaucuguucugccag

SEQ ID NO: 291520 - RNA, 18 nt, Human
uggcccuggggcaguccc

SEQ ID NO: 291521 - RNA, 22 nt, Human
uggccugggccuggccccgagu

SEQ ID NO: 291522 - RNA, 18 nt, Human
uggcucuccucccgcuuc

SEQ ID NO: 291523 - RNA, 20 nt, Human
ugguccacuucagcaaauga

SEQ ID NO: 291524 - RNA, 19 nt, Human
uggucuugauuccagaagc

SEQ ID NO: 291525 - RNA, 24 nt, Human
uguaaucugcacaacuugucacac

SEQ ID NO: 291526 - RNA, 26 nt, Human
ugugauacuccguggcaucuguucug

SEQ ID NO: 291527 - RNA, 20 nt, Human
uuacaaggggcugcuuuggu

SEQ ID NO: 291528 - RNA, 19 nt, Human
uuaguccuggggcucuugc

SEQ ID NO: 291529 - RNA, 22 nt, Human
uucaaggcuggacaaguccucc

SEQ ID NO: 291530 - RNA, 23 nt, Human
uucccccagagcugccggcacaa

SEQ ID NO: 291531 - RNA, 18 nt, Human
uugaaucacugcuuuucc

SEQ ID NO: 291532 - RNA, 20 nt, Human
uuggauccagaggcgucuga

SEQ ID NO: 291533 - RNA, 22 nt, Human
uugguccacuucagcaaaugau

SEQ ID NO: 291534 - RNA, 21 nt, Human
uuuccuguuucucuccccuuc

SEQ ID NO: 291535 - RNA, 24 nt, Human
uuuccuguuucucuccccuucccc

SEQ ID NO: 291536 - RNA, 18 nt, Human
uuuuuuuuuuuuuuuuug

SEQ ID NO: 291537 - RNA, 22 nt, Human
aacucagaaagcauaccaucau

SEQ ID NO: 291538 - RNA, 21 nt, Human
aagaaaaaacagaaccuauca

SEQ ID NO: 291539 - RNA, 21 nt, Human
aagagaauaagacagcaacug

SEQ ID NO: 291540 - RNA, 18 nt, Human
acugcauuucauugaauu

SEQ ID NO: 291541 - RNA, 22 nt, Human
agcaggaaucugucugcccucu

SEQ ID NO: 291542 - RNA, 22 nt, Human
auagagucuucuuugacguuca

SEQ ID NO: 291543 - RNA, 21 nt, Human
auuuucaugcccacauauucc

SEQ ID NO: 291544 - RNA, 28 nt, Human
caagaaaauguuacuaggaaaauuuuua

SEQ ID NO: 291545 - RNA, 20 nt, Human
caagagguuugcccgacuaa

SEQ ID NO: 291546 - RNA, 21 nt, Human
cacaaugagaaauaaagagaa

SEQ ID NO: 291547 - RNA, 26 nt, Human
cagcaaguuuucuugccaaggcugcc

SEQ ID NO: 291548 - RNA, 22 nt, Human
caucaagaaaauguuacuagga

SEQ ID NO: 291549 - RNA, 18 nt, Human
ccacaugauagacaugcc

SEQ ID NO: 291550 - RNA, 19 nt, Human
cccgacuaaaauaagaaaa

SEQ ID NO: 291551 - RNA, 19 nt, Human
ccuacaaucuagguacauu

SEQ ID NO: 291552 - RNA, 22 nt, Human
cgacuaaaauaagaaaagcaaa

SEQ ID NO: 291553 - RNA, 19 nt, Human
cgguaguauuucuucuuac

SEQ ID NO: 291554 - RNA, 21 nt, Human
cuaagcugcuagcaggaaucu

SEQ ID NO: 291555 - RNA, 19 nt, Human
cuuauuuguaacagucugc

SEQ ID NO: 291556 - RNA, 19 nt, Human
cuucaagaaaaaacagaac

SEQ ID NO: 291557 - RNA, 22 nt, Human
cuucaagaaaaaacagaaccua

SEQ ID NO: 291558 - RNA, 26 nt, Human
cuugcacaucccuuuaaaaagaacca

SEQ ID NO: 291559 - RNA, 22 nt, Human
gagaaaaaaaacugcauuucau

SEQ ID NO: 291560 - RNA, 19 nt, Human
gauuaugcagcaaguuuuc

SEQ ID NO: 291561 - RNA, 18 nt, Human
ggaagggaaagcacaaug

SEQ ID NO: 291562 - RNA, 25 nt, Human
uaaaagcaagucagaguaaaagaug

SEQ ID NO: 291563 - RNA, 21 nt, Human
uaagacagcaacugaaaaagu

SEQ ID NO: 291564 - RNA, 21 nt, Human
uaagcauacuacuaagauaaa

SEQ ID NO: 291565 - RNA, 23 nt, Human
uaagcugcuagcaggaaucuguc

SEQ ID NO: 291566 - RNA, 23 nt, Human
uaccaaauacauaggcuucaaga

SEQ ID NO: 291567 - RNA, 23 nt, Human
uagaaaagcaaaacaguucaaca

SEQ ID NO: 291568 - RNA, 20 nt, Human
uaguagugaugagguuaaua

SEQ ID NO: 291569 - RNA, 27 nt, Human
uauaaagaagggaagggaaagcacaau

SEQ ID NO: 291570 - RNA, 21 nt, Human
uaugucugucaucuccuacaa

SEQ ID NO: 291571 - RNA, 21 nt, Human
ucacucaaagcugauuugcgg

SEQ ID NO: 291572 - RNA, 21 nt, Human
ucagaaaacagaugacuacau

SEQ ID NO: 291573 - RNA, 26 nt, Human
ugaaauaccuuaugucugucaucucc

SEQ ID NO: 291574 - RNA, 19 nt, Human
ugagaaauaaagagaauaa

SEQ ID NO: 291575 - RNA, 21 nt, Human
ugcauuucauugaauuugggg

SEQ ID NO: 291576 - RNA, 23 nt, Human
ugcccgacuaaaauaagaaaagc

SEQ ID NO: 291577 - RNA, 20 nt, Human
ugugaggcauugauauccac

SEQ ID NO: 291578 - RNA, 26 nt, Human
uguuacuaggaaaauuuuuagaaaag

SEQ ID NO: 291579 - RNA, 19 nt, Human
uucaaauuugauguucaac

SEQ ID NO: 291580 - RNA, 20 nt, Human
uugggguaaaauaauagagu

SEQ ID NO: 291581 - RNA, 24 nt, Human
uuuaaauuaaaaacgagaaaaaaa

SEQ ID NO: 291582 - RNA, 23 nt, Human
uuucaugcccacauauucccacu

SEQ ID NO: 291583 - RNA, 21 nt, Human
aaacagaaagaaugcaaaugg

SEQ ID NO: 291584 - RNA, 26 nt, Human
aaacgagaagacaaaacuuuacagaa

SEQ ID NO: 291585 - RNA, 19 nt, Human
aacuaaccaucuaaguaau

SEQ ID NO: 291586 - RNA, 19 nt, Human
aagaggcugaauuucccuu

SEQ ID NO: 291587 - RNA, 19 nt, Human
aagccagucucaacuccga

SEQ ID NO: 291588 - RNA, 21 nt, Human
aagcggcguggagaguuggcc

SEQ ID NO: 291589 - RNA, 20 nt, Human
aaugggugcuaaucgcccgc

SEQ ID NO: 291590 - RNA, 18 nt, Human
aauguaguaugaauuagg

SEQ ID NO: 291591 - RNA, 23 nt, Human
acagaagauaaucugucucagag

SEQ ID NO: 291592 - RNA, 21 nt, Human
acagcccccucggcgcccccc

SEQ ID NO: 291593 - RNA, 20 nt, Human
accacagcccccucggcgcc

SEQ ID NO: 291594 - RNA, 24 nt, Human
accaggcgcuggggccagcaacaa

SEQ ID NO: 291595 - RNA, 19 nt, Human
acgaagcagccgccugaaa

SEQ ID NO: 291596 - RNA, 21 nt, Human
acgaagcagccgccugaaacc

SEQ ID NO: 291597 - RNA, 23 nt, Human
acuccaaacccaggcucugcucc

SEQ ID NO: 291598 - RNA, 23 nt, Human
agaaaauaauuucaggugaaaac

SEQ ID NO: 291599 - RNA, 22 nt, Human
agaaagugaguguugggaauca

SEQ ID NO: 291600 - RNA, 22 nt, Human
agaauccccggcucuagucccc

SEQ ID NO: 291601 - RNA, 19 nt, Human
agagggaggggagggaggg

SEQ ID NO: 291602 - RNA, 22 nt, Human
agagggaggggagggagggggc

SEQ ID NO: 291603 - RNA, 19 nt, Human
agcagugcgcaccgugcgg

SEQ ID NO: 291604 - RNA, 18 nt, Human
agcccccucggcgccccc

SEQ ID NO: 291605 - RNA, 22 nt, Human
agcccgagccaucuucagagac

SEQ ID NO: 291606 - RNA, 21 nt, Human
aggcagaaguggcaggcaaag

SEQ ID NO: 291607 - RNA, 24 nt, Human
aggcgcuggggccagcaacaagcc

SEQ ID NO: 291608 - RNA, 20 nt, Human
agggaggggagggagggggc

SEQ ID NO: 291609 - RNA, 21 nt, Human
agggcaggcuccagcagguuu

SEQ ID NO: 291610 - RNA, 20 nt, Human
agguggggaaugagccugca

SEQ ID NO: 291611 - RNA, 18 nt, Human
agucgcaguacucacagu

SEQ ID NO: 291612 - RNA, 23 nt, Human
auauuuuuaaaccagcaguuuca

SEQ ID NO: 291613 - RNA, 23 nt, Human
caaacagaaagaaugcaaauggu

SEQ ID NO: 291614 - RNA, 23 nt, Human
caacaagccagucucaacuccga

SEQ ID NO: 291615 - RNA, 19 nt, Human
caacccagagucauccccu

SEQ ID NO: 291616 - RNA, 26 nt, Human
caacccagagucauccccucagcggg

SEQ ID NO: 291617 - RNA, 18 nt, Human
cacacauauuuauucugg

SEQ ID NO: 291618 - RNA, 22 nt, Human
cacagcccccucggcgcccccc

SEQ ID NO: 291619 - RNA, 22 nt, Human
caccccacggccaagggcaggc

SEQ ID NO: 291620 - RNA, 19 nt, Human
caccgugcggugcccaagu

SEQ ID NO: 291621 - RNA, 23 nt, Human
cagacaaacgugagucgcuuccu

SEQ ID NO: 291622 - RNA, 19 nt, Human
cagcccccucggcgccccc

SEQ ID NO: 291623 - RNA, 21 nt, Human
cagcccccucggcgccccccu

SEQ ID NO: 291624 - RNA, 20 nt, Human
cagccuuucgcccacggggg

SEQ ID NO: 291625 - RNA, 19 nt, Human
cagcgauagaugcuucuuu

SEQ ID NO: 291626 - RNA, 23 nt, Human
ccacagcccccucggcgcccccc

SEQ ID NO: 291627 - RNA, 19 nt, Human
ccacccagacaaacgugag

SEQ ID NO: 291628 - RNA, 21 nt, Human
cccaacccagagucauccccu

SEQ ID NO: 291629 - RNA, 25 nt, Human
cccacggccaagggcaggcuccagc

SEQ ID NO: 291630 - RNA, 23 nt, Human
ccccaacccagagucauccccuc

SEQ ID NO: 291631 - RNA, 19 nt, Human
cccccgccugccagcccgc

SEQ ID NO: 291632 - RNA, 22 nt, Human
cccccggcgcgccaaagagaag

SEQ ID NO: 291633 - RNA, 20 nt, Human
ccccgaguccucuccccucu

SEQ ID NO: 291634 - RNA, 25 nt, Human
ccccgcucugucggaaggggccaga

SEQ ID NO: 291635 - RNA, 21 nt, Human
cccggcacgucgcuucgggca

SEQ ID NO: 291636 - RNA, 24 nt, Human
cccggcgcgccaaagagaagcccg

SEQ ID NO: 291637 - RNA, 18 nt, Human
cccucggcgccccccucc

SEQ ID NO: 291638 - RNA, 21 nt, Human
ccgcagcagccuuucgcccac

SEQ ID NO: 291639 - RNA, 20 nt, Human
ccgcagcagccuuucgcccc

SEQ ID NO: 291640 - RNA, 18 nt, Human
ccugcaccaggcgcuggg

SEQ ID NO: 291641 - RNA, 24 nt, Human
ccuuucgcccacgggggcgaaggc

SEQ ID NO: 291642 - RNA, 19 nt, Human
cgaagcagccgccugaaac

SEQ ID NO: 291643 - RNA, 22 nt, Human
cgagagggaggggagggagggg

SEQ ID NO: 291644 - RNA, 18 nt, Human
cgaguccucuccccucuc

SEQ ID NO: 291645 - RNA, 21 nt, Human
cgcaaggucauuagucacgaa

SEQ ID NO: 291646 - RNA, 21 nt, Human
cgcagcagccuuucgcccacg

SEQ ID NO: 291647 - RNA, 27 nt, Human
cggaaggggccagaaccgcuccggcag

SEQ ID NO: 291648 - RNA, 18 nt, Human
cggcgcgccaaagagaag

SEQ ID NO: 291649 - RNA, 20 nt, Human
cgggaaugggggugggaggg

SEQ ID NO: 291650 - RNA, 24 nt, Human
cguuccaggcacucacuccaaacc

SEQ ID NO: 291651 - RNA, 26 nt, Human
cucccccaacccagagucaucccccc

SEQ ID NO: 291652 - RNA, 22 nt, Human
cuccccucucccggaaaggaag

SEQ ID NO: 291653 - RNA, 19 nt, Human
cugaauacuucuuucagua

SEQ ID NO: 291654 - RNA, 25 nt, Human
cuguuucauacauuuauuuuauuuu

SEQ ID NO: 291655 - RNA, 21 nt, Human
cuucuccugcugcugcugccg

SEQ ID NO: 291656 - RNA, 22 nt, Human
cuucuccugcugcugcugcuac

SEQ ID NO: 291657 - RNA, 23 nt, Human
gaagagaaagugaguguugggaa

SEQ ID NO: 291658 - RNA, 24 nt, Human
gaaggagcgagagggaggggaggg

SEQ ID NO: 291659 - RNA, 19 nt, Human
gacucugcucaugcagcgg

SEQ ID NO: 291660 - RNA, 23 nt, Human
gagaauccccggcucuagucccc

SEQ ID NO: 291661 - RNA, 21 nt, Human
gagcagugcgcaccgugcggu

SEQ ID NO: 291662 - RNA, 19 nt, Human
gaguagaaaggucaucaca

SEQ ID NO: 291663 - RNA, 26 nt, Human
gauagaugcuucuuuuuuuccuccug

SEQ ID NO: 291664 - RNA, 24 nt, Human
gcaaacuuuuaauaccaaacagaa

SEQ ID NO: 291665 - RNA, 19 nt, Human
gcacucacuccaaacccag

SEQ ID NO: 291666 - RNA, 21 nt, Human
gcccgagccaucuucagagac

SEQ ID NO: 291667 - RNA, 20 nt, Human
gcgccgcggguucggcgcuc

SEQ ID NO: 291668 - RNA, 20 nt, Human
gcuccuucuaaccacagccc

SEQ ID NO: 291669 - RNA, 22 nt, Human
gcugcuacugcuccuucuaacc

SEQ ID NO: 291670 - RNA, 27 nt, Human
ggaaaggaaggagcgagagggagggga

SEQ ID NO: 291671 - RNA, 25 nt, Human
ggaaggagcgagagggaggggaggg

SEQ ID NO: 291672 - RNA, 26 nt, Human
ggaaggggccagaaccgcuccggcag

SEQ ID NO: 291673 - RNA, 22 nt, Human
ggaaucagugaagggguuagac

SEQ ID NO: 291674 - RNA, 22 nt, Human
ggagagcgcggguuucucuuuu

SEQ ID NO: 291675 - RNA, 19 nt, Human
ggagcgagagggaggggag

SEQ ID NO: 291676 - RNA, 24 nt, Human
ggaggggagggagggggcaaaagc

SEQ ID NO: 291677 - RNA, 20 nt, Human
ggcugggaagagguggggaa

SEQ ID NO: 291678 - RNA, 21 nt, Human
ggggagccagucaacagaucg

SEQ ID NO: 291679 - RNA, 22 nt, Human
guacucacaguucacgggacac

SEQ ID NO: 291680 - RNA, 24 nt, Human
guagcacauuucugcauuaauacu

SEQ ID NO: 291681 - RNA, 22 nt, Human
gugcgcaccgugcggugcccaa

SEQ ID NO: 291682 - RNA, 23 nt, Human
guuccaggcacucacuccaaacc

SEQ ID NO: 291683 - RNA, 20 nt, Human
uaacaguaucacuaaaggcc

SEQ ID NO: 291684 - RNA, 21 nt, Human
uacaacaaguggaacaagcag

SEQ ID NO: 291685 - RNA, 23 nt, Human
uacagaagauaaucugucucaga

SEQ ID NO: 291686 - RNA, 21 nt, Human
uaccaaacagaaagaaugcaa

SEQ ID NO: 291687 - RNA, 18 nt, Human
uaccucuuguagauggcc

SEQ ID NO: 291688 - RNA, 21 nt, Human
uacucgaguugaguccaauuc

SEQ ID NO: 291689 - RNA, 20 nt, Human
uauaaaagauugaaagugga

SEQ ID NO: 291690 - RNA, 24 nt, Human
uauaaaagauugaaaguggaguuu

SEQ ID NO: 291691 - RNA, 18 nt, Human
uauuguuucauaauucau

SEQ ID NO: 291692 - RNA, 24 nt, Human
ucaaaaauaaaauguacaacaagu

SEQ ID NO: 291693 - RNA, 24 nt, Human
ucagacauccauuaguagcacauu

SEQ ID NO: 291694 - RNA, 21 nt, Human
uccugcugcugcugcuacugc

SEQ ID NO: 291695 - RNA, 24 nt, Human
uccugcugcugcugcuacugcucc

SEQ ID NO: 291696 - RNA, 26 nt, Human
uccugcugcugcugcuacugcuccuu

SEQ ID NO: 291697 - RNA, 23 nt, Human
uccugcuucuuccgaaaguuauu

SEQ ID NO: 291698 - RNA, 21 nt, Human
ucgaguugaguccaauucacg

SEQ ID NO: 291699 - RNA, 18 nt, Human
ucuccugcugcugcugcu

SEQ ID NO: 291700 - RNA, 23 nt, Human
ucuccugcugcugcugcuacugc

SEQ ID NO: 291701 - RNA, 19 nt, Human
ucucuuugguagcccccuc

SEQ ID NO: 291702 - RNA, 22 nt, Human
ucucuuuuuucuuaacaacucu

SEQ ID NO: 291703 - RNA, 22 nt, Human
ugaagggguuagacaugcaagu

SEQ ID NO: 291704 - RNA, 22 nt, Human
ugacucagacauccauuaguag

SEQ ID NO: 291705 - RNA, 21 nt, Human
ugagaaagaaaaagacucaaa

SEQ ID NO: 291706 - RNA, 22 nt, Human
ugcaaagagaacugccaaacac

SEQ ID NO: 291707 - RNA, 26 nt, Human
ugcaaguaacaaggaugguuucuaca

SEQ ID NO: 291708 - RNA, 19 nt, Human
ugcaccaggcgcuggggcc

SEQ ID NO: 291709 - RNA, 22 nt, Human
ugccacagaagaaaauaauuuc

SEQ ID NO: 291710 - RNA, 24 nt, Human
ugccacagaagaaaauaauuucag

SEQ ID NO: 291711 - RNA, 21 nt, Human
ugcggugcccaaguuuggguu

SEQ ID NO: 291712 - RNA, 18 nt, Human
ugcuaaccgccucuuuaa

SEQ ID NO: 291713 - RNA, 20 nt, Human
ugcuccggcuccggccaccc

SEQ ID NO: 291714 - RNA, 21 nt, Human
ugcuccuucuaaccacagccc

SEQ ID NO: 291715 - RNA, 21 nt, Human
uggaaacaaaaaaauguagua

SEQ ID NO: 291716 - RNA, 24 nt, Human
uggaauuucuggugacucagacau

SEQ ID NO: 291717 - RNA, 18 nt, Human
uggaggcagaaguggcag

SEQ ID NO: 291718 - RNA, 18 nt, Human
uggggaagagaaagugag

SEQ ID NO: 291719 - RNA, 21 nt, Human
ugucucuuugguagcccccuc

SEQ ID NO: 291720 - RNA, 20 nt, Human
uguugggaaucagugaaggg

SEQ ID NO: 291721 - RNA, 18 nt, Human
uguuuuuuuuuuuuugga

SEQ ID NO: 291722 - RNA, 23 nt, Human
uugucucuuugguagcccccucu

SEQ ID NO: 291723 - RNA, 26 nt, Human
uugucucuuugguagcccccucuuug

SEQ ID NO: 291724 - RNA, 25 nt, Human
uuucauaauucaugcaaugggugcu

SEQ ID NO: 291725 - RNA, 19 nt, Human
uuuuccuccugcuucuucc

SEQ ID NO: 291726 - RNA, 20 nt, Human
uuuuccuccugcuucuuccg

SEQ ID NO: 291727 - RNA, 26 nt, Human
uuuuguuuuuuuuuuuuuggagaggg

SEQ ID NO: 291728 - RNA, 23 nt, Human
uuuuuuggagagggguggggaag

SEQ ID NO: 291729 - RNA, 23 nt, Human
uuuuuuuuuuuggagaggggugg

SEQ ID NO: 291730 - RNA, 19 nt, Human
aaaaacacuaagaaaaugg

SEQ ID NO: 291731 - RNA, 23 nt, Human
aaauaccaaacaguaccaaugug

SEQ ID NO: 291732 - RNA, 21 nt, Human
aacuuccacuuuagcuuuuau

SEQ ID NO: 291733 - RNA, 19 nt, Human
aagaaaauggcaagccgca

SEQ ID NO: 291734 - RNA, 18 nt, Human
aggcucucggaaucacgc

SEQ ID NO: 291735 - RNA, 22 nt, Human
caagugcgauccgaaaggcuaa

SEQ ID NO: 291736 - RNA, 21 nt, Human
cauaaaaauuacauuaacuac

SEQ ID NO: 291737 - RNA, 19 nt, Human
cccucacucugcgccucuc

SEQ ID NO: 291738 - RNA, 19 nt, Human
ccucacucugcgccucucc

SEQ ID NO: 291739 - RNA, 22 nt, Human
cgggagaagucugcggguagca

SEQ ID NO: 291740 - RNA, 24 nt, Human
cuuggcaaggcaaaauuucucaaa

SEQ ID NO: 291741 - RNA, 23 nt, Human
gcaaauaccaaacaguaccaaug

SEQ ID NO: 291742 - RNA, 23 nt, Human
gccuccagccucaagugcgaucc

SEQ ID NO: 291743 - RNA, 27 nt, Human
uaaaaacacuaagaaaauggcaagccg

SEQ ID NO: 291744 - RNA, 18 nt, Human
uacacaauguacagguua

SEQ ID NO: 291745 - RNA, 19 nt, Human
uagcagcuccgagccucca

SEQ ID NO: 291746 - RNA, 19 nt, Human
uaggggcuucucggaguga

SEQ ID NO: 291747 - RNA, 24 nt, Human
uauauacaaacauuacauuacaca

SEQ ID NO: 291748 - RNA, 21 nt, Human
ucaauaacuuaggggcuucuc

SEQ ID NO: 291749 - RNA, 23 nt, Human
uccuuuggcaauaacuuccacuu

SEQ ID NO: 291750 - RNA, 22 nt, Human
ucuucaaacacaugacaaaucu

SEQ ID NO: 291751 - RNA, 22 nt, Human
ugaaaucuaccacagagucaag

SEQ ID NO: 291752 - RNA, 22 nt, Human
uggcaauaacuuccacuuuagc

SEQ ID NO: 291753 - RNA, 21 nt, Human
uguacagguuaaaaacacuaa

SEQ ID NO: 291754 - RNA, 20 nt, Human
ugucuuacagacaguuccuu

SEQ ID NO: 291755 - RNA, 18 nt, Human
uguuuuguuuuuugucuu

SEQ ID NO: 291756 - RNA, 21 nt, Human
uucaaacacaugacaaaucuu

SEQ ID NO: 291757 - RNA, 20 nt, Human
uugaaaucaaagucaauagc

SEQ ID NO: 291758 - RNA, 24 nt, Human
uuuguuuuuugucuuacagacagu

SEQ ID NO: 291759 - RNA, 20 nt, Human
aacacucauucuccucagca

SEQ ID NO: 291760 - RNA, 22 nt, Human
aagaucacaacaaugaccacca

SEQ ID NO: 291761 - RNA, 23 nt, Human
aagcgugugcaaagacuuagggu

SEQ ID NO: 291762 - RNA, 19 nt, Human
acacucauucuccucagca

SEQ ID NO: 291763 - RNA, 18 nt, Human
acaguacuauacuuuggc

SEQ ID NO: 291764 - RNA, 24 nt, Human
accaaaggggcauccccagcuuua

SEQ ID NO: 291765 - RNA, 23 nt, Human
accaccucaaguucaaagaaaca

SEQ ID NO: 291766 - RNA, 21 nt, Human
acucuggaggcugucaaaacu

SEQ ID NO: 291767 - RNA, 23 nt, Human
aggaauacaagcacaagcgugug

SEQ ID NO: 291768 - RNA, 18 nt, Human
aggaauggcugagagggg

SEQ ID NO: 291769 - RNA, 18 nt, Human
aggcacugaagugaucug

SEQ ID NO: 291770 - RNA, 22 nt, Human
aggcacugaagugaucugaacu

SEQ ID NO: 291771 - RNA, 22 nt, Human
agguaaaaaucccucaggucca

SEQ ID NO: 291772 - RNA, 24 nt, Human
agugucaacauccacugcaaaaac

SEQ ID NO: 291773 - RNA, 18 nt, Human
agugucugguuugagaug

SEQ ID NO: 291774 - RNA, 26 nt, Human
aucaccaccucaaguucaaagaaaca

SEQ ID NO: 291775 - RNA, 21 nt, Human
aucagaggcaacaauuuuaaa

SEQ ID NO: 291776 - RNA, 21 nt, Human
auccagaacaguaacaaucac

SEQ ID NO: 291777 - RNA, 24 nt, Human
auccaguccaaaaacacucugccc

SEQ ID NO: 291778 - RNA, 23 nt, Human
augaaaugggaccucucuuucaa

SEQ ID NO: 291779 - RNA, 23 nt, Human
caaaaacacucugcccauuuaac

SEQ ID NO: 291780 - RNA, 18 nt, Human
caaacgaugcaaucccac

SEQ ID NO: 291781 - RNA, 22 nt, Human
caaaugaaaugggaccucucuu

SEQ ID NO: 291782 - RNA, 23 nt, Human
caacaaagaagaggucucuaaca

SEQ ID NO: 291783 - RNA, 19 nt, Human
caacaaugaccaccauggc

SEQ ID NO: 291784 - RNA, 19 nt, Human
caacauccacugcaaaaac

SEQ ID NO: 291785 - RNA, 23 nt, Human
caagcugauaaacaaugucugca

SEQ ID NO: 291786 - RNA, 19 nt, Human
caaucagagcagccaacag

SEQ ID NO: 291787 - RNA, 22 nt, Human
cacaguacuauacuuuggcaga

SEQ ID NO: 291788 - RNA, 24 nt, Human
cacugcaaaaacuucugcuaccac

SEQ ID NO: 291789 - RNA, 18 nt, Human
cacugucuucaucugugg

SEQ ID NO: 291790 - RNA, 26 nt, Human
cagagcagccaacagguaaaaauccc

SEQ ID NO: 291791 - RNA, 20 nt, Human
cagauaaauacacggugcca

SEQ ID NO: 291792 - RNA, 22 nt, Human
cagcaucugcaucugucacugu

SEQ ID NO: 291793 - RNA, 21 nt, Human
caucacuuacugugaccugca

SEQ ID NO: 291794 - RNA, 22 nt, Human
cauccagaacaguaacaaucac

SEQ ID NO: 291795 - RNA, 23 nt, Human
ccagaacaguaacaaucacagcc

SEQ ID NO: 291796 - RNA, 21 nt, Human
ccaguccaaaaacacucugcc

SEQ ID NO: 291797 - RNA, 22 nt, Human
ccaguccaaaaacacucugccc

SEQ ID NO: 291798 - RNA, 22 nt, Human
cccaacaaagguguuguccaaa

SEQ ID NO: 291799 - RNA, 23 nt, Human
cccacaucaguaggugcugguuu

SEQ ID NO: 291800 - RNA, 18 nt, Human
ccggcgaugauggcaauc

SEQ ID NO: 291801 - RNA, 22 nt, Human
cgaagaucacaacaaugaccac

SEQ ID NO: 291802 - RNA, 20 nt, Human
cguuaacauaaaggaauaca

SEQ ID NO: 291803 - RNA, 22 nt, Human
cuccuugggaacugcacucuga

SEQ ID NO: 291804 - RNA, 19 nt, Human
cucugcccauuuaacaauu

SEQ ID NO: 291805 - RNA, 19 nt, Human
cugaaacuguaauuagggc

SEQ ID NO: 291806 - RNA, 21 nt, Human
cugaagaaaucauuggggagg

SEQ ID NO: 291807 - RNA, 23 nt, Human
cuugaagccuccuugggaacugc

SEQ ID NO: 291808 - RNA, 24 nt, Human
cuugagcuauugcggaauccagcc

SEQ ID NO: 291809 - RNA, 21 nt, Human
gacaggagauggaaacauggg

SEQ ID NO: 291810 - RNA, 18 nt, Human
gagcaggaguggagcugc

SEQ ID NO: 291811 - RNA, 22 nt, Human
gaugcacaaauugcaagaggaa

SEQ ID NO: 291812 - RNA, 18 nt, Human
gcacaaauugcaagagga

SEQ ID NO: 291813 - RNA, 21 nt, Human
gcugaauuacagagguaccua

SEQ ID NO: 291814 - RNA, 20 nt, Human
ggaauaugcaccuccacuug

SEQ ID NO: 291815 - RNA, 26 nt, Human
ggaauaugcaccuccacuugacccuc

SEQ ID NO: 291816 - RNA, 19 nt, Human
ggagauggaaacauggggg

SEQ ID NO: 291817 - RNA, 22 nt, Human
ggagugccuccauccucuacuu

SEQ ID NO: 291818 - RNA, 26 nt, Human
ggcaaucagagcagccaacagguaaa

SEQ ID NO: 291819 - RNA, 23 nt, Human
gggcgaccugggcaccaaaaaug

SEQ ID NO: 291820 - RNA, 20 nt, Human
guaaaaaucccucaggucca

SEQ ID NO: 291821 - RNA, 28 nt, Human
uaaaaaugaaucguucuuguucuucucu

SEQ ID NO: 291822 - RNA, 23 nt, Human
uaaacaggcaaucagagcagcca

SEQ ID NO: 291823 - RNA, 20 nt, Human
uaaaggaaguauuagacggu

SEQ ID NO: 291824 - RNA, 25 nt, Human
uaaggggcccuuugucuugaagccu

SEQ ID NO: 291825 - RNA, 20 nt, Human
uacaagcacaagcgugugca

SEQ ID NO: 291826 - RNA, 19 nt, Human
uacaggcugguugaaaauu

SEQ ID NO: 291827 - RNA, 19 nt, Human
uaccggauuucagcauuac

SEQ ID NO: 291828 - RNA, 20 nt, Human
uaccugaggucuauauuagg

SEQ ID NO: 291829 - RNA, 24 nt, Human
uacucuggaggcugucaaaacucc

SEQ ID NO: 291830 - RNA, 18 nt, Human
uacugccuauaucugcau

SEQ ID NO: 291831 - RNA, 23 nt, Human
uagaaagggugucacaaccccca

SEQ ID NO: 291832 - RNA, 20 nt, Human
uagacgguggagaaaugaca

SEQ ID NO: 291833 - RNA, 19 nt, Human
uaggaggguuaucauuuac

SEQ ID NO: 291834 - RNA, 18 nt, Human
uaggguaccccaggucac

SEQ ID NO: 291835 - RNA, 23 nt, Human
uauaacccacgucgguuguuuuc

SEQ ID NO: 291836 - RNA, 24 nt, Human
ucaaagaaacacucauucuccuca

SEQ ID NO: 291837 - RNA, 21 nt, Human
ucacaacaaugaccaccaugg

SEQ ID NO: 291838 - RNA, 23 nt, Human
ucacaacaaugaccaccauggca

SEQ ID NO: 291839 - RNA, 22 nt, Human
ucacugugauuacccccacagu

SEQ ID NO: 291840 - RNA, 20 nt, Human
ucagauccuuugguauguuu

SEQ ID NO: 291841 - RNA, 18 nt, Human
ucagcguucauuccagug

SEQ ID NO: 291842 - RNA, 22 nt, Human
ucaguaggugcugguuuuucuu

SEQ ID NO: 291843 - RNA, 22 nt, Human
uccacgauauccaguccaaaaa

SEQ ID NO: 291844 - RNA, 19 nt, Human
uccagaucaaagaaggagg

SEQ ID NO: 291845 - RNA, 22 nt, Human
uccuauacuuugcuccuccagu

SEQ ID NO: 291846 - RNA, 18 nt, Human
ucuacuuugauuuucauc

SEQ ID NO: 291847 - RNA, 19 nt, Human
ucucuaucuaaggaccucu

SEQ ID NO: 291848 - RNA, 22 nt, Human
ucugcauuuuucccacugucuu

SEQ ID NO: 291849 - RNA, 22 nt, Human
ucugcuaccacggagccaggaa

SEQ ID NO: 291850 - RNA, 20 nt, Human
ucuguggagugccuccaucc

SEQ ID NO: 291851 - RNA, 24 nt, Human
ugaaaagcaggcuguggagaagca

SEQ ID NO: 291852 - RNA, 22 nt, Human
ugaaaugggaccucucuuucaa

SEQ ID NO: 291853 - RNA, 26 nt, Human
ugacaggagauggaaacaugggggca

SEQ ID NO: 291854 - RNA, 25 nt, Human
ugacuccagaauagggauccaacac

SEQ ID NO: 291855 - RNA, 21 nt, Human
ugauaaacaaugucugcauuu

SEQ ID NO: 291856 - RNA, 19 nt, Human
ugauagguucaugaacugc

SEQ ID NO: 291857 - RNA, 22 nt, Human
ugaugcacaaauugcaagagga

SEQ ID NO: 291858 - RNA, 19 nt, Human
ugcaaaaacuucugcuacc

SEQ ID NO: 291859 - RNA, 22 nt, Human
ugcacaaauugcaagaggaagc

SEQ ID NO: 291860 - RNA, 21 nt, Human
ugcaggggcgaccugggcacc

SEQ ID NO: 291861 - RNA, 24 nt, Human
ugcaucugucacugugauuacccc

SEQ ID NO: 291862 - RNA, 23 nt, Human
uggaaagcggcuguugaucaaag

SEQ ID NO: 291863 - RNA, 21 nt, Human
uggagaagcagauuuguagug

SEQ ID NO: 291864 - RNA, 23 nt, Human
uggcauggagcugaauuacagag

SEQ ID NO: 291865 - RNA, 20 nt, Human
uggccguacuggauuucugu

SEQ ID NO: 291866 - RNA, 24 nt, Human
ugguuguccuccaucaguggcuuu

SEQ ID NO: 291867 - RNA, 21 nt, Human
ugguuugagaugaaaagcagg

SEQ ID NO: 291868 - RNA, 21 nt, Human
ugucauuuucauccucaagcu

SEQ ID NO: 291869 - RNA, 21 nt, Human
ugucugguuugagaugaaaag

SEQ ID NO: 291870 - RNA, 21 nt, Human
ugucuugaagccuccuuggga

SEQ ID NO: 291871 - RNA, 18 nt, Human
ugugaauggcugucuccu

SEQ ID NO: 291872 - RNA, 20 nt, Human
uucagaaacugacagcucaa

SEQ ID NO: 291873 - RNA, 21 nt, Human
uugaagccugugucaggaucu

SEQ ID NO: 291874 - RNA, 18 nt, Human
uugacccucuuuaaacac

SEQ ID NO: 291875 - RNA, 23 nt, Human
uugaucaaaguguuuucuggaau

SEQ ID NO: 291876 - RNA, 23 nt, Human
uuggaggggaggggucccauugu

SEQ ID NO: 291877 - RNA, 18 nt, Human
uuggcuuuggaggggagg

SEQ ID NO: 291878 - RNA, 24 nt, Human
uuguccaaagggaguuccugaauc

SEQ ID NO: 291879 - RNA, 21 nt, Human
uugucuugaagccuccuuggg

SEQ ID NO: 291880 - RNA, 23 nt, Human
uuucaucacauagguaucuuucu

SEQ ID NO: 291881 - RNA, 18 nt, Human
uuugauaggguuggcuac

SEQ ID NO: 291882 - RNA, 18 nt, Human
uuuguagugcuuggccag

SEQ ID NO: 291883 - RNA, 21 nt, Human
uuugugaauggcugucuccuc

SEQ ID NO: 291884 - RNA, 25 nt, Human
aaaaggaaaacuaaaccaaagagaa

SEQ ID NO: 291885 - RNA, 23 nt, Human
aaacucccaagcugcucaaucuc

SEQ ID NO: 291886 - RNA, 22 nt, Human
aacucccaagcugcucaaucuc

SEQ ID NO: 291887 - RNA, 22 nt, Human
aacuguuggcuugcagguauga

SEQ ID NO: 291888 - RNA, 26 nt, Human
aagcuaaaaguagacaagagggaccc

SEQ ID NO: 291889 - RNA, 23 nt, Human
aagcugcucaaucucaaaacuuu

SEQ ID NO: 291890 - RNA, 19 nt, Human
aauccugcagagcugaagu

SEQ ID NO: 291891 - RNA, 30 nt, Human
aaugcuuuuuuuaaauaacagacuccuacu

SEQ ID NO: 291892 - RNA, 24 nt, Human
acauguguugguaacaaguuuuac

SEQ ID NO: 291893 - RNA, 21 nt, Human
accaccauuuucauuuauuag

SEQ ID NO: 291894 - RNA, 22 nt, Human
accuugaagacauuuuuuaaag

SEQ ID NO: 291895 - RNA, 21 nt, Human
acuaaaccaaagagaaggugu

SEQ ID NO: 291896 - RNA, 19 nt, Human
agaaaggaaacuugggucu

SEQ ID NO: 291897 - RNA, 22 nt, Human
agacaggauccccggagcacag

SEQ ID NO: 291898 - RNA, 19 nt, Human
agagagagagagaaagaga

SEQ ID NO: 291899 - RNA, 19 nt, Human
agaggguggcugccaccuc

SEQ ID NO: 291900 - RNA, 21 nt, Human
agccaauaucuggcacucgca

SEQ ID NO: 291901 - RNA, 23 nt, Human
agccagaguggagagaaagaguu

SEQ ID NO: 291902 - RNA, 18 nt, Human
agcuuuuacgacaaaacc

SEQ ID NO: 291903 - RNA, 19 nt, Human
aggagaaaggaaacuuggg

SEQ ID NO: 291904 - RNA, 23 nt, Human
aguuacacacccuucaaaauaug

SEQ ID NO: 291905 - RNA, 21 nt, Human
auaaaucuaugaaacaacaaa

SEQ ID NO: 291906 - RNA, 21 nt, Human
auaccauuagaauuucaaagc

SEQ ID NO: 291907 - RNA, 21 nt, Human
augcaagaggcagccccagag

SEQ ID NO: 291908 - RNA, 24 nt, Human
auucaagacaaaacugccauuaau

SEQ ID NO: 291909 - RNA, 22 nt, Human
caacaauaaagcuuaaaguuca

SEQ ID NO: 291910 - RNA, 23 nt, Human
caacagacuuuagggucuccuaa

SEQ ID NO: 291911 - RNA, 21 nt, Human
cacagaauuaguagauugaaa

SEQ ID NO: 291912 - RNA, 20 nt, Human
cacauacacaagcacagagu

SEQ ID NO: 291913 - RNA, 18 nt, Human
cacuguaugagaaaacaa

SEQ ID NO: 291914 - RNA, 24 nt, Human
cagauaccauuagaauuucaaagc

SEQ ID NO: 291915 - RNA, 22 nt, Human
caggauccccggagcacagggc

SEQ ID NO: 291916 - RNA, 22 nt, Human
cauagcauacagcauacauaug

SEQ ID NO: 291917 - RNA, 18 nt, Human
caugcaagaggcagcccc

SEQ ID NO: 291918 - RNA, 21 nt, Human
cauucaagacaaaacugccau

SEQ ID NO: 291919 - RNA, 22 nt, Human
ccaguggccacaaacucccaag

SEQ ID NO: 291920 - RNA, 21 nt, Human
ccccaugcaauccugcagagc

SEQ ID NO: 291921 - RNA, 22 nt, Human
ccccaugcaauccugcagagcu

SEQ ID NO: 291922 - RNA, 23 nt, Human
cccgcgguagccacacauaccca

SEQ ID NO: 291923 - RNA, 19 nt, Human
cccuucaaaauaugggaga

SEQ ID NO: 291924 - RNA, 20 nt, Human
ccgcgguagccacacauacc

SEQ ID NO: 291925 - RNA, 19 nt, Human
cuaaaaguagacaagacag

SEQ ID NO: 291926 - RNA, 19 nt, Human
cuaaaccaaagagaaggug

SEQ ID NO: 291927 - RNA, 25 nt, Human
cuagcacaccaagacaagucacaga

SEQ ID NO: 291928 - RNA, 23 nt, Human
cuaugaaacaacaaacagcgaaa

SEQ ID NO: 291929 - RNA, 18 nt, Human
cucccaagcugcucaauc

SEQ ID NO: 291930 - RNA, 18 nt, Human
cugcagagcugaaguuac

SEQ ID NO: 291931 - RNA, 21 nt, Human
cuggaccauaaauaaaauucc

SEQ ID NO: 291932 - RNA, 18 nt, Human
cuuauuuaaggugacagc

SEQ ID NO: 291933 - RNA, 23 nt, Human
gaacuguuggcuugcagguauga

SEQ ID NO: 291934 - RNA, 20 nt, Human
gaccugaaagaguaaagcug

SEQ ID NO: 291935 - RNA, 20 nt, Human
gagagagagagagaaagaga

SEQ ID NO: 291936 - RNA, 20 nt, Human
gccacaaacucccaagcugc

SEQ ID NO: 291937 - RNA, 21 nt, Human
gcugcucaaucucaaaacuuu

SEQ ID NO: 291938 - RNA, 20 nt, Human
gcuucuguuucccagggugg

SEQ ID NO: 291939 - RNA, 19 nt, Human
gggcugggaagccucuccu

SEQ ID NO: 291940 - RNA, 21 nt, Human
gggcugggaagccucuccuuu

SEQ ID NO: 291941 - RNA, 18 nt, Human
uaacagacuccuaccucu

SEQ ID NO: 291942 - RNA, 20 nt, Human
uaacaucauagguguuagua

SEQ ID NO: 291943 - RNA, 24 nt, Human
uaauaaauuagcccgauucuccuc

SEQ ID NO: 291944 - RNA, 21 nt, Human
uaauggaauuacauucaacaa

SEQ ID NO: 291945 - RNA, 27 nt, Human
uaauuaucaucauuaauaaauuagccc

SEQ ID NO: 291946 - RNA, 19 nt, Human
uacacaaaagcugauuaac

SEQ ID NO: 291947 - RNA, 23 nt, Human
uaccaauagcaccaauucaaaau

SEQ ID NO: 291948 - RNA, 21 nt, Human
uaccauuagaauuucaaagca

SEQ ID NO: 291949 - RNA, 25 nt, Human
uaccccaugcaauccugcagagcug

SEQ ID NO: 291950 - RNA, 19 nt, Human
uacgacaaaaccuguuaaa

SEQ ID NO: 291951 - RNA, 18 nt, Human
uacugugucuuucauaca

SEQ ID NO: 291952 - RNA, 23 nt, Human
uagaauuucaaagcauucugcaa

SEQ ID NO: 291953 - RNA, 24 nt, Human
uagaauuucaaagcauucugcaac

SEQ ID NO: 291954 - RNA, 26 nt, Human
uagcacaccaagacaagucacagaau

SEQ ID NO: 291955 - RNA, 20 nt, Human
uaguagauugaaaaaucugc

SEQ ID NO: 291956 - RNA, 23 nt, Human
uauuugucuuuguuuucuugccu

SEQ ID NO: 291957 - RNA, 22 nt, Human
uccacuuuuucacagguguaca

SEQ ID NO: 291958 - RNA, 22 nt, Human
ugaaacaacaaacagcgaaagg

SEQ ID NO: 291959 - RNA, 22 nt, Human
ugaacaccuugaagacauuuuu

SEQ ID NO: 291960 - RNA, 19 nt, Human
ugauauuugaaaagaugau

SEQ ID NO: 291961 - RNA, 23 nt, Human
ugcaauccugcagagcugaaguu

SEQ ID NO: 291962 - RNA, 28 nt, Human
ugcuuuuuuuaaauaacagacuccuacu

SEQ ID NO: 291963 - RNA, 20 nt, Human
uggcuggaccauaaauaaaa

SEQ ID NO: 291964 - RNA, 22 nt, Human
uggcuggaccauaaauaaaauu

SEQ ID NO: 291965 - RNA, 20 nt, Human
uggcuugcagguaugaugca

SEQ ID NO: 291966 - RNA, 23 nt, Human
uguacagauacauuauaauuauc

SEQ ID NO: 291967 - RNA, 22 nt, Human
uuaaaaaaacacuacuccacuu

SEQ ID NO: 291968 - RNA, 19 nt, Human
uuaaaacacugaacuguug

SEQ ID NO: 291969 - RNA, 19 nt, Human
uuaacaaugguuaaaaaaa

SEQ ID NO: 291970 - RNA, 26 nt, Human
uuagugaacaccuugaagacauuuuu

SEQ ID NO: 291971 - RNA, 21 nt, Human
uucaaaaugaauccacaugac

SEQ ID NO: 291972 - RNA, 22 nt, Human
uucacauacacaagcacagagu

SEQ ID NO: 291973 - RNA, 21 nt, Human
uucgcaaauguaaaaagugcu

SEQ ID NO: 291974 - RNA, 18 nt, Human
uuguauucauauuucucu

SEQ ID NO: 291975 - RNA, 22 nt, Human
uuuauuuaguaauacaugcaag

SEQ ID NO: 291976 - RNA, 22 nt, Human
uuuucauaaacauugugugcaa

SEQ ID NO: 291977 - RNA, 25 nt, Human
aaaaggaaaacuaaaccaaagagaa

SEQ ID NO: 291978 - RNA, 23 nt, Human
aaacucccaagcugcucaaucuc

SEQ ID NO: 291979 - RNA, 21 nt, Human
aacaauaaagcuuaaaguuca

SEQ ID NO: 291980 - RNA, 22 nt, Human
aacucccaagcugcucaaucuc

SEQ ID NO: 291981 - RNA, 22 nt, Human
aacuguuggcuugcagguauga

SEQ ID NO: 291982 - RNA, 26 nt, Human
aagcuaaaaguagacaagagggaccc

SEQ ID NO: 291983 - RNA, 19 nt, Human
aauccugcagagcugaagu

SEQ ID NO: 291984 - RNA, 30 nt, Human; identical to SEQ ID NO: 291891

SEQ ID NO: 291985 - RNA, 24 nt, Human
acauguguugguaacaaguuuuac

SEQ ID NO: 291986 - RNA, 21 nt, Human
accaccauuuucauuuauuag

SEQ ID NO: 291987 - RNA, 24 nt, Human
acccgcgguagccacacauaccca

SEQ ID NO: 291988 - RNA, 21 nt, Human
acuaaaccaaagagaaggugu

SEQ ID NO: 291989 - RNA, 19 nt, Human
agaaaggaaacuugggucu

SEQ ID NO: 291990 - RNA, 21 nt, Human
agacaggauccccggagcaca

SEQ ID NO: 291991 - RNA, 22 nt, Human
agacaggauccccggagcacag

SEQ ID NO: 291992 - RNA, 19 nt, Human
agagagagagagaaagaga

SEQ ID NO: 291993 - RNA, 19 nt, Human
agaggguggcugccaccuc

SEQ ID NO: 291994 - RNA, 21 nt, Human
agccaauaucuggcacucgca

SEQ ID NO: 291995 - RNA, 23 nt, Human
agccagaguggagagaaagaguu

SEQ ID NO: 291996 - RNA, 18 nt, Human
aggagaaaggaaacuugg

SEQ ID NO: 291997 - RNA, 19 nt, Human
aggagaaaggaaacuuggg

SEQ ID NO: 291998 - RNA, 23 nt, Human
aguuacacacccuucaaaauaug

SEQ ID NO: 291999 - RNA, 21 nt, Human
auaaaucuaugaaacaacaaa

SEQ ID NO: 292000 - RNA, 21 nt, Human
auaccauuagaauuucaaagc

SEQ ID NO: 292001 - RNA, 21 nt, Human
augcaagaggcagccccagag

SEQ ID NO: 292002 - RNA, 20 nt, Human
caaaaggaaauauaauggaa

SEQ ID NO: 292003 - RNA, 22 nt, Human
caacaauaaagcuuaaaguuca

SEQ ID NO: 292004 - RNA, 23 nt, Human
caacagacuuuagggucuccuaa

SEQ ID NO: 292005 - RNA, 21 nt, Human
cacagaauuaguagauugaaa

SEQ ID NO: 292006 - RNA, 20 nt, Human
cacauacacaagcacagagu

SEQ ID NO: 292007 - RNA, 18 nt, Human
cacuguaugagaaaacaa

SEQ ID NO: 292008 - RNA, 24 nt, Human
cagauaccauuagaauuucaaagc

SEQ ID NO: 292009 - RNA, 22 nt, Human
caggauccccggagcacagggc

SEQ ID NO: 292010 - RNA, 18 nt, Human
caugcaagaggcagcccc

SEQ ID NO: 292011 - RNA, 22 nt, Human
ccaguggccacaaacucccaag

SEQ ID NO: 292012 - RNA, 23 nt, Human
cccaagcugcucaaucucaaaac

SEQ ID NO: 292013 - RNA, 21 nt, Human
ccccaugcaauccugcagagc

SEQ ID NO: 292014 - RNA, 22 nt, Human
ccccaugcaauccugcagagcu

SEQ ID NO: 292015 - RNA, 23 nt, Human
cccgcgguagccacacauaccca

SEQ ID NO: 292016 - RNA, 19 nt, Human
cccuucaaaauaugggaga

SEQ ID NO: 292017 - RNA, 20 nt, Human
ccgcgguagccacacauacc

SEQ ID NO: 292018 - RNA, 19 nt, Human
cuaaaaguagacaagacag

SEQ ID NO: 292019 - RNA, 25 nt, Human
cuagcacaccaagacaagucacaga

SEQ ID NO: 292020 - RNA, 23 nt, Human
cuaugaaacaacaaacagcgaaa

SEQ ID NO: 292021 - RNA, 18 nt, Human
cucccaagcugcucaauc

SEQ ID NO: 292022 - RNA, 18 nt, Human
cugcagagcugaaguuac

SEQ ID NO: 292023 - RNA, 21 nt, Human
cuggaccauaaauaaaauucc

SEQ ID NO: 292024 - RNA, 18 nt, Human
cuuauuuaaggugacagc

SEQ ID NO: 292025 - RNA, 23 nt, Human
gaacuguuggcuugcagguauga

SEQ ID NO: 292026 - RNA, 20 nt, Human
gaccugaaagaguaaagcug

SEQ ID NO: 292027 - RNA, 20 nt, Human
gagagagagagagaaagaga

SEQ ID NO: 292028 - RNA, 18 nt, Human
gcauacagcauacauaug

SEQ ID NO: 292029 - RNA, 20 nt, Human
gccacaaacucccaagcugc

SEQ ID NO: 292030 - RNA, 21 nt, Human
gcugcucaaucucaaaacuuu

SEQ ID NO: 292031 - RNA, 20 nt, Human
gcuucuguuucccagggugg

SEQ ID NO: 292032 - RNA, 21 nt, Human
gggcugggaagccucuccuuu

SEQ ID NO: 292033 - RNA, 18 nt, Human
uaacagacuccuaccucu

SEQ ID NO: 292034 - RNA, 18 nt, Human
uaacaucauagguguuag

SEQ ID NO: 292035 - RNA, 20 nt, Human
uaacaucauagguguuagua

SEQ ID NO: 292036 - RNA, 21 nt, Human
uaauaaauuagcccgauucuc

SEQ ID NO: 292037 - RNA, 21 nt, Human
uaauggaauuacauucaacaa

SEQ ID NO: 292038 - RNA, 27 nt, Human
uaauuaucaucauuaauaaauuagccc

SEQ ID NO: 292039 - RNA, 19 nt, Human
uacacaaaagcugauuaac

SEQ ID NO: 292040 - RNA, 23 nt, Human
uaccaauagcaccaauucaaaau

SEQ ID NO: 292041 - RNA, 21 nt, Human
uaccauuagaauuucaaagca

SEQ ID NO: 292042 - RNA, 25 nt, Human
uaccccaugcaauccugcagagcug

SEQ ID NO: 292043 - RNA, 19 nt, Human
uacgacaaaaccuguuaaa

SEQ ID NO: 292044 - RNA, 18 nt, Human
uacugugucuuucauaca

SEQ ID NO: 292045 - RNA, 23 nt, Human
uagaauuucaaagcauucugcaa

SEQ ID NO: 292046 - RNA, 24 nt, Human
uagaauuucaaagcauucugcaac

SEQ ID NO: 292047 - RNA, 26 nt, Human
uagcacaccaagacaagucacagaau

SEQ ID NO: 292048 - RNA, 20 nt, Human
uaguagauugaaaaaucugc

SEQ ID NO: 292049 - RNA, 23 nt, Human
uauuugucuuuguuuucuugccu

SEQ ID NO: 292050 - RNA, 22 nt, Human
uccacuuuuucacagguguaca

SEQ ID NO: 292051 - RNA, 22 nt, Human
ugaaacaacaaacagcgaaagg

SEQ ID NO: 292052 - RNA, 23 nt, Human
ugcaauccugcagagcugaaguu

SEQ ID NO: 292053 - RNA, 20 nt, Human
uggcuggaccauaaauaaaa

SEQ ID NO: 292054 - RNA, 22 nt, Human
uggcuggaccauaaauaaaauu

SEQ ID NO: 292055 - RNA, 20 nt, Human
uggcuugcagguaugaugca

SEQ ID NO: 292056 - RNA, 23 nt, Human
uguacagauacauuauaauuauc

SEQ ID NO: 292057 - RNA, 22 nt, Human
uuaaaaaaacacuacuccacuu

SEQ ID NO: 292058 - RNA, 19 nt, Human
uuaaaacacugaacuguug

SEQ ID NO: 292059 - RNA, 19 nt, Human
uuaacaaugguuaaaaaaa

SEQ ID NO: 292060 - RNA, 21 nt, Human
uucaaaaugaauccacaugac

SEQ ID NO: 292061 - RNA, 22 nt, Human
uucacauacacaagcacagagu

SEQ ID NO: 292062 - RNA, 21 nt, Human
uucgcaaauguaaaaagugcu

SEQ ID NO: 292063 - RNA, 18 nt, Human
uuguauucauauuucucu

SEQ ID NO: 292064 - RNA, 22 nt, Human
uuuucauaaacauugugugcaa

SEQ ID NO: 292065 - RNA, 23 nt, Human
aaaacaaauauauucauauucuc

SEQ ID NO: 292066 - RNA, 25 nt, Human
aaaaggaaaacuaaaccaaagagaa

SEQ ID NO: 292067 - RNA, 22 nt, Human
aaacaaauauauucauauucuc

SEQ ID NO: 292068 - RNA, 22 nt, Human
aacucccaagcugcucaaucuc

SEQ ID NO: 292069 - RNA, 22 nt, Human
aacuguuggcuugcagguauga

SEQ ID NO: 292070 - RNA, 26 nt, Human
aagcuaaaaguagacaagagggaccc

SEQ ID NO: 292071 - RNA, 23 nt, Human
aagcugcucaaucucaaaacuuu

SEQ ID NO: 292072 - RNA, 19 nt, Human
aauccugcagagcugaagu

SEQ ID NO: 292073 - RNA, 30 nt, Human; identical to SEQ ID NO: 291891

SEQ ID NO: 292074 - RNA, 20 nt, Human
acaguaccagauucuucagu

SEQ ID NO: 292075 - RNA, 24 nt, Human
acauguguugguaacaaguuuuac

SEQ ID NO: 292076 - RNA, 21 nt, Human
accaccauuuucauuuauuag

SEQ ID NO: 292077 - RNA, 24 nt, Human
acccgcgguagccacacauaccca

SEQ ID NO: 292078 - RNA, 21 nt, Human
acuaaaccaaagagaaggugu

SEQ ID NO: 292079 - RNA, 23 nt, Human
acugcauuuaccaccacagaauu

SEQ ID NO: 292080 - RNA, 19 nt, Human
agaaaggaaacuugggucu

SEQ ID NO: 292081 - RNA, 22 nt, Human
agacaggauccccggagcacag

SEQ ID NO: 292082 - RNA, 19 nt, Human
agagagagagagaaagaga

SEQ ID NO: 292083 - RNA, 19 nt, Human
agaggguggcugccaccuc

SEQ ID NO: 292084 - RNA, 21 nt, Human
agccaauaucuggcacucgca

SEQ ID NO: 292085 - RNA, 23 nt, Human
agccagaguggagagaaagaguu

SEQ ID NO: 292086 - RNA, 18 nt, Human
agcuuuuacgacaaaacc

SEQ ID NO: 292087 - RNA, 19 nt, Human
aggagaaaggaaacuuggg

SEQ ID NO: 292088 - RNA, 23 nt, Human
aguuacacacccuucaaaauaug

SEQ ID NO: 292089 - RNA, 21 nt, Human
auaaaucuaugaaacaacaaa

SEQ ID NO: 292090 - RNA, 21 nt, Human
auaccauuagaauuucaaagc

SEQ ID NO: 292091 - RNA, 22 nt, Human
augaaaaacaaauauauucaua

SEQ ID NO: 292092 - RNA, 20 nt, Human
caaaaggaaauauaauggaa

SEQ ID NO: 292093 - RNA, 22 nt, Human
caacaauaaagcuuaaaguuca

SEQ ID NO: 292094 - RNA, 23 nt, Human
caacagacuuuagggucuccuaa

SEQ ID NO: 292095 - RNA, 21 nt, Human
cacagaauuaguagauugaaa

SEQ ID NO: 292096 - RNA, 18 nt, Human
cacuguaugagaaaacaa

SEQ ID NO: 292097 - RNA, 21 nt, Human
cagagugagagagaaagagaa

SEQ ID NO: 292098 - RNA, 24 nt, Human
cagauaccauuagaauuucaaagc

SEQ ID NO: 292099 - RNA, 22 nt, Human
caggauccccggagcacagggc

SEQ ID NO: 292100 - RNA, 22 nt, Human
cauagcauacagcauacauaug

SEQ ID NO: 292101 - RNA, 18 nt, Human
caugcaagaggcagcccc

SEQ ID NO: 292102 - RNA, 19 nt, Human
ccacaaacucccaagcugc

SEQ ID NO: 292103 - RNA, 22 nt, Human
ccaguggccacaaacucccaag

SEQ ID NO: 292104 - RNA, 23 nt, Human
cccaagcugcucaaucucaaaac

SEQ ID NO: 292105 - RNA, 21 nt, Human
ccccaugcaauccugcagagc

SEQ ID NO: 292106 - RNA, 22 nt, Human
ccccaugcaauccugcagagcu

SEQ ID NO: 292107 - RNA, 19 nt, Human
cccuucaaaauaugggaga

SEQ ID NO: 292108 - RNA, 20 nt, Human
ccgcgguagccacacauacc

SEQ ID NO: 292109 - RNA, 18 nt, Human
cuaaaacugugaguacug

SEQ ID NO: 292110 - RNA, 19 nt, Human
cuaaaaguagacaagacag

SEQ ID NO: 292111 - RNA, 25 nt, Human
cuagcacaccaagacaagucacaga

SEQ ID NO: 292112 - RNA, 23 nt, Human
cuaugaaacaacaaacagcgaaa

SEQ ID NO: 292113 - RNA, 18 nt, Human
cucccaagcugcucaauc

SEQ ID NO: 292114 - RNA, 18 nt, Human
cugcagagcugaaguuac

SEQ ID NO: 292115 - RNA, 21 nt, Human
cuggaccauaaauaaaauucc

SEQ ID NO: 292116 - RNA, 18 nt, Human
cuuauuuaaggugacagc

SEQ ID NO: 292117 - RNA, 19 nt, Human
cuugcauuuucauaucuau

SEQ ID NO: 292118 - RNA, 23 nt, Human
gaacuguuggcuugcagguauga

SEQ ID NO: 292119 - RNA, 20 nt, Human
gaccugaaagaguaaagcug

SEQ ID NO: 292120 - RNA, 20 nt, Human
gagagagagagagaaagaga

SEQ ID NO: 292121 - RNA, 19 nt, Human
gagugagagagaaagagaa

SEQ ID NO: 292122 - RNA, 19 nt, Human
gcaagaggcagccccagag

SEQ ID NO: 292123 - RNA, 20 nt, Human
gcuucuguuucccagggugg

SEQ ID NO: 292124 - RNA, 21 nt, Human
gggcugggaagccucuccuuu

SEQ ID NO: 292125 - RNA, 21 nt, Human
uaaaaaagaauccacaaagga

SEQ ID NO: 292126 - RNA, 18 nt, Human
uaaauuauugugucuaug

SEQ ID NO: 292127 - RNA, 18 nt, Human
uaacagacuccuaccucu

SEQ ID NO: 292128 - RNA, 20 nt, Human
uaacaucauagguguuagua

SEQ ID NO: 292129 - RNA, 24 nt, Human
uaauaaauuagcccgauucuccuc

SEQ ID NO: 292130 - RNA, 21 nt, Human
uaauggaauuacauucaacaa

SEQ ID NO: 292131 - RNA, 27 nt, Human
uaauuaucaucauuaauaaauuagccc

SEQ ID NO: 292132 - RNA, 19 nt, Human
uacacaaaagcugauuaac

SEQ ID NO: 292133 - RNA, 23 nt, Human
uaccaauagcaccaauucaaaau

SEQ ID NO: 292134 - RNA, 21 nt, Human
uaccauuagaauuucaaagca

SEQ ID NO: 292135 - RNA, 25 nt, Human
uaccccaugcaauccugcagagcug

SEQ ID NO: 292136 - RNA, 19 nt, Human
uacgacaaaaccuguuaaa

SEQ ID NO: 292137 - RNA, 18 nt, Human
uacugugucuuucauaca

SEQ ID NO: 292138 - RNA, 23 nt, Human
uagaauuucaaagcauucugcaa

SEQ ID NO: 292139 - RNA, 24 nt, Human
uagaauuucaaagcauucugcaac

SEQ ID NO: 292140 - RNA, 26 nt, Human
uagcacaccaagacaagucacagaau

SEQ ID NO: 292141 - RNA, 20 nt, Human
uaguagauugaaaaaucugc

SEQ ID NO: 292142 - RNA, 25 nt, Human
uaugauggaguuccuuuguauggga

SEQ ID NO: 292143 - RNA, 23 nt, Human
uauucucaaacuugguaguuuua

SEQ ID NO: 292144 - RNA, 23 nt, Human
uauuugucuuuguuuucuugccu

SEQ ID NO: 292145 - RNA, 24 nt, Human
ucaaagaaaaaauugaaguuuuau

SEQ ID NO: 292146 - RNA, 22 nt, Human
uccacuuuuucacagguguaca

SEQ ID NO: 292147 - RNA, 22 nt, Human
ugaaacaacaaacagcgaaagg

SEQ ID NO: 292148 - RNA, 24 nt, Human
ugagagagaaagagaauucaguug

SEQ ID NO: 292149 - RNA, 23 nt, Human
ugcaauccugcagagcugaaguu

SEQ ID NO: 292150 - RNA, 22 nt, Human
ugcuuauuuauggaauauucag

SEQ ID NO: 292151 - RNA, 20 nt, Human
uggcuggaccauaaauaaaa

SEQ ID NO: 292152 - RNA, 20 nt, Human
uggcuugcagguaugaugca

SEQ ID NO: 292153 - RNA, 23 nt, Human
uguacagauacauuauaauuauc

SEQ ID NO: 292154 - RNA, 29 nt, Human
uguuuuggguuucuucccccaaauauuuu

SEQ ID NO: 292155 - RNA, 22 nt, Human
uuaaaaaaacacuacuccacuu

SEQ ID NO: 292156 - RNA, 19 nt, Human
uuaaaacacugaacuguug

SEQ ID NO: 292157 - RNA, 19 nt, Human
uuaacaaugguuaaaaaaa

SEQ ID NO: 292158 - RNA, 25 nt, Human
uuacacuuacaguaccagauucuuc

SEQ ID NO: 292159 - RNA, 22 nt, Human
uuacaguaccagauucuucagu

SEQ ID NO: 292160 - RNA, 24 nt, Human
uucaaaaugaauccacaugacgug

SEQ ID NO: 292161 - RNA, 22 nt, Human
uucacauacacaagcacagagu

SEQ ID NO: 292162 - RNA, 20 nt, Human
uuccuuuguaugggagugcc

SEQ ID NO: 292163 - RNA, 21 nt, Human
uucgcaaauguaaaaagugcu

SEQ ID NO: 292164 - RNA, 21 nt, Human
uugcagaacaauaugaaaaag

SEQ ID NO: 292165 - RNA, 22 nt, Human
uuuauuuaguaauacaugcaag

SEQ ID NO: 292166 - RNA, 22 nt, Human
uuuucauaaacauugugugcaa

SEQ ID NO: 292167 - RNA, 25 nt, Human
aaaaggaaaacuaaaccaaagagaa

SEQ ID NO: 292168 - RNA, 23 nt, Human
aaacucccaagcugcucaaucuc

SEQ ID NO: 292169 - RNA, 22 nt, Human
aacuguuggcuugcagguauga

SEQ ID NO: 292170 - RNA, 26 nt, Human
aagcuaaaaguagacaagagggaccc

SEQ ID NO: 292171 - RNA, 19 nt, Human
aauccugcagagcugaagu

SEQ ID NO: 292172 - RNA, 30 nt, Human; identical to SEQ ID NO: 291891

SEQ ID NO: 292173 - RNA, 24 nt, Human
acauguguugguaacaaguuuuac

SEQ ID NO: 292174 - RNA, 21 nt, Human
accaccauuuucauuuauuag

SEQ ID NO: 292175 - RNA, 24 nt, Human
acccgcgguagccacacauaccca

SEQ ID NO: 292176 - RNA, 19 nt, Human
agaaaggaaacuugggucu

SEQ ID NO: 292177 - RNA, 22 nt, Human
agacaggauccccggagcacag

SEQ ID NO: 292178 - RNA, 19 nt, Human
agagagagagagaaagaga

SEQ ID NO: 292179 - RNA, 19 nt, Human
agaggguggcugccaccuc

SEQ ID NO: 292180 - RNA, 18 nt, Human
agcagucacccuuuucug

SEQ ID NO: 292181 - RNA, 21 nt, Human
agccaauaucuggcacucgca

SEQ ID NO: 292182 - RNA, 23 nt, Human
agccagaguggagagaaagaguu

SEQ ID NO: 292183 - RNA, 19 nt, Human
aggagaaaggaaacuuggg

SEQ ID NO: 292184 - RNA, 19 nt, Human
agggccucugaguugggac

SEQ ID NO: 292185 - RNA, 23 nt, Human
aguuacacacccuucaaaauaug

SEQ ID NO: 292186 - RNA, 21 nt, Human
auaaaucuaugaaacaacaaa

SEQ ID NO: 292187 - RNA, 21 nt, Human
auaccauuagaauuucaaagc

SEQ ID NO: 292188 - RNA, 21 nt, Human
augcaagaggcagccccagag

SEQ ID NO: 292189 - RNA, 20 nt, Human
caaaaggaaauauaauggaa

SEQ ID NO: 292190 - RNA, 22 nt, Human
caacaauaaagcuuaaaguuca

SEQ ID NO: 292191 - RNA, 23 nt, Human
caacagacuuuagggucuccuaa

SEQ ID NO: 292192 - RNA, 21 nt, Human
cacagaauuaguagauugaaa

SEQ ID NO: 292193 - RNA, 18 nt, Human
cacuguaugagaaaacaa

SEQ ID NO: 292194 - RNA, 24 nt, Human
cagauaccauuagaauuucaaagc

SEQ ID NO: 292195 - RNA, 22 nt, Human
caggauccccggagcacagggc

SEQ ID NO: 292196 - RNA, 22 nt, Human
cauagcauacagcauacauaug

SEQ ID NO: 292197 - RNA, 18 nt, Human
caugcaagaggcagcccc

SEQ ID NO: 292198 - RNA, 22 nt, Human
ccaguggccacaaacucccaag

SEQ ID NO: 292199 - RNA, 23 nt, Human
cccaagcugcucaaucucaaaac

SEQ ID NO: 292200 - RNA, 21 nt, Human
ccccaugcaauccugcagagc

SEQ ID NO: 292201 - RNA, 21 nt, Human
ccccaugcaauccugcagagc

SEQ ID NO: 292202 - RNA, 19 nt, Human
cccuucaaaauaugggaga

SEQ ID NO: 292203 - RNA, 20 nt, Human
ccgcgguagccacacauacc

SEQ ID NO: 292204 - RNA, 24 nt, Human
ccucugaguugggacaaucaguuu

SEQ ID NO: 292205 - RNA, 19 nt, Human
cuaaaaguagacaagacag

SEQ ID NO: 292206 - RNA, 19 nt, Human
cuaaaccaaagagaaggug

SEQ ID NO: 292207 - RNA, 25 nt, Human
cuagcacaccaagacaagucacaga

SEQ ID NO: 292208 - RNA, 23 nt, Human
cuaugaaacaacaaacagcgaaa

SEQ ID NO: 292209 - RNA, 18 nt, Human
cucccaagcugcucaauc

SEQ ID NO: 292210 - RNA, 18 nt, Human
cugcagagcugaaguuac

SEQ ID NO: 292211 - RNA, 21 nt, Human
cuggaccauaaauaaaauucc

SEQ ID NO: 292212 - RNA, 18 nt, Human
cuuauuuaaggugacagc

SEQ ID NO: 292213 - RNA, 20 nt, Human
gaccugaaagaguaaagcug

SEQ ID NO: 292214 - RNA, 20 nt, Human
gagagagagagagaaagaga

SEQ ID NO: 292215 - RNA, 20 nt, Human
gccacaaacucccaagcugc

SEQ ID NO: 292216 - RNA, 21 nt, Human
gcugcucaaucucaaaacuuu

SEQ ID NO: 292217 - RNA, 20 nt, Human
gcuucuguuucccagggugg

SEQ ID NO: 292218 - RNA, 19 nt, Human
gggcugggaagccucuccu

SEQ ID NO: 292219 - RNA, 18 nt, Human
uaacagacuccuaccucu

SEQ ID NO: 292220 - RNA, 20 nt, Human
uaacaucauagguguuagua

SEQ ID NO: 292221 - RNA, 24 nt, Human
uaauaaauuagcccgauucuccuc

SEQ ID NO: 292222 - RNA, 21 nt, Human
uaauggaauuacauucaacaa

SEQ ID NO: 292223 - RNA, 27 nt, Human
uaauuaucaucauuaauaaauuagccc

SEQ ID NO: 292224 - RNA, 19 nt, Human
uacacaaaagcugauuaac

SEQ ID NO: 292225 - RNA, 23 nt, Human
uaccaauagcaccaauucaaaau

SEQ ID NO: 292226 - RNA, 21 nt, Human
uaccauuagaauuucaaagca

SEQ ID NO: 292227 - RNA, 25 nt, Human
uaccccaugcaauccugcagagcug

SEQ ID NO: 292228 - RNA, 19 nt, Human
uacgacaaaaccuguuaaa

SEQ ID NO: 292229 - RNA, 18 nt, Human
uacugugucuuucauaca

SEQ ID NO: 292230 - RNA, 23 nt, Human
uagaauuucaaagcauucugcaa

SEQ ID NO: 292231 - RNA, 24 nt, Human
uagaauuucaaagcauucugcaac

SEQ ID NO: 292232 - RNA, 26 nt, Human
uagcacaccaagacaagucacagaau

SEQ ID NO: 292233 - RNA, 20 nt, Human
uaguagauugaaaaaucugc

SEQ ID NO: 292234 - RNA, 23 nt, Human
uauuugucuuuguuuucuugccu

SEQ ID NO: 292235 - RNA, 22 nt, Human
uccacuuuuucacagguguaca

SEQ ID NO: 292236 - RNA, 22 nt, Human
ugaaacaacaaacagcgaaagg

SEQ ID NO: 292237 - RNA, 20 nt, Human
ugaguugggacaaucaguuu

SEQ ID NO: 292238 - RNA, 23 nt, Human
ugcaauccugcagagcugaaguu

SEQ ID NO: 292239 - RNA, 20 nt, Human
uggcuggaccauaaauaaaa

SEQ ID NO: 292240 - RNA, 20 nt, Human
uggcuugcagguaugaugca

SEQ ID NO: 292241 - RNA, 23 nt, Human
uguacagauacauuauaauuauc

SEQ ID NO: 292242 - RNA, 22 nt, Human
uuaaaaaaacacuacuccacuu

SEQ ID NO: 292243 - RNA, 19 nt, Human
uuaaaacacugaacuguug

SEQ ID NO: 292244 - RNA, 21 nt, Human
uucaaaaugaauccacaugac

SEQ ID NO: 292245 - RNA, 22 nt, Human
uucacauacacaagcacagagu

SEQ ID NO: 292246 - RNA, 21 nt, Human
uucgcaaauguaaaaagugcu

SEQ ID NO: 292247 - RNA, 18 nt, Human
uuguauucauauuucucu

SEQ ID NO: 292248 - RNA, 22 nt, Human
uuuauuuaguaauacaugcaag

SEQ ID NO: 292249 - RNA, 22 nt, Human
uuuucauaaacauugugugcaa

SEQ ID NO: 292250 - RNA, 25 nt, Human
aaaaggaaaacuaaaccaaagagaa

SEQ ID NO: 292251 - RNA, 23 nt, Human
aaacucccaagcugcucaaucuc

SEQ ID NO: 292252 - RNA, 22 nt, Human
aacuguuggcuugcagguauga

SEQ ID NO: 292253 - RNA, 26 nt, Human
aagcuaaaaguagacaagagggaccc

SEQ ID NO: 292254 - RNA, 23 nt, Human
aagcugcucaaucucaaaacuuu

SEQ ID NO: 292255 - RNA, 19 nt, Human
aauccugcagagcugaagu

SEQ ID NO: 292256 - RNA, 30 nt, Human; identical to SEQ ID NO: 291891

SEQ ID NO: 292257 - RNA, 24 nt, Human
acauguguugguaacaaguuuuac

SEQ ID NO: 292258 - RNA, 21 nt, Human
accaccauuuucauuuauuag

SEQ ID NO: 292259 - RNA, 24 nt, Human
acccgcgguagccacacauaccca

SEQ ID NO: 292260 - RNA, 21 nt, Human
acuaaaccaaagagaaggugu

SEQ ID NO: 292261 - RNA, 19 nt, Human
agaaaggaaacuugggucu

SEQ ID NO: 292262 - RNA, 22 nt, Human
agacaggauccccggagcacag

SEQ ID NO: 292263 - RNA, 19 nt, Human
agagagagagagaaagaga

SEQ ID NO: 292264 - RNA, 19 nt, Human
agaggguggcugccaccuc

SEQ ID NO: 292265 - RNA, 21 nt, Human
agccaauaucuggcacucgca

SEQ ID NO: 292266 - RNA, 23 nt, Human
agccagaguggagagaaagaguu

SEQ ID NO: 292267 - RNA, 18 nt, Human
aggagaaaggaaacuugg

SEQ ID NO: 292268 - RNA, 23 nt, Human
aguuacacacccuucaaaauaug

SEQ ID NO: 292269 - RNA, 21 nt, Human
auaaaucuaugaaacaacaaa

SEQ ID NO: 292270 - RNA, 21 nt, Human
auaccauuagaauuucaaagc

SEQ ID NO: 292271 - RNA, 21 nt, Human
augcaagaggcagccccagag

SEQ ID NO: 292272 - RNA, 20 nt, Human
caaaaggaaauauaauggaa

SEQ ID NO: 292273 - RNA, 22 nt, Human
caacaauaaagcuuaaaguuca

SEQ ID NO: 292274 - RNA, 23 nt, Human
caacagacuuuagggucuccuaa

SEQ ID NO: 292275 - RNA, 21 nt, Human
cacagaauuaguagauugaaa

SEQ ID NO: 292276 - RNA, 18 nt, Human
cacuguaugagaaaacaa

SEQ ID NO: 292277 - RNA, 24 nt, Human
cagauaccauuagaauuucaaagc

SEQ ID NO: 292278 - RNA, 22 nt, Human
caggauccccggagcacagggc

SEQ ID NO: 292279 - RNA, 22 nt, Human
cauagcauacagcauacauaug

SEQ ID NO: 292280 - RNA, 18 nt, Human
caugcaagaggcagcccc

SEQ ID NO: 292281 - RNA, 19 nt, Human
ccacaaacucccaagcugc

SEQ ID NO: 292282 - RNA, 22 nt, Human
ccaguggccacaaacucccaag

SEQ ID NO: 292283 - RNA, 23 nt, Human
cccaagcugcucaaucucaaaac

SEQ ID NO: 292284 - RNA, 21 nt, Human
ccccaugcaauccugcagagc

SEQ ID NO: 292285 - RNA, 22 nt, Human
ccccaugcaauccugcagagcu

SEQ ID NO: 292286 - RNA, 20 nt, Human
ccgcgguagccacacauacc

SEQ ID NO: 292287 - RNA, 19 nt, Human
cuaaaaguagacaagacag

SEQ ID NO: 292288 - RNA, 25 nt, Human
cuagcacaccaagacaagucacaga

SEQ ID NO: 292289 - RNA, 23 nt, Human
cuaugaaacaacaaacagcgaaa

SEQ ID NO: 292290 - RNA, 18 nt, Human
cucccaagcugcucaauc

SEQ ID NO: 292291 - RNA, 18 nt, Human
cugcagagcugaaguuac

SEQ ID NO: 292292 - RNA, 21 nt, Human
cuggaccauaaauaaaauucc

SEQ ID NO: 292293 - RNA, 18 nt, Human
cuuauuuaaggugacagc

SEQ ID NO: 292294 - RNA, 20 nt, Human
gaccugaaagaguaaagcug

SEQ ID NO: 292295 - RNA, 20 nt, Human
gagagagagagagaaagaga

SEQ ID NO: 292296 - RNA, 20 nt, Human
gcuucuguuucccagggugg

SEQ ID NO: 292297 - RNA, 21 nt, Human
gggcugggaagccucuccuuu

SEQ ID NO: 292298 - RNA, 18 nt, Human
uaacagacuccuaccucu

SEQ ID NO: 292299 - RNA, 20 nt, Human
uaacaucauagguguuagua

SEQ ID NO: 292300 - RNA, 24 nt, Human
uaauaaauuagcccgauucuccuc

SEQ ID NO: 292301 - RNA, 21 nt, Human
uaauggaauuacauucaacaa

SEQ ID NO: 292302 - RNA, 27 nt, Human
uaauuaucaucauuaauaaauuagccc

SEQ ID NO: 292303 - RNA, 19 nt, Human
uacacaaaagcugauuaac

SEQ ID NO: 292304 - RNA, 23 nt, Human
uaccaauagcaccaauucaaaau

SEQ ID NO: 292305 - RNA, 21 nt, Human
uaccauuagaauuucaaagca

SEQ ID NO: 292306 - RNA, 25 nt, Human
uaccccaugcaauccugcagagcug

SEQ ID NO: 292307 - RNA, 19 nt, Human
uacgacaaaaccuguuaaa

SEQ ID NO: 292308 - RNA, 18 nt, Human
uacugugucuuucauaca

SEQ ID NO: 292309 - RNA, 23 nt, Human
uagaauuucaaagcauucugcaa

SEQ ID NO: 292310 - RNA, 24 nt, Human
uagaauuucaaagcauucugcaac

SEQ ID NO: 292311 - RNA, 26 nt, Human
uagcacaccaagacaagucacagaau

SEQ ID NO: 292312 - RNA, 20 nt, Human
uaguagauugaaaaaucugc

SEQ ID NO: 292313 - RNA, 23 nt, Human
uauuugucuuuguuuucuugccu

SEQ ID NO: 292314 - RNA, 22 nt, Human
uccacuuuuucacagguguaca

SEQ ID NO: 292315 - RNA, 22 nt, Human
ugaaacaacaaacagcgaaagg

SEQ ID NO: 292316 - RNA, 23 nt, Human
ugcaauccugcagagcugaaguu

SEQ ID NO: 292317 - RNA, 20 nt, Human
uggcuggaccauaaauaaaa

SEQ ID NO: 292318 - RNA, 20 nt, Human
uggcuugcagguaugaugca

SEQ ID NO: 292319 - RNA, 23 nt, Human
uguacagauacauuauaauuauc

SEQ ID NO: 292320 - RNA, 22 nt, Human
uuaaaaaaacacuacuccacuu

SEQ ID NO: 292321 - RNA, 19 nt, Human
uuaaaacacugaacuguug

SEQ ID NO: 292322 - RNA, 19 nt, Human
uuaacaaugguuaaaaaaa

SEQ ID NO: 292323 - RNA, 21 nt, Human
uucaaaaugaauccacaugac

SEQ ID NO: 292324 - RNA, 22 nt, Human
uucacauacacaagcacagagu

SEQ ID NO: 292325 - RNA, 21 nt, Human
uucgcaaauguaaaaagugcu

SEQ ID NO: 292326 - RNA, 22 nt, Human
uuuauuuaguaauacaugcaag

SEQ ID NO: 292327 - RNA, 22 nt, Human
uuuucauaaacauugugugcaa

SEQ ID NO: 292328 - RNA, 19 nt, Human
aaaaaccaaaacaacaaca

SEQ ID NO: 292329 - RNA, 21 nt, Human
aaaaaccaaaacaacaacaaa

SEQ ID NO: 292330 - RNA, 25 nt, Human
aaaaaccaaaacaacaacaaaaaac

SEQ ID NO: 292331 - RNA, 25 nt, Human
aaaacaacaacaaaaaacccaccaa

SEQ ID NO: 292332 - RNA, 25 nt, Human
aaaaggaaaacuaaaccaaagagaa

SEQ ID NO: 292333 - RNA, 21 nt, Human
aaacacacacacacaaaaacc

SEQ ID NO: 292334 - RNA, 23 nt, Human
aaacucccaagcugcucaaucuc

SEQ ID NO: 292335 - RNA, 24 nt, Human
aaccaaaacaacaacaaaaaaccc

SEQ ID NO: 292336 - RNA, 22 nt, Human
aacuguuggcuugcagguauga

SEQ ID NO: 292337 - RNA, 18 nt, Human
aagcacauuggaaaaaag

SEQ ID NO: 292338 - RNA, 26 nt, Human
aagcuaaaaguagacaagagggaccc

SEQ ID NO: 292339 - RNA, 23 nt, Human
aagcugcucaaucucaaaacuuu

SEQ ID NO: 292340 - RNA, 19 nt, Human
aauccugcagagcugaagu

SEQ ID NO: 292341 - RNA, 30 nt, Human; identical to SEQ ID NO: 291891

SEQ ID NO: 292342 - RNA, 20 nt, Human
acaaaaaccaaaacaacaac

SEQ ID NO: 292343 - RNA, 29 nt, Human
acaacaaaaaacccaccaaauuucugaaa

SEQ ID NO: 292344 - RNA, 26 nt, Human
acacaaaaaccaaaacagcagggacu

SEQ ID NO: 292345 - RNA, 20 nt, Human
acacacaaaaaccaaaacaa

SEQ ID NO: 292346 - RNA, 25 nt, Human
acacacacacacaaaaaccaaaaca

SEQ ID NO: 292347 - RNA, 31 nt, Human
acacucacacaaacacacacacacaaaaacc

SEQ ID NO: 292348 - RNA, 24 nt, Human
acauguguugguaacaaguuuuac

SEQ ID NO: 292349 - RNA, 24 nt, Human
accaaauuucugaaucaaacagaa

SEQ ID NO: 292350 - RNA, 21 nt, Human
accaccauuuucauuuauuag

SEQ ID NO: 292351 - RNA, 24 nt, Human
acccgcgguagccacacauaccca

SEQ ID NO: 292352 - RNA, 21 nt, Human
acuaaaccaaagagaaggugu

SEQ ID NO: 292353 - RNA, 24 nt, Human
acucacacaaacacacacacacaa

SEQ ID NO: 292354 - RNA, 19 nt, Human
agaaaggaaacuugggucu

SEQ ID NO: 292355 - RNA, 22 nt, Human
agacaggauccccggagcacag

SEQ ID NO: 292356 - RNA, 19 nt, Human
agagagagagagaaagaga

SEQ ID NO: 292357 - RNA, 19 nt, Human
agaggguggcugccaccuc

SEQ ID NO: 292358 - RNA, 21 nt, Human
agccaauaucuggcacucgca

SEQ ID NO: 292359 - RNA, 23 nt, Human
agccagaguggagagaaagaguu

SEQ ID NO: 292360 - RNA, 18 nt, Human
agcuuuuacgacaaaacc

SEQ ID NO: 292361 - RNA, 18 nt, Human
aggagaaaggaaacuugg

SEQ ID NO: 292362 - RNA, 23 nt, Human
aguuacacacccuucaaaauaug

SEQ ID NO: 292363 - RNA, 21 nt, Human
auaaaucuaugaaacaacaaa

SEQ ID NO: 292364 - RNA, 21 nt, Human
auaccauuagaauuucaaagc

SEQ ID NO: 292365 - RNA, 21 nt, Human
augcaagaggcagccccagag

SEQ ID NO: 292366 - RNA, 23 nt, Human
caaaacaacaacaaaaaacccac

SEQ ID NO: 292367 - RNA, 24 nt, Human
caaacacacacacacaaaaaccaa

SEQ ID NO: 292368 - RNA, 28 nt, Human
caaacacacacacacaaaaaccaaaaca

SEQ ID NO: 292369 - RNA, 23 nt, Human
caacaacaaaaaacccaccaaau

SEQ ID NO: 292370 - RNA, 22 nt, Human
caacaauaaagcuuaaaguuca

SEQ ID NO: 292371 - RNA, 23 nt, Human
caacagacuuuagggucuccuaa

SEQ ID NO: 292372 - RNA, 26 nt, Human
cacaaaaaccaaaacaacaacaaaaa

SEQ ID NO: 292373 - RNA, 22 nt, Human
cacacaaaaaccaaaacaacaa

SEQ ID NO: 292374 - RNA, 23 nt, Human
cacacaaaaaccaaaacaacaac

SEQ ID NO: 292375 - RNA, 18 nt, Human
cacacaaacacacacaca

SEQ ID NO: 292376 - RNA, 20 nt, Human
cacacaaacacacacacaca

SEQ ID NO: 292377 - RNA, 23 nt, Human
cacacacacaaaaaccaaaacaa

SEQ ID NO: 292378 - RNA, 22 nt, Human
cacacacacacaaaaaccaaaa

SEQ ID NO: 292379 - RNA, 21 nt, Human
cacagaauuaguagauugaaa

SEQ ID NO: 292380 - RNA, 18 nt, Human
cacuguaugagaaaacaa

SEQ ID NO: 292381 - RNA, 24 nt, Human
cagauaccauuagaauuucaaagc

SEQ ID NO: 292382 - RNA, 22 nt, Human
caggauccccggagcacagggc

SEQ ID NO: 292383 - RNA, 18 nt, Human
caguacaucugugaagug

SEQ ID NO: 292384 - RNA, 22 nt, Human
cauagcauacagcauacauaug

SEQ ID NO: 292385 - RNA, 18 nt, Human
caugcaagaggcagcccc

SEQ ID NO: 292386 - RNA, 19 nt, Human
cauuuaccagguauuuuaa

SEQ ID NO: 292387 - RNA, 21 nt, Human
ccaccaaauuucugaaucaaa

SEQ ID NO: 292388 - RNA, 22 nt, Human
ccaguggccacaaacucccaag

SEQ ID NO: 292389 - RNA, 23 nt, Human
cccaagcugcucaaucucaaaac

SEQ ID NO: 292390 - RNA, 21 nt, Human
ccccaugcaauccugcagagc

SEQ ID NO: 292391 - RNA, 22 nt, Human
ccccaugcaauccugcagagcu

SEQ ID NO: 292392 - RNA, 20 nt, Human
ccgcgguagccacacauacc

SEQ ID NO: 292393 - RNA, 22 nt, Human
ccugcugcuucucuuauuccuc

SEQ ID NO: 292394 - RNA, 19 nt, Human
cuaaaaguagacaagacag

SEQ ID NO: 292395 - RNA, 25 nt, Human
cuagcacaccaagacaagucacaga

SEQ ID NO: 292396 - RNA, 28 nt, Human
cuagugaaaauagcuuuacgcucccucu

SEQ ID NO: 292397 - RNA, 23 nt, Human
cuaugaaacaacaaacagcgaaa

SEQ ID NO: 292398 - RNA, 21 nt, Human
cucacacaaacacacacacac

SEQ ID NO: 292399 - RNA, 18 nt, Human
cucccaagcugcucaauc

SEQ ID NO: 292400 - RNA, 18 nt, Human
cugcagagcugaaguuac

SEQ ID NO: 292401 - RNA, 21 nt, Human
cuggaccauaaauaaaauucc

SEQ ID NO: 292402 - RNA, 18 nt, Human
cuuauuuaaggugacagc

SEQ ID NO: 292403 - RNA, 23 nt, Human
gaacuguuggcuugcagguauga

SEQ ID NO: 292404 - RNA, 20 nt, Human
gaccugaaagaguaaagcug

SEQ ID NO: 292405 - RNA, 20 nt, Human
gagagagagagagaaagaga

SEQ ID NO: 292406 - RNA, 20 nt, Human
gccacaaacucccaagcugc

SEQ ID NO: 292407 - RNA, 20 nt, Human
gcuucuguuucccagggugg

SEQ ID NO: 292408 - RNA, 19 nt, Human
gggcugggaagccucuccu

SEQ ID NO: 292409 - RNA, 24 nt, Human
guccugcugcuucucuuauuccuc

SEQ ID NO: 292410 - RNA, 19 nt, Human
uaaaguccugcugcuucuc

SEQ ID NO: 292411 - RNA, 18 nt, Human
uaacagacuccuaccucu

SEQ ID NO: 292412 - RNA, 20 nt, Human
uaacaucauagguguuagua

SEQ ID NO: 292413 - RNA, 24 nt, Human
uaauaaauuagcccgauucuccuc

SEQ ID NO: 292414 - RNA, 20 nt, Human
uaauauuuucauuuaccagg

SEQ ID NO: 292415 - RNA, 21 nt, Human
uaauggaauuacauucaacaa

SEQ ID NO: 292416 - RNA, 27 nt, Human
uaauuaucaucauuaauaaauuagccc

SEQ ID NO: 292417 - RNA, 19 nt, Human
uacacaaaagcugauuaac

SEQ ID NO: 292418 - RNA, 23 nt, Human
uaccaauagcaccaauucaaaau

SEQ ID NO: 292419 - RNA, 21 nt, Human
uaccauuagaauuucaaagca

SEQ ID NO: 292420 - RNA, 25 nt, Human
uaccccaugcaauccugcagagcug

SEQ ID NO: 292421 - RNA, 19 nt, Human
uacgacaaaaccuguuaaa

SEQ ID NO: 292422 - RNA, 18 nt, Human
uacugugucuuucauaca

SEQ ID NO: 292423 - RNA, 23 nt, Human
uagaauuucaaagcauucugcaa

SEQ ID NO: 292424 - RNA, 24 nt, Human
uagaauuucaaagcauucugcaac

SEQ ID NO: 292425 - RNA, 26 nt, Human
uagcacaccaagacaagucacagaau

SEQ ID NO: 292426 - RNA, 20 nt, Human
uaguagauugaaaaaucugc

SEQ ID NO: 292427 - RNA, 23 nt, Human
uauuugucuuuguuuucuugccu

SEQ ID NO: 292428 - RNA, 23 nt, Human
ucacacaaacacacacacacaaa

SEQ ID NO: 292429 - RNA, 22 nt, Human
uccacuuuuucacagguguaca

SEQ ID NO: 292430 - RNA, 23 nt, Human
ucucuguuaaaguccugcugcuu

SEQ ID NO: 292431 - RNA, 20 nt, Human
ucugaaucaaacagaaacca

SEQ ID NO: 292432 - RNA, 21 nt, Human
ucuucaaaaugucuuugccaa

SEQ ID NO: 292433 - RNA, 22 nt, Human
ugaaaauagcuuuacgcucccu

SEQ ID NO: 292434 - RNA, 22 nt, Human
ugaaacaacaaacagcgaaagg

SEQ ID NO: 292435 - RNA, 23 nt, Human
ugcaauccugcagagcugaaguu

SEQ ID NO: 292436 - RNA, 22 nt, Human
uggcuggaccauaaauaaaauu

SEQ ID NO: 292437 - RNA, 20 nt, Human
uggcuugcagguaugaugca

SEQ ID NO: 292438 - RNA, 23 nt, Human
uguacagauacauuauaauuauc

SEQ ID NO: 292439 - RNA, 22 nt, Human
uuaaaaaaacacuacuccacuu

SEQ ID NO: 292440 - RNA, 19 nt, Human
uuaaaacacugaacuguug

SEQ ID NO: 292441 - RNA, 19 nt, Human
uuaacaaugguuaaaaaaa

SEQ ID NO: 292442 - RNA, 21 nt, Human
uuagaagagcauguuuugcaa

SEQ ID NO: 292443 - RNA, 21 nt, Human
uucaaaaugaauccacaugac

SEQ ID NO: 292444 - RNA, 22 nt, Human
uucacauacacaagcacagagu

SEQ ID NO: 292445 - RNA, 21 nt, Human
uucgcaaauguaaaaagugcu

SEQ ID NO: 292446 - RNA, 22 nt, Human
uugaagaacuacacucacacaa

SEQ ID NO: 292447 - RNA, 18 nt, Human
uuguauucauauuucucu

SEQ ID NO: 292448 - RNA, 23 nt, Human
uuuaaaaacuuuccuugccuccu

SEQ ID NO: 292449 - RNA, 22 nt, Human
uuuauuuaguaauacaugcaag

SEQ ID NO: 292450 - RNA, 22 nt, Human
uuuucauaaacauugugugcaa

SEQ ID NO: 292451 - RNA, 25 nt, Human
aaaaggaaaacuaaaccaaagagaa

SEQ ID NO: 292452 - RNA, 23 nt, Human
aaacucccaagcugcucaaucuc

SEQ ID NO: 292453 - RNA, 22 nt, Human
aacuguuggcuugcagguauga

SEQ ID NO: 292454 - RNA, 26 nt, Human
aagcuaaaaguagacaagagggaccc

SEQ ID NO: 292455 - RNA, 19 nt, Human
aauccugcagagcugaagu

SEQ ID NO: 292456 - RNA, 30 nt, Human; identical to SEQ ID NO: 291891

SEQ ID NO: 292457 - RNA, 18 nt, Human
acagaauuaguagauuga

SEQ ID NO: 292458 - RNA, 24 nt, Human
acauguguugguaacaaguuuuac

SEQ ID NO: 292459 - RNA, 21 nt, Human
accaccauuuucauuuauuag

SEQ ID NO: 292460 - RNA, 21 nt, Human
acuaaaccaaagagaaggugu

SEQ ID NO: 292461 - RNA, 19 nt, Human
agaaaggaaacuugggucu

SEQ ID NO: 292462 - RNA, 22 nt, Human
agacaggauccccggagcacag

SEQ ID NO: 292463 - RNA, 19 nt, Human
agagagagagagaaagaga

SEQ ID NO: 292464 - RNA, 19 nt, Human
agaggguggcugccaccuc

SEQ ID NO: 292465 - RNA, 21 nt, Human
agccaauaucuggcacucgca

SEQ ID NO: 292466 - RNA, 23 nt, Human
agccagaguggagagaaagaguu

SEQ ID NO: 292467 - RNA, 18 nt, Human
agcuuuuacgacaaaacc

SEQ ID NO: 292468 - RNA, 19 nt, Human
aggagaaaggaaacuuggg

SEQ ID NO: 292469 - RNA, 23 nt, Human
aguuacacacccuucaaaauaug

SEQ ID NO: 292470 - RNA, 21 nt, Human
auaaaucuaugaaacaacaaa

SEQ ID NO: 292471 - RNA, 21 nt, Human
auaccauuagaauuucaaagc

SEQ ID NO: 292472 - RNA, 20 nt, Human
caaaaggaaauauaauggaa

SEQ ID NO: 292473 - RNA, 22 nt, Human
caacaauaaagcuuaaaguuca

SEQ ID NO: 292474 - RNA, 23 nt, Human
caacagacuuuagggucuccuaa

SEQ ID NO: 292475 - RNA, 20 nt, Human
cacauacacaagcacagagu

SEQ ID NO: 292476 - RNA, 18 nt, Human
cacuguaugagaaaacaa

SEQ ID NO: 292477 - RNA, 24 nt, Human
cagauaccauuagaauuucaaagc

SEQ ID NO: 292478 - RNA, 22 nt, Human
caggauccccggagcacagggc

SEQ ID NO: 292479 - RNA, 22 nt, Human
cauagcauacagcauacauaug

SEQ ID NO: 292480 - RNA, 18 nt, Human
caugcaagaggcagcccc

SEQ ID NO: 292481 - RNA, 22 nt, Human
ccaguggccacaaacucccaag

SEQ ID NO: 292482 - RNA, 19 nt, Human
ccaugcaauccugcagagc

SEQ ID NO: 292483 - RNA, 23 nt, Human
cccaagcugcucaaucucaaaac

SEQ ID NO: 292484 - RNA, 21 nt, Human
ccccaugcaauccugcagagc

SEQ ID NO: 292485 - RNA, 23 nt, Human
cccgcgguagccacacauaccca

SEQ ID NO: 292486 - RNA, 19 nt, Human
cccuucaaaauaugggaga

SEQ ID NO: 292487 - RNA, 20 nt, Human
ccgcgguagccacacauacc

SEQ ID NO: 292488 - RNA, 19 nt, Human
cuaaaaguagacaagacag

SEQ ID NO: 292489 - RNA, 25 nt, Human
cuagcacaccaagacaagucacaga

SEQ ID NO: 292490 - RNA, 23 nt, Human
cuaugaaacaacaaacagcgaaa

SEQ ID NO: 292491 - RNA, 18 nt, Human
cucccaagcugcucaauc

SEQ ID NO: 292492 - RNA, 18 nt, Human
cugcagagcugaaguuac

SEQ ID NO: 292493 - RNA, 21 nt, Human
cuggaccauaaauaaaauucc

SEQ ID NO: 292494 - RNA, 18 nt, Human
cuuauuuaaggugacagc

SEQ ID NO: 292495 - RNA, 23 nt, Human
gaacuguuggcuugcagguauga

SEQ ID NO: 292496 - RNA, 20 nt, Human
gaccugaaagaguaaagcug

SEQ ID NO: 292497 - RNA, 20 nt, Human
gagagagagagagaaagaga

SEQ ID NO: 292498 - RNA, 19 nt, Human
gcaagaggcagccccagag

SEQ ID NO: 292499 - RNA, 20 nt, Human
gccacaaacucccaagcugc

SEQ ID NO: 292500 - RNA, 21 nt, Human
gcugcucaaucucaaaacuuu

SEQ ID NO: 292501 - RNA, 20 nt, Human
gcuucuguuucccagggugg

SEQ ID NO: 292502 - RNA, 21 nt, Human
gggcugggaagccucuccuuu

SEQ ID NO: 292503 - RNA, 18 nt, Human
uaacagacuccuaccucu

SEQ ID NO: 292504 - RNA, 18 nt, Human
uaacaucauagguguuag

SEQ ID NO: 292505 - RNA, 24 nt, Human
uaauaaauuagcccgauucuccuc

SEQ ID NO: 292506 - RNA, 21 nt, Human
uaauggaauuacauucaacaa

SEQ ID NO: 292507 - RNA, 27 nt, Human
uaauuaucaucauuaauaaauuagccc

SEQ ID NO: 292508 - RNA, 19 nt, Human
uacacaaaagcugauuaac

SEQ ID NO: 292509 - RNA, 23 nt, Human
uaccaauagcaccaauucaaaau

SEQ ID NO: 292510 - RNA, 21 nt, Human
uaccauuagaauuucaaagca

SEQ ID NO: 292511 - RNA, 25 nt, Human
uaccccaugcaauccugcagagcug

SEQ ID NO: 292512 - RNA, 19 nt, Human
uacgacaaaaccuguuaaa

SEQ ID NO: 292513 - RNA, 18 nt, Human
uacugugucuuucauaca

SEQ ID NO: 292514 - RNA, 23 nt, Human
uagaauuucaaagcauucugcaa

SEQ ID NO: 292515 - RNA, 24 nt, Human
uagaauuucaaagcauucugcaac

SEQ ID NO: 292516 - RNA, 26 nt, Human
uagcacaccaagacaagucacagaau

SEQ ID NO: 292517 - RNA, 20 nt, Human
uaguagauugaaaaaucugc

SEQ ID NO: 292518 - RNA, 23 nt, Human
uauuugucuuuguuuucuugccu

SEQ ID NO: 292519 - RNA, 22 nt, Human
uccacuuuuucacagguguaca

SEQ ID NO: 292520 - RNA, 22 nt, Human
ugaaacaacaaacagcgaaagg

SEQ ID NO: 292521 - RNA, 23 nt, Human
ugcaauccugcagagcugaaguu

SEQ ID NO: 292522 - RNA, 22 nt, Human
uggcuggaccauaaauaaaauu

SEQ ID NO: 292523 - RNA, 20 nt, Human
uggcuugcagguaugaugca

SEQ ID NO: 292524 - RNA, 23 nt, Human
uguacagauacauuauaauuauc

SEQ ID NO: 292525 - RNA, 22 nt, Human
uuaaaaaaacacuacuccacuu

SEQ ID NO: 292526 - RNA, 19 nt, Human
uuaaaacacugaacuguug

SEQ ID NO: 292527 - RNA, 19 nt, Human
uuaacaaugguuaaaaaaa

SEQ ID NO: 292528 - RNA, 21 nt, Human
uucaaaaugaauccacaugac

SEQ ID NO: 292529 - RNA, 21 nt, Human
uucgcaaauguaaaaagugcu

SEQ ID NO: 292530 - RNA, 18 nt, Human
uuguauucauauuucucu

SEQ ID NO: 292531 - RNA, 22 nt, Human
uuuauuuaguaauacaugcaag

SEQ ID NO: 292532 - RNA, 22 nt, Human
uuuucauaaacauugugugcaa

SEQ ID NO: 292533 - RNA, 25 nt, Human
aaaaggaaaacuaaaccaaagagaa

SEQ ID NO: 292534 - RNA, 23 nt, Human
aaacucccaagcugcucaaucuc

SEQ ID NO: 292535 - RNA, 22 nt, Human
aacuguuggcuugcagguauga

SEQ ID NO: 292536 - RNA, 26 nt, Human
aagcuaaaaguagacaagagggaccc

SEQ ID NO: 292537 - RNA, 23 nt, Human
aagcugcucaaucucaaaacuuu

SEQ ID NO: 292538 - RNA, 19 nt, Human
aauccugcagagcugaagu

SEQ ID NO: 292539 - RNA, 30 nt, Human; identical to SEQ ID NO: 291891

SEQ ID NO: 292540 - RNA, 24 nt, Human
acauguguugguaacaaguuuuac

SEQ ID NO: 292541 - RNA, 21 nt, Human
accaccauuuucauuuauuag

SEQ ID NO: 292542 - RNA, 24 nt, Human
acccgcgguagccacacauaccca

SEQ ID NO: 292543 - RNA, 21 nt, Human
acuaaaccaaagagaaggugu

SEQ ID NO: 292544 - RNA, 19 nt, Human
agaaaggaaacuugggucu

SEQ ID NO: 292545 - RNA, 22 nt, Human
agacaggauccccggagcacag

SEQ ID NO: 292546 - RNA, 19 nt, Human
agagagagagagaaagaga

SEQ ID NO: 292547 - RNA, 19 nt, Human
agaggguggcugccaccuc

SEQ ID NO: 292548 - RNA, 21 nt, Human
agccaauaucuggcacucgca

SEQ ID NO: 292549 - RNA, 23 nt, Human
agccagaguggagagaaagaguu

SEQ ID NO: 292550 - RNA, 18 nt, Human
aggagaaaggaaacuugg

SEQ ID NO: 292551 - RNA, 23 nt, Human
aguuacacacccuucaaaauaug

SEQ ID NO: 292552 - RNA, 21 nt, Human
auaaaucuaugaaacaacaaa

SEQ ID NO: 292553 - RNA, 21 nt, Human
auaccauuagaauuucaaagc

SEQ ID NO: 292554 - RNA, 20 nt, Human
auuaaauaucguuucucaaa

SEQ ID NO: 292555 - RNA, 20 nt, Human
caaaaggaaauauaauggaa

SEQ ID NO: 292556 - RNA, 22 nt, Human
caacaauaaagcuuaaaguuca

SEQ ID NO: 292557 - RNA, 23 nt, Human
caacagacuuuagggucuccuaa

SEQ ID NO: 292558 - RNA, 21 nt, Human
cacagaauuaguagauugaaa

SEQ ID NO: 292559 - RNA, 22 nt, Human
cacaguauuuuguucugauuaa

SEQ ID NO: 292560 - RNA, 18 nt, Human
cacuguaugagaaaacaa

SEQ ID NO: 292561 - RNA, 24 nt, Human
cagauaccauuagaauuucaaagc

SEQ ID NO: 292562 - RNA, 22 nt, Human
caggauccccggagcacagggc

SEQ ID NO: 292563 - RNA, 22 nt, Human
cauagcauacagcauacauaug

SEQ ID NO: 292564 - RNA, 18 nt, Human
caugcaagaggcagcccc

SEQ ID NO: 292565 - RNA, 19 nt, Human
ccacaaacucccaagcugc

SEQ ID NO: 292566 - RNA, 22 nt, Human
ccaguggccacaaacucccaag

SEQ ID NO: 292567 - RNA, 23 nt, Human
cccaagcugcucaaucucaaaac

SEQ ID NO: 292568 - RNA, 21 nt, Human
ccccaugcaauccugcagagc

SEQ ID NO: 292569 - RNA, 22 nt, Human
ccccaugcaauccugcagagcu

SEQ ID NO: 292570 - RNA, 19 nt, Human
cccuucaaaauaugggaga

SEQ ID NO: 292571 - RNA, 20 nt, Human
ccgcgguagccacacauacc

SEQ ID NO: 292572 - RNA, 19 nt, Human
cuaaaaguagacaagacag

SEQ ID NO: 292573 - RNA, 25 nt, Human
cuagcacaccaagacaagucacaga

SEQ ID NO: 292574 - RNA, 20 nt, Human
cucaaagucaagggaaaucc

SEQ ID NO: 292575 - RNA, 18 nt, Human
cucccaagcugcucaauc

SEQ ID NO: 292576 - RNA, 18 nt, Human
cugcagagcugaaguuac

SEQ ID NO: 292577 - RNA, 21 nt, Human
cuggaccauaaauaaaauucc

SEQ ID NO: 292578 - RNA, 18 nt, Human
cuuauuuaaggugacagc

SEQ ID NO: 292579 - RNA, 19 nt, Human
gaaacaacaaacagcgaaa

SEQ ID NO: 292580 - RNA, 20 nt, Human
gaccugaaagaguaaagcug

SEQ ID NO: 292581 - RNA, 20 nt, Human
gagagagagagagaaagaga

SEQ ID NO: 292582 - RNA, 19 nt, Human
gcaagaggcagccccagag

SEQ ID NO: 292583 - RNA, 20 nt, Human
gcuucuguuucccagggugg

SEQ ID NO: 292584 - RNA, 21 nt, Human
gggcugggaagccucuccuuu

SEQ ID NO: 292585 - RNA, 18 nt, Human
uaacagacuccuaccucu

SEQ ID NO: 292586 - RNA, 18 nt, Human
uaacaucauagguguuag

SEQ ID NO: 292587 - RNA, 24 nt, Human
uaauaaauuagcccgauucuccuc

SEQ ID NO: 292588 - RNA, 21 nt, Human
uaauggaauuacauucaacaa

SEQ ID NO: 292589 - RNA, 27 nt, Human
uaauuaucaucauuaauaaauuagccc

SEQ ID NO: 292590 - RNA, 19 nt, Human
uacacaaaagcugauuaac

SEQ ID NO: 292591 - RNA, 23 nt, Human
uaccaauagcaccaauucaaaau

SEQ ID NO: 292592 - RNA, 21 nt, Human
uaccauuagaauuucaaagca

SEQ ID NO: 292593 - RNA, 25 nt, Human
uaccccaugcaauccugcagagcug

SEQ ID NO: 292594 - RNA, 19 nt, Human
uacgacaaaaccuguuaaa

SEQ ID NO: 292595 - RNA, 18 nt, Human
uacugugucuuucauaca

SEQ ID NO: 292596 - RNA, 23 nt, Human
uagaauuucaaagcauucugcaa

SEQ ID NO: 292597 - RNA, 24 nt, Human
uagaauuucaaagcauucugcaac

SEQ ID NO: 292598 - RNA, 26 nt, Human
uagcacaccaagacaagucacagaau

SEQ ID NO: 292599 - RNA, 20 nt, Human
uaguagauugaaaaaucugc

SEQ ID NO: 292600 - RNA, 23 nt, Human
uauuugucuuuguuuucuugccu

SEQ ID NO: 292601 - RNA, 20 nt, Human
uauuuuguucugauuaaaua

SEQ ID NO: 292602 - RNA, 23 nt, Human
uauuuuguucugauuaaauaucg

SEQ ID NO: 292603 - RNA, 22 nt, Human
uccacuuuuucacagguguaca

SEQ ID NO: 292604 - RNA, 22 nt, Human
ugaaacaacaaacagcgaaagg

SEQ ID NO: 292605 - RNA, 22 nt, Human
ugauuaaauaucguuucucaaa

SEQ ID NO: 292606 - RNA, 23 nt, Human
ugcaauccugcagagcugaaguu

SEQ ID NO: 292607 - RNA, 24 nt, Human
ugcacaguauuuuguucugauuaa

SEQ ID NO: 292608 - RNA, 20 nt, Human
uggcuggaccauaaauaaaa

SEQ ID NO: 292609 - RNA, 20 nt, Human
uggcuugcagguaugaugca

SEQ ID NO: 292610 - RNA, 23 nt, Human
uguacagauacauuauaauuauc

SEQ ID NO: 292611 - RNA, 22 nt, Human
uuaaaaaaacacuacuccacuu

SEQ ID NO: 292612 - RNA, 19 nt, Human
uuaaaacacugaacuguug

SEQ ID NO: 292613 - RNA, 19 nt, Human
uuaacaaugguuaaaaaaa

SEQ ID NO: 292614 - RNA, 21 nt, Human
uucaaaaugaauccacaugac

SEQ ID NO: 292615 - RNA, 22 nt, Human
uucacauacacaagcacagagu

SEQ ID NO: 292616 - RNA, 21 nt, Human
uucgcaaauguaaaaagugcu

SEQ ID NO: 292617 - RNA, 22 nt, Human
uuuauuuaguaauacaugcaag

SEQ ID NO: 292618 - RNA, 22 nt, Human
uuuucauaaacauugugugcaa

SEQ ID NO: 292619 - RNA, 25 nt, Human
aaaaggaaaacuaaaccaaagagaa

SEQ ID NO: 292620 - RNA, 22 nt, Human
aacucccaagcugcucaaucuc

SEQ ID NO: 292621 - RNA, 22 nt, Human
aacuguuggcuugcagguauga

SEQ ID NO: 292622 - RNA, 26 nt, Human
aagcuaaaaguagacaagagggaccc

SEQ ID NO: 292623 - RNA, 19 nt, Human
aauccugcagagcugaagu

SEQ ID NO: 292624 - RNA, 30 nt, Human; identical to SEQ ID NO: 291891

SEQ ID NO: 292625 - RNA, 24 nt, Human
acauguguugguaacaaguuuuac

SEQ ID NO: 292626 - RNA, 21 nt, Human
accaccauuuucauuuauuag

SEQ ID NO: 292627 - RNA, 21 nt, Human
acuaaaccaaagagaaggugu

SEQ ID NO: 292628 - RNA, 19 nt, Human
agaaaggaaacuugggucu

SEQ ID NO: 292629 - RNA, 22 nt, Human
agacaggauccccggagcacag

SEQ ID NO: 292630 - RNA, 19 nt, Human
agagagagagagaaagaga

SEQ ID NO: 292631 - RNA, 19 nt, Human
agaggguggcugccaccuc

SEQ ID NO: 292632 - RNA, 21 nt, Human
agccaauaucuggcacucgca

SEQ ID NO: 292633 - RNA, 23 nt, Human
agccagaguggagagaaagaguu

SEQ ID NO: 292634 - RNA, 18 nt, Human
aggagaaaggaaacuugg

SEQ ID NO: 292635 - RNA, 23 nt, Human
aguuacacacccuucaaaauaug

SEQ ID NO: 292636 - RNA, 21 nt, Human
auaaaucuaugaaacaacaaa

SEQ ID NO: 292637 - RNA, 21 nt, Human
auaccauuagaauuucaaagc

SEQ ID NO: 292638 - RNA, 21 nt, Human
augcaagaggcagccccagag

SEQ ID NO: 292639 - RNA, 18 nt, Human
auggaauuacauucaaca

SEQ ID NO: 292640 - RNA, 22 nt, Human
caacaauaaagcuuaaaguuca

SEQ ID NO: 292641 - RNA, 23 nt, Human
caacagacuuuagggucuccuaa

SEQ ID NO: 292642 - RNA, 21 nt, Human
cacagaauuaguagauugaaa

SEQ ID NO: 292643 - RNA, 20 nt, Human
cacauacacaagcacagagu

SEQ ID NO: 292644 - RNA, 18 nt, Human
cacuguaugagaaaacaa

SEQ ID NO: 292645 - RNA, 24 nt, Human
cagauaccauuagaauuucaaagc

SEQ ID NO: 292646 - RNA, 22 nt, Human
caggauccccggagcacagggc

SEQ ID NO: 292647 - RNA, 22 nt, Human
cauagcauacagcauacauaug

SEQ ID NO: 292648 - RNA, 18 nt, Human
caugcaagaggcagcccc

SEQ ID NO: 292649 - RNA, 22 nt, Human
ccaguggccacaaacucccaag

SEQ ID NO: 292650 - RNA, 23 nt, Human
cccaagcugcucaaucucaaaac

SEQ ID NO: 292651 - RNA, 21 nt, Human
ccccaugcaauccugcagagc

SEQ ID NO: 292652 - RNA, 22 nt, Human
ccccaugcaauccugcagagcu

SEQ ID NO: 292653 - RNA, 23 nt, Human
cccgcgguagccacacauaccca

SEQ ID NO: 292654 - RNA, 19 nt, Human
cccuucaaaauaugggaga

SEQ ID NO: 292655 - RNA, 20 nt, Human
ccgcgguagccacacauacc

SEQ ID NO: 292656 - RNA, 19 nt, Human
cuaaaaguagacaagacag

SEQ ID NO: 292657 - RNA, 25 nt, Human
cuagcacaccaagacaagucacaga

SEQ ID NO: 292658 - RNA, 23 nt, Human
cuaugaaacaacaaacagcgaaa

SEQ ID NO: 292659 - RNA, 18 nt, Human
cucccaagcugcucaauc

SEQ ID NO: 292660 - RNA, 18 nt, Human
cugcagagcugaaguuac

SEQ ID NO: 292661 - RNA, 21 nt, Human
cuggaccauaaauaaaauucc

SEQ ID NO: 292662 - RNA, 18 nt, Human
cuuauuuaaggugacagc

SEQ ID NO: 292663 - RNA, 23 nt, Human
gaacuguuggcuugcagguauga

SEQ ID NO: 292664 - RNA, 20 nt, Human
gaccugaaagaguaaagcug

SEQ ID NO: 292665 - RNA, 20 nt, Human
gagagagagagagaaagaga

SEQ ID NO: 292666 - RNA, 20 nt, Human
gccacaaacucccaagcugc

SEQ ID NO: 292667 - RNA, 21 nt, Human
gcugcucaaucucaaaacuuu

SEQ ID NO: 292668 - RNA, 20 nt, Human
gcuucuguuucccagggugg

SEQ ID NO: 292669 - RNA, 19 nt, Human
gggcugggaagccucuccu

SEQ ID NO: 292670 - RNA, 18 nt, Human
uaacagacuccuaccucu

SEQ ID NO: 292671 - RNA, 20 nt, Human
uaacaucauagguguuagua

SEQ ID NO: 292672 - RNA, 24 nt, Human
uaauaaauuagcccgauucuccuc

SEQ ID NO: 292673 - RNA, 27 nt, Human
uaauuaucaucauuaauaaauuagccc

SEQ ID NO: 292674 - RNA, 19 nt, Human
uacacaaaagcugauuaac

SEQ ID NO: 292675 - RNA, 23 nt, Human
uaccaauagcaccaauucaaaau

SEQ ID NO: 292676 - RNA, 21 nt, Human
uaccauuagaauuucaaagca

SEQ ID NO: 292677 - RNA, 25 nt, Human
uaccccaugcaauccugcagagcug

SEQ ID NO: 292678 - RNA, 19 nt, Human
uacgacaaaaccuguuaaa

SEQ ID NO: 292679 - RNA, 18 nt, Human
uacugugucuuucauaca

SEQ ID NO: 292680 - RNA, 23 nt, Human
uagaauuucaaagcauucugcaa

SEQ ID NO: 292681 - RNA, 24 nt, Human
uagaauuucaaagcauucugcaac

SEQ ID NO: 292682 - RNA, 26 nt, Human
uagcacaccaagacaagucacagaau

SEQ ID NO: 292683 - RNA, 20 nt, Human
uaguagauugaaaaaucugc

SEQ ID NO: 292684 - RNA, 23 nt, Human
uauuugucuuuguuuucuugccu

SEQ ID NO: 292685 - RNA, 22 nt, Human
uccacuuuuucacagguguaca

SEQ ID NO: 292686 - RNA, 22 nt, Human
ugaaacaacaaacagcgaaagg

SEQ ID NO: 292687 - RNA, 23 nt, Human
ugcaauccugcagagcugaaguu

SEQ ID NO: 292688 - RNA, 22 nt, Human
uggcuggaccauaaauaaaauu

SEQ ID NO: 292689 - RNA, 20 nt, Human
uggcuugcagguaugaugca

SEQ ID NO: 292690 - RNA, 23 nt, Human
uguacagauacauuauaauuauc

SEQ ID NO: 292691 - RNA, 22 nt, Human
uuaaaaaaacacuacuccacuu

SEQ ID NO: 292692 - RNA, 19 nt, Human
uuaaaacacugaacuguug

SEQ ID NO: 292693 - RNA, 19 nt, Human
uuaacaaugguuaaaaaaa

SEQ ID NO: 292694 - RNA, 21 nt, Human
uucaaaaugaauccacaugac

SEQ ID NO: 292695 - RNA, 21 nt, Human
uucgcaaauguaaaaagugcu

SEQ ID NO: 292696 - RNA, 18 nt, Human
uuguauucauauuucucu

SEQ ID NO: 292697 - RNA, 22 nt, Human
uuuauuuaguaauacaugcaag

SEQ ID NO: 292698 - RNA, 22 nt, Human
uuuucauaaacauugugugcaa

SEQ ID NO: 292699 - RNA, 25 nt, Human
aaaaggaaaacuaaaccaaagagaa

SEQ ID NO: 292700 - RNA, 23 nt, Human
aaacucccaagcugcucaaucuc

SEQ ID NO: 292701 - RNA, 22 nt, Human
aaauaccucugguuuuauuucc

SEQ ID NO: 292702 - RNA, 21 nt, Human
aacaauaaagcuuaaaguuca

SEQ ID NO: 292703 - RNA, 22 nt, Human
aacuguuggcuugcagguauga

SEQ ID NO: 292704 - RNA, 26 nt, Human
aagcuaaaaguagacaagagggaccc

SEQ ID NO: 292705 - RNA, 23 nt, Human
aagcugcucaaucucaaaacuuu

SEQ ID NO: 292706 - RNA, 19 nt, Human
aauccugcagagcugaagu

SEQ ID NO: 292707 - RNA, 30 nt, Human; identical to SEQ ID NO: 291891

SEQ ID NO: 292708 - RNA, 18 nt, Human
acagaauuaguagauuga

SEQ ID NO: 292709 - RNA, 24 nt, Human
acauguguugguaacaaguuuuac

SEQ ID NO: 292710 - RNA, 21 nt, Human
accaccauuuucauuuauuag

SEQ ID NO: 292711 - RNA, 24 nt, Human
acccgcgguagccacacauaccca

SEQ ID NO: 292712 - RNA, 21 nt, Human
acuaaaccaaagagaaggugu

SEQ ID NO: 292713 - RNA, 19 nt, Human
agaaaggaaacuugggucu

SEQ ID NO: 292714 - RNA, 21 nt, Human
agacaggauccccggagcaca

SEQ ID NO: 292715 - RNA, 22 nt, Human
agacaggauccccggagcacag

SEQ ID NO: 292716 - RNA, 19 nt, Human
agagagagagagaaagaga

SEQ ID NO: 292717 - RNA, 19 nt, Human
agaggguggcugccaccuc

SEQ ID NO: 292718 - RNA, 21 nt, Human
agccaauaucuggcacucgca

SEQ ID NO: 292719 - RNA, 23 nt, Human
agccagaguggagagaaagaguu

SEQ ID NO: 292720 - RNA, 18 nt, Human
agcuuuuacgacaaaacc

SEQ ID NO: 292721 - RNA, 18 nt, Human
aggagaaaggaaacuugg

SEQ ID NO: 292722 - RNA, 19 nt, Human
aggagaaaggaaacuuggg

SEQ ID NO: 292723 - RNA, 23 nt, Human
aguuacacacccuucaaaauaug

SEQ ID NO: 292724 - RNA, 21 nt, Human
auaaaucuaugaaacaacaaa

SEQ ID NO: 292725 - RNA, 21 nt, Human
auaccauuagaauuucaaagc

SEQ ID NO: 292726 - RNA, 21 nt, Human
augcaagaggcagccccagag

SEQ ID NO: 292727 - RNA, 18 nt, Human
auggaauuacauucaaca

SEQ ID NO: 292728 - RNA, 23 nt, Human
caacagacuuuagggucuccuaa

SEQ ID NO: 292729 - RNA, 21 nt, Human
cacagaauuaguagauugaaa

SEQ ID NO: 292730 - RNA, 18 nt, Human
cacuguaugagaaaacaa

SEQ ID NO: 292731 - RNA, 24 nt, Human
cagauaccauuagaauuucaaagc

SEQ ID NO: 292732 - RNA, 22 nt, Human
caggauccccggagcacagggc

SEQ ID NO: 292733 - RNA, 18 nt, Human
caugcaagaggcagcccc

SEQ ID NO: 292734 - RNA, 19 nt, Human
ccacaaacucccaagcugc

SEQ ID NO: 292735 - RNA, 22 nt, Human
ccaguggccacaaacucccaag

SEQ ID NO: 292736 - RNA, 19 nt, Human
ccaugcaauccugcagagc

SEQ ID NO: 292737 - RNA, 23 nt, Human
cccaagcugcucaaucucaaaac

SEQ ID NO: 292738 - RNA, 21 nt, Human
ccccaugcaauccugcagagc

SEQ ID NO: 292739 - RNA, 21 nt, Human
ccccaugcaauccugcagagc

SEQ ID NO: 292740 - RNA, 23 nt, Human
cccgcgguagccacacauaccca

SEQ ID NO: 292741 - RNA, 19 nt, Human
cccuucaaaauaugggaga

SEQ ID NO: 292742 - RNA, 20 nt, Human
ccgcgguagccacacauacc

SEQ ID NO: 292743 - RNA, 19 nt, Human
cuaaaaguagacaagacag

SEQ ID NO: 292744 - RNA, 25 nt, Human
cuagcacaccaagacaagucacaga

SEQ ID NO: 292745 - RNA, 23 nt, Human
cuaugaaacaacaaacagcgaaa

SEQ ID NO: 292746 - RNA, 18 nt, Human
cucccaagcugcucaauc

SEQ ID NO: 292747 - RNA, 18 nt, Human
cugcagagcugaaguuac

SEQ ID NO: 292748 - RNA, 21 nt, Human
cuggaccauaaauaaaauucc

SEQ ID NO: 292749 - RNA, 18 nt, Human
cuuauuuaaggugacagc

SEQ ID NO: 292750 - RNA, 23 nt, Human
gaacuguuggcuugcagguauga

SEQ ID NO: 292751 - RNA, 20 nt, Human
gaccugaaagaguaaagcug

SEQ ID NO: 292752 - RNA, 20 nt, Human
gagagagagagagaaagaga

SEQ ID NO: 292753 - RNA, 18 nt, Human
gcauacagcauacauaug

SEQ ID NO: 292754 - RNA, 20 nt, Human
gccacaaacucccaagcugc

SEQ ID NO: 292755 - RNA, 20 nt, Human
gcuucuguuucccagggugg

SEQ ID NO: 292756 - RNA, 21 nt, Human
gggcugggaagccucuccuuu

SEQ ID NO: 292757 - RNA, 18 nt, Human
uaacagacuccuaccucu

SEQ ID NO: 292758 - RNA, 20 nt, Human
uaacaucauagguguuagua

SEQ ID NO: 292759 - RNA, 21 nt, Human
uaauaaauuagcccgauucuc

SEQ ID NO: 292760 - RNA, 24 nt, Human
uaauaaauuagcccgauucuccuc

SEQ ID NO: 292761 - RNA, 21 nt, Human
uaauggaauuacauucaacaa

SEQ ID NO: 292762 - RNA, 27 nt, Human
uaauuaucaucauuaauaaauuagccc

SEQ ID NO: 292763 - RNA, 19 nt, Human
uacacaaaagcugauuaac

SEQ ID NO: 292764 - RNA, 23 nt, Human
uaccaauagcaccaauucaaaau

SEQ ID NO: 292765 - RNA, 21 nt, Human
uaccauuagaauuucaaagca

SEQ ID NO: 292766 - RNA, 25 nt, Human
uaccccaugcaauccugcagagcug

SEQ ID NO: 292767 - RNA, 19 nt, Human
uacgacaaaaccuguuaaa

SEQ ID NO: 292768 - RNA, 18 nt, Human
uacugugucuuucauaca

SEQ ID NO: 292769 - RNA, 23 nt, Human
uagaauuucaaagcauucugcaa

SEQ ID NO: 292770 - RNA, 24 nt, Human
uagaauuucaaagcauucugcaac

SEQ ID NO: 292771 - RNA, 26 nt, Human
uagcacaccaagacaagucacagaau

SEQ ID NO: 292772 - RNA, 20 nt, Human
uaguagauugaaaaaucugc

SEQ ID NO: 292773 - RNA, 23 nt, Human
uauuugucuuuguuuucuugccu

SEQ ID NO: 292774 - RNA, 22 nt, Human
uccacuuuuucacagguguaca

SEQ ID NO: 292775 - RNA, 22 nt, Human
ugaaacaacaaacagcgaaagg

SEQ ID NO: 292776 - RNA, 23 nt, Human
ugcaauccugcagagcugaaguu

SEQ ID NO: 292777 - RNA, 28 nt, Human
ugcuuuuuuuaaauaacagacuccuacu

SEQ ID NO: 292778 - RNA, 22 nt, Human
uggcuggaccauaaauaaaauu

SEQ ID NO: 292779 - RNA, 20 nt, Human
uggcuugcagguaugaugca

SEQ ID NO: 292780 - RNA, 23 nt, Human
uguacagauacauuauaauuauc

SEQ ID NO: 292781 - RNA, 22 nt, Human
uuaaaaaaacacuacuccacuu

SEQ ID NO: 292782 - RNA, 19 nt, Human
uuaaaacacugaacuguug

SEQ ID NO: 292783 - RNA, 19 nt, Human
uuaacaaugguuaaaaaaa

SEQ ID NO: 292784 - RNA, 21 nt, Human
uucaaaaugaauccacaugac

SEQ ID NO: 292785 - RNA, 22 nt, Human
uucacauacacaagcacagagu

SEQ ID NO: 292786 - RNA, 21 nt, Human
uucgcaaauguaaaaagugcu

SEQ ID NO: 292787 - RNA, 18 nt, Human
uuguauucauauuucucu

SEQ ID NO: 292788 - RNA, 22 nt, Human
uuuauuuaguaauacaugcaag

SEQ ID NO: 292789 - RNA, 22 nt, Human
uuuucauaaacauugugugcaa

SEQ ID NO: 292790 - RNA, 25 nt, Human
aaaaggaaaacuaaaccaaagagaa

SEQ ID NO: 292791 - RNA, 23 nt, Human
aaacucccaagcugcucaaucuc

SEQ ID NO: 292792 - RNA, 22 nt, Human
aacuguuggcuugcagguauga

SEQ ID NO: 292793 - RNA, 26 nt, Human
aagcuaaaaguagacaagagggaccc

SEQ ID NO: 292794 - RNA, 19 nt, Human
aauccugcagagcugaagu

SEQ ID NO: 292795 - RNA, 24 nt, Human
acauguguugguaacaaguuuuac

SEQ ID NO: 292796 - RNA, 21 nt, Human
accaccauuuucauuuauuag

SEQ ID NO: 292797 - RNA, 21 nt, Human
acuaaaccaaagagaaggugu

SEQ ID NO: 292798 - RNA, 19 nt, Human
agaaaggaaacuugggucu

SEQ ID NO: 292799 - RNA, 21 nt, Human
agacaggauccccggagcaca

SEQ ID NO: 292800 - RNA, 19 nt, Human
agagagagagagaaagaga

SEQ ID NO: 292801 - RNA, 19 nt, Human
agaggguggcugccaccuc

SEQ ID NO: 292802 - RNA, 21 nt, Human
agccaauaucuggcacucgca

SEQ ID NO: 292803 - RNA, 23 nt, Human
agccagaguggagagaaagaguu

SEQ ID NO: 292804 - RNA, 19 nt, Human
aggagaaaggaaacuuggg

SEQ ID NO: 292805 - RNA, 23 nt, Human
aguuacacacccuucaaaauaug

SEQ ID NO: 292806 - RNA, 21 nt, Human
auaaaucuaugaaacaacaaa

SEQ ID NO: 292807 - RNA, 21 nt, Human
auaccauuagaauuucaaagc

SEQ ID NO: 292808 - RNA, 20 nt, Human
caaaaggaaauauaauggaa

SEQ ID NO: 292809 - RNA, 22 nt, Human
caacaauaaagcuuaaaguuca

SEQ ID NO: 292810 - RNA, 23 nt, Human
caacagacuuuagggucuccuaa

SEQ ID NO: 292811 - RNA, 21 nt, Human
cacagaauuaguagauugaaa

SEQ ID NO: 292812 - RNA, 18 nt, Human
cacuguaugagaaaacaa

SEQ ID NO: 292813 - RNA, 24 nt, Human
cagauaccauuagaauuucaaagc

SEQ ID NO: 292814 - RNA, 22 nt, Human
caggauccccggagcacagggc

SEQ ID NO: 292815 - RNA, 22 nt, Human
cauagcauacagcauacauaug

SEQ ID NO: 292816 - RNA, 18 nt, Human
caugcaagaggcagcccc

SEQ ID NO: 292817 - RNA, 22 nt, Human
ccaguggccacaaacucccaag

SEQ ID NO: 292818 - RNA, 19 nt, Human
ccaugcaauccugcagagc

SEQ ID NO: 292819 - RNA, 22 nt, Human
ccccaugcaauccugcagagcu

SEQ ID NO: 292820 - RNA, 23 nt, Human
cccgcgguagccacacauaccca

SEQ ID NO: 292821 - RNA, 19 nt, Human
cccuucaaaauaugggaga

SEQ ID NO: 292822 - RNA, 19 nt, Human
cgcgguagccacacauacc

SEQ ID NO: 292823 - RNA, 19 nt, Human
cuaaaaguagacaagacag

SEQ ID NO: 292824 - RNA, 25 nt, Human
cuagcacaccaagacaagucacaga

SEQ ID NO: 292825 - RNA, 23 nt, Human
cuaugaaacaacaaacagcgaaa

SEQ ID NO: 292826 - RNA, 18 nt, Human
cucccaagcugcucaauc

SEQ ID NO: 292827 - RNA, 18 nt, Human
cugcagagcugaaguuac

SEQ ID NO: 292828 - RNA, 21 nt, Human
cuggaccauaaauaaaauucc

SEQ ID NO: 292829 - RNA, 18 nt, Human
cuuauuuaaggugacagc

SEQ ID NO: 292830 - RNA, 20 nt, Human
gaccugaaagaguaaagcug

SEQ ID NO: 292831 - RNA, 20 nt, Human
gagagagagagagaaagaga

SEQ ID NO: 292832 - RNA, 19 nt, Human
gcaagaggcagccccagag

SEQ ID NO: 292833 - RNA, 20 nt, Human
gccacaaacucccaagcugc

SEQ ID NO: 292834 - RNA, 21 nt, Human
gcugcucaaucucaaaacuuu

SEQ ID NO: 292835 - RNA, 20 nt, Human
gcuucuguuucccagggugg

SEQ ID NO: 292836 - RNA, 21 nt, Human
gggcugggaagccucuccuuu

SEQ ID NO: 292837 - RNA, 18 nt, Human
uaacagacuccuaccucu

SEQ ID NO: 292838 - RNA, 18 nt, Human
uaacaucauagguguuag

SEQ ID NO: 292839 - RNA, 24 nt, Human
uaauaaauuagcccgauucuccuc

SEQ ID NO: 292840 - RNA, 21 nt, Human
uaauggaauuacauucaacaa

SEQ ID NO: 292841 - RNA, 27 nt, Human
uaauuaucaucauuaauaaauuagccc

SEQ ID NO: 292842 - RNA, 19 nt, Human
uacacaaaagcugauuaac

SEQ ID NO: 292843 - RNA, 23 nt, Human
uaccaauagcaccaauucaaaau

SEQ ID NO: 292844 - RNA, 21 nt, Human
uaccauuagaauuucaaagca

SEQ ID NO: 292845 - RNA, 25 nt, Human
uaccccaugcaauccugcagagcug

SEQ ID NO: 292846 - RNA, 19 nt, Human
uacgacaaaaccuguuaaa

SEQ ID NO: 292847 - RNA, 18 nt, Human
uacugugucuuucauaca

SEQ ID NO: 292848 - RNA, 23 nt, Human
uagaauuucaaagcauucugcaa

SEQ ID NO: 292849 - RNA, 24 nt, Human
uagaauuucaaagcauucugcaac

SEQ ID NO: 292850 - RNA, 26 nt, Human
uagcacaccaagacaagucacagaau

SEQ ID NO: 292851 - RNA, 20 nt, Human
uaguagauugaaaaaucugc

SEQ ID NO: 292852 - RNA, 23 nt, Human
uauuugucuuuguuuucuugccu

SEQ ID NO: 292853 - RNA, 22 nt, Human
ugaaacaacaaacagcgaaagg

SEQ ID NO: 292854 - RNA, 23 nt, Human
ugcaauccugcagagcugaaguu

SEQ ID NO: 292855 - RNA, 28 nt, Human
ugcuuuuuuuaaauaacagacuccuacu

SEQ ID NO: 292856 - RNA, 20 nt, Human
uggcuggaccauaaauaaaa

SEQ ID NO: 292857 - RNA, 20 nt, Human
uggcuugcagguaugaugca

SEQ ID NO: 292858 - RNA, 23 nt, Human
uguacagauacauuauaauuauc

SEQ ID NO: 292859 - RNA, 22 nt, Human
uuaaaaaaacacuacuccacuu

SEQ ID NO: 292860 - RNA, 19 nt, Human
uuaaaacacugaacuguug

SEQ ID NO: 292861 - RNA, 19 nt, Human
uuaacaaugguuaaaaaaa

SEQ ID NO: 292862 - RNA, 21 nt, Human
uucaaaaugaauccacaugac

SEQ ID NO: 292863 - RNA, 22 nt, Human
uucacauacacaagcacagagu

SEQ ID NO: 292864 - RNA, 21 nt, Human
uucgcaaauguaaaaagugcu

SEQ ID NO: 292865 - RNA, 18 nt, Human
uuguauucauauuucucu

SEQ ID NO: 292866 - RNA, 22 nt, Human
uuuauuuaguaauacaugcaag

SEQ ID NO: 292867 - RNA, 22 nt, Human
uuuucauaaacauugugugcaa

SEQ ID NO: 292868 - RNA, 25 nt, Human
aaaaggaaaacuaaaccaaagagaa

SEQ ID NO: 292869 - RNA, 22 nt, Human
aacucccaagcugcucaaucuc

SEQ ID NO: 292870 - RNA, 22 nt, Human
aacuguuggcuugcagguauga

SEQ ID NO: 292871 - RNA, 26 nt, Human
aagcuaaaaguagacaagagggaccc

SEQ ID NO: 292872 - RNA, 23 nt, Human
aagcugcucaaucucaaaacuuu

SEQ ID NO: 292873 - RNA, 19 nt, Human
aauccugcagagcugaagu

SEQ ID NO: 292874 - RNA, 30 nt, Human; identical to SEQ ID NO: 291891

SEQ ID NO: 292875 - RNA, 24 nt, Human
acauguguugguaacaaguuuuac

SEQ ID NO: 292876 - RNA, 21 nt, Human
accaccauuuucauuuauuag

SEQ ID NO: 292877 - RNA, 24 nt, Human
acccgcgguagccacacauaccca

SEQ ID NO: 292878 - RNA, 21 nt, Human
acuaaaccaaagagaaggugu

SEQ ID NO: 292879 - RNA, 19 nt, Human
agaaaggaaacuugggucu

SEQ ID NO: 292880 - RNA, 22 nt, Human
agacaggauccccggagcacag

SEQ ID NO: 292881 - RNA, 19 nt, Human
agagagagagagaaagaga

SEQ ID NO: 292882 - RNA, 19 nt, Human
agaggguggcugccaccuc

SEQ ID NO: 292883 - RNA, 21 nt, Human
agccaauaucuggcacucgca

SEQ ID NO: 292884 - RNA, 23 nt, Human
agccagaguggagagaaagaguu

SEQ ID NO: 292885 - RNA, 18 nt, Human
agcuuuuacgacaaaacc

SEQ ID NO: 292886 - RNA, 18 nt, Human
aggagaaaggaaacuugg

SEQ ID NO: 292887 - RNA, 23 nt, Human
aguuacacacccuucaaaauaug

SEQ ID NO: 292888 - RNA, 21 nt, Human
auaaaucuaugaaacaacaaa

SEQ ID NO: 292889 - RNA, 21 nt, Human
auaccauuagaauuucaaagc

SEQ ID NO: 292890 - RNA, 21 nt, Human
augcaagaggcagccccagag

SEQ ID NO: 292891 - RNA, 18 nt, Human
auggaauuacauucaaca

SEQ ID NO: 292892 - RNA, 20 nt, Human
caaaaggaaauauaauggaa

SEQ ID NO: 292893 - RNA, 22 nt, Human
caacaauaaagcuuaaaguuca

SEQ ID NO: 292894 - RNA, 23 nt, Human
caacagacuuuagggucuccuaa

SEQ ID NO: 292895 - RNA, 21 nt, Human
cacagaauuaguagauugaaa

SEQ ID NO: 292896 - RNA, 20 nt, Human
cacauacacaagcacagagu

SEQ ID NO: 292897 - RNA, 18 nt, Human
cacuguaugagaaaacaa

SEQ ID NO: 292898 - RNA, 24 nt, Human
cagauaccauuagaauuucaaagc

SEQ ID NO: 292899 - RNA, 22 nt, Human
caggauccccggagcacagggc

SEQ ID NO: 292900 - RNA, 18 nt, Human
caugcaagaggcagcccc

SEQ ID NO: 292901 - RNA, 19 nt, Human
ccacaaacucccaagcugc

SEQ ID NO: 292902 - RNA, 22 nt, Human
ccaguggccacaaacucccaag

SEQ ID NO: 292903 - RNA, 23 nt, Human
cccaagcugcucaaucucaaaac

SEQ ID NO: 292904 - RNA, 21 nt, Human
ccccaugcaauccugcagagc

SEQ ID NO: 292905 - RNA, 22 nt, Human
ccccaugcaauccugcagagcu

SEQ ID NO: 292906 - RNA, 19 nt, Human
cccuucaaaauaugggaga

SEQ ID NO: 292907 - RNA, 20 nt, Human
ccgcgguagccacacauacc

SEQ ID NO: 292908 - RNA, 19 nt, Human
cuaaaaguagacaagacag

SEQ ID NO: 292909 - RNA, 25 nt, Human
cuagcacaccaagacaagucacaga

SEQ ID NO: 292910 - RNA, 23 nt, Human
cuaugaaacaacaaacagcgaaa

SEQ ID NO: 292911 - RNA, 18 nt, Human
cucccaagcugcucaauc

SEQ ID NO: 292912 - RNA, 18 nt, Human
cugcagagcugaaguuac

SEQ ID NO: 292913 - RNA, 21 nt, Human
cuggaccauaaauaaaauucc

SEQ ID NO: 292914 - RNA, 18 nt, Human
cuuauuuaaggugacagc

SEQ ID NO: 292915 - RNA, 20 nt, Human
gaccugaaagaguaaagcug

SEQ ID NO: 292916 - RNA, 20 nt, Human
gagagagagagagaaagaga

SEQ ID NO: 292917 - RNA, 18 nt, Human
gcauacagcauacauaug

SEQ ID NO: 292918 - RNA, 20 nt, Human
gcuucuguuucccagggugg

SEQ ID NO: 292919 - RNA, 19 nt, Human
gggcugggaagccucuccu

SEQ ID NO: 292920 - RNA, 18 nt, Human
uaacagacuccuaccucu

SEQ ID NO: 292921 - RNA, 20 nt, Human
uaacaucauagguguuagua

SEQ ID NO: 292922 - RNA, 24 nt, Human
uaauaaauuagcccgauucuccuc

SEQ ID NO: 292923 - RNA, 27 nt, Human
uaauuaucaucauuaauaaauuagccc

SEQ ID NO: 292924 - RNA, 19 nt, Human
uacacaaaagcugauuaac

SEQ ID NO: 292925 - RNA, 23 nt, Human
uaccaauagcaccaauucaaaau

SEQ ID NO: 292926 - RNA, 21 nt, Human
uaccauuagaauuucaaagca

SEQ ID NO: 292927 - RNA, 25 nt, Human
uaccccaugcaauccugcagagcug

SEQ ID NO: 292928 - RNA, 19 nt, Human
uacgacaaaaccuguuaaa

SEQ ID NO: 292929 - RNA, 18 nt, Human
uacugugucuuucauaca

SEQ ID NO: 292930 - RNA, 23 nt, Human
uagaauuucaaagcauucugcaa

SEQ ID NO: 292931 - RNA, 24 nt, Human
uagaauuucaaagcauucugcaac

SEQ ID NO: 292932 - RNA, 26 nt, Human
uagcacaccaagacaagucacagaau

SEQ ID NO: 292933 - RNA, 20 nt, Human
uaguagauugaaaaaucugc

SEQ ID NO: 292934 - RNA, 23 nt, Human
uauuugucuuuguuuucuugccu

SEQ ID NO: 292935 - RNA, 22 nt, Human
uccacuuuuucacagguguaca

SEQ ID NO: 292936 - RNA, 22 nt, Human
ugaaacaacaaacagcgaaagg

SEQ ID NO: 292937 - RNA, 23 nt, Human
ugcaauccugcagagcugaaguu

SEQ ID NO: 292938 - RNA, 20 nt, Human
uggcuggaccauaaauaaaa

SEQ ID NO: 292939 - RNA, 20 nt, Human
uggcuugcagguaugaugca

SEQ ID NO: 292940 - RNA, 23 nt, Human
uguacagauacauuauaauuauc

SEQ ID NO: 292941 - RNA, 22 nt, Human
uuaaaaaaacacuacuccacuu

SEQ ID NO: 292942 - RNA, 19 nt, Human
uuaaaacacugaacuguug

SEQ ID NO: 292943 - RNA, 19 nt, Human
uuaacaaugguuaaaaaaa

SEQ ID NO: 292944 - RNA, 21 nt, Human
uucaaaaugaauccacaugac

SEQ ID NO: 292945 - RNA, 21 nt, Human
uucgcaaauguaaaaagugcu

SEQ ID NO: 292946 - RNA, 18 nt, Human
uuguauucauauuucucu

SEQ ID NO: 292947 - RNA, 22 nt, Human
uuuauuuaguaauacaugcaag

SEQ ID NO: 292948 - RNA, 22 nt, Human
uuuucauaaacauugugugcaa

SEQ ID NO: 292949 - RNA, 21 nt, Human
aaaaaauaaaaaagccuuggc

SEQ ID NO: 292950 - RNA, 25 nt, Human
aaaaggaaaacuaaaccaaagagaa

SEQ ID NO: 292951 - RNA, 20 nt, Human
aaaauaauagauacugaagg

SEQ ID NO: 292952 - RNA, 23 nt, Human
aaacucccaagcugcucaaucuc

SEQ ID NO: 292953 - RNA, 22 nt, Human
aacaauacaaguagacuaaaau

SEQ ID NO: 292954 - RNA, 24 nt, Human
aacaaucagauguucacagucucc

SEQ ID NO: 292955 - RNA, 19 nt, Human
aacacggugaaaccccauc

SEQ ID NO: 292956 - RNA, 20 nt, Human
aacacggugaaaccccaucu

SEQ ID NO: 292957 - RNA, 21 nt, Human
aacacggugaaaccccaucuc

SEQ ID NO: 292958 - RNA, 21 nt, Human
aacacggugaaaccccaucuc

SEQ ID NO: 292959 - RNA, 19 nt, Human
aacaugaugaaaccccauc

SEQ ID NO: 292960 - RNA, 20 nt, Human
aacaugaugaaaccccaucu

SEQ ID NO: 292961 - RNA, 21 nt, Human
aacaugaugaaaccccaucuc

SEQ ID NO: 292962 - RNA, 21 nt, Human
aacaugaugaaaccccaucuc

SEQ ID NO: 292963 - RNA, 21 nt, Human
aaccacauaacaaaaacucaa

SEQ ID NO: 292964 - RNA, 22 nt, Human
aacuguuggcuugcagguauga

SEQ ID NO: 292965 - RNA, 24 nt, Human
aagaacacauuuuaggccaggcgc

SEQ ID NO: 292966 - RNA, 22 nt, Human
aagacaaagucggcuccaaugu

SEQ ID NO: 292967 - RNA, 24 nt, Human
aagagaaauccaggaguugcaauc

SEQ ID NO: 292968 - RNA, 26 nt, Human
aagcuaaaaguagacaagagggaccc

SEQ ID NO: 292969 - RNA, 21 nt, Human
aauaaucagauaccugggucc

SEQ ID NO: 292970 - RNA, 24 nt, Human
aauauaggagcccagaaaucuacu

SEQ ID NO: 292971 - RNA, 22 nt, Human
aaucaucucaggugugcuuuaa

SEQ ID NO: 292972 - RNA, 19 nt, Human
aauccugcagagcugaagu

SEQ ID NO: 292973 - RNA, 22 nt, Human
aaugacaaaaaaaaaaaauaaa

SEQ ID NO: 292974 - RNA, 30 nt, Human; identical to SEQ ID NO: 291891

SEQ ID NO: 292975 - RNA, 20 nt, Human
aauugcuugaacccaggagg

SEQ ID NO: 292976 - RNA, 24 nt, Human
aauugcuugaacccaggaggcaga

SEQ ID NO: 292977 - RNA, 19 nt, Human
acaaaaaguagcaaccaac

SEQ ID NO: 292978 - RNA, 24 nt, Human
acagagcgagacucugacucaaaa

SEQ ID NO: 292979 - RNA, 18 nt, Human
acaguucacugcagccuc

SEQ ID NO: 292980 - RNA, 24 nt, Human
acauguguugguaacaaguuuuac

SEQ ID NO: 292981 - RNA, 22 nt, Human
accacauaacaaaaacucaaua

SEQ ID NO: 292982 - RNA, 21 nt, Human
accaccauuuucauuuauuag

SEQ ID NO: 292983 - RNA, 22 nt, Human
accacugcacuccagccugggc

SEQ ID NO: 292984 - RNA, 24 nt, Human
accccaucucuacuaaaaauacaa

SEQ ID NO: 292985 - RNA, 24 nt, Human
accccaucucuacuaaaaauacaa

SEQ ID NO: 292986 - RNA, 24 nt, Human
acccgcgguagccacacauaccca

SEQ ID NO: 292987 - RNA, 21 nt, Human
acuaaaccaaagagaaggugu

SEQ ID NO: 292988 - RNA, 24 nt, Human
acugcacuccagccugggcaacag

SEQ ID NO: 292989 - RNA, 24 nt, Human
acugcacuccagccugggcaacag

SEQ ID NO: 292990 - RNA, 24 nt, Human
acuguacuccagccuggguggcag

SEQ ID NO: 292991 - RNA, 22 nt, Human
acuugaaaagagacauaggagg

SEQ ID NO: 292992 - RNA, 22 nt, Human
agaaaaauaaaaagacaaaaaa

SEQ ID NO: 292993 - RNA, 19 nt, Human
agaaaggaaacacuuguuu

SEQ ID NO: 292994 - RNA, 24 nt, Human
agaaaggaaacacuuguuuaaaaa

SEQ ID NO: 292995 - RNA, 19 nt, Human
agaaaggaaacuugggucu

SEQ ID NO: 292996 - RNA, 19 nt, Human
agaaucucccauauggcuc

SEQ ID NO: 292997 - RNA, 22 nt, Human
agacaggauccccggagcacag

SEQ ID NO: 292998 - RNA, 20 nt, Human
agacguugcagugagccaag

SEQ ID NO: 292999 - RNA, 22 nt, Human
agagagaacaucgcggcaaaga

SEQ ID NO: 293000 - RNA, 19 nt, Human
agagagagagagaaagaga

SEQ ID NO: 293001 - RNA, 20 nt, Human
agagauuaauaugaaggacu

SEQ ID NO: 293002 - RNA, 19 nt, Human
agaggguggcugccaccuc

SEQ ID NO: 293003 - RNA, 24 nt, Human
agcacuuugggaggccgagguggg

SEQ ID NO: 293004 - RNA, 21 nt, Human
agcauuuugggaggcugaggc

SEQ ID NO: 293005 - RNA, 24 nt, Human
agcauuuugggaggcugaggcggg

SEQ ID NO: 293006 - RNA, 21 nt, Human
agccaauaucuggcacucgca

SEQ ID NO: 293007 - RNA, 23 nt, Human
agccagaguggagagaaagaguu

SEQ ID NO: 293008 - RNA, 24 nt, Human
agccugggcaacagagcgagacuc

SEQ ID NO: 293009 - RNA, 24 nt, Human
agccuggguggcagaaaacgacuc

SEQ ID NO: 293010 - RNA, 24 nt, Human
agcgauucucucgccucagccucc

SEQ ID NO: 293011 - RNA, 23 nt, Human
agcugggcgcgguggcaugugcc

SEQ ID NO: 293012 - RNA, 18 nt, Human
agcuuuuacgacaaaacc

SEQ ID NO: 293013 - RNA, 28 nt, Human
aggaaucaacaaaaaguagccgguaccc

SEQ ID NO: 293014 - RNA, 19 nt, Human
aggagaaaggaaacuuggg

SEQ ID NO: 293015 - RNA, 24 nt, Human
aggcagacguugcagugagccaag

SEQ ID NO: 293016 - RNA, 23 nt, Human
aggcaggagaauugcuugaaccc

SEQ ID NO: 293017 - RNA, 24 nt, Human
aggcgcgguggcucacgccuguaa

SEQ ID NO: 293018 - RNA, 18 nt, Human
aggcgggaggaucaugag

SEQ ID NO: 293019 - RNA, 20 nt, Human
aggcgggaggaucaugaggu

SEQ ID NO: 293020 - RNA, 24 nt, Human
aggcgggaggaucaugaggucagg

SEQ ID NO: 293021 - RNA, 19 nt, Human
aggcugaggcaggagaaug

SEQ ID NO: 293022 - RNA, 21 nt, Human
aggcugaggcaggagaauugc

SEQ ID NO: 293023 - RNA, 24 nt, Human
aggcugaggcaggagaauugcuug

SEQ ID NO: 293024 - RNA, 20 nt, Human
aggcugaggcgggaggauca

SEQ ID NO: 293025 - RNA, 22 nt, Human
aggcugaggcgggaggaucaug

SEQ ID NO: 293026 - RNA, 24 nt, Human
agggggagcuuggagugagccaag

SEQ ID NO: 293027 - RNA, 24 nt, Human
aggugggagcaucacaaggucagg

SEQ ID NO: 293028 - RNA, 24 nt, Human
aguggcucacagcuuuaaucccag

SEQ ID NO: 293029 - RNA, 23 nt, Human
aguuacacacccuucaaaauaug

SEQ ID NO: 293030 - RNA, 21 nt, Human
auaaaucuaugaaacaacaaa

SEQ ID NO: 293031 - RNA, 21 nt, Human
auaccauuagaauuucaaagc

SEQ ID NO: 293032 - RNA, 19 nt, Human
auagcugaaagagaaagaa

SEQ ID NO: 293033 - RNA, 24 nt, Human
auauuucaugaauaaaaauuucac

SEQ ID NO: 293034 - RNA, 23 nt, Human
aucagaaauucaaugucacuuua

SEQ ID NO: 293035 - RNA, 24 nt, Human
aucaugccacuguacuccagccug

SEQ ID NO: 293036 - RNA, 19 nt, Human
augaaugacuaacaacuaa

SEQ ID NO: 293037 - RNA, 25 nt, Human
augacaaaaaaaaaaaauaaaaaag

SEQ ID NO: 293038 - RNA, 20 nt, Human
augacaucuguagcaucccu

SEQ ID NO: 293039 - RNA, 22 nt, Human
augccacuguacuccagccugg

SEQ ID NO: 293040 - RNA, 24 nt, Human
auggcaccacugcacuccagccug

SEQ ID NO: 293041 - RNA, 20 nt, Human
auuaccaaucccaucaauac

SEQ ID NO: 293042 - RNA, 23 nt, Human
auucuaacuugaauugaggaaug

SEQ ID NO: 293043 - RNA, 22 nt, Human
caaaauguugggauugcaggug

SEQ ID NO: 293044 - RNA, 26 nt, Human
caaagauacuugaaaguauaagacua

SEQ ID NO: 293045 - RNA, 19 nt, Human
caacaaaaaguagcaacca

SEQ ID NO: 293046 - RNA, 22 nt, Human
caacaauaaagcuuaaaguuca

SEQ ID NO: 293047 - RNA, 23 nt, Human
caacagacuuuagggucuccuaa

SEQ ID NO: 293048 - RNA, 21 nt, Human
cacagaauuaguagauugaaa

SEQ ID NO: 293049 - RNA, 23 nt, Human
cacagcccuucugagaauuugca

SEQ ID NO: 293050 - RNA, 24 nt, Human
cacagcuuuaaucccagcacuuug

SEQ ID NO: 293051 - RNA, 20 nt, Human
cacaguuauucugcaaaacu

SEQ ID NO: 293052 - RNA, 20 nt, Human
cacauacuacaauucaggaa

SEQ ID NO: 293053 - RNA, 24 nt, Human
caccacugcacuccagccugggca

SEQ ID NO: 293054 - RNA, 20 nt, Human
cacccccuuugcucucaaag

SEQ ID NO: 293055 - RNA, 24 nt, Human
cacgccuguaaucccagcauuuug

SEQ ID NO: 293056 - RNA, 23 nt, Human
cacuccagccugggcaacagagc

SEQ ID NO: 293057 - RNA, 24 nt, Human
cacuccagccugggcaacagagcg

SEQ ID NO: 293058 - RNA, 18 nt, Human
cacugcacuccagccugg

SEQ ID NO: 293059 - RNA, 19 nt, Human
cacugcacuccagccuggg

SEQ ID NO: 293060 - RNA, 21 nt, Human
cacugcacuccagccugggca

SEQ ID NO: 293061 - RNA, 23 nt, Human
cacugcacuccagccugggcaac

SEQ ID NO: 293062 - RNA, 24 nt, Human
cacugcacuccagccugggcaaca

SEQ ID NO: 293063 - RNA, 19 nt, Human
cacuguacuccagccuggg

SEQ ID NO: 293064 - RNA, 19 nt, Human
cacuguacuccagccuggg

SEQ ID NO: 293065 - RNA, 19 nt, Human
cacuguacuccagccuggg

SEQ ID NO: 293066 - RNA, 21 nt, Human
cacuguacuccagccugggug

SEQ ID NO: 293067 - RNA, 24 nt, Human
cacuguacuccagccuggguggca

SEQ ID NO: 293068 - RNA, 25 nt, Human
cacuguacuccagccuggguggcag

SEQ ID NO: 293069 - RNA, 18 nt, Human
cacuguaugagaaaacaa

SEQ ID NO: 293070 - RNA, 19 nt, Human
cagaacaagugaauucuca

SEQ ID NO: 293071 - RNA, 22 nt, Human
cagaaucuugcugucucccggg

SEQ ID NO: 293072 - RNA, 23 nt, Human
cagagagaacaucgcggcaaaga

SEQ ID NO: 293073 - RNA, 24 nt, Human
cagauaccauuagaauuucaaagc

SEQ ID NO: 293074 - RNA, 21 nt, Human
cagcacuuugggaggccgagg

SEQ ID NO: 293075 - RNA, 24 nt, Human
cagcacuuugggaggccgaggugg

SEQ ID NO: 293076 - RNA, 24 nt, Human
cagcauuuugggaggcugaggcgg

SEQ ID NO: 293077 - RNA, 24 nt, Human
cagccucaaugucccaggcucaag

SEQ ID NO: 293078 - RNA, 20 nt, Human
cagccuccugaguaauuggg

SEQ ID NO: 293079 - RNA, 24 nt, Human
cagcuacucaggaggcugaggcag

SEQ ID NO: 293080 - RNA, 24 nt, Human
cagcuacucgggaggcugaggcag

SEQ ID NO: 293081 - RNA, 23 nt, Human
caggagcucagagaccacucaag

SEQ ID NO: 293082 - RNA, 22 nt, Human
caggauccccggagcacagggc

SEQ ID NO: 293083 - RNA, 25 nt, Human
cauaacaaaaacucaauaagcgaag

SEQ ID NO: 293084 - RNA, 19 nt, Human
cauaaggguaauguuuuaa

SEQ ID NO: 293085 - RNA, 23 nt, Human
cauaaggguaauguuuuaaguua

SEQ ID NO: 293086 - RNA, 20 nt, Human
caucacaaggucaggaguuc

SEQ ID NO: 293087 - RNA, 22 nt, Human
caucacaaggucaggaguucga

SEQ ID NO: 293088 - RNA, 24 nt, Human
caucacaaggucaggaguucgaga

SEQ ID NO: 293089 - RNA, 18 nt, Human
caugcaagaggcagcccc

SEQ ID NO: 293090 - RNA, 22 nt, Human
caugguggcaggcgccuguagu

SEQ ID NO: 293091 - RNA, 21 nt, Human
ccaaaauguugggauugcagg

SEQ ID NO: 293092 - RNA, 24 nt, Human
ccaaaauguugggauugcaggugu

SEQ ID NO: 293093 - RNA, 20 nt, Human
ccacugcacuccagccuggg

SEQ ID NO: 293094 - RNA, 20 nt, Human
ccacugcacuccagccuggg

SEQ ID NO: 293095 - RNA, 21 nt, Human
ccacugcacuccagccugggc

SEQ ID NO: 293096 - RNA, 23 nt, Human
ccacugcacuccagccugggcaa

SEQ ID NO: 293097 - RNA, 24 nt, Human
ccacugcacuccagccugggcaac

SEQ ID NO: 293098 - RNA, 20 nt, Human
ccacuguacuccagccuggg

SEQ ID NO: 293099 - RNA, 20 nt, Human
ccacuguacuccagccuggg

SEQ ID NO: 293100 - RNA, 20 nt, Human
ccacuguacuccagccuggg

SEQ ID NO: 293101 - RNA, 21 nt, Human
ccacuguacuccagccugggu

SEQ ID NO: 293102 - RNA, 21 nt, Human
ccacuguacuccagccugggu

SEQ ID NO: 293103 - RNA, 22 nt, Human
ccacuguacuccagccugggug

SEQ ID NO: 293104 - RNA, 23 nt, Human
ccacuguacuccagccugggugg

SEQ ID NO: 293105 - RNA, 24 nt, Human
ccacuguacuccagccuggguggc

SEQ ID NO: 293106 - RNA, 22 nt, Human
ccaguggccacaaacucccaag

SEQ ID NO: 293107 - RNA, 23 nt, Human
cccaagcugcucaaucucaaaac

SEQ ID NO: 293108 - RNA, 20 nt, Human
cccaggcucaagcgauucuc

SEQ ID NO: 293109 - RNA, 21 nt, Human
ccccaugcaauccugcagagc

SEQ ID NO: 293110 - RNA, 22 nt, Human
ccccaugcaauccugcagagcu

SEQ ID NO: 293111 - RNA, 24 nt, Human
cccucccaccuuggccucccaaaa

SEQ ID NO: 293112 - RNA, 20 nt, Human
ccgcgguagccacacauacc

SEQ ID NO: 293113 - RNA, 21 nt, Human
ccuauaaucccagcuacucag

SEQ ID NO: 293114 - RNA, 22 nt, Human
ccuauaaucccagcuacucagg

SEQ ID NO: 293115 - RNA, 19 nt, Human
ccucccaccuuggccuccc

SEQ ID NO: 293116 - RNA, 24 nt, Human
ccugacuaacacggugaaacccca

SEQ ID NO: 293117 - RNA, 24 nt, Human
ccuggccaacaugaugaaacccca

SEQ ID NO: 293118 - RNA, 22 nt, Human
ccugggcaacagagcgagacuc

SEQ ID NO: 293119 - RNA, 22 nt, Human
ccuggguggcagaaaacgacuc

SEQ ID NO: 293120 - RNA, 21 nt, Human
ccuguagucccagcuacucgg

SEQ ID NO: 293121 - RNA, 18 nt, Human
ccuugaaccagaacauuc

SEQ ID NO: 293122 - RNA, 21 nt, Human
cgagaccaaccuggccaacau

SEQ ID NO: 293123 - RNA, 24 nt, Human
cgagaccauccugacuaacacggu

SEQ ID NO: 293124 - RNA, 23 nt, Human
cgagacucugacucaaaaaaaaa

SEQ ID NO: 293125 - RNA, 24 nt, Human
cgaggugggagcaucacaagguca

SEQ ID NO: 293126 - RNA, 24 nt, Human
cgccuguaaucccagcauuuuggg

SEQ ID NO: 293127 - RNA, 23 nt, Human
cgccuguagucccagcuacucgg

SEQ ID NO: 293128 - RNA, 24 nt, Human
cgccuguagucccagcuacucggg

SEQ ID NO: 293129 - RNA, 19 nt, Human
cuaaaaguagacaagacag

SEQ ID NO: 293130 - RNA, 21 nt, Human
cuaaaaguuuuguaugaccuu

SEQ ID NO: 293131 - RNA, 19 nt, Human
cuaaauugguuuucaagug

SEQ ID NO: 293132 - RNA, 25 nt, Human
cuagcacaccaagacaagucacaga

SEQ ID NO: 293133 - RNA, 23 nt, Human
cuaugaaacaacaaacagcgaaa

SEQ ID NO: 293134 - RNA, 22 nt, Human
cuaugcaucauuuagcaauaaa

SEQ ID NO: 293135 - RNA, 23 nt, Human
cucaaggaagggacccucccacc

SEQ ID NO: 293136 - RNA, 24 nt, Human
cucacagcuuuaaucccagcacuu

SEQ ID NO: 293137 - RNA, 21 nt, Human
cucacgccuguaaucccagca

SEQ ID NO: 293138 - RNA, 21 nt, Human
cucacgccuguaaucccagca

SEQ ID NO: 293139 - RNA, 19 nt, Human
cucauauccagauuucugc

SEQ ID NO: 293140 - RNA, 18 nt, Human
cucccaagcugcucaauc

SEQ ID NO: 293141 - RNA, 25 nt, Human
cucccgggcugaaaugcaguugugc

SEQ ID NO: 293142 - RNA, 21 nt, Human
cucugaauuucaaaagaacuc

SEQ ID NO: 293143 - RNA, 23 nt, Human
cucugacucaaaaaaaaaaauac

SEQ ID NO: 293144 - RNA, 24 nt, Human
cucuuucccaugggaaaagggcug

SEQ ID NO: 293145 - RNA, 23 nt, Human
cugacuaacacggugaaacccca

SEQ ID NO: 293146 - RNA, 18 nt, Human
cugcagagcugaaguuac

SEQ ID NO: 293147 - RNA, 23 nt, Human
cugcagccucaaugucccaggcu

SEQ ID NO: 293148 - RNA, 21 nt, Human
cuggaccauaaauaaaauucc

SEQ ID NO: 293149 - RNA, 18 nt, Human
cuuauuuaaggugacagc

SEQ ID NO: 293150 - RNA, 18 nt, Human
gaaaaacgugcaaagaca

SEQ ID NO: 293151 - RNA, 20 nt, Human
gaaaacucuccacuuaaguu

SEQ ID NO: 293152 - RNA, 23 nt, Human
gaacuguuggcuugcagguauga

SEQ ID NO: 293153 - RNA, 19 nt, Human
gaccauaggccccaauuug

SEQ ID NO: 293154 - RNA, 20 nt, Human
gaccugaaagaguaaagcug

SEQ ID NO: 293155 - RNA, 24 nt, Human
gagaaaaagauauuuuuaaaaaaa

SEQ ID NO: 293156 - RNA, 23 nt, Human
gagaauugcuugaacccaggagg

SEQ ID NO: 293157 - RNA, 20 nt, Human
gagagagagagagaaagaga

SEQ ID NO: 293158 - RNA, 23 nt, Human
gagcaucacaaggucaggaguuc

SEQ ID NO: 293159 - RNA, 20 nt, Human
gagugaaaaagaauugagcc

SEQ ID NO: 293160 - RNA, 24 nt, Human
gauauuuuuaaaaaaacagauuuc

SEQ ID NO: 293161 - RNA, 23 nt, Human
gaucccguuucucuugcuggagc

SEQ ID NO: 293162 - RNA, 25 nt, Human
gauucuaguguaagagaaauccagg

SEQ ID NO: 293163 - RNA, 19 nt, Human
gcaagaggcagccccagag

SEQ ID NO: 293164 - RNA, 27 nt, Human
gcacuaaagguagaguguggaaaacca

SEQ ID NO: 293165 - RNA, 24 nt, Human
gcacuccagccugggcaacagagc

SEQ ID NO: 293166 - RNA, 21 nt, Human
gcagaaaacgacuccgucuca

SEQ ID NO: 293167 - RNA, 22 nt, Human
gcaggagaauugcuugaaccca

SEQ ID NO: 293168 - RNA, 18 nt, Human
gcauacagcauacauaug

SEQ ID NO: 293169 - RNA, 22 nt, Human
gcaugugccuauaaucccagcu

SEQ ID NO: 293170 - RNA, 24 nt, Human
gccaacaugaugaaaccccaucuc

SEQ ID NO: 293171 - RNA, 20 nt, Human
gccacaaacucccaagcugc

SEQ ID NO: 293172 - RNA, 19 nt, Human
gccacuguacuccagccug

SEQ ID NO: 293173 - RNA, 24 nt, Human
gccacuguacuccagccugggugg

SEQ ID NO: 293174 - RNA, 25 nt, Human
gccucagccuccugaguaauuggga

SEQ ID NO: 293175 - RNA, 21 nt, Human
gccuuggcacaguggcucaca

SEQ ID NO: 293176 - RNA, 24 nt, Human
gcgauucucucgccucagccuccu

SEQ ID NO: 293177 - RNA, 21 nt, Human
gcgggcaugguggcaggcgcc

SEQ ID NO: 293178 - RNA, 22 nt, Human
gcugaggcaggagaauggcgug

SEQ ID NO: 293179 - RNA, 21 nt, Human
gcugcucaaucucaaaacuuu

SEQ ID NO: 293180 - RNA, 20 nt, Human
gcuucuguuucccagggugg

SEQ ID NO: 293181 - RNA, 21 nt, Human
ggaaaagggcuguauuugucu

SEQ ID NO: 293182 - RNA, 20 nt, Human
ggacuuaggugcugcuaaug

SEQ ID NO: 293183 - RNA, 23 nt, Human
ggagcaucacaaggucaggaguu

SEQ ID NO: 293184 - RNA, 21 nt, Human
ggaguucgagaccaaccuggc

SEQ ID NO: 293185 - RNA, 19 nt, Human
ggauugcaggugucaggcc

SEQ ID NO: 293186 - RNA, 18 nt, Human
ggcacaugaaacuugaaa

SEQ ID NO: 293187 - RNA, 24 nt, Human
ggcagaaaacgacuccgucucaga

SEQ ID NO: 293188 - RNA, 22 nt, Human
ggcaugguggcaggcgccugua

SEQ ID NO: 293189 - RNA, 23 nt, Human
ggcgggaggaucaugaggucagg

SEQ ID NO: 293190 - RNA, 21 nt, Human
ggcucacgccuguaaucccag

SEQ ID NO: 293191 - RNA, 20 nt, Human
gggagacaaaugacaucugu

SEQ ID NO: 293192 - RNA, 24 nt, Human
gggcgcgguggcaugugccuauaa

SEQ ID NO: 293193 - RNA, 19 nt, Human
gggcugggaagccucuccu

SEQ ID NO: 293194 - RNA, 24 nt, Human
gguggcaggcgccuguagucccag

SEQ ID NO: 293195 - RNA, 24 nt, Human
gguggcaugugccuauaaucccag

SEQ ID NO: 293196 - RNA, 23 nt, Human
gguggcucacgccuguaauccca

SEQ ID NO: 293197 - RNA, 24 nt, Human
gguggcucacgccuguaaucccag

SEQ ID NO: 293198 - RNA, 19 nt, Human
guacuccagccuggguggc

SEQ ID NO: 293199 - RNA, 25 nt, Human
gucccaggcucaagcgauucucucg

SEQ ID NO: 293200 - RNA, 19 nt, Human
uaaaaagcauuuucuccaa

SEQ ID NO: 293201 - RNA, 23 nt, Human
uaaaaguuuuguaugaccuugau

SEQ ID NO: 293202 - RNA, 21 nt, Human
uaaaauagcugaaagagaaag

SEQ ID NO: 293203 - RNA, 22 nt, Human
uaacacggugaaaccccaucuc

SEQ ID NO: 293204 - RNA, 24 nt, Human
uaacacggugaaaccccaucucua

SEQ ID NO: 293205 - RNA, 18 nt, Human
uaacagacuccuaccucu

SEQ ID NO: 293206 - RNA, 20 nt, Human
uaacaucauagguguuagua

SEQ ID NO: 293207 - RNA, 24 nt, Human
uaauaaauuagcccgauucuccuc

SEQ ID NO: 293208 - RNA, 18 nt, Human
uaaugaaugacuaacaac

SEQ ID NO: 293209 - RNA, 21 nt, Human
uaauggaauuacauucaacaa

SEQ ID NO: 293210 - RNA, 27 nt, Human
uaauuaucaucauuaauaaauuagccc

SEQ ID NO: 293211 - RNA, 18 nt, Human
uaauuugauuccuaaagu

SEQ ID NO: 293212 - RNA, 19 nt, Human
uacacaaaagcugauuaac

SEQ ID NO: 293213 - RNA, 23 nt, Human
uaccaauagcaccaauucaaaau

SEQ ID NO: 293214 - RNA, 21 nt, Human
uaccauuagaauuucaaagca

SEQ ID NO: 293215 - RNA, 25 nt, Human
uaccccaugcaauccugcagagcug

SEQ ID NO: 293216 - RNA, 19 nt, Human
uacgacaaaaccuguuaaa

SEQ ID NO: 293217 - RNA, 18 nt, Human
uacuccagccuggguggc

SEQ ID NO: 293218 - RNA, 20 nt, Human
uacuccagccuggguggcag

SEQ ID NO: 293219 - RNA, 18 nt, Human
uacugugucuuucauaca

SEQ ID NO: 293220 - RNA, 22 nt, Human
uagaaaacaaacaaauagcuug

SEQ ID NO: 293221 - RNA, 24 nt, Human
uagaagucaagacaaagucggcuc

SEQ ID NO: 293222 - RNA, 23 nt, Human
uagaauuucaaagcauucugcaa

SEQ ID NO: 293223 - RNA, 24 nt, Human
uagaauuucaaagcauucugcaac

SEQ ID NO: 293224 - RNA, 20 nt, Human
uagagaacuacaaacuuaac

SEQ ID NO: 293225 - RNA, 23 nt, Human
uagagaacuacaaacuuaacaag

SEQ ID NO: 293226 - RNA, 26 nt, Human
uagcacaccaagacaagucacagaau

SEQ ID NO: 293227 - RNA, 22 nt, Human
uagcugggcgcgguggcaugug

SEQ ID NO: 293228 - RNA, 20 nt, Human
uaggauucuaguguaagaga

SEQ ID NO: 293229 - RNA, 25 nt, Human
uaggcaaaauaggaaagugucucuu

SEQ ID NO: 293230 - RNA, 23 nt, Human
uagggcuauggaucuaaaauuuc

SEQ ID NO: 293231 - RNA, 20 nt, Human
uaguagauugaaaaaucugc

SEQ ID NO: 293232 - RNA, 24 nt, Human
uaucaaauagggcuauggaucuaa

SEQ ID NO: 293233 - RNA, 21 nt, Human
uauuaggcaaaauaggaaagu

SEQ ID NO: 293234 - RNA, 23 nt, Human
uauuugucuuuguuuucuugccu

SEQ ID NO: 293235 - RNA, 23 nt, Human
ucaaaagaacucgaaguuucgaa

SEQ ID NO: 293236 - RNA, 19 nt, Human
ucaacaaaaaguagcaacc

SEQ ID NO: 293237 - RNA, 24 nt, Human
ucaaugucacuuuaaucacaaauu

SEQ ID NO: 293238 - RNA, 18 nt, Human
ucacaaggucaggaguuc

SEQ ID NO: 293239 - RNA, 24 nt, Human
ucacaaggucaggaguucgagacc

SEQ ID NO: 293240 - RNA, 21 nt, Human
ucacgccuguaaucccagcau

SEQ ID NO: 293241 - RNA, 24 nt, Human
ucacugcagccucaaugucccagg

SEQ ID NO: 293242 - RNA, 18 nt, Human
ucaugaggucaggagauc

SEQ ID NO: 293243 - RNA, 24 nt, Human
ucaugaggucaggagaucgagacc

SEQ ID NO: 293244 - RNA, 23 nt, Human
ucaugccacuguacuccagccug

SEQ ID NO: 293245 - RNA, 22 nt, Human
ucauuuagcaauaaauaaauga

SEQ ID NO: 293246 - RNA, 22 nt, Human
uccacuuuuucacagguguaca

SEQ ID NO: 293247 - RNA, 23 nt, Human
uccagccugggcaacagagcgag

SEQ ID NO: 293248 - RNA, 24 nt, Human
uccagccugggcaacagagcgaga

SEQ ID NO: 293249 - RNA, 18 nt, Human
uccagccuggguggcaga

SEQ ID NO: 293250 - RNA, 23 nt, Human
ucccaaaauguugggauugcagg

SEQ ID NO: 293251 - RNA, 21 nt, Human
ucccaggcucaagcgauucuc

SEQ ID NO: 293252 - RNA, 21 nt, Human
ucccaggcucaagcgauucuc

SEQ ID NO: 293253 - RNA, 20 nt, Human
ucccaugggaaaagggcugu

SEQ ID NO: 293254 - RNA, 22 nt, Human
ucccauucugcuguguucgcca

SEQ ID NO: 293255 - RNA, 24 nt, Human
ucccucuauucacaucaaauaauc

SEQ ID NO: 293256 - RNA, 18 nt, Human
ucccugagaaaacucucc

SEQ ID NO: 293257 - RNA, 19 nt, Human
ucccugagaaaacucucca

SEQ ID NO: 293258 - RNA, 23 nt, Human
ucuccaauuucuguaaacugaau

SEQ ID NO: 293259 - RNA, 21 nt, Human
ucucuacuaaaaauacaaaaa

SEQ ID NO: 293260 - RNA, 22 nt, Human
ucucuacuaaaaauacaaaaaa

SEQ ID NO: 293261 - RNA, 19 nt, Human
ucucuagugaauauaggag

SEQ ID NO: 293262 - RNA, 19 nt, Human
ucuugcugucucccgggcu

SEQ ID NO: 293263 - RNA, 24 nt, Human
ugaaaaagaauugagccucuuucc

SEQ ID NO: 293264 - RNA, 22 nt, Human
ugaaacaacaaacagcgaaagg

SEQ ID NO: 293265 - RNA, 19 nt, Human
ugaaacagaagaucccguu

SEQ ID NO: 293266 - RNA, 21 nt, Human
ugaaacagaagaucccguuuc

SEQ ID NO: 293267 - RNA, 19 nt, Human
ugaaaccccaucucuacua

SEQ ID NO: 293268 - RNA, 19 nt, Human
ugaaaccccaucucuacua

SEQ ID NO: 293269 - RNA, 19 nt, Human
ugaaagaaaaugacaaaaa

SEQ ID NO: 293270 - RNA, 21 nt, Human
ugaaagagaaagaaaaauaua

SEQ ID NO: 293271 - RNA, 18 nt, Human
ugaaagucacauacuaca

SEQ ID NO: 293272 - RNA, 19 nt, Human
ugacacaauauuaaauaaa

SEQ ID NO: 293273 - RNA, 19 nt, Human
ugacugccucuaaaaguuu

SEQ ID NO: 293274 - RNA, 23 nt, Human
ugaggcaggagaauggcgugaac

SEQ ID NO: 293275 - RNA, 24 nt, Human
ugaggcaggagaauugcuugaacc

SEQ ID NO: 293276 - RNA, 25 nt, Human
ugaggcaggagaauugcuugaaccc

SEQ ID NO: 293277 - RNA, 21 nt, Human
ugaggcgggaggaucaugagg

SEQ ID NO: 293278 - RNA, 24 nt, Human
ugaggcgggaggaucaugagguca

SEQ ID NO: 293279 - RNA, 23 nt, Human
ugcaauccugcagagcugaaguu

SEQ ID NO: 293280 - RNA, 24 nt, Human
ugccuauaaucccagcuacucagg

SEQ ID NO: 293281 - RNA, 21 nt, Human
uggaaaaccaccauuuugaaa

SEQ ID NO: 293282 - RNA, 24 nt, Human
uggaaaaccaccauuuugaaaguc

SEQ ID NO: 293283 - RNA, 20 nt, Human
uggcaccacugcacuccagc

SEQ ID NO: 293284 - RNA, 18 nt, Human
uggcagcauagcaucaga

SEQ ID NO: 293285 - RNA, 22 nt, Human
uggcaugugccuauaaucccag

SEQ ID NO: 293286 - RNA, 18 nt, Human
uggcgugaacacgggagg

SEQ ID NO: 293287 - RNA, 24 nt, Human
uggcucacagcuuuaaucccagca

SEQ ID NO: 293288 - RNA, 24 nt, Human
uggcucacgccuguaaucccagca

SEQ ID NO: 293289 - RNA, 20 nt, Human
uggcuggaccauaaauaaaa

SEQ ID NO: 293290 - RNA, 20 nt, Human
uggcuugcagguaugaugca

SEQ ID NO: 293291 - RNA, 24 nt, Human
ugggacuagagaugugugccacca

SEQ ID NO: 293292 - RNA, 19 nt, Human
ugggaggccgaggugggag

SEQ ID NO: 293293 - RNA, 21 nt, Human
ugggaggccgaggugggagca

SEQ ID NO: 293294 - RNA, 19 nt, Human
ugggaggcugaggcgggag

SEQ ID NO: 293295 - RNA, 24 nt, Human
ugggaggcugaggcgggaggauca

SEQ ID NO: 293296 - RNA, 22 nt, Human
ugggauugcaggugucaggcca

SEQ ID NO: 293297 - RNA, 23 nt, Human
ugggugacaacuuaguuuuuccu

SEQ ID NO: 293298 - RNA, 24 nt, Human
ugguggcaggcgccuguaguccca

SEQ ID NO: 293299 - RNA, 23 nt, Human
uguacagauacauuauaauuauc

SEQ ID NO: 293300 - RNA, 24 nt, Human
ugucccaggcucaagcgauucucu

SEQ ID NO: 293301 - RNA, 27 nt, Human
ugucccaggcucaagcgauucucucgg

SEQ ID NO: 293302 - RNA, 18 nt, Human
uguucuaaguguagacaa

SEQ ID NO: 293303 - RNA, 22 nt, Human
uuaaaaaaacacuacuccacuu

SEQ ID NO: 293304 - RNA, 19 nt, Human
uuaaaacacugaacuguug

SEQ ID NO: 293305 - RNA, 19 nt, Human
uuaacaaugguuaaaaaaa

SEQ ID NO: 293306 - RNA, 20 nt, Human
uuacagcacccccuuugcuc

SEQ ID NO: 293307 - RNA, 19 nt, Human
uuagcugggcgcgguggca

SEQ ID NO: 293308 - RNA, 24 nt, Human
uuagcugggcgcgguggcaugugc

SEQ ID NO: 293309 - RNA, 24 nt, Human
uuaggccaggcgcgguggcucacg

SEQ ID NO: 293310 - RNA, 18 nt, Human
uuaggggaaguuucuuuc

SEQ ID NO: 293311 - RNA, 21 nt, Human
uucaaaaugaauccacaugac

SEQ ID NO: 293312 - RNA, 22 nt, Human
uucacauacacaagcacagagu

SEQ ID NO: 293313 - RNA, 24 nt, Human
uucagcacccaaaaaauaucuauu

SEQ ID NO: 293314 - RNA, 21 nt, Human
uucgcaaauguaaaaagugcu

SEQ ID NO: 293315 - RNA, 18 nt, Human
uugaaaagguauaaaauu

SEQ ID NO: 293316 - RNA, 19 nt, Human
uugaaccagaacauucaau

SEQ ID NO: 293317 - RNA, 18 nt, Human
uugcagugagccaagauc

SEQ ID NO: 293318 - RNA, 18 nt, Human
uugcuugaacccaggagg

SEQ ID NO: 293319 - RNA, 23 nt, Human
uuggcacaguggcucacagcuuu

SEQ ID NO: 293320 - RNA, 21 nt, Human
uugggaggccgaggugggagc

SEQ ID NO: 293321 - RNA, 25 nt, Human
uugggaggcugaggcgggaggauca

SEQ ID NO: 293322 - RNA, 24 nt, Human
uugugccaucacaguucacugcag

SEQ ID NO: 293323 - RNA, 22 nt, Human
uuuauuuaguaauacaugcaag

SEQ ID NO: 293324 - RNA, 21 nt, Human
uuucuccaauuucuguaaacu

SEQ ID NO: 293325 - RNA, 18 nt, Human
uuucucuugcuggagccu

SEQ ID NO: 293326 - RNA, 18 nt, Human
uuugcucuuacuacccau

SEQ ID NO: 293327 - RNA, 22 nt, Human
uuuucauaaacauugugugcaa

SEQ ID NO: 293328 - RNA, 23 nt, Human
uuuuuggcagagaugagucucac

SEQ ID NO: 293329 - RNA, 25 nt, Human
aaaaggaaaacuaaaccaaagagaa

SEQ ID NO: 293330 - RNA, 23 nt, Human
aaacucccaagcugcucaaucuc

SEQ ID NO: 293331 - RNA, 20 nt, Human
aacacgcuacaccaacggug

SEQ ID NO: 293332 - RNA, 22 nt, Human
aacuguuggcuugcagguauga

SEQ ID NO: 293333 - RNA, 26 nt, Human
aagcuaaaaguagacaagagggaccc

SEQ ID NO: 293334 - RNA, 22 nt, Human
aaguaaauguuucaccuuccau

SEQ ID NO: 293335 - RNA, 19 nt, Human
aauccugcagagcugaagu

SEQ ID NO: 293336 - RNA, 30 nt, Human; identical to SEQ ID NO: 291891

SEQ ID NO: 293337 - RNA, 24 nt, Human
acauguguugguaacaaguuuuac

SEQ ID NO: 293338 - RNA, 21 nt, Human
accaccauuuucauuuauuag

SEQ ID NO: 293339 - RNA, 24 nt, Human
acccgcgguagccacacauaccca

SEQ ID NO: 293340 - RNA, 21 nt, Human
acuaaaccaaagagaaggugu

SEQ ID NO: 293341 - RNA, 19 nt, Human
agaaaggaaacuugggucu

SEQ ID NO: 293342 - RNA, 22 nt, Human
agacaggauccccggagcacag

SEQ ID NO: 293343 - RNA, 19 nt, Human
agagagagagagaaagaga

SEQ ID NO: 293344 - RNA, 19 nt, Human
agaggguggcugccaccuc

SEQ ID NO: 293345 - RNA, 21 nt, Human
agccaauaucuggcacucgca

SEQ ID NO: 293346 - RNA, 23 nt, Human
agccagaguggagagaaagaguu

SEQ ID NO: 293347 - RNA, 18 nt, Human
agcuuuuacgacaaaacc

SEQ ID NO: 293348 - RNA, 19 nt, Human
aggaagugcuaagaaggag

SEQ ID NO: 293349 - RNA, 18 nt, Human
aggagaaaggaaacuugg

SEQ ID NO: 293350 - RNA, 19 nt, Human
aguaaauguuucaccuucc

SEQ ID NO: 293351 - RNA, 23 nt, Human
aguuacacacccuucaaaauaug

SEQ ID NO: 293352 - RNA, 21 nt, Human
auaaaucuaugaaacaacaaa

SEQ ID NO: 293353 - RNA, 21 nt, Human
auaccauuagaauuucaaagc

SEQ ID NO: 293354 - RNA, 19 nt, Human
auaguuuaaguaaauguuu

SEQ ID NO: 293355 - RNA, 22 nt, Human
caacaauaaagcuuaaaguuca

SEQ ID NO: 293356 - RNA, 23 nt, Human
caacagacuuuagggucuccuaa

SEQ ID NO: 293357 - RNA, 21 nt, Human
cacagaauuaguagauugaaa

SEQ ID NO: 293358 - RNA, 25 nt, Human
cacaggaagugcuaagaaggagugu

SEQ ID NO: 293359 - RNA, 20 nt, Human
caccaacggugacccaggac

SEQ ID NO: 293360 - RNA, 22 nt, Human
caccaacggugacccaggacca

SEQ ID NO: 293361 - RNA, 18 nt, Human
cacuguaugagaaaacaa

SEQ ID NO: 293362 - RNA, 24 nt, Human
cagauaccauuagaauuucaaagc

SEQ ID NO: 293363 - RNA, 19 nt, Human
cagccaucuccgggccaaa

SEQ ID NO: 293364 - RNA, 22 nt, Human
caggauccccggagcacagggc

SEQ ID NO: 293365 - RNA, 18 nt, Human
caugcaagaggcagcccc

SEQ ID NO: 293366 - RNA, 24 nt, Human
cauucuucacuuuaaauauuagag

SEQ ID NO: 293367 - RNA, 19 nt, Human
ccacaaacucccaagcugc

SEQ ID NO: 293368 - RNA, 22 nt, Human
ccaguggccacaaacucccaag

SEQ ID NO: 293369 - RNA, 23 nt, Human
cccaagcugcucaaucucaaaac

SEQ ID NO: 293370 - RNA, 21 nt, Human
ccccaugcaauccugcagagc

SEQ ID NO: 293371 - RNA, 22 nt, Human
ccccaugcaauccugcagagcu

SEQ ID NO: 293372 - RNA, 19 nt, Human
cccuucaaaauaugggaga

SEQ ID NO: 293373 - RNA, 20 nt, Human
ccgcgguagccacacauacc

SEQ ID NO: 293374 - RNA, 19 nt, Human
cuaaaaguagacaagacag

SEQ ID NO: 293375 - RNA, 20 nt, Human
cuaauacuucuauacuucca

SEQ ID NO: 293376 - RNA, 25 nt, Human
cuagcacaccaagacaagucacaga

SEQ ID NO: 293377 - RNA, 23 nt, Human
cuaugaaacaacaaacagcgaaa

SEQ ID NO: 293378 - RNA, 18 nt, Human
cucccaagcugcucaauc

SEQ ID NO: 293379 - RNA, 18 nt, Human
cugcagagcugaaguuac

SEQ ID NO: 293380 - RNA, 20 nt, Human
cugccggccgucacugcugc

SEQ ID NO: 293381 - RNA, 21 nt, Human
cuggaccauaaauaaaauucc

SEQ ID NO: 293382 - RNA, 18 nt, Human
cuuauuuaaggugacagc

SEQ ID NO: 293383 - RNA, 20 nt, Human
gaccugaaagaguaaagcug

SEQ ID NO: 293384 - RNA, 20 nt, Human
gagagagagagagaaagaga

SEQ ID NO: 293385 - RNA, 19 nt, Human
gcaagaggcagccccagag

SEQ ID NO: 293386 - RNA, 18 nt, Human
gcauacagcauacauaug

SEQ ID NO: 293387 - RNA, 21 nt, Human
gcugcucaaucucaaaacuuu

SEQ ID NO: 293388 - RNA, 20 nt, Human
gcuucuguuucccagggugg

SEQ ID NO: 293389 - RNA, 20 nt, Human
ggaagugcuaagaaggagug

SEQ ID NO: 293390 - RNA, 23 nt, Human
ggcacaggaagugcuaagaagga

SEQ ID NO: 293391 - RNA, 21 nt, Human
gggcugggaagccucuccuuu

SEQ ID NO: 293392 - RNA, 23 nt, Human
gugguuaucgucaucuuuuaaua

SEQ ID NO: 293393 - RNA, 18 nt, Human
uaacagacuccuaccucu

SEQ ID NO: 293394 - RNA, 20 nt, Human
uaacaucauagguguuagua

SEQ ID NO: 293395 - RNA, 24 nt, Human
uaauaaauuagcccgauucuccuc

SEQ ID NO: 293396 - RNA, 21 nt, Human
uaauggaauuacauucaacaa

SEQ ID NO: 293397 - RNA, 27 nt, Human
uaauuaucaucauuaauaaauuagccc

SEQ ID NO: 293398 - RNA, 23 nt, Human
uaauuuauuuuuacaucuuuugu

SEQ ID NO: 293399 - RNA, 19 nt, Human
uacacaaaagcugauuaac

SEQ ID NO: 293400 - RNA, 23 nt, Human
uaccaauagcaccaauucaaaau

SEQ ID NO: 293401 - RNA, 21 nt, Human
uaccauuagaauuucaaagca

SEQ ID NO: 293402 - RNA, 25 nt, Human
uaccccaugcaauccugcagagcug

SEQ ID NO: 293403 - RNA, 19 nt, Human
uacgacaaaaccuguuaaa

SEQ ID NO: 293404 - RNA, 19 nt, Human
uacucagcgaccgccgacc

SEQ ID NO: 293405 - RNA, 18 nt, Human
uacugugucuuucauaca

SEQ ID NO: 293406 - RNA, 23 nt, Human
uagaauuucaaagcauucugcaa

SEQ ID NO: 293407 - RNA, 24 nt, Human
uagaauuucaaagcauucugcaac

SEQ ID NO: 293408 - RNA, 26 nt, Human
uagcacaccaagacaagucacagaau

SEQ ID NO: 293409 - RNA, 20 nt, Human
uaguagauugaaaaaucugc

SEQ ID NO: 293410 - RNA, 23 nt, Human
uauuugucuuuguuuucuugccu

SEQ ID NO: 293411 - RNA, 22 nt, Human
uccacuuuuucacagguguaca

SEQ ID NO: 293412 - RNA, 28 nt, Human
ucuuuugugguuaucgucaucuuuuaau

SEQ ID NO: 293413 - RNA, 22 nt, Human
ugaaacaacaaacagcgaaagg

SEQ ID NO: 293414 - RNA, 21 nt, Human
ugacccaggaccaugcuccgg

SEQ ID NO: 293415 - RNA, 23 nt, Human
ugcaauccugcagagcugaaguu

SEQ ID NO: 293416 - RNA, 22 nt, Human
ugcauugcaauaguuuaaguaa

SEQ ID NO: 293417 - RNA, 22 nt, Human
ugcuuauaaaauauuuugguau

SEQ ID NO: 293418 - RNA, 21 nt, Human
uggcacaggaagugcuaagaa

SEQ ID NO: 293419 - RNA, 22 nt, Human
uggcuggaccauaaauaaaauu

SEQ ID NO: 293420 - RNA, 20 nt, Human
uggcuugcagguaugaugca

SEQ ID NO: 293421 - RNA, 23 nt, Human
uguacagauacauuauaauuauc

SEQ ID NO: 293422 - RNA, 22 nt, Human
uuaaaaaaacacuacuccacuu

SEQ ID NO: 293423 - RNA, 19 nt, Human
uuaaaacacugaacuguug

SEQ ID NO: 293424 - RNA, 19 nt, Human
uuaacaaugguuaaaaaaa

SEQ ID NO: 293425 - RNA, 21 nt, Human
uucaaaaugaauccacaugac

SEQ ID NO: 293426 - RNA, 19 nt, Human
uucaauugaugaaauguug

SEQ ID NO: 293427 - RNA, 22 nt, Human
uucacauacacaagcacagagu

SEQ ID NO: 293428 - RNA, 21 nt, Human
uucgcaaauguaaaaagugcu

SEQ ID NO: 293429 - RNA, 22 nt, Human
uuuauuuaguaauacaugcaag

SEQ ID NO: 293430 - RNA, 20 nt, Human
uuuuagaccuuuaugucaua

SEQ ID NO: 293431 - RNA, 22 nt, Human
uuuucauaaacauugugugcaa

SEQ ID NO: 293432 - RNA, 25 nt, Human
aaaaggaaaacuaaaccaaagagaa

SEQ ID NO: 293433 - RNA, 23 nt, Human
aaacucccaagcugcucaaucuc

SEQ ID NO: 293434 - RNA, 22 nt, Human
aacuguuggcuugcagguauga

SEQ ID NO: 293435 - RNA, 26 nt, Human
aagcuaaaaguagacaagagggaccc

SEQ ID NO: 293436 - RNA, 23 nt, Human
aagcugcucaaucucaaaacuuu

SEQ ID NO: 293437 - RNA, 19 nt, Human
aauccugcagagcugaagu

SEQ ID NO: 293438 - RNA, 30 nt, Human; identical to SEQ ID NO: 291891

SEQ ID NO: 293439 - RNA, 24 nt, Human
acauguguugguaacaaguuuuac

SEQ ID NO: 293440 - RNA, 21 nt, Human
accaccauuuucauuuauuag

SEQ ID NO: 293441 - RNA, 24 nt, Human
acccgcgguagccacacauaccca

SEQ ID NO: 293442 - RNA, 21 nt, Human
acuaaaccaaagagaaggugu

SEQ ID NO: 293443 - RNA, 19 nt, Human
agaaaggaaacuugggucu

SEQ ID NO: 293444 - RNA, 22 nt, Human
agacaggauccccggagcacag

SEQ ID NO: 293445 - RNA, 19 nt, Human
agagagagagagaaagaga

SEQ ID NO: 293446 - RNA, 19 nt, Human
agaggguggcugccaccuc

SEQ ID NO: 293447 - RNA, 21 nt, Human
agccaauaucuggcacucgca

SEQ ID NO: 293448 - RNA, 23 nt, Human
agccagaguggagagaaagaguu

SEQ ID NO: 293449 - RNA, 18 nt, Human
agcuuuuacgacaaaacc

SEQ ID NO: 293450 - RNA, 19 nt, Human
aggagaaaggaaacuuggg

SEQ ID NO: 293451 - RNA, 23 nt, Human
aguuacacacccuucaaaauaug

SEQ ID NO: 293452 - RNA, 21 nt, Human
auaaaucuaugaaacaacaaa

SEQ ID NO: 293453 - RNA, 21 nt, Human
auaccauuagaauuucaaagc

SEQ ID NO: 293454 - RNA, 21 nt, Human
augcaagaggcagccccagag

SEQ ID NO: 293455 - RNA, 20 nt, Human
caaaaggaaauauaauggaa

SEQ ID NO: 293456 - RNA, 22 nt, Human
caacaauaaagcuuaaaguuca

SEQ ID NO: 293457 - RNA, 23 nt, Human
caacagacuuuagggucuccuaa

SEQ ID NO: 293458 - RNA, 21 nt, Human
cacagaauuaguagauugaaa

SEQ ID NO: 293459 - RNA, 18 nt, Human
cacuguaugagaaaacaa

SEQ ID NO: 293460 - RNA, 24 nt, Human
cagauaccauuagaauuucaaagc

SEQ ID NO: 293461 - RNA, 22 nt, Human
caggauccccggagcacagggc

SEQ ID NO: 293462 - RNA, 22 nt, Human
cauagcauacagcauacauaug

SEQ ID NO: 293463 - RNA, 18 nt, Human
caugcaagaggcagcccc

SEQ ID NO: 293464 - RNA, 22 nt, Human
ccaguggccacaaacucccaag

SEQ ID NO: 293465 - RNA, 23 nt, Human
cccaagcugcucaaucucaaaac

SEQ ID NO: 293466 - RNA, 21 nt, Human
ccccaugcaauccugcagagc

SEQ ID NO: 293467 - RNA, 21 nt, Human
ccccaugcaauccugcagagc

SEQ ID NO: 293468 - RNA, 19 nt, Human
cccuucaaaauaugggaga

SEQ ID NO: 293469 - RNA, 20 nt, Human
ccgcgguagccacacauacc

SEQ ID NO: 293470 - RNA, 19 nt, Human
cuaaaaguagacaagacag

SEQ ID NO: 293471 - RNA, 25 nt, Human
cuagcacaccaagacaagucacaga

SEQ ID NO: 293472 - RNA, 23 nt, Human
cuaugaaacaacaaacagcgaaa

SEQ ID NO: 293473 - RNA, 18 nt, Human
cucccaagcugcucaauc

SEQ ID NO: 293474 - RNA, 18 nt, Human
cugcagagcugaaguuac

SEQ ID NO: 293475 - RNA, 21 nt, Human
cuggaccauaaauaaaauucc

SEQ ID NO: 293476 - RNA, 18 nt, Human
cuuauuuaaggugacagc

SEQ ID NO: 293477 - RNA, 20 nt, Human
gaccugaaagaguaaagcug

SEQ ID NO: 293478 - RNA, 20 nt, Human
gagagagagagagaaagaga

SEQ ID NO: 293479 - RNA, 20 nt, Human
gccacaaacucccaagcugc

SEQ ID NO: 293480 - RNA, 20 nt, Human
gcuucuguuucccagggugg

SEQ ID NO: 293481 - RNA, 21 nt, Human
gggcugggaagccucuccuuu

SEQ ID NO: 293482 - RNA, 18 nt, Human
uaacagacuccuaccucu

SEQ ID NO: 293483 - RNA, 20 nt, Human
uaacaucauagguguuagua

SEQ ID NO: 293484 - RNA, 21 nt, Human
uaauaaauuagcccgauucuc

SEQ ID NO: 293485 - RNA, 21 nt, Human
uaauggaauuacauucaacaa

SEQ ID NO: 293486 - RNA, 27 nt, Human
uaauuaucaucauuaauaaauuagccc

SEQ ID NO: 293487 - RNA, 19 nt, Human
uacacaaaagcugauuaac

SEQ ID NO: 293488 - RNA, 23 nt, Human
uaccaauagcaccaauucaaaau

SEQ ID NO: 293489 - RNA, 21 nt, Human
uaccauuagaauuucaaagca

SEQ ID NO: 293490 - RNA, 25 nt, Human
uaccccaugcaauccugcagagcug

SEQ ID NO: 293491 - RNA, 19 nt, Human
uacgacaaaaccuguuaaa

SEQ ID NO: 293492 - RNA, 18 nt, Human
uacugugucuuucauaca

SEQ ID NO: 293493 - RNA, 23 nt, Human
uagaauuucaaagcauucugcaa

SEQ ID NO: 293494 - RNA, 24 nt, Human
uagaauuucaaagcauucugcaac

SEQ ID NO: 293495 - RNA, 26 nt, Human
uagcacaccaagacaagucacagaau

SEQ ID NO: 293496 - RNA, 20 nt, Human
uaguagauugaaaaaucugc

SEQ ID NO: 293497 - RNA, 23 nt, Human
uauuugucuuuguuuucuugccu

SEQ ID NO: 293498 - RNA, 22 nt, Human
uccacuuuuucacagguguaca

SEQ ID NO: 293499 - RNA, 22 nt, Human
ugaaacaacaaacagcgaaagg

SEQ ID NO: 293500 - RNA, 23 nt, Human
ugcaauccugcagagcugaaguu

SEQ ID NO: 293501 - RNA, 22 nt, Human
uggcuggaccauaaauaaaauu

SEQ ID NO: 293502 - RNA, 20 nt, Human
uggcuugcagguaugaugca

SEQ ID NO: 293503 - RNA, 23 nt, Human
uguacagauacauuauaauuauc

SEQ ID NO: 293504 - RNA, 22 nt, Human
uuaaaaaaacacuacuccacuu

SEQ ID NO: 293505 - RNA, 19 nt, Human
uuaaaacacugaacuguug

SEQ ID NO: 293506 - RNA, 19 nt, Human
uuaacaaugguuaaaaaaa

SEQ ID NO: 293507 - RNA, 21 nt, Human
uucaaaaugaauccacaugac

SEQ ID NO: 293508 - RNA, 22 nt, Human
uucacauacacaagcacagagu

SEQ ID NO: 293509 - RNA, 21 nt, Human
uucgcaaauguaaaaagugcu

SEQ ID NO: 293510 - RNA, 18 nt, Human
uuguauucauauuucucu

SEQ ID NO: 293511 - RNA, 22 nt, Human
uuuauuuaguaauacaugcaag

SEQ ID NO: 293512 - RNA, 22 nt, Human
uuuucauaaacauugugugcaa

SEQ ID NO: 293513 - RNA, 23 nt, Human
ucagagccaacuguugcggauau

SEQ ID NO: 293514 - RNA, 22 nt, Human
ucugcaaucagagccaacuguu

SEQ ID NO: 293515 - RNA, 24 nt, Human
ucugcaaucagagccaacuguugc

SEQ ID NO: 293516 - RNA, 24 nt, Human
aaaaaaaaaaaaaauuuagccgag

SEQ ID NO: 293517 - RNA, 21 nt, Human
aaaaaaaagaaaagaaaagaa

SEQ ID NO: 293518 - RNA, 20 nt, Human
aaaaaaggccgggcgcagug

SEQ ID NO: 293519 - RNA, 18 nt, Human
aaaagaaaaaaaaaaggc

SEQ ID NO: 293520 - RNA, 24 nt, Human
aaaggccgggcgcaguggcucaca

SEQ ID NO: 293521 - RNA, 24 nt, Human
aaauauggugacgauccgucucua

SEQ ID NO: 293522 - RNA, 20 nt, Human
aacguggugaaaccccgucu

SEQ ID NO: 293523 - RNA, 21 nt, Human
aacguggugaaaccccgucuc

SEQ ID NO: 293524 - RNA, 18 nt, Human
aagaaauauggugacgau

SEQ ID NO: 293525 - RNA, 20 nt, Human
aagacuaaauaauauugaua

SEQ ID NO: 293526 - RNA, 18 nt, Human
aauugcuugaacccgaga

SEQ ID NO: 293527 - RNA, 24 nt, Human
aauugcuugaacccgagaggcgga

SEQ ID NO: 293528 - RNA, 24 nt, Human
acagaaugagacucggucucaaaa

SEQ ID NO: 293529 - RNA, 19 nt, Human
agaaaagaaaaaaaaaagg

SEQ ID NO: 293530 - RNA, 19 nt, Human
agaaguuaaaggccagccu

SEQ ID NO: 293531 - RNA, 18 nt, Human
agagguugcagugagcug

SEQ ID NO: 293532 - RNA, 22 nt, Human
agagguugcagugagcugagau

SEQ ID NO: 293533 - RNA, 23 nt, Human
agagguugcagugagcugagauc

SEQ ID NO: 293534 - RNA, 20 nt, Human
agagguugcagugagcuggc

SEQ ID NO: 293535 - RNA, 22 nt, Human
agcacuuugggaggcugagggg

SEQ ID NO: 293536 - RNA, 24 nt, Human
agccagggcgacagaaugagacuc

SEQ ID NO: 293537 - RNA, 23 nt, Human
agccgagcgugguggugggcgcc

SEQ ID NO: 293538 - RNA, 23 nt, Human
agccgggcaugguggcgcacgcc

SEQ ID NO: 293539 - RNA, 23 nt, Human
agcgugguggugggcgccuguaa

SEQ ID NO: 293540 - RNA, 23 nt, Human
agcuacuuggaggcggagguggg

SEQ ID NO: 293541 - RNA, 20 nt, Human
aggcagagguugcagugagc

SEQ ID NO: 293542 - RNA, 24 nt, Human
aggcagagguugcagugagcugag

SEQ ID NO: 293543 - RNA, 24 nt, Human
aggccuggccgccuguaaucccag

SEQ ID NO: 293544 - RNA, 20 nt, Human
aggcggagggugcagugagc

SEQ ID NO: 293545 - RNA, 24 nt, Human
aggcggagggugcagugagcugag

SEQ ID NO: 293546 - RNA, 18 nt, Human
aggcugaggggagugcau

SEQ ID NO: 293547 - RNA, 23 nt, Human
aggcugaggggagugcaucucuu

SEQ ID NO: 293548 - RNA, 24 nt, Human
aggcugaugcaggagaauugcuug

SEQ ID NO: 293549 - RNA, 20 nt, Human
agucugggugacuaagacuc

SEQ ID NO: 293550 - RNA, 21 nt, Human
agugcaucucuugagcucaga

SEQ ID NO: 293551 - RNA, 24 nt, Human
aguggcucacaccgguaaucacag

SEQ ID NO: 293552 - RNA, 20 nt, Human
aucacaccauugcacuccag

SEQ ID NO: 293553 - RNA, 18 nt, Human
augcaggagaauugcuug

SEQ ID NO: 293554 - RNA, 24 nt, Human
augcaggagaauugcuugaacccg

SEQ ID NO: 293555 - RNA, 24 nt, Human
auugcacuccagccagggcgacag

SEQ ID NO: 293556 - RNA, 24 nt, Human
caacguggugaaaccccgucucua

SEQ ID NO: 293557 - RNA, 24 nt, Human
cacaccgguaaucacagcacuuug

SEQ ID NO: 293558 - RNA, 26 nt, Human
caccauugcacuccagccagggcgac

SEQ ID NO: 293559 - RNA, 23 nt, Human
cacgccuguagucccagcuacuu

SEQ ID NO: 293560 - RNA, 22 nt, Human
cagcacuuugggaggccguggc

SEQ ID NO: 293561 - RNA, 24 nt, Human
cagcacuuugggaggccguggcgg

SEQ ID NO: 293562 - RNA, 22 nt, Human
cagcacuuugggaggcugaggg

SEQ ID NO: 293563 - RNA, 20 nt, Human
cagugagcugagauccugcc

SEQ ID NO: 293564 - RNA, 18 nt, Human
cauugcacuccagccagg

SEQ ID NO: 293565 - RNA, 19 nt, Human
cauugcacuccagccaggg

SEQ ID NO: 293566 - RNA, 21 nt, Human
cauugcacuccagccagggcg

SEQ ID NO: 293567 - RNA, 24 nt, Human
cauugcacuccagccagggcgaca

SEQ ID NO: 293568 - RNA, 24 nt, Human
ccacugaccucuagucugggugac

SEQ ID NO: 293569 - RNA, 19 nt, Human
ccauugcacuccagccagg

SEQ ID NO: 293570 - RNA, 20 nt, Human
ccauugcacuccagccaggg

SEQ ID NO: 293571 - RNA, 21 nt, Human
ccauugcacuccagccagggc

SEQ ID NO: 293572 - RNA, 23 nt, Human
ccauugcacuccagccagggcga

SEQ ID NO: 293573 - RNA, 24 nt, Human
ccauugcacuccagccagggcgac

SEQ ID NO: 293574 - RNA, 25 nt, Human
ccauugcacuccagccagggcgaca

SEQ ID NO: 293575 - RNA, 23 nt, Human
cccggccaacguggugaaacccc

SEQ ID NO: 293576 - RNA, 24 nt, Human
cccggccaacguggugaaaccccg

SEQ ID NO: 293577 - RNA, 24 nt, Human
ccgguaaucacagcacuuugggag

SEQ ID NO: 293578 - RNA, 24 nt, Human
ccgucucuacuaaagauaaaaaaa

SEQ ID NO: 293579 - RNA, 20 nt, Human
ccuguaaucccagcacuuug

SEQ ID NO: 293580 - RNA, 22 nt, Human
ccuguaaucccagcacuuuggg

SEQ ID NO: 293581 - RNA, 22 nt, Human
ccuguaaugccagcuacucggg

SEQ ID NO: 293582 - RNA, 21 nt, Human
ccuguagucccagcuacuugg

SEQ ID NO: 293583 - RNA, 20 nt, Human
cgccuguaaucccagcacuu

SEQ ID NO: 293584 - RNA, 23 nt, Human
cgccuguaaugccagcuacucgg

SEQ ID NO: 293585 - RNA, 23 nt, Human
cgccuguagucccagcuacuugg

SEQ ID NO: 293586 - RNA, 19 nt, Human
cggaggugggcuggucucu

SEQ ID NO: 293587 - RNA, 24 nt, Human
cggccaacguggugaaaccccguc

SEQ ID NO: 293588 - RNA, 22 nt, Human
cggguggaacaugaggucaaga

SEQ ID NO: 293589 - RNA, 20 nt, Human
cggucucaaaaaaaaaaaaa

SEQ ID NO: 293590 - RNA, 22 nt, Human
cuaaagauaaaaaaaaaaaaaa

SEQ ID NO: 293591 - RNA, 18 nt, Human
cucaaaaaaaaaaaaaaa

SEQ ID NO: 293592 - RNA, 24 nt, Human
cucggucucaaaaaaaaaaaaaaa

SEQ ID NO: 293593 - RNA, 20 nt, Human
cucuacaaaaaauacaagaa

SEQ ID NO: 293594 - RNA, 21 nt, Human
cugaccucuagucugggugac

SEQ ID NO: 293595 - RNA, 21 nt, Human
gaacccgagaggcggagggug

SEQ ID NO: 293596 - RNA, 24 nt, Human
gagaaaagaaaaaauuaaaaauac

SEQ ID NO: 293597 - RNA, 23 nt, Human
gagaucacaccauugcacuccag

SEQ ID NO: 293598 - RNA, 22 nt, Human
gagggugcagugagcugagauc

SEQ ID NO: 293599 - RNA, 18 nt, Human
gauaugcaauacuugaaa

SEQ ID NO: 293600 - RNA, 24 nt, Human
gaugcaggagaauugcuugaaccc

SEQ ID NO: 293601 - RNA, 22 nt, Human
gcaggagaauugcuugaacccg

SEQ ID NO: 293602 - RNA, 24 nt, Human
gccaacguggugaaaccccgucuc

SEQ ID NO: 293603 - RNA, 24 nt, Human
gcccaggaggcagagguugcagug

SEQ ID NO: 293604 - RNA, 23 nt, Human
gcccggccaacguggugaaaccc

SEQ ID NO: 293605 - RNA, 23 nt, Human
gccuguaaugccagcuacucggg

SEQ ID NO: 293606 - RNA, 19 nt, Human
gccuguagucccagcuacu

SEQ ID NO: 293607 - RNA, 22 nt, Human
ggaggcagagguugcagugagc

SEQ ID NO: 293608 - RNA, 18 nt, Human
ggagggugcagugagcug

SEQ ID NO: 293609 - RNA, 23 nt, Human
ggagggugcagugagcugagauc

SEQ ID NO: 293610 - RNA, 24 nt, Human
ggagggugcagugagcugagauca

SEQ ID NO: 293611 - RNA, 18 nt, Human
ggcgcaguggcucacacc

SEQ ID NO: 293612 - RNA, 21 nt, Human
ggcggguggaacaugagguca

SEQ ID NO: 293613 - RNA, 24 nt, Human
gggcaugguggcgcacgccuguag

SEQ ID NO: 293614 - RNA, 23 nt, Human
ggggagaaaagaaaaaauuaaaa

SEQ ID NO: 293615 - RNA, 23 nt, Human
gguggaacaugaggucaagaguu

SEQ ID NO: 293616 - RNA, 24 nt, Human
gguggcgcacgccuguagucccag

SEQ ID NO: 293617 - RNA, 20 nt, Human
gugcagugagcugagaucac

SEQ ID NO: 293618 - RNA, 24 nt, Human
guugcagugagcugagauccugcc

SEQ ID NO: 293619 - RNA, 22 nt, Human
uaaaaaaguacaugcaaaugua

SEQ ID NO: 293620 - RNA, 24 nt, Human
uaauauaaaaaggauuuacaaugu

SEQ ID NO: 293621 - RNA, 19 nt, Human
uacaaaaaauacaagaagu

SEQ ID NO: 293622 - RNA, 21 nt, Human
uacauaaaacuaaaaaaguac

SEQ ID NO: 293623 - RNA, 18 nt, Human
uacuuggaggcggaggug

SEQ ID NO: 293624 - RNA, 18 nt, Human
uaucaaaaaaaagaaaag

SEQ ID NO: 293625 - RNA, 20 nt, Human
uaucaaaaaaaagaaaagaa

SEQ ID NO: 293626 - RNA, 23 nt, Human
ucgggaggcugaugcaggagaau

SEQ ID NO: 293627 - RNA, 21 nt, Human
ucggucucaaaaaaaaaaaaa

SEQ ID NO: 293628 - RNA, 24 nt, Human
ucggucucaaaaaaaaaaaaaaaa

SEQ ID NO: 293629 - RNA, 22 nt, Human
ucugggugacuaagacucugua

SEQ ID NO: 293630 - RNA, 23 nt, Human
ugagcucagaaguuaaaggccag

SEQ ID NO: 293631 - RNA, 25 nt, Human
ugaggucaagaguuuaaaaccugcc

SEQ ID NO: 293632 - RNA, 24 nt, Human
ugaugcaggagaauugcuugaacc

SEQ ID NO: 293633 - RNA, 19 nt, Human
ugcaauacuugaaaauuga

SEQ ID NO: 293634 - RNA, 22 nt, Human
ugcacuccagccagggcgacag

SEQ ID NO: 293635 - RNA, 18 nt, Human
ugcagugagcugagauca

SEQ ID NO: 293636 - RNA, 22 nt, Human
uggaacaugaggucaagaguuu

SEQ ID NO: 293637 - RNA, 21 nt, Human
uggccgccuguaaucccagca

SEQ ID NO: 293638 - RNA, 21 nt, Human
uggcgcacgccuguaguccca

SEQ ID NO: 293639 - RNA, 19 nt, Human
ugggaggcugaggggagug

SEQ ID NO: 293640 - RNA, 24 nt, Human
ugguggcgcacgccuguaguccca

SEQ ID NO: 293641 - RNA, 21 nt, Human
uguuacuuaauauaaaaagga

SEQ ID NO: 293642 - RNA, 24 nt, Human
uuagccgagcgugguggugggcgc

SEQ ID NO: 293643 - RNA, 19 nt, Human
uugcagugagcugagaucc

SEQ ID NO: 293644 - RNA, 21 nt, Human
uugcagugagcugagauccug

SEQ ID NO: 293645 - RNA, 22 nt, Human
uugcagugagcugagauccugc

SEQ ID NO: 293646 - RNA, 24 nt, Human
uugcuugaacccgagaggcggagg

SEQ ID NO: 293647 - RNA, 26 nt, Human
uugggggagaaaagaaaaaauuaaaa

SEQ ID NO: 293648 - RNA, 25 nt, Human
aaaaacaguauggaaugggagccgg

SEQ ID NO: 293649 - RNA, 22 nt, Human
aaauaaagauugaacaguagua

SEQ ID NO: 293650 - RNA, 21 nt, Human
aaugacaaaaacaguauggaa

SEQ ID NO: 293651 - RNA, 18 nt, Human
acaggcaccucacgauaa

SEQ ID NO: 293652 - RNA, 24 nt, Human
acuugaagaguauguauuugaagu

SEQ ID NO: 293653 - RNA, 18 nt, Human
auaauagcugaaaauuua

SEQ ID NO: 293654 - RNA, 23 nt, Human
caaaaauacuacuuuacaggcac

SEQ ID NO: 293655 - RNA, 24 nt, Human
caccucacgauaaguuccuaauua

SEQ ID NO: 293656 - RNA, 22 nt, Human
caggcaccucacgauaaguucc

SEQ ID NO: 293657 - RNA, 25 nt, Human
cuacuuuacaggcaccucacgauaa

SEQ ID NO: 293658 - RNA, 22 nt, Human
gaacagcauucuaaucaacuca

SEQ ID NO: 293659 - RNA, 22 nt, Human
uaaaaagguacacuacaaucua

SEQ ID NO: 293660 - RNA, 20 nt, Human
uaaaauaucucaaacaagag

SEQ ID NO: 293661 - RNA, 21 nt, Human
uaaauguauucauaaacacag

SEQ ID NO: 293662 - RNA, 22 nt, Human
uaguguaugauucauaaaacaa

SEQ ID NO: 293663 - RNA, 24 nt, Human
uccaaugacaaaaacaggguaccc

SEQ ID NO: 293664 - RNA, 23 nt, Human
ucucuuuaguuaggcagaaacug

SEQ ID NO: 293665 - RNA, 22 nt, Human
ugaacaguaguaugaauacgau

SEQ ID NO: 293666 - RNA, 21 nt, Human
ugaacuuacugaaucucuaag

SEQ ID NO: 293667 - RNA, 20 nt, Human
ugaagaguauguauuugaag

SEQ ID NO: 293668 - RNA, 20 nt, Human
uguaaagaaauuuauuucuu

SEQ ID NO: 293669 - RNA, 19 nt, Human
ugucacauauguuucuucu

SEQ ID NO: 293670 - RNA, 19 nt, Human
uuaguggaccuuagugaac

SEQ ID NO: 293671 - RNA, 24 nt, Human
uuuacccagaaaagcaagauuacu

SEQ ID NO: 293672 - RNA, 23 nt, Human
aaaaagagaaucaaaugaagaaa

SEQ ID NO: 293673 - RNA, 18 nt, Human
aaagaaugaauugucacc

SEQ ID NO: 293674 - RNA, 26 nt, Human
aaaugcuggaaaauuggaaucacuuc

SEQ ID NO: 293675 - RNA, 22 nt, Human
aagacuaaaaaaagagaaucaa

SEQ ID NO: 293676 - RNA, 18 nt, Human
aagauaggggcaugaaaa

SEQ ID NO: 293677 - RNA, 24 nt, Human
aagauaggggcaugaaaaaaaugu

SEQ ID NO: 293678 - RNA, 29 nt, Human
aagcaaaaagcauauuuaaaggggacccc

SEQ ID NO: 293679 - RNA, 19 nt, Human
aagcuccccguggacuucc

SEQ ID NO: 293680 - RNA, 23 nt, Human
acuuuaaaacaaagggagaaaga

SEQ ID NO: 293681 - RNA, 18 nt, Human
caccuuuuaagaaccagg

SEQ ID NO: 293682 - RNA, 19 nt, Human
cacuuuaaaacaaagggag

SEQ ID NO: 293683 - RNA, 21 nt, Human
cagcuaaagauaggggcaugg

SEQ ID NO: 293684 - RNA, 23 nt, Human
caugaaaaaaaugugauuuggua

SEQ ID NO: 293685 - RNA, 19 nt, Human
ccaagcuccccguggaccg

SEQ ID NO: 293686 - RNA, 26 nt, Human
cccagccguccucccuuuggcaucca

SEQ ID NO: 293687 - RNA, 21 nt, Human
ccucagaaauaugccagugag

SEQ ID NO: 293688 - RNA, 18 nt, Human
ccugcacaauccucucca

SEQ ID NO: 293689 - RNA, 21 nt, Human
ccugggaggacgguucugugg

SEQ ID NO: 293690 - RNA, 20 nt, Human
cuaaaaaaagagaaucaaau

SEQ ID NO: 293691 - RNA, 22 nt, Human
cucuccagaggacccagccguc

SEQ ID NO: 293692 - RNA, 22 nt, Human
gaaucacuuccaaauugcucua

SEQ ID NO: 293693 - RNA, 22 nt, Human
gcacaauccucuccaggaugaa

SEQ ID NO: 293694 - RNA, 18 nt, Human
gccagugaguaguccucu

SEQ ID NO: 293695 - RNA, 19 nt, Human
gccagugaguaguccucuc

SEQ ID NO: 293696 - RNA, 19 nt, Human
gggcaugaaaaaaauguga

SEQ ID NO: 293697 - RNA, 23 nt, Human
gggcaugaaaaaaaugugauuug

SEQ ID NO: 293698 - RNA, 18 nt, Human
gugaaguucagcuaaaga

SEQ ID NO: 293699 - RNA, 23 nt, Human
guugcaguaaaaaaaguuugaaa

SEQ ID NO: 293700 - RNA, 21 nt, Human
uaaaacaaagggagaaagaac

SEQ ID NO: 293701 - RNA, 23 nt, Human
uaaacauuggcauggaaaugcca

SEQ ID NO: 293702 - RNA, 24 nt, Human
uaacacacaacuccaauuuaugcu

SEQ ID NO: 293703 - RNA, 19 nt, Human
uaagacuaaaaaaagagaa

SEQ ID NO: 293704 - RNA, 22 nt, Human
uacaauauuacauacacacaaa

SEQ ID NO: 293705 - RNA, 23 nt, Human
uacaggcaaaaauuuuuacacau

SEQ ID NO: 293706 - RNA, 21 nt, Human
ucaccuuuuaagaaccaggaa

SEQ ID NO: 293707 - RNA, 22 nt, Human
uccaggaugaaugaggaaagga

SEQ ID NO: 293708 - RNA, 25 nt, Human
uccguacaauauuacauacacacag

SEQ ID NO: 293709 - RNA, 27 nt, Human
ucuacagauaccucagaaauaugccag

SEQ ID NO: 293710 - RNA, 21 nt, Human
ucuugcuggauucagcuuccu

SEQ ID NO: 293711 - RNA, 25 nt, Human
ugaguaguccucuccagaggaccca

SEQ ID NO: 293712 - RNA, 23 nt, Human
ugcaguaaaaaaaguuugaaaaa

SEQ ID NO: 293713 - RNA, 21 nt, Human
ugggcacaggcaucugcauuc

SEQ ID NO: 293714 - RNA, 19 nt, Human
ugguauugcucuuuaggga

SEQ ID NO: 293715 - RNA, 20 nt, Human
uuaaagaaugaauugucacc

SEQ ID NO: 293716 - RNA, 22 nt, Human
uucaacuagauugcacuagagc

SEQ ID NO: 293717 - RNA, 21 nt, Human
uucagcuaaagauaggggcau

SEQ ID NO: 293718 - RNA, 23 nt, Human
uuccugggaggacgguucugugg

SEQ ID NO: 293719 - RNA, 22 nt, Human
uugcaguaaaaaaaguuugaaa

SEQ ID NO: 293720 - RNA, 18 nt, Human
uugcuggauucagcuucc

SEQ ID NO: 293721 - RNA, 21 nt, Human
uugcuggauucagcuuccugg

SEQ ID NO: 293722 - RNA, 23 nt, Human
uuugggcacaggcaucugcauuc

SEQ ID NO: 293723 - RNA, 23 nt, Human
aaaaaccagaaaacacagauuac

SEQ ID NO: 293724 - RNA, 24 nt, Human
aaaagauuaugcaaaaaguaccau

SEQ ID NO: 293725 - RNA, 24 nt, Human
aaaaguaccaucagcuugccaaga

SEQ ID NO: 293726 - RNA, 21 nt, Human
agaaaaacaagagcuauaauc

SEQ ID NO: 293727 - RNA, 24 nt, Human
agaaacugugagaaaaacaagagc

SEQ ID NO: 293728 - RNA, 20 nt, Human
aguacaaccaagaauccaca

SEQ ID NO: 293729 - RNA, 21 nt, Human
aguacaaccaagaauccacaa

SEQ ID NO: 293730 - RNA, 24 nt, Human
augcaacuacaguacaaccaagaa

SEQ ID NO: 293731 - RNA, 24 nt, Human
caaaagauuaugcaaaaaguacca

SEQ ID NO: 293732 - RNA, 22 nt, Human
caagaauaaccaaaaauuagac

SEQ ID NO: 293733 - RNA, 21 nt, Human
caauaacuccauuaauauaac

SEQ ID NO: 293734 - RNA, 20 nt, Human
caugcaacuacaguacaacc

SEQ ID NO: 293735 - RNA, 22 nt, Human
ccaaauaaaugaaaaaccagaa

SEQ ID NO: 293736 - RNA, 21 nt, Human
cuacaguacaaccaagaaucc

SEQ ID NO: 293737 - RNA, 22 nt, Human
ucacagcaaaaauagcaauaac

SEQ ID NO: 293738 - RNA, 22 nt, Human
uccacaaaagauuaugcaaaaa

SEQ ID NO: 293739 - RNA, 24 nt, Human
ugaaaaaccagaaaacacagauua

SEQ ID NO: 293740 - RNA, 20 nt, Human
ugccaagaauaaccaaaaau

SEQ ID NO: 293741 - RNA, 23 nt, Human
uggccaaauaaaugaaaaaccag

SEQ ID NO: 293742 - RNA, 20 nt, Human
auuaauuuauucagaaauau

SEQ ID NO: 293743 - RNA, 22 nt, Human
cggaaagcuacagauaccuaca

SEQ ID NO: 293744 - RNA, 21 nt, Human
gacaaaggaaaugaguaacau

SEQ ID NO: 293745 - RNA, 21 nt, Human
gacggucggaaagcuacagau

SEQ ID NO: 293746 - RNA, 20 nt, Human
gucggaaagcuacagauacc

SEQ ID NO: 293747 - RNA, 22 nt, Human
uaaaaaaaacuaaggugaaaag

SEQ ID NO: 293748 - RNA, 23 nt, Human
uaaaaaaaaguagaauucaagau

SEQ ID NO: 293749 - RNA, 21 nt, Human
uaaagacaacaguagaaauuu

SEQ ID NO: 293750 - RNA, 24 nt, Human
aaaaaaagaaagaaaagaaaagaa

SEQ ID NO: 293751 - RNA, 20 nt, Human
aaaagaaauguaacauagga

SEQ ID NO: 293752 - RNA, 20 nt, Human
aaaagacugaagaaagagaa

SEQ ID NO: 293753 - RNA, 26 nt, Human
aaaauaaauaaauaaaacuuuggaug

SEQ ID NO: 293754 - RNA, 21 nt, Human
aaaaugaauaggaaguaaaua

SEQ ID NO: 293755 - RNA, 23 nt, Human
aaacaagcaaaucucaagguugg

SEQ ID NO: 293756 - RNA, 22 nt, Human
aaagaaagaaacuuuaagaaaa

SEQ ID NO: 293757 - RNA, 22 nt, Human
aaagacugaagaaagagaauaa

SEQ ID NO: 293758 - RNA, 23 nt, Human
aaaguacaggacuauaaaucagg

SEQ ID NO: 293759 - RNA, 18 nt, Human
aaaguucauuuguaguau

SEQ ID NO: 293760 - RNA, 19 nt, Human
aacaagacaaucauaagaa

SEQ ID NO: 293761 - RNA, 26 nt, Human
aacauaugugugugugugugugugug

SEQ ID NO: 293762 - RNA, 21 nt, Human
aagaaagaaacuuuaagaaaa

SEQ ID NO: 293763 - RNA, 24 nt, Human
aagcuacuugggaggcugaggugg

SEQ ID NO: 293764 - RNA, 22 nt, Human
aaggguggaauuuuaaucuauu

SEQ ID NO: 293765 - RNA, 21 nt, Human
acaaaagaaauguaacauagg

SEQ ID NO: 293766 - RNA, 26 nt, Human
acccugagaagugugaguugaggggu

SEQ ID NO: 293767 - RNA, 20 nt, Human
acuauguaauacaaaacacu

SEQ ID NO: 293768 - RNA, 18 nt, Human
acugcacuccagccuggg

SEQ ID NO: 293769 - RNA, 24 nt, Human
acugcacuccagccugggugacaa

SEQ ID NO: 293770 - RNA, 25 nt, Human
acugcacuccagccugggugacaag

SEQ ID NO: 293771 - RNA, 19 nt, Human
agaaaagaaaagaaagaaa

SEQ ID NO: 293772 - RNA, 20 nt, Human
agacacugcaaaauugcaau

SEQ ID NO: 293773 - RNA, 23 nt, Human
agagaaaguacaggacuauaaau

SEQ ID NO: 293774 - RNA, 22 nt, Human
agagguugcagugagccaagau

SEQ ID NO: 293775 - RNA, 24 nt, Human
agagguugcagugagccaagauug

SEQ ID NO: 293776 - RNA, 22 nt, Human
agaguaagacccugucucaaaa

SEQ ID NO: 293777 - RNA, 21 nt, Human
agccaagauugugccacugca

SEQ ID NO: 293778 - RNA, 19 nt, Human
agccauuaaaaauauaaca

SEQ ID NO: 293779 - RNA, 20 nt, Human
aggaaaaaaaaaaaaagaaa

SEQ ID NO: 293780 - RNA, 19 nt, Human
aggaaaagggaaacuggaa

SEQ ID NO: 293781 - RNA, 18 nt, Human
aggaaaauagacaaaaga

SEQ ID NO: 293782 - RNA, 23 nt, Human
aggaaaauagacaaaagaaaugu

SEQ ID NO: 293783 - RNA, 22 nt, Human
aggcaaaauacuucuaaaugua

SEQ ID NO: 293784 - RNA, 24 nt, Human
aggcagagguugcagugagccaag

SEQ ID NO: 293785 - RNA, 24 nt, Human
aggcugaggagggaggauggcuug

SEQ ID NO: 293786 - RNA, 24 nt, Human
aggcugagguggaaggauccguug

SEQ ID NO: 293787 - RNA, 18 nt, Human
aggcuuugggaaacgguu

SEQ ID NO: 293788 - RNA, 23 nt, Human
agggaggauggcuugagcccagg

SEQ ID NO: 293789 - RNA, 24 nt, Human
auagaauuuuauucaaaggccuaa

SEQ ID NO: 293790 - RNA, 23 nt, Human
auaucacuuacaauaggaauauu

SEQ ID NO: 293791 - RNA, 22 nt, Human
auggagcucugugauguuguac

SEQ ID NO: 293792 - RNA, 22 nt, Human
augugugugugugugugugugu

SEQ ID NO: 293793 - RNA, 23 nt, Human
auguguguguguguguguguguu

SEQ ID NO: 293794 - RNA, 24 nt, Human
auuggcuuaugccuguaaucccag

SEQ ID NO: 293795 - RNA, 24 nt, Human
auugugccacugcacuccagccug

SEQ ID NO: 293796 - RNA, 23 nt, Human
caaaaucucaucgcugcaaaaga

SEQ ID NO: 293797 - RNA, 22 nt, Human
caagagaaaccuuaccucuuuu

SEQ ID NO: 293798 - RNA, 24 nt, Human
caagauugugccacugcacuccag

SEQ ID NO: 293799 - RNA, 24 nt, Human
caccuauaguccaagcuacuuggg

SEQ ID NO: 293800 - RNA, 20 nt, Human
cacuccagccugggugacaa

SEQ ID NO: 293801 - RNA, 21 nt, Human
cacuccagccugggugacaag

SEQ ID NO: 293802 - RNA, 24 nt, Human
cacuccagccugggugacaagagu

SEQ ID NO: 293803 - RNA, 19 nt, Human
cacugcacuccagccuggg

SEQ ID NO: 293804 - RNA, 19 nt, Human
cacugcacuccagccuggg

SEQ ID NO: 293805 - RNA, 21 nt, Human
cacugcacuccagccugggug

SEQ ID NO: 293806 - RNA, 22 nt, Human
cacugcacuccagccuggguga

SEQ ID NO: 293807 - RNA, 24 nt, Human
cacugcacuccagccugggugaca

SEQ ID NO: 293808 - RNA, 25 nt, Human
cacugcacuccagccugggugacaa

SEQ ID NO: 293809 - RNA, 21 nt, Human
cacuuuuggauuccccccacc

SEQ ID NO: 293810 - RNA, 18 nt, Human
cagaaccaagcagcccaa

SEQ ID NO: 293811 - RNA, 20 nt, Human
cagaagcuucauguaucccc

SEQ ID NO: 293812 - RNA, 20 nt, Human
cagaauuuugggaggcugag

SEQ ID NO: 293813 - RNA, 19 nt, Human
cauaugugugugugugugu

SEQ ID NO: 293814 - RNA, 23 nt, Human
cauaugugugugugugugugugu

SEQ ID NO: 293815 - RNA, 22 nt, Human
cauucccaaacaagcaaaucuc

SEQ ID NO: 293816 - RNA, 20 nt, Human
cauuuucaucucaagagaaa

SEQ ID NO: 293817 - RNA, 20 nt, Human
ccacugcacuccagccuggg

SEQ ID NO: 293818 - RNA, 20 nt, Human
ccacugcacuccagccuggg

SEQ ID NO: 293819 - RNA, 20 nt, Human
ccacugcacuccagccuggg

SEQ ID NO: 293820 - RNA, 21 nt, Human
ccacugcacuccagccugggu

SEQ ID NO: 293821 - RNA, 23 nt, Human
ccacugcacuccagccuggguga

SEQ ID NO: 293822 - RNA, 24 nt, Human
ccacugcacuccagccugggugac

SEQ ID NO: 293823 - RNA, 22 nt, Human
ccaggaggcagagguugcagug

SEQ ID NO: 293824 - RNA, 24 nt, Human
cccaucccacuuauaaacauaugu

SEQ ID NO: 293825 - RNA, 27 nt, Human
cguacccguucucccaucccacuuaua

SEQ ID NO: 293826 - RNA, 22 nt, Human
cuagauaccgccaauguauacu

SEQ ID NO: 293827 - RNA, 26 nt, Human
cucaaaaaggaaaaaaaaaaaaagaa

SEQ ID NO: 293828 - RNA, 23 nt, Human
cugggcaacuuggcaaaaucuca

SEQ ID NO: 293829 - RNA, 19 nt, Human
cuuaaccugcagcgccacc

SEQ ID NO: 293830 - RNA, 21 nt, Human
cuuucugacaccuaacccuga

SEQ ID NO: 293831 - RNA, 21 nt, Human
cuuuugcuuccaggcuuuggg

SEQ ID NO: 293832 - RNA, 18 nt, Human
gaaaggaaaauagacaaa

SEQ ID NO: 293833 - RNA, 26 nt, Human
gagcaaaaaaugaauaggagggaccc

SEQ ID NO: 293834 - RNA, 21 nt, Human
gaggcagagguugcagugagc

SEQ ID NO: 293835 - RNA, 19 nt, Human
gccacugcacuccagccug

SEQ ID NO: 293836 - RNA, 24 nt, Human
gccacugcacuccagccuggguga

SEQ ID NO: 293837 - RNA, 22 nt, Human
gcccaggaguucaagaucagcc

SEQ ID NO: 293838 - RNA, 23 nt, Human
ggcacauuggcuuaugccuguaa

SEQ ID NO: 293839 - RNA, 22 nt, Human
gggaaaauagaacuuuuuuuuu

SEQ ID NO: 293840 - RNA, 20 nt, Human
gggaggcugagguggaagga

SEQ ID NO: 293841 - RNA, 23 nt, Human
guuaaagauuucucauaucacuu

SEQ ID NO: 293842 - RNA, 21 nt, Human
uaaaacuuuggaugggcacau

SEQ ID NO: 293843 - RNA, 22 nt, Human
uaaaguucauuuguaguaucug

SEQ ID NO: 293844 - RNA, 19 nt, Human
uaaauguacugaauagacu

SEQ ID NO: 293845 - RNA, 21 nt, Human
uaaaugucucuuugauaaguu

SEQ ID NO: 293846 - RNA, 23 nt, Human
uaaaugucucuuugauaaguuuu

SEQ ID NO: 293847 - RNA, 22 nt, Human
uaacagggaccucugauuuuuu

SEQ ID NO: 293848 - RNA, 20 nt, Human
uaauucaguaauagaaagaa

SEQ ID NO: 293849 - RNA, 19 nt, Human
uacacacuuagaagcaaaa

SEQ ID NO: 293850 - RNA, 20 nt, Human
uacacacuuagaagcaaaau

SEQ ID NO: 293851 - RNA, 24 nt, Human
uacauauaauaagcaagaaauaca

SEQ ID NO: 293852 - RNA, 22 nt, Human
uagacacugcaaaauugcaauc

SEQ ID NO: 293853 - RNA, 19 nt, Human
uaugccuguaaucccagaa

SEQ ID NO: 293854 - RNA, 24 nt, Human
uaugccuguaaucccagaauuuug

SEQ ID NO: 293855 - RNA, 26 nt, Human
uauggcacguagagaaaguacaggac

SEQ ID NO: 293856 - RNA, 18 nt, Human
uaugugugugugugugug

SEQ ID NO: 293857 - RNA, 23 nt, Human
uaugugugugugugugugugugu

SEQ ID NO: 293858 - RNA, 24 nt, Human
uaugugugugugugugugugugug

SEQ ID NO: 293859 - RNA, 19 nt, Human
uccagccugggugacaaga

SEQ ID NO: 293860 - RNA, 18 nt, Human
uccaggcuuugggaaacg

SEQ ID NO: 293861 - RNA, 19 nt, Human
uccaucucaaaaaaauaaa

SEQ ID NO: 293862 - RNA, 23 nt, Human
uccccccacccuuuuuucauuuc

SEQ ID NO: 293863 - RNA, 19 nt, Human
ucuacuuccuacuuagacu

SEQ ID NO: 293864 - RNA, 23 nt, Human
ugaaaaagacugaagaaagagaa

SEQ ID NO: 293865 - RNA, 22 nt, Human
ugaauagacuauguaauacaaa

SEQ ID NO: 293866 - RNA, 21 nt, Human
ugaaugucuuacaauggcuuc

SEQ ID NO: 293867 - RNA, 30 nt, Human
ugagaaguaacaugaaaaauggagcaaaac

SEQ ID NO: 293868 - RNA, 22 nt, Human
ugagccaagauugugccacugc

SEQ ID NO: 293869 - RNA, 23 nt, Human
ugagcccaggaguucaagaucag

SEQ ID NO: 293870 - RNA, 18 nt, Human
ugaggagggaggauggcu

SEQ ID NO: 293871 - RNA, 21 nt, Human
ugaggagggaggauggcuuga

SEQ ID NO: 293872 - RNA, 24 nt, Human
ugaggagggaggauggcuugagcc

SEQ ID NO: 293873 - RNA, 24 nt, Human
ugagguggaaggauccguugagcc

SEQ ID NO: 293874 - RNA, 24 nt, Human
ugccuguaaucccagaauuuuggg

SEQ ID NO: 293875 - RNA, 25 nt, Human
uggcaaaaucucaucgcugcaaaag

SEQ ID NO: 293876 - RNA, 21 nt, Human
uggcuuaugccuguaauccca

SEQ ID NO: 293877 - RNA, 22 nt, Human
uggcuuaugccuguaaucccag

SEQ ID NO: 293878 - RNA, 23 nt, Human
uggcuugagcccaggaguucaag

SEQ ID NO: 293879 - RNA, 18 nt, Human
ugggaggcugaggaggga

SEQ ID NO: 293880 - RNA, 19 nt, Human
ugggcacauuggcuuaugc

SEQ ID NO: 293881 - RNA, 19 nt, Human
uguguguguguguguaggu

SEQ ID NO: 293882 - RNA, 19 nt, Human
uguguguguguguguguag

SEQ ID NO: 293883 - RNA, 21 nt, Human
uguguguguguguguguaggu

SEQ ID NO: 293884 - RNA, 18 nt, Human
ugugugugugugugugug

SEQ ID NO: 293885 - RNA, 18 nt, Human
ugugugugugugugugug

SEQ ID NO: 293886 - RNA, 18 nt, Human
ugugugugugugugugug

SEQ ID NO: 293887 - RNA, 18 nt, Human
ugugugugugugugugug

SEQ ID NO: 293888 - RNA, 18 nt, Human
ugugugugugugugugug

SEQ ID NO: 293889 - RNA, 18 nt, Human
ugugugugugugugugug

SEQ ID NO: 293890 - RNA, 18 nt, Human
ugugugugugugugugug

SEQ ID NO: 293891 - RNA, 18 nt, Human
ugugugugugugugugug

SEQ ID NO: 293892 - RNA, 18 nt, Human
ugugugugugugugugug

SEQ ID NO: 293893 - RNA, 18 nt, Human
ugugugugugugugugug

SEQ ID NO: 293894 - RNA, 21 nt, Human
ugugugugugugugugugugu

SEQ ID NO: 293895 - RNA, 21 nt, Human
ugugugugugugugugugugu

SEQ ID NO: 293896 - RNA, 21 nt, Human
ugugugugugugugugugugu

SEQ ID NO: 293897 - RNA, 21 nt, Human
ugugugugugugugugugugu

SEQ ID NO: 293898 - RNA, 21 nt, Human
ugugugugugugugugugugu

SEQ ID NO: 293899 - RNA, 21 nt, Human
ugugugugugugugugugugu

SEQ ID NO: 293900 - RNA, 21 nt, Human
ugugugugugugugugugugu

SEQ ID NO: 293901 - RNA, 21 nt, Human
ugugugugugugugugugugu

SEQ ID NO: 293902 - RNA, 21 nt, Human
ugugugugugugugugugugu

SEQ ID NO: 293903 - RNA, 21 nt, Human
ugugugugugugugugugugu

SEQ ID NO: 293904 - RNA, 21 nt, Human
ugugugugugugugugugugu

SEQ ID NO: 293905 - RNA, 21 nt, Human
ugugugugugugugugugugu

SEQ ID NO: 293906 - RNA, 21 nt, Human
ugugugugugugugugugugu

SEQ ID NO: 293907 - RNA, 21 nt, Human
ugugugugugugugugugugu

SEQ ID NO: 293908 - RNA, 22 nt, Human
ugugugugugugugugugugua

SEQ ID NO: 293909 - RNA, 22 nt, Human
ugugugugugugugugugugug

SEQ ID NO: 293910 - RNA, 22 nt, Human
ugugugugugugugugugugug

SEQ ID NO: 293911 - RNA, 22 nt, Human
ugugugugugugugugugugug

SEQ ID NO: 293912 - RNA, 22 nt, Human
ugugugugugugugugugugug

SEQ ID NO: 293913 - RNA, 22 nt, Human
ugugugugugugugugugugug

SEQ ID NO: 293914 - RNA, 22 nt, Human
ugugugugugugugugugugug

SEQ ID NO: 293915 - RNA, 22 nt, Human
ugugugugugugugugugugug

SEQ ID NO: 293916 - RNA, 20 nt, Human
uuaaucaacaagacaaucau

SEQ ID NO: 293917 - RNA, 19 nt, Human
uuaaugcuguugagauuaa

SEQ ID NO: 293918 - RNA, 21 nt, Human
uuaugccuguaaucccagaau

SEQ ID NO: 293919 - RNA, 24 nt, Human
uucacagaagcuucauguaucccc

SEQ ID NO: 293920 - RNA, 23 nt, Human
uuccaggcuuugggaaacgguuu

SEQ ID NO: 293921 - RNA, 22 nt, Human
uugagcccaacaaaaauaccaa

SEQ ID NO: 293922 - RNA, 21 nt, Human
uugagcccaggaguucaagau

SEQ ID NO: 293923 - RNA, 22 nt, Human
uugcagugagccaagauugugc

SEQ ID NO: 293924 - RNA, 22 nt, Human
uugcuggauccuggagcugcgu

SEQ ID NO: 293925 - RNA, 21 nt, Human
uugcuuuauuaaagaauaaau

SEQ ID NO: 293926 - RNA, 23 nt, Human
uugugccacugcacuccagccug

SEQ ID NO: 293927 - RNA, 26 nt, Human
uuuaaggagauaccaauacagggaaa

SEQ ID NO: 293928 - RNA, 18 nt, Human
uuuggauuccccccaccc

SEQ ID NO: 293929 - RNA, 19 nt, Human
uuuguaguaucugucccag

SEQ ID NO: 293930 - RNA, 21 nt, Human
uuuucugaaguaacaugagaa

SEQ ID NO: 293931 - RNA, 26 nt, Human
aacaugcauagaauuggaauaagaug

SEQ ID NO: 293932 - RNA, 19 nt, Human
caaagcaguaaaaaaggac

SEQ ID NO: 293933 - RNA, 22 nt, Human
caguaaaaaaggacuuuccaca

SEQ ID NO: 293934 - RNA, 19 nt, Human
ccuccaaugggcaaagcag

SEQ ID NO: 293935 - RNA, 19 nt, Human
cucucaccaaacgugcucc

SEQ ID NO: 293936 - RNA, 19 nt, Human
ggacaauccuagggcccgg

SEQ ID NO: 293937 - RNA, 25 nt, Human
gguuacuuucuaauaaaaggagaca

SEQ ID NO: 293938 - RNA, 20 nt, Human
uagaauacaaagaaaauuua

SEQ ID NO: 293939 - RNA, 18 nt, Human
ucacguugucgcuaacuc

SEQ ID NO: 293940 - RNA, 20 nt, Human
ugaguggacaauccuagggc

SEQ ID NO: 293941 - RNA, 22 nt, Human
ugaguggacaauccuagggccc

SEQ ID NO: 293942 - RNA, 20 nt, Human
aaaaaaaaggcggaauuaag

SEQ ID NO: 293943 - RNA, 29 nt, Human
aaaaaaaaggcggaauuaagagggacccc

SEQ ID NO: 293944 - RNA, 18 nt, Human
aaaaaaaggcggaauuaa

SEQ ID NO: 293945 - RNA, 20 nt, Human
aaaaaaaggcggaauuaaga

SEQ ID NO: 293946 - RNA, 22 nt, Human
aaaaaagaccucuccaauggac

SEQ ID NO: 293947 - RNA, 23 nt, Human
aaaaaaggacuuuccacagauua

SEQ ID NO: 293948 - RNA, 19 nt, Human
aaaagacagugaauuucuu

SEQ ID NO: 293949 - RNA, 24 nt, Human
aauggacaaagcaguaaaaaagga

SEQ ID NO: 293950 - RNA, 25 nt, Human
agaaaaaaaaaaggcggaauuaaga

SEQ ID NO: 293951 - RNA, 21 nt, Human
agaccaaaaaagaccucucca

SEQ ID NO: 293952 - RNA, 25 nt, Human
auucucgauugaaauacaaaacauu

SEQ ID NO: 293953 - RNA, 19 nt, Human
caaagcaguaaaaaaggac

SEQ ID NO: 293954 - RNA, 18 nt, Human
caaaugucaacacagaaa

SEQ ID NO: 293955 - RNA, 18 nt, Human
cacuuuagauaaaccaaa

SEQ ID NO: 293956 - RNA, 22 nt, Human
cagagccacacaacuacuuucc

SEQ ID NO: 293957 - RNA, 22 nt, Human
caguaaaaaaggacuuuccaca

SEQ ID NO: 293958 - RNA, 20 nt, Human
cagugaauuucuuuuugcuc

SEQ ID NO: 293959 - RNA, 24 nt, Human
cauucagagccacacaacuacuuu

SEQ ID NO: 293960 - RNA, 22 nt, Human
ccagaccaaaaaagaccucucc

SEQ ID NO: 293961 - RNA, 18 nt, Human
cuaagccaucccuggauu

SEQ ID NO: 293962 - RNA, 19 nt, Human
cuuuagauaaaccaaaggg

SEQ ID NO: 293963 - RNA, 21 nt, Human
cuuuuugcuccccauuagaaa

SEQ ID NO: 293964 - RNA, 19 nt, Human
gaacacacuuuagauaaac

SEQ ID NO: 293965 - RNA, 21 nt, Human
ggcauauuauagaacacauua

SEQ ID NO: 293966 - RNA, 21 nt, Human
uaacuaagacgaggcucagua

SEQ ID NO: 293967 - RNA, 19 nt, Human
uacccauauuagucuauau

SEQ ID NO: 293968 - RNA, 22 nt, Human
uaugaauauauucaacaaggga

SEQ ID NO: 293969 - RNA, 22 nt, Human
ucaauauauaaacaaaauguuc

SEQ ID NO: 293970 - RNA, 21 nt, Human
uccaauggacaaagcaguaaa

SEQ ID NO: 293971 - RNA, 19 nt, Human
ucuccaauggacaaagcag

SEQ ID NO: 293972 - RNA, 20 nt, Human
ucuccaauggacaaagcagu

SEQ ID NO: 293973 - RNA, 18 nt, Human
ugaaaccuaagccauccc

SEQ ID NO: 293974 - RNA, 21 nt, Human
ugaguacuauaucccuaaaaa

SEQ ID NO: 293975 - RNA, 23 nt, Human
uggcaagccaggaugaaaggaga

SEQ ID NO: 293976 - RNA, 22 nt, Human
aaaagggacaaauuuagcuuua

SEQ ID NO: 293977 - RNA, 19 nt, Human
aaacaaaauaaucacuaga

SEQ ID NO: 293978 - RNA, 20 nt, Human
aagauggggagaagcuguag

SEQ ID NO: 293979 - RNA, 22 nt, Human
agaauagccaaggugcagaaga

SEQ ID NO: 293980 - RNA, 21 nt, Human
agcaaccaaauaaacaaaaua

SEQ ID NO: 293981 - RNA, 18 nt, Human
aggcauugcagugggaag

SEQ ID NO: 293982 - RNA, 21 nt, Human
aguauagucaaccagaaagga

SEQ ID NO: 293983 - RNA, 23 nt, Human
agucuugauuuuggggagaaauu

SEQ ID NO: 293984 - RNA, 19 nt, Human
aguuaaauacaaaacuuuc

SEQ ID NO: 293985 - RNA, 24 nt, Human
auauagagaaaauccauacucaau

SEQ ID NO: 293986 - RNA, 21 nt, Human
auuucagauucugagauuuuu

SEQ ID NO: 293987 - RNA, 18 nt, Human
caaaauaaucacuagaca

SEQ ID NO: 293988 - RNA, 23 nt, Human
cacauauuaaaguauacuuggau

SEQ ID NO: 293989 - RNA, 24 nt, Human
cagaaaggacaagguaauuauaaa

SEQ ID NO: 293990 - RNA, 18 nt, Human
cagaauagccaaggugca

SEQ ID NO: 293991 - RNA, 21 nt, Human
cuugcaaacauuaaguuacau

SEQ ID NO: 293992 - RNA, 21 nt, Human
gaaaaaccugagaucaacuga

SEQ ID NO: 293993 - RNA, 22 nt, Human
gaaaggacaagguaauuauaaa

SEQ ID NO: 293994 - RNA, 23 nt, Human
ggugcagaagaaauuucgugauu

SEQ ID NO: 293995 - RNA, 24 nt, Human
ggugcagaagaaauuucgugauuc

SEQ ID NO: 293996 - RNA, 22 nt, Human
gugaaaaaccugagaucaacug

SEQ ID NO: 293997 - RNA, 22 nt, Human
gugcagaagaaauuucgugauu

SEQ ID NO: 293998 - RNA, 23 nt, Human
gugcagaagaaauuucgugauuc

SEQ ID NO: 293999 - RNA, 19 nt, Human
guggucacaagaggaaaag

SEQ ID NO: 294000 - RNA, 24 nt, Human
uaacgggcgguucacugaacuaaa

SEQ ID NO: 294001 - RNA, 20 nt, Human
uaagagggcuuagccuagua

SEQ ID NO: 294002 - RNA, 21 nt, Human
uaaguagcaaccaaauaaaca

SEQ ID NO: 294003 - RNA, 24 nt, Human
uaaguagcaaccaaauaaacaaaa

SEQ ID NO: 294004 - RNA, 18 nt, Human
uaagugcaauuaauaaca

SEQ ID NO: 294005 - RNA, 23 nt, Human
uaagugcaauuaauaacaauaaa

SEQ ID NO: 294006 - RNA, 24 nt, Human
uacaugguaaagacaggcacaaca

SEQ ID NO: 294007 - RNA, 18 nt, Human
uacuuggauuucuauuua

SEQ ID NO: 294008 - RNA, 25 nt, Human
uagcaaccaaauaaacaaaauaauc

SEQ ID NO: 294009 - RNA, 26 nt, Human
uauagggaguaaaagguagcacaaaa

SEQ ID NO: 294010 - RNA, 19 nt, Human
uaucagggacaugaguagg

SEQ ID NO: 294011 - RNA, 24 nt, Human
ucagauuuaaacagaauagccaag

SEQ ID NO: 294012 - RNA, 20 nt, Human
uccagucuauacaaggacaa

SEQ ID NO: 294013 - RNA, 21 nt, Human
ugaaaaaccugagaucaacug

SEQ ID NO: 294014 - RNA, 22 nt, Human
ugaaagguuaugacaaauuaua

SEQ ID NO: 294015 - RNA, 18 nt, Human
ugagaucaacugauuauc

SEQ ID NO: 294016 - RNA, 24 nt, Human
ugcagaagaaauuucgugauucuu

SEQ ID NO: 294017 - RNA, 22 nt, Human
uggggagaaauuuagggcuuuc

SEQ ID NO: 294018 - RNA, 18 nt, Human
ugugguggucacaagagg

SEQ ID NO: 294019 - RNA, 23 nt, Human
uuaaucaccaauagaucaaauau

SEQ ID NO: 294020 - RNA, 26 nt, Human
uuacaaugugcuagguaaguagcaac

SEQ ID NO: 294021 - RNA, 23 nt, Human
uugaaauugugguaugaauauuu

SEQ ID NO: 294022 - RNA, 22 nt, Human
aaauaaccgcgaauccgaucuu

SEQ ID NO: 294023 - RNA, 19 nt, Human
aaaugcaaugaaauaaaau

SEQ ID NO: 294024 - RNA, 18 nt, Human
aauccgaucuuucuugac

SEQ ID NO: 294025 - RNA, 25 nt, Human
agaagagaaaaaaaucucaggaaaa

SEQ ID NO: 294026 - RNA, 27 nt, Human
agacaaauccauuaaaaagggaaauaa

SEQ ID NO: 294027 - RNA, 22 nt, Human
caaauccauuaaaaagggaaau

SEQ ID NO: 294028 - RNA, 24 nt, Human
caacaaauaccaacaagaagagaa

SEQ ID NO: 294029 - RNA, 19 nt, Human
caacaagaagagaaaaaaa

SEQ ID NO: 294030 - RNA, 19 nt, Human
caacacuuggacagcauga

SEQ ID NO: 294031 - RNA, 19 nt, Human
cacaacaaauaccaacaag

SEQ ID NO: 294032 - RNA, 22 nt, Human
cacaacaaauaccaacaagaag

SEQ ID NO: 294033 - RNA, 21 nt, Human
cagaaaacaacgcgucaucac

SEQ ID NO: 294034 - RNA, 21 nt, Human
ccacccugaagaucuagccac

SEQ ID NO: 294035 - RNA, 20 nt, Human
gacccgguccagaaggcgca

SEQ ID NO: 294036 - RNA, 22 nt, Human
guucagacccgguccagaaggc

SEQ ID NO: 294037 - RNA, 24 nt, Human
uaaauggcagaaaacaacgcguca

SEQ ID NO: 294038 - RNA, 26 nt, Human
uaacuccguacacaauccacccagau

SEQ ID NO: 294039 - RNA, 21 nt, Human
uacacaauccacccagaugau

SEQ ID NO: 294040 - RNA, 20 nt, Human
ucaaggugaaauuuuugucc

SEQ ID NO: 294041 - RNA, 20 nt, Human
uccacaagaacgaagcccac

SEQ ID NO: 294042 - RNA, 26 nt, Human
uccacaagaacgaagcccacccugaa

SEQ ID NO: 294043 - RNA, 20 nt, Human
uuuaaaauuaauacuugauu

SEQ ID NO: 294044 - RNA, 19 nt, Human
aaacaagaaacagaccaug

SEQ ID NO: 294045 - RNA, 24 nt, Human
agagguaaaauaaacaagaaacag

SEQ ID NO: 294046 - RNA, 23 nt, Human
aguaaagucuauagucacaaaaa

SEQ ID NO: 294047 - RNA, 24 nt, Human
caauagcuagaaauacaauuuuac

SEQ ID NO: 294048 - RNA, 19 nt, Human
cauagcaauagugaaacaa

SEQ ID NO: 294049 - RNA, 25 nt, Human
cauucagcaaauauuuauuaagcac

SEQ ID NO: 294050 - RNA, 21 nt, Human
ccuacauagcaauagugaaac

SEQ ID NO: 294051 - RNA, 21 nt, Human
uaaaagagaucuccaaacaua

SEQ ID NO: 294052 - RNA, 20 nt, Human
uaaggauuuacaauacuuuu

SEQ ID NO: 294053 - RNA, 20 nt, Human
uaaguuaaaagagaucucca

SEQ ID NO: 294054 - RNA, 21 nt, Human
uacuuuuuuuuggggggggga

SEQ ID NO: 294055 - RNA, 23 nt, Human
uguuacacacuguaggaguuacu

SEQ ID NO: 294056 - RNA, 22 nt, Human
aaaacaaacuuucaaaucagga

SEQ ID NO: 294057 - RNA, 22 nt, Human
aaaggagaaggcacagguugcc

SEQ ID NO: 294058 - RNA, 19 nt, Human
aaagucauauguucugaag

SEQ ID NO: 294059 - RNA, 22 nt, Human
aaugacagaaaacaguauggaa

SEQ ID NO: 294060 - RNA, 22 nt, Human
aauggcagcagcggaauccuuu

SEQ ID NO: 294061 - RNA, 21 nt, Human
agaaaaucuacaauaugaaga

SEQ ID NO: 294062 - RNA, 19 nt, Human
agagucagacagaucuggg

SEQ ID NO: 294063 - RNA, 23 nt, Human
auaaaaccauagauaaauaugua

SEQ ID NO: 294064 - RNA, 27 nt, Human
auuccuauuaccacuguuuccuuuccu

SEQ ID NO: 294065 - RNA, 27 nt, Human
caauaugaagaaaauaauuaacuaaug

SEQ ID NO: 294066 - RNA, 21 nt, Human
cagaaaacaguauggaaucgg

SEQ ID NO: 294067 - RNA, 19 nt, Human
cagcaguauaaauaugaua

SEQ ID NO: 294068 - RNA, 20 nt, Human
ccagaaaagcaggacuuuug

SEQ ID NO: 294069 - RNA, 26 nt, Human
ccccaauuccuauuaccacuguuucc

SEQ ID NO: 294070 - RNA, 23 nt, Human
cuaaauauagaaaagauuggaca

SEQ ID NO: 294071 - RNA, 21 nt, Human
cucauuuuaccccaauuccua

SEQ ID NO: 294072 - RNA, 19 nt, Human
cucgcaauaaguuccuaau

SEQ ID NO: 294073 - RNA, 21 nt, Human
cuuacugaaucucuaagacca

SEQ ID NO: 294074 - RNA, 22 nt, Human
gcagcggaauccuuugaaauga

SEQ ID NO: 294075 - RNA, 22 nt, Human
ggaaucggagcagggucacuga

SEQ ID NO: 294076 - RNA, 22 nt, Human
uaaaagcauuuuuuaaaaaugc

SEQ ID NO: 294077 - RNA, 20 nt, Human
uaaaauaucucaaacaagag

SEQ ID NO: 294078 - RNA, 21 nt, Human
uaaauaugauaaaagacuucu

SEQ ID NO: 294079 - RNA, 23 nt, Human
uaagaaaauaaaaccauagauaa

SEQ ID NO: 294080 - RNA, 18 nt, Human
uagacuguauauuaagca

SEQ ID NO: 294081 - RNA, 18 nt, Human
uaucuaaugacagaaaac

SEQ ID NO: 294082 - RNA, 27 nt, Human
ucaagaguacauauuugaaaugaugua

SEQ ID NO: 294083 - RNA, 22 nt, Human
ucagccuccagcggcucucaca

SEQ ID NO: 294084 - RNA, 21 nt, Human
ucaugcuuugugaaggguucu

SEQ ID NO: 294085 - RNA, 20 nt, Human
uccuaaaauaccaugccuca

SEQ ID NO: 294086 - RNA, 23 nt, Human
ucuacagucuaugcuucugagac

SEQ ID NO: 294087 - RNA, 22 nt, Human
ugaaaugagcugaauaauagca

SEQ ID NO: 294088 - RNA, 21 nt, Human
ugaacuuacugaaucucuaag

SEQ ID NO: 294089 - RNA, 18 nt, Human
ugacccagagucagacag

SEQ ID NO: 294090 - RNA, 19 nt, Human
ugacugcagaaaaucuaca

SEQ ID NO: 294091 - RNA, 24 nt, Human
ugauaucuaaugacagaaaacagu

SEQ ID NO: 294092 - RNA, 23 nt, Human
uggacagcaguauaaauaugaua

SEQ ID NO: 294093 - RNA, 18 nt, Human
uggcagcagcggaauccu

SEQ ID NO: 294094 - RNA, 23 nt, Human
uuaaugaucaucuaugauucucu

SEQ ID NO: 294095 - RNA, 19 nt, Human
uugguguauaagaaaauaa

SEQ ID NO: 294096 - RNA, 19 nt, Human
uuuguucauuccuaaaaua

SEQ ID NO: 294097 - RNA, 19 nt, Human
aagcuccccguggacuucc

SEQ ID NO: 294098 - RNA, 18 nt, Human
caguaucugaggcugugg

SEQ ID NO: 294099 - RNA, 19 nt, Human
ccaagcuccccguggaccg

SEQ ID NO: 294100 - RNA, 26 nt, Human
cccagccguccucccuuuggcaucca

SEQ ID NO: 294101 - RNA, 21 nt, Human
ccucagaaauaugccagugag

SEQ ID NO: 294102 - RNA, 21 nt, Human
ccugggaggacgguucugugg

SEQ ID NO: 294103 - RNA, 22 nt, Human
cucuccagaggacccagccguc

SEQ ID NO: 294104 - RNA, 18 nt, Human
gccagugaguaguccucu

SEQ ID NO: 294105 - RNA, 19 nt, Human
gccagugaguaguccucuc

SEQ ID NO: 294106 - RNA, 27 nt, Human
ucuacagauaccucagaaauaugccag

SEQ ID NO: 294107 - RNA, 25 nt, Human
ugaguaguccucuccagaggaccca

SEQ ID NO: 294108 - RNA, 23 nt, Human
uuccugggaggacgguucugugg

SEQ ID NO: 294109 - RNA, 18 nt, Human
uugcugaauucagcuucc

SEQ ID NO: 294110 - RNA, 27 nt, Human
aaaaaaaaaaaaaacaaacaaaccaaa

SEQ ID NO: 294111 - RNA, 20 nt, Human
aaaaaaaacaaacaaaccaa

SEQ ID NO: 294112 - RNA, 22 nt, Human
aaaaaaaacaaacaaaccaaaa

SEQ ID NO: 294113 - RNA, 25 nt, Human
aaaaaaacaaacaaaccaaaaaaca

SEQ ID NO: 294114 - RNA, 20 nt, Human
aaaaaacaaacaaaccaaaa

SEQ ID NO: 294115 - RNA, 21 nt, Human
aaaaauagaagaaauaucaaa

SEQ ID NO: 294116 - RNA, 20 nt, Human
aaaacaaacaaaccaaaaaa

SEQ ID NO: 294117 - RNA, 22 nt, Human
aaaauaagaaaaaguuaacuug

SEQ ID NO: 294118 - RNA, 24 nt, Human
aaacaaacaaacaaacaaaaaaca

SEQ ID NO: 294119 - RNA, 21 nt, Human
aaacaaacaaaccaaaaaaca

SEQ ID NO: 294120 - RNA, 25 nt, Human
aaacaaacaaaccaaaaaacaaaca

SEQ ID NO: 294121 - RNA, 25 nt, Human
aaacaaacaaaccaaaaaacaaaca

SEQ ID NO: 294122 - RNA, 21 nt, Human
aaacaaaccaaaaaacaaaca

SEQ ID NO: 294123 - RNA, 24 nt, Human
aaacaaaccaaaaaacaaacaaac

SEQ ID NO: 294124 - RNA, 22 nt, Human
aaacaguuguaaugaacaagga

SEQ ID NO: 294125 - RNA, 19 nt, Human
aaagaacagaccacacuaa

SEQ ID NO: 294126 - RNA, 20 nt, Human
aaagcacauauuacaugcag

SEQ ID NO: 294127 - RNA, 19 nt, Human
aaagugcugggauuacagg

SEQ ID NO: 294128 - RNA, 24 nt, Human
aaagugcugggauuacaggaauga

SEQ ID NO: 294129 - RNA, 26 nt, Human
aaaugucuuuauuaaguggguucccc

SEQ ID NO: 294130 - RNA, 23 nt, Human
aacaaacaaacaaacaaaaaaca

SEQ ID NO: 294131 - RNA, 25 nt, Human
aacaaacaaaccaaaaaacaaacaa

SEQ ID NO: 294132 - RNA, 27 nt, Human
aacaaaccaaaaaacaaacaaacaaac

SEQ ID NO: 294133 - RNA, 21 nt, Human
aacaagaauauauuaaagaag

SEQ ID NO: 294134 - RNA, 22 nt, Human
aaccaaaaaacaaacaaacaaa

SEQ ID NO: 294135 - RNA, 24 nt, Human
aagaaaaauagaagaaauaucaaa

SEQ ID NO: 294136 - RNA, 18 nt, Human
aagugcugggauuacagg

SEQ ID NO: 294137 - RNA, 26 nt, Human
aagugcugggauuacaggaaugagcc

SEQ ID NO: 294138 - RNA, 18 nt, Human
aaucgcuugaaccuggga

SEQ ID NO: 294139 - RNA, 24 nt, Human
aaucgcuugaaccugggaggcgga

SEQ ID NO: 294140 - RNA, 24 nt, Human
aauuuuguauuuuuaguaaagacg

SEQ ID NO: 294141 - RNA, 24 nt, Human
acagagcgagacuccgucucaaaa

SEQ ID NO: 294142 - RNA, 20 nt, Human
accaaaaaacaaacaaacaa

SEQ ID NO: 294143 - RNA, 26 nt, Human
accuaaggugaucugcccgccuuggc

SEQ ID NO: 294144 - RNA, 24 nt, Human
acgggguuacuuaacguuggucag

SEQ ID NO: 294145 - RNA, 23 nt, Human
acuaaagcccauuuacacacgcu

SEQ ID NO: 294146 - RNA, 18 nt, Human
acucuggaggcugaggca

SEQ ID NO: 294147 - RNA, 24 nt, Human
acugcacuccagccugggcgacag

SEQ ID NO: 294148 - RNA, 26 nt, Human
acugcacuccagccugggcgacagag

SEQ ID NO: 294149 - RNA, 23 nt, Human
agcaauuugggaggcugaguggg

SEQ ID NO: 294150 - RNA, 19 nt, Human
agccauuaaaaauuuaaca

SEQ ID NO: 294151 - RNA, 24 nt, Human
agccugggcgacagagcgagacuc

SEQ ID NO: 294152 - RNA, 24 nt, Human
agcgauucuccugccucagccucc

SEQ ID NO: 294153 - RNA, 24 nt, Human
agcugggauuacaagcaugugcca

SEQ ID NO: 294154 - RNA, 23 nt, Human
aggaaugagccacugagcccugc

SEQ ID NO: 294155 - RNA, 22 nt, Human
aggcaggagaaucgcuugaacc

SEQ ID NO: 294156 - RNA, 24 nt, Human
aggcaggagaaucgcuugaaccug

SEQ ID NO: 294157 - RNA, 20 nt, Human
aggcggagguugcagugagc

SEQ ID NO: 294158 - RNA, 24 nt, Human
aggcggagguugcagugagcugag

SEQ ID NO: 294159 - RNA, 20 nt, Human
aggcugaggcaggagaaucg

SEQ ID NO: 294160 - RNA, 24 nt, Human
aggcugaggcaggagaaucgcuug

SEQ ID NO: 294161 - RNA, 21 nt, Human
agggguuuauuuaucauauca

SEQ ID NO: 294162 - RNA, 24 nt, Human
aggugaucugcccgccuuggccuc

SEQ ID NO: 294163 - RNA, 23 nt, Human
aguagcugggauuacaagcaugu

SEQ ID NO: 294164 - RNA, 24 nt, Human
agugcugggauuacaggaaugagc

SEQ ID NO: 294165 - RNA, 24 nt, Human
agugggguggaucacgaggucaag

SEQ ID NO: 294166 - RNA, 18 nt, Human
auagaauuuuauucaaag

SEQ ID NO: 294167 - RNA, 24 nt, Human
aucgcgccacugcacuccagccug

SEQ ID NO: 294168 - RNA, 19 nt, Human
auuuuuuuuuuuuuuuugg

SEQ ID NO: 294169 - RNA, 25 nt, Human
caaaaaaaaaaaaaacaaacaaacc

SEQ ID NO: 294170 - RNA, 24 nt, Human
caaaaaacaaacaaacaaacaaaa

SEQ ID NO: 294171 - RNA, 22 nt, Human
caaaaaacaguuguaaugaaca

SEQ ID NO: 294172 - RNA, 20 nt, Human
caaacaaacaaacaaaaaac

SEQ ID NO: 294173 - RNA, 21 nt, Human
caaacaaaccaaaaaacaaac

SEQ ID NO: 294174 - RNA, 22 nt, Human
caaacaaaccaaaaaacaaaca

SEQ ID NO: 294175 - RNA, 24 nt, Human
caaaccaauaagaacaccgguuuc

SEQ ID NO: 294176 - RNA, 24 nt, Human
caaagugcugggauuacaggaaug

SEQ ID NO: 294177 - RNA, 21 nt, Human
caaauagggaacuaucaaugc

SEQ ID NO: 294178 - RNA, 25 nt, Human
caaauuaaauauuuucacaugaucc

SEQ ID NO: 294179 - RNA, 23 nt, Human
caacuuccaccuccuggguucaa

SEQ ID NO: 294180 - RNA, 20 nt, Human
caagcgauucuccugccuca

SEQ ID NO: 294181 - RNA, 22 nt, Human
caagcgauucuccugccucagc

SEQ ID NO: 294182 - RNA, 24 nt, Human
caaugccgggaaacuagaacuuua

SEQ ID NO: 294183 - RNA, 24 nt, Human
cacuccagccugggcgacagagcg

SEQ ID NO: 294184 - RNA, 22 nt, Human
cacugagcccugccucaaagac

SEQ ID NO: 294185 - RNA, 19 nt, Human
cacugcacuccagccuggg

SEQ ID NO: 294186 - RNA, 20 nt, Human
cacugcacuccagccugggc

SEQ ID NO: 294187 - RNA, 22 nt, Human
cacugcacuccagccugggcga

SEQ ID NO: 294188 - RNA, 23 nt, Human
cacugcacuccagccugggcgac

SEQ ID NO: 294189 - RNA, 24 nt, Human
cacugcacuccagccugggcgaca

SEQ ID NO: 294190 - RNA, 23 nt, Human
cagcaauuugggaggcugagugg

SEQ ID NO: 294191 - RNA, 21 nt, Human
ccaaaaaacaaacaaacaaac

SEQ ID NO: 294192 - RNA, 19 nt, Human
ccaaagugcugggauuaca

SEQ ID NO: 294193 - RNA, 21 nt, Human
ccaaagugcugggauuacagg

SEQ ID NO: 294194 - RNA, 24 nt, Human
ccaaagugcugggauuacaggaau

SEQ ID NO: 294195 - RNA, 24 nt, Human
ccaccuccuggguucaagcgauuc

SEQ ID NO: 294196 - RNA, 20 nt, Human
ccacugcacuccagccuggg

SEQ ID NO: 294197 - RNA, 21 nt, Human
ccacugcacuccagccugggc

SEQ ID NO: 294198 - RNA, 21 nt, Human
ccacugcacuccagccugggc

SEQ ID NO: 294199 - RNA, 23 nt, Human
ccacugcacuccagccugggcga

SEQ ID NO: 294200 - RNA, 24 nt, Human
ccacugcacuccagccugggcgac

SEQ ID NO: 294201 - RNA, 18 nt, Human
cccaggcuggaguacaau

SEQ ID NO: 294202 - RNA, 19 nt, Human
cccaggcuggaguacaaug

SEQ ID NO: 294203 - RNA, 19 nt, Human
cccgaguagcugggauuac

SEQ ID NO: 294204 - RNA, 22 nt, Human
cccgccuuggccucccaaagug

SEQ ID NO: 294205 - RNA, 22 nt, Human
cccgucucuacugaaaauacaa

SEQ ID NO: 294206 - RNA, 21 nt, Human
ccuaucuuaacacuauuaaaa

SEQ ID NO: 294207 - RNA, 24 nt, Human
ccuccuggguucaagcgauucucc

SEQ ID NO: 294208 - RNA, 23 nt, Human
ccugccucagccucccgaguagc

SEQ ID NO: 294209 - RNA, 24 nt, Human
ccugccucagccucccgaguagcu

SEQ ID NO: 294210 - RNA, 19 nt, Human
ccugggaggcggagguugc

SEQ ID NO: 294211 - RNA, 22 nt, Human
ccugggcgacagagcgagacuc

SEQ ID NO: 294212 - RNA, 23 nt, Human
ccuggguucaagcgauucuccug

SEQ ID NO: 294213 - RNA, 21 nt, Human
cuaacaccuaucuuaacacua

SEQ ID NO: 294214 - RNA, 21 nt, Human
cuagacacuaccaauaacacu

SEQ ID NO: 294215 - RNA, 19 nt, Human
cucaaaaaaaaaaaaaaca

SEQ ID NO: 294216 - RNA, 20 nt, Human
cucaaaaaaaaaaaaaacaa

SEQ ID NO: 294217 - RNA, 30 nt, Human
cucaaaaaaaaaaaaaacaaacaaaccaaa

SEQ ID NO: 294218 - RNA, 24 nt, Human
cucagccucccgaguagcugggau

SEQ ID NO: 294219 - RNA, 26 nt, Human
cucaugccuguaaaucccagcaauuu

SEQ ID NO: 294220 - RNA, 24 nt, Human
cuccgucucaaaaaaaaaaaaaac

SEQ ID NO: 294221 - RNA, 21 nt, Human
cuccuggguucaagcgauucu

SEQ ID NO: 294222 - RNA, 21 nt, Human
cucggcucaaagcaacuucca

SEQ ID NO: 294223 - RNA, 26 nt, Human
cucgugaccuaaggugaucugcccgc

SEQ ID NO: 294224 - RNA, 24 nt, Human
cuuaacguuggucaggcuggucuc

SEQ ID NO: 294225 - RNA, 19 nt, Human
cuugaaccugggaggcgga

SEQ ID NO: 294226 - RNA, 21 nt, Human
gacagagcgagacuccgucuc

SEQ ID NO: 294227 - RNA, 24 nt, Human
gacagagcgagacuccgucucaaa

SEQ ID NO: 294228 - RNA, 23 nt, Human
gaccuaaggugaucugcccgccu

SEQ ID NO: 294229 - RNA, 23 nt, Human
gagaaucgcuugaaccugggagg

SEQ ID NO: 294230 - RNA, 23 nt, Human
gagaucgcgccacugcacuccag

SEQ ID NO: 294231 - RNA, 23 nt, Human
gagguugcagugagcugagaucg

SEQ ID NO: 294232 - RNA, 25 nt, Human
gaguagcugggauuacaagcaugug

SEQ ID NO: 294233 - RNA, 23 nt, Human
gauacaaaauaagaaaaaguuaa

SEQ ID NO: 294234 - RNA, 24 nt, Human
gauuacaagcaugugccaccaugc

SEQ ID NO: 294235 - RNA, 18 nt, Human
gauuacaggaaugagcca

SEQ ID NO: 294236 - RNA, 22 nt, Human
gcaacuuccaccuccuggguuc

SEQ ID NO: 294237 - RNA, 24 nt, Human
gcacuccagccugggcgacagagc

SEQ ID NO: 294238 - RNA, 22 nt, Human
gccacugcacuccagccugggc

SEQ ID NO: 294239 - RNA, 24 nt, Human
gccacugcacuccagccugggcga

SEQ ID NO: 294240 - RNA, 20 nt, Human
gcccaaauggauuaagucaa

SEQ ID NO: 294241 - RNA, 22 nt, Human
gccuuggccucccaaagugcug

SEQ ID NO: 294242 - RNA, 24 nt, Human
gcgauucuccugccucagccuccc

SEQ ID NO: 294243 - RNA, 24 nt, Human
gcuagacacuaccaauaacacucu

SEQ ID NO: 294244 - RNA, 20 nt, Human
gcucuuauugcccaggcugg

SEQ ID NO: 294245 - RNA, 21 nt, Human
gcucuuauugcccaggcugga

SEQ ID NO: 294246 - RNA, 20 nt, Human
gcugagaucgcgccacugca

SEQ ID NO: 294247 - RNA, 30 nt, Human
gcuggaguacaauggugcaaucucggcucc

SEQ ID NO: 294248 - RNA, 21 nt, Human
ggaggcugagugggguggauc

SEQ ID NO: 294249 - RNA, 22 nt, Human
ggagguugcagugagcugagau

SEQ ID NO: 294250 - RNA, 24 nt, Human
ggagguugcagugagcugagaucg

SEQ ID NO: 294251 - RNA, 19 nt, Human
ggccaccaugaugaaaccc

SEQ ID NO: 294252 - RNA, 23 nt, Human
ggcugggugcgguggcucaugcc

SEQ ID NO: 294253 - RNA, 24 nt, Human
gggugcgguggcucaugccuguaa

SEQ ID NO: 294254 - RNA, 18 nt, Human
gguggaucacgaggucaa

SEQ ID NO: 294255 - RNA, 24 nt, Human
gguggcucaugccuguaaauccca

SEQ ID NO: 294256 - RNA, 25 nt, Human
gguggcucaugccuguaaaucccag

SEQ ID NO: 294257 - RNA, 18 nt, Human
guagcugggauuacaagc

SEQ ID NO: 294258 - RNA, 22 nt, Human
guaggcugggugcgguggcuca

SEQ ID NO: 294259 - RNA, 19 nt, Human
guugcagugagcugagauc

SEQ ID NO: 294260 - RNA, 21 nt, Human
guugcagugagcugagaucgc

SEQ ID NO: 294261 - RNA, 22 nt, Human
uaacaaguaaaaaguuuuagga

SEQ ID NO: 294262 - RNA, 25 nt, Human
uaacaaguaaaaaguuuuaggaaaa

SEQ ID NO: 294263 - RNA, 27 nt, Human
uaagaaaaaguuaacuugugaaguuaa

SEQ ID NO: 294264 - RNA, 24 nt, Human
uaagaacaccgguuucaaaagaaa

SEQ ID NO: 294265 - RNA, 18 nt, Human
uaaggugaucugcccgcc

SEQ ID NO: 294266 - RNA, 23 nt, Human
uaauuuuguauuuuuaguaaaga

SEQ ID NO: 294267 - RNA, 20 nt, Human
uacaagcaugugccaccaug

SEQ ID NO: 294268 - RNA, 22 nt, Human
uacaagcaugugccaccaugcc

SEQ ID NO: 294269 - RNA, 19 nt, Human
uacuuugugauugcuguug

SEQ ID NO: 294270 - RNA, 20 nt, Human
uagaccauccuggccaccau

SEQ ID NO: 294271 - RNA, 23 nt, Human
uaggcugggugcgguggcucaug

SEQ ID NO: 294272 - RNA, 18 nt, Human
uaguaaagacgggguuac

SEQ ID NO: 294273 - RNA, 24 nt, Human
uaguaaagacgggguuacuuaacg

SEQ ID NO: 294274 - RNA, 24 nt, Human
uauuuuauuuuauuuugauggagu

SEQ ID NO: 294275 - RNA, 25 nt, Human
ucaaaaaaaaaaaaaacaaacaaac

SEQ ID NO: 294276 - RNA, 24 nt, Human
ucaaagcaacuuccaccuccuggg

SEQ ID NO: 294277 - RNA, 19 nt, Human
ucaagcgauucuccugccu

SEQ ID NO: 294278 - RNA, 22 nt, Human
ucacgaggucaagagauagacc

SEQ ID NO: 294279 - RNA, 20 nt, Human
ucagccucccgaguagcugg

SEQ ID NO: 294280 - RNA, 24 nt, Human
ucauagaauuuuauucaaaguucu

SEQ ID NO: 294281 - RNA, 23 nt, Human
uccagccugggcgacagagcgag

SEQ ID NO: 294282 - RNA, 24 nt, Human
uccagccugggcgacagagcgaga

SEQ ID NO: 294283 - RNA, 18 nt, Human
ucccaaagugcugggauu

SEQ ID NO: 294284 - RNA, 23 nt, Human
ucccaaagugcugggauuacagg

SEQ ID NO: 294285 - RNA, 18 nt, Human
ucccgaguagcugggauu

SEQ ID NO: 294286 - RNA, 22 nt, Human
uccgucucaaaaaaaaaaaaaa

SEQ ID NO: 294287 - RNA, 21 nt, Human
uccuggguucaagcgauucuc

SEQ ID NO: 294288 - RNA, 24 nt, Human
uccuggguucaagcgauucuccug

SEQ ID NO: 294289 - RNA, 23 nt, Human
ucgcgccacugcacuccagccug

SEQ ID NO: 294290 - RNA, 24 nt, Human
ucgcuugaaccugggaggcggagg

SEQ ID NO: 294291 - RNA, 18 nt, Human
ucucaaaaaaaaaaaaaa

SEQ ID NO: 294292 - RNA, 23 nt, Human
ucucaaaaaaaaaaaaaacaaac

SEQ ID NO: 294293 - RNA, 24 nt, Human
ucuccugccucagccucccgagua

SEQ ID NO: 294294 - RNA, 21 nt, Human
ucucuacugaaaauacaaaaa

SEQ ID NO: 294295 - RNA, 24 nt, Human
ugaaccugggaggcggagguugca

SEQ ID NO: 294296 - RNA, 24 nt, Human
ugaccuaaggugaucugcccgccu

SEQ ID NO: 294297 - RNA, 24 nt, Human
ugacuaaauuuuuuuuuuuuuuuu

SEQ ID NO: 294298 - RNA, 22 nt, Human
ugagcugagaucgcgccacugc

SEQ ID NO: 294299 - RNA, 20 nt, Human
ugaggcaggagaaucgcuug

SEQ ID NO: 294300 - RNA, 24 nt, Human
ugaggcaggagaaucgcuugaacc

SEQ ID NO: 294301 - RNA, 25 nt, Human
ugaggcaggagaaucgcuugaaccu

SEQ ID NO: 294302 - RNA, 19 nt, Human
ugagugggguggaucacga

SEQ ID NO: 294303 - RNA, 21 nt, Human
ugcccaggcuggaguacaaug

SEQ ID NO: 294304 - RNA, 24 nt, Human
ugcccaggcuggaguacaauggug

SEQ ID NO: 294305 - RNA, 24 nt, Human
ugccucagccucccgaguagcugg

SEQ ID NO: 294306 - RNA, 24 nt, Human
ugcucuuauugcccaggcuggagu

SEQ ID NO: 294307 - RNA, 23 nt, Human
uggcucaugccuguaaaucccag

SEQ ID NO: 294308 - RNA, 25 nt, Human
uggcucaugccuguaaaucccagca

SEQ ID NO: 294309 - RNA, 29 nt, Human
ugggaggcggagguugcagugacaacggu

SEQ ID NO: 294310 - RNA, 24 nt, Human
ugggaggcggagguugcagugagc

SEQ ID NO: 294311 - RNA, 19 nt, Human
ugggaggcugaguggggug

SEQ ID NO: 294312 - RNA, 24 nt, Human
ugggaggcugagugggguggauca

SEQ ID NO: 294313 - RNA, 21 nt, Human
ugggauuacaagcaugugcca

SEQ ID NO: 294314 - RNA, 22 nt, Human
ugggauuacaagcaugugccac

SEQ ID NO: 294315 - RNA, 24 nt, Human
ugggauuacaagcaugugccacca

SEQ ID NO: 294316 - RNA, 22 nt, Human
ugggauuacaggaaugagccac

SEQ ID NO: 294317 - RNA, 22 nt, Human
ugggauuacaggaaugagccac

SEQ ID NO: 294318 - RNA, 23 nt, Human
ugggauuacaggaaugagccacu

SEQ ID NO: 294319 - RNA, 24 nt, Human
ugggauuacaggaaugagccacug

SEQ ID NO: 294320 - RNA, 23 nt, Human
uggguucaagcgauucuccugcc

SEQ ID NO: 294321 - RNA, 21 nt, Human
uggucaggcuggucucaaacu

SEQ ID NO: 294322 - RNA, 21 nt, Human
uguauuuuuaguaaagacggg

SEQ ID NO: 294323 - RNA, 20 nt, Human
uuaguaaagacgggguuacu

SEQ ID NO: 294324 - RNA, 24 nt, Human
uuauuguaggcugggugcgguggc

SEQ ID NO: 294325 - RNA, 22 nt, Human
uucaaaagaaaaauagaagaaa

SEQ ID NO: 294326 - RNA, 21 nt, Human
uucaagcgauucuccugccuc

SEQ ID NO: 294327 - RNA, 23 nt, Human
uucaagcgauucuccugccucag

SEQ ID NO: 294328 - RNA, 24 nt, Human
uucaagcgauucuccugccucagc

SEQ ID NO: 294329 - RNA, 24 nt, Human
uugaaccugggaggcggagguugc

SEQ ID NO: 294330 - RNA, 19 nt, Human
uugcagugagcugagaucg

SEQ ID NO: 294331 - RNA, 22 nt, Human
uugcagugagcugagaucgcgc

SEQ ID NO: 294332 - RNA, 23 nt, Human
uugcucuuauugcccaggcugga

SEQ ID NO: 294333 - RNA, 25 nt, Human
uugggaggcugagugggguggauca

SEQ ID NO: 294334 - RNA, 23 nt, Human
uuguauuuuuaguaaagacgggg

SEQ ID NO: 294335 - RNA, 23 nt, Human
uuuaaaacgaccaaaaauuuuua

SEQ ID NO: 294336 - RNA, 24 nt, Human
uuugcucuuauugcccaggcugga

SEQ ID NO: 294337 - RNA, 23 nt, Human
uuuugcucuuauugcccaggcug

SEQ ID NO: 294338 - RNA, 24 nt, Human
uuuugcucuuauugcccaggcugg

SEQ ID NO: 294339 - RNA, 20 nt, Human
uuuuguauuuuuaguaaaga

SEQ ID NO: 294340 - RNA, 21 nt, Human
aaaacacaacacgggccgccg

SEQ ID NO: 294341 - RNA, 24 nt, Human
aaaacagaagacugguccccaggg

SEQ ID NO: 294342 - RNA, 19 nt, Human
aaaagcacaccgcacuaca

SEQ ID NO: 294343 - RNA, 24 nt, Human
aaacaaaacagaagacuggucccc

SEQ ID NO: 294344 - RNA, 25 nt, Human
aaacaaaacagaagacuggucccca

SEQ ID NO: 294345 - RNA, 20 nt, Human
aaaugcccucccuaaauccc

SEQ ID NO: 294346 - RNA, 19 nt, Human
aacagaagacugguccccc

SEQ ID NO: 294347 - RNA, 19 nt, Human
aagaggucaugaugcccuu

SEQ ID NO: 294348 - RNA, 23 nt, Human
aagcuggcugccugggcugagcc

SEQ ID NO: 294349 - RNA, 25 nt, Human
acaaaacacaacacgggccgccgcg

SEQ ID NO: 294350 - RNA, 22 nt, Human
acaaaacagaagacuggucccc

SEQ ID NO: 294351 - RNA, 27 nt, Human
acagagccuccuccaaggccuugauaa

SEQ ID NO: 294352 - RNA, 22 nt, Human
acagcacaaaacacaacacggg

SEQ ID NO: 294353 - RNA, 21 nt, Human
accaugcuuugggggaagauu

SEQ ID NO: 294354 - RNA, 20 nt, Human
accccauacugucuuggaac

SEQ ID NO: 294355 - RNA, 19 nt, Human
acucgggaaagaggaacug

SEQ ID NO: 294356 - RNA, 22 nt, Human
acugaaaugccaguuuaaucca

SEQ ID NO: 294357 - RNA, 20 nt, Human
agaaggucuaugcacaagga

SEQ ID NO: 294358 - RNA, 19 nt, Human
agaggaacuguuggagugg

SEQ ID NO: 294359 - RNA, 24 nt, Human
agcucagcccaaagcuggcugccu

SEQ ID NO: 294360 - RNA, 21 nt, Human
aggacauacagagccuccucc

SEQ ID NO: 294361 - RNA, 22 nt, Human
aggaggcuuguagguuacuugg

SEQ ID NO: 294362 - RNA, 20 nt, Human
aggagggaggcaugggaugg

SEQ ID NO: 294363 - RNA, 18 nt, Human
aggagggcaggggcccug

SEQ ID NO: 294364 - RNA, 19 nt, Human
aggaggugggggaagucaa

SEQ ID NO: 294365 - RNA, 18 nt, Human
agggggcgcacuggggac

SEQ ID NO: 294366 - RNA, 25 nt, Human
auacagagccuccuccaaccggagg

SEQ ID NO: 294367 - RNA, 21 nt, Human
caaaacagaagacuggucccc

SEQ ID NO: 294368 - RNA, 23 nt, Human
caaacaaugaaaaacaaaacaga

SEQ ID NO: 294369 - RNA, 22 nt, Human
caacaccccaaccaccuuacuc

SEQ ID NO: 294370 - RNA, 21 nt, Human
cacacuucccuuccuuaucuu

SEQ ID NO: 294371 - RNA, 20 nt, Human
caccgcacuacacuacuggc

SEQ ID NO: 294372 - RNA, 18 nt, Human
cacuggggaccugggcag

SEQ ID NO: 294373 - RNA, 25 nt, Human
cagagccuccuccaaggccuugaua

SEQ ID NO: 294374 - RNA, 20 nt, Human
cagcccaaagcuggcugccu

SEQ ID NO: 294375 - RNA, 22 nt, Human
caggagggcaggggcccuguug

SEQ ID NO: 294376 - RNA, 22 nt, Human
caggggcagaagggggugggag

SEQ ID NO: 294377 - RNA, 22 nt, Human
caguauucuggggguuagcccu

SEQ ID NO: 294378 - RNA, 20 nt, Human
ccacagaggccccucugacc

SEQ ID NO: 294379 - RNA, 23 nt, Human
ccauacugucuuggaacaugcag

SEQ ID NO: 294380 - RNA, 26 nt, Human
ccauacugucuuggaacaugcagugg

SEQ ID NO: 294381 - RNA, 21 nt, Human
cccaccauccacauccacaca

SEQ ID NO: 294382 - RNA, 30 nt, Human
cccacccgccaucacguaaaagcacaccgg

SEQ ID NO: 294383 - RNA, 18 nt, Human
ccccacuacccccauggg

SEQ ID NO: 294384 - RNA, 20 nt, Human
ccccacuacccccaugggua

SEQ ID NO: 294385 - RNA, 21 nt, Human
ccccacuacccccauggguac

SEQ ID NO: 294386 - RNA, 27 nt, Human
cccccaccauccacauccacacacuuc

SEQ ID NO: 294387 - RNA, 25 nt, Human
cccccugggggggaagggguaggug

SEQ ID NO: 294388 - RNA, 21 nt, Human
ccccugaggacauacagagcc

SEQ ID NO: 294389 - RNA, 21 nt, Human
ccgccgcccgcugcccacccg

SEQ ID NO: 294390 - RNA, 22 nt, Human
ccucucaaggggaccugguccu

SEQ ID NO: 294391 - RNA, 22 nt, Human
ccuggcuggcccacccuuccug

SEQ ID NO: 294392 - RNA, 19 nt, Human
ccugggcugagacuuucug

SEQ ID NO: 294393 - RNA, 21 nt, Human
ccugggcugagcccuauuaug

SEQ ID NO: 294394 - RNA, 21 nt, Human
ccuguuagcucagcccaaagc

SEQ ID NO: 294395 - RNA, 24 nt, Human
cgcccgcugcccacccgccaucac

SEQ ID NO: 294396 - RNA, 19 nt, Human
cgcccuguggcucuuggcc

SEQ ID NO: 294397 - RNA, 22 nt, Human
cgcguggacacagcacaaaaca

SEQ ID NO: 294398 - RNA, 22 nt, Human
cggcaccuggcaaggugaagga

SEQ ID NO: 294399 - RNA, 23 nt, Human
cggcugcgcggagcccgccgccc

SEQ ID NO: 294400 - RNA, 22 nt, Human
cuauucuacaccagccgaaaga

SEQ ID NO: 294401 - RNA, 23 nt, Human
cugaggccugggugcagguaagg

SEQ ID NO: 294402 - RNA, 18 nt, Human
cugccugggcugagcccu

SEQ ID NO: 294403 - RNA, 18 nt, Human
cuggcaaggugaaggacu

SEQ ID NO: 294404 - RNA, 18 nt, Human
gaaaaacaaaacagaaga

SEQ ID NO: 294405 - RNA, 18 nt, Human
gaagauggaggaguucag

SEQ ID NO: 294406 - RNA, 21 nt, Human
gacccaggggcagaagggggu

SEQ ID NO: 294407 - RNA, 21 nt, Human
gagcauggccuuggccccuac

SEQ ID NO: 294408 - RNA, 18 nt, Human
gaggagggaggcauggga

SEQ ID NO: 294409 - RNA, 20 nt, Human
gagugggguggggaggaggg

SEQ ID NO: 294410 - RNA, 21 nt, Human
gcccccaccauccacauccac

SEQ ID NO: 294411 - RNA, 18 nt, Human
gcccuguggcucuuggcc

SEQ ID NO: 294412 - RNA, 20 nt, Human
gccuggcuggcccacccuuc

SEQ ID NO: 294413 - RNA, 18 nt, Human
gcggagcccgccgcccgc

SEQ ID NO: 294414 - RNA, 19 nt, Human
gcguggacacagcacaaaa

SEQ ID NO: 294415 - RNA, 20 nt, Human
gcugcgcggagcccgccgcc

SEQ ID NO: 294416 - RNA, 20 nt, Human
ggacccaggggcagaagggg

SEQ ID NO: 294417 - RNA, 22 nt, Human
ggagaagucaguacgggggagg

SEQ ID NO: 294418 - RNA, 19 nt, Human
ggaggcaugggauggaugg

SEQ ID NO: 294419 - RNA, 20 nt, Human
ggagggggcgcuacacuacu

SEQ ID NO: 294420 - RNA, 21 nt, Human
ggagugggguggggaggaggg

SEQ ID NO: 294421 - RNA, 22 nt, Human
ggagugggguggggaggaggga

SEQ ID NO: 294422 - RNA, 21 nt, Human
ggcaggucugggguucucugg

SEQ ID NO: 294423 - RNA, 19 nt, Human
ggcguugggaagaggcuug

SEQ ID NO: 294424 - RNA, 19 nt, Human
gggaccugguccuaaaccu

SEQ ID NO: 294425 - RNA, 19 nt, Human
gggaggagggaggcauggg

SEQ ID NO: 294426 - RNA, 21 nt, Human
gggcagaagggggugggagaa

SEQ ID NO: 294427 - RNA, 19 nt, Human
gggcguugggaagaggcuu

SEQ ID NO: 294428 - RNA, 18 nt, Human
ggggaagggguaggugcu

SEQ ID NO: 294429 - RNA, 30 nt, Human
ggggaggagggaggcaugggauggaugggg

SEQ ID NO: 294430 - RNA, 24 nt, Human
ggggagggggucgccuuagcgcgu

SEQ ID NO: 294431 - RNA, 27 nt, Human
ggggcagaagggggugggagaagaagg

SEQ ID NO: 294432 - RNA, 19 nt, Human
gggguggggaggagggagg

SEQ ID NO: 294433 - RNA, 20 nt, Human
gggguggggaggagggaggc

SEQ ID NO: 294434 - RNA, 21 nt, Human
guccaugcccccaccauccac

SEQ ID NO: 294435 - RNA, 23 nt, Human
gugaaggacugaggcuucaggag

SEQ ID NO: 294436 - RNA, 19 nt, Human
uacagagccuccuccaagg

SEQ ID NO: 294437 - RNA, 20 nt, Human
uacagagccuccuccaaggg

SEQ ID NO: 294438 - RNA, 21 nt, Human
uaccaguauucuggggguuag

SEQ ID NO: 294439 - RNA, 18 nt, Human
uacucgggaaagaggaac

SEQ ID NO: 294440 - RNA, 19 nt, Human
uagcccugaaacucugagg

SEQ ID NO: 294441 - RNA, 23 nt, Human
uagcccugaaacucugaggccug

SEQ ID NO: 294442 - RNA, 24 nt, Human
uaggagaagucaguacgggggagg

SEQ ID NO: 294443 - RNA, 25 nt, Human
uaucuuaccaccccauacugucuug

SEQ ID NO: 294444 - RNA, 19 nt, Human
uauguagugggaagggucc

SEQ ID NO: 294445 - RNA, 20 nt, Human
ucagcccaaagcuggcugcc

SEQ ID NO: 294446 - RNA, 18 nt, Human
ucaguccccugaggacau

SEQ ID NO: 294447 - RNA, 24 nt, Human
uccaaaacuugagcauugaucuug

SEQ ID NO: 294448 - RNA, 26 nt, Human
uccacacacuucccuuccuuaucuua

SEQ ID NO: 294449 - RNA, 19 nt, Human
uccacauccacacacuucc

SEQ ID NO: 294450 - RNA, 22 nt, Human
uccaccaguggcaccucuggag

SEQ ID NO: 294451 - RNA, 19 nt, Human
ugaaaaacaaaacagaaga

SEQ ID NO: 294452 - RNA, 21 nt, Human
ugaaaaacaaaacagaagacu

SEQ ID NO: 294453 - RNA, 18 nt, Human
ugacccuuccaccagugg

SEQ ID NO: 294454 - RNA, 22 nt, Human
ugacccuuccaccaguggcacc

SEQ ID NO: 294455 - RNA, 24 nt, Human
ugcccuagcucccugccuccccaa

SEQ ID NO: 294456 - RNA, 19 nt, Human
ugccugggcugagcccuau

SEQ ID NO: 294457 - RNA, 23 nt, Human
ugccugggcugagcccuauuaug

SEQ ID NO: 294458 - RNA, 22 nt, Human
ugcuggggcuccgcuccggggg

SEQ ID NO: 294459 - RNA, 21 nt, Human
uggaaacgucaaacaaugaaa

SEQ ID NO: 294460 - RNA, 25 nt, Human
uggaaacgucaaacaaugaaaaaca

SEQ ID NO: 294461 - RNA, 18 nt, Human
uggaaggaggugaagggg

SEQ ID NO: 294462 - RNA, 21 nt, Human
uggaaggaggugaaggggcug

SEQ ID NO: 294463 - RNA, 22 nt, Human
uggaaggaggugaaggggcugg

SEQ ID NO: 294464 - RNA, 18 nt, Human
uggaaucuggaggauguu

SEQ ID NO: 294465 - RNA, 22 nt, Human
uggaaucuggaggauguuguca

SEQ ID NO: 294466 - RNA, 21 nt, Human
uggacacagcacaaaacacaa

SEQ ID NO: 294467 - RNA, 19 nt, Human
uggaggauguugucagucc

SEQ ID NO: 294468 - RNA, 21 nt, Human
uggagugggguggggaggagg

SEQ ID NO: 294469 - RNA, 23 nt, Human
uggauggccggggacccaggggc

SEQ ID NO: 294470 - RNA, 29 nt, Human
uggcaaaugguucuuggugucuacaguaa

SEQ ID NO: 294471 - RNA, 19 nt, Human
uggcaaggugaaggacuga

SEQ ID NO: 294472 - RNA, 21 nt, Human
uggcaaggugaaggacugagg

SEQ ID NO: 294473 - RNA, 23 nt, Human
uggcaccucuggaguacccagca

SEQ ID NO: 294474 - RNA, 24 nt, Human
uggcaccucuggaguacccagcac

SEQ ID NO: 294475 - RNA, 18 nt, Human
uggcugccugggcugagc

SEQ ID NO: 294476 - RNA, 21 nt, Human
uggcugccugggcugagcccu

SEQ ID NO: 294477 - RNA, 19 nt, Human
ugggaaggguccagccuag

SEQ ID NO: 294478 - RNA, 20 nt, Human
ugggaaggguccagccuagu

SEQ ID NO: 294479 - RNA, 20 nt, Human
ugggaaggguccagccuagu

SEQ ID NO: 294480 - RNA, 19 nt, Human
ugggauggaugggccugau

SEQ ID NO: 294481 - RNA, 20 nt, Human
ugggcugguuggggagaggc

SEQ ID NO: 294482 - RNA, 22 nt, Human
uggggaccugggcaguggccuu

SEQ ID NO: 294483 - RNA, 20 nt, Human
uggggaggagggaggcaugg

SEQ ID NO: 294484 - RNA, 21 nt, Human
uggggaggagggaggcauggg

SEQ ID NO: 294485 - RNA, 18 nt, Human
ugggugcagguaaggaga

SEQ ID NO: 294486 - RNA, 26 nt, Human
ugguagcaaaaugcccucccuaaauc

SEQ ID NO: 294487 - RNA, 21 nt, Human
ugguccccagggcguugggaa

SEQ ID NO: 294488 - RNA, 20 nt, Human
uggucccugcccuagcuccc

SEQ ID NO: 294489 - RNA, 23 nt, Human
ugguuuauggcuggaaucuggag

SEQ ID NO: 294490 - RNA, 18 nt, Human
uguaagggcaggucuggg

SEQ ID NO: 294491 - RNA, 23 nt, Human
ugucuacaguaaccccacuaccc

SEQ ID NO: 294492 - RNA, 19 nt, Human
uguggcaaaugguucuugg

SEQ ID NO: 294493 - RNA, 23 nt, Human
uguggcaaaugguucuugguguc

SEQ ID NO: 294494 - RNA, 20 nt, Human
uugauuuggaagauggagga

SEQ ID NO: 294495 - RNA, 19 nt, Human
uuggaagauggaggaguuc

SEQ ID NO: 294496 - RNA, 21 nt, Human
uuguuucuguuucccaagggg

SEQ ID NO: 294497 - RNA, 21 nt, Human
uuguuugaggaggaggugggg

SEQ ID NO: 294498 - RNA, 21 nt, Human
uuuaaccaggcuauggccacu

SEQ ID NO: 294499 - RNA, 18 nt, Human
uuuucagaacuaggaggc

SEQ ID NO: 294500 - RNA, 21 nt, Human
aaaacacaacacgggccgccg

SEQ ID NO: 294501 - RNA, 24 nt, Human
aaaacagaagacugguccccaggg

SEQ ID NO: 294502 - RNA, 19 nt, Human
aaaagcacaccgcacuaca

SEQ ID NO: 294503 - RNA, 25 nt, Human
aaacaaaacagaagacuggucccca

SEQ ID NO: 294504 - RNA, 25 nt, Human
aaacaaaacagaagacuggucccca

SEQ ID NO: 294505 - RNA, 22 nt, Human
aaacaaugaaaaacaaaacaga

SEQ ID NO: 294506 - RNA, 20 nt, Human
aaaugcccucccuaaauccc

SEQ ID NO: 294507 - RNA, 19 nt, Human
aacagaagacugguccccc

SEQ ID NO: 294508 - RNA, 23 nt, Human
aagcuggcugccugggcugagcc

SEQ ID NO: 294509 - RNA, 25 nt, Human
acaaaacacaacacgggccgccgcg

SEQ ID NO: 294510 - RNA, 22 nt, Human
acaaaacagaagacuggucccc

SEQ ID NO: 294511 - RNA, 27 nt, Human
acagagccuccuccaaggccuugauaa

SEQ ID NO: 294512 - RNA, 22 nt, Human
acagcacaaaacacaacacggg

SEQ ID NO: 294513 - RNA, 21 nt, Human
accaugcuuugggggaagauu

SEQ ID NO: 294514 - RNA, 19 nt, Human
acucgggaaagaggaacug

SEQ ID NO: 294515 - RNA, 22 nt, Human
acugaaaugccaguuuaaucca

SEQ ID NO: 294516 - RNA, 20 nt, Human
agaaggucuaugcacaagga

SEQ ID NO: 294517 - RNA, 19 nt, Human
agaggaacuguuggagugg

SEQ ID NO: 294518 - RNA, 24 nt, Human
agcucagcccaaagcuggcugccu

SEQ ID NO: 294519 - RNA, 21 nt, Human
aggacauacagagccuccucc

SEQ ID NO: 294520 - RNA, 23 nt, Human
aggagaagucaguacgggggagg

SEQ ID NO: 294521 - RNA, 22 nt, Human
aggaggcuuguagguuacuugg

SEQ ID NO: 294522 - RNA, 20 nt, Human
aggagggaggcaugggaugg

SEQ ID NO: 294523 - RNA, 18 nt, Human
aggagggcaggggcccug

SEQ ID NO: 294524 - RNA, 19 nt, Human
aggaggugggggaagucaa

SEQ ID NO: 294525 - RNA, 23 nt, Human
agggaggcaugggauggaugggg

SEQ ID NO: 294526 - RNA, 21 nt, Human
aggggcagaagggggugggag

SEQ ID NO: 294527 - RNA, 18 nt, Human
agggggcgcacuggggac

SEQ ID NO: 294528 - RNA, 25 nt, Human
auacagagccuccuccaaccggagg

SEQ ID NO: 294529 - RNA, 20 nt, Human
auucuacaccagccgaaaga

SEQ ID NO: 294530 - RNA, 21 nt, Human
caaaacagaagacuggucccc

SEQ ID NO: 294531 - RNA, 22 nt, Human
caacaccccaaccaccuuacuc

SEQ ID NO: 294532 - RNA, 20 nt, Human
caagaggucaugaugcccuu

SEQ ID NO: 294533 - RNA, 21 nt, Human
cacacuucccuuccuuaucuu

SEQ ID NO: 294534 - RNA, 21 nt, Human
caccccauacugucuuggaac

SEQ ID NO: 294535 - RNA, 20 nt, Human
caccgcacuacacuacuggc

SEQ ID NO: 294536 - RNA, 18 nt, Human
cacuggggaccugggcag

SEQ ID NO: 294537 - RNA, 25 nt, Human
cagagccuccuccaaggccuugaua

SEQ ID NO: 294538 - RNA, 20 nt, Human
cagcccaaagcuggcugccu

SEQ ID NO: 294539 - RNA, 22 nt, Human
caggagggcaggggcccuguug

SEQ ID NO: 294540 - RNA, 22 nt, Human
caguauucuggggguuagcccu

SEQ ID NO: 294541 - RNA, 21 nt, Human
cauacagagccuccuccaagg

SEQ ID NO: 294542 - RNA, 29 nt, Human
ccacccgccaucacguaaaagcacaccgg

SEQ ID NO: 294543 - RNA, 23 nt, Human
ccauacugucuuggaacaugcag

SEQ ID NO: 294544 - RNA, 26 nt, Human
ccauacugucuuggaacaugcagugg

SEQ ID NO: 294545 - RNA, 21 nt, Human
cccacagaggccccucugacc

SEQ ID NO: 294546 - RNA, 21 nt, Human
cccaccauccacauccacaca

SEQ ID NO: 294547 - RNA, 19 nt, Human
cccaggggcagaagggggu

SEQ ID NO: 294548 - RNA, 18 nt, Human
ccccacuacccccauggg

SEQ ID NO: 294549 - RNA, 20 nt, Human
ccccacuacccccaugggua

SEQ ID NO: 294550 - RNA, 21 nt, Human
ccccacuacccccauggguac

SEQ ID NO: 294551 - RNA, 27 nt, Human
cccccaccauccacauccacacacuuc

SEQ ID NO: 294552 - RNA, 25 nt, Human
cccccugggggggaagggguaggug

SEQ ID NO: 294553 - RNA, 21 nt, Human
ccccugaggacauacagagcc

SEQ ID NO: 294554 - RNA, 21 nt, Human
ccgccgcccgcugcccacccg

SEQ ID NO: 294555 - RNA, 22 nt, Human
ccucucaaggggaccugguccu

SEQ ID NO: 294556 - RNA, 22 nt, Human
ccuggcuggcccacccuuccug

SEQ ID NO: 294557 - RNA, 19 nt, Human
ccugggcugagacuuucug

SEQ ID NO: 294558 - RNA, 21 nt, Human
ccugggcugagcccuauuaug

SEQ ID NO: 294559 - RNA, 21 nt, Human
ccuguuagcucagcccaaagc

SEQ ID NO: 294560 - RNA, 24 nt, Human
cgcccgcugcccacccgccaucac

SEQ ID NO: 294561 - RNA, 22 nt, Human
cgcguggacacagcacaaaaca

SEQ ID NO: 294562 - RNA, 22 nt, Human
cggcaccuggcaaggugaagga

SEQ ID NO: 294563 - RNA, 23 nt, Human
cggcugcgcggagcccgccgccc

SEQ ID NO: 294564 - RNA, 23 nt, Human
cugaggccugggugcagguaagg

SEQ ID NO: 294565 - RNA, 18 nt, Human
cugccugggcugagcccu

SEQ ID NO: 294566 - RNA, 18 nt, Human
cuggcaaggugaaggacu

SEQ ID NO: 294567 - RNA, 22 nt, Human
cuuguuugaggaggaggugggg

SEQ ID NO: 294568 - RNA, 22 nt, Human
cuuuaaccaggcuauggccacu

SEQ ID NO: 294569 - RNA, 18 nt, Human
gaaaaacaaaacagaaga

SEQ ID NO: 294570 - RNA, 18 nt, Human
gaagauggaggaguucag

SEQ ID NO: 294571 - RNA, 21 nt, Human
gacccaggggcagaagggggu

SEQ ID NO: 294572 - RNA, 21 nt, Human
gagcauggccuuggccccuac

SEQ ID NO: 294573 - RNA, 20 nt, Human
gagugggguggggaggaggg

SEQ ID NO: 294574 - RNA, 21 nt, Human
gcccccaccauccacauccac

SEQ ID NO: 294575 - RNA, 18 nt, Human
gcccuguggcucuuggcc

SEQ ID NO: 294576 - RNA, 20 nt, Human
gccuggcuggcccacccuuc

SEQ ID NO: 294577 - RNA, 18 nt, Human
gcggagcccgccgcccgc

SEQ ID NO: 294578 - RNA, 19 nt, Human
gcguggacacagcacaaaa

SEQ ID NO: 294579 - RNA, 19 nt, Human
gcugccugggcugagcccu

SEQ ID NO: 294580 - RNA, 20 nt, Human
gcugcgcggagcccgccgcc

SEQ ID NO: 294581 - RNA, 20 nt, Human
ggacccaggggcagaagggg

SEQ ID NO: 294582 - RNA, 22 nt, Human
ggagaagucaguacgggggagg

SEQ ID NO: 294583 - RNA, 19 nt, Human
ggaggagggaggcauggga

SEQ ID NO: 294584 - RNA, 20 nt, Human
ggagggggcgcuacacuacu

SEQ ID NO: 294585 - RNA, 21 nt, Human
ggagugggguggggaggaggg

SEQ ID NO: 294586 - RNA, 22 nt, Human
ggagugggguggggaggaggga

SEQ ID NO: 294587 - RNA, 21 nt, Human
ggcaggucugggguucucugg

SEQ ID NO: 294588 - RNA, 19 nt, Human
ggcguugggaagaggcuug

SEQ ID NO: 294589 - RNA, 19 nt, Human
gggaccugguccuaaaccu

SEQ ID NO: 294590 - RNA, 19 nt, Human
gggaggagggaggcauggg

SEQ ID NO: 294591 - RNA, 20 nt, Human
gggaggcaugggauggaugg

SEQ ID NO: 294592 - RNA, 21 nt, Human
gggcagaagggggugggagaa

SEQ ID NO: 294593 - RNA, 19 nt, Human
gggcguugggaagaggcuu

SEQ ID NO: 294594 - RNA, 18 nt, Human
ggggaagggguaggugcu

SEQ ID NO: 294595 - RNA, 24 nt, Human
ggggagggggucgccuuagcgcgu

SEQ ID NO: 294596 - RNA, 27 nt, Human
ggggcagaagggggugggagaagaagg

SEQ ID NO: 294597 - RNA, 19 nt, Human
gggguggggaggagggagg

SEQ ID NO: 294598 - RNA, 20 nt, Human
gggguggggaggagggaggc

SEQ ID NO: 294599 - RNA, 21 nt, Human
guccaugcccccaccauccac

SEQ ID NO: 294600 - RNA, 23 nt, Human
gugaaggacugaggcuucaggag

SEQ ID NO: 294601 - RNA, 20 nt, Human
uacagagccuccuccaaggg

SEQ ID NO: 294602 - RNA, 21 nt, Human
uaccaguauucuggggguuag

SEQ ID NO: 294603 - RNA, 18 nt, Human
uacucgggaaagaggaac

SEQ ID NO: 294604 - RNA, 19 nt, Human
uagcccugaaacucugagg

SEQ ID NO: 294605 - RNA, 23 nt, Human
uagcccugaaacucugaggccug

SEQ ID NO: 294606 - RNA, 25 nt, Human
uaucuuaccaccccauacugucuug

SEQ ID NO: 294607 - RNA, 20 nt, Human
ucagcccaaagcuggcugcc

SEQ ID NO: 294608 - RNA, 18 nt, Human
ucaguccccugaggacau

SEQ ID NO: 294609 - RNA, 24 nt, Human
uccaaaacuugagcauugaucuug

SEQ ID NO: 294610 - RNA, 26 nt, Human
uccacacacuucccuuccuuaucuua

SEQ ID NO: 294611 - RNA, 19 nt, Human
uccacauccacacacuucc

SEQ ID NO: 294612 - RNA, 22 nt, Human
uccaccaguggcaccucuggag

SEQ ID NO: 294613 - RNA, 21 nt, Human
ugaaaaacaaaacagaagacu

SEQ ID NO: 294614 - RNA, 18 nt, Human
ugacccuuccaccagugg

SEQ ID NO: 294615 - RNA, 22 nt, Human
ugacccuuccaccaguggcacc

SEQ ID NO: 294616 - RNA, 24 nt, Human
ugcccuagcucccugccuccccaa

SEQ ID NO: 294617 - RNA, 23 nt, Human
ugccugggcugagcccuauuaug

SEQ ID NO: 294618 - RNA, 22 nt, Human
ugcuggggcuccgcuccggggg

SEQ ID NO: 294619 - RNA, 21 nt, Human
uggaaacgucaaacaaugaaa

SEQ ID NO: 294620 - RNA, 25 nt, Human
uggaaacgucaaacaaugaaaaaca

SEQ ID NO: 294621 - RNA, 18 nt, Human
uggaaggaggugaagggg

SEQ ID NO: 294622 - RNA, 21 nt, Human
uggaaggaggugaaggggcug

SEQ ID NO: 294623 - RNA, 22 nt, Human
uggaaggaggugaaggggcugg

SEQ ID NO: 294624 - RNA, 18 nt, Human
uggaaucuggaggauguu

SEQ ID NO: 294625 - RNA, 22 nt, Human
uggaaucuggaggauguuguca

SEQ ID NO: 294626 - RNA, 21 nt, Human
uggacacagcacaaaacacaa

SEQ ID NO: 294627 - RNA, 19 nt, Human
uggaggauguugucagucc

SEQ ID NO: 294628 - RNA, 21 nt, Human
uggagugggguggggaggagg

SEQ ID NO: 294629 - RNA, 23 nt, Human
uggauggccggggacccaggggc

SEQ ID NO: 294630 - RNA, 29 nt, Human
uggcaaaugguucuuggugucuacaguaa

SEQ ID NO: 294631 - RNA, 19 nt, Human
uggcaaggugaaggacuga

SEQ ID NO: 294632 - RNA, 21 nt, Human
uggcaaggugaaggacugagg

SEQ ID NO: 294633 - RNA, 23 nt, Human
uggcaccucuggaguacccagca

SEQ ID NO: 294634 - RNA, 24 nt, Human
uggcaccucuggaguacccagcac

SEQ ID NO: 294635 - RNA, 18 nt, Human
uggcugccugggcugagc

SEQ ID NO: 294636 - RNA, 19 nt, Human
ugggaaggguccagccuag

SEQ ID NO: 294637 - RNA, 20 nt, Human
ugggaaggguccagccuagu

SEQ ID NO: 294638 - RNA, 20 nt, Human
ugggaaggguccagccuagu

SEQ ID NO: 294639 - RNA, 19 nt, Human
ugggauggaugggccugau

SEQ ID NO: 294640 - RNA, 20 nt, Human
ugggcugguuggggagaggc

SEQ ID NO: 294641 - RNA, 22 nt, Human
uggggaccugggcaguggccuu

SEQ ID NO: 294642 - RNA, 20 nt, Human
uggggaggagggaggcaugg

SEQ ID NO: 294643 - RNA, 21 nt, Human
uggggaggagggaggcauggg

SEQ ID NO: 294644 - RNA, 18 nt, Human
ugggugcagguaaggaga

SEQ ID NO: 294645 - RNA, 26 nt, Human
ugguagcaaaaugcccucccuaaauc

SEQ ID NO: 294646 - RNA, 21 nt, Human
ugguccccagggcguugggaa

SEQ ID NO: 294647 - RNA, 20 nt, Human
uggucccugcccuagcuccc

SEQ ID NO: 294648 - RNA, 23 nt, Human
ugguuuauggcuggaaucuggag

SEQ ID NO: 294649 - RNA, 18 nt, Human
uguaagggcaggucuggg

SEQ ID NO: 294650 - RNA, 23 nt, Human
ugucuacaguaaccccacuaccc

SEQ ID NO: 294651 - RNA, 19 nt, Human
uguggcaaaugguucuugg

SEQ ID NO: 294652 - RNA, 23 nt, Human
uguggcaaaugguucuugguguc

SEQ ID NO: 294653 - RNA, 20 nt, Human
uuauguagugggaagggucc

SEQ ID NO: 294654 - RNA, 20 nt, Human
uugauuuggaagauggagga

SEQ ID NO: 294655 - RNA, 21 nt, Human
uuguuucuguuucccaagggg

SEQ ID NO: 294656 - RNA, 18 nt, Human
uuuucagaacuaggaggc

SEQ ID NO: 294657 - RNA, 21 nt, Human
aaaacacaacacgggccgccg

SEQ ID NO: 294658 - RNA, 24 nt, Human
aaaacagaagacugguccccaggg

SEQ ID NO: 294659 - RNA, 19 nt, Human
aaaagcacaccgcacuaca

SEQ ID NO: 294660 - RNA, 24 nt, Human
aaacaaaacagaagacuggucccc

SEQ ID NO: 294661 - RNA, 25 nt, Human
aaacaaaacagaagacuggucccca

SEQ ID NO: 294662 - RNA, 25 nt, Human
aaacaaaacagaagacuggucccca

SEQ ID NO: 294663 - RNA, 23 nt, Human
aaacagaagacugguccccaggg

SEQ ID NO: 294664 - RNA, 20 nt, Human
aaagaggaacuguuggagug

SEQ ID NO: 294665 - RNA, 20 nt, Human
aaaugcccucccuaaauccc

SEQ ID NO: 294666 - RNA, 19 nt, Human
aacagaagacugguccccc

SEQ ID NO: 294667 - RNA, 19 nt, Human
aagaggucaugaugcccuu

SEQ ID NO: 294668 - RNA, 23 nt, Human
aagcuggcugccugggcugagcc

SEQ ID NO: 294669 - RNA, 25 nt, Human
acaaaacacaacacgggccgccgcg

SEQ ID NO: 294670 - RNA, 22 nt, Human
acaaaacagaagacuggucccc

SEQ ID NO: 294671 - RNA, 18 nt, Human
acagagccuccuccaagg

SEQ ID NO: 294672 - RNA, 27 nt, Human
acagagccuccuccaaggccuugauaa

SEQ ID NO: 294673 - RNA, 22 nt, Human
acagcacaaaacacaacacggg

SEQ ID NO: 294674 - RNA, 21 nt, Human
accaugcuuugggggaagauu

SEQ ID NO: 294675 - RNA, 19 nt, Human
acucgggaaagaggaacug

SEQ ID NO: 294676 - RNA, 22 nt, Human
acugaaaugccaguuuaaucca

SEQ ID NO: 294677 - RNA, 20 nt, Human
agaaggucuaugcacaagga

SEQ ID NO: 294678 - RNA, 19 nt, Human
agaggaacuguuggagugg

SEQ ID NO: 294679 - RNA, 24 nt, Human
agcucagcccaaagcuggcugccu

SEQ ID NO: 294680 - RNA, 21 nt, Human
aggacauacagagccuccucc

SEQ ID NO: 294681 - RNA, 22 nt, Human
aggaggcuuguagguuacuugg

SEQ ID NO: 294682 - RNA, 20 nt, Human
aggagggaggcaugggaugg

SEQ ID NO: 294683 - RNA, 18 nt, Human
aggagggcaggggcccug

SEQ ID NO: 294684 - RNA, 19 nt, Human
aggaggugggggaagucaa

SEQ ID NO: 294685 - RNA, 24 nt, Human
aggcaaaguaaaacucacauguag

SEQ ID NO: 294686 - RNA, 19 nt, Human
agggagggacucaauggcg

SEQ ID NO: 294687 - RNA, 18 nt, Human
agggggcgcacuggggac

SEQ ID NO: 294688 - RNA, 25 nt, Human
auacagagccuccuccaaccggagg

SEQ ID NO: 294689 - RNA, 24 nt, Human
auggccccuuugaaaucaaaagaa

SEQ ID NO: 294690 - RNA, 20 nt, Human
auucuacaccagccgaaaga

SEQ ID NO: 294691 - RNA, 21 nt, Human
caaaacagaagacuggucccc

SEQ ID NO: 294692 - RNA, 23 nt, Human
caaacaaugaaaaacaaaacaga

SEQ ID NO: 294693 - RNA, 22 nt, Human
caacaccccaaccaccuuacuc

SEQ ID NO: 294694 - RNA, 20 nt, Human
caagaggucaugaugcccuu

SEQ ID NO: 294695 - RNA, 21 nt, Human
cacacuucccuuccuuaucuu

SEQ ID NO: 294696 - RNA, 21 nt, Human
caccccauacugucuuggaac

SEQ ID NO: 294697 - RNA, 20 nt, Human
caccgcacuacacuacuggc

SEQ ID NO: 294698 - RNA, 18 nt, Human
cacuggggaccugggcag

SEQ ID NO: 294699 - RNA, 25 nt, Human
cagagccuccuccaaggccuugaua

SEQ ID NO: 294700 - RNA, 20 nt, Human
cagcccaaagcuggcugccu

SEQ ID NO: 294701 - RNA, 22 nt, Human
caggagggcaggggcccuguug

SEQ ID NO: 294702 - RNA, 22 nt, Human
caggggcagaagggggugggag

SEQ ID NO: 294703 - RNA, 22 nt, Human
caguauucuggggguuagcccu

SEQ ID NO: 294704 - RNA, 21 nt, Human
cauacagagccuccuccaagg

SEQ ID NO: 294705 - RNA, 25 nt, Human
cauccaaaauauaucagaaagcgaa

SEQ ID NO: 294706 - RNA, 23 nt, Human
ccacacacuucccuuccuuaucu

SEQ ID NO: 294707 - RNA, 20 nt, Human
ccacagaggccccucugacc

SEQ ID NO: 294708 - RNA, 23 nt, Human
ccauacugucuuggaacaugcag

SEQ ID NO: 294709 - RNA, 26 nt, Human
ccauacugucuuggaacaugcagugg

SEQ ID NO: 294710 - RNA, 21 nt, Human
cccacagaggccccucugacc

SEQ ID NO: 294711 - RNA, 21 nt, Human
cccaccauccacauccacaca

SEQ ID NO: 294712 - RNA, 30 nt, Human; identical to SEQ ID NO: 294382

SEQ ID NO: 294713 - RNA, 19 nt, Human
cccaggggcagaagggggu

SEQ ID NO: 294714 - RNA, 19 nt, Human
ccccacuacccccaugggu

SEQ ID NO: 294715 - RNA, 19 nt, Human
ccccacuacccccaugggu

SEQ ID NO: 294716 - RNA, 20 nt, Human
ccccacuacccccaugggua

SEQ ID NO: 294717 - RNA, 21 nt, Human
ccccacuacccccauggguac

SEQ ID NO: 294718 - RNA, 27 nt, Human
cccccaccauccacauccacacacuuc

SEQ ID NO: 294719 - RNA, 18 nt, Human
cccccccccaaacaguuu

SEQ ID NO: 294720 - RNA, 25 nt, Human
cccccugggggggaagggguaggug

SEQ ID NO: 294721 - RNA, 21 nt, Human
ccccugaggacauacagagcc

SEQ ID NO: 294722 - RNA, 18 nt, Human
ccccugggggggaagggg

SEQ ID NO: 294723 - RNA, 21 nt, Human
ccgccccaccccccccccaaa

SEQ ID NO: 294724 - RNA, 22 nt, Human
ccgccccaccccccccccaaac

SEQ ID NO: 294725 - RNA, 21 nt, Human
ccgccgcccgcugcccacccg

SEQ ID NO: 294726 - RNA, 22 nt, Human
ccucucaaggggaccugguccu

SEQ ID NO: 294727 - RNA, 22 nt, Human
ccuggcuggcccacccuuccug

SEQ ID NO: 294728 - RNA, 19 nt, Human
ccugggcugagacuuucug

SEQ ID NO: 294729 - RNA, 21 nt, Human
ccugggcugagcccuauuaug

SEQ ID NO: 294730 - RNA, 21 nt, Human
ccuguuagcucagcccaaagc

SEQ ID NO: 294731 - RNA, 19 nt, Human
cgccccaccccccccccaa

SEQ ID NO: 294732 - RNA, 24 nt, Human
cgcccgcugcccacccgccaucac

SEQ ID NO: 294733 - RNA, 19 nt, Human
cgcccuguggcucuuggcc

SEQ ID NO: 294734 - RNA, 18 nt, Human
cgccgcccgcugcccacc

SEQ ID NO: 294735 - RNA, 22 nt, Human
cgcguggacacagcacaaaaca

SEQ ID NO: 294736 - RNA, 22 nt, Human
cggcaccuggcaaggugaagga

SEQ ID NO: 294737 - RNA, 23 nt, Human
cggcugcgcggagcccgccgccc

SEQ ID NO: 294738 - RNA, 22 nt, Human
cuauucuacaccagccgaaaga

SEQ ID NO: 294739 - RNA, 22 nt, Human
cucagcccaaagcuggcugccu

SEQ ID NO: 294740 - RNA, 21 nt, Human
cucucaaggggaccugguccu

SEQ ID NO: 294741 - RNA, 23 nt, Human
cugaggccugggugcagguaagg

SEQ ID NO: 294742 - RNA, 18 nt, Human
cugccugggcugagcccu

SEQ ID NO: 294743 - RNA, 18 nt, Human
cuggcaaggugaaggacu

SEQ ID NO: 294744 - RNA, 22 nt, Human
cuuguuugaggaggaggugggg

SEQ ID NO: 294745 - RNA, 22 nt, Human
cuuuaaccaggcuauggccacu

SEQ ID NO: 294746 - RNA, 18 nt, Human
gaaaaacaaaacagaaga

SEQ ID NO: 294747 - RNA, 21 nt, Human
gaaagauuaucguaaucucau

SEQ ID NO: 294748 - RNA, 18 nt, Human
gaagauggaggaguucag

SEQ ID NO: 294749 - RNA, 21 nt, Human
gacccaggggcagaagggggu

SEQ ID NO: 294750 - RNA, 22 nt, Human
gagcagcggcgccuagagccca

SEQ ID NO: 294751 - RNA, 21 nt, Human
gagcauggccuuggccccuac

SEQ ID NO: 294752 - RNA, 18 nt, Human
gaggagggaggcauggga

SEQ ID NO: 294753 - RNA, 20 nt, Human
gagugggguggggaggaggg

SEQ ID NO: 294754 - RNA, 21 nt, Human
gcccccaccauccacauccac

SEQ ID NO: 294755 - RNA, 18 nt, Human
gcccuguggcucuuggcc

SEQ ID NO: 294756 - RNA, 20 nt, Human
gccuggcuggcccacccuuc

SEQ ID NO: 294757 - RNA, 18 nt, Human
gcggagcccgccgcccgc

SEQ ID NO: 294758 - RNA, 19 nt, Human
gcguggacacagcacaaaa

SEQ ID NO: 294759 - RNA, 21 nt, Human
gcguggacacagcacaaaaca

SEQ ID NO: 294760 - RNA, 20 nt, Human
gcugcgcggagcccgccgcc

SEQ ID NO: 294761 - RNA, 20 nt, Human
ggacccaggggcagaagggg

SEQ ID NO: 294762 - RNA, 22 nt, Human
ggagaagucaguacgggggagg

SEQ ID NO: 294763 - RNA, 19 nt, Human
ggaggagggaggcauggga

SEQ ID NO: 294764 - RNA, 19 nt, Human
ggaggcaugggauggaugg

SEQ ID NO: 294765 - RNA, 20 nt, Human
ggagggggcgcuacacuacu

SEQ ID NO: 294766 - RNA, 21 nt, Human
ggagugggguggggaggaggg

SEQ ID NO: 294767 - RNA, 22 nt, Human
ggagugggguggggaggaggga

SEQ ID NO: 294768 - RNA, 21 nt, Human
ggcaggucugggguucucugg

SEQ ID NO: 294769 - RNA, 19 nt, Human
ggcguugggaagaggcuug

SEQ ID NO: 294770 - RNA, 19 nt, Human
gggaccugguccuaaaccu

SEQ ID NO: 294771 - RNA, 19 nt, Human
gggaggagggaggcauggg

SEQ ID NO: 294772 - RNA, 20 nt, Human
gggaggcaugggauggaugg

SEQ ID NO: 294773 - RNA, 21 nt, Human
gggcagaagggggugggagaa

SEQ ID NO: 294774 - RNA, 19 nt, Human
gggcguugggaagaggcuu

SEQ ID NO: 294775 - RNA, 18 nt, Human
ggggaagggguaggugcu

SEQ ID NO: 294776 - RNA, 19 nt, Human
ggggagaggccgcccugug

SEQ ID NO: 294777 - RNA, 30 nt, Human; identical to SEQ ID NO: 294429

SEQ ID NO: 294778 - RNA, 24 nt, Human
ggggagggggucgccuuagcgcgu

SEQ ID NO: 294779 - RNA, 27 nt, Human
ggggcagaagggggugggagaagaagg

SEQ ID NO: 294780 - RNA, 19 nt, Human
gggguggggaggagggagg

SEQ ID NO: 294781 - RNA, 20 nt, Human
gggguggggaggagggaggc

SEQ ID NO: 294782 - RNA, 21 nt, Human
guccaugcccccaccauccac

SEQ ID NO: 294783 - RNA, 23 nt, Human
gugaaggacugaggcuucaggag

SEQ ID NO: 294784 - RNA, 19 nt, Human
uacagagccuccuccaagg

SEQ ID NO: 294785 - RNA, 20 nt, Human
uacagagccuccuccaaggg

SEQ ID NO: 294786 - RNA, 21 nt, Human
uaccaguauucuggggguuag

SEQ ID NO: 294787 - RNA, 18 nt, Human
uacucgggaaagaggaac

SEQ ID NO: 294788 - RNA, 19 nt, Human
uagcccugaaacucugagg

SEQ ID NO: 294789 - RNA, 23 nt, Human
uagcccugaaacucugaggccug

SEQ ID NO: 294790 - RNA, 24 nt, Human
uaggagaagucaguacgggggagg

SEQ ID NO: 294791 - RNA, 25 nt, Human
uaucuuaccaccccauacugucuug

SEQ ID NO: 294792 - RNA, 23 nt, Human
uaugccgccccacccccccccca

SEQ ID NO: 294793 - RNA, 19 nt, Human
uauguagugggaagggucc

SEQ ID NO: 294794 - RNA, 20 nt, Human
ucaauggcgcgcagcuuccc

SEQ ID NO: 294795 - RNA, 20 nt, Human
ucagcccaaagcuggcugcc

SEQ ID NO: 294796 - RNA, 18 nt, Human
ucaguccccugaggacau

SEQ ID NO: 294797 - RNA, 24 nt, Human
uccaaaacuugagcauugaucuug

SEQ ID NO: 294798 - RNA, 23 nt, Human
uccaaaauauaucagaaagcgaa

SEQ ID NO: 294799 - RNA, 26 nt, Human
uccacacacuucccuuccuuaucuua

SEQ ID NO: 294800 - RNA, 19 nt, Human
uccacauccacacacuucc

SEQ ID NO: 294801 - RNA, 22 nt, Human
uccaccaguggcaccucuggag

SEQ ID NO: 294802 - RNA, 21 nt, Human
ugaaaaacaaaacagaagacu

SEQ ID NO: 294803 - RNA, 21 nt, Human
ugaaaucaaaagaaaauaugc

SEQ ID NO: 294804 - RNA, 25 nt, Human
ugaaaucaaaagaaaauaugccaag

SEQ ID NO: 294805 - RNA, 24 nt, Human
ugaauggccccuuugaaaucaaaa

SEQ ID NO: 294806 - RNA, 18 nt, Human
ugacccuuccaccagugg

SEQ ID NO: 294807 - RNA, 22 nt, Human
ugacccuuccaccaguggcacc

SEQ ID NO: 294808 - RNA, 20 nt, Human
ugauaauagaaaaauaauac

SEQ ID NO: 294809 - RNA, 20 nt, Human
ugccaagauugaaaaaugac

SEQ ID NO: 294810 - RNA, 24 nt, Human
ugcccuagcucccugccuccccaa

SEQ ID NO: 294811 - RNA, 21 nt, Human
ugccgccccacccccccccca

SEQ ID NO: 294812 - RNA, 24 nt, Human
ugccgccccaccccccccccaaac

SEQ ID NO: 294813 - RNA, 19 nt, Human
ugccugggcugagcccuau

SEQ ID NO: 294814 - RNA, 23 nt, Human
ugccugggcugagcccuauuaug

SEQ ID NO: 294815 - RNA, 21 nt, Human
ugcuggggcuccgcuccgggg

SEQ ID NO: 294816 - RNA, 22 nt, Human
ugcuggggcuccgcuccggggg

SEQ ID NO: 294817 - RNA, 21 nt, Human
uggaaacgucaaacaaugaaa

SEQ ID NO: 294818 - RNA, 25 nt, Human
uggaaacgucaaacaaugaaaaaca

SEQ ID NO: 294819 - RNA, 18 nt, Human
uggaaggaggugaagggg

SEQ ID NO: 294820 - RNA, 21 nt, Human
uggaaggaggugaaggggcug

SEQ ID NO: 294821 - RNA, 22 nt, Human
uggaaggaggugaaggggcugg

SEQ ID NO: 294822 - RNA, 18 nt, Human
uggaaucuggaggauguu

SEQ ID NO: 294823 - RNA, 22 nt, Human
uggaaucuggaggauguuguca

SEQ ID NO: 294824 - RNA, 21 nt, Human
uggacacagcacaaaacacaa

SEQ ID NO: 294825 - RNA, 19 nt, Human
uggaggauguugucagucc

SEQ ID NO: 294826 - RNA, 21 nt, Human
uggagugggguggggaggagg

SEQ ID NO: 294827 - RNA, 23 nt, Human
uggauggccggggacccaggggc

SEQ ID NO: 294828 - RNA, 25 nt, Human
uggcaaaugguucuuggugucuaca

SEQ ID NO: 294829 - RNA, 29 nt, Human
uggcaaaugguucuuggugucuacaguaa

SEQ ID NO: 294830 - RNA, 19 nt, Human
uggcaaggugaaggacuga

SEQ ID NO: 294831 - RNA, 21 nt, Human
uggcaaggugaaggacugagg

SEQ ID NO: 294832 - RNA, 23 nt, Human
uggcaccucuggaguacccagca

SEQ ID NO: 294833 - RNA, 24 nt, Human
uggcaccucuggaguacccagcac

SEQ ID NO: 294834 - RNA, 21 nt, Human
uggccccuuugaaaucaaaag

SEQ ID NO: 294835 - RNA, 18 nt, Human
uggcugccugggcugagc

SEQ ID NO: 294836 - RNA, 21 nt, Human
uggcugccugggcugagcccu

SEQ ID NO: 294837 - RNA, 20 nt, Human
ugggaagaggcuugguagca

SEQ ID NO: 294838 - RNA, 19 nt, Human
ugggaaggguccagccuag

SEQ ID NO: 294839 - RNA, 20 nt, Human
ugggaaggguccagccuagu

SEQ ID NO: 294840 - RNA, 20 nt, Human
ugggaaggguccagccuagu

SEQ ID NO: 294841 - RNA, 19 nt, Human
ugggauggaugggccugau

SEQ ID NO: 294842 - RNA, 20 nt, Human
ugggcugguuggggagaggc

SEQ ID NO: 294843 - RNA, 22 nt, Human
uggggaccugggcaguggccuu

SEQ ID NO: 294844 - RNA, 20 nt, Human
uggggaggagggaggcaugg

SEQ ID NO: 294845 - RNA, 21 nt, Human
uggggaggagggaggcauggg

SEQ ID NO: 294846 - RNA, 18 nt, Human
ugggugcagguaaggaga

SEQ ID NO: 294847 - RNA, 26 nt, Human
ugguagcaaaaugcccucccuaaauc

SEQ ID NO: 294848 - RNA, 21 nt, Human
ugguccccagggcguugggaa

SEQ ID NO: 294849 - RNA, 20 nt, Human
uggucccugcccuagcuccc

SEQ ID NO: 294850 - RNA, 23 nt, Human
ugguuuauggcuggaaucuggag

SEQ ID NO: 294851 - RNA, 18 nt, Human
uguaagggcaggucuggg

SEQ ID NO: 294852 - RNA, 23 nt, Human
ugucuacaguaaccccacuaccc

SEQ ID NO: 294853 - RNA, 19 nt, Human
uguggcaaaugguucuugg

SEQ ID NO: 294854 - RNA, 23 nt, Human
uguggcaaaugguucuugguguc

SEQ ID NO: 294855 - RNA, 20 nt, Human
uuauguagugggaagggucc

SEQ ID NO: 294856 - RNA, 23 nt, Human
uugaauggccccuuugaaaucaa

SEQ ID NO: 294857 - RNA, 20 nt, Human
uugauuuggaagauggagga

SEQ ID NO: 294858 - RNA, 19 nt, Human
uuggaagauggaggaguuc

SEQ ID NO: 294859 - RNA, 21 nt, Human
uuguuucuguuucccaagggg

SEQ ID NO: 294860 - RNA, 21 nt, Human
uuguuugaggaggaggugggg

SEQ ID NO: 294861 - RNA, 18 nt, Human
uuuucagaacuaggaggc

SEQ ID NO: 294862 - RNA, 21 nt, Human
aaaacacaacacgggccgccg

SEQ ID NO: 294863 - RNA, 19 nt, Human
aaaagcacaccgcacuaca

SEQ ID NO: 294864 - RNA, 24 nt, Human
aaacaaaacagaagacuggucccc

SEQ ID NO: 294865 - RNA, 25 nt, Human
aaacaaaacagaagacuggucccca

SEQ ID NO: 294866 - RNA, 23 nt, Human
aaacagaagacugguccccaggg

SEQ ID NO: 294867 - RNA, 18 nt, Human
aaaugcccucccuaaauc

SEQ ID NO: 294868 - RNA, 19 nt, Human
aacagaagacugguccccc

SEQ ID NO: 294869 - RNA, 21 nt, Human
aaccacugaagucaggagcag

SEQ ID NO: 294870 - RNA, 19 nt, Human
aagaggaacuguuggagug

SEQ ID NO: 294871 - RNA, 23 nt, Human
aagcuggcugccugggcugagcc

SEQ ID NO: 294872 - RNA, 25 nt, Human
acaaaacacaacacgggccgccgcg

SEQ ID NO: 294873 - RNA, 22 nt, Human
acaaaacagaagacuggucccc

SEQ ID NO: 294874 - RNA, 18 nt, Human
acagagccuccuccaagg

SEQ ID NO: 294875 - RNA, 27 nt, Human
acagagccuccuccaaggccuugauaa

SEQ ID NO: 294876 - RNA, 22 nt, Human
acagcacaaaacacaacacggg

SEQ ID NO: 294877 - RNA, 21 nt, Human
accaugcuuugggggaagauu

SEQ ID NO: 294878 - RNA, 20 nt, Human
acccuuccaccaguggcacc

SEQ ID NO: 294879 - RNA, 19 nt, Human
acucgggaaagaggaacug

SEQ ID NO: 294880 - RNA, 22 nt, Human
acugaaaugccaguuuaaucca

SEQ ID NO: 294881 - RNA, 20 nt, Human
agaaggucuaugcacaagga

SEQ ID NO: 294882 - RNA, 19 nt, Human
agaggaacuguuggagugg

SEQ ID NO: 294883 - RNA, 24 nt, Human
agcucagcccaaagcuggcugccu

SEQ ID NO: 294884 - RNA, 21 nt, Human
aggacauacagagccuccucc

SEQ ID NO: 294885 - RNA, 22 nt, Human
aggaggcuuguagguuacuugg

SEQ ID NO: 294886 - RNA, 20 nt, Human
aggagggaggcaugggaugg

SEQ ID NO: 294887 - RNA, 18 nt, Human
aggagggcaggggcccug

SEQ ID NO: 294888 - RNA, 19 nt, Human
aggaggugggggaagucaa

SEQ ID NO: 294889 - RNA, 18 nt, Human
agggggcgcacuggggac

SEQ ID NO: 294890 - RNA, 25 nt, Human
auacagagccuccuccaaccggagg

SEQ ID NO: 294891 - RNA, 21 nt, Human
caaaacagaagacuggucccc

SEQ ID NO: 294892 - RNA, 23 nt, Human
caaacaaugaaaaacaaaacaga

SEQ ID NO: 294893 - RNA, 22 nt, Human
caacaccccaaccaccuuacuc

SEQ ID NO: 294894 - RNA, 20 nt, Human
caagaggucaugaugcccuu

SEQ ID NO: 294895 - RNA, 21 nt, Human
cacacuucccuuccuuaucuu

SEQ ID NO: 294896 - RNA, 21 nt, Human
caccccauacugucuuggaac

SEQ ID NO: 294897 - RNA, 20 nt, Human
caccgcacuacacuacuggc

SEQ ID NO: 294898 - RNA, 18 nt, Human
cacuggggaccugggcag

SEQ ID NO: 294899 - RNA, 25 nt, Human
cagagccuccuccaaggccuugaua

SEQ ID NO: 294900 - RNA, 21 nt, Human
cagagcuccuccguuguuucc

SEQ ID NO: 294901 - RNA, 20 nt, Human
cagcccaaagcuggcugccu

SEQ ID NO: 294902 - RNA, 22 nt, Human
caggagggcaggggcccuguug

SEQ ID NO: 294903 - RNA, 22 nt, Human
caggggcagaagggggugggag

SEQ ID NO: 294904 - RNA, 22 nt, Human
caguauucuggggguuagcccu

SEQ ID NO: 294905 - RNA, 20 nt, Human
ccacagaggccccucugacc

SEQ ID NO: 294906 - RNA, 29 nt, Human
ccacccgccaucacguaaaagcacaccgg

SEQ ID NO: 294907 - RNA, 22 nt, Human
ccagggaugguucauuccuagc

SEQ ID NO: 294908 - RNA, 23 nt, Human
ccauacugucuuggaacaugcag

SEQ ID NO: 294909 - RNA, 26 nt, Human
ccauacugucuuggaacaugcagugg

SEQ ID NO: 294910 - RNA, 21 nt, Human
cccaccauccacauccacaca

SEQ ID NO: 294911 - RNA, 19 nt, Human
cccaggggcagaagggggu

SEQ ID NO: 294912 - RNA, 18 nt, Human
cccauagaaugggacagu

SEQ ID NO: 294913 - RNA, 18 nt, Human
ccccacuacccccauggg

SEQ ID NO: 294914 - RNA, 20 nt, Human
ccccacuacccccaugggua

SEQ ID NO: 294915 - RNA, 21 nt, Human
ccccacuacccccauggguac

SEQ ID NO: 294916 - RNA, 27 nt, Human
cccccaccauccacauccacacacuuc

SEQ ID NO: 294917 - RNA, 25 nt, Human
cccccugggggggaagggguaggug

SEQ ID NO: 294918 - RNA, 21 nt, Human
ccccugaggacauacagagcc

SEQ ID NO: 294919 - RNA, 18 nt, Human
ccccugggggggaagggg

SEQ ID NO: 294920 - RNA, 21 nt, Human
ccgccgcccgcugcccacccg

SEQ ID NO: 294921 - RNA, 22 nt, Human
ccucucaaggggaccugguccu

SEQ ID NO: 294922 - RNA, 19 nt, Human
ccuggcuggcccacccuuc

SEQ ID NO: 294923 - RNA, 22 nt, Human
ccuggcuggcccacccuuccug

SEQ ID NO: 294924 - RNA, 19 nt, Human
ccugggcugagacuuucug

SEQ ID NO: 294925 - RNA, 21 nt, Human
ccuguuagcucagcccaaagc

SEQ ID NO: 294926 - RNA, 24 nt, Human
cgcccgcugcccacccgccaucac

SEQ ID NO: 294927 - RNA, 22 nt, Human
cgcguggacacagcacaaaaca

SEQ ID NO: 294928 - RNA, 22 nt, Human
cggcaccuggcaaggugaagga

SEQ ID NO: 294929 - RNA, 22 nt, Human
cuauucuacaccagccgaaaga

SEQ ID NO: 294930 - RNA, 18 nt, Human
cugccugggcugagcccu

SEQ ID NO: 294931 - RNA, 18 nt, Human
cuggcaaggugaaggacu

SEQ ID NO: 294932 - RNA, 22 nt, Human
cuuuaaccaggcuauggccacu

SEQ ID NO: 294933 - RNA, 18 nt, Human
gaaaaacaaaacagaaga

SEQ ID NO: 294934 - RNA, 18 nt, Human
gaagauggaggaguucag

SEQ ID NO: 294935 - RNA, 18 nt, Human
gaagucagagcuccuccg

SEQ ID NO: 294936 - RNA, 21 nt, Human
gacccaggggcagaagggggu

SEQ ID NO: 294937 - RNA, 21 nt, Human
gagcauggccuuggccccuac

SEQ ID NO: 294938 - RNA, 21 nt, Human
gaggccugggugcagguaagg

SEQ ID NO: 294939 - RNA, 20 nt, Human
gagugggguggggaggaggg

SEQ ID NO: 294940 - RNA, 21 nt, Human
gcccccaccauccacauccac

SEQ ID NO: 294941 - RNA, 18 nt, Human
gcccuguggcucuuggcc

SEQ ID NO: 294942 - RNA, 18 nt, Human
gcggagcccgccgcccgc

SEQ ID NO: 294943 - RNA, 19 nt, Human
gcguggacacagcacaaaa

SEQ ID NO: 294944 - RNA, 19 nt, Human
gcugccugggcugagcccu

SEQ ID NO: 294945 - RNA, 20 nt, Human
gcugcgcggagcccgccgcc

SEQ ID NO: 294946 - RNA, 18 nt, Human
ggaagucagagcuccucc

SEQ ID NO: 294947 - RNA, 20 nt, Human
ggacccaggggcagaagggg

SEQ ID NO: 294948 - RNA, 22 nt, Human
ggagaagucaguacgggggagg

SEQ ID NO: 294949 - RNA, 19 nt, Human
ggaggagggaggcauggga

SEQ ID NO: 294950 - RNA, 19 nt, Human
ggaggcaugggauggaugg

SEQ ID NO: 294951 - RNA, 20 nt, Human
ggagggggcgcuacacuacu

SEQ ID NO: 294952 - RNA, 21 nt, Human
ggagugggguggggaggaggg

SEQ ID NO: 294953 - RNA, 22 nt, Human
ggagugggguggggaggaggga

SEQ ID NO: 294954 - RNA, 21 nt, Human
ggcaggucugggguucucugg

SEQ ID NO: 294955 - RNA, 19 nt, Human
ggcguugggaagaggcuug

SEQ ID NO: 294956 - RNA, 19 nt, Human
gggaccugguccuaaaccu

SEQ ID NO: 294957 - RNA, 19 nt, Human
gggaggagggaggcauggg

SEQ ID NO: 294958 - RNA, 21 nt, Human
gggcagaagggggugggagaa

SEQ ID NO: 294959 - RNA, 18 nt, Human
ggggaagggguaggugcu

SEQ ID NO: 294960 - RNA, 19 nt, Human
ggggagaggccgcccugug

SEQ ID NO: 294961 - RNA, 30 nt, Human; identical to SEQ ID NO: 294429

SEQ ID NO: 294962 - RNA, 24 nt, Human
ggggagggggucgccuuagcgcgu

SEQ ID NO: 294963 - RNA, 27 nt, Human
ggggcagaagggggugggagaagaagg

SEQ ID NO: 294964 - RNA, 19 nt, Human
gggguggggaggagggagg

SEQ ID NO: 294965 - RNA, 20 nt, Human
gggguggggaggagggaggc

SEQ ID NO: 294966 - RNA, 23 nt, Human
gugaaggacugaggcuucaggag

SEQ ID NO: 294967 - RNA, 19 nt, Human
uacagagccuccuccaagg

SEQ ID NO: 294968 - RNA, 20 nt, Human
uacagagccuccuccaaggg

SEQ ID NO: 294969 - RNA, 21 nt, Human
uaccaguauucuggggguuag

SEQ ID NO: 294970 - RNA, 19 nt, Human
uagcccugaaacucugagg

SEQ ID NO: 294971 - RNA, 23 nt, Human
uagcccugaaacucugaggccug

SEQ ID NO: 294972 - RNA, 24 nt, Human
uaggagaagucaguacgggggagg

SEQ ID NO: 294973 - RNA, 25 nt, Human
uaucuuaccaccccauacugucuug

SEQ ID NO: 294974 - RNA, 20 nt, Human
ucagcccaaagcuggcugcc

SEQ ID NO: 294975 - RNA, 18 nt, Human
ucaguccccugaggacau

SEQ ID NO: 294976 - RNA, 24 nt, Human
uccaaaacuugagcauugaucuug

SEQ ID NO: 294977 - RNA, 26 nt, Human
uccacacacuucccuuccuuaucuua

SEQ ID NO: 294978 - RNA, 19 nt, Human
uccacauccacacacuucc

SEQ ID NO: 294979 - RNA, 22 nt, Human
uccaccaguggcaccucuggag

SEQ ID NO: 294980 - RNA, 20 nt, Human
uccaugcccccaccauccac

SEQ ID NO: 294981 - RNA, 24 nt, Human
uccuccguuguuuccacauacucc

SEQ ID NO: 294982 - RNA, 21 nt, Human
ugaaaaacaaaacagaagacu

SEQ ID NO: 294983 - RNA, 18 nt, Human
ugacccuuccaccagugg

SEQ ID NO: 294984 - RNA, 24 nt, Human
ugcccuagcucccugccuccccaa

SEQ ID NO: 294985 - RNA, 18 nt, Human
ugcccuuaaccacugaag

SEQ ID NO: 294986 - RNA, 20 nt, Human
ugcccuuaaccacugaaguc

SEQ ID NO: 294987 - RNA, 19 nt, Human
ugccugggcugagcccuau

SEQ ID NO: 294988 - RNA, 23 nt, Human
ugccugggcugagcccuauuaug

SEQ ID NO: 294989 - RNA, 22 nt, Human
ugcuggggcuccgcuccggggg

SEQ ID NO: 294990 - RNA, 21 nt, Human
uggaaacgucaaacaaugaaa

SEQ ID NO: 294991 - RNA, 25 nt, Human
uggaaacgucaaacaaugaaaaaca

SEQ ID NO: 294992 - RNA, 18 nt, Human
uggaaggaggugaagggg

SEQ ID NO: 294993 - RNA, 21 nt, Human
uggaaggaggugaaggggcug

SEQ ID NO: 294994 - RNA, 22 nt, Human
uggaaggaggugaaggggcugg

SEQ ID NO: 294995 - RNA, 18 nt, Human
uggaaucuggaggauguu

SEQ ID NO: 294996 - RNA, 22 nt, Human
uggaaucuggaggauguuguca

SEQ ID NO: 294997 - RNA, 21 nt, Human
uggacacagcacaaaacacaa

SEQ ID NO: 294998 - RNA, 19 nt, Human
uggaggauguugucagucc

SEQ ID NO: 294999 - RNA, 21 nt, Human
uggagugggguggggaggagg

SEQ ID NO: 295000 - RNA, 23 nt, Human
uggauggccggggacccaggggc

SEQ ID NO: 295001 - RNA, 25 nt, Human
uggcaaaugguucuuggugucuaca

SEQ ID NO: 295002 - RNA, 19 nt, Human
uggcaaggugaaggacuga

SEQ ID NO: 295003 - RNA, 21 nt, Human
uggcaaggugaaggacugagg

SEQ ID NO: 295004 - RNA, 23 nt, Human
uggcaccucuggaguacccagca

SEQ ID NO: 295005 - RNA, 24 nt, Human
uggcaccucuggaguacccagcac

SEQ ID NO: 295006 - RNA, 18 nt, Human
uggcugccugggcugagc

SEQ ID NO: 295007 - RNA, 20 nt, Human
ugggaagaggcuugguagca

SEQ ID NO: 295008 - RNA, 19 nt, Human
ugggaaggguccagccuag

SEQ ID NO: 295009 - RNA, 20 nt, Human
ugggaaggguccagccuagu

SEQ ID NO: 295010 - RNA, 19 nt, Human
ugggauggaugggccugau

SEQ ID NO: 295011 - RNA, 20 nt, Human
ugggcugguuggggagaggc

SEQ ID NO: 295012 - RNA, 22 nt, Human
uggggaccugggcaguggccuu

SEQ ID NO: 295013 - RNA, 20 nt, Human
uggggaggagggaggcaugg

SEQ ID NO: 295014 - RNA, 21 nt, Human
uggggaggagggaggcauggg

SEQ ID NO: 295015 - RNA, 18 nt, Human
ugggugcagguaaggaga

SEQ ID NO: 295016 - RNA, 26 nt, Human
ugguagcaaaaugcccucccuaaauc

SEQ ID NO: 295017 - RNA, 21 nt, Human
ugguccccagggcguugggaa

SEQ ID NO: 295018 - RNA, 20 nt, Human
uggucccugcccuagcuccc

SEQ ID NO: 295019 - RNA, 23 nt, Human
ugguuuauggcuggaaucuggag

SEQ ID NO: 295020 - RNA, 18 nt, Human
uguaagggcaggucuggg

SEQ ID NO: 295021 - RNA, 23 nt, Human
ugucuacaguaaccccacuaccc

SEQ ID NO: 295022 - RNA, 19 nt, Human
uguggcaaaugguucuugg

SEQ ID NO: 295023 - RNA, 23 nt, Human
uguggcaaaugguucuugguguc

SEQ ID NO: 295024 - RNA, 20 nt, Human
uuauguagugggaagggucc

SEQ ID NO: 295025 - RNA, 22 nt, Human
uuccuagcuaucugcuuugugc

SEQ ID NO: 295026 - RNA, 22 nt, Human
uuccuagcuaucugcuuugugc

SEQ ID NO: 295027 - RNA, 23 nt, Human
uuccuagcuaucugcuuugugcu

SEQ ID NO: 295028 - RNA, 24 nt, Human
uuccuagcuaucugcuuugugcuu

SEQ ID NO: 295029 - RNA, 20 nt, Human
uugauuuggaagauggagga

SEQ ID NO: 295030 - RNA, 21 nt, Human
uuguuucuguuucccaagggg

SEQ ID NO: 295031 - RNA, 21 nt, Human
uuguuugaggaggaggugggg

SEQ ID NO: 295032 - RNA, 18 nt, Human
uuuucagaacuaggaggc

SEQ ID NO: 295033 - RNA, 21 nt, Human
aaaacacaacacgggccgccg

SEQ ID NO: 295034 - RNA, 19 nt, Human
aaaagcacaccgcacuaca

SEQ ID NO: 295035 - RNA, 25 nt, Human
aaacaaaacagaagacuggucccca

SEQ ID NO: 295036 - RNA, 25 nt, Human
aaacaaaacagaagacuggucccca

SEQ ID NO: 295037 - RNA, 23 nt, Human
aaacagaagacugguccccaggg

SEQ ID NO: 295038 - RNA, 18 nt, Human
aaaugcccucccuaaauc

SEQ ID NO: 295039 - RNA, 19 nt, Human
aacagaagacugguccccc

SEQ ID NO: 295040 - RNA, 23 nt, Human
aagcuggcugccugggcugagcc

SEQ ID NO: 295041 - RNA, 21 nt, Human
aaugaaaaacaaaacagaaga

SEQ ID NO: 295042 - RNA, 25 nt, Human
acaaaacacaacacgggccgccgcg

SEQ ID NO: 295043 - RNA, 22 nt, Human
acaaaacagaagacuggucccc

SEQ ID NO: 295044 - RNA, 27 nt, Human
acagagccuccuccaaggccuugauaa

SEQ ID NO: 295045 - RNA, 22 nt, Human
acagcacaaaacacaacacggg

SEQ ID NO: 295046 - RNA, 21 nt, Human
accaugcuuugggggaagauu

SEQ ID NO: 295047 - RNA, 19 nt, Human
acucgggaaagaggaacug

SEQ ID NO: 295048 - RNA, 22 nt, Human
acugaaaugccaguuuaaucca

SEQ ID NO: 295049 - RNA, 20 nt, Human
agaaggucuaugcacaagga

SEQ ID NO: 295050 - RNA, 19 nt, Human
agaggaacuguuggagugg

SEQ ID NO: 295051 - RNA, 24 nt, Human
agcucagcccaaagcuggcugccu

SEQ ID NO: 295052 - RNA, 21 nt, Human
aggacauacagagccuccucc

SEQ ID NO: 295053 - RNA, 22 nt, Human
aggaggcuuguagguuacuugg

SEQ ID NO: 295054 - RNA, 20 nt, Human
aggagggaggcaugggaugg

SEQ ID NO: 295055 - RNA, 18 nt, Human
aggagggcaggggcccug

SEQ ID NO: 295056 - RNA, 19 nt, Human
aggaggugggggaagucaa

SEQ ID NO: 295057 - RNA, 23 nt, Human
agggaggcaugggauggaugggg

SEQ ID NO: 295058 - RNA, 18 nt, Human
agggggcgcacuggggac

SEQ ID NO: 295059 - RNA, 25 nt, Human
auacagagccuccuccaaccggagg

SEQ ID NO: 295060 - RNA, 21 nt, Human
caaaacagaagacuggucccc

SEQ ID NO: 295061 - RNA, 23 nt, Human
caaacaaugaaaaacaaaacaga

SEQ ID NO: 295062 - RNA, 22 nt, Human
caacaccccaaccaccuuacuc

SEQ ID NO: 295063 - RNA, 20 nt, Human
caagaggucaugaugcccuu

SEQ ID NO: 295064 - RNA, 21 nt, Human
cacacuucccuuccuuaucuu

SEQ ID NO: 295065 - RNA, 21 nt, Human
caccccauacugucuuggaac

SEQ ID NO: 295066 - RNA, 20 nt, Human
caccgcacuacacuacuggc

SEQ ID NO: 295067 - RNA, 18 nt, Human
cacuggggaccugggcag

SEQ ID NO: 295068 - RNA, 25 nt, Human
cagagccuccuccaaggccuugaua

SEQ ID NO: 295069 - RNA, 26 nt, Human
cagcauccagugcggauuccaaucuu

SEQ ID NO: 295070 - RNA, 22 nt, Human
caggagggcaggggcccuguug

SEQ ID NO: 295071 - RNA, 22 nt, Human
caggggcagaagggggugggag

SEQ ID NO: 295072 - RNA, 22 nt, Human
caguauucuggggguuagcccu

SEQ ID NO: 295073 - RNA, 20 nt, Human
ccacagaggccccucugacc

SEQ ID NO: 295074 - RNA, 23 nt, Human
ccauacugucuuggaacaugcag

SEQ ID NO: 295075 - RNA, 26 nt, Human
ccauacugucuuggaacaugcagugg

SEQ ID NO: 295076 - RNA, 21 nt, Human
cccaccauccacauccacaca

SEQ ID NO: 295077 - RNA, 30 nt, Human; identical to SEQ ID NO: 294382

SEQ ID NO: 295078 - RNA, 19 nt, Human
ccccacuacccccaugggu

SEQ ID NO: 295079 - RNA, 19 nt, Human
ccccacuacccccaugggu

SEQ ID NO: 295080 - RNA, 21 nt, Human
ccccacuacccccauggguac

SEQ ID NO: 295081 - RNA, 27 nt, Human
cccccaccauccacauccacacacuuc

SEQ ID NO: 295082 - RNA, 25 nt, Human
cccccugggggggaagggguaggug

SEQ ID NO: 295083 - RNA, 21 nt, Human
ccccugaggacauacagagcc

SEQ ID NO: 295084 - RNA, 22 nt, Human
cccuccugucgcaauuuucucc

SEQ ID NO: 295085 - RNA, 26 nt, Human
ccuccugucgcaauuuucuccgaguc

SEQ ID NO: 295086 - RNA, 19 nt, Human
ccuggcuggcccacccuuc

SEQ ID NO: 295087 - RNA, 22 nt, Human
ccuggcuggcccacccuuccug

SEQ ID NO: 295088 - RNA, 19 nt, Human
ccugggcugagacuuucug

SEQ ID NO: 295089 - RNA, 21 nt, Human
ccuguuagcucagcccaaagc

SEQ ID NO: 295090 - RNA, 24 nt, Human
cgcccgcugcccacccgccaucac

SEQ ID NO: 295091 - RNA, 18 nt, Human
cgccgcccgcugcccacc

SEQ ID NO: 295092 - RNA, 22 nt, Human
cgcguggacacagcacaaaaca

SEQ ID NO: 295093 - RNA, 22 nt, Human
cggcaccuggcaaggugaagga

SEQ ID NO: 295094 - RNA, 23 nt, Human
cggcugcgcggagcccgccgccc

SEQ ID NO: 295095 - RNA, 22 nt, Human
cuauucuacaccagccgaaaga

SEQ ID NO: 295096 - RNA, 22 nt, Human
cucagcccaaagcuggcugccu

SEQ ID NO: 295097 - RNA, 21 nt, Human
cucucaaggggaccugguccu

SEQ ID NO: 295098 - RNA, 23 nt, Human
cugaggccugggugcagguaagg

SEQ ID NO: 295099 - RNA, 18 nt, Human
cugccugggcugagcccu

SEQ ID NO: 295100 - RNA, 18 nt, Human
cuggcaaggugaaggacu

SEQ ID NO: 295101 - RNA, 18 nt, Human
gaagauggaggaguucag

SEQ ID NO: 295102 - RNA, 21 nt, Human
gacccaggggcagaagggggu

SEQ ID NO: 295103 - RNA, 21 nt, Human
gagcauggccuuggccccuac

SEQ ID NO: 295104 - RNA, 18 nt, Human
gaggagggaggcauggga

SEQ ID NO: 295105 - RNA, 20 nt, Human
gagugggguggggaggaggg

SEQ ID NO: 295106 - RNA, 21 nt, Human
gcccccaccauccacauccac

SEQ ID NO: 295107 - RNA, 18 nt, Human
gcccuguggcucuuggcc

SEQ ID NO: 295108 - RNA, 18 nt, Human
gcggagcccgccgcccgc

SEQ ID NO: 295109 - RNA, 19 nt, Human
gcguggacacagcacaaaa

SEQ ID NO: 295110 - RNA, 20 nt, Human
gcugcgcggagcccgccgcc

SEQ ID NO: 295111 - RNA, 20 nt, Human
ggacccaggggcagaagggg

SEQ ID NO: 295112 - RNA, 22 nt, Human
ggagaagucaguacgggggagg

SEQ ID NO: 295113 - RNA, 20 nt, Human
ggagggggcgcuacacuacu

SEQ ID NO: 295114 - RNA, 21 nt, Human
ggagugggguggggaggaggg

SEQ ID NO: 295115 - RNA, 22 nt, Human
ggagugggguggggaggaggga

SEQ ID NO: 295116 - RNA, 21 nt, Human
ggcaggucugggguucucugg

SEQ ID NO: 295117 - RNA, 19 nt, Human
ggcguugggaagaggcuug

SEQ ID NO: 295118 - RNA, 19 nt, Human
gggaccugguccuaaaccu

SEQ ID NO: 295119 - RNA, 19 nt, Human
gggaggagggaggcauggg

SEQ ID NO: 295120 - RNA, 20 nt, Human
gggaggcaugggauggaugg

SEQ ID NO: 295121 - RNA, 21 nt, Human
gggcagaagggggugggagaa

SEQ ID NO: 295122 - RNA, 19 nt, Human
gggccaaaccuccaccccc

SEQ ID NO: 295123 - RNA, 19 nt, Human
gggcguugggaagaggcuu

SEQ ID NO: 295124 - RNA, 18 nt, Human
ggggaagggguaggugcu

SEQ ID NO: 295125 - RNA, 24 nt, Human
ggggagggggucgccuuagcgcgu

SEQ ID NO: 295126 - RNA, 19 nt, Human
gggguggggaggagggagg

SEQ ID NO: 295127 - RNA, 20 nt, Human
gggguggggaggagggaggc

SEQ ID NO: 295128 - RNA, 21 nt, Human
guccaugcccccaccauccac

SEQ ID NO: 295129 - RNA, 23 nt, Human
gugaaggacugaggcuucaggag

SEQ ID NO: 295130 - RNA, 21 nt, Human
guuuauggcuggaaucuggag

SEQ ID NO: 295131 - RNA, 19 nt, Human
uacagagccuccuccaagg

SEQ ID NO: 295132 - RNA, 20 nt, Human
uacagagccuccuccaaggg

SEQ ID NO: 295133 - RNA, 21 nt, Human
uaccaguauucuggggguuag

SEQ ID NO: 295134 - RNA, 19 nt, Human
uagcccugaaacucugagg

SEQ ID NO: 295135 - RNA, 23 nt, Human
uagcccugaaacucugaggccug

SEQ ID NO: 295136 - RNA, 24 nt, Human
uaggagaagucaguacgggggagg

SEQ ID NO: 295137 - RNA, 25 nt, Human
uaucuuaccaccccauacugucuug

SEQ ID NO: 295138 - RNA, 22 nt, Human
uauggagagaacuggugggcug

SEQ ID NO: 295139 - RNA, 19 nt, Human
uauguagugggaagggucc

SEQ ID NO: 295140 - RNA, 20 nt, Human
ucagcccaaagcuggcugcc

SEQ ID NO: 295141 - RNA, 18 nt, Human
ucaguccccugaggacau

SEQ ID NO: 295142 - RNA, 24 nt, Human
uccaaaacuugagcauugaucuug

SEQ ID NO: 295143 - RNA, 26 nt, Human
uccacacacuucccuuccuuaucuua

SEQ ID NO: 295144 - RNA, 19 nt, Human
uccacauccacacacuucc

SEQ ID NO: 295145 - RNA, 22 nt, Human
uccaccaguggcaccucuggag

SEQ ID NO: 295146 - RNA, 19 nt, Human
ugaaaaacaaaacagaaga

SEQ ID NO: 295147 - RNA, 21 nt, Human
ugaaaaacaaaacagaagacu

SEQ ID NO: 295148 - RNA, 18 nt, Human
ugacccuuccaccagugg

SEQ ID NO: 295149 - RNA, 22 nt, Human
ugacccuuccaccaguggcacc

SEQ ID NO: 295150 - RNA, 26 nt, Human
ugagauaaccagcauucacgggaccc

SEQ ID NO: 295151 - RNA, 24 nt, Human
ugcccuagcucccugccuccccaa

SEQ ID NO: 295152 - RNA, 19 nt, Human
ugccugggcugagcccuau

SEQ ID NO: 295153 - RNA, 23 nt, Human
ugccugggcugagcccuauuaug

SEQ ID NO: 295154 - RNA, 22 nt, Human
ugcuggggcuccgcuccggggg

SEQ ID NO: 295155 - RNA, 21 nt, Human
uggaaacgucaaacaaugaaa

SEQ ID NO: 295156 - RNA, 25 nt, Human
uggaaacgucaaacaaugaaaaaca

SEQ ID NO: 295157 - RNA, 18 nt, Human
uggaaggaggugaagggg

SEQ ID NO: 295158 - RNA, 21 nt, Human
uggaaggaggugaaggggcug

SEQ ID NO: 295159 - RNA, 22 nt, Human
uggaaggaggugaaggggcugg

SEQ ID NO: 295160 - RNA, 18 nt, Human
uggaaucuggaggauguu

SEQ ID NO: 295161 - RNA, 22 nt, Human
uggaaucuggaggauguuguca

SEQ ID NO: 295162 - RNA, 21 nt, Human
uggacacagcacaaaacacaa

SEQ ID NO: 295163 - RNA, 19 nt, Human
uggaggauguugucagucc

SEQ ID NO: 295164 - RNA, 21 nt, Human
uggagugggguggggaggagg

SEQ ID NO: 295165 - RNA, 23 nt, Human
uggauggccggggacccaggggc

SEQ ID NO: 295166 - RNA, 29 nt, Human
uggcaaaugguucuuggugucuacaguaa

SEQ ID NO: 295167 - RNA, 19 nt, Human
uggcaaggugaaggacuga

SEQ ID NO: 295168 - RNA, 21 nt, Human
uggcaaggugaaggacugagg

SEQ ID NO: 295169 - RNA, 23 nt, Human
uggcaccucuggaguacccagca

SEQ ID NO: 295170 - RNA, 24 nt, Human
uggcaccucuggaguacccagcac

SEQ ID NO: 295171 - RNA, 18 nt, Human
uggcugccugggcugagc

SEQ ID NO: 295172 - RNA, 21 nt, Human
uggcugccugggcugagcccu

SEQ ID NO: 295173 - RNA, 19 nt, Human
ugggaaggguccagccuag

SEQ ID NO: 295174 - RNA, 20 nt, Human
ugggaaggguccagccuagu

SEQ ID NO: 295175 - RNA, 20 nt, Human
ugggaaggguccagccuagu

SEQ ID NO: 295176 - RNA, 19 nt, Human
ugggauggaugggccugau

SEQ ID NO: 295177 - RNA, 20 nt, Human
ugggcugguuggggagaggc

SEQ ID NO: 295178 - RNA, 22 nt, Human
uggggaccugggcaguggccuu

SEQ ID NO: 295179 - RNA, 20 nt, Human
uggggaggagggaggcaugg

SEQ ID NO: 295180 - RNA, 21 nt, Human
uggggaggagggaggcauggg

SEQ ID NO: 295181 - RNA, 18 nt, Human
ugggugcagguaaggaga

SEQ ID NO: 295182 - RNA, 26 nt, Human
ugguagcaaaaugcccucccuaaauc

SEQ ID NO: 295183 - RNA, 21 nt, Human
ugguccccagggcguugggaa

SEQ ID NO: 295184 - RNA, 20 nt, Human
uggucccugcccuagcuccc

SEQ ID NO: 295185 - RNA, 18 nt, Human
uguaagggcaggucuggg

SEQ ID NO: 295186 - RNA, 23 nt, Human
ugucuacaguaaccccacuaccc

SEQ ID NO: 295187 - RNA, 19 nt, Human
uguggcaaaugguucuugg

SEQ ID NO: 295188 - RNA, 23 nt, Human
uguggcaaaugguucuugguguc

SEQ ID NO: 295189 - RNA, 20 nt, Human
uugauuuggaagauggagga

SEQ ID NO: 295190 - RNA, 19 nt, Human
uuggaagauggaggaguuc

SEQ ID NO: 295191 - RNA, 21 nt, Human
uuguuucuguuucccaagggg

SEQ ID NO: 295192 - RNA, 21 nt, Human
uuguuugaggaggaggugggg

SEQ ID NO: 295193 - RNA, 21 nt, Human
uuuaaccaggcuauggccacu

SEQ ID NO: 295194 - RNA, 22 nt, Human
uuuagggccaaaccuccacccc

SEQ ID NO: 295195 - RNA, 18 nt, Human
uuuucagaacuaggaggc

SEQ ID NO: 295196 - RNA, 21 nt, Human
aaaacacaacacgggccgccg

SEQ ID NO: 295197 - RNA, 24 nt, Human
aaaacagaagacugguccccaggg

SEQ ID NO: 295198 - RNA, 19 nt, Human
aaaagcacaccgcacuaca

SEQ ID NO: 295199 - RNA, 25 nt, Human
aaacaaaacagaagacuggucccca

SEQ ID NO: 295200 - RNA, 25 nt, Human
aaacaaaacagaagacuggucccca

SEQ ID NO: 295201 - RNA, 20 nt, Human
aaaugcccucccuaaauccc

SEQ ID NO: 295202 - RNA, 19 nt, Human
aacagaagacugguccccc

SEQ ID NO: 295203 - RNA, 23 nt, Human
aagcuggcugccugggcugagcc

SEQ ID NO: 295204 - RNA, 25 nt, Human
acaaaacacaacacgggccgccgcg

SEQ ID NO: 295205 - RNA, 22 nt, Human
acaaaacagaagacuggucccc

SEQ ID NO: 295206 - RNA, 18 nt, Human
acagagccuccuccaagg

SEQ ID NO: 295207 - RNA, 27 nt, Human
acagagccuccuccaaggccuugauaa

SEQ ID NO: 295208 - RNA, 22 nt, Human
acagcacaaaacacaacacggg

SEQ ID NO: 295209 - RNA, 21 nt, Human
accaugcuuugggggaagauu

SEQ ID NO: 295210 - RNA, 19 nt, Human
acucgggaaagaggaacug

SEQ ID NO: 295211 - RNA, 22 nt, Human
acugaaaugccaguuuaaucca

SEQ ID NO: 295212 - RNA, 20 nt, Human
agaaggucuaugcacaagga

SEQ ID NO: 295213 - RNA, 19 nt, Human
agaggaacuguuggagugg

SEQ ID NO: 295214 - RNA, 24 nt, Human
agcucagcccaaagcuggcugccu

SEQ ID NO: 295215 - RNA, 21 nt, Human
aggacauacagagccuccucc

SEQ ID NO: 295216 - RNA, 23 nt, Human
aggagaagucaguacgggggagg

SEQ ID NO: 295217 - RNA, 22 nt, Human
aggaggcuuguagguuacuugg

SEQ ID NO: 295218 - RNA, 20 nt, Human
aggagggaggcaugggaugg

SEQ ID NO: 295219 - RNA, 18 nt, Human
aggagggcaggggcccug

SEQ ID NO: 295220 - RNA, 19 nt, Human
aggaggugggggaagucaa

SEQ ID NO: 295221 - RNA, 23 nt, Human
agggaggcaugggauggaugggg

SEQ ID NO: 295222 - RNA, 18 nt, Human
agggggcgcacuggggac

SEQ ID NO: 295223 - RNA, 25 nt, Human
auacagagccuccuccaaccggagg

SEQ ID NO: 295224 - RNA, 21 nt, Human
caaaacagaagacuggucccc

SEQ ID NO: 295225 - RNA, 23 nt, Human
caaacaaugaaaaacaaaacaga

SEQ ID NO: 295226 - RNA, 22 nt, Human
caacaccccaaccaccuuacuc

SEQ ID NO: 295227 - RNA, 20 nt, Human
caagaggucaugaugcccuu

SEQ ID NO: 295228 - RNA, 21 nt, Human
cacacuucccuuccuuaucuu

SEQ ID NO: 295229 - RNA, 21 nt, Human
caccccauacugucuuggaac

SEQ ID NO: 295230 - RNA, 20 nt, Human
caccgcacuacacuacuggc

SEQ ID NO: 295231 - RNA, 18 nt, Human
cacuggggaccugggcag

SEQ ID NO: 295232 - RNA, 25 nt, Human
cagagccuccuccaaggccuugaua

SEQ ID NO: 295233 - RNA, 20 nt, Human
cagcccaaagcuggcugccu

SEQ ID NO: 295234 - RNA, 22 nt, Human
caggagggcaggggcccuguug

SEQ ID NO: 295235 - RNA, 22 nt, Human
caggggcagaagggggugggag

SEQ ID NO: 295236 - RNA, 22 nt, Human
caguauucuggggguuagcccu

SEQ ID NO: 295237 - RNA, 23 nt, Human
ccacacacuucccuuccuuaucu

SEQ ID NO: 295238 - RNA, 23 nt, Human
ccauacugucuuggaacaugcag

SEQ ID NO: 295239 - RNA, 26 nt, Human
ccauacugucuuggaacaugcagugg

SEQ ID NO: 295240 - RNA, 21 nt, Human
cccacagaggccccucugacc

SEQ ID NO: 295241 - RNA, 21 nt, Human
cccaccauccacauccacaca

SEQ ID NO: 295242 - RNA, 30 nt, Human; identical to SEQ ID NO: 294382

SEQ ID NO: 295243 - RNA, 19 nt, Human
cccaggggcagaagggggu

SEQ ID NO: 295244 - RNA, 19 nt, Human
ccccacuacccccaugggu

SEQ ID NO: 295245 - RNA, 20 nt, Human
ccccacuacccccaugggua

SEQ ID NO: 295246 - RNA, 21 nt, Human
ccccacuacccccauggguac

SEQ ID NO: 295247 - RNA, 27 nt, Human
cccccaccauccacauccacacacuuc

SEQ ID NO: 295248 - RNA, 25 nt, Human
cccccugggggggaagggguaggug

SEQ ID NO: 295249 - RNA, 21 nt, Human
ccccugaggacauacagagcc

SEQ ID NO: 295250 - RNA, 21 nt, Human
ccgccgcccgcugcccacccg

SEQ ID NO: 295251 - RNA, 22 nt, Human
ccuggcuggcccacccuuccug

SEQ ID NO: 295252 - RNA, 19 nt, Human
ccugggcugagacuuucug

SEQ ID NO: 295253 - RNA, 21 nt, Human
ccugggcugagcccuauuaug

SEQ ID NO: 295254 - RNA, 21 nt, Human
ccuguuagcucagcccaaagc

SEQ ID NO: 295255 - RNA, 24 nt, Human
cgcccgcugcccacccgccaucac

SEQ ID NO: 295256 - RNA, 19 nt, Human
cgcccuguggcucuuggcc

SEQ ID NO: 295257 - RNA, 22 nt, Human
cgcguggacacagcacaaaaca

SEQ ID NO: 295258 - RNA, 22 nt, Human
cggcaccuggcaaggugaagga

SEQ ID NO: 295259 - RNA, 22 nt, Human
cuauucuacaccagccgaaaga

SEQ ID NO: 295260 - RNA, 21 nt, Human
cucucaaggggaccugguccu

SEQ ID NO: 295261 - RNA, 23 nt, Human
cugaggccugggugcagguaagg

SEQ ID NO: 295262 - RNA, 18 nt, Human
cugccugggcugagcccu

SEQ ID NO: 295263 - RNA, 18 nt, Human
cuggcaaggugaaggacu

SEQ ID NO: 295264 - RNA, 22 nt, Human
cuuguuugaggaggaggugggg

SEQ ID NO: 295265 - RNA, 22 nt, Human
cuuuaaccaggcuauggccacu

SEQ ID NO: 295266 - RNA, 18 nt, Human
gaaaaacaaaacagaaga

SEQ ID NO: 295267 - RNA, 18 nt, Human
gaagauggaggaguucag

SEQ ID NO: 295268 - RNA, 21 nt, Human
gacccaggggcagaagggggu

SEQ ID NO: 295269 - RNA, 21 nt, Human
gagcauggccuuggccccuac

SEQ ID NO: 295270 - RNA, 20 nt, Human
gagugggguggggaggaggg

SEQ ID NO: 295271 - RNA, 21 nt, Human
gcccccaccauccacauccac

SEQ ID NO: 295272 - RNA, 18 nt, Human
gcccuguggcucuuggcc

SEQ ID NO: 295273 - RNA, 20 nt, Human
gccuggcuggcccacccuuc

SEQ ID NO: 295274 - RNA, 18 nt, Human
gcggagcccgccgcccgc

SEQ ID NO: 295275 - RNA, 19 nt, Human
gcguggacacagcacaaaa

SEQ ID NO: 295276 - RNA, 20 nt, Human
gcugcgcggagcccgccgcc

SEQ ID NO: 295277 - RNA, 20 nt, Human
ggacccaggggcagaagggg

SEQ ID NO: 295278 - RNA, 22 nt, Human
ggagaagucaguacgggggagg

SEQ ID NO: 295279 - RNA, 19 nt, Human
ggaggagggaggcauggga

SEQ ID NO: 295280 - RNA, 19 nt, Human
ggaggcaugggauggaugg

SEQ ID NO: 295281 - RNA, 20 nt, Human
ggagggggcgcuacacuacu

SEQ ID NO: 295282 - RNA, 21 nt, Human
ggagugggguggggaggaggg

SEQ ID NO: 295283 - RNA, 22 nt, Human
ggagugggguggggaggaggga

SEQ ID NO: 295284 - RNA, 21 nt, Human
ggcaggucugggguucucugg

SEQ ID NO: 295285 - RNA, 19 nt, Human
ggcguugggaagaggcuug

SEQ ID NO: 295286 - RNA, 19 nt, Human
gggaccugguccuaaaccu

SEQ ID NO: 295287 - RNA, 19 nt, Human
gggaggagggaggcauggg

SEQ ID NO: 295288 - RNA, 21 nt, Human
gggcagaagggggugggagaa

SEQ ID NO: 295289 - RNA, 19 nt, Human
gggcguugggaagaggcuu

SEQ ID NO: 295290 - RNA, 18 nt, Human
ggggaagggguaggugcu

SEQ ID NO: 295291 - RNA, 24 nt, Human
ggggagggggucgccuuagcgcgu

SEQ ID NO: 295292 - RNA, 27 nt, Human
ggggcagaagggggugggagaagaagg

SEQ ID NO: 295293 - RNA, 19 nt, Human
gggguggggaggagggagg

SEQ ID NO: 295294 - RNA, 20 nt, Human
gggguggggaggagggaggc

SEQ ID NO: 295295 - RNA, 23 nt, Human
gugaaggacugaggcuucaggag

SEQ ID NO: 295296 - RNA, 19 nt, Human
uacagagccuccuccaagg

SEQ ID NO: 295297 - RNA, 20 nt, Human
uacagagccuccuccaaggg

SEQ ID NO: 295298 - RNA, 21 nt, Human
uaccaguauucuggggguuag

SEQ ID NO: 295299 - RNA, 19 nt, Human
uagcccugaaacucugagg

SEQ ID NO: 295300 - RNA, 23 nt, Human
uagcccugaaacucugaggccug

SEQ ID NO: 295301 - RNA, 25 nt, Human
uaucuuaccaccccauacugucuug

SEQ ID NO: 295302 - RNA, 20 nt, Human
ucagcccaaagcuggcugcc

SEQ ID NO: 295303 - RNA, 18 nt, Human
ucaguccccugaggacau

SEQ ID NO: 295304 - RNA, 24 nt, Human
uccaaaacuugagcauugaucuug

SEQ ID NO: 295305 - RNA, 19 nt, Human
uccacauccacacacuucc

SEQ ID NO: 295306 - RNA, 22 nt, Human
uccaccaguggcaccucuggag

SEQ ID NO: 295307 - RNA, 20 nt, Human
uccaugcccccaccauccac

SEQ ID NO: 295308 - RNA, 19 nt, Human
ugaaaaacaaaacagaaga

SEQ ID NO: 295309 - RNA, 21 nt, Human
ugaaaaacaaaacagaagacu

SEQ ID NO: 295310 - RNA, 18 nt, Human
ugacccuuccaccagugg

SEQ ID NO: 295311 - RNA, 22 nt, Human
ugacccuuccaccaguggcacc

SEQ ID NO: 295312 - RNA, 24 nt, Human
ugcccuagcucccugccuccccaa

SEQ ID NO: 295313 - RNA, 23 nt, Human
ugccugggcugagcccuauuaug

SEQ ID NO: 295314 - RNA, 22 nt, Human
ugcuggggcuccgcuccggggg

SEQ ID NO: 295315 - RNA, 21 nt, Human
uggaaacgucaaacaaugaaa

SEQ ID NO: 295316 - RNA, 25 nt, Human
uggaaacgucaaacaaugaaaaaca

SEQ ID NO: 295317 - RNA, 18 nt, Human
uggaaggaggugaagggg

SEQ ID NO: 295318 - RNA, 21 nt, Human
uggaaggaggugaaggggcug

SEQ ID NO: 295319 - RNA, 22 nt, Human
uggaaggaggugaaggggcugg

SEQ ID NO: 295320 - RNA, 18 nt, Human
uggaaucuggaggauguu

SEQ ID NO: 295321 - RNA, 22 nt, Human
uggaaucuggaggauguuguca

SEQ ID NO: 295322 - RNA, 21 nt, Human
uggacacagcacaaaacacaa

SEQ ID NO: 295323 - RNA, 19 nt, Human
uggaggauguugucagucc

SEQ ID NO: 295324 - RNA, 21 nt, Human
uggagugggguggggaggagg

SEQ ID NO: 295325 - RNA, 23 nt, Human
uggauggccggggacccaggggc

SEQ ID NO: 295326 - RNA, 29 nt, Human
uggcaaaugguucuuggugucuacaguaa

SEQ ID NO: 295327 - RNA, 19 nt, Human
uggcaaggugaaggacuga

SEQ ID NO: 295328 - RNA, 21 nt, Human
uggcaaggugaaggacugagg

SEQ ID NO: 295329 - RNA, 23 nt, Human
uggcaccucuggaguacccagca

SEQ ID NO: 295330 - RNA, 24 nt, Human
uggcaccucuggaguacccagcac

SEQ ID NO: 295331 - RNA, 18 nt, Human
uggcugccugggcugagc

SEQ ID NO: 295332 - RNA, 21 nt, Human
uggcugccugggcugagcccu

SEQ ID NO: 295333 - RNA, 19 nt, Human
ugggaaggguccagccuag

SEQ ID NO: 295334 - RNA, 20 nt, Human
ugggaaggguccagccuagu

SEQ ID NO: 295335 - RNA, 19 nt, Human
ugggauggaugggccugau

SEQ ID NO: 295336 - RNA, 20 nt, Human
ugggcugguuggggagaggc

SEQ ID NO: 295337 - RNA, 22 nt, Human
uggggaccugggcaguggccuu

SEQ ID NO: 295338 - RNA, 20 nt, Human
uggggaggagggaggcaugg

SEQ ID NO: 295339 - RNA, 21 nt, Human
uggggaggagggaggcauggg

SEQ ID NO: 295340 - RNA, 18 nt, Human
ugggugcagguaaggaga

SEQ ID NO: 295341 - RNA, 26 nt, Human
ugguagcaaaaugcccucccuaaauc

SEQ ID NO: 295342 - RNA, 21 nt, Human
ugguccccagggcguugggaa

SEQ ID NO: 295343 - RNA, 20 nt, Human
uggucccugcccuagcuccc

SEQ ID NO: 295344 - RNA, 23 nt, Human
ugguuuauggcuggaaucuggag

SEQ ID NO: 295345 - RNA, 18 nt, Human
uguaagggcaggucuggg

SEQ ID NO: 295346 - RNA, 23 nt, Human
ugucuacaguaaccccacuaccc

SEQ ID NO: 295347 - RNA, 19 nt, Human
uguggcaaaugguucuugg

SEQ ID NO: 295348 - RNA, 23 nt, Human
uguggcaaaugguucuugguguc

SEQ ID NO: 295349 - RNA, 20 nt, Human
uuauguagugggaagggucc

SEQ ID NO: 295350 - RNA, 20 nt, Human
uugauuuggaagauggagga

SEQ ID NO: 295351 - RNA, 21 nt, Human
uuguuucuguuucccaagggg

SEQ ID NO: 295352 - RNA, 18 nt, Human
uuuucagaacuaggaggc

SEQ ID NO: 295353 - RNA, 21 nt, Human
aaaacacaacacgggccgccg

SEQ ID NO: 295354 - RNA, 19 nt, Human
aaaagcacaccgcacuaca

SEQ ID NO: 295355 - RNA, 25 nt, Human
aaacaaaacagaagacuggucccca

SEQ ID NO: 295356 - RNA, 25 nt, Human
aaacaaaacagaagacuggucccca

SEQ ID NO: 295357 - RNA, 22 nt, Human
aaacaaugaaaaacaaaacaga

SEQ ID NO: 295358 - RNA, 23 nt, Human
aaacagaagacugguccccaggg

SEQ ID NO: 295359 - RNA, 20 nt, Human
aaaugcccucccuaaauccc

SEQ ID NO: 295360 - RNA, 19 nt, Human
aacagaagacugguccccc

SEQ ID NO: 295361 - RNA, 19 nt, Human
aagaggucaugaugcccuu

SEQ ID NO: 295362 - RNA, 23 nt, Human
aagcuggcugccugggcugagcc

SEQ ID NO: 295363 - RNA, 25 nt, Human
acaaaacacaacacgggccgccgcg

SEQ ID NO: 295364 - RNA, 22 nt, Human
acaaaacagaagacuggucccc

SEQ ID NO: 295365 - RNA, 18 nt, Human
acagagccuccuccaagg

SEQ ID NO: 295366 - RNA, 27 nt, Human
acagagccuccuccaaggccuugauaa

SEQ ID NO: 295367 - RNA, 22 nt, Human
acagcacaaaacacaacacggg

SEQ ID NO: 295368 - RNA, 21 nt, Human
accaugcuuugggggaagauu

SEQ ID NO: 295369 - RNA, 19 nt, Human
acucgggaaagaggaacug

SEQ ID NO: 295370 - RNA, 22 nt, Human
acugaaaugccaguuuaaucca

SEQ ID NO: 295371 - RNA, 20 nt, Human
agaaggucuaugcacaagga

SEQ ID NO: 295372 - RNA, 19 nt, Human
agaggaacuguuggagugg

SEQ ID NO: 295373 - RNA, 24 nt, Human
agcucagcccaaagcuggcugccu

SEQ ID NO: 295374 - RNA, 21 nt, Human
aggacauacagagccuccucc

SEQ ID NO: 295375 - RNA, 22 nt, Human
aggaggcuuguagguuacuugg

SEQ ID NO: 295376 - RNA, 20 nt, Human
aggagggaggcaugggaugg

SEQ ID NO: 295377 - RNA, 18 nt, Human
aggagggcaggggcccug

SEQ ID NO: 295378 - RNA, 19 nt, Human
aggaggugggggaagucaa

SEQ ID NO: 295379 - RNA, 18 nt, Human
agggggcgcacuggggac

SEQ ID NO: 295380 - RNA, 25 nt, Human
auacagagccuccuccaaccggagg

SEQ ID NO: 295381 - RNA, 21 nt, Human
caaaacagaagacuggucccc

SEQ ID NO: 295382 - RNA, 22 nt, Human
caacaccccaaccaccuuacuc

SEQ ID NO: 295383 - RNA, 21 nt, Human
cacacuucccuuccuuaucuu

SEQ ID NO: 295384 - RNA, 21 nt, Human
caccccauacugucuuggaac

SEQ ID NO: 295385 - RNA, 20 nt, Human
caccgcacuacacuacuggc

SEQ ID NO: 295386 - RNA, 18 nt, Human
cacuggggaccugggcag

SEQ ID NO: 295387 - RNA, 25 nt, Human
cagagccuccuccaaggccuugaua

SEQ ID NO: 295388 - RNA, 20 nt, Human
cagcccaaagcuggcugccu

SEQ ID NO: 295389 - RNA, 22 nt, Human
caggagggcaggggcccuguug

SEQ ID NO: 295390 - RNA, 22 nt, Human
caggggcagaagggggugggag

SEQ ID NO: 295391 - RNA, 22 nt, Human
caguauucuggggguuagcccu

SEQ ID NO: 295392 - RNA, 21 nt, Human
cauacagagccuccuccaagg

SEQ ID NO: 295393 - RNA, 23 nt, Human
ccauacugucuuggaacaugcag

SEQ ID NO: 295394 - RNA, 26 nt, Human
ccauacugucuuggaacaugcagugg

SEQ ID NO: 295395 - RNA, 21 nt, Human
cccacagaggccccucugacc

SEQ ID NO: 295396 - RNA, 21 nt, Human
cccaccauccacauccacaca

SEQ ID NO: 295397 - RNA, 30 nt, Human; identical to SEQ ID NO: 294382

SEQ ID NO: 295398 - RNA, 19 nt, Human
ccccacuacccccaugggu

SEQ ID NO: 295399 - RNA, 19 nt, Human
ccccacuacccccaugggu

SEQ ID NO: 295400 - RNA, 21 nt, Human
ccccacuacccccauggguac

SEQ ID NO: 295401 - RNA, 27 nt, Human
cccccaccauccacauccacacacuuc

SEQ ID NO: 295402 - RNA, 25 nt, Human
cccccugggggggaagggguaggug

SEQ ID NO: 295403 - RNA, 21 nt, Human
ccccugaggacauacagagcc

SEQ ID NO: 295404 - RNA, 18 nt, Human
ccccugggggggaagggg

SEQ ID NO: 295405 - RNA, 20 nt, Human
cccugaaacucugaggccug

SEQ ID NO: 295406 - RNA, 22 nt, Human
ccucucaaggggaccugguccu

SEQ ID NO: 295407 - RNA, 19 nt, Human
ccuggcuggcccacccuuc

SEQ ID NO: 295408 - RNA, 22 nt, Human
ccuggcuggcccacccuuccug

SEQ ID NO: 295409 - RNA, 19 nt, Human
ccugggcugagacuuucug

SEQ ID NO: 295410 - RNA, 21 nt, Human
ccuguuagcucagcccaaagc

SEQ ID NO: 295411 - RNA, 24 nt, Human
cgcccgcugcccacccgccaucac

SEQ ID NO: 295412 - RNA, 18 nt, Human
cgccgcccgcugcccacc

SEQ ID NO: 295413 - RNA, 22 nt, Human
cgcguggacacagcacaaaaca

SEQ ID NO: 295414 - RNA, 23 nt, Human
cggcugcgcggagcccgccgccc

SEQ ID NO: 295415 - RNA, 22 nt, Human
cuauucuacaccagccgaaaga

SEQ ID NO: 295416 - RNA, 23 nt, Human
cugaggccugggugcagguaagg

SEQ ID NO: 295417 - RNA, 18 nt, Human
cugccugggcugagcccu

SEQ ID NO: 295418 - RNA, 18 nt, Human
cuggcaaggugaaggacu

SEQ ID NO: 295419 - RNA, 22 nt, Human
cuuguuugaggaggaggugggg

SEQ ID NO: 295420 - RNA, 22 nt, Human
cuuuaaccaggcuauggccacu

SEQ ID NO: 295421 - RNA, 18 nt, Human
gaaaaacaaaacagaaga

SEQ ID NO: 295422 - RNA, 18 nt, Human
gaagauggaggaguucag

SEQ ID NO: 295423 - RNA, 21 nt, Human
gacccaggggcagaagggggu

SEQ ID NO: 295424 - RNA, 21 nt, Human
gagcauggccuuggccccuac

SEQ ID NO: 295425 - RNA, 18 nt, Human
gaggagggaggcauggga

SEQ ID NO: 295426 - RNA, 20 nt, Human
gagugggguggggaggaggg

SEQ ID NO: 295427 - RNA, 20 nt, Human
gcaccuggcaaggugaagga

SEQ ID NO: 295428 - RNA, 21 nt, Human
gcccccaccauccacauccac

SEQ ID NO: 295429 - RNA, 18 nt, Human
gcccuguggcucuuggcc

SEQ ID NO: 295430 - RNA, 18 nt, Human
gcggagcccgccgcccgc

SEQ ID NO: 295431 - RNA, 19 nt, Human
gcguggacacagcacaaaa

SEQ ID NO: 295432 - RNA, 20 nt, Human
gcugcgcggagcccgccgcc

SEQ ID NO: 295433 - RNA, 20 nt, Human
ggacccaggggcagaagggg

SEQ ID NO: 295434 - RNA, 22 nt, Human
ggagaagucaguacgggggagg

SEQ ID NO: 295435 - RNA, 20 nt, Human
ggagggggcgcuacacuacu

SEQ ID NO: 295436 - RNA, 21 nt, Human
ggagugggguggggaggaggg

SEQ ID NO: 295437 - RNA, 22 nt, Human
ggagugggguggggaggaggga

SEQ ID NO: 295438 - RNA, 21 nt, Human
ggcaggucugggguucucugg

SEQ ID NO: 295439 - RNA, 19 nt, Human
ggcguugggaagaggcuug

SEQ ID NO: 295440 - RNA, 19 nt, Human
gggaccugguccuaaaccu

SEQ ID NO: 295441 - RNA, 19 nt, Human
gggaggagggaggcauggg

SEQ ID NO: 295442 - RNA, 20 nt, Human
gggaggcaugggauggaugg

SEQ ID NO: 295443 - RNA, 18 nt, Human
ggggaagggguaggugcu

SEQ ID NO: 295444 - RNA, 30 nt, Human; identical to SEQ ID NO: 294429

SEQ ID NO: 295445 - RNA, 24 nt, Human
ggggagggggucgccuuagcgcgu

SEQ ID NO: 295446 - RNA, 27 nt, Human
ggggcagaagggggugggagaagaagg

SEQ ID NO: 295447 - RNA, 19 nt, Human
gggguggggaggagggagg

SEQ ID NO: 295448 - RNA, 20 nt, Human
gggguggggaggagggaggc

SEQ ID NO: 295449 - RNA, 21 nt, Human
guccaugcccccaccauccac

SEQ ID NO: 295450 - RNA, 23 nt, Human
gugaaggacugaggcuucaggag

SEQ ID NO: 295451 - RNA, 21 nt, Human
guuuauggcuggaaucuggag

SEQ ID NO: 295452 - RNA, 20 nt, Human
uacagagccuccuccaaggg

SEQ ID NO: 295453 - RNA, 21 nt, Human
uaccaguauucuggggguuag

SEQ ID NO: 295454 - RNA, 19 nt, Human
uagcccugaaacucugagg

SEQ ID NO: 295455 - RNA, 24 nt, Human
uaggagaagucaguacgggggagg

SEQ ID NO: 295456 - RNA, 25 nt, Human
uaucuuaccaccccauacugucuug

SEQ ID NO: 295457 - RNA, 19 nt, Human
uauguagugggaagggucc

SEQ ID NO: 295458 - RNA, 20 nt, Human
ucagcccaaagcuggcugcc

SEQ ID NO: 295459 - RNA, 18 nt, Human
ucaguccccugaggacau

SEQ ID NO: 295460 - RNA, 24 nt, Human
uccaaaacuugagcauugaucuug

SEQ ID NO: 295461 - RNA, 26 nt, Human
uccacacacuucccuuccuuaucuua

SEQ ID NO: 295462 - RNA, 19 nt, Human
uccacauccacacacuucc

SEQ ID NO: 295463 - RNA, 22 nt, Human
uccaccaguggcaccucuggag

SEQ ID NO: 295464 - RNA, 21 nt, Human
ugaaaaacaaaacagaagacu

SEQ ID NO: 295465 - RNA, 18 nt, Human
ugacccuuccaccagugg

SEQ ID NO: 295466 - RNA, 22 nt, Human
ugacccuuccaccaguggcacc

SEQ ID NO: 295467 - RNA, 19 nt, Human
ugauuuggaagauggagga

SEQ ID NO: 295468 - RNA, 24 nt, Human
ugcccuagcucccugccuccccaa

SEQ ID NO: 295469 - RNA, 19 nt, Human
ugccugggcugagcccuau

SEQ ID NO: 295470 - RNA, 23 nt, Human
ugccugggcugagcccuauuaug

SEQ ID NO: 295471 - RNA, 22 nt, Human
ugcuggggcuccgcuccggggg

SEQ ID NO: 295472 - RNA, 21 nt, Human
uggaaacgucaaacaaugaaa

SEQ ID NO: 295473 - RNA, 25 nt, Human
uggaaacgucaaacaaugaaaaaca

SEQ ID NO: 295474 - RNA, 18 nt, Human
uggaaggaggugaagggg

SEQ ID NO: 295475 - RNA, 21 nt, Human
uggaaggaggugaaggggcug

SEQ ID NO: 295476 - RNA, 22 nt, Human
uggaaggaggugaaggggcugg

SEQ ID NO: 295477 - RNA, 18 nt, Human
uggaaucuggaggauguu

SEQ ID NO: 295478 - RNA, 22 nt, Human
uggaaucuggaggauguuguca

SEQ ID NO: 295479 - RNA, 21 nt, Human
uggacacagcacaaaacacaa

SEQ ID NO: 295480 - RNA, 19 nt, Human
uggaggauguugucagucc

SEQ ID NO: 295481 - RNA, 21 nt, Human
uggagugggguggggaggagg

SEQ ID NO: 295482 - RNA, 23 nt, Human
uggauggccggggacccaggggc

SEQ ID NO: 295483 - RNA, 25 nt, Human
uggcaaaugguucuuggugucuaca

SEQ ID NO: 295484 - RNA, 19 nt, Human
uggcaaggugaaggacuga

SEQ ID NO: 295485 - RNA, 21 nt, Human
uggcaaggugaaggacugagg

SEQ ID NO: 295486 - RNA, 23 nt, Human
uggcaccucuggaguacccagca

SEQ ID NO: 295487 - RNA, 24 nt, Human
uggcaccucuggaguacccagcac

SEQ ID NO: 295488 - RNA, 18 nt, Human
uggcugccugggcugagc

SEQ ID NO: 295489 - RNA, 21 nt, Human
uggcugccugggcugagcccu

SEQ ID NO: 295490 - RNA, 19 nt, Human
ugggaaggguccagccuag

SEQ ID NO: 295491 - RNA, 20 nt, Human
ugggaaggguccagccuagu

SEQ ID NO: 295492 - RNA, 20 nt, Human
ugggaaggguccagccuagu

SEQ ID NO: 295493 - RNA, 19 nt, Human
ugggauggaugggccugau

SEQ ID NO: 295494 - RNA, 20 nt, Human
ugggcugguuggggagaggc

SEQ ID NO: 295495 - RNA, 22 nt, Human
uggggaccugggcaguggccuu

SEQ ID NO: 295496 - RNA, 20 nt, Human
uggggaggagggaggcaugg

SEQ ID NO: 295497 - RNA, 21 nt, Human
uggggaggagggaggcauggg

SEQ ID NO: 295498 - RNA, 18 nt, Human
ugggugcagguaaggaga

SEQ ID NO: 295499 - RNA, 26 nt, Human
ugguagcaaaaugcccucccuaaauc

SEQ ID NO: 295500 - RNA, 21 nt, Human
ugguccccagggcguugggaa

SEQ ID NO: 295501 - RNA, 20 nt, Human
uggucccugcccuagcuccc

SEQ ID NO: 295502 - RNA, 18 nt, Human
uguaagggcaggucuggg

SEQ ID NO: 295503 - RNA, 23 nt, Human
ugucuacaguaaccccacuaccc

SEQ ID NO: 295504 - RNA, 19 nt, Human
uguggcaaaugguucuugg

SEQ ID NO: 295505 - RNA, 23 nt, Human
uguggcaaaugguucuugguguc

SEQ ID NO: 295506 - RNA, 21 nt, Human
uuguuucuguuucccaagggg

SEQ ID NO: 295507 - RNA, 18 nt, Human
uuuucagaacuaggaggc

SEQ ID NO: 295508 - RNA, 21 nt, Human
aaaacacaacacgggccgccg

SEQ ID NO: 295509 - RNA, 19 nt, Human
aaaagcacaccgcacuaca

SEQ ID NO: 295510 - RNA, 25 nt, Human
aaacaaaacagaagacuggucccca

SEQ ID NO: 295511 - RNA, 25 nt, Human
aaacaaaacagaagacuggucccca

SEQ ID NO: 295512 - RNA, 23 nt, Human
aaacagaagacugguccccaggg

SEQ ID NO: 295513 - RNA, 20 nt, Human
aaaugcccucccuaaauccc

SEQ ID NO: 295514 - RNA, 19 nt, Human
aacagaagacugguccccc

SEQ ID NO: 295515 - RNA, 19 nt, Human
aagaggucaugaugcccuu

SEQ ID NO: 295516 - RNA, 25 nt, Human
acaaaacacaacacgggccgccgcg

SEQ ID NO: 295517 - RNA, 22 nt, Human
acaaaacagaagacuggucccc

SEQ ID NO: 295518 - RNA, 27 nt, Human
acagagccuccuccaaggccuugauaa

SEQ ID NO: 295519 - RNA, 22 nt, Human
acagcacaaaacacaacacggg

SEQ ID NO: 295520 - RNA, 21 nt, Human
accaugcuuugggggaagauu

SEQ ID NO: 295521 - RNA, 19 nt, Human
acucgggaaagaggaacug

SEQ ID NO: 295522 - RNA, 22 nt, Human
acugaaaugccaguuuaaucca

SEQ ID NO: 295523 - RNA, 20 nt, Human
agaaggucuaugcacaagga

SEQ ID NO: 295524 - RNA, 19 nt, Human
agaggaacuguuggagugg

SEQ ID NO: 295525 - RNA, 24 nt, Human
agcucagcccaaagcuggcugccu

SEQ ID NO: 295526 - RNA, 21 nt, Human
aggacauacagagccuccucc

SEQ ID NO: 295527 - RNA, 22 nt, Human
aggaggcuuguagguuacuugg

SEQ ID NO: 295528 - RNA, 20 nt, Human
aggagggaggcaugggaugg

SEQ ID NO: 295529 - RNA, 18 nt, Human
aggagggcaggggcccug

SEQ ID NO: 295530 - RNA, 19 nt, Human
aggaggugggggaagucaa

SEQ ID NO: 295531 - RNA, 23 nt, Human
agggaggcaugggauggaugggg

SEQ ID NO: 295532 - RNA, 18 nt, Human
agggggcgcacuggggac

SEQ ID NO: 295533 - RNA, 25 nt, Human
auacagagccuccuccaaccggagg

SEQ ID NO: 295534 - RNA, 20 nt, Human
auucuacaccagccgaaaga

SEQ ID NO: 295535 - RNA, 21 nt, Human
caaaacagaagacuggucccc

SEQ ID NO: 295536 - RNA, 23 nt, Human
caaacaaugaaaaacaaaacaga

SEQ ID NO: 295537 - RNA, 22 nt, Human
caacaccccaaccaccuuacuc

SEQ ID NO: 295538 - RNA, 21 nt, Human
cacacuucccuuccuuaucuu

SEQ ID NO: 295539 - RNA, 21 nt, Human
caccccauacugucuuggaac

SEQ ID NO: 295540 - RNA, 20 nt, Human
caccgcacuacacuacuggc

SEQ ID NO: 295541 - RNA, 18 nt, Human
cacuggggaccugggcag

SEQ ID NO: 295542 - RNA, 25 nt, Human
cagagccuccuccaaggccuugaua

SEQ ID NO: 295543 - RNA, 22 nt, Human
caggagggcaggggcccuguug

SEQ ID NO: 295544 - RNA, 22 nt, Human
caggggcagaagggggugggag

SEQ ID NO: 295545 - RNA, 22 nt, Human
caguauucuggggguuagcccu

SEQ ID NO: 295546 - RNA, 23 nt, Human
ccacacacuucccuuccuuaucu

SEQ ID NO: 295547 - RNA, 20 nt, Human
ccacagaggccccucugacc

SEQ ID NO: 295548 - RNA, 29 nt, Human
ccacccgccaucacguaaaagcacaccgg

SEQ ID NO: 295549 - RNA, 23 nt, Human
ccauacugucuuggaacaugcag

SEQ ID NO: 295550 - RNA, 26 nt, Human
ccauacugucuuggaacaugcagugg

SEQ ID NO: 295551 - RNA, 21 nt, Human
cccaccauccacauccacaca

SEQ ID NO: 295552 - RNA, 18 nt, Human
ccccacuacccccauggg

SEQ ID NO: 295553 - RNA, 20 nt, Human
ccccacuacccccaugggua

SEQ ID NO: 295554 - RNA, 21 nt, Human
ccccacuacccccauggguac

SEQ ID NO: 295555 - RNA, 27 nt, Human
cccccaccauccacauccacacacuuc

SEQ ID NO: 295556 - RNA, 25 nt, Human
cccccugggggggaagggguaggug

SEQ ID NO: 295557 - RNA, 21 nt, Human
ccccugaggacauacagagcc

SEQ ID NO: 295558 - RNA, 18 nt, Human
ccccugggggggaagggg

SEQ ID NO: 295559 - RNA, 20 nt, Human
cccugaaacucugaggccug

SEQ ID NO: 295560 - RNA, 22 nt, Human
ccucucaaggggaccugguccu

SEQ ID NO: 295561 - RNA, 19 nt, Human
ccuggcuggcccacccuuc

SEQ ID NO: 295562 - RNA, 22 nt, Human
ccuggcuggcccacccuuccug

SEQ ID NO: 295563 - RNA, 19 nt, Human
ccugggcugagacuuucug

SEQ ID NO: 295564 - RNA, 21 nt, Human
ccugggcugagcccuauuaug

SEQ ID NO: 295565 - RNA, 21 nt, Human
ccuguuagcucagcccaaagc

SEQ ID NO: 295566 - RNA, 24 nt, Human
cgcccgcugcccacccgccaucac

SEQ ID NO: 295567 - RNA, 18 nt, Human
cgccgcccgcugcccacc

SEQ ID NO: 295568 - RNA, 22 nt, Human
cgcguggacacagcacaaaaca

SEQ ID NO: 295569 - RNA, 22 nt, Human
cggcaccuggcaaggugaagga

SEQ ID NO: 295570 - RNA, 22 nt, Human
cucagcccaaagcuggcugccu

SEQ ID NO: 295571 - RNA, 23 nt, Human
cugaggccugggugcagguaagg

SEQ ID NO: 295572 - RNA, 18 nt, Human
cugccugggcugagcccu

SEQ ID NO: 295573 - RNA, 18 nt, Human
cuggcaaggugaaggacu

SEQ ID NO: 295574 - RNA, 18 nt, Human
gaaaaacaaaacagaaga

SEQ ID NO: 295575 - RNA, 18 nt, Human
gaagauggaggaguucag

SEQ ID NO: 295576 - RNA, 21 nt, Human
gacccaggggcagaagggggu

SEQ ID NO: 295577 - RNA, 21 nt, Human
gagcauggccuuggccccuac

SEQ ID NO: 295578 - RNA, 18 nt, Human
gaggagggaggcauggga

SEQ ID NO: 295579 - RNA, 20 nt, Human
gagugggguggggaggaggg

SEQ ID NO: 295580 - RNA, 21 nt, Human
gcccccaccauccacauccac

SEQ ID NO: 295581 - RNA, 18 nt, Human
gcccuguggcucuuggcc

SEQ ID NO: 295582 - RNA, 18 nt, Human
gcggagcccgccgcccgc

SEQ ID NO: 295583 - RNA, 19 nt, Human
gcguggacacagcacaaaa

SEQ ID NO: 295584 - RNA, 20 nt, Human
gcugcgcggagcccgccgcc

SEQ ID NO: 295585 - RNA, 20 nt, Human
ggacccaggggcagaagggg

SEQ ID NO: 295586 - RNA, 22 nt, Human
ggagaagucaguacgggggagg

SEQ ID NO: 295587 - RNA, 20 nt, Human
ggagggggcgcuacacuacu

SEQ ID NO: 295588 - RNA, 21 nt, Human
ggagugggguggggaggaggg

SEQ ID NO: 295589 - RNA, 22 nt, Human
ggagugggguggggaggaggga

SEQ ID NO: 295590 - RNA, 21 nt, Human
ggcaggucugggguucucugg

SEQ ID NO: 295591 - RNA, 19 nt, Human
ggcguugggaagaggcuug

SEQ ID NO: 295592 - RNA, 19 nt, Human
gggaccugguccuaaaccu

SEQ ID NO: 295593 - RNA, 19 nt, Human
gggaggagggaggcauggg

SEQ ID NO: 295594 - RNA, 20 nt, Human
gggaggcaugggauggaugg

SEQ ID NO: 295595 - RNA, 19 nt, Human
gggcguugggaagaggcuu

SEQ ID NO: 295596 - RNA, 18 nt, Human
ggggaagggguaggugcu

SEQ ID NO: 295597 - RNA, 24 nt, Human
ggggagggggucgccuuagcgcgu

SEQ ID NO: 295598 - RNA, 27 nt, Human
ggggcagaagggggugggagaagaagg

SEQ ID NO: 295599 - RNA, 19 nt, Human
gggguggggaggagggagg

SEQ ID NO: 295600 - RNA, 20 nt, Human
gggguggggaggagggaggc

SEQ ID NO: 295601 - RNA, 23 nt, Human
gugaaggacugaggcuucaggag

SEQ ID NO: 295602 - RNA, 19 nt, Human
uacagagccuccuccaagg

SEQ ID NO: 295603 - RNA, 20 nt, Human
uacagagccuccuccaaggg

SEQ ID NO: 295604 - RNA, 21 nt, Human
uaccaguauucuggggguuag

SEQ ID NO: 295605 - RNA, 19 nt, Human
uagcccugaaacucugagg

SEQ ID NO: 295606 - RNA, 24 nt, Human
uaggagaagucaguacgggggagg

SEQ ID NO: 295607 - RNA, 25 nt, Human
uaucuuaccaccccauacugucuug

SEQ ID NO: 295608 - RNA, 20 nt, Human
ucagcccaaagcuggcugcc

SEQ ID NO: 295609 - RNA, 18 nt, Human
ucaguccccugaggacau

SEQ ID NO: 295610 - RNA, 24 nt, Human
uccaaaacuugagcauugaucuug

SEQ ID NO: 295611 - RNA, 19 nt, Human
uccacauccacacacuucc

SEQ ID NO: 295612 - RNA, 22 nt, Human
uccaccaguggcaccucuggag

SEQ ID NO: 295613 - RNA, 20 nt, Human
uccaugcccccaccauccac

SEQ ID NO: 295614 - RNA, 21 nt, Human
ugaaaaacaaaacagaagacu

SEQ ID NO: 295615 - RNA, 18 nt, Human
ugacccuuccaccagugg

SEQ ID NO: 295616 - RNA, 22 nt, Human
ugacccuuccaccaguggcacc

SEQ ID NO: 295617 - RNA, 24 nt, Human
ugcccuagcucccugccuccccaa

SEQ ID NO: 295618 - RNA, 19 nt, Human
ugccugggcugagcccuau

SEQ ID NO: 295619 - RNA, 23 nt, Human
ugccugggcugagcccuauuaug

SEQ ID NO: 295620 - RNA, 22 nt, Human
ugcuggggcuccgcuccggggg

SEQ ID NO: 295621 - RNA, 21 nt, Human
uggaaacgucaaacaaugaaa

SEQ ID NO: 295622 - RNA, 25 nt, Human
uggaaacgucaaacaaugaaaaaca

SEQ ID NO: 295623 - RNA, 18 nt, Human
uggaaggaggugaagggg

SEQ ID NO: 295624 - RNA, 21 nt, Human
uggaaggaggugaaggggcug

SEQ ID NO: 295625 - RNA, 22 nt, Human
uggaaggaggugaaggggcugg

SEQ ID NO: 295626 - RNA, 18 nt, Human
uggaaucuggaggauguu

SEQ ID NO: 295627 - RNA, 22 nt, Human
uggaaucuggaggauguuguca

SEQ ID NO: 295628 - RNA, 21 nt, Human
uggacacagcacaaaacacaa

SEQ ID NO: 295629 - RNA, 19 nt, Human
uggaggauguugucagucc

SEQ ID NO: 295630 - RNA, 21 nt, Human
uggagugggguggggaggagg

SEQ ID NO: 295631 - RNA, 23 nt, Human
uggauggccggggacccaggggc

SEQ ID NO: 295632 - RNA, 29 nt, Human
uggcaaaugguucuuggugucuacaguaa

SEQ ID NO: 295633 - RNA, 19 nt, Human
uggcaaggugaaggacuga

SEQ ID NO: 295634 - RNA, 21 nt, Human
uggcaaggugaaggacugagg

SEQ ID NO: 295635 - RNA, 23 nt, Human
uggcaccucuggaguacccagca

SEQ ID NO: 295636 - RNA, 24 nt, Human
uggcaccucuggaguacccagcac

SEQ ID NO: 295637 - RNA, 18 nt, Human
uggcugccugggcugagc

SEQ ID NO: 295638 - RNA, 21 nt, Human
uggcugccugggcugagcccu

SEQ ID NO: 295639 - RNA, 19 nt, Human
ugggaaggguccagccuag

SEQ ID NO: 295640 - RNA, 20 nt, Human
ugggaaggguccagccuagu

SEQ ID NO: 295641 - RNA, 19 nt, Human
ugggauggaugggccugau

SEQ ID NO: 295642 - RNA, 20 nt, Human
ugggcugguuggggagaggc

SEQ ID NO: 295643 - RNA, 22 nt, Human
uggggaccugggcaguggccuu

SEQ ID NO: 295644 - RNA, 20 nt, Human
uggggaggagggaggcaugg

SEQ ID NO: 295645 - RNA, 21 nt, Human
uggggaggagggaggcauggg

SEQ ID NO: 295646 - RNA, 18 nt, Human
ugggugcagguaaggaga

SEQ ID NO: 295647 - RNA, 26 nt, Human
ugguagcaaaaugcccucccuaaauc

SEQ ID NO: 295648 - RNA, 21 nt, Human
ugguccccagggcguugggaa

SEQ ID NO: 295649 - RNA, 20 nt, Human
uggucccugcccuagcuccc

SEQ ID NO: 295650 - RNA, 23 nt, Human
ugguuuauggcuggaaucuggag

SEQ ID NO: 295651 - RNA, 18 nt, Human
uguaagggcaggucuggg

SEQ ID NO: 295652 - RNA, 23 nt, Human
ugucuacaguaaccccacuaccc

SEQ ID NO: 295653 - RNA, 19 nt, Human
uguggcaaaugguucuugg

SEQ ID NO: 295654 - RNA, 23 nt, Human
uguggcaaaugguucuugguguc

SEQ ID NO: 295655 - RNA, 20 nt, Human
uuauguagugggaagggucc

SEQ ID NO: 295656 - RNA, 20 nt, Human
uugauuuggaagauggagga

SEQ ID NO: 295657 - RNA, 21 nt, Human
uuguuucuguuucccaagggg

SEQ ID NO: 295658 - RNA, 21 nt, Human
uuguuugaggaggaggugggg

SEQ ID NO: 295659 - RNA, 21 nt, Human
uuuaaccaggcuauggccacu

SEQ ID NO: 295660 - RNA, 18 nt, Human
uuuucagaacuaggaggc

SEQ ID NO: 295661 - RNA, 21 nt, Human
aaaacacaacacgggccgccg

SEQ ID NO: 295662 - RNA, 24 nt, Human
aaaacagaagacugguccccaggg

SEQ ID NO: 295663 - RNA, 19 nt, Human
aaaagcacaccgcacuaca

SEQ ID NO: 295664 - RNA, 25 nt, Human
aaacaaaacagaagacuggucccca

SEQ ID NO: 295665 - RNA, 25 nt, Human
aaacaaaacagaagacuggucccca

SEQ ID NO: 295666 - RNA, 18 nt, Human
aaaugcccucccuaaauc

SEQ ID NO: 295667 - RNA, 19 nt, Human
aacagaagacugguccccc

SEQ ID NO: 295668 - RNA, 19 nt, Human
aagaggucaugaugcccuu

SEQ ID NO: 295669 - RNA, 25 nt, Human
acaaaacacaacacgggccgccgcg

SEQ ID NO: 295670 - RNA, 22 nt, Human
acaaaacagaagacuggucccc

SEQ ID NO: 295671 - RNA, 18 nt, Human
acagagccuccuccaagg

SEQ ID NO: 295672 - RNA, 27 nt, Human
acagagccuccuccaaggccuugauaa

SEQ ID NO: 295673 - RNA, 22 nt, Human
acagcacaaaacacaacacggg

SEQ ID NO: 295674 - RNA, 21 nt, Human
accaugcuuugggggaagauu

SEQ ID NO: 295675 - RNA, 20 nt, Human
accccauacugucuuggaac

SEQ ID NO: 295676 - RNA, 19 nt, Human
acucgggaaagaggaacug

SEQ ID NO: 295677 - RNA, 22 nt, Human
acugaaaugccaguuuaaucca

SEQ ID NO: 295678 - RNA, 20 nt, Human
agaaggucuaugcacaagga

SEQ ID NO: 295679 - RNA, 19 nt, Human
agaggaacuguuggagugg

SEQ ID NO: 295680 - RNA, 24 nt, Human
agcucagcccaaagcuggcugccu

SEQ ID NO: 295681 - RNA, 21 nt, Human
aggacauacagagccuccucc

SEQ ID NO: 295682 - RNA, 22 nt, Human
aggaggcuuguagguuacuugg

SEQ ID NO: 295683 - RNA, 20 nt, Human
aggagggaggcaugggaugg

SEQ ID NO: 295684 - RNA, 18 nt, Human
aggagggcaggggcccug

SEQ ID NO: 295685 - RNA, 19 nt, Human
aggaggugggggaagucaa

SEQ ID NO: 295686 - RNA, 21 nt, Human
aggggcagaagggggugggag

SEQ ID NO: 295687 - RNA, 18 nt, Human
agggggcgcacuggggac

SEQ ID NO: 295688 - RNA, 25 nt, Human
auacagagccuccuccaaccggagg

SEQ ID NO: 295689 - RNA, 20 nt, Human
auucuacaccagccgaaaga

SEQ ID NO: 295690 - RNA, 21 nt, Human
caaaacagaagacuggucccc

SEQ ID NO: 295691 - RNA, 23 nt, Human
caaacaaugaaaaacaaaacaga

SEQ ID NO: 295692 - RNA, 22 nt, Human
caacaccccaaccaccuuacuc

SEQ ID NO: 295693 - RNA, 21 nt, Human
cacacuucccuuccuuaucuu

SEQ ID NO: 295694 - RNA, 20 nt, Human
caccgcacuacacuacuggc

SEQ ID NO: 295695 - RNA, 18 nt, Human
cacuggggaccugggcag

SEQ ID NO: 295696 - RNA, 25 nt, Human
cagagccuccuccaaggccuugaua

SEQ ID NO: 295697 - RNA, 22 nt, Human
caggagggcaggggcccuguug

SEQ ID NO: 295698 - RNA, 22 nt, Human
caguauucuggggguuagcccu

SEQ ID NO: 295699 - RNA, 21 nt, Human
cauacagagccuccuccaagg

SEQ ID NO: 295700 - RNA, 29 nt, Human
ccacccgccaucacguaaaagcacaccgg

SEQ ID NO: 295701 - RNA, 23 nt, Human
ccauacugucuuggaacaugcag

SEQ ID NO: 295702 - RNA, 26 nt, Human
ccauacugucuuggaacaugcagugg

SEQ ID NO: 295703 - RNA, 21 nt, Human
cccacagaggccccucugacc

SEQ ID NO: 295704 - RNA, 21 nt, Human
cccaccauccacauccacaca

SEQ ID NO: 295705 - RNA, 19 nt, Human
cccaggggcagaagggggu

SEQ ID NO: 295706 - RNA, 26 nt, Human
ccccaccauccacauccacacacuuc

SEQ ID NO: 295707 - RNA, 19 nt, Human
ccccacuacccccaugggu

SEQ ID NO: 295708 - RNA, 20 nt, Human
ccccacuacccccaugggua

SEQ ID NO: 295709 - RNA, 21 nt, Human
ccccacuacccccauggguac

SEQ ID NO: 295710 - RNA, 25 nt, Human
cccccugggggggaagggguaggug

SEQ ID NO: 295711 - RNA, 21 nt, Human
ccccugaggacauacagagcc

SEQ ID NO: 295712 - RNA, 18 nt, Human
ccccugggggggaagggg

SEQ ID NO: 295713 - RNA, 20 nt, Human
cccugaaacucugaggccug

SEQ ID NO: 295714 - RNA, 21 nt, Human
ccgccgcccgcugcccacccg

SEQ ID NO: 295715 - RNA, 19 nt, Human
ccuggcuggcccacccuuc

SEQ ID NO: 295716 - RNA, 22 nt, Human
ccuggcuggcccacccuuccug

SEQ ID NO: 295717 - RNA, 19 nt, Human
ccugggcugagacuuucug

SEQ ID NO: 295718 - RNA, 21 nt, Human
ccugggcugagcccuauuaug

SEQ ID NO: 295719 - RNA, 21 nt, Human
ccuguuagcucagcccaaagc

SEQ ID NO: 295720 - RNA, 24 nt, Human
cgcccgcugcccacccgccaucac

SEQ ID NO: 295721 - RNA, 19 nt, Human
cgcccuguggcucuuggcc

SEQ ID NO: 295722 - RNA, 22 nt, Human
cgcguggacacagcacaaaaca

SEQ ID NO: 295723 - RNA, 23 nt, Human
cggcugcgcggagcccgccgccc

SEQ ID NO: 295724 - RNA, 22 nt, Human
cucagcccaaagcuggcugccu

SEQ ID NO: 295725 - RNA, 21 nt, Human
cucucaaggggaccugguccu

SEQ ID NO: 295726 - RNA, 18 nt, Human
cugccugggcugagcccu

SEQ ID NO: 295727 - RNA, 18 nt, Human
cuggcaaggugaaggacu

SEQ ID NO: 295728 - RNA, 22 nt, Human
cuuguuugaggaggaggugggg

SEQ ID NO: 295729 - RNA, 22 nt, Human
cuuuaaccaggcuauggccacu

SEQ ID NO: 295730 - RNA, 18 nt, Human
gaaaaacaaaacagaaga

SEQ ID NO: 295731 - RNA, 18 nt, Human
gaagauggaggaguucag

SEQ ID NO: 295732 - RNA, 21 nt, Human
gacccaggggcagaagggggu

SEQ ID NO: 295733 - RNA, 21 nt, Human
gagcauggccuuggccccuac

SEQ ID NO: 295734 - RNA, 18 nt, Human
gaggagggaggcauggga

SEQ ID NO: 295735 - RNA, 21 nt, Human
gaggccugggugcagguaagg

SEQ ID NO: 295736 - RNA, 20 nt, Human
gagugggguggggaggaggg

SEQ ID NO: 295737 - RNA, 20 nt, Human
gcaccuggcaaggugaagga

SEQ ID NO: 295738 - RNA, 21 nt, Human
gcccccaccauccacauccac

SEQ ID NO: 295739 - RNA, 18 nt, Human
gcccuguggcucuuggcc

SEQ ID NO: 295740 - RNA, 18 nt, Human
gcggagcccgccgcccgc

SEQ ID NO: 295741 - RNA, 19 nt, Human
gcguggacacagcacaaaa

SEQ ID NO: 295742 - RNA, 20 nt, Human
gcugcgcggagcccgccgcc

SEQ ID NO: 295743 - RNA, 20 nt, Human
ggacccaggggcagaagggg

SEQ ID NO: 295744 - RNA, 22 nt, Human
ggagaagucaguacgggggagg

SEQ ID NO: 295745 - RNA, 20 nt, Human
ggagggggcgcuacacuacu

SEQ ID NO: 295746 - RNA, 21 nt, Human
ggagugggguggggaggaggg

SEQ ID NO: 295747 - RNA, 22 nt, Human
ggagugggguggggaggaggga

SEQ ID NO: 295748 - RNA, 21 nt, Human
ggcaggucugggguucucugg

SEQ ID NO: 295749 - RNA, 19 nt, Human
ggcguugggaagaggcuug

SEQ ID NO: 295750 - RNA, 19 nt, Human
gggaccugguccuaaaccu

SEQ ID NO: 295751 - RNA, 19 nt, Human
gggaggagggaggcauggg

SEQ ID NO: 295752 - RNA, 20 nt, Human
gggaggcaugggauggaugg

SEQ ID NO: 295753 - RNA, 21 nt, Human
gggcagaagggggugggagaa

SEQ ID NO: 295754 - RNA, 19 nt, Human
gggcguugggaagaggcuu

SEQ ID NO: 295755 - RNA, 18 nt, Human
ggggaagggguaggugcu

SEQ ID NO: 295756 - RNA, 30 nt, Human; identical to SEQ ID NO: 294429

SEQ ID NO: 295757 - RNA, 24 nt, Human
ggggagggggucgccuuagcgcgu

SEQ ID NO: 295758 - RNA, 27 nt, Human
ggggcagaagggggugggagaagaagg

SEQ ID NO: 295759 - RNA, 20 nt, Human
gggguggggaggagggaggc

SEQ ID NO: 295760 - RNA, 23 nt, Human
gugaaggacugaggcuucaggag

SEQ ID NO: 295761 - RNA, 20 nt, Human
uacagagccuccuccaaggg

SEQ ID NO: 295762 - RNA, 21 nt, Human
uaccaguauucuggggguuag

SEQ ID NO: 295763 - RNA, 19 nt, Human
uagcccugaaacucugagg

SEQ ID NO: 295764 - RNA, 24 nt, Human
uaggagaagucaguacgggggagg

SEQ ID NO: 295765 - RNA, 25 nt, Human
uaucuuaccaccccauacugucuug

SEQ ID NO: 295766 - RNA, 20 nt, Human
ucagcccaaagcuggcugcc

SEQ ID NO: 295767 - RNA, 18 nt, Human
ucaguccccugaggacau

SEQ ID NO: 295768 - RNA, 24 nt, Human
uccaaaacuugagcauugaucuug

SEQ ID NO: 295769 - RNA, 26 nt, Human
uccacacacuucccuuccuuaucuua

SEQ ID NO: 295770 - RNA, 19 nt, Human
uccacauccacacacuucc

SEQ ID NO: 295771 - RNA, 22 nt, Human
uccaccaguggcaccucuggag

SEQ ID NO: 295772 - RNA, 20 nt, Human
uccaugcccccaccauccac

SEQ ID NO: 295773 - RNA, 21 nt, Human
ugaaaaacaaaacagaagacu

SEQ ID NO: 295774 - RNA, 18 nt, Human
ugacccuuccaccagugg

SEQ ID NO: 295775 - RNA, 22 nt, Human
ugacccuuccaccaguggcacc

SEQ ID NO: 295776 - RNA, 24 nt, Human
ugcccuagcucccugccuccccaa

SEQ ID NO: 295777 - RNA, 23 nt, Human
ugccugggcugagcccuauuaug

SEQ ID NO: 295778 - RNA, 21 nt, Human
ugcuggggcuccgcuccgggg

SEQ ID NO: 295779 - RNA, 21 nt, Human
uggaaacgucaaacaaugaaa

SEQ ID NO: 295780 - RNA, 25 nt, Human
uggaaacgucaaacaaugaaaaaca

SEQ ID NO: 295781 - RNA, 18 nt, Human
uggaaggaggugaagggg

SEQ ID NO: 295782 - RNA, 21 nt, Human
uggaaggaggugaaggggcug

SEQ ID NO: 295783 - RNA, 22 nt, Human
uggaaggaggugaaggggcugg

SEQ ID NO: 295784 - RNA, 18 nt, Human
uggaaucuggaggauguu

SEQ ID NO: 295785 - RNA, 22 nt, Human
uggaaucuggaggauguuguca

SEQ ID NO: 295786 - RNA, 21 nt, Human
uggacacagcacaaaacacaa

SEQ ID NO: 295787 - RNA, 19 nt, Human
uggaggauguugucagucc

SEQ ID NO: 295788 - RNA, 21 nt, Human
uggagugggguggggaggagg

SEQ ID NO: 295789 - RNA, 23 nt, Human
uggauggccggggacccaggggc

SEQ ID NO: 295790 - RNA, 25 nt, Human
uggcaaaugguucuuggugucuaca

SEQ ID NO: 295791 - RNA, 19 nt, Human
uggcaaggugaaggacuga

SEQ ID NO: 295792 - RNA, 21 nt, Human
uggcaaggugaaggacugagg

SEQ ID NO: 295793 - RNA, 23 nt, Human
uggcaccucuggaguacccagca

SEQ ID NO: 295794 - RNA, 24 nt, Human
uggcaccucuggaguacccagcac

SEQ ID NO: 295795 - RNA, 18 nt, Human
uggcugccugggcugagc

SEQ ID NO: 295796 - RNA, 21 nt, Human
uggcugccugggcugagcccu

SEQ ID NO: 295797 - RNA, 19 nt, Human
ugggaaggguccagccuag

SEQ ID NO: 295798 - RNA, 20 nt, Human
ugggaaggguccagccuagu

SEQ ID NO: 295799 - RNA, 19 nt, Human
ugggauggaugggccugau

SEQ ID NO: 295800 - RNA, 20 nt, Human
ugggcugguuggggagaggc

SEQ ID NO: 295801 - RNA, 22 nt, Human
uggggaccugggcaguggccuu

SEQ ID NO: 295802 - RNA, 20 nt, Human
uggggaggagggaggcaugg

SEQ ID NO: 295803 - RNA, 21 nt, Human
uggggaggagggaggcauggg

SEQ ID NO: 295804 - RNA, 18 nt, Human
ugggugcagguaaggaga

SEQ ID NO: 295805 - RNA, 26 nt, Human
ugguagcaaaaugcccucccuaaauc

SEQ ID NO: 295806 - RNA, 21 nt, Human
ugguccccagggcguugggaa

SEQ ID NO: 295807 - RNA, 20 nt, Human
uggucccugcccuagcuccc

SEQ ID NO: 295808 - RNA, 23 nt, Human
ugguuuauggcuggaaucuggag

SEQ ID NO: 295809 - RNA, 18 nt, Human
uguaagggcaggucuggg

SEQ ID NO: 295810 - RNA, 23 nt, Human
ugucuacaguaaccccacuaccc

SEQ ID NO: 295811 - RNA, 19 nt, Human
uguggcaaaugguucuugg

SEQ ID NO: 295812 - RNA, 23 nt, Human
uguggcaaaugguucuugguguc

SEQ ID NO: 295813 - RNA, 20 nt, Human
uuauguagugggaagggucc

SEQ ID NO: 295814 - RNA, 20 nt, Human
uugauuuggaagauggagga

SEQ ID NO: 295815 - RNA, 21 nt, Human
uuguuucuguuucccaagggg

SEQ ID NO: 295816 - RNA, 18 nt, Human
uuuucagaacuaggaggc

SEQ ID NO: 295817 - RNA, 21 nt, Human
aaaacacaacacgggccgccg

SEQ ID NO: 295818 - RNA, 19 nt, Human
aaaagcacaccgcacuaca

SEQ ID NO: 295819 - RNA, 25 nt, Human
aaacaaaacagaagacuggucccca

SEQ ID NO: 295820 - RNA, 25 nt, Human
aaacaaaacagaagacuggucccca

SEQ ID NO: 295821 - RNA, 23 nt, Human
aaacagaagacugguccccaggg

SEQ ID NO: 295822 - RNA, 18 nt, Human
aaaugcccucccuaaauc

SEQ ID NO: 295823 - RNA, 19 nt, Human
aacagaagacugguccccc

SEQ ID NO: 295824 - RNA, 19 nt, Human
aagaggucaugaugcccuu

SEQ ID NO: 295825 - RNA, 23 nt, Human
aagcuggcugccugggcugagcc

SEQ ID NO: 295826 - RNA, 25 nt, Human
acaaaacacaacacgggccgccgcg

SEQ ID NO: 295827 - RNA, 22 nt, Human
acaaaacagaagacuggucccc

SEQ ID NO: 295828 - RNA, 27 nt, Human
acagagccuccuccaaggccuugauaa

SEQ ID NO: 295829 - RNA, 22 nt, Human
acagcacaaaacacaacacggg

SEQ ID NO: 295830 - RNA, 21 nt, Human
accaugcuuugggggaagauu

SEQ ID NO: 295831 - RNA, 19 nt, Human
acucgggaaagaggaacug

SEQ ID NO: 295832 - RNA, 22 nt, Human
acugaaaugccaguuuaaucca

SEQ ID NO: 295833 - RNA, 20 nt, Human
agaaggucuaugcacaagga

SEQ ID NO: 295834 - RNA, 19 nt, Human
agaggaacuguuggagugg

SEQ ID NO: 295835 - RNA, 24 nt, Human
agcucagcccaaagcuggcugccu

SEQ ID NO: 295836 - RNA, 21 nt, Human
aggacauacagagccuccucc

SEQ ID NO: 295837 - RNA, 22 nt, Human
aggaggcuuguagguuacuugg

SEQ ID NO: 295838 - RNA, 20 nt, Human
aggagggaggcaugggaugg

SEQ ID NO: 295839 - RNA, 18 nt, Human
aggagggcaggggcccug

SEQ ID NO: 295840 - RNA, 19 nt, Human
aggaggugggggaagucaa

SEQ ID NO: 295841 - RNA, 23 nt, Human
agggaggcaugggauggaugggg

SEQ ID NO: 295842 - RNA, 21 nt, Human
aggggcagaagggggugggag

SEQ ID NO: 295843 - RNA, 18 nt, Human
agggggcgcacuggggac

SEQ ID NO: 295844 - RNA, 25 nt, Human
auacagagccuccuccaaccggagg

SEQ ID NO: 295845 - RNA, 20 nt, Human
auucuacaccagccgaaaga

SEQ ID NO: 295846 - RNA, 21 nt, Human
caaaacagaagacuggucccc

SEQ ID NO: 295847 - RNA, 24 nt, Human
caaaauaauagagaaauaucaugc

SEQ ID NO: 295848 - RNA, 23 nt, Human
caaacaaugaaaaacaaaacaga

SEQ ID NO: 295849 - RNA, 22 nt, Human
caacaccccaaccaccuuacuc

SEQ ID NO: 295850 - RNA, 21 nt, Human
cacacuucccuuccuuaucuu

SEQ ID NO: 295851 - RNA, 21 nt, Human
caccccauacugucuuggaac

SEQ ID NO: 295852 - RNA, 20 nt, Human
caccgcacuacacuacuggc

SEQ ID NO: 295853 - RNA, 18 nt, Human
cacuggggaccugggcag

SEQ ID NO: 295854 - RNA, 25 nt, Human
cagagccuccuccaaggccuugaua

SEQ ID NO: 295855 - RNA, 22 nt, Human
caggagggcaggggcccuguug

SEQ ID NO: 295856 - RNA, 22 nt, Human
caguauucuggggguuagcccu

SEQ ID NO: 295857 - RNA, 23 nt, Human
ccacacacuucccuuccuuaucu

SEQ ID NO: 295858 - RNA, 23 nt, Human
ccauacugucuuggaacaugcag

SEQ ID NO: 295859 - RNA, 26 nt, Human
ccauacugucuuggaacaugcagugg

SEQ ID NO: 295860 - RNA, 21 nt, Human
cccacagaggccccucugacc

SEQ ID NO: 295861 - RNA, 21 nt, Human
cccaccauccacauccacaca

SEQ ID NO: 295862 - RNA, 30 nt, Human; identical to SEQ ID NO: 294382

SEQ ID NO: 295863 - RNA, 19 nt, Human
ccccacuacccccaugggu

SEQ ID NO: 295864 - RNA, 20 nt, Human
ccccacuacccccaugggua

SEQ ID NO: 295865 - RNA, 21 nt, Human
ccccacuacccccauggguac

SEQ ID NO: 295866 - RNA, 27 nt, Human
cccccaccauccacauccacacacuuc

SEQ ID NO: 295867 - RNA, 25 nt, Human
cccccugggggggaagggguaggug

SEQ ID NO: 295868 - RNA, 21 nt, Human
ccccugaggacauacagagcc

SEQ ID NO: 295869 - RNA, 21 nt, Human
ccgccgcccgcugcccacccg

SEQ ID NO: 295870 - RNA, 22 nt, Human
ccucucaaggggaccugguccu

SEQ ID NO: 295871 - RNA, 22 nt, Human
ccuggcuggcccacccuuccug

SEQ ID NO: 295872 - RNA, 19 nt, Human
ccugggcugagacuuucug

SEQ ID NO: 295873 - RNA, 21 nt, Human
ccuguuagcucagcccaaagc

SEQ ID NO: 295874 - RNA, 24 nt, Human
cgcccgcugcccacccgccaucac

SEQ ID NO: 295875 - RNA, 22 nt, Human
cgcguggacacagcacaaaaca

SEQ ID NO: 295876 - RNA, 23 nt, Human
cggcugcgcggagcccgccgccc

SEQ ID NO: 295877 - RNA, 22 nt, Human
cucagcccaaagcuggcugccu

SEQ ID NO: 295878 - RNA, 23 nt, Human
cugaaggaaacugguaaacucau

SEQ ID NO: 295879 - RNA, 23 nt, Human
cugaggccugggugcagguaagg

SEQ ID NO: 295880 - RNA, 18 nt, Human
cugccugggcugagcccu

SEQ ID NO: 295881 - RNA, 18 nt, Human
cuggcaaggugaaggacu

SEQ ID NO: 295882 - RNA, 22 nt, Human
cuuguuugaggaggaggugggg

SEQ ID NO: 295883 - RNA, 18 nt, Human
gaaaaacaaaacagaaga

SEQ ID NO: 295884 - RNA, 18 nt, Human
gaagauggaggaguucag

SEQ ID NO: 295885 - RNA, 21 nt, Human
gacccaggggcagaagggggu

SEQ ID NO: 295886 - RNA, 21 nt, Human
gagcauggccuuggccccuac

SEQ ID NO: 295887 - RNA, 20 nt, Human
gagugggguggggaggaggg

SEQ ID NO: 295888 - RNA, 20 nt, Human
gcaccuggcaaggugaagga

SEQ ID NO: 295889 - RNA, 21 nt, Human
gcccccaccauccacauccac

SEQ ID NO: 295890 - RNA, 18 nt, Human
gcccuguggcucuuggcc

SEQ ID NO: 295891 - RNA, 20 nt, Human
gccuggcuggcccacccuuc

SEQ ID NO: 295892 - RNA, 18 nt, Human
gcggagcccgccgcccgc

SEQ ID NO: 295893 - RNA, 19 nt, Human
gcguggacacagcacaaaa

SEQ ID NO: 295894 - RNA, 19 nt, Human
gcugccugggcugagcccu

SEQ ID NO: 295895 - RNA, 20 nt, Human
gcugcgcggagcccgccgcc

SEQ ID NO: 295896 - RNA, 20 nt, Human
ggacccaggggcagaagggg

SEQ ID NO: 295897 - RNA, 22 nt, Human
ggagaagucaguacgggggagg

SEQ ID NO: 295898 - RNA, 19 nt, Human
ggaggagggaggcauggga

SEQ ID NO: 295899 - RNA, 19 nt, Human
ggaggcaugggauggaugg

SEQ ID NO: 295900 - RNA, 20 nt, Human
ggagggggcgcuacacuacu

SEQ ID NO: 295901 - RNA, 21 nt, Human
ggagugggguggggaggaggg

SEQ ID NO: 295902 - RNA, 22 nt, Human
ggagugggguggggaggaggga

SEQ ID NO: 295903 - RNA, 21 nt, Human
ggcaggucugggguucucugg

SEQ ID NO: 295904 - RNA, 19 nt, Human
ggcguugggaagaggcuug

SEQ ID NO: 295905 - RNA, 19 nt, Human
gggaccugguccuaaaccu

SEQ ID NO: 295906 - RNA, 19 nt, Human
gggaggagggaggcauggg

SEQ ID NO: 295907 - RNA, 19 nt, Human
gggcguugggaagaggcuu

SEQ ID NO: 295908 - RNA, 18 nt, Human
ggggaagggguaggugcu

SEQ ID NO: 295909 - RNA, 24 nt, Human
ggggagggggucgccuuagcgcgu

SEQ ID NO: 295910 - RNA, 27 nt, Human
ggggcagaagggggugggagaagaagg

SEQ ID NO: 295911 - RNA, 19 nt, Human
gggguggggaggagggagg

SEQ ID NO: 295912 - RNA, 20 nt, Human
gggguggggaggagggaggc

SEQ ID NO: 295913 - RNA, 23 nt, Human
gugaaggacugaggcuucaggag

SEQ ID NO: 295914 - RNA, 19 nt, Human
uaaagugucaccacugaag

SEQ ID NO: 295915 - RNA, 23 nt, Human
uaaaucccuauuuucaaaacauu

SEQ ID NO: 295916 - RNA, 19 nt, Human
uacagagccuccuccaagg

SEQ ID NO: 295917 - RNA, 20 nt, Human
uacagagccuccuccaaggg

SEQ ID NO: 295918 - RNA, 21 nt, Human
uaccaguauucuggggguuag

SEQ ID NO: 295919 - RNA, 18 nt, Human
uacucgggaaagaggaac

SEQ ID NO: 295920 - RNA, 19 nt, Human
uagcccugaaacucugagg

SEQ ID NO: 295921 - RNA, 23 nt, Human
uagcccugaaacucugaggccug

SEQ ID NO: 295922 - RNA, 24 nt, Human
uaggagaagucaguacgggggagg

SEQ ID NO: 295923 - RNA, 25 nt, Human
uaucuuaccaccccauacugucuug

SEQ ID NO: 295924 - RNA, 20 nt, Human
ucacuaaagaaauacuauau

SEQ ID NO: 295925 - RNA, 20 nt, Human
ucagcccaaagcuggcugcc

SEQ ID NO: 295926 - RNA, 18 nt, Human
ucaguccccugaggacau

SEQ ID NO: 295927 - RNA, 24 nt, Human
uccaaaacuugagcauugaucuug

SEQ ID NO: 295928 - RNA, 19 nt, Human
uccacauccacacacuucc

SEQ ID NO: 295929 - RNA, 22 nt, Human
uccaccaguggcaccucuggag

SEQ ID NO: 295930 - RNA, 20 nt, Human
uccaugcccccaccauccac

SEQ ID NO: 295931 - RNA, 21 nt, Human
ugaaaaacaaaacagaagacu

SEQ ID NO: 295932 - RNA, 18 nt, Human
ugacccuuccaccagugg

SEQ ID NO: 295933 - RNA, 22 nt, Human
ugacccuuccaccaguggcacc

SEQ ID NO: 295934 - RNA, 24 nt, Human
ugcccuagcucccugccuccccaa

SEQ ID NO: 295935 - RNA, 23 nt, Human
ugccugggcugagcccuauuaug

SEQ ID NO: 295936 - RNA, 22 nt, Human
ugcuggggcuccgcuccggggg

SEQ ID NO: 295937 - RNA, 21 nt, Human
uggaaacgucaaacaaugaaa

SEQ ID NO: 295938 - RNA, 25 nt, Human
uggaaacgucaaacaaugaaaaaca

SEQ ID NO: 295939 - RNA, 21 nt, Human
uggaaauuauaaaaugugaua

SEQ ID NO: 295940 - RNA, 18 nt, Human
uggaaggaggugaagggg

SEQ ID NO: 295941 - RNA, 21 nt, Human
uggaaggaggugaaggggcug

SEQ ID NO: 295942 - RNA, 22 nt, Human
uggaaggaggugaaggggcugg

SEQ ID NO: 295943 - RNA, 18 nt, Human
uggaaucuggaggauguu

SEQ ID NO: 295944 - RNA, 22 nt, Human
uggaaucuggaggauguuguca

SEQ ID NO: 295945 - RNA, 21 nt, Human
uggacacagcacaaaacacaa

SEQ ID NO: 295946 - RNA, 19 nt, Human
uggaggauguugucagucc

SEQ ID NO: 295947 - RNA, 21 nt, Human
uggagugggguggggaggagg

SEQ ID NO: 295948 - RNA, 23 nt, Human
uggauggccggggacccaggggc

SEQ ID NO: 295949 - RNA, 25 nt, Human
uggcaaaugguucuuggugucuaca

SEQ ID NO: 295950 - RNA, 19 nt, Human
uggcaaggugaaggacuga

SEQ ID NO: 295951 - RNA, 21 nt, Human
uggcaaggugaaggacugagg

SEQ ID NO: 295952 - RNA, 23 nt, Human
uggcaccucuggaguacccagca

SEQ ID NO: 295953 - RNA, 24 nt, Human
uggcaccucuggaguacccagcac

SEQ ID NO: 295954 - RNA, 18 nt, Human
uggcugccugggcugagc

SEQ ID NO: 295955 - RNA, 19 nt, Human
ugggaaggguccagccuag

SEQ ID NO: 295956 - RNA, 20 nt, Human
ugggaaggguccagccuagu

SEQ ID NO: 295957 - RNA, 20 nt, Human
ugggaaggguccagccuagu

SEQ ID NO: 295958 - RNA, 19 nt, Human
ugggauggaugggccugau

SEQ ID NO: 295959 - RNA, 20 nt, Human
ugggcugguuggggagaggc

SEQ ID NO: 295960 - RNA, 22 nt, Human
uggggaccugggcaguggccuu

SEQ ID NO: 295961 - RNA, 20 nt, Human
uggggaggagggaggcaugg

SEQ ID NO: 295962 - RNA, 21 nt, Human
uggggaggagggaggcauggg

SEQ ID NO: 295963 - RNA, 18 nt, Human
ugggugcagguaaggaga

SEQ ID NO: 295964 - RNA, 26 nt, Human
ugguaaacucauuuuuaccucuauca

SEQ ID NO: 295965 - RNA, 26 nt, Human
ugguagcaaaaugcccucccuaaauc

SEQ ID NO: 295966 - RNA, 21 nt, Human
ugguccccagggcguugggaa

SEQ ID NO: 295967 - RNA, 20 nt, Human
uggucccugcccuagcuccc

SEQ ID NO: 295968 - RNA, 23 nt, Human
ugguuuauggcuggaaucuggag

SEQ ID NO: 295969 - RNA, 18 nt, Human
uguaagggcaggucuggg

SEQ ID NO: 295970 - RNA, 23 nt, Human
ugucuacaguaaccccacuaccc

SEQ ID NO: 295971 - RNA, 19 nt, Human
uguggcaaaugguucuugg

SEQ ID NO: 295972 - RNA, 23 nt, Human
uguggcaaaugguucuugguguc

SEQ ID NO: 295973 - RNA, 20 nt, Human
uuauguagugggaagggucc

SEQ ID NO: 295974 - RNA, 20 nt, Human
uugauuuggaagauggagga

SEQ ID NO: 295975 - RNA, 21 nt, Human
uuguuucuguuucccaagggg

SEQ ID NO: 295976 - RNA, 21 nt, Human
uuuaaccaggcuauggccacu

SEQ ID NO: 295977 - RNA, 18 nt, Human
uuuucagaacuaggaggc

SEQ ID NO: 295978 - RNA, 21 nt, Human
aaaacacaacacgggccgccg

SEQ ID NO: 295979 - RNA, 18 nt, Human
aaaagaaacagccaaaga

SEQ ID NO: 295980 - RNA, 19 nt, Human
aaaagcacaccgcacuaca

SEQ ID NO: 295981 - RNA, 25 nt, Human
aaacaaaacagaagacuggucccca

SEQ ID NO: 295982 - RNA, 25 nt, Human
aaacaaaacagaagacuggucccca

SEQ ID NO: 295983 - RNA, 22 nt, Human
aaacaaugaaaaacaaaacaga

SEQ ID NO: 295984 - RNA, 23 nt, Human
aaacagaagacugguccccaggg

SEQ ID NO: 295985 - RNA, 20 nt, Human
aaaugcccucccuaaauccc

SEQ ID NO: 295986 - RNA, 19 nt, Human
aacagaagacugguccccc

SEQ ID NO: 295987 - RNA, 19 nt, Human
aagaggucaugaugcccuu

SEQ ID NO: 295988 - RNA, 23 nt, Human
aagcuggcugccugggcugagcc

SEQ ID NO: 295989 - RNA, 21 nt, Human
aaugaaaaacaaaacagaaga

SEQ ID NO: 295990 - RNA, 25 nt, Human
acaaaacacaacacgggccgccgcg

SEQ ID NO: 295991 - RNA, 22 nt, Human
acaaaacagaagacuggucccc

SEQ ID NO: 295992 - RNA, 18 nt, Human
acagagccuccuccaagg

SEQ ID NO: 295993 - RNA, 27 nt, Human
acagagccuccuccaaggccuugauaa

SEQ ID NO: 295994 - RNA, 22 nt, Human
acagcacaaaacacaacacggg

SEQ ID NO: 295995 - RNA, 21 nt, Human
accaugcuuugggggaagauu

SEQ ID NO: 295996 - RNA, 19 nt, Human
acucgggaaagaggaacug

SEQ ID NO: 295997 - RNA, 22 nt, Human
acugaaaugccaguuuaaucca

SEQ ID NO: 295998 - RNA, 20 nt, Human
agaaggucuaugcacaagga

SEQ ID NO: 295999 - RNA, 19 nt, Human
agaggaacuguuggagugg

SEQ ID NO: 296000 - RNA, 24 nt, Human
agcucagcccaaagcuggcugccu

SEQ ID NO: 296001 - RNA, 21 nt, Human
aggacauacagagccuccucc

SEQ ID NO: 296002 - RNA, 22 nt, Human
aggaggcuuguagguuacuugg

SEQ ID NO: 296003 - RNA, 20 nt, Human
aggagggaggcaugggaugg

SEQ ID NO: 296004 - RNA, 18 nt, Human
aggagggcaggggcccug

SEQ ID NO: 296005 - RNA, 19 nt, Human
aggaggugggggaagucaa

SEQ ID NO: 296006 - RNA, 18 nt, Human
agggggcgcacuggggac

SEQ ID NO: 296007 - RNA, 22 nt, Human
aguccuaaauaguuacugcacu

SEQ ID NO: 296008 - RNA, 25 nt, Human
auacagagccuccuccaaccggagg

SEQ ID NO: 296009 - RNA, 18 nt, Human
aucauuuuacaagcuuuc

SEQ ID NO: 296010 - RNA, 21 nt, Human
caaaacagaagacuggucccc

SEQ ID NO: 296011 - RNA, 24 nt, Human
caaaacauaauuuaugccaaauaa

SEQ ID NO: 296012 - RNA, 22 nt, Human
caacaccccaaccaccuuacuc

SEQ ID NO: 296013 - RNA, 21 nt, Human
cacacuucccuuccuuaucuu

SEQ ID NO: 296014 - RNA, 21 nt, Human
caccccauacugucuuggaac

SEQ ID NO: 296015 - RNA, 20 nt, Human
caccgcacuacacuacuggc

SEQ ID NO: 296016 - RNA, 18 nt, Human
cacuggggaccugggcag

SEQ ID NO: 296017 - RNA, 21 nt, Human
cagaauccucucagaaucuuc

SEQ ID NO: 296018 - RNA, 25 nt, Human
cagagccuccuccaaggccuugaua

SEQ ID NO: 296019 - RNA, 22 nt, Human
caggagggcaggggcccuguug

SEQ ID NO: 296020 - RNA, 22 nt, Human
caggggcagaagggggugggag

SEQ ID NO: 296021 - RNA, 22 nt, Human
caguauucuggggguuagcccu

SEQ ID NO: 296022 - RNA, 21 nt, Human
cauacagagccuccuccaagg

SEQ ID NO: 296023 - RNA, 23 nt, Human
ccaaaauaaacccaaaacucugu

SEQ ID NO: 296024 - RNA, 23 nt, Human
ccacacacuucccuuccuuaucu

SEQ ID NO: 296025 - RNA, 20 nt, Human
ccacagaggccccucugacc

SEQ ID NO: 296026 - RNA, 23 nt, Human
ccauacugucuuggaacaugcag

SEQ ID NO: 296027 - RNA, 26 nt, Human
ccauacugucuuggaacaugcagugg

SEQ ID NO: 296028 - RNA, 21 nt, Human
cccaccauccacauccacaca

SEQ ID NO: 296029 - RNA, 30 nt, Human; identical to SEQ ID NO: 294382

SEQ ID NO: 296030 - RNA, 19 nt, Human
cccauugugcucuaagcuu

SEQ ID NO: 296031 - RNA, 26 nt, Human
ccccaccauccacauccacacacuuc

SEQ ID NO: 296032 - RNA, 18 nt, Human
ccccacuacccccauggg

SEQ ID NO: 296033 - RNA, 20 nt, Human
ccccacuacccccaugggua

SEQ ID NO: 296034 - RNA, 21 nt, Human
ccccacuacccccauggguac

SEQ ID NO: 296035 - RNA, 25 nt, Human
cccccugggggggaagggguaggug

SEQ ID NO: 296036 - RNA, 21 nt, Human
ccccugaggacauacagagcc

SEQ ID NO: 296037 - RNA, 21 nt, Human
ccgccgcccgcugcccacccg

SEQ ID NO: 296038 - RNA, 22 nt, Human
ccuggcuggcccacccuuccug

SEQ ID NO: 296039 - RNA, 19 nt, Human
ccugggcugagacuuucug

SEQ ID NO: 296040 - RNA, 21 nt, Human
ccuguuagcucagcccaaagc

SEQ ID NO: 296041 - RNA, 24 nt, Human
cgcccgcugcccacccgccaucac

SEQ ID NO: 296042 - RNA, 23 nt, Human
cggcugcgcggagcccgccgccc

SEQ ID NO: 296043 - RNA, 24 nt, Human
cuagauuacugagaaaaaaaaauc

SEQ ID NO: 296044 - RNA, 22 nt, Human
cuauucuacaccagccgaaaga

SEQ ID NO: 296045 - RNA, 22 nt, Human
cucagcccaaagcuggcugccu

SEQ ID NO: 296046 - RNA, 25 nt, Human
cucuacuagauuacugagaaaaaaa

SEQ ID NO: 296047 - RNA, 21 nt, Human
cucucaaggggaccugguccu

SEQ ID NO: 296048 - RNA, 20 nt, Human
cugagaaaaaaaaaucauuu

SEQ ID NO: 296049 - RNA, 23 nt, Human
cugaggccugggugcagguaagg

SEQ ID NO: 296050 - RNA, 18 nt, Human
cugccugggcugagcccu

SEQ ID NO: 296051 - RNA, 18 nt, Human
cuggcaaggugaaggacu

SEQ ID NO: 296052 - RNA, 22 nt, Human
cuuuaaccaggcuauggccacu

SEQ ID NO: 296053 - RNA, 22 nt, Human
cuuuauuguaaaugucuccaau

SEQ ID NO: 296054 - RNA, 24 nt, Human
gaacuucaguugucaccagaaaug

SEQ ID NO: 296055 - RNA, 18 nt, Human
gaagauggaggaguucag

SEQ ID NO: 296056 - RNA, 21 nt, Human
gacccaggggcagaagggggu

SEQ ID NO: 296057 - RNA, 21 nt, Human
gagcauggccuuggccccuac

SEQ ID NO: 296058 - RNA, 20 nt, Human
gagugggguggggaggaggg

SEQ ID NO: 296059 - RNA, 26 nt, Human
gauuacuucuaaauguaauacucuac

SEQ ID NO: 296060 - RNA, 20 nt, Human
gcaccuggcaaggugaagga

SEQ ID NO: 296061 - RNA, 19 nt, Human
gcagaauccucucagaauc

SEQ ID NO: 296062 - RNA, 21 nt, Human
gcccccaccauccacauccac

SEQ ID NO: 296063 - RNA, 18 nt, Human
gcccuguggcucuuggcc

SEQ ID NO: 296064 - RNA, 20 nt, Human
gccuggcuggcccacccuuc

SEQ ID NO: 296065 - RNA, 18 nt, Human
gcggagcccgccgcccgc

SEQ ID NO: 296066 - RNA, 19 nt, Human
gcguggacacagcacaaaa

SEQ ID NO: 296067 - RNA, 21 nt, Human
gcguggacacagcacaaaaca

SEQ ID NO: 296068 - RNA, 19 nt, Human
gcugccugggcugagcccu

SEQ ID NO: 296069 - RNA, 20 nt, Human
gcugcgcggagcccgccgcc

SEQ ID NO: 296070 - RNA, 20 nt, Human
ggacccaggggcagaagggg

SEQ ID NO: 296071 - RNA, 22 nt, Human
ggagaagucaguacgggggagg

SEQ ID NO: 296072 - RNA, 19 nt, Human
ggaggagggaggcauggga

SEQ ID NO: 296073 - RNA, 20 nt, Human
ggagggggcgcuacacuacu

SEQ ID NO: 296074 - RNA, 21 nt, Human
ggagugggguggggaggaggg

SEQ ID NO: 296075 - RNA, 22 nt, Human
ggagugggguggggaggaggga

SEQ ID NO: 296076 - RNA, 21 nt, Human
ggcaggucugggguucucugg

SEQ ID NO: 296077 - RNA, 19 nt, Human
ggcguugggaagaggcuug

SEQ ID NO: 296078 - RNA, 19 nt, Human
gggaccugguccuaaaccu

SEQ ID NO: 296079 - RNA, 19 nt, Human
gggaggagggaggcauggg

SEQ ID NO: 296080 - RNA, 20 nt, Human
gggaggcaugggauggaugg

SEQ ID NO: 296081 - RNA, 21 nt, Human
gggcagaagggggugggagaa

SEQ ID NO: 296082 - RNA, 19 nt, Human
gggcguugggaagaggcuu

SEQ ID NO: 296083 - RNA, 18 nt, Human
ggggaagggguaggugcu

SEQ ID NO: 296084 - RNA, 30 nt, Human; identical to SEQ ID NO: 294429

SEQ ID NO: 296085 - RNA, 24 nt, Human
ggggagggggucgccuuagcgcgu

SEQ ID NO: 296086 - RNA, 27 nt, Human
ggggcagaagggggugggagaagaagg

SEQ ID NO: 296087 - RNA, 19 nt, Human
gggguggggaggagggagg

SEQ ID NO: 296088 - RNA, 20 nt, Human
gggguggggaggagggaggc

SEQ ID NO: 296089 - RNA, 23 nt, Human
gugaaggacugaggcuucaggag

SEQ ID NO: 296090 - RNA, 18 nt, Human
guuguuuugcugcagaau

SEQ ID NO: 296091 - RNA, 21 nt, Human
guuuauggcuggaaucuggag

SEQ ID NO: 296092 - RNA, 24 nt, Human
uaaaagaaacagccaaagaaugug

SEQ ID NO: 296093 - RNA, 23 nt, Human
uaaaugaucagauuagaucagaa

SEQ ID NO: 296094 - RNA, 22 nt, Human
uaacaaauaacuaagaacuuca

SEQ ID NO: 296095 - RNA, 23 nt, Human
uacaagcuuucuauagaguuguu

SEQ ID NO: 296096 - RNA, 20 nt, Human
uacagagccuccuccaaggg

SEQ ID NO: 296097 - RNA, 21 nt, Human
uaccaguauucuggggguuag

SEQ ID NO: 296098 - RNA, 18 nt, Human
uacucgggaaagaggaac

SEQ ID NO: 296099 - RNA, 19 nt, Human
uagaccuacuggagaugac

SEQ ID NO: 296100 - RNA, 19 nt, Human
uagcccugaaacucugagg

SEQ ID NO: 296101 - RNA, 23 nt, Human
uagcccugaaacucugaggccug

SEQ ID NO: 296102 - RNA, 24 nt, Human
uaggagaagucaguacgggggagg

SEQ ID NO: 296103 - RNA, 22 nt, Human
uaguaacaccaccaaaauaaac

SEQ ID NO: 296104 - RNA, 25 nt, Human
uaucuuaccaccccauacugucuug

SEQ ID NO: 296105 - RNA, 19 nt, Human
uauguagugggaagggucc

SEQ ID NO: 296106 - RNA, 22 nt, Human
ucaauuuuauaguaacaccacc

SEQ ID NO: 296107 - RNA, 20 nt, Human
ucacugugcauaaauggguc

SEQ ID NO: 296108 - RNA, 20 nt, Human
ucagcccaaagcuggcugcc

SEQ ID NO: 296109 - RNA, 18 nt, Human
ucaguccccugaggacau

SEQ ID NO: 296110 - RNA, 24 nt, Human
uccaaaacuugagcauugaucuug

SEQ ID NO: 296111 - RNA, 19 nt, Human
uccacauccacacacuucc

SEQ ID NO: 296112 - RNA, 22 nt, Human
uccaccaguggcaccucuggag

SEQ ID NO: 296113 - RNA, 20 nt, Human
uccaugcccccaccauccac

SEQ ID NO: 296114 - RNA, 21 nt, Human
ugaaaaacaaaacagaagacu

SEQ ID NO: 296115 - RNA, 18 nt, Human
ugacccuuccaccagugg

SEQ ID NO: 296116 - RNA, 22 nt, Human
ugacccuuccaccaguggcacc

SEQ ID NO: 296117 - RNA, 24 nt, Human
ugcccuagcucccugccuccccaa

SEQ ID NO: 296118 - RNA, 23 nt, Human
ugccugggcugagcccuauuaug

SEQ ID NO: 296119 - RNA, 22 nt, Human
ugcuggggcuccgcuccggggg

SEQ ID NO: 296120 - RNA, 21 nt, Human
uggaaacgucaaacaaugaaa

SEQ ID NO: 296121 - RNA, 25 nt, Human
uggaaacgucaaacaaugaaaaaca

SEQ ID NO: 296122 - RNA, 18 nt, Human
uggaaggaggugaagggg

SEQ ID NO: 296123 - RNA, 21 nt, Human
uggaaggaggugaaggggcug

SEQ ID NO: 296124 - RNA, 22 nt, Human
uggaaggaggugaaggggcugg

SEQ ID NO: 296125 - RNA, 18 nt, Human
uggaaucuggaggauguu

SEQ ID NO: 296126 - RNA, 22 nt, Human
uggaaucuggaggauguuguca

SEQ ID NO: 296127 - RNA, 21 nt, Human
uggacacagcacaaaacacaa

SEQ ID NO: 296128 - RNA, 19 nt, Human
uggaggauguugucagucc

SEQ ID NO: 296129 - RNA, 21 nt, Human
uggagugggguggggaggagg

SEQ ID NO: 296130 - RNA, 23 nt, Human
uggauggccggggacccaggggc

SEQ ID NO: 296131 - RNA, 25 nt, Human
uggcaaaugguucuuggugucuaca

SEQ ID NO: 296132 - RNA, 19 nt, Human
uggcaaggugaaggacuga

SEQ ID NO: 296133 - RNA, 21 nt, Human
uggcaaggugaaggacugagg

SEQ ID NO: 296134 - RNA, 23 nt, Human
uggcaccucuggaguacccagca

SEQ ID NO: 296135 - RNA, 24 nt, Human
uggcaccucuggaguacccagcac

SEQ ID NO: 296136 - RNA, 22 nt, Human
uggcaucugcgggucuucguga

SEQ ID NO: 296137 - RNA, 23 nt, Human
uggcaucugcgggucuucgugag

SEQ ID NO: 296138 - RNA, 18 nt, Human
uggcugccugggcugagc

SEQ ID NO: 296139 - RNA, 19 nt, Human
ugggaaggguccagccuag

SEQ ID NO: 296140 - RNA, 20 nt, Human
ugggaaggguccagccuagu

SEQ ID NO: 296141 - RNA, 20 nt, Human
ugggaaggguccagccuagu

SEQ ID NO: 296142 - RNA, 19 nt, Human
ugggauggaugggccugau

SEQ ID NO: 296143 - RNA, 20 nt, Human
ugggcugguuggggagaggc

SEQ ID NO: 296144 - RNA, 22 nt, Human
uggggaccugggcaguggccuu

SEQ ID NO: 296145 - RNA, 20 nt, Human
uggggaggagggaggcaugg

SEQ ID NO: 296146 - RNA, 21 nt, Human
uggggaggagggaggcauggg

SEQ ID NO: 296147 - RNA, 18 nt, Human
ugggugcagguaaggaga

SEQ ID NO: 296148 - RNA, 26 nt, Human
ugguagcaaaaugcccucccuaaauc

SEQ ID NO: 296149 - RNA, 21 nt, Human
ugguccccagggcguugggaa

SEQ ID NO: 296150 - RNA, 20 nt, Human
uggucccugcccuagcuccc

SEQ ID NO: 296151 - RNA, 20 nt, Human
ugguuuaaacuacuuaauca

SEQ ID NO: 296152 - RNA, 18 nt, Human
uguaagggcaggucuggg

SEQ ID NO: 296153 - RNA, 23 nt, Human
ugucuacaguaaccccacuaccc

SEQ ID NO: 296154 - RNA, 19 nt, Human
uguggcaaaugguucuugg

SEQ ID NO: 296155 - RNA, 23 nt, Human
uguggcaaaugguucuugguguc

SEQ ID NO: 296156 - RNA, 19 nt, Human
uguuguuuugcugcagaau

SEQ ID NO: 296157 - RNA, 23 nt, Human
uguuuugcugcagaauccucuca

SEQ ID NO: 296158 - RNA, 26 nt, Human
uuauccguaaacccauauuuuaaaag

SEQ ID NO: 296159 - RNA, 24 nt, Human
uucccauugugcucuaagcuuuau

SEQ ID NO: 296160 - RNA, 21 nt, Human
uugagacuaaaauagaccuac

SEQ ID NO: 296161 - RNA, 20 nt, Human
uugauuuggaagauggagga

SEQ ID NO: 296162 - RNA, 19 nt, Human
uuggaagauggaggaguuc

SEQ ID NO: 296163 - RNA, 21 nt, Human
uuguuucuguuucccaagggg

SEQ ID NO: 296164 - RNA, 21 nt, Human
uuguuugaggaggaggugggg

SEQ ID NO: 296165 - RNA, 24 nt, Human
uuucuauagaguuguugcuuuuaa

SEQ ID NO: 296166 - RNA, 26 nt, Human
uuucuugccgcagcuauggagaugac

SEQ ID NO: 296167 - RNA, 18 nt, Human
uuuucagaacuaggaggc

SEQ ID NO: 296168 - RNA, 21 nt, Human
aaaacacaacacgggccgccg

SEQ ID NO: 296169 - RNA, 24 nt, Human
aaaacagaagacugguccccaggg

SEQ ID NO: 296170 - RNA, 19 nt, Human
aaaagcacaccgcacuaca

SEQ ID NO: 296171 - RNA, 25 nt, Human
aaacaaaacagaagacuggucccca

SEQ ID NO: 296172 - RNA, 25 nt, Human
aaacaaaacagaagacuggucccca

SEQ ID NO: 296173 - RNA, 22 nt, Human
aaacaaugaaaaacaaaacaga

SEQ ID NO: 296174 - RNA, 18 nt, Human
aaaugcccucccuaaauc

SEQ ID NO: 296175 - RNA, 19 nt, Human
aacagaagacugguccccc

SEQ ID NO: 296176 - RNA, 23 nt, Human
aagcuggcugccugggcugagcc

SEQ ID NO: 296177 - RNA, 21 nt, Human
aaugaaaaacaaaacagaaga

SEQ ID NO: 296178 - RNA, 25 nt, Human
acaaaacacaacacgggccgccgcg

SEQ ID NO: 296179 - RNA, 22 nt, Human
acaaaacagaagacuggucccc

SEQ ID NO: 296180 - RNA, 27 nt, Human
acagagccuccuccaaggccuugauaa

SEQ ID NO: 296181 - RNA, 22 nt, Human
acagcacaaaacacaacacggg

SEQ ID NO: 296182 - RNA, 21 nt, Human
accaugcuuugggggaagauu

SEQ ID NO: 296183 - RNA, 19 nt, Human
acucgggaaagaggaacug

SEQ ID NO: 296184 - RNA, 22 nt, Human
acugaaaugccaguuuaaucca

SEQ ID NO: 296185 - RNA, 20 nt, Human
agaaggucuaugcacaagga

SEQ ID NO: 296186 - RNA, 19 nt, Human
agaggaacuguuggagugg

SEQ ID NO: 296187 - RNA, 24 nt, Human
agcucagcccaaagcuggcugccu

SEQ ID NO: 296188 - RNA, 21 nt, Human
aggacauacagagccuccucc

SEQ ID NO: 296189 - RNA, 23 nt, Human
aggagaagucaguacgggggagg

SEQ ID NO: 296190 - RNA, 22 nt, Human
aggaggcuuguagguuacuugg

SEQ ID NO: 296191 - RNA, 18 nt, Human
aggagggcaggggcccug

SEQ ID NO: 296192 - RNA, 19 nt, Human
aggaggugggggaagucaa

SEQ ID NO: 296193 - RNA, 18 nt, Human
agggggcgcacuggggac

SEQ ID NO: 296194 - RNA, 25 nt, Human
auacagagccuccuccaaccggagg

SEQ ID NO: 296195 - RNA, 21 nt, Human
caaaacagaagacuggucccc

SEQ ID NO: 296196 - RNA, 22 nt, Human
caacaccccaaccaccuuacuc

SEQ ID NO: 296197 - RNA, 20 nt, Human
caagaggucaugaugcccuu

SEQ ID NO: 296198 - RNA, 21 nt, Human
cacacuucccuuccuuaucuu

SEQ ID NO: 296199 - RNA, 21 nt, Human
caccccauacugucuuggaac

SEQ ID NO: 296200 - RNA, 20 nt, Human
caccgcacuacacuacuggc

SEQ ID NO: 296201 - RNA, 18 nt, Human
cacuggggaccugggcag

SEQ ID NO: 296202 - RNA, 25 nt, Human
cagagccuccuccaaggccuugaua

SEQ ID NO: 296203 - RNA, 22 nt, Human
caggagggcaggggcccuguug

SEQ ID NO: 296204 - RNA, 22 nt, Human
caggggcagaagggggugggag

SEQ ID NO: 296205 - RNA, 22 nt, Human
caguauucuggggguuagcccu

SEQ ID NO: 296206 - RNA, 21 nt, Human
cauacagagccuccuccaagg

SEQ ID NO: 296207 - RNA, 23 nt, Human
ccacacacuucccuuccuuaucu

SEQ ID NO: 296208 - RNA, 23 nt, Human
ccauacugucuuggaacaugcag

SEQ ID NO: 296209 - RNA, 26 nt, Human
ccauacugucuuggaacaugcagugg

SEQ ID NO: 296210 - RNA, 21 nt, Human
cccacagaggccccucugacc

SEQ ID NO: 296211 - RNA, 21 nt, Human
cccaccauccacauccacaca

SEQ ID NO: 296212 - RNA, 30 nt, Human; identical to SEQ ID NO: 294382

SEQ ID NO: 296213 - RNA, 18 nt, Human
ccccacuacccccauggg

SEQ ID NO: 296214 - RNA, 20 nt, Human
ccccacuacccccaugggua

SEQ ID NO: 296215 - RNA, 21 nt, Human
ccccacuacccccauggguac

SEQ ID NO: 296216 - RNA, 27 nt, Human
cccccaccauccacauccacacacuuc

SEQ ID NO: 296217 - RNA, 25 nt, Human
cccccugggggggaagggguaggug

SEQ ID NO: 296218 - RNA, 21 nt, Human
ccccugaggacauacagagcc

SEQ ID NO: 296219 - RNA, 20 nt, Human
cccugaaacucugaggccug

SEQ ID NO: 296220 - RNA, 21 nt, Human
ccgccgcccgcugcccacccg

SEQ ID NO: 296221 - RNA, 22 nt, Human
ccuggcuggcccacccuuccug

SEQ ID NO: 296222 - RNA, 19 nt, Human
ccugggcugagacuuucug

SEQ ID NO: 296223 - RNA, 21 nt, Human
ccugggcugagcccuauuaug

SEQ ID NO: 296224 - RNA, 21 nt, Human
ccuguuagcucagcccaaagc

SEQ ID NO: 296225 - RNA, 24 nt, Human
cgcccgcugcccacccgccaucac

SEQ ID NO: 296226 - RNA, 19 nt, Human
cgcccuguggcucuuggcc

SEQ ID NO: 296227 - RNA, 22 nt, Human
cgcguggacacagcacaaaaca

SEQ ID NO: 296228 - RNA, 23 nt, Human
cggcugcgcggagcccgccgccc

SEQ ID NO: 296229 - RNA, 22 nt, Human
cuauucuacaccagccgaaaga

SEQ ID NO: 296230 - RNA, 22 nt, Human
cucagcccaaagcuggcugccu

SEQ ID NO: 296231 - RNA, 21 nt, Human
cucucaaggggaccugguccu

SEQ ID NO: 296232 - RNA, 23 nt, Human
cugaggccugggugcagguaagg

SEQ ID NO: 296233 - RNA, 18 nt, Human
cugccugggcugagcccu

SEQ ID NO: 296234 - RNA, 18 nt, Human
cuggcaaggugaaggacu

SEQ ID NO: 296235 - RNA, 22 nt, Human
cuuguuugaggaggaggugggg

SEQ ID NO: 296236 - RNA, 22 nt, Human
cuuuaaccaggcuauggccacu

SEQ ID NO: 296237 - RNA, 18 nt, Human
gaagauggaggaguucag

SEQ ID NO: 296238 - RNA, 21 nt, Human
gacccaggggcagaagggggu

SEQ ID NO: 296239 - RNA, 21 nt, Human
gagcauggccuuggccccuac

SEQ ID NO: 296240 - RNA, 18 nt, Human
gaggagggaggcauggga

SEQ ID NO: 296241 - RNA, 21 nt, Human
gaggagggaggcaugggaugg

SEQ ID NO: 296242 - RNA, 20 nt, Human
gagugggguggggaggaggg

SEQ ID NO: 296243 - RNA, 20 nt, Human
gcaccuggcaaggugaagga

SEQ ID NO: 296244 - RNA, 21 nt, Human
gcccccaccauccacauccac

SEQ ID NO: 296245 - RNA, 18 nt, Human
gcccuguggcucuuggcc

SEQ ID NO: 296246 - RNA, 20 nt, Human
gccuggcuggcccacccuuc

SEQ ID NO: 296247 - RNA, 18 nt, Human
gcggagcccgccgcccgc

SEQ ID NO: 296248 - RNA, 19 nt, Human
gcguggacacagcacaaaa

SEQ ID NO: 296249 - RNA, 20 nt, Human
gcugcgcggagcccgccgcc

SEQ ID NO: 296250 - RNA, 20 nt, Human
ggacccaggggcagaagggg

SEQ ID NO: 296251 - RNA, 22 nt, Human
ggagaagucaguacgggggagg

SEQ ID NO: 296252 - RNA, 20 nt, Human
ggagggggcgcuacacuacu

SEQ ID NO: 296253 - RNA, 21 nt, Human
ggagugggguggggaggaggg

SEQ ID NO: 296254 - RNA, 22 nt, Human
ggagugggguggggaggaggga

SEQ ID NO: 296255 - RNA, 21 nt, Human
ggcaggucugggguucucugg

SEQ ID NO: 296256 - RNA, 19 nt, Human
ggcguugggaagaggcuug

SEQ ID NO: 296257 - RNA, 19 nt, Human
gggaccugguccuaaaccu

SEQ ID NO: 296258 - RNA, 19 nt, Human
gggaggagggaggcauggg

SEQ ID NO: 296259 - RNA, 20 nt, Human
gggaggcaugggauggaugg

SEQ ID NO: 296260 - RNA, 21 nt, Human
gggcagaagggggugggagaa

SEQ ID NO: 296261 - RNA, 18 nt, Human
ggggaagggguaggugcu

SEQ ID NO: 296262 - RNA, 30 nt, Human; identical to SEQ ID NO: 294429

SEQ ID NO: 296263 - RNA, 24 nt, Human
ggggagggggucgccuuagcgcgu

SEQ ID NO: 296264 - RNA, 27 nt, Human
ggggcagaagggggugggagaagaagg

SEQ ID NO: 296265 - RNA, 19 nt, Human
gggguggggaggagggagg

SEQ ID NO: 296266 - RNA, 20 nt, Human
gggguggggaggagggaggc

SEQ ID NO: 296267 - RNA, 21 nt, Human
guccaugcccccaccauccac

SEQ ID NO: 296268 - RNA, 23 nt, Human
gugaaggacugaggcuucaggag

SEQ ID NO: 296269 - RNA, 20 nt, Human
uacagagccuccuccaaggg

SEQ ID NO: 296270 - RNA, 21 nt, Human
uaccaguauucuggggguuag

SEQ ID NO: 296271 - RNA, 18 nt, Human
uacucgggaaagaggaac

SEQ ID NO: 296272 - RNA, 19 nt, Human
uagcccugaaacucugagg

SEQ ID NO: 296273 - RNA, 25 nt, Human
uaucuuaccaccccauacugucuug

SEQ ID NO: 296274 - RNA, 20 nt, Human
ucagcccaaagcuggcugcc

SEQ ID NO: 296275 - RNA, 18 nt, Human
ucaguccccugaggacau

SEQ ID NO: 296276 - RNA, 24 nt, Human
uccaaaacuugagcauugaucuug

SEQ ID NO: 296277 - RNA, 19 nt, Human
uccacauccacacacuucc

SEQ ID NO: 296278 - RNA, 22 nt, Human
uccaccaguggcaccucuggag

SEQ ID NO: 296279 - RNA, 19 nt, Human
ugaaaaacaaaacagaaga

SEQ ID NO: 296280 - RNA, 21 nt, Human
ugaaaaacaaaacagaagacu

SEQ ID NO: 296281 - RNA, 18 nt, Human
ugacccuuccaccagugg

SEQ ID NO: 296282 - RNA, 22 nt, Human
ugacccuuccaccaguggcacc

SEQ ID NO: 296283 - RNA, 24 nt, Human
ugcccuagcucccugccuccccaa

SEQ ID NO: 296284 - RNA, 19 nt, Human
ugccugggcugagcccuau

SEQ ID NO: 296285 - RNA, 23 nt, Human
ugccugggcugagcccuauuaug

SEQ ID NO: 296286 - RNA, 22 nt, Human
ugcuggggcuccgcuccggggg

SEQ ID NO: 296287 - RNA, 21 nt, Human
uggaaacgucaaacaaugaaa

SEQ ID NO: 296288 - RNA, 25 nt, Human
uggaaacgucaaacaaugaaaaaca

SEQ ID NO: 296289 - RNA, 18 nt, Human
uggaaggaggugaagggg

SEQ ID NO: 296290 - RNA, 21 nt, Human
uggaaggaggugaaggggcug

SEQ ID NO: 296291 - RNA, 22 nt, Human
uggaaggaggugaaggggcugg

SEQ ID NO: 296292 - RNA, 18 nt, Human
uggaaucuggaggauguu

SEQ ID NO: 296293 - RNA, 22 nt, Human
uggaaucuggaggauguuguca

SEQ ID NO: 296294 - RNA, 21 nt, Human
uggacacagcacaaaacacaa

SEQ ID NO: 296295 - RNA, 19 nt, Human
uggaggauguugucagucc

SEQ ID NO: 296296 - RNA, 21 nt, Human
uggagugggguggggaggagg

SEQ ID NO: 296297 - RNA, 23 nt, Human
uggauggccggggacccaggggc

SEQ ID NO: 296298 - RNA, 29 nt, Human
uggcaaaugguucuuggugucuacaguaa

SEQ ID NO: 296299 - RNA, 19 nt, Human
uggcaaggugaaggacuga

SEQ ID NO: 296300 - RNA, 21 nt, Human
uggcaaggugaaggacugagg

SEQ ID NO: 296301 - RNA, 23 nt, Human
uggcaccucuggaguacccagca

SEQ ID NO: 296302 - RNA, 24 nt, Human
uggcaccucuggaguacccagcac

SEQ ID NO: 296303 - RNA, 18 nt, Human
uggcugccugggcugagc

SEQ ID NO: 296304 - RNA, 21 nt, Human
uggcugccugggcugagcccu

SEQ ID NO: 296305 - RNA, 19 nt, Human
ugggaaggguccagccuag

SEQ ID NO: 296306 - RNA, 20 nt, Human
ugggaaggguccagccuagu

SEQ ID NO: 296307 - RNA, 19 nt, Human
ugggauggaugggccugau

SEQ ID NO: 296308 - RNA, 20 nt, Human
ugggcugguuggggagaggc

SEQ ID NO: 296309 - RNA, 22 nt, Human
uggggaccugggcaguggccuu

SEQ ID NO: 296310 - RNA, 20 nt, Human
uggggaggagggaggcaugg

SEQ ID NO: 296311 - RNA, 21 nt, Human
uggggaggagggaggcauggg

SEQ ID NO: 296312 - RNA, 18 nt, Human
ugggugcagguaaggaga

SEQ ID NO: 296313 - RNA, 26 nt, Human
ugguagcaaaaugcccucccuaaauc

SEQ ID NO: 296314 - RNA, 21 nt, Human
ugguccccagggcguugggaa

SEQ ID NO: 296315 - RNA, 20 nt, Human
uggucccugcccuagcuccc

SEQ ID NO: 296316 - RNA, 23 nt, Human
ugguuuauggcuggaaucuggag

SEQ ID NO: 296317 - RNA, 18 nt, Human
uguaagggcaggucuggg

SEQ ID NO: 296318 - RNA, 23 nt, Human
ugucuacaguaaccccacuaccc

SEQ ID NO: 296319 - RNA, 19 nt, Human
uguggcaaaugguucuugg

SEQ ID NO: 296320 - RNA, 23 nt, Human
uguggcaaaugguucuugguguc

SEQ ID NO: 296321 - RNA, 20 nt, Human
uuauguagugggaagggucc

SEQ ID NO: 296322 - RNA, 20 nt, Human
uugauuuggaagauggagga

SEQ ID NO: 296323 - RNA, 19 nt, Human
uuggaagauggaggaguuc

SEQ ID NO: 296324 - RNA, 21 nt, Human
uuguuucuguuucccaagggg

SEQ ID NO: 296325 - RNA, 18 nt, Human
uuuucagaacuaggaggc

SEQ ID NO: 296326 - RNA, 21 nt, Human
aaaacacaacacgggccgccg

SEQ ID NO: 296327 - RNA, 24 nt, Human
aaaacagaagacugguccccaggg

SEQ ID NO: 296328 - RNA, 19 nt, Human
aaaagcacaccgcacuaca

SEQ ID NO: 296329 - RNA, 24 nt, Human
aaacaaaacagaagacuggucccc

SEQ ID NO: 296330 - RNA, 25 nt, Human
aaacaaaacagaagacuggucccca

SEQ ID NO: 296331 - RNA, 20 nt, Human
aaaugcccucccuaaauccc

SEQ ID NO: 296332 - RNA, 19 nt, Human
aacagaagacugguccccc

SEQ ID NO: 296333 - RNA, 23 nt, Human
aagcuggcugccugggcugagcc

SEQ ID NO: 296334 - RNA, 25 nt, Human
acaaaacacaacacgggccgccgcg

SEQ ID NO: 296335 - RNA, 22 nt, Human
acaaaacagaagacuggucccc

SEQ ID NO: 296336 - RNA, 18 nt, Human
acagagccuccuccaagg

SEQ ID NO: 296337 - RNA, 27 nt, Human
acagagccuccuccaaggccuugauaa

SEQ ID NO: 296338 - RNA, 22 nt, Human
acagcacaaaacacaacacggg

SEQ ID NO: 296339 - RNA, 21 nt, Human
accaugcuuugggggaagauu

SEQ ID NO: 296340 - RNA, 19 nt, Human
acucgggaaagaggaacug

SEQ ID NO: 296341 - RNA, 22 nt, Human
acugaaaugccaguuuaaucca

SEQ ID NO: 296342 - RNA, 20 nt, Human
agaaggucuaugcacaagga

SEQ ID NO: 296343 - RNA, 19 nt, Human
agaggaacuguuggagugg

SEQ ID NO: 296344 - RNA, 24 nt, Human
agcucagcccaaagcuggcugccu

SEQ ID NO: 296345 - RNA, 21 nt, Human
aggacauacagagccuccucc

SEQ ID NO: 296346 - RNA, 23 nt, Human
aggagaagucaguacgggggagg

SEQ ID NO: 296347 - RNA, 22 nt, Human
aggaggcuuguagguuacuugg

SEQ ID NO: 296348 - RNA, 20 nt, Human
aggagggaggcaugggaugg

SEQ ID NO: 296349 - RNA, 18 nt, Human
aggagggcaggggcccug

SEQ ID NO: 296350 - RNA, 19 nt, Human
aggaggugggggaagucaa

SEQ ID NO: 296351 - RNA, 23 nt, Human
agggaggcaugggauggaugggg

SEQ ID NO: 296352 - RNA, 21 nt, Human
aggggcagaagggggugggag

SEQ ID NO: 296353 - RNA, 18 nt, Human
agggggcgcacuggggac

SEQ ID NO: 296354 - RNA, 25 nt, Human
auacagagccuccuccaaccggagg

SEQ ID NO: 296355 - RNA, 20 nt, Human
auucuacaccagccgaaaga

SEQ ID NO: 296356 - RNA, 21 nt, Human
caaaacagaagacuggucccc

SEQ ID NO: 296357 - RNA, 23 nt, Human
caaacaaugaaaaacaaaacaga

SEQ ID NO: 296358 - RNA, 22 nt, Human
caacaccccaaccaccuuacuc

SEQ ID NO: 296359 - RNA, 20 nt, Human
caagaggucaugaugcccuu

SEQ ID NO: 296360 - RNA, 21 nt, Human
cacacuucccuuccuuaucuu

SEQ ID NO: 296361 - RNA, 21 nt, Human
caccccauacugucuuggaac

SEQ ID NO: 296362 - RNA, 20 nt, Human
caccgcacuacacuacuggc

SEQ ID NO: 296363 - RNA, 18 nt, Human
cacuggggaccugggcag

SEQ ID NO: 296364 - RNA, 25 nt, Human
cagagccuccuccaaggccuugaua

SEQ ID NO: 296365 - RNA, 22 nt, Human
caggagggcaggggcccuguug

SEQ ID NO: 296366 - RNA, 22 nt, Human
caguauucuggggguuagcccu

SEQ ID NO: 296367 - RNA, 21 nt, Human
cauacagagccuccuccaagg

SEQ ID NO: 296368 - RNA, 23 nt, Human
ccacacacuucccuuccuuaucu

SEQ ID NO: 296369 - RNA, 29 nt, Human
ccacccgccaucacguaaaagcacaccgg

SEQ ID NO: 296370 - RNA, 23 nt, Human
ccauacugucuuggaacaugcag

SEQ ID NO: 296371 - RNA, 26 nt, Human
ccauacugucuuggaacaugcagugg

SEQ ID NO: 296372 - RNA, 21 nt, Human
cccacagaggccccucugacc

SEQ ID NO: 296373 - RNA, 21 nt, Human
cccaccauccacauccacaca

SEQ ID NO: 296374 - RNA, 26 nt, Human
ccccaccauccacauccacacacuuc

SEQ ID NO: 296375 - RNA, 19 nt, Human
ccccacuacccccaugggu

SEQ ID NO: 296376 - RNA, 20 nt, Human
ccccacuacccccaugggua

SEQ ID NO: 296377 - RNA, 21 nt, Human
ccccacuacccccauggguac

SEQ ID NO: 296378 - RNA, 25 nt, Human
cccccugggggggaagggguaggug

SEQ ID NO: 296379 - RNA, 21 nt, Human
ccccugaggacauacagagcc

SEQ ID NO: 296380 - RNA, 20 nt, Human
cccugaaacucugaggccug

SEQ ID NO: 296381 - RNA, 21 nt, Human
ccgccgcccgcugcccacccg

SEQ ID NO: 296382 - RNA, 22 nt, Human
ccucucaaggggaccugguccu

SEQ ID NO: 296383 - RNA, 22 nt, Human
ccuggcuggcccacccuuccug

SEQ ID NO: 296384 - RNA, 19 nt, Human
ccugggcugagacuuucug

SEQ ID NO: 296385 - RNA, 21 nt, Human
ccuguuagcucagcccaaagc

SEQ ID NO: 296386 - RNA, 24 nt, Human
cgcccgcugcccacccgccaucac

SEQ ID NO: 296387 - RNA, 22 nt, Human
cgcguggacacagcacaaaaca

SEQ ID NO: 296388 - RNA, 22 nt, Human
cucagcccaaagcuggcugccu

SEQ ID NO: 296389 - RNA, 23 nt, Human
cugaggccugggugcagguaagg

SEQ ID NO: 296390 - RNA, 18 nt, Human
cugccugggcugagcccu

SEQ ID NO: 296391 - RNA, 18 nt, Human
cuggcaaggugaaggacu

SEQ ID NO: 296392 - RNA, 22 nt, Human
cuuguuugaggaggaggugggg

SEQ ID NO: 296393 - RNA, 18 nt, Human
gaaaaacaaaacagaaga

SEQ ID NO: 296394 - RNA, 18 nt, Human
gaagauggaggaguucag

SEQ ID NO: 296395 - RNA, 21 nt, Human
gacccaggggcagaagggggu

SEQ ID NO: 296396 - RNA, 21 nt, Human
gagcauggccuuggccccuac

SEQ ID NO: 296397 - RNA, 18 nt, Human
gaggagggaggcauggga

SEQ ID NO: 296398 - RNA, 20 nt, Human
gagugggguggggaggaggg

SEQ ID NO: 296399 - RNA, 20 nt, Human
gcaccuggcaaggugaagga

SEQ ID NO: 296400 - RNA, 21 nt, Human
gcccccaccauccacauccac

SEQ ID NO: 296401 - RNA, 18 nt, Human
gcccuguggcucuuggcc

SEQ ID NO: 296402 - RNA, 20 nt, Human
gccuggcuggcccacccuuc

SEQ ID NO: 296403 - RNA, 18 nt, Human
gcggagcccgccgcccgc

SEQ ID NO: 296404 - RNA, 19 nt, Human
gcguggacacagcacaaaa

SEQ ID NO: 296405 - RNA, 20 nt, Human
gcugcgcggagcccgccgcc

SEQ ID NO: 296406 - RNA, 20 nt, Human
ggacccaggggcagaagggg

SEQ ID NO: 296407 - RNA, 22 nt, Human
ggagaagucaguacgggggagg

SEQ ID NO: 296408 - RNA, 20 nt, Human
ggagggggcgcuacacuacu

SEQ ID NO: 296409 - RNA, 21 nt, Human
ggagugggguggggaggaggg

SEQ ID NO: 296410 - RNA, 22 nt, Human
ggagugggguggggaggaggga

SEQ ID NO: 296411 - RNA, 21 nt, Human
ggcaggucugggguucucugg

SEQ ID NO: 296412 - RNA, 19 nt, Human
ggcguugggaagaggcuug

SEQ ID NO: 296413 - RNA, 19 nt, Human
gggaccugguccuaaaccu

SEQ ID NO: 296414 - RNA, 19 nt, Human
gggaggagggaggcauggg

SEQ ID NO: 296415 - RNA, 20 nt, Human
gggaggcaugggauggaugg

SEQ ID NO: 296416 - RNA, 21 nt, Human
gggcagaagggggugggagaa

SEQ ID NO: 296417 - RNA, 19 nt, Human
gggcguugggaagaggcuu

SEQ ID NO: 296418 - RNA, 18 nt, Human
ggggaagggguaggugcu

SEQ ID NO: 296419 - RNA, 24 nt, Human
ggggagggggucgccuuagcgcgu

SEQ ID NO: 296420 - RNA, 27 nt, Human
ggggcagaagggggugggagaagaagg

SEQ ID NO: 296421 - RNA, 19 nt, Human
gggguggggaggagggagg

SEQ ID NO: 296422 - RNA, 20 nt, Human
gggguggggaggagggaggc

SEQ ID NO: 296423 - RNA, 21 nt, Human
guccaugcccccaccauccac

SEQ ID NO: 296424 - RNA, 23 nt, Human
gugaaggacugaggcuucaggag

SEQ ID NO: 296425 - RNA, 20 nt, Human
uacagagccuccuccaaggg

SEQ ID NO: 296426 - RNA, 21 nt, Human
uaccaguauucuggggguuag

SEQ ID NO: 296427 - RNA, 18 nt, Human
uacucgggaaagaggaac

SEQ ID NO: 296428 - RNA, 19 nt, Human
uagcccugaaacucugagg

SEQ ID NO: 296429 - RNA, 25 nt, Human
uaucuuaccaccccauacugucuug

SEQ ID NO: 296430 - RNA, 19 nt, Human
uauguagugggaagggucc

SEQ ID NO: 296431 - RNA, 20 nt, Human
ucagcccaaagcuggcugcc

SEQ ID NO: 296432 - RNA, 18 nt, Human
ucaguccccugaggacau

SEQ ID NO: 296433 - RNA, 24 nt, Human
uccaaaacuugagcauugaucuug

SEQ ID NO: 296434 - RNA, 19 nt, Human
uccacauccacacacuucc

SEQ ID NO: 296435 - RNA, 22 nt, Human
uccaccaguggcaccucuggag

SEQ ID NO: 296436 - RNA, 19 nt, Human
ugaaaaacaaaacagaaga

SEQ ID NO: 296437 - RNA, 21 nt, Human
ugaaaaacaaaacagaagacu

SEQ ID NO: 296438 - RNA, 18 nt, Human
ugacccuuccaccagugg

SEQ ID NO: 296439 - RNA, 22 nt, Human
ugacccuuccaccaguggcacc

SEQ ID NO: 296440 - RNA, 24 nt, Human
ugcccuagcucccugccuccccaa

SEQ ID NO: 296441 - RNA, 19 nt, Human
ugccugggcugagcccuau

SEQ ID NO: 296442 - RNA, 23 nt, Human
ugccugggcugagcccuauuaug

SEQ ID NO: 296443 - RNA, 22 nt, Human
ugcuggggcuccgcuccggggg

SEQ ID NO: 296444 - RNA, 21 nt, Human
uggaaacgucaaacaaugaaa

SEQ ID NO: 296445 - RNA, 25 nt, Human
uggaaacgucaaacaaugaaaaaca

SEQ ID NO: 296446 - RNA, 18 nt, Human
uggaaggaggugaagggg

SEQ ID NO: 296447 - RNA, 21 nt, Human
uggaaggaggugaaggggcug

SEQ ID NO: 296448 - RNA, 22 nt, Human
uggaaggaggugaaggggcugg

SEQ ID NO: 296449 - RNA, 18 nt, Human
uggaaucuggaggauguu

SEQ ID NO: 296450 - RNA, 22 nt, Human
uggaaucuggaggauguuguca

SEQ ID NO: 296451 - RNA, 21 nt, Human
uggacacagcacaaaacacaa

SEQ ID NO: 296452 - RNA, 19 nt, Human
uggaggauguugucagucc

SEQ ID NO: 296453 - RNA, 21 nt, Human
uggagugggguggggaggagg

SEQ ID NO: 296454 - RNA, 23 nt, Human
uggauggccggggacccaggggc

SEQ ID NO: 296455 - RNA, 29 nt, Human
uggcaaaugguucuuggugucuacaguaa

SEQ ID NO: 296456 - RNA, 19 nt, Human
uggcaaggugaaggacuga

SEQ ID NO: 296457 - RNA, 21 nt, Human
uggcaaggugaaggacugagg

SEQ ID NO: 296458 - RNA, 23 nt, Human
uggcaccucuggaguacccagca

SEQ ID NO: 296459 - RNA, 24 nt, Human
uggcaccucuggaguacccagcac

SEQ ID NO: 296460 - RNA, 18 nt, Human
uggcugccugggcugagc

SEQ ID NO: 296461 - RNA, 21 nt, Human
uggcugccugggcugagcccu

SEQ ID NO: 296462 - RNA, 19 nt, Human
ugggaaggguccagccuag

SEQ ID NO: 296463 - RNA, 20 nt, Human
ugggaaggguccagccuagu

SEQ ID NO: 296464 - RNA, 20 nt, Human
ugggaaggguccagccuagu

SEQ ID NO: 296465 - RNA, 19 nt, Human
ugggauggaugggccugau

SEQ ID NO: 296466 - RNA, 20 nt, Human
ugggcugguuggggagaggc

SEQ ID NO: 296467 - RNA, 22 nt, Human
uggggaccugggcaguggccuu

SEQ ID NO: 296468 - RNA, 20 nt, Human
uggggaggagggaggcaugg

SEQ ID NO: 296469 - RNA, 21 nt, Human
uggggaggagggaggcauggg

SEQ ID NO: 296470 - RNA, 18 nt, Human
ugggugcagguaaggaga

SEQ ID NO: 296471 - RNA, 26 nt, Human
ugguagcaaaaugcccucccuaaauc

SEQ ID NO: 296472 - RNA, 21 nt, Human
ugguccccagggcguugggaa

SEQ ID NO: 296473 - RNA, 20 nt, Human
uggucccugcccuagcuccc

SEQ ID NO: 296474 - RNA, 23 nt, Human
ugguuuauggcuggaaucuggag

SEQ ID NO: 296475 - RNA, 18 nt, Human
uguaagggcaggucuggg

SEQ ID NO: 296476 - RNA, 23 nt, Human
ugucuacaguaaccccacuaccc

SEQ ID NO: 296477 - RNA, 19 nt, Human
uguggcaaaugguucuugg

SEQ ID NO: 296478 - RNA, 23 nt, Human
uguggcaaaugguucuugguguc

SEQ ID NO: 296479 - RNA, 20 nt, Human
uugauuuggaagauggagga

SEQ ID NO: 296480 - RNA, 21 nt, Human
uuguuucuguuucccaagggg

SEQ ID NO: 296481 - RNA, 21 nt, Human
uuuaaccaggcuauggccacu

SEQ ID NO: 296482 - RNA, 18 nt, Human
uuuucagaacuaggaggc

SEQ ID NO: 296483 - RNA, 21 nt, Human
aaaacacaacacgggccgccg

SEQ ID NO: 296484 - RNA, 24 nt, Human
aaaacagaagacugguccccaggg

SEQ ID NO: 296485 - RNA, 19 nt, Human
aaaagcacaccgcacuaca

SEQ ID NO: 296486 - RNA, 25 nt, Human
aaacaaaacagaagacuggucccca

SEQ ID NO: 296487 - RNA, 25 nt, Human
aaacaaaacagaagacuggucccca

SEQ ID NO: 296488 - RNA, 22 nt, Human
aaacaaugaaaaacaaaacaga

SEQ ID NO: 296489 - RNA, 20 nt, Human
aaaugcccucccuaaauccc

SEQ ID NO: 296490 - RNA, 19 nt, Human
aacagaagacugguccccc

SEQ ID NO: 296491 - RNA, 23 nt, Human
aagcuggcugccugggcugagcc

SEQ ID NO: 296492 - RNA, 21 nt, Human
aaugaaaaacaaaacagaaga

SEQ ID NO: 296493 - RNA, 25 nt, Human
acaaaacacaacacgggccgccgcg

SEQ ID NO: 296494 - RNA, 22 nt, Human
acaaaacagaagacuggucccc

SEQ ID NO: 296495 - RNA, 22 nt, Human
acagcacaaaacacaacacggg

SEQ ID NO: 296496 - RNA, 21 nt, Human
accaugcuuugggggaagauu

SEQ ID NO: 296497 - RNA, 20 nt, Human
accccauacugucuuggaac

SEQ ID NO: 296498 - RNA, 19 nt, Human
acucgggaaagaggaacug

SEQ ID NO: 296499 - RNA, 22 nt, Human
acugaaaugccaguuuaaucca

SEQ ID NO: 296500 - RNA, 20 nt, Human
agaaggucuaugcacaagga

SEQ ID NO: 296501 - RNA, 19 nt, Human
agaggaacuguuggagugg

SEQ ID NO: 296502 - RNA, 24 nt, Human
agcucagcccaaagcuggcugccu

SEQ ID NO: 296503 - RNA, 21 nt, Human
aggacauacagagccuccucc

SEQ ID NO: 296504 - RNA, 22 nt, Human
aggaggcuuguagguuacuugg

SEQ ID NO: 296505 - RNA, 20 nt, Human
aggagggaggcaugggaugg

SEQ ID NO: 296506 - RNA, 18 nt, Human
aggagggcaggggcccug

SEQ ID NO: 296507 - RNA, 19 nt, Human
aggaggugggggaagucaa

SEQ ID NO: 296508 - RNA, 23 nt, Human
agggaggcaugggauggaugggg

SEQ ID NO: 296509 - RNA, 18 nt, Human
agggggcgcacuggggac

SEQ ID NO: 296510 - RNA, 25 nt, Human
auacagagccuccuccaaccggagg

SEQ ID NO: 296511 - RNA, 20 nt, Human
auucuacaccagccgaaaga

SEQ ID NO: 296512 - RNA, 21 nt, Human
caaaacagaagacuggucccc

SEQ ID NO: 296513 - RNA, 22 nt, Human
caacaccccaaccaccuuacuc

SEQ ID NO: 296514 - RNA, 20 nt, Human
caagaggucaugaugcccuu

SEQ ID NO: 296515 - RNA, 21 nt, Human
cacacuucccuuccuuaucuu

SEQ ID NO: 296516 - RNA, 20 nt, Human
caccgcacuacacuacuggc

SEQ ID NO: 296517 - RNA, 18 nt, Human
cacuggggaccugggcag

SEQ ID NO: 296518 - RNA, 25 nt, Human
cagagccuccuccaaggccuugaua

SEQ ID NO: 296519 - RNA, 22 nt, Human
caggagggcaggggcccuguug

SEQ ID NO: 296520 - RNA, 22 nt, Human
caggggcagaagggggugggag

SEQ ID NO: 296521 - RNA, 22 nt, Human
caguauucuggggguuagcccu

SEQ ID NO: 296522 - RNA, 21 nt, Human
cauacagagccuccuccaagg

SEQ ID NO: 296523 - RNA, 23 nt, Human
ccacacacuucccuuccuuaucu

SEQ ID NO: 296524 - RNA, 23 nt, Human
ccauacugucuuggaacaugcag

SEQ ID NO: 296525 - RNA, 26 nt, Human
ccauacugucuuggaacaugcagugg

SEQ ID NO: 296526 - RNA, 21 nt, Human
cccacagaggccccucugacc

SEQ ID NO: 296527 - RNA, 21 nt, Human
cccaccauccacauccacaca

SEQ ID NO: 296528 - RNA, 30 nt, Human; identical to SEQ ID NO: 294382

SEQ ID NO: 296529 - RNA, 26 nt, Human
ccccaccauccacauccacacacuuc

SEQ ID NO: 296530 - RNA, 19 nt, Human
ccccacuacccccaugggu

SEQ ID NO: 296531 - RNA, 20 nt, Human
ccccacuacccccaugggua

SEQ ID NO: 296532 - RNA, 21 nt, Human
ccccacuacccccauggguac

SEQ ID NO: 296533 - RNA, 25 nt, Human
cccccugggggggaagggguaggug

SEQ ID NO: 296534 - RNA, 21 nt, Human
ccccugaggacauacagagcc

SEQ ID NO: 296535 - RNA, 21 nt, Human
ccgccgcccgcugcccacccg

SEQ ID NO: 296536 - RNA, 19 nt, Human
ccuggcuggcccacccuuc

SEQ ID NO: 296537 - RNA, 22 nt, Human
ccuggcuggcccacccuuccug

SEQ ID NO: 296538 - RNA, 19 nt, Human
ccugggcugagacuuucug

SEQ ID NO: 296539 - RNA, 21 nt, Human
ccugggcugagcccuauuaug

SEQ ID NO: 296540 - RNA, 21 nt, Human
ccuguuagcucagcccaaagc

SEQ ID NO: 296541 - RNA, 24 nt, Human
cgcccgcugcccacccgccaucac

SEQ ID NO: 296542 - RNA, 19 nt, Human
cgcccuguggcucuuggcc

SEQ ID NO: 296543 - RNA, 22 nt, Human
cgcguggacacagcacaaaaca

SEQ ID NO: 296544 - RNA, 22 nt, Human
cggcaccuggcaaggugaagga

SEQ ID NO: 296545 - RNA, 23 nt, Human
cggcugcgcggagcccgccgccc

SEQ ID NO: 296546 - RNA, 22 nt, Human
cucagcccaaagcuggcugccu

SEQ ID NO: 296547 - RNA, 21 nt, Human
cucucaaggggaccugguccu

SEQ ID NO: 296548 - RNA, 23 nt, Human
cugaggccugggugcagguaagg

SEQ ID NO: 296549 - RNA, 18 nt, Human
cugccugggcugagcccu

SEQ ID NO: 296550 - RNA, 18 nt, Human
cuggcaaggugaaggacu

SEQ ID NO: 296551 - RNA, 22 nt, Human
cuuguuugaggaggaggugggg

SEQ ID NO: 296552 - RNA, 22 nt, Human
cuuuaaccaggcuauggccacu

SEQ ID NO: 296553 - RNA, 18 nt, Human
gaagauggaggaguucag

SEQ ID NO: 296554 - RNA, 21 nt, Human
gacccaggggcagaagggggu

SEQ ID NO: 296555 - RNA, 21 nt, Human
gagcauggccuuggccccuac

SEQ ID NO: 296556 - RNA, 20 nt, Human
gagugggguggggaggaggg

SEQ ID NO: 296557 - RNA, 21 nt, Human
gcccccaccauccacauccac

SEQ ID NO: 296558 - RNA, 18 nt, Human
gcccuguggcucuuggcc

SEQ ID NO: 296559 - RNA, 18 nt, Human
gcggagcccgccgcccgc

SEQ ID NO: 296560 - RNA, 19 nt, Human
gcguggacacagcacaaaa

SEQ ID NO: 296561 - RNA, 20 nt, Human
gcugcgcggagcccgccgcc

SEQ ID NO: 296562 - RNA, 20 nt, Human
ggacccaggggcagaagggg

SEQ ID NO: 296563 - RNA, 22 nt, Human
ggagaagucaguacgggggagg

SEQ ID NO: 296564 - RNA, 19 nt, Human
ggaggagggaggcauggga

SEQ ID NO: 296565 - RNA, 20 nt, Human
ggagggggcgcuacacuacu

SEQ ID NO: 296566 - RNA, 21 nt, Human
ggagugggguggggaggaggg

SEQ ID NO: 296567 - RNA, 22 nt, Human
ggagugggguggggaggaggga

SEQ ID NO: 296568 - RNA, 21 nt, Human
ggcaggucugggguucucugg

SEQ ID NO: 296569 - RNA, 19 nt, Human
ggcguugggaagaggcuug

SEQ ID NO: 296570 - RNA, 19 nt, Human
gggaccugguccuaaaccu

SEQ ID NO: 296571 - RNA, 19 nt, Human
gggaggagggaggcauggg

SEQ ID NO: 296572 - RNA, 20 nt, Human
gggaggcaugggauggaugg

SEQ ID NO: 296573 - RNA, 21 nt, Human
gggcagaagggggugggagaa

SEQ ID NO: 296574 - RNA, 19 nt, Human
gggcguugggaagaggcuu

SEQ ID NO: 296575 - RNA, 18 nt, Human
ggggaagggguaggugcu

SEQ ID NO: 296576 - RNA, 24 nt, Human
ggggagggggucgccuuagcgcgu

SEQ ID NO: 296577 - RNA, 19 nt, Human
gggguggggaggagggagg

SEQ ID NO: 296578 - RNA, 20 nt, Human
gggguggggaggagggaggc

SEQ ID NO: 296579 - RNA, 24 nt, Human
guagcaaaaugcccucccuaaauc

SEQ ID NO: 296580 - RNA, 21 nt, Human
guccaugcccccaccauccac

SEQ ID NO: 296581 - RNA, 23 nt, Human
gugaaggacugaggcuucaggag

SEQ ID NO: 296582 - RNA, 20 nt, Human
uacagagccuccuccaaggg

SEQ ID NO: 296583 - RNA, 21 nt, Human
uaccaguauucuggggguuag

SEQ ID NO: 296584 - RNA, 18 nt, Human
uacucgggaaagaggaac

SEQ ID NO: 296585 - RNA, 19 nt, Human
uagcccugaaacucugagg

SEQ ID NO: 296586 - RNA, 23 nt, Human
uagcccugaaacucugaggccug

SEQ ID NO: 296587 - RNA, 24 nt, Human
uaggagaagucaguacgggggagg

SEQ ID NO: 296588 - RNA, 25 nt, Human
uaucuuaccaccccauacugucuug

SEQ ID NO: 296589 - RNA, 19 nt, Human
uauguagugggaagggucc

SEQ ID NO: 296590 - RNA, 20 nt, Human
ucagcccaaagcuggcugcc

SEQ ID NO: 296591 - RNA, 18 nt, Human
ucaguccccugaggacau

SEQ ID NO: 296592 - RNA, 24 nt, Human
uccaaaacuugagcauugaucuug

SEQ ID NO: 296593 - RNA, 19 nt, Human
uccacauccacacacuucc

SEQ ID NO: 296594 - RNA, 22 nt, Human
uccaccaguggcaccucuggag

SEQ ID NO: 296595 - RNA, 21 nt, Human
ugaaaaacaaaacagaagacu

SEQ ID NO: 296596 - RNA, 18 nt, Human
ugacccuuccaccagugg

SEQ ID NO: 296597 - RNA, 22 nt, Human
ugacccuuccaccaguggcacc

SEQ ID NO: 296598 - RNA, 24 nt, Human
ugcccuagcucccugccuccccaa

SEQ ID NO: 296599 - RNA, 19 nt, Human
ugccugggcugagcccuau

SEQ ID NO: 296600 - RNA, 23 nt, Human
ugccugggcugagcccuauuaug

SEQ ID NO: 296601 - RNA, 22 nt, Human
ugcuggggcuccgcuccggggg

SEQ ID NO: 296602 - RNA, 21 nt, Human
uggaaacgucaaacaaugaaa

SEQ ID NO: 296603 - RNA, 25 nt, Human
uggaaacgucaaacaaugaaaaaca

SEQ ID NO: 296604 - RNA, 18 nt, Human
uggaaggaggugaagggg

SEQ ID NO: 296605 - RNA, 21 nt, Human
uggaaggaggugaaggggcug

SEQ ID NO: 296606 - RNA, 22 nt, Human
uggaaggaggugaaggggcugg

SEQ ID NO: 296607 - RNA, 18 nt, Human
uggaaucuggaggauguu

SEQ ID NO: 296608 - RNA, 22 nt, Human
uggaaucuggaggauguuguca

SEQ ID NO: 296609 - RNA, 21 nt, Human
uggacacagcacaaaacacaa

SEQ ID NO: 296610 - RNA, 19 nt, Human
uggaggauguugucagucc

SEQ ID NO: 296611 - RNA, 21 nt, Human
uggagugggguggggaggagg

SEQ ID NO: 296612 - RNA, 23 nt, Human
uggauggccggggacccaggggc

SEQ ID NO: 296613 - RNA, 25 nt, Human
uggcaaaugguucuuggugucuaca

SEQ ID NO: 296614 - RNA, 19 nt, Human
uggcaaggugaaggacuga

SEQ ID NO: 296615 - RNA, 21 nt, Human
uggcaaggugaaggacugagg

SEQ ID NO: 296616 - RNA, 23 nt, Human
uggcaccucuggaguacccagca

SEQ ID NO: 296617 - RNA, 24 nt, Human
uggcaccucuggaguacccagcac

SEQ ID NO: 296618 - RNA, 18 nt, Human
uggcugccugggcugagc

SEQ ID NO: 296619 - RNA, 21 nt, Human
uggcugccugggcugagcccu

SEQ ID NO: 296620 - RNA, 19 nt, Human
ugggaaggguccagccuag

SEQ ID NO: 296621 - RNA, 20 nt, Human
ugggaaggguccagccuagu

SEQ ID NO: 296622 - RNA, 20 nt, Human
ugggaaggguccagccuagu

SEQ ID NO: 296623 - RNA, 19 nt, Human
ugggauggaugggccugau

SEQ ID NO: 296624 - RNA, 20 nt, Human
ugggcugguuggggagaggc

SEQ ID NO: 296625 - RNA, 22 nt, Human
uggggaccugggcaguggccuu

SEQ ID NO: 296626 - RNA, 20 nt, Human
uggggaggagggaggcaugg

SEQ ID NO: 296627 - RNA, 21 nt, Human
uggggaggagggaggcauggg

SEQ ID NO: 296628 - RNA, 18 nt, Human
ugggugcagguaaggaga

SEQ ID NO: 296629 - RNA, 21 nt, Human
ugguccccagggcguugggaa

SEQ ID NO: 296630 - RNA, 20 nt, Human
uggucccugcccuagcuccc

SEQ ID NO: 296631 - RNA, 23 nt, Human
ugguuuauggcuggaaucuggag

SEQ ID NO: 296632 - RNA, 18 nt, Human
uguaagggcaggucuggg

SEQ ID NO: 296633 - RNA, 23 nt, Human
ugucuacaguaaccccacuaccc

SEQ ID NO: 296634 - RNA, 19 nt, Human
uguggcaaaugguucuugg

SEQ ID NO: 296635 - RNA, 23 nt, Human
uguggcaaaugguucuugguguc

SEQ ID NO: 296636 - RNA, 20 nt, Human
uugauuuggaagauggagga

SEQ ID NO: 296637 - RNA, 19 nt, Human
uuggaagauggaggaguuc

SEQ ID NO: 296638 - RNA, 21 nt, Human
uuguuucuguuucccaagggg

SEQ ID NO: 296639 - RNA, 18 nt, Human
uuuucagaacuaggaggc

SEQ ID NO: 296640 - RNA, 21 nt, Human
aaaacacaacacgggccgccg

SEQ ID NO: 296641 - RNA, 19 nt, Human
aaaagcacaccgcacuaca

SEQ ID NO: 296642 - RNA, 25 nt, Human
aaacaaaacagaagacuggucccca

SEQ ID NO: 296643 - RNA, 25 nt, Human
aaacaaaacagaagacuggucccca

SEQ ID NO: 296644 - RNA, 22 nt, Human
aaacaaugaaaaacaaaacaga

SEQ ID NO: 296645 - RNA, 23 nt, Human
aaacagaagacugguccccaggg

SEQ ID NO: 296646 - RNA, 20 nt, Human
aaaugcccucccuaaauccc

SEQ ID NO: 296647 - RNA, 19 nt, Human
aacagaagacugguccccc

SEQ ID NO: 296648 - RNA, 19 nt, Human
aagaggucaugaugcccuu

SEQ ID NO: 296649 - RNA, 23 nt, Human
aagcuggcugccugggcugagcc

SEQ ID NO: 296650 - RNA, 25 nt, Human
acaaaacacaacacgggccgccgcg

SEQ ID NO: 296651 - RNA, 22 nt, Human
acaaaacagaagacuggucccc

SEQ ID NO: 296652 - RNA, 18 nt, Human
acagagccuccuccaagg

SEQ ID NO: 296653 - RNA, 27 nt, Human
acagagccuccuccaaggccuugauaa

SEQ ID NO: 296654 - RNA, 22 nt, Human
acagcacaaaacacaacacggg

SEQ ID NO: 296655 - RNA, 21 nt, Human
accaugcuuugggggaagauu

SEQ ID NO: 296656 - RNA, 20 nt, Human
acccuuccaccaguggcacc

SEQ ID NO: 296657 - RNA, 19 nt, Human
acucgggaaagaggaacug

SEQ ID NO: 296658 - RNA, 22 nt, Human
acugaaaugccaguuuaaucca

SEQ ID NO: 296659 - RNA, 20 nt, Human
agaaggucuaugcacaagga

SEQ ID NO: 296660 - RNA, 19 nt, Human
agaggaacuguuggagugg

SEQ ID NO: 296661 - RNA, 24 nt, Human
agcucagcccaaagcuggcugccu

SEQ ID NO: 296662 - RNA, 21 nt, Human
aggacauacagagccuccucc

SEQ ID NO: 296663 - RNA, 22 nt, Human
aggaggcuuguagguuacuugg

SEQ ID NO: 296664 - RNA, 20 nt, Human
aggagggaggcaugggaugg

SEQ ID NO: 296665 - RNA, 18 nt, Human
aggagggcaggggcccug

SEQ ID NO: 296666 - RNA, 19 nt, Human
aggaggugggggaagucaa

SEQ ID NO: 296667 - RNA, 23 nt, Human
agggaggcaugggauggaugggg

SEQ ID NO: 296668 - RNA, 18 nt, Human
agggggcgcacuggggac

SEQ ID NO: 296669 - RNA, 25 nt, Human
auacagagccuccuccaaccggagg

SEQ ID NO: 296670 - RNA, 20 nt, Human
auggccggggacccaggggc

SEQ ID NO: 296671 - RNA, 21 nt, Human
caaaacagaagacuggucccc

SEQ ID NO: 296672 - RNA, 22 nt, Human
caacaccccaaccaccuuacuc

SEQ ID NO: 296673 - RNA, 21 nt, Human
cacacuucccuuccuuaucuu

SEQ ID NO: 296674 - RNA, 21 nt, Human
caccccauacugucuuggaac

SEQ ID NO: 296675 - RNA, 20 nt, Human
caccgcacuacacuacuggc

SEQ ID NO: 296676 - RNA, 18 nt, Human
cacuggggaccugggcag

SEQ ID NO: 296677 - RNA, 25 nt, Human
cagagccuccuccaaggccuugaua

SEQ ID NO: 296678 - RNA, 20 nt, Human
cagcccaaagcuggcugccu

SEQ ID NO: 296679 - RNA, 22 nt, Human
caggagggcaggggcccuguug

SEQ ID NO: 296680 - RNA, 22 nt, Human
caggggcagaagggggugggag

SEQ ID NO: 296681 - RNA, 22 nt, Human
caguauucuggggguuagcccu

SEQ ID NO: 296682 - RNA, 23 nt, Human
ccacacacuucccuuccuuaucu

SEQ ID NO: 296683 - RNA, 23 nt, Human
ccauacugucuuggaacaugcag

SEQ ID NO: 296684 - RNA, 26 nt, Human
ccauacugucuuggaacaugcagugg

SEQ ID NO: 296685 - RNA, 21 nt, Human
cccacagaggccccucugacc

SEQ ID NO: 296686 - RNA, 21 nt, Human
cccaccauccacauccacaca

SEQ ID NO: 296687 - RNA, 30 nt, Human; identical to SEQ ID NO: 294382

SEQ ID NO: 296688 - RNA, 19 nt, Human
ccccacuacccccaugggu

SEQ ID NO: 296689 - RNA, 20 nt, Human
ccccacuacccccaugggua

SEQ ID NO: 296690 - RNA, 21 nt, Human
ccccacuacccccauggguac

SEQ ID NO: 296691 - RNA, 27 nt, Human
cccccaccauccacauccacacacuuc

SEQ ID NO: 296692 - RNA, 23 nt, Human
cccccugggggggaagggguagg

SEQ ID NO: 296693 - RNA, 21 nt, Human
ccccugaggacauacagagcc

SEQ ID NO: 296694 - RNA, 20 nt, Human
cccugaaacucugaggccug

SEQ ID NO: 296695 - RNA, 19 nt, Human
ccuggcuggcccacccuuc

SEQ ID NO: 296696 - RNA, 22 nt, Human
ccuggcuggcccacccuuccug

SEQ ID NO: 296697 - RNA, 19 nt, Human
ccugggcugagacuuucug

SEQ ID NO: 296698 - RNA, 21 nt, Human
ccugggcugagcccuauuaug

SEQ ID NO: 296699 - RNA, 21 nt, Human
ccuguuagcucagcccaaagc

SEQ ID NO: 296700 - RNA, 24 nt, Human
cgcccgcugcccacccgccaucac

SEQ ID NO: 296701 - RNA, 18 nt, Human
cgccgcccgcugcccacc

SEQ ID NO: 296702 - RNA, 22 nt, Human
cgcguggacacagcacaaaaca

SEQ ID NO: 296703 - RNA, 23 nt, Human
cggcugcgcggagcccgccgccc

SEQ ID NO: 296704 - RNA, 22 nt, Human
cuauucuacaccagccgaaaga

SEQ ID NO: 296705 - RNA, 21 nt, Human
cucucaaggggaccugguccu

SEQ ID NO: 296706 - RNA, 18 nt, Human
cugccugggcugagcccu

SEQ ID NO: 296707 - RNA, 18 nt, Human
cuggcaaggugaaggacu

SEQ ID NO: 296708 - RNA, 18 nt, Human
gaaaaacaaaacagaaga

SEQ ID NO: 296709 - RNA, 18 nt, Human
gaagauggaggaguucag

SEQ ID NO: 296710 - RNA, 21 nt, Human
gacccaggggcagaagggggu

SEQ ID NO: 296711 - RNA, 21 nt, Human
gagcauggccuuggccccuac

SEQ ID NO: 296712 - RNA, 21 nt, Human
gaggccugggugcagguaagg

SEQ ID NO: 296713 - RNA, 20 nt, Human
gagugggguggggaggaggg

SEQ ID NO: 296714 - RNA, 20 nt, Human
gcaccuggcaaggugaagga

SEQ ID NO: 296715 - RNA, 21 nt, Human
gcccccaccauccacauccac

SEQ ID NO: 296716 - RNA, 18 nt, Human
gcccuguggcucuuggcc

SEQ ID NO: 296717 - RNA, 18 nt, Human
gcggagcccgccgcccgc

SEQ ID NO: 296718 - RNA, 19 nt, Human
gcguggacacagcacaaaa

SEQ ID NO: 296719 - RNA, 19 nt, Human
gcugccugggcugagcccu

SEQ ID NO: 296720 - RNA, 20 nt, Human
gcugcgcggagcccgccgcc

SEQ ID NO: 296721 - RNA, 20 nt, Human
ggacccaggggcagaagggg

SEQ ID NO: 296722 - RNA, 22 nt, Human
ggagaagucaguacgggggagg

SEQ ID NO: 296723 - RNA, 19 nt, Human
ggaggagggaggcauggga

SEQ ID NO: 296724 - RNA, 19 nt, Human
ggaggcaugggauggaugg

SEQ ID NO: 296725 - RNA, 20 nt, Human
ggagggggcgcuacacuacu

SEQ ID NO: 296726 - RNA, 21 nt, Human
ggagugggguggggaggaggg

SEQ ID NO: 296727 - RNA, 22 nt, Human
ggagugggguggggaggaggga

SEQ ID NO: 296728 - RNA, 21 nt, Human
ggcaggucugggguucucugg

SEQ ID NO: 296729 - RNA, 19 nt, Human
ggcguugggaagaggcuug

SEQ ID NO: 296730 - RNA, 19 nt, Human
gggaccugguccuaaaccu

SEQ ID NO: 296731 - RNA, 19 nt, Human
gggaggagggaggcauggg

SEQ ID NO: 296732 - RNA, 19 nt, Human
gggcguugggaagaggcuu

SEQ ID NO: 296733 - RNA, 18 nt, Human
ggggaagggguaggugcu

SEQ ID NO: 296734 - RNA, 24 nt, Human
ggggagggggucgccuuagcgcgu

SEQ ID NO: 296735 - RNA, 27 nt, Human
ggggcagaagggggugggagaagaagg

SEQ ID NO: 296736 - RNA, 19 nt, Human
gggguggggaggagggagg

SEQ ID NO: 296737 - RNA, 20 nt, Human
gggguggggaggagggaggc

SEQ ID NO: 296738 - RNA, 21 nt, Human
guccaugcccccaccauccac

SEQ ID NO: 296739 - RNA, 23 nt, Human
gugaaggacugaggcuucaggag

SEQ ID NO: 296740 - RNA, 19 nt, Human
uacagagccuccuccaagg

SEQ ID NO: 296741 - RNA, 20 nt, Human
uacagagccuccuccaaggg

SEQ ID NO: 296742 - RNA, 21 nt, Human
uaccaguauucuggggguuag

SEQ ID NO: 296743 - RNA, 18 nt, Human
uacucgggaaagaggaac

SEQ ID NO: 296744 - RNA, 19 nt, Human
uagcccugaaacucugagg

SEQ ID NO: 296745 - RNA, 24 nt, Human
uaggagaagucaguacgggggagg

SEQ ID NO: 296746 - RNA, 25 nt, Human
uaucuuaccaccccauacugucuug

SEQ ID NO: 296747 - RNA, 20 nt, Human
ucagcccaaagcuggcugcc

SEQ ID NO: 296748 - RNA, 18 nt, Human
ucaguccccugaggacau

SEQ ID NO: 296749 - RNA, 24 nt, Human
uccaaaacuugagcauugaucuug

SEQ ID NO: 296750 - RNA, 19 nt, Human
uccacauccacacacuucc

SEQ ID NO: 296751 - RNA, 22 nt, Human
uccaccaguggcaccucuggag

SEQ ID NO: 296752 - RNA, 19 nt, Human
ugaaaaacaaaacagaaga

SEQ ID NO: 296753 - RNA, 21 nt, Human
ugaaaaacaaaacagaagacu

SEQ ID NO: 296754 - RNA, 18 nt, Human
ugacccuuccaccagugg

SEQ ID NO: 296755 - RNA, 24 nt, Human
ugcccuagcucccugccuccccaa

SEQ ID NO: 296756 - RNA, 19 nt, Human
ugccugggcugagcccuau

SEQ ID NO: 296757 - RNA, 23 nt, Human
ugccugggcugagcccuauuaug

SEQ ID NO: 296758 - RNA, 22 nt, Human
ugcuggggcuccgcuccggggg

SEQ ID NO: 296759 - RNA, 21 nt, Human
uggaaacgucaaacaaugaaa

SEQ ID NO: 296760 - RNA, 25 nt, Human
uggaaacgucaaacaaugaaaaaca

SEQ ID NO: 296761 - RNA, 18 nt, Human
uggaaggaggugaagggg

SEQ ID NO: 296762 - RNA, 21 nt, Human
uggaaggaggugaaggggcug

SEQ ID NO: 296763 - RNA, 22 nt, Human
uggaaggaggugaaggggcugg

SEQ ID NO: 296764 - RNA, 18 nt, Human
uggaaucuggaggauguu

SEQ ID NO: 296765 - RNA, 22 nt, Human
uggaaucuggaggauguuguca

SEQ ID NO: 296766 - RNA, 21 nt, Human
uggacacagcacaaaacacaa

SEQ ID NO: 296767 - RNA, 19 nt, Human
uggaggauguugucagucc

SEQ ID NO: 296768 - RNA, 21 nt, Human
uggagugggguggggaggagg

SEQ ID NO: 296769 - RNA, 29 nt, Human
uggcaaaugguucuuggugucuacaguaa

SEQ ID NO: 296770 - RNA, 19 nt, Human
uggcaaggugaaggacuga

SEQ ID NO: 296771 - RNA, 21 nt, Human
uggcaaggugaaggacugagg

SEQ ID NO: 296772 - RNA, 23 nt, Human
uggcaccucuggaguacccagca

SEQ ID NO: 296773 - RNA, 24 nt, Human
uggcaccucuggaguacccagcac

SEQ ID NO: 296774 - RNA, 18 nt, Human
uggcugccugggcugagc

SEQ ID NO: 296775 - RNA, 19 nt, Human
ugggaaggguccagccuag

SEQ ID NO: 296776 - RNA, 20 nt, Human
ugggaaggguccagccuagu

SEQ ID NO: 296777 - RNA, 20 nt, Human
ugggaaggguccagccuagu

SEQ ID NO: 296778 - RNA, 19 nt, Human
ugggauggaugggccugau

SEQ ID NO: 296779 - RNA, 20 nt, Human
ugggcugguuggggagaggc

SEQ ID NO: 296780 - RNA, 22 nt, Human
uggggaccugggcaguggccuu

SEQ ID NO: 296781 - RNA, 20 nt, Human
uggggaggagggaggcaugg

SEQ ID NO: 296782 - RNA, 21 nt, Human
uggggaggagggaggcauggg

SEQ ID NO: 296783 - RNA, 18 nt, Human
ugggugcagguaaggaga

SEQ ID NO: 296784 - RNA, 26 nt, Human
ugguagcaaaaugcccucccuaaauc

SEQ ID NO: 296785 - RNA, 21 nt, Human
ugguccccagggcguugggaa

SEQ ID NO: 296786 - RNA, 20 nt, Human
uggucccugcccuagcuccc

SEQ ID NO: 296787 - RNA, 23 nt, Human
ugguuuauggcuggaaucuggag

SEQ ID NO: 296788 - RNA, 18 nt, Human
uguaagggcaggucuggg

SEQ ID NO: 296789 - RNA, 23 nt, Human
ugucuacaguaaccccacuaccc

SEQ ID NO: 296790 - RNA, 19 nt, Human
uguggcaaaugguucuugg

SEQ ID NO: 296791 - RNA, 23 nt, Human
uguggcaaaugguucuugguguc

SEQ ID NO: 296792 - RNA, 20 nt, Human
uuauguagugggaagggucc

SEQ ID NO: 296793 - RNA, 20 nt, Human
uugauuuggaagauggagga

SEQ ID NO: 296794 - RNA, 21 nt, Human
uuguuucuguuucccaagggg

SEQ ID NO: 296795 - RNA, 21 nt, Human
uuguuugaggaggaggugggg

SEQ ID NO: 296796 - RNA, 21 nt, Human
uuuaaccaggcuauggccacu

SEQ ID NO: 296797 - RNA, 18 nt, Human
uuuucagaacuaggaggc

SEQ ID NO: 296798 - RNA, 21 nt, Human
aaaacacaacacgggccgccg

SEQ ID NO: 296799 - RNA, 24 nt, Human
aaaacagaagacugguccccaggg

SEQ ID NO: 296800 - RNA, 19 nt, Human
aaaagcacaccgcacuaca

SEQ ID NO: 296801 - RNA, 25 nt, Human
aaacaaaacagaagacuggucccca

SEQ ID NO: 296802 - RNA, 25 nt, Human
aaacaaaacagaagacuggucccca

SEQ ID NO: 296803 - RNA, 22 nt, Human
aaacaaugaaaaacaaaacaga

SEQ ID NO: 296804 - RNA, 18 nt, Human
aaaugcccucccuaaauc

SEQ ID NO: 296805 - RNA, 19 nt, Human
aacagaagacugguccccc

SEQ ID NO: 296806 - RNA, 19 nt, Human
aagaggaacuguuggagug

SEQ ID NO: 296807 - RNA, 23 nt, Human
aagcuggcugccugggcugagcc

SEQ ID NO: 296808 - RNA, 25 nt, Human
acaaaacacaacacgggccgccgcg

SEQ ID NO: 296809 - RNA, 22 nt, Human
acaaaacagaagacuggucccc

SEQ ID NO: 296810 - RNA, 18 nt, Human
acagagccuccuccaagg

SEQ ID NO: 296811 - RNA, 27 nt, Human
acagagccuccuccaaggccuugauaa

SEQ ID NO: 296812 - RNA, 22 nt, Human
acagcacaaaacacaacacggg

SEQ ID NO: 296813 - RNA, 21 nt, Human
accaugcuuugggggaagauu

SEQ ID NO: 296814 - RNA, 19 nt, Human
acucgggaaagaggaacug

SEQ ID NO: 296815 - RNA, 22 nt, Human
acugaaaugccaguuuaaucca

SEQ ID NO: 296816 - RNA, 20 nt, Human
agaaggucuaugcacaagga

SEQ ID NO: 296817 - RNA, 19 nt, Human
agaggaacuguuggagugg

SEQ ID NO: 296818 - RNA, 24 nt, Human
agcucagcccaaagcuggcugccu

SEQ ID NO: 296819 - RNA, 21 nt, Human
aggacauacagagccuccucc

SEQ ID NO: 296820 - RNA, 22 nt, Human
aggaggcuuguagguuacuugg

SEQ ID NO: 296821 - RNA, 20 nt, Human
aggagggaggcaugggaugg

SEQ ID NO: 296822 - RNA, 18 nt, Human
aggagggcaggggcccug

SEQ ID NO: 296823 - RNA, 19 nt, Human
aggaggugggggaagucaa

SEQ ID NO: 296824 - RNA, 18 nt, Human
agggggcgcacuggggac

SEQ ID NO: 296825 - RNA, 25 nt, Human
auacagagccuccuccaaccggagg

SEQ ID NO: 296826 - RNA, 21 nt, Human
caaaacagaagacuggucccc

SEQ ID NO: 296827 - RNA, 22 nt, Human
caacaccccaaccaccuuacuc

SEQ ID NO: 296828 - RNA, 20 nt, Human
caagaggucaugaugcccuu

SEQ ID NO: 296829 - RNA, 21 nt, Human
cacacuucccuuccuuaucuu

SEQ ID NO: 296830 - RNA, 21 nt, Human
caccccauacugucuuggaac

SEQ ID NO: 296831 - RNA, 20 nt, Human
caccgcacuacacuacuggc

SEQ ID NO: 296832 - RNA, 18 nt, Human
cacuggggaccugggcag

SEQ ID NO: 296833 - RNA, 25 nt, Human
cagagccuccuccaaggccuugaua

SEQ ID NO: 296834 - RNA, 22 nt, Human
caggagggcaggggcccuguug

SEQ ID NO: 296835 - RNA, 22 nt, Human
caggggcagaagggggugggag

SEQ ID NO: 296836 - RNA, 22 nt, Human
caguauucuggggguuagcccu

SEQ ID NO: 296837 - RNA, 21 nt, Human
cauacagagccuccuccaagg

SEQ ID NO: 296838 - RNA, 23 nt, Human
ccacacacuucccuuccuuaucu

SEQ ID NO: 296839 - RNA, 29 nt, Human
ccacccgccaucacguaaaagcacaccgg

SEQ ID NO: 296840 - RNA, 23 nt, Human
ccauacugucuuggaacaugcag

SEQ ID NO: 296841 - RNA, 26 nt, Human
ccauacugucuuggaacaugcagugg

SEQ ID NO: 296842 - RNA, 21 nt, Human
cccacagaggccccucugacc

SEQ ID NO: 296843 - RNA, 21 nt, Human
cccaccauccacauccacaca

SEQ ID NO: 296844 - RNA, 19 nt, Human
cccaggggcagaagggggu

SEQ ID NO: 296845 - RNA, 26 nt, Human
ccccaccauccacauccacacacuuc

SEQ ID NO: 296846 - RNA, 19 nt, Human
ccccacuacccccaugggu

SEQ ID NO: 296847 - RNA, 20 nt, Human
ccccacuacccccaugggua

SEQ ID NO: 296848 - RNA, 21 nt, Human
ccccacuacccccauggguac

SEQ ID NO: 296849 - RNA, 25 nt, Human
cccccugggggggaagggguaggug

SEQ ID NO: 296850 - RNA, 21 nt, Human
ccccugaggacauacagagcc

SEQ ID NO: 296851 - RNA, 18 nt, Human
ccccugggggggaagggg

SEQ ID NO: 296852 - RNA, 20 nt, Human
cccugaaacucugaggccug

SEQ ID NO: 296853 - RNA, 21 nt, Human
ccgccgcccgcugcccacccg

SEQ ID NO: 296854 - RNA, 19 nt, Human
ccuggcuggcccacccuuc

SEQ ID NO: 296855 - RNA, 22 nt, Human
ccuggcuggcccacccuuccug

SEQ ID NO: 296856 - RNA, 19 nt, Human
ccugggcugagacuuucug

SEQ ID NO: 296857 - RNA, 21 nt, Human
ccugggcugagcccuauuaug

SEQ ID NO: 296858 - RNA, 21 nt, Human
ccuguuagcucagcccaaagc

SEQ ID NO: 296859 - RNA, 24 nt, Human
cgcccgcugcccacccgccaucac

SEQ ID NO: 296860 - RNA, 22 nt, Human
cgcguggacacagcacaaaaca

SEQ ID NO: 296861 - RNA, 23 nt, Human
cggcugcgcggagcccgccgccc

SEQ ID NO: 296862 - RNA, 22 nt, Human
cuauucuacaccagccgaaaga

SEQ ID NO: 296863 - RNA, 22 nt, Human
cucagcccaaagcuggcugccu

SEQ ID NO: 296864 - RNA, 21 nt, Human
cucucaaggggaccugguccu

SEQ ID NO: 296865 - RNA, 23 nt, Human
cugaggccugggugcagguaagg

SEQ ID NO: 296866 - RNA, 18 nt, Human
cugccugggcugagcccu

SEQ ID NO: 296867 - RNA, 18 nt, Human
cuggcaaggugaaggacu

SEQ ID NO: 296868 - RNA, 22 nt, Human
cuuuaaccaggcuauggccacu

SEQ ID NO: 296869 - RNA, 18 nt, Human
gaaaaacaaaacagaaga

SEQ ID NO: 296870 - RNA, 18 nt, Human
gaagauggaggaguucag

SEQ ID NO: 296871 - RNA, 21 nt, Human
gacccaggggcagaagggggu

SEQ ID NO: 296872 - RNA, 21 nt, Human
gagcauggccuuggccccuac

SEQ ID NO: 296873 - RNA, 18 nt, Human
gaggagggaggcauggga

SEQ ID NO: 296874 - RNA, 20 nt, Human
gagugggguggggaggaggg

SEQ ID NO: 296875 - RNA, 20 nt, Human
gcaccuggcaaggugaagga

SEQ ID NO: 296876 - RNA, 21 nt, Human
gcccccaccauccacauccac

SEQ ID NO: 296877 - RNA, 18 nt, Human
gcccuguggcucuuggcc

SEQ ID NO: 296878 - RNA, 18 nt, Human
gcggagcccgccgcccgc

SEQ ID NO: 296879 - RNA, 19 nt, Human
gcguggacacagcacaaaa

SEQ ID NO: 296880 - RNA, 20 nt, Human
gcugcgcggagcccgccgcc

SEQ ID NO: 296881 - RNA, 20 nt, Human
ggacccaggggcagaagggg

SEQ ID NO: 296882 - RNA, 22 nt, Human
ggagaagucaguacgggggagg

SEQ ID NO: 296883 - RNA, 20 nt, Human
ggagggggcgcuacacuacu

SEQ ID NO: 296884 - RNA, 21 nt, Human
ggagugggguggggaggaggg

SEQ ID NO: 296885 - RNA, 22 nt, Human
ggagugggguggggaggaggga

SEQ ID NO: 296886 - RNA, 21 nt, Human
ggcaggucugggguucucugg

SEQ ID NO: 296887 - RNA, 19 nt, Human
ggcguugggaagaggcuug

SEQ ID NO: 296888 - RNA, 18 nt, Human
gggaaggguccagccuag

SEQ ID NO: 296889 - RNA, 19 nt, Human
gggaccugguccuaaaccu

SEQ ID NO: 296890 - RNA, 19 nt, Human
gggaggagggaggcauggg

SEQ ID NO: 296891 - RNA, 20 nt, Human
gggaggcaugggauggaugg

SEQ ID NO: 296892 - RNA, 21 nt, Human
gggcagaagggggugggagaa

SEQ ID NO: 296893 - RNA, 18 nt, Human
ggggaagggguaggugcu

SEQ ID NO: 296894 - RNA, 19 nt, Human
ggggagaggccgcccugug

SEQ ID NO: 296895 - RNA, 30 nt, Human; identical to SEQ ID NO: 294429

SEQ ID NO: 296896 - RNA, 24 nt, Human
ggggagggggucgccuuagcgcgu

SEQ ID NO: 296897 - RNA, 19 nt, Human
gggguggggaggagggagg

SEQ ID NO: 296898 - RNA, 20 nt, Human
gggguggggaggagggaggc

SEQ ID NO: 296899 - RNA, 21 nt, Human
guccaugcccccaccauccac

SEQ ID NO: 296900 - RNA, 23 nt, Human
gugaaggacugaggcuucaggag

SEQ ID NO: 296901 - RNA, 20 nt, Human
uacagagccuccuccaaggg

SEQ ID NO: 296902 - RNA, 21 nt, Human
uaccaguauucuggggguuag

SEQ ID NO: 296903 - RNA, 19 nt, Human
uagcccugaaacucugagg

SEQ ID NO: 296904 - RNA, 24 nt, Human
uaggagaagucaguacgggggagg

SEQ ID NO: 296905 - RNA, 25 nt, Human
uaucuuaccaccccauacugucuug

SEQ ID NO: 296906 - RNA, 19 nt, Human
uauguagugggaagggucc

SEQ ID NO: 296907 - RNA, 20 nt, Human
ucagcccaaagcuggcugcc

SEQ ID NO: 296908 - RNA, 18 nt, Human
ucaguccccugaggacau

SEQ ID NO: 296909 - RNA, 24 nt, Human
uccaaaacuugagcauugaucuug

SEQ ID NO: 296910 - RNA, 19 nt, Human
uccacauccacacacuucc

SEQ ID NO: 296911 - RNA, 22 nt, Human
uccaccaguggcaccucuggag

SEQ ID NO: 296912 - RNA, 19 nt, Human
ugaaaaacaaaacagaaga

SEQ ID NO: 296913 - RNA, 21 nt, Human
ugaaaaacaaaacagaagacu

SEQ ID NO: 296914 - RNA, 18 nt, Human
ugacccuuccaccagugg

SEQ ID NO: 296915 - RNA, 22 nt, Human
ugacccuuccaccaguggcacc

SEQ ID NO: 296916 - RNA, 24 nt, Human
ugcccuagcucccugccuccccaa

SEQ ID NO: 296917 - RNA, 19 nt, Human
ugccugggcugagcccuau

SEQ ID NO: 296918 - RNA, 23 nt, Human
ugccugggcugagcccuauuaug

SEQ ID NO: 296919 - RNA, 21 nt, Human
ugcuggggcuccgcuccgggg

SEQ ID NO: 296920 - RNA, 21 nt, Human
uggaaacgucaaacaaugaaa

SEQ ID NO: 296921 - RNA, 25 nt, Human
uggaaacgucaaacaaugaaaaaca

SEQ ID NO: 296922 - RNA, 18 nt, Human
uggaaggaggugaagggg

SEQ ID NO: 296923 - RNA, 21 nt, Human
uggaaggaggugaaggggcug

SEQ ID NO: 296924 - RNA, 22 nt, Human
uggaaggaggugaaggggcugg

SEQ ID NO: 296925 - RNA, 18 nt, Human
uggaaucuggaggauguu

SEQ ID NO: 296926 - RNA, 22 nt, Human
uggaaucuggaggauguuguca

SEQ ID NO: 296927 - RNA, 21 nt, Human
uggacacagcacaaaacacaa

SEQ ID NO: 296928 - RNA, 19 nt, Human
uggaggauguugucagucc

SEQ ID NO: 296929 - RNA, 21 nt, Human
uggagugggguggggaggagg

SEQ ID NO: 296930 - RNA, 23 nt, Human
uggauggccggggacccaggggc

SEQ ID NO: 296931 - RNA, 29 nt, Human
uggcaaaugguucuuggugucuacaguaa

SEQ ID NO: 296932 - RNA, 19 nt, Human
uggcaaggugaaggacuga

SEQ ID NO: 296933 - RNA, 21 nt, Human
uggcaaggugaaggacugagg

SEQ ID NO: 296934 - RNA, 23 nt, Human
uggcaccucuggaguacccagca

SEQ ID NO: 296935 - RNA, 24 nt, Human
uggcaccucuggaguacccagcac

SEQ ID NO: 296936 - RNA, 18 nt, Human
uggcugccugggcugagc

SEQ ID NO: 296937 - RNA, 21 nt, Human
uggcugccugggcugagcccu

SEQ ID NO: 296938 - RNA, 20 nt, Human
ugggaagaggcuugguagca

SEQ ID NO: 296939 - RNA, 19 nt, Human
ugggaaggguccagccuag

SEQ ID NO: 296940 - RNA, 19 nt, Human
ugggauggaugggccugau

SEQ ID NO: 296941 - RNA, 20 nt, Human
ugggcugguuggggagaggc

SEQ ID NO: 296942 - RNA, 22 nt, Human
uggggaccugggcaguggccuu

SEQ ID NO: 296943 - RNA, 20 nt, Human
uggggaggagggaggcaugg

SEQ ID NO: 296944 - RNA, 21 nt, Human
uggggaggagggaggcauggg

SEQ ID NO: 296945 - RNA, 18 nt, Human
ugggugcagguaaggaga

SEQ ID NO: 296946 - RNA, 26 nt, Human
ugguagcaaaaugcccucccuaaauc

SEQ ID NO: 296947 - RNA, 21 nt, Human
ugguccccagggcguugggaa

SEQ ID NO: 296948 - RNA, 20 nt, Human
uggucccugcccuagcuccc

SEQ ID NO: 296949 - RNA, 23 nt, Human
ugguuuauggcuggaaucuggag

SEQ ID NO: 296950 - RNA, 18 nt, Human
uguaagggcaggucuggg

SEQ ID NO: 296951 - RNA, 23 nt, Human
ugucuacaguaaccccacuaccc

SEQ ID NO: 296952 - RNA, 19 nt, Human
uguggcaaaugguucuugg

SEQ ID NO: 296953 - RNA, 23 nt, Human
uguggcaaaugguucuugguguc

SEQ ID NO: 296954 - RNA, 20 nt, Human
uugauuuggaagauggagga

SEQ ID NO: 296955 - RNA, 19 nt, Human
uuggaagauggaggaguuc

SEQ ID NO: 296956 - RNA, 21 nt, Human
uuguuucuguuucccaagggg

SEQ ID NO: 296957 - RNA, 21 nt, Human
uuguuugaggaggaggugggg

SEQ ID NO: 296958 - RNA, 18 nt, Human
uuuucagaacuaggaggc

SEQ ID NO: 296959 - RNA, 21 nt, Human
aaaacacaacacgggccgccg

SEQ ID NO: 296960 - RNA, 24 nt, Human
aaaacagaagacugguccccaggg

SEQ ID NO: 296961 - RNA, 19 nt, Human
aaaagcacaccgcacuaca

SEQ ID NO: 296962 - RNA, 25 nt, Human
aaacaaaacagaagacuggucccca

SEQ ID NO: 296963 - RNA, 25 nt, Human
aaacaaaacagaagacuggucccca

SEQ ID NO: 296964 - RNA, 20 nt, Human
aaaugcccucccuaaauccc

SEQ ID NO: 296965 - RNA, 19 nt, Human
aacagaagacugguccccc

SEQ ID NO: 296966 - RNA, 23 nt, Human
aagcuggcugccugggcugagcc

SEQ ID NO: 296967 - RNA, 25 nt, Human
acaaaacacaacacgggccgccgcg

SEQ ID NO: 296968 - RNA, 22 nt, Human
acaaaacagaagacuggucccc

SEQ ID NO: 296969 - RNA, 18 nt, Human
acagagccuccuccaagg

SEQ ID NO: 296970 - RNA, 27 nt, Human
acagagccuccuccaaggccuugauaa

SEQ ID NO: 296971 - RNA, 22 nt, Human
acagcacaaaacacaacacggg

SEQ ID NO: 296972 - RNA, 21 nt, Human
accaugcuuugggggaagauu

SEQ ID NO: 296973 - RNA, 20 nt, Human
accccauacugucuuggaac

SEQ ID NO: 296974 - RNA, 19 nt, Human
acucgggaaagaggaacug

SEQ ID NO: 296975 - RNA, 22 nt, Human
acugaaaugccaguuuaaucca

SEQ ID NO: 296976 - RNA, 20 nt, Human
agaaggucuaugcacaagga

SEQ ID NO: 296977 - RNA, 19 nt, Human
agaggaacuguuggagugg

SEQ ID NO: 296978 - RNA, 24 nt, Human
agcucagcccaaagcuggcugccu

SEQ ID NO: 296979 - RNA, 21 nt, Human
aggacauacagagccuccucc

SEQ ID NO: 296980 - RNA, 22 nt, Human
aggaggcuuguagguuacuugg

SEQ ID NO: 296981 - RNA, 20 nt, Human
aggagggaggcaugggaugg

SEQ ID NO: 296982 - RNA, 18 nt, Human
aggagggcaggggcccug

SEQ ID NO: 296983 - RNA, 19 nt, Human
aggaggugggggaagucaa

SEQ ID NO: 296984 - RNA, 18 nt, Human
agggggcgcacuggggac

SEQ ID NO: 296985 - RNA, 25 nt, Human
auacagagccuccuccaaccggagg

SEQ ID NO: 296986 - RNA, 21 nt, Human
caaaacagaagacuggucccc

SEQ ID NO: 296987 - RNA, 23 nt, Human
caaacaaugaaaaacaaaacaga

SEQ ID NO: 296988 - RNA, 22 nt, Human
caacaccccaaccaccuuacuc

SEQ ID NO: 296989 - RNA, 20 nt, Human
caagaggucaugaugcccuu

SEQ ID NO: 296990 - RNA, 21 nt, Human
cacacuucccuuccuuaucuu

SEQ ID NO: 296991 - RNA, 20 nt, Human
caccgcacuacacuacuggc

SEQ ID NO: 296992 - RNA, 18 nt, Human
cacuggggaccugggcag

SEQ ID NO: 296993 - RNA, 25 nt, Human
cagagccuccuccaaggccuugaua

SEQ ID NO: 296994 - RNA, 20 nt, Human
cagcccaaagcuggcugccu

SEQ ID NO: 296995 - RNA, 22 nt, Human
caggagggcaggggcccuguug

SEQ ID NO: 296996 - RNA, 22 nt, Human
caggggcagaagggggugggag

SEQ ID NO: 296997 - RNA, 22 nt, Human
caguauucuggggguuagcccu

SEQ ID NO: 296998 - RNA, 21 nt, Human
cauacagagccuccuccaagg

SEQ ID NO: 296999 - RNA, 23 nt, Human
ccacacacuucccuuccuuaucu

SEQ ID NO: 297000 - RNA, 29 nt, Human
ccacccgccaucacguaaaagcacaccgg

SEQ ID NO: 297001 - RNA, 23 nt, Human
ccauacugucuuggaacaugcag

SEQ ID NO: 297002 - RNA, 26 nt, Human
ccauacugucuuggaacaugcagugg

SEQ ID NO: 297003 - RNA, 21 nt, Human
cccacagaggccccucugacc

SEQ ID NO: 297004 - RNA, 21 nt, Human
cccaccauccacauccacaca

SEQ ID NO: 297005 - RNA, 18 nt, Human
ccccacuacccccauggg

SEQ ID NO: 297006 - RNA, 20 nt, Human
ccccacuacccccaugggua

SEQ ID NO: 297007 - RNA, 21 nt, Human
ccccacuacccccauggguac

SEQ ID NO: 297008 - RNA, 27 nt, Human
cccccaccauccacauccacacacuuc

SEQ ID NO: 297009 - RNA, 25 nt, Human
cccccugggggggaagggguaggug

SEQ ID NO: 297010 - RNA, 21 nt, Human
ccccugaggacauacagagcc

SEQ ID NO: 297011 - RNA, 21 nt, Human
ccgccgcccgcugcccacccg

SEQ ID NO: 297012 - RNA, 19 nt, Human
ccuggcuggcccacccuuc

SEQ ID NO: 297013 - RNA, 22 nt, Human
ccuggcuggcccacccuuccug

SEQ ID NO: 297014 - RNA, 19 nt, Human
ccugggcugagacuuucug

SEQ ID NO: 297015 - RNA, 21 nt, Human
ccuguuagcucagcccaaagc

SEQ ID NO: 297016 - RNA, 24 nt, Human
cgcccgcugcccacccgccaucac

SEQ ID NO: 297017 - RNA, 19 nt, Human
cgcccuguggcucuuggcc

SEQ ID NO: 297018 - RNA, 22 nt, Human
cgcguggacacagcacaaaaca

SEQ ID NO: 297019 - RNA, 22 nt, Human
cggcaccuggcaaggugaagga

SEQ ID NO: 297020 - RNA, 23 nt, Human
cggcugcgcggagcccgccgccc

SEQ ID NO: 297021 - RNA, 22 nt, Human
cuauucuacaccagccgaaaga

SEQ ID NO: 297022 - RNA, 21 nt, Human
cucucaaggggaccugguccu

SEQ ID NO: 297023 - RNA, 18 nt, Human
cugccugggcugagcccu

SEQ ID NO: 297024 - RNA, 18 nt, Human
cuggcaaggugaaggacu

SEQ ID NO: 297025 - RNA, 22 nt, Human
cuuuaaccaggcuauggccacu

SEQ ID NO: 297026 - RNA, 18 nt, Human
gaaaaacaaaacagaaga

SEQ ID NO: 297027 - RNA, 18 nt, Human
gaagauggaggaguucag

SEQ ID NO: 297028 - RNA, 21 nt, Human
gacccaggggcagaagggggu

SEQ ID NO: 297029 - RNA, 21 nt, Human
gagcauggccuuggccccuac

SEQ ID NO: 297030 - RNA, 18 nt, Human
gaggagggaggcauggga

SEQ ID NO: 297031 - RNA, 21 nt, Human
gaggccugggugcagguaagg

SEQ ID NO: 297032 - RNA, 20 nt, Human
gagugggguggggaggaggg

SEQ ID NO: 297033 - RNA, 21 nt, Human
gcccccaccauccacauccac

SEQ ID NO: 297034 - RNA, 18 nt, Human
gcccuguggcucuuggcc

SEQ ID NO: 297035 - RNA, 18 nt, Human
gcggagcccgccgcccgc

SEQ ID NO: 297036 - RNA, 19 nt, Human
gcguggacacagcacaaaa

SEQ ID NO: 297037 - RNA, 20 nt, Human
gcugcgcggagcccgccgcc

SEQ ID NO: 297038 - RNA, 20 nt, Human
ggacccaggggcagaagggg

SEQ ID NO: 297039 - RNA, 22 nt, Human
ggagaagucaguacgggggagg

SEQ ID NO: 297040 - RNA, 20 nt, Human
ggagggggcgcuacacuacu

SEQ ID NO: 297041 - RNA, 21 nt, Human
ggagugggguggggaggaggg

SEQ ID NO: 297042 - RNA, 22 nt, Human
ggagugggguggggaggaggga

SEQ ID NO: 297043 - RNA, 21 nt, Human
ggcaggucugggguucucugg

SEQ ID NO: 297044 - RNA, 19 nt, Human
ggcguugggaagaggcuug

SEQ ID NO: 297045 - RNA, 19 nt, Human
gggaccugguccuaaaccu

SEQ ID NO: 297046 - RNA, 19 nt, Human
gggaggagggaggcauggg

SEQ ID NO: 297047 - RNA, 20 nt, Human
gggaggcaugggauggaugg

SEQ ID NO: 297048 - RNA, 21 nt, Human
gggcagaagggggugggagaa

SEQ ID NO: 297049 - RNA, 18 nt, Human
ggggaagggguaggugcu

SEQ ID NO: 297050 - RNA, 30 nt, Human; identical to SEQ ID NO: 294429

SEQ ID NO: 297051 - RNA, 24 nt, Human
ggggagggggucgccuuagcgcgu

SEQ ID NO: 297052 - RNA, 27 nt, Human
ggggcagaagggggugggagaagaagg

SEQ ID NO: 297053 - RNA, 19 nt, Human
gggguggggaggagggagg

SEQ ID NO: 297054 - RNA, 20 nt, Human
gggguggggaggagggaggc

SEQ ID NO: 297055 - RNA, 23 nt, Human
gugaaggacugaggcuucaggag

SEQ ID NO: 297056 - RNA, 20 nt, Human
uacagagccuccuccaaggg

SEQ ID NO: 297057 - RNA, 21 nt, Human
uaccaguauucuggggguuag

SEQ ID NO: 297058 - RNA, 18 nt, Human
uacucgggaaagaggaac

SEQ ID NO: 297059 - RNA, 19 nt, Human
uagcccugaaacucugagg

SEQ ID NO: 297060 - RNA, 23 nt, Human
uagcccugaaacucugaggccug

SEQ ID NO: 297061 - RNA, 24 nt, Human
uaggagaagucaguacgggggagg

SEQ ID NO: 297062 - RNA, 25 nt, Human
uaucuuaccaccccauacugucuug

SEQ ID NO: 297063 - RNA, 20 nt, Human
ucagcccaaagcuggcugcc

SEQ ID NO: 297064 - RNA, 18 nt, Human
ucaguccccugaggacau

SEQ ID NO: 297065 - RNA, 24 nt, Human
uccaaaacuugagcauugaucuug

SEQ ID NO: 297066 - RNA, 19 nt, Human
uccacauccacacacuucc

SEQ ID NO: 297067 - RNA, 22 nt, Human
uccaccaguggcaccucuggag

SEQ ID NO: 297068 - RNA, 20 nt, Human
uccaugcccccaccauccac

SEQ ID NO: 297069 - RNA, 21 nt, Human
ugaaaaacaaaacagaagacu

SEQ ID NO: 297070 - RNA, 18 nt, Human
ugacccuuccaccagugg

SEQ ID NO: 297071 - RNA, 22 nt, Human
ugacccuuccaccaguggcacc

SEQ ID NO: 297072 - RNA, 24 nt, Human
ugcccuagcucccugccuccccaa

SEQ ID NO: 297073 - RNA, 23 nt, Human
ugccugggcugagcccuauuaug

SEQ ID NO: 297074 - RNA, 22 nt, Human
ugcuggggcuccgcuccggggg

SEQ ID NO: 297075 - RNA, 21 nt, Human
uggaaacgucaaacaaugaaa

SEQ ID NO: 297076 - RNA, 25 nt, Human
uggaaacgucaaacaaugaaaaaca

SEQ ID NO: 297077 - RNA, 18 nt, Human
uggaaggaggugaagggg

SEQ ID NO: 297078 - RNA, 21 nt, Human
uggaaggaggugaaggggcug

SEQ ID NO: 297079 - RNA, 22 nt, Human
uggaaggaggugaaggggcugg

SEQ ID NO: 297080 - RNA, 18 nt, Human
uggaaucuggaggauguu

SEQ ID NO: 297081 - RNA, 22 nt, Human
uggaaucuggaggauguuguca

SEQ ID NO: 297082 - RNA, 21 nt, Human
uggacacagcacaaaacacaa

SEQ ID NO: 297083 - RNA, 19 nt, Human
uggaggauguugucagucc

SEQ ID NO: 297084 - RNA, 21 nt, Human
uggagugggguggggaggagg

SEQ ID NO: 297085 - RNA, 23 nt, Human
uggauggccggggacccaggggc

SEQ ID NO: 297086 - RNA, 29 nt, Human
uggcaaaugguucuuggugucuacaguaa

SEQ ID NO: 297087 - RNA, 19 nt, Human
uggcaaggugaaggacuga

SEQ ID NO: 297088 - RNA, 21 nt, Human
uggcaaggugaaggacugagg

SEQ ID NO: 297089 - RNA, 23 nt, Human
uggcaccucuggaguacccagca

SEQ ID NO: 297090 - RNA, 24 nt, Human
uggcaccucuggaguacccagcac

SEQ ID NO: 297091 - RNA, 18 nt, Human
uggcugccugggcugagc

SEQ ID NO: 297092 - RNA, 21 nt, Human
uggcugccugggcugagcccu

SEQ ID NO: 297093 - RNA, 19 nt, Human
ugggaaggguccagccuag

SEQ ID NO: 297094 - RNA, 20 nt, Human
ugggaaggguccagccuagu

SEQ ID NO: 297095 - RNA, 19 nt, Human
ugggauggaugggccugau

SEQ ID NO: 297096 - RNA, 20 nt, Human
ugggcugguuggggagaggc

SEQ ID NO: 297097 - RNA, 22 nt, Human
uggggaccugggcaguggccuu

SEQ ID NO: 297098 - RNA, 20 nt, Human
uggggaggagggaggcaugg

SEQ ID NO: 297099 - RNA, 21 nt, Human
uggggaggagggaggcauggg

SEQ ID NO: 297100 - RNA, 18 nt, Human
ugggugcagguaaggaga

SEQ ID NO: 297101 - RNA, 26 nt, Human
ugguagcaaaaugcccucccuaaauc

SEQ ID NO: 297102 - RNA, 21 nt, Human
ugguccccagggcguugggaa

SEQ ID NO: 297103 - RNA, 20 nt, Human
uggucccugcccuagcuccc

SEQ ID NO: 297104 - RNA, 23 nt, Human
ugguuuauggcuggaaucuggag

SEQ ID NO: 297105 - RNA, 18 nt, Human
uguaagggcaggucuggg

SEQ ID NO: 297106 - RNA, 23 nt, Human
ugucuacaguaaccccacuaccc

SEQ ID NO: 297107 - RNA, 19 nt, Human
uguggcaaaugguucuugg

SEQ ID NO: 297108 - RNA, 23 nt, Human
uguggcaaaugguucuugguguc

SEQ ID NO: 297109 - RNA, 20 nt, Human
uuauguagugggaagggucc

SEQ ID NO: 297110 - RNA, 20 nt, Human
uugauuuggaagauggagga

SEQ ID NO: 297111 - RNA, 19 nt, Human
uuggaagauggaggaguuc

SEQ ID NO: 297112 - RNA, 21 nt, Human
uuguuucuguuucccaagggg

SEQ ID NO: 297113 - RNA, 21 nt, Human
uuguuugaggaggaggugggg

SEQ ID NO: 297114 - RNA, 18 nt, Human
uuuucagaacuaggaggc

SEQ ID NO: 297115 - RNA, 21 nt, Human
aaaacacaacacgggccgccg

SEQ ID NO: 297116 - RNA, 19 nt, Human
aaaagcacaccgcacuaca

SEQ ID NO: 297117 - RNA, 25 nt, Human
aaacaaaacagaagacuggucccca

SEQ ID NO: 297118 - RNA, 25 nt, Human
aaacaaaacagaagacuggucccca

SEQ ID NO: 297119 - RNA, 23 nt, Human
aaacagaagacugguccccaggg

SEQ ID NO: 297120 - RNA, 20 nt, Human
aaaugcccucccuaaauccc

SEQ ID NO: 297121 - RNA, 19 nt, Human
aacagaagacugguccccc

SEQ ID NO: 297122 - RNA, 19 nt, Human
aagaggucaugaugcccuu

SEQ ID NO: 297123 - RNA, 25 nt, Human
acaaaacacaacacgggccgccgcg

SEQ ID NO: 297124 - RNA, 22 nt, Human
acaaaacagaagacuggucccc

SEQ ID NO: 297125 - RNA, 18 nt, Human
acagagccuccuccaagg

SEQ ID NO: 297126 - RNA, 27 nt, Human
acagagccuccuccaaggccuugauaa

SEQ ID NO: 297127 - RNA, 22 nt, Human
acagcacaaaacacaacacggg

SEQ ID NO: 297128 - RNA, 21 nt, Human
accaugcuuugggggaagauu

SEQ ID NO: 297129 - RNA, 20 nt, Human
accccauacugucuuggaac

SEQ ID NO: 297130 - RNA, 19 nt, Human
acucgggaaagaggaacug

SEQ ID NO: 297131 - RNA, 22 nt, Human
acugaaaugccaguuuaaucca

SEQ ID NO: 297132 - RNA, 20 nt, Human
agaaggucuaugcacaagga

SEQ ID NO: 297133 - RNA, 19 nt, Human
agaggaacuguuggagugg

SEQ ID NO: 297134 - RNA, 24 nt, Human
agcucagcccaaagcuggcugccu

SEQ ID NO: 297135 - RNA, 21 nt, Human
aggacauacagagccuccucc

SEQ ID NO: 297136 - RNA, 22 nt, Human
aggaggcuuguagguuacuugg

SEQ ID NO: 297137 - RNA, 20 nt, Human
aggagggaggcaugggaugg

SEQ ID NO: 297138 - RNA, 18 nt, Human
aggagggcaggggcccug

SEQ ID NO: 297139 - RNA, 19 nt, Human
aggaggugggggaagucaa

SEQ ID NO: 297140 - RNA, 18 nt, Human
agggggcgcacuggggac

SEQ ID NO: 297141 - RNA, 25 nt, Human
auacagagccuccuccaaccggagg

SEQ ID NO: 297142 - RNA, 20 nt, Human
auucuacaccagccgaaaga

SEQ ID NO: 297143 - RNA, 21 nt, Human
caaaacagaagacuggucccc

SEQ ID NO: 297144 - RNA, 23 nt, Human
caaacaaugaaaaacaaaacaga

SEQ ID NO: 297145 - RNA, 22 nt, Human
caacaccccaaccaccuuacuc

SEQ ID NO: 297146 - RNA, 21 nt, Human
cacacuucccuuccuuaucuu

SEQ ID NO: 297147 - RNA, 20 nt, Human
caccgcacuacacuacuggc

SEQ ID NO: 297148 - RNA, 18 nt, Human
cacuggggaccugggcag

SEQ ID NO: 297149 - RNA, 25 nt, Human
cagagccuccuccaaggccuugaua

SEQ ID NO: 297150 - RNA, 22 nt, Human
caggagggcaggggcccuguug

SEQ ID NO: 297151 - RNA, 22 nt, Human
caggggcagaagggggugggag

SEQ ID NO: 297152 - RNA, 22 nt, Human
caguauucuggggguuagcccu

SEQ ID NO: 297153 - RNA, 21 nt, Human
cauacagagccuccuccaagg

SEQ ID NO: 297154 - RNA, 29 nt, Human
ccacccgccaucacguaaaagcacaccgg

SEQ ID NO: 297155 - RNA, 23 nt, Human
ccauacugucuuggaacaugcag

SEQ ID NO: 297156 - RNA, 26 nt, Human
ccauacugucuuggaacaugcagugg

SEQ ID NO: 297157 - RNA, 21 nt, Human
cccacagaggccccucugacc

SEQ ID NO: 297158 - RNA, 21 nt, Human
cccaccauccacauccacaca

SEQ ID NO: 297159 - RNA, 19 nt, Human
ccccacuacccccaugggu

SEQ ID NO: 297160 - RNA, 20 nt, Human
ccccacuacccccaugggua

SEQ ID NO: 297161 - RNA, 21 nt, Human
ccccacuacccccauggguac

SEQ ID NO: 297162 - RNA, 27 nt, Human
cccccaccauccacauccacacacuuc

SEQ ID NO: 297163 - RNA, 25 nt, Human
cccccugggggggaagggguaggug

SEQ ID NO: 297164 - RNA, 21 nt, Human
ccccugaggacauacagagcc

SEQ ID NO: 297165 - RNA, 20 nt, Human
cccugaaacucugaggccug

SEQ ID NO: 297166 - RNA, 21 nt, Human
ccgccgcccgcugcccacccg

SEQ ID NO: 297167 - RNA, 22 nt, Human
ccucucaaggggaccugguccu

SEQ ID NO: 297168 - RNA, 19 nt, Human
ccuggcuggcccacccuuc

SEQ ID NO: 297169 - RNA, 22 nt, Human
ccuggcuggcccacccuuccug

SEQ ID NO: 297170 - RNA, 19 nt, Human
ccugggcugagacuuucug

SEQ ID NO: 297171 - RNA, 21 nt, Human
ccuguuagcucagcccaaagc

SEQ ID NO: 297172 - RNA, 24 nt, Human
cgcccgcugcccacccgccaucac

SEQ ID NO: 297173 - RNA, 22 nt, Human
cgcguggacacagcacaaaaca

SEQ ID NO: 297174 - RNA, 22 nt, Human
cggcaccuggcaaggugaagga

SEQ ID NO: 297175 - RNA, 23 nt, Human
cggcugcgcggagcccgccgccc

SEQ ID NO: 297176 - RNA, 22 nt, Human
cucagcccaaagcuggcugccu

SEQ ID NO: 297177 - RNA, 23 nt, Human
cugaggccugggugcagguaagg

SEQ ID NO: 297178 - RNA, 18 nt, Human
cugccugggcugagcccu

SEQ ID NO: 297179 - RNA, 18 nt, Human
cuggcaaggugaaggacu

SEQ ID NO: 297180 - RNA, 22 nt, Human
cuuguuugaggaggaggugggg

SEQ ID NO: 297181 - RNA, 22 nt, Human
cuuuaaccaggcuauggccacu

SEQ ID NO: 297182 - RNA, 18 nt, Human
gaaaaacaaaacagaaga

SEQ ID NO: 297183 - RNA, 18 nt, Human
gaagauggaggaguucag

SEQ ID NO: 297184 - RNA, 21 nt, Human
gacccaggggcagaagggggu

SEQ ID NO: 297185 - RNA, 21 nt, Human
gagcauggccuuggccccuac

SEQ ID NO: 297186 - RNA, 20 nt, Human
gagugggguggggaggaggg

SEQ ID NO: 297187 - RNA, 21 nt, Human
gcccccaccauccacauccac

SEQ ID NO: 297188 - RNA, 18 nt, Human
gcccuguggcucuuggcc

SEQ ID NO: 297189 - RNA, 18 nt, Human
gcggagcccgccgcccgc

SEQ ID NO: 297190 - RNA, 19 nt, Human
gcguggacacagcacaaaa

SEQ ID NO: 297191 - RNA, 19 nt, Human
gcugccugggcugagcccu

SEQ ID NO: 297192 - RNA, 20 nt, Human
gcugcgcggagcccgccgcc

SEQ ID NO: 297193 - RNA, 20 nt, Human
ggacccaggggcagaagggg

SEQ ID NO: 297194 - RNA, 22 nt, Human
ggagaagucaguacgggggagg

SEQ ID NO: 297195 - RNA, 19 nt, Human
ggaggagggaggcauggga

SEQ ID NO: 297196 - RNA, 20 nt, Human
ggagggggcgcuacacuacu

SEQ ID NO: 297197 - RNA, 21 nt, Human
ggagugggguggggaggaggg

SEQ ID NO: 297198 - RNA, 22 nt, Human
ggagugggguggggaggaggga

SEQ ID NO: 297199 - RNA, 21 nt, Human
ggcaggucugggguucucugg

SEQ ID NO: 297200 - RNA, 19 nt, Human
ggcguugggaagaggcuug

SEQ ID NO: 297201 - RNA, 19 nt, Human
gggaccugguccuaaaccu

SEQ ID NO: 297202 - RNA, 19 nt, Human
gggaggagggaggcauggg

SEQ ID NO: 297203 - RNA, 20 nt, Human
gggaggcaugggauggaugg

SEQ ID NO: 297204 - RNA, 21 nt, Human
gggcagaagggggugggagaa

SEQ ID NO: 297205 - RNA, 19 nt, Human
gggcguugggaagaggcuu

SEQ ID NO: 297206 - RNA, 18 nt, Human
ggggaagggguaggugcu

SEQ ID NO: 297207 - RNA, 30 nt, Human; identical to SEQ ID NO: 294429

SEQ ID NO: 297208 - RNA, 24 nt, Human
ggggagggggucgccuuagcgcgu

SEQ ID NO: 297209 - RNA, 27 nt, Human
ggggcagaagggggugggagaagaagg

SEQ ID NO: 297210 - RNA, 19 nt, Human
gggguggggaggagggagg

SEQ ID NO: 297211 - RNA, 20 nt, Human
gggguggggaggagggaggc

SEQ ID NO: 297212 - RNA, 21 nt, Human
guccaugcccccaccauccac

SEQ ID NO: 297213 - RNA, 23 nt, Human
gugaaggacugaggcuucaggag

SEQ ID NO: 297214 - RNA, 21 nt, Human
guuuauggcuggaaucuggag

SEQ ID NO: 297215 - RNA, 20 nt, Human
uacagagccuccuccaaggg

SEQ ID NO: 297216 - RNA, 21 nt, Human
uaccaguauucuggggguuag

SEQ ID NO: 297217 - RNA, 18 nt, Human
uacucgggaaagaggaac

SEQ ID NO: 297218 - RNA, 19 nt, Human
uagcccugaaacucugagg

SEQ ID NO: 297219 - RNA, 24 nt, Human
uaggagaagucaguacgggggagg

SEQ ID NO: 297220 - RNA, 25 nt, Human
uaucuuaccaccccauacugucuug

SEQ ID NO: 297221 - RNA, 20 nt, Human
ucagcccaaagcuggcugcc

SEQ ID NO: 297222 - RNA, 18 nt, Human
ucaguccccugaggacau

SEQ ID NO: 297223 - RNA, 24 nt, Human
uccaaaacuugagcauugaucuug

SEQ ID NO: 297224 - RNA, 26 nt, Human
uccacacacuucccuuccuuaucuua

SEQ ID NO: 297225 - RNA, 19 nt, Human
uccacauccacacacuucc

SEQ ID NO: 297226 - RNA, 22 nt, Human
uccaccaguggcaccucuggag

SEQ ID NO: 297227 - RNA, 21 nt, Human
ugaaaaacaaaacagaagacu

SEQ ID NO: 297228 - RNA, 18 nt, Human
ugacccuuccaccagugg

SEQ ID NO: 297229 - RNA, 22 nt, Human
ugacccuuccaccaguggcacc

SEQ ID NO: 297230 - RNA, 24 nt, Human
ugcccuagcucccugccuccccaa

SEQ ID NO: 297231 - RNA, 19 nt, Human
ugccugggcugagcccuau

SEQ ID NO: 297232 - RNA, 23 nt, Human
ugccugggcugagcccuauuaug

SEQ ID NO: 297233 - RNA, 21 nt, Human
ugcuggggcuccgcuccgggg

SEQ ID NO: 297234 - RNA, 21 nt, Human
uggaaacgucaaacaaugaaa

SEQ ID NO: 297235 - RNA, 25 nt, Human
uggaaacgucaaacaaugaaaaaca

SEQ ID NO: 297236 - RNA, 18 nt, Human
uggaaggaggugaagggg

SEQ ID NO: 297237 - RNA, 21 nt, Human
uggaaggaggugaaggggcug

SEQ ID NO: 297238 - RNA, 22 nt, Human
uggaaggaggugaaggggcugg

SEQ ID NO: 297239 - RNA, 18 nt, Human
uggaaucuggaggauguu

SEQ ID NO: 297240 - RNA, 22 nt, Human
uggaaucuggaggauguuguca

SEQ ID NO: 297241 - RNA, 21 nt, Human
uggacacagcacaaaacacaa

SEQ ID NO: 297242 - RNA, 19 nt, Human
uggaggauguugucagucc

SEQ ID NO: 297243 - RNA, 21 nt, Human
uggagugggguggggaggagg

SEQ ID NO: 297244 - RNA, 23 nt, Human
uggauggccggggacccaggggc

SEQ ID NO: 297245 - RNA, 29 nt, Human
uggcaaaugguucuuggugucuacaguaa

SEQ ID NO: 297246 - RNA, 19 nt, Human
uggcaaggugaaggacuga

SEQ ID NO: 297247 - RNA, 21 nt, Human
uggcaaggugaaggacugagg

SEQ ID NO: 297248 - RNA, 23 nt, Human
uggcaccucuggaguacccagca

SEQ ID NO: 297249 - RNA, 24 nt, Human
uggcaccucuggaguacccagcac

SEQ ID NO: 297250 - RNA, 18 nt, Human
uggcugccugggcugagc

SEQ ID NO: 297251 - RNA, 19 nt, Human
ugggaaggguccagccuag

SEQ ID NO: 297252 - RNA, 20 nt, Human
ugggaaggguccagccuagu

SEQ ID NO: 297253 - RNA, 20 nt, Human
ugggaaggguccagccuagu

SEQ ID NO: 297254 - RNA, 19 nt, Human
ugggauggaugggccugau

SEQ ID NO: 297255 - RNA, 20 nt, Human
ugggcugguuggggagaggc

SEQ ID NO: 297256 - RNA, 22 nt, Human
uggggaccugggcaguggccuu

SEQ ID NO: 297257 - RNA, 20 nt, Human
uggggaggagggaggcaugg

SEQ ID NO: 297258 - RNA, 21 nt, Human
uggggaggagggaggcauggg

SEQ ID NO: 297259 - RNA, 18 nt, Human
ugggugcagguaaggaga

SEQ ID NO: 297260 - RNA, 26 nt, Human
ugguagcaaaaugcccucccuaaauc

SEQ ID NO: 297261 - RNA, 21 nt, Human
ugguccccagggcguugggaa

SEQ ID NO: 297262 - RNA, 20 nt, Human
uggucccugcccuagcuccc

SEQ ID NO: 297263 - RNA, 18 nt, Human
uguaagggcaggucuggg

SEQ ID NO: 297264 - RNA, 23 nt, Human
ugucuacaguaaccccacuaccc

SEQ ID NO: 297265 - RNA, 19 nt, Human
uguggcaaaugguucuugg

SEQ ID NO: 297266 - RNA, 23 nt, Human
uguggcaaaugguucuugguguc

SEQ ID NO: 297267 - RNA, 20 nt, Human
uuauguagugggaagggucc

SEQ ID NO: 297268 - RNA, 20 nt, Human
uugauuuggaagauggagga

SEQ ID NO: 297269 - RNA, 21 nt, Human
uuguuucuguuucccaagggg

SEQ ID NO: 297270 - RNA, 18 nt, Human
uuuucagaacuaggaggc

SEQ ID NO: 297271 - RNA, 21 nt, Human
aaaacacaacacgggccgccg

SEQ ID NO: 297272 - RNA, 24 nt, Human
aaaacagaagacugguccccaggg

SEQ ID NO: 297273 - RNA, 19 nt, Human
aaaagcacaccgcacuaca

SEQ ID NO: 297274 - RNA, 24 nt, Human
aaacaaaacagaagacuggucccc

SEQ ID NO: 297275 - RNA, 25 nt, Human
aaacaaaacagaagacuggucccca

SEQ ID NO: 297276 - RNA, 21 nt, Human
aaagagcauucggcccaggac

SEQ ID NO: 297277 - RNA, 20 nt, Human
aaaugcccucccuaaauccc

SEQ ID NO: 297278 - RNA, 19 nt, Human
aacagaagacugguccccc

SEQ ID NO: 297279 - RNA, 19 nt, Human
aagaggucaugaugcccuu

SEQ ID NO: 297280 - RNA, 23 nt, Human
aagcuggcugccugggcugagcc

SEQ ID NO: 297281 - RNA, 25 nt, Human
acaaaacacaacacgggccgccgcg

SEQ ID NO: 297282 - RNA, 22 nt, Human
acaaaacagaagacuggucccc

SEQ ID NO: 297283 - RNA, 18 nt, Human
acagagccuccuccaagg

SEQ ID NO: 297284 - RNA, 27 nt, Human
acagagccuccuccaaggccuugauaa

SEQ ID NO: 297285 - RNA, 22 nt, Human
acagcacaaaacacaacacggg

SEQ ID NO: 297286 - RNA, 21 nt, Human
accaugcuuugggggaagauu

SEQ ID NO: 297287 - RNA, 19 nt, Human
acucgggaaagaggaacug

SEQ ID NO: 297288 - RNA, 22 nt, Human
acugaaaugccaguuuaaucca

SEQ ID NO: 297289 - RNA, 20 nt, Human
agaaggucuaugcacaagga

SEQ ID NO: 297290 - RNA, 19 nt, Human
agaggaacuguuggagugg

SEQ ID NO: 297291 - RNA, 24 nt, Human
agcucagcccaaagcuggcugccu

SEQ ID NO: 297292 - RNA, 21 nt, Human
aggacauacagagccuccucc

SEQ ID NO: 297293 - RNA, 22 nt, Human
aggaggcuuguagguuacuugg

SEQ ID NO: 297294 - RNA, 20 nt, Human
aggagggaggcaugggaugg

SEQ ID NO: 297295 - RNA, 18 nt, Human
aggagggcaggggcccug

SEQ ID NO: 297296 - RNA, 19 nt, Human
aggaggugggggaagucaa

SEQ ID NO: 297297 - RNA, 18 nt, Human
agggggcgcacuggggac

SEQ ID NO: 297298 - RNA, 25 nt, Human
auacagagccuccuccaaccggagg

SEQ ID NO: 297299 - RNA, 21 nt, Human
caaaacagaagacuggucccc

SEQ ID NO: 297300 - RNA, 23 nt, Human
caaacaaugaaaaacaaaacaga

SEQ ID NO: 297301 - RNA, 22 nt, Human
caacaccccaaccaccuuacuc

SEQ ID NO: 297302 - RNA, 21 nt, Human
cacacuucccuuccuuaucuu

SEQ ID NO: 297303 - RNA, 21 nt, Human
caccccauacugucuuggaac

SEQ ID NO: 297304 - RNA, 20 nt, Human
caccgcacuacacuacuggc

SEQ ID NO: 297305 - RNA, 18 nt, Human
cacuggggaccugggcag

SEQ ID NO: 297306 - RNA, 25 nt, Human
cagagccuccuccaaggccuugaua

SEQ ID NO: 297307 - RNA, 20 nt, Human
cagcccaaagcuggcugccu

SEQ ID NO: 297308 - RNA, 22 nt, Human
caggagggcaggggcccuguug

SEQ ID NO: 297309 - RNA, 22 nt, Human
caggggcagaagggggugggag

SEQ ID NO: 297310 - RNA, 22 nt, Human
caguauucuggggguuagcccu

SEQ ID NO: 297311 - RNA, 21 nt, Human
cauacagagccuccuccaagg

SEQ ID NO: 297312 - RNA, 23 nt, Human
ccacacacuucccuuccuuaucu

SEQ ID NO: 297313 - RNA, 23 nt, Human
ccauacugucuuggaacaugcag

SEQ ID NO: 297314 - RNA, 26 nt, Human
ccauacugucuuggaacaugcagugg

SEQ ID NO: 297315 - RNA, 21 nt, Human
cccacagaggccccucugacc

SEQ ID NO: 297316 - RNA, 21 nt, Human
cccaccauccacauccacaca

SEQ ID NO: 297317 - RNA, 30 nt, Human; identical to SEQ ID NO: 294382

SEQ ID NO: 297318 - RNA, 26 nt, Human
ccccaccauccacauccacacacuuc

SEQ ID NO: 297319 - RNA, 18 nt, Human
ccccacuacccccauggg

SEQ ID NO: 297320 - RNA, 20 nt, Human
ccccacuacccccaugggua

SEQ ID NO: 297321 - RNA, 21 nt, Human
ccccacuacccccauggguac

SEQ ID NO: 297322 - RNA, 23 nt, Human
cccccugggggggaagggguagg

SEQ ID NO: 297323 - RNA, 21 nt, Human
ccccugaggacauacagagcc

SEQ ID NO: 297324 - RNA, 18 nt, Human
ccccugggggggaagggg

SEQ ID NO: 297325 - RNA, 20 nt, Human
cccugaaacucugaggccug

SEQ ID NO: 297326 - RNA, 22 nt, Human
ccuggcuggcccacccuuccug

SEQ ID NO: 297327 - RNA, 19 nt, Human
ccugggcugagacuuucug

SEQ ID NO: 297328 - RNA, 21 nt, Human
ccuguuagcucagcccaaagc

SEQ ID NO: 297329 - RNA, 24 nt, Human
cgcccgcugcccacccgccaucac

SEQ ID NO: 297330 - RNA, 19 nt, Human
cgcccuguggcucuuggcc

SEQ ID NO: 297331 - RNA, 18 nt, Human
cgccgcccgcugcccacc

SEQ ID NO: 297332 - RNA, 22 nt, Human
cggcaccuggcaaggugaagga

SEQ ID NO: 297333 - RNA, 23 nt, Human
cggcugcgcggagcccgccgccc

SEQ ID NO: 297334 - RNA, 22 nt, Human
cuauucuacaccagccgaaaga

SEQ ID NO: 297335 - RNA, 23 nt, Human
cucgcuggguccccgcuuuucca

SEQ ID NO: 297336 - RNA, 20 nt, Human
cucggguucucgcugggucc

SEQ ID NO: 297337 - RNA, 21 nt, Human
cucucaaggggaccugguccu

SEQ ID NO: 297338 - RNA, 23 nt, Human
cugaggccugggugcagguaagg

SEQ ID NO: 297339 - RNA, 18 nt, Human
cugccugggcugagcccu

SEQ ID NO: 297340 - RNA, 18 nt, Human
cuggcaaggugaaggacu

SEQ ID NO: 297341 - RNA, 22 nt, Human
cuuguuugaggaggaggugggg

SEQ ID NO: 297342 - RNA, 22 nt, Human
cuuuaaccaggcuauggccacu

SEQ ID NO: 297343 - RNA, 18 nt, Human
gaaaaacaaaacagaaga

SEQ ID NO: 297344 - RNA, 18 nt, Human
gaagauggaggaguucag

SEQ ID NO: 297345 - RNA, 21 nt, Human
gacccaggggcagaagggggu

SEQ ID NO: 297346 - RNA, 21 nt, Human
gagcauggccuuggccccuac

SEQ ID NO: 297347 - RNA, 20 nt, Human
gagugggguggggaggaggg

SEQ ID NO: 297348 - RNA, 21 nt, Human
gcccccaccauccacauccac

SEQ ID NO: 297349 - RNA, 18 nt, Human
gcccuguggcucuuggcc

SEQ ID NO: 297350 - RNA, 20 nt, Human
gccuggcuggcccacccuuc

SEQ ID NO: 297351 - RNA, 18 nt, Human
gcggagcccgccgcccgc

SEQ ID NO: 297352 - RNA, 19 nt, Human
gcguggacacagcacaaaa

SEQ ID NO: 297353 - RNA, 21 nt, Human
gcguggacacagcacaaaaca

SEQ ID NO: 297354 - RNA, 20 nt, Human
gcugcgcggagcccgccgcc

SEQ ID NO: 297355 - RNA, 20 nt, Human
ggacccaggggcagaagggg

SEQ ID NO: 297356 - RNA, 22 nt, Human
ggagaagucaguacgggggagg

SEQ ID NO: 297357 - RNA, 19 nt, Human
ggaggagggaggcauggga

SEQ ID NO: 297358 - RNA, 20 nt, Human
ggagggggcgcuacacuacu

SEQ ID NO: 297359 - RNA, 21 nt, Human
ggagugggguggggaggaggg

SEQ ID NO: 297360 - RNA, 22 nt, Human
ggagugggguggggaggaggga

SEQ ID NO: 297361 - RNA, 21 nt, Human
ggcaggucugggguucucugg

SEQ ID NO: 297362 - RNA, 19 nt, Human
ggcguugggaagaggcuug

SEQ ID NO: 297363 - RNA, 19 nt, Human
gggaccugguccuaaaccu

SEQ ID NO: 297364 - RNA, 19 nt, Human
gggaggagggaggcauggg

SEQ ID NO: 297365 - RNA, 20 nt, Human
gggaggcaugggauggaugg

SEQ ID NO: 297366 - RNA, 18 nt, Human
ggggaagggguaggugcu

SEQ ID NO: 297367 - RNA, 30 nt, Human; identical to SEQ ID NO: 294429

SEQ ID NO: 297368 - RNA, 24 nt, Human
ggggagggggucgccuuagcgcgu

SEQ ID NO: 297369 - RNA, 27 nt, Human
ggggcagaagggggugggagaagaagg

SEQ ID NO: 297370 - RNA, 19 nt, Human
gggguggggaggagggagg

SEQ ID NO: 297371 - RNA, 20 nt, Human
gggguggggaggagggaggc

SEQ ID NO: 297372 - RNA, 21 nt, Human
gggucucggagcuggcaaucu

SEQ ID NO: 297373 - RNA, 21 nt, Human
guccaugcccccaccauccac

SEQ ID NO: 297374 - RNA, 23 nt, Human
gugaaggacugaggcuucaggag

SEQ ID NO: 297375 - RNA, 21 nt, Human
guuuauggcuggaaucuggag

SEQ ID NO: 297376 - RNA, 23 nt, Human
uaaccauaaauuugaccuauauu

SEQ ID NO: 297377 - RNA, 20 nt, Human
uacagagccuccuccaaggg

SEQ ID NO: 297378 - RNA, 21 nt, Human
uaccaguauucuggggguuag

SEQ ID NO: 297379 - RNA, 18 nt, Human
uacucgggaaagaggaac

SEQ ID NO: 297380 - RNA, 22 nt, Human
uagaaucuuaaaauaauaccac

SEQ ID NO: 297381 - RNA, 19 nt, Human
uagcccugaaacucugagg

SEQ ID NO: 297382 - RNA, 24 nt, Human
uaggagaagucaguacgggggagg

SEQ ID NO: 297383 - RNA, 25 nt, Human
uaucuuaccaccccauacugucuug

SEQ ID NO: 297384 - RNA, 19 nt, Human
uauguagugggaagggucc

SEQ ID NO: 297385 - RNA, 20 nt, Human
ucagcccaaagcuggcugcc

SEQ ID NO: 297386 - RNA, 18 nt, Human
ucaguccccugaggacau

SEQ ID NO: 297387 - RNA, 24 nt, Human
uccaaaacuugagcauugaucuug

SEQ ID NO: 297388 - RNA, 19 nt, Human
uccacauccacacacuucc

SEQ ID NO: 297389 - RNA, 22 nt, Human
uccaccaguggcaccucuggag

SEQ ID NO: 297390 - RNA, 21 nt, Human
ucgcuggguccccgcuuuucc

SEQ ID NO: 297391 - RNA, 19 nt, Human
ugaaaaacaaaacagaaga

SEQ ID NO: 297392 - RNA, 21 nt, Human
ugaaaaacaaaacagaagacu

SEQ ID NO: 297393 - RNA, 18 nt, Human
ugacccuuccaccagugg

SEQ ID NO: 297394 - RNA, 22 nt, Human
ugacccuuccaccaguggcacc

SEQ ID NO: 297395 - RNA, 24 nt, Human
ugcccuagcucccugccuccccaa

SEQ ID NO: 297396 - RNA, 19 nt, Human
ugccugggcugagcccuau

SEQ ID NO: 297397 - RNA, 23 nt, Human
ugccugggcugagcccuauuaug

SEQ ID NO: 297398 - RNA, 21 nt, Human
ugcuggggcuccgcuccgggg

SEQ ID NO: 297399 - RNA, 21 nt, Human
uggaaacgucaaacaaugaaa

SEQ ID NO: 297400 - RNA, 25 nt, Human
uggaaacgucaaacaaugaaaaaca

SEQ ID NO: 297401 - RNA, 18 nt, Human
uggaaggaggugaagggg

SEQ ID NO: 297402 - RNA, 21 nt, Human
uggaaggaggugaaggggcug

SEQ ID NO: 297403 - RNA, 22 nt, Human
uggaaggaggugaaggggcugg

SEQ ID NO: 297404 - RNA, 18 nt, Human
uggaaucuggaggauguu

SEQ ID NO: 297405 - RNA, 22 nt, Human
uggaaucuggaggauguuguca

SEQ ID NO: 297406 - RNA, 21 nt, Human
uggacacagcacaaaacacaa

SEQ ID NO: 297407 - RNA, 19 nt, Human
uggaggauguugucagucc

SEQ ID NO: 297408 - RNA, 21 nt, Human
uggagugggguggggaggagg

SEQ ID NO: 297409 - RNA, 23 nt, Human
uggauggccggggacccaggggc

SEQ ID NO: 297410 - RNA, 25 nt, Human
uggcaaaugguucuuggugucuaca

SEQ ID NO: 297411 - RNA, 19 nt, Human
uggcaaggugaaggacuga

SEQ ID NO: 297412 - RNA, 21 nt, Human
uggcaaggugaaggacugagg

SEQ ID NO: 297413 - RNA, 23 nt, Human
uggcaccucuggaguacccagca

SEQ ID NO: 297414 - RNA, 24 nt, Human
uggcaccucuggaguacccagcac

SEQ ID NO: 297415 - RNA, 18 nt, Human
uggcugccugggcugagc

SEQ ID NO: 297416 - RNA, 21 nt, Human
uggcugccugggcugagcccu

SEQ ID NO: 297417 - RNA, 19 nt, Human
ugggaaggguccagccuag

SEQ ID NO: 297418 - RNA, 20 nt, Human
ugggaaggguccagccuagu

SEQ ID NO: 297419 - RNA, 19 nt, Human
ugggauggaugggccugau

SEQ ID NO: 297420 - RNA, 20 nt, Human
ugggcugguuggggagaggc

SEQ ID NO: 297421 - RNA, 22 nt, Human
uggggaccugggcaguggccuu

SEQ ID NO: 297422 - RNA, 20 nt, Human
uggggaggagggaggcaugg

SEQ ID NO: 297423 - RNA, 21 nt, Human
uggggaggagggaggcauggg

SEQ ID NO: 297424 - RNA, 18 nt, Human
ugggugcagguaaggaga

SEQ ID NO: 297425 - RNA, 26 nt, Human
ugguagcaaaaugcccucccuaaauc

SEQ ID NO: 297426 - RNA, 21 nt, Human
ugguccccagggcguugggaa

SEQ ID NO: 297427 - RNA, 20 nt, Human
uggucccugcccuagcuccc

SEQ ID NO: 297428 - RNA, 18 nt, Human
uguaagggcaggucuggg

SEQ ID NO: 297429 - RNA, 24 nt, Human
uguaauauaaaaaggauuaaauac

SEQ ID NO: 297430 - RNA, 23 nt, Human
ugucuacaguaaccccacuaccc

SEQ ID NO: 297431 - RNA, 19 nt, Human
uguggcaaaugguucuugg

SEQ ID NO: 297432 - RNA, 23 nt, Human
uguggcaaaugguucuugguguc

SEQ ID NO: 297433 - RNA, 20 nt, Human
uugauuuggaagauggagga

SEQ ID NO: 297434 - RNA, 19 nt, Human
uuggaagauggaggaguuc

SEQ ID NO: 297435 - RNA, 21 nt, Human
uuguuucuguuucccaagggg

SEQ ID NO: 297436 - RNA, 18 nt, Human
uuuucagaacuaggaggc

SEQ ID NO: 297437 - RNA, 21 nt, Human
aaaacacaacacgggccgccg

SEQ ID NO: 297438 - RNA, 24 nt, Human
aaaacagaagacugguccccaggg

SEQ ID NO: 297439 - RNA, 19 nt, Human
aaaagcacaccgcacuaca

SEQ ID NO: 297440 - RNA, 18 nt, Human
aaaagcaguuccucucag

SEQ ID NO: 297441 - RNA, 24 nt, Human
aaacaaaacagaagacuggucccc

SEQ ID NO: 297442 - RNA, 25 nt, Human
aaacaaaacagaagacuggucccca

SEQ ID NO: 297443 - RNA, 25 nt, Human
aaacaaaacagaagacuggucccca

SEQ ID NO: 297444 - RNA, 22 nt, Human
aaacaaugaaaaacaaaacaga

SEQ ID NO: 297445 - RNA, 20 nt, Human
aaagaggaacuguuggagug

SEQ ID NO: 297446 - RNA, 18 nt, Human
aaaugcccucccuaaauc

SEQ ID NO: 297447 - RNA, 20 nt, Human
aaaugcccucccuaaauccc

SEQ ID NO: 297448 - RNA, 19 nt, Human
aacagaagacugguccccc

SEQ ID NO: 297449 - RNA, 19 nt, Human
aagaggucaugaugcccuu

SEQ ID NO: 297450 - RNA, 23 nt, Human
aagcuggcugccugggcugagcc

SEQ ID NO: 297451 - RNA, 21 nt, Human
aaugaaaaacaaaacagaaga

SEQ ID NO: 297452 - RNA, 25 nt, Human
acaaaacacaacacgggccgccgcg

SEQ ID NO: 297453 - RNA, 22 nt, Human
acaaaacagaagacuggucccc

SEQ ID NO: 297454 - RNA, 18 nt, Human
acagagccuccuccaagg

SEQ ID NO: 297455 - RNA, 27 nt, Human
acagagccuccuccaaggccuugauaa

SEQ ID NO: 297456 - RNA, 22 nt, Human
acagcacaaaacacaacacggg

SEQ ID NO: 297457 - RNA, 21 nt, Human
accaugcuuugggggaagauu

SEQ ID NO: 297458 - RNA, 19 nt, Human
acucgggaaagaggaacug

SEQ ID NO: 297459 - RNA, 22 nt, Human
acugaaaugccaguuuaaucca

SEQ ID NO: 297460 - RNA, 20 nt, Human
agaaggucuaugcacaagga

SEQ ID NO: 297461 - RNA, 19 nt, Human
agaggaacuguuggagugg

SEQ ID NO: 297462 - RNA, 24 nt, Human
agcucagcccaaagcuggcugccu

SEQ ID NO: 297463 - RNA, 21 nt, Human
aggacauacagagccuccucc

SEQ ID NO: 297464 - RNA, 22 nt, Human
aggaggcuuguagguuacuugg

SEQ ID NO: 297465 - RNA, 20 nt, Human
aggagggaggcaugggaugg

SEQ ID NO: 297466 - RNA, 18 nt, Human
aggagggcaggggcccug

SEQ ID NO: 297467 - RNA, 19 nt, Human
aggaggugggggaagucaa

SEQ ID NO: 297468 - RNA, 18 nt, Human
agggggcgcacuggggac

SEQ ID NO: 297469 - RNA, 25 nt, Human
auacagagccuccuccaaccggagg

SEQ ID NO: 297470 - RNA, 21 nt, Human
caaaacagaagacuggucccc

SEQ ID NO: 297471 - RNA, 23 nt, Human
caaacaaugaaaaacaaaacaga

SEQ ID NO: 297472 - RNA, 22 nt, Human
caacaccccaaccaccuuacuc

SEQ ID NO: 297473 - RNA, 21 nt, Human
cacaaaccacacucuggcagg

SEQ ID NO: 297474 - RNA, 21 nt, Human
cacacuucccuuccuuaucuu

SEQ ID NO: 297475 - RNA, 21 nt, Human
caccccauacugucuuggaac

SEQ ID NO: 297476 - RNA, 20 nt, Human
caccgcacuacacuacuggc

SEQ ID NO: 297477 - RNA, 18 nt, Human
cacuggggaccugggcag

SEQ ID NO: 297478 - RNA, 25 nt, Human
cagagccuccuccaaggccuugaua

SEQ ID NO: 297479 - RNA, 20 nt, Human
cagcccaaagcuggcugccu

SEQ ID NO: 297480 - RNA, 22 nt, Human
caggagggcaggggcccuguug

SEQ ID NO: 297481 - RNA, 22 nt, Human
caggggcagaagggggugggag

SEQ ID NO: 297482 - RNA, 22 nt, Human
caguauucuggggguuagcccu

SEQ ID NO: 297483 - RNA, 21 nt, Human
cauacagagccuccuccaagg

SEQ ID NO: 297484 - RNA, 23 nt, Human
ccauacugucuuggaacaugcag

SEQ ID NO: 297485 - RNA, 26 nt, Human
ccauacugucuuggaacaugcagugg

SEQ ID NO: 297486 - RNA, 21 nt, Human
cccacagaggccccucugacc

SEQ ID NO: 297487 - RNA, 21 nt, Human
cccaccauccacauccacaca

SEQ ID NO: 297488 - RNA, 30 nt, Human; identical to SEQ ID NO: 294382

SEQ ID NO: 297489 - RNA, 26 nt, Human
ccccaccauccacauccacacacuuc

SEQ ID NO: 297490 - RNA, 19 nt, Human
ccccacuacccccaugggu

SEQ ID NO: 297491 - RNA, 19 nt, Human
ccccacuacccccaugggu

SEQ ID NO: 297492 - RNA, 20 nt, Human
ccccacuacccccaugggua

SEQ ID NO: 297493 - RNA, 21 nt, Human
ccccacuacccccauggguac

SEQ ID NO: 297494 - RNA, 27 nt, Human
cccccaccauccacauccacacacuuc

SEQ ID NO: 297495 - RNA, 23 nt, Human
cccccugggggggaagggguagg

SEQ ID NO: 297496 - RNA, 25 nt, Human
cccccugggggggaagggguaggug

SEQ ID NO: 297497 - RNA, 21 nt, Human
ccccugaggacauacagagcc

SEQ ID NO: 297498 - RNA, 18 nt, Human
ccccugggggggaagggg

SEQ ID NO: 297499 - RNA, 20 nt, Human
cccugaaacucugaggccug

SEQ ID NO: 297500 - RNA, 21 nt, Human
cccugagauuucgcugagaaa

SEQ ID NO: 297501 - RNA, 21 nt, Human
ccgccgcccgcugcccacccg

SEQ ID NO: 297502 - RNA, 19 nt, Human
ccugaaaugggaccacaaa

SEQ ID NO: 297503 - RNA, 19 nt, Human
ccuggcuggcccacccuuc

SEQ ID NO: 297504 - RNA, 22 nt, Human
ccuggcuggcccacccuuccug

SEQ ID NO: 297505 - RNA, 19 nt, Human
ccugggcugagacuuucug

SEQ ID NO: 297506 - RNA, 21 nt, Human
ccuguuagcucagcccaaagc

SEQ ID NO: 297507 - RNA, 24 nt, Human
cgcccgcugcccacccgccaucac

SEQ ID NO: 297508 - RNA, 19 nt, Human
cgcccuguggcucuuggcc

SEQ ID NO: 297509 - RNA, 22 nt, Human
cgcguggacacagcacaaaaca

SEQ ID NO: 297510 - RNA, 23 nt, Human
cggcugcgcggagcccgccgccc

SEQ ID NO: 297511 - RNA, 22 nt, Human
cuauucuacaccagccgaaaga

SEQ ID NO: 297512 - RNA, 22 nt, Human
cucagcccaaagcuggcugccu

SEQ ID NO: 297513 - RNA, 21 nt, Human
cucucaaggggaccugguccu

SEQ ID NO: 297514 - RNA, 23 nt, Human
cugaggccugggugcagguaagg

SEQ ID NO: 297515 - RNA, 18 nt, Human
cugccugggcugagcccu

SEQ ID NO: 297516 - RNA, 18 nt, Human
cuggcaaggugaaggacu

SEQ ID NO: 297517 - RNA, 22 nt, Human
cuuguuugaggaggaggugggg

SEQ ID NO: 297518 - RNA, 22 nt, Human
cuuuaaccaggcuauggccacu

SEQ ID NO: 297519 - RNA, 18 nt, Human
gaaaaacaaaacagaaga

SEQ ID NO: 297520 - RNA, 18 nt, Human
gaagauggaggaguucag

SEQ ID NO: 297521 - RNA, 21 nt, Human
gacccaggggcagaagggggu

SEQ ID NO: 297522 - RNA, 21 nt, Human
gagcauggccuuggccccuac

SEQ ID NO: 297523 - RNA, 18 nt, Human
gaggagggaggcauggga

SEQ ID NO: 297524 - RNA, 21 nt, Human
gaggccugggugcagguaagg

SEQ ID NO: 297525 - RNA, 20 nt, Human
gagucaaguaucuucccccu

SEQ ID NO: 297526 - RNA, 20 nt, Human
gagugggguggggaggaggg

SEQ ID NO: 297527 - RNA, 20 nt, Human
gcaccuggcaaggugaagga

SEQ ID NO: 297528 - RNA, 21 nt, Human
gcccccaccauccacauccac

SEQ ID NO: 297529 - RNA, 18 nt, Human
gcccuguggcucuuggcc

SEQ ID NO: 297530 - RNA, 20 nt, Human
gccuggcuggcccacccuuc

SEQ ID NO: 297531 - RNA, 18 nt, Human
gcggagcccgccgcccgc

SEQ ID NO: 297532 - RNA, 19 nt, Human
gcguggacacagcacaaaa

SEQ ID NO: 297533 - RNA, 19 nt, Human
gcugccugggcugagcccu

SEQ ID NO: 297534 - RNA, 20 nt, Human
gcugcgcggagcccgccgcc

SEQ ID NO: 297535 - RNA, 20 nt, Human
ggacccaggggcagaagggg

SEQ ID NO: 297536 - RNA, 22 nt, Human
ggagaagucaguacgggggagg

SEQ ID NO: 297537 - RNA, 20 nt, Human
ggagggggcgcuacacuacu

SEQ ID NO: 297538 - RNA, 21 nt, Human
ggagugggguggggaggaggg

SEQ ID NO: 297539 - RNA, 22 nt, Human
ggagugggguggggaggaggga

SEQ ID NO: 297540 - RNA, 21 nt, Human
ggcaggucugggguucucugg

SEQ ID NO: 297541 - RNA, 19 nt, Human
ggcguugggaagaggcuug

SEQ ID NO: 297542 - RNA, 19 nt, Human
gggaccugguccuaaaccu

SEQ ID NO: 297543 - RNA, 18 nt, Human
gggagaggccgcccugug

SEQ ID NO: 297544 - RNA, 19 nt, Human
gggaggagggaggcauggg

SEQ ID NO: 297545 - RNA, 20 nt, Human
gggaggcaugggauggaugg

SEQ ID NO: 297546 - RNA, 21 nt, Human
gggcagaagggggugggagaa

SEQ ID NO: 297547 - RNA, 19 nt, Human
gggcguugggaagaggcuu

SEQ ID NO: 297548 - RNA, 18 nt, Human
ggggaagggguaggugcu

SEQ ID NO: 297549 - RNA, 19 nt, Human
ggggagaggccgcccugug

SEQ ID NO: 297550 - RNA, 30 nt, Human; identical to SEQ ID NO: 294429

SEQ ID NO: 297551 - RNA, 24 nt, Human
ggggagggggucgccuuagcgcgu

SEQ ID NO: 297552 - RNA, 27 nt, Human
ggggcagaagggggugggagaagaagg

SEQ ID NO: 297553 - RNA, 19 nt, Human
gggguggggaggagggagg

SEQ ID NO: 297554 - RNA, 20 nt, Human
gggguggggaggagggaggc

SEQ ID NO: 297555 - RNA, 21 nt, Human
guccaugcccccaccauccac

SEQ ID NO: 297556 - RNA, 23 nt, Human
gugaaggacugaggcuucaggag

SEQ ID NO: 297557 - RNA, 21 nt, Human
guuuauggcuggaaucuggag

SEQ ID NO: 297558 - RNA, 20 nt, Human
uacagagccuccuccaaggg

SEQ ID NO: 297559 - RNA, 21 nt, Human
uaccaguauucuggggguuag

SEQ ID NO: 297560 - RNA, 19 nt, Human
uagcccugaaacucugagg

SEQ ID NO: 297561 - RNA, 23 nt, Human
uagcccugaaacucugaggccug

SEQ ID NO: 297562 - RNA, 24 nt, Human
uaggagaagucaguacgggggagg

SEQ ID NO: 297563 - RNA, 25 nt, Human
uaucuuaccaccccauacugucuug

SEQ ID NO: 297564 - RNA, 19 nt, Human
uauguagugggaagggucc

SEQ ID NO: 297565 - RNA, 22 nt, Human
ucaaaagcaguuccucucagcg

SEQ ID NO: 297566 - RNA, 20 nt, Human
ucagcccaaagcuggcugcc

SEQ ID NO: 297567 - RNA, 18 nt, Human
ucaguccccugaggacau

SEQ ID NO: 297568 - RNA, 24 nt, Human
uccaaaacuugagcauugaucuug

SEQ ID NO: 297569 - RNA, 26 nt, Human
uccacacacuucccuuccuuaucuua

SEQ ID NO: 297570 - RNA, 19 nt, Human
uccacauccacacacuucc

SEQ ID NO: 297571 - RNA, 22 nt, Human
uccaccaguggcaccucuggag

SEQ ID NO: 297572 - RNA, 19 nt, Human
ugaaaaacaaaacagaaga

SEQ ID NO: 297573 - RNA, 21 nt, Human
ugaaaaacaaaacagaagacu

SEQ ID NO: 297574 - RNA, 23 nt, Human
ugaaaugggaccacaaaccacac

SEQ ID NO: 297575 - RNA, 18 nt, Human
ugacccuuccaccagugg

SEQ ID NO: 297576 - RNA, 22 nt, Human
ugacccuuccaccaguggcacc

SEQ ID NO: 297577 - RNA, 24 nt, Human
ugcccuagcucccugccuccccaa

SEQ ID NO: 297578 - RNA, 23 nt, Human
ugccugggcugagcccuauuaug

SEQ ID NO: 297579 - RNA, 21 nt, Human
ugcuggggcuccgcuccgggg

SEQ ID NO: 297580 - RNA, 22 nt, Human
ugcuggggcuccgcuccggggg

SEQ ID NO: 297581 - RNA, 21 nt, Human
uggaaacgucaaacaaugaaa

SEQ ID NO: 297582 - RNA, 25 nt, Human
uggaaacgucaaacaaugaaaaaca

SEQ ID NO: 297583 - RNA, 18 nt, Human
uggaaggaggugaagggg

SEQ ID NO: 297584 - RNA, 21 nt, Human
uggaaggaggugaaggggcug

SEQ ID NO: 297585 - RNA, 22 nt, Human
uggaaggaggugaaggggcugg

SEQ ID NO: 297586 - RNA, 18 nt, Human
uggaaucuggaggauguu

SEQ ID NO: 297587 - RNA, 22 nt, Human
uggaaucuggaggauguuguca

SEQ ID NO: 297588 - RNA, 21 nt, Human
uggacacagcacaaaacacaa

SEQ ID NO: 297589 - RNA, 19 nt, Human
uggaggauguugucagucc

SEQ ID NO: 297590 - RNA, 21 nt, Human
uggagugggguggggaggagg

SEQ ID NO: 297591 - RNA, 23 nt, Human
uggauggccggggacccaggggc

SEQ ID NO: 297592 - RNA, 25 nt, Human
uggcaaaugguucuuggugucuaca

SEQ ID NO: 297593 - RNA, 29 nt, Human
uggcaaaugguucuuggugucuacaguaa

SEQ ID NO: 297594 - RNA, 19 nt, Human
uggcaaggugaaggacuga

SEQ ID NO: 297595 - RNA, 21 nt, Human
uggcaaggugaaggacugagg

SEQ ID NO: 297596 - RNA, 23 nt, Human
uggcaccucuggaguacccagca

SEQ ID NO: 297597 - RNA, 24 nt, Human
uggcaccucuggaguacccagcac

SEQ ID NO: 297598 - RNA, 18 nt, Human
uggcugccugggcugagc

SEQ ID NO: 297599 - RNA, 21 nt, Human
uggcugccugggcugagcccu

SEQ ID NO: 297600 - RNA, 20 nt, Human
ugggaagaggcuugguagca

SEQ ID NO: 297601 - RNA, 19 nt, Human
ugggaaggguccagccuag

SEQ ID NO: 297602 - RNA, 20 nt, Human
ugggaaggguccagccuagu

SEQ ID NO: 297603 - RNA, 20 nt, Human
ugggaaggguccagccuagu

SEQ ID NO: 297604 - RNA, 19 nt, Human
ugggauggaugggccugau

SEQ ID NO: 297605 - RNA, 20 nt, Human
ugggcugguuggggagaggc

SEQ ID NO: 297606 - RNA, 22 nt, Human
uggggaccugggcaguggccuu

SEQ ID NO: 297607 - RNA, 20 nt, Human
uggggaggagggaggcaugg

SEQ ID NO: 297608 - RNA, 21 nt, Human
uggggaggagggaggcauggg

SEQ ID NO: 297609 - RNA, 18 nt, Human
ugggugcagguaaggaga

SEQ ID NO: 297610 - RNA, 26 nt, Human
ugguagcaaaaugcccucccuaaauc

SEQ ID NO: 297611 - RNA, 21 nt, Human
ugguccccagggcguugggaa

SEQ ID NO: 297612 - RNA, 20 nt, Human
uggucccugcccuagcuccc

SEQ ID NO: 297613 - RNA, 23 nt, Human
ugguuuauggcuggaaucuggag

SEQ ID NO: 297614 - RNA, 18 nt, Human
uguaagggcaggucuggg

SEQ ID NO: 297615 - RNA, 23 nt, Human
ugucuacaguaaccccacuaccc

SEQ ID NO: 297616 - RNA, 19 nt, Human
uguggcaaaugguucuugg

SEQ ID NO: 297617 - RNA, 23 nt, Human
uguggcaaaugguucuugguguc

SEQ ID NO: 297618 - RNA, 20 nt, Human
uuauguagugggaagggucc

SEQ ID NO: 297619 - RNA, 20 nt, Human
uugauuuggaagauggagga

SEQ ID NO: 297620 - RNA, 19 nt, Human
uuggaagauggaggaguuc

SEQ ID NO: 297621 - RNA, 21 nt, Human
uuguuucuguuucccaagggg

SEQ ID NO: 297622 - RNA, 18 nt, Human
uuuucagaacuaggaggc

SEQ ID NO: 297623 - RNA, 21 nt, Human
aaaacacaacacgggccgccg

SEQ ID NO: 297624 - RNA, 24 nt, Human
aaaacagaagacugguccccaggg

SEQ ID NO: 297625 - RNA, 19 nt, Human
aaaagcacaccgcacuaca

SEQ ID NO: 297626 - RNA, 24 nt, Human
aaacaaaacagaagacuggucccc

SEQ ID NO: 297627 - RNA, 25 nt, Human
aaacaaaacagaagacuggucccca

SEQ ID NO: 297628 - RNA, 20 nt, Human
aaaugcccucccuaaauccc

SEQ ID NO: 297629 - RNA, 19 nt, Human
aacagaagacugguccccc

SEQ ID NO: 297630 - RNA, 23 nt, Human
aagcuggcugccugggcugagcc

SEQ ID NO: 297631 - RNA, 25 nt, Human
acaaaacacaacacgggccgccgcg

SEQ ID NO: 297632 - RNA, 22 nt, Human
acaaaacagaagacuggucccc

SEQ ID NO: 297633 - RNA, 18 nt, Human
acagagccuccuccaagg

SEQ ID NO: 297634 - RNA, 27 nt, Human
acagagccuccuccaaggccuugauaa

SEQ ID NO: 297635 - RNA, 22 nt, Human
acagcacaaaacacaacacggg

SEQ ID NO: 297636 - RNA, 21 nt, Human
accaugcuuugggggaagauu

SEQ ID NO: 297637 - RNA, 20 nt, Human
accccauacugucuuggaac

SEQ ID NO: 297638 - RNA, 19 nt, Human
acucgggaaagaggaacug

SEQ ID NO: 297639 - RNA, 22 nt, Human
acugaaaugccaguuuaaucca

SEQ ID NO: 297640 - RNA, 20 nt, Human
agaaggucuaugcacaagga

SEQ ID NO: 297641 - RNA, 19 nt, Human
agaggaacuguuggagugg

SEQ ID NO: 297642 - RNA, 24 nt, Human
agcucagcccaaagcuggcugccu

SEQ ID NO: 297643 - RNA, 21 nt, Human
aggacauacagagccuccucc

SEQ ID NO: 297644 - RNA, 22 nt, Human
aggaggcuuguagguuacuugg

SEQ ID NO: 297645 - RNA, 20 nt, Human
aggagggaggcaugggaugg

SEQ ID NO: 297646 - RNA, 18 nt, Human
aggagggcaggggcccug

SEQ ID NO: 297647 - RNA, 19 nt, Human
aggaggugggggaagucaa

SEQ ID NO: 297648 - RNA, 18 nt, Human
agggggcgcacuggggac

SEQ ID NO: 297649 - RNA, 25 nt, Human
auacagagccuccuccaaccggagg

SEQ ID NO: 297650 - RNA, 20 nt, Human
auucuacaccagccgaaaga

SEQ ID NO: 297651 - RNA, 21 nt, Human
caaaacagaagacuggucccc

SEQ ID NO: 297652 - RNA, 23 nt, Human
caaacaaugaaaaacaaaacaga

SEQ ID NO: 297653 - RNA, 22 nt, Human
caacaccccaaccaccuuacuc

SEQ ID NO: 297654 - RNA, 20 nt, Human
caagaggucaugaugcccuu

SEQ ID NO: 297655 - RNA, 21 nt, Human
cacacuucccuuccuuaucuu

SEQ ID NO: 297656 - RNA, 20 nt, Human
caccgcacuacacuacuggc

SEQ ID NO: 297657 - RNA, 18 nt, Human
cacuggggaccugggcag

SEQ ID NO: 297658 - RNA, 25 nt, Human
cagagccuccuccaaggccuugaua

SEQ ID NO: 297659 - RNA, 22 nt, Human
caggagggcaggggcccuguug

SEQ ID NO: 297660 - RNA, 22 nt, Human
caggggcagaagggggugggag

SEQ ID NO: 297661 - RNA, 22 nt, Human
caguauucuggggguuagcccu

SEQ ID NO: 297662 - RNA, 21 nt, Human
cauacagagccuccuccaagg

SEQ ID NO: 297663 - RNA, 20 nt, Human
ccacagaggccccucugacc

SEQ ID NO: 297664 - RNA, 23 nt, Human
ccauacugucuuggaacaugcag

SEQ ID NO: 297665 - RNA, 26 nt, Human
ccauacugucuuggaacaugcagugg

SEQ ID NO: 297666 - RNA, 21 nt, Human
cccaccauccacauccacaca

SEQ ID NO: 297667 - RNA, 30 nt, Human; identical to SEQ ID NO: 294382

SEQ ID NO: 297668 - RNA, 19 nt, Human
ccccacuacccccaugggu

SEQ ID NO: 297669 - RNA, 19 nt, Human
ccccacuacccccaugggu

SEQ ID NO: 297670 - RNA, 21 nt, Human
ccccacuacccccauggguac

SEQ ID NO: 297671 - RNA, 27 nt, Human
cccccaccauccacauccacacacuuc

SEQ ID NO: 297672 - RNA, 25 nt, Human
cccccugggggggaagggguaggug

SEQ ID NO: 297673 - RNA, 21 nt, Human
ccccugaggacauacagagcc

SEQ ID NO: 297674 - RNA, 21 nt, Human
ccgccgcccgcugcccacccg

SEQ ID NO: 297675 - RNA, 22 nt, Human
ccucucaaggggaccugguccu

SEQ ID NO: 297676 - RNA, 22 nt, Human
ccuggcuggcccacccuuccug

SEQ ID NO: 297677 - RNA, 19 nt, Human
ccugggcugagacuuucug

SEQ ID NO: 297678 - RNA, 21 nt, Human
ccuguuagcucagcccaaagc

SEQ ID NO: 297679 - RNA, 24 nt, Human
cgcccgcugcccacccgccaucac

SEQ ID NO: 297680 - RNA, 22 nt, Human
cgcguggacacagcacaaaaca

SEQ ID NO: 297681 - RNA, 22 nt, Human
cggcaccuggcaaggugaagga

SEQ ID NO: 297682 - RNA, 23 nt, Human
cggcugcgcggagcccgccgccc

SEQ ID NO: 297683 - RNA, 22 nt, Human
cucagcccaaagcuggcugccu

SEQ ID NO: 297684 - RNA, 23 nt, Human
cugaggccugggugcagguaagg

SEQ ID NO: 297685 - RNA, 18 nt, Human
cugccugggcugagcccu

SEQ ID NO: 297686 - RNA, 18 nt, Human
cuggcaaggugaaggacu

SEQ ID NO: 297687 - RNA, 22 nt, Human
cuuuaaccaggcuauggccacu

SEQ ID NO: 297688 - RNA, 18 nt, Human
gaaaaacaaaacagaaga

SEQ ID NO: 297689 - RNA, 18 nt, Human
gaagauggaggaguucag

SEQ ID NO: 297690 - RNA, 21 nt, Human
gacccaggggcagaagggggu

SEQ ID NO: 297691 - RNA, 21 nt, Human
gagcauggccuuggccccuac

SEQ ID NO: 297692 - RNA, 20 nt, Human
gagugggguggggaggaggg

SEQ ID NO: 297693 - RNA, 21 nt, Human
gcccccaccauccacauccac

SEQ ID NO: 297694 - RNA, 18 nt, Human
gcccuguggcucuuggcc

SEQ ID NO: 297695 - RNA, 20 nt, Human
gccuggcuggcccacccuuc

SEQ ID NO: 297696 - RNA, 18 nt, Human
gcggagcccgccgcccgc

SEQ ID NO: 297697 - RNA, 19 nt, Human
gcguggacacagcacaaaa

SEQ ID NO: 297698 - RNA, 20 nt, Human
gcugcgcggagcccgccgcc

SEQ ID NO: 297699 - RNA, 20 nt, Human
ggacccaggggcagaagggg

SEQ ID NO: 297700 - RNA, 22 nt, Human
ggagaagucaguacgggggagg

SEQ ID NO: 297701 - RNA, 19 nt, Human
ggaggagggaggcauggga

SEQ ID NO: 297702 - RNA, 20 nt, Human
ggagggggcgcuacacuacu

SEQ ID NO: 297703 - RNA, 21 nt, Human
ggagugggguggggaggaggg

SEQ ID NO: 297704 - RNA, 22 nt, Human
ggagugggguggggaggaggga

SEQ ID NO: 297705 - RNA, 21 nt, Human
ggcaggucugggguucucugg

SEQ ID NO: 297706 - RNA, 19 nt, Human
ggcguugggaagaggcuug

SEQ ID NO: 297707 - RNA, 19 nt, Human
gggaccugguccuaaaccu

SEQ ID NO: 297708 - RNA, 19 nt, Human
gggaggagggaggcauggg

SEQ ID NO: 297709 - RNA, 20 nt, Human
gggaggcaugggauggaugg

SEQ ID NO: 297710 - RNA, 19 nt, Human
gggcguugggaagaggcuu

SEQ ID NO: 297711 - RNA, 18 nt, Human
ggggaagggguaggugcu

SEQ ID NO: 297712 - RNA, 30 nt, Human; identical to SEQ ID NO: 294429

SEQ ID NO: 297713 - RNA, 24 nt, Human
ggggagggggucgccuuagcgcgu

SEQ ID NO: 297714 - RNA, 27 nt, Human
ggggcagaagggggugggagaagaagg

SEQ ID NO: 297715 - RNA, 19 nt, Human
gggguggggaggagggagg

SEQ ID NO: 297716 - RNA, 20 nt, Human
gggguggggaggagggaggc

SEQ ID NO: 297717 - RNA, 23 nt, Human
gugaaggacugaggcuucaggag

SEQ ID NO: 297718 - RNA, 20 nt, Human
uacagagccuccuccaaggg

SEQ ID NO: 297719 - RNA, 21 nt, Human
uaccaguauucuggggguuag

SEQ ID NO: 297720 - RNA, 18 nt, Human
uacucgggaaagaggaac

SEQ ID NO: 297721 - RNA, 19 nt, Human
uagcccugaaacucugagg

SEQ ID NO: 297722 - RNA, 23 nt, Human
uagcccugaaacucugaggccug

SEQ ID NO: 297723 - RNA, 24 nt, Human
uaggagaagucaguacgggggagg

SEQ ID NO: 297724 - RNA, 25 nt, Human
uaucuuaccaccccauacugucuug

SEQ ID NO: 297725 - RNA, 19 nt, Human
uauguagugggaagggucc

SEQ ID NO: 297726 - RNA, 20 nt, Human
ucagcccaaagcuggcugcc

SEQ ID NO: 297727 - RNA, 18 nt, Human
ucaguccccugaggacau

SEQ ID NO: 297728 - RNA, 24 nt, Human
uccaaaacuugagcauugaucuug

SEQ ID NO: 297729 - RNA, 26 nt, Human
uccacacacuucccuuccuuaucuua

SEQ ID NO: 297730 - RNA, 19 nt, Human
uccacauccacacacuucc

SEQ ID NO: 297731 - RNA, 22 nt, Human
uccaccaguggcaccucuggag

SEQ ID NO: 297732 - RNA, 20 nt, Human
uccaugcccccaccauccac

SEQ ID NO: 297733 - RNA, 21 nt, Human
ugaaaaacaaaacagaagacu

SEQ ID NO: 297734 - RNA, 18 nt, Human
ugacccuuccaccagugg

SEQ ID NO: 297735 - RNA, 22 nt, Human
ugacccuuccaccaguggcacc

SEQ ID NO: 297736 - RNA, 24 nt, Human
ugcccuagcucccugccuccccaa

SEQ ID NO: 297737 - RNA, 19 nt, Human
ugccugggcugagcccuau

SEQ ID NO: 297738 - RNA, 23 nt, Human
ugccugggcugagcccuauuaug

SEQ ID NO: 297739 - RNA, 21 nt, Human
ugcuggggcuccgcuccgggg

SEQ ID NO: 297740 - RNA, 21 nt, Human
uggaaacgucaaacaaugaaa

SEQ ID NO: 297741 - RNA, 25 nt, Human
uggaaacgucaaacaaugaaaaaca

SEQ ID NO: 297742 - RNA, 18 nt, Human
uggaaggaggugaagggg

SEQ ID NO: 297743 - RNA, 21 nt, Human
uggaaggaggugaaggggcug

SEQ ID NO: 297744 - RNA, 22 nt, Human
uggaaggaggugaaggggcugg

SEQ ID NO: 297745 - RNA, 18 nt, Human
uggaaucuggaggauguu

SEQ ID NO: 297746 - RNA, 22 nt, Human
uggaaucuggaggauguuguca

SEQ ID NO: 297747 - RNA, 21 nt, Human
uggacacagcacaaaacacaa

SEQ ID NO: 297748 - RNA, 19 nt, Human
uggaggauguugucagucc

SEQ ID NO: 297749 - RNA, 21 nt, Human
uggagugggguggggaggagg

SEQ ID NO: 297750 - RNA, 23 nt, Human
uggauggccggggacccaggggc

SEQ ID NO: 297751 - RNA, 29 nt, Human
uggcaaaugguucuuggugucuacaguaa

SEQ ID NO: 297752 - RNA, 19 nt, Human
uggcaaggugaaggacuga

SEQ ID NO: 297753 - RNA, 21 nt, Human
uggcaaggugaaggacugagg

SEQ ID NO: 297754 - RNA, 23 nt, Human
uggcaccucuggaguacccagca

SEQ ID NO: 297755 - RNA, 24 nt, Human
uggcaccucuggaguacccagcac

SEQ ID NO: 297756 - RNA, 18 nt, Human
uggcugccugggcugagc

SEQ ID NO: 297757 - RNA, 21 nt, Human
uggcugccugggcugagcccu

SEQ ID NO: 297758 - RNA, 19 nt, Human
ugggaaggguccagccuag

SEQ ID NO: 297759 - RNA, 20 nt, Human
ugggaaggguccagccuagu

SEQ ID NO: 297760 - RNA, 20 nt, Human
ugggaaggguccagccuagu

SEQ ID NO: 297761 - RNA, 19 nt, Human
ugggauggaugggccugau

SEQ ID NO: 297762 - RNA, 20 nt, Human
ugggcugguuggggagaggc

SEQ ID NO: 297763 - RNA, 22 nt, Human
uggggaccugggcaguggccuu

SEQ ID NO: 297764 - RNA, 20 nt, Human
uggggaggagggaggcaugg

SEQ ID NO: 297765 - RNA, 21 nt, Human
uggggaggagggaggcauggg

SEQ ID NO: 297766 - RNA, 18 nt, Human
ugggugcagguaaggaga

SEQ ID NO: 297767 - RNA, 26 nt, Human
ugguagcaaaaugcccucccuaaauc

SEQ ID NO: 297768 - RNA, 21 nt, Human
ugguccccagggcguugggaa

SEQ ID NO: 297769 - RNA, 20 nt, Human
uggucccugcccuagcuccc

SEQ ID NO: 297770 - RNA, 23 nt, Human
ugguuuauggcuggaaucuggag

SEQ ID NO: 297771 - RNA, 18 nt, Human
uguaagggcaggucuggg

SEQ ID NO: 297772 - RNA, 23 nt, Human
ugucuacaguaaccccacuaccc

SEQ ID NO: 297773 - RNA, 19 nt, Human
uguggcaaaugguucuugg

SEQ ID NO: 297774 - RNA, 23 nt, Human
uguggcaaaugguucuugguguc

SEQ ID NO: 297775 - RNA, 20 nt, Human
uugauuuggaagauggagga

SEQ ID NO: 297776 - RNA, 21 nt, Human
uuguuucuguuucccaagggg

SEQ ID NO: 297777 - RNA, 21 nt, Human
uuguuugaggaggaggugggg

SEQ ID NO: 297778 - RNA, 18 nt, Human
uuuucagaacuaggaggc

SEQ ID NO: 297779 - RNA, 21 nt, Human
aaaacacaacacgggccgccg

SEQ ID NO: 297780 - RNA, 24 nt, Human
aaaacagaagacugguccccaggg

SEQ ID NO: 297781 - RNA, 19 nt, Human
aaaagcacaccgcacuaca

SEQ ID NO: 297782 - RNA, 25 nt, Human
aaacaaaacagaagacuggucccca

SEQ ID NO: 297783 - RNA, 25 nt, Human
aaacaaaacagaagacuggucccca

SEQ ID NO: 297784 - RNA, 20 nt, Human
aaaugcccucccuaaauccc

SEQ ID NO: 297785 - RNA, 19 nt, Human
aacagaagacugguccccc

SEQ ID NO: 297786 - RNA, 23 nt, Human
aagcuggcugccugggcugagcc

SEQ ID NO: 297787 - RNA, 21 nt, Human
aaugaaaaacaaaacagaaga

SEQ ID NO: 297788 - RNA, 25 nt, Human
acaaaacacaacacgggccgccgcg

SEQ ID NO: 297789 - RNA, 22 nt, Human
acaaaacagaagacuggucccc

SEQ ID NO: 297790 - RNA, 18 nt, Human
acagagccuccuccaagg

SEQ ID NO: 297791 - RNA, 27 nt, Human
acagagccuccuccaaggccuugauaa

SEQ ID NO: 297792 - RNA, 22 nt, Human
acagcacaaaacacaacacggg

SEQ ID NO: 297793 - RNA, 21 nt, Human
accaugcuuugggggaagauu

SEQ ID NO: 297794 - RNA, 19 nt, Human
acucgggaaagaggaacug

SEQ ID NO: 297795 - RNA, 22 nt, Human
acugaaaugccaguuuaaucca

SEQ ID NO: 297796 - RNA, 20 nt, Human
agaaggucuaugcacaagga

SEQ ID NO: 297797 - RNA, 19 nt, Human
agaggaacuguuggagugg

SEQ ID NO: 297798 - RNA, 24 nt, Human
agcucagcccaaagcuggcugccu

SEQ ID NO: 297799 - RNA, 21 nt, Human
aggacauacagagccuccucc

SEQ ID NO: 297800 - RNA, 22 nt, Human
aggaggcuuguagguuacuugg

SEQ ID NO: 297801 - RNA, 20 nt, Human
aggagggaggcaugggaugg

SEQ ID NO: 297802 - RNA, 18 nt, Human
aggagggcaggggcccug

SEQ ID NO: 297803 - RNA, 19 nt, Human
aggaggugggggaagucaa

SEQ ID NO: 297804 - RNA, 23 nt, Human
agggaggcaugggauggaugggg

SEQ ID NO: 297805 - RNA, 21 nt, Human
aggggcagaagggggugggag

SEQ ID NO: 297806 - RNA, 18 nt, Human
agggggcgcacuggggac

SEQ ID NO: 297807 - RNA, 25 nt, Human
auacagagccuccuccaaccggagg

SEQ ID NO: 297808 - RNA, 21 nt, Human
caaaacagaagacuggucccc

SEQ ID NO: 297809 - RNA, 23 nt, Human
caaacaaugaaaaacaaaacaga

SEQ ID NO: 297810 - RNA, 22 nt, Human
caacaccccaaccaccuuacuc

SEQ ID NO: 297811 - RNA, 20 nt, Human
caagaggucaugaugcccuu

SEQ ID NO: 297812 - RNA, 21 nt, Human
cacacuucccuuccuuaucuu

SEQ ID NO: 297813 - RNA, 21 nt, Human
caccccauacugucuuggaac

SEQ ID NO: 297814 - RNA, 20 nt, Human
caccgcacuacacuacuggc

SEQ ID NO: 297815 - RNA, 18 nt, Human
cacuggggaccugggcag

SEQ ID NO: 297816 - RNA, 25 nt, Human
cagagccuccuccaaggccuugaua

SEQ ID NO: 297817 - RNA, 20 nt, Human
cagcccaaagcuggcugccu

SEQ ID NO: 297818 - RNA, 22 nt, Human
caggagggcaggggcccuguug

SEQ ID NO: 297819 - RNA, 22 nt, Human
caguauucuggggguuagcccu

SEQ ID NO: 297820 - RNA, 21 nt, Human
cauacagagccuccuccaagg

SEQ ID NO: 297821 - RNA, 23 nt, Human
ccacacacuucccuuccuuaucu

SEQ ID NO: 297822 - RNA, 23 nt, Human
ccauacugucuuggaacaugcag

SEQ ID NO: 297823 - RNA, 26 nt, Human
ccauacugucuuggaacaugcagugg

SEQ ID NO: 297824 - RNA, 21 nt, Human
cccacagaggccccucugacc

SEQ ID NO: 297825 - RNA, 21 nt, Human
cccaccauccacauccacaca

SEQ ID NO: 297826 - RNA, 30 nt, Human; identical to SEQ ID NO: 294382

SEQ ID NO: 297827 - RNA, 19 nt, Human
ccccacuacccccaugggu

SEQ ID NO: 297828 - RNA, 19 nt, Human
ccccacuacccccaugggu

SEQ ID NO: 297829 - RNA, 21 nt, Human
ccccacuacccccauggguac

SEQ ID NO: 297830 - RNA, 27 nt, Human
cccccaccauccacauccacacacuuc

SEQ ID NO: 297831 - RNA, 25 nt, Human
cccccugggggggaagggguaggug

SEQ ID NO: 297832 - RNA, 21 nt, Human
ccccugaggacauacagagcc

SEQ ID NO: 297833 - RNA, 19 nt, Human
ccuggcuggcccacccuuc

SEQ ID NO: 297834 - RNA, 22 nt, Human
ccuggcuggcccacccuuccug

SEQ ID NO: 297835 - RNA, 19 nt, Human
ccugggcugagacuuucug

SEQ ID NO: 297836 - RNA, 21 nt, Human
ccuguuagcucagcccaaagc

SEQ ID NO: 297837 - RNA, 24 nt, Human
cgcccgcugcccacccgccaucac

SEQ ID NO: 297838 - RNA, 18 nt, Human
cgccgcccgcugcccacc

SEQ ID NO: 297839 - RNA, 22 nt, Human
cgcguggacacagcacaaaaca

SEQ ID NO: 297840 - RNA, 22 nt, Human
cggcaccuggcaaggugaagga

SEQ ID NO: 297841 - RNA, 23 nt, Human
cggcugcgcggagcccgccgccc

SEQ ID NO: 297842 - RNA, 22 nt, Human
cuauucuacaccagccgaaaga

SEQ ID NO: 297843 - RNA, 21 nt, Human
cucucaaggggaccugguccu

SEQ ID NO: 297844 - RNA, 23 nt, Human
cugaggccugggugcagguaagg

SEQ ID NO: 297845 - RNA, 18 nt, Human
cugccugggcugagcccu

SEQ ID NO: 297846 - RNA, 18 nt, Human
cuggcaaggugaaggacu

SEQ ID NO: 297847 - RNA, 22 nt, Human
cuuuaaccaggcuauggccacu

SEQ ID NO: 297848 - RNA, 18 nt, Human
gaagauggaggaguucag

SEQ ID NO: 297849 - RNA, 21 nt, Human
gacccaggggcagaagggggu

SEQ ID NO: 297850 - RNA, 21 nt, Human
gagcauggccuuggccccuac

SEQ ID NO: 297851 - RNA, 20 nt, Human
gagugggguggggaggaggg

SEQ ID NO: 297852 - RNA, 21 nt, Human
gcccccaccauccacauccac

SEQ ID NO: 297853 - RNA, 18 nt, Human
gcccuguggcucuuggcc

SEQ ID NO: 297854 - RNA, 18 nt, Human
gcggagcccgccgcccgc

SEQ ID NO: 297855 - RNA, 19 nt, Human
gcguggacacagcacaaaa

SEQ ID NO: 297856 - RNA, 20 nt, Human
gcugcgcggagcccgccgcc

SEQ ID NO: 297857 - RNA, 20 nt, Human
ggacccaggggcagaagggg

SEQ ID NO: 297858 - RNA, 22 nt, Human
ggagaagucaguacgggggagg

SEQ ID NO: 297859 - RNA, 19 nt, Human
ggaggagggaggcauggga

SEQ ID NO: 297860 - RNA, 20 nt, Human
ggagggggcgcuacacuacu

SEQ ID NO: 297861 - RNA, 21 nt, Human
ggagugggguggggaggaggg

SEQ ID NO: 297862 - RNA, 22 nt, Human
ggagugggguggggaggaggga

SEQ ID NO: 297863 - RNA, 21 nt, Human
ggcaggucugggguucucugg

SEQ ID NO: 297864 - RNA, 19 nt, Human
ggcguugggaagaggcuug

SEQ ID NO: 297865 - RNA, 19 nt, Human
gggaccugguccuaaaccu

SEQ ID NO: 297866 - RNA, 19 nt, Human
gggaggagggaggcauggg

SEQ ID NO: 297867 - RNA, 20 nt, Human
gggaggcaugggauggaugg

SEQ ID NO: 297868 - RNA, 21 nt, Human
gggcagaagggggugggagaa

SEQ ID NO: 297869 - RNA, 19 nt, Human
gggcguugggaagaggcuu

SEQ ID NO: 297870 - RNA, 18 nt, Human
ggggaagggguaggugcu

SEQ ID NO: 297871 - RNA, 24 nt, Human
ggggagggggucgccuuagcgcgu

SEQ ID NO: 297872 - RNA, 27 nt, Human
ggggcagaagggggugggagaagaagg

SEQ ID NO: 297873 - RNA, 19 nt, Human
gggguggggaggagggagg

SEQ ID NO: 297874 - RNA, 20 nt, Human
gggguggggaggagggaggc

SEQ ID NO: 297875 - RNA, 23 nt, Human
gugaaggacugaggcuucaggag

SEQ ID NO: 297876 - RNA, 20 nt, Human
uacagagccuccuccaaggg

SEQ ID NO: 297877 - RNA, 21 nt, Human
uaccaguauucuggggguuag

SEQ ID NO: 297878 - RNA, 18 nt, Human
uacucgggaaagaggaac

SEQ ID NO: 297879 - RNA, 19 nt, Human
uagcccugaaacucugagg

SEQ ID NO: 297880 - RNA, 23 nt, Human
uagcccugaaacucugaggccug

SEQ ID NO: 297881 - RNA, 24 nt, Human
uaggagaagucaguacgggggagg

SEQ ID NO: 297882 - RNA, 25 nt, Human
uaucuuaccaccccauacugucuug

SEQ ID NO: 297883 - RNA, 19 nt, Human
uauguagugggaagggucc

SEQ ID NO: 297884 - RNA, 20 nt, Human
ucagcccaaagcuggcugcc

SEQ ID NO: 297885 - RNA, 18 nt, Human
ucaguccccugaggacau

SEQ ID NO: 297886 - RNA, 24 nt, Human
uccaaaacuugagcauugaucuug

SEQ ID NO: 297887 - RNA, 19 nt, Human
uccacauccacacacuucc

SEQ ID NO: 297888 - RNA, 22 nt, Human
uccaccaguggcaccucuggag

SEQ ID NO: 297889 - RNA, 20 nt, Human
uccaugcccccaccauccac

SEQ ID NO: 297890 - RNA, 21 nt, Human
ugaaaaacaaaacagaagacu

SEQ ID NO: 297891 - RNA, 18 nt, Human
ugacccuuccaccagugg

SEQ ID NO: 297892 - RNA, 22 nt, Human
ugacccuuccaccaguggcacc

SEQ ID NO: 297893 - RNA, 24 nt, Human
ugcccuagcucccugccuccccaa

SEQ ID NO: 297894 - RNA, 23 nt, Human
ugccugggcugagcccuauuaug

SEQ ID NO: 297895 - RNA, 22 nt, Human
ugcuggggcuccgcuccggggg

SEQ ID NO: 297896 - RNA, 21 nt, Human
uggaaacgucaaacaaugaaa

SEQ ID NO: 297897 - RNA, 25 nt, Human
uggaaacgucaaacaaugaaaaaca

SEQ ID NO: 297898 - RNA, 18 nt, Human
uggaaggaggugaagggg

SEQ ID NO: 297899 - RNA, 21 nt, Human
uggaaggaggugaaggggcug

SEQ ID NO: 297900 - RNA, 22 nt, Human
uggaaggaggugaaggggcugg

SEQ ID NO: 297901 - RNA, 18 nt, Human
uggaaucuggaggauguu

SEQ ID NO: 297902 - RNA, 22 nt, Human
uggaaucuggaggauguuguca

SEQ ID NO: 297903 - RNA, 21 nt, Human
uggacacagcacaaaacacaa

SEQ ID NO: 297904 - RNA, 19 nt, Human
uggaggauguugucagucc

SEQ ID NO: 297905 - RNA, 21 nt, Human
uggagugggguggggaggagg

SEQ ID NO: 297906 - RNA, 23 nt, Human
uggauggccggggacccaggggc

SEQ ID NO: 297907 - RNA, 25 nt, Human
uggcaaaugguucuuggugucuaca

SEQ ID NO: 297908 - RNA, 19 nt, Human
uggcaaggugaaggacuga

SEQ ID NO: 297909 - RNA, 21 nt, Human
uggcaaggugaaggacugagg

SEQ ID NO: 297910 - RNA, 23 nt, Human
uggcaccucuggaguacccagca

SEQ ID NO: 297911 - RNA, 24 nt, Human
uggcaccucuggaguacccagcac

SEQ ID NO: 297912 - RNA, 18 nt, Human
uggcugccugggcugagc

SEQ ID NO: 297913 - RNA, 21 nt, Human
uggcugccugggcugagcccu

SEQ ID NO: 297914 - RNA, 19 nt, Human
ugggaaggguccagccuag

SEQ ID NO: 297915 - RNA, 20 nt, Human
ugggaaggguccagccuagu

SEQ ID NO: 297916 - RNA, 20 nt, Human
ugggaaggguccagccuagu

SEQ ID NO: 297917 - RNA, 19 nt, Human
ugggauggaugggccugau

SEQ ID NO: 297918 - RNA, 20 nt, Human
ugggcugguuggggagaggc

SEQ ID NO: 297919 - RNA, 22 nt, Human
uggggaccugggcaguggccuu

SEQ ID NO: 297920 - RNA, 20 nt, Human
uggggaggagggaggcaugg

SEQ ID NO: 297921 - RNA, 21 nt, Human
uggggaggagggaggcauggg

SEQ ID NO: 297922 - RNA, 18 nt, Human
ugggugcagguaaggaga

SEQ ID NO: 297923 - RNA, 26 nt, Human
ugguagcaaaaugcccucccuaaauc

SEQ ID NO: 297924 - RNA, 21 nt, Human
ugguccccagggcguugggaa

SEQ ID NO: 297925 - RNA, 20 nt, Human
uggucccugcccuagcuccc

SEQ ID NO: 297926 - RNA, 23 nt, Human
ugguuuauggcuggaaucuggag

SEQ ID NO: 297927 - RNA, 18 nt, Human
uguaagggcaggucuggg

SEQ ID NO: 297928 - RNA, 23 nt, Human
ugucuacaguaaccccacuaccc

SEQ ID NO: 297929 - RNA, 19 nt, Human
uguggcaaaugguucuugg

SEQ ID NO: 297930 - RNA, 23 nt, Human
uguggcaaaugguucuugguguc

SEQ ID NO: 297931 - RNA, 20 nt, Human
uugauuuggaagauggagga

SEQ ID NO: 297932 - RNA, 19 nt, Human
uuggaagauggaggaguuc

SEQ ID NO: 297933 - RNA, 21 nt, Human
uuguuucuguuucccaagggg

SEQ ID NO: 297934 - RNA, 21 nt, Human
uuguuugaggaggaggugggg

SEQ ID NO: 297935 - RNA, 18 nt, Human
uuuucagaacuaggaggc

SEQ ID NO: 297936 - RNA, 21 nt, Human
aaagugaaaaaacacugaaaa

SEQ ID NO: 297937 - RNA, 21 nt, Human
aauuugggaacacuugcccuc

SEQ ID NO: 297938 - RNA, 23 nt, Human
acacacacacacacacacacaca

SEQ ID NO: 297939 - RNA, 23 nt, Human
acacacacacacacacacacaca

SEQ ID NO: 297940 - RNA, 23 nt, Human
acacacacacacacacacacaca

SEQ ID NO: 297941 - RNA, 23 nt, Human
acacacacacacacacacacaca

SEQ ID NO: 297942 - RNA, 23 nt, Human
acacacacacacacacacacaua

SEQ ID NO: 297943 - RNA, 23 nt, Human
acacacacacacacacacauaua

SEQ ID NO: 297944 - RNA, 21 nt, Human
acacacacacacauauauaua

SEQ ID NO: 297945 - RNA, 24 nt, Human
acacauacacaaauauaccacaca

SEQ ID NO: 297946 - RNA, 19 nt, Human
accacacagacacaugugc

SEQ ID NO: 297947 - RNA, 21 nt, Human
accuuauggaugggaaaggga

SEQ ID NO: 297948 - RNA, 22 nt, Human
acuugcccucucuugcuccuac

SEQ ID NO: 297949 - RNA, 19 nt, Human
auacacauacacaaauaua

SEQ ID NO: 297950 - RNA, 22 nt, Human
auacacauacacaaauauacca

SEQ ID NO: 297951 - RNA, 20 nt, Human
cacacacacacacacacaca

SEQ ID NO: 297952 - RNA, 20 nt, Human
cacacacacacacacacaca

SEQ ID NO: 297953 - RNA, 20 nt, Human
cacacacacacacacacaca

SEQ ID NO: 297954 - RNA, 20 nt, Human
cacacacacacacacacaca

SEQ ID NO: 297955 - RNA, 20 nt, Human
cacacacacacacacacaca

SEQ ID NO: 297956 - RNA, 20 nt, Human
cacacacacacacacacaca

SEQ ID NO: 297957 - RNA, 20 nt, Human
cacacacacacacacacaca

SEQ ID NO: 297958 - RNA, 20 nt, Human
cacacacacacacacacaca

SEQ ID NO: 297959 - RNA, 20 nt, Human
cacacacacacacacacaca

SEQ ID NO: 297960 - RNA, 22 nt, Human
cacacacacacacacacacaca

SEQ ID NO: 297961 - RNA, 22 nt, Human
cacacacacacacacacacaca

SEQ ID NO: 297962 - RNA, 22 nt, Human
cacacacacacacacacacaca

SEQ ID NO: 297963 - RNA, 22 nt, Human
cacacacacacacacacacaca

SEQ ID NO: 297964 - RNA, 26 nt, Human
cacacacacacacacacacacacaca

SEQ ID NO: 297965 - RNA, 26 nt, Human
cacacacacacacacacacacacaca

SEQ ID NO: 297966 - RNA, 26 nt, Human
cacacacacacacacacacacacaca

SEQ ID NO: 297967 - RNA, 26 nt, Human
cacacacacacacacacacacacaca

SEQ ID NO: 297968 - RNA, 26 nt, Human
cacacacacacacacacacacacaua

SEQ ID NO: 297969 - RNA, 26 nt, Human
cacacacacacacacacacacauaua

SEQ ID NO: 297970 - RNA, 26 nt, Human
cacacacacacacacacacauauaua

SEQ ID NO: 297971 - RNA, 20 nt, Human
cacacacacacacacacaua

SEQ ID NO: 297972 - RNA, 26 nt, Human
cacacacacacacacacauauauaua

SEQ ID NO: 297973 - RNA, 19 nt, Human
cacacacacacacacauau

SEQ ID NO: 297974 - RNA, 25 nt, Human
cacacacacacacacauauauauau

SEQ ID NO: 297975 - RNA, 25 nt, Human
caguacauacaaauacacauacaca

SEQ ID NO: 297976 - RNA, 21 nt, Human
cauacaaauacacauacacaa

SEQ ID NO: 297977 - RNA, 25 nt, Human
caugcacacacacacacacacacac

SEQ ID NO: 297978 - RNA, 23 nt, Human
caugcuaagauuucccuucucaa

SEQ ID NO: 297979 - RNA, 22 nt, Human
uaaagugaaaaaacacugaaaa

SEQ ID NO: 297980 - RNA, 27 nt, Human
uaaagugaaaaaacacugaaaagauca

SEQ ID NO: 297981 - RNA, 22 nt, Human
uaagcacaauauuaauaacaaa

SEQ ID NO: 297982 - RNA, 21 nt, Human
uacacaaauauaccacacaga

SEQ ID NO: 297983 - RNA, 23 nt, Human
uacagcucaaguauuuuuuuggu

SEQ ID NO: 297984 - RNA, 24 nt, Human
uacaugcacacacacacacacaca

SEQ ID NO: 297985 - RNA, 26 nt, Human
uacaugcacacacacacacacacaca

SEQ ID NO: 297986 - RNA, 25 nt, Human
uaguaggucaucuugcccaagauuu

SEQ ID NO: 297987 - RNA, 24 nt, Human
uauaccacacagacacaugugcac

SEQ ID NO: 297988 - RNA, 23 nt, Human
uccacauagcuaaagugaaaaaa

SEQ ID NO: 297989 - RNA, 24 nt, Human
ucccagugggaaggccgugcuugg

SEQ ID NO: 297990 - RNA, 23 nt, Human
ucucuugcuccuacugcaccuua

SEQ ID NO: 297991 - RNA, 20 nt, Human
ugcacacacacacacacaca

SEQ ID NO: 297992 - RNA, 25 nt, Human
ugcacacacacacacacacacacac

SEQ ID NO: 297993 - RNA, 24 nt, Human
ugcuaaggggcacgaaugugaggu

SEQ ID NO: 297994 - RNA, 18 nt, Human
uggcagaaccucccagcu

SEQ ID NO: 297995 - RNA, 21 nt, Human
ugggaacacuugcccucucuu

SEQ ID NO: 297996 - RNA, 20 nt, Human
ugggaaggccgugcuuggug

SEQ ID NO: 297997 - RNA, 22 nt, Human
ugggaaggccgugcuugguggc

SEQ ID NO: 297998 - RNA, 26 nt, Human
ugugcacauacaugcacacacacaca

SEQ ID NO: 297999 - RNA, 25 nt, Human
ugugcacauacaugcacacacacag

SEQ ID NO: 298000 - RNA, 22 nt, Human
uucaaggaaaacuaguagguca

SEQ ID NO: 298001 - RNA, 20 nt, Human
uucaauaacaguacauacaa

SEQ ID NO: 298002 - RNA, 21 nt, Human
uugcccucucuugcuccuacc

SEQ ID NO: 298003 - RNA, 24 nt, Human
uuuaagcacaauauuaauaacaaa

SEQ ID NO: 298004 - RNA, 20 nt, Human
uuuuuuggugugcauucuag

SEQ ID NO: 298005 - RNA, 20 nt, Human
aaaauacagcaguuaagaua

SEQ ID NO: 298006 - RNA, 23 nt, Human
aaaaugacaccacaugcacagca

SEQ ID NO: 298007 - RNA, 20 nt, Human
aaacaaaaaggacacacaac

SEQ ID NO: 298008 - RNA, 18 nt, Human
aaacaggaaaggacagca

SEQ ID NO: 298009 - RNA, 18 nt, Human
aaacaggaaaggacagca

SEQ ID NO: 298010 - RNA, 21 nt, Human
aaacaggaaaggacagcagga

SEQ ID NO: 298011 - RNA, 23 nt, Human
aaacaggaaaggacagcaggaaa

SEQ ID NO: 298012 - RNA, 22 nt, Human
aaagagcauauuaauguauuua

SEQ ID NO: 298013 - RNA, 25 nt, Human
aaugguuagaaaaaauaucuguaaa

SEQ ID NO: 298014 - RNA, 21 nt, Human
acacuuaacaacuauggaaac

SEQ ID NO: 298015 - RNA, 22 nt, Human
acacuuaacaacuauggaaaca

SEQ ID NO: 298016 - RNA, 22 nt, Human
acagacaaagggacagagaaca

SEQ ID NO: 298017 - RNA, 20 nt, Human
accgcuuuuaugugcugcug

SEQ ID NO: 298018 - RNA, 21 nt, Human
acuguaucaaaugcuaugagc

SEQ ID NO: 298019 - RNA, 27 nt, Human
agaguauguauccucagauggaaccag

SEQ ID NO: 298020 - RNA, 18 nt, Human
aggcaaaaaacacugauc

SEQ ID NO: 298021 - RNA, 19 nt, Human
aggcaaaaaacacugaucc

SEQ ID NO: 298022 - RNA, 22 nt, Human
aggcagauuaucagacugaguu

SEQ ID NO: 298023 - RNA, 21 nt, Human
aguauguauccucagauggaa

SEQ ID NO: 298024 - RNA, 18 nt, Human
agucaaaagaugcccagu

SEQ ID NO: 298025 - RNA, 20 nt, Human
auacaaaucacuguagucaa

SEQ ID NO: 298026 - RNA, 21 nt, Human
caagagagaacuuucaccaug

SEQ ID NO: 298027 - RNA, 22 nt, Human
caccacaugcacagcacuaaag

SEQ ID NO: 298028 - RNA, 24 nt, Human
caccuccuucuggcuugacugguc

SEQ ID NO: 298029 - RNA, 26 nt, Human
cacugauccacauuccaacugguagg

SEQ ID NO: 298030 - RNA, 21 nt, Human
cagaauggacccaauugugcu

SEQ ID NO: 298031 - RNA, 20 nt, Human
cagcaggaaagaaaggcaac

SEQ ID NO: 298032 - RNA, 23 nt, Human
cagcaggaaagaaaggcaacaga

SEQ ID NO: 298033 - RNA, 24 nt, Human
ccaacagaauggacccaauugugc

SEQ ID NO: 298034 - RNA, 20 nt, Human
ccaucagacaucaccuuccu

SEQ ID NO: 298035 - RNA, 22 nt, Human
ccuggcuaaugccuuuuagaag

SEQ ID NO: 298036 - RNA, 18 nt, Human
ccuuucugcucaccuccu

SEQ ID NO: 298037 - RNA, 19 nt, Human
cgcaaacaaaaaggacaca

SEQ ID NO: 298038 - RNA, 22 nt, Human
cuccucaggagguggauuuggc

SEQ ID NO: 298039 - RNA, 21 nt, Human
cugucaucacauacaaagugu

SEQ ID NO: 298040 - RNA, 22 nt, Human
cuuccuggcaugauuagacuga

SEQ ID NO: 298041 - RNA, 22 nt, Human
cuucuggcuugacugguccauc

SEQ ID NO: 298042 - RNA, 22 nt, Human
gaugacuagggagauggagaga

SEQ ID NO: 298043 - RNA, 22 nt, Human
gaugguggaaacaaaggagaaa

SEQ ID NO: 298044 - RNA, 20 nt, Human
gcaaaaaacacugauccaca

SEQ ID NO: 298045 - RNA, 22 nt, Human
gcccagugcauagaaaaauaca

SEQ ID NO: 298046 - RNA, 19 nt, Human
ggaaacaaaggagaaacag

SEQ ID NO: 298047 - RNA, 20 nt, Human
ggccuuucugcucaccuccu

SEQ ID NO: 298048 - RNA, 28 nt, Human
uaaaaaaaaucuaaauaagaaagagcau

SEQ ID NO: 298049 - RNA, 21 nt, Human
uaaacauauuuuaucagacaa

SEQ ID NO: 298050 - RNA, 18 nt, Human
uaccauauuucagaagca

SEQ ID NO: 298051 - RNA, 23 nt, Human
uagacugaccgcuuuuaugugcu

SEQ ID NO: 298052 - RNA, 22 nt, Human
uauuacacaggcacuuggagau

SEQ ID NO: 298053 - RNA, 20 nt, Human
ucaaaugccaaaaugacacc

SEQ ID NO: 298054 - RNA, 26 nt, Human
ucaaaugccaaaaugacaccacaugc

SEQ ID NO: 298055 - RNA, 21 nt, Human
uccaagguucuagaaguugac

SEQ ID NO: 298056 - RNA, 20 nt, Human
uccauucugcaauaugaagg

SEQ ID NO: 298057 - RNA, 20 nt, Human
ucuaaauaagaaagagcaua

SEQ ID NO: 298058 - RNA, 23 nt, Human
ucuaaauaagaaagagcauauua

SEQ ID NO: 298059 - RNA, 19 nt, Human
ucugcaauaugaauauugu

SEQ ID NO: 298060 - RNA, 22 nt, Human
ugaaagcaaacaggaaaggaca

SEQ ID NO: 298061 - RNA, 21 nt, Human
ugaaauaauaggcaaaaaaca

SEQ ID NO: 298062 - RNA, 20 nt, Human
ugaaauggaaacccagagua

SEQ ID NO: 298063 - RNA, 23 nt, Human
ugaauguggauugaguuccugug

SEQ ID NO: 298064 - RNA, 18 nt, Human
ugacaccacaugcacagc

SEQ ID NO: 298065 - RNA, 19 nt, Human
ugacaccacaugcacagca

SEQ ID NO: 298066 - RNA, 21 nt, Human
ugagaauguaagaaauaagau

SEQ ID NO: 298067 - RNA, 20 nt, Human
ugcauuaucuucugccuaga

SEQ ID NO: 298068 - RNA, 21 nt, Human
ugccaaaaugacaccacaugc

SEQ ID NO: 298069 - RNA, 18 nt, Human
ugccaugcccacaaaagc

SEQ ID NO: 298070 - RNA, 20 nt, Human
ugccuagacuuuuugagugu

SEQ ID NO: 298071 - RNA, 21 nt, Human
uggaaaacuggcagccacuug

SEQ ID NO: 298072 - RNA, 23 nt, Human
uggaaacaaaggagaaacagcca

SEQ ID NO: 298073 - RNA, 21 nt, Human
uggagagaacaaugaucuauc

SEQ ID NO: 298074 - RNA, 24 nt, Human
uggaugguggaaacaaaggagaaa

SEQ ID NO: 298075 - RNA, 24 nt, Human
uguuuucaaaugccaaaaugacac

SEQ ID NO: 298076 - RNA, 23 nt, Human
uugacuuauagcuaccagacaua

SEQ ID NO: 298077 - RNA, 20 nt, Human
uugaguuccuguggaaaucu

SEQ ID NO: 298078 - RNA, 18 nt, Human
uugcauugccuuaucaca

SEQ ID NO: 298079 - RNA, 22 nt, Human
uuugcacauggaaagcuaccau

SEQ ID NO: 298080 - RNA, 27 nt, Human
uuuucagaagacuacaauuuuuugcac

SEQ ID NO: 298081 - RNA, 20 nt, Human
uuuuuugguauaaguccugg

SEQ ID NO: 298082 - RNA, 22 nt, Human
uuuuuuuugguauaaguccugg

SEQ ID NO: 298083 - RNA, 18 nt, Human
aagcagccucuccuguca

SEQ ID NO: 298084 - RNA, 23 nt, Human
aagcagccucuccugucaaaggc

SEQ ID NO: 298085 - RNA, 19 nt, Human
cacgcgcagcacgcacuua

SEQ ID NO: 298086 - RNA, 23 nt, Human
cacguacgcacgcgcagcacgca

SEQ ID NO: 298087 - RNA, 19 nt, Human
cagaggggcaagcgcggcg

SEQ ID NO: 298088 - RNA, 21 nt, Human
cccgcacgacccgcgccggca

SEQ ID NO: 298089 - RNA, 23 nt, Human
ccgcgccggcagcggucggcccu

SEQ ID NO: 298090 - RNA, 19 nt, Human
ccggcagcggucggcccuc

SEQ ID NO: 298091 - RNA, 18 nt, Human
gagaacucgccggcggga

SEQ ID NO: 298092 - RNA, 20 nt, Human
gcagcagagaggcccacacg

SEQ ID NO: 298093 - RNA, 21 nt, Human
gugguggagaagagggcgggg

SEQ ID NO: 298094 - RNA, 20 nt, Human
uccucgcaacggcgcgcggg

SEQ ID NO: 298095 - RNA, 25 nt, Human
ugugguggagaagagggcgggguac

SEQ ID NO: 298096 - RNA, 23 nt, Human
uuuagaaacuaguuuuugcagcu

SEQ ID NO: 298097 - RNA, 19 nt, Human
uuugcagcucagaaacugc

SEQ ID NO: 298098 - RNA, 20 nt, Human
uuuugcagcucagaaacugc

SEQ ID NO: 298099 - RNA, 20 nt, Human
aaaaaccacuccucaaaauc

SEQ ID NO: 298100 - RNA, 18 nt, Human
aaaaagcuuugaggacug

SEQ ID NO: 298101 - RNA, 20 nt, Human
aaacagaaaaccacacuaaa

SEQ ID NO: 298102 - RNA, 30 nt, Human
aaauuagaaacagaaaaccacacuaaacuu

SEQ ID NO: 298103 - RNA, 21 nt, Human
aaugccuaguuuuaagguaac

SEQ ID NO: 298104 - RNA, 24 nt, Human
acagaaccaccuucagcgcgacga

SEQ ID NO: 298105 - RNA, 20 nt, Human
acauuuucaugcugaaaaua

SEQ ID NO: 298106 - RNA, 21 nt, Human
agaaaaccacacuaaacuaca

SEQ ID NO: 298107 - RNA, 19 nt, Human
agcagcugauuguaucuac

SEQ ID NO: 298108 - RNA, 23 nt, Human
caaaaagcuuugaggacugagau

SEQ ID NO: 298109 - RNA, 20 nt, Human
caaagcagcacugcauaaac

SEQ ID NO: 298110 - RNA, 26 nt, Human
caaauuagaaacagaaaaccacacua

SEQ ID NO: 298111 - RNA, 18 nt, Human
cacucggagcagguacag

SEQ ID NO: 298112 - RNA, 21 nt, Human
cagaaaaccacacuaaacuac

SEQ ID NO: 298113 - RNA, 20 nt, Human
cagaaacccuaaaaaaacac

SEQ ID NO: 298114 - RNA, 22 nt, Human
cagaaacccuaaaaaaacacac

SEQ ID NO: 298115 - RNA, 21 nt, Human
caguguaacaaaguccaaaac

SEQ ID NO: 298116 - RNA, 21 nt, Human
ccucaaaaucaauucacaaac

SEQ ID NO: 298117 - RNA, 21 nt, Human
cuccucaaaaucaauucacaa

SEQ ID NO: 298118 - RNA, 19 nt, Human
cucugugccucuuugaaga

SEQ ID NO: 298119 - RNA, 21 nt, Human
cugaaaauaacaguguaacaa

SEQ ID NO: 298120 - RNA, 28 nt, Human
gagcagguacagaaccaccuucagcgcg

SEQ ID NO: 298121 - RNA, 19 nt, Human
gcucugugccucuuugaag

SEQ ID NO: 298122 - RNA, 21 nt, Human
guguccaagaaaagaaaaacc

SEQ ID NO: 298123 - RNA, 30 nt, Human
uaaaaaaacacacauuuucaugcugaaaag

SEQ ID NO: 298124 - RNA, 22 nt, Human
uaaaaagaaagcucaucucuau

SEQ ID NO: 298125 - RNA, 24 nt, Human
uacacagcauguuaaguucauaua

SEQ ID NO: 298126 - RNA, 22 nt, Human
uaugacaccacaucaaaagcuu

SEQ ID NO: 298127 - RNA, 20 nt, Human
uccaaauaccaagaaucuua

SEQ ID NO: 298128 - RNA, 21 nt, Human
uccaagaaaagaaaaaccacu

SEQ ID NO: 298129 - RNA, 22 nt, Human
uccaagaaaagaaaaaccacuc

SEQ ID NO: 298130 - RNA, 20 nt, Human
uccaaugcacaaaagcaauc

SEQ ID NO: 298131 - RNA, 23 nt, Human
ucuaacagauauccaaauaccaa

SEQ ID NO: 298132 - RNA, 21 nt, Human
ucuuuuaauauuuccaaguaa

SEQ ID NO: 298133 - RNA, 23 nt, Human
ugaacagcugaguguuuacagga

SEQ ID NO: 298134 - RNA, 19 nt, Human
ugacaccacaucaaaagcu

SEQ ID NO: 298135 - RNA, 21 nt, Human
ugacaccacaucaaaagcuuu

SEQ ID NO: 298136 - RNA, 19 nt, Human
ugagaugagcaauccacug

SEQ ID NO: 298137 - RNA, 19 nt, Human
ugcauaaacuguucaagaa

SEQ ID NO: 298138 - RNA, 23 nt, Human
uggaagaagaaagagcagaagau

SEQ ID NO: 298139 - RNA, 23 nt, Human
uguaacaaaguccaaaacaagcu

SEQ ID NO: 298140 - RNA, 25 nt, Human
uguccaagaaaagaaaaaccacucc

SEQ ID NO: 298141 - RNA, 25 nt, Human
uuaauaucagaacagaauuaagugu

SEQ ID NO: 298142 - RNA, 18 nt, Human
uugcauccuuccucuacc

SEQ ID NO: 298143 - RNA, 21 nt, Human
uuugaagaaucagaaacccua

SEQ ID NO: 298144 - RNA, 19 nt, Human
uuugagagagagagaaggg

SEQ ID NO: 298145 - RNA, 18 nt, Human
aaacaauaucuacauaug

SEQ ID NO: 298146 - RNA, 22 nt, Human
aagacuucaguauaugcuggca

SEQ ID NO: 298147 - RNA, 21 nt, Human
agacuucaguauaugcuggca

SEQ ID NO: 298148 - RNA, 22 nt, Human
aggcaggcgggaaggaggaaag

SEQ ID NO: 298149 - RNA, 23 nt, Human
aggcgggaaggaggaaagucuag

SEQ ID NO: 298150 - RNA, 24 nt, Human
cacaaguauuucuaagagacaaaa

SEQ ID NO: 298151 - RNA, 23 nt, Human
cagaucagacuuuggacuuuauu

SEQ ID NO: 298152 - RNA, 18 nt, Human
cuaagagacaaaaauacu

SEQ ID NO: 298153 - RNA, 21 nt, Human
gacuucaguauaugcuggcau

SEQ ID NO: 298154 - RNA, 19 nt, Human
ggcuucaggagccucagag

SEQ ID NO: 298155 - RNA, 20 nt, Human
uaaauucaaaaacacuucuu

SEQ ID NO: 298156 - RNA, 22 nt, Human
uacaaauuuggugacagaaaag

SEQ ID NO: 298157 - RNA, 19 nt, Human
uagaagcaguucucaaaga

SEQ ID NO: 298158 - RNA, 29 nt, Human
ucagacuuuggacuuuauucucccugggg

SEQ ID NO: 298159 - RNA, 23 nt, Human
ucggcuucaggagccucagagcg

SEQ ID NO: 298160 - RNA, 18 nt, Human
ucuagguuaacuagacca

SEQ ID NO: 298161 - RNA, 22 nt, Human
uucggcuucaggagccucagag

SEQ ID NO: 298162 - RNA, 19 nt, Human
uuggagagaauagagaaaa

SEQ ID NO: 298163 - RNA, 19 nt, Human
agaaacauuuauuuggaua

SEQ ID NO: 298164 - RNA, 20 nt, Human
aggccugagggcuaggggcc

SEQ ID NO: 298165 - RNA, 19 nt, Human
agggcuaggggccggggcu

SEQ ID NO: 298166 - RNA, 18 nt, Human
cagcagcgguggcggcag

SEQ ID NO: 298167 - RNA, 24 nt, Human
cucaagacagaggcagcagcugaa

SEQ ID NO: 298168 - RNA, 20 nt, Human
gagcagcagcagcgguggcg

SEQ ID NO: 298169 - RNA, 19 nt, Human
gcagcagcagcgguggcgg

SEQ ID NO: 298170 - RNA, 19 nt, Human
gcagcagcugaauuuugca

SEQ ID NO: 298171 - RNA, 19 nt, Human
gccccgggggaaaggcgcu

SEQ ID NO: 298172 - RNA, 23 nt, Human
gccccgggggaaaggcgcugggg

SEQ ID NO: 298173 - RNA, 21 nt, Human
gggccggggcuggccugcguc

SEQ ID NO: 298174 - RNA, 20 nt, Human
aacacuauaaauauugcacu

SEQ ID NO: 298175 - RNA, 25 nt, Human
aaguauuuuuuuuucuacugagaga

SEQ ID NO: 298176 - RNA, 21 nt, Human
acccaccgcgcucacaccgcc

SEQ ID NO: 298177 - RNA, 22 nt, Human
accgccgcggggcggcccaggu

SEQ ID NO: 298178 - RNA, 24 nt, Human
acgcaagacaagauuguaacaccu

SEQ ID NO: 298179 - RNA, 23 nt, Human
caagacaagauuguaacaccuca

SEQ ID NO: 298180 - RNA, 19 nt, Human
cacccaccgcgcucacacc

SEQ ID NO: 298181 - RNA, 20 nt, Human
cacgccccuccgcacccacc

SEQ ID NO: 298182 - RNA, 20 nt, Human
cacuaagucggcagguuucc

SEQ ID NO: 298183 - RNA, 19 nt, Human
cagcguagacgcucggggu

SEQ ID NO: 298184 - RNA, 21 nt, Human
caugugaagagucaaccaguc

SEQ ID NO: 298185 - RNA, 21 nt, Human
ccaccgcgcucacaccgccgc

SEQ ID NO: 298186 - RNA, 23 nt, Human
ccaccgcgcucacaccgccgcuc

SEQ ID NO: 298187 - RNA, 23 nt, Human
ccgcacccaccgcgcucacaccg

SEQ ID NO: 298188 - RNA, 27 nt, Human
ccgcacuaagucggcagguuuccaauc

SEQ ID NO: 298189 - RNA, 23 nt, Human
ccuccgcacccaccgcgcucaca

SEQ ID NO: 298190 - RNA, 25 nt, Human
cgccccuccgcacccaccgcgcuca

SEQ ID NO: 298191 - RNA, 21 nt, Human
cgcgcgcgccggcacacacgg

SEQ ID NO: 298192 - RNA, 25 nt, Human
cucacacuggcagcagcgcuggcuc

SEQ ID NO: 298193 - RNA, 24 nt, Human
cuccgcacccaccgcgcucacacc

SEQ ID NO: 298194 - RNA, 26 nt, Human
cugacagcaggcaaagaacuucccuc

SEQ ID NO: 298195 - RNA, 19 nt, Human
cugcccgcgcgcucccucu

SEQ ID NO: 298196 - RNA, 22 nt, Human
gcagcagcgcuggcucacaccg

SEQ ID NO: 298197 - RNA, 23 nt, Human
gcgcgcucccucucacgcgcgca

SEQ ID NO: 298198 - RNA, 26 nt, Human
gcucacacuggcagcagcgcuggcuc

SEQ ID NO: 298199 - RNA, 19 nt, Human
uaacacuauaaauauugca

SEQ ID NO: 298200 - RNA, 27 nt, Human
uagaaaacgcaagacaagauuguaaca

SEQ ID NO: 298201 - RNA, 19 nt, Human
uagcuuccuaucaccgcac

SEQ ID NO: 298202 - RNA, 23 nt, Human
ucaaaggcaauggcagaauacag

SEQ ID NO: 298203 - RNA, 24 nt, Human
ucacgcgcgcaccgccgcggggcg

SEQ ID NO: 298204 - RNA, 19 nt, Human
ucccucagcuaucucggag

SEQ ID NO: 298205 - RNA, 24 nt, Human
uccgcacccaccgcgcucacaccg

SEQ ID NO: 298206 - RNA, 18 nt, Human
ucggaggccucauaccuc

SEQ ID NO: 298207 - RNA, 19 nt, Human
ugacagcaggcaaagaacu

SEQ ID NO: 298208 - RNA, 23 nt, Human
uggcagcagcgcuggcucacacc

SEQ ID NO: 298209 - RNA, 18 nt, Human
uggcucacaccggcgcuc

SEQ ID NO: 298210 - RNA, 20 nt, Human
ugugaagagucaaccagucc

SEQ ID NO: 298211 - RNA, 29 nt, Human
uucacacaacucaauucuaaaauauccuu

SEQ ID NO: 298212 - RNA, 21 nt, Human
uuuuuuguaauccuuuaaaaa

SEQ ID NO: 298213 - RNA, 18 nt, Human
uuuuuuuuuuuuuuuuug

SEQ ID NO: 298214 - RNA, 19 nt, Human
uuuuuuuuuuuuuuuuugu

SEQ ID NO: 298215 - RNA, 22 nt, Human
aaaaacaaaaacaaaaccugga

SEQ ID NO: 298216 - RNA, 20 nt, Human
aaacaaaaacaaaaccugga

SEQ ID NO: 298217 - RNA, 27 nt, Human
aaacaaaaacaaaaccuggaagccuca

SEQ ID NO: 298218 - RNA, 25 nt, Human
aaagacagcaggcugugcccaaagc

SEQ ID NO: 298219 - RNA, 20 nt, Human
aacaaaaacaaaaccuggaa

SEQ ID NO: 298220 - RNA, 21 nt, Human
aagguccuccgggagaaccag

SEQ ID NO: 298221 - RNA, 21 nt, Human
aauggaaaagacagcaggcug

SEQ ID NO: 298222 - RNA, 23 nt, Human
acaaaaccuggaagccucaagac

SEQ ID NO: 298223 - RNA, 25 nt, Human
acaccacugcagccucagcaugggc

SEQ ID NO: 298224 - RNA, 28 nt, Human
acaccaggacacagacccaccgcccaac

SEQ ID NO: 298225 - RNA, 23 nt, Human
acagcacauguggccaaaggcac

SEQ ID NO: 298226 - RNA, 22 nt, Human
acaggacugaggcagccccacc

SEQ ID NO: 298227 - RNA, 22 nt, Human
acaggcagcaucgucaugaagc

SEQ ID NO: 298228 - RNA, 21 nt, Human
acauagaccuguggugccucc

SEQ ID NO: 298229 - RNA, 24 nt, Human
acccaccgcccaaccuaaaagaac

SEQ ID NO: 298230 - RNA, 21 nt, Human
acccacgacaccacugcagcc

SEQ ID NO: 298231 - RNA, 19 nt, Human
acccacgauggacagaagg

SEQ ID NO: 298232 - RNA, 21 nt, Human
accgcccaaccuaaaagaaca

SEQ ID NO: 298233 - RNA, 22 nt, Human
acugaagaggggcggggacccg

SEQ ID NO: 298234 - RNA, 26 nt, Human
agaaacucaacaccaggacacagacc

SEQ ID NO: 298235 - RNA, 25 nt, Human
agacaaacagcacagcacauguggc

SEQ ID NO: 298236 - RNA, 22 nt, Human
agacagcaggcugugcccaaag

SEQ ID NO: 298237 - RNA, 23 nt, Human
agacagcaggcugugcccaaagc

SEQ ID NO: 298238 - RNA, 18 nt, Human
agcagccccaaccccagc

SEQ ID NO: 298239 - RNA, 18 nt, Human
agccucucucagccuccc

SEQ ID NO: 298240 - RNA, 23 nt, Human
agcugcagacgcacccgcuggga

SEQ ID NO: 298241 - RNA, 23 nt, Human
agcugcuggugacucuccagggc

SEQ ID NO: 298242 - RNA, 18 nt, Human
aggcauuggggugugguc

SEQ ID NO: 298243 - RNA, 20 nt, Human
agggaagugagggagcgcag

SEQ ID NO: 298244 - RNA, 21 nt, Human
agggaagugagggagcgcagg

SEQ ID NO: 298245 - RNA, 20 nt, Human
agggggcucagccagcuggg

SEQ ID NO: 298246 - RNA, 21 nt, Human
agguuuuccucacagcagccc

SEQ ID NO: 298247 - RNA, 23 nt, Human
auggaggaggaggaugucauugu

SEQ ID NO: 298248 - RNA, 24 nt, Human
caaaaacaaaaccuggaagccuca

SEQ ID NO: 298249 - RNA, 19 nt, Human
caaaggcaccuccagaggc

SEQ ID NO: 298250 - RNA, 19 nt, Human
caacaccaggacacagacc

SEQ ID NO: 298251 - RNA, 20 nt, Human
caacaccaggacacagaccc

SEQ ID NO: 298252 - RNA, 25 nt, Human
caacagcauucuaggagaaagguga

SEQ ID NO: 298253 - RNA, 24 nt, Human
caacagggcagcccugacccccuc

SEQ ID NO: 298254 - RNA, 27 nt, Human
caaccccagcccagcugaagacggcuc

SEQ ID NO: 298255 - RNA, 24 nt, Human
cacagcagccccaaccccagccca

SEQ ID NO: 298256 - RNA, 23 nt, Human
caccaggacacagacccaccgcc

SEQ ID NO: 298257 - RNA, 27 nt, Human
cacccccagaaauuugcagaaacucaa

SEQ ID NO: 298258 - RNA, 20 nt, Human
cagaaauuugcagaaacuca

SEQ ID NO: 298259 - RNA, 18 nt, Human
cagagcucugcacccucc

SEQ ID NO: 298260 - RNA, 21 nt, Human
cagcacagcacauguggccaa

SEQ ID NO: 298261 - RNA, 18 nt, Human
cagcauucuaggagaaag

SEQ ID NO: 298262 - RNA, 26 nt, Human
cagccccaaccccagcccagcugaag

SEQ ID NO: 298263 - RNA, 19 nt, Human
cagccgcccaccaccugcc

SEQ ID NO: 298264 - RNA, 22 nt, Human
cagggccccaaggaaaggggag

SEQ ID NO: 298265 - RNA, 21 nt, Human
cauagaccuguggugccuccu

SEQ ID NO: 298266 - RNA, 19 nt, Human
ccaaaggcaccuccagagg

SEQ ID NO: 298267 - RNA, 20 nt, Human
ccaacacuagccccucccug

SEQ ID NO: 298268 - RNA, 21 nt, Human
ccacugcagccucagcauggg

SEQ ID NO: 298269 - RNA, 24 nt, Human
ccaggacacagacccaccgcccaa

SEQ ID NO: 298270 - RNA, 19 nt, Human
ccagggggcucagccagcu

SEQ ID NO: 298271 - RNA, 27 nt, Human
cccaaccccagcccagcugaagacggc

SEQ ID NO: 298272 - RNA, 18 nt, Human
cccaaccuaaaagaacag

SEQ ID NO: 298273 - RNA, 21 nt, Human
cccaagagcugcuggugacuc

SEQ ID NO: 298274 - RNA, 24 nt, Human
cccaagagcugcuggugacucucc

SEQ ID NO: 298275 - RNA, 26 nt, Human
cccaccgcccaaccuaaaagguuuuc

SEQ ID NO: 298276 - RNA, 20 nt, Human
cccacgacaccacugcagcc

SEQ ID NO: 298277 - RNA, 21 nt, Human
cccacgacaccacugcagccu

SEQ ID NO: 298278 - RNA, 22 nt, Human
cccacgacaccacugcagccuc

SEQ ID NO: 298279 - RNA, 24 nt, Human
cccacgacaccacugcagccucag

SEQ ID NO: 298280 - RNA, 25 nt, Human
cccacgacaccacugcagccucagc

SEQ ID NO: 298281 - RNA, 19 nt, Human
ccccaaccccagcccagcu

SEQ ID NO: 298282 - RNA, 19 nt, Human
ccccagagucugaaggccu

SEQ ID NO: 298283 - RNA, 25 nt, Human
ccccauggacugggcagcuuuggga

SEQ ID NO: 298284 - RNA, 19 nt, Human
ccccucuggcugaugggaa

SEQ ID NO: 298285 - RNA, 21 nt, Human
ccccucuuggccuccccgcug

SEQ ID NO: 298286 - RNA, 18 nt, Human
cccugccagccgcccacc

SEQ ID NO: 298287 - RNA, 19 nt, Human
ccucacagcagccccaacc

SEQ ID NO: 298288 - RNA, 24 nt, Human
ccucacagcagccccaaccccagc

SEQ ID NO: 298289 - RNA, 19 nt, Human
ccucccagcaaguccuucc

SEQ ID NO: 298290 - RNA, 19 nt, Human
ccuccgggagaaccagccu

SEQ ID NO: 298291 - RNA, 19 nt, Human
ccuggcccauggcucugca

SEQ ID NO: 298292 - RNA, 24 nt, Human
cgcccaaccuaaaagaacaggaac

SEQ ID NO: 298293 - RNA, 22 nt, Human
cgccguggccgaggaccuuuug

SEQ ID NO: 298294 - RNA, 20 nt, Human
cgucuaggaccuaccaacac

SEQ ID NO: 298295 - RNA, 25 nt, Human
cgucuaggaccuaccaacacuagcc

SEQ ID NO: 298296 - RNA, 22 nt, Human
cucacagcagccccaaccccag

SEQ ID NO: 298297 - RNA, 24 nt, Human
cucacagcagccccaaccccagcc

SEQ ID NO: 298298 - RNA, 24 nt, Human
cucccagcaaguccuucccaagag

SEQ ID NO: 298299 - RNA, 24 nt, Human
cucccugccagccgcccaccaccu

SEQ ID NO: 298300 - RNA, 23 nt, Human
cucccuucaucagcugccuuggc

SEQ ID NO: 298301 - RNA, 19 nt, Human
cugcagccucagcaugggc

SEQ ID NO: 298302 - RNA, 21 nt, Human
cugccagccgcccaccaccug

SEQ ID NO: 298303 - RNA, 19 nt, Human
cuguccacauggugggacc

SEQ ID NO: 298304 - RNA, 22 nt, Human
cugugcccaaagccucucucag

SEQ ID NO: 298305 - RNA, 19 nt, Human
cuucaucagcugccuuggc

SEQ ID NO: 298306 - RNA, 18 nt, Human
gaccuguggugccuccuu

SEQ ID NO: 298307 - RNA, 22 nt, Human
gaguuguuuggcaacagggcag

SEQ ID NO: 298308 - RNA, 23 nt, Human
gaguuguuuggcaacagggcagc

SEQ ID NO: 298309 - RNA, 24 nt, Human
gcaaaaacaaaaacaaaaccugga

SEQ ID NO: 298310 - RNA, 22 nt, Human
gcacggggugggcaggacugag

SEQ ID NO: 298311 - RNA, 24 nt, Human
gcagcuuugggaacugagggaagu

SEQ ID NO: 298312 - RNA, 23 nt, Human
gcccagagucacagaaaucaccc

SEQ ID NO: 298313 - RNA, 22 nt, Human
gccccaaccccagcccagcuga

SEQ ID NO: 298314 - RNA, 24 nt, Human
gcccccacagugcugggugaaagu

SEQ ID NO: 298315 - RNA, 22 nt, Human
gcugcagacgcacccgcuggga

SEQ ID NO: 298316 - RNA, 27 nt, Human
ggaaaagacagcaggcugugcccaaag

SEQ ID NO: 298317 - RNA, 18 nt, Human
ggacugaggaggggaggg

SEQ ID NO: 298318 - RNA, 18 nt, Human
ggagaaccagccugccca

SEQ ID NO: 298319 - RNA, 20 nt, Human
ggagcgcaggaggccagggg

SEQ ID NO: 298320 - RNA, 22 nt, Human
ggaggagcugcagacgcacccg

SEQ ID NO: 298321 - RNA, 25 nt, Human
ggaggaggaugucauuggucucagg

SEQ ID NO: 298322 - RNA, 20 nt, Human
ggagggcaggacugaagagg

SEQ ID NO: 298323 - RNA, 18 nt, Human
ggagugauggaggaggag

SEQ ID NO: 298324 - RNA, 24 nt, Human
ggaguuguuuggcaacagggcagg

SEQ ID NO: 298325 - RNA, 23 nt, Human
ggcaaaaacaaaaacaaaaccug

SEQ ID NO: 298326 - RNA, 19 nt, Human
ggcaacagggcagcccuga

SEQ ID NO: 298327 - RNA, 23 nt, Human
ggggagggcaggacugaagaggg

SEQ ID NO: 298328 - RNA, 22 nt, Human
ggggcucagccagcugguaggg

SEQ ID NO: 298329 - RNA, 24 nt, Human
ggggugggcaggacugaggagggg

SEQ ID NO: 298330 - RNA, 20 nt, Human
gugccuccuugggcuauguc

SEQ ID NO: 298331 - RNA, 26 nt, Human
uacuuuggcaaaaacaaaaacaaagc

SEQ ID NO: 298332 - RNA, 18 nt, Human
uaggaccuaccaacacua

SEQ ID NO: 298333 - RNA, 19 nt, Human
ucacagaaaucacccccag

SEQ ID NO: 298334 - RNA, 22 nt, Human
ucagggucuccacguuccugca

SEQ ID NO: 298335 - RNA, 19 nt, Human
ucagugcccaaggggacag

SEQ ID NO: 298336 - RNA, 18 nt, Human
uccacagggccccucuug

SEQ ID NO: 298337 - RNA, 25 nt, Human
ucccccagcacacauagaccugugg

SEQ ID NO: 298338 - RNA, 20 nt, Human
uccuccgggagaaccagccu

SEQ ID NO: 298339 - RNA, 23 nt, Human
ucucucagccucccagcaagucc

SEQ ID NO: 298340 - RNA, 23 nt, Human
ucugcacccuccccaaggcuguu

SEQ ID NO: 298341 - RNA, 19 nt, Human
ucuguccacauggugggac

SEQ ID NO: 298342 - RNA, 23 nt, Human
ugaaaagaaaaccaaaugcagug

SEQ ID NO: 298343 - RNA, 19 nt, Human
ugaaaguccacagggcccc

SEQ ID NO: 298344 - RNA, 25 nt, Human
ugaagcagggccccaaggaaagguc

SEQ ID NO: 298345 - RNA, 24 nt, Human
ugagcucccuucaucagcugccuu

SEQ ID NO: 298346 - RNA, 21 nt, Human
ugauggaggaggaggauguca

SEQ ID NO: 298347 - RNA, 18 nt, Human
ugcagggugggcacacuu

SEQ ID NO: 298348 - RNA, 18 nt, Human
ugcccaaggggacaggac

SEQ ID NO: 298349 - RNA, 18 nt, Human
uggacaggcucccugucg

SEQ ID NO: 298350 - RNA, 21 nt, Human
uggaggaggaggaugucauug

SEQ ID NO: 298351 - RNA, 18 nt, Human
uggagugauggaggagga

SEQ ID NO: 298352 - RNA, 18 nt, Human
uggcaaaaacaaaaacaa

SEQ ID NO: 298353 - RNA, 20 nt, Human
uggcaaaaacaaaaacaaaa

SEQ ID NO: 298354 - RNA, 22 nt, Human
uggcaaaaacaaaaacaaaacc

SEQ ID NO: 298355 - RNA, 21 nt, Human
ugggaaggcauuggggugugg

SEQ ID NO: 298356 - RNA, 24 nt, Human
ugggccccucuccucagugcccaa

SEQ ID NO: 298357 - RNA, 21 nt, Human
ugggcugcacggggugggcag

SEQ ID NO: 298358 - RNA, 19 nt, Human
ugguaggggcggccgagac

SEQ ID NO: 298359 - RNA, 19 nt, Human
ugucauuguaaauaccacc

SEQ ID NO: 298360 - RNA, 19 nt, Human
ugucugcugccccagaguc

SEQ ID NO: 298361 - RNA, 19 nt, Human
ugucuguccacaugguggg

SEQ ID NO: 298362 - RNA, 23 nt, Human
uguuacccacgauggacagaagg

SEQ ID NO: 298363 - RNA, 25 nt, Human
uuccucacagcagccccaaccccag

SEQ ID NO: 298364 - RNA, 22 nt, Human
uuuacagaugguagagggugac

SEQ ID NO: 298365 - RNA, 21 nt, Human
cagcacagcgaccccucggaa

SEQ ID NO: 298366 - RNA, 19 nt, Human
caggaggaaugaaaaugga

SEQ ID NO: 298367 - RNA, 20 nt, Human
ggaaugaaaauggagagaaa

SEQ ID NO: 298368 - RNA, 20 nt, Human
uaugcguguguggauugugu

SEQ ID NO: 298369 - RNA, 23 nt, Human
uaugcguguguggauugugugug

SEQ ID NO: 298370 - RNA, 24 nt, Human
ucagguggacuaggaggggguucu

SEQ ID NO: 298371 - RNA, 19 nt, Human
ucuguacaugcauuggagg

SEQ ID NO: 298372 - RNA, 21 nt, Human
ugcguguguggauugugugug

SEQ ID NO: 298373 - RNA, 19 nt, Human
uggcucuaacucaacagcu

SEQ ID NO: 298374 - RNA, 18 nt, Human
uguguguggaugacuucu

SEQ ID NO: 298375 - RNA, 19 nt, Human
uugcaggaggaaugaaaau

SEQ ID NO: 298376 - RNA, 22 nt, Human
uuguguguggaugacuucucuc

SEQ ID NO: 298377 - RNA, 24 nt, Human
aaaaagaaaaggugccacaaagga

SEQ ID NO: 298378 - RNA, 18 nt, Human
aaaaagaagcaagauagg

SEQ ID NO: 298379 - RNA, 22 nt, Human
aaaaagaagcaagauaggagaa

SEQ ID NO: 298380 - RNA, 19 nt, Human
aaaacauucugcauaccaa

SEQ ID NO: 298381 - RNA, 24 nt, Human
aaacaaaaucuaccugagggacaa

SEQ ID NO: 298382 - RNA, 18 nt, Human
aaacagaggaaagaccag

SEQ ID NO: 298383 - RNA, 22 nt, Human
aaacauucugcauaccaaacaa

SEQ ID NO: 298384 - RNA, 25 nt, Human
aaacucagugggagaaagccagcag

SEQ ID NO: 298385 - RNA, 21 nt, Human
aaagaucuagggaaugagucu

SEQ ID NO: 298386 - RNA, 23 nt, Human
aacaagcuacagaaacaguuucu

SEQ ID NO: 298387 - RNA, 22 nt, Human
aagaauucaugacaaaacaacc

SEQ ID NO: 298388 - RNA, 19 nt, Human
aagaggaaaaagaagcaag

SEQ ID NO: 298389 - RNA, 23 nt, Human
aagcaagauaggagaaaagccag

SEQ ID NO: 298390 - RNA, 24 nt, Human
aagcaagauaggagaaaagccaga

SEQ ID NO: 298391 - RNA, 20 nt, Human
acacacucgcuugaacaaga

SEQ ID NO: 298392 - RNA, 23 nt, Human
accacauggacaagacagggaac

SEQ ID NO: 298393 - RNA, 19 nt, Human
acucccccuucccacccuc

SEQ ID NO: 298394 - RNA, 20 nt, Human
acuggagacuuuguaagcau

SEQ ID NO: 298395 - RNA, 25 nt, Human
agaaagauuuauacaucuagcacua

SEQ ID NO: 298396 - RNA, 23 nt, Human
agaaaggagacagguauagaaaa

SEQ ID NO: 298397 - RNA, 18 nt, Human
agaacacgcuguucuaau

SEQ ID NO: 298398 - RNA, 22 nt, Human
agacaaaugucacuuuuaauau

SEQ ID NO: 298399 - RNA, 20 nt, Human
agacagguauagaaaacuuu

SEQ ID NO: 298400 - RNA, 19 nt, Human
agaggaaaaagaagcaaga

SEQ ID NO: 298401 - RNA, 21 nt, Human
agaggaaaaagaagcaagaua

SEQ ID NO: 298402 - RNA, 18 nt, Human
agccaaagcaaaugacag

SEQ ID NO: 298403 - RNA, 23 nt, Human
agugaacuccuucauuaggccua

SEQ ID NO: 298404 - RNA, 18 nt, Human
agugauaggauuggagaa

SEQ ID NO: 298405 - RNA, 21 nt, Human
agugauaggauuggagaagaa

SEQ ID NO: 298406 - RNA, 22 nt, Human
auacuccagguuggaaacauuc

SEQ ID NO: 298407 - RNA, 21 nt, Human
auaucacaacacauacaugua

SEQ ID NO: 298408 - RNA, 22 nt, Human
auaugcuccaauauuggaaauu

SEQ ID NO: 298409 - RNA, 19 nt, Human
auggagcagggugccaugg

SEQ ID NO: 298410 - RNA, 21 nt, Human
auuucaagaucuguuucuaga

SEQ ID NO: 298411 - RNA, 30 nt, Human
caaaaacaaaacuucucuugguuucucccc

SEQ ID NO: 298412 - RNA, 19 nt, Human
caaagcaaaugacagacuc

SEQ ID NO: 298413 - RNA, 19 nt, Human
caacugugacuccagaaag

SEQ ID NO: 298414 - RNA, 24 nt, Human
caacugugacuccagaaagaacaa

SEQ ID NO: 298415 - RNA, 18 nt, Human
caagagugggaagggaag

SEQ ID NO: 298416 - RNA, 23 nt, Human
caagcuacagaaacaguuucuga

SEQ ID NO: 298417 - RNA, 20 nt, Human
caauacaucaaauguauaau

SEQ ID NO: 298418 - RNA, 21 nt, Human
caccacagacacagugcaccg

SEQ ID NO: 298419 - RNA, 23 nt, Human
cacccucgggcucuagaccacuc

SEQ ID NO: 298420 - RNA, 22 nt, Human
cagaaggagaaacagaggaaag

SEQ ID NO: 298421 - RNA, 21 nt, Human
caggcacuaagaaagacugac

SEQ ID NO: 298422 - RNA, 22 nt, Human
cagugauaggauuggagaagaa

SEQ ID NO: 298423 - RNA, 20 nt, Human
cauuguaggugacuggagac

SEQ ID NO: 298424 - RNA, 18 nt, Human
ccacuucagacacaggca

SEQ ID NO: 298425 - RNA, 25 nt, Human
ccagacagacucccccuucccaccc

SEQ ID NO: 298426 - RNA, 21 nt, Human
ccuaaugcauuuacacuuugu

SEQ ID NO: 298427 - RNA, 26 nt, Human
ccuuaugaaguucaaacuucauggaa

SEQ ID NO: 298428 - RNA, 22 nt, Human
cgagaggagaggcugggcggcg

SEQ ID NO: 298429 - RNA, 24 nt, Human
cgggcauugcucugcaaacacccu

SEQ ID NO: 298430 - RNA, 19 nt, Human
cucccccuucccacccucg

SEQ ID NO: 298431 - RNA, 22 nt, Human
cuugagagugaaccuuuggcua

SEQ ID NO: 298432 - RNA, 23 nt, Human
gaaaaagaaaaggugccacaaag

SEQ ID NO: 298433 - RNA, 20 nt, Human
gaaaggagacagguauagaa

SEQ ID NO: 298434 - RNA, 24 nt, Human
gaagcaagauaggagaaaagccag

SEQ ID NO: 298435 - RNA, 22 nt, Human
gacuccagaaagaacaaaacaa

SEQ ID NO: 298436 - RNA, 22 nt, Human
gagcuuuuugucaacugugacu

SEQ ID NO: 298437 - RNA, 22 nt, Human
gauuuuauuuaaauauuaaagc

SEQ ID NO: 298438 - RNA, 21 nt, Human
gccuuuucuuuugagaauuga

SEQ ID NO: 298439 - RNA, 24 nt, Human
gcucuagguaacauggagcagggu

SEQ ID NO: 298440 - RNA, 19 nt, Human
ggacaagacagggaacaag

SEQ ID NO: 298441 - RNA, 21 nt, Human
ggagaaacagaggaaagacca

SEQ ID NO: 298442 - RNA, 21 nt, Human
ggcggcgagcgcuccucgcgg

SEQ ID NO: 298443 - RNA, 20 nt, Human
gggaauggaaaaguaaugag

SEQ ID NO: 298444 - RNA, 18 nt, Human
ggguaaggaagaagcaug

SEQ ID NO: 298445 - RNA, 23 nt, Human
gguauagaaaacuuucagaagga

SEQ ID NO: 298446 - RNA, 21 nt, Human
uaagaaagacugacaaaacug

SEQ ID NO: 298447 - RNA, 21 nt, Human
uaagaauaccaagaccacaca

SEQ ID NO: 298448 - RNA, 31 nt, Human
uaagcaaacucauaauuauuauuguacagaa

SEQ ID NO: 298449 - RNA, 22 nt, Human
uaauugauaucccagguuuugc

SEQ ID NO: 298450 - RNA, 21 nt, Human
uaccaaacaaaaucuaccuga

SEQ ID NO: 298451 - RNA, 20 nt, Human
uaccaagaccacacauguua

SEQ ID NO: 298452 - RNA, 24 nt, Human
uaggagaaaagccagacagacucc

SEQ ID NO: 298453 - RNA, 24 nt, Human
uauaugaaacuuccaaggacagag

SEQ ID NO: 298454 - RNA, 22 nt, Human
uaucccagguuuugccuuuucu

SEQ ID NO: 298455 - RNA, 22 nt, Human
uauuauacuccagguuggaaac

SEQ ID NO: 298456 - RNA, 18 nt, Human
ucagcuccagcuaacugu

SEQ ID NO: 298457 - RNA, 26 nt, Human
uccaauauuggaaauucuaucuaaca

SEQ ID NO: 298458 - RNA, 23 nt, Human
uccacggacgccucuggcaccac

SEQ ID NO: 298459 - RNA, 19 nt, Human
uccagaaagaacaaaacac

SEQ ID NO: 298460 - RNA, 24 nt, Human
uccagaaagaacaaaacacuucac

SEQ ID NO: 298461 - RNA, 20 nt, Human
ucccagguuuugccuuuucu

SEQ ID NO: 298462 - RNA, 24 nt, Human
ucccagguuuugccuuuucuuuug

SEQ ID NO: 298463 - RNA, 22 nt, Human
ucgaaaauugcucaaaccagag

SEQ ID NO: 298464 - RNA, 24 nt, Human
ucuaagaauucucugguccuuuuu

SEQ ID NO: 298465 - RNA, 21 nt, Human
ucuaaucaggcagcugcuacu

SEQ ID NO: 298466 - RNA, 19 nt, Human
ucuaguguucuuuucauga

SEQ ID NO: 298467 - RNA, 21 nt, Human
ucugaauauuauacuccaggu

SEQ ID NO: 298468 - RNA, 23 nt, Human
ucugcaaacacccucuacacaaa

SEQ ID NO: 298469 - RNA, 24 nt, Human
ucugcauaccaaacaaaaucuacc

SEQ ID NO: 298470 - RNA, 20 nt, Human
ucuugagagugaaccuuugg

SEQ ID NO: 298471 - RNA, 23 nt, Human
ugaaacuuccaaggacagaguga

SEQ ID NO: 298472 - RNA, 22 nt, Human
ugaaauaccuaugaucaauucu

SEQ ID NO: 298473 - RNA, 18 nt, Human
ugaacacaguuggaaaaa

SEQ ID NO: 298474 - RNA, 24 nt, Human
ugacaaaacaaccacuucagacac

SEQ ID NO: 298475 - RNA, 24 nt, Human
ugaccaacaugaccagauuuugac

SEQ ID NO: 298476 - RNA, 22 nt, Human
ugagaauuuggacacuaucagu

SEQ ID NO: 298477 - RNA, 18 nt, Human
ugagagaaggaagccaga

SEQ ID NO: 298478 - RNA, 20 nt, Human
ugagagucaucuaaucaggc

SEQ ID NO: 298479 - RNA, 19 nt, Human
ugauaugcuccaauauugg

SEQ ID NO: 298480 - RNA, 26 nt, Human
ugauaugcuccaauauuggaaauucu

SEQ ID NO: 298481 - RNA, 21 nt, Human
ugcagacaggaaagauguguu

SEQ ID NO: 298482 - RNA, 20 nt, Human
ugcaguguucuaauguagug

SEQ ID NO: 298483 - RNA, 22 nt, Human
ugccacaaaggauauuauaagc

SEQ ID NO: 298484 - RNA, 19 nt, Human
ugccuaacagaagaugcgg

SEQ ID NO: 298485 - RNA, 19 nt, Human
ugcgaagagcuaggaggcg

SEQ ID NO: 298486 - RNA, 23 nt, Human
ugcuugagcucauccccuucaca

SEQ ID NO: 298487 - RNA, 20 nt, Human
uggaauagaaagaucuaggg

SEQ ID NO: 298488 - RNA, 22 nt, Human
uggaauagaaagaucuagggaa

SEQ ID NO: 298489 - RNA, 24 nt, Human
uggcaccacagacacagugcacca

SEQ ID NO: 298490 - RNA, 23 nt, Human
uggcugagaaaggagacagguau

SEQ ID NO: 298491 - RNA, 18 nt, Human
ugggagaaagccagcauu

SEQ ID NO: 298492 - RNA, 19 nt, Human
uguggcugagaaaggagac

SEQ ID NO: 298493 - RNA, 28 nt, Human
uguuaccaaccauacuucaagccaaagc

SEQ ID NO: 298494 - RNA, 27 nt, Human
uuaagaauaccaagaccacacauguua

SEQ ID NO: 298495 - RNA, 21 nt, Human
uuaagaauaccaagaccacag

SEQ ID NO: 298496 - RNA, 22 nt, Human
uucaagaucuguuucuagaucu

SEQ ID NO: 298497 - RNA, 20 nt, Human
uucacaaaaauccacacagg

SEQ ID NO: 298498 - RNA, 25 nt, Human
uucagacacaggcaaaaucgcaggg

SEQ ID NO: 298499 - RNA, 21 nt, Human
uugaagaaccacauggacaag

SEQ ID NO: 298500 - RNA, 21 nt, Human
uuucuuggcaucaaaauuuga

SEQ ID NO: 298501 - RNA, 22 nt, Human
uuugauaugcuccaauauugga

SEQ ID NO: 298502 - RNA, 19 nt, Human
ggggguagggauccucggg

SEQ ID NO: 298503 - RNA, 23 nt, Human
guggggccaggggguagggaucc

SEQ ID NO: 298504 - RNA, 19 nt, Human
ucuggacgugcuggcgggg

SEQ ID NO: 298505 - RNA, 21 nt, Human
uggacgugcuggcggggagca

SEQ ID NO: 298506 - RNA, 24 nt, Human
ugggucccagggugcacgggaucc

SEQ ID NO: 298507 - RNA, 23 nt, Human
uuuuuuuuuuuuuuuugcuucag

SEQ ID NO: 298508 - RNA, 21 nt, Human
uuuuuuuuuuuuuuuuugcuu

SEQ ID NO: 298509 - RNA, 20 nt, Human
uuuuuuuuuuuuuuuuuugg

SEQ ID NO: 298510 - RNA, 22 nt, Human
aaaaaauacuccugucgccucu

SEQ ID NO: 298511 - RNA, 22 nt, Human
aaaauacuccugucgccucuca

SEQ ID NO: 298512 - RNA, 22 nt, Human
aaacugguuuaaaaagaccuuu

SEQ ID NO: 298513 - RNA, 21 nt, Human
aaauucaaaacaucgcucccc

SEQ ID NO: 298514 - RNA, 22 nt, Human
aacacauuaaugacaucaaacu

SEQ ID NO: 298515 - RNA, 22 nt, Human
aacgugccccuuucaccuccca

SEQ ID NO: 298516 - RNA, 21 nt, Human
aaguagcugauaaguugcuuu

SEQ ID NO: 298517 - RNA, 30 nt, Human
aauacacauacacacauuauagguauaugg

SEQ ID NO: 298518 - RNA, 18 nt, Human
aaucugcauuuucagcuc

SEQ ID NO: 298519 - RNA, 18 nt, Human
aaugacaucaaacugugg

SEQ ID NO: 298520 - RNA, 18 nt, Human
acacauauauacacacau

SEQ ID NO: 298521 - RNA, 24 nt, Human
acacccuguccucagcuuugauuu

SEQ ID NO: 298522 - RNA, 24 nt, Human
acagagagcugaaaaauuacagag

SEQ ID NO: 298523 - RNA, 24 nt, Human
acagccccuuguuugagaccaugg

SEQ ID NO: 298524 - RNA, 23 nt, Human
agaaagagacugaacagggucuu

SEQ ID NO: 298525 - RNA, 22 nt, Human
agaaagagcgaguguaggucug

SEQ ID NO: 298526 - RNA, 18 nt, Human
agaggcggagcuggggag

SEQ ID NO: 298527 - RNA, 22 nt, Human
agccccuuguuugagaccaugg

SEQ ID NO: 298528 - RNA, 20 nt, Human
agcuaugugaggagccccag

SEQ ID NO: 298529 - RNA, 21 nt, Human
agcuggggagggagggcggug

SEQ ID NO: 298530 - RNA, 19 nt, Human
aggauaucacccauuugaa

SEQ ID NO: 298531 - RNA, 24 nt, Human
aggugccugccugaaacguggagc

SEQ ID NO: 298532 - RNA, 22 nt, Human
aguguauguauauauacacaua

SEQ ID NO: 298533 - RNA, 20 nt, Human
auagagaccaaauauuuaua

SEQ ID NO: 298534 - RNA, 20 nt, Human
auguauauauacacauauau

SEQ ID NO: 298535 - RNA, 23 nt, Human
caacaaguaauaaauuucuuuua

SEQ ID NO: 298536 - RNA, 24 nt, Human
caacuggagaacuaugugaagaua

SEQ ID NO: 298537 - RNA, 27 nt, Human
cacauguauauagucuacauauguaua

SEQ ID NO: 298538 - RNA, 19 nt, Human
caccucccaugacucuucc

SEQ ID NO: 298539 - RNA, 21 nt, Human
cagauuucucucuuaaagugg

SEQ ID NO: 298540 - RNA, 22 nt, Human
cauauauacacacauguauaua

SEQ ID NO: 298541 - RNA, 20 nt, Human
caucaaacugugggggagua

SEQ ID NO: 298542 - RNA, 18 nt, Human
cauuucuugggaauggau

SEQ ID NO: 298543 - RNA, 21 nt, Human
ccgggacagaggccuuuuucc

SEQ ID NO: 298544 - RNA, 24 nt, Human
cgaggacagaggcggagcugggga

SEQ ID NO: 298545 - RNA, 20 nt, Human
cggagcaggggacucggagg

SEQ ID NO: 298546 - RNA, 26 nt, Human
cggauuuuaacauaacucagagcaga

SEQ ID NO: 298547 - RNA, 19 nt, Human
cggcccggcgcgcgggcag

SEQ ID NO: 298548 - RNA, 19 nt, Human
cucacacccuguccucagc

SEQ ID NO: 298549 - RNA, 19 nt, Human
cucagaaacaaaaaaaaaa

SEQ ID NO: 298550 - RNA, 20 nt, Human
cucagaaacaaaaaaaaaaa

SEQ ID NO: 298551 - RNA, 19 nt, Human
cugaaaaauuacagaggug

SEQ ID NO: 298552 - RNA, 19 nt, Human
cuggaggggaagccgugca

SEQ ID NO: 298553 - RNA, 30 nt, Human
cugugugcacuuauacacacaugcacacag

SEQ ID NO: 298554 - RNA, 25 nt, Human
cuuauacacacaugcacacauaaug

SEQ ID NO: 298555 - RNA, 21 nt, Human
cuucucucaccuccuucaggc

SEQ ID NO: 298556 - RNA, 27 nt, Human
gacugugugcuuuccucacagaggucu

SEQ ID NO: 298557 - RNA, 26 nt, Human
gagcagcagcuggugagaagggcgcc

SEQ ID NO: 298558 - RNA, 21 nt, Human
gagcagcagcuggugagagca

SEQ ID NO: 298559 - RNA, 18 nt, Human
gaucagauugagacaccu

SEQ ID NO: 298560 - RNA, 24 nt, Human
gcaaaaaaugaaauagaggggacc

SEQ ID NO: 298561 - RNA, 19 nt, Human
gccucucacucagaucaga

SEQ ID NO: 298562 - RNA, 20 nt, Human
gcucuguguugcuggcuuga

SEQ ID NO: 298563 - RNA, 25 nt, Human
gcugaagacaaagcauuucuuggga

SEQ ID NO: 298564 - RNA, 23 nt, Human
ggacagaggcggagcuggggagg

SEQ ID NO: 298565 - RNA, 18 nt, Human
ggacucggagggagggug

SEQ ID NO: 298566 - RNA, 19 nt, Human
ggacucggagggagggugc

SEQ ID NO: 298567 - RNA, 19 nt, Human
ggagccccagaaaauuggg

SEQ ID NO: 298568 - RNA, 24 nt, Human
ggagggcggugggaaaggcggaug

SEQ ID NO: 298569 - RNA, 21 nt, Human
ggcaggggugcgaaugugggg

SEQ ID NO: 298570 - RNA, 19 nt, Human
ggggagggagggcgguggg

SEQ ID NO: 298571 - RNA, 19 nt, Human
gguauauguguauauacau

SEQ ID NO: 298572 - RNA, 19 nt, Human
gguugcauguuaaaugguc

SEQ ID NO: 298573 - RNA, 23 nt, Human
guaggucacuuugguaaugucua

SEQ ID NO: 298574 - RNA, 18 nt, Human
guauagagaaagagacug

SEQ ID NO: 298575 - RNA, 19 nt, Human
guguauguauauauacaca

SEQ ID NO: 298576 - RNA, 19 nt, Human
guguauguauauauacaca

SEQ ID NO: 298577 - RNA, 24 nt, Human
guuugagaccauggacaauuguuc

SEQ ID NO: 298578 - RNA, 23 nt, Human
uaaauacacauacacacauuaua

SEQ ID NO: 298579 - RNA, 19 nt, Human
uaaaugacuauaaauaacu

SEQ ID NO: 298580 - RNA, 18 nt, Human
uaaauuacaccacaccug

SEQ ID NO: 298581 - RNA, 18 nt, Human
uaagcucucugcucccac

SEQ ID NO: 298582 - RNA, 24 nt, Human
uaaucuacaucccugguaaaucuc

SEQ ID NO: 298583 - RNA, 25 nt, Human
uacacacaugcacacauaauguccu

SEQ ID NO: 298584 - RNA, 19 nt, Human
uacacacauguauauaguc

SEQ ID NO: 298585 - RNA, 25 nt, Human
uacacacauguauauagucuacaua

SEQ ID NO: 298586 - RNA, 21 nt, Human
uacacauauauacacacaugu

SEQ ID NO: 298587 - RNA, 22 nt, Human
uacguucuuuucucagaaacaa

SEQ ID NO: 298588 - RNA, 24 nt, Human
uacguucuuuucucagaaacaaaa

SEQ ID NO: 298589 - RNA, 21 nt, Human
uauacaaguguauguauauau

SEQ ID NO: 298590 - RNA, 24 nt, Human
uauacaaguguauguauauauaca

SEQ ID NO: 298591 - RNA, 19 nt, Human
uauacacacauguauauag

SEQ ID NO: 298592 - RNA, 25 nt, Human
uauacacauauauacacacauguag

SEQ ID NO: 298593 - RNA, 20 nt, Human
uauagguauauguguauaua

SEQ ID NO: 298594 - RNA, 25 nt, Human
uauauacacacauguauauagucua

SEQ ID NO: 298595 - RNA, 32 nt, Human
uauauacacauauauacacacauguauauagu

SEQ ID NO: 298596 - RNA, 27 nt, Human
uauauagucuacauauguauauauuac

SEQ ID NO: 298597 - RNA, 22 nt, Human
uauauauacacauauauacaca

SEQ ID NO: 298598 - RNA, 25 nt, Human
uauauauacacauauauacacacau

SEQ ID NO: 298599 - RNA, 24 nt, Human
uauauguguauauacauuuauaca

SEQ ID NO: 298600 - RNA, 22 nt, Human
uauguauauauacacauauaua

SEQ ID NO: 298601 - RNA, 24 nt, Human
uauguauauauacacauauauaca

SEQ ID NO: 298602 - RNA, 22 nt, Human
uauguauauauauuucugugug

SEQ ID NO: 298603 - RNA, 18 nt, Human
uauuuggggcauagagua

SEQ ID NO: 298604 - RNA, 19 nt, Human
ucuacauauguauauauau

SEQ ID NO: 298605 - RNA, 23 nt, Human
ucucacuaaauucaaaacaucgc

SEQ ID NO: 298606 - RNA, 23 nt, Human
ucucuggguaggucacuuuggua

SEQ ID NO: 298607 - RNA, 21 nt, Human
ucuggagcauaauguuuuauu

SEQ ID NO: 298608 - RNA, 18 nt, Human
ugacugugugcuuuccuc

SEQ ID NO: 298609 - RNA, 18 nt, Human
ugagacaccucaaaguga

SEQ ID NO: 298610 - RNA, 18 nt, Human
ugagaccauggacaauug

SEQ ID NO: 298611 - RNA, 24 nt, Human
ugcuuauaaaauuuugucacaggg

SEQ ID NO: 298612 - RNA, 20 nt, Human
uggccaccuucagggaauug

SEQ ID NO: 298613 - RNA, 18 nt, Human
uggcggagcaggggacuc

SEQ ID NO: 298614 - RNA, 20 nt, Human
uggcuggaggggaagccgug

SEQ ID NO: 298615 - RNA, 20 nt, Human
ugggaauggaugugcauugg

SEQ ID NO: 298616 - RNA, 19 nt, Human
uggggagggagggcggugg

SEQ ID NO: 298617 - RNA, 19 nt, Human
uggggagggagggcggugg

SEQ ID NO: 298618 - RNA, 23 nt, Human
ugguaaaucucacuaaauucaaa

SEQ ID NO: 298619 - RNA, 20 nt, Human
uguaaaaaaaaaaaaauacu

SEQ ID NO: 298620 - RNA, 18 nt, Human
uguauauagucuacauau

SEQ ID NO: 298621 - RNA, 24 nt, Human
uguauguauauauacacauauaua

SEQ ID NO: 298622 - RNA, 21 nt, Human
ugugaaaugaauuuucgauga

SEQ ID NO: 298623 - RNA, 20 nt, Human
uguguguucuccagcaucug

SEQ ID NO: 298624 - RNA, 26 nt, Human
uucaauaaauacacauacacacauua

SEQ ID NO: 298625 - RNA, 21 nt, Human
uucagauuucucucuuaaagu

SEQ ID NO: 298626 - RNA, 24 nt, Human
uugagaccauggacaauuguucuu

SEQ ID NO: 298627 - RNA, 24 nt, Human
uugaugaacauuuucaccugaauu

SEQ ID NO: 298628 - RNA, 25 nt, Human
uugaugcuaaaucugcauuuucagc

SEQ ID NO: 298629 - RNA, 21 nt, Human
uuggagucacucuauguggcu

SEQ ID NO: 298630 - RNA, 23 nt, Human
uuuaaaauacguucuuuucucag

SEQ ID NO: 298631 - RNA, 19 nt, Human
uuuucagcuccuccucagc

SEQ ID NO: 298632 - RNA, 23 nt, Human
uuuuuuuuuuuuuuuuuuucagg

SEQ ID NO: 298633 - RNA, 20 nt, Human
acuaacuucuccggccugcg

SEQ ID NO: 298634 - RNA, 22 nt, Human
agaugaccagcgggagcgguac

SEQ ID NO: 298635 - RNA, 24 nt, Human
aggaacaaagaaaucuaagauggc

SEQ ID NO: 298636 - RNA, 21 nt, Human
aggaggaggcugaguggggcg

SEQ ID NO: 298637 - RNA, 21 nt, Human
caaagaaaucuaagauggcug

SEQ ID NO: 298638 - RNA, 19 nt, Human
cagccccgggccgccgcag

SEQ ID NO: 298639 - RNA, 21 nt, Human
cagcgagccuuacgccggcuc

SEQ ID NO: 298640 - RNA, 25 nt, Human
caggcagcgaccgggcgcccccucu

SEQ ID NO: 298641 - RNA, 19 nt, Human
ccagcgggagcgguacagg

SEQ ID NO: 298642 - RNA, 18 nt, Human
ccccgagcgcggcggaga

SEQ ID NO: 298643 - RNA, 19 nt, Human
ccccgggccgccgcagcuc

SEQ ID NO: 298644 - RNA, 18 nt, Human
ccccgggcgaucggcagg

SEQ ID NO: 298645 - RNA, 19 nt, Human
cccggcgccucgcugcucc

SEQ ID NO: 298646 - RNA, 22 nt, Human
ccgccgcagcucgcagccccgg

SEQ ID NO: 298647 - RNA, 20 nt, Human
ccggcagggagcagagcagc

SEQ ID NO: 298648 - RNA, 28 nt, Human
ccggcccguggggcgcucggccaccugg

SEQ ID NO: 298649 - RNA, 22 nt, Human
ccggggcccccgagcgcggcgg

SEQ ID NO: 298650 - RNA, 21 nt, Human
ccuagaccaucccuggggcug

SEQ ID NO: 298651 - RNA, 23 nt, Human
ccugcgccgcccggcgagcagcc

SEQ ID NO: 298652 - RNA, 19 nt, Human
ccugugcucccagcucucc

SEQ ID NO: 298653 - RNA, 21 nt, Human
ccugugcucccagcucuccgg

SEQ ID NO: 298654 - RNA, 18 nt, Human
cggcaggaggcggcuagc

SEQ ID NO: 298655 - RNA, 18 nt, Human
cggcuccuagaccauccc

SEQ ID NO: 298656 - RNA, 18 nt, Human
cgggcgcccccucugcug

SEQ ID NO: 298657 - RNA, 21 nt, Human
cgggcguccuccgcaguuggg

SEQ ID NO: 298658 - RNA, 21 nt, Human
cuagccccggcagggagcaga

SEQ ID NO: 298659 - RNA, 19 nt, Human
gagcgcggcggagaugacc

SEQ ID NO: 298660 - RNA, 18 nt, Human
gcagccccgggcgaucgg

SEQ ID NO: 298661 - RNA, 19 nt, Human
gcagccccgggcgaucggc

SEQ ID NO: 298662 - RNA, 24 nt, Human
gccccggcagggagcagagcagcg

SEQ ID NO: 298663 - RNA, 23 nt, Human
gccccgggccgccgcagcucgca

SEQ ID NO: 298664 - RNA, 24 nt, Human
gcgccgcccggcgagcagccccgg

SEQ ID NO: 298665 - RNA, 21 nt, Human
gcucgcuugcucgcucccagc

SEQ ID NO: 298666 - RNA, 22 nt, Human
gcugccgggaccugugcuccca

SEQ ID NO: 298667 - RNA, 18 nt, Human
ggagaugaccagcgggag

SEQ ID NO: 298668 - RNA, 24 nt, Human
ggaggcugaguggggcgggcgucc

SEQ ID NO: 298669 - RNA, 19 nt, Human
ggccgccgcagcucgcagc

SEQ ID NO: 298670 - RNA, 20 nt, Human
gggaccugugcucccagcuc

SEQ ID NO: 298671 - RNA, 23 nt, Human
guggggcgggcguccuccgcagu

SEQ ID NO: 298672 - RNA, 19 nt, Human
ucccuggggcugccgggac

SEQ ID NO: 298673 - RNA, 23 nt, Human
uccuagaccaucccuggggcugc

SEQ ID NO: 298674 - RNA, 19 nt, Human
ucggcaggaggcggcuagc

SEQ ID NO: 298675 - RNA, 21 nt, Human
ucggcaggaggcggcuagccc

SEQ ID NO: 298676 - RNA, 19 nt, Human
ucuccggccugcgccgccc

SEQ ID NO: 298677 - RNA, 22 nt, Human
ugcuggcccgggcuccaaacgc

SEQ ID NO: 298678 - RNA, 23 nt, Human
aaaaaaaaaaaacaaugaaugaa

SEQ ID NO: 298679 - RNA, 20 nt, Human
aaaaaaaacaaaaaucucau

SEQ ID NO: 298680 - RNA, 21 nt, Human
aaacaaaaaaaggcccacaca

SEQ ID NO: 298681 - RNA, 20 nt, Human
aaacaaacaaaaaaaggccc

SEQ ID NO: 298682 - RNA, 20 nt, Human
aaacaaacaaaaaaaggccc

SEQ ID NO: 298683 - RNA, 23 nt, Human
aacccaaccccccaaacccacua

SEQ ID NO: 298684 - RNA, 22 nt, Human
aacugcccccuccccucgugcc

SEQ ID NO: 298685 - RNA, 19 nt, Human
aagaguggggccccccacc

SEQ ID NO: 298686 - RNA, 23 nt, Human
aagaguuauuggccuuuaccacc

SEQ ID NO: 298687 - RNA, 19 nt, Human
aagcaggcagaggaugccu

SEQ ID NO: 298688 - RNA, 20 nt, Human
aagcaggcagaggaugccuc

SEQ ID NO: 298689 - RNA, 20 nt, Human
aagcaggcagaggaugccuc

SEQ ID NO: 298690 - RNA, 21 nt, Human
aagccggagacggcaccaggg

SEQ ID NO: 298691 - RNA, 23 nt, Human
aagccggagacggcaccagggag

SEQ ID NO: 298692 - RNA, 22 nt, Human
aaguuugcuagcgccuagguga

SEQ ID NO: 298693 - RNA, 24 nt, Human
acaaaaaaaggcccacacaauaug

SEQ ID NO: 298694 - RNA, 21 nt, Human
acaaacaaaaaaaggcccaca

SEQ ID NO: 298695 - RNA, 21 nt, Human
acaccccccucccccaacccu

SEQ ID NO: 298696 - RNA, 19 nt, Human
acagagacagacagaccaa

SEQ ID NO: 298697 - RNA, 23 nt, Human
acaggccaauggguggguugaca

SEQ ID NO: 298698 - RNA, 21 nt, Human
acccaaccccccaaacccacu

SEQ ID NO: 298699 - RNA, 22 nt, Human
accccucacaccccccuccccc

SEQ ID NO: 298700 - RNA, 19 nt, Human
accccugcccucccacccc

SEQ ID NO: 298701 - RNA, 24 nt, Human
accuggcgcgucaaucaccacucg

SEQ ID NO: 298702 - RNA, 19 nt, Human
acugcccccuccccucgug

SEQ ID NO: 298703 - RNA, 22 nt, Human
agacagacagaccaagugaagg

SEQ ID NO: 298704 - RNA, 25 nt, Human
agacaggccaauggguggguugaca

SEQ ID NO: 298705 - RNA, 18 nt, Human
agccgcugccugcugggg

SEQ ID NO: 298706 - RNA, 22 nt, Human
agcuacgggacugcaggagaga

SEQ ID NO: 298707 - RNA, 20 nt, Human
aggaaaaaagacaaaugaag

SEQ ID NO: 298708 - RNA, 22 nt, Human
aggaacccaaccccccaaaccc

SEQ ID NO: 298709 - RNA, 24 nt, Human
aggaacccaaccccccaaacccac

SEQ ID NO: 298710 - RNA, 24 nt, Human
aggaggaggcggcggcggcggcgg

SEQ ID NO: 298711 - RNA, 21 nt, Human
aggcagagaguaagcagggaa

SEQ ID NO: 298712 - RNA, 20 nt, Human
aggcaggaaagcaggcagag

SEQ ID NO: 298713 - RNA, 22 nt, Human
aggcaggaaagcaggcagagga

SEQ ID NO: 298714 - RNA, 27 nt, Human
aggcaggaaagcaggcagaggggaccc

SEQ ID NO: 298715 - RNA, 20 nt, Human
aggcagguggggcaggcagg

SEQ ID NO: 298716 - RNA, 23 nt, Human
aggcggcggcggcggcgguggcu

SEQ ID NO: 298717 - RNA, 18 nt, Human
aggcuggcacggccaugc

SEQ ID NO: 298718 - RNA, 24 nt, Human
agggucuggugaugaucaggguuc

SEQ ID NO: 298719 - RNA, 22 nt, Human
aggugaacauggcucaggcagg

SEQ ID NO: 298720 - RNA, 22 nt, Human
aguggcggcggaucccagggcc

SEQ ID NO: 298721 - RNA, 23 nt, Human
augaaacaaacaaaaaaaggccc

SEQ ID NO: 298722 - RNA, 21 nt, Human
caaaaaaaggcccacacaaua

SEQ ID NO: 298723 - RNA, 22 nt, Human
caaacaaaaaaaggcccacaca

SEQ ID NO: 298724 - RNA, 25 nt, Human
caaaugaagcacucaguucuagucc

SEQ ID NO: 298725 - RNA, 20 nt, Human
caacaccugggcacaacccc

SEQ ID NO: 298726 - RNA, 22 nt, Human
caacaccugggcacaaccccuc

SEQ ID NO: 298727 - RNA, 25 nt, Human
caacaccugggcacaaccccucaca

SEQ ID NO: 298728 - RNA, 19 nt, Human
caaccccucacaccccccu

SEQ ID NO: 298729 - RNA, 19 nt, Human
caaggggacugggcugggg

SEQ ID NO: 298730 - RNA, 20 nt, Human
cacaaccccucacacccccc

SEQ ID NO: 298731 - RNA, 22 nt, Human
cacaccccccucccccaacccu

SEQ ID NO: 298732 - RNA, 18 nt, Human
caccccccucccccaacc

SEQ ID NO: 298733 - RNA, 20 nt, Human
caccccccucccccaacccu

SEQ ID NO: 298734 - RNA, 21 nt, Human
caccccccucccccaacccug

SEQ ID NO: 298735 - RNA, 23 nt, Human
caccccccucccccaacccugcu

SEQ ID NO: 298736 - RNA, 18 nt, Human
caccccugcccucccacc

SEQ ID NO: 298737 - RNA, 21 nt, Human
caccccugcccucccacccca

SEQ ID NO: 298738 - RNA, 25 nt, Human
caccccugcccucccaccccauuuc

SEQ ID NO: 298739 - RNA, 22 nt, Human
caccuuguccauuucccagagu

SEQ ID NO: 298740 - RNA, 21 nt, Human
cagagacagacagaccaagug

SEQ ID NO: 298741 - RNA, 23 nt, Human
caggcgcccgucccaguagucuu

SEQ ID NO: 298742 - RNA, 18 nt, Human
cagggccccagggcuuag

SEQ ID NO: 298743 - RNA, 19 nt, Human
cauugucaccaucuugucu

SEQ ID NO: 298744 - RNA, 24 nt, Human
ccaaccccccaaacccacuaggag

SEQ ID NO: 298745 - RNA, 24 nt, Human
ccaacccugcuugugcacauaugc

SEQ ID NO: 298746 - RNA, 20 nt, Human
ccaagccggagacggcacca

SEQ ID NO: 298747 - RNA, 21 nt, Human
ccacacaauaugaggcaggug

SEQ ID NO: 298748 - RNA, 20 nt, Human
ccacacgcaggggguggggc

SEQ ID NO: 298749 - RNA, 19 nt, Human
ccaccccugcccucccacc

SEQ ID NO: 298750 - RNA, 22 nt, Human
ccagccgcugccugcuggggcc

SEQ ID NO: 298751 - RNA, 24 nt, Human
cccaaccccccaaacccacuagga

SEQ ID NO: 298752 - RNA, 21 nt, Human
cccaacugcccccuccccucg

SEQ ID NO: 298753 - RNA, 18 nt, Human
cccaccccauuucagggc

SEQ ID NO: 298754 - RNA, 18 nt, Human
cccacuaggagggcuccc

SEQ ID NO: 298755 - RNA, 23 nt, Human
ccccaaacccacuaggagggcuc

SEQ ID NO: 298756 - RNA, 19 nt, Human
ccccagaucccccugcaac

SEQ ID NO: 298757 - RNA, 19 nt, Human
cccccucccccaacccugc

SEQ ID NO: 298758 - RNA, 18 nt, Human
ccccgcccaacugccccc

SEQ ID NO: 298759 - RNA, 24 nt, Human
ccccgcccaacugcccccuccccu

SEQ ID NO: 298760 - RNA, 18 nt, Human
ccccugcccucccacccc

SEQ ID NO: 298761 - RNA, 20 nt, Human
cccgcucagccggccaugag

SEQ ID NO: 298762 - RNA, 19 nt, Human
cccguccgcagcgggaggg

SEQ ID NO: 298763 - RNA, 18 nt, Human
cccucccaccccauuuca

SEQ ID NO: 298764 - RNA, 21 nt, Human
cccugcccugccucacccucc

SEQ ID NO: 298765 - RNA, 23 nt, Human
cccugcccugccucacccucccc

SEQ ID NO: 298766 - RNA, 24 nt, Human
cccugcccugccucacccucccca

SEQ ID NO: 298767 - RNA, 19 nt, Human
cccugccucacccucccca

SEQ ID NO: 298768 - RNA, 18 nt, Human
cccuugaggugcuugggg

SEQ ID NO: 298769 - RNA, 18 nt, Human
ccgcagcgggaggggacg

SEQ ID NO: 298770 - RNA, 19 nt, Human
ccgcgcgcgccgcgcuccg

SEQ ID NO: 298771 - RNA, 27 nt, Human
ccgggaugaggccgcgcgaccuccuuc

SEQ ID NO: 298772 - RNA, 23 nt, Human
ccgucccaguagucuucagccau

SEQ ID NO: 298773 - RNA, 21 nt, Human
ccucacaccccccucccccaa

SEQ ID NO: 298774 - RNA, 24 nt, Human
ccucacaccccccucccccaaccc

SEQ ID NO: 298775 - RNA, 22 nt, Human
ccuccagccgcugccugcuggg

SEQ ID NO: 298776 - RNA, 22 nt, Human
ccucccaccccauuucagggcc

SEQ ID NO: 298777 - RNA, 22 nt, Human
ccugcaacuggggauggcgggc

SEQ ID NO: 298778 - RNA, 27 nt, Human
ccugcccugccucacccuccccaggag

SEQ ID NO: 298779 - RNA, 18 nt, Human
ccugccucacccucccca

SEQ ID NO: 298780 - RNA, 19 nt, Human
ccugggcuagcucuggacc

SEQ ID NO: 298781 - RNA, 19 nt, Human
ccuggggcggcggcccggg

SEQ ID NO: 298782 - RNA, 22 nt, Human
cgcagcgggaggggacgcggcc

SEQ ID NO: 298783 - RNA, 18 nt, Human
cggcgcggcggcgccugg

SEQ ID NO: 298784 - RNA, 19 nt, Human
cggcggcgccuggggcggc

SEQ ID NO: 298785 - RNA, 25 nt, Human
cggcggcgccuggggcggcggcccg

SEQ ID NO: 298786 - RNA, 23 nt, Human
cggcuugaauccgagugcucacg

SEQ ID NO: 298787 - RNA, 22 nt, Human
cgggcggggguaggaaggcgag

SEQ ID NO: 298788 - RNA, 22 nt, Human
cucacaccccccucccccaacc

SEQ ID NO: 298789 - RNA, 23 nt, Human
cucacaccccccucccccaaccc

SEQ ID NO: 298790 - RNA, 25 nt, Human
cuggaccccuggcuggccguggggu

SEQ ID NO: 298791 - RNA, 18 nt, Human
cugggcccgggccgccgc

SEQ ID NO: 298792 - RNA, 18 nt, Human
cugguaguccccagaucc

SEQ ID NO: 298793 - RNA, 24 nt, Human
gaacccaaccccccaaacccacca

SEQ ID NO: 298794 - RNA, 22 nt, Human
gaagauguaguugggggcugcc

SEQ ID NO: 298795 - RNA, 18 nt, Human
gacaggccaauggugggg

SEQ ID NO: 298796 - RNA, 19 nt, Human
gagacagacagaccaagug

SEQ ID NO: 298797 - RNA, 18 nt, Human
gaggaggaggaggcggcg

SEQ ID NO: 298798 - RNA, 29 nt, Human
gaggaggaggcggcggcggcggcggugac

SEQ ID NO: 298799 - RNA, 18 nt, Human
gaggcuguuuaguacuca

SEQ ID NO: 298800 - RNA, 23 nt, Human
gagucgagauccccagccugggc

SEQ ID NO: 298801 - RNA, 26 nt, Human
gcaacaccugggcacaaccccucaca

SEQ ID NO: 298802 - RNA, 24 nt, Human
gcacaaccccucacaccccccucc

SEQ ID NO: 298803 - RNA, 18 nt, Human
gcagcaggggacaagugg

SEQ ID NO: 298804 - RNA, 25 nt, Human
gcaggcagcaggggacaagugggca

SEQ ID NO: 298805 - RNA, 20 nt, Human
gcauugucaccaucuugucu

SEQ ID NO: 298806 - RNA, 21 nt, Human
gccacacgcaggggguggggc

SEQ ID NO: 298807 - RNA, 22 nt, Human
gccgcgcgaccuccuucuccuc

SEQ ID NO: 298808 - RNA, 20 nt, Human
gccugggcuagcucuggacc

SEQ ID NO: 298809 - RNA, 22 nt, Human
gccugggcuagcucuggacccc

SEQ ID NO: 298810 - RNA, 20 nt, Human
gcggcggcggcggcgguggc

SEQ ID NO: 298811 - RNA, 23 nt, Human
gcggcggcggcggcgguggcuuu

SEQ ID NO: 298812 - RNA, 23 nt, Human
gcggcggcggcgguggcugaggc

SEQ ID NO: 298813 - RNA, 24 nt, Human
gcggcggcggcgguggcugaggcg

SEQ ID NO: 298814 - RNA, 22 nt, Human
gcggcggcgguggcugaggcgg

SEQ ID NO: 298815 - RNA, 19 nt, Human
gcuagcucuggaccccugg

SEQ ID NO: 298816 - RNA, 23 nt, Human
ggaaagcaggcagaggaugccuc

SEQ ID NO: 298817 - RNA, 21 nt, Human
ggaaggcgaguggcuguggca

SEQ ID NO: 298818 - RNA, 23 nt, Human
ggacgcggccaucgcgagcccag

SEQ ID NO: 298819 - RNA, 21 nt, Human
ggcauugucaccaucuugucu

SEQ ID NO: 298820 - RNA, 24 nt, Human
ggcggcggcggcggcgguggcugg

SEQ ID NO: 298821 - RNA, 18 nt, Human
gggaugggagcaagggga

SEQ ID NO: 298822 - RNA, 30 nt, Human
gggcaggcagcaggggacaagugggcaacg

SEQ ID NO: 298823 - RNA, 18 nt, Human
ggggacugggcuggggag

SEQ ID NO: 298824 - RNA, 18 nt, Human
ggggauggcgggcggggg

SEQ ID NO: 298825 - RNA, 20 nt, Human
gggguguuugggcaggcagc

SEQ ID NO: 298826 - RNA, 23 nt, Human
gggguguuugggcaggcagcagg

SEQ ID NO: 298827 - RNA, 24 nt, Human
ggguguuugggcaggcagcagggg

SEQ ID NO: 298828 - RNA, 27 nt, Human
guggggcaggcaggaaagcaggcagag

SEQ ID NO: 298829 - RNA, 19 nt, Human
uaaccacccauccagggac

SEQ ID NO: 298830 - RNA, 22 nt, Human
uaaccacccauccagggacuga

SEQ ID NO: 298831 - RNA, 24 nt, Human
uaauuaaaaaaaaaaaaaacaaug

SEQ ID NO: 298832 - RNA, 18 nt, Human
uacugugggagggccaca

SEQ ID NO: 298833 - RNA, 19 nt, Human
uaggaaggcgaguggcugu

SEQ ID NO: 298834 - RNA, 23 nt, Human
uaggaaggcgaguggcuguggca

SEQ ID NO: 298835 - RNA, 22 nt, Human
uaggguggaggaaggggaggua

SEQ ID NO: 298836 - RNA, 22 nt, Human
uaguacucaguuccgaucuugg

SEQ ID NO: 298837 - RNA, 22 nt, Human
ucaaucaccacucguucccccu

SEQ ID NO: 298838 - RNA, 23 nt, Human
uccaaauaggggcugugucccug

SEQ ID NO: 298839 - RNA, 18 nt, Human
uccauuucccagagucuc

SEQ ID NO: 298840 - RNA, 23 nt, Human
ucccaccccugcccucccacccc

SEQ ID NO: 298841 - RNA, 25 nt, Human
ucccagagucucugguaguccccag

SEQ ID NO: 298842 - RNA, 19 nt, Human
ucccauagccaaucccagg

SEQ ID NO: 298843 - RNA, 20 nt, Human
uccccagaucccccugcaac

SEQ ID NO: 298844 - RNA, 21 nt, Human
uccccgcccaacugcccccuc

SEQ ID NO: 298845 - RNA, 22 nt, Human
ucccugucucugaaaggcuggg

SEQ ID NO: 298846 - RNA, 22 nt, Human
ucccuugaggugcuuggggagg

SEQ ID NO: 298847 - RNA, 22 nt, Human
ucgcugagcuggucaguuccug

SEQ ID NO: 298848 - RNA, 22 nt, Human
ucucugaaaggcugggagcagg

SEQ ID NO: 298849 - RNA, 21 nt, Human
ucucugguaguccccagaucc

SEQ ID NO: 298850 - RNA, 21 nt, Human
ucugagucgagauccccagcc

SEQ ID NO: 298851 - RNA, 19 nt, Human
ugaaacaaacaaaaaaagg

SEQ ID NO: 298852 - RNA, 22 nt, Human
ugaaacaaacaaaaaaaggccc

SEQ ID NO: 298853 - RNA, 22 nt, Human
ugaaacaaacaaaaaaaggccc

SEQ ID NO: 298854 - RNA, 24 nt, Human
ugaaugaaacaaacaaaaaaaggc

SEQ ID NO: 298855 - RNA, 20 nt, Human
ugagcuggucaguuccuggc

SEQ ID NO: 298856 - RNA, 23 nt, Human
ugagcuggucaguuccuggcagg

SEQ ID NO: 298857 - RNA, 21 nt, Human
ugaggccgcgcgaccuccuuc

SEQ ID NO: 298858 - RNA, 19 nt, Human
ugaugggggguagaccugg

SEQ ID NO: 298859 - RNA, 20 nt, Human
ugcccugccucacccucccc

SEQ ID NO: 298860 - RNA, 20 nt, Human
ugcccugugagggguguggc

SEQ ID NO: 298861 - RNA, 21 nt, Human
uggaggaaggggagguaacca

SEQ ID NO: 298862 - RNA, 21 nt, Human
uggaggcuguuuaguacucag

SEQ ID NO: 298863 - RNA, 18 nt, Human
uggcacggccaugcuguc

SEQ ID NO: 298864 - RNA, 24 nt, Human
uggcacggccaugcuguccaccgg

SEQ ID NO: 298865 - RNA, 21 nt, Human
uggcagaaguuugcuagcgcc

SEQ ID NO: 298866 - RNA, 25 nt, Human
uggcagggccccuacccaacagcac

SEQ ID NO: 298867 - RNA, 20 nt, Human
uggcucaggcagguaggcag

SEQ ID NO: 298868 - RNA, 21 nt, Human
uggcuccucgcugagcugguc

SEQ ID NO: 298869 - RNA, 24 nt, Human
uggcuguggcaugcuuucccauag

SEQ ID NO: 298870 - RNA, 18 nt, Human
ugggagcaaggggacugg

SEQ ID NO: 298871 - RNA, 20 nt, Human
ugggagcaaggggacuggaa

SEQ ID NO: 298872 - RNA, 21 nt, Human
ugggagcaaggggacugggcu

SEQ ID NO: 298873 - RNA, 24 nt, Human
ugggagcaaggggacugggcuggg

SEQ ID NO: 298874 - RNA, 19 nt, Human
ugggaugggagcaagggga

SEQ ID NO: 298875 - RNA, 19 nt, Human
uggggauggcgggcggggg

SEQ ID NO: 298876 - RNA, 22 nt, Human
uggggccccccaccuuguccau

SEQ ID NO: 298877 - RNA, 20 nt, Human
ugggguagugguccuggggg

SEQ ID NO: 298878 - RNA, 21 nt, Human
ugggguagugguccugggggc

SEQ ID NO: 298879 - RNA, 24 nt, Human
ugggguguuugggcaggcagcagg

SEQ ID NO: 298880 - RNA, 20 nt, Human
uggguugacaggccaauggu

SEQ ID NO: 298881 - RNA, 23 nt, Human
uggguugacaggccaaugguggg

SEQ ID NO: 298882 - RNA, 23 nt, Human
uggugggguguuugggcaggcag

SEQ ID NO: 298883 - RNA, 27 nt, Human
uggugggguguuugggcaggggagugc

SEQ ID NO: 298884 - RNA, 20 nt, Human
uguccauuucccagagucuc

SEQ ID NO: 298885 - RNA, 21 nt, Human
ugugggagggccacacgcagg

SEQ ID NO: 298886 - RNA, 23 nt, Human
ugugucccugucucugaaaggcu

SEQ ID NO: 298887 - RNA, 22 nt, Human
uuaaaaaaaacaaaaaucucau

SEQ ID NO: 298888 - RNA, 24 nt, Human
uuaccaccuuagcuaggacggccu

SEQ ID NO: 298889 - RNA, 19 nt, Human
uuaggguggaggaagggga

SEQ ID NO: 298890 - RNA, 23 nt, Human
uuaggguggaggaaggggaggua

SEQ ID NO: 298891 - RNA, 27 nt, Human
uuauggugcauucaggaacccaacccc

SEQ ID NO: 298892 - RNA, 22 nt, Human
uucaggaacccaaccccccaaa

SEQ ID NO: 298893 - RNA, 21 nt, Human
uuucagggccccagggcuuag

SEQ ID NO: 298894 - RNA, 24 nt, Human
uuuuaauauuucauacagcgauua

SEQ ID NO: 298895 - RNA, 19 nt, Human
uuuuuuuuuuuuucacuuu

SEQ ID NO: 298896 - RNA, 21 nt, Human
uuuuuuuuuuuuucacuuuag

SEQ ID NO: 298897 - RNA, 23 nt, Human
uuuuuuuuuuuuuuuuucacuuu

SEQ ID NO: 298898 - RNA, 26 nt, Human
uuuuuuuuuuuuuuuuucacuuuaau

SEQ ID NO: 298899 - RNA, 26 nt, Human
uuuuuuuuuuuuuuuuuucacuuuag

SEQ ID NO: 298900 - RNA, 27 nt, Human
aaagaagaaacagccguggccagaagg

SEQ ID NO: 298901 - RNA, 24 nt, Human
aagaagaaacagccguggccagaa

SEQ ID NO: 298902 - RNA, 21 nt, Human
aagaggagguagaagggaggg

SEQ ID NO: 298903 - RNA, 23 nt, Human
aaggggccagaaagggggacuac

SEQ ID NO: 298904 - RNA, 22 nt, Human
acaaagaagaaacagccguggc

SEQ ID NO: 298905 - RNA, 18 nt, Human
acaguaccguggggagga

SEQ ID NO: 298906 - RNA, 21 nt, Human
agaaaggcgaggcuggccucc

SEQ ID NO: 298907 - RNA, 25 nt, Human
agaagggaggggaagggagggagug

SEQ ID NO: 298908 - RNA, 21 nt, Human
agagaagcugcaaccugagcu

SEQ ID NO: 298909 - RNA, 21 nt, Human
agccacaagggcugggaagga

SEQ ID NO: 298910 - RNA, 19 nt, Human
aggcaggagccggucacag

SEQ ID NO: 298911 - RNA, 19 nt, Human
agggaggggaagggaggga

SEQ ID NO: 298912 - RNA, 21 nt, Human
aggggcugggggaagcuggua

SEQ ID NO: 298913 - RNA, 22 nt, Human
agggggccuggguagaaaggcg

SEQ ID NO: 298914 - RNA, 23 nt, Human
agggguugguaugcaggugaggg

SEQ ID NO: 298915 - RNA, 21 nt, Human
aggugggcagggcagggggcc

SEQ ID NO: 298916 - RNA, 18 nt, Human
caacuccauucagacuga

SEQ ID NO: 298917 - RNA, 22 nt, Human
cacacauguggguaccuaggau

SEQ ID NO: 298918 - RNA, 23 nt, Human
cacagcugggcauccaagcaugc

SEQ ID NO: 298919 - RNA, 24 nt, Human
cacagcugggcauccaagcaugcc

SEQ ID NO: 298920 - RNA, 24 nt, Human
cacaguaccguggggaggagugga

SEQ ID NO: 298921 - RNA, 26 nt, Human
cacccaggcuuccagcccccggaggc

SEQ ID NO: 298922 - RNA, 18 nt, Human
caccugccagguggggua

SEQ ID NO: 298923 - RNA, 18 nt, Human
cagagugcccauccuggc

SEQ ID NO: 298924 - RNA, 22 nt, Human
cagagugcccauccuggcgccu

SEQ ID NO: 298925 - RNA, 19 nt, Human
cagccaugguucaagccag

SEQ ID NO: 298926 - RNA, 19 nt, Human
cagccggguccuuugcucc

SEQ ID NO: 298927 - RNA, 23 nt, Human
cagcuuaugccagccccaacgug

SEQ ID NO: 298928 - RNA, 25 nt, Human
cagggaagcagcuuaugccagcccc

SEQ ID NO: 298929 - RNA, 21 nt, Human
cagggcagggggccuggguag

SEQ ID NO: 298930 - RNA, 23 nt, Human
caugugaucucuugucccuuggc

SEQ ID NO: 298931 - RNA, 21 nt, Human
ccaagcaugccagcaaagcgu

SEQ ID NO: 298932 - RNA, 21 nt, Human
ccacgcaggugcccaaacacc

SEQ ID NO: 298933 - RNA, 23 nt, Human
ccacgcaggugcccaaacaccag

SEQ ID NO: 298934 - RNA, 20 nt, Human
cccaggcgcaccgcccgcgg

SEQ ID NO: 298935 - RNA, 20 nt, Human
ccccugcuccggaaagguga

SEQ ID NO: 298936 - RNA, 18 nt, Human
cccgcuccuccgaccucc

SEQ ID NO: 298937 - RNA, 24 nt, Human
cccgcuccuccgaccucccccuuc

SEQ ID NO: 298938 - RNA, 18 nt, Human
cccggcgccgcggugccc

SEQ ID NO: 298939 - RNA, 25 nt, Human
cccggcgccgcggugcccgcuccuc

SEQ ID NO: 298940 - RNA, 22 nt, Human
cccugaccaggccuggcuaauc

SEQ ID NO: 298941 - RNA, 19 nt, Human
ccgcggugcgcccgcuccc

SEQ ID NO: 298942 - RNA, 23 nt, Human
ccgggcacggggcagcuuccccu

SEQ ID NO: 298943 - RNA, 21 nt, Human
ccuaggauuccagggucccag

SEQ ID NO: 298944 - RNA, 20 nt, Human
ccuccccuuggccugugcca

SEQ ID NO: 298945 - RNA, 27 nt, Human
ccuccgaccucccccuuccucccaggc

SEQ ID NO: 298946 - RNA, 22 nt, Human
ccuccgagggccacacaggcuc

SEQ ID NO: 298947 - RNA, 20 nt, Human
ccugagcuggcgaagaggag

SEQ ID NO: 298948 - RNA, 18 nt, Human
ccuggcuaaucagagccc

SEQ ID NO: 298949 - RNA, 20 nt, Human
ccuguauccagggcagagug

SEQ ID NO: 298950 - RNA, 24 nt, Human
ccugucguggccgcccucuggggu

SEQ ID NO: 298951 - RNA, 22 nt, Human
cgagccuucgggagcugagguc

SEQ ID NO: 298952 - RNA, 19 nt, Human
cggaaaggugagcaguucc

SEQ ID NO: 298953 - RNA, 22 nt, Human
cggaggcaagccucucagcauc

SEQ ID NO: 298954 - RNA, 20 nt, Human
cuacccgaauuugugcucca

SEQ ID NO: 298955 - RNA, 20 nt, Human
cuacuggggaggcacacggg

SEQ ID NO: 298956 - RNA, 22 nt, Human
cucagaggggaaaaagaugaaa

SEQ ID NO: 298957 - RNA, 22 nt, Human
cucccugucguggccgcccucu

SEQ ID NO: 298958 - RNA, 19 nt, Human
cucugcauaucugggugcc

SEQ ID NO: 298959 - RNA, 26 nt, Human
cuggcaccagugucagggugacucug

SEQ ID NO: 298960 - RNA, 23 nt, Human
cuggccuccccuuggccugugcc

SEQ ID NO: 298961 - RNA, 24 nt, Human
cugggggauacagaggggagccuu

SEQ ID NO: 298962 - RNA, 18 nt, Human
cugggguggcaggggcug

SEQ ID NO: 298963 - RNA, 18 nt, Human
cuguauccagggcagagu

SEQ ID NO: 298964 - RNA, 21 nt, Human
cuuccagcccccggaggcaag

SEQ ID NO: 298965 - RNA, 19 nt, Human
gaaggaaggauggggaggc

SEQ ID NO: 298966 - RNA, 23 nt, Human
gagggugggggccugaggugggc

SEQ ID NO: 298967 - RNA, 25 nt, Human
gagggugggggccugaggugggcag

SEQ ID NO: 298968 - RNA, 19 nt, Human
gaucagguggacagagcca

SEQ ID NO: 298969 - RNA, 21 nt, Human
gccagaaagggggacuaccaa

SEQ ID NO: 298970 - RNA, 25 nt, Human
gcccccggaggcaagccucucagca

SEQ ID NO: 298971 - RNA, 19 nt, Human
gccuggcuaaucagagccc

SEQ ID NO: 298972 - RNA, 24 nt, Human
gcggucuuccaggcuggcugucag

SEQ ID NO: 298973 - RNA, 20 nt, Human
gcggugcgcccgcucccucc

SEQ ID NO: 298974 - RNA, 19 nt, Human
ggacugggcagccgggucc

SEQ ID NO: 298975 - RNA, 23 nt, Human
ggccccggccacccaggcuuccc

SEQ ID NO: 298976 - RNA, 22 nt, Human
ggcgaagaggagguagaaggga

SEQ ID NO: 298977 - RNA, 23 nt, Human
ggcgaggcuggccuccccuuggc

SEQ ID NO: 298978 - RNA, 24 nt, Human
gggaagcugguauugggaucaggu

SEQ ID NO: 298979 - RNA, 21 nt, Human
gggcagggcagggggccuggg

SEQ ID NO: 298980 - RNA, 22 nt, Human
gggcagggcagggggccugggu

SEQ ID NO: 298981 - RNA, 22 nt, Human
gggcuggcugagguggcaggcg

SEQ ID NO: 298982 - RNA, 25 nt, Human
ggggaagcugguauugggaucaggu

SEQ ID NO: 298983 - RNA, 19 nt, Human
ggggaagggagggagugga

SEQ ID NO: 298984 - RNA, 27 nt, Human
gggggccugaggugggcagggcagggg

SEQ ID NO: 298985 - RNA, 24 nt, Human
gggguggacaggcaggagccgguc

SEQ ID NO: 298986 - RNA, 24 nt, Human
gggugggggccugaggugggcagg

SEQ ID NO: 298987 - RNA, 22 nt, Human
guggacagagccacaagggcug

SEQ ID NO: 298988 - RNA, 18 nt, Human
gugugggcuccaaggggc

SEQ ID NO: 298989 - RNA, 18 nt, Human
uacccggcgccgcggugc

SEQ ID NO: 298990 - RNA, 19 nt, Human
uaccguggggaggagugga

SEQ ID NO: 298991 - RNA, 19 nt, Human
uagaagggaggggaaggga

SEQ ID NO: 298992 - RNA, 22 nt, Human
uauuccuucuguugcuguggga

SEQ ID NO: 298993 - RNA, 18 nt, Human
ucagcccaguguugagga

SEQ ID NO: 298994 - RNA, 21 nt, Human
ucaguccuccgagggccacac

SEQ ID NO: 298995 - RNA, 20 nt, Human
uccaaggggccagaaagggg

SEQ ID NO: 298996 - RNA, 19 nt, Human
ucccacgcaggugcccaaa

SEQ ID NO: 298997 - RNA, 21 nt, Human
ucccagagaacaugccauguc

SEQ ID NO: 298998 - RNA, 22 nt, Human
ucccagagaacaugccaugucu

SEQ ID NO: 298999 - RNA, 27 nt, Human
uccccaggacccugaccaggccuggcu

SEQ ID NO: 299000 - RNA, 23 nt, Human
uccuguuccacguuccucucccu

SEQ ID NO: 299001 - RNA, 21 nt, Human
ucuacaccucucccugucgug

SEQ ID NO: 299002 - RNA, 18 nt, Human
ucugggguggcaggggcu

SEQ ID NO: 299003 - RNA, 19 nt, Human
ugagcuggcgaagaggagg

SEQ ID NO: 299004 - RNA, 22 nt, Human
ugagcuggcgaagaggagguag

SEQ ID NO: 299005 - RNA, 24 nt, Human
ugaggguaggguagggcugaugga

SEQ ID NO: 299006 - RNA, 22 nt, Human
ugaggugggcagggcagggggc

SEQ ID NO: 299007 - RNA, 23 nt, Human
ugaggugggcagggcagggggcc

SEQ ID NO: 299008 - RNA, 20 nt, Human
ugaucucuugucccuuggcc

SEQ ID NO: 299009 - RNA, 24 nt, Human
ugcaaccugagcuggcgaagagga

SEQ ID NO: 299010 - RNA, 21 nt, Human
ugcuccuguuccacguuccuc

SEQ ID NO: 299011 - RNA, 24 nt, Human
uggaaagaguggggacuacuauuc

SEQ ID NO: 299012 - RNA, 26 nt, Human
uggaaagaguggggacuacuauuccu

SEQ ID NO: 299013 - RNA, 22 nt, Human
uggagggugggggccugaggug

SEQ ID NO: 299014 - RNA, 24 nt, Human
uggagggugggggccugaggugga

SEQ ID NO: 299015 - RNA, 20 nt, Human
uggcacuaggcagguccugg

SEQ ID NO: 299016 - RNA, 21 nt, Human
uggcaggggcugggggaagcu

SEQ ID NO: 299017 - RNA, 18 nt, Human
uggcuaaucagagcccug

SEQ ID NO: 299018 - RNA, 22 nt, Human
ugggcagggcagggggccuggg

SEQ ID NO: 299019 - RNA, 21 nt, Human
ugggcgggggcuggcugaggu

SEQ ID NO: 299020 - RNA, 20 nt, Human
ugggggaggaggguagagcc

SEQ ID NO: 299021 - RNA, 20 nt, Human
ugggggccugaggugggcag

SEQ ID NO: 299022 - RNA, 18 nt, Human
uguccugggggccgcggu

SEQ ID NO: 299023 - RNA, 21 nt, Human
uucacaguaccguggggagga

SEQ ID NO: 299024 - RNA, 21 nt, Human
uuccaggcuggcugucagccc

SEQ ID NO: 299025 - RNA, 23 nt, Human
uuccagggucccagagaacaugc

SEQ ID NO: 299026 - RNA, 20 nt, Human
aaagagccagcccgcccaaa

SEQ ID NO: 299027 - RNA, 18 nt, Human
aacagcuacugauccucc

SEQ ID NO: 299028 - RNA, 21 nt, Human
aacagcuacugauccuccaca

SEQ ID NO: 299029 - RNA, 22 nt, Human
aacccauggaugcaauguuccc

SEQ ID NO: 299030 - RNA, 21 nt, Human
aagcagacgagugagcuggau

SEQ ID NO: 299031 - RNA, 20 nt, Human
acaaggcuaugcacaaagca

SEQ ID NO: 299032 - RNA, 19 nt, Human
acuuccagcagccccuccc

SEQ ID NO: 299033 - RNA, 21 nt, Human
agaaaaggcagacaacuuagg

SEQ ID NO: 299034 - RNA, 19 nt, Human
agaaacagcaggggaaggc

SEQ ID NO: 299035 - RNA, 21 nt, Human
agaagaaggcagcccagccca

SEQ ID NO: 299036 - RNA, 24 nt, Human
agaagaaggcagcccagcccagga

SEQ ID NO: 299037 - RNA, 19 nt, Human
agacagaaacagcagggga

SEQ ID NO: 299038 - RNA, 21 nt, Human
agcauagaaaacuaaaagucu

SEQ ID NO: 299039 - RNA, 20 nt, Human
aggaagcagacgagugagcu

SEQ ID NO: 299040 - RNA, 23 nt, Human
aggauggggggagcgagaaagga

SEQ ID NO: 299041 - RNA, 21 nt, Human
aggccucugauacuucuccaa

SEQ ID NO: 299042 - RNA, 25 nt, Human
agguggcacuuccagguggcacuuc

SEQ ID NO: 299043 - RNA, 22 nt, Human
aucaccucaaaucccagccuaa

SEQ ID NO: 299044 - RNA, 20 nt, Human
aucagcuccacaaagcauaa

SEQ ID NO: 299045 - RNA, 26 nt, Human
caaaucccagccuaaucagcuccaca

SEQ ID NO: 299046 - RNA, 23 nt, Human
cagcccaggauggggggagcgag

SEQ ID NO: 299047 - RNA, 21 nt, Human
caguggugggugcucuuccag

SEQ ID NO: 299048 - RNA, 24 nt, Human
ccagaaagaaaacaaacagucuga

SEQ ID NO: 299049 - RNA, 20 nt, Human
ccagcagccccucccaagcu

SEQ ID NO: 299050 - RNA, 21 nt, Human
ccagugacauauggaaaagag

SEQ ID NO: 299051 - RNA, 22 nt, Human
cccagaaagaaaacaaacaguc

SEQ ID NO: 299052 - RNA, 24 nt, Human
cccuacugaagacuuccccuccua

SEQ ID NO: 299053 - RNA, 19 nt, Human
ccuccgcccacccaucccc

SEQ ID NO: 299054 - RNA, 22 nt, Human
cuaugcacaaagcaucuuugcu

SEQ ID NO: 299055 - RNA, 22 nt, Human
cucccaagcuggaagaaaucac

SEQ ID NO: 299056 - RNA, 22 nt, Human
gaagaaggcagcccagcccagg

SEQ ID NO: 299057 - RNA, 20 nt, Human
gagaaaucauccauuuccuc

SEQ ID NO: 299058 - RNA, 24 nt, Human
gcugcaaaagagccagcccgccca

SEQ ID NO: 299059 - RNA, 21 nt, Human
ggaaaagagaaaucauccauu

SEQ ID NO: 299060 - RNA, 21 nt, Human
ggugggugcucuuccagagac

SEQ ID NO: 299061 - RNA, 18 nt, Human
uaacagcuacugauccuc

SEQ ID NO: 299062 - RNA, 20 nt, Human
uaaggcaaauggacauuggc

SEQ ID NO: 299063 - RNA, 21 nt, Human
uacccuaccaaaauucaggag

SEQ ID NO: 299064 - RNA, 20 nt, Human
uacugaagacuuccccuccu

SEQ ID NO: 299065 - RNA, 24 nt, Human
uagaaaaggcagacaacuuaggca

SEQ ID NO: 299066 - RNA, 22 nt, Human
uaguaagcaagcaaagguuucc

SEQ ID NO: 299067 - RNA, 22 nt, Human
ucaggagaaagcauagaaaacu

SEQ ID NO: 299068 - RNA, 18 nt, Human
uccacaaagcauaaggca

SEQ ID NO: 299069 - RNA, 22 nt, Human
uccacaaguaggaacgaggaaa

SEQ ID NO: 299070 - RNA, 21 nt, Human
uccagcagccccucccaagcu

SEQ ID NO: 299071 - RNA, 18 nt, Human
ucccaagcuggaagaaau

SEQ ID NO: 299072 - RNA, 19 nt, Human
ucccagccuaaucagcucc

SEQ ID NO: 299073 - RNA, 23 nt, Human
ucccagccuaaucagcuccacaa

SEQ ID NO: 299074 - RNA, 26 nt, Human
ucuuccagagacacuuccagguggca

SEQ ID NO: 299075 - RNA, 18 nt, Human
ucuugacgccucaguuuc

SEQ ID NO: 299076 - RNA, 18 nt, Human
ugagaaaaaggugcagag

SEQ ID NO: 299077 - RNA, 18 nt, Human
ugagaaaaaggugcagag

SEQ ID NO: 299078 - RNA, 21 nt, Human
ugagagguacaggcagccuuu

SEQ ID NO: 299079 - RNA, 18 nt, Human
ugagcuggaugucaggca

SEQ ID NO: 299080 - RNA, 18 nt, Human
ugagguaucccacauuaa

SEQ ID NO: 299081 - RNA, 22 nt, Human
ugcaaaagagccagcccgccca

SEQ ID NO: 299082 - RNA, 18 nt, Human
ugcacaauggaaugaucg

SEQ ID NO: 299083 - RNA, 21 nt, Human
ugcagagucauuaagccacca

SEQ ID NO: 299084 - RNA, 24 nt, Human
ugcauagaaagauacuuuuucaca

SEQ ID NO: 299085 - RNA, 21 nt, Human
uggaagaaaucacaagcugca

SEQ ID NO: 299086 - RNA, 21 nt, Human
uucaggagaaagcauagaaaa

SEQ ID NO: 299087 - RNA, 23 nt, Human
uuccagagacaucaacccaugga

SEQ ID NO: 299088 - RNA, 21 nt, Human
uuccagagacauugggugguu

SEQ ID NO: 299089 - RNA, 22 nt, Human
uuccagcagccccucccaagcu

SEQ ID NO: 299090 - RNA, 20 nt, Human
uuuuggugguagaaaaggca

SEQ ID NO: 299091 - RNA, 22 nt, Human
aacugcaacucacgcucccccg

SEQ ID NO: 299092 - RNA, 23 nt, Human
agaaagggaggacaggaaaggag

SEQ ID NO: 299093 - RNA, 19 nt, Human
agggaggacaggaaaggag

SEQ ID NO: 299094 - RNA, 22 nt, Human
ccuuagguuuaguguugggguc

SEQ ID NO: 299095 - RNA, 18 nt, Human
gaggacaggaaaggaggg

SEQ ID NO: 299096 - RNA, 24 nt, Human
uaacugcaacucacgcucccccga

SEQ ID NO: 299097 - RNA, 26 nt, Human
ugaagguaaugggacagaaagggagg

SEQ ID NO: 299098 - RNA, 24 nt, Human
uugucuuuccuuuguagcuguccu

SEQ ID NO: 299099 - RNA, 22 nt, Human
aaaaacagcaaaaacauucaaa

SEQ ID NO: 299100 - RNA, 21 nt, Human
aaaacagcaaaaacauucaaa

SEQ ID NO: 299101 - RNA, 19 nt, Human
aaagauagcagcuaccccu

SEQ ID NO: 299102 - RNA, 23 nt, Human
accccaucucccaggcacccccc

SEQ ID NO: 299103 - RNA, 25 nt, Human
accccaucucccaggcaccccccag

SEQ ID NO: 299104 - RNA, 24 nt, Human
accccucccccagucccccccccc

SEQ ID NO: 299105 - RNA, 18 nt, Human
accugucagcagcugccu

SEQ ID NO: 299106 - RNA, 21 nt, Human
agacacagcagagguccuggc

SEQ ID NO: 299107 - RNA, 22 nt, Human
agccaugacccucgaggaccca

SEQ ID NO: 299108 - RNA, 19 nt, Human
agcgcggcccagguccccg

SEQ ID NO: 299109 - RNA, 24 nt, Human
agcuaccccucccccagucccccc

SEQ ID NO: 299110 - RNA, 24 nt, Human
aggaggccccaggccauggggggc

SEQ ID NO: 299111 - RNA, 19 nt, Human
aggcaacacaguccggggc

SEQ ID NO: 299112 - RNA, 18 nt, Human
aggcaccccccagcaagg

SEQ ID NO: 299113 - RNA, 18 nt, Human
aggcucccagaugauagc

SEQ ID NO: 299114 - RNA, 20 nt, Human
aguccccccccccauccccc

SEQ ID NO: 299115 - RNA, 20 nt, Human
auggggggcuccuggccaug

SEQ ID NO: 299116 - RNA, 22 nt, Human
caaaugaaagcucuucuuaccc

SEQ ID NO: 299117 - RNA, 19 nt, Human
caacacaguccggggcugu

SEQ ID NO: 299118 - RNA, 20 nt, Human
caccggaaccggaaauagcu

SEQ ID NO: 299119 - RNA, 21 nt, Human
caccggaaccggaaauagcuu

SEQ ID NO: 299120 - RNA, 23 nt, Human
cagacaaaugaaagcucuucuua

SEQ ID NO: 299121 - RNA, 19 nt, Human
cagcgcggcccaggucccc

SEQ ID NO: 299122 - RNA, 18 nt, Human
cagggcacagggugggcg

SEQ ID NO: 299123 - RNA, 21 nt, Human
caggggcacaggcucccagau

SEQ ID NO: 299124 - RNA, 19 nt, Human
ccaguccccccccccaucc

SEQ ID NO: 299125 - RNA, 25 nt, Human
ccaucccccaaacaauuucugugcc

SEQ ID NO: 299126 - RNA, 20 nt, Human
cccaggcaccccccagcaag

SEQ ID NO: 299127 - RNA, 28 nt, Human
cccaguccccccccccaucccccaaaca

SEQ ID NO: 299128 - RNA, 20 nt, Human
ccccaaacaauuucugugcc

SEQ ID NO: 299129 - RNA, 19 nt, Human
ccccccaucccccaaacaa

SEQ ID NO: 299130 - RNA, 21 nt, Human
ccccccccccaucccccaaac

SEQ ID NO: 299131 - RNA, 19 nt, Human
cggcggcggcggcggcgcc

SEQ ID NO: 299132 - RNA, 20 nt, Human
cggcggcggcggcggcgccu

SEQ ID NO: 299133 - RNA, 21 nt, Human
cucccccagucccccccccca

SEQ ID NO: 299134 - RNA, 18 nt, Human
cugaaugagcacccaggc

SEQ ID NO: 299135 - RNA, 23 nt, Human
cugaaugagcacccaggcaacac

SEQ ID NO: 299136 - RNA, 23 nt, Human
cugacaccggaaccggaaauagc

SEQ ID NO: 299137 - RNA, 24 nt, Human
cugcggcggcggcggcggcgccuc

SEQ ID NO: 299138 - RNA, 22 nt, Human
cuuacaugcuaucuaucuacca

SEQ ID NO: 299139 - RNA, 20 nt, Human
gaaaugcuguccugcaucuu

SEQ ID NO: 299140 - RNA, 21 nt, Human
gcagggaagggcagagaggug

SEQ ID NO: 299141 - RNA, 23 nt, Human
gcggcugcggcggcggcggcggc

SEQ ID NO: 299142 - RNA, 21 nt, Human
ggcagggaagggcagagaggu

SEQ ID NO: 299143 - RNA, 23 nt, Human
ggcggcugcggcggcggcggcgg

SEQ ID NO: 299144 - RNA, 24 nt, Human
gggcagagaggugaggcccugagg

SEQ ID NO: 299145 - RNA, 22 nt, Human
ggggcuccuggccaugaggggc

SEQ ID NO: 299146 - RNA, 23 nt, Human
gggggcuccuggccaugaggggc

SEQ ID NO: 299147 - RNA, 18 nt, Human
ggggggcuccuggccaug

SEQ ID NO: 299148 - RNA, 19 nt, Human
ggguagggcugaaaauggg

SEQ ID NO: 299149 - RNA, 21 nt, Human
guggagcauguuuugccuggg

SEQ ID NO: 299150 - RNA, 21 nt, Human
ucagcagcugccuccugggac

SEQ ID NO: 299151 - RNA, 18 nt, Human
ucagucagacaggacuga

SEQ ID NO: 299152 - RNA, 27 nt, Human
ucccaggcaccccccagcaagggcucc

SEQ ID NO: 299153 - RNA, 18 nt, Human
uccugcaucuuucugucu

SEQ ID NO: 299154 - RNA, 20 nt, Human
ucuaaaaacagcaaaaacau

SEQ ID NO: 299155 - RNA, 21 nt, Human
ucucccaggcaccccccagca

SEQ ID NO: 299156 - RNA, 19 nt, Human
ucugugccaagaugaagag

SEQ ID NO: 299157 - RNA, 23 nt, Human
ugccaagaugaagaggaggcccc

SEQ ID NO: 299158 - RNA, 23 nt, Human
ugccuccugggacaaccaccccc

SEQ ID NO: 299159 - RNA, 18 nt, Human
ugccugggugccacacag

SEQ ID NO: 299160 - RNA, 20 nt, Human
uggagcauguuuugccuggu

SEQ ID NO: 299161 - RNA, 20 nt, Human
ugggacaaccacccccuuaa

SEQ ID NO: 299162 - RNA, 18 nt, Human
uggguagggcugaaaaug

SEQ ID NO: 299163 - RNA, 23 nt, Human
uggguagggcugaaaaugggcac

SEQ ID NO: 299164 - RNA, 22 nt, Human
uguccugcaucuuucugucuca

SEQ ID NO: 299165 - RNA, 28 nt, Human
aaaaaagacaaaacauaacuugaaaggg

SEQ ID NO: 299166 - RNA, 24 nt, Human
aaaaagacaaaacauaacuugaaa

SEQ ID NO: 299167 - RNA, 24 nt, Human
aagcaauauagauacuaccaaaac

SEQ ID NO: 299168 - RNA, 20 nt, Human
aagccaacugcggagaaggc

SEQ ID NO: 299169 - RNA, 22 nt, Human
aauaauguaauuugaaaagucc

SEQ ID NO: 299170 - RNA, 21 nt, Human
aaucauuuauuacuccuuugg

SEQ ID NO: 299171 - RNA, 20 nt, Human
acuaccaaaaccaucaucca

SEQ ID NO: 299172 - RNA, 19 nt, Human
agacaaaacauaacuugaa

SEQ ID NO: 299173 - RNA, 20 nt, Human
agacaaaacauaacuugaaa

SEQ ID NO: 299174 - RNA, 22 nt, Human
agggaaaauggaguaaaaaaga

SEQ ID NO: 299175 - RNA, 20 nt, Human
auggaguaaaaaagacaaaa

SEQ ID NO: 299176 - RNA, 21 nt, Human
caagcauuguaucaauuugag

SEQ ID NO: 299177 - RNA, 24 nt, Human
ccaaaaccaucauccaauaccuaa

SEQ ID NO: 299178 - RNA, 19 nt, Human
ccaauaccuaaaggauaaa

SEQ ID NO: 299179 - RNA, 21 nt, Human
ccugagaaucuccuucuugcu

SEQ ID NO: 299180 - RNA, 24 nt, Human
cuaauaauguugcugaagacagcu

SEQ ID NO: 299181 - RNA, 19 nt, Human
cuuuuuguuguuguuuuug

SEQ ID NO: 299182 - RNA, 27 nt, Human
cuuuuuguuguuguuuuuguuuuuguc

SEQ ID NO: 299183 - RNA, 23 nt, Human
gaagguauuccucacauugcuau

SEQ ID NO: 299184 - RNA, 23 nt, Human
gauacuaccaaaaccaucaucca

SEQ ID NO: 299185 - RNA, 22 nt, Human
ggaagccaacugcggagaaggc

SEQ ID NO: 299186 - RNA, 19 nt, Human
ggaagcuaccgaggaagcc

SEQ ID NO: 299187 - RNA, 24 nt, Human
ggaguaaaaaagacaaaacauaac

SEQ ID NO: 299188 - RNA, 28 nt, Human
uaaagcaauauagauacuaccaaaacca

SEQ ID NO: 299189 - RNA, 19 nt, Human
uaagaaaugcuaauaacuc

SEQ ID NO: 299190 - RNA, 20 nt, Human
uaagaaaugcuaauaacucg

SEQ ID NO: 299191 - RNA, 21 nt, Human
uaauuaggaagguauuccuca

SEQ ID NO: 299192 - RNA, 21 nt, Human
uagauacuaccaaaaccauca

SEQ ID NO: 299193 - RNA, 23 nt, Human
ucauccaauaccuaaaggauaaa

SEQ ID NO: 299194 - RNA, 19 nt, Human
ucucaugagauuucauuuu

SEQ ID NO: 299195 - RNA, 19 nt, Human
uguuguuguuuuuguuuuu

SEQ ID NO: 299196 - RNA, 24 nt, Human
uucauuuuuauuacacaaagaaaa

SEQ ID NO: 299197 - RNA, 25 nt, Human
uugaaaaaugucauaauauuaucca

SEQ ID NO: 299198 - RNA, 23 nt, Human
uugucaaguuagcauagccgugc

SEQ ID NO: 299199 - RNA, 20 nt, Human
uuguuguuguuuuuguuuuu

SEQ ID NO: 299200 - RNA, 21 nt, Human
uuuuuuuuuuuuuuuuuauuu

SEQ ID NO: 299201 - RNA, 24 nt, Human
uuuuuuuuuuuuuuuuuuuauuuu

SEQ ID NO: 299202 - RNA, 24 nt, Human
aaucugucaacaucucugcaccuc

SEQ ID NO: 299203 - RNA, 21 nt, Human
cccacagcugggucggaaggc

SEQ ID NO: 299204 - RNA, 19 nt, Human
cggaaaucgggcgccgggc

SEQ ID NO: 299205 - RNA, 23 nt, Human
gcggggcgcgggcuggcgugggg

SEQ ID NO: 299206 - RNA, 20 nt, Human
gggcgcagcccacagcuggg

SEQ ID NO: 299207 - RNA, 26 nt, Human
uaggauaaaaucccagaaauggaauu

SEQ ID NO: 299208 - RNA, 28 nt, Human
uccuuaggauaaaaucccagaaauggag

SEQ ID NO: 299209 - RNA, 19 nt, Human
ugguauaaguauuuccuua

SEQ ID NO: 299210 - RNA, 20 nt, Human
accuccuccuucccuuuccu

SEQ ID NO: 299211 - RNA, 21 nt, Human
cggcgaccgcuauucgggacc

SEQ ID NO: 299212 - RNA, 23 nt, Human
aaaaaaaaaaaaaaugcacccug

SEQ ID NO: 299213 - RNA, 24 nt, Human
aaaaaaaaucuagguuaaacaaaa

SEQ ID NO: 299214 - RNA, 24 nt, Human
aaaaagagacaaagacaagcaggg

SEQ ID NO: 299215 - RNA, 23 nt, Human
aaaacaaaaagagacaaagacaa

SEQ ID NO: 299216 - RNA, 22 nt, Human
aaaacaccuuggcaggaaacag

SEQ ID NO: 299217 - RNA, 26 nt, Human
aaaagagacaaagacaagcaggggca

SEQ ID NO: 299218 - RNA, 20 nt, Human
aaacaaaaagagacaaagac

SEQ ID NO: 299219 - RNA, 22 nt, Human
aaacaccuuggcaggaaacaga

SEQ ID NO: 299220 - RNA, 24 nt, Human
aaagaacagcugaaaagccagaag

SEQ ID NO: 299221 - RNA, 19 nt, Human
aaagacugaaaggaaauaa

SEQ ID NO: 299222 - RNA, 20 nt, Human
aaagagacaaagacaagcag

SEQ ID NO: 299223 - RNA, 18 nt, Human
aaagccagaagacaaagg

SEQ ID NO: 299224 - RNA, 21 nt, Human
aaaggaaaaaaacgcaaauga

SEQ ID NO: 299225 - RNA, 25 nt, Human
aaccaaaaaguuuuaaaaaaaaucu

SEQ ID NO: 299226 - RNA, 21 nt, Human
aacccaaacaaugagaaaucu

SEQ ID NO: 299227 - RNA, 24 nt, Human
aacugcuugaacccaggaggugga

SEQ ID NO: 299228 - RNA, 20 nt, Human
aaggaaaaaaacgcaaauga

SEQ ID NO: 299229 - RNA, 20 nt, Human
aaguagcugggacuagaggu

SEQ ID NO: 299230 - RNA, 21 nt, Human
aauaaaagggacuacaaagaa

SEQ ID NO: 299231 - RNA, 19 nt, Human
aaucaugguucacugcagc

SEQ ID NO: 299232 - RNA, 21 nt, Human
acaauaacagagaugucacac

SEQ ID NO: 299233 - RNA, 24 nt, Human
acagagcgagacuccaucucaaag

SEQ ID NO: 299234 - RNA, 24 nt, Human
acagcugaaaagccagaagacaaa

SEQ ID NO: 299235 - RNA, 25 nt, Human
acaugaaauccagcagcagaggcca

SEQ ID NO: 299236 - RNA, 24 nt, Human
acccaggagguggagguugcagug

SEQ ID NO: 299237 - RNA, 22 nt, Human
acuccagccugggugacagagc

SEQ ID NO: 299238 - RNA, 22 nt, Human
agacugaaaggaaauaagcuag

SEQ ID NO: 299239 - RNA, 21 nt, Human
agagauccuccugacuaagcc

SEQ ID NO: 299240 - RNA, 19 nt, Human
agagauuauuuuaauuuuc

SEQ ID NO: 299241 - RNA, 23 nt, Human
agagauuauuuuaauuuucuuau

SEQ ID NO: 299242 - RNA, 18 nt, Human
agcccgacagcgcggacc

SEQ ID NO: 299243 - RNA, 24 nt, Human
agccugggugacagagcgagacuc

SEQ ID NO: 299244 - RNA, 20 nt, Human
agcugaaaagccagaagaca

SEQ ID NO: 299245 - RNA, 18 nt, Human
aggcgggagaacugcuug

SEQ ID NO: 299246 - RNA, 21 nt, Human
aggcugaggcgggagaacugc

SEQ ID NO: 299247 - RNA, 24 nt, Human
aggcugaggcgggagaacugcuug

SEQ ID NO: 299248 - RNA, 24 nt, Human
agggucucugucgcccagguugga

SEQ ID NO: 299249 - RNA, 24 nt, Human
agguggagguugcagugagccgag

SEQ ID NO: 299250 - RNA, 20 nt, Human
agucaauuccugaaaagccg

SEQ ID NO: 299251 - RNA, 22 nt, Human
auaacagagaugucacaccaca

SEQ ID NO: 299252 - RNA, 24 nt, Human
aucacgcuauuguacuccagccug

SEQ ID NO: 299253 - RNA, 19 nt, Human
auuguacuccagccugggu

SEQ ID NO: 299254 - RNA, 21 nt, Human
auuguacuccagccuggguga

SEQ ID NO: 299255 - RNA, 23 nt, Human
auuguacuccagccugggugaca

SEQ ID NO: 299256 - RNA, 24 nt, Human
auuguacuccagccugggugacag

SEQ ID NO: 299257 - RNA, 19 nt, Human
caaaaagagacaaagacaa

SEQ ID NO: 299258 - RNA, 20 nt, Human
caagagauccuccugacuaa

SEQ ID NO: 299259 - RNA, 21 nt, Human
caauuccugaaaagccaggaa

SEQ ID NO: 299260 - RNA, 22 nt, Human
cacugcagccuugaccucccag

SEQ ID NO: 299261 - RNA, 22 nt, Human
cagcagaggccaccccucagga

SEQ ID NO: 299262 - RNA, 23 nt, Human
cagcagcagaggccaccccucag

SEQ ID NO: 299263 - RNA, 23 nt, Human
cagccuugaccucccaggcucaa

SEQ ID NO: 299264 - RNA, 24 nt, Human
cagccuugaccucccaggcucaag

SEQ ID NO: 299265 - RNA, 24 nt, Human
cagcuacucaggaggcugaggcgg

SEQ ID NO: 299266 - RNA, 29 nt, Human
caggagguggagguugcagugacaacggu

SEQ ID NO: 299267 - RNA, 19 nt, Human
cagggucucugucgcccag

SEQ ID NO: 299268 - RNA, 24 nt, Human
caucaagcaaauuauaucacaucu

SEQ ID NO: 299269 - RNA, 18 nt, Human
ccaggaaaaucaaaauug

SEQ ID NO: 299270 - RNA, 19 nt, Human
cccaaguagcugggacuag

SEQ ID NO: 299271 - RNA, 21 nt, Human
cccaggagguggagguugcag

SEQ ID NO: 299272 - RNA, 18 nt, Human
cccaggcucaagagaucc

SEQ ID NO: 299273 - RNA, 21 nt, Human
cccaggcucaagagauccucc

SEQ ID NO: 299274 - RNA, 26 nt, Human
ccgucuaaagcuauggaacugauuac

SEQ ID NO: 299275 - RNA, 24 nt, Human
ccugaaaagccaggaaaaucaaaa

SEQ ID NO: 299276 - RNA, 22 nt, Human
ccugcuguuccagacuuaguca

SEQ ID NO: 299277 - RNA, 22 nt, Human
ccugggugacagagcgagacuc

SEQ ID NO: 299278 - RNA, 22 nt, Human
cgagacuccaucucaaagaaaa

SEQ ID NO: 299279 - RNA, 26 nt, Human
cgcuccggauccuuugggccagcagc

SEQ ID NO: 299280 - RNA, 19 nt, Human
cggaaggaauggagcacuu

SEQ ID NO: 299281 - RNA, 24 nt, Human
cuaagccucccaaguagcugggac

SEQ ID NO: 299282 - RNA, 21 nt, Human
cuauuguacuccagccugggu

SEQ ID NO: 299283 - RNA, 24 nt, Human
cuauuguacuccagccugggugac

SEQ ID NO: 299284 - RNA, 22 nt, Human
cucaaagaaaacaaacaaaaua

SEQ ID NO: 299285 - RNA, 18 nt, Human
cucaggaggcugaggcgg

SEQ ID NO: 299286 - RNA, 18 nt, Human
cucugucgcccagguugg

SEQ ID NO: 299287 - RNA, 19 nt, Human
cucugucgcccagguugga

SEQ ID NO: 299288 - RNA, 22 nt, Human
cugcagccuugaccucccaggc

SEQ ID NO: 299289 - RNA, 23 nt, Human
cugcagccuugaccucccaggcu

SEQ ID NO: 299290 - RNA, 24 nt, Human
cugcuugaacccaggagguggagg

SEQ ID NO: 299291 - RNA, 19 nt, Human
gacugggugcgguggcuca

SEQ ID NO: 299292 - RNA, 23 nt, Human
gagaucacgcuauuguacuccag

SEQ ID NO: 299293 - RNA, 21 nt, Human
gagguggagguugcagugagc

SEQ ID NO: 299294 - RNA, 22 nt, Human
gagguugcagugagccgagauc

SEQ ID NO: 299295 - RNA, 23 nt, Human
gaucaucugaagacaauuuccaa

SEQ ID NO: 299296 - RNA, 21 nt, Human
gcgguggcucaccccuuuaaa

SEQ ID NO: 299297 - RNA, 19 nt, Human
gcuauuguacuccagccug

SEQ ID NO: 299298 - RNA, 24 nt, Human
gcuauuguacuccagccuggguga

SEQ ID NO: 299299 - RNA, 22 nt, Human
ggagaacugcuugaacccagga

SEQ ID NO: 299300 - RNA, 18 nt, Human
ggagguugcagugagccg

SEQ ID NO: 299301 - RNA, 20 nt, Human
ggagguugcagugagccgag

SEQ ID NO: 299302 - RNA, 22 nt, Human
ggagguugcagugagccgagau

SEQ ID NO: 299303 - RNA, 23 nt, Human
ggagguugcagugagccgagauc

SEQ ID NO: 299304 - RNA, 24 nt, Human
ggagguugcagugagccgagauca

SEQ ID NO: 299305 - RNA, 20 nt, Human
ggcgccggaaggaauggagc

SEQ ID NO: 299306 - RNA, 21 nt, Human
ggcucaagagauccuccugac

SEQ ID NO: 299307 - RNA, 22 nt, Human
gggaaaaaaaaaaucuaaccac

SEQ ID NO: 299308 - RNA, 24 nt, Human
guacuccagccugggugacagagc

SEQ ID NO: 299309 - RNA, 24 nt, Human
gucucugucgcccagguuggagug

SEQ ID NO: 299310 - RNA, 19 nt, Human
guugcagugagccgagauc

SEQ ID NO: 299311 - RNA, 23 nt, Human
uaaaaaaaggaaaaaaacgcaaa

SEQ ID NO: 299312 - RNA, 22 nt, Human
uaaaaauauugaaaaaagacug

SEQ ID NO: 299313 - RNA, 19 nt, Human
uaaaagggacuacaaagaa

SEQ ID NO: 299314 - RNA, 23 nt, Human
uaaaagggacuacaaagaacagc

SEQ ID NO: 299315 - RNA, 24 nt, Human
uaaagagacugguuaaauaaauua

SEQ ID NO: 299316 - RNA, 23 nt, Human
uaaaguuaaaaaaaggaaaaaaa

SEQ ID NO: 299317 - RNA, 24 nt, Human
uaaaguuaaaaaaaggaaaaaaac

SEQ ID NO: 299318 - RNA, 24 nt, Human
uaaauauaauuuacaaucauuuga

SEQ ID NO: 299319 - RNA, 23 nt, Human
uaacaauacuucccugcuucuaa

SEQ ID NO: 299320 - RNA, 21 nt, Human
uaacagagaugucacaccaca

SEQ ID NO: 299321 - RNA, 26 nt, Human
uaagcuagacuaacaauacuucccug

SEQ ID NO: 299322 - RNA, 21 nt, Human
uacaaagaacagcugaaaagc

SEQ ID NO: 299323 - RNA, 21 nt, Human
uacaaagauuuccagccccac

SEQ ID NO: 299324 - RNA, 21 nt, Human
uacagaauuacacucucagac

SEQ ID NO: 299325 - RNA, 20 nt, Human
uacauagaaaaaaaggcuau

SEQ ID NO: 299326 - RNA, 22 nt, Human
uacuccagccugggugacagag

SEQ ID NO: 299327 - RNA, 24 nt, Human
uacuccagccugggugacagagcg

SEQ ID NO: 299328 - RNA, 18 nt, Human
uacugaauaugaauuacu

SEQ ID NO: 299329 - RNA, 24 nt, Human
uauagaacaguauguucagaauga

SEQ ID NO: 299330 - RNA, 21 nt, Human
uauucagcauucugauuuaau

SEQ ID NO: 299331 - RNA, 21 nt, Human
ucaaaagccuggcuuccuguc

SEQ ID NO: 299332 - RNA, 19 nt, Human
ucacugcagccuugaccuc

SEQ ID NO: 299333 - RNA, 20 nt, Human
ucacugcagccuugaccucc

SEQ ID NO: 299334 - RNA, 24 nt, Human
ucacugcagccuugaccucccagg

SEQ ID NO: 299335 - RNA, 24 nt, Human
ucaguuuuccucuacugaauauga

SEQ ID NO: 299336 - RNA, 28 nt, Human
ucaucugaagacaauuuccaagacccug

SEQ ID NO: 299337 - RNA, 23 nt, Human
uccagccugggugacagagcgag

SEQ ID NO: 299338 - RNA, 24 nt, Human
uccagccugggugacagagcgaga

SEQ ID NO: 299339 - RNA, 23 nt, Human
ucccaaguagcugggacuagagg

SEQ ID NO: 299340 - RNA, 18 nt, Human
ucccaggcucaagagauc

SEQ ID NO: 299341 - RNA, 22 nt, Human
uccugaaaagccaggaaaauca

SEQ ID NO: 299342 - RNA, 20 nt, Human
uccuuugggccagcagcucc

SEQ ID NO: 299343 - RNA, 22 nt, Human
ucgcccagguuggagugcaauc

SEQ ID NO: 299344 - RNA, 20 nt, Human
ucgcuccggauccuuugggc

SEQ ID NO: 299345 - RNA, 20 nt, Human
ucuaagaucaucugaagaca

SEQ ID NO: 299346 - RNA, 19 nt, Human
ucucugucgcccagguugg

SEQ ID NO: 299347 - RNA, 19 nt, Human
ucucugucgcccagguugg

SEQ ID NO: 299348 - RNA, 24 nt, Human
ucugucgcccagguuggagugcaa

SEQ ID NO: 299349 - RNA, 19 nt, Human
ucuuucuuuuuaagaagac

SEQ ID NO: 299350 - RNA, 21 nt, Human
ugaaaagccagaagacaaagg

SEQ ID NO: 299351 - RNA, 24 nt, Human
ugaaaagccagaagacaaaggaac

SEQ ID NO: 299352 - RNA, 19 nt, Human
ugaaaagccaggaaaauca

SEQ ID NO: 299353 - RNA, 23 nt, Human
ugaauuacuuuuccaauaugaaa

SEQ ID NO: 299354 - RNA, 25 nt, Human
ugaccucccaggcucaagagauccu

SEQ ID NO: 299355 - RNA, 22 nt, Human
ugacuaagccucccaaguagcu

SEQ ID NO: 299356 - RNA, 22 nt, Human
ugagccgagaucacgcuauugu

SEQ ID NO: 299357 - RNA, 24 nt, Human
ugaggcgggagaacugcuugaacc

SEQ ID NO: 299358 - RNA, 28 nt, Human
ugauauauuauuagcugaccauacuaua

SEQ ID NO: 299359 - RNA, 23 nt, Human
ugauuaagaaaaugcucuauuua

SEQ ID NO: 299360 - RNA, 23 nt, Human
uggagugcaaucaugguucacug

SEQ ID NO: 299361 - RNA, 18 nt, Human
uggcaggaaacagaccaa

SEQ ID NO: 299362 - RNA, 19 nt, Human
uggcaggaaacagaccaaa

SEQ ID NO: 299363 - RNA, 19 nt, Human
ugggccagcagcuccgggc

SEQ ID NO: 299364 - RNA, 24 nt, Human
ugguucacugcagccuugaccucc

SEQ ID NO: 299365 - RNA, 20 nt, Human
uguacuccagccugggugac

SEQ ID NO: 299366 - RNA, 22 nt, Human
uguacuccagccugggugacag

SEQ ID NO: 299367 - RNA, 24 nt, Human
uguacuccagccugggugacagag

SEQ ID NO: 299368 - RNA, 24 nt, Human
uuagucaaaaaaaaaaaaaaugca

SEQ ID NO: 299369 - RNA, 24 nt, Human
uucacugcagccuugaccucccag

SEQ ID NO: 299370 - RNA, 19 nt, Human
uuccagccccacuccagcu

SEQ ID NO: 299371 - RNA, 20 nt, Human
uuccugaaaagccaggaaaa

SEQ ID NO: 299372 - RNA, 24 nt, Human
uugaacccaggagguggagguugc

SEQ ID NO: 299373 - RNA, 19 nt, Human
uugagacagggucucuguc

SEQ ID NO: 299374 - RNA, 18 nt, Human
uugcagugagccgagauc

SEQ ID NO: 299375 - RNA, 20 nt, Human
uugcagugagccgagaucac

SEQ ID NO: 299376 - RNA, 21 nt, Human
uugcagugagccgagaucacg

SEQ ID NO: 299377 - RNA, 19 nt, Human
uuuauacaacuguaaguca

SEQ ID NO: 299378 - RNA, 21 nt, Human
uuuccagccccacuccagcuc

SEQ ID NO: 299379 - RNA, 23 nt, Human
uuuuaugcauaauaaaagggacu

SEQ ID NO: 299380 - RNA, 21 nt, Human
aaaaauggcagaagcacuggc

SEQ ID NO: 299381 - RNA, 25 nt, Human
aauacaguuacagucaguuucagca

SEQ ID NO: 299382 - RNA, 21 nt, Human
acucugacagauuugcuauug

SEQ ID NO: 299383 - RNA, 18 nt, Human
agaguuacuagcucaaaa

SEQ ID NO: 299384 - RNA, 21 nt, Human
agcuagaacaagcauuccuca

SEQ ID NO: 299385 - RNA, 22 nt, Human
aggagucaauuaaaauggccca

SEQ ID NO: 299386 - RNA, 18 nt, Human
agucaguuucagcagcua

SEQ ID NO: 299387 - RNA, 21 nt, Human
caaagcaagaaaaauuaaaaa

SEQ ID NO: 299388 - RNA, 23 nt, Human
cagcuagaacaagcauuccucag

SEQ ID NO: 299389 - RNA, 23 nt, Human
cauauauccacugcucaccaccc

SEQ ID NO: 299390 - RNA, 18 nt, Human
ccaaauuguggagggaaa

SEQ ID NO: 299391 - RNA, 22 nt, Human
ggagggaaaaaaauggcagaag

SEQ ID NO: 299392 - RNA, 21 nt, Human
uaagacaauacaguuacaguc

SEQ ID NO: 299393 - RNA, 18 nt, Human
uacaaagcugagggaaga

SEQ ID NO: 299394 - RNA, 21 nt, Human
uauugcacagucauuacgaca

SEQ ID NO: 299395 - RNA, 24 nt, Human
ucaaagcaagaaaaauuaaaaacu

SEQ ID NO: 299396 - RNA, 25 nt, Human
ucagcagcuagaacaagccgggguc

SEQ ID NO: 299397 - RNA, 23 nt, Human
ucugcacauguauugcacaguca

SEQ ID NO: 299398 - RNA, 21 nt, Human
ugacaggcauauauccacugc

SEQ ID NO: 299399 - RNA, 19 nt, Human
ugcuauugacuuugacagg

SEQ ID NO: 299400 - RNA, 20 nt, Human
uggagggaaaaaaauggcag

SEQ ID NO: 299401 - RNA, 24 nt, Human
uggccaaaaacucugauaaaaacu

SEQ ID NO: 299402 - RNA, 23 nt, Human
uucaaagcaagaaaaauuaaaaa

SEQ ID NO: 299403 - RNA, 18 nt, Human
uuuguuuuugcuuccuuu

SEQ ID NO: 299404 - RNA, 22 nt, Human
uuuuuuuuuuuuuuuuguuuuu

SEQ ID NO: 299405 - RNA, 20 nt, Human
aacacuuuggacucaaugaa

SEQ ID NO: 299406 - RNA, 19 nt, Human
aaccccaaaucucuggcau

SEQ ID NO: 299407 - RNA, 20 nt, Human
aaggaauccacuccccuccc

SEQ ID NO: 299408 - RNA, 20 nt, Human
accccauucccagauccuag

SEQ ID NO: 299409 - RNA, 26 nt, Human
acccccaaaauguauugcuuagaaac

SEQ ID NO: 299410 - RNA, 21 nt, Human
agaggcugagggaugggcaca

SEQ ID NO: 299411 - RNA, 21 nt, Human
agccugaaguuccccagucuu

SEQ ID NO: 299412 - RNA, 21 nt, Human
aggaugggggaggucccaggg

SEQ ID NO: 299413 - RNA, 19 nt, Human
agggaugggcacagugacc

SEQ ID NO: 299414 - RNA, 19 nt, Human
agggcucugaaaaccccca

SEQ ID NO: 299415 - RNA, 19 nt, Human
auccuagaaagguaccaug

SEQ ID NO: 299416 - RNA, 18 nt, Human
aucucugacccuucccca

SEQ ID NO: 299417 - RNA, 19 nt, Human
caccccauucccagauccu

SEQ ID NO: 299418 - RNA, 18 nt, Human
cacuccccuccccacaca

SEQ ID NO: 299419 - RNA, 21 nt, Human
cagaggcugagggaugggcac

SEQ ID NO: 299420 - RNA, 19 nt, Human
caggaagcuccccgcuccc

SEQ ID NO: 299421 - RNA, 28 nt, Human
cagugggugucagguggggaggggcccu

SEQ ID NO: 299422 - RNA, 25 nt, Human
caucucugacccuuccccaaggccc

SEQ ID NO: 299423 - RNA, 22 nt, Human
cccaaccccaaaucucuggcau

SEQ ID NO: 299424 - RNA, 21 nt, Human
cccagaccugccagcuaagau

SEQ ID NO: 299425 - RNA, 19 nt, Human
cccaggggaggaaaagggg

SEQ ID NO: 299426 - RNA, 19 nt, Human
ccuauuccagcccuuccca

SEQ ID NO: 299427 - RNA, 26 nt, Human
ccugggaagccuccaggaagcucccc

SEQ ID NO: 299428 - RNA, 18 nt, Human
ccugggccagccccaggg

SEQ ID NO: 299429 - RNA, 19 nt, Human
cuccaccccauucccagau

SEQ ID NO: 299430 - RNA, 19 nt, Human
cucccuggcagccaccugg

SEQ ID NO: 299431 - RNA, 21 nt, Human
cuggcaucucugacccuuccc

SEQ ID NO: 299432 - RNA, 19 nt, Human
cuggccaugaagagaaucc

SEQ ID NO: 299433 - RNA, 19 nt, Human
cuuuccccaaccccaaauc

SEQ ID NO: 299434 - RNA, 19 nt, Human
gacccuuccccaaggcccu

SEQ ID NO: 299435 - RNA, 20 nt, Human
gaccugggccagccccaggg

SEQ ID NO: 299436 - RNA, 18 nt, Human
gccaugaagagaauccag

SEQ ID NO: 299437 - RNA, 23 nt, Human
ggaaaaggggcacccagaccugc

SEQ ID NO: 299438 - RNA, 20 nt, Human
ggaacauuaaagugcacccc

SEQ ID NO: 299439 - RNA, 20 nt, Human
ggaagcuccccgcucccugg

SEQ ID NO: 299440 - RNA, 20 nt, Human
ggagccugaaguuccccagu

SEQ ID NO: 299441 - RNA, 18 nt, Human
ggcaucucugacccuucc

SEQ ID NO: 299442 - RNA, 18 nt, Human
ggcccuuuccccaacccc

SEQ ID NO: 299443 - RNA, 19 nt, Human
gggguggggggcugaggga

SEQ ID NO: 299444 - RNA, 20 nt, Human
uagaaagguaccaugcccug

SEQ ID NO: 299445 - RNA, 18 nt, Human
uauuccagcccuucccag

SEQ ID NO: 299446 - RNA, 19 nt, Human
uccaccccauucccagauc

SEQ ID NO: 299447 - RNA, 20 nt, Human
uccccaaccccaaaucucug

SEQ ID NO: 299448 - RNA, 23 nt, Human
ucccuuggagcagaugggggagc

SEQ ID NO: 299449 - RNA, 20 nt, Human
uccucuccaccccauuccca

SEQ ID NO: 299450 - RNA, 23 nt, Human
ucucugacccuuccccaaggccc

SEQ ID NO: 299451 - RNA, 19 nt, Human
ugaagagaauccagaggcu

SEQ ID NO: 299452 - RNA, 20 nt, Human
ugaagagaauccagaggcug

SEQ ID NO: 299453 - RNA, 24 nt, Human
ugaaggaauccacuccccucccca

SEQ ID NO: 299454 - RNA, 18 nt, Human
ugacaucaaacacuuugg

SEQ ID NO: 299455 - RNA, 22 nt, Human
uggaggcaaaaaggauggggga

SEQ ID NO: 299456 - RNA, 23 nt, Human
uggcaucucugacccuuccccaa

SEQ ID NO: 299457 - RNA, 21 nt, Human
uggguuguuucuuccacgacc

SEQ ID NO: 299458 - RNA, 21 nt, Human
uguccucuccaccccauuccc

SEQ ID NO: 299459 - RNA, 25 nt, Human
aaaaaaagguaaagaaugaacaaaa

SEQ ID NO: 299460 - RNA, 27 nt, Human
aaaaagguaaagaaugaacaaaaagaa

SEQ ID NO: 299461 - RNA, 23 nt, Human
aaaagcccagaaggaggccccac

SEQ ID NO: 299462 - RNA, 19 nt, Human
aaacaacagcggugagucc

SEQ ID NO: 299463 - RNA, 22 nt, Human
aaacaagaggagaagcagcuag

SEQ ID NO: 299464 - RNA, 20 nt, Human
aaagaaaaaaagguaaagaa

SEQ ID NO: 299465 - RNA, 20 nt, Human
aaagaaaacagaaaaaaacc

SEQ ID NO: 299466 - RNA, 21 nt, Human
aaagaaaacagaaaaaaaccc

SEQ ID NO: 299467 - RNA, 18 nt, Human
aacagcggugaguccacc

SEQ ID NO: 299468 - RNA, 22 nt, Human
aagaaaacagaaaaaaacccca

SEQ ID NO: 299469 - RNA, 19 nt, Human
aagaaaaggcccacuccga

SEQ ID NO: 299470 - RNA, 20 nt, Human
aagaaagaaaaggcccacuc

SEQ ID NO: 299471 - RNA, 23 nt, Human
aagagucuuugaggcagaggagg

SEQ ID NO: 299472 - RNA, 23 nt, Human
aagcagcuuacagagguccugug

SEQ ID NO: 299473 - RNA, 19 nt, Human
aaggaggccccacaccugc

SEQ ID NO: 299474 - RNA, 20 nt, Human
aaggggaaaaaaagaaaaca

SEQ ID NO: 299475 - RNA, 19 nt, Human
aaggugcaggcggccacug

SEQ ID NO: 299476 - RNA, 19 nt, Human
aagugaacccaaaguggaa

SEQ ID NO: 299477 - RNA, 20 nt, Human
acaaaaaagaaagaaagaaa

SEQ ID NO: 299478 - RNA, 18 nt, Human
acaaccacuggggagggg

SEQ ID NO: 299479 - RNA, 20 nt, Human
acacgacuucccauaaaaca

SEQ ID NO: 299480 - RNA, 22 nt, Human
accucagccccucauuccccag

SEQ ID NO: 299481 - RNA, 21 nt, Human
acgcucccuuccauaccaccc

SEQ ID NO: 299482 - RNA, 23 nt, Human
agaaaagaaaaaaagguaaagaa

SEQ ID NO: 299483 - RNA, 18 nt, Human
agaaguggggcggggggc

SEQ ID NO: 299484 - RNA, 21 nt, Human
agcggugaguccacccuuuuc

SEQ ID NO: 299485 - RNA, 22 nt, Human
agcuagaaguggggcggggggc

SEQ ID NO: 299486 - RNA, 23 nt, Human
aggagaaauuauuuuggugccag

SEQ ID NO: 299487 - RNA, 18 nt, Human
aggaggccccacaccugc

SEQ ID NO: 299488 - RNA, 23 nt, Human
aggcagaaacaagaggagaagca

SEQ ID NO: 299489 - RNA, 19 nt, Human
aggcagaggaggagguggu

SEQ ID NO: 299490 - RNA, 23 nt, Human
agggauggaaggcuagggaggaa

SEQ ID NO: 299491 - RNA, 21 nt, Human
aggggaacagggacagagguc

SEQ ID NO: 299492 - RNA, 23 nt, Human
aggggaggagggagagagggggc

SEQ ID NO: 299493 - RNA, 21 nt, Human
agguagagacuccccaggcgg

SEQ ID NO: 299494 - RNA, 22 nt, Human
agguagagacuccccaggcggc

SEQ ID NO: 299495 - RNA, 23 nt, Human
agguccugugcucacccugggga

SEQ ID NO: 299496 - RNA, 18 nt, Human
aggugggguccggaggac

SEQ ID NO: 299497 - RNA, 21 nt, Human
aguauguacaaaaaagaaaga

SEQ ID NO: 299498 - RNA, 20 nt, Human
agugggggaaggugaggggg

SEQ ID NO: 299499 - RNA, 24 nt, Human
auggagaguggaggaggucuaggg

SEQ ID NO: 299500 - RNA, 20 nt, Human
caaaaaaaggccccgugggu

SEQ ID NO: 299501 - RNA, 18 nt, Human
caaaccagaggggggcug

SEQ ID NO: 299502 - RNA, 23 nt, Human
caaaguggacaauacacaagcag

SEQ ID NO: 299503 - RNA, 20 nt, Human
caagagucuuugaggcagag

SEQ ID NO: 299504 - RNA, 21 nt, Human
caccuccaaaaaaaggccccg

SEQ ID NO: 299505 - RNA, 20 nt, Human
cacugcaacccccuugccug

SEQ ID NO: 299506 - RNA, 23 nt, Human
cacugccccaaaaaacggagaaa

SEQ ID NO: 299507 - RNA, 19 nt, Human
cacuggggagggggugccg

SEQ ID NO: 299508 - RNA, 23 nt, Human
cacuggggagggggugccgggca

SEQ ID NO: 299509 - RNA, 23 nt, Human
cagaaaaaaaccccacuuuucgu

SEQ ID NO: 299510 - RNA, 21 nt, Human
cagcagcccugguuacauggc

SEQ ID NO: 299511 - RNA, 23 nt, Human
cagcagcccugguuacauggccc

SEQ ID NO: 299512 - RNA, 22 nt, Human
cagcaggaacagagacucuccc

SEQ ID NO: 299513 - RNA, 18 nt, Human
cagcagggcugggggcuc

SEQ ID NO: 299514 - RNA, 22 nt, Human
cagcagggcugggggcucccuu

SEQ ID NO: 299515 - RNA, 23 nt, Human
cagcccccaccuccaaaaaaagg

SEQ ID NO: 299516 - RNA, 25 nt, Human
cagcccugggccccaacgggccccc

SEQ ID NO: 299517 - RNA, 19 nt, Human
caggaacagagacucuccc

SEQ ID NO: 299518 - RNA, 19 nt, Human
caggauggggguucugggc

SEQ ID NO: 299519 - RNA, 20 nt, Human
caggauggggguucugggcg

SEQ ID NO: 299520 - RNA, 18 nt, Human
cagucccccauggcuugg

SEQ ID NO: 299521 - RNA, 22 nt, Human
cauaccacccccguauccuaaa

SEQ ID NO: 299522 - RNA, 19 nt, Human
ccacagugacugccccccc

SEQ ID NO: 299523 - RNA, 21 nt, Human
ccacuggggagggggugccgg

SEQ ID NO: 299524 - RNA, 18 nt, Human
ccagaaggaggccccaca

SEQ ID NO: 299525 - RNA, 22 nt, Human
ccagcagggcugggggcucccu

SEQ ID NO: 299526 - RNA, 24 nt, Human
ccagcagggcugggggcucccuuc

SEQ ID NO: 299527 - RNA, 21 nt, Human
ccagcugcagaaccaggccga

SEQ ID NO: 299528 - RNA, 22 nt, Human
cccaaccccuaggaugacacga

SEQ ID NO: 299529 - RNA, 22 nt, Human
cccacagugacugccccccacc

SEQ ID NO: 299530 - RNA, 27 nt, Human
cccagcagcagcccugguuacauggcc

SEQ ID NO: 299531 - RNA, 23 nt, Human
ccccacccuggccccagccccgc

SEQ ID NO: 299532 - RNA, 21 nt, Human
ccccagcccccaccuccaaaa

SEQ ID NO: 299533 - RNA, 19 nt, Human
ccccagccccgccuagaau

SEQ ID NO: 299534 - RNA, 24 nt, Human
ccccccgcggcaguggguggaggc

SEQ ID NO: 299535 - RNA, 20 nt, Human
ccccuaggaugacacgacuu

SEQ ID NO: 299536 - RNA, 22 nt, Human
ccccuggcuccuggagaagggg

SEQ ID NO: 299537 - RNA, 20 nt, Human
cccucauuccccagccccca

SEQ ID NO: 299538 - RNA, 20 nt, Human
cccugggccccaacgggccc

SEQ ID NO: 299539 - RNA, 27 nt, Human
ccgccuagaauggcuauuccugaccac

SEQ ID NO: 299540 - RNA, 21 nt, Human
ccgcgcucccagcagcagccc

SEQ ID NO: 299541 - RNA, 21 nt, Human
ccuccaaaaaaaggccccgug

SEQ ID NO: 299542 - RNA, 19 nt, Human
ccuccuucccuaccuuccc

SEQ ID NO: 299543 - RNA, 27 nt, Human
ccuggccccagccccgccuagaauggc

SEQ ID NO: 299544 - RNA, 26 nt, Human
ccuguggccgugggaauuauuaaggc

SEQ ID NO: 299545 - RNA, 19 nt, Human
cgccuggcccugccucauc

SEQ ID NO: 299546 - RNA, 20 nt, Human
cgcgcucccagcagcagccc

SEQ ID NO: 299547 - RNA, 19 nt, Human
cgcggaggggccugggccg

SEQ ID NO: 299548 - RNA, 20 nt, Human
cuagaaguggggcggggggc

SEQ ID NO: 299549 - RNA, 21 nt, Human
cuagggcccuccucaaauccc

SEQ ID NO: 299550 - RNA, 20 nt, Human
cucagaauuggguagggggc

SEQ ID NO: 299551 - RNA, 24 nt, Human
cugcccaggaaugagaaugagggu

SEQ ID NO: 299552 - RNA, 22 nt, Human
cuggccccagccccgccuagaa

SEQ ID NO: 299553 - RNA, 24 nt, Human
cuguggccgugggaauuauuaagg

SEQ ID NO: 299554 - RNA, 24 nt, Human
cuuagcccgccuggggcugcugca

SEQ ID NO: 299555 - RNA, 20 nt, Human
cuuugaggcagaggaggagg

SEQ ID NO: 299556 - RNA, 21 nt, Human
gaaaacagaaaaaaaccccac

SEQ ID NO: 299557 - RNA, 25 nt, Human
gaacagagacucucccaacgggaga

SEQ ID NO: 299558 - RNA, 23 nt, Human
gaaccaggccgagggcgagggga

SEQ ID NO: 299559 - RNA, 21 nt, Human
gaaggaggccccacaccugcu

SEQ ID NO: 299560 - RNA, 24 nt, Human
gaggccccacaccugcuugggccc

SEQ ID NO: 299561 - RNA, 18 nt, Human
gagggauggaaggcuagg

SEQ ID NO: 299562 - RNA, 18 nt, Human
gagggauuuggaagugga

SEQ ID NO: 299563 - RNA, 19 nt, Human
gaggggaggagggagagag

SEQ ID NO: 299564 - RNA, 18 nt, Human
gaguggaggaggucuagg

SEQ ID NO: 299565 - RNA, 19 nt, Human
gcccagaaggaggccccac

SEQ ID NO: 299566 - RNA, 25 nt, Human
gcccagccccaaccccuaggaugac

SEQ ID NO: 299567 - RNA, 22 nt, Human
gcccugggccccaacgggcccc

SEQ ID NO: 299568 - RNA, 23 nt, Human
gccuagaauggcuauuccugacc

SEQ ID NO: 299569 - RNA, 19 nt, Human
gccuggggcugcugcacac

SEQ ID NO: 299570 - RNA, 21 nt, Human
gcuagggaggaacugggggcu

SEQ ID NO: 299571 - RNA, 21 nt, Human
ggaaaaaaagaaaacagaaaa

SEQ ID NO: 299572 - RNA, 23 nt, Human
ggaaaaaaagaaaacagaaaaaa

SEQ ID NO: 299573 - RNA, 18 nt, Human
ggaacagagacucuccca

SEQ ID NO: 299574 - RNA, 22 nt, Human
ggaaccaggaacaggagcaucu

SEQ ID NO: 299575 - RNA, 19 nt, Human
ggaaggaagggcugcccag

SEQ ID NO: 299576 - RNA, 18 nt, Human
ggacaggcucugcccagc

SEQ ID NO: 299577 - RNA, 22 nt, Human
ggagaaggggggaggggacagg

SEQ ID NO: 299578 - RNA, 19 nt, Human
ggagaccuccuucccuacc

SEQ ID NO: 299579 - RNA, 22 nt, Human
ggagaggaggcagcaaaccaga

SEQ ID NO: 299580 - RNA, 22 nt, Human
ggaggagggagagagggggcuu

SEQ ID NO: 299581 - RNA, 25 nt, Human
ggaggccccacaccugcuugggccc

SEQ ID NO: 299582 - RNA, 25 nt, Human
ggaucagagccacugccccaaaaaa

SEQ ID NO: 299583 - RNA, 18 nt, Human
ggcaaaagguaggggggc

SEQ ID NO: 299584 - RNA, 19 nt, Human
ggcagaggaggaggugguc

SEQ ID NO: 299585 - RNA, 20 nt, Human
ggcagggcaagggucccagg

SEQ ID NO: 299586 - RNA, 18 nt, Human
ggcagugggggaagguga

SEQ ID NO: 299587 - RNA, 21 nt, Human
ggcgaggggaggagggagaga

SEQ ID NO: 299588 - RNA, 25 nt, Human
ggcuagggaggaacugggggcuaca

SEQ ID NO: 299589 - RNA, 18 nt, Human
gggagagggagaggcuag

SEQ ID NO: 299590 - RNA, 20 nt, Human
gggagagggagaggcuaggc

SEQ ID NO: 299591 - RNA, 24 nt, Human
gggaggggacaggcucugcccagc

SEQ ID NO: 299592 - RNA, 22 nt, Human
gggauggaaggcuagggaggaa

SEQ ID NO: 299593 - RNA, 26 nt, Human
gggcaaaagguaggggggcugugauc

SEQ ID NO: 299594 - RNA, 20 nt, Human
gggcuggagcugggaccucc

SEQ ID NO: 299595 - RNA, 18 nt, Human
gggcugggggcucccuuc

SEQ ID NO: 299596 - RNA, 22 nt, Human
ggggagagggagaggcuaggca

SEQ ID NO: 299597 - RNA, 21 nt, Human
ggggagggggugccgggcagg

SEQ ID NO: 299598 - RNA, 18 nt, Human
ggggcggggggcgggggg

SEQ ID NO: 299599 - RNA, 19 nt, Human
ggggcggggggcggggggg

SEQ ID NO: 299600 - RNA, 25 nt, Human
ggggggugcggccaggauggggguu

SEQ ID NO: 299601 - RNA, 20 nt, Human
ggggguccgugcccauggga

SEQ ID NO: 299602 - RNA, 19 nt, Human
gggguccgugcccauggga

SEQ ID NO: 299603 - RNA, 18 nt, Human
ggugccaggguggaagga

SEQ ID NO: 299604 - RNA, 24 nt, Human
guagagacuccccaggcggcugga

SEQ ID NO: 299605 - RNA, 21 nt, Human
guauguacaaaaaagaaagaa

SEQ ID NO: 299606 - RNA, 19 nt, Human
gugugagugcgggguuacc

SEQ ID NO: 299607 - RNA, 20 nt, Human
guucugggcgccuggcccug

SEQ ID NO: 299608 - RNA, 21 nt, Human
uaaaacaacagcggugagucc

SEQ ID NO: 299609 - RNA, 20 nt, Human
uaaaauccuuccgggaccuc

SEQ ID NO: 299610 - RNA, 26 nt, Human
uaaagugaacagcucccccagcuccc

SEQ ID NO: 299611 - RNA, 24 nt, Human
uacaaaauaugaacccuguacaga

SEQ ID NO: 299612 - RNA, 22 nt, Human
uacaguaccgugugcucagaau

SEQ ID NO: 299613 - RNA, 19 nt, Human
uagaaguggggcggggggc

SEQ ID NO: 299614 - RNA, 19 nt, Human
uagaggggagaggaggcag

SEQ ID NO: 299615 - RNA, 25 nt, Human
uagucaguaucgccaggaguaucgc

SEQ ID NO: 299616 - RNA, 19 nt, Human
uauugcucaggggacuagc

SEQ ID NO: 299617 - RNA, 20 nt, Human
uauugcucaggggacuagcu

SEQ ID NO: 299618 - RNA, 20 nt, Human
ucauccaaggugcaggcggc

SEQ ID NO: 299619 - RNA, 26 nt, Human
ucauuccccagcccccaccuccaaaa

SEQ ID NO: 299620 - RNA, 18 nt, Human
uccacccuuuucccagga

SEQ ID NO: 299621 - RNA, 21 nt, Human
uccacccuuuucccaggacua

SEQ ID NO: 299622 - RNA, 20 nt, Human
uccccagcccccaccuccaa

SEQ ID NO: 299623 - RNA, 25 nt, Human
uccccagcccccaccuccaaaaaaa

SEQ ID NO: 299624 - RNA, 24 nt, Human
ucccccagcucccugacuuucuag

SEQ ID NO: 299625 - RNA, 21 nt, Human
ucccuuuuugccuccguagaa

SEQ ID NO: 299626 - RNA, 22 nt, Human
uccuagggcaaaagguaggggg

SEQ ID NO: 299627 - RNA, 21 nt, Human
uccuggagaaggggggagggg

SEQ ID NO: 299628 - RNA, 20 nt, Human
ucgccggcugggacaaaaac

SEQ ID NO: 299629 - RNA, 21 nt, Human
ucuccagucacccccuggcuc

SEQ ID NO: 299630 - RNA, 24 nt, Human
ucucccaacgggagaccuccuucc

SEQ ID NO: 299631 - RNA, 26 nt, Human
ugacugaucgucaaaguggacaauac

SEQ ID NO: 299632 - RNA, 20 nt, Human
ugagccuggaacuugggggg

SEQ ID NO: 299633 - RNA, 18 nt, Human
ugaggcagaggaggaggu

SEQ ID NO: 299634 - RNA, 20 nt, Human
ugaggcagaggaggaggugg

SEQ ID NO: 299635 - RNA, 21 nt, Human
ugaggcagaggaggagguggu

SEQ ID NO: 299636 - RNA, 19 nt, Human
ugcccaggaaugagaauga

SEQ ID NO: 299637 - RNA, 21 nt, Human
ugccccaaaaaacggagaaaa

SEQ ID NO: 299638 - RNA, 25 nt, Human
ugccccaaaaaacggagaaaauuca

SEQ ID NO: 299639 - RNA, 24 nt, Human
ugcggccaggauggggguucuggg

SEQ ID NO: 299640 - RNA, 22 nt, Human
uggaaaggggggugcggccagg

SEQ ID NO: 299641 - RNA, 26 nt, Human
uggaaaggggggugcggccaggaugg

SEQ ID NO: 299642 - RNA, 19 nt, Human
uggaagacugagccuggaa

SEQ ID NO: 299643 - RNA, 25 nt, Human
uggaagacugagccuggaacuuggg

SEQ ID NO: 299644 - RNA, 20 nt, Human
uggaaggaagggcugcccag

SEQ ID NO: 299645 - RNA, 20 nt, Human
uggaaggugggguccggagg

SEQ ID NO: 299646 - RNA, 20 nt, Human
uggacagagggauggaaggc

SEQ ID NO: 299647 - RNA, 24 nt, Human
uggagaguggaggaggucuagggc

SEQ ID NO: 299648 - RNA, 27 nt, Human
ugggaggggggcagggcaagggucccc

SEQ ID NO: 299649 - RNA, 24 nt, Human
ugggcgccuggcccugccucaucc

SEQ ID NO: 299650 - RNA, 22 nt, Human
ugggcuuggggagucccggggu

SEQ ID NO: 299651 - RNA, 21 nt, Human
uggggagaggagcccugcuug

SEQ ID NO: 299652 - RNA, 24 nt, Human
uggggagaggagcccugcuugggg

SEQ ID NO: 299653 - RNA, 20 nt, Human
ugggggaaggugaggggagg

SEQ ID NO: 299654 - RNA, 21 nt, Human
ugggggcagggggaaagggga

SEQ ID NO: 299655 - RNA, 20 nt, Human
ugggguggacagagggaugg

SEQ ID NO: 299656 - RNA, 19 nt, Human
uggguaguggaagggggag

SEQ ID NO: 299657 - RNA, 20 nt, Human
uggguggaggcggugggggg

SEQ ID NO: 299658 - RNA, 23 nt, Human
ugggugggggcagggggaaaggg

SEQ ID NO: 299659 - RNA, 24 nt, Human
uguacagacagcaucaagggagug

SEQ ID NO: 299660 - RNA, 20 nt, Human
uuccaaacagucccccaugg

SEQ ID NO: 299661 - RNA, 19 nt, Human
uucuuucuuuuuuuuuucu

SEQ ID NO: 299662 - RNA, 21 nt, Human
uugaggcagaggaggaggugg

SEQ ID NO: 299663 - RNA, 21 nt, Human
uugaggcagaggaggaggugg

SEQ ID NO: 299664 - RNA, 22 nt, Human
uuggagacaagaucgaaggauu

SEQ ID NO: 299665 - RNA, 25 nt, Human
uuggagacuuagcccgccuggggcu

SEQ ID NO: 299666 - RNA, 22 nt, Human
uuggugccaggguggaaggaag

SEQ ID NO: 299667 - RNA, 22 nt, Human
uuuuuuucuuuuuuuguucuuu

SEQ ID NO: 299668 - RNA, 20 nt, Human
uuuuuuuuuucuuuuuuugg

SEQ ID NO: 299669 - RNA, 22 nt, Human
aaaaacuacaucccauugcccc

SEQ ID NO: 299670 - RNA, 19 nt, Human
aaaacuaaaggcagaagca

SEQ ID NO: 299671 - RNA, 19 nt, Human
aaaauucgggugaaaacug

SEQ ID NO: 299672 - RNA, 21 nt, Human
aaacaggaauggagguguuag

SEQ ID NO: 299673 - RNA, 24 nt, Human
aaacuaaaggcagaagcaccaaag

SEQ ID NO: 299674 - RNA, 26 nt, Human
aaacuacaucccauugccccugcccc

SEQ ID NO: 299675 - RNA, 23 nt, Human
aaacuccagguauucaacaggca

SEQ ID NO: 299676 - RNA, 21 nt, Human
aaagggcagacccuuugaaca

SEQ ID NO: 299677 - RNA, 21 nt, Human
aaagggcagacccuuugaaca

SEQ ID NO: 299678 - RNA, 25 nt, Human
aagcucaucugcauaaauguguccu

SEQ ID NO: 299679 - RNA, 23 nt, Human
aaguuuccccccaaccccccgcc

SEQ ID NO: 299680 - RNA, 19 nt, Human
acacaaauuuaacaccacc

SEQ ID NO: 299681 - RNA, 19 nt, Human
acacaaauuuaacaccacc

SEQ ID NO: 299682 - RNA, 21 nt, Human
acacaaauuuaacaccaccau

SEQ ID NO: 299683 - RNA, 21 nt, Human
acacaaauuuaacaccaccau

SEQ ID NO: 299684 - RNA, 18 nt, Human
acaguggugcucugccug

SEQ ID NO: 299685 - RNA, 21 nt, Human
acccccuaauuuguucaauuu

SEQ ID NO: 299686 - RNA, 19 nt, Human
acuaaaggcagaagcacca

SEQ ID NO: 299687 - RNA, 22 nt, Human
acuauuuucuuucccuuuucca

SEQ ID NO: 299688 - RNA, 28 nt, Human
acuccaaacucaaguaacugaaaggcca

SEQ ID NO: 299689 - RNA, 18 nt, Human
agaaggcagugcaagaga

SEQ ID NO: 299690 - RNA, 20 nt, Human
agaggaggaugggaagcagg

SEQ ID NO: 299691 - RNA, 23 nt, Human
agaggaggaugggaagcagggcc

SEQ ID NO: 299692 - RNA, 19 nt, Human
agcuucagcccucuccacc

SEQ ID NO: 299693 - RNA, 20 nt, Human
aggaggaugggaagcagggc

SEQ ID NO: 299694 - RNA, 19 nt, Human
aggcaagucaaccguggga

SEQ ID NO: 299695 - RNA, 24 nt, Human
aggcagaagcaccaaagaguuuuc

SEQ ID NO: 299696 - RNA, 21 nt, Human
aggcaggcaaacagagagaag

SEQ ID NO: 299697 - RNA, 18 nt, Human
aggcagggaaagggcaga

SEQ ID NO: 299698 - RNA, 18 nt, Human
aggcagggaaagggcaga

SEQ ID NO: 299699 - RNA, 24 nt, Human
aggcagugcaagagaaggacggca

SEQ ID NO: 299700 - RNA, 24 nt, Human
aggcagugcaagagaaggacggca

SEQ ID NO: 299701 - RNA, 19 nt, Human
aggcggagggaacggucuc

SEQ ID NO: 299702 - RNA, 26 nt, Human
auaaguucccgaaacuuagugcagaa

SEQ ID NO: 299703 - RNA, 28 nt, Human
auacacgguuauaaacaggaauggaggu

SEQ ID NO: 299704 - RNA, 18 nt, Human
aucaaggcaagucaaccg

SEQ ID NO: 299705 - RNA, 18 nt, Human
augucucuacuaagugac

SEQ ID NO: 299706 - RNA, 18 nt, Human
augucucuacuaagugac

SEQ ID NO: 299707 - RNA, 24 nt, Human
augugguuagaaguguauccuuuc

SEQ ID NO: 299708 - RNA, 20 nt, Human
auuguuuucuuuuguaauga

SEQ ID NO: 299709 - RNA, 20 nt, Human
cacaaauuuaacaccaccau

SEQ ID NO: 299710 - RNA, 20 nt, Human
cacaaauuuaacaccaccau

SEQ ID NO: 299711 - RNA, 22 nt, Human
cacaauacaaaacauuacaaga

SEQ ID NO: 299712 - RNA, 22 nt, Human
cacaauacaaaacauuacaaga

SEQ ID NO: 299713 - RNA, 21 nt, Human
caccaggagaacaaaucacag

SEQ ID NO: 299714 - RNA, 18 nt, Human
caccccuguccucucugc

SEQ ID NO: 299715 - RNA, 18 nt, Human
caccccuguccucucugc

SEQ ID NO: 299716 - RNA, 24 nt, Human
caccccuguccucucugccaaggg

SEQ ID NO: 299717 - RNA, 24 nt, Human
caccccuguccucucugccaaggg

SEQ ID NO: 299718 - RNA, 21 nt, Human
cacugcuccuuucuacccccu

SEQ ID NO: 299719 - RNA, 19 nt, Human
cagaaggcagugcaagaga

SEQ ID NO: 299720 - RNA, 18 nt, Human
cagaaguagcaacucagg

SEQ ID NO: 299721 - RNA, 22 nt, Human
cagacccuuugaacaaaagccc

SEQ ID NO: 299722 - RNA, 22 nt, Human
cagacccuuugaacaaaagccc

SEQ ID NO: 299723 - RNA, 20 nt, Human
cagcaaaaaguuaaaaguac

SEQ ID NO: 299724 - RNA, 19 nt, Human
cagggaaagggcagacccu

SEQ ID NO: 299725 - RNA, 19 nt, Human
cagggaaagggcagacccu

SEQ ID NO: 299726 - RNA, 19 nt, Human
cauuuugcuuuucuucuaa

SEQ ID NO: 299727 - RNA, 19 nt, Human
ccagaaagagucaaaaaag

SEQ ID NO: 299728 - RNA, 18 nt, Human
ccccaaccccccgccugg

SEQ ID NO: 299729 - RNA, 20 nt, Human
ccucugaggaagaaggcgga

SEQ ID NO: 299730 - RNA, 19 nt, Human
ccuuccagcucucuccacc

SEQ ID NO: 299731 - RNA, 24 nt, Human
cgggagcauucagaagaaucagaa

SEQ ID NO: 299732 - RNA, 19 nt, Human
cggggugaagagaggagga

SEQ ID NO: 299733 - RNA, 25 nt, Human
cuacuaagugacguuuggguuauau

SEQ ID NO: 299734 - RNA, 25 nt, Human
cuacuaagugacguuuggguuauau

SEQ ID NO: 299735 - RNA, 19 nt, Human
cucaaggagaaaugaggaa

SEQ ID NO: 299736 - RNA, 23 nt, Human
cucaaggagaaaugaggaaagcu

SEQ ID NO: 299737 - RNA, 18 nt, Human
cucagacucucucugccu

SEQ ID NO: 299738 - RNA, 26 nt, Human
cuggugccaaguuuccccccaacccc

SEQ ID NO: 299739 - RNA, 18 nt, Human
gaaaacugguucauaaag

SEQ ID NO: 299740 - RNA, 21 nt, Human
gaauuccuuuuuuuuuuuuuu

SEQ ID NO: 299741 - RNA, 19 nt, Human
gacaaagggacaagugaga

SEQ ID NO: 299742 - RNA, 24 nt, Human
gagaauauuguuuccaaaacuggu

SEQ ID NO: 299743 - RNA, 21 nt, Human
gcagaaggcagugcaagagaa

SEQ ID NO: 299744 - RNA, 21 nt, Human
gcccccagcaacagcuucagc

SEQ ID NO: 299745 - RNA, 26 nt, Human
gccugggauggcuggugccaaguuuc

SEQ ID NO: 299746 - RNA, 23 nt, Human
ggaaagcuuuuucucauuuugcu

SEQ ID NO: 299747 - RNA, 18 nt, Human
ggcaggguccaagacaca

SEQ ID NO: 299748 - RNA, 21 nt, Human
gguucauaaagggguugugca

SEQ ID NO: 299749 - RNA, 21 nt, Human
gguucauaaagggguugugca

SEQ ID NO: 299750 - RNA, 24 nt, Human
guaguguuuccuuuugaaccaaag

SEQ ID NO: 299751 - RNA, 22 nt, Human
gugaagagaggaggaugggaag

SEQ ID NO: 299752 - RNA, 18 nt, Human
guuugcaaaaguaacugu

SEQ ID NO: 299753 - RNA, 21 nt, Human
uaaaacuaaaggcagaagcac

SEQ ID NO: 299754 - RNA, 22 nt, Human
uaaaacuaaaggcagaagcacc

SEQ ID NO: 299755 - RNA, 21 nt, Human
uaaaagacucaguauaaacca

SEQ ID NO: 299756 - RNA, 21 nt, Human
uaacggggugaagagaggagg

SEQ ID NO: 299757 - RNA, 21 nt, Human
uaacggggugaagagaggagg

SEQ ID NO: 299758 - RNA, 19 nt, Human
uacaaaacauuacaagaaa

SEQ ID NO: 299759 - RNA, 19 nt, Human
uacaaaacauuacaagaaa

SEQ ID NO: 299760 - RNA, 19 nt, Human
uacaagaaaaagucguaac

SEQ ID NO: 299761 - RNA, 19 nt, Human
uacaagaaaaagucguaac

SEQ ID NO: 299762 - RNA, 20 nt, Human
uacacaaauuuaacaccacc

SEQ ID NO: 299763 - RNA, 20 nt, Human
uacacaaauuuaacaccacc

SEQ ID NO: 299764 - RNA, 22 nt, Human
uagaaccuggguaaaaacuaca

SEQ ID NO: 299765 - RNA, 20 nt, Human
uagcaacuccuguggggggc

SEQ ID NO: 299766 - RNA, 18 nt, Human
uaggauccaguuauaacc

SEQ ID NO: 299767 - RNA, 23 nt, Human
uauaauacacaauacaaaacauu

SEQ ID NO: 299768 - RNA, 23 nt, Human
uauaauacacaauacaaaacauu

SEQ ID NO: 299769 - RNA, 20 nt, Human
uauacaaaaguaaaagacuc

SEQ ID NO: 299770 - RNA, 24 nt, Human
uccaaacucaaguaacugaaaggc

SEQ ID NO: 299771 - RNA, 19 nt, Human
uccaccaggagaacaaauc

SEQ ID NO: 299772 - RNA, 20 nt, Human
ucuacccccuaauuuguuca

SEQ ID NO: 299773 - RNA, 21 nt, Human
ugaaaacugguucauaaaggg

SEQ ID NO: 299774 - RNA, 22 nt, Human
ugaaacagucaaaauucgggug

SEQ ID NO: 299775 - RNA, 21 nt, Human
ugaacaaaagcccaccccugu

SEQ ID NO: 299776 - RNA, 21 nt, Human
ugaacaaaagcccaccccugu

SEQ ID NO: 299777 - RNA, 22 nt, Human
ugaacuggaacaugacauuccu

SEQ ID NO: 299778 - RNA, 19 nt, Human
ugaagagaggaggauggga

SEQ ID NO: 299779 - RNA, 18 nt, Human
ugaaggauauugcccaag

SEQ ID NO: 299780 - RNA, 21 nt, Human
ugagaauauuguuuccaaaac

SEQ ID NO: 299781 - RNA, 23 nt, Human
ugagaauauuguuuccaaaacug

SEQ ID NO: 299782 - RNA, 21 nt, Human
ugagcaaauguaguguuuccu

SEQ ID NO: 299783 - RNA, 21 nt, Human
ugaugucauuucugagugcuu

SEQ ID NO: 299784 - RNA, 23 nt, Human
ugaugucauuucugagugcuuug

SEQ ID NO: 299785 - RNA, 24 nt, Human
ugccaaguuuccccccaacccccc

SEQ ID NO: 299786 - RNA, 18 nt, Human
ugggauggcuggugccaa

SEQ ID NO: 299787 - RNA, 19 nt, Human
uggguaaaaacuacauccc

SEQ ID NO: 299788 - RNA, 18 nt, Human
ugugagaauauuguuucc

SEQ ID NO: 299789 - RNA, 25 nt, Human
ugugagaauauuguuuccaaaacug

SEQ ID NO: 299790 - RNA, 23 nt, Human
uguggaguuggacuggacaacag

SEQ ID NO: 299791 - RNA, 20 nt, Human
uuauaaacaggaauggaggu

SEQ ID NO: 299792 - RNA, 22 nt, Human
uucaaagucaguaguucgggag

SEQ ID NO: 299793 - RNA, 22 nt, Human
uucagcccucuccaccaagcuu

SEQ ID NO: 299794 - RNA, 23 nt, Human
uuccccccaaccccccgccugga

SEQ ID NO: 299795 - RNA, 21 nt, Human
uuccccccaaccccccgccuu

SEQ ID NO: 299796 - RNA, 26 nt, Human
uugauacuaaacuccagguauucaac

SEQ ID NO: 299797 - RNA, 22 nt, Human
uugcuuccuggucuugcuuucu

SEQ ID NO: 299798 - RNA, 20 nt, Human
uuggcagacaaagggacaag

SEQ ID NO: 299799 - RNA, 23 nt, Human
uuuauuguuuucuuuuguaauga

SEQ ID NO: 299800 - RNA, 23 nt, Human
uuucucagacucucucugccuua

SEQ ID NO: 299801 - RNA, 20 nt, Human
aaaauuuuccccacucacau

SEQ ID NO: 299802 - RNA, 23 nt, Human
aaacuccugagcuuaagcagucc

SEQ ID NO: 299803 - RNA, 23 nt, Human
aaagugcugggauuauaggcaug

SEQ ID NO: 299804 - RNA, 24 nt, Human
aaagugcugggauuauaggcaugg

SEQ ID NO: 299805 - RNA, 25 nt, Human
aaagugcugggauuauaggcauggg

SEQ ID NO: 299806 - RNA, 24 nt, Human
aaccucaggugauccaccugccuc

SEQ ID NO: 299807 - RNA, 25 nt, Human
aagcaguccucccaccucagccucc

SEQ ID NO: 299808 - RNA, 18 nt, Human
aagcccaggagaaagaca

SEQ ID NO: 299809 - RNA, 26 nt, Human
aaguaccgggauuacaggcauaagcc

SEQ ID NO: 299810 - RNA, 21 nt, Human
aagucugccugccaagagcca

SEQ ID NO: 299811 - RNA, 19 nt, Human
aagugcugggauuauaggc

SEQ ID NO: 299812 - RNA, 21 nt, Human
aagugcugggauuauaggcau

SEQ ID NO: 299813 - RNA, 21 nt, Human
acaggcacccgccaccaugcc

SEQ ID NO: 299814 - RNA, 21 nt, Human
accagggcaucguaagaggcu

SEQ ID NO: 299815 - RNA, 24 nt, Human
accauguuggccaggcuggucucg

SEQ ID NO: 299816 - RNA, 18 nt, Human
agacaggaucuugcugug

SEQ ID NO: 299817 - RNA, 19 nt, Human
agacaggaucuugcugugu

SEQ ID NO: 299818 - RNA, 19 nt, Human
agagauggugggggucuug

SEQ ID NO: 299819 - RNA, 20 nt, Human
agccaccuauaacuaagagc

SEQ ID NO: 299820 - RNA, 22 nt, Human
agccaggugccuccaauuagac

SEQ ID NO: 299821 - RNA, 19 nt, Human
aggcuggagugcaguggca

SEQ ID NO: 299822 - RNA, 24 nt, Human
aggugauccaccugccucagccuc

SEQ ID NO: 299823 - RNA, 18 nt, Human
aguagcugggauuacagg

SEQ ID NO: 299824 - RNA, 19 nt, Human
aguagcugggauucucagg

SEQ ID NO: 299825 - RNA, 21 nt, Human
agugcagugaugcagucauag

SEQ ID NO: 299826 - RNA, 23 nt, Human
agugcagugaugcagucauagcu

SEQ ID NO: 299827 - RNA, 23 nt, Human
agugcaguggcaugaugucggcu

SEQ ID NO: 299828 - RNA, 24 nt, Human
agugcaguggcaugaugucggcuc

SEQ ID NO: 299829 - RNA, 25 nt, Human
auagaagcccaggagaaagacacca

SEQ ID NO: 299830 - RNA, 22 nt, Human
augggguuucaccauguuggcc

SEQ ID NO: 299831 - RNA, 24 nt, Human
augggguuucaccauguuggccag

SEQ ID NO: 299832 - RNA, 18 nt, Human
auucuccugccucagccu

SEQ ID NO: 299833 - RNA, 24 nt, Human
auuuuuguauuuuuaguagagaug

SEQ ID NO: 299834 - RNA, 24 nt, Human
caaaguaccgggauuacaggcaua

SEQ ID NO: 299835 - RNA, 24 nt, Human
caaagugcugggauuauaggcaug

SEQ ID NO: 299836 - RNA, 23 nt, Human
caaccuccaccuccugaauucaa

SEQ ID NO: 299837 - RNA, 27 nt, Human
caacuccugggcucaagcgauccccuu

SEQ ID NO: 299838 - RNA, 20 nt, Human
caagugauucuccugccuca

SEQ ID NO: 299839 - RNA, 22 nt, Human
caagugauucuccugccucagc

SEQ ID NO: 299840 - RNA, 24 nt, Human
caauuuuuguauuuuuaguagaga

SEQ ID NO: 299841 - RNA, 24 nt, Human
cacaccaccaugccuggcuaauuu

SEQ ID NO: 299842 - RNA, 21 nt, Human
caccauguuggccaggcuggu

SEQ ID NO: 299843 - RNA, 24 nt, Human
caccauguuggccaggcuggucuc

SEQ ID NO: 299844 - RNA, 27 nt, Human
caccauguuggccaggcuggucucgaa

SEQ ID NO: 299845 - RNA, 24 nt, Human
caccucagccucccaaaguaccgg

SEQ ID NO: 299846 - RNA, 23 nt, Human
caccugccucagccucccaaagu

SEQ ID NO: 299847 - RNA, 20 nt, Human
cacuaugccuugcccagccc

SEQ ID NO: 299848 - RNA, 21 nt, Human
cacugcaaccuccaccuccug

SEQ ID NO: 299849 - RNA, 19 nt, Human
cagagccccgucucuuucc

SEQ ID NO: 299850 - RNA, 24 nt, Human
cagaguggaccccagccaggugcc

SEQ ID NO: 299851 - RNA, 21 nt, Human
cagccuccaacuccugggcuc

SEQ ID NO: 299852 - RNA, 23 nt, Human
cagccuccaacuccugggcucaa

SEQ ID NO: 299853 - RNA, 24 nt, Human
caggaucuugcuguguugcccagg

SEQ ID NO: 299854 - RNA, 22 nt, Human
cagggauagaagcccaggagaa

SEQ ID NO: 299855 - RNA, 22 nt, Human
caggugauccaccugccucagc

SEQ ID NO: 299856 - RNA, 25 nt, Human
caguagcugggauuacaggcacccg

SEQ ID NO: 299857 - RNA, 20 nt, Human
cauggagccucuuccuggaa

SEQ ID NO: 299858 - RNA, 24 nt, Human
cauguuggccaggcuggucucgaa

SEQ ID NO: 299859 - RNA, 24 nt, Human
ccaaaguaccgggauuacaggcau

SEQ ID NO: 299860 - RNA, 24 nt, Human
ccaaagugcugggauuauaggcau

SEQ ID NO: 299861 - RNA, 25 nt, Human
ccaacuccugggcucaagcgauccc

SEQ ID NO: 299862 - RNA, 24 nt, Human
ccaccuccugaauucaagugauuc

SEQ ID NO: 299863 - RNA, 26 nt, Human
ccaccugccucagccucccaaagugc

SEQ ID NO: 299864 - RNA, 26 nt, Human
ccagcagacagcaccucuccucacag

SEQ ID NO: 299865 - RNA, 18 nt, Human
ccagggcaucguaagagg

SEQ ID NO: 299866 - RNA, 22 nt, Human
ccaguagcugggauuacaggca

SEQ ID NO: 299867 - RNA, 24 nt, Human
cccaaaguaccgggauuacaggca

SEQ ID NO: 299868 - RNA, 20 nt, Human
cccaggcuggagugcaguga

SEQ ID NO: 299869 - RNA, 23 nt, Human
cccaguagcugggauuacaggca

SEQ ID NO: 299870 - RNA, 24 nt, Human
ccccaggcuggagugcaguggcau

SEQ ID NO: 299871 - RNA, 23 nt, Human
ccccaguagcugggauuacaggc

SEQ ID NO: 299872 - RNA, 21 nt, Human
ccuaaccucaggugauccacc

SEQ ID NO: 299873 - RNA, 23 nt, Human
ccuaaccucaggugauccaccug

SEQ ID NO: 299874 - RNA, 23 nt, Human
ccuaaccucaggugauccaccug

SEQ ID NO: 299875 - RNA, 24 nt, Human
ccuauaacuaagagcuugauuguc

SEQ ID NO: 299876 - RNA, 23 nt, Human
ccucuccucacagggauagaagc

SEQ ID NO: 299877 - RNA, 23 nt, Human
ccugaauucaagugauucuccug

SEQ ID NO: 299878 - RNA, 20 nt, Human
ccugggcucaagcgaucccc

SEQ ID NO: 299879 - RNA, 21 nt, Human
ccugggcucaagcgauccccu

SEQ ID NO: 299880 - RNA, 21 nt, Human
cgggauuacaggcauaagcca

SEQ ID NO: 299881 - RNA, 22 nt, Human
cgggauuacaggcauaagccac

SEQ ID NO: 299882 - RNA, 24 nt, Human
cgggauuacaggcauaagccacua

SEQ ID NO: 299883 - RNA, 18 nt, Human
cguaagaggcugccccuu

SEQ ID NO: 299884 - RNA, 26 nt, Human
cucacugcaaccuccaccuccugaau

SEQ ID NO: 299885 - RNA, 24 nt, Human
cucagccuccccaguagcugggau

SEQ ID NO: 299886 - RNA, 23 nt, Human
cucaggugauccaccugccucag

SEQ ID NO: 299887 - RNA, 22 nt, Human
cuccagcagacagcaccucucc

SEQ ID NO: 299888 - RNA, 22 nt, Human
cuccucuuccugcccccuaccg

SEQ ID NO: 299889 - RNA, 19 nt, Human
cuccugaauucaagugauu

SEQ ID NO: 299890 - RNA, 23 nt, Human
cuccugccucagccuccccagua

SEQ ID NO: 299891 - RNA, 21 nt, Human
cucucuucagccuccaacucc

SEQ ID NO: 299892 - RNA, 23 nt, Human
cugcaaccuccaccuccugaauu

SEQ ID NO: 299893 - RNA, 23 nt, Human
cugccucagccucccaaagugcu

SEQ ID NO: 299894 - RNA, 24 nt, Human
cugccucagccucccaaagugcug

SEQ ID NO: 299895 - RNA, 23 nt, Human
cugccucagccuccccaguagcu

SEQ ID NO: 299896 - RNA, 23 nt, Human
cuucagccuccaacuccugggcu

SEQ ID NO: 299897 - RNA, 18 nt, Human
cuuccugcccccuaccgu

SEQ ID NO: 299898 - RNA, 25 nt, Human
cuuccugcccccuaccguaguuuca

SEQ ID NO: 299899 - RNA, 24 nt, Human
cuugcucugucagccccaggcugg

SEQ ID NO: 299900 - RNA, 22 nt, Human
cuugcuguguugcccaggcugg

SEQ ID NO: 299901 - RNA, 19 nt, Human
cuuuccuucucuuuucuuu

SEQ ID NO: 299902 - RNA, 19 nt, Human
cuuuccuuuccuucucuuu

SEQ ID NO: 299903 - RNA, 21 nt, Human
gaaagucugccugccaagagc

SEQ ID NO: 299904 - RNA, 18 nt, Human
gagaugggguuucaccau

SEQ ID NO: 299905 - RNA, 24 nt, Human
gagaugggguuucaccauguuggc

SEQ ID NO: 299906 - RNA, 21 nt, Human
gauccaccugccucagccucc

SEQ ID NO: 299907 - RNA, 22 nt, Human
gauuacaggcacccgccaccau

SEQ ID NO: 299908 - RNA, 18 nt, Human
gauuacaggcauaagcca

SEQ ID NO: 299909 - RNA, 21 nt, Human
gauuacaggcauaagccacua

SEQ ID NO: 299910 - RNA, 24 nt, Human
gauuacaggcauaagccacuaugc

SEQ ID NO: 299911 - RNA, 21 nt, Human
gauucuccugccucagccucc

SEQ ID NO: 299912 - RNA, 22 nt, Human
gcaaccuccaccuccugaauuc

SEQ ID NO: 299913 - RNA, 20 nt, Human
gccacugugcucggccucag

SEQ ID NO: 299914 - RNA, 22 nt, Human
gcccagccaauuuuuguauuuu

SEQ ID NO: 299915 - RNA, 19 nt, Human
gcccaggcuggagugcagu

SEQ ID NO: 299916 - RNA, 21 nt, Human
gcccuucuuuucugcuccucu

SEQ ID NO: 299917 - RNA, 19 nt, Human
gcuggagugcaguggcaug

SEQ ID NO: 299918 - RNA, 23 nt, Human
gcuggucucgaacuccuaaccuc

SEQ ID NO: 299919 - RNA, 20 nt, Human
ggagaggguggacuagaggc

SEQ ID NO: 299920 - RNA, 24 nt, Human
ggauuacaggcauaagccacuaug

SEQ ID NO: 299921 - RNA, 20 nt, Human
gggauagaagcccaggagaa

SEQ ID NO: 299922 - RNA, 21 nt, Human
gggauuacaggcauaagccac

SEQ ID NO: 299923 - RNA, 22 nt, Human
gggauuacaggcauaagccacu

SEQ ID NO: 299924 - RNA, 23 nt, Human
gggauuacaggcauaagccacua

SEQ ID NO: 299925 - RNA, 24 nt, Human
gggggucuugcuauguugcccagg

SEQ ID NO: 299926 - RNA, 22 nt, Human
gggguuucaccauguuggccag

SEQ ID NO: 299927 - RNA, 23 nt, Human
gggguuucaccauguuggccagg

SEQ ID NO: 299928 - RNA, 18 nt, Human
ggguuucaccauguuggc

SEQ ID NO: 299929 - RNA, 23 nt, Human
guagagaugggguuucaccaugu

SEQ ID NO: 299930 - RNA, 18 nt, Human
guagcugggauuacaggc

SEQ ID NO: 299931 - RNA, 18 nt, Human
gugauccaccugccucag

SEQ ID NO: 299932 - RNA, 24 nt, Human
gugauccaccugccucagccuccc

SEQ ID NO: 299933 - RNA, 24 nt, Human
gugauucuccugccucagccuccc

SEQ ID NO: 299934 - RNA, 24 nt, Human
uaaccucaggugauccaccugccu

SEQ ID NO: 299935 - RNA, 24 nt, Human
uaacuaagagcuugauugucuccc

SEQ ID NO: 299936 - RNA, 27 nt, Human
uaagcaguccucccaccucagccuccc

SEQ ID NO: 299937 - RNA, 27 nt, Human
uaagcaguccucccaccucagccuccc

SEQ ID NO: 299938 - RNA, 24 nt, Human
uacaggcacccgccaccaugccca

SEQ ID NO: 299939 - RNA, 24 nt, Human
uaccgggauuacaggcauaagcca

SEQ ID NO: 299940 - RNA, 18 nt, Human
uaccguaguuucagaaac

SEQ ID NO: 299941 - RNA, 19 nt, Human
uaccguaguuucagaaaca

SEQ ID NO: 299942 - RNA, 22 nt, Human
uagagaugggguuucaccaugu

SEQ ID NO: 299943 - RNA, 24 nt, Human
uagcucucuucagccuccaacucc

SEQ ID NO: 299944 - RNA, 24 nt, Human
uaguagagaugggguuucaccaug

SEQ ID NO: 299945 - RNA, 26 nt, Human
uaguagagaugggguuucaccauguu

SEQ ID NO: 299946 - RNA, 22 nt, Human
uaguuucagaaacaaaacuggg

SEQ ID NO: 299947 - RNA, 23 nt, Human
uauguugcccaggcuggucucaa

SEQ ID NO: 299948 - RNA, 24 nt, Human
uauguugcccaggcuggucucaaa

SEQ ID NO: 299949 - RNA, 20 nt, Human
ucaaccuucugaguagcugg

SEQ ID NO: 299950 - RNA, 19 nt, Human
ucacugcaaccuccaccuc

SEQ ID NO: 299951 - RNA, 20 nt, Human
ucacugcaaccuccaccucc

SEQ ID NO: 299952 - RNA, 22 nt, Human
ucacugcaaccuccaccuccug

SEQ ID NO: 299953 - RNA, 23 nt, Human
ucacugcaaccuccaccuccuga

SEQ ID NO: 299954 - RNA, 27 nt, Human
ucacugcaaccuccaccuccugaauuc

SEQ ID NO: 299955 - RNA, 18 nt, Human
ucagccucccaaaguacc

SEQ ID NO: 299956 - RNA, 20 nt, Human
ucagccucccaaaguaccgg

SEQ ID NO: 299957 - RNA, 20 nt, Human
ucagccuccccaguagcugg

SEQ ID NO: 299958 - RNA, 22 nt, Human
ucaggugauccaccugccucag

SEQ ID NO: 299959 - RNA, 24 nt, Human
ucccaaaguaccgggauuacaggc

SEQ ID NO: 299960 - RNA, 24 nt, Human
ucccaaagugcugggauuauaggc

SEQ ID NO: 299961 - RNA, 24 nt, Human
uccccaguagcugggauuacaggc

SEQ ID NO: 299962 - RNA, 27 nt, Human
uccucccaccucagccucccaaaguac

SEQ ID NO: 299963 - RNA, 21 nt, Human
uccugaauucaagugauucuc

SEQ ID NO: 299964 - RNA, 24 nt, Human
uccugaauucaagugauucuccug

SEQ ID NO: 299965 - RNA, 18 nt, Human
uccugggcucaagcgauc

SEQ ID NO: 299966 - RNA, 24 nt, Human
uccugggcucaagcgauccccuuu

SEQ ID NO: 299967 - RNA, 24 nt, Human
ucucaaacuccugagcuuaagcag

SEQ ID NO: 299968 - RNA, 19 nt, Human
ucuccugacuccccacccu

SEQ ID NO: 299969 - RNA, 20 nt, Human
ucucuucagccuccaacucc

SEQ ID NO: 299970 - RNA, 23 nt, Human
ucucuuuccuuuccuucucuuuu

SEQ ID NO: 299971 - RNA, 23 nt, Human
ucugaguagcugggauucucagg

SEQ ID NO: 299972 - RNA, 25 nt, Human
ucugaguagcugggauucucaggug

SEQ ID NO: 299973 - RNA, 18 nt, Human
ucugucagccccaggcug

SEQ ID NO: 299974 - RNA, 22 nt, Human
ucugucagccccaggcuggagu

SEQ ID NO: 299975 - RNA, 18 nt, Human
ucuugcuauguugcccag

SEQ ID NO: 299976 - RNA, 19 nt, Human
ucuugcuauguugcccagg

SEQ ID NO: 299977 - RNA, 23 nt, Human
ucuugcuauguugcccaggcugg

SEQ ID NO: 299978 - RNA, 24 nt, Human
ucuugcuauguugcccaggcuggu

SEQ ID NO: 299979 - RNA, 21 nt, Human
ucuugcucugucagccccagg

SEQ ID NO: 299980 - RNA, 24 nt, Human
ucuugcucugucagccccaggcug

SEQ ID NO: 299981 - RNA, 25 nt, Human
ucuugcucugucagccccaggcugg

SEQ ID NO: 299982 - RNA, 26 nt, Human
ucuugcucugucagccccaggcugga

SEQ ID NO: 299983 - RNA, 23 nt, Human
ucuugcuguguugcccaggcugg

SEQ ID NO: 299984 - RNA, 24 nt, Human
ucuugcuguguugcccaggcugga

SEQ ID NO: 299985 - RNA, 18 nt, Human
ugaauucaagugauucuc

SEQ ID NO: 299986 - RNA, 23 nt, Human
ugaauucaagugauucuccugcc

SEQ ID NO: 299987 - RNA, 24 nt, Human
ugaauucaagugauucuccugccu

SEQ ID NO: 299988 - RNA, 20 nt, Human
ugacagaugugacucaagag

SEQ ID NO: 299989 - RNA, 22 nt, Human
ugagacagugucuugcucuguc

SEQ ID NO: 299990 - RNA, 20 nt, Human
ugcaguggcaugaugucggc

SEQ ID NO: 299991 - RNA, 22 nt, Human
ugccaagagccaaagggcuuua

SEQ ID NO: 299992 - RNA, 18 nt, Human
ugcccaggcuggagugca

SEQ ID NO: 299993 - RNA, 22 nt, Human
ugcccaggcuggagugcaguga

SEQ ID NO: 299994 - RNA, 24 nt, Human
ugcccaggcuggagugcagugaug

SEQ ID NO: 299995 - RNA, 24 nt, Human
ugcccaggcuggucucaaacuccu

SEQ ID NO: 299996 - RNA, 28 nt, Human
ugcccaggcuggucucaaacuccugagc

SEQ ID NO: 299997 - RNA, 24 nt, Human
ugccucagccucccaaagugcugg

SEQ ID NO: 299998 - RNA, 21 nt, Human
ugccucagccuccccaguagc

SEQ ID NO: 299999 - RNA, 24 nt, Human
ugccucagccuccccaguagcugg

SEQ ID NO: 300000 - RNA, 19 nt, Human
ugccuugcccagcccuucu

SEQ ID NO: 300001 - RNA, 24 nt, Human
ugcuauguugcccaggcuggucuc

SEQ ID NO: 300002 - RNA, 27 nt, Human
ugcuauguugcccaggcuggucucaaa

SEQ ID NO: 300003 - RNA, 19 nt, Human
ugcucugucagccccaggc

SEQ ID NO: 300004 - RNA, 26 nt, Human
ugcucugucagccccaggcuggagug

SEQ ID NO: 300005 - RNA, 21 nt, Human
ugcugaaaauuuuccccacuc

SEQ ID NO: 300006 - RNA, 24 nt, Human
ugcuguguugcccaggcuggagug

SEQ ID NO: 300007 - RNA, 28 nt, Human
uggagugcagugaugcaguccuagcacg

SEQ ID NO: 300008 - RNA, 23 nt, Human
uggagugcaguggcaugaugucg

SEQ ID NO: 300009 - RNA, 24 nt, Human
uggagugcaguggcaugaugucgg

SEQ ID NO: 300010 - RNA, 20 nt, Human
uggcaugaugucggcucacu

SEQ ID NO: 300011 - RNA, 24 nt, Human
uggccaggcuggucucgaacuccu

SEQ ID NO: 300012 - RNA, 21 nt, Human
ugggaaagugaagcaggagcc

SEQ ID NO: 300013 - RNA, 21 nt, Human
ugggauuacaggcacccgcca

SEQ ID NO: 300014 - RNA, 22 nt, Human
ugggauuacaggcacccgccac

SEQ ID NO: 300015 - RNA, 24 nt, Human
ugggauuacaggcacccgccacca

SEQ ID NO: 300016 - RNA, 25 nt, Human
ugggauuacaggcacccgccaccau

SEQ ID NO: 300017 - RNA, 18 nt, Human
ugggauuauaggcauggg

SEQ ID NO: 300018 - RNA, 21 nt, Human
ugggauuauaggcaugggcca

SEQ ID NO: 300019 - RNA, 22 nt, Human
ugggauuauaggcaugggccac

SEQ ID NO: 300020 - RNA, 22 nt, Human
ugggauuauaggcaugggccac

SEQ ID NO: 300021 - RNA, 22 nt, Human
ugggauuauaggcaugggccac

SEQ ID NO: 300022 - RNA, 24 nt, Human
ugggauuauaggcaugggccacug

SEQ ID NO: 300023 - RNA, 25 nt, Human
ugggcucaagcgauccccuuugucu

SEQ ID NO: 300024 - RNA, 24 nt, Human
ugggguuucaccauguuggccagg

SEQ ID NO: 300025 - RNA, 23 nt, Human
uggguaugagugaagcuuuggug

SEQ ID NO: 300026 - RNA, 18 nt, Human
ugguagaggaagacaggg

SEQ ID NO: 300027 - RNA, 23 nt, Human
ugucagccccaggcuggagugca

SEQ ID NO: 300028 - RNA, 20 nt, Human
ugucucaaccuucugaguaa

SEQ ID NO: 300029 - RNA, 22 nt, Human
ugucucaaccuucugaguagcu

SEQ ID NO: 300030 - RNA, 18 nt, Human
uguguugcccaggcugga

SEQ ID NO: 300031 - RNA, 22 nt, Human
uguguugcccaggcuggagugc

SEQ ID NO: 300032 - RNA, 21 nt, Human
uguugcccaggcuggagugca

SEQ ID NO: 300033 - RNA, 18 nt, Human
uuaguagagaugggguuu

SEQ ID NO: 300034 - RNA, 22 nt, Human
uuaguagagaugggguuucacc

SEQ ID NO: 300035 - RNA, 24 nt, Human
uuaguagagaugggguuucaccau

SEQ ID NO: 300036 - RNA, 21 nt, Human
uucaagugauucuccugccuc

SEQ ID NO: 300037 - RNA, 23 nt, Human
uucaagugauucuccugccucag

SEQ ID NO: 300038 - RNA, 24 nt, Human
uucaagugauucuccugccucagc

SEQ ID NO: 300039 - RNA, 24 nt, Human
uugcccaggcuggagugcagugau

SEQ ID NO: 300040 - RNA, 24 nt, Human
uugcuguguugcccaggcuggagu

SEQ ID NO: 300041 - RNA, 23 nt, Human
uuguauuuuuaguagagaugggg

SEQ ID NO: 300042 - RNA, 24 nt, Human
uuucaccauguuggccaggcuggu

SEQ ID NO: 300043 - RNA, 24 nt, Human
uuuuuaguagagaugggguuucac

SEQ ID NO: 300044 - RNA, 22 nt, Human
uuuuucuuuuuugagacagugu

SEQ ID NO: 300045 - RNA, 20 nt, Human
uuuuuguauuuuuaguagag

SEQ ID NO: 300046 - RNA, 18 nt, Human
uuuuuuuuuucuuuuuug

SEQ ID NO: 300047 - RNA, 25 nt, Human
uuuuuuuuuuuuuuuuuuucuuuuu

SEQ ID NO: 300048 - RNA, 25 nt, Human
aaaaaaaaaaaaggaaauaaucaaa

SEQ ID NO: 300049 - RNA, 19 nt, Human
aaaaaaaaaggcaugaaag

SEQ ID NO: 300050 - RNA, 20 nt, Human
aaaauccauuucauucaagu

SEQ ID NO: 300051 - RNA, 20 nt, Human
aaacaaccaucacacaugca

SEQ ID NO: 300052 - RNA, 20 nt, Human
aaacaagcucuaaggugaca

SEQ ID NO: 300053 - RNA, 20 nt, Human
aaacuugcaaguuacuccuu

SEQ ID NO: 300054 - RNA, 18 nt, Human
aaagaggaauaaacucua

SEQ ID NO: 300055 - RNA, 23 nt, Human
aaagcaguauauauuucugaagc

SEQ ID NO: 300056 - RNA, 22 nt, Human
aaaugcccagcccuagcuccac

SEQ ID NO: 300057 - RNA, 23 nt, Human
aaaugcccagcccuagcuccacu

SEQ ID NO: 300058 - RNA, 19 nt, Human
aacagauggcaaacaacca

SEQ ID NO: 300059 - RNA, 23 nt, Human
aacuacuuggucaaacauacguc

SEQ ID NO: 300060 - RNA, 19 nt, Human
aagaagacuuuauuaaggc

SEQ ID NO: 300061 - RNA, 18 nt, Human
aagagcuucugucucaaa

SEQ ID NO: 300062 - RNA, 19 nt, Human
aagagcuucugucucaaaa

SEQ ID NO: 300063 - RNA, 18 nt, Human
aagcuagucaugauauac

SEQ ID NO: 300064 - RNA, 18 nt, Human
aaguuuuuucuuuccuug

SEQ ID NO: 300065 - RNA, 21 nt, Human
acaagaccucaucuagcaaac

SEQ ID NO: 300066 - RNA, 22 nt, Human
acgcuaaauuauaaagcagcac

SEQ ID NO: 300067 - RNA, 25 nt, Human
agaaaaaaaaugcauggcacaaaaa

SEQ ID NO: 300068 - RNA, 22 nt, Human
agaaaaacacuggugaagagca

SEQ ID NO: 300069 - RNA, 19 nt, Human
agaacagauaauuuacaau

SEQ ID NO: 300070 - RNA, 23 nt, Human
agacaacacgaacugaugacuga

SEQ ID NO: 300071 - RNA, 20 nt, Human
agauuuuuauccaguguagc

SEQ ID NO: 300072 - RNA, 20 nt, Human
agcacagauuuguacugaaa

SEQ ID NO: 300073 - RNA, 23 nt, Human
agcuagucaugauauacaaccuc

SEQ ID NO: 300074 - RNA, 18 nt, Human
agcuggugcggggcucug

SEQ ID NO: 300075 - RNA, 19 nt, Human
aggaaaacaucuaaaaaag

SEQ ID NO: 300076 - RNA, 22 nt, Human
aguaaauaauaaagacuuacaa

SEQ ID NO: 300077 - RNA, 23 nt, Human
agugcagcucacugaaccacacu

SEQ ID NO: 300078 - RNA, 24 nt, Human
auaaaacaaaauuaaaacagcauu

SEQ ID NO: 300079 - RNA, 24 nt, Human
auaaacaagcucuaaggugacaag

SEQ ID NO: 300080 - RNA, 19 nt, Human
auaaagcagcacaagggga

SEQ ID NO: 300081 - RNA, 26 nt, Human
auauucuugugaaacuacuuggucag

SEQ ID NO: 300082 - RNA, 22 nt, Human
auguccaccuugcucggaugac

SEQ ID NO: 300083 - RNA, 18 nt, Human
auuuuaucugcuuuguca

SEQ ID NO: 300084 - RNA, 23 nt, Human
caaaaaauaaauaaugcauucaa

SEQ ID NO: 300085 - RNA, 22 nt, Human
caaaaugcaaaguaaauaauag

SEQ ID NO: 300086 - RNA, 22 nt, Human
caaaguaaauaauaaagacuua

SEQ ID NO: 300087 - RNA, 21 nt, Human
caacagauggcaaacaaccau

SEQ ID NO: 300088 - RNA, 19 nt, Human
caccguggcucccagagga

SEQ ID NO: 300089 - RNA, 23 nt, Human
cacgcuaaauuauaaagcagcac

SEQ ID NO: 300090 - RNA, 19 nt, Human
cacugaaccacacuauuca

SEQ ID NO: 300091 - RNA, 18 nt, Human
cagaggaucccaaacaaa

SEQ ID NO: 300092 - RNA, 18 nt, Human
cagaguauguauacacac

SEQ ID NO: 300093 - RNA, 23 nt, Human
cagcuagaucucaggggacugaa

SEQ ID NO: 300094 - RNA, 19 nt, Human
cagcucacugaaccacacu

SEQ ID NO: 300095 - RNA, 18 nt, Human
cagcucuaccaagcugaa

SEQ ID NO: 300096 - RNA, 19 nt, Human
cauauaaaugcuuuucaga

SEQ ID NO: 300097 - RNA, 20 nt, Human
cauauaaaugcuuuucagag

SEQ ID NO: 300098 - RNA, 24 nt, Human
cccaaacaaaagccauuuuuaagg

SEQ ID NO: 300099 - RNA, 18 nt, Human
ccccauacaguacccaga

SEQ ID NO: 300100 - RNA, 22 nt, Human
ccgaguuaaaaaaaaaaaaaaa

SEQ ID NO: 300101 - RNA, 26 nt, Human
ccgaguuaaaaaaaaaaaaaaaggaa

SEQ ID NO: 300102 - RNA, 19 nt, Human
ccucugcaagauaugcuua

SEQ ID NO: 300103 - RNA, 18 nt, Human
ccugcaacauaaaguugu

SEQ ID NO: 300104 - RNA, 20 nt, Human
cuaagcaucagcuagaucuu

SEQ ID NO: 300105 - RNA, 18 nt, Human
cucaggggacugaaaugg

SEQ ID NO: 300106 - RNA, 19 nt, Human
cuccacuguuaccuuucaa

SEQ ID NO: 300107 - RNA, 20 nt, Human
cuuucaaaugcagcaaaaca

SEQ ID NO: 300108 - RNA, 21 nt, Human
gaaaaacacuggugaagagca

SEQ ID NO: 300109 - RNA, 20 nt, Human
gaaaacaucuaaaaaagacu

SEQ ID NO: 300110 - RNA, 19 nt, Human
gaaaugaacaucuagugac

SEQ ID NO: 300111 - RNA, 22 nt, Human
gaagaaaaacacuggugaagag

SEQ ID NO: 300112 - RNA, 18 nt, Human
gaccgugguuguggcaug

SEQ ID NO: 300113 - RNA, 21 nt, Human
gaccgugguuguggcauguga

SEQ ID NO: 300114 - RNA, 21 nt, Human
gagcuggugcggggcucuggg

SEQ ID NO: 300115 - RNA, 18 nt, Human
gccuggauguaaaaugcc

SEQ ID NO: 300116 - RNA, 22 nt, Human
ggggcucuggggcccugaggcc

SEQ ID NO: 300117 - RNA, 21 nt, Human
ggugaagagcaacucugcuua

SEQ ID NO: 300118 - RNA, 26 nt, Human
ggugagaaaaaaaaugcauggcacaa

SEQ ID NO: 300119 - RNA, 19 nt, Human
gugcggggcucuggggccc

SEQ ID NO: 300120 - RNA, 24 nt, Human
guuaaaaaaaaaaaaaaaggaaau

SEQ ID NO: 300121 - RNA, 22 nt, Human
guuugcaugaagcuuaagacac

SEQ ID NO: 300122 - RNA, 19 nt, Human
uaaaaaccaacaaacugga

SEQ ID NO: 300123 - RNA, 18 nt, Human
uaaaaugcccagcccuag

SEQ ID NO: 300124 - RNA, 21 nt, Human
uaaaccaagaguaaaagcuag

SEQ ID NO: 300125 - RNA, 19 nt, Human
uaaagcagcacaaggggaa

SEQ ID NO: 300126 - RNA, 25 nt, Human
uaaauacaugguuguaaacagacaa

SEQ ID NO: 300127 - RNA, 18 nt, Human
uaaauuauaaagcagcac

SEQ ID NO: 300128 - RNA, 25 nt, Human
uaacacacauaaaaguauuauagaa

SEQ ID NO: 300129 - RNA, 26 nt, Human
uaacacacauaaaaguauuauagaac

SEQ ID NO: 300130 - RNA, 19 nt, Human
uaacauuacaguauguaca

SEQ ID NO: 300131 - RNA, 20 nt, Human
uaagaacagauaauuuacaa

SEQ ID NO: 300132 - RNA, 23 nt, Human
uaagugauaaaggacuuccuaca

SEQ ID NO: 300133 - RNA, 21 nt, Human
uaauacaguuccuggugcuga

SEQ ID NO: 300134 - RNA, 21 nt, Human
uacacuuaaaaccguuucuca

SEQ ID NO: 300135 - RNA, 19 nt, Human
uacagaguauguauacaca

SEQ ID NO: 300136 - RNA, 19 nt, Human
uacagguaaggucauuugg

SEQ ID NO: 300137 - RNA, 23 nt, Human
uacuauaacuggcuguaaaaaca

SEQ ID NO: 300138 - RNA, 24 nt, Human
uagaacaaauagucacuuugcaca

SEQ ID NO: 300139 - RNA, 28 nt, Human
uagcacagauuuguacugaaaacuugca

SEQ ID NO: 300140 - RNA, 19 nt, Human
uaggaaaacaucuaaaaaa

SEQ ID NO: 300141 - RNA, 18 nt, Human
uaggaaauguaaagccac

SEQ ID NO: 300142 - RNA, 25 nt, Human
uaggagauacuaaguaggaaaacau

SEQ ID NO: 300143 - RNA, 25 nt, Human
uaggcacucugugggggaaauacua

SEQ ID NO: 300144 - RNA, 20 nt, Human
uauaucucccacuugcuuca

SEQ ID NO: 300145 - RNA, 24 nt, Human
uauguacauugcaauaaauacaug

SEQ ID NO: 300146 - RNA, 22 nt, Human
ucaacagauggcaaacaaccau

SEQ ID NO: 300147 - RNA, 21 nt, Human
ucaggaagacuugaaauuaga

SEQ ID NO: 300148 - RNA, 19 nt, Human
ucaguuaauugcuaugaac

SEQ ID NO: 300149 - RNA, 26 nt, Human
uccacauauaaaugcuuuucagaguu

SEQ ID NO: 300150 - RNA, 22 nt, Human
uccacaucaaaaccuguaggac

SEQ ID NO: 300151 - RNA, 19 nt, Human
uccccauacaguacccaga

SEQ ID NO: 300152 - RNA, 21 nt, Human
uccuggcagaugacagugagg

SEQ ID NO: 300153 - RNA, 24 nt, Human
ucuaaaacuguaauacaguuccug

SEQ ID NO: 300154 - RNA, 19 nt, Human
ucuacuuaaaaaaaaaaaa

SEQ ID NO: 300155 - RNA, 18 nt, Human
ucuuacuauaacuggcug

SEQ ID NO: 300156 - RNA, 21 nt, Human
ucuuccauaaacaagcucuaa

SEQ ID NO: 300157 - RNA, 20 nt, Human
ugaaauggggacucucuuca

SEQ ID NO: 300158 - RNA, 20 nt, Human
ugaagaaaaacacuggugaa

SEQ ID NO: 300159 - RNA, 23 nt, Human
ugaagagcaacucugcuuaucug

SEQ ID NO: 300160 - RNA, 20 nt, Human
ugaagauguccaccuugcuc

SEQ ID NO: 300161 - RNA, 21 nt, Human
ugacauggaggugaaaaaacu

SEQ ID NO: 300162 - RNA, 22 nt, Human
ugaccgugguuguggcauguga

SEQ ID NO: 300163 - RNA, 22 nt, Human
ugacguggggauaaagucagaa

SEQ ID NO: 300164 - RNA, 19 nt, Human
ugacuuacuuuccaguccc

SEQ ID NO: 300165 - RNA, 20 nt, Human
ugagaaaaaaaaugcauggc

SEQ ID NO: 300166 - RNA, 21 nt, Human
ugagaaaaaaaaugcauggca

SEQ ID NO: 300167 - RNA, 24 nt, Human
ugaggccccgcacggagcaggagg

SEQ ID NO: 300168 - RNA, 22 nt, Human
ugauaaaggacuuccuacacgu

SEQ ID NO: 300169 - RNA, 24 nt, Human
ugaucaacagauggcaaacaacca

SEQ ID NO: 300170 - RNA, 22 nt, Human
ugcagcaaaacagaagaaaaua

SEQ ID NO: 300171 - RNA, 23 nt, Human
uggcaagaaguacuuaagagcuu

SEQ ID NO: 300172 - RNA, 22 nt, Human
uggcacaaaaaauaaauaaugc

SEQ ID NO: 300173 - RNA, 23 nt, Human
uggcagaugaaguucugaacaua

SEQ ID NO: 300174 - RNA, 20 nt, Human
uggcucccagaggaucccuc

SEQ ID NO: 300175 - RNA, 24 nt, Human
uggcuguccauuaaggaagaguag

SEQ ID NO: 300176 - RNA, 23 nt, Human
uggugaagagcaacucugcuuau

SEQ ID NO: 300177 - RNA, 25 nt, Human
uuaaaaccaaauaggauuaguugua

SEQ ID NO: 300178 - RNA, 23 nt, Human
uuagagcaugaaauguguggauu

SEQ ID NO: 300179 - RNA, 24 nt, Human
uucauagagaagguaaagaagacu

SEQ ID NO: 300180 - RNA, 20 nt, Human
uuccgaguuaaaaaaaaaaa

SEQ ID NO: 300181 - RNA, 18 nt, Human
uucucuguaaaccaagag

SEQ ID NO: 300182 - RNA, 22 nt, Human
uugcacaugaagaaaaacacug

SEQ ID NO: 300183 - RNA, 23 nt, Human
uuggaguagauuuuaucugcuuu

SEQ ID NO: 300184 - RNA, 23 nt, Human
uuuccaaauauaucaacaccauc

SEQ ID NO: 300185 - RNA, 23 nt, Human
uuuggaguagauuuuaucugcuu

SEQ ID NO: 300186 - RNA, 22 nt, Human
uuuuucuuacuauaacuggcug

SEQ ID NO: 300187 - RNA, 19 nt, Human
aaacaaauauacaaaaaau

SEQ ID NO: 300188 - RNA, 22 nt, Human
aagaauacugcauacacuuugc

SEQ ID NO: 300189 - RNA, 19 nt, Human
accccagcuuccccgccca

SEQ ID NO: 300190 - RNA, 24 nt, Human
acucggccucgagacccucccccu

SEQ ID NO: 300191 - RNA, 21 nt, Human
agacacuauacagacagugug

SEQ ID NO: 300192 - RNA, 20 nt, Human
agacaguguguaagaaacua

SEQ ID NO: 300193 - RNA, 23 nt, Human
agcaaaaaaaccucagugcaaga

SEQ ID NO: 300194 - RNA, 24 nt, Human
agcaaaaaaaccucagugcaagaa

SEQ ID NO: 300195 - RNA, 23 nt, Human
aguacacgaaauaucacaaacaa

SEQ ID NO: 300196 - RNA, 21 nt, Human
aguggcaaaguauauaccaaa

SEQ ID NO: 300197 - RNA, 18 nt, Human
caaagcggccggagcgcg

SEQ ID NO: 300198 - RNA, 23 nt, Human
caagaauacugcauacacuuugc

SEQ ID NO: 300199 - RNA, 25 nt, Human
caccccagcuuccccgcccagccag

SEQ ID NO: 300200 - RNA, 19 nt, Human
caccgcgcgccucggaggc

SEQ ID NO: 300201 - RNA, 25 nt, Human
cagaacacaccaucucuguaaacuu

SEQ ID NO: 300202 - RNA, 21 nt, Human
cagacaguguguaagaaacua

SEQ ID NO: 300203 - RNA, 18 nt, Human
cagcugggguccgucccu

SEQ ID NO: 300204 - RNA, 19 nt, Human
cagcugggguccgucccuc

SEQ ID NO: 300205 - RNA, 23 nt, Human
caguguguaagaaacuaggcaua

SEQ ID NO: 300206 - RNA, 22 nt, Human
ccccuucguccugcuccagucg

SEQ ID NO: 300207 - RNA, 24 nt, Human
ccggcuuucgacaaagcggccgga

SEQ ID NO: 300208 - RNA, 23 nt, Human
cgaaauaucacaaacaaugcuuu

SEQ ID NO: 300209 - RNA, 22 nt, Human
gaaauaucacaaacaaugcuuu

SEQ ID NO: 300210 - RNA, 25 nt, Human
gcaguggcaaaguauauaccaaaag

SEQ ID NO: 300211 - RNA, 20 nt, Human
uaaaacaaauauacaaaaaa

SEQ ID NO: 300212 - RNA, 22 nt, Human
uaaaacaaauauacaaaaaaua

SEQ ID NO: 300213 - RNA, 23 nt, Human
uacagcaguggcaaaguauauac

SEQ ID NO: 300214 - RNA, 25 nt, Human
uacugcauacacuuugcaguacacg

SEQ ID NO: 300215 - RNA, 18 nt, Human
uacugcuuuuccacccca

SEQ ID NO: 300216 - RNA, 19 nt, Human
uagcauaaaacaaauauac

SEQ ID NO: 300217 - RNA, 20 nt, Human
uagcauaaaacaaauauaca

SEQ ID NO: 300218 - RNA, 25 nt, Human
uagcauaaaacaaauauacaaaaaa

SEQ ID NO: 300219 - RNA, 19 nt, Human
uccaccccagcuggggucc

SEQ ID NO: 300220 - RNA, 23 nt, Human
uccucuaaaaacauucaugcuau

SEQ ID NO: 300221 - RNA, 20 nt, Human
ucuguaaacuucaacucugc

SEQ ID NO: 300222 - RNA, 22 nt, Human
ugcauacacuuugcaguacacg

SEQ ID NO: 300223 - RNA, 22 nt, Human
uggcaagguuccgucauguugc

SEQ ID NO: 300224 - RNA, 18 nt, Human
uguaagaaacuaggcaua

SEQ ID NO: 300225 - RNA, 21 nt, Human
ugucccguggacucgucccuc

SEQ ID NO: 300226 - RNA, 21 nt, Human
uguguaagaaacuaggcauau

SEQ ID NO: 300227 - RNA, 23 nt, Human
aggguggugccguccagccagca

SEQ ID NO: 300228 - RNA, 18 nt, Human
cugggucuugucugcaaa

SEQ ID NO: 300229 - RNA, 18 nt, Human
gaacaguccuggaagcua

SEQ ID NO: 300230 - RNA, 27 nt, Human
gacucuucuacuucucaaggugugugg

SEQ ID NO: 300231 - RNA, 20 nt, Human
gaggccuuccaauggcaguu

SEQ ID NO: 300232 - RNA, 22 nt, Human
ggacugggacggaggccuucca

SEQ ID NO: 300233 - RNA, 23 nt, Human
ggaggccuuccaauggcaguuuu

SEQ ID NO: 300234 - RNA, 18 nt, Human
ggcugggagucccacugg

SEQ ID NO: 300235 - RNA, 23 nt, Human
uaacagcuuucaaauccuaugac

SEQ ID NO: 300236 - RNA, 19 nt, Human
ucaaauccuaugacucuuc

SEQ ID NO: 300237 - RNA, 21 nt, Human
uccacuggcuugagucaucuc

SEQ ID NO: 300238 - RNA, 20 nt, Human
ucucuucccaggaaagggug

SEQ ID NO: 300239 - RNA, 25 nt, Human
uucaacagcuaucauuaguguuacu

SEQ ID NO: 300240 - RNA, 22 nt, Human
uuuugcagucugcaacaagucc

SEQ ID NO: 300241 - RNA, 24 nt, Human
aaacaggcugggcgugguggcuca

SEQ ID NO: 300242 - RNA, 20 nt, Human
aauauggugaaaccccaucu

SEQ ID NO: 300243 - RNA, 24 nt, Human
aaucgcuugaaccugggaggugga

SEQ ID NO: 300244 - RNA, 18 nt, Human
acacauauguacaugugu

SEQ ID NO: 300245 - RNA, 24 nt, Human
acagagcaagacuccaucucaaaa

SEQ ID NO: 300246 - RNA, 24 nt, Human
acaggcugggcgugguggcucaug

SEQ ID NO: 300247 - RNA, 24 nt, Human
accugaggucaggaguucgagacc

SEQ ID NO: 300248 - RNA, 24 nt, Human
acggcacuccagccugggugacag

SEQ ID NO: 300249 - RNA, 26 nt, Human
acggcacuccagccugggugacagag

SEQ ID NO: 300250 - RNA, 20 nt, Human
agccacaggcagaacccaaa

SEQ ID NO: 300251 - RNA, 24 nt, Human
agccugcccaauauggugaaaccc

SEQ ID NO: 300252 - RNA, 24 nt, Human
agccugggugacagagcaagacuc

SEQ ID NO: 300253 - RNA, 22 nt, Human
aggcacgagaaucgcuugaacc

SEQ ID NO: 300254 - RNA, 24 nt, Human
aggcacgagaaucgcuugaaccug

SEQ ID NO: 300255 - RNA, 18 nt, Human
aggcagaacccaaauccu

SEQ ID NO: 300256 - RNA, 20 nt, Human
aggcggugaucaccugaggu

SEQ ID NO: 300257 - RNA, 24 nt, Human
aggcugaggcacgagaaucgcuug

SEQ ID NO: 300258 - RNA, 20 nt, Human
agguggagguugcagugagc

SEQ ID NO: 300259 - RNA, 24 nt, Human
agguggagguugcagugagcugag

SEQ ID NO: 300260 - RNA, 24 nt, Human
aucaccugaggucaggaguucgag

SEQ ID NO: 300261 - RNA, 24 nt, Human
aucgugccacggcacuccagccug

SEQ ID NO: 300262 - RNA, 19 nt, Human
augccuguaaucccagcac

SEQ ID NO: 300263 - RNA, 21 nt, Human
caagacuccaucucaaaaaaa

SEQ ID NO: 300264 - RNA, 22 nt, Human
caauauggugaaaccccaucug

SEQ ID NO: 300265 - RNA, 23 nt, Human
caccugaggucaggaguucgaga

SEQ ID NO: 300266 - RNA, 19 nt, Human
cacggcacuccagccuggg

SEQ ID NO: 300267 - RNA, 24 nt, Human
cacggcacuccagccugggugaca

SEQ ID NO: 300268 - RNA, 22 nt, Human
cacuccagccugggugacagag

SEQ ID NO: 300269 - RNA, 23 nt, Human
cacuccagccugggugacagagc

SEQ ID NO: 300270 - RNA, 24 nt, Human
caggaggcugaggcacgagaaucg

SEQ ID NO: 300271 - RNA, 23 nt, Human
caugccuguaaucccagcacuuc

SEQ ID NO: 300272 - RNA, 21 nt, Human
ccaauauggugaaaccccauc

SEQ ID NO: 300273 - RNA, 20 nt, Human
ccacggcacuccagccuggg

SEQ ID NO: 300274 - RNA, 21 nt, Human
ccacggcacuccagccugggu

SEQ ID NO: 300275 - RNA, 21 nt, Human
ccacggcacuccagccugggu

SEQ ID NO: 300276 - RNA, 23 nt, Human
ccacggcacuccagccuggguga

SEQ ID NO: 300277 - RNA, 24 nt, Human
ccacggcacuccagccugggugac

SEQ ID NO: 300278 - RNA, 25 nt, Human
ccaucucaaaaaaaaaaaaaaaaaa

SEQ ID NO: 300279 - RNA, 18 nt, Human
ccucuuguagcaaauagc

SEQ ID NO: 300280 - RNA, 22 nt, Human
ccugaggucaggaguucgagac

SEQ ID NO: 300281 - RNA, 24 nt, Human
ccugcccaauauggugaaacccca

SEQ ID NO: 300282 - RNA, 21 nt, Human
ccugggagguggagguugcag

SEQ ID NO: 300283 - RNA, 22 nt, Human
ccugggugacagagcaagacuc

SEQ ID NO: 300284 - RNA, 21 nt, Human
ccuguagucccagcuacucag

SEQ ID NO: 300285 - RNA, 22 nt, Human
ccuguagucccagcuacucagg

SEQ ID NO: 300286 - RNA, 24 nt, Human
cgagaccagccugcccaauauggu

SEQ ID NO: 300287 - RNA, 24 nt, Human
cgccuguagucccagcuacucagg

SEQ ID NO: 300288 - RNA, 21 nt, Human
cgcuugaaccugggaggugga

SEQ ID NO: 300289 - RNA, 18 nt, Human
cucaaaaaaaaaaaaaaa

SEQ ID NO: 300290 - RNA, 23 nt, Human
cucaugccuguaaucccagcacu

SEQ ID NO: 300291 - RNA, 24 nt, Human
cucaugccuguaaucccagcacuu

SEQ ID NO: 300292 - RNA, 19 nt, Human
cuccaucucaaaaaaaaaa

SEQ ID NO: 300293 - RNA, 19 nt, Human
cugaggcggugaucaccug

SEQ ID NO: 300294 - RNA, 21 nt, Human
cuguguacacauauguacaug

SEQ ID NO: 300295 - RNA, 23 nt, Human
gagaucgugccacggcacuccag

SEQ ID NO: 300296 - RNA, 23 nt, Human
gagguugcagugagcugagaucg

SEQ ID NO: 300297 - RNA, 22 nt, Human
gaucaccugaggucaggaguuc

SEQ ID NO: 300298 - RNA, 24 nt, Human
gaucaccugaggucaggaguucga

SEQ ID NO: 300299 - RNA, 24 nt, Human
gcacuccagccugggugacagagc

SEQ ID NO: 300300 - RNA, 19 nt, Human
gccacggcacuccagccug

SEQ ID NO: 300301 - RNA, 22 nt, Human
ggagguugcagugagcugagau

SEQ ID NO: 300302 - RNA, 24 nt, Human
ggagguugcagugagcugagaucg

SEQ ID NO: 300303 - RNA, 24 nt, Human
ggcggugaucaccugaggucagga

SEQ ID NO: 300304 - RNA, 23 nt, Human
ggcgugguggcucaugccuguaa

SEQ ID NO: 300305 - RNA, 23 nt, Human
ggcugggcgugguggcucaugcc

SEQ ID NO: 300306 - RNA, 24 nt, Human
ggugaucaccugaggucaggaguu

SEQ ID NO: 300307 - RNA, 19 nt, Human
gguggagguugcagugagc

SEQ ID NO: 300308 - RNA, 24 nt, Human
gguggcucaugccuguaaucccag

SEQ ID NO: 300309 - RNA, 24 nt, Human
gugaucaccugaggucaggaguuc

SEQ ID NO: 300310 - RNA, 20 nt, Human
guggagguugcagugagcug

SEQ ID NO: 300311 - RNA, 23 nt, Human
guggugggcgccuguagucccag

SEQ ID NO: 300312 - RNA, 19 nt, Human
guucgagaccagccugccc

SEQ ID NO: 300313 - RNA, 24 nt, Human
guugcagugagcugagaucgugcc

SEQ ID NO: 300314 - RNA, 22 nt, Human
uaggcuacaguuuauucacagu

SEQ ID NO: 300315 - RNA, 26 nt, Human
uauguacauguguggcugcaaauguu

SEQ ID NO: 300316 - RNA, 22 nt, Human
ucaaaaaaaaaaaaaaaaaaaa

SEQ ID NO: 300317 - RNA, 23 nt, Human
ucaaaaaaaaaaaaaaaaaaaaa

SEQ ID NO: 300318 - RNA, 25 nt, Human
ucaaaaaaaaaaaaaaaaaaaaaau

SEQ ID NO: 300319 - RNA, 23 nt, Human
ucauggacccuuuucaaaggucu

SEQ ID NO: 300320 - RNA, 24 nt, Human
uccagccugggugacagagcaaga

SEQ ID NO: 300321 - RNA, 23 nt, Human
uccaucucaaaaaaaaaaaaaaa

SEQ ID NO: 300322 - RNA, 24 nt, Human
ucgagaccagccugcccaauaugg

SEQ ID NO: 300323 - RNA, 24 nt, Human
ucgcuugaaccugggagguggagg

SEQ ID NO: 300324 - RNA, 23 nt, Human
ucgugccacggcacuccagccug

SEQ ID NO: 300325 - RNA, 26 nt, Human
ucugucuaccuguguacacauaugua

SEQ ID NO: 300326 - RNA, 19 nt, Human
ugaaaccccaucuguacug

SEQ ID NO: 300327 - RNA, 24 nt, Human
ugaaccugggagguggagguugca

SEQ ID NO: 300328 - RNA, 24 nt, Human
ugaggcacgagaaucgcuugaacc

SEQ ID NO: 300329 - RNA, 20 nt, Human
ugagggagccauaggguccc

SEQ ID NO: 300330 - RNA, 23 nt, Human
ugaucaccugaggucaggaguuc

SEQ ID NO: 300331 - RNA, 24 nt, Human
ugccuguaaucccagcacuucagg

SEQ ID NO: 300332 - RNA, 24 nt, Human
uggcucaugccuguaaucccagca

SEQ ID NO: 300333 - RNA, 18 nt, Human
ugggagguggagguugca

SEQ ID NO: 300334 - RNA, 29 nt, Human
ugggagguggagguugcagugacaacggu

SEQ ID NO: 300335 - RNA, 24 nt, Human
ugggagguggagguugcagugagc

SEQ ID NO: 300336 - RNA, 24 nt, Human
ugguggcucaugccuguaauccca

SEQ ID NO: 300337 - RNA, 24 nt, Human
ugguggugggcgccuguaguccca

SEQ ID NO: 300338 - RNA, 23 nt, Human
uguacacauauguacaugugugg

SEQ ID NO: 300339 - RNA, 19 nt, Human
ugucuaccuguguacacau

SEQ ID NO: 300340 - RNA, 25 nt, Human
ugucuaccuguguacacauauguac

SEQ ID NO: 300341 - RNA, 19 nt, Human
uguguacacauauguacau

SEQ ID NO: 300342 - RNA, 19 nt, Human
uguguacacauauguacau

SEQ ID NO: 300343 - RNA, 24 nt, Human
uguguacacauauguacaugugug

SEQ ID NO: 300344 - RNA, 24 nt, Human
uguguccaucugucuaccugugua

SEQ ID NO: 300345 - RNA, 21 nt, Human
uuagcaugugugguggugggc

SEQ ID NO: 300346 - RNA, 24 nt, Human
uugaaccugggagguggagguugc

SEQ ID NO: 300347 - RNA, 18 nt, Human
uugcagugagcugagauc

SEQ ID NO: 300348 - RNA, 21 nt, Human
uugcagugagcugagaucgug

SEQ ID NO: 300349 - RNA, 22 nt, Human
uugcagugagcugagaucgugc

SEQ ID NO: 300350 - RNA, 19 nt, Human
gcacuaccugaggcagagu

SEQ ID NO: 300351 - RNA, 22 nt, Human
gcuagcaauauauauuuucuuc

SEQ ID NO: 300352 - RNA, 20 nt, Human
guugaacuuuauuuugcccc

SEQ ID NO: 300353 - RNA, 18 nt, Human
uaccugaggcagagugau

SEQ ID NO: 300354 - RNA, 19 nt, Human
uauuuuugucauauuuugc

SEQ ID NO: 300355 - RNA, 20 nt, Human
ucagagcacuaccugaggca

SEQ ID NO: 300356 - RNA, 19 nt, Human
ugagaaggaaauucauccu

SEQ ID NO: 300357 - RNA, 23 nt, Human
ugagaaggaaauucauccuggug

SEQ ID NO: 300358 - RNA, 21 nt, Human
ugaggaaaccguaaauggucc

SEQ ID NO: 300359 - RNA, 22 nt, Human
ugaggaaaccguaaaugguccc

SEQ ID NO: 300360 - RNA, 22 nt, Human
uggcaccaaaaauguaccuauu

SEQ ID NO: 300361 - RNA, 21 nt, Human
uggcuugcuuugcugcguuug

SEQ ID NO: 300362 - RNA, 22 nt, Human
uucagaaaggacgaccuucaga

SEQ ID NO: 300363 - RNA, 19 nt, Human
uuggcaccaaaaauguacc

SEQ ID NO: 300364 - RNA, 27 nt, Human
uuuugcacuuuuguugaacuuuauuuu

SEQ ID NO: 300365 - RNA, 20 nt, Human
aaacguguggaggaaaaaag

SEQ ID NO: 300366 - RNA, 19 nt, Human
aaggaggagacaaggaggg

SEQ ID NO: 300367 - RNA, 27 nt, Human
agaaaugguaggaaaaaaccgguaccc

SEQ ID NO: 300368 - RNA, 22 nt, Human
agccgaggauggagccgcagcc

SEQ ID NO: 300369 - RNA, 20 nt, Human
aggaacacggaauuuuucca

SEQ ID NO: 300370 - RNA, 22 nt, Human
agguucugcuguugagggaauu

SEQ ID NO: 300371 - RNA, 26 nt, Human
aguaaacaguuuccuccucccuccaa

SEQ ID NO: 300372 - RNA, 23 nt, Human
augguaggaaaaaacuaaacaug

SEQ ID NO: 300373 - RNA, 25 nt, Human
caaaaaucaaacguguggaggaaaa

SEQ ID NO: 300374 - RNA, 26 nt, Human
caaauucuugaaauguacacacauuc

SEQ ID NO: 300375 - RNA, 19 nt, Human
cacucuggucggcggagcc

SEQ ID NO: 300376 - RNA, 19 nt, Human
cagacggugcccaggagcc

SEQ ID NO: 300377 - RNA, 24 nt, Human
cagcccggcuuggagaccucgggc

SEQ ID NO: 300378 - RNA, 18 nt, Human
caggagccgaggauggag

SEQ ID NO: 300379 - RNA, 21 nt, Human
cccaaggaggagacaaggagg

SEQ ID NO: 300380 - RNA, 22 nt, Human
ccuccucccuccaaaaaaccca

SEQ ID NO: 300381 - RNA, 24 nt, Human
ccugcccuggucugggguugggag

SEQ ID NO: 300382 - RNA, 21 nt, Human
ccuguccccugcccuggucug

SEQ ID NO: 300383 - RNA, 20 nt, Human
cuagcagccgcagcggccag

SEQ ID NO: 300384 - RNA, 20 nt, Human
cucccuccaaaaaacccaaa

SEQ ID NO: 300385 - RNA, 21 nt, Human
cuuggagaccucgggcuagca

SEQ ID NO: 300386 - RNA, 23 nt, Human
gaaaaaacuaaacaugggucagg

SEQ ID NO: 300387 - RNA, 21 nt, Human
gaaaugguaggaaaaaacuaa

SEQ ID NO: 300388 - RNA, 20 nt, Human
gcccaaggaggagacaagga

SEQ ID NO: 300389 - RNA, 21 nt, Human
gcuuucucacucuggucggcg

SEQ ID NO: 300390 - RNA, 21 nt, Human
ggaauuuuuccaaaaccaggg

SEQ ID NO: 300391 - RNA, 24 nt, Human
ggaauuuuuccaaaaccaggggcc

SEQ ID NO: 300392 - RNA, 19 nt, Human
gggcccaaggaggagacaa

SEQ ID NO: 300393 - RNA, 22 nt, Human
uaaacaguuuccuccucccucc

SEQ ID NO: 300394 - RNA, 24 nt, Human
uaggaaaaaacuaaacauggguca

SEQ ID NO: 300395 - RNA, 24 nt, Human
uauguguuuguuucccugugugua

SEQ ID NO: 300396 - RNA, 24 nt, Human
uccaaaaaacccaaauucuugaaa

SEQ ID NO: 300397 - RNA, 20 nt, Human
uccuccucccuccaaaaaac

SEQ ID NO: 300398 - RNA, 22 nt, Human
uggaagauggcggcuugggaaa

SEQ ID NO: 300399 - RNA, 22 nt, Human
uggaggaaaaaaguaaacaguu

SEQ ID NO: 300400 - RNA, 20 nt, Human
ugggaaaaagagccaucugg

SEQ ID NO: 300401 - RNA, 20 nt, Human
ugggaaggacuugagaccug

SEQ ID NO: 300402 - RNA, 22 nt, Human
uggucagcuggaagauggcggc

SEQ ID NO: 300403 - RNA, 20 nt, Human
ugguccccugguggcugcag

SEQ ID NO: 300404 - RNA, 19 nt, Human
uguguguaugcugggaagg

SEQ ID NO: 300405 - RNA, 19 nt, Human
uuuuuuuuuuuugacugua

SEQ ID NO: 300406 - RNA, 22 nt, Human
aaaauagauuuaaaggacuuac

SEQ ID NO: 300407 - RNA, 20 nt, Human
aaaggacuuacagauaaaca

SEQ ID NO: 300408 - RNA, 22 nt, Human
aagaaaccacuuccaaucagcu

SEQ ID NO: 300409 - RNA, 19 nt, Human
aagcaaccaaaauuacagc

SEQ ID NO: 300410 - RNA, 24 nt, Human
aagcaaccaaaauuacagcagaug

SEQ ID NO: 300411 - RNA, 24 nt, Human
aauguagagaaauauugaugacuu

SEQ ID NO: 300412 - RNA, 21 nt, Human
acagggcaaaagcaaccaaaa

SEQ ID NO: 300413 - RNA, 19 nt, Human
accuugaaagucaaagaaa

SEQ ID NO: 300414 - RNA, 21 nt, Human
aggagguggggagugacauaa

SEQ ID NO: 300415 - RNA, 21 nt, Human
caacagggcaaaagcaaccaa

SEQ ID NO: 300416 - RNA, 23 nt, Human
caacagggcaaaagcaaccaaaa

SEQ ID NO: 300417 - RNA, 19 nt, Human
cagggcaaaagcaaccaaa

SEQ ID NO: 300418 - RNA, 19 nt, Human
cauugagaguggcagaacc

SEQ ID NO: 300419 - RNA, 21 nt, Human
gcugauguuucccuuucagcc

SEQ ID NO: 300420 - RNA, 20 nt, Human
uaagagaacucuuaguagua

SEQ ID NO: 300421 - RNA, 23 nt, Human
uagcaaaaauagauuuaaaggac

SEQ ID NO: 300422 - RNA, 18 nt, Human
uaggaaaagguggucaag

SEQ ID NO: 300423 - RNA, 21 nt, Human
ucagcugcccagcugccuucu

SEQ ID NO: 300424 - RNA, 18 nt, Human
uccuaucagcugcccagc

SEQ ID NO: 300425 - RNA, 27 nt, Human
uccuaucagcugcccagcugccuucuu

SEQ ID NO: 300426 - RNA, 25 nt, Human
ucugacaguaagagaacucuuagua

SEQ ID NO: 300427 - RNA, 21 nt, Human
ugcaagagagauucugacagu

SEQ ID NO: 300428 - RNA, 23 nt, Human
uuccuaucagcugcccagcugcc

SEQ ID NO: 300429 - RNA, 24 nt, Human
aaacaagaaguuuggucacuuagc

SEQ ID NO: 300430 - RNA, 24 nt, Human
aaagaagaaaaaggcaaaccaggg

SEQ ID NO: 300431 - RNA, 22 nt, Human
aaaguuaacagcaacaggcaca

SEQ ID NO: 300432 - RNA, 27 nt, Human
aacaggcacauauuaaaaaggguuucc

SEQ ID NO: 300433 - RNA, 22 nt, Human
aacuuaguggaagguacaagau

SEQ ID NO: 300434 - RNA, 19 nt, Human
aagaaaaaggcaaaccagg

SEQ ID NO: 300435 - RNA, 19 nt, Human
aagaagaaaaaggcaaacc

SEQ ID NO: 300436 - RNA, 19 nt, Human
aagaagaaaaaggcaaacc

SEQ ID NO: 300437 - RNA, 20 nt, Human
aaggcaauuuagaaccaaua

SEQ ID NO: 300438 - RNA, 24 nt, Human
aauuacaaaaguggaauguuugaa

SEQ ID NO: 300439 - RNA, 19 nt, Human
aauugcuaaaaaaaauugc

SEQ ID NO: 300440 - RNA, 25 nt, Human
acaagaaaacaaugcacuuuuuuca

SEQ ID NO: 300441 - RNA, 21 nt, Human
acacauccguacauucacaca

SEQ ID NO: 300442 - RNA, 23 nt, Human
acacaugcacaaacaugcacgca

SEQ ID NO: 300443 - RNA, 27 nt, Human
acaguagugaaaacaacaugcaauguc

SEQ ID NO: 300444 - RNA, 23 nt, Human
accuaccaaccuuccccuccccc

SEQ ID NO: 300445 - RNA, 19 nt, Human
agaaaaaggcaaaccaggg

SEQ ID NO: 300446 - RNA, 22 nt, Human
agaaccaaggccagacaccaga

SEQ ID NO: 300447 - RNA, 19 nt, Human
agaagaaaaaggcaaacca

SEQ ID NO: 300448 - RNA, 18 nt, Human
agagauuguugcugaaca

SEQ ID NO: 300449 - RNA, 18 nt, Human
aggcaaaagagaggggac

SEQ ID NO: 300450 - RNA, 23 nt, Human
aggcaaaagagaggggacacuga

SEQ ID NO: 300451 - RNA, 21 nt, Human
aggcagcagaggcugggcacu

SEQ ID NO: 300452 - RNA, 22 nt, Human
aguuuguccuagaaaacaucug

SEQ ID NO: 300453 - RNA, 22 nt, Human
auaaaagcuuacauuucaaauc

SEQ ID NO: 300454 - RNA, 18 nt, Human
augaaauaaaacuauagc

SEQ ID NO: 300455 - RNA, 20 nt, Human
augaacuaaaagaaagcacc

SEQ ID NO: 300456 - RNA, 21 nt, Human
augaacuaaaagaaagcaccg

SEQ ID NO: 300457 - RNA, 24 nt, Human
augcacgcaaacacacauccguac

SEQ ID NO: 300458 - RNA, 25 nt, Human
augcuggcuggcaucacucacuugg

SEQ ID NO: 300459 - RNA, 19 nt, Human
auuaugucacauucuaaaa

SEQ ID NO: 300460 - RNA, 23 nt, Human
caaaaguuaacagcaacaggcac

SEQ ID NO: 300461 - RNA, 21 nt, Human
caaauuaaaaacuaauugcua

SEQ ID NO: 300462 - RNA, 20 nt, Human
cacauuucuaaaaaccucca

SEQ ID NO: 300463 - RNA, 23 nt, Human
cacucaagcuuucucccaagaaa

SEQ ID NO: 300464 - RNA, 24 nt, Human
cacuugauaagaaccaaggccaga

SEQ ID NO: 300465 - RNA, 22 nt, Human
cacuuuuauuucagauuggcaa

SEQ ID NO: 300466 - RNA, 28 nt, Human
cauaacaugcacagucacacaugcacag

SEQ ID NO: 300467 - RNA, 26 nt, Human
caugcacaaacaugcacgcaaacaca

SEQ ID NO: 300468 - RNA, 19 nt, Human
cauuccaccuuuuucucgc

SEQ ID NO: 300469 - RNA, 19 nt, Human
ccaaacggcacuggaguga

SEQ ID NO: 300470 - RNA, 18 nt, Human
ccaaggcaauuuagaacc

SEQ ID NO: 300471 - RNA, 22 nt, Human
ccagacaccagaucaauguaau

SEQ ID NO: 300472 - RNA, 20 nt, Human
ccagaggcagcagaggcugg

SEQ ID NO: 300473 - RNA, 23 nt, Human
cccacuuuuauuucagauuggca

SEQ ID NO: 300474 - RNA, 23 nt, Human
ccccucccaccccaaauuaaaaa

SEQ ID NO: 300475 - RNA, 22 nt, Human
cccgcugcauaaucucucucuu

SEQ ID NO: 300476 - RNA, 21 nt, Human
cccucccaccccaaauuaaaa

SEQ ID NO: 300477 - RNA, 24 nt, Human
cucaagcuuucucccaagaaaaug

SEQ ID NO: 300478 - RNA, 19 nt, Human
cucucccaucccacuuuua

SEQ ID NO: 300479 - RNA, 23 nt, Human
cuggcaucacucacuuggaaacc

SEQ ID NO: 300480 - RNA, 21 nt, Human
cuuggaaaccuuggcagucaa

SEQ ID NO: 300481 - RNA, 21 nt, Human
cuuuacacucaagcuuucucc

SEQ ID NO: 300482 - RNA, 26 nt, Human
cuuuacacucaagcuuucucccaaga

SEQ ID NO: 300483 - RNA, 25 nt, Human
gaaccaaggccagacaccagaucaa

SEQ ID NO: 300484 - RNA, 20 nt, Human
gauuaugguguuuuaaacau

SEQ ID NO: 300485 - RNA, 23 nt, Human
gcacagucacacaugcacaaaca

SEQ ID NO: 300486 - RNA, 22 nt, Human
ggacaagaaaacaaugcacuuu

SEQ ID NO: 300487 - RNA, 22 nt, Human
ggagcaaggaaaacuucuuagg

SEQ ID NO: 300488 - RNA, 23 nt, Human
gggagcaaggaaaacuucuuagg

SEQ ID NO: 300489 - RNA, 21 nt, Human
gguguucuuccccucccaccc

SEQ ID NO: 300490 - RNA, 20 nt, Human
gguuccuucacaaucaugcu

SEQ ID NO: 300491 - RNA, 23 nt, Human
guucgggucuugcaauuaacaag

SEQ ID NO: 300492 - RNA, 20 nt, Human
uaaaacuauagcaaauggga

SEQ ID NO: 300493 - RNA, 23 nt, Human
uaacaugcacagucacacaugca

SEQ ID NO: 300494 - RNA, 23 nt, Human
uaaguucucucaccucaagaccc

SEQ ID NO: 300495 - RNA, 22 nt, Human
uacagcuuaccuaccaaccuuc

SEQ ID NO: 300496 - RNA, 24 nt, Human
uacccuugaucugaaggacacacu

SEQ ID NO: 300497 - RNA, 27 nt, Human
uauaguuuguccuagaaaacaucuguu

SEQ ID NO: 300498 - RNA, 22 nt, Human
ucaaaaguuaacagcaacaggc

SEQ ID NO: 300499 - RNA, 24 nt, Human
ucaaaaguuaacagcaacaggcac

SEQ ID NO: 300500 - RNA, 21 nt, Human
ucaaagggagggacaagaaaa

SEQ ID NO: 300501 - RNA, 21 nt, Human
ucauuaugucacauucuaaaa

SEQ ID NO: 300502 - RNA, 21 nt, Human
uccaaagaagaaaaaggcaaa

SEQ ID NO: 300503 - RNA, 22 nt, Human
uccaaagaagaaaaaggcaaac

SEQ ID NO: 300504 - RNA, 22 nt, Human
uccaaagaagaaaaaggcaaac

SEQ ID NO: 300505 - RNA, 20 nt, Human
uccaagagauuguugcugaa

SEQ ID NO: 300506 - RNA, 23 nt, Human
uccguacauucacacacaacaua

SEQ ID NO: 300507 - RNA, 19 nt, Human
uccuagaaaacaucuguuc

SEQ ID NO: 300508 - RNA, 21 nt, Human
uccuagaaaacaucuguucac

SEQ ID NO: 300509 - RNA, 21 nt, Human
ucuacgauaaaugcucaguuu

SEQ ID NO: 300510 - RNA, 26 nt, Human
ugaaaagauagguuuuuauucaucaa

SEQ ID NO: 300511 - RNA, 19 nt, Human
ugaacuaaaagaaagcacc

SEQ ID NO: 300512 - RNA, 21 nt, Human
ugaacuaaaagaaagcaccgg

SEQ ID NO: 300513 - RNA, 19 nt, Human
ugaaggacacacucuccca

SEQ ID NO: 300514 - RNA, 21 nt, Human
ugagugguuccuucacaauca

SEQ ID NO: 300515 - RNA, 24 nt, Human
ugauaagaaccaaggccagacacc

SEQ ID NO: 300516 - RNA, 20 nt, Human
ugauuuguaaacauugucuu

SEQ ID NO: 300517 - RNA, 22 nt, Human
ugcacagucacacaugcacaaa

SEQ ID NO: 300518 - RNA, 18 nt, Human
ugcacgcaaacacacauc

SEQ ID NO: 300519 - RNA, 24 nt, Human
ugcacgcaaacacacauccguaca

SEQ ID NO: 300520 - RNA, 19 nt, Human
ugcaggucaaguguacagu

SEQ ID NO: 300521 - RNA, 22 nt, Human
ugcauauucaagguuucacaug

SEQ ID NO: 300522 - RNA, 20 nt, Human
ugccuuggaccucaagcagc

SEQ ID NO: 300523 - RNA, 19 nt, Human
uggagaaacauaacaugca

SEQ ID NO: 300524 - RNA, 20 nt, Human
uggcagucaagaguuaaguu

SEQ ID NO: 300525 - RNA, 19 nt, Human
uguacaguagugaaaacaa

SEQ ID NO: 300526 - RNA, 20 nt, Human
ugucuugccagaggcagcag

SEQ ID NO: 300527 - RNA, 22 nt, Human
ugugcaggucaaguguacagua

SEQ ID NO: 300528 - RNA, 20 nt, Human
uuaaauuuguuugagugguu

SEQ ID NO: 300529 - RNA, 24 nt, Human
uuacuccuuucggauucucuccug

SEQ ID NO: 300530 - RNA, 20 nt, Human
uucaaaugauccaacagagg

SEQ ID NO: 300531 - RNA, 23 nt, Human
uugcugaacaauucaaguuucac

SEQ ID NO: 300532 - RNA, 18 nt, Human
uuggcaaauacccugagc

SEQ ID NO: 300533 - RNA, 19 nt, Human
uuggcagucaagaguuaag

SEQ ID NO: 300534 - RNA, 22 nt, Human
uuguuugagugguuccuucaca

SEQ ID NO: 300535 - RNA, 20 nt, Human
uuuacaguaacaagggaaau

SEQ ID NO: 300536 - RNA, 21 nt, Human
uuuauucaucaaaaguuaaca

SEQ ID NO: 300537 - RNA, 22 nt, Human
uuucuaaaaaccuccaggaggc

SEQ ID NO: 300538 - RNA, 21 nt, Human
uuuguccuagaaaacaucugu

SEQ ID NO: 300539 - RNA, 26 nt, Human
uuuucagaguugauuuguaaacauug

SEQ ID NO: 300540 - RNA, 19 nt, Human
agaacugcagccacgcccc

SEQ ID NO: 300541 - RNA, 19 nt, Human
augguucuuagaaaacaug

SEQ ID NO: 300542 - RNA, 18 nt, Human
caaaaugguucuuagaaa

SEQ ID NO: 300543 - RNA, 19 nt, Human
cagcccguccagaacugca

SEQ ID NO: 300544 - RNA, 24 nt, Human
caggugcccagggcagcucuuccc

SEQ ID NO: 300545 - RNA, 18 nt, Human
cagugaacaaaaugguuc

SEQ ID NO: 300546 - RNA, 18 nt, Human
cauggucuuguggugcca

SEQ ID NO: 300547 - RNA, 23 nt, Human
ccagaacugcagccacgcccccc

SEQ ID NO: 300548 - RNA, 20 nt, Human
cccguccagaacugcagcca

SEQ ID NO: 300549 - RNA, 22 nt, Human
cccguccagaacugcagccacg

SEQ ID NO: 300550 - RNA, 19 nt, Human
cgcagcucggccagcccgu

SEQ ID NO: 300551 - RNA, 18 nt, Human
cguccagaacugcagcca

SEQ ID NO: 300552 - RNA, 24 nt, Human
cugcagccacgccccccgcuuucc

SEQ ID NO: 300553 - RNA, 20 nt, Human
gcucggccagcccguccaga

SEQ ID NO: 300554 - RNA, 22 nt, Human
ggugccaggugcccagggcagc

SEQ ID NO: 300555 - RNA, 20 nt, Human
ucagugaacaaaaugguucu

SEQ ID NO: 300556 - RNA, 23 nt, Human
ugccaggugcccagggcagcucu

SEQ ID NO: 300557 - RNA, 19 nt, Human
uuucccgacgccagccgcc

SEQ ID NO: 300558 - RNA, 22 nt, Human
uuuuuuuuuuuuuuuguaucag

SEQ ID NO: 300559 - RNA, 20 nt, Human
aaaaauaaaaggaaagcccc

SEQ ID NO: 300560 - RNA, 18 nt, Human
aaaaggaaagcccccaaa

SEQ ID NO: 300561 - RNA, 28 nt, Human
aaaauaaaaggaaagcccccaaaaauau

SEQ ID NO: 300562 - RNA, 19 nt, Human
aaaaugcaggguggaggua

SEQ ID NO: 300563 - RNA, 18 nt, Human
aaagugcaguagguggga

SEQ ID NO: 300564 - RNA, 28 nt, Human
aacccguuucccccaaagagcgacccca

SEQ ID NO: 300565 - RNA, 26 nt, Human
aagagccccuugguggagcagacuga

SEQ ID NO: 300566 - RNA, 18 nt, Human
aaggcccccaaaaucgga

SEQ ID NO: 300567 - RNA, 21 nt, Human
aagggccaggacaagaggaaa

SEQ ID NO: 300568 - RNA, 20 nt, Human
aaggguggacggacacgugg

SEQ ID NO: 300569 - RNA, 18 nt, Human
aauaaaaggaaagccccc

SEQ ID NO: 300570 - RNA, 23 nt, Human
accugggcgcaggaccugggucc

SEQ ID NO: 300571 - RNA, 19 nt, Human
acgaaaacgaaaagaagcc

SEQ ID NO: 300572 - RNA, 22 nt, Human
agaccggaggccgcugggagga

SEQ ID NO: 300573 - RNA, 21 nt, Human
agaggaaaaugcaggguggag

SEQ ID NO: 300574 - RNA, 21 nt, Human
agaggaagaggugaaucagag

SEQ ID NO: 300575 - RNA, 22 nt, Human
agccauggaguccgaggcagcc

SEQ ID NO: 300576 - RNA, 22 nt, Human
agcgcucagguguggcccaggc

SEQ ID NO: 300577 - RNA, 22 nt, Human
aggaaaaugcaggguggaggua

SEQ ID NO: 300578 - RNA, 18 nt, Human
aggaagaggugaaucaga

SEQ ID NO: 300579 - RNA, 19 nt, Human
aggcaggggauacccaggu

SEQ ID NO: 300580 - RNA, 23 nt, Human
aggcgggaagggggaaagugcag

SEQ ID NO: 300581 - RNA, 22 nt, Human
agggaggcaggcaggccgcucc

SEQ ID NO: 300582 - RNA, 20 nt, Human
agggguggcaggaggcaggg

SEQ ID NO: 300583 - RNA, 22 nt, Human
agggguucaagagccccuuggu

SEQ ID NO: 300584 - RNA, 23 nt, Human
aggguggggggcuggggaggggg

SEQ ID NO: 300585 - RNA, 18 nt, Human
caacagcaaacuccaucu

SEQ ID NO: 300586 - RNA, 19 nt, Human
caacagcaaacuccaucuc

SEQ ID NO: 300587 - RNA, 18 nt, Human
caagaccggaggccgcug

SEQ ID NO: 300588 - RNA, 19 nt, Human
caagaccggaggccgcugg

SEQ ID NO: 300589 - RNA, 21 nt, Human
caagaccggaggccgcuggga

SEQ ID NO: 300590 - RNA, 22 nt, Human
caagaggaaaaggaacacggca

SEQ ID NO: 300591 - RNA, 21 nt, Human
cacacucuccugccgaugccc

SEQ ID NO: 300592 - RNA, 22 nt, Human
caccaccucaacagcaaacucc

SEQ ID NO: 300593 - RNA, 25 nt, Human
cagacugaagggccaggacaagagg

SEQ ID NO: 300594 - RNA, 21 nt, Human
cagagguggagcucagaagga

SEQ ID NO: 300595 - RNA, 24 nt, Human
cagcaaauaccauauuaaauaacc

SEQ ID NO: 300596 - RNA, 24 nt, Human
caggugcaggggaaggaacccguu

SEQ ID NO: 300597 - RNA, 22 nt, Human
caguacacacccugcacaaccu

SEQ ID NO: 300598 - RNA, 18 nt, Human
ccacagcgcucaggugug

SEQ ID NO: 300599 - RNA, 22 nt, Human
ccacaggcugcaucaggggcac

SEQ ID NO: 300600 - RNA, 26 nt, Human
ccacaggcugcaucaggggcacagcc

SEQ ID NO: 300601 - RNA, 23 nt, Human
ccagccgaggcgucuagccgugu

SEQ ID NO: 300602 - RNA, 18 nt, Human
ccaggccaggugcagggg

SEQ ID NO: 300603 - RNA, 20 nt, Human
ccagggagacgaggugacug

SEQ ID NO: 300604 - RNA, 21 nt, Human
ccagggagacgaggugacugg

SEQ ID NO: 300605 - RNA, 24 nt, Human
ccaggguggggggcuggggagggg

SEQ ID NO: 300606 - RNA, 21 nt, Human
ccaggucaccaucuacaccac

SEQ ID NO: 300607 - RNA, 21 nt, Human
ccaggugucccacacccaccu

SEQ ID NO: 300608 - RNA, 22 nt, Human
ccaguccacaaggagucuuugu

SEQ ID NO: 300609 - RNA, 23 nt, Human
cccaaaaucggaaagcgcggagc

SEQ ID NO: 300610 - RNA, 20 nt, Human
cccccaaaaaacuuuuucca

SEQ ID NO: 300611 - RNA, 22 nt, Human
cccccaaaaauauaaucaccga

SEQ ID NO: 300612 - RNA, 23 nt, Human
cccccauucccagcccacgagcu

SEQ ID NO: 300613 - RNA, 21 nt, Human
cccgcggccaggguggggggc

SEQ ID NO: 300614 - RNA, 27 nt, Human
cccggccccggcuccgucgccgguucc

SEQ ID NO: 300615 - RNA, 22 nt, Human
cccuaccacagucucccuccua

SEQ ID NO: 300616 - RNA, 20 nt, Human
cccuagggaggcagcggggg

SEQ ID NO: 300617 - RNA, 18 nt, Human
cccugcccacacacucuc

SEQ ID NO: 300618 - RNA, 19 nt, Human
cccugcccacacacucucc

SEQ ID NO: 300619 - RNA, 20 nt, Human
cccugcccacacacucuccu

SEQ ID NO: 300620 - RNA, 19 nt, Human
cccuugcugcccuggccuc

SEQ ID NO: 300621 - RNA, 18 nt, Human
ccgcccccgcggccaggg

SEQ ID NO: 300622 - RNA, 21 nt, Human
ccgucugcccgccugcucgcc

SEQ ID NO: 300623 - RNA, 19 nt, Human
ccucagagcuggccagggg

SEQ ID NO: 300624 - RNA, 22 nt, Human
ccucagggcuccucaggacagu

SEQ ID NO: 300625 - RNA, 22 nt, Human
ccucccugccccuaccacaguc

SEQ ID NO: 300626 - RNA, 24 nt, Human
ccucccugccccuaccacagucuc

SEQ ID NO: 300627 - RNA, 21 nt, Human
ccuccuauuuggccacuccag

SEQ ID NO: 300628 - RNA, 21 nt, Human
ccucugcagccgcggcucacc

SEQ ID NO: 300629 - RNA, 21 nt, Human
ccucugcccgccggcuuagcu

SEQ ID NO: 300630 - RNA, 24 nt, Human
ccuuggagaccuucucccaggugu

SEQ ID NO: 300631 - RNA, 25 nt, Human
cgaaaacgaaaagaagccacugugc

SEQ ID NO: 300632 - RNA, 18 nt, Human
cgacagguggacgcggcg

SEQ ID NO: 300633 - RNA, 19 nt, Human
cgacuccgggcccggcccc

SEQ ID NO: 300634 - RNA, 19 nt, Human
cgaggccggcuaccugggc

SEQ ID NO: 300635 - RNA, 21 nt, Human
cgcaggaccuggguccgaggc

SEQ ID NO: 300636 - RNA, 22 nt, Human
cgcccgggccggguaggggggc

SEQ ID NO: 300637 - RNA, 22 nt, Human
cgcggccaggguggggggcugg

SEQ ID NO: 300638 - RNA, 25 nt, Human
cgcuggggggcaggggaggaccuga

SEQ ID NO: 300639 - RNA, 23 nt, Human
cggacgcguagaucgagcgcgcc

SEQ ID NO: 300640 - RNA, 19 nt, Human
cggcucagguccgcggcga

SEQ ID NO: 300641 - RNA, 19 nt, Human
cguauguaugugugugcgc

SEQ ID NO: 300642 - RNA, 21 nt, Human
cgugggagggguuuucuccag

SEQ ID NO: 300643 - RNA, 18 nt, Human
cucacacucuuaucccaa

SEQ ID NO: 300644 - RNA, 23 nt, Human
cucccccaaaaaacuuuuuccaa

SEQ ID NO: 300645 - RNA, 18 nt, Human
cucccuuggagaccuucu

SEQ ID NO: 300646 - RNA, 20 nt, Human
cucgccgcucugggcguccu

SEQ ID NO: 300647 - RNA, 19 nt, Human
cugcagccgcggcucaccc

SEQ ID NO: 300648 - RNA, 21 nt, Human
cugcuccgguuuucucuuugc

SEQ ID NO: 300649 - RNA, 22 nt, Human
cugggcgcaggaccuggguccg

SEQ ID NO: 300650 - RNA, 22 nt, Human
cuucaaaacgaaaacgaaaaga

SEQ ID NO: 300651 - RNA, 19 nt, Human
cuuggagaccuucucccag

SEQ ID NO: 300652 - RNA, 19 nt, Human
cuuugcagcgaggcuggag

SEQ ID NO: 300653 - RNA, 24 nt, Human
cuuuuuuuuuuuuuuuuccuuuuu

SEQ ID NO: 300654 - RNA, 19 nt, Human
gaaaggcccccaaaaucgg

SEQ ID NO: 300655 - RNA, 22 nt, Human
gaagcaccauuggccguccgaa

SEQ ID NO: 300656 - RNA, 19 nt, Human
gaaggaacccguuuccccc

SEQ ID NO: 300657 - RNA, 19 nt, Human
gaaggaagcagguuuugga

SEQ ID NO: 300658 - RNA, 20 nt, Human
gaaggaagcagguuuuggaa

SEQ ID NO: 300659 - RNA, 20 nt, Human
gaaggaucaaagauggggaa

SEQ ID NO: 300660 - RNA, 21 nt, Human
gaagugugcaagcagggaggg

SEQ ID NO: 300661 - RNA, 21 nt, Human
gaggagccaccagagguggag

SEQ ID NO: 300662 - RNA, 23 nt, Human
gaggcgucuagccgugugggggc

SEQ ID NO: 300663 - RNA, 19 nt, Human
gagugcagcauccacggcc

SEQ ID NO: 300664 - RNA, 19 nt, Human
gcacagaggcaccagggag

SEQ ID NO: 300665 - RNA, 19 nt, Human
gcacagccaguccacaagg

SEQ ID NO: 300666 - RNA, 21 nt, Human
gcagcauccacggccgggggg

SEQ ID NO: 300667 - RNA, 22 nt, Human
gccaggacaagaggaaaaugca

SEQ ID NO: 300668 - RNA, 24 nt, Human
gccaggugcaggggaaggaacccg

SEQ ID NO: 300669 - RNA, 20 nt, Human
gcccccgcggccaggguggg

SEQ ID NO: 300670 - RNA, 20 nt, Human
gcccuggccucuagucuucu

SEQ ID NO: 300671 - RNA, 21 nt, Human
gcccuggccucuagucuucug

SEQ ID NO: 300672 - RNA, 21 nt, Human
gccgacuccgggcccggcccc

SEQ ID NO: 300673 - RNA, 20 nt, Human
gcuccgguuuucucuuugca

SEQ ID NO: 300674 - RNA, 24 nt, Human
gcugcacccucccuuggagaccuu

SEQ ID NO: 300675 - RNA, 21 nt, Human
gcuggggaggggggugggcuc

SEQ ID NO: 300676 - RNA, 23 nt, Human
gcuggguuggaauaugaugagca

SEQ ID NO: 300677 - RNA, 23 nt, Human
gcuuuuuuuuuuuuuuuuccuuu

SEQ ID NO: 300678 - RNA, 28 nt, Human
ggaaagcccccaaaaauauaaucaccga

SEQ ID NO: 300679 - RNA, 24 nt, Human
ggaacccguuucccccaaagagcg

SEQ ID NO: 300680 - RNA, 19 nt, Human
ggacaagaggaaaaugcag

SEQ ID NO: 300681 - RNA, 22 nt, Human
ggaggugggagcucagauccca

SEQ ID NO: 300682 - RNA, 21 nt, Human
ggcagcgggggaggcugcggg

SEQ ID NO: 300683 - RNA, 19 nt, Human
ggcaggggaggaccugggc

SEQ ID NO: 300684 - RNA, 21 nt, Human
ggccagggguucagggaucag

SEQ ID NO: 300685 - RNA, 19 nt, Human
ggcccgggcggcgggcacg

SEQ ID NO: 300686 - RNA, 20 nt, Human
ggcggcgggcacggcugcuc

SEQ ID NO: 300687 - RNA, 19 nt, Human
ggcuggggagggggguggg

SEQ ID NO: 300688 - RNA, 19 nt, Human
gggaagaagauggcgaugg

SEQ ID NO: 300689 - RNA, 19 nt, Human
gggauacccaggucaccau

SEQ ID NO: 300690 - RNA, 20 nt, Human
gggcaggggaggaccugggc

SEQ ID NO: 300691 - RNA, 24 nt, Human
gggcaguugcuggagcagaggacu

SEQ ID NO: 300692 - RNA, 19 nt, Human
gggccaggacaagaggaaa

SEQ ID NO: 300693 - RNA, 23 nt, Human
gggccggguaggggggcgggagc

SEQ ID NO: 300694 - RNA, 21 nt, Human
gggcggaucccgagcccgagu

SEQ ID NO: 300695 - RNA, 21 nt, Human
gggcuuuuuuuuuuuuuuuuc

SEQ ID NO: 300696 - RNA, 19 nt, Human
ggggaggcugcgggugcgc

SEQ ID NO: 300697 - RNA, 20 nt, Human
ggggcuggggaggggggugg

SEQ ID NO: 300698 - RNA, 22 nt, Human
ggggggcaggggaggaccuggg

SEQ ID NO: 300699 - RNA, 20 nt, Human
ggguggggggcuggggaggg

SEQ ID NO: 300700 - RNA, 21 nt, Human
ggugcaggggaaggaacccgu

SEQ ID NO: 300701 - RNA, 24 nt, Human
ggugggaagggaggugggagcuca

SEQ ID NO: 300702 - RNA, 29 nt, Human
ggugggcuuuuuuuuuuuuuuuuccuuuu

SEQ ID NO: 300703 - RNA, 24 nt, Human
gguggggggcuggggaggggggug

SEQ ID NO: 300704 - RNA, 23 nt, Human
gguuuccuaggaggagccaccag

SEQ ID NO: 300705 - RNA, 19 nt, Human
guccgaaucaggcaucgag

SEQ ID NO: 300706 - RNA, 22 nt, Human
gucugugugcccgucugugguc

SEQ ID NO: 300707 - RNA, 21 nt, Human
gugccuccccucagagcuggc

SEQ ID NO: 300708 - RNA, 18 nt, Human
gugugcccgucugugguc

SEQ ID NO: 300709 - RNA, 23 nt, Human
gugugcccgucuguggucuuagc

SEQ ID NO: 300710 - RNA, 20 nt, Human
guucaguccuucuuuuucuu

SEQ ID NO: 300711 - RNA, 18 nt, Human
uaaaaggaaagcccccaa

SEQ ID NO: 300712 - RNA, 18 nt, Human
uacauggcagucguggcu

SEQ ID NO: 300713 - RNA, 24 nt, Human
uacccaggucaccaucuacaccac

SEQ ID NO: 300714 - RNA, 18 nt, Human
uaggaggagccaccagag

SEQ ID NO: 300715 - RNA, 20 nt, Human
uaggaggagccaccagaggu

SEQ ID NO: 300716 - RNA, 21 nt, Human
uaggaggagccaccagaggug

SEQ ID NO: 300717 - RNA, 21 nt, Human
uaugcugagagguccucaggg

SEQ ID NO: 300718 - RNA, 25 nt, Human
ucaaaacgaaaacgaaaagaagcca

SEQ ID NO: 300719 - RNA, 18 nt, Human
ucaagagccccuuggugg

SEQ ID NO: 300720 - RNA, 20 nt, Human
uccaaccuccaagaggaaaa

SEQ ID NO: 300721 - RNA, 19 nt, Human
uccaaggaccccauggggg

SEQ ID NO: 300722 - RNA, 19 nt, Human
uccgcgcgcgcggcgugcc

SEQ ID NO: 300723 - RNA, 24 nt, Human
uccgucgcuggggggcaggggagg

SEQ ID NO: 300724 - RNA, 22 nt, Human
ucugcccgccugcucgccgcuc

SEQ ID NO: 300725 - RNA, 21 nt, Human
ucuggaaaggcccccaaaauc

SEQ ID NO: 300726 - RNA, 24 nt, Human
ugaaggaagcagguuuuggaaggc

SEQ ID NO: 300727 - RNA, 19 nt, Human
ugagcaggucccuugcugc

SEQ ID NO: 300728 - RNA, 18 nt, Human
ugaugugaacagugcucc

SEQ ID NO: 300729 - RNA, 24 nt, Human
ugcaacauuuucuggaaaggcccc

SEQ ID NO: 300730 - RNA, 24 nt, Human
uggcaggaggcaggggauacccag

SEQ ID NO: 300731 - RNA, 19 nt, Human
uggcccaggccaggugcag

SEQ ID NO: 300732 - RNA, 21 nt, Human
uggccucuagucuucugcccu

SEQ ID NO: 300733 - RNA, 21 nt, Human
ugggaaauggaggucaugugg

SEQ ID NO: 300734 - RNA, 20 nt, Human
ugggaagggaggugggagcc

SEQ ID NO: 300735 - RNA, 20 nt, Human
ugggaggagacccgcugaug

SEQ ID NO: 300736 - RNA, 19 nt, Human
ugggcaagaccggaggccg

SEQ ID NO: 300737 - RNA, 22 nt, Human
ugggcuuuuuuuuuuuuuuuuu

SEQ ID NO: 300738 - RNA, 18 nt, Human
uggggaggggggugggcu

SEQ ID NO: 300739 - RNA, 21 nt, Human
uggggaggggggugggcucgg

SEQ ID NO: 300740 - RNA, 22 nt, Human
uggggggcaggggaggaccugg

SEQ ID NO: 300741 - RNA, 20 nt, Human
uggggggcuggggagggggg

SEQ ID NO: 300742 - RNA, 23 nt, Human
uggggggcuggggaggggggugg

SEQ ID NO: 300743 - RNA, 24 nt, Human
uggggggcuggggagggggguggg

SEQ ID NO: 300744 - RNA, 29 nt, Human
uggguuggaauaugaugagcaggucccuu

SEQ ID NO: 300745 - RNA, 19 nt, Human
uuaaauaacccugcccaca

SEQ ID NO: 300746 - RNA, 21 nt, Human
uuaagggaagaagauggcgau

SEQ ID NO: 300747 - RNA, 21 nt, Human
uucaaaacgaaaacgaaaaga

SEQ ID NO: 300748 - RNA, 25 nt, Human
uucaaaacgaaaacgaaaagaagcc

SEQ ID NO: 300749 - RNA, 26 nt, Human
uuccuuuuugcgcgcguauguaugug

SEQ ID NO: 300750 - RNA, 23 nt, Human
uucucuuugcagcgaggcuggag

SEQ ID NO: 300751 - RNA, 18 nt, Human
uuuaaaaaauaaaaggaa

SEQ ID NO: 300752 - RNA, 23 nt, Human
uuuaaaaaauaaaaggaaagccc

SEQ ID NO: 300753 - RNA, 24 nt, Human
uuuacauuuaaaaaauaaaaggaa

SEQ ID NO: 300754 - RNA, 20 nt, Human
uuuggaaggcgggaaggggg

SEQ ID NO: 300755 - RNA, 21 nt, Human
uuugggcaccgugggaggggu

SEQ ID NO: 300756 - RNA, 21 nt, Human
aaaaaaauauaaacgaaggca

SEQ ID NO: 300757 - RNA, 19 nt, Human
aaaaacaugaacaggggca

SEQ ID NO: 300758 - RNA, 19 nt, Human
aaaaaguucaacagcagcu

SEQ ID NO: 300759 - RNA, 26 nt, Human
aaaaggaaacaaaucuggaauuugcu

SEQ ID NO: 300760 - RNA, 18 nt, Human
aaaaugcuauaguaccag

SEQ ID NO: 300761 - RNA, 23 nt, Human
aaacaaaaacaugaacaggggca

SEQ ID NO: 300762 - RNA, 23 nt, Human
aaaccaaacuuuagcuuucucag

SEQ ID NO: 300763 - RNA, 19 nt, Human
aaacgaaggcagugauaca

SEQ ID NO: 300764 - RNA, 22 nt, Human
aaacucccugcgcuccgaaucu

SEQ ID NO: 300765 - RNA, 20 nt, Human
aaaguuucucucaaacuccu

SEQ ID NO: 300766 - RNA, 24 nt, Human
aaauacauauauugggguugccaa

SEQ ID NO: 300767 - RNA, 22 nt, Human
aaaugucaaaaacugucaaacu

SEQ ID NO: 300768 - RNA, 20 nt, Human
aaaugucacuaaccugaagc

SEQ ID NO: 300769 - RNA, 24 nt, Human
aacccacaccaaccuguuugacag

SEQ ID NO: 300770 - RNA, 24 nt, Human
aagaagauaguuaauacaaucuaa

SEQ ID NO: 300771 - RNA, 24 nt, Human
aaggacaucacuaaucguuuaaaa

SEQ ID NO: 300772 - RNA, 18 nt, Human
aaugggcucaaaaaccgc

SEQ ID NO: 300773 - RNA, 24 nt, Human
acaauucauccucccaucuaaccu

SEQ ID NO: 300774 - RNA, 21 nt, Human
acacacacacccacaaaugca

SEQ ID NO: 300775 - RNA, 21 nt, Human
acacacccacaaaugcaguca

SEQ ID NO: 300776 - RNA, 24 nt, Human
acccacaaaugcagucauauacaa

SEQ ID NO: 300777 - RNA, 24 nt, Human
acggggaaaguucaaucuccccca

SEQ ID NO: 300778 - RNA, 26 nt, Human
agaaaaaaaaaaaaaacuucugcaaa

SEQ ID NO: 300779 - RNA, 18 nt, Human
agaacuuuuaggacuuaa

SEQ ID NO: 300780 - RNA, 19 nt, Human
agcccccccucaaccuugg

SEQ ID NO: 300781 - RNA, 21 nt, Human
aggacuggaaacugcuggacu

SEQ ID NO: 300782 - RNA, 20 nt, Human
aggcaugaagaaaaaaaaaa

SEQ ID NO: 300783 - RNA, 23 nt, Human
aggccaaaaggaaacaaaucugg

SEQ ID NO: 300784 - RNA, 18 nt, Human
agggaaguacauggaugg

SEQ ID NO: 300785 - RNA, 21 nt, Human
auaguccauccuucuaaaacu

SEQ ID NO: 300786 - RNA, 23 nt, Human
auaucaaaaugcaaagcaccaac

SEQ ID NO: 300787 - RNA, 21 nt, Human
aucauuuuaucuuaugucccu

SEQ ID NO: 300788 - RNA, 22 nt, Human
aucuaucuccaaacuucacaca

SEQ ID NO: 300789 - RNA, 18 nt, Human
auugugcuuucucuggag

SEQ ID NO: 300790 - RNA, 20 nt, Human
caaaaugcaaagcaccaaca

SEQ ID NO: 300791 - RNA, 22 nt, Human
caaagcaccaacaaaauaaggc

SEQ ID NO: 300792 - RNA, 21 nt, Human
caacccccagacuucgacaac

SEQ ID NO: 300793 - RNA, 22 nt, Human
cacacacacacccacaaaugca

SEQ ID NO: 300794 - RNA, 24 nt, Human
caggaaauaagcccccccucaacc

SEQ ID NO: 300795 - RNA, 24 nt, Human
ccaaaugaucucuugcagucuccu

SEQ ID NO: 300796 - RNA, 21 nt, Human
ccacacauggaguaaagagcg

SEQ ID NO: 300797 - RNA, 23 nt, Human
ccauucauucauauuuagaacgc

SEQ ID NO: 300798 - RNA, 19 nt, Human
cccacacauggaguaaaga

SEQ ID NO: 300799 - RNA, 25 nt, Human
cccacggccuucccaaaugaucucu

SEQ ID NO: 300800 - RNA, 19 nt, Human
cccagacuucgacaacaac

SEQ ID NO: 300801 - RNA, 18 nt, Human
cccauggcaacuuccuga

SEQ ID NO: 300802 - RNA, 21 nt, Human
cccauggcaacuuccugaaac

SEQ ID NO: 300803 - RNA, 24 nt, Human
cccauggcaacuuccugaaaccua

SEQ ID NO: 300804 - RNA, 20 nt, Human
ccccagaaguggaaggaacc

SEQ ID NO: 300805 - RNA, 22 nt, Human
ccccagaaguggaaggaaccuc

SEQ ID NO: 300806 - RNA, 26 nt, Human
cccccucaaccuuggucucuucaaaa

SEQ ID NO: 300807 - RNA, 20 nt, Human
cccuuauccaucuaucucca

SEQ ID NO: 300808 - RNA, 19 nt, Human
ccuccgauguuauuccgca

SEQ ID NO: 300809 - RNA, 20 nt, Human
ccuccuguuucucucccugu

SEQ ID NO: 300810 - RNA, 18 nt, Human
ccuuauccaucuaucucc

SEQ ID NO: 300811 - RNA, 20 nt, Human
cgaggcccuuggcugggaac

SEQ ID NO: 300812 - RNA, 25 nt, Human
cugaaaacacacacacacccaauuu

SEQ ID NO: 300813 - RNA, 23 nt, Human
cugcgugguugaauuccaacccu

SEQ ID NO: 300814 - RNA, 19 nt, Human
cuggccgaucagaacagcu

SEQ ID NO: 300815 - RNA, 18 nt, Human
cugucaaaaccaaacuuu

SEQ ID NO: 300816 - RNA, 24 nt, Human
cuugcagucuccuccuguuucucu

SEQ ID NO: 300817 - RNA, 22 nt, Human
gaacccacaccaaccuguuuga

SEQ ID NO: 300818 - RNA, 21 nt, Human
gaggauccaggcuaaugcaca

SEQ ID NO: 300819 - RNA, 22 nt, Human
gaggauccaggcuaaugcacau

SEQ ID NO: 300820 - RNA, 22 nt, Human
gaggcaacacugacaaaguuca

SEQ ID NO: 300821 - RNA, 19 nt, Human
gcaaggcucacagcaauau

SEQ ID NO: 300822 - RNA, 21 nt, Human
gcaauaaagugguuuucugaa

SEQ ID NO: 300823 - RNA, 21 nt, Human
gggagcauuuguuaggacugg

SEQ ID NO: 300824 - RNA, 21 nt, Human
gggguaaggggugaaagaagg

SEQ ID NO: 300825 - RNA, 22 nt, Human
gucaguguuuccgaaaacuggc

SEQ ID NO: 300826 - RNA, 24 nt, Human
gucucuucaaaauaaaaguuucuc

SEQ ID NO: 300827 - RNA, 27 nt, Human
uaaaacaaaaacaugaacaggggcauu

SEQ ID NO: 300828 - RNA, 24 nt, Human
uaaacaucaaccaaguccuccucu

SEQ ID NO: 300829 - RNA, 23 nt, Human
uaacaguaguaguauuauaaaca

SEQ ID NO: 300830 - RNA, 19 nt, Human
uaaguaaauagcugucagg

SEQ ID NO: 300831 - RNA, 25 nt, Human
uaaguaucuuucuuuuuauuauuuc

SEQ ID NO: 300832 - RNA, 22 nt, Human
uacauauauacauauugaugua

SEQ ID NO: 300833 - RNA, 18 nt, Human
uaccauacuuuauagaga

SEQ ID NO: 300834 - RNA, 22 nt, Human
uaccauacuuuauagagaaaca

SEQ ID NO: 300835 - RNA, 23 nt, Human
uacgauggauuggggaaccuauu

SEQ ID NO: 300836 - RNA, 21 nt, Human
uacuuuauuauugcuucugca

SEQ ID NO: 300837 - RNA, 21 nt, Human
uagaaacacaaacguauuuca

SEQ ID NO: 300838 - RNA, 23 nt, Human
uagaaaguaggaaagauuggcaa

SEQ ID NO: 300839 - RNA, 24 nt, Human
uagcaaaaugcuauaguaccagua

SEQ ID NO: 300840 - RNA, 19 nt, Human
uaguguuucucaggccggc

SEQ ID NO: 300841 - RNA, 23 nt, Human
uauaaauuuuggacauucaaaag

SEQ ID NO: 300842 - RNA, 24 nt, Human
uauacaaauucaggugggagcauu

SEQ ID NO: 300843 - RNA, 22 nt, Human
uauauagaaauacauauauaca

SEQ ID NO: 300844 - RNA, 22 nt, Human
uauauagaaauacauauauaca

SEQ ID NO: 300845 - RNA, 18 nt, Human
ucaaaaccaaacuuuagc

SEQ ID NO: 300846 - RNA, 18 nt, Human
ucacaaaaauaggaccau

SEQ ID NO: 300847 - RNA, 24 nt, Human
ucaggaaauaagcccccccucaau

SEQ ID NO: 300848 - RNA, 26 nt, Human
ucaucaggcaugaagaaaaaaaaaaa

SEQ ID NO: 300849 - RNA, 23 nt, Human
ucauuucaaaauaucccauucau

SEQ ID NO: 300850 - RNA, 25 nt, Human
uccaaacuucacacaccacugagau

SEQ ID NO: 300851 - RNA, 25 nt, Human
uccaaagcaucaucugccgauagca

SEQ ID NO: 300852 - RNA, 23 nt, Human
ucccuuauccaucuaucuccaaa

SEQ ID NO: 300853 - RNA, 19 nt, Human
uccucccaucuaaccucaa

SEQ ID NO: 300854 - RNA, 24 nt, Human
uccuccgauguuauuccgcaauga

SEQ ID NO: 300855 - RNA, 20 nt, Human
uccuccucucaaccuccgca

SEQ ID NO: 300856 - RNA, 24 nt, Human
ucgacaacaacuggggggcgggga

SEQ ID NO: 300857 - RNA, 20 nt, Human
ucucacacauucaccacacc

SEQ ID NO: 300858 - RNA, 22 nt, Human
ucucucaaacucccugcgcucc

SEQ ID NO: 300859 - RNA, 23 nt, Human
ucuuaugucccucuucacaaaaa

SEQ ID NO: 300860 - RNA, 23 nt, Human
ucuuccaaagcaucaucugccga

SEQ ID NO: 300861 - RNA, 20 nt, Human
ugaaaacacacacacaccca

SEQ ID NO: 300862 - RNA, 21 nt, Human
ugaaaacacacacacacccac

SEQ ID NO: 300863 - RNA, 23 nt, Human
ugaaaacacacacacacccacaa

SEQ ID NO: 300864 - RNA, 21 nt, Human
ugaacaggggcauucguaaua

SEQ ID NO: 300865 - RNA, 18 nt, Human
ugacaucagguuucaaga

SEQ ID NO: 300866 - RNA, 18 nt, Human
ugagauuacaccaguagg

SEQ ID NO: 300867 - RNA, 21 nt, Human
ugagcugguuacacagagacu

SEQ ID NO: 300868 - RNA, 22 nt, Human
ugaguggucucuucagaagucc

SEQ ID NO: 300869 - RNA, 19 nt, Human
ugccaaagcuuucaucagg

SEQ ID NO: 300870 - RNA, 24 nt, Human
uggaaggaaccccucgaauccgcc

SEQ ID NO: 300871 - RNA, 21 nt, Human
uggaauuugcugaaaacacac

SEQ ID NO: 300872 - RNA, 23 nt, Human
uggcgggguauggagugggaggc

SEQ ID NO: 300873 - RNA, 18 nt, Human
uggcucagucuucgcacu

SEQ ID NO: 300874 - RNA, 23 nt, Human
ugggaggcagaagacgggagacg

SEQ ID NO: 300875 - RNA, 18 nt, Human
ugggcauccuucugaccc

SEQ ID NO: 300876 - RNA, 23 nt, Human
uggucucuucagaaguccaaaga

SEQ ID NO: 300877 - RNA, 18 nt, Human
ugucaggcuucuaaauga

SEQ ID NO: 300878 - RNA, 19 nt, Human
ugucaugcaaggcucacag

SEQ ID NO: 300879 - RNA, 22 nt, Human
uguuucucucccuguagcucca

SEQ ID NO: 300880 - RNA, 18 nt, Human
uguuuguuucuaauccca

SEQ ID NO: 300881 - RNA, 23 nt, Human
uuauugcuucugcaucuuccaaa

SEQ ID NO: 300882 - RNA, 22 nt, Human
uucauucauauuuagaacgcuc

SEQ ID NO: 300883 - RNA, 24 nt, Human
uuuacauaauuacaaugcugaagu

SEQ ID NO: 300884 - RNA, 18 nt, Human
uuuuccaccaaaacacug

SEQ ID NO: 300885 - RNA, 24 nt, Human
uuuuugcucuuacgcaaucagggg

SEQ ID NO: 300886 - RNA, 24 nt, Human
aaaaaaaaguacacagauagaaaa

SEQ ID NO: 300887 - RNA, 18 nt, Human
aaaccauacccccaugga

SEQ ID NO: 300888 - RNA, 18 nt, Human
aaaccuccaaagcgccca

SEQ ID NO: 300889 - RNA, 20 nt, Human
aaagaggucccguggucuuc

SEQ ID NO: 300890 - RNA, 20 nt, Human
aacccugacuccccuggcac

SEQ ID NO: 300891 - RNA, 22 nt, Human
aaccuccaaagcgcccaccucc

SEQ ID NO: 300892 - RNA, 24 nt, Human
aagcccggucaggccaggccagga

SEQ ID NO: 300893 - RNA, 21 nt, Human
aagcgcccaccucucacaucc

SEQ ID NO: 300894 - RNA, 19 nt, Human
aagggcagccuggcugaca

SEQ ID NO: 300895 - RNA, 18 nt, Human
aagggcugcaggcugggg

SEQ ID NO: 300896 - RNA, 22 nt, Human
acagcauacaaaauagcauuuc

SEQ ID NO: 300897 - RNA, 20 nt, Human
acguggccacuccacacugg

SEQ ID NO: 300898 - RNA, 26 nt, Human
agaaggacaggcaggacuggugcagg

SEQ ID NO: 300899 - RNA, 18 nt, Human
agagaauccuagauucug

SEQ ID NO: 300900 - RNA, 18 nt, Human
agagggauggaggaaggg

SEQ ID NO: 300901 - RNA, 21 nt, Human
agagggauggaggaagggggc

SEQ ID NO: 300902 - RNA, 21 nt, Human
agagggauggaggaagggggc

SEQ ID NO: 300903 - RNA, 20 nt, Human
agagggcuggucacggcccc

SEQ ID NO: 300904 - RNA, 19 nt, Human
agcagccagggaggcuagg

SEQ ID NO: 300905 - RNA, 21 nt, Human
agccuggcugacaggaagccc

SEQ ID NO: 300906 - RNA, 20 nt, Human
agcgcugccucagggauggg

SEQ ID NO: 300907 - RNA, 19 nt, Human
aggcaggacuggugcaggc

SEQ ID NO: 300908 - RNA, 20 nt, Human
aggcagggcaggguaggggc

SEQ ID NO: 300909 - RNA, 21 nt, Human
aggccaggagaugcugggugc

SEQ ID NO: 300910 - RNA, 25 nt, Human
agggaggagacuggcuuucuucugg

SEQ ID NO: 300911 - RNA, 21 nt, Human
agggggggagcuucaggcagg

SEQ ID NO: 300912 - RNA, 22 nt, Human
agggguugagcuuccugcaccc

SEQ ID NO: 300913 - RNA, 22 nt, Human
auacucuagaauguuagugcug

SEQ ID NO: 300914 - RNA, 21 nt, Human
augcggggcccgucuggccuu

SEQ ID NO: 300915 - RNA, 21 nt, Human
augguuccugaguccccagag

SEQ ID NO: 300916 - RNA, 23 nt, Human
caaagcgcccaccucucacaucc

SEQ ID NO: 300917 - RNA, 19 nt, Human
cacauuuacauucucauca

SEQ ID NO: 300918 - RNA, 28 nt, Human
cacccccuccaggaaguccuccuuacug

SEQ ID NO: 300919 - RNA, 24 nt, Human
cacggccccugcaguuuucuugcc

SEQ ID NO: 300920 - RNA, 21 nt, Human
cagaaagcuuccagaagggga

SEQ ID NO: 300921 - RNA, 24 nt, Human
cagcagccagggaggcuagggucu

SEQ ID NO: 300922 - RNA, 24 nt, Human
cagcugacccccaggauggaaguu

SEQ ID NO: 300923 - RNA, 22 nt, Human
caggaaguccuccuuacugccc

SEQ ID NO: 300924 - RNA, 19 nt, Human
caggagcagaaagcuucca

SEQ ID NO: 300925 - RNA, 21 nt, Human
cagguccaaugcagagccagg

SEQ ID NO: 300926 - RNA, 25 nt, Human
caguaacuccaagaaucuucccagg

SEQ ID NO: 300927 - RNA, 23 nt, Human
cagugacaaaaccauacccccau

SEQ ID NO: 300928 - RNA, 23 nt, Human
ccaccuggaauacucuagaaugu

SEQ ID NO: 300929 - RNA, 19 nt, Human
ccagggaaguaaggugcca

SEQ ID NO: 300930 - RNA, 21 nt, Human
ccauauacuggcacacacacg

SEQ ID NO: 300931 - RNA, 23 nt, Human
ccauauacuggcacacacacgug

SEQ ID NO: 300932 - RNA, 19 nt, Human
cccaggagcccagcugacc

SEQ ID NO: 300933 - RNA, 19 nt, Human
cccauuuuacauaugggaa

SEQ ID NO: 300934 - RNA, 22 nt, Human
cccccggaggucaucgugggua

SEQ ID NO: 300935 - RNA, 24 nt, Human
cccccuucccaacccuccccgugc

SEQ ID NO: 300936 - RNA, 22 nt, Human
cccguggucuucccaugucccu

SEQ ID NO: 300937 - RNA, 21 nt, Human
cccucuuugucccuuuugccc

SEQ ID NO: 300938 - RNA, 22 nt, Human
cccuggggcagcugcugggggc

SEQ ID NO: 300939 - RNA, 22 nt, Human
ccguauugagaacccacucucc

SEQ ID NO: 300940 - RNA, 20 nt, Human
ccucaguaacuccaagaauc

SEQ ID NO: 300941 - RNA, 19 nt, Human
ccuccuaagccagccccag

SEQ ID NO: 300942 - RNA, 23 nt, Human
ccuccuaagccagccccaggguu

SEQ ID NO: 300943 - RNA, 20 nt, Human
ccuccuuggaccaacucugg

SEQ ID NO: 300944 - RNA, 18 nt, Human
ccucucacauccuucuug

SEQ ID NO: 300945 - RNA, 28 nt, Human
ccugcaaugcaggguuggugcccagagg

SEQ ID NO: 300946 - RNA, 18 nt, Human
ccugcaguuuucuugccu

SEQ ID NO: 300947 - RNA, 23 nt, Human
ccugcaguuuucuugccuccuaa

SEQ ID NO: 300948 - RNA, 18 nt, Human
cgccucacuccccaagca

SEQ ID NO: 300949 - RNA, 24 nt, Human
cgggaggagcagagccgccagagg

SEQ ID NO: 300950 - RNA, 23 nt, Human
cuagggucucuucccuagcuccu

SEQ ID NO: 300951 - RNA, 18 nt, Human
cuccuuacugcccucucc

SEQ ID NO: 300952 - RNA, 18 nt, Human
cugccucagggauggggc

SEQ ID NO: 300953 - RNA, 22 nt, Human
cugcgugugcuccaagugcccu

SEQ ID NO: 300954 - RNA, 21 nt, Human
cuggaaucucccaggagccca

SEQ ID NO: 300955 - RNA, 23 nt, Human
cuggcaccuccaaugcccacugg

SEQ ID NO: 300956 - RNA, 23 nt, Human
cugggggcuuuccaggacaccgg

SEQ ID NO: 300957 - RNA, 21 nt, Human
cuguguucuugagacuugcug

SEQ ID NO: 300958 - RNA, 18 nt, Human
cuuggcuacaacccugac

SEQ ID NO: 300959 - RNA, 23 nt, Human
cuuucccauuuuacauaugggaa

SEQ ID NO: 300960 - RNA, 19 nt, Human
gagcuuccugcacccccuu

SEQ ID NO: 300961 - RNA, 24 nt, Human
gauagaaaaacucaacagcauaca

SEQ ID NO: 300962 - RNA, 19 nt, Human
gcccucuuugucccuuuug

SEQ ID NO: 300963 - RNA, 28 nt, Human
gcgcugccucagggauggggggaacgcc

SEQ ID NO: 300964 - RNA, 20 nt, Human
gcguugggcagggcgagcac

SEQ ID NO: 300965 - RNA, 21 nt, Human
gcugggugcuggcaggggggg

SEQ ID NO: 300966 - RNA, 18 nt, Human
gcuggucacggccccugc

SEQ ID NO: 300967 - RNA, 24 nt, Human
gcuucuggugugggcacaguucca

SEQ ID NO: 300968 - RNA, 18 nt, Human
ggaugaggcaacacugcu

SEQ ID NO: 300969 - RNA, 22 nt, Human
ggccccugcaguuuucuugccu

SEQ ID NO: 300970 - RNA, 20 nt, Human
ggcucuggacagucaccccc

SEQ ID NO: 300971 - RNA, 22 nt, Human
gggcaaaccuccaaagcgccca

SEQ ID NO: 300972 - RNA, 18 nt, Human
ggggaaacugaggcccag

SEQ ID NO: 300973 - RNA, 20 nt, Human
ggggcagcuggugggugagg

SEQ ID NO: 300974 - RNA, 22 nt, Human
ggggccuggggaaggggcaugg

SEQ ID NO: 300975 - RNA, 24 nt, Human
gggggagcuucaggcagggcaggg

SEQ ID NO: 300976 - RNA, 24 nt, Human
ggugauaaagaaaaagccccagga

SEQ ID NO: 300977 - RNA, 24 nt, Human
gguggauaaaagugcgaggagaga

SEQ ID NO: 300978 - RNA, 19 nt, Human
guacacagauagaaaaacu

SEQ ID NO: 300979 - RNA, 21 nt, Human
gugggcacaguuccaggcucu

SEQ ID NO: 300980 - RNA, 18 nt, Human
gugggugaggggcaaacc

SEQ ID NO: 300981 - RNA, 27 nt, Human
uaaaaaaaaguacacagauagaaaaac

SEQ ID NO: 300982 - RNA, 24 nt, Human
uacacagauagaaaaacucaacag

SEQ ID NO: 300983 - RNA, 22 nt, Human
uagaaaaacucaacagcauaca

SEQ ID NO: 300984 - RNA, 23 nt, Human
uagaaggacaggcaggacuggug

SEQ ID NO: 300985 - RNA, 22 nt, Human
uagauucugggucaucaagccu

SEQ ID NO: 300986 - RNA, 21 nt, Human
uaggggagaggagcggcccag

SEQ ID NO: 300987 - RNA, 22 nt, Human
uauacuggcacacacacguggc

SEQ ID NO: 300988 - RNA, 21 nt, Human
uaucagaaagacugcuggucc

SEQ ID NO: 300989 - RNA, 21 nt, Human
uaucagaaagacugcuggucc

SEQ ID NO: 300990 - RNA, 26 nt, Human
ucaacagcauacaaaauagcauuucu

SEQ ID NO: 300991 - RNA, 21 nt, Human
ucacggccccugcaguuuucu

SEQ ID NO: 300992 - RNA, 19 nt, Human
ucacugcuaggucugggca

SEQ ID NO: 300993 - RNA, 20 nt, Human
ucaggccaggccaggagaug

SEQ ID NO: 300994 - RNA, 18 nt, Human
ucagggauggggcagcug

SEQ ID NO: 300995 - RNA, 20 nt, Human
ucaguuggccucccuggagg

SEQ ID NO: 300996 - RNA, 21 nt, Human
uccaaagcgcccaccucucac

SEQ ID NO: 300997 - RNA, 22 nt, Human
uccaaagcgcccaccucucaca

SEQ ID NO: 300998 - RNA, 20 nt, Human
ucccagaguggguaacagcu

SEQ ID NO: 300999 - RNA, 19 nt, Human
uccccuggcaccuccaaug

SEQ ID NO: 301000 - RNA, 18 nt, Human
ucccuggggcagcugcug

SEQ ID NO: 301001 - RNA, 26 nt, Human
ucccuggggcagcugcugggggcuuu

SEQ ID NO: 301002 - RNA, 21 nt, Human
ucccugggggaacccuggcuc

SEQ ID NO: 301003 - RNA, 25 nt, Human
uccuaagccagccccaggguuuggg

SEQ ID NO: 301004 - RNA, 19 nt, Human
uccuucgggaggagcagag

SEQ ID NO: 301005 - RNA, 19 nt, Human
ucgggccagggaacgcagg

SEQ ID NO: 301006 - RNA, 19 nt, Human
ucuagaauguuagugcugg

SEQ ID NO: 301007 - RNA, 23 nt, Human
ucuggccuucuagacucuggugg

SEQ ID NO: 301008 - RNA, 19 nt, Human
ucugucuucgacgcagacc

SEQ ID NO: 301009 - RNA, 18 nt, Human
ucuuggcuacaacccuga

SEQ ID NO: 301010 - RNA, 18 nt, Human
ugacuccccuggcaccuc

SEQ ID NO: 301011 - RNA, 23 nt, Human
ugagacuugcugggggccugggg

SEQ ID NO: 301012 - RNA, 19 nt, Human
ugauaagggcagccuggcu

SEQ ID NO: 301013 - RNA, 22 nt, Human
ugcacccccuucccaacccucc

SEQ ID NO: 301014 - RNA, 20 nt, Human
ugccucagggauggggcagc

SEQ ID NO: 301015 - RNA, 20 nt, Human
ugccucagggauggggcagc

SEQ ID NO: 301016 - RNA, 19 nt, Human
ugccuccuaagccagcccc

SEQ ID NO: 301017 - RNA, 19 nt, Human
ugcugggggccuggggaag

SEQ ID NO: 301018 - RNA, 21 nt, Human
uggaggaagggggcugcugua

SEQ ID NO: 301019 - RNA, 21 nt, Human
uggcacacacacguggccacu

SEQ ID NO: 301020 - RNA, 18 nt, Human
uggcucagagucaguugg

SEQ ID NO: 301021 - RNA, 23 nt, Human
uggcuucuggugugggcacaguu

SEQ ID NO: 301022 - RNA, 21 nt, Human
ugggaaaacugaguucccugg

SEQ ID NO: 301023 - RNA, 21 nt, Human
ugggcacaguuccaggcucug

SEQ ID NO: 301024 - RNA, 22 nt, Human
ugggcugcaggaggugaucuca

SEQ ID NO: 301025 - RNA, 20 nt, Human
uggggaaggggcaugguucc

SEQ ID NO: 301026 - RNA, 18 nt, Human
ugggucuggcugucugcg

SEQ ID NO: 301027 - RNA, 21 nt, Human
uguguucuugagacuugcugg

SEQ ID NO: 301028 - RNA, 22 nt, Human
uuccaggcucuggacagucacc

SEQ ID NO: 301029 - RNA, 19 nt, Human
uucccaugucccuggggca

SEQ ID NO: 301030 - RNA, 19 nt, Human
uucccugggggaacccugg

SEQ ID NO: 301031 - RNA, 19 nt, Human
uuccuugagggguagcugg

SEQ ID NO: 301032 - RNA, 21 nt, Human
uucuagacucugguggaugga

SEQ ID NO: 301033 - RNA, 24 nt, Human
aagcacuaauaaaaggaaccccaa

SEQ ID NO: 301034 - RNA, 20 nt, Human
aaugggcuuuccauaaguuc

SEQ ID NO: 301035 - RNA, 23 nt, Human
acauguauaaaaacuaggaacac

SEQ ID NO: 301036 - RNA, 19 nt, Human
cugugaauagacuggauga

SEQ ID NO: 301037 - RNA, 20 nt, Human
cuugacaucagccucuggcc

SEQ ID NO: 301038 - RNA, 25 nt, Human
gcaaagcacuaauaaaaggaacccc

SEQ ID NO: 301039 - RNA, 22 nt, Human
gcaggagcgcggcggcugcgcg

SEQ ID NO: 301040 - RNA, 19 nt, Human
gcgcggggcggggacgcag

SEQ ID NO: 301041 - RNA, 22 nt, Human
gcggcugcgcggggcggggacg

SEQ ID NO: 301042 - RNA, 19 nt, Human
uaaaaggaaccccaaagcu

SEQ ID NO: 301043 - RNA, 24 nt, Human
uaauaaaaggaaccccaaagcuga

SEQ ID NO: 301044 - RNA, 19 nt, Human
uauaaaauuguuuacacau

SEQ ID NO: 301045 - RNA, 23 nt, Human
uggcaaagcacuaauaaaaggaa

SEQ ID NO: 301046 - RNA, 18 nt, Human
ugggcuuuccauaaguuc

SEQ ID NO: 301047 - RNA, 22 nt, Human
uguagguaagcaaucaaaauca

SEQ ID NO: 301048 - RNA, 18 nt, Human
acccaggaggcacgacgc

SEQ ID NO: 301049 - RNA, 23 nt, Human
acccaggaggcacgacgcgggug

SEQ ID NO: 301050 - RNA, 22 nt, Human
cagcggcgacuccucacaaccc

SEQ ID NO: 301051 - RNA, 29 nt, Human
caggcaguggcggcagcggcgacuccucu

SEQ ID NO: 301052 - RNA, 26 nt, Human
ggcggcagcggcgacuccucacaacc

SEQ ID NO: 301053 - RNA, 24 nt, Human
gugcccccaagucuccuucaggug

SEQ ID NO: 301054 - RNA, 18 nt, Human
ugacuggguuuucuuccu

SEQ ID NO: 301055 - RNA, 19 nt, Human
ugacuggguuuucuuccuc

SEQ ID NO: 301056 - RNA, 22 nt, Human
uggcggcagcggcgacuccuca

SEQ ID NO: 301057 - RNA, 25 nt, Human
uggcggcagcggcgacuccucacaa

SEQ ID NO: 301058 - RNA, 27 nt, Human
uuacuaccugcucaaucuacacacuua

SEQ ID NO: 301059 - RNA, 25 nt, Human
aaagaacauggcaaccguaacagac

SEQ ID NO: 301060 - RNA, 24 nt, Human
aaauccaggugcagugccagcaag

SEQ ID NO: 301061 - RNA, 24 nt, Human
aagcauggcaucuaggggaggaag

SEQ ID NO: 301062 - RNA, 21 nt, Human
acaaauccaggugcagugcca

SEQ ID NO: 301063 - RNA, 24 nt, Human
acaucuuucaugaggacucugcca

SEQ ID NO: 301064 - RNA, 25 nt, Human
agacaaaaggaagcauggcaucuag

SEQ ID NO: 301065 - RNA, 18 nt, Human
caaccguaacagacaaaa

SEQ ID NO: 301066 - RNA, 23 nt, Human
caaccguaacagacaaaaggaag

SEQ ID NO: 301067 - RNA, 22 nt, Human
cacaaacacauuuaaacuuccc

SEQ ID NO: 301068 - RNA, 19 nt, Human
cauggcaaccguaacagac

SEQ ID NO: 301069 - RNA, 22 nt, Human
cuugcaguacaaauccaggugc

SEQ ID NO: 301070 - RNA, 18 nt, Human
gcaguacaaauccaggug

SEQ ID NO: 301071 - RNA, 20 nt, Human
gggaggagaguggagaguuu

SEQ ID NO: 301072 - RNA, 23 nt, Human
ggggaggagaguggagaguuuuc

SEQ ID NO: 301073 - RNA, 20 nt, Human
uaaaauguuauauaauuugu

SEQ ID NO: 301074 - RNA, 18 nt, Human
uauucaaagaacauggca

SEQ ID NO: 301075 - RNA, 21 nt, Human
uauucaaagaacauggcaacc

SEQ ID NO: 301076 - RNA, 22 nt, Human
ucaaagaacauggcaaccguaa

SEQ ID NO: 301077 - RNA, 24 nt, Human
ugaauagucaggucuugcaguaca

SEQ ID NO: 301078 - RNA, 21 nt, Human
ugccagcaaguauuucaaaua

SEQ ID NO: 301079 - RNA, 21 nt, Human
uuccauacacaaacacauuua

SEQ ID NO: 301080 - RNA, 19 nt, Human
uuuguccuuguggugagag

SEQ ID NO: 301081 - RNA, 18 nt, Human
agagaagccacagccagu

SEQ ID NO: 301082 - RNA, 18 nt, Human
agccagguaaagugggga

SEQ ID NO: 301083 - RNA, 23 nt, Human
cagccaguacgccagguuucccg

SEQ ID NO: 301084 - RNA, 21 nt, Human
cagguuucccgcgccaauguu

SEQ ID NO: 301085 - RNA, 21 nt, Human
cuagagaagccacagccagua

SEQ ID NO: 301086 - RNA, 21 nt, Human
gagaagccacagccaguacgc

SEQ ID NO: 301087 - RNA, 19 nt, Human
gcuagagaagccacagcca

SEQ ID NO: 301088 - RNA, 24 nt, Human
guucugaacaccauaccuuccaaa

SEQ ID NO: 301089 - RNA, 20 nt, Human
ucccgcuagagaagccacag

SEQ ID NO: 301090 - RNA, 20 nt, Human
ucugaacaccauaccuucca

SEQ ID NO: 301091 - RNA, 25 nt, Human
aaaaaauuaucacauuucucuguac

SEQ ID NO: 301092 - RNA, 23 nt, Human
aaaaacagauggaaaacugaggc

SEQ ID NO: 301093 - RNA, 23 nt, Human
aaaacugaaauccacaaaaaaau

SEQ ID NO: 301094 - RNA, 24 nt, Human
aaaaugccugccuucugcuucccu

SEQ ID NO: 301095 - RNA, 23 nt, Human
aaacaaggguucacacacaaaca

SEQ ID NO: 301096 - RNA, 18 nt, Human
aaacugcuaaccaccauc

SEQ ID NO: 301097 - RNA, 24 nt, Human
aaagcucuuccccagauuucacaa

SEQ ID NO: 301098 - RNA, 20 nt, Human
aacuggucugccaaccuuca

SEQ ID NO: 301099 - RNA, 19 nt, Human
aagaauccauacugcuuuc

SEQ ID NO: 301100 - RNA, 19 nt, Human
aagacaaaaacacaaugua

SEQ ID NO: 301101 - RNA, 21 nt, Human
aagcagcacugguguagaccc

SEQ ID NO: 301102 - RNA, 21 nt, Human
aaggaguuuucguugcugucg

SEQ ID NO: 301103 - RNA, 21 nt, Human
acaaggguucacacacaaaca

SEQ ID NO: 301104 - RNA, 20 nt, Human
acacuaggccaccaugaaau

SEQ ID NO: 301105 - RNA, 23 nt, Human
acuagaauccuaaagcucuuccc

SEQ ID NO: 301106 - RNA, 26 nt, Human
acuagaauccuaaagcucuuccccag

SEQ ID NO: 301107 - RNA, 20 nt, Human
acucccuuucuuauucuuau

SEQ ID NO: 301108 - RNA, 22 nt, Human
acugaaaugacaaauaaccuag

SEQ ID NO: 301109 - RNA, 18 nt, Human
agacaaaaacacaaugua

SEQ ID NO: 301110 - RNA, 18 nt, Human
agugaagagucugggcag

SEQ ID NO: 301111 - RNA, 20 nt, Human
aucaguguucugauuaagga

SEQ ID NO: 301112 - RNA, 20 nt, Human
caaaaacagauggaaaacug

SEQ ID NO: 301113 - RNA, 19 nt, Human
caaauaaccuacugcaaac

SEQ ID NO: 301114 - RNA, 19 nt, Human
caacacuaggccaccauga

SEQ ID NO: 301115 - RNA, 19 nt, Human
caacuggucugccaaccuu

SEQ ID NO: 301116 - RNA, 23 nt, Human
cacacacaaacauucaggaagca

SEQ ID NO: 301117 - RNA, 21 nt, Human
cacaguauuugaguuaauuaa

SEQ ID NO: 301118 - RNA, 18 nt, Human
caccaugaaauuacacac

SEQ ID NO: 301119 - RNA, 22 nt, Human
cacccggccuggcggggacugu

SEQ ID NO: 301120 - RNA, 24 nt, Human
cacccggccuggcggggacugugg

SEQ ID NO: 301121 - RNA, 24 nt, Human
cacuaggccaccaugaaauuacac

SEQ ID NO: 301122 - RNA, 18 nt, Human
cacucacucccuuucuua

SEQ ID NO: 301123 - RNA, 22 nt, Human
ccccggccugggcugggguuug

SEQ ID NO: 301124 - RNA, 20 nt, Human
ccgagggggcgcggcgcguc

SEQ ID NO: 301125 - RNA, 18 nt, Human
ccuacugcaaacuguuuu

SEQ ID NO: 301126 - RNA, 22 nt, Human
ccuggcggggacuguggcuggc

SEQ ID NO: 301127 - RNA, 22 nt, Human
cgcguccgggcgaggacugcag

SEQ ID NO: 301128 - RNA, 24 nt, Human
cuccaauccccaacaucccgaguu

SEQ ID NO: 301129 - RNA, 24 nt, Human
cugccuucugcuucccucucuucc

SEQ ID NO: 301130 - RNA, 27 nt, Human
cuggacucccaccauuaagaaauguca

SEQ ID NO: 301131 - RNA, 20 nt, Human
cugucuaggacuucugauga

SEQ ID NO: 301132 - RNA, 18 nt, Human
gaaaagcccuuccuacug

SEQ ID NO: 301133 - RNA, 25 nt, Human
gaagcaccacaacacuaggccacca

SEQ ID NO: 301134 - RNA, 22 nt, Human
gagcagagccugguuccgaggg

SEQ ID NO: 301135 - RNA, 22 nt, Human
gcggggacuguggcuggcuuga

SEQ ID NO: 301136 - RNA, 23 nt, Human
gcuggcuugaggggcgaaggcug

SEQ ID NO: 301137 - RNA, 22 nt, Human
ggccuggcggggacuguggcug

SEQ ID NO: 301138 - RNA, 23 nt, Human
ggccugggcugggguuugagggu

SEQ ID NO: 301139 - RNA, 24 nt, Human
ggccugggcugggguuugagggug

SEQ ID NO: 301140 - RNA, 22 nt, Human
ggcugggguuugagggugccgc

SEQ ID NO: 301141 - RNA, 18 nt, Human
ggcuugugcgccccggcc

SEQ ID NO: 301142 - RNA, 25 nt, Human
gggaaaauagaaaaaugccgguacc

SEQ ID NO: 301143 - RNA, 18 nt, Human
ggucacagaaacaagcuc

SEQ ID NO: 301144 - RNA, 20 nt, Human
guaaaguguccugagugucc

SEQ ID NO: 301145 - RNA, 19 nt, Human
uaaaaaacugaaaugacaa

SEQ ID NO: 301146 - RNA, 19 nt, Human
uaaaagguacuuaaauucu

SEQ ID NO: 301147 - RNA, 23 nt, Human
uaaaguguccugagugucccuuc

SEQ ID NO: 301148 - RNA, 22 nt, Human
uaagaaaugucacugucuagga

SEQ ID NO: 301149 - RNA, 23 nt, Human
uacacacaaaugucaaauucaac

SEQ ID NO: 301150 - RNA, 22 nt, Human
uaccagaagcaccacaacacua

SEQ ID NO: 301151 - RNA, 24 nt, Human
uaccauuaccagaagcaccacaac

SEQ ID NO: 301152 - RNA, 24 nt, Human
uaccuuaacucucccaaaaauacc

SEQ ID NO: 301153 - RNA, 18 nt, Human
uagaaaauggaugccuuu

SEQ ID NO: 301154 - RNA, 22 nt, Human
uagaauccuaaagcucuucccc

SEQ ID NO: 301155 - RNA, 27 nt, Human
uaucccagaaaauacagaagguccuuc

SEQ ID NO: 301156 - RNA, 21 nt, Human
ucaaaaacagauggaaaacug

SEQ ID NO: 301157 - RNA, 20 nt, Human
ucaaaguucauuugcacagu

SEQ ID NO: 301158 - RNA, 18 nt, Human
ucaggauuugauauaaac

SEQ ID NO: 301159 - RNA, 22 nt, Human
ucagugcacaucuaacaauuca

SEQ ID NO: 301160 - RNA, 23 nt, Human
ucagugcacaucuaacaauucac

SEQ ID NO: 301161 - RNA, 23 nt, Human
ucccaccauuaagaaaugucacu

SEQ ID NO: 301162 - RNA, 22 nt, Human
uccccaacaucccgaguucagu

SEQ ID NO: 301163 - RNA, 18 nt, Human
uccuaaagcucuucccca

SEQ ID NO: 301164 - RNA, 23 nt, Human
uccugggucacagaaacaagcuc

SEQ ID NO: 301165 - RNA, 19 nt, Human
ucuccugggucacagaaac

SEQ ID NO: 301166 - RNA, 28 nt, Human
ucucuguacauagcauaaagacaaaaac

SEQ ID NO: 301167 - RNA, 23 nt, Human
ucuguuaacuccuguagucuugc

SEQ ID NO: 301168 - RNA, 23 nt, Human
ugaaaugacaaauaaccuacugc

SEQ ID NO: 301169 - RNA, 26 nt, Human
ugaaaugacaaauaaccuacugcaaa

SEQ ID NO: 301170 - RNA, 21 nt, Human
ugaacaagaggccuaaaauau

SEQ ID NO: 301171 - RNA, 18 nt, Human
ugacaaauaaccuacugc

SEQ ID NO: 301172 - RNA, 27 nt, Human
ugauaaaaacugaaauccacaaaaaaa

SEQ ID NO: 301173 - RNA, 19 nt, Human
uguggcuggcuugaggggc

SEQ ID NO: 301174 - RNA, 22 nt, Human
uuaaacagacauauuaaugcug

SEQ ID NO: 301175 - RNA, 19 nt, Human
uuauucuuaucaaaaacag

SEQ ID NO: 301176 - RNA, 21 nt, Human
uucaggguagagaaaagcccu

SEQ ID NO: 301177 - RNA, 24 nt, Human
uucagugcacaucuaacaauucac

SEQ ID NO: 301178 - RNA, 23 nt, Human
uuucaggguagagaaaagcccuu

SEQ ID NO: 301179 - RNA, 18 nt, Human
uuuggaggaaacaagggu

SEQ ID NO: 301180 - RNA, 21 nt, Human
uuuggcaauucucucucucca

SEQ ID NO: 301181 - RNA, 18 nt, Human
uuuucguugcugucguuu

SEQ ID NO: 301182 - RNA, 20 nt, Human
aaaaggaaaaacaaaacaau

SEQ ID NO: 301183 - RNA, 18 nt, Human
aaaaguaaacaacaaaaa

SEQ ID NO: 301184 - RNA, 22 nt, Human
aaaguuguucauucagcuuaag

SEQ ID NO: 301185 - RNA, 24 nt, Human
aaaguuguucauucagcuuaaggu

SEQ ID NO: 301186 - RNA, 21 nt, Human
aacagccaaaaggaaaaacaa

SEQ ID NO: 301187 - RNA, 24 nt, Human
acaaaacaaucaacaugcaguagc

SEQ ID NO: 301188 - RNA, 24 nt, Human
accaaaaugaacagccaaaaggaa

SEQ ID NO: 301189 - RNA, 23 nt, Human
agccaaaaggaaaaacaaaacaa

SEQ ID NO: 301190 - RNA, 20 nt, Human
aggaaaaacaaaacaaucaa

SEQ ID NO: 301191 - RNA, 20 nt, Human
aguaaacaacaaaaaacagu

SEQ ID NO: 301192 - RNA, 24 nt, Human
auuuccuuauaguagccaccaaaa

SEQ ID NO: 301193 - RNA, 26 nt, Human
caaaacaaucaacaugcaguagcucc

SEQ ID NO: 301194 - RNA, 25 nt, Human
caaaaugaacagccaaaaggaaaaa

SEQ ID NO: 301195 - RNA, 18 nt, Human
caaucaacaugcaguagc

SEQ ID NO: 301196 - RNA, 22 nt, Human
ccaaaaugaacagccaaaagga

SEQ ID NO: 301197 - RNA, 21 nt, Human
ccacaaguaaagaugcaaaag

SEQ ID NO: 301198 - RNA, 22 nt, Human
gcaaaaguaaacaacaaaaaac

SEQ ID NO: 301199 - RNA, 19 nt, Human
ggaaaaacaaaacaaucaa

SEQ ID NO: 301200 - RNA, 22 nt, Human
ggcaagcucugcaggccaccga

SEQ ID NO: 301201 - RNA, 22 nt, Human
uagccaccaaaaugaacagcca

SEQ ID NO: 301202 - RNA, 20 nt, Human
uauaguagccaccaaaauga

SEQ ID NO: 301203 - RNA, 18 nt, Human
uaugaggacuugccacag

SEQ ID NO: 301204 - RNA, 19 nt, Human
uccacaaguaaagaugcaa

SEQ ID NO: 301205 - RNA, 22 nt, Human
uccacaaguaaagaugcaaaag

SEQ ID NO: 301206 - RNA, 23 nt, Human
ucugcaggccaccgaauucuugu

SEQ ID NO: 301207 - RNA, 18 nt, Human
uguucagaguccagaagc

SEQ ID NO: 301208 - RNA, 21 nt, Human
uucaagagaagaaaaguuguu

SEQ ID NO: 301209 - RNA, 22 nt, Human
uucaagagaagaaaaguuguuc

SEQ ID NO: 301210 - RNA, 18 nt, Human
aacagcuugcagggcacc

SEQ ID NO: 301211 - RNA, 22 nt, Human
aacuuucaagagaggagagggc

SEQ ID NO: 301212 - RNA, 19 nt, Human
aagcagagggaaaaccaaa

SEQ ID NO: 301213 - RNA, 18 nt, Human
agagaagaacgguggggc

SEQ ID NO: 301214 - RNA, 21 nt, Human
aggcagggaggggacucaaug

SEQ ID NO: 301215 - RNA, 18 nt, Human
agggacacaguguugcug

SEQ ID NO: 301216 - RNA, 20 nt, Human
aguuuuccuuuaauuguaaa

SEQ ID NO: 301217 - RNA, 22 nt, Human
caaggugacacugaacaaaaca

SEQ ID NO: 301218 - RNA, 20 nt, Human
cacaguguugcugacaaggu

SEQ ID NO: 301219 - RNA, 18 nt, Human
cagcagagaagaacggug

SEQ ID NO: 301220 - RNA, 24 nt, Human
ccagaacacugagagaaaaagcug

SEQ ID NO: 301221 - RNA, 20 nt, Human
ccuuuaauuguaaaagcggg

SEQ ID NO: 301222 - RNA, 23 nt, Human
gaagggacacaguguugcugaca

SEQ ID NO: 301223 - RNA, 22 nt, Human
gacacguuauauuugauugggu

SEQ ID NO: 301224 - RNA, 25 nt, Human
gcggaacagcuugcagggcaccccc

SEQ ID NO: 301225 - RNA, 19 nt, Human
gcugacaaggugacacuga

SEQ ID NO: 301226 - RNA, 20 nt, Human
ggagaaagagcggcgcggcg

SEQ ID NO: 301227 - RNA, 20 nt, Human
gucagacacguuauauuuga

SEQ ID NO: 301228 - RNA, 19 nt, Human
uaaaaacaaaaucaguguc

SEQ ID NO: 301229 - RNA, 21 nt, Human
ugacaaggugacacugaacaa

SEQ ID NO: 301230 - RNA, 20 nt, Human
ugagagaaaaagcugcagca

SEQ ID NO: 301231 - RNA, 18 nt, Human
uggcgggcgacgacccgc

SEQ ID NO: 301232 - RNA, 18 nt, Human
uggggcgaagggacacag

SEQ ID NO: 301233 - RNA, 19 nt, Human
uuuacaagcagagggaaaa

SEQ ID NO: 301234 - RNA, 19 nt, Human
cggcgccuccucagcgucc

SEQ ID NO: 301235 - RNA, 23 nt, Human
cggcgcgggcgccucccccgcag

SEQ ID NO: 301236 - RNA, 20 nt, Human
cuccucagcguccuccuccc

SEQ ID NO: 301237 - RNA, 21 nt, Human
gcgaagggcagcccggccgca

SEQ ID NO: 301238 - RNA, 21 nt, Human
ggcagcgaagggcagcccggc

SEQ ID NO: 301239 - RNA, 20 nt, Human
ggcggccaagccgcgcuggg

SEQ ID NO: 301240 - RNA, 23 nt, Human
uaaaaaugcugcaagguuuccgc

SEQ ID NO: 301241 - RNA, 20 nt, Human
ucggcgcgggcgccuccccc

SEQ ID NO: 301242 - RNA, 22 nt, Human
uggcagcgaagggcagcccggc

SEQ ID NO: 301243 - RNA, 23 nt, Human
uggcagguggucuggaagcgucc

SEQ ID NO: 301244 - RNA, 19 nt, Human
aaaaacaagacagauagaa

SEQ ID NO: 301245 - RNA, 18 nt, Human
aaaaugcucaaaugagcc

SEQ ID NO: 301246 - RNA, 23 nt, Human
aacaagacagauagaaaccaccc

SEQ ID NO: 301247 - RNA, 18 nt, Human
acaguguuauauaaguga

SEQ ID NO: 301248 - RNA, 20 nt, Human
acugaaucaacuaagcugaa

SEQ ID NO: 301249 - RNA, 21 nt, Human
agaaagguuuacauauuuuag

SEQ ID NO: 301250 - RNA, 22 nt, Human
agacagauagaaaccacccuaa

SEQ ID NO: 301251 - RNA, 20 nt, Human
agcagugcuuguaaaaguga

SEQ ID NO: 301252 - RNA, 23 nt, Human
agugaaaaacaagacagauagaa

SEQ ID NO: 301253 - RNA, 22 nt, Human
auauaagugaaaaacaagacag

SEQ ID NO: 301254 - RNA, 20 nt, Human
caaaaugcucaaaugagcca

SEQ ID NO: 301255 - RNA, 24 nt, Human
caaacauauacuuugauuuacauc

SEQ ID NO: 301256 - RNA, 19 nt, Human
caaauugaagaugaagaca

SEQ ID NO: 301257 - RNA, 19 nt, Human
caacuaagcugaacaccaa

SEQ ID NO: 301258 - RNA, 27 nt, Human
caagacagauagaaaccacccuaaacc

SEQ ID NO: 301259 - RNA, 23 nt, Human
cacuucauacuuaaauaccaagu

SEQ ID NO: 301260 - RNA, 23 nt, Human
cagcaccagagguuaaaaaugga

SEQ ID NO: 301261 - RNA, 18 nt, Human
cagugcuuguaaaaguga

SEQ ID NO: 301262 - RNA, 22 nt, Human
cuuuauacagcaccagagguua

SEQ ID NO: 301263 - RNA, 18 nt, Human
gacucaagaugaaggcaa

SEQ ID NO: 301264 - RNA, 24 nt, Human
gguuuaccuagaaagguuuacaua

SEQ ID NO: 301265 - RNA, 21 nt, Human
uaaaagugaggucccacugcu

SEQ ID NO: 301266 - RNA, 19 nt, Human
uaagcugaacaccaacuuc

SEQ ID NO: 301267 - RNA, 22 nt, Human
uaagcugaacaccaacuucuua

SEQ ID NO: 301268 - RNA, 25 nt, Human
uacagcaccagagguuaaaaaugga

SEQ ID NO: 301269 - RNA, 19 nt, Human
uacauucucaaauauucca

SEQ ID NO: 301270 - RNA, 24 nt, Human
uauguacauaaaaaauucaauaau

SEQ ID NO: 301271 - RNA, 19 nt, Human
ucaagaugaaggcaagcgg

SEQ ID NO: 301272 - RNA, 18 nt, Human
ucuuuucauucaugcuuc

SEQ ID NO: 301273 - RNA, 20 nt, Human
ugaaaaacaagacagauaga

SEQ ID NO: 301274 - RNA, 25 nt, Human
ugaaaaacaagacagauagaaacca

SEQ ID NO: 301275 - RNA, 18 nt, Human
ugccauaaccccuaauac

SEQ ID NO: 301276 - RNA, 24 nt, Human
ugcuaaguuaauggccaucucuuu

SEQ ID NO: 301277 - RNA, 24 nt, Human
uuuacaucuaguuuaauauucccu

SEQ ID NO: 301278 - RNA, 20 nt, Human
uuuauuauccagaauaaacu

SEQ ID NO: 301279 - RNA, 20 nt, Human
uuugaagaucacuucuaccu

SEQ ID NO: 301280 - RNA, 18 nt, Human
uuuuuuuuuuuuuuuuug

SEQ ID NO: 301281 - RNA, 23 nt, Human
uuuuuuuuuuuuuuuuuggcaag

SEQ ID NO: 301282 - RNA, 22 nt, Human
uuuuuuuuuuuuuuuuuuuggc

SEQ ID NO: 301283 - RNA, 18 nt, Human
aaacacggagacaccaac

SEQ ID NO: 301284 - RNA, 18 nt, Human
accagcagaugccggaca

SEQ ID NO: 301285 - RNA, 23 nt, Human
agcgcagacgccuccuucugacc

SEQ ID NO: 301286 - RNA, 22 nt, Human
cacagggacaaacacggagaca

SEQ ID NO: 301287 - RNA, 22 nt, Human
cacuuuguuauuuuucacaaag

SEQ ID NO: 301288 - RNA, 19 nt, Human
ccagcagaugccggacacu

SEQ ID NO: 301289 - RNA, 19 nt, Human
cccucggcugcgacucugg

SEQ ID NO: 301290 - RNA, 22 nt, Human
ccgaggcgggggcacggucucc

SEQ ID NO: 301291 - RNA, 22 nt, Human
ccgccgcucgcucgggcuccgg

SEQ ID NO: 301292 - RNA, 21 nt, Human
ccggccccggcuccccucggc

SEQ ID NO: 301293 - RNA, 21 nt, Human
ccuggccgcggcggcgcgggg

SEQ ID NO: 301294 - RNA, 19 nt, Human
cgcucgggcuccggcucgg

SEQ ID NO: 301295 - RNA, 23 nt, Human
cggacacucaugaaagaaaaaaa

SEQ ID NO: 301296 - RNA, 19 nt, Human
cggcucgggcucgggcucc

SEQ ID NO: 301297 - RNA, 24 nt, Human
cuaaggcagacguuacauguuuuc

SEQ ID NO: 301298 - RNA, 20 nt, Human
cucgggcuccggccccggcc

SEQ ID NO: 301299 - RNA, 19 nt, Human
ggccgaggcgggggcacgg

SEQ ID NO: 301300 - RNA, 18 nt, Human
gggccgaggcgggggcac

SEQ ID NO: 301301 - RNA, 24 nt, Human
gggccgaggcgggggcacggucuc

SEQ ID NO: 301302 - RNA, 18 nt, Human
gggccuggccgcggcggc

SEQ ID NO: 301303 - RNA, 20 nt, Human
gugucacgggcaagcggcgg

SEQ ID NO: 301304 - RNA, 25 nt, Human
ugaagaccagcagaugccggacacu

SEQ ID NO: 301305 - RNA, 19 nt, Human
uggccgcggcggcgcgggg

SEQ ID NO: 301306 - RNA, 22 nt, Human
uuuuuuuuuuuuuuugugacca

SEQ ID NO: 301307 - RNA, 19 nt, Human
uuuuuuuuuuuuuuuuugu

SEQ ID NO: 301308 - RNA, 20 nt, Human
uuuuuuuuuuuuuuuuuugg

SEQ ID NO: 301309 - RNA, 23 nt, Human
aaacaaucuauccauuucagaac

SEQ ID NO: 301310 - RNA, 21 nt, Human
aaccaagacaucaggaggucu

SEQ ID NO: 301311 - RNA, 21 nt, Human
aagaggaaagaagcauuaugg

SEQ ID NO: 301312 - RNA, 19 nt, Human
aagcauuauggggauugaa

SEQ ID NO: 301313 - RNA, 20 nt, Human
acaaaauaacucuaaaacaa

SEQ ID NO: 301314 - RNA, 19 nt, Human
acauccacccuuccccauc

SEQ ID NO: 301315 - RNA, 21 nt, Human
acccaaugcccagugcguaug

SEQ ID NO: 301316 - RNA, 18 nt, Human
acuccaaccugaaaaggu

SEQ ID NO: 301317 - RNA, 20 nt, Human
agacagggagggcuuugaug

SEQ ID NO: 301318 - RNA, 20 nt, Human
agacauuaagaggaaagaag

SEQ ID NO: 301319 - RNA, 19 nt, Human
agagauaggcugggcuugg

SEQ ID NO: 301320 - RNA, 23 nt, Human
agaggaaagaagcauuaugggga

SEQ ID NO: 301321 - RNA, 21 nt, Human
agccuauuaaaggcuaagcaa

SEQ ID NO: 301322 - RNA, 21 nt, Human
agccucaucuccuggacccac

SEQ ID NO: 301323 - RNA, 19 nt, Human
aggcacuguccaggguacc

SEQ ID NO: 301324 - RNA, 22 nt, Human
agggcuuugauggaaaccaaga

SEQ ID NO: 301325 - RNA, 20 nt, Human
agggguuucuccugacucua

SEQ ID NO: 301326 - RNA, 18 nt, Human
aggguaccaacaugacug

SEQ ID NO: 301327 - RNA, 22 nt, Human
agucaggugcacaggagaucuu

SEQ ID NO: 301328 - RNA, 18 nt, Human
auaacauacucccacgca

SEQ ID NO: 301329 - RNA, 28 nt, Human
aucacaaacugcugcugcugcugcugcc

SEQ ID NO: 301330 - RNA, 20 nt, Human
aucuuucuuuuauuuauugu

SEQ ID NO: 301331 - RNA, 26 nt, Human
caaacugcugcugcugcugcugcugc

SEQ ID NO: 301332 - RNA, 21 nt, Human
caaagaggcagcugugaacac

SEQ ID NO: 301333 - RNA, 18 nt, Human
caagccuauuaaaggcua

SEQ ID NO: 301334 - RNA, 19 nt, Human
cacaaaauaacucuaaaac

SEQ ID NO: 301335 - RNA, 20 nt, Human
cacaaaccaaaagagagugc

SEQ ID NO: 301336 - RNA, 22 nt, Human
caccauggaguagaagcaugau

SEQ ID NO: 301337 - RNA, 23 nt, Human
caccauggaguagaagcaugaua

SEQ ID NO: 301338 - RNA, 21 nt, Human
cacucugcuuugucccugggc

SEQ ID NO: 301339 - RNA, 19 nt, Human
cagcaauuccugcggcuug

SEQ ID NO: 301340 - RNA, 23 nt, Human
cagccucaucuccuggacccaca

SEQ ID NO: 301341 - RNA, 19 nt, Human
caggugcacaggagaucuu

SEQ ID NO: 301342 - RNA, 25 nt, Human
cauuuuauuccucuuucugguuuua

SEQ ID NO: 301343 - RNA, 23 nt, Human
ccacccuuccccaucacagaccc

SEQ ID NO: 301344 - RNA, 19 nt, Human
cccacaaaccaaaagagag

SEQ ID NO: 301345 - RNA, 24 nt, Human
cccacaaaccaaaagagagugccu

SEQ ID NO: 301346 - RNA, 24 nt, Human
cccagagaaauaacauacucccac

SEQ ID NO: 301347 - RNA, 19 nt, Human
cccagugcguauguugggc

SEQ ID NO: 301348 - RNA, 21 nt, Human
ccucaucuccuggacccacaa

SEQ ID NO: 301349 - RNA, 20 nt, Human
gaaugcacuccaaccugaaa

SEQ ID NO: 301350 - RNA, 20 nt, Human
gcaaaagagagacagacaga

SEQ ID NO: 301351 - RNA, 24 nt, Human
gcauucaagaggcugcucucaauc

SEQ ID NO: 301352 - RNA, 19 nt, Human
gcucaggggccuccuugac

SEQ ID NO: 301353 - RNA, 22 nt, Human
ggcugcugcaacagcucccccc

SEQ ID NO: 301354 - RNA, 20 nt, Human
ggcuugggcugcugcaacag

SEQ ID NO: 301355 - RNA, 18 nt, Human
gggccagauggcuuggac

SEQ ID NO: 301356 - RNA, 19 nt, Human
uaaacccacuagaagacug

SEQ ID NO: 301357 - RNA, 28 nt, Human
uaagcaaauuccaaguaaauugcauaaa

SEQ ID NO: 301358 - RNA, 21 nt, Human
uaaguuuggacaucauagacc

SEQ ID NO: 301359 - RNA, 24 nt, Human
uacaaauuauccagacucaagccu

SEQ ID NO: 301360 - RNA, 23 nt, Human
uacacaagccuauuaaaggcuaa

SEQ ID NO: 301361 - RNA, 23 nt, Human
uagaccuacagguacaaagaaca

SEQ ID NO: 301362 - RNA, 19 nt, Human
uaggauuucuguguaugaa

SEQ ID NO: 301363 - RNA, 23 nt, Human
uauccagccucaucuccuggacc

SEQ ID NO: 301364 - RNA, 22 nt, Human
uauuaaaggcuaagcaaauucc

SEQ ID NO: 301365 - RNA, 22 nt, Human
uauuuuguacacaaugcugagc

SEQ ID NO: 301366 - RNA, 26 nt, Human
ucacaaacugcugcugcugcugcugc

SEQ ID NO: 301367 - RNA, 21 nt, Human
ucagggguuucuccugacucu

SEQ ID NO: 301368 - RNA, 21 nt, Human
ucaggugcacaggagaucuuu

SEQ ID NO: 301369 - RNA, 22 nt, Human
ucauuuggccucaagcacuuaa

SEQ ID NO: 301370 - RNA, 19 nt, Human
uccacccuuccccaucaca

SEQ ID NO: 301371 - RNA, 19 nt, Human
ucccacgcagaagagagau

SEQ ID NO: 301372 - RNA, 18 nt, Human
uccccaucacagacccca

SEQ ID NO: 301373 - RNA, 21 nt, Human
uccugcggcuugggcugcugc

SEQ ID NO: 301374 - RNA, 23 nt, Human
ucggagguggcaguggcuggucc

SEQ ID NO: 301375 - RNA, 23 nt, Human
ucuauccauuucagaacaucauc

SEQ ID NO: 301376 - RNA, 24 nt, Human
ucuccugacucuacuccaugaaaa

SEQ ID NO: 301377 - RNA, 25 nt, Human
ucugguuuuauuuugagacauuaag

SEQ ID NO: 301378 - RNA, 19 nt, Human
ugaaugcacuccaaccuga

SEQ ID NO: 301379 - RNA, 18 nt, Human
ugacuaaacauuaaaccc

SEQ ID NO: 301380 - RNA, 19 nt, Human
ugauguguauacuaucugc

SEQ ID NO: 301381 - RNA, 20 nt, Human
ugauguguauacuaucugca

SEQ ID NO: 301382 - RNA, 21 nt, Human
ugcaacagcuccccccacgca

SEQ ID NO: 301383 - RNA, 18 nt, Human
ugccucugauucaggguu

SEQ ID NO: 301384 - RNA, 19 nt, Human
ugccugggaaugagagagc

SEQ ID NO: 301385 - RNA, 18 nt, Human
ugcucagcagcaucuuau

SEQ ID NO: 301386 - RNA, 19 nt, Human
ugcugagcugagcaugggg

SEQ ID NO: 301387 - RNA, 23 nt, Human
ugcugccgcugcugauaguuuua

SEQ ID NO: 301388 - RNA, 18 nt, Human
ugcugcugcugccgcugc

SEQ ID NO: 301389 - RNA, 21 nt, Human
ugcugcugcugcugcugcugc

SEQ ID NO: 301390 - RNA, 24 nt, Human
uggacccacaaaccaaaagagagu

SEQ ID NO: 301391 - RNA, 24 nt, Human
uggcugguccaaggcucaggggcc

SEQ ID NO: 301392 - RNA, 19 nt, Human
ugggccagauggcuuggac

SEQ ID NO: 301393 - RNA, 21 nt, Human
uugagauuugggaauauaaug

SEQ ID NO: 301394 - RNA, 21 nt, Human
uuuaaaggacacaaaauaacu

SEQ ID NO: 301395 - RNA, 18 nt, Human
uuucacucccuucuguaa

SEQ ID NO: 301396 - RNA, 19 nt, Human
uuuucacucccuucuguaa

SEQ ID NO: 301397 - RNA, 23 nt, Human
uuuucugaacaaugaggacucag

SEQ ID NO: 301398 - RNA, 22 nt, Human
aaacaggucacaacucauuccu

SEQ ID NO: 301399 - RNA, 24 nt, Human
acagaaugagacccuggagaugga

SEQ ID NO: 301400 - RNA, 22 nt, Human
accacugcacuccagccugggc

SEQ ID NO: 301401 - RNA, 24 nt, Human
acugcacuccagccugggcaacag

SEQ ID NO: 301402 - RNA, 27 nt, Human
agaaaggauuccuauuaaauacccaga

SEQ ID NO: 301403 - RNA, 24 nt, Human
agagguugcugugagccgagaucg

SEQ ID NO: 301404 - RNA, 20 nt, Human
aguaaacaggucacaacuca

SEQ ID NO: 301405 - RNA, 24 nt, Human
aucgcaccacugcacuccagccug

SEQ ID NO: 301406 - RNA, 28 nt, Human
aucgcaccacugcacuccagccugggca

SEQ ID NO: 301407 - RNA, 18 nt, Human
augauaacagaagacaau

SEQ ID NO: 301408 - RNA, 23 nt, Human
cacaacauuguuacaaaagcaca

SEQ ID NO: 301409 - RNA, 22 nt, Human
cacaauuuuaauaggcuuaucu

SEQ ID NO: 301410 - RNA, 19 nt, Human
cacugcacuccagccuggg

SEQ ID NO: 301411 - RNA, 21 nt, Human
cacugcacuccagccugggca

SEQ ID NO: 301412 - RNA, 22 nt, Human
cacugcacuccagccugggcaa

SEQ ID NO: 301413 - RNA, 23 nt, Human
cacugcacuccagccugggcaac

SEQ ID NO: 301414 - RNA, 24 nt, Human
cacugcacuccagccugggcaaca

SEQ ID NO: 301415 - RNA, 21 nt, Human
cagcuaucaaauaaacagcca

SEQ ID NO: 301416 - RNA, 20 nt, Human
ccacugcacuccagccuggg

SEQ ID NO: 301417 - RNA, 20 nt, Human
ccacugcacuccagccuggg

SEQ ID NO: 301418 - RNA, 21 nt, Human
ccacugcacuccagccugggc

SEQ ID NO: 301419 - RNA, 23 nt, Human
ccacugcacuccagccugggcaa

SEQ ID NO: 301420 - RNA, 24 nt, Human
ccacugcacuccagccugggcaac

SEQ ID NO: 301421 - RNA, 23 nt, Human
cucaaggaaccuguagaaguaag

SEQ ID NO: 301422 - RNA, 22 nt, Human
gagacaucaucauacagagaaa

SEQ ID NO: 301423 - RNA, 23 nt, Human
gagaucgcaccacugcacuccag

SEQ ID NO: 301424 - RNA, 20 nt, Human
gcaccacugcacuccagccu

SEQ ID NO: 301425 - RNA, 20 nt, Human
gccgagaucgcaccacugca

SEQ ID NO: 301426 - RNA, 24 nt, Human
gccgccuguaagacaaaugauaac

SEQ ID NO: 301427 - RNA, 22 nt, Human
ggaaaagaucacaugaaaaaaa

SEQ ID NO: 301428 - RNA, 19 nt, Human
ggaggcagagagguugcug

SEQ ID NO: 301429 - RNA, 23 nt, Human
gggcaacagaaugagacccugga

SEQ ID NO: 301430 - RNA, 20 nt, Human
ggugcucaaggaaccuguag

SEQ ID NO: 301431 - RNA, 21 nt, Human
guaagacaaaugauaacagaa

SEQ ID NO: 301432 - RNA, 23 nt, Human
uaagcagcugucaccuauacaga

SEQ ID NO: 301433 - RNA, 23 nt, Human
uaagcauaaauuagccgucugca

SEQ ID NO: 301434 - RNA, 20 nt, Human
uccuugagaaaggauuccua

SEQ ID NO: 301435 - RNA, 23 nt, Human
ucgcaccacugcacuccagccug

SEQ ID NO: 301436 - RNA, 31 nt, Human
ucgcaccacugcacuccagccugggcaacaa

SEQ ID NO: 301437 - RNA, 25 nt, Human
ugaaaaaaaucuagcucuugccuua

SEQ ID NO: 301438 - RNA, 22 nt, Human
ugagccgagaucgcaccacugc

SEQ ID NO: 301439 - RNA, 18 nt, Human
uggaagaggagcugcucc

SEQ ID NO: 301440 - RNA, 22 nt, Human
uugcugugagccgagaucgcac

SEQ ID NO: 301441 - RNA, 21 nt, Human
uuggugcucaaggaaccugua

SEQ ID NO: 301442 - RNA, 22 nt, Human
uuugcauuuguuaaugguauuu

SEQ ID NO: 301443 - RNA, 24 nt, Human
uuuuuuuuuuuuuuuuuugcauuu

SEQ ID NO: 301444 - RNA, 27 nt, Human
uuuuuuuuuuuuuuuuuuuuuuugggg

SEQ ID NO: 301445 - RNA, 19 nt, Human
aaaagggcagacauggcag

SEQ ID NO: 301446 - RNA, 26 nt, Human
aaacaguccagcacaggaguacaaac

SEQ ID NO: 301447 - RNA, 18 nt, Human
aacccugucucucuucuc

SEQ ID NO: 301448 - RNA, 20 nt, Human
aaccuccuccucggcucccg

SEQ ID NO: 301449 - RNA, 24 nt, Human
aacucagcccccuccccuagcccc

SEQ ID NO: 301450 - RNA, 26 nt, Human
aacucagcccccuccccuagccccug

SEQ ID NO: 301451 - RNA, 21 nt, Human
aaggagagagggaagguugcc

SEQ ID NO: 301452 - RNA, 23 nt, Human
aagggucucauucuucaaccucc

SEQ ID NO: 301453 - RNA, 23 nt, Human
aauaaccaaguugggacccuaua

SEQ ID NO: 301454 - RNA, 21 nt, Human
acaccacaaaaaagggcagac

SEQ ID NO: 301455 - RNA, 23 nt, Human
accaggaaaggaucccuggcuca

SEQ ID NO: 301456 - RNA, 20 nt, Human
acccugucucucuucuccca

SEQ ID NO: 301457 - RNA, 20 nt, Human
acccugucucucuucuccca

SEQ ID NO: 301458 - RNA, 23 nt, Human
acucccacauccuaaaagcuccu

SEQ ID NO: 301459 - RNA, 19 nt, Human
acugcagacagaagagcac

SEQ ID NO: 301460 - RNA, 23 nt, Human
acuguaguuaacuucuuucuggc

SEQ ID NO: 301461 - RNA, 19 nt, Human
agaaauagcccccaccucc

SEQ ID NO: 301462 - RNA, 21 nt, Human
agacaaaaagggaccugcugg

SEQ ID NO: 301463 - RNA, 19 nt, Human
agagggaagguugccuaca

SEQ ID NO: 301464 - RNA, 24 nt, Human
aggaaagggaaguaggaggaaugu

SEQ ID NO: 301465 - RNA, 21 nt, Human
agggaaagggagacuugggaa

SEQ ID NO: 301466 - RNA, 21 nt, Human
agggagaagccagacagggaa

SEQ ID NO: 301467 - RNA, 18 nt, Human
agguguucacaagcccag

SEQ ID NO: 301468 - RNA, 20 nt, Human
agguguucacaagcccaggg

SEQ ID NO: 301469 - RNA, 21 nt, Human
aguggguagaugguggguugc

SEQ ID NO: 301470 - RNA, 19 nt, Human
agugggugggcagguuagu

SEQ ID NO: 301471 - RNA, 23 nt, Human
auggggggaguggaggaaaggga

SEQ ID NO: 301472 - RNA, 23 nt, Human
auguuuuuugaaaaagccuucuu

SEQ ID NO: 301473 - RNA, 18 nt, Human
auuccccucccacccccg

SEQ ID NO: 301474 - RNA, 21 nt, Human
caaaaaagggcagacauggca

SEQ ID NO: 301475 - RNA, 20 nt, Human
caaaaagggaccugcuggua

SEQ ID NO: 301476 - RNA, 18 nt, Human
caaucucacagcaauaua

SEQ ID NO: 301477 - RNA, 24 nt, Human
cacaaaaaagggcagacauggcag

SEQ ID NO: 301478 - RNA, 20 nt, Human
cacacaguuagcacggucag

SEQ ID NO: 301479 - RNA, 21 nt, Human
cacacugcagacagaagagca

SEQ ID NO: 301480 - RNA, 22 nt, Human
cacgcacacacacgcgcacagu

SEQ ID NO: 301481 - RNA, 22 nt, Human
cacuccugaguccccgguuccu

SEQ ID NO: 301482 - RNA, 21 nt, Human
cacugcagacagaagagcaca

SEQ ID NO: 301483 - RNA, 23 nt, Human
cagaagagcacaagauaggggca

SEQ ID NO: 301484 - RNA, 25 nt, Human
cagagcgugcgcacacgcacacaca

SEQ ID NO: 301485 - RNA, 23 nt, Human
cagcacaggaguacaaacaugga

SEQ ID NO: 301486 - RNA, 19 nt, Human
cagcccccuccccuagccc

SEQ ID NO: 301487 - RNA, 20 nt, Human
cagcccccuccccuagcccc

SEQ ID NO: 301488 - RNA, 22 nt, Human
caguccagcacaggaguacaaa

SEQ ID NO: 301489 - RNA, 24 nt, Human
caguucaugcucauuccccccacc

SEQ ID NO: 301490 - RNA, 21 nt, Human
caugagagacaaaaagggacc

SEQ ID NO: 301491 - RNA, 22 nt, Human
caugcucauuccccccacccaa

SEQ ID NO: 301492 - RNA, 18 nt, Human
ccaaggagagagggaagg

SEQ ID NO: 301493 - RNA, 24 nt, Human
ccacauccuaaaagcuccuaacuu

SEQ ID NO: 301494 - RNA, 20 nt, Human
ccagacagggaaagggagac

SEQ ID NO: 301495 - RNA, 21 nt, Human
cccccuccccuagccccugac

SEQ ID NO: 301496 - RNA, 23 nt, Human
cccccuccccuagccccugaccc

SEQ ID NO: 301497 - RNA, 25 nt, Human
cccgccgccgccgccgccgccgcuu

SEQ ID NO: 301498 - RNA, 22 nt, Human
ccgagcccagcgccgcucacuc

SEQ ID NO: 301499 - RNA, 22 nt, Human
ccgccgccgccgccgccgccgc

SEQ ID NO: 301500 - RNA, 24 nt, Human
ccgccgccgccgccgccgccgcuu

SEQ ID NO: 301501 - RNA, 31 nt, Human
ccgccgccgccgccgcuucugccgccgccgg

SEQ ID NO: 301502 - RNA, 18 nt, Human
ccgccgccgccgcuucug

SEQ ID NO: 301503 - RNA, 20 nt, Human
ccgccgccgccucuuccgcc

SEQ ID NO: 301504 - RNA, 21 nt, Human
ccgccgccgccucuuccgccc

SEQ ID NO: 301505 - RNA, 24 nt, Human
ccgccgccgccucuuccgcccggu

SEQ ID NO: 301506 - RNA, 20 nt, Human
ccgccgccgcuucugccgcc

SEQ ID NO: 301507 - RNA, 23 nt, Human
ccgccgccgcuucugccgccgcc

SEQ ID NO: 301508 - RNA, 24 nt, Human
ccgccgcuucugccgccgccgccg

SEQ ID NO: 301509 - RNA, 26 nt, Human
ccgccgcuucugccgccgccgccgcc

SEQ ID NO: 301510 - RNA, 27 nt, Human
ccgccgcuucugccgccgccgccgccu

SEQ ID NO: 301511 - RNA, 18 nt, Human
ccgcucacuccacccggc

SEQ ID NO: 301512 - RNA, 26 nt, Human
ccgcuucugccgccgccgccgccucu

SEQ ID NO: 301513 - RNA, 20 nt, Human
ccggaaccuccuccucggcu

SEQ ID NO: 301514 - RNA, 18 nt, Human
ccguccccacugcuuuuc

SEQ ID NO: 301515 - RNA, 18 nt, Human
ccgugcacacugcagaca

SEQ ID NO: 301516 - RNA, 21 nt, Human
ccuaaaagcuccuaacuugaa

SEQ ID NO: 301517 - RNA, 22 nt, Human
ccuaugcuaggcccaugagaga

SEQ ID NO: 301518 - RNA, 26 nt, Human
ccucccacccccgcucuggccuagac

SEQ ID NO: 301519 - RNA, 19 nt, Human
ccuggauccaccuaccucu

SEQ ID NO: 301520 - RNA, 18 nt, Human
cgccgccgccgccgccgc

SEQ ID NO: 301521 - RNA, 21 nt, Human
cgcgggcacuccugagucccc

SEQ ID NO: 301522 - RNA, 21 nt, Human
cgcuucugccgccgccgccgc

SEQ ID NO: 301523 - RNA, 21 nt, Human
cggagcccgagcccagcgccg

SEQ ID NO: 301524 - RNA, 20 nt, Human
cggagccggagcccgagccc

SEQ ID NO: 301525 - RNA, 23 nt, Human
cuaaaagcuccuaacuugaacuu

SEQ ID NO: 301526 - RNA, 22 nt, Human
cuaacgcuggcugcuccauggg

SEQ ID NO: 301527 - RNA, 19 nt, Human
cuagacaccacaaaaaagg

SEQ ID NO: 301528 - RNA, 20 nt, Human
cuaggcccaugagagacaag

SEQ ID NO: 301529 - RNA, 18 nt, Human
cucauuccccccacccaa

SEQ ID NO: 301530 - RNA, 18 nt, Human
cucccauaccuuaccccu

SEQ ID NO: 301531 - RNA, 20 nt, Human
cucucccauaccuuaccccu

SEQ ID NO: 301532 - RNA, 18 nt, Human
cugaguaggaacaacuga

SEQ ID NO: 301533 - RNA, 21 nt, Human
cugcagcaguggccagagggg

SEQ ID NO: 301534 - RNA, 19 nt, Human
cuugcccccucuccuggag

SEQ ID NO: 301535 - RNA, 20 nt, Human
cuugcccccucuccuggagg

SEQ ID NO: 301536 - RNA, 20 nt, Human
gaaacaguccagcacaggag

SEQ ID NO: 301537 - RNA, 22 nt, Human
gacaaaaagggaccugcuggua

SEQ ID NO: 301538 - RNA, 23 nt, Human
gagaaacuacuagacucugcuga

SEQ ID NO: 301539 - RNA, 19 nt, Human
gagcgcucagggcgcgggc

SEQ ID NO: 301540 - RNA, 18 nt, Human
gaggcuggggucacucac

SEQ ID NO: 301541 - RNA, 19 nt, Human
gaggggcaucuugggguag

SEQ ID NO: 301542 - RNA, 19 nt, Human
gcaaucucacagcaauaua

SEQ ID NO: 301543 - RNA, 22 nt, Human
gcacacgcacacacacgcgcac

SEQ ID NO: 301544 - RNA, 22 nt, Human
gcacacugcagacagaagagca

SEQ ID NO: 301545 - RNA, 23 nt, Human
gcaucuugggguaggcaggaggc

SEQ ID NO: 301546 - RNA, 18 nt, Human
gcccucauccccaucuca

SEQ ID NO: 301547 - RNA, 22 nt, Human
gccgccgccgccgccucuuccg

SEQ ID NO: 301548 - RNA, 20 nt, Human
gcucccgccgccgccgccgc

SEQ ID NO: 301549 - RNA, 21 nt, Human
ggagccggagcccgagcccag

SEQ ID NO: 301550 - RNA, 18 nt, Human
ggaggaaugugcugauuu

SEQ ID NO: 301551 - RNA, 24 nt, Human
ggcauuccccucccacccccgcuc

SEQ ID NO: 301552 - RNA, 20 nt, Human
gggaguggaggaaagggaag

SEQ ID NO: 301553 - RNA, 20 nt, Human
gggcuccccucucucugccc

SEQ ID NO: 301554 - RNA, 19 nt, Human
ggggaguggaggaaaggga

SEQ ID NO: 301555 - RNA, 19 nt, Human
ggggaucggugcaaaggaa

SEQ ID NO: 301556 - RNA, 20 nt, Human
guuagucuuuuuagauuauu

SEQ ID NO: 301557 - RNA, 21 nt, Human
uaaccaaguugggacccuaua

SEQ ID NO: 301558 - RNA, 25 nt, Human
uaaugcuagacaccacaaaaaaggg

SEQ ID NO: 301559 - RNA, 19 nt, Human
uaccuuaccccuaugucag

SEQ ID NO: 301560 - RNA, 22 nt, Human
uagccccugacccccauccccu

SEQ ID NO: 301561 - RNA, 23 nt, Human
uauauguacacacaguuagcacg

SEQ ID NO: 301562 - RNA, 22 nt, Human
uauggggggaguggaggaaagg

SEQ ID NO: 301563 - RNA, 21 nt, Human
uauguacacacaguuagcacg

SEQ ID NO: 301564 - RNA, 23 nt, Human
uauguagaauauauauguacaca

SEQ ID NO: 301565 - RNA, 22 nt, Human
ucaggguggggaggggcaucuu

SEQ ID NO: 301566 - RNA, 22 nt, Human
uccaaccuuccuccucuuccuc

SEQ ID NO: 301567 - RNA, 19 nt, Human
ucccacauccuaaaagcuc

SEQ ID NO: 301568 - RNA, 23 nt, Human
ucccacauccuaaaagcuccuaa

SEQ ID NO: 301569 - RNA, 21 nt, Human
ucccgccgccgccgccgccgc

SEQ ID NO: 301570 - RNA, 24 nt, Human
ucccgccgccgccgccgccgccgg

SEQ ID NO: 301571 - RNA, 23 nt, Human
uccuaagcagcguccggaaccuc

SEQ ID NO: 301572 - RNA, 25 nt, Human
ucggcucccgccgccgccgccgccg

SEQ ID NO: 301573 - RNA, 22 nt, Human
ucucucuucucccauuucuucc

SEQ ID NO: 301574 - RNA, 19 nt, Human
ucugccacucccuucacug

SEQ ID NO: 301575 - RNA, 27 nt, Human
ugaaaagaacccugucucucuucuccc

SEQ ID NO: 301576 - RNA, 18 nt, Human
ugcacacugcagacagaa

SEQ ID NO: 301577 - RNA, 24 nt, Human
ugcaguuuuaauauacauauaugu

SEQ ID NO: 301578 - RNA, 24 nt, Human
ugcccucauccccaucucaggcuc

SEQ ID NO: 301579 - RNA, 19 nt, Human
ugcccuugcccccucuccu

SEQ ID NO: 301580 - RNA, 25 nt, Human
ugcgcacacgcacacacacgcgcac

SEQ ID NO: 301581 - RNA, 25 nt, Human
ugcgcacacgcacacacacgcgcag

SEQ ID NO: 301582 - RNA, 18 nt, Human
uggaaggacaguucaugc

SEQ ID NO: 301583 - RNA, 19 nt, Human
uggaaggacaguucaugcu

SEQ ID NO: 301584 - RNA, 19 nt, Human
uggaggaaagggaaguagg

SEQ ID NO: 301585 - RNA, 26 nt, Human
uggaggaaagggaaguaggaggaaaa

SEQ ID NO: 301586 - RNA, 21 nt, Human
uggcauuccccucccaccccc

SEQ ID NO: 301587 - RNA, 18 nt, Human
uggcuaggagguguucac

SEQ ID NO: 301588 - RNA, 25 nt, Human
uggggaaacucagcccccuccccua

SEQ ID NO: 301589 - RNA, 20 nt, Human
uggggaggggcaucuugggg

SEQ ID NO: 301590 - RNA, 20 nt, Human
ugggggaagggaguggucug

SEQ ID NO: 301591 - RNA, 19 nt, Human
uucacaagcccagggggcc

SEQ ID NO: 301592 - RNA, 24 nt, Human
uucccagcacagucucuccagagu

SEQ ID NO: 301593 - RNA, 23 nt, Human
uucucccauuucuuccauaagaa

SEQ ID NO: 301594 - RNA, 23 nt, Human
uucugccgccgccgccgccucuu

SEQ ID NO: 301595 - RNA, 26 nt, Human
uugcauagaaauagcccccaccuccu

SEQ ID NO: 301596 - RNA, 24 nt, Human
uuuaauguuuuuugaaaaagccuu

SEQ ID NO: 301597 - RNA, 20 nt, Human
uuuuuuuuuuuuuuuugcaa

SEQ ID NO: 301598 - RNA, 24 nt, Human
aaacacgcuugcuucgacucaugc

SEQ ID NO: 301599 - RNA, 26 nt, Human
acaguuuaggaaacacaagauugucu

SEQ ID NO: 301600 - RNA, 21 nt, Human
agccaaagacauaagaaaucc

SEQ ID NO: 301601 - RNA, 23 nt, Human
aggcucggggaacacugcagcga

SEQ ID NO: 301602 - RNA, 23 nt, Human
cacaaaauaucuaguguagccaa

SEQ ID NO: 301603 - RNA, 20 nt, Human
cagcacuuccucuauccuuu

SEQ ID NO: 301604 - RNA, 21 nt, Human
caggccaggaagggggcgggg

SEQ ID NO: 301605 - RNA, 22 nt, Human
ccaaagacauaagaaaucccug

SEQ ID NO: 301606 - RNA, 22 nt, Human
cccuucuugcagcuuucuguca

SEQ ID NO: 301607 - RNA, 21 nt, Human
cucaugcagccuagggcagca

SEQ ID NO: 301608 - RNA, 24 nt, Human
cuuccucuauccuuuccucucuca

SEQ ID NO: 301609 - RNA, 23 nt, Human
gaaaucccuguaugaaucaaaaa

SEQ ID NO: 301610 - RNA, 19 nt, Human
gaaucaaaaagugcccuuc

SEQ ID NO: 301611 - RNA, 21 nt, Human
gccaggaagggggcggggccc

SEQ ID NO: 301612 - RNA, 23 nt, Human
ggaaccaaagagguccucaccuc

SEQ ID NO: 301613 - RNA, 22 nt, Human
gggagaggggaugggaaugcag

SEQ ID NO: 301614 - RNA, 22 nt, Human
uaagaaaucccuguaugaauca

SEQ ID NO: 301615 - RNA, 18 nt, Human
uagggcagcacuuccucu

SEQ ID NO: 301616 - RNA, 19 nt, Human
uauccuuuccucucucagu

SEQ ID NO: 301617 - RNA, 21 nt, Human
ucacaaaauaucuaguguagc

SEQ ID NO: 301618 - RNA, 20 nt, Human
ugcuucgacucaugcagccu

SEQ ID NO: 301619 - RNA, 23 nt, Human
uggcgggaaggaaacacgcuugc

SEQ ID NO: 301620 - RNA, 21 nt, Human
uuuuuuuuuuuuuuuuuauuu

SEQ ID NO: 301621 - RNA, 25 nt, Human
aaagaacagcauuauuuucaaucau

SEQ ID NO: 301622 - RNA, 19 nt, Human
aaagagguugcaaggccag

SEQ ID NO: 301623 - RNA, 21 nt, Human
aaaggugggagccugcaaaag

SEQ ID NO: 301624 - RNA, 23 nt, Human
aaaguaucagaaaugcuucuuuc

SEQ ID NO: 301625 - RNA, 19 nt, Human
aaaugcuucuuuccuggga

SEQ ID NO: 301626 - RNA, 24 nt, Human
aaucauuuuaagucgcucauuuaa

SEQ ID NO: 301627 - RNA, 19 nt, Human
aggccaggcccccaggugc

SEQ ID NO: 301628 - RNA, 24 nt, Human
aggugcgcugggauuucuggcugg

SEQ ID NO: 301629 - RNA, 20 nt, Human
aucaaaugccgaagcuggga

SEQ ID NO: 301630 - RNA, 19 nt, Human
caaaugccauucugcauau

SEQ ID NO: 301631 - RNA, 22 nt, Human
caggcccccaggugcgcuggga

SEQ ID NO: 301632 - RNA, 21 nt, Human
ccaggcccccaggugcgcugg

SEQ ID NO: 301633 - RNA, 23 nt, Human
ccccaggugcgcugggauuucug

SEQ ID NO: 301634 - RNA, 23 nt, Human
cuaaagaacagcauuauuuucaa

SEQ ID NO: 301635 - RNA, 20 nt, Human
cuacuaaagaacagcauuau

SEQ ID NO: 301636 - RNA, 20 nt, Human
cugaucaaaugccgaagcug

SEQ ID NO: 301637 - RNA, 24 nt, Human
gagguugcaaggccaggcccccag

SEQ ID NO: 301638 - RNA, 18 nt, Human
gauucugggugccgucuc

SEQ ID NO: 301639 - RNA, 19 nt, Human
ugacagaaaguaucagaaa

SEQ ID NO: 301640 - RNA, 19 nt, Human
ugacagcaagacacauuuu

SEQ ID NO: 301641 - RNA, 22 nt, Human
ugcuucuuuccugggaaaagga

SEQ ID NO: 301642 - RNA, 18 nt, Human
uggagugcugaccagcag

SEQ ID NO: 301643 - RNA, 18 nt, Human
ugggaaaaggaauauaaa

SEQ ID NO: 301644 - RNA, 19 nt, Human
ugggagccugcaaaagggu

SEQ ID NO: 301645 - RNA, 19 nt, Human
aaaaaaaaaaaaaaaaaga

SEQ ID NO: 301646 - RNA, 22 nt, Human
aaaaaaacacucuaccuugacu

SEQ ID NO: 301647 - RNA, 24 nt, Human
aaaagacacaagcagucaaacaaa

SEQ ID NO: 301648 - RNA, 21 nt, Human
aaacagccaugaagaucuuuc

SEQ ID NO: 301649 - RNA, 21 nt, Human
aaacaugacuugaugcuuggc

SEQ ID NO: 301650 - RNA, 19 nt, Human
aaagugcuggggacacugg

SEQ ID NO: 301651 - RNA, 20 nt, Human
aacauggugaaacccugucu

SEQ ID NO: 301652 - RNA, 21 nt, Human
aacauggugaaacccugucuc

SEQ ID NO: 301653 - RNA, 18 nt, Human
aagaaugagggcugugca

SEQ ID NO: 301654 - RNA, 19 nt, Human
aagaaugagggcugugcac

SEQ ID NO: 301655 - RNA, 18 nt, Human
aagcaacaugagcauaug

SEQ ID NO: 301656 - RNA, 23 nt, Human
aagcacacacacuaaagaaaaca

SEQ ID NO: 301657 - RNA, 18 nt, Human
aaucgcuugaaccuggga

SEQ ID NO: 301658 - RNA, 24 nt, Human
aaucgcuugaaccugggaggcaga

SEQ ID NO: 301659 - RNA, 21 nt, Human
acacaaacaaaccacuugucc

SEQ ID NO: 301660 - RNA, 24 nt, Human
accaauuuucuaaaaggcaaacag

SEQ ID NO: 301661 - RNA, 23 nt, Human
accauaaagagaugacugaugac

SEQ ID NO: 301662 - RNA, 18 nt, Human
acccugggaaagcucugg

SEQ ID NO: 301663 - RNA, 24 nt, Human
acccugucucuacuaaaaauacaa

SEQ ID NO: 301664 - RNA, 21 nt, Human
accgcaguucaaacgagcgca

SEQ ID NO: 301665 - RNA, 24 nt, Human
accugguguaccucgcuggcugcc

SEQ ID NO: 301666 - RNA, 22 nt, Human
acuaaaaucucuuccccauccc

SEQ ID NO: 301667 - RNA, 27 nt, Human
acuccaucuaaaaaaaaaaaaaaaaaa

SEQ ID NO: 301668 - RNA, 18 nt, Human
acugcacuccagccuggg

SEQ ID NO: 301669 - RNA, 24 nt, Human
acugcacuccagccugggcaaaaa

SEQ ID NO: 301670 - RNA, 25 nt, Human
acugcacuccagccugggcaaaaag

SEQ ID NO: 301671 - RNA, 26 nt, Human
agacaagaauaaugcagaagggaccc

SEQ ID NO: 301672 - RNA, 19 nt, Human
agacacaagcagucaaaca

SEQ ID NO: 301673 - RNA, 18 nt, Human
agagguugcagugagcca

SEQ ID NO: 301674 - RNA, 20 nt, Human
agagguugcagugagccaag

SEQ ID NO: 301675 - RNA, 22 nt, Human
agagguugcagugagccaagau

SEQ ID NO: 301676 - RNA, 24 nt, Human
agagguugcagugagccaagaugg

SEQ ID NO: 301677 - RNA, 22 nt, Human
agauaaaaagcaguccccaaga

SEQ ID NO: 301678 - RNA, 24 nt, Human
agaucuuucaucucuuccaagcac

SEQ ID NO: 301679 - RNA, 22 nt, Human
agauggcgccacugcacuccag

SEQ ID NO: 301680 - RNA, 20 nt, Human
agcacacacacuaaagaaaa

SEQ ID NO: 301681 - RNA, 24 nt, Human
agcacuuugggaggccgagguggg

SEQ ID NO: 301682 - RNA, 22 nt, Human
agccuggccaacauggugaaac

SEQ ID NO: 301683 - RNA, 24 nt, Human
agccuggccaacauggugaaaccc

SEQ ID NO: 301684 - RNA, 19 nt, Human
agcugggugugguggcagu

SEQ ID NO: 301685 - RNA, 24 nt, Human
aggcagagguugcagugagccaag

SEQ ID NO: 301686 - RNA, 22 nt, Human
aggcaggagaaucgcuugaacc

SEQ ID NO: 301687 - RNA, 24 nt, Human
aggcaggagaaucgcuugaaccug

SEQ ID NO: 301688 - RNA, 20 nt, Human
aggccgagguggguggaucg

SEQ ID NO: 301689 - RNA, 24 nt, Human
aggccgagguggguggaucgcuug

SEQ ID NO: 301690 - RNA, 20 nt, Human
aggcugaggcaggagaaucg

SEQ ID NO: 301691 - RNA, 24 nt, Human
aggcugaggcaggagaaucgcuug

SEQ ID NO: 301692 - RNA, 21 nt, Human
agguggguggaucgcuugagg

SEQ ID NO: 301693 - RNA, 18 nt, Human
agugauaacuuugaauuu

SEQ ID NO: 301694 - RNA, 21 nt, Human
aguggauuacaaagagauuuc

SEQ ID NO: 301695 - RNA, 23 nt, Human
auauauaaaaacauauuucuuuc

SEQ ID NO: 301696 - RNA, 26 nt, Human
aucaaaaaacagaaaacccugguccc

SEQ ID NO: 301697 - RNA, 24 nt, Human
auggcgccacugcacuccagccug

SEQ ID NO: 301698 - RNA, 25 nt, Human
caaacaaaaccuaugucagacugaa

SEQ ID NO: 301699 - RNA, 24 nt, Human
caacauggugaaacccugucucua

SEQ ID NO: 301700 - RNA, 23 nt, Human
caacccagggugcagugggagag

SEQ ID NO: 301701 - RNA, 23 nt, Human
caacuuuguucacuacaaacaaa

SEQ ID NO: 301702 - RNA, 18 nt, Human
caaguguccaaaugaccu

SEQ ID NO: 301703 - RNA, 23 nt, Human
cacaaacaaaccacuuguccagc

SEQ ID NO: 301704 - RNA, 18 nt, Human
cacacaaaccacuaggcu

SEQ ID NO: 301705 - RNA, 18 nt, Human
cacaggacuucugggagc

SEQ ID NO: 301706 - RNA, 22 nt, Human
caccauaaagagaugacugaug

SEQ ID NO: 301707 - RNA, 19 nt, Human
cacccugggaaagcucugg

SEQ ID NO: 301708 - RNA, 21 nt, Human
caccuaucccuucaugaucug

SEQ ID NO: 301709 - RNA, 24 nt, Human
cacgccuguaaucccagcacuuug

SEQ ID NO: 301710 - RNA, 19 nt, Human
cacugcacuccagccuggg

SEQ ID NO: 301711 - RNA, 21 nt, Human
cacugcacuccagccugggca

SEQ ID NO: 301712 - RNA, 22 nt, Human
cacugcacuccagccugggcaa

SEQ ID NO: 301713 - RNA, 23 nt, Human
cacugcacuccagccugggcaaa

SEQ ID NO: 301714 - RNA, 24 nt, Human
cagcacuuugggaggccgaggugg

SEQ ID NO: 301715 - RNA, 18 nt, Human
cagcagaguaagauuuug

SEQ ID NO: 301716 - RNA, 22 nt, Human
cagcagaguaagauuuuggcag

SEQ ID NO: 301717 - RNA, 22 nt, Human
cagccugguuugcaaagggaag

SEQ ID NO: 301718 - RNA, 24 nt, Human
cagcuacucaggaggcugaggcag

SEQ ID NO: 301719 - RNA, 18 nt, Human
cagcugauguuacuuugu

SEQ ID NO: 301720 - RNA, 18 nt, Human
cauaacagcagaguaaga

SEQ ID NO: 301721 - RNA, 22 nt, Human
cauaggcauaggcagcugaugu

SEQ ID NO: 301722 - RNA, 25 nt, Human
caucaaaaaacagaaaacccugguc

SEQ ID NO: 301723 - RNA, 20 nt, Human
ccacugcacuccagccuggg

SEQ ID NO: 301724 - RNA, 20 nt, Human
ccacugcacuccagccuggg

SEQ ID NO: 301725 - RNA, 21 nt, Human
ccacugcacuccagccugggc

SEQ ID NO: 301726 - RNA, 23 nt, Human
ccacugcacuccagccugggcaa

SEQ ID NO: 301727 - RNA, 23 nt, Human
ccaguugggcgugguggcucacg

SEQ ID NO: 301728 - RNA, 22 nt, Human
ccauuugguauguauaaaaaaa

SEQ ID NO: 301729 - RNA, 20 nt, Human
ccccugaaaauacagaugca

SEQ ID NO: 301730 - RNA, 25 nt, Human
ccccugaaaauacagaugcagucgc

SEQ ID NO: 301731 - RNA, 24 nt, Human
ccucacuuuuccccaaguguccaa

SEQ ID NO: 301732 - RNA, 18 nt, Human
ccugagcugcgaagcggg

SEQ ID NO: 301733 - RNA, 22 nt, Human
ccuggccaacauggugaaaccc

SEQ ID NO: 301734 - RNA, 24 nt, Human
ccuggccaacauggugaaacccug

SEQ ID NO: 301735 - RNA, 25 nt, Human
ccugggaggcagagguugcagugag

SEQ ID NO: 301736 - RNA, 22 nt, Human
ccuguaaucccagcacuuuggg

SEQ ID NO: 301737 - RNA, 19 nt, Human
ccuguggucccagcuacuc

SEQ ID NO: 301738 - RNA, 21 nt, Human
ccuguggucccagcuacucag

SEQ ID NO: 301739 - RNA, 24 nt, Human
cgagaccagccuggccaacauggu

SEQ ID NO: 301740 - RNA, 24 nt, Human
cgagguggguggaucgcuugaggu

SEQ ID NO: 301741 - RNA, 26 nt, Human
cgagguggguggaucgcuugagguca

SEQ ID NO: 301742 - RNA, 24 nt, Human
cgccacugcacuccagccugggca

SEQ ID NO: 301743 - RNA, 24 nt, Human
cgccuguggucccagcuacucagg

SEQ ID NO: 301744 - RNA, 22 nt, Human
cggaagaaaaccaaacaggacu

SEQ ID NO: 301745 - RNA, 23 nt, Human
cuaguggauuacaaagagauuuc

SEQ ID NO: 301746 - RNA, 22 nt, Human
cucacgccuguaaucccagcac

SEQ ID NO: 301747 - RNA, 24 nt, Human
cucacgccuguaaucccagcacuu

SEQ ID NO: 301748 - RNA, 22 nt, Human
cucaugaaaagaaugagggcuu

SEQ ID NO: 301749 - RNA, 20 nt, Human
cucuuccccaucccacaaaa

SEQ ID NO: 301750 - RNA, 21 nt, Human
cugaagcuacaguuaacaauc

SEQ ID NO: 301751 - RNA, 22 nt, Human
cugacacuaagaggcgcuuagu

SEQ ID NO: 301752 - RNA, 18 nt, Human
cugcgugugcauucaucc

SEQ ID NO: 301753 - RNA, 24 nt, Human
cuggccaacauggugaaacccugu

SEQ ID NO: 301754 - RNA, 18 nt, Human
cuggucccuuuuaagccu

SEQ ID NO: 301755 - RNA, 24 nt, Human
cuggucccuuuuaagccucauagu

SEQ ID NO: 301756 - RNA, 18 nt, Human
gaacucuccccacucucc

SEQ ID NO: 301757 - RNA, 22 nt, Human
gaacucuccccacucuccacag

SEQ ID NO: 301758 - RNA, 18 nt, Human
gagaaaaacuguuuaaca

SEQ ID NO: 301759 - RNA, 23 nt, Human
gagaaucgcuugaaccugggagg

SEQ ID NO: 301760 - RNA, 21 nt, Human
gagcacugaggcaacuucccu

SEQ ID NO: 301761 - RNA, 23 nt, Human
gagguggguggaucgcuugaggu

SEQ ID NO: 301762 - RNA, 24 nt, Human
gagguggguggaucgcuugagguc

SEQ ID NO: 301763 - RNA, 18 nt, Human
gagguugcagugagccaa

SEQ ID NO: 301764 - RNA, 24 nt, Human
gaucgcuugaggucaggaguucga

SEQ ID NO: 301765 - RNA, 21 nt, Human
gcaaaaagaaacuccaucuaa

SEQ ID NO: 301766 - RNA, 22 nt, Human
gcaaaaagaaacuccaucuaaa

SEQ ID NO: 301767 - RNA, 25 nt, Human
gcacuccagccugggcaaaaagaaa

SEQ ID NO: 301768 - RNA, 24 nt, Human
gcaguucaaacgagcgcacccugc

SEQ ID NO: 301769 - RNA, 24 nt, Human
gccaacauggugaaacccugucuc

SEQ ID NO: 301770 - RNA, 22 nt, Human
gccacugcacuccagccugggc

SEQ ID NO: 301771 - RNA, 24 nt, Human
gccacugcacuccagccugggcaa

SEQ ID NO: 301772 - RNA, 23 nt, Human
gccuguggucccagcuacucagg

SEQ ID NO: 301773 - RNA, 22 nt, Human
gcuggcugccgggcugaggugg

SEQ ID NO: 301774 - RNA, 24 nt, Human
gcuggggacacuggcagaggccug

SEQ ID NO: 301775 - RNA, 24 nt, Human
gcuugaggucaggaguucgagacc

SEQ ID NO: 301776 - RNA, 19 nt, Human
ggagacaagaauaaugcag

SEQ ID NO: 301777 - RNA, 22 nt, Human
ggcaaaaagaaacuccaucuaa

SEQ ID NO: 301778 - RNA, 23 nt, Human
ggcgugguggcucacgccuguaa

SEQ ID NO: 301779 - RNA, 22 nt, Human
ggggguucgaguccccaacccu

SEQ ID NO: 301780 - RNA, 19 nt, Human
gguggaagcagaugucugg

SEQ ID NO: 301781 - RNA, 24 nt, Human
gguggcucacgccuguaaucccag

SEQ ID NO: 301782 - RNA, 24 nt, Human
gguugcagugagccaagauggcgc

SEQ ID NO: 301783 - RNA, 24 nt, Human
gucccaguugggcgugguggcuca

SEQ ID NO: 301784 - RNA, 21 nt, Human
gugaaacccugucucuacuaa

SEQ ID NO: 301785 - RNA, 23 nt, Human
guggcucacgccuguaaucccag

SEQ ID NO: 301786 - RNA, 23 nt, Human
guguccauuucaguggaaacagc

SEQ ID NO: 301787 - RNA, 19 nt, Human
uaaaaagacacaagcaguc

SEQ ID NO: 301788 - RNA, 26 nt, Human
uaaaaagcaguccccaagagaggaca

SEQ ID NO: 301789 - RNA, 27 nt, Human
uaaauaacaacuaaaaucucuucccca

SEQ ID NO: 301790 - RNA, 23 nt, Human
uaaauuaacgaaaaauuaaagug

SEQ ID NO: 301791 - RNA, 19 nt, Human
uaacaccuguguaagcaca

SEQ ID NO: 301792 - RNA, 22 nt, Human
uaacuguaaccuuagaugaaca

SEQ ID NO: 301793 - RNA, 23 nt, Human
uaagccucauagucuugguccaa

SEQ ID NO: 301794 - RNA, 25 nt, Human
uacaaacaaaaccuaugucagacug

SEQ ID NO: 301795 - RNA, 21 nt, Human
uacaaagagauuucaccucca

SEQ ID NO: 301796 - RNA, 18 nt, Human
uauacaaugcaacaugag

SEQ ID NO: 301797 - RNA, 21 nt, Human
uauacaaugcaacaugagguu

SEQ ID NO: 301798 - RNA, 26 nt, Human
uaucauaggcauaggcagcugauguu

SEQ ID NO: 301799 - RNA, 24 nt, Human
uauguauaaaaaaacacucuaccu

SEQ ID NO: 301800 - RNA, 23 nt, Human
uauugcacuggguaaagaaaguu

SEQ ID NO: 301801 - RNA, 19 nt, Human
ucacuacaaacaaaaccua

SEQ ID NO: 301802 - RNA, 19 nt, Human
ucaguggaaacagccauga

SEQ ID NO: 301803 - RNA, 18 nt, Human
uccaagcaccaccuggug

SEQ ID NO: 301804 - RNA, 24 nt, Human
uccaagcaccaccugguguaccuc

SEQ ID NO: 301805 - RNA, 22 nt, Human
uccacauauauauuuuauauau

SEQ ID NO: 301806 - RNA, 21 nt, Human
uccauauuggccaucaugguc

SEQ ID NO: 301807 - RNA, 22 nt, Human
uccaucuaaaaaaaaaaaaaaa

SEQ ID NO: 301808 - RNA, 21 nt, Human
ucccacaaaacuccacauaua

SEQ ID NO: 301809 - RNA, 21 nt, Human
ucccacaaaacuccacauaua

SEQ ID NO: 301810 - RNA, 22 nt, Human
uccccaaguguccaaaugaccu

SEQ ID NO: 301811 - RNA, 23 nt, Human
uccccaucccacaaaacuccaca

SEQ ID NO: 301812 - RNA, 24 nt, Human
uccgagagaggucgggcucaugaa

SEQ ID NO: 301813 - RNA, 19 nt, Human
uccgauggaguuggccaca

SEQ ID NO: 301814 - RNA, 18 nt, Human
ucgcuugaaccugggagg

SEQ ID NO: 301815 - RNA, 20 nt, Human
ucgcuugaggucaggaguuc

SEQ ID NO: 301816 - RNA, 21 nt, Human
ucgggcucaugaaaagaauga

SEQ ID NO: 301817 - RNA, 21 nt, Human
ucuaaaaaaaaaaaaaaaaaa

SEQ ID NO: 301818 - RNA, 24 nt, Human
ucucuacuaaaaauacaaaaaauu

SEQ ID NO: 301819 - RNA, 24 nt, Human
ugaaccugggaggcagagguugca

SEQ ID NO: 301820 - RNA, 20 nt, Human
ugaagaucuuucaucucuuc

SEQ ID NO: 301821 - RNA, 21 nt, Human
ugacuuuagaggcaaggaguu

SEQ ID NO: 301822 - RNA, 21 nt, Human
ugagcacauauuaaaugauaa

SEQ ID NO: 301823 - RNA, 20 nt, Human
ugaggcaggagaaucgcuug

SEQ ID NO: 301824 - RNA, 24 nt, Human
ugaggcaggagaaucgcuugaacc

SEQ ID NO: 301825 - RNA, 24 nt, Human
ugaggcaggagaaucgcuugaacc

SEQ ID NO: 301826 - RNA, 22 nt, Human
ugagggcugugcacccaaccca

SEQ ID NO: 301827 - RNA, 18 nt, Human
ugaugugggcuuggcugg

SEQ ID NO: 301828 - RNA, 19 nt, Human
ugaugugggcuuggcuggg

SEQ ID NO: 301829 - RNA, 18 nt, Human
ugcuggggacacuggcag

SEQ ID NO: 301830 - RNA, 24 nt, Human
uggaguuggccacacaaaccacua

SEQ ID NO: 301831 - RNA, 24 nt, Human
uggaucgcuugaggucaggaguuc

SEQ ID NO: 301832 - RNA, 24 nt, Human
uggcagucgccuguggucccagcu

SEQ ID NO: 301833 - RNA, 24 nt, Human
uggcaucacguaaacaaauucaca

SEQ ID NO: 301834 - RNA, 24 nt, Human
uggccaacauggugaaacccuguc

SEQ ID NO: 301835 - RNA, 22 nt, Human
uggcucacgccuguaaucccag

SEQ ID NO: 301836 - RNA, 24 nt, Human
uggcucacgccuguaaucccagca

SEQ ID NO: 301837 - RNA, 22 nt, Human
uggcugccgggcugaggugggg

SEQ ID NO: 301838 - RNA, 21 nt, Human
uggcuggguggaagcagaugu

SEQ ID NO: 301839 - RNA, 19 nt, Human
ugggaaagcucuggaagcc

SEQ ID NO: 301840 - RNA, 24 nt, Human
ugggaggcagagguugcagugagc

SEQ ID NO: 301841 - RNA, 23 nt, Human
ugggaggccgagguggguggauc

SEQ ID NO: 301842 - RNA, 24 nt, Human
ugggaggccgagguggguggaucg

SEQ ID NO: 301843 - RNA, 19 nt, Human
ugggcucuggaacgaagcu

SEQ ID NO: 301844 - RNA, 24 nt, Human
ugggcucuggaacgaagcuuucgg

SEQ ID NO: 301845 - RNA, 24 nt, Human
uggguggaucgcuugaggucagga

SEQ ID NO: 301846 - RNA, 22 nt, Human
uggucacagccugguuuccuug

SEQ ID NO: 301847 - RNA, 24 nt, Human
ugguggcagucgccugugguccca

SEQ ID NO: 301848 - RNA, 24 nt, Human
ugguggcucacgccuguaauccca

SEQ ID NO: 301849 - RNA, 24 nt, Human
uguaaauuaacgaaaaauuaaagu

SEQ ID NO: 301850 - RNA, 20 nt, Human
uguccaaaugaccuaaaagu

SEQ ID NO: 301851 - RNA, 23 nt, Human
ugugguggcagucgccugugguc

SEQ ID NO: 301852 - RNA, 18 nt, Human
uuacaaagagauuucacc

SEQ ID NO: 301853 - RNA, 19 nt, Human
uuacaaagagauuucaccu

SEQ ID NO: 301854 - RNA, 18 nt, Human
uuagcugggugugguggc

SEQ ID NO: 301855 - RNA, 20 nt, Human
uucaccuccaucaaaaaaca

SEQ ID NO: 301856 - RNA, 24 nt, Human
uugaaccugggaggcagagguugc

SEQ ID NO: 301857 - RNA, 22 nt, Human
uugcagugagccaagauggcgc

SEQ ID NO: 301858 - RNA, 18 nt, Human
uuuaagccucauagucuu

SEQ ID NO: 301859 - RNA, 20 nt, Human
uuuacauaucucuucgggaa

SEQ ID NO: 301860 - RNA, 18 nt, Human
uuuaugaagaauagguuu

SEQ ID NO: 301861 - RNA, 21 nt, Human
uuugcaaagggaagucaccau

SEQ ID NO: 301862 - RNA, 23 nt, Human
aacugugugggagggggcugugg

SEQ ID NO: 301863 - RNA, 18 nt, Human
aagggaagcgagggcugc

SEQ ID NO: 301864 - RNA, 24 nt, Human
aauaacaaaugcucccccuacccu

SEQ ID NO: 301865 - RNA, 18 nt, Human
accaggcaccagcagggc

SEQ ID NO: 301866 - RNA, 21 nt, Human
accaggcaccagcagggcagc

SEQ ID NO: 301867 - RNA, 21 nt, Human
acccugagaaucacgggucca

SEQ ID NO: 301868 - RNA, 24 nt, Human
agcagggcagcuccauccaaggga

SEQ ID NO: 301869 - RNA, 18 nt, Human
agccagagagcaugaggg

SEQ ID NO: 301870 - RNA, 21 nt, Human
aggagaagugacucuggucca

SEQ ID NO: 301871 - RNA, 19 nt, Human
aggaggagaagugacucug

SEQ ID NO: 301872 - RNA, 18 nt, Human
aggggcuggccucagccc

SEQ ID NO: 301873 - RNA, 24 nt, Human
agguccucuggccugccucugcca

SEQ ID NO: 301874 - RNA, 20 nt, Human
aucacagcacccugagaauc

SEQ ID NO: 301875 - RNA, 25 nt, Human
cacacuuagguccucuggccugccu

SEQ ID NO: 301876 - RNA, 22 nt, Human
caccagcagggcagcuccaucc

SEQ ID NO: 301877 - RNA, 18 nt, Human
caccccaucacagcaccc

SEQ ID NO: 301878 - RNA, 26 nt, Human
caccccaucacagcacccugagaauc

SEQ ID NO: 301879 - RNA, 23 nt, Human
cagagaaucaggcugggcacaga

SEQ ID NO: 301880 - RNA, 20 nt, Human
cagaggccucuucucugacc

SEQ ID NO: 301881 - RNA, 19 nt, Human
cagcagggcagcuccaucc

SEQ ID NO: 301882 - RNA, 22 nt, Human
caguagguagggggcugggugg

SEQ ID NO: 301883 - RNA, 21 nt, Human
caucacacuuagguccucugg

SEQ ID NO: 301884 - RNA, 21 nt, Human
ccaggcaccagcagggcagcu

SEQ ID NO: 301885 - RNA, 19 nt, Human
ccaucacagcacccugaga

SEQ ID NO: 301886 - RNA, 20 nt, Human
cccaucacagcacccugaga

SEQ ID NO: 301887 - RNA, 25 nt, Human
cccccuacccucaccccaucacagc

SEQ ID NO: 301888 - RNA, 21 nt, Human
ccucaccccaucacagcaccc

SEQ ID NO: 301889 - RNA, 18 nt, Human
cucaccccaucacagcac

SEQ ID NO: 301890 - RNA, 20 nt, Human
cucccccuacccucacccca

SEQ ID NO: 301891 - RNA, 24 nt, Human
gcuggccucagcccugugaggggc

SEQ ID NO: 301892 - RNA, 25 nt, Human
gcugggcacagaggccucuucucug

SEQ ID NO: 301893 - RNA, 21 nt, Human
ggaggaggagaagugacucug

SEQ ID NO: 301894 - RNA, 18 nt, Human
ggcaguagguagggggcu

SEQ ID NO: 301895 - RNA, 18 nt, Human
ggugggccucugcaccuc

SEQ ID NO: 301896 - RNA, 19 nt, Human
uaacaaaugcucccccuac

SEQ ID NO: 301897 - RNA, 19 nt, Human
uacaggcagcuccacuucc

SEQ ID NO: 301898 - RNA, 22 nt, Human
uacccucaccccaucacagcac

SEQ ID NO: 301899 - RNA, 20 nt, Human
uagguagggggcuggguggg

SEQ ID NO: 301900 - RNA, 22 nt, Human
uagguagggggcugggugggcc

SEQ ID NO: 301901 - RNA, 21 nt, Human
ucagggcuggcuggagaaagg

SEQ ID NO: 301902 - RNA, 18 nt, Human
ucccccuacccucacccc

SEQ ID NO: 301903 - RNA, 24 nt, Human
ucucugaccaggcaccagcagggc

SEQ ID NO: 301904 - RNA, 19 nt, Human
ugaggagccgacuagggcc

SEQ ID NO: 301905 - RNA, 24 nt, Human
ugcuaggggcuggccucagcccug

SEQ ID NO: 301906 - RNA, 21 nt, Human
ugcucccccuacccucacccc

SEQ ID NO: 301907 - RNA, 27 nt, Human
ugggcacagaggccucuucucugaccc

SEQ ID NO: 301908 - RNA, 19 nt, Human
ugggugggccucugcaccu

SEQ ID NO: 301909 - RNA, 25 nt, Human
uguggaaagccaggaugaauggggg

SEQ ID NO: 301910 - RNA, 21 nt, Human
uuaauaacaaaugcucccccu

SEQ ID NO: 301911 - RNA, 19 nt, Human
aggcgggguggcugcuggu

SEQ ID NO: 301912 - RNA, 22 nt, Human
cacuguuuguuguugucccuug

SEQ ID NO: 301913 - RNA, 23 nt, Human
cagccucaccggacccuccugau

SEQ ID NO: 301914 - RNA, 22 nt, Human
caggcgggguggcugcuggucg

SEQ ID NO: 301915 - RNA, 19 nt, Human
cccuugggcaaggggaucc

SEQ ID NO: 301916 - RNA, 25 nt, Human
cugcugcagccucaccggacccucc

SEQ ID NO: 301917 - RNA, 23 nt, Human
gcaggcgggguggcugcuggucg

SEQ ID NO: 301918 - RNA, 21 nt, Human
gcugcagccucaccggacccu

SEQ ID NO: 301919 - RNA, 21 nt, Human
gggcaaggggaucccaaacau

SEQ ID NO: 301920 - RNA, 24 nt, Human
uagagggugagaacacuggugaca

SEQ ID NO: 301921 - RNA, 27 nt, Human
ugagaacacuggugacauuaacgccau

SEQ ID NO: 301922 - RNA, 20 nt, Human
uucacaggauccuguuccca

SEQ ID NO: 301923 - RNA, 23 nt, Human
uuuuuuuuuuuuuuuuuuaacag

SEQ ID NO: 301924 - RNA, 19 nt, Human
aagaaauucauagacacca

SEQ ID NO: 301925 - RNA, 24 nt, Human
aagaagaaauucauagacaccauu

SEQ ID NO: 301926 - RNA, 21 nt, Human
agccaucaaaaaacuuaacag

SEQ ID NO: 301927 - RNA, 23 nt, Human
auuccaagaaauuuaaauuuaau

SEQ ID NO: 301928 - RNA, 25 nt, Human
caaaacagugaagaagcugcuaagc

SEQ ID NO: 301929 - RNA, 26 nt, Human
caaaacagugaagaagcugcuaagca

SEQ ID NO: 301930 - RNA, 22 nt, Human
cacccuagcgccgcaaaggacc

SEQ ID NO: 301931 - RNA, 22 nt, Human
cagugaagaagcugcuaagcau

SEQ ID NO: 301932 - RNA, 21 nt, Human
cccuagcgccgcaaaggaccc

SEQ ID NO: 301933 - RNA, 18 nt, Human
ccggagcgucccucuggg

SEQ ID NO: 301934 - RNA, 26 nt, Human
gagcgucccucuggguucgcccaccc

SEQ ID NO: 301935 - RNA, 23 nt, Human
ggaaauaaaauauggaaucuguu

SEQ ID NO: 301936 - RNA, 23 nt, Human
gucccggagcgucccucuggguu

SEQ ID NO: 301937 - RNA, 23 nt, Human
uaacagaaccaaaucaaaaagaa

SEQ ID NO: 301938 - RNA, 22 nt, Human
uaagaagaaauucauagacacc

SEQ ID NO: 301939 - RNA, 22 nt, Human
uacaacugggaauuccaagaaa

SEQ ID NO: 301940 - RNA, 21 nt, Human
ucccucuggguucgcccaccc

SEQ ID NO: 301941 - RNA, 22 nt, Human
ucccucuggguucgcccacccu

SEQ ID NO: 301942 - RNA, 24 nt, Human
ucucaauccugaucauuacauaau

SEQ ID NO: 301943 - RNA, 23 nt, Human
uggaaucuguuauaaugucccaa

SEQ ID NO: 301944 - RNA, 22 nt, Human
uucgcccacccuagcgccgcaa

SEQ ID NO: 301945 - RNA, 26 nt, Human
aagcgaccuugacguguauugaaggu

SEQ ID NO: 301946 - RNA, 21 nt, Human
acccgccagccuccgugcccc

SEQ ID NO: 301947 - RNA, 25 nt, Human
accuggcucgugagugcgucugggu

SEQ ID NO: 301948 - RNA, 19 nt, Human
acucauucaguccauugcc

SEQ ID NO: 301949 - RNA, 18 nt, Human
acucccguagaggucauc

SEQ ID NO: 301950 - RNA, 22 nt, Human
agccuccgugccccaccccacc

SEQ ID NO: 301951 - RNA, 19 nt, Human
aggccccccaggagagggc

SEQ ID NO: 301952 - RNA, 18 nt, Human
aggugcuggccuugguug

SEQ ID NO: 301953 - RNA, 24 nt, Human
augcaguuuugaaaaccuggaaac

SEQ ID NO: 301954 - RNA, 18 nt, Human
augguuuggggaagggag

SEQ ID NO: 301955 - RNA, 26 nt, Human
caacccgccagccuccgugccccacc

SEQ ID NO: 301956 - RNA, 19 nt, Human
caaguccugggggaugugc

SEQ ID NO: 301957 - RNA, 27 nt, Human
cacccagcacgcacucauucaguccau

SEQ ID NO: 301958 - RNA, 21 nt, Human
cagccuccgugccccacccca

SEQ ID NO: 301959 - RNA, 23 nt, Human
cagccuccgugccccaccccacc

SEQ ID NO: 301960 - RNA, 18 nt, Human
cagcgccgccucccaugg

SEQ ID NO: 301961 - RNA, 22 nt, Human
caggcgccccucccagggcuga

SEQ ID NO: 301962 - RNA, 19 nt, Human
caugacaaaaaacugagag

SEQ ID NO: 301963 - RNA, 19 nt, Human
ccagccuccgugccccacc

SEQ ID NO: 301964 - RNA, 23 nt, Human
cccagggcugagaaagcgcagcc

SEQ ID NO: 301965 - RNA, 22 nt, Human
cccauggggccguggggcugcu

SEQ ID NO: 301966 - RNA, 22 nt, Human
ccccaccccacccagcacgcac

SEQ ID NO: 301967 - RNA, 21 nt, Human
cccccauacccccaggaccug

SEQ ID NO: 301968 - RNA, 22 nt, Human
cccgagcagccacgccggccac

SEQ ID NO: 301969 - RNA, 20 nt, Human
ccuaccagguugggguuagg

SEQ ID NO: 301970 - RNA, 20 nt, Human
ccuggcagcccccauacccc

SEQ ID NO: 301971 - RNA, 19 nt, Human
cgccccuggcagcccccau

SEQ ID NO: 301972 - RNA, 18 nt, Human
cuaaaaucccguccaaau

SEQ ID NO: 301973 - RNA, 23 nt, Human
cuacuucugaauuacuucucaac

SEQ ID NO: 301974 - RNA, 24 nt, Human
cucacugcacuggcugaagcaacc

SEQ ID NO: 301975 - RNA, 18 nt, Human
cucgugagugcgucuggg

SEQ ID NO: 301976 - RNA, 18 nt, Human
cucugcccagccgcccuc

SEQ ID NO: 301977 - RNA, 25 nt, Human
cugaauuacuucucaacuguauggu

SEQ ID NO: 301978 - RNA, 23 nt, Human
cugagaaagcgcagccagggaca

SEQ ID NO: 301979 - RNA, 22 nt, Human
cuggggccgagcugaggggcug

SEQ ID NO: 301980 - RNA, 18 nt, Human
gaaagcgcagccagggac

SEQ ID NO: 301981 - RNA, 20 nt, Human
gaaggugugugugccaaaug

SEQ ID NO: 301982 - RNA, 21 nt, Human
gagagcagcgccgccucccau

SEQ ID NO: 301983 - RNA, 20 nt, Human
gaggcgggaaauaggcuggg

SEQ ID NO: 301984 - RNA, 25 nt, Human
gauuucuguuuucuaaaacuggaag

SEQ ID NO: 301985 - RNA, 21 nt, Human
gcccagacgggcgagaacuga

SEQ ID NO: 301986 - RNA, 27 nt, Human
gccgagcugaggggcugaacacagcag

SEQ ID NO: 301987 - RNA, 18 nt, Human
ggaugugcucugcccagc

SEQ ID NO: 301988 - RNA, 23 nt, Human
ggcuggggccgagcugaggggcu

SEQ ID NO: 301989 - RNA, 23 nt, Human
ucaaauggaggcgggaaauaggc

SEQ ID NO: 301990 - RNA, 26 nt, Human
ucaguccauugccuuaacacaagccu

SEQ ID NO: 301991 - RNA, 23 nt, Human
ucccauggggccguggggcugcu

SEQ ID NO: 301992 - RNA, 22 nt, Human
ucgccugcccagcaggcccccc

SEQ ID NO: 301993 - RNA, 20 nt, Human
ucuaaaacuggaagcgaccu

SEQ ID NO: 301994 - RNA, 19 nt, Human
ucuucuggccuacuucuga

SEQ ID NO: 301995 - RNA, 20 nt, Human
ugaagcaacccgccagccuc

SEQ ID NO: 301996 - RNA, 19 nt, Human
ugagaugcagauuucuguu

SEQ ID NO: 301997 - RNA, 20 nt, Human
ugagaugcagauuucuguuu

SEQ ID NO: 301998 - RNA, 21 nt, Human
ugaggggcugaacacagcagu

SEQ ID NO: 301999 - RNA, 27 nt, Human
ugccccaccccacccagcacgcacuca

SEQ ID NO: 302000 - RNA, 19 nt, Human
uggcagcccccauaccccc

SEQ ID NO: 302001 - RNA, 18 nt, Human
uggcugaguccuaccagg

SEQ ID NO: 302002 - RNA, 19 nt, Human
uucaguccauugccuuaac

SEQ ID NO: 302003 - RNA, 19 nt, Human
uugaaaaccuggaaacauc

SEQ ID NO: 302004 - RNA, 24 nt, Human
uugguuucucucugccccgugugg

SEQ ID NO: 302005 - RNA, 20 nt, Human
uuuuuuuuuuuuuuugcugg

SEQ ID NO: 302006 - RNA, 19 nt, Human
aaaacaccugaaauagcca

SEQ ID NO: 302007 - RNA, 22 nt, Human
aacugcaggcaaacaugaaaga

SEQ ID NO: 302008 - RNA, 20 nt, Human
caaaacaccugaaauagcca

SEQ ID NO: 302009 - RNA, 22 nt, Human
cagcaaaacaccugaaauagcc

SEQ ID NO: 302010 - RNA, 18 nt, Human
ccucucggcucccgcucc

SEQ ID NO: 302011 - RNA, 20 nt, Human
cuccucucggcucccgcucc

SEQ ID NO: 302012 - RNA, 19 nt, Human
uagccaauaacaaauguuu

SEQ ID NO: 302013 - RNA, 23 nt, Human
uauuguucaacugcaggcaaaca

SEQ ID NO: 302014 - RNA, 21 nt, Human
ugcaggcaaacaugaaagaua

SEQ ID NO: 302015 - RNA, 22 nt, Human
uguguaacuuuaauaauuucua

SEQ ID NO: 302016 - RNA, 19 nt, Human
aagcugcccucccagggcc

SEQ ID NO: 302017 - RNA, 22 nt, Human
aagugugacuccccacacugcc

SEQ ID NO: 302018 - RNA, 22 nt, Human
agaggaggccagguggacagaa

SEQ ID NO: 302019 - RNA, 21 nt, Human
agagggaggcaggguauggcc

SEQ ID NO: 302020 - RNA, 25 nt, Human
agcucugcccccuaccugggcucca

SEQ ID NO: 302021 - RNA, 23 nt, Human
agcucuggccaugcgugguguca

SEQ ID NO: 302022 - RNA, 20 nt, Human
aggcagcugggccuggggcu

SEQ ID NO: 302023 - RNA, 23 nt, Human
aggcagcugggccuggggcuggg

SEQ ID NO: 302024 - RNA, 22 nt, Human
aggcgagaggaggccaggugga

SEQ ID NO: 302025 - RNA, 21 nt, Human
aggcuucgcugccuucagccu

SEQ ID NO: 302026 - RNA, 20 nt, Human
agggggcuggggaggggcuu

SEQ ID NO: 302027 - RNA, 27 nt, Human
auuugucugggaggacgacggggcaug

SEQ ID NO: 302028 - RNA, 24 nt, Human
cagcugaggacagcucugcccccu

SEQ ID NO: 302029 - RNA, 19 nt, Human
caggccgcagugcagcuga

SEQ ID NO: 302030 - RNA, 18 nt, Human
ccacacugccaccaggcc

SEQ ID NO: 302031 - RNA, 26 nt, Human
ccaggccgcagugcagcugaggacag

SEQ ID NO: 302032 - RNA, 23 nt, Human
ccagggagggagggggauggcag

SEQ ID NO: 302033 - RNA, 21 nt, Human
ccagggccgggcccagggagg

SEQ ID NO: 302034 - RNA, 21 nt, Human
cccagggccagagagggaggc

SEQ ID NO: 302035 - RNA, 19 nt, Human
ccccgaggcuucgcugccu

SEQ ID NO: 302036 - RNA, 19 nt, Human
ccgcugggcgagguuucuc

SEQ ID NO: 302037 - RNA, 26 nt, Human
ccuggggcuggggcuggggcuggggc

SEQ ID NO: 302038 - RNA, 22 nt, Human
cgggagagggggcuggggaggg

SEQ ID NO: 302039 - RNA, 18 nt, Human
cggguccagggccgggcc

SEQ ID NO: 302040 - RNA, 26 nt, Human
cgguagucaagacacucagcaaacac

SEQ ID NO: 302041 - RNA, 28 nt, Human
cgguagucaagacacucagcaaacacac

SEQ ID NO: 302042 - RNA, 19 nt, Human
cuccuccggagugagcccc

SEQ ID NO: 302043 - RNA, 22 nt, Human
cugacuugagaucaaagccaaa

SEQ ID NO: 302044 - RNA, 21 nt, Human
cugccuucagccugacuugag

SEQ ID NO: 302045 - RNA, 20 nt, Human
cugggccuggggcuggggcu

SEQ ID NO: 302046 - RNA, 22 nt, Human
gaggggcuugggccccgaggcu

SEQ ID NO: 302047 - RNA, 28 nt, Human
gagugggguuggggcugggugcuggagc

SEQ ID NO: 302048 - RNA, 21 nt, Human
gcagcugaggacagcucugcc

SEQ ID NO: 302049 - RNA, 22 nt, Human
gcaguagggacgcuagcucugg

SEQ ID NO: 302050 - RNA, 19 nt, Human
gcugaaccauuacacggca

SEQ ID NO: 302051 - RNA, 20 nt, Human
gcugcccucccagggccaga

SEQ ID NO: 302052 - RNA, 20 nt, Human
ggagagggggcuggggaggg

SEQ ID NO: 302053 - RNA, 18 nt, Human
ggagugagcccccaucuc

SEQ ID NO: 302054 - RNA, 19 nt, Human
ggauggcagacaccagagg

SEQ ID NO: 302055 - RNA, 24 nt, Human
ggccaggcgagaggaggccagguu

SEQ ID NO: 302056 - RNA, 23 nt, Human
ggccuggggcuggggcuggggcu

SEQ ID NO: 302057 - RNA, 20 nt, Human
ggcuggggaggggcuugggc

SEQ ID NO: 302058 - RNA, 19 nt, Human
ggcuggggcuggggcuggc

SEQ ID NO: 302059 - RNA, 20 nt, Human
gggccuggggcuggggcugg

SEQ ID NO: 302060 - RNA, 25 nt, Human
gggcuggggacaggcaccugacggg

SEQ ID NO: 302061 - RNA, 22 nt, Human
gggcuggggcuggggcuggggc

SEQ ID NO: 302062 - RNA, 23 nt, Human
gggcuggggcuggggcuggggcu

SEQ ID NO: 302063 - RNA, 21 nt, Human
gggcuugggccccgaggcuuc

SEQ ID NO: 302064 - RNA, 26 nt, Human
gguccagggccgggcccagggaggga

SEQ ID NO: 302065 - RNA, 19 nt, Human
uaccugggcuccaagcugc

SEQ ID NO: 302066 - RNA, 20 nt, Human
uaccugggcuccaagcugcc

SEQ ID NO: 302067 - RNA, 19 nt, Human
uagucaagacacucagcaa

SEQ ID NO: 302068 - RNA, 19 nt, Human
ucacgguagucaagacacu

SEQ ID NO: 302069 - RNA, 22 nt, Human
uccccacacugccaccaggccg

SEQ ID NO: 302070 - RNA, 20 nt, Human
uccuccggagugagccccca

SEQ ID NO: 302071 - RNA, 19 nt, Human
ucgcugccuucagccugac

SEQ ID NO: 302072 - RNA, 22 nt, Human
ucgcugccuucagccugacuug

SEQ ID NO: 302073 - RNA, 24 nt, Human
ugacuccccacacugccaccucac

SEQ ID NO: 302074 - RNA, 21 nt, Human
ugggcuccaagcugcccuccc

SEQ ID NO: 302075 - RNA, 24 nt, Human
uggggcuggggacaggcaccugac

SEQ ID NO: 302076 - RNA, 20 nt, Human
ugucacgguagucaagacac

SEQ ID NO: 302077 - RNA, 23 nt, Human
uugagaucaaagccaaaggcagc

SEQ ID NO: 302078 - RNA, 22 nt, Human
acagauuuuuccucaguauuaa

SEQ ID NO: 302079 - RNA, 23 nt, Human
accuuaaaaaauauagugaagaa

SEQ ID NO: 302080 - RNA, 24 nt, Human
auuuacccaguguauuuuaaaaag

SEQ ID NO: 302081 - RNA, 23 nt, Human
caauauguaacuuucuaaggcuu

SEQ ID NO: 302082 - RNA, 19 nt, Human
cacauccuagaccuauguc

SEQ ID NO: 302083 - RNA, 20 nt, Human
caccauuuccauaagaauaa

SEQ ID NO: 302084 - RNA, 26 nt, Human
cacuucuguuuacagcagucuaggga

SEQ ID NO: 302085 - RNA, 21 nt, Human
cagauuuuuccucaguauuaa

SEQ ID NO: 302086 - RNA, 22 nt, Human
cguguauauauauaugcccaca

SEQ ID NO: 302087 - RNA, 19 nt, Human
gcauuuugauaacaaacug

SEQ ID NO: 302088 - RNA, 22 nt, Human
ggugugggcugacuagggguga

SEQ ID NO: 302089 - RNA, 19 nt, Human
guauauauauaugcccaca

SEQ ID NO: 302090 - RNA, 20 nt, Human
guuguuggaauucaccauuu

SEQ ID NO: 302091 - RNA, 21 nt, Human
uaaaaaaguccuccaucaagg

SEQ ID NO: 302092 - RNA, 26 nt, Human
uaaaaaauauagugaagaaauagcaa

SEQ ID NO: 302093 - RNA, 31 nt, Human
uaaaaaauauagugaagaaauagcaaagaag

SEQ ID NO: 302094 - RNA, 20 nt, Human
uagccucuaaaccaauaugu

SEQ ID NO: 302095 - RNA, 18 nt, Human
uaggggugugggcugacu

SEQ ID NO: 302096 - RNA, 20 nt, Human
uaugaaaugaagacuuuuau

SEQ ID NO: 302097 - RNA, 18 nt, Human
uccaaacuucacacaucc

SEQ ID NO: 302098 - RNA, 23 nt, Human
uccaaacuucacacauccuagac

SEQ ID NO: 302099 - RNA, 23 nt, Human
ugaagaaauagcaaagaacauag

SEQ ID NO: 302100 - RNA, 19 nt, Human
ugcacguguauauauauau

SEQ ID NO: 302101 - RNA, 24 nt, Human
ugguaaaguacacugaauuuugua

SEQ ID NO: 302102 - RNA, 19 nt, Human
uguauuuauauauauauau

SEQ ID NO: 302103 - RNA, 24 nt, Human
uguauuuauauauauauauaugua

SEQ ID NO: 302104 - RNA, 23 nt, Human
uuuaaaaaguaaaugaaucccac

SEQ ID NO: 302105 - RNA, 22 nt, Human
uuuacagcagucuagggaacau

SEQ ID NO: 302106 - RNA, 19 nt, Human
uuuauauauauauauaugu

SEQ ID NO: 302107 - RNA, 22 nt, Human
uuuccauaagaauaaaaaaguc

SEQ ID NO: 302108 - RNA, 23 nt, Human
uuugaaagguagcuggagaaaag

SEQ ID NO: 302109 - RNA, 21 nt, Human
uuuuuuuuuuuuuuuuacuaa

SEQ ID NO: 302110 - RNA, 20 nt, Human
aacuagcccucucagggccc

SEQ ID NO: 302111 - RNA, 21 nt, Human
agcggggucccagacccuggg

SEQ ID NO: 302112 - RNA, 20 nt, Human
cagaacccaaggcccuggcc

SEQ ID NO: 302113 - RNA, 20 nt, Human
cagaucucucugugggcuau

SEQ ID NO: 302114 - RNA, 19 nt, Human
cagcagccugaggaggagc

SEQ ID NO: 302115 - RNA, 19 nt, Human
cagcagccugaggaggagc

SEQ ID NO: 302116 - RNA, 22 nt, Human
ccacagaacuagcccucucagg

SEQ ID NO: 302117 - RNA, 24 nt, Human
ccccagaacccaaggcccuggccc

SEQ ID NO: 302118 - RNA, 24 nt, Human
ccugcagccaugcugagcgggguc

SEQ ID NO: 302119 - RNA, 25 nt, Human
ccuggcccucuuccugguccccugg

SEQ ID NO: 302120 - RNA, 19 nt, Human
cugagcggggucccagacc

SEQ ID NO: 302121 - RNA, 23 nt, Human
gcggggucccagacccugggggg

SEQ ID NO: 302122 - RNA, 23 nt, Human
gcugcugucucaaugccacuuug

SEQ ID NO: 302123 - RNA, 21 nt, Human
ggagggagguggccuccaggu

SEQ ID NO: 302124 - RNA, 20 nt, Human
ggagguggccuccagguggg

SEQ ID NO: 302125 - RNA, 21 nt, Human
gggagguggccuccagguggg

SEQ ID NO: 302126 - RNA, 20 nt, Human
gggccuuucucuuagagccg

SEQ ID NO: 302127 - RNA, 20 nt, Human
ucccagacccuggggggcuc

SEQ ID NO: 302128 - RNA, 24 nt, Human
uccuggagggagguggccuccagg

SEQ ID NO: 302129 - RNA, 23 nt, Human
ucucaaugccacuuugcacccug

SEQ ID NO: 302130 - RNA, 19 nt, Human
ucucugugggcuaucaagg

SEQ ID NO: 302131 - RNA, 20 nt, Human
uggaaggaggggcaaguagg

SEQ ID NO: 302132 - RNA, 19 nt, Human
uggagggagguggccucca

SEQ ID NO: 302133 - RNA, 19 nt, Human
uucccagaucucucugugg

SEQ ID NO: 302134 - RNA, 19 nt, Human
uuccugaguagaugggccu

SEQ ID NO: 302135 - RNA, 18 nt, Human
uuuuuuuuuuagggggcg

SEQ ID NO: 302136 - RNA, 19 nt, Human
uuuuuuuuuuuuagggggc

SEQ ID NO: 302137 - RNA, 22 nt, Human
uuuuuuuuuuuuuuuuuuaggg

SEQ ID NO: 302138 - RNA, 23 nt, Human
aagccguuccgagucggaggcac

SEQ ID NO: 302139 - RNA, 24 nt, Human
agcauauaaaagcauaaugucuau

SEQ ID NO: 302140 - RNA, 23 nt, Human
auagcauauaaaagcauaauguc

SEQ ID NO: 302141 - RNA, 21 nt, Human
caacauccucuguuucugacc

SEQ ID NO: 302142 - RNA, 21 nt, Human
ccaggguaaauuggaaagauu

SEQ ID NO: 302143 - RNA, 20 nt, Human
cccccggcccucgcugcccc

SEQ ID NO: 302144 - RNA, 20 nt, Human
cccgccgcccccggcccucg

SEQ ID NO: 302145 - RNA, 21 nt, Human
cccggcccucgcugccccggc

SEQ ID NO: 302146 - RNA, 20 nt, Human
ccgcccgccgcccccggccc

SEQ ID NO: 302147 - RNA, 25 nt, Human
ccgccgcccccggcccucgcugccc

SEQ ID NO: 302148 - RNA, 23 nt, Human
gacuacauuuuaauagauacuac

SEQ ID NO: 302149 - RNA, 24 nt, Human
ucagcucccucaaaacugauucca

SEQ ID NO: 302150 - RNA, 27 nt, Human
ucagcucccucaaaacugauuccaggg

SEQ ID NO: 302151 - RNA, 22 nt, Human
aacacaaauaucagaaguuucu

SEQ ID NO: 302152 - RNA, 22 nt, Human
auaacacaaauaucagaaguuu

SEQ ID NO: 302153 - RNA, 20 nt, Human
caaaugcacacacguaggca

SEQ ID NO: 302154 - RNA, 23 nt, Human
cauaaggauaacacaaauaucag

SEQ ID NO: 302155 - RNA, 25 nt, Human
cuauauagcaaaugcacacacguag

SEQ ID NO: 302156 - RNA, 18 nt, Human
uaaggauaacacaaauau

SEQ ID NO: 302157 - RNA, 21 nt, Human
aaaucagucuuuauuaaacca

SEQ ID NO: 302158 - RNA, 19 nt, Human
aaaugaacaaauauguauc

SEQ ID NO: 302159 - RNA, 24 nt, Human
aacaaaaucagucuuuauuaaacc

SEQ ID NO: 302160 - RNA, 27 nt, Human
aagaaggauaauacaaacaucagaaga

SEQ ID NO: 302161 - RNA, 25 nt, Human
cagugcgcagggaaagucgggcugg

SEQ ID NO: 302162 - RNA, 24 nt, Human
cauaaaugaacaaauauguaucag

SEQ ID NO: 302163 - RNA, 20 nt, Human
cuuuuugcuuaaaauucugg

SEQ ID NO: 302164 - RNA, 24 nt, Human
gaacaaauauguaucagcuaacau

SEQ ID NO: 302165 - RNA, 20 nt, Human
gaaggauaauacaaacauca

SEQ ID NO: 302166 - RNA, 24 nt, Human
uaagaaauagauugacuauaccac

SEQ ID NO: 302167 - RNA, 24 nt, Human
uuaagagcuacuaauauuuauugg

SEQ ID NO: 302168 - RNA, 20 nt, Human
acugcccccugcaccucuac

SEQ ID NO: 302169 - RNA, 20 nt, Human
aggagcgugcagcaacuucc

SEQ ID NO: 302170 - RNA, 19 nt, Human
agggggcucagaguggagg

SEQ ID NO: 302171 - RNA, 22 nt, Human
caccccugagccucaguuuccc

SEQ ID NO: 302172 - RNA, 23 nt, Human
caccucuaccagagaggaggucc

SEQ ID NO: 302173 - RNA, 19 nt, Human
ccagagaggaggucccgcu

SEQ ID NO: 302174 - RNA, 18 nt, Human
cccccugcaccucuacca

SEQ ID NO: 302175 - RNA, 24 nt, Human
cccugcaccucuaccagagaggag

SEQ ID NO: 302176 - RNA, 25 nt, Human
cuaacauaaugacggggucaaccuc

SEQ ID NO: 302177 - RNA, 20 nt, Human
gaaaaugcauaaucucuaac

SEQ ID NO: 302178 - RNA, 19 nt, Human
gagccucaguuucccuaug

SEQ ID NO: 302179 - RNA, 19 nt, Human
gccgugugaccuuggguga

SEQ ID NO: 302180 - RNA, 19 nt, Human
ggguugauaggcucccaga

SEQ ID NO: 302181 - RNA, 22 nt, Human
guacugcccccugcaccucuac

SEQ ID NO: 302182 - RNA, 22 nt, Human
gugaagugagugugcggugcuc

SEQ ID NO: 302183 - RNA, 24 nt, Human
uaacauaaugacggggucaaccuc

SEQ ID NO: 302184 - RNA, 21 nt, Human
uaggagcgugcagcaacuucc

SEQ ID NO: 302185 - RNA, 18 nt, Human
ucccagaggaaauggagc

SEQ ID NO: 302186 - RNA, 25 nt, Human
ucuaccagagaggaggucgucccgg

SEQ ID NO: 302187 - RNA, 24 nt, Human
ugaaccagggugaagugagugugc

SEQ ID NO: 302188 - RNA, 22 nt, Human
ugaguacugcccccugcaccuc

SEQ ID NO: 302189 - RNA, 20 nt, Human
uggaaaaugcauaaucucua

SEQ ID NO: 302190 - RNA, 18 nt, Human
aaaguuuccuccagagcu

SEQ ID NO: 302191 - RNA, 20 nt, Human
aagguggaaggcgaugagga

SEQ ID NO: 302192 - RNA, 22 nt, Human
agaaaguuuccuccagagcuag

SEQ ID NO: 302193 - RNA, 21 nt, Human
aggccaaggcagaguaggaga

SEQ ID NO: 302194 - RNA, 24 nt, Human
augaggacacaggcaguuugacuu

SEQ ID NO: 302195 - RNA, 22 nt, Human
cagaguaggagaagagcaaaga

SEQ ID NO: 302196 - RNA, 19 nt, Human
caguaagucuuuauucguc

SEQ ID NO: 302197 - RNA, 19 nt, Human
cagugaggccaaggcagag

SEQ ID NO: 302198 - RNA, 25 nt, Human
ccucuuguaggcaguaagucuuuau

SEQ ID NO: 302199 - RNA, 23 nt, Human
gaugaggacacaggcaguuugac

SEQ ID NO: 302200 - RNA, 20 nt, Human
ggaggacuucuucacuggaa

SEQ ID NO: 302201 - RNA, 24 nt, Human
ggcagaguaggagaagagcaaaga

SEQ ID NO: 302202 - RNA, 20 nt, Human
uaagaaagaaaguuuccucc

SEQ ID NO: 302203 - RNA, 24 nt, Human
ucacuuccuaucuuacuaccuguc

SEQ ID NO: 302204 - RNA, 19 nt, Human
ugcggccagcaagcgaggc

SEQ ID NO: 302205 - RNA, 24 nt, Human
uggaaguggggugccucagugagg

SEQ ID NO: 302206 - RNA, 20 nt, Human
uugcggccagcaagcgaggc

SEQ ID NO: 302207 - RNA, 19 nt, Human
aacaugaggacauuaguga

SEQ ID NO: 302208 - RNA, 19 nt, Human
aauuugcacacauaaccuc

SEQ ID NO: 302209 - RNA, 26 nt, Human
agacaaaagugaaggaaaagggaccc

SEQ ID NO: 302210 - RNA, 23 nt, Human
agacaccagggaacagagagaag

SEQ ID NO: 302211 - RNA, 18 nt, Human
aggccagggcuggaggga

SEQ ID NO: 302212 - RNA, 21 nt, Human
agggcaggaggccagggcugg

SEQ ID NO: 302213 - RNA, 21 nt, Human
aggggacaugaaaguggggga

SEQ ID NO: 302214 - RNA, 26 nt, Human
caccacaaugccaugcauuacacugg

SEQ ID NO: 302215 - RNA, 23 nt, Human
ccacaaugccaugcauuacacug

SEQ ID NO: 302216 - RNA, 18 nt, Human
ccccaacacuucaccaac

SEQ ID NO: 302217 - RNA, 20 nt, Human
ccccaagggcguguaucuuu

SEQ ID NO: 302218 - RNA, 23 nt, Human
cccgcccuccaucccccaacacc

SEQ ID NO: 302219 - RNA, 21 nt, Human
ccuccuccuccagaucauccc

SEQ ID NO: 302220 - RNA, 21 nt, Human
cuacgaucucuccuaagaucc

SEQ ID NO: 302221 - RNA, 25 nt, Human
cuuggccccggcgccugcccuguaa

SEQ ID NO: 302222 - RNA, 21 nt, Human
gacugcucacccgcccuccau

SEQ ID NO: 302223 - RNA, 21 nt, Human
gggcaggaggccagggcugga

SEQ ID NO: 302224 - RNA, 23 nt, Human
uaacugggccagacuugucucuu

SEQ ID NO: 302225 - RNA, 22 nt, Human
uaaggagugugaggaaaacaca

SEQ ID NO: 302226 - RNA, 18 nt, Human
uacaccaccggaaugcug

SEQ ID NO: 302227 - RNA, 20 nt, Human
uagacagacaccacaaugcc

SEQ ID NO: 302228 - RNA, 25 nt, Human
uagacagacaccacaaugccaugca

SEQ ID NO: 302229 - RNA, 22 nt, Human
ucccucccugccuuggccccgg

SEQ ID NO: 302230 - RNA, 21 nt, Human
uccuaagaucccucccugccu

SEQ ID NO: 302231 - RNA, 24 nt, Human
uccuaagaucccucccugccuugg

SEQ ID NO: 302232 - RNA, 24 nt, Human
ugaagacaccagggaacuggagac

SEQ ID NO: 302233 - RNA, 18 nt, Human
ugaaggaaaaauagacuu

SEQ ID NO: 302234 - RNA, 26 nt, Human
ugcucacccgcccuccaucccccaac

SEQ ID NO: 302235 - RNA, 23 nt, Human
uguaucuuuuuccuccuccucca

SEQ ID NO: 302236 - RNA, 21 nt, Human
uuacacuggacaauccagagg

SEQ ID NO: 302237 - RNA, 22 nt, Human
uuccuuccuagacagacaccac

SEQ ID NO: 302238 - RNA, 25 nt, Human
uuuuccuccuccuccagaucauccc

SEQ ID NO: 302239 - RNA, 20 nt, Human
aaaaagugcaaaagccagca

SEQ ID NO: 302240 - RNA, 20 nt, Human
aaaacagcacagugucccca

SEQ ID NO: 302241 - RNA, 22 nt, Human
aaacaaaacagcacaguguccc

SEQ ID NO: 302242 - RNA, 20 nt, Human
aacccaacaccuguccaagu

SEQ ID NO: 302243 - RNA, 24 nt, Human
aagaggccucaacccaacaccugu

SEQ ID NO: 302244 - RNA, 18 nt, Human
aagccccccagggcaaga

SEQ ID NO: 302245 - RNA, 24 nt, Human
aagcugcagaaauggaaauggaau

SEQ ID NO: 302246 - RNA, 23 nt, Human
aaggcagggcgccagggacccac

SEQ ID NO: 302247 - RNA, 21 nt, Human
acaaaacagcacagugucccc

SEQ ID NO: 302248 - RNA, 24 nt, Human
accaguguggucuucccagcucca

SEQ ID NO: 302249 - RNA, 27 nt, Human
aggcagggcgccagggacccacguggu

SEQ ID NO: 302250 - RNA, 27 nt, Human
aggcgucuucccaggucaagaugcacc

SEQ ID NO: 302251 - RNA, 21 nt, Human
aggcucccccgcugcuccacc

SEQ ID NO: 302252 - RNA, 22 nt, Human
aggcucccccgcugcuccaccc

SEQ ID NO: 302253 - RNA, 19 nt, Human
agggacuuccugcagaaga

SEQ ID NO: 302254 - RNA, 22 nt, Human
aggguagcgaggcuggggaugc

SEQ ID NO: 302255 - RNA, 21 nt, Human
auggaauggaaccgacacguc

SEQ ID NO: 302256 - RNA, 21 nt, Human
caaaauacuucccucuccccg

SEQ ID NO: 302257 - RNA, 22 nt, Human
caagaugcaccaaacagucacg

SEQ ID NO: 302258 - RNA, 19 nt, Human
caagcuaagcugcagaaau

SEQ ID NO: 302259 - RNA, 25 nt, Human
cacagaaacgaaacaaaacagcaca

SEQ ID NO: 302260 - RNA, 24 nt, Human
caccaggcccugcugcucgccucc

SEQ ID NO: 302261 - RNA, 23 nt, Human
cacccagccaacuugcgucucag

SEQ ID NO: 302262 - RNA, 22 nt, Human
caccuguccaaguucguuccca

SEQ ID NO: 302263 - RNA, 18 nt, Human
cacucaucacccucccaa

SEQ ID NO: 302264 - RNA, 18 nt, Human
cagaaauggaaauggaau

SEQ ID NO: 302265 - RNA, 18 nt, Human
cagaagaggccucaaccc

SEQ ID NO: 302266 - RNA, 19 nt, Human
cagagguuccaagcccccc

SEQ ID NO: 302267 - RNA, 22 nt, Human
caggacacaagcuaagcugcag

SEQ ID NO: 302268 - RNA, 25 nt, Human
cagggacuuccugcagaagaggccu

SEQ ID NO: 302269 - RNA, 19 nt, Human
cagggcaagacaccccaac

SEQ ID NO: 302270 - RNA, 20 nt, Human
caucaaaaaagugcaaaagc

SEQ ID NO: 302271 - RNA, 20 nt, Human
caucaaaaaagugcaaaagc

SEQ ID NO: 302272 - RNA, 20 nt, Human
cauuccuaggaaacccagag

SEQ ID NO: 302273 - RNA, 25 nt, Human
ccaacaccuguccaaguucguuccc

SEQ ID NO: 302274 - RNA, 21 nt, Human
ccaccccacccucuccggaag

SEQ ID NO: 302275 - RNA, 24 nt, Human
ccagcggccuccugucaggaccag

SEQ ID NO: 302276 - RNA, 21 nt, Human
ccccccagggcaagacacccc

SEQ ID NO: 302277 - RNA, 23 nt, Human
ccccccagggcaagacaccccaa

SEQ ID NO: 302278 - RNA, 22 nt, Human
cccugcugcucgccuccucucc

SEQ ID NO: 302279 - RNA, 23 nt, Human
cccuggagcucccugggagcagg

SEQ ID NO: 302280 - RNA, 19 nt, Human
ccgcgcucucgccaccagg

SEQ ID NO: 302281 - RNA, 18 nt, Human
ccggaagaaguccucagg

SEQ ID NO: 302282 - RNA, 22 nt, Human
ccucccaaggcuuugugaaggu

SEQ ID NO: 302283 - RNA, 23 nt, Human
cgaaacaaaacagcacagugucc

SEQ ID NO: 302284 - RNA, 25 nt, Human
cgaaacaaaacagcacagugucccc

SEQ ID NO: 302285 - RNA, 19 nt, Human
cgaggcuggggaugcccgg

SEQ ID NO: 302286 - RNA, 26 nt, Human
cgcggccgggcguuuccugcgcugcc

SEQ ID NO: 302287 - RNA, 22 nt, Human
cgcugcuccaccccacccucuc

SEQ ID NO: 302288 - RNA, 20 nt, Human
cggaacaaaggaggagaggg

SEQ ID NO: 302289 - RNA, 19 nt, Human
cggaccacccagccaacuu

SEQ ID NO: 302290 - RNA, 24 nt, Human
cgguaaugcaagugcuggggaagg

SEQ ID NO: 302291 - RNA, 22 nt, Human
cuaaaggcagggcgccagggac

SEQ ID NO: 302292 - RNA, 22 nt, Human
cucccccgcugcuccaccccac

SEQ ID NO: 302293 - RNA, 20 nt, Human
cuccggaagaaguccucagg

SEQ ID NO: 302294 - RNA, 18 nt, Human
cuggggaaggaugccagg

SEQ ID NO: 302295 - RNA, 23 nt, Human
cuuugggcuaaguuccggacccu

SEQ ID NO: 302296 - RNA, 20 nt, Human
gaacaaaggaggagaggggg

SEQ ID NO: 302297 - RNA, 22 nt, Human
gacacaagcuaagcugcagaaa

SEQ ID NO: 302298 - RNA, 19 nt, Human
gacgcuggcaggagagcgg

SEQ ID NO: 302299 - RNA, 20 nt, Human
gacucucaggucacacuucu

SEQ ID NO: 302300 - RNA, 18 nt, Human
gagcucccugggagcagg

SEQ ID NO: 302301 - RNA, 24 nt, Human
gccgcgcucucgccaccaggcccu

SEQ ID NO: 302302 - RNA, 18 nt, Human
gcguuuccugcgcugcca

SEQ ID NO: 302303 - RNA, 21 nt, Human
ggacauuccuaggaaacccag

SEQ ID NO: 302304 - RNA, 19 nt, Human
ggagagccagggugcggac

SEQ ID NO: 302305 - RNA, 19 nt, Human
ggaggagaggggggcgugc

SEQ ID NO: 302306 - RNA, 18 nt, Human
ggaugcucgggcgcagug

SEQ ID NO: 302307 - RNA, 18 nt, Human
ggccgaggggacacagac

SEQ ID NO: 302308 - RNA, 19 nt, Human
gggcaagacaccccaacau

SEQ ID NO: 302309 - RNA, 21 nt, Human
gggcguuuccugcgcugccag

SEQ ID NO: 302310 - RNA, 24 nt, Human
gguaaugcaagugcuggggaagga

SEQ ID NO: 302311 - RNA, 21 nt, Human
gugggaggagagaggggcccu

SEQ ID NO: 302312 - RNA, 18 nt, Human
ucagggacuuccugcaga

SEQ ID NO: 302313 - RNA, 24 nt, Human
uccccaccugggaagagcagggac

SEQ ID NO: 302314 - RNA, 21 nt, Human
uccccgugcagccagccugcc

SEQ ID NO: 302315 - RNA, 22 nt, Human
ucggcaaaauacuucccucucc

SEQ ID NO: 302316 - RNA, 21 nt, Human
ucgggcgcagugacagccgcg

SEQ ID NO: 302317 - RNA, 21 nt, Human
ugccaccaguguggucuuccc

SEQ ID NO: 302318 - RNA, 22 nt, Human
uggaauggaaccgacacgucug

SEQ ID NO: 302319 - RNA, 24 nt, Human
uggaauggaaccgacacgucugcc

SEQ ID NO: 302320 - RNA, 18 nt, Human
uggaggugggggccccac

SEQ ID NO: 302321 - RNA, 20 nt, Human
ugggaagagcagggacggua

SEQ ID NO: 302322 - RNA, 21 nt, Human
ugggaagagcagggacgguaa

SEQ ID NO: 302323 - RNA, 19 nt, Human
ugggagcaggaggccccag

SEQ ID NO: 302324 - RNA, 24 nt, Human
ugggaggagagaggggcccuggag

SEQ ID NO: 302325 - RNA, 20 nt, Human
ugugaaggucuccgaggcug

SEQ ID NO: 302326 - RNA, 19 nt, Human
uguuccgcuccccaccuuc

SEQ ID NO: 302327 - RNA, 19 nt, Human
uucagcaacuaggagccug

SEQ ID NO: 302328 - RNA, 23 nt, Human
uucccagcuccaaacgugccggg

SEQ ID NO: 302329 - RNA, 19 nt, Human
uuccuuaacuuucagcaac

SEQ ID NO: 302330 - RNA, 21 nt, Human
uucucaguuccccccaagucc

SEQ ID NO: 302331 - RNA, 19 nt, Human
uuuccugcgcugccagggg

SEQ ID NO: 302332 - RNA, 20 nt, Human
aaaauacacagaagcaaagg

SEQ ID NO: 302333 - RNA, 28 nt, Human
aaaauccucccuugcccagggacugccu

SEQ ID NO: 302334 - RNA, 18 nt, Human
aaagagccaggugggcug

SEQ ID NO: 302335 - RNA, 22 nt, Human
aaagaugugcuacccuccaggc

SEQ ID NO: 302336 - RNA, 20 nt, Human
aagcaaaggcugcaguccua

SEQ ID NO: 302337 - RNA, 22 nt, Human
aagcacuuuccuuucacauugu

SEQ ID NO: 302338 - RNA, 19 nt, Human
acacgggcagcaacagggg

SEQ ID NO: 302339 - RNA, 23 nt, Human
acacuuucugacccagccccaca

SEQ ID NO: 302340 - RNA, 20 nt, Human
accaagggaacccacuaugg

SEQ ID NO: 302341 - RNA, 18 nt, Human
acuccaaaauacacagaa

SEQ ID NO: 302342 - RNA, 20 nt, Human
acugccccccugcccucacc

SEQ ID NO: 302343 - RNA, 23 nt, Human
agaagcucagggccccaugaaga

SEQ ID NO: 302344 - RNA, 18 nt, Human
agaggccgggggguugcc

SEQ ID NO: 302345 - RNA, 19 nt, Human
agaguccaccuguggacag

SEQ ID NO: 302346 - RNA, 18 nt, Human
aggcagaagucaacaaac

SEQ ID NO: 302347 - RNA, 21 nt, Human
aggcagaagucaacaaacacc

SEQ ID NO: 302348 - RNA, 20 nt, Human
aggcagaagucaacaaaccg

SEQ ID NO: 302349 - RNA, 21 nt, Human
aggcugcaaagcccugggagg

SEQ ID NO: 302350 - RNA, 21 nt, Human
agggacugccuauggguucug

SEQ ID NO: 302351 - RNA, 18 nt, Human
agggcagaggccgggggg

SEQ ID NO: 302352 - RNA, 23 nt, Human
aggugacaaaagucaccaaaacu

SEQ ID NO: 302353 - RNA, 22 nt, Human
auggcuaacaaaugaguguguc

SEQ ID NO: 302354 - RNA, 21 nt, Human
caaaagucaccaaaacuccag

SEQ ID NO: 302355 - RNA, 25 nt, Human
caaaauacacagaagcaaaggcugc

SEQ ID NO: 302356 - RNA, 18 nt, Human
caaaggacuugggaucca

SEQ ID NO: 302357 - RNA, 23 nt, Human
caacaggggagaggccgccuccc

SEQ ID NO: 302358 - RNA, 21 nt, Human
caaugugcugaagcaagcgca

SEQ ID NO: 302359 - RNA, 22 nt, Human
cacaaggaugagagaccaccgg

SEQ ID NO: 302360 - RNA, 23 nt, Human
cacagcaagcacuuuccuuucac

SEQ ID NO: 302361 - RNA, 23 nt, Human
caccaaaacuccaaaauacacag

SEQ ID NO: 302362 - RNA, 25 nt, Human
caccaaaacuccaaaauacacagaa

SEQ ID NO: 302363 - RNA, 18 nt, Human
caccucagcccaugcgga

SEQ ID NO: 302364 - RNA, 24 nt, Human
caccucagcccaugcggagaccau

SEQ ID NO: 302365 - RNA, 19 nt, Human
caccuguggacagcagggc

SEQ ID NO: 302366 - RNA, 24 nt, Human
cagcccaugcggagaccaugccag

SEQ ID NO: 302367 - RNA, 21 nt, Human
cagcugggccacaguaggaac

SEQ ID NO: 302368 - RNA, 18 nt, Human
caggagccacgcacaacc

SEQ ID NO: 302369 - RNA, 23 nt, Human
caggggccuggcuuccccagagu

SEQ ID NO: 302370 - RNA, 24 nt, Human
caguaggaacaucacagcaagcac

SEQ ID NO: 302371 - RNA, 25 nt, Human
caguggcugcccaggaagcaucugc

SEQ ID NO: 302372 - RNA, 19 nt, Human
caugaaugcccacaacuaa

SEQ ID NO: 302373 - RNA, 22 nt, Human
cauugcuuucaugaaugcccac

SEQ ID NO: 302374 - RNA, 23 nt, Human
ccaagggaacccacuauggcuaa

SEQ ID NO: 302375 - RNA, 22 nt, Human
ccagcaacuccuaacuccccuc

SEQ ID NO: 302376 - RNA, 19 nt, Human
ccagggaaggggagagggg

SEQ ID NO: 302377 - RNA, 25 nt, Human
ccauguguggcuucaagaauauccc

SEQ ID NO: 302378 - RNA, 21 nt, Human
cccacaggcagaagucaacaa

SEQ ID NO: 302379 - RNA, 22 nt, Human
ccccauuggcugccagugucca

SEQ ID NO: 302380 - RNA, 22 nt, Human
ccccccugcccucacguuucug

SEQ ID NO: 302381 - RNA, 21 nt, Human
ccggaagaaacuggggcuggg

SEQ ID NO: 302382 - RNA, 23 nt, Human
ccuggccaguggcugcccaggaa

SEQ ID NO: 302383 - RNA, 26 nt, Human
ccuugggcucugggucuaaagggcuu

SEQ ID NO: 302384 - RNA, 19 nt, Human
cgaccacaacugccccccu

SEQ ID NO: 302385 - RNA, 22 nt, Human
cgcauugcuuucaugaaugccc

SEQ ID NO: 302386 - RNA, 24 nt, Human
cgcgcagcccaugcagaugcaguc

SEQ ID NO: 302387 - RNA, 19 nt, Human
cuaacuccccucuguacac

SEQ ID NO: 302388 - RNA, 20 nt, Human
cuaacuccccucuguacacu

SEQ ID NO: 302389 - RNA, 21 nt, Human
cucagacccacaggcagaagu

SEQ ID NO: 302390 - RNA, 23 nt, Human
cucgagcacuucggugugugcac

SEQ ID NO: 302391 - RNA, 26 nt, Human
cucguaaugcauccaguccagcaacu

SEQ ID NO: 302392 - RNA, 22 nt, Human
cucuggguuccgccagccaugu

SEQ ID NO: 302393 - RNA, 20 nt, Human
cugcgccggaagaaacuggg

SEQ ID NO: 302394 - RNA, 24 nt, Human
cuggccucuggcucaggaaguggc

SEQ ID NO: 302395 - RNA, 23 nt, Human
cuggggugggggcucuggguucc

SEQ ID NO: 302396 - RNA, 19 nt, Human
gaaaauaucugcaacaugg

SEQ ID NO: 302397 - RNA, 19 nt, Human
gaacucaggggcaugacag

SEQ ID NO: 302398 - RNA, 25 nt, Human
gagaccaccggccagggccagggac

SEQ ID NO: 302399 - RNA, 20 nt, Human
gagagaccaccggccagggc

SEQ ID NO: 302400 - RNA, 21 nt, Human
gagcagugccugccuaguggu

SEQ ID NO: 302401 - RNA, 19 nt, Human
gaggaugguagaggcccug

SEQ ID NO: 302402 - RNA, 21 nt, Human
gcauugcuuucaugaaugccc

SEQ ID NO: 302403 - RNA, 19 nt, Human
gccagcuguaaacagacug

SEQ ID NO: 302404 - RNA, 21 nt, Human
gcuuccccagaguccaccugu

SEQ ID NO: 302405 - RNA, 22 nt, Human
ggacacgggcagcaacagggga

SEQ ID NO: 302406 - RNA, 18 nt, Human
ggagagggggcggcagcc

SEQ ID NO: 302407 - RNA, 19 nt, Human
ggccagggccagggacgcu

SEQ ID NO: 302408 - RNA, 21 nt, Human
ggcuggggugggggcucuggg

SEQ ID NO: 302409 - RNA, 18 nt, Human
gggacugccuauggguuc

SEQ ID NO: 302410 - RNA, 22 nt, Human
gggcagaggccgggggguugcc

SEQ ID NO: 302411 - RNA, 23 nt, Human
gggcuggggugggggcucugggu

SEQ ID NO: 302412 - RNA, 23 nt, Human
ggggagagggggcggcagccucu

SEQ ID NO: 302413 - RNA, 25 nt, Human
ggucucaccucagaugacauccaga

SEQ ID NO: 302414 - RNA, 19 nt, Human
guccagacacuuucugacc

SEQ ID NO: 302415 - RNA, 21 nt, Human
guccaggugacaaaagucacc

SEQ ID NO: 302416 - RNA, 19 nt, Human
gugggggcucuggguuccg

SEQ ID NO: 302417 - RNA, 24 nt, Human
uacacagaagcaaaggcugcaguc

SEQ ID NO: 302418 - RNA, 20 nt, Human
uaggaacaucacagcaagca

SEQ ID NO: 302419 - RNA, 26 nt, Human
ucaauaccauccauucuggggaacuc

SEQ ID NO: 302420 - RNA, 18 nt, Human
ucacaaagccaacugagc

SEQ ID NO: 302421 - RNA, 25 nt, Human
ucaccaaaacuccaaaauacacaga

SEQ ID NO: 302422 - RNA, 19 nt, Human
ucagcccaugcggagaccc

SEQ ID NO: 302423 - RNA, 18 nt, Human
uccaaaauacacagaagc

SEQ ID NO: 302424 - RNA, 18 nt, Human
uccaggggccuggcuucc

SEQ ID NO: 302425 - RNA, 20 nt, Human
uccaggugacaaaagucacc

SEQ ID NO: 302426 - RNA, 21 nt, Human
ucccaaaggcaugguccuugg

SEQ ID NO: 302427 - RNA, 18 nt, Human
ucccucuacccugucccc

SEQ ID NO: 302428 - RNA, 24 nt, Human
ucccugcauggcauggugacuaac

SEQ ID NO: 302429 - RNA, 19 nt, Human
ucccuugcccagggacugc

SEQ ID NO: 302430 - RNA, 19 nt, Human
uccgcgcagcccaugcaga

SEQ ID NO: 302431 - RNA, 21 nt, Human
ucucugggaccaaaagaacuc

SEQ ID NO: 302432 - RNA, 19 nt, Human
ucugccuucucccuuccuc

SEQ ID NO: 302433 - RNA, 22 nt, Human
ugaagugguuucacugugagag

SEQ ID NO: 302434 - RNA, 19 nt, Human
ugacaaaagucaccaaaac

SEQ ID NO: 302435 - RNA, 21 nt, Human
ugacagaugagucuggaagga

SEQ ID NO: 302436 - RNA, 24 nt, Human
ugacccagccccacaacuugccag

SEQ ID NO: 302437 - RNA, 18 nt, Human
ugcccaggaagcaucugc

SEQ ID NO: 302438 - RNA, 25 nt, Human
ugcccugucuugaagugguuucacu

SEQ ID NO: 302439 - RNA, 22 nt, Human
ugccucucugggaccaaaagaa

SEQ ID NO: 302440 - RNA, 24 nt, Human
ugcuggacacaguguugcaugugg

SEQ ID NO: 302441 - RNA, 19 nt, Human
ugcuuucaugaaugcccac

SEQ ID NO: 302442 - RNA, 21 nt, Human
uggagggccuggaaugacccc

SEQ ID NO: 302443 - RNA, 23 nt, Human
uggaugucccucuacccuguccc

SEQ ID NO: 302444 - RNA, 25 nt, Human
uggcaucugcaggcugcaaagcccu

SEQ ID NO: 302445 - RNA, 19 nt, Human
uggcucaggaaguggccac

SEQ ID NO: 302446 - RNA, 20 nt, Human
ugggauccaggggccuggcu

SEQ ID NO: 302447 - RNA, 19 nt, Human
ugggcagcugggccacagu

SEQ ID NO: 302448 - RNA, 20 nt, Human
uggggcucugacagaugagu

SEQ ID NO: 302449 - RNA, 20 nt, Human
ugucccucuacccugucccc

SEQ ID NO: 302450 - RNA, 18 nt, Human
ugucgccgacugucaaca

SEQ ID NO: 302451 - RNA, 24 nt, Human
uucaauaccauccauucuggggaa

SEQ ID NO: 302452 - RNA, 22 nt, Human
uuuuuauuuuuuaaaaaguauu

SEQ ID NO: 302453 - RNA, 20 nt, Human
acccaggccaccguccaacu

SEQ ID NO: 302454 - RNA, 21 nt, Human
aggaagguggaugccccaggg

SEQ ID NO: 302455 - RNA, 23 nt, Human
aggcaggggaugggcugagcagg

SEQ ID NO: 302456 - RNA, 24 nt, Human
aggcaggggaugggcugagcaggg

SEQ ID NO: 302457 - RNA, 21 nt, Human
aggcuccagacacaacagccc

SEQ ID NO: 302458 - RNA, 19 nt, Human
agguggccagggauagagg

SEQ ID NO: 302459 - RNA, 22 nt, Human
caacacaaccuaggcgccagca

SEQ ID NO: 302460 - RNA, 19 nt, Human
caaccuaggcgccagcagc

SEQ ID NO: 302461 - RNA, 23 nt, Human
cacaaccuaggcgccagcagccu

SEQ ID NO: 302462 - RNA, 23 nt, Human
cacccaggccaccguccaaccac

SEQ ID NO: 302463 - RNA, 23 nt, Human
cagacacaacagcccaggcccca

SEQ ID NO: 302464 - RNA, 23 nt, Human
cagcagcagggagcaggugugag

SEQ ID NO: 302465 - RNA, 19 nt, Human
cagccggagggaggccugg

SEQ ID NO: 302466 - RNA, 19 nt, Human
cagcgccacguccccuggg

SEQ ID NO: 302467 - RNA, 20 nt, Human
cagcuucuccagguccaccg

SEQ ID NO: 302468 - RNA, 19 nt, Human
caggagcagcgcacccagg

SEQ ID NO: 302469 - RNA, 18 nt, Human
cagggcacucuguccucc

SEQ ID NO: 302470 - RNA, 24 nt, Human
ccaaagccagggggcagcagccuc

SEQ ID NO: 302471 - RNA, 22 nt, Human
ccacgccucuggcaggcagcag

SEQ ID NO: 302472 - RNA, 19 nt, Human
ccagcagccuaccggccag

SEQ ID NO: 302473 - RNA, 23 nt, Human
ccaggccccaucugagcccuggc

SEQ ID NO: 302474 - RNA, 20 nt, Human
ccccugggcaggaaggugga

SEQ ID NO: 302475 - RNA, 20 nt, Human
cccgcagcuucuccaggucc

SEQ ID NO: 302476 - RNA, 22 nt, Human
cccgcagcuucuccagguccac

SEQ ID NO: 302477 - RNA, 19 nt, Human
cccgcgcccgacgcccgca

SEQ ID NO: 302478 - RNA, 22 nt, Human
ccgcuggucaggacgccgaugg

SEQ ID NO: 302479 - RNA, 20 nt, Human
ccuggcagguggccagggau

SEQ ID NO: 302480 - RNA, 23 nt, Human
cgacagcgccacguccccugggc

SEQ ID NO: 302481 - RNA, 22 nt, Human
cgcagcuucuccagguccaccg

SEQ ID NO: 302482 - RNA, 20 nt, Human
cuaggcgccagcagccuacc

SEQ ID NO: 302483 - RNA, 20 nt, Human
cucuguccuccugcuggagg

SEQ ID NO: 302484 - RNA, 22 nt, Human
cugagcccuggcgcugcgcugg

SEQ ID NO: 302485 - RNA, 20 nt, Human
cuggcaggcagcagcugagg

SEQ ID NO: 302486 - RNA, 20 nt, Human
cuggcgcugcgcuggcaugg

SEQ ID NO: 302487 - RNA, 21 nt, Human
gacgcccgcagcuucuccagg

SEQ ID NO: 302488 - RNA, 25 nt, Human
gagcaggugugaggugaggugccac

SEQ ID NO: 302489 - RNA, 24 nt, Human
gcagggccaggggcaucccccucu

SEQ ID NO: 302490 - RNA, 20 nt, Human
gcagguggccagggauagag

SEQ ID NO: 302491 - RNA, 22 nt, Human
gcaucccccucucaacacaacc

SEQ ID NO: 302492 - RNA, 19 nt, Human
gcccaggccccaucugagc

SEQ ID NO: 302493 - RNA, 21 nt, Human
gcccaggccccaucugagccc

SEQ ID NO: 302494 - RNA, 24 nt, Human
ggcaggaagguggaugccccaggg

SEQ ID NO: 302495 - RNA, 21 nt, Human
ggcagggcaaggagagggcag

SEQ ID NO: 302496 - RNA, 18 nt, Human
ggccuggcaggcuggucu

SEQ ID NO: 302497 - RNA, 19 nt, Human
gggcacucuguccuccugc

SEQ ID NO: 302498 - RNA, 20 nt, Human
ggggcuggggaggggcgugg

SEQ ID NO: 302499 - RNA, 19 nt, Human
gggugggggcuggggaggg

SEQ ID NO: 302500 - RNA, 20 nt, Human
gucacagugaggcagggcca

SEQ ID NO: 302501 - RNA, 18 nt, Human
uagaaaaggugacaggug

SEQ ID NO: 302502 - RNA, 21 nt, Human
ucagcagggggccuggugggc

SEQ ID NO: 302503 - RNA, 21 nt, Human
uccagguccaccgcggccaug

SEQ ID NO: 302504 - RNA, 22 nt, Human
ucucuggucuccccagcuccag

SEQ ID NO: 302505 - RNA, 23 nt, Human
ucucuggucuccccagcuccagg

SEQ ID NO: 302506 - RNA, 18 nt, Human
ucuguccuccugcuggag

SEQ ID NO: 302507 - RNA, 20 nt, Human
ucuguccuccugcuggaggg

SEQ ID NO: 302508 - RNA, 18 nt, Human
ugacaggugcugcacgug

SEQ ID NO: 302509 - RNA, 28 nt, Human
ugaggugaggugccacgccucuggcagg

SEQ ID NO: 302510 - RNA, 19 nt, Human
ugccccagggcacucuguc

SEQ ID NO: 302511 - RNA, 18 nt, Human
ugcuggagggccuggcag

SEQ ID NO: 302512 - RNA, 19 nt, Human
ugggggcuggggaggggcg

SEQ ID NO: 302513 - RNA, 23 nt, Human
ugggggcuggggaggggcguggg

SEQ ID NO: 302514 - RNA, 18 nt, Human
ugugaggugaggugccac

SEQ ID NO: 302515 - RNA, 20 nt, Human
uucuccagguccaccgcggc

SEQ ID NO: 302516 - RNA, 22 nt, Human
uuucuagaaaaggugacaggug

SEQ ID NO: 302517 - RNA, 25 nt, Human
uuuuuuuuuuuuuuuuuuuuuccgg

SEQ ID NO: 302518 - RNA, 18 nt, Human
aaaacaagcagagacuug

SEQ ID NO: 302519 - RNA, 18 nt, Human
agagggagggggaaggag

SEQ ID NO: 302520 - RNA, 27 nt, Human
agagggagggggaaggaggagaggcuu

SEQ ID NO: 302521 - RNA, 18 nt, Human
aggaagaaaacaagcaga

SEQ ID NO: 302522 - RNA, 21 nt, Human
aggaagaaaacaagcagagac

SEQ ID NO: 302523 - RNA, 23 nt, Human
aggagccagguggaggcaaagag

SEQ ID NO: 302524 - RNA, 27 nt, Human
aggcgcacagccugguuaccccuugug

SEQ ID NO: 302525 - RNA, 28 nt, Human
aggggcaggcgcacagccucccaagggg

SEQ ID NO: 302526 - RNA, 19 nt, Human
agggggaaggaggagaggc

SEQ ID NO: 302527 - RNA, 20 nt, Human
aggggugauggacgaacaug

SEQ ID NO: 302528 - RNA, 21 nt, Human
caaaagugccaucacugcuuc

SEQ ID NO: 302529 - RNA, 22 nt, Human
cacccauccugcugcccagaau

SEQ ID NO: 302530 - RNA, 22 nt, Human
caccuggacacauuccaugagg

SEQ ID NO: 302531 - RNA, 24 nt, Human
ccagacgcuuaaccaccagcugaa

SEQ ID NO: 302532 - RNA, 18 nt, Human
ccagguggaggcaaagag

SEQ ID NO: 302533 - RNA, 24 nt, Human
ccagguggaggcaaagagggaggg

SEQ ID NO: 302534 - RNA, 20 nt, Human
cccagacgcuuaaccaccag

SEQ ID NO: 302535 - RNA, 18 nt, Human
ccuccaaaagugccauca

SEQ ID NO: 302536 - RNA, 18 nt, Human
cgaacauggggaggagcc

SEQ ID NO: 302537 - RNA, 26 nt, Human
cgucccaccccucugcacaugcccca

SEQ ID NO: 302538 - RNA, 29 nt, Human
cucuccuccgccgcugcuuucuugcagau

SEQ ID NO: 302539 - RNA, 21 nt, Human
cugauggcgucccaccccucu

SEQ ID NO: 302540 - RNA, 23 nt, Human
cugggguaucugggguccccucc

SEQ ID NO: 302541 - RNA, 23 nt, Human
cugggguccccuccaaaagugcc

SEQ ID NO: 302542 - RNA, 18 nt, Human
gaagaaaacaagcagaga

SEQ ID NO: 302543 - RNA, 24 nt, Human
gaagaaaacaagcagagacuuggg

SEQ ID NO: 302544 - RNA, 20 nt, Human
gacagcucagccucuugucu

SEQ ID NO: 302545 - RNA, 20 nt, Human
gagacuuggguaaaccaugg

SEQ ID NO: 302546 - RNA, 19 nt, Human
gaggagccagguggaggca

SEQ ID NO: 302547 - RNA, 21 nt, Human
gcaaagagggagggggaagga

SEQ ID NO: 302548 - RNA, 21 nt, Human
gcucacuacacaggcuggggu

SEQ ID NO: 302549 - RNA, 22 nt, Human
ggcaaagagggagggggaagga

SEQ ID NO: 302550 - RNA, 19 nt, Human
gucauaucccagacgcuua

SEQ ID NO: 302551 - RNA, 23 nt, Human
uaaccaccagcugaagggaccaa

SEQ ID NO: 302552 - RNA, 20 nt, Human
ucacuacacaggcuggggua

SEQ ID NO: 302553 - RNA, 23 nt, Human
ucagccucuugucuuguaauggu

SEQ ID NO: 302554 - RNA, 24 nt, Human
uccaaaagugccaucacugcuucc

SEQ ID NO: 302555 - RNA, 21 nt, Human
uccacacccauccugcugccc

SEQ ID NO: 302556 - RNA, 22 nt, Human
uccacacccauccugcugccca

SEQ ID NO: 302557 - RNA, 19 nt, Human
uccuugggaaaggggggag

SEQ ID NO: 302558 - RNA, 22 nt, Human
uccuugggaaaggggggagggg

SEQ ID NO: 302559 - RNA, 18 nt, Human
ugaagggaccaacagagg

SEQ ID NO: 302560 - RNA, 22 nt, Human
ugcccagaauucugucaaaggc

SEQ ID NO: 302561 - RNA, 19 nt, Human
ugggaaaggggggaggggu

SEQ ID NO: 302562 - RNA, 19 nt, Human
ugggguaucuggggucccc

SEQ ID NO: 302563 - RNA, 25 nt, Human
uuagcucuccuccgccgcugcuuuc

SEQ ID NO: 302564 - RNA, 22 nt, Human
uugucuuguaaugguucuuugu

SEQ ID NO: 302565 - RNA, 20 nt, Human
aaacagacaguccacggugg

SEQ ID NO: 302566 - RNA, 21 nt, Human
acagacagcacgcacuggagc

SEQ ID NO: 302567 - RNA, 21 nt, Human
acagacaguccacgguggccg

SEQ ID NO: 302568 - RNA, 23 nt, Human
agacacacuccacagacagcacg

SEQ ID NO: 302569 - RNA, 19 nt, Human
agacagcacgcacuggagc

SEQ ID NO: 302570 - RNA, 19 nt, Human
auaaagugcugauaaaaua

SEQ ID NO: 302571 - RNA, 18 nt, Human
uccacagacagcacgcac

SEQ ID NO: 302572 - RNA, 20 nt, Human
uccacagacagcacgcacuu

SEQ ID NO: 302573 - RNA, 24 nt, Human
uccacgguggcugcaggcacaugc

SEQ ID NO: 302574 - RNA, 24 nt, Human
ugcauaaagugcugauaaaauaac

SEQ ID NO: 302575 - RNA, 22 nt, Human
uuaauucugcucauaugcacau

SEQ ID NO: 302576 - RNA, 20 nt, Human
aaaaaaccccaaaaaacaaa

SEQ ID NO: 302577 - RNA, 19 nt, Human
agaaaaaaaaaaccccaaa

SEQ ID NO: 302578 - RNA, 22 nt, Human
agaaaaaaaaaaccccaaaaaa

SEQ ID NO: 302579 - RNA, 18 nt, Human
ccucggcuggcgggcggg

SEQ ID NO: 302580 - RNA, 22 nt, Human
cgcugcugcuggggccgcggac

SEQ ID NO: 302581 - RNA, 25 nt, Human
cgcugcugcuggggccgcggacugg

SEQ ID NO: 302582 - RNA, 23 nt, Human
cugcuacuggggcugcucucggc

SEQ ID NO: 302583 - RNA, 23 nt, Human
gaaaaaaaaaaccccaaaaaaca

SEQ ID NO: 302584 - RNA, 19 nt, Human
gcgcugccguccggaccgc

SEQ ID NO: 302585 - RNA, 21 nt, Human
gcuacuggggcugcucucggc

SEQ ID NO: 302586 - RNA, 19 nt, Human
ggaaaggggugcaaagcug

SEQ ID NO: 302587 - RNA, 23 nt, Human
uaguagaaucuuuuuuauucaga

SEQ ID NO: 302588 - RNA, 21 nt, Human
uauucagaaaaaaaaaacccc

SEQ ID NO: 302589 - RNA, 26 nt, Human
uggcagcaauaagggguaugggguaa

SEQ ID NO: 302590 - RNA, 22 nt, Human
uggcccccagcccaugugguuu

SEQ ID NO: 302591 - RNA, 18 nt, Human
ugggguaauggcccaaaa

SEQ ID NO: 302592 - RNA, 21 nt, Human
ugggguaauggcccaaaaaau

SEQ ID NO: 302593 - RNA, 24 nt, Human
ugugguuuuggcagcaauaagggg

SEQ ID NO: 302594 - RNA, 24 nt, Human
uucagaaaaaaaaaaccccaaaaa

SEQ ID NO: 302595 - RNA, 25 nt, Human
uucagaaaaaaaaaaccccaaaaaa

SEQ ID NO: 302596 - RNA, 18 nt, Human
uuuuuuuuuuuuuuuuug

SEQ ID NO: 302597 - RNA, 24 nt, Human
uuuuuuuuuuuuuuuuuuguuagu

SEQ ID NO: 302598 - RNA, 25 nt, Human
aaaaaaaaacaggcacugcauaaaa

SEQ ID NO: 302599 - RNA, 25 nt, Human
aaaaaaaaacaggcacugcauaaaa

SEQ ID NO: 302600 - RNA, 18 nt, Human
aaaaaaacaggcacugca

SEQ ID NO: 302601 - RNA, 19 nt, Human
aaaaaaacaggcacugcau

SEQ ID NO: 302602 - RNA, 18 nt, Human
aaaacaaaagugaacaga

SEQ ID NO: 302603 - RNA, 19 nt, Human
aaacaauagaagcaaauac

SEQ ID NO: 302604 - RNA, 19 nt, Human
aaacaauagaagcaaauac

SEQ ID NO: 302605 - RNA, 19 nt, Human
aacaaaacaaaagugaaca

SEQ ID NO: 302606 - RNA, 19 nt, Human
aaccaaugcuggaguacac

SEQ ID NO: 302607 - RNA, 23 nt, Human
aagaaaaaggaagaaaaaucuga

SEQ ID NO: 302608 - RNA, 23 nt, Human
aagaaaaaggaagaaaaaucuga

SEQ ID NO: 302609 - RNA, 19 nt, Human
aagacaccuuuccccacca

SEQ ID NO: 302610 - RNA, 18 nt, Human
aagaguagagcuggugug

SEQ ID NO: 302611 - RNA, 18 nt, Human
aagaguagagcuggugug

SEQ ID NO: 302612 - RNA, 21 nt, Human
aaggaaacaaaacaaaaguga

SEQ ID NO: 302613 - RNA, 21 nt, Human
acaaaacaaaagugaacagaa

SEQ ID NO: 302614 - RNA, 24 nt, Human
acaauacuaaaagcaaacuacugc

SEQ ID NO: 302615 - RNA, 24 nt, Human
acaauacuaaaagcaaacuacugc

SEQ ID NO: 302616 - RNA, 21 nt, Human
acaauagaagcaaauacuaga

SEQ ID NO: 302617 - RNA, 21 nt, Human
acaauagaagcaaauacuaga

SEQ ID NO: 302618 - RNA, 23 nt, Human
acugcagcucucaauagcucauc

SEQ ID NO: 302619 - RNA, 23 nt, Human
acugcagcucucaauagcucauc

SEQ ID NO: 302620 - RNA, 18 nt, Human
agaaaauagguaaagaaa

SEQ ID NO: 302621 - RNA, 20 nt, Human
agaaauggacaaaucagcaa

SEQ ID NO: 302622 - RNA, 22 nt, Human
agagaagagugaaggaaugaug

SEQ ID NO: 302623 - RNA, 19 nt, Human
aggaagacuaaaugagcca

SEQ ID NO: 302624 - RNA, 19 nt, Human
agggaggggggggcgggaa

SEQ ID NO: 302625 - RNA, 19 nt, Human
agggaggggggggcgggaa

SEQ ID NO: 302626 - RNA, 19 nt, Human
aggguuguugaugaagaca

SEQ ID NO: 302627 - RNA, 19 nt, Human
aggguuguugaugaagaca

SEQ ID NO: 302628 - RNA, 20 nt, Human
aggguuguugaugaagacag

SEQ ID NO: 302629 - RNA, 20 nt, Human
aggguuguugaugaagacag

SEQ ID NO: 302630 - RNA, 18 nt, Human
agugcaacaacaauacua

SEQ ID NO: 302631 - RNA, 18 nt, Human
agugcaacaacaauacua

SEQ ID NO: 302632 - RNA, 21 nt, Human
augaagaacaaacuggacaca

SEQ ID NO: 302633 - RNA, 21 nt, Human
augaagaacaaacuggacaca

SEQ ID NO: 302634 - RNA, 21 nt, Human
augaagacaguugcuagguag

SEQ ID NO: 302635 - RNA, 21 nt, Human
augaagacaguugcuagguag

SEQ ID NO: 302636 - RNA, 23 nt, Human
augcccccuccccccaauuucaa

SEQ ID NO: 302637 - RNA, 23 nt, Human
auguaacaaagugcagggaaaga

SEQ ID NO: 302638 - RNA, 23 nt, Human
auguaacaaagugcagggaaaga

SEQ ID NO: 302639 - RNA, 19 nt, Human
auguugccagauaaggguu

SEQ ID NO: 302640 - RNA, 19 nt, Human
auguugccagauaaggguu

SEQ ID NO: 302641 - RNA, 19 nt, Human
auucaaucaguaugguuac

SEQ ID NO: 302642 - RNA, 19 nt, Human
auucaaucaguaugguuac

SEQ ID NO: 302643 - RNA, 19 nt, Human
caacaacaauacuaaaagc

SEQ ID NO: 302644 - RNA, 19 nt, Human
caacaacaauacuaaaagc

SEQ ID NO: 302645 - RNA, 22 nt, Human
caacaauacuaaaagcaaacua

SEQ ID NO: 302646 - RNA, 22 nt, Human
caacaauacuaaaagcaaacua

SEQ ID NO: 302647 - RNA, 22 nt, Human
caagugcaacaacaauacuaaa

SEQ ID NO: 302648 - RNA, 22 nt, Human
caagugcaacaacaauacuaaa

SEQ ID NO: 302649 - RNA, 22 nt, Human
cacagguucauaccccaucacc

SEQ ID NO: 302650 - RNA, 22 nt, Human
cacugcauaaaaaaagauggaa

SEQ ID NO: 302651 - RNA, 22 nt, Human
cacugcauaaaaaaagauggaa

SEQ ID NO: 302652 - RNA, 23 nt, Human
cacugcauaaaaaaagauggaag

SEQ ID NO: 302653 - RNA, 25 nt, Human
cagaaagaaagacaccuuuccccac

SEQ ID NO: 302654 - RNA, 21 nt, Human
cagccaaguccacaauaaugc

SEQ ID NO: 302655 - RNA, 21 nt, Human
cagccaaguccacaauaaugc

SEQ ID NO: 302656 - RNA, 21 nt, Human
cagggaaagaaauggacaaau

SEQ ID NO: 302657 - RNA, 23 nt, Human
cauaaaaaaagauggaagcaaac

SEQ ID NO: 302658 - RNA, 23 nt, Human
cauaaaaaaagauggaagcaaac

SEQ ID NO: 302659 - RNA, 23 nt, Human
cauauaaaaacucaagcugcaaa

SEQ ID NO: 302660 - RNA, 23 nt, Human
cauauaaaaacucaagcugcaaa

SEQ ID NO: 302661 - RNA, 23 nt, Human
caugacuauaaccaaugcuggag

SEQ ID NO: 302662 - RNA, 22 nt, Human
caugcccccuccccccaauuuc

SEQ ID NO: 302663 - RNA, 22 nt, Human
caugcccccuccccccaauuuc

SEQ ID NO: 302664 - RNA, 24 nt, Human
caugcccccuccccccaauuucaa

SEQ ID NO: 302665 - RNA, 23 nt, Human
cauuauccacaaggcccaaacaa

SEQ ID NO: 302666 - RNA, 23 nt, Human
cauuauccacaaggcccaaacaa

SEQ ID NO: 302667 - RNA, 25 nt, Human
cccaucacccugcauugcuaauaaa

SEQ ID NO: 302668 - RNA, 21 nt, Human
ccccaucacccugcauugcua

SEQ ID NO: 302669 - RNA, 21 nt, Human
cccccuccccccaauuucaag

SEQ ID NO: 302670 - RNA, 22 nt, Human
ccccuaauacuuaacagucugc

SEQ ID NO: 302671 - RNA, 20 nt, Human
ccccuccccccaauuucaag

SEQ ID NO: 302672 - RNA, 21 nt, Human
cucacaauagcaacaguucau

SEQ ID NO: 302673 - RNA, 21 nt, Human
cucacaauagcaacaguucau

SEQ ID NO: 302674 - RNA, 23 nt, Human
cuuacacaucagaccuccucagg

SEQ ID NO: 302675 - RNA, 20 nt, Human
gaaaaaaauucaucacaaga

SEQ ID NO: 302676 - RNA, 20 nt, Human
gaaaaaaauucaucacaaga

SEQ ID NO: 302677 - RNA, 24 nt, Human
gaaaauagguaaagaaaaauuagc

SEQ ID NO: 302678 - RNA, 24 nt, Human
gaaaauagguaaagaaaaauuagc

SEQ ID NO: 302679 - RNA, 23 nt, Human
gaaacaaaacaaaagugaacaga

SEQ ID NO: 302680 - RNA, 18 nt, Human
gaaauggacaaaucagca

SEQ ID NO: 302681 - RNA, 21 nt, Human
gagaagagugaaggaaugaug

SEQ ID NO: 302682 - RNA, 23 nt, Human
gcacuuuuuccucccaaccaugc

SEQ ID NO: 302683 - RNA, 23 nt, Human
gcacuuuuuccucccaaccaugc

SEQ ID NO: 302684 - RNA, 22 nt, Human
gcuacaaaaggaagacuaaaug

SEQ ID NO: 302685 - RNA, 22 nt, Human
gcuacaaaaggaagacuaaaug

SEQ ID NO: 302686 - RNA, 21 nt, Human
gcugcaauuauguugccagau

SEQ ID NO: 302687 - RNA, 21 nt, Human
gcugcaauuauguugccagau

SEQ ID NO: 302688 - RNA, 18 nt, Human
ggaaacaaaacaaaagug

SEQ ID NO: 302689 - RNA, 19 nt, Human
ggcccaaacaauagaagca

SEQ ID NO: 302690 - RNA, 19 nt, Human
ggcccaaacaauagaagca

SEQ ID NO: 302691 - RNA, 19 nt, Human
ggcgggaaaaagagaagag

SEQ ID NO: 302692 - RNA, 19 nt, Human
ggcgggaaaaagagaagag

SEQ ID NO: 302693 - RNA, 18 nt, Human
guacauuauccacaaggc

SEQ ID NO: 302694 - RNA, 18 nt, Human
guacauuauccacaaggc

SEQ ID NO: 302695 - RNA, 20 nt, Human
guagauggggagaggcugcu

SEQ ID NO: 302696 - RNA, 21 nt, Human
uaaaauuuccagaauuaagac

SEQ ID NO: 302697 - RNA, 23 nt, Human
uaaaucagaugaguuagacugua

SEQ ID NO: 302698 - RNA, 23 nt, Human
uaaaucagaugaguuagacugua

SEQ ID NO: 302699 - RNA, 20 nt, Human
uaaaugcauauuaaaucaga

SEQ ID NO: 302700 - RNA, 20 nt, Human
uaaaugcauauuaaaucaga

SEQ ID NO: 302701 - RNA, 24 nt, Human
uaagacaaagugaugcccaacuug

SEQ ID NO: 302702 - RNA, 24 nt, Human
uaagacaaagugaugcccaacuug

SEQ ID NO: 302703 - RNA, 23 nt, Human
uaauaguuauggcauuuuuuuaa

SEQ ID NO: 302704 - RNA, 23 nt, Human
uaauaguuauggcauuuuuuuaa

SEQ ID NO: 302705 - RNA, 19 nt, Human
uacugcagcucucaauagc

SEQ ID NO: 302706 - RNA, 19 nt, Human
uacugcagcucucaauagc

SEQ ID NO: 302707 - RNA, 19 nt, Human
uagaaaauagguaaagaaa

SEQ ID NO: 302708 - RNA, 19 nt, Human
uagaaaauagguaaagaaa

SEQ ID NO: 302709 - RNA, 20 nt, Human
uagcucaucaacaaaaggga

SEQ ID NO: 302710 - RNA, 20 nt, Human
uagcucaucaacaaaaggga

SEQ ID NO: 302711 - RNA, 19 nt, Human
uaggucaguuaaaauccau

SEQ ID NO: 302712 - RNA, 19 nt, Human
uaggucaguuaaaauccau

SEQ ID NO: 302713 - RNA, 22 nt, Human
uauaaccaaugcuggaguacac

SEQ ID NO: 302714 - RNA, 23 nt, Human
uauagcuaggaaaguuuaagagg

SEQ ID NO: 302715 - RNA, 20 nt, Human
uauggcacagaauacauaug

SEQ ID NO: 302716 - RNA, 20 nt, Human
uauggcacagaauacauaug

SEQ ID NO: 302717 - RNA, 18 nt, Human
uauguugccagauaaggg

SEQ ID NO: 302718 - RNA, 18 nt, Human
uauguugccagauaaggg

SEQ ID NO: 302719 - RNA, 26 nt, Human
ucaaagugcugaaaagacacugauca

SEQ ID NO: 302720 - RNA, 26 nt, Human
ucaaagugcugaaaagacacugauca

SEQ ID NO: 302721 - RNA, 24 nt, Human
ucaauagcucaucaacaaaaggga

SEQ ID NO: 302722 - RNA, 24 nt, Human
ucaauagcucaucaacaaaaggga

SEQ ID NO: 302723 - RNA, 24 nt, Human
ucacccugcauugcuaauaaaauu

SEQ ID NO: 302724 - RNA, 19 nt, Human
ucagaccuccucagguaua

SEQ ID NO: 302725 - RNA, 18 nt, Human
ucagagauuguacaaccg

SEQ ID NO: 302726 - RNA, 18 nt, Human
ucagagauuguacaaccg

SEQ ID NO: 302727 - RNA, 18 nt, Human
uccacaaggcccaaacaa

SEQ ID NO: 302728 - RNA, 25 nt, Human
uccacaauaaugcaacuucauauaa

SEQ ID NO: 302729 - RNA, 25 nt, Human
uccacaauaaugcaacuucauauaa

SEQ ID NO: 302730 - RNA, 21 nt, Human
uccauugggcaaacaggaauc

SEQ ID NO: 302731 - RNA, 21 nt, Human
uccauugggcaaacaggaauc

SEQ ID NO: 302732 - RNA, 18 nt, Human
uccguggacaccuuccuu

SEQ ID NO: 302733 - RNA, 22 nt, Human
uccguggacaccuuccuuuccc

SEQ ID NO: 302734 - RNA, 21 nt, Human
ugaugcaugcacuuuuuccuc

SEQ ID NO: 302735 - RNA, 21 nt, Human
ugaugcaugcacuuuuuccuc

SEQ ID NO: 302736 - RNA, 23 nt, Human
ugcagggaaagaaauggacaaau

SEQ ID NO: 302737 - RNA, 23 nt, Human
ugccuaugugcgaagggaggggg

SEQ ID NO: 302738 - RNA, 23 nt, Human
ugccuaugugcgaagggaggggg

SEQ ID NO: 302739 - RNA, 20 nt, Human
ugcuagguagauggggagag

SEQ ID NO: 302740 - RNA, 20 nt, Human
ugcuagguagauggggagag

SEQ ID NO: 302741 - RNA, 20 nt, Human
ugcugaaaagacacugauca

SEQ ID NO: 302742 - RNA, 20 nt, Human
ugcugaaaagacacugauca

SEQ ID NO: 302743 - RNA, 23 nt, Human
uggaagcaaaccaaaugccuaug

SEQ ID NO: 302744 - RNA, 23 nt, Human
uggaagcaaaccaaaugccuaug

SEQ ID NO: 302745 - RNA, 24 nt, Human
uggaauaaauuuauuucaucuguc

SEQ ID NO: 302746 - RNA, 24 nt, Human
uggaauaaauuuauuucaucuguc

SEQ ID NO: 302747 - RNA, 23 nt, Human
uggcaugcccccuccccccaauu

SEQ ID NO: 302748 - RNA, 23 nt, Human
uggcaugcccccuccccccaauu

SEQ ID NO: 302749 - RNA, 20 nt, Human
ugggaggaagugcuuuuugc

SEQ ID NO: 302750 - RNA, 20 nt, Human
ugggaggaagugcuuuuugc

SEQ ID NO: 302751 - RNA, 23 nt, Human
uggggggggagggcagaaagaaa

SEQ ID NO: 302752 - RNA, 27 nt, Human
uguccuguagacacuaugaauaaaggu

SEQ ID NO: 302753 - RNA, 27 nt, Human
uguccuguagacacuaugaauaaaggu

SEQ ID NO: 302754 - RNA, 23 nt, Human
ugugcgaagggaggggggggcgg

SEQ ID NO: 302755 - RNA, 23 nt, Human
ugugcgaagggaggggggggcgg

SEQ ID NO: 302756 - RNA, 25 nt, Human
uuaaaaaaaaacaggcacugcauaa

SEQ ID NO: 302757 - RNA, 25 nt, Human
uuaaaaaaaaacaggcacugcauaa

SEQ ID NO: 302758 - RNA, 18 nt, Human
uuagcuaccaucuacagu

SEQ ID NO: 302759 - RNA, 18 nt, Human
uuagcuaccaucuacagu

SEQ ID NO: 302760 - RNA, 23 nt, Human
uugguccuaugaagaacaaacug

SEQ ID NO: 302761 - RNA, 23 nt, Human
uugguccuaugaagaacaaacug

SEQ ID NO: 302762 - RNA, 23 nt, Human
uugguuggaauaaauuuauuuca

SEQ ID NO: 302763 - RNA, 25 nt, Human
uuguuuugccauugcacucuucaua

SEQ ID NO: 302764 - RNA, 25 nt, Human
uuguuuugccauugcacucuucaua

SEQ ID NO: 302765 - RNA, 19 nt, Human
uuuuggggggggagggcag

SEQ ID NO: 302766 - RNA, 22 nt, Human
uuuuuccucccaaccaugcgcu

SEQ ID NO: 302767 - RNA, 22 nt, Human
uuuuuccucccaaccaugcgcu

SEQ ID NO: 302768 - RNA, 21 nt, Human
uuuuuuuuuuuuuugguugga

SEQ ID NO: 302769 - RNA, 21 nt, Human
uuuuuuuuuuuuuuuuugguu

SEQ ID NO: 302770 - RNA, 23 nt, Human
uuuuuuuuuuuuuuuuugguugg

SEQ ID NO: 302771 - RNA, 20 nt, Human
uuuuuuuuuuuuuuuuuugg

SEQ ID NO: 302772 - RNA, 18 nt, Human
aaccugugcucuagaacu

SEQ ID NO: 302773 - RNA, 24 nt, Human
aagcaacuagaacaugauucagaa

SEQ ID NO: 302774 - RNA, 20 nt, Human
acaaagcacucgcaaaaacc

SEQ ID NO: 302775 - RNA, 18 nt, Human
acaagaaaccccagaagg

SEQ ID NO: 302776 - RNA, 20 nt, Human
acuccgcucauggggacaga

SEQ ID NO: 302777 - RNA, 24 nt, Human
agaaccugugcucuagaacugcua

SEQ ID NO: 302778 - RNA, 19 nt, Human
aggcaggaagggauucuaa

SEQ ID NO: 302779 - RNA, 21 nt, Human
aguaggcagugaccugacugc

SEQ ID NO: 302780 - RNA, 19 nt, Human
augaagggagugggugcag

SEQ ID NO: 302781 - RNA, 22 nt, Human
caaccgccacaagaaaccccag

SEQ ID NO: 302782 - RNA, 26 nt, Human
cacuccugccccucagaggucaagga

SEQ ID NO: 302783 - RNA, 24 nt, Human
cacugccaugaaacaaggcaggaa

SEQ ID NO: 302784 - RNA, 27 nt, Human
cacugccaugaaacaaggcaggaaggg

SEQ ID NO: 302785 - RNA, 23 nt, Human
cagguuacauucgucuuccacug

SEQ ID NO: 302786 - RNA, 20 nt, Human
cauuucacugccaugaaaca

SEQ ID NO: 302787 - RNA, 24 nt, Human
ccacaagaaaccccagaaggguua

SEQ ID NO: 302788 - RNA, 23 nt, Human
cgccacaagaaaccccagaaggg

SEQ ID NO: 302789 - RNA, 20 nt, Human
cuaauacacacaccaggaag

SEQ ID NO: 302790 - RNA, 24 nt, Human
cucaagaugucuacagaugugguc

SEQ ID NO: 302791 - RNA, 21 nt, Human
cuccccaaaguccuuaguaaa

SEQ ID NO: 302792 - RNA, 23 nt, Human
cucgcaaaaacccaagucacuac

SEQ ID NO: 302793 - RNA, 21 nt, Human
cuuagacugagaaccugugcu

SEQ ID NO: 302794 - RNA, 20 nt, Human
cuuggacaggaccaagaggc

SEQ ID NO: 302795 - RNA, 25 nt, Human
gaagcacuccugccccucagagguc

SEQ ID NO: 302796 - RNA, 19 nt, Human
gagcagaggacagacuccg

SEQ ID NO: 302797 - RNA, 21 nt, Human
gcagaggacagacuccgcuca

SEQ ID NO: 302798 - RNA, 24 nt, Human
gcagguuacauucgucuuccacug

SEQ ID NO: 302799 - RNA, 22 nt, Human
ggagcuuuuccauagcuuagac

SEQ ID NO: 302800 - RNA, 19 nt, Human
gggacagacaggcucuguu

SEQ ID NO: 302801 - RNA, 21 nt, Human
gucagugugacaugugcaggu

SEQ ID NO: 302802 - RNA, 21 nt, Human
guuauuguuuuguauuauaua

SEQ ID NO: 302803 - RNA, 24 nt, Human
uaaacaaagcacucgcaaaaaccc

SEQ ID NO: 302804 - RNA, 24 nt, Human
uaaauuaacacauaacgaaauuca

SEQ ID NO: 302805 - RNA, 23 nt, Human
uacaguuaugcucagaugaacac

SEQ ID NO: 302806 - RNA, 24 nt, Human
uagaacaugauucagaaaucagug

SEQ ID NO: 302807 - RNA, 24 nt, Human
uagcaugguuccuccccaaagucc

SEQ ID NO: 302808 - RNA, 24 nt, Human
uauuauacugauauggaaaaagga

SEQ ID NO: 302809 - RNA, 20 nt, Human
ucacugccaugaaacaaggc

SEQ ID NO: 302810 - RNA, 20 nt, Human
ucagaugaacacuggaccca

SEQ ID NO: 302811 - RNA, 18 nt, Human
ucauggggacagacaggc

SEQ ID NO: 302812 - RNA, 19 nt, Human
uccauagcuuagacugaga

SEQ ID NO: 302813 - RNA, 19 nt, Human
ucccaaccuagagccagau

SEQ ID NO: 302814 - RNA, 21 nt, Human
uccccaaaguccuuaguaaac

SEQ ID NO: 302815 - RNA, 23 nt, Human
uccccaaaguccuuaguaaacaa

SEQ ID NO: 302816 - RNA, 24 nt, Human
uggaaugacuagagcccccaggca

SEQ ID NO: 302817 - RNA, 24 nt, Human
uggcuuagcaugguuccuccccaa

SEQ ID NO: 302818 - RNA, 21 nt, Human
uggggucagggaggaaacagu

SEQ ID NO: 302819 - RNA, 18 nt, Human
uguggucagugugacaug

SEQ ID NO: 302820 - RNA, 19 nt, Human
uggcagcagggaccacaga

SEQ ID NO: 302821 - RNA, 18 nt, Human
aaaaagaaggcugaaucc

SEQ ID NO: 302822 - RNA, 26 nt, Human
aaaagaaggcugaauccagaguggaa

SEQ ID NO: 302823 - RNA, 19 nt, Human
agaggaagagcagcucuga

SEQ ID NO: 302824 - RNA, 19 nt, Human
agaguggaaagacagauac

SEQ ID NO: 302825 - RNA, 18 nt, Human
cagaguccagaaaaagaa

SEQ ID NO: 302826 - RNA, 18 nt, Human
cagggucaagaggaagag

SEQ ID NO: 302827 - RNA, 19 nt, Human
cagggucaagaggaagagg

SEQ ID NO: 302828 - RNA, 20 nt, Human
gaagagcagcucugaguucu

SEQ ID NO: 302829 - RNA, 19 nt, Human
gcccuaggagggugcaggg

SEQ ID NO: 302830 - RNA, 25 nt, Human
ggaaagacagauacaaugcccuagg

SEQ ID NO: 302831 - RNA, 18 nt, Human
ggugcagggucaagagga

SEQ ID NO: 302832 - RNA, 18 nt, Human
ggugcagggucaagagga

SEQ ID NO: 302833 - RNA, 25 nt, Human
ggugcagggucaagaggaagagggg

SEQ ID NO: 302834 - RNA, 23 nt, Human
gucaagaggaagaggggagccca

SEQ ID NO: 302835 - RNA, 20 nt, Human
guggaaagacagauacaaug

SEQ ID NO: 302836 - RNA, 18 nt, Human
uagagaaaguccagaguc

SEQ ID NO: 302837 - RNA, 28 nt, Human
uccagaguccagaaaaagaaggcugaau

SEQ ID NO: 302838 - RNA, 19 nt, Human
uccagaguggaaagacaga

SEQ ID NO: 302839 - RNA, 23 nt, Human
ugcagggucaagaggaagagggg

SEQ ID NO: 302840 - RNA, 18 nt, Human
ugcccuaggagggugcag

SEQ ID NO: 302841 - RNA, 19 nt, Human
uggaaagacagauacaaug

SEQ ID NO: 302842 - RNA, 26 nt, Human
aaaaaaaaaaaaaaagacgaaagaag

SEQ ID NO: 302843 - RNA, 25 nt, Human
aaaaaaaaaaaaagacgaaagaaaa

SEQ ID NO: 302844 - RNA, 20 nt, Human
aaagccccugguguguccuc

SEQ ID NO: 302845 - RNA, 25 nt, Human
aacagaaaauagggcaaaggggacc

SEQ ID NO: 302846 - RNA, 19 nt, Human
acccgcagcggcucccucc

SEQ ID NO: 302847 - RNA, 24 nt, Human
acguccauguacccauugcccaau

SEQ ID NO: 302848 - RNA, 23 nt, Human
agagggcaugguggcucucacag

SEQ ID NO: 302849 - RNA, 23 nt, Human
aggaaaaagggaauucagccgca

SEQ ID NO: 302850 - RNA, 18 nt, Human
agggaaagacccgcagcg

SEQ ID NO: 302851 - RNA, 20 nt, Human
auaaagaaugucacgcacag

SEQ ID NO: 302852 - RNA, 22 nt, Human
caaaaaaaaaaaaaaaaaaaaa

SEQ ID NO: 302853 - RNA, 21 nt, Human
cagagugcgcaaacacccuuc

SEQ ID NO: 302854 - RNA, 20 nt, Human
cauguacccauugcccaauu

SEQ ID NO: 302855 - RNA, 20 nt, Human
ccaggagcaaaaaaaaaaaa

SEQ ID NO: 302856 - RNA, 26 nt, Human
ccaggagcaaaaaaaaaaaaaaaaaa

SEQ ID NO: 302857 - RNA, 19 nt, Human
cccgcagcggcucccucca

SEQ ID NO: 302858 - RNA, 21 nt, Human
cgaggugagacuaagaaucug

SEQ ID NO: 302859 - RNA, 21 nt, Human
cggacagagcagaaccgaaga

SEQ ID NO: 302860 - RNA, 22 nt, Human
cuugccaggagcaaaaaaaaaa

SEQ ID NO: 302861 - RNA, 18 nt, Human
gaaguauuugacauacaa

SEQ ID NO: 302862 - RNA, 19 nt, Human
gacccgcagcggcucccuc

SEQ ID NO: 302863 - RNA, 21 nt, Human
ggaaaaagggaauucagccgc

SEQ ID NO: 302864 - RNA, 20 nt, Human
ggaagccacugccgcaagga

SEQ ID NO: 302865 - RNA, 19 nt, Human
ggugacaggagcagcauga

SEQ ID NO: 302866 - RNA, 21 nt, Human
guaaaggaaaaagggaauuca

SEQ ID NO: 302867 - RNA, 19 nt, Human
uaaacugugugucuuccuc

SEQ ID NO: 302868 - RNA, 21 nt, Human
uacagugaacguccauguacc

SEQ ID NO: 302869 - RNA, 19 nt, Human
uagggcaaagggccaggug

SEQ ID NO: 302870 - RNA, 23 nt, Human
ucaggagucucuuacaacacuuu

SEQ ID NO: 302871 - RNA, 20 nt, Human
uccauguacccauugcccaa

SEQ ID NO: 302872 - RNA, 19 nt, Human
ucuguggaaucguggaggg

SEQ ID NO: 302873 - RNA, 20 nt, Human
ugacauacaaaaagccauaa

SEQ ID NO: 302874 - RNA, 21 nt, Human
ugacauacaaaaagccauaaa

SEQ ID NO: 302875 - RNA, 24 nt, Human
ugacauacaaaaagccauaaagaa

SEQ ID NO: 302876 - RNA, 18 nt, Human
ugagacuaagaaucugga

SEQ ID NO: 302877 - RNA, 21 nt, Human
ugagcagcuccuggucagucc

SEQ ID NO: 302878 - RNA, 23 nt, Human
ugagcagcuccuggucaguccca

SEQ ID NO: 302879 - RNA, 18 nt, Human
ugaguaaaggaaaaaggg

SEQ ID NO: 302880 - RNA, 19 nt, Human
ugaguaaaggaaaaaggga

SEQ ID NO: 302881 - RNA, 22 nt, Human
ugccaggagcaaaaaaaaaaaa

SEQ ID NO: 302882 - RNA, 18 nt, Human
ugccaugaggcacaugga

SEQ ID NO: 302883 - RNA, 19 nt, Human
ugccugccuccucugagug

SEQ ID NO: 302884 - RNA, 19 nt, Human
ugcgugaugggaaccgcac

SEQ ID NO: 302885 - RNA, 22 nt, Human
uuaaagccccugguguguccuc

SEQ ID NO: 302886 - RNA, 18 nt, Human
aagcaaauggcaaagugu

SEQ ID NO: 302887 - RNA, 19 nt, Human
aagcccccaggcaaccacu

SEQ ID NO: 302888 - RNA, 23 nt, Human
aagccuugcggagucaggagccc

SEQ ID NO: 302889 - RNA, 20 nt, Human
agcggaagcucccagggguc

SEQ ID NO: 302890 - RNA, 21 nt, Human
agcuugugggggugccagggc

SEQ ID NO: 302891 - RNA, 21 nt, Human
aggcaaccacuguucuccaga

SEQ ID NO: 302892 - RNA, 23 nt, Human
aggcaaccacuguucuccagagc

SEQ ID NO: 302893 - RNA, 18 nt, Human
aggcagcucuuucuccag

SEQ ID NO: 302894 - RNA, 19 nt, Human
aggcauucagcagggaaac

SEQ ID NO: 302895 - RNA, 23 nt, Human
auccaggcagcucuuucuccagc

SEQ ID NO: 302896 - RNA, 19 nt, Human
caaaagcccccaggcaacc

SEQ ID NO: 302897 - RNA, 23 nt, Human
caaagcggaagcucccagggguc

SEQ ID NO: 302898 - RNA, 20 nt, Human
caagagaaucuggcuuggca

SEQ ID NO: 302899 - RNA, 22 nt, Human
caccuuggccggaaagaacaau

SEQ ID NO: 302900 - RNA, 21 nt, Human
cagagccugaggcccaagaac

SEQ ID NO: 302901 - RNA, 24 nt, Human
caggagcccguagguaaggcugug

SEQ ID NO: 302902 - RNA, 19 nt, Human
caggagucacugaagagug

SEQ ID NO: 302903 - RNA, 20 nt, Human
cagggccucuggggccuagc

SEQ ID NO: 302904 - RNA, 23 nt, Human
cagguccucccguagcugggccg

SEQ ID NO: 302905 - RNA, 20 nt, Human
caguacaagcaaauggcaaa

SEQ ID NO: 302906 - RNA, 21 nt, Human
ccagggcccuuggggaaccug

SEQ ID NO: 302907 - RNA, 21 nt, Human
ccagggccucuggggccuagc

SEQ ID NO: 302908 - RNA, 20 nt, Human
ccagggggcuccgagggaaa

SEQ ID NO: 302909 - RNA, 22 nt, Human
ccccaggcaaccacuguucucc

SEQ ID NO: 302910 - RNA, 24 nt, Human
cccccaggcaaccacuguucucca

SEQ ID NO: 302911 - RNA, 18 nt, Human
cccccggggagccccugg

SEQ ID NO: 302912 - RNA, 21 nt, Human
ccccgaggccccggccggugg

SEQ ID NO: 302913 - RNA, 18 nt, Human
ccccuggagaccuccagg

SEQ ID NO: 302914 - RNA, 21 nt, Human
ccccuggagaccuccagggcc

SEQ ID NO: 302915 - RNA, 25 nt, Human
ccccuggagaccuccagggccucug

SEQ ID NO: 302916 - RNA, 22 nt, Human
cccguagcugggcggccguccg

SEQ ID NO: 302917 - RNA, 23 nt, Human
cccuggugaccucauccccacug

SEQ ID NO: 302918 - RNA, 23 nt, Human
cccuucuuuccuucugcaggccc

SEQ ID NO: 302919 - RNA, 19 nt, Human
ccgcugccggccuucccac

SEQ ID NO: 302920 - RNA, 27 nt, Human
ccggccggugguucgagcaucuucugg

SEQ ID NO: 302921 - RNA, 19 nt, Human
ccuccagggccucuggggc

SEQ ID NO: 302922 - RNA, 23 nt, Human
ccuccagggccucuggggccuag

SEQ ID NO: 302923 - RNA, 22 nt, Human
ccucccucacugcugccccgag

SEQ ID NO: 302924 - RNA, 19 nt, Human
ccuccgcagacagcagccu

SEQ ID NO: 302925 - RNA, 21 nt, Human
ccucuggggccuagcuugccc

SEQ ID NO: 302926 - RNA, 22 nt, Human
ccuucagcugggacgcacaggc

SEQ ID NO: 302927 - RNA, 24 nt, Human
ccuuggccggaaagaaccgggguc

SEQ ID NO: 302928 - RNA, 18 nt, Human
cgacggggagcggcccgg

SEQ ID NO: 302929 - RNA, 21 nt, Human
cgagcaucuucuggaagccuu

SEQ ID NO: 302930 - RNA, 20 nt, Human
cuccgagggaaaaccaccau

SEQ ID NO: 302931 - RNA, 19 nt, Human
cucuggggccuagcuugcc

SEQ ID NO: 302932 - RNA, 20 nt, Human
cugcuccccugccacugccu

SEQ ID NO: 302933 - RNA, 21 nt, Human
cugcuccccugccacugccuu

SEQ ID NO: 302934 - RNA, 19 nt, Human
cuucugcaggccccuggag

SEQ ID NO: 302935 - RNA, 21 nt, Human
cuugccccucacgaggccacg

SEQ ID NO: 302936 - RNA, 19 nt, Human
gaaccugcuccccugccac

SEQ ID NO: 302937 - RNA, 23 nt, Human
gaaccugcuccccugccacugcc

SEQ ID NO: 302938 - RNA, 20 nt, Human
gaagaagagggggaaguggc

SEQ ID NO: 302939 - RNA, 21 nt, Human
gaagccuugcggagucaggag

SEQ ID NO: 302940 - RNA, 18 nt, Human
gaccucauccccacuggc

SEQ ID NO: 302941 - RNA, 22 nt, Human
gcagguaccagcaggagucacu

SEQ ID NO: 302942 - RNA, 18 nt, Human
gccagggcccuuggggaa

SEQ ID NO: 302943 - RNA, 23 nt, Human
gcccugcagggacagcuuguggg

SEQ ID NO: 302944 - RNA, 18 nt, Human
gcccuuggggaaccugcu

SEQ ID NO: 302945 - RNA, 22 nt, Human
gcccuuggggaaccugcucccc

SEQ ID NO: 302946 - RNA, 19 nt, Human
ggagaccuccagggccucu

SEQ ID NO: 302947 - RNA, 23 nt, Human
ggagcgaggcauucagcagggaa

SEQ ID NO: 302948 - RNA, 24 nt, Human
ggcccuuggggaaccugcuccccu

SEQ ID NO: 302949 - RNA, 26 nt, Human
ggccggugguucgagcaucuucugga

SEQ ID NO: 302950 - RNA, 18 nt, Human
gggaacccgacggggagc

SEQ ID NO: 302951 - RNA, 22 nt, Human
gggcgcccagugccacuccagg

SEQ ID NO: 302952 - RNA, 20 nt, Human
ggggucuguggcuggcuucg

SEQ ID NO: 302953 - RNA, 18 nt, Human
ggucucucuccuccaagg

SEQ ID NO: 302954 - RNA, 21 nt, Human
uaauaaauagagggcagguac

SEQ ID NO: 302955 - RNA, 20 nt, Human
uacaagcaaauggcaaagug

SEQ ID NO: 302956 - RNA, 27 nt, Human
uccacacuagaauacuuuauucaagag

SEQ ID NO: 302957 - RNA, 19 nt, Human
ucccaggggucuguggcug

SEQ ID NO: 302958 - RNA, 23 nt, Human
uccccugccacugccuucagcug

SEQ ID NO: 302959 - RNA, 23 nt, Human
ucccuacuuuuggacaggagcug

SEQ ID NO: 302960 - RNA, 21 nt, Human
ucccugccccucgucuugaag

SEQ ID NO: 302961 - RNA, 20 nt, Human
uccgcagacagcagccucgu

SEQ ID NO: 302962 - RNA, 21 nt, Human
ucucagacgucccgagccagg

SEQ ID NO: 302963 - RNA, 18 nt, Human
ucucuuagggggggcagg

SEQ ID NO: 302964 - RNA, 18 nt, Human
ugccccgaggccccggcc

SEQ ID NO: 302965 - RNA, 23 nt, Human
ugcuccccugccacugccuucag

SEQ ID NO: 302966 - RNA, 22 nt, Human
uggagaccuccagggccucugg

SEQ ID NO: 302967 - RNA, 23 nt, Human
uggcacaggaggagaagagcuga

SEQ ID NO: 302968 - RNA, 23 nt, Human
uggcuaauaaauagagggcaggu

SEQ ID NO: 302969 - RNA, 19 nt, Human
uggcuggauccccuccgcc

SEQ ID NO: 302970 - RNA, 20 nt, Human
uggcuggggaacccgacggg

SEQ ID NO: 302971 - RNA, 25 nt, Human
uggugaccucauccccacuggcuga

SEQ ID NO: 302972 - RNA, 19 nt, Human
ugugaggggagaucacggg

SEQ ID NO: 302973 - RNA, 21 nt, Human
uuggggaaccugcuccccugc

SEQ ID NO: 302974 - RNA, 20 nt, Human
uuuuuuuuuuuuuuuuccac

SEQ ID NO: 302975 - RNA, 19 nt, Human
aaagagaacuaagcuaaca

SEQ ID NO: 302976 - RNA, 23 nt, Human
aaauauaugcacucuagaaugca

SEQ ID NO: 302977 - RNA, 18 nt, Human
aagcuaaucauaauaacc

SEQ ID NO: 302978 - RNA, 21 nt, Human
agaaaaugcuaaguugacuua

SEQ ID NO: 302979 - RNA, 22 nt, Human
aggguuccuggcacugcaucuc

SEQ ID NO: 302980 - RNA, 24 nt, Human
aggguuccuggcacugcaucucuu

SEQ ID NO: 302981 - RNA, 26 nt, Human
augcuaaguugacuuaggggcugugc

SEQ ID NO: 302982 - RNA, 23 nt, Human
caauggacacuuuuauuguuuac

SEQ ID NO: 302983 - RNA, 19 nt, Human
cagaaaaugcuaaguugac

SEQ ID NO: 302984 - RNA, 23 nt, Human
cuaacacugcucacuuucuuuuu

SEQ ID NO: 302985 - RNA, 20 nt, Human
gcacaggaacuaaaaggcag

SEQ ID NO: 302986 - RNA, 21 nt, Human
uaugcaaauccagggugcagu

SEQ ID NO: 302987 - RNA, 22 nt, Human
ucaaaagagaacuaagcuaaca

SEQ ID NO: 302988 - RNA, 20 nt, Human
ugaaacagugacaaagcuaa

SEQ ID NO: 302989 - RNA, 20 nt, Human
ugacauggaagguuuuagcu

SEQ ID NO: 302990 - RNA, 22 nt, Human
ugccgacgugcgcuccggaggc

SEQ ID NO: 302991 - RNA, 19 nt, Human
uucaaaugggaucuugaag

SEQ ID NO: 302992 - RNA, 24 nt, Human
uucaucuuguuuccaugcugagua

SEQ ID NO: 302993 - RNA, 21 nt, Human
uuggccacuagcugaaucuug

SEQ ID NO: 302994 - RNA, 25 nt, Human
agccacagccuguguguugagcccc

SEQ ID NO: 302995 - RNA, 21 nt, Human
aggggcccagccccaugggcc

SEQ ID NO: 302996 - RNA, 22 nt, Human
aguggcggccagcaggggccca

SEQ ID NO: 302997 - RNA, 19 nt, Human
cagcagcacgacguggcuu

SEQ ID NO: 302998 - RNA, 21 nt, Human
cagcagcagcacgacguggcu

SEQ ID NO: 302999 - RNA, 26 nt, Human
ccagcagcagcacgacguggcuuuuu

SEQ ID NO: 303000 - RNA, 19 nt, Human
ccccaugggccgcgugccu

SEQ ID NO: 303001 - RNA, 24 nt, Human
ccccaugggccgcgugccuggucc

SEQ ID NO: 303002 - RNA, 18 nt, Human
cuguuggcuuccagcagc

SEQ ID NO: 303003 - RNA, 20 nt, Human
gagaguggcggccagcaggg

SEQ ID NO: 303004 - RNA, 18 nt, Human
gagcccggagaguggcgg

SEQ ID NO: 303005 - RNA, 21 nt, Human
ggcugcuggccggaggcuguu

SEQ ID NO: 303006 - RNA, 27 nt, Human
guguguugagccccggguagggcugcu

SEQ ID NO: 303007 - RNA, 21 nt, Human
ugagccccggguagggcugcu

SEQ ID NO: 303008 - RNA, 19 nt, Human
ugccuggucccagcugcgg

SEQ ID NO: 303009 - RNA, 25 nt, Human
uggucccagcugcggcgucccucug

SEQ ID NO: 303010 - RNA, 25 nt, Human
uguccagagccacagccuguguguu

SEQ ID NO: 303011 - RNA, 25 nt, Human
uguguugagccccggguagggcugc

SEQ ID NO: 303012 - RNA, 19 nt, Human
aaaggaacuugcaccauca

SEQ ID NO: 303013 - RNA, 19 nt, Human
accugauggcuaaggagac

SEQ ID NO: 303014 - RNA, 23 nt, Human
acgcagcagcaaugcaggagggc

SEQ ID NO: 303015 - RNA, 22 nt, Human
agacaaauacccacgcagcagc

SEQ ID NO: 303016 - RNA, 26 nt, Human
agcaaugcaggagggcaugaaaagga

SEQ ID NO: 303017 - RNA, 20 nt, Human
aggaaagaacugauuggaca

SEQ ID NO: 303018 - RNA, 23 nt, Human
aggaaagaacugauuggacagaa

SEQ ID NO: 303019 - RNA, 19 nt, Human
aggcacuagaaauugcauu

SEQ ID NO: 303020 - RNA, 21 nt, Human
aggcagaaaucuguagccaag

SEQ ID NO: 303021 - RNA, 20 nt, Human
cacauccuaaggaugaagaa

SEQ ID NO: 303022 - RNA, 25 nt, Human
caccaucauuucauugccacauccu

SEQ ID NO: 303023 - RNA, 21 nt, Human
caggggacagggcccucccuc

SEQ ID NO: 303024 - RNA, 21 nt, Human
cauuuuguuucugucaugcuc

SEQ ID NO: 303025 - RNA, 27 nt, Human
ccgcagguccucuuucccucacagcuc

SEQ ID NO: 303026 - RNA, 18 nt, Human
ccggcguuuggcccuccu

SEQ ID NO: 303027 - RNA, 22 nt, Human
ccucuuucccucacagcuccca

SEQ ID NO: 303028 - RNA, 23 nt, Human
cuaagcccgcagguccucuuucc

SEQ ID NO: 303029 - RNA, 23 nt, Human
cucagaggaaagaacugauugga

SEQ ID NO: 303030 - RNA, 20 nt, Human
cuccgcgccagcccaccucc

SEQ ID NO: 303031 - RNA, 20 nt, Human
gaaagauucacaaaagagaa

SEQ ID NO: 303032 - RNA, 19 nt, Human
gcagaaaucuguagccaag

SEQ ID NO: 303033 - RNA, 18 nt, Human
gcccgcagguccucuuuc

SEQ ID NO: 303034 - RNA, 20 nt, Human
gcccucccuccgcgccagcc

SEQ ID NO: 303035 - RNA, 20 nt, Human
gccgggggucagagcggcgg

SEQ ID NO: 303036 - RNA, 26 nt, Human
gcuuauuuuccuuuauuaucccaaaa

SEQ ID NO: 303037 - RNA, 21 nt, Human
ggacuuggcuggcggaggggc

SEQ ID NO: 303038 - RNA, 23 nt, Human
gugaaugggacaaugucgcaaaa

SEQ ID NO: 303039 - RNA, 21 nt, Human
ucagagcggcggacuuggcug

SEQ ID NO: 303040 - RNA, 23 nt, Human
ucccucacagcucccaagggcug

SEQ ID NO: 303041 - RNA, 27 nt, Human
ucuggggugagggcacggcgggugggg

SEQ ID NO: 303042 - RNA, 18 nt, Human
ugagggcacggcgggugg

SEQ ID NO: 303043 - RNA, 22 nt, Human
ugagggcacggcgggugggggc

SEQ ID NO: 303044 - RNA, 23 nt, Human
uggauggguccggggguggaggg

SEQ ID NO: 303045 - RNA, 21 nt, Human
uggcuaaggagacaaauaccc

SEQ ID NO: 303046 - RNA, 18 nt, Human
uguagccaaguacgucuc

SEQ ID NO: 303047 - RNA, 21 nt, Human
uguaguguaaacuguaccuga

SEQ ID NO: 303048 - RNA, 20 nt, Human
uguuggguuacauguaaaca

SEQ ID NO: 303049 - RNA, 23 nt, Human
uucccucacagcucccaagggca

SEQ ID NO: 303050 - RNA, 23 nt, Human
uuuggcccuccuccuuaaaggga

SEQ ID NO: 303051 - RNA, 18 nt, Human
uuuuuuuuuuuuuuuuug

SEQ ID NO: 303052 - RNA, 19 nt, Human
uuuuuuuuuuuuuuuuugu

SEQ ID NO: 303053 - RNA, 23 nt, Human
aauauaggggcagagggaggaga

SEQ ID NO: 303054 - RNA, 21 nt, Human
acuccccuuuucuccuccccc

SEQ ID NO: 303055 - RNA, 18 nt, Human
aggaggaggggguuucgg

SEQ ID NO: 303056 - RNA, 24 nt, Human
agggaggagggaaaagggaaggag

SEQ ID NO: 303057 - RNA, 24 nt, Human
aggggguuucgggaauauaggggc

SEQ ID NO: 303058 - RNA, 18 nt, Human
ccccuuuucuccuccccc

SEQ ID NO: 303059 - RNA, 23 nt, Human
ccccuuuucuccucccccgucuc

SEQ ID NO: 303060 - RNA, 28 nt, Human
ccccuuuucuccucccccgucuccaggg

SEQ ID NO: 303061 - RNA, 20 nt, Human
ccuccugggucgggggcggg

SEQ ID NO: 303062 - RNA, 21 nt, Human
cggagggaucuccaccuccug

SEQ ID NO: 303063 - RNA, 20 nt, Human
cgggaauauaggggcagagg

SEQ ID NO: 303064 - RNA, 29 nt, Human
cuccccuuuucuccucccccgucuccccu

SEQ ID NO: 303065 - RNA, 22 nt, Human
cuggacuccccuuuucuccucc

SEQ ID NO: 303066 - RNA, 24 nt, Human
gaucuccaccuccugggucggggg

SEQ ID NO: 303067 - RNA, 29 nt, Human
ggaggagggaaaagggaaggaggaggggg

SEQ ID NO: 303068 - RNA, 21 nt, Human
ggggcagagggaggagaaagu

SEQ ID NO: 303069 - RNA, 25 nt, Human
uaauucuuuaaaagaaaaagaugac

SEQ ID NO: 303070 - RNA, 20 nt, Human
uccaccuccugggucggggg

SEQ ID NO: 303071 - RNA, 24 nt, Human
uccagggaggagggaaaagggaag

SEQ ID NO: 303072 - RNA, 18 nt, Human
uggcuggaccggagggau

SEQ ID NO: 303073 - RNA, 22 nt, Human
ugggucgggggcgggggagggc

SEQ ID NO: 303074 - RNA, 21 nt, Human
aagucuucaacaggacucaca

SEQ ID NO: 303075 - RNA, 26 nt, Human
acacaccuguuuccgcuggucacaca

SEQ ID NO: 303076 - RNA, 19 nt, Human
acagcaguuuauacacauu

SEQ ID NO: 303077 - RNA, 24 nt, Human
accugcuuccacucugaccuccac

SEQ ID NO: 303078 - RNA, 18 nt, Human
aggaaggcuguguuaaga

SEQ ID NO: 303079 - RNA, 22 nt, Human
aggaaggcuguguuaagaauca

SEQ ID NO: 303080 - RNA, 21 nt, Human
aggcagacaccugugcucccc

SEQ ID NO: 303081 - RNA, 25 nt, Human
auagagcccgugagaagggcagucu

SEQ ID NO: 303082 - RNA, 24 nt, Human
caacaggacucacaucucggucca

SEQ ID NO: 303083 - RNA, 22 nt, Human
cacagugauuucugggguggga

SEQ ID NO: 303084 - RNA, 22 nt, Human
cacauacugccccgccugcgug

SEQ ID NO: 303085 - RNA, 18 nt, Human
cagcagcaucugcacagg

SEQ ID NO: 303086 - RNA, 22 nt, Human
cagcagcaucugcacaggaacc

SEQ ID NO: 303087 - RNA, 19 nt, Human
cagcaucugcacaggaacc

SEQ ID NO: 303088 - RNA, 21 nt, Human
cagcaucugcacaggaaccgc

SEQ ID NO: 303089 - RNA, 22 nt, Human
cagcccgcggaggugcaggcag

SEQ ID NO: 303090 - RNA, 23 nt, Human
cagcccgcggagguggcgguccg

SEQ ID NO: 303091 - RNA, 20 nt, Human
caucggggcuguggcccagu

SEQ ID NO: 303092 - RNA, 20 nt, Human
ccaguccaucacauacugcc

SEQ ID NO: 303093 - RNA, 23 nt, Human
cccagugcaggcauagagcccgu

SEQ ID NO: 303094 - RNA, 22 nt, Human
ccugcgugcugccaaaugcugg

SEQ ID NO: 303095 - RNA, 19 nt, Human
ccuucugcuggacccucuc

SEQ ID NO: 303096 - RNA, 21 nt, Human
cgcugggaagacggaggccug

SEQ ID NO: 303097 - RNA, 23 nt, Human
cuaaagcugguuugcauaggcac

SEQ ID NO: 303098 - RNA, 19 nt, Human
cuaggcagacaccugugcu

SEQ ID NO: 303099 - RNA, 22 nt, Human
cugcacaggaaccgcugggaag

SEQ ID NO: 303100 - RNA, 20 nt, Human
cugccccgccugcgugcugc

SEQ ID NO: 303101 - RNA, 19 nt, Human
cuggacccucucacaccug

SEQ ID NO: 303102 - RNA, 22 nt, Human
cuggucacacaguuaaagagaa

SEQ ID NO: 303103 - RNA, 18 nt, Human
cugugcuccccaguccau

SEQ ID NO: 303104 - RNA, 18 nt, Human
gaagggcagucucugaac

SEQ ID NO: 303105 - RNA, 20 nt, Human
gagcagaaggaaggcugugu

SEQ ID NO: 303106 - RNA, 21 nt, Human
gcagauucuucaaucugugcc

SEQ ID NO: 303107 - RNA, 19 nt, Human
gccacacguggaucuaggc

SEQ ID NO: 303108 - RNA, 18 nt, Human
gccccgccugcgugcugc

SEQ ID NO: 303109 - RNA, 18 nt, Human
gcccgugagaagggcagu

SEQ ID NO: 303110 - RNA, 20 nt, Human
gcuuccacucugaccuccac

SEQ ID NO: 303111 - RNA, 26 nt, Human
ggacccucucacaccugcuuccacuc

SEQ ID NO: 303112 - RNA, 19 nt, Human
guccaggccuccucucuca

SEQ ID NO: 303113 - RNA, 19 nt, Human
uaacagacagaccacuucc

SEQ ID NO: 303114 - RNA, 24 nt, Human
uaacagacagaccacuuccucucu

SEQ ID NO: 303115 - RNA, 18 nt, Human
uagauggaugugagaaga

SEQ ID NO: 303116 - RNA, 18 nt, Human
uaugguaacagacagacc

SEQ ID NO: 303117 - RNA, 19 nt, Human
uaugguaacagacagacca

SEQ ID NO: 303118 - RNA, 23 nt, Human
ucagugacaggacggaggccaca

SEQ ID NO: 303119 - RNA, 21 nt, Human
ucugaagugauuuuaccuuua

SEQ ID NO: 303120 - RNA, 19 nt, Human
ucugcuggacccucucaca

SEQ ID NO: 303121 - RNA, 20 nt, Human
ugaaauuucacagugauuuc

SEQ ID NO: 303122 - RNA, 19 nt, Human
ugaauuccccaaccacaca

SEQ ID NO: 303123 - RNA, 21 nt, Human
ugaauuccccaaccacacaua

SEQ ID NO: 303124 - RNA, 24 nt, Human
ugacaggacggaggccacacgugg

SEQ ID NO: 303125 - RNA, 22 nt, Human
ugaccuccacaugaauucccuc

SEQ ID NO: 303126 - RNA, 20 nt, Human
ugaccuccacaugaauuccu

SEQ ID NO: 303127 - RNA, 21 nt, Human
ugcccaggccggaacuccagc

SEQ ID NO: 303128 - RNA, 22 nt, Human
uggacccucucacaccugcuuc

SEQ ID NO: 303129 - RNA, 18 nt, Human
ugggagcagaaggaaggc

SEQ ID NO: 303130 - RNA, 23 nt, Human
uggggugggagcagaaggaaggc

SEQ ID NO: 303131 - RNA, 24 nt, Human
uggggugggagcagaaggaaggcu

SEQ ID NO: 303132 - RNA, 22 nt, Human
ugguaacagacagaccacuucc

SEQ ID NO: 303133 - RNA, 22 nt, Human
uggugcccaggccggaacucca

SEQ ID NO: 303134 - RNA, 21 nt, Human
uguuaagaaucaucggggcug

SEQ ID NO: 303135 - RNA, 23 nt, Human
acaggaaggagcugaagagcaag

SEQ ID NO: 303136 - RNA, 22 nt, Human
acccugggagcaucucaagagg

SEQ ID NO: 303137 - RNA, 19 nt, Human
acugcugcaggagcaggga

SEQ ID NO: 303138 - RNA, 18 nt, Human
agaccccgcucagggcac

SEQ ID NO: 303139 - RNA, 22 nt, Human
agcauccucuuggaccaauagc

SEQ ID NO: 303140 - RNA, 22 nt, Human
aggcaguccucucucgccgccu

SEQ ID NO: 303141 - RNA, 24 nt, Human
aggcaguccucucucgccgccucc

SEQ ID NO: 303142 - RNA, 19 nt, Human
aggcgaccugcuggugugu

SEQ ID NO: 303143 - RNA, 20 nt, Human
aggcggacaccgugagggcc

SEQ ID NO: 303144 - RNA, 22 nt, Human
agggaccacaggaccagggaca

SEQ ID NO: 303145 - RNA, 22 nt, Human
agggaccacaggaccagggaca

SEQ ID NO: 303146 - RNA, 19 nt, Human
agggcacccacugagccca

SEQ ID NO: 303147 - RNA, 19 nt, Human
agggcacccacugagccca

SEQ ID NO: 303148 - RNA, 20 nt, Human
aggguuggggcucucuccag

SEQ ID NO: 303149 - RNA, 19 nt, Human
agugcagcccaccaaggcc

SEQ ID NO: 303150 - RNA, 19 nt, Human
agugcagcccaccaaggcc

SEQ ID NO: 303151 - RNA, 20 nt, Human
agugcagcccaccaaggccu

SEQ ID NO: 303152 - RNA, 20 nt, Human
agugcagcccaccaaggccu

SEQ ID NO: 303153 - RNA, 26 nt, Human
agugcagcccaccaaggccugacguc

SEQ ID NO: 303154 - RNA, 26 nt, Human
agugcagcccaccaaggccugacguc

SEQ ID NO: 303155 - RNA, 21 nt, Human
caaaccacaggaaggagcuga

SEQ ID NO: 303156 - RNA, 22 nt, Human
caaggcggacaccgugagggcc

SEQ ID NO: 303157 - RNA, 21 nt, Human
cagccaccgaagacuacccga

SEQ ID NO: 303158 - RNA, 22 nt, Human
cagccugaaugguccuggaggc

SEQ ID NO: 303159 - RNA, 22 nt, Human
cagccugaaugguccuggaggc

SEQ ID NO: 303160 - RNA, 22 nt, Human
cagccugaaugguccuggaggc

SEQ ID NO: 303161 - RNA, 21 nt, Human
caguccucucucgccgccucc

SEQ ID NO: 303162 - RNA, 22 nt, Human
ccagcagcuguggauagggcag

SEQ ID NO: 303163 - RNA, 22 nt, Human
cccacugagcccaccgcgacuu

SEQ ID NO: 303164 - RNA, 22 nt, Human
cccacugagcccaccgcgacuu

SEQ ID NO: 303165 - RNA, 19 nt, Human
ccccggagccuccagguga

SEQ ID NO: 303166 - RNA, 19 nt, Human
ccccggagccuccagguga

SEQ ID NO: 303167 - RNA, 19 nt, Human
ccccggagccuccagguga

SEQ ID NO: 303168 - RNA, 18 nt, Human
ccccucccuuccccuccc

SEQ ID NO: 303169 - RNA, 23 nt, Human
cgcucagggcacccacugagccc

SEQ ID NO: 303170 - RNA, 23 nt, Human
cgcucagggcacccacugagccc

SEQ ID NO: 303171 - RNA, 23 nt, Human
cuccaggugagagugcagcccac

SEQ ID NO: 303172 - RNA, 23 nt, Human
cuccaggugagagugcagcccac

SEQ ID NO: 303173 - RNA, 23 nt, Human
cuccaggugagagugcagcccac

SEQ ID NO: 303174 - RNA, 22 nt, Human
cucccuuccccucccugugguu

SEQ ID NO: 303175 - RNA, 23 nt, Human
cuccuggggcuggcggccacaug

SEQ ID NO: 303176 - RNA, 20 nt, Human
cucgccgccuccucucccug

SEQ ID NO: 303177 - RNA, 20 nt, Human
cugcagccaccgaagacuac

SEQ ID NO: 303178 - RNA, 23 nt, Human
cuggucaggcuggaggcgaccug

SEQ ID NO: 303179 - RNA, 18 nt, Human
cugguuugaagguggagg

SEQ ID NO: 303180 - RNA, 20 nt, Human
cuuggaccaauagcaacugc

SEQ ID NO: 303181 - RNA, 21 nt, Human
gaccccgcucagggcacccac

SEQ ID NO: 303182 - RNA, 21 nt, Human
gaccccgcucagggcacccac

SEQ ID NO: 303183 - RNA, 19 nt, Human
gaccugcugguguguccuc

SEQ ID NO: 303184 - RNA, 19 nt, Human
gagagacaggcucagcugc

SEQ ID NO: 303185 - RNA, 21 nt, Human
gagaggggcagaggcgcagca

SEQ ID NO: 303186 - RNA, 20 nt, Human
gagcaucucaagaggcuggg

SEQ ID NO: 303187 - RNA, 19 nt, Human
gagcugaagagcaaggcgg

SEQ ID NO: 303188 - RNA, 23 nt, Human
gaggcagaugcuuccccggagcc

SEQ ID NO: 303189 - RNA, 21 nt, Human
gauggcaaaccacaggaagga

SEQ ID NO: 303190 - RNA, 18 nt, Human
gcugggcuccuggggcug

SEQ ID NO: 303191 - RNA, 20 nt, Human
gcugguuugaagguggaggg

SEQ ID NO: 303192 - RNA, 20 nt, Human
gcugguuugaagguggaggg

SEQ ID NO: 303193 - RNA, 20 nt, Human
ggaccacaggaccagggaca

SEQ ID NO: 303194 - RNA, 23 nt, Human
ggaccagggacaaggacuuggga

SEQ ID NO: 303195 - RNA, 23 nt, Human
ggaccagggacaaggacuuggga

SEQ ID NO: 303196 - RNA, 23 nt, Human
ggaccagggacaaggacuuggga

SEQ ID NO: 303197 - RNA, 22 nt, Human
ggagaggggcagaggcgcagca

SEQ ID NO: 303198 - RNA, 25 nt, Human
ggaggcagaugcuuccccggagccu

SEQ ID NO: 303199 - RNA, 25 nt, Human
ggaggcagaugcuuccccggagccu

SEQ ID NO: 303200 - RNA, 20 nt, Human
ggaugcccugaaggcagucc

SEQ ID NO: 303201 - RNA, 20 nt, Human
ggcacgggacugcugcagga

SEQ ID NO: 303202 - RNA, 24 nt, Human
ggcagccagguggcaggagagggg

SEQ ID NO: 303203 - RNA, 20 nt, Human
ggcaugggacugcugcagga

SEQ ID NO: 303204 - RNA, 24 nt, Human
ggcugggcuccuggggcuggcggc

SEQ ID NO: 303205 - RNA, 20 nt, Human
gggcagaggcgcagcaucgc

SEQ ID NO: 303206 - RNA, 21 nt, Human
uagggcagacucagagugugg

SEQ ID NO: 303207 - RNA, 23 nt, Human
ucaggguguauuugcccuugcgg

SEQ ID NO: 303208 - RNA, 20 nt, Human
ucuccugcagccaccgaaga

SEQ ID NO: 303209 - RNA, 18 nt, Human
ucucucgccgccuccucu

SEQ ID NO: 303210 - RNA, 25 nt, Human
ucucucgccgccuccucucccugac

SEQ ID NO: 303211 - RNA, 19 nt, Human
ugaagagcaaggcggacac

SEQ ID NO: 303212 - RNA, 20 nt, Human
ugagagacaggcucagcugc

SEQ ID NO: 303213 - RNA, 21 nt, Human
ugcagccaccgaagacuaccc

SEQ ID NO: 303214 - RNA, 28 nt, Human
uggagagcucugugggcagccagguggc

SEQ ID NO: 303215 - RNA, 28 nt, Human
uggagagcucugugggcagccagguggc

SEQ ID NO: 303216 - RNA, 24 nt, Human
uggcaaaccacaggaaggagcuga

SEQ ID NO: 303217 - RNA, 18 nt, Human
uggcaggagaggggcaga

SEQ ID NO: 303218 - RNA, 18 nt, Human
uggcaggagaggggcaga

SEQ ID NO: 303219 - RNA, 24 nt, Human
uggcaggagaggggcagaggcgca

SEQ ID NO: 303220 - RNA, 24 nt, Human
uggcaggagaggggcagaggcgca

SEQ ID NO: 303221 - RNA, 19 nt, Human
ugggcagccagguggcagg

SEQ ID NO: 303222 - RNA, 19 nt, Human
ugggcagccagguggcagg

SEQ ID NO: 303223 - RNA, 21 nt, Human
uguguggguccacccugggag

SEQ ID NO: 303224 - RNA, 22 nt, Human
uugcugguuugaagguggaggg

SEQ ID NO: 303225 - RNA, 22 nt, Human
uugcugguuugaagguggaggg

SEQ ID NO: 303226 - RNA, 22 nt, Human
uugcugguuugaagguggaggg

SEQ ID NO: 303227 - RNA, 20 nt, Human
aaagaaacauacuuaguuca

SEQ ID NO: 303228 - RNA, 21 nt, Human
aaagcaaugggcgaugaaggc

SEQ ID NO: 303229 - RNA, 23 nt, Human
aaagcaaugggcgaugaaggcuc

SEQ ID NO: 303230 - RNA, 20 nt, Human
aaaguagccuagggauuuau

SEQ ID NO: 303231 - RNA, 18 nt, Human
aaagucacuuuucguggu

SEQ ID NO: 303232 - RNA, 19 nt, Human
aagcaggucaccuacccaa

SEQ ID NO: 303233 - RNA, 24 nt, Human
acagaugcugucuagauccaagca

SEQ ID NO: 303234 - RNA, 23 nt, Human
acuuugaacagaugcugucuaga

SEQ ID NO: 303235 - RNA, 22 nt, Human
augaaagucuccaggccuaaag

SEQ ID NO: 303236 - RNA, 22 nt, Human
cacugugcaacugucucaggau

SEQ ID NO: 303237 - RNA, 20 nt, Human
gaaagucuccaggccuaaag

SEQ ID NO: 303238 - RNA, 21 nt, Human
uaaagaaacauacuuaguuca

SEQ ID NO: 303239 - RNA, 21 nt, Human
uaguucauucuuauauuccac

SEQ ID NO: 303240 - RNA, 18 nt, Human
ucagugcagccuccgcug

SEQ ID NO: 303241 - RNA, 22 nt, Human
ucuaaagaaacauacuuaguuc

SEQ ID NO: 303242 - RNA, 20 nt, Human
ucucaggaugccauaaacca

SEQ ID NO: 303243 - RNA, 20 nt, Human
uuaguucauucuuauauucc

SEQ ID NO: 303244 - RNA, 22 nt, Human
uuccacuuuauaagcccuacga

SEQ ID NO: 303245 - RNA, 23 nt, Human
aaccccaccucggacuccucccc

SEQ ID NO: 303246 - RNA, 25 nt, Human
aagaugcccccuccuccccacucaa

SEQ ID NO: 303247 - RNA, 20 nt, Human
aagcagcggcagcggcagga

SEQ ID NO: 303248 - RNA, 22 nt, Human
aagcuguaacaaaauaacauca

SEQ ID NO: 303249 - RNA, 22 nt, Human
aagcuguaacaaaauaacauca

SEQ ID NO: 303250 - RNA, 22 nt, Human
acaaaauaacaucaaaggaaaa

SEQ ID NO: 303251 - RNA, 22 nt, Human
acaaaauaacaucaaaggaaaa

SEQ ID NO: 303252 - RNA, 27 nt, Human
accaaccccaccucggacuccuccccc

SEQ ID NO: 303253 - RNA, 25 nt, Human
accccaccucggacuccucccccag

SEQ ID NO: 303254 - RNA, 24 nt, Human
accucggacuccucccccaguccc

SEQ ID NO: 303255 - RNA, 22 nt, Human
agaugcccccuccuccccacuc

SEQ ID NO: 303256 - RNA, 21 nt, Human
agccaaagcagcggcagcggc

SEQ ID NO: 303257 - RNA, 19 nt, Human
aggaaaugggaaggauggg

SEQ ID NO: 303258 - RNA, 19 nt, Human
aggaaaugggaaggauggg

SEQ ID NO: 303259 - RNA, 20 nt, Human
aggcaggcuguucagaagau

SEQ ID NO: 303260 - RNA, 18 nt, Human
caaagcagcggcagcggc

SEQ ID NO: 303261 - RNA, 24 nt, Human
caccucggacuccucccccagucc

SEQ ID NO: 303262 - RNA, 23 nt, Human
cacucaaccagguacugcacaga

SEQ ID NO: 303263 - RNA, 18 nt, Human
cagcggcagcggcaggag

SEQ ID NO: 303264 - RNA, 21 nt, Human
cagcggcagcggcaggaggag

SEQ ID NO: 303265 - RNA, 18 nt, Human
caggcggaggccgggggg

SEQ ID NO: 303266 - RNA, 24 nt, Human
ccaaccccaccucggacuccuccc

SEQ ID NO: 303267 - RNA, 25 nt, Human
ccaggcccagccccuccgucccggc

SEQ ID NO: 303268 - RNA, 19 nt, Human
ccccacuccccacucuugg

SEQ ID NO: 303269 - RNA, 19 nt, Human
ccccacuccccacucuugg

SEQ ID NO: 303270 - RNA, 22 nt, Human
ccccaggcccagccccuccguc

SEQ ID NO: 303271 - RNA, 18 nt, Human
cccccagucccaggagac

SEQ ID NO: 303272 - RNA, 19 nt, Human
cccccuccuccccacucaa

SEQ ID NO: 303273 - RNA, 22 nt, Human
cccccuccuccccacucaacca

SEQ ID NO: 303274 - RNA, 20 nt, Human
ccccuccuccccacucaacc

SEQ ID NO: 303275 - RNA, 21 nt, Human
cccuccuccccacucaaccag

SEQ ID NO: 303276 - RNA, 27 nt, Human
ccgccgggagccgggcaggggcagacg

SEQ ID NO: 303277 - RNA, 22 nt, Human
ccucgggacagguaaccaaccc

SEQ ID NO: 303278 - RNA, 19 nt, Human
cggacuccucccccagucc

SEQ ID NO: 303279 - RNA, 23 nt, Human
cucagucucugcccccagggguu

SEQ ID NO: 303280 - RNA, 23 nt, Human
cucagucucugcccccagggguu

SEQ ID NO: 303281 - RNA, 20 nt, Human
cucuccgagcaaggacccgg

SEQ ID NO: 303282 - RNA, 24 nt, Human
cugcccccagggguuaaauaauuu

SEQ ID NO: 303283 - RNA, 24 nt, Human
cugcccccagggguuaaauaauuu

SEQ ID NO: 303284 - RNA, 22 nt, Human
gagucccccgcgcggagagggc

SEQ ID NO: 303285 - RNA, 18 nt, Human
gcacguccgggcgugggg

SEQ ID NO: 303286 - RNA, 18 nt, Human
gcagcggcagcggcagga

SEQ ID NO: 303287 - RNA, 21 nt, Human
ggaggguagagaagagggccu

SEQ ID NO: 303288 - RNA, 21 nt, Human
ggaggguagagaagagggccu

SEQ ID NO: 303289 - RNA, 24 nt, Human
gggccgccgggagccgggcagggg

SEQ ID NO: 303290 - RNA, 24 nt, Human
gggccgccgggagccgggcagggg

SEQ ID NO: 303291 - RNA, 19 nt, Human
gggccucuuccccacuccc

SEQ ID NO: 303292 - RNA, 19 nt, Human
gggccucuuccccacuccc

SEQ ID NO: 303293 - RNA, 21 nt, Human
gggcguaugacgcagcagcca

SEQ ID NO: 303294 - RNA, 19 nt, Human
ggggagaagggggugcuga

SEQ ID NO: 303295 - RNA, 18 nt, Human
ggggagcugggcagaggc

SEQ ID NO: 303296 - RNA, 18 nt, Human
ggggagcugggcagaggc

SEQ ID NO: 303297 - RNA, 19 nt, Human
gggggugcugagcgucuag

SEQ ID NO: 303298 - RNA, 21 nt, Human
guccgggaucccuuaucaucc

SEQ ID NO: 303299 - RNA, 21 nt, Human
guccgggaucccuuaucaucc

SEQ ID NO: 303300 - RNA, 24 nt, Human
gugacagcuggggccgccgggagc

SEQ ID NO: 303301 - RNA, 23 nt, Human
gugcaggcggaggccgggggguc

SEQ ID NO: 303302 - RNA, 24 nt, Human
ucagaagaugcccccuccucccca

SEQ ID NO: 303303 - RNA, 25 nt, Human
uccccacuccccacucuuggauucc

SEQ ID NO: 303304 - RNA, 25 nt, Human
uccccacuccccacucuuggauucc

SEQ ID NO: 303305 - RNA, 22 nt, Human
ucuccagguacaucccagcugu

SEQ ID NO: 303306 - RNA, 22 nt, Human
ucuccagguacaucccagcugu

SEQ ID NO: 303307 - RNA, 18 nt, Human
ucuuccccacuccccacu

SEQ ID NO: 303308 - RNA, 18 nt, Human
ucuuccccacuccccacu

SEQ ID NO: 303309 - RNA, 24 nt, Human
ucuuggauuccagccugggcagua

SEQ ID NO: 303310 - RNA, 23 nt, Human
ugacagcuggggccgccgggagc

SEQ ID NO: 303311 - RNA, 19 nt, Human
uggauuccagccugggcag

SEQ ID NO: 303312 - RNA, 21 nt, Human
ugggaaggaugggagggguca

SEQ ID NO: 303313 - RNA, 21 nt, Human
ugggaaggaugggagggguca

SEQ ID NO: 303314 - RNA, 21 nt, Human
ugggaggggucaggaaucaug

SEQ ID NO: 303315 - RNA, 21 nt, Human
ugggaggggucaggaaucaug

SEQ ID NO: 303316 - RNA, 28 nt, Human
uucagaagaugcccccuccuccccacuc

SEQ ID NO: 303317 - RNA, 18 nt, Human
uuuuuuuuuuuuuuuuug

SEQ ID NO: 303318 - RNA, 22 nt, Human
uuuuuuuuuuuuuuuuuuguuu

SEQ ID NO: 303319 - RNA, 24 nt, Human
aaagccccagaggcagggaccagg

SEQ ID NO: 303320 - RNA, 20 nt, Human
aacugggcaguauucuccag

SEQ ID NO: 303321 - RNA, 23 nt, Human
aagaagcugcgguucggccuggc

SEQ ID NO: 303322 - RNA, 19 nt, Human
agaaaagccccagaggcag

SEQ ID NO: 303323 - RNA, 23 nt, Human
aucuccuccuccuccuccucuua

SEQ ID NO: 303324 - RNA, 25 nt, Human
cagcucccgcuccccagucaucucc

SEQ ID NO: 303325 - RNA, 25 nt, Human
caguauucuccagcucccgcucccc

SEQ ID NO: 303326 - RNA, 21 nt, Human
ccagucaucuccuccuccucc

SEQ ID NO: 303327 - RNA, 20 nt, Human
cuccuccuccuccuccucuu

SEQ ID NO: 303328 - RNA, 18 nt, Human
gggguaggcucuuuauua

SEQ ID NO: 303329 - RNA, 25 nt, Human
uaccuaagccaagaagccggggguc

SEQ ID NO: 303330 - RNA, 20 nt, Human
ucagaaaagccccagaggca

SEQ ID NO: 303331 - RNA, 23 nt, Human
ucccgcuccccagucaucuccuc

SEQ ID NO: 303332 - RNA, 22 nt, Human
uggguuucuucagaaaagcccc

SEQ ID NO: 303333 - RNA, 20 nt, Human
ugucagaggcccgcguucag

SEQ ID NO: 303334 - RNA, 18 nt, Human
uguggauuuucucucccu

SEQ ID NO: 303335 - RNA, 22 nt, Human
aaguauccaacgcugcuccacc

SEQ ID NO: 303336 - RNA, 21 nt, Human
acagaaaggggcaggguugga

SEQ ID NO: 303337 - RNA, 20 nt, Human
agaagccaggaaccaaagcc

SEQ ID NO: 303338 - RNA, 24 nt, Human
agagcccucccaccgcucaggccu

SEQ ID NO: 303339 - RNA, 23 nt, Human
caaaaggcucccagaagccagga

SEQ ID NO: 303340 - RNA, 19 nt, Human
caccggagcuucggucccu

SEQ ID NO: 303341 - RNA, 19 nt, Human
cagagcccucccaccgcuc

SEQ ID NO: 303342 - RNA, 19 nt, Human
caggccccgcagagcccuc

SEQ ID NO: 303343 - RNA, 18 nt, Human
ccaggccccgcagagccc

SEQ ID NO: 303344 - RNA, 18 nt, Human
ccccgcagagcccucccc

SEQ ID NO: 303345 - RNA, 19 nt, Human
cgaggcagggaccagcugu

SEQ ID NO: 303346 - RNA, 23 nt, Human
cgccugaacaccaggccccgcag

SEQ ID NO: 303347 - RNA, 22 nt, Human
cguggugggacgccugaacacc

SEQ ID NO: 303348 - RNA, 19 nt, Human
cuugggaaggaugggacag

SEQ ID NO: 303349 - RNA, 19 nt, Human
gcacaaucaaccgaggcag

SEQ ID NO: 303350 - RNA, 18 nt, Human
gcugcuccacccucgugg

SEQ ID NO: 303351 - RNA, 24 nt, Human
ggaguuagaaaacuauauugguag

SEQ ID NO: 303352 - RNA, 22 nt, Human
gggcaggguuggagugauuagg

SEQ ID NO: 303353 - RNA, 18 nt, Human
uagcccgggugccaccgg

SEQ ID NO: 303354 - RNA, 19 nt, Human
uccaacgcugcuccacccu

SEQ ID NO: 303355 - RNA, 18 nt, Human
ucccagaagccaggaacc

SEQ ID NO: 303356 - RNA, 24 nt, Human
ucccagaagccaggaaccaaagcc

SEQ ID NO: 303357 - RNA, 22 nt, Human
uccccaaacaggaguuagaaaa

SEQ ID NO: 303358 - RNA, 21 nt, Human
ucggucccuaaggaacaagua

SEQ ID NO: 303359 - RNA, 20 nt, Human
ucuagagaauaaaaacacau

SEQ ID NO: 303360 - RNA, 26 nt, Human
ucuagagaauaaaaacacaugcaaac

SEQ ID NO: 303361 - RNA, 22 nt, Human
ugaaagaaauaaagccaaucau

SEQ ID NO: 303362 - RNA, 19 nt, Human
ugaugaaagaaauaaagcc

SEQ ID NO: 303363 - RNA, 19 nt, Human
ugcacaaucaaccgaggca

SEQ ID NO: 303364 - RNA, 18 nt, Human
ugggaaggaugggacaga

SEQ ID NO: 303365 - RNA, 24 nt, Human
ugggaaggaugggacagaaagggg

SEQ ID NO: 303366 - RNA, 22 nt, Human
ugggacgccugaacaccaggcc

SEQ ID NO: 303367 - RNA, 23 nt, Human
ugggacgccugaacaccaggccc

SEQ ID NO: 303368 - RNA, 24 nt, Human
uugguaacagaucuagagaauaaa

SEQ ID NO: 303369 - RNA, 22 nt, Human
aaacccuggaagaccaugagcc

SEQ ID NO: 303370 - RNA, 25 nt, Human
aagcaaggcacaagaaaacccccca

SEQ ID NO: 303371 - RNA, 26 nt, Human
aagcaaggcacaagaaaaccccccau

SEQ ID NO: 303372 - RNA, 18 nt, Human
agaaaaccccccauucca

SEQ ID NO: 303373 - RNA, 18 nt, Human
agacagccaggauaaaaa

SEQ ID NO: 303374 - RNA, 21 nt, Human
agagaccaauuuccaauuccu

SEQ ID NO: 303375 - RNA, 21 nt, Human
aggaugugucacuagcucauc

SEQ ID NO: 303376 - RNA, 18 nt, Human
aggcaggagaaaacccua

SEQ ID NO: 303377 - RNA, 21 nt, Human
auuauguuacaucaaggcagc

SEQ ID NO: 303378 - RNA, 21 nt, Human
caagaaaaccccccauuccac

SEQ ID NO: 303379 - RNA, 22 nt, Human
caagcaaggcacaagaaaaccc

SEQ ID NO: 303380 - RNA, 21 nt, Human
caaggcacaagaaaacccccc

SEQ ID NO: 303381 - RNA, 23 nt, Human
cagagagacacaaguguucuauu

SEQ ID NO: 303382 - RNA, 19 nt, Human
cagccaggauaaaaacccu

SEQ ID NO: 303383 - RNA, 19 nt, Human
caggagaaaacccuaguuc

SEQ ID NO: 303384 - RNA, 21 nt, Human
cauccugugaagagguggccc

SEQ ID NO: 303385 - RNA, 22 nt, Human
ccaggauaaaaacccuggaaga

SEQ ID NO: 303386 - RNA, 21 nt, Human
ccucagaguccgugagaccag

SEQ ID NO: 303387 - RNA, 19 nt, Human
ccuccaagcgggucugguu

SEQ ID NO: 303388 - RNA, 23 nt, Human
ccuccaagcgggucugguucccg

SEQ ID NO: 303389 - RNA, 25 nt, Human
cggggcuguggccuccaagcggguc

SEQ ID NO: 303390 - RNA, 22 nt, Human
cgggggaacacaggacuccuca

SEQ ID NO: 303391 - RNA, 22 nt, Human
gaagaccaugagccaaggugaa

SEQ ID NO: 303392 - RNA, 23 nt, Human
gaagaggaauuuucuaaaucuug

SEQ ID NO: 303393 - RNA, 24 nt, Human
gaccaauuuccaauuccuccucag

SEQ ID NO: 303394 - RNA, 25 nt, Human
gaccagaugcuacagcaaauguucc

SEQ ID NO: 303395 - RNA, 19 nt, Human
gauaaaaacccuggaagac

SEQ ID NO: 303396 - RNA, 22 nt, Human
gcaaggcacaagaaaacccccc

SEQ ID NO: 303397 - RNA, 22 nt, Human
gcacaggggaucuugggggaca

SEQ ID NO: 303398 - RNA, 22 nt, Human
gcgugggcgcgggacgucgggg

SEQ ID NO: 303399 - RNA, 23 nt, Human
gggggaacacaggacuccucagc

SEQ ID NO: 303400 - RNA, 23 nt, Human
uaaaauggaaggcuaugaaagca

SEQ ID NO: 303401 - RNA, 19 nt, Human
uacagcaaauguuccagag

SEQ ID NO: 303402 - RNA, 22 nt, Human
uacagcaaauguuccagagaaa

SEQ ID NO: 303403 - RNA, 19 nt, Human
uaugaaagcaagcaaggca

SEQ ID NO: 303404 - RNA, 20 nt, Human
ucaguuucagggugagugcu

SEQ ID NO: 303405 - RNA, 23 nt, Human
ucccaggccgcagcgcccgaucu

SEQ ID NO: 303406 - RNA, 19 nt, Human
ucccggacacucacagccu

SEQ ID NO: 303407 - RNA, 21 nt, Human
ucugcacucaaaagagaccaa

SEQ ID NO: 303408 - RNA, 21 nt, Human
ucuguggcuuuaacauacauc

SEQ ID NO: 303409 - RNA, 20 nt, Human
ugaaagcaagcaaggcacaa

SEQ ID NO: 303410 - RNA, 18 nt, Human
ugauagcacaggggaucu

SEQ ID NO: 303411 - RNA, 20 nt, Human
ugcacagacagacugcaucc

SEQ ID NO: 303412 - RNA, 23 nt, Human
ugcuaccauugccccccgagagu

SEQ ID NO: 303413 - RNA, 19 nt, Human
ugucacuagcucaucgaaa

SEQ ID NO: 303414 - RNA, 24 nt, Human
ugugaucauguuuccaggugagac

SEQ ID NO: 303415 - RNA, 21 nt, Human
uuacaucaaggcagccaugcc

SEQ ID NO: 303416 - RNA, 22 nt, Human
uuccuaaggcaggagaaaaccc

SEQ ID NO: 303417 - RNA, 21 nt, Human
uuuccuaaggcaggagaaaac

SEQ ID NO: 303418 - RNA, 22 nt, Human
aaaagcauuuaccauuaccguu

SEQ ID NO: 303419 - RNA, 24 nt, Human
aaccucaagugauccaccugccuc

SEQ ID NO: 303420 - RNA, 19 nt, Human
aaccuccgucuccugguuc

SEQ ID NO: 303421 - RNA, 26 nt, Human
aagcaauucucaugccucagccuccu

SEQ ID NO: 303422 - RNA, 18 nt, Human
aagcauuuaccauuaccg

SEQ ID NO: 303423 - RNA, 24 nt, Human
aagugauccaccugccucagccuc

SEQ ID NO: 303424 - RNA, 22 nt, Human
aagugcuaagauuucaggugug

SEQ ID NO: 303425 - RNA, 23 nt, Human
aagugcuaagauuucagguguga

SEQ ID NO: 303426 - RNA, 24 nt, Human
acagagcuuccuacaccuucccca

SEQ ID NO: 303427 - RNA, 25 nt, Human
acaggguuuucaccauguuggcugg

SEQ ID NO: 303428 - RNA, 24 nt, Human
accauguuggcugggcuggucuug

SEQ ID NO: 303429 - RNA, 19 nt, Human
accuccccagcaugcucag

SEQ ID NO: 303430 - RNA, 18 nt, Human
acuauuauaguuggcaua

SEQ ID NO: 303431 - RNA, 19 nt, Human
aggagcucaaagaaaaugu

SEQ ID NO: 303432 - RNA, 22 nt, Human
aguagagacaggguuuucacca

SEQ ID NO: 303433 - RNA, 24 nt, Human
agugauccaccugccucagccucc

SEQ ID NO: 303434 - RNA, 21 nt, Human
aguuggcauaaucaugagaac

SEQ ID NO: 303435 - RNA, 19 nt, Human
augcaagagguccauaacc

SEQ ID NO: 303436 - RNA, 23 nt, Human
augccucagccuccucaguagcu

SEQ ID NO: 303437 - RNA, 24 nt, Human
auuuuuguauuuuuaguagagaca

SEQ ID NO: 303438 - RNA, 19 nt, Human
caaaauaucagcuggcuga

SEQ ID NO: 303439 - RNA, 25 nt, Human
caacacacuucagaacaugugucuc

SEQ ID NO: 303440 - RNA, 24 nt, Human
caacaugcagcggcaaauuuucaa

SEQ ID NO: 303441 - RNA, 22 nt, Human
caagugauccaccugccucagc

SEQ ID NO: 303442 - RNA, 25 nt, Human
caauucucaugccucagccuccuca

SEQ ID NO: 303443 - RNA, 21 nt, Human
caccauguuggcugggcuggu

SEQ ID NO: 303444 - RNA, 23 nt, Human
caccauguuggcugggcuggucu

SEQ ID NO: 303445 - RNA, 24 nt, Human
caccauguuggcugggcuggucuu

SEQ ID NO: 303446 - RNA, 20 nt, Human
cagagcuuccuacaccuucc

SEQ ID NO: 303447 - RNA, 25 nt, Human
caggguuuucaccauguuggcuggg

SEQ ID NO: 303448 - RNA, 25 nt, Human
caguagcuggguuuaaaaggcaugc

SEQ ID NO: 303449 - RNA, 21 nt, Human
caugccuggcuaauuuuugua

SEQ ID NO: 303450 - RNA, 24 nt, Human
cauguuggcugggcuggucuugaa

SEQ ID NO: 303451 - RNA, 25 nt, Human
ccaccugccucagccucccgaagug

SEQ ID NO: 303452 - RNA, 23 nt, Human
ccuaaccucaagugauccaccug

SEQ ID NO: 303453 - RNA, 23 nt, Human
ccuaaccucaagugauccaccug

SEQ ID NO: 303454 - RNA, 19 nt, Human
ccugguucaagcaauucuc

SEQ ID NO: 303455 - RNA, 22 nt, Human
ccugguucaagcaauucucaug

SEQ ID NO: 303456 - RNA, 22 nt, Human
cgcucugucacccaggcuggug

SEQ ID NO: 303457 - RNA, 23 nt, Human
cucaagugauccaccugccucag

SEQ ID NO: 303458 - RNA, 24 nt, Human
cucacugcaaccuccgucuccugg

SEQ ID NO: 303459 - RNA, 23 nt, Human
cugcaaccuccgucuccugguuc

SEQ ID NO: 303460 - RNA, 23 nt, Human
cugccucagccucccgaagugcu

SEQ ID NO: 303461 - RNA, 24 nt, Human
cugccucagccucccgaagugcua

SEQ ID NO: 303462 - RNA, 18 nt, Human
gaagugcuaagauuucag

SEQ ID NO: 303463 - RNA, 20 nt, Human
gcaccaucaugccuggcuaa

SEQ ID NO: 303464 - RNA, 25 nt, Human
gcucugucacccaggcuggugugca

SEQ ID NO: 303465 - RNA, 23 nt, Human
gcuggucuugaacuccuaaccuc

SEQ ID NO: 303466 - RNA, 24 nt, Human
gcuggugugcaguggcaggauuuc

SEQ ID NO: 303467 - RNA, 24 nt, Human
ggcuggucuugaacuccuaaccuc

SEQ ID NO: 303468 - RNA, 19 nt, Human
ggguuuucaccauguuggc

SEQ ID NO: 303469 - RNA, 23 nt, Human
ggguuuucaccauguuggcuggg

SEQ ID NO: 303470 - RNA, 18 nt, Human
gugauccaccugccucag

SEQ ID NO: 303471 - RNA, 24 nt, Human
gugauccaccugccucagccuccc

SEQ ID NO: 303472 - RNA, 23 nt, Human
gugcaguggcaggauuucagcuc

SEQ ID NO: 303473 - RNA, 22 nt, Human
uaagcuugaacaugaaacacaa

SEQ ID NO: 303474 - RNA, 24 nt, Human
uaauuuuuguauuuuuaguagaga

SEQ ID NO: 303475 - RNA, 21 nt, Human
uagaauagcucuguauacuaa

SEQ ID NO: 303476 - RNA, 23 nt, Human
uagagacaggguuuucaccaugu

SEQ ID NO: 303477 - RNA, 25 nt, Human
uaguagagacaggguuuucaccaug

SEQ ID NO: 303478 - RNA, 23 nt, Human
uauuauuaauaaugcaguuuuug

SEQ ID NO: 303479 - RNA, 22 nt, Human
ucaagugauccaccugccucag

SEQ ID NO: 303480 - RNA, 21 nt, Human
ucaccuccccagcaugcucag

SEQ ID NO: 303481 - RNA, 19 nt, Human
ucacugcaaccuccgucuc

SEQ ID NO: 303482 - RNA, 23 nt, Human
ucacugcaaccuccgucuccugg

SEQ ID NO: 303483 - RNA, 23 nt, Human
ucacugcaaccuccgucuccugg

SEQ ID NO: 303484 - RNA, 27 nt, Human
ucacugcaaccuccgucuccugguuca

SEQ ID NO: 303485 - RNA, 20 nt, Human
ucaguaucuuuugauuucca

SEQ ID NO: 303486 - RNA, 19 nt, Human
uccaaagagcaaagauuca

SEQ ID NO: 303487 - RNA, 19 nt, Human
ucccgaagugcuaagauuu

SEQ ID NO: 303488 - RNA, 23 nt, Human
uccgucuccugguucaagcaauu

SEQ ID NO: 303489 - RNA, 18 nt, Human
uccugguucaagcaauuc

SEQ ID NO: 303490 - RNA, 20 nt, Human
ucucaugccucagccuccuc

SEQ ID NO: 303491 - RNA, 19 nt, Human
ucucgcucugucacccagg

SEQ ID NO: 303492 - RNA, 23 nt, Human
ucucgcucugucacccaggcugg

SEQ ID NO: 303493 - RNA, 24 nt, Human
ucucgcucugucacccaggcuggu

SEQ ID NO: 303494 - RNA, 26 nt, Human
ucucgcucugucacccaggcuggugu

SEQ ID NO: 303495 - RNA, 27 nt, Human
ucucgcucugucacccaggcuggugug

SEQ ID NO: 303496 - RNA, 24 nt, Human
ucugucacccaggcuggugugcag

SEQ ID NO: 303497 - RNA, 22 nt, Human
ugaaacacaacacacuucagaa

SEQ ID NO: 303498 - RNA, 25 nt, Human
ugacaauaccacuaagagaaguuca

SEQ ID NO: 303499 - RNA, 19 nt, Human
ugacaugcaagagguccau

SEQ ID NO: 303500 - RNA, 19 nt, Human
ugagaacuuuuuccugcuu

SEQ ID NO: 303501 - RNA, 24 nt, Human
ugccucagccucccgaagugcuaa

SEQ ID NO: 303502 - RNA, 21 nt, Human
ugccucagccuccucaguagc

SEQ ID NO: 303503 - RNA, 24 nt, Human
ugccucagccuccucaguagcugg

SEQ ID NO: 303504 - RNA, 22 nt, Human
ugcucaguucguauauuaaugg

SEQ ID NO: 303505 - RNA, 20 nt, Human
uggcaggauuucagcucacu

SEQ ID NO: 303506 - RNA, 24 nt, Human
uggcaggauuucagcucacugcaa

SEQ ID NO: 303507 - RNA, 24 nt, Human
uggcugacuuugcuuuuaugaugu

SEQ ID NO: 303508 - RNA, 24 nt, Human
uggcugggcuggucuugaacuccu

SEQ ID NO: 303509 - RNA, 22 nt, Human
ugugcaguggcaggauuucagc

SEQ ID NO: 303510 - RNA, 23 nt, Human
ugugcaguggcaggauuucagcu

SEQ ID NO: 303511 - RNA, 25 nt, Human
uuaguagagacaggguuuucaccau

SEQ ID NO: 303512 - RNA, 22 nt, Human
uugaacaugaaacacaacacac

SEQ ID NO: 303513 - RNA, 21 nt, Human
uuuagcaggagcucaaagaaa

SEQ ID NO: 303514 - RNA, 24 nt, Human
uuucaccauguuggcugggcuggu

SEQ ID NO: 303515 - RNA, 24 nt, Human
uuugagaaccaaaauaucagcugg

SEQ ID NO: 303516 - RNA, 20 nt, Human
uuuuuguauuuuuaguagag

SEQ ID NO: 303517 - RNA, 21 nt, Human
aagccccccggggagagggga

SEQ ID NO: 303518 - RNA, 26 nt, Human
ccccaccugcccccuagcccucccug

SEQ ID NO: 303519 - RNA, 25 nt, Human
ccccuagcccucccugacuggccaa

SEQ ID NO: 303520 - RNA, 21 nt, Human
gacuuguauuuccauggcuuc

SEQ ID NO: 303521 - RNA, 19 nt, Human
ggaccacagagggcugaag

SEQ ID NO: 303522 - RNA, 18 nt, Human
uccccaccugcccccuag

SEQ ID NO: 303523 - RNA, 21 nt, Human
uccccaccugcccccuagccc

SEQ ID NO: 303524 - RNA, 22 nt, Human
uccccaccugcccccuagcccu

SEQ ID NO: 303525 - RNA, 24 nt, Human
uccccaccugcccccuagcccucc

SEQ ID NO: 303526 - RNA, 25 nt, Human
uggcuuccccuccccaccugccccc

SEQ ID NO: 303527 - RNA, 19 nt, Human
uugacaagaaucccaaagc

SEQ ID NO: 303528 - RNA, 19 nt, Human
uuuuuuuuuuuuuuacccc

SEQ ID NO: 303529 - RNA, 27 nt, Human
uuuuuuuuuuuuuuuuuaccccuuuga

SEQ ID NO: 303530 - RNA, 26 nt, Human
uuuuuuuuuuuuuuuuuuuaccccuu

SEQ ID NO: 303531 - RNA, 27 nt, Human
agagcccagaggagcugggaccaaagu

SEQ ID NO: 303532 - RNA, 20 nt, Human
aggcagaggagccagggucg

SEQ ID NO: 303533 - RNA, 20 nt, Human
agugggccugaggccagagc

SEQ ID NO: 303534 - RNA, 25 nt, Human
caccccagcucugaucucagagucc

SEQ ID NO: 303535 - RNA, 18 nt, Human
caggaucauuagugggcc

SEQ ID NO: 303536 - RNA, 20 nt, Human
cauaugcagugcaugcagca

SEQ ID NO: 303537 - RNA, 21 nt, Human
cccagcucugaucucagaguc

SEQ ID NO: 303538 - RNA, 23 nt, Human
cccuggcguguagcagauuuuau

SEQ ID NO: 303539 - RNA, 24 nt, Human
ccgggccaggcguggcguucagaa

SEQ ID NO: 303540 - RNA, 24 nt, Human
ccugaggccagagcccagaggagc

SEQ ID NO: 303541 - RNA, 23 nt, Human
cguucagaauggcucccuuccac

SEQ ID NO: 303542 - RNA, 18 nt, Human
gagagagguaccgggcug

SEQ ID NO: 303543 - RNA, 18 nt, Human
ggcaggcagaggagccag

SEQ ID NO: 303544 - RNA, 18 nt, Human
ggggagagagguaccggg

SEQ ID NO: 303545 - RNA, 24 nt, Human
guggcguucagaauggcucccuuc

SEQ ID NO: 303546 - RNA, 21 nt, Human
ucuggagaguucugcuuccug

SEQ ID NO: 303547 - RNA, 18 nt, Human
ugagggggcaggcagagg

SEQ ID NO: 303548 - RNA, 20 nt, Human
ugaucucagaguccuggcca

SEQ ID NO: 303549 - RNA, 21 nt, Human
uggggagagagguaccgggcu

SEQ ID NO: 303550 - RNA, 23 nt, Human
uucagaauggcucccuuccaccc

SEQ ID NO: 303551 - RNA, 22 nt, Human
aagcccgcugcguccacgcccu

SEQ ID NO: 303552 - RNA, 23 nt, Human
acgcccuccagcgucucuugcuc

SEQ ID NO: 303553 - RNA, 18 nt, Human
ccacgcccuccagcgucu

SEQ ID NO: 303554 - RNA, 21 nt, Human
cccacuuccucaaguccucaa

SEQ ID NO: 303555 - RNA, 18 nt, Human
ccccggaaacuccucucc

SEQ ID NO: 303556 - RNA, 24 nt, Human
cccggaaacuccucuccucuaccc

SEQ ID NO: 303557 - RNA, 21 nt, Human
cccggacccgagccccggaaa

SEQ ID NO: 303558 - RNA, 23 nt, Human
cccuccagcgucucuugcuccgc

SEQ ID NO: 303559 - RNA, 23 nt, Human
cucaaaaccuugucuugcccggg

SEQ ID NO: 303560 - RNA, 18 nt, Human
cuccagcgucucuugcuc

SEQ ID NO: 303561 - RNA, 21 nt, Human
cuuccgcgcucguuccccugg

SEQ ID NO: 303562 - RNA, 24 nt, Human
gacccggacccgagccccggaaac

SEQ ID NO: 303563 - RNA, 21 nt, Human
gccccggaaacuccucuccuu

SEQ ID NO: 303564 - RNA, 21 nt, Human
gcugcguccacgcccuccagc

SEQ ID NO: 303565 - RNA, 20 nt, Human
uacccaggcgaucgcccaag

SEQ ID NO: 303566 - RNA, 21 nt, Human
ugcuccgccucucgccgccca

SEQ ID NO: 303567 - RNA, 19 nt, Human
uugcuuccgcgcucguucc

SEQ ID NO: 303568 - RNA, 24 nt, Human
aaacccccccucacccccaccacc

SEQ ID NO: 303569 - RNA, 24 nt, Human
acaccgcggcccucagcacccggc

SEQ ID NO: 303570 - RNA, 21 nt, Human
acccccccucacccccaccac

SEQ ID NO: 303571 - RNA, 19 nt, Human
accuaagcagcaggagacc

SEQ ID NO: 303572 - RNA, 18 nt, Human
agagucugggaccaucca

SEQ ID NO: 303573 - RNA, 20 nt, Human
agagucugggaccauccagg

SEQ ID NO: 303574 - RNA, 21 nt, Human
agcagggagggggcuccuaug

SEQ ID NO: 303575 - RNA, 19 nt, Human
agcuccagcgccuccucca

SEQ ID NO: 303576 - RNA, 19 nt, Human
agcugggcauguccugaga

SEQ ID NO: 303577 - RNA, 19 nt, Human
aggaccuaagcagcaggag

SEQ ID NO: 303578 - RNA, 20 nt, Human
auggagcacagccgugcccc

SEQ ID NO: 303579 - RNA, 24 nt, Human
auggccaaacccccccucaccccc

SEQ ID NO: 303580 - RNA, 19 nt, Human
caaacccccccucaccccc

SEQ ID NO: 303581 - RNA, 22 nt, Human
caaacccccccucacccccacc

SEQ ID NO: 303582 - RNA, 24 nt, Human
caaacccccccucacccccaccac

SEQ ID NO: 303583 - RNA, 21 nt, Human
caacgaagcugccuugaccuc

SEQ ID NO: 303584 - RNA, 20 nt, Human
caagccagagggaacaacga

SEQ ID NO: 303585 - RNA, 18 nt, Human
cacaagccagagggaaca

SEQ ID NO: 303586 - RNA, 23 nt, Human
caccaccuuaggccgaacaccgc

SEQ ID NO: 303587 - RNA, 19 nt, Human
cacccgcuccuccgcucua

SEQ ID NO: 303588 - RNA, 19 nt, Human
cagaugccuccgcgccucc

SEQ ID NO: 303589 - RNA, 18 nt, Human
cagcaggagacccccagg

SEQ ID NO: 303590 - RNA, 18 nt, Human
cagccgugcccccacaag

SEQ ID NO: 303591 - RNA, 23 nt, Human
cagccgugcccccacaagccaga

SEQ ID NO: 303592 - RNA, 25 nt, Human
cagcucccccuuucaaggugagucc

SEQ ID NO: 303593 - RNA, 19 nt, Human
caggacagagggcaggacc

SEQ ID NO: 303594 - RNA, 22 nt, Human
cauccucagcccugcguagccu

SEQ ID NO: 303595 - RNA, 21 nt, Human
cauguccugagagucugggaa

SEQ ID NO: 303596 - RNA, 18 nt, Human
ccaaaaggaccuaagcaa

SEQ ID NO: 303597 - RNA, 23 nt, Human
ccaaacccccccucacccccacc

SEQ ID NO: 303598 - RNA, 21 nt, Human
ccagcgcgcuccgcgcccacc

SEQ ID NO: 303599 - RNA, 24 nt, Human
ccaggccuggcacaaagccagggg

SEQ ID NO: 303600 - RNA, 24 nt, Human
cccacaagccagagggaacaacga

SEQ ID NO: 303601 - RNA, 20 nt, Human
cccacaccgcggcccucagc

SEQ ID NO: 303602 - RNA, 22 nt, Human
ccccaccaccuuaggccgaaca

SEQ ID NO: 303603 - RNA, 19 nt, Human
ccccagcgcgcuccgcgcc

SEQ ID NO: 303604 - RNA, 22 nt, Human
ccccaugggggacugcccucuc

SEQ ID NO: 303605 - RNA, 23 nt, Human
ccccaugggggacugcccucucc

SEQ ID NO: 303606 - RNA, 21 nt, Human
cccccacaagccagagggaac

SEQ ID NO: 303607 - RNA, 23 nt, Human
cccccagcgcgcuccgcgcccac

SEQ ID NO: 303608 - RNA, 26 nt, Human
cccccaggagugggcuuuaggcccag

SEQ ID NO: 303609 - RNA, 18 nt, Human
cccccccucacccccacc

SEQ ID NO: 303610 - RNA, 22 nt, Human
ccccgagguucgcggaaagcuc

SEQ ID NO: 303611 - RNA, 21 nt, Human
ccccucacccccaccaccuua

SEQ ID NO: 303612 - RNA, 21 nt, Human
cccucuccaggccuggcacaa

SEQ ID NO: 303613 - RNA, 19 nt, Human
ccgacccgccucugccaga

SEQ ID NO: 303614 - RNA, 21 nt, Human
ccgcagcgcaggauucuggcg

SEQ ID NO: 303615 - RNA, 18 nt, Human
ccgccucugccagaugcc

SEQ ID NO: 303616 - RNA, 18 nt, Human
ccgccucugccagaugcc

SEQ ID NO: 303617 - RNA, 21 nt, Human
ccgcgcccaccgccccgcuuc

SEQ ID NO: 303618 - RNA, 22 nt, Human
ccgcuucagccggcacccgcuc

SEQ ID NO: 303619 - RNA, 18 nt, Human
ccgugagccccaccgccc

SEQ ID NO: 303620 - RNA, 22 nt, Human
ccgugcgcgcugcccaccugcg

SEQ ID NO: 303621 - RNA, 26 nt, Human
ccucacccccaccaccuuaggccgaa

SEQ ID NO: 303622 - RNA, 19 nt, Human
ccucaugccauaugaggcc

SEQ ID NO: 303623 - RNA, 22 nt, Human
ccugcguagccuucugcccucc

SEQ ID NO: 303624 - RNA, 22 nt, Human
cgcagcgcaggauucuggcgcc

SEQ ID NO: 303625 - RNA, 22 nt, Human
cgcgcacccacaccgcggcccu

SEQ ID NO: 303626 - RNA, 19 nt, Human
cgcggaaagcuccaggcug

SEQ ID NO: 303627 - RNA, 22 nt, Human
cgugcccccacaagccagaggg

SEQ ID NO: 303628 - RNA, 22 nt, Human
cucacccccaccaccuuaggcc

SEQ ID NO: 303629 - RNA, 19 nt, Human
cucgaagccccugagcugg

SEQ ID NO: 303630 - RNA, 23 nt, Human
cucguccauuccuucagcuccag

SEQ ID NO: 303631 - RNA, 27 nt, Human
cugacugcuccgcgcacccacaccgcg

SEQ ID NO: 303632 - RNA, 26 nt, Human
cuggaugggugggggucccaaaagga

SEQ ID NO: 303633 - RNA, 22 nt, Human
cuucagccggcacccgcuccuc

SEQ ID NO: 303634 - RNA, 23 nt, Human
gaagccccugagcugggcauguc

SEQ ID NO: 303635 - RNA, 25 nt, Human
gaccauccaggggcugcaucuucau

SEQ ID NO: 303636 - RNA, 20 nt, Human
gagcagucugcaggacagag

SEQ ID NO: 303637 - RNA, 21 nt, Human
gcagcgcaggauucuggcgcc

SEQ ID NO: 303638 - RNA, 23 nt, Human
gcaggacagagggcaggaccaca

SEQ ID NO: 303639 - RNA, 21 nt, Human
gccccgagguucgcggaaagc

SEQ ID NO: 303640 - RNA, 19 nt, Human
gccccgggcuggcaggccc

SEQ ID NO: 303641 - RNA, 23 nt, Human
gccgugcgcgcugcccaccugcg

SEQ ID NO: 303642 - RNA, 18 nt, Human
gcuucagccggcacccgc

SEQ ID NO: 303643 - RNA, 24 nt, Human
ggagugggcuuuaggcccagcagc

SEQ ID NO: 303644 - RNA, 19 nt, Human
ggcgcggcgccccucucgg

SEQ ID NO: 303645 - RNA, 21 nt, Human
ggcugcaucuucauccucagc

SEQ ID NO: 303646 - RNA, 22 nt, Human
ggguacuccuuuugguaccagg

SEQ ID NO: 303647 - RNA, 19 nt, Human
gugcaaaaaagggccugga

SEQ ID NO: 303648 - RNA, 19 nt, Human
ucagcacccggcugccggu

SEQ ID NO: 303649 - RNA, 23 nt, Human
uccaugccuuccaccuugccaca

SEQ ID NO: 303650 - RNA, 20 nt, Human
ucccagggcucguccauucc

SEQ ID NO: 303651 - RNA, 21 nt, Human
ucccagggcucguccauuccu

SEQ ID NO: 303652 - RNA, 22 nt, Human
ucccagggcucguccauuccuu

SEQ ID NO: 303653 - RNA, 18 nt, Human
uccgcgcacccacaccgc

SEQ ID NO: 303654 - RNA, 23 nt, Human
uccgcucuaccccagcuggccca

SEQ ID NO: 303655 - RNA, 18 nt, Human
uccuucagcuccagcgcc

SEQ ID NO: 303656 - RNA, 18 nt, Human
ugcaaaaaagggccugga

SEQ ID NO: 303657 - RNA, 22 nt, Human
ugccagcucccccucaugccau

SEQ ID NO: 303658 - RNA, 27 nt, Human
ugcccaccugcgcccugacugcuccgc

SEQ ID NO: 303659 - RNA, 19 nt, Human
ugccuccgcgccucccuag

SEQ ID NO: 303660 - RNA, 20 nt, Human
uggagcacagccgugccccc

SEQ ID NO: 303661 - RNA, 19 nt, Human
uggagugggccuggguacc

SEQ ID NO: 303662 - RNA, 22 nt, Human
ugggcuuuaggcccagcagcuc

SEQ ID NO: 303663 - RNA, 23 nt, Human
uggggaaagacaugaaaugcuaa

SEQ ID NO: 303664 - RNA, 21 nt, Human
ugugcaaaaaagggccuggau

SEQ ID NO: 303665 - RNA, 19 nt, Human
uucgcggaaagcuccaggc

SEQ ID NO: 303666 - RNA, 23 nt, Human
uucugcccuccucccagggcucg

SEQ ID NO: 303667 - RNA, 24 nt, Human
aaaaagacuauguccaguaaacau

SEQ ID NO: 303668 - RNA, 18 nt, Human
aacaagcagguggguauc

SEQ ID NO: 303669 - RNA, 22 nt, Human
aauaguucgcuugaucucucuu

SEQ ID NO: 303670 - RNA, 19 nt, Human
agagaaaugaaaucuccag

SEQ ID NO: 303671 - RNA, 18 nt, Human
agguuuuuagcaugcaca

SEQ ID NO: 303672 - RNA, 22 nt, Human
aguucgcuugaucucucuuuga

SEQ ID NO: 303673 - RNA, 23 nt, Human
ccaaaaagacuauguccaguaaa

SEQ ID NO: 303674 - RNA, 20 nt, Human
ccaguaaacauaacugucac

SEQ ID NO: 303675 - RNA, 21 nt, Human
ccuaaauaguucgcuugaucu

SEQ ID NO: 303676 - RNA, 21 nt, Human
ccuccggaaacaccauucauu

SEQ ID NO: 303677 - RNA, 21 nt, Human
cgcuuugcagagcugagagca

SEQ ID NO: 303678 - RNA, 20 nt, Human
gaaaaggacuugcuccuccg

SEQ ID NO: 303679 - RNA, 21 nt, Human
guuuuuagcaugcacacccag

SEQ ID NO: 303680 - RNA, 21 nt, Human
uaaaauagcuuugcuucaugc

SEQ ID NO: 303681 - RNA, 19 nt, Human
uagagaaaugaaaucucca

SEQ ID NO: 303682 - RNA, 23 nt, Human
uagguaaguuuugauaccagcca

SEQ ID NO: 303683 - RNA, 22 nt, Human
uccagccagagaaugggauuuc

SEQ ID NO: 303684 - RNA, 21 nt, Human
uccuccggaaacaccauucau

SEQ ID NO: 303685 - RNA, 19 nt, Human
ucugcagucaucacuuucc

SEQ ID NO: 303686 - RNA, 20 nt, Human
ugagagcaccugugcauguc

SEQ ID NO: 303687 - RNA, 22 nt, Human
uggaaaaggacuugcuccuccg

SEQ ID NO: 303688 - RNA, 21 nt, Human
uucauucgcuuugcagagcug

SEQ ID NO: 303689 - RNA, 21 nt, Human
aaaacaguaauauuucacuuu

SEQ ID NO: 303690 - RNA, 19 nt, Human
accaccuuuauuggcugcc

SEQ ID NO: 303691 - RNA, 20 nt, Human
auuaagaaaacauuuuccuu

SEQ ID NO: 303692 - RNA, 20 nt, Human
cauacccuaagcuccaaauc

SEQ ID NO: 303693 - RNA, 23 nt, Human
cccuaagcuccaaaucauucacu

SEQ ID NO: 303694 - RNA, 20 nt, Human
ccuaagcuccaaaucauuca

SEQ ID NO: 303695 - RNA, 22 nt, Human
gcgcggggaacccccaccccuc

SEQ ID NO: 303696 - RNA, 18 nt, Human
gcggcgcggggaaccccc

SEQ ID NO: 303697 - RNA, 25 nt, Human
ggaaaaaaaucucuuaugacauaaa

SEQ ID NO: 303698 - RNA, 20 nt, Human
ggcgcggggaacccccaccc

SEQ ID NO: 303699 - RNA, 25 nt, Human
uaaagcaacaccauugugcugcaaa

SEQ ID NO: 303700 - RNA, 26 nt, Human
uaucagaaaggggauacaaaacauac

SEQ ID NO: 303701 - RNA, 23 nt, Human
ucuguugaaagaguuauagcaga

SEQ ID NO: 303702 - RNA, 24 nt, Human
uguucuagauuugggggaaaaaaa

SEQ ID NO: 303703 - RNA, 26 nt, Human
uuagacaccaaccaccuuuauuggcu

SEQ ID NO: 303704 - RNA, 22 nt, Human
aaguggaugagagaggcagcuc

SEQ ID NO: 303705 - RNA, 26 nt, Human
aggaccagauggggccuguagcucug

SEQ ID NO: 303706 - RNA, 24 nt, Human
aggcagcuccagccgugggcaucc

SEQ ID NO: 303707 - RNA, 18 nt, Human
cucuggggacggcacagg

SEQ ID NO: 303708 - RNA, 25 nt, Human
ggggaagggcagcagggacuuagga

SEQ ID NO: 303709 - RNA, 18 nt, Human
guggaugagagaggcagc

SEQ ID NO: 303710 - RNA, 19 nt, Human
uaagagcuaaggccauacc

SEQ ID NO: 303711 - RNA, 20 nt, Human
uggccuggcuccagggcggg

SEQ ID NO: 303712 - RNA, 19 nt, Human
uggcuaagagcuaaggcca

SEQ ID NO: 303713 - RNA, 23 nt, Human
uggcuaagagcuaaggccauacc

SEQ ID NO: 303714 - RNA, 20 nt, Human
ugggaaggggaagggcagca

SEQ ID NO: 303715 - RNA, 18 nt, Human
ugggaggaagaauggaca

SEQ ID NO: 303716 - RNA, 21 nt, Human
ugggaggaagaauggacagug

SEQ ID NO: 303717 - RNA, 18 nt, Human
ugugggaaggggaagggc

SEQ ID NO: 303718 - RNA, 23 nt, Human
ugugggaaggggaagggcagcag

SEQ ID NO: 303719 - RNA, 20 nt, Human
uguuuggcuaagagcuaagg

SEQ ID NO: 303720 - RNA, 20 nt, Human
aaacagagcacaaaguucuc

SEQ ID NO: 303721 - RNA, 20 nt, Human
agguaaaacagagcacaaag

SEQ ID NO: 303722 - RNA, 23 nt, Human
ccaaguucauucgaucuggggug

SEQ ID NO: 303723 - RNA, 21 nt, Human
ccgccgcuagacccgccccuc

SEQ ID NO: 303724 - RNA, 22 nt, Human
ccggccuggccccgccccggcc

SEQ ID NO: 303725 - RNA, 20 nt, Human
ccuggccccgccccggcccg

SEQ ID NO: 303726 - RNA, 23 nt, Human
cgaucugggguggggaugggagc

SEQ ID NO: 303727 - RNA, 21 nt, Human
cggccuggccccgccccggcc

SEQ ID NO: 303728 - RNA, 21 nt, Human
cgggggccgccgcuagacccg

SEQ ID NO: 303729 - RNA, 18 nt, Human
cuaaaaaaaggaaaaaaa

SEQ ID NO: 303730 - RNA, 20 nt, Human
gccgcuagacccgccccucu

SEQ ID NO: 303731 - RNA, 21 nt, Human
uaaaacagagcacaaaguucu

SEQ ID NO: 303732 - RNA, 21 nt, Human
uaagguaaaacagagcacaaa

SEQ ID NO: 303733 - RNA, 21 nt, Human
ucccuaaaaaaaggaaaaaaa

SEQ ID NO: 303734 - RNA, 19 nt, Human
ucuaaacagaguaagguaa

SEQ ID NO: 303735 - RNA, 21 nt, Human
ucugggguggggaugggagca

SEQ ID NO: 303736 - RNA, 18 nt, Human
ucuuuuaauuuuuucccu

SEQ ID NO: 303737 - RNA, 22 nt, Human
uggggaugggagcagcagggcc

SEQ ID NO: 303738 - RNA, 18 nt, Human
ugggguggggaugggagc

SEQ ID NO: 303739 - RNA, 24 nt, Human
uguuuuaucacacaggcagucuua

SEQ ID NO: 303740 - RNA, 18 nt, Human
uuuuuuuuuuaaacaagu

SEQ ID NO: 303741 - RNA, 20 nt, Human
uuuuuuuuuuuuaaacaagu

SEQ ID NO: 303742 - RNA, 19 nt, Human
aaaaagaagauugggaagg

SEQ ID NO: 303743 - RNA, 21 nt, Human
aaaaguaggcaucugugaagg

SEQ ID NO: 303744 - RNA, 23 nt, Human
aaagaacauuuccagaaacagac

SEQ ID NO: 303745 - RNA, 20 nt, Human
aagaagaaauagagccaugg

SEQ ID NO: 303746 - RNA, 24 nt, Human
aagagaggugccccuuccccaaga

SEQ ID NO: 303747 - RNA, 18 nt, Human
aagcaauaggccgggccu

SEQ ID NO: 303748 - RNA, 22 nt, Human
aaggagggcacaggguccuucc

SEQ ID NO: 303749 - RNA, 23 nt, Human
accccaguguccuuaaaaagagg

SEQ ID NO: 303750 - RNA, 25 nt, Human
accccaguguccuuaaaaagagguu

SEQ ID NO: 303751 - RNA, 19 nt, Human
acccuuugggugcuggccu

SEQ ID NO: 303752 - RNA, 18 nt, Human
agacauagucaaggcuga

SEQ ID NO: 303753 - RNA, 20 nt, Human
agagagagacccaagcaaua

SEQ ID NO: 303754 - RNA, 24 nt, Human
agauugggaaggagggcacagggu

SEQ ID NO: 303755 - RNA, 27 nt, Human
aggcagagaugaggccaaaagggaccc

SEQ ID NO: 303756 - RNA, 18 nt, Human
agggaucagaguagcugg

SEQ ID NO: 303757 - RNA, 23 nt, Human
agggcacaggguccuuccaccuc

SEQ ID NO: 303758 - RNA, 22 nt, Human
caauaggccgggccugacuccc

SEQ ID NO: 303759 - RNA, 21 nt, Human
cacaggguccuuccaccuccc

SEQ ID NO: 303760 - RNA, 22 nt, Human
caccaucuaaagaacauuucca

SEQ ID NO: 303761 - RNA, 22 nt, Human
cagaaacagaccccaguguccu

SEQ ID NO: 303762 - RNA, 21 nt, Human
cauacccaaaggaaugugcca

SEQ ID NO: 303763 - RNA, 22 nt, Human
cauacuugcucaguguuggggg

SEQ ID NO: 303764 - RNA, 20 nt, Human
caucccauuugccucccacu

SEQ ID NO: 303765 - RNA, 25 nt, Human
ccaucuaaagaacauuuccagaaac

SEQ ID NO: 303766 - RNA, 29 nt, Human
ccaucuaaagaacauuuccagaaacagag

SEQ ID NO: 303767 - RNA, 19 nt, Human
ccaugagccucuagaagcu

SEQ ID NO: 303768 - RNA, 21 nt, Human
cccaguguccuuaaaaagagg

SEQ ID NO: 303769 - RNA, 18 nt, Human
ccuaggccuuggcgagcc

SEQ ID NO: 303770 - RNA, 18 nt, Human
ccuccucugucauacugg

SEQ ID NO: 303771 - RNA, 23 nt, Human
ccugacucccagaccccugcaga

SEQ ID NO: 303772 - RNA, 20 nt, Human
gaaggagggcacaggguccu

SEQ ID NO: 303773 - RNA, 19 nt, Human
gaaguuuccauaauccagg

SEQ ID NO: 303774 - RNA, 21 nt, Human
gacaauggaugugaagaagaa

SEQ ID NO: 303775 - RNA, 18 nt, Human
gaguauuuugguuuuucu

SEQ ID NO: 303776 - RNA, 19 nt, Human
gucaucuuuggaguauuuu

SEQ ID NO: 303777 - RNA, 24 nt, Human
uaaauagagagagacccaagcaau

SEQ ID NO: 303778 - RNA, 19 nt, Human
uaacauacccaaaggaaug

SEQ ID NO: 303779 - RNA, 21 nt, Human
uaaggccuuacauccuccucu

SEQ ID NO: 303780 - RNA, 18 nt, Human
uagacauagucaaggcug

SEQ ID NO: 303781 - RNA, 23 nt, Human
uagcugggguugggacuccacag

SEQ ID NO: 303782 - RNA, 20 nt, Human
uauuuugguuuuucuuauuu

SEQ ID NO: 303783 - RNA, 23 nt, Human
ucagaguagcugggguugggacu

SEQ ID NO: 303784 - RNA, 19 nt, Human
ucagcccuucuccuagcuc

SEQ ID NO: 303785 - RNA, 19 nt, Human
ucaggcagagaugaggcca

SEQ ID NO: 303786 - RNA, 19 nt, Human
ucaguuuuuccaccugucu

SEQ ID NO: 303787 - RNA, 20 nt, Human
uccacaauccaaaauaaagu

SEQ ID NO: 303788 - RNA, 21 nt, Human
uccacaauccaaaauaaaguu

SEQ ID NO: 303789 - RNA, 20 nt, Human
uccacagcauacuugcucag

SEQ ID NO: 303790 - RNA, 19 nt, Human
ucccuggaaaggugcagaa

SEQ ID NO: 303791 - RNA, 21 nt, Human
ucuguccaucucugaaacugc

SEQ ID NO: 303792 - RNA, 19 nt, Human
ugaaaaagaagauugggaa

SEQ ID NO: 303793 - RNA, 21 nt, Human
ugaaaaagaagauugggaagg

SEQ ID NO: 303794 - RNA, 18 nt, Human
ugaaacugccugucucag

SEQ ID NO: 303795 - RNA, 21 nt, Human
ugcagaaugagccaggccuaa

SEQ ID NO: 303796 - RNA, 21 nt, Human
ugggaaggagggcacaggguc

SEQ ID NO: 303797 - RNA, 22 nt, Human
ugggaaggagggcacagggucc

SEQ ID NO: 303798 - RNA, 19 nt, Human
ugggguugggacuccacag

SEQ ID NO: 303799 - RNA, 23 nt, Human
uggguuuggguaauaagaagaga

SEQ ID NO: 303800 - RNA, 20 nt, Human
uguccaucucugaaacugcc

SEQ ID NO: 303801 - RNA, 20 nt, Human
ugugaagaagaaauagagcc

SEQ ID NO: 303802 - RNA, 19 nt, Human
uucuccuagcucacauacc

SEQ ID NO: 303803 - RNA, 21 nt, Human
uuugggguucaagagaggugc

SEQ ID NO: 303804 - RNA, 22 nt, Human
agcaggacaacgccgaagagga

SEQ ID NO: 303805 - RNA, 20 nt, Human
agcccgagccccagagcccc

SEQ ID NO: 303806 - RNA, 23 nt, Human
agcuccugccugggaaguccucg

SEQ ID NO: 303807 - RNA, 20 nt, Human
aggcaaaucacacucccucu

SEQ ID NO: 303808 - RNA, 21 nt, Human
aucagcuuuaaacggcucugg

SEQ ID NO: 303809 - RNA, 23 nt, Human
caaagcccgagccccagagcccc

SEQ ID NO: 303810 - RNA, 22 nt, Human
cacccggaacacagaugggaac

SEQ ID NO: 303811 - RNA, 19 nt, Human
cacucccucugaguuggaa

SEQ ID NO: 303812 - RNA, 20 nt, Human
caguucacucuuuauuuccu

SEQ ID NO: 303813 - RNA, 22 nt, Human
caguucacucuuuauuuccuca

SEQ ID NO: 303814 - RNA, 20 nt, Human
caguuccaggacgaucuugc

SEQ ID NO: 303815 - RNA, 18 nt, Human
ccagguuugcucuggaaa

SEQ ID NO: 303816 - RNA, 21 nt, Human
cccagagccccaggacugccu

SEQ ID NO: 303817 - RNA, 22 nt, Human
cccaugcaccagcggcgccgag

SEQ ID NO: 303818 - RNA, 23 nt, Human
ccccagagccccaggacugccuc

SEQ ID NO: 303819 - RNA, 22 nt, Human
ccccaggacugccucugccucc

SEQ ID NO: 303820 - RNA, 23 nt, Human
cccccagccgacccggguccccg

SEQ ID NO: 303821 - RNA, 18 nt, Human
ccccugccggccagcgcc

SEQ ID NO: 303822 - RNA, 22 nt, Human
cccgagccccagagccccagga

SEQ ID NO: 303823 - RNA, 21 nt, Human
cccggcuccccucccaugcac

SEQ ID NO: 303824 - RNA, 22 nt, Human
cccucugaguuggaagccccca

SEQ ID NO: 303825 - RNA, 20 nt, Human
ccuccgccccgagcuccugc

SEQ ID NO: 303826 - RNA, 21 nt, Human
ccucugccuccaccggaaugg

SEQ ID NO: 303827 - RNA, 24 nt, Human
ccugccugggaaguccucggccgc

SEQ ID NO: 303828 - RNA, 18 nt, Human
cgccccgagcuccugccu

SEQ ID NO: 303829 - RNA, 24 nt, Human
cugccggccagcgccucgcugccc

SEQ ID NO: 303830 - RNA, 24 nt, Human
cugcgggucccggugacaaagccc

SEQ ID NO: 303831 - RNA, 19 nt, Human
gacaggacagggcagggca

SEQ ID NO: 303832 - RNA, 22 nt, Human
gacaggacagggcagggcagga

SEQ ID NO: 303833 - RNA, 22 nt, Human
gaccgaucccacccggaacaca

SEQ ID NO: 303834 - RNA, 19 nt, Human
gaggaagcaccggguuucu

SEQ ID NO: 303835 - RNA, 21 nt, Human
gaggaagcaccggguuucuug

SEQ ID NO: 303836 - RNA, 22 nt, Human
gaggaagcaccggguuucuugg

SEQ ID NO: 303837 - RNA, 24 nt, Human
gccagccucaggcuggcaccgcag

SEQ ID NO: 303838 - RNA, 21 nt, Human
gccagcgccucgcugcccugg

SEQ ID NO: 303839 - RNA, 24 nt, Human
gccccagagccccaggacugccuc

SEQ ID NO: 303840 - RNA, 22 nt, Human
gccggccagcgccucgcugccc

SEQ ID NO: 303841 - RNA, 23 nt, Human
gccggccagcgccucgcugcccu

SEQ ID NO: 303842 - RNA, 25 nt, Human
ggaagcccccagccgacccgggucc

SEQ ID NO: 303843 - RNA, 18 nt, Human
ggagcagccagccucagg

SEQ ID NO: 303844 - RNA, 22 nt, Human
ggaucaggcaaaucacacuccc

SEQ ID NO: 303845 - RNA, 24 nt, Human
gggaacggcgggaagugggauggc

SEQ ID NO: 303846 - RNA, 23 nt, Human
uccagaccgaucccacccggaac

SEQ ID NO: 303847 - RNA, 22 nt, Human
ucccaugcaccagcggcgccga

SEQ ID NO: 303848 - RNA, 21 nt, Human
ucccucugaguuggaagcccc

SEQ ID NO: 303849 - RNA, 20 nt, Human
ucuggaggaagcaccggguu

SEQ ID NO: 303850 - RNA, 23 nt, Human
ugacaaagcccgagccccagagc

SEQ ID NO: 303851 - RNA, 20 nt, Human
ugccucugccuccaccggaa

SEQ ID NO: 303852 - RNA, 19 nt, Human
ugccugggaaguccucggc

SEQ ID NO: 303853 - RNA, 21 nt, Human
uggaagcccccagccgacccg

SEQ ID NO: 303854 - RNA, 18 nt, Human
uggcaccgcagcgccccc

SEQ ID NO: 303855 - RNA, 21 nt, Human
ugggauggcgguacagggcug

SEQ ID NO: 303856 - RNA, 21 nt, Human
uguccugcccccauccuccuu

SEQ ID NO: 303857 - RNA, 23 nt, Human
uguccugcccccauccuccuuca

SEQ ID NO: 303858 - RNA, 18 nt, Human
uuccucauaucagcuuua

SEQ ID NO: 303859 - RNA, 23 nt, Human
uuggaagcccccagccgacccgg

SEQ ID NO: 303860 - RNA, 21 nt, Human
aaaaacaacaaaauuaacaaa

SEQ ID NO: 303861 - RNA, 23 nt, Human
aaaaaugacaggaaaacaaccua

SEQ ID NO: 303862 - RNA, 25 nt, Human
aaacccagcagaucugggcugugaa

SEQ ID NO: 303863 - RNA, 19 nt, Human
aaauagcugcagaaaaacc

SEQ ID NO: 303864 - RNA, 24 nt, Human
aaugcuagaaaauagcugcagaaa

SEQ ID NO: 303865 - RNA, 20 nt, Human
aauuucugcccgcuggccuc

SEQ ID NO: 303866 - RNA, 26 nt, Human
acaaaauacaacagcuagaauuacaa

SEQ ID NO: 303867 - RNA, 21 nt, Human
acuccuuuaccucccauaucc

SEQ ID NO: 303868 - RNA, 27 nt, Human
agagagaagggaauacgcagaggggcc

SEQ ID NO: 303869 - RNA, 24 nt, Human
agagagaccaaaaccuaaccugag

SEQ ID NO: 303870 - RNA, 22 nt, Human
agcacccaauauuccuuugaaa

SEQ ID NO: 303871 - RNA, 21 nt, Human
agcagaucugggcugugaagg

SEQ ID NO: 303872 - RNA, 18 nt, Human
aggcaggauggaaaggug

SEQ ID NO: 303873 - RNA, 23 nt, Human
aggcaggauggaaagguggaagg

SEQ ID NO: 303874 - RNA, 21 nt, Human
aggcgggaggugaacagggaa

SEQ ID NO: 303875 - RNA, 21 nt, Human
agugaccaggagcaacuggga

SEQ ID NO: 303876 - RNA, 20 nt, Human
aguggccaacaguaaauuuc

SEQ ID NO: 303877 - RNA, 18 nt, Human
aguuacaagaaacaagac

SEQ ID NO: 303878 - RNA, 18 nt, Human
caaaauccauucauccaa

SEQ ID NO: 303879 - RNA, 23 nt, Human
caaauucacaaaauacaacagcu

SEQ ID NO: 303880 - RNA, 26 nt, Human
caacagcuagaauuacaaaauccauu

SEQ ID NO: 303881 - RNA, 21 nt, Human
caagacaguaauggcuauaaa

SEQ ID NO: 303882 - RNA, 19 nt, Human
cacagcuccgccgccgcgg

SEQ ID NO: 303883 - RNA, 19 nt, Human
caggaaaacaaccuaaucu

SEQ ID NO: 303884 - RNA, 24 nt, Human
caguaaauuucugcccgcuggccu

SEQ ID NO: 303885 - RNA, 26 nt, Human
ccacagcuccgccgccgcggcuccgg

SEQ ID NO: 303886 - RNA, 21 nt, Human
cccacaauuuuagucucucaa

SEQ ID NO: 303887 - RNA, 20 nt, Human
cccaugcccaccgcgggcca

SEQ ID NO: 303888 - RNA, 24 nt, Human
cccuuggcagagcggguccugccu

SEQ ID NO: 303889 - RNA, 18 nt, Human
ccgccgcggcuccggccc

SEQ ID NO: 303890 - RNA, 23 nt, Human
ccgccgcggcuccggcccugccc

SEQ ID NO: 303891 - RNA, 23 nt, Human
ccuccuaucucaucucuucaggc

SEQ ID NO: 303892 - RNA, 21 nt, Human
ccuuugaaauauggaaauaga

SEQ ID NO: 303893 - RNA, 18 nt, Human
cggaguugaaaaaguuca

SEQ ID NO: 303894 - RNA, 24 nt, Human
cuauaugcagcacccaauauuccu

SEQ ID NO: 303895 - RNA, 21 nt, Human
cuccuuuaccucccauaucca

SEQ ID NO: 303896 - RNA, 19 nt, Human
cuuuccuccuaucucaucu

SEQ ID NO: 303897 - RNA, 23 nt, Human
gaaaaacaacaaaauuaacaaau

SEQ ID NO: 303898 - RNA, 20 nt, Human
gacuuuaaauguaccaauug

SEQ ID NO: 303899 - RNA, 19 nt, Human
gagaccaaaaccuaaccug

SEQ ID NO: 303900 - RNA, 19 nt, Human
gcaggcgggaggugaacag

SEQ ID NO: 303901 - RNA, 21 nt, Human
gcaguggagcaagagagacca

SEQ ID NO: 303902 - RNA, 25 nt, Human
gcaguggagcaagagagaccaaaag

SEQ ID NO: 303903 - RNA, 21 nt, Human
gccacagcuucuuccaauccc

SEQ ID NO: 303904 - RNA, 19 nt, Human
gcuagaauuacaaaaucca

SEQ ID NO: 303905 - RNA, 19 nt, Human
gcugcagaaaaaccugugg

SEQ ID NO: 303906 - RNA, 21 nt, Human
gcuuuuuccccuucaagggaa

SEQ ID NO: 303907 - RNA, 19 nt, Human
ggaaaacaaccuaaucaca

SEQ ID NO: 303908 - RNA, 21 nt, Human
ggcuuuuuuuuuuuuuuuuuu

SEQ ID NO: 303909 - RNA, 20 nt, Human
gggaauacgcagaggggccc

SEQ ID NO: 303910 - RNA, 21 nt, Human
guggagcaagagagaccaaaa

SEQ ID NO: 303911 - RNA, 26 nt, Human
uaccagguauuuugaacaucugcccc

SEQ ID NO: 303912 - RNA, 22 nt, Human
uagaaaauagcugcagaaaaac

SEQ ID NO: 303913 - RNA, 24 nt, Human
uagcuuuuuccccuucaagggaaa

SEQ ID NO: 303914 - RNA, 24 nt, Human
ucacagaaaaacaacaaaauuaac

SEQ ID NO: 303915 - RNA, 24 nt, Human
ucaguccaggcacagggacuggca

SEQ ID NO: 303916 - RNA, 23 nt, Human
uccacacacuggugucagggaac

SEQ ID NO: 303917 - RNA, 18 nt, Human
ucccuggcaggcgggagg

SEQ ID NO: 303918 - RNA, 21 nt, Human
uccucaaaacccagcagaucu

SEQ ID NO: 303919 - RNA, 23 nt, Human
ucugcccgcuggccucccaccac

SEQ ID NO: 303920 - RNA, 22 nt, Human
ugaccaggagcaacugggacac

SEQ ID NO: 303921 - RNA, 23 nt, Human
ugaccauuuuuuaaaaacuugua

SEQ ID NO: 303922 - RNA, 21 nt, Human
ugcagaaaaaccuguggccuu

SEQ ID NO: 303923 - RNA, 23 nt, Human
ugcaguggagcaagagagaccaa

SEQ ID NO: 303924 - RNA, 20 nt, Human
uggaaauagaccuggcagug

SEQ ID NO: 303925 - RNA, 23 nt, Human
uggcaaaugcuagaaaauagcug

SEQ ID NO: 303926 - RNA, 18 nt, Human
uggccucccaccaccaac

SEQ ID NO: 303927 - RNA, 21 nt, Human
uugcaguggagcaagagagac

SEQ ID NO: 303928 - RNA, 21 nt, Human
uuucacagaaaaacaacaaaa

SEQ ID NO: 303929 - RNA, 22 nt, Human
uuuuuuuuuuuuuugcagugga

SEQ ID NO: 303930 - RNA, 19 nt, Human
uuuuuuuuuuuuuuuuugc

SEQ ID NO: 303931 - RNA, 25 nt, Human
uuuuuuuuuuuuuuuuuugcagugg

SEQ ID NO: 303932 - RNA, 27 nt, Human
uuuuuuuuuuuuuuuuuuuuuuugggg

SEQ ID NO: 303933 - RNA, 18 nt, Human
aaaaaaacaaaaaccccc

SEQ ID NO: 303934 - RNA, 21 nt, Human
aaaaaaacaaaaaccccccaa

SEQ ID NO: 303935 - RNA, 22 nt, Human
aaaaaaacaaaaaccccccaaa

SEQ ID NO: 303936 - RNA, 22 nt, Human
aaaaaaacaaaaaccccccaaa

SEQ ID NO: 303937 - RNA, 22 nt, Human
aaaaaaacaaaaaccccccaaa

SEQ ID NO: 303938 - RNA, 20 nt, Human
aaaaaacaaaaaccccccaa

SEQ ID NO: 303939 - RNA, 20 nt, Human
aaaaaacaaaaaccccccaa

SEQ ID NO: 303940 - RNA, 23 nt, Human
aaaaaggaaaauaauaauuugca

SEQ ID NO: 303941 - RNA, 24 nt, Human
aaaaaggaaaauaauaauuugcaa

SEQ ID NO: 303942 - RNA, 24 nt, Human
aaaaaggaaaauaauaauuugcaa

SEQ ID NO: 303943 - RNA, 24 nt, Human
aaaaaggaaaauaauaauuugcaa

SEQ ID NO: 303944 - RNA, 19 nt, Human
aaaacaaaaaccccccaaa

SEQ ID NO: 303945 - RNA, 19 nt, Human
aaaacaaaaaccccccaaa

SEQ ID NO: 303946 - RNA, 22 nt, Human
aaaacaaaaaccccccaaaagc

SEQ ID NO: 303947 - RNA, 22 nt, Human
aaaacaaaaaccccccaaaagc

SEQ ID NO: 303948 - RNA, 22 nt, Human
aaaacaaaaaccccccaaaagc

SEQ ID NO: 303949 - RNA, 24 nt, Human
aaaacaaaaaccccccaaaagcaa

SEQ ID NO: 303950 - RNA, 18 nt, Human
aaaaggacaggguagcag

SEQ ID NO: 303951 - RNA, 18 nt, Human
aaaaggacaggguagcag

SEQ ID NO: 303952 - RNA, 21 nt, Human
aaaaggacaggguagcagcug

SEQ ID NO: 303953 - RNA, 21 nt, Human
aaaaggacaggguagcagcug

SEQ ID NO: 303954 - RNA, 21 nt, Human
aaaaggacaggguagcagcug

SEQ ID NO: 303955 - RNA, 23 nt, Human
aaaauaccuucacaaacacaacu

SEQ ID NO: 303956 - RNA, 23 nt, Human
aaaauaccuucacaaacacaacu

SEQ ID NO: 303957 - RNA, 23 nt, Human
aaaauaccuucacaaacacaacu

SEQ ID NO: 303958 - RNA, 18 nt, Human
aaacaaaaaccccccaaa

SEQ ID NO: 303959 - RNA, 23 nt, Human
aaacaaaaaccccccaaaagcaa

SEQ ID NO: 303960 - RNA, 23 nt, Human
aaacaaaaaccccccaaaagcaa

SEQ ID NO: 303961 - RNA, 24 nt, Human
aaaccuuaagaguucaaagaauuc

SEQ ID NO: 303962 - RNA, 24 nt, Human
aaaccuuaagaguucaaagaauuc

SEQ ID NO: 303963 - RNA, 24 nt, Human
aaaccuuaagaguucaaagaauuc

SEQ ID NO: 303964 - RNA, 18 nt, Human
aaacugccaacaaagcaa

SEQ ID NO: 303965 - RNA, 18 nt, Human
aaacugccaacaaagcaa

SEQ ID NO: 303966 - RNA, 18 nt, Human
aaagcaaaaaauaccuuc

SEQ ID NO: 303967 - RNA, 18 nt, Human
aaagcaaaaaauaccuuc

SEQ ID NO: 303968 - RNA, 18 nt, Human
aaagcaaaaaauaccuuc

SEQ ID NO: 303969 - RNA, 23 nt, Human
aaagcaaaaaauaccuucacaaa

SEQ ID NO: 303970 - RNA, 23 nt, Human
aaagcaaaaaauaccuucacaaa

SEQ ID NO: 303971 - RNA, 23 nt, Human
aaagcaaaaaauaccuucacaaa

SEQ ID NO: 303972 - RNA, 22 nt, Human
aaauucacuuuaaaaucaacua

SEQ ID NO: 303973 - RNA, 23 nt, Human
aaauucacuuuaaaaucaacuaa

SEQ ID NO: 303974 - RNA, 23 nt, Human
aaauucacuuuaaaaucaacuaa

SEQ ID NO: 303975 - RNA, 22 nt, Human
aacaaaaaccccccaaaagcaa

SEQ ID NO: 303976 - RNA, 21 nt, Human
aacacagcuuccacugauacc

SEQ ID NO: 303977 - RNA, 21 nt, Human
aacacagcuuccacugauacc

SEQ ID NO: 303978 - RNA, 22 nt, Human
aacacagcuuccacugauaccc

SEQ ID NO: 303979 - RNA, 22 nt, Human
aacacagcuuccacugauaccc

SEQ ID NO: 303980 - RNA, 19 nt, Human
aacagugauaucggucccc

SEQ ID NO: 303981 - RNA, 19 nt, Human
aacagugauaucggucccc

SEQ ID NO: 303982 - RNA, 19 nt, Human
aacagugauaucggucccc

SEQ ID NO: 303983 - RNA, 24 nt, Human
aaccacaauuaugaugaaguaagc

SEQ ID NO: 303984 - RNA, 24 nt, Human
aaccacaauuaugaugaaguaagc

SEQ ID NO: 303985 - RNA, 24 nt, Human
aaccacaauuaugaugaaguaagc

SEQ ID NO: 303986 - RNA, 27 nt, Human
aacucuaaaaaaacaaaaaccccccaa

SEQ ID NO: 303987 - RNA, 27 nt, Human
aacucuaaaaaaacaaaaaccccccaa

SEQ ID NO: 303988 - RNA, 27 nt, Human
aacucuaaaaaaacaaaaaccccccaa

SEQ ID NO: 303989 - RNA, 22 nt, Human
aacuuacuaaauuaacucuaaa

SEQ ID NO: 303990 - RNA, 18 nt, Human
aagaaaaugaggaagagg

SEQ ID NO: 303991 - RNA, 18 nt, Human
aagaaaaugaggaagagg

SEQ ID NO: 303992 - RNA, 22 nt, Human
aauaccuucacaaacacaacug

SEQ ID NO: 303993 - RNA, 22 nt, Human
aauaccuucacaaacacaacug

SEQ ID NO: 303994 - RNA, 23 nt, Human
aaugugcugguaacugauggacu

SEQ ID NO: 303995 - RNA, 23 nt, Human
aaugugcugguaacugauggacu

SEQ ID NO: 303996 - RNA, 23 nt, Human
aaugugcugguaacugauggacu

SEQ ID NO: 303997 - RNA, 21 nt, Human
acaaaaaccccccaaaagcaa

SEQ ID NO: 303998 - RNA, 21 nt, Human
acaaaaaccccccaaaagcaa

SEQ ID NO: 303999 - RNA, 24 nt, Human
acaaaacacaaauauauuucuuuu

SEQ ID NO: 304000 - RNA, 24 nt, Human
acaaaacacaaauauauuucuuuu

SEQ ID NO: 304001 - RNA, 24 nt, Human
acaaaacacaaauauauuucuuuu

SEQ ID NO: 304002 - RNA, 18 nt, Human
acaaagcaaagauguagc

SEQ ID NO: 304003 - RNA, 18 nt, Human
acaaagcaaagauguagc

SEQ ID NO: 304004 - RNA, 20 nt, Human
acaaagcaaagauguagccu

SEQ ID NO: 304005 - RNA, 20 nt, Human
acaaagcaaagauguagccu

SEQ ID NO: 304006 - RNA, 27 nt, Human
accacaauuaugaugaaguaagccauu

SEQ ID NO: 304007 - RNA, 27 nt, Human
accacaauuaugaugaaguaagccauu

SEQ ID NO: 304008 - RNA, 27 nt, Human
accacaauuaugaugaaguaagccauu

SEQ ID NO: 304009 - RNA, 19 nt, Human
accuuaagaguucaaagaa

SEQ ID NO: 304010 - RNA, 19 nt, Human
accuuaagaguucaaagaa

SEQ ID NO: 304011 - RNA, 19 nt, Human
accuuaagaguucaaagaa

SEQ ID NO: 304012 - RNA, 18 nt, Human
acgugaaacaaauuuacu

SEQ ID NO: 304013 - RNA, 18 nt, Human
agagcaacccaguuaaga

SEQ ID NO: 304014 - RNA, 25 nt, Human
agauuuuaaaaauugcacucuugcu

SEQ ID NO: 304015 - RNA, 25 nt, Human
agauuuuaaaaauugcacucuugcu

SEQ ID NO: 304016 - RNA, 25 nt, Human
agauuuuaaaaauugcacucuugcu

SEQ ID NO: 304017 - RNA, 20 nt, Human
agccuguuacugggccgcag

SEQ ID NO: 304018 - RNA, 22 nt, Human
agcgaggccacagugaagggga

SEQ ID NO: 304019 - RNA, 22 nt, Human
agcgaggccacagugaagggga

SEQ ID NO: 304020 - RNA, 22 nt, Human
agcgaggccacagugaagggga

SEQ ID NO: 304021 - RNA, 19 nt, Human
aggaagaggaaguugaaaa

SEQ ID NO: 304022 - RNA, 18 nt, Human
agggauuucaguagucug

SEQ ID NO: 304023 - RNA, 18 nt, Human
agggauuucaguagucug

SEQ ID NO: 304024 - RNA, 18 nt, Human
agggauuucaguagucug

SEQ ID NO: 304025 - RNA, 21 nt, Human
aguccaggcaccccguggccc

SEQ ID NO: 304026 - RNA, 21 nt, Human
aguccaggcaccccguggccc

SEQ ID NO: 304027 - RNA, 19 nt, Human
auaaaaaucccaguaagac

SEQ ID NO: 304028 - RNA, 22 nt, Human
auaaauuuugugaauguuguca

SEQ ID NO: 304029 - RNA, 22 nt, Human
auaaauuuugugaauguuguca

SEQ ID NO: 304030 - RNA, 22 nt, Human
auaaauuuugugaauguuguca

SEQ ID NO: 304031 - RNA, 22 nt, Human
auaauacacaccauguggauaa

SEQ ID NO: 304032 - RNA, 22 nt, Human
auaauacacaccauguggauaa

SEQ ID NO: 304033 - RNA, 22 nt, Human
auaauacacaccauguggauaa

SEQ ID NO: 304034 - RNA, 21 nt, Human
auaccuucacaaacacaacug

SEQ ID NO: 304035 - RNA, 22 nt, Human
augaaguaagccauuugaaugg

SEQ ID NO: 304036 - RNA, 22 nt, Human
augaaguaagccauuugaaugg

SEQ ID NO: 304037 - RNA, 22 nt, Human
augaaguaagccauuugaaugg

SEQ ID NO: 304038 - RNA, 25 nt, Human
augguaaacaaagagugaaugcacc

SEQ ID NO: 304039 - RNA, 25 nt, Human
augguaaacaaagagugaaugcacc

SEQ ID NO: 304040 - RNA, 25 nt, Human
augguaaacaaagagugaaugcacc

SEQ ID NO: 304041 - RNA, 20 nt, Human
auucuggucuuuauuuuugg

SEQ ID NO: 304042 - RNA, 20 nt, Human
auucuggucuuuauuuuugg

SEQ ID NO: 304043 - RNA, 20 nt, Human
auucuggucuuuauuuuugg

SEQ ID NO: 304044 - RNA, 21 nt, Human
auugaucucauaucaaccaca

SEQ ID NO: 304045 - RNA, 21 nt, Human
auugaucucauaucaaccaca

SEQ ID NO: 304046 - RNA, 21 nt, Human
auugaucucauaucaaccaca

SEQ ID NO: 304047 - RNA, 19 nt, Human
auugcacucuugcuuuugc

SEQ ID NO: 304048 - RNA, 19 nt, Human
auugcacucuugcuuuugc

SEQ ID NO: 304049 - RNA, 19 nt, Human
auugcacucuugcuuuugc

SEQ ID NO: 304050 - RNA, 22 nt, Human
caaaaaauaccuucacaaacac

SEQ ID NO: 304051 - RNA, 22 nt, Human
caaaaaauaccuucacaaacac

SEQ ID NO: 304052 - RNA, 22 nt, Human
caaaaaauaccuucacaaacac

SEQ ID NO: 304053 - RNA, 20 nt, Human
caaaaccccuaacuucuaga

SEQ ID NO: 304054 - RNA, 20 nt, Human
caaaaccccuaacuucuaga

SEQ ID NO: 304055 - RNA, 20 nt, Human
caaaaccccuaacuucuaga

SEQ ID NO: 304056 - RNA, 24 nt, Human
caaagcucucaaaauauaauguua

SEQ ID NO: 304057 - RNA, 24 nt, Human
caaagcucucaaaauauaauguua

SEQ ID NO: 304058 - RNA, 24 nt, Human
caaagcucucaaaauauaauguua

SEQ ID NO: 304059 - RNA, 24 nt, Human
caacaaaaccccuaacuucuagau

SEQ ID NO: 304060 - RNA, 25 nt, Human
caauauauuuuucacaaauuucuca

SEQ ID NO: 304061 - RNA, 25 nt, Human
caauauauuuuucacaaauuucuca

SEQ ID NO: 304062 - RNA, 25 nt, Human
caauauauuuuucacaaauuucuca

SEQ ID NO: 304063 - RNA, 19 nt, Human
cacaaacacaacugaagau

SEQ ID NO: 304064 - RNA, 19 nt, Human
cacaaacacaacugaagau

SEQ ID NO: 304065 - RNA, 19 nt, Human
cacaaacacaacugaagau

SEQ ID NO: 304066 - RNA, 24 nt, Human
cacaacacugucagaaucuaugua

SEQ ID NO: 304067 - RNA, 24 nt, Human
cacaacacugucagaaucuaugua

SEQ ID NO: 304068 - RNA, 24 nt, Human
cacaacacugucagaaucuaugua

SEQ ID NO: 304069 - RNA, 18 nt, Human
cacauaaaauaauaaggu

SEQ ID NO: 304070 - RNA, 22 nt, Human
caccccguggcccaguggcauc

SEQ ID NO: 304071 - RNA, 22 nt, Human
caccccguggcccaguggcauc

SEQ ID NO: 304072 - RNA, 25 nt, Human
cacccugucaugcagcugguaucuu

SEQ ID NO: 304073 - RNA, 25 nt, Human
cacccugucaugcagcugguaucuu

SEQ ID NO: 304074 - RNA, 19 nt, Human
cagauaucucauuauucuc

SEQ ID NO: 304075 - RNA, 19 nt, Human
cagauaucucauuauucuc

SEQ ID NO: 304076 - RNA, 24 nt, Human
cagcacccaaagcucucaaaauau

SEQ ID NO: 304077 - RNA, 24 nt, Human
cagcacccaaagcucucaaaauau

SEQ ID NO: 304078 - RNA, 24 nt, Human
cagcacccaaagcucucaaaauau

SEQ ID NO: 304079 - RNA, 18 nt, Human
cagcugguuuugggaugg

SEQ ID NO: 304080 - RNA, 18 nt, Human
cagcugguuuugggaugg

SEQ ID NO: 304081 - RNA, 23 nt, Human
caguagucugaaaaauugcauac

SEQ ID NO: 304082 - RNA, 23 nt, Human
caguagucugaaaaauugcauac

SEQ ID NO: 304083 - RNA, 23 nt, Human
caguagucugaaaaauugcauac

SEQ ID NO: 304084 - RNA, 22 nt, Human
cauaaaaaucccaguaagacug

SEQ ID NO: 304085 - RNA, 22 nt, Human
cauaaaaaucccaguaagacug

SEQ ID NO: 304086 - RNA, 25 nt, Human
cauaacuuacuaaauuaacucuaaa

SEQ ID NO: 304087 - RNA, 25 nt, Human
cauaacuuacuaaauuaacucuaaa

SEQ ID NO: 304088 - RNA, 22 nt, Human
cauguuggauauugaucucaua

SEQ ID NO: 304089 - RNA, 21 nt, Human
ccaaaaaaugcccagaaaacg

SEQ ID NO: 304090 - RNA, 21 nt, Human
ccaaaaaaugcccagaaaacg

SEQ ID NO: 304091 - RNA, 21 nt, Human
ccaaaaaaugcccagaaaacg

SEQ ID NO: 304092 - RNA, 24 nt, Human
cccgaacuucuuccaaaaugauuu

SEQ ID NO: 304093 - RNA, 24 nt, Human
cccgaacuucuuccaaaaugauuu

SEQ ID NO: 304094 - RNA, 18 nt, Human
cggugauuuuuuuccugg

SEQ ID NO: 304095 - RNA, 18 nt, Human
cggugauuuuuuuccugg

SEQ ID NO: 304096 - RNA, 18 nt, Human
cggugauuuuuuuccugg

SEQ ID NO: 304097 - RNA, 20 nt, Human
cuaaaaaaacaaaaaccccc

SEQ ID NO: 304098 - RNA, 20 nt, Human
cuaaaaaaacaaaaaccccc

SEQ ID NO: 304099 - RNA, 22 nt, Human
cucacaaaaaccuuaagaguuc

SEQ ID NO: 304100 - RNA, 22 nt, Human
cucacaaaaaccuuaagaguuc

SEQ ID NO: 304101 - RNA, 22 nt, Human
cucacaaaaaccuuaagaguuc

SEQ ID NO: 304102 - RNA, 20 nt, Human
cucacauaaaauaauaaggu

SEQ ID NO: 304103 - RNA, 22 nt, Human
cucuaaaaaaacaaaaaccccc

SEQ ID NO: 304104 - RNA, 25 nt, Human
cucuaaaaaaacaaaaaccccccaa

SEQ ID NO: 304105 - RNA, 25 nt, Human
cucuaaaaaaacaaaaaccccccaa

SEQ ID NO: 304106 - RNA, 25 nt, Human
cucuaaaaaaacaaaaaccccccaa

SEQ ID NO: 304107 - RNA, 20 nt, Human
cugaagauggaggcucuacc

SEQ ID NO: 304108 - RNA, 20 nt, Human
cugaagauggaggcucuacc

SEQ ID NO: 304109 - RNA, 20 nt, Human
cugaagauggaggcucuacc

SEQ ID NO: 304110 - RNA, 21 nt, Human
cuggagcuggcaaugucccug

SEQ ID NO: 304111 - RNA, 21 nt, Human
cuggagcuggcaaugucccug

SEQ ID NO: 304112 - RNA, 21 nt, Human
cuuacauuaaaaggacagggu

SEQ ID NO: 304113 - RNA, 21 nt, Human
cuuacauuaaaaggacagggu

SEQ ID NO: 304114 - RNA, 21 nt, Human
cuuacauuaaaaggacagggu

SEQ ID NO: 304115 - RNA, 23 nt, Human
cuugaacuaagacauuucuaaca

SEQ ID NO: 304116 - RNA, 23 nt, Human
cuugaacuaagacauuucuaaca

SEQ ID NO: 304117 - RNA, 24 nt, Human
cuuucccgaacuucuuccaaaaug

SEQ ID NO: 304118 - RNA, 24 nt, Human
cuuucccgaacuucuuccaaaaug

SEQ ID NO: 304119 - RNA, 24 nt, Human
gaaauacaauauauuuuucacaaa

SEQ ID NO: 304120 - RNA, 24 nt, Human
gaaauacaauauauuuuucacaaa

SEQ ID NO: 304121 - RNA, 24 nt, Human
gaaauacaauauauuuuucacaaa

SEQ ID NO: 304122 - RNA, 22 nt, Human
gaagaggaaguugaaaacugcc

SEQ ID NO: 304123 - RNA, 22 nt, Human
gaagaggaaguugaaaacugcc

SEQ ID NO: 304124 - RNA, 20 nt, Human
gaaggcauuuauagaaaacu

SEQ ID NO: 304125 - RNA, 20 nt, Human
gaaggcauuuauagaaaacu

SEQ ID NO: 304126 - RNA, 20 nt, Human
gaaggcauuuauagaaaacu

SEQ ID NO: 304127 - RNA, 19 nt, Human
gaggccacagugaagggga

SEQ ID NO: 304128 - RNA, 19 nt, Human
gaggccacagugaagggga

SEQ ID NO: 304129 - RNA, 19 nt, Human
gaggccacagugaagggga

SEQ ID NO: 304130 - RNA, 18 nt, Human
gagucauccaucucaaga

SEQ ID NO: 304131 - RNA, 18 nt, Human
gagucauccaucucaaga

SEQ ID NO: 304132 - RNA, 23 nt, Human
gccaacaaagcaaagauguagcc

SEQ ID NO: 304133 - RNA, 22 nt, Human
ggaggcucuaccuaggagaaug

SEQ ID NO: 304134 - RNA, 22 nt, Human
ggaggcucuaccuaggagaaug

SEQ ID NO: 304135 - RNA, 22 nt, Human
ggaggcucuaccuaggagaaug

SEQ ID NO: 304136 - RNA, 22 nt, Human
ggcaaccuuuugaaacaucaaa

SEQ ID NO: 304137 - RNA, 22 nt, Human
ggcaaccuuuugaaacaucaaa

SEQ ID NO: 304138 - RNA, 22 nt, Human
ggcaaccuuuugaaacaucaaa

SEQ ID NO: 304139 - RNA, 23 nt, Human
ggcaaccuuuugaaacaucaaaa

SEQ ID NO: 304140 - RNA, 23 nt, Human
ggcaaccuuuugaaacaucaaaa

SEQ ID NO: 304141 - RNA, 23 nt, Human
ggcaaccuuuugaaacaucaaaa

SEQ ID NO: 304142 - RNA, 23 nt, Human
ggucccucuccuccaauuaugaa

SEQ ID NO: 304143 - RNA, 18 nt, Human
ggugauuuuuuuccuggc

SEQ ID NO: 304144 - RNA, 18 nt, Human
ggugauuuuuuuccuggc

SEQ ID NO: 304145 - RNA, 18 nt, Human
ggugauuuuuuuccuggc

SEQ ID NO: 304146 - RNA, 19 nt, Human
gguggcaugccucuaaaac

SEQ ID NO: 304147 - RNA, 18 nt, Human
guuacaauuaagguaucc

SEQ ID NO: 304148 - RNA, 23 nt, Human
guuacaauuaagguauccagaaa

SEQ ID NO: 304149 - RNA, 23 nt, Human
guuacaauuaagguauccagaaa

SEQ ID NO: 304150 - RNA, 23 nt, Human
guuacaauuaagguauccagaaa

SEQ ID NO: 304151 - RNA, 25 nt, Human
uaaaaaaacaaaaaccccccaaaag

SEQ ID NO: 304152 - RNA, 25 nt, Human
uaaaaaaacaaaaaccccccaaaag

SEQ ID NO: 304153 - RNA, 25 nt, Human
uaaaaaaacaaaaaccccccaaaag

SEQ ID NO: 304154 - RNA, 23 nt, Human
uaaaacaguucauauaauuguug

SEQ ID NO: 304155 - RNA, 23 nt, Human
uaaaacaguucauauaauuguug

SEQ ID NO: 304156 - RNA, 23 nt, Human
uaaaacaguucauauaauuguug

SEQ ID NO: 304157 - RNA, 18 nt, Human
uaaacaaagagugaaugc

SEQ ID NO: 304158 - RNA, 18 nt, Human
uaaacaaagagugaaugc

SEQ ID NO: 304159 - RNA, 18 nt, Human
uaaacaaagagugaaugc

SEQ ID NO: 304160 - RNA, 23 nt, Human
uaaauaaaccauucugaaguaaa

SEQ ID NO: 304161 - RNA, 23 nt, Human
uaaauaaaccauucugaaguaaa

SEQ ID NO: 304162 - RNA, 23 nt, Human
uaaauaaaccauucugaaguaaa

SEQ ID NO: 304163 - RNA, 20 nt, Human
uaacauccacccacaaagac

SEQ ID NO: 304164 - RNA, 20 nt, Human
uaacauccacccacaaagac

SEQ ID NO: 304165 - RNA, 20 nt, Human
uaacauccacccacaaagac

SEQ ID NO: 304166 - RNA, 22 nt, Human
uagccuguuacugggccgcagu

SEQ ID NO: 304167 - RNA, 22 nt, Human
uaguagugugucggugauuuuu

SEQ ID NO: 304168 - RNA, 22 nt, Human
uaguagugugucggugauuuuu

SEQ ID NO: 304169 - RNA, 22 nt, Human
uaguagugugucggugauuuuu

SEQ ID NO: 304170 - RNA, 21 nt, Human
uauagaaaacucaauuaugca

SEQ ID NO: 304171 - RNA, 21 nt, Human
uauagaaaacucaauuaugca

SEQ ID NO: 304172 - RNA, 21 nt, Human
uauagaaaacucaauuaugca

SEQ ID NO: 304173 - RNA, 23 nt, Human
uauuacaaauguuuaaaaucuua

SEQ ID NO: 304174 - RNA, 23 nt, Human
uauuacaaauguuuaaaaucuua

SEQ ID NO: 304175 - RNA, 23 nt, Human
uauuacaaauguuuaaaaucuua

SEQ ID NO: 304176 - RNA, 18 nt, Human
ucacaaaaaccuuaagag

SEQ ID NO: 304177 - RNA, 19 nt, Human
ucacaaaaaccuuaagagu

SEQ ID NO: 304178 - RNA, 19 nt, Human
ucacaaaaaccuuaagagu

SEQ ID NO: 304179 - RNA, 22 nt, Human
ucagauaucucauuauucucac

SEQ ID NO: 304180 - RNA, 21 nt, Human
ucagcacccaaagcucucaaa

SEQ ID NO: 304181 - RNA, 21 nt, Human
ucagcacccaaagcucucaaa

SEQ ID NO: 304182 - RNA, 21 nt, Human
ucagcacccaaagcucucaaa

SEQ ID NO: 304183 - RNA, 27 nt, Human
ucaguccauuuuucuccaacaaaaccc

SEQ ID NO: 304184 - RNA, 27 nt, Human
ucaguccauuuuucuccaacaaaaccc

SEQ ID NO: 304185 - RNA, 27 nt, Human
ucaguccauuuuucuccaacaaaaccc

SEQ ID NO: 304186 - RNA, 22 nt, Human
ucccaguaagacugaauaguuu

SEQ ID NO: 304187 - RNA, 22 nt, Human
ucccaguaagacugaauaguuu

SEQ ID NO: 304188 - RNA, 22 nt, Human
ucccaguaagacugaauaguuu

SEQ ID NO: 304189 - RNA, 18 nt, Human
ucgguccccaguauuuaa

SEQ ID NO: 304190 - RNA, 18 nt, Human
ucgguccccaguauuuaa

SEQ ID NO: 304191 - RNA, 18 nt, Human
ucgguccccaguauuuaa

SEQ ID NO: 304192 - RNA, 21 nt, Human
ucuaaaaaaacaaaaaccccc

SEQ ID NO: 304193 - RNA, 21 nt, Human
ucuaaaaaaacaaaaaccccc

SEQ ID NO: 304194 - RNA, 21 nt, Human
ucuaaagcucccaaaagacgc

SEQ ID NO: 304195 - RNA, 21 nt, Human
ucuaaagcucccaaaagacgc

SEQ ID NO: 304196 - RNA, 23 nt, Human
ucuccaacaaaaccccuaacuuc

SEQ ID NO: 304197 - RNA, 24 nt, Human
ucuccaacaaaaccccuaacuucu

SEQ ID NO: 304198 - RNA, 24 nt, Human
ucuccaacaaaaccccuaacuucu

SEQ ID NO: 304199 - RNA, 18 nt, Human
ucuuucccgaacuucuuc

SEQ ID NO: 304200 - RNA, 18 nt, Human
ucuuucccgaacuucuuc

SEQ ID NO: 304201 - RNA, 19 nt, Human
ugaaugauauagagguagc

SEQ ID NO: 304202 - RNA, 19 nt, Human
ugaaugauauagagguagc

SEQ ID NO: 304203 - RNA, 19 nt, Human
ugaaugauauagagguagc

SEQ ID NO: 304204 - RNA, 22 nt, Human
ugaaugguaaacaaagagugaa

SEQ ID NO: 304205 - RNA, 22 nt, Human
ugaaugguaaacaaagagugaa

SEQ ID NO: 304206 - RNA, 22 nt, Human
ugaaugguaaacaaagagugaa

SEQ ID NO: 304207 - RNA, 24 nt, Human
ugacaauacuuaucagacaucagc

SEQ ID NO: 304208 - RNA, 24 nt, Human
ugacaauacuuaucagacaucagc

SEQ ID NO: 304209 - RNA, 24 nt, Human
ugacaauacuuaucagacaucagc

SEQ ID NO: 304210 - RNA, 20 nt, Human
ugagugaaccuaauaaaugu

SEQ ID NO: 304211 - RNA, 20 nt, Human
ugagugaaccuaauaaaugu

SEQ ID NO: 304212 - RNA, 20 nt, Human
ugagugaaccuaauaaaugu

SEQ ID NO: 304213 - RNA, 23 nt, Human
ugcacacugacaauacuuaucag

SEQ ID NO: 304214 - RNA, 23 nt, Human
ugcacacugacaauacuuaucag

SEQ ID NO: 304215 - RNA, 23 nt, Human
ugcacacugacaauacuuaucag

SEQ ID NO: 304216 - RNA, 19 nt, Human
ugcacugaaaaauguggag

SEQ ID NO: 304217 - RNA, 20 nt, Human
ugcauaaaaaucccaguaag

SEQ ID NO: 304218 - RNA, 20 nt, Human
ugcauaaaaaucccaguaag

SEQ ID NO: 304219 - RNA, 20 nt, Human
ugcauaaaaaucccaguaag

SEQ ID NO: 304220 - RNA, 21 nt, Human
ugcauacaacaggaacaaagu

SEQ ID NO: 304221 - RNA, 21 nt, Human
ugcauacaacaggaacaaagu

SEQ ID NO: 304222 - RNA, 21 nt, Human
ugcauacaacaggaacaaagu

SEQ ID NO: 304223 - RNA, 24 nt, Human
ugccaacaaagcaaagauguagcc

SEQ ID NO: 304224 - RNA, 19 nt, Human
ugccuuauuguuuugaauu

SEQ ID NO: 304225 - RNA, 19 nt, Human
ugccuuauuguuuugaauu

SEQ ID NO: 304226 - RNA, 18 nt, Human
uggaggguuucucugcac

SEQ ID NO: 304227 - RNA, 18 nt, Human
uggaggguuucucugcac

SEQ ID NO: 304228 - RNA, 18 nt, Human
uggaggguuucucugcac

SEQ ID NO: 304229 - RNA, 22 nt, Human
uggcaaugucccugacuucagu

SEQ ID NO: 304230 - RNA, 22 nt, Human
uggcaaugucccugacuucagu

SEQ ID NO: 304231 - RNA, 23 nt, Human
uggcccaguggcaucuauugcaa

SEQ ID NO: 304232 - RNA, 23 nt, Human
uggcccaguggcaucuauugcaa

SEQ ID NO: 304233 - RNA, 19 nt, Human
uggcucugggcaacaacaa

SEQ ID NO: 304234 - RNA, 19 nt, Human
uggcucugggcaacaacaa

SEQ ID NO: 304235 - RNA, 19 nt, Human
uggcucugggcaacaacaa

SEQ ID NO: 304236 - RNA, 24 nt, Human
uggucccucuccuccaauuaugaa

SEQ ID NO: 304237 - RNA, 24 nt, Human
ugucaugcagcugguaucuuuccc

SEQ ID NO: 304238 - RNA, 24 nt, Human
ugucaugcagcugguaucuuuccc

SEQ ID NO: 304239 - RNA, 22 nt, Human
uguuaauuacauguaacaccua

SEQ ID NO: 304240 - RNA, 22 nt, Human
uguuaauuacauguaacaccua

SEQ ID NO: 304241 - RNA, 22 nt, Human
uguuaauuacauguaacaccua

SEQ ID NO: 304242 - RNA, 21 nt, Human
uuaaaaagcaaaaaauaccuu

SEQ ID NO: 304243 - RNA, 21 nt, Human
uuaaaaagcaaaaaauaccuu

SEQ ID NO: 304244 - RNA, 21 nt, Human
uuaaaaagcaaaaaauaccuu

SEQ ID NO: 304245 - RNA, 24 nt, Human
uuaacucuaaaaaaacaaaaaccc

SEQ ID NO: 304246 - RNA, 24 nt, Human
uuaacucuaaaaaaacaaaaaccc

SEQ ID NO: 304247 - RNA, 24 nt, Human
uuaacucuaaaaaaacaaaaaccc

SEQ ID NO: 304248 - RNA, 21 nt, Human
uuaauaacauccacccacaaa

SEQ ID NO: 304249 - RNA, 21 nt, Human
uuaauaacauccacccacaaa

SEQ ID NO: 304250 - RNA, 21 nt, Human
uuaauaacauccacccacaaa

SEQ ID NO: 304251 - RNA, 22 nt, Human
uuacaauuaagguauccagaaa

SEQ ID NO: 304252 - RNA, 22 nt, Human
uuacaauuaagguauccagaaa

SEQ ID NO: 304253 - RNA, 22 nt, Human
uuacaauuaagguauccagaaa

SEQ ID NO: 304254 - RNA, 21 nt, Human
uuacgugaaacaaauuuacuu

SEQ ID NO: 304255 - RNA, 21 nt, Human
uuacgugaaacaaauuuacuu

SEQ ID NO: 304256 - RNA, 24 nt, Human
uuacuaaauuaacucuaaaaaaac

SEQ ID NO: 304257 - RNA, 24 nt, Human
uuacuaaauuaacucuaaaaaaac

SEQ ID NO: 304258 - RNA, 24 nt, Human
uuacuaaauuaacucuaaaaaaac

SEQ ID NO: 304259 - RNA, 20 nt, Human
uuaguacaaacaaaacacaa

SEQ ID NO: 304260 - RNA, 21 nt, Human
uuaguacaaacaaaacacaaa

SEQ ID NO: 304261 - RNA, 21 nt, Human
uuaguacaaacaaaacacaaa

SEQ ID NO: 304262 - RNA, 21 nt, Human
uucagauaucucauuauucuc

SEQ ID NO: 304263 - RNA, 21 nt, Human
uucagauaucucauuauucuc

SEQ ID NO: 304264 - RNA, 24 nt, Human
uucauguuuauaugugaguuucua

SEQ ID NO: 304265 - RNA, 24 nt, Human
uucauguuuauaugugaguuucua

SEQ ID NO: 304266 - RNA, 25 nt, Human
uucauguuuauaugugaguuucuau

SEQ ID NO: 304267 - RNA, 23 nt, Human
uucucuuuggucccucuccucca

SEQ ID NO: 304268 - RNA, 23 nt, Human
uucucuuuggucccucuccucca

SEQ ID NO: 304269 - RNA, 19 nt, Human
uucuggucuuuauuuuugg

SEQ ID NO: 304270 - RNA, 19 nt, Human
uucuggucuuuauuuuugg

SEQ ID NO: 304271 - RNA, 19 nt, Human
uucuggucuuuauuuuugg

SEQ ID NO: 304272 - RNA, 21 nt, Human
uugaaugauauagagguagca

SEQ ID NO: 304273 - RNA, 21 nt, Human
uugaaugauauagagguagca

SEQ ID NO: 304274 - RNA, 21 nt, Human
uugaaugauauagagguagca

SEQ ID NO: 304275 - RNA, 18 nt, Human
uuuccuggcauuaacugg

SEQ ID NO: 304276 - RNA, 18 nt, Human
uuuccuggcauuaacugg

SEQ ID NO: 304277 - RNA, 18 nt, Human
uuuccuggcauuaacugg

SEQ ID NO: 304278 - RNA, 19 nt, Human
uuuuacugaaggcucacau

SEQ ID NO: 304279 - RNA, 19 nt, Human
uuuuacugaaggcucacau

SEQ ID NO: 304280 - RNA, 23 nt, Human
aaaacuaaaggucuuuauuuaaa

SEQ ID NO: 304281 - RNA, 19 nt, Human
aagcccggaaguaaccggg

SEQ ID NO: 304282 - RNA, 20 nt, Human
auguuaauuuaucuaggaaa

SEQ ID NO: 304283 - RNA, 18 nt, Human
caagcccggaaguaaccg

SEQ ID NO: 304284 - RNA, 18 nt, Human
caugaaucuuacccagug

SEQ ID NO: 304285 - RNA, 21 nt, Human
cggaagaaagcugcaguagcg

SEQ ID NO: 304286 - RNA, 25 nt, Human
uacccaguguuuaccgaaguauuua

SEQ ID NO: 304287 - RNA, 18 nt, Human
uccgaaaacugcuggaag

SEQ ID NO: 304288 - RNA, 26 nt, Human
ugagagcagucgucgcucgcaagccc

SEQ ID NO: 304289 - RNA, 24 nt, Human
uggccuuugagagcagucgucgcu

SEQ ID NO: 304290 - RNA, 18 nt, Human
ugguauuuuauacauuuc

SEQ ID NO: 304291 - RNA, 18 nt, Human
ugguggccuccuugcggu

SEQ ID NO: 304292 - RNA, 30 nt, Human
uugguaaagcaguucauacagcuuuuuucu

SEQ ID NO: 304293 - RNA, 21 nt, Human
uuuaaaaucuggcauuguauu

SEQ ID NO: 304294 - RNA, 23 nt, Human
uuuccucaguagugauauuuggu

SEQ ID NO: 304295 - RNA, 19 nt, Human
uuuuuuuuuuuuuugagga

SEQ ID NO: 304296 - RNA, 22 nt, Human
uuuuuuuuuuuuuuuuuugagg

SEQ ID NO: 304297 - RNA, 21 nt, Human
aauaacagaaaggauaagcac

SEQ ID NO: 304298 - RNA, 20 nt, Human
agaaaaagagagacugugaa

SEQ ID NO: 304299 - RNA, 21 nt, Human
agaauggaacucugucuuuaa

SEQ ID NO: 304300 - RNA, 22 nt, Human
auaagcacccucaccacccaag

SEQ ID NO: 304301 - RNA, 20 nt, Human
auucaagagguccccagaaa

SEQ ID NO: 304302 - RNA, 23 nt, Human
auuuuuuuaauagaaaccacauc

SEQ ID NO: 304303 - RNA, 24 nt, Human
cacaaugacaugcugcuuccagaa

SEQ ID NO: 304304 - RNA, 22 nt, Human
cacagccaaguuccuagaaaaa

SEQ ID NO: 304305 - RNA, 25 nt, Human
cacagccaaguuccuagaaaaagag

SEQ ID NO: 304306 - RNA, 19 nt, Human
caguuuaaucaucgcccuc

SEQ ID NO: 304307 - RNA, 19 nt, Human
cuacaaaauaacagaaagg

SEQ ID NO: 304308 - RNA, 20 nt, Human
cucaccacccaagccuuugg

SEQ ID NO: 304309 - RNA, 23 nt, Human
cuuuaugaaguuuugaaaugaga

SEQ ID NO: 304310 - RNA, 24 nt, Human
gaugaauuugucucugaggcagga

SEQ ID NO: 304311 - RNA, 20 nt, Human
uaagcacccucaccacccaa

SEQ ID NO: 304312 - RNA, 25 nt, Human
uaagcacccucaccacccaagccuu

SEQ ID NO: 304313 - RNA, 18 nt, Human
uccuagaaaaagagagac

SEQ ID NO: 304314 - RNA, 22 nt, Human
ucuacaaaauaacagaaaggau

SEQ ID NO: 304315 - RNA, 24 nt, Human
ucuauucucuuaccacaaugacau

SEQ ID NO: 304316 - RNA, 23 nt, Human
ucuuaccacaaugacaugcugcu

SEQ ID NO: 304317 - RNA, 18 nt, Human
ugaggcaggacaacacag

SEQ ID NO: 304318 - RNA, 20 nt, Human
ugaggcaggacaacacagcc

SEQ ID NO: 304319 - RNA, 23 nt, Human
uggaaauuccaugcuguguugau

SEQ ID NO: 304320 - RNA, 27 nt, Human
uguucuaccaaccuuuccuuguuuuca

SEQ ID NO: 304321 - RNA, 23 nt, Human
uucaaacucaggccaguuuaauc

SEQ ID NO: 304322 - RNA, 24 nt, Human
uuccuuguuuucaaaggcaggggc

SEQ ID NO: 304323 - RNA, 20 nt, Human
aacuacguaaaaaacagagc

SEQ ID NO: 304324 - RNA, 19 nt, Human
acaaagaaauaucucccuu

SEQ ID NO: 304325 - RNA, 19 nt, Human
acaaagaaauaucucccuu

SEQ ID NO: 304326 - RNA, 24 nt, Human
caacuagaagguacaaucucucag

SEQ ID NO: 304327 - RNA, 26 nt, Human
ccucccgcggaagggaagcggggaac

SEQ ID NO: 304328 - RNA, 19 nt, Human
cuacaaucacaucauguug

SEQ ID NO: 304329 - RNA, 18 nt, Human
cugcuuggcuuugaccau

SEQ ID NO: 304330 - RNA, 23 nt, Human
cuuugaccauacacauuucugcc

SEQ ID NO: 304331 - RNA, 24 nt, Human
uacagaaucugcacaaagggacau

SEQ ID NO: 304332 - RNA, 20 nt, Human
uacguaaaaaacagagcugu

SEQ ID NO: 304333 - RNA, 21 nt, Human
uguaacuacguaaaaaacaga

SEQ ID NO: 304334 - RNA, 23 nt, Human
uuggauggcuagcuaacucuccc

SEQ ID NO: 304335 - RNA, 26 nt, Human
aaaaaaaaaugcugaguaacagaaaa

SEQ ID NO: 304336 - RNA, 20 nt, Human
aaaagcagcuaucugugaac

SEQ ID NO: 304337 - RNA, 20 nt, Human
aaaccugaacaugcuuagca

SEQ ID NO: 304338 - RNA, 21 nt, Human
aaguaaaccugaacaugcuua

SEQ ID NO: 304339 - RNA, 20 nt, Human
agacaaugcuggccuucuga

SEQ ID NO: 304340 - RNA, 19 nt, Human
aggcaaaaccuuacaagga

SEQ ID NO: 304341 - RNA, 19 nt, Human
auaaaaagcagcuaucugu

SEQ ID NO: 304342 - RNA, 19 nt, Human
caacaaaguaaaccugaac

SEQ ID NO: 304343 - RNA, 18 nt, Human
caagacaucugaugucag

SEQ ID NO: 304344 - RNA, 19 nt, Human
caccugaugguuuggagua

SEQ ID NO: 304345 - RNA, 22 nt, Human
cccccacucggccgcccgcacc

SEQ ID NO: 304346 - RNA, 19 nt, Human
ccgcaccgcgcggcgcugc

SEQ ID NO: 304347 - RNA, 22 nt, Human
cugauauaaaaaaaaaugcuga

SEQ ID NO: 304348 - RNA, 22 nt, Human
cugaugucaguuucccauuguu

SEQ ID NO: 304349 - RNA, 22 nt, Human
gcccccacucggccgcccgcac

SEQ ID NO: 304350 - RNA, 19 nt, Human
gccccuauggcuuaagagu

SEQ ID NO: 304351 - RNA, 23 nt, Human
ggaaaaccagccccuauggcuua

SEQ ID NO: 304352 - RNA, 25 nt, Human
ggaaaaccagccccuauggcuuaag

SEQ ID NO: 304353 - RNA, 20 nt, Human
gugaaccagguaacugugug

SEQ ID NO: 304354 - RNA, 19 nt, Human
uaaaaagcagcuaucugug

SEQ ID NO: 304355 - RNA, 22 nt, Human
uaaauaagcccuguacagaaca

SEQ ID NO: 304356 - RNA, 21 nt, Human
uaagcccuguacagaacacag

SEQ ID NO: 304357 - RNA, 19 nt, Human
uccauaaugguuccuagga

SEQ ID NO: 304358 - RNA, 21 nt, Human
ugaaaaccaaaguccaauuuc

SEQ ID NO: 304359 - RNA, 20 nt, Human
ugaaauacuaugaucuuguu

SEQ ID NO: 304360 - RNA, 23 nt, Human
uggaagaucuguuuauuaacagu

SEQ ID NO: 304361 - RNA, 19 nt, Human
uguacagaacacaggcacu

SEQ ID NO: 304362 - RNA, 21 nt, Human
ugucucauccuucuuggcaaa

SEQ ID NO: 304363 - RNA, 25 nt, Human
ugucucauccuucuuggcaaaagua

SEQ ID NO: 304364 - RNA, 19 nt, Human
ugucugaaaaccaaagucc

SEQ ID NO: 304365 - RNA, 18 nt, Human
ugugucaaaauucuuaag

SEQ ID NO: 304366 - RNA, 26 nt, Human
uucacaaacaucaacaaaguaaaccu

SEQ ID NO: 304367 - RNA, 24 nt, Human
uucuuugcugacauuacuuuugac

SEQ ID NO: 304368 - RNA, 20 nt, Human
uugucucauccuucuuggca

SEQ ID NO: 304369 - RNA, 24 nt, Human
uuucccauuguuuugcuucacaaa

SEQ ID NO: 304370 - RNA, 23 nt, Human
uuuuucguaacuuuacacaaggg

SEQ ID NO: 304371 - RNA, 21 nt, Human
aaagauugggaggauauacaa

SEQ ID NO: 304372 - RNA, 24 nt, Human
acauuaaagaauaaaccaaaggaa

SEQ ID NO: 304373 - RNA, 20 nt, Human
agaauaaaccaaaggaaaac

SEQ ID NO: 304374 - RNA, 21 nt, Human
augaaaaaagacauuacaaaa

SEQ ID NO: 304375 - RNA, 21 nt, Human
caucuuugcuuuuaauuaaag

SEQ ID NO: 304376 - RNA, 20 nt, Human
cauuguaaaaugaaaaaaga

SEQ ID NO: 304377 - RNA, 21 nt, Human
uacacaaaauacaaaacugga

SEQ ID NO: 304378 - RNA, 23 nt, Human
uauaaaauuaauaguugauucaa

SEQ ID NO: 304379 - RNA, 25 nt, Human
uauuuuucuuuaaguuauaaaauua

SEQ ID NO: 304380 - RNA, 19 nt, Human
uccaugcauucuucauuca

SEQ ID NO: 304381 - RNA, 19 nt, Human
aaaaaaaaaaagugaagga

SEQ ID NO: 304382 - RNA, 28 nt, Human
aaaaaaagugaaggauagaccgguaccc

SEQ ID NO: 304383 - RNA, 19 nt, Human
aaacaauauacgaaaaagc

SEQ ID NO: 304384 - RNA, 19 nt, Human
aaaccagugcugaaagcug

SEQ ID NO: 304385 - RNA, 23 nt, Human
aaaccagugcugaaagcugauag

SEQ ID NO: 304386 - RNA, 19 nt, Human
aaaggaaaaaaaugaaaaa

SEQ ID NO: 304387 - RNA, 20 nt, Human
aaauaccugcaaacacuuuu

SEQ ID NO: 304388 - RNA, 19 nt, Human
aaggaaaaaaaugaaaaag

SEQ ID NO: 304389 - RNA, 24 nt, Human
aauaauagaugacaguaaaaagaa

SEQ ID NO: 304390 - RNA, 21 nt, Human
aauucaaagggaaagaaacaa

SEQ ID NO: 304391 - RNA, 22 nt, Human
acaaccagaaagaauaacaccu

SEQ ID NO: 304392 - RNA, 18 nt, Human
accaagcacuuucuacuu

SEQ ID NO: 304393 - RNA, 25 nt, Human
acccucccggcucucgugccgaauu

SEQ ID NO: 304394 - RNA, 21 nt, Human
acugcccccacaggcauaugc

SEQ ID NO: 304395 - RNA, 23 nt, Human
agacagaaauaccaagcacuuuc

SEQ ID NO: 304396 - RNA, 23 nt, Human
agcugccagccaaaggaaaaaaa

SEQ ID NO: 304397 - RNA, 24 nt, Human
aggaaaauccagaaaugaaaaaaa

SEQ ID NO: 304398 - RNA, 25 nt, Human
aggcauaugcucuccucuggguaug

SEQ ID NO: 304399 - RNA, 22 nt, Human
aguaaaaagaaauucaaaggga

SEQ ID NO: 304400 - RNA, 18 nt, Human
aguuauuuuaacuccugu

SEQ ID NO: 304401 - RNA, 19 nt, Human
augccugcaaaaccuagaa

SEQ ID NO: 304402 - RNA, 19 nt, Human
caacaucacugggaagagc

SEQ ID NO: 304403 - RNA, 21 nt, Human
cacaaccagaaagaauaacac

SEQ ID NO: 304404 - RNA, 21 nt, Human
cacagcaaugacuuuggaugc

SEQ ID NO: 304405 - RNA, 18 nt, Human
cagaaaugaaaaaaaaaa

SEQ ID NO: 304406 - RNA, 23 nt, Human
caggaaagcuuagcaucagccaa

SEQ ID NO: 304407 - RNA, 21 nt, Human
cagugguccccucuacccucc

SEQ ID NO: 304408 - RNA, 18 nt, Human
caucagcacugcccccac

SEQ ID NO: 304409 - RNA, 19 nt, Human
cccaggaaaauccagaaau

SEQ ID NO: 304410 - RNA, 22 nt, Human
cuccaaaggcuacagcucaucu

SEQ ID NO: 304411 - RNA, 24 nt, Human
cugcaaaaccuagaaaaaaaaaga

SEQ ID NO: 304412 - RNA, 24 nt, Human
cugggaagagcugccagccaaagg

SEQ ID NO: 304413 - RNA, 23 nt, Human
cuuccagguuuaucaucaucugu

SEQ ID NO: 304414 - RNA, 20 nt, Human
gaaaucccaggaaaauccag

SEQ ID NO: 304415 - RNA, 21 nt, Human
gaaauucaaagggaaagaaac

SEQ ID NO: 304416 - RNA, 22 nt, Human
gaaggcaggacccagcuccauu

SEQ ID NO: 304417 - RNA, 21 nt, Human
gacccagcuccauuaaagcuc

SEQ ID NO: 304418 - RNA, 19 nt, Human
gcaaaaggccaacucugca

SEQ ID NO: 304419 - RNA, 23 nt, Human
gcagugguccccucuacccuccc

SEQ ID NO: 304420 - RNA, 21 nt, Human
gccaaaggaaaaaaaugaaaa

SEQ ID NO: 304421 - RNA, 20 nt, Human
ggaaaauccagaaaugaaaa

SEQ ID NO: 304422 - RNA, 19 nt, Human
gguugacugagaaaaccug

SEQ ID NO: 304423 - RNA, 20 nt, Human
guagaauauacuauauaucc

SEQ ID NO: 304424 - RNA, 19 nt, Human
gugcuagaaucucacaacc

SEQ ID NO: 304425 - RNA, 23 nt, Human
uaacaaaaccagugcugaaagcu

SEQ ID NO: 304426 - RNA, 25 nt, Human
uaacaaaaccagugcugaaagcuga

SEQ ID NO: 304427 - RNA, 19 nt, Human
uaacuuaauucaaaagcaa

SEQ ID NO: 304428 - RNA, 22 nt, Human
uaagacagaaauaccaagcacu

SEQ ID NO: 304429 - RNA, 18 nt, Human
uaaggaacaucuauguuc

SEQ ID NO: 304430 - RNA, 18 nt, Human
uacagaggguuuccuagu

SEQ ID NO: 304431 - RNA, 22 nt, Human
uaccaagcacuuucuacuuuug

SEQ ID NO: 304432 - RNA, 21 nt, Human
uacgaaaaagcuaugggguaa

SEQ ID NO: 304433 - RNA, 18 nt, Human
uacuauauauccauaucc

SEQ ID NO: 304434 - RNA, 19 nt, Human
uacuauauauccauaucca

SEQ ID NO: 304435 - RNA, 21 nt, Human
uagaauauacuauauauccau

SEQ ID NO: 304436 - RNA, 19 nt, Human
uagggcgcauaccaggaaa

SEQ ID NO: 304437 - RNA, 23 nt, Human
uaggucuccaaaggcuacagcuc

SEQ ID NO: 304438 - RNA, 23 nt, Human
uaugugggaaguugugcgacugg

SEQ ID NO: 304439 - RNA, 20 nt, Human
uccaaauaccauuuuccuua

SEQ ID NO: 304440 - RNA, 20 nt, Human
uccagauaaccugucaauuc

SEQ ID NO: 304441 - RNA, 19 nt, Human
ucugcagggauauguaaag

SEQ ID NO: 304442 - RNA, 20 nt, Human
ugaaaaaaaaaaagugaagg

SEQ ID NO: 304443 - RNA, 22 nt, Human
ugagaaaaccugagaaauagca

SEQ ID NO: 304444 - RNA, 18 nt, Human
ugagauuuuagcuuaaaa

SEQ ID NO: 304445 - RNA, 22 nt, Human
ugauaaauauugacgguggcac

SEQ ID NO: 304446 - RNA, 26 nt, Human
ugcaaaaccuagaaaaaaaaagaagc

SEQ ID NO: 304447 - RNA, 21 nt, Human
uguaaagggucauuuuaugga

SEQ ID NO: 304448 - RNA, 26 nt, Human
uguaacuaauuagucuucaagaacag

SEQ ID NO: 304449 - RNA, 21 nt, Human
ugugcuagaaucucacaacca

SEQ ID NO: 304450 - RNA, 19 nt, Human
uuaggccuuugugcuagaa

SEQ ID NO: 304451 - RNA, 26 nt, Human
uucaaagggaaagaaacaauauacga

SEQ ID NO: 304452 - RNA, 24 nt, Human
uuccagcucagccacagcaaugac

SEQ ID NO: 304453 - RNA, 22 nt, Human
uuccagguuuaucaucaucugu

SEQ ID NO: 304454 - RNA, 22 nt, Human
uuuuccacagauauaaucacua

SEQ ID NO: 304455 - RNA, 22 nt, Human
aaaaaaaaaaaaaauuagccag

SEQ ID NO: 304456 - RNA, 23 nt, Human
aaaaaaagaggccggacgcggug

SEQ ID NO: 304457 - RNA, 18 nt, Human
aaaagaaaaagaaaaacg

SEQ ID NO: 304458 - RNA, 18 nt, Human
aaagaagaagaggggaag

SEQ ID NO: 304459 - RNA, 19 nt, Human
aacacggugaaacccuguc

SEQ ID NO: 304460 - RNA, 20 nt, Human
aacacggugaaacccugucu

SEQ ID NO: 304461 - RNA, 21 nt, Human
aacacggugaaacccugucuc

SEQ ID NO: 304462 - RNA, 20 nt, Human
aacauggcgaaacccugucu

SEQ ID NO: 304463 - RNA, 21 nt, Human
aacauggcgaaacccugucuc

SEQ ID NO: 304464 - RNA, 21 nt, Human
aagaagaagaggggaaggacg

SEQ ID NO: 304465 - RNA, 19 nt, Human
aauggugucaaccugggag

SEQ ID NO: 304466 - RNA, 19 nt, Human
acacagugagacuuugucu

SEQ ID NO: 304467 - RNA, 20 nt, Human
acacagugagacuuugucuc

SEQ ID NO: 304468 - RNA, 24 nt, Human
acacagugagacuuugucucaaaa

SEQ ID NO: 304469 - RNA, 20 nt, Human
acagugagagacuccgucuc

SEQ ID NO: 304470 - RNA, 18 nt, Human
accagcacgccucugagg

SEQ ID NO: 304471 - RNA, 24 nt, Human
acccugucucuacuaaaaauacaa

SEQ ID NO: 304472 - RNA, 28 nt, Human
acuccgucucaaaaaaaaaaaagaaaaa

SEQ ID NO: 304473 - RNA, 19 nt, Human
acugcacuccagccugggc

SEQ ID NO: 304474 - RNA, 24 nt, Human
acugcacuccagccugggcgacag

SEQ ID NO: 304475 - RNA, 25 nt, Human
agaagaagaggggaaggacgggagg

SEQ ID NO: 304476 - RNA, 18 nt, Human
agaagaggggaaggacgg

SEQ ID NO: 304477 - RNA, 30 nt, Human
agaagaggggaaggacgggagggagggauu

SEQ ID NO: 304478 - RNA, 24 nt, Human
agacaugguggcccacaucuguag

SEQ ID NO: 304479 - RNA, 22 nt, Human
agagagaucccuggcccaggac

SEQ ID NO: 304480 - RNA, 25 nt, Human
agagcagggagugggguccccagga

SEQ ID NO: 304481 - RNA, 22 nt, Human
agagguuucagugagccgagau

SEQ ID NO: 304482 - RNA, 24 nt, Human
agagguuucagugagccgagauug

SEQ ID NO: 304483 - RNA, 24 nt, Human
agcacuuugggaggcagaggcagg

SEQ ID NO: 304484 - RNA, 24 nt, Human
agccugggcgacagugagagacuc

SEQ ID NO: 304485 - RNA, 24 nt, Human
aggaaagaagaagaggggaaggaa

SEQ ID NO: 304486 - RNA, 23 nt, Human
aggaacaauuaggccaggcuuug

SEQ ID NO: 304487 - RNA, 23 nt, Human
aggacucgagacauuuuaugacc

SEQ ID NO: 304488 - RNA, 21 nt, Human
aggcagagguuucagugagcc

SEQ ID NO: 304489 - RNA, 24 nt, Human
aggcagagguuucagugagccgag

SEQ ID NO: 304490 - RNA, 22 nt, Human
aggcaggagaauggugucaacc

SEQ ID NO: 304491 - RNA, 24 nt, Human
aggcaggagaauggugucaaccug

SEQ ID NO: 304492 - RNA, 25 nt, Human
aggcaggagaauggugucaaccugg

SEQ ID NO: 304493 - RNA, 20 nt, Human
aggcaggcggaucacgaggu

SEQ ID NO: 304494 - RNA, 24 nt, Human
aggcaggcggaucacgaggucagg

SEQ ID NO: 304495 - RNA, 26 nt, Human
aggcaggcggaucacgaggucaggag

SEQ ID NO: 304496 - RNA, 22 nt, Human
aggcaugagaauagcuugaacc

SEQ ID NO: 304497 - RNA, 24 nt, Human
aggcaugagaauagcuugaaccug

SEQ ID NO: 304498 - RNA, 22 nt, Human
aggccggacgcgguggcucacg

SEQ ID NO: 304499 - RNA, 25 nt, Human
aggcggagguugcagugacaacggu

SEQ ID NO: 304500 - RNA, 21 nt, Human
aggcggagguugcagugagcc

SEQ ID NO: 304501 - RNA, 24 nt, Human
aggcggagguugcagugagccgag

SEQ ID NO: 304502 - RNA, 24 nt, Human
aggcggaucacgaggucaggagau

SEQ ID NO: 304503 - RNA, 20 nt, Human
aggcggcagaucacuugagg

SEQ ID NO: 304504 - RNA, 25 nt, Human
aggcggcagaucacuugaggccagg

SEQ ID NO: 304505 - RNA, 24 nt, Human
aggcgugcuggcaggcgccuguag

SEQ ID NO: 304506 - RNA, 21 nt, Human
aggcucaguggcucaugccua

SEQ ID NO: 304507 - RNA, 24 nt, Human
aggcugaggcaugagaauagcuug

SEQ ID NO: 304508 - RNA, 20 nt, Human
agggagcaggcggcgacacc

SEQ ID NO: 304509 - RNA, 20 nt, Human
agggagggauggaguggagg

SEQ ID NO: 304510 - RNA, 22 nt, Human
agggagugggguccccaggagc

SEQ ID NO: 304511 - RNA, 18 nt, Human
agggccuuugagaaaaac

SEQ ID NO: 304512 - RNA, 24 nt, Human
aggggcagaggugagcaccccugg

SEQ ID NO: 304513 - RNA, 18 nt, Human
aguacagaacucagagga

SEQ ID NO: 304514 - RNA, 24 nt, Human
agucucgucaacauggcgaaaccc

SEQ ID NO: 304515 - RNA, 24 nt, Human
agucugggugacacagugagacuu

SEQ ID NO: 304516 - RNA, 26 nt, Human
aguggcucaugccuauauaaucccag

SEQ ID NO: 304517 - RNA, 26 nt, Human
aucagcucucccacccuggucccucu

SEQ ID NO: 304518 - RNA, 21 nt, Human
augugagugacagaaauggug

SEQ ID NO: 304519 - RNA, 24 nt, Human
auuagccagacaugguggcccaca

SEQ ID NO: 304520 - RNA, 24 nt, Human
auugcgccacugcacuccagccug

SEQ ID NO: 304521 - RNA, 21 nt, Human
auuuucucuucucccuccucc

SEQ ID NO: 304522 - RNA, 23 nt, Human
caaagcaccugaauucuaguaug

SEQ ID NO: 304523 - RNA, 22 nt, Human
caacauggcgaaacccugucuc

SEQ ID NO: 304524 - RNA, 24 nt, Human
caacauggcgaaacccugucucua

SEQ ID NO: 304525 - RNA, 24 nt, Human
cacgccuguaaucccagcacuuug

SEQ ID NO: 304526 - RNA, 19 nt, Human
cacugcacuccagccuggg

SEQ ID NO: 304527 - RNA, 21 nt, Human
cacugcacuccagccugggcg

SEQ ID NO: 304528 - RNA, 22 nt, Human
cacugcacuccagccugggcga

SEQ ID NO: 304529 - RNA, 23 nt, Human
cacugcacuccagccugggcgac

SEQ ID NO: 304530 - RNA, 24 nt, Human
cacugcacuccagccugggcgaca

SEQ ID NO: 304531 - RNA, 26 nt, Human
cacugcacuccagccugggcgacagu

SEQ ID NO: 304532 - RNA, 22 nt, Human
cacugcauuccagucuggguga

SEQ ID NO: 304533 - RNA, 23 nt, Human
cacugcauuccagucugggugac

SEQ ID NO: 304534 - RNA, 24 nt, Human
cacugcauuccagucugggugaca

SEQ ID NO: 304535 - RNA, 21 nt, Human
cacugguguccucagaaaggc

SEQ ID NO: 304536 - RNA, 21 nt, Human
cacuuccuucucucccguuga

SEQ ID NO: 304537 - RNA, 25 nt, Human
cagaggcaggcggaucacgagguca

SEQ ID NO: 304538 - RNA, 27 nt, Human
cagaucacuugaggccaggaguucgag

SEQ ID NO: 304539 - RNA, 24 nt, Human
cagcacuuugggaggcagaggcag

SEQ ID NO: 304540 - RNA, 26 nt, Human
cagcacuuugggaggcagaggcaggc

SEQ ID NO: 304541 - RNA, 24 nt, Human
caguacuuugagaagcugaggcgg

SEQ ID NO: 304542 - RNA, 20 nt, Human
caucuagcaaagcaccugaa

SEQ ID NO: 304543 - RNA, 23 nt, Human
caucuguagucccagcuacuuga

SEQ ID NO: 304544 - RNA, 20 nt, Human
caucuuuugauggaaggaaa

SEQ ID NO: 304545 - RNA, 24 nt, Human
cauuccagucugggugacacagug

SEQ ID NO: 304546 - RNA, 20 nt, Human
ccacugcacuccagccuggg

SEQ ID NO: 304547 - RNA, 20 nt, Human
ccacugcacuccagccuggg

SEQ ID NO: 304548 - RNA, 21 nt, Human
ccacugcacuccagccugggc

SEQ ID NO: 304549 - RNA, 21 nt, Human
ccacugcacuccagccugggc

SEQ ID NO: 304550 - RNA, 23 nt, Human
ccacugcacuccagccugggcga

SEQ ID NO: 304551 - RNA, 24 nt, Human
ccacugcacuccagccugggcgac

SEQ ID NO: 304552 - RNA, 19 nt, Human
ccaggacaggagaugccaa

SEQ ID NO: 304553 - RNA, 26 nt, Human
ccaggaguucgagaccagucgaguuc

SEQ ID NO: 304554 - RNA, 24 nt, Human
cccacaucuguagucccagcuacu

SEQ ID NO: 304555 - RNA, 21 nt, Human
cccaugauaagggugcagagg

SEQ ID NO: 304556 - RNA, 24 nt, Human
cccaugauaagggugcagaggggc

SEQ ID NO: 304557 - RNA, 18 nt, Human
cccuccuccuccuuauuc

SEQ ID NO: 304558 - RNA, 22 nt, Human
cccuccuuuacauuuucucuuc

SEQ ID NO: 304559 - RNA, 19 nt, Human
ccuauauaaucccaguacu

SEQ ID NO: 304560 - RNA, 22 nt, Human
ccuggcuaacacggugaaaccc

SEQ ID NO: 304561 - RNA, 24 nt, Human
ccuggcuaacacggugaaacccug

SEQ ID NO: 304562 - RNA, 19 nt, Human
ccugggaggcggagguugc

SEQ ID NO: 304563 - RNA, 22 nt, Human
ccuguaaucccagcacuuuggg

SEQ ID NO: 304564 - RNA, 18 nt, Human
ccuguagucccagcuacu

SEQ ID NO: 304565 - RNA, 21 nt, Human
ccuguagucccagcuacuugg

SEQ ID NO: 304566 - RNA, 23 nt, Human
ccuuucugcaaucagcucuccca

SEQ ID NO: 304567 - RNA, 24 nt, Human
cgagaccauccuggcuaacacggu

SEQ ID NO: 304568 - RNA, 24 nt, Human
cgagauugcgccacugcacuccag

SEQ ID NO: 304569 - RNA, 22 nt, Human
cgccaagaagagcuguggcuuc

SEQ ID NO: 304570 - RNA, 24 nt, Human
cgccuguagucccagcuacuuggg

SEQ ID NO: 304571 - RNA, 23 nt, Human
cggcagaucacuugaggccagga

SEQ ID NO: 304572 - RNA, 20 nt, Human
cggccugggaaagaucuccc

SEQ ID NO: 304573 - RNA, 21 nt, Human
cuaaaacugugccuccaacag

SEQ ID NO: 304574 - RNA, 24 nt, Human
cucaaaaaaaaaaaagaaaaagaa

SEQ ID NO: 304575 - RNA, 22 nt, Human
cucacgccuguaaucccagcac

SEQ ID NO: 304576 - RNA, 24 nt, Human
cucacgccuguaaucccagcacuu

SEQ ID NO: 304577 - RNA, 22 nt, Human
cucaggccgacuucuccugugc

SEQ ID NO: 304578 - RNA, 21 nt, Human
cucaugccacccucaucccca

SEQ ID NO: 304579 - RNA, 25 nt, Human
cucccuccuccuccuuauucuaaaa

SEQ ID NO: 304580 - RNA, 25 nt, Human
cucccuccuuuacauuuucucuucu

SEQ ID NO: 304581 - RNA, 19 nt, Human
cuccgucucaaaaaaaaaa

SEQ ID NO: 304582 - RNA, 19 nt, Human
cucuucucccuccuccucc

SEQ ID NO: 304583 - RNA, 18 nt, Human
cuggcuaacacggugaaa

SEQ ID NO: 304584 - RNA, 24 nt, Human
cuggcuaacacggugaaacccugu

SEQ ID NO: 304585 - RNA, 19 nt, Human
cugggugacacagugagac

SEQ ID NO: 304586 - RNA, 20 nt, Human
cugggugacacagugagacu

SEQ ID NO: 304587 - RNA, 21 nt, Human
cuggucccucuuccuucaagg

SEQ ID NO: 304588 - RNA, 19 nt, Human
cuguagucccagcuacuug

SEQ ID NO: 304589 - RNA, 19 nt, Human
gaaacccugucucuacuaa

SEQ ID NO: 304590 - RNA, 18 nt, Human
gaaagaagaagaggggaa

SEQ ID NO: 304591 - RNA, 22 nt, Human
gaaccuggaaggcagagguuuc

SEQ ID NO: 304592 - RNA, 18 nt, Human
gaaggaaagaagaagagg

SEQ ID NO: 304593 - RNA, 24 nt, Human
gaaggacgggagggagggauggag

SEQ ID NO: 304594 - RNA, 18 nt, Human
gaaguacagaacucagag

SEQ ID NO: 304595 - RNA, 21 nt, Human
gacacagugagacuuugucuc

SEQ ID NO: 304596 - RNA, 24 nt, Human
gacacagugagacuuugucucaaa

SEQ ID NO: 304597 - RNA, 20 nt, Human
gacaggagaugccaaaucua

SEQ ID NO: 304598 - RNA, 24 nt, Human
gacagugagagacuccgucucaaa

SEQ ID NO: 304599 - RNA, 24 nt, Human
gaccccuaaggccuuaggacucga

SEQ ID NO: 304600 - RNA, 22 nt, Human
gagaccagucucgucaacaugg

SEQ ID NO: 304601 - RNA, 19 nt, Human
gagcaccccuggugaaaag

SEQ ID NO: 304602 - RNA, 25 nt, Human
gaggacaguaggaaaaaccgguacc

SEQ ID NO: 304603 - RNA, 21 nt, Human
gaggggaaggacgggagggag

SEQ ID NO: 304604 - RNA, 21 nt, Human
gagguugcagugagccgagau

SEQ ID NO: 304605 - RNA, 23 nt, Human
gagguugcagugagccgagauug

SEQ ID NO: 304606 - RNA, 18 nt, Human
gaucacuugaggccagga

SEQ ID NO: 304607 - RNA, 24 nt, Human
gaucacuugaggccaggaguucga

SEQ ID NO: 304608 - RNA, 22 nt, Human
gccacugcacuccagccugggc

SEQ ID NO: 304609 - RNA, 24 nt, Human
gccacugcacuccagccugggcga

SEQ ID NO: 304610 - RNA, 19 nt, Human
gccaggcucaguggcucau

SEQ ID NO: 304611 - RNA, 23 nt, Human
gccuccaacagaggggcaggggc

SEQ ID NO: 304612 - RNA, 23 nt, Human
gccuguagucccagcuacuuggg

SEQ ID NO: 304613 - RNA, 24 nt, Human
gcuaacacggugaaacccugucuc

SEQ ID NO: 304614 - RNA, 24 nt, Human
gcuggcaggcgccuguagucccag

SEQ ID NO: 304615 - RNA, 23 nt, Human
ggaaggacgggagggagggaugg

SEQ ID NO: 304616 - RNA, 24 nt, Human
ggacgcgguggcucacgccuguaa

SEQ ID NO: 304617 - RNA, 24 nt, Human
ggacucgagacauuuuaugaccuc

SEQ ID NO: 304618 - RNA, 22 nt, Human
ggagguugcagugagccgagau

SEQ ID NO: 304619 - RNA, 24 nt, Human
ggagguugcagugagccgagauug

SEQ ID NO: 304620 - RNA, 21 nt, Human
ggcucacgccuguaaucccag

SEQ ID NO: 304621 - RNA, 20 nt, Human
ggcugguugaaguacagaac

SEQ ID NO: 304622 - RNA, 24 nt, Human
gguggcccacaucuguagucccag

SEQ ID NO: 304623 - RNA, 23 nt, Human
gguggcucacgccuguaauccca

SEQ ID NO: 304624 - RNA, 24 nt, Human
gguggcucacgccuguaaucccag

SEQ ID NO: 304625 - RNA, 24 nt, Human
gucaaccugggaggcggagguugc

SEQ ID NO: 304626 - RNA, 24 nt, Human
guggcccacaucuguagucccagc

SEQ ID NO: 304627 - RNA, 18 nt, Human
guugaaguacagaacuca

SEQ ID NO: 304628 - RNA, 19 nt, Human
guugcagugagccgagauu

SEQ ID NO: 304629 - RNA, 21 nt, Human
guugcagugagccgagauugc

SEQ ID NO: 304630 - RNA, 22 nt, Human
uaacacggugaaacccugucuc

SEQ ID NO: 304631 - RNA, 24 nt, Human
uaacacggugaaacccugucucua

SEQ ID NO: 304632 - RNA, 24 nt, Human
uacaaaaaaaaaaaaaaaaaaaaa

SEQ ID NO: 304633 - RNA, 22 nt, Human
uacagaacucagaggaaaaaag

SEQ ID NO: 304634 - RNA, 24 nt, Human
uagccagacaugguggcccacauc

SEQ ID NO: 304635 - RNA, 22 nt, Human
uaggagcuacuggcagggcacu

SEQ ID NO: 304636 - RNA, 25 nt, Human
uaggggcagaggugagcaccccugg

SEQ ID NO: 304637 - RNA, 18 nt, Human
ucacgaggucaggagauc

SEQ ID NO: 304638 - RNA, 24 nt, Human
ucacgaggucaggagaucgagacc

SEQ ID NO: 304639 - RNA, 19 nt, Human
ucacugaggaggggaccag

SEQ ID NO: 304640 - RNA, 20 nt, Human
ucacugaggaggggaccagc

SEQ ID NO: 304641 - RNA, 20 nt, Human
ucacugcauuccagucuggg

SEQ ID NO: 304642 - RNA, 24 nt, Human
ucacugcauuccagucugggugac

SEQ ID NO: 304643 - RNA, 23 nt, Human
ucacuugaggccaggaguucgag

SEQ ID NO: 304644 - RNA, 22 nt, Human
uccagccugggcgacagugaga

SEQ ID NO: 304645 - RNA, 20 nt, Human
ucccgagcgccgcaccacuc

SEQ ID NO: 304646 - RNA, 20 nt, Human
ucccuccuccuccuuauucu

SEQ ID NO: 304647 - RNA, 20 nt, Human
uccgucucaaaaaaaaaaaa

SEQ ID NO: 304648 - RNA, 23 nt, Human
uccgucucaaaaaaaaaaaagaa

SEQ ID NO: 304649 - RNA, 18 nt, Human
ucuaaaacugugccucca

SEQ ID NO: 304650 - RNA, 27 nt, Human
ucucaaaaaaaaaaaagaaaaagaaaa

SEQ ID NO: 304651 - RNA, 22 nt, Human
ucucccuccuccuccuuauucu

SEQ ID NO: 304652 - RNA, 24 nt, Human
ucucccuccuuuacauuuucucuu

SEQ ID NO: 304653 - RNA, 24 nt, Human
ucucgucaacauggcgaaacccug

SEQ ID NO: 304654 - RNA, 22 nt, Human
ucucuacaaaaaaaaaaaaaaa

SEQ ID NO: 304655 - RNA, 22 nt, Human
ucucuacuaaaaauacaaaaaa

SEQ ID NO: 304656 - RNA, 22 nt, Human
ucuguagucccagcuacuugag

SEQ ID NO: 304657 - RNA, 19 nt, Human
ugaaaugguaagaaugugg

SEQ ID NO: 304658 - RNA, 21 nt, Human
ugacacagugagacuuugucu

SEQ ID NO: 304659 - RNA, 22 nt, Human
ugacacagugagacuuugucuc

SEQ ID NO: 304660 - RNA, 20 nt, Human
ugaccccuaaggccuuagga

SEQ ID NO: 304661 - RNA, 19 nt, Human
ugacuucagggacacagcc

SEQ ID NO: 304662 - RNA, 22 nt, Human
ugagccgagauugcgccacugc

SEQ ID NO: 304663 - RNA, 22 nt, Human
ugagccgagauugugucacugc

SEQ ID NO: 304664 - RNA, 20 nt, Human
ugaggcaggagaaugguguc

SEQ ID NO: 304665 - RNA, 21 nt, Human
ugaggcaggagaaugguguca

SEQ ID NO: 304666 - RNA, 24 nt, Human
ugaggcaugagaauagcuugaacc

SEQ ID NO: 304667 - RNA, 25 nt, Human
ugaggcggcagaucacuugaggcca

SEQ ID NO: 304668 - RNA, 21 nt, Human
ugauggaaggaaagaagaaga

SEQ ID NO: 304669 - RNA, 24 nt, Human
ugccuauauaaucccaguacuuug

SEQ ID NO: 304670 - RNA, 24 nt, Human
ugcuggcaggcgccuguaguccca

SEQ ID NO: 304671 - RNA, 18 nt, Human
uggaaggaaagaagaaga

SEQ ID NO: 304672 - RNA, 21 nt, Human
uggaaggaaagaagaagaggg

SEQ ID NO: 304673 - RNA, 24 nt, Human
uggaaggaaagaagaagaggggaa

SEQ ID NO: 304674 - RNA, 20 nt, Human
uggcaccaucaaacacuucu

SEQ ID NO: 304675 - RNA, 21 nt, Human
uggccaguugguaaccccugc

SEQ ID NO: 304676 - RNA, 23 nt, Human
uggcccaggacaggagaugccaa

SEQ ID NO: 304677 - RNA, 22 nt, Human
uggcucacgccuguaaucccag

SEQ ID NO: 304678 - RNA, 24 nt, Human
uggcucacgccuguaaucccagca

SEQ ID NO: 304679 - RNA, 19 nt, Human
ugggaggcagaggcaggcg

SEQ ID NO: 304680 - RNA, 24 nt, Human
ugggaggcagaggcaggcggauca

SEQ ID NO: 304681 - RNA, 24 nt, Human
ugggaggcggagguugcagugagc

SEQ ID NO: 304682 - RNA, 24 nt, Human
ugguggcccacaucuguaguccca

SEQ ID NO: 304683 - RNA, 18 nt, Human
uggugggucccgagcgcc

SEQ ID NO: 304684 - RNA, 21 nt, Human
uggugucaaccugggaggcgg

SEQ ID NO: 304685 - RNA, 24 nt, Human
uggugucaaccugggaggcggagg

SEQ ID NO: 304686 - RNA, 19 nt, Human
ugucaaccugggaggcgga

SEQ ID NO: 304687 - RNA, 21 nt, Human
ugugaaaugguaagaaugugg

SEQ ID NO: 304688 - RNA, 24 nt, Human
ugugaaaugguaagaauguggguu

SEQ ID NO: 304689 - RNA, 23 nt, Human
uguguguaugcucaucauacaug

SEQ ID NO: 304690 - RNA, 20 nt, Human
uuagccaggcgugcuggcag

SEQ ID NO: 304691 - RNA, 22 nt, Human
uucuguugacaucccaugauaa

SEQ ID NO: 304692 - RNA, 22 nt, Human
uugaggccaggaguucgagacc

SEQ ID NO: 304693 - RNA, 18 nt, Human
uugcagugagccgagauu

SEQ ID NO: 304694 - RNA, 19 nt, Human
uugcagugagccgagauug

SEQ ID NO: 304695 - RNA, 22 nt, Human
uugcagugagccgagauugcgc

SEQ ID NO: 304696 - RNA, 23 nt, Human
uugcgccacugcacuccagccug

SEQ ID NO: 304697 - RNA, 19 nt, Human
uuggaacucuucaaacauc

SEQ ID NO: 304698 - RNA, 21 nt, Human
uugggaggcagaggcaggcgg

SEQ ID NO: 304699 - RNA, 23 nt, Human
uugucaugggugcagggagcagg

SEQ ID NO: 304700 - RNA, 23 nt, Human
uuucagugagccgagauuguguc

SEQ ID NO: 304701 - RNA, 19 nt, Human
aaaaaaaaaaaaccuaggg

SEQ ID NO: 304702 - RNA, 23 nt, Human
aaaaaaaaccuagggaaaagucc

SEQ ID NO: 304703 - RNA, 23 nt, Human
aaaacuuugcugcaaccucacag

SEQ ID NO: 304704 - RNA, 19 nt, Human
aaacaguacacagaucucu

SEQ ID NO: 304705 - RNA, 24 nt, Human
aaagaaaaaucauggggcaaaaaa

SEQ ID NO: 304706 - RNA, 22 nt, Human
aaaggagauacaagggauucug

SEQ ID NO: 304707 - RNA, 21 nt, Human
aaaguccaauaagaaccuuaa

SEQ ID NO: 304708 - RNA, 19 nt, Human
aacauggugaaaccccguc

SEQ ID NO: 304709 - RNA, 20 nt, Human
aacauggugaaaccccgucu

SEQ ID NO: 304710 - RNA, 21 nt, Human
aacauggugaaaccccgucuc

SEQ ID NO: 304711 - RNA, 19 nt, Human
aagccucaguccagcacag

SEQ ID NO: 304712 - RNA, 19 nt, Human
aaggauaacaguuuccaaa

SEQ ID NO: 304713 - RNA, 20 nt, Human
aaggcaggcagaucacgagg

SEQ ID NO: 304714 - RNA, 24 nt, Human
aaucgcuugaacccgggaggcaga

SEQ ID NO: 304715 - RNA, 24 nt, Human
aauuagcuuggcgugguggcacau

SEQ ID NO: 304716 - RNA, 21 nt, Human
acaacaacaauaacaaaaaaa

SEQ ID NO: 304717 - RNA, 19 nt, Human
acaauaacaaaaaaaaaaa

SEQ ID NO: 304718 - RNA, 20 nt, Human
acaauaacaaaaaaaaaaaa

SEQ ID NO: 304719 - RNA, 21 nt, Human
acagaaauggaguuugggagg

SEQ ID NO: 304720 - RNA, 23 nt, Human
acaggcacaaagccaguaacaca

SEQ ID NO: 304721 - RNA, 25 nt, Human
acagggcgagacuccgucuccaaaa

SEQ ID NO: 304722 - RNA, 21 nt, Human
acccacugggccccuccccag

SEQ ID NO: 304723 - RNA, 24 nt, Human
accccgucucuacuaaaaauacaa

SEQ ID NO: 304724 - RNA, 23 nt, Human
accuggaccgagcuggaggccug

SEQ ID NO: 304725 - RNA, 26 nt, Human
acgaaacaacaacaacaauaacaaaa

SEQ ID NO: 304726 - RNA, 22 nt, Human
acuacacuccagccuggcgaca

SEQ ID NO: 304727 - RNA, 23 nt, Human
acuacacuccagccuggcgacag

SEQ ID NO: 304728 - RNA, 19 nt, Human
acucucccugccuccuacc

SEQ ID NO: 304729 - RNA, 21 nt, Human
agaaaacgaaacaacaacaac

SEQ ID NO: 304730 - RNA, 19 nt, Human
agaaaggagauacaaggga

SEQ ID NO: 304731 - RNA, 25 nt, Human
agaaaggagauacaagggauucugg

SEQ ID NO: 304732 - RNA, 21 nt, Human
agaaauggaguuugggaggga

SEQ ID NO: 304733 - RNA, 19 nt, Human
agaaucaccuggaccgagc

SEQ ID NO: 304734 - RNA, 18 nt, Human
agacaagaggaaaagucc

SEQ ID NO: 304735 - RNA, 26 nt, Human
agacaagaggaaaaguccccccaaaa

SEQ ID NO: 304736 - RNA, 21 nt, Human
agagagggcucuggccgagga

SEQ ID NO: 304737 - RNA, 22 nt, Human
agagagggcucuggccgaggac

SEQ ID NO: 304738 - RNA, 22 nt, Human
agccaguaacacauuuaugguc

SEQ ID NO: 304739 - RNA, 21 nt, Human
agccuggcgacagggcgagac

SEQ ID NO: 304740 - RNA, 23 nt, Human
agccuggcgacagggcgagacuc

SEQ ID NO: 304741 - RNA, 24 nt, Human
agccugggaugcugggugguggcu

SEQ ID NO: 304742 - RNA, 19 nt, Human
agcgcucuccuuuggaggc

SEQ ID NO: 304743 - RNA, 23 nt, Human
agcuuggcgugguggcacaugcc

SEQ ID NO: 304744 - RNA, 18 nt, Human
aggaagagacagcagagc

SEQ ID NO: 304745 - RNA, 21 nt, Human
aggaagaggaaggagugaauu

SEQ ID NO: 304746 - RNA, 21 nt, Human
aggcaaaaucagaaaggccca

SEQ ID NO: 304747 - RNA, 18 nt, Human
aggcagaucacgagguca

SEQ ID NO: 304748 - RNA, 19 nt, Human
aggcagaucacgaggucaa

SEQ ID NO: 304749 - RNA, 19 nt, Human
aggcagauuuugcagugag

SEQ ID NO: 304750 - RNA, 24 nt, Human
aggcagauuuugcagugagucgag

SEQ ID NO: 304751 - RNA, 22 nt, Human
aggcagcccuccccaacccucc

SEQ ID NO: 304752 - RNA, 18 nt, Human
aggcaggcagaucacgag

SEQ ID NO: 304753 - RNA, 24 nt, Human
aggcaggcagaucacgaggucaag

SEQ ID NO: 304754 - RNA, 23 nt, Human
aggccaaggcaggcagaucacga

SEQ ID NO: 304755 - RNA, 24 nt, Human
aggcugagguaggagaaucgcuug

SEQ ID NO: 304756 - RNA, 24 nt, Human
agguaggagaaucgcuugaacccg

SEQ ID NO: 304757 - RNA, 19 nt, Human
aguuucugauccuuggaau

SEQ ID NO: 304758 - RNA, 21 nt, Human
auacagcccaccccacacacu

SEQ ID NO: 304759 - RNA, 24 nt, Human
aucaugccacuacacuccagccug

SEQ ID NO: 304760 - RNA, 22 nt, Human
aucccagcacuuugggaggcca

SEQ ID NO: 304761 - RNA, 21 nt, Human
auccuggccaacauggugaaa

SEQ ID NO: 304762 - RNA, 21 nt, Human
augagucagcaaaacggggag

SEQ ID NO: 304763 - RNA, 22 nt, Human
augccacuacacuccagccugg

SEQ ID NO: 304764 - RNA, 21 nt, Human
augcugcccuguggcuucggu

SEQ ID NO: 304765 - RNA, 19 nt, Human
augcuuuccagaggcuacc

SEQ ID NO: 304766 - RNA, 24 nt, Human
auggauggggaaugcuuuccagag

SEQ ID NO: 304767 - RNA, 22 nt, Human
augggggacacaggcaacaaag

SEQ ID NO: 304768 - RNA, 26 nt, Human
caaauagucuuccucucuugccuucu

SEQ ID NO: 304769 - RNA, 22 nt, Human
caacaacaauaacaaaaaaaaa

SEQ ID NO: 304770 - RNA, 24 nt, Human
caacauggugaaaccccgucucua

SEQ ID NO: 304771 - RNA, 24 nt, Human
caaggcaggcagaucacgagguca

SEQ ID NO: 304772 - RNA, 23 nt, Human
cacaaggaggagucucacagggg

SEQ ID NO: 304773 - RNA, 20 nt, Human
cacacacuccccaaaccaag

SEQ ID NO: 304774 - RNA, 19 nt, Human
cacagaucucuuuaaauca

SEQ ID NO: 304775 - RNA, 19 nt, Human
caccccacacacuccccaa

SEQ ID NO: 304776 - RNA, 26 nt, Human
caccccacacacuccccaaaccaagc

SEQ ID NO: 304777 - RNA, 28 nt, Human
caccccacacacuccccaaaccaagcau

SEQ ID NO: 304778 - RNA, 19 nt, Human
caccuggaccgagcuggag

SEQ ID NO: 304779 - RNA, 24 nt, Human
cacgccuguaaucccagcacuuug

SEQ ID NO: 304780 - RNA, 22 nt, Human
cacuccagccuggcgacagggc

SEQ ID NO: 304781 - RNA, 23 nt, Human
cacuccagccuggcgacagggcg

SEQ ID NO: 304782 - RNA, 20 nt, Human
cacuccucuucccccuccug

SEQ ID NO: 304783 - RNA, 20 nt, Human
cagagacaaaugaagggaga

SEQ ID NO: 304784 - RNA, 26 nt, Human
cagagacaaaugaagggagagaccua

SEQ ID NO: 304785 - RNA, 19 nt, Human
cagaucacgaggucaagag

SEQ ID NO: 304786 - RNA, 21 nt, Human
cagaucucuuuaaaucaggag

SEQ ID NO: 304787 - RNA, 19 nt, Human
cagcacaggcagcccuccc

SEQ ID NO: 304788 - RNA, 28 nt, Human
cagcacaggcagcccuccccaacccucc

SEQ ID NO: 304789 - RNA, 24 nt, Human
cagcacuuugggaggccaaggcag

SEQ ID NO: 304790 - RNA, 25 nt, Human
cagcacuuugggaggccaaggcagg

SEQ ID NO: 304791 - RNA, 20 nt, Human
cagcagaaagaaguggggag

SEQ ID NO: 304792 - RNA, 26 nt, Human
cagcagaaagaaguggggagugaugg

SEQ ID NO: 304793 - RNA, 19 nt, Human
cagcccuccccaacccucc

SEQ ID NO: 304794 - RNA, 21 nt, Human
cagcuacucgggaggcugagg

SEQ ID NO: 304795 - RNA, 18 nt, Human
caggacuacagugaaccu

SEQ ID NO: 304796 - RNA, 22 nt, Human
caggcagaucacgaggucaaga

SEQ ID NO: 304797 - RNA, 20 nt, Human
caguccagcacaggcagccc

SEQ ID NO: 304798 - RNA, 18 nt, Human
caguggcacaagccucag

SEQ ID NO: 304799 - RNA, 18 nt, Human
caugggaaauauccagcc

SEQ ID NO: 304800 - RNA, 23 nt, Human
ccaaaagagcaugggucccugaa

SEQ ID NO: 304801 - RNA, 22 nt, Human
ccacacacuccccaaaccaagc

SEQ ID NO: 304802 - RNA, 22 nt, Human
ccaccccacacacuccccaaac

SEQ ID NO: 304803 - RNA, 19 nt, Human
ccacuacacuccagccugg

SEQ ID NO: 304804 - RNA, 20 nt, Human
ccacuacacuccagccuggc

SEQ ID NO: 304805 - RNA, 23 nt, Human
ccacuacacuccagccuggcgac

SEQ ID NO: 304806 - RNA, 21 nt, Human
ccacuccucuucccccuccug

SEQ ID NO: 304807 - RNA, 20 nt, Human
cccacacacuccccaaacca

SEQ ID NO: 304808 - RNA, 18 nt, Human
cccacugggccccucccc

SEQ ID NO: 304809 - RNA, 19 nt, Human
cccacugggccccucccca

SEQ ID NO: 304810 - RNA, 23 nt, Human
ccccaaaagagcaugggucccuu

SEQ ID NO: 304811 - RNA, 18 nt, Human
ccccaacccuccccaacc

SEQ ID NO: 304812 - RNA, 24 nt, Human
ccccaacccuccccaaccuguccu

SEQ ID NO: 304813 - RNA, 19 nt, Human
ccccacacacuccccaaac

SEQ ID NO: 304814 - RNA, 23 nt, Human
ccccacacacuccccaaaccaag

SEQ ID NO: 304815 - RNA, 24 nt, Human
ccccacacacuccccaaaccaagc

SEQ ID NO: 304816 - RNA, 25 nt, Human
ccccacacacuccccaaaccaagca

SEQ ID NO: 304817 - RNA, 23 nt, Human
ccccacuccucuucccccuccug

SEQ ID NO: 304818 - RNA, 24 nt, Human
cccccaaaagagcaugggucccug

SEQ ID NO: 304819 - RNA, 19 nt, Human
cccccaaaaugcuacuuca

SEQ ID NO: 304820 - RNA, 22 nt, Human
cccccaccccaugccccuuucc

SEQ ID NO: 304821 - RNA, 21 nt, Human
cccuccccaacccuccccaac

SEQ ID NO: 304822 - RNA, 21 nt, Human
cccugagggccucugcucccc

SEQ ID NO: 304823 - RNA, 19 nt, Human
ccgcccacuccccacuccu

SEQ ID NO: 304824 - RNA, 26 nt, Human
ccgucuccaaaaaaaaaaaaaaaaau

SEQ ID NO: 304825 - RNA, 19 nt, Human
ccuagcaagcagucaguag

SEQ ID NO: 304826 - RNA, 19 nt, Human
ccuagggaccucuucccag

SEQ ID NO: 304827 - RNA, 21 nt, Human
ccuauagcuagaaaacgaaac

SEQ ID NO: 304828 - RNA, 24 nt, Human
ccuccuaccacagaggccagaauc

SEQ ID NO: 304829 - RNA, 24 nt, Human
ccuccuacugaccaaagaaaaauc

SEQ ID NO: 304830 - RNA, 22 nt, Human
ccuggccaacauggugaaaccc

SEQ ID NO: 304831 - RNA, 23 nt, Human
ccuggccaacauggugaaacccc

SEQ ID NO: 304832 - RNA, 24 nt, Human
ccuggccaacauggugaaaccccg

SEQ ID NO: 304833 - RNA, 21 nt, Human
ccuggcgacagggcgagacuc

SEQ ID NO: 304834 - RNA, 22 nt, Human
ccuguaaucccagcacuuuggg

SEQ ID NO: 304835 - RNA, 19 nt, Human
ccuguaaucccagcuacuc

SEQ ID NO: 304836 - RNA, 21 nt, Human
ccuguaaucccagcuacucgg

SEQ ID NO: 304837 - RNA, 22 nt, Human
ccuguaaucccagcuacucggg

SEQ ID NO: 304838 - RNA, 23 nt, Human
ccuucucgcaaggcuuccugucc

SEQ ID NO: 304839 - RNA, 25 nt, Human
cgaaacaacaacaacaauaacaaaa

SEQ ID NO: 304840 - RNA, 24 nt, Human
cgagaccauccuggccaacauggu

SEQ ID NO: 304841 - RNA, 24 nt, Human
cgagaucaugccacuacacuccag

SEQ ID NO: 304842 - RNA, 21 nt, Human
cgaggacccacugggccccuc

SEQ ID NO: 304843 - RNA, 23 nt, Human
cgccuguaaucccagcacuuugg

SEQ ID NO: 304844 - RNA, 24 nt, Human
cucaaaauggaauccuuuuggccc

SEQ ID NO: 304845 - RNA, 20 nt, Human
cucacagccuccaaggggcu

SEQ ID NO: 304846 - RNA, 22 nt, Human
cucacgccuguaaucccagcac

SEQ ID NO: 304847 - RNA, 24 nt, Human
cucacgccuguaaucccagcacuu

SEQ ID NO: 304848 - RNA, 27 nt, Human
cuccccacuccucuucccccuccugga

SEQ ID NO: 304849 - RNA, 22 nt, Human
cucuucuuccuucucuauaccc

SEQ ID NO: 304850 - RNA, 22 nt, Human
cugacccccagaagggccagga

SEQ ID NO: 304851 - RNA, 21 nt, Human
cuggaggguugugacauggug

SEQ ID NO: 304852 - RNA, 20 nt, Human
cugggugguggcucugcugg

SEQ ID NO: 304853 - RNA, 21 nt, Human
cugggugguggcucugcuggg

SEQ ID NO: 304854 - RNA, 25 nt, Human
cuucaggacuacagugaaccucucu

SEQ ID NO: 304855 - RNA, 21 nt, Human
cuuccaugcugcccuguggcu

SEQ ID NO: 304856 - RNA, 20 nt, Human
cuucuuccuucucuauaccc

SEQ ID NO: 304857 - RNA, 20 nt, Human
cuuuuggcccucuacucuuc

SEQ ID NO: 304858 - RNA, 23 nt, Human
gaaaacgaaacaacaacaacaau

SEQ ID NO: 304859 - RNA, 19 nt, Human
gaaaaguccccccaaaaga

SEQ ID NO: 304860 - RNA, 26 nt, Human
gaaacaacaacaacaauaacaaaaaa

SEQ ID NO: 304861 - RNA, 21 nt, Human
gacagggcgagacuccgucuc

SEQ ID NO: 304862 - RNA, 21 nt, Human
gacccacugggccccucccca

SEQ ID NO: 304863 - RNA, 18 nt, Human
gacgccaucucuauggug

SEQ ID NO: 304864 - RNA, 23 nt, Human
gagaaucgcuugaacccgggagg

SEQ ID NO: 304865 - RNA, 18 nt, Human
gaggacccacugggcccc

SEQ ID NO: 304866 - RNA, 18 nt, Human
gagugaauugcuaaggcu

SEQ ID NO: 304867 - RNA, 18 nt, Human
gaugcugggugguggcuc

SEQ ID NO: 304868 - RNA, 20 nt, Human
gcaaaacggggaguuucuga

SEQ ID NO: 304869 - RNA, 18 nt, Human
gcaaaaucagaaaggccc

SEQ ID NO: 304870 - RNA, 21 nt, Human
gcaacaaagucucuacuuccu

SEQ ID NO: 304871 - RNA, 19 nt, Human
gcaaggcuuccugucccag

SEQ ID NO: 304872 - RNA, 18 nt, Human
gcacaagccucaguccag

SEQ ID NO: 304873 - RNA, 19 nt, Human
gcagcacagcagaaagaag

SEQ ID NO: 304874 - RNA, 24 nt, Human
gccaacauggugaaaccccgucuc

SEQ ID NO: 304875 - RNA, 18 nt, Human
gccaccagccugggaugc

SEQ ID NO: 304876 - RNA, 25 nt, Human
gcccacuccccacuccucuuccccc

SEQ ID NO: 304877 - RNA, 18 nt, Human
gcccuguggcuucgguca

SEQ ID NO: 304878 - RNA, 24 nt, Human
gccgaggacccacugggccccucc

SEQ ID NO: 304879 - RNA, 19 nt, Human
gcggggcaugguggcucac

SEQ ID NO: 304880 - RNA, 19 nt, Human
gcuaaggcuuccuucagcc

SEQ ID NO: 304881 - RNA, 18 nt, Human
gcugcaaccucacagccu

SEQ ID NO: 304882 - RNA, 20 nt, Human
ggaaaaguccccccaaaaga

SEQ ID NO: 304883 - RNA, 21 nt, Human
ggaaaaguccccccaaaagag

SEQ ID NO: 304884 - RNA, 22 nt, Human
ggaaguaaacaguacacagauc

SEQ ID NO: 304885 - RNA, 22 nt, Human
ggagagaccuauggggaagcac

SEQ ID NO: 304886 - RNA, 22 nt, Human
ggaggcaaaaucagaaaggccc

SEQ ID NO: 304887 - RNA, 22 nt, Human
ggaugcugggugguggcucugc

SEQ ID NO: 304888 - RNA, 23 nt, Human
ggcgaggaagacaacccuuugga

SEQ ID NO: 304889 - RNA, 23 nt, Human
ggcgugguggcacaugccuguaa

SEQ ID NO: 304890 - RNA, 22 nt, Human
gggaagcagcacagcagaaaga

SEQ ID NO: 304891 - RNA, 22 nt, Human
gggaauaaagaauaugaagaga

SEQ ID NO: 304892 - RNA, 19 nt, Human
gggagagaccuauggggaa

SEQ ID NO: 304893 - RNA, 24 nt, Human
gggcaugguggcucacgccuguaa

SEQ ID NO: 304894 - RNA, 22 nt, Human
ggguugugacauggugucuggg

SEQ ID NO: 304895 - RNA, 24 nt, Human
gguggcacaugccuguaaucccag

SEQ ID NO: 304896 - RNA, 24 nt, Human
gguggcucacgccuguaaucccag

SEQ ID NO: 304897 - RNA, 18 nt, Human
guccuuagagagggcucu

SEQ ID NO: 304898 - RNA, 21 nt, Human
guccuuagagagggcucuggc

SEQ ID NO: 304899 - RNA, 19 nt, Human
guccuuggcagaaccccaa

SEQ ID NO: 304900 - RNA, 23 nt, Human
gucuuacucucccugccuccuac

SEQ ID NO: 304901 - RNA, 19 nt, Human
gugaggaugggggacacag

SEQ ID NO: 304902 - RNA, 26 nt, Human
uaaaaugagcuacaggcacaaagcca

SEQ ID NO: 304903 - RNA, 20 nt, Human
uaagaaccuuaaucauacaa

SEQ ID NO: 304904 - RNA, 22 nt, Human
uacagcccaccccacacacucc

SEQ ID NO: 304905 - RNA, 18 nt, Human
uacccugagggccucugc

SEQ ID NO: 304906 - RNA, 21 nt, Human
uacuucauacagcccacccca

SEQ ID NO: 304907 - RNA, 22 nt, Human
uagcuuggcgugguggcacaug

SEQ ID NO: 304908 - RNA, 21 nt, Human
uauagcuagaaaacgaaacaa

SEQ ID NO: 304909 - RNA, 23 nt, Human
uaucacagcgcucuccuuuggag

SEQ ID NO: 304910 - RNA, 23 nt, Human
uauccacccacccacccccaaaa

SEQ ID NO: 304911 - RNA, 19 nt, Human
uaugguccguucaucugga

SEQ ID NO: 304912 - RNA, 18 nt, Human
ucaccacuccaauccagc

SEQ ID NO: 304913 - RNA, 24 nt, Human
ucacgaggucaagagaucgagacc

SEQ ID NO: 304914 - RNA, 21 nt, Human
ucacuauuucauuuuuuaaaa

SEQ ID NO: 304915 - RNA, 27 nt, Human
ucaguccagcacaggcagcccucccca

SEQ ID NO: 304916 - RNA, 23 nt, Human
uccaaauagucuuccucucuugc

SEQ ID NO: 304917 - RNA, 22 nt, Human
uccaauccagccuccuacugac

SEQ ID NO: 304918 - RNA, 19 nt, Human
uccacccacccacccccaa

SEQ ID NO: 304919 - RNA, 21 nt, Human
uccacccacccacccccaaaa

SEQ ID NO: 304920 - RNA, 22 nt, Human
uccagccuggcgacagggcgag

SEQ ID NO: 304921 - RNA, 23 nt, Human
uccagccuggcgacagggcgaga

SEQ ID NO: 304922 - RNA, 21 nt, Human
ucccaguuaggacaacaucac

SEQ ID NO: 304923 - RNA, 21 nt, Human
uccccaaaccaagcauugcuc

SEQ ID NO: 304924 - RNA, 22 nt, Human
uccccaacccuccccaaccugu

SEQ ID NO: 304925 - RNA, 22 nt, Human
ucccccaccccaugccccuuuc

SEQ ID NO: 304926 - RNA, 22 nt, Human
ucccugccuccuaccacagagg

SEQ ID NO: 304927 - RNA, 24 nt, Human
uccgucuccaaaaaaaaaaaaaaa

SEQ ID NO: 304928 - RNA, 21 nt, Human
uccugccaccagccugggaug

SEQ ID NO: 304929 - RNA, 18 nt, Human
ucgcuugaacccgggagg

SEQ ID NO: 304930 - RNA, 24 nt, Human
ucgggaggcugagguaggagaauc

SEQ ID NO: 304931 - RNA, 18 nt, Human
ucuaugguggaacagugg

SEQ ID NO: 304932 - RNA, 20 nt, Human
ucuccaaaaaaaaaaaaaaa

SEQ ID NO: 304933 - RNA, 27 nt, Human
ucuccaaaaaaaaaaaaaaaaauccau

SEQ ID NO: 304934 - RNA, 21 nt, Human
ucucuacuaaaaauacaaaaa

SEQ ID NO: 304935 - RNA, 21 nt, Human
ucuuccucucuugccuucugg

SEQ ID NO: 304936 - RNA, 20 nt, Human
ucuugggugaaacuacaucu

SEQ ID NO: 304937 - RNA, 23 nt, Human
ugacagaaauggaguuugggagg

SEQ ID NO: 304938 - RNA, 21 nt, Human
ugaccaaagaaaaaucauggg

SEQ ID NO: 304939 - RNA, 21 nt, Human
ugagcuacaggcacaaagcca

SEQ ID NO: 304940 - RNA, 27 nt, Human
ugaggaaaagucuuauaaaaaggguga

SEQ ID NO: 304941 - RNA, 21 nt, Human
ugaggaugggggacacaggca

SEQ ID NO: 304942 - RNA, 24 nt, Human
ugagguaggagaaucgcuugaacc

SEQ ID NO: 304943 - RNA, 19 nt, Human
ugagucgagaucaugccac

SEQ ID NO: 304944 - RNA, 24 nt, Human
ugccuguaaucccagcuacucggg

SEQ ID NO: 304945 - RNA, 18 nt, Human
ugcucaucacaaccaacc

SEQ ID NO: 304946 - RNA, 21 nt, Human
uggaaggauaacaguuuccaa

SEQ ID NO: 304947 - RNA, 21 nt, Human
uggaaucccccaccccaugcc

SEQ ID NO: 304948 - RNA, 23 nt, Human
uggaaucccccaccccaugcccc

SEQ ID NO: 304949 - RNA, 24 nt, Human
uggaauccuuuuggcccucuacuc

SEQ ID NO: 304950 - RNA, 20 nt, Human
uggaggcaaaaucagaaagg

SEQ ID NO: 304951 - RNA, 21 nt, Human
uggcacaugccuguaauccca

SEQ ID NO: 304952 - RNA, 22 nt, Human
uggcacaugccuguaaucccag

SEQ ID NO: 304953 - RNA, 24 nt, Human
uggccaacauggugaaaccccguc

SEQ ID NO: 304954 - RNA, 22 nt, Human
uggcucacgccuguaaucccag

SEQ ID NO: 304955 - RNA, 24 nt, Human
uggcucacgccuguaaucccagca

SEQ ID NO: 304956 - RNA, 24 nt, Human
ugggaggccaaggcaggcagauca

SEQ ID NO: 304957 - RNA, 19 nt, Human
ugggaugcugggugguggc

SEQ ID NO: 304958 - RNA, 24 nt, Human
ugguggcacaugccuguaauccca

SEQ ID NO: 304959 - RNA, 24 nt, Human
ugguggcucacgccuguaauccca

SEQ ID NO: 304960 - RNA, 18 nt, Human
ugugaagccucugcuagg

SEQ ID NO: 304961 - RNA, 18 nt, Human
uuacgguuugcugcaaag

SEQ ID NO: 304962 - RNA, 18 nt, Human
uuagcuuggcgugguggc

SEQ ID NO: 304963 - RNA, 24 nt, Human
uuagcuuggcgugguggcacaugc

SEQ ID NO: 304964 - RNA, 22 nt, Human
uucaaagucccucccuccuuuu

SEQ ID NO: 304965 - RNA, 23 nt, Human
uucauagagaccagcugaccccc

SEQ ID NO: 304966 - RNA, 22 nt, Human
uuccaaagaggcaaacaaucuu

SEQ ID NO: 304967 - RNA, 22 nt, Human
uucucaggaagaggaaggagug

SEQ ID NO: 304968 - RNA, 18 nt, Human
uugcagugagucgagauc

SEQ ID NO: 304969 - RNA, 21 nt, Human
uugcagugagucgagaucaug

SEQ ID NO: 304970 - RNA, 23 nt, Human
uuggcgaggaagacaacccuuug

SEQ ID NO: 304971 - RNA, 28 nt, Human
uuucaccgcccacuccccacuccucuuc

SEQ ID NO: 304972 - RNA, 18 nt, Human
uuucugauccuuggaauu

SEQ ID NO: 304973 - RNA, 19 nt, Human
uuucugcuucaggacuaca

SEQ ID NO: 304974 - RNA, 22 nt, Human
uuugauggaaucccccacccca

SEQ ID NO: 304975 - RNA, 19 nt, Human
uuugcagugagucgagauc

SEQ ID NO: 304976 - RNA, 24 nt, Human
uuugcagugagucgagaucaugcc

SEQ ID NO: 304977 - RNA, 18 nt, Human
aguauuuuauuucuguuc

SEQ ID NO: 304978 - RNA, 20 nt, Human
cggucuuugccugcugagag

SEQ ID NO: 304979 - RNA, 19 nt, Human
uauuuuauuucuguucuug

SEQ ID NO: 304980 - RNA, 18 nt, Human
ucaaacccuguuugcguu

SEQ ID NO: 304981 - RNA, 21 nt, Human
ugaaaugaacuaguuuaagug

SEQ ID NO: 304982 - RNA, 22 nt, Human
aaagaccagcaaagcccccucc

SEQ ID NO: 304983 - RNA, 18 nt, Human
aacaaaaucacuuuacag

SEQ ID NO: 304984 - RNA, 19 nt, Human
aacagaggaagaccccauc

SEQ ID NO: 304985 - RNA, 20 nt, Human
aacagaggaagaccccaucu

SEQ ID NO: 304986 - RNA, 20 nt, Human
aacauggugaaacccccguc

SEQ ID NO: 304987 - RNA, 21 nt, Human
aacauggugaaacccccgucu

SEQ ID NO: 304988 - RNA, 22 nt, Human
aacauggugaaacccccgucuc

SEQ ID NO: 304989 - RNA, 18 nt, Human
aacuaacuugccuucccc

SEQ ID NO: 304990 - RNA, 23 nt, Human
aagaaucacuugaaccugggagg

SEQ ID NO: 304991 - RNA, 24 nt, Human
aagacuguacacccaaaaccagaa

SEQ ID NO: 304992 - RNA, 20 nt, Human
aauaguccaagaaagaccag

SEQ ID NO: 304993 - RNA, 24 nt, Human
aaucacuugaaccugggaggcgga

SEQ ID NO: 304994 - RNA, 19 nt, Human
acaaaaggcagccaugucg

SEQ ID NO: 304995 - RNA, 20 nt, Human
acagaggaagaccccaucuc

SEQ ID NO: 304996 - RNA, 24 nt, Human
acagaggaagaccccaucucaaaa

SEQ ID NO: 304997 - RNA, 22 nt, Human
acagcagguucccaaaggugau

SEQ ID NO: 304998 - RNA, 22 nt, Human
accacugcacuccagccugggc

SEQ ID NO: 304999 - RNA, 18 nt, Human
accccaucucaaaaaaaa

SEQ ID NO: 305000 - RNA, 19 nt, Human
acccgcagccgccuccucu

SEQ ID NO: 305001 - RNA, 24 nt, Human
accugaggucaggaguucgagacc

SEQ ID NO: 305002 - RNA, 24 nt, Human
acuaaaauacaaaaauuagcuggu

SEQ ID NO: 305003 - RNA, 24 nt, Human
acugcacuccagccugggcaacag

SEQ ID NO: 305004 - RNA, 24 nt, Human
acugcacuccagccugggcaacag

SEQ ID NO: 305005 - RNA, 22 nt, Human
agaaagaucccagcacgccccc

SEQ ID NO: 305006 - RNA, 20 nt, Human
agaacagagcuggcaccuga

SEQ ID NO: 305007 - RNA, 18 nt, Human
agacuguacacccaaaac

SEQ ID NO: 305008 - RNA, 20 nt, Human
agcacuuugggaggcucagg

SEQ ID NO: 305009 - RNA, 24 nt, Human
agcccagccaacauggugaaaccc

SEQ ID NO: 305010 - RNA, 23 nt, Human
agcgggcggcuacuucuggcucu

SEQ ID NO: 305011 - RNA, 24 nt, Human
aggaggcugaggcaagaagaauca

SEQ ID NO: 305012 - RNA, 23 nt, Human
aggcaagaagaaucacuugaacc

SEQ ID NO: 305013 - RNA, 25 nt, Human
aggcaagaagaaucacuugaaccug

SEQ ID NO: 305014 - RNA, 20 nt, Human
aggcagccaugucgguucuu

SEQ ID NO: 305015 - RNA, 19 nt, Human
aggcggagguuacagugag

SEQ ID NO: 305016 - RNA, 24 nt, Human
aggcggagguuacagugagccaag

SEQ ID NO: 305017 - RNA, 22 nt, Human
aggcggguggaucaccugaggu

SEQ ID NO: 305018 - RNA, 26 nt, Human
aggcggguggaucaccugaggucagg

SEQ ID NO: 305019 - RNA, 20 nt, Human
aguaggcaccaggugaccgc

SEQ ID NO: 305020 - RNA, 20 nt, Human
agugucaucccgcccuggcc

SEQ ID NO: 305021 - RNA, 25 nt, Human
auaaauaaauaaccaguguaaacaa

SEQ ID NO: 305022 - RNA, 19 nt, Human
aucaccgggcagguccuga

SEQ ID NO: 305023 - RNA, 21 nt, Human
aucacuuuacaguagagaaag

SEQ ID NO: 305024 - RNA, 19 nt, Human
auccaggccuuuggaggcu

SEQ ID NO: 305025 - RNA, 19 nt, Human
augccuguaaucccagcac

SEQ ID NO: 305026 - RNA, 24 nt, Human
auugcaccacugcacuccagccug

SEQ ID NO: 305027 - RNA, 28 nt, Human
auugcaccacugcacuccagccugggca

SEQ ID NO: 305028 - RNA, 25 nt, Human
caacauggugaaacccccgucucua

SEQ ID NO: 305029 - RNA, 22 nt, Human
caagacuguacacccaaaacca

SEQ ID NO: 305030 - RNA, 21 nt, Human
cacaagacuguacacccaaaa

SEQ ID NO: 305031 - RNA, 23 nt, Human
cacaagacuguacacccaaaacc

SEQ ID NO: 305032 - RNA, 19 nt, Human
cacacaggcgcacuuaaau

SEQ ID NO: 305033 - RNA, 19 nt, Human
cacaccuguaaucccagcu

SEQ ID NO: 305034 - RNA, 23 nt, Human
caccugaggucaggaguucgaga

SEQ ID NO: 305035 - RNA, 24 nt, Human
caccuguaaucccagcuacucagg

SEQ ID NO: 305036 - RNA, 18 nt, Human
cacugcacuccagccugg

SEQ ID NO: 305037 - RNA, 19 nt, Human
cacugcacuccagccuggg

SEQ ID NO: 305038 - RNA, 21 nt, Human
cacugcacuccagccugggca

SEQ ID NO: 305039 - RNA, 23 nt, Human
cacugcacuccagccugggcaac

SEQ ID NO: 305040 - RNA, 24 nt, Human
cacugcacuccagccugggcaaca

SEQ ID NO: 305041 - RNA, 25 nt, Human
cacugcacuccagccugggcaacaa

SEQ ID NO: 305042 - RNA, 27 nt, Human
cacugcacuccagccugggcaacagag

SEQ ID NO: 305043 - RNA, 21 nt, Human
cacuugaaccugggaggcgga

SEQ ID NO: 305044 - RNA, 18 nt, Human
cagaacucagucuaggga

SEQ ID NO: 305045 - RNA, 20 nt, Human
cagagugcuggucucaaccc

SEQ ID NO: 305046 - RNA, 19 nt, Human
cagcaccgccgcugaauga

SEQ ID NO: 305047 - RNA, 22 nt, Human
cagcacuuugggaggcucaggc

SEQ ID NO: 305048 - RNA, 24 nt, Human
cagcacuuugggaggcucaggcgg

SEQ ID NO: 305049 - RNA, 18 nt, Human
cagccugggcaacagagg

SEQ ID NO: 305050 - RNA, 22 nt, Human
cagccugggcaacagaggaaga

SEQ ID NO: 305051 - RNA, 19 nt, Human
cagcuggaagacuuggggu

SEQ ID NO: 305052 - RNA, 24 nt, Human
cagcuggaagacuuggggugacag

SEQ ID NO: 305053 - RNA, 20 nt, Human
caggcacacaagacuguaca

SEQ ID NO: 305054 - RNA, 21 nt, Human
caggcacacaagacuguacac

SEQ ID NO: 305055 - RNA, 21 nt, Human
cagguccugaguccauggccu

SEQ ID NO: 305056 - RNA, 20 nt, Human
cagguucccaaaggugaugg

SEQ ID NO: 305057 - RNA, 26 nt, Human
caguucaggcucuucagccccuuuag

SEQ ID NO: 305058 - RNA, 24 nt, Human
caugccuguaaucccagcacuuug

SEQ ID NO: 305059 - RNA, 23 nt, Human
ccaagaaagaccagcaaagcccc

SEQ ID NO: 305060 - RNA, 21 nt, Human
ccacacccgcgcacacaggcg

SEQ ID NO: 305061 - RNA, 20 nt, Human
ccacugcacuccagccuggg

SEQ ID NO: 305062 - RNA, 20 nt, Human
ccacugcacuccagccuggg

SEQ ID NO: 305063 - RNA, 21 nt, Human
ccacugcacuccagccugggc

SEQ ID NO: 305064 - RNA, 23 nt, Human
ccacugcacuccagccugggcaa

SEQ ID NO: 305065 - RNA, 24 nt, Human
ccacugcacuccagccugggcaac

SEQ ID NO: 305066 - RNA, 20 nt, Human
ccagacagaaacaugaaaug

SEQ ID NO: 305067 - RNA, 22 nt, Human
ccagacagaaacaugaaaugac

SEQ ID NO: 305068 - RNA, 22 nt, Human
ccagaugacaguuguccucucu

SEQ ID NO: 305069 - RNA, 19 nt, Human
ccaggacccaggcagucug

SEQ ID NO: 305070 - RNA, 24 nt, Human
ccaucucaaaaaaaaaaaaaaaaa

SEQ ID NO: 305071 - RNA, 22 nt, Human
cccaaaggugaugguucuggaa

SEQ ID NO: 305072 - RNA, 20 nt, Human
cccacgacccgcagccgccu

SEQ ID NO: 305073 - RNA, 24 nt, Human
cccacgacccgcagccgccuccuc

SEQ ID NO: 305074 - RNA, 19 nt, Human
ccccaucucaaaaaaaaaa

SEQ ID NO: 305075 - RNA, 22 nt, Human
ccccgucucuacuaaaauacaa

SEQ ID NO: 305076 - RNA, 21 nt, Human
ccucagccgagagccaggugc

SEQ ID NO: 305077 - RNA, 22 nt, Human
ccucggggggcccagcaccgcc

SEQ ID NO: 305078 - RNA, 22 nt, Human
ccugaggucaggaguucgagac

SEQ ID NO: 305079 - RNA, 18 nt, Human
ccugggaagaagguuccc

SEQ ID NO: 305080 - RNA, 19 nt, Human
ccugggaggcggagguuac

SEQ ID NO: 305081 - RNA, 21 nt, Human
ccuguaaucccagcuacucag

SEQ ID NO: 305082 - RNA, 18 nt, Human
ccuuuggaggcuuaagac

SEQ ID NO: 305083 - RNA, 24 nt, Human
cgagaccagcccagccaacauggu

SEQ ID NO: 305084 - RNA, 19 nt, Human
cggcgcagcugacagggcu

SEQ ID NO: 305085 - RNA, 24 nt, Human
cggguggaucaccugaggucagga

SEQ ID NO: 305086 - RNA, 18 nt, Human
cucaaaaaaaaaaaaaaa

SEQ ID NO: 305087 - RNA, 18 nt, Human
cucaaaaaaaaaaaaaaa

SEQ ID NO: 305088 - RNA, 24 nt, Human
cucaugccuguaaucccagcacuu

SEQ ID NO: 305089 - RNA, 23 nt, Human
cuggccucauccuuuuguuaaaa

SEQ ID NO: 305090 - RNA, 23 nt, Human
cuggugaaucagaacagagcugg

SEQ ID NO: 305091 - RNA, 21 nt, Human
cuguaaucccagcuacucagg

SEQ ID NO: 305092 - RNA, 19 nt, Human
gaagaccccaucucaaaaa

SEQ ID NO: 305093 - RNA, 21 nt, Human
gacccgcagccgccuccucuu

SEQ ID NO: 305094 - RNA, 18 nt, Human
gagguuacagugagccaa

SEQ ID NO: 305095 - RNA, 23 nt, Human
gagguuacagugagccaagauug

SEQ ID NO: 305096 - RNA, 24 nt, Human
gagugggccgggcgugguggcuca

SEQ ID NO: 305097 - RNA, 24 nt, Human
gaucaccugaggucaggaguucga

SEQ ID NO: 305098 - RNA, 25 nt, Human
gccaacauggugaaacccccgucuc

SEQ ID NO: 305099 - RNA, 20 nt, Human
gcccagggcugggaggagcc

SEQ ID NO: 305100 - RNA, 19 nt, Human
gccuuuggaggcuuaagac

SEQ ID NO: 305101 - RNA, 22 nt, Human
ggaagacuuggggugacaaucc

SEQ ID NO: 305102 - RNA, 21 nt, Human
ggaggcggagguuacagugag

SEQ ID NO: 305103 - RNA, 22 nt, Human
ggagguuacagugagccaagau

SEQ ID NO: 305104 - RNA, 24 nt, Human
ggagguuacagugagccaagauug

SEQ ID NO: 305105 - RNA, 22 nt, Human
ggaucaccugaggucaggaguu

SEQ ID NO: 305106 - RNA, 21 nt, Human
ggccgggcgugguggcucaug

SEQ ID NO: 305107 - RNA, 23 nt, Human
ggccgggcgugguggcucaugcc

SEQ ID NO: 305108 - RNA, 23 nt, Human
ggcgugguggcucaugccuguaa

SEQ ID NO: 305109 - RNA, 22 nt, Human
gggaauucucguacccaagacc

SEQ ID NO: 305110 - RNA, 21 nt, Human
ggugcacaccuguaaucccag

SEQ ID NO: 305111 - RNA, 21 nt, Human
gguggaucaccugaggucagg

SEQ ID NO: 305112 - RNA, 24 nt, Human
gguggcucaugccuguaaucccag

SEQ ID NO: 305113 - RNA, 23 nt, Human
gguggugcacaccuguaauccca

SEQ ID NO: 305114 - RNA, 24 nt, Human
gguggugcacaccuguaaucccag

SEQ ID NO: 305115 - RNA, 23 nt, Human
gugcucccacacccgcgcacaca

SEQ ID NO: 305116 - RNA, 23 nt, Human
uaaaagcccacaguccuagcccc

SEQ ID NO: 305117 - RNA, 25 nt, Human
uaaauaaauaaccaguguuguaaua

SEQ ID NO: 305118 - RNA, 20 nt, Human
uaaauaaauaacgcgcacgc

SEQ ID NO: 305119 - RNA, 21 nt, Human
uaacuaacuugccuuccccag

SEQ ID NO: 305120 - RNA, 19 nt, Human
uacacccaaaaccagaaac

SEQ ID NO: 305121 - RNA, 22 nt, Human
uacuucuggcucuguugaguuu

SEQ ID NO: 305122 - RNA, 20 nt, Human
ucaccugaggucaggaguuc

SEQ ID NO: 305123 - RNA, 24 nt, Human
ucacuugaaccugggaggcggagg

SEQ ID NO: 305124 - RNA, 25 nt, Human
ucacuugaaccugggaggcggaggu

SEQ ID NO: 305125 - RNA, 24 nt, Human
ucaggcggguggaucaccugaggu

SEQ ID NO: 305126 - RNA, 26 nt, Human
ucaggcggguggaucaccugagguca

SEQ ID NO: 305127 - RNA, 22 nt, Human
ucaugccuguaaucccagcacu

SEQ ID NO: 305128 - RNA, 27 nt, Human
ucccacacccgcgcacacaggcgcacu

SEQ ID NO: 305129 - RNA, 19 nt, Human
uccccacgacccgcagccg

SEQ ID NO: 305130 - RNA, 19 nt, Human
uccuuuuguuaaaaccugc

SEQ ID NO: 305131 - RNA, 22 nt, Human
ucgcuucugaccugcuuuugcc

SEQ ID NO: 305132 - RNA, 18 nt, Human
ucucaaaaaaaaaaaaaa

SEQ ID NO: 305133 - RNA, 20 nt, Human
ucucuacuaaaauacaaaaa

SEQ ID NO: 305134 - RNA, 23 nt, Human
ucugaaggcugggagaagcccua

SEQ ID NO: 305135 - RNA, 22 nt, Human
ucuggcucuguugaguuuugga

SEQ ID NO: 305136 - RNA, 20 nt, Human
ugaaaaguggagagcaagca

SEQ ID NO: 305137 - RNA, 22 nt, Human
ugaaaaguggagagcaagcauc

SEQ ID NO: 305138 - RNA, 24 nt, Human
ugaaaugacuuaaaaaaauagaaa

SEQ ID NO: 305139 - RNA, 23 nt, Human
ugaaucagaacagagcuggcacc

SEQ ID NO: 305140 - RNA, 22 nt, Human
ugaaucuagaggguaccccggc

SEQ ID NO: 305141 - RNA, 19 nt, Human
ugaggcaagaagaaucacu

SEQ ID NO: 305142 - RNA, 21 nt, Human
ugaggcaagaagaaucacuug

SEQ ID NO: 305143 - RNA, 25 nt, Human
ugaggcaagaagaaucacuugaacc

SEQ ID NO: 305144 - RNA, 26 nt, Human
ugaggcaagaagaaucacuugaaccu

SEQ ID NO: 305145 - RNA, 23 nt, Human
ugagggaauucucguacccaaga

SEQ ID NO: 305146 - RNA, 21 nt, Human
ugcaccacugcacuccagccu

SEQ ID NO: 305147 - RNA, 23 nt, Human
ugccuguaaucccagcacuuugg

SEQ ID NO: 305148 - RNA, 24 nt, Human
ugccuguaaucccagcacuuuggg

SEQ ID NO: 305149 - RNA, 18 nt, Human
ugcgugaccggggugagc

SEQ ID NO: 305150 - RNA, 20 nt, Human
ugcguuguuacuucccagau

SEQ ID NO: 305151 - RNA, 22 nt, Human
ugcugggcccagauccaccagc

SEQ ID NO: 305152 - RNA, 24 nt, Human
uggaucaccugaggucaggaguuc

SEQ ID NO: 305153 - RNA, 27 nt, Human
uggaucaccugaggucaggaguucgag

SEQ ID NO: 305154 - RNA, 24 nt, Human
uggcagagugggccgggcguggug

SEQ ID NO: 305155 - RNA, 22 nt, Human
uggcucaugccuguaaucccag

SEQ ID NO: 305156 - RNA, 24 nt, Human
uggcucaugccuguaaucccagca

SEQ ID NO: 305157 - RNA, 29 nt, Human
ugggaggcggagguuacagugacaacggu

SEQ ID NO: 305158 - RNA, 24 nt, Human
ugggaggcggagguuacagugagc

SEQ ID NO: 305159 - RNA, 24 nt, Human
ugggaggcucaggcggguggauca

SEQ ID NO: 305160 - RNA, 22 nt, Human
ugggaggcucaggcggguggga

SEQ ID NO: 305161 - RNA, 18 nt, Human
uggggugacaauccucag

SEQ ID NO: 305162 - RNA, 22 nt, Human
uggugcacaccuguaaucccag

SEQ ID NO: 305163 - RNA, 24 nt, Human
ugguggcucaugccuguaauccca

SEQ ID NO: 305164 - RNA, 23 nt, Human
uguacacccaaaaccagaaacgc

SEQ ID NO: 305165 - RNA, 18 nt, Human
ugucaucccgcccuggcc

SEQ ID NO: 305166 - RNA, 20 nt, Human
uguuaaaaccugcuuucaga

SEQ ID NO: 305167 - RNA, 22 nt, Human
uuacagugagccaagauugcac

SEQ ID NO: 305168 - RNA, 21 nt, Human
uuagcuggguacggguggugc

SEQ ID NO: 305169 - RNA, 24 nt, Human
uucccagaugacaguuguccucuc

SEQ ID NO: 305170 - RNA, 19 nt, Human
uucucacacuucugguacc

SEQ ID NO: 305171 - RNA, 19 nt, Human
uucucauuucaagguuuca

SEQ ID NO: 305172 - RNA, 21 nt, Human
uugaaccugggaggcggaggu

SEQ ID NO: 305173 - RNA, 23 nt, Human
uugcaccacugcacuccagccug

SEQ ID NO: 305174 - RNA, 19 nt, Human
uuugcugggcccagaucca

SEQ ID NO: 305175 - RNA, 19 nt, Human
uuuguuaaaaccugcuuuc

SEQ ID NO: 305176 - RNA, 18 nt, Human
aaaaaaaaaagaaaaggg

SEQ ID NO: 305177 - RNA, 18 nt, Human
aaaaaaccaaaccugcaa

SEQ ID NO: 305178 - RNA, 25 nt, Human
aaaaagaaaaggucuggacuaccuc

SEQ ID NO: 305179 - RNA, 20 nt, Human
aaacaaaaacaaaaauguga

SEQ ID NO: 305180 - RNA, 28 nt, Human
aaacaaaaacaaaaaugugaugcaccug

SEQ ID NO: 305181 - RNA, 19 nt, Human
aaacagguaucuauuuuua

SEQ ID NO: 305182 - RNA, 24 nt, Human
aaaccaaaccugcaaauaauccua

SEQ ID NO: 305183 - RNA, 20 nt, Human
aaaccugcaaauaauccuag

SEQ ID NO: 305184 - RNA, 27 nt, Human
aaagggaggcagggaaaaaggaaggga

SEQ ID NO: 305185 - RNA, 20 nt, Human
aaccauagaacacuaacuug

SEQ ID NO: 305186 - RNA, 25 nt, Human
aagaccagcagaggaaggucaaggc

SEQ ID NO: 305187 - RNA, 20 nt, Human
aagagauggagucucacugu

SEQ ID NO: 305188 - RNA, 23 nt, Human
aagcacucaauaguaagauaguc

SEQ ID NO: 305189 - RNA, 22 nt, Human
aaggaagggaagaaaugucagg

SEQ ID NO: 305190 - RNA, 21 nt, Human
aauaucagggacaauaaggaa

SEQ ID NO: 305191 - RNA, 20 nt, Human
acaaaaacaaaaaugugaug

SEQ ID NO: 305192 - RNA, 20 nt, Human
acaacgauuacaucuuuuuc

SEQ ID NO: 305193 - RNA, 20 nt, Human
acaugaucaugacucucugc

SEQ ID NO: 305194 - RNA, 19 nt, Human
acccuggaacaagaccagc

SEQ ID NO: 305195 - RNA, 22 nt, Human
acuguguugcccaggcugauaa

SEQ ID NO: 305196 - RNA, 21 nt, Human
agaaaaaaccaaaccugcaaa

SEQ ID NO: 305197 - RNA, 22 nt, Human
agaaaaagaaaaaacuguucag

SEQ ID NO: 305198 - RNA, 22 nt, Human
agaccagcagaggaaggucaag

SEQ ID NO: 305199 - RNA, 19 nt, Human
agagauggagucucacugu

SEQ ID NO: 305200 - RNA, 23 nt, Human
agcaaugccaacaucuuuucucc

SEQ ID NO: 305201 - RNA, 20 nt, Human
aggaagggaagaaaugucag

SEQ ID NO: 305202 - RNA, 18 nt, Human
aggcaauccuccugccuc

SEQ ID NO: 305203 - RNA, 20 nt, Human
aggcacauaccacuauaccc

SEQ ID NO: 305204 - RNA, 19 nt, Human
aggcauaaaagaggcccug

SEQ ID NO: 305205 - RNA, 26 nt, Human
agguaggaaaagagcuauacuucuga

SEQ ID NO: 305206 - RNA, 23 nt, Human
auauucauaacccuggaacaaga

SEQ ID NO: 305207 - RNA, 24 nt, Human
auccaggcuggaguguaaggacau

SEQ ID NO: 305208 - RNA, 20 nt, Human
auccuccugccucagccucc

SEQ ID NO: 305209 - RNA, 23 nt, Human
augcaccugcaaaacuauugccc

SEQ ID NO: 305210 - RNA, 21 nt, Human
augccacagacaaaugagaaa

SEQ ID NO: 305211 - RNA, 19 nt, Human
augguugaggcuaugaagc

SEQ ID NO: 305212 - RNA, 19 nt, Human
caaaagacacugaaaagac

SEQ ID NO: 305213 - RNA, 18 nt, Human
caaagaauuuccagaagc

SEQ ID NO: 305214 - RNA, 19 nt, Human
caaagaauuuccagaagca

SEQ ID NO: 305215 - RNA, 23 nt, Human
caacgguuuagauuucuccugcu

SEQ ID NO: 305216 - RNA, 22 nt, Human
caagaccagcagaggaagguca

SEQ ID NO: 305217 - RNA, 24 nt, Human
cacaaagauaaccaaaauugagac

SEQ ID NO: 305218 - RNA, 28 nt, Human
cacacauuaaaaaaaaaaaaaaaaagaa

SEQ ID NO: 305219 - RNA, 21 nt, Human
cacaccacuaacaccugcaga

SEQ ID NO: 305220 - RNA, 24 nt, Human
caccuccugggcucaggcaauccu

SEQ ID NO: 305221 - RNA, 18 nt, Human
cacuguguugcccaggcu

SEQ ID NO: 305222 - RNA, 19 nt, Human
cacuguguugcccaggcug

SEQ ID NO: 305223 - RNA, 24 nt, Human
cagacaaaugagaaaaaaccaaac

SEQ ID NO: 305224 - RNA, 20 nt, Human
cagccuccugaguaccuggg

SEQ ID NO: 305225 - RNA, 23 nt, Human
cagcuaauuuuuuuuuuaagaga

SEQ ID NO: 305226 - RNA, 22 nt, Human
caggcaauccuccugccucagc

SEQ ID NO: 305227 - RNA, 26 nt, Human
cauaacccuggaacaagaccagcaga

SEQ ID NO: 305228 - RNA, 24 nt, Human
cauaccacuauacccagcuaauuu

SEQ ID NO: 305229 - RNA, 25 nt, Human
cauauucauaacccuggaacaagac

SEQ ID NO: 305230 - RNA, 21 nt, Human
cauuaagaaaaagaaaaaacu

SEQ ID NO: 305231 - RNA, 23 nt, Human
ccaaacaaucagcaaugccaaca

SEQ ID NO: 305232 - RNA, 23 nt, Human
ccacagacaaaugagaaaaaacc

SEQ ID NO: 305233 - RNA, 18 nt, Human
cccucccuuuuccuccca

SEQ ID NO: 305234 - RNA, 22 nt, Human
ccgugcccucccuuuuccuccc

SEQ ID NO: 305235 - RNA, 24 nt, Human
ccugaguaccugggacuacaggca

SEQ ID NO: 305236 - RNA, 24 nt, Human
ccugccucagccuccugaguaccu

SEQ ID NO: 305237 - RNA, 26 nt, Human
cuaugaagcuuuccccuuuuaugaga

SEQ ID NO: 305238 - RNA, 21 nt, Human
cuccaauaaauaacgagauau

SEQ ID NO: 305239 - RNA, 21 nt, Human
cucccaaaacaaaaacaaaaa

SEQ ID NO: 305240 - RNA, 24 nt, Human
cucgcucuguuauccaggcuggag

SEQ ID NO: 305241 - RNA, 21 nt, Human
cugcaguuuccaccuccuggg

SEQ ID NO: 305242 - RNA, 24 nt, Human
cugcaguuuccaccuccugggcuc

SEQ ID NO: 305243 - RNA, 24 nt, Human
cugccaugcuggagaaagcuauac

SEQ ID NO: 305244 - RNA, 19 nt, Human
gaaaaaaccaaaccugcaa

SEQ ID NO: 305245 - RNA, 18 nt, Human
gaaaugucaggcauaaaa

SEQ ID NO: 305246 - RNA, 24 nt, Human
gaagauuucacaagucuguaaaga

SEQ ID NO: 305247 - RNA, 19 nt, Human
gaagggaagaaaugucagg

SEQ ID NO: 305248 - RNA, 24 nt, Human
gacuacaggcacauaccacuauac

SEQ ID NO: 305249 - RNA, 20 nt, Human
gauaaucuagccgagaagga

SEQ ID NO: 305250 - RNA, 18 nt, Human
gaugaaaaagggaggcag

SEQ ID NO: 305251 - RNA, 24 nt, Human
gauuucuccugcuguguuugugug

SEQ ID NO: 305252 - RNA, 23 nt, Human
gcaauccuccugccucagccucc

SEQ ID NO: 305253 - RNA, 19 nt, Human
gcagccaggcuuaggaacc

SEQ ID NO: 305254 - RNA, 19 nt, Human
gcuggaguguaaggacaug

SEQ ID NO: 305255 - RNA, 20 nt, Human
ggaaauggauaaggcaagua

SEQ ID NO: 305256 - RNA, 22 nt, Human
ggagucucacuguguugcccag

SEQ ID NO: 305257 - RNA, 23 nt, Human
ggagucucacuguguugcccagg

SEQ ID NO: 305258 - RNA, 19 nt, Human
ggauaaggcaaguaguguu

SEQ ID NO: 305259 - RNA, 22 nt, Human
gggaggcagggaaaaaggaagg

SEQ ID NO: 305260 - RNA, 22 nt, Human
gggcucaggcaauccuccugcc

SEQ ID NO: 305261 - RNA, 24 nt, Human
guaggaaaagagcuauacuucuga

SEQ ID NO: 305262 - RNA, 22 nt, Human
uaaauaucuucuuccauuaaga

SEQ ID NO: 305263 - RNA, 21 nt, Human
uaacccuggaacaagaccagc

SEQ ID NO: 305264 - RNA, 21 nt, Human
uaacccuggaacaagaccagg

SEQ ID NO: 305265 - RNA, 23 nt, Human
uaagaaaaagaaaaaacuguuca

SEQ ID NO: 305266 - RNA, 20 nt, Human
uaaggagauguuuggaagca

SEQ ID NO: 305267 - RNA, 23 nt, Human
uaaggagauguuuggaagcauca

SEQ ID NO: 305268 - RNA, 21 nt, Human
uaaggcaaguaguguucuucc

SEQ ID NO: 305269 - RNA, 20 nt, Human
uacuagauaacucacucuug

SEQ ID NO: 305270 - RNA, 23 nt, Human
uagcuacagguaauuacaaaaua

SEQ ID NO: 305271 - RNA, 22 nt, Human
uauacaugacaaaagaauugaa

SEQ ID NO: 305272 - RNA, 25 nt, Human
uaugaagccuggcugccgugcccuc

SEQ ID NO: 305273 - RNA, 26 nt, Human
uauuuuauuuuuuugagacagggucu

SEQ ID NO: 305274 - RNA, 18 nt, Human
ucaauaguaagauaguca

SEQ ID NO: 305275 - RNA, 20 nt, Human
uccaaagaauuuccagaagc

SEQ ID NO: 305276 - RNA, 18 nt, Human
uccaaugccacagacaaa

SEQ ID NO: 305277 - RNA, 22 nt, Human
uccacaauacagguuggacuag

SEQ ID NO: 305278 - RNA, 21 nt, Human
uccaggcuggaguguaaggac

SEQ ID NO: 305279 - RNA, 18 nt, Human
ucccuuuuccucccaaaa

SEQ ID NO: 305280 - RNA, 19 nt, Human
ucccuuuuccucccaaaac

SEQ ID NO: 305281 - RNA, 22 nt, Human
ucccuuuuccucccaaaacaaa

SEQ ID NO: 305282 - RNA, 25 nt, Human
uccuccugccucagccuccugagua

SEQ ID NO: 305283 - RNA, 24 nt, Human
uccugaguaccugggacuacaggc

SEQ ID NO: 305284 - RNA, 18 nt, Human
uccugggcucaggcaauc

SEQ ID NO: 305285 - RNA, 22 nt, Human
uccugggcucaggcaauccucc

SEQ ID NO: 305286 - RNA, 24 nt, Human
uccugggcucaggcaauccuccug

SEQ ID NO: 305287 - RNA, 24 nt, Human
ucgcucuguuauccaggcuggagu

SEQ ID NO: 305288 - RNA, 19 nt, Human
ucggugguaguaucaucuc

SEQ ID NO: 305289 - RNA, 22 nt, Human
ucuauugcauuugaaauccaag

SEQ ID NO: 305290 - RNA, 19 nt, Human
ucucacuguguugcccagg

SEQ ID NO: 305291 - RNA, 19 nt, Human
ucucacuguguugcccagg

SEQ ID NO: 305292 - RNA, 25 nt, Human
ucucacuguguugcccaggcugaua

SEQ ID NO: 305293 - RNA, 26 nt, Human
ucucacuguguugcccaggcugauaa

SEQ ID NO: 305294 - RNA, 20 nt, Human
ucuccugcuguguuugugug

SEQ ID NO: 305295 - RNA, 19 nt, Human
ucucgcucuguuauccagg

SEQ ID NO: 305296 - RNA, 23 nt, Human
ucucgcucuguuauccaggcugg

SEQ ID NO: 305297 - RNA, 24 nt, Human
ucucgcucuguuauccaggcugga

SEQ ID NO: 305298 - RNA, 24 nt, Human
ucucugcaguuuccaccuccuggg

SEQ ID NO: 305299 - RNA, 21 nt, Human
ucugcaguuuccaccuccugg

SEQ ID NO: 305300 - RNA, 24 nt, Human
ucuguuauccaggcuggaguguaa

SEQ ID NO: 305301 - RNA, 21 nt, Human
ugaagauuucacaagucugua

SEQ ID NO: 305302 - RNA, 22 nt, Human
ugagacagggucucgcucuguu

SEQ ID NO: 305303 - RNA, 21 nt, Human
ugaggaacacaaagauaacca

SEQ ID NO: 305304 - RNA, 27 nt, Human
ugcacacauuaaaaaaaaaaaaaaaaa

SEQ ID NO: 305305 - RNA, 24 nt, Human
ugccucagccuccugaguaccugg

SEQ ID NO: 305306 - RNA, 18 nt, Human
ugccuccuuuaauaagau

SEQ ID NO: 305307 - RNA, 19 nt, Human
uggaagcaucauuuaagga

SEQ ID NO: 305308 - RNA, 21 nt, Human
uggaagcaucauuuaaggaau

SEQ ID NO: 305309 - RNA, 22 nt, Human
uggacuagacaaugaaacacag

SEQ ID NO: 305310 - RNA, 24 nt, Human
uggagucucacuguguugcccagg

SEQ ID NO: 305311 - RNA, 21 nt, Human
ugggacuacaggcacauacca

SEQ ID NO: 305312 - RNA, 22 nt, Human
ugggacuacaggcacauaccac

SEQ ID NO: 305313 - RNA, 22 nt, Human
ugggacuacaggcacauaccac

SEQ ID NO: 305314 - RNA, 24 nt, Human
ugggacuacaggcacauaccacua

SEQ ID NO: 305315 - RNA, 26 nt, Human
ugggacuacaggcacauaccacuaua

SEQ ID NO: 305316 - RNA, 24 nt, Human
ugggcucaggcaauccuccugccu

SEQ ID NO: 305317 - RNA, 21 nt, Human
uguguugcccaggcugauaag

SEQ ID NO: 305318 - RNA, 23 nt, Human
uuaaaaaaaaaaaaaaaaagaaa

SEQ ID NO: 305319 - RNA, 24 nt, Human
uuaauggucucucuaagguuaaac

SEQ ID NO: 305320 - RNA, 25 nt, Human
uuagcacaccacuaacaccugcaga

SEQ ID NO: 305321 - RNA, 18 nt, Human
uucagguaggaaaagagc

SEQ ID NO: 305322 - RNA, 22 nt, Human
uucauauuuucuagaaugccuc

SEQ ID NO: 305323 - RNA, 22 nt, Human
uugagacagggucucgcucugu

SEQ ID NO: 305324 - RNA, 23 nt, Human
uugcccaggcugauaagaguguu

SEQ ID NO: 305325 - RNA, 19 nt, Human
uugccggaacguuguagau

SEQ ID NO: 305326 - RNA, 23 nt, Human
uuuaagagauggagucucacugu

SEQ ID NO: 305327 - RNA, 26 nt, Human
uuuccucccaaaacaaaaacaaaaau

SEQ ID NO: 305328 - RNA, 28 nt, Human
uuuuauuuuauuuuuuugagacaggguc

SEQ ID NO: 305329 - RNA, 21 nt, Human
uuuuauuuuuuugagacaggg

SEQ ID NO: 305330 - RNA, 19 nt, Human
uuuuuuugagacagggucu

SEQ ID NO: 305331 - RNA, 18 nt, Human
aaaacaguccaaaaaaaa

SEQ ID NO: 305332 - RNA, 24 nt, Human
aaagaaaaaaagaaaaagaaggga

SEQ ID NO: 305333 - RNA, 19 nt, Human
aacaaaaauccgggacaac

SEQ ID NO: 305334 - RNA, 21 nt, Human
aacaaaacaguccaaaaaaaa

SEQ ID NO: 305335 - RNA, 24 nt, Human
aacaaaacaguccaaaaaaaaucu

SEQ ID NO: 305336 - RNA, 20 nt, Human
aagaaaaaaagaaaaagaag

SEQ ID NO: 305337 - RNA, 24 nt, Human
aagaaaaaaagaaaaagaagggau

SEQ ID NO: 305338 - RNA, 26 nt, Human
aaugucauuuuaaguccuguuuucca

SEQ ID NO: 305339 - RNA, 22 nt, Human
aauuaaaccaaagaaaaaaaga

SEQ ID NO: 305340 - RNA, 26 nt, Human
acaaaacaguccaaaaaaaaucuguu

SEQ ID NO: 305341 - RNA, 25 nt, Human
acugacauucucccaaagcgucccu

SEQ ID NO: 305342 - RNA, 19 nt, Human
agaaaaaaagaaaaagaag

SEQ ID NO: 305343 - RNA, 19 nt, Human
agaaagcucuagucccauc

SEQ ID NO: 305344 - RNA, 18 nt, Human
agaggccucaggguggcu

SEQ ID NO: 305345 - RNA, 19 nt, Human
agcccuuugcuuuccagag

SEQ ID NO: 305346 - RNA, 23 nt, Human
agcugguaaagcuucagaaagca

SEQ ID NO: 305347 - RNA, 20 nt, Human
agucauccaauauuauguac

SEQ ID NO: 305348 - RNA, 23 nt, Human
agucccauccaaagaaagauggc

SEQ ID NO: 305349 - RNA, 21 nt, Human
auugaauaaagcagcuuugaa

SEQ ID NO: 305350 - RNA, 23 nt, Human
caaaacaaaacagaagcuauuug

SEQ ID NO: 305351 - RNA, 19 nt, Human
caaagaaaaaaagaaaaag

SEQ ID NO: 305352 - RNA, 26 nt, Human
caagcaacaaaaacugggguggggaa

SEQ ID NO: 305353 - RNA, 20 nt, Human
cacagcaacauccaggcuaa

SEQ ID NO: 305354 - RNA, 24 nt, Human
cagcucaauucacagaucagacug

SEQ ID NO: 305355 - RNA, 20 nt, Human
cagcuuaggaacgugugguc

SEQ ID NO: 305356 - RNA, 19 nt, Human
caggguucuucugccucuc

SEQ ID NO: 305357 - RNA, 22 nt, Human
caucauacagccuuaggcugca

SEQ ID NO: 305358 - RNA, 22 nt, Human
ccaaagaaaaaaagaaaaagaa

SEQ ID NO: 305359 - RNA, 22 nt, Human
ccgcucuccagagucccaacuu

SEQ ID NO: 305360 - RNA, 30 nt, Human
cgggacaacaauauuuucaagcaacaaaag

SEQ ID NO: 305361 - RNA, 18 nt, Human
cucuuuguguuguaugug

SEQ ID NO: 305362 - RNA, 19 nt, Human
cuggguuuuuguuuuuuga

SEQ ID NO: 305363 - RNA, 24 nt, Human
cuuuaaauuaaaccaaagaaaaaa

SEQ ID NO: 305364 - RNA, 20 nt, Human
gaaagaaagcucuaguccca

SEQ ID NO: 305365 - RNA, 21 nt, Human
gcuggaccaaaccuucucagg

SEQ ID NO: 305366 - RNA, 19 nt, Human
gucauuuuaaguccuguuu

SEQ ID NO: 305367 - RNA, 19 nt, Human
guccaaaaaaaaucuguua

SEQ ID NO: 305368 - RNA, 22 nt, Human
gugaaagaaagcucuaguccca

SEQ ID NO: 305369 - RNA, 21 nt, Human
guuucugcagcucaauucaca

SEQ ID NO: 305370 - RNA, 21 nt, Human
uauugaauaaagcagcuuuga

SEQ ID NO: 305371 - RNA, 21 nt, Human
ucagaaagcauuaacaagcac

SEQ ID NO: 305372 - RNA, 21 nt, Human
ucagcaaaacaaaacagaagc

SEQ ID NO: 305373 - RNA, 18 nt, Human
ucaggccaggguucuucu

SEQ ID NO: 305374 - RNA, 22 nt, Human
uccacagugcgaugugucuggg

SEQ ID NO: 305375 - RNA, 18 nt, Human
uccagagucccaacuuuc

SEQ ID NO: 305376 - RNA, 21 nt, Human
ucccauccaaagaaagauggc

SEQ ID NO: 305377 - RNA, 24 nt, Human
ucccugcacgcagagauuuuugca

SEQ ID NO: 305378 - RNA, 21 nt, Human
uccgggacaacaauauuuuca

SEQ ID NO: 305379 - RNA, 22 nt, Human
uccuccgcucuccagaguccca

SEQ ID NO: 305380 - RNA, 25 nt, Human
ucugccucucucuccuccgcucucc

SEQ ID NO: 305381 - RNA, 20 nt, Human
ucuguugcuggguuuuuguu

SEQ ID NO: 305382 - RNA, 21 nt, Human
ucuuccccuacuucuuuuuuu

SEQ ID NO: 305383 - RNA, 22 nt, Human
ugaaagaaagcucuagucccau

SEQ ID NO: 305384 - RNA, 22 nt, Human
ugacagaauuucuucugaacau

SEQ ID NO: 305385 - RNA, 24 nt, Human
uguuaugaacuuuuuaaccuuggg

SEQ ID NO: 305386 - RNA, 21 nt, Human
uuacuuuuaaaaaaggauaac

SEQ ID NO: 305387 - RNA, 21 nt, Human
uuagccuucagcaaaacaaaa

SEQ ID NO: 305388 - RNA, 18 nt, Human
uucaggagaaggaucaag

SEQ ID NO: 305389 - RNA, 24 nt, Human
uucuucugaacauacaugaacugg

SEQ ID NO: 305390 - RNA, 23 nt, Human
uuuauugaauaaagcagcuuuga

SEQ ID NO: 305391 - RNA, 21 nt, Human
uuuucaagcaacaaaaacugg

SEQ ID NO: 305392 - RNA, 23 nt, Human
uuuucuguugcuggguuuuuguu

SEQ ID NO: 305393 - RNA, 19 nt, Human
uuuuuuuuuuuuacuggca

SEQ ID NO: 305394 - RNA, 24 nt, Human
aaagauccgcccgucuuggccucc

SEQ ID NO: 305395 - RNA, 24 nt, Human
aaagugcugggauuacaggcauga

SEQ ID NO: 305396 - RNA, 21 nt, Human
aacaagagccagagccggaga

SEQ ID NO: 305397 - RNA, 19 nt, Human
aagaaagacagagaaaagg

SEQ ID NO: 305398 - RNA, 21 nt, Human
aagagaaagagggugagagaa

SEQ ID NO: 305399 - RNA, 19 nt, Human
aagugcugggauuacaggc

SEQ ID NO: 305400 - RNA, 21 nt, Human
aagugcugggauuacaggcau

SEQ ID NO: 305401 - RNA, 26 nt, Human
aagugcugggauuacaggcaugagcc

SEQ ID NO: 305402 - RNA, 23 nt, Human
aaguuggagucuguggggcgggu

SEQ ID NO: 305403 - RNA, 18 nt, Human
acaggcgaccacaggggc

SEQ ID NO: 305404 - RNA, 21 nt, Human
acccccaacauggagagagac

SEQ ID NO: 305405 - RNA, 21 nt, Human
accucuaucuccagcagucac

SEQ ID NO: 305406 - RNA, 22 nt, Human
acgggcccaggggcggcucugc

SEQ ID NO: 305407 - RNA, 26 nt, Human
agacaggggccaagaaagacagagaa

SEQ ID NO: 305408 - RNA, 23 nt, Human
agagaaccccaaacaagagccag

SEQ ID NO: 305409 - RNA, 18 nt, Human
agagggagaucuggagaa

SEQ ID NO: 305410 - RNA, 20 nt, Human
aggcaugagccaccgugccu

SEQ ID NO: 305411 - RNA, 23 nt, Human
aggcaugagccaccgugccuggc

SEQ ID NO: 305412 - RNA, 19 nt, Human
auccgcccgucuuggccuc

SEQ ID NO: 305413 - RNA, 24 nt, Human
auuuuaguagaugcgggguuuugc

SEQ ID NO: 305414 - RNA, 24 nt, Human
caaagugcugggauuacaggcaug

SEQ ID NO: 305415 - RNA, 18 nt, Human
caagagccagagccggag

SEQ ID NO: 305416 - RNA, 22 nt, Human
cagagugaaguuccuuccugcc

SEQ ID NO: 305417 - RNA, 23 nt, Human
cagcagagugaaguuccuuccug

SEQ ID NO: 305418 - RNA, 19 nt, Human
caggggccaagaaagacag

SEQ ID NO: 305419 - RNA, 26 nt, Human
caggggccaagaaagacagagaaaag

SEQ ID NO: 305420 - RNA, 21 nt, Human
cauggagagagacaggggcca

SEQ ID NO: 305421 - RNA, 23 nt, Human
ccaaagugcugggauuacaggca

SEQ ID NO: 305422 - RNA, 24 nt, Human
ccaaagugcugggauuacaggcau

SEQ ID NO: 305423 - RNA, 20 nt, Human
ccaagaaagacagagaaaaa

SEQ ID NO: 305424 - RNA, 23 nt, Human
ccacuggccccauugguugaagc

SEQ ID NO: 305425 - RNA, 20 nt, Human
ccaggcuggccuccaacucc

SEQ ID NO: 305426 - RNA, 22 nt, Human
ccauuuuggccaggcuggccuc

SEQ ID NO: 305427 - RNA, 24 nt, Human
cccaaagugcugggauuacaggca

SEQ ID NO: 305428 - RNA, 20 nt, Human
cccccuugugggguaacccg

SEQ ID NO: 305429 - RNA, 26 nt, Human
ccccuggauguggcuggucuuggucc

SEQ ID NO: 305430 - RNA, 22 nt, Human
cccgucuuggccucccaaagug

SEQ ID NO: 305431 - RNA, 22 nt, Human
ccgcuggguuggcuuggggugc

SEQ ID NO: 305432 - RNA, 18 nt, Human
ccggagaaaugaggaccc

SEQ ID NO: 305433 - RNA, 25 nt, Human
ccugcccugaccccaggucuauggc

SEQ ID NO: 305434 - RNA, 19 nt, Human
cgcagcccaggggcccucu

SEQ ID NO: 305435 - RNA, 19 nt, Human
cggccgagguucucggaag

SEQ ID NO: 305436 - RNA, 23 nt, Human
cgggguuuugccauuuuggccag

SEQ ID NO: 305437 - RNA, 24 nt, Human
cgggguuuugccauuuuggccagg

SEQ ID NO: 305438 - RNA, 23 nt, Human
cgugagugggguggggucuggau

SEQ ID NO: 305439 - RNA, 26 nt, Human
cucccgaccucaaaagauccgcccgu

SEQ ID NO: 305440 - RNA, 18 nt, Human
cuccggcgcagacgggcc

SEQ ID NO: 305441 - RNA, 19 nt, Human
cucgcagcggcccccuugu

SEQ ID NO: 305442 - RNA, 22 nt, Human
cuucucgcagcggcccccuugu

SEQ ID NO: 305443 - RNA, 23 nt, Human
gaaguuccuuccugcccugaccc

SEQ ID NO: 305444 - RNA, 18 nt, Human
gaaugggggagggaagga

SEQ ID NO: 305445 - RNA, 23 nt, Human
gaccucaaaagauccgcccgucu

SEQ ID NO: 305446 - RNA, 22 nt, Human
gagaaccccaaacaagagccag

SEQ ID NO: 305447 - RNA, 19 nt, Human
gagaaugggggagggaagg

SEQ ID NO: 305448 - RNA, 18 nt, Human
gagagaaccccaaacaag

SEQ ID NO: 305449 - RNA, 23 nt, Human
gagagagacaggggccaagaaag

SEQ ID NO: 305450 - RNA, 24 nt, Human
gagccagagccggagaaaugagga

SEQ ID NO: 305451 - RNA, 18 nt, Human
gauuacaggcaugagcca

SEQ ID NO: 305452 - RNA, 21 nt, Human
gauuacaggcaugagccaccg

SEQ ID NO: 305453 - RNA, 24 nt, Human
gauuacaggcaugagccaccgugc

SEQ ID NO: 305454 - RNA, 23 nt, Human
gcccaggggcccucuguaaacau

SEQ ID NO: 305455 - RNA, 21 nt, Human
gcccaggggcggcucugcuug

SEQ ID NO: 305456 - RNA, 22 nt, Human
gcgcagcccaggggcccucugu

SEQ ID NO: 305457 - RNA, 24 nt, Human
gcgcagcccaggggcccucuguaa

SEQ ID NO: 305458 - RNA, 20 nt, Human
gcgggguuuugccauuuugg

SEQ ID NO: 305459 - RNA, 24 nt, Human
gcgggguuuugccauuuuggccag

SEQ ID NO: 305460 - RNA, 23 nt, Human
gcuggccuccaacucccgaccuc

SEQ ID NO: 305461 - RNA, 20 nt, Human
gcuuggagccccacuggccc

SEQ ID NO: 305462 - RNA, 20 nt, Human
gcuuggggcggguccucggu

SEQ ID NO: 305463 - RNA, 19 nt, Human
ggaaggaaagagaaagagg

SEQ ID NO: 305464 - RNA, 26 nt, Human
ggagacagagggagaucuggagaaug

SEQ ID NO: 305465 - RNA, 20 nt, Human
ggaggacacguagauauggg

SEQ ID NO: 305466 - RNA, 24 nt, Human
ggauuacaggcaugagccaccgug

SEQ ID NO: 305467 - RNA, 20 nt, Human
ggcagggcagagggucaggg

SEQ ID NO: 305468 - RNA, 19 nt, Human
ggcaggugcagccagaagg

SEQ ID NO: 305469 - RNA, 22 nt, Human
ggccgcgcagcccaggggcccu

SEQ ID NO: 305470 - RNA, 20 nt, Human
ggcugggaggguccgcuggg

SEQ ID NO: 305471 - RNA, 18 nt, Human
gggaaggaaagagaaaga

SEQ ID NO: 305472 - RNA, 21 nt, Human
gggaggguccgcuggguuggc

SEQ ID NO: 305473 - RNA, 23 nt, Human
gggcugggaggguccgcuggguu

SEQ ID NO: 305474 - RNA, 20 nt, Human
ggggcccucuguaaacaugg

SEQ ID NO: 305475 - RNA, 21 nt, Human
gggggaccugcggugggcagg

SEQ ID NO: 305476 - RNA, 23 nt, Human
gggguuuugccauuuuggccagg

SEQ ID NO: 305477 - RNA, 21 nt, Human
gguugaagcagggcugggagg

SEQ ID NO: 305478 - RNA, 21 nt, Human
guuaggacccccaacauggag

SEQ ID NO: 305479 - RNA, 21 nt, Human
uaauuuuuguauuuuaguaga

SEQ ID NO: 305480 - RNA, 22 nt, Human
uacaggcaugagccaccgugcc

SEQ ID NO: 305481 - RNA, 20 nt, Human
uaggacccccaacauggaga

SEQ ID NO: 305482 - RNA, 23 nt, Human
uaguagaugcgggguuuugccau

SEQ ID NO: 305483 - RNA, 28 nt, Human
ucacuggguccaccauucgucagcuggu

SEQ ID NO: 305484 - RNA, 24 nt, Human
ucccaaagugcugggauuacaggc

SEQ ID NO: 305485 - RNA, 19 nt, Human
uccgggaccccgggggacc

SEQ ID NO: 305486 - RNA, 24 nt, Human
ucuguaaacauggcaggugcagcc

SEQ ID NO: 305487 - RNA, 20 nt, Human
ucuuggccucccaaagugcu

SEQ ID NO: 305488 - RNA, 19 nt, Human
ugagugggguggggucugg

SEQ ID NO: 305489 - RNA, 24 nt, Human
ugccauuuuggccaggcuggccuc

SEQ ID NO: 305490 - RNA, 23 nt, Human
ugcccaggcuggggccgcgcagc

SEQ ID NO: 305491 - RNA, 23 nt, Human
ugcccugaccccaggucuauggc

SEQ ID NO: 305492 - RNA, 25 nt, Human
ugcccugaccccaggucuauggcuu

SEQ ID NO: 305493 - RNA, 22 nt, Human
ugcggugggcagggcagagggu

SEQ ID NO: 305494 - RNA, 20 nt, Human
uggccaggcuggccuccaac

SEQ ID NO: 305495 - RNA, 21 nt, Human
uggccaggcuggccuccaacu

SEQ ID NO: 305496 - RNA, 19 nt, Human
uggccuccaacucccgacc

SEQ ID NO: 305497 - RNA, 20 nt, Human
uggccuccaacucccgaccu

SEQ ID NO: 305498 - RNA, 18 nt, Human
uggccucccaaagugcug

SEQ ID NO: 305499 - RNA, 20 nt, Human
ugggaggguccgcuggguug

SEQ ID NO: 305500 - RNA, 21 nt, Human
ugggaggguccgcuggguugg

SEQ ID NO: 305501 - RNA, 22 nt, Human
ugggaggguccgcuggguuggc

SEQ ID NO: 305502 - RNA, 18 nt, Human
ugggauuacaggcaugag

SEQ ID NO: 305503 - RNA, 21 nt, Human
ugggauuacaggcaugagcca

SEQ ID NO: 305504 - RNA, 22 nt, Human
ugggauuacaggcaugagccac

SEQ ID NO: 305505 - RNA, 23 nt, Human
ugggauuacaggcaugagccacc

SEQ ID NO: 305506 - RNA, 23 nt, Human
ugggauuacaggcaugagccacc

SEQ ID NO: 305507 - RNA, 24 nt, Human
ugggauuacaggcaugagccaccg

SEQ ID NO: 305508 - RNA, 22 nt, Human
uggggugggggaguuaggaccc

SEQ ID NO: 305509 - RNA, 18 nt, Human
uuagguuggcugcuugga

SEQ ID NO: 305510 - RNA, 24 nt, Human
uuaguagaugcgggguuuugccau

SEQ ID NO: 305511 - RNA, 19 nt, Human
uuccaugacccuuacaagg

SEQ ID NO: 305512 - RNA, 21 nt, Human
uuccugcccugaccccagguc

SEQ ID NO: 305513 - RNA, 18 nt, Human
uugaagcagggcugggag

SEQ ID NO: 305514 - RNA, 19 nt, Human
uugaagcagggcugggagg

SEQ ID NO: 305515 - RNA, 20 nt, Human
uuuuuguauuuuaguagaug

SEQ ID NO: 305516 - RNA, 21 nt, Human
aaaaaaaugccagagaaccac

SEQ ID NO: 305517 - RNA, 21 nt, Human
aaaaaccccaaugaaacagac

SEQ ID NO: 305518 - RNA, 21 nt, Human
aaaaagaaugcuauuccucau

SEQ ID NO: 305519 - RNA, 21 nt, Human
aaaaagcagcccuucuccaca

SEQ ID NO: 305520 - RNA, 25 nt, Human
aaaaagccaaagagaagcaguggga

SEQ ID NO: 305521 - RNA, 23 nt, Human
aaaagacacucagaacacacuga

SEQ ID NO: 305522 - RNA, 23 nt, Human
aaaagcuuccagauggcuucuac

SEQ ID NO: 305523 - RNA, 26 nt, Human
aaaauccuuucuacacagucgcucuu

SEQ ID NO: 305524 - RNA, 18 nt, Human
aaagaccaauaaguaucu

SEQ ID NO: 305525 - RNA, 23 nt, Human
aaagcucaccauccccacaaaaa

SEQ ID NO: 305526 - RNA, 18 nt, Human
aaauacaaccccacccgc

SEQ ID NO: 305527 - RNA, 20 nt, Human
aaauacaaccccacccgcua

SEQ ID NO: 305528 - RNA, 18 nt, Human
aacaaaaugcccccgaac

SEQ ID NO: 305529 - RNA, 21 nt, Human
aacaaugaauucaagaaugaa

SEQ ID NO: 305530 - RNA, 18 nt, Human
aacaggguccucccccuc

SEQ ID NO: 305531 - RNA, 19 nt, Human
aaccaacccgaccgcacca

SEQ ID NO: 305532 - RNA, 23 nt, Human
aaccaacccgaccgcaccaacug

SEQ ID NO: 305533 - RNA, 18 nt, Human
aaccgaagcugccgcagc

SEQ ID NO: 305534 - RNA, 20 nt, Human
aacugcccucaagcucugcc

SEQ ID NO: 305535 - RNA, 24 nt, Human
aagaggaaaaaaaagaacacguug

SEQ ID NO: 305536 - RNA, 18 nt, Human
aagaugcagguacuggcu

SEQ ID NO: 305537 - RNA, 21 nt, Human
aaggagcagacacauuacuga

SEQ ID NO: 305538 - RNA, 20 nt, Human
aaucauggcgugccaucuag

SEQ ID NO: 305539 - RNA, 20 nt, Human
acaaaaaccccaaugaaaca

SEQ ID NO: 305540 - RNA, 18 nt, Human
acaacaaaaugcccccga

SEQ ID NO: 305541 - RNA, 24 nt, Human
acaacagaauagauuuuucacaag

SEQ ID NO: 305542 - RNA, 23 nt, Human
acaacucccagcagagccaugcc

SEQ ID NO: 305543 - RNA, 21 nt, Human
acaccaggcccaguggguagu

SEQ ID NO: 305544 - RNA, 23 nt, Human
acagaacacaacaaaaugccccc

SEQ ID NO: 305545 - RNA, 24 nt, Human
acagaacacaacaaaaugcccccg

SEQ ID NO: 305546 - RNA, 21 nt, Human
agaaaagcucccaccgccucc

SEQ ID NO: 305547 - RNA, 21 nt, Human
agacuggucccuaugccauuu

SEQ ID NO: 305548 - RNA, 19 nt, Human
agcauccaccugcuucagc

SEQ ID NO: 305549 - RNA, 18 nt, Human
agccagggugccugacug

SEQ ID NO: 305550 - RNA, 24 nt, Human
agccucacagaggccuacucuggg

SEQ ID NO: 305551 - RNA, 22 nt, Human
aggaaaaaaaagaacacguugg

SEQ ID NO: 305552 - RNA, 20 nt, Human
aggaaacaccauacaagcac

SEQ ID NO: 305553 - RNA, 22 nt, Human
aggaaacaccauacaagcacca

SEQ ID NO: 305554 - RNA, 18 nt, Human
aggcaaaaaagggggcug

SEQ ID NO: 305555 - RNA, 18 nt, Human
aggcaaagagaaaagcuu

SEQ ID NO: 305556 - RNA, 22 nt, Human
aggcaggaaggacagaagggac

SEQ ID NO: 305557 - RNA, 18 nt, Human
aggccucuaaugccccca

SEQ ID NO: 305558 - RNA, 21 nt, Human
aggcuuccaaauacaaccccu

SEQ ID NO: 305559 - RNA, 23 nt, Human
agggagaaugaagaggaaaaaaa

SEQ ID NO: 305560 - RNA, 23 nt, Human
aguaccaguccggccaaacuacc

SEQ ID NO: 305561 - RNA, 24 nt, Human
aguaccaguccggccaaacuaccc

SEQ ID NO: 305562 - RNA, 22 nt, Human
agugacaaaggaaggcaaaaaa

SEQ ID NO: 305563 - RNA, 24 nt, Human
auaaaaacuguagaaaaaaaugcc

SEQ ID NO: 305564 - RNA, 23 nt, Human
auaaagaugguacuuggucucuc

SEQ ID NO: 305565 - RNA, 22 nt, Human
aucugacuccccuccuuagcaa

SEQ ID NO: 305566 - RNA, 19 nt, Human
auuuuaugauucaaagcuc

SEQ ID NO: 305567 - RNA, 27 nt, Human
caaaaaagagacccguggaagacacau

SEQ ID NO: 305568 - RNA, 20 nt, Human
caaaaaccccaaugaaacag

SEQ ID NO: 305569 - RNA, 21 nt, Human
caaaaaccccaaugaaacaga

SEQ ID NO: 305570 - RNA, 21 nt, Human
caaaaagaaugcuauuccuca

SEQ ID NO: 305571 - RNA, 23 nt, Human
caaaacaaaaaccccaaugaaac

SEQ ID NO: 305572 - RNA, 22 nt, Human
caaaaugcccccgaacuuucaa

SEQ ID NO: 305573 - RNA, 20 nt, Human
caaagcaaaacacaacuccc

SEQ ID NO: 305574 - RNA, 26 nt, Human
caaagcucaccauccccacaaaaaga

SEQ ID NO: 305575 - RNA, 20 nt, Human
caaauacaaccccacccgcu

SEQ ID NO: 305576 - RNA, 22 nt, Human
caacuacauuaugaacuguccc

SEQ ID NO: 305577 - RNA, 20 nt, Human
caacugcccucaagcucugc

SEQ ID NO: 305578 - RNA, 22 nt, Human
caagacagucccaggguccaga

SEQ ID NO: 305579 - RNA, 22 nt, Human
caagccuaauauucuguugagg

SEQ ID NO: 305580 - RNA, 23 nt, Human
caaguggcuggagcuaaagcagg

SEQ ID NO: 305581 - RNA, 20 nt, Human
caaucugacuccccuccuua

SEQ ID NO: 305582 - RNA, 18 nt, Human
cacaaaaaaaggcaaaga

SEQ ID NO: 305583 - RNA, 26 nt, Human
cacaaaaucacuucuugugcaaaaca

SEQ ID NO: 305584 - RNA, 27 nt, Human
caccuuagaaaacaggaauugcccagg

SEQ ID NO: 305585 - RNA, 20 nt, Human
caccuugcuacccucucccc

SEQ ID NO: 305586 - RNA, 20 nt, Human
cacguugggagaaacccggg

SEQ ID NO: 305587 - RNA, 18 nt, Human
cacugaaauuuuaguacc

SEQ ID NO: 305588 - RNA, 21 nt, Human
cacuuuuguguccuucgaagg

SEQ ID NO: 305589 - RNA, 22 nt, Human
cagaacacaacaaaaugccccc

SEQ ID NO: 305590 - RNA, 23 nt, Human
cagaacacaacaaaaugcccccg

SEQ ID NO: 305591 - RNA, 24 nt, Human
cagaagauuccuggccuaaaauca

SEQ ID NO: 305592 - RNA, 19 nt, Human
cagcuggacucuauuuguc

SEQ ID NO: 305593 - RNA, 21 nt, Human
caggagauauauagaaggcau

SEQ ID NO: 305594 - RNA, 26 nt, Human
caguuuaagagaacacauggggcuga

SEQ ID NO: 305595 - RNA, 18 nt, Human
caugaugggggcaggaau

SEQ ID NO: 305596 - RNA, 23 nt, Human
cauugaaacugcaguuaagaugc

SEQ ID NO: 305597 - RNA, 19 nt, Human
cauugcaccuuuucuuuac

SEQ ID NO: 305598 - RNA, 20 nt, Human
cauuggucuggcaacaaacu

SEQ ID NO: 305599 - RNA, 23 nt, Human
cauuuuccuuugguugucuuuuu

SEQ ID NO: 305600 - RNA, 19 nt, Human
ccaaaaccccauccagcaa

SEQ ID NO: 305601 - RNA, 19 nt, Human
ccaauccugaaacugcagu

SEQ ID NO: 305602 - RNA, 20 nt, Human
ccaggguccagaucauggga

SEQ ID NO: 305603 - RNA, 19 nt, Human
ccaguaccaguccggccaa

SEQ ID NO: 305604 - RNA, 19 nt, Human
ccaguccggccaaacuacc

SEQ ID NO: 305605 - RNA, 23 nt, Human
ccauccccacaaaaagaaugcua

SEQ ID NO: 305606 - RNA, 21 nt, Human
ccaucccggccggcugcugcu

SEQ ID NO: 305607 - RNA, 21 nt, Human
cccaaaaccccauccagcaaa

SEQ ID NO: 305608 - RNA, 21 nt, Human
cccaggguccagaucauggga

SEQ ID NO: 305609 - RNA, 21 nt, Human
cccaggugcaauucucaguuu

SEQ ID NO: 305610 - RNA, 24 nt, Human
cccauucuaucacaaaaccuaaac

SEQ ID NO: 305611 - RNA, 23 nt, Human
ccccagaggccgggacucgggcu

SEQ ID NO: 305612 - RNA, 24 nt, Human
cccccagaacuagagcuuuccuag

SEQ ID NO: 305613 - RNA, 18 nt, Human
cccccuacccuccccaac

SEQ ID NO: 305614 - RNA, 22 nt, Human
ccccucuacacaccaggcccag

SEQ ID NO: 305615 - RNA, 19 nt, Human
cccgaccgcaccaacugcc

SEQ ID NO: 305616 - RNA, 25 nt, Human
cccuacccuccccaacaauugcaca

SEQ ID NO: 305617 - RNA, 20 nt, Human
cccuaucuggacccucuggu

SEQ ID NO: 305618 - RNA, 26 nt, Human
cccucaagcucugcccggacuccagc

SEQ ID NO: 305619 - RNA, 18 nt, Human
cccucugguuucugaggc

SEQ ID NO: 305620 - RNA, 18 nt, Human
cccuggaccacagggccc

SEQ ID NO: 305621 - RNA, 18 nt, Human
cccuggaccacagggccc

SEQ ID NO: 305622 - RNA, 22 nt, Human
cccuggaccacagggccccugg

SEQ ID NO: 305623 - RNA, 20 nt, Human
ccgaacaggguccucccccu

SEQ ID NO: 305624 - RNA, 23 nt, Human
ccgaacaggguccucccccucuc

SEQ ID NO: 305625 - RNA, 18 nt, Human
ccggccggagaaguccag

SEQ ID NO: 305626 - RNA, 21 nt, Human
ccgggacucgggcuccucucc

SEQ ID NO: 305627 - RNA, 23 nt, Human
ccuaaaaucaaggccacuggagc

SEQ ID NO: 305628 - RNA, 21 nt, Human
ccuauagcucccaaaacccca

SEQ ID NO: 305629 - RNA, 19 nt, Human
ccucaggccucuaaugccc

SEQ ID NO: 305630 - RNA, 19 nt, Human
ccucucgccuuucccccua

SEQ ID NO: 305631 - RNA, 21 nt, Human
ccugcaaaagcuucagaaacc

SEQ ID NO: 305632 - RNA, 21 nt, Human
ccuggccuaaaaucaaggcca

SEQ ID NO: 305633 - RNA, 19 nt, Human
ccuuucccccuacccuccc

SEQ ID NO: 305634 - RNA, 19 nt, Human
ccuuugguugucuuuuuca

SEQ ID NO: 305635 - RNA, 20 nt, Human
cgcagccucgggaauggggc

SEQ ID NO: 305636 - RNA, 22 nt, Human
cggcaccaaagucacaugcugg

SEQ ID NO: 305637 - RNA, 20 nt, Human
cgggcaagugacaaaggaag

SEQ ID NO: 305638 - RNA, 21 nt, Human
cgggcaagugacaaaggaagg

SEQ ID NO: 305639 - RNA, 22 nt, Human
cuaaaaauauauaucugcaaaa

SEQ ID NO: 305640 - RNA, 22 nt, Human
cuaaaaucaaggccacuggagc

SEQ ID NO: 305641 - RNA, 22 nt, Human
cuacccucucccccucuacaca

SEQ ID NO: 305642 - RNA, 18 nt, Human
cuaugggcuuuucuccuc

SEQ ID NO: 305643 - RNA, 21 nt, Human
cucaccauccccacaaaaaga

SEQ ID NO: 305644 - RNA, 21 nt, Human
cucacccaauccugaaacugc

SEQ ID NO: 305645 - RNA, 25 nt, Human
cucaggccucuaaugcccccauccc

SEQ ID NO: 305646 - RNA, 23 nt, Human
cucaugaaggaggccaagaccug

SEQ ID NO: 305647 - RNA, 19 nt, Human
cucauugaaacugcaguua

SEQ ID NO: 305648 - RNA, 20 nt, Human
cucccaaaaccccauccagc

SEQ ID NO: 305649 - RNA, 23 nt, Human
cucccaaaaccccauccagcaaa

SEQ ID NO: 305650 - RNA, 21 nt, Human
cucucccugcaaaagcuucag

SEQ ID NO: 305651 - RNA, 21 nt, Human
cugcaguuaagaugccaagac

SEQ ID NO: 305652 - RNA, 20 nt, Human
cugcccccacuccauuugcc

SEQ ID NO: 305653 - RNA, 21 nt, Human
cugcccccacuccauuugccu

SEQ ID NO: 305654 - RNA, 22 nt, Human
cugcucccaagucaugggcgua

SEQ ID NO: 305655 - RNA, 25 nt, Human
cuggcuaaacaaaacaaaaacccca

SEQ ID NO: 305656 - RNA, 21 nt, Human
cugggcgcucccgccggggug

SEQ ID NO: 305657 - RNA, 20 nt, Human
cuucuccacaagccagccca

SEQ ID NO: 305658 - RNA, 22 nt, Human
cuugagcauccaccugcuucag

SEQ ID NO: 305659 - RNA, 24 nt, Human
cuugagcauccaccugcuucagca

SEQ ID NO: 305660 - RNA, 21 nt, Human
gaagaggaaaaaaaagaacac

SEQ ID NO: 305661 - RNA, 19 nt, Human
gaagauuccuggccuaaaa

SEQ ID NO: 305662 - RNA, 18 nt, Human
gacugaaaaaaagcagcc

SEQ ID NO: 305663 - RNA, 21 nt, Human
gacugccaaagcaaaacacaa

SEQ ID NO: 305664 - RNA, 20 nt, Human
gagcaggagggcagacugca

SEQ ID NO: 305665 - RNA, 22 nt, Human
gcaccaacugcccucaagcucu

SEQ ID NO: 305666 - RNA, 26 nt, Human
gcacuagacucucaugaaggaggcca

SEQ ID NO: 305667 - RNA, 22 nt, Human
gcagaagauuccuggccuaaaa

SEQ ID NO: 305668 - RNA, 18 nt, Human
gcagacugcacauagccu

SEQ ID NO: 305669 - RNA, 18 nt, Human
gccacaaguggcuggagc

SEQ ID NO: 305670 - RNA, 19 nt, Human
gccaucuaaaagcacugca

SEQ ID NO: 305671 - RNA, 20 nt, Human
gccaucuaaggccaggugga

SEQ ID NO: 305672 - RNA, 24 nt, Human
gcccucugccucauugaaacugca

SEQ ID NO: 305673 - RNA, 20 nt, Human
gcucccaaaaccccauccag

SEQ ID NO: 305674 - RNA, 18 nt, Human
ggagagggagugaaagug

SEQ ID NO: 305675 - RNA, 21 nt, Human
ggagcuaaagcagguuugagc

SEQ ID NO: 305676 - RNA, 19 nt, Human
ggagggggaaaugaaggga

SEQ ID NO: 305677 - RNA, 24 nt, Human
ggccagacuguccccucuugggga

SEQ ID NO: 305678 - RNA, 18 nt, Human
ggcuuggagagggaguga

SEQ ID NO: 305679 - RNA, 24 nt, Human
gggaagguauuaaacaaaaagacc

SEQ ID NO: 305680 - RNA, 20 nt, Human
ggugugacucucacccugga

SEQ ID NO: 305681 - RNA, 22 nt, Human
guggguaguagacuggucccua

SEQ ID NO: 305682 - RNA, 20 nt, Human
guguggggcaugaugggggc

SEQ ID NO: 305683 - RNA, 18 nt, Human
uaaaaagacauggucucu

SEQ ID NO: 305684 - RNA, 18 nt, Human
uaaagaugguacuugguc

SEQ ID NO: 305685 - RNA, 22 nt, Human
uaaaugaaaucccaagccuccc

SEQ ID NO: 305686 - RNA, 26 nt, Human
uaaccaagaaaaagccaaagagaagc

SEQ ID NO: 305687 - RNA, 23 nt, Human
uacacgaauuuucuuggacacug

SEQ ID NO: 305688 - RNA, 22 nt, Human
uacagaacacaacaaaaugccc

SEQ ID NO: 305689 - RNA, 26 nt, Human
uacagaacacaacaaaaugcccccga

SEQ ID NO: 305690 - RNA, 24 nt, Human
uacuaacagucuaaacacuaagcc

SEQ ID NO: 305691 - RNA, 19 nt, Human
uagaaaacaggaauugccc

SEQ ID NO: 305692 - RNA, 18 nt, Human
uagaaagaaugcccucau

SEQ ID NO: 305693 - RNA, 26 nt, Human
uagcaaccuauagcucccaaaacccc

SEQ ID NO: 305694 - RNA, 20 nt, Human
uagcucccaaaaccccaucc

SEQ ID NO: 305695 - RNA, 20 nt, Human
uaggcuaaggaaacaccaua

SEQ ID NO: 305696 - RNA, 21 nt, Human
uaguuacagugaucaauuuua

SEQ ID NO: 305697 - RNA, 23 nt, Human
uaucacaaaaccuaaacagccuu

SEQ ID NO: 305698 - RNA, 19 nt, Human
uaucuguauuuccauuuug

SEQ ID NO: 305699 - RNA, 19 nt, Human
uauggaagcacauguguaa

SEQ ID NO: 305700 - RNA, 20 nt, Human
uaugggcuuuucuccucaga

SEQ ID NO: 305701 - RNA, 26 nt, Human
uauugcaaugucuuuauugcauuacu

SEQ ID NO: 305702 - RNA, 28 nt, Human
ucaaaaaaaacaucugcuuccagcuuag

SEQ ID NO: 305703 - RNA, 25 nt, Human
ucaaacagcugacucacucugagcc

SEQ ID NO: 305704 - RNA, 23 nt, Human
ucacaaguaacggcaccaaaguc

SEQ ID NO: 305705 - RNA, 18 nt, Human
ucacagaggccuacucug

SEQ ID NO: 305706 - RNA, 18 nt, Human
ucacccccagaacuagag

SEQ ID NO: 305707 - RNA, 22 nt, Human
ucagcagguucaacaccaggug

SEQ ID NO: 305708 - RNA, 19 nt, Human
ucagugcagcggcauggcu

SEQ ID NO: 305709 - RNA, 20 nt, Human
ucagugcagcggcauggcug

SEQ ID NO: 305710 - RNA, 22 nt, Human
ucauggcgugccaucuaaggcc

SEQ ID NO: 305711 - RNA, 18 nt, Human
ucccaucaaacauugguc

SEQ ID NO: 305712 - RNA, 24 nt, Human
ucccccagaggccgggacucgggc

SEQ ID NO: 305713 - RNA, 21 nt, Human
ucccccucuacacaccaggcc

SEQ ID NO: 305714 - RNA, 19 nt, Human
ucccugcaaaagcuucaga

SEQ ID NO: 305715 - RNA, 22 nt, Human
ucccugcaaaagcuucagaaac

SEQ ID NO: 305716 - RNA, 20 nt, Human
ucccuuucuauccucgucac

SEQ ID NO: 305717 - RNA, 19 nt, Human
ucugaggccacugaagccu

SEQ ID NO: 305718 - RNA, 22 nt, Human
ucugcagagagcgaauccccca

SEQ ID NO: 305719 - RNA, 22 nt, Human
ucugcagggccuuuaaacuugg

SEQ ID NO: 305720 - RNA, 22 nt, Human
ucugccucauugaaacugcagu

SEQ ID NO: 305721 - RNA, 24 nt, Human
ucuucagagggaggggcuggugag

SEQ ID NO: 305722 - RNA, 18 nt, Human
ugaaaaaaaaaaugaagg

SEQ ID NO: 305723 - RNA, 24 nt, Human
ugaaaaaaaaaaugaaggaaugua

SEQ ID NO: 305724 - RNA, 19 nt, Human
ugaaaucccaagccucccc

SEQ ID NO: 305725 - RNA, 20 nt, Human
ugacaagaacaauuuguaaa

SEQ ID NO: 305726 - RNA, 18 nt, Human
ugacaguuuggggaaggg

SEQ ID NO: 305727 - RNA, 22 nt, Human
ugaccccugggucuuagauccc

SEQ ID NO: 305728 - RNA, 20 nt, Human
ugacuccccuccuuagcaag

SEQ ID NO: 305729 - RNA, 19 nt, Human
ugaggcaccugaccacaau

SEQ ID NO: 305730 - RNA, 20 nt, Human
ugaggccacugaagccucag

SEQ ID NO: 305731 - RNA, 21 nt, Human
ugcaauucucaguuuaagaga

SEQ ID NO: 305732 - RNA, 19 nt, Human
ugccaaagcaaaacacaac

SEQ ID NO: 305733 - RNA, 20 nt, Human
ugcccccaucccggccggcu

SEQ ID NO: 305734 - RNA, 23 nt, Human
ugcccucaagcucugcccggacu

SEQ ID NO: 305735 - RNA, 18 nt, Human
ugccuagcuucacucagc

SEQ ID NO: 305736 - RNA, 21 nt, Human
ugcucggccucuccacuucac

SEQ ID NO: 305737 - RNA, 24 nt, Human
uggaauuuguaaggaaacgagguu

SEQ ID NO: 305738 - RNA, 20 nt, Human
uggaggucccaucaaggcuu

SEQ ID NO: 305739 - RNA, 21 nt, Human
uggcagcagagggcccaagca

SEQ ID NO: 305740 - RNA, 25 nt, Human
uggccagacuguccccucuugggga

SEQ ID NO: 305741 - RNA, 25 nt, Human
uggcuaaacaaaacaaaaaccccaa

SEQ ID NO: 305742 - RNA, 19 nt, Human
uggcugaguccuagagaac

SEQ ID NO: 305743 - RNA, 20 nt, Human
uggcuggagcuaaagcaggu

SEQ ID NO: 305744 - RNA, 20 nt, Human
uggggggaagagagacugcc

SEQ ID NO: 305745 - RNA, 21 nt, Human
uggguaguagacuggucccua

SEQ ID NO: 305746 - RNA, 24 nt, Human
ugguaagaaacaaaauaccuucag

SEQ ID NO: 305747 - RNA, 27 nt, Human
uggucagaaaagauacugucaaaccuc

SEQ ID NO: 305748 - RNA, 23 nt, Human
ugguugucuuuuucaucaaaucc

SEQ ID NO: 305749 - RNA, 21 nt, Human
uguaaggaaacgagguuguuu

SEQ ID NO: 305750 - RNA, 21 nt, Human
uguagaaaaaaaugccagaga

SEQ ID NO: 305751 - RNA, 20 nt, Human
uguagcaaaaaagagacccg

SEQ ID NO: 305752 - RNA, 21 nt, Human
ugucugggcgcucccgccggg

SEQ ID NO: 305753 - RNA, 22 nt, Human
uuagaaaacaggaauugcccag

SEQ ID NO: 305754 - RNA, 21 nt, Human
uucaaagcacaugaggccuaa

SEQ ID NO: 305755 - RNA, 19 nt, Human
uucaagcuaugggcuuuuc

SEQ ID NO: 305756 - RNA, 21 nt, Human
uucacccccagaacuagagcu

SEQ ID NO: 305757 - RNA, 22 nt, Human
uucagagggaggggcuggugag

SEQ ID NO: 305758 - RNA, 22 nt, Human
uuccacaggcucagggucaagc

SEQ ID NO: 305759 - RNA, 21 nt, Human
uucuuggacacaucaaagaca

SEQ ID NO: 305760 - RNA, 24 nt, Human
uugacaguuuggggaagggaugug

SEQ ID NO: 305761 - RNA, 24 nt, Human
uuguguccuucgaaggagggagaa

SEQ ID NO: 305762 - RNA, 18 nt, Human
uuucccaucaaacauugg

SEQ ID NO: 305763 - RNA, 24 nt, Human
uuucuugugagucagauauuuuua

SEQ ID NO: 305764 - RNA, 22 nt, Human
uuugagcaguuggcagcagagg

SEQ ID NO: 305765 - RNA, 20 nt, Human
aaaaauaaaaaauugagagc

SEQ ID NO: 305766 - RNA, 25 nt, Human
aagccccaacaagucuggaccccac

SEQ ID NO: 305767 - RNA, 22 nt, Human
acagcuggcucucccaccccuc

SEQ ID NO: 305768 - RNA, 24 nt, Human
acccaucucccccugcacuccccc

SEQ ID NO: 305769 - RNA, 26 nt, Human
acccaucucccccugcacucccccag

SEQ ID NO: 305770 - RNA, 19 nt, Human
accccccaccacuccuggg

SEQ ID NO: 305771 - RNA, 19 nt, Human
acugacacagaccaggagg

SEQ ID NO: 305772 - RNA, 25 nt, Human
agagcucuuuucccuggguuugggg

SEQ ID NO: 305773 - RNA, 18 nt, Human
aggcagggaaaaagcaaa

SEQ ID NO: 305774 - RNA, 25 nt, Human
agggaagaggugguagugaccaaga

SEQ ID NO: 305775 - RNA, 18 nt, Human
agugaccaagacaggcag

SEQ ID NO: 305776 - RNA, 21 nt, Human
caagacaggcagggaaaaagc

SEQ ID NO: 305777 - RNA, 25 nt, Human
cacagaccaggaggggcagggaagc

SEQ ID NO: 305778 - RNA, 22 nt, Human
cacccaucucccccugcacucc

SEQ ID NO: 305779 - RNA, 26 nt, Human
cacccaucucccccugcacuccccca

SEQ ID NO: 305780 - RNA, 19 nt, Human
caccucuguuuucuggagg

SEQ ID NO: 305781 - RNA, 19 nt, Human
cagaacggaauaagaggau

SEQ ID NO: 305782 - RNA, 21 nt, Human
cagcuggcucucccaccccuc

SEQ ID NO: 305783 - RNA, 23 nt, Human
caggaucaaguccuaaguaccga

SEQ ID NO: 305784 - RNA, 19 nt, Human
cagggaaaaagcaaacuuc

SEQ ID NO: 305785 - RNA, 22 nt, Human
caggggucggucccugggaggg

SEQ ID NO: 305786 - RNA, 19 nt, Human
cauggaaggcccgcccuuc

SEQ ID NO: 305787 - RNA, 23 nt, Human
ccaagacaggcagggaaaaagca

SEQ ID NO: 305788 - RNA, 20 nt, Human
ccaguggccaaccacaggau

SEQ ID NO: 305789 - RNA, 22 nt, Human
ccagugucccucacauuuguca

SEQ ID NO: 305790 - RNA, 26 nt, Human
ccaucucccccugcacucccccagaa

SEQ ID NO: 305791 - RNA, 24 nt, Human
ccccaacaagucuggaccccacag

SEQ ID NO: 305792 - RNA, 26 nt, Human
ccccacagcuggcucucccaccccuc

SEQ ID NO: 305793 - RNA, 20 nt, Human
ccccacuuccugggccccag

SEQ ID NO: 305794 - RNA, 18 nt, Human
cccccaccacuccugggc

SEQ ID NO: 305795 - RNA, 22 nt, Human
ccccccaccacuccugggcuga

SEQ ID NO: 305796 - RNA, 20 nt, Human
cccucacauuugucaccucu

SEQ ID NO: 305797 - RNA, 18 nt, Human
cccuggguuuggggaagg

SEQ ID NO: 305798 - RNA, 22 nt, Human
cccuggguuuggggaaggaguc

SEQ ID NO: 305799 - RNA, 20 nt, Human
cccuuggguggaugguuggg

SEQ ID NO: 305800 - RNA, 19 nt, Human
ccggaccccccaccacucc

SEQ ID NO: 305801 - RNA, 19 nt, Human
ccucaucacccaucucccc

SEQ ID NO: 305802 - RNA, 21 nt, Human
ccucaucacccaucucccccu

SEQ ID NO: 305803 - RNA, 19 nt, Human
cggaccccccaccacuccu

SEQ ID NO: 305804 - RNA, 18 nt, Human
cggucccugggaggggua

SEQ ID NO: 305805 - RNA, 21 nt, Human
cucccaccccucagcaagcuc

SEQ ID NO: 305806 - RNA, 19 nt, Human
cugacacagaccaggaggg

SEQ ID NO: 305807 - RNA, 23 nt, Human
cuggaccccacagcuggcucucc

SEQ ID NO: 305808 - RNA, 19 nt, Human
cugguuugggguuucucag

SEQ ID NO: 305809 - RNA, 19 nt, Human
gaaccucugagagaccccu

SEQ ID NO: 305810 - RNA, 19 nt, Human
gaccaagacaggcagggaa

SEQ ID NO: 305811 - RNA, 18 nt, Human
gagggcagugaguccugg

SEQ ID NO: 305812 - RNA, 19 nt, Human
gcagcagcauggccagugg

SEQ ID NO: 305813 - RNA, 21 nt, Human
gcccaugauggggaaccucag

SEQ ID NO: 305814 - RNA, 22 nt, Human
gcccaugauggggaaccucagc

SEQ ID NO: 305815 - RNA, 21 nt, Human
gccccggaccccccaccacuc

SEQ ID NO: 305816 - RNA, 20 nt, Human
ggccaggggucggucccugg

SEQ ID NO: 305817 - RNA, 21 nt, Human
ggccaguggccaaccacagga

SEQ ID NO: 305818 - RNA, 21 nt, Human
ggcugugggaauucccuuccu

SEQ ID NO: 305819 - RNA, 19 nt, Human
gggaagccccaacaagucu

SEQ ID NO: 305820 - RNA, 18 nt, Human
gggaauucccuuccuugc

SEQ ID NO: 305821 - RNA, 21 nt, Human
gggcagcagcauggccagugg

SEQ ID NO: 305822 - RNA, 24 nt, Human
gggcugugggaauucccuuccuug

SEQ ID NO: 305823 - RNA, 21 nt, Human
gggugccccggaccccccacc

SEQ ID NO: 305824 - RNA, 20 nt, Human
ggguuuggggaaggagucag

SEQ ID NO: 305825 - RNA, 20 nt, Human
guaggucccugggaggggua

SEQ ID NO: 305826 - RNA, 25 nt, Human
uaacuaaggacuuuauuucaaacaa

SEQ ID NO: 305827 - RNA, 19 nt, Human
uacaaggagaagaaaggcc

SEQ ID NO: 305828 - RNA, 19 nt, Human
uagagcugggcagcagcau

SEQ ID NO: 305829 - RNA, 18 nt, Human
ucaaccaaguguaaucug

SEQ ID NO: 305830 - RNA, 21 nt, Human
ucccccugcacucccccagaa

SEQ ID NO: 305831 - RNA, 21 nt, Human
ucccucacauuugucaccucu

SEQ ID NO: 305832 - RNA, 23 nt, Human
ucccugggagggguaggucccug

SEQ ID NO: 305833 - RNA, 23 nt, Human
uccuaaguaccgagaaccuacuc

SEQ ID NO: 305834 - RNA, 20 nt, Human
uccugggccccagaacggaa

SEQ ID NO: 305835 - RNA, 21 nt, Human
ucuggaccccacagcuggcuc

SEQ ID NO: 305836 - RNA, 18 nt, Human
ucuuaguggcugcuccgg

SEQ ID NO: 305837 - RNA, 20 nt, Human
ugccccggaccccccaccac

SEQ ID NO: 305838 - RNA, 23 nt, Human
ugccccggaccccccaccacucc

SEQ ID NO: 305839 - RNA, 19 nt, Human
uggaaagaaccucugagag

SEQ ID NO: 305840 - RNA, 19 nt, Human
uggccuguggaaagaaccu

SEQ ID NO: 305841 - RNA, 19 nt, Human
uggcugcuccggaguaguc

SEQ ID NO: 305842 - RNA, 18 nt, Human
ugggagggguagagcugg

SEQ ID NO: 305843 - RNA, 19 nt, Human
ugggagggguagagcuggg

SEQ ID NO: 305844 - RNA, 20 nt, Human
ugggagggguagagcugggc

SEQ ID NO: 305845 - RNA, 20 nt, Human
ugggagggguaggucccugg

SEQ ID NO: 305846 - RNA, 21 nt, Human
ugggagggguaggucccugga

SEQ ID NO: 305847 - RNA, 22 nt, Human
ugggcagcagcauggccagugg

SEQ ID NO: 305848 - RNA, 21 nt, Human
uucauaccucaucacccaucu

SEQ ID NO: 305849 - RNA, 23 nt, Human
uuuguaucuuggacacugaggca

SEQ ID NO: 305850 - RNA, 22 nt, Human
aaaaaccaaaaaggaagaccag

SEQ ID NO: 305851 - RNA, 21 nt, Human
aaacaagaaacaaaaacaggu

SEQ ID NO: 305852 - RNA, 21 nt, Human
aaacaagaaacaaaaacaggu

SEQ ID NO: 305853 - RNA, 23 nt, Human
aaacaagaaacaaaaacagguaa

SEQ ID NO: 305854 - RNA, 27 nt, Human
aaacagagcaagcgucgcagcccuccc

SEQ ID NO: 305855 - RNA, 23 nt, Human
aaagaaaacuagggcagcagcua

SEQ ID NO: 305856 - RNA, 21 nt, Human
aaauacauaacauugaccucc

SEQ ID NO: 305857 - RNA, 25 nt, Human
aaccaaaaaggaagaccaguucacu

SEQ ID NO: 305858 - RNA, 24 nt, Human
aacugcuuuucauaauuauccuau

SEQ ID NO: 305859 - RNA, 25 nt, Human
aagaaacaaaaacagguaaaauaac

SEQ ID NO: 305860 - RNA, 20 nt, Human
aagcagcagguaaaagaggc

SEQ ID NO: 305861 - RNA, 23 nt, Human
aagcagcagguaaaagaggggac

SEQ ID NO: 305862 - RNA, 19 nt, Human
aaggaggcagaaaaaaggg

SEQ ID NO: 305863 - RNA, 22 nt, Human
aaggcacucagaaagagucgga

SEQ ID NO: 305864 - RNA, 18 nt, Human
aagguccccaagucagag

SEQ ID NO: 305865 - RNA, 25 nt, Human
acacagccccagagaggagggaacc

SEQ ID NO: 305866 - RNA, 25 nt, Human
acacagucagcaaugccccucccca

SEQ ID NO: 305867 - RNA, 23 nt, Human
acccacccccaccccccaccccc

SEQ ID NO: 305868 - RNA, 24 nt, Human
acccccaccccccacccccgggau

SEQ ID NO: 305869 - RNA, 18 nt, Human
agcaagcgucgcagcccu

SEQ ID NO: 305870 - RNA, 22 nt, Human
aggaggaaaggaggaaagaaaa

SEQ ID NO: 305871 - RNA, 20 nt, Human
aggagggggugagggaggac

SEQ ID NO: 305872 - RNA, 28 nt, Human
aggcaaaauuucuuaaaaauuagaucca

SEQ ID NO: 305873 - RNA, 18 nt, Human
aggcagaaaaaagggcag

SEQ ID NO: 305874 - RNA, 22 nt, Human
aggccgagggcgagucggagga

SEQ ID NO: 305875 - RNA, 18 nt, Human
auuucagaguccagcaau

SEQ ID NO: 305876 - RNA, 19 nt, Human
caaaacaagaaacaaaaac

SEQ ID NO: 305877 - RNA, 18 nt, Human
caaaacacagccccagag

SEQ ID NO: 305878 - RNA, 22 nt, Human
caaaacacagccccagagagga

SEQ ID NO: 305879 - RNA, 21 nt, Human
cacaaacagagcaagcgucgc

SEQ ID NO: 305880 - RNA, 20 nt, Human
cacagucagcaaugccccuc

SEQ ID NO: 305881 - RNA, 22 nt, Human
cacccccaccccccacccccgg

SEQ ID NO: 305882 - RNA, 24 nt, Human
caccuggguaaguaggugaggggc

SEQ ID NO: 305883 - RNA, 19 nt, Human
cacucagaaagagucggaa

SEQ ID NO: 305884 - RNA, 22 nt, Human
cacucuuccccacuguugggag

SEQ ID NO: 305885 - RNA, 18 nt, Human
cagaggaggaaaggagga

SEQ ID NO: 305886 - RNA, 20 nt, Human
cagcacagccggagucccca

SEQ ID NO: 305887 - RNA, 18 nt, Human
cagcggggucgggcagcg

SEQ ID NO: 305888 - RNA, 29 nt, Human
cauccagaacugcuuuucauaauuauccc

SEQ ID NO: 305889 - RNA, 22 nt, Human
caucccaaccuguuuccccccu

SEQ ID NO: 305890 - RNA, 24 nt, Human
caugccaacuguacacacauuuac

SEQ ID NO: 305891 - RNA, 23 nt, Human
ccacaaacagagcaagcgucgca

SEQ ID NO: 305892 - RNA, 23 nt, Human
cccacagaagccagggagcugca

SEQ ID NO: 305893 - RNA, 19 nt, Human
cccacagagccgggaccca

SEQ ID NO: 305894 - RNA, 21 nt, Human
cccacagagccgggacccacc

SEQ ID NO: 305895 - RNA, 25 nt, Human
cccagcacagccggaguccccacag

SEQ ID NO: 305896 - RNA, 21 nt, Human
ccccacagaagccagggagcu

SEQ ID NO: 305897 - RNA, 19 nt, Human
ccccaccccccacccccgg

SEQ ID NO: 305898 - RNA, 21 nt, Human
ccccuccccaucacccacaga

SEQ ID NO: 305899 - RNA, 21 nt, Human
ccccuguacaguauuucacuc

SEQ ID NO: 305900 - RNA, 20 nt, Human
cccuggagagucacucuucc

SEQ ID NO: 305901 - RNA, 18 nt, Human
ccgccgccgcugccaccg

SEQ ID NO: 305902 - RNA, 25 nt, Human
ccgccgcugccaccgacuccucucg

SEQ ID NO: 305903 - RNA, 20 nt, Human
ccuaggaccccuggagaguc

SEQ ID NO: 305904 - RNA, 19 nt, Human
ccuccaggggccugggauc

SEQ ID NO: 305905 - RNA, 20 nt, Human
ccuggggcuguggcuguggc

SEQ ID NO: 305906 - RNA, 18 nt, Human
cggcgcagggacggugcc

SEQ ID NO: 305907 - RNA, 19 nt, Human
cgucaccccacaaacagag

SEQ ID NO: 305908 - RNA, 19 nt, Human
cgugcggcagcgccgcggg

SEQ ID NO: 305909 - RNA, 23 nt, Human
cuccccaucacccacagagccgg

SEQ ID NO: 305910 - RNA, 19 nt, Human
cuggaaggcacaccaucca

SEQ ID NO: 305911 - RNA, 22 nt, Human
cuggggcuguggcuguggcugu

SEQ ID NO: 305912 - RNA, 23 nt, Human
cuggggcuguggcuguggcugug

SEQ ID NO: 305913 - RNA, 18 nt, Human
gaaggcacaccauccaga

SEQ ID NO: 305914 - RNA, 19 nt, Human
gaaggcacaccauccagaa

SEQ ID NO: 305915 - RNA, 20 nt, Human
gacaagagaggggaggaccu

SEQ ID NO: 305916 - RNA, 22 nt, Human
gagaaaaauagggaacaaaacc

SEQ ID NO: 305917 - RNA, 25 nt, Human
gagccgggacccaccuggguaaguu

SEQ ID NO: 305918 - RNA, 20 nt, Human
gaggugacagggacuuaaaa

SEQ ID NO: 305919 - RNA, 22 nt, Human
gcagauuuuuggagaagcagca

SEQ ID NO: 305920 - RNA, 20 nt, Human
gcagcagcuauggaagcuug

SEQ ID NO: 305921 - RNA, 27 nt, Human
gcccuguagccucuuccauggcaccuu

SEQ ID NO: 305922 - RNA, 20 nt, Human
gccggucccgccgccgccgc

SEQ ID NO: 305923 - RNA, 22 nt, Human
gcggggcaggaggcuagugguu

SEQ ID NO: 305924 - RNA, 22 nt, Human
gcugcggcuggcgcggaaggcc

SEQ ID NO: 305925 - RNA, 20 nt, Human
ggaggacaacugagggcgcu

SEQ ID NO: 305926 - RNA, 18 nt, Human
ggaggaguugaggccuag

SEQ ID NO: 305927 - RNA, 18 nt, Human
ggcagaaaaaagggcagg

SEQ ID NO: 305928 - RNA, 20 nt, Human
ggcuaugccuggggcugugg

SEQ ID NO: 305929 - RNA, 18 nt, Human
ggcucguggggcucgugc

SEQ ID NO: 305930 - RNA, 21 nt, Human
ggcuguggcuguggcuguggc

SEQ ID NO: 305931 - RNA, 18 nt, Human
gggauauuucagagucca

SEQ ID NO: 305932 - RNA, 23 nt, Human
gggcagcgcugagaacggcgggg

SEQ ID NO: 305933 - RNA, 22 nt, Human
gggcuguggcuguggcuguggc

SEQ ID NO: 305934 - RNA, 18 nt, Human
ggggugagcggcucgugg

SEQ ID NO: 305935 - RNA, 21 nt, Human
ggugagggaggacaggagaga

SEQ ID NO: 305936 - RNA, 18 nt, Human
gucaccccacaaacagag

SEQ ID NO: 305937 - RNA, 18 nt, Human
guccagcaaugcuggaca

SEQ ID NO: 305938 - RNA, 25 nt, Human
guccugcuuggcgagacgugucacu

SEQ ID NO: 305939 - RNA, 21 nt, Human
gugguugcugcugcugcugcu

SEQ ID NO: 305940 - RNA, 23 nt, Human
gugguugcugcugcugcugcugc

SEQ ID NO: 305941 - RNA, 23 nt, Human
guuuggcccuguagccucuucca

SEQ ID NO: 305942 - RNA, 22 nt, Human
uaaaaccagcaggcuaccugcu

SEQ ID NO: 305943 - RNA, 23 nt, Human
uaaaauggugcuaguccuauccc

SEQ ID NO: 305944 - RNA, 18 nt, Human
uacacagucagcaaugcc

SEQ ID NO: 305945 - RNA, 24 nt, Human
uacacagucagcaaugccccuccc

SEQ ID NO: 305946 - RNA, 24 nt, Human
uauuucacucagauaaaaccagca

SEQ ID NO: 305947 - RNA, 18 nt, Human
ucaaaacaagaaacaaaa

SEQ ID NO: 305948 - RNA, 22 nt, Human
ucaaaacaagaaacaaaaacaa

SEQ ID NO: 305949 - RNA, 25 nt, Human
ucaaaacacagccccagagaggauc

SEQ ID NO: 305950 - RNA, 20 nt, Human
ucaccccacaaacagagcaa

SEQ ID NO: 305951 - RNA, 24 nt, Human
ucacugguacucgggaagcuggag

SEQ ID NO: 305952 - RNA, 19 nt, Human
ucagaggaggaaaggagga

SEQ ID NO: 305953 - RNA, 21 nt, Human
ucagauaaaaccagcaggcua

SEQ ID NO: 305954 - RNA, 21 nt, Human
ucccaaccuguuuccccccua

SEQ ID NO: 305955 - RNA, 25 nt, Human
uccccacagaaggcacucagaaaga

SEQ ID NO: 305956 - RNA, 23 nt, Human
ucccgccgccgccgcugccaccg

SEQ ID NO: 305957 - RNA, 25 nt, Human
ucccgccgccgccgcugccaccgac

SEQ ID NO: 305958 - RNA, 18 nt, Human
uccuauauacacagucag

SEQ ID NO: 305959 - RNA, 18 nt, Human
ucgcagcccucccccaaa

SEQ ID NO: 305960 - RNA, 20 nt, Human
ucggaagaggugacagggac

SEQ ID NO: 305961 - RNA, 22 nt, Human
ucucccagcacagccggagucc

SEQ ID NO: 305962 - RNA, 27 nt, Human
ucuuuuauuccccuguacaguauuuca

SEQ ID NO: 305963 - RNA, 19 nt, Human
ugaaggaaacaguuccaug

SEQ ID NO: 305964 - RNA, 18 nt, Human
ugacaagagaggggagga

SEQ ID NO: 305965 - RNA, 21 nt, Human
ugacagggacuuaaaauggug

SEQ ID NO: 305966 - RNA, 18 nt, Human
ugacccacccccaccccc

SEQ ID NO: 305967 - RNA, 19 nt, Human
ugacccacccccacccccc

SEQ ID NO: 305968 - RNA, 24 nt, Human
ugacccacccccaccccccacccc

SEQ ID NO: 305969 - RNA, 25 nt, Human
ugacccacccccaccccccaccccc

SEQ ID NO: 305970 - RNA, 19 nt, Human
ugaggccuaggaccccugg

SEQ ID NO: 305971 - RNA, 21 nt, Human
ugaggccuaggaccccuggag

SEQ ID NO: 305972 - RNA, 21 nt, Human
ugauugcauuguuugugcauu

SEQ ID NO: 305973 - RNA, 19 nt, Human
ugcagcacugucccgccug

SEQ ID NO: 305974 - RNA, 23 nt, Human
ugccaccgacuccucucgggccu

SEQ ID NO: 305975 - RNA, 18 nt, Human
ugccuggggcuguggcug

SEQ ID NO: 305976 - RNA, 19 nt, Human
ugccuggggcuguggcugu

SEQ ID NO: 305977 - RNA, 18 nt, Human
ugcuaguccuaucccauc

SEQ ID NO: 305978 - RNA, 21 nt, Human
ugcugcugcugcugcugcugc

SEQ ID NO: 305979 - RNA, 21 nt, Human
ugcugcugcugcugcugcugc

SEQ ID NO: 305980 - RNA, 21 nt, Human
ugcugcugcugcugcugcugc

SEQ ID NO: 305981 - RNA, 21 nt, Human
ugcugcugcugcugcugcugc

SEQ ID NO: 305982 - RNA, 20 nt, Human
uggaaugaguuguaaauguu

SEQ ID NO: 305983 - RNA, 21 nt, Human
uggacaccuaugagaagaaga

SEQ ID NO: 305984 - RNA, 23 nt, Human
uggcuguggcugcggguggcguu

SEQ ID NO: 305985 - RNA, 18 nt, Human
uggcuguggcuguggcug

SEQ ID NO: 305986 - RNA, 21 nt, Human
uggggcuguggcuguggcugu

SEQ ID NO: 305987 - RNA, 20 nt, Human
uguugggaggcagccuccag

SEQ ID NO: 305988 - RNA, 21 nt, Human
uuacagcuuuucuguugauug

SEQ ID NO: 305989 - RNA, 21 nt, Human
uucaaguauuucucccagcac

SEQ ID NO: 305990 - RNA, 23 nt, Human
uuugugcauuuuuugugugugug

SEQ ID NO: 305991 - RNA, 26 nt, Human
uuuuacuaaaggaggcagaaaaaagg

SEQ ID NO: 305992 - RNA, 20 nt, Human
aaaaaaccauccaucccauc

SEQ ID NO: 305993 - RNA, 27 nt, Human
aaaaaaccauccaucccauccuagugu

SEQ ID NO: 305994 - RNA, 18 nt, Human
aaaagaagccuuggggua

SEQ ID NO: 305995 - RNA, 24 nt, Human
aaacagcaagccuuauuuccccua

SEQ ID NO: 305996 - RNA, 21 nt, Human
aacagcaagccuuauuucccc

SEQ ID NO: 305997 - RNA, 22 nt, Human
aacuccccuccccacaauacgu

SEQ ID NO: 305998 - RNA, 21 nt, Human
aagcacccuugcccaaguaag

SEQ ID NO: 305999 - RNA, 25 nt, Human
aagcagcuugacccaauaugggacc

SEQ ID NO: 306000 - RNA, 27 nt, Human
aauguccaucuaucccugugacauggc

SEQ ID NO: 306001 - RNA, 19 nt, Human
acccaaaaaaaaaaaaaaa

SEQ ID NO: 306002 - RNA, 24 nt, Human
agaauaagagucccggggcucaga

SEQ ID NO: 306003 - RNA, 25 nt, Human
agaaugggaacaacuucaccaaaaa

SEQ ID NO: 306004 - RNA, 22 nt, Human
agaggagggcacacuuggaacu

SEQ ID NO: 306005 - RNA, 19 nt, Human
agcccaucccccaaaaaac

SEQ ID NO: 306006 - RNA, 21 nt, Human
aggcaggagaagagaggaggg

SEQ ID NO: 306007 - RNA, 23 nt, Human
aggcaggagaagagaggagggac

SEQ ID NO: 306008 - RNA, 23 nt, Human
aggcuaggggaaagggucccuuu

SEQ ID NO: 306009 - RNA, 24 nt, Human
agggaacugggcagacuugguuua

SEQ ID NO: 306010 - RNA, 20 nt, Human
augggacccuaggcuagggg

SEQ ID NO: 306011 - RNA, 19 nt, Human
caaaaaaccauccauccca

SEQ ID NO: 306012 - RNA, 18 nt, Human
caacagggcauuaccucc

SEQ ID NO: 306013 - RNA, 19 nt, Human
caacagggcauuaccuccc

SEQ ID NO: 306014 - RNA, 21 nt, Human
caacagggcauuaccuccccc

SEQ ID NO: 306015 - RNA, 20 nt, Human
cacccuugcccaaguaagag

SEQ ID NO: 306016 - RNA, 19 nt, Human
cacugaacccgcuaagccc

SEQ ID NO: 306017 - RNA, 18 nt, Human
cacuugggauaacagagu

SEQ ID NO: 306018 - RNA, 22 nt, Human
cagaauaagagucccggggcuc

SEQ ID NO: 306019 - RNA, 25 nt, Human
cagcaagccuuauuuccccuagccc

SEQ ID NO: 306020 - RNA, 24 nt, Human
cagcuggggagccagggcuggggg

SEQ ID NO: 306021 - RNA, 19 nt, Human
cagguaagcagcuugaccc

SEQ ID NO: 306022 - RNA, 22 nt, Human
ccaaaaaaaaaaaaaaaaaaaa

SEQ ID NO: 306023 - RNA, 25 nt, Human
ccaaaaaaaaaaaaaaaaaaaagaa

SEQ ID NO: 306024 - RNA, 25 nt, Human
ccaaaauaaacuuccuuagcaaaau

SEQ ID NO: 306025 - RNA, 20 nt, Human
ccaaauuauggaaguaaggu

SEQ ID NO: 306026 - RNA, 20 nt, Human
ccaggcaggagaagagagga

SEQ ID NO: 306027 - RNA, 20 nt, Human
ccaggguggaaagcagagaa

SEQ ID NO: 306028 - RNA, 20 nt, Human
cccaggagaacaaacagcaa

SEQ ID NO: 306029 - RNA, 19 nt, Human
ccccaaaaaaccauccauc

SEQ ID NO: 306030 - RNA, 18 nt, Human
ccccagaauaaagaaucc

SEQ ID NO: 306031 - RNA, 21 nt, Human
cccccuccagaaucagggacu

SEQ ID NO: 306032 - RNA, 25 nt, Human
ccccucacccaaaaaaaaaaaaaaa

SEQ ID NO: 306033 - RNA, 24 nt, Human
cccggggcagcgcagcuggggagc

SEQ ID NO: 306034 - RNA, 24 nt, Human
cccucacccaaaaaaaaaaaaaaa

SEQ ID NO: 306035 - RNA, 19 nt, Human
cccuugcccaaguaagagc

SEQ ID NO: 306036 - RNA, 21 nt, Human
ccugggcugaggcagguaagc

SEQ ID NO: 306037 - RNA, 25 nt, Human
cgcagcuggggagccagggcugggg

SEQ ID NO: 306038 - RNA, 21 nt, Human
cggcucaggaggagguugcaa

SEQ ID NO: 306039 - RNA, 22 nt, Human
cuagcccaucccccaaaaaacc

SEQ ID NO: 306040 - RNA, 23 nt, Human
cuagcccaucccccaaaaaacca

SEQ ID NO: 306041 - RNA, 19 nt, Human
cuuggaacuccccucccca

SEQ ID NO: 306042 - RNA, 19 nt, Human
gaaggcuccuuuguaggau

SEQ ID NO: 306043 - RNA, 19 nt, Human
gcuccuuuguaggauuggg

SEQ ID NO: 306044 - RNA, 21 nt, Human
gcuccuuuguaggauugggaa

SEQ ID NO: 306045 - RNA, 20 nt, Human
ggaaagcagagaaacuggug

SEQ ID NO: 306046 - RNA, 26 nt, Human
ggaaagggucccuuuacuaaaauaaa

SEQ ID NO: 306047 - RNA, 21 nt, Human
ggauugggaagggaacugggc

SEQ ID NO: 306048 - RNA, 23 nt, Human
ggcugaggcagguaagcagcuug

SEQ ID NO: 306049 - RNA, 21 nt, Human
gggagccagggcuggggggcc

SEQ ID NO: 306050 - RNA, 19 nt, Human
gggcucagaaugggaacaa

SEQ ID NO: 306051 - RNA, 20 nt, Human
ggggagccagggcugggggg

SEQ ID NO: 306052 - RNA, 21 nt, Human
guaggguccccucacccaaaa

SEQ ID NO: 306053 - RNA, 23 nt, Human
guguccaucuuccauuccuuccc

SEQ ID NO: 306054 - RNA, 24 nt, Human
uaaaaccaagucaacaaaugucca

SEQ ID NO: 306055 - RNA, 23 nt, Human
uaaagaauccugggcugaggcag

SEQ ID NO: 306056 - RNA, 24 nt, Human
uaaagaauccugggcugaggcagg

SEQ ID NO: 306057 - RNA, 21 nt, Human
uaacagaguaggguccccuca

SEQ ID NO: 306058 - RNA, 21 nt, Human
uaaccccugauccucaauccc

SEQ ID NO: 306059 - RNA, 18 nt, Human
uagcaaaaugagaagcaa

SEQ ID NO: 306060 - RNA, 20 nt, Human
uagcaaaaugagaagcaaga

SEQ ID NO: 306061 - RNA, 20 nt, Human
uaggguccccucacccaaaa

SEQ ID NO: 306062 - RNA, 23 nt, Human
uaguggguuuccacacauggcuu

SEQ ID NO: 306063 - RNA, 22 nt, Human
ucacccaaaaaaaaaaaaaaaa

SEQ ID NO: 306064 - RNA, 25 nt, Human
ucacccaaaaaaaaaaaaaaaaaaa

SEQ ID NO: 306065 - RNA, 23 nt, Human
ucccccaaaaaaccauccauccc

SEQ ID NO: 306066 - RNA, 23 nt, Human
ucccccagaauaaagaauccugg

SEQ ID NO: 306067 - RNA, 22 nt, Human
uccccuagcccaucccccaaaa

SEQ ID NO: 306068 - RNA, 18 nt, Human
ucccggggcucagaaugg

SEQ ID NO: 306069 - RNA, 22 nt, Human
uccugggcugaggcagguaagc

SEQ ID NO: 306070 - RNA, 19 nt, Human
ucuaaccccugauccucaa

SEQ ID NO: 306071 - RNA, 24 nt, Human
ucuauuacuuuuauuaaauagugg

SEQ ID NO: 306072 - RNA, 19 nt, Human
ugacacaucaucagaauaa

SEQ ID NO: 306073 - RNA, 24 nt, Human
ugagaagcaagaaguucccccucc

SEQ ID NO: 306074 - RNA, 19 nt, Human
ugaggcagguaagcagcuu

SEQ ID NO: 306075 - RNA, 26 nt, Human
uggaaagcagagaaacugguggcccg

SEQ ID NO: 306076 - RNA, 24 nt, Human
uggcccggaagcgcccgcagacgg

SEQ ID NO: 306077 - RNA, 19 nt, Human
ugggaacaacuucaccaaa

SEQ ID NO: 306078 - RNA, 21 nt, Human
ugggcagacuugguuuauguc

SEQ ID NO: 306079 - RNA, 18 nt, Human
uggggggcgccagggugg

SEQ ID NO: 306080 - RNA, 18 nt, Human
uggguuuccacacauggc

SEQ ID NO: 306081 - RNA, 21 nt, Human
uguaaaaccaagucaacaaau

SEQ ID NO: 306082 - RNA, 24 nt, Human
uguccaucuuccauuccuucccaa

SEQ ID NO: 306083 - RNA, 19 nt, Human
ugucuggugguguccggug

SEQ ID NO: 306084 - RNA, 18 nt, Human
uguggugguaguaggagg

SEQ ID NO: 306085 - RNA, 18 nt, Human
uguggugguaguaggagg

SEQ ID NO: 306086 - RNA, 22 nt, Human
uugagcccacugaacccgcuaa

SEQ ID NO: 306087 - RNA, 23 nt, Human
aacgugggcagaaguauggaaua

SEQ ID NO: 306088 - RNA, 24 nt, Human
aacgugggcagaaguauggaauag

SEQ ID NO: 306089 - RNA, 23 nt, Human
accacgacaaacuaguacagaga

SEQ ID NO: 306090 - RNA, 19 nt, Human
acugcaacggucuccuggg

SEQ ID NO: 306091 - RNA, 21 nt, Human
aggcugcaguccuuguuucug

SEQ ID NO: 306092 - RNA, 20 nt, Human
auggaauagaaaauaaauac

SEQ ID NO: 306093 - RNA, 19 nt, Human
caaagguucaaacaucgag

SEQ ID NO: 306094 - RNA, 18 nt, Human
cacagcucaggcccggcu

SEQ ID NO: 306095 - RNA, 24 nt, Human
cagagaaugcccuguacaaaacac

SEQ ID NO: 306096 - RNA, 24 nt, Human
ccugggggaggugcuagcacagcu

SEQ ID NO: 306097 - RNA, 24 nt, Human
ggaauagaaaauaaauacaaaugu

SEQ ID NO: 306098 - RNA, 21 nt, Human
ggcccggcuagagcuaccguc

SEQ ID NO: 306099 - RNA, 18 nt, Human
uaaaggaauggauuuuga

SEQ ID NO: 306100 - RNA, 22 nt, Human
uacaaaacacaacaaagguuca

SEQ ID NO: 306101 - RNA, 25 nt, Human
uacaaaacacaacaaagguucaaac

SEQ ID NO: 306102 - RNA, 20 nt, Human
ucaggcccggcuagagcuac

SEQ ID NO: 306103 - RNA, 18 nt, Human
ugagagaaaacaacgugg

SEQ ID NO: 306104 - RNA, 23 nt, Human
ugagagaaaacaacgugggcaga

SEQ ID NO: 306105 - RNA, 18 nt, Human
uggaauagaaaauaaaua

SEQ ID NO: 306106 - RNA, 24 nt, Human
uggaauagaaaauaaauacaaaug

SEQ ID NO: 306107 - RNA, 18 nt, Human
uguggcacaguccaugcu

SEQ ID NO: 306108 - RNA, 18 nt, Human
uuuuuaaaggaauggauu

SEQ ID NO: 306109 - RNA, 21 nt, Human
accccucccaccacacugccc

SEQ ID NO: 306110 - RNA, 20 nt, Human
acuggcuggcgggcaagggg

SEQ ID NO: 306111 - RNA, 19 nt, Human
agccgcccugcccugcccc

SEQ ID NO: 306112 - RNA, 24 nt, Human
caccccucccaccacacugcccug

SEQ ID NO: 306113 - RNA, 20 nt, Human
cagccccaacuggggaugga

SEQ ID NO: 306114 - RNA, 29 nt, Human
cccagggcccccaaucuggaagggccccu

SEQ ID NO: 306115 - RNA, 20 nt, Human
ccccagggcccccaaucugg

SEQ ID NO: 306116 - RNA, 19 nt, Human
ccccgaggccaggccuggg

SEQ ID NO: 306117 - RNA, 18 nt, Human
cccucgagucugccucca

SEQ ID NO: 306118 - RNA, 22 nt, Human
cccugcugaagucaauuccuua

SEQ ID NO: 306119 - RNA, 23 nt, Human
cuggcggucgcagccccaacugg

SEQ ID NO: 306120 - RNA, 24 nt, Human
cugggagccucccaccccugcuga

SEQ ID NO: 306121 - RNA, 23 nt, Human
gacagggaguggggaccccaggg

SEQ ID NO: 306122 - RNA, 21 nt, Human
ggaacaccccucccaccacac

SEQ ID NO: 306123 - RNA, 24 nt, Human
ggacagggaguggggaccccaggg

SEQ ID NO: 306124 - RNA, 21 nt, Human
ggcagggagugggggguucgg

SEQ ID NO: 306125 - RNA, 24 nt, Human
gggagaaucuggcggucgcagccc

SEQ ID NO: 306126 - RNA, 23 nt, Human
ggggggacacggggcggcucugc

SEQ ID NO: 306127 - RNA, 24 nt, Human
gggggguucggccacuggcuggcg

SEQ ID NO: 306128 - RNA, 20 nt, Human
ucccaccacacugcccuggg

SEQ ID NO: 306129 - RNA, 19 nt, Human
ugacgguggcagggagugg

SEQ ID NO: 306130 - RNA, 20 nt, Human
uggccggccuagccgcccug

SEQ ID NO: 306131 - RNA, 22 nt, Human
uggcugccgcaugaguguucac

SEQ ID NO: 306132 - RNA, 19 nt, Human
uggggaccccagggccccc

SEQ ID NO: 306133 - RNA, 25 nt, Human
ugugacgguggcagggagugggggg

SEQ ID NO: 306134 - RNA, 19 nt, Human
aagggcccccucccagcca

SEQ ID NO: 306135 - RNA, 19 nt, Human
aauccgugaacacuguccc

SEQ ID NO: 306136 - RNA, 19 nt, Human
acugugugacaguggcagg

SEQ ID NO: 306137 - RNA, 19 nt, Human
agagaagcguggccuaacu

SEQ ID NO: 306138 - RNA, 19 nt, Human
agcaggcagcgggggaacc

SEQ ID NO: 306139 - RNA, 20 nt, Human
agggaguggggaaccccagg

SEQ ID NO: 306140 - RNA, 21 nt, Human
agggaguggggaaccccaggg

SEQ ID NO: 306141 - RNA, 20 nt, Human
aguguuugcuuuugcuacug

SEQ ID NO: 306142 - RNA, 21 nt, Human
cagccccaacuggggacugac

SEQ ID NO: 306143 - RNA, 19 nt, Human
caguggcagggaguggggg

SEQ ID NO: 306144 - RNA, 19 nt, Human
caguggcagggaguggggg

SEQ ID NO: 306145 - RNA, 23 nt, Human
ccaauccucacuccgugcggaca

SEQ ID NO: 306146 - RNA, 24 nt, Human
ccaggaccuggugggacauggggc

SEQ ID NO: 306147 - RNA, 29 nt, Human
cccagggcccccagucuggaagggccccu

SEQ ID NO: 306148 - RNA, 20 nt, Human
ccccagggcccccagucugg

SEQ ID NO: 306149 - RNA, 18 nt, Human
cccccaauccucacuccg

SEQ ID NO: 306150 - RNA, 20 nt, Human
cccccagucuggaagggccc

SEQ ID NO: 306151 - RNA, 19 nt, Human
ccccgaggccaggccuggg

SEQ ID NO: 306152 - RNA, 23 nt, Human
ccucacuccgugcggacaaugac

SEQ ID NO: 306153 - RNA, 18 nt, Human
ccuccaggaccugguggg

SEQ ID NO: 306154 - RNA, 24 nt, Human
ccuuugcugaaggcacccaggucu

SEQ ID NO: 306155 - RNA, 19 nt, Human
cgcucaucucccccguccg

SEQ ID NO: 306156 - RNA, 19 nt, Human
cgugcggacaaugacgugg

SEQ ID NO: 306157 - RNA, 19 nt, Human
cuccucccaccacauugcc

SEQ ID NO: 306158 - RNA, 21 nt, Human
cucgcaucugccuccaggacc

SEQ ID NO: 306159 - RNA, 22 nt, Human
cugcgagccucccucccaugcu

SEQ ID NO: 306160 - RNA, 23 nt, Human
cuggaggucgcagccccaacugg

SEQ ID NO: 306161 - RNA, 22 nt, Human
gacaaugacguggaugccggaa

SEQ ID NO: 306162 - RNA, 19 nt, Human
gcccugggucugcgagccc

SEQ ID NO: 306163 - RNA, 20 nt, Human
gcucagagggcccacagcug

SEQ ID NO: 306164 - RNA, 21 nt, Human
ggaacacuccucccaccacau

SEQ ID NO: 306165 - RNA, 21 nt, Human
ggcagggagugggggguucgg

SEQ ID NO: 306166 - RNA, 19 nt, Human
ggggugaaagggugcugca

SEQ ID NO: 306167 - RNA, 18 nt, Human
gggucuucaaauggcuuc

SEQ ID NO: 306168 - RNA, 18 nt, Human
guggcagggagugggggg

SEQ ID NO: 306169 - RNA, 20 nt, Human
ucccaccacauugcccuggg

SEQ ID NO: 306170 - RNA, 18 nt, Human
ucgcagccccaacugggg

SEQ ID NO: 306171 - RNA, 23 nt, Human
ucugggcccucgcaucugccucc

SEQ ID NO: 306172 - RNA, 22 nt, Human
ugaacacugucccgcucaucuc

SEQ ID NO: 306173 - RNA, 19 nt, Human
ugcucagagggcccacagc

SEQ ID NO: 306174 - RNA, 20 nt, Human
ugcucagagggcccacagcu

SEQ ID NO: 306175 - RNA, 19 nt, Human
uggcuucugcaucugaccu

SEQ ID NO: 306176 - RNA, 22 nt, Human
ugggcccccaauccucacuccg

SEQ ID NO: 306177 - RNA, 18 nt, Human
uggggcggcucugcugac

SEQ ID NO: 306178 - RNA, 21 nt, Human
ugggggugaaagggugcugca

SEQ ID NO: 306179 - RNA, 22 nt, Human
ugggggugaaagggugcugcaa

SEQ ID NO: 306180 - RNA, 22 nt, Human
uggugggacauggggcggcucu

SEQ ID NO: 306181 - RNA, 19 nt, Human
ugucccgcucaucuccccc

SEQ ID NO: 306182 - RNA, 26 nt, Human
ugucccgcucaucucccccguccgcc

SEQ ID NO: 306183 - RNA, 25 nt, Human
ugugacaguggcagggagugggggg

SEQ ID NO: 306184 - RNA, 23 nt, Human
aaaaagaaaggaguuaacacuga

SEQ ID NO: 306185 - RNA, 24 nt, Human
acacuaaucuauuugaugcccaau

SEQ ID NO: 306186 - RNA, 21 nt, Human
acagaauacaaggagcaucca

SEQ ID NO: 306187 - RNA, 21 nt, Human
acuauguuaagacaguggagc

SEQ ID NO: 306188 - RNA, 21 nt, Human
acugacugaauaccuacuaca

SEQ ID NO: 306189 - RNA, 22 nt, Human
aggaaagagaauacagguuaaa

SEQ ID NO: 306190 - RNA, 21 nt, Human
cacccucucuuacaccuacaa

SEQ ID NO: 306191 - RNA, 24 nt, Human
cacccucucuuacaccuacaaacc

SEQ ID NO: 306192 - RNA, 21 nt, Human
caguugugugaauagugugag

SEQ ID NO: 306193 - RNA, 21 nt, Human
ccccacccucucuuacaccua

SEQ ID NO: 306194 - RNA, 18 nt, Human
ccccugaagaugguuucu

SEQ ID NO: 306195 - RNA, 23 nt, Human
ccuacaaacccauacuuagagcu

SEQ ID NO: 306196 - RNA, 22 nt, Human
ccuggaagaucagaguugacua

SEQ ID NO: 306197 - RNA, 21 nt, Human
gaaacaaaauguauaaaacuu

SEQ ID NO: 306198 - RNA, 18 nt, Human
gagcuaauaccaccuguc

SEQ ID NO: 306199 - RNA, 23 nt, Human
uaaaacaaauguugucuaggaac

SEQ ID NO: 306200 - RNA, 27 nt, Human
uaaaacaaauguugucuaggaacuuau

SEQ ID NO: 306201 - RNA, 20 nt, Human
uaacacugaaaggcauaacg

SEQ ID NO: 306202 - RNA, 24 nt, Human
uacuacaguugacauucacuuagc

SEQ ID NO: 306203 - RNA, 27 nt, Human
uacuuagagcuuucacagaauacaagg

SEQ ID NO: 306204 - RNA, 27 nt, Human
ucuuacaccuacaaacccauacuuaga

SEQ ID NO: 306205 - RNA, 23 nt, Human
ugacugaauaccuacuacaguug

SEQ ID NO: 306206 - RNA, 20 nt, Human
ugagaaagacugacugaaua

SEQ ID NO: 306207 - RNA, 24 nt, Human
ugagaaagacugacugaauaccua

SEQ ID NO: 306208 - RNA, 21 nt, Human
uguaaaacaaauguugucuag

SEQ ID NO: 306209 - RNA, 22 nt, Human
uguccuggaagaucagaguuga

SEQ ID NO: 306210 - RNA, 25 nt, Human
uguuuuuuuccuccaauaaacauuu

SEQ ID NO: 306211 - RNA, 21 nt, Human
uucacagaauacaaggagcau

SEQ ID NO: 306212 - RNA, 24 nt, Human
uugaugcccaauauuuucaguugu

SEQ ID NO: 306213 - RNA, 22 nt, Human
uuuccuugcagcuccagcucaa

SEQ ID NO: 306214 - RNA, 18 nt, Human
uuuuuuuuuuuuuguuuu

SEQ ID NO: 306215 - RNA, 24 nt, Human
uuuuuuuuuuuuuguuuuuuuccu

SEQ ID NO: 306216 - RNA, 18 nt, Human
ccacugggcgggcuggag

SEQ ID NO: 306217 - RNA, 24 nt, Human
ccacugggcgggcuggagacucca

SEQ ID NO: 306218 - RNA, 25 nt, Human
cccaugggcaugccacaagaugcgc

SEQ ID NO: 306219 - RNA, 27 nt, Human
cccgcagugcccugacagcugaguggu

SEQ ID NO: 306220 - RNA, 21 nt, Human
ccgccgccucuggaccugggu

SEQ ID NO: 306221 - RNA, 24 nt, Human
cuggagacuccaggagaaucagga

SEQ ID NO: 306222 - RNA, 18 nt, Human
gacuucaggccagaggug

SEQ ID NO: 306223 - RNA, 19 nt, Human
gggaaauguggcgagaggg

SEQ ID NO: 306224 - RNA, 20 nt, Human
ugagaacauuaaaaaggucc

SEQ ID NO: 306225 - RNA, 22 nt, Human
ugagagccacgauugagaacau

SEQ ID NO: 306226 - RNA, 21 nt, Human
uggaccugggugacugcggcc

SEQ ID NO: 306227 - RNA, 25 nt, Human
aaacagaaggcaaugugucccagag

SEQ ID NO: 306228 - RNA, 24 nt, Human
cagaaggcaaugugucccagagaa

SEQ ID NO: 306229 - RNA, 20 nt, Human
gaaaucaccuggguguggca

SEQ ID NO: 306230 - RNA, 22 nt, Human
gaccacagcagaaauuccagcc

SEQ ID NO: 306231 - RNA, 20 nt, Human
gagaaaacagaaggcaaugu

SEQ ID NO: 306232 - RNA, 26 nt, Human
uagaccacagcagaaauuccagccaa

SEQ ID NO: 306233 - RNA, 21 nt, Human
uggcaaacagacagggcuucc

SEQ ID NO: 306234 - RNA, 21 nt, Human
uuaagaaguuuauuuuauaga

SEQ ID NO: 306235 - RNA, 19 nt, Human
uucuuuagaggaaaucacc

SEQ ID NO: 306236 - RNA, 20 nt, Human
aaaaaaaaacgaggcaugaa

SEQ ID NO: 306237 - RNA, 20 nt, Human
aaaaaaacgaggcaugaaaa

SEQ ID NO: 306238 - RNA, 18 nt, Human
aaaaaauagcaagaauuc

SEQ ID NO: 306239 - RNA, 24 nt, Human
aaaaagaagaagaaagcugggagg

SEQ ID NO: 306240 - RNA, 22 nt, Human
aaaagaagaagaaagcugggag

SEQ ID NO: 306241 - RNA, 22 nt, Human
aaacacccuuaucccccaaaaa

SEQ ID NO: 306242 - RNA, 19 nt, Human
aaacagacagaaguguccc

SEQ ID NO: 306243 - RNA, 26 nt, Human
aaacauggcagcaaagacaggcagcc

SEQ ID NO: 306244 - RNA, 21 nt, Human
aaacgaggcaugaaaaguccc

SEQ ID NO: 306245 - RNA, 18 nt, Human
aacacccuuaucccccaa

SEQ ID NO: 306246 - RNA, 22 nt, Human
aaccgcuuuccacaggggauac

SEQ ID NO: 306247 - RNA, 19 nt, Human
aacucacgucccgcacccc

SEQ ID NO: 306248 - RNA, 24 nt, Human
aacucacgucccgcacccccucca

SEQ ID NO: 306249 - RNA, 24 nt, Human
aagagaggaggaguuuaaagagga

SEQ ID NO: 306250 - RNA, 24 nt, Human
aagcugccaaguccagcaauccca

SEQ ID NO: 306251 - RNA, 24 nt, Human
accaagccacaucugaaaaaaaaa

SEQ ID NO: 306252 - RNA, 22 nt, Human
accuugcgcccagaccaagcca

SEQ ID NO: 306253 - RNA, 18 nt, Human
acucacgucccgcacccc

SEQ ID NO: 306254 - RNA, 20 nt, Human
agaaaaaaaaaagaagaaga

SEQ ID NO: 306255 - RNA, 22 nt, Human
agacagggggguaggacauaug

SEQ ID NO: 306256 - RNA, 19 nt, Human
agaccaagccacaucugaa

SEQ ID NO: 306257 - RNA, 23 nt, Human
agagaggaggaguuuaaagagga

SEQ ID NO: 306258 - RNA, 21 nt, Human
agagcaaaaaaaaucuccucu

SEQ ID NO: 306259 - RNA, 25 nt, Human
agagcaaaaaaaaucuccucuggag

SEQ ID NO: 306260 - RNA, 26 nt, Human
agcaagaauucuuuccuucuuguaaa

SEQ ID NO: 306261 - RNA, 24 nt, Human
aggcagccagaaacuggcuggggg

SEQ ID NO: 306262 - RNA, 25 nt, Human
aggcagccagaaacuggcugggggu

SEQ ID NO: 306263 - RNA, 23 nt, Human
aggcagggugggauagagaaggg

SEQ ID NO: 306264 - RNA, 19 nt, Human
agggugggauagagaaggg

SEQ ID NO: 306265 - RNA, 25 nt, Human
auaguggaggcaaaggguuggccag

SEQ ID NO: 306266 - RNA, 20 nt, Human
aucaagagaggaggaguuua

SEQ ID NO: 306267 - RNA, 18 nt, Human
augaagacagggggguag

SEQ ID NO: 306268 - RNA, 21 nt, Human
auggaggagcagcuccccuca

SEQ ID NO: 306269 - RNA, 21 nt, Human
caaagacaggcagccagaaac

SEQ ID NO: 306270 - RNA, 24 nt, Human
caaggcaagaaucugcugucuccc

SEQ ID NO: 306271 - RNA, 24 nt, Human
caaucccauuuccagcaugaagaa

SEQ ID NO: 306272 - RNA, 21 nt, Human
cagaaaaaaaaaagaagaaga

SEQ ID NO: 306273 - RNA, 20 nt, Human
cagaccaagccacaucugaa

SEQ ID NO: 306274 - RNA, 23 nt, Human
cagagagaaagaacuaagguagg

SEQ ID NO: 306275 - RNA, 26 nt, Human
cagauggaaaaccacaacucuuguag

SEQ ID NO: 306276 - RNA, 21 nt, Human
cagcaaugaccucaccaaggc

SEQ ID NO: 306277 - RNA, 19 nt, Human
cagcccauggcugccuccu

SEQ ID NO: 306278 - RNA, 25 nt, Human
cagcggccuggcucucuucccccug

SEQ ID NO: 306279 - RNA, 19 nt, Human
caggagaacacuguuggaa

SEQ ID NO: 306280 - RNA, 18 nt, Human
cagggugggauagagaag

SEQ ID NO: 306281 - RNA, 25 nt, Human
caucuugucaacacuucuggaguuc

SEQ ID NO: 306282 - RNA, 20 nt, Human
cauuuagaaaaacaaccaga

SEQ ID NO: 306283 - RNA, 22 nt, Human
ccaaguccagcaaucccauuuc

SEQ ID NO: 306284 - RNA, 19 nt, Human
ccagaccaagccacaucug

SEQ ID NO: 306285 - RNA, 25 nt, Human
ccccauuccuuucccuaagacccag

SEQ ID NO: 306286 - RNA, 19 nt, Human
cccccauuuccaacuuccc

SEQ ID NO: 306287 - RNA, 24 nt, Human
cccccuccgggccucccucagaca

SEQ ID NO: 306288 - RNA, 21 nt, Human
cccccuucuuccccugacaag

SEQ ID NO: 306289 - RNA, 25 nt, Human
ccccgcccccuccgggccucccuca

SEQ ID NO: 306290 - RNA, 23 nt, Human
cccgcacccccuccacaaguuua

SEQ ID NO: 306291 - RNA, 20 nt, Human
cccgcccccuccgggccucc

SEQ ID NO: 306292 - RNA, 25 nt, Human
cccucagcggccuggcucucuuuca

SEQ ID NO: 306293 - RNA, 22 nt, Human
ccgcacccccuccacaaguuua

SEQ ID NO: 306294 - RNA, 21 nt, Human
ccgguucuuccucuucucgga

SEQ ID NO: 306295 - RNA, 22 nt, Human
ccuaagacccagcccucccuca

SEQ ID NO: 306296 - RNA, 18 nt, Human
ccuccgggccucccucag

SEQ ID NO: 306297 - RNA, 27 nt, Human
ccuccgggccucccucagacacguccc

SEQ ID NO: 306298 - RNA, 23 nt, Human
ccugagauaccaggcccccuucu

SEQ ID NO: 306299 - RNA, 18 nt, Human
ccuggaccagcucaaggc

SEQ ID NO: 306300 - RNA, 20 nt, Human
ccuugcgcccagaccaagcc

SEQ ID NO: 306301 - RNA, 25 nt, Human
cgcacccccuccacaaguuuaaccg

SEQ ID NO: 306302 - RNA, 20 nt, Human
cgucccgcacccccuccaca

SEQ ID NO: 306303 - RNA, 18 nt, Human
cucaaauauucccuccca

SEQ ID NO: 306304 - RNA, 24 nt, Human
cucacgucccgcacccccuccaca

SEQ ID NO: 306305 - RNA, 21 nt, Human
cucagcggccuggcucucuuu

SEQ ID NO: 306306 - RNA, 21 nt, Human
cucccaccccuaacagaacuc

SEQ ID NO: 306307 - RNA, 23 nt, Human
cucccagcccauggcugccuccu

SEQ ID NO: 306308 - RNA, 23 nt, Human
cuccccgcccccuccgggccucc

SEQ ID NO: 306309 - RNA, 21 nt, Human
cuccuggaccagcucaaggcc

SEQ ID NO: 306310 - RNA, 18 nt, Human
cucugaggcacuaaggcc

SEQ ID NO: 306311 - RNA, 22 nt, Human
cucuucauuccuucagccuuaa

SEQ ID NO: 306312 - RNA, 23 nt, Human
cugacaagaguggaaggaucaga

SEQ ID NO: 306313 - RNA, 23 nt, Human
gaaaauucagcauugcuggggca

SEQ ID NO: 306314 - RNA, 19 nt, Human
gaaugggggucugaaaaaa

SEQ ID NO: 306315 - RNA, 19 nt, Human
gagcgaacgccccuucucc

SEQ ID NO: 306316 - RNA, 19 nt, Human
gauacuuuccccuuucaca

SEQ ID NO: 306317 - RNA, 22 nt, Human
gcaugaagaaugggggucugaa

SEQ ID NO: 306318 - RNA, 19 nt, Human
gccaccuccccgcccccuc

SEQ ID NO: 306319 - RNA, 23 nt, Human
gcccccucccccucagcggccug

SEQ ID NO: 306320 - RNA, 21 nt, Human
gccuggcauggggaagaacuc

SEQ ID NO: 306321 - RNA, 21 nt, Human
gcugcugggaccuugcgccca

SEQ ID NO: 306322 - RNA, 21 nt, Human
guagcccccauuuccaacuuc

SEQ ID NO: 306323 - RNA, 19 nt, Human
guccugaggaaauuaagag

SEQ ID NO: 306324 - RNA, 18 nt, Human
gucucuuuacagaacccg

SEQ ID NO: 306325 - RNA, 21 nt, Human
uaaaaaacauggcagcaaaga

SEQ ID NO: 306326 - RNA, 21 nt, Human
uaaacagacagaagugucccc

SEQ ID NO: 306327 - RNA, 22 nt, Human
uaaagaggagcugcuucuggca

SEQ ID NO: 306328 - RNA, 20 nt, Human
uaaauuaugaaaaaaaaaua

SEQ ID NO: 306329 - RNA, 19 nt, Human
uaagaguccgguuccuagu

SEQ ID NO: 306330 - RNA, 23 nt, Human
uaccaggcccccuucuuccccug

SEQ ID NO: 306331 - RNA, 21 nt, Human
uagcagcccccucccccucag

SEQ ID NO: 306332 - RNA, 27 nt, Human
uagcagcccccucccccucagcggccu

SEQ ID NO: 306333 - RNA, 19 nt, Human
uaggaagggcuaugaucuc

SEQ ID NO: 306334 - RNA, 20 nt, Human
uagggauaaugugccagcua

SEQ ID NO: 306335 - RNA, 20 nt, Human
uaucaaggcagggugggaua

SEQ ID NO: 306336 - RNA, 21 nt, Human
uaucaaggcagggugggauag

SEQ ID NO: 306337 - RNA, 25 nt, Human
uaugaaaaaaaaauagcaagaauuc

SEQ ID NO: 306338 - RNA, 23 nt, Human
ucacagaagaguaagcuuaagcu

SEQ ID NO: 306339 - RNA, 22 nt, Human
ucacauuuagaaaaacaaccag

SEQ ID NO: 306340 - RNA, 23 nt, Human
ucagaaaaaaaaaagaagaagaa

SEQ ID NO: 306341 - RNA, 25 nt, Human
ucagaaaaaaaaaagaagaagaaag

SEQ ID NO: 306342 - RNA, 20 nt, Human
ucauaaacaccauggcucuu

SEQ ID NO: 306343 - RNA, 21 nt, Human
ucccaaaggagcgaacgcccc

SEQ ID NO: 306344 - RNA, 25 nt, Human
uccccaugaguuuaagaaaauauuu

SEQ ID NO: 306345 - RNA, 26 nt, Human
uccccaugaguuuaagaaaauauuug

SEQ ID NO: 306346 - RNA, 22 nt, Human
uccccgcccccuccgggccucc

SEQ ID NO: 306347 - RNA, 23 nt, Human
ucccuaagacccagcccucccuc

SEQ ID NO: 306348 - RNA, 21 nt, Human
uccuagucaaagacgagggga

SEQ ID NO: 306349 - RNA, 24 nt, Human
ucucccagcccauggcugccuccu

SEQ ID NO: 306350 - RNA, 19 nt, Human
ucuccccaugaguuuaaga

SEQ ID NO: 306351 - RNA, 21 nt, Human
ucuccguccuuccuaaccacg

SEQ ID NO: 306352 - RNA, 24 nt, Human
ucucugaggcacuaaggcccauuc

SEQ ID NO: 306353 - RNA, 23 nt, Human
ucugaaaaaaauucaauaguggg

SEQ ID NO: 306354 - RNA, 22 nt, Human
ugaaaaaaaaacgaggcaugaa

SEQ ID NO: 306355 - RNA, 23 nt, Human
ugaaaaaaaaacgaggcaugaaa

SEQ ID NO: 306356 - RNA, 21 nt, Human
ugaaaaaaauucaauagugga

SEQ ID NO: 306357 - RNA, 23 nt, Human
ugaaaauccguaccacccaacuc

SEQ ID NO: 306358 - RNA, 23 nt, Human
ugaagacagggggguaggacaua

SEQ ID NO: 306359 - RNA, 23 nt, Human
ugaccucaccaaggcaagaaucu

SEQ ID NO: 306360 - RNA, 24 nt, Human
ugagauaccaggcccccuucuucc

SEQ ID NO: 306361 - RNA, 23 nt, Human
ugaggaagaggaaggagagaagg

SEQ ID NO: 306362 - RNA, 24 nt, Human
ugaggaagaggaaggagagaaggu

SEQ ID NO: 306363 - RNA, 21 nt, Human
ugaggcacuaaggcccauuca

SEQ ID NO: 306364 - RNA, 18 nt, Human
uggaggagcagcuccccu

SEQ ID NO: 306365 - RNA, 20 nt, Human
uggaguggaggggaugcugc

SEQ ID NO: 306366 - RNA, 19 nt, Human
uggccaguugaaaauccgu

SEQ ID NO: 306367 - RNA, 20 nt, Human
ugggaggugguuaaacaccc

SEQ ID NO: 306368 - RNA, 18 nt, Human
ugggaucacagagauggc

SEQ ID NO: 306369 - RNA, 21 nt, Human
uggggaagaacucacgucccg

SEQ ID NO: 306370 - RNA, 23 nt, Human
uguaaaaaacauggcagcaaaga

SEQ ID NO: 306371 - RNA, 24 nt, Human
ugucccacucucuucauuccuuca

SEQ ID NO: 306372 - RNA, 22 nt, Human
uuaccuuagcuccacaaacagg

SEQ ID NO: 306373 - RNA, 24 nt, Human
uuagcagcccccucccccucagcg

SEQ ID NO: 306374 - RNA, 25 nt, Human
uucagaaaaaaaaaagaagaagaaa

SEQ ID NO: 306375 - RNA, 18 nt, Human
uucaggaagaagauggag

SEQ ID NO: 306376 - RNA, 21 nt, Human
uuccacaggggauacuuuccc

SEQ ID NO: 306377 - RNA, 18 nt, Human
uuccaggucuucugaggc

SEQ ID NO: 306378 - RNA, 27 nt, Human
uucccaacgucucuuuacagaacccgc

SEQ ID NO: 306379 - RNA, 22 nt, Human
uuccuucagccuuaagaaauuc

SEQ ID NO: 306380 - RNA, 22 nt, Human
uuccuuucccuaagacccagcc

SEQ ID NO: 306381 - RNA, 19 nt, Human
uucucuucauaaacaccau

SEQ ID NO: 306382 - RNA, 22 nt, Human
uucuucuucaggaagaagaugg

SEQ ID NO: 306383 - RNA, 21 nt, Human
uugcgcccagaccaagccaca

SEQ ID NO: 306384 - RNA, 19 nt, Human
uuggccaguugaaaauccg

SEQ ID NO: 306385 - RNA, 23 nt, Human
uugucaacacuucuggaguucug

SEQ ID NO: 306386 - RNA, 23 nt, Human
uuuaagaaaauauuugcuggccu

SEQ ID NO: 306387 - RNA, 21 nt, Human
uuugguaagucuucacauuua

SEQ ID NO: 306388 - RNA, 26 nt, Human
aaaauagcacuuccaacuccaaaaag

SEQ ID NO: 306389 - RNA, 22 nt, Human
aaacaacagagcugacuuuaca

SEQ ID NO: 306390 - RNA, 18 nt, Human
aacagagcuagucuuccc

SEQ ID NO: 306391 - RNA, 20 nt, Human
aagugaaggcagaccuagua

SEQ ID NO: 306392 - RNA, 20 nt, Human
acaaauauuucaaagacaau

SEQ ID NO: 306393 - RNA, 23 nt, Human
acccgggcagcauucgggugccu

SEQ ID NO: 306394 - RNA, 22 nt, Human
acuuccaacuccaaaaagguga

SEQ ID NO: 306395 - RNA, 18 nt, Human
agaaaaggcccucaaaug

SEQ ID NO: 306396 - RNA, 19 nt, Human
agacaauguauguacacga

SEQ ID NO: 306397 - RNA, 22 nt, Human
agagcugacuuuacaaaaguaa

SEQ ID NO: 306398 - RNA, 24 nt, Human
agcucugcugggccuuggcuuccc

SEQ ID NO: 306399 - RNA, 19 nt, Human
aguaaacagugaaaaaauc

SEQ ID NO: 306400 - RNA, 18 nt, Human
augcaguucuucacaguu

SEQ ID NO: 306401 - RNA, 22 nt, Human
caacugcuugcuguuuacagug

SEQ ID NO: 306402 - RNA, 21 nt, Human
cacaaugaaauaaugcaaaag

SEQ ID NO: 306403 - RNA, 18 nt, Human
caccagagaaaggucaca

SEQ ID NO: 306404 - RNA, 24 nt, Human
cagcaaaugauagaauagggagua

SEQ ID NO: 306405 - RNA, 25 nt, Human
cagcaagcaacagcaaaugauagaa

SEQ ID NO: 306406 - RNA, 22 nt, Human
cauugucgagaccguuuucuuu

SEQ ID NO: 306407 - RNA, 23 nt, Human
cauugucgagaccguuuucuuug

SEQ ID NO: 306408 - RNA, 21 nt, Human
cgcuaccaagaccaguugcgc

SEQ ID NO: 306409 - RNA, 18 nt, Human
cucauugucgagaccguu

SEQ ID NO: 306410 - RNA, 24 nt, Human
cugcagucacaucucagcucugcu

SEQ ID NO: 306411 - RNA, 18 nt, Human
cugggccuuggcuuccuc

SEQ ID NO: 306412 - RNA, 18 nt, Human
cuuugccagguuucuuuc

SEQ ID NO: 306413 - RNA, 18 nt, Human
gaagcaggaagagaaaag

SEQ ID NO: 306414 - RNA, 20 nt, Human
gaauagggaguauuuuucac

SEQ ID NO: 306415 - RNA, 19 nt, Human
gcuaccaagaccaguugcg

SEQ ID NO: 306416 - RNA, 21 nt, Human
gcuuccucaucucacccgggc

SEQ ID NO: 306417 - RNA, 22 nt, Human
ggaagagaaaaggcccucaaau

SEQ ID NO: 306418 - RNA, 24 nt, Human
ggacugggguuggacggcucugca

SEQ ID NO: 306419 - RNA, 22 nt, Human
gggcagcauucgggugccuccg

SEQ ID NO: 306420 - RNA, 19 nt, Human
ggguuggacggcucugcag

SEQ ID NO: 306421 - RNA, 19 nt, Human
uaaaacaacagagcugagg

SEQ ID NO: 306422 - RNA, 24 nt, Human
uaaugaaccaauuuaacuuucaau

SEQ ID NO: 306423 - RNA, 20 nt, Human
ucaacugcuugcuguuuaca

SEQ ID NO: 306424 - RNA, 21 nt, Human
ucacaggacugggguuggacg

SEQ ID NO: 306425 - RNA, 23 nt, Human
uccauaggaaaauagcacuucca

SEQ ID NO: 306426 - RNA, 23 nt, Human
ucccaucugcugaucagccuuaa

SEQ ID NO: 306427 - RNA, 24 nt, Human
ugaaaaaaucuuuauagaagcuag

SEQ ID NO: 306428 - RNA, 18 nt, Human
ugaaauaaugcaaaaguc

SEQ ID NO: 306429 - RNA, 22 nt, Human
ugaacuauaauuuugcaaaaga

SEQ ID NO: 306430 - RNA, 21 nt, Human
ugaaggcagaccuaguauauu

SEQ ID NO: 306431 - RNA, 26 nt, Human
ugagaacaaaauauuuuauuucucuc

SEQ ID NO: 306432 - RNA, 20 nt, Human
ugcagucacaucucagcucu

SEQ ID NO: 306433 - RNA, 19 nt, Human
ugcaugcacaaugaaauaa

SEQ ID NO: 306434 - RNA, 22 nt, Human
ugccauaacugugcucacgucu

SEQ ID NO: 306435 - RNA, 23 nt, Human
ugggccuuggcuuccucaucuca

SEQ ID NO: 306436 - RNA, 18 nt, Human
uggguggccuacucauug

SEQ ID NO: 306437 - RNA, 19 nt, Human
uguauguaguggggcucag

SEQ ID NO: 306438 - RNA, 23 nt, Human
ugugcucacgucucauccaugug

SEQ ID NO: 306439 - RNA, 26 nt, Human
uuaguagcaacagagcuagucuuccc

SEQ ID NO: 306440 - RNA, 24 nt, Human
uuaguagugauggguggccuacuc

SEQ ID NO: 306441 - RNA, 22 nt, Human
uucacaguucagcaagcaacag

SEQ ID NO: 306442 - RNA, 18 nt, Human
uuuguaaaugaaauggca

SEQ ID NO: 306443 - RNA, 19 nt, Human
uuuucuuugccagguuucu

SEQ ID NO: 306444 - RNA, 24 nt, Human
aaacacaaaucaaauauaaacacc

SEQ ID NO: 306445 - RNA, 25 nt, Human
aaauauaaacacaaaucaaauauaa

SEQ ID NO: 306446 - RNA, 23 nt, Human
aacuacuuucuaaagaacuuaac

SEQ ID NO: 306447 - RNA, 24 nt, Human
aagaaaaagggcauuucaaaauau

SEQ ID NO: 306448 - RNA, 20 nt, Human
acauaugccauaaaacugca

SEQ ID NO: 306449 - RNA, 21 nt, Human
agacaaaugcucacuuuaauc

SEQ ID NO: 306450 - RNA, 22 nt, Human
agagaacauaaucauaaaaugg

SEQ ID NO: 306451 - RNA, 24 nt, Human
aggugcuauaaacuagacaaagcu

SEQ ID NO: 306452 - RNA, 20 nt, Human
caaccaaacauuccuccugu

SEQ ID NO: 306453 - RNA, 23 nt, Human
caaccaaacauuccuccuguacc

SEQ ID NO: 306454 - RNA, 22 nt, Human
cauaugccauaaaacugcaacc

SEQ ID NO: 306455 - RNA, 26 nt, Human
ccagauaaaacugaacaacgggggcg

SEQ ID NO: 306456 - RNA, 25 nt, Human
cccaaccaaacauuccuccuguacc

SEQ ID NO: 306457 - RNA, 19 nt, Human
cucauugaagucuugaaga

SEQ ID NO: 306458 - RNA, 19 nt, Human
cugaaagaaauaagaaugu

SEQ ID NO: 306459 - RNA, 19 nt, Human
gcuaaaauacaaaacaucu

SEQ ID NO: 306460 - RNA, 21 nt, Human
uaaaacugacaacguagcuua

SEQ ID NO: 306461 - RNA, 18 nt, Human
uaaaauggcuagaggucc

SEQ ID NO: 306462 - RNA, 22 nt, Human
uaaacacaaaucaaauauaaac

SEQ ID NO: 306463 - RNA, 26 nt, Human
uaaacacaaaucaaauauaaacaccc

SEQ ID NO: 306464 - RNA, 19 nt, Human
uaacaaaaagugacuacuu

SEQ ID NO: 306465 - RNA, 24 nt, Human
uaacaaaaagugacuacuugaaga

SEQ ID NO: 306466 - RNA, 18 nt, Human
uaaggugcuauaaacuag

SEQ ID NO: 306467 - RNA, 19 nt, Human
uacaauaccugccucaaau

SEQ ID NO: 306468 - RNA, 22 nt, Human
uagaaaaacagaauacgcucuu

SEQ ID NO: 306469 - RNA, 22 nt, Human
uagaaaagaacagcaugugaug

SEQ ID NO: 306470 - RNA, 28 nt, Human
uauaaacacaaaucaaauauaaacaccc

SEQ ID NO: 306471 - RNA, 21 nt, Human
uaucaagaaaaagggcauuuc

SEQ ID NO: 306472 - RNA, 25 nt, Human
uaucauaauagggaugacuaaguac

SEQ ID NO: 306473 - RNA, 24 nt, Human
ucaaaguaaauucagaucuaagcu

SEQ ID NO: 306474 - RNA, 23 nt, Human
uccacuuuuauuaaagguuuuga

SEQ ID NO: 306475 - RNA, 20 nt, Human
ucucauaucauaauagggau

SEQ ID NO: 306476 - RNA, 22 nt, Human
ucucccaaccaaacauuccucc

SEQ ID NO: 306477 - RNA, 21 nt, Human
ucuucugaaagaaauaagaau

SEQ ID NO: 306478 - RNA, 20 nt, Human
ugaaagaaauaagaauguuu

SEQ ID NO: 306479 - RNA, 19 nt, Human
ugccauaaaacugcaacca

SEQ ID NO: 306480 - RNA, 19 nt, Human
ugcuauaaacuagacaaag

SEQ ID NO: 306481 - RNA, 20 nt, Human
ugguaucaagaaaaagggca

SEQ ID NO: 306482 - RNA, 23 nt, Human
uucucccaaccaaacauuccuuc

SEQ ID NO: 306483 - RNA, 21 nt, Human
uuuacagagaacauaaucaua

SEQ ID NO: 306484 - RNA, 21 nt, Human
uuuugacaaugaagauuucau

SEQ ID NO: 306485 - RNA, 18 nt, Human
uuuuuuuuuuuuuuuuug

SEQ ID NO: 306486 - RNA, 22 nt, Human
uuuuuuuuuuuuuuuuugauag

SEQ ID NO: 306487 - RNA, 24 nt, Human
ccgucaagggccucucccgacugc

SEQ ID NO: 306488 - RNA, 23 nt, Human
cgucaagggccucucccgacugc

SEQ ID NO: 306489 - RNA, 26 nt, Human
acgccacguaucucggaggagcaggc

SEQ ID NO: 306490 - RNA, 22 nt, Human
aggcuccugcacacgcgggcuc

SEQ ID NO: 306491 - RNA, 21 nt, Human
caauacugaagggcaucuaga

SEQ ID NO: 306492 - RNA, 25 nt, Human
ccccgccgcccucgccgcggucgcc

SEQ ID NO: 306493 - RNA, 23 nt, Human
ccccguggcccggcccggcccgg

SEQ ID NO: 306494 - RNA, 22 nt, Human
cccgcccggccucccgcccgcu

SEQ ID NO: 306495 - RNA, 20 nt, Human
ccgacgccgcccggagcugc

SEQ ID NO: 306496 - RNA, 25 nt, Human
ccgcccggccucccgcccgcugccc

SEQ ID NO: 306497 - RNA, 26 nt, Human
ccgcugcccgccggccgcucuccccg

SEQ ID NO: 306498 - RNA, 18 nt, Human
ccguccccgccgcccucg

SEQ ID NO: 306499 - RNA, 19 nt, Human
ccguccccgccgcccucgg

SEQ ID NO: 306500 - RNA, 25 nt, Human
ccucgucgccucucgcgccgcugcc

SEQ ID NO: 306501 - RNA, 20 nt, Human
ccucucgcgccgcugccgac

SEQ ID NO: 306502 - RNA, 25 nt, Human
cgaaaguugccugaagaaugggcac

SEQ ID NO: 306503 - RNA, 23 nt, Human
cgccgcgccggcuccugccgccc

SEQ ID NO: 306504 - RNA, 20 nt, Human
cgcggcccgcccggccuccc

SEQ ID NO: 306505 - RNA, 21 nt, Human
cggcucgguggcugcccgcgg

SEQ ID NO: 306506 - RNA, 18 nt, Human
cuauuuguucacaauacu

SEQ ID NO: 306507 - RNA, 23 nt, Human
cuuccuguugaccacugucuugc

SEQ ID NO: 306508 - RNA, 22 nt, Human
gaaauaaagguugggggaacac

SEQ ID NO: 306509 - RNA, 27 nt, Human
gaacacaauggagagagaccgguaccc

SEQ ID NO: 306510 - RNA, 18 nt, Human
ggaggagcaggcuccugc

SEQ ID NO: 306511 - RNA, 19 nt, Human
gggcaucuagaauuagcua

SEQ ID NO: 306512 - RNA, 19 nt, Human
guggcugcccgcggcccgc

SEQ ID NO: 306513 - RNA, 22 nt, Human
uccccguggcccggcccggccc

SEQ ID NO: 306514 - RNA, 24 nt, Human
ucgccgcgccggcuccugccgccc

SEQ ID NO: 306515 - RNA, 20 nt, Human
ucgccgcggucgccgcgccg

SEQ ID NO: 306516 - RNA, 20 nt, Human
ugcagaggggaaaggcggcu

SEQ ID NO: 306517 - RNA, 21 nt, Human
ugcccgccggccgcucucccc

SEQ ID NO: 306518 - RNA, 22 nt, Human
ugccugaagaaugggcacagaa

SEQ ID NO: 306519 - RNA, 19 nt, Human
uggcccggcccggcccggc

SEQ ID NO: 306520 - RNA, 19 nt, Human
ugggucuuccuguugacca

SEQ ID NO: 306521 - RNA, 24 nt, Human
ugucacuuggaaauaaagguuggg

SEQ ID NO: 306522 - RNA, 19 nt, Human
uugcaaaaagugcagaggg

SEQ ID NO: 306523 - RNA, 22 nt, Human
uugggggaacacacagaaaugg

SEQ ID NO: 306524 - RNA, 24 nt, Human
aaaagaagagaaaaauaauaaaag

SEQ ID NO: 306525 - RNA, 21 nt, Human
aaacaaguaaaaacuggccug

SEQ ID NO: 306526 - RNA, 23 nt, Human
aaacuguuccuaucucaaaguca

SEQ ID NO: 306527 - RNA, 24 nt, Human
aaagaagagaaaaauaauaaaagg

SEQ ID NO: 306528 - RNA, 18 nt, Human
aaauccaauaaaaaccag

SEQ ID NO: 306529 - RNA, 24 nt, Human
aaauccaauaaaaaccagaaauuu

SEQ ID NO: 306530 - RNA, 19 nt, Human
aacuggccuguaacuuugc

SEQ ID NO: 306531 - RNA, 23 nt, Human
acauacauauauacacacguggu

SEQ ID NO: 306532 - RNA, 24 nt, Human
acaugugggaaaacgaggagcagg

SEQ ID NO: 306533 - RNA, 23 nt, Human
accaaacacuuugcagacaauga

SEQ ID NO: 306534 - RNA, 25 nt, Human
acuaaaaaaaaauuuauaacagacu

SEQ ID NO: 306535 - RNA, 20 nt, Human
agaaaccgucaucuccauuu

SEQ ID NO: 306536 - RNA, 19 nt, Human
agaaagcugauaaaaaucu

SEQ ID NO: 306537 - RNA, 18 nt, Human
agacagagaaagcugaua

SEQ ID NO: 306538 - RNA, 23 nt, Human
auacaaaaauccaauaaaaacca

SEQ ID NO: 306539 - RNA, 21 nt, Human
auaugcacacauacauauagu

SEQ ID NO: 306540 - RNA, 22 nt, Human
augcacacauacauauauacac

SEQ ID NO: 306541 - RNA, 21 nt, Human
auugcagucaauuuguccauu

SEQ ID NO: 306542 - RNA, 23 nt, Human
caaaacaagacuccaugaagugc

SEQ ID NO: 306543 - RNA, 22 nt, Human
caacacugcaagauacugguca

SEQ ID NO: 306544 - RNA, 20 nt, Human
caacagugcccagagaguaa

SEQ ID NO: 306545 - RNA, 20 nt, Human
caagacuccaugaagugcua

SEQ ID NO: 306546 - RNA, 18 nt, Human
cacaagcacacaucuggg

SEQ ID NO: 306547 - RNA, 23 nt, Human
cacaagcacacaucugggaaacg

SEQ ID NO: 306548 - RNA, 19 nt, Human
caccgcacgcaggccagac

SEQ ID NO: 306549 - RNA, 21 nt, Human
caccgcacgcaggccagacuc

SEQ ID NO: 306550 - RNA, 18 nt, Human
cacuaacuauauccuauc

SEQ ID NO: 306551 - RNA, 18 nt, Human
cacucaucacuggcugcg

SEQ ID NO: 306552 - RNA, 18 nt, Human
cagauguccaccagucuc

SEQ ID NO: 306553 - RNA, 25 nt, Human
cauaugcacacauacauauauacac

SEQ ID NO: 306554 - RNA, 19 nt, Human
ccagacucacacugcaucu

SEQ ID NO: 306555 - RNA, 24 nt, Human
ccagcuaguauuacauugcaguca

SEQ ID NO: 306556 - RNA, 22 nt, Human
ccauccagaaauaaauaguuau

SEQ ID NO: 306557 - RNA, 25 nt, Human
ccucacagcugccgccgauaccacc

SEQ ID NO: 306558 - RNA, 21 nt, Human
ccucaccgcacgcaggccaga

SEQ ID NO: 306559 - RNA, 22 nt, Human
ccucgcaccaaacacuuugcag

SEQ ID NO: 306560 - RNA, 20 nt, Human
cuacuugagagcacauccca

SEQ ID NO: 306561 - RNA, 18 nt, Human
cuucaaaacaagacucca

SEQ ID NO: 306562 - RNA, 19 nt, Human
cuuccaggacugacagagg

SEQ ID NO: 306563 - RNA, 20 nt, Human
cuucccggaacccccucaca

SEQ ID NO: 306564 - RNA, 23 nt, Human
gcaccaaacacuuugcagacaau

SEQ ID NO: 306565 - RNA, 20 nt, Human
gcguguuuuaggagggacag

SEQ ID NO: 306566 - RNA, 18 nt, Human
gcuguaguuacagaaaac

SEQ ID NO: 306567 - RNA, 20 nt, Human
ggaacccccucacagcugcc

SEQ ID NO: 306568 - RNA, 21 nt, Human
ggggagggaugcaggacaugu

SEQ ID NO: 306569 - RNA, 24 nt, Human
gguuuuguugcugaggauaacagg

SEQ ID NO: 306570 - RNA, 25 nt, Human
gugauccuacacauccuuccuuguc

SEQ ID NO: 306571 - RNA, 21 nt, Human
uaaaaggcuauauauguuggu

SEQ ID NO: 306572 - RNA, 24 nt, Human
uaaaauacaaaaauccaauaaaaa

SEQ ID NO: 306573 - RNA, 21 nt, Human
uaaaucagaaaccgucaucuc

SEQ ID NO: 306574 - RNA, 24 nt, Human
uacaaaaauccaauaaaaaccaga

SEQ ID NO: 306575 - RNA, 18 nt, Human
uacaacagugcccagaga

SEQ ID NO: 306576 - RNA, 30 nt, Human
uacagacauaugcacacauacauauauaca

SEQ ID NO: 306577 - RNA, 21 nt, Human
uaguauuacauugcagucaau

SEQ ID NO: 306578 - RNA, 22 nt, Human
uauacagcuacagacauaugca

SEQ ID NO: 306579 - RNA, 20 nt, Human
uauauacacaagugugugua

SEQ ID NO: 306580 - RNA, 31 nt, Human
uauauacacacgugguugagaaccugugcag

SEQ ID NO: 306581 - RNA, 26 nt, Human
uauauacagcuacagacauaugcaca

SEQ ID NO: 306582 - RNA, 23 nt, Human
uauauuuccaacuuuucuacaca

SEQ ID NO: 306583 - RNA, 28 nt, Human
uauguacauauauacacaagugugugua

SEQ ID NO: 306584 - RNA, 18 nt, Human
uaugucuguauguacaua

SEQ ID NO: 306585 - RNA, 24 nt, Human
uaugucuguauguacauauauaca

SEQ ID NO: 306586 - RNA, 19 nt, Human
uauucagaaucuguccuga

SEQ ID NO: 306587 - RNA, 24 nt, Human
ucacuggcugcgcuuguuccccuc

SEQ ID NO: 306588 - RNA, 25 nt, Human
uccaacuuuucuacacagccuacaa

SEQ ID NO: 306589 - RNA, 24 nt, Human
uccacagcuugacauuuaugaaac

SEQ ID NO: 306590 - RNA, 23 nt, Human
uccaugcgccgggcucucauuuc

SEQ ID NO: 306591 - RNA, 23 nt, Human
ucuuacaacagugcccagagagu

SEQ ID NO: 306592 - RNA, 22 nt, Human
ugaaacauaccagcuaguauua

SEQ ID NO: 306593 - RNA, 20 nt, Human
ugaagaaauuuucuguggga

SEQ ID NO: 306594 - RNA, 19 nt, Human
ugacugcagggguuggcgu

SEQ ID NO: 306595 - RNA, 20 nt, Human
ugacuuaaaagaagagaaaa

SEQ ID NO: 306596 - RNA, 20 nt, Human
ugagagcacaucccacaguc

SEQ ID NO: 306597 - RNA, 21 nt, Human
ugauccuacacauccuuccuu

SEQ ID NO: 306598 - RNA, 24 nt, Human
ugcaguagugauccuacacauccu

SEQ ID NO: 306599 - RNA, 20 nt, Human
ugcauguguguguaucauca

SEQ ID NO: 306600 - RNA, 24 nt, Human
uggaacaccaaaaaauuuugaaga

SEQ ID NO: 306601 - RNA, 24 nt, Human
uggaacaccaaaaaauuuugaaga

SEQ ID NO: 306602 - RNA, 23 nt, Human
uggcguguuuuaggagggacagg

SEQ ID NO: 306603 - RNA, 24 nt, Human
ugggacuaaaaaaaaauuuauaac

SEQ ID NO: 306604 - RNA, 18 nt, Human
uguaucaucacaagcaca

SEQ ID NO: 306605 - RNA, 23 nt, Human
uguaucaucacaagcacacaucu

SEQ ID NO: 306606 - RNA, 23 nt, Human
ugugggagucuacugcuuauggg

SEQ ID NO: 306607 - RNA, 23 nt, Human
uguguguaucuggaucuguagcu

SEQ ID NO: 306608 - RNA, 18 nt, Human
uguguguguaucaucaca

SEQ ID NO: 306609 - RNA, 20 nt, Human
uucacaaaauuagcaauaau

SEQ ID NO: 306610 - RNA, 23 nt, Human
uuccaugugcgccuaagcucccu

SEQ ID NO: 306611 - RNA, 18 nt, Human
uuccucgcaccaaacacu

SEQ ID NO: 306612 - RNA, 23 nt, Human
uugaccuugauuacguaaacagu

SEQ ID NO: 306613 - RNA, 23 nt, Human
uuuuacuguaauuuacacaagag

SEQ ID NO: 306614 - RNA, 22 nt, Human
aaagcaaacacaaaaccaaccc

SEQ ID NO: 306615 - RNA, 21 nt, Human
aacccaacgcccgccccaaca

SEQ ID NO: 306616 - RNA, 21 nt, Human
aagcaaacacaaaaccaaccc

SEQ ID NO: 306617 - RNA, 24 nt, Human
aagcaaacacaaaaccaacgaguc

SEQ ID NO: 306618 - RNA, 24 nt, Human
aagcucaaggcugggguguucuga

SEQ ID NO: 306619 - RNA, 22 nt, Human
aaggcgcucucggccgggccua

SEQ ID NO: 306620 - RNA, 18 nt, Human
accacccgcgccaucccg

SEQ ID NO: 306621 - RNA, 28 nt, Human
accucccgccaggcccgcacugcccgcu

SEQ ID NO: 306622 - RNA, 23 nt, Human
agcaaacacaaaaccaacccgga

SEQ ID NO: 306623 - RNA, 22 nt, Human
agcgcacgcuaagcggcugccc

SEQ ID NO: 306624 - RNA, 19 nt, Human
aggcccgcacugcccgcug

SEQ ID NO: 306625 - RNA, 22 nt, Human
caaguccaggccccgcacaucc

SEQ ID NO: 306626 - RNA, 19 nt, Human
cacacacaccacccgcgcc

SEQ ID NO: 306627 - RNA, 20 nt, Human
cacacacaccacccgcgcca

SEQ ID NO: 306628 - RNA, 24 nt, Human
cacacacaccacccgcgccauccc

SEQ ID NO: 306629 - RNA, 19 nt, Human
caccguccccccaaaccca

SEQ ID NO: 306630 - RNA, 22 nt, Human
caccuccuagcccgggagcaga

SEQ ID NO: 306631 - RNA, 21 nt, Human
cagagugggguccggaaaagc

SEQ ID NO: 306632 - RNA, 23 nt, Human
ccaaacccaacgcccgccccaac

SEQ ID NO: 306633 - RNA, 20 nt, Human
ccaacgcccgccccaacacg

SEQ ID NO: 306634 - RNA, 22 nt, Human
ccacugagugcccgauccuggg

SEQ ID NO: 306635 - RNA, 21 nt, Human
ccagcgcggcgggggcgcggg

SEQ ID NO: 306636 - RNA, 18 nt, Human
cccaaacccaacgcccgc

SEQ ID NO: 306637 - RNA, 25 nt, Human
cccaacgcccgccccaacacggauc

SEQ ID NO: 306638 - RNA, 19 nt, Human
cccaccucccgccaggccc

SEQ ID NO: 306639 - RNA, 21 nt, Human
cccaccucccgccaggcccgc

SEQ ID NO: 306640 - RNA, 20 nt, Human
ccccaaacccaacgcccgcc

SEQ ID NO: 306641 - RNA, 26 nt, Human
ccccaaacccaacgcccgccccaaca

SEQ ID NO: 306642 - RNA, 19 nt, Human
ccccccaaacccaacgccc

SEQ ID NO: 306643 - RNA, 24 nt, Human
ccccccaaacccaacgcccgcccc

SEQ ID NO: 306644 - RNA, 21 nt, Human
cccggccgcugggccucggcc

SEQ ID NO: 306645 - RNA, 22 nt, Human
cccuccgcggagugggccuccg

SEQ ID NO: 306646 - RNA, 21 nt, Human
ccggagugggaagugggagga

SEQ ID NO: 306647 - RNA, 25 nt, Human
ccggggcugggcgcgcccgccgccu

SEQ ID NO: 306648 - RNA, 19 nt, Human
ccucccccggccgcugggc

SEQ ID NO: 306649 - RNA, 23 nt, Human
ccucccgccaggcccgcacugcc

SEQ ID NO: 306650 - RNA, 20 nt, Human
ccuccgcgcccgcgcccuuc

SEQ ID NO: 306651 - RNA, 19 nt, Human
ccugcagcuaagcucaagg

SEQ ID NO: 306652 - RNA, 19 nt, Human
cgcccgcgcccuuccccgc

SEQ ID NO: 306653 - RNA, 19 nt, Human
cgcgcccgcgcccuucccc

SEQ ID NO: 306654 - RNA, 18 nt, Human
cgcggcgcggugagcugg

SEQ ID NO: 306655 - RNA, 20 nt, Human
cgcgugcguccuccgcgccc

SEQ ID NO: 306656 - RNA, 21 nt, Human
cggcgcggugagcuggggcuu

SEQ ID NO: 306657 - RNA, 19 nt, Human
cggcgggcgcuccaggggc

SEQ ID NO: 306658 - RNA, 19 nt, Human
cgggcggugaggagggggc

SEQ ID NO: 306659 - RNA, 23 nt, Human
cugcccgcugucgcuccguggcc

SEQ ID NO: 306660 - RNA, 19 nt, Human
cugccggcucgacucuugc

SEQ ID NO: 306661 - RNA, 24 nt, Human
gaaaagcaaacacaaaaccaaccc

SEQ ID NO: 306662 - RNA, 25 nt, Human
gaaaagcaaacacaaaaccaacccg

SEQ ID NO: 306663 - RNA, 22 nt, Human
gagcagagcagagggccugggc

SEQ ID NO: 306664 - RNA, 19 nt, Human
gaggagggggcugcgcagg

SEQ ID NO: 306665 - RNA, 21 nt, Human
gauggaccucccccaccuccc

SEQ ID NO: 306666 - RNA, 18 nt, Human
gcgcggcgggggcgcggg

SEQ ID NO: 306667 - RNA, 18 nt, Human
gcgcgggccggagagcgg

SEQ ID NO: 306668 - RNA, 19 nt, Human
gcgcgggccggagagcggg

SEQ ID NO: 306669 - RNA, 20 nt, Human
gcggcgggggcgcgggauac

SEQ ID NO: 306670 - RNA, 18 nt, Human
gcgggcggugaggagggg

SEQ ID NO: 306671 - RNA, 24 nt, Human
ggaccucccccaccucccgccagg

SEQ ID NO: 306672 - RNA, 25 nt, Human
ggagagcgggugugcaaagugggcg

SEQ ID NO: 306673 - RNA, 23 nt, Human
ggagugggaagugggaggagggg

SEQ ID NO: 306674 - RNA, 23 nt, Human
ggagugggaagugggaggagggg

SEQ ID NO: 306675 - RNA, 22 nt, Human
ggcaccguccccccaaacccaa

SEQ ID NO: 306676 - RNA, 21 nt, Human
ggcugcgcaggugugaggucc

SEQ ID NO: 306677 - RNA, 20 nt, Human
gggaagugggaggagggggc

SEQ ID NO: 306678 - RNA, 21 nt, Human
ggggaccgcggcgggcgcucc

SEQ ID NO: 306679 - RNA, 20 nt, Human
ggggccgcgccccuugcucu

SEQ ID NO: 306680 - RNA, 23 nt, Human
gugggguccggaaaagcaaacac

SEQ ID NO: 306681 - RNA, 19 nt, Human
uaccaggcgcgccgggccg

SEQ ID NO: 306682 - RNA, 20 nt, Human
uaccgcgccgcgugcccucc

SEQ ID NO: 306683 - RNA, 19 nt, Human
uacgagguuguccuccccc

SEQ ID NO: 306684 - RNA, 22 nt, Human
uagacagauuuauuacagucag

SEQ ID NO: 306685 - RNA, 19 nt, Human
uagcccgggagcagagcag

SEQ ID NO: 306686 - RNA, 19 nt, Human
uccaguccgcaggcccggc

SEQ ID NO: 306687 - RNA, 23 nt, Human
uccccccaaacccaacgcccgcc

SEQ ID NO: 306688 - RNA, 24 nt, Human
uccgcaggcccggccgcucagucc

SEQ ID NO: 306689 - RNA, 21 nt, Human
uccggaaaagcaaacacaaaa

SEQ ID NO: 306690 - RNA, 18 nt, Human
uccggggcccgugggaac

SEQ ID NO: 306691 - RNA, 21 nt, Human
uccuaggcaaguccaggcccc

SEQ ID NO: 306692 - RNA, 23 nt, Human
uccuaggcaaguccaggccccgc

SEQ ID NO: 306693 - RNA, 23 nt, Human
ucugagauggaccucccccaccu

SEQ ID NO: 306694 - RNA, 18 nt, Human
ucuugcacggcgggcggu

SEQ ID NO: 306695 - RNA, 24 nt, Human
ucuuuuuggagggcagaguggggu

SEQ ID NO: 306696 - RNA, 20 nt, Human
ugagauggaccucccccacc

SEQ ID NO: 306697 - RNA, 25 nt, Human
ugcaaagugggcgcagggcccuggg

SEQ ID NO: 306698 - RNA, 18 nt, Human
uggaccucccccaccucc

SEQ ID NO: 306699 - RNA, 19 nt, Human
uggaccucccccaccuccc

SEQ ID NO: 306700 - RNA, 19 nt, Human
ugggaacacacacacacca

SEQ ID NO: 306701 - RNA, 18 nt, Human
ugggaggagggggcugcg

SEQ ID NO: 306702 - RNA, 21 nt, Human
ugggggcaccguccccccaau

SEQ ID NO: 306703 - RNA, 20 nt, Human
ugugcaaagugggcgcaggg

SEQ ID NO: 306704 - RNA, 21 nt, Human
uuuuuuuuuuuuuugucuuuu

SEQ ID NO: 306705 - RNA, 18 nt, Human
uuuuuuuuuuuuuuuuug

SEQ ID NO: 306706 - RNA, 25 nt, Human
uuuuuuuuuuuuuuuuuugucuuuu

SEQ ID NO: 306707 - RNA, 25 nt, Human
aaacaagagugggcaaagacccccu

SEQ ID NO: 306708 - RNA, 23 nt, Human
aaagcgaaacaagagugggcaaa

SEQ ID NO: 306709 - RNA, 21 nt, Human
aagcgaaacaagagugggcaa

SEQ ID NO: 306710 - RNA, 26 nt, Human
acacaggguagguuguacauagcagu

SEQ ID NO: 306711 - RNA, 31 nt, Human
acccccuucuucucucccucccucccccaag

SEQ ID NO: 306712 - RNA, 18 nt, Human
acccuccgcaacgcgcac

SEQ ID NO: 306713 - RNA, 24 nt, Human
accgcgcucugcccgccccccccc

SEQ ID NO: 306714 - RNA, 21 nt, Human
accuucuagcauaauucccag

SEQ ID NO: 306715 - RNA, 18 nt, Human
acucagagcgucuuuagg

SEQ ID NO: 306716 - RNA, 23 nt, Human
agacccccuucuucucucccucc

SEQ ID NO: 306717 - RNA, 21 nt, Human
agugacagggacagguaggug

SEQ ID NO: 306718 - RNA, 21 nt, Human
auugcauccaccagagaaacu

SEQ ID NO: 306719 - RNA, 21 nt, Human
caaacgaagacaugggaugug

SEQ ID NO: 306720 - RNA, 21 nt, Human
caacgcgcacacgcacacccc

SEQ ID NO: 306721 - RNA, 26 nt, Human
cacauuuguuucauauuugcugaaaa

SEQ ID NO: 306722 - RNA, 20 nt, Human
cagcagccgcugcagccacg

SEQ ID NO: 306723 - RNA, 22 nt, Human
caggcacccaggcgagcgacgg

SEQ ID NO: 306724 - RNA, 26 nt, Human
cagugguuuccuuuucucuauauagc

SEQ ID NO: 306725 - RNA, 21 nt, Human
ccagaucugcggcuccgcgcu

SEQ ID NO: 306726 - RNA, 23 nt, Human
cccccaagaaccccuccaauaag

SEQ ID NO: 306727 - RNA, 20 nt, Human
ccccccccacgcggcagccc

SEQ ID NO: 306728 - RNA, 20 nt, Human
cccccccccacgcggcagcc

SEQ ID NO: 306729 - RNA, 21 nt, Human
cccccguagccgccgcugccc

SEQ ID NO: 306730 - RNA, 21 nt, Human
cccccuucuucucucccuccc

SEQ ID NO: 306731 - RNA, 24 nt, Human
ccccucgggcggucgaacaggagc

SEQ ID NO: 306732 - RNA, 20 nt, Human
cccgccgaguucucaagcca

SEQ ID NO: 306733 - RNA, 22 nt, Human
cccgcuccgggucgcgcucucc

SEQ ID NO: 306734 - RNA, 19 nt, Human
ccgccgagcccccguagcc

SEQ ID NO: 306735 - RNA, 20 nt, Human
ccgcgcucugcccgcccccc

SEQ ID NO: 306736 - RNA, 21 nt, Human
ccgcgcucugcccgccccccc

SEQ ID NO: 306737 - RNA, 21 nt, Human
cgaccgcgcucugcccgcccc

SEQ ID NO: 306738 - RNA, 21 nt, Human
cgcccccccccacgcggcagc

SEQ ID NO: 306739 - RNA, 21 nt, Human
cgccgaccgcgcucugcccgc

SEQ ID NO: 306740 - RNA, 20 nt, Human
cgccgaguucucaagccaag

SEQ ID NO: 306741 - RNA, 22 nt, Human
cggcaagguccuaggaucccgg

SEQ ID NO: 306742 - RNA, 20 nt, Human
cggcagcccugacagagaag

SEQ ID NO: 306743 - RNA, 23 nt, Human
cuccuccggaaggcucaagcgaa

SEQ ID NO: 306744 - RNA, 18 nt, Human
cucugcccgccccccccc

SEQ ID NO: 306745 - RNA, 19 nt, Human
cucugcccgccccccccca

SEQ ID NO: 306746 - RNA, 24 nt, Human
gacacugaggacaucccuuugaaa

SEQ ID NO: 306747 - RNA, 25 nt, Human
gaccuucuagcauaauucccagucu

SEQ ID NO: 306748 - RNA, 20 nt, Human
gagcaggcuuccaagcucca

SEQ ID NO: 306749 - RNA, 24 nt, Human
gcgaaacaagagugggcaaagacc

SEQ ID NO: 306750 - RNA, 20 nt, Human
gcgcucugcccgcccccccc

SEQ ID NO: 306751 - RNA, 23 nt, Human
gcuaacgccgaccgcgcucugcc

SEQ ID NO: 306752 - RNA, 19 nt, Human
gcucugcccgccccccccc

SEQ ID NO: 306753 - RNA, 24 nt, Human
gcucugcccgcccccccccacgcg

SEQ ID NO: 306754 - RNA, 24 nt, Human
ggacgcaacccccgccgaguucuc

SEQ ID NO: 306755 - RNA, 25 nt, Human
ggacgcaacccccgccgaguucuca

SEQ ID NO: 306756 - RNA, 22 nt, Human
ggcggcagcagccgcugcagcc

SEQ ID NO: 306757 - RNA, 23 nt, Human
gggagagccaggggacgcaaccc

SEQ ID NO: 306758 - RNA, 22 nt, Human
uaauauguuagaaacauacagu

SEQ ID NO: 306759 - RNA, 22 nt, Human
uacacaggguagguuguacaua

SEQ ID NO: 306760 - RNA, 20 nt, Human
uagguuguacauagcaguuu

SEQ ID NO: 306761 - RNA, 21 nt, Human
uauaguaauguuaaaauguca

SEQ ID NO: 306762 - RNA, 25 nt, Human
uauguuagaaacauacaguguggca

SEQ ID NO: 306763 - RNA, 20 nt, Human
uauuuuacucccaugaaaua

SEQ ID NO: 306764 - RNA, 19 nt, Human
ucccccaagaaccccucca

SEQ ID NO: 306765 - RNA, 23 nt, Human
ucccucccucccccaagaacccc

SEQ ID NO: 306766 - RNA, 20 nt, Human
ucucuuucucucccuuucuu

SEQ ID NO: 306767 - RNA, 19 nt, Human
ucugagcgcacccuccgca

SEQ ID NO: 306768 - RNA, 22 nt, Human
ucuucucucccucccuccccca

SEQ ID NO: 306769 - RNA, 21 nt, Human
ugaaaaguaaaacaauaauau

SEQ ID NO: 306770 - RNA, 18 nt, Human
ugagcgcacccuccgcaa

SEQ ID NO: 306771 - RNA, 27 nt, Human
ugggaugugggcagaagggcaccacuc

SEQ ID NO: 306772 - RNA, 24 nt, Human
uguacauagcaguuucagaaacau

SEQ ID NO: 306773 - RNA, 18 nt, Human
ugucaagagugacaggga

SEQ ID NO: 306774 - RNA, 22 nt, Human
ugucagacacugaggacauccc

SEQ ID NO: 306775 - RNA, 25 nt, Human
uuaaaaaauaacaagcuuauaguaa

SEQ ID NO: 306776 - RNA, 27 nt, Human
uuaaagccuaaccuuuaaaaacacugu

SEQ ID NO: 306777 - RNA, 18 nt, Human
uucaagggcggaguugcc

SEQ ID NO: 306778 - RNA, 26 nt, Human
uucuucucucccucccucccccaaga

SEQ ID NO: 306779 - RNA, 22 nt, Human
uuguguauguguccuugcaacu

SEQ ID NO: 306780 - RNA, 19 nt, Human
uuucaagggcggaguugcc

SEQ ID NO: 306781 - RNA, 19 nt, Human
uuuuuuuuuuuuuuuuugu

SEQ ID NO: 306782 - RNA, 27 nt, Human
uuuuuuuuuuuuuuuuuuuuuuugggg

SEQ ID NO: 306783 - RNA, 22 nt, Human
agcuggucccugucgugacaca

SEQ ID NO: 306784 - RNA, 18 nt, Human
agggaggggaagccugga

SEQ ID NO: 306785 - RNA, 25 nt, Human
caaaaugaccccaguccgcggaggc

SEQ ID NO: 306786 - RNA, 18 nt, Human
caacaggcagacucccag

SEQ ID NO: 306787 - RNA, 23 nt, Human
cagcugcccaaacaccccuuuca

SEQ ID NO: 306788 - RNA, 19 nt, Human
caguagcggcggcugcggc

SEQ ID NO: 306789 - RNA, 21 nt, Human
caguagcggcggcugcggcgg

SEQ ID NO: 306790 - RNA, 22 nt, Human
ccaguagcggcggcugcggcuu

SEQ ID NO: 306791 - RNA, 19 nt, Human
ccagucaaaaugaccccag

SEQ ID NO: 306792 - RNA, 21 nt, Human
ccccccagcugcccaaacacc

SEQ ID NO: 306793 - RNA, 23 nt, Human
ccccccagcugcccaaacacccc

SEQ ID NO: 306794 - RNA, 18 nt, Human
ccccccugcucccgggcc

SEQ ID NO: 306795 - RNA, 21 nt, Human
ccccccugcucccgggccgcc

SEQ ID NO: 306796 - RNA, 19 nt, Human
cccccggggagcugguccc

SEQ ID NO: 306797 - RNA, 21 nt, Human
cccccggggagcuggucccug

SEQ ID NO: 306798 - RNA, 18 nt, Human
ccccggggagcugguccc

SEQ ID NO: 306799 - RNA, 19 nt, Human
ccggagugggggccgcccc

SEQ ID NO: 306800 - RNA, 24 nt, Human
cggagugggggccgccccccugcu

SEQ ID NO: 306801 - RNA, 22 nt, Human
cucccaguagcggcggcugcgg

SEQ ID NO: 306802 - RNA, 20 nt, Human
cucccgggccgccucuccgc

SEQ ID NO: 306803 - RNA, 22 nt, Human
gagaaggcgggaugggccaagg

SEQ ID NO: 306804 - RNA, 21 nt, Human
gagggcaggcaggggccaggg

SEQ ID NO: 306805 - RNA, 19 nt, Human
gcaacaggcagacucccag

SEQ ID NO: 306806 - RNA, 23 nt, Human
ggaggggaagccuggagaaggcg

SEQ ID NO: 306807 - RNA, 20 nt, Human
ggugaguuggcccccgggga

SEQ ID NO: 306808 - RNA, 20 nt, Human
ggugccccccagcugcccaa

SEQ ID NO: 306809 - RNA, 21 nt, Human
guagcggcggcugcggcggcg

SEQ ID NO: 306810 - RNA, 19 nt, Human
gucaaaaugaccccagucc

SEQ ID NO: 306811 - RNA, 21 nt, Human
ucagacccuggggcgggagca

SEQ ID NO: 306812 - RNA, 21 nt, Human
ucccgggccgccucuccgcuc

SEQ ID NO: 306813 - RNA, 24 nt, Human
ucccuguuccuggcuuuaguccca

SEQ ID NO: 306814 - RNA, 22 nt, Human
ugcccaaacaccccuuucagac

SEQ ID NO: 306815 - RNA, 23 nt, Human
ugcccaaacaccccuuucagacc

SEQ ID NO: 306816 - RNA, 24 nt, Human
ugcccccgcccucggggaugaucu

SEQ ID NO: 306817 - RNA, 23 nt, Human
ugggaggggaaggcccucuccug

SEQ ID NO: 306818 - RNA, 23 nt, Human
uuccuggcuuuagucccaggggc

SEQ ID NO: 306819 - RNA, 18 nt, Human
uuuuuuuuuuuuuuuuug

SEQ ID NO: 306820 - RNA, 22 nt, Human
uuuuuuuuuuuuuuuuugacag

SEQ ID NO: 306821 - RNA, 21 nt, Human
aaaaaaaugcucacaaaauau

SEQ ID NO: 306822 - RNA, 22 nt, Human
aaaaaaguaaauaaaagcuuaa

SEQ ID NO: 306823 - RNA, 20 nt, Human
aaaaaugcucacaaaauauc

SEQ ID NO: 306824 - RNA, 26 nt, Human
aaaauaaacaaaaaaaugcucacaaa

SEQ ID NO: 306825 - RNA, 24 nt, Human
aaaaucccaaagucauuucaaaaa

SEQ ID NO: 306826 - RNA, 20 nt, Human
aaauucaaaacagguaucuc

SEQ ID NO: 306827 - RNA, 18 nt, Human
acuugcucacuccugaaa

SEQ ID NO: 306828 - RNA, 23 nt, Human
agaaagauaacaguuaaaaaaaa

SEQ ID NO: 306829 - RNA, 22 nt, Human
aguaccuuuuaucuuuaagaua

SEQ ID NO: 306830 - RNA, 21 nt, Human
auaaacaaaaaaaugcucaca

SEQ ID NO: 306831 - RNA, 23 nt, Human
auaguaauguuaauauagagauu

SEQ ID NO: 306832 - RNA, 19 nt, Human
augagcugaaaccccaccu

SEQ ID NO: 306833 - RNA, 18 nt, Human
auuucuuggaccgcugcc

SEQ ID NO: 306834 - RNA, 21 nt, Human
caaaaaaaugcucacaaaaua

SEQ ID NO: 306835 - RNA, 21 nt, Human
ccccccugccaaauaaaaauc

SEQ ID NO: 306836 - RNA, 24 nt, Human
cccuucccaaguuucauccagaaa

SEQ ID NO: 306837 - RNA, 18 nt, Human
ccgcugcccucgcccuag

SEQ ID NO: 306838 - RNA, 22 nt, Human
ccggugaauagcaaugcuagaa

SEQ ID NO: 306839 - RNA, 24 nt, Human
ccucuuaucuccuuuaaauucaaa

SEQ ID NO: 306840 - RNA, 21 nt, Human
ccugguccuugcaccucagcc

SEQ ID NO: 306841 - RNA, 21 nt, Human
ccugguccuugcaccucagcc

SEQ ID NO: 306842 - RNA, 22 nt, Human
cggugaauagcaaugcuagaaa

SEQ ID NO: 306843 - RNA, 23 nt, Human
cucacaaaauaucuaugagaaac

SEQ ID NO: 306844 - RNA, 24 nt, Human
cuugcaccucagcccgaggccaac

SEQ ID NO: 306845 - RNA, 21 nt, Human
gcaaugcuagaaauaaaaugc

SEQ ID NO: 306846 - RNA, 18 nt, Human
uaaaaaaaucccaaaguc

SEQ ID NO: 306847 - RNA, 24 nt, Human
uaaaaaaaucccaaagucauuuca

SEQ ID NO: 306848 - RNA, 23 nt, Human
uaaauaaaagcuuaaaaaaaucc

SEQ ID NO: 306849 - RNA, 20 nt, Human
uacaaccuagccccccugcc

SEQ ID NO: 306850 - RNA, 25 nt, Human
uaccaaguaucuuauccacauuucu

SEQ ID NO: 306851 - RNA, 24 nt, Human
ucaugucccaguuccaaaacaaaa

SEQ ID NO: 306852 - RNA, 21 nt, Human
uccagaaagauaacaguuaaa

SEQ ID NO: 306853 - RNA, 21 nt, Human
ucccauacaaccuagcccccc

SEQ ID NO: 306854 - RNA, 28 nt, Human
ucuucaaaauaaacaaaaaaaugcucac

SEQ ID NO: 306855 - RNA, 18 nt, Human
ugagcugaaaccccaccu

SEQ ID NO: 306856 - RNA, 18 nt, Human
ugcaccucagcccgaggc

SEQ ID NO: 306857 - RNA, 23 nt, Human
ugcccucgcccuaguccuggucc

SEQ ID NO: 306858 - RNA, 19 nt, Human
uucuuuggacaauuuaaaa

SEQ ID NO: 306859 - RNA, 22 nt, Human
aaaaaaacagaaugcauagagg

SEQ ID NO: 306860 - RNA, 19 nt, Human
aaaaacagaaaagggagga

SEQ ID NO: 306861 - RNA, 27 nt, Human
aaacagaaaagggaggaaaagggaccc

SEQ ID NO: 306862 - RNA, 21 nt, Human
aaacauccaacacaccaguaa

SEQ ID NO: 306863 - RNA, 27 nt, Human
aaacauccaacacaccaguaaccucac

SEQ ID NO: 306864 - RNA, 26 nt, Human
aaaggacacaacgagcagcagcugcg

SEQ ID NO: 306865 - RNA, 25 nt, Human
aaccacucccuuccucucccuucca

SEQ ID NO: 306866 - RNA, 20 nt, Human
aacucgugcaacguaauccu

SEQ ID NO: 306867 - RNA, 25 nt, Human
aagaaaaacagaaaagggaggaaaa

SEQ ID NO: 306868 - RNA, 20 nt, Human
aagaagaaaaacagaaaaga

SEQ ID NO: 306869 - RNA, 20 nt, Human
aagaagaaaaacagaaaagg

SEQ ID NO: 306870 - RNA, 20 nt, Human
aagggagggggcgagguccc

SEQ ID NO: 306871 - RNA, 21 nt, Human
aaugcauagaagggggaggga

SEQ ID NO: 306872 - RNA, 18 nt, Human
aauuaaacauccaacaca

SEQ ID NO: 306873 - RNA, 19 nt, Human
agaaaagggaggaaaaaaa

SEQ ID NO: 306874 - RNA, 19 nt, Human
agaagaaaaacagaaaagg

SEQ ID NO: 306875 - RNA, 24 nt, Human
agaagaaaaacagaaaagggaggg

SEQ ID NO: 306876 - RNA, 24 nt, Human
aggaaaaaaacagaaugcauagaa

SEQ ID NO: 306877 - RNA, 18 nt, Human
agggagggggcgaggucc

SEQ ID NO: 306878 - RNA, 22 nt, Human
agggagggggcgaggucccuga

SEQ ID NO: 306879 - RNA, 23 nt, Human
aguaaccucacuuaacugaaggc

SEQ ID NO: 306880 - RNA, 23 nt, Human
caaaggacacaacgagcagcagc

SEQ ID NO: 306881 - RNA, 23 nt, Human
caaauccucccaaccaccacuug

SEQ ID NO: 306882 - RNA, 26 nt, Human
caacacaccaguaaccucacuuaacu

SEQ ID NO: 306883 - RNA, 21 nt, Human
caaccaccacuuggauaaugc

SEQ ID NO: 306884 - RNA, 22 nt, Human
cacucccuuccucucccuucca

SEQ ID NO: 306885 - RNA, 20 nt, Human
cacuuguuauucaaacaacu

SEQ ID NO: 306886 - RNA, 18 nt, Human
cagcggcaauuucuccag

SEQ ID NO: 306887 - RNA, 21 nt, Human
cagcggcaauuucuccagcgg

SEQ ID NO: 306888 - RNA, 19 nt, Human
caguaaccucacuuaacug

SEQ ID NO: 306889 - RNA, 19 nt, Human
cccacuccaugucgguggu

SEQ ID NO: 306890 - RNA, 18 nt, Human
cccccgccuucccucucc

SEQ ID NO: 306891 - RNA, 23 nt, Human
cccccuucuucacaccccugggc

SEQ ID NO: 306892 - RNA, 20 nt, Human
ccccgccuucccucuccucu

SEQ ID NO: 306893 - RNA, 21 nt, Human
ccccgccuucccucuccucuc

SEQ ID NO: 306894 - RNA, 21 nt, Human
cccgacaccgcaccgcggccg

SEQ ID NO: 306895 - RNA, 20 nt, Human
cccugggcucagcgaggcuc

SEQ ID NO: 306896 - RNA, 24 nt, Human
cccugggcucagcgaggcuccucc

SEQ ID NO: 306897 - RNA, 22 nt, Human
cccuuccucucccuuccagccc

SEQ ID NO: 306898 - RNA, 25 nt, Human
ccgcggccgccgcccggaggcuccc

SEQ ID NO: 306899 - RNA, 18 nt, Human
ccgggaagaagaaaaaca

SEQ ID NO: 306900 - RNA, 20 nt, Human
ccucggcucggagcacgcca

SEQ ID NO: 306901 - RNA, 21 nt, Human
ccucucgccgucgcgcccugg

SEQ ID NO: 306902 - RNA, 19 nt, Human
ccugaagcagccccucggc

SEQ ID NO: 306903 - RNA, 21 nt, Human
ccuuccagcccucccccgccu

SEQ ID NO: 306904 - RNA, 20 nt, Human
ccuucccucuccucucgccg

SEQ ID NO: 306905 - RNA, 23 nt, Human
cgcccgagcccacuccaugucgg

SEQ ID NO: 306906 - RNA, 19 nt, Human
cgccgcgcgggcagagagc

SEQ ID NO: 306907 - RNA, 18 nt, Human
cgcggccggggguggaag

SEQ ID NO: 306908 - RNA, 20 nt, Human
cggaggcucccgacgcccca

SEQ ID NO: 306909 - RNA, 21 nt, Human
cggccggggguggaaggcggg

SEQ ID NO: 306910 - RNA, 22 nt, Human
cggccggggguggaaggcgggc

SEQ ID NO: 306911 - RNA, 21 nt, Human
cggcggcgcgggcggcucugg

SEQ ID NO: 306912 - RNA, 18 nt, Human
cggcucccaaccacuccc

SEQ ID NO: 306913 - RNA, 22 nt, Human
cgggcugcgggcggcacuggca

SEQ ID NO: 306914 - RNA, 23 nt, Human
cuccaugucgguggucgcucgug

SEQ ID NO: 306915 - RNA, 20 nt, Human
cucccccgccuucccucucc

SEQ ID NO: 306916 - RNA, 18 nt, Human
cucccggcuucacccuag

SEQ ID NO: 306917 - RNA, 20 nt, Human
cucccuuccucucccuucca

SEQ ID NO: 306918 - RNA, 20 nt, Human
cuggugcugaauuaaacauc

SEQ ID NO: 306919 - RNA, 27 nt, Human
cuggugcugaauuaaacauccaacuga

SEQ ID NO: 306920 - RNA, 25 nt, Human
gaagaaaaacagaaaagggaggaaa

SEQ ID NO: 306921 - RNA, 20 nt, Human
gaagaagaaaaacagaaaag

SEQ ID NO: 306922 - RNA, 19 nt, Human
gaggcggcuuuucguuucu

SEQ ID NO: 306923 - RNA, 21 nt, Human
gaggcggcuuuucguuucucc

SEQ ID NO: 306924 - RNA, 20 nt, Human
gauuucugcugguuuuccuu

SEQ ID NO: 306925 - RNA, 21 nt, Human
gcccacuccaugucggugguc

SEQ ID NO: 306926 - RNA, 19 nt, Human
gcccucccccgccuucccu

SEQ ID NO: 306927 - RNA, 21 nt, Human
ggaagaagaaaaacagaaaag

SEQ ID NO: 306928 - RNA, 23 nt, Human
ggaagaagaaaaacagaaaaggg

SEQ ID NO: 306929 - RNA, 18 nt, Human
ggacacaacgagcagcag

SEQ ID NO: 306930 - RNA, 25 nt, Human
ggcggcggcgcgggcggcucuggca

SEQ ID NO: 306931 - RNA, 20 nt, Human
ggcucggagcacgccaaguc

SEQ ID NO: 306932 - RNA, 23 nt, Human
gggaagaagaaaaacagaaaagg

SEQ ID NO: 306933 - RNA, 21 nt, Human
gggagggggcgaggucccuga

SEQ ID NO: 306934 - RNA, 23 nt, Human
gucccgcgcacagaggcggaggc

SEQ ID NO: 306935 - RNA, 19 nt, Human
guccuucuuucuuuaaggc

SEQ ID NO: 306936 - RNA, 19 nt, Human
gucgcgcccugggcucagc

SEQ ID NO: 306937 - RNA, 24 nt, Human
uaaaaaaaaaaaaaaacucuucuc

SEQ ID NO: 306938 - RNA, 21 nt, Human
uaaacauccaacacaccagua

SEQ ID NO: 306939 - RNA, 23 nt, Human
uaacugaaggcgucuucaauuuc

SEQ ID NO: 306940 - RNA, 19 nt, Human
ucaaaggacacaacgagca

SEQ ID NO: 306941 - RNA, 23 nt, Human
ucacuucccgggaagaagaaaaa

SEQ ID NO: 306942 - RNA, 21 nt, Human
ucaugcaaugcuggugcugaa

SEQ ID NO: 306943 - RNA, 18 nt, Human
ucauucaaaauucaacuc

SEQ ID NO: 306944 - RNA, 19 nt, Human
uccacagcgaggagggagg

SEQ ID NO: 306945 - RNA, 18 nt, Human
ucccaaccacucccuucc

SEQ ID NO: 306946 - RNA, 19 nt, Human
ucccccgccuucccucucc

SEQ ID NO: 306947 - RNA, 23 nt, Human
ucccccuucuucacaccccuggg

SEQ ID NO: 306948 - RNA, 18 nt, Human
ucccgagguccuucuuuc

SEQ ID NO: 306949 - RNA, 22 nt, Human
ucccggcuucacccuagggccu

SEQ ID NO: 306950 - RNA, 23 nt, Human
ucccugaagcagccccucggcuc

SEQ ID NO: 306951 - RNA, 23 nt, Human
ucccuuccucucccuuccagccc

SEQ ID NO: 306952 - RNA, 24 nt, Human
uccgcggcugaggagacuagaggc

SEQ ID NO: 306953 - RNA, 20 nt, Human
uccuucuuucuuuaaggcuu

SEQ ID NO: 306954 - RNA, 21 nt, Human
ucugaaccuaaauuuuaaaag

SEQ ID NO: 306955 - RNA, 24 nt, Human
ucuucaauuucacccauauacaua

SEQ ID NO: 306956 - RNA, 20 nt, Human
ucuuuaaaaaaaaaaaaaaa

SEQ ID NO: 306957 - RNA, 22 nt, Human
ugaauuaaacauccaacacacc

SEQ ID NO: 306958 - RNA, 21 nt, Human
ugcaaauccucccaaccacca

SEQ ID NO: 306959 - RNA, 24 nt, Human
ugcaaauccucccaaccaccacuu

SEQ ID NO: 306960 - RNA, 18 nt, Human
uuaaugcauuuuuaaaag

SEQ ID NO: 306961 - RNA, 21 nt, Human
uucaaacaacugucaugcaau

SEQ ID NO: 306962 - RNA, 23 nt, Human
uuccagcccucccccgccuuccc

SEQ ID NO: 306963 - RNA, 21 nt, Human
uucccgggaagaagaaaaaca

SEQ ID NO: 306964 - RNA, 19 nt, Human
uugcugcaaauccucccaa

SEQ ID NO: 306965 - RNA, 22 nt, Human
acagacagacagaugccccugc

SEQ ID NO: 306966 - RNA, 21 nt, Human
acgccaccacaccuaccaagc

SEQ ID NO: 306967 - RNA, 24 nt, Human
agacagaugccccugccugcucuc

SEQ ID NO: 306968 - RNA, 25 nt, Human
agaccugaugccagcaggccugggc

SEQ ID NO: 306969 - RNA, 24 nt, Human
aggggacccuggguccugguuggc

SEQ ID NO: 306970 - RNA, 19 nt, Human
aggggcaggguggcggcgg

SEQ ID NO: 306971 - RNA, 22 nt, Human
caagcucgcauccaagcagcag

SEQ ID NO: 306972 - RNA, 18 nt, Human
cagcagccuuagcagugg

SEQ ID NO: 306973 - RNA, 18 nt, Human
cagcccccaggaggaguc

SEQ ID NO: 306974 - RNA, 22 nt, Human
cagcccuagugaaaauagugac

SEQ ID NO: 306975 - RNA, 21 nt, Human
cagcucugggcgcaggccccu

SEQ ID NO: 306976 - RNA, 21 nt, Human
cagucaccuuccuccacccug

SEQ ID NO: 306977 - RNA, 23 nt, Human
cccacagaagugguacacagaag

SEQ ID NO: 306978 - RNA, 21 nt, Human
cccacagacagacagaugccc

SEQ ID NO: 306979 - RNA, 22 nt, Human
cccacagacagacagaugcccc

SEQ ID NO: 306980 - RNA, 23 nt, Human
cccacccccgccaggaaggagga

SEQ ID NO: 306981 - RNA, 19 nt, Human
ccccaggaggagucuuuuc

SEQ ID NO: 306982 - RNA, 24 nt, Human
ccccgccguccccaggcccgcccg

SEQ ID NO: 306983 - RNA, 21 nt, Human
ccccucagcccuagugaaaau

SEQ ID NO: 306984 - RNA, 18 nt, Human
cccugaagccagcagccu

SEQ ID NO: 306985 - RNA, 20 nt, Human
ccgcagcucaggcggggccc

SEQ ID NO: 306986 - RNA, 21 nt, Human
ccgccguccccaggcccgccc

SEQ ID NO: 306987 - RNA, 25 nt, Human
ccuggcccucggccuugacagcggc

SEQ ID NO: 306988 - RNA, 20 nt, Human
cgacuccacggcccaccccc

SEQ ID NO: 306989 - RNA, 23 nt, Human
cgagggccuugaggcugccuggg

SEQ ID NO: 306990 - RNA, 20 nt, Human
cgcacacacacacacacaca

SEQ ID NO: 306991 - RNA, 20 nt, Human
cgugcagccauucugccugg

SEQ ID NO: 306992 - RNA, 21 nt, Human
cuccacccugggagccagccc

SEQ ID NO: 306993 - RNA, 22 nt, Human
cugcuuggugcggggguugggg

SEQ ID NO: 306994 - RNA, 22 nt, Human
gagacggugcagggaguacggu

SEQ ID NO: 306995 - RNA, 23 nt, Human
gagcgacgcccgcucggggcucg

SEQ ID NO: 306996 - RNA, 21 nt, Human
gcagcgcgcgcauggccccgc

SEQ ID NO: 306997 - RNA, 18 nt, Human
gcaggcuaacccucccug

SEQ ID NO: 306998 - RNA, 19 nt, Human
gcccccagcaccggcccaa

SEQ ID NO: 306999 - RNA, 21 nt, Human
gcccccaggaggagucuuuuc

SEQ ID NO: 307000 - RNA, 19 nt, Human
gccuggcccucggccuuga

SEQ ID NO: 307001 - RNA, 24 nt, Human
gcgcgcacacacacacacacacag

SEQ ID NO: 307002 - RNA, 19 nt, Human
gcgggcgcggggcuggaug

SEQ ID NO: 307003 - RNA, 19 nt, Human
gcggggguugggggggugu

SEQ ID NO: 307004 - RNA, 31 nt, Human
gcgucgcgcgcgcacacacacacacacacag

SEQ ID NO: 307005 - RNA, 19 nt, Human
gcucggggccaggccgcuc

SEQ ID NO: 307006 - RNA, 18 nt, Human
ggaggggacccugggucc

SEQ ID NO: 307007 - RNA, 18 nt, Human
ggcauggcgggcgcgggg

SEQ ID NO: 307008 - RNA, 18 nt, Human
ggcccaaggccaagcucg

SEQ ID NO: 307009 - RNA, 26 nt, Human
ggggaggggacccuggguccugguug

SEQ ID NO: 307010 - RNA, 20 nt, Human
ggggcaggguggcggcggug

SEQ ID NO: 307011 - RNA, 20 nt, Human
gggggaggccagcucugggc

SEQ ID NO: 307012 - RNA, 19 nt, Human
guccugcuacuugcccaga

SEQ ID NO: 307013 - RNA, 22 nt, Human
guccugcuacuugcccagaccu

SEQ ID NO: 307014 - RNA, 20 nt, Human
uaacuuaggggcaggguggc

SEQ ID NO: 307015 - RNA, 23 nt, Human
uacacagaagcaggcacagccag

SEQ ID NO: 307016 - RNA, 21 nt, Human
uccacccugggagccagcccc

SEQ ID NO: 307017 - RNA, 21 nt, Human
uccacuccgacuccacggccc

SEQ ID NO: 307018 - RNA, 18 nt, Human
ucgcauccaagcagcagc

SEQ ID NO: 307019 - RNA, 20 nt, Human
ucggggcucggggccaggcc

SEQ ID NO: 307020 - RNA, 19 nt, Human
ucucagaggcuagaaaccu

SEQ ID NO: 307021 - RNA, 23 nt, Human
ucucuugcuaccuggccuggggc

SEQ ID NO: 307022 - RNA, 18 nt, Human
ugcagccauucugccugg

SEQ ID NO: 307023 - RNA, 23 nt, Human
ugcccccagcaccggcccaaggc

SEQ ID NO: 307024 - RNA, 25 nt, Human
ugcggggguugggggggugucgagg

SEQ ID NO: 307025 - RNA, 18 nt, Human
uggauggggcugcgcggc

SEQ ID NO: 307026 - RNA, 19 nt, Human
uggcagacagcugugcccc

SEQ ID NO: 307027 - RNA, 20 nt, Human
uggguccugguuggccacac

SEQ ID NO: 307028 - RNA, 21 nt, Human
uggugcggggguugggggggu

SEQ ID NO: 307029 - RNA, 18 nt, Human
ugucugcuuggugcgggg

SEQ ID NO: 307030 - RNA, 18 nt, Human
uguguccuucccaaggga

SEQ ID NO: 307031 - RNA, 26 nt, Human
aaaaacaguacaauaaaaaguaucau

SEQ ID NO: 307032 - RNA, 18 nt, Human
aaaauaaauuaaagugca

SEQ ID NO: 307033 - RNA, 20 nt, Human
aaacuuacagaaacccagua

SEQ ID NO: 307034 - RNA, 22 nt, Human
aaagagacuuucuagugaccau

SEQ ID NO: 307035 - RNA, 24 nt, Human
aaagugcugggauuacaggcguga

SEQ ID NO: 307036 - RNA, 19 nt, Human
aaaugaacauaauuguugg

SEQ ID NO: 307037 - RNA, 25 nt, Human
aaguaaagauagagaugaagccaug

SEQ ID NO: 307038 - RNA, 19 nt, Human
aagugcugggauuacaggc

SEQ ID NO: 307039 - RNA, 19 nt, Human
aagugcugggauuacaggc

SEQ ID NO: 307040 - RNA, 26 nt, Human
aagugcugggauuacaggcgugagcc

SEQ ID NO: 307041 - RNA, 19 nt, Human
aaugucaccuuacucaaca

SEQ ID NO: 307042 - RNA, 18 nt, Human
accaaaugcuuuaugaau

SEQ ID NO: 307043 - RNA, 19 nt, Human
acugaucuuuggugguuuu

SEQ ID NO: 307044 - RNA, 21 nt, Human
acuugaguacuauauuuuuua

SEQ ID NO: 307045 - RNA, 22 nt, Human
agaaaacaguguugcuaacuca

SEQ ID NO: 307046 - RNA, 18 nt, Human
agaaaggaggaauucugc

SEQ ID NO: 307047 - RNA, 20 nt, Human
aggccauggggccagagaug

SEQ ID NO: 307048 - RNA, 22 nt, Human
agggaggggccuuggaaauagc

SEQ ID NO: 307049 - RNA, 24 nt, Human
agggaggggccuuggaaauagcuc

SEQ ID NO: 307050 - RNA, 18 nt, Human
agugcugggauuacaggc

SEQ ID NO: 307051 - RNA, 22 nt, Human
aguuagucccacagacaucaga

SEQ ID NO: 307052 - RNA, 18 nt, Human
auaaagaacuuuguguag

SEQ ID NO: 307053 - RNA, 19 nt, Human
auaauagggaagagaugag

SEQ ID NO: 307054 - RNA, 23 nt, Human
auagcuccccccaccccacuccc

SEQ ID NO: 307055 - RNA, 18 nt, Human
aucaaggccauggggcca

SEQ ID NO: 307056 - RNA, 20 nt, Human
augaacuuuuaauaccaaaa

SEQ ID NO: 307057 - RNA, 21 nt, Human
augcaaacuuuaguauguagu

SEQ ID NO: 307058 - RNA, 19 nt, Human
auuagacugagcuccauuu

SEQ ID NO: 307059 - RNA, 24 nt, Human
caaagugcugggauuacaggcgug

SEQ ID NO: 307060 - RNA, 19 nt, Human
caagaauacuugaguacua

SEQ ID NO: 307061 - RNA, 22 nt, Human
caagugauucgccuguuucggc

SEQ ID NO: 307062 - RNA, 19 nt, Human
cacacagauucuaucauag

SEQ ID NO: 307063 - RNA, 22 nt, Human
cacacauacugaaacacacaua

SEQ ID NO: 307064 - RNA, 24 nt, Human
caccccacuccccacgugucccau

SEQ ID NO: 307065 - RNA, 26 nt, Human
cacuccccacgugucccauccaguuu

SEQ ID NO: 307066 - RNA, 23 nt, Human
cagcuuauucaaauuagagccaa

SEQ ID NO: 307067 - RNA, 24 nt, Human
cagcuuauucaaauuagagccaaa

SEQ ID NO: 307068 - RNA, 23 nt, Human
cauggucgauacacauggauacc

SEQ ID NO: 307069 - RNA, 25 nt, Human
cauguaacaacaugguacauauaca

SEQ ID NO: 307070 - RNA, 20 nt, Human
ccaaagugcugggauuacag

SEQ ID NO: 307071 - RNA, 22 nt, Human
ccaaagugcugggauuacaggc

SEQ ID NO: 307072 - RNA, 22 nt, Human
ccaaagugcugggauuacaggc

SEQ ID NO: 307073 - RNA, 24 nt, Human
ccaaagugcugggauuacaggcgu

SEQ ID NO: 307074 - RNA, 19 nt, Human
ccagaguggaaaggaaugc

SEQ ID NO: 307075 - RNA, 24 nt, Human
ccauguuggucuugaacuccuggg

SEQ ID NO: 307076 - RNA, 19 nt, Human
cccacgugucccauccagu

SEQ ID NO: 307077 - RNA, 18 nt, Human
ccccacgugucccaucca

SEQ ID NO: 307078 - RNA, 19 nt, Human
ccccccaccccacucccca

SEQ ID NO: 307079 - RNA, 20 nt, Human
ccccccaccccacuccccac

SEQ ID NO: 307080 - RNA, 21 nt, Human
ccugggcucaagugauucgcc

SEQ ID NO: 307081 - RNA, 22 nt, Human
ccugggcucaagugauucgccu

SEQ ID NO: 307082 - RNA, 23 nt, Human
ccugggcucaagugauucgccug

SEQ ID NO: 307083 - RNA, 22 nt, Human
ccuguuucggccucccaaagug

SEQ ID NO: 307084 - RNA, 22 nt, Human
cgccacauugcccauguugguc

SEQ ID NO: 307085 - RNA, 21 nt, Human
cucaaaaugucaccuuacuca

SEQ ID NO: 307086 - RNA, 24 nt, Human
cucaaaaugucaccuuacucaaca

SEQ ID NO: 307087 - RNA, 19 nt, Human
cucaagugauucgccuguu

SEQ ID NO: 307088 - RNA, 22 nt, Human
cucaauauuuacaccuagauuu

SEQ ID NO: 307089 - RNA, 20 nt, Human
cuccugggcucaagugauuc

SEQ ID NO: 307090 - RNA, 23 nt, Human
cuguuucggccucccaaagugcu

SEQ ID NO: 307091 - RNA, 21 nt, Human
gaaaaacaguacaauaaaaag

SEQ ID NO: 307092 - RNA, 18 nt, Human
gaaacagggaggggccuu

SEQ ID NO: 307093 - RNA, 19 nt, Human
gaaaggaggaauucugcaa

SEQ ID NO: 307094 - RNA, 19 nt, Human
gacaacuuagggcuccuuc

SEQ ID NO: 307095 - RNA, 19 nt, Human
gacaggauucucuugguuc

SEQ ID NO: 307096 - RNA, 21 nt, Human
gacuagcauccuaugguggaa

SEQ ID NO: 307097 - RNA, 22 nt, Human
gagaugccauuuuauccuauaa

SEQ ID NO: 307098 - RNA, 20 nt, Human
gauaauagggaagagaugag

SEQ ID NO: 307099 - RNA, 24 nt, Human
gauuacaggcgugagccgucauac

SEQ ID NO: 307100 - RNA, 20 nt, Human
gcagcagcuggacgagggca

SEQ ID NO: 307101 - RNA, 25 nt, Human
gccagaguggaaaggaaugccccag

SEQ ID NO: 307102 - RNA, 22 nt, Human
gcuccccccaccccacucccca

SEQ ID NO: 307103 - RNA, 19 nt, Human
gcuggacgagggcacagga

SEQ ID NO: 307104 - RNA, 24 nt, Human
ggaaacagggaggggccuuggaaa

SEQ ID NO: 307105 - RNA, 24 nt, Human
gggaguucuccaugacuaaagaag

SEQ ID NO: 307106 - RNA, 21 nt, Human
gggcagcagcuggacgagggc

SEQ ID NO: 307107 - RNA, 19 nt, Human
gggcucaagugauucgccu

SEQ ID NO: 307108 - RNA, 22 nt, Human
guaccgcucaauacacaucaug

SEQ ID NO: 307109 - RNA, 24 nt, Human
uaaaaugaacauaauuguuggaua

SEQ ID NO: 307110 - RNA, 18 nt, Human
uaagugauacaguuaguc

SEQ ID NO: 307111 - RNA, 18 nt, Human
uacaauaaaaaguaucau

SEQ ID NO: 307112 - RNA, 18 nt, Human
uacaccuagauuucuuau

SEQ ID NO: 307113 - RNA, 21 nt, Human
uacagucaauaucccuggaau

SEQ ID NO: 307114 - RNA, 21 nt, Human
uagcuccccccaccccacucc

SEQ ID NO: 307115 - RNA, 21 nt, Human
uagggaagagaugaggggggg

SEQ ID NO: 307116 - RNA, 21 nt, Human
uaguugaaaaaaaaggcuccu

SEQ ID NO: 307117 - RNA, 25 nt, Human
uauaucaaguuuuuauuaagaagua

SEQ ID NO: 307118 - RNA, 23 nt, Human
uaugagaaaaagaaaaaaaaauc

SEQ ID NO: 307119 - RNA, 24 nt, Human
ucagaagcccuuugacaguuuucu

SEQ ID NO: 307120 - RNA, 22 nt, Human
ucaucuuaaccauucacacaga

SEQ ID NO: 307121 - RNA, 24 nt, Human
ucccaaagugcugggauuacaggc

SEQ ID NO: 307122 - RNA, 19 nt, Human
uccugggcucaagugauuc

SEQ ID NO: 307123 - RNA, 24 nt, Human
uccugggcucaagugauucgccug

SEQ ID NO: 307124 - RNA, 22 nt, Human
ucuugaacuccugggcucaagu

SEQ ID NO: 307125 - RNA, 23 nt, Human
ucuugaacuccugggcucaagug

SEQ ID NO: 307126 - RNA, 20 nt, Human
ucuuggaaaaaaauaacaau

SEQ ID NO: 307127 - RNA, 20 nt, Human
ugaaaaaaaaggcuccuuuc

SEQ ID NO: 307128 - RNA, 23 nt, Human
ugauacaguuagucccacagaca

SEQ ID NO: 307129 - RNA, 24 nt, Human
ugccagaguggaaaggaaugcccc

SEQ ID NO: 307130 - RNA, 24 nt, Human
ugcccauguuggucuugaacuccu

SEQ ID NO: 307131 - RNA, 23 nt, Human
ugccccauuuuccuucacacucu

SEQ ID NO: 307132 - RNA, 20 nt, Human
ugcugggauuacaggcguga

SEQ ID NO: 307133 - RNA, 22 nt, Human
uggaaauagcuccccccacccc

SEQ ID NO: 307134 - RNA, 19 nt, Human
uggagggcagcagcuggac

SEQ ID NO: 307135 - RNA, 19 nt, Human
uggcguccggcgcgcgggu

SEQ ID NO: 307136 - RNA, 18 nt, Human
ugggauuacaggcgugag

SEQ ID NO: 307137 - RNA, 19 nt, Human
ugggauuacaggcgugagc

SEQ ID NO: 307138 - RNA, 20 nt, Human
ugggauuacaggcgugagcc

SEQ ID NO: 307139 - RNA, 21 nt, Human
ugggauuacaggcgugagccg

SEQ ID NO: 307140 - RNA, 22 nt, Human
ugggauuacaggcgugagccgu

SEQ ID NO: 307141 - RNA, 23 nt, Human
ugggauuacaggcgugagccguc

SEQ ID NO: 307142 - RNA, 23 nt, Human
ugggauuacaggcgugagccguc

SEQ ID NO: 307143 - RNA, 24 nt, Human
ugggauuacaggcgugagccguca

SEQ ID NO: 307144 - RNA, 24 nt, Human
ugggcucaagugauucgccuguuu

SEQ ID NO: 307145 - RNA, 24 nt, Human
ugucuaauguaugaacuuuuaaua

SEQ ID NO: 307146 - RNA, 22 nt, Human
uuaaccauucacacagauucua

SEQ ID NO: 307147 - RNA, 27 nt, Human
uuagaaaaguuuaccccaggaagcuag

SEQ ID NO: 307148 - RNA, 20 nt, Human
uuagucccacagacaucaga

SEQ ID NO: 307149 - RNA, 18 nt, Human
uucaggacagccacuucc

SEQ ID NO: 307150 - RNA, 21 nt, Human
uucauugucaacugagaagac

SEQ ID NO: 307151 - RNA, 26 nt, Human
uucuccaagugaggguuauucaacag

SEQ ID NO: 307152 - RNA, 21 nt, Human
uugagaucaaggccauggggc

SEQ ID NO: 307153 - RNA, 24 nt, Human
uuguagagauggaguuucgccaca

SEQ ID NO: 307154 - RNA, 20 nt, Human
uuucggccucccaaagugcu

SEQ ID NO: 307155 - RNA, 22 nt, Human
uuuuuuguagagauggaguuuc

SEQ ID NO: 307156 - RNA, 23 nt, Human
uuuuuuguagagauggaguuucg

SEQ ID NO: 307157 - RNA, 24 nt, Human
uuuuuuuuuuuugagaucaaggcc

SEQ ID NO: 307158 - RNA, 18 nt, Human
uuuuuuuuuuuuuuuuug

SEQ ID NO: 307159 - RNA, 19 nt, Human
aacuggaagguggggguuu

SEQ ID NO: 307160 - RNA, 22 nt, Human
aagaauaaugucagaacccacc

SEQ ID NO: 307161 - RNA, 19 nt, Human
acgggaggaaaaggcgaug

SEQ ID NO: 307162 - RNA, 19 nt, Human
agaggaagagggagcagag

SEQ ID NO: 307163 - RNA, 21 nt, Human
agaggggagaauaggaggagg

SEQ ID NO: 307164 - RNA, 19 nt, Human
agaggggagaggggagaau

SEQ ID NO: 307165 - RNA, 21 nt, Human
agccugggcuccugccuuuug

SEQ ID NO: 307166 - RNA, 18 nt, Human
aggaguuuuauugauagc

SEQ ID NO: 307167 - RNA, 19 nt, Human
augaggugggggggcccgg

SEQ ID NO: 307168 - RNA, 25 nt, Human
caagccccaggggaccagccgaaag

SEQ ID NO: 307169 - RNA, 20 nt, Human
cagaacccaccacauauuag

SEQ ID NO: 307170 - RNA, 18 nt, Human
cagccgaaaggggaggug

SEQ ID NO: 307171 - RNA, 23 nt, Human
cagccucuugcagaagauccuuc

SEQ ID NO: 307172 - RNA, 19 nt, Human
caggagcucucucucccuc

SEQ ID NO: 307173 - RNA, 24 nt, Human
caggagcucucucucccucuugcu

SEQ ID NO: 307174 - RNA, 19 nt, Human
ccacacagccugggcuccu

SEQ ID NO: 307175 - RNA, 24 nt, Human
ccagccuagccagcagagagcaaa

SEQ ID NO: 307176 - RNA, 18 nt, Human
ccaggugcccacucucag

SEQ ID NO: 307177 - RNA, 18 nt, Human
ccugaguucauuuccuug

SEQ ID NO: 307178 - RNA, 18 nt, Human
cucagcuagaggaagagg

SEQ ID NO: 307179 - RNA, 21 nt, Human
cuguuuccacacagccugggc

SEQ ID NO: 307180 - RNA, 27 nt, Human
gaacuggaagguggggguugagccucu

SEQ ID NO: 307181 - RNA, 24 nt, Human
gaagauccuucauagacuuugcuc

SEQ ID NO: 307182 - RNA, 19 nt, Human
gaaugaggugggggggccc

SEQ ID NO: 307183 - RNA, 20 nt, Human
gagaggggagaauaggagga

SEQ ID NO: 307184 - RNA, 18 nt, Human
gagcggaugagaggacag

SEQ ID NO: 307185 - RNA, 19 nt, Human
gagcggaugagaggacagg

SEQ ID NO: 307186 - RNA, 25 nt, Human
gaugagaggacaggguggggaagga

SEQ ID NO: 307187 - RNA, 24 nt, Human
ggagaauaggaggaggauguggag

SEQ ID NO: 307188 - RNA, 18 nt, Human
ggagcugggaguggaagg

SEQ ID NO: 307189 - RNA, 22 nt, Human
ggaggugagggaacuggaaggu

SEQ ID NO: 307190 - RNA, 21 nt, Human
gggaccagccgaaaggggagg

SEQ ID NO: 307191 - RNA, 18 nt, Human
gggagaggggagaauagg

SEQ ID NO: 307192 - RNA, 27 nt, Human
gugagggaacuggaagguggggguuug

SEQ ID NO: 307193 - RNA, 24 nt, Human
uaccccaggugcccacucucagcc

SEQ ID NO: 307194 - RNA, 20 nt, Human
uagaggaagagggagcagag

SEQ ID NO: 307195 - RNA, 21 nt, Human
uagccaccauggaaacccaca

SEQ ID NO: 307196 - RNA, 21 nt, Human
ucaaagaucucugaauccuga

SEQ ID NO: 307197 - RNA, 20 nt, Human
ucaggagcucucucucccuc

SEQ ID NO: 307198 - RNA, 22 nt, Human
ucccucuugcugcaagccccag

SEQ ID NO: 307199 - RNA, 21 nt, Human
ucucugaauccugaguucauu

SEQ ID NO: 307200 - RNA, 21 nt, Human
ugaauccugaguucauuuccu

SEQ ID NO: 307201 - RNA, 18 nt, Human
ugaggugggggggcccgg

SEQ ID NO: 307202 - RNA, 21 nt, Human
uggaaggagaaacgggaggaa

SEQ ID NO: 307203 - RNA, 23 nt, Human
uggaagguggggguuugaagagg

SEQ ID NO: 307204 - RNA, 24 nt, Human
ugggaguggaaggagaaacgggag

SEQ ID NO: 307205 - RNA, 21 nt, Human
uggggagggagcggaugagag

SEQ ID NO: 307206 - RNA, 24 nt, Human
ugucugugccugcuggggagggag

SEQ ID NO: 307207 - RNA, 21 nt, Human
ugugccugcuggggagggagc

SEQ ID NO: 307208 - RNA, 23 nt, Human
ugugccugcuggggagggagccu

SEQ ID NO: 307209 - RNA, 18 nt, Human
aagcaaacaagauucuuc

SEQ ID NO: 307210 - RNA, 24 nt, Human
aagcuuaggcuucuugaaguucuu

SEQ ID NO: 307211 - RNA, 23 nt, Human
cucauauuaagacaacuuuugga

SEQ ID NO: 307212 - RNA, 26 nt, Human
cuucuugaaguucuuauaagcaaaca

SEQ ID NO: 307213 - RNA, 23 nt, Human
gaguacaagaaaauuaaagccaa

SEQ ID NO: 307214 - RNA, 18 nt, Human
uaaagccaagcuuaggcu

SEQ ID NO: 307215 - RNA, 22 nt, Human
uacaagaaaauuaaagccaagc

SEQ ID NO: 307216 - RNA, 18 nt, Human
ucuuauaagcaaacaaga

SEQ ID NO: 307217 - RNA, 24 nt, Human
ugcccagaaagaggaucguguucc

SEQ ID NO: 307218 - RNA, 19 nt, Human
uguuccagugcuugaggag

SEQ ID NO: 307219 - RNA, 19 nt, Human
uuccuugaagcuaucaucg

SEQ ID NO: 307220 - RNA, 19 nt, Human
uuugaacuuauguuuagua

SEQ ID NO: 307221 - RNA, 22 nt, Human
uuugaacuuauguuuaguaaca

SEQ ID NO: 307222 - RNA, 21 nt, Human
uuuuuuuuuuuuuuuuuucag

SEQ ID NO: 307223 - RNA, 21 nt, Human
aaaugaacaugcuucugagug

SEQ ID NO: 307224 - RNA, 23 nt, Human
aagaaacaggguugcccuuguac

SEQ ID NO: 307225 - RNA, 23 nt, Human
aaucccacacugugauccugcug

SEQ ID NO: 307226 - RNA, 20 nt, Human
accacauuuuccuuauuccu

SEQ ID NO: 307227 - RNA, 18 nt, Human
acgaggcccuaagcccag

SEQ ID NO: 307228 - RNA, 18 nt, Human
agcgcagaaacacccaga

SEQ ID NO: 307229 - RNA, 21 nt, Human
aggaguuuggggcucugucag

SEQ ID NO: 307230 - RNA, 23 nt, Human
auaaaccacauuuuccuuauucc

SEQ ID NO: 307231 - RNA, 21 nt, Human
aucuuagaugcauauguugcu

SEQ ID NO: 307232 - RNA, 18 nt, Human
cacccuggccaggucccu

SEQ ID NO: 307233 - RNA, 21 nt, Human
cacuacacucccaacuuuuac

SEQ ID NO: 307234 - RNA, 26 nt, Human
cacuacacucccaacuuuuacacucc

SEQ ID NO: 307235 - RNA, 24 nt, Human
cagacaaugcuccacccuggccag

SEQ ID NO: 307236 - RNA, 23 nt, Human
ccagcacgcuauuaauaaccaaa

SEQ ID NO: 307237 - RNA, 21 nt, Human
cccagggggaacaagaggagg

SEQ ID NO: 307238 - RNA, 20 nt, Human
ccccagaugcuacacuacac

SEQ ID NO: 307239 - RNA, 20 nt, Human
cccuggucuacaaaggggcc

SEQ ID NO: 307240 - RNA, 21 nt, Human
cucaaaaccaguggcucugcc

SEQ ID NO: 307241 - RNA, 21 nt, Human
cuggccaggucccucucucaa

SEQ ID NO: 307242 - RNA, 19 nt, Human
cugugauccugcugucucc

SEQ ID NO: 307243 - RNA, 19 nt, Human
cuuggucagaaaauguuac

SEQ ID NO: 307244 - RNA, 24 nt, Human
gagcaacaggccauuagcuuccag

SEQ ID NO: 307245 - RNA, 25 nt, Human
gcagaaacacccagacaaugcucca

SEQ ID NO: 307246 - RNA, 22 nt, Human
gccacugacacucccuaauccc

SEQ ID NO: 307247 - RNA, 21 nt, Human
gucacauaacuccccucuaaa

SEQ ID NO: 307248 - RNA, 19 nt, Human
uaagaauaaaugagaagca

SEQ ID NO: 307249 - RNA, 19 nt, Human
uauuucaaugugaacccau

SEQ ID NO: 307250 - RNA, 25 nt, Human
ucaaaaccaguggcucugccuucuc

SEQ ID NO: 307251 - RNA, 22 nt, Human
uccagcacgcuauuaauaacca

SEQ ID NO: 307252 - RNA, 21 nt, Human
ucccaacuuuuacacucccaa

SEQ ID NO: 307253 - RNA, 21 nt, Human
uccccuuaaucccacagacuc

SEQ ID NO: 307254 - RNA, 19 nt, Human
uccuuauuccugaauaguc

SEQ ID NO: 307255 - RNA, 23 nt, Human
ucucuuggucagaaaauguuacu

SEQ ID NO: 307256 - RNA, 24 nt, Human
ucuuaagugauaaaccacauuuuc

SEQ ID NO: 307257 - RNA, 20 nt, Human
ugauaaaccacauuuuccuu

SEQ ID NO: 307258 - RNA, 26 nt, Human
ugcaggcaccaaagaaacaggguugc

SEQ ID NO: 307259 - RNA, 26 nt, Human
ugcaggcaccaaagaaacuggagacc

SEQ ID NO: 307260 - RNA, 23 nt, Human
uggcaucuacauaaaugaacaug

SEQ ID NO: 307261 - RNA, 21 nt, Human
ugggucaagcgcagaaacacc

SEQ ID NO: 307262 - RNA, 25 nt, Human
uuaacaaaacaugucucuuggucag

SEQ ID NO: 307263 - RNA, 24 nt, Human
uuacuuuaacuaccaguagcuuua

SEQ ID NO: 307264 - RNA, 18 nt, Human
aaaaaacuuaaaaagugg

SEQ ID NO: 307265 - RNA, 19 nt, Human
aaaaaacuuaaaaaguggu

SEQ ID NO: 307266 - RNA, 19 nt, Human
aaaaaaugucccccucccc

SEQ ID NO: 307267 - RNA, 23 nt, Human
aaaaacugguaaauaauuaacaa

SEQ ID NO: 307268 - RNA, 27 nt, Human
aaaaagccaggaaguugccguuaugaa

SEQ ID NO: 307269 - RNA, 18 nt, Human
aaaaauuggaagaagggu

SEQ ID NO: 307270 - RNA, 24 nt, Human
aaaauacaucaucuacaaagagga

SEQ ID NO: 307271 - RNA, 18 nt, Human
aaacauuucugccaauuc

SEQ ID NO: 307272 - RNA, 24 nt, Human
aaagcaugugcagguaaacugagg

SEQ ID NO: 307273 - RNA, 18 nt, Human
aacagggacuaauuaaac

SEQ ID NO: 307274 - RNA, 18 nt, Human
aacaguguggaauuaaac

SEQ ID NO: 307275 - RNA, 21 nt, Human
aagaagcucaaagcauugugg

SEQ ID NO: 307276 - RNA, 26 nt, Human
aagaagcucaaagcauuguggguggu

SEQ ID NO: 307277 - RNA, 22 nt, Human
aagaaggggcagaaauaacaga

SEQ ID NO: 307278 - RNA, 21 nt, Human
aagugcaaauuugauacgcuc

SEQ ID NO: 307279 - RNA, 23 nt, Human
aaguugccuugugguuggaaggu

SEQ ID NO: 307280 - RNA, 21 nt, Human
aauaagaagauaauaaaaauu

SEQ ID NO: 307281 - RNA, 21 nt, Human
aauacugggaacauucugccu

SEQ ID NO: 307282 - RNA, 24 nt, Human
acguuagacuauaacucaccuaac

SEQ ID NO: 307283 - RNA, 22 nt, Human
acucguuugugucccagccaaa

SEQ ID NO: 307284 - RNA, 20 nt, Human
agaaaugcuuuucuguaaca

SEQ ID NO: 307285 - RNA, 22 nt, Human
agaaggggcagaaauaacagag

SEQ ID NO: 307286 - RNA, 18 nt, Human
agaaucacugaaaaauag

SEQ ID NO: 307287 - RNA, 20 nt, Human
agaguaaacgucuauaaacc

SEQ ID NO: 307288 - RNA, 22 nt, Human
aucaggcuuaaguuaaaaacug

SEQ ID NO: 307289 - RNA, 19 nt, Human
augaauuuuaaaugacaga

SEQ ID NO: 307290 - RNA, 21 nt, Human
caaacaaaaagcauggagaaa

SEQ ID NO: 307291 - RNA, 18 nt, Human
caacacagugaccacaga

SEQ ID NO: 307292 - RNA, 21 nt, Human
caagaccgagaaucuacaaaa

SEQ ID NO: 307293 - RNA, 21 nt, Human
caauacucaccagaugccuaa

SEQ ID NO: 307294 - RNA, 19 nt, Human
caaucucuuuuuggaagcu

SEQ ID NO: 307295 - RNA, 19 nt, Human
cacaggaaaaaagcacauc

SEQ ID NO: 307296 - RNA, 21 nt, Human
cacaggaaaaaagcacaucuc

SEQ ID NO: 307297 - RNA, 18 nt, Human
cacugaaaaauagaacag

SEQ ID NO: 307298 - RNA, 21 nt, Human
cacuuguaaaaagccaggaag

SEQ ID NO: 307299 - RNA, 23 nt, Human
cagcaggacaguccucacuuccc

SEQ ID NO: 307300 - RNA, 24 nt, Human
cagcaggacaguccucacuucccc

SEQ ID NO: 307301 - RNA, 19 nt, Human
caggaaaaauaccugugga

SEQ ID NO: 307302 - RNA, 23 nt, Human
ccagaaagacuggucuugugaca

SEQ ID NO: 307303 - RNA, 18 nt, Human
cccaugagaauaucaauu

SEQ ID NO: 307304 - RNA, 21 nt, Human
ccccaaaaaaugucccccucc

SEQ ID NO: 307305 - RNA, 21 nt, Human
cccccaaaaaaugucccccuc

SEQ ID NO: 307306 - RNA, 20 nt, Human
ccccccaaaaaauguccccc

SEQ ID NO: 307307 - RNA, 23 nt, Human
ccccccaaaaaaugucccccucc

SEQ ID NO: 307308 - RNA, 28 nt, Human
ccccccaaaaaaugucccccuccccaaa

SEQ ID NO: 307309 - RNA, 22 nt, Human
ccuucuggauccagagccaagg

SEQ ID NO: 307310 - RNA, 18 nt, Human
ccuugaucagauaagcug

SEQ ID NO: 307311 - RNA, 20 nt, Human
cuaaacucucagcaaagccc

SEQ ID NO: 307312 - RNA, 22 nt, Human
cuacuggauauucucacuaggc

SEQ ID NO: 307313 - RNA, 18 nt, Human
cucaagggagaaaugauc

SEQ ID NO: 307314 - RNA, 19 nt, Human
cucaagggagaaaugaucc

SEQ ID NO: 307315 - RNA, 22 nt, Human
cucucagcaaagcccaugagaa

SEQ ID NO: 307316 - RNA, 20 nt, Human
cugccccccaaaaaaugucc

SEQ ID NO: 307317 - RNA, 21 nt, Human
cugccccccaaaaaauguccc

SEQ ID NO: 307318 - RNA, 18 nt, Human
cugggcaguaacaagggc

SEQ ID NO: 307319 - RNA, 18 nt, Human
cuucaagaccgagaaucu

SEQ ID NO: 307320 - RNA, 22 nt, Human
gaaaaaaacacaaggagaagua

SEQ ID NO: 307321 - RNA, 20 nt, Human
gaacacagucccugcccccc

SEQ ID NO: 307322 - RNA, 18 nt, Human
gaagcucuccacauuccu

SEQ ID NO: 307323 - RNA, 18 nt, Human
gaaggcccugagagagcu

SEQ ID NO: 307324 - RNA, 22 nt, Human
gaagggagucauucaacuaaau

SEQ ID NO: 307325 - RNA, 19 nt, Human
gaaguugccuugugguugg

SEQ ID NO: 307326 - RNA, 22 nt, Human
gaauaaauuuagaguuggccua

SEQ ID NO: 307327 - RNA, 20 nt, Human
gagaaggcuaccuaccuccu

SEQ ID NO: 307328 - RNA, 20 nt, Human
gaguguguuuccuuucucuc

SEQ ID NO: 307329 - RNA, 19 nt, Human
gaguuggaaaaaaacacaa

SEQ ID NO: 307330 - RNA, 20 nt, Human
gccaguacuucucauagaac

SEQ ID NO: 307331 - RNA, 28 nt, Human
ggagaaguagguuuuugggcuguguuaa

SEQ ID NO: 307332 - RNA, 21 nt, Human
ggcaguaacaagggcaagucu

SEQ ID NO: 307333 - RNA, 21 nt, Human
ggccuucuggauccagagcca

SEQ ID NO: 307334 - RNA, 23 nt, Human
gggaaauauuugcuggguuaccc

SEQ ID NO: 307335 - RNA, 18 nt, Human
gggaaggcccugagagac

SEQ ID NO: 307336 - RNA, 18 nt, Human
guauagagcucaggaaaa

SEQ ID NO: 307337 - RNA, 21 nt, Human
gucuccuugugacucaaggga

SEQ ID NO: 307338 - RNA, 24 nt, Human
guugaaaaagggauucagagucca

SEQ ID NO: 307339 - RNA, 24 nt, Human
guuuuucguuuuuaauucuguugg

SEQ ID NO: 307340 - RNA, 18 nt, Human
uaaaaaguggugaaagaa

SEQ ID NO: 307341 - RNA, 21 nt, Human
uaaaacaugccucccagaaag

SEQ ID NO: 307342 - RNA, 18 nt, Human
uaaacuagggaaggcaug

SEQ ID NO: 307343 - RNA, 21 nt, Human
uaaaguagagauugcaaaggc

SEQ ID NO: 307344 - RNA, 20 nt, Human
uaaaucaauacucuuaagau

SEQ ID NO: 307345 - RNA, 23 nt, Human
uaacaaccuuaccaaauguauca

SEQ ID NO: 307346 - RNA, 22 nt, Human
uaacuaaacucucagcaaagcc

SEQ ID NO: 307347 - RNA, 23 nt, Human
uaacuaaacucucagcaaagccc

SEQ ID NO: 307348 - RNA, 19 nt, Human
uaacucacucacguuagac

SEQ ID NO: 307349 - RNA, 21 nt, Human
uaagaagauaauaaaaauugg

SEQ ID NO: 307350 - RNA, 24 nt, Human
uacaaaauuuccuuucccaaauuu

SEQ ID NO: 307351 - RNA, 25 nt, Human
uacaaaauuuccuuucccaaauuug

SEQ ID NO: 307352 - RNA, 20 nt, Human
uacaguggugcucaaauugg

SEQ ID NO: 307353 - RNA, 22 nt, Human
uacaguggugcucaaauuggcu

SEQ ID NO: 307354 - RNA, 18 nt, Human
uacauuugauuuccucau

SEQ ID NO: 307355 - RNA, 21 nt, Human
uaccuccuuuuagggacagcc

SEQ ID NO: 307356 - RNA, 21 nt, Human
uaccuguggaaaaaaaacuua

SEQ ID NO: 307357 - RNA, 24 nt, Human
uacuuauauuuucuuccaaaucca

SEQ ID NO: 307358 - RNA, 21 nt, Human
uagaacaguggucauacaaaa

SEQ ID NO: 307359 - RNA, 21 nt, Human
uagauugucacugcugggaaa

SEQ ID NO: 307360 - RNA, 24 nt, Human
uagcugcaaaauauguaugagaca

SEQ ID NO: 307361 - RNA, 19 nt, Human
uaggauaaaacaugccucc

SEQ ID NO: 307362 - RNA, 24 nt, Human
uagggugagacacaccugccccuu

SEQ ID NO: 307363 - RNA, 19 nt, Human
uauaaaccaacuucuugca

SEQ ID NO: 307364 - RNA, 22 nt, Human
uauaguguauguugaaaucaac

SEQ ID NO: 307365 - RNA, 24 nt, Human
uaucugguuagagcucagccugca

SEQ ID NO: 307366 - RNA, 22 nt, Human
uaugagacauuuuucagucugu

SEQ ID NO: 307367 - RNA, 20 nt, Human
uauuuauuuagauaaagggu

SEQ ID NO: 307368 - RNA, 21 nt, Human
ucaaacacuuuugaacucucu

SEQ ID NO: 307369 - RNA, 23 nt, Human
ucaacaguucuauacucaauagu

SEQ ID NO: 307370 - RNA, 21 nt, Human
ucaagaauccguggacauguu

SEQ ID NO: 307371 - RNA, 23 nt, Human
ucaagggagaaaugauccuuucu

SEQ ID NO: 307372 - RNA, 20 nt, Human
ucaguuugaaaagaaauggg

SEQ ID NO: 307373 - RNA, 18 nt, Human
ucaguuuugauuggagca

SEQ ID NO: 307374 - RNA, 19 nt, Human
uccaaaaagcuuacggcuc

SEQ ID NO: 307375 - RNA, 23 nt, Human
uccacuuguaaaaagccaggaag

SEQ ID NO: 307376 - RNA, 19 nt, Human
uccaugccacaugcuagag

SEQ ID NO: 307377 - RNA, 24 nt, Human
ucccuaauucucucauuuuuuuuu

SEQ ID NO: 307378 - RNA, 25 nt, Human
ucccuucuauaaaagaagcucaaag

SEQ ID NO: 307379 - RNA, 24 nt, Human
ucucugaucucccaauguaguucu

SEQ ID NO: 307380 - RNA, 18 nt, Human
ucugguuagagcucagcc

SEQ ID NO: 307381 - RNA, 20 nt, Human
ucuuuuccaguuguaaaugu

SEQ ID NO: 307382 - RNA, 18 nt, Human
ugaaaaagggauucagag

SEQ ID NO: 307383 - RNA, 26 nt, Human
ugaaaaauagaacaguggucauacaa

SEQ ID NO: 307384 - RNA, 20 nt, Human
ugaaagaaagcaugugcagg

SEQ ID NO: 307385 - RNA, 23 nt, Human
ugaaagaaagcaugugcagguaa

SEQ ID NO: 307386 - RNA, 21 nt, Human
ugaaagcaaaauauggaaugc

SEQ ID NO: 307387 - RNA, 24 nt, Human
ugaaauaaaauccacuuguaaaaa

SEQ ID NO: 307388 - RNA, 21 nt, Human
ugaacacagucccugcccccc

SEQ ID NO: 307389 - RNA, 18 nt, Human
ugaagauguuuauagcug

SEQ ID NO: 307390 - RNA, 22 nt, Human
ugaauaaauuuagaguuggccu

SEQ ID NO: 307391 - RNA, 19 nt, Human
ugaccagaccuuuucauga

SEQ ID NO: 307392 - RNA, 19 nt, Human
ugaccagaccuuuucauga

SEQ ID NO: 307393 - RNA, 21 nt, Human
ugaccagaccuuuucaugauc

SEQ ID NO: 307394 - RNA, 22 nt, Human
ugagagcaaucucuuuuuggaa

SEQ ID NO: 307395 - RNA, 23 nt, Human
ugagagcaaucucuuuuuggaag

SEQ ID NO: 307396 - RNA, 19 nt, Human
ugauccuuucuuucuaagu

SEQ ID NO: 307397 - RNA, 22 nt, Human
ugcaggcauuucaauguauagu

SEQ ID NO: 307398 - RNA, 19 nt, Human
ugcaucaucuucuccaaaa

SEQ ID NO: 307399 - RNA, 21 nt, Human
uggaaaaaaacacaaggagaa

SEQ ID NO: 307400 - RNA, 22 nt, Human
uggaagaaggguaaagaagggg

SEQ ID NO: 307401 - RNA, 22 nt, Human
uggaauggaucaguugaacuaa

SEQ ID NO: 307402 - RNA, 21 nt, Human
uggaauuaaacuguagcugac

SEQ ID NO: 307403 - RNA, 21 nt, Human
uggaucaguugaacuaauuaa

SEQ ID NO: 307404 - RNA, 20 nt, Human
uggcaaguuacugaagaugu

SEQ ID NO: 307405 - RNA, 21 nt, Human
ugguaaauaauuaacaagugc

SEQ ID NO: 307406 - RNA, 18 nt, Human
uggucaaaacaaccgugg

SEQ ID NO: 307407 - RNA, 22 nt, Human
uggugcccaagcaaaauacauc

SEQ ID NO: 307408 - RNA, 24 nt, Human
uguauauauuuaucauguacaacu

SEQ ID NO: 307409 - RNA, 22 nt, Human
ugugaagggcgaaauagaauga

SEQ ID NO: 307410 - RNA, 19 nt, Human
ugugacucaagggagaaau

SEQ ID NO: 307411 - RNA, 23 nt, Human
ugugacucaagggagaaaugauc

SEQ ID NO: 307412 - RNA, 20 nt, Human
uguggaauuaaacuguagcu

SEQ ID NO: 307413 - RNA, 20 nt, Human
uguuggugcccaagcaaaau

SEQ ID NO: 307414 - RNA, 24 nt, Human
uuaaaguauucuucaguuugaaaa

SEQ ID NO: 307415 - RNA, 25 nt, Human
uuagagcucagccugcagccaccac

SEQ ID NO: 307416 - RNA, 22 nt, Human
uuagcuagaugccaaaauucca

SEQ ID NO: 307417 - RNA, 21 nt, Human
uucauugaguuggaaaaaaac

SEQ ID NO: 307418 - RNA, 18 nt, Human
uugcuggguuacccaugu

SEQ ID NO: 307419 - RNA, 24 nt, Human
uuucucucugucaagaauccgugg

SEQ ID NO: 307420 - RNA, 23 nt, Human
uuucuggucugagugcagugaug

SEQ ID NO: 307421 - RNA, 19 nt, Human
aaaaaagacaugaaaacac

SEQ ID NO: 307422 - RNA, 20 nt, Human
aaaaugaaaagacagcccuu

SEQ ID NO: 307423 - RNA, 24 nt, Human
aacaguguaaauaacacagcagua

SEQ ID NO: 307424 - RNA, 19 nt, Human
aagcaaucagagagggggc

SEQ ID NO: 307425 - RNA, 21 nt, Human
aaggagauuacuuucuccacc

SEQ ID NO: 307426 - RNA, 21 nt, Human
aaggauccauacaaaaaugac

SEQ ID NO: 307427 - RNA, 24 nt, Human
aagucacuucuuuggggaaaccag

SEQ ID NO: 307428 - RNA, 24 nt, Human
aaugaaaagacagcccuuuuaaaa

SEQ ID NO: 307429 - RNA, 18 nt, Human
aaugacagagguagggaa

SEQ ID NO: 307430 - RNA, 23 nt, Human
acacacagauacguaaugcuaaa

SEQ ID NO: 307431 - RNA, 22 nt, Human
acaccaccacaguauggaaaac

SEQ ID NO: 307432 - RNA, 23 nt, Human
acaucauuuuguuuucauaagca

SEQ ID NO: 307433 - RNA, 19 nt, Human
accugauucagcuuaguga

SEQ ID NO: 307434 - RNA, 21 nt, Human
acuaaaaugaaaagacagccc

SEQ ID NO: 307435 - RNA, 25 nt, Human
agaauaaaacaaauuugacagauug

SEQ ID NO: 307436 - RNA, 21 nt, Human
agagagaagagccaggggggc

SEQ ID NO: 307437 - RNA, 25 nt, Human
agagagaagagccaggggggcuuuc

SEQ ID NO: 307438 - RNA, 23 nt, Human
agagggggcagugcugagcauau

SEQ ID NO: 307439 - RNA, 20 nt, Human
agcagguuccugcaaugcag

SEQ ID NO: 307440 - RNA, 24 nt, Human
agccauuuucuuuuuccucuuuuc

SEQ ID NO: 307441 - RNA, 20 nt, Human
agcccuuuuaaaaaugagug

SEQ ID NO: 307442 - RNA, 18 nt, Human
agcggggccgcucccgac

SEQ ID NO: 307443 - RNA, 25 nt, Human
agcucgcgccggcccgcgccccacc

SEQ ID NO: 307444 - RNA, 21 nt, Human
agggaaaagucugccugcagc

SEQ ID NO: 307445 - RNA, 24 nt, Human
agucaggaaacuuccccggaccua

SEQ ID NO: 307446 - RNA, 19 nt, Human
auauauauauauauauaua

SEQ ID NO: 307447 - RNA, 19 nt, Human
auauauauauauauauaua

SEQ ID NO: 307448 - RNA, 21 nt, Human
auggagucuugaugaaucugu

SEQ ID NO: 307449 - RNA, 24 nt, Human
auuaaaauauauauauauauauau

SEQ ID NO: 307450 - RNA, 20 nt, Human
caaggagauuacuuucucca

SEQ ID NO: 307451 - RNA, 21 nt, Human
cacacagauacguaaugcuaa

SEQ ID NO: 307452 - RNA, 23 nt, Human
cacacagauacguaaugcuaaaa

SEQ ID NO: 307453 - RNA, 24 nt, Human
cacacagauacguaaugcuaaaaa

SEQ ID NO: 307454 - RNA, 24 nt, Human
cacaguauggaaaacuaaaaugaa

SEQ ID NO: 307455 - RNA, 19 nt, Human
cacaugauugcaaggagau

SEQ ID NO: 307456 - RNA, 24 nt, Human
cagcagaggccaucaaacacagua

SEQ ID NO: 307457 - RNA, 24 nt, Human
cagcuuagugaagauaaguugucc

SEQ ID NO: 307458 - RNA, 21 nt, Human
caugauugcaaggagauuacu

SEQ ID NO: 307459 - RNA, 19 nt, Human
cauuuuguuuucauaagca

SEQ ID NO: 307460 - RNA, 20 nt, Human
ccaaacacaagccacaugau

SEQ ID NO: 307461 - RNA, 23 nt, Human
ccauagaacaaaauauuuccagu

SEQ ID NO: 307462 - RNA, 20 nt, Human
ccauuuucuuuuuccucuuu

SEQ ID NO: 307463 - RNA, 27 nt, Human
cccgaccccagggaaggcagccuggaa

SEQ ID NO: 307464 - RNA, 23 nt, Human
cccgcgcacgccgccacgggccg

SEQ ID NO: 307465 - RNA, 25 nt, Human
cccgcgcacgccgccacgggccgca

SEQ ID NO: 307466 - RNA, 18 nt, Human
cccuuuuaaaaaugagug

SEQ ID NO: 307467 - RNA, 20 nt, Human
ccgccgcgcccgccgagugc

SEQ ID NO: 307468 - RNA, 22 nt, Human
ccgccgcgcccgccgagugcuc

SEQ ID NO: 307469 - RNA, 22 nt, Human
ccugcagccacagccucugccc

SEQ ID NO: 307470 - RNA, 26 nt, Human
cgccgcggagcuccggcugcaugaag

SEQ ID NO: 307471 - RNA, 20 nt, Human
cucuuuuuucuuggagauga

SEQ ID NO: 307472 - RNA, 19 nt, Human
cugccccgcgagguugugg

SEQ ID NO: 307473 - RNA, 20 nt, Human
cugccccgcgagguugugga

SEQ ID NO: 307474 - RNA, 24 nt, Human
gaauuccuuuuuuuuuuuuuuuuu

SEQ ID NO: 307475 - RNA, 18 nt, Human
gaccccagggaaggcagc

SEQ ID NO: 307476 - RNA, 22 nt, Human
gagaugaccuucagauuucuau

SEQ ID NO: 307477 - RNA, 23 nt, Human
gaucucuuuuuucuuggagauga

SEQ ID NO: 307478 - RNA, 23 nt, Human
gccggcccgcgccccaccugcca

SEQ ID NO: 307479 - RNA, 19 nt, Human
gggaaaccagggcuucuca

SEQ ID NO: 307480 - RNA, 22 nt, Human
ggugaacacuugagccagagau

SEQ ID NO: 307481 - RNA, 18 nt, Human
guccuuaguaugaucuug

SEQ ID NO: 307482 - RNA, 18 nt, Human
uaaaacacagcagaggcc

SEQ ID NO: 307483 - RNA, 22 nt, Human
uaaaacacagcagaggccauca

SEQ ID NO: 307484 - RNA, 20 nt, Human
uaaauaacacagcaguaacc

SEQ ID NO: 307485 - RNA, 19 nt, Human
uacaaaaaugacgcccaaa

SEQ ID NO: 307486 - RNA, 18 nt, Human
uacaccaccacaguaugg

SEQ ID NO: 307487 - RNA, 22 nt, Human
uaccuuuccaauuguccaaaau

SEQ ID NO: 307488 - RNA, 23 nt, Human
uaguaaaaguuuacaaacauuaa

SEQ ID NO: 307489 - RNA, 19 nt, Human
uauauauauauauauauau

SEQ ID NO: 307490 - RNA, 18 nt, Human
uauuguacaauacaaaac

SEQ ID NO: 307491 - RNA, 20 nt, Human
ucaaacacaguauuaaugag

SEQ ID NO: 307492 - RNA, 19 nt, Human
uccuuaguaugaucuuggc

SEQ ID NO: 307493 - RNA, 18 nt, Human
uccuuuuuuuuuuuuuuu

SEQ ID NO: 307494 - RNA, 18 nt, Human
uccuuuuuuuuuuuuuuu

SEQ ID NO: 307495 - RNA, 18 nt, Human
ucgcgccagccacggggg

SEQ ID NO: 307496 - RNA, 18 nt, Human
ucucugcaaagcgcggaa

SEQ ID NO: 307497 - RNA, 22 nt, Human
ucuuucuuuuacugggugaaca

SEQ ID NO: 307498 - RNA, 19 nt, Human
ugaaaaaagacaugaaaac

SEQ ID NO: 307499 - RNA, 21 nt, Human
ugaaaaaagacaugaaaacac

SEQ ID NO: 307500 - RNA, 22 nt, Human
ugaccuucagauuucuaucaga

SEQ ID NO: 307501 - RNA, 23 nt, Human
ugagcaaggggaaagacuguguu

SEQ ID NO: 307502 - RNA, 20 nt, Human
ugauaaugagcagguuccug

SEQ ID NO: 307503 - RNA, 22 nt, Human
ugcuaccaaauauccacauagc

SEQ ID NO: 307504 - RNA, 20 nt, Human
ugggguucaaucaacccuuc

SEQ ID NO: 307505 - RNA, 23 nt, Human
ugggugaacacuugagccagaga

SEQ ID NO: 307506 - RNA, 20 nt, Human
uguccaaaauucucauaaau

SEQ ID NO: 307507 - RNA, 21 nt, Human
ugugauugguguccacaugau

SEQ ID NO: 307508 - RNA, 23 nt, Human
uguggucgagggucaaagugggg

SEQ ID NO: 307509 - RNA, 21 nt, Human
uguguacaccaccacaguaug

SEQ ID NO: 307510 - RNA, 25 nt, Human
uucacaguaauguacaucauuuugu

SEQ ID NO: 307511 - RNA, 22 nt, Human
uucuaccuuuccaauuguccaa

SEQ ID NO: 307512 - RNA, 18 nt, Human
uuggaaaccuucuugucu

SEQ ID NO: 307513 - RNA, 21 nt, Human
uuuuuuuuuuuuuuuuacugg

SEQ ID NO: 307514 - RNA, 23 nt, Human
uuuuuuuuuuuuuuuuuuacugg

SEQ ID NO: 307515 - RNA, 19 nt, Human
aaagugaguagcaucacaa

SEQ ID NO: 307516 - RNA, 19 nt, Human
acaaauuuugcauuuucca

SEQ ID NO: 307517 - RNA, 19 nt, Human
acagguuuaaaaaauucug

SEQ ID NO: 307518 - RNA, 27 nt, Human
accaccagacuaaaugucucaagaaaa

SEQ ID NO: 307519 - RNA, 24 nt, Human
agaagcaaaauacgucagacaaaa

SEQ ID NO: 307520 - RNA, 19 nt, Human
agcaugacuccagccgcgc

SEQ ID NO: 307521 - RNA, 19 nt, Human
caaacacacucuauccaug

SEQ ID NO: 307522 - RNA, 19 nt, Human
caagcucugcggcccggaa

SEQ ID NO: 307523 - RNA, 19 nt, Human
cacaggguuuucugcuucu

SEQ ID NO: 307524 - RNA, 19 nt, Human
cacauacuagaagcaaaau

SEQ ID NO: 307525 - RNA, 24 nt, Human
cacauacuagaagcaaaauacguc

SEQ ID NO: 307526 - RNA, 20 nt, Human
caguauagcaugacuccagc

SEQ ID NO: 307527 - RNA, 19 nt, Human
cagugaauuuuguuggguu

SEQ ID NO: 307528 - RNA, 22 nt, Human
ccaaaaauguccauaauuuucu

SEQ ID NO: 307529 - RNA, 21 nt, Human
ccaagcucugcggcccggagc

SEQ ID NO: 307530 - RNA, 21 nt, Human
cgacucgggcucuagccuccg

SEQ ID NO: 307531 - RNA, 22 nt, Human
cuaaagauguuucuguuaucaa

SEQ ID NO: 307532 - RNA, 19 nt, Human
cuccuaucuuuccuguccc

SEQ ID NO: 307533 - RNA, 22 nt, Human
cugccugccggugcccugggcu

SEQ ID NO: 307534 - RNA, 23 nt, Human
cuuucaacaugcagauauucagc

SEQ ID NO: 307535 - RNA, 19 nt, Human
cuuucuuucuccuaucuuu

SEQ ID NO: 307536 - RNA, 21 nt, Human
gagcugcgacucgggcucuag

SEQ ID NO: 307537 - RNA, 22 nt, Human
gcccggagcugcgacucgggcu

SEQ ID NO: 307538 - RNA, 21 nt, Human
gccugccugccggugcccugg

SEQ ID NO: 307539 - RNA, 25 nt, Human
gcgcagcugccugccugccggugcc

SEQ ID NO: 307540 - RNA, 22 nt, Human
uaaacuuucuuucuccuaucuu

SEQ ID NO: 307541 - RNA, 25 nt, Human
uaagucuuucaacaugcagauauuc

SEQ ID NO: 307542 - RNA, 24 nt, Human
uaauagcuuaccuuggacaucauc

SEQ ID NO: 307543 - RNA, 22 nt, Human
uaccacaguuaccaccagacua

SEQ ID NO: 307544 - RNA, 22 nt, Human
uagaagcaaaauacgucagaca

SEQ ID NO: 307545 - RNA, 20 nt, Human
uagcaugacuccagccgcgc

SEQ ID NO: 307546 - RNA, 20 nt, Human
uaggcauguuccauauaacc

SEQ ID NO: 307547 - RNA, 27 nt, Human
ucaaacuuuuacaauuuuuccaagacg

SEQ ID NO: 307548 - RNA, 19 nt, Human
uccaagacguuuuugaggu

SEQ ID NO: 307549 - RNA, 23 nt, Human
uccuaaagauguuucuguuauca

SEQ ID NO: 307550 - RNA, 18 nt, Human
ugcaauguuaccacaguu

SEQ ID NO: 307551 - RNA, 22 nt, Human
ugcagauauucagcacucuuga

SEQ ID NO: 307552 - RNA, 22 nt, Human
ugcgacucgggcucuagccucc

SEQ ID NO: 307553 - RNA, 22 nt, Human
uggcaaaaaacaaacacacucu

SEQ ID NO: 307554 - RNA, 19 nt, Human
uggcacaggguuuucugcu

SEQ ID NO: 307555 - RNA, 23 nt, Human
uuaucuaauauacacaugcugcu

SEQ ID NO: 307556 - RNA, 20 nt, Human
uuccugucccuggcacaggg

SEQ ID NO: 307557 - RNA, 23 nt, Human
uuccugucccuggcacaggguuu

SEQ ID NO: 307558 - RNA, 18 nt, Human
uucuccuaucuuuccugu

SEQ ID NO: 307559 - RNA, 24 nt, Human
uuuccugucccuggcacaggguuu

SEQ ID NO: 307560 - RNA, 18 nt, Human
uuuggcaaaaaacaaaca

SEQ ID NO: 307561 - RNA, 24 nt, Human
uuuuuuuuuuuuuuuuuuuuaggg

SEQ ID NO: 307562 - RNA, 22 nt, Human
aaaaguguuuucuaaaaaaggg

SEQ ID NO: 307563 - RNA, 18 nt, Human
aaguguaccugggcacgg

SEQ ID NO: 307564 - RNA, 19 nt, Human
aaguguaccugggcacggu

SEQ ID NO: 307565 - RNA, 21 nt, Human
acaaugacaguuuagcuaaaa

SEQ ID NO: 307566 - RNA, 21 nt, Human
agaggagguguugguguuggg

SEQ ID NO: 307567 - RNA, 19 nt, Human
agguggugggaaugugaag

SEQ ID NO: 307568 - RNA, 21 nt, Human
agguggugggaaugugaagcc

SEQ ID NO: 307569 - RNA, 23 nt, Human
aucguuuugagccaaaaucccuu

SEQ ID NO: 307570 - RNA, 21 nt, Human
aucucuucagauuuuccacug

SEQ ID NO: 307571 - RNA, 21 nt, Human
auggagcucagagaagaggcu

SEQ ID NO: 307572 - RNA, 22 nt, Human
cagaaggucucucguccagccu

SEQ ID NO: 307573 - RNA, 23 nt, Human
ccucuggggagccuucucagucu

SEQ ID NO: 307574 - RNA, 18 nt, Human
ccugugggugugggcaga

SEQ ID NO: 307575 - RNA, 20 nt, Human
ccugugggugugggcagagg

SEQ ID NO: 307576 - RNA, 20 nt, Human
cgagaggagcguuccugugu

SEQ ID NO: 307577 - RNA, 23 nt, Human
cgcccaagucccggcgccagcuc

SEQ ID NO: 307578 - RNA, 22 nt, Human
cuccauaucugcugaaaaaagg

SEQ ID NO: 307579 - RNA, 18 nt, Human
cuccgugccugggccgcc

SEQ ID NO: 307580 - RNA, 23 nt, Human
cuggacccagaagauugggcugg

SEQ ID NO: 307581 - RNA, 22 nt, Human
cugguuuaauuucuuuuuccug

SEQ ID NO: 307582 - RNA, 25 nt, Human
cugugggugugggcagagggcuuuc

SEQ ID NO: 307583 - RNA, 20 nt, Human
gagaagaggcugcugggcca

SEQ ID NO: 307584 - RNA, 23 nt, Human
gaggagcguuccugugugggcug

SEQ ID NO: 307585 - RNA, 20 nt, Human
gaucuguggagcuccaugag

SEQ ID NO: 307586 - RNA, 18 nt, Human
gcagagggcuuucccgga

SEQ ID NO: 307587 - RNA, 18 nt, Human
gccaaaaucccuucccua

SEQ ID NO: 307588 - RNA, 20 nt, Human
gcccaagucccggcgccagc

SEQ ID NO: 307589 - RNA, 24 nt, Human
gccccgcccaagucccggcgccag

SEQ ID NO: 307590 - RNA, 25 nt, Human
gccugggccgccggcacgaggccuc

SEQ ID NO: 307591 - RNA, 18 nt, Human
gcuuaaaaaaugugaauu

SEQ ID NO: 307592 - RNA, 20 nt, Human
gggcacggugcgaagguggu

SEQ ID NO: 307593 - RNA, 23 nt, Human
gggcaggccccgcccaagucccg

SEQ ID NO: 307594 - RNA, 21 nt, Human
ggggagccuucucagucuggc

SEQ ID NO: 307595 - RNA, 20 nt, Human
gguggugggaaugugaagcc

SEQ ID NO: 307596 - RNA, 21 nt, Human
gucucgccgccucuccgugcc

SEQ ID NO: 307597 - RNA, 25 nt, Human
uacagugucuugaaaguguaccugg

SEQ ID NO: 307598 - RNA, 20 nt, Human
uaccugggcacggugcgaag

SEQ ID NO: 307599 - RNA, 23 nt, Human
uagggcaggccccgcccaagucc

SEQ ID NO: 307600 - RNA, 20 nt, Human
ucagauuuuccacuguugac

SEQ ID NO: 307601 - RNA, 20 nt, Human
ucagcucucuccauaucugc

SEQ ID NO: 307602 - RNA, 19 nt, Human
ucccuucccuaaaaaugga

SEQ ID NO: 307603 - RNA, 18 nt, Human
uccucaggccugguuuaa

SEQ ID NO: 307604 - RNA, 20 nt, Human
ucuguggagcuccaugaggg

SEQ ID NO: 307605 - RNA, 18 nt, Human
ugaauugauugucagcuc

SEQ ID NO: 307606 - RNA, 23 nt, Human
uggacagggcagagguggucaga

SEQ ID NO: 307607 - RNA, 22 nt, Human
uggaggccacagaggccucugg

SEQ ID NO: 307608 - RNA, 19 nt, Human
ugggccgccggcacgaggc

SEQ ID NO: 307609 - RNA, 22 nt, Human
ugugaagccugugggugugggc

SEQ ID NO: 307610 - RNA, 18 nt, Human
ugugugggcugcucacug

SEQ ID NO: 307611 - RNA, 19 nt, Human
uguugguguugggacaggg

SEQ ID NO: 307612 - RNA, 24 nt, Human
uuacacaaaucaucggcauuuauu

SEQ ID NO: 307613 - RNA, 20 nt, Human
uucugcggucucgccgccuc

SEQ ID NO: 307614 - RNA, 18 nt, Human
uugggcuggagaggaggu

SEQ ID NO: 307615 - RNA, 19 nt, Human
aagguggggcuuuggaggg

SEQ ID NO: 307616 - RNA, 20 nt, Human
accucgaaggggcuagauga

SEQ ID NO: 307617 - RNA, 20 nt, Human
accugugugaaauggagaug

SEQ ID NO: 307618 - RNA, 19 nt, Human
agauggggaaggggcaacc

SEQ ID NO: 307619 - RNA, 28 nt, Human
aggaauagagaagagaggaccgguaccc

SEQ ID NO: 307620 - RNA, 21 nt, Human
ccugugugaaauggagauggg

SEQ ID NO: 307621 - RNA, 20 nt, Human
cugcugagcagauuggaugc

SEQ ID NO: 307622 - RNA, 22 nt, Human
cugggccagaggggggaggggc

SEQ ID NO: 307623 - RNA, 21 nt, Human
gaccugugugaaauggagaug

SEQ ID NO: 307624 - RNA, 18 nt, Human
gcugggccagagggggga

SEQ ID NO: 307625 - RNA, 21 nt, Human
gggcuuuggaggggugugggc

SEQ ID NO: 307626 - RNA, 19 nt, Human
ggugcuguuggguggccag

SEQ ID NO: 307627 - RNA, 22 nt, Human
ugaaauggagauggggaagggg

SEQ ID NO: 307628 - RNA, 19 nt, Human
uggagauggggaaggggca

SEQ ID NO: 307629 - RNA, 18 nt, Human
uggggaggaagggauggg

SEQ ID NO: 307630 - RNA, 19 nt, Human
uggggcuuuggaggggugu

SEQ ID NO: 307631 - RNA, 19 nt, Human
uuaaagguggggcuuugga

SEQ ID NO: 307632 - RNA, 23 nt, Human
uuggugcuguuggguggccagug

SEQ ID NO: 307633 - RNA, 19 nt, Human
uuucagugugggccugggg

SEQ ID NO: 307634 - RNA, 18 nt, Human
uuuuuuuuuuuuuuuuug

SEQ ID NO: 307635 - RNA, 24 nt, Human
uuuuuuuuuuuuuuuuuuuuuggg

SEQ ID NO: 307636 - RNA, 26 nt, Human
acacagccauguuucagugaggcguu

SEQ ID NO: 307637 - RNA, 20 nt, Human
agacgaagaagauccggagc

SEQ ID NO: 307638 - RNA, 22 nt, Human
agcugaguggaggguggggaca

SEQ ID NO: 307639 - RNA, 20 nt, Human
aggcucugggcugucccacu

SEQ ID NO: 307640 - RNA, 19 nt, Human
agugggggaaaauggaagg

SEQ ID NO: 307641 - RNA, 20 nt, Human
augggcugggggaagggggu

SEQ ID NO: 307642 - RNA, 24 nt, Human
caacagcccagugcccuaaggccc

SEQ ID NO: 307643 - RNA, 20 nt, Human
caaccuaccagugccacguu

SEQ ID NO: 307644 - RNA, 20 nt, Human
caaggagccacugccucagc

SEQ ID NO: 307645 - RNA, 24 nt, Human
cacacaggaaaggaagcugucacc

SEQ ID NO: 307646 - RNA, 22 nt, Human
cagcccagagugaguucuacaa

SEQ ID NO: 307647 - RNA, 18 nt, Human
caggcucugggcuguccc

SEQ ID NO: 307648 - RNA, 18 nt, Human
caggggccuccaguccag

SEQ ID NO: 307649 - RNA, 19 nt, Human
caugauggggcagccaggc

SEQ ID NO: 307650 - RNA, 22 nt, Human
cgcugaccgacucgggcuacgc

SEQ ID NO: 307651 - RNA, 25 nt, Human
cggcaacaggccuggaggugcugca

SEQ ID NO: 307652 - RNA, 20 nt, Human
cggcuucaauggaacaacag

SEQ ID NO: 307653 - RNA, 19 nt, Human
cuccaggggccuccagucc

SEQ ID NO: 307654 - RNA, 20 nt, Human
cuccaggggccuccagucca

SEQ ID NO: 307655 - RNA, 18 nt, Human
cuggcuccaggggccucc

SEQ ID NO: 307656 - RNA, 25 nt, Human
gaagcaaguaagggccagggccaga

SEQ ID NO: 307657 - RNA, 19 nt, Human
gaagguggaggguggagug

SEQ ID NO: 307658 - RNA, 19 nt, Human
gacucgggcuacgcugcaa

SEQ ID NO: 307659 - RNA, 18 nt, Human
ggacagaguacacacagg

SEQ ID NO: 307660 - RNA, 24 nt, Human
ggacaggggcuggaggaggggcuc

SEQ ID NO: 307661 - RNA, 21 nt, Human
ggcuggaggaggggcucuggg

SEQ ID NO: 307662 - RNA, 22 nt, Human
ggcuggaggaggggcucugggg

SEQ ID NO: 307663 - RNA, 20 nt, Human
ggcugggggaaggggguggg

SEQ ID NO: 307664 - RNA, 19 nt, Human
gggaagggggugggacagg

SEQ ID NO: 307665 - RNA, 25 nt, Human
gggaagggggugggacaggggcugg

SEQ ID NO: 307666 - RNA, 23 nt, Human
ggguggaguguuugcugcaggaa

SEQ ID NO: 307667 - RNA, 19 nt, Human
ggugcaaacuggagaggcc

SEQ ID NO: 307668 - RNA, 24 nt, Human
uaaggccccuaacucuugcuggcu

SEQ ID NO: 307669 - RNA, 19 nt, Human
uaccagugccacguuacag

SEQ ID NO: 307670 - RNA, 23 nt, Human
ucagugaggcguugaucuucuuc

SEQ ID NO: 307671 - RNA, 18 nt, Human
ucccuggugucccaaccu

SEQ ID NO: 307672 - RNA, 23 nt, Human
ucuaaaggaacuggacagaguac

SEQ ID NO: 307673 - RNA, 20 nt, Human
ucuggcuccaggggccucca

SEQ ID NO: 307674 - RNA, 23 nt, Human
ucuggcuccaggggccuccaguc

SEQ ID NO: 307675 - RNA, 24 nt, Human
ugauuggguggggccacaugaugg

SEQ ID NO: 307676 - RNA, 23 nt, Human
ugcaguagugggggaaaauggaa

SEQ ID NO: 307677 - RNA, 24 nt, Human
ugcugcaguagugggggaaaaugg

SEQ ID NO: 307678 - RNA, 19 nt, Human
uggaagguggaggguggag

SEQ ID NO: 307679 - RNA, 24 nt, Human
uggacagaguacacacaggaaagg

SEQ ID NO: 307680 - RNA, 18 nt, Human
uggaggguggaguguuug

SEQ ID NO: 307681 - RNA, 23 nt, Human
uggaggguggaguguuugcugca

SEQ ID NO: 307682 - RNA, 19 nt, Human
uggaggguggggacaggug

SEQ ID NO: 307683 - RNA, 20 nt, Human
uggccuaauggaugggcugg

SEQ ID NO: 307684 - RNA, 20 nt, Human
uggcuccaggggccuccagu

SEQ ID NO: 307685 - RNA, 19 nt, Human
ugggcugggggaagggggu

SEQ ID NO: 307686 - RNA, 20 nt, Human
ugggggaagggggugggaca

SEQ ID NO: 307687 - RNA, 20 nt, Human
ugggggaagggggugggaca

SEQ ID NO: 307688 - RNA, 19 nt, Human
uggguggggccacaugaug

SEQ ID NO: 307689 - RNA, 22 nt, Human
uggguggggccacaugaugggg

SEQ ID NO: 307690 - RNA, 22 nt, Human
ugucccaaccuaccagugccac

SEQ ID NO: 307691 - RNA, 23 nt, Human
uuggguggggccacaugaugggg

SEQ ID NO: 307692 - RNA, 20 nt, Human
aaaaaaaaccaugagaugug

SEQ ID NO: 307693 - RNA, 23 nt, Human
aaaaaaaaccaugagaugugcau

SEQ ID NO: 307694 - RNA, 27 nt, Human
aaaaacucuucacuagcuuaaaauguc

SEQ ID NO: 307695 - RNA, 22 nt, Human
aaaaagcagcaaaaaaaaccau

SEQ ID NO: 307696 - RNA, 20 nt, Human
aaaaaugucauucucucccc

SEQ ID NO: 307697 - RNA, 31 nt, Human
aaaauccacacacacgcacacacgcgcacag

SEQ ID NO: 307698 - RNA, 25 nt, Human
aaacaaaucgaaaccaaagaaaaca

SEQ ID NO: 307699 - RNA, 21 nt, Human
aacacugacaccaggagacca

SEQ ID NO: 307700 - RNA, 19 nt, Human
aagaaaacagaacccaggg

SEQ ID NO: 307701 - RNA, 23 nt, Human
aagagcaaaacucugucucaaaa

SEQ ID NO: 307702 - RNA, 18 nt, Human
aagaucaaccagcccacu

SEQ ID NO: 307703 - RNA, 23 nt, Human
aagcaacaacguacaagagaaca

SEQ ID NO: 307704 - RNA, 22 nt, Human
aagcagcaaaaaaaaccaugag

SEQ ID NO: 307705 - RNA, 20 nt, Human
aagcgaccaugcaacugugg

SEQ ID NO: 307706 - RNA, 27 nt, Human
aaguaaacaaugaaaacaaaucgaaac

SEQ ID NO: 307707 - RNA, 18 nt, Human
acacaagaucaaccagcc

SEQ ID NO: 307708 - RNA, 18 nt, Human
acacacacacacacacac

SEQ ID NO: 307709 - RNA, 21 nt, Human
acacacacacacuugaaagaa

SEQ ID NO: 307710 - RNA, 27 nt, Human
acacacacgcacacacgcgcacacaca

SEQ ID NO: 307711 - RNA, 23 nt, Human
acacgcacacacgcgcacacaca

SEQ ID NO: 307712 - RNA, 26 nt, Human
acacgcacacacgcgcacacacacac

SEQ ID NO: 307713 - RNA, 22 nt, Human
acagaacuaagugacaaccgca

SEQ ID NO: 307714 - RNA, 19 nt, Human
accacuccuaaguaaacaa

SEQ ID NO: 307715 - RNA, 27 nt, Human
accucacuuaccugaaguccgacuucg

SEQ ID NO: 307716 - RNA, 25 nt, Human
accucacuuaccugaaguccuguuu

SEQ ID NO: 307717 - RNA, 23 nt, Human
acgcacacacgcgcacacacaca

SEQ ID NO: 307718 - RNA, 19 nt, Human
acucagucuaggcgugugc

SEQ ID NO: 307719 - RNA, 18 nt, Human
acugaagacauucccgac

SEQ ID NO: 307720 - RNA, 23 nt, Human
agaaaaaacucuucacuagcuua

SEQ ID NO: 307721 - RNA, 20 nt, Human
agaaaacagaacccagccca

SEQ ID NO: 307722 - RNA, 27 nt, Human
agaaaacagaacccagcccacucucuc

SEQ ID NO: 307723 - RNA, 18 nt, Human
agagcaaaacucugucuc

SEQ ID NO: 307724 - RNA, 24 nt, Human
aggaaacagaaguccuacaguuau

SEQ ID NO: 307725 - RNA, 18 nt, Human
agggauucaaggugggga

SEQ ID NO: 307726 - RNA, 19 nt, Human
aggguggggagcgggggca

SEQ ID NO: 307727 - RNA, 19 nt, Human
aggugcccucgccagacca

SEQ ID NO: 307728 - RNA, 24 nt, Human
aguaaacaaugaaaacaaaucgaa

SEQ ID NO: 307729 - RNA, 22 nt, Human
aucacgguuuagaaaauggcag

SEQ ID NO: 307730 - RNA, 18 nt, Human
auugcccuccagccuggg

SEQ ID NO: 307731 - RNA, 22 nt, Human
caaacgcaaacguaggagccaa

SEQ ID NO: 307732 - RNA, 22 nt, Human
caaagaaaacagaacccagccc

SEQ ID NO: 307733 - RNA, 21 nt, Human
caacaacguacaagagaacac

SEQ ID NO: 307734 - RNA, 19 nt, Human
cacacaagaucaaccagcc

SEQ ID NO: 307735 - RNA, 20 nt, Human
cacacacacacacacacaca

SEQ ID NO: 307736 - RNA, 28 nt, Human
cacacacacgcacacacgcgcacacaca

SEQ ID NO: 307737 - RNA, 24 nt, Human
caccauugcccuccagccugggca

SEQ ID NO: 307738 - RNA, 18 nt, Human
caccguggccuguuuucu

SEQ ID NO: 307739 - RNA, 26 nt, Human
cacgcgcacacacacacacacacaca

SEQ ID NO: 307740 - RNA, 20 nt, Human
cacgguuuagaaaauggcag

SEQ ID NO: 307741 - RNA, 21 nt, Human
cacuagcuuaaaaugucccuu

SEQ ID NO: 307742 - RNA, 19 nt, Human
cagaacccagcccacucuc

SEQ ID NO: 307743 - RNA, 24 nt, Human
cagccauaccauuucagaugauau

SEQ ID NO: 307744 - RNA, 24 nt, Human
cagcccacugagaucugcuggaac

SEQ ID NO: 307745 - RNA, 23 nt, Human
caggagaccagccacaaacgcaa

SEQ ID NO: 307746 - RNA, 25 nt, Human
caggagaccagccacaaacgcaaga

SEQ ID NO: 307747 - RNA, 26 nt, Human
caggcucacugaacaugaggggacuu

SEQ ID NO: 307748 - RNA, 19 nt, Human
cauugcccuccagccuggg

SEQ ID NO: 307749 - RNA, 22 nt, Human
cauugcccuccagccugggcaa

SEQ ID NO: 307750 - RNA, 23 nt, Human
cauugcccuccagccugggcaac

SEQ ID NO: 307751 - RNA, 24 nt, Human
cauugcccuccagccugggcaaca

SEQ ID NO: 307752 - RNA, 25 nt, Human
ccagaccaacucgcugcugggacuc

SEQ ID NO: 307753 - RNA, 23 nt, Human
ccagcaagguaaaaauaggaguu

SEQ ID NO: 307754 - RNA, 25 nt, Human
ccauccacucacgacgaaaccacac

SEQ ID NO: 307755 - RNA, 21 nt, Human
ccauugcccuccagccugggc

SEQ ID NO: 307756 - RNA, 23 nt, Human
ccauugcccuccagccugggcaa

SEQ ID NO: 307757 - RNA, 24 nt, Human
ccauugcccuccagccugggcaac

SEQ ID NO: 307758 - RNA, 23 nt, Human
cccacugagaucugcuggaacca

SEQ ID NO: 307759 - RNA, 24 nt, Human
ccccaaaagacuugauaaccaagu

SEQ ID NO: 307760 - RNA, 24 nt, Human
cccuccagccugggcaacaagagc

SEQ ID NO: 307761 - RNA, 18 nt, Human
cccucgccagaccaacuc

SEQ ID NO: 307762 - RNA, 23 nt, Human
cccuuggcuuacaaccaaucauu

SEQ ID NO: 307763 - RNA, 19 nt, Human
ccuguuuucugagaaaaag

SEQ ID NO: 307764 - RNA, 22 nt, Human
cgaaaccaaagaaaacagaacc

SEQ ID NO: 307765 - RNA, 22 nt, Human
cgaaagcaacaacguacaagag

SEQ ID NO: 307766 - RNA, 20 nt, Human
cgcacacacacacacacaca

SEQ ID NO: 307767 - RNA, 22 nt, Human
cgcacacacgcgcacacacaca

SEQ ID NO: 307768 - RNA, 23 nt, Human
cgcacacacgcgcacacacacac

SEQ ID NO: 307769 - RNA, 26 nt, Human
cgcgcacacacacacacacacacacu

SEQ ID NO: 307770 - RNA, 18 nt, Human
cggaauggguacaaggga

SEQ ID NO: 307771 - RNA, 21 nt, Human
cucgccagaccaacucgcugc

SEQ ID NO: 307772 - RNA, 27 nt, Human
cucugucucaaaaaaaaaaugucauuc

SEQ ID NO: 307773 - RNA, 23 nt, Human
cuuaaaaugucccuuggcuuaca

SEQ ID NO: 307774 - RNA, 21 nt, Human
gaaaaaaaaagcagcaaaaaa

SEQ ID NO: 307775 - RNA, 23 nt, Human
gaaaaaaaaagcagcaaaaaaaa

SEQ ID NO: 307776 - RNA, 21 nt, Human
gaaaacaaaucgaaaccaaag

SEQ ID NO: 307777 - RNA, 18 nt, Human
gacucucaagaaacugaa

SEQ ID NO: 307778 - RNA, 19 nt, Human
gaggugcccucgccagacc

SEQ ID NO: 307779 - RNA, 19 nt, Human
ggcugccgaggugcccucg

SEQ ID NO: 307780 - RNA, 24 nt, Human
gggcugccgaggugcccucgccag

SEQ ID NO: 307781 - RNA, 18 nt, Human
ggguggggagcgggggca

SEQ ID NO: 307782 - RNA, 23 nt, Human
guuucgggugcagcagcuucuuu

SEQ ID NO: 307783 - RNA, 22 nt, Human
uaaaaauccacacacacgcaca

SEQ ID NO: 307784 - RNA, 18 nt, Human
uaccaggaaacagaaguc

SEQ ID NO: 307785 - RNA, 25 nt, Human
uauccucaauauagucaucauccaa

SEQ ID NO: 307786 - RNA, 21 nt, Human
ucaaggguggggagcgggggc

SEQ ID NO: 307787 - RNA, 24 nt, Human
ucagaacauuccaaauugaaauau

SEQ ID NO: 307788 - RNA, 20 nt, Human
ucauucucuccccaaaagac

SEQ ID NO: 307789 - RNA, 20 nt, Human
uccacacacacgcacacacg

SEQ ID NO: 307790 - RNA, 24 nt, Human
ucgaaaccaaagaaaacagaaccc

SEQ ID NO: 307791 - RNA, 20 nt, Human
ucgaaagcaacaacguacaa

SEQ ID NO: 307792 - RNA, 19 nt, Human
ucuuucaguuaaagcuccu

SEQ ID NO: 307793 - RNA, 24 nt, Human
ucuuuugggaaaaaucaauuccag

SEQ ID NO: 307794 - RNA, 24 nt, Human
ugaaaaaaaaagcagcaaaaaaaa

SEQ ID NO: 307795 - RNA, 24 nt, Human
ugaaacaggugaauuuuauagaau

SEQ ID NO: 307796 - RNA, 22 nt, Human
ugaaguuaaaacuuuuaaaaca

SEQ ID NO: 307797 - RNA, 19 nt, Human
ugcagauaucaaaauuuca

SEQ ID NO: 307798 - RNA, 23 nt, Human
ugcccuagcucugagccaauggg

SEQ ID NO: 307799 - RNA, 19 nt, Human
ugcccuccagccugggcaa

SEQ ID NO: 307800 - RNA, 26 nt, Human
ugcuggaaccacagaacuaagugaca

SEQ ID NO: 307801 - RNA, 22 nt, Human
ugggaaaaaucaauuccagaaa

SEQ ID NO: 307802 - RNA, 22 nt, Human
uggucaagugagcaggagggcu

SEQ ID NO: 307803 - RNA, 26 nt, Human
uguggucagauuuaaauuagacugga

SEQ ID NO: 307804 - RNA, 19 nt, Human
uguuaccaggaaacagaag

SEQ ID NO: 307805 - RNA, 19 nt, Human
uuagaaaauggcagcgcua

SEQ ID NO: 307806 - RNA, 20 nt, Human
uuagaucaaguguaaaaugc

SEQ ID NO: 307807 - RNA, 18 nt, Human
uucagaugauaugaagac

SEQ ID NO: 307808 - RNA, 21 nt, Human
uugcugugcaaacuccaaaaa

SEQ ID NO: 307809 - RNA, 24 nt, Human
uugcugugcaaacuccaaaaaguc

SEQ ID NO: 307810 - RNA, 31 nt, Human
uuuaaaaauccacacacacgcacacacgcgg

SEQ ID NO: 307811 - RNA, 25 nt, Human
uuuaaaauaaauuucuguguguuuc

SEQ ID NO: 307812 - RNA, 18 nt, Human
uuugcugugcaaacucca

SEQ ID NO: 307813 - RNA, 26 nt, Human
uuuuauaguaguaaauguucaucacu

SEQ ID NO: 307814 - RNA, 23 nt, Human
aaaaaucuuuccacuauccacag

SEQ ID NO: 307815 - RNA, 22 nt, Human
aaagccccccccgccccaaccu

SEQ ID NO: 307816 - RNA, 20 nt, Human
aagaaagccccccccgcccc

SEQ ID NO: 307817 - RNA, 20 nt, Human
aagccccccccgccccaacc

SEQ ID NO: 307818 - RNA, 22 nt, Human
aagccccccccgccccaaccuc

SEQ ID NO: 307819 - RNA, 21 nt, Human
accccugcccugcaccacccc

SEQ ID NO: 307820 - RNA, 23 nt, Human
agaaaaccccauccagcgaggcc

SEQ ID NO: 307821 - RNA, 21 nt, Human
aggaaaaaaaaaaucuaaaaa

SEQ ID NO: 307822 - RNA, 26 nt, Human
aggaaaaaaaaaaucuaaaaaucuuu

SEQ ID NO: 307823 - RNA, 19 nt, Human
auggacagaaaaccccauc

SEQ ID NO: 307824 - RNA, 22 nt, Human
caagaaagccccccccgcccca

SEQ ID NO: 307825 - RNA, 22 nt, Human
caagaaagccccccccgcccca

SEQ ID NO: 307826 - RNA, 21 nt, Human
cacuggcgaggcccgcccucc

SEQ ID NO: 307827 - RNA, 22 nt, Human
caggauauaccaccccugcccu

SEQ ID NO: 307828 - RNA, 24 nt, Human
ccaaccucccuaacccccauugcc

SEQ ID NO: 307829 - RNA, 18 nt, Human
ccaaggaaaaaaaaaauc

SEQ ID NO: 307830 - RNA, 23 nt, Human
ccaaggaaaaaaaaaaucuaaaa

SEQ ID NO: 307831 - RNA, 19 nt, Human
ccauccagcgaggccugag

SEQ ID NO: 307832 - RNA, 19 nt, Human
cccaaggaaaaaaaaaauc

SEQ ID NO: 307833 - RNA, 25 nt, Human
ccccaaccucccuaacccccauugc

SEQ ID NO: 307834 - RNA, 22 nt, Human
ccccccccgccccaaccucccu

SEQ ID NO: 307835 - RNA, 24 nt, Human
cccccccgccccaaccucccuaac

SEQ ID NO: 307836 - RNA, 18 nt, Human
ccccccgccccaaccucc

SEQ ID NO: 307837 - RNA, 24 nt, Human
cccccgccccaaccucccuaaccc

SEQ ID NO: 307838 - RNA, 18 nt, Human
ccccgccccaaccucccu

SEQ ID NO: 307839 - RNA, 21 nt, Human
ccccgccccaaccucccuaac

SEQ ID NO: 307840 - RNA, 25 nt, Human
cccugcagcugcuccuggcgcuucc

SEQ ID NO: 307841 - RNA, 18 nt, Human
ccucccuaacccccauug

SEQ ID NO: 307842 - RNA, 21 nt, Human
ccucccuaacccccauugccu

SEQ ID NO: 307843 - RNA, 18 nt, Human
ccugcaagccuaacuugc

SEQ ID NO: 307844 - RNA, 18 nt, Human
ccugcagcugcuccuggc

SEQ ID NO: 307845 - RNA, 21 nt, Human
cgccccaaccucccuaacccc

SEQ ID NO: 307846 - RNA, 22 nt, Human
cgcggccggggccuaggagagc

SEQ ID NO: 307847 - RNA, 24 nt, Human
cugcuccuggcgcuuccacccugg

SEQ ID NO: 307848 - RNA, 20 nt, Human
gacagaaaaccccauccagc

SEQ ID NO: 307849 - RNA, 18 nt, Human
gagcgugcucuucucgcu

SEQ ID NO: 307850 - RNA, 23 nt, Human
gccccaaccucccuaacccccau

SEQ ID NO: 307851 - RNA, 19 nt, Human
gcgcgcggccggggccuag

SEQ ID NO: 307852 - RNA, 24 nt, Human
gcuccuggcgcuuccacccugguu

SEQ ID NO: 307853 - RNA, 18 nt, Human
ggcacuggcgaggcccgc

SEQ ID NO: 307854 - RNA, 19 nt, Human
gggcucccugcagcugcuc

SEQ ID NO: 307855 - RNA, 21 nt, Human
uaacucaagaaagcccccccc

SEQ ID NO: 307856 - RNA, 24 nt, Human
uauaccaccccugcccugcaccac

SEQ ID NO: 307857 - RNA, 25 nt, Human
uccccaaggaaaaaaaaaaucuaaa

SEQ ID NO: 307858 - RNA, 19 nt, Human
ucccugcagcugcuccugg

SEQ ID NO: 307859 - RNA, 23 nt, Human
ucuaaaaaucuuuccacuauccu

SEQ ID NO: 307860 - RNA, 21 nt, Human
ucucuggcacuggcgaggccc

SEQ ID NO: 307861 - RNA, 23 nt, Human
ugaacuuucccaaauacugcacu

SEQ ID NO: 307862 - RNA, 18 nt, Human
ugagggcuucucagcugg

SEQ ID NO: 307863 - RNA, 19 nt, Human
uucgucccucucuggcacu

SEQ ID NO: 307864 - RNA, 23 nt, Human
uugccugccaguuuccccaagga

SEQ ID NO: 307865 - RNA, 19 nt, Human
aaaaaaaaaaauaacagaa

SEQ ID NO: 307866 - RNA, 21 nt, Human
aaaacaugggaaccagaaaag

SEQ ID NO: 307867 - RNA, 24 nt, Human
aaacaaccaaggggauaaaaacaa

SEQ ID NO: 307868 - RNA, 19 nt, Human
aaacaugggaaccagaaaa

SEQ ID NO: 307869 - RNA, 23 nt, Human
aaauucucuccaguauuuuaaaa

SEQ ID NO: 307870 - RNA, 20 nt, Human
aaccaaggggauaaaaacaa

SEQ ID NO: 307871 - RNA, 25 nt, Human
aaccagaaaaggaauauaaauguaa

SEQ ID NO: 307872 - RNA, 26 nt, Human
aagcacaaaguaaagaaaggggaccc

SEQ ID NO: 307873 - RNA, 22 nt, Human
acaaccaaggggauaaaaacaa

SEQ ID NO: 307874 - RNA, 20 nt, Human
acacugcagaacaauacacc

SEQ ID NO: 307875 - RNA, 19 nt, Human
acuuaggacaaauguuguc

SEQ ID NO: 307876 - RNA, 18 nt, Human
agagaaaaacaaccaagg

SEQ ID NO: 307877 - RNA, 20 nt, Human
agcccuaauaacaaagaccc

SEQ ID NO: 307878 - RNA, 24 nt, Human
agccuguggccgguaucuacuggu

SEQ ID NO: 307879 - RNA, 25 nt, Human
auaaauucucuccaguauuuuaaaa

SEQ ID NO: 307880 - RNA, 22 nt, Human
aucacaguugccuuucucugug

SEQ ID NO: 307881 - RNA, 27 nt, Human
auuuaaaaaucagagaaaaacaaccaa

SEQ ID NO: 307882 - RNA, 18 nt, Human
auuuguuuucuggauuca

SEQ ID NO: 307883 - RNA, 19 nt, Human
cacaaaguaaagaaagaaa

SEQ ID NO: 307884 - RNA, 20 nt, Human
cagauaaagauagaguccag

SEQ ID NO: 307885 - RNA, 20 nt, Human
caggaaaggcauuacauagg

SEQ ID NO: 307886 - RNA, 22 nt, Human
caggcaguggccaaaaaagucc

SEQ ID NO: 307887 - RNA, 23 nt, Human
cagucugauagaaggccuuaguu

SEQ ID NO: 307888 - RNA, 21 nt, Human
caugcuuuugagguuucuugg

SEQ ID NO: 307889 - RNA, 22 nt, Human
ccaaggggauaaaaacaagcac

SEQ ID NO: 307890 - RNA, 23 nt, Human
ccaucguuuagaagagauuugga

SEQ ID NO: 307891 - RNA, 25 nt, Human
ccucuugcagauaaagauagagucc

SEQ ID NO: 307892 - RNA, 19 nt, Human
cuuacagucaugcauacuu

SEQ ID NO: 307893 - RNA, 21 nt, Human
cuuuucuucucuagaguuuuc

SEQ ID NO: 307894 - RNA, 21 nt, Human
gacaaaacaugggaaccagaa

SEQ ID NO: 307895 - RNA, 23 nt, Human
gcacaaaguaaagaaagaaacca

SEQ ID NO: 307896 - RNA, 27 nt, Human
ggaaaagacuucuuuaauuugcuauga

SEQ ID NO: 307897 - RNA, 18 nt, Human
ggguaguagaaaaauagg

SEQ ID NO: 307898 - RNA, 19 nt, Human
ggugggcaaggcugggcug

SEQ ID NO: 307899 - RNA, 24 nt, Human
guaaagacuaacucuauaugaaug

SEQ ID NO: 307900 - RNA, 23 nt, Human
guguuuuccuuuggggauuuuug

SEQ ID NO: 307901 - RNA, 23 nt, Human
uaaaaacaagcacaaaguaaaga

SEQ ID NO: 307902 - RNA, 25 nt, Human
uaaaaucccaguaaugcaacagcuu

SEQ ID NO: 307903 - RNA, 22 nt, Human
uaaagauagaguccauucuuuc

SEQ ID NO: 307904 - RNA, 19 nt, Human
uaaguugucuucauucagc

SEQ ID NO: 307905 - RNA, 22 nt, Human
uagaaacaaggcaugcuuuuga

SEQ ID NO: 307906 - RNA, 24 nt, Human
uaucaucagaacucuggaaaaaga

SEQ ID NO: 307907 - RNA, 22 nt, Human
uaugagaucuaguggcucugug

SEQ ID NO: 307908 - RNA, 22 nt, Human
uauuucucauaucauuucugga

SEQ ID NO: 307909 - RNA, 26 nt, Human
ucagauuaaaaaaaaaaauaacagaa

SEQ ID NO: 307910 - RNA, 22 nt, Human
ucagugccccaggcuggccagg

SEQ ID NO: 307911 - RNA, 22 nt, Human
ucauaugagaucuaguggcucu

SEQ ID NO: 307912 - RNA, 19 nt, Human
ucauugacucaguguuggg

SEQ ID NO: 307913 - RNA, 23 nt, Human
ucauugacucaguguugggggag

SEQ ID NO: 307914 - RNA, 22 nt, Human
uccaggcaguggccaaaaaagu

SEQ ID NO: 307915 - RNA, 19 nt, Human
ucccaguaaugcaacaggg

SEQ ID NO: 307916 - RNA, 20 nt, Human
uccucucaauuucuuuuucu

SEQ ID NO: 307917 - RNA, 24 nt, Human
ucuaccauaagcccuaauaacaaa

SEQ ID NO: 307918 - RNA, 26 nt, Human
ucuuacagucaugcauacucuguaau

SEQ ID NO: 307919 - RNA, 26 nt, Human
ucuucacuuuucuucucuagaguuuu

SEQ ID NO: 307920 - RNA, 22 nt, Human
ugaaaaaaaauugcuucaaaua

SEQ ID NO: 307921 - RNA, 27 nt, Human
ugacaaaacaugggaaccagaaaagga

SEQ ID NO: 307922 - RNA, 22 nt, Human
ugagaaaaaucucauugacuca

SEQ ID NO: 307923 - RNA, 22 nt, Human
ugagugacaaaacaugggaacc

SEQ ID NO: 307924 - RNA, 24 nt, Human
uggaugaugucaaccauuuaaaau

SEQ ID NO: 307925 - RNA, 21 nt, Human
uggcaaacuugcaaaggucuu

SEQ ID NO: 307926 - RNA, 21 nt, Human
uggugggcaaggcugggcugg

SEQ ID NO: 307927 - RNA, 21 nt, Human
ugugauauuucuuaaauggug

SEQ ID NO: 307928 - RNA, 25 nt, Human
ugugcacaugagugacaaaacaugg

SEQ ID NO: 307929 - RNA, 25 nt, Human
uguggccgguaucuacugguggcaa

SEQ ID NO: 307930 - RNA, 22 nt, Human
uguucuauuuguuuucuggauu

SEQ ID NO: 307931 - RNA, 23 nt, Human
uuaaaaaucagagaaaaacaacc

SEQ ID NO: 307932 - RNA, 24 nt, Human
uucucauaucauuucuggaugguc

SEQ ID NO: 307933 - RNA, 22 nt, Human
uucucuguggaaaagauuuuau

SEQ ID NO: 307934 - RNA, 21 nt, Human
uuuguuuucuggauucagggg

SEQ ID NO: 307935 - RNA, 24 nt, Human
ccucaaaaaggaaaaaaaaacaca

SEQ ID NO: 307936 - RNA, 24 nt, Human
cggcacccgaaaaaauuaaaaaag

SEQ ID NO: 307937 - RNA, 25 nt, Human
cuucauucauuccuuccacuucacu

SEQ ID NO: 307938 - RNA, 22 nt, Human
gaaaaaauuaaaaaagugccgc

SEQ ID NO: 307939 - RNA, 19 nt, Human
gcgcggcugcccgccccuc

SEQ ID NO: 307940 - RNA, 20 nt, Human
gcggcggcgcggcugcccgc

SEQ ID NO: 307941 - RNA, 22 nt, Human
gcugcccgccccucaaaaacaa

SEQ ID NO: 307942 - RNA, 21 nt, Human
uaaaaaagugccgcggcggcg

SEQ ID NO: 307943 - RNA, 22 nt, Human
ucaaaaaggaaaaaaaaacaca

SEQ ID NO: 307944 - RNA, 22 nt, Human
ucauucauuccuuccacuucac

SEQ ID NO: 307945 - RNA, 18 nt, Human
acagaagacuuggaggag

SEQ ID NO: 307946 - RNA, 23 nt, Human
accaagcccggcggacacacacc

SEQ ID NO: 307947 - RNA, 19 nt, Human
accgggagucaggcccagg

SEQ ID NO: 307948 - RNA, 24 nt, Human
accucaccuucccucgcggcccaa

SEQ ID NO: 307949 - RNA, 20 nt, Human
accuggggcggcgcaaaggc

SEQ ID NO: 307950 - RNA, 20 nt, Human
acucccccagccccuccccc

SEQ ID NO: 307951 - RNA, 18 nt, Human
agacuuggaggaggggua

SEQ ID NO: 307952 - RNA, 22 nt, Human
agaggugggacggugcugcagg

SEQ ID NO: 307953 - RNA, 22 nt, Human
agcuaggggcgggcaccugggg

SEQ ID NO: 307954 - RNA, 21 nt, Human
aggcaccaagcccggcggaca

SEQ ID NO: 307955 - RNA, 24 nt, Human
auuacucccccagccccucccccg

SEQ ID NO: 307956 - RNA, 25 nt, Human
caagcccggcggacacacaccccgg

SEQ ID NO: 307957 - RNA, 24 nt, Human
cacacaccccggcugucacgcccc

SEQ ID NO: 307958 - RNA, 21 nt, Human
caccuggggcggcgcaaaggc

SEQ ID NO: 307959 - RNA, 18 nt, Human
cacgccccggcuccgccc

SEQ ID NO: 307960 - RNA, 25 nt, Human
cacgccccggcuccgcccccgaccu

SEQ ID NO: 307961 - RNA, 24 nt, Human
cacgccuguaaucccagcacuuug

SEQ ID NO: 307962 - RNA, 22 nt, Human
ccagccccucccccgcucaccu

SEQ ID NO: 307963 - RNA, 23 nt, Human
ccggcggacacacaccccggcug

SEQ ID NO: 307964 - RNA, 18 nt, Human
ccugaauuugcuuuaaca

SEQ ID NO: 307965 - RNA, 19 nt, Human
cgcccccgaccucaccuuc

SEQ ID NO: 307966 - RNA, 22 nt, Human
cucacgccuguaaucccagcac

SEQ ID NO: 307967 - RNA, 24 nt, Human
cucacgccuguaaucccagcacuu

SEQ ID NO: 307968 - RNA, 22 nt, Human
cugucacgccccggcuccgccc

SEQ ID NO: 307969 - RNA, 21 nt, Human
gacucacgccuguaaucccag

SEQ ID NO: 307970 - RNA, 23 nt, Human
ggcgcggugacucacgccuguaa

SEQ ID NO: 307971 - RNA, 22 nt, Human
ggcgcuggggacaggaccggga

SEQ ID NO: 307972 - RNA, 24 nt, Human
ggugacucacgccuguaaucccag

SEQ ID NO: 307973 - RNA, 19 nt, Human
gucacgccccggcuccgcc

SEQ ID NO: 307974 - RNA, 20 nt, Human
gugcugcagggccaccggag

SEQ ID NO: 307975 - RNA, 18 nt, Human
ucuuggucacugaagggg

SEQ ID NO: 307976 - RNA, 22 nt, Human
ucuuuugauguuauuacucccc

SEQ ID NO: 307977 - RNA, 21 nt, Human
ugacucacgccuguaauccca

SEQ ID NO: 307978 - RNA, 22 nt, Human
ugacucacgccuguaaucccag

SEQ ID NO: 307979 - RNA, 24 nt, Human
ugacucacgccuguaaucccagca

SEQ ID NO: 307980 - RNA, 18 nt, Human
ugcugcagggccaccgga

SEQ ID NO: 307981 - RNA, 22 nt, Human
ugcugcagggccaccggaggca

SEQ ID NO: 307982 - RNA, 20 nt, Human
ugggacggugcugcagggcc

SEQ ID NO: 307983 - RNA, 21 nt, Human
ugugcaaaagagcauuucaag

SEQ ID NO: 307984 - RNA, 24 nt, Human
uuuggccgggcgcggugacucacg

SEQ ID NO: 307985 - RNA, 21 nt, Human
uuuuuuuuuuuuuuuuucauu

SEQ ID NO: 307986 - RNA, 21 nt, Human
ggagaguacagugugagauga

SEQ ID NO: 307987 - RNA, 18 nt, Human
ugagaugaggcagauaga

SEQ ID NO: 307988 - RNA, 20 nt, Human
uggagaguacagugugagau

SEQ ID NO: 307989 - RNA, 25 nt, Human
aacuucugccccggccgucgcuccc

SEQ ID NO: 307990 - RNA, 18 nt, Human
aaggcuguuuggagacag

SEQ ID NO: 307991 - RNA, 23 nt, Human
agacagggcaggugaaugcuccc

SEQ ID NO: 307992 - RNA, 23 nt, Human
agagagggaaauucagcacuggg

SEQ ID NO: 307993 - RNA, 23 nt, Human
agggagggaggguaugagagagg

SEQ ID NO: 307994 - RNA, 20 nt, Human
auggacuggccuagcuccuc

SEQ ID NO: 307995 - RNA, 19 nt, Human
cacuggguggaagguuucc

SEQ ID NO: 307996 - RNA, 21 nt, Human
cagaagagaccccccggagua

SEQ ID NO: 307997 - RNA, 18 nt, Human
cccccggaguacagcuuc

SEQ ID NO: 307998 - RNA, 20 nt, Human
ccgucgcuccccugcuccuc

SEQ ID NO: 307999 - RNA, 20 nt, Human
ccuagcuccucugcugggug

SEQ ID NO: 308000 - RNA, 22 nt, Human
ccucugggagguuggggguagg

SEQ ID NO: 308001 - RNA, 21 nt, Human
cuguuuggagacagggcaggu

SEQ ID NO: 308002 - RNA, 22 nt, Human
gagagggaaauucagcacuggg

SEQ ID NO: 308003 - RNA, 22 nt, Human
gggcaggugaaugcucccuucu

SEQ ID NO: 308004 - RNA, 24 nt, Human
ggggguaggugaggcacaaggcug

SEQ ID NO: 308005 - RNA, 20 nt, Human
uagaagggcuccugccuggc

SEQ ID NO: 308006 - RNA, 25 nt, Human
uagggagggaggguaugagagaggg

SEQ ID NO: 308007 - RNA, 19 nt, Human
ucaacuucugccccggccg

SEQ ID NO: 308008 - RNA, 25 nt, Human
ucagaagagaccccccggaguacag

SEQ ID NO: 308009 - RNA, 21 nt, Human
ucccucugggagguugggggu

SEQ ID NO: 308010 - RNA, 19 nt, Human
ucccuggaucuguugcucu

SEQ ID NO: 308011 - RNA, 25 nt, Human
ucccuggaucuguugcucuuuuucc

SEQ ID NO: 308012 - RNA, 18 nt, Human
ugagagagggaaauucag

SEQ ID NO: 308013 - RNA, 23 nt, Human
uggccuagcuccucugcugggug

SEQ ID NO: 308014 - RNA, 24 nt, Human
ugggugacaaaugcagauggacug

SEQ ID NO: 308015 - RNA, 18 nt, Human
uguucugcacuccugcuc

SEQ ID NO: 308016 - RNA, 19 nt, Human
uucagaagagaccccccgg

SEQ ID NO: 308017 - RNA, 19 nt, Human
uucugcacuccugcucccc

SEQ ID NO: 308018 - RNA, 24 nt, Human
uugguuaagcacggaguugaggug

SEQ ID NO: 308019 - RNA, 22 nt, Human
uuuuuuuuuuuuuuuugcuaau

SEQ ID NO: 308020 - RNA, 18 nt, Human
uuuuuuuuuuuuuuuuug

SEQ ID NO: 308021 - RNA, 20 nt, Human
uuuuuuuuuuuuuuuuugcu

SEQ ID NO: 308022 - RNA, 23 nt, Human
uuuuuuuuuuuuuuuuuugcuaa

SEQ ID NO: 308023 - RNA, 18 nt, Human
aacccagacaauccugca

SEQ ID NO: 308024 - RNA, 23 nt, Human
aaggauucuugugcaaaugcuuu

SEQ ID NO: 308025 - RNA, 21 nt, Human
aaguguugggauuacaggcau

SEQ ID NO: 308026 - RNA, 23 nt, Human
aaguguugggauuacaggcauga

SEQ ID NO: 308027 - RNA, 26 nt, Human
aaguguugggauuacaggcaugagcc

SEQ ID NO: 308028 - RNA, 18 nt, Human
aauagcugggauuacagg

SEQ ID NO: 308029 - RNA, 23 nt, Human
aauagcugggauuacaggcaccc

SEQ ID NO: 308030 - RNA, 19 nt, Human
acacaggcacagcugcccc

SEQ ID NO: 308031 - RNA, 22 nt, Human
acagagugucacucuguugccc

SEQ ID NO: 308032 - RNA, 24 nt, Human
acaggggaaacagagauggcacag

SEQ ID NO: 308033 - RNA, 19 nt, Human
acccaagaaggauuuaugg

SEQ ID NO: 308034 - RNA, 20 nt, Human
accuggccucacucagggag

SEQ ID NO: 308035 - RNA, 18 nt, Human
acgagguuuugccauguu

SEQ ID NO: 308036 - RNA, 20 nt, Human
acgagguuuugccauguugg

SEQ ID NO: 308037 - RNA, 24 nt, Human
acucuguugcccaggcuggagugc

SEQ ID NO: 308038 - RNA, 22 nt, Human
agaaggcauugguagaggguuc

SEQ ID NO: 308039 - RNA, 23 nt, Human
agaccagggcaguauuuagggga

SEQ ID NO: 308040 - RNA, 21 nt, Human
agagaggugguuccaggagag

SEQ ID NO: 308041 - RNA, 24 nt, Human
agagguggggcagggggaaggcag

SEQ ID NO: 308042 - RNA, 18 nt, Human
agccuccugaauagcugg

SEQ ID NO: 308043 - RNA, 25 nt, Human
aggcuggagugcagugucgcgaucu

SEQ ID NO: 308044 - RNA, 22 nt, Human
aggcuucacccaagaaggauuu

SEQ ID NO: 308045 - RNA, 19 nt, Human
agggagaggggccuugggc

SEQ ID NO: 308046 - RNA, 20 nt, Human
agggggugaggaaggacaag

SEQ ID NO: 308047 - RNA, 20 nt, Human
aggggucagaccaagcagag

SEQ ID NO: 308048 - RNA, 28 nt, Human
aggggucagaccaagcagagaggugguu

SEQ ID NO: 308049 - RNA, 22 nt, Human
agguccaagugauucuccugcc

SEQ ID NO: 308050 - RNA, 23 nt, Human
agguccaagugauucuccugccu

SEQ ID NO: 308051 - RNA, 20 nt, Human
agguggggaugccagagcuc

SEQ ID NO: 308052 - RNA, 22 nt, Human
aguagagacgagguuuugccau

SEQ ID NO: 308053 - RNA, 24 nt, Human
agugauucuccugccucagccucc

SEQ ID NO: 308054 - RNA, 19 nt, Human
agugcagugucgcgaucug

SEQ ID NO: 308055 - RNA, 18 nt, Human
auagcugggauuacaggc

SEQ ID NO: 308056 - RNA, 24 nt, Human
auuuuuguauuuuuaguagagacg

SEQ ID NO: 308057 - RNA, 22 nt, Human
caagugauucuccugccucagc

SEQ ID NO: 308058 - RNA, 23 nt, Human
cacaccaucugcugcaaccucug

SEQ ID NO: 308059 - RNA, 21 nt, Human
cacagcaaaauugagaaggua

SEQ ID NO: 308060 - RNA, 19 nt, Human
cacaucucagaacugcuca

SEQ ID NO: 308061 - RNA, 21 nt, Human
cacaugagucaccacaucuca

SEQ ID NO: 308062 - RNA, 18 nt, Human
cacccaccacgaugccug

SEQ ID NO: 308063 - RNA, 24 nt, Human
cacccugagccaaugccuggaggc

SEQ ID NO: 308064 - RNA, 18 nt, Human
caccuggccucacucagg

SEQ ID NO: 308065 - RNA, 24 nt, Human
cacgaugccuggcuaauuuuugua

SEQ ID NO: 308066 - RNA, 22 nt, Human
cacucuguugcccaggcuggag

SEQ ID NO: 308067 - RNA, 21 nt, Human
cagaccccucccccaccccga

SEQ ID NO: 308068 - RNA, 23 nt, Human
cagcaggugggggacagcggcag

SEQ ID NO: 308069 - RNA, 20 nt, Human
cagcggcagaccccuccccc

SEQ ID NO: 308070 - RNA, 22 nt, Human
cagcggcagaccccucccccac

SEQ ID NO: 308071 - RNA, 24 nt, Human
cagcugaggcacagauggugccaa

SEQ ID NO: 308072 - RNA, 24 nt, Human
caggcacccaccacgaugccuggc

SEQ ID NO: 308073 - RNA, 22 nt, Human
cagggcaguauuuaggggaagg

SEQ ID NO: 308074 - RNA, 24 nt, Human
cauguugggcaggcuggucuugaa

SEQ ID NO: 308075 - RNA, 19 nt, Human
ccaagugauucuccugccu

SEQ ID NO: 308076 - RNA, 20 nt, Human
ccaccaugccuggccuagac

SEQ ID NO: 308077 - RNA, 22 nt, Human
ccacccucagaggacacagcua

SEQ ID NO: 308078 - RNA, 18 nt, Human
ccagacaauccugcacag

SEQ ID NO: 308079 - RNA, 18 nt, Human
ccagagugugggugacug

SEQ ID NO: 308080 - RNA, 19 nt, Human
ccaggagaggccuggccuc

SEQ ID NO: 308081 - RNA, 22 nt, Human
ccaggugaucugccugccucag

SEQ ID NO: 308082 - RNA, 18 nt, Human
ccauccacccucagagga

SEQ ID NO: 308083 - RNA, 19 nt, Human
ccauguugggcaggcuggu

SEQ ID NO: 308084 - RNA, 21 nt, Human
ccauguugggcaggcuggucu

SEQ ID NO: 308085 - RNA, 24 nt, Human
cccaagaaggauuuauggagcucc

SEQ ID NO: 308086 - RNA, 27 nt, Human
cccagcgcccacaguccuucauuccua

SEQ ID NO: 308087 - RNA, 23 nt, Human
cccccacacaggcacagcugccc

SEQ ID NO: 308088 - RNA, 23 nt, Human
cccuaaguguugggauuacaggc

SEQ ID NO: 308089 - RNA, 24 nt, Human
cccuaaguguugggauuacaggca

SEQ ID NO: 308090 - RNA, 23 nt, Human
cccuuguaauucacccugagcca

SEQ ID NO: 308091 - RNA, 20 nt, Human
cccuuugacccugaggaggu

SEQ ID NO: 308092 - RNA, 22 nt, Human
ccgaugcuuugguccaaacacc

SEQ ID NO: 308093 - RNA, 19 nt, Human
ccuaaguguugggauuaca

SEQ ID NO: 308094 - RNA, 22 nt, Human
ccuaaguguugggauuacaggc

SEQ ID NO: 308095 - RNA, 24 nt, Human
ccuaaguguugggauuacaggcau

SEQ ID NO: 308096 - RNA, 22 nt, Human
ccucagccacccuaaguguugg

SEQ ID NO: 308097 - RNA, 24 nt, Human
ccucccagguccaagugauucucc

SEQ ID NO: 308098 - RNA, 23 nt, Human
ccugaauagcugggauuacaggc

SEQ ID NO: 308099 - RNA, 24 nt, Human
ccugaauagcugggauuacaggca

SEQ ID NO: 308100 - RNA, 21 nt, Human
ccugaccccaggugaucugcc

SEQ ID NO: 308101 - RNA, 23 nt, Human
ccugaccccaggugaucugccug

SEQ ID NO: 308102 - RNA, 23 nt, Human
ccuggccucagcccgauccgguu

SEQ ID NO: 308103 - RNA, 19 nt, Human
ccuugcuugggcuucuccc

SEQ ID NO: 308104 - RNA, 20 nt, Human
cgagguuuugccauguuggg

SEQ ID NO: 308105 - RNA, 22 nt, Human
cuaaguguugggauuacaggca

SEQ ID NO: 308106 - RNA, 25 nt, Human
cucacgccauucacaggcaugaauu

SEQ ID NO: 308107 - RNA, 22 nt, Human
cucacugaaaccucugccuccc

SEQ ID NO: 308108 - RNA, 23 nt, Human
cucacugaaaccucugccuccca

SEQ ID NO: 308109 - RNA, 24 nt, Human
cucacugaaaccucugccucccag

SEQ ID NO: 308110 - RNA, 19 nt, Human
cucccagguccaagugauu

SEQ ID NO: 308111 - RNA, 24 nt, Human
cuccugaauagcugggauuacagg

SEQ ID NO: 308112 - RNA, 26 nt, Human
cuccugaccccaggugaucugccugc

SEQ ID NO: 308113 - RNA, 19 nt, Human
cucuuggugggagaggugg

SEQ ID NO: 308114 - RNA, 20 nt, Human
cucuuggugggagagguggg

SEQ ID NO: 308115 - RNA, 18 nt, Human
cugaaaccucugccuccc

SEQ ID NO: 308116 - RNA, 23 nt, Human
cugaaaccucugccucccagguc

SEQ ID NO: 308117 - RNA, 19 nt, Human
cugagggaguacuuucugg

SEQ ID NO: 308118 - RNA, 20 nt, Human
cugcaaccucuguguaucca

SEQ ID NO: 308119 - RNA, 23 nt, Human
cugccucagccuccugaauagcu

SEQ ID NO: 308120 - RNA, 21 nt, Human
cuucuugguucugguguugcu

SEQ ID NO: 308121 - RNA, 21 nt, Human
cuugggcuucucccaagauuc

SEQ ID NO: 308122 - RNA, 24 nt, Human
gaccccaggugaucugccugccuc

SEQ ID NO: 308123 - RNA, 24 nt, Human
gacugugcaggguccccagugccu

SEQ ID NO: 308124 - RNA, 19 nt, Human
gagaggccuggccucagcc

SEQ ID NO: 308125 - RNA, 22 nt, Human
gagcaccuaguaugugggaaaa

SEQ ID NO: 308126 - RNA, 24 nt, Human
gagccaaugccuggaggcaggaga

SEQ ID NO: 308127 - RNA, 23 nt, Human
gagcuggcaauuguacccuccau

SEQ ID NO: 308128 - RNA, 18 nt, Human
gauuacaggcaugagcca

SEQ ID NO: 308129 - RNA, 21 nt, Human
gauuacaggcaugagccacca

SEQ ID NO: 308130 - RNA, 24 nt, Human
gauuacaggcaugagccaccaugc

SEQ ID NO: 308131 - RNA, 20 nt, Human
gccauguugggcaggcuggu

SEQ ID NO: 308132 - RNA, 24 nt, Human
gccauguugggcaggcuggucuug

SEQ ID NO: 308133 - RNA, 21 nt, Human
gcccaggcuggagugcagugu

SEQ ID NO: 308134 - RNA, 21 nt, Human
gcucacugaaaccucugccuc

SEQ ID NO: 308135 - RNA, 23 nt, Human
gcuggucuugaacuccugacccc

SEQ ID NO: 308136 - RNA, 23 nt, Human
ggaacaggguagagggugugggc

SEQ ID NO: 308137 - RNA, 19 nt, Human
ggaaccaggaaaacuggau

SEQ ID NO: 308138 - RNA, 20 nt, Human
ggaaggaggcagauuggagc

SEQ ID NO: 308139 - RNA, 24 nt, Human
ggacagcggcagaccccuccccca

SEQ ID NO: 308140 - RNA, 19 nt, Human
ggaggagggagugagcccu

SEQ ID NO: 308141 - RNA, 24 nt, Human
ggauuacaggcaugagccaccaug

SEQ ID NO: 308142 - RNA, 22 nt, Human
ggcucacgccauucacaggcau

SEQ ID NO: 308143 - RNA, 18 nt, Human
ggcuggucuugaacuccu

SEQ ID NO: 308144 - RNA, 18 nt, Human
gggaaaacaggggaaaca

SEQ ID NO: 308145 - RNA, 23 nt, Human
gggagacuuccagaaaguagccc

SEQ ID NO: 308146 - RNA, 23 nt, Human
gguaucccuaccuggaguggugc

SEQ ID NO: 308147 - RNA, 23 nt, Human
guagagacgagguuuugccaugu

SEQ ID NO: 308148 - RNA, 19 nt, Human
gucuaggcuucacccaaga

SEQ ID NO: 308149 - RNA, 24 nt, Human
gugacagguggccucuugguggga

SEQ ID NO: 308150 - RNA, 24 nt, Human
gugaucugccugccucagccaccc

SEQ ID NO: 308151 - RNA, 24 nt, Human
gugauucuccugccucagccuccu

SEQ ID NO: 308152 - RNA, 23 nt, Human
guuuuagguucacagcaaaauug

SEQ ID NO: 308153 - RNA, 21 nt, Human
uaaaagauagagccacaugga

SEQ ID NO: 308154 - RNA, 22 nt, Human
uaagcggcagagccaugaagca

SEQ ID NO: 308155 - RNA, 24 nt, Human
uaauuuuuguauuuuuaguagaga

SEQ ID NO: 308156 - RNA, 22 nt, Human
uacaggcaugagccaccaugcc

SEQ ID NO: 308157 - RNA, 22 nt, Human
uagagacgagguuuugccaugu

SEQ ID NO: 308158 - RNA, 24 nt, Human
uaguagagacgagguuuugccaug

SEQ ID NO: 308159 - RNA, 18 nt, Human
uauggagcuccuucuugg

SEQ ID NO: 308160 - RNA, 19 nt, Human
ucacaugagucaccacauc

SEQ ID NO: 308161 - RNA, 22 nt, Human
ucacucuguugcccaggcugga

SEQ ID NO: 308162 - RNA, 24 nt, Human
ucacucuguugcccaggcuggagu

SEQ ID NO: 308163 - RNA, 24 nt, Human
ucacugaaaccucugccucccagg

SEQ ID NO: 308164 - RNA, 25 nt, Human
ucacugaaaccucugccucccaggu

SEQ ID NO: 308165 - RNA, 21 nt, Human
ucagaacugcucagucagcug

SEQ ID NO: 308166 - RNA, 22 nt, Human
ucagcccccuggcuggaaacag

SEQ ID NO: 308167 - RNA, 19 nt, Human
ucagggagaggggccuugg

SEQ ID NO: 308168 - RNA, 25 nt, Human
ucaguagccccuuguaauucacccu

SEQ ID NO: 308169 - RNA, 20 nt, Human
uccaaacaccaccucugagg

SEQ ID NO: 308170 - RNA, 23 nt, Human
uccaagugauucuccugccucag

SEQ ID NO: 308171 - RNA, 24 nt, Human
uccaagugauucuccugccucagc

SEQ ID NO: 308172 - RNA, 22 nt, Human
uccaggagaggccuggccucag

SEQ ID NO: 308173 - RNA, 21 nt, Human
ucccagguccaagugauucuc

SEQ ID NO: 308174 - RNA, 24 nt, Human
ucccagguccaagugauucuccug

SEQ ID NO: 308175 - RNA, 25 nt, Human
uccccagugccuaugagaggcuuua

SEQ ID NO: 308176 - RNA, 24 nt, Human
uccugaauagcugggauuacaggc

SEQ ID NO: 308177 - RNA, 20 nt, Human
ucuaggcuucacccaagaag

SEQ ID NO: 308178 - RNA, 21 nt, Human
ucucccaagauucccauccac

SEQ ID NO: 308179 - RNA, 24 nt, Human
ucuccugccucagccuccugaaua

SEQ ID NO: 308180 - RNA, 18 nt, Human
ucuguugcccaggcugga

SEQ ID NO: 308181 - RNA, 24 nt, Human
ucuguugcccaggcuggagugcag

SEQ ID NO: 308182 - RNA, 19 nt, Human
ugaaaccucugccucccag

SEQ ID NO: 308183 - RNA, 18 nt, Human
ugaccccaggugaucugc

SEQ ID NO: 308184 - RNA, 19 nt, Human
ugaccccaggugaucugcc

SEQ ID NO: 308185 - RNA, 20 nt, Human
ugacugcaggugccucagcc

SEQ ID NO: 308186 - RNA, 18 nt, Human
ugagcaccuaguaugugg

SEQ ID NO: 308187 - RNA, 23 nt, Human
ugagccaaugccuggaggcagga

SEQ ID NO: 308188 - RNA, 27 nt, Human
ugaggagguggggaucagucgugauga

SEQ ID NO: 308189 - RNA, 21 nt, Human
ugagggaaccaggaaaacugg

SEQ ID NO: 308190 - RNA, 21 nt, Human
ugagggcucccuugcuugggc

SEQ ID NO: 308191 - RNA, 21 nt, Human
ugagguggggaugccagagcu

SEQ ID NO: 308192 - RNA, 20 nt, Human
ugauucuccugccucagccu

SEQ ID NO: 308193 - RNA, 24 nt, Human
ugccauguugggcaggcuggucuu

SEQ ID NO: 308194 - RNA, 18 nt, Human
ugcccaggcuggagugca

SEQ ID NO: 308195 - RNA, 21 nt, Human
ugcccaggcuggagugcagug

SEQ ID NO: 308196 - RNA, 21 nt, Human
ugcccaggcuggagugcagug

SEQ ID NO: 308197 - RNA, 23 nt, Human
ugccucagccacccuaaguguug

SEQ ID NO: 308198 - RNA, 24 nt, Human
ugccucagccacccuaaguguugg

SEQ ID NO: 308199 - RNA, 19 nt, Human
ugccucagcccccuggcug

SEQ ID NO: 308200 - RNA, 24 nt, Human
ugccucagcccccuggcuggaaac

SEQ ID NO: 308201 - RNA, 31 nt, Human
ugccucagcccccuggcuggaaacagcuagg

SEQ ID NO: 308202 - RNA, 27 nt, Human
ugccucagccuccugaauagcugggau

SEQ ID NO: 308203 - RNA, 18 nt, Human
ugccuggagccacaagac

SEQ ID NO: 308204 - RNA, 21 nt, Human
ugccuggagccacaagaccug

SEQ ID NO: 308205 - RNA, 26 nt, Human
ugccuggaggcaggagaaaguaccau

SEQ ID NO: 308206 - RNA, 24 nt, Human
uggacagaaagaucaauauugccc

SEQ ID NO: 308207 - RNA, 19 nt, Human
uggagugcagugucgcgau

SEQ ID NO: 308208 - RNA, 23 nt, Human
uggagugcagugucgcgaucugg

SEQ ID NO: 308209 - RNA, 20 nt, Human
uggccaugagugacaggugg

SEQ ID NO: 308210 - RNA, 20 nt, Human
uggcuggaaacagcuagcca

SEQ ID NO: 308211 - RNA, 20 nt, Human
uggcuggaaacagcuagcca

SEQ ID NO: 308212 - RNA, 25 nt, Human
ugggaaaacaggggaaacagagaug

SEQ ID NO: 308213 - RNA, 19 nt, Human
ugggagcuuggaggaggga

SEQ ID NO: 308214 - RNA, 19 nt, Human
ugggauuacaggcacccac

SEQ ID NO: 308215 - RNA, 21 nt, Human
ugggauuacaggcacccacca

SEQ ID NO: 308216 - RNA, 18 nt, Human
ugggauuacaggcaugag

SEQ ID NO: 308217 - RNA, 22 nt, Human
ugggauuacaggcaugagccac

SEQ ID NO: 308218 - RNA, 23 nt, Human
ugggauuacaggcaugagccacc

SEQ ID NO: 308219 - RNA, 24 nt, Human
ugggauuacaggcaugagccacca

SEQ ID NO: 308220 - RNA, 25 nt, Human
ugggauuacaggcaugagccaccau

SEQ ID NO: 308221 - RNA, 24 nt, Human
ugggcaggcuggucuugaacuccu

SEQ ID NO: 308222 - RNA, 24 nt, Human
uggggcagggggaaggcagcuccc

SEQ ID NO: 308223 - RNA, 18 nt, Human
ugggggacagcggcagac

SEQ ID NO: 308224 - RNA, 24 nt, Human
uggugggagagguggggcaggggg

SEQ ID NO: 308225 - RNA, 23 nt, Human
ugguuccaggagaggccuggccu

SEQ ID NO: 308226 - RNA, 24 nt, Human
ugucacucuguugcccaggcugga

SEQ ID NO: 308227 - RNA, 18 nt, Human
ugugcaggguccccagug

SEQ ID NO: 308228 - RNA, 23 nt, Human
ugugggaaaacaggggaaacaga

SEQ ID NO: 308229 - RNA, 24 nt, Human
uuaguagagacgagguuuugccau

SEQ ID NO: 308230 - RNA, 24 nt, Human
uucagguuagauacugaggugggg

SEQ ID NO: 308231 - RNA, 19 nt, Human
uucccccacacaggcacag

SEQ ID NO: 308232 - RNA, 19 nt, Human
uucuugugcaaaugcuuua

SEQ ID NO: 308233 - RNA, 24 nt, Human
uugcccaggcuggagugcaguguc

SEQ ID NO: 308234 - RNA, 23 nt, Human
uuuugccauguugggcaggcugg

SEQ ID NO: 308235 - RNA, 21 nt, Human
uuuuuaguagagacgagguuu

SEQ ID NO: 308236 - RNA, 20 nt, Human
uuuuuguauuuuuaguagag

SEQ ID NO: 308237 - RNA, 19 nt, Human
aaaaagaacacacauaaga

SEQ ID NO: 308238 - RNA, 20 nt, Human
aaaagaacacacauaagaaa

SEQ ID NO: 308239 - RNA, 25 nt, Human
aaagaaaaaaaauuuuuaaaaagaa

SEQ ID NO: 308240 - RNA, 23 nt, Human
agaaaaaaaauuuuuaaaaagaa

SEQ ID NO: 308241 - RNA, 19 nt, Human
auguauguauauauaugca

SEQ ID NO: 308242 - RNA, 19 nt, Human
auguauguauauauaugca

SEQ ID NO: 308243 - RNA, 21 nt, Human
caggaaguucauacugacuga

SEQ ID NO: 308244 - RNA, 19 nt, Human
cugaaaauguagcuaagua

SEQ ID NO: 308245 - RNA, 25 nt, Human
gaaaaaaaauuuuuaaaaagaacac

SEQ ID NO: 308246 - RNA, 22 nt, Human
uaaaaagaacacacauaagaaa

SEQ ID NO: 308247 - RNA, 18 nt, Human
uauguauauauaugcaua

SEQ ID NO: 308248 - RNA, 20 nt, Human
uauguauauauaugcauaua

SEQ ID NO: 308249 - RNA, 22 nt, Human
uauguauauauaugcauauaua

SEQ ID NO: 308250 - RNA, 22 nt, Human
uauuucauguauguauauauau

SEQ ID NO: 308251 - RNA, 20 nt, Human
ucaguacgacuaucuguacu

SEQ ID NO: 308252 - RNA, 23 nt, Human
ugacugaaaauguagcuaaguau

SEQ ID NO: 308253 - RNA, 18 nt, Human
uguauauauaugcauaua

SEQ ID NO: 308254 - RNA, 20 nt, Human
uguauauauaugcauauaua

SEQ ID NO: 308255 - RNA, 19 nt, Human
uguauguauauauaugcau

SEQ ID NO: 308256 - RNA, 23 nt, Human
uguauguauauauaugcauauau

SEQ ID NO: 308257 - RNA, 20 nt, Human
uucaauuacaggaaauguuu

SEQ ID NO: 308258 - RNA, 24 nt, Human
accccacugcaaacugcugaggcg

SEQ ID NO: 308259 - RNA, 18 nt, Human
caacuacucaagguagcg

SEQ ID NO: 308260 - RNA, 21 nt, Human
cacaaaugggcuuggccuccu

SEQ ID NO: 308261 - RNA, 24 nt, Human
caccugagcccgaggcucugaagc

SEQ ID NO: 308262 - RNA, 19 nt, Human
cacugcaaacugcugaggc

SEQ ID NO: 308263 - RNA, 21 nt, Human
cagcagccagggaaugaauga

SEQ ID NO: 308264 - RNA, 21 nt, Human
cgaggcucugaagcacugcgu

SEQ ID NO: 308265 - RNA, 19 nt, Human
cugcgugaugacaguuccc

SEQ ID NO: 308266 - RNA, 20 nt, Human
gcagaagggaaaacaggcac

SEQ ID NO: 308267 - RNA, 22 nt, Human
gccuccuuaccccacugcaaac

SEQ ID NO: 308268 - RNA, 23 nt, Human
gcugaggcgcaagggagcuccca

SEQ ID NO: 308269 - RNA, 19 nt, Human
ggaaaacaggcacaggccg

SEQ ID NO: 308270 - RNA, 20 nt, Human
uagggguggcaggggccccg

SEQ ID NO: 308271 - RNA, 24 nt, Human
uaucaagugcuccaacuacucaag

SEQ ID NO: 308272 - RNA, 21 nt, Human
ugagaguuagggguggcaggg

SEQ ID NO: 308273 - RNA, 19 nt, Human
ugcaacucagcagccaggg

SEQ ID NO: 308274 - RNA, 18 nt, Human
uggcaggggccccggcca

SEQ ID NO: 308275 - RNA, 24 nt, Human
uucccaccugcaacucagcagcca

SEQ ID NO: 308276 - RNA, 23 nt, Human
uuuugggugauuacacaaauggg

SEQ ID NO: 308277 - RNA, 19 nt, Human
uuuuuuuuuuuuuuuuugu

SEQ ID NO: 308278 - RNA, 20 nt, Human
uuuuuuuuuuuuuuuuuugg

SEQ ID NO: 308279 - RNA, 22 nt, Human
acgccuucuucugaaugacgcu

SEQ ID NO: 308280 - RNA, 19 nt, Human
agaaaauucucaguccucc

SEQ ID NO: 308281 - RNA, 21 nt, Human
aucagucaaucagcaagcauu

SEQ ID NO: 308282 - RNA, 19 nt, Human
auucucaguccuccugagc

SEQ ID NO: 308283 - RNA, 19 nt, Human
caaaaucacagucuagcug

SEQ ID NO: 308284 - RNA, 20 nt, Human
cagaaaauucucaguccucc

SEQ ID NO: 308285 - RNA, 24 nt, Human
ccaaagcuucugugguccuccugc

SEQ ID NO: 308286 - RNA, 19 nt, Human
cccacagugcccuggaagc

SEQ ID NO: 308287 - RNA, 24 nt, Human
cccacagugcccuggaagcugagg

SEQ ID NO: 308288 - RNA, 25 nt, Human
cccccugugggaggaggucgcgggc

SEQ ID NO: 308289 - RNA, 20 nt, Human
ccuccugguccugagcaggg

SEQ ID NO: 308290 - RNA, 18 nt, Human
ccugagcagggccaaccu

SEQ ID NO: 308291 - RNA, 19 nt, Human
ccugagccugggucugggg

SEQ ID NO: 308292 - RNA, 20 nt, Human
cgcgggugaagacugcgggg

SEQ ID NO: 308293 - RNA, 20 nt, Human
cucagagcuccacuuggcug

SEQ ID NO: 308294 - RNA, 18 nt, Human
cuccugagccugggucug

SEQ ID NO: 308295 - RNA, 21 nt, Human
cuggggcgugugcgcaugcgc

SEQ ID NO: 308296 - RNA, 20 nt, Human
cugguccugagcagggccaa

SEQ ID NO: 308297 - RNA, 20 nt, Human
gaaggcauuggucugaacua

SEQ ID NO: 308298 - RNA, 21 nt, Human
gaccaacaggcccacagugcc

SEQ ID NO: 308299 - RNA, 19 nt, Human
gagcaguggaaggcauugg

SEQ ID NO: 308300 - RNA, 23 nt, Human
gauagcccaugauuuaagcccaa

SEQ ID NO: 308301 - RNA, 23 nt, Human
gcaguggaaggcauuggucugaa

SEQ ID NO: 308302 - RNA, 25 nt, Human
ggaggcuugggcuccggaauccggu

SEQ ID NO: 308303 - RNA, 18 nt, Human
ggcgugugcgcaugcgcg

SEQ ID NO: 308304 - RNA, 19 nt, Human
uaucacauucauucuggcc

SEQ ID NO: 308305 - RNA, 23 nt, Human
uauugagcacuuguuguauucuc

SEQ ID NO: 308306 - RNA, 25 nt, Human
ucaaggccaugaagcguguggcuga

SEQ ID NO: 308307 - RNA, 22 nt, Human
uccaggaucucccgagggaccu

SEQ ID NO: 308308 - RNA, 22 nt, Human
ucucagagcuccacuuggcugu

SEQ ID NO: 308309 - RNA, 18 nt, Human
ucucccgagggaccugca

SEQ ID NO: 308310 - RNA, 18 nt, Human
ugaagcguguggcugaag

SEQ ID NO: 308311 - RNA, 23 nt, Human
ugcuccagcuccaggaucucccg

SEQ ID NO: 308312 - RNA, 22 nt, Human
ugcuccggaauccggugcggag

SEQ ID NO: 308313 - RNA, 19 nt, Human
uggagcuugugcuccggaa

SEQ ID NO: 308314 - RNA, 20 nt, Human
ugggaggaggucgcgggcug

SEQ ID NO: 308315 - RNA, 21 nt, Human
ugggaggaggucgcgggcugg

SEQ ID NO: 308316 - RNA, 18 nt, Human
ugucagacacucaugcuc

SEQ ID NO: 308317 - RNA, 19 nt, Human
ugugcgcaugcgcggugga

SEQ ID NO: 308318 - RNA, 22 nt, Human
uucucaguccuccugagccugg

SEQ ID NO: 308319 - RNA, 21 nt, Human
aaaaacagaacaaaagucuug

SEQ ID NO: 308320 - RNA, 25 nt, Human
aaacagaacaaaagucuuggucugg

SEQ ID NO: 308321 - RNA, 22 nt, Human
aacagaacaaaagucuuggucu

SEQ ID NO: 308322 - RNA, 20 nt, Human
aagaaaagagacacagccaa

SEQ ID NO: 308323 - RNA, 19 nt, Human
acaguguggcccugggggu

SEQ ID NO: 308324 - RNA, 21 nt, Human
accagagucacucuccuggga

SEQ ID NO: 308325 - RNA, 19 nt, Human
acccuggagacccgggucu

SEQ ID NO: 308326 - RNA, 19 nt, Human
agaaaagagacacagccaa

SEQ ID NO: 308327 - RNA, 24 nt, Human
agaaaagagacacagccaacccug

SEQ ID NO: 308328 - RNA, 25 nt, Human
agaaaagagacacagccaacccuga

SEQ ID NO: 308329 - RNA, 20 nt, Human
agaacaaaagucuuggucug

SEQ ID NO: 308330 - RNA, 28 nt, Human
agaagaaaagagacacagccaacccuga

SEQ ID NO: 308331 - RNA, 20 nt, Human
cagagaagaaaagagacaca

SEQ ID NO: 308332 - RNA, 21 nt, Human
cccucagaaguggaggccuag

SEQ ID NO: 308333 - RNA, 21 nt, Human
cccugaguuggaggagagcuc

SEQ ID NO: 308334 - RNA, 25 nt, Human
ccuagggacccugggacccuaccaa

SEQ ID NO: 308335 - RNA, 28 nt, Human
ccuaugaccagagucacucuccugggac

SEQ ID NO: 308336 - RNA, 21 nt, Human
cgagaaagacugaggucugug

SEQ ID NO: 308337 - RNA, 18 nt, Human
cucgcgggcuccccgucu

SEQ ID NO: 308338 - RNA, 18 nt, Human
cuuaggagccucucucag

SEQ ID NO: 308339 - RNA, 20 nt, Human
cuucgagaaagacugagguc

SEQ ID NO: 308340 - RNA, 24 nt, Human
gaggguacaguguggcccuggggg

SEQ ID NO: 308341 - RNA, 19 nt, Human
gagucacucuccugggacu

SEQ ID NO: 308342 - RNA, 24 nt, Human
ggaggguacaguguggcccugggg

SEQ ID NO: 308343 - RNA, 21 nt, Human
ggguacaguguggcccugggg

SEQ ID NO: 308344 - RNA, 18 nt, Human
guacaguguggcccuggg

SEQ ID NO: 308345 - RNA, 19 nt, Human
guggcccuggggguccgcc

SEQ ID NO: 308346 - RNA, 23 nt, Human
gugguggugaugauaaucugauc

SEQ ID NO: 308347 - RNA, 18 nt, Human
uaagugcaucucaggaaa

SEQ ID NO: 308348 - RNA, 18 nt, Human
uacccauacaccagauuu

SEQ ID NO: 308349 - RNA, 24 nt, Human
uagaaaaacagaacaaaagucuug

SEQ ID NO: 308350 - RNA, 26 nt, Human
uagaaaaacagaacaaaagucuuggu

SEQ ID NO: 308351 - RNA, 24 nt, Human
uccugggacucgcuggaggguaca

SEQ ID NO: 308352 - RNA, 18 nt, Human
uccuugggcagacccugg

SEQ ID NO: 308353 - RNA, 20 nt, Human
ucucgcgggcuccccgucuc

SEQ ID NO: 308354 - RNA, 19 nt, Human
ugaguuggaggagagcucu

SEQ ID NO: 308355 - RNA, 21 nt, Human
ugaguuggaggagagcucuug

SEQ ID NO: 308356 - RNA, 25 nt, Human
uggagacccgggucucgcgggcucc

SEQ ID NO: 308357 - RNA, 20 nt, Human
uggagggugguggugaugau

SEQ ID NO: 308358 - RNA, 20 nt, Human
uugcguaaaauucucuggag

SEQ ID NO: 308359 - RNA, 19 nt, Human
caccgcgcaccaacgcgac

SEQ ID NO: 308360 - RNA, 24 nt, Human
ccgcgcaccaacgcgacccaagcg

SEQ ID NO: 308361 - RNA, 25 nt, Human
cgcgacccaagcgcuccaaacccga

SEQ ID NO: 308362 - RNA, 23 nt, Human
cggagcugcucgcgggaacuggg

SEQ ID NO: 308363 - RNA, 23 nt, Human
gcgcuccaaacccgacugcuucu

SEQ ID NO: 308364 - RNA, 18 nt, Human
ggaacuggggucccuggg

SEQ ID NO: 308365 - RNA, 21 nt, Human
aaacaacuaagaauccucuca

SEQ ID NO: 308366 - RNA, 18 nt, Human
aacuaagaauccucucag

SEQ ID NO: 308367 - RNA, 18 nt, Human
aagcacccggccccgccg

SEQ ID NO: 308368 - RNA, 18 nt, Human
aagcccuuuccuuuuccc

SEQ ID NO: 308369 - RNA, 22 nt, Human
aaggccacauuuuaacuauaug

SEQ ID NO: 308370 - RNA, 19 nt, Human
acccggccccgccgcgcgg

SEQ ID NO: 308371 - RNA, 21 nt, Human
agaauccucucagaagcccuu

SEQ ID NO: 308372 - RNA, 18 nt, Human
agcccagagcccuggaga

SEQ ID NO: 308373 - RNA, 22 nt, Human
agcucuacuccuuuaaauccaa

SEQ ID NO: 308374 - RNA, 20 nt, Human
aucaaaacccaucugauuug

SEQ ID NO: 308375 - RNA, 20 nt, Human
aucaguugagagcccagaac

SEQ ID NO: 308376 - RNA, 21 nt, Human
auuuagaaucccagaaagucc

SEQ ID NO: 308377 - RNA, 27 nt, Human
caaugcauaauuuaccccuuuuaagaa

SEQ ID NO: 308378 - RNA, 18 nt, Human
cacugggcucuccgggag

SEQ ID NO: 308379 - RNA, 19 nt, Human
cagagcccuggagacccac

SEQ ID NO: 308380 - RNA, 25 nt, Human
ccaccgcugucuccacagugaaccg

SEQ ID NO: 308381 - RNA, 29 nt, Human
ccacuccgccaccgcugucuccacaguga

SEQ ID NO: 308382 - RNA, 23 nt, Human
cccaauucacauucuaauggcau

SEQ ID NO: 308383 - RNA, 24 nt, Human
cccagagcccuggagacccacucc

SEQ ID NO: 308384 - RNA, 20 nt, Human
ccccucauauacaagauuaa

SEQ ID NO: 308385 - RNA, 19 nt, Human
cccgccgcgcggaagcgga

SEQ ID NO: 308386 - RNA, 19 nt, Human
ccuccgcgccccaccccuc

SEQ ID NO: 308387 - RNA, 22 nt, Human
ccuccgggggccuugccagccc

SEQ ID NO: 308388 - RNA, 21 nt, Human
cggaagcggaucuguagccuc

SEQ ID NO: 308389 - RNA, 22 nt, Human
cugaaaaauaaccaaugcauaa

SEQ ID NO: 308390 - RNA, 22 nt, Human
cuucucaacaacaucugucugg

SEQ ID NO: 308391 - RNA, 20 nt, Human
gagacccacuccgccaccgc

SEQ ID NO: 308392 - RNA, 22 nt, Human
gcccagagcccuggagacccac

SEQ ID NO: 308393 - RNA, 25 nt, Human
ggaaaugaauaaaucaaaacccauc

SEQ ID NO: 308394 - RNA, 23 nt, Human
gggagccccuuaucccgggagcc

SEQ ID NO: 308395 - RNA, 18 nt, Human
gucuccacagugaaccga

SEQ ID NO: 308396 - RNA, 21 nt, Human
uaaauagaacaccuaaacuca

SEQ ID NO: 308397 - RNA, 21 nt, Human
uaagaauccucucagaagccc

SEQ ID NO: 308398 - RNA, 20 nt, Human
uacccuggugucuguggcau

SEQ ID NO: 308399 - RNA, 24 nt, Human
uagccuccuccgcgccccaccccu

SEQ ID NO: 308400 - RNA, 23 nt, Human
uagggaguuucuuuuaauaguuc

SEQ ID NO: 308401 - RNA, 18 nt, Human
uaguacuucucaacaaca

SEQ ID NO: 308402 - RNA, 20 nt, Human
uauaauacagaucuuuagcu

SEQ ID NO: 308403 - RNA, 25 nt, Human
uauaauauauuuagaaucccagaaa

SEQ ID NO: 308404 - RNA, 25 nt, Human
ucaaaaccaguaaucacuucaagaa

SEQ ID NO: 308405 - RNA, 23 nt, Human
ucaaaacccaucugauuugguua

SEQ ID NO: 308406 - RNA, 21 nt, Human
ucagaagcccuuuccuuuucc

SEQ ID NO: 308407 - RNA, 22 nt, Human
uccacagugaaccgacacucgg

SEQ ID NO: 308408 - RNA, 22 nt, Human
ucccccaaauuuuaguagagau

SEQ ID NO: 308409 - RNA, 18 nt, Human
ucccgggagcccagagcc

SEQ ID NO: 308410 - RNA, 22 nt, Human
ucuguagccuccuccgcgcccc

SEQ ID NO: 308411 - RNA, 23 nt, Human
ugacccaauucacauucuaaugg

SEQ ID NO: 308412 - RNA, 23 nt, Human
ugagacuauaauacagaucuuua

SEQ ID NO: 308413 - RNA, 20 nt, Human
uguaacauauuauauaauau

SEQ ID NO: 308414 - RNA, 21 nt, Human
uuaaaguuucaauauauuacu

SEQ ID NO: 308415 - RNA, 21 nt, Human
uucaaaagaaacaacuaagaa

SEQ ID NO: 308416 - RNA, 21 nt, Human
aacaacaucuguaacaucagc

SEQ ID NO: 308417 - RNA, 21 nt, Human
accacagcugggcggggucug

SEQ ID NO: 308418 - RNA, 21 nt, Human
agaguaaacacuccaaugacc

SEQ ID NO: 308419 - RNA, 20 nt, Human
aggaaccccagaagguucuc

SEQ ID NO: 308420 - RNA, 20 nt, Human
aucagaccagcccccgaguc

SEQ ID NO: 308421 - RNA, 21 nt, Human
cacagcugggcggggucuggg

SEQ ID NO: 308422 - RNA, 23 nt, Human
cagaccagcccccgaguccccaa

SEQ ID NO: 308423 - RNA, 19 nt, Human
cagcuccuccuggcucucc

SEQ ID NO: 308424 - RNA, 18 nt, Human
cagggcaggacaacugag

SEQ ID NO: 308425 - RNA, 18 nt, Human
ccagcuccuccuggcucu

SEQ ID NO: 308426 - RNA, 18 nt, Human
ccccaagaaggucacccc

SEQ ID NO: 308427 - RNA, 20 nt, Human
cccccgaguccccaagaagg

SEQ ID NO: 308428 - RNA, 25 nt, Human
ccccgaguccccaagaaggucaccc

SEQ ID NO: 308429 - RNA, 21 nt, Human
ccucagggugcccccaacaac

SEQ ID NO: 308430 - RNA, 20 nt, Human
ccugcagaguaaacacuccc

SEQ ID NO: 308431 - RNA, 20 nt, Human
ccugcucagucccgcccucc

SEQ ID NO: 308432 - RNA, 23 nt, Human
ccugggaccuggagucauccgga

SEQ ID NO: 308433 - RNA, 24 nt, Human
cuccgccugcucagucccgcccuc

SEQ ID NO: 308434 - RNA, 25 nt, Human
cuccgccugcucagucccgcccucc

SEQ ID NO: 308435 - RNA, 18 nt, Human
cugaagguccugguggcg

SEQ ID NO: 308436 - RNA, 22 nt, Human
gaccacagcugggcggggucug

SEQ ID NO: 308437 - RNA, 23 nt, Human
gcaggacaacugaggucgcgucc

SEQ ID NO: 308438 - RNA, 18 nt, Human
gcggcucugagcugggac

SEQ ID NO: 308439 - RNA, 18 nt, Human
ggcccagcuccuccuggc

SEQ ID NO: 308440 - RNA, 21 nt, Human
ggguccuggccugggcauggc

SEQ ID NO: 308441 - RNA, 23 nt, Human
gggucuggggguguauuuagggg

SEQ ID NO: 308442 - RNA, 20 nt, Human
ggugcucugaagguccuggu

SEQ ID NO: 308443 - RNA, 19 nt, Human
uaaacacuccaaugaccac

SEQ ID NO: 308444 - RNA, 25 nt, Human
uaaauaaauacacaguuccaucaga

SEQ ID NO: 308445 - RNA, 19 nt, Human
uaauaauaaauaacagacu

SEQ ID NO: 308446 - RNA, 21 nt, Human
uacacaguuccaucagaccag

SEQ ID NO: 308447 - RNA, 27 nt, Human
ucagacagcuuuauuuuuaucaccaga

SEQ ID NO: 308448 - RNA, 22 nt, Human
ucagggugcccccucagggugc

SEQ ID NO: 308449 - RNA, 22 nt, Human
uccuccuggcucuccuugucua

SEQ ID NO: 308450 - RNA, 18 nt, Human
uccuggcucuccuugucu

SEQ ID NO: 308451 - RNA, 21 nt, Human
ucucaggaaccuugagcccau

SEQ ID NO: 308452 - RNA, 20 nt, Human
ucuggggguguauuuagggg

SEQ ID NO: 308453 - RNA, 20 nt, Human
ugagguuggggcccagcucc

SEQ ID NO: 308454 - RNA, 24 nt, Human
ugcccccaacaacaucuguaacau

SEQ ID NO: 308455 - RNA, 19 nt, Human
ugcccccucagggugcccc

SEQ ID NO: 308456 - RNA, 18 nt, Human
uggccugggcauggcugu

SEQ ID NO: 308457 - RNA, 20 nt, Human
ugggagucugugcuuuugga

SEQ ID NO: 308458 - RNA, 24 nt, Human
uggggcccagcuccuccuggcucu

SEQ ID NO: 308459 - RNA, 21 nt, Human
uggggguguauuuagggggag

SEQ ID NO: 308460 - RNA, 21 nt, Human
uguaacaucagcagcaucuga

SEQ ID NO: 308461 - RNA, 19 nt, Human
uguccgaggguccuaggaa

SEQ ID NO: 308462 - RNA, 20 nt, Human
uuaauaauaaauaacagacu

SEQ ID NO: 308463 - RNA, 26 nt, Human
uuagggggaggaucuuuagguggggg

SEQ ID NO: 308464 - RNA, 18 nt, Human
uuggggcccagcuccucc

SEQ ID NO: 308465 - RNA, 19 nt, Human
aaaaauauagaaaaaggcu

SEQ ID NO: 308466 - RNA, 19 nt, Human
aaggaacuugcugugucug

SEQ ID NO: 308467 - RNA, 18 nt, Human
acuggugaaggcagcugc

SEQ ID NO: 308468 - RNA, 19 nt, Human
agcacuuauuugucagaca

SEQ ID NO: 308469 - RNA, 20 nt, Human
agcaucuucaggagacccca

SEQ ID NO: 308470 - RNA, 18 nt, Human
aggcagcugccaaauuuc

SEQ ID NO: 308471 - RNA, 21 nt, Human
aucucagucaccggaacugaa

SEQ ID NO: 308472 - RNA, 22 nt, Human
caggagaccccaaaccugagga

SEQ ID NO: 308473 - RNA, 19 nt, Human
cuauagguuucucuuucuu

SEQ ID NO: 308474 - RNA, 26 nt, Human
cuggggauaauuugucaguuuccuuu

SEQ ID NO: 308475 - RNA, 20 nt, Human
uagaaaaaggcuuaauucau

SEQ ID NO: 308476 - RNA, 21 nt, Human
uauuuuuuguuuacacaugaa

SEQ ID NO: 308477 - RNA, 19 nt, Human
ucagacauuuguacacuau

SEQ ID NO: 308478 - RNA, 20 nt, Human
ucaggagaccccaaaccuga

SEQ ID NO: 308479 - RNA, 21 nt, Human
ugugucuguauuugcccccag

SEQ ID NO: 308480 - RNA, 21 nt, Human
uuaauucaugaaguugcuaua

SEQ ID NO: 308481 - RNA, 18 nt, Human
uuuuauuuuauuuuuugu

SEQ ID NO: 308482 - RNA, 21 nt, Human
aacauaucaaauucagcaaga

SEQ ID NO: 308483 - RNA, 24 nt, Human
aagaggcaaccgcggggcuuuaac

SEQ ID NO: 308484 - RNA, 24 nt, Human
aagcaaaaagggacugauuacuga

SEQ ID NO: 308485 - RNA, 21 nt, Human
aagcacaagcaacaaauaggc

SEQ ID NO: 308486 - RNA, 20 nt, Human
aagcauuauauaucaaaggc

SEQ ID NO: 308487 - RNA, 18 nt, Human
aaggcauaaccuauaaga

SEQ ID NO: 308488 - RNA, 23 nt, Human
aauauucuccuaaucaaaagcua

SEQ ID NO: 308489 - RNA, 26 nt, Human
acacauuuaccagaacuaacagcccc

SEQ ID NO: 308490 - RNA, 19 nt, Human
acaggcaaagagguguaca

SEQ ID NO: 308491 - RNA, 23 nt, Human
acagugccaagauccuuccacac

SEQ ID NO: 308492 - RNA, 24 nt, Human
acauaacacuguaggccacaagaa

SEQ ID NO: 308493 - RNA, 24 nt, Human
accacacacacacauacacauaca

SEQ ID NO: 308494 - RNA, 20 nt, Human
acuaaaugaaauaaaaaagu

SEQ ID NO: 308495 - RNA, 24 nt, Human
acuggcuuaaugaaaauuuguauu

SEQ ID NO: 308496 - RNA, 20 nt, Human
agaaugaagcauucugggug

SEQ ID NO: 308497 - RNA, 21 nt, Human
agaucuccuccaaugucacau

SEQ ID NO: 308498 - RNA, 24 nt, Human
agcagcaugauccaauauaauauu

SEQ ID NO: 308499 - RNA, 20 nt, Human
agcuaaggcacuaccagaaa

SEQ ID NO: 308500 - RNA, 22 nt, Human
aggaagcaguaaugaagcagag

SEQ ID NO: 308501 - RNA, 23 nt, Human
aggcccuaagugcaaucugagug

SEQ ID NO: 308502 - RNA, 21 nt, Human
aguucugugucauuucuaggc

SEQ ID NO: 308503 - RNA, 25 nt, Human
auaacuauaaagguacuuguauaca

SEQ ID NO: 308504 - RNA, 21 nt, Human
auaucacuauauuccacaaau

SEQ ID NO: 308505 - RNA, 19 nt, Human
aucaucuaauggcacuuga

SEQ ID NO: 308506 - RNA, 21 nt, Human
auccguuuccuaauggauucc

SEQ ID NO: 308507 - RNA, 21 nt, Human
auguauguguguguguauaua

SEQ ID NO: 308508 - RNA, 21 nt, Human
auuuuggccaaucugaggccc

SEQ ID NO: 308509 - RNA, 23 nt, Human
caaaaagggacugauuacugaug

SEQ ID NO: 308510 - RNA, 20 nt, Human
caaaagacacugccuuccau

SEQ ID NO: 308511 - RNA, 23 nt, Human
caaacauaacacuguaggccaca

SEQ ID NO: 308512 - RNA, 19 nt, Human
caaagcucaguuuaaaagc

SEQ ID NO: 308513 - RNA, 18 nt, Human
caaaggccuacauauaua

SEQ ID NO: 308514 - RNA, 23 nt, Human
caaaggccuacauauauaucauc

SEQ ID NO: 308515 - RNA, 20 nt, Human
caacaaugaaaauaaauugc

SEQ ID NO: 308516 - RNA, 22 nt, Human
caagaaaugauauaagcgcuau

SEQ ID NO: 308517 - RNA, 18 nt, Human
caagaggcaaccgcgggg

SEQ ID NO: 308518 - RNA, 24 nt, Human
caagcaacaaauaggcaaaaauac

SEQ ID NO: 308519 - RNA, 18 nt, Human
caagcuaaggcacuacca

SEQ ID NO: 308520 - RNA, 23 nt, Human
caauacuccuaucauuucccaga

SEQ ID NO: 308521 - RNA, 19 nt, Human
cacacaccacacacacaca

SEQ ID NO: 308522 - RNA, 20 nt, Human
cacacauacacauacauaca

SEQ ID NO: 308523 - RNA, 18 nt, Human
cacgaaaugccaugucac

SEQ ID NO: 308524 - RNA, 21 nt, Human
cacuaccagaaauuucaagga

SEQ ID NO: 308525 - RNA, 19 nt, Human
cauagaaacuaaaggaagc

SEQ ID NO: 308526 - RNA, 20 nt, Human
cauauauuuuguggaauuca

SEQ ID NO: 308527 - RNA, 18 nt, Human
caugauaagccacuugau

SEQ ID NO: 308528 - RNA, 22 nt, Human
ccauuguaguguaugcgcugcc

SEQ ID NO: 308529 - RNA, 22 nt, Human
cccacccuugcccccaucccca

SEQ ID NO: 308530 - RNA, 24 nt, Human
cccagguaaacuuaacugaacaca

SEQ ID NO: 308531 - RNA, 19 nt, Human
cccauuuccaaaaugcuuu

SEQ ID NO: 308532 - RNA, 22 nt, Human
cccguccgccgccucuacaccg

SEQ ID NO: 308533 - RNA, 20 nt, Human
ccguccgccgccucuacacc

SEQ ID NO: 308534 - RNA, 23 nt, Human
ccucauggcugcaguuccacaau

SEQ ID NO: 308535 - RNA, 22 nt, Human
cgacaaaauauccuguguacua

SEQ ID NO: 308536 - RNA, 18 nt, Human
cggccaaggcagcaccaa

SEQ ID NO: 308537 - RNA, 23 nt, Human
cgguaugugugcaugugugugug

SEQ ID NO: 308538 - RNA, 22 nt, Human
cuaaaaaccucccacccuugcc

SEQ ID NO: 308539 - RNA, 23 nt, Human
cucccuauggguuuuuagcacaa

SEQ ID NO: 308540 - RNA, 21 nt, Human
cugaagaccccaaugccauac

SEQ ID NO: 308541 - RNA, 21 nt, Human
cugguucaucuguaccacuga

SEQ ID NO: 308542 - RNA, 18 nt, Human
cuguaggccacaagaagc

SEQ ID NO: 308543 - RNA, 23 nt, Human
cuuacgccucuuuccagcagcca

SEQ ID NO: 308544 - RNA, 20 nt, Human
cuucuaaaaaccucccaccc

SEQ ID NO: 308545 - RNA, 20 nt, Human
cuucucaaguuucauguggu

SEQ ID NO: 308546 - RNA, 24 nt, Human
gaaaaaauauucuccuaaucaaaa

SEQ ID NO: 308547 - RNA, 21 nt, Human
gaaaagccuauaauuauucag

SEQ ID NO: 308548 - RNA, 18 nt, Human
gaaaauuaagacuccaaa

SEQ ID NO: 308549 - RNA, 22 nt, Human
gacaaaaaugaaaauuuuaaga

SEQ ID NO: 308550 - RNA, 26 nt, Human
gagaguggaauccaauccuucccauu

SEQ ID NO: 308551 - RNA, 23 nt, Human
gaggcccugcuccaaacucuagc

SEQ ID NO: 308552 - RNA, 21 nt, Human
gaugcuuuguguuuaggguuu

SEQ ID NO: 308553 - RNA, 18 nt, Human
gcaagaaaugauauaagc

SEQ ID NO: 308554 - RNA, 23 nt, Human
gccaaauacggccaaggcagcac

SEQ ID NO: 308555 - RNA, 23 nt, Human
gccaugucaccuaacagagucuc

SEQ ID NO: 308556 - RNA, 20 nt, Human
gcggggcuuuaacauccucc

SEQ ID NO: 308557 - RNA, 23 nt, Human
gcggggcuuuaacauccucccuc

SEQ ID NO: 308558 - RNA, 25 nt, Human
ggaaagaaaaacauaucaaauucag

SEQ ID NO: 308559 - RNA, 19 nt, Human
ggaagacagugugcuuuga

SEQ ID NO: 308560 - RNA, 21 nt, Human
ggagcaguuugaaaaauuuaa

SEQ ID NO: 308561 - RNA, 19 nt, Human
gguaugugugcaugugugu

SEQ ID NO: 308562 - RNA, 21 nt, Human
gguaugugugcaugugugugu

SEQ ID NO: 308563 - RNA, 22 nt, Human
ggugaacugguauuuuuuaacu

SEQ ID NO: 308564 - RNA, 19 nt, Human
gucacagaaugaagcauuc

SEQ ID NO: 308565 - RNA, 24 nt, Human
guguauauauacacacaccacaca

SEQ ID NO: 308566 - RNA, 24 nt, Human
guguguguguauuauauauauaua

SEQ ID NO: 308567 - RNA, 23 nt, Human
guuaaauucaaagggcuguuagu

SEQ ID NO: 308568 - RNA, 24 nt, Human
uaaaaaccucccacccuugccccc

SEQ ID NO: 308569 - RNA, 23 nt, Human
uaaaaauauacaaaauucggccu

SEQ ID NO: 308570 - RNA, 27 nt, Human
uaaaaauguaccuguuuaaaauaccau

SEQ ID NO: 308571 - RNA, 22 nt, Human
uaaaauaccaucuaccauuuuu

SEQ ID NO: 308572 - RNA, 22 nt, Human
uaacauacagcauguucuucac

SEQ ID NO: 308573 - RNA, 20 nt, Human
uaacccuggcuacaggggcc

SEQ ID NO: 308574 - RNA, 23 nt, Human
uaacugaacacaaaugguuccaa

SEQ ID NO: 308575 - RNA, 21 nt, Human
uaagaaaauuuaaacccuuga

SEQ ID NO: 308576 - RNA, 21 nt, Human
uaagaaaguuucuguaaaggu

SEQ ID NO: 308577 - RNA, 19 nt, Human
uaagugacacgaaaugcca

SEQ ID NO: 308578 - RNA, 21 nt, Human
uaauuuagggccaacuauuaa

SEQ ID NO: 308579 - RNA, 21 nt, Human
uacacagcuugaaagaaacac

SEQ ID NO: 308580 - RNA, 22 nt, Human
uacacauacauacauauauggc

SEQ ID NO: 308581 - RNA, 23 nt, Human
uacagagcuuauacacacacaaa

SEQ ID NO: 308582 - RNA, 22 nt, Human
uacagcauguucuucacuccac

SEQ ID NO: 308583 - RNA, 21 nt, Human
uagcagcaugauccaauauaa

SEQ ID NO: 308584 - RNA, 18 nt, Human
uagcauguuaagaaggau

SEQ ID NO: 308585 - RNA, 24 nt, Human
uaggcacacauuuaccagaacuaa

SEQ ID NO: 308586 - RNA, 22 nt, Human
uauaauauugaaggaguguuuc

SEQ ID NO: 308587 - RNA, 21 nt, Human
uaugugugcaugugugugugu

SEQ ID NO: 308588 - RNA, 18 nt, Human
uauuaaaugaaaagauag

SEQ ID NO: 308589 - RNA, 22 nt, Human
uauucucaauuguuauuuucau

SEQ ID NO: 308590 - RNA, 22 nt, Human
ucaaaaaggguuuagugaccac

SEQ ID NO: 308591 - RNA, 27 nt, Human
ucaaaagacacugccuuccauccucag

SEQ ID NO: 308592 - RNA, 19 nt, Human
ucacugcagcuucauaaug

SEQ ID NO: 308593 - RNA, 18 nt, Human
ucaggagccaaagcuccu

SEQ ID NO: 308594 - RNA, 23 nt, Human
uccacacccuauuauaaagccca

SEQ ID NO: 308595 - RNA, 18 nt, Human
uccacacuugcuauuugu

SEQ ID NO: 308596 - RNA, 21 nt, Human
ucccacccuugcccccauccc

SEQ ID NO: 308597 - RNA, 23 nt, Human
ucccuccggcccguccgccgccu

SEQ ID NO: 308598 - RNA, 21 nt, Human
ucgggcuggacgcggcgggcc

SEQ ID NO: 308599 - RNA, 19 nt, Human
ucuaugaucccaaaggagc

SEQ ID NO: 308600 - RNA, 22 nt, Human
ucugaggcccaaauucuaaacu

SEQ ID NO: 308601 - RNA, 18 nt, Human
ucugaggcccugcuccaa

SEQ ID NO: 308602 - RNA, 18 nt, Human
ucuuacagcaaacauaac

SEQ ID NO: 308603 - RNA, 23 nt, Human
ugacccaccccuugguccccugg

SEQ ID NO: 308604 - RNA, 21 nt, Human
ugacuaagaaaaauaaagcac

SEQ ID NO: 308605 - RNA, 21 nt, Human
ugaugcuuuguguuuaggguu

SEQ ID NO: 308606 - RNA, 18 nt, Human
ugcaaggaaagauggauu

SEQ ID NO: 308607 - RNA, 24 nt, Human
ugcagcuucauaaugugauugcua

SEQ ID NO: 308608 - RNA, 23 nt, Human
ugcccaacuccacuaaaugauau

SEQ ID NO: 308609 - RNA, 21 nt, Human
uggauaaaaaaauacgacuga

SEQ ID NO: 308610 - RNA, 18 nt, Human
uguaaaaaaauaaaccau

SEQ ID NO: 308611 - RNA, 21 nt, Human
ugugaaagguggaaaagacua

SEQ ID NO: 308612 - RNA, 23 nt, Human
uguggaagugaaacugaaugagg

SEQ ID NO: 308613 - RNA, 19 nt, Human
uguguauuauauauauaua

SEQ ID NO: 308614 - RNA, 20 nt, Human
uguguauuauauauauauau

SEQ ID NO: 308615 - RNA, 19 nt, Human
ugugugcaugugugugugu

SEQ ID NO: 308616 - RNA, 22 nt, Human
ugugugcaugugugugugugug

SEQ ID NO: 308617 - RNA, 24 nt, Human
uguguguguauuauauauauauaa

SEQ ID NO: 308618 - RNA, 24 nt, Human
uguguguguguauuauauauauau

SEQ ID NO: 308619 - RNA, 21 nt, Human
uguuaacaagugcuuaauaga

SEQ ID NO: 308620 - RNA, 22 nt, Human
uuaaaaaacugaacuugguaau

SEQ ID NO: 308621 - RNA, 24 nt, Human
uuaaaucugguauauggacaauaa

SEQ ID NO: 308622 - RNA, 19 nt, Human
uuaacccuggcuacagggg

SEQ ID NO: 308623 - RNA, 18 nt, Human
uuaagaagauuauguugg

SEQ ID NO: 308624 - RNA, 21 nt, Human
uuacagaauagcaauuuuaaa

SEQ ID NO: 308625 - RNA, 19 nt, Human
uuagcagcaugauccaaua

SEQ ID NO: 308626 - RNA, 22 nt, Human
uuauauaucaaaggccuacaua

SEQ ID NO: 308627 - RNA, 25 nt, Human
uucccagagaugcaugaaaguggga

SEQ ID NO: 308628 - RNA, 22 nt, Human
uucuaaaaaguccaguuuuuaa

SEQ ID NO: 308629 - RNA, 20 nt, Human
uucugggugccaaauacggc

SEQ ID NO: 308630 - RNA, 18 nt, Human
uuucuguaaugaauccau

SEQ ID NO: 308631 - RNA, 26 nt, Human
uuuuacagagcuuauacacacacaaa

SEQ ID NO: 308632 - RNA, 21 nt, Human
aaaacaucuuccagaauacgg

SEQ ID NO: 308633 - RNA, 21 nt, Human
aaaacuacagguuggcuaugg

SEQ ID NO: 308634 - RNA, 23 nt, Human
aaaaugccuuugacugacgcccu

SEQ ID NO: 308635 - RNA, 22 nt, Human
aagguagaaaaaucccugaaaa

SEQ ID NO: 308636 - RNA, 21 nt, Human
acauccaacccugaagguaga

SEQ ID NO: 308637 - RNA, 22 nt, Human
acggaaaagccucuaaaaacau

SEQ ID NO: 308638 - RNA, 18 nt, Human
agacaagauuaacuccuc

SEQ ID NO: 308639 - RNA, 26 nt, Human
agacagaggcaaaggaaaagggaccc

SEQ ID NO: 308640 - RNA, 21 nt, Human
agauuuggagaaauccaaacc

SEQ ID NO: 308641 - RNA, 24 nt, Human
agguagaaaaaucccugaaaagaa

SEQ ID NO: 308642 - RNA, 18 nt, Human
caaaaugccuuugacuga

SEQ ID NO: 308643 - RNA, 19 nt, Human
cagcaaaaugccuuugacu

SEQ ID NO: 308644 - RNA, 20 nt, Human
caucucaagccagucaucac

SEQ ID NO: 308645 - RNA, 23 nt, Human
ccauagucccagucucguuuucc

SEQ ID NO: 308646 - RNA, 19 nt, Human
cugaagauucaaaccugug

SEQ ID NO: 308647 - RNA, 21 nt, Human
gaagauucaaaccugugagaa

SEQ ID NO: 308648 - RNA, 22 nt, Human
gacagauuggcacaauacaugc

SEQ ID NO: 308649 - RNA, 21 nt, Human
gagaauucucuuaucaucuca

SEQ ID NO: 308650 - RNA, 22 nt, Human
gauuaacuccucugauuccuau

SEQ ID NO: 308651 - RNA, 20 nt, Human
ggaaaaauacacuuuaaaaa

SEQ ID NO: 308652 - RNA, 23 nt, Human
ggagagacacacaaaguuaucuu

SEQ ID NO: 308653 - RNA, 21 nt, Human
gucagcaaaaugccuuugacu

SEQ ID NO: 308654 - RNA, 21 nt, Human
uaaaaugcuucuuaaaacauc

SEQ ID NO: 308655 - RNA, 24 nt, Human
uaaaaugcuucuuaaaacaucuuc

SEQ ID NO: 308656 - RNA, 19 nt, Human
uaaccugguuacacaguga

SEQ ID NO: 308657 - RNA, 24 nt, Human
uaacuaaacuacauccaacccuga

SEQ ID NO: 308658 - RNA, 25 nt, Human
uaagcuagacagaggcaaaggaaaa

SEQ ID NO: 308659 - RNA, 21 nt, Human
uaauaagauaccaaauucaag

SEQ ID NO: 308660 - RNA, 23 nt, Human
uaauaguaacuaaacuacaucca

SEQ ID NO: 308661 - RNA, 25 nt, Human
uacaaagcaugaacacucaggacag

SEQ ID NO: 308662 - RNA, 21 nt, Human
uaccacuuaaccugguuacac

SEQ ID NO: 308663 - RNA, 22 nt, Human
uauagcagccgucauuuuggau

SEQ ID NO: 308664 - RNA, 21 nt, Human
uauauguuuacggaaaagccu

SEQ ID NO: 308665 - RNA, 18 nt, Human
uccagaauacggaaaaau

SEQ ID NO: 308666 - RNA, 26 nt, Human
uccagaauacggaaaaauacacuuua

SEQ ID NO: 308667 - RNA, 23 nt, Human
uccauaguucccuuacuaggcag

SEQ ID NO: 308668 - RNA, 19 nt, Human
ucccagucucguuuuccaa

SEQ ID NO: 308669 - RNA, 20 nt, Human
ucugaagauucaaaccugug

SEQ ID NO: 308670 - RNA, 20 nt, Human
ucugcugcgaggcagggacu

SEQ ID NO: 308671 - RNA, 18 nt, Human
ucugucagauguaacuga

SEQ ID NO: 308672 - RNA, 18 nt, Human
ucuuccagaauacggaaa

SEQ ID NO: 308673 - RNA, 26 nt, Human
uucaagagauuauaguuacauuguaa

SEQ ID NO: 308674 - RNA, 23 nt, Human
uucccauauggacaaacacuuau

SEQ ID NO: 308675 - RNA, 18 nt, Human
uucuuaaaacaucuucca

SEQ ID NO: 308676 - RNA, 18 nt, Human
uuggauuacagaacacgc

SEQ ID NO: 308677 - RNA, 25 nt, Human
uuuaagauaaaugaagugauaacuc

SEQ ID NO: 308678 - RNA, 21 nt, Human
uuuaagcuagacagaggcaaa

SEQ ID NO: 308679 - RNA, 25 nt, Human
aacagaaaguaaaaacuaacaugga

SEQ ID NO: 308680 - RNA, 23 nt, Human
aagaagaagaggcgggaucucau

SEQ ID NO: 308681 - RNA, 23 nt, Human
aauucacggcuugcuccuucccu

SEQ ID NO: 308682 - RNA, 20 nt, Human
accuucugagagccagggag

SEQ ID NO: 308683 - RNA, 21 nt, Human
acgucaagggugcuuuugagg

SEQ ID NO: 308684 - RNA, 23 nt, Human
acucuaaaguuuauaaagaaaaa

SEQ ID NO: 308685 - RNA, 18 nt, Human
agacaugcuuucauuuuu

SEQ ID NO: 308686 - RNA, 20 nt, Human
agccagggaguggggaaagg

SEQ ID NO: 308687 - RNA, 19 nt, Human
aggcaggggguggggucgg

SEQ ID NO: 308688 - RNA, 19 nt, Human
aggcaggggguggggucgg

SEQ ID NO: 308689 - RNA, 20 nt, Human
aggcaggggguggggucggu

SEQ ID NO: 308690 - RNA, 21 nt, Human
aggcaggggguggggucggug

SEQ ID NO: 308691 - RNA, 22 nt, Human
agggaguggggaaaggggaagg

SEQ ID NO: 308692 - RNA, 24 nt, Human
aggggguggggucgguggccccgg

SEQ ID NO: 308693 - RNA, 20 nt, Human
augcucaguggacagggcca

SEQ ID NO: 308694 - RNA, 22 nt, Human
caacagaaaguaaaaacuaaca

SEQ ID NO: 308695 - RNA, 22 nt, Human
cacagcuccggccuccuuaagu

SEQ ID NO: 308696 - RNA, 20 nt, Human
cacuguacacaaaaggaaua

SEQ ID NO: 308697 - RNA, 26 nt, Human
cacuuuacacacuguacacaaaagga

SEQ ID NO: 308698 - RNA, 22 nt, Human
cagcuccggccuccuuaaguuu

SEQ ID NO: 308699 - RNA, 22 nt, Human
caggcaggggguggggucggug

SEQ ID NO: 308700 - RNA, 21 nt, Human
ccccacagcuccggccuccuu

SEQ ID NO: 308701 - RNA, 20 nt, Human
ccuucccuuuccucgcagag

SEQ ID NO: 308702 - RNA, 23 nt, Human
ccuucugagagccagggaguggg

SEQ ID NO: 308703 - RNA, 19 nt, Human
cucauuugcuuuugaggag

SEQ ID NO: 308704 - RNA, 19 nt, Human
cuccuuaaguuuccaggca

SEQ ID NO: 308705 - RNA, 21 nt, Human
cucgcagagguuuucucucca

SEQ ID NO: 308706 - RNA, 23 nt, Human
cucgucccgcuucugcggugugg

SEQ ID NO: 308707 - RNA, 22 nt, Human
cuucccaucugacagaguaucc

SEQ ID NO: 308708 - RNA, 22 nt, Human
cuucugaagaagaagaggcggg

SEQ ID NO: 308709 - RNA, 20 nt, Human
cuuuagcugaaaacagggug

SEQ ID NO: 308710 - RNA, 23 nt, Human
cuuuccucgcagagguuuucucu

SEQ ID NO: 308711 - RNA, 27 nt, Human
gcaacagaaaguaaaaacuaacaugga

SEQ ID NO: 308712 - RNA, 22 nt, Human
gccccggcugggcggguuucug

SEQ ID NO: 308713 - RNA, 24 nt, Human
gcccuggacuccuguaggauccca

SEQ ID NO: 308714 - RNA, 18 nt, Human
ggaaguaucugggaaaau

SEQ ID NO: 308715 - RNA, 18 nt, Human
gugaaaaauauaucugaa

SEQ ID NO: 308716 - RNA, 23 nt, Human
gugcuuuugaggaacaugacggg

SEQ ID NO: 308717 - RNA, 20 nt, Human
guggccccggcugggcgggu

SEQ ID NO: 308718 - RNA, 22 nt, Human
uacacacuguacacaaaaggaa

SEQ ID NO: 308719 - RNA, 21 nt, Human
uaccuucugagagccagggag

SEQ ID NO: 308720 - RNA, 23 nt, Human
uagagaagcacugcgccuuugca

SEQ ID NO: 308721 - RNA, 21 nt, Human
uagcugaaaacaggguggcau

SEQ ID NO: 308722 - RNA, 23 nt, Human
uauaaagaaaaaggauuuacacu

SEQ ID NO: 308723 - RNA, 23 nt, Human
uauccugaaaucagaccaagucc

SEQ ID NO: 308724 - RNA, 22 nt, Human
uauuaaguacaguauaaaacag

SEQ ID NO: 308725 - RNA, 21 nt, Human
uccaggcaggggguggggucg

SEQ ID NO: 308726 - RNA, 18 nt, Human
uccccacagcuccggccu

SEQ ID NO: 308727 - RNA, 25 nt, Human
ucucauuugcuuuugaggagucggg

SEQ ID NO: 308728 - RNA, 20 nt, Human
ucucuccagcccuggacucc

SEQ ID NO: 308729 - RNA, 20 nt, Human
ucugaagaagaagaggcggg

SEQ ID NO: 308730 - RNA, 23 nt, Human
ugacaggucaggagguugggcuu

SEQ ID NO: 308731 - RNA, 21 nt, Human
ugaggcccugcugggcucuug

SEQ ID NO: 308732 - RNA, 22 nt, Human
ugccccaacuuugaggcccugc

SEQ ID NO: 308733 - RNA, 21 nt, Human
ugcgguguggugggucuggag

SEQ ID NO: 308734 - RNA, 21 nt, Human
uggaaaaacugugaaaaauau

SEQ ID NO: 308735 - RNA, 22 nt, Human
uggcauggccacuuucugccca

SEQ ID NO: 308736 - RNA, 23 nt, Human
uggcauggccacuuucugcccag

SEQ ID NO: 308737 - RNA, 19 nt, Human
uggccccggcugggcgggu

SEQ ID NO: 308738 - RNA, 20 nt, Human
ugggaaguaucugggaaaau

SEQ ID NO: 308739 - RNA, 20 nt, Human
uguagagaagcacugcgccu

SEQ ID NO: 308740 - RNA, 18 nt, Human
uugaggcccugcugggcu

SEQ ID NO: 308741 - RNA, 18 nt, Human
uuuuuuuuuuuuuuuuug

SEQ ID NO: 308742 - RNA, 20 nt, Human
aaccaugggccucacaaaug

SEQ ID NO: 308743 - RNA, 19 nt, Human
aagaaagcggguggugccc

SEQ ID NO: 308744 - RNA, 19 nt, Human
aagaaagggacaucuaugu

SEQ ID NO: 308745 - RNA, 21 nt, Human
acacucacagcccacacacaa

SEQ ID NO: 308746 - RNA, 20 nt, Human
accccacccagugaggauug

SEQ ID NO: 308747 - RNA, 22 nt, Human
accccacccagugaggauugga

SEQ ID NO: 308748 - RNA, 19 nt, Human
acucuacugcaaaaaugac

SEQ ID NO: 308749 - RNA, 20 nt, Human
acuuacacucacagcccaca

SEQ ID NO: 308750 - RNA, 23 nt, Human
agaaaaagacaaguugcugguca

SEQ ID NO: 308751 - RNA, 20 nt, Human
agaaagcggguggugcccgu

SEQ ID NO: 308752 - RNA, 21 nt, Human
agaauaauacauucccaggca

SEQ ID NO: 308753 - RNA, 24 nt, Human
agagccuaucuucccagucucuuc

SEQ ID NO: 308754 - RNA, 19 nt, Human
auggagaugacucuacugc

SEQ ID NO: 308755 - RNA, 24 nt, Human
caaccaugggccucacaaaugccc

SEQ ID NO: 308756 - RNA, 22 nt, Human
cacaggagaugcccugcccuuu

SEQ ID NO: 308757 - RNA, 20 nt, Human
cauacacacacauauauauu

SEQ ID NO: 308758 - RNA, 24 nt, Human
ccagaaagaccacucuguguggca

SEQ ID NO: 308759 - RNA, 23 nt, Human
ccagcacccaggccuaugccuga

SEQ ID NO: 308760 - RNA, 20 nt, Human
ccaugcacaggagaugcccu

SEQ ID NO: 308761 - RNA, 19 nt, Human
ccuaugccugaggguaaag

SEQ ID NO: 308762 - RNA, 20 nt, Human
ccucuccagaaagaccacuu

SEQ ID NO: 308763 - RNA, 23 nt, Human
cgugggggacccaagaggcccca

SEQ ID NO: 308764 - RNA, 27 nt, Human
cuaucuucccagucucuucuuacagcu

SEQ ID NO: 308765 - RNA, 21 nt, Human
cuccccaaaccgcugcuccca

SEQ ID NO: 308766 - RNA, 21 nt, Human
cuuacacucacagcccacaca

SEQ ID NO: 308767 - RNA, 19 nt, Human
gagaugacucuacugcaaa

SEQ ID NO: 308768 - RNA, 21 nt, Human
gagugguccucaccccaccca

SEQ ID NO: 308769 - RNA, 19 nt, Human
gcaaauccaucugugcaga

SEQ ID NO: 308770 - RNA, 19 nt, Human
gcuaaaaggaagggauaac

SEQ ID NO: 308771 - RNA, 22 nt, Human
gggaaauuauucauuucucaac

SEQ ID NO: 308772 - RNA, 18 nt, Human
gggacccaagaggcccca

SEQ ID NO: 308773 - RNA, 18 nt, Human
gugguccucaccccaccc

SEQ ID NO: 308774 - RNA, 20 nt, Human
ucacgugggggacccaagag

SEQ ID NO: 308775 - RNA, 24 nt, Human
ucaguccagaaaaagacaaguugc

SEQ ID NO: 308776 - RNA, 21 nt, Human
ucccagucucuucuuacagcu

SEQ ID NO: 308777 - RNA, 20 nt, Human
uccccaaaccgcugcuccca

SEQ ID NO: 308778 - RNA, 21 nt, Human
ucucaaccaugggccucacaa

SEQ ID NO: 308779 - RNA, 19 nt, Human
ucuccagaaagaccacucu

SEQ ID NO: 308780 - RNA, 22 nt, Human
ucuucuuacagcugauggagau

SEQ ID NO: 308781 - RNA, 20 nt, Human
ugaaacugagacagugcugg

SEQ ID NO: 308782 - RNA, 20 nt, Human
ugagacagugcuggucacag

SEQ ID NO: 308783 - RNA, 18 nt, Human
uggagaugacucuacugc

SEQ ID NO: 308784 - RNA, 19 nt, Human
uggccagaggggucugggc

SEQ ID NO: 308785 - RNA, 18 nt, Human
uggucacaggucaugcug

SEQ ID NO: 308786 - RNA, 19 nt, Human
ugguccucaccccacccag

SEQ ID NO: 308787 - RNA, 19 nt, Human
ugugaaagugaaacugaga

SEQ ID NO: 308788 - RNA, 27 nt, Human
ugugcaaacauacacacacauauauag

SEQ ID NO: 308789 - RNA, 22 nt, Human
uuagacuuaacaaucagacacc

SEQ ID NO: 308790 - RNA, 19 nt, Human
uucccaggcacugucacgu

SEQ ID NO: 308791 - RNA, 20 nt, Human
uuuagacuuaacaaucagac

SEQ ID NO: 308792 - RNA, 23 nt, Human
aacaacacaacagcggcaacaau

SEQ ID NO: 308793 - RNA, 23 nt, Human
aagagcucucccauugcccacgg

SEQ ID NO: 308794 - RNA, 20 nt, Human
acaaacuuccuucccggggc

SEQ ID NO: 308795 - RNA, 24 nt, Human
acaacaacacaacagcggcaacaa

SEQ ID NO: 308796 - RNA, 20 nt, Human
acccggggcaaucgcucucc

SEQ ID NO: 308797 - RNA, 25 nt, Human
agagcucucccauugcccacggccu

SEQ ID NO: 308798 - RNA, 22 nt, Human
aggaaggaggcaguuuuguggc

SEQ ID NO: 308799 - RNA, 18 nt, Human
agggcaaagggguccccc

SEQ ID NO: 308800 - RNA, 20 nt, Human
auagcugggaaaacugaggc

SEQ ID NO: 308801 - RNA, 23 nt, Human
auuuuuguuaguuuugucaggag

SEQ ID NO: 308802 - RNA, 22 nt, Human
caaaucccaguucucucucuuc

SEQ ID NO: 308803 - RNA, 24 nt, Human
cacacuggccugaggucacacagc

SEQ ID NO: 308804 - RNA, 22 nt, Human
cagggacuccucccagacguuu

SEQ ID NO: 308805 - RNA, 21 nt, Human
caguuuuguggccccagggac

SEQ ID NO: 308806 - RNA, 25 nt, Human
cccacggccuuccuccagcuuuucu

SEQ ID NO: 308807 - RNA, 24 nt, Human
ccccagaugcgugggcgccucccc

SEQ ID NO: 308808 - RNA, 19 nt, Human
ccccggauccagccagggc

SEQ ID NO: 308809 - RNA, 19 nt, Human
cccggggcaaucgcucucc

SEQ ID NO: 308810 - RNA, 21 nt, Human
cccugcacgucuucucuccuu

SEQ ID NO: 308811 - RNA, 23 nt, Human
ccuccgccacaaacuuccuuccc

SEQ ID NO: 308812 - RNA, 24 nt, Human
ccuccgccacaaacuuccuucccg

SEQ ID NO: 308813 - RNA, 22 nt, Human
ccugaggucacacagcaagucu

SEQ ID NO: 308814 - RNA, 21 nt, Human
ccugggugcaaaucccaguuc

SEQ ID NO: 308815 - RNA, 22 nt, Human
ccuucuggccucaggaaggagg

SEQ ID NO: 308816 - RNA, 21 nt, Human
cgaaccuccuccgccacaaac

SEQ ID NO: 308817 - RNA, 23 nt, Human
cgccacaaacuuccuucccgggg

SEQ ID NO: 308818 - RNA, 23 nt, Human
cggccuuccuccagcuuuucucu

SEQ ID NO: 308819 - RNA, 21 nt, Human
cuggccucaggaaggaggcag

SEQ ID NO: 308820 - RNA, 21 nt, Human
gagucagccccagaugcgugg

SEQ ID NO: 308821 - RNA, 20 nt, Human
gcugguggugaaggggcugg

SEQ ID NO: 308822 - RNA, 21 nt, Human
ggcagagagggggauuucagg

SEQ ID NO: 308823 - RNA, 22 nt, Human
ggcagagagggggauuucaggu

SEQ ID NO: 308824 - RNA, 19 nt, Human
gggcuggcucggcccugac

SEQ ID NO: 308825 - RNA, 21 nt, Human
ggggcgcggccggcugguggu

SEQ ID NO: 308826 - RNA, 18 nt, Human
gucgcgagggcagcuccu

SEQ ID NO: 308827 - RNA, 22 nt, Human
guggccccagggacuccuccca

SEQ ID NO: 308828 - RNA, 26 nt, Human
uaaaauaaauaauaugaauauuaauu

SEQ ID NO: 308829 - RNA, 24 nt, Human
uaacaacaacacaacagcggcaac

SEQ ID NO: 308830 - RNA, 23 nt, Human
uaauaacaacaacacaacagcgg

SEQ ID NO: 308831 - RNA, 23 nt, Human
ucaggaaggaggcaguuuugugg

SEQ ID NO: 308832 - RNA, 22 nt, Human
ucccccggauccagccagggca

SEQ ID NO: 308833 - RNA, 24 nt, Human
uccgccacaaacuuccuucccggg

SEQ ID NO: 308834 - RNA, 23 nt, Human
uccuccgccacaaacuuccuucc

SEQ ID NO: 308835 - RNA, 18 nt, Human
uccugugcgcgggguccc

SEQ ID NO: 308836 - RNA, 24 nt, Human
ucuccacugcuguaaaaugaggau

SEQ ID NO: 308837 - RNA, 21 nt, Human
ucuguccccagauugccuggg

SEQ ID NO: 308838 - RNA, 22 nt, Human
ugacgguaaauaugaauguggc

SEQ ID NO: 308839 - RNA, 19 nt, Human
ugaggcccagagaggucgg

SEQ ID NO: 308840 - RNA, 24 nt, Human
ugggacccggggcaaucgcucucc

SEQ ID NO: 308841 - RNA, 18 nt, Human
uggugaaggggcuggcuc

SEQ ID NO: 308842 - RNA, 23 nt, Human
ugguggugaaggggcuggcucgg

SEQ ID NO: 308843 - RNA, 25 nt, Human
uguaaaaugaggauaaaaacuuuga

SEQ ID NO: 308844 - RNA, 25 nt, Human
ugugagauagcuguuuucauagcug

SEQ ID NO: 308845 - RNA, 23 nt, Human
uuaauaauaacaagagcucuccc

SEQ ID NO: 308846 - RNA, 25 nt, Human
uuaauaauaacaagagcucucccau

SEQ ID NO: 308847 - RNA, 19 nt, Human
uucccggggcgcggccggc

SEQ ID NO: 308848 - RNA, 18 nt, Human
aacagcacccaagagccc

SEQ ID NO: 308849 - RNA, 27 nt, Human
agacuucuaggccccagagaggcccuu

SEQ ID NO: 308850 - RNA, 22 nt, Human
agaguggggccaggaucccacu

SEQ ID NO: 308851 - RNA, 18 nt, Human
agccaagcugggcucaaa

SEQ ID NO: 308852 - RNA, 21 nt, Human
agccuggggcaggaggguucg

SEQ ID NO: 308853 - RNA, 18 nt, Human
aggaagaggggugagcca

SEQ ID NO: 308854 - RNA, 22 nt, Human
aggaaggaggccagccaggagg

SEQ ID NO: 308855 - RNA, 22 nt, Human
agggugccuggguccugucuca

SEQ ID NO: 308856 - RNA, 21 nt, Human
aucccacuuucugccuuccag

SEQ ID NO: 308857 - RNA, 20 nt, Human
auggggccuggaagccuggg

SEQ ID NO: 308858 - RNA, 19 nt, Human
cagaagggcaggaaggagg

SEQ ID NO: 308859 - RNA, 19 nt, Human
cagaguggggccaggaucc

SEQ ID NO: 308860 - RNA, 24 nt, Human
cagccaggagggggagccaagcug

SEQ ID NO: 308861 - RNA, 21 nt, Human
ccaggaucccacuuucugccu

SEQ ID NO: 308862 - RNA, 20 nt, Human
ccaguccauagucuuuugcc

SEQ ID NO: 308863 - RNA, 19 nt, Human
cccaagagcccacugcccc

SEQ ID NO: 308864 - RNA, 18 nt, Human
cccacuuucugccuucca

SEQ ID NO: 308865 - RNA, 18 nt, Human
cccugccgugagggugcc

SEQ ID NO: 308866 - RNA, 22 nt, Human
cccugccgugagggugccuggg

SEQ ID NO: 308867 - RNA, 20 nt, Human
ccuaggaagaggggugagcc

SEQ ID NO: 308868 - RNA, 20 nt, Human
ccucaacaaauauaugacac

SEQ ID NO: 308869 - RNA, 18 nt, Human
ccuggggcaggaggguuc

SEQ ID NO: 308870 - RNA, 20 nt, Human
cuagagauggagggggaggu

SEQ ID NO: 308871 - RNA, 24 nt, Human
cuaggccccagagaggcccugccg

SEQ ID NO: 308872 - RNA, 19 nt, Human
cugagagggguacauggua

SEQ ID NO: 308873 - RNA, 19 nt, Human
cugcagcguccaaggcagc

SEQ ID NO: 308874 - RNA, 23 nt, Human
gacacaggcaggcagaagggcag

SEQ ID NO: 308875 - RNA, 20 nt, Human
gagaggcccugccgugaggg

SEQ ID NO: 308876 - RNA, 21 nt, Human
gagcaaaugaugcugaccuug

SEQ ID NO: 308877 - RNA, 20 nt, Human
gagccagggucaggguggaa

SEQ ID NO: 308878 - RNA, 18 nt, Human
gaggagggggcugcagcg

SEQ ID NO: 308879 - RNA, 19 nt, Human
gaggagggggcugcagcgu

SEQ ID NO: 308880 - RNA, 19 nt, Human
gagggugccuggguccugu

SEQ ID NO: 308881 - RNA, 19 nt, Human
gcagaagggcaggaaggag

SEQ ID NO: 308882 - RNA, 27 nt, Human
gcccucaacaaauauaugaccgguuuc

SEQ ID NO: 308883 - RNA, 21 nt, Human
gccuggccguugaggaggggg

SEQ ID NO: 308884 - RNA, 22 nt, Human
gccuggguccugucucagacuc

SEQ ID NO: 308885 - RNA, 24 nt, Human
ggaagucagcuugagaagacuucu

SEQ ID NO: 308886 - RNA, 21 nt, Human
ggcaggaaggaggccagccag

SEQ ID NO: 308887 - RNA, 21 nt, Human
ggccccagagaggcccugccg

SEQ ID NO: 308888 - RNA, 20 nt, Human
ggccuggaagccuggggcag

SEQ ID NO: 308889 - RNA, 19 nt, Human
gggcaggaaggaggccagc

SEQ ID NO: 308890 - RNA, 19 nt, Human
gggcaggaggguucggggc

SEQ ID NO: 308891 - RNA, 20 nt, Human
guggggccaggaucccacuu

SEQ ID NO: 308892 - RNA, 19 nt, Human
uagaaccacaucccagaga

SEQ ID NO: 308893 - RNA, 20 nt, Human
uagagauggagggggaggua

SEQ ID NO: 308894 - RNA, 19 nt, Human
uagccccugggguggcccu

SEQ ID NO: 308895 - RNA, 22 nt, Human
uaggaagaggggugagccaggg

SEQ ID NO: 308896 - RNA, 19 nt, Human
ucagaaggcuggggcuccu

SEQ ID NO: 308897 - RNA, 19 nt, Human
uccauagucuuuugcccuc

SEQ ID NO: 308898 - RNA, 18 nt, Human
ucccagagaaggggcuga

SEQ ID NO: 308899 - RNA, 21 nt, Human
ucucagacucuggccuggccg

SEQ ID NO: 308900 - RNA, 20 nt, Human
ugaggaaacugagcccagag

SEQ ID NO: 308901 - RNA, 22 nt, Human
ugaggagggggcugcagcgucc

SEQ ID NO: 308902 - RNA, 21 nt, Human
ugagggugccuggguccuguc

SEQ ID NO: 308903 - RNA, 24 nt, Human
uggaacagcacccaagagcccacu

SEQ ID NO: 308904 - RNA, 19 nt, Human
uggaagccuggggcaggag

SEQ ID NO: 308905 - RNA, 21 nt, Human
uggaagccuggggcaggaggg

SEQ ID NO: 308906 - RNA, 19 nt, Human
uggaggugaguggguccaa

SEQ ID NO: 308907 - RNA, 25 nt, Human
uggggccaggaucccacuuucugcc

SEQ ID NO: 308908 - RNA, 19 nt, Human
ugucucagacucuggccug

SEQ ID NO: 308909 - RNA, 21 nt, Human
uucuaggccccagagaggccc

SEQ ID NO: 308910 - RNA, 18 nt, Human
uuugcagaaucucagcag

SEQ ID NO: 308911 - RNA, 21 nt, Human
aaaaggaagaggagaauaaaa

SEQ ID NO: 308912 - RNA, 21 nt, Human
aagaguuguucacaccaagcu

SEQ ID NO: 308913 - RNA, 25 nt, Human
acauaaaggaaacaaaauaaacagc

SEQ ID NO: 308914 - RNA, 20 nt, Human
agcggcacuggagggacaca

SEQ ID NO: 308915 - RNA, 19 nt, Human
auuuuuguuuggccaagga

SEQ ID NO: 308916 - RNA, 21 nt, Human
caaaauaaacagcuuucaucc

SEQ ID NO: 308917 - RNA, 19 nt, Human
caggggucccccuggugcu

SEQ ID NO: 308918 - RNA, 26 nt, Human
ccugcaguuacaacauguccuaaggc

SEQ ID NO: 308919 - RNA, 26 nt, Human
cucugaugcaaagauccagguccuac

SEQ ID NO: 308920 - RNA, 19 nt, Human
cugaugcaaagauccaggu

SEQ ID NO: 308921 - RNA, 19 nt, Human
cuggugcuugggagaacaa

SEQ ID NO: 308922 - RNA, 21 nt, Human
cuugggagaacaaggggcaag

SEQ ID NO: 308923 - RNA, 21 nt, Human
gacucugccuuacuggaauag

SEQ ID NO: 308924 - RNA, 19 nt, Human
gagaauaaaauuaccucuc

SEQ ID NO: 308925 - RNA, 22 nt, Human
gagucuuuugaugcuuuguggg

SEQ ID NO: 308926 - RNA, 19 nt, Human
gugagacuaggguaaaagg

SEQ ID NO: 308927 - RNA, 22 nt, Human
uaaaauuaccucucauugcaga

SEQ ID NO: 308928 - RNA, 21 nt, Human
uacacauaaaggaaacaaaau

SEQ ID NO: 308929 - RNA, 21 nt, Human
ucccagagcuguuagucuagu

SEQ ID NO: 308930 - RNA, 21 nt, Human
ucucugguuucagauaucauc

SEQ ID NO: 308931 - RNA, 23 nt, Human
ugagugagucuuuugaugcuuug

SEQ ID NO: 308932 - RNA, 19 nt, Human
ugcaaagauccagguccua

SEQ ID NO: 308933 - RNA, 26 nt, Human
ugcuuuguggguuugcugccguguac

SEQ ID NO: 308934 - RNA, 22 nt, Human
uggaauaguaaauuuuugugga

SEQ ID NO: 308935 - RNA, 22 nt, Human
uggguuugcugcuucaguuugc

SEQ ID NO: 308936 - RNA, 24 nt, Human
uggugcuugggagaacaaggggca

SEQ ID NO: 308937 - RNA, 28 nt, Human
uggugcuugggagaacaaggggcaagcg

SEQ ID NO: 308938 - RNA, 21 nt, Human
uucccaaacuaguccucagug

SEQ ID NO: 308939 - RNA, 20 nt, Human
uuguggauuuguagcuauuu

SEQ ID NO: 308940 - RNA, 19 nt, Human
accccacuggguuccucca

SEQ ID NO: 308941 - RNA, 21 nt, Human
caagaggcugggagcaggcac

SEQ ID NO: 308942 - RNA, 21 nt, Human
cacuauguuagggcugaaggc

SEQ ID NO: 308943 - RNA, 21 nt, Human
cagcccacucaggggggaccc

SEQ ID NO: 308944 - RNA, 20 nt, Human
cccacauguggacagagggc

SEQ ID NO: 308945 - RNA, 23 nt, Human
cgacagcaccggcggccuggggu

SEQ ID NO: 308946 - RNA, 18 nt, Human
gcugaaggcaauuugggg

SEQ ID NO: 308947 - RNA, 19 nt, Human
gcugcauuguuauuccuaa

SEQ ID NO: 308948 - RNA, 19 nt, Human
gguccgagcggagugcgac

SEQ ID NO: 308949 - RNA, 19 nt, Human
uccgagcggagugcgacca

SEQ ID NO: 308950 - RNA, 27 nt, Human
uguuagggcugaaggcaauuugggggc

SEQ ID NO: 308951 - RNA, 19 nt, Human
aaacacaguacaguuuuug

SEQ ID NO: 308952 - RNA, 21 nt, Human
aagcuacaggacaauguaaac

SEQ ID NO: 308953 - RNA, 24 nt, Human
aaggcuccuccuccuccuccacuc

SEQ ID NO: 308954 - RNA, 19 nt, Human
acagcaccugcugcucucc

SEQ ID NO: 308955 - RNA, 19 nt, Human
acucuuaggaaugucagag

SEQ ID NO: 308956 - RNA, 21 nt, Human
aggaaugucaguagcuccuug

SEQ ID NO: 308957 - RNA, 21 nt, Human
auccagagcuggggcauggag

SEQ ID NO: 308958 - RNA, 19 nt, Human
caaagaacccaguucgcgg

SEQ ID NO: 308959 - RNA, 21 nt, Human
caacggcggcggcggcacccc

SEQ ID NO: 308960 - RNA, 23 nt, Human
caagauggaaggauccaucucca

SEQ ID NO: 308961 - RNA, 22 nt, Human
cacucuuaggaaugucaguagc

SEQ ID NO: 308962 - RNA, 18 nt, Human
cacugcuggaauccaggc

SEQ ID NO: 308963 - RNA, 27 nt, Human
cagcaaggcuccuccuccuccuccacu

SEQ ID NO: 308964 - RNA, 24 nt, Human
ccacuggcugaggcagccucucuc

SEQ ID NO: 308965 - RNA, 24 nt, Human
ccaucuccagaagucagggccaga

SEQ ID NO: 308966 - RNA, 22 nt, Human
cccacaagauggaaggauccau

SEQ ID NO: 308967 - RNA, 19 nt, Human
cccagcaaggcuccuccuc

SEQ ID NO: 308968 - RNA, 23 nt, Human
ccgcccgggagcaagcgcaacgg

SEQ ID NO: 308969 - RNA, 20 nt, Human
ccuccuccuccuccacucuu

SEQ ID NO: 308970 - RNA, 21 nt, Human
ccugcugcucuccaacgaggc

SEQ ID NO: 308971 - RNA, 25 nt, Human
cuccuccuccuccuccacucuuccc

SEQ ID NO: 308972 - RNA, 24 nt, Human
cugggggcggcggcggcacaggcc

SEQ ID NO: 308973 - RNA, 21 nt, Human
gaggcagccucucucuccaag

SEQ ID NO: 308974 - RNA, 19 nt, Human
gcgcacagcaccugcugcu

SEQ ID NO: 308975 - RNA, 20 nt, Human
ggaaggccgccacagggggc

SEQ ID NO: 308976 - RNA, 22 nt, Human
ggccaugguccuggccccacaa

SEQ ID NO: 308977 - RNA, 19 nt, Human
gggggcggcggcggcacag

SEQ ID NO: 308978 - RNA, 23 nt, Human
gucaguagcuccuuggagucucc

SEQ ID NO: 308979 - RNA, 22 nt, Human
gugugcuuaaugcgaaacacag

SEQ ID NO: 308980 - RNA, 19 nt, Human
uagcuccuuggagucuccu

SEQ ID NO: 308981 - RNA, 23 nt, Human
ucaguagcuccuuggagucuccu

SEQ ID NO: 308982 - RNA, 23 nt, Human
uccaaagaacccaguucgcggca

SEQ ID NO: 308983 - RNA, 25 nt, Human
uccaaagaacccaguucgcggcauu

SEQ ID NO: 308984 - RNA, 30 nt, Human
uccagagcuggggcauggaggcccaaaacc

SEQ ID NO: 308985 - RNA, 18 nt, Human
ucuccaacgaggcugggg

SEQ ID NO: 308986 - RNA, 21 nt, Human
ugccacuggcugaggcagccu

SEQ ID NO: 308987 - RNA, 22 nt, Human
uggccccacaagauggaaggau

SEQ ID NO: 308988 - RNA, 20 nt, Human
uggggcauggaggcccaaaa

SEQ ID NO: 308989 - RNA, 21 nt, Human
ugggggcggcggcggcacagg

SEQ ID NO: 308990 - RNA, 22 nt, Human
ugggggcggcggcggcacaggc

SEQ ID NO: 308991 - RNA, 21 nt, Human
uguuucccuggcccagcaagg

SEQ ID NO: 308992 - RNA, 20 nt, Human
uucccuggcccagcaaggcu

SEQ ID NO: 308993 - RNA, 23 nt, Human
uucccuggcccagcaaggcuccc

SEQ ID NO: 308994 - RNA, 18 nt, Human
uuggagucuccugugcca

SEQ ID NO: 308995 - RNA, 22 nt, Human
uuggagucuccugugccacugg

SEQ ID NO: 308996 - RNA, 26 nt, Human
aacacacaugcgcacacacacagugu

SEQ ID NO: 308997 - RNA, 21 nt, Human
acacacaugcgcacacacaca

SEQ ID NO: 308998 - RNA, 21 nt, Human
agaaggaaggaaucgggagaa

SEQ ID NO: 308999 - RNA, 22 nt, Human
cacaugcgcacacacacaauag

SEQ ID NO: 309000 - RNA, 21 nt, Human
cagcugcccgccugccccggg

SEQ ID NO: 309001 - RNA, 28 nt, Human
caugcgcacacacacaauacccuuacac

SEQ ID NO: 309002 - RNA, 19 nt, Human
cccgcgcgcgcagcccgcg

SEQ ID NO: 309003 - RNA, 20 nt, Human
cccgcgcgcgcagcccgcgg

SEQ ID NO: 309004 - RNA, 24 nt, Human
cccgcgcgcgcagcccgcgucccg

SEQ ID NO: 309005 - RNA, 23 nt, Human
cgcacacacacaauacccuuaca

SEQ ID NO: 309006 - RNA, 32 nt, Human
cgcacacacacaauacccuuacacacauagug

SEQ ID NO: 309007 - RNA, 28 nt, Human
cgcagcccgcgucccgacucgggucacc

SEQ ID NO: 309008 - RNA, 21 nt, Human
cgcgcgcgcagcccgcguccc

SEQ ID NO: 309009 - RNA, 18 nt, Human
cugcccgccugccccggg

SEQ ID NO: 309010 - RNA, 19 nt, Human
cuggccgugccgcccgggc

SEQ ID NO: 309011 - RNA, 25 nt, Human
gaaaauaauaggaaauuaccccaac

SEQ ID NO: 309012 - RNA, 20 nt, Human
gggagaaaucaggaagcugg

SEQ ID NO: 309013 - RNA, 21 nt, Human
gggagaaaucaggaagcuggc

SEQ ID NO: 309014 - RNA, 22 nt, Human
ggggucccgcgcgcgcagcccg

SEQ ID NO: 309015 - RNA, 21 nt, Human
gugccgcccgggcacagcugc

SEQ ID NO: 309016 - RNA, 26 nt, Human
uacaugcaaacacacaugcgcacaca

SEQ ID NO: 309017 - RNA, 21 nt, Human
uccaagaugaaaauaauagga

SEQ ID NO: 309018 - RNA, 23 nt, Human
uccaagaugaaaauaauaggaaa

SEQ ID NO: 309019 - RNA, 23 nt, Human
ugaagaaaagaugucacagauua

SEQ ID NO: 309020 - RNA, 23 nt, Human
ugagaggccaaaaaugaggagca

SEQ ID NO: 309021 - RNA, 21 nt, Human
uugaagaaaagaugucacaga

SEQ ID NO: 309022 - RNA, 23 nt, Human
aacagaguacaugcuaccaacaa

SEQ ID NO: 309023 - RNA, 20 nt, Human
aaggggccgcuagcaccugc

SEQ ID NO: 309024 - RNA, 21 nt, Human
aaggggcugcagggcgaaggg

SEQ ID NO: 309025 - RNA, 21 nt, Human
cccuccccagucauuccaaaa

SEQ ID NO: 309026 - RNA, 20 nt, Human
ggauacgagaaugcgucagg

SEQ ID NO: 309027 - RNA, 19 nt, Human
gggcgaaggggccgcuagc

SEQ ID NO: 309028 - RNA, 22 nt, Human
uaggcagaaggaauuauaaagu

SEQ ID NO: 309029 - RNA, 23 nt, Human
ucaaugugacugcagcccucccc

SEQ ID NO: 309030 - RNA, 19 nt, Human
uccccaggaagucacugug

SEQ ID NO: 309031 - RNA, 20 nt, Human
ucucagggcuccucgugccu

SEQ ID NO: 309032 - RNA, 21 nt, Human
ucuuugagcugccaaugaaua

SEQ ID NO: 309033 - RNA, 19 nt, Human
ugacugcagcccuccccag

SEQ ID NO: 309034 - RNA, 24 nt, Human
ugcagcccuccccagucauuccaa

SEQ ID NO: 309035 - RNA, 24 nt, Human
uggacagaguaaaagcaaaggggc

SEQ ID NO: 309036 - RNA, 19 nt, Human
aagaggaagggaacaaugg

SEQ ID NO: 309037 - RNA, 25 nt, Human
aaugccugccuccccagaucucaaa

SEQ ID NO: 309038 - RNA, 23 nt, Human
agccggagcccacgccccggccg

SEQ ID NO: 309039 - RNA, 26 nt, Human
agggagccagacgugguggggcacag

SEQ ID NO: 309040 - RNA, 22 nt, Human
agggaggggguucaagggcagg

SEQ ID NO: 309041 - RNA, 20 nt, Human
agggcacugcccucaguccu

SEQ ID NO: 309042 - RNA, 20 nt, Human
auugaacggauacaaaguua

SEQ ID NO: 309043 - RNA, 18 nt, Human
cacugggcagcagggggg

SEQ ID NO: 309044 - RNA, 19 nt, Human
cagggagccagacguggug

SEQ ID NO: 309045 - RNA, 18 nt, Human
ccccagaucucaaagggc

SEQ ID NO: 309046 - RNA, 19 nt, Human
ccggagcccacgccccggc

SEQ ID NO: 309047 - RNA, 22 nt, Human
ccggagcugcagccggagccca

SEQ ID NO: 309048 - RNA, 23 nt, Human
ccuggggcagagcccccuucucc

SEQ ID NO: 309049 - RNA, 21 nt, Human
cucuguaacaccucuaguucc

SEQ ID NO: 309050 - RNA, 22 nt, Human
cuucaggaaugccugccucccc

SEQ ID NO: 309051 - RNA, 19 nt, Human
gacagggaggggguucaag

SEQ ID NO: 309052 - RNA, 22 nt, Human
gacagggaggggguucaagggc

SEQ ID NO: 309053 - RNA, 21 nt, Human
gcaggaagaggaagggaacaa

SEQ ID NO: 309054 - RNA, 22 nt, Human
gcuugacccugcucacccuggc

SEQ ID NO: 309055 - RNA, 18 nt, Human
gcuuuauccuucccucca

SEQ ID NO: 309056 - RNA, 18 nt, Human
ggagccagacgugguggg

SEQ ID NO: 309057 - RNA, 22 nt, Human
ggagcugugcuucuccuuugca

SEQ ID NO: 309058 - RNA, 18 nt, Human
ggccuggggcagagcccc

SEQ ID NO: 309059 - RNA, 24 nt, Human
gggaacaauggguaguagggccgg

SEQ ID NO: 309060 - RNA, 26 nt, Human
gggcaggaagaggaagggaacaaugg

SEQ ID NO: 309061 - RNA, 20 nt, Human
ggggguucaagggcaggaag

SEQ ID NO: 309062 - RNA, 24 nt, Human
guggggcacagcagcuggugaccu

SEQ ID NO: 309063 - RNA, 23 nt, Human
uaagaggcuugacccugcucacc

SEQ ID NO: 309064 - RNA, 20 nt, Human
uaaugugcccuccuuccuuc

SEQ ID NO: 309065 - RNA, 20 nt, Human
ucagcaggcugguggaggga

SEQ ID NO: 309066 - RNA, 19 nt, Human
uccuuccccuggugggggc

SEQ ID NO: 309067 - RNA, 20 nt, Human
uccuuccuuccccugguggg

SEQ ID NO: 309068 - RNA, 25 nt, Human
ugcagcauggagaagugguuugcac

SEQ ID NO: 309069 - RNA, 22 nt, Human
uggaauaagaggcuugacccug

SEQ ID NO: 309070 - RNA, 19 nt, Human
uggcagcaaugggcuggga

SEQ ID NO: 309071 - RNA, 23 nt, Human
ugggagggcccugggacagggag

SEQ ID NO: 309072 - RNA, 21 nt, Human
uggugggggcugaagccagaa

SEQ ID NO: 309073 - RNA, 24 nt, Human
uucaagggcaggaagaggaaggga

SEQ ID NO: 309074 - RNA, 21 nt, Human
aagcaaacguguggcucguca

SEQ ID NO: 309075 - RNA, 24 nt, Human
acagaagagauugucgcacccgga

SEQ ID NO: 309076 - RNA, 22 nt, Human
acagggaagaagcaaacgugug

SEQ ID NO: 309077 - RNA, 18 nt, Human
cacccggaagugacgggg

SEQ ID NO: 309078 - RNA, 18 nt, Human
ccuaacgacuccagcggc

SEQ ID NO: 309079 - RNA, 19 nt, Human
ggcaccuaacgacuccagc

SEQ ID NO: 309080 - RNA, 19 nt, Human
gggaacacagggaagaagc

SEQ ID NO: 309081 - RNA, 27 nt, Human
gggaacacagggaagaagccgguaccc

SEQ ID NO: 309082 - RNA, 21 nt, Human
guguggcucgucagaagcaag

SEQ ID NO: 309083 - RNA, 25 nt, Human
ugggaacacagggaagaagcaaacg

SEQ ID NO: 309084 - RNA, 21 nt, Human
aaacagaaucucacagaugug

SEQ ID NO: 309085 - RNA, 25 nt, Human
aaacccucaaaaccaccacugcucu

SEQ ID NO: 309086 - RNA, 20 nt, Human
aaagacaguucuuuaccucu

SEQ ID NO: 309087 - RNA, 22 nt, Human
aaaugaaacagaaucucacaga

SEQ ID NO: 309088 - RNA, 20 nt, Human
aacaaagggagacccucuca

SEQ ID NO: 309089 - RNA, 27 nt, Human
aacguuagagaaaugcuccagaaagga

SEQ ID NO: 309090 - RNA, 18 nt, Human
aagcugaggcacgaacgc

SEQ ID NO: 309091 - RNA, 18 nt, Human
aaggacccucagcuacuc

SEQ ID NO: 309092 - RNA, 23 nt, Human
aaguagaagaugucuaaagagaa

SEQ ID NO: 309093 - RNA, 21 nt, Human
aaugaggaaaaauguucuacu

SEQ ID NO: 309094 - RNA, 18 nt, Human
accccugggcuguuuccc

SEQ ID NO: 309095 - RNA, 19 nt, Human
acuguacuacagaucagca

SEQ ID NO: 309096 - RNA, 23 nt, Human
acuguacuacagaucagcaacag

SEQ ID NO: 309097 - RNA, 23 nt, Human
agagaacaaaagagguuucuucc

SEQ ID NO: 309098 - RNA, 21 nt, Human
agaugcugcgcaaugcuaaca

SEQ ID NO: 309099 - RNA, 19 nt, Human
agauuuuuuuuuuuuuaag

SEQ ID NO: 309100 - RNA, 22 nt, Human
agcagaacaacuagauacacua

SEQ ID NO: 309101 - RNA, 22 nt, Human
agcuggccaguaguucagcccc

SEQ ID NO: 309102 - RNA, 20 nt, Human
aggaacaaagggagacccuc

SEQ ID NO: 309103 - RNA, 23 nt, Human
aggaggggaggaggaaugcagga

SEQ ID NO: 309104 - RNA, 18 nt, Human
aggauuugauaaaaugag

SEQ ID NO: 309105 - RNA, 21 nt, Human
aggccaagagcaaguagaaga

SEQ ID NO: 309106 - RNA, 21 nt, Human
agggggaccucaggaaucuac

SEQ ID NO: 309107 - RNA, 21 nt, Human
aguggaauagggcuccucugg

SEQ ID NO: 309108 - RNA, 23 nt, Human
agugggaacagcuucaggaaugu

SEQ ID NO: 309109 - RNA, 24 nt, Human
augcaaaggucacucucaggcaac

SEQ ID NO: 309110 - RNA, 21 nt, Human
auugcaaauaaguucccaauu

SEQ ID NO: 309111 - RNA, 23 nt, Human
auuuuuuuuuuuuuaagcuaggg

SEQ ID NO: 309112 - RNA, 19 nt, Human
caaaacccucaaaaccacc

SEQ ID NO: 309113 - RNA, 20 nt, Human
caaaacccucaaaaccacca

SEQ ID NO: 309114 - RNA, 21 nt, Human
caaaaguaauagaagucaaaa

SEQ ID NO: 309115 - RNA, 23 nt, Human
caauacaaugcaggggaaccuug

SEQ ID NO: 309116 - RNA, 22 nt, Human
caccaggcaguugcccaggccu

SEQ ID NO: 309117 - RNA, 23 nt, Human
caccaggcaguugcccaggccuc

SEQ ID NO: 309118 - RNA, 21 nt, Human
cagaagacacaacuuuccagg

SEQ ID NO: 309119 - RNA, 25 nt, Human
cagaaucucacagaugugggguccc

SEQ ID NO: 309120 - RNA, 19 nt, Human
cagaguggaauagggcucc

SEQ ID NO: 309121 - RNA, 23 nt, Human
cagcugccgcaagacacauucac

SEQ ID NO: 309122 - RNA, 19 nt, Human
cagcuucaggaauguuaca

SEQ ID NO: 309123 - RNA, 19 nt, Human
cagguccuggacugagcuu

SEQ ID NO: 309124 - RNA, 24 nt, Human
ccaaaaguaauagaagucaaaacc

SEQ ID NO: 309125 - RNA, 22 nt, Human
ccaggccucucacccauggggg

SEQ ID NO: 309126 - RNA, 25 nt, Human
ccccccugcaaaugaaaacuuccca

SEQ ID NO: 309127 - RNA, 21 nt, Human
cccgggucucuuucccagaag

SEQ ID NO: 309128 - RNA, 21 nt, Human
cccucaaaaccaccacugcuc

SEQ ID NO: 309129 - RNA, 21 nt, Human
ccucaaaaccaccacugcucu

SEQ ID NO: 309130 - RNA, 21 nt, Human
ccuccccgggucucuuuccca

SEQ ID NO: 309131 - RNA, 24 nt, Human
ccucucagaaguucuguguggcuc

SEQ ID NO: 309132 - RNA, 19 nt, Human
cuacucuccuuucuuuccu

SEQ ID NO: 309133 - RNA, 19 nt, Human
cucaggaggggaggaggaa

SEQ ID NO: 309134 - RNA, 25 nt, Human
cucuccuuucuuuccuggagccuuu

SEQ ID NO: 309135 - RNA, 21 nt, Human
cugucuuucucaauuuuggag

SEQ ID NO: 309136 - RNA, 22 nt, Human
gaaacagaaucucacagaugug

SEQ ID NO: 309137 - RNA, 25 nt, Human
gaacagcuucaggaauguuacaggg

SEQ ID NO: 309138 - RNA, 26 nt, Human
gaaggacaccagcagaacuggagacc

SEQ ID NO: 309139 - RNA, 20 nt, Human
gaaguucuguguggcucuga

SEQ ID NO: 309140 - RNA, 19 nt, Human
gaaguuuuugaguaggaug

SEQ ID NO: 309141 - RNA, 18 nt, Human
gaggaaaaauguucuacu

SEQ ID NO: 309142 - RNA, 22 nt, Human
gaggggaggaggaaugcaggag

SEQ ID NO: 309143 - RNA, 19 nt, Human
gaugaggaagaaagaagag

SEQ ID NO: 309144 - RNA, 18 nt, Human
gcaauaucauuuacugga

SEQ ID NO: 309145 - RNA, 19 nt, Human
gcuccagaaaggaacaaag

SEQ ID NO: 309146 - RNA, 22 nt, Human
gcugcgcaaugcuaacagcccc

SEQ ID NO: 309147 - RNA, 19 nt, Human
gcuuaaagcugaggcacga

SEQ ID NO: 309148 - RNA, 18 nt, Human
ggaaccuugcacaccaca

SEQ ID NO: 309149 - RNA, 23 nt, Human
ggggcagaggggcugcagugagc

SEQ ID NO: 309150 - RNA, 24 nt, Human
gggucauggauaggggcagagggg

SEQ ID NO: 309151 - RNA, 22 nt, Human
gucaaaacccucaaaaccaccc

SEQ ID NO: 309152 - RNA, 22 nt, Human
uacuccuggccuccccgggucu

SEQ ID NO: 309153 - RNA, 23 nt, Human
uacuuuaacacugaguguagaaa

SEQ ID NO: 309154 - RNA, 19 nt, Human
uaggggcagaggggcugca

SEQ ID NO: 309155 - RNA, 22 nt, Human
ucagaacucaagcaggagcugc

SEQ ID NO: 309156 - RNA, 24 nt, Human
ucagaacucaagcaggagcugcug

SEQ ID NO: 309157 - RNA, 23 nt, Human
ucagaaguucuguguggcucuga

SEQ ID NO: 309158 - RNA, 18 nt, Human
uccagaagaggcccugag

SEQ ID NO: 309159 - RNA, 24 nt, Human
uccccgggucucuuucccagaagg

SEQ ID NO: 309160 - RNA, 18 nt, Human
ucccucaggaggggagga

SEQ ID NO: 309161 - RNA, 18 nt, Human
ucucacagaugugggguc

SEQ ID NO: 309162 - RNA, 19 nt, Human
ucucacagauguggggucc

SEQ ID NO: 309163 - RNA, 19 nt, Human
ucucagaucagccuaaaac

SEQ ID NO: 309164 - RNA, 21 nt, Human
ucuguaaaccucaaaugaaac

SEQ ID NO: 309165 - RNA, 21 nt, Human
ucuguguggcucugaguccuu

SEQ ID NO: 309166 - RNA, 20 nt, Human
ugaaaacuucccaccccugg

SEQ ID NO: 309167 - RNA, 23 nt, Human
ugaaaacuucccaccccugggcu

SEQ ID NO: 309168 - RNA, 18 nt, Human
ugaaacagaaucucacag

SEQ ID NO: 309169 - RNA, 21 nt, Human
ugaagauaacugaaggccagu

SEQ ID NO: 309170 - RNA, 21 nt, Human
ugccaaaaguaauagaaguca

SEQ ID NO: 309171 - RNA, 19 nt, Human
ugcgcaaugcuaacagccc

SEQ ID NO: 309172 - RNA, 22 nt, Human
uggacaggcagaugcaaagguc

SEQ ID NO: 309173 - RNA, 23 nt, Human
uggacaggcagaugcaaagguca

SEQ ID NO: 309174 - RNA, 25 nt, Human
uggacugagcuuguccaugggccgg

SEQ ID NO: 309175 - RNA, 23 nt, Human
uggcuggacaggcagaugcaaag

SEQ ID NO: 309176 - RNA, 19 nt, Human
ugggagugggaacagcuuc

SEQ ID NO: 309177 - RNA, 21 nt, Human
ugggagugggaacagcuucag

SEQ ID NO: 309178 - RNA, 22 nt, Human
uggggcagauuuuuuuuuuuuu

SEQ ID NO: 309179 - RNA, 21 nt, Human
uggggggaacacaucuggccg

SEQ ID NO: 309180 - RNA, 18 nt, Human
uggugaguuacauucaga

SEQ ID NO: 309181 - RNA, 18 nt, Human
uguccaugggcuucccuc

SEQ ID NO: 309182 - RNA, 21 nt, Human
ugucuaaagagaacaaaagag

SEQ ID NO: 309183 - RNA, 22 nt, Human
uguuacaggggaauugagggag

SEQ ID NO: 309184 - RNA, 20 nt, Human
uuaaagcugaggcacgaacc

SEQ ID NO: 309185 - RNA, 21 nt, Human
uuacuggagaacugaagaugc

SEQ ID NO: 309186 - RNA, 22 nt, Human
uuacuggagaacugaagaugcu

SEQ ID NO: 309187 - RNA, 24 nt, Human
uucaccaggcaguugcccaggccu

SEQ ID NO: 309188 - RNA, 22 nt, Human
uucucaauuuuggagaagaauc

SEQ ID NO: 309189 - RNA, 18 nt, Human
uuuucuguaaaccucaaa

SEQ ID NO: 309190 - RNA, 21 nt, Human
uuuuuuuuuuaagcuaggggg

SEQ ID NO: 309191 - RNA, 21 nt, Human
aaaaccaaaauuuacucaaau

SEQ ID NO: 309192 - RNA, 21 nt, Human
aaaaugccgagguuuggcgua

SEQ ID NO: 309193 - RNA, 22 nt, Human
aaccaaaauuuacucaaaucaa

SEQ ID NO: 309194 - RNA, 18 nt, Human
aaucccuacccacguccc

SEQ ID NO: 309195 - RNA, 21 nt, Human
agaaaauaacacaaaaaaugc

SEQ ID NO: 309196 - RNA, 20 nt, Human
agaauccagcagucagaaaa

SEQ ID NO: 309197 - RNA, 23 nt, Human
agcugguagcuggggacaguguc

SEQ ID NO: 309198 - RNA, 23 nt, Human
cuacccacgucccagccucuagg

SEQ ID NO: 309199 - RNA, 19 nt, Human
gagucagugcgucacucug

SEQ ID NO: 309200 - RNA, 20 nt, Human
gcagucagaaaauaacacaa

SEQ ID NO: 309201 - RNA, 24 nt, Human
gcccagaaagugggucccaauccc

SEQ ID NO: 309202 - RNA, 22 nt, Human
gcuaaaucccuacccacguccc

SEQ ID NO: 309203 - RNA, 19 nt, Human
uacagaauccagcagucag

SEQ ID NO: 309204 - RNA, 22 nt, Human
uacuacagaauccagcagucag

SEQ ID NO: 309205 - RNA, 23 nt, Human
ucaaaguuaaguacagaguuuau

SEQ ID NO: 309206 - RNA, 19 nt, Human
ucccagccucuaggugagu

SEQ ID NO: 309207 - RNA, 24 nt, Human
ugcuaaaucccuacccacguccca

SEQ ID NO: 309208 - RNA, 23 nt, Human
ugucauagcuaugucaccuuacu

SEQ ID NO: 309209 - RNA, 21 nt, Human
uuacugccaguuauuuccagc

SEQ ID NO: 309210 - RNA, 20 nt, Human
aaaaaauagaaagcaaccau

SEQ ID NO: 309211 - RNA, 24 nt, Human
aaaaaauagaaagcaaccauguuc

SEQ ID NO: 309212 - RNA, 20 nt, Human
aacaauacaguauaacaacu

SEQ ID NO: 309213 - RNA, 21 nt, Human
aagaaaccuccauacccaaga

SEQ ID NO: 309214 - RNA, 22 nt, Human
acaauacaguauaacaacgauu

SEQ ID NO: 309215 - RNA, 23 nt, Human
acaauuugagucaaacaugugau

SEQ ID NO: 309216 - RNA, 19 nt, Human
acuucagucccaaacauag

SEQ ID NO: 309217 - RNA, 21 nt, Human
acuugaaaaagaugagagaaa

SEQ ID NO: 309218 - RNA, 27 nt, Human
agaaaaaauagaaagcaaccgguaccc

SEQ ID NO: 309219 - RNA, 18 nt, Human
agccacagggguccugga

SEQ ID NO: 309220 - RNA, 23 nt, Human
aggaaaagucugaccuaggucug

SEQ ID NO: 309221 - RNA, 24 nt, Human
aguggaacuccauuuuugacaggu

SEQ ID NO: 309222 - RNA, 21 nt, Human
auagaaagcaaccauguucua

SEQ ID NO: 309223 - RNA, 23 nt, Human
caagaaaaaauagaaagcaacca

SEQ ID NO: 309224 - RNA, 26 nt, Human
caagaaaccuccauacccaagaaaaa

SEQ ID NO: 309225 - RNA, 19 nt, Human
cacaaauucaaccaacugu

SEQ ID NO: 309226 - RNA, 18 nt, Human
cacauccacaaauucaac

SEQ ID NO: 309227 - RNA, 25 nt, Human
cagcagugcccagaaaguguguccc

SEQ ID NO: 309228 - RNA, 21 nt, Human
cauccacaaauucaaccaacu

SEQ ID NO: 309229 - RNA, 19 nt, Human
cauuuuacauaagggacuu

SEQ ID NO: 309230 - RNA, 22 nt, Human
ccacaaauucaaccaacugugg

SEQ ID NO: 309231 - RNA, 23 nt, Human
ccacaaauucaaccaacugugga

SEQ ID NO: 309232 - RNA, 23 nt, Human
cccucacagacacagacggacac

SEQ ID NO: 309233 - RNA, 23 nt, Human
cccucuguauccauggguuccac

SEQ ID NO: 309234 - RNA, 19 nt, Human
gaaccaaucccucacagac

SEQ ID NO: 309235 - RNA, 24 nt, Human
gcccagaaagugugucccaauccc

SEQ ID NO: 309236 - RNA, 18 nt, Human
gucaucuuuggucuuuuc

SEQ ID NO: 309237 - RNA, 20 nt, Human
gugccaaaaauaguugaaca

SEQ ID NO: 309238 - RNA, 20 nt, Human
guuggcccucuguauccaug

SEQ ID NO: 309239 - RNA, 25 nt, Human
uaaaacauaauacaaauaaaaacaa

SEQ ID NO: 309240 - RNA, 26 nt, Human
uacaguagaugaacacaaagaugaaa

SEQ ID NO: 309241 - RNA, 24 nt, Human
uacauagcauuuacauuauauuag

SEQ ID NO: 309242 - RNA, 24 nt, Human
uacccaagaaaaaauagaaagcaa

SEQ ID NO: 309243 - RNA, 19 nt, Human
uagggauugcacaagagaa

SEQ ID NO: 309244 - RNA, 20 nt, Human
ucacagacacagacggacac

SEQ ID NO: 309245 - RNA, 19 nt, Human
ucagucccaaacauaguca

SEQ ID NO: 309246 - RNA, 23 nt, Human
uccacaaauucaaccaacugugg

SEQ ID NO: 309247 - RNA, 24 nt, Human
ucccucacagacacagacggacac

SEQ ID NO: 309248 - RNA, 24 nt, Human
ucccucuguaguucuuuccauucc

SEQ ID NO: 309249 - RNA, 18 nt, Human
ucuuuccauucccagucu

SEQ ID NO: 309250 - RNA, 19 nt, Human
ugaaaggaaaagucugacu

SEQ ID NO: 309251 - RNA, 19 nt, Human
ugagagaaaauaacaauau

SEQ ID NO: 309252 - RNA, 23 nt, Human
ugagagaaaauaacaauaugaca

SEQ ID NO: 309253 - RNA, 24 nt, Human
ugaugccauuuuuuguuuuggaca

SEQ ID NO: 309254 - RNA, 22 nt, Human
ugcggggagaaguggaacucca

SEQ ID NO: 309255 - RNA, 22 nt, Human
uggaaaagacuugaaaaagaug

SEQ ID NO: 309256 - RNA, 23 nt, Human
uucaaccaacuguggauggaaaa

SEQ ID NO: 309257 - RNA, 22 nt, Human
uucaagaaaccuccauacccaa

SEQ ID NO: 309258 - RNA, 21 nt, Human
uucauugauuuuuuuuuuuaa

SEQ ID NO: 309259 - RNA, 20 nt, Human
uuccacauccacaaauucaa

SEQ ID NO: 309260 - RNA, 24 nt, Human
uucuucuauguucuaggucuucaa

SEQ ID NO: 309261 - RNA, 25 nt, Human
aaaaaaaaaggaaacaacuuaaaag

SEQ ID NO: 309262 - RNA, 18 nt, Human
aaaaaagaaaaaaaaagg

SEQ ID NO: 309263 - RNA, 27 nt, Human
aaaaaaggaaacaacuuaaaaguccau

SEQ ID NO: 309264 - RNA, 20 nt, Human
aaaaaggaaacaacuuaaaa

SEQ ID NO: 309265 - RNA, 26 nt, Human
aaacacccaagagcuuuugcaucuga

SEQ ID NO: 309266 - RNA, 20 nt, Human
aaagacacacauccuuuugc

SEQ ID NO: 309267 - RNA, 18 nt, Human
aaauaaacacccaagagc

SEQ ID NO: 309268 - RNA, 24 nt, Human
aacacucacuccggcugaccgcca

SEQ ID NO: 309269 - RNA, 22 nt, Human
aacggucaaauaucuuuuggcc

SEQ ID NO: 309270 - RNA, 24 nt, Human
aacuggcucugagagugaagcccc

SEQ ID NO: 309271 - RNA, 20 nt, Human
aagaaaaaaaaaggaaacaa

SEQ ID NO: 309272 - RNA, 21 nt, Human
aagcacacaggccuggacuca

SEQ ID NO: 309273 - RNA, 24 nt, Human
aagcaggcaugcguaacaccccac

SEQ ID NO: 309274 - RNA, 23 nt, Human
aagcuucaacuucuucccuuuaa

SEQ ID NO: 309275 - RNA, 18 nt, Human
aaggcaggugccccagga

SEQ ID NO: 309276 - RNA, 21 nt, Human
aaggcaggugccccaggaccc

SEQ ID NO: 309277 - RNA, 18 nt, Human
acaaaaaucucuccaagc

SEQ ID NO: 309278 - RNA, 20 nt, Human
acaaaaaucucuccaagcug

SEQ ID NO: 309279 - RNA, 20 nt, Human
accccaacacucacuccggc

SEQ ID NO: 309280 - RNA, 18 nt, Human
agaaaaaaaaaggaaaca

SEQ ID NO: 309281 - RNA, 24 nt, Human
agaaaaaaaaaggaaacaacuuaa

SEQ ID NO: 309282 - RNA, 21 nt, Human
agagaaacccgccggcccggg

SEQ ID NO: 309283 - RNA, 23 nt, Human
agagaaacccgccggcccggggc

SEQ ID NO: 309284 - RNA, 19 nt, Human
agagauggcaccguggugg

SEQ ID NO: 309285 - RNA, 19 nt, Human
agagcgagugggauuuaua

SEQ ID NO: 309286 - RNA, 18 nt, Human
agccugcugggagccuug

SEQ ID NO: 309287 - RNA, 19 nt, Human
aggaccccaacacucacuc

SEQ ID NO: 309288 - RNA, 18 nt, Human
aggugccccaggacccca

SEQ ID NO: 309289 - RNA, 25 nt, Human
auaaaauaaaaauaaaaagugcgcc

SEQ ID NO: 309290 - RNA, 21 nt, Human
aucaccauuuugguuccccag

SEQ ID NO: 309291 - RNA, 21 nt, Human
aucaggaugaggcugagcucc

SEQ ID NO: 309292 - RNA, 22 nt, Human
aucucuccaagcuguauuauua

SEQ ID NO: 309293 - RNA, 19 nt, Human
caaaaaagaaaaaaaaagg

SEQ ID NO: 309294 - RNA, 18 nt, Human
caaaaaucucuccaagcu

SEQ ID NO: 309295 - RNA, 20 nt, Human
caaaguagccugcugggagc

SEQ ID NO: 309296 - RNA, 22 nt, Human
caguagcaaaaaagaaaaaaaa

SEQ ID NO: 309297 - RNA, 23 nt, Human
caucagaggauguucaucagagg

SEQ ID NO: 309298 - RNA, 25 nt, Human
ccaacacucacuccggcugaccgcc

SEQ ID NO: 309299 - RNA, 19 nt, Human
ccaggaccccaacacucac

SEQ ID NO: 309300 - RNA, 31 nt, Human
ccucgcuccucaagcuucaacuucuucccuu

SEQ ID NO: 309301 - RNA, 23 nt, Human
cgagugggauuuauaaugugaua

SEQ ID NO: 309302 - RNA, 23 nt, Human
cguaacaccccacagcuugugua

SEQ ID NO: 309303 - RNA, 18 nt, Human
cguggcaaauauuuaucc

SEQ ID NO: 309304 - RNA, 22 nt, Human
gaucauccuagaucacagagga

SEQ ID NO: 309305 - RNA, 21 nt, Human
gccuggacucagccugugaag

SEQ ID NO: 309306 - RNA, 22 nt, Human
gccugggcagugcggguucugu

SEQ ID NO: 309307 - RNA, 26 nt, Human
gcucgccugggcagugcggguucugu

SEQ ID NO: 309308 - RNA, 19 nt, Human
ggcccggggcgcggcggcu

SEQ ID NO: 309309 - RNA, 20 nt, Human
gggaacaggggagcucgggg

SEQ ID NO: 309310 - RNA, 24 nt, Human
gggaacaggggagcucggggagaa

SEQ ID NO: 309311 - RNA, 21 nt, Human
guaacaccccacagcuugugu

SEQ ID NO: 309312 - RNA, 23 nt, Human
gugaagccccaaaaggaugcuaa

SEQ ID NO: 309313 - RNA, 21 nt, Human
gugcauagcccugcauacaca

SEQ ID NO: 309314 - RNA, 24 nt, Human
guuaaagagaugaaaaaucaaguu

SEQ ID NO: 309315 - RNA, 19 nt, Human
guuggggaugaacuguggc

SEQ ID NO: 309316 - RNA, 20 nt, Human
uaaacacaagcggggagugc

SEQ ID NO: 309317 - RNA, 23 nt, Human
uaaauaaacacccaagagcuuuu

SEQ ID NO: 309318 - RNA, 20 nt, Human
uaaugugauacaaaaaucuc

SEQ ID NO: 309319 - RNA, 23 nt, Human
uagcaaaaaagaaaaaaaaagga

SEQ ID NO: 309320 - RNA, 21 nt, Human
uaggguuggggaugaacugug

SEQ ID NO: 309321 - RNA, 22 nt, Human
ucaaaaccuucugucuggaccu

SEQ ID NO: 309322 - RNA, 23 nt, Human
ucaccauuuugguuccccagcau

SEQ ID NO: 309323 - RNA, 23 nt, Human
ucagugcuaagaaugugucaaaa

SEQ ID NO: 309324 - RNA, 20 nt, Human
uccauauuaugcaguaguua

SEQ ID NO: 309325 - RNA, 28 nt, Human
ucggggagaaagacacacauccuuuugc

SEQ ID NO: 309326 - RNA, 25 nt, Human
ugaagccccaaaaggaugcuaaaaa

SEQ ID NO: 309327 - RNA, 23 nt, Human
ugacaggaguuacucauucgugg

SEQ ID NO: 309328 - RNA, 18 nt, Human
ugaggcugagcuccccag

SEQ ID NO: 309329 - RNA, 25 nt, Human
ugcauacacaagagauggcaccgug

SEQ ID NO: 309330 - RNA, 22 nt, Human
ugcauacacacgugccugcagg

SEQ ID NO: 309331 - RNA, 18 nt, Human
ugcugggagccuugauca

SEQ ID NO: 309332 - RNA, 21 nt, Human
uggcucugagagugaagcccc

SEQ ID NO: 309333 - RNA, 20 nt, Human
uggcugugagcaagcagcug

SEQ ID NO: 309334 - RNA, 24 nt, Human
ugggagccuugaucaucagaggau

SEQ ID NO: 309335 - RNA, 20 nt, Human
uggugguuuucaaugaaggg

SEQ ID NO: 309336 - RNA, 23 nt, Human
uguaaggcaggugccccaggacc

SEQ ID NO: 309337 - RNA, 22 nt, Human
ugucccuuaaaaacuggcucug

SEQ ID NO: 309338 - RNA, 19 nt, Human
uguguaaacacaagcgggg

SEQ ID NO: 309339 - RNA, 21 nt, Human
uuaaagagaugaaaaaucaag

SEQ ID NO: 309340 - RNA, 28 nt, Human
uuaaauaaacacccaagagcuuuugcau

SEQ ID NO: 309341 - RNA, 24 nt, Human
uuauaguaacaaccaagccauaga

SEQ ID NO: 309342 - RNA, 22 nt, Human
uucaacuucuucccuuuaaugu

SEQ ID NO: 309343 - RNA, 20 nt, Human
uugguuccccagcaucaaaa

SEQ ID NO: 309344 - RNA, 22 nt, Human
uuguuagagaaacccgccggcc

SEQ ID NO: 309345 - RNA, 23 nt, Human
uuucaaugaaggggaacagggga

SEQ ID NO: 309346 - RNA, 19 nt, Human
uuuguuagagaaacccgcc

SEQ ID NO: 309347 - RNA, 22 nt, Human
uuuugcaauauuugaauucugu

SEQ ID NO: 309348 - RNA, 18 nt, Human
aaagauaaaaagcuggca

SEQ ID NO: 309349 - RNA, 24 nt, Human
aagcugauguggcaagcugcagau

SEQ ID NO: 309350 - RNA, 26 nt, Human
aagcugcagaucuagagguuguagca

SEQ ID NO: 309351 - RNA, 26 nt, Human
aaguggucgagagaaagauaaaaagc

SEQ ID NO: 309352 - RNA, 27 nt, Human
agaaacucuucuacucaggaagugguc

SEQ ID NO: 309353 - RNA, 21 nt, Human
agaccugaaaaauacuuagua

SEQ ID NO: 309354 - RNA, 21 nt, Human
agagaaagauaaaaagcuggc

SEQ ID NO: 309355 - RNA, 24 nt, Human
agaucuagagguuguagcagaacu

SEQ ID NO: 309356 - RNA, 21 nt, Human
aggaaguggucuguuauacaa

SEQ ID NO: 309357 - RNA, 21 nt, Human
auauaacacgcaaaauaugug

SEQ ID NO: 309358 - RNA, 19 nt, Human
auauuuggagagagaauuc

SEQ ID NO: 309359 - RNA, 19 nt, Human
auguacuagaauucuguga

SEQ ID NO: 309360 - RNA, 21 nt, Human
caaccugcaaaaucauucuga

SEQ ID NO: 309361 - RNA, 20 nt, Human
caagauccaacagaugaaua

SEQ ID NO: 309362 - RNA, 21 nt, Human
caguucucaucuguugaucau

SEQ ID NO: 309363 - RNA, 22 nt, Human
cauuuuauacacuuauuuugaa

SEQ ID NO: 309364 - RNA, 24 nt, Human
cgaauugucagcuccccuaacccc

SEQ ID NO: 309365 - RNA, 18 nt, Human
cuacagugccuuaaauga

SEQ ID NO: 309366 - RNA, 23 nt, Human
cucacugucacauauuaaccacc

SEQ ID NO: 309367 - RNA, 22 nt, Human
cuuacuuuuccauacuugauuc

SEQ ID NO: 309368 - RNA, 18 nt, Human
gaaagauaaaaagcuggc

SEQ ID NO: 309369 - RNA, 21 nt, Human
gcuggaauggaagacaaccug

SEQ ID NO: 309370 - RNA, 22 nt, Human
ggaauggaagacaaccugcaaa

SEQ ID NO: 309371 - RNA, 19 nt, Human
gucagcuccccuaaccccc

SEQ ID NO: 309372 - RNA, 20 nt, Human
gucuucuuuuagguagccuu

SEQ ID NO: 309373 - RNA, 20 nt, Human
uaaaagauguuaauguggca

SEQ ID NO: 309374 - RNA, 20 nt, Human
uaaaugaagauuagauucug

SEQ ID NO: 309375 - RNA, 23 nt, Human
uacauguacuagaauucugugau

SEQ ID NO: 309376 - RNA, 24 nt, Human
uagaaaaaauacaauuucuguuuu

SEQ ID NO: 309377 - RNA, 24 nt, Human
uagauguaauagaugggccaacaa

SEQ ID NO: 309378 - RNA, 20 nt, Human
uagauucugauaguuacuac

SEQ ID NO: 309379 - RNA, 20 nt, Human
uagguaacucuagcucagau

SEQ ID NO: 309380 - RNA, 18 nt, Human
ugaggagucaguggacua

SEQ ID NO: 309381 - RNA, 25 nt, Human
ugcggacccacgaauugucagcucc

SEQ ID NO: 309382 - RNA, 22 nt, Human
uggaagacaaccugcaaaauca

SEQ ID NO: 309383 - RNA, 25 nt, Human
uggaauggaagacaaccugcaaaau

SEQ ID NO: 309384 - RNA, 22 nt, Human
ugguaagcuagguaacucuagc

SEQ ID NO: 309385 - RNA, 20 nt, Human
uguucaagggucagcuguag

SEQ ID NO: 309386 - RNA, 18 nt, Human
uuaagauuuugcggaccc

SEQ ID NO: 309387 - RNA, 23 nt, Human
uugauacuuggugaagaccugaa

SEQ ID NO: 309388 - RNA, 22 nt, Human
uuggcagcugugaucaucacag

SEQ ID NO: 309389 - RNA, 22 nt, Human
uuucuaaauaacauuuucucua

SEQ ID NO: 309390 - RNA, 21 nt, Human
aaaacuugaagcagaaguccc

SEQ ID NO: 309391 - RNA, 22 nt, Human
aaagaagaaagguccaagaggg

SEQ ID NO: 309392 - RNA, 23 nt, Human
aacuugaagcagaagucccuggu

SEQ ID NO: 309393 - RNA, 23 nt, Human
aagagcaaugggaagucaacagc

SEQ ID NO: 309394 - RNA, 22 nt, Human
aagucccuggugcaacaccugu

SEQ ID NO: 309395 - RNA, 24 nt, Human
accacggagagccccagccauaaa

SEQ ID NO: 309396 - RNA, 22 nt, Human
agaacaccacggagagccccag

SEQ ID NO: 309397 - RNA, 19 nt, Human
aggcauccaggacagggug

SEQ ID NO: 309398 - RNA, 21 nt, Human
agggggccuugguuuuucagg

SEQ ID NO: 309399 - RNA, 23 nt, Human
aggugggggaagggggccuuggu

SEQ ID NO: 309400 - RNA, 21 nt, Human
aguggcugucuccaggggacu

SEQ ID NO: 309401 - RNA, 20 nt, Human
caaaacuugaagcagaaguc

SEQ ID NO: 309402 - RNA, 21 nt, Human
caaaacuugaagcagaagucc

SEQ ID NO: 309403 - RNA, 23 nt, Human
cacagaugccucuucugucuccc

SEQ ID NO: 309404 - RNA, 18 nt, Human
cacuccccuccccacagg

SEQ ID NO: 309405 - RNA, 21 nt, Human
ccacggagagccccagccaua

SEQ ID NO: 309406 - RNA, 25 nt, Human
ccaggguaaagcgacccauugaaaa

SEQ ID NO: 309407 - RNA, 18 nt, Human
cccacaggcaaguagaag

SEQ ID NO: 309408 - RNA, 18 nt, Human
cccuggugcaacaccugu

SEQ ID NO: 309409 - RNA, 22 nt, Human
ccugggaccccgaggucccaga

SEQ ID NO: 309410 - RNA, 18 nt, Human
ccugugccugggagaagc

SEQ ID NO: 309411 - RNA, 22 nt, Human
cgacccauugaaaacaggaucc

SEQ ID NO: 309412 - RNA, 21 nt, Human
cuacaaagcaguaaaagugaa

SEQ ID NO: 309413 - RNA, 18 nt, Human
cucccaagagguucucug

SEQ ID NO: 309414 - RNA, 24 nt, Human
cucccugucagucccaggguaaag

SEQ ID NO: 309415 - RNA, 19 nt, Human
cucucaugaccagccaugg

SEQ ID NO: 309416 - RNA, 20 nt, Human
cucucuucagaggcauccag

SEQ ID NO: 309417 - RNA, 20 nt, Human
cuggugcaacaccugugccu

SEQ ID NO: 309418 - RNA, 18 nt, Human
gccugggagaagcucugg

SEQ ID NO: 309419 - RNA, 21 nt, Human
ggagagccccagccauaaagg

SEQ ID NO: 309420 - RNA, 22 nt, Human
ggggacuacgguuugcucucau

SEQ ID NO: 309421 - RNA, 19 nt, Human
ggggccuugguuuuucagg

SEQ ID NO: 309422 - RNA, 22 nt, Human
guaaagcgacccauugaaaaca

SEQ ID NO: 309423 - RNA, 23 nt, Human
uaaagcgacccauugaaaacagg

SEQ ID NO: 309424 - RNA, 20 nt, Human
uaccccaaaacuugaagcag

SEQ ID NO: 309425 - RNA, 24 nt, Human
uaccccaaaacuugaagcagaagu

SEQ ID NO: 309426 - RNA, 23 nt, Human
ucacccagacagucuuucugggc

SEQ ID NO: 309427 - RNA, 22 nt, Human
ucagggcagcccuuggagucug

SEQ ID NO: 309428 - RNA, 22 nt, Human
uccagaacaccacggagagccc

SEQ ID NO: 309429 - RNA, 24 nt, Human
uccaggugucuuuaccccaaaacu

SEQ ID NO: 309430 - RNA, 18 nt, Human
ucccagaggcugcugggc

SEQ ID NO: 309431 - RNA, 18 nt, Human
ucccaggguaaagcgacc

SEQ ID NO: 309432 - RNA, 22 nt, Human
uccccacaggcaaguagaagau

SEQ ID NO: 309433 - RNA, 23 nt, Human
ucccugggaccccgaggucccag

SEQ ID NO: 309434 - RNA, 27 nt, Human
ucccugggaccccgaggucccagaggc

SEQ ID NO: 309435 - RNA, 21 nt, Human
ucccuggugcaacaccugugc

SEQ ID NO: 309436 - RNA, 19 nt, Human
ucuccaggggacuacgguu

SEQ ID NO: 309437 - RNA, 18 nt, Human
ucugacggucugucccuc

SEQ ID NO: 309438 - RNA, 20 nt, Human
ucugucccucucuucagagg

SEQ ID NO: 309439 - RNA, 20 nt, Human
ugaaaacaggauccucauuc

SEQ ID NO: 309440 - RNA, 18 nt, Human
uggaagaggugggggaag

SEQ ID NO: 309441 - RNA, 21 nt, Human
uggagagcacgagucacuaca

SEQ ID NO: 309442 - RNA, 22 nt, Human
ugggaagucaacagccaggagg

SEQ ID NO: 309443 - RNA, 18 nt, Human
ugggggacgaucggccgc

SEQ ID NO: 309444 - RNA, 19 nt, Human
uggugucuccaggggcugg

SEQ ID NO: 309445 - RNA, 19 nt, Human
ugguguguggaccugucac

SEQ ID NO: 309446 - RNA, 19 nt, Human
ugguugucggcaaagaaga

SEQ ID NO: 309447 - RNA, 19 nt, Human
ugucacuccccuccccaca

SEQ ID NO: 309448 - RNA, 18 nt, Human
ugugccugggagaagcuc

SEQ ID NO: 309449 - RNA, 23 nt, Human
uucccugggaccccgagguccca

SEQ ID NO: 309450 - RNA, 19 nt, Human
aaaaaaaaaccuauuugac

SEQ ID NO: 309451 - RNA, 22 nt, Human
aaaaaaaccuauuugacuuaag

SEQ ID NO: 309452 - RNA, 22 nt, Human
aaaauaaucugccuuccaauca

SEQ ID NO: 309453 - RNA, 23 nt, Human
aaacauaggguuugauuuuuaau

SEQ ID NO: 309454 - RNA, 24 nt, Human
aaacggaagaagcaaggcucaaca

SEQ ID NO: 309455 - RNA, 20 nt, Human
aaagcaaauaacccuccccc

SEQ ID NO: 309456 - RNA, 21 nt, Human
aaagggcaaaacggaagaagc

SEQ ID NO: 309457 - RNA, 22 nt, Human
aaauaacccuccccccaaaaaa

SEQ ID NO: 309458 - RNA, 22 nt, Human
aaccaccaacaaaaaaaaaccu

SEQ ID NO: 309459 - RNA, 24 nt, Human
aagcaaauaacccuccccccaaaa

SEQ ID NO: 309460 - RNA, 21 nt, Human
aagcaagcacaaccaccaaca

SEQ ID NO: 309461 - RNA, 23 nt, Human
aagcaagcacaaccaccaacaaa

SEQ ID NO: 309462 - RNA, 24 nt, Human
aaggaaagcaagcacaaccaccaa

SEQ ID NO: 309463 - RNA, 19 nt, Human
aauggaaagguuuucuaaa

SEQ ID NO: 309464 - RNA, 21 nt, Human
acaucaagucaacaaguauuu

SEQ ID NO: 309465 - RNA, 28 nt, Human
accaccaacaaaaaaaaaccuauuugac

SEQ ID NO: 309466 - RNA, 23 nt, Human
acgcuccucgguuguguuuugua

SEQ ID NO: 309467 - RNA, 22 nt, Human
agacacucagaagaauaaaaug

SEQ ID NO: 309468 - RNA, 25 nt, Human
agcaaauaacccuccccccaaaaaa

SEQ ID NO: 309469 - RNA, 23 nt, Human
agcacaaccaccaacaaaaaaaa

SEQ ID NO: 309470 - RNA, 22 nt, Human
aggagcgagacaaagggcaaaa

SEQ ID NO: 309471 - RNA, 22 nt, Human
agggcaaaacggaagaagcaag

SEQ ID NO: 309472 - RNA, 22 nt, Human
aucaauuugaaacacaaauuca

SEQ ID NO: 309473 - RNA, 19 nt, Human
aucugaaagaaacauaggg

SEQ ID NO: 309474 - RNA, 20 nt, Human
auuuugucuacauuuccucu

SEQ ID NO: 309475 - RNA, 23 nt, Human
caagcacaaccaccaacaaaaaa

SEQ ID NO: 309476 - RNA, 18 nt, Human
caucugaaagaaacauag

SEQ ID NO: 309477 - RNA, 18 nt, Human
caugccagucauucaccc

SEQ ID NO: 309478 - RNA, 21 nt, Human
ccaccaacaaaaaaaaaccua

SEQ ID NO: 309479 - RNA, 19 nt, Human
ccccccaaaaaagaauaag

SEQ ID NO: 309480 - RNA, 26 nt, Human
ccucucaucuucucagccacaacuuc

SEQ ID NO: 309481 - RNA, 21 nt, Human
cucagaagaauaaaauggaaa

SEQ ID NO: 309482 - RNA, 22 nt, Human
cuccucgguuguguuuuguacc

SEQ ID NO: 309483 - RNA, 22 nt, Human
cucucaucuucucagccacaac

SEQ ID NO: 309484 - RNA, 23 nt, Human
cuuuacauuaaaaacaguagcua

SEQ ID NO: 309485 - RNA, 24 nt, Human
gaccugcauagguguucagaaaua

SEQ ID NO: 309486 - RNA, 19 nt, Human
gcaaaacggaagaagcaag

SEQ ID NO: 309487 - RNA, 19 nt, Human
gcaaauaacccucccccca

SEQ ID NO: 309488 - RNA, 22 nt, Human
gcaagcacaaccaccaacaaaa

SEQ ID NO: 309489 - RNA, 25 nt, Human
gcacaaccaccaacaaaaaaaaacc

SEQ ID NO: 309490 - RNA, 28 nt, Human
gcacaaccaccaacaaaaagggaacgcc

SEQ ID NO: 309491 - RNA, 23 nt, Human
gcgagacaaagggcaaaacggaa

SEQ ID NO: 309492 - RNA, 23 nt, Human
gcuacaauaaggauauuucaacc

SEQ ID NO: 309493 - RNA, 23 nt, Human
ggaaagcaagcacaaccaccaac

SEQ ID NO: 309494 - RNA, 20 nt, Human
ggagcgagacaaagggcaaa

SEQ ID NO: 309495 - RNA, 19 nt, Human
uaaaauggaaauuaugcca

SEQ ID NO: 309496 - RNA, 23 nt, Human
uaacacuguaaauaagaccugca

SEQ ID NO: 309497 - RNA, 23 nt, Human
uaagaaauaucaaacaauuuuuu

SEQ ID NO: 309498 - RNA, 23 nt, Human
uacauuaaaaacaguagcuacaa

SEQ ID NO: 309499 - RNA, 24 nt, Human
uacauuaaaaacaguagcuacaau

SEQ ID NO: 309500 - RNA, 21 nt, Human
uaugccaggaagauaaaaaag

SEQ ID NO: 309501 - RNA, 23 nt, Human
uaugccaggaagauaaaaaagca

SEQ ID NO: 309502 - RNA, 18 nt, Human
uauuccucucaucuucuc

SEQ ID NO: 309503 - RNA, 23 nt, Human
ucauucacccaaaauaaauuuca

SEQ ID NO: 309504 - RNA, 25 nt, Human
ucgguuguguuuuguaccauuuucu

SEQ ID NO: 309505 - RNA, 18 nt, Human
ucguuuuccuauuuucua

SEQ ID NO: 309506 - RNA, 20 nt, Human
ucuguguuuuaaggcucaga

SEQ ID NO: 309507 - RNA, 19 nt, Human
ucuucuucaaucuguguuu

SEQ ID NO: 309508 - RNA, 21 nt, Human
ucuuucuuuucuucuucaauc

SEQ ID NO: 309509 - RNA, 26 nt, Human
ugaggaaaacguuguguaauucuuug

SEQ ID NO: 309510 - RNA, 20 nt, Human
ugauaaaacaucaagucaac

SEQ ID NO: 309511 - RNA, 19 nt, Human
uucaagguuuuacaacaug

SEQ ID NO: 309512 - RNA, 25 nt, Human
uuguguguucccuuaguaacacugu

SEQ ID NO: 309513 - RNA, 23 nt, Human
uuuaaauauuccucucaucuucu

SEQ ID NO: 309514 - RNA, 21 nt, Human
uuuggaagauucaucugaaag

SEQ ID NO: 309515 - RNA, 30 nt, Human
aaaaaaaggcguauccggaggcuacagaaa

SEQ ID NO: 309516 - RNA, 20 nt, Human
aaggugacauauucaguuca

SEQ ID NO: 309517 - RNA, 19 nt, Human
acagaaagcuccagaugcc

SEQ ID NO: 309518 - RNA, 20 nt, Human
agacccaucccccaacuccc

SEQ ID NO: 309519 - RNA, 20 nt, Human
agagacccaucccccaacuc

SEQ ID NO: 309520 - RNA, 18 nt, Human
aggcggggacuccgggag

SEQ ID NO: 309521 - RNA, 20 nt, Human
auggcagggcagguuuggca

SEQ ID NO: 309522 - RNA, 22 nt, Human
cacgcggggaguccccagaagc

SEQ ID NO: 309523 - RNA, 23 nt, Human
cagcacccaggauccugggaucu

SEQ ID NO: 309524 - RNA, 18 nt, Human
caggacgggggccaggcc

SEQ ID NO: 309525 - RNA, 21 nt, Human
caggcccccuaaaaaggcaca

SEQ ID NO: 309526 - RNA, 20 nt, Human
cauguggaagcccucgugcc

SEQ ID NO: 309527 - RNA, 23 nt, Human
ccaacucccaggacgggggccag

SEQ ID NO: 309528 - RNA, 21 nt, Human
ccagaagcccugugcccacga

SEQ ID NO: 309529 - RNA, 19 nt, Human
ccccagaagcccugugccc

SEQ ID NO: 309530 - RNA, 24 nt, Human
ccccagaagcccugugcccacgaa

SEQ ID NO: 309531 - RNA, 23 nt, Human
cccccuaaaaaggcacaauggca

SEQ ID NO: 309532 - RNA, 18 nt, Human
cccugugcccacgaaccc

SEQ ID NO: 309533 - RNA, 18 nt, Human
cccugugcccacgaaccc

SEQ ID NO: 309534 - RNA, 20 nt, Human
ccggaaagggggcgcucggg

SEQ ID NO: 309535 - RNA, 20 nt, Human
ccggcgccacagacaaggcg

SEQ ID NO: 309536 - RNA, 26 nt, Human
cgcccugaaaaaaaggcguauccgga

SEQ ID NO: 309537 - RNA, 19 nt, Human
cuacgcccugaaaaaaagg

SEQ ID NO: 309538 - RNA, 18 nt, Human
cucugggcugagccagcc

SEQ ID NO: 309539 - RNA, 19 nt, Human
cuggaucccagcuccggag

SEQ ID NO: 309540 - RNA, 21 nt, Human
gacagagagacccauccccca

SEQ ID NO: 309541 - RNA, 18 nt, Human
gaggcgggggaggggcgg

SEQ ID NO: 309542 - RNA, 18 nt, Human
gaggggcggcggcucggg

SEQ ID NO: 309543 - RNA, 22 nt, Human
gcccugugcccacgaaccccug

SEQ ID NO: 309544 - RNA, 20 nt, Human
ggaggagagaggcggggacu

SEQ ID NO: 309545 - RNA, 20 nt, Human
ggcggaggagagaggcgggg

SEQ ID NO: 309546 - RNA, 19 nt, Human
gggccggcgggcgggagac

SEQ ID NO: 309547 - RNA, 18 nt, Human
gggcugagccagccgcuu

SEQ ID NO: 309548 - RNA, 21 nt, Human
gguggggagcgggcccagaca

SEQ ID NO: 309549 - RNA, 23 nt, Human
uaaaaaggcacaauggcagggca

SEQ ID NO: 309550 - RNA, 24 nt, Human
uaucacgcggggaguccccagaag

SEQ ID NO: 309551 - RNA, 19 nt, Human
uauucaguucaggcacgcg

SEQ ID NO: 309552 - RNA, 20 nt, Human
uccccagaagcccugugccc

SEQ ID NO: 309553 - RNA, 24 nt, Human
ucccccaacucccaggacgggggc

SEQ ID NO: 309554 - RNA, 21 nt, Human
uccggaggcuacagaaagcuc

SEQ ID NO: 309555 - RNA, 21 nt, Human
ugcccacgaaccccugugggc

SEQ ID NO: 309556 - RNA, 18 nt, Human
ugcggaacauuaauaauu

SEQ ID NO: 309557 - RNA, 18 nt, Human
ugucccgggcgcacggga

SEQ ID NO: 309558 - RNA, 19 nt, Human
uuuggcagagugguugagu

SEQ ID NO: 309559 - RNA, 24 nt, Human
aaaucuaacuccccacuucccuca

SEQ ID NO: 309560 - RNA, 23 nt, Human
aaccaccacccacaccgaggaga

SEQ ID NO: 309561 - RNA, 22 nt, Human
acacacauaugguggccacacc

SEQ ID NO: 309562 - RNA, 21 nt, Human
agggggugggaguuggucugc

SEQ ID NO: 309563 - RNA, 22 nt, Human
auguuguuguugggguggggag

SEQ ID NO: 309564 - RNA, 19 nt, Human
caaccuagggccuggacuc

SEQ ID NO: 309565 - RNA, 24 nt, Human
cacuuuuaccucaaagagggggug

SEQ ID NO: 309566 - RNA, 19 nt, Human
cccucuauagaaccaccac

SEQ ID NO: 309567 - RNA, 20 nt, Human
ccucuauagaaccaccaccc

SEQ ID NO: 309568 - RNA, 24 nt, Human
cuaggcacacacauaugguggcca

SEQ ID NO: 309569 - RNA, 20 nt, Human
cuugcucgugguuucgagga

SEQ ID NO: 309570 - RNA, 27 nt, Human
ggagugggucccaaccuagggccugga

SEQ ID NO: 309571 - RNA, 19 nt, Human
uaacaauguuuauuauuca

SEQ ID NO: 309572 - RNA, 19 nt, Human
uaacuccccacuucccuca

SEQ ID NO: 309573 - RNA, 22 nt, Human
uaccucaaagagggggugggag

SEQ ID NO: 309574 - RNA, 23 nt, Human
uaggcacacacauaugguggcca

SEQ ID NO: 309575 - RNA, 24 nt, Human
uaugguggccacacccaggagggu

SEQ ID NO: 309576 - RNA, 21 nt, Human
ucccaaccuagggccuggacu

SEQ ID NO: 309577 - RNA, 22 nt, Human
ucccaauaaaggcacuuuuacc

SEQ ID NO: 309578 - RNA, 23 nt, Human
ucugaaaucuaacuccccacuuc

SEQ ID NO: 309579 - RNA, 22 nt, Human
uggacucugaaaucuaacuccc

SEQ ID NO: 309580 - RNA, 21 nt, Human
uggagugggucccaaccuagg

SEQ ID NO: 309581 - RNA, 18 nt, Human
ugguggccacacccagga

SEQ ID NO: 309582 - RNA, 23 nt, Human
ugguggccacacccaggaggguu

SEQ ID NO: 309583 - RNA, 19 nt, Human
uugcagagagaaaugaggg

SEQ ID NO: 309584 - RNA, 19 nt, Human
aaaauaguccaagcuguag

SEQ ID NO: 309585 - RNA, 24 nt, Human
aagcaaauaaaaggauuaaacugg

SEQ ID NO: 309586 - RNA, 25 nt, Human
aauacaauggugaaaaaaaaucaga

SEQ ID NO: 309587 - RNA, 22 nt, Human
acaguauagaaacuuacagaaa

SEQ ID NO: 309588 - RNA, 22 nt, Human
acauaucucucuaauaacaucc

SEQ ID NO: 309589 - RNA, 19 nt, Human
agaauccuguaaacuguga

SEQ ID NO: 309590 - RNA, 19 nt, Human
augaagcuaacaggacagu

SEQ ID NO: 309591 - RNA, 22 nt, Human
cacaccaaaaaaaucaaaccac

SEQ ID NO: 309592 - RNA, 20 nt, Human
cacagcagaaccugcaaaaa

SEQ ID NO: 309593 - RNA, 19 nt, Human
cacauuucacagcagaacc

SEQ ID NO: 309594 - RNA, 26 nt, Human
caccaaaaaaaucaaaccacauuuca

SEQ ID NO: 309595 - RNA, 20 nt, Human
cagaaaaacaauucagaaga

SEQ ID NO: 309596 - RNA, 24 nt, Human
cagcauaucuugggauguucuagc

SEQ ID NO: 309597 - RNA, 19 nt, Human
cauaccacuuaugaaaagc

SEQ ID NO: 309598 - RNA, 20 nt, Human
cuaaauuauauagggcuucu

SEQ ID NO: 309599 - RNA, 21 nt, Human
cuauuaucuguaucaguuggu

SEQ ID NO: 309600 - RNA, 18 nt, Human
gaaaauacucuacauuga

SEQ ID NO: 309601 - RNA, 18 nt, Human
gaaguccagaaaaacaau

SEQ ID NO: 309602 - RNA, 19 nt, Human
gacuauaugcacauucaaa

SEQ ID NO: 309603 - RNA, 24 nt, Human
gagaaaaagaacacccuaaagugc

SEQ ID NO: 309604 - RNA, 24 nt, Human
gcagaaauggacuaaugcuaaaaa

SEQ ID NO: 309605 - RNA, 22 nt, Human
ggaaagaaaucucuuuuguaga

SEQ ID NO: 309606 - RNA, 18 nt, Human
ggggaaaauacugauggu

SEQ ID NO: 309607 - RNA, 21 nt, Human
ggugaaaaaaaaucagaggga

SEQ ID NO: 309608 - RNA, 21 nt, Human
guccagaaaaacaauucagaa

SEQ ID NO: 309609 - RNA, 22 nt, Human
guggaagauggagaaaguagau

SEQ ID NO: 309610 - RNA, 23 nt, Human
uaaaaaagaaugauuuagucuug

SEQ ID NO: 309611 - RNA, 23 nt, Human
uaaaagagcaagaacauaucuua

SEQ ID NO: 309612 - RNA, 20 nt, Human
uaaaaggauuaaacuggauu

SEQ ID NO: 309613 - RNA, 22 nt, Human
uaaaguaucaauguaguuaaaa

SEQ ID NO: 309614 - RNA, 25 nt, Human
uaacuguguuacccaaaaaggcuga

SEQ ID NO: 309615 - RNA, 20 nt, Human
uaacuuaguaaauacaaugg

SEQ ID NO: 309616 - RNA, 24 nt, Human
uaauaaacaauucuggucaccaua

SEQ ID NO: 309617 - RNA, 22 nt, Human
uaauacgacuuuuaagcaacaa

SEQ ID NO: 309618 - RNA, 23 nt, Human
uacaauauguuuaauguggcaga

SEQ ID NO: 309619 - RNA, 19 nt, Human
uacacagcauuuuuauuaa

SEQ ID NO: 309620 - RNA, 21 nt, Human
uacgacuuuuaagcaacaaaa

SEQ ID NO: 309621 - RNA, 19 nt, Human
uagacuacucauucacacu

SEQ ID NO: 309622 - RNA, 22 nt, Human
uagcagcagaaauggacuaaug

SEQ ID NO: 309623 - RNA, 19 nt, Human
uagcuuuauguuacuuucu

SEQ ID NO: 309624 - RNA, 19 nt, Human
uauaaaaagaaaucuuaau

SEQ ID NO: 309625 - RNA, 18 nt, Human
uauauaugcacacauauc

SEQ ID NO: 309626 - RNA, 19 nt, Human
uaucaguugguaaauuaac

SEQ ID NO: 309627 - RNA, 21 nt, Human
ucuaauaacauccuaccaaca

SEQ ID NO: 309628 - RNA, 21 nt, Human
ugaaaaacauaugaaaauacu

SEQ ID NO: 309629 - RNA, 23 nt, Human
ugaaaauacucuacauugaauac

SEQ ID NO: 309630 - RNA, 20 nt, Human
ugaagcuaacaggacagugu

SEQ ID NO: 309631 - RNA, 23 nt, Human
ugacauuuuuguugcacaacagu

SEQ ID NO: 309632 - RNA, 23 nt, Human
ugagaaaaagaacacccuaaagu

SEQ ID NO: 309633 - RNA, 19 nt, Human
ugagauuuggaaguccaga

SEQ ID NO: 309634 - RNA, 21 nt, Human
ugcuaaaaauuuagaaaaaaa

SEQ ID NO: 309635 - RNA, 22 nt, Human
uggaaggggucaaaugacuaua

SEQ ID NO: 309636 - RNA, 23 nt, Human
uggaaguccagaaaaacaauuca

SEQ ID NO: 309637 - RNA, 19 nt, Human
uggagaaaguagauuucug

SEQ ID NO: 309638 - RNA, 23 nt, Human
uggcugaaugaccaauuaaacau

SEQ ID NO: 309639 - RNA, 20 nt, Human
uggugaaaaaaaaucagagg

SEQ ID NO: 309640 - RNA, 18 nt, Human
ugguuggcugaaugacca

SEQ ID NO: 309641 - RNA, 21 nt, Human
uguggcagaaaaucauaugaa

SEQ ID NO: 309642 - RNA, 22 nt, Human
uguuuggcuacaaguauuugga

SEQ ID NO: 309643 - RNA, 18 nt, Human
uuaacuguguuacccaaa

SEQ ID NO: 309644 - RNA, 20 nt, Human
uuaaucuuaagaaaacaauc

SEQ ID NO: 309645 - RNA, 28 nt, Human
uuaaucuuaagaaaacaaucaucaaaaa

SEQ ID NO: 309646 - RNA, 21 nt, Human
uucaaaaugaauacuuauaaa

SEQ ID NO: 309647 - RNA, 21 nt, Human
uugaaccauaaaaaagaauga

SEQ ID NO: 309648 - RNA, 22 nt, Human
aaaaugaaaaguccuuugaaug

SEQ ID NO: 309649 - RNA, 24 nt, Human
aaacagcuugacaaagcaagagua

SEQ ID NO: 309650 - RNA, 25 nt, Human
aaagaauacuguaaaaagauacugu

SEQ ID NO: 309651 - RNA, 20 nt, Human
aacccuuuccccugaggcuc

SEQ ID NO: 309652 - RNA, 23 nt, Human
aagaacuagcauacuggauggaa

SEQ ID NO: 309653 - RNA, 23 nt, Human
aagcaagucccaagagagggaca

SEQ ID NO: 309654 - RNA, 21 nt, Human
aagcacuucaccugggaaaua

SEQ ID NO: 309655 - RNA, 19 nt, Human
aauaccuuggaaacuauag

SEQ ID NO: 309656 - RNA, 24 nt, Human
aaugucaagggcagcauucuagga

SEQ ID NO: 309657 - RNA, 25 nt, Human
acaaagcaagaguacauuaauuccu

SEQ ID NO: 309658 - RNA, 21 nt, Human
acuguacuuaagaauaaaaga

SEQ ID NO: 309659 - RNA, 21 nt, Human
acuugaagaccccuuaaaaaa

SEQ ID NO: 309660 - RNA, 21 nt, Human
agaaagaauacuguaaaaaga

SEQ ID NO: 309661 - RNA, 20 nt, Human
agagagagaguuugaugaua

SEQ ID NO: 309662 - RNA, 21 nt, Human
agucgcagaguccugggucug

SEQ ID NO: 309663 - RNA, 24 nt, Human
caguacuacaaagauaagcaaagg

SEQ ID NO: 309664 - RNA, 21 nt, Human
cauucugcacagccaguuacu

SEQ ID NO: 309665 - RNA, 22 nt, Human
ccccugaggcucucaugauaag

SEQ ID NO: 309666 - RNA, 18 nt, Human
ccuuaagccauaagcacu

SEQ ID NO: 309667 - RNA, 21 nt, Human
ccuuugaauggccaagaguuc

SEQ ID NO: 309668 - RNA, 24 nt, Human
cuagcauacuggauggaaagcaaa

SEQ ID NO: 309669 - RNA, 21 nt, Human
cugaccugcgaaucaugcacc

SEQ ID NO: 309670 - RNA, 22 nt, Human
cugccgccgaccaacccacuca

SEQ ID NO: 309671 - RNA, 19 nt, Human
gcaaaagauaacagagcaa

SEQ ID NO: 309672 - RNA, 21 nt, Human
guccugggucuggcccgacug

SEQ ID NO: 309673 - RNA, 19 nt, Human
uacaaagauaagcaaagga

SEQ ID NO: 309674 - RNA, 21 nt, Human
uagcugaccugcgaaucaugc

SEQ ID NO: 309675 - RNA, 19 nt, Human
uauccaaauacgcucugac

SEQ ID NO: 309676 - RNA, 22 nt, Human
ucaaaaugaaaaguccuuugaa

SEQ ID NO: 309677 - RNA, 23 nt, Human
ucagcagucuuguuuaauauaau

SEQ ID NO: 309678 - RNA, 24 nt, Human
ucuccucaaaaguaucauauucaa

SEQ ID NO: 309679 - RNA, 18 nt, Human
ucuucuagcuacgaugua

SEQ ID NO: 309680 - RNA, 21 nt, Human
ugaccugcgaaucaugcaccu

SEQ ID NO: 309681 - RNA, 19 nt, Human
ugccugacaaauucaacuc

SEQ ID NO: 309682 - RNA, 19 nt, Human
uggcuaugagcacauuuca

SEQ ID NO: 309683 - RNA, 21 nt, Human
ugggaaauagcugaccugcga

SEQ ID NO: 309684 - RNA, 25 nt, Human
ugggaaauagcugaccugcgaauca

SEQ ID NO: 309685 - RNA, 22 nt, Human
uucuucuagcuacgauguaugu

SEQ ID NO: 309686 - RNA, 23 nt, Human
aaaaauuaauaaggccuuaguua

SEQ ID NO: 309687 - RNA, 18 nt, Human
aaaaguauacaaccagag

SEQ ID NO: 309688 - RNA, 19 nt, Human
aaagcaaaaguauacaacc

SEQ ID NO: 309689 - RNA, 24 nt, Human
aaccagagcuacaggccuuacagc

SEQ ID NO: 309690 - RNA, 22 nt, Human
aagcaaaaguauacaaccagag

SEQ ID NO: 309691 - RNA, 23 nt, Human
aaugaguauuaaaaaauguacaa

SEQ ID NO: 309692 - RNA, 18 nt, Human
acagcuuaauucauacag

SEQ ID NO: 309693 - RNA, 23 nt, Human
accagagcuacaggccuuacagc

SEQ ID NO: 309694 - RNA, 19 nt, Human
agauuuccugaggagacuu

SEQ ID NO: 309695 - RNA, 24 nt, Human
augauuucuugaagauuaaaaaaa

SEQ ID NO: 309696 - RNA, 19 nt, Human
caagguccagagagccggg

SEQ ID NO: 309697 - RNA, 19 nt, Human
ccagaguuuuagagugaag

SEQ ID NO: 309698 - RNA, 21 nt, Human
cggcuccugguuucguuuccu

SEQ ID NO: 309699 - RNA, 24 nt, Human
cggggccaggcgauggcuuccucu

SEQ ID NO: 309700 - RNA, 18 nt, Human
cugccgggcacagcugug

SEQ ID NO: 309701 - RNA, 19 nt, Human
cugcgccucuagacugccg

SEQ ID NO: 309702 - RNA, 24 nt, Human
cuuugcgccaacacccgcggcucc

SEQ ID NO: 309703 - RNA, 21 nt, Human
gagccggggccaggcgauggc

SEQ ID NO: 309704 - RNA, 20 nt, Human
gcaugaaauaaauuguaacu

SEQ ID NO: 309705 - RNA, 22 nt, Human
gcgagacaagguccagagagcc

SEQ ID NO: 309706 - RNA, 22 nt, Human
uaaaauggacaaugaaucaacu

SEQ ID NO: 309707 - RNA, 20 nt, Human
uaauaguaaagaaaauuauc

SEQ ID NO: 309708 - RNA, 21 nt, Human
uaggagaaguuaaguguagca

SEQ ID NO: 309709 - RNA, 20 nt, Human
uaguaaagaaaauuaucuuu

SEQ ID NO: 309710 - RNA, 21 nt, Human
ucuaauagaucauuauuuagg

SEQ ID NO: 309711 - RNA, 23 nt, Human
ucuaggaaggauagaguguaaga

SEQ ID NO: 309712 - RNA, 23 nt, Human
ucucuggcugccgcuguuuccgc

SEQ ID NO: 309713 - RNA, 20 nt, Human
ucuuugagcuuuuuugaaua

SEQ ID NO: 309714 - RNA, 19 nt, Human
ugaaaagcaaaaguauaca

SEQ ID NO: 309715 - RNA, 22 nt, Human
ugaaucagagaucauaauucaa

SEQ ID NO: 309716 - RNA, 27 nt, Human
uggcauuugcaaaauaacauuagcucu

SEQ ID NO: 309717 - RNA, 24 nt, Human
ugugaauauauauaugauauugua

SEQ ID NO: 309718 - RNA, 24 nt, Human
uuaaaaaauguacaaaaaccuuua

SEQ ID NO: 309719 - RNA, 22 nt, Human
uugaagauuaaaaaaacauuua

SEQ ID NO: 309720 - RNA, 23 nt, Human
uuuagguuuauacucugugaaua

SEQ ID NO: 309721 - RNA, 21 nt, Human
agaggggcugagagggguugg

SEQ ID NO: 309722 - RNA, 20 nt, Human
auccgggcgacggcggccac

SEQ ID NO: 309723 - RNA, 19 nt, Human
augugggaaaagaggggcu

SEQ ID NO: 309724 - RNA, 24 nt, Human
cagcucaggggauccgggcgacgg

SEQ ID NO: 309725 - RNA, 22 nt, Human
ccugaaugacagcugccagcuu

SEQ ID NO: 309726 - RNA, 22 nt, Human
cuaugaaugugggaaaagaggg

SEQ ID NO: 309727 - RNA, 22 nt, Human
gagagggguugggguccugaau

SEQ ID NO: 309728 - RNA, 21 nt, Human
gggggcggcgcggucacgugg

SEQ ID NO: 309729 - RNA, 19 nt, Human
uccugaaugacagcugcca

SEQ ID NO: 309730 - RNA, 18 nt, Human
ucucuguggcacuggggg

SEQ ID NO: 309731 - RNA, 24 nt, Human
ugaaugugggaaaagaggggcuga

SEQ ID NO: 309732 - RNA, 24 nt, Human
ugggaaaagaggggcugagagggg

SEQ ID NO: 309733 - RNA, 18 nt, Human
ugggauggcgggcagcuc

SEQ ID NO: 309734 - RNA, 18 nt, Human
ugugggaaaagaggggcu

SEQ ID NO: 309735 - RNA, 21 nt, Human
aaacaguccccagauguccca

SEQ ID NO: 309736 - RNA, 25 nt, Human
aagagccgggacccgaccgggugag

SEQ ID NO: 309737 - RNA, 22 nt, Human
aagccacccaggagucugagca

SEQ ID NO: 309738 - RNA, 23 nt, Human
acacaggaagagccgggacccga

SEQ ID NO: 309739 - RNA, 23 nt, Human
acagcccaagcuggcuaccccuc

SEQ ID NO: 309740 - RNA, 25 nt, Human
acagcccugaggacggagaggggcu

SEQ ID NO: 309741 - RNA, 20 nt, Human
agcugugugcgcagcugugg

SEQ ID NO: 309742 - RNA, 18 nt, Human
agcuuggaaagcugggaa

SEQ ID NO: 309743 - RNA, 20 nt, Human
agcuuggaaagcugggaaug

SEQ ID NO: 309744 - RNA, 19 nt, Human
aggauggcagcggugcagc

SEQ ID NO: 309745 - RNA, 22 nt, Human
aggauggcagcggugcagcggg

SEQ ID NO: 309746 - RNA, 24 nt, Human
agggacagagagaguggagagaga

SEQ ID NO: 309747 - RNA, 21 nt, Human
aggggcugcccgguccgucug

SEQ ID NO: 309748 - RNA, 21 nt, Human
aguuaacuguacaguacccca

SEQ ID NO: 309749 - RNA, 18 nt, Human
caaaacagcggcccgcag

SEQ ID NO: 309750 - RNA, 18 nt, Human
cacaaaaacaguccccag

SEQ ID NO: 309751 - RNA, 19 nt, Human
cacagcccugaggacggag

SEQ ID NO: 309752 - RNA, 26 nt, Human
cacauauauauauaugcauauauaua

SEQ ID NO: 309753 - RNA, 20 nt, Human
caccaccggacacuccacac

SEQ ID NO: 309754 - RNA, 18 nt, Human
caccccagaggcucucag

SEQ ID NO: 309755 - RNA, 18 nt, Human
cacccccagccucuuguc

SEQ ID NO: 309756 - RNA, 25 nt, Human
cacccccagccucuuguccuggucu

SEQ ID NO: 309757 - RNA, 19 nt, Human
cacuccacacgcaugcggu

SEQ ID NO: 309758 - RNA, 18 nt, Human
cagcggugcagcgggcau

SEQ ID NO: 309759 - RNA, 21 nt, Human
cagcugccaaccgggccccgg

SEQ ID NO: 309760 - RNA, 24 nt, Human
cagcugccagggcagccuguguag

SEQ ID NO: 309761 - RNA, 19 nt, Human
caggaagagccgggacccg

SEQ ID NO: 309762 - RNA, 22 nt, Human
cauauauauauaugcauauaua

SEQ ID NO: 309763 - RNA, 18 nt, Human
caugcggugagggcuguc

SEQ ID NO: 309764 - RNA, 24 nt, Human
ccacuccagggaggcuccggccac

SEQ ID NO: 309765 - RNA, 19 nt, Human
ccacuggggcuggagccug

SEQ ID NO: 309766 - RNA, 18 nt, Human
ccaggacacugcugagau

SEQ ID NO: 309767 - RNA, 23 nt, Human
ccaggacacugcugagaugccac

SEQ ID NO: 309768 - RNA, 24 nt, Human
cccagccucuuguccuggucucaa

SEQ ID NO: 309769 - RNA, 20 nt, Human
cccaguggcucccagaggca

SEQ ID NO: 309770 - RNA, 24 nt, Human
ccccagaugucccacugcucugga

SEQ ID NO: 309771 - RNA, 21 nt, Human
cccccagccucuuguccuggu

SEQ ID NO: 309772 - RNA, 19 nt, Human
ccccgggacccucagacuc

SEQ ID NO: 309773 - RNA, 23 nt, Human
ccccgggacccucagacucugcc

SEQ ID NO: 309774 - RNA, 25 nt, Human
ccccuaaacacaaaaacagucccca

SEQ ID NO: 309775 - RNA, 21 nt, Human
ccccugagcaagcagcugugu

SEQ ID NO: 309776 - RNA, 19 nt, Human
ccccuggagggcccuggcc

SEQ ID NO: 309777 - RNA, 24 nt, Human
ccccuggagggcccuggccucacc

SEQ ID NO: 309778 - RNA, 20 nt, Human
cccucagacucugccgccug

SEQ ID NO: 309779 - RNA, 25 nt, Human
cccugagcaagcagcugugugcgca

SEQ ID NO: 309780 - RNA, 18 nt, Human
ccggacacuccacacgca

SEQ ID NO: 309781 - RNA, 21 nt, Human
ccucuggucacugcccgucac

SEQ ID NO: 309782 - RNA, 22 nt, Human
ccucuuguccuggucucaaggg

SEQ ID NO: 309783 - RNA, 19 nt, Human
ccuggcccaguggcuccca

SEQ ID NO: 309784 - RNA, 20 nt, Human
ccuggcccaguggcucccaa

SEQ ID NO: 309785 - RNA, 18 nt, Human
cgacccggggccccuggc

SEQ ID NO: 309786 - RNA, 22 nt, Human
cggcaccccagaggcucucagg

SEQ ID NO: 309787 - RNA, 18 nt, Human
cggcccgagcaccaccgg

SEQ ID NO: 309788 - RNA, 21 nt, Human
cggggccccuggcccaguggc

SEQ ID NO: 309789 - RNA, 18 nt, Human
cgggugaggcaggggagg

SEQ ID NO: 309790 - RNA, 21 nt, Human
cucaccccucagccccucaga

SEQ ID NO: 309791 - RNA, 23 nt, Human
cucaggggccgcccucaggggcu

SEQ ID NO: 309792 - RNA, 23 nt, Human
cuccacaaccauuuggcauugcu

SEQ ID NO: 309793 - RNA, 25 nt, Human
cucccagaggcacagcccugaggac

SEQ ID NO: 309794 - RNA, 22 nt, Human
cugagaugccacacuggaagcc

SEQ ID NO: 309795 - RNA, 21 nt, Human
cugagcagccuggcccacagc

SEQ ID NO: 309796 - RNA, 24 nt, Human
cuggaagccacccaggagucugag

SEQ ID NO: 309797 - RNA, 18 nt, Human
cuggagggcccuggccuc

SEQ ID NO: 309798 - RNA, 18 nt, Human
cuggcccacagccccucc

SEQ ID NO: 309799 - RNA, 20 nt, Human
cuucagggcugcuccacucc

SEQ ID NO: 309800 - RNA, 23 nt, Human
cuuucuccagcugccaaccgggc

SEQ ID NO: 309801 - RNA, 20 nt, Human
gaaugcugacacccccagcc

SEQ ID NO: 309802 - RNA, 21 nt, Human
gacagcccaagcuggcuaccc

SEQ ID NO: 309803 - RNA, 20 nt, Human
gacccggggccccuggccca

SEQ ID NO: 309804 - RNA, 18 nt, Human
gaggcaggggagggaggg

SEQ ID NO: 309805 - RNA, 19 nt, Human
gagggcaaggguggacacc

SEQ ID NO: 309806 - RNA, 27 nt, Human
gccccguggugccgcggcaccccagag

SEQ ID NO: 309807 - RNA, 20 nt, Human
gcccgagcaccaccggacac

SEQ ID NO: 309808 - RNA, 22 nt, Human
gcggcggcccgagcaccaccgg

SEQ ID NO: 309809 - RNA, 21 nt, Human
gcugacacccccagccucuug

SEQ ID NO: 309810 - RNA, 21 nt, Human
gcugcacugcggcggcccgag

SEQ ID NO: 309811 - RNA, 20 nt, Human
gcuggaugaucacagcuggg

SEQ ID NO: 309812 - RNA, 24 nt, Human
ggaaagcugggaaugcugacaccc

SEQ ID NO: 309813 - RNA, 18 nt, Human
ggacaccgcuggccucca

SEQ ID NO: 309814 - RNA, 20 nt, Human
ggagaggggcugcccggucc

SEQ ID NO: 309815 - RNA, 20 nt, Human
ggagcccugccacagaccuu

SEQ ID NO: 309816 - RNA, 22 nt, Human
ggagugcucaggggccgcccuc

SEQ ID NO: 309817 - RNA, 21 nt, Human
ggcaugggugcuggagguggg

SEQ ID NO: 309818 - RNA, 24 nt, Human
ggccacuuucuccacaaccauuug

SEQ ID NO: 309819 - RNA, 22 nt, Human
ggccccuggcccaguggcuccc

SEQ ID NO: 309820 - RNA, 21 nt, Human
ggcuaccccucccccuggagg

SEQ ID NO: 309821 - RNA, 20 nt, Human
ggcucccagaggcacagccc

SEQ ID NO: 309822 - RNA, 24 nt, Human
ggcuuuuugccucuuucuccagcu

SEQ ID NO: 309823 - RNA, 23 nt, Human
gggaggcuccggccacuuucucc

SEQ ID NO: 309824 - RNA, 21 nt, Human
gggcacaggcuucagggcugc

SEQ ID NO: 309825 - RNA, 24 nt, Human
ggugcuggaggugggagucggugg

SEQ ID NO: 309826 - RNA, 19 nt, Human
gucuggaagccacccagga

SEQ ID NO: 309827 - RNA, 20 nt, Human
gugcuggaggugggagucgg

SEQ ID NO: 309828 - RNA, 21 nt, Human
uaaaaagaucaacucagacua

SEQ ID NO: 309829 - RNA, 24 nt, Human
uauauauauaugcauauauauaca

SEQ ID NO: 309830 - RNA, 22 nt, Human
uauauauaugcauauauauaca

SEQ ID NO: 309831 - RNA, 22 nt, Human
uauauauaugcauauauauaca

SEQ ID NO: 309832 - RNA, 23 nt, Human
uauauauaugcauauauauacau

SEQ ID NO: 309833 - RNA, 24 nt, Human
uauauauaugcauauauauacaug

SEQ ID NO: 309834 - RNA, 24 nt, Human
uauaugcauauauauacauguaca

SEQ ID NO: 309835 - RNA, 22 nt, Human
ucaaaccaaaacagcggcccgc

SEQ ID NO: 309836 - RNA, 25 nt, Human
ucaaaccaaaacagcggcccgcagg

SEQ ID NO: 309837 - RNA, 21 nt, Human
ucagaggucagcccuucuccc

SEQ ID NO: 309838 - RNA, 22 nt, Human
uccacacaggaagagccgggac

SEQ ID NO: 309839 - RNA, 19 nt, Human
ucccacugccuucauuuuc

SEQ ID NO: 309840 - RNA, 21 nt, Human
uccccagaugucccacugcuc

SEQ ID NO: 309841 - RNA, 25 nt, Human
ucccucuggucacugcccgucacuc

SEQ ID NO: 309842 - RNA, 22 nt, Human
ucggggggcacaggcuucaggg

SEQ ID NO: 309843 - RNA, 18 nt, Human
ucgguggcaacgggccca

SEQ ID NO: 309844 - RNA, 19 nt, Human
ucucagggucagcaggaag

SEQ ID NO: 309845 - RNA, 25 nt, Human
ucuccacaaccauuuggcauugcuu

SEQ ID NO: 309846 - RNA, 23 nt, Human
ucuccagcugccaaccgggcccc

SEQ ID NO: 309847 - RNA, 26 nt, Human
ucucucuugcugagggcaaggguugg

SEQ ID NO: 309848 - RNA, 21 nt, Human
ucuucaguuaacuguacagua

SEQ ID NO: 309849 - RNA, 21 nt, Human
ugaagacagcugccagggcag

SEQ ID NO: 309850 - RNA, 21 nt, Human
ugaaggccacugggcagcucu

SEQ ID NO: 309851 - RNA, 18 nt, Human
ugagaugccacacuggaa

SEQ ID NO: 309852 - RNA, 22 nt, Human
ugaggacggagaggggcugccc

SEQ ID NO: 309853 - RNA, 22 nt, Human
ugagggcaaggguggacaccgg

SEQ ID NO: 309854 - RNA, 23 nt, Human
ugccacagaccucaaggcccaag

SEQ ID NO: 309855 - RNA, 18 nt, Human
ugccccguggugccgcgg

SEQ ID NO: 309856 - RNA, 21 nt, Human
uggauguggugcuccggccuc

SEQ ID NO: 309857 - RNA, 19 nt, Human
uggcagcggugcagcgggc

SEQ ID NO: 309858 - RNA, 23 nt, Human
uggggcagggacagagagagugg

SEQ ID NO: 309859 - RNA, 21 nt, Human
uggggcgagguggauguggug

SEQ ID NO: 309860 - RNA, 20 nt, Human
ugggggcagcuuggaaagcu

SEQ ID NO: 309861 - RNA, 19 nt, Human
uguacagcuuucuuuuaag

SEQ ID NO: 309862 - RNA, 18 nt, Human
uguggcagguaccaucac

SEQ ID NO: 309863 - RNA, 24 nt, Human
uuccccuaaacacaaaaacagucc

SEQ ID NO: 309864 - RNA, 21 nt, Human
aaaaaacaguagcaaaaagca

SEQ ID NO: 309865 - RNA, 21 nt, Human
aaaaacaguagcaaaaagccg

SEQ ID NO: 309866 - RNA, 24 nt, Human
aaaacaaaaaacaguagcaaaaag

SEQ ID NO: 309867 - RNA, 24 nt, Human
aaacaaaacaaaaaacaguagcaa

SEQ ID NO: 309868 - RNA, 23 nt, Human
aacaaaacaaaaaacaguagcaa

SEQ ID NO: 309869 - RNA, 26 nt, Human
aacaaaacaaaaaacaguagcaaaaa

SEQ ID NO: 309870 - RNA, 19 nt, Human
aaccaccuucucccggccc

SEQ ID NO: 309871 - RNA, 20 nt, Human
aagggagacagaaaucagaa

SEQ ID NO: 309872 - RNA, 25 nt, Human
acaaaacaaaaaacaguagcaaaaa

SEQ ID NO: 309873 - RNA, 23 nt, Human
acaguagcaaaaagcauugguac

SEQ ID NO: 309874 - RNA, 19 nt, Human
accugaaggggcaaaggag

SEQ ID NO: 309875 - RNA, 18 nt, Human
acuggccucuguuuuugc

SEQ ID NO: 309876 - RNA, 21 nt, Human
agacagaaaucagaauuaaac

SEQ ID NO: 309877 - RNA, 21 nt, Human
agacucccagugugacagcuu

SEQ ID NO: 309878 - RNA, 21 nt, Human
aggauggacgacgcccacugu

SEQ ID NO: 309879 - RNA, 22 nt, Human
aguguuuggugcauacuugugc

SEQ ID NO: 309880 - RNA, 19 nt, Human
aguuccauacuccucuggc

SEQ ID NO: 309881 - RNA, 23 nt, Human
aucuccucucaaaagaugagaau

SEQ ID NO: 309882 - RNA, 19 nt, Human
augcaaagcagcagucaca

SEQ ID NO: 309883 - RNA, 20 nt, Human
augggagaaaagaaggaagg

SEQ ID NO: 309884 - RNA, 24 nt, Human
auuucuguuuuuuucccuuuuucu

SEQ ID NO: 309885 - RNA, 21 nt, Human
caaaacaaaaaacaguagcaa

SEQ ID NO: 309886 - RNA, 21 nt, Human
caaagcagcagucacagaggc

SEQ ID NO: 309887 - RNA, 19 nt, Human
cagccagggugagcucuug

SEQ ID NO: 309888 - RNA, 18 nt, Human
caggucccucuucccagg

SEQ ID NO: 309889 - RNA, 20 nt, Human
caucaaaggucaaauugucc

SEQ ID NO: 309890 - RNA, 21 nt, Human
caucauucuucuucuccucuu

SEQ ID NO: 309891 - RNA, 23 nt, Human
caucuccucucaaaagaugagaa

SEQ ID NO: 309892 - RNA, 21 nt, Human
ccagccagccagggugagcug

SEQ ID NO: 309893 - RNA, 20 nt, Human
ccaggccguuuccccaggga

SEQ ID NO: 309894 - RNA, 21 nt, Human
ccagguuuuacuggccucugu

SEQ ID NO: 309895 - RNA, 19 nt, Human
cccacacaccuccaggccg

SEQ ID NO: 309896 - RNA, 22 nt, Human
cccacugauauucuuccccauc

SEQ ID NO: 309897 - RNA, 22 nt, Human
cucauuauuuccccaauauaca

SEQ ID NO: 309898 - RNA, 21 nt, Human
cucccggccccggguucucug

SEQ ID NO: 309899 - RNA, 24 nt, Human
cuccucuggcugccgggauaauuc

SEQ ID NO: 309900 - RNA, 18 nt, Human
cucguggaggccuggccc

SEQ ID NO: 309901 - RNA, 22 nt, Human
cucucagcaucucugcuuucuc

SEQ ID NO: 309902 - RNA, 20 nt, Human
cucuggggccugauccccau

SEQ ID NO: 309903 - RNA, 25 nt, Human
cugccgggauaauuccagguuuuac

SEQ ID NO: 309904 - RNA, 23 nt, Human
cuggaaguuccauacuccucugg

SEQ ID NO: 309905 - RNA, 22 nt, Human
cuucucauaguaacuuuaggga

SEQ ID NO: 309906 - RNA, 19 nt, Human
cuucuucuccucuuucucu

SEQ ID NO: 309907 - RNA, 22 nt, Human
cuucuucuccucuuucucucuu

SEQ ID NO: 309908 - RNA, 19 nt, Human
cuugaagaaccaccuucuc

SEQ ID NO: 309909 - RNA, 20 nt, Human
gaaaggaaacauaucaaaga

SEQ ID NO: 309910 - RNA, 19 nt, Human
gaggaguccuccccucucc

SEQ ID NO: 309911 - RNA, 23 nt, Human
gaggaguccuccccucuccccag

SEQ ID NO: 309912 - RNA, 21 nt, Human
gaggcagaacuguccccaacu

SEQ ID NO: 309913 - RNA, 19 nt, Human
gcaaagcagcagucacaga

SEQ ID NO: 309914 - RNA, 20 nt, Human
gcuggcguagggagaggagu

SEQ ID NO: 309915 - RNA, 18 nt, Human
ggaaaaggagacagucau

SEQ ID NO: 309916 - RNA, 20 nt, Human
ggaaugggagaaaagaagga

SEQ ID NO: 309917 - RNA, 19 nt, Human
gugccucucggcuugaaga

SEQ ID NO: 309918 - RNA, 18 nt, Human
uagcaaaaagcauuggua

SEQ ID NO: 309919 - RNA, 24 nt, Human
uaggauuaaauaaaacaaaacaaa

SEQ ID NO: 309920 - RNA, 20 nt, Human
uaugucuccaaaucaacuuu

SEQ ID NO: 309921 - RNA, 18 nt, Human
ucaaaggucaaauugucc

SEQ ID NO: 309922 - RNA, 22 nt, Human
uccaccugaaggggcaaaggag

SEQ ID NO: 309923 - RNA, 18 nt, Human
uccccagggugccugguu

SEQ ID NO: 309924 - RNA, 18 nt, Human
ucccggccccggguucuc

SEQ ID NO: 309925 - RNA, 18 nt, Human
ucucaggggacagcaagc

SEQ ID NO: 309926 - RNA, 21 nt, Human
ucucugguguucucacugagg

SEQ ID NO: 309927 - RNA, 24 nt, Human
ucuucuccucuuucucucuuuuuu

SEQ ID NO: 309928 - RNA, 18 nt, Human
ucuuuuuuuuuuuuuuuu

SEQ ID NO: 309929 - RNA, 21 nt, Human
ugaaaggaaacauaucaaaga

SEQ ID NO: 309930 - RNA, 19 nt, Human
ugagaauauacaggugugu

SEQ ID NO: 309931 - RNA, 23 nt, Human
ugaggcagggcugccaggugucu

SEQ ID NO: 309932 - RNA, 21 nt, Human
ugauaugaggcagggcugcca

SEQ ID NO: 309933 - RNA, 25 nt, Human
ugcaaagcagcagucacagaggcag

SEQ ID NO: 309934 - RNA, 22 nt, Human
ugccagggaccacuggaugauu

SEQ ID NO: 309935 - RNA, 19 nt, Human
ugccgggauaauuccaggu

SEQ ID NO: 309936 - RNA, 19 nt, Human
uggagugaacuccaaaguc

SEQ ID NO: 309937 - RNA, 25 nt, Human
uggagugaacuccaaagucaaacac

SEQ ID NO: 309938 - RNA, 22 nt, Human
uggcccacacaccuccaggccg

SEQ ID NO: 309939 - RNA, 23 nt, Human
ugggagaaaagaaggaagggaga

SEQ ID NO: 309940 - RNA, 23 nt, Human
ugggagaaaagaaggaagggaga

SEQ ID NO: 309941 - RNA, 25 nt, Human
ugggagaggcccaccucaccccacu

SEQ ID NO: 309942 - RNA, 23 nt, Human
uuccccaauauacaucaaaugag

SEQ ID NO: 309943 - RNA, 21 nt, Human
uuuagggaaauugaaaggaaa

SEQ ID NO: 309944 - RNA, 20 nt, Human
uuucucucuuuuuuuuuuuu

SEQ ID NO: 309945 - RNA, 19 nt, Human
uuuguuuuauuucuguuuu

SEQ ID NO: 309946 - RNA, 20 nt, Human
aaaaagacgcuguauuugau

SEQ ID NO: 309947 - RNA, 19 nt, Human
aacugcucccagucccccc

SEQ ID NO: 309948 - RNA, 18 nt, Human
aagauuuacaaaaagggg

SEQ ID NO: 309949 - RNA, 24 nt, Human
aagauuuacaaaaagggguggggu

SEQ ID NO: 309950 - RNA, 24 nt, Human
acagacagacauaggaucugggaa

SEQ ID NO: 309951 - RNA, 21 nt, Human
accccaggaugucugggcccc

SEQ ID NO: 309952 - RNA, 24 nt, Human
acgcugggcggguuccggcugcac

SEQ ID NO: 309953 - RNA, 20 nt, Human
acguggggcccagcagccgu

SEQ ID NO: 309954 - RNA, 23 nt, Human
acugcucccaguccccccggacu

SEQ ID NO: 309955 - RNA, 22 nt, Human
agcuggggcuggggcuggugcu

SEQ ID NO: 309956 - RNA, 22 nt, Human
agggagcuggggcuggggcugg

SEQ ID NO: 309957 - RNA, 22 nt, Human
agggcauggaggcggcugcugg

SEQ ID NO: 309958 - RNA, 19 nt, Human
caaaucacucgagacucuu

SEQ ID NO: 309959 - RNA, 18 nt, Human
ccacccagagugccggca

SEQ ID NO: 309960 - RNA, 18 nt, Human
ccagcugcccccagcgug

SEQ ID NO: 309961 - RNA, 20 nt, Human
cccucagaucccccaggggc

SEQ ID NO: 309962 - RNA, 22 nt, Human
cccugggggccacaggcccuca

SEQ ID NO: 309963 - RNA, 21 nt, Human
ccucagaucccccaggggccc

SEQ ID NO: 309964 - RNA, 18 nt, Human
ccucagccacagccacuc

SEQ ID NO: 309965 - RNA, 23 nt, Human
cggcacccuuggggaggccggug

SEQ ID NO: 309966 - RNA, 19 nt, Human
cucagccacagccacucgg

SEQ ID NO: 309967 - RNA, 21 nt, Human
cuccggcuuggggcgcguucc

SEQ ID NO: 309968 - RNA, 20 nt, Human
cugcggccggagggagcugg

SEQ ID NO: 309969 - RNA, 18 nt, Human
cuggugcgugggcggagg

SEQ ID NO: 309970 - RNA, 20 nt, Human
cuuuuucuccuccucccauc

SEQ ID NO: 309971 - RNA, 21 nt, Human
gaccaggaccccaggaugucu

SEQ ID NO: 309972 - RNA, 23 nt, Human
gaguccacccagagugccggcac

SEQ ID NO: 309973 - RNA, 24 nt, Human
gccggagggagcuggggcuggggc

SEQ ID NO: 309974 - RNA, 21 nt, Human
gcgcguuccaggggagggugg

SEQ ID NO: 309975 - RNA, 18 nt, Human
ggacagacagacauagga

SEQ ID NO: 309976 - RNA, 18 nt, Human
ggcgcguuccaggggagg

SEQ ID NO: 309977 - RNA, 23 nt, Human
ggcugcacccacuccggcuuggg

SEQ ID NO: 309978 - RNA, 24 nt, Human
gggagggugggggccucagccaca

SEQ ID NO: 309979 - RNA, 20 nt, Human
gggcggaggcggaggccagc

SEQ ID NO: 309980 - RNA, 19 nt, Human
gggcuggggcuggugcugg

SEQ ID NO: 309981 - RNA, 23 nt, Human
ggguggggcucuagggcagccug

SEQ ID NO: 309982 - RNA, 26 nt, Human
uaccgcuuuuucuccuccucccaucu

SEQ ID NO: 309983 - RNA, 24 nt, Human
uaugucccaaggcagcacuggaga

SEQ ID NO: 309984 - RNA, 18 nt, Human
ucacucgagacucgacag

SEQ ID NO: 309985 - RNA, 25 nt, Human
ucacuugaccuuugacguggggccc

SEQ ID NO: 309986 - RNA, 22 nt, Human
uccacccagagugccggcaccc

SEQ ID NO: 309987 - RNA, 18 nt, Human
uccaggggaggguggggg

SEQ ID NO: 309988 - RNA, 21 nt, Human
ucucacuugaccuuugacgug

SEQ ID NO: 309989 - RNA, 24 nt, Human
ucugcggccggagggagcuggggc

SEQ ID NO: 309990 - RNA, 19 nt, Human
ugcccugggggccacaggc

SEQ ID NO: 309991 - RNA, 21 nt, Human
ugcuggugcggugcccggcgg

SEQ ID NO: 309992 - RNA, 22 nt, Human
ugcuggugcgugggcggaggcg

SEQ ID NO: 309993 - RNA, 19 nt, Human
uggacagacagacauagga

SEQ ID NO: 309994 - RNA, 21 nt, Human
ugggcggaggcggaggccagc

SEQ ID NO: 309995 - RNA, 21 nt, Human
uuuuucuccuccucccaucuc

SEQ ID NO: 309996 - RNA, 24 nt, Human
uuuuuuuuuuuugaaaaagacgcu

SEQ ID NO: 309997 - RNA, 20 nt, Human
uuuuuuuuuuuuuuuuuugg

SEQ ID NO: 309998 - RNA, 20 nt, Human
agagggggaaggagggggau

SEQ ID NO: 309999 - RNA, 22 nt, Human
agagggggaaggagggggaucc

SEQ ID NO: 310000 - RNA, 24 nt, Human
aggcaaauaaauacaauggggaga

SEQ ID NO: 310001 - RNA, 18 nt, Human
agggggaaggagggggau

SEQ ID NO: 310002 - RNA, 24 nt, Human
auacaauggggagagggggaagga

SEQ ID NO: 310003 - RNA, 19 nt, Human
cagggcaguggcgaugggc

SEQ ID NO: 310004 - RNA, 23 nt, Human
ccccucaguggcuggcucgguuc

SEQ ID NO: 310005 - RNA, 19 nt, Human
ccuggcuuugcacccugug

SEQ ID NO: 310006 - RNA, 18 nt, Human
gaaggugggugggcuggc

SEQ ID NO: 310007 - RNA, 19 nt, Human
gagagggggaaggaggggg

SEQ ID NO: 310008 - RNA, 20 nt, Human
gcaggggagguggcaggcag

SEQ ID NO: 310009 - RNA, 18 nt, Human
gcccccaggcucugccag

SEQ ID NO: 310010 - RNA, 23 nt, Human
gcccccaggcucugccagcuccc

SEQ ID NO: 310011 - RNA, 22 nt, Human
gcgcugcgguguugguggaucc

SEQ ID NO: 310012 - RNA, 23 nt, Human
gggauccuuauaaauuagaaaca

SEQ ID NO: 310013 - RNA, 18 nt, Human
ggggagagggggaaggag

SEQ ID NO: 310014 - RNA, 19 nt, Human
uaaauuagaaacaaucuca

SEQ ID NO: 310015 - RNA, 23 nt, Human
uccuuauaaauuagaaacaaucu

SEQ ID NO: 310016 - RNA, 18 nt, Human
ucuccugggcggcguggc

SEQ ID NO: 310017 - RNA, 19 nt, Human
ugccccagggcaguggcga

SEQ ID NO: 310018 - RNA, 22 nt, Human
ugcccccaggcucugccagcuc

SEQ ID NO: 310019 - RNA, 18 nt, Human
uggcaggggagguggcag

SEQ ID NO: 310020 - RNA, 18 nt, Human
ugggcuggcaggggaggu

SEQ ID NO: 310021 - RNA, 19 nt, Human
uggggagagggggaaggag

SEQ ID NO: 310022 - RNA, 22 nt, Human
uggggagagggggaaggagggg

SEQ ID NO: 310023 - RNA, 18 nt, Human
uggggggaaggugggugg

SEQ ID NO: 310024 - RNA, 18 nt, Human
uggggggaaggugggugg

SEQ ID NO: 310025 - RNA, 20 nt, Human
aaaaccauucaccaaagaca

SEQ ID NO: 310026 - RNA, 21 nt, Human
aaaaggacugacuuucagaga

SEQ ID NO: 310027 - RNA, 20 nt, Human
aaauugcuugaacccgggaa

SEQ ID NO: 310028 - RNA, 20 nt, Human
aacagagugagacuccaucu

SEQ ID NO: 310029 - RNA, 24 nt, Human
aacagagugagacuccaucucaaa

SEQ ID NO: 310030 - RNA, 24 nt, Human
aacagguccauaucaaaaaaagaa

SEQ ID NO: 310031 - RNA, 22 nt, Human
aaugauggagguaaaccaagga

SEQ ID NO: 310032 - RNA, 24 nt, Human
aauugcuugaacccgggaggcaga

SEQ ID NO: 310033 - RNA, 22 nt, Human
acagaacacaggcuccaaacau

SEQ ID NO: 310034 - RNA, 24 nt, Human
acagagugagacuccaucucaaaa

SEQ ID NO: 310035 - RNA, 24 nt, Human
accuugccucuacuaaaaauacaa

SEQ ID NO: 310036 - RNA, 24 nt, Human
acuccagccugggcaacagaguga

SEQ ID NO: 310037 - RNA, 28 nt, Human
acuccaucucaaaaaaaaaaaaaaaaaa

SEQ ID NO: 310038 - RNA, 24 nt, Human
acugguaaaaauauacagauguua

SEQ ID NO: 310039 - RNA, 21 nt, Human
agagcagaacauuuuugaacu

SEQ ID NO: 310040 - RNA, 24 nt, Human
agagguuucagugagccgagaucg

SEQ ID NO: 310041 - RNA, 20 nt, Human
agccaggcaugguggugggc

SEQ ID NO: 310042 - RNA, 24 nt, Human
agccugggcaacagagugagacuc

SEQ ID NO: 310043 - RNA, 21 nt, Human
aggcagagguuucagugagcc

SEQ ID NO: 310044 - RNA, 24 nt, Human
aggcagagguuucagugagccgag

SEQ ID NO: 310045 - RNA, 23 nt, Human
aggcaggaaauugcuugaacccg

SEQ ID NO: 310046 - RNA, 24 nt, Human
aggcagguggaucacgaggucagg

SEQ ID NO: 310047 - RNA, 24 nt, Human
aggcaugguggugggcaccuguaa

SEQ ID NO: 310048 - RNA, 20 nt, Human
aggcugaggcaggaaauugc

SEQ ID NO: 310049 - RNA, 23 nt, Human
aggcugaggcaggaaauugcuug

SEQ ID NO: 310050 - RNA, 24 nt, Human
agguggaucacgaggucaggaguu

SEQ ID NO: 310051 - RNA, 24 nt, Human
aguggugcacgccuguaaucccag

SEQ ID NO: 310052 - RNA, 26 nt, Human
auaaaaccauucaccaaagacaugcu

SEQ ID NO: 310053 - RNA, 24 nt, Human
aucgugccauugcacuccagccug

SEQ ID NO: 310054 - RNA, 23 nt, Human
auugcacuccagccugggcaaca

SEQ ID NO: 310055 - RNA, 24 nt, Human
auugcacuccagccugggcaacag

SEQ ID NO: 310056 - RNA, 20 nt, Human
caacagguccauaucaaaaa

SEQ ID NO: 310057 - RNA, 19 nt, Human
caccuguaaucccagcuau

SEQ ID NO: 310058 - RNA, 25 nt, Human
caccuguaaucccagcuauucauga

SEQ ID NO: 310059 - RNA, 22 nt, Human
cacgccuguaaucccagcacuu

SEQ ID NO: 310060 - RNA, 24 nt, Human
cacgccuguaaucccagcacuuug

SEQ ID NO: 310061 - RNA, 22 nt, Human
cacuccagccugggcaacagag

SEQ ID NO: 310062 - RNA, 22 nt, Human
cacuccagccugggcaacagag

SEQ ID NO: 310063 - RNA, 24 nt, Human
cacuccagccugggcaacagagug

SEQ ID NO: 310064 - RNA, 18 nt, Human
cagaacacaggcuccaaa

SEQ ID NO: 310065 - RNA, 19 nt, Human
cagaacacaggcuccaaac

SEQ ID NO: 310066 - RNA, 18 nt, Human
cagaacauuuuugaacug

SEQ ID NO: 310067 - RNA, 24 nt, Human
cagcacuuugggaagccgaggcag

SEQ ID NO: 310068 - RNA, 26 nt, Human
cagcacuuugggaagccgaggcaggu

SEQ ID NO: 310069 - RNA, 19 nt, Human
cagcaguggcuucaugaga

SEQ ID NO: 310070 - RNA, 22 nt, Human
cauagaccaacagguccauauc

SEQ ID NO: 310071 - RNA, 22 nt, Human
cauucaccaaagacaugcuuaa

SEQ ID NO: 310072 - RNA, 18 nt, Human
cauugcacuccagccugg

SEQ ID NO: 310073 - RNA, 19 nt, Human
cauugcacuccagccuggg

SEQ ID NO: 310074 - RNA, 21 nt, Human
cauugcacuccagccugggca

SEQ ID NO: 310075 - RNA, 23 nt, Human
cauugcacuccagccugggcaac

SEQ ID NO: 310076 - RNA, 24 nt, Human
cauugcacuccagccugggcaaca

SEQ ID NO: 310077 - RNA, 23 nt, Human
ccaaagacaugcuuaauuuuuga

SEQ ID NO: 310078 - RNA, 20 nt, Human
ccauugcacuccagccuggg

SEQ ID NO: 310079 - RNA, 21 nt, Human
ccauugcacuccagccugggc

SEQ ID NO: 310080 - RNA, 22 nt, Human
ccauugcacuccagccugggca

SEQ ID NO: 310081 - RNA, 23 nt, Human
ccauugcacuccagccugggcaa

SEQ ID NO: 310082 - RNA, 24 nt, Human
ccauugcacuccagccugggcaac

SEQ ID NO: 310083 - RNA, 21 nt, Human
cccagcaguggcuucaugaga

SEQ ID NO: 310084 - RNA, 22 nt, Human
ccugggcaacagagugagacuc

SEQ ID NO: 310085 - RNA, 22 nt, Human
ccuguaaucccagcacuuuggg

SEQ ID NO: 310086 - RNA, 18 nt, Human
cgagaacggaacugcacu

SEQ ID NO: 310087 - RNA, 24 nt, Human
cgaggcagguggaucacgagguca

SEQ ID NO: 310088 - RNA, 18 nt, Human
cuacuauaaauuugaauc

SEQ ID NO: 310089 - RNA, 18 nt, Human
cucaaaaaaaaaaaaaaa

SEQ ID NO: 310090 - RNA, 21 nt, Human
cucaacaagugaagguggucu

SEQ ID NO: 310091 - RNA, 19 nt, Human
cuccaucucaaaaaaaaaa

SEQ ID NO: 310092 - RNA, 20 nt, Human
cucuacuaaaaauacaaaaa

SEQ ID NO: 310093 - RNA, 24 nt, Human
cugaggcaggaaauugcuugaacc

SEQ ID NO: 310094 - RNA, 24 nt, Human
cuugaccaagauggugaaaccuug

SEQ ID NO: 310095 - RNA, 23 nt, Human
gaaaaagccuaugauuuugguua

SEQ ID NO: 310096 - RNA, 23 nt, Human
gaccaagauggugaaaccuugcc

SEQ ID NO: 310097 - RNA, 23 nt, Human
gagaucgugccauugcacuccag

SEQ ID NO: 310098 - RNA, 19 nt, Human
gaucacaaucacagauuua

SEQ ID NO: 310099 - RNA, 24 nt, Human
gaucacgaggucaggaguuccaga

SEQ ID NO: 310100 - RNA, 18 nt, Human
gcaauuaaaugcuuuucu

SEQ ID NO: 310101 - RNA, 24 nt, Human
gcacuccagccugggcaacagagu

SEQ ID NO: 310102 - RNA, 20 nt, Human
gcagaacauuuuugaacuga

SEQ ID NO: 310103 - RNA, 22 nt, Human
gccauugcacuccagccugggc

SEQ ID NO: 310104 - RNA, 24 nt, Human
gccauugcacuccagccugggcaa

SEQ ID NO: 310105 - RNA, 21 nt, Human
gcuggacucaguggugcacgc

SEQ ID NO: 310106 - RNA, 21 nt, Human
ggagguaaaccaaggagggua

SEQ ID NO: 310107 - RNA, 23 nt, Human
ggagguaaaccaaggaggguagg

SEQ ID NO: 310108 - RNA, 24 nt, Human
gguggugggcaccuguaaucccag

SEQ ID NO: 310109 - RNA, 19 nt, Human
gucuagaguguauguaagg

SEQ ID NO: 310110 - RNA, 21 nt, Human
gugaaaccuugccucuacuaa

SEQ ID NO: 310111 - RNA, 23 nt, Human
guggaucacgaggucaggaguuc

SEQ ID NO: 310112 - RNA, 22 nt, Human
guggugcacgccuguaauccca

SEQ ID NO: 310113 - RNA, 23 nt, Human
guggugggcaccuguaaucccag

SEQ ID NO: 310114 - RNA, 24 nt, Human
guuuugguagaaguggucugagaa

SEQ ID NO: 310115 - RNA, 21 nt, Human
uaaaaauacaaaaacuagcca

SEQ ID NO: 310116 - RNA, 20 nt, Human
uaaaagacaaaucaaccuuc

SEQ ID NO: 310117 - RNA, 25 nt, Human
uaaaccagacauuuaacauaauacc

SEQ ID NO: 310118 - RNA, 21 nt, Human
uaacauuaugggcuucuccuc

SEQ ID NO: 310119 - RNA, 20 nt, Human
uaagucauaauuauacagaa

SEQ ID NO: 310120 - RNA, 24 nt, Human
uaaguggcaguaugacuugucauu

SEQ ID NO: 310121 - RNA, 18 nt, Human
uacugaucuaucuuaacg

SEQ ID NO: 310122 - RNA, 20 nt, Human
uauacagaauuuucacaaag

SEQ ID NO: 310123 - RNA, 25 nt, Human
uauaugcaaacagucacaauaugca

SEQ ID NO: 310124 - RNA, 18 nt, Human
uauuucuuacaugccaag

SEQ ID NO: 310125 - RNA, 24 nt, Human
ucaaaaaaaaaaaaaaaaaaagaa

SEQ ID NO: 310126 - RNA, 25 nt, Human
ucaaaaaaaaaaaaaaaaaaagaau

SEQ ID NO: 310127 - RNA, 20 nt, Human
ucaacaagugaagguggucu

SEQ ID NO: 310128 - RNA, 22 nt, Human
ucacaaaguucaaugcacagaa

SEQ ID NO: 310129 - RNA, 22 nt, Human
ucaccaaagacaugcuuaauuu

SEQ ID NO: 310130 - RNA, 24 nt, Human
ucacgaggucaggaguuccagacc

SEQ ID NO: 310131 - RNA, 23 nt, Human
ucauuguuguuuuuuaaugaugg

SEQ ID NO: 310132 - RNA, 23 nt, Human
uccagccugggcaacagagugag

SEQ ID NO: 310133 - RNA, 24 nt, Human
uccagccugggcaacagagugaga

SEQ ID NO: 310134 - RNA, 23 nt, Human
uccaucucaaaaaaaaaaaaaaa

SEQ ID NO: 310135 - RNA, 23 nt, Human
ucgugccauugcacuccagccug

SEQ ID NO: 310136 - RNA, 26 nt, Human
ucugcaauuuacugguugacugcacu

SEQ ID NO: 310137 - RNA, 22 nt, Human
ugaaaagaugacauagaccaac

SEQ ID NO: 310138 - RNA, 19 nt, Human
ugaaagauuuuuuuuucuu

SEQ ID NO: 310139 - RNA, 22 nt, Human
ugaacugauaaacaagaauaua

SEQ ID NO: 310140 - RNA, 19 nt, Human
ugaccaagauggugaaacc

SEQ ID NO: 310141 - RNA, 22 nt, Human
ugagaccaagugucuacuuugc

SEQ ID NO: 310142 - RNA, 22 nt, Human
ugagccgagaucgugccauugc

SEQ ID NO: 310143 - RNA, 23 nt, Human
ugaggcaggaaauugcuugaacc

SEQ ID NO: 310144 - RNA, 23 nt, Human
ugaggcaggaaauugcuugaacc

SEQ ID NO: 310145 - RNA, 24 nt, Human
ugaggcaggaaauugcuugaaccc

SEQ ID NO: 310146 - RNA, 21 nt, Human
ugcacgccuguaaucccagca

SEQ ID NO: 310147 - RNA, 22 nt, Human
ugcacuccagccugggcaacag

SEQ ID NO: 310148 - RNA, 22 nt, Human
ugcacuccagccugggcaacag

SEQ ID NO: 310149 - RNA, 22 nt, Human
ugccaaguaguuccuccauucu

SEQ ID NO: 310150 - RNA, 22 nt, Human
uggaucacgaggucaggaguuc

SEQ ID NO: 310151 - RNA, 24 nt, Human
ugggaagccgaggcagguggauca

SEQ ID NO: 310152 - RNA, 21 nt, Human
uggugcacgccuguaauccca

SEQ ID NO: 310153 - RNA, 24 nt, Human
uggugcacgccuguaaucccagca

SEQ ID NO: 310154 - RNA, 24 nt, Human
ugguggugggcaccuguaauccca

SEQ ID NO: 310155 - RNA, 18 nt, Human
ugucuuauaugcuuuagg

SEQ ID NO: 310156 - RNA, 19 nt, Human
uguuuugguagaagugguc

SEQ ID NO: 310157 - RNA, 22 nt, Human
uucaaaaguugacauuaucaga

SEQ ID NO: 310158 - RNA, 27 nt, Human
uugaccaagauggugaaaccuugccuc

SEQ ID NO: 310159 - RNA, 18 nt, Human
uugcuugaacccgggagg

SEQ ID NO: 310160 - RNA, 24 nt, Human
uugcuugaacccgggaggcagagg

SEQ ID NO: 310161 - RNA, 22 nt, Human
uuucagugagccgagaucgugc

SEQ ID NO: 310162 - RNA, 23 nt, Human
uuucagugagccgagaucgugcc

SEQ ID NO: 310163 - RNA, 24 nt, Human
aaaagagacagggcucuggacaca

SEQ ID NO: 310164 - RNA, 21 nt, Human
aaacacagacugcugggcccc

SEQ ID NO: 310165 - RNA, 20 nt, Human
aaacagcacacauggugggg

SEQ ID NO: 310166 - RNA, 23 nt, Human
aagaagcucccaggggaugcuga

SEQ ID NO: 310167 - RNA, 22 nt, Human
aagagaagcugaaggggaggcg

SEQ ID NO: 310168 - RNA, 26 nt, Human
aagcagaggugucugugcagccagga

SEQ ID NO: 310169 - RNA, 26 nt, Human
aagcagaggugucugugcagccagga

SEQ ID NO: 310170 - RNA, 24 nt, Human
aagccagcaaaugacacgccagga

SEQ ID NO: 310171 - RNA, 24 nt, Human
aagccagcaaaugacacgccagga

SEQ ID NO: 310172 - RNA, 28 nt, Human
aagccagcaaaugacacgccaggagccc

SEQ ID NO: 310173 - RNA, 19 nt, Human
aagcuccagacaaaggucu

SEQ ID NO: 310174 - RNA, 18 nt, Human
aagcugaaggggaggcgu

SEQ ID NO: 310175 - RNA, 21 nt, Human
aauaaaccucuagggacagaa

SEQ ID NO: 310176 - RNA, 21 nt, Human
aaugaguagggaugggaagga

SEQ ID NO: 310177 - RNA, 24 nt, Human
acaccccuucacuggcccccacug

SEQ ID NO: 310178 - RNA, 21 nt, Human
acagaaccucagacugagggc

SEQ ID NO: 310179 - RNA, 21 nt, Human
acagaaccucagacugagggc

SEQ ID NO: 310180 - RNA, 25 nt, Human
acaugguggggcuggaaaucagugg

SEQ ID NO: 310181 - RNA, 19 nt, Human
accacggaagacaugucaa

SEQ ID NO: 310182 - RNA, 19 nt, Human
accacggaagacaugucaa

SEQ ID NO: 310183 - RNA, 18 nt, Human
acccugagggugcugggg

SEQ ID NO: 310184 - RNA, 21 nt, Human
acccugagggugcuggggccu

SEQ ID NO: 310185 - RNA, 21 nt, Human
agacagggcucuggacacaug

SEQ ID NO: 310186 - RNA, 19 nt, Human
agaccagggccaccuagag

SEQ ID NO: 310187 - RNA, 24 nt, Human
agagaagacccaggucucccugcc

SEQ ID NO: 310188 - RNA, 27 nt, Human
agagcaaagcuguggccaagcagaggu

SEQ ID NO: 310189 - RNA, 23 nt, Human
agaggccugggcugcuugggaag

SEQ ID NO: 310190 - RNA, 27 nt, Human
agccagcaaaugacacgccaggagccc

SEQ ID NO: 310191 - RNA, 27 nt, Human
agccagcaaaugacacgccaggagccc

SEQ ID NO: 310192 - RNA, 18 nt, Human
agccucuaguaauaaacc

SEQ ID NO: 310193 - RNA, 21 nt, Human
agcggacaacccugaccugcc

SEQ ID NO: 310194 - RNA, 18 nt, Human
agcucaggggccgggcag

SEQ ID NO: 310195 - RNA, 21 nt, Human
agcucaggggccgggcagggg

SEQ ID NO: 310196 - RNA, 21 nt, Human
agcucaggggccgggcagggg

SEQ ID NO: 310197 - RNA, 21 nt, Human
agcucaggggccgggcagggg

SEQ ID NO: 310198 - RNA, 18 nt, Human
agcucuccugggccuggc

SEQ ID NO: 310199 - RNA, 18 nt, Human
agcucuccugggccuggc

SEQ ID NO: 310200 - RNA, 22 nt, Human
agcugucauuuggagacugucc

SEQ ID NO: 310201 - RNA, 22 nt, Human
aggaaggaagcaagcuuuggaa

SEQ ID NO: 310202 - RNA, 22 nt, Human
aggaaggaagcaagcuuuggaa

SEQ ID NO: 310203 - RNA, 19 nt, Human
aggagaaggggagggcaaa

SEQ ID NO: 310204 - RNA, 19 nt, Human
aggagaaggggagggcaaa

SEQ ID NO: 310205 - RNA, 18 nt, Human
aggagccccggagggagc

SEQ ID NO: 310206 - RNA, 18 nt, Human
aggagccccggagggagc

SEQ ID NO: 310207 - RNA, 23 nt, Human
aggaggaaggaagcaagcuuugg

SEQ ID NO: 310208 - RNA, 18 nt, Human
aggcuugggguggggguc

SEQ ID NO: 310209 - RNA, 18 nt, Human
aggcuugggguggggguc

SEQ ID NO: 310210 - RNA, 18 nt, Human
aggcuugggguggggguc

SEQ ID NO: 310211 - RNA, 18 nt, Human
aggcuugggguggggguc

SEQ ID NO: 310212 - RNA, 18 nt, Human
agggacagaagggucacu

SEQ ID NO: 310213 - RNA, 18 nt, Human
agggaggaggaggaaggg

SEQ ID NO: 310214 - RNA, 19 nt, Human
agggaggaggaggaagggg

SEQ ID NO: 310215 - RNA, 20 nt, Human
agggaggaggaggaaggggc

SEQ ID NO: 310216 - RNA, 22 nt, Human
agggcuggguaccaggaccugg

SEQ ID NO: 310217 - RNA, 25 nt, Human
agggugcuggggccuuccagcugga

SEQ ID NO: 310218 - RNA, 20 nt, Human
auaaaccucuagggacagaa

SEQ ID NO: 310219 - RNA, 20 nt, Human
aucaaucuguuuccaucggu

SEQ ID NO: 310220 - RNA, 20 nt, Human
caaagaaaaccagaggucug

SEQ ID NO: 310221 - RNA, 20 nt, Human
caaagaggccuggaauggug

SEQ ID NO: 310222 - RNA, 20 nt, Human
caaagaggccuggaauggug

SEQ ID NO: 310223 - RNA, 20 nt, Human
caaagaggccuggaauggug

SEQ ID NO: 310224 - RNA, 20 nt, Human
caaagaggccuggaauggug

SEQ ID NO: 310225 - RNA, 21 nt, Human
caaaugacacgccaggagccc

SEQ ID NO: 310226 - RNA, 21 nt, Human
caaaugacacgccaggagccc

SEQ ID NO: 310227 - RNA, 25 nt, Human
caaguguuuauugagcagccacauc

SEQ ID NO: 310228 - RNA, 25 nt, Human
caaguguuuauugagcagccacauc

SEQ ID NO: 310229 - RNA, 25 nt, Human
caaguguuuauugagcagccacauc

SEQ ID NO: 310230 - RNA, 25 nt, Human
caaguguuuauugagcagccacauc

SEQ ID NO: 310231 - RNA, 23 nt, Human
caauacagaaccucagacugagg

SEQ ID NO: 310232 - RNA, 18 nt, Human
cacagacuucaccagugu

SEQ ID NO: 310233 - RNA, 24 nt, Human
cacagccagauggccgcucugacc

SEQ ID NO: 310234 - RNA, 20 nt, Human
caccagagacuccaagcugg

SEQ ID NO: 310235 - RNA, 18 nt, Human
cacccaagguaguggcag

SEQ ID NO: 310236 - RNA, 18 nt, Human
cacgguggacggcagggc

SEQ ID NO: 310237 - RNA, 18 nt, Human
cacgguggacggcagggc

SEQ ID NO: 310238 - RNA, 24 nt, Human
cacugcacagucagagauagggac

SEQ ID NO: 310239 - RNA, 23 nt, Human
cacuuucauugucaaucuugagg

SEQ ID NO: 310240 - RNA, 19 nt, Human
cagaacaccccucaaucac

SEQ ID NO: 310241 - RNA, 23 nt, Human
cagaaccucagacugagggcugg

SEQ ID NO: 310242 - RNA, 19 nt, Human
cagacuucaccagugugaa

SEQ ID NO: 310243 - RNA, 25 nt, Human
cagagaagacccaggucucccugcc

SEQ ID NO: 310244 - RNA, 25 nt, Human
cagagaagacccaggucucccugcc

SEQ ID NO: 310245 - RNA, 25 nt, Human
cagagaagacccaggucucccugcc

SEQ ID NO: 310246 - RNA, 18 nt, Human
cagaggccugugguagag

SEQ ID NO: 310247 - RNA, 20 nt, Human
cagcagagacuggacuggcg

SEQ ID NO: 310248 - RNA, 20 nt, Human
cagcagagacuggacuggcg

SEQ ID NO: 310249 - RNA, 21 nt, Human
cagccucuaguaauaaaccuc

SEQ ID NO: 310250 - RNA, 19 nt, Human
cagcucaggggccgggcag

SEQ ID NO: 310251 - RNA, 19 nt, Human
cagcucaggggccgggcag

SEQ ID NO: 310252 - RNA, 19 nt, Human
cagcucaggggccgggcag

SEQ ID NO: 310253 - RNA, 20 nt, Human
cagcugucauuuggagacug

SEQ ID NO: 310254 - RNA, 22 nt, Human
caggaagagccaagggccaugc

SEQ ID NO: 310255 - RNA, 20 nt, Human
caggagcccaggugagccgg

SEQ ID NO: 310256 - RNA, 20 nt, Human
caggagcccaggugagccgg

SEQ ID NO: 310257 - RNA, 21 nt, Human
caggcuggaggcuccuugugc

SEQ ID NO: 310258 - RNA, 21 nt, Human
caggcuggaggcuccuugugc

SEQ ID NO: 310259 - RNA, 20 nt, Human
cagugggcccagucucccuu

SEQ ID NO: 310260 - RNA, 18 nt, Human
caucaaaauucacuguga

SEQ ID NO: 310261 - RNA, 21 nt, Human
caucggggguggcagccugcu

SEQ ID NO: 310262 - RNA, 21 nt, Human
caucggggguggcagccugcu

SEQ ID NO: 310263 - RNA, 23 nt, Human
caucugccaggucuugggauagc

SEQ ID NO: 310264 - RNA, 23 nt, Human
caucugccaggucuugggauagc

SEQ ID NO: 310265 - RNA, 23 nt, Human
caucugccaggucuugggauagc

SEQ ID NO: 310266 - RNA, 20 nt, Human
caucuuuauucaagccagca

SEQ ID NO: 310267 - RNA, 20 nt, Human
caucuuuauucaagccagca

SEQ ID NO: 310268 - RNA, 18 nt, Human
caugucaagcugggaagc

SEQ ID NO: 310269 - RNA, 19 nt, Human
ccaagcuggucacccccuc

SEQ ID NO: 310270 - RNA, 18 nt, Human
ccacaggucugcauuucu

SEQ ID NO: 310271 - RNA, 25 nt, Human
ccaccagagacuccaagcuggucac

SEQ ID NO: 310272 - RNA, 22 nt, Human
ccacugggauaaaugggaggag

SEQ ID NO: 310273 - RNA, 22 nt, Human
ccacugggauaaaugggaggag

SEQ ID NO: 310274 - RNA, 18 nt, Human
ccaggacccugagggugc

SEQ ID NO: 310275 - RNA, 19 nt, Human
cccacgguggacggcaggg

SEQ ID NO: 310276 - RNA, 19 nt, Human
cccacgguggacggcaggg

SEQ ID NO: 310277 - RNA, 20 nt, Human
ccccuuggaggagcagucua

SEQ ID NO: 310278 - RNA, 20 nt, Human
cccggagggagcggcugcgg

SEQ ID NO: 310279 - RNA, 20 nt, Human
cccggagggagcggcugcgg

SEQ ID NO: 310280 - RNA, 19 nt, Human
ccucaggggccacccaguc

SEQ ID NO: 310281 - RNA, 19 nt, Human
ccucccugguucuagcucc

SEQ ID NO: 310282 - RNA, 23 nt, Human
ccucugggcagguggaggguggg

SEQ ID NO: 310283 - RNA, 22 nt, Human
ccugcacuucuuuuugggacuc

SEQ ID NO: 310284 - RNA, 22 nt, Human
ccugcacuucuuuuugggacuc

SEQ ID NO: 310285 - RNA, 22 nt, Human
ccugcccccaccacggaagaca

SEQ ID NO: 310286 - RNA, 22 nt, Human
ccugcccccaccacggaagaca

SEQ ID NO: 310287 - RNA, 19 nt, Human
ccugccucuguucugcugu

SEQ ID NO: 310288 - RNA, 18 nt, Human
cgaaggcggauggcucuc

SEQ ID NO: 310289 - RNA, 23 nt, Human
cgggaggacgaguuuucggcauc

SEQ ID NO: 310290 - RNA, 25 nt, Human
cgggaucgcacagccccucguaucc

SEQ ID NO: 310291 - RNA, 20 nt, Human
cguggaggccaaucagccca

SEQ ID NO: 310292 - RNA, 24 nt, Human
cuaugagagcagcgguucucaaac

SEQ ID NO: 310293 - RNA, 23 nt, Human
cucagaggccugcuuuccauucc

SEQ ID NO: 310294 - RNA, 18 nt, Human
cucagccagagaagaccc

SEQ ID NO: 310295 - RNA, 19 nt, Human
cucagggaccccaucccuc

SEQ ID NO: 310296 - RNA, 22 nt, Human
cuccauggagccucugacagag

SEQ ID NO: 310297 - RNA, 22 nt, Human
cuccauggagccucugacagag

SEQ ID NO: 310298 - RNA, 23 nt, Human
cuccuggcccugguguaguggga

SEQ ID NO: 310299 - RNA, 25 nt, Human
cuccuggcccugguguagugggagg

SEQ ID NO: 310300 - RNA, 24 nt, Human
cucguccaggacccugagggugcu

SEQ ID NO: 310301 - RNA, 19 nt, Human
cucuagggacagaaggguc

SEQ ID NO: 310302 - RNA, 28 nt, Human
cucuaguaauaaaccucuaggguacccc

SEQ ID NO: 310303 - RNA, 21 nt, Human
cucugcccaccagagacucca

SEQ ID NO: 310304 - RNA, 20 nt, Human
cucugggcagguggagggug

SEQ ID NO: 310305 - RNA, 23 nt, Human
cucugugcagggccuguaagagc

SEQ ID NO: 310306 - RNA, 23 nt, Human
cucugugcagggccuguaagagc

SEQ ID NO: 310307 - RNA, 20 nt, Human
cugaaccaaaugacaacuga

SEQ ID NO: 310308 - RNA, 20 nt, Human
cugccaggucuugggauagc

SEQ ID NO: 310309 - RNA, 22 nt, Human
cugcccaccagagacuccaagc

SEQ ID NO: 310310 - RNA, 25 nt, Human
cuggaggaggcagcucaggggccgg

SEQ ID NO: 310311 - RNA, 25 nt, Human
cuggaggaggcagcucaggggccgg

SEQ ID NO: 310312 - RNA, 25 nt, Human
cuggaggaggcagcucaggggccgg

SEQ ID NO: 310313 - RNA, 19 nt, Human
cuggcagauggcucugccu

SEQ ID NO: 310314 - RNA, 19 nt, Human
cuggcagauggcucugccu

SEQ ID NO: 310315 - RNA, 21 nt, Human
cuggggugguccaggcaugca

SEQ ID NO: 310316 - RNA, 22 nt, Human
cuguuuuaacagucuggcauca

SEQ ID NO: 310317 - RNA, 22 nt, Human
cuugagaggccuccauggagcc

SEQ ID NO: 310318 - RNA, 22 nt, Human
cuugagaggccuccauggagcc

SEQ ID NO: 310319 - RNA, 23 nt, Human
gaagagaagcugaaggggaggcg

SEQ ID NO: 310320 - RNA, 23 nt, Human
gaaggcacuuugaguugccaugg

SEQ ID NO: 310321 - RNA, 24 nt, Human
gaaggggagggcaaaaaaguuguu

SEQ ID NO: 310322 - RNA, 24 nt, Human
gaaggggagggcaaaaaaguuguu

SEQ ID NO: 310323 - RNA, 18 nt, Human
gacaccccuucacuggcc

SEQ ID NO: 310324 - RNA, 22 nt, Human
gacacuagagcuuaggaaggga

SEQ ID NO: 310325 - RNA, 21 nt, Human
gacaguggaggcagggcagaa

SEQ ID NO: 310326 - RNA, 26 nt, Human
gaccaaagagcaaagcuguggccaag

SEQ ID NO: 310327 - RNA, 22 nt, Human
gaccccaucccucucugcccac

SEQ ID NO: 310328 - RNA, 22 nt, Human
gacggcugagggugagggcagu

SEQ ID NO: 310329 - RNA, 24 nt, Human
gagcaugcaccagcaucaccggga

SEQ ID NO: 310330 - RNA, 18 nt, Human
gagcaugggcuggaggag

SEQ ID NO: 310331 - RNA, 18 nt, Human
gagcaugggcuggaggag

SEQ ID NO: 310332 - RNA, 18 nt, Human
gagcaugggcuggaggag

SEQ ID NO: 310333 - RNA, 19 nt, Human
gagcaugggcuggaggagg

SEQ ID NO: 310334 - RNA, 19 nt, Human
gagcaugggcuggaggagg

SEQ ID NO: 310335 - RNA, 19 nt, Human
gagcaugggcuggaggagg

SEQ ID NO: 310336 - RNA, 24 nt, Human
gagcggcugcgggaucgcacagcc

SEQ ID NO: 310337 - RNA, 24 nt, Human
gagcggcugcgggaucgcacagcc

SEQ ID NO: 310338 - RNA, 22 nt, Human
gagcuaaugaguagggauggga

SEQ ID NO: 310339 - RNA, 19 nt, Human
gaggagccccggagggagc

SEQ ID NO: 310340 - RNA, 19 nt, Human
gaggagccccggagggagc

SEQ ID NO: 310341 - RNA, 19 nt, Human
gaggaggaggaaggggcug

SEQ ID NO: 310342 - RNA, 21 nt, Human
gagggcaaaaaaguuguugag

SEQ ID NO: 310343 - RNA, 23 nt, Human
gaggggcccugugauggcaggag

SEQ ID NO: 310344 - RNA, 23 nt, Human
gaggggcccugugauggcaggag

SEQ ID NO: 310345 - RNA, 19 nt, Human
gaggucaaagaaaaccaga

SEQ ID NO: 310346 - RNA, 21 nt, Human
gaggugccggcucagggcccg

SEQ ID NO: 310347 - RNA, 21 nt, Human
gagugcgugaagagaagcuga

SEQ ID NO: 310348 - RNA, 21 nt, Human
gaguuuucggcaucugagucu

SEQ ID NO: 310349 - RNA, 18 nt, Human
gaugaggccccucuggga

SEQ ID NO: 310350 - RNA, 18 nt, Human
gcacagccagauggccgc

SEQ ID NO: 310351 - RNA, 19 nt, Human
gcagaacaccccucaauca

SEQ ID NO: 310352 - RNA, 21 nt, Human
gccagagcucagagcucuccu

SEQ ID NO: 310353 - RNA, 22 nt, Human
gccagagcucagagcucuccug

SEQ ID NO: 310354 - RNA, 22 nt, Human
gccagagcucagagcucuccug

SEQ ID NO: 310355 - RNA, 18 nt, Human
gccccggagggagcggcu

SEQ ID NO: 310356 - RNA, 18 nt, Human
gccccggagggagcggcu

SEQ ID NO: 310357 - RNA, 23 nt, Human
gcccugugauggcaggagugcug

SEQ ID NO: 310358 - RNA, 23 nt, Human
gcccugugauggcaggagugcug

SEQ ID NO: 310359 - RNA, 18 nt, Human
gccugcucagcgggcugg

SEQ ID NO: 310360 - RNA, 18 nt, Human
gccugcucagcgggcugg

SEQ ID NO: 310361 - RNA, 20 nt, Human
gcggacaacccugaccugcc

SEQ ID NO: 310362 - RNA, 20 nt, Human
gcugcaguuguuggccagag

SEQ ID NO: 310363 - RNA, 20 nt, Human
gcugcaguuguuggccagag

SEQ ID NO: 310364 - RNA, 23 nt, Human
gcugugauggguggggccuggcu

SEQ ID NO: 310365 - RNA, 23 nt, Human
gcuuagauccuggcagaggccua

SEQ ID NO: 310366 - RNA, 23 nt, Human
gcuuagauccuggcagaggccua

SEQ ID NO: 310367 - RNA, 18 nt, Human
ggaaggagggaggaggag

SEQ ID NO: 310368 - RNA, 20 nt, Human
ggaccacauggggagaccaa

SEQ ID NO: 310369 - RNA, 20 nt, Human
ggaccacauggggagaccaa

SEQ ID NO: 310370 - RNA, 19 nt, Human
ggacuggcgaggagugggc

SEQ ID NO: 310371 - RNA, 19 nt, Human
ggacuggcgaggagugggc

SEQ ID NO: 310372 - RNA, 21 nt, Human
ggacuggcgaggagugggcug

SEQ ID NO: 310373 - RNA, 21 nt, Human
ggacuggcgaggagugggcug

SEQ ID NO: 310374 - RNA, 18 nt, Human
ggaggccaagcugggggg

SEQ ID NO: 310375 - RNA, 18 nt, Human
ggaggccaagcugggggg

SEQ ID NO: 310376 - RNA, 20 nt, Human
ggagggagcggcugcgggau

SEQ ID NO: 310377 - RNA, 20 nt, Human
ggagggagcggcugcgggau

SEQ ID NO: 310378 - RNA, 22 nt, Human
ggagggcaaaaaaguuguugag

SEQ ID NO: 310379 - RNA, 22 nt, Human
ggagggcaaaaaaguuguugag

SEQ ID NO: 310380 - RNA, 19 nt, Human
ggagugcucugcccagccu

SEQ ID NO: 310381 - RNA, 19 nt, Human
ggagugcucugcccagccu

SEQ ID NO: 310382 - RNA, 24 nt, Human
ggagugcuggcuuggaccacaugg

SEQ ID NO: 310383 - RNA, 24 nt, Human
ggagugcuggcuuggaccacaugg

SEQ ID NO: 310384 - RNA, 21 nt, Human
ggcagggcagaacaccccuca

SEQ ID NO: 310385 - RNA, 23 nt, Human
ggcaggggcuggggucagggcag

SEQ ID NO: 310386 - RNA, 22 nt, Human
ggccagagcucagagcucuccu

SEQ ID NO: 310387 - RNA, 19 nt, Human
ggccccacccugaagauuc

SEQ ID NO: 310388 - RNA, 21 nt, Human
ggccuggcagauggcucugcc

SEQ ID NO: 310389 - RNA, 21 nt, Human
ggccuggcagauggcucugcc

SEQ ID NO: 310390 - RNA, 21 nt, Human
ggcuggggucagggcagagcu

SEQ ID NO: 310391 - RNA, 24 nt, Human
ggcuuagauccuggcagaggccua

SEQ ID NO: 310392 - RNA, 24 nt, Human
ggcuuagauccuggcagaggccua

SEQ ID NO: 310393 - RNA, 19 nt, Human
ggcuuggggugggggucgg

SEQ ID NO: 310394 - RNA, 19 nt, Human
ggcuuggggugggggucgg

SEQ ID NO: 310395 - RNA, 19 nt, Human
ggcuuggggugggggucgg

SEQ ID NO: 310396 - RNA, 19 nt, Human
ggcuuggggugggggucgg

SEQ ID NO: 310397 - RNA, 23 nt, Human
gggaacaagacccuacggaauuc

SEQ ID NO: 310398 - RNA, 20 nt, Human
gggacacuagagcuuaggaa

SEQ ID NO: 310399 - RNA, 22 nt, Human
gggagcuaaugaguagggaugg

SEQ ID NO: 310400 - RNA, 22 nt, Human
gggagggcuggggugguccagg

SEQ ID NO: 310401 - RNA, 24 nt, Human
gggaucgcacagccccucguaucc

SEQ ID NO: 310402 - RNA, 18 nt, Human
gggaugaaaggagaaggg

SEQ ID NO: 310403 - RNA, 21 nt, Human
gggcaggggcuggggucaggg

SEQ ID NO: 310404 - RNA, 26 nt, Human
gggcagggguguuggcugcaaggucg

SEQ ID NO: 310405 - RNA, 26 nt, Human
gggcagggguguuggcugcaaggucg

SEQ ID NO: 310406 - RNA, 26 nt, Human
gggcagggguguuggcugcaaggucg

SEQ ID NO: 310407 - RNA, 20 nt, Human
gggcuggggucagggcagag

SEQ ID NO: 310408 - RNA, 21 nt, Human
gggcuggggucagggcagagc

SEQ ID NO: 310409 - RNA, 18 nt, Human
gggcuggggugguccagg

SEQ ID NO: 310410 - RNA, 20 nt, Human
ggggaggccaagcugggggg

SEQ ID NO: 310411 - RNA, 20 nt, Human
ggggaggccaagcugggggg

SEQ ID NO: 310412 - RNA, 22 nt, Human
ggggagggcaaaaaaguuguug

SEQ ID NO: 310413 - RNA, 22 nt, Human
ggggagggcaaaaaaguuguug

SEQ ID NO: 310414 - RNA, 21 nt, Human
gggguagccccaggagaaccc

SEQ ID NO: 310415 - RNA, 19 nt, Human
ggguacacagacuucacca

SEQ ID NO: 310416 - RNA, 23 nt, Human
ggugucugugcagccaggaggaa

SEQ ID NO: 310417 - RNA, 21 nt, Human
gucacuacccacgaggccacc

SEQ ID NO: 310418 - RNA, 19 nt, Human
gucagcagguguccagggg

SEQ ID NO: 310419 - RNA, 21 nt, Human
guccaggggcaggggcugggg

SEQ ID NO: 310420 - RNA, 22 nt, Human
gucucccuuccuccuuccaucu

SEQ ID NO: 310421 - RNA, 21 nt, Human
gugcucagcuuuggaaccuuc

SEQ ID NO: 310422 - RNA, 24 nt, Human
gugcugggcacuccuugggacggc

SEQ ID NO: 310423 - RNA, 25 nt, Human
gugcuggggccuuccagcuggaggu

SEQ ID NO: 310424 - RNA, 18 nt, Human
gugggggacccuaaccuc

SEQ ID NO: 310425 - RNA, 24 nt, Human
guguagugggagggcugggguggu

SEQ ID NO: 310426 - RNA, 25 nt, Human
uaagaagcucccaggggaugcugaa

SEQ ID NO: 310427 - RNA, 24 nt, Human
uaaugaguagggaugggaaggagg

SEQ ID NO: 310428 - RNA, 20 nt, Human
uacagaaccucagacugagg

SEQ ID NO: 310429 - RNA, 24 nt, Human
uagaggacagaaaaugcauaagga

SEQ ID NO: 310430 - RNA, 22 nt, Human
uagccagcaucaccucagacug

SEQ ID NO: 310431 - RNA, 20 nt, Human
uauucagauccccuuuuccc

SEQ ID NO: 310432 - RNA, 20 nt, Human
ucaccagugugaaagcugag

SEQ ID NO: 310433 - RNA, 19 nt, Human
ucacucaggaccucccugg

SEQ ID NO: 310434 - RNA, 21 nt, Human
ucagaacacaggagagugcaa

SEQ ID NO: 310435 - RNA, 21 nt, Human
ucagaacacaggagagugcaa

SEQ ID NO: 310436 - RNA, 21 nt, Human
ucagaauacaggagagugcaa

SEQ ID NO: 310437 - RNA, 21 nt, Human
ucagaauacaggagagugcaa

SEQ ID NO: 310438 - RNA, 21 nt, Human
ucagagcucuccugggccugg

SEQ ID NO: 310439 - RNA, 21 nt, Human
ucagagcucuccugggccugg

SEQ ID NO: 310440 - RNA, 23 nt, Human
ucagccaugccuuagccuucccc

SEQ ID NO: 310441 - RNA, 23 nt, Human
ucagccaugccuuagccuucccc

SEQ ID NO: 310442 - RNA, 20 nt, Human
ucagcgggcugguggggagg

SEQ ID NO: 310443 - RNA, 20 nt, Human
ucagcgggcugguggggagg

SEQ ID NO: 310444 - RNA, 19 nt, Human
ucaggcuuuggaagcagga

SEQ ID NO: 310445 - RNA, 20 nt, Human
ucaggggccgggcaggggug

SEQ ID NO: 310446 - RNA, 20 nt, Human
ucaggggccgggcaggggug

SEQ ID NO: 310447 - RNA, 20 nt, Human
ucaggggccgggcaggggug

SEQ ID NO: 310448 - RNA, 21 nt, Human
uccaagagucugggcucugcu

SEQ ID NO: 310449 - RNA, 21 nt, Human
uccacugccucagaggccugc

SEQ ID NO: 310450 - RNA, 22 nt, Human
uccacugccucagaggccugcu

SEQ ID NO: 310451 - RNA, 20 nt, Human
uccccagggggaacaccugc

SEQ ID NO: 310452 - RNA, 21 nt, Human
uccccugcccccaccacggaa

SEQ ID NO: 310453 - RNA, 19 nt, Human
ucccucucugcccaccaga

SEQ ID NO: 310454 - RNA, 21 nt, Human
uccggucgugggaacaagacc

SEQ ID NO: 310455 - RNA, 22 nt, Human
uccugggccuggcagauggcuc

SEQ ID NO: 310456 - RNA, 22 nt, Human
uccugggccuggcagauggcuc

SEQ ID NO: 310457 - RNA, 21 nt, Human
uccuugggacggcugagggug

SEQ ID NO: 310458 - RNA, 21 nt, Human
ucgggaggacgaguuuucggc

SEQ ID NO: 310459 - RNA, 20 nt, Human
ucuagggacagaagggucac

SEQ ID NO: 310460 - RNA, 21 nt, Human
ucuagggacagaagggucacu

SEQ ID NO: 310461 - RNA, 21 nt, Human
ucuaguaauaaaccucuaggg

SEQ ID NO: 310462 - RNA, 19 nt, Human
ucucagccagagaagaccc

SEQ ID NO: 310463 - RNA, 19 nt, Human
ucucagccagagaagaccc

SEQ ID NO: 310464 - RNA, 19 nt, Human
ucucagccagagaagaccc

SEQ ID NO: 310465 - RNA, 21 nt, Human
ucuccugggccuggcagaugg

SEQ ID NO: 310466 - RNA, 21 nt, Human
ucuccugggccuggcagaugg

SEQ ID NO: 310467 - RNA, 20 nt, Human
ugaagagaagcugaagggga

SEQ ID NO: 310468 - RNA, 21 nt, Human
ugacagaaguuucuuucuugg

SEQ ID NO: 310469 - RNA, 21 nt, Human
ugacagaaguuucuuucuugg

SEQ ID NO: 310470 - RNA, 21 nt, Human
ugacagaaguuucuuucuugg

SEQ ID NO: 310471 - RNA, 21 nt, Human
ugacagaaguuucuuucuugg

SEQ ID NO: 310472 - RNA, 23 nt, Human
ugaggcucagcaucggggguggc

SEQ ID NO: 310473 - RNA, 23 nt, Human
ugaggcucagcaucggggguggc

SEQ ID NO: 310474 - RNA, 25 nt, Human
ugagggcuggaagagaccucagggg

SEQ ID NO: 310475 - RNA, 21 nt, Human
ugaggggucugguggccugag

SEQ ID NO: 310476 - RNA, 18 nt, Human
ugaggucaucagccaugg

SEQ ID NO: 310477 - RNA, 24 nt, Human
ugaguugccaugggcugccagggc

SEQ ID NO: 310478 - RNA, 19 nt, Human
ugauggguggggccuggcu

SEQ ID NO: 310479 - RNA, 22 nt, Human
ugccaggucuugggauagccag

SEQ ID NO: 310480 - RNA, 22 nt, Human
ugccaggucuugggauagccag

SEQ ID NO: 310481 - RNA, 22 nt, Human
ugccaggucuugggauagccag

SEQ ID NO: 310482 - RNA, 22 nt, Human
ugccaggucuugggauagccag

SEQ ID NO: 310483 - RNA, 22 nt, Human
ugccucagaggccugcuuucca

SEQ ID NO: 310484 - RNA, 21 nt, Human
ugccuuagccuuccccucuca

SEQ ID NO: 310485 - RNA, 21 nt, Human
ugccuuagccuuccccucuca

SEQ ID NO: 310486 - RNA, 21 nt, Human
ugccuuagccuuccccucuca

SEQ ID NO: 310487 - RNA, 21 nt, Human
ugccuuagccuuccccucuca

SEQ ID NO: 310488 - RNA, 21 nt, Human
ugcgugaagagaagcugaagg

SEQ ID NO: 310489 - RNA, 22 nt, Human
ugcugugauggguggggccugg

SEQ ID NO: 310490 - RNA, 20 nt, Human
ugcuugggggucagcaaggu

SEQ ID NO: 310491 - RNA, 21 nt, Human
uggaaggaggggcuaauagga

SEQ ID NO: 310492 - RNA, 20 nt, Human
uggaaugguggcuugaaucu

SEQ ID NO: 310493 - RNA, 20 nt, Human
uggaaugguggcuugaaucu

SEQ ID NO: 310494 - RNA, 20 nt, Human
uggaaugguggcuugaaucu

SEQ ID NO: 310495 - RNA, 20 nt, Human
uggaaugguggcuugaaucu

SEQ ID NO: 310496 - RNA, 18 nt, Human
uggaggagaaggggaggg

SEQ ID NO: 310497 - RNA, 18 nt, Human
uggaggagaaggggaggg

SEQ ID NO: 310498 - RNA, 19 nt, Human
uggaggagaaggggagggc

SEQ ID NO: 310499 - RNA, 19 nt, Human
uggaggagaaggggagggc

SEQ ID NO: 310500 - RNA, 21 nt, Human
uggaggagcagucuaugagag

SEQ ID NO: 310501 - RNA, 23 nt, Human
uggagugcgugaagagaagcuga

SEQ ID NO: 310502 - RNA, 20 nt, Human
uggauggagucaaaccucac

SEQ ID NO: 310503 - RNA, 20 nt, Human
uggcagauggcucugccugc

SEQ ID NO: 310504 - RNA, 20 nt, Human
uggcagauggcucugccugc

SEQ ID NO: 310505 - RNA, 22 nt, Human
uggcagccugcucagcgggcuu

SEQ ID NO: 310506 - RNA, 22 nt, Human
uggcagccugcucagcgggcuu

SEQ ID NO: 310507 - RNA, 19 nt, Human
uggcaggagugcuggcuug

SEQ ID NO: 310508 - RNA, 19 nt, Human
uggcaggagugcuggcuug

SEQ ID NO: 310509 - RNA, 22 nt, Human
uggccagagcucagagcucucc

SEQ ID NO: 310510 - RNA, 22 nt, Human
uggccagagcucagagcucucc

SEQ ID NO: 310511 - RNA, 21 nt, Human
uggccccuauauagcugcccu

SEQ ID NO: 310512 - RNA, 22 nt, Human
uggccccuauauagcugcccuu

SEQ ID NO: 310513 - RNA, 18 nt, Human
uggccugaggaccaaaga

SEQ ID NO: 310514 - RNA, 22 nt, Human
uggcugcaguuguuggccagag

SEQ ID NO: 310515 - RNA, 22 nt, Human
uggcugcaguuguuggccagag

SEQ ID NO: 310516 - RNA, 20 nt, Human
ugggaagccauggaggagaa

SEQ ID NO: 310517 - RNA, 20 nt, Human
ugggaagccauggaggagaa

SEQ ID NO: 310518 - RNA, 23 nt, Human
ugggaaggagggaggaggaggaa

SEQ ID NO: 310519 - RNA, 22 nt, Human
ugggacugggcugauggggggc

SEQ ID NO: 310520 - RNA, 22 nt, Human
ugggacugggcugauggggggc

SEQ ID NO: 310521 - RNA, 22 nt, Human
ugggauggauggggcaagacca

SEQ ID NO: 310522 - RNA, 18 nt, Human
ugggcuggaggaggcagc

SEQ ID NO: 310523 - RNA, 18 nt, Human
ugggcuggaggaggcagc

SEQ ID NO: 310524 - RNA, 18 nt, Human
ugggcuggaggaggcagc

SEQ ID NO: 310525 - RNA, 22 nt, Human
ugggcuggaggaggcagcucag

SEQ ID NO: 310526 - RNA, 22 nt, Human
ugggcuggaggaggcagcucag

SEQ ID NO: 310527 - RNA, 22 nt, Human
ugggcuggaggaggcagcucag

SEQ ID NO: 310528 - RNA, 25 nt, Human
ugggcuggcgaggacuguggcucgg

SEQ ID NO: 310529 - RNA, 18 nt, Human
ugggcuggcgaggagugg

SEQ ID NO: 310530 - RNA, 18 nt, Human
ugggcuggcgaggagugg

SEQ ID NO: 310531 - RNA, 21 nt, Human
uggggaggccaagcugggggg

SEQ ID NO: 310532 - RNA, 21 nt, Human
uggggaggccaagcugggggg

SEQ ID NO: 310533 - RNA, 19 nt, Human
uggggugggggucggggca

SEQ ID NO: 310534 - RNA, 19 nt, Human
uggggugggggucggggca

SEQ ID NO: 310535 - RNA, 19 nt, Human
uggggugggggucggggca

SEQ ID NO: 310536 - RNA, 19 nt, Human
uggggugggggucggggca

SEQ ID NO: 310537 - RNA, 20 nt, Human
uggggugggggucggggcau

SEQ ID NO: 310538 - RNA, 20 nt, Human
uggggugggggucggggcau

SEQ ID NO: 310539 - RNA, 20 nt, Human
uggggugggggucggggcau

SEQ ID NO: 310540 - RNA, 20 nt, Human
uggggugggggucggggcau

SEQ ID NO: 310541 - RNA, 28 nt, Human
uggggugggggucggggcauggaaggcu

SEQ ID NO: 310542 - RNA, 28 nt, Human
uggggugggggucggggcauggaaggcu

SEQ ID NO: 310543 - RNA, 28 nt, Human
uggggugggggucggggcauggaaggcu

SEQ ID NO: 310544 - RNA, 28 nt, Human
uggggugggggucggggcauggaaggcu

SEQ ID NO: 310545 - RNA, 20 nt, Human
uggguacacagacuucacca

SEQ ID NO: 310546 - RNA, 21 nt, Human
ugguagagcccacaggucugc

SEQ ID NO: 310547 - RNA, 21 nt, Human
uggucccagagaaagggaacu

SEQ ID NO: 310548 - RNA, 21 nt, Human
ugguguagugggagggcuggg

SEQ ID NO: 310549 - RNA, 22 nt, Human
ugucagcagguguccaggggca

SEQ ID NO: 310550 - RNA, 18 nt, Human
ugugauggcaggagugcu

SEQ ID NO: 310551 - RNA, 18 nt, Human
ugugauggcaggagugcu

SEQ ID NO: 310552 - RNA, 19 nt, Human
uuagaaaggggugggggua

SEQ ID NO: 310553 - RNA, 22 nt, Human
uucaagccagcaaaugacacgc

SEQ ID NO: 310554 - RNA, 22 nt, Human
uucaagccagcaaaugacacgc

SEQ ID NO: 310555 - RNA, 21 nt, Human
uuccagaaaagagacagggcu

SEQ ID NO: 310556 - RNA, 21 nt, Human
uucucuguaggauguuuagag

SEQ ID NO: 310557 - RNA, 21 nt, Human
uucuugggcaaagaggccugg

SEQ ID NO: 310558 - RNA, 21 nt, Human
uucuugggcaaagaggccugg

SEQ ID NO: 310559 - RNA, 21 nt, Human
uucuugggcaaagaggccugg

SEQ ID NO: 310560 - RNA, 21 nt, Human
uucuugggcaaagaggccugg

SEQ ID NO: 310561 - RNA, 23 nt, Human
uuggaccacauggggagaccaag

SEQ ID NO: 310562 - RNA, 23 nt, Human
uuggaccacauggggagaccaag

SEQ ID NO: 310563 - RNA, 22 nt, Human
uuuaaggcggacaucuuuauuc

SEQ ID NO: 310564 - RNA, 22 nt, Human
uuuaaggcggacaucuuuauuc

SEQ ID NO: 310565 - RNA, 26 nt, Human
uuugaguugccaugggcugccagggc

SEQ ID NO: 310566 - RNA, 22 nt, Human
uuuuuuuuuuuuuuaaggcgga

SEQ ID NO: 310567 - RNA, 20 nt, Human
uuuuuuuuuuuuuuugaugg

SEQ ID NO: 310568 - RNA, 20 nt, Human
uuuuuuuuuuuuuuugaugg

SEQ ID NO: 310569 - RNA, 20 nt, Human
uuuuuuuuuuuuuuugaugg

SEQ ID NO: 310570 - RNA, 18 nt, Human
uuuuuuuuuuuuuuuuug

SEQ ID NO: 310571 - RNA, 22 nt, Human
uuuuuuuuuuuuuuuuugaugg

SEQ ID NO: 310572 - RNA, 24 nt, Human
uuuuuuuuuuuuuuuuuuuucaag

SEQ ID NO: 310573 - RNA, 25 nt, Human
uuuuuuuuuuuuuuuuuuuuuaagg

SEQ ID NO: 310574 - RNA, 23 nt, Human
aagaaaccucuucuguaccgaaa

SEQ ID NO: 310575 - RNA, 19 nt, Human
accucaucgcccagggcag

SEQ ID NO: 310576 - RNA, 23 nt, Human
accuuccccaccguaccucaucg

SEQ ID NO: 310577 - RNA, 23 nt, Human
agaaagaaaccucuucuguaccg

SEQ ID NO: 310578 - RNA, 20 nt, Human
agccagugccacuaggagca

SEQ ID NO: 310579 - RNA, 20 nt, Human
agcuguggccuggggcacca

SEQ ID NO: 310580 - RNA, 23 nt, Human
aggcaggcagggcaggcuagauc

SEQ ID NO: 310581 - RNA, 24 nt, Human
aggccuaggccaaacucuucagaa

SEQ ID NO: 310582 - RNA, 28 nt, Human
caaaguucucuaaaauaggcaccuuccc

SEQ ID NO: 310583 - RNA, 18 nt, Human
caagcagcagcuguggcc

SEQ ID NO: 310584 - RNA, 22 nt, Human
ccaacaccaggaccucucuuua

SEQ ID NO: 310585 - RNA, 19 nt, Human
ccccaccguaccucaucgc

SEQ ID NO: 310586 - RNA, 23 nt, Human
ccucucuuuaggccuaggccaaa

SEQ ID NO: 310587 - RNA, 18 nt, Human
cgaaauacaagcagcagc

SEQ ID NO: 310588 - RNA, 23 nt, Human
cuguaccgaaauacaagcagcag

SEQ ID NO: 310589 - RNA, 26 nt, Human
gaaauacaagcagcagcuguggccug

SEQ ID NO: 310590 - RNA, 25 nt, Human
gaggggcccuggcaucuauccaaca

SEQ ID NO: 310591 - RNA, 19 nt, Human
gcagcaggcguccugggcc

SEQ ID NO: 310592 - RNA, 19 nt, Human
ggagcauggggaacacucu

SEQ ID NO: 310593 - RNA, 20 nt, Human
ggcaggcaggcagggcaggc

SEQ ID NO: 310594 - RNA, 21 nt, Human
ggccagaggaggggcccuggc

SEQ ID NO: 310595 - RNA, 21 nt, Human
ggcccuggcaucuauccaaca

SEQ ID NO: 310596 - RNA, 20 nt, Human
gggcccuggcaucuauccaa

SEQ ID NO: 310597 - RNA, 27 nt, Human
gugacaaaguucucuaaaauaggcacc

SEQ ID NO: 310598 - RNA, 19 nt, Human
uaaaauaggcaccuucccc

SEQ ID NO: 310599 - RNA, 19 nt, Human
uaccgaaauacaagcagca

SEQ ID NO: 310600 - RNA, 18 nt, Human
uccacacagacucuggcc

SEQ ID NO: 310601 - RNA, 19 nt, Human
uccacacagacucuggccc

SEQ ID NO: 310602 - RNA, 22 nt, Human
uccccaccguaccucaucgccc

SEQ ID NO: 310603 - RNA, 24 nt, Human
uccuggugcagaaagaaaccucuu

SEQ ID NO: 310604 - RNA, 18 nt, Human
ucuguaccgaaauacaag

SEQ ID NO: 310605 - RNA, 25 nt, Human
aaacuagaggcgaacgccuccagga

SEQ ID NO: 310606 - RNA, 23 nt, Human
aagcaccuggcugugggcuggga

SEQ ID NO: 310607 - RNA, 21 nt, Human
acacugccccacucacagccc

SEQ ID NO: 310608 - RNA, 21 nt, Human
accccgccccucccgcuccca

SEQ ID NO: 310609 - RNA, 19 nt, Human
acucuccagcccagcuguu

SEQ ID NO: 310610 - RNA, 19 nt, Human
agacuagggggcugggggu

SEQ ID NO: 310611 - RNA, 19 nt, Human
agcaggccucagccccaaa

SEQ ID NO: 310612 - RNA, 22 nt, Human
aggaaagaugccgcuggauggc

SEQ ID NO: 310613 - RNA, 18 nt, Human
aggcaggagugcagggca

SEQ ID NO: 310614 - RNA, 20 nt, Human
aggcaggagugcagggcagc

SEQ ID NO: 310615 - RNA, 21 nt, Human
aggcaggagugcagggcagcc

SEQ ID NO: 310616 - RNA, 23 nt, Human
aggcaggagugcagggcagccug

SEQ ID NO: 310617 - RNA, 25 nt, Human
aggcaggagugcagggcagccuggg

SEQ ID NO: 310618 - RNA, 20 nt, Human
agggaaccagguuuagcugu

SEQ ID NO: 310619 - RNA, 18 nt, Human
agggaggguccaggcaca

SEQ ID NO: 310620 - RNA, 21 nt, Human
caaacccccauguuugguauu

SEQ ID NO: 310621 - RNA, 22 nt, Human
cacacugccccacucacagccc

SEQ ID NO: 310622 - RNA, 18 nt, Human
caccuggcugugggcugg

SEQ ID NO: 310623 - RNA, 18 nt, Human
cagagccugccuaggcug

SEQ ID NO: 310624 - RNA, 23 nt, Human
cagcaggccucagccccaaacac

SEQ ID NO: 310625 - RNA, 23 nt, Human
ccaagagggaggguccaggcaca

SEQ ID NO: 310626 - RNA, 23 nt, Human
ccacacaaccccagcaccaagca

SEQ ID NO: 310627 - RNA, 21 nt, Human
ccagcaccaacucuccagccc

SEQ ID NO: 310628 - RNA, 24 nt, Human
ccagcaggccucagccccaaacac

SEQ ID NO: 310629 - RNA, 21 nt, Human
ccaggaagccagccaggggca

SEQ ID NO: 310630 - RNA, 22 nt, Human
cccauguuugguauugaugcag

SEQ ID NO: 310631 - RNA, 18 nt, Human
ccccgccccucccgcucc

SEQ ID NO: 310632 - RNA, 18 nt, Human
cccgccccucccgcuccc

SEQ ID NO: 310633 - RNA, 22 nt, Human
cccugagaaacuagaggcgaac

SEQ ID NO: 310634 - RNA, 20 nt, Human
ccgcuggauggcuguguccu

SEQ ID NO: 310635 - RNA, 23 nt, Human
ccuggccccagacucaggucggc

SEQ ID NO: 310636 - RNA, 21 nt, Human
ccuggcugugggcugggaggc

SEQ ID NO: 310637 - RNA, 20 nt, Human
ccugggcugggucacugcag

SEQ ID NO: 310638 - RNA, 19 nt, Human
ccuuccuucuggaaguuuc

SEQ ID NO: 310639 - RNA, 18 nt, Human
cggggcucagacaguuac

SEQ ID NO: 310640 - RNA, 23 nt, Human
cucacagcccccaucaaggugac

SEQ ID NO: 310641 - RNA, 22 nt, Human
cucagccccaaacacgggaaaa

SEQ ID NO: 310642 - RNA, 19 nt, Human
cuggaaguuucuggcacug

SEQ ID NO: 310643 - RNA, 21 nt, Human
cuguugguucccacuaccucc

SEQ ID NO: 310644 - RNA, 23 nt, Human
gaccccgccccucccgcucccac

SEQ ID NO: 310645 - RNA, 20 nt, Human
gagcacgugugggaggaccc

SEQ ID NO: 310646 - RNA, 21 nt, Human
gcaggagugcagggcagccug

SEQ ID NO: 310647 - RNA, 22 nt, Human
gccacacaaccccagcaccaag

SEQ ID NO: 310648 - RNA, 20 nt, Human
gccaucuguccagcaggccu

SEQ ID NO: 310649 - RNA, 22 nt, Human
gcggaccuagcuguagcugcac

SEQ ID NO: 310650 - RNA, 23 nt, Human
gcugcuuucaccccaccggaucc

SEQ ID NO: 310651 - RNA, 18 nt, Human
ggcaaggacuguuuugcc

SEQ ID NO: 310652 - RNA, 18 nt, Human
ggcugcgggugggugagc

SEQ ID NO: 310653 - RNA, 24 nt, Human
ggcugggaggcaggagugcagggc

SEQ ID NO: 310654 - RNA, 24 nt, Human
ggcuggggguggguggggaagacc

SEQ ID NO: 310655 - RNA, 19 nt, Human
gggcugggggugggugggg

SEQ ID NO: 310656 - RNA, 21 nt, Human
gggugggugagcacguguggg

SEQ ID NO: 310657 - RNA, 20 nt, Human
gguaagaaccggccccaggg

SEQ ID NO: 310658 - RNA, 18 nt, Human
gucagccgggaccccgcc

SEQ ID NO: 310659 - RNA, 23 nt, Human
gucagccgggaccccgccccucc

SEQ ID NO: 310660 - RNA, 22 nt, Human
gugaaggccugggugagugcag

SEQ ID NO: 310661 - RNA, 19 nt, Human
uaccuccggucucggagac

SEQ ID NO: 310662 - RNA, 26 nt, Human
uaccuccggucucggagacagagaag

SEQ ID NO: 310663 - RNA, 27 nt, Human
uagccgcaccuuacaagacacguuggc

SEQ ID NO: 310664 - RNA, 20 nt, Human
uagggggcugggggugggug

SEQ ID NO: 310665 - RNA, 24 nt, Human
uaucacacugccccacucacagcc

SEQ ID NO: 310666 - RNA, 21 nt, Human
ucagccccaaacacgggaaaa

SEQ ID NO: 310667 - RNA, 21 nt, Human
ucagccgggaccccgccccuc

SEQ ID NO: 310668 - RNA, 21 nt, Human
uccacagacccaccaagaggg

SEQ ID NO: 310669 - RNA, 19 nt, Human
uccaccguguucuagcuga

SEQ ID NO: 310670 - RNA, 18 nt, Human
ucccuagggucugcuccc

SEQ ID NO: 310671 - RNA, 26 nt, Human
ucucgcuccaucccugagaaacuaga

SEQ ID NO: 310672 - RNA, 24 nt, Human
ucuggcacuggagguggaagucca

SEQ ID NO: 310673 - RNA, 25 nt, Human
ucuggcacuggagguggaaguccag

SEQ ID NO: 310674 - RNA, 20 nt, Human
ucuuacuguucucuggcugg

SEQ ID NO: 310675 - RNA, 19 nt, Human
ugacaugcaggcgggagcu

SEQ ID NO: 310676 - RNA, 24 nt, Human
ugagacccgggauccuuccagaac

SEQ ID NO: 310677 - RNA, 19 nt, Human
ugagugcagauaggagagc

SEQ ID NO: 310678 - RNA, 18 nt, Human
ugaguguagugaacacag

SEQ ID NO: 310679 - RNA, 22 nt, Human
ugcagagccugccuaggcugcg

SEQ ID NO: 310680 - RNA, 21 nt, Human
ugccuaggcugcgggugggug

SEQ ID NO: 310681 - RNA, 19 nt, Human
ugccuggcauagcaugcag

SEQ ID NO: 310682 - RNA, 21 nt, Human
ugcuggcuugucagccgggac

SEQ ID NO: 310683 - RNA, 19 nt, Human
uggaccuggguaagaaccg

SEQ ID NO: 310684 - RNA, 19 nt, Human
uggcugggcucucgcucca

SEQ ID NO: 310685 - RNA, 20 nt, Human
ugggaggcaggagugcaggg

SEQ ID NO: 310686 - RNA, 19 nt, Human
ugggagguuuggagggaac

SEQ ID NO: 310687 - RNA, 19 nt, Human
uggguaagaaccggcccca

SEQ ID NO: 310688 - RNA, 19 nt, Human
ugggugagcacguguggga

SEQ ID NO: 310689 - RNA, 20 nt, Human
uguucucuggcugggcucuc

SEQ ID NO: 310690 - RNA, 19 nt, Human
uguuugguauugaugcagg

SEQ ID NO: 310691 - RNA, 21 nt, Human
uucucauuaccaaacccccau

SEQ ID NO: 310692 - RNA, 18 nt, Human
uucugaguguagugaaca

SEQ ID NO: 310693 - RNA, 21 nt, Human
uuugccagcaccaacucucca

SEQ ID NO: 310694 - RNA, 18 nt, Human
aaaaagaaacaaacuaca

SEQ ID NO: 310695 - RNA, 20 nt, Human
aaaaagaaacaaacuacagc

SEQ ID NO: 310696 - RNA, 21 nt, Human
aaaaaggcaaacagaaaagaa

SEQ ID NO: 310697 - RNA, 27 nt, Human
aaacagaaaagaaugcaugauguacaa

SEQ ID NO: 310698 - RNA, 24 nt, Human
aaagaaacaaacuacagcugcaug

SEQ ID NO: 310699 - RNA, 22 nt, Human
aagacaaaagcaaaaacaaaua

SEQ ID NO: 310700 - RNA, 20 nt, Human
aagcaaaaacaaauauuugc

SEQ ID NO: 310701 - RNA, 22 nt, Human
aaucuauaugauagaaaccaaa

SEQ ID NO: 310702 - RNA, 25 nt, Human
acacugacuuuuagauuaauucuca

SEQ ID NO: 310703 - RNA, 24 nt, Human
acgaagaucugagugcuagguaua

SEQ ID NO: 310704 - RNA, 19 nt, Human
acuucaaugaagaaaugau

SEQ ID NO: 310705 - RNA, 23 nt, Human
agaaauuauauccuuuuuauuau

SEQ ID NO: 310706 - RNA, 25 nt, Human
agacaaaagcaaaaacaaagggacc

SEQ ID NO: 310707 - RNA, 24 nt, Human
auagcccauucuccuagcuugccu

SEQ ID NO: 310708 - RNA, 19 nt, Human
aucaacaucaacauguuuu

SEQ ID NO: 310709 - RNA, 21 nt, Human
augcauguguauuaucacaca

SEQ ID NO: 310710 - RNA, 21 nt, Human
cacacauauaugcauggaggc

SEQ ID NO: 310711 - RNA, 28 nt, Human
cacauauaugcauggaggcauguguaug

SEQ ID NO: 310712 - RNA, 27 nt, Human
cacgcacauaaaugcauguguauuauc

SEQ ID NO: 310713 - RNA, 22 nt, Human
cacuucaaugaagaaaugauuu

SEQ ID NO: 310714 - RNA, 22 nt, Human
cauggaggcauguguaugcaau

SEQ ID NO: 310715 - RNA, 24 nt, Human
ccaauucuauuccauuuccacauu

SEQ ID NO: 310716 - RNA, 18 nt, Human
ccccuucaagcuggcucu

SEQ ID NO: 310717 - RNA, 24 nt, Human
cucaguuuaggccuuugcauaucu

SEQ ID NO: 310718 - RNA, 19 nt, Human
gaagggacagaaaaaaaug

SEQ ID NO: 310719 - RNA, 18 nt, Human
gcaauggucccccguucc

SEQ ID NO: 310720 - RNA, 21 nt, Human
gcauggaggcauguguaugca

SEQ ID NO: 310721 - RNA, 18 nt, Human
gcuccuuccccauaucuc

SEQ ID NO: 310722 - RNA, 20 nt, Human
gcuggaguagaggcuacccc

SEQ ID NO: 310723 - RNA, 18 nt, Human
gcuuuggaaucauccauu

SEQ ID NO: 310724 - RNA, 21 nt, Human
ggagccccuucaagcuggcuc

SEQ ID NO: 310725 - RNA, 22 nt, Human
gggaagggacagaaaaaaaugu

SEQ ID NO: 310726 - RNA, 23 nt, Human
gggugagagcucaacacaguucu

SEQ ID NO: 310727 - RNA, 21 nt, Human
guaaauauaugcauguguaua

SEQ ID NO: 310728 - RNA, 20 nt, Human
uaaaaaaggcaaacagaaaa

SEQ ID NO: 310729 - RNA, 19 nt, Human
uaaaaagaaacaaacuaca

SEQ ID NO: 310730 - RNA, 25 nt, Human
uaaauuauccauuuuuacuuaacug

SEQ ID NO: 310731 - RNA, 18 nt, Human
uaagacaaaagcaaaaac

SEQ ID NO: 310732 - RNA, 20 nt, Human
uaagacaaaagcaaaaacaa

SEQ ID NO: 310733 - RNA, 24 nt, Human
uacacacacgcacauaaaugcaug

SEQ ID NO: 310734 - RNA, 24 nt, Human
uaccuugcccuugcuuuggaauca

SEQ ID NO: 310735 - RNA, 23 nt, Human
uacuugguaauaaaaagaaacaa

SEQ ID NO: 310736 - RNA, 21 nt, Human
uagaauggauaaacugugaua

SEQ ID NO: 310737 - RNA, 24 nt, Human
uagcagcuuuauucauagcagccg

SEQ ID NO: 310738 - RNA, 22 nt, Human
uagcccauucuccuagcuugcc

SEQ ID NO: 310739 - RNA, 22 nt, Human
uagggguggaacagaaaaggac

SEQ ID NO: 310740 - RNA, 28 nt, Human
uauaauacauauaaacguacauauacau

SEQ ID NO: 310741 - RNA, 24 nt, Human
uauaugcauggaggcauguguagg

SEQ ID NO: 310742 - RNA, 23 nt, Human
uaucacaaaaacaugaugcugaa

SEQ ID NO: 310743 - RNA, 21 nt, Human
uauuuaacucacauuuaccug

SEQ ID NO: 310744 - RNA, 23 nt, Human
uccauagugaacauccugacucc

SEQ ID NO: 310745 - RNA, 18 nt, Human
ugagguguuuuugugucu

SEQ ID NO: 310746 - RNA, 24 nt, Human
ugaguuauauuuaacucacauuua

SEQ ID NO: 310747 - RNA, 19 nt, Human
ugauagaaaccaaaccacu

SEQ ID NO: 310748 - RNA, 24 nt, Human
ugcauguguauacacacacgcaca

SEQ ID NO: 310749 - RNA, 25 nt, Human
ugcauguguauuaucacacacauaa

SEQ ID NO: 310750 - RNA, 22 nt, Human
ugcccuugcuuuggaaucaucc

SEQ ID NO: 310751 - RNA, 23 nt, Human
uggcucaaguuuggccaguggaa

SEQ ID NO: 310752 - RNA, 19 nt, Human
ugggugagagcucaacaca

SEQ ID NO: 310753 - RNA, 22 nt, Human
ugguaauaaaaagaaacaaacu

SEQ ID NO: 310754 - RNA, 24 nt, Human
uguauacacacacgcacauaaaug

SEQ ID NO: 310755 - RNA, 32 nt, Human
uguauacacacacgcacauaaaugcauguggu

SEQ ID NO: 310756 - RNA, 25 nt, Human
uguaugcaauuauaauacauauagu

SEQ ID NO: 310757 - RNA, 25 nt, Human
ugugauauauucauacaaugaaaua

SEQ ID NO: 310758 - RNA, 19 nt, Human
uguguauuaucacacacau

SEQ ID NO: 310759 - RNA, 27 nt, Human
uguguauuaucacacacauauaugcag

SEQ ID NO: 310760 - RNA, 18 nt, Human
uuccuaccuugcccuugc

SEQ ID NO: 310761 - RNA, 20 nt, Human
uugcccuugcuuuggaauca

SEQ ID NO: 310762 - RNA, 22 nt, Human
uuucuugccuucccucauuuca

SEQ ID NO: 310763 - RNA, 20 nt, Human
uuuuggcaauauaccucuau

SEQ ID NO: 310764 - RNA, 21 nt, Human
uuuuuuaacauuacuuucugg

SEQ ID NO: 310765 - RNA, 22 nt, Human
aaaacaaaaauacugagcugga

SEQ ID NO: 310766 - RNA, 19 nt, Human
aaaacaaacaaacaaaaaa

SEQ ID NO: 310767 - RNA, 23 nt, Human
aaaaguguuauaaauagguuuua

SEQ ID NO: 310768 - RNA, 21 nt, Human
aaacaaaaaacaaaacaaaaa

SEQ ID NO: 310769 - RNA, 20 nt, Human
aaacaaaaauacugagcugg

SEQ ID NO: 310770 - RNA, 25 nt, Human
aaacaaaacaaaaauacugagcugg

SEQ ID NO: 310771 - RNA, 24 nt, Human
aaacaaaaggucuggagucuuagc

SEQ ID NO: 310772 - RNA, 25 nt, Human
aaacaaaaggucuggagucuuagca

SEQ ID NO: 310773 - RNA, 23 nt, Human
aaagcaaaaacaaaaggucugga

SEQ ID NO: 310774 - RNA, 27 nt, Human
aacaaaaaacaaaacaaaaauacugag

SEQ ID NO: 310775 - RNA, 25 nt, Human
aacagccuagacccagccaagcucu

SEQ ID NO: 310776 - RNA, 20 nt, Human
aagcaaaaacaaaaggucug

SEQ ID NO: 310777 - RNA, 24 nt, Human
aagcaaaaacaaaaggucuggagu

SEQ ID NO: 310778 - RNA, 19 nt, Human
aagggcuuuuggacauuug

SEQ ID NO: 310779 - RNA, 19 nt, Human
aaugcaaagcaaaaacaaa

SEQ ID NO: 310780 - RNA, 20 nt, Human
acaaaacaaacaaacaaaaa

SEQ ID NO: 310781 - RNA, 24 nt, Human
acaaacaaacaaaaaacaaaacaa

SEQ ID NO: 310782 - RNA, 18 nt, Human
acagaacagccuagaccc

SEQ ID NO: 310783 - RNA, 22 nt, Human
acgcucagagccucagacagac

SEQ ID NO: 310784 - RNA, 19 nt, Human
acugggucacccaccagaa

SEQ ID NO: 310785 - RNA, 20 nt, Human
agacccagccaagcucuagg

SEQ ID NO: 310786 - RNA, 22 nt, Human
agacccgcagccgacagacuaa

SEQ ID NO: 310787 - RNA, 19 nt, Human
aggaaugguaaauccauag

SEQ ID NO: 310788 - RNA, 23 nt, Human
aggcacagaacagccuagaccca

SEQ ID NO: 310789 - RNA, 23 nt, Human
agggagguaucuucuuucagaug

SEQ ID NO: 310790 - RNA, 21 nt, Human
agggcagucagagacccgcag

SEQ ID NO: 310791 - RNA, 19 nt, Human
aguccuuggaggcacagaa

SEQ ID NO: 310792 - RNA, 19 nt, Human
augcaucuuaguccacaca

SEQ ID NO: 310793 - RNA, 19 nt, Human
caaaacaaaaauacugagc

SEQ ID NO: 310794 - RNA, 26 nt, Human
caaaacaaacaaacaaaaaacaaaac

SEQ ID NO: 310795 - RNA, 21 nt, Human
caacagcaacccccaccucca

SEQ ID NO: 310796 - RNA, 18 nt, Human
caacauaaaaagcaaaca

SEQ ID NO: 310797 - RNA, 22 nt, Human
caauacuauguacauauaugua

SEQ ID NO: 310798 - RNA, 22 nt, Human
cagaaaaugcaaagcaaaaaca

SEQ ID NO: 310799 - RNA, 21 nt, Human
caggcuccccgagauguuccc

SEQ ID NO: 310800 - RNA, 20 nt, Human
ccacagggcagucagagacc

SEQ ID NO: 310801 - RNA, 24 nt, Human
cccacagggcagucagagacccgc

SEQ ID NO: 310802 - RNA, 19 nt, Human
cgcucagagccucagacag

SEQ ID NO: 310803 - RNA, 20 nt, Human
cggccaaacagcguaacccc

SEQ ID NO: 310804 - RNA, 21 nt, Human
cugcuuucugguuucccuucc

SEQ ID NO: 310805 - RNA, 20 nt, Human
cuguuucuguuggaugcacu

SEQ ID NO: 310806 - RNA, 21 nt, Human
cuuccaagcagauuucuuugc

SEQ ID NO: 310807 - RNA, 22 nt, Human
gaagauacuccaccuguaaggg

SEQ ID NO: 310808 - RNA, 20 nt, Human
gcaaagcaaaaacaaaaggu

SEQ ID NO: 310809 - RNA, 21 nt, Human
gcaagggcuccaguuugggca

SEQ ID NO: 310810 - RNA, 20 nt, Human
gccuagacccagccaagcuc

SEQ ID NO: 310811 - RNA, 20 nt, Human
gcuagguacaaaagcaguua

SEQ ID NO: 310812 - RNA, 19 nt, Human
gcucagagccucagacaga

SEQ ID NO: 310813 - RNA, 24 nt, Human
ggcuguuucuguuggaugcacugg

SEQ ID NO: 310814 - RNA, 22 nt, Human
gguuugaguuugggauuuuggg

SEQ ID NO: 310815 - RNA, 22 nt, Human
uaaggcaagacccuccccacag

SEQ ID NO: 310816 - RNA, 23 nt, Human
uacaucuucaaucaacagcaacc

SEQ ID NO: 310817 - RNA, 25 nt, Human
uaugccaaugccacaagccguguuu

SEQ ID NO: 310818 - RNA, 23 nt, Human
ucagaaaaugcaaagcaaaaaca

SEQ ID NO: 310819 - RNA, 19 nt, Human
ucagacagaccgucugggc

SEQ ID NO: 310820 - RNA, 24 nt, Human
ucagagccucagacagaccgucug

SEQ ID NO: 310821 - RNA, 18 nt, Human
ucuacaguugguggccaa

SEQ ID NO: 310822 - RNA, 19 nt, Human
ugcaagggauguuaaggca

SEQ ID NO: 310823 - RNA, 24 nt, Human
ugccaaugccacaagccguguuuu

SEQ ID NO: 310824 - RNA, 22 nt, Human
ugccacaagccguguuuuugca

SEQ ID NO: 310825 - RNA, 21 nt, Human
ugccagacaguccuuggaggc

SEQ ID NO: 310826 - RNA, 19 nt, Human
ugcucagcggaguuucugc

SEQ ID NO: 310827 - RNA, 20 nt, Human
uggccaauacaagucauugc

SEQ ID NO: 310828 - RNA, 18 nt, Human
ugggagggagguaucuuc

SEQ ID NO: 310829 - RNA, 20 nt, Human
ugggcuagcucuuuuuucuu

SEQ ID NO: 310830 - RNA, 18 nt, Human
ugggguuucuacccacac

SEQ ID NO: 310831 - RNA, 21 nt, Human
ugggguuucuacccacacuuu

SEQ ID NO: 310832 - RNA, 21 nt, Human
uguacauauauguaaaaagug

SEQ ID NO: 310833 - RNA, 28 nt, Human
uucaaucaacagcaacccccaccuccac

SEQ ID NO: 310834 - RNA, 26 nt, Human
uucccuauguacgcucagagccucag

SEQ ID NO: 310835 - RNA, 20 nt, Human
uuuccagugaguuguuuaga

SEQ ID NO: 310836 - RNA, 21 nt, Human
uuucuuugcagccaaaugcaa

SEQ ID NO: 310837 - RNA, 22 nt, Human
uuugggguuucuacccacacuu

SEQ ID NO: 310838 - RNA, 21 nt, Human
aaauaaccaugugacacauaa

SEQ ID NO: 310839 - RNA, 23 nt, Human
gaaccaauuucaaugguaacuaa

SEQ ID NO: 310840 - RNA, 21 nt, Human
gauaauuuaaaaccagacuca

SEQ ID NO: 310841 - RNA, 21 nt, Human
uaaaaaauaaccaugugacac

SEQ ID NO: 310842 - RNA, 22 nt, Human
uaaaaacaagucagugaauccu

SEQ ID NO: 310843 - RNA, 19 nt, Human
uaacagagcagcuugcugc

SEQ ID NO: 310844 - RNA, 19 nt, Human
ugaaaaaaugggcgaccau

SEQ ID NO: 310845 - RNA, 19 nt, Human
uggaagauagguuaaauga

SEQ ID NO: 310846 - RNA, 26 nt, Human
uuaaaaaauaaccaugugacacauaa

SEQ ID NO: 310847 - RNA, 21 nt, Human
uuaaaaccagacucaugcugu

SEQ ID NO: 310848 - RNA, 22 nt, Human
uucaaugguaacuaaucuucuu

SEQ ID NO: 310849 - RNA, 18 nt, Human
aaagguuagugaagacuc

SEQ ID NO: 310850 - RNA, 19 nt, Human
ugaaaagguucucaagauc

SEQ ID NO: 310851 - RNA, 19 nt, Human
uuuuaaguagcagguuuca

SEQ ID NO: 310852 - RNA, 19 nt, Human
aggaaaccuguccaagaac

SEQ ID NO: 310853 - RNA, 21 nt, Human
auggacaacugcugcggugac

SEQ ID NO: 310854 - RNA, 18 nt, Human
cagcauggacaacugcug

SEQ ID NO: 310855 - RNA, 19 nt, Human
ccauacaggaaaguggaaa

SEQ ID NO: 310856 - RNA, 19 nt, Human
cccgcccauacaggaaagu

SEQ ID NO: 310857 - RNA, 24 nt, Human
ccgcccauacaggaaaguggaaac

SEQ ID NO: 310858 - RNA, 19 nt, Human
ccuauaaucauagguuugu

SEQ ID NO: 310859 - RNA, 28 nt, Human
ccuugaaaagaaccugucgaaaaaaaag

SEQ ID NO: 310860 - RNA, 18 nt, Human
cuggcccugggcuaagca

SEQ ID NO: 310861 - RNA, 24 nt, Human
cuggcccugggcuaagcacuuggg

SEQ ID NO: 310862 - RNA, 22 nt, Human
gaauccuaaccagcccgcccau

SEQ ID NO: 310863 - RNA, 23 nt, Human
ggugacuggagccuugaaaagaa

SEQ ID NO: 310864 - RNA, 22 nt, Human
guggaaacuacagcauggacaa

SEQ ID NO: 310865 - RNA, 24 nt, Human
uccuucaacaaguauuucuuaagc

SEQ ID NO: 310866 - RNA, 26 nt, Human
ucuggcccugggcuaagcacuugggg

SEQ ID NO: 310867 - RNA, 21 nt, Human
ucuuguuuuuccaaguuccac

SEQ ID NO: 310868 - RNA, 20 nt, Human
ugagggauggggugaacgug

SEQ ID NO: 310869 - RNA, 21 nt, Human
uggaauccuaaccagcccgcc

SEQ ID NO: 310870 - RNA, 20 nt, Human
uggacaacugcugcggugac

SEQ ID NO: 310871 - RNA, 19 nt, Human
uucaagguuaaaaaaagaa

SEQ ID NO: 310872 - RNA, 23 nt, Human
caccagcauuuggugcuuccggu

SEQ ID NO: 310873 - RNA, 19 nt, Human
uucagccugcacggcucgu

SEQ ID NO: 310874 - RNA, 23 nt, Human
uuuuuuuuuuuuuuuucuucagg

SEQ ID NO: 310875 - RNA, 23 nt, Human
uuuuuuuuuuuuuuuuuucuuca

SEQ ID NO: 310876 - RNA, 24 nt, Human
uuuuuuuuuuuuuuuuuuuuucuu

SEQ ID NO: 310877 - RNA, 26 nt, Human
aaacaagugguggugguaucccagag

SEQ ID NO: 310878 - RNA, 26 nt, Human
aaacaagugguggugguaucccagag

SEQ ID NO: 310879 - RNA, 20 nt, Human
aaacagaagaagagagaagg

SEQ ID NO: 310880 - RNA, 23 nt, Human
aaacagaagaagagagaagggac

SEQ ID NO: 310881 - RNA, 21 nt, Human
aaacuauauuccuuggccuuc

SEQ ID NO: 310882 - RNA, 18 nt, Human
aaagaaaaagaaauggaa

SEQ ID NO: 310883 - RNA, 19 nt, Human
aaagaaaaagaaauggaag

SEQ ID NO: 310884 - RNA, 19 nt, Human
aaagaaaaagaaauggaag

SEQ ID NO: 310885 - RNA, 21 nt, Human
aaagaaaaagaaauggaagau

SEQ ID NO: 310886 - RNA, 22 nt, Human
aaagagaugugggcaugccuuu

SEQ ID NO: 310887 - RNA, 22 nt, Human
aaagagaugugggcaugccuuu

SEQ ID NO: 310888 - RNA, 25 nt, Human
aaagauggagacaaugagaaaggga

SEQ ID NO: 310889 - RNA, 25 nt, Human
aaagauggagacaaugagaaaggga

SEQ ID NO: 310890 - RNA, 23 nt, Human
aaauguuggaauuuagaaaaacc

SEQ ID NO: 310891 - RNA, 23 nt, Human
aaauguuggaauuuagaaaaacc

SEQ ID NO: 310892 - RNA, 22 nt, Human
aacaaaauaaacacacacagaa

SEQ ID NO: 310893 - RNA, 22 nt, Human
aacaaaauaaacacacacagaa

SEQ ID NO: 310894 - RNA, 20 nt, Human
aacguguuccccccucucug

SEQ ID NO: 310895 - RNA, 28 nt, Human
aagaaaaacaaaauaaacacacacagaa

SEQ ID NO: 310896 - RNA, 29 nt, Human
aagaaaaacaaaauaaacacacacagaaa

SEQ ID NO: 310897 - RNA, 19 nt, Human
aagaagagagaagaagggg

SEQ ID NO: 310898 - RNA, 20 nt, Human
aagaagagagaagaagggga

SEQ ID NO: 310899 - RNA, 23 nt, Human
aagagagaagaaggggugggaga

SEQ ID NO: 310900 - RNA, 26 nt, Human
aagaggacaggguaaggcagugggca

SEQ ID NO: 310901 - RNA, 26 nt, Human
aagaggacaggguaaggcagugggca

SEQ ID NO: 310902 - RNA, 18 nt, Human
aagccuuugugcugugcc

SEQ ID NO: 310903 - RNA, 25 nt, Human
aagcggaggccagcagggcggggga

SEQ ID NO: 310904 - RNA, 22 nt, Human
aauaacaagggggagagaggaa

SEQ ID NO: 310905 - RNA, 18 nt, Human
aaucauucaaagacaaca

SEQ ID NO: 310906 - RNA, 18 nt, Human
aaucauucaaagacaaca

SEQ ID NO: 310907 - RNA, 21 nt, Human
acaaagaaaaagaaauggaag

SEQ ID NO: 310908 - RNA, 21 nt, Human
acaaagaaaaagaaauggaag

SEQ ID NO: 310909 - RNA, 23 nt, Human
acaaagaaaaagaaauggaagaa

SEQ ID NO: 310910 - RNA, 23 nt, Human
acaguagaggcaaucauucugga

SEQ ID NO: 310911 - RNA, 23 nt, Human
acaguagaggcaaucauucugga

SEQ ID NO: 310912 - RNA, 18 nt, Human
accgaucccacccacccc

SEQ ID NO: 310913 - RNA, 21 nt, Human
accgaucccacccaccccccu

SEQ ID NO: 310914 - RNA, 20 nt, Human
acgcagccaauuacauugga

SEQ ID NO: 310915 - RNA, 20 nt, Human
acgcagccaauuacauugga

SEQ ID NO: 310916 - RNA, 24 nt, Human
acuccuguggauucucaggaguug

SEQ ID NO: 310917 - RNA, 21 nt, Human
acuucaaaaggcacaaacugg

SEQ ID NO: 310918 - RNA, 20 nt, Human
acuuuuuccccccagcagau

SEQ ID NO: 310919 - RNA, 20 nt, Human
acuuuuuccccccagcagau

SEQ ID NO: 310920 - RNA, 22 nt, Human
agaacggauagaugacuaaaug

SEQ ID NO: 310921 - RNA, 22 nt, Human
agaacggauagaugacuaaaug

SEQ ID NO: 310922 - RNA, 19 nt, Human
agaagaagagagaagaagg

SEQ ID NO: 310923 - RNA, 21 nt, Human
agaagaagagagaagaagggg

SEQ ID NO: 310924 - RNA, 26 nt, Human
agaagagagaagaaggggugggagag

SEQ ID NO: 310925 - RNA, 21 nt, Human
agagagaagaaggggugggag

SEQ ID NO: 310926 - RNA, 23 nt, Human
agagagaagaaggggugggagag

SEQ ID NO: 310927 - RNA, 21 nt, Human
agagaggaaagcggaggccag

SEQ ID NO: 310928 - RNA, 24 nt, Human
agagagggaggaagagggagggaa

SEQ ID NO: 310929 - RNA, 21 nt, Human
agaggcugauggaaaaaccuu

SEQ ID NO: 310930 - RNA, 21 nt, Human
agaggcugauggaaaaaccuu

SEQ ID NO: 310931 - RNA, 18 nt, Human
agagggagggaaggagag

SEQ ID NO: 310932 - RNA, 19 nt, Human
agccauggcgcuuuucagu

SEQ ID NO: 310933 - RNA, 20 nt, Human
agcuucuauaaagagaacug

SEQ ID NO: 310934 - RNA, 20 nt, Human
agcuucuauaaagagaacug

SEQ ID NO: 310935 - RNA, 22 nt, Human
aggaaggccaaaaaaaaaaaau

SEQ ID NO: 310936 - RNA, 22 nt, Human
aggcaagaguucaagcaccaac

SEQ ID NO: 310937 - RNA, 18 nt, Human
aggcacgaaagagaugug

SEQ ID NO: 310938 - RNA, 19 nt, Human
aggcacgaaagagaugugg

SEQ ID NO: 310939 - RNA, 24 nt, Human
agggaggaagagggagggaaggag

SEQ ID NO: 310940 - RNA, 18 nt, Human
agggagggaaggagagga

SEQ ID NO: 310941 - RNA, 22 nt, Human
agggggagagaggaaagcggag

SEQ ID NO: 310942 - RNA, 25 nt, Human
agggggagagaggaaagcggaggcc

SEQ ID NO: 310943 - RNA, 19 nt, Human
auauauauauauauauaua

SEQ ID NO: 310944 - RNA, 19 nt, Human
auauauauauauauauaua

SEQ ID NO: 310945 - RNA, 19 nt, Human
auauauauauauauauaua

SEQ ID NO: 310946 - RNA, 19 nt, Human
auauauauauauauauaua

SEQ ID NO: 310947 - RNA, 19 nt, Human
auauauauauauauauaua

SEQ ID NO: 310948 - RNA, 19 nt, Human
auauauauauauauauaua

SEQ ID NO: 310949 - RNA, 19 nt, Human
auauauauauauauauaua

SEQ ID NO: 310950 - RNA, 19 nt, Human
auauauauauauauauaua

SEQ ID NO: 310951 - RNA, 19 nt, Human
auauauauauauauauaua

SEQ ID NO: 310952 - RNA, 19 nt, Human
auauauauauauauauaua

SEQ ID NO: 310953 - RNA, 19 nt, Human
aucccacccaccccccucu

SEQ ID NO: 310954 - RNA, 20 nt, Human
aucccacccaccccccucuu

SEQ ID NO: 310955 - RNA, 23 nt, Human
aucccacccaccccccucuuccc

SEQ ID NO: 310956 - RNA, 18 nt, Human
aucccuuccaacucucca

SEQ ID NO: 310957 - RNA, 18 nt, Human
aucuguagcuucaagcuu

SEQ ID NO: 310958 - RNA, 21 nt, Human
augaaugaaagaaaaacaaaa

SEQ ID NO: 310959 - RNA, 21 nt, Human
augaaugaaagaaaaacaaaa

SEQ ID NO: 310960 - RNA, 19 nt, Human
auugcaaacuuaagcuugc

SEQ ID NO: 310961 - RNA, 18 nt, Human
auuuacuuuuucccccca

SEQ ID NO: 310962 - RNA, 22 nt, Human
caaaaaaaaaaaauuggaaaag

SEQ ID NO: 310963 - RNA, 22 nt, Human
caaaauaaacacacacagaaac

SEQ ID NO: 310964 - RNA, 22 nt, Human
caaaauaaacacacacagaaac

SEQ ID NO: 310965 - RNA, 23 nt, Human
caacagaagaaggcuuguuccag

SEQ ID NO: 310966 - RNA, 21 nt, Human
caagaaaacguguuccccccu

SEQ ID NO: 310967 - RNA, 24 nt, Human
caagaaaacguguuccccccucuc

SEQ ID NO: 310968 - RNA, 18 nt, Human
caauauuaaaaagucacc

SEQ ID NO: 310969 - RNA, 21 nt, Human
caauauuaaaaagucacccua

SEQ ID NO: 310970 - RNA, 22 nt, Human
caauucccaugauagaucagau

SEQ ID NO: 310971 - RNA, 22 nt, Human
caauucccaugauagaucagau

SEQ ID NO: 310972 - RNA, 19 nt, Human
cacaaucuccuucuuccuc

SEQ ID NO: 310973 - RNA, 22 nt, Human
cacccuauguucaagucaggag

SEQ ID NO: 310974 - RNA, 19 nt, Human
caccgaucccacccacccc

SEQ ID NO: 310975 - RNA, 21 nt, Human
caccgaucccacccacccccc

SEQ ID NO: 310976 - RNA, 23 nt, Human
caccgaucccacccaccccccuc

SEQ ID NO: 310977 - RNA, 24 nt, Human
cagcauugguugauuuccugaggc

SEQ ID NO: 310978 - RNA, 22 nt, Human
caggcuccaaacucaaggacau

SEQ ID NO: 310979 - RNA, 22 nt, Human
caggcuccaaacucaaggacau

SEQ ID NO: 310980 - RNA, 20 nt, Human
caucacaaucuccuucuucc

SEQ ID NO: 310981 - RNA, 24 nt, Human
ccaacaaagauggagacaaugaga

SEQ ID NO: 310982 - RNA, 24 nt, Human
ccaacaaagauggagacaaugaga

SEQ ID NO: 310983 - RNA, 20 nt, Human
ccacacgcacagacuaaaaa

SEQ ID NO: 310984 - RNA, 18 nt, Human
ccaccccccucuucccgc

SEQ ID NO: 310985 - RNA, 18 nt, Human
ccaggcaagaguucaagc

SEQ ID NO: 310986 - RNA, 18 nt, Human
cccacaauugccuuuuaa

SEQ ID NO: 310987 - RNA, 18 nt, Human
cccacaauugccuuuuaa

SEQ ID NO: 310988 - RNA, 20 nt, Human
cccaccgaucccacccaccc

SEQ ID NO: 310989 - RNA, 24 nt, Human
cccaccgaucccacccaccccccu

SEQ ID NO: 310990 - RNA, 23 nt, Human
cccagcagaugaagaaauaacag

SEQ ID NO: 310991 - RNA, 24 nt, Human
ccccaccgaucccacccacccccc

SEQ ID NO: 310992 - RNA, 25 nt, Human
ccccaccgaucccacccaccccccu

SEQ ID NO: 310993 - RNA, 21 nt, Human
cccccaccgaucccacccacc

SEQ ID NO: 310994 - RNA, 18 nt, Human
ccccccagcagaugaaga

SEQ ID NO: 310995 - RNA, 18 nt, Human
ccccccagcagaugaaga

SEQ ID NO: 310996 - RNA, 18 nt, Human
ccccccuuuccccuucuc

SEQ ID NO: 310997 - RNA, 18 nt, Human
cccccuuuccccuucucu

SEQ ID NO: 310998 - RNA, 19 nt, Human
cccccuuuccccuucucuc

SEQ ID NO: 310999 - RNA, 25 nt, Human
ccccugggagggcagaucucgacuu

SEQ ID NO: 311000 - RNA, 19 nt, Human
ccccuucucucucuccccc

SEQ ID NO: 311001 - RNA, 20 nt, Human
cccuaaugugaaaaugggac

SEQ ID NO: 311002 - RNA, 20 nt, Human
cccuaaugugaaaaugggac

SEQ ID NO: 311003 - RNA, 26 nt, Human
ccgccuuccgcagcauugguugauuu

SEQ ID NO: 311004 - RNA, 18 nt, Human
ccuggcucccagcccuag

SEQ ID NO: 311005 - RNA, 18 nt, Human
ccuggcucccagcccuag

SEQ ID NO: 311006 - RNA, 22 nt, Human
cgaggggggagaggagccgagu

SEQ ID NO: 311007 - RNA, 19 nt, Human
cuaauucauuuaaagcccu

SEQ ID NO: 311008 - RNA, 19 nt, Human
cuaauucauuuaaagcccu

SEQ ID NO: 311009 - RNA, 23 nt, Human
cucagguuggcaaugcuguuggc

SEQ ID NO: 311010 - RNA, 19 nt, Human
cucucccccucuucuugcu

SEQ ID NO: 311011 - RNA, 21 nt, Human
cuggcucccagcccuagacac

SEQ ID NO: 311012 - RNA, 19 nt, Human
cuuccaacucuccaaaagu

SEQ ID NO: 311013 - RNA, 18 nt, Human
cuuugugcugugccugac

SEQ ID NO: 311014 - RNA, 23 nt, Human
cuuugugcugugccugacguuuc

SEQ ID NO: 311015 - RNA, 22 nt, Human
cuuuuuguaaagaguaaaaaaa

SEQ ID NO: 311016 - RNA, 21 nt, Human
gaaaaaccuuaccaugaccaa

SEQ ID NO: 311017 - RNA, 21 nt, Human
gaaaaaccuuaccaugaccaa

SEQ ID NO: 311018 - RNA, 21 nt, Human
gaaaacguguuccccccucuc

SEQ ID NO: 311019 - RNA, 19 nt, Human
gaaucaacaccaaacgcug

SEQ ID NO: 311020 - RNA, 22 nt, Human
gacacuaaacuuuauuucaaaa

SEQ ID NO: 311021 - RNA, 23 nt, Human
gagagggaggaagagggagggaa

SEQ ID NO: 311022 - RNA, 21 nt, Human
gaggaagagggagggaaggag

SEQ ID NO: 311023 - RNA, 19 nt, Human
gagggaaggagaggaaggc

SEQ ID NO: 311024 - RNA, 22 nt, Human
gauaggugucuuaugguuuuug

SEQ ID NO: 311025 - RNA, 22 nt, Human
gauaggugucuuaugguuuuug

SEQ ID NO: 311026 - RNA, 19 nt, Human
gauucuucagaaagacuuu

SEQ ID NO: 311027 - RNA, 19 nt, Human
gauucuucagaaagacuuu

SEQ ID NO: 311028 - RNA, 20 nt, Human
gcaaacagaagaagagagaa

SEQ ID NO: 311029 - RNA, 19 nt, Human
gcagaugaagaaauaacag

SEQ ID NO: 311030 - RNA, 20 nt, Human
gcggaggccagcagggcggg

SEQ ID NO: 311031 - RNA, 26 nt, Human
gcggaggccagcagggcgggggaguu

SEQ ID NO: 311032 - RNA, 19 nt, Human
gcuccaaacucaaggacau

SEQ ID NO: 311033 - RNA, 24 nt, Human
gcugauggaaaaaccuuaccauga

SEQ ID NO: 311034 - RNA, 24 nt, Human
gcugauggaaaaaccuuaccauga

SEQ ID NO: 311035 - RNA, 24 nt, Human
ggaccuguucucaaacagcugccc

SEQ ID NO: 311036 - RNA, 27 nt, Human
gggaauacaagaaaauuggagaccggu

SEQ ID NO: 311037 - RNA, 19 nt, Human
gggagggaaggagaggaag

SEQ ID NO: 311038 - RNA, 24 nt, Human
gggggugggugggcugaaccuauc

SEQ ID NO: 311039 - RNA, 24 nt, Human
gggggugggugggcugaaccuauc

SEQ ID NO: 311040 - RNA, 21 nt, Human
ggugggagagaagaaucaaag

SEQ ID NO: 311041 - RNA, 18 nt, Human
ggugguggugauagugau

SEQ ID NO: 311042 - RNA, 18 nt, Human
ggugguggugauagugau

SEQ ID NO: 311043 - RNA, 30 nt, Human
guaaaaaaaaaaauuaagaauuaaaaaaag

SEQ ID NO: 311044 - RNA, 20 nt, Human
guguuacuagagaaauuucu

SEQ ID NO: 311045 - RNA, 18 nt, Human
guucucaaacagcugccc

SEQ ID NO: 311046 - RNA, 20 nt, Human
uaaaacaucuucaagaaaac

SEQ ID NO: 311047 - RNA, 18 nt, Human
uaaacacacacagaaaca

SEQ ID NO: 311048 - RNA, 20 nt, Human
uaaacacacacagaaacaaa

SEQ ID NO: 311049 - RNA, 21 nt, Human
uaaacacacacagaaacaagu

SEQ ID NO: 311050 - RNA, 21 nt, Human
uaaaucuauagcuuagaugua

SEQ ID NO: 311051 - RNA, 21 nt, Human
uaaaucuauagcuuagaugua

SEQ ID NO: 311052 - RNA, 22 nt, Human
uaagaacaguggugagggugug

SEQ ID NO: 311053 - RNA, 22 nt, Human
uaagaacaguggugagggugug

SEQ ID NO: 311054 - RNA, 20 nt, Human
uaagaugauugauugauuga

SEQ ID NO: 311055 - RNA, 20 nt, Human
uaagaugauugauugauuga

SEQ ID NO: 311056 - RNA, 22 nt, Human
uaaggcacuaagguucaaacaa

SEQ ID NO: 311057 - RNA, 22 nt, Human
uaaggcacuaagguucaaacaa

SEQ ID NO: 311058 - RNA, 20 nt, Human
uacaauauuaaaaagucacc

SEQ ID NO: 311059 - RNA, 18 nt, Human
uaccaaauagucugugac

SEQ ID NO: 311060 - RNA, 18 nt, Human
uagagagcaggauucuca

SEQ ID NO: 311061 - RNA, 18 nt, Human
uagggugagggguggugg

SEQ ID NO: 311062 - RNA, 18 nt, Human
uagggugagggguggugg

SEQ ID NO: 311063 - RNA, 21 nt, Human
uauaaagagaacugggaagag

SEQ ID NO: 311064 - RNA, 21 nt, Human
uauaaagagaacugggaagag

SEQ ID NO: 311065 - RNA, 18 nt, Human
uauaguuucuuuggcugc

SEQ ID NO: 311066 - RNA, 18 nt, Human
uauaguuucuuuggcugc

SEQ ID NO: 311067 - RNA, 25 nt, Human
uauauaaauauauacaguauauaua

SEQ ID NO: 311068 - RNA, 25 nt, Human
uauauaaauauauacaguauauaua

SEQ ID NO: 311069 - RNA, 24 nt, Human
uauauacaguauauauauaagugu

SEQ ID NO: 311070 - RNA, 24 nt, Human
uauauacaguauauauauaagugu

SEQ ID NO: 311071 - RNA, 19 nt, Human
uauauauauauauauauau

SEQ ID NO: 311072 - RNA, 19 nt, Human
uauauauauauauauauau

SEQ ID NO: 311073 - RNA, 19 nt, Human
uauauauauauauauauau

SEQ ID NO: 311074 - RNA, 19 nt, Human
uauauauauauauauauau

SEQ ID NO: 311075 - RNA, 19 nt, Human
uauauauauauauauauau

SEQ ID NO: 311076 - RNA, 19 nt, Human
uauauauauauauauauau

SEQ ID NO: 311077 - RNA, 21 nt, Human
uauauaugaaauauauauaua

SEQ ID NO: 311078 - RNA, 21 nt, Human
uauauaugaaauauauauaua

SEQ ID NO: 311079 - RNA, 20 nt, Human
ucaaaaggcacaaacuggca

SEQ ID NO: 311080 - RNA, 24 nt, Human
ucaaagacaacaaauaucuuuaac

SEQ ID NO: 311081 - RNA, 24 nt, Human
ucaaagacaacaaauaucuuuaac

SEQ ID NO: 311082 - RNA, 24 nt, Human
ucaacaccaaacgcugugggcgcg

SEQ ID NO: 311083 - RNA, 23 nt, Human
ucaagcaccaacagaagaaggcu

SEQ ID NO: 311084 - RNA, 23 nt, Human
ucacaacaccccugugagguagg

SEQ ID NO: 311085 - RNA, 23 nt, Human
ucacaacaccccugugagguagg

SEQ ID NO: 311086 - RNA, 20 nt, Human
ucacagacccccuuucucca

SEQ ID NO: 311087 - RNA, 23 nt, Human
ucauauuccugcuaagugaagaa

SEQ ID NO: 311088 - RNA, 23 nt, Human
ucauauuccugcuaagugaagaa

SEQ ID NO: 311089 - RNA, 18 nt, Human
ucaugggggugggugggc

SEQ ID NO: 311090 - RNA, 18 nt, Human
ucaugggggugggugggc

SEQ ID NO: 311091 - RNA, 25 nt, Human
ucauucuggauauauauauauauau

SEQ ID NO: 311092 - RNA, 25 nt, Human
ucauucuggauauauauauauauau

SEQ ID NO: 311093 - RNA, 28 nt, Human
uccaaagagauaauccacaguaaaauac

SEQ ID NO: 311094 - RNA, 22 nt, Human
uccacacgcacagacuaaaaau

SEQ ID NO: 311095 - RNA, 18 nt, Human
uccacaguaaaauacaau

SEQ ID NO: 311096 - RNA, 23 nt, Human
uccaucacaaucuccuucuuccu

SEQ ID NO: 311097 - RNA, 21 nt, Human
ucccagagggaggaggaacau

SEQ ID NO: 311098 - RNA, 21 nt, Human
ucccagagggaggaggaacau

SEQ ID NO: 311099 - RNA, 22 nt, Human
ucccagcccuagacacuaaacu

SEQ ID NO: 311100 - RNA, 22 nt, Human
ucccagcccuagacacuaaacu

SEQ ID NO: 311101 - RNA, 20 nt, Human
uccccccuuuccccuucucc

SEQ ID NO: 311102 - RNA, 21 nt, Human
ucccgcucgaaucaacaccaa

SEQ ID NO: 311103 - RNA, 23 nt, Human
ucucaaacagcugcccuaucaau

SEQ ID NO: 311104 - RNA, 23 nt, Human
ucucaaacagcugcccuaucaau

SEQ ID NO: 311105 - RNA, 25 nt, Human
ucucaaacagcugcccuaucaauua

SEQ ID NO: 311106 - RNA, 25 nt, Human
ucucaaacagcugcccuaucaauua

SEQ ID NO: 311107 - RNA, 18 nt, Human
ucucaggagugacuaaag

SEQ ID NO: 311108 - RNA, 18 nt, Human
ucucagguuggcaaugcu

SEQ ID NO: 311109 - RNA, 18 nt, Human
ucucccccucuucuugcu

SEQ ID NO: 311110 - RNA, 22 nt, Human
ucuccugcuuuucucugccaug

SEQ ID NO: 311111 - RNA, 22 nt, Human
ucuccugcuuuucucugccaug

SEQ ID NO: 311112 - RNA, 22 nt, Human
ucuucaagaaaacguguucccc

SEQ ID NO: 311113 - RNA, 21 nt, Human
ugaaaaugggaccuguucuca

SEQ ID NO: 311114 - RNA, 22 nt, Human
ugaaaaugggaccuguucucaa

SEQ ID NO: 311115 - RNA, 23 nt, Human
ugaaagaaaaacaaaauaaacac

SEQ ID NO: 311116 - RNA, 23 nt, Human
ugaaagaaaaacaaaauaaacac

SEQ ID NO: 311117 - RNA, 19 nt, Human
ugacagcaaaucauucaaa

SEQ ID NO: 311118 - RNA, 19 nt, Human
ugacagcaaaucauucaaa

SEQ ID NO: 311119 - RNA, 21 nt, Human
ugcaauauuauauauauauau

SEQ ID NO: 311120 - RNA, 19 nt, Human
ugcagaggaggcuuuguag

SEQ ID NO: 311121 - RNA, 21 nt, Human
ugcagggcuauuguuggcaca

SEQ ID NO: 311122 - RNA, 20 nt, Human
ugcccugugcagggcuauug

SEQ ID NO: 311123 - RNA, 22 nt, Human
uggaaaaaccuuaccaugacca

SEQ ID NO: 311124 - RNA, 22 nt, Human
uggaaaaaccuuaccaugacca

SEQ ID NO: 311125 - RNA, 19 nt, Human
uggagaccccugggagggc

SEQ ID NO: 311126 - RNA, 19 nt, Human
uggauauauauauauauau

SEQ ID NO: 311127 - RNA, 19 nt, Human
uggauauauauauauauau

SEQ ID NO: 311128 - RNA, 20 nt, Human
uggauauauauauauauaua

SEQ ID NO: 311129 - RNA, 20 nt, Human
uggauauauauauauauaua

SEQ ID NO: 311130 - RNA, 20 nt, Human
uggcaaagccuuugugcugu

SEQ ID NO: 311131 - RNA, 24 nt, Human
uggcaaguuacaaaagcauggcug

SEQ ID NO: 311132 - RNA, 24 nt, Human
uggcaaguuacaaaagcauggcug

SEQ ID NO: 311133 - RNA, 22 nt, Human
uggccauguugaugcccugugc

SEQ ID NO: 311134 - RNA, 20 nt, Human
uggcucccagcccuagacac

SEQ ID NO: 311135 - RNA, 22 nt, Human
uggcugggaacaaagaaaaaga

SEQ ID NO: 311136 - RNA, 22 nt, Human
uggcugggaacaaagaaaaaga

SEQ ID NO: 311137 - RNA, 20 nt, Human
ugggaagaggacaggguaag

SEQ ID NO: 311138 - RNA, 20 nt, Human
ugggaagaggacaggguaag

SEQ ID NO: 311139 - RNA, 22 nt, Human
ugggaagaggacaggguaaggc

SEQ ID NO: 311140 - RNA, 22 nt, Human
ugggaagaggacaggguaaggc

SEQ ID NO: 311141 - RNA, 19 nt, Human
ugggagagaagaaucaaag

SEQ ID NO: 311142 - RNA, 24 nt, Human
ugguggugguaucccagagggagg

SEQ ID NO: 311143 - RNA, 24 nt, Human
ugguggugguaucccagagggagg

SEQ ID NO: 311144 - RNA, 26 nt, Human
uguagaaaaagaaaagcagcaagauc

SEQ ID NO: 311145 - RNA, 26 nt, Human
uguagaaaaagaaaagcagcaagauc

SEQ ID NO: 311146 - RNA, 22 nt, Human
uguuccccccucucugcacucc

SEQ ID NO: 311147 - RNA, 21 nt, Human
uguuggcacauguggcagaau

SEQ ID NO: 311148 - RNA, 20 nt, Human
uguuugggaaauugcaaacu

SEQ ID NO: 311149 - RNA, 20 nt, Human
uguuugggaaauugcaaacu

SEQ ID NO: 311150 - RNA, 24 nt, Human
uuaaaaaauaaaaauagcccacaa

SEQ ID NO: 311151 - RNA, 24 nt, Human
uuaaaaaauaaaaauagcccacaa

SEQ ID NO: 311152 - RNA, 18 nt, Human
uuaaacaugugccuuucu

SEQ ID NO: 311153 - RNA, 18 nt, Human
uuaaacaugugccuuucu

SEQ ID NO: 311154 - RNA, 19 nt, Human
uuagagagcaggauucuca

SEQ ID NO: 311155 - RNA, 25 nt, Human
uucaaagacaacaaauaucuuuaac

SEQ ID NO: 311156 - RNA, 25 nt, Human
uucaaagacaacaaauaucuuuaac

SEQ ID NO: 311157 - RNA, 22 nt, Human
uucaagucaggagaaaaaaauc

SEQ ID NO: 311158 - RNA, 27 nt, Human
uucacagacccccuuucuccaucacaa

SEQ ID NO: 311159 - RNA, 20 nt, Human
uuccucaguugacuguuggc

SEQ ID NO: 311160 - RNA, 18 nt, Human
uucgaaagcuccuagagc

SEQ ID NO: 311161 - RNA, 18 nt, Human
uucgaaagcuccuagagc

SEQ ID NO: 311162 - RNA, 24 nt, Human
uucuggauauauauauauauauau

SEQ ID NO: 311163 - RNA, 24 nt, Human
uucuggauauauauauauauauau

SEQ ID NO: 311164 - RNA, 18 nt, Human
uugcaaacuuaagcuugc

SEQ ID NO: 311165 - RNA, 22 nt, Human
uugcaauauuauauauauauau

SEQ ID NO: 311166 - RNA, 19 nt, Human
uuggccauguugaugcccu

SEQ ID NO: 311167 - RNA, 22 nt, Human
uuuacuuuuuguaaagaguaaa

SEQ ID NO: 311168 - RNA, 19 nt, Human
uuuccccuucucucucucc

SEQ ID NO: 311169 - RNA, 18 nt, Human
uuugauuucuucuuaggc

SEQ ID NO: 311170 - RNA, 18 nt, Human
uuugauuucuucuuaggc

SEQ ID NO: 311171 - RNA, 19 nt, Human
uuugcuuuuuguauuguuu

SEQ ID NO: 311172 - RNA, 19 nt, Human
uuugcuuuuuguauuguuu

SEQ ID NO: 311173 - RNA, 23 nt, Human
uuuguguuacuagagaaauuucu

SEQ ID NO: 311174 - RNA, 24 nt, Human
uuuguuuguuuguaauuuacuuuu

SEQ ID NO: 311175 - RNA, 24 nt, Human
uuuguuuguuuguaauuuacuuuu

SEQ ID NO: 311176 - RNA, 21 nt, Human
uuuuuuuaaaacuucauacaa

SEQ ID NO: 311177 - RNA, 21 nt, Human
uuuuuuuaaaacuucauacaa

SEQ ID NO: 311178 - RNA, 22 nt, Human
agggaauccagguggguggggg

SEQ ID NO: 311179 - RNA, 19 nt, Human
aggugggugggggccacag

SEQ ID NO: 311180 - RNA, 20 nt, Human
aggugggugggggccacagg

SEQ ID NO: 311181 - RNA, 22 nt, Human
ccacagggcaccagguacagcc

SEQ ID NO: 311182 - RNA, 24 nt, Human
ggccacagggcaccagguacagcc

SEQ ID NO: 311183 - RNA, 22 nt, Human
uccaggugggugggggccacag

SEQ ID NO: 311184 - RNA, 19 nt, Human
aacgaggacaucccaaaaa

SEQ ID NO: 311185 - RNA, 19 nt, Human
aagugucaacgaggacauc

SEQ ID NO: 311186 - RNA, 21 nt, Human
aauaacaagggagaauagaaa

SEQ ID NO: 311187 - RNA, 22 nt, Human
acaaauuuguaaaacaacaaag

SEQ ID NO: 311188 - RNA, 27 nt, Human
acacaaacucaaaaaccaaguuugaaa

SEQ ID NO: 311189 - RNA, 19 nt, Human
acuguccaaggcaaauaaa

SEQ ID NO: 311190 - RNA, 18 nt, Human
agaaaauagcaaaugauu

SEQ ID NO: 311191 - RNA, 18 nt, Human
agaaaucuucugcugcaa

SEQ ID NO: 311192 - RNA, 21 nt, Human
agaagggaacagacuuaaaga

SEQ ID NO: 311193 - RNA, 21 nt, Human
agaagggaacagacuuaaaga

SEQ ID NO: 311194 - RNA, 19 nt, Human
agacaagacacaaacucaa

SEQ ID NO: 311195 - RNA, 29 nt, Human
agacaagacacaaacucaaaagggacccc

SEQ ID NO: 311196 - RNA, 21 nt, Human
agacacaaacucaaaaaccaa

SEQ ID NO: 311197 - RNA, 18 nt, Human
aggaaaccuucaaaaaca

SEQ ID NO: 311198 - RNA, 22 nt, Human
aucuaguguuaaaagcugaaaa

SEQ ID NO: 311199 - RNA, 25 nt, Human
caaaaaguacaagaaugucugguaa

SEQ ID NO: 311200 - RNA, 24 nt, Human
caacacaaaguuaagacaagacac

SEQ ID NO: 311201 - RNA, 21 nt, Human
caacuaaaaacuguccaaggc

SEQ ID NO: 311202 - RNA, 21 nt, Human
caagaaugucugguaaacaaa

SEQ ID NO: 311203 - RNA, 20 nt, Human
cacaaaguuaagacaagaca

SEQ ID NO: 311204 - RNA, 22 nt, Human
cagucacacaagucuaagccac

SEQ ID NO: 311205 - RNA, 22 nt, Human
caucaggaagaaaaugccaacc

SEQ ID NO: 311206 - RNA, 22 nt, Human
ccaacacaaaguuaagacaaga

SEQ ID NO: 311207 - RNA, 21 nt, Human
ccaaggcaaauaaaaacgagg

SEQ ID NO: 311208 - RNA, 18 nt, Human
ccugcggcaggcuugaga

SEQ ID NO: 311209 - RNA, 18 nt, Human
cggcaggcuugagacugc

SEQ ID NO: 311210 - RNA, 20 nt, Human
cucccugcggcaggcuugag

SEQ ID NO: 311211 - RNA, 19 nt, Human
cuuagauuaaaauaacaag

SEQ ID NO: 311212 - RNA, 22 nt, Human
ggggaaaaugcuuagauuaaaa

SEQ ID NO: 311213 - RNA, 23 nt, Human
gggggaaaaugcuuagauuaaaa

SEQ ID NO: 311214 - RNA, 20 nt, Human
guauaguaauggccaacaga

SEQ ID NO: 311215 - RNA, 20 nt, Human
uaaaaacgaggaaaccuuca

SEQ ID NO: 311216 - RNA, 21 nt, Human
uaaaaacgaggaaaccuucaa

SEQ ID NO: 311217 - RNA, 26 nt, Human
uaaaaacgaggaaaccuucaaaaaca

SEQ ID NO: 311218 - RNA, 20 nt, Human
uaaaaacuguccaaggcaaa

SEQ ID NO: 311219 - RNA, 25 nt, Human
uaaagagaacuguucccccucaauu

SEQ ID NO: 311220 - RNA, 19 nt, Human
uaaauaacucuuacaaaau

SEQ ID NO: 311221 - RNA, 20 nt, Human
uaagacaagacacaaacuca

SEQ ID NO: 311222 - RNA, 25 nt, Human
uaagacaagacacaaacucaaaaac

SEQ ID NO: 311223 - RNA, 22 nt, Human
uacagaauuagaagggaacaga

SEQ ID NO: 311224 - RNA, 22 nt, Human
uauaguaauggccaacagauac

SEQ ID NO: 311225 - RNA, 26 nt, Human
uauaguaauggccaacagauacucca

SEQ ID NO: 311226 - RNA, 27 nt, Human
uaucagcauguuuaaguuagagccaac

SEQ ID NO: 311227 - RNA, 23 nt, Human
uccaaggcaaauaaaaacgagga

SEQ ID NO: 311228 - RNA, 24 nt, Human
ucccugcggcaggcuugagacugc

SEQ ID NO: 311229 - RNA, 26 nt, Human
ucccugcggcaggcuugagacugcuu

SEQ ID NO: 311230 - RNA, 22 nt, Human
ucuuaaggcagcauccucuuua

SEQ ID NO: 311231 - RNA, 23 nt, Human
ugguaaacaaacagucuguauuu

SEQ ID NO: 311232 - RNA, 21 nt, Human
uuaaacaaaauucuugaaaac

SEQ ID NO: 311233 - RNA, 23 nt, Human
uuaaagauuugccuauuaaaaua

SEQ ID NO: 311234 - RNA, 20 nt, Human
uuagagccaacacaaaguua

SEQ ID NO: 311235 - RNA, 20 nt, Human
aaacaaguuauggcaguggc

SEQ ID NO: 311236 - RNA, 21 nt, Human
aaacaaucagucaaaaagaac

SEQ ID NO: 311237 - RNA, 22 nt, Human
aaacaaucagucaaaaagaaca

SEQ ID NO: 311238 - RNA, 20 nt, Human
aaaccccagguucaauuucc

SEQ ID NO: 311239 - RNA, 19 nt, Human
aaagaacagcucuuuuaca

SEQ ID NO: 311240 - RNA, 24 nt, Human
aacagcucuuuuacaaacaaguua

SEQ ID NO: 311241 - RNA, 23 nt, Human
aaccaaacagcagaaccugcaag

SEQ ID NO: 311242 - RNA, 22 nt, Human
acagcccuccccuucccugccc

SEQ ID NO: 311243 - RNA, 23 nt, Human
accaaacagcagaaccugcaagc

SEQ ID NO: 311244 - RNA, 24 nt, Human
agcccuccccuucccugcccaccu

SEQ ID NO: 311245 - RNA, 26 nt, Human
aggaacaaucagacgggaagguucug

SEQ ID NO: 311246 - RNA, 19 nt, Human
augacacauacacacacug

SEQ ID NO: 311247 - RNA, 25 nt, Human
caaaaauacacucugauguagcaac

SEQ ID NO: 311248 - RNA, 22 nt, Human
cacacugacccccuucagcaac

SEQ ID NO: 311249 - RNA, 28 nt, Human
caccuccaugacacauacacacagugug

SEQ ID NO: 311250 - RNA, 23 nt, Human
cagcauauauauccucaucuccc

SEQ ID NO: 311251 - RNA, 21 nt, Human
cagcugggaggagcgccccuu

SEQ ID NO: 311252 - RNA, 25 nt, Human
caggagagauggggcuauugaaaug

SEQ ID NO: 311253 - RNA, 19 nt, Human
cauacacacacugaccccc

SEQ ID NO: 311254 - RNA, 18 nt, Human
cccuucagcaaccaaaca

SEQ ID NO: 311255 - RNA, 18 nt, Human
ccuccgauggaugcgagg

SEQ ID NO: 311256 - RNA, 20 nt, Human
gacccccuucagcaaccaaa

SEQ ID NO: 311257 - RNA, 22 nt, Human
gcccaccuccaugacacauaca

SEQ ID NO: 311258 - RNA, 24 nt, Human
gcgcucagugccuuggggaagaag

SEQ ID NO: 311259 - RNA, 19 nt, Human
ggagcaggaagcaggugcu

SEQ ID NO: 311260 - RNA, 22 nt, Human
ggcaagaggcgggugagcagga

SEQ ID NO: 311261 - RNA, 23 nt, Human
ggggaucaccuggacgcucaugg

SEQ ID NO: 311262 - RNA, 21 nt, Human
gggugagcaggagagaugggg

SEQ ID NO: 311263 - RNA, 23 nt, Human
gggugagcaggagagauggggcu

SEQ ID NO: 311264 - RNA, 21 nt, Human
guugcaguggccgguacagcu

SEQ ID NO: 311265 - RNA, 23 nt, Human
guuguggugaaacaugccagggg

SEQ ID NO: 311266 - RNA, 23 nt, Human
ucaaaaagaacagcucuuuuaca

SEQ ID NO: 311267 - RNA, 18 nt, Human
ucagcaaccaaacagcag

SEQ ID NO: 311268 - RNA, 19 nt, Human
ucagcaaccaaacagcaga

SEQ ID NO: 311269 - RNA, 22 nt, Human
ucuuuuacaaacaaguuauggc

SEQ ID NO: 311270 - RNA, 18 nt, Human
ugcccaccuccaugacac

SEQ ID NO: 311271 - RNA, 19 nt, Human
ugccuuggggaagaaggaa

SEQ ID NO: 311272 - RNA, 19 nt, Human
aaacagacacaaugaccug

SEQ ID NO: 311273 - RNA, 20 nt, Human
aaacagacacaaugaccugg

SEQ ID NO: 311274 - RNA, 19 nt, Human
aagcggcggaggccgaggc

SEQ ID NO: 311275 - RNA, 20 nt, Human
aagggaggcggaucucugaa

SEQ ID NO: 311276 - RNA, 22 nt, Human
accaacauuguucuccugucac

SEQ ID NO: 311277 - RNA, 22 nt, Human
accccgcuccuugcagccucug

SEQ ID NO: 311278 - RNA, 23 nt, Human
acgugcggggcgggcucgcgggc

SEQ ID NO: 311279 - RNA, 20 nt, Human
acguucaccaacauuguucu

SEQ ID NO: 311280 - RNA, 23 nt, Human
aggccgaggccgggcugcggggu

SEQ ID NO: 311281 - RNA, 19 nt, Human
agugccccgggggcccucc

SEQ ID NO: 311282 - RNA, 23 nt, Human
ccaggagguggcucaccgcccag

SEQ ID NO: 311283 - RNA, 22 nt, Human
cccccaaggucagagagggcca

SEQ ID NO: 311284 - RNA, 18 nt, Human
ccccgggggcccuccagg

SEQ ID NO: 311285 - RNA, 21 nt, Human
ccccucggaaacagacacaau

SEQ ID NO: 311286 - RNA, 21 nt, Human
cccucggaaacagacacaaug

SEQ ID NO: 311287 - RNA, 19 nt, Human
ccgcccagugccccggggg

SEQ ID NO: 311288 - RNA, 22 nt, Human
ccgcuaggcgucuggggauaag

SEQ ID NO: 311289 - RNA, 18 nt, Human
ccgggggcgggggaaggg

SEQ ID NO: 311290 - RNA, 21 nt, Human
ccuccaggucgggccgggcug

SEQ ID NO: 311291 - RNA, 18 nt, Human
ccugggaggggguggugc

SEQ ID NO: 311292 - RNA, 27 nt, Human
ccugucaccaggacaggaccggggucc

SEQ ID NO: 311293 - RNA, 19 nt, Human
cgcgacaacaagcggcgga

SEQ ID NO: 311294 - RNA, 19 nt, Human
cgggagcaggcaaaggagg

SEQ ID NO: 311295 - RNA, 23 nt, Human
cggggcgggcucgcgggcggggc

SEQ ID NO: 311296 - RNA, 25 nt, Human
cucaccgcccagugccccgggggcc

SEQ ID NO: 311297 - RNA, 20 nt, Human
cugucaccaggacaggacgc

SEQ ID NO: 311298 - RNA, 19 nt, Human
gacggcaccgagaguugcc

SEQ ID NO: 311299 - RNA, 21 nt, Human
gaucucugaagucccgcccaa

SEQ ID NO: 311300 - RNA, 22 nt, Human
gcagggccugcgguuugggugc

SEQ ID NO: 311301 - RNA, 21 nt, Human
gcccagugccccgggggcccu

SEQ ID NO: 311302 - RNA, 18 nt, Human
gccucuggccuccuuaug

SEQ ID NO: 311303 - RNA, 21 nt, Human
gcgcgacaacaagcggcggag

SEQ ID NO: 311304 - RNA, 19 nt, Human
gcgggugggaacaucggga

SEQ ID NO: 311305 - RNA, 21 nt, Human
gcuggggagaagaggccucga

SEQ ID NO: 311306 - RNA, 21 nt, Human
ggaaacagacacaaugaccug

SEQ ID NO: 311307 - RNA, 24 nt, Human
ggacgcggcauucacaacggaaga

SEQ ID NO: 311308 - RNA, 18 nt, Human
ggagguggcucaccgccc

SEQ ID NO: 311309 - RNA, 18 nt, Human
ggccgggcuguggagaag

SEQ ID NO: 311310 - RNA, 22 nt, Human
ggccuccuuaugucuggagggc

SEQ ID NO: 311311 - RNA, 20 nt, Human
ggcgcgacaacaagcggcgg

SEQ ID NO: 311312 - RNA, 19 nt, Human
ggcuacgguccaggccccu

SEQ ID NO: 311313 - RNA, 24 nt, Human
ggggcgcgacaacaagcggcggag

SEQ ID NO: 311314 - RNA, 21 nt, Human
gggggaagggcaagggaggcg

SEQ ID NO: 311315 - RNA, 25 nt, Human
gggggcuguggccccgcgucuccgg

SEQ ID NO: 311316 - RNA, 20 nt, Human
ggguguaagcggucacgacc

SEQ ID NO: 311317 - RNA, 26 nt, Human
ggucagagagggccagcugggcgggg

SEQ ID NO: 311318 - RNA, 18 nt, Human
gguggugcugagaauaaa

SEQ ID NO: 311319 - RNA, 22 nt, Human
guccaggggugcgagggcgucc

SEQ ID NO: 311320 - RNA, 18 nt, Human
uaagggaagacucggccc

SEQ ID NO: 311321 - RNA, 26 nt, Human
uccguucugcagcacuggggcaggga

SEQ ID NO: 311322 - RNA, 21 nt, Human
ucucugaagucccgcccaacu

SEQ ID NO: 311323 - RNA, 22 nt, Human
ucucugaagucccgcccaacuu

SEQ ID NO: 311324 - RNA, 20 nt, Human
ucugaagucccgcccaacuu

SEQ ID NO: 311325 - RNA, 21 nt, Human
ucuggggauaagggaagacuc

SEQ ID NO: 311326 - RNA, 18 nt, Human
ugaccugggagggggugg

SEQ ID NO: 311327 - RNA, 19 nt, Human
ugaccugggaggggguggu

SEQ ID NO: 311328 - RNA, 23 nt, Human
ugagaauaaauuagggucagcug

SEQ ID NO: 311329 - RNA, 24 nt, Human
ugcuggggagaagaggccucgagc

SEQ ID NO: 311330 - RNA, 19 nt, Human
uggcgggaagggaucaugc

SEQ ID NO: 311331 - RNA, 19 nt, Human
ugggaggggguggugcuga

SEQ ID NO: 311332 - RNA, 24 nt, Human
uggggucucagcacucgcugggug

SEQ ID NO: 311333 - RNA, 21 nt, Human
ugggugacccgcgggagcagg

SEQ ID NO: 311334 - RNA, 18 nt, Human
uugcagccucuggccucc

SEQ ID NO: 311335 - RNA, 25 nt, Human
uuugggugcugugaccguccggggg

SEQ ID NO: 311336 - RNA, 18 nt, Human
aaaaugcucaaucuccuc

SEQ ID NO: 311337 - RNA, 21 nt, Human
aacucgccgcccucuggccuc

SEQ ID NO: 311338 - RNA, 21 nt, Human
aacucgccgcccucuggccuc

SEQ ID NO: 311339 - RNA, 23 nt, Human
aacucgccgcccucuggccucua

SEQ ID NO: 311340 - RNA, 23 nt, Human
aacucgccgcccucuggccucua

SEQ ID NO: 311341 - RNA, 18 nt, Human
aagaggaggagauuuaaa

SEQ ID NO: 311342 - RNA, 18 nt, Human
aagaggaggagauuuaaa

SEQ ID NO: 311343 - RNA, 20 nt, Human
aagaggaggagauuuaaaua

SEQ ID NO: 311344 - RNA, 21 nt, Human
aaucuucucucccuuucaggc

SEQ ID NO: 311345 - RNA, 21 nt, Human
acagaucagugaggaagaggc

SEQ ID NO: 311346 - RNA, 18 nt, Human
agaagaacaaaaguaggg

SEQ ID NO: 311347 - RNA, 18 nt, Human
agaagaacaaaaguaggg

SEQ ID NO: 311348 - RNA, 22 nt, Human
agcagugcacccuguugucuug

SEQ ID NO: 311349 - RNA, 21 nt, Human
agccuggggaacaggaaccug

SEQ ID NO: 311350 - RNA, 20 nt, Human
agcgccaaucuucucucccu

SEQ ID NO: 311351 - RNA, 21 nt, Human
agcuggugcugggaggggccg

SEQ ID NO: 311352 - RNA, 21 nt, Human
agcuggugcugggaggggccg

SEQ ID NO: 311353 - RNA, 21 nt, Human
agcuggugcugggaggggccg

SEQ ID NO: 311354 - RNA, 19 nt, Human
aggcaaaguuccucacaca

SEQ ID NO: 311355 - RNA, 19 nt, Human
agugaggaagaggcuauug

SEQ ID NO: 311356 - RNA, 23 nt, Human
aucuucucucccuuucaggccuu

SEQ ID NO: 311357 - RNA, 19 nt, Human
caaaaugcucaaucuccuc

SEQ ID NO: 311358 - RNA, 18 nt, Human
caaacugcugaucaaugu

SEQ ID NO: 311359 - RNA, 21 nt, Human
caaguguggauuugcccaggc

SEQ ID NO: 311360 - RNA, 19 nt, Human
caguuucuggaucuguccc

SEQ ID NO: 311361 - RNA, 19 nt, Human
caguuucuggaucuguccc

SEQ ID NO: 311362 - RNA, 25 nt, Human
ccaauggccggagcccauggccgaa

SEQ ID NO: 311363 - RNA, 20 nt, Human
ccaauggccggagccugggg

SEQ ID NO: 311364 - RNA, 21 nt, Human
ccacgaugccccagggguaga

SEQ ID NO: 311365 - RNA, 18 nt, Human
cccacauacuccuuguca

SEQ ID NO: 311366 - RNA, 20 nt, Human
ccccagggguagagucgacc

SEQ ID NO: 311367 - RNA, 20 nt, Human
ccccagggguagagucgacc

SEQ ID NO: 311368 - RNA, 19 nt, Human
cccccugccagcuuugucc

SEQ ID NO: 311369 - RNA, 19 nt, Human
cccccugccagcuuugucc

SEQ ID NO: 311370 - RNA, 18 nt, Human
ccccggcacccagcgcca

SEQ ID NO: 311371 - RNA, 21 nt, Human
ccgggcggggccggcuccgcc

SEQ ID NO: 311372 - RNA, 28 nt, Human
ccucugagucucugggcagucagcaggg

SEQ ID NO: 311373 - RNA, 28 nt, Human
ccucugagucucugggcagucagcaggg

SEQ ID NO: 311374 - RNA, 21 nt, Human
ccugcaauuugaaguccucau

SEQ ID NO: 311375 - RNA, 23 nt, Human
ccuuucaggccuuugccccagcc

SEQ ID NO: 311376 - RNA, 23 nt, Human
cgaggaggaccccagcacccgcu

SEQ ID NO: 311377 - RNA, 23 nt, Human
cgaggaggaccccagcacccgcu

SEQ ID NO: 311378 - RNA, 21 nt, Human
cgcccgagcgacccgcggcgg

SEQ ID NO: 311379 - RNA, 21 nt, Human
cgguacagaucagugaggaag

SEQ ID NO: 311380 - RNA, 27 nt, Human
cucuccugccaccaugaggguaaaguc

SEQ ID NO: 311381 - RNA, 25 nt, Human
cucuucagcaccaagaaguuuccgg

SEQ ID NO: 311382 - RNA, 26 nt, Human
cucuucuauguccacugcaugcuuag

SEQ ID NO: 311383 - RNA, 19 nt, Human
cugcaaaugggaugcuuuc

SEQ ID NO: 311384 - RNA, 26 nt, Human
cuucuggucauacuugcgauuccguu

SEQ ID NO: 311385 - RNA, 26 nt, Human
cuucuggucauacuugcgauuccguu

SEQ ID NO: 311386 - RNA, 20 nt, Human
cuuucgguggacuugguugg

SEQ ID NO: 311387 - RNA, 18 nt, Human
gagcugcgcgccgaccuc

SEQ ID NO: 311388 - RNA, 18 nt, Human
gcagagcuggugcuggga

SEQ ID NO: 311389 - RNA, 18 nt, Human
gcagagcuggugcuggga

SEQ ID NO: 311390 - RNA, 18 nt, Human
gcagagcuggugcuggga

SEQ ID NO: 311391 - RNA, 20 nt, Human
gcauuguccucagcuucaca

SEQ ID NO: 311392 - RNA, 20 nt, Human
gcauuguccucagcuucaca

SEQ ID NO: 311393 - RNA, 19 nt, Human
gcccacauacuccuuguca

SEQ ID NO: 311394 - RNA, 24 nt, Human
gccccggcacccagcgccaaucuu

SEQ ID NO: 311395 - RNA, 21 nt, Human
gcccgagcgacccgcggcgga

SEQ ID NO: 311396 - RNA, 19 nt, Human
gccgaccucgcagcaccgc

SEQ ID NO: 311397 - RNA, 24 nt, Human
gccgcagccucacacccuucucuu

SEQ ID NO: 311398 - RNA, 18 nt, Human
gccuggacagcgcccgag

SEQ ID NO: 311399 - RNA, 18 nt, Human
gcuucuggucauacuugc

SEQ ID NO: 311400 - RNA, 18 nt, Human
gcuucuggucauacuugc

SEQ ID NO: 311401 - RNA, 19 nt, Human
gcuuuguccuggcuucugg

SEQ ID NO: 311402 - RNA, 19 nt, Human
gcuuuguccuggcuucugg

SEQ ID NO: 311403 - RNA, 19 nt, Human
ggacaggaagaagaggagg

SEQ ID NO: 311404 - RNA, 19 nt, Human
ggacaggaagaagaggagg

SEQ ID NO: 311405 - RNA, 19 nt, Human
ggacaggaagaagaggagg

SEQ ID NO: 311406 - RNA, 18 nt, Human
gggaagucgguaccacuu

SEQ ID NO: 311407 - RNA, 18 nt, Human
gggaagucgguaccacuu

SEQ ID NO: 311408 - RNA, 18 nt, Human
gggaggugucaguguguc

SEQ ID NO: 311409 - RNA, 18 nt, Human
gggaggugucaguguguc

SEQ ID NO: 311410 - RNA, 19 nt, Human
gggcggggccggcuccgcc

SEQ ID NO: 311411 - RNA, 23 nt, Human
gguuggggaggguugcaaagccc

SEQ ID NO: 311412 - RNA, 20 nt, Human
guaccagcauuguccucagc

SEQ ID NO: 311413 - RNA, 20 nt, Human
guaccagcauuguccucagc

SEQ ID NO: 311414 - RNA, 23 nt, Human
guccacaauggugagccgcagcc

SEQ ID NO: 311415 - RNA, 19 nt, Human
gugcacccuguugucuugg

SEQ ID NO: 311416 - RNA, 22 nt, Human
gugggacagcagggauggggaa

SEQ ID NO: 311417 - RNA, 22 nt, Human
gugggacagcagggauggggaa

SEQ ID NO: 311418 - RNA, 23 nt, Human
guuuugaugcuguuguugucugg

SEQ ID NO: 311419 - RNA, 18 nt, Human
uacaguguugcugccaau

SEQ ID NO: 311420 - RNA, 18 nt, Human
uacaguguugcugccaau

SEQ ID NO: 311421 - RNA, 21 nt, Human
uaggcacgauguugacccgcu

SEQ ID NO: 311422 - RNA, 21 nt, Human
uaggcacgauguugacccgcu

SEQ ID NO: 311423 - RNA, 18 nt, Human
ucacagucugggaauuga

SEQ ID NO: 311424 - RNA, 18 nt, Human
ucacagucugggaauuga

SEQ ID NO: 311425 - RNA, 18 nt, Human
ucagcagggauguaaggc

SEQ ID NO: 311426 - RNA, 18 nt, Human
ucagcagggauguaaggc

SEQ ID NO: 311427 - RNA, 18 nt, Human
ucagcagggauguaaggc

SEQ ID NO: 311428 - RNA, 18 nt, Human
ucauaaugugucucccgu

SEQ ID NO: 311429 - RNA, 18 nt, Human
ucauaaugugucucccgu

SEQ ID NO: 311430 - RNA, 19 nt, Human
uccacaguuugcaugaucc

SEQ ID NO: 311431 - RNA, 19 nt, Human
uccacuuccacgaugcccc

SEQ ID NO: 311432 - RNA, 19 nt, Human
uccacuuccacgaugcccc

SEQ ID NO: 311433 - RNA, 20 nt, Human
ucccccugccagcuuugucc

SEQ ID NO: 311434 - RNA, 20 nt, Human
ucccccugccagcuuugucc

SEQ ID NO: 311435 - RNA, 22 nt, Human
ucccuggugggacagcagggau

SEQ ID NO: 311436 - RNA, 22 nt, Human
ucccuggugggacagcagggau

SEQ ID NO: 311437 - RNA, 25 nt, Human
ucccugucagaaagcucuaggucua

SEQ ID NO: 311438 - RNA, 22 nt, Human
uccucugagucucugggcaguc

SEQ ID NO: 311439 - RNA, 22 nt, Human
uccucugagucucugggcaguc

SEQ ID NO: 311440 - RNA, 22 nt, Human
uccucugagucucugggcaguc

SEQ ID NO: 311441 - RNA, 22 nt, Human
ucucacccaaggcuaggcuugg

SEQ ID NO: 311442 - RNA, 22 nt, Human
ucucacccaaggcuaggcuugg

SEQ ID NO: 311443 - RNA, 19 nt, Human
ucuccugccaccaugaggg

SEQ ID NO: 311444 - RNA, 24 nt, Human
ucucucggauaagcuucucaguuu

SEQ ID NO: 311445 - RNA, 24 nt, Human
ucucucggauaagcuucucaguuu

SEQ ID NO: 311446 - RNA, 19 nt, Human
ucucugggcagucagcagg

SEQ ID NO: 311447 - RNA, 19 nt, Human
ucucugggcagucagcagg

SEQ ID NO: 311448 - RNA, 19 nt, Human
ucucugggcagucagcagg

SEQ ID NO: 311449 - RNA, 19 nt, Human
ucuggaucugucccuggug

SEQ ID NO: 311450 - RNA, 19 nt, Human
ucuggaucugucccuggug

SEQ ID NO: 311451 - RNA, 19 nt, Human
ugagcagagcuggugcugg

SEQ ID NO: 311452 - RNA, 19 nt, Human
ugagcagagcuggugcugg

SEQ ID NO: 311453 - RNA, 18 nt, Human
ugagcccagggccuauag

SEQ ID NO: 311454 - RNA, 21 nt, Human
ugccacaggcuuccagcacuc

SEQ ID NO: 311455 - RNA, 26 nt, Human
ugccaccaugaggguaaagucaaagc

SEQ ID NO: 311456 - RNA, 23 nt, Human
ugcccuggguuuuccacuuccac

SEQ ID NO: 311457 - RNA, 23 nt, Human
ugcccuggguuuuccacuuccac

SEQ ID NO: 311458 - RNA, 20 nt, Human
uggcuuccuggcuugcuccu

SEQ ID NO: 311459 - RNA, 21 nt, Human
uggcuuccuggcuugcuccuu

SEQ ID NO: 311460 - RNA, 18 nt, Human
ugggaggggccggcaugg

SEQ ID NO: 311461 - RNA, 18 nt, Human
ugggaggggccggcaugg

SEQ ID NO: 311462 - RNA, 18 nt, Human
ugggaggggccggcaugg

SEQ ID NO: 311463 - RNA, 20 nt, Human
ugggaggggccggcauggac

SEQ ID NO: 311464 - RNA, 20 nt, Human
ugggaggggccggcauggac

SEQ ID NO: 311465 - RNA, 20 nt, Human
ugggaggggccggcauggac

SEQ ID NO: 311466 - RNA, 19 nt, Human
ugggaugcuuuccuuuagg

SEQ ID NO: 311467 - RNA, 19 nt, Human
ugggaugcuuuccuuuagg

SEQ ID NO: 311468 - RNA, 18 nt, Human
uggugcugggaggggccg

SEQ ID NO: 311469 - RNA, 18 nt, Human
uggugcugggaggggccg

SEQ ID NO: 311470 - RNA, 19 nt, Human
ugucagaaagcucuagguc

SEQ ID NO: 311471 - RNA, 22 nt, Human
ugucagaaagcucuaggucuaa

SEQ ID NO: 311472 - RNA, 24 nt, Human
uguggauuugcccaggccagacuc

SEQ ID NO: 311473 - RNA, 19 nt, Human
uuccucacacacagaaaca

SEQ ID NO: 311474 - RNA, 22 nt, Human
uugcaugauccucucuucagca

SEQ ID NO: 311475 - RNA, 19 nt, Human
uugguuggggaggguugca

SEQ ID NO: 311476 - RNA, 22 nt, Human
uuguguagcaucuccugcaucc

SEQ ID NO: 311477 - RNA, 22 nt, Human
uuguguagcaucuccugcaucc

SEQ ID NO: 311478 - RNA, 21 nt, Human
uuugcuaaagggagaaaaggg

SEQ ID NO: 311479 - RNA, 21 nt, Human
uuugcuaaagggagaaaaggg

SEQ ID NO: 311480 - RNA, 23 nt, Human
uuugcuaaagggagaaaaggguu

SEQ ID NO: 311481 - RNA, 23 nt, Human
uuugcuaaagggagaaaaggguu

SEQ ID NO: 311482 - RNA, 22 nt, Human
aaaacaccugaucuacaagaca

SEQ ID NO: 311483 - RNA, 18 nt, Human
aaaagcucauccaaaacu

SEQ ID NO: 311484 - RNA, 28 nt, Human
aaacaaaacaaaacaccugaucuacaag

SEQ ID NO: 311485 - RNA, 21 nt, Human
aaacaacuauaacaaaacucu

SEQ ID NO: 311486 - RNA, 23 nt, Human
aaagaguugaugauaaacugucu

SEQ ID NO: 311487 - RNA, 18 nt, Human
aaagugugagaagaccag

SEQ ID NO: 311488 - RNA, 24 nt, Human
aaccgcagcagccccacuaggcuc

SEQ ID NO: 311489 - RNA, 19 nt, Human
aaccucugaaucagcccag

SEQ ID NO: 311490 - RNA, 22 nt, Human
aagaaggaagcaaacaccucac

SEQ ID NO: 311491 - RNA, 22 nt, Human
aagcaaacaccucacucaagcc

SEQ ID NO: 311492 - RNA, 23 nt, Human
aagcagaccugguucacgcacgg

SEQ ID NO: 311493 - RNA, 20 nt, Human
aagcccuggcuggugaagug

SEQ ID NO: 311494 - RNA, 23 nt, Human
aagccuagacuaacacaguuugg

SEQ ID NO: 311495 - RNA, 19 nt, Human
acaacagaaaaccuacugg

SEQ ID NO: 311496 - RNA, 19 nt, Human
acacugaguguagggaggg

SEQ ID NO: 311497 - RNA, 18 nt, Human
acagagaagaggaacagc

SEQ ID NO: 311498 - RNA, 21 nt, Human
acagucugucccccaggcugc

SEQ ID NO: 311499 - RNA, 18 nt, Human
acccuggagguguggcgu

SEQ ID NO: 311500 - RNA, 21 nt, Human
accucugaaucagcccagagc

SEQ ID NO: 311501 - RNA, 20 nt, Human
acgcccagaacgauggagac

SEQ ID NO: 311502 - RNA, 18 nt, Human
acuaguucaucuauaaag

SEQ ID NO: 311503 - RNA, 22 nt, Human
acuccaaccuuuacugaaaugg

SEQ ID NO: 311504 - RNA, 20 nt, Human
acucuuugcccucucuugcc

SEQ ID NO: 311505 - RNA, 20 nt, Human
agaaacugcaagagaaccgc

SEQ ID NO: 311506 - RNA, 20 nt, Human
agaccaacaccaaagaguca

SEQ ID NO: 311507 - RNA, 22 nt, Human
agaccugagggaucagcuagug

SEQ ID NO: 311508 - RNA, 18 nt, Human
agagcauauugacuccaa

SEQ ID NO: 311509 - RNA, 26 nt, Human
agaggaacagcaaggccuagcuccag

SEQ ID NO: 311510 - RNA, 21 nt, Human
agaugccaccagaaacugcaa

SEQ ID NO: 311511 - RNA, 18 nt, Human
agcaaggcaaggugucag

SEQ ID NO: 311512 - RNA, 23 nt, Human
agcaguguggcauggugcaaaug

SEQ ID NO: 311513 - RNA, 18 nt, Human
agcggcggcggcggcggc

SEQ ID NO: 311514 - RNA, 24 nt, Human
agcuuuuggccuuuggcaguggag

SEQ ID NO: 311515 - RNA, 21 nt, Human
aggaaggaauuaggcagaugg

SEQ ID NO: 311516 - RNA, 19 nt, Human
aggaagucacuucaucuuu

SEQ ID NO: 311517 - RNA, 20 nt, Human
aggagcggcggcggcggcgg

SEQ ID NO: 311518 - RNA, 21 nt, Human
aggaucagcaaaggaggaaua

SEQ ID NO: 311519 - RNA, 22 nt, Human
aggccaggcuguggcccggggc

SEQ ID NO: 311520 - RNA, 22 nt, Human
aggccccaggacagaguaagug

SEQ ID NO: 311521 - RNA, 23 nt, Human
aggguagguuaacauggucacug

SEQ ID NO: 311522 - RNA, 22 nt, Human
aggguugccugccaaccagagc

SEQ ID NO: 311523 - RNA, 22 nt, Human
agguggcugcggugccggcgga

SEQ ID NO: 311524 - RNA, 22 nt, Human
auaguuuuuacaaacaaguuuc

SEQ ID NO: 311525 - RNA, 19 nt, Human
auauguguauauguaucag

SEQ ID NO: 311526 - RNA, 24 nt, Human
auccugcccaccuccaaacacuag

SEQ ID NO: 311527 - RNA, 21 nt, Human
caaaaacuugucauuuccagu

SEQ ID NO: 311528 - RNA, 27 nt, Human
caaaacaaaacaccugaucuacaagac

SEQ ID NO: 311529 - RNA, 23 nt, Human
caaaaggaacacgcugcucucac

SEQ ID NO: 311530 - RNA, 24 nt, Human
caaagaauauucuguaccuccuuc

SEQ ID NO: 311531 - RNA, 22 nt, Human
caagagaaccgcagcagcccca

SEQ ID NO: 311532 - RNA, 18 nt, Human
cacaacagucuguccccc

SEQ ID NO: 311533 - RNA, 18 nt, Human
cacugcagacaaaaagac

SEQ ID NO: 311534 - RNA, 21 nt, Human
cacugcagacaaaaagaccaa

SEQ ID NO: 311535 - RNA, 23 nt, Human
cacugcagacaaaaagaccaaca

SEQ ID NO: 311536 - RNA, 19 nt, Human
cacugcgcuuuccaggccc

SEQ ID NO: 311537 - RNA, 22 nt, Human
cagaaugaagggauuccacuag

SEQ ID NO: 311538 - RNA, 21 nt, Human
cagagccgggcuggggcgcag

SEQ ID NO: 311539 - RNA, 21 nt, Human
cagaucuuccccagccccucc

SEQ ID NO: 311540 - RNA, 22 nt, Human
cagccacugcucuuucauacug

SEQ ID NO: 311541 - RNA, 19 nt, Human
caggccaggacagugggac

SEQ ID NO: 311542 - RNA, 20 nt, Human
caucagagcuacuacagccg

SEQ ID NO: 311543 - RNA, 23 nt, Human
cauccugcccaccuccaaacacu

SEQ ID NO: 311544 - RNA, 20 nt, Human
caucuuaaaccuaaaugauu

SEQ ID NO: 311545 - RNA, 18 nt, Human
caugcccacugcuuagga

SEQ ID NO: 311546 - RNA, 19 nt, Human
ccacacaggauucccccuu

SEQ ID NO: 311547 - RNA, 20 nt, Human
ccagaacaagggguucaagg

SEQ ID NO: 311548 - RNA, 30 nt, Human
ccaggccaggacagugggacguucccacag

SEQ ID NO: 311549 - RNA, 21 nt, Human
cccagccccucccccuacccu

SEQ ID NO: 311550 - RNA, 23 nt, Human
cccagccccucccccuacccuuu

SEQ ID NO: 311551 - RNA, 20 nt, Human
ccccuaagcagaccugguuc

SEQ ID NO: 311552 - RNA, 20 nt, Human
ccccucggaguucacucucc

SEQ ID NO: 311553 - RNA, 19 nt, Human
ccccuggccuuccuuuucc

SEQ ID NO: 311554 - RNA, 22 nt, Human
cccugcccuccuuuccagccca

SEQ ID NO: 311555 - RNA, 20 nt, Human
cccugccgcugcagcagagc

SEQ ID NO: 311556 - RNA, 22 nt, Human
ccuaagcaguucugcccauuuu

SEQ ID NO: 311557 - RNA, 22 nt, Human
ccuagacuaacacaguuuggac

SEQ ID NO: 311558 - RNA, 22 nt, Human
ccucugaaucagcccagagccu

SEQ ID NO: 311559 - RNA, 18 nt, Human
ccugcagccacugcucuu

SEQ ID NO: 311560 - RNA, 22 nt, Human
ccuggggggauugggaggggac

SEQ ID NO: 311561 - RNA, 18 nt, Human
ccuguccagagaaaaaac

SEQ ID NO: 311562 - RNA, 18 nt, Human
ccugugcuaaucccagag

SEQ ID NO: 311563 - RNA, 24 nt, Human
ccuucgaguagcaauucuuaauuu

SEQ ID NO: 311564 - RNA, 22 nt, Human
cgaaaguucaacauuccacaca

SEQ ID NO: 311565 - RNA, 21 nt, Human
cgccucugggccgggagcagg

SEQ ID NO: 311566 - RNA, 26 nt, Human
cgggaccacaacagaaaaccuacugg

SEQ ID NO: 311567 - RNA, 20 nt, Human
cgggaccacaacagaaaacu

SEQ ID NO: 311568 - RNA, 22 nt, Human
cucccugccgcugcagcagagc

SEQ ID NO: 311569 - RNA, 21 nt, Human
cuccuuuccagcccagccacc

SEQ ID NO: 311570 - RNA, 18 nt, Human
cugaagacacaucgcuga

SEQ ID NO: 311571 - RNA, 20 nt, Human
cugcaagagaaccgcagcag

SEQ ID NO: 311572 - RNA, 19 nt, Human
cugccgagcccauaaaagu

SEQ ID NO: 311573 - RNA, 19 nt, Human
cugcggcggcucuuccucc

SEQ ID NO: 311574 - RNA, 18 nt, Human
cugcucucuaguccuugc

SEQ ID NO: 311575 - RNA, 25 nt, Human
cuggagcucuguggugcugcuggag

SEQ ID NO: 311576 - RNA, 19 nt, Human
cuguggugcugcuggaggc

SEQ ID NO: 311577 - RNA, 20 nt, Human
cuuugcugccugucucccca

SEQ ID NO: 311578 - RNA, 20 nt, Human
gaaaccacaguuuaccacug

SEQ ID NO: 311579 - RNA, 24 nt, Human
gaaccaugugauuuugaggaaguc

SEQ ID NO: 311580 - RNA, 18 nt, Human
gaccgugacaaaagcuau

SEQ ID NO: 311581 - RNA, 18 nt, Human
gaccugguucacgcacgg

SEQ ID NO: 311582 - RNA, 20 nt, Human
gagccuucuacauggcagcu

SEQ ID NO: 311583 - RNA, 21 nt, Human
gcccucucuugccucccccau

SEQ ID NO: 311584 - RNA, 19 nt, Human
gcgcugcggcggcucuucc

SEQ ID NO: 311585 - RNA, 22 nt, Human
gcgcuuuccaggcccucuuuuc

SEQ ID NO: 311586 - RNA, 20 nt, Human
gcggcggcggcggcggcugc

SEQ ID NO: 311587 - RNA, 25 nt, Human
gcggcggcggcggcggcugcguccu

SEQ ID NO: 311588 - RNA, 23 nt, Human
gcucucacuagcuacagcagauu

SEQ ID NO: 311589 - RNA, 19 nt, Human
gcugccugucuccccacuc

SEQ ID NO: 311590 - RNA, 18 nt, Human
gcuggggcgcagagccag

SEQ ID NO: 311591 - RNA, 23 nt, Human
ggaacaaacacugaguguaggga

SEQ ID NO: 311592 - RNA, 20 nt, Human
ggaagauggguacacgaggc

SEQ ID NO: 311593 - RNA, 23 nt, Human
ggaauuuacgcccagaacgaugg

SEQ ID NO: 311594 - RNA, 19 nt, Human
ggagugccaggggcaaugg

SEQ ID NO: 311595 - RNA, 24 nt, Human
ggcccggggcucccgagucgcgcu

SEQ ID NO: 311596 - RNA, 20 nt, Human
ggccgggagcagguggcugc

SEQ ID NO: 311597 - RNA, 23 nt, Human
gggaaaccacaguuuaccacuga

SEQ ID NO: 311598 - RNA, 20 nt, Human
gggagcagguggcugcggug

SEQ ID NO: 311599 - RNA, 22 nt, Human
gggcaagaaggaagcaaacacc

SEQ ID NO: 311600 - RNA, 24 nt, Human
gggcaaugggccagugucgggccc

SEQ ID NO: 311601 - RNA, 24 nt, Human
gggcgcagagccaguggcagagga

SEQ ID NO: 311602 - RNA, 23 nt, Human
ggguagguuaacauggucacugu

SEQ ID NO: 311603 - RNA, 19 nt, Human
gguggcuccggaggccagg

SEQ ID NO: 311604 - RNA, 19 nt, Human
guaaauuccaguguacuuc

SEQ ID NO: 311605 - RNA, 23 nt, Human
gucgcgcugcggcggcucuuccu

SEQ ID NO: 311606 - RNA, 25 nt, Human
guggcagaggagcggcggcggcggc

SEQ ID NO: 311607 - RNA, 21 nt, Human
guggcccggggcucccgaguc

SEQ ID NO: 311608 - RNA, 23 nt, Human
guggguggcuccggaggccaggc

SEQ ID NO: 311609 - RNA, 28 nt, Human
guguggcguuucacccgaaaaauggccg

SEQ ID NO: 311610 - RNA, 23 nt, Human
uaaaaaaacaaaacaaaacaccu

SEQ ID NO: 311611 - RNA, 18 nt, Human
uaaccucugaaucagccc

SEQ ID NO: 311612 - RNA, 25 nt, Human
uaagcagaccugguucacgcacgga

SEQ ID NO: 311613 - RNA, 19 nt, Human
uaagccuagacuaacacag

SEQ ID NO: 311614 - RNA, 19 nt, Human
uacaaacaaguuucucagu

SEQ ID NO: 311615 - RNA, 19 nt, Human
uacuggguggagagaaccc

SEQ ID NO: 311616 - RNA, 22 nt, Human
uagaaaacaacuauaacaaaac

SEQ ID NO: 311617 - RNA, 23 nt, Human
uagaaaacaacuauaacaaaacu

SEQ ID NO: 311618 - RNA, 20 nt, Human
uagaucuugaaauaccuuuc

SEQ ID NO: 311619 - RNA, 26 nt, Human
uagcuuuuguguuccccugagaugau

SEQ ID NO: 311620 - RNA, 20 nt, Human
uaggagaaggaaaacuuggg

SEQ ID NO: 311621 - RNA, 21 nt, Human
uauaaaagcucauccaaaacu

SEQ ID NO: 311622 - RNA, 24 nt, Human
uaucagagagcauuuagaacccag

SEQ ID NO: 311623 - RNA, 23 nt, Human
uauuccuucugaggcgcacaguc

SEQ ID NO: 311624 - RNA, 21 nt, Human
ucaccugcacgcagguccccu

SEQ ID NO: 311625 - RNA, 25 nt, Human
ucagagcuacuacagccggagccug

SEQ ID NO: 311626 - RNA, 20 nt, Human
ucaggucgucagaucccacc

SEQ ID NO: 311627 - RNA, 20 nt, Human
uccauccugcccaccuccaa

SEQ ID NO: 311628 - RNA, 20 nt, Human
ucccacgggaccacaacaga

SEQ ID NO: 311629 - RNA, 25 nt, Human
ucccagacccaaugcucucugaauu

SEQ ID NO: 311630 - RNA, 19 nt, Human
ucccagaggccccaggaca

SEQ ID NO: 311631 - RNA, 18 nt, Human
uccccagccccucccccu

SEQ ID NO: 311632 - RNA, 22 nt, Human
uccccagccccucccccuaccc

SEQ ID NO: 311633 - RNA, 22 nt, Human
uccccuucucuccucaccugca

SEQ ID NO: 311634 - RNA, 23 nt, Human
uccugcccaccuccaaacacuag

SEQ ID NO: 311635 - RNA, 18 nt, Human
uccuuggacagagcgaug

SEQ ID NO: 311636 - RNA, 19 nt, Human
ucgcuggggcccuauguga

SEQ ID NO: 311637 - RNA, 24 nt, Human
ucuccaagaggccauaggguugca

SEQ ID NO: 311638 - RNA, 20 nt, Human
ucuguccuuugugucauucu

SEQ ID NO: 311639 - RNA, 18 nt, Human
ucuuauguuuguguucau

SEQ ID NO: 311640 - RNA, 20 nt, Human
ugaaauaccuuucuccauga

SEQ ID NO: 311641 - RNA, 18 nt, Human
ugaacaacaaaaggaaca

SEQ ID NO: 311642 - RNA, 22 nt, Human
ugacaguauacaauuuuccaaa

SEQ ID NO: 311643 - RNA, 20 nt, Human
ugacauagguguccuggugg

SEQ ID NO: 311644 - RNA, 19 nt, Human
ugacuuugcuggggagggg

SEQ ID NO: 311645 - RNA, 21 nt, Human
ugagaugccaccagaaacugc

SEQ ID NO: 311646 - RNA, 23 nt, Human
ugagaugccaccagaaacugcaa

SEQ ID NO: 311647 - RNA, 19 nt, Human
ugagcucaggcacuagugg

SEQ ID NO: 311648 - RNA, 20 nt, Human
ugagugagaugagcuaacug

SEQ ID NO: 311649 - RNA, 23 nt, Human
ugcgcuuuccaggcccucuuuuc

SEQ ID NO: 311650 - RNA, 19 nt, Human
ugcuggaggccaccggcag

SEQ ID NO: 311651 - RNA, 20 nt, Human
uggcaguggagggcuggguu

SEQ ID NO: 311652 - RNA, 18 nt, Human
uggcugcggugccggcgg

SEQ ID NO: 311653 - RNA, 22 nt, Human
ugggaagauggguacacgaggc

SEQ ID NO: 311654 - RNA, 21 nt, Human
ugggaggggacaccccucgga

SEQ ID NO: 311655 - RNA, 23 nt, Human
ugggccgggagcagguggcugcg

SEQ ID NO: 311656 - RNA, 20 nt, Human
uggggugguuggucuggagc

SEQ ID NO: 311657 - RNA, 20 nt, Human
uguagggagggguaagaaca

SEQ ID NO: 311658 - RNA, 23 nt, Human
ugugcagcuuggggaaaccacaa

SEQ ID NO: 311659 - RNA, 22 nt, Human
uguucuccauccugcccaccuc

SEQ ID NO: 311660 - RNA, 24 nt, Human
uuaacuauaguuuuuacaaacaag

SEQ ID NO: 311661 - RNA, 21 nt, Human
uucaaaguuucuccaguauau

SEQ ID NO: 311662 - RNA, 22 nt, Human
uucacgcacggagaccugugug

SEQ ID NO: 311663 - RNA, 18 nt, Human
uuccagcccagccaccug

SEQ ID NO: 311664 - RNA, 22 nt, Human
uuccccagccccucccccuacc

SEQ ID NO: 311665 - RNA, 19 nt, Human
uucccuuccccauccaaac

SEQ ID NO: 311666 - RNA, 19 nt, Human
uuccuuuucccccuaggau

SEQ ID NO: 311667 - RNA, 21 nt, Human
uugaaaagggaaaaauuaagg

SEQ ID NO: 311668 - RNA, 22 nt, Human
uugaggaagucacuucaucuuu

SEQ ID NO: 311669 - RNA, 19 nt, Human
uuuggccuguugacauagg

SEQ ID NO: 311670 - RNA, 18 nt, Human
uuuguucagguugaaaag

SEQ ID NO: 311671 - RNA, 19 nt, Human
uuuguucucauccuggcuc

SEQ ID NO: 311672 - RNA, 20 nt, Human
aguauauuuuauuuuuucuc

SEQ ID NO: 311673 - RNA, 25 nt, Human
caaaugucuucuuaaagaaagcucu

SEQ ID NO: 311674 - RNA, 19 nt, Human
caauuuguugaguuugaca

SEQ ID NO: 311675 - RNA, 21 nt, Human
ccggaugccgcgauauggacc

SEQ ID NO: 311676 - RNA, 22 nt, Human
gggcgggagccggaugccgcga

SEQ ID NO: 311677 - RNA, 24 nt, Human
uauuuuuucuuucucuccugaaga

SEQ ID NO: 311678 - RNA, 24 nt, Human
ucucuccugaagacgggcgggagc

SEQ ID NO: 311679 - RNA, 21 nt, Human
uggcagguacaacuucccucu

SEQ ID NO: 311680 - RNA, 19 nt, Human
uuguugaguuugacaaaug

SEQ ID NO: 311681 - RNA, 26 nt, Human
aaaaauagcaagcgagggccaauuaa

SEQ ID NO: 311682 - RNA, 21 nt, Human
aaaaauagcaagcgagggccg

SEQ ID NO: 311683 - RNA, 19 nt, Human
aaaggcccugagcaaagcc

SEQ ID NO: 311684 - RNA, 26 nt, Human
aaauagcaagcgagggccaauuaagc

SEQ ID NO: 311685 - RNA, 23 nt, Human
aacacaugauccucaccguaacc

SEQ ID NO: 311686 - RNA, 19 nt, Human
aagacaagacugaaaagga

SEQ ID NO: 311687 - RNA, 21 nt, Human
aauaauguaagagaggaaaga

SEQ ID NO: 311688 - RNA, 28 nt, Human
acacagucccaagggagaagggaacgcc

SEQ ID NO: 311689 - RNA, 18 nt, Human
accccuacacauguuaau

SEQ ID NO: 311690 - RNA, 22 nt, Human
acucaacauuuuugcagccccc

SEQ ID NO: 311691 - RNA, 22 nt, Human
agaaaaaaauagcaagcgaggg

SEQ ID NO: 311692 - RNA, 23 nt, Human
agaagaaggcacaacauacuuuu

SEQ ID NO: 311693 - RNA, 23 nt, Human
aggggcaaaaagggaaugugagu

SEQ ID NO: 311694 - RNA, 20 nt, Human
caagcgagggccaauuaagc

SEQ ID NO: 311695 - RNA, 23 nt, Human
cacagucccaagggagaaacaga

SEQ ID NO: 311696 - RNA, 24 nt, Human
cagcccccuuuccuggucuacauu

SEQ ID NO: 311697 - RNA, 18 nt, Human
cagucaggcucugagaag

SEQ ID NO: 311698 - RNA, 19 nt, Human
cagucaggcucugagaagc

SEQ ID NO: 311699 - RNA, 23 nt, Human
cauuuuguuaguauaaucuuacc

SEQ ID NO: 311700 - RNA, 18 nt, Human
ccucccucagaaaccggg

SEQ ID NO: 311701 - RNA, 21 nt, Human
cucagugugugucuguuggac

SEQ ID NO: 311702 - RNA, 19 nt, Human
gaggcacagaggaagcugg

SEQ ID NO: 311703 - RNA, 18 nt, Human
gcaaaaagggaaugugag

SEQ ID NO: 311704 - RNA, 20 nt, Human
gcuuggggaggggcucugga

SEQ ID NO: 311705 - RNA, 20 nt, Human
ggaggggagcuuggggaggg

SEQ ID NO: 311706 - RNA, 18 nt, Human
ggcaaaaagggaauguga

SEQ ID NO: 311707 - RNA, 19 nt, Human
ggcuucuaaaucuuccccc

SEQ ID NO: 311708 - RNA, 22 nt, Human
gggaggggagcuuggggagggg

SEQ ID NO: 311709 - RNA, 22 nt, Human
gggcaaaaagggaaugugagga

SEQ ID NO: 311710 - RNA, 22 nt, Human
uaaaggcccugagcaaagccug

SEQ ID NO: 311711 - RNA, 22 nt, Human
uaagcaucccucuccccguuuu

SEQ ID NO: 311712 - RNA, 19 nt, Human
uagggccagaguggaggca

SEQ ID NO: 311713 - RNA, 24 nt, Human
uauugugaagaaaugagaaaaaaa

SEQ ID NO: 311714 - RNA, 18 nt, Human
ucccucagaaaccggguc

SEQ ID NO: 311715 - RNA, 18 nt, Human
ugaagaaaugagaaaaaa

SEQ ID NO: 311716 - RNA, 19 nt, Human
ugcagcccccuuuccuggu

SEQ ID NO: 311717 - RNA, 20 nt, Human
uggaggcacagaggaagcug

SEQ ID NO: 311718 - RNA, 22 nt, Human
uggaggcacagaggaagcuggg

SEQ ID NO: 311719 - RNA, 21 nt, Human
uggggaggggagcuuggggag

SEQ ID NO: 311720 - RNA, 23 nt, Human
uggggaggggagcuuggggaggg

SEQ ID NO: 311721 - RNA, 18 nt, Human
ugugucuguuggacuuug

SEQ ID NO: 311722 - RNA, 22 nt, Human
uguuagaguaucaaauuauuuu

SEQ ID NO: 311723 - RNA, 22 nt, Human
uguuaguauaaucuuaccaaua

SEQ ID NO: 311724 - RNA, 23 nt, Human
uuacauuccagcuacucucaauc

SEQ ID NO: 311725 - RNA, 23 nt, Human
uuagggccagaguggaggcacag

SEQ ID NO: 311726 - RNA, 24 nt, Human
uucaacuacccccuccuugguuac

SEQ ID NO: 311727 - RNA, 25 nt, Human
uucaacuacccccuccuugguuacu

SEQ ID NO: 311728 - RNA, 18 nt, Human
uucuaaaucuucccccuc

SEQ ID NO: 311729 - RNA, 26 nt, Human
aaaaacaccaaagacccuuacauagc

SEQ ID NO: 311730 - RNA, 21 nt, Human
aagaagaaacaaucauuuaaa

SEQ ID NO: 311731 - RNA, 33 nt, Human
aagaagaaacaaucauuuaaaaacaccaaagga

SEQ ID NO: 311732 - RNA, 19 nt, Human
aagcaaaagcaugaagaag

SEQ ID NO: 311733 - RNA, 25 nt, Human
aagcaaaagcaugaagaagaaacaa

SEQ ID NO: 311734 - RNA, 27 nt, Human
aagcaaaagcaugaagaagagggaccc

SEQ ID NO: 311735 - RNA, 23 nt, Human
aagcaugaagaagaaacaaucau

SEQ ID NO: 311736 - RNA, 18 nt, Human
accccagaguguucagaa

SEQ ID NO: 311737 - RNA, 19 nt, Human
caagcaaaagcaugaagaa

SEQ ID NO: 311738 - RNA, 23 nt, Human
cacccgagaaccccagaguguuc

SEQ ID NO: 311739 - RNA, 23 nt, Human
cagggacuagagcccucucccag

SEQ ID NO: 311740 - RNA, 27 nt, Human
cauagcaaagguuaagaaauaaauuaa

SEQ ID NO: 311741 - RNA, 21 nt, Human
ccccagaguguucagaaccag

SEQ ID NO: 311742 - RNA, 18 nt, Human
cccuuacauagcaaaggu

SEQ ID NO: 311743 - RNA, 23 nt, Human
ccgagaaccccagaguguucaga

SEQ ID NO: 311744 - RNA, 26 nt, Human
gagaaccccagaguguucagaaccag

SEQ ID NO: 311745 - RNA, 28 nt, Human
ggacuagagcccucucccaaccggaggg

SEQ ID NO: 311746 - RNA, 26 nt, Human
uaaaaacaccaaagacccuuacauag

SEQ ID NO: 311747 - RNA, 23 nt, Human
uaagaaauaaauuaagacuccua

SEQ ID NO: 311748 - RNA, 21 nt, Human
uauuggguugugucugccagg

SEQ ID NO: 311749 - RNA, 20 nt, Human
uggguugugucugccaggga

SEQ ID NO: 311750 - RNA, 19 nt, Human
uugacuacauugcaagcaa

SEQ ID NO: 311751 - RNA, 18 nt, Human
acgccgccgugaccccug

SEQ ID NO: 311752 - RNA, 18 nt, Human
cccgcccccgccccaugg

SEQ ID NO: 311753 - RNA, 28 nt, Human
caaugccgacacugcagggaaugaacag

SEQ ID NO: 311754 - RNA, 21 nt, Human
cagcuucgcccaggccaagga

SEQ ID NO: 311755 - RNA, 18 nt, Human
cagggaaugaacagccuc

SEQ ID NO: 311756 - RNA, 19 nt, Human
ccacacagcuucgcccagg

SEQ ID NO: 311757 - RNA, 19 nt, Human
ccaggccaaggagguucaa

SEQ ID NO: 311758 - RNA, 18 nt, Human
gaacagccuccaucuggg

SEQ ID NO: 311759 - RNA, 22 nt, Human
gccgacacugcagggaaugaac

SEQ ID NO: 311760 - RNA, 20 nt, Human
ggucaaaaccacuuuuuuga

SEQ ID NO: 311761 - RNA, 22 nt, Human
ugcagggaaugaacagccucca

SEQ ID NO: 311762 - RNA, 21 nt, Human
uugcuugguccacacagcuuc

SEQ ID NO: 311763 - RNA, 18 nt, Human
aagcgaagacgaagcaag

SEQ ID NO: 311764 - RNA, 19 nt, Human
agaaaagcgaagacgaagg

SEQ ID NO: 311765 - RNA, 21 nt, Human
agacggagaggcaaacaaagc

SEQ ID NO: 311766 - RNA, 20 nt, Human
aggaaagaagggggcccuga

SEQ ID NO: 311767 - RNA, 21 nt, Human
agggggcccugagggaaaaca

SEQ ID NO: 311768 - RNA, 22 nt, Human
gaaaacagacggagaggcaaac

SEQ ID NO: 311769 - RNA, 18 nt, Human
gaaaagcgaagacgaagc

SEQ ID NO: 311770 - RNA, 20 nt, Human
gaaagacacagauaagaaua

SEQ ID NO: 311771 - RNA, 18 nt, Human
gaggcaaacaaagcgaaa

SEQ ID NO: 311772 - RNA, 22 nt, Human
ggucgaggaaagaagggggccc

SEQ ID NO: 311773 - RNA, 18 nt, Human
uaagcagaaaacugauga

SEQ ID NO: 311774 - RNA, 19 nt, Human
uaagcagaaaacugaugaa

SEQ ID NO: 311775 - RNA, 23 nt, Human
uuugaaaaggucgaggaaagaag

SEQ ID NO: 311776 - RNA, 22 nt, Human
aaaaagcacagcugaaagccug

SEQ ID NO: 311777 - RNA, 18 nt, Human
aagaagaaaaggaaaaaa

SEQ ID NO: 311778 - RNA, 19 nt, Human
aagaagaaaaggaaaaaau

SEQ ID NO: 311779 - RNA, 20 nt, Human
accuggcuuugggcuccagc

SEQ ID NO: 311780 - RNA, 25 nt, Human
agaacaaagaaccagccaagaagaa

SEQ ID NO: 311781 - RNA, 26 nt, Human
aucuucuuggcagguccugcuacuga

SEQ ID NO: 311782 - RNA, 20 nt, Human
aucuugguucugaacccacu

SEQ ID NO: 311783 - RNA, 28 nt, Human
caaaaagcacagcugaaagccggggccc

SEQ ID NO: 311784 - RNA, 22 nt, Human
caaagaaccagccaagaagaaa

SEQ ID NO: 311785 - RNA, 23 nt, Human
caaagaaccagccaagaagaaaa

SEQ ID NO: 311786 - RNA, 22 nt, Human
caagcaacaaugccccuugucc

SEQ ID NO: 311787 - RNA, 19 nt, Human
caccaccccgaugaagcuc

SEQ ID NO: 311788 - RNA, 24 nt, Human
caccaccccgaugaagcuccacgg

SEQ ID NO: 311789 - RNA, 18 nt, Human
cagaacaaagaaccagcc

SEQ ID NO: 311790 - RNA, 18 nt, Human
ccaagaagaaaaggaaaa

SEQ ID NO: 311791 - RNA, 20 nt, Human
cccaaauccucgguccucac

SEQ ID NO: 311792 - RNA, 21 nt, Human
cccacugaauucaacugcacc

SEQ ID NO: 311793 - RNA, 21 nt, Human
cccgaccccaggcccacggcc

SEQ ID NO: 311794 - RNA, 19 nt, Human
ccuguaguccacaccgaug

SEQ ID NO: 311795 - RNA, 22 nt, Human
ccuucuuuuuauuuccacugcc

SEQ ID NO: 311796 - RNA, 22 nt, Human
ccuuguccuguaguccacaccg

SEQ ID NO: 311797 - RNA, 20 nt, Human
cgcagccucgggguagcgug

SEQ ID NO: 311798 - RNA, 19 nt, Human
cucccccgaccccaggccc

SEQ ID NO: 311799 - RNA, 18 nt, Human
cuuggcagguccugcuac

SEQ ID NO: 311800 - RNA, 25 nt, Human
cuuuuuauuuccacugccuuggagc

SEQ ID NO: 311801 - RNA, 18 nt, Human
gagcauuaauucuuuccc

SEQ ID NO: 311802 - RNA, 19 nt, Human
gccucgggguagcgugugg

SEQ ID NO: 311803 - RNA, 23 nt, Human
ggccuuaggcaagcccuuuugca

SEQ ID NO: 311804 - RNA, 20 nt, Human
guccugucucugcucuccug

SEQ ID NO: 311805 - RNA, 20 nt, Human
uagaaggaaucuucuuggca

SEQ ID NO: 311806 - RNA, 20 nt, Human
ucccccgaccccaggcccac

SEQ ID NO: 311807 - RNA, 19 nt, Human
uccuguaguccacaccgau

SEQ ID NO: 311808 - RNA, 21 nt, Human
ugcaaaaagcacagcugaaag

SEQ ID NO: 311809 - RNA, 26 nt, Human
ugccuuccaccccaaauccucggucc

SEQ ID NO: 311810 - RNA, 21 nt, Human
ugcugcucccccgaccccagg

SEQ ID NO: 311811 - RNA, 18 nt, Human
uggcuuugggcuccagcu

SEQ ID NO: 311812 - RNA, 23 nt, Human
uggcuuugggcuccagcuuggcu

SEQ ID NO: 311813 - RNA, 24 nt, Human
uggcuuugggcuccagcuuggcuu

SEQ ID NO: 311814 - RNA, 20 nt, Human
ugucucugcucuccugucaa

SEQ ID NO: 311815 - RNA, 18 nt, Human
uuacccaacaagcaacaa

SEQ ID NO: 311816 - RNA, 19 nt, Human
uugcaaaaagcacagcuga

SEQ ID NO: 311817 - RNA, 24 nt, Human
uuggagcagguuuaucacguuaga

SEQ ID NO: 311818 - RNA, 26 nt, Human
uuggagcagguuuaucacguuagaga

SEQ ID NO: 311819 - RNA, 26 nt, Human
uuuuuuuucuuuuuuuuccuucuuuu

SEQ ID NO: 311820 - RNA, 25 nt, Human
uuuuuuuuuuuuuuuuuuucuuuuu

SEQ ID NO: 311821 - RNA, 21 nt, Human
aaagauaaagaccuguaaaga

SEQ ID NO: 311822 - RNA, 19 nt, Human
aaagugcuggcauuacagg

SEQ ID NO: 311823 - RNA, 24 nt, Human
aaagugcuggcauuacagguauga

SEQ ID NO: 311824 - RNA, 24 nt, Human
aaaguguuaggauuacaggcguga

SEQ ID NO: 311825 - RNA, 24 nt, Human
aaauccuacaggcaagccugaggg

SEQ ID NO: 311826 - RNA, 21 nt, Human
aaaugcuaaagauuaaaaacu

SEQ ID NO: 311827 - RNA, 21 nt, Human
aacaaacaccuggcaaaacug

SEQ ID NO: 311828 - RNA, 21 nt, Human
aagcaauucuucugccucagc

SEQ ID NO: 311829 - RNA, 20 nt, Human
aagguaacaaacaccugggg

SEQ ID NO: 311830 - RNA, 22 nt, Human
aaguagcugggaucacaggugc

SEQ ID NO: 311831 - RNA, 26 nt, Human
aaguguuaggauuacaggcgugagcc

SEQ ID NO: 311832 - RNA, 18 nt, Human
aauggaagggcuccugaa

SEQ ID NO: 311833 - RNA, 24 nt, Human
accucgugaucugcccgccuuggc

SEQ ID NO: 311834 - RNA, 24 nt, Human
agaugguuuugccauguuggccag

SEQ ID NO: 311835 - RNA, 18 nt, Human
agccucccgaguagcugg

SEQ ID NO: 311836 - RNA, 23 nt, Human
agguaugagccacugugccuggc

SEQ ID NO: 311837 - RNA, 24 nt, Human
aggugaucugucugccucggccuc

SEQ ID NO: 311838 - RNA, 20 nt, Human
aguagagaugguuuugccau

SEQ ID NO: 311839 - RNA, 19 nt, Human
aguagcugggaucacaggc

SEQ ID NO: 311840 - RNA, 21 nt, Human
agugcgguggcgcaaucucag

SEQ ID NO: 311841 - RNA, 24 nt, Human
agugcgguggcgcaaucucagcuc

SEQ ID NO: 311842 - RNA, 19 nt, Human
aucugcccgccuuggccuc

SEQ ID NO: 311843 - RNA, 19 nt, Human
augacacugccucccuaaa

SEQ ID NO: 311844 - RNA, 23 nt, Human
augcaaccuccgccuccaagguu

SEQ ID NO: 311845 - RNA, 20 nt, Human
augggguuucaccauauugg

SEQ ID NO: 311846 - RNA, 21 nt, Human
augggguuucaccauauuggu

SEQ ID NO: 311847 - RNA, 25 nt, Human
auuaaaaauuucauaauucccuuuc

SEQ ID NO: 311848 - RNA, 20 nt, Human
auuacagguaugagccacug

SEQ ID NO: 311849 - RNA, 18 nt, Human
auucuccugccuuagccu

SEQ ID NO: 311850 - RNA, 24 nt, Human
auuuuaguagagaugggguuucac

SEQ ID NO: 311851 - RNA, 24 nt, Human
caaagugcuggcauuacagguaug

SEQ ID NO: 311852 - RNA, 24 nt, Human
caaaguguuaggauuacaggcgug

SEQ ID NO: 311853 - RNA, 20 nt, Human
caagugauucuccugccuua

SEQ ID NO: 311854 - RNA, 22 nt, Human
caagugauucuccugccuuagc

SEQ ID NO: 311855 - RNA, 23 nt, Human
caaucucagcucaccccaaccuc

SEQ ID NO: 311856 - RNA, 22 nt, Human
caccauauuggucugaaacucc

SEQ ID NO: 311857 - RNA, 23 nt, Human
caccccaaccucugccuccuggg

SEQ ID NO: 311858 - RNA, 19 nt, Human
caccuggcaaaacugccag

SEQ ID NO: 311859 - RNA, 22 nt, Human
cagagcuaaguuugcaaccacg

SEQ ID NO: 311860 - RNA, 18 nt, Human
cagcagcgguugccgaaa

SEQ ID NO: 311861 - RNA, 22 nt, Human
cagcagcgguugccgaaaaugc

SEQ ID NO: 311862 - RNA, 24 nt, Human
cagcagugggauuagaauccaugc

SEQ ID NO: 311863 - RNA, 22 nt, Human
cagugaguuucgagcgagauuu

SEQ ID NO: 311864 - RNA, 24 nt, Human
cauguuggccaggcuggucucaaa

SEQ ID NO: 311865 - RNA, 24 nt, Human
cauuacagguaugagccacugugc

SEQ ID NO: 311866 - RNA, 21 nt, Human
ccaaagugcuggcauuacagg

SEQ ID NO: 311867 - RNA, 21 nt, Human
ccaaagugcuggcauuacagg

SEQ ID NO: 311868 - RNA, 24 nt, Human
ccaaagugcuggcauuacagguau

SEQ ID NO: 311869 - RNA, 22 nt, Human
ccaaaguguuaggauuacaggc

SEQ ID NO: 311870 - RNA, 24 nt, Human
ccaaaguguuaggauuacaggcgu

SEQ ID NO: 311871 - RNA, 19 nt, Human
ccauguuggccaggcuggu

SEQ ID NO: 311872 - RNA, 23 nt, Human
ccccaaccucugccuccuggguu

SEQ ID NO: 311873 - RNA, 19 nt, Human
cccgaguagcugggaucac

SEQ ID NO: 311874 - RNA, 22 nt, Human
cccgccuuggccucccaaagug

SEQ ID NO: 311875 - RNA, 21 nt, Human
ccuccuggguucaagugauuc

SEQ ID NO: 311876 - RNA, 24 nt, Human
ccuccuggguucaagugauucucc

SEQ ID NO: 311877 - RNA, 22 nt, Human
ccucugccuccuggguucaagu

SEQ ID NO: 311878 - RNA, 23 nt, Human
ccugaccucaggugaucugucug

SEQ ID NO: 311879 - RNA, 24 nt, Human
ccugaccucgugaucugcccgccu

SEQ ID NO: 311880 - RNA, 26 nt, Human
ccugaccucgugaucugcccgccuug

SEQ ID NO: 311881 - RNA, 24 nt, Human
ccugccuuagccucccgaguagcu

SEQ ID NO: 311882 - RNA, 23 nt, Human
ccuggguucaagugauucuccuc

SEQ ID NO: 311883 - RNA, 23 nt, Human
ccuggguucaagugauucuccug

SEQ ID NO: 311884 - RNA, 24 nt, Human
cgcucuguugcccaggcuggagcg

SEQ ID NO: 311885 - RNA, 24 nt, Human
cucaccccaaccucugccuccugg

SEQ ID NO: 311886 - RNA, 22 nt, Human
cucagccuccaaguagcuggga

SEQ ID NO: 311887 - RNA, 26 nt, Human
cuccugaccucaggugaucugucugc

SEQ ID NO: 311888 - RNA, 24 nt, Human
cuccugaccucgugaucugcccgc

SEQ ID NO: 311889 - RNA, 21 nt, Human
cuccuggguucaagugauucu

SEQ ID NO: 311890 - RNA, 24 nt, Human
cucgcucuguugcccaggcuggag

SEQ ID NO: 311891 - RNA, 24 nt, Human
cucgcucuguugcccaggcuggag

SEQ ID NO: 311892 - RNA, 20 nt, Human
cucuguugcccaggcuggag

SEQ ID NO: 311893 - RNA, 18 nt, Human
cugccucggccucccaaa

SEQ ID NO: 311894 - RNA, 23 nt, Human
cuuagccucccgaguagcuggga

SEQ ID NO: 311895 - RNA, 24 nt, Human
gaccucaggugaucugucugccuc

SEQ ID NO: 311896 - RNA, 21 nt, Human
gaccucgugaucugcccgccu

SEQ ID NO: 311897 - RNA, 24 nt, Human
gaccucgugaucugcccgccuugg

SEQ ID NO: 311898 - RNA, 19 nt, Human
gagaaugugaagaaaauga

SEQ ID NO: 311899 - RNA, 24 nt, Human
gagaugggguuucaccauauuggu

SEQ ID NO: 311900 - RNA, 24 nt, Human
gaguagcugggaucacaggcgugc

SEQ ID NO: 311901 - RNA, 24 nt, Human
gaugguuuugccauguuggccagg

SEQ ID NO: 311902 - RNA, 18 nt, Human
gauuacaggcgugagcca

SEQ ID NO: 311903 - RNA, 21 nt, Human
gauuacaggcgugagccauug

SEQ ID NO: 311904 - RNA, 24 nt, Human
gauuacaggcgugagccauuguac

SEQ ID NO: 311905 - RNA, 18 nt, Human
gccauguuggccaggcug

SEQ ID NO: 311906 - RNA, 20 nt, Human
gccauguuggccaggcuggu

SEQ ID NO: 311907 - RNA, 20 nt, Human
gccuuagccucccgaguagc

SEQ ID NO: 311908 - RNA, 22 nt, Human
gccuuggccucccaaagugcug

SEQ ID NO: 311909 - RNA, 27 nt, Human
gcucuguugcccaggcuggagcgcacu

SEQ ID NO: 311910 - RNA, 25 nt, Human
gcucuguugcccaggcuggagugcg

SEQ ID NO: 311911 - RNA, 23 nt, Human
gcuggucucaaacuccugaccuc

SEQ ID NO: 311912 - RNA, 23 nt, Human
ggagucucgcucuguugcccagg

SEQ ID NO: 311913 - RNA, 24 nt, Human
ggauuacaggcgugagccauugua

SEQ ID NO: 311914 - RNA, 18 nt, Human
ggcaaaacugccagcagc

SEQ ID NO: 311915 - RNA, 21 nt, Human
ggcauuacagguaugagccac

SEQ ID NO: 311916 - RNA, 24 nt, Human
ggcuggucucaaacuccugaccuc

SEQ ID NO: 311917 - RNA, 18 nt, Human
gggguuucaccauauugg

SEQ ID NO: 311918 - RNA, 20 nt, Human
gguuuugccauguuggccag

SEQ ID NO: 311919 - RNA, 21 nt, Human
gguuuugccauguuggccagg

SEQ ID NO: 311920 - RNA, 21 nt, Human
guagagaugguuuugccaugu

SEQ ID NO: 311921 - RNA, 24 nt, Human
gugauucuccugccuuagccuccc

SEQ ID NO: 311922 - RNA, 22 nt, Human
uaacaaacaccuggcaaaacug

SEQ ID NO: 311923 - RNA, 23 nt, Human
uaauuuuucuauuuuuaguagag

SEQ ID NO: 311924 - RNA, 24 nt, Human
uaauuuuucuauuuuuaguagaga

SEQ ID NO: 311925 - RNA, 27 nt, Human
uaauuuuuuuuguaauuuuaguagaga

SEQ ID NO: 311926 - RNA, 19 nt, Human
uacaggcgugagccauugu

SEQ ID NO: 311927 - RNA, 22 nt, Human
uacagguaugagccacugugcc

SEQ ID NO: 311928 - RNA, 23 nt, Human
uacauuuaaaacccuuuuuuaaa

SEQ ID NO: 311929 - RNA, 18 nt, Human
uagcaugaucucagcuca

SEQ ID NO: 311930 - RNA, 19 nt, Human
uaggauuacaggcgugagc

SEQ ID NO: 311931 - RNA, 21 nt, Human
uaggauuacaggcgugagcca

SEQ ID NO: 311932 - RNA, 21 nt, Human
uaggauuacaggcgugagcca

SEQ ID NO: 311933 - RNA, 22 nt, Human
uaggauuacaggcgugagccau

SEQ ID NO: 311934 - RNA, 24 nt, Human
uaggauuacaggcgugagccauug

SEQ ID NO: 311935 - RNA, 31 nt, Human
uaggauuacaggcgugagccauuguacccgg

SEQ ID NO: 311936 - RNA, 19 nt, Human
uaguagagaugggguuuca

SEQ ID NO: 311937 - RNA, 23 nt, Human
uaguagagaugggguuucaccau

SEQ ID NO: 311938 - RNA, 26 nt, Human
uaguagagaugggguuucaccauauu

SEQ ID NO: 311939 - RNA, 22 nt, Human
uaguagagaugguuuugccaug

SEQ ID NO: 311940 - RNA, 23 nt, Human
uaucuccauuuuacagaugagaa

SEQ ID NO: 311941 - RNA, 26 nt, Human
ucaagguaacaaacaccuggcaaaac

SEQ ID NO: 311942 - RNA, 19 nt, Human
ucaagugauucuccugccu

SEQ ID NO: 311943 - RNA, 18 nt, Human
ucaaugcaaccuccgccu

SEQ ID NO: 311944 - RNA, 19 nt, Human
ucaaugcaaccuccgccuc

SEQ ID NO: 311945 - RNA, 24 nt, Human
ucaaugcaaccuccgccuccaagg

SEQ ID NO: 311946 - RNA, 27 nt, Human
ucaaugcaaccuccgccuccaagguua

SEQ ID NO: 311947 - RNA, 24 nt, Human
ucaccccaaccucugccuccuggg

SEQ ID NO: 311948 - RNA, 20 nt, Human
ucagggaaaucuguaaagau

SEQ ID NO: 311949 - RNA, 24 nt, Human
uccaagguuaaagcaauucuucug

SEQ ID NO: 311950 - RNA, 19 nt, Human
uccaaguagcugggaucac

SEQ ID NO: 311951 - RNA, 22 nt, Human
uccaaguagcugggaucacagg

SEQ ID NO: 311952 - RNA, 23 nt, Human
uccaaguagcugggaucacaggu

SEQ ID NO: 311953 - RNA, 23 nt, Human
ucccaaagugcuggcauuacagg

SEQ ID NO: 311954 - RNA, 24 nt, Human
ucccaaaguguuaggauuacaggc

SEQ ID NO: 311955 - RNA, 24 nt, Human
ucccgaguagcugggaucacaggc

SEQ ID NO: 311956 - RNA, 20 nt, Human
ucccuaaaugcuaaagauua

SEQ ID NO: 311957 - RNA, 24 nt, Human
uccgccuccaagguuaaagcaauu

SEQ ID NO: 311958 - RNA, 21 nt, Human
uccuggguucaagugauucuc

SEQ ID NO: 311959 - RNA, 22 nt, Human
uccuggguucaagugauucucc

SEQ ID NO: 311960 - RNA, 24 nt, Human
uccuggguucaagugauucuccug

SEQ ID NO: 311961 - RNA, 24 nt, Human
ucgcucuguugcccaggcuggagu

SEQ ID NO: 311962 - RNA, 22 nt, Human
ucuccauuuuacagaugagaau

SEQ ID NO: 311963 - RNA, 24 nt, Human
ucuccugccuuagccucccgagua

SEQ ID NO: 311964 - RNA, 19 nt, Human
ucucgcucuguugcccagg

SEQ ID NO: 311965 - RNA, 19 nt, Human
ucucgcucuguugcccagg

SEQ ID NO: 311966 - RNA, 23 nt, Human
ucucgcucuguugcccaggcugg

SEQ ID NO: 311967 - RNA, 23 nt, Human
ucucgcucuguugcccaggcugg

SEQ ID NO: 311968 - RNA, 24 nt, Human
ucucgcucuguugcccaggcugga

SEQ ID NO: 311969 - RNA, 24 nt, Human
ucucgcucuguugcccaggcugga

SEQ ID NO: 311970 - RNA, 26 nt, Human
ucucgcucuguugcccaggcuggagc

SEQ ID NO: 311971 - RNA, 23 nt, Human
ucugccucagccuccaaguagcu

SEQ ID NO: 311972 - RNA, 23 nt, Human
ucuguaagguauuaucuccauuu

SEQ ID NO: 311973 - RNA, 18 nt, Human
ucuguugcccaggcugga

SEQ ID NO: 311974 - RNA, 18 nt, Human
ucuguugcccaggcugga

SEQ ID NO: 311975 - RNA, 24 nt, Human
ucuguugcccaggcuggagugcgg

SEQ ID NO: 311976 - RNA, 18 nt, Human
ugaagucucgcucuguug

SEQ ID NO: 311977 - RNA, 19 nt, Human
ugaccucaggugaucuguc

SEQ ID NO: 311978 - RNA, 24 nt, Human
ugaccucaggugaucugucugccu

SEQ ID NO: 311979 - RNA, 25 nt, Human
ugacgacggagaaaccgagaaggga

SEQ ID NO: 311980 - RNA, 25 nt, Human
ugagaaugugaagaaaaugacuugu

SEQ ID NO: 311981 - RNA, 22 nt, Human
ugagaugaagucucgcucuguu

SEQ ID NO: 311982 - RNA, 22 nt, Human
ugagauggagucucgcucuguu

SEQ ID NO: 311983 - RNA, 24 nt, Human
ugccauguuggccaggcuggucuc

SEQ ID NO: 311984 - RNA, 27 nt, Human
ugccauguuggccaggcuggucucaaa

SEQ ID NO: 311985 - RNA, 19 nt, Human
ugcccaggcuggagugcgg

SEQ ID NO: 311986 - RNA, 21 nt, Human
ugcccaggcuggagugcggug

SEQ ID NO: 311987 - RNA, 21 nt, Human
ugcccaggcuggagugcggug

SEQ ID NO: 311988 - RNA, 24 nt, Human
ugcccaggcuggagugcgguggcg

SEQ ID NO: 311989 - RNA, 20 nt, Human
ugcccgggcaaccgucccca

SEQ ID NO: 311990 - RNA, 24 nt, Human
ugccgaaaaugcuggguucggugc

SEQ ID NO: 311991 - RNA, 23 nt, Human
ugccucagccuccaaguagcugg

SEQ ID NO: 311992 - RNA, 22 nt, Human
ugccuccuggguucaagugauu

SEQ ID NO: 311993 - RNA, 22 nt, Human
ugccucggccucccaaaguguu

SEQ ID NO: 311994 - RNA, 24 nt, Human
ugccuggcuaauuuuucuauuuuu

SEQ ID NO: 311995 - RNA, 21 nt, Human
ugccugugaagagaugggacc

SEQ ID NO: 311996 - RNA, 23 nt, Human
ugccugugaagagaugggaccgu

SEQ ID NO: 311997 - RNA, 24 nt, Human
ugccuuagccucccgaguagcugg

SEQ ID NO: 311998 - RNA, 23 nt, Human
ugcgguggcgcaaucucagcuca

SEQ ID NO: 311999 - RNA, 23 nt, Human
uggagcgcacuagcaugaucuca

SEQ ID NO: 312000 - RNA, 24 nt, Human
uggagucucgcucuguugcccagg

SEQ ID NO: 312001 - RNA, 18 nt, Human
uggagugcgguggcgcaa

SEQ ID NO: 312002 - RNA, 23 nt, Human
uggagugcgguggcgcaaucuca

SEQ ID NO: 312003 - RNA, 24 nt, Human
uggagugcgguggcgcaaucucag

SEQ ID NO: 312004 - RNA, 21 nt, Human
uggcauuacagguaugagcca

SEQ ID NO: 312005 - RNA, 22 nt, Human
uggcauuacagguaugagccac

SEQ ID NO: 312006 - RNA, 24 nt, Human
uggcauuacagguaugagccacug

SEQ ID NO: 312007 - RNA, 24 nt, Human
uggccaggcuggucucaaacuccu

SEQ ID NO: 312008 - RNA, 24 nt, Human
uggcgcaaucucagcucaccccaa

SEQ ID NO: 312009 - RNA, 21 nt, Human
ugggaucacaggcgugcacca

SEQ ID NO: 312010 - RNA, 24 nt, Human
ugggaucacaggcgugcaccacca

SEQ ID NO: 312011 - RNA, 19 nt, Human
ugggguuucaccauauugg

SEQ ID NO: 312012 - RNA, 23 nt, Human
uggguucaagugauucuccugcc

SEQ ID NO: 312013 - RNA, 24 nt, Human
uggguucaagugauucuccugccu

SEQ ID NO: 312014 - RNA, 21 nt, Human
uggucugaaacuccugaccuc

SEQ ID NO: 312015 - RNA, 22 nt, Human
ugugacgacggagaaaccgaga

SEQ ID NO: 312016 - RNA, 18 nt, Human
uuaguagagaugggguuu

SEQ ID NO: 312017 - RNA, 22 nt, Human
uuaguagagaugggguuucacc

SEQ ID NO: 312018 - RNA, 24 nt, Human
uuaguagagaugggguuucaccau

SEQ ID NO: 312019 - RNA, 22 nt, Human
uuaguagagaugguuuugccau

SEQ ID NO: 312020 - RNA, 20 nt, Human
uucaagugauucuccugccu

SEQ ID NO: 312021 - RNA, 24 nt, Human
uucaagugauucuccugccuuagc

SEQ ID NO: 312022 - RNA, 24 nt, Human
uugccauguuggccaggcuggucu

SEQ ID NO: 312023 - RNA, 18 nt, Human
uugcccaggcuggagcgc

SEQ ID NO: 312024 - RNA, 24 nt, Human
uugcccaggcuggagugcgguggc

SEQ ID NO: 312025 - RNA, 18 nt, Human
uuggccucccaaagugcu

SEQ ID NO: 312026 - RNA, 20 nt, Human
uuuucuauuuuuaguagaga

SEQ ID NO: 312027 - RNA, 23 nt, Human
uuuugccauguuggccaggcugg

SEQ ID NO: 312028 - RNA, 20 nt, Human
uuuuuaguagagaugguuuu

SEQ ID NO: 312029 - RNA, 21 nt, Human
uuuuuguaauuuuaguagaga

SEQ ID NO: 312030 - RNA, 18 nt, Human
uuuuuuguaauuuuagua

SEQ ID NO: 312031 - RNA, 21 nt, Human
uuuuuuguaauuuuaguagag

SEQ ID NO: 312032 - RNA, 22 nt, Human
uuuuuuguaauuuuaguagaga

SEQ ID NO: 312033 - RNA, 24 nt, Human
uuuuuuguaauuuuaguagagaug

SEQ ID NO: 312034 - RNA, 20 nt, Human
aaaccgcuaauccgaaaaua

SEQ ID NO: 312035 - RNA, 19 nt, Human
ccucgucgucgccgccgcc

SEQ ID NO: 312036 - RNA, 19 nt, Human
ccucgucgucgccgccgcc

SEQ ID NO: 312037 - RNA, 21 nt, Human
ccuugcuuuucagaccuuuuu

SEQ ID NO: 312038 - RNA, 20 nt, Human
cgccgccuuccuccuccggc

SEQ ID NO: 312039 - RNA, 26 nt, Human
cgccuuccuccuccggcuccaccccc

SEQ ID NO: 312040 - RNA, 22 nt, Human
cucgucgucgccgccgccuucc

SEQ ID NO: 312041 - RNA, 21 nt, Human
cuuccucgucgucgccgccgc

SEQ ID NO: 312042 - RNA, 20 nt, Human
ucgccgccgccuuccuccuc

SEQ ID NO: 312043 - RNA, 25 nt, Human
ucuggaacaguuuacuccguuauug

SEQ ID NO: 312044 - RNA, 19 nt, Human
ucuguuauauuuuuacgcu

SEQ ID NO: 312045 - RNA, 21 nt, Human
ucuuccucgucgucgccgccg

SEQ ID NO: 312046 - RNA, 21 nt, Human
ucuuccucgucgucgccgcua

SEQ ID NO: 312047 - RNA, 24 nt, Human
uuaauaaaccgcuaauccgaaaau

SEQ ID NO: 312048 - RNA, 26 nt, Human
uuaauaaaccgcuaauccgaaaauaa

SEQ ID NO: 312049 - RNA, 22 nt, Human
uuacauuauuucuucuguuaua

SEQ ID NO: 312050 - RNA, 23 nt, Human
uuccucgucgucgccgccgccuu

SEQ ID NO: 312051 - RNA, 24 nt, Human
uuuuacauuauuucuucuguuaua

SEQ ID NO: 312052 - RNA, 18 nt, Human
uuuuuuuuuuuuuuuuug

SEQ ID NO: 312053 - RNA, 18 nt, Human
aaacuuaaaaucagaaag

SEQ ID NO: 312054 - RNA, 24 nt, Human
aaagggcuggcauuacagguguga

SEQ ID NO: 312055 - RNA, 24 nt, Human
aacaaaguaguuaagugcugaaaa

SEQ ID NO: 312056 - RNA, 23 nt, Human
aaguaguucuccugccucagcca

SEQ ID NO: 312057 - RNA, 26 nt, Human
aauuuuaauuaugaaugcucaugaag

SEQ ID NO: 312058 - RNA, 22 nt, Human
acauaauugacaagaaaugaaa

SEQ ID NO: 312059 - RNA, 23 nt, Human
agacacuaggaucaaugccaaca

SEQ ID NO: 312060 - RNA, 24 nt, Human
aggcgugugccaccaagccuggcu

SEQ ID NO: 312061 - RNA, 18 nt, Human
aggcugcgcgagcgacgg

SEQ ID NO: 312062 - RNA, 18 nt, Human
agggcuggcauuacaggu

SEQ ID NO: 312063 - RNA, 24 nt, Human
aguacaguggcaagaucuuggcug

SEQ ID NO: 312064 - RNA, 19 nt, Human
aguagcugggauuacaggc

SEQ ID NO: 312065 - RNA, 23 nt, Human
aguagcugggauuacaggcgugu

SEQ ID NO: 312066 - RNA, 24 nt, Human
auagcacaaaaguacuuggagaaa

SEQ ID NO: 312067 - RNA, 21 nt, Human
auccuucuuuauagauuugug

SEQ ID NO: 312068 - RNA, 20 nt, Human
auuacaggugugagccauug

SEQ ID NO: 312069 - RNA, 22 nt, Human
caaaaguacuuggagaaacuac

SEQ ID NO: 312070 - RNA, 22 nt, Human
caaguaguucuccugccucagc

SEQ ID NO: 312071 - RNA, 19 nt, Human
caccaagccuggcuaauuu

SEQ ID NO: 312072 - RNA, 24 nt, Human
caccauguuggcgaggcuggucuc

SEQ ID NO: 312073 - RNA, 21 nt, Human
cagcuuugaccucccagguuc

SEQ ID NO: 312074 - RNA, 23 nt, Human
cagcuuugaccucccagguucaa

SEQ ID NO: 312075 - RNA, 20 nt, Human
caggcuggaguacaguggca

SEQ ID NO: 312076 - RNA, 24 nt, Human
cagggucucaccauguuggcgagg

SEQ ID NO: 312077 - RNA, 24 nt, Human
cauuacaggugugagccauugugc

SEQ ID NO: 312078 - RNA, 24 nt, Human
ccaaagggcuggcauuacaggugu

SEQ ID NO: 312079 - RNA, 23 nt, Human
ccaacgcccuucccagaaugcag

SEQ ID NO: 312080 - RNA, 23 nt, Human
cccagguucaaguaguucuccug

SEQ ID NO: 312081 - RNA, 19 nt, Human
ccccgcccucuccuuucuc

SEQ ID NO: 312082 - RNA, 24 nt, Human
ccucccagguucaaguaguucucc

SEQ ID NO: 312083 - RNA, 24 nt, Human
ccuccugcuuuucuacccgucguc

SEQ ID NO: 312084 - RNA, 24 nt, Human
ccucuccuuucuccgcuccuccug

SEQ ID NO: 312085 - RNA, 23 nt, Human
ccugaccucaagugaucugccca

SEQ ID NO: 312086 - RNA, 24 nt, Human
ccugccucagccaucugaguagcu

SEQ ID NO: 312087 - RNA, 22 nt, Human
cuaaauaaaucugcaaacuuaa

SEQ ID NO: 312088 - RNA, 22 nt, Human
cuacuauuaagcugucuucuuu

SEQ ID NO: 312089 - RNA, 23 nt, Human
cucaagugaucugcccauucggc

SEQ ID NO: 312090 - RNA, 19 nt, Human
cucaugaaguauuuaaaga

SEQ ID NO: 312091 - RNA, 19 nt, Human
cuccuuucuccgcuccucc

SEQ ID NO: 312092 - RNA, 23 nt, Human
cucuucaggcuggaguacagugg

SEQ ID NO: 312093 - RNA, 22 nt, Human
cugaguagcugggauuacaggc

SEQ ID NO: 312094 - RNA, 24 nt, Human
cugaguagcugggauuacaggcgu

SEQ ID NO: 312095 - RNA, 24 nt, Human
cugcagcuuugaccucccagguuc

SEQ ID NO: 312096 - RNA, 22 nt, Human
cuggcauuacaggugugagcca

SEQ ID NO: 312097 - RNA, 26 nt, Human
gaacaaauucauugauuauaaaauaa

SEQ ID NO: 312098 - RNA, 23 nt, Human
gaaucaucuuagacuaaauauuu

SEQ ID NO: 312099 - RNA, 19 nt, Human
gacagagucucgcucuuca

SEQ ID NO: 312100 - RNA, 23 nt, Human
gaccucaagugaucugcccauuc

SEQ ID NO: 312101 - RNA, 20 nt, Human
gaguagcugggauuacaggc

SEQ ID NO: 312102 - RNA, 25 nt, Human
gaguagcugggauuacaggcgugug

SEQ ID NO: 312103 - RNA, 18 nt, Human
gauuacaggcgugugcca

SEQ ID NO: 312104 - RNA, 20 nt, Human
gcaugugugaaucuuugaga

SEQ ID NO: 312105 - RNA, 23 nt, Human
gcuggucucaaacuccugaccuc

SEQ ID NO: 312106 - RNA, 24 nt, Human
ggcuggucucaaacuccugaccuc

SEQ ID NO: 312107 - RNA, 18 nt, Human
guagcugggauuacaggc

SEQ ID NO: 312108 - RNA, 18 nt, Human
guagcugggauuacaggc

SEQ ID NO: 312109 - RNA, 19 nt, Human
gucucgcucuucaggcugg

SEQ ID NO: 312110 - RNA, 22 nt, Human
gucucgcucuucaggcuggagu

SEQ ID NO: 312111 - RNA, 23 nt, Human
uaaaaauaauaaaaaaaucaccu

SEQ ID NO: 312112 - RNA, 21 nt, Human
uaaaucugcaaacuuaaaauc

SEQ ID NO: 312113 - RNA, 19 nt, Human
uaacaggauugauuuccaa

SEQ ID NO: 312114 - RNA, 20 nt, Human
uacaggcgugugccaccaag

SEQ ID NO: 312115 - RNA, 23 nt, Human
uacaggugugagccauugugccu

SEQ ID NO: 312116 - RNA, 19 nt, Human
uacaguggcaagaucuugg

SEQ ID NO: 312117 - RNA, 22 nt, Human
uagagacagggucucaccaugu

SEQ ID NO: 312118 - RNA, 24 nt, Human
uaguagagacagggucucaccaug

SEQ ID NO: 312119 - RNA, 26 nt, Human
uaguagagacagggucucaccauguu

SEQ ID NO: 312120 - RNA, 22 nt, Human
uauagauuuguggaaaguacca

SEQ ID NO: 312121 - RNA, 23 nt, Human
ucaaugccaacaaaguaguuaag

SEQ ID NO: 312122 - RNA, 19 nt, Human
uccaacuucauguugcaau

SEQ ID NO: 312123 - RNA, 23 nt, Human
ucccaaagggcuggcauuacagg

SEQ ID NO: 312124 - RNA, 26 nt, Human
ucccaaagggcuggcauuacaggugu

SEQ ID NO: 312125 - RNA, 21 nt, Human
ucccagguucaaguaguucuc

SEQ ID NO: 312126 - RNA, 24 nt, Human
ucccagguucaaguaguucuccug

SEQ ID NO: 312127 - RNA, 22 nt, Human
ucccauuccuaauuucccuuuu

SEQ ID NO: 312128 - RNA, 18 nt, Human
ucccuaccccgcccucuc

SEQ ID NO: 312129 - RNA, 25 nt, Human
ucccuaccccgcccucuccuuucuc

SEQ ID NO: 312130 - RNA, 19 nt, Human
uccuuucuccgcuccuccu

SEQ ID NO: 312131 - RNA, 18 nt, Human
ucucgcucuucaggcugg

SEQ ID NO: 312132 - RNA, 23 nt, Human
ucugaguagcugggauuacaggc

SEQ ID NO: 312133 - RNA, 24 nt, Human
ucugaguagcugggauuacaggcg

SEQ ID NO: 312134 - RNA, 23 nt, Human
ucugcaaacuuaaaaucagaaag

SEQ ID NO: 312135 - RNA, 23 nt, Human
ugacaagaaaugaaauacugcca

SEQ ID NO: 312136 - RNA, 18 nt, Human
ugaccucaagugaucugc

SEQ ID NO: 312137 - RNA, 23 nt, Human
ugacugcagcuuugaccucccag

SEQ ID NO: 312138 - RNA, 24 nt, Human
ugacugcagcuuugaccucccagg

SEQ ID NO: 312139 - RNA, 22 nt, Human
ugagaagaacucauugauagca

SEQ ID NO: 312140 - RNA, 23 nt, Human
ugagaagaacucauugauagcac

SEQ ID NO: 312141 - RNA, 21 nt, Human
ugagacagagucucgcucuuc

SEQ ID NO: 312142 - RNA, 18 nt, Human
ugagagcccuuacaaaug

SEQ ID NO: 312143 - RNA, 18 nt, Human
ugccauuuaaaaguccug

SEQ ID NO: 312144 - RNA, 24 nt, Human
ugccucagccaucugaguagcugg

SEQ ID NO: 312145 - RNA, 22 nt, Human
uggaaaguaccaacauaauuga

SEQ ID NO: 312146 - RNA, 24 nt, Human
uggaguacaguggcaagaucuugg

SEQ ID NO: 312147 - RNA, 21 nt, Human
uggcauuacaggugugagcca

SEQ ID NO: 312148 - RNA, 22 nt, Human
uggcauuacaggugugagccau

SEQ ID NO: 312149 - RNA, 24 nt, Human
uggcauuacaggugugagccauug

SEQ ID NO: 312150 - RNA, 27 nt, Human
uggcauuacaggugugagccauugugc

SEQ ID NO: 312151 - RNA, 24 nt, Human
uggcgaggcuggucucaaacuccu

SEQ ID NO: 312152 - RNA, 23 nt, Human
uggcuaauuuuuuuuuuuuuuuu

SEQ ID NO: 312153 - RNA, 24 nt, Human
uggcugacugcagcuuugaccucc

SEQ ID NO: 312154 - RNA, 18 nt, Human
ugggauuacaggcgugug

SEQ ID NO: 312155 - RNA, 19 nt, Human
ugggauuacaggcgugugc

SEQ ID NO: 312156 - RNA, 21 nt, Human
ugggauuacaggcgugugcca

SEQ ID NO: 312157 - RNA, 22 nt, Human
ugggauuacaggcgugugccac

SEQ ID NO: 312158 - RNA, 24 nt, Human
ugggauuacaggcgugugccacca

SEQ ID NO: 312159 - RNA, 18 nt, Human
uguguuuuaauacacauu

SEQ ID NO: 312160 - RNA, 24 nt, Human
uuaguagagacagggucucaccau

SEQ ID NO: 312161 - RNA, 21 nt, Human
uucaaguaguucuccugccuc

SEQ ID NO: 312162 - RNA, 23 nt, Human
uucaaguaguucuccugccucag

SEQ ID NO: 312163 - RNA, 24 nt, Human
uucuccgcuccuccugcuuuucua

SEQ ID NO: 312164 - RNA, 21 nt, Human
uugaaucaucuuagacuaaau

SEQ ID NO: 312165 - RNA, 24 nt, Human
uuuuuuaucguuuuaguagagaca

SEQ ID NO: 312166 - RNA, 23 nt, Human
uuuuuuuuuuuuuuuaucguuuu

SEQ ID NO: 312167 - RNA, 18 nt, Human
aagagucucuccaacccc

SEQ ID NO: 312168 - RNA, 21 nt, Human
acauguggaauggcuguucuc

SEQ ID NO: 312169 - RNA, 21 nt, Human
accccagagggugccggauga

SEQ ID NO: 312170 - RNA, 21 nt, Human
accuggggcuucaaaccagcc

SEQ ID NO: 312171 - RNA, 18 nt, Human
acuggguggccaggaggg

SEQ ID NO: 312172 - RNA, 18 nt, Human
agagucucuccaaccccu

SEQ ID NO: 312173 - RNA, 21 nt, Human
agcagggaagggggauaccug

SEQ ID NO: 312174 - RNA, 20 nt, Human
agcagguguggggagcccuc

SEQ ID NO: 312175 - RNA, 23 nt, Human
agccucucgacaugggggugcuc

SEQ ID NO: 312176 - RNA, 20 nt, Human
aggcccagagcccugggccc

SEQ ID NO: 312177 - RNA, 19 nt, Human
aggggcaguggugagguag

SEQ ID NO: 312178 - RNA, 20 nt, Human
auagcagggaagggggauac

SEQ ID NO: 312179 - RNA, 19 nt, Human
caaaccagccaccugcucc

SEQ ID NO: 312180 - RNA, 21 nt, Human
caggcccagagcccugggccc

SEQ ID NO: 312181 - RNA, 22 nt, Human
caguccaacucggcucuccuca

SEQ ID NO: 312182 - RNA, 21 nt, Human
ccaagagucucuccaaccccc

SEQ ID NO: 312183 - RNA, 19 nt, Human
ccagagucgguccccgggu

SEQ ID NO: 312184 - RNA, 24 nt, Human
ccagcaccaccagcugcccaggaa

SEQ ID NO: 312185 - RNA, 21 nt, Human
cccagcagcuuggccuuuccc

SEQ ID NO: 312186 - RNA, 22 nt, Human
cccagcagcuuggccuuuccca

SEQ ID NO: 312187 - RNA, 19 nt, Human
ccccggccccaagagucuc

SEQ ID NO: 312188 - RNA, 23 nt, Human
ccccugcagcuucuguccccacc

SEQ ID NO: 312189 - RNA, 18 nt, Human
cccgaccccggccccaag

SEQ ID NO: 312190 - RNA, 20 nt, Human
ccucuccccugcagcuucug

SEQ ID NO: 312191 - RNA, 22 nt, Human
ccugcagcuucuguccccaccc

SEQ ID NO: 312192 - RNA, 19 nt, Human
ccuggucucagccucucga

SEQ ID NO: 312193 - RNA, 23 nt, Human
cgggcagacacugggagccgggc

SEQ ID NO: 312194 - RNA, 21 nt, Human
cucccaacacuguccucacca

SEQ ID NO: 312195 - RNA, 18 nt, Human
cuccucagcacccccagc

SEQ ID NO: 312196 - RNA, 22 nt, Human
cuccugucugggagagggcugg

SEQ ID NO: 312197 - RNA, 20 nt, Human
cugcuguccuggucucagcc

SEQ ID NO: 312198 - RNA, 18 nt, Human
cugggccccugggccucc

SEQ ID NO: 312199 - RNA, 18 nt, Human
cuguccccacccagcagc

SEQ ID NO: 312200 - RNA, 21 nt, Human
cuuaaaauggggcaaggggcc

SEQ ID NO: 312201 - RNA, 24 nt, Human
gacacugggagccgggcagacacu

SEQ ID NO: 312202 - RNA, 21 nt, Human
gaggagucucgcagcugcggg

SEQ ID NO: 312203 - RNA, 23 nt, Human
gcagcugcggggagauggggcac

SEQ ID NO: 312204 - RNA, 18 nt, Human
gcccagagcccugggccc

SEQ ID NO: 312205 - RNA, 23 nt, Human
gccccaagagucucuccaacccc

SEQ ID NO: 312206 - RNA, 19 nt, Human
gcccgaccccggccccaag

SEQ ID NO: 312207 - RNA, 18 nt, Human
gccgcagcaggugugggg

SEQ ID NO: 312208 - RNA, 25 nt, Human
gcgcaggccagggaaucccagcucg

SEQ ID NO: 312209 - RNA, 22 nt, Human
ggaguacuggguggccaggagg

SEQ ID NO: 312210 - RNA, 21 nt, Human
ggcagacacugggagccgggc

SEQ ID NO: 312211 - RNA, 22 nt, Human
ggcaggugcgguguacucgccg

SEQ ID NO: 312212 - RNA, 20 nt, Human
ggcaguggugagguagaagg

SEQ ID NO: 312213 - RNA, 21 nt, Human
gggaagggggauaccuggggc

SEQ ID NO: 312214 - RNA, 21 nt, Human
gggaguacuggguggccagga

SEQ ID NO: 312215 - RNA, 19 nt, Human
ggugcucagcgccgcagcu

SEQ ID NO: 312216 - RNA, 25 nt, Human
guggaauggcuguucuccuaccccc

SEQ ID NO: 312217 - RNA, 18 nt, Human
uagaagaaagcuggagug

SEQ ID NO: 312218 - RNA, 22 nt, Human
uagaagaaagcuggagugcccg

SEQ ID NO: 312219 - RNA, 19 nt, Human
uccucaccaaggcuggggc

SEQ ID NO: 312220 - RNA, 18 nt, Human
ucgcugaggaagcuggug

SEQ ID NO: 312221 - RNA, 19 nt, Human
ucgguccccgggugggguc

SEQ ID NO: 312222 - RNA, 22 nt, Human
ucuccucagcacccccagccau

SEQ ID NO: 312223 - RNA, 18 nt, Human
uggaauggcuguucuccu

SEQ ID NO: 312224 - RNA, 21 nt, Human
ugggagagggcugggcagaca

SEQ ID NO: 312225 - RNA, 22 nt, Human
ugggagccgggcagacacuggg

SEQ ID NO: 312226 - RNA, 23 nt, Human
ugggagccgggcuggcucuugcu

SEQ ID NO: 312227 - RNA, 20 nt, Human
ugggccccugggccucccaa

SEQ ID NO: 312228 - RNA, 18 nt, Human
uguggggagcccuccggg

SEQ ID NO: 312229 - RNA, 22 nt, Human
uucccagcaccaccagcugccc

SEQ ID NO: 312230 - RNA, 18 nt, Human
uucccucuccccugcagc

SEQ ID NO: 312231 - RNA, 23 nt, Human
uugacagcacggcugcuucccuc

SEQ ID NO: 312232 - RNA, 24 nt, Human
uuuacugggccccugggccuccca

SEQ ID NO: 312233 - RNA, 24 nt, Human
uuugcaaaauucuucgaggggcag

SEQ ID NO: 312234 - RNA, 21 nt, Human
aaaauacuauuuccguacugu

SEQ ID NO: 312235 - RNA, 19 nt, Human
aaacagaaagaggcacuaa

SEQ ID NO: 312236 - RNA, 22 nt, Human
acaaacagaaagaggcacuaag

SEQ ID NO: 312237 - RNA, 25 nt, Human
acacuccaaccauaccaagucuuac

SEQ ID NO: 312238 - RNA, 19 nt, Human
acagauguggaaccaaagu

SEQ ID NO: 312239 - RNA, 22 nt, Human
agacagauguggaaccaaagug

SEQ ID NO: 312240 - RNA, 18 nt, Human
agggaaggaaaagcaaua

SEQ ID NO: 312241 - RNA, 22 nt, Human
aggggguauuuucugucucugg

SEQ ID NO: 312242 - RNA, 19 nt, Human
agucuaucaagacuugaaa

SEQ ID NO: 312243 - RNA, 18 nt, Human
caaagugcuaagugcaua

SEQ ID NO: 312244 - RNA, 21 nt, Human
caaauacauucauuguaugaa

SEQ ID NO: 312245 - RNA, 24 nt, Human
caacagcaaaaagauuagcuccau

SEQ ID NO: 312246 - RNA, 23 nt, Human
cacacgaugccuaccaccaccag

SEQ ID NO: 312247 - RNA, 21 nt, Human
cacaguaaguuacaaaaggca

SEQ ID NO: 312248 - RNA, 20 nt, Human
cacaguaaguuacaaaaggg

SEQ ID NO: 312249 - RNA, 23 nt, Human
cagaacaggauaccucuugaaga

SEQ ID NO: 312250 - RNA, 21 nt, Human
cagacagauguggaaccaaag

SEQ ID NO: 312251 - RNA, 27 nt, Human
cagggugaaaccaaaucuuuaucugcc

SEQ ID NO: 312252 - RNA, 22 nt, Human
cauucauuguaugaauuaggga

SEQ ID NO: 312253 - RNA, 27 nt, Human
cauuccuacacuccaaccauaccaagu

SEQ ID NO: 312254 - RNA, 18 nt, Human
ccacaaacagaaagaggc

SEQ ID NO: 312255 - RNA, 23 nt, Human
cccagacagauguggaaccaaag

SEQ ID NO: 312256 - RNA, 19 nt, Human
ccuacacuccaaccauacc

SEQ ID NO: 312257 - RNA, 19 nt, Human
cgaugccuaccaccaccag

SEQ ID NO: 312258 - RNA, 23 nt, Human
cuaccaccaccagggugaaacca

SEQ ID NO: 312259 - RNA, 20 nt, Human
gccacaguaaguuacaaaag

SEQ ID NO: 312260 - RNA, 20 nt, Human
guucuuuccaggugacugca

SEQ ID NO: 312261 - RNA, 18 nt, Human
uaaguuacaaaaggcaaa

SEQ ID NO: 312262 - RNA, 18 nt, Human
uagaauucauaauuuauu

SEQ ID NO: 312263 - RNA, 21 nt, Human
uaggcuaagucuaucaagacu

SEQ ID NO: 312264 - RNA, 23 nt, Human
uauucuacuucccccacgccccc

SEQ ID NO: 312265 - RNA, 27 nt, Human
ucccccacgcccccagaaguuuuugau

SEQ ID NO: 312266 - RNA, 18 nt, Human
ucuacuucccccacgccc

SEQ ID NO: 312267 - RNA, 23 nt, Human
ucuguucuuuccaggugacugca

SEQ ID NO: 312268 - RNA, 22 nt, Human
ugaauauucauuccuacacucc

SEQ ID NO: 312269 - RNA, 19 nt, Human
ugaauuagggaaggaaaag

SEQ ID NO: 312270 - RNA, 26 nt, Human
ugaccugcaauaaaaacaucugaucu

SEQ ID NO: 312271 - RNA, 23 nt, Human
ugagguaggugaaaggguaaucu

SEQ ID NO: 312272 - RNA, 21 nt, Human
ugcauauuucaagcaucuguu

SEQ ID NO: 312273 - RNA, 21 nt, Human
uuaaaauacuauuuccguacu

SEQ ID NO: 312274 - RNA, 22 nt, Human
uuacaaaaggcaaauucauaga

SEQ ID NO: 312275 - RNA, 24 nt, Human
uuacuaggcuaagucuaucaagac

SEQ ID NO: 312276 - RNA, 18 nt, Human
uucauaauuuauuagcca

SEQ ID NO: 312277 - RNA, 19 nt, Human
uucccccacgcccccagaa

SEQ ID NO: 312278 - RNA, 18 nt, Human
uucccugggaggacuuca

SEQ ID NO: 312279 - RNA, 20 nt, Human
uuuuuuuuuuuuuuucucau

SEQ ID NO: 312280 - RNA, 20 nt, Human
aaaaaaaaagaagggaaaag

SEQ ID NO: 312281 - RNA, 20 nt, Human
aaaaagccugcgccgccucc

SEQ ID NO: 312282 - RNA, 22 nt, Human
aaaauacccuuuacccgccccg

SEQ ID NO: 312283 - RNA, 21 nt, Human
aaaggaaaaaaaaagaaggga

SEQ ID NO: 312284 - RNA, 20 nt, Human
aagaagaaaaaggguaacga

SEQ ID NO: 312285 - RNA, 19 nt, Human
aagccggaggaggggaagg

SEQ ID NO: 312286 - RNA, 19 nt, Human
aaggaccuccccgaguugg

SEQ ID NO: 312287 - RNA, 24 nt, Human
aaggaucuucaauuuggggacagg

SEQ ID NO: 312288 - RNA, 20 nt, Human
acaaaaagccugcuguccga

SEQ ID NO: 312289 - RNA, 20 nt, Human
acaaaaggcagcuuuagcuu

SEQ ID NO: 312290 - RNA, 19 nt, Human
agacaaaaggcagcuuuag

SEQ ID NO: 312291 - RNA, 23 nt, Human
agacaagaaucugcaucagaaac

SEQ ID NO: 312292 - RNA, 21 nt, Human
aggaaaaaaaaagaagggaaa

SEQ ID NO: 312293 - RNA, 25 nt, Human
aggaaaaaaaaagaagggaaaagga

SEQ ID NO: 312294 - RNA, 24 nt, Human
aggaaaaagccggaggaggggaag

SEQ ID NO: 312295 - RNA, 21 nt, Human
aggcaagaacugcacggcagc

SEQ ID NO: 312296 - RNA, 21 nt, Human
aggcagcuuuagcuuuguucu

SEQ ID NO: 312297 - RNA, 18 nt, Human
aggcaggggguggguggg

SEQ ID NO: 312298 - RNA, 19 nt, Human
aggcagggggugggugggg

SEQ ID NO: 312299 - RNA, 20 nt, Human
aggcaggggguggguggggu

SEQ ID NO: 312300 - RNA, 18 nt, Human
agggggugggugggguag

SEQ ID NO: 312301 - RNA, 20 nt, Human
agggggugggugggguagga

SEQ ID NO: 312302 - RNA, 22 nt, Human
agggggugggugggguaggagg

SEQ ID NO: 312303 - RNA, 22 nt, Human
aguaaccggguuccugaacggc

SEQ ID NO: 312304 - RNA, 19 nt, Human
cacucacagcaggaacuac

SEQ ID NO: 312305 - RNA, 21 nt, Human
cagaaguucaccgggagcucu

SEQ ID NO: 312306 - RNA, 24 nt, Human
cagcacgggcaagcugcccugggc

SEQ ID NO: 312307 - RNA, 20 nt, Human
ccaaaaaggaaaaaaaaaga

SEQ ID NO: 312308 - RNA, 21 nt, Human
ccccgcaucaagccacaggca

SEQ ID NO: 312309 - RNA, 21 nt, Human
cccgaguugggaggaaaaagc

SEQ ID NO: 312310 - RNA, 18 nt, Human
cccuagcccgcugccgca

SEQ ID NO: 312311 - RNA, 18 nt, Human
cccuucuuucccuuaccg

SEQ ID NO: 312312 - RNA, 19 nt, Human
ccgcugccgcaccccacgu

SEQ ID NO: 312313 - RNA, 20 nt, Human
ccgggaaggaccuccccgag

SEQ ID NO: 312314 - RNA, 22 nt, Human
cgaguugggaggaaaaagccgg

SEQ ID NO: 312315 - RNA, 22 nt, Human
cgcaaaccucacuacaaaaagc

SEQ ID NO: 312316 - RNA, 23 nt, Human
cgccccgugagggaggcaagaac

SEQ ID NO: 312317 - RNA, 24 nt, Human
cggaggaggggaagguggcggagg

SEQ ID NO: 312318 - RNA, 18 nt, Human
cggccaccgggaaggacc

SEQ ID NO: 312319 - RNA, 20 nt, Human
cggcgaaauaaggagcgaaa

SEQ ID NO: 312320 - RNA, 18 nt, Human
cgggcaagcugcccuggg

SEQ ID NO: 312321 - RNA, 19 nt, Human
cucccaaaaaggaaaaaaa

SEQ ID NO: 312322 - RNA, 20 nt, Human
cugccgcaccccacgugccc

SEQ ID NO: 312323 - RNA, 22 nt, Human
gaaaaaaaaagaagggaaaagg

SEQ ID NO: 312324 - RNA, 23 nt, Human
gaaauaaggagcgaaaggagccc

SEQ ID NO: 312325 - RNA, 23 nt, Human
gacaagaaucugcaucagaaacg

SEQ ID NO: 312326 - RNA, 18 nt, Human
gaggaggggaagguggcg

SEQ ID NO: 312327 - RNA, 25 nt, Human
gaggggaagguggcggagggaagga

SEQ ID NO: 312328 - RNA, 22 nt, Human
gcuguaaccacucacagcagga

SEQ ID NO: 312329 - RNA, 19 nt, Human
ggaaaaaaaaagaagggaa

SEQ ID NO: 312330 - RNA, 25 nt, Human
ggaaggaucuucaauuuggggaaag

SEQ ID NO: 312331 - RNA, 21 nt, Human
ggacaggcagggggugggugg

SEQ ID NO: 312332 - RNA, 20 nt, Human
ggaggaaaaagccggaggag

SEQ ID NO: 312333 - RNA, 18 nt, Human
ggcgcaaaccucacuaca

SEQ ID NO: 312334 - RNA, 18 nt, Human
ggcggccaccgggaagga

SEQ ID NO: 312335 - RNA, 18 nt, Human
gggaagguggcggaggga

SEQ ID NO: 312336 - RNA, 20 nt, Human
ggggugggugggguaggagg

SEQ ID NO: 312337 - RNA, 20 nt, Human
uaaaauaacagacaaaaggc

SEQ ID NO: 312338 - RNA, 20 nt, Human
uaaaauaacagacaaaaggc

SEQ ID NO: 312339 - RNA, 22 nt, Human
uaaaauacccuuuacccgcccc

SEQ ID NO: 312340 - RNA, 21 nt, Human
uaacagcacaaguggagaaca

SEQ ID NO: 312341 - RNA, 24 nt, Human
uacaaaaagccugcgccgccuccg

SEQ ID NO: 312342 - RNA, 27 nt, Human
uaccggaaauuuuucagcucccaaaaa

SEQ ID NO: 312343 - RNA, 22 nt, Human
uagaacaccacugggccaguga

SEQ ID NO: 312344 - RNA, 26 nt, Human
ucacaagguauuuauguacaacggag

SEQ ID NO: 312345 - RNA, 23 nt, Human
ucccuuaccggaaauuuuucagc

SEQ ID NO: 312346 - RNA, 19 nt, Human
ucugcaucagaaacgggau

SEQ ID NO: 312347 - RNA, 26 nt, Human
ugggggaggaagaagaaaaaggggag

SEQ ID NO: 312348 - RNA, 24 nt, Human
ugggguaggagguagaacaccacu

SEQ ID NO: 312349 - RNA, 19 nt, Human
ugucucucccccuuccggg

SEQ ID NO: 312350 - RNA, 21 nt, Human
uucagcucccaaaaaggaaaa

SEQ ID NO: 312351 - RNA, 23 nt, Human
uucuccaaccgucccggccgcgc

SEQ ID NO: 312352 - RNA, 23 nt, Human
aaacaccacugcaucccugguaa

SEQ ID NO: 312353 - RNA, 21 nt, Human
aacgagaagagucugaagaga

SEQ ID NO: 312354 - RNA, 23 nt, Human
aacugcuuugugcauguuccuau

SEQ ID NO: 312355 - RNA, 23 nt, Human
aagaagcucaaccaacaguagac

SEQ ID NO: 312356 - RNA, 24 nt, Human
aagaagcucaaccaacaguagacc

SEQ ID NO: 312357 - RNA, 18 nt, Human
aagcgcuagcaggccagc

SEQ ID NO: 312358 - RNA, 22 nt, Human
aagcgcuagcaggccagcccug

SEQ ID NO: 312359 - RNA, 21 nt, Human
accagacaucuaagguacaac

SEQ ID NO: 312360 - RNA, 26 nt, Human
agacaucuaagguacaacugaaaaug

SEQ ID NO: 312361 - RNA, 23 nt, Human
auaaacacuuuuaaaaagacaac

SEQ ID NO: 312362 - RNA, 24 nt, Human
auugcaaaaauaaacacuuuuaaa

SEQ ID NO: 312363 - RNA, 21 nt, Human
caagaagcucaaccaacagua

SEQ ID NO: 312364 - RNA, 19 nt, Human
cacugcugccaauuauuaa

SEQ ID NO: 312365 - RNA, 25 nt, Human
caggccagcccuggggcaagaacug

SEQ ID NO: 312366 - RNA, 21 nt, Human
caguaaagaccuauccugccu

SEQ ID NO: 312367 - RNA, 24 nt, Human
cagugcugagggguuagggccaga

SEQ ID NO: 312368 - RNA, 19 nt, Human
ccaagaagcucaaccaaca

SEQ ID NO: 312369 - RNA, 19 nt, Human
ccagcccuggggcaagaac

SEQ ID NO: 312370 - RNA, 20 nt, Human
cccauauccagcugcuggcc

SEQ ID NO: 312371 - RNA, 23 nt, Human
cccccugaauaaaggcuauggca

SEQ ID NO: 312372 - RNA, 22 nt, Human
ccuaaacaccacugcaucccug

SEQ ID NO: 312373 - RNA, 18 nt, Human
ccugccuaaacaccacug

SEQ ID NO: 312374 - RNA, 21 nt, Human
ccugcuauuccaaaagguuac

SEQ ID NO: 312375 - RNA, 18 nt, Human
cugaauaaaggcuauggc

SEQ ID NO: 312376 - RNA, 23 nt, Human
cugccuaauuaacugcuuugugc

SEQ ID NO: 312377 - RNA, 21 nt, Human
cuggaucucugguuuucucca

SEQ ID NO: 312378 - RNA, 18 nt, Human
cuguguaugugggagggg

SEQ ID NO: 312379 - RNA, 23 nt, Human
gagaaaugaaauacuccuccugu

SEQ ID NO: 312380 - RNA, 21 nt, Human
gauccucaacaccagacaucu

SEQ ID NO: 312381 - RNA, 23 nt, Human
gauccucaacaccagacaucuaa

SEQ ID NO: 312382 - RNA, 23 nt, Human
gggacaccugggaauuugaagcg

SEQ ID NO: 312383 - RNA, 24 nt, Human
gugcacuggaaacacuccagcagg

SEQ ID NO: 312384 - RNA, 25 nt, Human
uaggcccccugaauaaaggcuaugg

SEQ ID NO: 312385 - RNA, 21 nt, Human
uaucuggagacagugcugagg

SEQ ID NO: 312386 - RNA, 21 nt, Human
ucauuuuggacagaaaggguu

SEQ ID NO: 312387 - RNA, 21 nt, Human
uccaaaagguuacuucucaaa

SEQ ID NO: 312388 - RNA, 22 nt, Human
ucugguuuucuccaggcugccu

SEQ ID NO: 312389 - RNA, 22 nt, Human
ucuguacuggaucucugguuuu

SEQ ID NO: 312390 - RNA, 28 nt, Human
ugccaagaagcucaaccaacaguagacu

SEQ ID NO: 312391 - RNA, 18 nt, Human
ugccuaaacaccacugca

SEQ ID NO: 312392 - RNA, 21 nt, Human
ugcucuuuauugcaaaaauaa

SEQ ID NO: 312393 - RNA, 23 nt, Human
ugcuuugugcauguuccuaucug

SEQ ID NO: 312394 - RNA, 24 nt, Human
uguacuggaucucugguuuucucc

SEQ ID NO: 312395 - RNA, 20 nt, Human
uguuaaucaauaaauauccu

SEQ ID NO: 312396 - RNA, 22 nt, Human
aaaccauucugggagccgugga

SEQ ID NO: 312397 - RNA, 23 nt, Human
aaccaguccaacaacgugcugca

SEQ ID NO: 312398 - RNA, 22 nt, Human
aagaaggggccagggaggggac

SEQ ID NO: 312399 - RNA, 21 nt, Human
aagcuuagaagaaggggccag

SEQ ID NO: 312400 - RNA, 21 nt, Human
acagcccgggaggacggggac

SEQ ID NO: 312401 - RNA, 21 nt, Human
agaggcuuccaggagcacgag

SEQ ID NO: 312402 - RNA, 23 nt, Human
agcacuggaaacguggcccaugc

SEQ ID NO: 312403 - RNA, 19 nt, Human
agcgccaagggcagcccga

SEQ ID NO: 312404 - RNA, 18 nt, Human
agcuuaggugcgccgucc

SEQ ID NO: 312405 - RNA, 18 nt, Human
aggagcagcuggaggcca

SEQ ID NO: 312406 - RNA, 22 nt, Human
aggcagccggaauucgugugag

SEQ ID NO: 312407 - RNA, 21 nt, Human
aggccuccgagcugcuguccu

SEQ ID NO: 312408 - RNA, 22 nt, Human
agguggcuucuggcagccacag

SEQ ID NO: 312409 - RNA, 21 nt, Human
caacaacgugcugcaggcccc

SEQ ID NO: 312410 - RNA, 22 nt, Human
caagcuuagaagaaggggccag

SEQ ID NO: 312411 - RNA, 19 nt, Human
cacaggucuguugcaggga

SEQ ID NO: 312412 - RNA, 23 nt, Human
cacauggccaccaagcacuggaa

SEQ ID NO: 312413 - RNA, 23 nt, Human
caccaagcacuggaaacguggcc

SEQ ID NO: 312414 - RNA, 24 nt, Human
caccaagcacuggaaacguggccc

SEQ ID NO: 312415 - RNA, 21 nt, Human
caccucagcuuccuggagcag

SEQ ID NO: 312416 - RNA, 18 nt, Human
cagaacaccagguguggc

SEQ ID NO: 312417 - RNA, 19 nt, Human
cagagagagccccguggcg

SEQ ID NO: 312418 - RNA, 21 nt, Human
cagcagagcgaggccagccua

SEQ ID NO: 312419 - RNA, 19 nt, Human
cagcagcagagcgaggcca

SEQ ID NO: 312420 - RNA, 22 nt, Human
cagccacagcggcagugaggag

SEQ ID NO: 312421 - RNA, 27 nt, Human
cagcccgagccuuacgagagcggcagg

SEQ ID NO: 312422 - RNA, 19 nt, Human
cagcccgggaggacgggga

SEQ ID NO: 312423 - RNA, 25 nt, Human
cagcggcagugaggagcagcuggag

SEQ ID NO: 312424 - RNA, 27 nt, Human
caggaggcaggcccugcccugcccucu

SEQ ID NO: 312425 - RNA, 19 nt, Human
caggccccacugcccccca

SEQ ID NO: 312426 - RNA, 18 nt, Human
cauggccaccaagcacug

SEQ ID NO: 312427 - RNA, 22 nt, Human
ccaacaacgugcugcaggcccc

SEQ ID NO: 312428 - RNA, 21 nt, Human
ccacagggcuguguggaugga

SEQ ID NO: 312429 - RNA, 22 nt, Human
ccauucugggagccguggaugg

SEQ ID NO: 312430 - RNA, 21 nt, Human
ccccacauggccaccaagcac

SEQ ID NO: 312431 - RNA, 25 nt, Human
ccccacugccccccaugaggcuccg

SEQ ID NO: 312432 - RNA, 21 nt, Human
ccccccgccacggggccccgc

SEQ ID NO: 312433 - RNA, 21 nt, Human
cccccuccgccuaaccccgcc

SEQ ID NO: 312434 - RNA, 21 nt, Human
ccccgccacggggccccgcga

SEQ ID NO: 312435 - RNA, 18 nt, Human
ccccuugucucuccucca

SEQ ID NO: 312436 - RNA, 24 nt, Human
cccgcgcggacugcgccugcgccg

SEQ ID NO: 312437 - RNA, 19 nt, Human
cccugcccugcccucuccu

SEQ ID NO: 312438 - RNA, 21 nt, Human
ccgaaucaggcccccuccgcc

SEQ ID NO: 312439 - RNA, 23 nt, Human
ccuaaccccgccccgcgccgguu

SEQ ID NO: 312440 - RNA, 23 nt, Human
ccugcaccacggcauagcuuagg

SEQ ID NO: 312441 - RNA, 27 nt, Human
ccugcagcccagggcaguccaggaaaa

SEQ ID NO: 312442 - RNA, 22 nt, Human
ccugggccucccccuaggggag

SEQ ID NO: 312443 - RNA, 21 nt, Human
ccuugcggcacaggacugugc

SEQ ID NO: 312444 - RNA, 18 nt, Human
cgggcggaugacacuggg

SEQ ID NO: 312445 - RNA, 21 nt, Human
cuccagcacguccccugcacc

SEQ ID NO: 312446 - RNA, 21 nt, Human
cuccccaucucuccugucugu

SEQ ID NO: 312447 - RNA, 23 nt, Human
cuccgccgccgccgccgcucgca

SEQ ID NO: 312448 - RNA, 19 nt, Human
cuccucccagaggcuucca

SEQ ID NO: 312449 - RNA, 21 nt, Human
cucgcaccccuucuccgcgcg

SEQ ID NO: 312450 - RNA, 24 nt, Human
cucggaucggcagcgccaagggca

SEQ ID NO: 312451 - RNA, 19 nt, Human
cucucaggauucaacacca

SEQ ID NO: 312452 - RNA, 20 nt, Human
cugcccugcccucuccucac

SEQ ID NO: 312453 - RNA, 26 nt, Human
cugggagccguggaugggggcggagg

SEQ ID NO: 312454 - RNA, 22 nt, Human
cuguggcagcugcaagcuuaga

SEQ ID NO: 312455 - RNA, 22 nt, Human
cuguggcagcugcaagcuuaga

SEQ ID NO: 312456 - RNA, 18 nt, Human
cuucaccacaggcugugc

SEQ ID NO: 312457 - RNA, 21 nt, Human
gagcagcagcagagcgaggcc

SEQ ID NO: 312458 - RNA, 20 nt, Human
gagcggcaguuggcugagcg

SEQ ID NO: 312459 - RNA, 19 nt, Human
gagcugggguggggcuggg

SEQ ID NO: 312460 - RNA, 24 nt, Human
gagcugggguuuggugcaguuucc

SEQ ID NO: 312461 - RNA, 24 nt, Human
gcagcagagcgaggccagccuaga

SEQ ID NO: 312462 - RNA, 25 nt, Human
gcagcgccaagggcagcccgagccu

SEQ ID NO: 312463 - RNA, 18 nt, Human
gcagggaaaggcagccgg

SEQ ID NO: 312464 - RNA, 20 nt, Human
gccccgcgcuggucugucgu

SEQ ID NO: 312465 - RNA, 20 nt, Human
gcccugggccucccccuagg

SEQ ID NO: 312466 - RNA, 20 nt, Human
gccuccgccgccgccgccgc

SEQ ID NO: 312467 - RNA, 23 nt, Human
gcugggaccacagguggcuucuc

SEQ ID NO: 312468 - RNA, 22 nt, Human
ggacgcaggaggcaggcccugc

SEQ ID NO: 312469 - RNA, 21 nt, Human
ggccaccaagcacuggaaacg

SEQ ID NO: 312470 - RNA, 23 nt, Human
ggcgaaugccugaaugcagcaac

SEQ ID NO: 312471 - RNA, 20 nt, Human
gggagccguggaugggggcg

SEQ ID NO: 312472 - RNA, 18 nt, Human
ggggcggagcugggguuu

SEQ ID NO: 312473 - RNA, 22 nt, Human
ggggcucagguacacagugggg

SEQ ID NO: 312474 - RNA, 21 nt, Human
gggguuuggugcaguuuccag

SEQ ID NO: 312475 - RNA, 23 nt, Human
gugaggagcagcuggaggccaca

SEQ ID NO: 312476 - RNA, 25 nt, Human
uaagguuucgcacgucagccccaca

SEQ ID NO: 312477 - RNA, 26 nt, Human
ucagccccacauggccaccaagcacu

SEQ ID NO: 312478 - RNA, 21 nt, Human
uccagaacaccagguguggcc

SEQ ID NO: 312479 - RNA, 22 nt, Human
ucccaccagcgggcgccuccuc

SEQ ID NO: 312480 - RNA, 22 nt, Human
uccccccgccaucugucucccu

SEQ ID NO: 312481 - RNA, 25 nt, Human
uccccugcaccacggcauagcuuag

SEQ ID NO: 312482 - RNA, 21 nt, Human
uccucacaggucuguugcagg

SEQ ID NO: 312483 - RNA, 21 nt, Human
uccuccaucucuccugucugu

SEQ ID NO: 312484 - RNA, 19 nt, Human
uccugucugucccuccccu

SEQ ID NO: 312485 - RNA, 21 nt, Human
ucggaccuagaggaggccucc

SEQ ID NO: 312486 - RNA, 22 nt, Human
ucucucggaagccaccgugugg

SEQ ID NO: 312487 - RNA, 23 nt, Human
ucugucccuccccuugucucucc

SEQ ID NO: 312488 - RNA, 26 nt, Human
ugaaauaaaaaguuuuuaaucgggug

SEQ ID NO: 312489 - RNA, 19 nt, Human
ugcccugggccaccucagc

SEQ ID NO: 312490 - RNA, 22 nt, Human
ugcccugggccaccucagcuuc

SEQ ID NO: 312491 - RNA, 20 nt, Human
ugcuccugucccuccagcaa

SEQ ID NO: 312492 - RNA, 18 nt, Human
uggcccugggccuccccc

SEQ ID NO: 312493 - RNA, 18 nt, Human
uggccgcacagccucucg

SEQ ID NO: 312494 - RNA, 19 nt, Human
ugggagcccggguggucuu

SEQ ID NO: 312495 - RNA, 23 nt, Human
ugggagcccggguggucuucacc

SEQ ID NO: 312496 - RNA, 21 nt, Human
ugggagccguggaugggggcg

SEQ ID NO: 312497 - RNA, 22 nt, Human
ugggguggggcugggaccacag

SEQ ID NO: 312498 - RNA, 25 nt, Human
ugggguggggcugggaccacagguu

SEQ ID NO: 312499 - RNA, 25 nt, Human
ugucccuccccuugucucuccucca

SEQ ID NO: 312500 - RNA, 21 nt, Human
ugucccugcccagugcauccc

SEQ ID NO: 312501 - RNA, 19 nt, Human
ugugcuguccccugcaccc

SEQ ID NO: 312502 - RNA, 19 nt, Human
uguggaacugucaggcggu

SEQ ID NO: 312503 - RNA, 24 nt, Human
uuaggugcgccguccuggggucgc

SEQ ID NO: 312504 - RNA, 21 nt, Human
uucaacaccaaccaguccaac

SEQ ID NO: 312505 - RNA, 24 nt, Human
uucaacaccaaccaguccaacaac

SEQ ID NO: 312506 - RNA, 21 nt, Human
uuccagaacaccagguguggc

SEQ ID NO: 312507 - RNA, 22 nt, Human
uuggugcaguuuccagggugca

SEQ ID NO: 312508 - RNA, 24 nt, Human
uuggugcaguuuccagggugcagu

SEQ ID NO: 312509 - RNA, 24 nt, Human
uuucacaggcacguuuauuuugcu

SEQ ID NO: 312510 - RNA, 23 nt, Human
uuuccagaacaccagguguggcc

SEQ ID NO: 312511 - RNA, 24 nt, Human
aaacagcgacacuacgacucgcgc

SEQ ID NO: 312512 - RNA, 19 nt, Human
agcgaccccgcugcgcccc

SEQ ID NO: 312513 - RNA, 19 nt, Human
ccccgcugcgccccggucc

SEQ ID NO: 312514 - RNA, 20 nt, Human
cccgcaaacagcgacacuac

SEQ ID NO: 312515 - RNA, 22 nt, Human
cccgcugcgccccggucccgcc

SEQ ID NO: 312516 - RNA, 22 nt, Human
cgcggagacccgcaaacagcga

SEQ ID NO: 312517 - RNA, 21 nt, Human
gcggagacccgcaaacagcga

SEQ ID NO: 312518 - RNA, 19 nt, Human
uauaaagugagaaugaaaa

SEQ ID NO: 312519 - RNA, 21 nt, Human
ucagcgaccccgcugcgcccc

SEQ ID NO: 312520 - RNA, 19 nt, Human
aacacauacugaaaaauga

SEQ ID NO: 312521 - RNA, 19 nt, Human
aagcaccagaugccuucug

SEQ ID NO: 312522 - RNA, 23 nt, Human
acacuuagacgccgcaaccccag

SEQ ID NO: 312523 - RNA, 19 nt, Human
caacaugauaagugugaca

SEQ ID NO: 312524 - RNA, 20 nt, Human
caccagaugccuucugggau

SEQ ID NO: 312525 - RNA, 24 nt, Human
cacuuccuagaguaggaccaaggg

SEQ ID NO: 312526 - RNA, 22 nt, Human
cagcagccagacuggaccucug

SEQ ID NO: 312527 - RNA, 23 nt, Human
cagcagccagacuggaccucugg

SEQ ID NO: 312528 - RNA, 19 nt, Human
cagguaggcaggcagaguc

SEQ ID NO: 312529 - RNA, 24 nt, Human
caguaguuaagcuacaagaagcac

SEQ ID NO: 312530 - RNA, 24 nt, Human
ccaccggaaacacuuagacgccgc

SEQ ID NO: 312531 - RNA, 19 nt, Human
ccagaccagguaggcaggc

SEQ ID NO: 312532 - RNA, 24 nt, Human
ccuccacaacagcagccagacugg

SEQ ID NO: 312533 - RNA, 25 nt, Human
ccuccgacagucccugggaauccac

SEQ ID NO: 312534 - RNA, 18 nt, Human
ccucuggacaacaugaua

SEQ ID NO: 312535 - RNA, 21 nt, Human
ccuugccuccacaacagcagc

SEQ ID NO: 312536 - RNA, 19 nt, Human
cggaaacacuuagacgccg

SEQ ID NO: 312537 - RNA, 21 nt, Human
cugggaugaguugccuuccuu

SEQ ID NO: 312538 - RNA, 22 nt, Human
cuugccuccacaacagcagcca

SEQ ID NO: 312539 - RNA, 20 nt, Human
gacagucccugggaauccac

SEQ ID NO: 312540 - RNA, 23 nt, Human
gcaccagaugccuucugggauga

SEQ ID NO: 312541 - RNA, 19 nt, Human
ggcagaguccacaccuccg

SEQ ID NO: 312542 - RNA, 21 nt, Human
uaagcuacaagaagcaccaga

SEQ ID NO: 312543 - RNA, 20 nt, Human
uacaagaagcaccagaugcc

SEQ ID NO: 312544 - RNA, 24 nt, Human
uaguuaagcuacaagaagcaccag

SEQ ID NO: 312545 - RNA, 26 nt, Human
ugauaagugugacaaucacacuuccu

SEQ ID NO: 312546 - RNA, 21 nt, Human
aaugcccaugaccugagugac

SEQ ID NO: 312547 - RNA, 18 nt, Human
agagaggcuggcuucagg

SEQ ID NO: 312548 - RNA, 19 nt, Human
agccagcccuuccucaaca

SEQ ID NO: 312549 - RNA, 19 nt, Human
cacaggcgagucaguuucc

SEQ ID NO: 312550 - RNA, 23 nt, Human
cacgguggacagugagccagccc

SEQ ID NO: 312551 - RNA, 21 nt, Human
cagcucucccacugugucuuu

SEQ ID NO: 312552 - RNA, 18 nt, Human
cauuuucagcucucccac

SEQ ID NO: 312553 - RNA, 23 nt, Human
gagagcagcagaaggggugagag

SEQ ID NO: 312554 - RNA, 24 nt, Human
gagagcagcagaaggggugagagc

SEQ ID NO: 312555 - RNA, 19 nt, Human
gagcagcagaaggggugag

SEQ ID NO: 312556 - RNA, 23 nt, Human
gagcagcagaaggggugagagcg

SEQ ID NO: 312557 - RNA, 24 nt, Human
gagcgcgaccacaguugggaguac

SEQ ID NO: 312558 - RNA, 19 nt, Human
gcacccccuagcguggaca

SEQ ID NO: 312559 - RNA, 24 nt, Human
ggacagugagccagcccuuccuca

SEQ ID NO: 312560 - RNA, 18 nt, Human
ugaacaaugcccaugacc

SEQ ID NO: 312561 - RNA, 23 nt, Human
ugaccugagugacuuggcagaga

SEQ ID NO: 312562 - RNA, 24 nt, Human
ugagugacuuggcagagaggcugg

SEQ ID NO: 312563 - RNA, 18 nt, Human
ugccgccacgguggacag

SEQ ID NO: 312564 - RNA, 23 nt, Human
uggacagugagccagcccuuccu

SEQ ID NO: 312565 - RNA, 24 nt, Human
agcccgcgcagcccucccagccuu

SEQ ID NO: 312566 - RNA, 22 nt, Human
uauuacacucgggggagagagg

SEQ ID NO: 312567 - RNA, 22 nt, Human
uuuauuacacucgggggagaga

SEQ ID NO: 312568 - RNA, 21 nt, Human
accuggagcggagggucaggc

SEQ ID NO: 312569 - RNA, 18 nt, Human
agagcccccucuggcccu

SEQ ID NO: 312570 - RNA, 21 nt, Human
ccccaaggguccgccgccgcc

SEQ ID NO: 312571 - RNA, 21 nt, Human
cucccgccgccguugcgucca

SEQ ID NO: 312572 - RNA, 19 nt, Human
gcagagcccccucuggccc

SEQ ID NO: 312573 - RNA, 24 nt, Human
uaccuggagcggagggucaggcca

SEQ ID NO: 312574 - RNA, 19 nt, Human
uccagaccccaaggguccg

SEQ ID NO: 312575 - RNA, 22 nt, Human
ucccgccgccguugcguccaga

SEQ ID NO: 312576 - RNA, 23 nt, Human
ucccgccgccguugcguccagaa

SEQ ID NO: 312577 - RNA, 23 nt, Human
ugcguccagaccccaaggguccg

SEQ ID NO: 312578 - RNA, 26 nt, Human
uuaggaauauaaaaccuaaucuaugu

SEQ ID NO: 312579 - RNA, 24 nt, Human
aaaaacucacuccgcguuuccaaa

SEQ ID NO: 312580 - RNA, 22 nt, Human
aaacucacuccgcguuuccaaa

SEQ ID NO: 312581 - RNA, 22 nt, Human
aacaaucagaaaugggaagaga

SEQ ID NO: 312582 - RNA, 18 nt, Human
agguuucaggaguucacu

SEQ ID NO: 312583 - RNA, 21 nt, Human
auauauggaaaaaacagugua

SEQ ID NO: 312584 - RNA, 18 nt, Human
cagcacggaaaaacucac

SEQ ID NO: 312585 - RNA, 20 nt, Human
ccccuacacagcacggaaaa

SEQ ID NO: 312586 - RNA, 21 nt, Human
cccuacacagcacggaaaaac

SEQ ID NO: 312587 - RNA, 19 nt, Human
gaguucacugggggccuug

SEQ ID NO: 312588 - RNA, 25 nt, Human
uacaacaaucagaaaugggaagaga

SEQ ID NO: 312589 - RNA, 20 nt, Human
uacacagcacggaaaaacuc

SEQ ID NO: 312590 - RNA, 19 nt, Human
ucucuugcuaugcuuaauu

SEQ ID NO: 312591 - RNA, 22 nt, Human
uggaaaaaacaguguauaaagg

SEQ ID NO: 312592 - RNA, 20 nt, Human
uugagguuucaggaguucac

SEQ ID NO: 312593 - RNA, 26 nt, Human
cgccgcuccaggcgccgccgccgccg

SEQ ID NO: 312594 - RNA, 20 nt, Human
cuccaggcgccgccgccgcc

SEQ ID NO: 312595 - RNA, 19 nt, Human
uuuuuuuuuuuuggggggu

SEQ ID NO: 312596 - RNA, 20 nt, Human
uuuuuuuuuuuuggggggug

SEQ ID NO: 312597 - RNA, 19 nt, Human
uuuuuuuuuuuuuuggggg

SEQ ID NO: 312598 - RNA, 20 nt, Human
uuuuuuuuuuuuuuuggggg

SEQ ID NO: 312599 - RNA, 22 nt, Human
uuuuuuuuuuuuuuuuuggggg

SEQ ID NO: 312600 - RNA, 21 nt, Human
aaaauagcaaaccgcgaagga

SEQ ID NO: 312601 - RNA, 22 nt, Human
aaaaugcacaccccacgggaca

SEQ ID NO: 312602 - RNA, 24 nt, Human
aaagacaucaaaauaaaaccccaa

SEQ ID NO: 312603 - RNA, 22 nt, Human
aacaggaaaugaaaauagcaaa

SEQ ID NO: 312604 - RNA, 24 nt, Human
aaggaacagacacggcuaccucaa

SEQ ID NO: 312605 - RNA, 20 nt, Human
aauaauagucaccagaccca

SEQ ID NO: 312606 - RNA, 21 nt, Human
acacgauccguuaaaacacuc

SEQ ID NO: 312607 - RNA, 20 nt, Human
acagaugagcacaacgagcu

SEQ ID NO: 312608 - RNA, 19 nt, Human
accaccacacgaagaaaca

SEQ ID NO: 312609 - RNA, 20 nt, Human
agauggccuacaagaugaac

SEQ ID NO: 312610 - RNA, 22 nt, Human
agccgacacgaugacccaacuu

SEQ ID NO: 312611 - RNA, 18 nt, Human
agugugcuacucuauucu

SEQ ID NO: 312612 - RNA, 19 nt, Human
auagaaaaacaguucugaa

SEQ ID NO: 312613 - RNA, 23 nt, Human
aucaaaauaaaaccccaaacccc

SEQ ID NO: 312614 - RNA, 18 nt, Human
aucaaagaauagaaaaac

SEQ ID NO: 312615 - RNA, 21 nt, Human
caaaaaaaucgaaacaugaua

SEQ ID NO: 312616 - RNA, 23 nt, Human
caaaagaaaagacaucaaaauaa

SEQ ID NO: 312617 - RNA, 21 nt, Human
caaaagggcagaccgcagaca

SEQ ID NO: 312618 - RNA, 24 nt, Human
caaaauaaaaccccaaaccccuca

SEQ ID NO: 312619 - RNA, 24 nt, Human
caaccagccgacacgaugacccaa

SEQ ID NO: 312620 - RNA, 18 nt, Human
caacgcugggcugugcuc

SEQ ID NO: 312621 - RNA, 18 nt, Human
caacgcugggcugugcuc

SEQ ID NO: 312622 - RNA, 20 nt, Human
caacuuagaaaaugcagcuc

SEQ ID NO: 312623 - RNA, 22 nt, Human
cagaccgcagacauuuuaaagc

SEQ ID NO: 312624 - RNA, 18 nt, Human
cagagcaggacaacggcc

SEQ ID NO: 312625 - RNA, 19 nt, Human
cagagugagccaguccugc

SEQ ID NO: 312626 - RNA, 21 nt, Human
cagucaauauugcuaaugcgu

SEQ ID NO: 312627 - RNA, 19 nt, Human
caguuccugagcccaaccu

SEQ ID NO: 312628 - RNA, 24 nt, Human
cauaguauaccuguaugcuuccga

SEQ ID NO: 312629 - RNA, 21 nt, Human
ccacagugguagccaggccaa

SEQ ID NO: 312630 - RNA, 24 nt, Human
ccaccacacgaagaaacaugcaga

SEQ ID NO: 312631 - RNA, 21 nt, Human
ccacgggcagucugccaggug

SEQ ID NO: 312632 - RNA, 23 nt, Human
cccaacgcugggcugugcucucc

SEQ ID NO: 312633 - RNA, 21 nt, Human
cccacggcgcacugggcagcu

SEQ ID NO: 312634 - RNA, 21 nt, Human
ccccacgggacacgcacugcc

SEQ ID NO: 312635 - RNA, 25 nt, Human
ccccacugcugcacaugcaucagau

SEQ ID NO: 312636 - RNA, 25 nt, Human
cccgacagcagggccacgggcaguc

SEQ ID NO: 312637 - RNA, 20 nt, Human
cccggccccaacgcugggcc

SEQ ID NO: 312638 - RNA, 25 nt, Human
ccgcaauaauagucaccagacccau

SEQ ID NO: 312639 - RNA, 18 nt, Human
ccgcgaaggaacagacac

SEQ ID NO: 312640 - RNA, 22 nt, Human
ccgguggccgaggccgcggggc

SEQ ID NO: 312641 - RNA, 22 nt, Human
ccugagcccaaccugccucagc

SEQ ID NO: 312642 - RNA, 23 nt, Human
ccugcaguuccugagcccaaccu

SEQ ID NO: 312643 - RNA, 28 nt, Human
ccugcaguuccugagcccaaccugccuc

SEQ ID NO: 312644 - RNA, 22 nt, Human
ccuggggcccgacagcagggcc

SEQ ID NO: 312645 - RNA, 22 nt, Human
ccuguaugcuuccgacgucggg

SEQ ID NO: 312646 - RNA, 18 nt, Human
ccuuuggaaaaccuucag

SEQ ID NO: 312647 - RNA, 22 nt, Human
cgacacgaugacccaacuuaga

SEQ ID NO: 312648 - RNA, 22 nt, Human
cgccagcggucccggccccaac

SEQ ID NO: 312649 - RNA, 22 nt, Human
cgcgaaggaacagacacggcua

SEQ ID NO: 312650 - RNA, 24 nt, Human
cgcugggcugugcucuccugcgac

SEQ ID NO: 312651 - RNA, 21 nt, Human
cggccuggggcccgacagcag

SEQ ID NO: 312652 - RNA, 18 nt, Human
cgggacacgcacugccag

SEQ ID NO: 312653 - RNA, 21 nt, Human
cgguccgcaauaauagucacc

SEQ ID NO: 312654 - RNA, 22 nt, Human
cuagaacuccccacugcugcac

SEQ ID NO: 312655 - RNA, 22 nt, Human
cucaucaugguguuuguaacga

SEQ ID NO: 312656 - RNA, 19 nt, Human
cuggauuuguuguccaguu

SEQ ID NO: 312657 - RNA, 23 nt, Human
gaacagacacggcuaccucaaac

SEQ ID NO: 312658 - RNA, 22 nt, Human
gaagaaacaugcagagugauca

SEQ ID NO: 312659 - RNA, 18 nt, Human
gaagauggacgcgaccac

SEQ ID NO: 312660 - RNA, 24 nt, Human
gaaggaacagacacggcuaccuca

SEQ ID NO: 312661 - RNA, 18 nt, Human
gacaacggccuggggccc

SEQ ID NO: 312662 - RNA, 19 nt, Human
gacacgaugacccaacuua

SEQ ID NO: 312663 - RNA, 21 nt, Human
gacacgaugacccaacuuaga

SEQ ID NO: 312664 - RNA, 20 nt, Human
gaccaaaagaaaagacauca

SEQ ID NO: 312665 - RNA, 22 nt, Human
gaccaaaagaaaagacaucaaa

SEQ ID NO: 312666 - RNA, 19 nt, Human
gacccguagugguuuccuu

SEQ ID NO: 312667 - RNA, 20 nt, Human
gagccaagcccuuuggaaaa

SEQ ID NO: 312668 - RNA, 20 nt, Human
gauccguuaaaacacucccc

SEQ ID NO: 312669 - RNA, 20 nt, Human
gcaauaauagucaccagacc

SEQ ID NO: 312670 - RNA, 20 nt, Human
gcagaaaacaacguccacgu

SEQ ID NO: 312671 - RNA, 22 nt, Human
gccaauucauuugcuucaccau

SEQ ID NO: 312672 - RNA, 25 nt, Human
gccccaacgcugggcugugcucucc

SEQ ID NO: 312673 - RNA, 19 nt, Human
gcccggcugacgugcgggg

SEQ ID NO: 312674 - RNA, 21 nt, Human
gcgacacgauccguuaaaaca

SEQ ID NO: 312675 - RNA, 19 nt, Human
gcgggcgugccgcgagccc

SEQ ID NO: 312676 - RNA, 18 nt, Human
gcuccuucacucacuucc

SEQ ID NO: 312677 - RNA, 20 nt, Human
ggcucuggagccaagcccuu

SEQ ID NO: 312678 - RNA, 21 nt, Human
gggggaggcugacgcagccag

SEQ ID NO: 312679 - RNA, 22 nt, Human
guagugguuuccuuaauguggg

SEQ ID NO: 312680 - RNA, 20 nt, Human
gucagacaaccagccgacac

SEQ ID NO: 312681 - RNA, 20 nt, Human
guggcucuggagccaagccc

SEQ ID NO: 312682 - RNA, 21 nt, Human
guuuaaaaaaaauucccuccu

SEQ ID NO: 312683 - RNA, 20 nt, Human
uaaaaaaaauucccuccucc

SEQ ID NO: 312684 - RNA, 21 nt, Human
uaaaacaaugaccucccaagc

SEQ ID NO: 312685 - RNA, 27 nt, Human
uaaaacaaugaccucccaagcuuaucc

SEQ ID NO: 312686 - RNA, 18 nt, Human
uaaaaccccaaaccccuc

SEQ ID NO: 312687 - RNA, 19 nt, Human
uaaaaugcacaccccacgg

SEQ ID NO: 312688 - RNA, 22 nt, Human
uaaaaugcacaccccacgggac

SEQ ID NO: 312689 - RNA, 21 nt, Human
uaacaaagacagugguuguug

SEQ ID NO: 312690 - RNA, 26 nt, Human
uacagaucaguuuuuauaaauauucu

SEQ ID NO: 312691 - RNA, 23 nt, Human
uagaacuccccacugcugcacau

SEQ ID NO: 312692 - RNA, 22 nt, Human
ucaaaaaaagguaacaaagaca

SEQ ID NO: 312693 - RNA, 24 nt, Human
ucaaaauaaaaccccaaaccccuc

SEQ ID NO: 312694 - RNA, 22 nt, Human
uccaaaaacucaggguuaggca

SEQ ID NO: 312695 - RNA, 24 nt, Human
uccacacacaaaaaaaucgaaaca

SEQ ID NO: 312696 - RNA, 22 nt, Human
ucccaaugacagagugagccag

SEQ ID NO: 312697 - RNA, 21 nt, Human
ucccggccccaacgcugggcu

SEQ ID NO: 312698 - RNA, 24 nt, Human
uccgcaauaauagucaccagaccc

SEQ ID NO: 312699 - RNA, 19 nt, Human
uccugagcccaaccugccu

SEQ ID NO: 312700 - RNA, 24 nt, Human
ucgcagcugacagcucccaaugac

SEQ ID NO: 312701 - RNA, 19 nt, Human
ucuauucuggaaugccucc

SEQ ID NO: 312702 - RNA, 27 nt, Human
ucuguggucagagcaggaccggggucc

SEQ ID NO: 312703 - RNA, 19 nt, Human
ugacauucuccacuagugg

SEQ ID NO: 312704 - RNA, 23 nt, Human
ugagggcaguaaaacaaugaccu

SEQ ID NO: 312705 - RNA, 21 nt, Human
uggaaugccuccuagagaacc

SEQ ID NO: 312706 - RNA, 18 nt, Human
uggccgaggccgcggggc

SEQ ID NO: 312707 - RNA, 20 nt, Human
uggucagagcaggacaacgg

SEQ ID NO: 312708 - RNA, 23 nt, Human
ugugagggcaguaaaacaaugac

SEQ ID NO: 312709 - RNA, 20 nt, Human
uguggcagaauacacuugca

SEQ ID NO: 312710 - RNA, 20 nt, Human
uucacagaugagcacaacga

SEQ ID NO: 312711 - RNA, 24 nt, Human
uucacauuuuccuaaagauuuuau

SEQ ID NO: 312712 - RNA, 20 nt, Human
uuccugagcccaaccugccu

SEQ ID NO: 312713 - RNA, 24 nt, Human
uuucaaacaaaaugugagggcagu

SEQ ID NO: 312714 - RNA, 23 nt, Human
uuuggaaaaccuucagggcgacc

SEQ ID NO: 312715 - RNA, 18 nt, Human
uuuuauaaugugacaacc

SEQ ID NO: 312716 - RNA, 18 nt, Human
uuuuuuuuuuuuuuuuug

SEQ ID NO: 312717 - RNA, 23 nt, Human
aggcaggcugaggcucugucucg

SEQ ID NO: 312718 - RNA, 21 nt, Human
aggcggcagcagggcagggga

SEQ ID NO: 312719 - RNA, 21 nt, Human
aggcugcucucugagggcggg

SEQ ID NO: 312720 - RNA, 27 nt, Human
cagcagggcaggggagagcaaggggcu

SEQ ID NO: 312721 - RNA, 20 nt, Human
ccccaggcugggaggcggca

SEQ ID NO: 312722 - RNA, 21 nt, Human
cccuccuucgccgccgcuuag

SEQ ID NO: 312723 - RNA, 19 nt, Human
ccuggggcccgcugugccc

SEQ ID NO: 312724 - RNA, 20 nt, Human
cggcagcagggcaggggagg

SEQ ID NO: 312725 - RNA, 19 nt, Human
cugccacgaccccccaggc

SEQ ID NO: 312726 - RNA, 18 nt, Human
gaggcggcagcagggcag

SEQ ID NO: 312727 - RNA, 24 nt, Human
gcaggcugaggcucugucucggga

SEQ ID NO: 312728 - RNA, 19 nt, Human
gcucucugagggcggggac

SEQ ID NO: 312729 - RNA, 19 nt, Human
gcugcucucugagggcggg

SEQ ID NO: 312730 - RNA, 24 nt, Human
ggcaggggagagcaaggggcuuug

SEQ ID NO: 312731 - RNA, 21 nt, Human
gggaggcggcagcagggcagg

SEQ ID NO: 312732 - RNA, 26 nt, Human
ggggaggguagcccuggggcccgcug

SEQ ID NO: 312733 - RNA, 23 nt, Human
guagcccuggggcccgcugugcc

SEQ ID NO: 312734 - RNA, 18 nt, Human
uaagaggcugauuaucug

SEQ ID NO: 312735 - RNA, 21 nt, Human
uccugggggaggguagcccug

SEQ ID NO: 312736 - RNA, 21 nt, Human
ucugccacgaccccccaggcu

SEQ ID NO: 312737 - RNA, 21 nt, Human
ucuucuuccccuccuucgccg

SEQ ID NO: 312738 - RNA, 19 nt, Human
ugggaggcggcagcagggc

SEQ ID NO: 312739 - RNA, 21 nt, Human
ugggaggcggcagcagggcag

SEQ ID NO: 312740 - RNA, 24 nt, Human
aaagucccacgaucccguggggaa

SEQ ID NO: 312741 - RNA, 18 nt, Human
aaggcaaagcccacugcu

SEQ ID NO: 312742 - RNA, 21 nt, Human
acugaggugucagaaggcaaa

SEQ ID NO: 312743 - RNA, 23 nt, Human
agcagcaccacugaggugucaga

SEQ ID NO: 312744 - RNA, 21 nt, Human
agccaggccagcgcagccgca

SEQ ID NO: 312745 - RNA, 21 nt, Human
aggcagugcgacaccuccugg

SEQ ID NO: 312746 - RNA, 18 nt, Human
aggccgagaagcgccgcc

SEQ ID NO: 312747 - RNA, 28 nt, Human
agguacaguaggaggccgaccgguaccc

SEQ ID NO: 312748 - RNA, 26 nt, Human
auaacagcagucagagucagggacac

SEQ ID NO: 312749 - RNA, 21 nt, Human
caccacagccaggccuacgcc

SEQ ID NO: 312750 - RNA, 22 nt, Human
cagcagucagagucagggacac

SEQ ID NO: 312751 - RNA, 24 nt, Human
cagccaggccuacgcccagcagca

SEQ ID NO: 312752 - RNA, 23 nt, Human
cagcgcagccgcagcaaccccug

SEQ ID NO: 312753 - RNA, 21 nt, Human
ccacagccaggccuacgccca

SEQ ID NO: 312754 - RNA, 22 nt, Human
ccaggccgcgguaguccccacg

SEQ ID NO: 312755 - RNA, 19 nt, Human
cccacggccagccaggccu

SEQ ID NO: 312756 - RNA, 24 nt, Human
ccccaccaggccgcgguagucccc

SEQ ID NO: 312757 - RNA, 21 nt, Human
ccccacggccagccaggccag

SEQ ID NO: 312758 - RNA, 20 nt, Human
cccuccggagcgggggcggg

SEQ ID NO: 312759 - RNA, 21 nt, Human
ccgagaagcgccgccccggcc

SEQ ID NO: 312760 - RNA, 18 nt, Human
ccgccgccgcucgccugc

SEQ ID NO: 312761 - RNA, 18 nt, Human
ccgccgccgcucgccugc

SEQ ID NO: 312762 - RNA, 19 nt, Human
ccgccgccgcucgccugcu

SEQ ID NO: 312763 - RNA, 21 nt, Human
ccgcgguaguccccacggcca

SEQ ID NO: 312764 - RNA, 19 nt, Human
ccggacaggaauacugggc

SEQ ID NO: 312765 - RNA, 23 nt, Human
ccucggggcucgcggcucagucc

SEQ ID NO: 312766 - RNA, 22 nt, Human
ccugcuccagccgccgcagccg

SEQ ID NO: 312767 - RNA, 21 nt, Human
cgaagcgaacaguguucgccc

SEQ ID NO: 312768 - RNA, 18 nt, Human
cgagaagcgccgccccgg

SEQ ID NO: 312769 - RNA, 21 nt, Human
cgcggcucuaggagguuuccg

SEQ ID NO: 312770 - RNA, 20 nt, Human
cggccgccgccgcucgccug

SEQ ID NO: 312771 - RNA, 26 nt, Human
cuacgcccagcagcaccacugaggug

SEQ ID NO: 312772 - RNA, 23 nt, Human
cuaucggccgccgccgcucgccu

SEQ ID NO: 312773 - RNA, 20 nt, Human
gaagcagacacaggguggga

SEQ ID NO: 312774 - RNA, 22 nt, Human
gacuuggccggaggcgaagcga

SEQ ID NO: 312775 - RNA, 27 nt, Human
gagcgcggcgccgggcgggcgggcggc

SEQ ID NO: 312776 - RNA, 18 nt, Human
gccgcagcaggcacgagg

SEQ ID NO: 312777 - RNA, 21 nt, Human
gcgccuucugaacgaaggagg

SEQ ID NO: 312778 - RNA, 27 nt, Human
ggagaagaggaguggggagagaggggu

SEQ ID NO: 312779 - RNA, 21 nt, Human
ggagcgcggcgccgggcgggc

SEQ ID NO: 312780 - RNA, 18 nt, Human
ggagggcgguguggagcg

SEQ ID NO: 312781 - RNA, 18 nt, Human
ggaguggggagagagggg

SEQ ID NO: 312782 - RNA, 19 nt, Human
gggcgggcugcggcggccc

SEQ ID NO: 312783 - RNA, 21 nt, Human
gggucggcggggagggcggug

SEQ ID NO: 312784 - RNA, 21 nt, Human
guaaaaguggugaacgcgaug

SEQ ID NO: 312785 - RNA, 25 nt, Human
uauucggaagcagacacaggguggg

SEQ ID NO: 312786 - RNA, 21 nt, Human
ucagaaggcaaagcccacugc

SEQ ID NO: 312787 - RNA, 21 nt, Human
ucaguccccaccaggccgcgg

SEQ ID NO: 312788 - RNA, 19 nt, Human
uccagcacacugugggaag

SEQ ID NO: 312789 - RNA, 20 nt, Human
ugcccaugaggagcaguucg

SEQ ID NO: 312790 - RNA, 18 nt, Human
uggagcgcggcgccgggc

SEQ ID NO: 312791 - RNA, 18 nt, Human
uggccggaggcgaagcga

SEQ ID NO: 312792 - RNA, 20 nt, Human
ugggaaguacccccggacag

SEQ ID NO: 312793 - RNA, 24 nt, Human
ugggaggcagugcgacaccuccug

SEQ ID NO: 312794 - RNA, 18 nt, Human
uggugagaaccaggauaa

SEQ ID NO: 312795 - RNA, 20 nt, Human
uguggagcgcggcgccgggc

SEQ ID NO: 312796 - RNA, 21 nt, Human
uguggagcgcggcgccgggcg

SEQ ID NO: 312797 - RNA, 18 nt, Human
aaaaaaaagcccuacaca

SEQ ID NO: 312798 - RNA, 18 nt, Human
aaaaacaaaacaaaagca

SEQ ID NO: 312799 - RNA, 20 nt, Human
aaaacccaccagcacuacca

SEQ ID NO: 312800 - RNA, 23 nt, Human
aaacaaaaacccaccagcacuac

SEQ ID NO: 312801 - RNA, 20 nt, Human
aaacaaaagcaagaaaaaaa

SEQ ID NO: 312802 - RNA, 18 nt, Human
aaagucauauaucgaagg

SEQ ID NO: 312803 - RNA, 19 nt, Human
aaauauuaaacaaaaaccc

SEQ ID NO: 312804 - RNA, 24 nt, Human
aacaaaacaaaagcaagaaaaaaa

SEQ ID NO: 312805 - RNA, 24 nt, Human
aacagagugagauucggucucaaa

SEQ ID NO: 312806 - RNA, 24 nt, Human
aacccugcuccccugugucuucug

SEQ ID NO: 312807 - RNA, 24 nt, Human
aagcaagaaaaaaauuuguuucua

SEQ ID NO: 312808 - RNA, 25 nt, Human
aagcaagaaaaaaauuuguuucuaa

SEQ ID NO: 312809 - RNA, 25 nt, Human
aaggcagcgauacacacaugugcuu

SEQ ID NO: 312810 - RNA, 23 nt, Human
acaaaacaaaagcaagaaaaaaa

SEQ ID NO: 312811 - RNA, 24 nt, Human
acagagugagauucggucucaaaa

SEQ ID NO: 312812 - RNA, 24 nt, Human
acaguguagucuuuggggacacuu

SEQ ID NO: 312813 - RNA, 22 nt, Human
accacugcacuccagccugggc

SEQ ID NO: 312814 - RNA, 24 nt, Human
acuccagccugggcaacagaguga

SEQ ID NO: 312815 - RNA, 24 nt, Human
acugcacuccagccugggcaacag

SEQ ID NO: 312816 - RNA, 24 nt, Human
acugcacuccagccugggcaacag

SEQ ID NO: 312817 - RNA, 20 nt, Human
agaaguugcagugagccaag

SEQ ID NO: 312818 - RNA, 23 nt, Human
agcacuaccaccaccucaacaac

SEQ ID NO: 312819 - RNA, 24 nt, Human
agccugggcaacagagugagauuc

SEQ ID NO: 312820 - RNA, 19 nt, Human
aggcagcgauacacacaug

SEQ ID NO: 312821 - RNA, 22 nt, Human
aggggaguuggaauaguucagg

SEQ ID NO: 312822 - RNA, 24 nt, Human
agguagaaguugcagugagccaag

SEQ ID NO: 312823 - RNA, 22 nt, Human
aucauaucacucccaguuaaac

SEQ ID NO: 312824 - RNA, 24 nt, Human
aucgcaccacugcacuccagccug

SEQ ID NO: 312825 - RNA, 20 nt, Human
caaaaaaaagcccuacacau

SEQ ID NO: 312826 - RNA, 19 nt, Human
caaaacaaaagcaagaaaa

SEQ ID NO: 312827 - RNA, 23 nt, Human
caacacucccaagaauuuuaaga

SEQ ID NO: 312828 - RNA, 25 nt, Human
caacagagugagauucggucucagu

SEQ ID NO: 312829 - RNA, 18 nt, Human
caagaucauagagacuca

SEQ ID NO: 312830 - RNA, 22 nt, Human
cacacuguuauuuaauaucuga

SEQ ID NO: 312831 - RNA, 21 nt, Human
cacgugagcuaacccugcucc

SEQ ID NO: 312832 - RNA, 22 nt, Human
cacuccagccugggcaacagag

SEQ ID NO: 312833 - RNA, 22 nt, Human
cacuccagccugggcaacagag

SEQ ID NO: 312834 - RNA, 24 nt, Human
cacuccagccugggcaacagagug

SEQ ID NO: 312835 - RNA, 19 nt, Human
cacugcacuccagccuggg

SEQ ID NO: 312836 - RNA, 21 nt, Human
cacugcacuccagccugggca

SEQ ID NO: 312837 - RNA, 22 nt, Human
cacugcacuccagccugggcaa

SEQ ID NO: 312838 - RNA, 23 nt, Human
cacugcacuccagccugggcaac

SEQ ID NO: 312839 - RNA, 24 nt, Human
cacugcacuccagccugggcaaca

SEQ ID NO: 312840 - RNA, 25 nt, Human
cacugcacuccagccugggcaacaa

SEQ ID NO: 312841 - RNA, 18 nt, Human
cagcgauacacacaugug

SEQ ID NO: 312842 - RNA, 18 nt, Human
caguguagucuuugggga

SEQ ID NO: 312843 - RNA, 20 nt, Human
ccacugcacuccagccuggg

SEQ ID NO: 312844 - RNA, 20 nt, Human
ccacugcacuccagccuggg

SEQ ID NO: 312845 - RNA, 21 nt, Human
ccacugcacuccagccugggc

SEQ ID NO: 312846 - RNA, 22 nt, Human
ccacugcacuccagccugggca

SEQ ID NO: 312847 - RNA, 23 nt, Human
ccacugcacuccagccugggcaa

SEQ ID NO: 312848 - RNA, 24 nt, Human
ccacugcacuccagccugggcaac

SEQ ID NO: 312849 - RNA, 20 nt, Human
ccagucaucgaagugaacaa

SEQ ID NO: 312850 - RNA, 22 nt, Human
ccuacacaucauaucacuccca

SEQ ID NO: 312851 - RNA, 22 nt, Human
ccugggcaacagagugagauuc

SEQ ID NO: 312852 - RNA, 21 nt, Human
ccuucaaaucagaaaaacaaa

SEQ ID NO: 312853 - RNA, 21 nt, Human
cgaagugaacaaacuuccuuu

SEQ ID NO: 312854 - RNA, 21 nt, Human
cgcaccacugcacuccagccu

SEQ ID NO: 312855 - RNA, 23 nt, Human
cggagguagaaguugcagugagc

SEQ ID NO: 312856 - RNA, 27 nt, Human
cgggaggcugaggcacaagaaucucuu

SEQ ID NO: 312857 - RNA, 18 nt, Human
cuaacccugcuccccugu

SEQ ID NO: 312858 - RNA, 23 nt, Human
cucaaaaacaaaacaaaagcaag

SEQ ID NO: 312859 - RNA, 20 nt, Human
cucggagguagaaguugcag

SEQ ID NO: 312860 - RNA, 20 nt, Human
cuucauaaugcauauguuuu

SEQ ID NO: 312861 - RNA, 18 nt, Human
gaagggaaaaugggagua

SEQ ID NO: 312862 - RNA, 18 nt, Human
gaaguugcagugagccaa

SEQ ID NO: 312863 - RNA, 22 nt, Human
gagucccugggugaguacugga

SEQ ID NO: 312864 - RNA, 22 nt, Human
gcacaagaaucucuugaaccuc

SEQ ID NO: 312865 - RNA, 20 nt, Human
gcaccacugcacuccagccu

SEQ ID NO: 312866 - RNA, 23 nt, Human
gcacuccagccugggcaacagag

SEQ ID NO: 312867 - RNA, 20 nt, Human
gccaagaucgcaccacugca

SEQ ID NO: 312868 - RNA, 20 nt, Human
gggaguuggaauaguucagg

SEQ ID NO: 312869 - RNA, 23 nt, Human
gugaguacuggaguucuaaagac

SEQ ID NO: 312870 - RNA, 19 nt, Human
guucagcuaagaacacugg

SEQ ID NO: 312871 - RNA, 23 nt, Human
uaaacaaaaacccaccaaccccg

SEQ ID NO: 312872 - RNA, 20 nt, Human
uaacacccugaagaaguaau

SEQ ID NO: 312873 - RNA, 19 nt, Human
uauuccaagacugauuuga

SEQ ID NO: 312874 - RNA, 20 nt, Human
ucaaaaacaaaacaaaagca

SEQ ID NO: 312875 - RNA, 18 nt, Human
ucauuguucagcuaagaa

SEQ ID NO: 312876 - RNA, 23 nt, Human
uccagccugggcaacagagugag

SEQ ID NO: 312877 - RNA, 24 nt, Human
uccagccugggcaacagagugaga

SEQ ID NO: 312878 - RNA, 23 nt, Human
ucgcaccacugcacuccagccug

SEQ ID NO: 312879 - RNA, 23 nt, Human
ucggucucaaaaacaaaacaaaa

SEQ ID NO: 312880 - RNA, 21 nt, Human
ugacaacacucccaagaauuu

SEQ ID NO: 312881 - RNA, 20 nt, Human
ugagaaggauuuuuauggua

SEQ ID NO: 312882 - RNA, 24 nt, Human
ugaggcacaagaaucucuugaacc

SEQ ID NO: 312883 - RNA, 21 nt, Human
uggagucccugggugaguacu

SEQ ID NO: 312884 - RNA, 22 nt, Human
uggccugugaacuggagucccu

SEQ ID NO: 312885 - RNA, 22 nt, Human
ugucagacaccugacgggcucc

SEQ ID NO: 312886 - RNA, 23 nt, Human
ugucauugcaacaggagaauuga

SEQ ID NO: 312887 - RNA, 23 nt, Human
uuaaacaaaaacccaccagcacu

SEQ ID NO: 312888 - RNA, 18 nt, Human
uuaaacagugcuuugaug

SEQ ID NO: 312889 - RNA, 22 nt, Human
uucagccuccacaacaagaagu

SEQ ID NO: 312890 - RNA, 21 nt, Human
uucucaaaaaaaagcccuaca

SEQ ID NO: 312891 - RNA, 22 nt, Human
uugcagugagccaagaucgcac

SEQ ID NO: 312892 - RNA, 19 nt, Human
uuuauccauuuuagugaga

SEQ ID NO: 312893 - RNA, 18 nt, Human
aaccuguucauuuuccuu

SEQ ID NO: 312894 - RNA, 19 nt, Human
aagaaccuguucauuuucc

SEQ ID NO: 312895 - RNA, 23 nt, Human
aagcagcuuucuuuucugucccu

SEQ ID NO: 312896 - RNA, 21 nt, Human
acucuauuucaguggaaucca

SEQ ID NO: 312897 - RNA, 20 nt, Human
cacagugccagaagugaggu

SEQ ID NO: 312898 - RNA, 20 nt, Human
cgaaagcagcuuucuuuucu

SEQ ID NO: 312899 - RNA, 18 nt, Human
cuggcaguuggaaggcaa

SEQ ID NO: 312900 - RNA, 18 nt, Human
ggugaggcuuacuuugug

SEQ ID NO: 312901 - RNA, 23 nt, Human
uaauauaacuccaacuuuuuaau

SEQ ID NO: 312902 - RNA, 23 nt, Human
ucagaauuagcaauuucauagaa

SEQ ID NO: 312903 - RNA, 23 nt, Human
uccaacuuuuuaaugguaaacaa

SEQ ID NO: 312904 - RNA, 18 nt, Human
ugcucuaagaacuaaaag

SEQ ID NO: 312905 - RNA, 18 nt, Human
uuggaaggcaaaggugag

SEQ ID NO: 312906 - RNA, 19 nt, Human
uugggauuuuaguuagucu

SEQ ID NO: 312907 - RNA, 20 nt, Human
uugggauuuuaguuagucuu

SEQ ID NO: 312908 - RNA, 18 nt, Human
uuuuuuuuuuuuuuuuug

SEQ ID NO: 312909 - RNA, 24 nt, Human
uuuuuuuuuuuuuuuuuuuuuggg

SEQ ID NO: 312910 - RNA, 18 nt, Human
agacuuuuuuuuuuuuuu

SEQ ID NO: 312911 - RNA, 27 nt, Human
auauguagacuuuuuuuuuuuuuuuuu

SEQ ID NO: 312912 - RNA, 20 nt, Human
ccacuuaucauacaauuauc

SEQ ID NO: 312913 - RNA, 23 nt, Human
uguagacuuuuuuuuuuuuuuuu

SEQ ID NO: 312914 - RNA, 20 nt, Human
aacaacccugugaggugggu

SEQ ID NO: 312915 - RNA, 19 nt, Human
accgacuccaccuuuccua

SEQ ID NO: 312916 - RNA, 24 nt, Human
agccuuccagugggugggaaaaga

SEQ ID NO: 312917 - RNA, 23 nt, Human
agguggguuucauaacccccacu

SEQ ID NO: 312918 - RNA, 22 nt, Human
cacaacaacccugugagguggg

SEQ ID NO: 312919 - RNA, 23 nt, Human
caggggucuucucaccuccggcu

SEQ ID NO: 312920 - RNA, 21 nt, Human
cccacuguuuaccgaugaggc

SEQ ID NO: 312921 - RNA, 23 nt, Human
ccuagaagccuucgugccgaauu

SEQ ID NO: 312922 - RNA, 20 nt, Human
ccugaaggaagguuugugag

SEQ ID NO: 312923 - RNA, 23 nt, Human
ccuugccugugagccuuccagug

SEQ ID NO: 312924 - RNA, 24 nt, Human
cggcuucucacuaccgacuccacc

SEQ ID NO: 312925 - RNA, 23 nt, Human
cuaaaucaacucauuggauccuc

SEQ ID NO: 312926 - RNA, 25 nt, Human
cucacuaccgacuccaccuuuccua

SEQ ID NO: 312927 - RNA, 26 nt, Human
cucacuaccgacuccaccuuuccuag

SEQ ID NO: 312928 - RNA, 21 nt, Human
cugguaaaggacggaaucugu

SEQ ID NO: 312929 - RNA, 26 nt, Human
cuguagcgacaguguuggcaccuucu

SEQ ID NO: 312930 - RNA, 18 nt, Human
cuugccugugagccuucc

SEQ ID NO: 312931 - RNA, 19 nt, Human
gaaggaagguuugugaggg

SEQ ID NO: 312932 - RNA, 22 nt, Human
gagggugaauuucucaaaguca

SEQ ID NO: 312933 - RNA, 18 nt, Human
gagguggguuucauaacc

SEQ ID NO: 312934 - RNA, 18 nt, Human
ucauaacccccacuguuu

SEQ ID NO: 312935 - RNA, 23 nt, Human
ucauuggauccucacaacaaccc

SEQ ID NO: 312936 - RNA, 18 nt, Human
ucucucaccuugccugug

SEQ ID NO: 312937 - RNA, 21 nt, Human
ucugugccucugcacuaccaa

SEQ ID NO: 312938 - RNA, 23 nt, Human
ugagguggguuucauaaccccca

SEQ ID NO: 312939 - RNA, 18 nt, Human
ugccugugagccuuccag

SEQ ID NO: 312940 - RNA, 24 nt, Human
uggcaccuucuguguccucucuca

SEQ ID NO: 312941 - RNA, 21 nt, Human
uggggccucucaaagccucac

SEQ ID NO: 312942 - RNA, 23 nt, Human
ugggugggaaaagaggcaugccu

SEQ ID NO: 312943 - RNA, 19 nt, Human
ugugaacacagaagagagc

SEQ ID NO: 312944 - RNA, 23 nt, Human
ugugccucugcacuaccaaugcc

SEQ ID NO: 312945 - RNA, 20 nt, Human
uuccuagaagccuucgugcc

SEQ ID NO: 312946 - RNA, 18 nt, Human
uuuggggccucucaaagc

SEQ ID NO: 312947 - RNA, 19 nt, Human
uuuuuuuuuuuuuuuuuaa

SEQ ID NO: 312948 - RNA, 18 nt, Human
aacucggagcgucacugg

SEQ ID NO: 312949 - RNA, 22 nt, Human
aagucaaccaguguuaaccccg

SEQ ID NO: 312950 - RNA, 24 nt, Human
caacauccucaacucggagcguca

SEQ ID NO: 312951 - RNA, 23 nt, Human
cagcaauaccuccuuuauuugau

SEQ ID NO: 312952 - RNA, 25 nt, Human
cauaaacaacugccuuagacggcaa

SEQ ID NO: 312953 - RNA, 19 nt, Human
cggagcgucacuggcugga

SEQ ID NO: 312954 - RNA, 25 nt, Human
uagagcacucagaaaacauggaaaa

SEQ ID NO: 312955 - RNA, 28 nt, Human
uaucauagagcacucagaaaacauggaa

SEQ ID NO: 312956 - RNA, 22 nt, Human
ucacacaaaaugaaaaucuccu

SEQ ID NO: 312957 - RNA, 19 nt, Human
ucauagagcacucagaaaa

SEQ ID NO: 312958 - RNA, 25 nt, Human
uccuagaaagagaaauuccucuguc

SEQ ID NO: 312959 - RNA, 20 nt, Human
uuccucuguccucugacuuc

SEQ ID NO: 312960 - RNA, 18 nt, Human
uuuuuuuuuuuuuuuuug

SEQ ID NO: 312961 - RNA, 21 nt, Human
uuuuuuuuuuuuuuuuugcag

SEQ ID NO: 312962 - RNA, 21 nt, Human
acccaggagacuacgggaggg

SEQ ID NO: 312963 - RNA, 23 nt, Human
agccaaacacacccaggagacua

SEQ ID NO: 312964 - RNA, 26 nt, Human
aggccaagccaaacacacccaggaga

SEQ ID NO: 312965 - RNA, 19 nt, Human
agucugugggguggguggg

SEQ ID NO: 312966 - RNA, 19 nt, Human
augccaaggccaagccaaa

SEQ ID NO: 312967 - RNA, 19 nt, Human
caaggccaagccaaacaca

SEQ ID NO: 312968 - RNA, 20 nt, Human
caccccaggcccagaggagu

SEQ ID NO: 312969 - RNA, 19 nt, Human
cagcagagagaaagagccc

SEQ ID NO: 312970 - RNA, 18 nt, Human
ccaagccaaacacaccca

SEQ ID NO: 312971 - RNA, 19 nt, Human
ccccaggcccagaggaguc

SEQ ID NO: 312972 - RNA, 23 nt, Human
cccugggcugugcugccaggggc

SEQ ID NO: 312973 - RNA, 23 nt, Human
gccaagccaaacacacccaggag

SEQ ID NO: 312974 - RNA, 18 nt, Human
gccucggacacgguggag

SEQ ID NO: 312975 - RNA, 22 nt, Human
ggaggaugcaccccaggcccag

SEQ ID NO: 312976 - RNA, 20 nt, Human
ggccagaggccuccagaggc

SEQ ID NO: 312977 - RNA, 19 nt, Human
gguggaccucaccuggccu

SEQ ID NO: 312978 - RNA, 20 nt, Human
gguggguggggcaggcaggc

SEQ ID NO: 312979 - RNA, 22 nt, Human
uacgggagggagccaggagagc

SEQ ID NO: 312980 - RNA, 18 nt, Human
ucagcagagagaaagagc

SEQ ID NO: 312981 - RNA, 23 nt, Human
ugccaaggccaagccaaacacac

SEQ ID NO: 312982 - RNA, 22 nt, Human
uggagcugguguccacguggga

SEQ ID NO: 312983 - RNA, 18 nt, Human
ugggguggguggggcagg

SEQ ID NO: 312984 - RNA, 22 nt, Human
aaaaaaaguggaaaaguaaagc

SEQ ID NO: 312985 - RNA, 18 nt, Human
aauauauuuggcuuaaaa

SEQ ID NO: 312986 - RNA, 24 nt, Human
agaaaaauaaggagaaccgguacc

SEQ ID NO: 312987 - RNA, 21 nt, Human
aggagaaccgcugcuccccaa

SEQ ID NO: 312988 - RNA, 20 nt, Human
auuucuguuuuuguugagga

SEQ ID NO: 312989 - RNA, 28 nt, Human
cccacaagagaguagaaaaauaaggaga

SEQ ID NO: 312990 - RNA, 23 nt, Human
gagaaaaaggcuauuauacaaua

SEQ ID NO: 312991 - RNA, 19 nt, Human
uaaguaaauaacaucaaua

SEQ ID NO: 312992 - RNA, 19 nt, Human
uauuacuguuaauauauuu

SEQ ID NO: 312993 - RNA, 20 nt, Human
ucagaguuuuauuauauuac

SEQ ID NO: 312994 - RNA, 19 nt, Human
uccccaaaucagaguuuua

SEQ ID NO: 312995 - RNA, 20 nt, Human
uggcuuaaaauagauaaugu

SEQ ID NO: 312996 - RNA, 22 nt, Human
ugucucaaagggccgauucaau

SEQ ID NO: 312997 - RNA, 24 nt, Human
uuucuuuuuuuuaaaaaaaagugg

SEQ ID NO: 312998 - RNA, 19 nt, Human
uuuguugaggaagagaaag

SEQ ID NO: 312999 - RNA, 20 nt, Human
aaaaaaaaccaaaaaaaaga

SEQ ID NO: 313000 - RNA, 21 nt, Human
aaaacccacaugguagcacua

SEQ ID NO: 313001 - RNA, 19 nt, Human
aaaccaaaaaaaagaaagg

SEQ ID NO: 313002 - RNA, 24 nt, Human
aaagcuccucuggaaaacguugau

SEQ ID NO: 313003 - RNA, 18 nt, Human
aaaggaagaagggaggga

SEQ ID NO: 313004 - RNA, 19 nt, Human
aacauggugaaaccccguc

SEQ ID NO: 313005 - RNA, 20 nt, Human
aacauggugaaaccccgucu

SEQ ID NO: 313006 - RNA, 21 nt, Human
aacauggugaaaccccgucuc

SEQ ID NO: 313007 - RNA, 18 nt, Human
aagaaagaaagagagagg

SEQ ID NO: 313008 - RNA, 20 nt, Human
aagaagcgagggagggaggg

SEQ ID NO: 313009 - RNA, 22 nt, Human
aagagcuaagcacaccugcuaa

SEQ ID NO: 313010 - RNA, 21 nt, Human
aagcacaccugcuaacaacuc

SEQ ID NO: 313011 - RNA, 18 nt, Human
aagcccuccccaggccag

SEQ ID NO: 313012 - RNA, 21 nt, Human
aaggcugggugcgguggcuca

SEQ ID NO: 313013 - RNA, 21 nt, Human
aauaaccaaguaaucuggagc

SEQ ID NO: 313014 - RNA, 24 nt, Human
aaucacuugaacuugggagacaga

SEQ ID NO: 313015 - RNA, 24 nt, Human
aauggagugagacuccgucccaaa

SEQ ID NO: 313016 - RNA, 22 nt, Human
aauuaccucccaaaauggaacu

SEQ ID NO: 313017 - RNA, 18 nt, Human
aauuagccaggcauggug

SEQ ID NO: 313018 - RNA, 24 nt, Human
acaggucuacaauucuagcugugc

SEQ ID NO: 313019 - RNA, 19 nt, Human
accaaaaaaaagaaagaaa

SEQ ID NO: 313020 - RNA, 22 nt, Human
accauuguacuccagccugggc

SEQ ID NO: 313021 - RNA, 24 nt, Human
accauuguacuccagccugggcaa

SEQ ID NO: 313022 - RNA, 22 nt, Human
accccacugugcgcgccccagc

SEQ ID NO: 313023 - RNA, 24 nt, Human
accccgucucuacuaaaaauacaa

SEQ ID NO: 313024 - RNA, 21 nt, Human
acuccagccugggcaauggag

SEQ ID NO: 313025 - RNA, 24 nt, Human
acuccagccugggcaauggaguga

SEQ ID NO: 313026 - RNA, 20 nt, Human
acuggccuguccccacccac

SEQ ID NO: 313027 - RNA, 20 nt, Human
acuucuggcugaggcuccag

SEQ ID NO: 313028 - RNA, 19 nt, Human
agaagcgagggagggaggg

SEQ ID NO: 313029 - RNA, 21 nt, Human
agaagcgagggagggagggag

SEQ ID NO: 313030 - RNA, 26 nt, Human
agaagggaaggagggaaggaagggag

SEQ ID NO: 313031 - RNA, 18 nt, Human
agaagggagggaggggaa

SEQ ID NO: 313032 - RNA, 23 nt, Human
agacagaggugcagugagccaag

SEQ ID NO: 313033 - RNA, 24 nt, Human
agaccgggguguguuuuccuccag

SEQ ID NO: 313034 - RNA, 19 nt, Human
agagagaagaagcgaggga

SEQ ID NO: 313035 - RNA, 19 nt, Human
agaggugcagugagccaag

SEQ ID NO: 313036 - RNA, 26 nt, Human
agcaaaacaaauuaaaauuaaaccua

SEQ ID NO: 313037 - RNA, 21 nt, Human
agcaggugggugagccaguuc

SEQ ID NO: 313038 - RNA, 22 nt, Human
agccagccgggacagagcaaca

SEQ ID NO: 313039 - RNA, 25 nt, Human
agcccaacuucccuugcacguaucc

SEQ ID NO: 313040 - RNA, 19 nt, Human
agccgggacagagcaacag

SEQ ID NO: 313041 - RNA, 22 nt, Human
agccuggccaacauggugaaac

SEQ ID NO: 313042 - RNA, 24 nt, Human
agccuggccaacauggugaaaccc

SEQ ID NO: 313043 - RNA, 22 nt, Human
agccugggcaauggagugagac

SEQ ID NO: 313044 - RNA, 24 nt, Human
agccugggcaauggagugagacuc

SEQ ID NO: 313045 - RNA, 23 nt, Human
agccuguucccaucccuccucug

SEQ ID NO: 313046 - RNA, 24 nt, Human
agcgcagcgcgggcagccacagcc

SEQ ID NO: 313047 - RNA, 18 nt, Human
aggaagaagggagggagg

SEQ ID NO: 313048 - RNA, 22 nt, Human
aggaaggaaagaaggaaggaag

SEQ ID NO: 313049 - RNA, 21 nt, Human
aggaaggaaggaaagaaggaa

SEQ ID NO: 313050 - RNA, 21 nt, Human
aggaaggaaggaaggaaggaa

SEQ ID NO: 313051 - RNA, 21 nt, Human
aggaaggaaggaaggaaggaa

SEQ ID NO: 313052 - RNA, 21 nt, Human
aggaaggaaggaaggaaggaa

SEQ ID NO: 313053 - RNA, 21 nt, Human
aggaaggaaggaaggaaggaa

SEQ ID NO: 313054 - RNA, 21 nt, Human
aggaaggaaggaaggaaggaa

SEQ ID NO: 313055 - RNA, 21 nt, Human
aggaaggaaggaaggaaggaa

SEQ ID NO: 313056 - RNA, 21 nt, Human
aggaaggaaggaaggaaggaa

SEQ ID NO: 313057 - RNA, 21 nt, Human
aggaaggaaggaaggaaggaa

SEQ ID NO: 313058 - RNA, 21 nt, Human
aggaaggaaggaaggaaggaa

SEQ ID NO: 313059 - RNA, 21 nt, Human
aggaaggaaggaaggaaggaa

SEQ ID NO: 313060 - RNA, 21 nt, Human
aggaaggaaggaaggaaggaa

SEQ ID NO: 313061 - RNA, 21 nt, Human
aggaaggaaggaaggaaggaa

SEQ ID NO: 313062 - RNA, 21 nt, Human
aggaaggaaggaaggaaggaa

SEQ ID NO: 313063 - RNA, 21 nt, Human
aggaaggaaggaaggaaggaa

SEQ ID NO: 313064 - RNA, 21 nt, Human
aggaaggaaggaaggaaggaa

SEQ ID NO: 313065 - RNA, 24 nt, Human
aggaaggaagggguuggaaaggaa

SEQ ID NO: 313066 - RNA, 24 nt, Human
aggaaggaagggguuggaaaggga

SEQ ID NO: 313067 - RNA, 23 nt, Human
aggaagguuuacaggucuacaau

SEQ ID NO: 313068 - RNA, 20 nt, Human
aggaagugagggagggaggg

SEQ ID NO: 313069 - RNA, 21 nt, Human
aggagggaaggaagggaggga

SEQ ID NO: 313070 - RNA, 21 nt, Human
aggagggaaggaagggaggga

SEQ ID NO: 313071 - RNA, 21 nt, Human
aggaugggggagagggaggaa

SEQ ID NO: 313072 - RNA, 21 nt, Human
aggcaggagaaucacuugaac

SEQ ID NO: 313073 - RNA, 24 nt, Human
aggcaggagaaucacuugaacuug

SEQ ID NO: 313074 - RNA, 24 nt, Human
aggcaugguggcaugcaccuguaa

SEQ ID NO: 313075 - RNA, 24 nt, Human
aggcgcgcggaucacaaggucagg

SEQ ID NO: 313076 - RNA, 24 nt, Human
aggcucaggcaggagaaucacuug

SEQ ID NO: 313077 - RNA, 22 nt, Human
agggaaggaagguuuacagguc

SEQ ID NO: 313078 - RNA, 23 nt, Human
agggaaggaagguuuacaggucu

SEQ ID NO: 313079 - RNA, 19 nt, Human
agggagggaggggaagaau

SEQ ID NO: 313080 - RNA, 22 nt, Human
agggagggaggggaagaaugga

SEQ ID NO: 313081 - RNA, 20 nt, Human
agggguuggaaagggagaag

SEQ ID NO: 313082 - RNA, 23 nt, Human
aggugggugagccaguucccaag

SEQ ID NO: 313083 - RNA, 18 nt, Human
aguaagaaagagagaaga

SEQ ID NO: 313084 - RNA, 22 nt, Human
agugagggagggaggggaagga

SEQ ID NO: 313085 - RNA, 22 nt, Human
agugaugagcccaaaagcuccu

SEQ ID NO: 313086 - RNA, 19 nt, Human
aucacaaggucaggaguuc

SEQ ID NO: 313087 - RNA, 24 nt, Human
aucgcaccauuguacuccagccug

SEQ ID NO: 313088 - RNA, 19 nt, Human
aucuggagccaagucauuc

SEQ ID NO: 313089 - RNA, 26 nt, Human
augguggcuuauggacgcuuuuaaga

SEQ ID NO: 313090 - RNA, 19 nt, Human
auguucuuuucucccugcc

SEQ ID NO: 313091 - RNA, 27 nt, Human
caaaaaaaaccaaaaaaaagaaagaaa

SEQ ID NO: 313092 - RNA, 21 nt, Human
caaaacccacaugguagcacu

SEQ ID NO: 313093 - RNA, 22 nt, Human
caaaacccacaugguagcacua

SEQ ID NO: 313094 - RNA, 24 nt, Human
caacauggugaaaccccgucucua

SEQ ID NO: 313095 - RNA, 19 nt, Human
caacucagucuccuacaaa

SEQ ID NO: 313096 - RNA, 31 nt, Human
cacagaaugguggcuuauggacgcuuuuaaa

SEQ ID NO: 313097 - RNA, 24 nt, Human
cacagcaccagcagagggccuaga

SEQ ID NO: 313098 - RNA, 21 nt, Human
cacagccuguucccaucccuc

SEQ ID NO: 313099 - RNA, 24 nt, Human
cacagccuguucccaucccuccuc

SEQ ID NO: 313100 - RNA, 24 nt, Human
caccauuguacuccagccugggca

SEQ ID NO: 313101 - RNA, 20 nt, Human
caccccucucuccaacuaag

SEQ ID NO: 313102 - RNA, 20 nt, Human
caccccuuacuacucugagc

SEQ ID NO: 313103 - RNA, 23 nt, Human
caccuguaaucccagcuacucgg

SEQ ID NO: 313104 - RNA, 24 nt, Human
caccuguaaucccagcuacucggg

SEQ ID NO: 313105 - RNA, 24 nt, Human
cacgccugugaucccagcacucug

SEQ ID NO: 313106 - RNA, 18 nt, Human
cacugugcgcgccccagc

SEQ ID NO: 313107 - RNA, 21 nt, Human
cagcacucugagaggcugagg

SEQ ID NO: 313108 - RNA, 19 nt, Human
cagcgcagcgcgggcagcc

SEQ ID NO: 313109 - RNA, 22 nt, Human
caggacucaggugggagccacg

SEQ ID NO: 313110 - RNA, 19 nt, Human
caucacauccucccaccuc

SEQ ID NO: 313111 - RNA, 18 nt, Human
cauuguacuccagccugg

SEQ ID NO: 313112 - RNA, 19 nt, Human
cauuguacuccagccuggg

SEQ ID NO: 313113 - RNA, 21 nt, Human
cauuguacuccagccugggca

SEQ ID NO: 313114 - RNA, 24 nt, Human
cauuguacuccagccugggcaaug

SEQ ID NO: 313115 - RNA, 25 nt, Human
cauuguacuccagccugggcaaugg

SEQ ID NO: 313116 - RNA, 21 nt, Human
ccacccacuucccaccccuua

SEQ ID NO: 313117 - RNA, 20 nt, Human
ccagccagccgggacagagc

SEQ ID NO: 313118 - RNA, 21 nt, Human
ccagcggccccggcccagagc

SEQ ID NO: 313119 - RNA, 20 nt, Human
ccauuguacuccagccuggg

SEQ ID NO: 313120 - RNA, 21 nt, Human
ccauuguacuccagccugggc

SEQ ID NO: 313121 - RNA, 22 nt, Human
ccauuguacuccagccugggca

SEQ ID NO: 313122 - RNA, 23 nt, Human
ccauuguacuccagccugggcaa

SEQ ID NO: 313123 - RNA, 24 nt, Human
ccauuguacuccagccugggcaau

SEQ ID NO: 313124 - RNA, 25 nt, Human
ccauuguacuccagccugggcaaug

SEQ ID NO: 313125 - RNA, 22 nt, Human
cccacaugguaaaaggcugggu

SEQ ID NO: 313126 - RNA, 20 nt, Human
cccacaugguagcacuaagc

SEQ ID NO: 313127 - RNA, 26 nt, Human
cccaccccuuacuacucugagcccca

SEQ ID NO: 313128 - RNA, 23 nt, Human
cccagaaaagucauuucccagaa

SEQ ID NO: 313129 - RNA, 21 nt, Human
cccaugcaggcuuccaggcca

SEQ ID NO: 313130 - RNA, 18 nt, Human
ccccacacucggagccag

SEQ ID NO: 313131 - RNA, 21 nt, Human
ccccgugucaagcccucccca

SEQ ID NO: 313132 - RNA, 24 nt, Human
ccccgugucaagcccuccccaggc

SEQ ID NO: 313133 - RNA, 19 nt, Human
cccgcggggaccugcugug

SEQ ID NO: 313134 - RNA, 24 nt, Human
cccggcccagagcgccccacacuc

SEQ ID NO: 313135 - RNA, 22 nt, Human
cccgugucaagcccuccccagg

SEQ ID NO: 313136 - RNA, 20 nt, Human
cccugccacccacuucccac

SEQ ID NO: 313137 - RNA, 23 nt, Human
ccgaccaaacacacccuucaccc

SEQ ID NO: 313138 - RNA, 19 nt, Human
ccgccggccaccacauaca

SEQ ID NO: 313139 - RNA, 18 nt, Human
ccgggacagagcaacagc

SEQ ID NO: 313140 - RNA, 21 nt, Human
ccuccaguggagccaccgcuu

SEQ ID NO: 313141 - RNA, 26 nt, Human
ccucccacaccccucucuccaacuaa

SEQ ID NO: 313142 - RNA, 19 nt, Human
ccucuggaaaacguugauc

SEQ ID NO: 313143 - RNA, 21 nt, Human
ccugccacccacuucccaccc

SEQ ID NO: 313144 - RNA, 23 nt, Human
ccuggccaacauggugaaacccc

SEQ ID NO: 313145 - RNA, 24 nt, Human
ccuggccaacauggugaaaccccg

SEQ ID NO: 313146 - RNA, 22 nt, Human
ccugggcaauggagugagacuc

SEQ ID NO: 313147 - RNA, 21 nt, Human
ccuguaaucccagcuacucgg

SEQ ID NO: 313148 - RNA, 21 nt, Human
ccugugaucccagcacucuga

SEQ ID NO: 313149 - RNA, 18 nt, Human
ccuuuucucuuugaagcc

SEQ ID NO: 313150 - RNA, 24 nt, Human
cgagaccagccuggccaacauggu

SEQ ID NO: 313151 - RNA, 22 nt, Human
cgagggagggagggagguaaag

SEQ ID NO: 313152 - RNA, 21 nt, Human
cgcaccauuguacuccagccu

SEQ ID NO: 313153 - RNA, 22 nt, Human
cggaucacaaggucaggaguuc

SEQ ID NO: 313154 - RNA, 24 nt, Human
cgggaggcucaggcaggagaauca

SEQ ID NO: 313155 - RNA, 21 nt, Human
cgggcagccacagccugcacc

SEQ ID NO: 313156 - RNA, 18 nt, Human
cggggcuggucuucccgc

SEQ ID NO: 313157 - RNA, 25 nt, Human
cguucacuaucaagagcuaagcaca

SEQ ID NO: 313158 - RNA, 21 nt, Human
cuagaggugagagagaaaugg

SEQ ID NO: 313159 - RNA, 23 nt, Human
cucacgccugugaucccagcacu

SEQ ID NO: 313160 - RNA, 24 nt, Human
cucacgccugugaucccagcacuc

SEQ ID NO: 313161 - RNA, 20 nt, Human
cuccaacuaagaugcacagc

SEQ ID NO: 313162 - RNA, 25 nt, Human
cucccugccacccacuucccacccc

SEQ ID NO: 313163 - RNA, 21 nt, Human
cuccucugucccucucuucgu

SEQ ID NO: 313164 - RNA, 20 nt, Human
cugaggcuguuuccugggcu

SEQ ID NO: 313165 - RNA, 21 nt, Human
cuguaaucccagcuacucggg

SEQ ID NO: 313166 - RNA, 21 nt, Human
gaacugacagcucaaggacuc

SEQ ID NO: 313167 - RNA, 20 nt, Human
gaacuugggagacagaggug

SEQ ID NO: 313168 - RNA, 19 nt, Human
gaaggaugggggagaggga

SEQ ID NO: 313169 - RNA, 24 nt, Human
gaagggaaggagggaaggaaggga

SEQ ID NO: 313170 - RNA, 18 nt, Human
gaagggagggaggaaaag

SEQ ID NO: 313171 - RNA, 18 nt, Human
gaagggagggaggaaaag

SEQ ID NO: 313172 - RNA, 29 nt, Human
gaagggagggaggaaaaggaaggaagggg

SEQ ID NO: 313173 - RNA, 18 nt, Human
gaagugagggagggaggg

SEQ ID NO: 313174 - RNA, 23 nt, Human
gagaaucacuugaacuugggaga

SEQ ID NO: 313175 - RNA, 18 nt, Human
gagagaagaagcgaggga

SEQ ID NO: 313176 - RNA, 22 nt, Human
gagcaacagcgcagcgcgggca

SEQ ID NO: 313177 - RNA, 24 nt, Human
gagcaacagcgcagcgcgggcagc

SEQ ID NO: 313178 - RNA, 18 nt, Human
gagggaaggaagggaggg

SEQ ID NO: 313179 - RNA, 18 nt, Human
gagggaaggaagggaggg

SEQ ID NO: 313180 - RNA, 23 nt, Human
gagggaggaaaaggaaggaaggg

SEQ ID NO: 313181 - RNA, 23 nt, Human
gagggaggaaaaggaaggaaggg

SEQ ID NO: 313182 - RNA, 24 nt, Human
gaggugcugucggggcuggucuuc

SEQ ID NO: 313183 - RNA, 21 nt, Human
gagugagacuccgucccaaaa

SEQ ID NO: 313184 - RNA, 22 nt, Human
gaucacaaggucaggaguucga

SEQ ID NO: 313185 - RNA, 24 nt, Human
gaucacaaggucaggaguucgaga

SEQ ID NO: 313186 - RNA, 20 nt, Human
gcaccauuguacuccagccu

SEQ ID NO: 313187 - RNA, 24 nt, Human
gcagcgcgggcagccacagccugc

SEQ ID NO: 313188 - RNA, 23 nt, Human
gcaggagaaucacuugaacuugg

SEQ ID NO: 313189 - RNA, 24 nt, Human
gccaacauggugaaaccccgucuc

SEQ ID NO: 313190 - RNA, 18 nt, Human
gccaccacauacaucuua

SEQ ID NO: 313191 - RNA, 22 nt, Human
gccaccacauacaucuuaaaau

SEQ ID NO: 313192 - RNA, 20 nt, Human
gcccaacuucccuugcacgu

SEQ ID NO: 313193 - RNA, 18 nt, Human
gcccagagcgccccacac

SEQ ID NO: 313194 - RNA, 18 nt, Human
gcgagggagggagggagg

SEQ ID NO: 313195 - RNA, 24 nt, Human
gcgcggaucacaaggucaggaguu

SEQ ID NO: 313196 - RNA, 21 nt, Human
gcucaaggacucuggcaucag

SEQ ID NO: 313197 - RNA, 19 nt, Human
gcugggugcgguggcucac

SEQ ID NO: 313198 - RNA, 20 nt, Human
ggaaagggagaagggaagga

SEQ ID NO: 313199 - RNA, 28 nt, Human
ggaaagggagaagggaaggagggaagga

SEQ ID NO: 313200 - RNA, 22 nt, Human
ggaagggagggaggaaaaggaa

SEQ ID NO: 313201 - RNA, 22 nt, Human
ggaagggagggaggaaaaggaa

SEQ ID NO: 313202 - RNA, 20 nt, Human
ggaccugcugugugugggug

SEQ ID NO: 313203 - RNA, 22 nt, Human
ggagagggaggaagugagggag

SEQ ID NO: 313204 - RNA, 25 nt, Human
ggagagggaggaagugagggaggga

SEQ ID NO: 313205 - RNA, 18 nt, Human
ggaggaagugagggaggg

SEQ ID NO: 313206 - RNA, 18 nt, Human
ggagggaaggaagggagg

SEQ ID NO: 313207 - RNA, 24 nt, Human
ggagggaggaaaaggaaggaaggg

SEQ ID NO: 313208 - RNA, 25 nt, Human
ggaggggaaggaagaagggaaggaa

SEQ ID NO: 313209 - RNA, 18 nt, Human
ggcaggacucagcccgcc

SEQ ID NO: 313210 - RNA, 20 nt, Human
ggccccgcggggaccugcug

SEQ ID NO: 313211 - RNA, 29 nt, Human
gggaagaauggaaggaugggggagagggg

SEQ ID NO: 313212 - RNA, 24 nt, Human
gggaaggaagaagggaaggaaggg

SEQ ID NO: 313213 - RNA, 20 nt, Human
gggagagggaggaagugagg

SEQ ID NO: 313214 - RNA, 23 nt, Human
gggagggaggggaaggaagaagg

SEQ ID NO: 313215 - RNA, 18 nt, Human
gggccuagaggugagaga

SEQ ID NO: 313216 - RNA, 22 nt, Human
ggggagagggaggaagugaggg

SEQ ID NO: 313217 - RNA, 24 nt, Human
gggugcgguggcucacgccuguga

SEQ ID NO: 313218 - RNA, 24 nt, Human
gguggcaugcaccuguaaucccag

SEQ ID NO: 313219 - RNA, 23 nt, Human
gguggcucacgccugugauccca

SEQ ID NO: 313220 - RNA, 24 nt, Human
gguggcucacgccugugaucccag

SEQ ID NO: 313221 - RNA, 22 nt, Human
ggugguguggggcaagcugugg

SEQ ID NO: 313222 - RNA, 21 nt, Human
ggugugaaggugguguggggc

SEQ ID NO: 313223 - RNA, 23 nt, Human
guacuccagccugggcaauggag

SEQ ID NO: 313224 - RNA, 21 nt, Human
gucaagcccuccccaggccag

SEQ ID NO: 313225 - RNA, 22 nt, Human
gugcagugagccaagaucgcac

SEQ ID NO: 313226 - RNA, 22 nt, Human
gugguguggggcaagcuguggg

SEQ ID NO: 313227 - RNA, 23 nt, Human
guugccuuuucucuuugaagccg

SEQ ID NO: 313228 - RNA, 23 nt, Human
guuuuccuccaguggagccaccg

SEQ ID NO: 313229 - RNA, 21 nt, Human
uaaaaauacaaaaauuagcca

SEQ ID NO: 313230 - RNA, 22 nt, Human
uacuccagccugggcaauggag

SEQ ID NO: 313231 - RNA, 24 nt, Human
uacuccagccugggcaauggagug

SEQ ID NO: 313232 - RNA, 24 nt, Human
uacuucuggcugaggcuccagagg

SEQ ID NO: 313233 - RNA, 22 nt, Human
uagaggugagagagaaauggcc

SEQ ID NO: 313234 - RNA, 18 nt, Human
ucacaaggucaggaguuc

SEQ ID NO: 313235 - RNA, 24 nt, Human
ucacaaggucaggaguucgagacc

SEQ ID NO: 313236 - RNA, 22 nt, Human
ucacgccugugaucccagcacu

SEQ ID NO: 313237 - RNA, 23 nt, Human
ucacuggccuguccccacccacc

SEQ ID NO: 313238 - RNA, 18 nt, Human
ucacuugaacuugggaga

SEQ ID NO: 313239 - RNA, 25 nt, Human
ucacuugaacuugggagacagaggu

SEQ ID NO: 313240 - RNA, 23 nt, Human
ucagcccgccaugggcgccugcc

SEQ ID NO: 313241 - RNA, 20 nt, Human
ucaggcaggagaaucacuug

SEQ ID NO: 313242 - RNA, 23 nt, Human
ucaggcaggagaaucacuugaac

SEQ ID NO: 313243 - RNA, 22 nt, Human
ucagggaacaggacucaggugg

SEQ ID NO: 313244 - RNA, 20 nt, Human
uccaagaaaugaaaugugac

SEQ ID NO: 313245 - RNA, 23 nt, Human
uccagccugggcaauggagugag

SEQ ID NO: 313246 - RNA, 24 nt, Human
uccagccugggcaauggagugaga

SEQ ID NO: 313247 - RNA, 18 nt, Human
ucccacaccccucucucc

SEQ ID NO: 313248 - RNA, 19 nt, Human
ucccacaccccucucucca

SEQ ID NO: 313249 - RNA, 20 nt, Human
ucccacaccccucucuccaa

SEQ ID NO: 313250 - RNA, 18 nt, Human
ucccaccccuuacuacuc

SEQ ID NO: 313251 - RNA, 20 nt, Human
ucccagaaaagucauuuccc

SEQ ID NO: 313252 - RNA, 18 nt, Human
uccccaggagggagggug

SEQ ID NO: 313253 - RNA, 22 nt, Human
ucccuauaauuaccucccaaaa

SEQ ID NO: 313254 - RNA, 20 nt, Human
uccucagccuuccuccuccc

SEQ ID NO: 313255 - RNA, 23 nt, Human
uccucccacaccccucucuccaa

SEQ ID NO: 313256 - RNA, 23 nt, Human
ucgcaccauuguacuccagccug

SEQ ID NO: 313257 - RNA, 21 nt, Human
ucucuacuaaaaauacaaaaa

SEQ ID NO: 313258 - RNA, 25 nt, Human
ucugcagccaggccgccugucaccc

SEQ ID NO: 313259 - RNA, 19 nt, Human
ucuggcugaggcuccagag

SEQ ID NO: 313260 - RNA, 21 nt, Human
ucuuuucucccugccacccac

SEQ ID NO: 313261 - RNA, 20 nt, Human
ugacagaaaugaaagcccau

SEQ ID NO: 313262 - RNA, 21 nt, Human
ugacagcucaaggacucuggc

SEQ ID NO: 313263 - RNA, 22 nt, Human
ugacuacuccaaacaagcauga

SEQ ID NO: 313264 - RNA, 24 nt, Human
ugagaggcugaggcgcgcggauca

SEQ ID NO: 313265 - RNA, 24 nt, Human
ugaggcgcgcggaucacaagguca

SEQ ID NO: 313266 - RNA, 18 nt, Human
ugagggagggaggggaag

SEQ ID NO: 313267 - RNA, 19 nt, Human
ugcaccuguaaucccagcu

SEQ ID NO: 313268 - RNA, 22 nt, Human
ugcagccaggccgccugucacc

SEQ ID NO: 313269 - RNA, 27 nt, Human
ugccuggacuguaaaucuggccgaggc

SEQ ID NO: 313270 - RNA, 26 nt, Human
uggaaaggaagaagggagggagggga

SEQ ID NO: 313271 - RNA, 21 nt, Human
uggaaagggagaagggaagga

SEQ ID NO: 313272 - RNA, 23 nt, Human
uggaccacagacuuggcaacauu

SEQ ID NO: 313273 - RNA, 19 nt, Human
uggagccaagucauuccuc

SEQ ID NO: 313274 - RNA, 23 nt, Human
uggagccaccgcuugagcugagg

SEQ ID NO: 313275 - RNA, 19 nt, Human
uggagggggccuugguucc

SEQ ID NO: 313276 - RNA, 22 nt, Human
uggcaugcaccuguaaucccag

SEQ ID NO: 313277 - RNA, 24 nt, Human
uggccaacauggugaaaccccguc

SEQ ID NO: 313278 - RNA, 22 nt, Human
uggcucacgccugugaucccag

SEQ ID NO: 313279 - RNA, 24 nt, Human
uggcucacgccugugaucccagca

SEQ ID NO: 313280 - RNA, 18 nt, Human
uggcuuauggacgcuuuu

SEQ ID NO: 313281 - RNA, 24 nt, Human
ugguggcaugcaccuguaauccca

SEQ ID NO: 313282 - RNA, 24 nt, Human
ugguguggggcaagcugugggaac

SEQ ID NO: 313283 - RNA, 19 nt, Human
uguacuccagccugggcaa

SEQ ID NO: 313284 - RNA, 24 nt, Human
uguacuccagccugggcaauggag

SEQ ID NO: 313285 - RNA, 24 nt, Human
ugugugugggugugaagguggugu

SEQ ID NO: 313286 - RNA, 23 nt, Human
uuccucagccuuccuccucccug

SEQ ID NO: 313287 - RNA, 19 nt, Human
uuccugggcuuuuuaaagg

SEQ ID NO: 313288 - RNA, 25 nt, Human
uugaagccgacaguuuggcuucuuu

SEQ ID NO: 313289 - RNA, 23 nt, Human
uugagcugaggcuguuuccuggg

SEQ ID NO: 313290 - RNA, 20 nt, Human
uugcacggcgcccaugcagg

SEQ ID NO: 313291 - RNA, 18 nt, Human
uuucagggaacaggacuc

SEQ ID NO: 313292 - RNA, 21 nt, Human
uuugaagccgacaguuuggcu

SEQ ID NO: 313293 - RNA, 21 nt, Human
agaggaugaggaggagaggcc

SEQ ID NO: 313294 - RNA, 22 nt, Human
aggaggaugaggaugaagagga

SEQ ID NO: 313295 - RNA, 18 nt, Human
aggcagggaccagaggaa

SEQ ID NO: 313296 - RNA, 21 nt, Human
aucugccccaggcccaacuca

SEQ ID NO: 313297 - RNA, 22 nt, Human
caagggaccaaggcagggacca

SEQ ID NO: 313298 - RNA, 22 nt, Human
caccacuggccuccugccccuc

SEQ ID NO: 313299 - RNA, 20 nt, Human
ccaaggcagggaccagagga

SEQ ID NO: 313300 - RNA, 20 nt, Human
ccacagccgcagccgcugcu

SEQ ID NO: 313301 - RNA, 21 nt, Human
ccacuggccuccugccccucu

SEQ ID NO: 313302 - RNA, 22 nt, Human
ccacuggccuccugccccucuu

SEQ ID NO: 313303 - RNA, 24 nt, Human
ccaggcccacaccaggcggggugc

SEQ ID NO: 313304 - RNA, 24 nt, Human
ccccaccacuggccuccugccccu

SEQ ID NO: 313305 - RNA, 25 nt, Human
ccccccuggaccuccaggggucugu

SEQ ID NO: 313306 - RNA, 18 nt, Human
ccccucuucccaggcaag

SEQ ID NO: 313307 - RNA, 21 nt, Human
ccggggcugcaccggcugccc

SEQ ID NO: 313308 - RNA, 24 nt, Human
ccuccugccccucuucccaggcaa

SEQ ID NO: 313309 - RNA, 21 nt, Human
ccucgggccccccuggaccuc

SEQ ID NO: 313310 - RNA, 28 nt, Human
ccugccccucuucccaggcaagggacca

SEQ ID NO: 313311 - RNA, 19 nt, Human
ccugccucgggccccccug

SEQ ID NO: 313312 - RNA, 22 nt, Human
ccugccucgggccccccuggac

SEQ ID NO: 313313 - RNA, 19 nt, Human
cugccccaggcccaacuca

SEQ ID NO: 313314 - RNA, 21 nt, Human
cugccucgggccccccuggac

SEQ ID NO: 313315 - RNA, 27 nt, Human
cuuuccuuuuuuuuuuuuuuuuuuggu

SEQ ID NO: 313316 - RNA, 21 nt, Human
cuuuuuuuuuuuuuuuuuugg

SEQ ID NO: 313317 - RNA, 20 nt, Human
gaugaagaggaugaggagga

SEQ ID NO: 313318 - RNA, 21 nt, Human
gcccccagcaccagauucccg

SEQ ID NO: 313319 - RNA, 23 nt, Human
gccuccugccccucuucccaggc

SEQ ID NO: 313320 - RNA, 19 nt, Human
gcugcugagaccaggccca

SEQ ID NO: 313321 - RNA, 24 nt, Human
ggaaugggaggggaggcauggcug

SEQ ID NO: 313322 - RNA, 23 nt, Human
ggaccaaggcagggaccagagga

SEQ ID NO: 313323 - RNA, 18 nt, Human
ggaggcauggcuggcccu

SEQ ID NO: 313324 - RNA, 25 nt, Human
guagagguuuuuuuuuuuuuuuggu

SEQ ID NO: 313325 - RNA, 23 nt, Human
uagagguuuuuuuuuuuuuuugg

SEQ ID NO: 313326 - RNA, 27 nt, Human
uaguuucuuuccuuuuuuuuuuuuuuu

SEQ ID NO: 313327 - RNA, 18 nt, Human
ucagguuuggacccugcc

SEQ ID NO: 313328 - RNA, 18 nt, Human
uccccggggcugcaccgg

SEQ ID NO: 313329 - RNA, 24 nt, Human
ucccuugucacuccugcucugagg

SEQ ID NO: 313330 - RNA, 18 nt, Human
uccuuuuuuuuuuuuuuu

SEQ ID NO: 313331 - RNA, 18 nt, Human
uccuuuuuuuuuuuuuuu

SEQ ID NO: 313332 - RNA, 22 nt, Human
ucuguugugauuauuuuugguu

SEQ ID NO: 313333 - RNA, 18 nt, Human
ugaagaggaugaggagga

SEQ ID NO: 313334 - RNA, 20 nt, Human
ugauucaagaagagcggcga

SEQ ID NO: 313335 - RNA, 22 nt, Human
ugcaccggcugcccccagcacc

SEQ ID NO: 313336 - RNA, 18 nt, Human
ugccgucucgcugcaagu

SEQ ID NO: 313337 - RNA, 21 nt, Human
ugccucgggccccccuggacc

SEQ ID NO: 313338 - RNA, 19 nt, Human
ugcuggagauggaggcugc

SEQ ID NO: 313339 - RNA, 21 nt, Human
ugcuggagauggaggcugcca

SEQ ID NO: 313340 - RNA, 25 nt, Human
uggaggaggaggaggaugaggauga

SEQ ID NO: 313341 - RNA, 22 nt, Human
uggcuggcccucacucagguuu

SEQ ID NO: 313342 - RNA, 19 nt, Human
ugggaggggaggcauggcu

SEQ ID NO: 313343 - RNA, 20 nt, Human
ugggaggggaggcauggcug

SEQ ID NO: 313344 - RNA, 21 nt, Human
ugggaggggaggcauggcugg

SEQ ID NO: 313345 - RNA, 23 nt, Human
ugguuuguuuuugguuuuuuuug

SEQ ID NO: 313346 - RNA, 25 nt, Human
uuaguuucuuuccuuuuuuuuuuuu

SEQ ID NO: 313347 - RNA, 24 nt, Human
uugguuguuuuuuuggucuuuccu

SEQ ID NO: 313348 - RNA, 26 nt, Human
uuguuuguuuuucaccucugguuccu

SEQ ID NO: 313349 - RNA, 18 nt, Human
uuuuucaccucugguucc

SEQ ID NO: 313350 - RNA, 19 nt, Human
uuuuuugguugguuguuuu

SEQ ID NO: 313351 - RNA, 21 nt, Human
uuuuuuuuugguugguuguuu

SEQ ID NO: 313352 - RNA, 26 nt, Human
uuuuuuuuuuuuuuugguuuguuuuu

SEQ ID NO: 313353 - RNA, 18 nt, Human
uuuuuuuuuuuuuuuuug

SEQ ID NO: 313354 - RNA, 21 nt, Human
uuuuuuuuuuuuuuuuugguu

SEQ ID NO: 313355 - RNA, 23 nt, Human
uuuuuuuuuuuuuuuuugguugg

SEQ ID NO: 313356 - RNA, 20 nt, Human
aaaaaaccaagcccggagaa

SEQ ID NO: 313357 - RNA, 25 nt, Human
aaaaaccaagcccggagaaagggga

SEQ ID NO: 313358 - RNA, 24 nt, Human
aaaauccaaagcaaccgaacaaaa

SEQ ID NO: 313359 - RNA, 23 nt, Human
aaaccaagcccggagaaagggga

SEQ ID NO: 313360 - RNA, 24 nt, Human
agaaaggggaaagcgggguggggc

SEQ ID NO: 313361 - RNA, 19 nt, Human
agcgcgccggcgggggccc

SEQ ID NO: 313362 - RNA, 21 nt, Human
aggcggcgggcaggaugcccg

SEQ ID NO: 313363 - RNA, 24 nt, Human
aggcggcgggcaggaugcccgggg

SEQ ID NO: 313364 - RNA, 24 nt, Human
auaaaaaccguaaaaaaccaagcc

SEQ ID NO: 313365 - RNA, 19 nt, Human
cagcgcgccggcgggggcc

SEQ ID NO: 313366 - RNA, 20 nt, Human
caggagccgagaggcuccac

SEQ ID NO: 313367 - RNA, 20 nt, Human
ccacccuggacccgcaggcu

SEQ ID NO: 313368 - RNA, 25 nt, Human
ccccgcacugcguuaccugucgcuu

SEQ ID NO: 313369 - RNA, 22 nt, Human
cccgcacugcguuaccugucgg

SEQ ID NO: 313370 - RNA, 21 nt, Human
cccgcaggcucaggaguccac

SEQ ID NO: 313371 - RNA, 18 nt, Human
cccuggacccgcaggcuc

SEQ ID NO: 313372 - RNA, 23 nt, Human
ccgcgcccugcagcgcgccggcg

SEQ ID NO: 313373 - RNA, 19 nt, Human
ccggaucuucgcuccucuc

SEQ ID NO: 313374 - RNA, 22 nt, Human
ccggccccgaacagcccggggg

SEQ ID NO: 313375 - RNA, 21 nt, Human
ccuccggggccccgauaaaua

SEQ ID NO: 313376 - RNA, 22 nt, Human
cgaguuccggaucuucgcuccu

SEQ ID NO: 313377 - RNA, 25 nt, Human
cgcccugcagcgcgccggcgggggc

SEQ ID NO: 313378 - RNA, 25 nt, Human
cgcgaccuccccuccggggccccga

SEQ ID NO: 313379 - RNA, 19 nt, Human
cgcgccggcgggggcccgg

SEQ ID NO: 313380 - RNA, 23 nt, Human
cgcugccgggauccggccccgaa

SEQ ID NO: 313381 - RNA, 18 nt, Human
cggccccgaacagcccgg

SEQ ID NO: 313382 - RNA, 24 nt, Human
cguaaaaaaccaagcccggagaaa

SEQ ID NO: 313383 - RNA, 25 nt, Human
cguccucucucccggggaaucccua

SEQ ID NO: 313384 - RNA, 24 nt, Human
cucgcuucguccucucucccgggg

SEQ ID NO: 313385 - RNA, 20 nt, Human
gaccuccccuccggggcccc

SEQ ID NO: 313386 - RNA, 22 nt, Human
gagaaaggggaaagcggggugg

SEQ ID NO: 313387 - RNA, 21 nt, Human
gagaacucuccucgcuucguc

SEQ ID NO: 313388 - RNA, 22 nt, Human
gcagcgcgccggcgggggcccg

SEQ ID NO: 313389 - RNA, 21 nt, Human
gcccgggggggcaggggcggg

SEQ ID NO: 313390 - RNA, 24 nt, Human
gcccgggggggcaggggcgggggu

SEQ ID NO: 313391 - RNA, 21 nt, Human
gcuucguccucucucccgggg

SEQ ID NO: 313392 - RNA, 21 nt, Human
ggagagaagaggcguguagcg

SEQ ID NO: 313393 - RNA, 21 nt, Human
ggaggccgcugccgggauccg

SEQ ID NO: 313394 - RNA, 19 nt, Human
ggcagagagcaggcggcgg

SEQ ID NO: 313395 - RNA, 24 nt, Human
ggcaggggcgggggucgucgaggg

SEQ ID NO: 313396 - RNA, 29 nt, Human
ggcaggggcgggggucgucgaggggaugg

SEQ ID NO: 313397 - RNA, 21 nt, Human
ggcuuuuuuuuuuuuuuguaa

SEQ ID NO: 313398 - RNA, 21 nt, Human
gggcgacgcagccuaccgggc

SEQ ID NO: 313399 - RNA, 22 nt, Human
gggcggaguuagaaggacccca

SEQ ID NO: 313400 - RNA, 18 nt, Human
ggggaugggggcagagag

SEQ ID NO: 313401 - RNA, 24 nt, Human
gggggggcaggggcgggggucguc

SEQ ID NO: 313402 - RNA, 24 nt, Human
gggucgucgaggggaugggggcag

SEQ ID NO: 313403 - RNA, 21 nt, Human
guaaaaaaccaagcccggagg

SEQ ID NO: 313404 - RNA, 19 nt, Human
uaaaauccaaagcaaccga

SEQ ID NO: 313405 - RNA, 20 nt, Human
uaaagugacagccccccacc

SEQ ID NO: 313406 - RNA, 21 nt, Human
uaaagugacagccccccaccc

SEQ ID NO: 313407 - RNA, 22 nt, Human
uaaauaaaaaccguaaaaaacc

SEQ ID NO: 313408 - RNA, 19 nt, Human
uaccugucgcuuuggggag

SEQ ID NO: 313409 - RNA, 22 nt, Human
uccacgaauaaauaaaaaccgu

SEQ ID NO: 313410 - RNA, 24 nt, Human
ucccuaaccccgcacugcguuacc

SEQ ID NO: 313411 - RNA, 22 nt, Human
uccugcuuuuauacacagacgc

SEQ ID NO: 313412 - RNA, 22 nt, Human
ucgcuucguccucucucccggg

SEQ ID NO: 313413 - RNA, 20 nt, Human
ugcuuuuuuuuggggggagg

SEQ ID NO: 313414 - RNA, 20 nt, Human
uggggcgcauccuuauagga

SEQ ID NO: 313415 - RNA, 19 nt, Human
uggggggaggguaggguag

SEQ ID NO: 313416 - RNA, 26 nt, Human
uguaaaauccaaagcaaccgaacaaa

SEQ ID NO: 313417 - RNA, 22 nt, Human
uguuugguuuuguucgaaaguu

SEQ ID NO: 313418 - RNA, 24 nt, Human
uuaaagcuuuggcuauuuccugcu

SEQ ID NO: 313419 - RNA, 20 nt, Human
uuccggaucuucgcuccucu

SEQ ID NO: 313420 - RNA, 19 nt, Human
uugcuuuuuuuugggggga

SEQ ID NO: 313421 - RNA, 22 nt, Human
uuuggggggaggguaggguagg

SEQ ID NO: 313422 - RNA, 22 nt, Human
uuuuggggggaggguaggguag

SEQ ID NO: 313423 - RNA, 22 nt, Human
aaacacagcagcaugugccaac

SEQ ID NO: 313424 - RNA, 23 nt, Human
aacaagagggccgggaaagggcc

SEQ ID NO: 313425 - RNA, 23 nt, Human
aacaaucagaaguuagagaggga

SEQ ID NO: 313426 - RNA, 20 nt, Human
aagcaucaggaagcugcauu

SEQ ID NO: 313427 - RNA, 19 nt, Human
acaccugcuaccuuuaaag

SEQ ID NO: 313428 - RNA, 18 nt, Human
acuccacuccauugccug

SEQ ID NO: 313429 - RNA, 19 nt, Human
acuccacuccauugccugg

SEQ ID NO: 313430 - RNA, 25 nt, Human
cacucuccucacucucuccaggaga

SEQ ID NO: 313431 - RNA, 23 nt, Human
cagcaugugccaacucuaagcau

SEQ ID NO: 313432 - RNA, 20 nt, Human
caggagacacuccacuccau

SEQ ID NO: 313433 - RNA, 21 nt, Human
ccagugucuuaguugcuuucc

SEQ ID NO: 313434 - RNA, 19 nt, Human
ccggacugagcgcuccggu

SEQ ID NO: 313435 - RNA, 19 nt, Human
ccgggaaagggccaaggac

SEQ ID NO: 313436 - RNA, 28 nt, Human
ccucgcucgcucuuucugucuccucucu

SEQ ID NO: 313437 - RNA, 19 nt, Human
cgccugcaaaggucaaaac

SEQ ID NO: 313438 - RNA, 20 nt, Human
cgcucugccccucccccagc

SEQ ID NO: 313439 - RNA, 23 nt, Human
cuagcuaucacacacucuccuca

SEQ ID NO: 313440 - RNA, 21 nt, Human
cuccaggagacacuccacucc

SEQ ID NO: 313441 - RNA, 18 nt, Human
cucgcucgcucuuucugu

SEQ ID NO: 313442 - RNA, 19 nt, Human
gacgcccgcuccgacgccu

SEQ ID NO: 313443 - RNA, 19 nt, Human
gagccggacugagcgcucc

SEQ ID NO: 313444 - RNA, 19 nt, Human
gccccgcgcucugccccuc

SEQ ID NO: 313445 - RNA, 22 nt, Human
gccucgggcucccucuccucgc

SEQ ID NO: 313446 - RNA, 18 nt, Human
ggagccccgcgcucugcc

SEQ ID NO: 313447 - RNA, 19 nt, Human
ggagggggagccccgcgcu

SEQ ID NO: 313448 - RNA, 19 nt, Human
ggggagccccgcgcucugc

SEQ ID NO: 313449 - RNA, 21 nt, Human
gguuugguggauuuuuuuucc

SEQ ID NO: 313450 - RNA, 21 nt, Human
uaaaggagccgcgcauuugac

SEQ ID NO: 313451 - RNA, 19 nt, Human
uaaauaaacacagcagcag

SEQ ID NO: 313452 - RNA, 19 nt, Human
uaaauaaacacagcagcau

SEQ ID NO: 313453 - RNA, 23 nt, Human
uacucgccugcaaaggucaaaac

SEQ ID NO: 313454 - RNA, 22 nt, Human
ucacacacucuccucacucucu

SEQ ID NO: 313455 - RNA, 26 nt, Human
uccacaauaaauaaacacagcagcau

SEQ ID NO: 313456 - RNA, 25 nt, Human
uccacuccauugccugguuacucgc

SEQ ID NO: 313457 - RNA, 21 nt, Human
ucgcucgcucuuucugucucc

SEQ ID NO: 313458 - RNA, 19 nt, Human
ucugucuccucucucuccc

SEQ ID NO: 313459 - RNA, 18 nt, Human
ucugucucucucucuuuc

SEQ ID NO: 313460 - RNA, 20 nt, Human
ugguggauuuuuuuuccuuu

SEQ ID NO: 313461 - RNA, 22 nt, Human
uuaaaggagccgcgcauuugac

SEQ ID NO: 313462 - RNA, 19 nt, Human
uuaguuuugccagguauuu

SEQ ID NO: 313463 - RNA, 21 nt, Human
uucugucuccucucucuccca

SEQ ID NO: 313464 - RNA, 24 nt, Human
uuucugucuccucucucucccaca

SEQ ID NO: 313465 - RNA, 20 nt, Human
aaaagaaaagaaagggaaag

SEQ ID NO: 313466 - RNA, 19 nt, Human
aaaaggaaaggaaagcaaa

SEQ ID NO: 313467 - RNA, 21 nt, Human
aaaaugaaaggaaaggaaagg

SEQ ID NO: 313468 - RNA, 23 nt, Human
aaagaaaaaggggaaagggaaag

SEQ ID NO: 313469 - RNA, 21 nt, Human
aaagaagggaaagaaaaaggg

SEQ ID NO: 313470 - RNA, 27 nt, Human
aaaggaaagcaaaagaaaagaaaggga

SEQ ID NO: 313471 - RNA, 23 nt, Human
aaaggaaaggaaagcaaaagaaa

SEQ ID NO: 313472 - RNA, 18 nt, Human
aacgagagagagagaaaa

SEQ ID NO: 313473 - RNA, 20 nt, Human
aagaagggaaagaaaaagga

SEQ ID NO: 313474 - RNA, 22 nt, Human
aaggaaagaaaagggaaaaaaa

SEQ ID NO: 313475 - RNA, 18 nt, Human
aagggaagggaagggaag

SEQ ID NO: 313476 - RNA, 24 nt, Human
aaggggaaagggaaagaaaaagga

SEQ ID NO: 313477 - RNA, 21 nt, Human
aaugaaaggaaaggaaaggga

SEQ ID NO: 313478 - RNA, 22 nt, Human
agaaaagaaagggaaaggaaag

SEQ ID NO: 313479 - RNA, 19 nt, Human
agaaagggaaaggaaagga

SEQ ID NO: 313480 - RNA, 21 nt, Human
agcgaacgagagagagagaaa

SEQ ID NO: 313481 - RNA, 21 nt, Human
aggaaagaaaagggaaaaaaa

SEQ ID NO: 313482 - RNA, 19 nt, Human
aggaaagcaaaagaaaaga

SEQ ID NO: 313483 - RNA, 22 nt, Human
aggaaaggaaagcaaaagaaaa

SEQ ID NO: 313484 - RNA, 21 nt, Human
aggaaaggaaagggaaaaaga

SEQ ID NO: 313485 - RNA, 19 nt, Human
aggaaagggaaaaagaagg

SEQ ID NO: 313486 - RNA, 23 nt, Human
agggaaaaagaagggaaagaaaa

SEQ ID NO: 313487 - RNA, 21 nt, Human
agggaagggaagggaagggga

SEQ ID NO: 313488 - RNA, 18 nt, Human
augaaaggaaaggaaagg

SEQ ID NO: 313489 - RNA, 24 nt, Human
cccagugcggccggccgccuccuc

SEQ ID NO: 313490 - RNA, 24 nt, Human
cggccggccgccuccucgcuuccu

SEQ ID NO: 313491 - RNA, 18 nt, Human
gaaaaagaagggaaagaa

SEQ ID NO: 313492 - RNA, 20 nt, Human
gaaagaaaaaggggaaaggg

SEQ ID NO: 313493 - RNA, 20 nt, Human
gaagggaagggaagggaagg

SEQ ID NO: 313494 - RNA, 24 nt, Human
gaagggaagggaaggggaaaggaa

SEQ ID NO: 313495 - RNA, 20 nt, Human
gcggccggccgccuccucgc

SEQ ID NO: 313496 - RNA, 20 nt, Human
ggaaaaagaagggaaagaaa

SEQ ID NO: 313497 - RNA, 21 nt, Human
ggaaaaagaagggaaagaaaa

SEQ ID NO: 313498 - RNA, 23 nt, Human
ggaaaggaagagauggaagggaa

SEQ ID NO: 313499 - RNA, 19 nt, Human
ggaagggaagggaagggga

SEQ ID NO: 313500 - RNA, 26 nt, Human
gggaaaaaaaggaaaggaaagcaaaa

SEQ ID NO: 313501 - RNA, 18 nt, Human
gggaaagaaaaaggggaa

SEQ ID NO: 313502 - RNA, 27 nt, Human
ucaacagaaguuagaaccucuuaugaa

SEQ ID NO: 313503 - RNA, 18 nt, Human
ugaaaaggaaagaaaagg

SEQ ID NO: 313504 - RNA, 18 nt, Human
ugaaaggaaaggaaaggg

SEQ ID NO: 313505 - RNA, 20 nt, Human
ugagagagaaaggaaauccc

SEQ ID NO: 313506 - RNA, 21 nt, Human
ugagagagaaaggaaaucccg

SEQ ID NO: 313507 - RNA, 22 nt, Human
ugagagagaaaggaaaucccgg

SEQ ID NO: 313508 - RNA, 22 nt, Human
aaaaaagauaaaacugaaaggg

SEQ ID NO: 313509 - RNA, 22 nt, Human
aaacaggagagaguaucucucc

SEQ ID NO: 313510 - RNA, 21 nt, Human
aaagacccccaccccaacagg

SEQ ID NO: 313511 - RNA, 24 nt, Human
aaagacccccaccccaacaggacc

SEQ ID NO: 313512 - RNA, 27 nt, Human
aaagagaaaaaacauaaccaaggagaa

SEQ ID NO: 313513 - RNA, 18 nt, Human
aaagcaggcauuuuaccu

SEQ ID NO: 313514 - RNA, 24 nt, Human
aaagccccccaaaaaugccuccuc

SEQ ID NO: 313515 - RNA, 24 nt, Human
aaaugacucuugaauaauaagaac

SEQ ID NO: 313516 - RNA, 23 nt, Human
aacacgcagacagaacaaggaaa

SEQ ID NO: 313517 - RNA, 19 nt, Human
aagagaggaagaaacggga

SEQ ID NO: 313518 - RNA, 21 nt, Human
aagcagaggaaagccccccaa

SEQ ID NO: 313519 - RNA, 20 nt, Human
aagcuccggaauucugcuuu

SEQ ID NO: 313520 - RNA, 19 nt, Human
aauaacuuuuuuccuguuu

SEQ ID NO: 313521 - RNA, 24 nt, Human
aauaauaagaacaaguaaaaggaa

SEQ ID NO: 313522 - RNA, 21 nt, Human
aaucaacaggaaaaaucagua

SEQ ID NO: 313523 - RNA, 21 nt, Human
aauccccacacccagcacccc

SEQ ID NO: 313524 - RNA, 19 nt, Human
acaaaaacgcacccaaauc

SEQ ID NO: 313525 - RNA, 20 nt, Human
acccagcaccccaguccuca

SEQ ID NO: 313526 - RNA, 21 nt, Human
acccagcaccccaguccucaa

SEQ ID NO: 313527 - RNA, 22 nt, Human
accccagaaccauccugcuccu

SEQ ID NO: 313528 - RNA, 18 nt, Human
accccaguccucaaggcu

SEQ ID NO: 313529 - RNA, 20 nt, Human
acccccaccccaacaggacc

SEQ ID NO: 313530 - RNA, 24 nt, Human
acccccaccccaacaggaccaggc

SEQ ID NO: 313531 - RNA, 22 nt, Human
acccuauacuccaauccccaca

SEQ ID NO: 313532 - RNA, 20 nt, Human
acccuucccgcgucuccccc

SEQ ID NO: 313533 - RNA, 21 nt, Human
acccuucccgcgucucccccc

SEQ ID NO: 313534 - RNA, 20 nt, Human
accuagaagagcaagaugag

SEQ ID NO: 313535 - RNA, 19 nt, Human
accucuuugaaacaaaugg

SEQ ID NO: 313536 - RNA, 23 nt, Human
acgccggcucacccggccucccu

SEQ ID NO: 313537 - RNA, 18 nt, Human
acuaugcccuucucucca

SEQ ID NO: 313538 - RNA, 23 nt, Human
acucccccgaaugcucccccccu

SEQ ID NO: 313539 - RNA, 24 nt, Human
agacagguagaucaauccgugaga

SEQ ID NO: 313540 - RNA, 22 nt, Human
agagaaaaaacauaaccaagga

SEQ ID NO: 313541 - RNA, 23 nt, Human
agagaggaagaaacgggaccuag

SEQ ID NO: 313542 - RNA, 18 nt, Human
agccauaggccucucauu

SEQ ID NO: 313543 - RNA, 21 nt, Human
aggaaagccccccaaaaaugc

SEQ ID NO: 313544 - RNA, 26 nt, Human
aggaagaaacgggaccuagaagagca

SEQ ID NO: 313545 - RNA, 22 nt, Human
aggcagggccacgggaaaaguu

SEQ ID NO: 313546 - RNA, 23 nt, Human
auccacaaacacuccgaaagucc

SEQ ID NO: 313547 - RNA, 24 nt, Human
augaacacuggcagucuguuacca

SEQ ID NO: 313548 - RNA, 20 nt, Human
augcagaccucuuugaaaca

SEQ ID NO: 313549 - RNA, 21 nt, Human
caaaaaugccuccucagcucc

SEQ ID NO: 313550 - RNA, 21 nt, Human
caacaggaccaggccaccaga

SEQ ID NO: 313551 - RNA, 22 nt, Human
caagaugagucucguucagugg

SEQ ID NO: 313552 - RNA, 19 nt, Human
cacaaacacuccgaaaguc

SEQ ID NO: 313553 - RNA, 19 nt, Human
cacacccagcaccccaguc

SEQ ID NO: 313554 - RNA, 19 nt, Human
cacagccaaguccuaccgc

SEQ ID NO: 313555 - RNA, 20 nt, Human
caccagaguauaggcagggc

SEQ ID NO: 313556 - RNA, 23 nt, Human
cacccagcaccccaguccucaag

SEQ ID NO: 313557 - RNA, 23 nt, Human
caccccauuagucuauuugaauc

SEQ ID NO: 313558 - RNA, 22 nt, Human
cacccggccucccuucggaggc

SEQ ID NO: 313559 - RNA, 21 nt, Human
cagcaaaggcaggaaaaucag

SEQ ID NO: 313560 - RNA, 20 nt, Human
cauguauauccacaaacacu

SEQ ID NO: 313561 - RNA, 19 nt, Human
cauuucaggaugaacacug

SEQ ID NO: 313562 - RNA, 21 nt, Human
cauuuuccuuugcuuuuguuc

SEQ ID NO: 313563 - RNA, 19 nt, Human
ccaacaggaccaggccacc

SEQ ID NO: 313564 - RNA, 21 nt, Human
ccaagagaggaagaaacggga

SEQ ID NO: 313565 - RNA, 18 nt, Human
ccacaaacacuccgaaag

SEQ ID NO: 313566 - RNA, 19 nt, Human
ccacccaaaccccagaacc

SEQ ID NO: 313567 - RNA, 22 nt, Human
ccaccuucaacuaucuuaauuu

SEQ ID NO: 313568 - RNA, 20 nt, Human
cccaacaggaccaggccacc

SEQ ID NO: 313569 - RNA, 21 nt, Human
cccagcaccccaguccucaag

SEQ ID NO: 313570 - RNA, 18 nt, Human
ccccaaaaaugccuccuc

SEQ ID NO: 313571 - RNA, 18 nt, Human
ccccacacccagcacccc

SEQ ID NO: 313572 - RNA, 21 nt, Human
ccccacacccagcaccccagu

SEQ ID NO: 313573 - RNA, 21 nt, Human
ccccacccaaaccccagaacc

SEQ ID NO: 313574 - RNA, 22 nt, Human
ccccacuccccacucccccgaa

SEQ ID NO: 313575 - RNA, 24 nt, Human
cccccaccccaacaggaccaggcc

SEQ ID NO: 313576 - RNA, 20 nt, Human
cccccacuccccacuccccc

SEQ ID NO: 313577 - RNA, 19 nt, Human
ccccccaaaaaugccuccu

SEQ ID NO: 313578 - RNA, 21 nt, Human
ccccccaaaaaugccuccuca

SEQ ID NO: 313579 - RNA, 22 nt, Human
ccccccacccaaaccccagaac

SEQ ID NO: 313580 - RNA, 20 nt, Human
ccccccacuccccacucccc

SEQ ID NO: 313581 - RNA, 23 nt, Human
ccccccacuccccacucccccga

SEQ ID NO: 313582 - RNA, 18 nt, Human
ccccccuucuccccuacc

SEQ ID NO: 313583 - RNA, 18 nt, Human
cccgacaccucccagccc

SEQ ID NO: 313584 - RNA, 20 nt, Human
ccgcgggcugcugcugcugc

SEQ ID NO: 313585 - RNA, 20 nt, Human
ccuaagcaagcagccagccu

SEQ ID NO: 313586 - RNA, 19 nt, Human
ccuauacuccaauccccac

SEQ ID NO: 313587 - RNA, 24 nt, Human
ccuccucagcuccccauucugucc

SEQ ID NO: 313588 - RNA, 20 nt, Human
ccucgcggucccgcuucucc

SEQ ID NO: 313589 - RNA, 25 nt, Human
cgaaugcucccccccuucuccccua

SEQ ID NO: 313590 - RNA, 22 nt, Human
cgggcugcugcugcugcuccug

SEQ ID NO: 313591 - RNA, 26 nt, Human
cuaccagaaagcuagcccaguuuagu

SEQ ID NO: 313592 - RNA, 20 nt, Human
cuaccaggaccuggcccagg

SEQ ID NO: 313593 - RNA, 19 nt, Human
cuccaaagacccccacccc

SEQ ID NO: 313594 - RNA, 20 nt, Human
cucccccugacccucucuuu

SEQ ID NO: 313595 - RNA, 22 nt, Human
cuccccggaguuaaaauuucua

SEQ ID NO: 313596 - RNA, 19 nt, Human
cuccccuacccuauacucc

SEQ ID NO: 313597 - RNA, 21 nt, Human
cucccuucggaggcugcagcc

SEQ ID NO: 313598 - RNA, 20 nt, Human
cugcuccugcugcugccagg

SEQ ID NO: 313599 - RNA, 23 nt, Human
cugcugcugcuccugcugcugcc

SEQ ID NO: 313600 - RNA, 18 nt, Human
cuuaaaaccccugcucgg

SEQ ID NO: 313601 - RNA, 21 nt, Human
cuuaaaaccccugcucggguc

SEQ ID NO: 313602 - RNA, 19 nt, Human
cuuuaaaucugucuuccuc

SEQ ID NO: 313603 - RNA, 22 nt, Human
gaagaaacgggaccuagaagag

SEQ ID NO: 313604 - RNA, 20 nt, Human
gacauaagaggaaaaaaaac

SEQ ID NO: 313605 - RNA, 26 nt, Human
gaccucuuugaaacaaaugggggugg

SEQ ID NO: 313606 - RNA, 20 nt, Human
gcagaggaaagccccccaaa

SEQ ID NO: 313607 - RNA, 22 nt, Human
gcucacccggccucccuucgga

SEQ ID NO: 313608 - RNA, 23 nt, Human
gcucccccccuucuccccuaccc

SEQ ID NO: 313609 - RNA, 21 nt, Human
gcugcugcuccugcugcugcc

SEQ ID NO: 313610 - RNA, 21 nt, Human
gcugcugcuccugcugcugcc

SEQ ID NO: 313611 - RNA, 20 nt, Human
ggaccuagaagagcaagaug

SEQ ID NO: 313612 - RNA, 22 nt, Human
ggaggcaagcagaggaaagccc

SEQ ID NO: 313613 - RNA, 22 nt, Human
gggugggggcacuuuaaaucug

SEQ ID NO: 313614 - RNA, 24 nt, Human
ggucccgcuucuccgacagcucua

SEQ ID NO: 313615 - RNA, 20 nt, Human
ggugcucuuuuuucucuucu

SEQ ID NO: 313616 - RNA, 20 nt, Human
gguugguagguuuguuuuug

SEQ ID NO: 313617 - RNA, 21 nt, Human
guacugggacacaucccccug

SEQ ID NO: 313618 - RNA, 20 nt, Human
gucgcggcggcuggcggcga

SEQ ID NO: 313619 - RNA, 24 nt, Human
gucuuuauuugucuaguuuuuggu

SEQ ID NO: 313620 - RNA, 20 nt, Human
guggaggugagagagggaaa

SEQ ID NO: 313621 - RNA, 25 nt, Human
uaaaccucucucuaaaaaaaagaua

SEQ ID NO: 313622 - RNA, 22 nt, Human
uaaccaaggagaaagcucagca

SEQ ID NO: 313623 - RNA, 27 nt, Human
uaaccaaggagaaagcucagcagacau

SEQ ID NO: 313624 - RNA, 19 nt, Human
uaagaacaaguaaaaggaa

SEQ ID NO: 313625 - RNA, 23 nt, Human
uaagaacaaguaaaaggaaacac

SEQ ID NO: 313626 - RNA, 23 nt, Human
uaagcaagcagccagccuccccc

SEQ ID NO: 313627 - RNA, 22 nt, Human
uaccagaaagcuagcccaguuu

SEQ ID NO: 313628 - RNA, 25 nt, Human
uaccagaaagcuagcccaguuuagg

SEQ ID NO: 313629 - RNA, 21 nt, Human
uacuccaauccccacacccag

SEQ ID NO: 313630 - RNA, 26 nt, Human
uacuccaauccccacacccagcaccc

SEQ ID NO: 313631 - RNA, 19 nt, Human
uaggggacagcaaaggcag

SEQ ID NO: 313632 - RNA, 24 nt, Human
uauaaacacaaaaacgcacccaaa

SEQ ID NO: 313633 - RNA, 19 nt, Human
uaugacaaaaauguuuuca

SEQ ID NO: 313634 - RNA, 20 nt, Human
uaugcccuucucuccaaaga

SEQ ID NO: 313635 - RNA, 20 nt, Human
ucaacauuucuauaauuuca

SEQ ID NO: 313636 - RNA, 19 nt, Human
ucagcagacauacauagac

SEQ ID NO: 313637 - RNA, 18 nt, Human
uccaaagacccccacccc

SEQ ID NO: 313638 - RNA, 18 nt, Human
uccaaagaguaucuugua

SEQ ID NO: 313639 - RNA, 22 nt, Human
uccacaaacacuccgaaagucc

SEQ ID NO: 313640 - RNA, 24 nt, Human
uccacaaacacuccgaaaguccgc

SEQ ID NO: 313641 - RNA, 18 nt, Human
uccaccagcagcuuguaa

SEQ ID NO: 313642 - RNA, 22 nt, Human
uccccacucccccgaaugcucc

SEQ ID NO: 313643 - RNA, 18 nt, Human
uccccccacccaaacccc

SEQ ID NO: 313644 - RNA, 20 nt, Human
uccccccacccaaaccccag

SEQ ID NO: 313645 - RNA, 19 nt, Human
ucuaccaggaccuggccca

SEQ ID NO: 313646 - RNA, 21 nt, Human
ucuccgcuuuccuucccccca

SEQ ID NO: 313647 - RNA, 20 nt, Human
ucucuaaaaaaaagauaaaa

SEQ ID NO: 313648 - RNA, 19 nt, Human
ucuguuuuguuuuaguuug

SEQ ID NO: 313649 - RNA, 20 nt, Human
ugaaaucgcacuagccacaa

SEQ ID NO: 313650 - RNA, 24 nt, Human
ugcaggcaggauaacggacacucc

SEQ ID NO: 313651 - RNA, 23 nt, Human
ugccaggcgcucccucugaccgc

SEQ ID NO: 313652 - RNA, 18 nt, Human
ugcccugcaaacaaugau

SEQ ID NO: 313653 - RNA, 23 nt, Human
ugcccuucucuccaaagaccccc

SEQ ID NO: 313654 - RNA, 19 nt, Human
ugcuccuuaaaaccccugc

SEQ ID NO: 313655 - RNA, 21 nt, Human
ugcugcugcuccugcugcugc

SEQ ID NO: 313656 - RNA, 21 nt, Human
ugcugcugcugcuccugcugc

SEQ ID NO: 313657 - RNA, 21 nt, Human
uggaacggaggaaauaaagag

SEQ ID NO: 313658 - RNA, 20 nt, Human
uggaggaaagagagcgagaa

SEQ ID NO: 313659 - RNA, 24 nt, Human
uggcauguauauccacaaacacuc

SEQ ID NO: 313660 - RNA, 21 nt, Human
ugggaaaagcuuauuuugaaa

SEQ ID NO: 313661 - RNA, 23 nt, Human
ugggggaaaaugaaguugcagau

SEQ ID NO: 313662 - RNA, 18 nt, Human
ugggguggaggugagaga

SEQ ID NO: 313663 - RNA, 22 nt, Human
ugggguggaggugagagaggga

SEQ ID NO: 313664 - RNA, 27 nt, Human
uggguggaggaaagagagcgagaaggg

SEQ ID NO: 313665 - RNA, 22 nt, Human
uggucagaaacaguccauuuuc

SEQ ID NO: 313666 - RNA, 20 nt, Human
ugucccgcccgacaccuccc

SEQ ID NO: 313667 - RNA, 25 nt, Human
uguugaaagguucuaccaggaccug

SEQ ID NO: 313668 - RNA, 24 nt, Human
uguuuuguuuuaguuugucuuuau

SEQ ID NO: 313669 - RNA, 23 nt, Human
uguuuuuguacauaguuccuugg

SEQ ID NO: 313670 - RNA, 20 nt, Human
uuaaaauuucuaaagcauuu

SEQ ID NO: 313671 - RNA, 20 nt, Human
uuccccccacuccccacucc

SEQ ID NO: 313672 - RNA, 23 nt, Human
uuccuagaauaagauaucucgaa

SEQ ID NO: 313673 - RNA, 25 nt, Human
uugaaacaaaugggggugggggcaa

SEQ ID NO: 313674 - RNA, 22 nt, Human
uuggcgcauagaauugguucug

SEQ ID NO: 313675 - RNA, 22 nt, Human
uuguacauaguuccuugguccc

SEQ ID NO: 313676 - RNA, 18 nt, Human
uuguucuguuuucgccca

SEQ ID NO: 313677 - RNA, 22 nt, Human
uuucagcugugcucccacucac

SEQ ID NO: 313678 - RNA, 22 nt, Human
uuucaggaugaacacuggcagu

SEQ ID NO: 313679 - RNA, 24 nt, Human
uuuucagcugugcucccacucacu

SEQ ID NO: 313680 - RNA, 18 nt, Human
aaaaacccuggcacaaac

SEQ ID NO: 313681 - RNA, 18 nt, Human
aaaaacccuggcacaaac

SEQ ID NO: 313682 - RNA, 19 nt, Human
aaagcccugccacaaacuc

SEQ ID NO: 313683 - RNA, 19 nt, Human
aaccaguugccccaaacuc

SEQ ID NO: 313684 - RNA, 19 nt, Human
aaccaguugccccaaacuc

SEQ ID NO: 313685 - RNA, 19 nt, Human
aaccaguugccccaaacuc

SEQ ID NO: 313686 - RNA, 24 nt, Human
aaccaguugccccaaacuccccug

SEQ ID NO: 313687 - RNA, 24 nt, Human
aaccaguugccccaaacuccccug

SEQ ID NO: 313688 - RNA, 24 nt, Human
aaccaguugccccaaacuccccug

SEQ ID NO: 313689 - RNA, 19 nt, Human
aacuccccugcccccaccc

SEQ ID NO: 313690 - RNA, 19 nt, Human
aacuccccugcccccaccc

SEQ ID NO: 313691 - RNA, 19 nt, Human
aacuccccugcccccaccc

SEQ ID NO: 313692 - RNA, 25 nt, Human
aagaacuuaauccaaaaacccuggc

SEQ ID NO: 313693 - RNA, 21 nt, Human
aaggcgccccaagccgggggc

SEQ ID NO: 313694 - RNA, 23 nt, Human
accaguugccccaaacuccccug

SEQ ID NO: 313695 - RNA, 23 nt, Human
accaguugccccaaacuccccug

SEQ ID NO: 313696 - RNA, 23 nt, Human
accaguugccccaaacuccccug

SEQ ID NO: 313697 - RNA, 24 nt, Human
ccaaaagcccugccacaaacucca

SEQ ID NO: 313698 - RNA, 18 nt, Human
ccacaaaugucauucacc

SEQ ID NO: 313699 - RNA, 22 nt, Human
ccacccuuaguguucccaauuc

SEQ ID NO: 313700 - RNA, 22 nt, Human
ccacccuuuguguucccaauuc

SEQ ID NO: 313701 - RNA, 22 nt, Human
ccacccuuuguguucccaauuc

SEQ ID NO: 313702 - RNA, 24 nt, Human
ccaccuaacuucuagaaauaaccu

SEQ ID NO: 313703 - RNA, 24 nt, Human
cccaaaaacccuggcacaaacucc

SEQ ID NO: 313704 - RNA, 24 nt, Human
cccaaaagcccugccacaaacucc

SEQ ID NO: 313705 - RNA, 21 nt, Human
cccacaaaugucauucaccca

SEQ ID NO: 313706 - RNA, 22 nt, Human
ccccacccuuaguguucccaau

SEQ ID NO: 313707 - RNA, 22 nt, Human
ccccacccuuuguguucccaau

SEQ ID NO: 313708 - RNA, 22 nt, Human
ccccacccuuuguguucccaau

SEQ ID NO: 313709 - RNA, 25 nt, Human
ccccugcccccacccuuaguguucc

SEQ ID NO: 313710 - RNA, 25 nt, Human
ccccugcccccacccuuuguguucc

SEQ ID NO: 313711 - RNA, 25 nt, Human
ccccugcccccacccuuuguguucc

SEQ ID NO: 313712 - RNA, 18 nt, Human
ccccuguuccccauuccc

SEQ ID NO: 313713 - RNA, 27 nt, Human
cccuuaguguucccaauuuugacgggc

SEQ ID NO: 313714 - RNA, 21 nt, Human
ccugucccccauuccuagaag

SEQ ID NO: 313715 - RNA, 21 nt, Human
ccugucccccauuccuagaag

SEQ ID NO: 313716 - RNA, 21 nt, Human
cuuaaucccaaaaacccuggc

SEQ ID NO: 313717 - RNA, 19 nt, Human
cuuccgagcugcccaccua

SEQ ID NO: 313718 - RNA, 24 nt, Human
gccccaaacuccccugcccccacc

SEQ ID NO: 313719 - RNA, 24 nt, Human
gccccaaacuccccugcccccacc

SEQ ID NO: 313720 - RNA, 24 nt, Human
gccccaaacuccccugcccccacc

SEQ ID NO: 313721 - RNA, 25 nt, Human
gccuuccgagcugcccaccuaacuu

SEQ ID NO: 313722 - RNA, 23 nt, Human
gcgccccaagccgggggccuggu

SEQ ID NO: 313723 - RNA, 26 nt, Human
uaaaaucaagagcaucauugaacuuc

SEQ ID NO: 313724 - RNA, 26 nt, Human
uaaaaucaagagcaucauugaacuuc

SEQ ID NO: 313725 - RNA, 26 nt, Human
uaaaaucaagagcaucauugaacuuc

SEQ ID NO: 313726 - RNA, 23 nt, Human
uaagaaaaaagugauacaugaug

SEQ ID NO: 313727 - RNA, 23 nt, Human
uaagaaaaaagugauacaugaug

SEQ ID NO: 313728 - RNA, 23 nt, Human
uaagaaaaaagugauacaugaug

SEQ ID NO: 313729 - RNA, 26 nt, Human
uagcuccuccccucccccuguccccc

SEQ ID NO: 313730 - RNA, 26 nt, Human
uagcuccuccccucccccuguccccc

SEQ ID NO: 313731 - RNA, 25 nt, Human
uagcuccuccccuccccuguucccc

SEQ ID NO: 313732 - RNA, 24 nt, Human
uccaaaaacccuggcacaaacucc

SEQ ID NO: 313733 - RNA, 27 nt, Human
ucccaaaaacccuggcacaaacuccag

SEQ ID NO: 313734 - RNA, 21 nt, Human
ucccccugucccccauuccuc

SEQ ID NO: 313735 - RNA, 21 nt, Human
ucccccugucccccauuccuc

SEQ ID NO: 313736 - RNA, 22 nt, Human
ucccuagcuccuccccuccccc

SEQ ID NO: 313737 - RNA, 22 nt, Human
ucccuagcuccuccccuccccc

SEQ ID NO: 313738 - RNA, 22 nt, Human
ucccuagcuccuccccuccccu

SEQ ID NO: 313739 - RNA, 21 nt, Human
uccgagcugcccaccuaacuu

SEQ ID NO: 313740 - RNA, 18 nt, Human
ucuagaaauaaccuaccc

SEQ ID NO: 313741 - RNA, 21 nt, Human
ucuuucccuagcuccuccccu

SEQ ID NO: 313742 - RNA, 21 nt, Human
ucuuucccuagcuccuccccu

SEQ ID NO: 313743 - RNA, 22 nt, Human
ugaugugggauuaaaaucaaga

SEQ ID NO: 313744 - RNA, 22 nt, Human
ugaugugggauuaaaaucaaga

SEQ ID NO: 313745 - RNA, 22 nt, Human
ugaugugggauuaaaaucaaga

SEQ ID NO: 313746 - RNA, 24 nt, Human
ugggauuaaaaucaagagcaucau

SEQ ID NO: 313747 - RNA, 24 nt, Human
ugggauuaaaaucaagagcaucau

SEQ ID NO: 313748 - RNA, 24 nt, Human
ugggauuaaaaucaagagcaucau

SEQ ID NO: 313749 - RNA, 23 nt, Human
uuaaucccaaaaacccuggcaca

SEQ ID NO: 313750 - RNA, 19 nt, Human
uuauuuaagaaaaaaguga

SEQ ID NO: 313751 - RNA, 21 nt, Human
uugaacuucaccuucccucca

SEQ ID NO: 313752 - RNA, 21 nt, Human
uugaacuucaccuucccucca

SEQ ID NO: 313753 - RNA, 21 nt, Human
uugaacuucaccuucccucca

SEQ ID NO: 313754 - RNA, 21 nt, Human
aacccaaggaggaagaaagcu

SEQ ID NO: 313755 - RNA, 25 nt, Human
aacccgcuugccccccuccagcccc

SEQ ID NO: 313756 - RNA, 20 nt, Human
aaccugccuuccuggcccug

SEQ ID NO: 313757 - RNA, 23 nt, Human
aagaggcacccuggucuccucca

SEQ ID NO: 313758 - RNA, 23 nt, Human
aaggagauaagaggcacccuggu

SEQ ID NO: 313759 - RNA, 22 nt, Human
acauacacagacacauugcaug

SEQ ID NO: 313760 - RNA, 22 nt, Human
acauucacacauacacagacac

SEQ ID NO: 313761 - RNA, 23 nt, Human
accccuaacccaggacacagcug

SEQ ID NO: 313762 - RNA, 19 nt, Human
acccgcuugccccccucca

SEQ ID NO: 313763 - RNA, 24 nt, Human
acccgcuugccccccuccagcccc

SEQ ID NO: 313764 - RNA, 21 nt, Human
agcuccgcagggcucggggca

SEQ ID NO: 313765 - RNA, 22 nt, Human
aggaggcagaccgcuagaagga

SEQ ID NO: 313766 - RNA, 20 nt, Human
caaaaauagaacuucucuug

SEQ ID NO: 313767 - RNA, 23 nt, Human
cacauacacagacacauugcaug

SEQ ID NO: 313768 - RNA, 26 nt, Human
cagcagcaccagagagggaaccugcc

SEQ ID NO: 313769 - RNA, 20 nt, Human
cauggcacaugggaccucag

SEQ ID NO: 313770 - RNA, 20 nt, Human
cauguugugcacacucaugg

SEQ ID NO: 313771 - RNA, 21 nt, Human
ccaaggaggaagaaagcucaa

SEQ ID NO: 313772 - RNA, 21 nt, Human
ccaggucccuuggucugagaa

SEQ ID NO: 313773 - RNA, 20 nt, Human
ccccaagagguaccaggagg

SEQ ID NO: 313774 - RNA, 20 nt, Human
ccccgagcuccgcagggcuc

SEQ ID NO: 313775 - RNA, 18 nt, Human
ccccuaacccaggacaca

SEQ ID NO: 313776 - RNA, 25 nt, Human
ccgacccccaaccccuaacccagga

SEQ ID NO: 313777 - RNA, 21 nt, Human
ccgcagggcucggggcaccag

SEQ ID NO: 313778 - RNA, 23 nt, Human
ccucggaacccgcuugccccccu

SEQ ID NO: 313779 - RNA, 21 nt, Human
ccuggaaggggccgaccccca

SEQ ID NO: 313780 - RNA, 19 nt, Human
cgcuugccccccuccagcc

SEQ ID NO: 313781 - RNA, 19 nt, Human
cggaacccgcuugcccccc

SEQ ID NO: 313782 - RNA, 19 nt, Human
cuccgcagggcucggggca

SEQ ID NO: 313783 - RNA, 19 nt, Human
gaaagcucaaccccucuag

SEQ ID NO: 313784 - RNA, 18 nt, Human
gaacccgcuugccccccu

SEQ ID NO: 313785 - RNA, 21 nt, Human
gacccccaaccccuaacccag

SEQ ID NO: 313786 - RNA, 19 nt, Human
gcuggccccgagcuccgca

SEQ ID NO: 313787 - RNA, 19 nt, Human
uaacccaggacacagcugg

SEQ ID NO: 313788 - RNA, 23 nt, Human
uacagguagaaaagccauauggg

SEQ ID NO: 313789 - RNA, 20 nt, Human
uagaaaagccauauggggca

SEQ ID NO: 313790 - RNA, 18 nt, Human
uagaaggagauaagaggc

SEQ ID NO: 313791 - RNA, 19 nt, Human
uagaaggagauaagaggca

SEQ ID NO: 313792 - RNA, 22 nt, Human
uccaacccaaggaggaagaaag

SEQ ID NO: 313793 - RNA, 22 nt, Human
ucggaacccgcuugccccccuc

SEQ ID NO: 313794 - RNA, 18 nt, Human
ucucacauucacacauac

SEQ ID NO: 313795 - RNA, 21 nt, Human
ucuccuccaacccaaggagga

SEQ ID NO: 313796 - RNA, 25 nt, Human
ucuugguauuuauaaaucuacggcc

SEQ ID NO: 313797 - RNA, 27 nt, Human
ugaaaggagggcuguguuuuucucacu

SEQ ID NO: 313798 - RNA, 21 nt, Human
ugaagguuuuuuuuccuccuu

SEQ ID NO: 313799 - RNA, 19 nt, Human
ugcaagcagcagcaccaga

SEQ ID NO: 313800 - RNA, 27 nt, Human
uggagcguugacuuagggggcguuuuu

SEQ ID NO: 313801 - RNA, 21 nt, Human
ugugcacacucauggcacaug

SEQ ID NO: 313802 - RNA, 24 nt, Human
uucucacauucacacauacacaga

SEQ ID NO: 313803 - RNA, 20 nt, Human
uuuccuccuuuuugcagucu

SEQ ID NO: 313804 - RNA, 28 nt, Human
uuuuucucacuucccuuuuuauuuccuc

SEQ ID NO: 313805 - RNA, 18 nt, Human
agaugaacacgauguagc

SEQ ID NO: 313806 - RNA, 18 nt, Human
auauacauccaauaugug

SEQ ID NO: 313807 - RNA, 22 nt, Human
cagagccaccagcccgcacgcg

SEQ ID NO: 313808 - RNA, 23 nt, Human
cccgcacgcggcgccgacugaca

SEQ ID NO: 313809 - RNA, 18 nt, Human
ccugccgccgccgcugcc

SEQ ID NO: 313810 - RNA, 23 nt, Human
cuucuaauacauccagaugaaca

SEQ ID NO: 313811 - RNA, 20 nt, Human
gcagaauuuacuuuaguuag

SEQ ID NO: 313812 - RNA, 22 nt, Human
gccggaguccugccgccgccgc

SEQ ID NO: 313813 - RNA, 23 nt, Human
gcugccacagagccaccagcccg

SEQ ID NO: 313814 - RNA, 18 nt, Human
uaacauauacauccaaua

SEQ ID NO: 313815 - RNA, 22 nt, Human
uagauggauaacauucugagua

SEQ ID NO: 313816 - RNA, 22 nt, Human
uagcaauaucagcuuguauucc

SEQ ID NO: 313817 - RNA, 21 nt, Human
ugacuuccaaaugacaacugc

SEQ ID NO: 313818 - RNA, 24 nt, Human
ugaguucuacaaauuuaaagcuuu

SEQ ID NO: 313819 - RNA, 22 nt, Human
ugccacagagccaccagcccgc

SEQ ID NO: 313820 - RNA, 24 nt, Human
ugccacagagccaccagcccgcac

SEQ ID NO: 313821 - RNA, 19 nt, Human
ugccggaguccugccgccg

SEQ ID NO: 313822 - RNA, 21 nt, Human
uuuuuuuuuuuuuuuuuucag

SEQ ID NO: 313823 - RNA, 21 nt, Human
aacuguggugacagcuucuca

SEQ ID NO: 313824 - RNA, 22 nt, Human
augaagcaggaagcacguccuc

SEQ ID NO: 313825 - RNA, 18 nt, Human
cgccgagcuccaagcucu

SEQ ID NO: 313826 - RNA, 18 nt, Human
cugagcuucagccugggc

SEQ ID NO: 313827 - RNA, 21 nt, Human
gcccugagcuucagccugggc

SEQ ID NO: 313828 - RNA, 22 nt, Human
ggugcugguugugcgccgagcu

SEQ ID NO: 313829 - RNA, 27 nt, Human
ucuugccacaaacuguugaguccacag

SEQ ID NO: 313830 - RNA, 18 nt, Human
ugacacugaaucugcugg

SEQ ID NO: 313831 - RNA, 21 nt, Human
ugcugcucccccgucuccuuu

SEQ ID NO: 313832 - RNA, 24 nt, Human
ugcugucagcuucagaacuccugg

SEQ ID NO: 313833 - RNA, 22 nt, Human
ugucuugccacaaacuguugag

SEQ ID NO: 313834 - RNA, 20 nt, Human
ugugcaaaaucgugcugcuc

SEQ ID NO: 313835 - RNA, 25 nt, Human
uuaaaacaaagauauggaauaauau

SEQ ID NO: 313836 - RNA, 20 nt, Human
aaaaauggaaaaagggagaa

SEQ ID NO: 313837 - RNA, 22 nt, Human
aaacagacaccaaacauuacuu

SEQ ID NO: 313838 - RNA, 24 nt, Human
aaacauggccuaaaaauggaaaaa

SEQ ID NO: 313839 - RNA, 19 nt, Human
aaaguccuucauuugcccu

SEQ ID NO: 313840 - RNA, 24 nt, Human
aaaguugaacaaccuucaugcaaa

SEQ ID NO: 313841 - RNA, 21 nt, Human
aaccaaaucagaccugucuga

SEQ ID NO: 313842 - RNA, 23 nt, Human
aagaaacagacaccaaacauuac

SEQ ID NO: 313843 - RNA, 23 nt, Human
aagcccuuccccaccacuaacgg

SEQ ID NO: 313844 - RNA, 21 nt, Human
aaucuucccucccccagucac

SEQ ID NO: 313845 - RNA, 20 nt, Human
accaaaguccuucauuugcc

SEQ ID NO: 313846 - RNA, 21 nt, Human
accccucccaccccccucccu

SEQ ID NO: 313847 - RNA, 25 nt, Human
acccuauuuaaacccuccuaaaaua

SEQ ID NO: 313848 - RNA, 21 nt, Human
acgaaacacuguauaaaaaca

SEQ ID NO: 313849 - RNA, 23 nt, Human
agaagaggagggugcucgaggcc

SEQ ID NO: 313850 - RNA, 22 nt, Human
agccuugcucuucggccuucca

SEQ ID NO: 313851 - RNA, 19 nt, Human
agucacuccuaagaaacag

SEQ ID NO: 313852 - RNA, 19 nt, Human
aguguccaaaaugaccaaa

SEQ ID NO: 313853 - RNA, 21 nt, Human
auaagcucccuaccaccauau

SEQ ID NO: 313854 - RNA, 21 nt, Human
auaugccuuucuaauucaccc

SEQ ID NO: 313855 - RNA, 23 nt, Human
caaaaggauaagcccuuccccac

SEQ ID NO: 313856 - RNA, 23 nt, Human
caaacaaaguugaacaaccuuca

SEQ ID NO: 313857 - RNA, 24 nt, Human
caauaguuuuuuuuccucuggccc

SEQ ID NO: 313858 - RNA, 21 nt, Human
caccccucccaccccccuccc

SEQ ID NO: 313859 - RNA, 18 nt, Human
caccccuuauggugguuu

SEQ ID NO: 313860 - RNA, 23 nt, Human
cagacaccaaacauuacuuaagu

SEQ ID NO: 313861 - RNA, 24 nt, Human
cauggccuaaaaauggaaaaaggg

SEQ ID NO: 313862 - RNA, 21 nt, Human
ccagcagucccuacucuuccc

SEQ ID NO: 313863 - RNA, 24 nt, Human
ccccugagcuuucauccugaaggc

SEQ ID NO: 313864 - RNA, 28 nt, Human
ccccugagcuuucauccugaaggcgagg

SEQ ID NO: 313865 - RNA, 22 nt, Human
cccuacaccccucccacccccc

SEQ ID NO: 313866 - RNA, 24 nt, Human
cccuaccaccauauaagccuugcu

SEQ ID NO: 313867 - RNA, 24 nt, Human
ccuacaccccucccaccccccucc

SEQ ID NO: 313868 - RNA, 23 nt, Human
ccucccaccccccucccuuucuu

SEQ ID NO: 313869 - RNA, 25 nt, Human
ccucccaccccccucccuuucuuaa

SEQ ID NO: 313870 - RNA, 18 nt, Human
ccuucauauacaugcacu

SEQ ID NO: 313871 - RNA, 21 nt, Human
cgaggagaagcuagauccgcc

SEQ ID NO: 313872 - RNA, 20 nt, Human
cggcggcaagaagaggaggg

SEQ ID NO: 313873 - RNA, 22 nt, Human
cuaaaauaaucuucccuccccc

SEQ ID NO: 313874 - RNA, 21 nt, Human
cucccuaccaccauauaagcc

SEQ ID NO: 313875 - RNA, 24 nt, Human
cugaacccuauuuaaacccuccua

SEQ ID NO: 313876 - RNA, 21 nt, Human
cuggcacaggaacaaagaaga

SEQ ID NO: 313877 - RNA, 22 nt, Human
gaagacuuccugguaaccagaa

SEQ ID NO: 313878 - RNA, 19 nt, Human
gaaucaaacccugugguuu

SEQ ID NO: 313879 - RNA, 19 nt, Human
gaccugucugacucacccc

SEQ ID NO: 313880 - RNA, 22 nt, Human
gagaagaaaauauauaugaaua

SEQ ID NO: 313881 - RNA, 18 nt, Human
gcggcaagaagaggaggg

SEQ ID NO: 313882 - RNA, 19 nt, Human
gcuauaagcucccuaccac

SEQ ID NO: 313883 - RNA, 22 nt, Human
ggaaaaagggagaagaaaauau

SEQ ID NO: 313884 - RNA, 18 nt, Human
ggacaacuaccucaaaca

SEQ ID NO: 313885 - RNA, 25 nt, Human
gggagaagaaaauauauaugaauau

SEQ ID NO: 313886 - RNA, 24 nt, Human
uaacuccuaauauuccuaugaucu

SEQ ID NO: 313887 - RNA, 21 nt, Human
uagcuaaaauaaucuucccuc

SEQ ID NO: 313888 - RNA, 23 nt, Human
ucaaacggacaacuaccucaaac

SEQ ID NO: 313889 - RNA, 24 nt, Human
ucaaacggacaacuaccucaaaca

SEQ ID NO: 313890 - RNA, 24 nt, Human
ucaaacggacaacuaccucaaaca

SEQ ID NO: 313891 - RNA, 19 nt, Human
ucauuugcccaugacucaa

SEQ ID NO: 313892 - RNA, 23 nt, Human
ucccaccccccucccuuucuuaa

SEQ ID NO: 313893 - RNA, 23 nt, Human
ucccuacaccccucccacccccc

SEQ ID NO: 313894 - RNA, 18 nt, Human
uccucgguuuccccccug

SEQ ID NO: 313895 - RNA, 19 nt, Human
ugaaggcgaggagaagcua

SEQ ID NO: 313896 - RNA, 19 nt, Human
ugacuccucgguuuccccc

SEQ ID NO: 313897 - RNA, 21 nt, Human
ugcuugggcuugaugcuacag

SEQ ID NO: 313898 - RNA, 27 nt, Human
uuaaacccuccuaaaauaaaaauauca

SEQ ID NO: 313899 - RNA, 22 nt, Human
uuacucagcuuuucugacuccu

SEQ ID NO: 313900 - RNA, 21 nt, Human
uucauccugaaggcgaggaga

SEQ ID NO: 313901 - RNA, 18 nt, Human
uuucuuuaauagggucug

SEQ ID NO: 313902 - RNA, 22 nt, Human
aagcagaaugcagaaaugcagg

SEQ ID NO: 313903 - RNA, 21 nt, Human
aauagaucauauucuaaaacc

SEQ ID NO: 313904 - RNA, 24 nt, Human
agaaaaagacuugaaguaacagaa

SEQ ID NO: 313905 - RNA, 24 nt, Human
aggaaagggaauuaagcagaaugc

SEQ ID NO: 313906 - RNA, 19 nt, Human
aggccgacccaagcgcccc

SEQ ID NO: 313907 - RNA, 25 nt, Human
aggcggcggcugcggcuccucgcgg

SEQ ID NO: 313908 - RNA, 19 nt, Human
aggcggcggcugcggcucg

SEQ ID NO: 313909 - RNA, 20 nt, Human
aggcggcggcugcggcucga

SEQ ID NO: 313910 - RNA, 22 nt, Human
aggcggcggcugcggcucgggc

SEQ ID NO: 313911 - RNA, 21 nt, Human
aucauauucuaaauccuuuuc

SEQ ID NO: 313912 - RNA, 24 nt, Human
auccuuuucuuuuuaaaacgcuuu

SEQ ID NO: 313913 - RNA, 24 nt, Human
ccacggcggcguggcgccccucuc

SEQ ID NO: 313914 - RNA, 19 nt, Human
ccccaggcggcggcugcgg

SEQ ID NO: 313915 - RNA, 22 nt, Human
ccccaggcggcggcugcggcuc

SEQ ID NO: 313916 - RNA, 19 nt, Human
cuaaggaaagggaauuaag

SEQ ID NO: 313917 - RNA, 20 nt, Human
gaaaaagacuugaaguaaca

SEQ ID NO: 313918 - RNA, 22 nt, Human
gaauacacccaugagucaagac

SEQ ID NO: 313919 - RNA, 23 nt, Human
gacccaagcgccccaggcggcgg

SEQ ID NO: 313920 - RNA, 24 nt, Human
gcggccacggcggcguggcgcccc

SEQ ID NO: 313921 - RNA, 22 nt, Human
ggccacggcggcguggcgcccc

SEQ ID NO: 313922 - RNA, 24 nt, Human
uaaacaauaugcauaaaauagauc

SEQ ID NO: 313923 - RNA, 19 nt, Human
uaggugucagauuuucccu

SEQ ID NO: 313924 - RNA, 19 nt, Human
uccucgaggccgacccaag

SEQ ID NO: 313925 - RNA, 24 nt, Human
ugaaguaacagaauuugugaauac

SEQ ID NO: 313926 - RNA, 22 nt, Human
ugaauacacccaugagucaaga

SEQ ID NO: 313927 - RNA, 23 nt, Human
ugcggccacggcggcguggcgcc

SEQ ID NO: 313928 - RNA, 25 nt, Human
ugcggccacggcggcguggcgcccc

SEQ ID NO: 313929 - RNA, 20 nt, Human
uguuggcaguggcucaggac

SEQ ID NO: 313930 - RNA, 24 nt, Human
uuuuuuuuuuuuuucauaauaugg

SEQ ID NO: 313931 - RNA, 18 nt, Human
aaaaaaacagaguacaaa

SEQ ID NO: 313932 - RNA, 23 nt, Human
aaacaucauaccccaauagugca

SEQ ID NO: 313933 - RNA, 18 nt, Human
aaagaaaaacaagcgaca

SEQ ID NO: 313934 - RNA, 21 nt, Human
aaaguucccucucugcugcuu

SEQ ID NO: 313935 - RNA, 24 nt, Human
aacaguggauucacucagaacaca

SEQ ID NO: 313936 - RNA, 22 nt, Human
aacccgguguccgcuccucaga

SEQ ID NO: 313937 - RNA, 21 nt, Human
aacuacagaaacuucaaaaug

SEQ ID NO: 313938 - RNA, 23 nt, Human
aacugacccaaacaucauacccc

SEQ ID NO: 313939 - RNA, 22 nt, Human
aagaaaaacaagcgacaagaaa

SEQ ID NO: 313940 - RNA, 22 nt, Human
aagaaaaauuuagcaguuuuga

SEQ ID NO: 313941 - RNA, 21 nt, Human
aagaagccaaaaaaucaagca

SEQ ID NO: 313942 - RNA, 24 nt, Human
aagaagccaaaaaaucaagcaagc

SEQ ID NO: 313943 - RNA, 18 nt, Human
aagaaggcugcauuuaca

SEQ ID NO: 313944 - RNA, 22 nt, Human
aagcaagcauccgacaggacaa

SEQ ID NO: 313945 - RNA, 23 nt, Human
aagccaaaaaaucaagcaagcau

SEQ ID NO: 313946 - RNA, 23 nt, Human
aaucaagcaagcauccgacagga

SEQ ID NO: 313947 - RNA, 23 nt, Human
acaaaacagcauuuuaaaaagau

SEQ ID NO: 313948 - RNA, 24 nt, Human
acaacagaagauacucaaaauuca

SEQ ID NO: 313949 - RNA, 20 nt, Human
acacgcacacuccaucacca

SEQ ID NO: 313950 - RNA, 23 nt, Human
acacucaugcaggcaaccagccc

SEQ ID NO: 313951 - RNA, 18 nt, Human
acacuccaaauguuacug

SEQ ID NO: 313952 - RNA, 20 nt, Human
acagaagauacucaaaauuc

SEQ ID NO: 313953 - RNA, 19 nt, Human
acauaaaauaaaaauacuc

SEQ ID NO: 313954 - RNA, 18 nt, Human
accaaguauuccacucau

SEQ ID NO: 313955 - RNA, 19 nt, Human
acccaacucucauuaguaa

SEQ ID NO: 313956 - RNA, 19 nt, Human
acccacagugucugcagaa

SEQ ID NO: 313957 - RNA, 24 nt, Human
acuaaagcaccaguucgguuacca

SEQ ID NO: 313958 - RNA, 24 nt, Human
acuccaggaaaagcaaagcugaca

SEQ ID NO: 313959 - RNA, 18 nt, Human
agaaaaacaagcgacaag

SEQ ID NO: 313960 - RNA, 21 nt, Human
agaagcaaugucaucaagaac

SEQ ID NO: 313961 - RNA, 22 nt, Human
agaagcaaugucaucaagaaca

SEQ ID NO: 313962 - RNA, 24 nt, Human
agagagagagagagagagagagac

SEQ ID NO: 313963 - RNA, 21 nt, Human
agcacacacaccacacacaua

SEQ ID NO: 313964 - RNA, 22 nt, Human
agcacacacucaugcaggcaac

SEQ ID NO: 313965 - RNA, 21 nt, Human
agcggcugucauuuuagggug

SEQ ID NO: 313966 - RNA, 21 nt, Human
agcucagugaggcugaugugu

SEQ ID NO: 313967 - RNA, 24 nt, Human
aggcaaaauagagaacacaugugg

SEQ ID NO: 313968 - RNA, 22 nt, Human
agggaaagaaauacuggcuuca

SEQ ID NO: 313969 - RNA, 18 nt, Human
agggcaaaaaggagaaug

SEQ ID NO: 313970 - RNA, 24 nt, Human
auaaaacuucaaagaaaaacaagc

SEQ ID NO: 313971 - RNA, 19 nt, Human
auauauauauauauauaua

SEQ ID NO: 313972 - RNA, 19 nt, Human
auauauauauauauauaua

SEQ ID NO: 313973 - RNA, 19 nt, Human
auauauauauauauauaua

SEQ ID NO: 313974 - RNA, 21 nt, Human
auccucucccacccagauucc

SEQ ID NO: 313975 - RNA, 22 nt, Human
aucuaugcugaaauuugccucc

SEQ ID NO: 313976 - RNA, 18 nt, Human
augucucuuuaguaaaca

SEQ ID NO: 313977 - RNA, 23 nt, Human
auugaggaaaacuaucuucaugg

SEQ ID NO: 313978 - RNA, 22 nt, Human
auuguagaugugguacuuacca

SEQ ID NO: 313979 - RNA, 19 nt, Human
caaaauuagcugcauuggc

SEQ ID NO: 313980 - RNA, 24 nt, Human
caaagcugacacccaugaauaaac

SEQ ID NO: 313981 - RNA, 25 nt, Human
caacaauacauguagaaaggguuuc

SEQ ID NO: 313982 - RNA, 23 nt, Human
caaccaacaguauuacacuuuca

SEQ ID NO: 313983 - RNA, 20 nt, Human
caagaacaacaccaugguca

SEQ ID NO: 313984 - RNA, 21 nt, Human
cacacacaccacacacauaca

SEQ ID NO: 313985 - RNA, 20 nt, Human
cacacauacauacacacaca

SEQ ID NO: 313986 - RNA, 24 nt, Human
cacacucaugcaggcaaccagccc

SEQ ID NO: 313987 - RNA, 23 nt, Human
cacaguuaaaauaccugcauuua

SEQ ID NO: 313988 - RNA, 25 nt, Human
caccacacacauacauacacacaca

SEQ ID NO: 313989 - RNA, 22 nt, Human
cacuccaucaccaagagacucu

SEQ ID NO: 313990 - RNA, 21 nt, Human
cagaacaacaagaauuaggcg

SEQ ID NO: 313991 - RNA, 23 nt, Human
cagaacacaauaugcuggugaua

SEQ ID NO: 313992 - RNA, 25 nt, Human
cagccaaacaguaaucgaaucucaa

SEQ ID NO: 313993 - RNA, 22 nt, Human
caguggaagaucaacauuuugg

SEQ ID NO: 313994 - RNA, 21 nt, Human
cauaacuguaaaaaauacaga

SEQ ID NO: 313995 - RNA, 22 nt, Human
caucaagaacaacaccaugguc

SEQ ID NO: 313996 - RNA, 23 nt, Human
caucaagaacaacaccaugguca

SEQ ID NO: 313997 - RNA, 19 nt, Human
caugcaggcaaccagcccc

SEQ ID NO: 313998 - RNA, 24 nt, Human
cauguacccacacauacuuccccu

SEQ ID NO: 313999 - RNA, 23 nt, Human
cauuccagggacuccacacucag

SEQ ID NO: 314000 - RNA, 23 nt, Human
cauuuugaugggcuacccacagu

SEQ ID NO: 314001 - RNA, 18 nt, Human
ccaagagacuccaggaaa

SEQ ID NO: 314002 - RNA, 25 nt, Human
ccacacacauacauacacacacaca

SEQ ID NO: 314003 - RNA, 24 nt, Human
cccaaaaaaauaaaaauaaaaaug

SEQ ID NO: 314004 - RNA, 22 nt, Human
ccccaguccucacauguaccca

SEQ ID NO: 314005 - RNA, 21 nt, Human
ccccuaaaccaagcacacaca

SEQ ID NO: 314006 - RNA, 18 nt, Human
ccccuuacugagagugaa

SEQ ID NO: 314007 - RNA, 23 nt, Human
cccuaaaccaagcacacacacca

SEQ ID NO: 314008 - RNA, 20 nt, Human
ccucucccacccagauucca

SEQ ID NO: 314009 - RNA, 21 nt, Human
cggaaagcaucauuuugcucu

SEQ ID NO: 314010 - RNA, 20 nt, Human
cucacuuucccucuucagca

SEQ ID NO: 314011 - RNA, 24 nt, Human
cucagaacacaauaugcuggugau

SEQ ID NO: 314012 - RNA, 21 nt, Human
cucccaaaaaaauaaaaauaa

SEQ ID NO: 314013 - RNA, 22 nt, Human
cuccucagaaagaaccgcugaa

SEQ ID NO: 314014 - RNA, 20 nt, Human
cuccucagaaagaaccgcuu

SEQ ID NO: 314015 - RNA, 19 nt, Human
cugaaauuugccuccagug

SEQ ID NO: 314016 - RNA, 21 nt, Human
cugacccaaacaucauacccc

SEQ ID NO: 314017 - RNA, 18 nt, Human
cugaugcccagacaucag

SEQ ID NO: 314018 - RNA, 20 nt, Human
cuuagauugaagcucaccua

SEQ ID NO: 314019 - RNA, 21 nt, Human
cuucaaagaaaaacaagcgac

SEQ ID NO: 314020 - RNA, 19 nt, Human
cuuuugauaaguaagaaaa

SEQ ID NO: 314021 - RNA, 20 nt, Human
gaaaaagaaaaaaaaaagag

SEQ ID NO: 314022 - RNA, 24 nt, Human
gaagauacucaaaauucagaaaga

SEQ ID NO: 314023 - RNA, 18 nt, Human
gaucguguugggcgagag

SEQ ID NO: 314024 - RNA, 21 nt, Human
gauuucuuaaaauaauuuauu

SEQ ID NO: 314025 - RNA, 18 nt, Human
gcaaugucaucaagaaca

SEQ ID NO: 314026 - RNA, 21 nt, Human
gcuaucugcaacugauaaaua

SEQ ID NO: 314027 - RNA, 18 nt, Human
gguugguugguugguugg

SEQ ID NO: 314028 - RNA, 19 nt, Human
guaaauacuuaacuacauc

SEQ ID NO: 314029 - RNA, 18 nt, Human
guagugcugucuuuugau

SEQ ID NO: 314030 - RNA, 24 nt, Human
gugacacagagcacacacucaugc

SEQ ID NO: 314031 - RNA, 18 nt, Human
guuguaacgcagaaccug

SEQ ID NO: 314032 - RNA, 18 nt, Human
uaaaacaaaacagcauuu

SEQ ID NO: 314033 - RNA, 19 nt, Human
uaaaaccacaacaauacau

SEQ ID NO: 314034 - RNA, 27 nt, Human
uaaaauaaaaauacuccauuuaacauc

SEQ ID NO: 314035 - RNA, 21 nt, Human
uaagaagccaaaaaaucaagc

SEQ ID NO: 314036 - RNA, 27 nt, Human
uaaguaagaaaagaaaccaaguauucc

SEQ ID NO: 314037 - RNA, 21 nt, Human
uacaaauuuagaaucaucaca

SEQ ID NO: 314038 - RNA, 24 nt, Human
uacaacagaagauacucaaaauuc

SEQ ID NO: 314039 - RNA, 20 nt, Human
uacaaugaauaaaaccacaa

SEQ ID NO: 314040 - RNA, 20 nt, Human
uacauguagaauuggcaggu

SEQ ID NO: 314041 - RNA, 18 nt, Human
uaccccaauagugcaaag

SEQ ID NO: 314042 - RNA, 18 nt, Human
uagaaaauuuccacuggc

SEQ ID NO: 314043 - RNA, 21 nt, Human
uagaaaauuuccacuggcuuu

SEQ ID NO: 314044 - RNA, 19 nt, Human
uagcauucuggugcccgca

SEQ ID NO: 314045 - RNA, 19 nt, Human
uagcuguaacaaaaaagaa

SEQ ID NO: 314046 - RNA, 20 nt, Human
uaggauauuucuugacaaga

SEQ ID NO: 314047 - RNA, 19 nt, Human
uauauauauauauauauau

SEQ ID NO: 314048 - RNA, 19 nt, Human
uauauauauauauauauau

SEQ ID NO: 314049 - RNA, 19 nt, Human
uauauauauauauauauau

SEQ ID NO: 314050 - RNA, 19 nt, Human
uauauauauauauauauau

SEQ ID NO: 314051 - RNA, 21 nt, Human
uaucaacugacccaaacauca

SEQ ID NO: 314052 - RNA, 24 nt, Human
uaucaugucuuccagaaaagucau

SEQ ID NO: 314053 - RNA, 24 nt, Human
uauucuugauuaagaaaaauuuag

SEQ ID NO: 314054 - RNA, 19 nt, Human
ucaaagauagucuucagac

SEQ ID NO: 314055 - RNA, 22 nt, Human
ucaacagacacacacacugucu

SEQ ID NO: 314056 - RNA, 20 nt, Human
ucagaaagaaccgcugaaca

SEQ ID NO: 314057 - RNA, 20 nt, Human
ucaggauugucauauaauca

SEQ ID NO: 314058 - RNA, 19 nt, Human
ucaucaagaacaacaccau

SEQ ID NO: 314059 - RNA, 23 nt, Human
ucccaaaaaaauaaaaauaaaaa

SEQ ID NO: 314060 - RNA, 26 nt, Human
ucgcucacuuucccucuuuccucggg

SEQ ID NO: 314061 - RNA, 18 nt, Human
ucuaaaggcaugaaaagg

SEQ ID NO: 314062 - RNA, 24 nt, Human
ucuaugcugaaauuugccuccagu

SEQ ID NO: 314063 - RNA, 19 nt, Human
ucucagagaguucuaccca

SEQ ID NO: 314064 - RNA, 19 nt, Human
ucuuaaaaaaacagaguac

SEQ ID NO: 314065 - RNA, 24 nt, Human
ugaaaaugucugucacauagguac

SEQ ID NO: 314066 - RNA, 24 nt, Human
ugaacacauaauaggauuuacuaa

SEQ ID NO: 314067 - RNA, 26 nt, Human
ugaacacauaauaggauuuacuaaaa

SEQ ID NO: 314068 - RNA, 28 nt, Human
ugaauaaaaccacaacaauacauguaga

SEQ ID NO: 314069 - RNA, 22 nt, Human
ugacccaaacaucauaccccaa

SEQ ID NO: 314070 - RNA, 20 nt, Human
ugaguaguagguguaucauu

SEQ ID NO: 314071 - RNA, 24 nt, Human
ugcagaagauacaaaagcuccacu

SEQ ID NO: 314072 - RNA, 18 nt, Human
ugcugaaauuugccucca

SEQ ID NO: 314073 - RNA, 20 nt, Human
ugcuuacuggauaucauucu

SEQ ID NO: 314074 - RNA, 19 nt, Human
ugcuucaaguugauucugc

SEQ ID NO: 314075 - RNA, 19 nt, Human
ugcuuugaauguugacagc

SEQ ID NO: 314076 - RNA, 20 nt, Human
uguaacccgguguccgcucc

SEQ ID NO: 314077 - RNA, 25 nt, Human
uguacccacacauacuuccccuaaa

SEQ ID NO: 314078 - RNA, 23 nt, Human
uguaucaugucuuccagaaaagu

SEQ ID NO: 314079 - RNA, 21 nt, Human
ugugguugguugguugguugg

SEQ ID NO: 314080 - RNA, 23 nt, Human
uguuguuguucuuguuguauugu

SEQ ID NO: 314081 - RNA, 23 nt, Human
uguuuuguuuuuguacagagagu

SEQ ID NO: 314082 - RNA, 19 nt, Human
uuacaugggugucaggauu

SEQ ID NO: 314083 - RNA, 20 nt, Human
uuaguucuauggaaccugug

SEQ ID NO: 314084 - RNA, 22 nt, Human
uucaacuccaauccacagugac

SEQ ID NO: 314085 - RNA, 31 nt, Human
uuccuuuuuaauuuauauauauauauauauu

SEQ ID NO: 314086 - RNA, 23 nt, Human
uucuggucaggugcccccagucc

SEQ ID NO: 314087 - RNA, 20 nt, Human
uugaaacauucguuucccuu

SEQ ID NO: 314088 - RNA, 19 nt, Human
uugaugggcuacccacagu

SEQ ID NO: 314089 - RNA, 20 nt, Human
uuguuuuguuuuuguacaga

SEQ ID NO: 314090 - RNA, 19 nt, Human
uuuauauauauauauauau

SEQ ID NO: 314091 - RNA, 19 nt, Human
uuuauauauauauauauau

SEQ ID NO: 314092 - RNA, 20 nt, Human
uuuauauauauauauauauu

SEQ ID NO: 314093 - RNA, 19 nt, Human
uuucuugacaagaugcuua

SEQ ID NO: 314094 - RNA, 24 nt, Human
uuuucaacuccaauccacagugac

SEQ ID NO: 314095 - RNA, 18 nt, Human
uuuugcucuuguugcacu

SEQ ID NO: 314096 - RNA, 18 nt, Human
aaaaggccaugauggaga

SEQ ID NO: 314097 - RNA, 23 nt, Human
aaacaaaaacuacagaaaacgca

SEQ ID NO: 314098 - RNA, 18 nt, Human
aacaaaaacuacagaaaa

SEQ ID NO: 314099 - RNA, 21 nt, Human
aacaaaaacuacagaaaacgc

SEQ ID NO: 314100 - RNA, 24 nt, Human
aacauacuuauuacacauauuuau

SEQ ID NO: 314101 - RNA, 21 nt, Human
aagaaaaaacuucaaaaaaga

SEQ ID NO: 314102 - RNA, 22 nt, Human
aagcaucucaguaaaacaaaaa

SEQ ID NO: 314103 - RNA, 21 nt, Human
acaagaaaaaacuucaaaaaa

SEQ ID NO: 314104 - RNA, 20 nt, Human
acacacauccaacccuacca

SEQ ID NO: 314105 - RNA, 18 nt, Human
acuacagccagaacugua

SEQ ID NO: 314106 - RNA, 21 nt, Human
acuucagaaaauugugaagua

SEQ ID NO: 314107 - RNA, 23 nt, Human
agaaaaaaaaaaaaaucucaaaa

SEQ ID NO: 314108 - RNA, 18 nt, Human
agagauggcaaagaucug

SEQ ID NO: 314109 - RNA, 22 nt, Human
agccaaggucauaacuacagcc

SEQ ID NO: 314110 - RNA, 21 nt, Human
agguggucccagggcuuuauu

SEQ ID NO: 314111 - RNA, 23 nt, Human
auaaacaaagguuuggggucaag

SEQ ID NO: 314112 - RNA, 22 nt, Human
aucaagcacuucauuaaaaaaa

SEQ ID NO: 314113 - RNA, 19 nt, Human
aucgcacuuugguauccuu

SEQ ID NO: 314114 - RNA, 18 nt, Human
aucucagauguuacaaga

SEQ ID NO: 314115 - RNA, 21 nt, Human
auguguacauguauauguaca

SEQ ID NO: 314116 - RNA, 21 nt, Human
caaaaaagaaaucaaauucau

SEQ ID NO: 314117 - RNA, 26 nt, Human
caaauaagucacaaaaaguaggcugu

SEQ ID NO: 314118 - RNA, 22 nt, Human
cacaaauaagucacaaaaagua

SEQ ID NO: 314119 - RNA, 20 nt, Human
cacauauuuaucaacaaggc

SEQ ID NO: 314120 - RNA, 19 nt, Human
cagaaaacgcaaaguaaaa

SEQ ID NO: 314121 - RNA, 18 nt, Human
cauuuuacauuguaccaa

SEQ ID NO: 314122 - RNA, 18 nt, Human
ccccaaagugguugucuc

SEQ ID NO: 314123 - RNA, 21 nt, Human
ccccaaagugguugucucuuu

SEQ ID NO: 314124 - RNA, 22 nt, Human
ccgaaagcacgaggaaggaccu

SEQ ID NO: 314125 - RNA, 24 nt, Human
cugcugcaugugggcuuaaagagc

SEQ ID NO: 314126 - RNA, 21 nt, Human
cuucuugcaaacccuuuaaag

SEQ ID NO: 314127 - RNA, 24 nt, Human
gaaaacgcaaaguaaaaucagaga

SEQ ID NO: 314128 - RNA, 19 nt, Human
gaagccaaggucauaacua

SEQ ID NO: 314129 - RNA, 23 nt, Human
gaggcaccagauuuuuuuuuuuu

SEQ ID NO: 314130 - RNA, 22 nt, Human
gagguggucccagggcuuuauu

SEQ ID NO: 314131 - RNA, 24 nt, Human
gccaauuaugucuccuuccaucau

SEQ ID NO: 314132 - RNA, 24 nt, Human
gccaccgaaagcacgaggaaggac

SEQ ID NO: 314133 - RNA, 18 nt, Human
ggaaaugucagugaccac

SEQ ID NO: 314134 - RNA, 20 nt, Human
ggacuugggaaaugucagug

SEQ ID NO: 314135 - RNA, 24 nt, Human
guauguguacauguauauguacau

SEQ ID NO: 314136 - RNA, 19 nt, Human
guggggaaacugaggcacc

SEQ ID NO: 314137 - RNA, 18 nt, Human
guugucucuuugauccuu

SEQ ID NO: 314138 - RNA, 19 nt, Human
uaaaaaucaaaguaaggcc

SEQ ID NO: 314139 - RNA, 22 nt, Human
uaaaacaaaaacuacagaaaac

SEQ ID NO: 314140 - RNA, 24 nt, Human
uaaaacaaaaacuacagaaaacgc

SEQ ID NO: 314141 - RNA, 19 nt, Human
uaacauaacagaaacaaac

SEQ ID NO: 314142 - RNA, 20 nt, Human
uaacauaacagaaacaaaca

SEQ ID NO: 314143 - RNA, 19 nt, Human
uaacuucuugaccaacuuu

SEQ ID NO: 314144 - RNA, 20 nt, Human
uaagaugauacuuggacuug

SEQ ID NO: 314145 - RNA, 24 nt, Human
uacagaaaacgcaaaguaaaauca

SEQ ID NO: 314146 - RNA, 18 nt, Human
uaccaaaggaagacaaac

SEQ ID NO: 314147 - RNA, 24 nt, Human
uaccaaaggaagacaaacaguuuc

SEQ ID NO: 314148 - RNA, 25 nt, Human
uaccaaaggaagacaaacaguuuca

SEQ ID NO: 314149 - RNA, 22 nt, Human
uauauguacaucuacauguaua

SEQ ID NO: 314150 - RNA, 20 nt, Human
uauauuuaacucaccugucu

SEQ ID NO: 314151 - RNA, 24 nt, Human
uaucuugaaacuacacacauccaa

SEQ ID NO: 314152 - RNA, 19 nt, Human
uaugauaauuaauuaaauu

SEQ ID NO: 314153 - RNA, 19 nt, Human
uauguacaucuacauguau

SEQ ID NO: 314154 - RNA, 22 nt, Human
uauguacaucuacauguauaua

SEQ ID NO: 314155 - RNA, 22 nt, Human
uauguguauguguacauguaua

SEQ ID NO: 314156 - RNA, 23 nt, Human
uauguguauguguacauguauau

SEQ ID NO: 314157 - RNA, 24 nt, Human
uauguguauguguacauguauaug

SEQ ID NO: 314158 - RNA, 21 nt, Human
uauuucaaauguaccagguua

SEQ ID NO: 314159 - RNA, 26 nt, Human
uauuucaaauguaccagguuacuugc

SEQ ID NO: 314160 - RNA, 25 nt, Human
ucaccugucuuguuggcaucaccuc

SEQ ID NO: 314161 - RNA, 23 nt, Human
uccuuaaacaaaacuggccccua

SEQ ID NO: 314162 - RNA, 21 nt, Human
ucuacaguuagacagggaagc

SEQ ID NO: 314163 - RNA, 23 nt, Human
ucugccaauuaugucuccuucca

SEQ ID NO: 314164 - RNA, 18 nt, Human
ugaaacuacacacaucca

SEQ ID NO: 314165 - RNA, 19 nt, Human
ugaaaugauggcucaaauc

SEQ ID NO: 314166 - RNA, 21 nt, Human
ugaauuuaaagcaguuaaaca

SEQ ID NO: 314167 - RNA, 20 nt, Human
ugacccacaggucuugccuc

SEQ ID NO: 314168 - RNA, 21 nt, Human
ugaguugucuuaaaaucagaa

SEQ ID NO: 314169 - RNA, 18 nt, Human
ugcaauaauauuuaugug

SEQ ID NO: 314170 - RNA, 24 nt, Human
ugccauggggaguacauuuaagac

SEQ ID NO: 314171 - RNA, 25 nt, Human
uggccccuauugugucuguacuuga

SEQ ID NO: 314172 - RNA, 21 nt, Human
ugguaaaaaaaaaaaauugua

SEQ ID NO: 314173 - RNA, 23 nt, Human
ugguauauuuaacucaccugucu

SEQ ID NO: 314174 - RNA, 21 nt, Human
uguaaaaaaaagaacaccaca

SEQ ID NO: 314175 - RNA, 21 nt, Human
uguacaucuacauguauauau

SEQ ID NO: 314176 - RNA, 19 nt, Human
uguacauguauauguacau

SEQ ID NO: 314177 - RNA, 21 nt, Human
uguagaauuacuaaacuguca

SEQ ID NO: 314178 - RNA, 21 nt, Human
ugucaaaauuuuaucuuggcc

SEQ ID NO: 314179 - RNA, 20 nt, Human
uguguaaaaaaaagaacacc

SEQ ID NO: 314180 - RNA, 18 nt, Human
uguguacauguauaugua

SEQ ID NO: 314181 - RNA, 23 nt, Human
uguguauguguacauguauaugu

SEQ ID NO: 314182 - RNA, 24 nt, Human
uguguauguguacauguauaugua

SEQ ID NO: 314183 - RNA, 28 nt, Human
uguuacaagaaaaaacuucaaaaaagaa

SEQ ID NO: 314184 - RNA, 22 nt, Human
uuauaaacauaagcauggcauu

SEQ ID NO: 314185 - RNA, 22 nt, Human
uucaaaaaguuaacaaucauua

SEQ ID NO: 314186 - RNA, 25 nt, Human
uucuuacauaaacaaagguuugggg

SEQ ID NO: 314187 - RNA, 20 nt, Human
uuucaaaaaguuaacaauca

SEQ ID NO: 314188 - RNA, 22 nt, Human
uuuuuuuuuuuuuaaagauuug

SEQ ID NO: 314189 - RNA, 19 nt, Human
uuuuuuuuuuuuuuuuuaa

SEQ ID NO: 314190 - RNA, 21 nt, Human
aaacacauauccaaauuuuaa

SEQ ID NO: 314191 - RNA, 24 nt, Human
aaaugugauuuuugagacagaaug

SEQ ID NO: 314192 - RNA, 22 nt, Human
agaaggcugagcuagaguuguu

SEQ ID NO: 314193 - RNA, 19 nt, Human
agacagaaugaaacacaua

SEQ ID NO: 314194 - RNA, 23 nt, Human
agacagaaugaaacacauaucca

SEQ ID NO: 314195 - RNA, 24 nt, Human
agacagaaugaaacacauauccaa

SEQ ID NO: 314196 - RNA, 21 nt, Human
auccugaauaaaugagaacuc

SEQ ID NO: 314197 - RNA, 21 nt, Human
gaaccagaagaccucugagug

SEQ ID NO: 314198 - RNA, 26 nt, Human
ugaaacacauauccaaauuuuaauac

SEQ ID NO: 314199 - RNA, 19 nt, Human
ugagaacucuagaaaauca

SEQ ID NO: 314200 - RNA, 20 nt, Human
aaaauucaagcuucagccuc

SEQ ID NO: 314201 - RNA, 20 nt, Human
aaaugcucucuggcuuuccu

SEQ ID NO: 314202 - RNA, 23 nt, Human
aaccugguauuccuccugucucc

SEQ ID NO: 314203 - RNA, 20 nt, Human
aaugcugaaaccaaauccua

SEQ ID NO: 314204 - RNA, 23 nt, Human
agguguuucaaaggaaaugaaga

SEQ ID NO: 314205 - RNA, 18 nt, Human
augaagacgagaaaaaaa

SEQ ID NO: 314206 - RNA, 21 nt, Human
caauaacagcuugcuagggac

SEQ ID NO: 314207 - RNA, 20 nt, Human
cagacuccuagaucuucacu

SEQ ID NO: 314208 - RNA, 22 nt, Human
cagagugugaaaagugccuccc

SEQ ID NO: 314209 - RNA, 21 nt, Human
cagcuugcuagggacuuccaa

SEQ ID NO: 314210 - RNA, 21 nt, Human
ccacuagguccaacccaguuu

SEQ ID NO: 314211 - RNA, 23 nt, Human
ccugacugcgggcucaggacaca

SEQ ID NO: 314212 - RNA, 18 nt, Human
cuaaugcugaaaccaaau

SEQ ID NO: 314213 - RNA, 19 nt, Human
cucacgacaacaccacuag

SEQ ID NO: 314214 - RNA, 22 nt, Human
cuccugguuagguggcacuccu

SEQ ID NO: 314215 - RNA, 22 nt, Human
cucuggggaaaugcagagggcu

SEQ ID NO: 314216 - RNA, 22 nt, Human
cuggccuccugguuagguggca

SEQ ID NO: 314217 - RNA, 20 nt, Human
cuuccaaaacccauacuaug

SEQ ID NO: 314218 - RNA, 18 nt, Human
gacaacaccacuaggucc

SEQ ID NO: 314219 - RNA, 19 nt, Human
gacaacaccacuaggucca

SEQ ID NO: 314220 - RNA, 18 nt, Human
ggagccugagggaagcuc

SEQ ID NO: 314221 - RNA, 22 nt, Human
gucaagcuuaguaguuuucucu

SEQ ID NO: 314222 - RNA, 23 nt, Human
uaaccuaaucuuaccaauaacag

SEQ ID NO: 314223 - RNA, 19 nt, Human
uaagcugcgaggaaccacu

SEQ ID NO: 314224 - RNA, 20 nt, Human
uaaugcugaaaccaaauccu

SEQ ID NO: 314225 - RNA, 19 nt, Human
uagagguuuuuccucaccc

SEQ ID NO: 314226 - RNA, 27 nt, Human
uagccgauccucuucagucauagauuc

SEQ ID NO: 314227 - RNA, 23 nt, Human
uaugaguuccuuucaggauguuu

SEQ ID NO: 314228 - RNA, 24 nt, Human
uaugaguuccuuucaggauguuuu

SEQ ID NO: 314229 - RNA, 19 nt, Human
uauuccuccugucucccuc

SEQ ID NO: 314230 - RNA, 23 nt, Human
ucaaaugcucucuggcuuuccua

SEQ ID NO: 314231 - RNA, 24 nt, Human
ucagucauagauucuguuucuucu

SEQ ID NO: 314232 - RNA, 18 nt, Human
uccacacagguucgggga

SEQ ID NO: 314233 - RNA, 24 nt, Human
ucccucagucacucacagauguca

SEQ ID NO: 314234 - RNA, 21 nt, Human
ucucucuggggaaaugcagag

SEQ ID NO: 314235 - RNA, 18 nt, Human
ucucuggggaaaugcaga

SEQ ID NO: 314236 - RNA, 18 nt, Human
ucuuaccaauaacagcuu

SEQ ID NO: 314237 - RNA, 21 nt, Human
ucuugugcuguaugaguuccu

SEQ ID NO: 314238 - RNA, 24 nt, Human
ugaccagggauguguucucccagc

SEQ ID NO: 314239 - RNA, 21 nt, Human
ugcuuggccaauguagagguu

SEQ ID NO: 314240 - RNA, 20 nt, Human
uggaaaggacuguacuugug

SEQ ID NO: 314241 - RNA, 21 nt, Human
ugggaugaauugggaucugcu

SEQ ID NO: 314242 - RNA, 22 nt, Human
uggggaaaugcagagggcuugu

SEQ ID NO: 314243 - RNA, 25 nt, Human
uucaaaggaaaugaagacgagaaaa

SEQ ID NO: 314244 - RNA, 24 nt, Human
uuggccaauguagagguuuuuccu

SEQ ID NO: 314245 - RNA, 25 nt, Human
aagaaaaaguaaauaaugaagaaaa

SEQ ID NO: 314246 - RNA, 18 nt, Human
aaugaaaacaaugagaga

SEQ ID NO: 314247 - RNA, 22 nt, Human
acacaacaccccaacccacccc

SEQ ID NO: 314248 - RNA, 23 nt, Human
acacaacaccccaacccaccccu

SEQ ID NO: 314249 - RNA, 24 nt, Human
acacaacaccccaacccaccccuc

SEQ ID NO: 314250 - RNA, 24 nt, Human
acccugugucuacuaaaaauacaa

SEQ ID NO: 314251 - RNA, 24 nt, Human
accugagguugggaguucaagacc

SEQ ID NO: 314252 - RNA, 24 nt, Human
acuaaaaauacaaaauuauccugg

SEQ ID NO: 314253 - RNA, 23 nt, Human
acugaaauacacaggugauucug

SEQ ID NO: 314254 - RNA, 18 nt, Human
agaaacuccaucucaaaa

SEQ ID NO: 314255 - RNA, 24 nt, Human
agauagucuagugagaagcugagc

SEQ ID NO: 314256 - RNA, 24 nt, Human
agcacuuugggaggcugaggaggg

SEQ ID NO: 314257 - RNA, 21 nt, Human
agccauaaagaaggugcagcc

SEQ ID NO: 314258 - RNA, 23 nt, Human
agccauaaagaaggugcagcccu

SEQ ID NO: 314259 - RNA, 22 nt, Human
aggaggguggaucaccugaggu

SEQ ID NO: 314260 - RNA, 25 nt, Human
aggcagaaaucucuuuaacaugcag

SEQ ID NO: 314261 - RNA, 18 nt, Human
aggcaggagaaucgccug

SEQ ID NO: 314262 - RNA, 24 nt, Human
aggcggacuuugcggugagccgag

SEQ ID NO: 314263 - RNA, 20 nt, Human
aggcugaggcaggagaaucg

SEQ ID NO: 314264 - RNA, 20 nt, Human
aggcugaggcaggagaaucg

SEQ ID NO: 314265 - RNA, 20 nt, Human
aggcugggugcgguggcuca

SEQ ID NO: 314266 - RNA, 26 nt, Human
aggugcagcccuagucugccaugucu

SEQ ID NO: 314267 - RNA, 18 nt, Human
auaaagaaggugcagccc

SEQ ID NO: 314268 - RNA, 21 nt, Human
auacacaacaccccaacccac

SEQ ID NO: 314269 - RNA, 23 nt, Human
auacauacacaacaccccaaccc

SEQ ID NO: 314270 - RNA, 23 nt, Human
aucaccugagguugggaguucaa

SEQ ID NO: 314271 - RNA, 24 nt, Human
aucgcgccaaugcacuccagccug

SEQ ID NO: 314272 - RNA, 19 nt, Human
augccuguaaucccagcac

SEQ ID NO: 314273 - RNA, 22 nt, Human
caacccaccccuccacacugaa

SEQ ID NO: 314274 - RNA, 19 nt, Human
caaugcacuccagccuggg

SEQ ID NO: 314275 - RNA, 22 nt, Human
caaugcacuccagccugggcaa

SEQ ID NO: 314276 - RNA, 23 nt, Human
caaugcacuccagccugggcaac

SEQ ID NO: 314277 - RNA, 24 nt, Human
caaugcacuccagccugggcaaca

SEQ ID NO: 314278 - RNA, 21 nt, Human
caccccaacccaccccuccac

SEQ ID NO: 314279 - RNA, 26 nt, Human
caccccaacccaccccuccacacuga

SEQ ID NO: 314280 - RNA, 23 nt, Human
caccugagguugggaguucaaga

SEQ ID NO: 314281 - RNA, 23 nt, Human
cacuuugggugaugaagaccagg

SEQ ID NO: 314282 - RNA, 23 nt, Human
cagcacuuugggaggcugaggag

SEQ ID NO: 314283 - RNA, 26 nt, Human
cagcacuuugggaggcugaggagggu

SEQ ID NO: 314284 - RNA, 21 nt, Human
cagcauaaaguuucacaugga

SEQ ID NO: 314285 - RNA, 24 nt, Human
cagccugaccaacauggagaaacc

SEQ ID NO: 314286 - RNA, 18 nt, Human
cagccugggcaacaagag

SEQ ID NO: 314287 - RNA, 24 nt, Human
cagcuacucaggaggcugaggcag

SEQ ID NO: 314288 - RNA, 22 nt, Human
caggacgcagcagauccagagg

SEQ ID NO: 314289 - RNA, 19 nt, Human
caggcuucuugccucgaag

SEQ ID NO: 314290 - RNA, 20 nt, Human
caugccuguaaucccagcac

SEQ ID NO: 314291 - RNA, 24 nt, Human
caugccuguaaucccagcacuuug

SEQ ID NO: 314292 - RNA, 18 nt, Human
cauggagaauaagggaga

SEQ ID NO: 314293 - RNA, 19 nt, Human
ccaacccaccccuccacac

SEQ ID NO: 314294 - RNA, 21 nt, Human
ccaacccaccccuccacacug

SEQ ID NO: 314295 - RNA, 21 nt, Human
ccaaugcacuccagccugggc

SEQ ID NO: 314296 - RNA, 22 nt, Human
ccaaugcacuccagccugggca

SEQ ID NO: 314297 - RNA, 23 nt, Human
ccaaugcacuccagccugggcaa

SEQ ID NO: 314298 - RNA, 24 nt, Human
ccaaugcacuccagccugggcaac

SEQ ID NO: 314299 - RNA, 24 nt, Human
cccaccccuccacacugaaauaca

SEQ ID NO: 314300 - RNA, 22 nt, Human
ccugaccaacauggagaaaccc

SEQ ID NO: 314301 - RNA, 24 nt, Human
ccugaccaacauggagaaacccug

SEQ ID NO: 314302 - RNA, 21 nt, Human
ccugcaggacgcagcagaucc

SEQ ID NO: 314303 - RNA, 22 nt, Human
ccuguaaucccagcacuuuggg

SEQ ID NO: 314304 - RNA, 21 nt, Human
ccuguaaucccagcuacucag

SEQ ID NO: 314305 - RNA, 24 nt, Human
cgagaucgcgccaaugcacuccag

SEQ ID NO: 314306 - RNA, 26 nt, Human
cgccaaugcacuccagccugggcaac

SEQ ID NO: 314307 - RNA, 26 nt, Human
cgcgccaaugcacuccagccugggca

SEQ ID NO: 314308 - RNA, 19 nt, Human
cuaaaaauacaaaauuauc

SEQ ID NO: 314309 - RNA, 24 nt, Human
cucaugccuguaaucccagcacuu

SEQ ID NO: 314310 - RNA, 19 nt, Human
cuggugugguggugcaugc

SEQ ID NO: 314311 - RNA, 21 nt, Human
gagaaacccugugucuacuaa

SEQ ID NO: 314312 - RNA, 23 nt, Human
gaggaggguggaucaccugaggu

SEQ ID NO: 314313 - RNA, 23 nt, Human
gaucaccugagguugggaguuca

SEQ ID NO: 314314 - RNA, 24 nt, Human
gaucaccugagguugggaguucaa

SEQ ID NO: 314315 - RNA, 21 nt, Human
gauugugaggugggguugggg

SEQ ID NO: 314316 - RNA, 22 nt, Human
gcagcccuagucugccaugucu

SEQ ID NO: 314317 - RNA, 22 nt, Human
gccaaugcacuccagccugggc

SEQ ID NO: 314318 - RNA, 26 nt, Human
gccaaugcacuccagccugggcaaca

SEQ ID NO: 314319 - RNA, 22 nt, Human
ggacagugagcuguuugcuucu

SEQ ID NO: 314320 - RNA, 24 nt, Human
ggacuuugcggugagccgagaucg

SEQ ID NO: 314321 - RNA, 24 nt, Human
ggaggguggaucaccugagguugg

SEQ ID NO: 314322 - RNA, 21 nt, Human
ggcucaugccuguaaucccag

SEQ ID NO: 314323 - RNA, 23 nt, Human
ggcugggugcgguggcucaugcc

SEQ ID NO: 314324 - RNA, 24 nt, Human
gggugcgguggcucaugccuguaa

SEQ ID NO: 314325 - RNA, 21 nt, Human
ggugcaugccuguaaucccag

SEQ ID NO: 314326 - RNA, 23 nt, Human
gguggcucaugccuguaauccca

SEQ ID NO: 314327 - RNA, 24 nt, Human
gguggcucaugccuguaaucccag

SEQ ID NO: 314328 - RNA, 24 nt, Human
gguggugcaugccuguaaucccag

SEQ ID NO: 314329 - RNA, 23 nt, Human
ggugugguggugcaugccuguaa

SEQ ID NO: 314330 - RNA, 23 nt, Human
gugacaggaaggaaaguucaggc

SEQ ID NO: 314331 - RNA, 23 nt, Human
guggugcaugccuguaaucccag

SEQ ID NO: 314332 - RNA, 21 nt, Human
uaaaacacauacauacacaac

SEQ ID NO: 314333 - RNA, 28 nt, Human
uaaaauaggcugggugcgguggcucaug

SEQ ID NO: 314334 - RNA, 18 nt, Human
uaaauuuucagcauaaag

SEQ ID NO: 314335 - RNA, 25 nt, Human
uaaauuuucagcauaaaguuucaca

SEQ ID NO: 314336 - RNA, 21 nt, Human
uaacaugcaggcgugauccca

SEQ ID NO: 314337 - RNA, 19 nt, Human
uaaguucuacuuugugaag

SEQ ID NO: 314338 - RNA, 23 nt, Human
uacaguaacaaguaagaaaaagu

SEQ ID NO: 314339 - RNA, 18 nt, Human
ucaccugagguugggagu

SEQ ID NO: 314340 - RNA, 23 nt, Human
ucaccugagguugggaguucaag

SEQ ID NO: 314341 - RNA, 22 nt, Human
ucaugccuguaaucccagcacu

SEQ ID NO: 314342 - RNA, 20 nt, Human
ucccaggcugaucugauucu

SEQ ID NO: 314343 - RNA, 18 nt, Human
ucuacuaaaaauacaaaa

SEQ ID NO: 314344 - RNA, 22 nt, Human
ugaaaacacuauaccuaaguuc

SEQ ID NO: 314345 - RNA, 25 nt, Human
ugacaggaaggaaaguucaggcuuc

SEQ ID NO: 314346 - RNA, 22 nt, Human
ugagccgagaucgcgccaaugc

SEQ ID NO: 314347 - RNA, 20 nt, Human
ugaggaggguggaucaccug

SEQ ID NO: 314348 - RNA, 21 nt, Human
ugaggaggguggaucaccuga

SEQ ID NO: 314349 - RNA, 24 nt, Human
ugaggaggguggaucaccugaggu

SEQ ID NO: 314350 - RNA, 20 nt, Human
ugaggcaggagaaucgccug

SEQ ID NO: 314351 - RNA, 25 nt, Human
ugaggcaggagaaucgccugggagg

SEQ ID NO: 314352 - RNA, 20 nt, Human
ugaggugggguuggggcacu

SEQ ID NO: 314353 - RNA, 19 nt, Human
ugcacuccagccugggcaa

SEQ ID NO: 314354 - RNA, 18 nt, Human
ugccucgaaggaguaggc

SEQ ID NO: 314355 - RNA, 23 nt, Human
ugccuguaaucccagcacuuugg

SEQ ID NO: 314356 - RNA, 24 nt, Human
ugccuguaaucccagcuacucagg

SEQ ID NO: 314357 - RNA, 24 nt, Human
uggaucaccugagguugggaguuc

SEQ ID NO: 314358 - RNA, 22 nt, Human
uggcucaugccuguaaucccag

SEQ ID NO: 314359 - RNA, 24 nt, Human
uggcucaugccuguaaucccagca

SEQ ID NO: 314360 - RNA, 21 nt, Human
ugggaggcggacuuugcggug

SEQ ID NO: 314361 - RNA, 24 nt, Human
ugggaggcggacuuugcggugagc

SEQ ID NO: 314362 - RNA, 23 nt, Human
ugggaggcugaggaggguggauc

SEQ ID NO: 314363 - RNA, 24 nt, Human
ugggaggcugaggaggguggauca

SEQ ID NO: 314364 - RNA, 22 nt, Human
uggggcacucauauacuuaaaa

SEQ ID NO: 314365 - RNA, 21 nt, Human
uggugcaugccuguaauccca

SEQ ID NO: 314366 - RNA, 24 nt, Human
ugguggugcaugccuguaauccca

SEQ ID NO: 314367 - RNA, 23 nt, Human
ugucagugguucuuaacugaagu

SEQ ID NO: 314368 - RNA, 19 nt, Human
uugcggugagccgagaucg

SEQ ID NO: 314369 - RNA, 22 nt, Human
uugcggugagccgagaucgcgc

SEQ ID NO: 314370 - RNA, 25 nt, Human
uugggaggcugaggaggguggauca

SEQ ID NO: 314371 - RNA, 22 nt, Human
uugggugaugaagaccaggcug

SEQ ID NO: 314372 - RNA, 24 nt, Human
uuuagaauuugaaaacacuauacc

SEQ ID NO: 314373 - RNA, 19 nt, Human
uuugcggugagccgagauc

SEQ ID NO: 314374 - RNA, 21 nt, Human
uuugcggugagccgagaucgc

SEQ ID NO: 314375 - RNA, 26 nt, Human
uuuuuuuuuuuuuuuuuuacaauuag

SEQ ID NO: 314376 - RNA, 22 nt, Human
aaagaggauucucccaugcaaa

SEQ ID NO: 314377 - RNA, 22 nt, Human
aaaggacacccgucucccaaca

SEQ ID NO: 314378 - RNA, 21 nt, Human
aagcggacguuuggggcggga

SEQ ID NO: 314379 - RNA, 23 nt, Human
accccggagccagaggagaaggg

SEQ ID NO: 314380 - RNA, 21 nt, Human
accgucccccugcccccacgc

SEQ ID NO: 314381 - RNA, 21 nt, Human
caccugcaugacgccgggcag

SEQ ID NO: 314382 - RNA, 20 nt, Human
cacgguccucaccuggaggc

SEQ ID NO: 314383 - RNA, 20 nt, Human
cagcgaguccccccuccccu

SEQ ID NO: 314384 - RNA, 18 nt, Human
cauucugcgcccccuacc

SEQ ID NO: 314385 - RNA, 22 nt, Human
ccaccgugccgccccgcacccc

SEQ ID NO: 314386 - RNA, 23 nt, Human
ccacgucgcccagcggcaucgug

SEQ ID NO: 314387 - RNA, 21 nt, Human
ccaggccccggcccugugcga

SEQ ID NO: 314388 - RNA, 20 nt, Human
cccacgccacgucgcccagc

SEQ ID NO: 314389 - RNA, 21 nt, Human
cccacgccacgucgcccagcg

SEQ ID NO: 314390 - RNA, 21 nt, Human
cccaugcaaaccccggagcca

SEQ ID NO: 314391 - RNA, 22 nt, Human
ccccaccgucccccugccccca

SEQ ID NO: 314392 - RNA, 23 nt, Human
ccccaccgucccccugcccccac

SEQ ID NO: 314393 - RNA, 21 nt, Human
cccccaccgucccccugcccc

SEQ ID NO: 314394 - RNA, 18 nt, Human
cccccacgccacgucgcc

SEQ ID NO: 314395 - RNA, 19 nt, Human
cccccacgccacgucgccc

SEQ ID NO: 314396 - RNA, 21 nt, Human
ccccccuccccuccuuucgga

SEQ ID NO: 314397 - RNA, 26 nt, Human
cccccugcccccacgccacgucgccc

SEQ ID NO: 314398 - RNA, 21 nt, Human
ccccgcacccccaaggucgcc

SEQ ID NO: 314399 - RNA, 23 nt, Human
ccccgcacccccaaggucgccca

SEQ ID NO: 314400 - RNA, 24 nt, Human
ccccgcacccccaaggucgcccag

SEQ ID NO: 314401 - RNA, 18 nt, Human
ccccgcccccuucccgcg

SEQ ID NO: 314402 - RNA, 20 nt, Human
ccccgcuucuucccccucuc

SEQ ID NO: 314403 - RNA, 21 nt, Human
ccccgcuucuucccccucuca

SEQ ID NO: 314404 - RNA, 23 nt, Human
ccccggagccagaggagaagggg

SEQ ID NO: 314405 - RNA, 21 nt, Human
ccccuucccgcggguaaagga

SEQ ID NO: 314406 - RNA, 24 nt, Human
cccgcagaugacccgggggaccgg

SEQ ID NO: 314407 - RNA, 19 nt, Human
cccgcccccuucccgcggg

SEQ ID NO: 314408 - RNA, 23 nt, Human
ccggcgaccggacgcggcggggc

SEQ ID NO: 314409 - RNA, 18 nt, Human
ccuggggcggggaggccg

SEQ ID NO: 314410 - RNA, 21 nt, Human
cgaggcgggcgcgcgcacucc

SEQ ID NO: 314411 - RNA, 21 nt, Human
cgcacccccaaggucgcccag

SEQ ID NO: 314412 - RNA, 21 nt, Human
cgccacgucgcccagcggcau

SEQ ID NO: 314413 - RNA, 25 nt, Human
cgccccgcacccccaaggucgccca

SEQ ID NO: 314414 - RNA, 18 nt, Human
cgccgggcagcgcgugga

SEQ ID NO: 314415 - RNA, 21 nt, Human
cgcgacugggcaggaaaaagg

SEQ ID NO: 314416 - RNA, 22 nt, Human
cucccaugcaaaccccggagcc

SEQ ID NO: 314417 - RNA, 18 nt, Human
cucccccgcccgcucucc

SEQ ID NO: 314418 - RNA, 19 nt, Human
cugcgcccccuacccccgg

SEQ ID NO: 314419 - RNA, 20 nt, Human
cugcgcccccuacccccggg

SEQ ID NO: 314420 - RNA, 19 nt, Human
cuuuacccgugaucacuga

SEQ ID NO: 314421 - RNA, 22 nt, Human
gacacgagacacgggggaggga

SEQ ID NO: 314422 - RNA, 24 nt, Human
gacgccgggcagcgcguggagcag

SEQ ID NO: 314423 - RNA, 18 nt, Human
gacuugggccccgcgacu

SEQ ID NO: 314424 - RNA, 21 nt, Human
gagcucccccgcccgcucucc

SEQ ID NO: 314425 - RNA, 19 nt, Human
gaguggcacagggggcgag

SEQ ID NO: 314426 - RNA, 21 nt, Human
gcagcgaguccccccuccccu

SEQ ID NO: 314427 - RNA, 23 nt, Human
gccacaguccgggcaggagaggg

SEQ ID NO: 314428 - RNA, 18 nt, Human
gccacgucgcccagcggc

SEQ ID NO: 314429 - RNA, 20 nt, Human
gccccgcacccccaaggucg

SEQ ID NO: 314430 - RNA, 18 nt, Human
gccccgcccccuucccgc

SEQ ID NO: 314431 - RNA, 18 nt, Human
gccgggcagcgcguggag

SEQ ID NO: 314432 - RNA, 22 nt, Human
ggagccagaggagaaggggaag

SEQ ID NO: 314433 - RNA, 20 nt, Human
ggauucucccaugcaaaccc

SEQ ID NO: 314434 - RNA, 20 nt, Human
ggccacagcacggggggcgg

SEQ ID NO: 314435 - RNA, 21 nt, Human
ggccccggcccugugcgaggc

SEQ ID NO: 314436 - RNA, 19 nt, Human
ggcggugaggccccgggga

SEQ ID NO: 314437 - RNA, 23 nt, Human
ggcucccccaccgucccccugcc

SEQ ID NO: 314438 - RNA, 25 nt, Human
gggaggccgaccgagagucgaagac

SEQ ID NO: 314439 - RNA, 25 nt, Human
gggcggagcugaguggcacaggggg

SEQ ID NO: 314440 - RNA, 25 nt, Human
gggcucccccaccgucccccugccc

SEQ ID NO: 314441 - RNA, 22 nt, Human
ggggaacccgcccgcagaugac

SEQ ID NO: 314442 - RNA, 18 nt, Human
gggggagggagaggggaa

SEQ ID NO: 314443 - RNA, 24 nt, Human
guccaggccccggcccugugcgag

SEQ ID NO: 314444 - RNA, 21 nt, Human
uaaauuacaaaguagagaaaa

SEQ ID NO: 314445 - RNA, 20 nt, Human
ucccaugcaaaccccggagc

SEQ ID NO: 314446 - RNA, 24 nt, Human
ucccgcuggucuguacagaugguc

SEQ ID NO: 314447 - RNA, 18 nt, Human
uccucaccuggaggccug

SEQ ID NO: 314448 - RNA, 22 nt, Human
uccuguggaagugcgggaggag

SEQ ID NO: 314449 - RNA, 19 nt, Human
ucuccccggcgaggccaca

SEQ ID NO: 314450 - RNA, 20 nt, Human
ucuuccuccccgcuucuucc

SEQ ID NO: 314451 - RNA, 19 nt, Human
ugacccgggggaccggcga

SEQ ID NO: 314452 - RNA, 24 nt, Human
ugacgccuggggcggggaggccga

SEQ ID NO: 314453 - RNA, 20 nt, Human
ugaguggcacagggggcgag

SEQ ID NO: 314454 - RNA, 20 nt, Human
uggaaagaggauucucccau

SEQ ID NO: 314455 - RNA, 22 nt, Human
ugggcaggaaaaaggggaggga

SEQ ID NO: 314456 - RNA, 20 nt, Human
ugggccccgcgacugggcag

SEQ ID NO: 314457 - RNA, 21 nt, Human
uggggcgggauuucuuccucc

SEQ ID NO: 314458 - RNA, 22 nt, Human
uguggaagugcgggaggaggcg

SEQ ID NO: 314459 - RNA, 23 nt, Human
ugugucauccacacguuuccugu

SEQ ID NO: 314460 - RNA, 26 nt, Human
uucucccaugcaaaccccggagccag

SEQ ID NO: 314461 - RNA, 19 nt, Human
aagcagagaaggggccagg

SEQ ID NO: 314462 - RNA, 19 nt, Human
agaaggggccaggccaccc

SEQ ID NO: 314463 - RNA, 24 nt, Human
agcgggagaggcugggaggggcug

SEQ ID NO: 314464 - RNA, 20 nt, Human
auaaagugcuaacuugcccc

SEQ ID NO: 314465 - RNA, 24 nt, Human
caggggcacuuugcuuagaagagg

SEQ ID NO: 314466 - RNA, 20 nt, Human
caucaggccguggagcuggu

SEQ ID NO: 314467 - RNA, 25 nt, Human
ccccaggcugucuaugggagacccu

SEQ ID NO: 314468 - RNA, 19 nt, Human
cuuugcuuagaagaggacu

SEQ ID NO: 314469 - RNA, 20 nt, Human
gaagaggacucuccuagcgg

SEQ ID NO: 314470 - RNA, 22 nt, Human
gccaggccaccccauucaggaa

SEQ ID NO: 314471 - RNA, 24 nt, Human
gggcaguccuggcggcagaacccg

SEQ ID NO: 314472 - RNA, 21 nt, Human
gggcucugggaagggggcagu

SEQ ID NO: 314473 - RNA, 19 nt, Human
gggcugcaucaggccgugg

SEQ ID NO: 314474 - RNA, 18 nt, Human
uacaguccguccaccacc

SEQ ID NO: 314475 - RNA, 21 nt, Human
uagaagaggacucuccuagcg

SEQ ID NO: 314476 - RNA, 23 nt, Human
uccugagcucuguuggguuccug

SEQ ID NO: 314477 - RNA, 19 nt, Human
ucuuuaagcagagaagggg

SEQ ID NO: 314478 - RNA, 20 nt, Human
ugagcucuguuggguuccug

SEQ ID NO: 314479 - RNA, 20 nt, Human
ugggaagggggcaguccugg

SEQ ID NO: 314480 - RNA, 21 nt, Human
ugggaagggggcaguccugga

SEQ ID NO: 314481 - RNA, 23 nt, Human
ugggaggggcugcaucaggccgu

SEQ ID NO: 314482 - RNA, 20 nt, Human
ugggauggaaucagugcauc

SEQ ID NO: 314483 - RNA, 19 nt, Human
uuccugggauggaaucagu

SEQ ID NO: 314484 - RNA, 21 nt, Human
aaggaaaacauggaacccaaa

SEQ ID NO: 314485 - RNA, 21 nt, Human
acugcgagcaaauggggugga

SEQ ID NO: 314486 - RNA, 18 nt, Human
agaaggaaugaucuggug

SEQ ID NO: 314487 - RNA, 21 nt, Human
aggcaugggagggaacaagga

SEQ ID NO: 314488 - RNA, 24 nt, Human
auggaacccaaagggaacugcagc

SEQ ID NO: 314489 - RNA, 25 nt, Human
cgagcaaaugggguggaggggugcu

SEQ ID NO: 314490 - RNA, 22 nt, Human
cugcgagcaaaugggguggagg

SEQ ID NO: 314491 - RNA, 19 nt, Human
gaacaaggaaaacauggaa

SEQ ID NO: 314492 - RNA, 23 nt, Human
gaacccaaagggaacugcagcga

SEQ ID NO: 314493 - RNA, 22 nt, Human
gagggaacaaggaaaacaugga

SEQ ID NO: 314494 - RNA, 23 nt, Human
gcuaauaguacacgguuuuccuc

SEQ ID NO: 314495 - RNA, 19 nt, Human
gggaacaaggaaaacaugg

SEQ ID NO: 314496 - RNA, 21 nt, Human
ggugguuaagauaaaacacaa

SEQ ID NO: 314497 - RNA, 22 nt, Human
uaacucugcaauccagcuaggc

SEQ ID NO: 314498 - RNA, 19 nt, Human
uaagauaaaacacaaguca

SEQ ID NO: 314499 - RNA, 19 nt, Human
ugggagggaacaaggaaaa

SEQ ID NO: 314500 - RNA, 26 nt, Human
ugggguggaggggugcucuccugagc

SEQ ID NO: 314501 - RNA, 26 nt, Human
aaaaaaaaaaagcaaauaauugaaag

SEQ ID NO: 314502 - RNA, 31 nt, Human
acacaacacacacacacacacacacacacag

SEQ ID NO: 314503 - RNA, 23 nt, Human
acacacacacacacacacacaca

SEQ ID NO: 314504 - RNA, 23 nt, Human
acacacacacacacacacacaca

SEQ ID NO: 314505 - RNA, 23 nt, Human
acacacacacacacacacacaca

SEQ ID NO: 314506 - RNA, 25 nt, Human
acacacacacacacacacacacagu

SEQ ID NO: 314507 - RNA, 25 nt, Human
acacacacacacacacacacacccc

SEQ ID NO: 314508 - RNA, 18 nt, Human
acacacaccccugccaaa

SEQ ID NO: 314509 - RNA, 25 nt, Human
agcaaauaauugaaagacaacacaa

SEQ ID NO: 314510 - RNA, 19 nt, Human
agcaccacuugaggaaggg

SEQ ID NO: 314511 - RNA, 20 nt, Human
cacacacacacacacacaca

SEQ ID NO: 314512 - RNA, 20 nt, Human
cacacacacacacacacaca

SEQ ID NO: 314513 - RNA, 20 nt, Human
cacacacacacacacacaca

SEQ ID NO: 314514 - RNA, 20 nt, Human
cacacacacacacacacaca

SEQ ID NO: 314515 - RNA, 20 nt, Human
cacacacacacacacacaca

SEQ ID NO: 314516 - RNA, 22 nt, Human
cacacacacacacacacacaca

SEQ ID NO: 314517 - RNA, 26 nt, Human
cacacacacacacacacacacacaca

SEQ ID NO: 314518 - RNA, 22 nt, Human
cacacacacacacacacacccu

SEQ ID NO: 314519 - RNA, 23 nt, Human
cacacaccccugccaaagcauau

SEQ ID NO: 314520 - RNA, 31 nt, Human
gacaacacaacacacacacacacacacacag

SEQ ID NO: 314521 - RNA, 19 nt, Human
gggauagaauacaaaaaga

SEQ ID NO: 314522 - RNA, 20 nt, Human
uaaguucaaagucccuaagc

SEQ ID NO: 314523 - RNA, 24 nt, Human
uagaauacaaaaagaaaguaaaaa

SEQ ID NO: 314524 - RNA, 23 nt, Human
uauccuuguuuucugccaguugu

SEQ ID NO: 314525 - RNA, 22 nt, Human
ucccuaagcaggugguuuacua

SEQ ID NO: 314526 - RNA, 22 nt, Human
ucugggacagcugacgggccuc

SEQ ID NO: 314527 - RNA, 19 nt, Human
ugaaagacaacacaacaca

SEQ ID NO: 314528 - RNA, 24 nt, Human
ugggauagaauacaaaaagaaagu

SEQ ID NO: 314529 - RNA, 21 nt, Human
uuugccaauucaaaguuuuuu

SEQ ID NO: 314530 - RNA, 26 nt, Human
uuuuuaguuuuaaaauagcaccacuu

SEQ ID NO: 314531 - RNA, 18 nt, Human
uuuuuuuuuuuuuuuuug

SEQ ID NO: 314532 - RNA, 22 nt, Human
uuuuuuuuuuuuuuuuugccaa

SEQ ID NO: 314533 - RNA, 23 nt, Human
uuuuuuuuuuuuuuuuugccaau

SEQ ID NO: 314534 - RNA, 18 nt, Human
aaaauuagcugggcgugg

SEQ ID NO: 314535 - RNA, 18 nt, Human
aaacaguaaggaacuaag

SEQ ID NO: 314536 - RNA, 23 nt, Human
aaagaaacaaacaaaaccacuuu

SEQ ID NO: 314537 - RNA, 20 nt, Human
aacuguaaacaguaaggaac

SEQ ID NO: 314538 - RNA, 19 nt, Human
aagacuggacaccauuauu

SEQ ID NO: 314539 - RNA, 24 nt, Human
aagcugaggcaggagaauugcuug

SEQ ID NO: 314540 - RNA, 24 nt, Human
aaggcgggguggaucacaagguca

SEQ ID NO: 314541 - RNA, 21 nt, Human
aauauggugaaaccccaucuc

SEQ ID NO: 314542 - RNA, 24 nt, Human
aauugcuugaacccgggaggcaga

SEQ ID NO: 314543 - RNA, 20 nt, Human
acacaauaagcaaaacugaa

SEQ ID NO: 314544 - RNA, 24 nt, Human
acagagcaagacuccaucucaaag

SEQ ID NO: 314545 - RNA, 24 nt, Human
accaauauggugaaaccccaucuc

SEQ ID NO: 314546 - RNA, 24 nt, Human
accccaucucuacuaaaaauacaa

SEQ ID NO: 314547 - RNA, 22 nt, Human
accccuaucaguacuccuaaac

SEQ ID NO: 314548 - RNA, 24 nt, Human
accgcacuccagccugggugacag

SEQ ID NO: 314549 - RNA, 26 nt, Human
accgcacuccagccugggugacagag

SEQ ID NO: 314550 - RNA, 19 nt, Human
accuaguggccgcccgggc

SEQ ID NO: 314551 - RNA, 23 nt, Human
acgugaccaauauggugaaaccc

SEQ ID NO: 314552 - RNA, 22 nt, Human
agaggaugcagugagccgagau

SEQ ID NO: 314553 - RNA, 24 nt, Human
agaggaugcagugagccgagauug

SEQ ID NO: 314554 - RNA, 24 nt, Human
agccugggugacagagcaagacuc

SEQ ID NO: 314555 - RNA, 23 nt, Human
agcugggcgugguggcacgugcc

SEQ ID NO: 314556 - RNA, 28 nt, Human
aggaguucaagaccaacgugacgugacc

SEQ ID NO: 314557 - RNA, 21 nt, Human
aggcagaggaugcagugagcc

SEQ ID NO: 314558 - RNA, 24 nt, Human
aggcagaggaugcagugagccgag

SEQ ID NO: 314559 - RNA, 24 nt, Human
aggcaggagaauugcuugaacccg

SEQ ID NO: 314560 - RNA, 22 nt, Human
aggccaaggcgggguggaucac

SEQ ID NO: 314561 - RNA, 20 nt, Human
aggcgggguggaucacaagg

SEQ ID NO: 314562 - RNA, 21 nt, Human
aggcgggguggaucacaaggu

SEQ ID NO: 314563 - RNA, 24 nt, Human
aucaacacacaauaagcaaaacug

SEQ ID NO: 314564 - RNA, 21 nt, Human
aucacaaggucaggaguucaa

SEQ ID NO: 314565 - RNA, 22 nt, Human
aucccagcacuuugggaggcca

SEQ ID NO: 314566 - RNA, 22 nt, Human
augcagugagccgagauugcgc

SEQ ID NO: 314567 - RNA, 20 nt, Human
auggugaaaccccaucucua

SEQ ID NO: 314568 - RNA, 24 nt, Human
auugcgccaccgcacuccagccug

SEQ ID NO: 314569 - RNA, 24 nt, Human
caauauggugaaaccccaucucua

SEQ ID NO: 314570 - RNA, 24 nt, Human
cacaccuguaaucccagcacuuug

SEQ ID NO: 314571 - RNA, 23 nt, Human
cacauaaccauuuuaaaaaacau

SEQ ID NO: 314572 - RNA, 24 nt, Human
caccgcacuccagccugggugaca

SEQ ID NO: 314573 - RNA, 19 nt, Human
caccuguaaucccagcacu

SEQ ID NO: 314574 - RNA, 24 nt, Human
caccuguaaucccagcacuuuggg

SEQ ID NO: 314575 - RNA, 22 nt, Human
cacuccagccugggugacagag

SEQ ID NO: 314576 - RNA, 23 nt, Human
cacuccagccugggugacagagc

SEQ ID NO: 314577 - RNA, 24 nt, Human
cagcacuuugggaggccaaggcgg

SEQ ID NO: 314578 - RNA, 20 nt, Human
cauaaccauuuuaaaaaaca

SEQ ID NO: 314579 - RNA, 26 nt, Human
caucucaaagaaacaaacaaaaccac

SEQ ID NO: 314580 - RNA, 23 nt, Human
cauuagggaucauauucauagac

SEQ ID NO: 314581 - RNA, 22 nt, Human
cauuuuaaaaaacauuuuacuu

SEQ ID NO: 314582 - RNA, 29 nt, Human
cauuuuaaaaaacauuuuacuuggccggu

SEQ ID NO: 314583 - RNA, 20 nt, Human
ccaccgcacuccagccuggg

SEQ ID NO: 314584 - RNA, 20 nt, Human
ccaccgcacuccagccuggg

SEQ ID NO: 314585 - RNA, 23 nt, Human
ccaccgcacuccagccuggguga

SEQ ID NO: 314586 - RNA, 24 nt, Human
ccaccgcacuccagccugggugac

SEQ ID NO: 314587 - RNA, 22 nt, Human
ccugggugacagagcaagacuc

SEQ ID NO: 314588 - RNA, 18 nt, Human
ccuguaaucccagcuacu

SEQ ID NO: 314589 - RNA, 21 nt, Human
ccuguaaucccagcuacuugg

SEQ ID NO: 314590 - RNA, 22 nt, Human
ccuguaaucccagcuacuuggg

SEQ ID NO: 314591 - RNA, 26 nt, Human
cgccaccgcacuccagccugggugac

SEQ ID NO: 314592 - RNA, 19 nt, Human
cgccggagaccggcagcga

SEQ ID NO: 314593 - RNA, 21 nt, Human
cgggaggcagaggaugcagug

SEQ ID NO: 314594 - RNA, 24 nt, Human
cgugccuguaaucccagcuacuug

SEQ ID NO: 314595 - RNA, 22 nt, Human
cucacaccuguaaucccagcac

SEQ ID NO: 314596 - RNA, 24 nt, Human
cucacaccuguaaucccagcacuu

SEQ ID NO: 314597 - RNA, 24 nt, Human
cuuggccgggcacgguggcucaca

SEQ ID NO: 314598 - RNA, 18 nt, Human
gaacccgggaggcagagg

SEQ ID NO: 314599 - RNA, 23 nt, Human
gagaauugcuugaacccgggagg

SEQ ID NO: 314600 - RNA, 23 nt, Human
gagauugcgccaccgcacuccag

SEQ ID NO: 314601 - RNA, 24 nt, Human
gaucacaaggucaggaguucaaga

SEQ ID NO: 314602 - RNA, 24 nt, Human
gcacuccagccugggugacagagc

SEQ ID NO: 314603 - RNA, 19 nt, Human
gccaccgcacuccagccug

SEQ ID NO: 314604 - RNA, 19 nt, Human
gcccgggccgcccaaacuc

SEQ ID NO: 314605 - RNA, 20 nt, Human
gccuguaaucccagcuacuu

SEQ ID NO: 314606 - RNA, 21 nt, Human
ggcacgugccuguaaucccag

SEQ ID NO: 314607 - RNA, 24 nt, Human
ggcgggguggaucacaaggucagg

SEQ ID NO: 314608 - RNA, 23 nt, Human
ggcgugguggcacgugccuguaa

SEQ ID NO: 314609 - RNA, 21 nt, Human
ggcucacaccuguaaucccag

SEQ ID NO: 314610 - RNA, 24 nt, Human
gggcacgguggcucacaccuguaa

SEQ ID NO: 314611 - RNA, 18 nt, Human
gggccgcccaaacuccag

SEQ ID NO: 314612 - RNA, 23 nt, Human
gguggaucacaaggucaggaguu

SEQ ID NO: 314613 - RNA, 24 nt, Human
gguggcacgugccuguaaucccag

SEQ ID NO: 314614 - RNA, 23 nt, Human
gguggcucacaccuguaauccca

SEQ ID NO: 314615 - RNA, 24 nt, Human
gguggcucacaccuguaaucccag

SEQ ID NO: 314616 - RNA, 19 nt, Human
gugaccaauauggugaaac

SEQ ID NO: 314617 - RNA, 23 nt, Human
guggaucacaaggucaggaguuc

SEQ ID NO: 314618 - RNA, 25 nt, Human
uaaggaacuaaggugucaaaagaaa

SEQ ID NO: 314619 - RNA, 24 nt, Human
uacaaguuuaaaaagacuggacac

SEQ ID NO: 314620 - RNA, 22 nt, Human
uagcugggcgugguggcacgug

SEQ ID NO: 314621 - RNA, 20 nt, Human
ucaacacacaauaagcaaaa

SEQ ID NO: 314622 - RNA, 21 nt, Human
ucacaaggucaggaguucaag

SEQ ID NO: 314623 - RNA, 24 nt, Human
ucacaaggucaggaguucaagacc

SEQ ID NO: 314624 - RNA, 24 nt, Human
uccagccugggugacagagcaaga

SEQ ID NO: 314625 - RNA, 21 nt, Human
uccaucucaaagaaacaaaca

SEQ ID NO: 314626 - RNA, 24 nt, Human
ucucaaagaaacaaacaaaaccac

SEQ ID NO: 314627 - RNA, 21 nt, Human
ucucuacuaaaaauacaaaaa

SEQ ID NO: 314628 - RNA, 19 nt, Human
ugaaaccccaucucuacua

SEQ ID NO: 314629 - RNA, 22 nt, Human
ugaccaauauggugaaacccca

SEQ ID NO: 314630 - RNA, 24 nt, Human
ugaccaauauggugaaaccccauc

SEQ ID NO: 314631 - RNA, 22 nt, Human
ugagccgagauugcgccaccgc

SEQ ID NO: 314632 - RNA, 24 nt, Human
ugaggcaggagaauugcuugaacc

SEQ ID NO: 314633 - RNA, 25 nt, Human
ugaggcaggagaauugcuugaaccc

SEQ ID NO: 314634 - RNA, 24 nt, Human
ugccuguaaucccagcuacuuggg

SEQ ID NO: 314635 - RNA, 22 nt, Human
uggaucacaaggucaggaguuc

SEQ ID NO: 314636 - RNA, 21 nt, Human
uggcacgugccuguaauccca

SEQ ID NO: 314637 - RNA, 21 nt, Human
uggcucacaccuguaauccca

SEQ ID NO: 314638 - RNA, 24 nt, Human
uggcucacaccuguaaucccagca

SEQ ID NO: 314639 - RNA, 25 nt, Human
ugggaggccaaggcgggguggauca

SEQ ID NO: 314640 - RNA, 24 nt, Human
ugguggcacgugccuguaauccca

SEQ ID NO: 314641 - RNA, 24 nt, Human
ugucaaaagaaacacauuagggau

SEQ ID NO: 314642 - RNA, 19 nt, Human
uuagcugggcgugguggca

SEQ ID NO: 314643 - RNA, 20 nt, Human
uuagcugggcgugguggcac

SEQ ID NO: 314644 - RNA, 24 nt, Human
uuagcugggcgugguggcacgugc

SEQ ID NO: 314645 - RNA, 18 nt, Human
uugcuugaacccgggagg

SEQ ID NO: 314646 - RNA, 24 nt, Human
uugcuugaacccgggaggcagagg

SEQ ID NO: 314647 - RNA, 23 nt, Human
uugggaagcugaggcaggagaau

SEQ ID NO: 314648 - RNA, 23 nt, Human
aaaaacgacagcagcaaaccaac

SEQ ID NO: 314649 - RNA, 28 nt, Human
aaaccaacaggcuucacaguaaccagga

SEQ ID NO: 314650 - RNA, 19 nt, Human
aacucaggucacaccacag

SEQ ID NO: 314651 - RNA, 18 nt, Human
aagacuuucacuuggaug

SEQ ID NO: 314652 - RNA, 18 nt, Human
aauccauguuccagaaau

SEQ ID NO: 314653 - RNA, 23 nt, Human
acccaucaccaucaccaugucca

SEQ ID NO: 314654 - RNA, 23 nt, Human
accuuggcugacagcccaacgcg

SEQ ID NO: 314655 - RNA, 21 nt, Human
acugcuccuacccccaugggc

SEQ ID NO: 314656 - RNA, 21 nt, Human
agcagcaaaccaacaggcuuc

SEQ ID NO: 314657 - RNA, 20 nt, Human
aucauguccacaaagaugcc

SEQ ID NO: 314658 - RNA, 20 nt, Human
caaaacugacugucccccuu

SEQ ID NO: 314659 - RNA, 18 nt, Human
caacugcuccuaccccca

SEQ ID NO: 314660 - RNA, 18 nt, Human
caaggggugggugacauc

SEQ ID NO: 314661 - RNA, 20 nt, Human
caccaugccagcacccuggc

SEQ ID NO: 314662 - RNA, 23 nt, Human
cacgggcggggagaacacagaac

SEQ ID NO: 314663 - RNA, 19 nt, Human
ccacaaagaugcccagaaa

SEQ ID NO: 314664 - RNA, 20 nt, Human
ccaucaccaucaccaugucc

SEQ ID NO: 314665 - RNA, 23 nt, Human
cggggagaacacagaacucaaac

SEQ ID NO: 314666 - RNA, 20 nt, Human
cuacccccaugggcccuccc

SEQ ID NO: 314667 - RNA, 20 nt, Human
cugacugucccccuugguca

SEQ ID NO: 314668 - RNA, 22 nt, Human
gaacacagaacucaaacugacg

SEQ ID NO: 314669 - RNA, 21 nt, Human
gacagcccaacgcggccaccu

SEQ ID NO: 314670 - RNA, 22 nt, Human
gaggucgugaggaagggugggu

SEQ ID NO: 314671 - RNA, 23 nt, Human
gcugacagcccaacgcggccacc

SEQ ID NO: 314672 - RNA, 24 nt, Human
gcugacagcccaacgcggccaccu

SEQ ID NO: 314673 - RNA, 19 nt, Human
ggaaaagacuuucacuugg

SEQ ID NO: 314674 - RNA, 18 nt, Human
ggcugggcaaucacaggc

SEQ ID NO: 314675 - RNA, 19 nt, Human
gggcgcgggucgggcggga

SEQ ID NO: 314676 - RNA, 24 nt, Human
gggugcauggacauuugcagcugc

SEQ ID NO: 314677 - RNA, 23 nt, Human
ggucaaggaaaagacuuucacuu

SEQ ID NO: 314678 - RNA, 20 nt, Human
uaacacacagaaaaaucaaa

SEQ ID NO: 314679 - RNA, 24 nt, Human
uaacacacagaaaaaucaaagccu

SEQ ID NO: 314680 - RNA, 19 nt, Human
uaacacaucaugaguagau

SEQ ID NO: 314681 - RNA, 18 nt, Human
uagcaacacaggaauucc

SEQ ID NO: 314682 - RNA, 21 nt, Human
ucacuuggauggcaacccauc

SEQ ID NO: 314683 - RNA, 18 nt, Human
ucccagguucaacugcuc

SEQ ID NO: 314684 - RNA, 18 nt, Human
ucccuagcagccuuccuc

SEQ ID NO: 314685 - RNA, 20 nt, Human
ucccuccggagcacaggagc

SEQ ID NO: 314686 - RNA, 23 nt, Human
ugcuccuacccccaugggcccuc

SEQ ID NO: 314687 - RNA, 24 nt, Human
ugggugcauggacauuugcagcug

SEQ ID NO: 314688 - RNA, 22 nt, Human
ugguggguccuggccgaggucu

SEQ ID NO: 314689 - RNA, 19 nt, Human
ugucuaggcacagcucaag

SEQ ID NO: 314690 - RNA, 20 nt, Human
ugugacaguggagugggcac

SEQ ID NO: 314691 - RNA, 20 nt, Human
uucacauuuaaggugaacac

SEQ ID NO: 314692 - RNA, 23 nt, Human
uucacauuuaaggugaacacaaa

SEQ ID NO: 314693 - RNA, 19 nt, Human
uuccucaggcacacuguga

SEQ ID NO: 314694 - RNA, 18 nt, Human
uugaauuucuuuaacaca

SEQ ID NO: 314695 - RNA, 24 nt, Human
uuuugcaaaacugacugucccccu

SEQ ID NO: 314696 - RNA, 20 nt, Human
uuuuuuuuuuuuuuuuccau

SEQ ID NO: 314697 - RNA, 24 nt, Human
uuuuuuuuuuuuuuuuuuccauag

SEQ ID NO: 314698 - RNA, 20 nt, Human
aaaaaaaacaaggacaacug

SEQ ID NO: 314699 - RNA, 23 nt, Human
aaaaaacaaggacaacugguggg

SEQ ID NO: 314700 - RNA, 24 nt, Human
aaaaacaaugaaaaggaaaacaac

SEQ ID NO: 314701 - RNA, 24 nt, Human
aaaagaccaaaaaaaaacaaggac

SEQ ID NO: 314702 - RNA, 22 nt, Human
aaaaggaaaacaacauaaagga

SEQ ID NO: 314703 - RNA, 24 nt, Human
aaaaggacaaacauaaaacaaucc

SEQ ID NO: 314704 - RNA, 18 nt, Human
aaacagaauggaaguaag

SEQ ID NO: 314705 - RNA, 24 nt, Human
aaacauaaaacaauccaaaaacaa

SEQ ID NO: 314706 - RNA, 22 nt, Human
aaagaccaaaaaaaaacaagga

SEQ ID NO: 314707 - RNA, 25 nt, Human
aaagaccaaaaaaaaacaaggacaa

SEQ ID NO: 314708 - RNA, 23 nt, Human
aaugaagaaaagaccaaaaaaaa

SEQ ID NO: 314709 - RNA, 22 nt, Human
accaaaaaaaaacaaggacaac

SEQ ID NO: 314710 - RNA, 25 nt, Human
accaaaaaaaaacaaggacaacuga

SEQ ID NO: 314711 - RNA, 20 nt, Human
acucaaugaaauccacauua

SEQ ID NO: 314712 - RNA, 23 nt, Human
agaaaagaccaaaaaaaaacaag

SEQ ID NO: 314713 - RNA, 26 nt, Human
aggaaaacaacauaaaggagauucau

SEQ ID NO: 314714 - RNA, 19 nt, Human
caaaaaaaaacaaggacaa

SEQ ID NO: 314715 - RNA, 19 nt, Human
caaaaaaaaacaaggacac

SEQ ID NO: 314716 - RNA, 25 nt, Human
caaacauaaaacaauccaaaaacaa

SEQ ID NO: 314717 - RNA, 18 nt, Human
caacugaucccugugcuc

SEQ ID NO: 314718 - RNA, 23 nt, Human
caacugaucccugugcuccugca

SEQ ID NO: 314719 - RNA, 23 nt, Human
cagauugcagauuaucaaaaaau

SEQ ID NO: 314720 - RNA, 21 nt, Human
cgaaacagaauggaaguaagu

SEQ ID NO: 314721 - RNA, 23 nt, Human
cgccgccagaaaaggcgcuaaag

SEQ ID NO: 314722 - RNA, 21 nt, Human
gaccaaaaaaaaacaaggaca

SEQ ID NO: 314723 - RNA, 26 nt, Human
uaagaaaaaaaaggacaaacauaaaa

SEQ ID NO: 314724 - RNA, 26 nt, Human
uagcaagucucucaaacuuaaaaucc

SEQ ID NO: 314725 - RNA, 18 nt, Human
ucaaaugaagaaaagacc

SEQ ID NO: 314726 - RNA, 24 nt, Human
uccaaaaacaaugaaaaggaaaac

SEQ ID NO: 314727 - RNA, 22 nt, Human
uccagauugcagauuaucaaaa

SEQ ID NO: 314728 - RNA, 23 nt, Human
ucccugugcuccugcaccgguag

SEQ ID NO: 314729 - RNA, 23 nt, Human
ucuucucuggguccgguccuuug

SEQ ID NO: 314730 - RNA, 22 nt, Human
ugaagaaaagaccaaaaaaaaa

SEQ ID NO: 314731 - RNA, 19 nt, Human
ugcagauuaucaaaaaauc

SEQ ID NO: 314732 - RNA, 21 nt, Human
uuaagaaaaaaaaggacaaac

SEQ ID NO: 314733 - RNA, 24 nt, Human
uucaaaugaagaaaagaccaaaaa

SEQ ID NO: 314734 - RNA, 18 nt, Human
uuuuuuuuuuuuuuuuug

SEQ ID NO: 314735 - RNA, 31 nt, Human
uuuuuuuuuuuuuuuuuuuuuuuuguuuuuu

SEQ ID NO: 314736 - RNA, 19 nt, Human
aagaacaccaccaagaaga

SEQ ID NO: 314737 - RNA, 21 nt, Human
aagaacaccaccaagaagaag

SEQ ID NO: 314738 - RNA, 20 nt, Human
aagaagaagggaaggccuga

SEQ ID NO: 314739 - RNA, 22 nt, Human
aggcagggaagcaaagacgggg

SEQ ID NO: 314740 - RNA, 21 nt, Human
aucucugacacuuccaugguc

SEQ ID NO: 314741 - RNA, 23 nt, Human
auggggcagcagcaggcagggaa

SEQ ID NO: 314742 - RNA, 23 nt, Human
cagauuaucuuacucaagaacac

SEQ ID NO: 314743 - RNA, 22 nt, Human
caguccagauuaucuuacucaa

SEQ ID NO: 314744 - RNA, 19 nt, Human
gcuccgacccggaagcaga

SEQ ID NO: 314745 - RNA, 24 nt, Human
ucuugaucaaauggggcagcagca

SEQ ID NO: 314746 - RNA, 25 nt, Human
ugaaucucugacacuuccauggucu

SEQ ID NO: 314747 - RNA, 21 nt, Human
aacaaauguaaaagacugaaa

SEQ ID NO: 314748 - RNA, 21 nt, Human
aagaagcagcauuaugguuca

SEQ ID NO: 314749 - RNA, 20 nt, Human
aagaagcugggcucaagaac

SEQ ID NO: 314750 - RNA, 21 nt, Human
aagagaaaagaagcauccuau

SEQ ID NO: 314751 - RNA, 20 nt, Human
aagugucagaaacagcacug

SEQ ID NO: 314752 - RNA, 24 nt, Human
agaacaaauguaaaagacugaaau

SEQ ID NO: 314753 - RNA, 25 nt, Human
agagaaaagaagcauccuauuaaaa

SEQ ID NO: 314754 - RNA, 21 nt, Human
agaugccaggccuccuaagcu

SEQ ID NO: 314755 - RNA, 20 nt, Human
agccggcggcggaaugcuug

SEQ ID NO: 314756 - RNA, 22 nt, Human
aucuagaagcugguucacuggg

SEQ ID NO: 314757 - RNA, 20 nt, Human
caaaaccacugagaaaugac

SEQ ID NO: 314758 - RNA, 23 nt, Human
caaaugcucuggcaaccuaggca

SEQ ID NO: 314759 - RNA, 23 nt, Human
caaauguaaaagacugaaauagg

SEQ ID NO: 314760 - RNA, 21 nt, Human
cauucuaugucaucuagaagc

SEQ ID NO: 314761 - RNA, 23 nt, Human
cccacaaaauccagaaagcggac

SEQ ID NO: 314762 - RNA, 19 nt, Human
ccugcuccuccccacaaaa

SEQ ID NO: 314763 - RNA, 20 nt, Human
ccuucuuagaaacuugauug

SEQ ID NO: 314764 - RNA, 20 nt, Human
cgagaagaagcugggcucag

SEQ ID NO: 314765 - RNA, 21 nt, Human
cgggaagcuggggugggagac

SEQ ID NO: 314766 - RNA, 21 nt, Human
cuccuaagcuucaugacuugc

SEQ ID NO: 314767 - RNA, 23 nt, Human
gacccgucgcugcugcacacuuc

SEQ ID NO: 314768 - RNA, 27 nt, Human
gagaaaagaagcauccuauuaaaaugu

SEQ ID NO: 314769 - RNA, 19 nt, Human
uaagcuucaugacuugcaa

SEQ ID NO: 314770 - RNA, 23 nt, Human
uaggccagaauauaaaucuccuu

SEQ ID NO: 314771 - RNA, 23 nt, Human
ucaagaacagaggaaaaugcaaa

SEQ ID NO: 314772 - RNA, 20 nt, Human
ucagagcagacaugcacaag

SEQ ID NO: 314773 - RNA, 23 nt, Human
ucauuuggcaaaaauucaaugug

SEQ ID NO: 314774 - RNA, 23 nt, Human
uccagaaaguuauuuuuauacau

SEQ ID NO: 314775 - RNA, 23 nt, Human
ucgauaccaggauuuggguggcc

SEQ ID NO: 314776 - RNA, 21 nt, Human
ucuccugcuccuccccacaaa

SEQ ID NO: 314777 - RNA, 23 nt, Human
ucuccuuucugagaguacuacuu

SEQ ID NO: 314778 - RNA, 23 nt, Human
ucugaagugucagaaacagcacu

SEQ ID NO: 314779 - RNA, 18 nt, Human
ugccgggaagcuggggug

SEQ ID NO: 314780 - RNA, 20 nt, Human
ugcucuggcaaccuaggcaa

SEQ ID NO: 314781 - RNA, 21 nt, Human
uggccaagacaaggaagagga

SEQ ID NO: 314782 - RNA, 22 nt, Human
ugggggaagagaaaagaagcau

SEQ ID NO: 314783 - RNA, 22 nt, Human
uguaaaagacugaaauagggcg

SEQ ID NO: 314784 - RNA, 21 nt, Human
ugucauucuaugucaucuaga

SEQ ID NO: 314785 - RNA, 19 nt, Human
uguggcuuugcgugggaug

SEQ ID NO: 314786 - RNA, 24 nt, Human
uguugauguucugguuuugagagg

SEQ ID NO: 314787 - RNA, 20 nt, Human
uuaaaagaacuugaguggcg

SEQ ID NO: 314788 - RNA, 21 nt, Human
uucauuuggcaaaaauucaau

SEQ ID NO: 314789 - RNA, 24 nt, Human
uucgauaccaggauuuggguggcc

SEQ ID NO: 314790 - RNA, 23 nt, Human
uucuaugucaucuagaagcuggu

SEQ ID NO: 314791 - RNA, 18 nt, Human
uuguggaaguuucuaugu

SEQ ID NO: 314792 - RNA, 21 nt, Human
aacaagcagacuccagccacc

SEQ ID NO: 314793 - RNA, 24 nt, Human
aacaagcagacuccagccaccagg

SEQ ID NO: 314794 - RNA, 23 nt, Human
accagggcuagggagaggacgac

SEQ ID NO: 314795 - RNA, 18 nt, Human
acguccacuccagcaccc

SEQ ID NO: 314796 - RNA, 25 nt, Human
agauaauaagcgagacuuguaaagc

SEQ ID NO: 314797 - RNA, 21 nt, Human
agauauuggcguggugaauaa

SEQ ID NO: 314798 - RNA, 21 nt, Human
agaugucaugccaggcagcag

SEQ ID NO: 314799 - RNA, 18 nt, Human
aggaguuuguugcuggga

SEQ ID NO: 314800 - RNA, 23 nt, Human
aggcagcagcccccacgggccca

SEQ ID NO: 314801 - RNA, 22 nt, Human
aguguacaggaaaagggaggaa

SEQ ID NO: 314802 - RNA, 22 nt, Human
caaaggauuuaaaugccagaac

SEQ ID NO: 314803 - RNA, 21 nt, Human
cagaguaacuacugaggaggc

SEQ ID NO: 314804 - RNA, 19 nt, Human
cagcaccgagggcuggaca

SEQ ID NO: 314805 - RNA, 23 nt, Human
caggcagcagcccccacgggccc

SEQ ID NO: 314806 - RNA, 22 nt, Human
ccacgggcccaggccuuugugg

SEQ ID NO: 314807 - RNA, 18 nt, Human
ccccacgggcccaggccu

SEQ ID NO: 314808 - RNA, 18 nt, Human
ccugcaccagggcuaggg

SEQ ID NO: 314809 - RNA, 18 nt, Human
cugaaacuaaggcuaaca

SEQ ID NO: 314810 - RNA, 20 nt, Human
cugaaacuaaggcuaacagc

SEQ ID NO: 314811 - RNA, 20 nt, Human
cugguggcugacaauuaacg

SEQ ID NO: 314812 - RNA, 18 nt, Human
cuuguccuucagugguuu

SEQ ID NO: 314813 - RNA, 19 nt, Human
gagaggacgacaccaagga

SEQ ID NO: 314814 - RNA, 19 nt, Human
gaguguacaggaaaaggga

SEQ ID NO: 314815 - RNA, 19 nt, Human
gcagcacaauccacuauca

SEQ ID NO: 314816 - RNA, 24 nt, Human
gccuuuguggggcagugucacugu

SEQ ID NO: 314817 - RNA, 22 nt, Human
ggaguguacaggaaaagggagg

SEQ ID NO: 314818 - RNA, 21 nt, Human
guggggcagugucacugucug

SEQ ID NO: 314819 - RNA, 22 nt, Human
uaaagcacugaaacuaaggcua

SEQ ID NO: 314820 - RNA, 18 nt, Human
uaacagcagcacaaucca

SEQ ID NO: 314821 - RNA, 20 nt, Human
uaagccagaaaucuggagag

SEQ ID NO: 314822 - RNA, 21 nt, Human
uacgucacucagggugaauga

SEQ ID NO: 314823 - RNA, 21 nt, Human
uaggugccgggacagucuggu

SEQ ID NO: 314824 - RNA, 21 nt, Human
uccagcaccgagggcuggaca

SEQ ID NO: 314825 - RNA, 24 nt, Human
ucggauggaaaguugguuuuaagc

SEQ ID NO: 314826 - RNA, 21 nt, Human
ugagauaauaagcgagacuug

SEQ ID NO: 314827 - RNA, 18 nt, Human
ugagcagaguaacuacug

SEQ ID NO: 314828 - RNA, 21 nt, Human
ugaggaguuuguugcugggag

SEQ ID NO: 314829 - RNA, 22 nt, Human
ugccagaacugugaaacauucu

SEQ ID NO: 314830 - RNA, 20 nt, Human
ugccaggcagcagcccccac

SEQ ID NO: 314831 - RNA, 23 nt, Human
ugggaguguacaggaaaagggag

SEQ ID NO: 314832 - RNA, 20 nt, Human
uggggcagugucacugucug

SEQ ID NO: 314833 - RNA, 19 nt, Human
ugguuuuaagccagaaauc

SEQ ID NO: 314834 - RNA, 18 nt, Human
ugucaugccaggcagcag

SEQ ID NO: 314835 - RNA, 21 nt, Human
ugugcaguuaucaugaggagu

SEQ ID NO: 314836 - RNA, 24 nt, Human
ugugugcaguuaucaugaggaguu

SEQ ID NO: 314837 - RNA, 23 nt, Human
uuaaaugccagaacugugaaaca

SEQ ID NO: 314838 - RNA, 20 nt, Human
uucaccuuuccuggcuugga

SEQ ID NO: 314839 - RNA, 21 nt, Human
uugggacgagaguugccuguc

SEQ ID NO: 314840 - RNA, 22 nt, Human
uuuaagccagaaaucuggagag

SEQ ID NO: 314841 - RNA, 19 nt, Human
uuucaugcuauaaauaaag

SEQ ID NO: 314842 - RNA, 22 nt, Human
uuuuaagccagaaaucuggaga

SEQ ID NO: 314843 - RNA, 23 nt, Human
aaacauuuagcccuauugucaca

SEQ ID NO: 314844 - RNA, 23 nt, Human
aaagcccucuuauauccuaaguu

SEQ ID NO: 314845 - RNA, 19 nt, Human
aaauagcaaggaaaacuuc

SEQ ID NO: 314846 - RNA, 25 nt, Human
aaauguugggaauuagcagcaccuc

SEQ ID NO: 314847 - RNA, 24 nt, Human
aauuaugaaaucagaaauaaaaaa

SEQ ID NO: 314848 - RNA, 22 nt, Human
agacacuuggcucuaagaaaca

SEQ ID NO: 314849 - RNA, 23 nt, Human
agcaaacacgagaagggaguaac

SEQ ID NO: 314850 - RNA, 18 nt, Human
caauuacuguguaucaga

SEQ ID NO: 314851 - RNA, 22 nt, Human
cacuaggcgcucgccggccaac

SEQ ID NO: 314852 - RNA, 24 nt, Human
caucuacaaaauccacauuuacaa

SEQ ID NO: 314853 - RNA, 21 nt, Human
ccccuuaaaaaaaguucaaca

SEQ ID NO: 314854 - RNA, 20 nt, Human
ccgccgaauccggcggcggg

SEQ ID NO: 314855 - RNA, 23 nt, Human
ccggucccacgcagcccgccgaa

SEQ ID NO: 314856 - RNA, 19 nt, Human
cgacgacgccgagaagggg

SEQ ID NO: 314857 - RNA, 22 nt, Human
cgccgagaagggggagggggcg

SEQ ID NO: 314858 - RNA, 24 nt, Human
cuggccgggaucccgccgguccca

SEQ ID NO: 314859 - RNA, 24 nt, Human
cuuaauaauuuacuuuaaaaaguu

SEQ ID NO: 314860 - RNA, 21 nt, Human
gccggagcgccggagcgagca

SEQ ID NO: 314861 - RNA, 24 nt, Human
uaagaaacauuaagugaaacacag

SEQ ID NO: 314862 - RNA, 26 nt, Human
uacaaaauccacauuuacaauacaag

SEQ ID NO: 314863 - RNA, 18 nt, Human
ugaaaaagaagggaauug

SEQ ID NO: 314864 - RNA, 20 nt, Human
ugaaacacaggucacuauga

SEQ ID NO: 314865 - RNA, 23 nt, Human
ugaaauagcaaggaaaacuucac

SEQ ID NO: 314866 - RNA, 24 nt, Human
ugaaauagcaaggaaaagggaggc

SEQ ID NO: 314867 - RNA, 20 nt, Human
ugaaaucagaaauaaaaaau

SEQ ID NO: 314868 - RNA, 21 nt, Human
ugucuggacuuguccgcgaga

SEQ ID NO: 314869 - RNA, 19 nt, Human
uuaaaagacacuuggcucu

SEQ ID NO: 314870 - RNA, 21 nt, Human
uuaagcaaacacgagaaggga

SEQ ID NO: 314871 - RNA, 22 nt, Human
uucacauauuuuaagcaaacac

SEQ ID NO: 314872 - RNA, 19 nt, Human
uuccaaaaagucaaacugu

SEQ ID NO: 314873 - RNA, 20 nt, Human
uuccaaaaagucaaacugua

SEQ ID NO: 314874 - RNA, 20 nt, Human
uugcacaguuuucaagacaa

SEQ ID NO: 314875 - RNA, 21 nt, Human
uuuggaaaaaccucauuuccc

SEQ ID NO: 314876 - RNA, 23 nt, Human
uuuuagauuguuuuaggcaaaca

SEQ ID NO: 314877 - RNA, 21 nt, Human
uuuuuuuuuuuuuuuuuucag

SEQ ID NO: 314878 - RNA, 18 nt, Human
aaaugagggagaaggaga

SEQ ID NO: 314879 - RNA, 24 nt, Human
acucccacccccagccuuuucggu

SEQ ID NO: 314880 - RNA, 24 nt, Human
auuuucaugaaugagaguugggga

SEQ ID NO: 314881 - RNA, 19 nt, Human
cacaauagguagggaugag

SEQ ID NO: 314882 - RNA, 20 nt, Human
cacccccagccuuuucgguc

SEQ ID NO: 314883 - RNA, 21 nt, Human
cacccccagccuuuucggucu

SEQ ID NO: 314884 - RNA, 21 nt, Human
cccacaauagguagggaugag

SEQ ID NO: 314885 - RNA, 20 nt, Human
cggaaacccacaauagguag

SEQ ID NO: 314886 - RNA, 21 nt, Human
gagagaaaaugagggagaagg

SEQ ID NO: 314887 - RNA, 22 nt, Human
ggcggcgggcaguacgccugag

SEQ ID NO: 314888 - RNA, 22 nt, Human
uccguccacucuguucuccccc

SEQ ID NO: 314889 - RNA, 22 nt, Human
ugagagaaaaugagggagaagg

SEQ ID NO: 314890 - RNA, 23 nt, Human
ugagagaaaaugagggagaagga

SEQ ID NO: 314891 - RNA, 23 nt, Human
uucaaauccgcuacucccacccc

SEQ ID NO: 314892 - RNA, 23 nt, Human
uuuucggucucuccuacucuccg

SEQ ID NO: 314893 - RNA, 19 nt, Human
aaaaaaaaaaaaaaaaaga

SEQ ID NO: 314894 - RNA, 23 nt, Human
aaaaaaaaaaaaaaaagaaagaa

SEQ ID NO: 314895 - RNA, 23 nt, Human
aaaaaaaagaaauaggaaaagaa

SEQ ID NO: 314896 - RNA, 22 nt, Human
aaaaaaagaaauaggaaaagaa

SEQ ID NO: 314897 - RNA, 23 nt, Human
aaaaagaaaaccaaugcagguga

SEQ ID NO: 314898 - RNA, 21 nt, Human
aaaaaggauuccuauuaacca

SEQ ID NO: 314899 - RNA, 25 nt, Human
aaaaaggauucucauguacugugga

SEQ ID NO: 314900 - RNA, 26 nt, Human
aaaacaaaacaagcucaaaauaauua

SEQ ID NO: 314901 - RNA, 19 nt, Human
aaaagaaaaagaaaaccaa

SEQ ID NO: 314902 - RNA, 23 nt, Human
aaaaugugcuuuaaaacaaaacg

SEQ ID NO: 314903 - RNA, 21 nt, Human
aaacaaaaacaaaacaagcuc

SEQ ID NO: 314904 - RNA, 23 nt, Human
aaacaaaaacaaaacaagcucaa

SEQ ID NO: 314905 - RNA, 24 nt, Human
aaacaaacaaaaacaaaacaagcu

SEQ ID NO: 314906 - RNA, 21 nt, Human
aaacaaccaagcaacacuaaa

SEQ ID NO: 314907 - RNA, 20 nt, Human
aaacaagagaggcccccucg

SEQ ID NO: 314908 - RNA, 24 nt, Human
aaacaagcucaaaauaauuaaaca

SEQ ID NO: 314909 - RNA, 23 nt, Human
aaagcucuucccauauuucacuu

SEQ ID NO: 314910 - RNA, 18 nt, Human
aaauaaacaagagaggcc

SEQ ID NO: 314911 - RNA, 24 nt, Human
aaauaaacaagagaggcccccucg

SEQ ID NO: 314912 - RNA, 23 nt, Human
aaaucagaauaaaaaucuuuagu

SEQ ID NO: 314913 - RNA, 20 nt, Human
aacaugauaaauuuccaucc

SEQ ID NO: 314914 - RNA, 23 nt, Human
aacauugcccuuuuucccugcca

SEQ ID NO: 314915 - RNA, 20 nt, Human
aagaaagaaaaaagaaaaaa

SEQ ID NO: 314916 - RNA, 20 nt, Human
aagaaagaaaaaagaaaaag

SEQ ID NO: 314917 - RNA, 21 nt, Human
aagaaagaaaaaagaaaaaga

SEQ ID NO: 314918 - RNA, 21 nt, Human
aagacgauauuaaggucaaaa

SEQ ID NO: 314919 - RNA, 22 nt, Human
aaggcuugucaaaaaaggauuc

SEQ ID NO: 314920 - RNA, 20 nt, Human
aagguguuaccaggaaguua

SEQ ID NO: 314921 - RNA, 21 nt, Human
acaaacaaaaacaaaacaagc

SEQ ID NO: 314922 - RNA, 28 nt, Human
acaacaacucaaaaaaaaaaaaaaaaaa

SEQ ID NO: 314923 - RNA, 23 nt, Human
acccaauacccauaguugacaaa

SEQ ID NO: 314924 - RNA, 20 nt, Human
acccacggaaaauaaauaaa

SEQ ID NO: 314925 - RNA, 20 nt, Human
acuacauuuaaaaugugcuu

SEQ ID NO: 314926 - RNA, 22 nt, Human
acuacauuuaaaaugugcuuua

SEQ ID NO: 314927 - RNA, 21 nt, Human
acuguaaggaaaaaaaaaauc

SEQ ID NO: 314928 - RNA, 20 nt, Human
agacagugucagcuuuccaa

SEQ ID NO: 314929 - RNA, 18 nt, Human
agacgauauuaaggucaa

SEQ ID NO: 314930 - RNA, 21 nt, Human
agagggaggaaaaagagacag

SEQ ID NO: 314931 - RNA, 19 nt, Human
aggaaaaaaaaaaucaguc

SEQ ID NO: 314932 - RNA, 20 nt, Human
aggaaaaagagacaguguca

SEQ ID NO: 314933 - RNA, 21 nt, Human
aggcugcggcgacggcucggc

SEQ ID NO: 314934 - RNA, 18 nt, Human
agggaaaauaauaguugg

SEQ ID NO: 314935 - RNA, 23 nt, Human
auuuuaaagaacuuuugcacugu

SEQ ID NO: 314936 - RNA, 24 nt, Human
caaaagccagacaaugggauacag

SEQ ID NO: 314937 - RNA, 20 nt, Human
caaacaaaaacaaaacaagc

SEQ ID NO: 314938 - RNA, 24 nt, Human
caacauacuuagucuugaccugga

SEQ ID NO: 314939 - RNA, 19 nt, Human
caaccaagcaacacuaaaa

SEQ ID NO: 314940 - RNA, 23 nt, Human
caaccaagcaacacuaaaaccac

SEQ ID NO: 314941 - RNA, 18 nt, Human
caagcaacacuaaaacca

SEQ ID NO: 314942 - RNA, 19 nt, Human
cacauccaauagugucaca

SEQ ID NO: 314943 - RNA, 20 nt, Human
ccaagguaccacauaaucac

SEQ ID NO: 314944 - RNA, 21 nt, Human
ccaauacccauaguugacaaa

SEQ ID NO: 314945 - RNA, 25 nt, Human
ccagcagcgggaacaagggcuucuc

SEQ ID NO: 314946 - RNA, 23 nt, Human
cccacugaccagcauucauuuaa

SEQ ID NO: 314947 - RNA, 19 nt, Human
cccccacccccuccccgcc

SEQ ID NO: 314948 - RNA, 19 nt, Human
ccccccacccccuccccgc

SEQ ID NO: 314949 - RNA, 19 nt, Human
cccccucgaacagggccgc

SEQ ID NO: 314950 - RNA, 25 nt, Human
cccgggcccuccccccacccccucc

SEQ ID NO: 314951 - RNA, 19 nt, Human
ccuccccccacccccuccc

SEQ ID NO: 314952 - RNA, 24 nt, Human
ccuccccccacccccuccccgccg

SEQ ID NO: 314953 - RNA, 20 nt, Human
ccuguaaguucucuccuucu

SEQ ID NO: 314954 - RNA, 24 nt, Human
cggaauuagaaaaaaagacauaug

SEQ ID NO: 314955 - RNA, 20 nt, Human
cgggcccuccccccaccccc

SEQ ID NO: 314956 - RNA, 22 nt, Human
cgggcccuccccccacccccuc

SEQ ID NO: 314957 - RNA, 23 nt, Human
cgggcccuccccccacccccucc

SEQ ID NO: 314958 - RNA, 18 nt, Human
cuaaaaacaaacaacaac

SEQ ID NO: 314959 - RNA, 22 nt, Human
cuaaaaacaaacaacaacucaa

SEQ ID NO: 314960 - RNA, 21 nt, Human
cuaaguagauaaacaagggaa

SEQ ID NO: 314961 - RNA, 19 nt, Human
cuacuauacuucacuacaa

SEQ ID NO: 314962 - RNA, 26 nt, Human
cucaauuuaacauuuucaaagacgau

SEQ ID NO: 314963 - RNA, 18 nt, Human
cuccccccacccccuccc

SEQ ID NO: 314964 - RNA, 20 nt, Human
cuccccccacccccuccccg

SEQ ID NO: 314965 - RNA, 22 nt, Human
cuccccccacccccuccccgcc

SEQ ID NO: 314966 - RNA, 24 nt, Human
cucuucccauauuucacuuuuaaa

SEQ ID NO: 314967 - RNA, 26 nt, Human
cugcggcgacggcucggcguucucuc

SEQ ID NO: 314968 - RNA, 23 nt, Human
cuuacacacuccaaucaggaagu

SEQ ID NO: 314969 - RNA, 25 nt, Human
cuuuaaaaaaaaaaaaggauuccua

SEQ ID NO: 314970 - RNA, 25 nt, Human
cuuuucccgggcccuccccccaccc

SEQ ID NO: 314971 - RNA, 25 nt, Human
gaaaagaaucauuucaauaugucaa

SEQ ID NO: 314972 - RNA, 20 nt, Human
gaucuaaaaacaaacaacaa

SEQ ID NO: 314973 - RNA, 23 nt, Human
gcaacacuaaaaccacauuacac

SEQ ID NO: 314974 - RNA, 21 nt, Human
gcacugugcugaaaaugaaau

SEQ ID NO: 314975 - RNA, 19 nt, Human
gcgcgcacacucggaggca

SEQ ID NO: 314976 - RNA, 21 nt, Human
ggcacagacucuccuucccag

SEQ ID NO: 314977 - RNA, 23 nt, Human
gggcauuauagauaugaugucca

SEQ ID NO: 314978 - RNA, 18 nt, Human
guauacaacauucacaug

SEQ ID NO: 314979 - RNA, 19 nt, Human
gugaaugucuguaaagcuc

SEQ ID NO: 314980 - RNA, 21 nt, Human
gugcgaaugaaaaccuaaagc

SEQ ID NO: 314981 - RNA, 22 nt, Human
uaaaacaaaacggaauuagaaa

SEQ ID NO: 314982 - RNA, 19 nt, Human
uaaaaccuuugugaccuaa

SEQ ID NO: 314983 - RNA, 20 nt, Human
uaaaaugugcuuuaaaacua

SEQ ID NO: 314984 - RNA, 27 nt, Human
uaaaauuccuuuuuaauguaaugaggc

SEQ ID NO: 314985 - RNA, 24 nt, Human
uaaacaaccaagcaacacuaaaac

SEQ ID NO: 314986 - RNA, 20 nt, Human
uaaacaaccaagcaacacuu

SEQ ID NO: 314987 - RNA, 21 nt, Human
uaaacagauaucuaaguagau

SEQ ID NO: 314988 - RNA, 18 nt, Human
uaaauaaacaagagaggc

SEQ ID NO: 314989 - RNA, 19 nt, Human
uaaauaaacaagagaggcc

SEQ ID NO: 314990 - RNA, 21 nt, Human
uaaauacauccuucguauaga

SEQ ID NO: 314991 - RNA, 22 nt, Human
uaaaucaccucagauaaaaccu

SEQ ID NO: 314992 - RNA, 23 nt, Human
uaacugggaugcuuuucaacuuu

SEQ ID NO: 314993 - RNA, 19 nt, Human
uaaguuaaaggugugacau

SEQ ID NO: 314994 - RNA, 24 nt, Human
uaaguucucuccuucuaaaaucuu

SEQ ID NO: 314995 - RNA, 22 nt, Human
uaauuaaacaaccaagcaacac

SEQ ID NO: 314996 - RNA, 22 nt, Human
uacaguaucauaugaccuuuga

SEQ ID NO: 314997 - RNA, 20 nt, Human
uaccacauaaucacauuacc

SEQ ID NO: 314998 - RNA, 21 nt, Human
uagagcaucaauaaguuaaaa

SEQ ID NO: 314999 - RNA, 26 nt, Human
uagugaaaacaaacaaaaacaaaaca

SEQ ID NO: 315000 - RNA, 24 nt, Human
uauagagggaggaaaaagagacag

SEQ ID NO: 315001 - RNA, 22 nt, Human
ucaaaaaaaaaaaaaaaaaaaa

SEQ ID NO: 315002 - RNA, 23 nt, Human
ucaaaaaaaaaaaaaaaaaaaaa

SEQ ID NO: 315003 - RNA, 21 nt, Human
ucacuggauuggacaaugugc

SEQ ID NO: 315004 - RNA, 20 nt, Human
ucagcuuuccaaggcuuguc

SEQ ID NO: 315005 - RNA, 21 nt, Human
ucccauauuucacuuuuaaaa

SEQ ID NO: 315006 - RNA, 19 nt, Human
ucccgggcccuccccccac

SEQ ID NO: 315007 - RNA, 22 nt, Human
ucccgggcccuccccccacccc

SEQ ID NO: 315008 - RNA, 23 nt, Human
ucucacuguaaggaaaaaaaaaa

SEQ ID NO: 315009 - RNA, 20 nt, Human
ucuugcaguaaguaauacaa

SEQ ID NO: 315010 - RNA, 24 nt, Human
ugaaaacaaacaaaaacaaaacaa

SEQ ID NO: 315011 - RNA, 25 nt, Human
ugaaaacaaacaaaaacaaaacaag

SEQ ID NO: 315012 - RNA, 22 nt, Human
ugaaaaccuaaagccaagguac

SEQ ID NO: 315013 - RNA, 23 nt, Human
ugaaaaccuaaagccaagguacc

SEQ ID NO: 315014 - RNA, 23 nt, Human
ugacaaugcucaauaaaagcuuu

SEQ ID NO: 315015 - RNA, 19 nt, Human
ugaucagguacagaaauua

SEQ ID NO: 315016 - RNA, 18 nt, Human
ugcacaaauccaaaucag

SEQ ID NO: 315017 - RNA, 20 nt, Human
ugcaguaaguaauacaaugu

SEQ ID NO: 315018 - RNA, 20 nt, Human
uggaucuaaaaacaaacaac

SEQ ID NO: 315019 - RNA, 22 nt, Human
uggaucuaaaaacaaacaacaa

SEQ ID NO: 315020 - RNA, 31 nt, Human
uguaaggaaaaaaaaaaucagucaggcuucc

SEQ ID NO: 315021 - RNA, 19 nt, Human
ugucacagucaaagaauca

SEQ ID NO: 315022 - RNA, 22 nt, Human
ugucacagucaaagaaucacaa

SEQ ID NO: 315023 - RNA, 20 nt, Human
uuaaaacaaaacggaauuag

SEQ ID NO: 315024 - RNA, 23 nt, Human
uuaagauccuuuacccgucuccu

SEQ ID NO: 315025 - RNA, 18 nt, Human
uucauguuaacuuuucua

SEQ ID NO: 315026 - RNA, 24 nt, Human
uuccgugcgaaugaaaaccuaaag

SEQ ID NO: 315027 - RNA, 20 nt, Human
uugaucagguacagaaauua

SEQ ID NO: 315028 - RNA, 20 nt, Human
uuucccgggcccucccccca

SEQ ID NO: 315029 - RNA, 18 nt, Human
aagaaaaaaauucucagg

SEQ ID NO: 315030 - RNA, 25 nt, Human
agaauaaagaauguaggccaaagaa

SEQ ID NO: 315031 - RNA, 21 nt, Human
aggccaguaagaggcagaucg

SEQ ID NO: 315032 - RNA, 24 nt, Human
caccacacgguauuguacacgguc

SEQ ID NO: 315033 - RNA, 21 nt, Human
cagaauaaagaauguaggcca

SEQ ID NO: 315034 - RNA, 25 nt, Human
cagaauaaagaauguaggccaaaga

SEQ ID NO: 315035 - RNA, 24 nt, Human
cauaaaauccauaaauucuguuga

SEQ ID NO: 315036 - RNA, 19 nt, Human
cauaguccccaagaaacag

SEQ ID NO: 315037 - RNA, 23 nt, Human
ccuguccacauaguccccaagaa

SEQ ID NO: 315038 - RNA, 19 nt, Human
cucaaaaagucgcagcaaa

SEQ ID NO: 315039 - RNA, 26 nt, Human
cugguggacaguaaguuaguuccuuu

SEQ ID NO: 315040 - RNA, 21 nt, Human
cuguccacauaguccccaaga

SEQ ID NO: 315041 - RNA, 23 nt, Human
cuuauaagccucaacuucaccgc

SEQ ID NO: 315042 - RNA, 19 nt, Human
gagacuuuaagcacagucc

SEQ ID NO: 315043 - RNA, 24 nt, Human
gcuggcacauucaugguucccucu

SEQ ID NO: 315044 - RNA, 24 nt, Human
gguggacaguaaguuaguuccuuu

SEQ ID NO: 315045 - RNA, 21 nt, Human
ggugggaaaccaccguacuca

SEQ ID NO: 315046 - RNA, 22 nt, Human
uaaagaauguaggccaaagaaa

SEQ ID NO: 315047 - RNA, 20 nt, Human
uacucaaaaagucgcagcaa

SEQ ID NO: 315048 - RNA, 25 nt, Human
uauuguacacggucaucuguugaaa

SEQ ID NO: 315049 - RNA, 24 nt, Human
uccaugacagcagaauaucuucuc

SEQ ID NO: 315050 - RNA, 20 nt, Human
ucccucugagaagaaaaaaa

SEQ ID NO: 315051 - RNA, 19 nt, Human
uccucugauuucauucucc

SEQ ID NO: 315052 - RNA, 19 nt, Human
ugacugcuuuccccugucc

SEQ ID NO: 315053 - RNA, 23 nt, Human
ugaguggugcuucaaguucuagu

SEQ ID NO: 315054 - RNA, 21 nt, Human
uggcacauucaugguucccuc

SEQ ID NO: 315055 - RNA, 20 nt, Human
ugggaaaccaccguacucaa

SEQ ID NO: 315056 - RNA, 24 nt, Human
uuaacuuauaagccucaacuucac

SEQ ID NO: 315057 - RNA, 18 nt, Human
uuaguuccuuuguuuuaa

SEQ ID NO: 315058 - RNA, 26 nt, Human
uuguaucuucuuuuacauucaucaua

SEQ ID NO: 315059 - RNA, 24 nt, Human
uuguccauggaugucaccacauau

SEQ ID NO: 315060 - RNA, 25 nt, Human
aaaacccaauuuaaguguucgcuac

SEQ ID NO: 315061 - RNA, 25 nt, Human
aauaacaggagaagggugggaagaa

SEQ ID NO: 315062 - RNA, 19 nt, Human
aaugcuggaggagagaggg

SEQ ID NO: 315063 - RNA, 18 nt, Human
acaggcaaggacuaagaa

SEQ ID NO: 315064 - RNA, 21 nt, Human
accaaucucaagccagcuuug

SEQ ID NO: 315065 - RNA, 23 nt, Human
agagagggaaggagggggcugga

SEQ ID NO: 315066 - RNA, 20 nt, Human
agcaggaggagaagggcugg

SEQ ID NO: 315067 - RNA, 22 nt, Human
agcugggacuguugaaaaccca

SEQ ID NO: 315068 - RNA, 18 nt, Human
aggacagggaggagagga

SEQ ID NO: 315069 - RNA, 20 nt, Human
aggacagggaggagaggagg

SEQ ID NO: 315070 - RNA, 20 nt, Human
aggacagggaggagaggagg

SEQ ID NO: 315071 - RNA, 22 nt, Human
aggacagggaggagaggaggaa

SEQ ID NO: 315072 - RNA, 22 nt, Human
aggacagggaggagaggaggaa

SEQ ID NO: 315073 - RNA, 22 nt, Human
aggcagaggagacagucggcuc

SEQ ID NO: 315074 - RNA, 23 nt, Human
agggaaggagggggcuggagaag

SEQ ID NO: 315075 - RNA, 21 nt, Human
agggaggagaggaggaagggg

SEQ ID NO: 315076 - RNA, 21 nt, Human
agggaggagaggaggaagggg

SEQ ID NO: 315077 - RNA, 24 nt, Human
agggugugagaaggguuagcagga

SEQ ID NO: 315078 - RNA, 20 nt, Human
aggguuagcaggaggagaag

SEQ ID NO: 315079 - RNA, 21 nt, Human
auccuccaccuucuuuauucc

SEQ ID NO: 315080 - RNA, 21 nt, Human
auccuccaccuucuuuauucc

SEQ ID NO: 315081 - RNA, 20 nt, Human
auuuauuuugugcaucugug

SEQ ID NO: 315082 - RNA, 18 nt, Human
caaaaggaccggaaaaug

SEQ ID NO: 315083 - RNA, 19 nt, Human
caagagaacugaacaucug

SEQ ID NO: 315084 - RNA, 18 nt, Human
caagauaacuagauccca

SEQ ID NO: 315085 - RNA, 22 nt, Human
cagaggagacagucggcucuaa

SEQ ID NO: 315086 - RNA, 20 nt, Human
cagagugguagccaggaucc

SEQ ID NO: 315087 - RNA, 24 nt, Human
caguaagggguagagaggggccaa

SEQ ID NO: 315088 - RNA, 26 nt, Human
ccaaucucaagccagcuuugucagaa

SEQ ID NO: 315089 - RNA, 18 nt, Human
cccucuuccuuccucucc

SEQ ID NO: 315090 - RNA, 20 nt, Human
ccggagaaaucaaagucuag

SEQ ID NO: 315091 - RNA, 18 nt, Human
ccuccucuuccucuuccc

SEQ ID NO: 315092 - RNA, 20 nt, Human
ccucgagagagaaggguggg

SEQ ID NO: 315093 - RNA, 18 nt, Human
ccucuugagggugugaga

SEQ ID NO: 315094 - RNA, 21 nt, Human
cucacaggcaaggacuaagaa

SEQ ID NO: 315095 - RNA, 21 nt, Human
cucaggacagggaggagagga

SEQ ID NO: 315096 - RNA, 21 nt, Human
cucaggacagggaggagagga

SEQ ID NO: 315097 - RNA, 23 nt, Human
cucaggacagggaggagaggagg

SEQ ID NO: 315098 - RNA, 23 nt, Human
cucaggacagggaggagaggagg

SEQ ID NO: 315099 - RNA, 19 nt, Human
cuccugggccuccgcuucu

SEQ ID NO: 315100 - RNA, 19 nt, Human
cuccugggccuccgcuucu

SEQ ID NO: 315101 - RNA, 21 nt, Human
cuccugggccuccgcuucucc

SEQ ID NO: 315102 - RNA, 21 nt, Human
cuccugggccuccgcuucucc

SEQ ID NO: 315103 - RNA, 25 nt, Human
cucuuccucuucccucuaucaggca

SEQ ID NO: 315104 - RNA, 24 nt, Human
cucuugagggugugagaaggguua

SEQ ID NO: 315105 - RNA, 23 nt, Human
cucuuugcucccucccucuuccu

SEQ ID NO: 315106 - RNA, 26 nt, Human
cugggccuccgcuucuccaccccugg

SEQ ID NO: 315107 - RNA, 26 nt, Human
cugggccuccgcuucuccaccccugg

SEQ ID NO: 315108 - RNA, 24 nt, Human
cuugagggugugagaaggguuagc

SEQ ID NO: 315109 - RNA, 20 nt, Human
cuuugcucccucccucuucc

SEQ ID NO: 315110 - RNA, 23 nt, Human
cuuugcucccucccucuuccuuc

SEQ ID NO: 315111 - RNA, 27 nt, Human
cuuugcucccucccucuuccuuccucu

SEQ ID NO: 315112 - RNA, 20 nt, Human
gaaaaacaaaaggcagagga

SEQ ID NO: 315113 - RNA, 24 nt, Human
gacacaggaaugcuggaggagaga

SEQ ID NO: 315114 - RNA, 21 nt, Human
gacccuggcagugaaagcugg

SEQ ID NO: 315115 - RNA, 19 nt, Human
gacuguugaaaacccaauu

SEQ ID NO: 315116 - RNA, 24 nt, Human
gagaacaaaaggaagacacuggga

SEQ ID NO: 315117 - RNA, 20 nt, Human
gaggagaagggcugggagcu

SEQ ID NO: 315118 - RNA, 21 nt, Human
gaggagaggaggaagggggau

SEQ ID NO: 315119 - RNA, 21 nt, Human
gaggagaggaggaagggggau

SEQ ID NO: 315120 - RNA, 20 nt, Human
gaucucuguucguccuccuc

SEQ ID NO: 315121 - RNA, 19 nt, Human
gcaggaggagaagggcugg

SEQ ID NO: 315122 - RNA, 21 nt, Human
gccuccgcuucuccaccccug

SEQ ID NO: 315123 - RNA, 21 nt, Human
gccuccgcuucuccaccccug

SEQ ID NO: 315124 - RNA, 22 nt, Human
ggaggcuggguucuggaauagc

SEQ ID NO: 315125 - RNA, 24 nt, Human
ggcagugaaagcugggacuguuga

SEQ ID NO: 315126 - RNA, 20 nt, Human
ggcagugagaacaaaaggaa

SEQ ID NO: 315127 - RNA, 20 nt, Human
ggcucuaagugaccaaucuc

SEQ ID NO: 315128 - RNA, 23 nt, Human
gggccuccgcuucuccaccccug

SEQ ID NO: 315129 - RNA, 20 nt, Human
gugagaaggguuagcaggag

SEQ ID NO: 315130 - RNA, 21 nt, Human
guuagggcgcaaauuccugga

SEQ ID NO: 315131 - RNA, 20 nt, Human
uaaauaacaggagaagggug

SEQ ID NO: 315132 - RNA, 22 nt, Human
uaagagaagcgguaucggauuc

SEQ ID NO: 315133 - RNA, 22 nt, Human
uaagagaagcgguaucggauuc

SEQ ID NO: 315134 - RNA, 22 nt, Human
uagaucccaggacaggcaguuu

SEQ ID NO: 315135 - RNA, 25 nt, Human
uaucucacaggcaaggacuaagaau

SEQ ID NO: 315136 - RNA, 21 nt, Human
ucagagugguagccaggaucc

SEQ ID NO: 315137 - RNA, 24 nt, Human
ucagagugguagccaggauccucc

SEQ ID NO: 315138 - RNA, 20 nt, Human
ucaggacagggaggagagga

SEQ ID NO: 315139 - RNA, 20 nt, Human
ucaggacagggaggagagga

SEQ ID NO: 315140 - RNA, 20 nt, Human
ucaggacagggaggagagga

SEQ ID NO: 315141 - RNA, 22 nt, Human
ucaggaucucuguucguccucc

SEQ ID NO: 315142 - RNA, 20 nt, Human
ucccucccucuuccuuccuc

SEQ ID NO: 315143 - RNA, 19 nt, Human
uccugggccuccgcuucuc

SEQ ID NO: 315144 - RNA, 19 nt, Human
uccugggccuccgcuucuc

SEQ ID NO: 315145 - RNA, 23 nt, Human
uccugggccuccgcuucucgggg

SEQ ID NO: 315146 - RNA, 23 nt, Human
uccugggccuccgcuucucgggg

SEQ ID NO: 315147 - RNA, 23 nt, Human
ucucccagagacccaggucccug

SEQ ID NO: 315148 - RNA, 20 nt, Human
ucugaagcugaaaaacaaaa

SEQ ID NO: 315149 - RNA, 22 nt, Human
ucugaagcugaaaaacaaaagg

SEQ ID NO: 315150 - RNA, 19 nt, Human
ucuugagggugugagaagg

SEQ ID NO: 315151 - RNA, 26 nt, Human
ugacugggacccuggcagugaaagcu

SEQ ID NO: 315152 - RNA, 18 nt, Human
ugagaacaaaaggaagac

SEQ ID NO: 315153 - RNA, 19 nt, Human
ugagaacaaaaggaagaca

SEQ ID NO: 315154 - RNA, 22 nt, Human
ugagaacaaaaggaagacaccg

SEQ ID NO: 315155 - RNA, 24 nt, Human
ugagaacaaaaggaagacacuggg

SEQ ID NO: 315156 - RNA, 19 nt, Human
ugagaaggguuagcaggag

SEQ ID NO: 315157 - RNA, 21 nt, Human
ugagaaggguuagcaggagga

SEQ ID NO: 315158 - RNA, 18 nt, Human
ugauuuuggguuauuuau

SEQ ID NO: 315159 - RNA, 28 nt, Human
ugcucccucccucuuccuuccucuccca

SEQ ID NO: 315160 - RNA, 21 nt, Human
uggaauagcagcaagucagaa

SEQ ID NO: 315161 - RNA, 19 nt, Human
uggcagugaaagcugggac

SEQ ID NO: 315162 - RNA, 20 nt, Human
uggcagugaaagcugggacu

SEQ ID NO: 315163 - RNA, 24 nt, Human
ugggaagaaaggauaugauuauuu

SEQ ID NO: 315164 - RNA, 21 nt, Human
ugggacccuggcagugaaagc

SEQ ID NO: 315165 - RNA, 24 nt, Human
ugggacuguugaaaacccaauuua

SEQ ID NO: 315166 - RNA, 24 nt, Human
ugggaggaaaaaugaggacugggg

SEQ ID NO: 315167 - RNA, 23 nt, Human
ugggccuccgcuucuccaccccu

SEQ ID NO: 315168 - RNA, 23 nt, Human
ugggccuccgcuucuccaccccu

SEQ ID NO: 315169 - RNA, 25 nt, Human
uuccuuccucucccagagacccagg

SEQ ID NO: 315170 - RNA, 18 nt, Human
uuggcagugagaacaaaa

SEQ ID NO: 315171 - RNA, 18 nt, Human
uuuuuuuuuuuuuuuuug

SEQ ID NO: 315172 - RNA, 24 nt, Human
uuuuuuuuuuuuuuuuugugauuu

SEQ ID NO: 315173 - RNA, 19 nt, Human
aaaaaaaaaaaggccacug

SEQ ID NO: 315174 - RNA, 23 nt, Human
aaaaaaaaucuucucagcagcug

SEQ ID NO: 315175 - RNA, 22 nt, Human
aaaaaaacaaaaaacaaaccaa

SEQ ID NO: 315176 - RNA, 20 nt, Human
aaaaaacaaaccaacaacaa

SEQ ID NO: 315177 - RNA, 18 nt, Human
aaaaaucuucucagcagc

SEQ ID NO: 315178 - RNA, 24 nt, Human
aaaacaaaccaacaacaacaaaaa

SEQ ID NO: 315179 - RNA, 25 nt, Human
aaacaaaaaacaaaccaacaacaac

SEQ ID NO: 315180 - RNA, 24 nt, Human
aaacaaaccaacaacaacaaaaac

SEQ ID NO: 315181 - RNA, 21 nt, Human
aaacaccccagaaaauuaaac

SEQ ID NO: 315182 - RNA, 23 nt, Human
aaacaccccagaaaauuaaacaa

SEQ ID NO: 315183 - RNA, 21 nt, Human
aaacauagaagacucugccac

SEQ ID NO: 315184 - RNA, 23 nt, Human
aacaacaaaaacaccccagaaaa

SEQ ID NO: 315185 - RNA, 23 nt, Human
aacaacaacaaaaacaccccaga

SEQ ID NO: 315186 - RNA, 24 nt, Human
aaccaacaacaacaaaaacacccc

SEQ ID NO: 315187 - RNA, 20 nt, Human
aaggaaaaaauacaaaccca

SEQ ID NO: 315188 - RNA, 21 nt, Human
aaguuuucucagucauuaaaa

SEQ ID NO: 315189 - RNA, 23 nt, Human
aauacaaucagcuacuauaagcu

SEQ ID NO: 315190 - RNA, 18 nt, Human
acaacaaaaacaccccag

SEQ ID NO: 315191 - RNA, 19 nt, Human
acaacaaaaacaccccaga

SEQ ID NO: 315192 - RNA, 20 nt, Human
acaacaacaaaaacacccca

SEQ ID NO: 315193 - RNA, 23 nt, Human
acaaguuuucucagucauuaaaa

SEQ ID NO: 315194 - RNA, 24 nt, Human
accccagaaaauuaaacaaaauga

SEQ ID NO: 315195 - RNA, 22 nt, Human
acuacaauaaaaaaaaagugac

SEQ ID NO: 315196 - RNA, 23 nt, Human
agaaggaaaaaauacaaacccaa

SEQ ID NO: 315197 - RNA, 21 nt, Human
agacauuugaaauaagaaaua

SEQ ID NO: 315198 - RNA, 24 nt, Human
auucuagauaagagggcauuuggc

SEQ ID NO: 315199 - RNA, 27 nt, Human
caaaaaacaaaccaacaacaacaaaaa

SEQ ID NO: 315200 - RNA, 25 nt, Human
caaaaacaccccagaaaauuaaaca

SEQ ID NO: 315201 - RNA, 22 nt, Human
caaaccaacaacaacaaaaaca

SEQ ID NO: 315202 - RNA, 23 nt, Human
caacaacaaaaacaccccagaaa

SEQ ID NO: 315203 - RNA, 19 nt, Human
caacaacaacaaaaacacc

SEQ ID NO: 315204 - RNA, 25 nt, Human
caacaacaacaaaaacaccccagaa

SEQ ID NO: 315205 - RNA, 18 nt, Human
caacuaaggcuuacuggu

SEQ ID NO: 315206 - RNA, 24 nt, Human
caauacaaucaauaauacaaucag

SEQ ID NO: 315207 - RNA, 25 nt, Human
caccccagaaaauuaaaagguccuc

SEQ ID NO: 315208 - RNA, 19 nt, Human
caguaccugcuaaaaugaa

SEQ ID NO: 315209 - RNA, 24 nt, Human
cauuugaaauaagaaauagucaag

SEQ ID NO: 315210 - RNA, 21 nt, Human
ccgaaaaugacagucuccaag

SEQ ID NO: 315211 - RNA, 21 nt, Human
ccgugaaaacauagaagacuc

SEQ ID NO: 315212 - RNA, 22 nt, Human
ccuuaaaaaaaaaaaggccacu

SEQ ID NO: 315213 - RNA, 19 nt, Human
gaaaaacucgaaacugugg

SEQ ID NO: 315214 - RNA, 27 nt, Human
gggcauuuggcaggauauccgaaaaug

SEQ ID NO: 315215 - RNA, 18 nt, Human
uaaaaaaaaaaaggccac

SEQ ID NO: 315216 - RNA, 23 nt, Human
uaaaaaaaaaaaggccacugaaa

SEQ ID NO: 315217 - RNA, 21 nt, Human
uaaaauggucugaacaugaug

SEQ ID NO: 315218 - RNA, 18 nt, Human
uaaaugcauauugcacaa

SEQ ID NO: 315219 - RNA, 20 nt, Human
uaacaugaaacaauggucuu

SEQ ID NO: 315220 - RNA, 23 nt, Human
uaagaaauaaaugcauauugcac

SEQ ID NO: 315221 - RNA, 22 nt, Human
uaagaaauagucaagcaugcca

SEQ ID NO: 315222 - RNA, 21 nt, Human
uaauacaugacaauaaucaca

SEQ ID NO: 315223 - RNA, 23 nt, Human
uacuuuggcuagcacaacaguuu

SEQ ID NO: 315224 - RNA, 23 nt, Human
uagaagacucugccacaugaaga

SEQ ID NO: 315225 - RNA, 22 nt, Human
uauacaauacaaucaauaauac

SEQ ID NO: 315226 - RNA, 25 nt, Human
ucaguaccugcuaaaaugaauguga

SEQ ID NO: 315227 - RNA, 20 nt, Human
ucagucauuaaaaaaaaauc

SEQ ID NO: 315228 - RNA, 22 nt, Human
uccaaggauucuucccagacuu

SEQ ID NO: 315229 - RNA, 18 nt, Human
uccaggugggagacaaca

SEQ ID NO: 315230 - RNA, 23 nt, Human
uccuuaaaaaaaaaaaggccacu

SEQ ID NO: 315231 - RNA, 20 nt, Human
ucugcaaaugauuucauagc

SEQ ID NO: 315232 - RNA, 21 nt, Human
ucuucugugagagcugaaagu

SEQ ID NO: 315233 - RNA, 23 nt, Human
ugaaacaaaaauucuagauaaga

SEQ ID NO: 315234 - RNA, 21 nt, Human
ugaggcauaucuggccuugaa

SEQ ID NO: 315235 - RNA, 23 nt, Human
ugaguacuaucaaaugaaaacug

SEQ ID NO: 315236 - RNA, 18 nt, Human
ugcauuagcagacauuug

SEQ ID NO: 315237 - RNA, 21 nt, Human
ugccagaaagauguaguauuu

SEQ ID NO: 315238 - RNA, 19 nt, Human
ugcuaaaaugaaugugaag

SEQ ID NO: 315239 - RNA, 19 nt, Human
uguaaugaaaaagccguga

SEQ ID NO: 315240 - RNA, 22 nt, Human
ugugaaauguaaagcaauuauc

SEQ ID NO: 315241 - RNA, 23 nt, Human
uuagaaggaaaaaauacaaaccc

SEQ ID NO: 315242 - RNA, 21 nt, Human
uuccagugacugccaauuaug

SEQ ID NO: 315243 - RNA, 21 nt, Human
uuccuuauaugcuggagcugu

SEQ ID NO: 315244 - RNA, 23 nt, Human
uuguaaagauagggcuccacaua

SEQ ID NO: 315245 - RNA, 19 nt, Human
uuuacaguaggaaacuuuu

SEQ ID NO: 315246 - RNA, 25 nt, Human
uuuagaaggaaaaaauacaaaccca

SEQ ID NO: 315247 - RNA, 25 nt, Human
aaaaagaaaauacuguaaguauuaa

SEQ ID NO: 315248 - RNA, 18 nt, Human
aaaaccaggaauggcaag

SEQ ID NO: 315249 - RNA, 19 nt, Human
aaaaccaggaauggcaagg

SEQ ID NO: 315250 - RNA, 21 nt, Human
aaaaccaggaauggcaaggaa

SEQ ID NO: 315251 - RNA, 18 nt, Human
aaaagaggggugggggca

SEQ ID NO: 315252 - RNA, 24 nt, Human
aaacaaaaaauucuggacuuggau

SEQ ID NO: 315253 - RNA, 22 nt, Human
aaaccagacauggcuacucaug

SEQ ID NO: 315254 - RNA, 22 nt, Human
aaacuuuagccccagaaucucu

SEQ ID NO: 315255 - RNA, 24 nt, Human
aaagacacaaaaugcuaccacuaa

SEQ ID NO: 315256 - RNA, 23 nt, Human
aaagccccugggccuucugccuu

SEQ ID NO: 315257 - RNA, 20 nt, Human
aaagucaguuccugagaggu

SEQ ID NO: 315258 - RNA, 20 nt, Human
aaagucaguuccugagaggu

SEQ ID NO: 315259 - RNA, 21 nt, Human
aacagcucaaauagguccuuu

SEQ ID NO: 315260 - RNA, 19 nt, Human
aacauggcaaaaccccauc

SEQ ID NO: 315261 - RNA, 21 nt, Human
aacauggcaaaaccccaucuc

SEQ ID NO: 315262 - RNA, 21 nt, Human
aacauggcaaaaccccaucuc

SEQ ID NO: 315263 - RNA, 22 nt, Human
aaccauuccagagggcaucuga

SEQ ID NO: 315264 - RNA, 22 nt, Human
aaccauuccagagggcaucuga

SEQ ID NO: 315265 - RNA, 18 nt, Human
aacugguguagagugagg

SEQ ID NO: 315266 - RNA, 22 nt, Human
aagaaaacaaaaaauucuggac

SEQ ID NO: 315267 - RNA, 25 nt, Human
aagcagaugaauuggggaacagcuc

SEQ ID NO: 315268 - RNA, 23 nt, Human
aagcaggucaagcuaccucagac

SEQ ID NO: 315269 - RNA, 24 nt, Human
aagcaggucaagcuaccucagaca

SEQ ID NO: 315270 - RNA, 21 nt, Human
aagccccugggccuucugccu

SEQ ID NO: 315271 - RNA, 18 nt, Human
aagcgggaaucuguuccg

SEQ ID NO: 315272 - RNA, 23 nt, Human
aagcugaggaaaggugguugagg

SEQ ID NO: 315273 - RNA, 22 nt, Human
aagcugccugcuuauuggguuu

SEQ ID NO: 315274 - RNA, 22 nt, Human
aaggaaaaccauaaagccaaag

SEQ ID NO: 315275 - RNA, 18 nt, Human
aaggaaagaccaucuuga

SEQ ID NO: 315276 - RNA, 18 nt, Human
aaggaagugaggcagaau

SEQ ID NO: 315277 - RNA, 21 nt, Human
aagugacagaccugagcccca

SEQ ID NO: 315278 - RNA, 19 nt, Human
aagugcugggauuacaggc

SEQ ID NO: 315279 - RNA, 21 nt, Human
aagugcugggauuacaggcau

SEQ ID NO: 315280 - RNA, 23 nt, Human
aagugcugggauuacaggcauga

SEQ ID NO: 315281 - RNA, 20 nt, Human
aaguggccucagauacuuga

SEQ ID NO: 315282 - RNA, 24 nt, Human
aaguguccuuccaccaaaacaucc

SEQ ID NO: 315283 - RNA, 24 nt, Human
aaguguccuuccaccaaaacaucc

SEQ ID NO: 315284 - RNA, 19 nt, Human
aaucuccccuccccaccuc

SEQ ID NO: 315285 - RNA, 21 nt, Human
aaucuggagccuagccuacuu

SEQ ID NO: 315286 - RNA, 23 nt, Human
aaugaaccacucuaaacacugaa

SEQ ID NO: 315287 - RNA, 23 nt, Human
aaugacuugcacacucaagugaa

SEQ ID NO: 315288 - RNA, 20 nt, Human
aaugcagucacugucaccuu

SEQ ID NO: 315289 - RNA, 23 nt, Human
aauggcccacuagagaaucuggg

SEQ ID NO: 315290 - RNA, 24 nt, Human
aauugcuuucuauccauuucucca

SEQ ID NO: 315291 - RNA, 20 nt, Human
acaccacugcacuccagccu

SEQ ID NO: 315292 - RNA, 24 nt, Human
acaccacugcacuccagccugggc

SEQ ID NO: 315293 - RNA, 20 nt, Human
acaccuaacaaaguacaugg

SEQ ID NO: 315294 - RNA, 18 nt, Human
acacucuaaaaauggggu

SEQ ID NO: 315295 - RNA, 20 nt, Human
acagaguuuuaccaggaaca

SEQ ID NO: 315296 - RNA, 21 nt, Human
acaggccaaaaauccagacac

SEQ ID NO: 315297 - RNA, 19 nt, Human
acaggcgccugccaccacg

SEQ ID NO: 315298 - RNA, 18 nt, Human
accaagggauaaaacucc

SEQ ID NO: 315299 - RNA, 22 nt, Human
accacugcacuccagccugggc

SEQ ID NO: 315300 - RNA, 19 nt, Human
acccugagauuugcauaac

SEQ ID NO: 315301 - RNA, 21 nt, Human
accuaacaaaguacauggcuu

SEQ ID NO: 315302 - RNA, 19 nt, Human
acgccuguaauccuaucgc

SEQ ID NO: 315303 - RNA, 22 nt, Human
acgccuguaauccuaucgcuuu

SEQ ID NO: 315304 - RNA, 23 nt, Human
acgccuguaauccuaucgcuuug

SEQ ID NO: 315305 - RNA, 18 nt, Human
acuccaugcccaccucaa

SEQ ID NO: 315306 - RNA, 18 nt, Human
acugcaagcuccgccucc

SEQ ID NO: 315307 - RNA, 18 nt, Human
acugcacuccagccuggg

SEQ ID NO: 315308 - RNA, 22 nt, Human
acugcacuccagccugggcgag

SEQ ID NO: 315309 - RNA, 24 nt, Human
acugcacuccagccugggcgagag

SEQ ID NO: 315310 - RNA, 24 nt, Human
acuggguuaauguaaaaagcugaa

SEQ ID NO: 315311 - RNA, 24 nt, Human
acuggguuaauguaaaaagcugaa

SEQ ID NO: 315312 - RNA, 21 nt, Human
agaaaggaaaggaauaaauga

SEQ ID NO: 315313 - RNA, 30 nt, Human
agaacccucuccuaccccgcagccugccuu

SEQ ID NO: 315314 - RNA, 22 nt, Human
agaagcccaauuuucaacaaac

SEQ ID NO: 315315 - RNA, 21 nt, Human
agagaggaaaacaaggucaag

SEQ ID NO: 315316 - RNA, 18 nt, Human
agaguagaauuucccuuu

SEQ ID NO: 315317 - RNA, 20 nt, Human
agcaacuuucccagaagccc

SEQ ID NO: 315318 - RNA, 24 nt, Human
agcagcuucagaccagccugggca

SEQ ID NO: 315319 - RNA, 20 nt, Human
agccagugguaggcacaacc

SEQ ID NO: 315320 - RNA, 21 nt, Human
agccagugguaggcacaaccc

SEQ ID NO: 315321 - RNA, 22 nt, Human
agccagugguaggcacaaccuu

SEQ ID NO: 315322 - RNA, 19 nt, Human
agcccagcagcuucagacc

SEQ ID NO: 315323 - RNA, 22 nt, Human
agccccugggccuucugccuuc

SEQ ID NO: 315324 - RNA, 19 nt, Human
agccuagccuacuuggaca

SEQ ID NO: 315325 - RNA, 24 nt, Human
agccugggcaacauggcaaaaccc

SEQ ID NO: 315326 - RNA, 18 nt, Human
agccugguguacucccca

SEQ ID NO: 315327 - RNA, 18 nt, Human
agccugguguacucccca

SEQ ID NO: 315328 - RNA, 22 nt, Human
agcgugcuuuccguaaagacuc

SEQ ID NO: 315329 - RNA, 20 nt, Human
agcugaggaaaggugguuga

SEQ ID NO: 315330 - RNA, 21 nt, Human
agcugccuggggugcucauga

SEQ ID NO: 315331 - RNA, 19 nt, Human
agcuuccuugcuuccugag

SEQ ID NO: 315332 - RNA, 19 nt, Human
agcuuuuauaccauugagu

SEQ ID NO: 315333 - RNA, 24 nt, Human
aggaaaaacucucucguuauuaga

SEQ ID NO: 315334 - RNA, 22 nt, Human
aggaccugcugcuucugacauu

SEQ ID NO: 315335 - RNA, 24 nt, Human
aggagaaauaacagaaaauaucac

SEQ ID NO: 315336 - RNA, 21 nt, Human
aggaggcucucuguaaccccu

SEQ ID NO: 315337 - RNA, 18 nt, Human
aggcuggagugcaguggc

SEQ ID NO: 315338 - RNA, 23 nt, Human
aggcuugugaaagccaagugcug

SEQ ID NO: 315339 - RNA, 20 nt, Human
agggagcaggcaguggugcu

SEQ ID NO: 315340 - RNA, 21 nt, Human
agggggcgguggugguggugg

SEQ ID NO: 315341 - RNA, 22 nt, Human
agggguuuggaagaacagggca

SEQ ID NO: 315342 - RNA, 22 nt, Human
agggguuuggaagaacagggca

SEQ ID NO: 315343 - RNA, 24 nt, Human
agguggagguugcagugagcugag

SEQ ID NO: 315344 - RNA, 18 nt, Human
agguggauugcuugagcc

SEQ ID NO: 315345 - RNA, 20 nt, Human
aguagagauuggguuucacc

SEQ ID NO: 315346 - RNA, 18 nt, Human
aguagcugggacuacagg

SEQ ID NO: 315347 - RNA, 20 nt, Human
agugcaguggcgugaucaag

SEQ ID NO: 315348 - RNA, 22 nt, Human
agugcaguggcgugaucaaggc

SEQ ID NO: 315349 - RNA, 23 nt, Human
agugcaguggcgugaucaaggcu

SEQ ID NO: 315350 - RNA, 24 nt, Human
agugcaguggcgugaucaaggcuc

SEQ ID NO: 315351 - RNA, 18 nt, Human
agugcugggauuacaggc

SEQ ID NO: 315352 - RNA, 24 nt, Human
agugugugcuuaaagugcggucag

SEQ ID NO: 315353 - RNA, 19 nt, Human
auaaagccaaagucugagu

SEQ ID NO: 315354 - RNA, 20 nt, Human
auaucacuggcaacccuaaa

SEQ ID NO: 315355 - RNA, 23 nt, Human
aucaaaucauuccaggugaaagc

SEQ ID NO: 315356 - RNA, 19 nt, Human
aucaauucaacauccugcu

SEQ ID NO: 315357 - RNA, 20 nt, Human
aucaauucaacauccugcug

SEQ ID NO: 315358 - RNA, 20 nt, Human
aucaauucaacauccugcug

SEQ ID NO: 315359 - RNA, 24 nt, Human
aucacaccacugcacuccagccug

SEQ ID NO: 315360 - RNA, 21 nt, Human
aucacagaauuuuaagccaaa

SEQ ID NO: 315361 - RNA, 21 nt, Human
aucaugcuucaauuaaaacug

SEQ ID NO: 315362 - RNA, 21 nt, Human
aucaugcuucaauuaaaacug

SEQ ID NO: 315363 - RNA, 23 nt, Human
aucccuugagccugggaggugga

SEQ ID NO: 315364 - RNA, 25 nt, Human
auccugcuguuucucuuggcacccc

SEQ ID NO: 315365 - RNA, 21 nt, Human
auccuuucugcuuucuuuuuc

SEQ ID NO: 315366 - RNA, 18 nt, Human
augcagcugcuggcugcu

SEQ ID NO: 315367 - RNA, 19 nt, Human
auggaaaaccaccucucua

SEQ ID NO: 315368 - RNA, 22 nt, Human
augggcugagcuguugccacca

SEQ ID NO: 315369 - RNA, 22 nt, Human
augguuggaaaugaaagacaga

SEQ ID NO: 315370 - RNA, 21 nt, Human
augugcaugugaacgcacaua

SEQ ID NO: 315371 - RNA, 19 nt, Human
auugcuaaaccuuuuuagg

SEQ ID NO: 315372 - RNA, 20 nt, Human
auuggguuucaccguguuag

SEQ ID NO: 315373 - RNA, 24 nt, Human
caaaagagagaucugaaaucucac

SEQ ID NO: 315374 - RNA, 20 nt, Human
caaaauaagcagaugaauug

SEQ ID NO: 315375 - RNA, 20 nt, Human
caaccccaaccccaccccag

SEQ ID NO: 315376 - RNA, 24 nt, Human
caaccccaaccccaccccauccca

SEQ ID NO: 315377 - RNA, 18 nt, Human
caaccccaacucucaaag

SEQ ID NO: 315378 - RNA, 18 nt, Human
caaggucaaggaagugag

SEQ ID NO: 315379 - RNA, 21 nt, Human
caaugcagucacugucacccc

SEQ ID NO: 315380 - RNA, 21 nt, Human
caaugcagucacugucacccc

SEQ ID NO: 315381 - RNA, 21 nt, Human
caaugcagucacugucaccuu

SEQ ID NO: 315382 - RNA, 21 nt, Human
cacaccacugcacuccagccu

SEQ ID NO: 315383 - RNA, 20 nt, Human
cacaccugcaguccuagcug

SEQ ID NO: 315384 - RNA, 21 nt, Human
cacaugguuuggggaagggaa

SEQ ID NO: 315385 - RNA, 18 nt, Human
caccaaaacauccauuuc

SEQ ID NO: 315386 - RNA, 21 nt, Human
caccaaaacauccauuucuuu

SEQ ID NO: 315387 - RNA, 21 nt, Human
caccaaaacauccauuucuuu

SEQ ID NO: 315388 - RNA, 25 nt, Human
caccacugcacuccagccugggcga

SEQ ID NO: 315389 - RNA, 24 nt, Human
caccagaggcuaccugaccaugcc

SEQ ID NO: 315390 - RNA, 20 nt, Human
caccagugagacagaacuca

SEQ ID NO: 315391 - RNA, 21 nt, Human
caccaugcagcugcuggcugc

SEQ ID NO: 315392 - RNA, 24 nt, Human
cacccaggcuggagugcaguggcg

SEQ ID NO: 315393 - RNA, 24 nt, Human
caccguguuagccaggauggucuc

SEQ ID NO: 315394 - RNA, 24 nt, Human
caccucggccuccugaagugcugg

SEQ ID NO: 315395 - RNA, 23 nt, Human
caccucucauuccuccuugcacu

SEQ ID NO: 315396 - RNA, 23 nt, Human
caccugcaguccuagcugcucgg

SEQ ID NO: 315397 - RNA, 24 nt, Human
caccugcaguccuagcugcucggg

SEQ ID NO: 315398 - RNA, 22 nt, Human
cacgccauucuccugccucagc

SEQ ID NO: 315399 - RNA, 22 nt, Human
cacuccagccugggcgagagag

SEQ ID NO: 315400 - RNA, 21 nt, Human
cacuccgacucucaacucugg

SEQ ID NO: 315401 - RNA, 20 nt, Human
cacugcacuccagccugggc

SEQ ID NO: 315402 - RNA, 20 nt, Human
cacugcacuccagccugggc

SEQ ID NO: 315403 - RNA, 22 nt, Human
cacugcacuccagccugggcga

SEQ ID NO: 315404 - RNA, 22 nt, Human
cacugcacuccagccugggcga

SEQ ID NO: 315405 - RNA, 27 nt, Human
cacugcacuccagccugggcgagagag

SEQ ID NO: 315406 - RNA, 25 nt, Human
cacuggguuaauguaaaaagcugaa

SEQ ID NO: 315407 - RNA, 18 nt, Human
cacuggguuguaagccaa

SEQ ID NO: 315408 - RNA, 19 nt, Human
cacuggguuguaagccaaa

SEQ ID NO: 315409 - RNA, 22 nt, Human
cagaacacaaaagaucaauagc

SEQ ID NO: 315410 - RNA, 24 nt, Human
cagaacauucauuaaugguauugu

SEQ ID NO: 315411 - RNA, 18 nt, Human
cagaacccucuccuaccc

SEQ ID NO: 315412 - RNA, 18 nt, Human
cagaaggcaagcgggaau

SEQ ID NO: 315413 - RNA, 18 nt, Human
cagaauaaugacuuccca

SEQ ID NO: 315414 - RNA, 18 nt, Human
cagagggaggaccaugga

SEQ ID NO: 315415 - RNA, 21 nt, Human
cagcaacuuucccagaagccc

SEQ ID NO: 315416 - RNA, 18 nt, Human
cagcagcucaaaguaaga

SEQ ID NO: 315417 - RNA, 21 nt, Human
cagcaguagguaccuguccaa

SEQ ID NO: 315418 - RNA, 19 nt, Human
cagccaccuccacuuccag

SEQ ID NO: 315419 - RNA, 20 nt, Human
cagccuccugaguagcuggg

SEQ ID NO: 315420 - RNA, 21 nt, Human
caggcgccugccaccacgccu

SEQ ID NO: 315421 - RNA, 23 nt, Human
caggcgccugccaccacgccugg

SEQ ID NO: 315422 - RNA, 18 nt, Human
cagggcaaagacaaggag

SEQ ID NO: 315423 - RNA, 18 nt, Human
cagggcauugaaagugca

SEQ ID NO: 315424 - RNA, 18 nt, Human
cagggcauugaaagugca

SEQ ID NO: 315425 - RNA, 19 nt, Human
caguagguaccuguccaag

SEQ ID NO: 315426 - RNA, 24 nt, Human
cagucaguaguuuacacacacuuu

SEQ ID NO: 315427 - RNA, 21 nt, Human
caguccaaccucauuuuacag

SEQ ID NO: 315428 - RNA, 20 nt, Human
cagugcuggcauaaacaaug

SEQ ID NO: 315429 - RNA, 19 nt, Human
caguggacugaaguuaauc

SEQ ID NO: 315430 - RNA, 22 nt, Human
cauacgggccuaaaagucaaac

SEQ ID NO: 315431 - RNA, 20 nt, Human
cauaugugucuuuccagccu

SEQ ID NO: 315432 - RNA, 20 nt, Human
caugacucucaucaaugggu

SEQ ID NO: 315433 - RNA, 22 nt, Human
cauggagagcuacaugucaugu

SEQ ID NO: 315434 - RNA, 23 nt, Human
cauucaauuacccucaauauuaa

SEQ ID NO: 315435 - RNA, 21 nt, Human
ccaaaaaggaugagaagucaa

SEQ ID NO: 315436 - RNA, 24 nt, Human
ccaaccccaccccaucccaggugu

SEQ ID NO: 315437 - RNA, 18 nt, Human
ccacaggcagacuucagc

SEQ ID NO: 315438 - RNA, 20 nt, Human
ccaccacgccuggcuaauuu

SEQ ID NO: 315439 - RNA, 19 nt, Human
ccacugcaccugguggaau

SEQ ID NO: 315440 - RNA, 24 nt, Human
ccacugcaccugguggaauuggga

SEQ ID NO: 315441 - RNA, 25 nt, Human
ccacugcaccugguggaauugggau

SEQ ID NO: 315442 - RNA, 20 nt, Human
ccacugcacuccagccuggg

SEQ ID NO: 315443 - RNA, 21 nt, Human
ccacugcacuccagccugggc

SEQ ID NO: 315444 - RNA, 21 nt, Human
ccacugcacuccagccugggc

SEQ ID NO: 315445 - RNA, 23 nt, Human
ccacugcacuccagccugggcga

SEQ ID NO: 315446 - RNA, 24 nt, Human
ccacugcacuccagccugggcgag

SEQ ID NO: 315447 - RNA, 25 nt, Human
ccacugcacuccagccugggcgaga

SEQ ID NO: 315448 - RNA, 23 nt, Human
ccagaaucucuggaauggccaaa

SEQ ID NO: 315449 - RNA, 19 nt, Human
ccagagcauucuccagaug

SEQ ID NO: 315450 - RNA, 23 nt, Human
ccaugauaauacgaagucucaag

SEQ ID NO: 315451 - RNA, 19 nt, Human
ccaugcagcugcuggcugc

SEQ ID NO: 315452 - RNA, 22 nt, Human
cccagaaugaaggauauaaaac

SEQ ID NO: 315453 - RNA, 24 nt, Human
cccagccagguggauugcuugagc

SEQ ID NO: 315454 - RNA, 21 nt, Human
cccaggcuggagugcaguggc

SEQ ID NO: 315455 - RNA, 20 nt, Human
cccaucgcagcacacagcca

SEQ ID NO: 315456 - RNA, 22 nt, Human
cccaucucuacaaaaaaauuca

SEQ ID NO: 315457 - RNA, 20 nt, Human
ccccaaccccaccccauccc

SEQ ID NO: 315458 - RNA, 21 nt, Human
ccccaaccccaccccauccca

SEQ ID NO: 315459 - RNA, 19 nt, Human
ccccaaccccaccccaucu

SEQ ID NO: 315460 - RNA, 24 nt, Human
ccccagaaucucuggaauggccaa

SEQ ID NO: 315461 - RNA, 23 nt, Human
ccccagggcugcuggcccucccc

SEQ ID NO: 315462 - RNA, 18 nt, Human
ccccugggccuucugccu

SEQ ID NO: 315463 - RNA, 21 nt, Human
ccccuuucccuggucuauuga

SEQ ID NO: 315464 - RNA, 20 nt, Human
cccucaaccccaacucucaa

SEQ ID NO: 315465 - RNA, 23 nt, Human
ccgccaucuuuacuccucccgcc

SEQ ID NO: 315466 - RNA, 19 nt, Human
ccgccuggaagcugaauaa

SEQ ID NO: 315467 - RNA, 19 nt, Human
ccgggacacuggguuguaa

SEQ ID NO: 315468 - RNA, 22 nt, Human
ccuccuugcacugacuucauuu

SEQ ID NO: 315469 - RNA, 21 nt, Human
ccucgaccggcugaauguccu

SEQ ID NO: 315470 - RNA, 22 nt, Human
ccucgcgccgccaucuuuacuc

SEQ ID NO: 315471 - RNA, 23 nt, Human
ccucugggucuugccacucuaaa

SEQ ID NO: 315472 - RNA, 23 nt, Human
ccugaagugcugggauuacaggc

SEQ ID NO: 315473 - RNA, 24 nt, Human
ccugaagugcugggauuacaggca

SEQ ID NO: 315474 - RNA, 23 nt, Human
ccugaguagcugggacuacaggc

SEQ ID NO: 315475 - RNA, 24 nt, Human
ccugaguagcugggacuacaggcg

SEQ ID NO: 315476 - RNA, 23 nt, Human
ccugccucagccuccugaguagc

SEQ ID NO: 315477 - RNA, 24 nt, Human
ccugccucagccuccugaguagcu

SEQ ID NO: 315478 - RNA, 25 nt, Human
ccugccuccuggugucuuuuuuccu

SEQ ID NO: 315479 - RNA, 23 nt, Human
ccugcuguuucucuuggcacccc

SEQ ID NO: 315480 - RNA, 23 nt, Human
ccugcuguuucucuuggcacccc

SEQ ID NO: 315481 - RNA, 21 nt, Human
ccugggagguggagguugcag

SEQ ID NO: 315482 - RNA, 24 nt, Human
ccugggcaacauggcaaaacccca

SEQ ID NO: 315483 - RNA, 22 nt, Human
ccuguaauccuaucgcuuuggg

SEQ ID NO: 315484 - RNA, 18 nt, Human
ccuugaguagaccuucgu

SEQ ID NO: 315485 - RNA, 23 nt, Human
ccuugcucuuugaaugggcugag

SEQ ID NO: 315486 - RNA, 18 nt, Human
ccuuucugccucuugaag

SEQ ID NO: 315487 - RNA, 19 nt, Human
cgccucccggguucacgcc

SEQ ID NO: 315488 - RNA, 21 nt, Human
cgccuuggagaaauggcuagg

SEQ ID NO: 315489 - RNA, 20 nt, Human
cggccuccugaagugcuggg

SEQ ID NO: 315490 - RNA, 25 nt, Human
cgugaucaaggcucacugcaagcuc

SEQ ID NO: 315491 - RNA, 25 nt, Human
cgugggauccacagaccauuaacuu

SEQ ID NO: 315492 - RNA, 20 nt, Human
cuaaacaaccccaaccccac

SEQ ID NO: 315493 - RNA, 22 nt, Human
cuaaacaaccccaaccccaccc

SEQ ID NO: 315494 - RNA, 20 nt, Human
cucaacaaucuccccucccc

SEQ ID NO: 315495 - RNA, 21 nt, Human
cucacagcccaguaggcugcu

SEQ ID NO: 315496 - RNA, 20 nt, Human
cucagaacccucuccuaccc

SEQ ID NO: 315497 - RNA, 21 nt, Human
cucagaaucagggacugaaaa

SEQ ID NO: 315498 - RNA, 23 nt, Human
cucagaaucagggacugaaaauc

SEQ ID NO: 315499 - RNA, 24 nt, Human
cucagccuccugaguagcugggac

SEQ ID NO: 315500 - RNA, 20 nt, Human
cucaugcuucucagggcucc

SEQ ID NO: 315501 - RNA, 21 nt, Human
cuccaguggaaccaguggcuc

SEQ ID NO: 315502 - RNA, 23 nt, Human
cucccagaaugaaggauauaaaa

SEQ ID NO: 315503 - RNA, 19 nt, Human
cuccccucaagcccuucag

SEQ ID NO: 315504 - RNA, 23 nt, Human
cuccccuccccaccucucauucc

SEQ ID NO: 315505 - RNA, 21 nt, Human
cucccggguucacgccauucu

SEQ ID NO: 315506 - RNA, 24 nt, Human
cuccucugacuguccuucucuaaa

SEQ ID NO: 315507 - RNA, 24 nt, Human
cuccugaagugcugggauuacagg

SEQ ID NO: 315508 - RNA, 22 nt, Human
cuccugaccucgugaucugucc

SEQ ID NO: 315509 - RNA, 22 nt, Human
cuccugccucagccuccugagu

SEQ ID NO: 315510 - RNA, 21 nt, Human
cucuucauccagacuccugcc

SEQ ID NO: 315511 - RNA, 21 nt, Human
cucuuggcaccccaaucagga

SEQ ID NO: 315512 - RNA, 21 nt, Human
cucuuggcaccccaaucagga

SEQ ID NO: 315513 - RNA, 24 nt, Human
cugaaaaucuauuuguccauagca

SEQ ID NO: 315514 - RNA, 23 nt, Human
cugaagugcugggauuacaggca

SEQ ID NO: 315515 - RNA, 24 nt, Human
cugaagugcugggauuacaggcau

SEQ ID NO: 315516 - RNA, 21 nt, Human
cugcaguccuagcugcucggg

SEQ ID NO: 315517 - RNA, 22 nt, Human
cugccaaaacuaccaacacuaa

SEQ ID NO: 315518 - RNA, 23 nt, Human
cugcccuuucacuccaauuacac

SEQ ID NO: 315519 - RNA, 22 nt, Human
cugcugagggcucaugcuucuc

SEQ ID NO: 315520 - RNA, 18 nt, Human
cuggaacugcugagggcu

SEQ ID NO: 315521 - RNA, 23 nt, Human
cugggcaacauggcaaaacccca

SEQ ID NO: 315522 - RNA, 18 nt, Human
cugucacccaggcuggag

SEQ ID NO: 315523 - RNA, 22 nt, Human
cuucagaccagccugggcaaca

SEQ ID NO: 315524 - RNA, 18 nt, Human
cuuccaucuucuuuguca

SEQ ID NO: 315525 - RNA, 24 nt, Human
cuucucccuaaacaaccccaaccc

SEQ ID NO: 315526 - RNA, 19 nt, Human
cuugcagcuuccacccugc

SEQ ID NO: 315527 - RNA, 25 nt, Human
cuuucuuuuuccuuuuugcaccuuu

SEQ ID NO: 315528 - RNA, 19 nt, Human
gaaaaaugguuggaaauga

SEQ ID NO: 315529 - RNA, 19 nt, Human
gaaaagaggggugggggca

SEQ ID NO: 315530 - RNA, 19 nt, Human
gaaaagaggggugggggca

SEQ ID NO: 315531 - RNA, 22 nt, Human
gaaaaucuauuuguccauagca

SEQ ID NO: 315532 - RNA, 23 nt, Human
gaaaggacaggcaaaggcacaga

SEQ ID NO: 315533 - RNA, 23 nt, Human
gaacugaacuuacaguacuccca

SEQ ID NO: 315534 - RNA, 18 nt, Human
gaacugcugagggcucau

SEQ ID NO: 315535 - RNA, 18 nt, Human
gaagcugaauaacuggca

SEQ ID NO: 315536 - RNA, 21 nt, Human
gaaggcaagcgggaaucuguu

SEQ ID NO: 315537 - RNA, 18 nt, Human
gaagggucaugugaagug

SEQ ID NO: 315538 - RNA, 21 nt, Human
gaauagugggccccgacgacu

SEQ ID NO: 315539 - RNA, 22 nt, Human
gaaucagggacugaaaaucuau

SEQ ID NO: 315540 - RNA, 24 nt, Human
gacagaaaccaggggaagcccaga

SEQ ID NO: 315541 - RNA, 22 nt, Human
gaccucgugaucuguccaccuc

SEQ ID NO: 315542 - RNA, 22 nt, Human
gaccucgugaucuguccaccuc

SEQ ID NO: 315543 - RNA, 24 nt, Human
gaccucgugaucuguccaccucgg

SEQ ID NO: 315544 - RNA, 18 nt, Human
gagcagcaggaaguugag

SEQ ID NO: 315545 - RNA, 18 nt, Human
gagcagcaggaaguugag

SEQ ID NO: 315546 - RNA, 19 nt, Human
gagcagcaggaaguugagg

SEQ ID NO: 315547 - RNA, 19 nt, Human
gagcagcaggaaguugagg

SEQ ID NO: 315548 - RNA, 21 nt, Human
gagcagcaggaaguugagggg

SEQ ID NO: 315549 - RNA, 21 nt, Human
gagcagcaggaaguugagggg

SEQ ID NO: 315550 - RNA, 19 nt, Human
gaggcugcaaacaggccaa

SEQ ID NO: 315551 - RNA, 22 nt, Human
gagguugcagugagcugagauc

SEQ ID NO: 315552 - RNA, 19 nt, Human
gaguacuaacaaacuaugg

SEQ ID NO: 315553 - RNA, 20 nt, Human
gaguagcugggacuacaggc

SEQ ID NO: 315554 - RNA, 26 nt, Human
gaguagcugggacuacaggcgccugc

SEQ ID NO: 315555 - RNA, 19 nt, Human
gaguuauccccaaauugcu

SEQ ID NO: 315556 - RNA, 18 nt, Human
gauaguagcagcuucucu

SEQ ID NO: 315557 - RNA, 24 nt, Human
gaucccuugagccugggaggugga

SEQ ID NO: 315558 - RNA, 18 nt, Human
gaugaaagggagaggagu

SEQ ID NO: 315559 - RNA, 18 nt, Human
gauuacaggcaugagcca

SEQ ID NO: 315560 - RNA, 22 nt, Human
gauuacaggcaugagccacugc

SEQ ID NO: 315561 - RNA, 23 nt, Human
gauuacaggcaugagccacugca

SEQ ID NO: 315562 - RNA, 25 nt, Human
gauugcugccuccucucagaacccu

SEQ ID NO: 315563 - RNA, 20 nt, Human
gcacuggauuuguauucuuu

SEQ ID NO: 315564 - RNA, 23 nt, Human
gcccagaagagaaguaaacacau

SEQ ID NO: 315565 - RNA, 22 nt, Human
gccccagaaucucuggaauggc

SEQ ID NO: 315566 - RNA, 22 nt, Human
gcccuggaaaaacaaacuuuag

SEQ ID NO: 315567 - RNA, 22 nt, Human
gccgccaucuuuacuccucccg

SEQ ID NO: 315568 - RNA, 25 nt, Human
gccucccggguucacgccauucucc

SEQ ID NO: 315569 - RNA, 22 nt, Human
gccucucucagagcgcuucagc

SEQ ID NO: 315570 - RNA, 23 nt, Human
gccuggcuaauuuuuuguauuuu

SEQ ID NO: 315571 - RNA, 21 nt, Human
gcgugguggguuugucuggcu

SEQ ID NO: 315572 - RNA, 22 nt, Human
gcucagcuggagccugagggau

SEQ ID NO: 315573 - RNA, 18 nt, Human
gcucugggcuagcaaaug

SEQ ID NO: 315574 - RNA, 25 nt, Human
gcucugucacccaggcuggagugca

SEQ ID NO: 315575 - RNA, 20 nt, Human
gcugagaucacaccacugca

SEQ ID NO: 315576 - RNA, 21 nt, Human
gcugagcagcaggaaguugag

SEQ ID NO: 315577 - RNA, 19 nt, Human
gcuggagugcaguggcgug

SEQ ID NO: 315578 - RNA, 21 nt, Human
gcugggcgugggcccuuacgc

SEQ ID NO: 315579 - RNA, 21 nt, Human
gcuuucuauccauuucuccau

SEQ ID NO: 315580 - RNA, 19 nt, Human
ggaacugcugagggcucau

SEQ ID NO: 315581 - RNA, 23 nt, Human
ggacagaaaccaggggaagccca

SEQ ID NO: 315582 - RNA, 22 nt, Human
ggaccaaauccaauguggacaa

SEQ ID NO: 315583 - RNA, 22 nt, Human
ggaccaaauccaauguggacaa

SEQ ID NO: 315584 - RNA, 19 nt, Human
ggacuggaaaagaggggug

SEQ ID NO: 315585 - RNA, 19 nt, Human
ggacuggaaaagaggggug

SEQ ID NO: 315586 - RNA, 20 nt, Human
ggagaggagugaaguguaug

SEQ ID NO: 315587 - RNA, 23 nt, Human
ggagaggcauggaaaccucaggg

SEQ ID NO: 315588 - RNA, 18 nt, Human
ggagcaggcaguggugcu

SEQ ID NO: 315589 - RNA, 26 nt, Human
ggagggcuuccgggacacuggguugu

SEQ ID NO: 315590 - RNA, 24 nt, Human
ggagguucuagggaacaucaaaug

SEQ ID NO: 315591 - RNA, 18 nt, Human
ggagguugcagugagcug

SEQ ID NO: 315592 - RNA, 22 nt, Human
ggagguugcagugagcugagau

SEQ ID NO: 315593 - RNA, 23 nt, Human
ggagguugcagugagcugagauc

SEQ ID NO: 315594 - RNA, 24 nt, Human
ggagguugcagugagcugagauca

SEQ ID NO: 315595 - RNA, 24 nt, Human
ggauggucucgaacuccugaccuc

SEQ ID NO: 315596 - RNA, 22 nt, Human
ggauuacaggcaugagccacug

SEQ ID NO: 315597 - RNA, 21 nt, Human
ggcaaggaacucuauugccag

SEQ ID NO: 315598 - RNA, 21 nt, Human
ggcauugaaagugcagagaaa

SEQ ID NO: 315599 - RNA, 21 nt, Human
ggcauugaaagugcagagaaa

SEQ ID NO: 315600 - RNA, 19 nt, Human
ggccacugaagaggccagc

SEQ ID NO: 315601 - RNA, 21 nt, Human
ggccuggaccgaaacacuggc

SEQ ID NO: 315602 - RNA, 23 nt, Human
ggcgugggcccuuacgccuguaa

SEQ ID NO: 315603 - RNA, 22 nt, Human
ggcuggagugcaguggcgugau

SEQ ID NO: 315604 - RNA, 25 nt, Human
gggaaaaacaaaagauaugauuuaa

SEQ ID NO: 315605 - RNA, 19 nt, Human
gggauagggguuuggaaga

SEQ ID NO: 315606 - RNA, 19 nt, Human
gggauagggguuuggaaga

SEQ ID NO: 315607 - RNA, 21 nt, Human
ggguuucaccguguuagccag

SEQ ID NO: 315608 - RNA, 18 nt, Human
gguaggcugggcgugggc

SEQ ID NO: 315609 - RNA, 19 nt, Human
gguggagguugcagugagc

SEQ ID NO: 315610 - RNA, 24 nt, Human
guacuuuugaaaggcacaaacaga

SEQ ID NO: 315611 - RNA, 24 nt, Human
gucacaugacuaaaaggagaaggg

SEQ ID NO: 315612 - RNA, 18 nt, Human
gucaugugaaguggcagg

SEQ ID NO: 315613 - RNA, 24 nt, Human
gucccugacagggucuacugcuuc

SEQ ID NO: 315614 - RNA, 20 nt, Human
gucccuuucuuuccucauaa

SEQ ID NO: 315615 - RNA, 18 nt, Human
gugaucaaggcucacugc

SEQ ID NO: 315616 - RNA, 19 nt, Human
gugcugggauuacaggcau

SEQ ID NO: 315617 - RNA, 20 nt, Human
guggagguugcagugagcug

SEQ ID NO: 315618 - RNA, 19 nt, Human
guggcagggaugcaacacc

SEQ ID NO: 315619 - RNA, 18 nt, Human
guggccucagauacuuga

SEQ ID NO: 315620 - RNA, 18 nt, Human
guuaaagaguugcagaua

SEQ ID NO: 315621 - RNA, 19 nt, Human
guugcagugagcugagauc

SEQ ID NO: 315622 - RNA, 22 nt, Human
guuucagagggaggaccaugga

SEQ ID NO: 315623 - RNA, 21 nt, Human
uaaaacaacuuguccaaaggc

SEQ ID NO: 315624 - RNA, 18 nt, Human
uaaaaccaggaauggcaa

SEQ ID NO: 315625 - RNA, 23 nt, Human
uaaacagcaugugguguuucaga

SEQ ID NO: 315626 - RNA, 21 nt, Human
uaaacuuggggugggaacuag

SEQ ID NO: 315627 - RNA, 20 nt, Human
uaaagcacccucggcuccaa

SEQ ID NO: 315628 - RNA, 20 nt, Human
uaacaaaguacauggcuuug

SEQ ID NO: 315629 - RNA, 23 nt, Human
uaacaaaguacauggcuuugaga

SEQ ID NO: 315630 - RNA, 20 nt, Human
uaacaaauuaaugaaaacag

SEQ ID NO: 315631 - RNA, 23 nt, Human
uaacaacaaccaguaaaacaaaa

SEQ ID NO: 315632 - RNA, 19 nt, Human
uaagaaugaauaaaucaca

SEQ ID NO: 315633 - RNA, 23 nt, Human
uaagaggcuccccaccaucagug

SEQ ID NO: 315634 - RNA, 20 nt, Human
uaagcagaugaauuggggaa

SEQ ID NO: 315635 - RNA, 19 nt, Human
uaaugguuuaauuuugcac

SEQ ID NO: 315636 - RNA, 24 nt, Human
uaauuuuuuguauuuuuaguagag

SEQ ID NO: 315637 - RNA, 23 nt, Human
uacaggcaucauauagaagugaa

SEQ ID NO: 315638 - RNA, 22 nt, Human
uacaggcaugagccacugcacc

SEQ ID NO: 315639 - RNA, 22 nt, Human
uacaggcgccugccaccacgcc

SEQ ID NO: 315640 - RNA, 23 nt, Human
uacucaaaacuauauaacaacaa

SEQ ID NO: 315641 - RNA, 19 nt, Human
uacugcuuccugagcagug

SEQ ID NO: 315642 - RNA, 21 nt, Human
uacuugacuuucgccauaugu

SEQ ID NO: 315643 - RNA, 23 nt, Human
uagaaggagaugcuggcguggug

SEQ ID NO: 315644 - RNA, 22 nt, Human
uagaaggccuauaauuaccauc

SEQ ID NO: 315645 - RNA, 24 nt, Human
uagccaggauggucucgaacuccu

SEQ ID NO: 315646 - RNA, 18 nt, Human
uaggaggcuugugaaagc

SEQ ID NO: 315647 - RNA, 21 nt, Human
uaguagagauuggguuucacc

SEQ ID NO: 315648 - RNA, 24 nt, Human
uaguagagauuggguuucaccgug

SEQ ID NO: 315649 - RNA, 26 nt, Human
uaguagagauuggguuucaccguguu

SEQ ID NO: 315650 - RNA, 23 nt, Human
uaguagaucuggacuacaaggag

SEQ ID NO: 315651 - RNA, 21 nt, Human
uaguggaggagggaagugagu

SEQ ID NO: 315652 - RNA, 21 nt, Human
uauaaaaggauagaaaggaaa

SEQ ID NO: 315653 - RNA, 21 nt, Human
uaucacuggcaacccuaaaau

SEQ ID NO: 315654 - RNA, 26 nt, Human
uaucgcuuugggaggcccagccaggu

SEQ ID NO: 315655 - RNA, 22 nt, Human
uaucucaagugccguuaaagag

SEQ ID NO: 315656 - RNA, 19 nt, Human
uaugaggaaugacuuaaag

SEQ ID NO: 315657 - RNA, 18 nt, Human
uauuuuuuuugagaugga

SEQ ID NO: 315658 - RNA, 22 nt, Human
uauuuuuuuugagauggagucu

SEQ ID NO: 315659 - RNA, 21 nt, Human
ucaaaaauuagcugggcaugg

SEQ ID NO: 315660 - RNA, 20 nt, Human
ucaacaaacagguggccacu

SEQ ID NO: 315661 - RNA, 19 nt, Human
ucaagcuacuucuggcccu

SEQ ID NO: 315662 - RNA, 21 nt, Human
ucaauagcugucccugacagg

SEQ ID NO: 315663 - RNA, 19 nt, Human
ucaauggaacuaaagauug

SEQ ID NO: 315664 - RNA, 23 nt, Human
ucacaccacugcacuccagccug

SEQ ID NO: 315665 - RNA, 23 nt, Human
ucacagcccaguaggcugcuauc

SEQ ID NO: 315666 - RNA, 24 nt, Human
ucacccaggcuggagugcaguggc

SEQ ID NO: 315667 - RNA, 24 nt, Human
ucaccguguuagccaggauggucu

SEQ ID NO: 315668 - RNA, 23 nt, Human
ucaccuuggaugcuaaccauucc

SEQ ID NO: 315669 - RNA, 23 nt, Human
ucaccuuggaugcuaaccauucc

SEQ ID NO: 315670 - RNA, 18 nt, Human
ucacugcaagcuccgccu

SEQ ID NO: 315671 - RNA, 19 nt, Human
ucacugcaagcuccgccuc

SEQ ID NO: 315672 - RNA, 24 nt, Human
ucacugcaagcuccgccucccggg

SEQ ID NO: 315673 - RNA, 18 nt, Human
ucacugucaccuuggaug

SEQ ID NO: 315674 - RNA, 18 nt, Human
ucacugucaccuuggaug

SEQ ID NO: 315675 - RNA, 21 nt, Human
ucagcccggagcagagggcgg

SEQ ID NO: 315676 - RNA, 23 nt, Human
ucagccuccugaguagcugggac

SEQ ID NO: 315677 - RNA, 19 nt, Human
ucagcuggagccugaggga

SEQ ID NO: 315678 - RNA, 21 nt, Human
ucagggcaaagacaaggagga

SEQ ID NO: 315679 - RNA, 24 nt, Human
ucaguaguuuacacacacuuucgu

SEQ ID NO: 315680 - RNA, 20 nt, Human
ucauuuuacagacagggagg

SEQ ID NO: 315681 - RNA, 25 nt, Human
uccaaacacagaguacuaacaaaga

SEQ ID NO: 315682 - RNA, 20 nt, Human
uccaagcagcacaagaaaaa

SEQ ID NO: 315683 - RNA, 23 nt, Human
ucccauuuuaagaaagcugagga

SEQ ID NO: 315684 - RNA, 20 nt, Human
uccccaccucucauuccucc

SEQ ID NO: 315685 - RNA, 22 nt, Human
uccccagaacacccagaucaac

SEQ ID NO: 315686 - RNA, 21 nt, Human
ucccggguucacgccauucuc

SEQ ID NO: 315687 - RNA, 24 nt, Human
ucccggguucacgccauucuccug

SEQ ID NO: 315688 - RNA, 20 nt, Human
ucccuaaacaaccccaaccc

SEQ ID NO: 315689 - RNA, 26 nt, Human
ucccuaaacaaccccaaccccacccc

SEQ ID NO: 315690 - RNA, 18 nt, Human
ucccugacagggucuacu

SEQ ID NO: 315691 - RNA, 19 nt, Human
ucccuugagccugggaggu

SEQ ID NO: 315692 - RNA, 24 nt, Human
ucccuugagccugggagguggagg

SEQ ID NO: 315693 - RNA, 21 nt, Human
uccuccaaacucucuuuaccu

SEQ ID NO: 315694 - RNA, 24 nt, Human
uccugaagugcugggauuacaggc

SEQ ID NO: 315695 - RNA, 24 nt, Human
uccugaguagcugggacuacaggc

SEQ ID NO: 315696 - RNA, 19 nt, Human
uccuucccaguacuugcag

SEQ ID NO: 315697 - RNA, 21 nt, Human
uccuugcacugacuucauuuc

SEQ ID NO: 315698 - RNA, 20 nt, Human
uccuuucugcuucuugaagg

SEQ ID NO: 315699 - RNA, 20 nt, Human
ucuaaccacuggaaauaauc

SEQ ID NO: 315700 - RNA, 19 nt, Human
ucuccagauggcucgaauu

SEQ ID NO: 315701 - RNA, 19 nt, Human
ucuccagauggcucgaauu

SEQ ID NO: 315702 - RNA, 21 nt, Human
ucuccuguucuguaauuggga

SEQ ID NO: 315703 - RNA, 19 nt, Human
ucucgaacuccugaccucg

SEQ ID NO: 315704 - RNA, 21 nt, Human
ucucuaaagcacccucggcuc

SEQ ID NO: 315705 - RNA, 18 nt, Human
ucucugaacucucagaau

SEQ ID NO: 315706 - RNA, 20 nt, Human
ucucugcccuuucacuccaa

SEQ ID NO: 315707 - RNA, 23 nt, Human
ucugagaggagacagugucuguc

SEQ ID NO: 315708 - RNA, 19 nt, Human
ucugaguuuucauuuguaa

SEQ ID NO: 315709 - RNA, 21 nt, Human
ucugcagcuauuuauucagcu

SEQ ID NO: 315710 - RNA, 18 nt, Human
ucugcucacuccaugccc

SEQ ID NO: 315711 - RNA, 20 nt, Human
ucugguugucggauuucagu

SEQ ID NO: 315712 - RNA, 24 nt, Human
ucugucacccaggcuggagugcag

SEQ ID NO: 315713 - RNA, 24 nt, Human
ucuguggcuaggagaggcugcaaa

SEQ ID NO: 315714 - RNA, 22 nt, Human
ucuguuagggugacaccuugag

SEQ ID NO: 315715 - RNA, 25 nt, Human
ucuguuagggugacaccuugaguag

SEQ ID NO: 315716 - RNA, 24 nt, Human
ucuguugcuggaacugcugagggc

SEQ ID NO: 315717 - RNA, 23 nt, Human
ucuugcucugucacccaggcugg

SEQ ID NO: 315718 - RNA, 24 nt, Human
ucuugcucugucacccaggcugga

SEQ ID NO: 315719 - RNA, 19 nt, Human
ucuugucacaaggaaaacu

SEQ ID NO: 315720 - RNA, 24 nt, Human
ucuuuccagccugcuuccacuucc

SEQ ID NO: 315721 - RNA, 21 nt, Human
ucuuugucacaauguugcaag

SEQ ID NO: 315722 - RNA, 21 nt, Human
ugaaagggagaggagugaagu

SEQ ID NO: 315723 - RNA, 25 nt, Human
ugaaauuaccuaggauaguuuacac

SEQ ID NO: 315724 - RNA, 21 nt, Human
ugaagagggugauagaaagaa

SEQ ID NO: 315725 - RNA, 21 nt, Human
ugaagagggugauagaaagaa

SEQ ID NO: 315726 - RNA, 21 nt, Human
ugaaggaaagaccaucuugaa

SEQ ID NO: 315727 - RNA, 20 nt, Human
ugaaguuaauccauacaacu

SEQ ID NO: 315728 - RNA, 25 nt, Human
ugaauguccuuucugccucuugaag

SEQ ID NO: 315729 - RNA, 25 nt, Human
ugaauguccuuucugcuucuugaag

SEQ ID NO: 315730 - RNA, 26 nt, Human
ugaauguccuuucugcuucuugaagg

SEQ ID NO: 315731 - RNA, 22 nt, Human
ugacacaauaauagaaagcugg

SEQ ID NO: 315732 - RNA, 18 nt, Human
ugacauuccaggcccagc

SEQ ID NO: 315733 - RNA, 21 nt, Human
ugacauuccaggcccagcacu

SEQ ID NO: 315734 - RNA, 24 nt, Human
ugaccaugcccaugggugaaagcu

SEQ ID NO: 315735 - RNA, 20 nt, Human
ugaccucugggucuugccuc

SEQ ID NO: 315736 - RNA, 23 nt, Human
ugacuguccuucucuaaacacug

SEQ ID NO: 315737 - RNA, 18 nt, Human
ugagaucacaccacugca

SEQ ID NO: 315738 - RNA, 24 nt, Human
ugagaucacaccacugcacuccag

SEQ ID NO: 315739 - RNA, 22 nt, Human
ugagauggagucuugcucuguc

SEQ ID NO: 315740 - RNA, 23 nt, Human
ugagcccagcagcuucagaccag

SEQ ID NO: 315741 - RNA, 18 nt, Human
ugagccugggagguggag

SEQ ID NO: 315742 - RNA, 24 nt, Human
ugagccugggagguggagguugca

SEQ ID NO: 315743 - RNA, 22 nt, Human
ugagccugguguacuccccaga

SEQ ID NO: 315744 - RNA, 22 nt, Human
ugagccugguguacuccccaga

SEQ ID NO: 315745 - RNA, 21 nt, Human
ugaggugagaggaucccuuga

SEQ ID NO: 315746 - RNA, 24 nt, Human
ugaggugagaggaucccuugagcc

SEQ ID NO: 315747 - RNA, 18 nt, Human
ugaugacucugaugaggg

SEQ ID NO: 315748 - RNA, 18 nt, Human
ugcaacaaauugcuuucu

SEQ ID NO: 315749 - RNA, 18 nt, Human
ugcagagaaaauguagag

SEQ ID NO: 315750 - RNA, 18 nt, Human
ugcagagaaaauguagag

SEQ ID NO: 315751 - RNA, 18 nt, Human
ugcagcugcuggcugcug

SEQ ID NO: 315752 - RNA, 19 nt, Human
ugcagcugcuggcugcugg

SEQ ID NO: 315753 - RNA, 22 nt, Human
ugcagggaaaucauugcccugg

SEQ ID NO: 315754 - RNA, 23 nt, Human
ugcaguuggaagacagggagguu

SEQ ID NO: 315755 - RNA, 18 nt, Human
ugccaaaacuaccaacac

SEQ ID NO: 315756 - RNA, 22 nt, Human
ugccaaaacuaccaacacuaaa

SEQ ID NO: 315757 - RNA, 18 nt, Human
ugccccagggcugcuggc

SEQ ID NO: 315758 - RNA, 19 nt, Human
ugcccucaaccccaacucu

SEQ ID NO: 315759 - RNA, 24 nt, Human
ugccucagccuccugaguagcugg

SEQ ID NO: 315760 - RNA, 19 nt, Human
ugccucuaguggagaaaca

SEQ ID NO: 315761 - RNA, 24 nt, Human
ugcucugucacccaggcuggagug

SEQ ID NO: 315762 - RNA, 22 nt, Human
ugcugaauccuuucugcuuucu

SEQ ID NO: 315763 - RNA, 20 nt, Human
ugcuggcugcuggccaagau

SEQ ID NO: 315764 - RNA, 19 nt, Human
ugcuuucuauccauuucuc

SEQ ID NO: 315765 - RNA, 26 nt, Human
uggaaaaggaucagcagcccuggaaa

SEQ ID NO: 315766 - RNA, 22 nt, Human
uggaaccaucuaauaagcacau

SEQ ID NO: 315767 - RNA, 19 nt, Human
uggaagaacagggcauuga

SEQ ID NO: 315768 - RNA, 19 nt, Human
uggaagaacagggcauuga

SEQ ID NO: 315769 - RNA, 23 nt, Human
uggaagcugaauaacuggcaaca

SEQ ID NO: 315770 - RNA, 19 nt, Human
uggaauagggggcgguggu

SEQ ID NO: 315771 - RNA, 20 nt, Human
uggaccaaauccaaugugga

SEQ ID NO: 315772 - RNA, 20 nt, Human
uggaccaaauccaaugugga

SEQ ID NO: 315773 - RNA, 20 nt, Human
uggacuuggauuuuugaggu

SEQ ID NO: 315774 - RNA, 20 nt, Human
uggagaaacagucaguaguu

SEQ ID NO: 315775 - RNA, 25 nt, Human
uggaggagggaagugaguuggagag

SEQ ID NO: 315776 - RNA, 21 nt, Human
uggaguaaagacacaaaaugc

SEQ ID NO: 315777 - RNA, 19 nt, Human
uggagucuugcucugucac

SEQ ID NO: 315778 - RNA, 19 nt, Human
uggagugcaguggcgugau

SEQ ID NO: 315779 - RNA, 21 nt, Human
uggagugcaguggcgugauca

SEQ ID NO: 315780 - RNA, 24 nt, Human
uggagugcaguggcgugaucaagg

SEQ ID NO: 315781 - RNA, 24 nt, Human
uggccaaagacaacugaggucagg

SEQ ID NO: 315782 - RNA, 19 nt, Human
uggccaagauucuguguuu

SEQ ID NO: 315783 - RNA, 18 nt, Human
uggcugagcugggcaccu

SEQ ID NO: 315784 - RNA, 21 nt, Human
ugggacuacaggcgccugcca

SEQ ID NO: 315785 - RNA, 22 nt, Human
ugggacuacaggcgccugccac

SEQ ID NO: 315786 - RNA, 24 nt, Human
ugggacuacaggcgccugccacca

SEQ ID NO: 315787 - RNA, 25 nt, Human
ugggagaggcauggaaaccucaggg

SEQ ID NO: 315788 - RNA, 24 nt, Human
ugggaggcccagccagguggauug

SEQ ID NO: 315789 - RNA, 18 nt, Human
ugggagguggagguugca

SEQ ID NO: 315790 - RNA, 29 nt, Human
ugggagguggagguugcagugacaacggu

SEQ ID NO: 315791 - RNA, 24 nt, Human
ugggagguggagguugcagugagc

SEQ ID NO: 315792 - RNA, 20 nt, Human
ugggauggggcuggggucau

SEQ ID NO: 315793 - RNA, 19 nt, Human
ugggauuacaggcaugagc

SEQ ID NO: 315794 - RNA, 21 nt, Human
ugggauuacaggcaugagcca

SEQ ID NO: 315795 - RNA, 22 nt, Human
ugggauuacaggcaugagccac

SEQ ID NO: 315796 - RNA, 22 nt, Human
ugggauuacaggcaugagccac

SEQ ID NO: 315797 - RNA, 24 nt, Human
ugggauuacaggcaugagccacug

SEQ ID NO: 315798 - RNA, 24 nt, Human
ugggauuacaggcaugagccacug

SEQ ID NO: 315799 - RNA, 22 nt, Human
ugggcaacauggcaaaacccca

SEQ ID NO: 315800 - RNA, 23 nt, Human
uggguuucaccguguuagccagg

SEQ ID NO: 315801 - RNA, 20 nt, Human
ugguaucagaaccuccuacu

SEQ ID NO: 315802 - RNA, 26 nt, Human
uggucuccuuggccaggcuauggagg

SEQ ID NO: 315803 - RNA, 19 nt, Human
uggugcacaccugcagucc

SEQ ID NO: 315804 - RNA, 23 nt, Human
ugguuuggggaagggaaaugggu

SEQ ID NO: 315805 - RNA, 18 nt, Human
uguaaccccuuucccugg

SEQ ID NO: 315806 - RNA, 22 nt, Human
uguaaggcagaguucaagacaa

SEQ ID NO: 315807 - RNA, 23 nt, Human
uguaaucaaguauaugccagacc

SEQ ID NO: 315808 - RNA, 22 nt, Human
ugucauaaaacuugggauaggg

SEQ ID NO: 315809 - RNA, 22 nt, Human
ugucauaaaacuugggauaggg

SEQ ID NO: 315810 - RNA, 18 nt, Human
ugucucaacucagcacac

SEQ ID NO: 315811 - RNA, 19 nt, Human
ugugcugggaagacacacu

SEQ ID NO: 315812 - RNA, 18 nt, Human
uguugauuuccucuccca

SEQ ID NO: 315813 - RNA, 20 nt, Human
uuagcugggcaugguggugc

SEQ ID NO: 315814 - RNA, 18 nt, Human
uuaguagagauuggguuu

SEQ ID NO: 315815 - RNA, 22 nt, Human
uuaguagagauuggguuucacc

SEQ ID NO: 315816 - RNA, 24 nt, Human
uuaguagagauuggguuucaccgu

SEQ ID NO: 315817 - RNA, 21 nt, Human
uucaacaaacagguggccacu

SEQ ID NO: 315818 - RNA, 19 nt, Human
uucacaaagcaagucuggc

SEQ ID NO: 315819 - RNA, 24 nt, Human
uucaccaugcagcugcuggcugcu

SEQ ID NO: 315820 - RNA, 21 nt, Human
uucagcuugagcugccugggg

SEQ ID NO: 315821 - RNA, 22 nt, Human
uucauuucucauuagaagcagg

SEQ ID NO: 315822 - RNA, 21 nt, Human
uuccaccaaaacauccauuuc

SEQ ID NO: 315823 - RNA, 21 nt, Human
uuccaccaaaacauccauuuc

SEQ ID NO: 315824 - RNA, 20 nt, Human
uucgugggauccacagacca

SEQ ID NO: 315825 - RNA, 24 nt, Human
uucucccuaaacaaccccaacccc

SEQ ID NO: 315826 - RNA, 19 nt, Human
uucugcucacuccaugccc

SEQ ID NO: 315827 - RNA, 22 nt, Human
uugaaaaauaacaaauuaauga

SEQ ID NO: 315828 - RNA, 23 nt, Human
uugaaaaauaacaaauuaaugaa

SEQ ID NO: 315829 - RNA, 19 nt, Human
uugaaaagcuugcaaauuu

SEQ ID NO: 315830 - RNA, 24 nt, Human
uugaagggggaagauaagugggag

SEQ ID NO: 315831 - RNA, 21 nt, Human
uugagauggagucuugcucug

SEQ ID NO: 315832 - RNA, 24 nt, Human
uugagccugggagguggagguugc

SEQ ID NO: 315833 - RNA, 19 nt, Human
uugcagugagcugagauca

SEQ ID NO: 315834 - RNA, 20 nt, Human
uugcagugagcugagaucac

SEQ ID NO: 315835 - RNA, 24 nt, Human
uugcucugucacccaggcuggagu

SEQ ID NO: 315836 - RNA, 19 nt, Human
uugcugaugacucugauga

SEQ ID NO: 315837 - RNA, 24 nt, Human
uugcuuccugaguggaaccaucua

SEQ ID NO: 315838 - RNA, 23 nt, Human
uugcuugagcccagcagcuucag

SEQ ID NO: 315839 - RNA, 18 nt, Human
uuggaaggcaaggacugg

SEQ ID NO: 315840 - RNA, 24 nt, Human
uuggguuucaccguguuagccagg

SEQ ID NO: 315841 - RNA, 19 nt, Human
uuucaccguguuagccagg

SEQ ID NO: 315842 - RNA, 22 nt, Human
uuucagagggaggaccauggag

SEQ ID NO: 315843 - RNA, 25 nt, Human
uuucucagcccucagaaaucaccuc

SEQ ID NO: 315844 - RNA, 20 nt, Human
uuugcugaugacucugauga

SEQ ID NO: 315845 - RNA, 18 nt, Human
uuugguuggaaggcaagg

SEQ ID NO: 315846 - RNA, 18 nt, Human
uuugguuggaaggcaagg

SEQ ID NO: 315847 - RNA, 24 nt, Human
uuuuuaguagagauuggguuucac

SEQ ID NO: 315848 - RNA, 21 nt, Human
uuuuuguauuuuuaguagaga

SEQ ID NO: 315849 - RNA, 18 nt, Human
uuuuuuguauuuuuagua

SEQ ID NO: 315850 - RNA, 26 nt, Human
aaaaaaccccaaaaguggaaaacuga

SEQ ID NO: 315851 - RNA, 19 nt, Human
aacaauaaaaaaccccaaa

SEQ ID NO: 315852 - RNA, 20 nt, Human
aacaauaaaaaaccccaaaa

SEQ ID NO: 315853 - RNA, 22 nt, Human
aauaacaauaaaaaaccccaaa

SEQ ID NO: 315854 - RNA, 23 nt, Human
aauaacaauaaaaaaccccaaaa

SEQ ID NO: 315855 - RNA, 23 nt, Human
cacgaggagcccugcucauggca

SEQ ID NO: 315856 - RNA, 23 nt, Human
ccaccgccuccgggacgcccgcc

SEQ ID NO: 315857 - RNA, 23 nt, Human
cgccaccgccuccgggacgcccg

SEQ ID NO: 315858 - RNA, 22 nt, Human
cucauggcaccaggccuggccg

SEQ ID NO: 315859 - RNA, 24 nt, Human
cucccugcgccaccgccuccggga

SEQ ID NO: 315860 - RNA, 19 nt, Human
cugcgccaccgccuccggg

SEQ ID NO: 315861 - RNA, 18 nt, Human
uaacaauaaaaaacccca

SEQ ID NO: 315862 - RNA, 20 nt, Human
ucgggccccucccugcgcca

SEQ ID NO: 315863 - RNA, 24 nt, Human
ucgggccccucccugcgccaccgc

SEQ ID NO: 315864 - RNA, 21 nt, Human
ugcucauggcaccaggccugg

SEQ ID NO: 315865 - RNA, 19 nt, Human
uggaaaacugagggggcag

SEQ ID NO: 315866 - RNA, 24 nt, Human
uuaauaacaauaaaaaaccccaaa

SEQ ID NO: 315867 - RNA, 24 nt, Human
uuuuuuuuuuuuuuuuugcaccaa

SEQ ID NO: 315868 - RNA, 27 nt, Human
uuuuuuuuuuuuuuuuuuuuuuugggg

SEQ ID NO: 315869 - RNA, 22 nt, Human
aaaaaaaaaaagaguauguggg

SEQ ID NO: 315870 - RNA, 25 nt, Human
aaaaaacaaaaacaaacaaaaaccc

SEQ ID NO: 315871 - RNA, 23 nt, Human
aaaaaacaaacaaaaaaaacccu

SEQ ID NO: 315872 - RNA, 20 nt, Human
aaaaaacagagcagacauug

SEQ ID NO: 315873 - RNA, 23 nt, Human
aaaaaacagagcagacauuggug

SEQ ID NO: 315874 - RNA, 24 nt, Human
aaaaaaucaaaauaauggccacag

SEQ ID NO: 315875 - RNA, 22 nt, Human
aaaaacaaaaacaaacaaaaac

SEQ ID NO: 315876 - RNA, 20 nt, Human
aaaaacaaacaaaaaccccc

SEQ ID NO: 315877 - RNA, 24 nt, Human
aaaaacauuaaaaaacaaaaacaa

SEQ ID NO: 315878 - RNA, 20 nt, Human
aaaacaaacaaaaaaaaccc

SEQ ID NO: 315879 - RNA, 21 nt, Human
aaaaccccccaaaaacaaaaa

SEQ ID NO: 315880 - RNA, 22 nt, Human
aaaaucagagggugcaugaaua

SEQ ID NO: 315881 - RNA, 25 nt, Human
aaacaaaaaacagagcagacauugg

SEQ ID NO: 315882 - RNA, 27 nt, Human
aaacaaaaacaaacaaaaaccccccaa

SEQ ID NO: 315883 - RNA, 24 nt, Human
aaacaaaaccaaagucauggggaa

SEQ ID NO: 315884 - RNA, 22 nt, Human
aaacaaacaaaaaaaacccuca

SEQ ID NO: 315885 - RNA, 23 nt, Human
aaacaaacaaaaaaaacccucag

SEQ ID NO: 315886 - RNA, 24 nt, Human
aaacaaacaaaaaaaacccucagu

SEQ ID NO: 315887 - RNA, 22 nt, Human
aaacaagaaaaccaaaaucaga

SEQ ID NO: 315888 - RNA, 23 nt, Human
aaacagacaaaucaaguugaagg

SEQ ID NO: 315889 - RNA, 23 nt, Human
aaacagacaagguaacaccaaau

SEQ ID NO: 315890 - RNA, 24 nt, Human
aaaccccccaaaaacaaaaaacag

SEQ ID NO: 315891 - RNA, 18 nt, Human
aaaucaucaucuacuuuc

SEQ ID NO: 315892 - RNA, 23 nt, Human
aaaugacagaagagugagagaaa

SEQ ID NO: 315893 - RNA, 23 nt, Human
aaccauaacuaaaccaagacaca

SEQ ID NO: 315894 - RNA, 24 nt, Human
aaccccccaaaaacaaaaaacaga

SEQ ID NO: 315895 - RNA, 19 nt, Human
aacccucaaaaaacaaaca

SEQ ID NO: 315896 - RNA, 22 nt, Human
aagaaaaccaaaaucagagggu

SEQ ID NO: 315897 - RNA, 21 nt, Human
aagacacacagggcuuuccug

SEQ ID NO: 315898 - RNA, 18 nt, Human
aagggaauggcgagauag

SEQ ID NO: 315899 - RNA, 23 nt, Human
aaguguuaaaauacuauucagcc

SEQ ID NO: 315900 - RNA, 21 nt, Human
aauauaugugcacgcacaugu

SEQ ID NO: 315901 - RNA, 18 nt, Human
aaugcaguuuuggacuga

SEQ ID NO: 315902 - RNA, 20 nt, Human
acaaaaaccccccaaaaaca

SEQ ID NO: 315903 - RNA, 21 nt, Human
acaaaaaccccccaaaaacaa

SEQ ID NO: 315904 - RNA, 20 nt, Human
acaaacaaaaaccccccaaa

SEQ ID NO: 315905 - RNA, 23 nt, Human
acagacuuaaucucuacaucccc

SEQ ID NO: 315906 - RNA, 21 nt, Human
acagucuuaaugauccuuuaa

SEQ ID NO: 315907 - RNA, 21 nt, Human
acauagcagcaaaugacagaa

SEQ ID NO: 315908 - RNA, 18 nt, Human
acugcacucacaguucag

SEQ ID NO: 315909 - RNA, 20 nt, Human
acugcacucacaguucagca

SEQ ID NO: 315910 - RNA, 20 nt, Human
agacagguauuuaaagggaa

SEQ ID NO: 315911 - RNA, 26 nt, Human
aggcagccgcagaucccgcucaggga

SEQ ID NO: 315912 - RNA, 25 nt, Human
aggcauuuucagucuaaucagucuc

SEQ ID NO: 315913 - RNA, 26 nt, Human
agguauagaaauucagcagcuaaacu

SEQ ID NO: 315914 - RNA, 20 nt, Human
agucacaggguuuacaucua

SEQ ID NO: 315915 - RNA, 21 nt, Human
augaaaacagacaagguaaca

SEQ ID NO: 315916 - RNA, 24 nt, Human
auguaucuauauauaaaauauaca

SEQ ID NO: 315917 - RNA, 19 nt, Human
augucaaauuuuagucauc

SEQ ID NO: 315918 - RNA, 25 nt, Human
caaaaacaaacaaaaaccccccaaa

SEQ ID NO: 315919 - RNA, 22 nt, Human
caaaaaccccccaaaaacaaag

SEQ ID NO: 315920 - RNA, 21 nt, Human
caaacaaaaaccccccaaaaa

SEQ ID NO: 315921 - RNA, 24 nt, Human
caaacaaaaaccccccaaaaacaa

SEQ ID NO: 315922 - RNA, 25 nt, Human
caaacaaaaaccccccaaaaacaaa

SEQ ID NO: 315923 - RNA, 21 nt, Human
caagaaaaccaaaaucagagg

SEQ ID NO: 315924 - RNA, 19 nt, Human
caagguaacaccaaauagu

SEQ ID NO: 315925 - RNA, 22 nt, Human
cacaacgaccccgacgccagag

SEQ ID NO: 315926 - RNA, 21 nt, Human
cacgacacaacgaccccgacg

SEQ ID NO: 315927 - RNA, 18 nt, Human
cacugcugcuacucaaac

SEQ ID NO: 315928 - RNA, 24 nt, Human
cagaaaaugcaacaguaacucuua

SEQ ID NO: 315929 - RNA, 22 nt, Human
cagaaacaagaaaaccaaaauc

SEQ ID NO: 315930 - RNA, 19 nt, Human
cagcagagacucgcaggca

SEQ ID NO: 315931 - RNA, 18 nt, Human
cagcagcuaaacuguauu

SEQ ID NO: 315932 - RNA, 26 nt, Human
cagccuaaaaccccacugagcaugcu

SEQ ID NO: 315933 - RNA, 21 nt, Human
ccaaaaacaaaaaacagagca

SEQ ID NO: 315934 - RNA, 19 nt, Human
cccaaaaacaaaaaacaga

SEQ ID NO: 315935 - RNA, 25 nt, Human
cccaaaaacaaaaaacagagcagac

SEQ ID NO: 315936 - RNA, 23 nt, Human
ccccaaagauauuguuuaacuuc

SEQ ID NO: 315937 - RNA, 21 nt, Human
cccccaaaaacaaaaaacaga

SEQ ID NO: 315938 - RNA, 18 nt, Human
ccccccaaaaacaaaaaa

SEQ ID NO: 315939 - RNA, 24 nt, Human
cccucaaaaaacaaacaaaaaaaa

SEQ ID NO: 315940 - RNA, 28 nt, Human
cccucaaaaaacaaacaaaaaaaacccu

SEQ ID NO: 315941 - RNA, 19 nt, Human
ccgcucagggcuaaagcgg

SEQ ID NO: 315942 - RNA, 21 nt, Human
ccuauagcacugcugcuacuc

SEQ ID NO: 315943 - RNA, 22 nt, Human
ccucaaaaaacaaacaaaaaaa

SEQ ID NO: 315944 - RNA, 25 nt, Human
ccuuggcuagaacugaaccgggguc

SEQ ID NO: 315945 - RNA, 20 nt, Human
cgacacaacgaccccgacgc

SEQ ID NO: 315946 - RNA, 18 nt, Human
cgcgcacccuuagccccu

SEQ ID NO: 315947 - RNA, 21 nt, Human
cuaaaaaccagaaaaugaguu

SEQ ID NO: 315948 - RNA, 22 nt, Human
cuaaaaccccacugagcaugcc

SEQ ID NO: 315949 - RNA, 25 nt, Human
cucaaaaaacaaacaaaaaaaaccc

SEQ ID NO: 315950 - RNA, 20 nt, Human
cuccuaauguggugacaguc

SEQ ID NO: 315951 - RNA, 27 nt, Human
cucucaugcaaagaaaacccucaaaaa

SEQ ID NO: 315952 - RNA, 23 nt, Human
cugaacauucagaucugucucuc

SEQ ID NO: 315953 - RNA, 21 nt, Human
cugcaugugacagccuaaaac

SEQ ID NO: 315954 - RNA, 19 nt, Human
cugcugccucggaaacggc

SEQ ID NO: 315955 - RNA, 19 nt, Human
cuuguaaacacaaagaaac

SEQ ID NO: 315956 - RNA, 23 nt, Human
gaaaaauguaaacaaaaccaaag

SEQ ID NO: 315957 - RNA, 19 nt, Human
gaaaacacaaaaagaauca

SEQ ID NO: 315958 - RNA, 24 nt, Human
gaaaacagacaagguaacaccaaa

SEQ ID NO: 315959 - RNA, 19 nt, Human
gaaaacccucaaaaaacaa

SEQ ID NO: 315960 - RNA, 23 nt, Human
gagaaaaaguucaguccuuuccu

SEQ ID NO: 315961 - RNA, 24 nt, Human
ggaaaaaauuccaccuaauucuua

SEQ ID NO: 315962 - RNA, 21 nt, Human
ggcacagcagagacucgcagg

SEQ ID NO: 315963 - RNA, 21 nt, Human
gggaaaaauguaaacaaaacc

SEQ ID NO: 315964 - RNA, 18 nt, Human
uaacuugaaucauaaugg

SEQ ID NO: 315965 - RNA, 22 nt, Human
uaagcacagaaagugauacuga

SEQ ID NO: 315966 - RNA, 21 nt, Human
uaagcuguucaauaaaagccu

SEQ ID NO: 315967 - RNA, 19 nt, Human
uaaugcaguuuuggacuga

SEQ ID NO: 315968 - RNA, 29 nt, Human
uaccaaaaacauuaaaaaacaaaaacaaa

SEQ ID NO: 315969 - RNA, 21 nt, Human
uagaaaacacaaaaagaauca

SEQ ID NO: 315970 - RNA, 21 nt, Human
uagaagauugugugcguaugu

SEQ ID NO: 315971 - RNA, 22 nt, Human
uaggaaagaaaagcaggagguu

SEQ ID NO: 315972 - RNA, 23 nt, Human
uaggucagaaaaugcaacaguaa

SEQ ID NO: 315973 - RNA, 23 nt, Human
uaucucauucaaaaaaucaaaau

SEQ ID NO: 315974 - RNA, 23 nt, Human
uaugugcacgcacauguacagac

SEQ ID NO: 315975 - RNA, 19 nt, Human
uauuuuuuuaaaaaacugc

SEQ ID NO: 315976 - RNA, 23 nt, Human
ucgcugcuuggcgugggguccgc

SEQ ID NO: 315977 - RNA, 23 nt, Human
ucuaaaaaccagaaaaugaguuu

SEQ ID NO: 315978 - RNA, 19 nt, Human
ucuacaaaaaaaaaaaaaa

SEQ ID NO: 315979 - RNA, 23 nt, Human
ugaaaacagacaagguaacacca

SEQ ID NO: 315980 - RNA, 27 nt, Human
ugaaaacagacaagguaacaccaaaua

SEQ ID NO: 315981 - RNA, 21 nt, Human
ugaaaauaaauuaguuccccc

SEQ ID NO: 315982 - RNA, 22 nt, Human
ugaacauucagaucugucucuc

SEQ ID NO: 315983 - RNA, 22 nt, Human
ugaaggaaaaaauuccaccuaa

SEQ ID NO: 315984 - RNA, 21 nt, Human
ugacagccuaaaaccccacug

SEQ ID NO: 315985 - RNA, 23 nt, Human
ugacagccuaaaaccccacugag

SEQ ID NO: 315986 - RNA, 21 nt, Human
uggaaaggaguaggaaagaaa

SEQ ID NO: 315987 - RNA, 18 nt, Human
uggggaaaaaagcuaguu

SEQ ID NO: 315988 - RNA, 23 nt, Human
uguaaacacaaagaaacucaaca

SEQ ID NO: 315989 - RNA, 23 nt, Human
uguagaaaacacaaaaagaauca

SEQ ID NO: 315990 - RNA, 27 nt, Human
uguagaaaacacaaaaagaaucaacug

SEQ ID NO: 315991 - RNA, 19 nt, Human
uugaaggaaaaaauuccac

SEQ ID NO: 315992 - RNA, 25 nt, Human
uugguacuuaagucaugaauuguga

SEQ ID NO: 315993 - RNA, 22 nt, Human
aaaaaagaaaacagcaagauga

SEQ ID NO: 315994 - RNA, 23 nt, Human
aaaaaagaaaacagcaagaugaa

SEQ ID NO: 315995 - RNA, 18 nt, Human
aaaaacacaaaauaaccu

SEQ ID NO: 315996 - RNA, 22 nt, Human
aaaacaaguauaauacaaaaca

SEQ ID NO: 315997 - RNA, 26 nt, Human
aaacagcaagaugaaaauaggcaagg

SEQ ID NO: 315998 - RNA, 20 nt, Human
aaaccaacuuaaaaacacaa

SEQ ID NO: 315999 - RNA, 19 nt, Human
aaagguuauuuagcuuuuc

SEQ ID NO: 316000 - RNA, 22 nt, Human
aagcauucuauaacaagaaccc

SEQ ID NO: 316001 - RNA, 18 nt, Human
aaggaagaagggaacuga

SEQ ID NO: 316002 - RNA, 23 nt, Human
aaggaagaagggaacugaaaaag

SEQ ID NO: 316003 - RNA, 24 nt, Human
aauaauagaagcaacauucuggga

SEQ ID NO: 316004 - RNA, 18 nt, Human
aauucugucacugcagag

SEQ ID NO: 316005 - RNA, 20 nt, Human
acaauaauagaagcaacauu

SEQ ID NO: 316006 - RNA, 24 nt, Human
accauuaacacagcuuuccaucac

SEQ ID NO: 316007 - RNA, 23 nt, Human
agaaauaauuuccccaggaaaga

SEQ ID NO: 316008 - RNA, 21 nt, Human
agaccccaacacuaaauucuc

SEQ ID NO: 316009 - RNA, 27 nt, Human
agaguggaccaucuuaugaggccaaaa

SEQ ID NO: 316010 - RNA, 18 nt, Human
agcaagaugaaaauaggc

SEQ ID NO: 316011 - RNA, 20 nt, Human
aggaagaagggaacugaaaa

SEQ ID NO: 316012 - RNA, 26 nt, Human
aggucucaaaagcucaaaucuaaacc

SEQ ID NO: 316013 - RNA, 19 nt, Human
aucagaccucccacuccuc

SEQ ID NO: 316014 - RNA, 20 nt, Human
auuuuuuuaaaaaaaagaaa

SEQ ID NO: 316015 - RNA, 19 nt, Human
caagcaucacaucaaaaaa

SEQ ID NO: 316016 - RNA, 22 nt, Human
cacaaaaacaaguauaauacaa

SEQ ID NO: 316017 - RNA, 24 nt, Human
cagagcccuuuguguauacuuuuc

SEQ ID NO: 316018 - RNA, 22 nt, Human
cagcaagaugaaaauaggcaag

SEQ ID NO: 316019 - RNA, 18 nt, Human
caggucucaaaagcucaa

SEQ ID NO: 316020 - RNA, 20 nt, Human
caugacaugaagucccuacg

SEQ ID NO: 316021 - RNA, 18 nt, Human
cauggcacaucacacaug

SEQ ID NO: 316022 - RNA, 19 nt, Human
cauucuuaaagguuauuua

SEQ ID NO: 316023 - RNA, 22 nt, Human
ccaacacuaaauucucaagugu

SEQ ID NO: 316024 - RNA, 22 nt, Human
cccaacaugaaagcuaguggau

SEQ ID NO: 316025 - RNA, 24 nt, Human
ccccaggaaagaauuguaaaaccc

SEQ ID NO: 316026 - RNA, 27 nt, Human
ccucccacuccucugacuugagcuuca

SEQ ID NO: 316027 - RNA, 25 nt, Human
cgucaagcaucacaucaaaaaagug

SEQ ID NO: 316028 - RNA, 19 nt, Human
cucaaugguugugcacaau

SEQ ID NO: 316029 - RNA, 18 nt, Human
cuguacagaccccaacac

SEQ ID NO: 316030 - RNA, 21 nt, Human
cuguacagaccccaacacuaa

SEQ ID NO: 316031 - RNA, 18 nt, Human
cuucuuucuccaauacca

SEQ ID NO: 316032 - RNA, 18 nt, Human
cuuuuuuuuuuuuuuuug

SEQ ID NO: 316033 - RNA, 24 nt, Human
gaaggaagaagggaacugaaaaag

SEQ ID NO: 316034 - RNA, 20 nt, Human
gauuugcuuaaacuuucccc

SEQ ID NO: 316035 - RNA, 24 nt, Human
ggaaagaauuguaaaaccaacuua

SEQ ID NO: 316036 - RNA, 18 nt, Human
ggcggacccuaaaagcca

SEQ ID NO: 316037 - RNA, 18 nt, Human
uacaguagaaaaguaugg

SEQ ID NO: 316038 - RNA, 18 nt, Human
uaccaagcauucuauaac

SEQ ID NO: 316039 - RNA, 22 nt, Human
uaggcagagaggcggcggaccc

SEQ ID NO: 316040 - RNA, 18 nt, Human
uaugacaagucaagacca

SEQ ID NO: 316041 - RNA, 24 nt, Human
uaugcacacacaaaaacaaguaua

SEQ ID NO: 316042 - RNA, 18 nt, Human
uauuuagcuuuucuccac

SEQ ID NO: 316043 - RNA, 24 nt, Human
ucaccaucagccauccuuccucaa

SEQ ID NO: 316044 - RNA, 25 nt, Human
ucagccauccuuccucaacuuuucc

SEQ ID NO: 316045 - RNA, 25 nt, Human
uccaccaacaaugaucagaccuccc

SEQ ID NO: 316046 - RNA, 22 nt, Human
uccauagccaggucucaaaagc

SEQ ID NO: 316047 - RNA, 18 nt, Human
uccaucaccaucagccau

SEQ ID NO: 316048 - RNA, 24 nt, Human
uccauuuuuuuaaaaaaaagaaaa

SEQ ID NO: 316049 - RNA, 18 nt, Human
uccuagugucgggccuca

SEQ ID NO: 316050 - RNA, 24 nt, Human
ucuaaaccuacugauggaguagca

SEQ ID NO: 316051 - RNA, 19 nt, Human
ucuauaacaagaacccaag

SEQ ID NO: 316052 - RNA, 24 nt, Human
ucuauaccaagcauucuauaacaa

SEQ ID NO: 316053 - RNA, 19 nt, Human
ucuaugugcaagguacugg

SEQ ID NO: 316054 - RNA, 21 nt, Human
ucuccaauaccacccacauuc

SEQ ID NO: 316055 - RNA, 18 nt, Human
ucuuuuuuuuuuuuuuuu

SEQ ID NO: 316056 - RNA, 20 nt, Human
ucuuuuuuuuuuuuuuuugu

SEQ ID NO: 316057 - RNA, 22 nt, Human
ugacaguuugaucacaaaguca

SEQ ID NO: 316058 - RNA, 22 nt, Human
ugagagggaaggaagaagggaa

SEQ ID NO: 316059 - RNA, 18 nt, Human
ugaggccaaaaacccaug

SEQ ID NO: 316060 - RNA, 18 nt, Human
ugaguuaccagaugacca

SEQ ID NO: 316061 - RNA, 26 nt, Human
ugauuuuuuauagaucacaucugaac

SEQ ID NO: 316062 - RNA, 23 nt, Human
ugcacacacaaaaacaaguauaa

SEQ ID NO: 316063 - RNA, 24 nt, Human
ugcagaaaaaugagucaccuucaa

SEQ ID NO: 316064 - RNA, 20 nt, Human
ugcauucucguaacaccucu

SEQ ID NO: 316065 - RNA, 19 nt, Human
ugcauugagaauccuagug

SEQ ID NO: 316066 - RNA, 22 nt, Human
uggauucuugcauugagaaucc

SEQ ID NO: 316067 - RNA, 23 nt, Human
uuaaaaaaaagaaaacagcaaga

SEQ ID NO: 316068 - RNA, 19 nt, Human
uuacuugauccuucaaagc

SEQ ID NO: 316069 - RNA, 19 nt, Human
uuccccuccagaaauaauu

SEQ ID NO: 316070 - RNA, 23 nt, Human
uugauucuccggagcuauaauuc

SEQ ID NO: 316071 - RNA, 19 nt, Human
uuguaucaaacacauuuau

SEQ ID NO: 316072 - RNA, 26 nt, Human
uuuaaaaaaaagaaaacagcaagaug

SEQ ID NO: 316073 - RNA, 22 nt, Human
uuuaugcacacacaaaaacaag

SEQ ID NO: 316074 - RNA, 18 nt, Human
aaauuguaagagugggga

SEQ ID NO: 316075 - RNA, 25 nt, Human
aaugacaggaggcgcagcuuaggug

SEQ ID NO: 316076 - RNA, 19 nt, Human
accccaccacccugcccca

SEQ ID NO: 316077 - RNA, 23 nt, Human
acccugccccaacucauuacaca

SEQ ID NO: 316078 - RNA, 19 nt, Human
accuaccccaccacccugc

SEQ ID NO: 316079 - RNA, 25 nt, Human
agacaagugacucagacguuucaag

SEQ ID NO: 316080 - RNA, 18 nt, Human
agcagggaaaugacagga

SEQ ID NO: 316081 - RNA, 22 nt, Human
caaccugcgggggaccucucgg

SEQ ID NO: 316082 - RNA, 19 nt, Human
cacaacucggccuucuggc

SEQ ID NO: 316083 - RNA, 24 nt, Human
cacaacucggccuucuggccaccu

SEQ ID NO: 316084 - RNA, 19 nt, Human
caccacccugccccaacuc

SEQ ID NO: 316085 - RNA, 26 nt, Human
caccugaggcuacuuuuuagacaagu

SEQ ID NO: 316086 - RNA, 23 nt, Human
ccaugcaccuaccccaccacccu

SEQ ID NO: 316087 - RNA, 21 nt, Human
cccaccacccugccccaacuc

SEQ ID NO: 316088 - RNA, 22 nt, Human
cccagagggcccacccucccau

SEQ ID NO: 316089 - RNA, 20 nt, Human
cccaugcaccuaccccacca

SEQ ID NO: 316090 - RNA, 18 nt, Human
ccccaccacccugcccca

SEQ ID NO: 316091 - RNA, 20 nt, Human
ccccagagggcccacccucc

SEQ ID NO: 316092 - RNA, 20 nt, Human
cccuacccuugguucgccac

SEQ ID NO: 316093 - RNA, 23 nt, Human
ccgccggccgucggaagaugagg

SEQ ID NO: 316094 - RNA, 24 nt, Human
ccuaccccaccacccugccccaac

SEQ ID NO: 316095 - RNA, 21 nt, Human
ccuagcaggaggacuugggcc

SEQ ID NO: 316096 - RNA, 25 nt, Human
cgacagcucccuccgugcucagaag

SEQ ID NO: 316097 - RNA, 19 nt, Human
cgaccccgcgacagcuccc

SEQ ID NO: 316098 - RNA, 18 nt, Human
cgggggaccucucggccc

SEQ ID NO: 316099 - RNA, 19 nt, Human
cuccccagagggcccaccc

SEQ ID NO: 316100 - RNA, 22 nt, Human
cuccccagagggcccacccucc

SEQ ID NO: 316101 - RNA, 25 nt, Human
gaguccuuguccagguccuccgcuu

SEQ ID NO: 316102 - RNA, 23 nt, Human
gcaaaacaagcugcuugggccuc

SEQ ID NO: 316103 - RNA, 21 nt, Human
ggaaaugacaggaggcgcagc

SEQ ID NO: 316104 - RNA, 23 nt, Human
ggggaccucucggcccggugcgc

SEQ ID NO: 316105 - RNA, 22 nt, Human
uaaagaaauuguaagagugggg

SEQ ID NO: 316106 - RNA, 24 nt, Human
uacagagacacauucaggacacau

SEQ ID NO: 316107 - RNA, 22 nt, Human
uaccccaccacccugccccaac

SEQ ID NO: 316108 - RNA, 22 nt, Human
uacccuugguucgccaccuugc

SEQ ID NO: 316109 - RNA, 18 nt, Human
ucccaugcaccuacccca

SEQ ID NO: 316110 - RNA, 24 nt, Human
ucccaugcaccuaccccaccaccc

SEQ ID NO: 316111 - RNA, 20 nt, Human
ucccuccgugcucagaagcc

SEQ ID NO: 316112 - RNA, 20 nt, Human
uccgcuaugggcuaaagguu

SEQ ID NO: 316113 - RNA, 18 nt, Human
uccugaggaggcauccgc

SEQ ID NO: 316114 - RNA, 18 nt, Human
uccugaggaggcauccgc

SEQ ID NO: 316115 - RNA, 21 nt, Human
ugacaggaggcgcagcuuagg

SEQ ID NO: 316116 - RNA, 19 nt, Human
ugcaccuaccccaccaccc

SEQ ID NO: 316117 - RNA, 19 nt, Human
ugguucgccaccuugcucc

SEQ ID NO: 316118 - RNA, 22 nt, Human
ugguucgccaccuugcuccucg

SEQ ID NO: 316119 - RNA, 21 nt, Human
uguggaggcuccagguggccg

SEQ ID NO: 316120 - RNA, 18 nt, Human
uugggccuccccagaggg

SEQ ID NO: 316121 - RNA, 21 nt, Human
auugccauuggguuugugacu

SEQ ID NO: 316122 - RNA, 19 nt, Human
cugaaaaugguguguggcg

SEQ ID NO: 316123 - RNA, 24 nt, Human
uagugacgaccucaggagcaacag

SEQ ID NO: 316124 - RNA, 20 nt, Human
ucagugccuuuauugccauu

SEQ ID NO: 316125 - RNA, 24 nt, Human
ugccuuuauugccauuggguuugu

SEQ ID NO: 316126 - RNA, 24 nt, Human
uugauauagugacgaccucaggag

SEQ ID NO: 316127 - RNA, 23 nt, Human
aaaaacagguaaauuucaaacaa

SEQ ID NO: 316128 - RNA, 23 nt, Human
aaaaauuccucuuagagacacca

SEQ ID NO: 316129 - RNA, 21 nt, Human
aaaaggccuauuacacaaaug

SEQ ID NO: 316130 - RNA, 18 nt, Human
aaacugacaucuaaaaau

SEQ ID NO: 316131 - RNA, 20 nt, Human
aaauaaguaauacuucuucu

SEQ ID NO: 316132 - RNA, 21 nt, Human
aacaggaaggacaaaagagaa

SEQ ID NO: 316133 - RNA, 21 nt, Human
aaccacugacccaaggaaaca

SEQ ID NO: 316134 - RNA, 18 nt, Human
aacucugucagguuuacu

SEQ ID NO: 316135 - RNA, 23 nt, Human
aagaaaaacagguaaauuucaaa

SEQ ID NO: 316136 - RNA, 21 nt, Human
aagccuucuuuuugaucaaac

SEQ ID NO: 316137 - RNA, 19 nt, Human
aagugccgcacgagggaug

SEQ ID NO: 316138 - RNA, 18 nt, Human
aaucccacccuucuccau

SEQ ID NO: 316139 - RNA, 24 nt, Human
aaucgaccaacugagggauccaca

SEQ ID NO: 316140 - RNA, 22 nt, Human
aaucuuuuccuuuuuaauuuga

SEQ ID NO: 316141 - RNA, 20 nt, Human
accacugacccaaggaaaca

SEQ ID NO: 316142 - RNA, 18 nt, Human
acccgugaguucuuccuc

SEQ ID NO: 316143 - RNA, 20 nt, Human
accugccaggaaggggccag

SEQ ID NO: 316144 - RNA, 22 nt, Human
acuguaaccucuacagcucugg

SEQ ID NO: 316145 - RNA, 20 nt, Human
agaaagaaaggagguagugg

SEQ ID NO: 316146 - RNA, 21 nt, Human
agaaaggagguaguggaaggc

SEQ ID NO: 316147 - RNA, 22 nt, Human
agacaagugcagcauggacccg

SEQ ID NO: 316148 - RNA, 22 nt, Human
agacaagugcagcauggacccg

SEQ ID NO: 316149 - RNA, 18 nt, Human
agagggaugcggggcuug

SEQ ID NO: 316150 - RNA, 18 nt, Human
aggacaaaagagaaaagc

SEQ ID NO: 316151 - RNA, 20 nt, Human
agggauccacauccucuggg

SEQ ID NO: 316152 - RNA, 18 nt, Human
agguaguggaaggccuag

SEQ ID NO: 316153 - RNA, 21 nt, Human
aguagaggacaguacucugga

SEQ ID NO: 316154 - RNA, 20 nt, Human
aucaauguuuccuaacuuug

SEQ ID NO: 316155 - RNA, 18 nt, Human
aucacccuuccaccccau

SEQ ID NO: 316156 - RNA, 23 nt, Human
aucccacccuucuccaugaccaa

SEQ ID NO: 316157 - RNA, 21 nt, Human
aucuugcgucucccccuccca

SEQ ID NO: 316158 - RNA, 22 nt, Human
augaaaaggccuauuacacaaa

SEQ ID NO: 316159 - RNA, 19 nt, Human
caaacugacaucuaaaaau

SEQ ID NO: 316160 - RNA, 18 nt, Human
caacaggaaggacaaaag

SEQ ID NO: 316161 - RNA, 22 nt, Human
caacaggaaggacaaaagagaa

SEQ ID NO: 316162 - RNA, 24 nt, Human
caaugguaaggguagaaauccgcu

SEQ ID NO: 316163 - RNA, 27 nt, Human
caccccauucccacccaaucccacccu

SEQ ID NO: 316164 - RNA, 23 nt, Human
cacccuuccaccccauucccacc

SEQ ID NO: 316165 - RNA, 20 nt, Human
cacccuucuccaugaccaaa

SEQ ID NO: 316166 - RNA, 21 nt, Human
cacgagggaugcagcaaccac

SEQ ID NO: 316167 - RNA, 21 nt, Human
cagcaaacaguuuuuccucaa

SEQ ID NO: 316168 - RNA, 24 nt, Human
cagcagaaaaguaaaaaaagagcc

SEQ ID NO: 316169 - RNA, 21 nt, Human
cagcgggaggcuagagccgga

SEQ ID NO: 316170 - RNA, 18 nt, Human
cagcucuggauucaaccu

SEQ ID NO: 316171 - RNA, 19 nt, Human
cagcuuaacugcagaauuc

SEQ ID NO: 316172 - RNA, 24 nt, Human
cagcuuaacugcagaauucuaagc

SEQ ID NO: 316173 - RNA, 25 nt, Human
cagcuuaacugcagaauucuaagcc

SEQ ID NO: 316174 - RNA, 22 nt, Human
caggaaggggccagaugcgaug

SEQ ID NO: 316175 - RNA, 20 nt, Human
caggagacauucugaaagac

SEQ ID NO: 316176 - RNA, 20 nt, Human
cagucuauugaaaaggauau

SEQ ID NO: 316177 - RNA, 20 nt, Human
caguuccugggccugggcuc

SEQ ID NO: 316178 - RNA, 26 nt, Human
caucuuuauuuguaauauaaugggga

SEQ ID NO: 316179 - RNA, 22 nt, Human
ccaaauaaguaauacuucuucu

SEQ ID NO: 316180 - RNA, 21 nt, Human
ccacccaaucccacccuucuc

SEQ ID NO: 316181 - RNA, 21 nt, Human
ccacccuucuccaugaccaaa

SEQ ID NO: 316182 - RNA, 18 nt, Human
ccacucuagcccuggccg

SEQ ID NO: 316183 - RNA, 20 nt, Human
ccagauggcaguggcaauca

SEQ ID NO: 316184 - RNA, 26 nt, Human
ccaucuugcgucucccccucccauuu

SEQ ID NO: 316185 - RNA, 18 nt, Human
cccaucacccuuccaccc

SEQ ID NO: 316186 - RNA, 20 nt, Human
cccaucacccuuccacccca

SEQ ID NO: 316187 - RNA, 21 nt, Human
cccauucccacccaaucccac

SEQ ID NO: 316188 - RNA, 22 nt, Human
ccccaaggcuggugaugcuacu

SEQ ID NO: 316189 - RNA, 18 nt, Human
cccccaaccccggguuuc

SEQ ID NO: 316190 - RNA, 20 nt, Human
cccccaaccccggguuucuu

SEQ ID NO: 316191 - RNA, 19 nt, Human
cccccaaggcuggugaugc

SEQ ID NO: 316192 - RNA, 23 nt, Human
cccggguuucuucaguuccuggg

SEQ ID NO: 316193 - RNA, 18 nt, Human
cccuaagcacgccgggaa

SEQ ID NO: 316194 - RNA, 21 nt, Human
ccgggccacucuagcccuggc

SEQ ID NO: 316195 - RNA, 20 nt, Human
ccgugaguucuuccucuucc

SEQ ID NO: 316196 - RNA, 18 nt, Human
ccucaaaaccacugaccc

SEQ ID NO: 316197 - RNA, 19 nt, Human
ccucaaugguaaggguaga

SEQ ID NO: 316198 - RNA, 22 nt, Human
ccucccauuuggcgcgcccuaa

SEQ ID NO: 316199 - RNA, 25 nt, Human
ccuccucaaugguaaggguagaaau

SEQ ID NO: 316200 - RNA, 23 nt, Human
ccuuccagcccaggcuagcuccc

SEQ ID NO: 316201 - RNA, 19 nt, Human
cgcacacauggaaaguuuu

SEQ ID NO: 316202 - RNA, 20 nt, Human
cgcccggcccggugcagcaa

SEQ ID NO: 316203 - RNA, 19 nt, Human
cggcccggugcagcaaaca

SEQ ID NO: 316204 - RNA, 20 nt, Human
cggcccggugcagcaaacag

SEQ ID NO: 316205 - RNA, 23 nt, Human
cgggacguacaggaaggggccag

SEQ ID NO: 316206 - RNA, 18 nt, Human
cgggaggcuagagccgga

SEQ ID NO: 316207 - RNA, 21 nt, Human
cguaaguucgggccaaggccu

SEQ ID NO: 316208 - RNA, 18 nt, Human
cuaguucauuagcucccc

SEQ ID NO: 316209 - RNA, 20 nt, Human
cuccccaucacccuuccacc

SEQ ID NO: 316210 - RNA, 22 nt, Human
cuccccaucacccuuccacccc

SEQ ID NO: 316211 - RNA, 24 nt, Human
cucccccucccauuuggcgcgccc

SEQ ID NO: 316212 - RNA, 28 nt, Human
cucgaagcgcuccggcgacuggcuaauc

SEQ ID NO: 316213 - RNA, 19 nt, Human
cucugaauaacaagagcuc

SEQ ID NO: 316214 - RNA, 19 nt, Human
cuguggcagacagacaagu

SEQ ID NO: 316215 - RNA, 22 nt, Human
cugugucuauggcaccagucac

SEQ ID NO: 316216 - RNA, 20 nt, Human
cuuccucuuccucuuugguc

SEQ ID NO: 316217 - RNA, 24 nt, Human
gaaaaacagguaaauuucaaacaa

SEQ ID NO: 316218 - RNA, 23 nt, Human
gaaaaguaaaaaaagagccgccc

SEQ ID NO: 316219 - RNA, 21 nt, Human
gagcccccaaccccggguuuc

SEQ ID NO: 316220 - RNA, 21 nt, Human
gaugcagcaaccacagaggga

SEQ ID NO: 316221 - RNA, 19 nt, Human
gcucgggacguacaggaag

SEQ ID NO: 316222 - RNA, 18 nt, Human
gcuugugagguuccaacc

SEQ ID NO: 316223 - RNA, 22 nt, Human
ggacccgagagcaagacuggug

SEQ ID NO: 316224 - RNA, 22 nt, Human
ggacccgagagcaagacuggug

SEQ ID NO: 316225 - RNA, 18 nt, Human
ggacuuggaaggauagug

SEQ ID NO: 316226 - RNA, 19 nt, Human
ggcccggugcagcaaacag

SEQ ID NO: 316227 - RNA, 23 nt, Human
gggccagaugcgaugcuccacgg

SEQ ID NO: 316228 - RNA, 19 nt, Human
gggccggggcuggcucgag

SEQ ID NO: 316229 - RNA, 24 nt, Human
ggguuucucccaaauaaguaauac

SEQ ID NO: 316230 - RNA, 24 nt, Human
ggguuucucccaaauaaguaauac

SEQ ID NO: 316231 - RNA, 23 nt, Human
gguaguggaaggccuaggaaaga

SEQ ID NO: 316232 - RNA, 20 nt, Human
guaaguucgggccaaggccu

SEQ ID NO: 316233 - RNA, 18 nt, Human
uaaaaaaagagccgcccu

SEQ ID NO: 316234 - RNA, 18 nt, Human
uaaaaagcuacacauaaa

SEQ ID NO: 316235 - RNA, 20 nt, Human
uaaaaagcuacacauaaagc

SEQ ID NO: 316236 - RNA, 20 nt, Human
uaaaaagcuacacauaaagc

SEQ ID NO: 316237 - RNA, 22 nt, Human
uaaagguuacagguaaaaagcu

SEQ ID NO: 316238 - RNA, 20 nt, Human
uaaccucuacagcucuggau

SEQ ID NO: 316239 - RNA, 20 nt, Human
uaagaaacuucagcaggagg

SEQ ID NO: 316240 - RNA, 22 nt, Human
uaagaagccuuucucuacaaug

SEQ ID NO: 316241 - RNA, 21 nt, Human
uaagugagcgccuuugagccc

SEQ ID NO: 316242 - RNA, 20 nt, Human
uacaugguuaggaugccagg

SEQ ID NO: 316243 - RNA, 20 nt, Human
uaccugccaggaaggggccg

SEQ ID NO: 316244 - RNA, 20 nt, Human
uacuguaaccucuacagcuc

SEQ ID NO: 316245 - RNA, 19 nt, Human
uagacaagugcagcaugga

SEQ ID NO: 316246 - RNA, 19 nt, Human
uagacaagugcagcaugga

SEQ ID NO: 316247 - RNA, 24 nt, Human
uagagacaccaguuacuuccaaac

SEQ ID NO: 316248 - RNA, 23 nt, Human
uagcuccccaucacccuuccacc

SEQ ID NO: 316249 - RNA, 20 nt, Human
uaggaugccaggagacauuc

SEQ ID NO: 316250 - RNA, 22 nt, Human
uaggaugccaggagacauucug

SEQ ID NO: 316251 - RNA, 21 nt, Human
uagugaauauaaauuaggcuc

SEQ ID NO: 316252 - RNA, 26 nt, Human
uauuucaaccccacccccaauuguca

SEQ ID NO: 316253 - RNA, 20 nt, Human
ucaaaggggcugccuaagug

SEQ ID NO: 316254 - RNA, 18 nt, Human
ucaaugguaaagucacac

SEQ ID NO: 316255 - RNA, 18 nt, Human
ucaaugguaaagucacac

SEQ ID NO: 316256 - RNA, 22 nt, Human
ucaaugguaaagucacacaaau

SEQ ID NO: 316257 - RNA, 22 nt, Human
ucaaugguaaagucacacaaau

SEQ ID NO: 316258 - RNA, 21 nt, Human
ucauauccuuugaaaacugcc

SEQ ID NO: 316259 - RNA, 27 nt, Human
uccaaacaaaucuuuuccuuuuuaauu

SEQ ID NO: 316260 - RNA, 22 nt, Human
uccaacaggaaggacaaaagag

SEQ ID NO: 316261 - RNA, 22 nt, Human
uccaccccauucccacccaauc

SEQ ID NO: 316262 - RNA, 20 nt, Human
uccagauuucccuccucaau

SEQ ID NO: 316263 - RNA, 18 nt, Human
ucccacccaaucccaccc

SEQ ID NO: 316264 - RNA, 23 nt, Human
ucccacccuucuccaugaccaaa

SEQ ID NO: 316265 - RNA, 22 nt, Human
ucuaaaaauuccucuuagagac

SEQ ID NO: 316266 - RNA, 18 nt, Human
ucuucaguuccugggccu

SEQ ID NO: 316267 - RNA, 21 nt, Human
ucuucaguuccugggccuggg

SEQ ID NO: 316268 - RNA, 22 nt, Human
ucuuuggucuuugaauguccag

SEQ ID NO: 316269 - RNA, 23 nt, Human
ugaaaaggauauaagaagccuuu

SEQ ID NO: 316270 - RNA, 23 nt, Human
ugaaaaggccuauuacacaaaug

SEQ ID NO: 316271 - RNA, 18 nt, Human
ugaauauaaauuaggcuc

SEQ ID NO: 316272 - RNA, 19 nt, Human
ugagagacaaauucacagc

SEQ ID NO: 316273 - RNA, 18 nt, Human
ugagaucuauggcaaccc

SEQ ID NO: 316274 - RNA, 24 nt, Human
ugagggauccacauccucuggguu

SEQ ID NO: 316275 - RNA, 21 nt, Human
ugaggggggaaagagccucca

SEQ ID NO: 316276 - RNA, 19 nt, Human
ugaucaaacugagaucuau

SEQ ID NO: 316277 - RNA, 20 nt, Human
ugaucaaacugagaucuaug

SEQ ID NO: 316278 - RNA, 26 nt, Human
ugccaggaaggggccagaugacccag

SEQ ID NO: 316279 - RNA, 23 nt, Human
ugccaggaaggggccagaugcga

SEQ ID NO: 316280 - RNA, 19 nt, Human
uggaaaguuuuucucccua

SEQ ID NO: 316281 - RNA, 20 nt, Human
uggaccucaaaaccacugac

SEQ ID NO: 316282 - RNA, 23 nt, Human
uggaccucaaaaccacugaccca

SEQ ID NO: 316283 - RNA, 18 nt, Human
uggcaaugucugaggcuu

SEQ ID NO: 316284 - RNA, 22 nt, Human
uggcaguggcaaucagugacug

SEQ ID NO: 316285 - RNA, 18 nt, Human
uggcucgagcgcgcucgg

SEQ ID NO: 316286 - RNA, 18 nt, Human
ugggcagucgaacagcgg

SEQ ID NO: 316287 - RNA, 20 nt, Human
ugguaaggguagaaauccgc

SEQ ID NO: 316288 - RNA, 21 nt, Human
uguccagauuucccuccucaa

SEQ ID NO: 316289 - RNA, 27 nt, Human
ugugggcaguguugaacucugucaggu

SEQ ID NO: 316290 - RNA, 24 nt, Human
uguuuguuagccaggucuagucuu

SEQ ID NO: 316291 - RNA, 22 nt, Human
uucaaccccacccccaauuguc

SEQ ID NO: 316292 - RNA, 18 nt, Human
uucauaauacacuuaaaa

SEQ ID NO: 316293 - RNA, 28 nt, Human
uuccaaacaaaucuuuuccuuuuuaauu

SEQ ID NO: 316294 - RNA, 24 nt, Human
uuccagauggcaguggcaaucagu

SEQ ID NO: 316295 - RNA, 19 nt, Human
uucccacccaaucccaccc

SEQ ID NO: 316296 - RNA, 19 nt, Human
uucuucaguuccugggccu

SEQ ID NO: 316297 - RNA, 22 nt, Human
uugaaaaggauauaagaagccu

SEQ ID NO: 316298 - RNA, 21 nt, Human
uugugggcaguguugaacucu

SEQ ID NO: 316299 - RNA, 18 nt, Human
uuuagcaaacauuuccag

SEQ ID NO: 316300 - RNA, 24 nt, Human
aaacaguucuguucaaaacaacuc

SEQ ID NO: 316301 - RNA, 24 nt, Human
aaagaacaacauggggcugagauu

SEQ ID NO: 316302 - RNA, 23 nt, Human
aagaacaauuucaaaacucacaa

SEQ ID NO: 316303 - RNA, 22 nt, Human
aagaacccacaaagugcacacc

SEQ ID NO: 316304 - RNA, 22 nt, Human
agcuaaauggaaguuaaauugu

SEQ ID NO: 316305 - RNA, 19 nt, Human
aggaagaacccacaaagug

SEQ ID NO: 316306 - RNA, 23 nt, Human
aucuuauuaucugcagucucuca

SEQ ID NO: 316307 - RNA, 22 nt, Human
caaaacaacucaccagguucug

SEQ ID NO: 316308 - RNA, 24 nt, Human
caaaacaacucaccagguucugaa

SEQ ID NO: 316309 - RNA, 24 nt, Human
caaggaguuaccagagagguuaug

SEQ ID NO: 316310 - RNA, 22 nt, Human
caaguagaagggaggccuuggu

SEQ ID NO: 316311 - RNA, 20 nt, Human
cacaaagugcacaccaacaa

SEQ ID NO: 316312 - RNA, 26 nt, Human
caggaagaacccacaaagugcacacc

SEQ ID NO: 316313 - RNA, 19 nt, Human
ccagagagguuauguagug

SEQ ID NO: 316314 - RNA, 20 nt, Human
ccccagccggcugccgcucc

SEQ ID NO: 316315 - RNA, 18 nt, Human
cccugaaaauaaaaagaa

SEQ ID NO: 316316 - RNA, 18 nt, Human
ccggcugccgcuccgcgc

SEQ ID NO: 316317 - RNA, 22 nt, Human
ccucccgcgccgccgcccgcac

SEQ ID NO: 316318 - RNA, 26 nt, Human
cuacaagucuacaaauucuaaaauuu

SEQ ID NO: 316319 - RNA, 22 nt, Human
cuacacgcacacgccgccgccg

SEQ ID NO: 316320 - RNA, 23 nt, Human
cuacagucaugcugaguaaagcu

SEQ ID NO: 316321 - RNA, 22 nt, Human
cuccuccgcucgcugaggcucc

SEQ ID NO: 316322 - RNA, 27 nt, Human
cucggccgucggcccugcgccgguucc

SEQ ID NO: 316323 - RNA, 23 nt, Human
cucuugugcagucacaucgucuu

SEQ ID NO: 316324 - RNA, 19 nt, Human
cugcagugcucuugugcag

SEQ ID NO: 316325 - RNA, 24 nt, Human
gaaaaaacaguucuguucaaaaca

SEQ ID NO: 316326 - RNA, 22 nt, Human
gaaaacaaguuuuuugaauguu

SEQ ID NO: 316327 - RNA, 19 nt, Human
gcagugcucuugugcaguc

SEQ ID NO: 316328 - RNA, 18 nt, Human
gccgccgccgguuccucg

SEQ ID NO: 316329 - RNA, 18 nt, Human
gcgccuccuccuccgcuc

SEQ ID NO: 316330 - RNA, 23 nt, Human
ggaaaaaacaguucuguucaaaa

SEQ ID NO: 316331 - RNA, 20 nt, Human
ggggcugagauuugaguagg

SEQ ID NO: 316332 - RNA, 19 nt, Human
gguaauuauuuuuaaaaau

SEQ ID NO: 316333 - RNA, 25 nt, Human
gguucauucuaaaguggucacggcu

SEQ ID NO: 316334 - RNA, 22 nt, Human
gucucucagagaaagcaaaagu

SEQ ID NO: 316335 - RNA, 19 nt, Human
guugcucuucccauuucca

SEQ ID NO: 316336 - RNA, 20 nt, Human
uaaaacacaacccaaagacu

SEQ ID NO: 316337 - RNA, 22 nt, Human
uaaaacacaacccaaagacuua

SEQ ID NO: 316338 - RNA, 25 nt, Human
uaaaacacaacccaaagacuuaaau

SEQ ID NO: 316339 - RNA, 21 nt, Human
uaaaguggucacggcuguuga

SEQ ID NO: 316340 - RNA, 22 nt, Human
uacaaauagcgcuaugccagaa

SEQ ID NO: 316341 - RNA, 22 nt, Human
uacaauuaagucuuacugaagc

SEQ ID NO: 316342 - RNA, 20 nt, Human
ucaaggaguuaccagagagg

SEQ ID NO: 316343 - RNA, 21 nt, Human
ucagagaaagcaaaaguaacu

SEQ ID NO: 316344 - RNA, 19 nt, Human
uccaaugauuguuugcugc

SEQ ID NO: 316345 - RNA, 24 nt, Human
uccaugugaaaacaaguuuuuuga

SEQ ID NO: 316346 - RNA, 23 nt, Human
ucuacagucaugcugaguaaagc

SEQ ID NO: 316347 - RNA, 18 nt, Human
ugaaaaacacugcagugc

SEQ ID NO: 316348 - RNA, 18 nt, Human
ugaggcuggcgcuggccc

SEQ ID NO: 316349 - RNA, 18 nt, Human
ugcagugcucuugugcag

SEQ ID NO: 316350 - RNA, 18 nt, Human
ugccagaaacugguuucu

SEQ ID NO: 316351 - RNA, 24 nt, Human
ugccgcuccgcgcuccucccgcgc

SEQ ID NO: 316352 - RNA, 23 nt, Human
uggcacaucuuuugguccaugug

SEQ ID NO: 316353 - RNA, 18 nt, Human
uuaaaacacaacccaaag

SEQ ID NO: 316354 - RNA, 18 nt, Human
uuaaaacacaacccaaag

SEQ ID NO: 316355 - RNA, 21 nt, Human
uuaaaacacaacccaaagacu

SEQ ID NO: 316356 - RNA, 20 nt, Human
uucauggcaauacuguacaa

SEQ ID NO: 316357 - RNA, 22 nt, Human
uuggaguuacuguugcucuucc

SEQ ID NO: 316358 - RNA, 21 nt, Human
uugguccaugugaaaacaagu

SEQ ID NO: 316359 - RNA, 19 nt, Human
uuuaacuuuuuuaauaaac

SEQ ID NO: 316360 - RNA, 20 nt, Human
uuuaacuuuuuuaauaaaca

SEQ ID NO: 316361 - RNA, 21 nt, Human
uuuaacuuuuuuaauaaacag

SEQ ID NO: 316362 - RNA, 22 nt, Human
aaaacuccaacucuauuaaucc

SEQ ID NO: 316363 - RNA, 25 nt, Human
aagacagaucccaauuuguuacaga

SEQ ID NO: 316364 - RNA, 23 nt, Human
aagcacugucaugacaaauauac

SEQ ID NO: 316365 - RNA, 22 nt, Human
auacauauauuuuaaaaagcca

SEQ ID NO: 316366 - RNA, 21 nt, Human
caaauaagcgcaaaaggagau

SEQ ID NO: 316367 - RNA, 22 nt, Human
gacaacauacucccaagaagaa

SEQ ID NO: 316368 - RNA, 21 nt, Human
ggcggccgggcuggggcucgg

SEQ ID NO: 316369 - RNA, 21 nt, Human
uaaaauuuccaaauaagcgca

SEQ ID NO: 316370 - RNA, 22 nt, Human
uaaaugaagggaaaucucuuua

SEQ ID NO: 316371 - RNA, 22 nt, Human
uauggcacauuugguccaugau

SEQ ID NO: 316372 - RNA, 24 nt, Human
uauuaauccaugccaguuaaacac

SEQ ID NO: 316373 - RNA, 21 nt, Human
uccaaauaagcgcaaaaggag

SEQ ID NO: 316374 - RNA, 18 nt, Human
ucccaagaagaaccuuuu

SEQ ID NO: 316375 - RNA, 24 nt, Human
ucccaagaagaaccuuuucuucag

SEQ ID NO: 316376 - RNA, 24 nt, Human
ugacaacauacucccaagaagaac

SEQ ID NO: 316377 - RNA, 20 nt, Human
ugucaugacaaauauacaga

SEQ ID NO: 316378 - RNA, 21 nt, Human
uuaugacaacauacucccaag

SEQ ID NO: 316379 - RNA, 25 nt, Human
uugugaauuuuucuuaaaaauaaaa

SEQ ID NO: 316380 - RNA, 24 nt, Human
aaaaaaaccaaugauggggaggac

SEQ ID NO: 316381 - RNA, 24 nt, Human
aaaaaaccaaugauggggaggacg

SEQ ID NO: 316382 - RNA, 18 nt, Human
aaugauggggaggacggg

SEQ ID NO: 316383 - RNA, 20 nt, Human
aaugauggggaggacgggag

SEQ ID NO: 316384 - RNA, 22 nt, Human
acaaaaaaaaaccaaugauggg

SEQ ID NO: 316385 - RNA, 18 nt, Human
agaaguaaaugggggagg

SEQ ID NO: 316386 - RNA, 25 nt, Human
agagggacuuguggggguuggaggg

SEQ ID NO: 316387 - RNA, 19 nt, Human
aggacgggagguggagaag

SEQ ID NO: 316388 - RNA, 23 nt, Human
aggcuggggagaggaggaaccgu

SEQ ID NO: 316389 - RNA, 19 nt, Human
caaaaaaaaaccaaugaug

SEQ ID NO: 316390 - RNA, 25 nt, Human
caaaaaaaaaccaaugauggggagg

SEQ ID NO: 316391 - RNA, 18 nt, Human
caucuucccaggcugggg

SEQ ID NO: 316392 - RNA, 19 nt, Human
cauuacagcagcaggaucc

SEQ ID NO: 316393 - RNA, 23 nt, Human
ccaaaggccccccagugucuccc

SEQ ID NO: 316394 - RNA, 19 nt, Human
cccauuacagcagcaggau

SEQ ID NO: 316395 - RNA, 20 nt, Human
ccccuuccucccaaggucac

SEQ ID NO: 316396 - RNA, 19 nt, Human
ccuguccaaccccgugcuc

SEQ ID NO: 316397 - RNA, 21 nt, Human
gacccgggaugcucacaucuc

SEQ ID NO: 316398 - RNA, 25 nt, Human
gacgggagguggagaaguaaauggg

SEQ ID NO: 316399 - RNA, 22 nt, Human
gagaggaggaaccgugcugggg

SEQ ID NO: 316400 - RNA, 19 nt, Human
gaggacgggagguggagaa

SEQ ID NO: 316401 - RNA, 18 nt, Human
gggggaaggggccugggg

SEQ ID NO: 316402 - RNA, 18 nt, Human
ucacuguccuguccaacc

SEQ ID NO: 316403 - RNA, 19 nt, Human
uccugucagacugcggcca

SEQ ID NO: 316404 - RNA, 24 nt, Human
ugaaaagggggaaaauaaaaggaa

SEQ ID NO: 316405 - RNA, 21 nt, Human
ugauggggaggacgggaggug

SEQ ID NO: 316406 - RNA, 23 nt, Human
ugcggccagcgcugccucgugcc

SEQ ID NO: 316407 - RNA, 24 nt, Human
ugcugggggaaggggccugggguc

SEQ ID NO: 316408 - RNA, 21 nt, Human
uggagaaguaaaugggggagg

SEQ ID NO: 316409 - RNA, 20 nt, Human
uggggagaggaggaaccgug

SEQ ID NO: 316410 - RNA, 23 nt, Human
uguggggguuggaggguggacac

SEQ ID NO: 316411 - RNA, 20 nt, Human
aggccuuuucccuccugcuc

SEQ ID NO: 316412 - RNA, 20 nt, Human
ccuuuucccuccugcuccuc

SEQ ID NO: 316413 - RNA, 20 nt, Human
ccuuuucccuccugcuccuc

SEQ ID NO: 316414 - RNA, 22 nt, Human
uaaaggccuuuucccuccugcu

SEQ ID NO: 316415 - RNA, 20 nt, Human
uugacuagaaauuugugaca

SEQ ID NO: 316416 - RNA, 21 nt, Human
uugacuagaaauuugugacaa

SEQ ID NO: 316417 - RNA, 18 nt, Human
aaaaaagagcauagcagg

SEQ ID NO: 316418 - RNA, 19 nt, Human
aaaaaagagcauagcaggg

SEQ ID NO: 316419 - RNA, 23 nt, Human
aaaaaagccaaggaacauguaag

SEQ ID NO: 316420 - RNA, 22 nt, Human
aaaaagcaagaguaacaaggca

SEQ ID NO: 316421 - RNA, 24 nt, Human
aaaaagccaaggaacauguaagua

SEQ ID NO: 316422 - RNA, 26 nt, Human
aaaagaacagaccagccuuucucagg

SEQ ID NO: 316423 - RNA, 22 nt, Human
aaaauggaaaauggaaaaaaaa

SEQ ID NO: 316424 - RNA, 19 nt, Human
aaacaagaagaauuugucu

SEQ ID NO: 316425 - RNA, 21 nt, Human
aaacaagaagaauuugucuaa

SEQ ID NO: 316426 - RNA, 22 nt, Human
aaacagaagugucccaaaccua

SEQ ID NO: 316427 - RNA, 24 nt, Human
aaagcaaauuacacuugaaaguca

SEQ ID NO: 316428 - RNA, 19 nt, Human
aaccaggaggaggggaggg

SEQ ID NO: 316429 - RNA, 20 nt, Human
aagagaaaaaagccaaggaa

SEQ ID NO: 316430 - RNA, 25 nt, Human
aagcaaauuacacuugaaagucagg

SEQ ID NO: 316431 - RNA, 24 nt, Human
aagcaucagaaguucaagucaacu

SEQ ID NO: 316432 - RNA, 21 nt, Human
aagcauucaaguucccuagcc

SEQ ID NO: 316433 - RNA, 24 nt, Human
aaguuauaaaucuggauccucaac

SEQ ID NO: 316434 - RNA, 21 nt, Human
acaaaaagcaagaguaacaag

SEQ ID NO: 316435 - RNA, 19 nt, Human
acacccaaaaagaacagac

SEQ ID NO: 316436 - RNA, 19 nt, Human
acauagaaccuucuggaaa

SEQ ID NO: 316437 - RNA, 24 nt, Human
agaaaaaaaauaaaaacccggcaa

SEQ ID NO: 316438 - RNA, 30 nt, Human
agaaaaaaaauaaaaacccggcaauggagg

SEQ ID NO: 316439 - RNA, 22 nt, Human
agaaacacccaaaaagaacaga

SEQ ID NO: 316440 - RNA, 21 nt, Human
agacaaguauccaugaucccu

SEQ ID NO: 316441 - RNA, 20 nt, Human
agacaccuaggaacaaaaca

SEQ ID NO: 316442 - RNA, 23 nt, Human
agagaaaaaaaauaaaaacccgg

SEQ ID NO: 316443 - RNA, 24 nt, Human
agagaagccuucuggucuguuuuu

SEQ ID NO: 316444 - RNA, 19 nt, Human
agauguagagauauuaacc

SEQ ID NO: 316445 - RNA, 18 nt, Human
agcuuucaauucuaaaca

SEQ ID NO: 316446 - RNA, 21 nt, Human
aggagaaacacccaaaaagaa

SEQ ID NO: 316447 - RNA, 22 nt, Human
aggaggaggggagggugcugcu

SEQ ID NO: 316448 - RNA, 19 nt, Human
auaaaucucuggcuuaaaa

SEQ ID NO: 316449 - RNA, 18 nt, Human
aucaagacagauguagag

SEQ ID NO: 316450 - RNA, 21 nt, Human
aucuggauccucaacugggga

SEQ ID NO: 316451 - RNA, 21 nt, Human
auggagcugucaccuccucca

SEQ ID NO: 316452 - RNA, 22 nt, Human
auggagcuuacaaaaaaagagc

SEQ ID NO: 316453 - RNA, 26 nt, Human
caacagguuccccuccuuggcagccg

SEQ ID NO: 316454 - RNA, 26 nt, Human
caagauacgccgugccccgagggguc

SEQ ID NO: 316455 - RNA, 18 nt, Human
caauggagcugucaccuc

SEQ ID NO: 316456 - RNA, 20 nt, Human
cacaaaacaagaagaauuug

SEQ ID NO: 316457 - RNA, 20 nt, Human
cacccaaaaagaacagacca

SEQ ID NO: 316458 - RNA, 23 nt, Human
cacccaaaaagaacagaccagcc

SEQ ID NO: 316459 - RNA, 19 nt, Human
caucagaaguucaagucaa

SEQ ID NO: 316460 - RNA, 19 nt, Human
caucucaaaccauuuaccc

SEQ ID NO: 316461 - RNA, 26 nt, Human
cauucugcauccucuucucagcuuca

SEQ ID NO: 316462 - RNA, 19 nt, Human
ccaagauacgccgugcccc

SEQ ID NO: 316463 - RNA, 19 nt, Human
ccacaguucauuucuguag

SEQ ID NO: 316464 - RNA, 26 nt, Human
ccagagaaaacugggcaauaaaagca

SEQ ID NO: 316465 - RNA, 19 nt, Human
ccagcuccaguucccagcg

SEQ ID NO: 316466 - RNA, 20 nt, Human
cccaaaaagaacagaccagc

SEQ ID NO: 316467 - RNA, 21 nt, Human
cccaaaaagaacagaccagcc

SEQ ID NO: 316468 - RNA, 22 nt, Human
cccaaaaagaacagaccagccu

SEQ ID NO: 316469 - RNA, 18 nt, Human
cccaacagguuccccucc

SEQ ID NO: 316470 - RNA, 19 nt, Human
cccccugggagagcgggca

SEQ ID NO: 316471 - RNA, 20 nt, Human
ccccgccuggcccugccaag

SEQ ID NO: 316472 - RNA, 24 nt, Human
ccgccuggcccugccaagcucacu

SEQ ID NO: 316473 - RNA, 19 nt, Human
ccgcuccaaaaugcaaaaa

SEQ ID NO: 316474 - RNA, 23 nt, Human
ccgcugccuccgggugccaagau

SEQ ID NO: 316475 - RNA, 26 nt, Human
ccggcaauggagcugucaccuccucc

SEQ ID NO: 316476 - RNA, 21 nt, Human
ccuaggaacaaaacacuggac

SEQ ID NO: 316477 - RNA, 18 nt, Human
ccuggcccugccaagcuc

SEQ ID NO: 316478 - RNA, 19 nt, Human
cgcccgcccgccccggagg

SEQ ID NO: 316479 - RNA, 21 nt, Human
cgcuccaaaaugcaaaaaaga

SEQ ID NO: 316480 - RNA, 23 nt, Human
cgcuccaaaaugcaaaaaagauc

SEQ ID NO: 316481 - RNA, 23 nt, Human
cggagagaaaaaaaauaaaaacc

SEQ ID NO: 316482 - RNA, 23 nt, Human
cggcaauggagcugucaccuccu

SEQ ID NO: 316483 - RNA, 22 nt, Human
cuaaacagaagugucccaaacc

SEQ ID NO: 316484 - RNA, 20 nt, Human
cucacuccagcuccaguucc

SEQ ID NO: 316485 - RNA, 19 nt, Human
cuccaaaaugcaaaaaaga

SEQ ID NO: 316486 - RNA, 23 nt, Human
cucccgcgcggugcgcucacucc

SEQ ID NO: 316487 - RNA, 20 nt, Human
cuccuuggcagccgcuccaa

SEQ ID NO: 316488 - RNA, 18 nt, Human
cugcacuaaaugggaguu

SEQ ID NO: 316489 - RNA, 24 nt, Human
cugcauccucuucucagcuucaug

SEQ ID NO: 316490 - RNA, 21 nt, Human
cuuaggagaaacacccaaaaa

SEQ ID NO: 316491 - RNA, 21 nt, Human
cuucuggaaauggcuuucuag

SEQ ID NO: 316492 - RNA, 18 nt, Human
gaaaaaaaaaugguggag

SEQ ID NO: 316493 - RNA, 19 nt, Human
gacuaguauucaguaugug

SEQ ID NO: 316494 - RNA, 19 nt, Human
gacugcaccaugguccgaa

SEQ ID NO: 316495 - RNA, 19 nt, Human
gagaggggggcaggggagc

SEQ ID NO: 316496 - RNA, 21 nt, Human
gagcugucaccuccuccacuc

SEQ ID NO: 316497 - RNA, 19 nt, Human
gcaaaaaagaucccuccuc

SEQ ID NO: 316498 - RNA, 20 nt, Human
gcagggacaggauucaggcu

SEQ ID NO: 316499 - RNA, 26 nt, Human
gcauuuagugccuuuccuagggggaa

SEQ ID NO: 316500 - RNA, 19 nt, Human
ggaaaaaaaaaugguggag

SEQ ID NO: 316501 - RNA, 23 nt, Human
ggagacggggaggcggagagaaa

SEQ ID NO: 316502 - RNA, 22 nt, Human
ggagcugucaccuccuccacuc

SEQ ID NO: 316503 - RNA, 19 nt, Human
ggcaauaaaagcaucagaa

SEQ ID NO: 316504 - RNA, 18 nt, Human
gggagcugggaauguugg

SEQ ID NO: 316505 - RNA, 24 nt, Human
gggcagccgcgacaaaauggugcc

SEQ ID NO: 316506 - RNA, 22 nt, Human
ggggagcugggaauguuggacu

SEQ ID NO: 316507 - RNA, 21 nt, Human
guaaguagaagauuauaugga

SEQ ID NO: 316508 - RNA, 18 nt, Human
uaaaaaaaacuuaucucu

SEQ ID NO: 316509 - RNA, 26 nt, Human
uaaauccuuugcaugcauuuagugcc

SEQ ID NO: 316510 - RNA, 20 nt, Human
uaaaucucuggcuuaaauga

SEQ ID NO: 316511 - RNA, 20 nt, Human
uaacaaggcagcagauggaa

SEQ ID NO: 316512 - RNA, 23 nt, Human
uaagagcacaaaaagcaagagua

SEQ ID NO: 316513 - RNA, 19 nt, Human
uaaguaauaacuugucccc

SEQ ID NO: 316514 - RNA, 19 nt, Human
uacaucuguaaacugaaag

SEQ ID NO: 316515 - RNA, 21 nt, Human
uacccugcacuaaaugggagu

SEQ ID NO: 316516 - RNA, 22 nt, Human
uacccugcacuaaaugggaguu

SEQ ID NO: 316517 - RNA, 25 nt, Human
uaggaacaaaacacuggacccacca

SEQ ID NO: 316518 - RNA, 21 nt, Human
uaggagaaaugagucaucaag

SEQ ID NO: 316519 - RNA, 20 nt, Human
ucaagacagauguagagaua

SEQ ID NO: 316520 - RNA, 21 nt, Human
ucagggacucagggguggugg

SEQ ID NO: 316521 - RNA, 23 nt, Human
uccaaagcaaauuacacuugaaa

SEQ ID NO: 316522 - RNA, 22 nt, Human
ucccuccucccccugggagagc

SEQ ID NO: 316523 - RNA, 19 nt, Human
uccuuggcagccgcuccaa

SEQ ID NO: 316524 - RNA, 25 nt, Human
ucuaauacaucuguaaacugaaaga

SEQ ID NO: 316525 - RNA, 23 nt, Human
ucuggucccgcccgcccgccccg

SEQ ID NO: 316526 - RNA, 24 nt, Human
ugcaaaaaagaucccuccuccccc

SEQ ID NO: 316527 - RNA, 18 nt, Human
ugcaguggcgagauggca

SEQ ID NO: 316528 - RNA, 24 nt, Human
ugcgaggcugcggcggcuccuccc

SEQ ID NO: 316529 - RNA, 18 nt, Human
uggaaauggcuuucuaga

SEQ ID NO: 316530 - RNA, 18 nt, Human
uggaauaaauaagcugga

SEQ ID NO: 316531 - RNA, 21 nt, Human
uggcagggacaggauucaggc

SEQ ID NO: 316532 - RNA, 21 nt, Human
ugggagagcgggcagccgcga

SEQ ID NO: 316533 - RNA, 23 nt, Human
ugggagagcgggcagccgcgaca

SEQ ID NO: 316534 - RNA, 18 nt, Human
uguaaacugaaagaaaau

SEQ ID NO: 316535 - RNA, 18 nt, Human
uguagagauauuaaccca

SEQ ID NO: 316536 - RNA, 19 nt, Human
uguuagcuggcagcuuuca

SEQ ID NO: 316537 - RNA, 19 nt, Human
uuagaacaccagauaauaa

SEQ ID NO: 316538 - RNA, 19 nt, Human
uucaaaggaaaauggaaaa

SEQ ID NO: 316539 - RNA, 22 nt, Human
uucaaguucccuagccaaauuc

SEQ ID NO: 316540 - RNA, 25 nt, Human
uucucagcuucaugcaauaaaucuc

SEQ ID NO: 316541 - RNA, 21 nt, Human
uucuggaaauggcuuucuaga

SEQ ID NO: 316542 - RNA, 18 nt, Human
uuucuggacuccacccau

SEQ ID NO: 316543 - RNA, 20 nt, Human
uuuuaauucuauuccaauca

SEQ ID NO: 316544 - RNA, 18 nt, Human
uuuuuuuuccuccuccaa

SEQ ID NO: 316545 - RNA, 22 nt, Human
aauuugauaguuuuaucguugg

SEQ ID NO: 316546 - RNA, 21 nt, Human
acacugccaccucugcagcug

SEQ ID NO: 316547 - RNA, 21 nt, Human
acacugccaccucugcagcug

SEQ ID NO: 316548 - RNA, 21 nt, Human
aggaaagcuggggcagggagg

SEQ ID NO: 316549 - RNA, 21 nt, Human
aggcucuugagauagucaaac

SEQ ID NO: 316550 - RNA, 22 nt, Human
augcccagggcuggccuuccug

SEQ ID NO: 316551 - RNA, 23 nt, Human
cacaauucuggccuaggaaagcu

SEQ ID NO: 316552 - RNA, 23 nt, Human
cacacugccaccucugcagcugu

SEQ ID NO: 316553 - RNA, 18 nt, Human
caccuguggccagcagcu

SEQ ID NO: 316554 - RNA, 21 nt, Human
cagacaauuacugccaaacac

SEQ ID NO: 316555 - RNA, 27 nt, Human
cagguuguauccuucgggccuuuuauc

SEQ ID NO: 316556 - RNA, 21 nt, Human
cccagggcuggccuuccugga

SEQ ID NO: 316557 - RNA, 23 nt, Human
cccggccgcccuugucaccuggu

SEQ ID NO: 316558 - RNA, 26 nt, Human
cgcuuccuuuccuuuuuauuuuuuua

SEQ ID NO: 316559 - RNA, 21 nt, Human
cugcagcuguccucaucagug

SEQ ID NO: 316560 - RNA, 22 nt, Human
cuuccuguguccacacacugcc

SEQ ID NO: 316561 - RNA, 19 nt, Human
gacccggccgcccuuguca

SEQ ID NO: 316562 - RNA, 21 nt, Human
gccaaacacaauucuggccua

SEQ ID NO: 316563 - RNA, 19 nt, Human
ggaaagcuggggcagggag

SEQ ID NO: 316564 - RNA, 18 nt, Human
uaucguugguggacagga

SEQ ID NO: 316565 - RNA, 23 nt, Human
ucaucagugcugugacuuucuuc

SEQ ID NO: 316566 - RNA, 21 nt, Human
ucugcagcuguccucaucagu

SEQ ID NO: 316567 - RNA, 23 nt, Human
ucuuccauaauuugauaguuuua

SEQ ID NO: 316568 - RNA, 19 nt, Human
ucuucuccucuaucuccag

SEQ ID NO: 316569 - RNA, 23 nt, Human
ugaggcuggguggcaggggccgg

SEQ ID NO: 316570 - RNA, 19 nt, Human
ugaugucagcucuggaguc

SEQ ID NO: 316571 - RNA, 22 nt, Human
uggagucuucaaugcccagggc

SEQ ID NO: 316572 - RNA, 19 nt, Human
uuccccuccuugcauugcg

SEQ ID NO: 316573 - RNA, 18 nt, Human
uugaucuuguugaucuuc

SEQ ID NO: 316574 - RNA, 24 nt, Human
uugcaugaggcuggguggcagggg

SEQ ID NO: 316575 - RNA, 23 nt, Human
uuugauaguuuuaucguuggugg

SEQ ID NO: 316576 - RNA, 24 nt, Human
uuuguggcggugaacgcuuccuuu

SEQ ID NO: 316577 - RNA, 23 nt, Human
aaacagaggcuuuaaucugaaca

SEQ ID NO: 316578 - RNA, 26 nt, Human
aaacagccucucaucaaacgggacga

SEQ ID NO: 316579 - RNA, 18 nt, Human
aaacaggagagaguggcc

SEQ ID NO: 316580 - RNA, 27 nt, Human
aaacccagcagagccaagggcuagaga

SEQ ID NO: 316581 - RNA, 24 nt, Human
aagagccagggggaggcuuggaca

SEQ ID NO: 316582 - RNA, 25 nt, Human
aagaggccagaaacaggagagagug

SEQ ID NO: 316583 - RNA, 27 nt, Human
aagccccucccugaguuucugccaucc

SEQ ID NO: 316584 - RNA, 20 nt, Human
aaggagccugggaggggcac

SEQ ID NO: 316585 - RNA, 21 nt, Human
aaggagccugggaggggcacc

SEQ ID NO: 316586 - RNA, 25 nt, Human
aaggggcugggagcccauaggggga

SEQ ID NO: 316587 - RNA, 21 nt, Human
acagcuaaggccucuccacca

SEQ ID NO: 316588 - RNA, 23 nt, Human
acagcuggacggugaccuccucc

SEQ ID NO: 316589 - RNA, 20 nt, Human
acaggggagagacagcugga

SEQ ID NO: 316590 - RNA, 21 nt, Human
acccagccucugcccagaccu

SEQ ID NO: 316591 - RNA, 21 nt, Human
accccacccaccccaccccag

SEQ ID NO: 316592 - RNA, 22 nt, Human
accccacccaccccaccccagc

SEQ ID NO: 316593 - RNA, 26 nt, Human
accccacccaccccaccccagcccac

SEQ ID NO: 316594 - RNA, 18 nt, Human
acccgaccccacccaccc

SEQ ID NO: 316595 - RNA, 20 nt, Human
acccuauaaaagcaauggac

SEQ ID NO: 316596 - RNA, 23 nt, Human
acugggcccauucugagugccaa

SEQ ID NO: 316597 - RNA, 20 nt, Human
acuguggccuggguggcucu

SEQ ID NO: 316598 - RNA, 26 nt, Human
agagaagcagggcccaggggcccagg

SEQ ID NO: 316599 - RNA, 18 nt, Human
agagccagggggaggcuu

SEQ ID NO: 316600 - RNA, 24 nt, Human
agagggaggggauggggaggggcc

SEQ ID NO: 316601 - RNA, 20 nt, Human
agcaauggaagcagcaggua

SEQ ID NO: 316602 - RNA, 22 nt, Human
agcaauggaagcagcagguauc

SEQ ID NO: 316603 - RNA, 21 nt, Human
agcaccuacccaaagggcagc

SEQ ID NO: 316604 - RNA, 20 nt, Human
agcagaaguggccgggccua

SEQ ID NO: 316605 - RNA, 18 nt, Human
aggaagggaaaagcaaug

SEQ ID NO: 316606 - RNA, 18 nt, Human
agggaggugggaggacaa

SEQ ID NO: 316607 - RNA, 19 nt, Human
agggaggugggaggacaag

SEQ ID NO: 316608 - RNA, 22 nt, Human
agggaggugggaggacaaggug

SEQ ID NO: 316609 - RNA, 22 nt, Human
aggggcugggagcccauagggg

SEQ ID NO: 316610 - RNA, 21 nt, Human
agggggaugggggagccagga

SEQ ID NO: 316611 - RNA, 20 nt, Human
aguggccgagugaccaggcc

SEQ ID NO: 316612 - RNA, 18 nt, Human
aucccaggcugagccccu

SEQ ID NO: 316613 - RNA, 18 nt, Human
aucucgccaccccacccc

SEQ ID NO: 316614 - RNA, 22 nt, Human
augcucugagcccccucaagcc

SEQ ID NO: 316615 - RNA, 24 nt, Human
caaaacagaggcuuuaaucugaac

SEQ ID NO: 316616 - RNA, 19 nt, Human
cacaggaacuguggccugg

SEQ ID NO: 316617 - RNA, 20 nt, Human
cacaggagggggcaguggaa

SEQ ID NO: 316618 - RNA, 18 nt, Human
cacccaccccaccccagc

SEQ ID NO: 316619 - RNA, 23 nt, Human
cacccaccccaccccagcccaca

SEQ ID NO: 316620 - RNA, 19 nt, Human
caccccaccccagcccaca

SEQ ID NO: 316621 - RNA, 20 nt, Human
caccccaucaucugggcccu

SEQ ID NO: 316622 - RNA, 20 nt, Human
cacccgaccccacccacccc

SEQ ID NO: 316623 - RNA, 20 nt, Human
cacccuauaaaagcaaugga

SEQ ID NO: 316624 - RNA, 19 nt, Human
cacugggcccauucugagu

SEQ ID NO: 316625 - RNA, 21 nt, Human
cagaacagccccugcucucaa

SEQ ID NO: 316626 - RNA, 21 nt, Human
cagacccucucuucuggccag

SEQ ID NO: 316627 - RNA, 22 nt, Human
cagcagcgcaaagguagcagaa

SEQ ID NO: 316628 - RNA, 24 nt, Human
cagccaggacagcuaaggccucuc

SEQ ID NO: 316629 - RNA, 23 nt, Human
cagccccugcucucaaaaccaga

SEQ ID NO: 316630 - RNA, 23 nt, Human
cagcccuaccauagauggccacc

SEQ ID NO: 316631 - RNA, 18 nt, Human
caggaacuguggccuggg

SEQ ID NO: 316632 - RNA, 22 nt, Human
caggaagggcugucuggcccug

SEQ ID NO: 316633 - RNA, 23 nt, Human
caggagcccagcaccuacccaaa

SEQ ID NO: 316634 - RNA, 27 nt, Human
cagggcccaggggcccagggugaggcu

SEQ ID NO: 316635 - RNA, 23 nt, Human
caguaaacagccucucaucaaac

SEQ ID NO: 316636 - RNA, 21 nt, Human
caucugggcccucccaggagc

SEQ ID NO: 316637 - RNA, 23 nt, Human
cauucugagugccaaagccuggg

SEQ ID NO: 316638 - RNA, 18 nt, Human
ccaccacccgaccccacc

SEQ ID NO: 316639 - RNA, 22 nt, Human
ccaccacccgaccccacccacc

SEQ ID NO: 316640 - RNA, 22 nt, Human
ccaccccaccccagcccacagc

SEQ ID NO: 316641 - RNA, 18 nt, Human
ccaccccaccccaguaaa

SEQ ID NO: 316642 - RNA, 20 nt, Human
ccacccgaccccacccaccc

SEQ ID NO: 316643 - RNA, 22 nt, Human
ccacugggcccauucugagugc

SEQ ID NO: 316644 - RNA, 20 nt, Human
ccagauacaaugggccccaa

SEQ ID NO: 316645 - RNA, 21 nt, Human
ccagccucugcccagaccauc

SEQ ID NO: 316646 - RNA, 19 nt, Human
ccaggacagcuaaggccuc

SEQ ID NO: 316647 - RNA, 18 nt, Human
ccaggagcccagcaccua

SEQ ID NO: 316648 - RNA, 22 nt, Human
ccagggugaggcucacagcagc

SEQ ID NO: 316649 - RNA, 18 nt, Human
cccaccccaccccagccc

SEQ ID NO: 316650 - RNA, 21 nt, Human
cccaccccaccccagcccaca

SEQ ID NO: 316651 - RNA, 21 nt, Human
cccaccccaguaaacagccuc

SEQ ID NO: 316652 - RNA, 23 nt, Human
cccagaccaucaccggaucccag

SEQ ID NO: 316653 - RNA, 22 nt, Human
cccagcaccuacccaaagggca

SEQ ID NO: 316654 - RNA, 27 nt, Human
ccccacccaccccaccccagcccacag

SEQ ID NO: 316655 - RNA, 19 nt, Human
ccccaccccagcccacagc

SEQ ID NO: 316656 - RNA, 23 nt, Human
ccccaccccagcccacagcuggc

SEQ ID NO: 316657 - RNA, 22 nt, Human
cccccucaagcccaucucgcca

SEQ ID NO: 316658 - RNA, 24 nt, Human
ccccucaagcccaucucgccaccc

SEQ ID NO: 316659 - RNA, 25 nt, Human
ccccugcucucaaaaccagacugga

SEQ ID NO: 316660 - RNA, 26 nt, Human
cccgaccccacccaccccaccccagc

SEQ ID NO: 316661 - RNA, 22 nt, Human
cccucccaggagcccagcaccu

SEQ ID NO: 316662 - RNA, 25 nt, Human
cccuuagaaaggcaucgacuccagg

SEQ ID NO: 316663 - RNA, 23 nt, Human
ccugcaaggagcagcuccaaccc

SEQ ID NO: 316664 - RNA, 24 nt, Human
ccuuaugcucugagcccccucaag

SEQ ID NO: 316665 - RNA, 24 nt, Human
cgggacgaacagagggaggggaug

SEQ ID NO: 316666 - RNA, 18 nt, Human
cucagaaaacuggcuaca

SEQ ID NO: 316667 - RNA, 23 nt, Human
cucgccaccccaccccaguaaac

SEQ ID NO: 316668 - RNA, 26 nt, Human
cucuccaccacccgaccccacccacc

SEQ ID NO: 316669 - RNA, 20 nt, Human
cucugagcccccucaagccc

SEQ ID NO: 316670 - RNA, 23 nt, Human
cuggcccugggagagagguggac

SEQ ID NO: 316671 - RNA, 19 nt, Human
cugucuggcccugggagag

SEQ ID NO: 316672 - RNA, 25 nt, Human
cugugcugugcuucucagugcuccc

SEQ ID NO: 316673 - RNA, 21 nt, Human
gaaaagcaauggaagcagccg

SEQ ID NO: 316674 - RNA, 21 nt, Human
gaaacccagcagagccaaggg

SEQ ID NO: 316675 - RNA, 23 nt, Human
gaagagccagggggaggcuugga

SEQ ID NO: 316676 - RNA, 19 nt, Human
gaaggcaggcacaggaacu

SEQ ID NO: 316677 - RNA, 25 nt, Human
gaccaggccccagacccucucuucu

SEQ ID NO: 316678 - RNA, 18 nt, Human
gacccagccucugcccag

SEQ ID NO: 316679 - RNA, 22 nt, Human
gacccagccucugcccagacca

SEQ ID NO: 316680 - RNA, 20 nt, Human
gaccccacccaccccacccc

SEQ ID NO: 316681 - RNA, 27 nt, Human
gaccccacccaccccaccccagcccac

SEQ ID NO: 316682 - RNA, 19 nt, Human
gagcccagcaccuacccaa

SEQ ID NO: 316683 - RNA, 19 nt, Human
gagcccagcaccuacccaa

SEQ ID NO: 316684 - RNA, 20 nt, Human
gagcccagcaccuacccaaa

SEQ ID NO: 316685 - RNA, 21 nt, Human
gagcccccucaagcccaucuc

SEQ ID NO: 316686 - RNA, 20 nt, Human
gagugaagggagaagaggcc

SEQ ID NO: 316687 - RNA, 20 nt, Human
gcacaggaacuguggccugg

SEQ ID NO: 316688 - RNA, 18 nt, Human
gcagaacagccccugcuc

SEQ ID NO: 316689 - RNA, 23 nt, Human
gcaguggagaagggcaggccugg

SEQ ID NO: 316690 - RNA, 22 nt, Human
gccccaagccccucccugaguu

SEQ ID NO: 316691 - RNA, 22 nt, Human
gcccucaaugggccugcccagc

SEQ ID NO: 316692 - RNA, 27 nt, Human
gcccugaagccuuaugcucugagcccc

SEQ ID NO: 316693 - RNA, 20 nt, Human
gccgggccuaagacugccaa

SEQ ID NO: 316694 - RNA, 21 nt, Human
gcuaaggccucuccaccaccc

SEQ ID NO: 316695 - RNA, 21 nt, Human
gcugggccucuucugagaaac

SEQ ID NO: 316696 - RNA, 19 nt, Human
ggaaacccagcagagccaa

SEQ ID NO: 316697 - RNA, 18 nt, Human
ggagcagcuccaacccuu

SEQ ID NO: 316698 - RNA, 27 nt, Human
ggauggggaggggccacugcuggggug

SEQ ID NO: 316699 - RNA, 21 nt, Human
gggagagacagcuggacggug

SEQ ID NO: 316700 - RNA, 18 nt, Human
gggaggggccacugcugg

SEQ ID NO: 316701 - RNA, 18 nt, Human
gggcaguggagaagggca

SEQ ID NO: 316702 - RNA, 21 nt, Human
gggcaguggagaagggcaggc

SEQ ID NO: 316703 - RNA, 23 nt, Human
gggggcagggugaaaaggagccu

SEQ ID NO: 316704 - RNA, 23 nt, Human
gggugaaaaggagccugggaggg

SEQ ID NO: 316705 - RNA, 19 nt, Human
gguggggaaggcaggcaca

SEQ ID NO: 316706 - RNA, 20 nt, Human
uaggagaaaccucggcggug

SEQ ID NO: 316707 - RNA, 23 nt, Human
ucaccggaucccaggcugagccc

SEQ ID NO: 316708 - RNA, 21 nt, Human
ucagcuuccagcccuaccaua

SEQ ID NO: 316709 - RNA, 19 nt, Human
uccaccacccgaccccacc

SEQ ID NO: 316710 - RNA, 21 nt, Human
uccaccacccgaccccaccca

SEQ ID NO: 316711 - RNA, 22 nt, Human
ucccugaguuucugccaucccc

SEQ ID NO: 316712 - RNA, 18 nt, Human
ucccugcggugcugcaga

SEQ ID NO: 316713 - RNA, 19 nt, Human
ucuggaaagacaugccuca

SEQ ID NO: 316714 - RNA, 20 nt, Human
ucugggcccacccaucaccc

SEQ ID NO: 316715 - RNA, 21 nt, Human
ugaagggagaagaggccagaa

SEQ ID NO: 316716 - RNA, 20 nt, Human
ugaaggguguguggacccag

SEQ ID NO: 316717 - RNA, 19 nt, Human
ugagggugcaaggggcugg

SEQ ID NO: 316718 - RNA, 24 nt, Human
ugagggugcaaggggcugggagcc

SEQ ID NO: 316719 - RNA, 25 nt, Human
ugaguuucugccauccccucccugg

SEQ ID NO: 316720 - RNA, 24 nt, Human
ugcaaaacagaggcuuuaaucuga

SEQ ID NO: 316721 - RNA, 23 nt, Human
ugcagaacagccccugcucucaa

SEQ ID NO: 316722 - RNA, 24 nt, Human
ugccaagaggaauccaggcucucc

SEQ ID NO: 316723 - RNA, 20 nt, Human
ugcugggguggggaaggcag

SEQ ID NO: 316724 - RNA, 18 nt, Human
uggaaagacaugccucac

SEQ ID NO: 316725 - RNA, 18 nt, Human
uggacgggagugaaggga

SEQ ID NO: 316726 - RNA, 21 nt, Human
uggccuggguggcucuucggc

SEQ ID NO: 316727 - RNA, 18 nt, Human
ugggacuccugacccagc

SEQ ID NO: 316728 - RNA, 20 nt, Human
ugggcccacccaucacccag

SEQ ID NO: 316729 - RNA, 21 nt, Human
ugggcuugggaggcugucucu

SEQ ID NO: 316730 - RNA, 23 nt, Human
ugggcuugggaggcugucucuua

SEQ ID NO: 316731 - RNA, 19 nt, Human
uggggacaggggagagaca

SEQ ID NO: 316732 - RNA, 20 nt, Human
uggggaggggccacugcugg

SEQ ID NO: 316733 - RNA, 21 nt, Human
uggggaggggccacugcugga

SEQ ID NO: 316734 - RNA, 22 nt, Human
uggggaggggccacugcugggg

SEQ ID NO: 316735 - RNA, 23 nt, Human
uggggaggggccacugcuggggu

SEQ ID NO: 316736 - RNA, 21 nt, Human
ugggggagccaggaagggcug

SEQ ID NO: 316737 - RNA, 20 nt, Human
uuaccucacccuauaaaagc

SEQ ID NO: 316738 - RNA, 19 nt, Human
uuucugccauccccucccu

SEQ ID NO: 316739 - RNA, 18 nt, Human
aaacuucagaagugacac

SEQ ID NO: 316740 - RNA, 18 nt, Human
aagaauucaagucauaau

SEQ ID NO: 316741 - RNA, 22 nt, Human
aagccuacugcaguuccuuuaa

SEQ ID NO: 316742 - RNA, 23 nt, Human
aagccuccaucccugggucagga

SEQ ID NO: 316743 - RNA, 18 nt, Human
acgccgccgagcuucucc

SEQ ID NO: 316744 - RNA, 21 nt, Human
agaggaggaaugaauugagag

SEQ ID NO: 316745 - RNA, 22 nt, Human
agaugugagaaauacuugacca

SEQ ID NO: 316746 - RNA, 25 nt, Human
aggaagggggauauucaugaggaac

SEQ ID NO: 316747 - RNA, 22 nt, Human
aggcgggggagaggcgcggggu

SEQ ID NO: 316748 - RNA, 26 nt, Human
auacuugaccaaguaaaaacauacaa

SEQ ID NO: 316749 - RNA, 19 nt, Human
augagguuuguuuuguaau

SEQ ID NO: 316750 - RNA, 19 nt, Human
augauacagcacagggcua

SEQ ID NO: 316751 - RNA, 24 nt, Human
caacacaaucaaagaagaauucaa

SEQ ID NO: 316752 - RNA, 21 nt, Human
caccacacugugggacucaaa

SEQ ID NO: 316753 - RNA, 18 nt, Human
cacugugggacucaaagc

SEQ ID NO: 316754 - RNA, 22 nt, Human
cagcccgcccugccuggagccu

SEQ ID NO: 316755 - RNA, 26 nt, Human
cagcgcagcccgcccugaccccuugg

SEQ ID NO: 316756 - RNA, 18 nt, Human
ccaucuguuaccacucug

SEQ ID NO: 316757 - RNA, 23 nt, Human
ccccacggcccuccggccccggg

SEQ ID NO: 316758 - RNA, 20 nt, Human
ccccgggccgcggcgagcuc

SEQ ID NO: 316759 - RNA, 18 nt, Human
ccccugcgccccggcccc

SEQ ID NO: 316760 - RNA, 19 nt, Human
cccggccccacggcccucc

SEQ ID NO: 316761 - RNA, 21 nt, Human
cccggccccacggcccuccgg

SEQ ID NO: 316762 - RNA, 22 nt, Human
cccggggcugccccguagcccc

SEQ ID NO: 316763 - RNA, 19 nt, Human
cccugccuggagccuccuc

SEQ ID NO: 316764 - RNA, 21 nt, Human
cccugcgccccggccccacgg

SEQ ID NO: 316765 - RNA, 23 nt, Human
ccgagcgcgccucucgucgcuuc

SEQ ID NO: 316766 - RNA, 19 nt, Human
ccgcggcccugacgcuugg

SEQ ID NO: 316767 - RNA, 21 nt, Human
ccgcugccagcgcagcccgcc

SEQ ID NO: 316768 - RNA, 21 nt, Human
ccggccggccagcaccucagc

SEQ ID NO: 316769 - RNA, 23 nt, Human
ccgggccgcggcgagcucccggg

SEQ ID NO: 316770 - RNA, 20 nt, Human
ccuaggauguaacuaagguu

SEQ ID NO: 316771 - RNA, 23 nt, Human
ccucacggccacaucucagcgcu

SEQ ID NO: 316772 - RNA, 22 nt, Human
ccucggagccacugccgcggug

SEQ ID NO: 316773 - RNA, 23 nt, Human
ccugcgccccggccccacggccg

SEQ ID NO: 316774 - RNA, 27 nt, Human
cgccccugcgccccggccccacggccc

SEQ ID NO: 316775 - RNA, 21 nt, Human
cgcgccccugcgccccggccc

SEQ ID NO: 316776 - RNA, 22 nt, Human
cgcggggugcucgcgccccugc

SEQ ID NO: 316777 - RNA, 23 nt, Human
cggagacggcaggaggaggcggg

SEQ ID NO: 316778 - RNA, 21 nt, Human
cggccgcugccagcgcagccc

SEQ ID NO: 316779 - RNA, 23 nt, Human
cgggacgccgccgagcuucuccu

SEQ ID NO: 316780 - RNA, 22 nt, Human
cucacggccacaucucagcgcu

SEQ ID NO: 316781 - RNA, 20 nt, Human
cucacucauaucauagauga

SEQ ID NO: 316782 - RNA, 18 nt, Human
cucaucgcccggggcugc

SEQ ID NO: 316783 - RNA, 20 nt, Human
cuccggcugcugcuugcaag

SEQ ID NO: 316784 - RNA, 22 nt, Human
cucucgucgcuucugcccccgu

SEQ ID NO: 316785 - RNA, 21 nt, Human
cuggagguuccugguccccgg

SEQ ID NO: 316786 - RNA, 19 nt, Human
gaagggcgggggcggaggg

SEQ ID NO: 316787 - RNA, 22 nt, Human
gaccaaguaaaaacauacaaga

SEQ ID NO: 316788 - RNA, 23 nt, Human
gagacggcaggaggaggcggggg

SEQ ID NO: 316789 - RNA, 20 nt, Human
gaggacuggaaaggcccugc

SEQ ID NO: 316790 - RNA, 21 nt, Human
gaggacuggaaaggcccugcc

SEQ ID NO: 316791 - RNA, 21 nt, Human
gagggaagggcgggggcggag

SEQ ID NO: 316792 - RNA, 23 nt, Human
gcccugccuggagccuccucuca

SEQ ID NO: 316793 - RNA, 22 nt, Human
gccucacggccacaucucagcg

SEQ ID NO: 316794 - RNA, 18 nt, Human
gcggggugcucgcgcccc

SEQ ID NO: 316795 - RNA, 18 nt, Human
ggagaggcgcggggugcu

SEQ ID NO: 316796 - RNA, 21 nt, Human
gggugcgggugccgagcgcgc

SEQ ID NO: 316797 - RNA, 20 nt, Human
uaagagauuggaaugguacu

SEQ ID NO: 316798 - RNA, 20 nt, Human
uauaaaagggaaaaauauac

SEQ ID NO: 316799 - RNA, 24 nt, Human
uccccgggccgcggcgagcucccg

SEQ ID NO: 316800 - RNA, 19 nt, Human
uccggcagaggugggaggc

SEQ ID NO: 316801 - RNA, 21 nt, Human
ucggcgcccgccaacgccuca

SEQ ID NO: 316802 - RNA, 23 nt, Human
ucuaugugcaacacaaucaaaga

SEQ ID NO: 316803 - RNA, 24 nt, Human
ugaaaagcacauuauaaaagggaa

SEQ ID NO: 316804 - RNA, 20 nt, Human
ugaaacuucagaagugacac

SEQ ID NO: 316805 - RNA, 19 nt, Human
ugagacaaagagaagggua

SEQ ID NO: 316806 - RNA, 22 nt, Human
ugagaggaagaggaggaaugaa

SEQ ID NO: 316807 - RNA, 24 nt, Human
ugagggagggguuagggcagguaa

SEQ ID NO: 316808 - RNA, 22 nt, Human
ugagguuuguuuuguaauuuuu

SEQ ID NO: 316809 - RNA, 20 nt, Human
ugccgcggugcccgcucuuc

SEQ ID NO: 316810 - RNA, 22 nt, Human
ugccuggagccuccucucaggg

SEQ ID NO: 316811 - RNA, 23 nt, Human
ugccuggagccuccucucagggc

SEQ ID NO: 316812 - RNA, 19 nt, Human
ugccuucagccuuugagag

SEQ ID NO: 316813 - RNA, 18 nt, Human
ugcucaaucccccaauga

SEQ ID NO: 316814 - RNA, 18 nt, Human
ugcugcucaaucccccaa

SEQ ID NO: 316815 - RNA, 19 nt, Human
ugcuuuaaaaagccuggag

SEQ ID NO: 316816 - RNA, 24 nt, Human
ugggacucaaagccuccaucccug

SEQ ID NO: 316817 - RNA, 19 nt, Human
ugggucaggagggacuagg

SEQ ID NO: 316818 - RNA, 21 nt, Human
ugggucaggagggacuaggug

SEQ ID NO: 316819 - RNA, 21 nt, Human
ugugaggacuggaaaggcccu

SEQ ID NO: 316820 - RNA, 23 nt, Human
uuaccacucccauaauuaucuca

SEQ ID NO: 316821 - RNA, 24 nt, Human
uuaguccauauauuuuuccauuua

SEQ ID NO: 316822 - RNA, 29 nt, Human
uucagaagugacacaauaaauccaaugaa

SEQ ID NO: 316823 - RNA, 21 nt, Human
aaggggacaaggaaguacaca

SEQ ID NO: 316824 - RNA, 30 nt, Human
aaggggacaaggaaguacacagcgagggaa

SEQ ID NO: 316825 - RNA, 22 nt, Human
accccaggacacugugaaucuc

SEQ ID NO: 316826 - RNA, 21 nt, Human
acccccagccacggaaagagg

SEQ ID NO: 316827 - RNA, 19 nt, Human
agacaggguagaaaggagg

SEQ ID NO: 316828 - RNA, 21 nt, Human
agagggacugacagcucuggg

SEQ ID NO: 316829 - RNA, 21 nt, Human
aggggacaaggaaguacacag

SEQ ID NO: 316830 - RNA, 22 nt, Human
cacaguccugggccccccccca

SEQ ID NO: 316831 - RNA, 21 nt, Human
cacccuggcuuucucgaaaac

SEQ ID NO: 316832 - RNA, 18 nt, Human
caggagaagggauagagg

SEQ ID NO: 316833 - RNA, 22 nt, Human
cauccuguccggccuuuggggg

SEQ ID NO: 316834 - RNA, 23 nt, Human
ccacccuggcuuucucgaaaacc

SEQ ID NO: 316835 - RNA, 20 nt, Human
ccacucuggcaaggccaggg

SEQ ID NO: 316836 - RNA, 20 nt, Human
ccagggccuccugcaacugc

SEQ ID NO: 316837 - RNA, 19 nt, Human
ccaugauuacugugaaccc

SEQ ID NO: 316838 - RNA, 22 nt, Human
cccacccuggcuuucucgaaaa

SEQ ID NO: 316839 - RNA, 19 nt, Human
ccccagggccuccugcaac

SEQ ID NO: 316840 - RNA, 25 nt, Human
cccccagggccuccugcaacugccc

SEQ ID NO: 316841 - RNA, 22 nt, Human
ccccccagggccuccugcaacu

SEQ ID NO: 316842 - RNA, 20 nt, Human
ccccggggguucucucuggg

SEQ ID NO: 316843 - RNA, 18 nt, Human
cggggguucucucugggc

SEQ ID NO: 316844 - RNA, 18 nt, Human
cucccccucccccugccc

SEQ ID NO: 316845 - RNA, 19 nt, Human
cucucugggccccuggaca

SEQ ID NO: 316846 - RNA, 22 nt, Human
cuguguagagggugagcugggc

SEQ ID NO: 316847 - RNA, 19 nt, Human
cuucuugccugugcccucc

SEQ ID NO: 316848 - RNA, 20 nt, Human
gaagaucccugauggcagcu

SEQ ID NO: 316849 - RNA, 23 nt, Human
gagaauaaauagaccauggaccc

SEQ ID NO: 316850 - RNA, 21 nt, Human
gcaggcgaggcgcugagugcc

SEQ ID NO: 316851 - RNA, 18 nt, Human
gcccaguccuggggggca

SEQ ID NO: 316852 - RNA, 19 nt, Human
ggacaaggaaguacacagc

SEQ ID NO: 316853 - RNA, 21 nt, Human
ggacaggagaagggauagagg

SEQ ID NO: 316854 - RNA, 25 nt, Human
ggagcagagggugggagcccgccug

SEQ ID NO: 316855 - RNA, 19 nt, Human
ggaggugcugggugagacu

SEQ ID NO: 316856 - RNA, 19 nt, Human
ggcagacaggguagaaagg

SEQ ID NO: 316857 - RNA, 18 nt, Human
ggcugggaguccucagaa

SEQ ID NO: 316858 - RNA, 26 nt, Human
gggacaaggaaguacacagcgaggga

SEQ ID NO: 316859 - RNA, 22 nt, Human
gggcaggggaagaucccugaug

SEQ ID NO: 316860 - RNA, 21 nt, Human
gggccuccugcaacugcccag

SEQ ID NO: 316861 - RNA, 22 nt, Human
gggccugggaggugcuggguga

SEQ ID NO: 316862 - RNA, 21 nt, Human
ggggggcagacaggguagaaa

SEQ ID NO: 316863 - RNA, 19 nt, Human
gggguucucucugggccug

SEQ ID NO: 316864 - RNA, 22 nt, Human
ggguucccacccuggcuuucuc

SEQ ID NO: 316865 - RNA, 22 nt, Human
guccugggcccccccccagggc

SEQ ID NO: 316866 - RNA, 22 nt, Human
gugaaagcugggcugggcuggg

SEQ ID NO: 316867 - RNA, 24 nt, Human
uacacagcgagggaagggaggagu

SEQ ID NO: 316868 - RNA, 19 nt, Human
uacccccagccacggaaag

SEQ ID NO: 316869 - RNA, 18 nt, Human
uagaaaggaggauggcuc

SEQ ID NO: 316870 - RNA, 21 nt, Human
uagacuucggucgccaacccc

SEQ ID NO: 316871 - RNA, 20 nt, Human
ucagaagccacucuggcaag

SEQ ID NO: 316872 - RNA, 20 nt, Human
ucccugauggcagcuuccug

SEQ ID NO: 316873 - RNA, 24 nt, Human
uccugggcccccccccagggccuc

SEQ ID NO: 316874 - RNA, 21 nt, Human
uccuguccggccuuugggggg

SEQ ID NO: 316875 - RNA, 21 nt, Human
ucucugggccugggaggugcu

SEQ ID NO: 316876 - RNA, 18 nt, Human
ugagacuggacagacuaa

SEQ ID NO: 316877 - RNA, 22 nt, Human
ugagugcccuugcccaaggcca

SEQ ID NO: 316878 - RNA, 21 nt, Human
ugauuacugugaacccccccu

SEQ ID NO: 316879 - RNA, 18 nt, Human
uggccaaggcaggggcag

SEQ ID NO: 316880 - RNA, 22 nt, Human
ugggcccccccccagggccucc

SEQ ID NO: 316881 - RNA, 20 nt, Human
ugggccugggaggugcuggg

SEQ ID NO: 316882 - RNA, 22 nt, Human
ugggccugggaggugcugggug

SEQ ID NO: 316883 - RNA, 24 nt, Human
uggguuuagcuuuuccccuucuga

SEQ ID NO: 316884 - RNA, 26 nt, Human
ugugcccucccccucccccugcccaa

SEQ ID NO: 316885 - RNA, 23 nt, Human
uucccacccuggcuuucucgaaa

SEQ ID NO: 316886 - RNA, 21 nt, Human
uuugcggggcaggggaagauc

SEQ ID NO: 316887 - RNA, 18 nt, Human
aaaaacaaacaaaagaac

SEQ ID NO: 316888 - RNA, 29 nt, Human
aaaaagagagucuucccagaaaccucucc

SEQ ID NO: 316889 - RNA, 23 nt, Human
aaaaagauguucuuacacacuga

SEQ ID NO: 316890 - RNA, 21 nt, Human
aaaacaaaagcucaguacaug

SEQ ID NO: 316891 - RNA, 19 nt, Human
aaaacaaagauacaaugua

SEQ ID NO: 316892 - RNA, 20 nt, Human
aaaccucucucacaaacaua

SEQ ID NO: 316893 - RNA, 21 nt, Human
aaagaaaaccuagacaaaaag

SEQ ID NO: 316894 - RNA, 20 nt, Human
aaagagccauuucacugaga

SEQ ID NO: 316895 - RNA, 22 nt, Human
aaagauccuaaguuccauuugg

SEQ ID NO: 316896 - RNA, 21 nt, Human
aaaggaagccauacuaaaggc

SEQ ID NO: 316897 - RNA, 21 nt, Human
aacaugaagaugaagggcagg

SEQ ID NO: 316898 - RNA, 21 nt, Human
aacccgcggcucugccagcgg

SEQ ID NO: 316899 - RNA, 24 nt, Human
aacuagggaaacuuuaggaggcca

SEQ ID NO: 316900 - RNA, 19 nt, Human
aagaaaccaggcggccgca

SEQ ID NO: 316901 - RNA, 22 nt, Human
aagaccgaugaaaacucagaca

SEQ ID NO: 316902 - RNA, 18 nt, Human
aagagccuuguugaaggg

SEQ ID NO: 316903 - RNA, 20 nt, Human
acacuaaaaagacacuugga

SEQ ID NO: 316904 - RNA, 25 nt, Human
accacaagaaguccccuccccccag

SEQ ID NO: 316905 - RNA, 18 nt, Human
acccugagagaaauaaag

SEQ ID NO: 316906 - RNA, 21 nt, Human
acccugagagaaauaaagaau

SEQ ID NO: 316907 - RNA, 21 nt, Human
acuggcgggcccggccccgac

SEQ ID NO: 316908 - RNA, 19 nt, Human
acuuggaaauauggcuuua

SEQ ID NO: 316909 - RNA, 18 nt, Human
agaaaauaccagcggcug

SEQ ID NO: 316910 - RNA, 24 nt, Human
agaaagaaaaccuagacaaaaaga

SEQ ID NO: 316911 - RNA, 18 nt, Human
agagaaggagacacggug

SEQ ID NO: 316912 - RNA, 24 nt, Human
agagcagaaagaaaaccuagacaa

SEQ ID NO: 316913 - RNA, 22 nt, Human
agauguucuuacacacugagcu

SEQ ID NO: 316914 - RNA, 24 nt, Human
agcagaaagaaaaccuagacaaaa

SEQ ID NO: 316915 - RNA, 21 nt, Human
aggaggccaaaauauuaagua

SEQ ID NO: 316916 - RNA, 18 nt, Human
aggcagcggcagugccgg

SEQ ID NO: 316917 - RNA, 24 nt, Human
agggcaaaaagagagucuucccag

SEQ ID NO: 316918 - RNA, 19 nt, Human
agguguugauaacgugagc

SEQ ID NO: 316919 - RNA, 19 nt, Human
agugaagagaccccuuaga

SEQ ID NO: 316920 - RNA, 21 nt, Human
augaaaaaacagauccuaaaa

SEQ ID NO: 316921 - RNA, 21 nt, Human
augaagggcagggugcuuucc

SEQ ID NO: 316922 - RNA, 22 nt, Human
caaaaagagagucuucccagaa

SEQ ID NO: 316923 - RNA, 18 nt, Human
caaagagccauuucacug

SEQ ID NO: 316924 - RNA, 18 nt, Human
caagaaguccccuccccc

SEQ ID NO: 316925 - RNA, 20 nt, Human
caagacacgaggacagaagc

SEQ ID NO: 316926 - RNA, 23 nt, Human
caagcaggauaaauaagucaaaa

SEQ ID NO: 316927 - RNA, 21 nt, Human
cacacuaaaaagacacuugga

SEQ ID NO: 316928 - RNA, 24 nt, Human
cagaaaccucucucacaaacauac

SEQ ID NO: 316929 - RNA, 19 nt, Human
cagacacuguauuuuccuu

SEQ ID NO: 316930 - RNA, 21 nt, Human
cagcaugugaagaccgauggu

SEQ ID NO: 316931 - RNA, 19 nt, Human
cagugccggccccgugcaa

SEQ ID NO: 316932 - RNA, 25 nt, Human
caucucacaaagcggacuuguccac

SEQ ID NO: 316933 - RNA, 20 nt, Human
ccacaagaaguccccucccc

SEQ ID NO: 316934 - RNA, 24 nt, Human
cccaggugauuuuccuccaagaca

SEQ ID NO: 316935 - RNA, 24 nt, Human
cgaaaucugcaaauaaaaauauua

SEQ ID NO: 316936 - RNA, 22 nt, Human
cgaggacaccgucgucaacccg

SEQ ID NO: 316937 - RNA, 23 nt, Human
cgcuggugccuccuccaagcucu

SEQ ID NO: 316938 - RNA, 22 nt, Human
cggaacgggguccaagaaagcu

SEQ ID NO: 316939 - RNA, 18 nt, Human
cgucauccucgcuggugc

SEQ ID NO: 316940 - RNA, 20 nt, Human
cuaaaauaagccacauuuug

SEQ ID NO: 316941 - RNA, 23 nt, Human
cucacaaacauacugaacaucca

SEQ ID NO: 316942 - RNA, 23 nt, Human
cugcaaauaaaaauauuaacaca

SEQ ID NO: 316943 - RNA, 21 nt, Human
cugcuggcguaacaaucacgu

SEQ ID NO: 316944 - RNA, 21 nt, Human
cuggugccuccuccaagcucu

SEQ ID NO: 316945 - RNA, 21 nt, Human
cuucaauaaagagcagaaaga

SEQ ID NO: 316946 - RNA, 26 nt, Human
gaacauccaaaaucaaggauauuuga

SEQ ID NO: 316947 - RNA, 19 nt, Human
gaagaugaagggcagggug

SEQ ID NO: 316948 - RNA, 22 nt, Human
gacuuggacuacgcuggggugg

SEQ ID NO: 316949 - RNA, 21 nt, Human
gcaaugcuguuguguuacuuu

SEQ ID NO: 316950 - RNA, 19 nt, Human
gccauacuaaaggccacac

SEQ ID NO: 316951 - RNA, 24 nt, Human
gcgggcucugggaagucaccauug

SEQ ID NO: 316952 - RNA, 22 nt, Human
ggagaacaugaagaugaagggc

SEQ ID NO: 316953 - RNA, 22 nt, Human
gucgucaacccgcggcucugcc

SEQ ID NO: 316954 - RNA, 21 nt, Human
gugaagaccgaugaaaacuca

SEQ ID NO: 316955 - RNA, 20 nt, Human
uaaaagauccuaaguuccau

SEQ ID NO: 316956 - RNA, 22 nt, Human
uaaaaggaagccauacuaaagg

SEQ ID NO: 316957 - RNA, 22 nt, Human
uaaaauggagagauacuuguca

SEQ ID NO: 316958 - RNA, 22 nt, Human
uaaagaauagacaaagcacuaa

SEQ ID NO: 316959 - RNA, 21 nt, Human
uaaagacggaaguucaaacaa

SEQ ID NO: 316960 - RNA, 22 nt, Human
uaaggcaagaaaccaggcggcc

SEQ ID NO: 316961 - RNA, 24 nt, Human
uaaguaauacucuugccaaagaaa

SEQ ID NO: 316962 - RNA, 24 nt, Human
uagacaaagcacuaaguuuaaaga

SEQ ID NO: 316963 - RNA, 23 nt, Human
uaguuuucauaaugguaaaaugg

SEQ ID NO: 316964 - RNA, 21 nt, Human
ucaaaauacauaagacgcugc

SEQ ID NO: 316965 - RNA, 20 nt, Human
ucaagacacuuaacauuaag

SEQ ID NO: 316966 - RNA, 26 nt, Human
uccaaaaucaaggauauuugagaauc

SEQ ID NO: 316967 - RNA, 22 nt, Human
ucuagacuucagcgggaaaggc

SEQ ID NO: 316968 - RNA, 22 nt, Human
ucucacuaucuuugaaaggaua

SEQ ID NO: 316969 - RNA, 22 nt, Human
ucucagaacagcacugcagccu

SEQ ID NO: 316970 - RNA, 19 nt, Human
ucugggaagucaccauugu

SEQ ID NO: 316971 - RNA, 20 nt, Human
ugaaaaaacagauccuaaaa

SEQ ID NO: 316972 - RNA, 21 nt, Human
ugaaaaacaaacaaaagaacu

SEQ ID NO: 316973 - RNA, 22 nt, Human
ugaaggcagcggcagugccggc

SEQ ID NO: 316974 - RNA, 20 nt, Human
ugaagggcaacaauguuuaa

SEQ ID NO: 316975 - RNA, 20 nt, Human
ugagaacucgaaagcaaaga

SEQ ID NO: 316976 - RNA, 19 nt, Human
ugccaaagaaaauuaguuu

SEQ ID NO: 316977 - RNA, 20 nt, Human
ugccaguggcuugaagugac

SEQ ID NO: 316978 - RNA, 20 nt, Human
ugcccaguacguugcgugag

SEQ ID NO: 316979 - RNA, 21 nt, Human
uggaguaccacagacuuggaa

SEQ ID NO: 316980 - RNA, 22 nt, Human
uggcguaacaaucacguggaaa

SEQ ID NO: 316981 - RNA, 23 nt, Human
ugggcaggagguaccagagcucc

SEQ ID NO: 316982 - RNA, 19 nt, Human
ugggguggcggcgacacug

SEQ ID NO: 316983 - RNA, 23 nt, Human
uguaacugauugguauggcacag

SEQ ID NO: 316984 - RNA, 21 nt, Human
ugucaacaucuagacuucagc

SEQ ID NO: 316985 - RNA, 18 nt, Human
uucaagcaggauaaauaa

SEQ ID NO: 316986 - RNA, 18 nt, Human
uucaugucacucaucaaa

SEQ ID NO: 316987 - RNA, 21 nt, Human
uugaagggcaacaauguuuaa

SEQ ID NO: 316988 - RNA, 18 nt, Human
uuggaaaacacugauguu

SEQ ID NO: 316989 - RNA, 19 nt, Human
uuuaaaacuccaauuucug

SEQ ID NO: 316990 - RNA, 23 nt, Human
uuuaaaauaaaucucuucuacag

SEQ ID NO: 316991 - RNA, 26 nt, Human
uuuaagauaaauuucagagcaaucuc

SEQ ID NO: 316992 - RNA, 21 nt, Human
aaccuggguccggccuuccuc

SEQ ID NO: 316993 - RNA, 20 nt, Human
aagcagucagccccagggug

SEQ ID NO: 316994 - RNA, 19 nt, Human
aagcccaacccaccuuagc

SEQ ID NO: 316995 - RNA, 23 nt, Human
acaaacaaggaaauaaauaggug

SEQ ID NO: 316996 - RNA, 18 nt, Human
accccagggcugcugcuc

SEQ ID NO: 316997 - RNA, 24 nt, Human
acccggcccgucuccugcggcccc

SEQ ID NO: 316998 - RNA, 25 nt, Human
acccuauguacacagccaaaagccg

SEQ ID NO: 316999 - RNA, 20 nt, Human
acugccugcgccccuggaac

SEQ ID NO: 317000 - RNA, 21 nt, Human
agaaaagcagucagccccagg

SEQ ID NO: 317001 - RNA, 25 nt, Human
agaaaagcagucagccccagggugg

SEQ ID NO: 317002 - RNA, 22 nt, Human
agagcagccucagguagcugug

SEQ ID NO: 317003 - RNA, 19 nt, Human
agcacccuauguacacagc

SEQ ID NO: 317004 - RNA, 19 nt, Human
agcagccucagguagcugu

SEQ ID NO: 317005 - RNA, 22 nt, Human
agcagguaggggacaggcaucc

SEQ ID NO: 317006 - RNA, 18 nt, Human
agccccuggccccuccaa

SEQ ID NO: 317007 - RNA, 21 nt, Human
aguauggagggccagggcagu

SEQ ID NO: 317008 - RNA, 30 nt, Human
agugcccacaucccccucccuugaguagcc

SEQ ID NO: 317009 - RNA, 22 nt, Human
augggguaagaagaaauaauac

SEQ ID NO: 317010 - RNA, 19 nt, Human
auucaucccuccccggccc

SEQ ID NO: 317011 - RNA, 26 nt, Human
caaaagccgcacugccugcgccccug

SEQ ID NO: 317012 - RNA, 21 nt, Human
caacagcacagaaaagcaguc

SEQ ID NO: 317013 - RNA, 23 nt, Human
cacacggcugggacuggggggcc

SEQ ID NO: 317014 - RNA, 22 nt, Human
cacagccaaaagccgcacugcc

SEQ ID NO: 317015 - RNA, 18 nt, Human
cacuaagcaucuuagugc

SEQ ID NO: 317016 - RNA, 24 nt, Human
cagcauagcacaaacaaggaaaua

SEQ ID NO: 317017 - RNA, 26 nt, Human
cagccaaaagccgcacugccugcgcc

SEQ ID NO: 317018 - RNA, 23 nt, Human
caucccccucccuugaguagcua

SEQ ID NO: 317019 - RNA, 22 nt, Human
ccaacagcacagaaaagcaguc

SEQ ID NO: 317020 - RNA, 24 nt, Human
ccagcacacggcugggacuggggg

SEQ ID NO: 317021 - RNA, 24 nt, Human
cccagggcugugugggcuguggcc

SEQ ID NO: 317022 - RNA, 23 nt, Human
ccccacuugguccaucugggccc

SEQ ID NO: 317023 - RNA, 20 nt, Human
cccccaagacagccaguagg

SEQ ID NO: 317024 - RNA, 21 nt, Human
cccggcccgucuccugcggcc

SEQ ID NO: 317025 - RNA, 19 nt, Human
cccgucuccugcggccccg

SEQ ID NO: 317026 - RNA, 23 nt, Human
ccgcacucggccgcucggcgucu

SEQ ID NO: 317027 - RNA, 22 nt, Human
ccuuccaugucugugaccccag

SEQ ID NO: 317028 - RNA, 22 nt, Human
cgcuccggcuccggcuuugcuc

SEQ ID NO: 317029 - RNA, 18 nt, Human
cggcugggacuggggggc

SEQ ID NO: 317030 - RNA, 21 nt, Human
cucggcccguccggacccggc

SEQ ID NO: 317031 - RNA, 20 nt, Human
cucugcaggggagagagagg

SEQ ID NO: 317032 - RNA, 26 nt, Human
cuucaagugcccacaucccccucccu

SEQ ID NO: 317033 - RNA, 23 nt, Human
cuuggggcaccgcucccugcuuc

SEQ ID NO: 317034 - RNA, 19 nt, Human
gaagagggaccauucugug

SEQ ID NO: 317035 - RNA, 21 nt, Human
gacccggcccgucuccugcgg

SEQ ID NO: 317036 - RNA, 22 nt, Human
gagggccagggcagugucccag

SEQ ID NO: 317037 - RNA, 22 nt, Human
gcucaccaaagacagggcacgg

SEQ ID NO: 317038 - RNA, 21 nt, Human
ggaaauaaauagguguuggca

SEQ ID NO: 317039 - RNA, 27 nt, Human
ggacccggcccgucuccuugggagccc

SEQ ID NO: 317040 - RNA, 24 nt, Human
gggaccaauggggcuugacauaac

SEQ ID NO: 317041 - RNA, 18 nt, Human
gggcacgggguagggugu

SEQ ID NO: 317042 - RNA, 24 nt, Human
ggggagaagagggaccauucugug

SEQ ID NO: 317043 - RNA, 19 nt, Human
gggguuggcuucccuucag

SEQ ID NO: 317044 - RNA, 23 nt, Human
uauguacacagccaaaagccgca

SEQ ID NO: 317045 - RNA, 21 nt, Human
ucccagggcugugugggcugu

SEQ ID NO: 317046 - RNA, 24 nt, Human
ucccccaagacagccaguagggag

SEQ ID NO: 317047 - RNA, 19 nt, Human
uccccggccccacuugguc

SEQ ID NO: 317048 - RNA, 24 nt, Human
uccugcggccccgcuccucgggag

SEQ ID NO: 317049 - RNA, 20 nt, Human
uccugcuguucccuacaugc

SEQ ID NO: 317050 - RNA, 22 nt, Human
uccuguguguacuucucagagc

SEQ ID NO: 317051 - RNA, 24 nt, Human
ucucagagcagccucagguagcug

SEQ ID NO: 317052 - RNA, 21 nt, Human
ugcuucaagugcccacauccc

SEQ ID NO: 317053 - RNA, 18 nt, Human
ugugaccccagggcugcu

SEQ ID NO: 317054 - RNA, 21 nt, Human
ugugugggcuguggcccugug

SEQ ID NO: 317055 - RNA, 23 nt, Human
uguuuauucaucccuccccggcc

SEQ ID NO: 317056 - RNA, 25 nt, Human
uuagugcucagccuguacuagccac

SEQ ID NO: 317057 - RNA, 18 nt, Human
uucagcuacucugggacc

SEQ ID NO: 317058 - RNA, 19 nt, Human
uuccucagccccuggcccc

SEQ ID NO: 317059 - RNA, 29 nt, Human
uucuccgccaucgugguguguucuugacu

SEQ ID NO: 317060 - RNA, 19 nt, Human
uuucuaguuuugggaacca

SEQ ID NO: 317061 - RNA, 22 nt, Human
uuuugggaaccaacagcacaga

SEQ ID NO: 317062 - RNA, 23 nt, Human
uuuuggggagaagagggaccauu

SEQ ID NO: 317063 - RNA, 25 nt, Human
agaggcuacauccucuuuugcugga

SEQ ID NO: 317064 - RNA, 22 nt, Human
agcguuccgguggcggcggcgg

SEQ ID NO: 317065 - RNA, 24 nt, Human
agcugcggggagccuggggcgacg

SEQ ID NO: 317066 - RNA, 18 nt, Human
agggaggaagacuggauc

SEQ ID NO: 317067 - RNA, 21 nt, Human
aguccuuauuuuguuuuuucc

SEQ ID NO: 317068 - RNA, 22 nt, Human
aucaccucuucucucuuaacuc

SEQ ID NO: 317069 - RNA, 18 nt, Human
auuacagucaaguuaucc

SEQ ID NO: 317070 - RNA, 20 nt, Human
auucaagacauugauuugga

SEQ ID NO: 317071 - RNA, 23 nt, Human
caacaacuccaaacaguccaagc

SEQ ID NO: 317072 - RNA, 20 nt, Human
caacucaggaagaugugcaa

SEQ ID NO: 317073 - RNA, 18 nt, Human
caauacagaaaacuguug

SEQ ID NO: 317074 - RNA, 25 nt, Human
cagcggcagcaagagaaggggacag

SEQ ID NO: 317075 - RNA, 25 nt, Human
caggaagaugugcaaaagaaaaaga

SEQ ID NO: 317076 - RNA, 25 nt, Human
caggacauuaggaauuuccagauuu

SEQ ID NO: 317077 - RNA, 19 nt, Human
cauagcaauuucaucaaca

SEQ ID NO: 317078 - RNA, 19 nt, Human
caugaauccgauauucccu

SEQ ID NO: 317079 - RNA, 19 nt, Human
caugaccccauuccacgug

SEQ ID NO: 317080 - RNA, 19 nt, Human
ccaucuucuacuacauaaa

SEQ ID NO: 317081 - RNA, 19 nt, Human
cccagaggcuacauccucu

SEQ ID NO: 317082 - RNA, 20 nt, Human
cccagaggcuacauccucuu

SEQ ID NO: 317083 - RNA, 24 nt, Human
ccccaguaaacaaaacuuuuauca

SEQ ID NO: 317084 - RNA, 23 nt, Human
ccccggacccggcggcggcggcg

SEQ ID NO: 317085 - RNA, 23 nt, Human
ccccuuucucucuccuauuguca

SEQ ID NO: 317086 - RNA, 21 nt, Human
ccggacccggcggcggcggcg

SEQ ID NO: 317087 - RNA, 18 nt, Human
ccuggggcgacggcuguc

SEQ ID NO: 317088 - RNA, 23 nt, Human
cgagaaucuacaaaaaacacugu

SEQ ID NO: 317089 - RNA, 24 nt, Human
cucagcguuccgguggcggcggcg

SEQ ID NO: 317090 - RNA, 23 nt, Human
cucaggaagaugugcaaaagaaa

SEQ ID NO: 317091 - RNA, 24 nt, Human
cuccaaacaguccaagcuguuugc

SEQ ID NO: 317092 - RNA, 21 nt, Human
cuguaauaaugaaacaaaggu

SEQ ID NO: 317093 - RNA, 24 nt, Human
gacguggggagggggggaagggag

SEQ ID NO: 317094 - RNA, 19 nt, Human
gagccgcaggagcuggagc

SEQ ID NO: 317095 - RNA, 20 nt, Human
gagguccgggcagcugcggg

SEQ ID NO: 317096 - RNA, 26 nt, Human
gagguggccgcagcgggggcgggcgg

SEQ ID NO: 317097 - RNA, 25 nt, Human
gccaccuuucgcuacccgcggugga

SEQ ID NO: 317098 - RNA, 24 nt, Human
gccccggacccggcggcggcggcg

SEQ ID NO: 317099 - RNA, 19 nt, Human
gccggacccgaaccucagc

SEQ ID NO: 317100 - RNA, 22 nt, Human
ggaaagauguucaccccaguaa

SEQ ID NO: 317101 - RNA, 20 nt, Human
ggaagggagggaggaagacu

SEQ ID NO: 317102 - RNA, 21 nt, Human
ggaccgggacgugcaggggga

SEQ ID NO: 317103 - RNA, 18 nt, Human
ggagggggggaagggagg

SEQ ID NO: 317104 - RNA, 20 nt, Human
ggagggggggaagggaggga

SEQ ID NO: 317105 - RNA, 23 nt, Human
ggagguccgggcagcugcgggga

SEQ ID NO: 317106 - RNA, 18 nt, Human
gggacagaauaaggagga

SEQ ID NO: 317107 - RNA, 20 nt, Human
gggagccuggggcgacggcu

SEQ ID NO: 317108 - RNA, 18 nt, Human
ggggaagggagggaggaa

SEQ ID NO: 317109 - RNA, 22 nt, Human
gggggaagggagggaggaagac

SEQ ID NO: 317110 - RNA, 23 nt, Human
gguaacaaauacaguaguuagga

SEQ ID NO: 317111 - RNA, 19 nt, Human
uaaaagagggugagaacaa

SEQ ID NO: 317112 - RNA, 21 nt, Human
uaaaagagggugagaacaaug

SEQ ID NO: 317113 - RNA, 21 nt, Human
uaaauaaggaacucccgauaa

SEQ ID NO: 317114 - RNA, 21 nt, Human
uaacaaauacaguaguuagga

SEQ ID NO: 317115 - RNA, 21 nt, Human
uaaggaaaugacagucuuuuu

SEQ ID NO: 317116 - RNA, 20 nt, Human
uacauauuaaaaaguaaggc

SEQ ID NO: 317117 - RNA, 20 nt, Human
uacuauguuuaucaccucuu

SEQ ID NO: 317118 - RNA, 21 nt, Human
uagugauaaauaaggaacucc

SEQ ID NO: 317119 - RNA, 24 nt, Human
uaguguuugucuuucuuauuucaa

SEQ ID NO: 317120 - RNA, 21 nt, Human
uccagauuuuuuucaguagca

SEQ ID NO: 317121 - RNA, 24 nt, Human
ucccaucaaaucggcaccgacccc

SEQ ID NO: 317122 - RNA, 21 nt, Human
ucccuacuauguuuaucaccu

SEQ ID NO: 317123 - RNA, 22 nt, Human
ucccuccgguuccgcggcggcg

SEQ ID NO: 317124 - RNA, 29 nt, Human
uccgguggcggcggcggccucacgauccu

SEQ ID NO: 317125 - RNA, 18 nt, Human
ugaagcuucuggggaaga

SEQ ID NO: 317126 - RNA, 24 nt, Human
ugagaaguccaucuacuguccaaa

SEQ ID NO: 317127 - RNA, 18 nt, Human
ugcagggggagguccggg

SEQ ID NO: 317128 - RNA, 23 nt, Human
ugcauaauaauguuuauccugaa

SEQ ID NO: 317129 - RNA, 18 nt, Human
ugccccggacccggcggc

SEQ ID NO: 317130 - RNA, 18 nt, Human
ugccccuuucucucuccu

SEQ ID NO: 317131 - RNA, 25 nt, Human
uggaaagauguucaccccaguaaac

SEQ ID NO: 317132 - RNA, 23 nt, Human
uggcgggcggcgccucagcucgu

SEQ ID NO: 317133 - RNA, 20 nt, Human
uggggagggggggaagggag

SEQ ID NO: 317134 - RNA, 22 nt, Human
uggggagggggggaagggaggg

SEQ ID NO: 317135 - RNA, 18 nt, Human
ugugcaaaagaaaaagau

SEQ ID NO: 317136 - RNA, 18 nt, Human
uuaaauuacagucaaguu

SEQ ID NO: 317137 - RNA, 22 nt, Human
uucaagacauugauuuggauuc

SEQ ID NO: 317138 - RNA, 24 nt, Human
uucacauuugaaaauuguaucaua

SEQ ID NO: 317139 - RNA, 23 nt, Human
uuguaucauacucucugcuagug

SEQ ID NO: 317140 - RNA, 18 nt, Human
uuucaugguuguauuguu

SEQ ID NO: 317141 - RNA, 21 nt, Human
uuugcaaaguucugagaaguc

SEQ ID NO: 317142 - RNA, 23 nt, Human
uuuuuuuuuuuaaaagaggguga

SEQ ID NO: 317143 - RNA, 22 nt, Human
uuuuuuuuuuuuaaaagagggu

SEQ ID NO: 317144 - RNA, 22 nt, Human
aaaagaaaggaauccaaaaaaa

SEQ ID NO: 317145 - RNA, 22 nt, Human
aaacaaccugauaacaaauuaa

SEQ ID NO: 317146 - RNA, 18 nt, Human
aaacaugcuaaccaucua

SEQ ID NO: 317147 - RNA, 24 nt, Human
aacaauguuacaaacaaacugaaa

SEQ ID NO: 317148 - RNA, 26 nt, Human
aacguucuuuuuuuucuuugggggcc

SEQ ID NO: 317149 - RNA, 23 nt, Human
aacugaauccaauuccuggcccc

SEQ ID NO: 317150 - RNA, 25 nt, Human
aagaagaagauaaguguuauaugga

SEQ ID NO: 317151 - RNA, 26 nt, Human
aagaagccuguggaaaucagccugug

SEQ ID NO: 317152 - RNA, 23 nt, Human
aagcauuuuagagaauauaaagu

SEQ ID NO: 317153 - RNA, 21 nt, Human
aagcgcauuacagucccauac

SEQ ID NO: 317154 - RNA, 19 nt, Human
aaucaccauccccaccaaa

SEQ ID NO: 317155 - RNA, 20 nt, Human
aauuccuggcccccagagcc

SEQ ID NO: 317156 - RNA, 20 nt, Human
acaucauuuuguuaaaaaug

SEQ ID NO: 317157 - RNA, 24 nt, Human
acgccucccgguucuucuuuuauu

SEQ ID NO: 317158 - RNA, 23 nt, Human
acucaguggaaggaugagaauuc

SEQ ID NO: 317159 - RNA, 24 nt, Human
agaaagaaaauaaacaccaugaag

SEQ ID NO: 317160 - RNA, 23 nt, Human
agaacagaacaaaauaacuaaac

SEQ ID NO: 317161 - RNA, 18 nt, Human
agacacucaacgccgccg

SEQ ID NO: 317162 - RNA, 21 nt, Human
agagaauauaaaguacgccag

SEQ ID NO: 317163 - RNA, 18 nt, Human
agccugugauguguggug

SEQ ID NO: 317164 - RNA, 21 nt, Human
agccuguggaaaucagccugu

SEQ ID NO: 317165 - RNA, 20 nt, Human
aggaaaacauguucauuccc

SEQ ID NO: 317166 - RNA, 24 nt, Human
aggaagccagaagauggcaucugc

SEQ ID NO: 317167 - RNA, 21 nt, Human
aguaggcaccaccccucagau

SEQ ID NO: 317168 - RNA, 24 nt, Human
auacaacugaaacaaccugauaac

SEQ ID NO: 317169 - RNA, 25 nt, Human
auacauuuccaguauaugucagacc

SEQ ID NO: 317170 - RNA, 18 nt, Human
auggaaagaagggcauuc

SEQ ID NO: 317171 - RNA, 24 nt, Human
caaaauuucaaaggcauuaagcau

SEQ ID NO: 317172 - RNA, 30 nt, Human
caacugaaacaaccugauaacaaauuaauu

SEQ ID NO: 317173 - RNA, 19 nt, Human
caauaaauaguccuuaguu

SEQ ID NO: 317174 - RNA, 18 nt, Human
caauguuacaaacaaacu

SEQ ID NO: 317175 - RNA, 22 nt, Human
cacacgagcacccaccccggca

SEQ ID NO: 317176 - RNA, 18 nt, Human
caccaccccucagaucac

SEQ ID NO: 317177 - RNA, 22 nt, Human
cagaacagaacaaaauaacuaa

SEQ ID NO: 317178 - RNA, 18 nt, Human
cagaaucaccauuucuuu

SEQ ID NO: 317179 - RNA, 22 nt, Human
cagaaugaaccaguuguaaccc

SEQ ID NO: 317180 - RNA, 20 nt, Human
cagcaagccacaaccaagac

SEQ ID NO: 317181 - RNA, 26 nt, Human
caguauacauacauuuccaguauaug

SEQ ID NO: 317182 - RNA, 24 nt, Human
caucuaaauauuuuccuugguugc

SEQ ID NO: 317183 - RNA, 22 nt, Human
ccaaaagagguguuuaaucacc

SEQ ID NO: 317184 - RNA, 23 nt, Human
cccaaaagagguguuuaaucacc

SEQ ID NO: 317185 - RNA, 22 nt, Human
cccauacaggccgauacagcca

SEQ ID NO: 317186 - RNA, 18 nt, Human
cccaucaugccccgcagc

SEQ ID NO: 317187 - RNA, 19 nt, Human
ccccaucaugccccgcagc

SEQ ID NO: 317188 - RNA, 18 nt, Human
cccccagagcaaauaagc

SEQ ID NO: 317189 - RNA, 30 nt, Human
ccccgcagcucaaaaaaaaaaaaaaaaaaa

SEQ ID NO: 317190 - RNA, 23 nt, Human
ccccucagaucacgaggccccua

SEQ ID NO: 317191 - RNA, 25 nt, Human
cccgguucuucuuuuauucuugggg

SEQ ID NO: 317192 - RNA, 23 nt, Human
cccuaaauauaaacggcaaaaaa

SEQ ID NO: 317193 - RNA, 22 nt, Human
cccuccuccgccgccgccgcua

SEQ ID NO: 317194 - RNA, 18 nt, Human
ccgccgccgccgccgccg

SEQ ID NO: 317195 - RNA, 18 nt, Human
ccgccgccgccgccgccg

SEQ ID NO: 317196 - RNA, 18 nt, Human
ccgccgccgccgccgccg

SEQ ID NO: 317197 - RNA, 18 nt, Human
ccgccgccgccgccgccg

SEQ ID NO: 317198 - RNA, 18 nt, Human
ccgccgccgccgccgccg

SEQ ID NO: 317199 - RNA, 24 nt, Human
ccgccgccgccgccgccgccgccg

SEQ ID NO: 317200 - RNA, 24 nt, Human
ccgccgccgccgccgccgccgccg

SEQ ID NO: 317201 - RNA, 24 nt, Human
ccgccgccgccgccgccgccgccg

SEQ ID NO: 317202 - RNA, 18 nt, Human
ccgccgccgccgccgcgc

SEQ ID NO: 317203 - RNA, 23 nt, Human
ccgccgccgccgccgcgcugcaa

SEQ ID NO: 317204 - RNA, 18 nt, Human
ccgccgccgccgcgcugc

SEQ ID NO: 317205 - RNA, 19 nt, Human
ccgccgcgcugcaaaccgc

SEQ ID NO: 317206 - RNA, 20 nt, Human
ccgccgcgcugcaaaccgcu

SEQ ID NO: 317207 - RNA, 23 nt, Human
ccgcgcugcaaaccgcucggcug

SEQ ID NO: 317208 - RNA, 19 nt, Human
ccgcugccgccagccccgc

SEQ ID NO: 317209 - RNA, 24 nt, Human
cgccgccgccgccgccgccgccgg

SEQ ID NO: 317210 - RNA, 20 nt, Human
cgccgccgccgccgccgcgc

SEQ ID NO: 317211 - RNA, 20 nt, Human
cgcugcucguccguccgacu

SEQ ID NO: 317212 - RNA, 26 nt, Human
cggagacccagcaccgcggaauggag

SEQ ID NO: 317213 - RNA, 19 nt, Human
cgggccagacacucaacgc

SEQ ID NO: 317214 - RNA, 22 nt, Human
cuccgccgcugccgccagcccc

SEQ ID NO: 317215 - RNA, 21 nt, Human
cuccgggcugcgcgugugugg

SEQ ID NO: 317216 - RNA, 19 nt, Human
cuccuccgccgccgccgcc

SEQ ID NO: 317217 - RNA, 24 nt, Human
cuccuccgccgccgccgccuucac

SEQ ID NO: 317218 - RNA, 22 nt, Human
cuccuccgccgcugccgccagc

SEQ ID NO: 317219 - RNA, 20 nt, Human
cucucucccucuuuuuuaau

SEQ ID NO: 317220 - RNA, 19 nt, Human
cuggcccccagagcaaaua

SEQ ID NO: 317221 - RNA, 20 nt, Human
gaagccuguggaaaucagcc

SEQ ID NO: 317222 - RNA, 22 nt, Human
gaccggcgggccagacacucaa

SEQ ID NO: 317223 - RNA, 23 nt, Human
gcacccaccccggcacggagacc

SEQ ID NO: 317224 - RNA, 21 nt, Human
gcaccuagaagacacauggug

SEQ ID NO: 317225 - RNA, 23 nt, Human
ggagaaauauccacaggaaaaaa

SEQ ID NO: 317226 - RNA, 22 nt, Human
ggagacccagcaccgcggaaug

SEQ ID NO: 317227 - RNA, 21 nt, Human
ggauagucuuugccagacugu

SEQ ID NO: 317228 - RNA, 23 nt, Human
gggcauccaauacaacugaaaca

SEQ ID NO: 317229 - RNA, 18 nt, Human
gugugguggugggccagc

SEQ ID NO: 317230 - RNA, 22 nt, Human
gugugguggugggccagcaccu

SEQ ID NO: 317231 - RNA, 23 nt, Human
guucauuccccuaacauugcagu

SEQ ID NO: 317232 - RNA, 21 nt, Human
uaaaaaacaugcauaggcaga

SEQ ID NO: 317233 - RNA, 19 nt, Human
uaaaagauauuccauugcc

SEQ ID NO: 317234 - RNA, 24 nt, Human
uaaaaggcauacccaaaagaggug

SEQ ID NO: 317235 - RNA, 23 nt, Human
uaacauugcaguauauacuagca

SEQ ID NO: 317236 - RNA, 24 nt, Human
uaaccaucuacaugugcauugaca

SEQ ID NO: 317237 - RNA, 22 nt, Human
uaaccuaucuagaaguccccaa

SEQ ID NO: 317238 - RNA, 21 nt, Human
uaagcgcauuacagucccaua

SEQ ID NO: 317239 - RNA, 19 nt, Human
uacaaagggaaaaaaguga

SEQ ID NO: 317240 - RNA, 18 nt, Human
uacaagugcaugcuuuga

SEQ ID NO: 317241 - RNA, 24 nt, Human
uacaugugcauugacaagcuuaug

SEQ ID NO: 317242 - RNA, 24 nt, Human
uaggaagaagccuguggaaaucag

SEQ ID NO: 317243 - RNA, 20 nt, Human
uauaaacggcaaaaaagaua

SEQ ID NO: 317244 - RNA, 22 nt, Human
ucaaaaaaaaaaaaaaaaaaaa

SEQ ID NO: 317245 - RNA, 23 nt, Human
ucaaaaaaaaaaaaaaaaaaaaa

SEQ ID NO: 317246 - RNA, 24 nt, Human
ucaacgccgccgccgccgccgccg

SEQ ID NO: 317247 - RNA, 22 nt, Human
ucagaaugaaccaguuguaacc

SEQ ID NO: 317248 - RNA, 19 nt, Human
ucaguggaaggaugagaau

SEQ ID NO: 317249 - RNA, 23 nt, Human
uccaacugcugauaugcagcaau

SEQ ID NO: 317250 - RNA, 20 nt, Human
ugaaaaaaguacauauuuug

SEQ ID NO: 317251 - RNA, 18 nt, Human
ugaugugugguggugggc

SEQ ID NO: 317252 - RNA, 19 nt, Human
ugccagacuguaucgagaa

SEQ ID NO: 317253 - RNA, 22 nt, Human
ugcgcguguguggugguuauuu

SEQ ID NO: 317254 - RNA, 21 nt, Human
ugcucguccguccgacugcac

SEQ ID NO: 317255 - RNA, 19 nt, Human
uggaaaucagccugugaug

SEQ ID NO: 317256 - RNA, 25 nt, Human
uggcacaugacagaacagaacaaaa

SEQ ID NO: 317257 - RNA, 18 nt, Human
ugggggaagggggauggg

SEQ ID NO: 317258 - RNA, 21 nt, Human
ugucagaagucaaauuacaaa

SEQ ID NO: 317259 - RNA, 19 nt, Human
uguccaguaacagaauaau

SEQ ID NO: 317260 - RNA, 25 nt, Human
uguggcacaugacagaacagaacaa

SEQ ID NO: 317261 - RNA, 23 nt, Human
ugugugguggugggccagcaccu

SEQ ID NO: 317262 - RNA, 21 nt, Human
uuaaaaaacaugcauaggcag

SEQ ID NO: 317263 - RNA, 19 nt, Human
uuagaguuucacauguaac

SEQ ID NO: 317264 - RNA, 21 nt, Human
uuagauaguagcugaagcgug

SEQ ID NO: 317265 - RNA, 23 nt, Human
uucacuauacuuaaaaaugcacc

SEQ ID NO: 317266 - RNA, 24 nt, Human
uucagcggacucaguggaaggaug

SEQ ID NO: 317267 - RNA, 20 nt, Human
uucuugggggaagggggaug

SEQ ID NO: 317268 - RNA, 23 nt, Human
uugccaugcauuuagaguuucac

SEQ ID NO: 317269 - RNA, 22 nt, Human
uuuaaaguugcugccuuuuccg

SEQ ID NO: 317270 - RNA, 20 nt, Human
uuuuauucuugggggaaggg

SEQ ID NO: 317271 - RNA, 21 nt, Human
uuuucugagcacgccucccgg

SEQ ID NO: 317272 - RNA, 18 nt, Human
uuuuuaggauggagaaau

SEQ ID NO: 317273 - RNA, 25 nt, Human
uuuuuagucaggauauuuucucugc

SEQ ID NO: 317274 - RNA, 18 nt, Human
aaaauaccaagacuaugu

SEQ ID NO: 317275 - RNA, 23 nt, Human
aaagaucugggcaaaaaagacuc

SEQ ID NO: 317276 - RNA, 24 nt, Human
aaauauuugcaaaaugaaaacaug

SEQ ID NO: 317277 - RNA, 18 nt, Human
aagcggcggcgccgccgg

SEQ ID NO: 317278 - RNA, 22 nt, Human
acauaaaaaugauagaaagcca

SEQ ID NO: 317279 - RNA, 25 nt, Human
acuauguuacagaauuagccacauu

SEQ ID NO: 317280 - RNA, 19 nt, Human
agacaggagaccauacagg

SEQ ID NO: 317281 - RNA, 19 nt, Human
aggauugcauuugaaauca

SEQ ID NO: 317282 - RNA, 20 nt, Human
agguguggaugcccuccacu

SEQ ID NO: 317283 - RNA, 22 nt, Human
auaaaauggagguguggaugcc

SEQ ID NO: 317284 - RNA, 19 nt, Human
augcccuccacuggaaauu

SEQ ID NO: 317285 - RNA, 21 nt, Human
auggaaaaagaaaaguccaca

SEQ ID NO: 317286 - RNA, 18 nt, Human
caaaaucuaauucuacug

SEQ ID NO: 317287 - RNA, 23 nt, Human
caaaguaaagggaaauaccaaac

SEQ ID NO: 317288 - RNA, 18 nt, Human
caccuuggcagcgaugac

SEQ ID NO: 317289 - RNA, 22 nt, Human
cagagccaagcggcggcgccgc

SEQ ID NO: 317290 - RNA, 24 nt, Human
ccagcuccucgggugaucugucca

SEQ ID NO: 317291 - RNA, 21 nt, Human
ccauuuggggcccgagaugug

SEQ ID NO: 317292 - RNA, 20 nt, Human
cccagggcccucaagccucc

SEQ ID NO: 317293 - RNA, 22 nt, Human
ccccaagccccuugcucacugc

SEQ ID NO: 317294 - RNA, 24 nt, Human
ccccuccagcuccucgggugaucu

SEQ ID NO: 317295 - RNA, 18 nt, Human
ccccuugcucacugcucu

SEQ ID NO: 317296 - RNA, 20 nt, Human
ccccuugcucacugcucucc

SEQ ID NO: 317297 - RNA, 21 nt, Human
cccuccacuggaaauugcccc

SEQ ID NO: 317298 - RNA, 19 nt, Human
ccuuugcauuaaaacauaa

SEQ ID NO: 317299 - RNA, 20 nt, Human
cucauaacaucuagguaacc

SEQ ID NO: 317300 - RNA, 20 nt, Human
cuucuuaaaucucuggggug

SEQ ID NO: 317301 - RNA, 25 nt, Human
gaaauugccccaagccccuugcuca

SEQ ID NO: 317302 - RNA, 20 nt, Human
gaccccuccagcuccucggg

SEQ ID NO: 317303 - RNA, 19 nt, Human
gccgggcgggguugggggc

SEQ ID NO: 317304 - RNA, 19 nt, Human
gcugggcccggggcucggc

SEQ ID NO: 317305 - RNA, 23 nt, Human
ggagguguggaugcccuccacug

SEQ ID NO: 317306 - RNA, 18 nt, Human
ggcccggggcucggcuag

SEQ ID NO: 317307 - RNA, 22 nt, Human
ggccgggcgggguugggggcgg

SEQ ID NO: 317308 - RNA, 21 nt, Human
ggcgggguugggggcgggggc

SEQ ID NO: 317309 - RNA, 19 nt, Human
ggggcccgagaugugagag

SEQ ID NO: 317310 - RNA, 18 nt, Human
gguugggggcgggggcgg

SEQ ID NO: 317311 - RNA, 24 nt, Human
guggcucucuaagcaacuugagua

SEQ ID NO: 317312 - RNA, 22 nt, Human
uaaaauuuccuuugcauuaaaa

SEQ ID NO: 317313 - RNA, 22 nt, Human
uaacuaucaaaagaaagguuuc

SEQ ID NO: 317314 - RNA, 23 nt, Human
uaaucaaaaacacuuccagaaca

SEQ ID NO: 317315 - RNA, 23 nt, Human
uaccaagacuauguuacagaauu

SEQ ID NO: 317316 - RNA, 21 nt, Human
uacgucaaguuuuacagacau

SEQ ID NO: 317317 - RNA, 21 nt, Human
uagaaagccagcagcaaauca

SEQ ID NO: 317318 - RNA, 18 nt, Human
uagaugguuccgcugccu

SEQ ID NO: 317319 - RNA, 23 nt, Human
uagggucucagaagcacaauggu

SEQ ID NO: 317320 - RNA, 22 nt, Human
uaucaaaagaaagguuucaaca

SEQ ID NO: 317321 - RNA, 20 nt, Human
uccacuggaaauugccccaa

SEQ ID NO: 317322 - RNA, 23 nt, Human
uccaggaagggggcuagggucuc

SEQ ID NO: 317323 - RNA, 22 nt, Human
ucccagggcccucaagccucca

SEQ ID NO: 317324 - RNA, 18 nt, Human
ucugggcaaaaaagacuc

SEQ ID NO: 317325 - RNA, 18 nt, Human
ugagagucccugggaagu

SEQ ID NO: 317326 - RNA, 18 nt, Human
ugauuuguaaacuuaaau

SEQ ID NO: 317327 - RNA, 21 nt, Human
ugccccaagccccuugcucac

SEQ ID NO: 317328 - RNA, 24 nt, Human
ugccccaagccccuugcucacugc

SEQ ID NO: 317329 - RNA, 19 nt, Human
uggaaaaagaaaaguccac

SEQ ID NO: 317330 - RNA, 25 nt, Human
uggcaaacaaaacaauagaugguuc

SEQ ID NO: 317331 - RNA, 20 nt, Human
ugggccgggcgggguugggg

SEQ ID NO: 317332 - RNA, 19 nt, Human
ugggguguaagucuuaaaa

SEQ ID NO: 317333 - RNA, 20 nt, Human
uggguuucucggcauuuugc

SEQ ID NO: 317334 - RNA, 21 nt, Human
uguacaucauaggucuauaua

SEQ ID NO: 317335 - RNA, 22 nt, Human
uguggaugcccuccacuggaaa

SEQ ID NO: 317336 - RNA, 24 nt, Human
uguggaugcccuccacuggaaauu

SEQ ID NO: 317337 - RNA, 18 nt, Human
uuuguguucaaguaagag

SEQ ID NO: 317338 - RNA, 20 nt, Human
acugacaggacgagggccca

SEQ ID NO: 317339 - RNA, 21 nt, Human
agaaaaaagggaaaaacaaaa

SEQ ID NO: 317340 - RNA, 19 nt, Human
agccagccgugcccggccc

SEQ ID NO: 317341 - RNA, 24 nt, Human
agguugaaguuguuuugaguugcu

SEQ ID NO: 317342 - RNA, 19 nt, Human
caccugagccacggcagga

SEQ ID NO: 317343 - RNA, 20 nt, Human
cagcgccggccuccgacgcc

SEQ ID NO: 317344 - RNA, 24 nt, Human
caggacgagggcccaccggccgcu

SEQ ID NO: 317345 - RNA, 18 nt, Human
cccgccggacgugcgccu

SEQ ID NO: 317346 - RNA, 22 nt, Human
ccgcggccgccgccuucuccuc

SEQ ID NO: 317347 - RNA, 18 nt, Human
cgaccgggacagccgcgg

SEQ ID NO: 317348 - RNA, 23 nt, Human
cgccuucuccucgggcagccuua

SEQ ID NO: 317349 - RNA, 22 nt, Human
cggggaacaccgcuucggcacc

SEQ ID NO: 317350 - RNA, 22 nt, Human
gagaaaaaagggaaaaacaaaa

SEQ ID NO: 317351 - RNA, 26 nt, Human
gagaaaaaagggaaaaacaaaacaga

SEQ ID NO: 317352 - RNA, 22 nt, Human
gccagccgugcccggccccggc

SEQ ID NO: 317353 - RNA, 21 nt, Human
gcccggccccggcuccucagc

SEQ ID NO: 317354 - RNA, 22 nt, Human
ggggaacaccgcuucggcaccg

SEQ ID NO: 317355 - RNA, 21 nt, Human
uagcacaagacuucacaaaug

SEQ ID NO: 317356 - RNA, 23 nt, Human
uccccucggccuccuccaggcuc

SEQ ID NO: 317357 - RNA, 22 nt, Human
uccgagcaccagaagggcgcgg

SEQ ID NO: 317358 - RNA, 23 nt, Human
uccuccaggcuccaggagcccgc

SEQ ID NO: 317359 - RNA, 24 nt, Human
uccucgggcagccuuagcugcccg

SEQ ID NO: 317360 - RNA, 22 nt, Human
ucucuugggaggcgccagcggc

SEQ ID NO: 317361 - RNA, 21 nt, Human
ugaauuauaaaugcaccucca

SEQ ID NO: 317362 - RNA, 19 nt, Human
ugcgccuacgccgcggccg

SEQ ID NO: 317363 - RNA, 24 nt, Human
ugcuaaggguggcgaccgggacag

SEQ ID NO: 317364 - RNA, 21 nt, Human
uguguugacaacaaucagauu

SEQ ID NO: 317365 - RNA, 19 nt, Human
uucuccucgggcagccuua

SEQ ID NO: 317366 - RNA, 18 nt, Human
uuuacagaauaaaugcag

SEQ ID NO: 317367 - RNA, 22 nt, Human
uuuuuuuuuuuuugagguuucc

SEQ ID NO: 317368 - RNA, 18 nt, Human
uuuuuuuuuuuuuuuuug

SEQ ID NO: 317369 - RNA, 21 nt, Human
uuuuuuuuuuuuuuuuugagg

SEQ ID NO: 317370 - RNA, 18 nt, Human
aaaaagccaaccccuucc

SEQ ID NO: 317371 - RNA, 18 nt, Human
aaaggaaaauagcuggcc

SEQ ID NO: 317372 - RNA, 22 nt, Human
aaaggaaaauagcuggccuaac

SEQ ID NO: 317373 - RNA, 19 nt, Human
aagaaaggagggggagagg

SEQ ID NO: 317374 - RNA, 22 nt, Human
aagaaaggagggggagaggggg

SEQ ID NO: 317375 - RNA, 24 nt, Human
aagaagaaaggagggggagagggg

SEQ ID NO: 317376 - RNA, 22 nt, Human
aaguauauuaaauuaaagccaa

SEQ ID NO: 317377 - RNA, 18 nt, Human
aaucaagaaaaaaaaacc

SEQ ID NO: 317378 - RNA, 22 nt, Human
aaucaagaaaaaaaaaccagua

SEQ ID NO: 317379 - RNA, 18 nt, Human
acuacauauauagaaagc

SEQ ID NO: 317380 - RNA, 22 nt, Human
acuuuaaagugcuacacugagu

SEQ ID NO: 317381 - RNA, 18 nt, Human
agaaaggagggggagagg

SEQ ID NO: 317382 - RNA, 20 nt, Human
agaaaggagggggagagggg

SEQ ID NO: 317383 - RNA, 20 nt, Human
agaagaaaggagggggagag

SEQ ID NO: 317384 - RNA, 19 nt, Human
agagggggcgaagacggcc

SEQ ID NO: 317385 - RNA, 18 nt, Human
agcagcggcgagaggcag

SEQ ID NO: 317386 - RNA, 19 nt, Human
agcuggccuaacacccggc

SEQ ID NO: 317387 - RNA, 24 nt, Human
aggaaaauagcuggccuaacaccc

SEQ ID NO: 317388 - RNA, 19 nt, Human
agggggaaauaaauuaagg

SEQ ID NO: 317389 - RNA, 25 nt, Human
auauaucuauauauaaauauuuaca

SEQ ID NO: 317390 - RNA, 19 nt, Human
augaagcagcuauaagccc

SEQ ID NO: 317391 - RNA, 20 nt, Human
augaagcagcuauaagcccu

SEQ ID NO: 317392 - RNA, 22 nt, Human
caagaaaaaaaaaccaguaugc

SEQ ID NO: 317393 - RNA, 20 nt, Human
cacagagagcauugcuggac

SEQ ID NO: 317394 - RNA, 19 nt, Human
cacuuaaaccacaaauaua

SEQ ID NO: 317395 - RNA, 23 nt, Human
cccgcgccggccgggcgauuggg

SEQ ID NO: 317396 - RNA, 18 nt, Human
ccgcggggcccgcgccgg

SEQ ID NO: 317397 - RNA, 19 nt, Human
ccucagacagcuucuggcc

SEQ ID NO: 317398 - RNA, 21 nt, Human
ccucagacagcuucuggccuu

SEQ ID NO: 317399 - RNA, 18 nt, Human
cgggggcugcagccucgc

SEQ ID NO: 317400 - RNA, 22 nt, Human
cuaacacccggcucaaauugua

SEQ ID NO: 317401 - RNA, 18 nt, Human
cucuuggcaguagcaaug

SEQ ID NO: 317402 - RNA, 21 nt, Human
cugcagccucgcgcucgcgcc

SEQ ID NO: 317403 - RNA, 23 nt, Human
gaaaauagcuggccuaacacccc

SEQ ID NO: 317404 - RNA, 21 nt, Human
gagaagaagaaaggaggggga

SEQ ID NO: 317405 - RNA, 24 nt, Human
gagaggcagagaagaagaaaggag

SEQ ID NO: 317406 - RNA, 19 nt, Human
gaggcaggagaggcagaga

SEQ ID NO: 317407 - RNA, 26 nt, Human
gagggggagagggggcgaagacggcc

SEQ ID NO: 317408 - RNA, 26 nt, Human
gccaaccccuucccuuucuccaccac

SEQ ID NO: 317409 - RNA, 19 nt, Human
gcggcggcccagcugcggc

SEQ ID NO: 317410 - RNA, 22 nt, Human
gcuacacugaguuauugagaga

SEQ ID NO: 317411 - RNA, 19 nt, Human
ggcggggagggggcgcgcg

SEQ ID NO: 317412 - RNA, 20 nt, Human
ggcggggagggggcgcgcgu

SEQ ID NO: 317413 - RNA, 25 nt, Human
gggcaaaucaagaaaaaaaaaccag

SEQ ID NO: 317414 - RNA, 23 nt, Human
gggcaggguagggggaaauaaau

SEQ ID NO: 317415 - RNA, 25 nt, Human
uaaagccaaccuacuacauauauag

SEQ ID NO: 317416 - RNA, 20 nt, Human
uaaauauuuacauauguaua

SEQ ID NO: 317417 - RNA, 23 nt, Human
uaacaaaugcuuugucaaucucu

SEQ ID NO: 317418 - RNA, 19 nt, Human
uacaaucaaucaugauugc

SEQ ID NO: 317419 - RNA, 19 nt, Human
uacuacauauauagaaagc

SEQ ID NO: 317420 - RNA, 19 nt, Human
uacuauaugaacacaagaa

SEQ ID NO: 317421 - RNA, 25 nt, Human
uagauacauacaugcauauuaaaua

SEQ ID NO: 317422 - RNA, 19 nt, Human
uauauaaauauuuacauau

SEQ ID NO: 317423 - RNA, 24 nt, Human
uauauaaauauuuacauauguaua

SEQ ID NO: 317424 - RNA, 25 nt, Human
uaugggcaaaucaagaaaaaaaaac

SEQ ID NO: 317425 - RNA, 23 nt, Human
ucaaaggagaaagcacaggaaaa

SEQ ID NO: 317426 - RNA, 18 nt, Human
ucagagccggagagcgcg

SEQ ID NO: 317427 - RNA, 24 nt, Human
ucagagccggagagcgcgggagga

SEQ ID NO: 317428 - RNA, 18 nt, Human
ucaguaagugauacauac

SEQ ID NO: 317429 - RNA, 22 nt, Human
ucgggggcugcagccucgcgcu

SEQ ID NO: 317430 - RNA, 24 nt, Human
ucuccucaagcagagguguauuaa

SEQ ID NO: 317431 - RNA, 22 nt, Human
ugagcagaucuucagagaugga

SEQ ID NO: 317432 - RNA, 18 nt, Human
ugccucagacagcuucug

SEQ ID NO: 317433 - RNA, 20 nt, Human
ugccucagacagcuucuggc

SEQ ID NO: 317434 - RNA, 28 nt, Human
ugcucuaucccucgugguaaagaaauuu

SEQ ID NO: 317435 - RNA, 20 nt, Human
uggcauaaauuuggauacaa

SEQ ID NO: 317436 - RNA, 20 nt, Human
uggcucgcaggaaacggcgg

SEQ ID NO: 317437 - RNA, 19 nt, Human
ugggggaggggaggcggcg

SEQ ID NO: 317438 - RNA, 25 nt, Human
uggguguuuagauacauacaugcag

SEQ ID NO: 317439 - RNA, 18 nt, Human
uuaaagccaaccuacuac

SEQ ID NO: 317440 - RNA, 25 nt, Human
uucagagccggagagcgcgggagga

SEQ ID NO: 317441 - RNA, 21 nt, Human
uucucacacuuaaaccacaaa

SEQ ID NO: 317442 - RNA, 18 nt, Human
uuggauacaauuuugcuc

SEQ ID NO: 317443 - RNA, 21 nt, Human
uuguuauaaaagaugaagaaa

SEQ ID NO: 317444 - RNA, 23 nt, Human
uuguuuuguuucugaaucaagua

SEQ ID NO: 317445 - RNA, 24 nt, Human
aaacaaacagaaaaaagaaggaaa

SEQ ID NO: 317446 - RNA, 19 nt, Human
aaagaaggaaaaaaagaaa

SEQ ID NO: 317447 - RNA, 18 nt, Human
aagaaggaaaaaaagaaa

SEQ ID NO: 317448 - RNA, 21 nt, Human
aagcacccucuugggggacag

SEQ ID NO: 317449 - RNA, 18 nt, Human
aaguggggagagaggagg

SEQ ID NO: 317450 - RNA, 20 nt, Human
agaaaaaagaaggaaaaaaa

SEQ ID NO: 317451 - RNA, 22 nt, Human
agagaggaggaggaacauggag

SEQ ID NO: 317452 - RNA, 23 nt, Human
agagaggaggaggaacauggagc

SEQ ID NO: 317453 - RNA, 18 nt, Human
agcacccucuugggggac

SEQ ID NO: 317454 - RNA, 19 nt, Human
agccaggacagcccccccc

SEQ ID NO: 317455 - RNA, 20 nt, Human
agccccccccacgcccagcc

SEQ ID NO: 317456 - RNA, 21 nt, Human
agggggcaggggccgggcggg

SEQ ID NO: 317457 - RNA, 20 nt, Human
auuuuuucauuuuuuuucuc

SEQ ID NO: 317458 - RNA, 25 nt, Human
cagcagagccaggacagcccccccc

SEQ ID NO: 317459 - RNA, 18 nt, Human
cccccacgcccagccucc

SEQ ID NO: 317460 - RNA, 20 nt, Human
cccccacgcccagccuccgu

SEQ ID NO: 317461 - RNA, 22 nt, Human
ccccccacgcccagccuccguc

SEQ ID NO: 317462 - RNA, 18 nt, Human
ccccccccacgcccagcc

SEQ ID NO: 317463 - RNA, 18 nt, Human
ccccccccacgcccagcc

SEQ ID NO: 317464 - RNA, 18 nt, Human
ccgccgcugcgacuccgg

SEQ ID NO: 317465 - RNA, 23 nt, Human
cuccgcaccgcacaggggucucc

SEQ ID NO: 317466 - RNA, 22 nt, Human
gaaggaaaaaaagaaaaaaaaa

SEQ ID NO: 317467 - RNA, 18 nt, Human
gaggaacauggagcuagg

SEQ ID NO: 317468 - RNA, 23 nt, Human
gccgccgcccccuccgcaccgca

SEQ ID NO: 317469 - RNA, 22 nt, Human
gggacagcagagccaggacagc

SEQ ID NO: 317470 - RNA, 18 nt, Human
gggggcaggggccgggcg

SEQ ID NO: 317471 - RNA, 19 nt, Human
ggguuggagggggcagggg

SEQ ID NO: 317472 - RNA, 21 nt, Human
uaucuaaaaacaaacagaaaa

SEQ ID NO: 317473 - RNA, 24 nt, Human
uaucuaaaaacaaacagaaaaaag

SEQ ID NO: 317474 - RNA, 24 nt, Human
ucuccaggccucuccagagaaguc

SEQ ID NO: 317475 - RNA, 21 nt, Human
ucuccgccgcugcgacuccgg

SEQ ID NO: 317476 - RNA, 19 nt, Human
ucuugggggacagcagagc

SEQ ID NO: 317477 - RNA, 18 nt, Human
uggggagagaggaggagg

SEQ ID NO: 317478 - RNA, 19 nt, Human
uggugcgagggccagaagg

SEQ ID NO: 317479 - RNA, 20 nt, Human
uggugcgagggccagaaggg

SEQ ID NO: 317480 - RNA, 19 nt, Human
uuuuuuucauuuuucuucu

SEQ ID NO: 317481 - RNA, 24 nt, Human
uuuuuuuuuuuuuuuuucauuuuu

SEQ ID NO: 317482 - RNA, 24 nt, Human
aaaaaaucagacacagacacucag

SEQ ID NO: 317483 - RNA, 21 nt, Human
aagcaggaaagacaccgagau

SEQ ID NO: 317484 - RNA, 18 nt, Human
acucagcaaccauucugu

SEQ ID NO: 317485 - RNA, 21 nt, Human
agacacagacacucagcaacc

SEQ ID NO: 317486 - RNA, 27 nt, Human
agacacucagcaaccauucuguaaaug

SEQ ID NO: 317487 - RNA, 20 nt, Human
aggagauguaaaaaccccuc

SEQ ID NO: 317488 - RNA, 22 nt, Human
augcucugccaauucaaguuuc

SEQ ID NO: 317489 - RNA, 21 nt, Human
auggaagcaggaaagacaccg

SEQ ID NO: 317490 - RNA, 20 nt, Human
cagacacagacacucagcaa

SEQ ID NO: 317491 - RNA, 23 nt, Human
cagcaauaugcugcgcuuaagag

SEQ ID NO: 317492 - RNA, 20 nt, Human
cagcaugaaaaaaucagaca

SEQ ID NO: 317493 - RNA, 19 nt, Human
ccgcccggggagccggggc

SEQ ID NO: 317494 - RNA, 19 nt, Human
cgaaugcccacugaaccuc

SEQ ID NO: 317495 - RNA, 22 nt, Human
cguggcgaaugcccacugaacc

SEQ ID NO: 317496 - RNA, 19 nt, Human
cuccuccgcggccgcccgg

SEQ ID NO: 317497 - RNA, 21 nt, Human
cugaaggucucuuucacaucu

SEQ ID NO: 317498 - RNA, 21 nt, Human
cuuuuuuuuuuuuuuuacagg

SEQ ID NO: 317499 - RNA, 21 nt, Human
gaacuugugccacaacaguuu

SEQ ID NO: 317500 - RNA, 24 nt, Human
gaagaaguugcaccucagagcuga

SEQ ID NO: 317501 - RNA, 20 nt, Human
gacagcuggccacagagccc

SEQ ID NO: 317502 - RNA, 20 nt, Human
gaguuuucuuuuuuuuuuuu

SEQ ID NO: 317503 - RNA, 24 nt, Human
gcacacgucacaaacgauucacac

SEQ ID NO: 317504 - RNA, 21 nt, Human
gccacagagcccagcaagucc

SEQ ID NO: 317505 - RNA, 21 nt, Human
ggcccgggcccuccucgaguu

SEQ ID NO: 317506 - RNA, 18 nt, Human
gggcacacgucugccuuc

SEQ ID NO: 317507 - RNA, 23 nt, Human
gggcugggcuggacagcuggcca

SEQ ID NO: 317508 - RNA, 22 nt, Human
uaaagacugcagcacucccaag

SEQ ID NO: 317509 - RNA, 18 nt, Human
uaaauguguacagcaaua

SEQ ID NO: 317510 - RNA, 18 nt, Human
uagaaaacaaucaaaagu

SEQ ID NO: 317511 - RNA, 26 nt, Human
uaggagauguaaaaacccccugaaag

SEQ ID NO: 317512 - RNA, 22 nt, Human
ucaucccuuccauaaggaaaau

SEQ ID NO: 317513 - RNA, 21 nt, Human
uccucgaguuuucuuuuuuuu

SEQ ID NO: 317514 - RNA, 24 nt, Human
ucgauuguuaaauaaaaccaggag

SEQ ID NO: 317515 - RNA, 22 nt, Human
ugacaauuauaauccucugaga

SEQ ID NO: 317516 - RNA, 21 nt, Human
ugcaccugcaaugaaguccgc

SEQ ID NO: 317517 - RNA, 19 nt, Human
ugcccacugaaccucggcu

SEQ ID NO: 317518 - RNA, 25 nt, Human
ugggagagaagaguuagggcugguc

SEQ ID NO: 317519 - RNA, 25 nt, Human
uguaaaaaccccuccuuucccauuu

SEQ ID NO: 317520 - RNA, 22 nt, Human
uguaggcaacuugcaccugcaa

SEQ ID NO: 317521 - RNA, 23 nt, Human
uucuuuuuuuuuuuuuuuacagg

SEQ ID NO: 317522 - RNA, 19 nt, Human
uuuuuuuuuuuuacagguc

SEQ ID NO: 317523 - RNA, 24 nt, Human
aaauacaaacuuuacaaaguaaaa

SEQ ID NO: 317524 - RNA, 20 nt, Human
aagcgaccccuacccuggca

SEQ ID NO: 317525 - RNA, 23 nt, Human
acagaaugcccaggcugugcccc

SEQ ID NO: 317526 - RNA, 21 nt, Human
accuccuuccucucuguccag

SEQ ID NO: 317527 - RNA, 19 nt, Human
acuuuacaaaguaaaaggg

SEQ ID NO: 317528 - RNA, 24 nt, Human
agccacucggccccaccccacccc

SEQ ID NO: 317529 - RNA, 21 nt, Human
aggggaggcgcaggcggggcc

SEQ ID NO: 317530 - RNA, 24 nt, Human
caccuccuuccucucuguccaggg

SEQ ID NO: 317531 - RNA, 25 nt, Human
caccuccuuccucucuguccaggga

SEQ ID NO: 317532 - RNA, 23 nt, Human
cagaaugcccaggcugugccccc

SEQ ID NO: 317533 - RNA, 20 nt, Human
cagccccugacucugccccu

SEQ ID NO: 317534 - RNA, 18 nt, Human
caggcggggccccccugc

SEQ ID NO: 317535 - RNA, 18 nt, Human
cagggcagccacucggcc

SEQ ID NO: 317536 - RNA, 21 nt, Human
cagggcagccacucggcccca

SEQ ID NO: 317537 - RNA, 22 nt, Human
ccaccuccuuccucucugucca

SEQ ID NO: 317538 - RNA, 18 nt, Human
cccaccccaccccgagga

SEQ ID NO: 317539 - RNA, 20 nt, Human
cccagccccagcugcuccac

SEQ ID NO: 317540 - RNA, 22 nt, Human
cccagccuagccccaccauggg

SEQ ID NO: 317541 - RNA, 18 nt, Human
cccaggcugugcccccag

SEQ ID NO: 317542 - RNA, 18 nt, Human
ccccaccccaccccgagg

SEQ ID NO: 317543 - RNA, 22 nt, Human
ccccaccccaccccgaggacgg

SEQ ID NO: 317544 - RNA, 25 nt, Human
ccccaccccgaggacggccuccccc

SEQ ID NO: 317545 - RNA, 26 nt, Human
ccccagccuagccccaccauggggcu

SEQ ID NO: 317546 - RNA, 19 nt, Human
cccccagccccagcugcuc

SEQ ID NO: 317547 - RNA, 18 nt, Human
ccuccuuccucucugucc

SEQ ID NO: 317548 - RNA, 23 nt, Human
ccucugcaaaccuaaaggggaau

SEQ ID NO: 317549 - RNA, 21 nt, Human
ccucuggccagccccugacuc

SEQ ID NO: 317550 - RNA, 23 nt, Human
ccugacucugccccuacccccuc

SEQ ID NO: 317551 - RNA, 21 nt, Human
ccugcugacccucucucuggg

SEQ ID NO: 317552 - RNA, 18 nt, Human
cgcaggcggggccccccu

SEQ ID NO: 317553 - RNA, 25 nt, Human
cgccagcggcacccggccgaacccu

SEQ ID NO: 317554 - RNA, 20 nt, Human
cggggccugcucugccccua

SEQ ID NO: 317555 - RNA, 18 nt, Human
cuacccccucugcaaacc

SEQ ID NO: 317556 - RNA, 23 nt, Human
cucuggccagccccugacucugc

SEQ ID NO: 317557 - RNA, 20 nt, Human
gcaaagcgaccccuacccug

SEQ ID NO: 317558 - RNA, 23 nt, Human
gcccccagccccagcugcuccac

SEQ ID NO: 317559 - RNA, 20 nt, Human
gcugcuccaccuccuuccuc

SEQ ID NO: 317560 - RNA, 18 nt, Human
ggcggggcccuauugcuu

SEQ ID NO: 317561 - RNA, 21 nt, Human
uaaaauagcuggggagggggg

SEQ ID NO: 317562 - RNA, 23 nt, Human
uacccccucugcaaaccuaaagg

SEQ ID NO: 317563 - RNA, 21 nt, Human
uauggcggggcccuauugcuu

SEQ ID NO: 317564 - RNA, 19 nt, Human
uccccacagaaugcccagg

SEQ ID NO: 317565 - RNA, 24 nt, Human
uccuauggcggggcccuauugcuu

SEQ ID NO: 317566 - RNA, 24 nt, Human
ucuggccagccccugacucugccc

SEQ ID NO: 317567 - RNA, 23 nt, Human
ugacccucucucugggggucuuc

SEQ ID NO: 317568 - RNA, 20 nt, Human
ugacucugccccuacccccu

SEQ ID NO: 317569 - RNA, 20 nt, Human
ugaggggggcagggcagcca

SEQ ID NO: 317570 - RNA, 21 nt, Human
ugcccccagccccagcugcuc

SEQ ID NO: 317571 - RNA, 23 nt, Human
ugcuccaccuccuuccucucugu

SEQ ID NO: 317572 - RNA, 19 nt, Human
uggggaggggggugagccc

SEQ ID NO: 317573 - RNA, 24 nt, Human
uggggaggggggugagccccagcc

SEQ ID NO: 317574 - RNA, 21 nt, Human
uggggcggggccugcucugcc

SEQ ID NO: 317575 - RNA, 19 nt, Human
uuggaggggcccugggaug

SEQ ID NO: 317576 - RNA, 18 nt, Human
uuuacaaaguaaaagggg

SEQ ID NO: 317577 - RNA, 21 nt, Human
aaaaaaggaaacacauccugu

SEQ ID NO: 317578 - RNA, 18 nt, Human
aagcaagagcuacaugca

SEQ ID NO: 317579 - RNA, 20 nt, Human
aagcaagagcuacaugcagc

SEQ ID NO: 317580 - RNA, 20 nt, Human
acagcggcggcggcggcugu

SEQ ID NO: 317581 - RNA, 20 nt, Human
acuaaaacaaaaggcugaau

SEQ ID NO: 317582 - RNA, 22 nt, Human
aggcagcauuucagcagcaaag

SEQ ID NO: 317583 - RNA, 23 nt, Human
augggucagcaggaugggcgaag

SEQ ID NO: 317584 - RNA, 21 nt, Human
auuuaaaaaaaaaaaaggcaa

SEQ ID NO: 317585 - RNA, 23 nt, Human
caaagugcucaauaaaaaguaua

SEQ ID NO: 317586 - RNA, 19 nt, Human
caagccgcggcaacagcgg

SEQ ID NO: 317587 - RNA, 18 nt, Human
cauuuggaguccaucgug

SEQ ID NO: 317588 - RNA, 29 nt, Human
cgcggcaacagcggcggcggcggcuuuuu

SEQ ID NO: 317589 - RNA, 25 nt, Human
cggcaacagcggcggcggcggcugu

SEQ ID NO: 317590 - RNA, 24 nt, Human
cuaaaacaaaaggcugaaugauac

SEQ ID NO: 317591 - RNA, 20 nt, Human
gcaagagcuacaugcagcag

SEQ ID NO: 317592 - RNA, 21 nt, Human
gcggcggcggcggcuguagca

SEQ ID NO: 317593 - RNA, 20 nt, Human
ggacagguauacauaacuuu

SEQ ID NO: 317594 - RNA, 21 nt, Human
guagcagcggcggcggcagcg

SEQ ID NO: 317595 - RNA, 19 nt, Human
uaagaauaacaagccgcgg

SEQ ID NO: 317596 - RNA, 21 nt, Human
uaccaaacuaaaacaaaaggc

SEQ ID NO: 317597 - RNA, 24 nt, Human
uagaaaaacuuugcuauagacacc

SEQ ID NO: 317598 - RNA, 20 nt, Human
ugggaugggggaaaauugau

SEQ ID NO: 317599 - RNA, 26 nt, Human
uuaccaaacuaaaacaaaaggcugaa

SEQ ID NO: 317600 - RNA, 19 nt, Human
uugaggcauuuggagucca

SEQ ID NO: 317601 - RNA, 18 nt, Human
uuuuuuuuuuuuuuuuug

SEQ ID NO: 317602 - RNA, 25 nt, Human
uuuuuuuuuuuuuuuuuuguccuuu

SEQ ID NO: 317603 - RNA, 27 nt, Human
uuuuuuuuuuuuuuuuuuguccuuuag

SEQ ID NO: 317604 - RNA, 21 nt, Human
aaaagcguuaaguuuucacag

SEQ ID NO: 317605 - RNA, 20 nt, Human
aaaauuauuuucacaucccc

SEQ ID NO: 317606 - RNA, 19 nt, Human
aacagaagauggcaaaggg

SEQ ID NO: 317607 - RNA, 22 nt, Human
aacagaguaaguugacucuagc

SEQ ID NO: 317608 - RNA, 22 nt, Human
aaccauaauggcuaaacuuagc

SEQ ID NO: 317609 - RNA, 22 nt, Human
aagcuuuuugagcaaacaaucc

SEQ ID NO: 317610 - RNA, 21 nt, Human
aaggcagccuuaagaaaugau

SEQ ID NO: 317611 - RNA, 19 nt, Human
aaguugacucuagcaucaa

SEQ ID NO: 317612 - RNA, 22 nt, Human
aaucaccagcaaaacaaagcau

SEQ ID NO: 317613 - RNA, 23 nt, Human
aauccucaucuuuuaguugaaga

SEQ ID NO: 317614 - RNA, 23 nt, Human
agaaagggcagguuggucgagaa

SEQ ID NO: 317615 - RNA, 21 nt, Human
agcuuuuugagcaaacaaucc

SEQ ID NO: 317616 - RNA, 22 nt, Human
aggggcucccugagcucuauug

SEQ ID NO: 317617 - RNA, 23 nt, Human
aguguguaguauuuuccaagcuu

SEQ ID NO: 317618 - RNA, 19 nt, Human
auauuaagaaagggcaggu

SEQ ID NO: 317619 - RNA, 21 nt, Human
ccaacuucuugcucuuaaucc

SEQ ID NO: 317620 - RNA, 21 nt, Human
cuaaacuuagcagcaccaaca

SEQ ID NO: 317621 - RNA, 21 nt, Human
cucacuuuucacuuucgcgcc

SEQ ID NO: 317622 - RNA, 23 nt, Human
cucaucauuucuccaaacugaca

SEQ ID NO: 317623 - RNA, 20 nt, Human
cucauggaacacaucagaaa

SEQ ID NO: 317624 - RNA, 18 nt, Human
cugguaaauguguuuugg

SEQ ID NO: 317625 - RNA, 21 nt, Human
cuucuugcucuuaauccucau

SEQ ID NO: 317626 - RNA, 19 nt, Human
gaauaaggcuuaagagaga

SEQ ID NO: 317627 - RNA, 21 nt, Human
gaauggaauaggaagaacuag

SEQ ID NO: 317628 - RNA, 21 nt, Human
gagacaaagugggugcugcag

SEQ ID NO: 317629 - RNA, 22 nt, Human
gagacaaagugggugcugcaga

SEQ ID NO: 317630 - RNA, 21 nt, Human
gaucugagcucaggcuugggc

SEQ ID NO: 317631 - RNA, 20 nt, Human
gcagguuggucgagaaugga

SEQ ID NO: 317632 - RNA, 18 nt, Human
gccugggcacaguucugg

SEQ ID NO: 317633 - RNA, 23 nt, Human
gcugccucacuuuucacuuucgc

SEQ ID NO: 317634 - RNA, 18 nt, Human
ggagacaaagugggugcu

SEQ ID NO: 317635 - RNA, 19 nt, Human
ggccugggcaccucuuugc

SEQ ID NO: 317636 - RNA, 19 nt, Human
ggcguagcucaucauuucu

SEQ ID NO: 317637 - RNA, 22 nt, Human
gguaacagaagauggcaaagga

SEQ ID NO: 317638 - RNA, 21 nt, Human
guggguugaucuccagaagga

SEQ ID NO: 317639 - RNA, 24 nt, Human
uaaaacaaucuccaugguaauuaa

SEQ ID NO: 317640 - RNA, 18 nt, Human
uaagaaaugaugcagaaa

SEQ ID NO: 317641 - RNA, 19 nt, Human
uaagaugauagcacagagg

SEQ ID NO: 317642 - RNA, 26 nt, Human
uagccaagcaagauuuuuccaagcac

SEQ ID NO: 317643 - RNA, 21 nt, Human
uaggaagaacuagcugccuca

SEQ ID NO: 317644 - RNA, 20 nt, Human
uaguguaggaaaugguagau

SEQ ID NO: 317645 - RNA, 20 nt, Human
uauggcaagacuuggaaaaa

SEQ ID NO: 317646 - RNA, 23 nt, Human
uaugguuccuccuauucucugcu

SEQ ID NO: 317647 - RNA, 19 nt, Human
uauuaagaaagggcagguu

SEQ ID NO: 317648 - RNA, 20 nt, Human
uauuaagaaagggcagguug

SEQ ID NO: 317649 - RNA, 23 nt, Human
uccaaacugacaugcuacagaaa

SEQ ID NO: 317650 - RNA, 24 nt, Human
uccaaacugacaugcuacagaaau

SEQ ID NO: 317651 - RNA, 21 nt, Human
ucccuaaguuauacaagaugu

SEQ ID NO: 317652 - RNA, 18 nt, Human
uccuuugggccugggcac

SEQ ID NO: 317653 - RNA, 22 nt, Human
ucucugcuaaagccagcaacag

SEQ ID NO: 317654 - RNA, 19 nt, Human
ucucuuaagcaacuuaauu

SEQ ID NO: 317655 - RNA, 20 nt, Human
ugaaggaaacugucucccau

SEQ ID NO: 317656 - RNA, 28 nt, Human
ugacaugcuacagaaaugucuuccaaaa

SEQ ID NO: 317657 - RNA, 20 nt, Human
ugagagaggaaggcagccuu

SEQ ID NO: 317658 - RNA, 18 nt, Human
ugcucaaauaguguagga

SEQ ID NO: 317659 - RNA, 18 nt, Human
uggcaaaggauaagauuc

SEQ ID NO: 317660 - RNA, 18 nt, Human
uggcuaaacuuagcagca

SEQ ID NO: 317661 - RNA, 25 nt, Human
uggcuaaacuuagcagcaccaacac

SEQ ID NO: 317662 - RNA, 22 nt, Human
ugggugcuacuucccuccuuuu

SEQ ID NO: 317663 - RNA, 21 nt, Human
uguacauuuccucucuuaagc

SEQ ID NO: 317664 - RNA, 21 nt, Human
ugucacaugaccgcgggcgcg

SEQ ID NO: 317665 - RNA, 20 nt, Human
uucacaucccccccaacuuu

SEQ ID NO: 317666 - RNA, 22 nt, Human
uuuacuguaacaggaauucuca

SEQ ID NO: 317667 - RNA, 24 nt, Human
uuuuccaagcuuuuugagcaaaca

SEQ ID NO: 317668 - RNA, 23 nt, Human
aaaaaaacugaaaauaaagagag

SEQ ID NO: 317669 - RNA, 21 nt, Human
aaaaagggaacauggggagga

SEQ ID NO: 317670 - RNA, 23 nt, Human
aaaagcagccacaaguuaaaaac

SEQ ID NO: 317671 - RNA, 19 nt, Human
aaacaggcggagcgaucca

SEQ ID NO: 317672 - RNA, 23 nt, Human
aaccccgucucuacuaaaaaugg

SEQ ID NO: 317673 - RNA, 23 nt, Human
aagaacacaggccucccccuuuc

SEQ ID NO: 317674 - RNA, 23 nt, Human
aagaaggccucuccaggcuucgu

SEQ ID NO: 317675 - RNA, 24 nt, Human
aaggagaccccuguggugggcagg

SEQ ID NO: 317676 - RNA, 21 nt, Human
acauucauccacguccacaug

SEQ ID NO: 317677 - RNA, 20 nt, Human
accgaggaguuccuggggac

SEQ ID NO: 317678 - RNA, 23 nt, Human
accucccgccucaccucccgcca

SEQ ID NO: 317679 - RNA, 19 nt, Human
acuuacaguuauguuuugc

SEQ ID NO: 317680 - RNA, 19 nt, Human
agaaaaaagggaacauggg

SEQ ID NO: 317681 - RNA, 22 nt, Human
agacccaggacaggaggggcaa

SEQ ID NO: 317682 - RNA, 21 nt, Human
agacucaggggcaggccaaga

SEQ ID NO: 317683 - RNA, 19 nt, Human
agagagagagagaucuggg

SEQ ID NO: 317684 - RNA, 23 nt, Human
agagcucaccccgggcccuaccc

SEQ ID NO: 317685 - RNA, 24 nt, Human
agaggaaggggguucugggaggcc

SEQ ID NO: 317686 - RNA, 24 nt, Human
agcaaaaaaacugaaaauaaagag

SEQ ID NO: 317687 - RNA, 26 nt, Human
agcagcaaaagcagccacaaguuaaa

SEQ ID NO: 317688 - RNA, 22 nt, Human
agcagcagcagcaaaagcagcc

SEQ ID NO: 317689 - RNA, 18 nt, Human
aggaggggcaauggaaua

SEQ ID NO: 317690 - RNA, 18 nt, Human
aggccaccacuuggucuc

SEQ ID NO: 317691 - RNA, 24 nt, Human
aggccaggcccuggggagccagga

SEQ ID NO: 317692 - RNA, 22 nt, Human
aggccucgcuccacccgcuguu

SEQ ID NO: 317693 - RNA, 18 nt, Human
aguaggccaggcccuggg

SEQ ID NO: 317694 - RNA, 20 nt, Human
agucuggaacccacgguggc

SEQ ID NO: 317695 - RNA, 21 nt, Human
aguggccuggaaggagacccc

SEQ ID NO: 317696 - RNA, 22 nt, Human
aguuauguuuugccuccuguga

SEQ ID NO: 317697 - RNA, 24 nt, Human
auaacaccuauucaaagguaguua

SEQ ID NO: 317698 - RNA, 22 nt, Human
augcaggugcgcccguccacgc

SEQ ID NO: 317699 - RNA, 21 nt, Human
auggaauauuccauugcgccc

SEQ ID NO: 317700 - RNA, 25 nt, Human
caaagccugacaucugcuuuccaag

SEQ ID NO: 317701 - RNA, 21 nt, Human
caagaggcuacugaggccccc

SEQ ID NO: 317702 - RNA, 23 nt, Human
caaguuaaaaacaugguuucuca

SEQ ID NO: 317703 - RNA, 21 nt, Human
cacagcucagccaccuguucu

SEQ ID NO: 317704 - RNA, 23 nt, Human
cacaggugagcgcccccgggugg

SEQ ID NO: 317705 - RNA, 20 nt, Human
cacccgaagucccgccucca

SEQ ID NO: 317706 - RNA, 22 nt, Human
caccuguucuggcugcagcucu

SEQ ID NO: 317707 - RNA, 18 nt, Human
cacugcuccagccgcucc

SEQ ID NO: 317708 - RNA, 18 nt, Human
cagagggugaugcugguc

SEQ ID NO: 317709 - RNA, 21 nt, Human
cagaugacagccucucacccc

SEQ ID NO: 317710 - RNA, 18 nt, Human
cagcaaaaaaacugaaaa

SEQ ID NO: 317711 - RNA, 18 nt, Human
cagcacggagcaaucccc

SEQ ID NO: 317712 - RNA, 19 nt, Human
cagcagcaaaagcagccac

SEQ ID NO: 317713 - RNA, 20 nt, Human
cagcagcaaaagcagccaca

SEQ ID NO: 317714 - RNA, 21 nt, Human
cagcagcaaaagcagccacaa

SEQ ID NO: 317715 - RNA, 21 nt, Human
cagcagcagcaaaagcagcca

SEQ ID NO: 317716 - RNA, 24 nt, Human
cagcagcagcaaaagcagccacaa

SEQ ID NO: 317717 - RNA, 21 nt, Human
cagccaccuguucuggcugca

SEQ ID NO: 317718 - RNA, 19 nt, Human
caggaggggcaauggaaua

SEQ ID NO: 317719 - RNA, 21 nt, Human
caggcccuggggagccaggag

SEQ ID NO: 317720 - RNA, 25 nt, Human
caggggacuuuagagaaaaaaggga

SEQ ID NO: 317721 - RNA, 19 nt, Human
cagugcuucccuccccagc

SEQ ID NO: 317722 - RNA, 23 nt, Human
ccacaaguuaaaaacaugguuuc

SEQ ID NO: 317723 - RNA, 19 nt, Human
ccacagauauuccccaaca

SEQ ID NO: 317724 - RNA, 18 nt, Human
ccacugcuccagccgcuc

SEQ ID NO: 317725 - RNA, 23 nt, Human
ccaggaucuuccuaaugcaucgc

SEQ ID NO: 317726 - RNA, 20 nt, Human
cccccagcagaaggcuccug

SEQ ID NO: 317727 - RNA, 18 nt, Human
cccccagccagaagacuc

SEQ ID NO: 317728 - RNA, 19 nt, Human
cccccagcgacccgaaagu

SEQ ID NO: 317729 - RNA, 21 nt, Human
cccccagcgacccgaaagucc

SEQ ID NO: 317730 - RNA, 19 nt, Human
ccccccgcucucccuccag

SEQ ID NO: 317731 - RNA, 23 nt, Human
cccccgcucucccuccagaugac

SEQ ID NO: 317732 - RNA, 21 nt, Human
ccccgggcccuacccccucug

SEQ ID NO: 317733 - RNA, 22 nt, Human
ccccgucucuacuaaaaauggg

SEQ ID NO: 317734 - RNA, 22 nt, Human
cccgaagucccgccuccaacuc

SEQ ID NO: 317735 - RNA, 21 nt, Human
cccgcaacacagacccaggac

SEQ ID NO: 317736 - RNA, 23 nt, Human
cccgcaacacagacccaggacag

SEQ ID NO: 317737 - RNA, 20 nt, Human
cccggccccacagcucagcc

SEQ ID NO: 317738 - RNA, 19 nt, Human
cccucuguugucaccucuc

SEQ ID NO: 317739 - RNA, 18 nt, Human
cccucuuaggaguuggga

SEQ ID NO: 317740 - RNA, 22 nt, Human
cccuggggagccaggaguccca

SEQ ID NO: 317741 - RNA, 23 nt, Human
cccuugaagagugcagacuccca

SEQ ID NO: 317742 - RNA, 20 nt, Human
ccgccucccgaacggccacg

SEQ ID NO: 317743 - RNA, 19 nt, Human
ccgcgcgagcguuccccgc

SEQ ID NO: 317744 - RNA, 22 nt, Human
ccgggcccuacccccucuguug

SEQ ID NO: 317745 - RNA, 25 nt, Human
ccucaagaggcuacugaggcccccc

SEQ ID NO: 317746 - RNA, 18 nt, Human
ccucccgccucaccuccc

SEQ ID NO: 317747 - RNA, 21 nt, Human
ccucuccaggcuucguugccc

SEQ ID NO: 317748 - RNA, 19 nt, Human
ccugaccggcccacugcuc

SEQ ID NO: 317749 - RNA, 19 nt, Human
ccuggcccaguuucuccug

SEQ ID NO: 317750 - RNA, 18 nt, Human
ccugugaagccccacccc

SEQ ID NO: 317751 - RNA, 22 nt, Human
ccugugaagccccacccccagc

SEQ ID NO: 317752 - RNA, 22 nt, Human
cgacccgaaaguccgauuuccc

SEQ ID NO: 317753 - RNA, 26 nt, Human
cgagcguuccccgcaacacagaccca

SEQ ID NO: 317754 - RNA, 21 nt, Human
cgcaacacagacccaggacag

SEQ ID NO: 317755 - RNA, 21 nt, Human
cgcacccgaagucccgccucc

SEQ ID NO: 317756 - RNA, 21 nt, Human
cgcagacgccuccguucaggc

SEQ ID NO: 317757 - RNA, 24 nt, Human
cgccacauaacgcgguacaugguc

SEQ ID NO: 317758 - RNA, 23 nt, Human
cgccgaggcccaggcuguugucc

SEQ ID NO: 317759 - RNA, 20 nt, Human
cgccucaccucccgccacau

SEQ ID NO: 317760 - RNA, 23 nt, Human
cggaugggagggggaagggcggg

SEQ ID NO: 317761 - RNA, 21 nt, Human
cgggaccaccagugucugcuu

SEQ ID NO: 317762 - RNA, 18 nt, Human
cgugagcagcagcccagg

SEQ ID NO: 317763 - RNA, 19 nt, Human
cgugagcagcagcccaggc

SEQ ID NO: 317764 - RNA, 20 nt, Human
cuacccccucuguugucacc

SEQ ID NO: 317765 - RNA, 19 nt, Human
cucccgccaacgcgcaccc

SEQ ID NO: 317766 - RNA, 21 nt, Human
cucccugacugcguccaugcc

SEQ ID NO: 317767 - RNA, 22 nt, Human
cuccugugaagccccaccccca

SEQ ID NO: 317768 - RNA, 21 nt, Human
cucucccuccagaugacagcc

SEQ ID NO: 317769 - RNA, 20 nt, Human
cugcagaugcgccucccagc

SEQ ID NO: 317770 - RNA, 21 nt, Human
cugcuuuccaaggccaccacu

SEQ ID NO: 317771 - RNA, 21 nt, Human
cuguggugggcaggggguggg

SEQ ID NO: 317772 - RNA, 20 nt, Human
cuucaagaacggaacugucc

SEQ ID NO: 317773 - RNA, 24 nt, Human
cuugaagagugcagacucccaccu

SEQ ID NO: 317774 - RNA, 21 nt, Human
gacccgaaaguccgauuuccc

SEQ ID NO: 317775 - RNA, 19 nt, Human
gacugggggauccccaaac

SEQ ID NO: 317776 - RNA, 20 nt, Human
gagcagcagcccaggccccu

SEQ ID NO: 317777 - RNA, 19 nt, Human
gaggccccccgcucucccu

SEQ ID NO: 317778 - RNA, 18 nt, Human
gaugggagggggaagggc

SEQ ID NO: 317779 - RNA, 24 nt, Human
gcaaaaaaacugaaaauaaagaga

SEQ ID NO: 317780 - RNA, 18 nt, Human
gcacaccaaagccugaca

SEQ ID NO: 317781 - RNA, 25 nt, Human
gcagcaaaagcagccacaaguuaaa

SEQ ID NO: 317782 - RNA, 18 nt, Human
gcagcagcaaaagcagcc

SEQ ID NO: 317783 - RNA, 20 nt, Human
gcagcagcaaaagcagccac

SEQ ID NO: 317784 - RNA, 26 nt, Human
gcagcagcagcaaaagcagccacaag

SEQ ID NO: 317785 - RNA, 25 nt, Human
gcaggggaaugacggaugggagggg

SEQ ID NO: 317786 - RNA, 20 nt, Human
gccacagauauuccccaaca

SEQ ID NO: 317787 - RNA, 18 nt, Human
gcccacugcuccagccgc

SEQ ID NO: 317788 - RNA, 22 nt, Human
gcgcacccgaagucccgccucc

SEQ ID NO: 317789 - RNA, 21 nt, Human
gcucagccaccuguucuggcu

SEQ ID NO: 317790 - RNA, 24 nt, Human
ggaauauuccauugcgcccuaggu

SEQ ID NO: 317791 - RNA, 18 nt, Human
ggacaggaggggcaaugg

SEQ ID NO: 317792 - RNA, 24 nt, Human
ggaccccuccaugcaggugcgccc

SEQ ID NO: 317793 - RNA, 18 nt, Human
ggagagaagcuaaaaaug

SEQ ID NO: 317794 - RNA, 18 nt, Human
ggaggagcagcagcagca

SEQ ID NO: 317795 - RNA, 20 nt, Human
ggaguugggagggcugaugu

SEQ ID NO: 317796 - RNA, 21 nt, Human
ggaugggagggggaagggcgg

SEQ ID NO: 317797 - RNA, 18 nt, Human
ggccaagaacacaggccu

SEQ ID NO: 317798 - RNA, 19 nt, Human
ggccucccccuuucuucag

SEQ ID NO: 317799 - RNA, 22 nt, Human
ggcgcacucgcacuggucaggc

SEQ ID NO: 317800 - RNA, 24 nt, Human
ggcuacugaggccccccgcucucc

SEQ ID NO: 317801 - RNA, 23 nt, Human
gggaacauggggaggagagaagc

SEQ ID NO: 317802 - RNA, 20 nt, Human
gggauccacccuuggccccc

SEQ ID NO: 317803 - RNA, 23 nt, Human
gggcaggggguggguucuccacc

SEQ ID NO: 317804 - RNA, 21 nt, Human
gggcaggggugcuguagaggc

SEQ ID NO: 317805 - RNA, 24 nt, Human
gggcaggggugcuguagaggcuuc

SEQ ID NO: 317806 - RNA, 19 nt, Human
gggggaagggugaggaaag

SEQ ID NO: 317807 - RNA, 20 nt, Human
gggguucugggaggccaagu

SEQ ID NO: 317808 - RNA, 21 nt, Human
ggucaugggggcagccgcagg

SEQ ID NO: 317809 - RNA, 24 nt, Human
ggucaugggggcagccgcagguga

SEQ ID NO: 317810 - RNA, 19 nt, Human
ggugaugcugguccuacau

SEQ ID NO: 317811 - RNA, 19 nt, Human
gucacaggcacaccaaagc

SEQ ID NO: 317812 - RNA, 24 nt, Human
guccugaguggccuggaaggagac

SEQ ID NO: 317813 - RNA, 21 nt, Human
guccuguaagugcugcagaug

SEQ ID NO: 317814 - RNA, 22 nt, Human
uaaaacaauggugcgagcagag

SEQ ID NO: 317815 - RNA, 19 nt, Human
uaaauacagggauaacacc

SEQ ID NO: 317816 - RNA, 24 nt, Human
uaacagcaaaaaaacugaaaauaa

SEQ ID NO: 317817 - RNA, 18 nt, Human
uacuaaaaccccgucucu

SEQ ID NO: 317818 - RNA, 21 nt, Human
uaucccaagucuggaacccac

SEQ ID NO: 317819 - RNA, 22 nt, Human
ucaucuuuuuccgccucccgaa

SEQ ID NO: 317820 - RNA, 22 nt, Human
uccaacacugaucauagggacu

SEQ ID NO: 317821 - RNA, 21 nt, Human
uccaaggccaccacuuggucu

SEQ ID NO: 317822 - RNA, 20 nt, Human
uccacaugacagugcuuccc

SEQ ID NO: 317823 - RNA, 24 nt, Human
uccaugccagaggaugagguggga

SEQ ID NO: 317824 - RNA, 19 nt, Human
ucccaagucuggaacccac

SEQ ID NO: 317825 - RNA, 18 nt, Human
ucccagaggauuaguggg

SEQ ID NO: 317826 - RNA, 23 nt, Human
uccccaaaccugagaugggccuc

SEQ ID NO: 317827 - RNA, 21 nt, Human
uccccgccuugauucucccca

SEQ ID NO: 317828 - RNA, 21 nt, Human
ucccgaacggccacgcugagu

SEQ ID NO: 317829 - RNA, 19 nt, Human
ucccgccucaccucccgcc

SEQ ID NO: 317830 - RNA, 19 nt, Human
ucgaugauugacgccgagg

SEQ ID NO: 317831 - RNA, 20 nt, Human
ucuacuaaaaccccgucucu

SEQ ID NO: 317832 - RNA, 21 nt, Human
ucuacuaaaaccccgucucua

SEQ ID NO: 317833 - RNA, 21 nt, Human
ucuccuccagcagcagcaccu

SEQ ID NO: 317834 - RNA, 22 nt, Human
ucucuggaccgaggaguuccug

SEQ ID NO: 317835 - RNA, 19 nt, Human
ucugcugaaccucccgccu

SEQ ID NO: 317836 - RNA, 18 nt, Human
ucuggaacccacgguggc

SEQ ID NO: 317837 - RNA, 21 nt, Human
ugacagugcuucccuccccag

SEQ ID NO: 317838 - RNA, 24 nt, Human
ugacggaugggagggggaagggcg

SEQ ID NO: 317839 - RNA, 23 nt, Human
ugacugcguccaugccagaggau

SEQ ID NO: 317840 - RNA, 24 nt, Human
ugaggugggagagauugaguaggc

SEQ ID NO: 317841 - RNA, 25 nt, Human
ugaggugggagagauugaguaggcc

SEQ ID NO: 317842 - RNA, 20 nt, Human
ugagguggucacaggcacac

SEQ ID NO: 317843 - RNA, 19 nt, Human
ugaugcugguccuacauuc

SEQ ID NO: 317844 - RNA, 27 nt, Human
ugcccuugucuccagagacgcagagag

SEQ ID NO: 317845 - RNA, 22 nt, Human
ugcgagcagagggugaugcugg

SEQ ID NO: 317846 - RNA, 21 nt, Human
ugcugcagaugcgccucccag

SEQ ID NO: 317847 - RNA, 18 nt, Human
ugcuggggaggaaacagg

SEQ ID NO: 317848 - RNA, 22 nt, Human
ugcugguccuacauucauccac

SEQ ID NO: 317849 - RNA, 19 nt, Human
ugcuguagaggcuucuuau

SEQ ID NO: 317850 - RNA, 21 nt, Human
ugcuguagaggcuucuuaucg

SEQ ID NO: 317851 - RNA, 18 nt, Human
ugcuuggagcagacuccc

SEQ ID NO: 317852 - RNA, 25 nt, Human
ugcuuggagcagacucccugacugc

SEQ ID NO: 317853 - RNA, 22 nt, Human
uggaacccacgguggcgggggg

SEQ ID NO: 317854 - RNA, 21 nt, Human
uggaaggagaccccuguggug

SEQ ID NO: 317855 - RNA, 20 nt, Human
uggaauauuccauugcgccc

SEQ ID NO: 317856 - RNA, 19 nt, Human
uggaauugucauucaugga

SEQ ID NO: 317857 - RNA, 25 nt, Human
uggagcgggaccaccagugucugcu

SEQ ID NO: 317858 - RNA, 20 nt, Human
uggaggagcagaggaagggg

SEQ ID NO: 317859 - RNA, 22 nt, Human
uggauaacagcaaaaaaacuga

SEQ ID NO: 317860 - RNA, 20 nt, Human
uggcacugguugggggcucu

SEQ ID NO: 317861 - RNA, 18 nt, Human
uggcagcacacugcaugg

SEQ ID NO: 317862 - RNA, 19 nt, Human
uggcagcacacugcauggg

SEQ ID NO: 317863 - RNA, 18 nt, Human
uggguguuggugguugca

SEQ ID NO: 317864 - RNA, 19 nt, Human
ugguugcauuuguuaagga

SEQ ID NO: 317865 - RNA, 22 nt, Human
ugguuucucacuucccaacuuc

SEQ ID NO: 317866 - RNA, 24 nt, Human
uguuuugccuccugugaagcccca

SEQ ID NO: 317867 - RNA, 24 nt, Human
uuaauuaucuggauaacagcaaaa

SEQ ID NO: 317868 - RNA, 18 nt, Human
uucaagaacggaacuguc

SEQ ID NO: 317869 - RNA, 19 nt, Human
uucaagaacggaacugucc

SEQ ID NO: 317870 - RNA, 23 nt, Human
uucaagaacggaacuguccccau

SEQ ID NO: 317871 - RNA, 18 nt, Human
uuccauugcgcccuaggu

SEQ ID NO: 317872 - RNA, 24 nt, Human
uuccccgccuugauucuccccacu

SEQ ID NO: 317873 - RNA, 21 nt, Human
uuccuggggaccccugaauau

SEQ ID NO: 317874 - RNA, 21 nt, Human
uucuggcugcagcucuucagg

SEQ ID NO: 317875 - RNA, 19 nt, Human
uuuuuuuuuuuuuugagga

SEQ ID NO: 317876 - RNA, 22 nt, Human
uuuuuuuuuuuuuuuuuugagg

SEQ ID NO: 317877 - RNA, 28 nt, Human
aggggagagcugggcuggccaggagccu

SEQ ID NO: 317878 - RNA, 23 nt, Human
gagcaagcuuuggccagagccaa

SEQ ID NO: 317879 - RNA, 24 nt, Human
gggcuggcgcugcucauggagucg

SEQ ID NO: 317880 - RNA, 21 nt, Human
ggugcagaggggagagcuggg

SEQ ID NO: 317881 - RNA, 20 nt, Human
gugcagaggggagagcuggg

SEQ ID NO: 317882 - RNA, 18 nt, Human
agcgacuuaggcuggccu

SEQ ID NO: 317883 - RNA, 19 nt, Human
aguaauaaucaaaaugguu

SEQ ID NO: 317884 - RNA, 26 nt, Human
aguaauaaucaaaaugguuuuuccuu

SEQ ID NO: 317885 - RNA, 23 nt, Human
auugcuucucuuuauuuucaaca

SEQ ID NO: 317886 - RNA, 27 nt, Human
caacuuccccuuuuuuuccucacugaa

SEQ ID NO: 317887 - RNA, 21 nt, Human
cacauuaacuccucaagucaa

SEQ ID NO: 317888 - RNA, 23 nt, Human
ccaacuuccccuuuuuuuccuca

SEQ ID NO: 317889 - RNA, 22 nt, Human
ccccaacuuccccuuuuuuucc

SEQ ID NO: 317890 - RNA, 21 nt, Human
cccuuuuuuuccucacugaac

SEQ ID NO: 317891 - RNA, 22 nt, Human
ccucacugaacauguuuuccuc

SEQ ID NO: 317892 - RNA, 20 nt, Human
ccucagagaguucaccacac

SEQ ID NO: 317893 - RNA, 23 nt, Human
ccucaggaccuccaacgcuugga

SEQ ID NO: 317894 - RNA, 21 nt, Human
ccuccaacgcuuggauuucua

SEQ ID NO: 317895 - RNA, 23 nt, Human
gcugcaggcccggcuucuggcug

SEQ ID NO: 317896 - RNA, 19 nt, Human
gucacgccugggaagcggg

SEQ ID NO: 317897 - RNA, 21 nt, Human
uaacuccuacauguacuuccc

SEQ ID NO: 317898 - RNA, 21 nt, Human
ucaacaucugccuauccccaa

SEQ ID NO: 317899 - RNA, 22 nt, Human
ucaacaucugccuauccccaac

SEQ ID NO: 317900 - RNA, 22 nt, Human
ucacugaacauguuuuccucac

SEQ ID NO: 317901 - RNA, 23 nt, Human
ucccaagccagaaucucccuuua

SEQ ID NO: 317902 - RNA, 21 nt, Human
uccuacauguacuucccaagc

SEQ ID NO: 317903 - RNA, 22 nt, Human
uccuacauguacuucccaagcc

SEQ ID NO: 317904 - RNA, 21 nt, Human
ucuauaagauguaucucccca

SEQ ID NO: 317905 - RNA, 23 nt, Human
ugggaagcggguggggugucccg

SEQ ID NO: 317906 - RNA, 23 nt, Human
ugucccggagcggugcugaggcg

SEQ ID NO: 317907 - RNA, 21 nt, Human
ugucugaaacuguggcugcuu

SEQ ID NO: 317908 - RNA, 24 nt, Human
uguggcugcuuuguugcuucaaga

SEQ ID NO: 317909 - RNA, 22 nt, Human
uuacaacagucuacacagggau

SEQ ID NO: 317910 - RNA, 24 nt, Human
uuuuugcuucacauugcuucucuu

SEQ ID NO: 317911 - RNA, 21 nt, Human
uuuuuuuuuuuuuuuuugcuu

SEQ ID NO: 317912 - RNA, 20 nt, Human
uuuuuuuuuuuuuuuuuugg

SEQ ID NO: 317913 - RNA, 21 nt, Human
aggaggcucuggagucacucc

SEQ ID NO: 317914 - RNA, 23 nt, Human
aucuucuuauucacuuccuguca

SEQ ID NO: 317915 - RNA, 21 nt, Human
cuuccugucauugaauccuag

SEQ ID NO: 317916 - RNA, 22 nt, Human
ggcucuggagucacucccaacu

SEQ ID NO: 317917 - RNA, 23 nt, Human
uuagagcuaugaugaccuuuuuc

SEQ ID NO: 317918 - RNA, 19 nt, Human
accaccuucuuccaauguc

SEQ ID NO: 317919 - RNA, 18 nt, Human
aggcucuggagucacucc

SEQ ID NO: 317920 - RNA, 23 nt, Human
aucacugucaucuucuuguucac

SEQ ID NO: 317921 - RNA, 24 nt, Human
caucuucuuguucacuuccuguca

SEQ ID NO: 317922 - RNA, 23 nt, Human
cauggcauuugaaucauuugaau

SEQ ID NO: 317923 - RNA, 21 nt, Human
gcucuggagucacucccaacu

SEQ ID NO: 317924 - RNA, 25 nt, Human
gucaucuucuuguucacuuccuguc

SEQ ID NO: 317925 - RNA, 23 nt, Human
aacacugucaucuucuuauucac

SEQ ID NO: 317926 - RNA, 18 nt, Human
aggcucuggagucacucc

SEQ ID NO: 317927 - RNA, 21 nt, Human
aucacauuauguuucaaggca

SEQ ID NO: 317928 - RNA, 23 nt, Human
aucuucuuauucacuuccuguca

SEQ ID NO: 317929 - RNA, 21 nt, Human
cuuccugucauugaauccuag

SEQ ID NO: 317930 - RNA, 22 nt, Human
ggcucuggagucacucccaacu

SEQ ID NO: 317931 - RNA, 25 nt, Human
gucaucuucuuauucacuuccuguc

SEQ ID NO: 317932 - RNA, 20 nt, Human
ucacauuauguuucaaggca

SEQ ID NO: 317933 - RNA, 19 nt, Human
ugaaacacugucaucuucu

SEQ ID NO: 317934 - RNA, 24 nt, Human
aaaacucccaccccagaacucaga

SEQ ID NO: 317935 - RNA, 24 nt, Human
aagcugggggccaggccagcuggg

SEQ ID NO: 317936 - RNA, 19 nt, Human
aaguccgccugcuccguac

SEQ ID NO: 317937 - RNA, 19 nt, Human
acaccugacagagagcaaa

SEQ ID NO: 317938 - RNA, 19 nt, Human
accccagaacucagagccc

SEQ ID NO: 317939 - RNA, 23 nt, Human
acucauggcuacggcugauuucc

SEQ ID NO: 317940 - RNA, 20 nt, Human
agaaaggagcugaauuuucu

SEQ ID NO: 317941 - RNA, 19 nt, Human
aguggugguggggaggguu

SEQ ID NO: 317942 - RNA, 20 nt, Human
aucacaccugacagagagca

SEQ ID NO: 317943 - RNA, 21 nt, Human
auccugggcuuagagcagcug

SEQ ID NO: 317944 - RNA, 30 nt, Human
cagcugggcuggcaggagauccugggagcc

SEQ ID NO: 317945 - RNA, 25 nt, Human
cagcuggggucccagaggugaagcu

SEQ ID NO: 317946 - RNA, 21 nt, Human
ccaggacagaaaggagcugaa

SEQ ID NO: 317947 - RNA, 20 nt, Human
cccaccccagaacucagagc

SEQ ID NO: 317948 - RNA, 18 nt, Human
cccggaggccuaguaggc

SEQ ID NO: 317949 - RNA, 20 nt, Human
ccugcuccguacucuagggc

SEQ ID NO: 317950 - RNA, 18 nt, Human
ccugggcuuagagcagcu

SEQ ID NO: 317951 - RNA, 20 nt, Human
ccuuggggaaagagauccug

SEQ ID NO: 317952 - RNA, 21 nt, Human
cugggcuggcaggagauccug

SEQ ID NO: 317953 - RNA, 22 nt, Human
cugggcuggcaggagauccugg

SEQ ID NO: 317954 - RNA, 18 nt, Human
cugggggccaggccagcu

SEQ ID NO: 317955 - RNA, 25 nt, Human
cugggggccaggccagcugggcugg

SEQ ID NO: 317956 - RNA, 20 nt, Human
cugguuuaaaaaaaaaaaaa

SEQ ID NO: 317957 - RNA, 18 nt, Human
gaacucagagccccuucg

SEQ ID NO: 317958 - RNA, 20 nt, Human
gcuggcaggagauccuggga

SEQ ID NO: 317959 - RNA, 19 nt, Human
gggaggguucaacauuuua

SEQ ID NO: 317960 - RNA, 20 nt, Human
gggccaggccagcugggcug

SEQ ID NO: 317961 - RNA, 20 nt, Human
gggcuggcaggagauccugg

SEQ ID NO: 317962 - RNA, 24 nt, Human
ggggaggguucaacauuuuaucac

SEQ ID NO: 317963 - RNA, 24 nt, Human
ggggucccagaggugaagcugggg

SEQ ID NO: 317964 - RNA, 18 nt, Human
uaacuuguuaagaaaaau

SEQ ID NO: 317965 - RNA, 20 nt, Human
uaagcuccuagucccgggca

SEQ ID NO: 317966 - RNA, 21 nt, Human
uaagcuccuagucccgggcaa

SEQ ID NO: 317967 - RNA, 21 nt, Human
ucacaccugacagagagcaaa

SEQ ID NO: 317968 - RNA, 19 nt, Human
ucccgcguuucgggcgccc

SEQ ID NO: 317969 - RNA, 23 nt, Human
ucccugguuuaaaaaaaaaaaaa

SEQ ID NO: 317970 - RNA, 20 nt, Human
ugggggccaggccagcuggg

SEQ ID NO: 317971 - RNA, 21 nt, Human
ugguuuaaaaaaaaaaaaagu

SEQ ID NO: 317972 - RNA, 21 nt, Human
uuuaaaaaaaaaaaaaguggu

SEQ ID NO: 317973 - RNA, 20 nt, Human
uuuuuuuuuuuuuugucaga

SEQ ID NO: 317974 - RNA, 18 nt, Human
uuuuuuuuuuuuuuuguc

SEQ ID NO: 317975 - RNA, 20 nt, Human
uuuuuuuuuuuuuuugucag

SEQ ID NO: 317976 - RNA, 18 nt, Human
uuuuuuuuuuuuuuuuug

SEQ ID NO: 317977 - RNA, 19 nt, Human
uuuuuuuuuuuuuuuuugu

SEQ ID NO: 317978 - RNA, 27 nt, Human
aaagacacuucaaccucaaaaccaaag

SEQ ID NO: 317979 - RNA, 19 nt, Human
aaagacagugagaacccag

SEQ ID NO: 317980 - RNA, 20 nt, Human
aaccaggaacucuacuccag

SEQ ID NO: 317981 - RNA, 19 nt, Human
aagaagaaauugaaaacaa

SEQ ID NO: 317982 - RNA, 20 nt, Human
aagaagaaauugaaaacaau

SEQ ID NO: 317983 - RNA, 22 nt, Human
aagaagaaauugaaaacaauca

SEQ ID NO: 317984 - RNA, 24 nt, Human
aagacacuucaaccucaaaaccag

SEQ ID NO: 317985 - RNA, 21 nt, Human
acuucaaccucaaaaccaaag

SEQ ID NO: 317986 - RNA, 24 nt, Human
agacacuucaaccucaaaaccaaa

SEQ ID NO: 317987 - RNA, 22 nt, Human
caaagaaaguaacucucccucu

SEQ ID NO: 317988 - RNA, 20 nt, Human
cacccucuauucuaucucaa

SEQ ID NO: 317989 - RNA, 22 nt, Human
cacccucuauucuaucucaacu

SEQ ID NO: 317990 - RNA, 24 nt, Human
ccagacauccuaccagcugcaauu

SEQ ID NO: 317991 - RNA, 23 nt, Human
cccucuauucuaucucaacuuug

SEQ ID NO: 317992 - RNA, 18 nt, Human
ccuagacguggugcaaag

SEQ ID NO: 317993 - RNA, 25 nt, Human
ccucuuaugaaaagcaaccaggaac

SEQ ID NO: 317994 - RNA, 21 nt, Human
cugcuugcagagauacaaaga

SEQ ID NO: 317995 - RNA, 25 nt, Human
gaaaguaacucucccucuuaugaaa

SEQ ID NO: 317996 - RNA, 19 nt, Human
gacguggugcaaagacagu

SEQ ID NO: 317997 - RNA, 24 nt, Human
gcugcaauuacaucauuuuuuauc

SEQ ID NO: 317998 - RNA, 18 nt, Human
ggugcaaagacagugaga

SEQ ID NO: 317999 - RNA, 23 nt, Human
uaaaagaagaaauugaaaacaau

SEQ ID NO: 318000 - RNA, 22 nt, Human
uacauguagaaaaucaaaguga

SEQ ID NO: 318001 - RNA, 18 nt, Human
uaucucaacuuuggcccc

SEQ ID NO: 318002 - RNA, 24 nt, Human
ucacccucuauucuaucucaacuu

SEQ ID NO: 318003 - RNA, 22 nt, Human
uccugggauugggcaccagaca

SEQ ID NO: 318004 - RNA, 20 nt, Human
ucuaucuucugcuuuuacuu

SEQ ID NO: 318005 - RNA, 18 nt, Human
ugaacauaaaagaagaaa

SEQ ID NO: 318006 - RNA, 20 nt, Human
ugaaugggaaugugguggug

SEQ ID NO: 318007 - RNA, 22 nt, Human
uggccccaucaaaucuaaugau

SEQ ID NO: 318008 - RNA, 18 nt, Human
ugugaacauaaaagaaga

SEQ ID NO: 318009 - RNA, 18 nt, Human
cacagugcuggaguuaca

SEQ ID NO: 318010 - RNA, 21 nt, Human
cccgggcgcgcgucccagcuc

SEQ ID NO: 318011 - RNA, 22 nt, Human
cuccucgcuucguccggccgcc

SEQ ID NO: 318012 - RNA, 22 nt, Human
gccaaucccugaaaccucacag

SEQ ID NO: 318013 - RNA, 25 nt, Human
ggacaggugcgcggucgcugcucuu

SEQ ID NO: 318014 - RNA, 21 nt, Human
gggcagccucggcggucccuc

SEQ ID NO: 318015 - RNA, 22 nt, Human
guccccuugguccccucugcca

SEQ ID NO: 318016 - RNA, 21 nt, Human
uccccucugccaaucccugaa

SEQ ID NO: 318017 - RNA, 18 nt, Human
ugaaaccucacagugcug

SEQ ID NO: 318018 - RNA, 24 nt, Human
ugcuggaguuacacuugggggcag

SEQ ID NO: 318019 - RNA, 27 nt, Human
uugggggcagccucggcggucccuccu

SEQ ID NO: 318020 - RNA, 20 nt, Human
acgcagggacaggguucucc

SEQ ID NO: 318021 - RNA, 22 nt, Human
acgcgggcacccggcaguggcc

SEQ ID NO: 318022 - RNA, 21 nt, Human
agcguccaccugcccacuggc

SEQ ID NO: 318023 - RNA, 23 nt, Human
aucauuugagugaucucucucuu

SEQ ID NO: 318024 - RNA, 19 nt, Human
augguggguggggaggaug

SEQ ID NO: 318025 - RNA, 19 nt, Human
caggguucuccggggcccc

SEQ ID NO: 318026 - RNA, 18 nt, Human
ccaccugcccacuggcug

SEQ ID NO: 318027 - RNA, 18 nt, Human
cccccggcugcccagccc

SEQ ID NO: 318028 - RNA, 21 nt, Human
ccugcccacuggcugauucug

SEQ ID NO: 318029 - RNA, 21 nt, Human
cggcaguggccaccagcuucu

SEQ ID NO: 318030 - RNA, 25 nt, Human
cggcaguggccaccagcuucugucg

SEQ ID NO: 318031 - RNA, 23 nt, Human
cggcucgcggaaucucucuccuc

SEQ ID NO: 318032 - RNA, 21 nt, Human
cuccuugaguccagaagcagc

SEQ ID NO: 318033 - RNA, 20 nt, Human
cucuccuccuccuugagucc

SEQ ID NO: 318034 - RNA, 19 nt, Human
gacaggguucuccggggcc

SEQ ID NO: 318035 - RNA, 19 nt, Human
gcagagcguccaccugccc

SEQ ID NO: 318036 - RNA, 19 nt, Human
gcucgcggaaucucucucc

SEQ ID NO: 318037 - RNA, 23 nt, Human
gcucgcggaaucucucuccuccu

SEQ ID NO: 318038 - RNA, 20 nt, Human
ggcccccggcugcccagccc

SEQ ID NO: 318039 - RNA, 25 nt, Human
gguggguggggaggaugcugaggag

SEQ ID NO: 318040 - RNA, 23 nt, Human
ucucucuccuccuccuugagucc

SEQ ID NO: 318041 - RNA, 18 nt, Human
ucugcgaggcagcuccgu

SEQ ID NO: 318042 - RNA, 23 nt, Human
ucuuuggacggccaccugcaugg

SEQ ID NO: 318043 - RNA, 19 nt, Human
ugcccacuggcugauucug

SEQ ID NO: 318044 - RNA, 24 nt, Human
ugcccucgcucuggccaccggccc

SEQ ID NO: 318045 - RNA, 19 nt, Human
ugcgaggcagcuccguugg

SEQ ID NO: 318046 - RNA, 21 nt, Human
ugguggguggggaggaugcug

SEQ ID NO: 318047 - RNA, 20 nt, Human
uuggacggccaccugcaugg

SEQ ID NO: 318048 - RNA, 25 nt, Human
aaaaaaaaucccuuuaucgugugac

SEQ ID NO: 318049 - RNA, 23 nt, Human
aaaaaaacgaaaacaacaaaaaa

SEQ ID NO: 318050 - RNA, 24 nt, Human
aaacaagggccaugcucagaucug

SEQ ID NO: 318051 - RNA, 24 nt, Human
aaacgcaacaccagaauaggcaua

SEQ ID NO: 318052 - RNA, 18 nt, Human
aaauaguaagagacaaca

SEQ ID NO: 318053 - RNA, 25 nt, Human
aaauaguaagagacaaccgguaccc

SEQ ID NO: 318054 - RNA, 21 nt, Human
aacaaaaaaaagaaauaccag

SEQ ID NO: 318055 - RNA, 25 nt, Human
aacaagugguaacagagcuucacaa

SEQ ID NO: 318056 - RNA, 28 nt, Human
aacacgugaacacacacgcacgcacaca

SEQ ID NO: 318057 - RNA, 20 nt, Human
aacccaagaaccucacugaa

SEQ ID NO: 318058 - RNA, 25 nt, Human
aaccccuuuuuguaugucaaauugu

SEQ ID NO: 318059 - RNA, 20 nt, Human
aacgaaaacaacaaaaaaaa

SEQ ID NO: 318060 - RNA, 25 nt, Human
aacgaaaacaacaaaaaaaagaaaa

SEQ ID NO: 318061 - RNA, 21 nt, Human
aacucaagaagcaaaaagcag

SEQ ID NO: 318062 - RNA, 18 nt, Human
aagaacacguccaagcac

SEQ ID NO: 318063 - RNA, 18 nt, Human
aagagccagaaacucaga

SEQ ID NO: 318064 - RNA, 21 nt, Human
aagcaaaaagcagggucaagg

SEQ ID NO: 318065 - RNA, 24 nt, Human
aagcaaaaagcagggucaaggagc

SEQ ID NO: 318066 - RNA, 21 nt, Human
aagcacaaacgggccaucaac

SEQ ID NO: 318067 - RNA, 20 nt, Human
aagcaggugagcugaccugc

SEQ ID NO: 318068 - RNA, 22 nt, Human
aaggccuuccuaaggcugaccc

SEQ ID NO: 318069 - RNA, 22 nt, Human
aaugggaaugauaguggaagga

SEQ ID NO: 318070 - RNA, 18 nt, Human
acaaaacccaagaaccuc

SEQ ID NO: 318071 - RNA, 24 nt, Human
acaaaacccaagaaccucacugaa

SEQ ID NO: 318072 - RNA, 25 nt, Human
acaaaacccaagaaccucacugaac

SEQ ID NO: 318073 - RNA, 19 nt, Human
acaaacgcaacaccagaau

SEQ ID NO: 318074 - RNA, 27 nt, Human
acaaauaguaagagacaaccgguaccc

SEQ ID NO: 318075 - RNA, 19 nt, Human
acaacgccaacaaaaaaag

SEQ ID NO: 318076 - RNA, 19 nt, Human
acacacacgcacgcacaca

SEQ ID NO: 318077 - RNA, 24 nt, Human
acacgcacgcacacaugcacgcgg

SEQ ID NO: 318078 - RNA, 33 nt, Human
acacgugaacacacacgcacgcacacaugcagu

SEQ ID NO: 318079 - RNA, 19 nt, Human
acacuucccagagcucacc

SEQ ID NO: 318080 - RNA, 21 nt, Human
acagugcccuucucuuuggga

SEQ ID NO: 318081 - RNA, 18 nt, Human
acaugcacucccuuucuc

SEQ ID NO: 318082 - RNA, 24 nt, Human
accacugaccaggaaaugccacuu

SEQ ID NO: 318083 - RNA, 21 nt, Human
accccaacaggaaggcugggc

SEQ ID NO: 318084 - RNA, 21 nt, Human
accccaaggccucaaccacac

SEQ ID NO: 318085 - RNA, 22 nt, Human
acccccaccauagccgaaaauc

SEQ ID NO: 318086 - RNA, 19 nt, Human
acugaccaggaaaugccac

SEQ ID NO: 318087 - RNA, 20 nt, Human
acugcagccgauugacugac

SEQ ID NO: 318088 - RNA, 19 nt, Human
agaacacguccaagcacaa

SEQ ID NO: 318089 - RNA, 23 nt, Human
agaagcucagacacuaaagaugu

SEQ ID NO: 318090 - RNA, 24 nt, Human
agaccacucacgcgcccgcacgag

SEQ ID NO: 318091 - RNA, 25 nt, Human
agacucaagagcaauggacugaugg

SEQ ID NO: 318092 - RNA, 19 nt, Human
agagcucccuccuuccgcu

SEQ ID NO: 318093 - RNA, 23 nt, Human
agagggaagguggggagagaggg

SEQ ID NO: 318094 - RNA, 21 nt, Human
agaguggagggaaggucaaaa

SEQ ID NO: 318095 - RNA, 20 nt, Human
agcacucuccaaaaagaagc

SEQ ID NO: 318096 - RNA, 20 nt, Human
aggagcucuugaaaaauugc

SEQ ID NO: 318097 - RNA, 24 nt, Human
aggcaaggaaggggguuuuccaug

SEQ ID NO: 318098 - RNA, 20 nt, Human
aggcacggaaggagguagag

SEQ ID NO: 318099 - RNA, 26 nt, Human
aggcauaaaaaagaguccauauccaa

SEQ ID NO: 318100 - RNA, 24 nt, Human
agguagaaaacauaguggccccuu

SEQ ID NO: 318101 - RNA, 19 nt, Human
agugaccuaccuaccccca

SEQ ID NO: 318102 - RNA, 24 nt, Human
agugcuacauugguuaaaaucaau

SEQ ID NO: 318103 - RNA, 24 nt, Human
aguuauaaaacuuuaaaaauggag

SEQ ID NO: 318104 - RNA, 20 nt, Human
aucccgaucaaaaagacuaa

SEQ ID NO: 318105 - RNA, 20 nt, Human
aucucuucuucuucccccug

SEQ ID NO: 318106 - RNA, 23 nt, Human
augaagggcgcaggagaucccuc

SEQ ID NO: 318107 - RNA, 22 nt, Human
augcaaaaaaggagugacccca

SEQ ID NO: 318108 - RNA, 21 nt, Human
caaaacccaagaaccucacug

SEQ ID NO: 318109 - RNA, 24 nt, Human
caaaacgccuaaggacucaauaca

SEQ ID NO: 318110 - RNA, 23 nt, Human
caaaagacaacucaagaagcaaa

SEQ ID NO: 318111 - RNA, 22 nt, Human
caaacgggccaucaacauggag

SEQ ID NO: 318112 - RNA, 21 nt, Human
caaaggcacaaaacccaagaa

SEQ ID NO: 318113 - RNA, 27 nt, Human
caaaggcacaaaacccaagaaccucac

SEQ ID NO: 318114 - RNA, 19 nt, Human
caaaguucaauacaggagc

SEQ ID NO: 318115 - RNA, 21 nt, Human
caacaaaaaaagugaaaugua

SEQ ID NO: 318116 - RNA, 21 nt, Human
caacaccagaauaggcauaaa

SEQ ID NO: 318117 - RNA, 24 nt, Human
caacauaaaguccccauaacagaa

SEQ ID NO: 318118 - RNA, 24 nt, Human
caacauggagauggagauucagau

SEQ ID NO: 318119 - RNA, 21 nt, Human
caagagccagaaacucagaca

SEQ ID NO: 318120 - RNA, 25 nt, Human
caagcucagcucacccguuucuccu

SEQ ID NO: 318121 - RNA, 20 nt, Human
caagugaccuaccuaccccc

SEQ ID NO: 318122 - RNA, 23 nt, Human
caagugaccuaccuacccccacc

SEQ ID NO: 318123 - RNA, 23 nt, Human
caagugguaacagagcuucacaa

SEQ ID NO: 318124 - RNA, 20 nt, Human
caauacauaacugggaaggc

SEQ ID NO: 318125 - RNA, 19 nt, Human
caauuuguuguuuuuaauc

SEQ ID NO: 318126 - RNA, 24 nt, Human
cacaaaacccaagaaccucacuga

SEQ ID NO: 318127 - RNA, 28 nt, Human
cacacgcacgcacacaugcacgcgcgca

SEQ ID NO: 318128 - RNA, 18 nt, Human
cacaugcaaaaaaggagu

SEQ ID NO: 318129 - RNA, 18 nt, Human
cacauggcagauacagag

SEQ ID NO: 318130 - RNA, 21 nt, Human
cacgcgcccgcacgagaacac

SEQ ID NO: 318131 - RNA, 19 nt, Human
cagagaaggguagacggug

SEQ ID NO: 318132 - RNA, 20 nt, Human
cagagcucaccaugggcugc

SEQ ID NO: 318133 - RNA, 22 nt, Human
cagcaauagcacaacaaaucuu

SEQ ID NO: 318134 - RNA, 19 nt, Human
cagcguggagucggccccc

SEQ ID NO: 318135 - RNA, 21 nt, Human
caggaaaggaaauugccaagc

SEQ ID NO: 318136 - RNA, 21 nt, Human
caggugcaccugaucugaggu

SEQ ID NO: 318137 - RNA, 20 nt, Human
caugcaaaaaaggagugacc

SEQ ID NO: 318138 - RNA, 18 nt, Human
cauuguauuaggagaaau

SEQ ID NO: 318139 - RNA, 21 nt, Human
ccaagcggaaaaauauccaca

SEQ ID NO: 318140 - RNA, 25 nt, Human
ccacacuucccagagcucaccaugg

SEQ ID NO: 318141 - RNA, 18 nt, Human
ccagagcucaccaugggc

SEQ ID NO: 318142 - RNA, 23 nt, Human
ccagucccaugacgaggagccag

SEQ ID NO: 318143 - RNA, 21 nt, Human
ccauacaccguccccauuccc

SEQ ID NO: 318144 - RNA, 24 nt, Human
ccaugugcuggggccgaggggcau

SEQ ID NO: 318145 - RNA, 18 nt, Human
ccccaaaggcacaaaacc

SEQ ID NO: 318146 - RNA, 21 nt, Human
ccccaaaggcacaaaacccaa

SEQ ID NO: 318147 - RNA, 25 nt, Human
ccccaaaggcacaaaacccaagaac

SEQ ID NO: 318148 - RNA, 21 nt, Human
cccccaccauagccgaaaauc

SEQ ID NO: 318149 - RNA, 22 nt, Human
cccccuggcaggauggccuccg

SEQ ID NO: 318150 - RNA, 25 nt, Human
ccccugggucaaaccaaagucccca

SEQ ID NO: 318151 - RNA, 27 nt, Human
ccccuuccugccgccccgggguucggg

SEQ ID NO: 318152 - RNA, 22 nt, Human
cccucguuugaagaccacucac

SEQ ID NO: 318153 - RNA, 23 nt, Human
cccuggcaggauggccuccgaaa

SEQ ID NO: 318154 - RNA, 19 nt, Human
ccuccccaagcaggugagc

SEQ ID NO: 318155 - RNA, 19 nt, Human
ccugaaaccuacaacaaac

SEQ ID NO: 318156 - RNA, 18 nt, Human
cgaaaucucuucuucuuc

SEQ ID NO: 318157 - RNA, 28 nt, Human
cgcacgcacacaugcacgcgcgcacaug

SEQ ID NO: 318158 - RNA, 25 nt, Human
cgcguugggcccccaccgaagcagc

SEQ ID NO: 318159 - RNA, 21 nt, Human
cgugccaaaaacaagggccau

SEQ ID NO: 318160 - RNA, 21 nt, Human
cguguagacauacaucuguac

SEQ ID NO: 318161 - RNA, 19 nt, Human
cuacauacauauuuacaga

SEQ ID NO: 318162 - RNA, 20 nt, Human
cuacugcuaaaacaggcaac

SEQ ID NO: 318163 - RNA, 22 nt, Human
cucaagaagcaaaaagcagggu

SEQ ID NO: 318164 - RNA, 22 nt, Human
cucaagagccagaaacucagac

SEQ ID NO: 318165 - RNA, 23 nt, Human
cucaagagccagaaacucagaca

SEQ ID NO: 318166 - RNA, 19 nt, Human
cuccuacuuucagauguac

SEQ ID NO: 318167 - RNA, 20 nt, Human
cuccucuaguuauuaagugu

SEQ ID NO: 318168 - RNA, 19 nt, Human
cucgcagccucacacaacu

SEQ ID NO: 318169 - RNA, 22 nt, Human
cugaaggccuuccuaaggcuga

SEQ ID NO: 318170 - RNA, 18 nt, Human
cugcaaagacucaagagc

SEQ ID NO: 318171 - RNA, 19 nt, Human
cuuauccuaaguugagcau

SEQ ID NO: 318172 - RNA, 24 nt, Human
cuugaaaagccuaaaguauccaaa

SEQ ID NO: 318173 - RNA, 25 nt, Human
cuuuauacaauauuucaacauaaag

SEQ ID NO: 318174 - RNA, 24 nt, Human
gaaaacaacaaaaaaaagaaauac

SEQ ID NO: 318175 - RNA, 22 nt, Human
gaaaagccuaaaguauccaaau

SEQ ID NO: 318176 - RNA, 21 nt, Human
gaagaacacguccaagcacaa

SEQ ID NO: 318177 - RNA, 23 nt, Human
gaaggccuuccuaaggcugaccc

SEQ ID NO: 318178 - RNA, 18 nt, Human
gaagguggggagagaggg

SEQ ID NO: 318179 - RNA, 25 nt, Human
gacaacucaagaagcaaaaagcagg

SEQ ID NO: 318180 - RNA, 20 nt, Human
gaccccugggucaaaccaaa

SEQ ID NO: 318181 - RNA, 23 nt, Human
gacucaauacauaacugggaagg

SEQ ID NO: 318182 - RNA, 24 nt, Human
gagaacaaaaaacaguaugaauaa

SEQ ID NO: 318183 - RNA, 20 nt, Human
gagguaccagucccaugacg

SEQ ID NO: 318184 - RNA, 22 nt, Human
gagucagcuucaacuggucuug

SEQ ID NO: 318185 - RNA, 20 nt, Human
gaguggagggaaggucaaaa

SEQ ID NO: 318186 - RNA, 23 nt, Human
gcacaaauucaccaaacaaauau

SEQ ID NO: 318187 - RNA, 23 nt, Human
gcacacaugcacgcgcgcacaug

SEQ ID NO: 318188 - RNA, 21 nt, Human
gcaggagaucccuccccucca

SEQ ID NO: 318189 - RNA, 20 nt, Human
gccaugcucagaucugaggu

SEQ ID NO: 318190 - RNA, 21 nt, Human
gcguugggcccccaccgaagc

SEQ ID NO: 318191 - RNA, 23 nt, Human
ggaaggagguagaaaacauagug

SEQ ID NO: 318192 - RNA, 23 nt, Human
ggacaagugaccuaccuaccccc

SEQ ID NO: 318193 - RNA, 21 nt, Human
ggagaaauaucuaagaaaaaa

SEQ ID NO: 318194 - RNA, 21 nt, Human
ggagucagccccguccccccc

SEQ ID NO: 318195 - RNA, 22 nt, Human
ggcacaaaacccaagaaccuca

SEQ ID NO: 318196 - RNA, 20 nt, Human
ggcccccaccgaagcagcag

SEQ ID NO: 318197 - RNA, 19 nt, Human
ggcugcaggugacuugcca

SEQ ID NO: 318198 - RNA, 19 nt, Human
gggaaacaggaaaacugug

SEQ ID NO: 318199 - RNA, 21 nt, Human
gggaacucggccuccuccuga

SEQ ID NO: 318200 - RNA, 19 nt, Human
gggaaugauaguggaagga

SEQ ID NO: 318201 - RNA, 19 nt, Human
gggcauguucaggcucggc

SEQ ID NO: 318202 - RNA, 18 nt, Human
gggcgcccagcaugcgcg

SEQ ID NO: 318203 - RNA, 18 nt, Human
ggggugguacugaagggg

SEQ ID NO: 318204 - RNA, 20 nt, Human
gguuaaaaucaauggacaac

SEQ ID NO: 318205 - RNA, 21 nt, Human
guagcccugaaaaaaaaaauc

SEQ ID NO: 318206 - RNA, 22 nt, Human
gugccaaaaacaagggccaugc

SEQ ID NO: 318207 - RNA, 23 nt, Human
guggaaggauuaaaguggcacaa

SEQ ID NO: 318208 - RNA, 18 nt, Human
guggagucggcccccuuc

SEQ ID NO: 318209 - RNA, 22 nt, Human
uaaaacaggcaacuugcuuugc

SEQ ID NO: 318210 - RNA, 21 nt, Human
uaaaagaaaggcaucaagagc

SEQ ID NO: 318211 - RNA, 22 nt, Human
uaaaguggcacaaauucaccaa

SEQ ID NO: 318212 - RNA, 26 nt, Human
uaacaacgccaacaaaaaaagugaaa

SEQ ID NO: 318213 - RNA, 24 nt, Human
uaacagcaaaguucaauacaggaa

SEQ ID NO: 318214 - RNA, 23 nt, Human
uaacuaacagcaaaguucaauac

SEQ ID NO: 318215 - RNA, 24 nt, Human
uaagccucgcagagugaggaacau

SEQ ID NO: 318216 - RNA, 22 nt, Human
uaagcugccggcaaucagcuga

SEQ ID NO: 318217 - RNA, 20 nt, Human
uaaguguuugcagcaauagc

SEQ ID NO: 318218 - RNA, 21 nt, Human
uaaguugagcaugcaauacuu

SEQ ID NO: 318219 - RNA, 22 nt, Human
uaauaguuauaaauuagugcca

SEQ ID NO: 318220 - RNA, 18 nt, Human
uaauggcaaaagacaacu

SEQ ID NO: 318221 - RNA, 23 nt, Human
uacaccguccccauucccugccc

SEQ ID NO: 318222 - RNA, 24 nt, Human
uaccuacccccaccauagccgaaa

SEQ ID NO: 318223 - RNA, 22 nt, Human
uagauccuuaucagaucccaua

SEQ ID NO: 318224 - RNA, 19 nt, Human
uagcacucuccaaaaagaa

SEQ ID NO: 318225 - RNA, 24 nt, Human
uagcacucuccaaaaagaagcaau

SEQ ID NO: 318226 - RNA, 23 nt, Human
uaguggaaggauuaaaguggcac

SEQ ID NO: 318227 - RNA, 23 nt, Human
uaguggccccuuccaccaaguuc

SEQ ID NO: 318228 - RNA, 21 nt, Human
uauagcaaagucccuaaaaaa

SEQ ID NO: 318229 - RNA, 23 nt, Human
uaucgugugacaaaccgugcuca

SEQ ID NO: 318230 - RNA, 19 nt, Human
ucaaaacgccuaaggacuc

SEQ ID NO: 318231 - RNA, 18 nt, Human
ucaaaccaaaguccccau

SEQ ID NO: 318232 - RNA, 20 nt, Human
ucaauacauaacugggaagg

SEQ ID NO: 318233 - RNA, 22 nt, Human
ucacauauaauacaauugaagc

SEQ ID NO: 318234 - RNA, 20 nt, Human
ucauauauuuaccuccccaa

SEQ ID NO: 318235 - RNA, 22 nt, Human
ucauauauuuaccuccccaagc

SEQ ID NO: 318236 - RNA, 19 nt, Human
ucauuagaauagucuuuuu

SEQ ID NO: 318237 - RNA, 23 nt, Human
uccaaaaagaagcaauaaaauaa

SEQ ID NO: 318238 - RNA, 19 nt, Human
uccaaacgccaagcucagc

SEQ ID NO: 318239 - RNA, 20 nt, Human
uccauacaccguccccauuc

SEQ ID NO: 318240 - RNA, 19 nt, Human
ucccaaaggacagcgugga

SEQ ID NO: 318241 - RNA, 20 nt, Human
ucccagagauguugccggga

SEQ ID NO: 318242 - RNA, 20 nt, Human
ucccauacugcagccgauug

SEQ ID NO: 318243 - RNA, 19 nt, Human
uccccaagcaggugagcug

SEQ ID NO: 318244 - RNA, 19 nt, Human
ucccuaaaaaauaagccuc

SEQ ID NO: 318245 - RNA, 18 nt, Human
ucccuccuuccgcucugg

SEQ ID NO: 318246 - RNA, 23 nt, Human
ucccuuucucucgcagccucaca

SEQ ID NO: 318247 - RNA, 21 nt, Human
ucccuuuggcuucacugauuc

SEQ ID NO: 318248 - RNA, 25 nt, Human
ucggccuccuccugaaggccuuccc

SEQ ID NO: 318249 - RNA, 18 nt, Human
ucuaacaagugguaacag

SEQ ID NO: 318250 - RNA, 21 nt, Human
ucucccaggugcaccugaucu

SEQ ID NO: 318251 - RNA, 23 nt, Human
ucugaaaacuccuacuuucagau

SEQ ID NO: 318252 - RNA, 23 nt, Human
ucuggaaaugccucaagagccag

SEQ ID NO: 318253 - RNA, 23 nt, Human
ucuguacaggccugggaugcgcc

SEQ ID NO: 318254 - RNA, 22 nt, Human
ugaaaccuacaacaaacuacug

SEQ ID NO: 318255 - RNA, 22 nt, Human
ugaaaggauuccaguuuaugaa

SEQ ID NO: 318256 - RNA, 24 nt, Human
ugaaaggauuccaguuuaugaaaa

SEQ ID NO: 318257 - RNA, 18 nt, Human
ugaaaggcacggaaggag

SEQ ID NO: 318258 - RNA, 21 nt, Human
ugaaaggcacggaaggaggua

SEQ ID NO: 318259 - RNA, 18 nt, Human
ugaccccugggucaaacc

SEQ ID NO: 318260 - RNA, 22 nt, Human
ugacugacucauuaaauaacac

SEQ ID NO: 318261 - RNA, 24 nt, Human
ugagaagcucagacacuaaagaug

SEQ ID NO: 318262 - RNA, 18 nt, Human
ugagugcauccaaaucug

SEQ ID NO: 318263 - RNA, 19 nt, Human
ugauuuaaaaaaacgaaaa

SEQ ID NO: 318264 - RNA, 24 nt, Human
ugccaagcggaaaaauauccacag

SEQ ID NO: 318265 - RNA, 20 nt, Human
ugccauguuauuucacaaca

SEQ ID NO: 318266 - RNA, 18 nt, Human
ugccccaaaggcacaaaa

SEQ ID NO: 318267 - RNA, 24 nt, Human
ugccccaaaggcacaaaacccaag

SEQ ID NO: 318268 - RNA, 19 nt, Human
ugccgggagagggaaggug

SEQ ID NO: 318269 - RNA, 18 nt, Human
ugcuguugauucccagag

SEQ ID NO: 318270 - RNA, 19 nt, Human
ugggaugcgccugugcacu

SEQ ID NO: 318271 - RNA, 24 nt, Human
ugguaugcaaauucauuuauacuu

SEQ ID NO: 318272 - RNA, 18 nt, Human
uguagacauacaucugua

SEQ ID NO: 318273 - RNA, 23 nt, Human
ugucccaagugggugccucagga

SEQ ID NO: 318274 - RNA, 21 nt, Human
ugucuggagucugccccaaag

SEQ ID NO: 318275 - RNA, 23 nt, Human
ugucuggagucugccccaaaggc

SEQ ID NO: 318276 - RNA, 18 nt, Human
ugugaaaggcacggaagg

SEQ ID NO: 318277 - RNA, 20 nt, Human
ugugcuuuuuaaucuuccca

SEQ ID NO: 318278 - RNA, 18 nt, Human
uguggcaaugaagggcgc

SEQ ID NO: 318279 - RNA, 24 nt, Human
uguugccgggagagggaagguggg

SEQ ID NO: 318280 - RNA, 19 nt, Human
uuaauacaucugacaagcc

SEQ ID NO: 318281 - RNA, 24 nt, Human
uuaucccaagagccauacuucuga

SEQ ID NO: 318282 - RNA, 22 nt, Human
uucaaaucaauccuuucucugc

SEQ ID NO: 318283 - RNA, 21 nt, Human
uucccagagauguugccggga

SEQ ID NO: 318284 - RNA, 21 nt, Human
uucucucgcagccucacacaa

SEQ ID NO: 318285 - RNA, 25 nt, Human
uucuguaaagauacacacaacaaag

SEQ ID NO: 318286 - RNA, 24 nt, Human
uugaaaagccuaaaguauccaaau

SEQ ID NO: 318287 - RNA, 19 nt, Human
uugauagcucacucuugaa

SEQ ID NO: 318288 - RNA, 24 nt, Human
uuuaauacaucugacaagccccaa

SEQ ID NO: 318289 - RNA, 21 nt, Human
aaaacaagaucuacccuaaac

SEQ ID NO: 318290 - RNA, 18 nt, Human
aaacaagaucuacccuaa

SEQ ID NO: 318291 - RNA, 23 nt, Human
aagcagcccagguguggugauuu

SEQ ID NO: 318292 - RNA, 22 nt, Human
aagccucagaaguuacacuucc

SEQ ID NO: 318293 - RNA, 20 nt, Human
aaguagcacacuuaugcugc

SEQ ID NO: 318294 - RNA, 24 nt, Human
agguguggugauuuacaccuguaa

SEQ ID NO: 318295 - RNA, 22 nt, Human
auaaagccucagaaguuacacu

SEQ ID NO: 318296 - RNA, 22 nt, Human
auggaagaaugugaaauaaauc

SEQ ID NO: 318297 - RNA, 22 nt, Human
caagaucuacccuaaacuucca

SEQ ID NO: 318298 - RNA, 20 nt, Human
caauguuuuaacacuuuuca

SEQ ID NO: 318299 - RNA, 19 nt, Human
caccagaguccucuacucc

SEQ ID NO: 318300 - RNA, 19 nt, Human
cacuaucagcaaucaggau

SEQ ID NO: 318301 - RNA, 22 nt, Human
cacuucccucccaguccaccac

SEQ ID NO: 318302 - RNA, 18 nt, Human
caggauggcuauggggca

SEQ ID NO: 318303 - RNA, 22 nt, Human
caggcaucucuccucuuguucu

SEQ ID NO: 318304 - RNA, 22 nt, Human
caggugacuugcucaggcuucc

SEQ ID NO: 318305 - RNA, 21 nt, Human
ccaccagaguccucuacucca

SEQ ID NO: 318306 - RNA, 24 nt, Human
ccagcaccugccgaaacuuuggag

SEQ ID NO: 318307 - RNA, 18 nt, Human
ccagcaggaaaauggaau

SEQ ID NO: 318308 - RNA, 24 nt, Human
ccagcaggcauuauuugggcucuu

SEQ ID NO: 318309 - RNA, 19 nt, Human
ccagcccagagguugugcc

SEQ ID NO: 318310 - RNA, 21 nt, Human
ccagcccagagguugugccuu

SEQ ID NO: 318311 - RNA, 18 nt, Human
ccccuuugucugaauggc

SEQ ID NO: 318312 - RNA, 18 nt, Human
cccuuccuucccuuccuc

SEQ ID NO: 318313 - RNA, 23 nt, Human
ccucagaaguuacacuucccucc

SEQ ID NO: 318314 - RNA, 23 nt, Human
ccucccaguccaccacuuaaaau

SEQ ID NO: 318315 - RNA, 22 nt, Human
ccuucuuuaccuuccaaaaauc

SEQ ID NO: 318316 - RNA, 21 nt, Human
cuccagcccagagguugugcc

SEQ ID NO: 318317 - RNA, 24 nt, Human
cuggauguuuacuggagacaggga

SEQ ID NO: 318318 - RNA, 18 nt, Human
cugggacccugaaaacag

SEQ ID NO: 318319 - RNA, 21 nt, Human
cuuaaaauaggacacaugcuc

SEQ ID NO: 318320 - RNA, 19 nt, Human
cuuaacuaagcugggaccc

SEQ ID NO: 318321 - RNA, 21 nt, Human
cuuuaaacuuacuagcugcca

SEQ ID NO: 318322 - RNA, 22 nt, Human
gagaaggagcgcucggguggug

SEQ ID NO: 318323 - RNA, 21 nt, Human
gagcauguuccaucaauccug

SEQ ID NO: 318324 - RNA, 23 nt, Human
gccuugagcaggagagcauguuc

SEQ ID NO: 318325 - RNA, 19 nt, Human
ggggccaauaucagagaag

SEQ ID NO: 318326 - RNA, 19 nt, Human
uaaaacacuaucagcaauc

SEQ ID NO: 318327 - RNA, 19 nt, Human
uaaaauaaagcagcccagg

SEQ ID NO: 318328 - RNA, 21 nt, Human
uaaaauaaagcagcccaggug

SEQ ID NO: 318329 - RNA, 22 nt, Human
uaaacuuacuagcugccaagua

SEQ ID NO: 318330 - RNA, 24 nt, Human
uaacuaagcugggacccugaaaac

SEQ ID NO: 318331 - RNA, 19 nt, Human
uaagguaaaugaaacauaa

SEQ ID NO: 318332 - RNA, 20 nt, Human
uaauggaagaaugugaaaua

SEQ ID NO: 318333 - RNA, 24 nt, Human
uacauucauuccauaaauacauua

SEQ ID NO: 318334 - RNA, 21 nt, Human
uacccuaaacuuccaaguggc

SEQ ID NO: 318335 - RNA, 23 nt, Human
uagaauguuaccaagucacagga

SEQ ID NO: 318336 - RNA, 19 nt, Human
uauaaaauaaagcagccca

SEQ ID NO: 318337 - RNA, 25 nt, Human
ucagcaaucaggauggcuauggggc

SEQ ID NO: 318338 - RNA, 23 nt, Human
ucagccuucuuuaccuuccaaaa

SEQ ID NO: 318339 - RNA, 19 nt, Human
ucaggagacaauccagcag

SEQ ID NO: 318340 - RNA, 22 nt, Human
ucccuuccuucccuuccucagg

SEQ ID NO: 318341 - RNA, 19 nt, Human
ucgggugguggggacaggc

SEQ ID NO: 318342 - RNA, 18 nt, Human
ucuaaaccuacaaagauc

SEQ ID NO: 318343 - RNA, 21 nt, Human
ugaauggcuggauguuuacug

SEQ ID NO: 318344 - RNA, 24 nt, Human
ugacuacugacugacugcugcuuu

SEQ ID NO: 318345 - RNA, 21 nt, Human
uggcuggauguuuacuggaga

SEQ ID NO: 318346 - RNA, 18 nt, Human
uguauuuuuccauuugca

SEQ ID NO: 318347 - RNA, 19 nt, Human
ugugccuugagcaggagag

SEQ ID NO: 318348 - RNA, 24 nt, Human
uguuaccaagucacaggaccagca

SEQ ID NO: 318349 - RNA, 19 nt, Human
uucccaccagaguccucua

SEQ ID NO: 318350 - RNA, 25 nt, Human
uuuuuuuuuuuuuuuuccgguauuu

SEQ ID NO: 318351 - RNA, 21 nt, Human
uuuuuuuuuuuuuuuuuccgg

SEQ ID NO: 318352 - RNA, 22 nt, Human
uuuuuuuuuuuuuuuuuccggu

SEQ ID NO: 318353 - RNA, 25 nt, Human
uuuuuuuuuuuuuuuuuuuuuccgg

SEQ ID NO: 318354 - RNA, 22 nt, Human
aaaauaaguaaaaugacuacau

SEQ ID NO: 318355 - RNA, 24 nt, Human
agccagaauuacaaaaacaaaaca

SEQ ID NO: 318356 - RNA, 23 nt, Human
auuacaaaaacaaaacauuuaga

SEQ ID NO: 318357 - RNA, 19 nt, Human
auuauaggcaagauucaag

SEQ ID NO: 318358 - RNA, 22 nt, Human
caggaccguugaucagaagcuu

SEQ ID NO: 318359 - RNA, 23 nt, Human
gccagaauuacaaaaacaaaaca

SEQ ID NO: 318360 - RNA, 21 nt, Human
uaaaaugacuacauaaacuca

SEQ ID NO: 318361 - RNA, 19 nt, Human
uaaccauguuuaaaagguc

SEQ ID NO: 318362 - RNA, 23 nt, Human
uacaaugaauacuucagcaaaga

SEQ ID NO: 318363 - RNA, 19 nt, Human
uagccagccaccaagaugu

SEQ ID NO: 318364 - RNA, 21 nt, Human
ugaauacuucagcaaagaaaa

SEQ ID NO: 318365 - RNA, 18 nt, Human
ugugguucuucucucagu

SEQ ID NO: 318366 - RNA, 21 nt, Human
ugugguucuucucucaguuga

SEQ ID NO: 318367 - RNA, 23 nt, Human
uucaaaaugcaaucccuggauuu

SEQ ID NO: 318368 - RNA, 21 nt, Human
uucaagaugaaaauuucagga

SEQ ID NO: 318369 - RNA, 27 nt, Human
aaccacaaguguuuauugcagaaaucu

SEQ ID NO: 318370 - RNA, 20 nt, Human
cacaaguguuuauugcagaa

SEQ ID NO: 318371 - RNA, 18 nt, Human
cagcacagggcugggcag

SEQ ID NO: 318372 - RNA, 19 nt, Human
cagggccccagcacagggc

SEQ ID NO: 318373 - RNA, 23 nt, Human
ccacuuccacuccgccuccuggc

SEQ ID NO: 318374 - RNA, 20 nt, Human
gauagggagggguggaggaa

SEQ ID NO: 318375 - RNA, 21 nt, Human
gggcugggcaggugagauagg

SEQ ID NO: 318376 - RNA, 24 nt, Human
uauugcagaaaucuggccaacauu

SEQ ID NO: 318377 - RNA, 19 nt, Human
uggccaacauuccaauugc

SEQ ID NO: 318378 - RNA, 18 nt, Human
uuuuccgcaaaccacaag

SEQ ID NO: 318379 - RNA, 19 nt, Human
agaagaaaggaggcaggga

SEQ ID NO: 318380 - RNA, 20 nt, Human
agaagaaaggaggcagggag

SEQ ID NO: 318381 - RNA, 23 nt, Human
agcaaagggaguccaggccucca

SEQ ID NO: 318382 - RNA, 22 nt, Human
aggcagaagaaaggaggcaggg

SEQ ID NO: 318383 - RNA, 19 nt, Human
aggcagggaguauggccug

SEQ ID NO: 318384 - RNA, 20 nt, Human
aggcagggaguauggccugg

SEQ ID NO: 318385 - RNA, 21 nt, Human
aggcagggaguauggccuggg

SEQ ID NO: 318386 - RNA, 26 nt, Human
agugcccauucaucuugucagaggca

SEQ ID NO: 318387 - RNA, 23 nt, Human
caaagggaguccaggccuccacu

SEQ ID NO: 318388 - RNA, 21 nt, Human
cacugcccgcaccgcggcacc

SEQ ID NO: 318389 - RNA, 19 nt, Human
cagaagaaaggaggcaggg

SEQ ID NO: 318390 - RNA, 19 nt, Human
caggccagucccuucccca

SEQ ID NO: 318391 - RNA, 22 nt, Human
caucugaacccccagauuacua

SEQ ID NO: 318392 - RNA, 18 nt, Human
caugugaagaggaacugg

SEQ ID NO: 318393 - RNA, 22 nt, Human
ccagcaaaugccaggggcuuca

SEQ ID NO: 318394 - RNA, 19 nt, Human
ccaggacaugccgcgccgg

SEQ ID NO: 318395 - RNA, 19 nt, Human
ccccagauuacuacccaag

SEQ ID NO: 318396 - RNA, 19 nt, Human
ccccagauuacuacccaag

SEQ ID NO: 318397 - RNA, 21 nt, Human
ccccgucgccgccgggagcac

SEQ ID NO: 318398 - RNA, 21 nt, Human
cccgcaccgcggcacccagga

SEQ ID NO: 318399 - RNA, 22 nt, Human
cccgcaccgcggcacccaggac

SEQ ID NO: 318400 - RNA, 26 nt, Human
ccucugguaggcagaagaaaggaggc

SEQ ID NO: 318401 - RNA, 27 nt, Human
cucugcucuagagauggcaguguccag

SEQ ID NO: 318402 - RNA, 28 nt, Human
cucugcucuagagauggcaguguccagg

SEQ ID NO: 318403 - RNA, 23 nt, Human
cugaacccccagauuacuaccca

SEQ ID NO: 318404 - RNA, 20 nt, Human
cuggauggauccacagauga

SEQ ID NO: 318405 - RNA, 18 nt, Human
gaaaggaggcagggagua

SEQ ID NO: 318406 - RNA, 27 nt, Human
gaugacgaaggcaagguuccugggaag

SEQ ID NO: 318407 - RNA, 21 nt, Human
gcagaagaaaggaggcaggga

SEQ ID NO: 318408 - RNA, 19 nt, Human
gccagucccuuccccagca

SEQ ID NO: 318409 - RNA, 21 nt, Human
ggaggcagggaguauggccuc

SEQ ID NO: 318410 - RNA, 22 nt, Human
ggcaagguuccugggaccugga

SEQ ID NO: 318411 - RNA, 25 nt, Human
guaggcagaagaaaggaggcaggga

SEQ ID NO: 318412 - RNA, 20 nt, Human
gugaagaggaacuggccaca

SEQ ID NO: 318413 - RNA, 19 nt, Human
uagagauggcaguguccag

SEQ ID NO: 318414 - RNA, 21 nt, Human
uaggcagaagaaaggaggcag

SEQ ID NO: 318415 - RNA, 20 nt, Human
ucacacagggccauagccaa

SEQ ID NO: 318416 - RNA, 19 nt, Human
ucaguucacucuuuccuuc

SEQ ID NO: 318417 - RNA, 23 nt, Human
ucaucuugucagaggcaaccuca

SEQ ID NO: 318418 - RNA, 23 nt, Human
ucaugugaagaggaacuggccac

SEQ ID NO: 318419 - RNA, 23 nt, Human
uccaggcuccugauucccaggaa

SEQ ID NO: 318420 - RNA, 22 nt, Human
ucccauuccucaagguaagggu

SEQ ID NO: 318421 - RNA, 24 nt, Human
uccccagcaaaugccaggggcuuc

SEQ ID NO: 318422 - RNA, 18 nt, Human
uccugauucccaggaagc

SEQ ID NO: 318423 - RNA, 24 nt, Human
ucuagauaaggacaagcucaacuc

SEQ ID NO: 318424 - RNA, 21 nt, Human
ugaacccccagauuacuaccc

SEQ ID NO: 318425 - RNA, 23 nt, Human
ugaacccccagauuacuacccaa

SEQ ID NO: 318426 - RNA, 25 nt, Human
ugaagaggaacuggccacaaggcug

SEQ ID NO: 318427 - RNA, 20 nt, Human
ugagcaaagggaguccaggc

SEQ ID NO: 318428 - RNA, 21 nt, Human
ugagcaaagggaguccaggcc

SEQ ID NO: 318429 - RNA, 22 nt, Human
ugaggggaggaggagaaacugu

SEQ ID NO: 318430 - RNA, 19 nt, Human
ugggcaucuucacauguuu

SEQ ID NO: 318431 - RNA, 21 nt, Human
ugguaggcagaagaaaggagg

SEQ ID NO: 318432 - RNA, 18 nt, Human
uucacuagaagggcaggc

SEQ ID NO: 318433 - RNA, 25 nt, Human
uuccugggaccuggagucacacagg

SEQ ID NO: 318434 - RNA, 24 nt, Human
uuuuuuuuuuuuuuuggggucuca

SEQ ID NO: 318435 - RNA, 22 nt, Human
uuuuuuuuuuuuuuuuuggggu

SEQ ID NO: 318436 - RNA, 23 nt, Human
uuuuuuuuuuuuuuuuuuugggg

SEQ ID NO: 318437 - RNA, 23 nt, Human
aaaccacagaaggccaggaguuu

SEQ ID NO: 318438 - RNA, 23 nt, Human
aaagaaggggagagagagaaaac

SEQ ID NO: 318439 - RNA, 19 nt, Human
aacuggguggaaccaaacu

SEQ ID NO: 318440 - RNA, 25 nt, Human
aagcugggagaaagaaggggagaga

SEQ ID NO: 318441 - RNA, 22 nt, Human
cagcagagagccagcuagaaga

SEQ ID NO: 318442 - RNA, 24 nt, Human
cagcuagaagaucugaucucccag

SEQ ID NO: 318443 - RNA, 22 nt, Human
cagcucugaguuuaguccuccu

SEQ ID NO: 318444 - RNA, 19 nt, Human
ccucccuucggcggagcug

SEQ ID NO: 318445 - RNA, 22 nt, Human
cucugaguuuaguccuccucuu

SEQ ID NO: 318446 - RNA, 21 nt, Human
gagggugggauaagggaggca

SEQ ID NO: 318447 - RNA, 26 nt, Human
gauaagggaggcaaagcugggagaaa

SEQ ID NO: 318448 - RNA, 20 nt, Human
gcagcagagagccagcuaga

SEQ ID NO: 318449 - RNA, 20 nt, Human
gcggucagagcagauccggu

SEQ ID NO: 318450 - RNA, 19 nt, Human
ggaaccaaacugaguccuu

SEQ ID NO: 318451 - RNA, 21 nt, Human
ggagagagagaaaacgaaugg

SEQ ID NO: 318452 - RNA, 25 nt, Human
ggcaaagcugggagaaagaagggga

SEQ ID NO: 318453 - RNA, 21 nt, Human
ggcggagcuguggcagcagag

SEQ ID NO: 318454 - RNA, 18 nt, Human
ggcugcagaagaauagau

SEQ ID NO: 318455 - RNA, 23 nt, Human
guccuccucuuccacccccuccc

SEQ ID NO: 318456 - RNA, 18 nt, Human
guuuaguccuccucuucc

SEQ ID NO: 318457 - RNA, 18 nt, Human
uaagggaggcaaagcugg

SEQ ID NO: 318458 - RNA, 21 nt, Human
uaguccuccucuuccaccccc

SEQ ID NO: 318459 - RNA, 19 nt, Human
ucccugccucgaggguggg

SEQ ID NO: 318460 - RNA, 20 nt, Human
uccucuuccacccccucccu

SEQ ID NO: 318461 - RNA, 18 nt, Human
ugcacugguugucuuuca

SEQ ID NO: 318462 - RNA, 26 nt, Human
ugccucuccucucagcucugaguuua

SEQ ID NO: 318463 - RNA, 19 nt, Human
ugcggucagagcagauccg

SEQ ID NO: 318464 - RNA, 23 nt, Human
ugggccccagccuucaagugcgg

SEQ ID NO: 318465 - RNA, 22 nt, Human
aaaaaaacaccaaaaaaccaca

SEQ ID NO: 318466 - RNA, 22 nt, Human
aaaaacaccaaaaaaccacaug

SEQ ID NO: 318467 - RNA, 23 nt, Human
aaaaaggagaagccuaaaaaaga

SEQ ID NO: 318468 - RNA, 19 nt, Human
aaaacuaacuuguugcaga

SEQ ID NO: 318469 - RNA, 23 nt, Human
aaccacaugugccuagacagggu

SEQ ID NO: 318470 - RNA, 23 nt, Human
aagaaacaccaaggccuugcuaa

SEQ ID NO: 318471 - RNA, 25 nt, Human
acaccaaggccuugcuaaaaaggag

SEQ ID NO: 318472 - RNA, 20 nt, Human
agaagucuucuccaugagaa

SEQ ID NO: 318473 - RNA, 18 nt, Human
agcaaucuaauauucaca

SEQ ID NO: 318474 - RNA, 22 nt, Human
aucccugucauucuuaaauaac

SEQ ID NO: 318475 - RNA, 22 nt, Human
caccaaaaaaccacaugugccu

SEQ ID NO: 318476 - RNA, 23 nt, Human
caccaaaaaaccacaugugccua

SEQ ID NO: 318477 - RNA, 25 nt, Human
caccaaggccuugcuaaaaaggaga

SEQ ID NO: 318478 - RNA, 21 nt, Human
caugcccuuaaaaaaaacacc

SEQ ID NO: 318479 - RNA, 22 nt, Human
ccaaaaaaccacaugugccuag

SEQ ID NO: 318480 - RNA, 19 nt, Human
ccacaugugccuagacagg

SEQ ID NO: 318481 - RNA, 20 nt, Human
ccacuucuggaguugccccu

SEQ ID NO: 318482 - RNA, 29 nt, Human
cccaacaugcccuuaaaaaaaacaccaag

SEQ ID NO: 318483 - RNA, 21 nt, Human
cccuuaaaaaaaacaccaaaa

SEQ ID NO: 318484 - RNA, 24 nt, Human
ccgacuaugauccuuaauucagca

SEQ ID NO: 318485 - RNA, 19 nt, Human
cucaauaugaagaaaccgg

SEQ ID NO: 318486 - RNA, 19 nt, Human
cucacagaaaacuccacuu

SEQ ID NO: 318487 - RNA, 24 nt, Human
gaauuccuuuuuuuuuuuuuuuuu

SEQ ID NO: 318488 - RNA, 20 nt, Human
gauccuuaauucagcaaucu

SEQ ID NO: 318489 - RNA, 25 nt, Human
ggaaaaagaaacaccaaggccuugc

SEQ ID NO: 318490 - RNA, 21 nt, Human
ggugucaacgugggaaagccc

SEQ ID NO: 318491 - RNA, 25 nt, Human
uaaaaaaaacaccaaaaaaccacau

SEQ ID NO: 318492 - RNA, 24 nt, Human
uaaaaaggagaagccuaaaaaaga

SEQ ID NO: 318493 - RNA, 18 nt, Human
uccuuuuuuuuuuuuuuu

SEQ ID NO: 318494 - RNA, 18 nt, Human
uccuuuuuuuuuuuuuuu

SEQ ID NO: 318495 - RNA, 18 nt, Human
ugcuaaaaaggagaagcc

SEQ ID NO: 318496 - RNA, 25 nt, Human
ugcuuuauucucacagaaaacucca

SEQ ID NO: 318497 - RNA, 23 nt, Human
uggaaaaagaaacaccaaggccu

SEQ ID NO: 318498 - RNA, 20 nt, Human
ugggaaagcccuugagguuu

SEQ ID NO: 318499 - RNA, 18 nt, Human
uguucaacuguagccugu

SEQ ID NO: 318500 - RNA, 18 nt, Human
uuuuuuuuuuuuuuuuug

SEQ ID NO: 318501 - RNA, 28 nt, Human
uuuuuuuuuuuuuuuuuuuuuuuggggg

SEQ ID NO: 318502 - RNA, 24 nt, Human
aaaaaaucccaaaauaaaccagag

SEQ ID NO: 318503 - RNA, 25 nt, Human
aaaauaaaccagagauuucaugcca

SEQ ID NO: 318504 - RNA, 20 nt, Human
aaaaucccaaaauaaaccag

SEQ ID NO: 318505 - RNA, 21 nt, Human
aacaaacuuugacaacaccaa

SEQ ID NO: 318506 - RNA, 23 nt, Human
acaacaaaaaaucccaaaauaaa

SEQ ID NO: 318507 - RNA, 26 nt, Human
acacaacuuuagaaaaaagggaacgc

SEQ ID NO: 318508 - RNA, 22 nt, Human
accuucuguugguccccuguua

SEQ ID NO: 318509 - RNA, 21 nt, Human
agaaaaaacaaacuuugacaa

SEQ ID NO: 318510 - RNA, 24 nt, Human
agccggguggccccauguggccuc

SEQ ID NO: 318511 - RNA, 22 nt, Human
aggagccgaaggccaggcaccu

SEQ ID NO: 318512 - RNA, 18 nt, Human
aggcagggaggacgcugg

SEQ ID NO: 318513 - RNA, 23 nt, Human
aggcagggaggacgcugggcagg

SEQ ID NO: 318514 - RNA, 24 nt, Human
aggcagggaggacgcugggcaggu

SEQ ID NO: 318515 - RNA, 21 nt, Human
aggcggagccaucccgaggga

SEQ ID NO: 318516 - RNA, 18 nt, Human
aggcgugauggaggcccc

SEQ ID NO: 318517 - RNA, 18 nt, Human
caaaucccagcuccagag

SEQ ID NO: 318518 - RNA, 23 nt, Human
caaaucccagcuccagaggccgc

SEQ ID NO: 318519 - RNA, 18 nt, Human
cacagcgaggguggccag

SEQ ID NO: 318520 - RNA, 23 nt, Human
caccagcugcucccaucagcucu

SEQ ID NO: 318521 - RNA, 19 nt, Human
caucacagcgaggguggcc

SEQ ID NO: 318522 - RNA, 23 nt, Human
caucacagcgaggguggccaggc

SEQ ID NO: 318523 - RNA, 20 nt, Human
caucccgagggagccgggug

SEQ ID NO: 318524 - RNA, 18 nt, Human
ccagcgcugccugcugug

SEQ ID NO: 318525 - RNA, 18 nt, Human
ccaggcuugucccggaag

SEQ ID NO: 318526 - RNA, 22 nt, Human
ccauauaaauaaagucagagca

SEQ ID NO: 318527 - RNA, 25 nt, Human
ccauguggccuccaugacguucccu

SEQ ID NO: 318528 - RNA, 24 nt, Human
ccuuggguucuggggacgcaggag

SEQ ID NO: 318529 - RNA, 20 nt, Human
cggaaggaggcagggaggac

SEQ ID NO: 318530 - RNA, 18 nt, Human
cggcccagggccaaucag

SEQ ID NO: 318531 - RNA, 18 nt, Human
cuccagaggccgcggccc

SEQ ID NO: 318532 - RNA, 21 nt, Human
gaagaaugggccggcccaggg

SEQ ID NO: 318533 - RNA, 18 nt, Human
gaaggaggcagggaggac

SEQ ID NO: 318534 - RNA, 21 nt, Human
gagccaucccgagggagccgg

SEQ ID NO: 318535 - RNA, 24 nt, Human
gccaaucagccagcucgucaucac

SEQ ID NO: 318536 - RNA, 22 nt, Human
gcggcugcggaagccuugggcc

SEQ ID NO: 318537 - RNA, 24 nt, Human
gggcggcugcggaagccuugggcc

SEQ ID NO: 318538 - RNA, 21 nt, Human
gguuagggugaaccuggaagc

SEQ ID NO: 318539 - RNA, 23 nt, Human
uaaucacacaacuuuagaaaaaa

SEQ ID NO: 318540 - RNA, 24 nt, Human
uaugggucuccagcaccccuccag

SEQ ID NO: 318541 - RNA, 20 nt, Human
uccaggggcggugaugucca

SEQ ID NO: 318542 - RNA, 18 nt, Human
ucccaaaauaaaccaggg

SEQ ID NO: 318543 - RNA, 18 nt, Human
ucccaaaucccagcucca

SEQ ID NO: 318544 - RNA, 21 nt, Human
ucccggaacgggcggcugcgg

SEQ ID NO: 318545 - RNA, 22 nt, Human
uccucccaaaucccagcuccag

SEQ ID NO: 318546 - RNA, 23 nt, Human
ucuuuuuuuuuuaguagaagcgg

SEQ ID NO: 318547 - RNA, 20 nt, Human
ugacaacaccaacaacaaaa

SEQ ID NO: 318548 - RNA, 21 nt, Human
ugacaacaccaacaacaaaaa

SEQ ID NO: 318549 - RNA, 23 nt, Human
ugacaacaccaacaacaaaaaau

SEQ ID NO: 318550 - RNA, 26 nt, Human
ugacaacaccaacaacaaaaaauccc

SEQ ID NO: 318551 - RNA, 20 nt, Human
ugaggaggaggagacacgug

SEQ ID NO: 318552 - RNA, 21 nt, Human
ugaggaggaggagacacgugu

SEQ ID NO: 318553 - RNA, 24 nt, Human
ugaggaggaggagacacguguggu

SEQ ID NO: 318554 - RNA, 28 nt, Human
ugcuguguccucccaaaucccagcucca

SEQ ID NO: 318555 - RNA, 19 nt, Human
uggcaggcgugugaagaau

SEQ ID NO: 318556 - RNA, 21 nt, Human
uggcaggcgugugaagaaugg

SEQ ID NO: 318557 - RNA, 21 nt, Human
uggccccauguggccuccaug

SEQ ID NO: 318558 - RNA, 20 nt, Human
uggccuccaugacguucccu

SEQ ID NO: 318559 - RNA, 25 nt, Human
ugggucuccagcaccccuccagcuu

SEQ ID NO: 318560 - RNA, 20 nt, Human
uugacaacaccaacaacaaa

SEQ ID NO: 318561 - RNA, 24 nt, Human
uuuuccaaguccaccaagcagguu

SEQ ID NO: 318562 - RNA, 26 nt, Human
uuuuccaaguccaccaagcagguuag

SEQ ID NO: 318563 - RNA, 23 nt, Human
aaauaugucaaauacccccacuc

SEQ ID NO: 318564 - RNA, 20 nt, Human
aagaacaauaagauagauaa

SEQ ID NO: 318565 - RNA, 24 nt, Human
aagaacaauaagauagauaacagc

SEQ ID NO: 318566 - RNA, 20 nt, Human
acacagauauccaggaaaaa

SEQ ID NO: 318567 - RNA, 21 nt, Human
agaaaaggggcauaucauuau

SEQ ID NO: 318568 - RNA, 21 nt, Human
augcuaacuacauugccuggu

SEQ ID NO: 318569 - RNA, 19 nt, Human
auuugggguguuauguaac

SEQ ID NO: 318570 - RNA, 19 nt, Human
cacaauccaagucagaguc

SEQ ID NO: 318571 - RNA, 19 nt, Human
cacuguguuucauuauuuu

SEQ ID NO: 318572 - RNA, 22 nt, Human
cacuguguuucauuauuuuucc

SEQ ID NO: 318573 - RNA, 18 nt, Human
cuguguuuuaauuuggga

SEQ ID NO: 318574 - RNA, 21 nt, Human
ggaugauaaaacuuaagcuuc

SEQ ID NO: 318575 - RNA, 21 nt, Human
guaaaauaugucaaauacccc

SEQ ID NO: 318576 - RNA, 18 nt, Human
guagacaaacacauccac

SEQ ID NO: 318577 - RNA, 24 nt, Human
uaaagcauaauccuuuaagaauuc

SEQ ID NO: 318578 - RNA, 20 nt, Human
uacccccacucuacaaauuc

SEQ ID NO: 318579 - RNA, 18 nt, Human
uagguaugaaauauuacc

SEQ ID NO: 318580 - RNA, 23 nt, Human
uaguacacuccacccuguaaaau

SEQ ID NO: 318581 - RNA, 18 nt, Human
uauccaggaaaaaaaggu

SEQ ID NO: 318582 - RNA, 21 nt, Human
ucacuguguuucauuauuuuu

SEQ ID NO: 318583 - RNA, 23 nt, Human
uccaagucagagucuuaauuuag

SEQ ID NO: 318584 - RNA, 23 nt, Human
ugaaaauacacagauauccagga

SEQ ID NO: 318585 - RNA, 27 nt, Human
uuaaagcauaauccuuuaagaauucau

SEQ ID NO: 318586 - RNA, 21 nt, Human
uugcuucucaagcuacuuuaa

SEQ ID NO: 318587 - RNA, 23 nt, Human
aaacaggauucccccaaugguga

SEQ ID NO: 318588 - RNA, 18 nt, Human
aagcagaggaggggaggc

SEQ ID NO: 318589 - RNA, 22 nt, Human
aauaaggaagacugccgaggaa

SEQ ID NO: 318590 - RNA, 21 nt, Human
acaccaggugccaggcaaagc

SEQ ID NO: 318591 - RNA, 22 nt, Human
acagagugaugauggucgaacg

SEQ ID NO: 318592 - RNA, 23 nt, Human
acucgugccaugucccaccggcc

SEQ ID NO: 318593 - RNA, 18 nt, Human
acugcuggcugggaccag

SEQ ID NO: 318594 - RNA, 20 nt, Human
agaaaaaucugaaacacaua

SEQ ID NO: 318595 - RNA, 21 nt, Human
agaaaaaucugaaacacauaa

SEQ ID NO: 318596 - RNA, 21 nt, Human
agacagagaugaagaugaagg

SEQ ID NO: 318597 - RNA, 18 nt, Human
agcaggccauuccagggg

SEQ ID NO: 318598 - RNA, 20 nt, Human
agcauuggcauggccaggaa

SEQ ID NO: 318599 - RNA, 21 nt, Human
agcugcccaggagagggcagc

SEQ ID NO: 318600 - RNA, 19 nt, Human
aggaggggaggcagcugcc

SEQ ID NO: 318601 - RNA, 18 nt, Human
agguggagggagggaugg

SEQ ID NO: 318602 - RNA, 22 nt, Human
caaagcgccgagagaaagcgua

SEQ ID NO: 318603 - RNA, 25 nt, Human
cacaccaggugccaggcaaagcgcc

SEQ ID NO: 318604 - RNA, 20 nt, Human
caccaggugccaggcaaagc

SEQ ID NO: 318605 - RNA, 18 nt, Human
cagaaggagcggaguucc

SEQ ID NO: 318606 - RNA, 19 nt, Human
cauuuuauugcagggaggu

SEQ ID NO: 318607 - RNA, 20 nt, Human
cauuuuauugcagggagguu

SEQ ID NO: 318608 - RNA, 23 nt, Human
ccacaccaggugccaggcaaagc

SEQ ID NO: 318609 - RNA, 22 nt, Human
ccagguacugcagacagagaug

SEQ ID NO: 318610 - RNA, 21 nt, Human
ccaggugccaggcaaagcgcc

SEQ ID NO: 318611 - RNA, 18 nt, Human
ccauucccagggcacagg

SEQ ID NO: 318612 - RNA, 23 nt, Human
cccaauggugagcauuggcaugg

SEQ ID NO: 318613 - RNA, 18 nt, Human
ccuuuguggugccauucc

SEQ ID NO: 318614 - RNA, 22 nt, Human
cuccgaacugagugaaggcaaa

SEQ ID NO: 318615 - RNA, 20 nt, Human
cugccccugggucucuuccu

SEQ ID NO: 318616 - RNA, 24 nt, Human
cugccgaggaagagucaaaugcuc

SEQ ID NO: 318617 - RNA, 20 nt, Human
cugcuucugcccugccccug

SEQ ID NO: 318618 - RNA, 19 nt, Human
gagcauuggcauggccagg

SEQ ID NO: 318619 - RNA, 27 nt, Human
gcaaagcgccgagagaaagcguagcuc

SEQ ID NO: 318620 - RNA, 18 nt, Human
gcaagcagaggaggggag

SEQ ID NO: 318621 - RNA, 21 nt, Human
gccaaauagguucccaaucug

SEQ ID NO: 318622 - RNA, 21 nt, Human
gccacaacuguaucacagaca

SEQ ID NO: 318623 - RNA, 18 nt, Human
gcccugaggcugaugccc

SEQ ID NO: 318624 - RNA, 26 nt, Human
gcguagcuccagaaggaggggaacgc

SEQ ID NO: 318625 - RNA, 23 nt, Human
ggaagagucaaaugcuccauugu

SEQ ID NO: 318626 - RNA, 20 nt, Human
ggagagggcagcucugaacu

SEQ ID NO: 318627 - RNA, 18 nt, Human
ggaguuccugcuucugcc

SEQ ID NO: 318628 - RNA, 21 nt, Human
ggcauuuguguaggugcugac

SEQ ID NO: 318629 - RNA, 23 nt, Human
ggguaugggaugugcccccgggg

SEQ ID NO: 318630 - RNA, 23 nt, Human
ggugguguagaaaaaucugaaac

SEQ ID NO: 318631 - RNA, 21 nt, Human
guagcucccuguuuucaugcu

SEQ ID NO: 318632 - RNA, 19 nt, Human
guucccaaucugcagguug

SEQ ID NO: 318633 - RNA, 24 nt, Human
guuccugcuucugcccugccccug

SEQ ID NO: 318634 - RNA, 21 nt, Human
uaaagaaugugguccucggau

SEQ ID NO: 318635 - RNA, 19 nt, Human
uaagccgguccaugagcag

SEQ ID NO: 318636 - RNA, 18 nt, Human
uaauaauaaggaagacug

SEQ ID NO: 318637 - RNA, 19 nt, Human
uccaugagcaggccauucc

SEQ ID NO: 318638 - RNA, 21 nt, Human
uccucggauguuaaaagaccc

SEQ ID NO: 318639 - RNA, 24 nt, Human
ucggauguuaaaagacccugucuu

SEQ ID NO: 318640 - RNA, 24 nt, Human
ugaugagaaacaggauucccccaa

SEQ ID NO: 318641 - RNA, 22 nt, Human
ugcauggggcaggugaugauuu

SEQ ID NO: 318642 - RNA, 30 nt, Human
ugccagguacugcagacagagaugaagauu

SEQ ID NO: 318643 - RNA, 21 nt, Human
ugcuccauuguacagagugau

SEQ ID NO: 318644 - RNA, 22 nt, Human
ugcuuccuucugguacuucugu

SEQ ID NO: 318645 - RNA, 19 nt, Human
uggccaaauagguucccaa

SEQ ID NO: 318646 - RNA, 21 nt, Human
uggccaggaagagcagcacgg

SEQ ID NO: 318647 - RNA, 20 nt, Human
uggugccauucccagggcac

SEQ ID NO: 318648 - RNA, 21 nt, Human
ugugguccucggauguuaaaa

SEQ ID NO: 318649 - RNA, 20 nt, Human
uuccuucugguacuucuguu

SEQ ID NO: 318650 - RNA, 22 nt, Human
uucuugcuuccuucugguacuu

SEQ ID NO: 318651 - RNA, 22 nt, Human
uuggaaaguauaaagaaugugg

SEQ ID NO: 318652 - RNA, 18 nt, Human
agcaggagagguuggggg

SEQ ID NO: 318653 - RNA, 18 nt, Human
caccacaucauuggcauc

SEQ ID NO: 318654 - RNA, 19 nt, Human
cgggagggagcugcuggca

SEQ ID NO: 318655 - RNA, 24 nt, Human
cgguaguucucccgccuggccucu

SEQ ID NO: 318656 - RNA, 23 nt, Human
cuccaccguccuucuuggggcug

SEQ ID NO: 318657 - RNA, 24 nt, Human
cucucucucucccauuuuuguuuu

SEQ ID NO: 318658 - RNA, 20 nt, Human
gccaagcaguccguacgccc

SEQ ID NO: 318659 - RNA, 19 nt, Human
ggacgggagggagcugcug

SEQ ID NO: 318660 - RNA, 21 nt, Human
gguaguucucccgccuggccu

SEQ ID NO: 318661 - RNA, 26 nt, Human
guuuaauaccucucucucucccauuu

SEQ ID NO: 318662 - RNA, 25 nt, Human
uagccaccacaucauuggcaucuua

SEQ ID NO: 318663 - RNA, 33 nt, Human
uaguauagccccuuccaagagucugagaccuuu

SEQ ID NO: 318664 - RNA, 19 nt, Human
uaguucucccgccuggccu

SEQ ID NO: 318665 - RNA, 23 nt, Human
uaugagcaggagagguuggggga

SEQ ID NO: 318666 - RNA, 21 nt, Human
uccguacgcccaccugcugcg

SEQ ID NO: 318667 - RNA, 23 nt, Human
uccguacgcccaccugcugcggu

SEQ ID NO: 318668 - RNA, 19 nt, Human
ugcgccaagcaguccguac

SEQ ID NO: 318669 - RNA, 19 nt, Human
ugcugcgguaguucucccg

SEQ ID NO: 318670 - RNA, 22 nt, Human
ugugugucuaguauagccccuu

SEQ ID NO: 318671 - RNA, 23 nt, Human
uguuuaauaccucucucucuccc

SEQ ID NO: 318672 - RNA, 18 nt, Human
uucuuggggcugucuuug

SEQ ID NO: 318673 - RNA, 18 nt, Human
uugggggacgggagggag

SEQ ID NO: 318674 - RNA, 23 nt, Human
uuuuuuuuuuuauccucuaaggg

SEQ ID NO: 318675 - RNA, 19 nt, Human
aaagagggauuaaucugcu

SEQ ID NO: 318676 - RNA, 23 nt, Human
aauggucuguaaacaauaacaac

SEQ ID NO: 318677 - RNA, 22 nt, Human
augcaaugggagggagaggagg

SEQ ID NO: 318678 - RNA, 24 nt, Human
augcaaugggagggagaggaggaa

SEQ ID NO: 318679 - RNA, 19 nt, Human
auuuauugauuucuuccuu

SEQ ID NO: 318680 - RNA, 19 nt, Human
uaagauuaucaaaucuguu

SEQ ID NO: 318681 - RNA, 21 nt, Human
uaccuuagauauauaauaaau

SEQ ID NO: 318682 - RNA, 20 nt, Human
ucuguaaacuucauguagac

SEQ ID NO: 318683 - RNA, 23 nt, Human
ugaauaagauuaucaaaucuguu

SEQ ID NO: 318684 - RNA, 23 nt, Human
uguaaaauuuuaauauuuccaug

SEQ ID NO: 318685 - RNA, 21 nt, Human
uuaaaagauauauucaauuug

SEQ ID NO: 318686 - RNA, 22 nt, Human
uuaauauuuccauguuuuccaa

SEQ ID NO: 318687 - RNA, 22 nt, Human
uucuuuuacaggugugagccau

SEQ ID NO: 318688 - RNA, 24 nt, Human
uuuauuuuuuuaauguuccaaagu

SEQ ID NO: 318689 - RNA, 19 nt, Human
uuuuuuuuuuuuaagccuc

SEQ ID NO: 318690 - RNA, 20 nt, Human
uuuuuuuuuuuuuuuuuaag

SEQ ID NO: 318691 - RNA, 23 nt, Human
aacacuguuaucuucuuauucac

SEQ ID NO: 318692 - RNA, 21 nt, Human
aggaggcucuggugucacucc

SEQ ID NO: 318693 - RNA, 23 nt, Human
aucuucuuauucacuuccuguca

SEQ ID NO: 318694 - RNA, 21 nt, Human
cuuccugucauugaauccugg

SEQ ID NO: 318695 - RNA, 19 nt, Human
ugaaacacuguuaucuucu

SEQ ID NO: 318696 - RNA, 23 nt, Human
aacacugucaucuucuuauucac

SEQ ID NO: 318697 - RNA, 23 nt, Human
acucccaacuuuucccccccccu

SEQ ID NO: 318698 - RNA, 21 nt, Human
agaaggcucuggugucacucc

SEQ ID NO: 318699 - RNA, 23 nt, Human
aggcucuggugucacucccaacu

SEQ ID NO: 318700 - RNA, 21 nt, Human
aucacauuauguuucaaggca

SEQ ID NO: 318701 - RNA, 24 nt, Human
caucuucuuauucacuuccuguca

SEQ ID NO: 318702 - RNA, 21 nt, Human
cuuccugucauugaauccuag

SEQ ID NO: 318703 - RNA, 19 nt, Human
cuugcagaaggcucuggug

SEQ ID NO: 318704 - RNA, 25 nt, Human
gucaucuucuuauucacuuccuguc

SEQ ID NO: 318705 - RNA, 21 nt, Human
ucccaacuuuucccccccccu

SEQ ID NO: 318706 - RNA, 19 nt, Human
ugaaacacugucaucuucu

SEQ ID NO: 318707 - RNA, 20 nt, Human
cagaagauauccacaauggu

SEQ ID NO: 318708 - RNA, 20 nt, Human
gaaggcagaagauauccaca

SEQ ID NO: 318709 - RNA, 21 nt, Human
uugaaggcagaagauauccac

SEQ ID NO: 318710 - RNA, 20 nt, Human
aaaaaaggccaggcacagug

SEQ ID NO: 318711 - RNA, 25 nt, Human
aaacaggaaacaggcuauugaggaa

SEQ ID NO: 318712 - RNA, 24 nt, Human
aaacucggaaaacacaaacggugg

SEQ ID NO: 318713 - RNA, 24 nt, Human
aaaggccaggcacaguggcucaca

SEQ ID NO: 318714 - RNA, 20 nt, Human
aacuacuugggaggcugagg

SEQ ID NO: 318715 - RNA, 21 nt, Human
aacuccuccucuuuccuucug

SEQ ID NO: 318716 - RNA, 18 nt, Human
acaaaaaaaaauugaaaa

SEQ ID NO: 318717 - RNA, 24 nt, Human
acgcugaggugugaggaucgcuug

SEQ ID NO: 318718 - RNA, 21 nt, Human
aggaucacuugagcugggaag

SEQ ID NO: 318719 - RNA, 24 nt, Human
aggcacaguggcucacaacuguaa

SEQ ID NO: 318720 - RNA, 24 nt, Human
aggcugagguaggaggaucacuug

SEQ ID NO: 318721 - RNA, 18 nt, Human
agguaggaggaucacuug

SEQ ID NO: 318722 - RNA, 23 nt, Human
agguaggaggaucacuugagcug

SEQ ID NO: 318723 - RNA, 24 nt, Human
aguggcucacaacuguaaucccag

SEQ ID NO: 318724 - RNA, 23 nt, Human
caaaggcaaaaucuuaaaaacag

SEQ ID NO: 318725 - RNA, 23 nt, Human
caacuguaaucccagcacucugg

SEQ ID NO: 318726 - RNA, 24 nt, Human
caacuguaaucccagcacucuggg

SEQ ID NO: 318727 - RNA, 26 nt, Human
caagaauacaaacucggaaaacacaa

SEQ ID NO: 318728 - RNA, 24 nt, Human
cacaacuguaaucccagcacucug

SEQ ID NO: 318729 - RNA, 25 nt, Human
cacaccuguguguccuaacuacuug

SEQ ID NO: 318730 - RNA, 24 nt, Human
cacugcacuaagccuuggugacag

SEQ ID NO: 318731 - RNA, 21 nt, Human
caggaaacaggcuauugagga

SEQ ID NO: 318732 - RNA, 21 nt, Human
cccaggagucugagaucugcc

SEQ ID NO: 318733 - RNA, 22 nt, Human
ccccccaccucuacaaaaaaaa

SEQ ID NO: 318734 - RNA, 20 nt, Human
cuccuaaaauaggacuuaaa

SEQ ID NO: 318735 - RNA, 18 nt, Human
cuccuccucuuuccuucu

SEQ ID NO: 318736 - RNA, 18 nt, Human
cugggaaggucaaggcug

SEQ ID NO: 318737 - RNA, 19 nt, Human
gaaaacacaaacgguggca

SEQ ID NO: 318738 - RNA, 23 nt, Human
gaugcagugaagagagaaguuaa

SEQ ID NO: 318739 - RNA, 18 nt, Human
gcagugaagagagaaguu

SEQ ID NO: 318740 - RNA, 23 nt, Human
ggaaaacacaaacgguggcagcc

SEQ ID NO: 318741 - RNA, 24 nt, Human
ggagaccccccaccucuacaaaaa

SEQ ID NO: 318742 - RNA, 19 nt, Human
uaaaaaaaaaaaaaggcca

SEQ ID NO: 318743 - RNA, 18 nt, Human
uaaaugacaucacucaag

SEQ ID NO: 318744 - RNA, 24 nt, Human
uaacaaaaaugguccagaaaagga

SEQ ID NO: 318745 - RNA, 19 nt, Human
uacaaagugauuaagaguu

SEQ ID NO: 318746 - RNA, 24 nt, Human
uacaaagugauuaagaguuaaaac

SEQ ID NO: 318747 - RNA, 18 nt, Human
uagaaacuccuccucuuu

SEQ ID NO: 318748 - RNA, 27 nt, Human
uauuaacaaaaaugguccagaaaagga

SEQ ID NO: 318749 - RNA, 18 nt, Human
ucaaagcaaaauauagug

SEQ ID NO: 318750 - RNA, 24 nt, Human
ucaaagcaaaauauagugaaaguc

SEQ ID NO: 318751 - RNA, 19 nt, Human
ucacugcacuaagccuugg

SEQ ID NO: 318752 - RNA, 23 nt, Human
ucccggguggcgggagaguucau

SEQ ID NO: 318753 - RNA, 21 nt, Human
uccuccucuuuccuucuguca

SEQ ID NO: 318754 - RNA, 21 nt, Human
ucgcuugagcccaggagucug

SEQ ID NO: 318755 - RNA, 23 nt, Human
ugagcccaggagucugagaucug

SEQ ID NO: 318756 - RNA, 24 nt, Human
ugagcugggaaggucaaggcugca

SEQ ID NO: 318757 - RNA, 20 nt, Human
ugagguaggaggaucacuug

SEQ ID NO: 318758 - RNA, 21 nt, Human
ugagguaggaggaucacuuga

SEQ ID NO: 318759 - RNA, 23 nt, Human
ugagguaggaggaucacuugagc

SEQ ID NO: 318760 - RNA, 24 nt, Human
ugaggugugaggaucgcuugagcc

SEQ ID NO: 318761 - RNA, 18 nt, Human
ugccugggcaacauaggg

SEQ ID NO: 318762 - RNA, 22 nt, Human
ugccugggcaacauagggagac

SEQ ID NO: 318763 - RNA, 22 nt, Human
uggcucacaacuguaaucccag

SEQ ID NO: 318764 - RNA, 24 nt, Human
uggcucacaacuguaaucccagca

SEQ ID NO: 318765 - RNA, 20 nt, Human
ugggaaggucaaggcugcaa

SEQ ID NO: 318766 - RNA, 19 nt, Human
ugggaggcugagguaggag

SEQ ID NO: 318767 - RNA, 19 nt, Human
ugggaggcugagguaggag

SEQ ID NO: 318768 - RNA, 24 nt, Human
ugggaggcugagguaggaggauca

SEQ ID NO: 318769 - RNA, 22 nt, Human
ugggaugcagugaagagagaag

SEQ ID NO: 318770 - RNA, 25 nt, Human
uugggaggcugagguaggaggauca

SEQ ID NO: 318771 - RNA, 18 nt, Human
uaacuugauuacaaaugg

SEQ ID NO: 318772 - RNA, 26 nt, Human
uaggcuuuuaacuauaaaucauguuc

SEQ ID NO: 318773 - RNA, 20 nt, Human
uggcugugacuuauuaugca

SEQ ID NO: 318774 - RNA, 18 nt, Human
aauagcauugugugcccc

SEQ ID NO: 318775 - RNA, 25 nt, Human
accacagucuucuguugaauacacu

SEQ ID NO: 318776 - RNA, 23 nt, Human
agaauauaacugauuuucauagu

SEQ ID NO: 318777 - RNA, 18 nt, Human
agcaaagcaaggaggugu

SEQ ID NO: 318778 - RNA, 23 nt, Human
auauuuuguuuucaguaauuuca

SEQ ID NO: 318779 - RNA, 25 nt, Human
caaagcaaggagguguugccaaacc

SEQ ID NO: 318780 - RNA, 22 nt, Human
cacccuuacauugagaugguuc

SEQ ID NO: 318781 - RNA, 18 nt, Human
caccgccugccgcuccgc

SEQ ID NO: 318782 - RNA, 19 nt, Human
cagaaagaaacuagagaca

SEQ ID NO: 318783 - RNA, 19 nt, Human
cagauauuuuguuuucagu

SEQ ID NO: 318784 - RNA, 23 nt, Human
ccucgcuccaccgccugccgcuc

SEQ ID NO: 318785 - RNA, 21 nt, Human
cuagccgccgccgccgccgcu

SEQ ID NO: 318786 - RNA, 19 nt, Human
cucgcuccaccgccugccg

SEQ ID NO: 318787 - RNA, 29 nt, Human
gccgcuccgcuagccgccgccgccgccgg

SEQ ID NO: 318788 - RNA, 18 nt, Human
gugccccuggaaauaauu

SEQ ID NO: 318789 - RNA, 18 nt, Human
uaaacacagcauaaagcc

SEQ ID NO: 318790 - RNA, 25 nt, Human
uacaccaaacagcaaagcaaggagg

SEQ ID NO: 318791 - RNA, 19 nt, Human
uagaaaaacuuggcuucug

SEQ ID NO: 318792 - RNA, 25 nt, Human
uagugcaauaacagaaagaaacuag

SEQ ID NO: 318793 - RNA, 22 nt, Human
uauugcaguggauauuauccaa

SEQ ID NO: 318794 - RNA, 18 nt, Human
ucgcuccaccgccugccg

SEQ ID NO: 318795 - RNA, 20 nt, Human
ucugaaaucuuggaggcagg

SEQ ID NO: 318796 - RNA, 23 nt, Human
ugaguuaguuacagcuguuuuua

SEQ ID NO: 318797 - RNA, 24 nt, Human
ugcaauaacagaaagaaacuagag

SEQ ID NO: 318798 - RNA, 26 nt, Human
ugcaauaacagaaagaaacuagagac

SEQ ID NO: 318799 - RNA, 18 nt, Human
uguuacaugaccacaguc

SEQ ID NO: 318800 - RNA, 19 nt, Human
uguuacaugaccacagucu

SEQ ID NO: 318801 - RNA, 25 nt, Human
uuacuacaccaaacagcaaagcaag

SEQ ID NO: 318802 - RNA, 23 nt, Human
uuggcuucugaaaucuuggaggc

SEQ ID NO: 318803 - RNA, 21 nt, Human
aaaaacacacagaugacugga

SEQ ID NO: 318804 - RNA, 23 nt, Human
aaacacacagaugacuggaaaug

SEQ ID NO: 318805 - RNA, 21 nt, Human
aaaugagcaauguacagucca

SEQ ID NO: 318806 - RNA, 19 nt, Human
aacacugucaccuauuaug

SEQ ID NO: 318807 - RNA, 21 nt, Human
acaaaaaaggguacccccaaa

SEQ ID NO: 318808 - RNA, 22 nt, Human
acaaaaaaggguacccccaaac

SEQ ID NO: 318809 - RNA, 19 nt, Human
acaauuguaaaaccucauc

SEQ ID NO: 318810 - RNA, 28 nt, Human
acacugucaccuauuaugacuggaauaa

SEQ ID NO: 318811 - RNA, 21 nt, Human
acaucuuccugacccagacuc

SEQ ID NO: 318812 - RNA, 21 nt, Human
acccugagcaagggacucccg

SEQ ID NO: 318813 - RNA, 26 nt, Human
acuggaauaaaaagcuggacaaccug

SEQ ID NO: 318814 - RNA, 19 nt, Human
agacucagaaggcugcugu

SEQ ID NO: 318815 - RNA, 18 nt, Human
agccucaugcaccgcggg

SEQ ID NO: 318816 - RNA, 19 nt, Human
aggcaagaccaacacugua

SEQ ID NO: 318817 - RNA, 19 nt, Human
aggggcagagguccugagc

SEQ ID NO: 318818 - RNA, 21 nt, Human
augaguccccgaggcucaaag

SEQ ID NO: 318819 - RNA, 20 nt, Human
caaguucuacauuccuuuca

SEQ ID NO: 318820 - RNA, 21 nt, Human
cacaaaaaaggguacccccaa

SEQ ID NO: 318821 - RNA, 23 nt, Human
cacaaaaaaggguacccccaaac

SEQ ID NO: 318822 - RNA, 24 nt, Human
cacagaccgaggcgcugcaggagc

SEQ ID NO: 318823 - RNA, 19 nt, Human
caccccucccucuuuucuu

SEQ ID NO: 318824 - RNA, 19 nt, Human
caccucccuggagccgaga

SEQ ID NO: 318825 - RNA, 21 nt, Human
caccucugcuuacaaaaagag

SEQ ID NO: 318826 - RNA, 27 nt, Human
cauuuuuggcuuaagaaaaaucgagaa

SEQ ID NO: 318827 - RNA, 23 nt, Human
ccaaaggacaucuuccugaccca

SEQ ID NO: 318828 - RNA, 19 nt, Human
ccccaaacucagguauacc

SEQ ID NO: 318829 - RNA, 21 nt, Human
cccggaaccgcgggucccaag

SEQ ID NO: 318830 - RNA, 24 nt, Human
ccucccucucccaccaggagcaaa

SEQ ID NO: 318831 - RNA, 18 nt, Human
ccucgggccgggagccgg

SEQ ID NO: 318832 - RNA, 19 nt, Human
ccugcccaggcaagccgcg

SEQ ID NO: 318833 - RNA, 18 nt, Human
cgacucccgggaaacuga

SEQ ID NO: 318834 - RNA, 23 nt, Human
cggaaggagucggagcaccagga

SEQ ID NO: 318835 - RNA, 18 nt, Human
cucacagcaaccugggcu

SEQ ID NO: 318836 - RNA, 22 nt, Human
cucagguauaccaaguaaauaa

SEQ ID NO: 318837 - RNA, 23 nt, Human
cucagucccuguuucccagaauu

SEQ ID NO: 318838 - RNA, 22 nt, Human
cucccggaaccgcgggucccaa

SEQ ID NO: 318839 - RNA, 21 nt, Human
cuuaagaaaaaucgagaaugu

SEQ ID NO: 318840 - RNA, 21 nt, Human
gaagauaaaccgacacuuucc

SEQ ID NO: 318841 - RNA, 18 nt, Human
gacaccucccuggagccg

SEQ ID NO: 318842 - RNA, 20 nt, Human
gacaggcaagaccaacacug

SEQ ID NO: 318843 - RNA, 22 nt, Human
gacuguaagaaacaauuguaaa

SEQ ID NO: 318844 - RNA, 23 nt, Human
gagcucacuccucccucucccac

SEQ ID NO: 318845 - RNA, 26 nt, Human
gagcuuccgcugacucacagcaaccu

SEQ ID NO: 318846 - RNA, 19 nt, Human
gaguccccgaggcucaaag

SEQ ID NO: 318847 - RNA, 22 nt, Human
gaucauccagcugaauggagaa

SEQ ID NO: 318848 - RNA, 23 nt, Human
ggcagagguccugagcaaggugc

SEQ ID NO: 318849 - RNA, 22 nt, Human
ggccucaacagggacaaguggc

SEQ ID NO: 318850 - RNA, 21 nt, Human
ggucccaaggagccugcggaa

SEQ ID NO: 318851 - RNA, 20 nt, Human
gucugcuuugguccaaagga

SEQ ID NO: 318852 - RNA, 23 nt, Human
uacccccaaacucagguauacca

SEQ ID NO: 318853 - RNA, 24 nt, Human
ucaugcaccgcggggccagggcug

SEQ ID NO: 318854 - RNA, 25 nt, Human
uccauagccaggccucaacagggac

SEQ ID NO: 318855 - RNA, 21 nt, Human
ucccaccaggagcaaagggca

SEQ ID NO: 318856 - RNA, 18 nt, Human
ucccuggagccgagagac

SEQ ID NO: 318857 - RNA, 25 nt, Human
uccucugccaccccucccucuuuuc

SEQ ID NO: 318858 - RNA, 22 nt, Human
uccugacccagacucagaaggc

SEQ ID NO: 318859 - RNA, 20 nt, Human
uccugggccaccauccgccc

SEQ ID NO: 318860 - RNA, 21 nt, Human
uccugggccaccauccgcccc

SEQ ID NO: 318861 - RNA, 26 nt, Human
ucggagcaccaggacaccacgccccc

SEQ ID NO: 318862 - RNA, 22 nt, Human
ugaaaagucacaaaaaagggua

SEQ ID NO: 318863 - RNA, 19 nt, Human
ugacaccucccuggagccg

SEQ ID NO: 318864 - RNA, 19 nt, Human
ugagcagaguucaugugac

SEQ ID NO: 318865 - RNA, 18 nt, Human
ugcagagccagccaccuc

SEQ ID NO: 318866 - RNA, 18 nt, Human
ugcaggaaagggacccug

SEQ ID NO: 318867 - RNA, 19 nt, Human
ugcaggaaagggacccuga

SEQ ID NO: 318868 - RNA, 18 nt, Human
ugcccaggcaagccgcgg

SEQ ID NO: 318869 - RNA, 23 nt, Human
ugcccaggcaagccgcggcaaga

SEQ ID NO: 318870 - RNA, 21 nt, Human
ugcggggacacagggaaggcg

SEQ ID NO: 318871 - RNA, 18 nt, Human
ugcuaggaggacugucac

SEQ ID NO: 318872 - RNA, 22 nt, Human
uggagccgagagacaaucuguu

SEQ ID NO: 318873 - RNA, 21 nt, Human
ugggggucugcggggacacag

SEQ ID NO: 318874 - RNA, 18 nt, Human
ugguggugugcugucucc

SEQ ID NO: 318875 - RNA, 22 nt, Human
uguaaaaccucaucuagaaauc

SEQ ID NO: 318876 - RNA, 24 nt, Human
uuauugcugagcagaguucaugug

SEQ ID NO: 318877 - RNA, 24 nt, Human
uugaaacuuguccaucaaggugac

SEQ ID NO: 318878 - RNA, 23 nt, Human
uugccgagcucucgcaaucgcgc

SEQ ID NO: 318879 - RNA, 22 nt, Human
uuucacgguuaacacugucacc

SEQ ID NO: 318880 - RNA, 21 nt, Human
uuugaaggacaggcaagacca

SEQ ID NO: 318881 - RNA, 24 nt, Human
uuugaaggacaggcaagaccaaca

SEQ ID NO: 318882 - RNA, 24 nt, Human
uuuuuuuuuuuuuuuuuuacaaag

SEQ ID NO: 318883 - RNA, 22 nt, Human
aaaaagaaaaaagaaaacccau

SEQ ID NO: 318884 - RNA, 22 nt, Human
aaaaagaaaacccaugggggca

SEQ ID NO: 318885 - RNA, 18 nt, Human
aaagcacaaaugagaaag

SEQ ID NO: 318886 - RNA, 20 nt, Human
aagaggaagggaaaaguggg

SEQ ID NO: 318887 - RNA, 22 nt, Human
aagcaacccacugaacauguca

SEQ ID NO: 318888 - RNA, 20 nt, Human
aagcccaagggugaagacag

SEQ ID NO: 318889 - RNA, 21 nt, Human
aagcgugagccccucuuucca

SEQ ID NO: 318890 - RNA, 19 nt, Human
accaaaaaaaagaaaaaag

SEQ ID NO: 318891 - RNA, 19 nt, Human
accccaggccugagaacuc

SEQ ID NO: 318892 - RNA, 19 nt, Human
agaaaaaagaaaaaagaaa

SEQ ID NO: 318893 - RNA, 21 nt, Human
agaaaaaagcacaaaugagaa

SEQ ID NO: 318894 - RNA, 21 nt, Human
agaaacucguuuaaaacaggc

SEQ ID NO: 318895 - RNA, 18 nt, Human
agacaggucuguugggga

SEQ ID NO: 318896 - RNA, 18 nt, Human
agagaaaaaagcacaaau

SEQ ID NO: 318897 - RNA, 23 nt, Human
agagaaaaaagcacaaaugagaa

SEQ ID NO: 318898 - RNA, 21 nt, Human
agaggaagggaaaagugggag

SEQ ID NO: 318899 - RNA, 21 nt, Human
agcaaguggggccugugguug

SEQ ID NO: 318900 - RNA, 23 nt, Human
agcacacuguucaagaggaaguc

SEQ ID NO: 318901 - RNA, 18 nt, Human
agcgccucccuuuccaaa

SEQ ID NO: 318902 - RNA, 24 nt, Human
aggaagggaaaagugggagagggg

SEQ ID NO: 318903 - RNA, 22 nt, Human
aggaauggggggacaugggagg

SEQ ID NO: 318904 - RNA, 20 nt, Human
agggagggaggcacuggugg

SEQ ID NO: 318905 - RNA, 21 nt, Human
aggggcuggggggcugugggg

SEQ ID NO: 318906 - RNA, 22 nt, Human
aggggcuggggggcugugggga

SEQ ID NO: 318907 - RNA, 20 nt, Human
caacccacugaacaugucac

SEQ ID NO: 318908 - RNA, 22 nt, Human
caacccucccacccccccgacc

SEQ ID NO: 318909 - RNA, 22 nt, Human
caagaccuggucugacuggagu

SEQ ID NO: 318910 - RNA, 19 nt, Human
caagaggaagucucguccu

SEQ ID NO: 318911 - RNA, 19 nt, Human
caagcaacccacugaacau

SEQ ID NO: 318912 - RNA, 28 nt, Human
caauccaacccucccacccccccgacca

SEQ ID NO: 318913 - RNA, 23 nt, Human
cacccggggccccaccccaggcc

SEQ ID NO: 318914 - RNA, 21 nt, Human
cacuaaaaaucucuccuuccc

SEQ ID NO: 318915 - RNA, 22 nt, Human
cacuaaaaaucucuccuuccca

SEQ ID NO: 318916 - RNA, 25 nt, Human
cacuaaaaaucucuccuucccaggc

SEQ ID NO: 318917 - RNA, 22 nt, Human
cagccccuccccagcagcucua

SEQ ID NO: 318918 - RNA, 20 nt, Human
cagcggcuccccacuuuucu

SEQ ID NO: 318919 - RNA, 21 nt, Human
cagcugguguuucugucccuc

SEQ ID NO: 318920 - RNA, 20 nt, Human
caggagggugaaggggauga

SEQ ID NO: 318921 - RNA, 24 nt, Human
cagguugaaucgcccccgcaccca

SEQ ID NO: 318922 - RNA, 18 nt, Human
ccaacccucccacccccc

SEQ ID NO: 318923 - RNA, 23 nt, Human
cccacccccccgaccaaaaaaaa

SEQ ID NO: 318924 - RNA, 22 nt, Human
cccaggcaggauuacuccgaaa

SEQ ID NO: 318925 - RNA, 18 nt, Human
ccccaccccaggccugag

SEQ ID NO: 318926 - RNA, 26 nt, Human
ccccaccccaggccugagaacuccuc

SEQ ID NO: 318927 - RNA, 26 nt, Human
ccccacucagcugagggaaggcugga

SEQ ID NO: 318928 - RNA, 18 nt, Human
cccccgcacccacccggg

SEQ ID NO: 318929 - RNA, 21 nt, Human
ccccggggaggggcccagggg

SEQ ID NO: 318930 - RNA, 19 nt, Human
ccccucugucuuuuugggg

SEQ ID NO: 318931 - RNA, 18 nt, Human
ccccucuuuccauacccu

SEQ ID NO: 318932 - RNA, 23 nt, Human
ccccucuuuccauacccuguccc

SEQ ID NO: 318933 - RNA, 23 nt, Human
cccgaccaaaaaaaagaaaaaag

SEQ ID NO: 318934 - RNA, 22 nt, Human
cccgcacccacccggggcccca

SEQ ID NO: 318935 - RNA, 19 nt, Human
cccggggccccaccccagg

SEQ ID NO: 318936 - RNA, 18 nt, Human
cccuccccagcagcucua

SEQ ID NO: 318937 - RNA, 26 nt, Human
ccgaccaaaaaaaagaaaaaagaaaa

SEQ ID NO: 318938 - RNA, 18 nt, Human
ccucccacccccccgacc

SEQ ID NO: 318939 - RNA, 18 nt, Human
ccucccacccccccgacc

SEQ ID NO: 318940 - RNA, 19 nt, Human
ccuccccacucagcugagg

SEQ ID NO: 318941 - RNA, 21 nt, Human
ccuuagcaaguggggccugug

SEQ ID NO: 318942 - RNA, 20 nt, Human
ccuugaaccccgggccgugg

SEQ ID NO: 318943 - RNA, 18 nt, Human
cgagagaaaaaagcacaa

SEQ ID NO: 318944 - RNA, 19 nt, Human
cuccccagcagcucuagcc

SEQ ID NO: 318945 - RNA, 18 nt, Human
cuccccagcggcucccca

SEQ ID NO: 318946 - RNA, 19 nt, Human
cuccccagcggcuccccac

SEQ ID NO: 318947 - RNA, 22 nt, Human
cucuagccuugaaccccgggcc

SEQ ID NO: 318948 - RNA, 24 nt, Human
cucuucuguucccuuuugcaggga

SEQ ID NO: 318949 - RNA, 21 nt, Human
cuggaggguggggugggggug

SEQ ID NO: 318950 - RNA, 21 nt, Human
cuggcuuucaaagcccaaggg

SEQ ID NO: 318951 - RNA, 19 nt, Human
cuggucugacuggaguuga

SEQ ID NO: 318952 - RNA, 28 nt, Human
cuuggccucuucuguucccuuuugcagg

SEQ ID NO: 318953 - RNA, 18 nt, Human
gaaggagggagggaggca

SEQ ID NO: 318954 - RNA, 26 nt, Human
gaggaaagacuugggcuuggggcucc

SEQ ID NO: 318955 - RNA, 23 nt, Human
gaguagaggaaggagggagggag

SEQ ID NO: 318956 - RNA, 20 nt, Human
gcagaagugggcugggaggg

SEQ ID NO: 318957 - RNA, 19 nt, Human
gcggaagcuggugggugag

SEQ ID NO: 318958 - RNA, 23 nt, Human
ggaauggggggacaugggagggg

SEQ ID NO: 318959 - RNA, 21 nt, Human
ggagaaguuaugagaggggga

SEQ ID NO: 318960 - RNA, 25 nt, Human
ggagagggggcaggagggugaaggg

SEQ ID NO: 318961 - RNA, 23 nt, Human
ggaguagaggaaggagggaggga

SEQ ID NO: 318962 - RNA, 18 nt, Human
ggaugagggggagcagcu

SEQ ID NO: 318963 - RNA, 20 nt, Human
ggaugagggggagcagcugg

SEQ ID NO: 318964 - RNA, 19 nt, Human
ggcugaggggcuggggggc

SEQ ID NO: 318965 - RNA, 24 nt, Human
ggcugaggggcuggggggcugugg

SEQ ID NO: 318966 - RNA, 26 nt, Human
ggcugggagggcugaggggcuggggg

SEQ ID NO: 318967 - RNA, 24 nt, Human
gggaaaagugggagagggggccgg

SEQ ID NO: 318968 - RNA, 21 nt, Human
gggaugggggugugggugggg

SEQ ID NO: 318969 - RNA, 24 nt, Human
gggcccaggggagauuagcagcgg

SEQ ID NO: 318970 - RNA, 20 nt, Human
gggcugaggggcuggggggc

SEQ ID NO: 318971 - RNA, 19 nt, Human
gggcugggagggcugaggg

SEQ ID NO: 318972 - RNA, 19 nt, Human
gggcuguggggaaagagga

SEQ ID NO: 318973 - RNA, 18 nt, Human
ggggcuggggggcugugg

SEQ ID NO: 318974 - RNA, 22 nt, Human
ggggcuguggggaaagaggaag

SEQ ID NO: 318975 - RNA, 22 nt, Human
gggggaaacgcugcugggagga

SEQ ID NO: 318976 - RNA, 20 nt, Human
ggggugggggugaaauuaga

SEQ ID NO: 318977 - RNA, 18 nt, Human
gggugggaugggggugug

SEQ ID NO: 318978 - RNA, 20 nt, Human
ggugaaggggaugaggggga

SEQ ID NO: 318979 - RNA, 19 nt, Human
ggugggauggggguguggg

SEQ ID NO: 318980 - RNA, 18 nt, Human
gucccucugauuaucugg

SEQ ID NO: 318981 - RNA, 30 nt, Human
gugggcugggagggcugaggggcugggggg

SEQ ID NO: 318982 - RNA, 19 nt, Human
gugguugggugggaugggg

SEQ ID NO: 318983 - RNA, 18 nt, Human
uaagcuggaggaggggcg

SEQ ID NO: 318984 - RNA, 23 nt, Human
uauugguaauaguuuucaaauau

SEQ ID NO: 318985 - RNA, 19 nt, Human
ucaauccaacccucccacc

SEQ ID NO: 318986 - RNA, 24 nt, Human
ucacuaaaaaucucuccuucccag

SEQ ID NO: 318987 - RNA, 18 nt, Human
ucccacccccccgaccaa

SEQ ID NO: 318988 - RNA, 22 nt, Human
ucccaggcaggauuacuccgaa

SEQ ID NO: 318989 - RNA, 21 nt, Human
uccccggggaggggcccaggg

SEQ ID NO: 318990 - RNA, 19 nt, Human
ucccucugauuaucugggc

SEQ ID NO: 318991 - RNA, 21 nt, Human
ucccucugauuaucugggcuu

SEQ ID NO: 318992 - RNA, 30 nt, Human
ucccuggauacaccagcaagaccuggucuu

SEQ ID NO: 318993 - RNA, 19 nt, Human
uccugggauggggagaagu

SEQ ID NO: 318994 - RNA, 23 nt, Human
ucugggcuuccugcucccccuaa

SEQ ID NO: 318995 - RNA, 21 nt, Human
ucuggggcccucuggcuguuc

SEQ ID NO: 318996 - RNA, 20 nt, Human
ugaaauuagaugcaaggaac

SEQ ID NO: 318997 - RNA, 19 nt, Human
ugaaucgcccccgcaccca

SEQ ID NO: 318998 - RNA, 21 nt, Human
ugagagggggaaauacgggga

SEQ ID NO: 318999 - RNA, 24 nt, Human
ugaggaauggggggacaugggagg

SEQ ID NO: 319000 - RNA, 18 nt, Human
ugaguaaaacaggcagcc

SEQ ID NO: 319001 - RNA, 23 nt, Human
ugauggacagcugacagcuaagc

SEQ ID NO: 319002 - RNA, 25 nt, Human
ugcaaggaacucuggggcccucugg

SEQ ID NO: 319003 - RNA, 19 nt, Human
uggaggaggggcgcccagg

SEQ ID NO: 319004 - RNA, 18 nt, Human
uggagggugggguggggg

SEQ ID NO: 319005 - RNA, 21 nt, Human
uggauuugaggaaugggggga

SEQ ID NO: 319006 - RNA, 18 nt, Human
uggcagagaggauucccc

SEQ ID NO: 319007 - RNA, 23 nt, Human
uggcagagaggauuccccgggga

SEQ ID NO: 319008 - RNA, 19 nt, Human
uggcuccccagcggcuccc

SEQ ID NO: 319009 - RNA, 22 nt, Human
uggcuguucaauccaacccucc

SEQ ID NO: 319010 - RNA, 18 nt, Human
ugggagggcugaggggcu

SEQ ID NO: 319011 - RNA, 24 nt, Human
ugggaggggugggaguagaggaag

SEQ ID NO: 319012 - RNA, 21 nt, Human
ugggauggggagaaguuauga

SEQ ID NO: 319013 - RNA, 19 nt, Human
ugggaugggggugugggug

SEQ ID NO: 319014 - RNA, 26 nt, Human
ugggaugggggugugggugggggcug

SEQ ID NO: 319015 - RNA, 21 nt, Human
ugggcugggagggcugagggg

SEQ ID NO: 319016 - RNA, 21 nt, Human
ugggcugggagggcugagggg

SEQ ID NO: 319017 - RNA, 22 nt, Human
ugggcugggagggcugaggggc

SEQ ID NO: 319018 - RNA, 22 nt, Human
uggggggacuuggccucuucug

SEQ ID NO: 319019 - RNA, 18 nt, Human
uggggguguggguggggg

SEQ ID NO: 319020 - RNA, 19 nt, Human
ugggguggcuccccagcgg

SEQ ID NO: 319021 - RNA, 21 nt, Human
ugggguggcuccccagcggcu

SEQ ID NO: 319022 - RNA, 21 nt, Human
uggggugggggugaaauuaga

SEQ ID NO: 319023 - RNA, 23 nt, Human
uugggcuuggggcucccccucug

SEQ ID NO: 319024 - RNA, 23 nt, Human
uugucuggcuuucaaagcccaag

SEQ ID NO: 319025 - RNA, 18 nt, Human
uuucugucccucugauua

SEQ ID NO: 319026 - RNA, 21 nt, Human
uuugcagggaugcccucccca

SEQ ID NO: 319027 - RNA, 23 nt, Human
aaaaaaauagcaaaacaaguggg

SEQ ID NO: 319028 - RNA, 21 nt, Human
aaacaaaacaaauguaaaccc

SEQ ID NO: 319029 - RNA, 18 nt, Human
aaacaaauguaaacccuc

SEQ ID NO: 319030 - RNA, 18 nt, Human
aaaugugcaaaagugcuu

SEQ ID NO: 319031 - RNA, 20 nt, Human
aacuucuuuuuaacgguuac

SEQ ID NO: 319032 - RNA, 23 nt, Human
aagaguuuuggcaaaaccaaguc

SEQ ID NO: 319033 - RNA, 19 nt, Human
aagcaaauagaaugauuau

SEQ ID NO: 319034 - RNA, 18 nt, Human
aaguggguuaagccaugg

SEQ ID NO: 319035 - RNA, 21 nt, Human
aauaacuacugaaagcaacac

SEQ ID NO: 319036 - RNA, 21 nt, Human
aaucagauggggaaaauuaaa

SEQ ID NO: 319037 - RNA, 25 nt, Human
acaaaacaaaacaaauguaaacccu

SEQ ID NO: 319038 - RNA, 19 nt, Human
acagguuuuuuuuaugucu

SEQ ID NO: 319039 - RNA, 24 nt, Human
accuaccugcaccgauaauaaagc

SEQ ID NO: 319040 - RNA, 24 nt, Human
accucuauauuguuuccaaaaauc

SEQ ID NO: 319041 - RNA, 25 nt, Human
agccauaacacugcccaucugaaac

SEQ ID NO: 319042 - RNA, 24 nt, Human
aggagaaagacaacccaaagagaa

SEQ ID NO: 319043 - RNA, 19 nt, Human
aggggucagggaagggaag

SEQ ID NO: 319044 - RNA, 18 nt, Human
auaagacagucuaucuuc

SEQ ID NO: 319045 - RNA, 22 nt, Human
augaugaggacuauuagagaaa

SEQ ID NO: 319046 - RNA, 20 nt, Human
auggauucucaacaaacacu

SEQ ID NO: 319047 - RNA, 23 nt, Human
caaaacaaaacaaauguaaaccc

SEQ ID NO: 319048 - RNA, 26 nt, Human
caaaacaaaacaaauguaaacccuca

SEQ ID NO: 319049 - RNA, 21 nt, Human
caaagguuucaccagggugug

SEQ ID NO: 319050 - RNA, 22 nt, Human
caaagguuucaccagggugugg

SEQ ID NO: 319051 - RNA, 20 nt, Human
cacacuacacaggcugguca

SEQ ID NO: 319052 - RNA, 20 nt, Human
cagccuuccaaauuucuggg

SEQ ID NO: 319053 - RNA, 24 nt, Human
ccaaaaaucaagccauuuuugacu

SEQ ID NO: 319054 - RNA, 20 nt, Human
ccaacaaaauaaaauggagc

SEQ ID NO: 319055 - RNA, 19 nt, Human
ccaagugagagaaucuggg

SEQ ID NO: 319056 - RNA, 18 nt, Human
ccagaauagugaauucca

SEQ ID NO: 319057 - RNA, 20 nt, Human
cccuucaaauaucacguagc

SEQ ID NO: 319058 - RNA, 23 nt, Human
ccuacagaaaugcugguaccaag

SEQ ID NO: 319059 - RNA, 20 nt, Human
cucacaaauauaguacacca

SEQ ID NO: 319060 - RNA, 23 nt, Human
cuugaaauuuccaccugacagca

SEQ ID NO: 319061 - RNA, 20 nt, Human
gacacguuugucacacuaca

SEQ ID NO: 319062 - RNA, 19 nt, Human
gaggaggauauaaaaggag

SEQ ID NO: 319063 - RNA, 22 nt, Human
gauauaaaaggagggaaaggga

SEQ ID NO: 319064 - RNA, 22 nt, Human
gcaacacuuauccuucccuuca

SEQ ID NO: 319065 - RNA, 19 nt, Human
gccagaauagugaauucca

SEQ ID NO: 319066 - RNA, 23 nt, Human
ggaaaauuaaaagcaaagaaaaa

SEQ ID NO: 319067 - RNA, 23 nt, Human
ggaagaaauggauguaggagagg

SEQ ID NO: 319068 - RNA, 22 nt, Human
ggagcacuguuuagagaaaacc

SEQ ID NO: 319069 - RNA, 21 nt, Human
ggagggaaagggaacuagaac

SEQ ID NO: 319070 - RNA, 24 nt, Human
ggcaagaaggggucagggaaggga

SEQ ID NO: 319071 - RNA, 21 nt, Human
gggucagggaagggaaggggg

SEQ ID NO: 319072 - RNA, 24 nt, Human
ggucagggaagggaaggggggcug

SEQ ID NO: 319073 - RNA, 21 nt, Human
guaggaaaaaaacuaaccucu

SEQ ID NO: 319074 - RNA, 23 nt, Human
gucagggaagggaaggggggcug

SEQ ID NO: 319075 - RNA, 26 nt, Human
uaaauugaucauuaaaaugaacccag

SEQ ID NO: 319076 - RNA, 23 nt, Human
uaacgguuacaaaacaaaacaaa

SEQ ID NO: 319077 - RNA, 20 nt, Human
uaauuuguauaaauuuccuu

SEQ ID NO: 319078 - RNA, 20 nt, Human
uaccucaaaauuaaaauaca

SEQ ID NO: 319079 - RNA, 19 nt, Human
uaccucuauauuguuucca

SEQ ID NO: 319080 - RNA, 22 nt, Human
uaccucuauauuguuuccaaaa

SEQ ID NO: 319081 - RNA, 24 nt, Human
uagcuggaaacaacuucuuuuuaa

SEQ ID NO: 319082 - RNA, 23 nt, Human
uaggaaaaaaacuaaccucucaa

SEQ ID NO: 319083 - RNA, 24 nt, Human
uaggaaaaaaacuaaccucucaaa

SEQ ID NO: 319084 - RNA, 21 nt, Human
ucaaaaauuaccaagaguuuu

SEQ ID NO: 319085 - RNA, 19 nt, Human
ucaacaaacacugaacuaa

SEQ ID NO: 319086 - RNA, 21 nt, Human
ucacacuacacaggcugguca

SEQ ID NO: 319087 - RNA, 18 nt, Human
ucacuuucauuaaucaug

SEQ ID NO: 319088 - RNA, 20 nt, Human
ucagacauucuguuuacuga

SEQ ID NO: 319089 - RNA, 21 nt, Human
ugcagaaacacuugauaaccg

SEQ ID NO: 319090 - RNA, 19 nt, Human
ugcuucaacaaggacgguc

SEQ ID NO: 319091 - RNA, 20 nt, Human
ugcuugaaauuuccaccuga

SEQ ID NO: 319092 - RNA, 21 nt, Human
uggcaaaaccaagucugagcu

SEQ ID NO: 319093 - RNA, 19 nt, Human
uggcacagacaaugcuugc

SEQ ID NO: 319094 - RNA, 22 nt, Human
ugguacagaugaaaagaagugg

SEQ ID NO: 319095 - RNA, 19 nt, Human
uguaggagaggagaaagac

SEQ ID NO: 319096 - RNA, 20 nt, Human
ugucacacuacacaggcugg

SEQ ID NO: 319097 - RNA, 22 nt, Human
ugucacacuacacaggcugguc

SEQ ID NO: 319098 - RNA, 18 nt, Human
uuccaagaaaguuagucu

SEQ ID NO: 319099 - RNA, 21 nt, Human
uucucaacaaacacugaacua

SEQ ID NO: 319100 - RNA, 22 nt, Human
uucuguuuacugagagaacaga

SEQ ID NO: 319101 - RNA, 22 nt, Human
uuuaaaauuugucacuuucauu

SEQ ID NO: 319102 - RNA, 21 nt, Human
uuucugggucuagcuguacug

SEQ ID NO: 319103 - RNA, 22 nt, Human
aaaaggaaagaaaacccacagg

SEQ ID NO: 319104 - RNA, 21 nt, Human
aaacaaaaaggaaagaaaacc

SEQ ID NO: 319105 - RNA, 23 nt, Human
aaacaaaaaggaaagaaaaccca

SEQ ID NO: 319106 - RNA, 22 nt, Human
aaacagcccacugaacauggca

SEQ ID NO: 319107 - RNA, 24 nt, Human
aaacagcccacugaacauggcacu

SEQ ID NO: 319108 - RNA, 23 nt, Human
aaaccucucuccuucccaggcag

SEQ ID NO: 319109 - RNA, 20 nt, Human
aacauggcacuaaaccucuc

SEQ ID NO: 319110 - RNA, 19 nt, Human
aagcacagagggaccagga

SEQ ID NO: 319111 - RNA, 21 nt, Human
aaguggugccuguucagggcu

SEQ ID NO: 319112 - RNA, 19 nt, Human
acaacagcaagaccuggcc

SEQ ID NO: 319113 - RNA, 24 nt, Human
accaaaaacaaaaaggaaagaaaa

SEQ ID NO: 319114 - RNA, 18 nt, Human
accaggaaggcauggggc

SEQ ID NO: 319115 - RNA, 19 nt, Human
acccugugggaggagaaag

SEQ ID NO: 319116 - RNA, 21 nt, Human
agaaacucguuuaaaacaggc

SEQ ID NO: 319117 - RNA, 21 nt, Human
agagagaagcacagagggacc

SEQ ID NO: 319118 - RNA, 22 nt, Human
aggaaggcauggggcggggggu

SEQ ID NO: 319119 - RNA, 20 nt, Human
aggcagaagggggcuggggc

SEQ ID NO: 319120 - RNA, 24 nt, Human
aggcagaagggggcuggggcaagg

SEQ ID NO: 319121 - RNA, 21 nt, Human
aguggugccuguucagggcug

SEQ ID NO: 319122 - RNA, 22 nt, Human
auccaacccucccaucccccaa

SEQ ID NO: 319123 - RNA, 22 nt, Human
caacccucccaucccccaaacc

SEQ ID NO: 319124 - RNA, 25 nt, Human
caauccaacccucccaucccccaaa

SEQ ID NO: 319125 - RNA, 20 nt, Human
caccaaaaacaaaaaggaag

SEQ ID NO: 319126 - RNA, 23 nt, Human
cacuaaaccucucuccuucccag

SEQ ID NO: 319127 - RNA, 18 nt, Human
cagaagggggcuggggca

SEQ ID NO: 319128 - RNA, 24 nt, Human
ccaaaccaccaaaaacaaaaagga

SEQ ID NO: 319129 - RNA, 18 nt, Human
ccaacccucccauccccc

SEQ ID NO: 319130 - RNA, 22 nt, Human
cccaggcaggauuacuccaaag

SEQ ID NO: 319131 - RNA, 18 nt, Human
cccaucccccaaaccacc

SEQ ID NO: 319132 - RNA, 21 nt, Human
cccccaaaccaccaaaaacaa

SEQ ID NO: 319133 - RNA, 24 nt, Human
cccccaaaccaccaaaaacaaaaa

SEQ ID NO: 319134 - RNA, 23 nt, Human
ccccucuuuccacaccguguccc

SEQ ID NO: 319135 - RNA, 19 nt, Human
cccuugauacaacagcaag

SEQ ID NO: 319136 - RNA, 23 nt, Human
ccucccaucccccaaaccaccaa

SEQ ID NO: 319137 - RNA, 26 nt, Human
cuaaaccucucuccuucccaggcagg

SEQ ID NO: 319138 - RNA, 22 nt, Human
gcacuaaaccucucuccuuccc

SEQ ID NO: 319139 - RNA, 22 nt, Human
ggaaagaaaacccacaggggca

SEQ ID NO: 319140 - RNA, 26 nt, Human
ggcggggggugagggagcagcuggug

SEQ ID NO: 319141 - RNA, 20 nt, Human
ggcuggggcaagggggaccc

SEQ ID NO: 319142 - RNA, 22 nt, Human
ggcuuccugcucccccaacccu

SEQ ID NO: 319143 - RNA, 22 nt, Human
gggcaagggggacccuguggga

SEQ ID NO: 319144 - RNA, 23 nt, Human
gggcuggggcaagggggacccug

SEQ ID NO: 319145 - RNA, 18 nt, Human
gggggcuggggcaagggg

SEQ ID NO: 319146 - RNA, 20 nt, Human
ggggugaggaugaaauuaga

SEQ ID NO: 319147 - RNA, 21 nt, Human
ucaauccaacccucccauccc

SEQ ID NO: 319148 - RNA, 24 nt, Human
uccaacccucccaucccccaaacc

SEQ ID NO: 319149 - RNA, 22 nt, Human
ucccaggcaggauuacuccaaa

SEQ ID NO: 319150 - RNA, 22 nt, Human
ucccccaaaccaccaaaaacaa

SEQ ID NO: 319151 - RNA, 27 nt, Human
ucccccaaaccaccaaaaacaaaaagg

SEQ ID NO: 319152 - RNA, 21 nt, Human
ucuggggcccucuggcuguuc

SEQ ID NO: 319153 - RNA, 20 nt, Human
ugaaauuagauacaaggaac

SEQ ID NO: 319154 - RNA, 19 nt, Human
ugagggagcagcugguguu

SEQ ID NO: 319155 - RNA, 22 nt, Human
ugagggagcagcugguguuucu

SEQ ID NO: 319156 - RNA, 22 nt, Human
uggcuguucaauccaacccucc

SEQ ID NO: 319157 - RNA, 18 nt, Human
ugguguuucuguuccucc

SEQ ID NO: 319158 - RNA, 24 nt, Human
uugagccccucuuuccacaccgug

SEQ ID NO: 319159 - RNA, 19 nt, Human
aagaggcgcccgggcccuc

SEQ ID NO: 319160 - RNA, 21 nt, Human
aagggcaggggacccugaaca

SEQ ID NO: 319161 - RNA, 18 nt, Human
acucagagcaugagcccc

SEQ ID NO: 319162 - RNA, 20 nt, Human
agaggacaggggcuagaacu

SEQ ID NO: 319163 - RNA, 21 nt, Human
agaucagaauuugucugagag

SEQ ID NO: 319164 - RNA, 21 nt, Human
auccauucucuuuccuccccc

SEQ ID NO: 319165 - RNA, 22 nt, Human
caccgcuccuggaggucaccac

SEQ ID NO: 319166 - RNA, 23 nt, Human
caucccaccgcuccuggagguca

SEQ ID NO: 319167 - RNA, 19 nt, Human
ccacagagcuuccagcagg

SEQ ID NO: 319168 - RNA, 22 nt, Human
cccacagagcuuccagcaggca

SEQ ID NO: 319169 - RNA, 22 nt, Human
cccauaccuucccuagcuccca

SEQ ID NO: 319170 - RNA, 23 nt, Human
ccuccccacucacauuaugggaa

SEQ ID NO: 319171 - RNA, 19 nt, Human
ccucccccauaccuucccu

SEQ ID NO: 319172 - RNA, 23 nt, Human
ccuggugcugcaugaccccuucc

SEQ ID NO: 319173 - RNA, 19 nt, Human
cgcccgggcccucaucauc

SEQ ID NO: 319174 - RNA, 19 nt, Human
cgcccgggcccucaucauc

SEQ ID NO: 319175 - RNA, 22 nt, Human
cuaaauggacuuggccuccucc

SEQ ID NO: 319176 - RNA, 19 nt, Human
cucccagauagaagggcag

SEQ ID NO: 319177 - RNA, 25 nt, Human
cuccuccauauagcacggaacagga

SEQ ID NO: 319178 - RNA, 22 nt, Human
cugcaugaccccuucccccagc

SEQ ID NO: 319179 - RNA, 24 nt, Human
gagcccccucaccaucuuuaaggg

SEQ ID NO: 319180 - RNA, 20 nt, Human
gcugaaaguuuuuucaagug

SEQ ID NO: 319181 - RNA, 18 nt, Human
gcugcaugaccccuuccc

SEQ ID NO: 319182 - RNA, 21 nt, Human
ggucaccaccuucuacucaga

SEQ ID NO: 319183 - RNA, 19 nt, Human
uaaauggacuuggccuccu

SEQ ID NO: 319184 - RNA, 18 nt, Human
uaagaggacaggggcuag

SEQ ID NO: 319185 - RNA, 19 nt, Human
uaguucacccagaaagggg

SEQ ID NO: 319186 - RNA, 21 nt, Human
ucaaguuucaucugauuccca

SEQ ID NO: 319187 - RNA, 21 nt, Human
ucccacagagcuuccagcagg

SEQ ID NO: 319188 - RNA, 20 nt, Human
ucccucaaguuucaucugau

SEQ ID NO: 319189 - RNA, 20 nt, Human
uccuggaggucaccaccuuc

SEQ ID NO: 319190 - RNA, 25 nt, Human
ugggaagaaaugucacuaaauggug

SEQ ID NO: 319191 - RNA, 18 nt, Human
ugucugagaggcacagag

SEQ ID NO: 319192 - RNA, 22 nt, Human
uuccagcaggcagugaguuggg

SEQ ID NO: 319193 - RNA, 24 nt, Human
aaaacgugacccagagacuuuguu

SEQ ID NO: 319194 - RNA, 19 nt, Human
aggcaaaacgugacccaga

SEQ ID NO: 319195 - RNA, 20 nt, Human
uaaccacuugcagccagugu

SEQ ID NO: 319196 - RNA, 24 nt, Human
ugaggcaaaacgugacccagagac

SEQ ID NO: 319197 - RNA, 19 nt, Human
uucaugaggcaaaacguga

SEQ ID NO: 319198 - RNA, 22 nt, Human
aaaaaaagacuaaaccaaagua

SEQ ID NO: 319199 - RNA, 18 nt, Human
aaaaaggaggaaaaaaag

SEQ ID NO: 319200 - RNA, 25 nt, Human
aaacacaaaguacagaucagaaacc

SEQ ID NO: 319201 - RNA, 18 nt, Human
aaacuuaaaaggcaggua

SEQ ID NO: 319202 - RNA, 21 nt, Human
aaagaaaaguuugccagagga

SEQ ID NO: 319203 - RNA, 25 nt, Human
aaagaaagaaaaguuugccagagga

SEQ ID NO: 319204 - RNA, 26 nt, Human
aaagaaauacagcauauauggccaca

SEQ ID NO: 319205 - RNA, 22 nt, Human
aaaguaaaaaacuucuuccaaa

SEQ ID NO: 319206 - RNA, 19 nt, Human
aacacugcacaaagagaag

SEQ ID NO: 319207 - RNA, 21 nt, Human
aacuucuuccaaaaucucaug

SEQ ID NO: 319208 - RNA, 23 nt, Human
aagaaagaaaaguuugccagagg

SEQ ID NO: 319209 - RNA, 23 nt, Human
aagacuaaaccaaaguaaaaaac

SEQ ID NO: 319210 - RNA, 22 nt, Human
aagcaacacagacacauuauac

SEQ ID NO: 319211 - RNA, 23 nt, Human
aagcaacacagacacauuauacc

SEQ ID NO: 319212 - RNA, 20 nt, Human
aagcauggauuggggagagg

SEQ ID NO: 319213 - RNA, 21 nt, Human
aaguuuuucaaaucuaugaaa

SEQ ID NO: 319214 - RNA, 20 nt, Human
acaaaguacagaucagaaac

SEQ ID NO: 319215 - RNA, 23 nt, Human
acacugaacuuuguccgccuggc

SEQ ID NO: 319216 - RNA, 20 nt, Human
accaaaguaaaaaacuucuu

SEQ ID NO: 319217 - RNA, 21 nt, Human
acccuaaaauguaaauaaaac

SEQ ID NO: 319218 - RNA, 18 nt, Human
acucacugcccaggguga

SEQ ID NO: 319219 - RNA, 19 nt, Human
agaaacccucauuuaauau

SEQ ID NO: 319220 - RNA, 20 nt, Human
agacacauuauacccuacca

SEQ ID NO: 319221 - RNA, 23 nt, Human
agauguaguuaaauacuaaccaa

SEQ ID NO: 319222 - RNA, 23 nt, Human
aggaaaaaaagacuaaaccaaag

SEQ ID NO: 319223 - RNA, 21 nt, Human
augaaaauaaaagugccuaca

SEQ ID NO: 319224 - RNA, 23 nt, Human
augaguuaguuucaaacuuaaaa

SEQ ID NO: 319225 - RNA, 23 nt, Human
caaauccaaucuccuggaaucag

SEQ ID NO: 319226 - RNA, 20 nt, Human
caagaauguagaccucaaau

SEQ ID NO: 319227 - RNA, 25 nt, Human
caagcuuuaagcuuguaagaacaua

SEQ ID NO: 319228 - RNA, 23 nt, Human
cacauuauacccuaccaucaacc

SEQ ID NO: 319229 - RNA, 22 nt, Human
caccaaaaagcauggcacucac

SEQ ID NO: 319230 - RNA, 26 nt, Human
caccagaaauucuagcugaauaaaaa

SEQ ID NO: 319231 - RNA, 24 nt, Human
cagcaaauccaaucuccuggaauc

SEQ ID NO: 319232 - RNA, 23 nt, Human
cagcaggauagccuuucagacca

SEQ ID NO: 319233 - RNA, 24 nt, Human
cagcaucugaucaauuauuuggca

SEQ ID NO: 319234 - RNA, 23 nt, Human
cagucacucccaaauauaacccu

SEQ ID NO: 319235 - RNA, 21 nt, Human
ccagugaaugucacggggaaa

SEQ ID NO: 319236 - RNA, 20 nt, Human
cgaggcugcgggugcgaggc

SEQ ID NO: 319237 - RNA, 18 nt, Human
cuaagauuuucuauaucc

SEQ ID NO: 319238 - RNA, 18 nt, Human
cuacauuacagaacugug

SEQ ID NO: 319239 - RNA, 21 nt, Human
cuaccaucaacccaccagaaa

SEQ ID NO: 319240 - RNA, 22 nt, Human
cucacugcccagggugaauacu

SEQ ID NO: 319241 - RNA, 21 nt, Human
cucuggggacgggcggcggcg

SEQ ID NO: 319242 - RNA, 22 nt, Human
cugaacuuuguccgccuggcau

SEQ ID NO: 319243 - RNA, 19 nt, Human
cuugcagucacucccaaau

SEQ ID NO: 319244 - RNA, 22 nt, Human
gaaaaaaaaaacugaaccaauc

SEQ ID NO: 319245 - RNA, 23 nt, Human
gaaaaaaaaaacugaaccaauca

SEQ ID NO: 319246 - RNA, 19 nt, Human
gaguuaguuucaaacuuaa

SEQ ID NO: 319247 - RNA, 21 nt, Human
gaguuaguuucaaacuuaaaa

SEQ ID NO: 319248 - RNA, 21 nt, Human
gaugccaguggccacuuggcg

SEQ ID NO: 319249 - RNA, 25 nt, Human
gcaacacagacacauuauacccuac

SEQ ID NO: 319250 - RNA, 19 nt, Human
gcgggcgcgaggcugcggg

SEQ ID NO: 319251 - RNA, 21 nt, Human
gcugcgggugcgaggcggcgg

SEQ ID NO: 319252 - RNA, 26 nt, Human
gcuuauaacuggacaauuaugucacu

SEQ ID NO: 319253 - RNA, 18 nt, Human
gggcggcggcgggcgcga

SEQ ID NO: 319254 - RNA, 24 nt, Human
uaaaaaauuuguaacaagguggcu

SEQ ID NO: 319255 - RNA, 25 nt, Human
uaaaaguuuuucaaaucuaugaaaa

SEQ ID NO: 319256 - RNA, 22 nt, Human
uaacaagauauaaauaaaccag

SEQ ID NO: 319257 - RNA, 21 nt, Human
uaaugcuccaaauugaaaaug

SEQ ID NO: 319258 - RNA, 19 nt, Human
uagauuauuuuggaaauuu

SEQ ID NO: 319259 - RNA, 18 nt, Human
uauccauuucccuaaucu

SEQ ID NO: 319260 - RNA, 25 nt, Human
uaugaaaaaaaucuaccaugaccaa

SEQ ID NO: 319261 - RNA, 18 nt, Human
uccaaaaucucaugcccc

SEQ ID NO: 319262 - RNA, 21 nt, Human
ucccucagcgcuuugcuccca

SEQ ID NO: 319263 - RNA, 19 nt, Human
ucccuuuagcagcaucacc

SEQ ID NO: 319264 - RNA, 23 nt, Human
ucuguuaggacauuugcuccauc

SEQ ID NO: 319265 - RNA, 22 nt, Human
ucuuacccacccuaaaauguaa

SEQ ID NO: 319266 - RNA, 22 nt, Human
ugaauaaaaaggaggaaaaaaa

SEQ ID NO: 319267 - RNA, 21 nt, Human
ugcacaaagagaagcaguaac

SEQ ID NO: 319268 - RNA, 24 nt, Human
ugcacaaagagaagcaguaacagc

SEQ ID NO: 319269 - RNA, 18 nt, Human
ugcacuguuacaucauua

SEQ ID NO: 319270 - RNA, 22 nt, Human
ugcacuguuacaucauuacucu

SEQ ID NO: 319271 - RNA, 23 nt, Human
ugcuagauaggaaagcaggacuu

SEQ ID NO: 319272 - RNA, 18 nt, Human
uggaaucaguuuaaugag

SEQ ID NO: 319273 - RNA, 21 nt, Human
uggugcaauaaaagcaacuuu

SEQ ID NO: 319274 - RNA, 19 nt, Human
uguaaauaaaaccucuucc

SEQ ID NO: 319275 - RNA, 18 nt, Human
uuaaaaaagaaaagaaag

SEQ ID NO: 319276 - RNA, 19 nt, Human
uuagcuuggcaaacaacaa

SEQ ID NO: 319277 - RNA, 19 nt, Human
uucaauaggugcuggaucu

SEQ ID NO: 319278 - RNA, 20 nt, Human
aaaugcccauaaccacagca

SEQ ID NO: 319279 - RNA, 19 nt, Human
aaugggccuucagaagcaa

SEQ ID NO: 319280 - RNA, 21 nt, Human
aggaaaggagcauguuuauac

SEQ ID NO: 319281 - RNA, 22 nt, Human
aggaaaggagcauguuuauacu

SEQ ID NO: 319282 - RNA, 23 nt, Human
aggcacuuaaauuguuggagaga

SEQ ID NO: 319283 - RNA, 22 nt, Human
caacccuacgcuaccacggccg

SEQ ID NO: 319284 - RNA, 22 nt, Human
cacuaagaaggcucuggggaag

SEQ ID NO: 319285 - RNA, 19 nt, Human
cccauaaccacagcaaugg

SEQ ID NO: 319286 - RNA, 19 nt, Human
cccuacgcuaccacggccg

SEQ ID NO: 319287 - RNA, 19 nt, Human
ccgcgcccgcgaggucucu

SEQ ID NO: 319288 - RNA, 19 nt, Human
cgcaacccuacgcuaccac

SEQ ID NO: 319289 - RNA, 21 nt, Human
gcccgcgaggucucuucgcgc

SEQ ID NO: 319290 - RNA, 23 nt, Human
gcgcaacccuacgcuaccacggc

SEQ ID NO: 319291 - RNA, 22 nt, Human
gucgcgccgcucuuuggccggc

SEQ ID NO: 319292 - RNA, 23 nt, Human
uaagaaggcucugggguguggca

SEQ ID NO: 319293 - RNA, 20 nt, Human
uccgggccgcgcaacccuac

SEQ ID NO: 319294 - RNA, 23 nt, Human
ugcguuuccgggccgcgcaaccc

SEQ ID NO: 319295 - RNA, 25 nt, Human
uggcagcaguggcggcaacggcagg

SEQ ID NO: 319296 - RNA, 20 nt, Human
uggccggcucugcguuuccu

SEQ ID NO: 319297 - RNA, 19 nt, Human
aaaaaaaccaaacaaaccc

SEQ ID NO: 319298 - RNA, 19 nt, Human
aaaaaaccaaacaaaccca

SEQ ID NO: 319299 - RNA, 20 nt, Human
aaaaagcagauauaugcuug

SEQ ID NO: 319300 - RNA, 22 nt, Human
aaaucacucauuuaaaagcaaa

SEQ ID NO: 319301 - RNA, 22 nt, Human
aaucacuuuuuaaaaaaacaaa

SEQ ID NO: 319302 - RNA, 23 nt, Human
aaugacuaaauugccuguccaua

SEQ ID NO: 319303 - RNA, 22 nt, Human
aauguaaaaaaaggaaaaaacc

SEQ ID NO: 319304 - RNA, 19 nt, Human
accuguuucccaaaaugaa

SEQ ID NO: 319305 - RNA, 21 nt, Human
acuacuguuuauugauacguu

SEQ ID NO: 319306 - RNA, 24 nt, Human
aggaaaaaaccugaaaucacagaa

SEQ ID NO: 319307 - RNA, 24 nt, Human
aggcagcacauaacuuaucaagcu

SEQ ID NO: 319308 - RNA, 22 nt, Human
agggaaaaaugcauuaaugauc

SEQ ID NO: 319309 - RNA, 24 nt, Human
auaaggaucccacauuauuuuugg

SEQ ID NO: 319310 - RNA, 19 nt, Human
caaaauagauaacuugaaa

SEQ ID NO: 319311 - RNA, 22 nt, Human
caaaauguacuuuauugcaaaa

SEQ ID NO: 319312 - RNA, 22 nt, Human
caagcuagaaaacuuuaaaaca

SEQ ID NO: 319313 - RNA, 22 nt, Human
cauauagccuaugauaacaucc

SEQ ID NO: 319314 - RNA, 22 nt, Human
cauaugauauuuuauaccauuu

SEQ ID NO: 319315 - RNA, 18 nt, Human
ccggccgccggcucccgg

SEQ ID NO: 319316 - RNA, 19 nt, Human
ccuggccgcccucgccccc

SEQ ID NO: 319317 - RNA, 22 nt, Human
cgcccccuccccggcacgccua

SEQ ID NO: 319318 - RNA, 22 nt, Human
cgccuagggccccgcggcugcc

SEQ ID NO: 319319 - RNA, 23 nt, Human
cgcuaccggcugcgagcgcggcg

SEQ ID NO: 319320 - RNA, 21 nt, Human
cggcaggcgccuggccgcccu

SEQ ID NO: 319321 - RNA, 19 nt, Human
cuaaaaauguggcugaagu

SEQ ID NO: 319322 - RNA, 20 nt, Human
cuaccggcugcgagcgcggc

SEQ ID NO: 319323 - RNA, 23 nt, Human
cucgcccccuccccggcacgccu

SEQ ID NO: 319324 - RNA, 22 nt, Human
gaacaaagaaauaaacuguggg

SEQ ID NO: 319325 - RNA, 21 nt, Human
gcacugggccccggcgccggc

SEQ ID NO: 319326 - RNA, 22 nt, Human
gccccgcggcugccgagcgacg

SEQ ID NO: 319327 - RNA, 19 nt, Human
gccuagaaaucauguaaga

SEQ ID NO: 319328 - RNA, 22 nt, Human
ggaaaaaaccugaaaucacaga

SEQ ID NO: 319329 - RNA, 23 nt, Human
ggcaucuacacaaacacauucuc

SEQ ID NO: 319330 - RNA, 19 nt, Human
ggccuagaaaucauguaag

SEQ ID NO: 319331 - RNA, 23 nt, Human
ggcgcacugggccccggcgccgg

SEQ ID NO: 319332 - RNA, 20 nt, Human
guaaaaaaaggaaaaaaccu

SEQ ID NO: 319333 - RNA, 25 nt, Human
guaaaacacauauagccuaugauaa

SEQ ID NO: 319334 - RNA, 22 nt, Human
uaaaaaaaggaaaaaaccugaa

SEQ ID NO: 319335 - RNA, 21 nt, Human
uaaaaccacuggaauauguau

SEQ ID NO: 319336 - RNA, 22 nt, Human
uaacagacauggcuuuuaaaau

SEQ ID NO: 319337 - RNA, 23 nt, Human
uaagaauacagaaugaugaacca

SEQ ID NO: 319338 - RNA, 25 nt, Human
uacaagaagguuuugcaaaaauguu

SEQ ID NO: 319339 - RNA, 24 nt, Human
uacaagugggaccauaaacauucu

SEQ ID NO: 319340 - RNA, 23 nt, Human
uacugacauuaugccaacaaagu

SEQ ID NO: 319341 - RNA, 22 nt, Human
uagaauacagagaauugcaaaa

SEQ ID NO: 319342 - RNA, 21 nt, Human
uaucaaugaacaaugaaaauc

SEQ ID NO: 319343 - RNA, 24 nt, Human
uaugcaggccuagugaagaacaaa

SEQ ID NO: 319344 - RNA, 23 nt, Human
ucaccaauaggccaaggcagcac

SEQ ID NO: 319345 - RNA, 23 nt, Human
ucagucugaauaaguaaaacaca

SEQ ID NO: 319346 - RNA, 24 nt, Human
ucuacauuaaagcaauggcaaggc

SEQ ID NO: 319347 - RNA, 21 nt, Human
ucuagacacugggucaugggg

SEQ ID NO: 319348 - RNA, 18 nt, Human
ucucuagacacuggguca

SEQ ID NO: 319349 - RNA, 21 nt, Human
ucucucaucuaaaacacuguu

SEQ ID NO: 319350 - RNA, 27 nt, Human
ucuggaguucuuuugugagugggaccg

SEQ ID NO: 319351 - RNA, 30 nt, Human
ucuggaguucuuuuguguuuuuucuuguuu

SEQ ID NO: 319352 - RNA, 23 nt, Human
ucuuauguggcagcauacugagc

SEQ ID NO: 319353 - RNA, 18 nt, Human
ugauauuuuauaccauuu

SEQ ID NO: 319354 - RNA, 21 nt, Human
ugaucucucaucuaaaacacu

SEQ ID NO: 319355 - RNA, 21 nt, Human
uuucuuguuuaacagacaugg

SEQ ID NO: 319356 - RNA, 25 nt, Human
uuuuuaugaacuacucuuuagaaag

SEQ ID NO: 319357 - RNA, 22 nt, Human
aauaacccuacaauuuucaggc

SEQ ID NO: 319358 - RNA, 19 nt, Human
agagagagacccugaacag

SEQ ID NO: 319359 - RNA, 28 nt, Human
cacugcggggagggcugggggcugggga

SEQ ID NO: 319360 - RNA, 21 nt, Human
cagacacaagccguggccuua

SEQ ID NO: 319361 - RNA, 21 nt, Human
cauauggaaucagacacaagc

SEQ ID NO: 319362 - RNA, 21 nt, Human
cccccccaaccaccucuugcu

SEQ ID NO: 319363 - RNA, 24 nt, Human
ccccccccaaccaccucuugcucc

SEQ ID NO: 319364 - RNA, 22 nt, Human
cccuacaauuuucaggccucca

SEQ ID NO: 319365 - RNA, 18 nt, Human
cugggggcuggggaggug

SEQ ID NO: 319366 - RNA, 18 nt, Human
gagguguuuguucucgcu

SEQ ID NO: 319367 - RNA, 25 nt, Human
guccccccccaaccaccucuugcuc

SEQ ID NO: 319368 - RNA, 19 nt, Human
uaacccuacaauuuucagg

SEQ ID NO: 319369 - RNA, 19 nt, Human
uaagagagagacccugaac

SEQ ID NO: 319370 - RNA, 21 nt, Human
ugcggggagggcugggggcug

SEQ ID NO: 319371 - RNA, 18 nt, Human
uggacuaauaacccuaca

SEQ ID NO: 319372 - RNA, 18 nt, Human
ugggggcuggggaggugu

SEQ ID NO: 319373 - RNA, 19 nt, Human
uucacuuccacugcgggga

SEQ ID NO: 319374 - RNA, 29 nt, Human
acagccgggucccggccaggcugguaccc

SEQ ID NO: 319375 - RNA, 21 nt, Human
agcaggcuccgggggcagugu

SEQ ID NO: 319376 - RNA, 21 nt, Human
aggacagaggagcagggaggc

SEQ ID NO: 319377 - RNA, 19 nt, Human
agguucgcugugcgaggac

SEQ ID NO: 319378 - RNA, 18 nt, Human
agugggcuggcuaacugc

SEQ ID NO: 319379 - RNA, 18 nt, Human
augacccuggugccuguc

SEQ ID NO: 319380 - RNA, 30 nt, Human
cacagccgggucccggccaggcugguaccc

SEQ ID NO: 319381 - RNA, 22 nt, Human
caggagcccagguucgcugugc

SEQ ID NO: 319382 - RNA, 22 nt, Human
caggagcccagguucgcugugc

SEQ ID NO: 319383 - RNA, 22 nt, Human
caggcccagaacccagcccucc

SEQ ID NO: 319384 - RNA, 30 nt, Human
cauugaccccaaccucagcuguccacggcc

SEQ ID NO: 319385 - RNA, 20 nt, Human
ccacaaggagcagggcucgg

SEQ ID NO: 319386 - RNA, 22 nt, Human
ccaggccagggcgauaggcuca

SEQ ID NO: 319387 - RNA, 18 nt, Human
cccacgcacccugccccc

SEQ ID NO: 319388 - RNA, 24 nt, Human
cccacgcacccugcccccggcacc

SEQ ID NO: 319389 - RNA, 26 nt, Human
cccacgcacccugcccccggcaccac

SEQ ID NO: 319390 - RNA, 27 nt, Human
cccacgcacccugcccccggcaccaca

SEQ ID NO: 319391 - RNA, 19 nt, Human
cccaggcuccguccuccca

SEQ ID NO: 319392 - RNA, 19 nt, Human
cccccggcaccacagccgc

SEQ ID NO: 319393 - RNA, 20 nt, Human
ccccgccccgcucccaggcu

SEQ ID NO: 319394 - RNA, 21 nt, Human
ccccgccccgcucccaggcuc

SEQ ID NO: 319395 - RNA, 21 nt, Human
cccuggggagcugccucuguc

SEQ ID NO: 319396 - RNA, 22 nt, Human
ccgccccacgggucuccaggcc

SEQ ID NO: 319397 - RNA, 23 nt, Human
ccgcucccaggcuccguccuccc

SEQ ID NO: 319398 - RNA, 19 nt, Human
ccggccaggcugguaccug

SEQ ID NO: 319399 - RNA, 21 nt, Human
cggcaccacagccgcggggca

SEQ ID NO: 319400 - RNA, 24 nt, Human
cgucgcccccuugcgcggcggccc

SEQ ID NO: 319401 - RNA, 23 nt, Human
cuugcgcggcggccccgccccgc

SEQ ID NO: 319402 - RNA, 20 nt, Human
cuuucuuuuccuuccugccc

SEQ ID NO: 319403 - RNA, 21 nt, Human
gaccaagcucucccucuggcc

SEQ ID NO: 319404 - RNA, 22 nt, Human
gagccgggaggggagggagggu

SEQ ID NO: 319405 - RNA, 19 nt, Human
gaggguggaggggccagug

SEQ ID NO: 319406 - RNA, 30 nt, Human
gcccaggaggcauugaccccaaccucagcc

SEQ ID NO: 319407 - RNA, 19 nt, Human
gccccacgggucuccaggc

SEQ ID NO: 319408 - RNA, 18 nt, Human
gccgggucccggccaggc

SEQ ID NO: 319409 - RNA, 19 nt, Human
gccgggucccggccaggcu

SEQ ID NO: 319410 - RNA, 23 nt, Human
ggacuccugccaccuccaagucc

SEQ ID NO: 319411 - RNA, 19 nt, Human
ggagcugccucugucgcuc

SEQ ID NO: 319412 - RNA, 20 nt, Human
ggaggggagggaggguggag

SEQ ID NO: 319413 - RNA, 22 nt, Human
ggaggggagggaggguggaggg

SEQ ID NO: 319414 - RNA, 19 nt, Human
gggaauagguacaaagggg

SEQ ID NO: 319415 - RNA, 20 nt, Human
ggggaauagguacaaagggg

SEQ ID NO: 319416 - RNA, 19 nt, Human
ggggagggaggguggaggg

SEQ ID NO: 319417 - RNA, 19 nt, Human
gucccaggccaugacccug

SEQ ID NO: 319418 - RNA, 22 nt, Human
gugugauggggacuggacgggc

SEQ ID NO: 319419 - RNA, 19 nt, Human
uaaggcagguccagagacc

SEQ ID NO: 319420 - RNA, 19 nt, Human
uccagagaccaagcucucc

SEQ ID NO: 319421 - RNA, 22 nt, Human
uccaggucccaggccaugaccc

SEQ ID NO: 319422 - RNA, 26 nt, Human
uccagguuuguguuuauucgauacag

SEQ ID NO: 319423 - RNA, 25 nt, Human
ucccacagccgggucccggccaggc

SEQ ID NO: 319424 - RNA, 21 nt, Human
ucccacgcacccugcccccgg

SEQ ID NO: 319425 - RNA, 22 nt, Human
ucccaggcuccguccucccacg

SEQ ID NO: 319426 - RNA, 22 nt, Human
ucccucuccuuccuaaggcagg

SEQ ID NO: 319427 - RNA, 23 nt, Human
ucccucuggccggggagccggga

SEQ ID NO: 319428 - RNA, 18 nt, Human
uccgccccacgggucucc

SEQ ID NO: 319429 - RNA, 18 nt, Human
uccugccaccuccaaguc

SEQ ID NO: 319430 - RNA, 21 nt, Human
uccugcccucccucuccuucc

SEQ ID NO: 319431 - RNA, 19 nt, Human
uccuuccugcccucccucu

SEQ ID NO: 319432 - RNA, 19 nt, Human
ucuccaggcccuggggagc

SEQ ID NO: 319433 - RNA, 20 nt, Human
ugagcgcccacaaggagcag

SEQ ID NO: 319434 - RNA, 21 nt, Human
ugccucugucgcucaccggaa

SEQ ID NO: 319435 - RNA, 21 nt, Human
uggccgagcugggggaacaga

SEQ ID NO: 319436 - RNA, 18 nt, Human
uggcuaacugcccagcuc

SEQ ID NO: 319437 - RNA, 20 nt, Human
ugggcuggcuaacugcccag

SEQ ID NO: 319438 - RNA, 21 nt, Human
uuggagugggcuggcuaacug

SEQ ID NO: 319439 - RNA, 19 nt, Human
uuggucccacagccggguc

SEQ ID NO: 319440 - RNA, 24 nt, Human
aaaaacauaaaaaugucaccacaa

SEQ ID NO: 319441 - RNA, 19 nt, Human
aagcaaauaaaguuugaaa

SEQ ID NO: 319442 - RNA, 22 nt, Human
aaguaucagaaacuacaacacu

SEQ ID NO: 319443 - RNA, 23 nt, Human
acaacaacagaaacaaaacccca

SEQ ID NO: 319444 - RNA, 23 nt, Human
acaacagaaacaaaaccccaaag

SEQ ID NO: 319445 - RNA, 26 nt, Human
acaacagaaacaaaaccccaaagcaa

SEQ ID NO: 319446 - RNA, 21 nt, Human
acauaaaguaucagaaacuac

SEQ ID NO: 319447 - RNA, 20 nt, Human
acauggaugcaacuuggcaa

SEQ ID NO: 319448 - RNA, 21 nt, Human
acuuggcaaugaaaaacauaa

SEQ ID NO: 319449 - RNA, 21 nt, Human
acuuugauaauguguuaauua

SEQ ID NO: 319450 - RNA, 19 nt, Human
agaaaaucaaacauggaug

SEQ ID NO: 319451 - RNA, 22 nt, Human
agaaaaucaaacauggaugcaa

SEQ ID NO: 319452 - RNA, 19 nt, Human
aggcccggaaguggaagag

SEQ ID NO: 319453 - RNA, 20 nt, Human
augaaggacggagaucuaca

SEQ ID NO: 319454 - RNA, 19 nt, Human
auuuggguucugaaacacu

SEQ ID NO: 319455 - RNA, 20 nt, Human
auuuggguucugaaacacug

SEQ ID NO: 319456 - RNA, 25 nt, Human
caacaacagaaacaaaaccccaaag

SEQ ID NO: 319457 - RNA, 25 nt, Human
caacaacagaaacaaaaccccaaag

SEQ ID NO: 319458 - RNA, 28 nt, Human
caacaacagaaacaaaaccccaaagcaa

SEQ ID NO: 319459 - RNA, 18 nt, Human
caacagaaacaaaacccc

SEQ ID NO: 319460 - RNA, 20 nt, Human
caccacaauagccguugagc

SEQ ID NO: 319461 - RNA, 20 nt, Human
cagaaacaaaaccccaaagc

SEQ ID NO: 319462 - RNA, 26 nt, Human
cagaaacaaaaccccaaagcaaauaa

SEQ ID NO: 319463 - RNA, 25 nt, Human
caggugaaauagagggauuccucuu

SEQ ID NO: 319464 - RNA, 20 nt, Human
cagugcagaaaaagagggaa

SEQ ID NO: 319465 - RNA, 23 nt, Human
cccaaagcaaauaaaguuugaaa

SEQ ID NO: 319466 - RNA, 22 nt, Human
ccccggggccgcgggaccgcgg

SEQ ID NO: 319467 - RNA, 23 nt, Human
cccgagaggugccggccccgggg

SEQ ID NO: 319468 - RNA, 21 nt, Human
ccggagcccgagaggugccgg

SEQ ID NO: 319469 - RNA, 26 nt, Human
cuaaaagcacauucuuggaauuuuag

SEQ ID NO: 319470 - RNA, 24 nt, Human
gaacaacaacagaaacaaaacccc

SEQ ID NO: 319471 - RNA, 25 nt, Human
gacagaaaugaaggacggagaucua

SEQ ID NO: 319472 - RNA, 23 nt, Human
gauaacauuuuauuuugagcaug

SEQ ID NO: 319473 - RNA, 20 nt, Human
gcuccaggcccggaagugga

SEQ ID NO: 319474 - RNA, 23 nt, Human
ggagcccgagaggugccggcccc

SEQ ID NO: 319475 - RNA, 21 nt, Human
ggccuugcuagagugacugug

SEQ ID NO: 319476 - RNA, 24 nt, Human
uaaaaaugucaccacaauagccgu

SEQ ID NO: 319477 - RNA, 19 nt, Human
uaaaagcacauucuuggaa

SEQ ID NO: 319478 - RNA, 20 nt, Human
uacaacacugagguagcacc

SEQ ID NO: 319479 - RNA, 23 nt, Human
uagucucaucagaaaaucaaaca

SEQ ID NO: 319480 - RNA, 19 nt, Human
ucaaggucuggugccucca

SEQ ID NO: 319481 - RNA, 21 nt, Human
ucaaguaguuuggggaugagg

SEQ ID NO: 319482 - RNA, 24 nt, Human
uccacagauuggaugguugggggu

SEQ ID NO: 319483 - RNA, 21 nt, Human
uccagaacaggugaaauagag

SEQ ID NO: 319484 - RNA, 25 nt, Human
ugaacaacaacagaaacaaaacccc

SEQ ID NO: 319485 - RNA, 25 nt, Human
ugagguagcacccaagcugguugcc

SEQ ID NO: 319486 - RNA, 18 nt, Human
uggcagugcagaaaaaga

SEQ ID NO: 319487 - RNA, 21 nt, Human
uggcagugcagaaaaagaggg

SEQ ID NO: 319488 - RNA, 23 nt, Human
ugggucuacuuagcugacaugcu

SEQ ID NO: 319489 - RNA, 22 nt, Human
uggguucugaaacacugucacu

SEQ ID NO: 319490 - RNA, 20 nt, Human
uggugccaaaugcccuuuuc

SEQ ID NO: 319491 - RNA, 18 nt, Human
ugguugcccuuugacccc

SEQ ID NO: 319492 - RNA, 20 nt, Human
uguguuaauuaugcagcugc

SEQ ID NO: 319493 - RNA, 18 nt, Human
uguucuuuucaaggucug

SEQ ID NO: 319494 - RNA, 26 nt, Human
uuagcugacaugcugcggaaaauaaa

SEQ ID NO: 319495 - RNA, 25 nt, Human
uucaaguaguuuggggaugagggug

SEQ ID NO: 319496 - RNA, 20 nt, Human
uugaacaacaacagaaacaa

SEQ ID NO: 319497 - RNA, 18 nt, Human
uugggggugaauauggca

SEQ ID NO: 319498 - RNA, 24 nt, Human
uuuggguucugaaacacugucacu

SEQ ID NO: 319499 - RNA, 20 nt, Human
aggggcaggcgccaaggguc

SEQ ID NO: 319500 - RNA, 25 nt, Human
ccguugcaggggcaggcgccaaggg

SEQ ID NO: 319501 - RNA, 18 nt, Human
aagggagaggagcuggag

SEQ ID NO: 319502 - RNA, 21 nt, Human
aagggagaggagcuggagacu

SEQ ID NO: 319503 - RNA, 22 nt, Human
agaaggccaggaacgcuuggga

SEQ ID NO: 319504 - RNA, 19 nt, Human
agaggagcuggagacucga

SEQ ID NO: 319505 - RNA, 19 nt, Human
agggaccaggauccugccu

SEQ ID NO: 319506 - RNA, 21 nt, Human
aggggguggugaaguuggggg

SEQ ID NO: 319507 - RNA, 21 nt, Human
caggauccugccuuucuuggg

SEQ ID NO: 319508 - RNA, 23 nt, Human
cagguggaagggagaggagcugg

SEQ ID NO: 319509 - RNA, 24 nt, Human
ccccagaaacguagcagggaccag

SEQ ID NO: 319510 - RNA, 23 nt, Human
ccccagaaacguagcagggaccc

SEQ ID NO: 319511 - RNA, 19 nt, Human
cccgggcgcgccggcuccg

SEQ ID NO: 319512 - RNA, 21 nt, Human
cccgggcgcgccggcuccgca

SEQ ID NO: 319513 - RNA, 20 nt, Human
ccuuucuugggggaaacagg

SEQ ID NO: 319514 - RNA, 23 nt, Human
cgcgccaggcagggagcggcacc

SEQ ID NO: 319515 - RNA, 22 nt, Human
cggcggaggggacguuggggac

SEQ ID NO: 319516 - RNA, 18 nt, Human
gaaguugggggugaagug

SEQ ID NO: 319517 - RNA, 19 nt, Human
gaccaggauccugccuuuc

SEQ ID NO: 319518 - RNA, 25 nt, Human
gaccaggauccugccuuucuugggg

SEQ ID NO: 319519 - RNA, 19 nt, Human
gcagagcuggaaugcuggg

SEQ ID NO: 319520 - RNA, 21 nt, Human
gcggagcgcgccaggcaggga

SEQ ID NO: 319521 - RNA, 26 nt, Human
gcuggaaugcuggggugcaggaucua

SEQ ID NO: 319522 - RNA, 25 nt, Human
ggaaacagguggaagggagaggagc

SEQ ID NO: 319523 - RNA, 18 nt, Human
ggaaugcuggggugcagg

SEQ ID NO: 319524 - RNA, 25 nt, Human
ggagaggggcaaggcaccuccaggu

SEQ ID NO: 319525 - RNA, 20 nt, Human
ggccaggaacgcuugggagg

SEQ ID NO: 319526 - RNA, 24 nt, Human
gggaaauuccgaggugggcaggag

SEQ ID NO: 319527 - RNA, 22 nt, Human
gggcagagcuggaaugcugggg

SEQ ID NO: 319528 - RNA, 20 nt, Human
gggcaggagaggggcaaggc

SEQ ID NO: 319529 - RNA, 23 nt, Human
ggggugcaggaucuagaauggga

SEQ ID NO: 319530 - RNA, 24 nt, Human
gguggaagggagaggagcuggaga

SEQ ID NO: 319531 - RNA, 19 nt, Human
guauggaguucagaaggcc

SEQ ID NO: 319532 - RNA, 19 nt, Human
uggaagggagaggagcugg

SEQ ID NO: 319533 - RNA, 21 nt, Human
uggaagggagaggagcuggag

SEQ ID NO: 319534 - RNA, 23 nt, Human
uggaaugcuggggugccgcggug

SEQ ID NO: 319535 - RNA, 23 nt, Human
uggaguucagaaggccaggaacg

SEQ ID NO: 319536 - RNA, 18 nt, Human
uggggugcaggaucuaga

SEQ ID NO: 319537 - RNA, 20 nt, Human
uggugaaguugggggugaag

SEQ ID NO: 319538 - RNA, 20 nt, Human
uugggggugaaguggggcug

SEQ ID NO: 319539 - RNA, 22 nt, Human
aagguucuuguucuaaggcuga

SEQ ID NO: 319540 - RNA, 18 nt, Human
agaguucuucacuugcuc

SEQ ID NO: 319541 - RNA, 18 nt, Human
aggagucgaggcagcccu

SEQ ID NO: 319542 - RNA, 20 nt, Human
cagaguucuucacuugcucc

SEQ ID NO: 319543 - RNA, 21 nt, Human
cccggccccggggggccugcu

SEQ ID NO: 319544 - RNA, 20 nt, Human
ccgcugccccggccccgggg

SEQ ID NO: 319545 - RNA, 20 nt, Human
ccggcgccgcugccccggcc

SEQ ID NO: 319546 - RNA, 19 nt, Human
cgugcccucucucucacuc

SEQ ID NO: 319547 - RNA, 22 nt, Human
cuaagcgccccucgacuggcca

SEQ ID NO: 319548 - RNA, 24 nt, Human
cucuauuccuuuggguucucgugc

SEQ ID NO: 319549 - RNA, 21 nt, Human
gcccucucucucacuccccau

SEQ ID NO: 319550 - RNA, 18 nt, Human
ggccccggggggccugcu

SEQ ID NO: 319551 - RNA, 22 nt, Human
gggccugcuucgcagcgggaga

SEQ ID NO: 319552 - RNA, 21 nt, Human
gucgaggcagcccuggggaaa

SEQ ID NO: 319553 - RNA, 25 nt, Human
uaagcgccccucgacuggccauucu

SEQ ID NO: 319554 - RNA, 19 nt, Human
uaguugauaucugaaaguu

SEQ ID NO: 319555 - RNA, 21 nt, Human
ucgaggcagcccuggggaaag

SEQ ID NO: 319556 - RNA, 19 nt, Human
ucucgugcccucucucuca

SEQ ID NO: 319557 - RNA, 19 nt, Human
ucucuauuccuuuggguuc

SEQ ID NO: 319558 - RNA, 22 nt, Human
ucugccuccuccguccgaauuc

SEQ ID NO: 319559 - RNA, 24 nt, Human
ucuuguucuaaggcugaugcuggg

SEQ ID NO: 319560 - RNA, 21 nt, Human
ugccccggccccggggggccu

SEQ ID NO: 319561 - RNA, 19 nt, Human
aaacagauguaauaauuga

SEQ ID NO: 319562 - RNA, 19 nt, Human
accuaccugcccaccucgc

SEQ ID NO: 319563 - RNA, 22 nt, Human
acugaaaaaccaguucaacuaa

SEQ ID NO: 319564 - RNA, 20 nt, Human
aggccgggggugcggggggc

SEQ ID NO: 319565 - RNA, 20 nt, Human
ccgcagcgccgacccaaggg

SEQ ID NO: 319566 - RNA, 23 nt, Human
ccggagaaccgcggccguccgcc

SEQ ID NO: 319567 - RNA, 25 nt, Human
ccguccgcccaccuaccugcccacc

SEQ ID NO: 319568 - RNA, 19 nt, Human
ccuaccugcccaccucgcc

SEQ ID NO: 319569 - RNA, 26 nt, Human
ccucacucccccgccucaacgcugga

SEQ ID NO: 319570 - RNA, 23 nt, Human
cucccccgccucaacgcuggagg

SEQ ID NO: 319571 - RNA, 19 nt, Human
cuccgccgccugcgcuugc

SEQ ID NO: 319572 - RNA, 22 nt, Human
gcuaguaguauuaauuuuuuuu

SEQ ID NO: 319573 - RNA, 21 nt, Human
uaaauggcaacaugaguagaa

SEQ ID NO: 319574 - RNA, 22 nt, Human
uaccugcccaccucgcccgcag

SEQ ID NO: 319575 - RNA, 23 nt, Human
uaguauuaauuuuuuuuucauag

SEQ ID NO: 319576 - RNA, 21 nt, Human
ucccucugggucggcaucucc

SEQ ID NO: 319577 - RNA, 18 nt, Human
ucgccggagcagccggaa

SEQ ID NO: 319578 - RNA, 20 nt, Human
ugcagcaaguuuauccaugc

SEQ ID NO: 319579 - RNA, 22 nt, Human
ugcagcaaguuuauccaugcau

SEQ ID NO: 319580 - RNA, 18 nt, Human
uggaggccgggggugcgg

SEQ ID NO: 319581 - RNA, 30 nt, Human
uuuuuuuuuuuaaacaaaaaagguaacuuu

SEQ ID NO: 319582 - RNA, 18 nt, Human
ccccggcgcgcggcccgc

SEQ ID NO: 319583 - RNA, 22 nt, Human
ccgcuccggccugcucggcucc

SEQ ID NO: 319584 - RNA, 18 nt, Human
ccuuuuuaaaaacuaaga

SEQ ID NO: 319585 - RNA, 19 nt, Human
cgcuccggccugcucggcu

SEQ ID NO: 319586 - RNA, 22 nt, Human
cgggcgcggcgcgacccucccc

SEQ ID NO: 319587 - RNA, 27 nt, Human
cucucgggcaggggcaggggcaggggc

SEQ ID NO: 319588 - RNA, 20 nt, Human
gaggagcgcgcgugcgcccc

SEQ ID NO: 319589 - RNA, 24 nt, Human
gccgcccgccagggguccccgcgc

SEQ ID NO: 319590 - RNA, 20 nt, Human
ggagggaggggcggccagag

SEQ ID NO: 319591 - RNA, 18 nt, Human
ggcaaaucccaaaggccu

SEQ ID NO: 319592 - RNA, 18 nt, Human
ggcaggggcaggggcagg

SEQ ID NO: 319593 - RNA, 24 nt, Human
ggcaggggcaggggcaggggaggg

SEQ ID NO: 319594 - RNA, 21 nt, Human
ggcgcggcgcgacccuccccg

SEQ ID NO: 319595 - RNA, 19 nt, Human
gggcaggggcaggggaggg

SEQ ID NO: 319596 - RNA, 21 nt, Human
gggcaggggcaggggcagggg

SEQ ID NO: 319597 - RNA, 21 nt, Human
gggcaggggcaggggcagggg

SEQ ID NO: 319598 - RNA, 22 nt, Human
gggcaggggcaggggcaggggc

SEQ ID NO: 319599 - RNA, 21 nt, Human
ggggagggggcgggcgcggcg

SEQ ID NO: 319600 - RNA, 22 nt, Human
aagaaaaacacugauuugcaaa

SEQ ID NO: 319601 - RNA, 20 nt, Human
acagaguauuauaagaaaga

SEQ ID NO: 319602 - RNA, 19 nt, Human
acucagauacaucaacagu

SEQ ID NO: 319603 - RNA, 23 nt, Human
agaaaaacacugauuugcaaagg

SEQ ID NO: 319604 - RNA, 25 nt, Human
agacggaaaauaaaaacuuuccgga

SEQ ID NO: 319605 - RNA, 23 nt, Human
aggaggaggaggagggcgaggag

SEQ ID NO: 319606 - RNA, 22 nt, Human
aggaggaggagggcgaggagaa

SEQ ID NO: 319607 - RNA, 21 nt, Human
aggcauuuaggcuuaagagca

SEQ ID NO: 319608 - RNA, 19 nt, Human
augggacacaccaaacaga

SEQ ID NO: 319609 - RNA, 21 nt, Human
cacaccaaacagaacuacuuc

SEQ ID NO: 319610 - RNA, 23 nt, Human
cacaccaaacagaacuacuucac

SEQ ID NO: 319611 - RNA, 21 nt, Human
cacagauacauucugucucuu

SEQ ID NO: 319612 - RNA, 19 nt, Human
cacagcuaggugcauuguc

SEQ ID NO: 319613 - RNA, 22 nt, Human
ccaggcaggcaaaggauucaaa

SEQ ID NO: 319614 - RNA, 19 nt, Human
cccacauggguuuuggagu

SEQ ID NO: 319615 - RNA, 24 nt, Human
cccuccucauucauuuuuuuccca

SEQ ID NO: 319616 - RNA, 18 nt, Human
cgaggaggaggaggaggg

SEQ ID NO: 319617 - RNA, 18 nt, Human
cuaaggcauuuaggcuua

SEQ ID NO: 319618 - RNA, 25 nt, Human
cuacccuccucauucauuuuuuucc

SEQ ID NO: 319619 - RNA, 19 nt, Human
gaggaggaggagagaagga

SEQ ID NO: 319620 - RNA, 19 nt, Human
gaggggagggcgaggagga

SEQ ID NO: 319621 - RNA, 19 nt, Human
gaucgggaggggagggcga

SEQ ID NO: 319622 - RNA, 18 nt, Human
gcaaaggauucaaaacua

SEQ ID NO: 319623 - RNA, 20 nt, Human
gcggcgcggcagcaggaaag

SEQ ID NO: 319624 - RNA, 20 nt, Human
gggcagcggagggcgggggc

SEQ ID NO: 319625 - RNA, 21 nt, Human
gggcgcagggccgggcagcgg

SEQ ID NO: 319626 - RNA, 18 nt, Human
ggggaugaggaucgggag

SEQ ID NO: 319627 - RNA, 22 nt, Human
ggugcauugucuugaguuuaaa

SEQ ID NO: 319628 - RNA, 23 nt, Human
guuucagggaacuuuuguuaaua

SEQ ID NO: 319629 - RNA, 23 nt, Human
uaaauauacugaggcacaccagu

SEQ ID NO: 319630 - RNA, 18 nt, Human
uaacaaguuucguguuuc

SEQ ID NO: 319631 - RNA, 25 nt, Human
uaagaaaaacacugauuugcaaagg

SEQ ID NO: 319632 - RNA, 19 nt, Human
uaagagcacuaggucuugc

SEQ ID NO: 319633 - RNA, 24 nt, Human
uacaacagaguauuauaagaaaga

SEQ ID NO: 319634 - RNA, 20 nt, Human
uacaaugacaacaccaaugg

SEQ ID NO: 319635 - RNA, 18 nt, Human
uaggucuugcacagcuag

SEQ ID NO: 319636 - RNA, 23 nt, Human
ucccacauggguuuuggaguugu

SEQ ID NO: 319637 - RNA, 19 nt, Human
ucccugggcugggggaggg

SEQ ID NO: 319638 - RNA, 20 nt, Human
ucccugggcugggggagggc

SEQ ID NO: 319639 - RNA, 21 nt, Human
ucccugggcugggggagggca

SEQ ID NO: 319640 - RNA, 23 nt, Human
uccucauucauuuuuuucccaca

SEQ ID NO: 319641 - RNA, 19 nt, Human
ugaaaaauacacaaaggug

SEQ ID NO: 319642 - RNA, 24 nt, Human
ugaggcacaccaggcaggcaaagg

SEQ ID NO: 319643 - RNA, 21 nt, Human
ugcaaaggcacaguggagaca

SEQ ID NO: 319644 - RNA, 19 nt, Human
ugggcugggggagggcaag

SEQ ID NO: 319645 - RNA, 20 nt, Human
uucacaauaacaaguuucgu

SEQ ID NO: 319646 - RNA, 23 nt, Human
uucauagaacacuggaaauaauc

SEQ ID NO: 319647 - RNA, 23 nt, Human
aaaaaaacaaacaaacaaacaua

SEQ ID NO: 319648 - RNA, 18 nt, Human
aaaacccuucaaugccuc

SEQ ID NO: 319649 - RNA, 22 nt, Human
aaaauaacagcaguaaagaaaa

SEQ ID NO: 319650 - RNA, 23 nt, Human
aaacaaacaaacaaacauauauu

SEQ ID NO: 319651 - RNA, 18 nt, Human
aacacaaccagguaaaac

SEQ ID NO: 319652 - RNA, 22 nt, Human
aacuucuuuauuuccucuguua

SEQ ID NO: 319653 - RNA, 20 nt, Human
aagcccaauaggcuagggga

SEQ ID NO: 319654 - RNA, 19 nt, Human
aauaacagcaguaaagaaa

SEQ ID NO: 319655 - RNA, 18 nt, Human
aauugacuuuaaaacacu

SEQ ID NO: 319656 - RNA, 21 nt, Human
acagcaguaaagaaaaugacc

SEQ ID NO: 319657 - RNA, 25 nt, Human
acagcaguaaagaaaaugaccgcac

SEQ ID NO: 319658 - RNA, 19 nt, Human
acaggagacuagcuucagg

SEQ ID NO: 319659 - RNA, 21 nt, Human
acaguagauugauugccuagu

SEQ ID NO: 319660 - RNA, 23 nt, Human
acugacccugcacuggcccuggc

SEQ ID NO: 319661 - RNA, 25 nt, Human
agaaaaaaggauacuguuugcuaua

SEQ ID NO: 319662 - RNA, 25 nt, Human
agaagaaaaaaaaaaagguuuacaa

SEQ ID NO: 319663 - RNA, 22 nt, Human
agacaggagacuagcuucaggg

SEQ ID NO: 319664 - RNA, 25 nt, Human
agaguagcagagcaacuccaaaaag

SEQ ID NO: 319665 - RNA, 22 nt, Human
aggauuuaacaucacugagcua

SEQ ID NO: 319666 - RNA, 19 nt, Human
auauauauauauauauaua

SEQ ID NO: 319667 - RNA, 21 nt, Human
auaucagucccaucaaaaagc

SEQ ID NO: 319668 - RNA, 21 nt, Human
auauuaaaaauguacugaaca

SEQ ID NO: 319669 - RNA, 21 nt, Human
auggcugcugugaggguaaac

SEQ ID NO: 319670 - RNA, 31 nt, Human
auuuauauuuuuuuauauauauauauauauu

SEQ ID NO: 319671 - RNA, 20 nt, Human
caaaaccaguuauugcuuag

SEQ ID NO: 319672 - RNA, 22 nt, Human
caaauguccucauuuucauucu

SEQ ID NO: 319673 - RNA, 21 nt, Human
caacaaauacaaagagugcaa

SEQ ID NO: 319674 - RNA, 21 nt, Human
caacacugugacaaagggaga

SEQ ID NO: 319675 - RNA, 23 nt, Human
caacucagcacuuagaccagcag

SEQ ID NO: 319676 - RNA, 24 nt, Human
cacauccccucaaacugcuuaaaa

SEQ ID NO: 319677 - RNA, 22 nt, Human
caccuucucaaauguccacacc

SEQ ID NO: 319678 - RNA, 23 nt, Human
cacuccuacacauccccucaaac

SEQ ID NO: 319679 - RNA, 24 nt, Human
cacuggcccuggcuaaaaagcaga

SEQ ID NO: 319680 - RNA, 21 nt, Human
cagaacauucuuuuuuuuuuu

SEQ ID NO: 319681 - RNA, 19 nt, Human
cagcaaaauaucaguccau

SEQ ID NO: 319682 - RNA, 20 nt, Human
cagcacugcagaugacaauc

SEQ ID NO: 319683 - RNA, 22 nt, Human
cagcagaguggagcuaugcaaa

SEQ ID NO: 319684 - RNA, 19 nt, Human
cagcaggauagaguugacg

SEQ ID NO: 319685 - RNA, 20 nt, Human
cagcaguacucuuccuuuug

SEQ ID NO: 319686 - RNA, 19 nt, Human
caggaaauacauauugaau

SEQ ID NO: 319687 - RNA, 19 nt, Human
cagugccuuuacaaaauuu

SEQ ID NO: 319688 - RNA, 18 nt, Human
caguuucccgccuguacc

SEQ ID NO: 319689 - RNA, 18 nt, Human
cauauuuagcagcagagu

SEQ ID NO: 319690 - RNA, 18 nt, Human
ccaggccaacauaacuaa

SEQ ID NO: 319691 - RNA, 22 nt, Human
cccagugugcuuuuucuaggca

SEQ ID NO: 319692 - RNA, 21 nt, Human
ccccucaaacugcuuaaaaua

SEQ ID NO: 319693 - RNA, 21 nt, Human
ccuacucauuaugaacuacag

SEQ ID NO: 319694 - RNA, 27 nt, Human
ccucaaacugcuuaaaauaauugacuu

SEQ ID NO: 319695 - RNA, 21 nt, Human
ccuuaaaaaaacaaacaaaca

SEQ ID NO: 319696 - RNA, 24 nt, Human
ccuuaaaaaaacaaacaaacaaac

SEQ ID NO: 319697 - RNA, 18 nt, Human
ccuugccucaguuuucuu

SEQ ID NO: 319698 - RNA, 18 nt, Human
cuagacaggagacuagcu

SEQ ID NO: 319699 - RNA, 19 nt, Human
cuccuacacauccccucaa

SEQ ID NO: 319700 - RNA, 26 nt, Human
cugacugaacccuagguaaagauaaa

SEQ ID NO: 319701 - RNA, 21 nt, Human
cugcagaugacaaucuacgaa

SEQ ID NO: 319702 - RNA, 23 nt, Human
gaacaugcauauuuagcagcaga

SEQ ID NO: 319703 - RNA, 21 nt, Human
gaacugccgacagaccugcca

SEQ ID NO: 319704 - RNA, 22 nt, Human
gaagucauccucuaucacaggg

SEQ ID NO: 319705 - RNA, 19 nt, Human
gacaaagggagaggcaaga

SEQ ID NO: 319706 - RNA, 19 nt, Human
gaccuaaaaaagaaaggua

SEQ ID NO: 319707 - RNA, 21 nt, Human
gaguccaagaccucagcaaaa

SEQ ID NO: 319708 - RNA, 21 nt, Human
gauacuuauacuagaaauagg

SEQ ID NO: 319709 - RNA, 23 nt, Human
gaugacaaucuacgaagaacaag

SEQ ID NO: 319710 - RNA, 18 nt, Human
gcagcacugcagaugaca

SEQ ID NO: 319711 - RNA, 21 nt, Human
ggagucuugauugaccuaaaa

SEQ ID NO: 319712 - RNA, 19 nt, Human
guaaaacagcccagugugc

SEQ ID NO: 319713 - RNA, 20 nt, Human
guaaagauaaauuguguaaa

SEQ ID NO: 319714 - RNA, 23 nt, Human
guucuuuuacuuuuguuagagug

SEQ ID NO: 319715 - RNA, 25 nt, Human
uaaaagaacuuagaacacaggagua

SEQ ID NO: 319716 - RNA, 18 nt, Human
uaaaauaacacaaccagg

SEQ ID NO: 319717 - RNA, 23 nt, Human
uaaaauaacagcaguaaagaaaa

SEQ ID NO: 319718 - RNA, 21 nt, Human
uaaagacaaaaaguuaugcag

SEQ ID NO: 319719 - RNA, 23 nt, Human
uaaagccgagaucugcaccugcu

SEQ ID NO: 319720 - RNA, 22 nt, Human
uaacaacaaauacaaagagugc

SEQ ID NO: 319721 - RNA, 18 nt, Human
uaacagcaguaaagaaag

SEQ ID NO: 319722 - RNA, 24 nt, Human
uaagaugaagcucauaaugacuua

SEQ ID NO: 319723 - RNA, 24 nt, Human
uacaaaauuuuuagaaaacuucuu

SEQ ID NO: 319724 - RNA, 19 nt, Human
uaccaagaggggaauguuu

SEQ ID NO: 319725 - RNA, 23 nt, Human
uaccaagaggggaauguuuccug

SEQ ID NO: 319726 - RNA, 19 nt, Human
uagaccagcaguacucuuc

SEQ ID NO: 319727 - RNA, 18 nt, Human
uagcagcagaguggagcu

SEQ ID NO: 319728 - RNA, 18 nt, Human
uauauauauauauauaua

SEQ ID NO: 319729 - RNA, 19 nt, Human
uauauauauauauauauau

SEQ ID NO: 319730 - RNA, 21 nt, Human
uauuaaaaauguacugaacag

SEQ ID NO: 319731 - RNA, 23 nt, Human
uauucaguacuuuuccuuugguu

SEQ ID NO: 319732 - RNA, 20 nt, Human
ucaaggaguugaaugcccca

SEQ ID NO: 319733 - RNA, 25 nt, Human
ucacgacaacacugugacaaaggag

SEQ ID NO: 319734 - RNA, 19 nt, Human
ucacugagcuauccucagc

SEQ ID NO: 319735 - RNA, 23 nt, Human
ucaguccauaaaaugaaaucccc

SEQ ID NO: 319736 - RNA, 23 nt, Human
uccacaccuuaaaucaccuucuc

SEQ ID NO: 319737 - RNA, 22 nt, Human
uccacuccuacacauccccuca

SEQ ID NO: 319738 - RNA, 19 nt, Human
ucccuaauuaucuuagaag

SEQ ID NO: 319739 - RNA, 24 nt, Human
ucccuaauuaucuuagaagcuguu

SEQ ID NO: 319740 - RNA, 21 nt, Human
uccuuaaaaaaacaaacaaac

SEQ ID NO: 319741 - RNA, 22 nt, Human
ucucaaauguccacaccuuaaa

SEQ ID NO: 319742 - RNA, 20 nt, Human
ucugaucuucacgacaacac

SEQ ID NO: 319743 - RNA, 22 nt, Human
ucuuuauuuccucuguuaagcc

SEQ ID NO: 319744 - RNA, 20 nt, Human
ugacugaacccuagguaaag

SEQ ID NO: 319745 - RNA, 21 nt, Human
ugauauaaacagacuuuggug

SEQ ID NO: 319746 - RNA, 19 nt, Human
uggaaaaguauggugauag

SEQ ID NO: 319747 - RNA, 18 nt, Human
uggagaagaaaaaaaaaa

SEQ ID NO: 319748 - RNA, 23 nt, Human
uggagcuaugcaaagacauacaa

SEQ ID NO: 319749 - RNA, 18 nt, Human
uggagucuugauugaccu

SEQ ID NO: 319750 - RNA, 23 nt, Human
uggauauaaccaaaaaaauauua

SEQ ID NO: 319751 - RNA, 24 nt, Human
uggcuaaaaagcagaaauuacuga

SEQ ID NO: 319752 - RNA, 24 nt, Human
uggucucaaauacuacuaacuguu

SEQ ID NO: 319753 - RNA, 22 nt, Human
uguaacaucauuugucccuaau

SEQ ID NO: 319754 - RNA, 20 nt, Human
ugucaaggugaaauccucuu

SEQ ID NO: 319755 - RNA, 23 nt, Human
ugucagucagaacaugcauauuu

SEQ ID NO: 319756 - RNA, 18 nt, Human
uguugauauaaacagacu

SEQ ID NO: 319757 - RNA, 21 nt, Human
uguuugaaauuuggcaguaag

SEQ ID NO: 319758 - RNA, 24 nt, Human
uuaaaacacuccagauaucugcaa

SEQ ID NO: 319759 - RNA, 27 nt, Human
uuaaaauaacagcaguaaagaaaauga

SEQ ID NO: 319760 - RNA, 22 nt, Human
uuaaauagcuggcugcuggagc

SEQ ID NO: 319761 - RNA, 18 nt, Human
uuacugacugaacccuag

SEQ ID NO: 319762 - RNA, 20 nt, Human
uuaggcauuuaacaacaaau

SEQ ID NO: 319763 - RNA, 20 nt, Human
uucacgacaacacugugaca

SEQ ID NO: 319764 - RNA, 21 nt, Human
uucacgacaacacugugacaa

SEQ ID NO: 319765 - RNA, 24 nt, Human
uuccuuugguuuacuaauuugaua

SEQ ID NO: 319766 - RNA, 23 nt, Human
uugaccuaaaaaagaaagguaaa

SEQ ID NO: 319767 - RNA, 19 nt, Human
uuggugaaacugggaaguc

SEQ ID NO: 319768 - RNA, 20 nt, Human
uuggugaaacugggaaguca

SEQ ID NO: 319769 - RNA, 21 nt, Human
uuuacuuuuguuagaguggag

SEQ ID NO: 319770 - RNA, 19 nt, Human
uuuauauauauauauauau

SEQ ID NO: 319771 - RNA, 20 nt, Human
uuucagucuguacuugucuc

SEQ ID NO: 319772 - RNA, 21 nt, Human
uuuuauauauauauauauauu

SEQ ID NO: 319773 - RNA, 19 nt, Human
uuuucauucuggggggaug

SEQ ID NO: 319774 - RNA, 20 nt, Human
aaaaaggaacccaagcagug

SEQ ID NO: 319775 - RNA, 24 nt, Human
aaaaccuauccagggcuggccccc

SEQ ID NO: 319776 - RNA, 21 nt, Human
aaccuauccagggcuggcccc

SEQ ID NO: 319777 - RNA, 21 nt, Human
acuucaggagcgucugugaga

SEQ ID NO: 319778 - RNA, 19 nt, Human
agaaggcaaauucuuuccu

SEQ ID NO: 319779 - RNA, 18 nt, Human
agacacacggcaucguca

SEQ ID NO: 319780 - RNA, 20 nt, Human
agugauuacuugucugcggc

SEQ ID NO: 319781 - RNA, 21 nt, Human
auccagggcuggcccccagca

SEQ ID NO: 319782 - RNA, 21 nt, Human
caggagacgagacacacggca

SEQ ID NO: 319783 - RNA, 20 nt, Human
ccaagcagugucucuugaac

SEQ ID NO: 319784 - RNA, 21 nt, Human
cccccagcauuuauacauccc

SEQ ID NO: 319785 - RNA, 23 nt, Human
uaaaaaccuauccagggcuggcc

SEQ ID NO: 319786 - RNA, 21 nt, Human
uaucaagucuugaaaccuuuc

SEQ ID NO: 319787 - RNA, 18 nt, Human
ucacaugggggcgaacgg

SEQ ID NO: 319788 - RNA, 19 nt, Human
ucagucuuuauuguugagu

SEQ ID NO: 319789 - RNA, 24 nt, Human
uccaagugcggagacccaucuuuc

SEQ ID NO: 319790 - RNA, 24 nt, Human
ugcuacagauaaagucacaugggg

SEQ ID NO: 319791 - RNA, 23 nt, Human
uggcgcccaggugaagagccaua

SEQ ID NO: 319792 - RNA, 19 nt, Human
uguuucuuucuuuuuccaa

SEQ ID NO: 319793 - RNA, 26 nt, Human
uuucugcuacagauaaaggacaucgg

SEQ ID NO: 319794 - RNA, 24 nt, Human
acgaagccccacaaagguccugcc

SEQ ID NO: 319795 - RNA, 18 nt, Human
agcaaaggucaguaucca

SEQ ID NO: 319796 - RNA, 28 nt, Human
aguauccaccgcaccccucuuguccagc

SEQ ID NO: 319797 - RNA, 20 nt, Human
caccgcaccccucuugucca

SEQ ID NO: 319798 - RNA, 22 nt, Human
caccgcaccccucuuguccagc

SEQ ID NO: 319799 - RNA, 19 nt, Human
cagccccgccugggcccca

SEQ ID NO: 319800 - RNA, 27 nt, Human
cccacaaagguccugccgccacagagg

SEQ ID NO: 319801 - RNA, 19 nt, Human
cccgaaacggguucugugg

SEQ ID NO: 319802 - RNA, 18 nt, Human
cccgccugggccccagag

SEQ ID NO: 319803 - RNA, 18 nt, Human
ccugggccccagagcagg

SEQ ID NO: 319804 - RNA, 22 nt, Human
cggagcaaaggucaguauccac

SEQ ID NO: 319805 - RNA, 23 nt, Human
cggagcaaaggucaguauccacc

SEQ ID NO: 319806 - RNA, 21 nt, Human
cucaccagacgcucugaggcc

SEQ ID NO: 319807 - RNA, 22 nt, Human
cucaccagacgcucugaggccc

SEQ ID NO: 319808 - RNA, 23 nt, Human
cuugagguucucugcgcccaucc

SEQ ID NO: 319809 - RNA, 19 nt, Human
gacagggcuggggguggug

SEQ ID NO: 319810 - RNA, 20 nt, Human
gacagggcuggggguggugg

SEQ ID NO: 319811 - RNA, 21 nt, Human
gcaggcccagaggggcgggug

SEQ ID NO: 319812 - RNA, 18 nt, Human
gcagggacagggcugggg

SEQ ID NO: 319813 - RNA, 19 nt, Human
gccacagaggagggcaaca

SEQ ID NO: 319814 - RNA, 23 nt, Human
gccggagcaaaggucaguaucca

SEQ ID NO: 319815 - RNA, 19 nt, Human
ggagggcaacagagccaca

SEQ ID NO: 319816 - RNA, 21 nt, Human
ggguggcagggacagggcugg

SEQ ID NO: 319817 - RNA, 20 nt, Human
gucaagucauucacuagucc

SEQ ID NO: 319818 - RNA, 20 nt, Human
uccccacuaggagggguggc

SEQ ID NO: 319819 - RNA, 19 nt, Human
ucuuuggaggcuguugggg

SEQ ID NO: 319820 - RNA, 22 nt, Human
ugaggucacaggucaagucauu

SEQ ID NO: 319821 - RNA, 19 nt, Human
ugcaggggcuggcuucaug

SEQ ID NO: 319822 - RNA, 19 nt, Human
uggcagggacagggcuggg

SEQ ID NO: 319823 - RNA, 22 nt, Human
uggcagggacagggcugggggu

SEQ ID NO: 319824 - RNA, 24 nt, Human
uggcagggacagggcugggggugg

SEQ ID NO: 319825 - RNA, 18 nt, Human
uggggccugggaaugugg

SEQ ID NO: 319826 - RNA, 22 nt, Human
uggggggcccagggagggcaag

SEQ ID NO: 319827 - RNA, 20 nt, Human
uuguauugaggucacagguc

SEQ ID NO: 319828 - RNA, 20 nt, Human
aaaaaaaacaaacaaauauc

SEQ ID NO: 319829 - RNA, 18 nt, Human
aaaggcuuugcuucagga

SEQ ID NO: 319830 - RNA, 20 nt, Human
acacugacauuuacagauga

SEQ ID NO: 319831 - RNA, 21 nt, Human
acucuuauacuacauugaagu

SEQ ID NO: 319832 - RNA, 19 nt, Human
acuuccaggaccaucuuua

SEQ ID NO: 319833 - RNA, 20 nt, Human
agaaaacauguaaagagcac

SEQ ID NO: 319834 - RNA, 22 nt, Human
agcuguaauagaucccacagcc

SEQ ID NO: 319835 - RNA, 21 nt, Human
aggcagaagcagguaagagaa

SEQ ID NO: 319836 - RNA, 26 nt, Human
agguuugcuggcagcugaccacaggg

SEQ ID NO: 319837 - RNA, 18 nt, Human
aguaugaaauugcagaau

SEQ ID NO: 319838 - RNA, 24 nt, Human
aucaauuuuuaaaaucugucagaa

SEQ ID NO: 319839 - RNA, 18 nt, Human
aucaugcauuauuuuuca

SEQ ID NO: 319840 - RNA, 23 nt, Human
caacugcuauuuuagguucaaac

SEQ ID NO: 319841 - RNA, 25 nt, Human
cacugcugggaaauaaaaucaugaa

SEQ ID NO: 319842 - RNA, 21 nt, Human
cagaaaaagcugucuucagca

SEQ ID NO: 319843 - RNA, 18 nt, Human
cagaagcagguaagagaa

SEQ ID NO: 319844 - RNA, 26 nt, Human
cagcaaggcagaagcagguaagagaa

SEQ ID NO: 319845 - RNA, 23 nt, Human
cagcuuauucacuaaaagguaau

SEQ ID NO: 319846 - RNA, 24 nt, Human
caggaccaccaugucaacugcuau

SEQ ID NO: 319847 - RNA, 22 nt, Human
caggccuaagacaagaagcuag

SEQ ID NO: 319848 - RNA, 25 nt, Human
caucuuuaagcacaauauuuuaaaa

SEQ ID NO: 319849 - RNA, 18 nt, Human
cccacuccacccuacccc

SEQ ID NO: 319850 - RNA, 24 nt, Human
cccacuccacccuaccccaagcau

SEQ ID NO: 319851 - RNA, 24 nt, Human
ccccacuccacccuaccccaagca

SEQ ID NO: 319852 - RNA, 21 nt, Human
ccuccgggcugccgggggcuc

SEQ ID NO: 319853 - RNA, 26 nt, Human
ccugccgcugcuccgcgucuugaggc

SEQ ID NO: 319854 - RNA, 25 nt, Human
cuccccacuccacccuaccccaagc

SEQ ID NO: 319855 - RNA, 25 nt, Human
cuccuccgggcugccgggggcuccc

SEQ ID NO: 319856 - RNA, 22 nt, Human
cuccuuccugccgcugcuccgc

SEQ ID NO: 319857 - RNA, 22 nt, Human
cucuagacugacuauguuguau

SEQ ID NO: 319858 - RNA, 20 nt, Human
gaauaaaguaaaucagcuug

SEQ ID NO: 319859 - RNA, 18 nt, Human
gacaugaacucugugacc

SEQ ID NO: 319860 - RNA, 20 nt, Human
gcugcuagucauuuacuucc

SEQ ID NO: 319861 - RNA, 22 nt, Human
guaaauauuaacaacuuugacu

SEQ ID NO: 319862 - RNA, 24 nt, Human
uaaaagggaauacuuuaagccuca

SEQ ID NO: 319863 - RNA, 19 nt, Human
uaaaaucugucagaaagaa

SEQ ID NO: 319864 - RNA, 24 nt, Human
uaauaauagucaacuggcaugcca

SEQ ID NO: 319865 - RNA, 18 nt, Human
uaauagucaacuggcaug

SEQ ID NO: 319866 - RNA, 21 nt, Human
uagugaaaaugcuugaguuuc

SEQ ID NO: 319867 - RNA, 18 nt, Human
uaucaaaaaaaacaaaca

SEQ ID NO: 319868 - RNA, 24 nt, Human
uaucaaaaaaaacaaacaaauauc

SEQ ID NO: 319869 - RNA, 21 nt, Human
uauuuauuuuuuggauggguu

SEQ ID NO: 319870 - RNA, 19 nt, Human
uauuuuuauaaaagggaau

SEQ ID NO: 319871 - RNA, 25 nt, Human
ucaaaaaaaacaaacaaauaucaug

SEQ ID NO: 319872 - RNA, 22 nt, Human
ucagaaaaagcugucuucagca

SEQ ID NO: 319873 - RNA, 21 nt, Human
ucagguuugcuggcagcugug

SEQ ID NO: 319874 - RNA, 19 nt, Human
uccccacuccacccuaccc

SEQ ID NO: 319875 - RNA, 26 nt, Human
ucccuccccacuccacccuaccccaa

SEQ ID NO: 319876 - RNA, 21 nt, Human
uccgggcugccgggggcuccu

SEQ ID NO: 319877 - RNA, 22 nt, Human
ucuccaugugaauaaaguaaau

SEQ ID NO: 319878 - RNA, 24 nt, Human
ucucugaccucaaauaaguaaugu

SEQ ID NO: 319879 - RNA, 18 nt, Human
ucuguuuuucauucuugu

SEQ ID NO: 319880 - RNA, 22 nt, Human
ugaaaugguuuugugaauugcu

SEQ ID NO: 319881 - RNA, 27 nt, Human
ugaagaaagggaauagcccaguuucug

SEQ ID NO: 319882 - RNA, 19 nt, Human
ugaauugcuuuuuuucccc

SEQ ID NO: 319883 - RNA, 22 nt, Human
ugccaauuuaucaaaaaaaaca

SEQ ID NO: 319884 - RNA, 19 nt, Human
ugcuucaggaccaccaugu

SEQ ID NO: 319885 - RNA, 21 nt, Human
ugcuugaguuucuggcuacac

SEQ ID NO: 319886 - RNA, 20 nt, Human
uggugaccccgagcacuaau

SEQ ID NO: 319887 - RNA, 19 nt, Human
uguuuuguucucugaccuc

SEQ ID NO: 319888 - RNA, 21 nt, Human
uguuuuuugguucaggccuaa

SEQ ID NO: 319889 - RNA, 20 nt, Human
uuaaucccuccccacuccac

SEQ ID NO: 319890 - RNA, 22 nt, Human
uuaaucccuccccacuccaccc

SEQ ID NO: 319891 - RNA, 21 nt, Human
uuagacaaguauauggacuca

SEQ ID NO: 319892 - RNA, 25 nt, Human
uuaguuagacaaguauauggacuca

SEQ ID NO: 319893 - RNA, 21 nt, Human
uucaggccuaagacaagaagc

SEQ ID NO: 319894 - RNA, 21 nt, Human
uuuauaauuaccuuugucucu

SEQ ID NO: 319895 - RNA, 24 nt, Human
uuucuacuucuuuuauuucuguuu

SEQ ID NO: 319896 - RNA, 23 nt, Human
uuuuauuuauuuuuuggaugggu

SEQ ID NO: 319897 - RNA, 23 nt, Human
uuuuuguuuguuuguuguuuuuu

SEQ ID NO: 319898 - RNA, 25 nt, Human
aaaaauuaacgaugauucuauacaa

SEQ ID NO: 319899 - RNA, 18 nt, Human
aaaagcaggugaaaguca

SEQ ID NO: 319900 - RNA, 20 nt, Human
aaucuugccucucccuggac

SEQ ID NO: 319901 - RNA, 23 nt, Human
accaccauuuuaagauaccacca

SEQ ID NO: 319902 - RNA, 19 nt, Human
acuacagugcaucaacauu

SEQ ID NO: 319903 - RNA, 24 nt, Human
agauuuucaaagagucagcagucu

SEQ ID NO: 319904 - RNA, 24 nt, Human
auaauacucugaaaagaaaauaau

SEQ ID NO: 319905 - RNA, 18 nt, Human
auccacaccauucuccuc

SEQ ID NO: 319906 - RNA, 18 nt, Human
caaucuugccucucccug

SEQ ID NO: 319907 - RNA, 20 nt, Human
cacugaucauaaaggagaga

SEQ ID NO: 319908 - RNA, 19 nt, Human
cagaaccauauccacacca

SEQ ID NO: 319909 - RNA, 20 nt, Human
cagcagucuuaccuacuaga

SEQ ID NO: 319910 - RNA, 26 nt, Human
caggaauuucuuuucccuaauggucu

SEQ ID NO: 319911 - RNA, 23 nt, Human
caguugagaaaagcaaauaaugu

SEQ ID NO: 319912 - RNA, 20 nt, Human
cauucuccucuucccauugu

SEQ ID NO: 319913 - RNA, 22 nt, Human
ccacaccauucuccucuuccca

SEQ ID NO: 319914 - RNA, 19 nt, Human
cccaauagaaaauaauuac

SEQ ID NO: 319915 - RNA, 20 nt, Human
cuagaauauauuuuccuuuc

SEQ ID NO: 319916 - RNA, 22 nt, Human
cucccuggacucaugucagagg

SEQ ID NO: 319917 - RNA, 24 nt, Human
cugaucauaaaggagagaaaauau

SEQ ID NO: 319918 - RNA, 18 nt, Human
gaaagucaggagguucug

SEQ ID NO: 319919 - RNA, 20 nt, Human
gauaugauuggaauggaaca

SEQ ID NO: 319920 - RNA, 24 nt, Human
gcaaaccaccauuuuaagauacca

SEQ ID NO: 319921 - RNA, 20 nt, Human
uaaaagcaggugaaagucag

SEQ ID NO: 319922 - RNA, 20 nt, Human
uaacaaggacuuucgaaaag

SEQ ID NO: 319923 - RNA, 23 nt, Human
uaagauaccaccaugcuuauaug

SEQ ID NO: 319924 - RNA, 18 nt, Human
uacugggaggcaaaagcc

SEQ ID NO: 319925 - RNA, 22 nt, Human
uagcaguugagaaaagcaaaua

SEQ ID NO: 319926 - RNA, 19 nt, Human
uagcaucauuuaaccacac

SEQ ID NO: 319927 - RNA, 18 nt, Human
uaucacagaauuuuucaa

SEQ ID NO: 319928 - RNA, 25 nt, Human
uaucacugaucauaaaggagagaaa

SEQ ID NO: 319929 - RNA, 20 nt, Human
ucaacauuugucaaugggau

SEQ ID NO: 319930 - RNA, 25 nt, Human
ucaccauuguuuuuccuucuauuug

SEQ ID NO: 319931 - RNA, 19 nt, Human
ucccuggacucaugucaga

SEQ ID NO: 319932 - RNA, 19 nt, Human
ucuaaguuccccaauagaa

SEQ ID NO: 319933 - RNA, 21 nt, Human
ucuucuguagaguacaggcag

SEQ ID NO: 319934 - RNA, 21 nt, Human
ugacuggauugauugauucag

SEQ ID NO: 319935 - RNA, 23 nt, Human
ugagaaaagcaaauaauguaaua

SEQ ID NO: 319936 - RNA, 23 nt, Human
ugagagcuggggagcucuccaaa

SEQ ID NO: 319937 - RNA, 23 nt, Human
ugcagaaaaaacugccacuuuaa

SEQ ID NO: 319938 - RNA, 20 nt, Human
uggaaaggaaaaugggguag

SEQ ID NO: 319939 - RNA, 19 nt, Human
uggaacaauagauugcaga

SEQ ID NO: 319940 - RNA, 22 nt, Human
uggaacaauagauugcagaaaa

SEQ ID NO: 319941 - RNA, 24 nt, Human
uggaauggaacaauagauugcaga

SEQ ID NO: 319942 - RNA, 19 nt, Human
uuaguaguacucaaacgag

SEQ ID NO: 319943 - RNA, 24 nt, Human
uuuucuaaguuccccaauagaaaa

SEQ ID NO: 319944 - RNA, 21 nt, Human
aaaaaaaaaaagaauaaagag

SEQ ID NO: 319945 - RNA, 24 nt, Human
aaaaagaauaaagagaugagccgg

SEQ ID NO: 319946 - RNA, 20 nt, Human
aaaaauaguaaaaaauuaaa

SEQ ID NO: 319947 - RNA, 21 nt, Human
aaagagaaaaaagaaggcuua

SEQ ID NO: 319948 - RNA, 20 nt, Human
aacauggugaaacccugucu

SEQ ID NO: 319949 - RNA, 20 nt, Human
aacauggugaaacccugucu

SEQ ID NO: 319950 - RNA, 21 nt, Human
aacauggugaaacccugucuu

SEQ ID NO: 319951 - RNA, 22 nt, Human
aacugcauaucagaagcaggau

SEQ ID NO: 319952 - RNA, 22 nt, Human
aagcgguagaaauuuaauaaau

SEQ ID NO: 319953 - RNA, 24 nt, Human
aauaaagagaugagccaggaaaaa

SEQ ID NO: 319954 - RNA, 24 nt, Human
aaucacuugaacccaagaggcaga

SEQ ID NO: 319955 - RNA, 19 nt, Human
acagagcgagacucugucu

SEQ ID NO: 319956 - RNA, 24 nt, Human
accucgaugccucgaugaagauug

SEQ ID NO: 319957 - RNA, 24 nt, Human
acuugaggucaggaguuugagacc

SEQ ID NO: 319958 - RNA, 23 nt, Human
agaaaaaagaaggcuuaaaaaaa

SEQ ID NO: 319959 - RNA, 20 nt, Human
agaaguugcagugagccaag

SEQ ID NO: 319960 - RNA, 22 nt, Human
agacugugucauugcacuccag

SEQ ID NO: 319961 - RNA, 22 nt, Human
agagaagcaaaccugagucaga

SEQ ID NO: 319962 - RNA, 24 nt, Human
agcacuuugggaggccgaggcagg

SEQ ID NO: 319963 - RNA, 19 nt, Human
agcagauuuuagauaauuu

SEQ ID NO: 319964 - RNA, 22 nt, Human
agccuggccaacauggugaaac

SEQ ID NO: 319965 - RNA, 24 nt, Human
agccuggccaacauggugaaaccc

SEQ ID NO: 319966 - RNA, 24 nt, Human
agccugggcaacagagcgagacuc

SEQ ID NO: 319967 - RNA, 20 nt, Human
aggaguuugagaccagccug

SEQ ID NO: 319968 - RNA, 24 nt, Human
aggcagaaguugcagugagccaag

SEQ ID NO: 319969 - RNA, 18 nt, Human
aggcaggagaaucacuug

SEQ ID NO: 319970 - RNA, 23 nt, Human
aggcaggagaaucacuugaaccc

SEQ ID NO: 319971 - RNA, 24 nt, Human
aggcaggagaaucacuugaaccca

SEQ ID NO: 319972 - RNA, 26 nt, Human
aggcagguggauuacuugaggucagg

SEQ ID NO: 319973 - RNA, 21 nt, Human
aggccgaggcagguggauuac

SEQ ID NO: 319974 - RNA, 24 nt, Human
aggcugaggcaggagaaucacuug

SEQ ID NO: 319975 - RNA, 22 nt, Human
aguuggguggguggcacaugcc

SEQ ID NO: 319976 - RNA, 24 nt, Human
augccuguaauccagcuacucagg

SEQ ID NO: 319977 - RNA, 24 nt, Human
auuacuugaggucaggaguuugag

SEQ ID NO: 319978 - RNA, 24 nt, Human
auugcacuccagccugggcaacag

SEQ ID NO: 319979 - RNA, 22 nt, Human
auuugcuccagaaacugguaaa

SEQ ID NO: 319980 - RNA, 23 nt, Human
caaaaugcacgcagauaaucacg

SEQ ID NO: 319981 - RNA, 21 nt, Human
caacauggugaaacccugucu

SEQ ID NO: 319982 - RNA, 24 nt, Human
cacuccagccugggcaacagagcg

SEQ ID NO: 319983 - RNA, 20 nt, Human
cacuuuuuuuuuuuuuuuaa

SEQ ID NO: 319984 - RNA, 23 nt, Human
cacuuuuuuuuuuuuuuuaauga

SEQ ID NO: 319985 - RNA, 24 nt, Human
cagcacuuugggaggccgaggcag

SEQ ID NO: 319986 - RNA, 24 nt, Human
cagcacuuugggaggccgaggcag

SEQ ID NO: 319987 - RNA, 24 nt, Human
cagcuacucaggaggcugaggcag

SEQ ID NO: 319988 - RNA, 24 nt, Human
caggaggcugaggcaggagaauca

SEQ ID NO: 319989 - RNA, 21 nt, Human
caggauacuuuuucagaaggg

SEQ ID NO: 319990 - RNA, 24 nt, Human
cagguggauuacuugaggucagga

SEQ ID NO: 319991 - RNA, 24 nt, Human
caucccuguaaucccagcacuuug

SEQ ID NO: 319992 - RNA, 18 nt, Human
cauugcacuccagccugg

SEQ ID NO: 319993 - RNA, 19 nt, Human
cauugcacuccagccuggg

SEQ ID NO: 319994 - RNA, 19 nt, Human
cauugcacuccagccuggg

SEQ ID NO: 319995 - RNA, 20 nt, Human
cauugcacuccagccugggc

SEQ ID NO: 319996 - RNA, 21 nt, Human
cauugcacuccagccugggca

SEQ ID NO: 319997 - RNA, 22 nt, Human
cauugcacuccagccugggcaa

SEQ ID NO: 319998 - RNA, 23 nt, Human
cauugcacuccagccugggcaac

SEQ ID NO: 319999 - RNA, 24 nt, Human
cauugcacuccagccugggcaaca

SEQ ID NO: 320000 - RNA, 22 nt, Human
ccuggccaacauggugaaaccc

SEQ ID NO: 320001 - RNA, 24 nt, Human
ccuggccaacauggugaaacccug

SEQ ID NO: 320002 - RNA, 22 nt, Human
ccugggcaacagagcgagacuc

SEQ ID NO: 320003 - RNA, 18 nt, Human
ccugguuggaagcuuugu

SEQ ID NO: 320004 - RNA, 22 nt, Human
ccuguaaucccagcacuuuggg

SEQ ID NO: 320005 - RNA, 24 nt, Human
cgaggcagguggauuacuugaggu

SEQ ID NO: 320006 - RNA, 26 nt, Human
cgaggcagguggauuacuugagguca

SEQ ID NO: 320007 - RNA, 24 nt, Human
cucaucccuguaaucccagcacuu

SEQ ID NO: 320008 - RNA, 24 nt, Human
cuggccaacauggugaaacccugu

SEQ ID NO: 320009 - RNA, 22 nt, Human
gaagcuuuguccaaaaugcacu

SEQ ID NO: 320010 - RNA, 19 nt, Human
gaaucacuugaacccaaga

SEQ ID NO: 320011 - RNA, 23 nt, Human
gagaccagccuggccaacauggu

SEQ ID NO: 320012 - RNA, 24 nt, Human
gaugaggcugggcgcgguggcuca

SEQ ID NO: 320013 - RNA, 19 nt, Human
gauggaagaacugcuaaag

SEQ ID NO: 320014 - RNA, 22 nt, Human
gauuacuugaggucaggaguuu

SEQ ID NO: 320015 - RNA, 24 nt, Human
gauuacuugaggucaggaguuuga

SEQ ID NO: 320016 - RNA, 23 nt, Human
gcaagucacaaaguaugagcaaa

SEQ ID NO: 320017 - RNA, 24 nt, Human
gcacuccagccugggcaacagagc

SEQ ID NO: 320018 - RNA, 22 nt, Human
gcaggagaaucacuugaaccca

SEQ ID NO: 320019 - RNA, 23 nt, Human
gccaacauggugaaacccugucu

SEQ ID NO: 320020 - RNA, 23 nt, Human
gccuguaauccagcuacucagga

SEQ ID NO: 320021 - RNA, 18 nt, Human
gcuugucgugccuguggu

SEQ ID NO: 320022 - RNA, 22 nt, Human
ggauuacuugaggucaggaguu

SEQ ID NO: 320023 - RNA, 23 nt, Human
ggcgcgguggcucaucccuguaa

SEQ ID NO: 320024 - RNA, 19 nt, Human
ggguggcacaugccuguaa

SEQ ID NO: 320025 - RNA, 19 nt, Human
ggucaggaguuugagacca

SEQ ID NO: 320026 - RNA, 23 nt, Human
gguggcacaugccuguaauccag

SEQ ID NO: 320027 - RNA, 23 nt, Human
gguggcucaucccuguaauccca

SEQ ID NO: 320028 - RNA, 24 nt, Human
gguggcucaucccuguaaucccag

SEQ ID NO: 320029 - RNA, 24 nt, Human
gucauugcacuccagccugggcaa

SEQ ID NO: 320030 - RNA, 23 nt, Human
guggagcugaaugccacugugac

SEQ ID NO: 320031 - RNA, 25 nt, Human
uaaaaaaaaaaaaaagaauaaagag

SEQ ID NO: 320032 - RNA, 19 nt, Human
uaaaagagaaaaaagaagg

SEQ ID NO: 320033 - RNA, 25 nt, Human
uagaacaaagagaugaggcugggcg

SEQ ID NO: 320034 - RNA, 21 nt, Human
uaguuggguggguggcacaug

SEQ ID NO: 320035 - RNA, 23 nt, Human
uauccugguuggaagcuuugucc

SEQ ID NO: 320036 - RNA, 21 nt, Human
ucacggaaguguggauguuga

SEQ ID NO: 320037 - RNA, 21 nt, Human
ucacuuuuuuuuuuuuuuuaa

SEQ ID NO: 320038 - RNA, 20 nt, Human
ucagauggaagaacugcuaa

SEQ ID NO: 320039 - RNA, 18 nt, Human
ucauugcacuccagccug

SEQ ID NO: 320040 - RNA, 20 nt, Human
ucauugcacuccagccuggg

SEQ ID NO: 320041 - RNA, 21 nt, Human
ucauugcacuccagccugggc

SEQ ID NO: 320042 - RNA, 24 nt, Human
ucauugcacuccagccugggcaac

SEQ ID NO: 320043 - RNA, 23 nt, Human
uccagccugggcaacagagcgag

SEQ ID NO: 320044 - RNA, 24 nt, Human
uccagccugggcaacagagcgaga

SEQ ID NO: 320045 - RNA, 22 nt, Human
ucccuguaaucccagcacuuug

SEQ ID NO: 320046 - RNA, 19 nt, Human
ucuauugauauucccuagc

SEQ ID NO: 320047 - RNA, 23 nt, Human
ucugucuuuaaaaaaaaaaaaaa

SEQ ID NO: 320048 - RNA, 24 nt, Human
ucugucuuuaaaaaaaaaaaaaag

SEQ ID NO: 320049 - RNA, 26 nt, Human
ucugucuuuaaaaaaaaaaaaaagaa

SEQ ID NO: 320050 - RNA, 22 nt, Human
ucuuuaaaaaaaaaaaaaagaa

SEQ ID NO: 320051 - RNA, 18 nt, Human
ugaagcaaaaagaagaaa

SEQ ID NO: 320052 - RNA, 19 nt, Human
ugaagcaaaaagaagaaaa

SEQ ID NO: 320053 - RNA, 21 nt, Human
ugaagcaaaaagaagaaaacc

SEQ ID NO: 320054 - RNA, 23 nt, Human
ugagaccagccuggccaacaugg

SEQ ID NO: 320055 - RNA, 20 nt, Human
ugaggcaggagaaucacuug

SEQ ID NO: 320056 - RNA, 24 nt, Human
ugaggcaggagaaucacuugaacc

SEQ ID NO: 320057 - RNA, 25 nt, Human
ugaggcaggagaaucacuugaaccc

SEQ ID NO: 320058 - RNA, 18 nt, Human
ugaggucaggaguuugag

SEQ ID NO: 320059 - RNA, 18 nt, Human
ugauugauucauuaauag

SEQ ID NO: 320060 - RNA, 22 nt, Human
ugcacuccagccugggcaacag

SEQ ID NO: 320061 - RNA, 22 nt, Human
ugcacuccagccugggcaacag

SEQ ID NO: 320062 - RNA, 23 nt, Human
ugccuguaauccagcuacucagg

SEQ ID NO: 320063 - RNA, 23 nt, Human
uggauuacuugaggucaggaguu

SEQ ID NO: 320064 - RNA, 24 nt, Human
uggauuacuugaggucaggaguuu

SEQ ID NO: 320065 - RNA, 20 nt, Human
uggcacaugccuguaaucca

SEQ ID NO: 320066 - RNA, 24 nt, Human
uggccaacauggugaaacccuguc

SEQ ID NO: 320067 - RNA, 18 nt, Human
uggcucaucccuguaauc

SEQ ID NO: 320068 - RNA, 21 nt, Human
uggcucaucccuguaauccca

SEQ ID NO: 320069 - RNA, 24 nt, Human
uggcucaucccuguaaucccagca

SEQ ID NO: 320070 - RNA, 22 nt, Human
ugggaggccgaggcagguggau

SEQ ID NO: 320071 - RNA, 24 nt, Human
ugucauugcacuccagccugggca

SEQ ID NO: 320072 - RNA, 25 nt, Human
ugugucauugcacuccagccugggc

SEQ ID NO: 320073 - RNA, 22 nt, Human
uuacaauuuacaaauccaggaa

SEQ ID NO: 320074 - RNA, 23 nt, Human
uuaguuggguggguggcacaugc

SEQ ID NO: 320075 - RNA, 22 nt, Human
uugcagugagccaagacugugu

SEQ ID NO: 320076 - RNA, 20 nt, Human
uugcuccagaaacugguaaa

SEQ ID NO: 320077 - RNA, 20 nt, Human
uuggccuaaaagcgguagaa

SEQ ID NO: 320078 - RNA, 23 nt, Human
uuggguggguggcacaugccugu

SEQ ID NO: 320079 - RNA, 19 nt, Human
acugauacaaaguugaagc

SEQ ID NO: 320080 - RNA, 24 nt, Human
agaaagacugucgcuagcauuuuu

SEQ ID NO: 320081 - RNA, 26 nt, Human
agccauuaaaaagagcuuaauaacaa

SEQ ID NO: 320082 - RNA, 24 nt, Human
caaaguaaauuagagauauguaaa

SEQ ID NO: 320083 - RNA, 24 nt, Human
caaauacacagcagaccaaucaug

SEQ ID NO: 320084 - RNA, 24 nt, Human
cagcagaccaaucauguucccuga

SEQ ID NO: 320085 - RNA, 19 nt, Human
ccccgggaggagcuccagc

SEQ ID NO: 320086 - RNA, 23 nt, Human
cccgggucgcugguccccgggag

SEQ ID NO: 320087 - RNA, 23 nt, Human
cccuuuauaaagcuuugugcaaa

SEQ ID NO: 320088 - RNA, 19 nt, Human
cucgcuccccgggucgcug

SEQ ID NO: 320089 - RNA, 20 nt, Human
gaaucccaucguaacaguuc

SEQ ID NO: 320090 - RNA, 19 nt, Human
gagaagggacggcucagcg

SEQ ID NO: 320091 - RNA, 19 nt, Human
ggcgagaagggacggcuca

SEQ ID NO: 320092 - RNA, 22 nt, Human
gugguacaaaguuuauaaauac

SEQ ID NO: 320093 - RNA, 20 nt, Human
uaaaaagagcuuaauaacaa

SEQ ID NO: 320094 - RNA, 18 nt, Human
uaaaaugagcagaauccc

SEQ ID NO: 320095 - RNA, 19 nt, Human
uaaaaugagcagaauccca

SEQ ID NO: 320096 - RNA, 24 nt, Human
uaacaagaacaggaugacagucaa

SEQ ID NO: 320097 - RNA, 21 nt, Human
uaagaaagacugucgcuagca

SEQ ID NO: 320098 - RNA, 22 nt, Human
uacaugaauucaaauacacagc

SEQ ID NO: 320099 - RNA, 18 nt, Human
uagaaacaagacauaaac

SEQ ID NO: 320100 - RNA, 25 nt, Human
uauguaaauaacagaauuaucaaca

SEQ ID NO: 320101 - RNA, 21 nt, Human
ucacaauggcuaacaagaaca

SEQ ID NO: 320102 - RNA, 19 nt, Human
ucagcggcuggaggaagag

SEQ ID NO: 320103 - RNA, 21 nt, Human
ucaguagcuuuuuaauaaaau

SEQ ID NO: 320104 - RNA, 23 nt, Human
ucccaucguaacaguucuuuguu

SEQ ID NO: 320105 - RNA, 21 nt, Human
uccccgggucgcugguccccg

SEQ ID NO: 320106 - RNA, 20 nt, Human
ucgcugguccccgggaggag

SEQ ID NO: 320107 - RNA, 25 nt, Human
uguaaaaugggugcuacacucucuc

SEQ ID NO: 320108 - RNA, 19 nt, Human
uuagugcugucccucaaga

SEQ ID NO: 320109 - RNA, 24 nt, Human
uuagugcugucccucaagacucua

SEQ ID NO: 320110 - RNA, 23 nt, Human
uuuuuaugugcuacugaaagauu

SEQ ID NO: 320111 - RNA, 19 nt, Human
aaaaaaaaaaaaaaaggcg

SEQ ID NO: 320112 - RNA, 19 nt, Human
aaaccuaagacaaacaugu

SEQ ID NO: 320113 - RNA, 23 nt, Human
aaaccucccuuuuuaucaccauc

SEQ ID NO: 320114 - RNA, 23 nt, Human
aaauaccacacuggaacaaaaaa

SEQ ID NO: 320115 - RNA, 18 nt, Human
aacauagugaaaccccau

SEQ ID NO: 320116 - RNA, 19 nt, Human
aacauagugaaaccccauc

SEQ ID NO: 320117 - RNA, 22 nt, Human
aacauagugaaaccccauccuc

SEQ ID NO: 320118 - RNA, 24 nt, Human
aaccugggugacagagagagacuc

SEQ ID NO: 320119 - RNA, 19 nt, Human
aagaauucuauuuagguuu

SEQ ID NO: 320120 - RNA, 18 nt, Human
aagaggaagaaacuuuaa

SEQ ID NO: 320121 - RNA, 22 nt, Human
aagugaagaucccauaagacuc

SEQ ID NO: 320122 - RNA, 24 nt, Human
aaucgcuugaacccaggaggggga

SEQ ID NO: 320123 - RNA, 18 nt, Human
aauuagccaggcauggug

SEQ ID NO: 320124 - RNA, 21 nt, Human
acaacuuaaauaguauccuuc

SEQ ID NO: 320125 - RNA, 24 nt, Human
acagagagagacuccaucucaaaa

SEQ ID NO: 320126 - RNA, 22 nt, Human
acagugaucucucucagauucu

SEQ ID NO: 320127 - RNA, 19 nt, Human
acccaguaaagugcaacuu

SEQ ID NO: 320128 - RNA, 21 nt, Human
acccauuaaguuuucgucauu

SEQ ID NO: 320129 - RNA, 23 nt, Human
accccacaucucugagaacccug

SEQ ID NO: 320130 - RNA, 23 nt, Human
accugggugacagagagagacuc

SEQ ID NO: 320131 - RNA, 25 nt, Human
acuaaaaagaaauucuaacaacuaa

SEQ ID NO: 320132 - RNA, 18 nt, Human
acugcacuccaaccuggg

SEQ ID NO: 320133 - RNA, 24 nt, Human
acugcacuccaaccugggugacag

SEQ ID NO: 320134 - RNA, 21 nt, Human
agaacccaagaggaagaaacu

SEQ ID NO: 320135 - RNA, 22 nt, Human
agacaaaccaaugccucucaga

SEQ ID NO: 320136 - RNA, 21 nt, Human
agacagaacuccuaauuaggu

SEQ ID NO: 320137 - RNA, 18 nt, Human
agccaguguuucauaugu

SEQ ID NO: 320138 - RNA, 24 nt, Human
agcuuauuaaagcauucugaacag

SEQ ID NO: 320139 - RNA, 24 nt, Human
aggagggcggaucacaagguuagg

SEQ ID NO: 320140 - RNA, 20 nt, Human
aggaguuugagaccagucug

SEQ ID NO: 320141 - RNA, 23 nt, Human
aggcaggagaaucgcuugaaccc

SEQ ID NO: 320142 - RNA, 24 nt, Human
aggcaggagaaucgcuugaaccca

SEQ ID NO: 320143 - RNA, 24 nt, Human
aggcaugguggcuggcgccuguag

SEQ ID NO: 320144 - RNA, 20 nt, Human
aggcugaggcaggagaaucg

SEQ ID NO: 320145 - RNA, 24 nt, Human
aggcugaggcaggagaaucgcuug

SEQ ID NO: 320146 - RNA, 22 nt, Human
agggggagguugcagcagugag

SEQ ID NO: 320147 - RNA, 27 nt, Human
agggggagguugcagcagugagccaag

SEQ ID NO: 320148 - RNA, 19 nt, Human
aguauccagcugcagauag

SEQ ID NO: 320149 - RNA, 19 nt, Human
agucuaaaguaaacucaaa

SEQ ID NO: 320150 - RNA, 22 nt, Human
agucuggccaacauagugaaac

SEQ ID NO: 320151 - RNA, 24 nt, Human
agucuggccaacauagugaaaccc

SEQ ID NO: 320152 - RNA, 20 nt, Human
auaaaacccaguaaagugca

SEQ ID NO: 320153 - RNA, 31 nt, Human
auagcagcaguuaaaaaaaaaaaaaaaaaaa

SEQ ID NO: 320154 - RNA, 22 nt, Human
auaugacagaacccaagaggaa

SEQ ID NO: 320155 - RNA, 20 nt, Human
auauguaagucucgaaaccu

SEQ ID NO: 320156 - RNA, 24 nt, Human
aucacaccacugcacuccaaccug

SEQ ID NO: 320157 - RNA, 24 nt, Human
auggagggucucaguucauccaca

SEQ ID NO: 320158 - RNA, 22 nt, Human
caaccugggugacagagagaga

SEQ ID NO: 320159 - RNA, 24 nt, Human
caacuugacagugaucucucucag

SEQ ID NO: 320160 - RNA, 24 nt, Human
cacaagguuaggaguuugagacca

SEQ ID NO: 320161 - RNA, 23 nt, Human
caccaaaacguuuccugcagcaa

SEQ ID NO: 320162 - RNA, 26 nt, Human
caccacugcacuccaaccugggugac

SEQ ID NO: 320163 - RNA, 23 nt, Human
cacugcacuccaaccugggugac

SEQ ID NO: 320164 - RNA, 24 nt, Human
cacugcacuccaaccugggugaca

SEQ ID NO: 320165 - RNA, 20 nt, Human
cagaagaauggauugaggug

SEQ ID NO: 320166 - RNA, 24 nt, Human
cagcuacucaggaggcugaggcag

SEQ ID NO: 320167 - RNA, 19 nt, Human
cagcugcagauagcagcag

SEQ ID NO: 320168 - RNA, 23 nt, Human
cagcugcuuugaauuauuacuga

SEQ ID NO: 320169 - RNA, 24 nt, Human
caugugagaaacaaggagacagcu

SEQ ID NO: 320170 - RNA, 22 nt, Human
cauuuaagaucuaaaaucaucu

SEQ ID NO: 320171 - RNA, 20 nt, Human
ccacacuggaacaaaaaaua

SEQ ID NO: 320172 - RNA, 20 nt, Human
ccacugcacuccaaccuggg

SEQ ID NO: 320173 - RNA, 24 nt, Human
ccacugcacuccaaccugggugac

SEQ ID NO: 320174 - RNA, 25 nt, Human
ccacugcacuccaaccugggugaca

SEQ ID NO: 320175 - RNA, 23 nt, Human
ccaucucaaaaaaaaaaaaaaaa

SEQ ID NO: 320176 - RNA, 21 nt, Human
cccaggagggggagguugcag

SEQ ID NO: 320177 - RNA, 20 nt, Human
ccccacaucucugagaaccc

SEQ ID NO: 320178 - RNA, 19 nt, Human
ccuaagacaaacaugugaa

SEQ ID NO: 320179 - RNA, 22 nt, Human
ccugccuucugugaaagguaaa

SEQ ID NO: 320180 - RNA, 19 nt, Human
ccuguagucccagcuacuc

SEQ ID NO: 320181 - RNA, 21 nt, Human
ccuguagucccagcuacucag

SEQ ID NO: 320182 - RNA, 24 nt, Human
cgccuguagucccagcuacucagg

SEQ ID NO: 320183 - RNA, 21 nt, Human
cggaucacaagguuaggaguu

SEQ ID NO: 320184 - RNA, 23 nt, Human
cuaagacaaacaugugaagugaa

SEQ ID NO: 320185 - RNA, 18 nt, Human
cucaaaaaaaaaaaaaaa

SEQ ID NO: 320186 - RNA, 19 nt, Human
cuccaucucaaaaaaaaaa

SEQ ID NO: 320187 - RNA, 19 nt, Human
cuccuaaaacuggauaaaa

SEQ ID NO: 320188 - RNA, 24 nt, Human
cuccuaaaacuggauaaaacccag

SEQ ID NO: 320189 - RNA, 20 nt, Human
cucuacuaaaaauacaaaaa

SEQ ID NO: 320190 - RNA, 23 nt, Human
cuggccaacauagugaaacccca

SEQ ID NO: 320191 - RNA, 19 nt, Human
cugucucacccaaaacaag

SEQ ID NO: 320192 - RNA, 20 nt, Human
cugugcaaaaaaaaaaaaaa

SEQ ID NO: 320193 - RNA, 25 nt, Human
cugugcaaaaaaaaaaaaaaguaca

SEQ ID NO: 320194 - RNA, 23 nt, Human
cuugaacccaggagggggagguu

SEQ ID NO: 320195 - RNA, 20 nt, Human
gaaaccccauccucuacuaa

SEQ ID NO: 320196 - RNA, 23 nt, Human
gagaaucgcuugaacccaggagg

SEQ ID NO: 320197 - RNA, 23 nt, Human
gauagcagcaguuaaaaaaaaaa

SEQ ID NO: 320198 - RNA, 22 nt, Human
gaucacaagguuaggaguuuga

SEQ ID NO: 320199 - RNA, 18 nt, Human
gcagcaaguuacccugcc

SEQ ID NO: 320200 - RNA, 22 nt, Human
gcaggagaaucgcuugaaccca

SEQ ID NO: 320201 - RNA, 22 nt, Human
gccaacauagugaaaccccauc

SEQ ID NO: 320202 - RNA, 20 nt, Human
gccaagaucacaccacugca

SEQ ID NO: 320203 - RNA, 18 nt, Human
gcucauguucuguauugg

SEQ ID NO: 320204 - RNA, 23 nt, Human
ggagguugcagcagugagccaag

SEQ ID NO: 320205 - RNA, 20 nt, Human
ggaucacaagguuaggaguu

SEQ ID NO: 320206 - RNA, 26 nt, Human
ggauuccccccaaacgagauucauau

SEQ ID NO: 320207 - RNA, 23 nt, Human
ggcggaucacaagguuaggaguu

SEQ ID NO: 320208 - RNA, 24 nt, Human
gguggcuggcgccuguagucccag

SEQ ID NO: 320209 - RNA, 26 nt, Human
guaaaacagcagcaguaucugcagaa

SEQ ID NO: 320210 - RNA, 21 nt, Human
uaaaaagagcuaaggacaacu

SEQ ID NO: 320211 - RNA, 21 nt, Human
uaaaaauacaaaaauuagcca

SEQ ID NO: 320212 - RNA, 21 nt, Human
uaaaaucaucuaagauacuau

SEQ ID NO: 320213 - RNA, 22 nt, Human
uaaaccuaagacaaacauguga

SEQ ID NO: 320214 - RNA, 27 nt, Human
uaagacaaacaugugaagugaagaucc

SEQ ID NO: 320215 - RNA, 26 nt, Human
uaaggagggcggaucacaagguuagg

SEQ ID NO: 320216 - RNA, 20 nt, Human
uacaaggauuccccccaaac

SEQ ID NO: 320217 - RNA, 21 nt, Human
uaccuggcaagcccauggggu

SEQ ID NO: 320218 - RNA, 20 nt, Human
uagaagaauacggaggaaaa

SEQ ID NO: 320219 - RNA, 23 nt, Human
uagcagcaguuaaaaaaaaaaaa

SEQ ID NO: 320220 - RNA, 19 nt, Human
uaguagacagaacuccuaa

SEQ ID NO: 320221 - RNA, 24 nt, Human
uauacaccaaaacguuuccugcag

SEQ ID NO: 320222 - RNA, 19 nt, Human
uauaugccuugcaaaagaa

SEQ ID NO: 320223 - RNA, 24 nt, Human
uaucaaauaccacacuggaacaaa

SEQ ID NO: 320224 - RNA, 25 nt, Human
uaugacagaacccaagaggaagaaa

SEQ ID NO: 320225 - RNA, 24 nt, Human
ucacaagguuaggaguuugagacc

SEQ ID NO: 320226 - RNA, 23 nt, Human
ucacaccacugcacuccaaccug

SEQ ID NO: 320227 - RNA, 19 nt, Human
uccagcugcagauagcagc

SEQ ID NO: 320228 - RNA, 23 nt, Human
uccaucucaaaaaaaaaaaaaaa

SEQ ID NO: 320229 - RNA, 20 nt, Human
uccuaaaacuggauaaaacc

SEQ ID NO: 320230 - RNA, 23 nt, Human
ucgucauuaccuggcaagcccau

SEQ ID NO: 320231 - RNA, 18 nt, Human
ucucaaaaaaaaaaaaaa

SEQ ID NO: 320232 - RNA, 22 nt, Human
ucucacccaaaacaaggcuuca

SEQ ID NO: 320233 - RNA, 18 nt, Human
ucucaguucauccacauu

SEQ ID NO: 320234 - RNA, 23 nt, Human
ucuggccaacauagugaaacccc

SEQ ID NO: 320235 - RNA, 23 nt, Human
ugaaaaaaccucccuuuuuauca

SEQ ID NO: 320236 - RNA, 21 nt, Human
ugaaaccccauccucuacuaa

SEQ ID NO: 320237 - RNA, 23 nt, Human
ugaaagguaaaccuaagacaaac

SEQ ID NO: 320238 - RNA, 21 nt, Human
ugacauugccuccccuccucc

SEQ ID NO: 320239 - RNA, 19 nt, Human
ugagaacccuguaaagcca

SEQ ID NO: 320240 - RNA, 18 nt, Human
ugagaccagucuggccaa

SEQ ID NO: 320241 - RNA, 24 nt, Human
ugagaccagucuggccaacauagu

SEQ ID NO: 320242 - RNA, 20 nt, Human
ugaggcaggagaaucgcuug

SEQ ID NO: 320243 - RNA, 24 nt, Human
ugaggcaggagaaucgcuugaacc

SEQ ID NO: 320244 - RNA, 25 nt, Human
ugaggcaggagaaucgcuugaaccc

SEQ ID NO: 320245 - RNA, 22 nt, Human
ugcaaaaaaaaaaaaaaguaca

SEQ ID NO: 320246 - RNA, 19 nt, Human
ugcaaaagaaugcaagaca

SEQ ID NO: 320247 - RNA, 25 nt, Human
ugccaaacucauuuaagaucuaaaa

SEQ ID NO: 320248 - RNA, 21 nt, Human
uggcuggcgccuguaguccca

SEQ ID NO: 320249 - RNA, 22 nt, Human
uggcuggcgccuguagucccag

SEQ ID NO: 320250 - RNA, 20 nt, Human
ugggggggcuaaggagggcg

SEQ ID NO: 320251 - RNA, 19 nt, Human
ugguggcuggcgccuguag

SEQ ID NO: 320252 - RNA, 24 nt, Human
ugguggcuggcgccuguaguccca

SEQ ID NO: 320253 - RNA, 23 nt, Human
ugugagaaacaaggagacagcug

SEQ ID NO: 320254 - RNA, 19 nt, Human
ugugcaaaaaaaaaaaaaa

SEQ ID NO: 320255 - RNA, 25 nt, Human
ugugcaaaaaaaaaaaaaaguacac

SEQ ID NO: 320256 - RNA, 20 nt, Human
ugugucaaguaaauuucacu

SEQ ID NO: 320257 - RNA, 23 nt, Human
ugugugcaguguucuaucugcaa

SEQ ID NO: 320258 - RNA, 18 nt, Human
uuagccaggcaugguggc

SEQ ID NO: 320259 - RNA, 25 nt, Human
uuagccaggcaugguggcuggcgcc

SEQ ID NO: 320260 - RNA, 20 nt, Human
uugggggggcuaaggagggc

SEQ ID NO: 320261 - RNA, 29 nt, Human
uuucuacagaaugaugagcugaccuuggu

SEQ ID NO: 320262 - RNA, 18 nt, Human
uuugggggggcuaaggag

SEQ ID NO: 320263 - RNA, 19 nt, Human
uuugggggggcuaaggagg

SEQ ID NO: 320264 - RNA, 20 nt, Human
aaaaaagaauucagcuguga

SEQ ID NO: 320265 - RNA, 30 nt, Human
aaaaauaggcacuccccucccugacccccc

SEQ ID NO: 320266 - RNA, 18 nt, Human
aaaacccaagccagugcu

SEQ ID NO: 320267 - RNA, 21 nt, Human
aaaacgagaggaacccgggca

SEQ ID NO: 320268 - RNA, 23 nt, Human
aaaaugaguuauguacaaagcca

SEQ ID NO: 320269 - RNA, 21 nt, Human
aaacagcuccaauagcaagga

SEQ ID NO: 320270 - RNA, 27 nt, Human
aaacuaaaggugaaauaaaagggaccc

SEQ ID NO: 320271 - RNA, 25 nt, Human
aaagaaacaaaacgcugaaugagaa

SEQ ID NO: 320272 - RNA, 26 nt, Human
aaagaagagguggagaagagggaccc

SEQ ID NO: 320273 - RNA, 25 nt, Human
aaagagaaaaggugcacccucuuca

SEQ ID NO: 320274 - RNA, 22 nt, Human
aaagccagaccccacacccuca

SEQ ID NO: 320275 - RNA, 24 nt, Human
aaagugcugggauugcaggcauga

SEQ ID NO: 320276 - RNA, 19 nt, Human
aacaguguuaagccauagu

SEQ ID NO: 320277 - RNA, 23 nt, Human
aaccuacuaauuauucucaccua

SEQ ID NO: 320278 - RNA, 29 nt, Human
aaccuacuucuucaaugcacucaccccug

SEQ ID NO: 320279 - RNA, 20 nt, Human
aaccugagcuacugaguuuu

SEQ ID NO: 320280 - RNA, 20 nt, Human
aagaagagguggagaagaaa

SEQ ID NO: 320281 - RNA, 25 nt, Human
aagcaauccucucgccccagccucc

SEQ ID NO: 320282 - RNA, 25 nt, Human
aagcaauccucucgccccagccucc

SEQ ID NO: 320283 - RNA, 25 nt, Human
aagcaaucuuucugcuucagcuucc

SEQ ID NO: 320284 - RNA, 22 nt, Human
aaggguuucaucauguuggcca

SEQ ID NO: 320285 - RNA, 24 nt, Human
aaggguuucaucauguuggccagg

SEQ ID NO: 320286 - RNA, 18 nt, Human
aagugagcccuacaacca

SEQ ID NO: 320287 - RNA, 19 nt, Human
aagugcugggauugcaggc

SEQ ID NO: 320288 - RNA, 21 nt, Human
aagugcugggauugcaggcau

SEQ ID NO: 320289 - RNA, 20 nt, Human
aaucugauuacauuucccuu

SEQ ID NO: 320290 - RNA, 23 nt, Human
aauggugugaucucagaucacug

SEQ ID NO: 320291 - RNA, 24 nt, Human
aauuucaacugugcucugaucuau

SEQ ID NO: 320292 - RNA, 21 nt, Human
acacacacacacacacacaca

SEQ ID NO: 320293 - RNA, 18 nt, Human
acacaccccaaaguaucc

SEQ ID NO: 320294 - RNA, 19 nt, Human
acaccccaaaguauccaaa

SEQ ID NO: 320295 - RNA, 21 nt, Human
acagaaauggcgaacaacaca

SEQ ID NO: 320296 - RNA, 19 nt, Human
acagacaggguucacuaug

SEQ ID NO: 320297 - RNA, 24 nt, Human
acccaggcuggagggcaauggugu

SEQ ID NO: 320298 - RNA, 21 nt, Human
accccauuucaaaucuguaca

SEQ ID NO: 320299 - RNA, 20 nt, Human
acuaacugggauuacaggca

SEQ ID NO: 320300 - RNA, 25 nt, Human
acuauguugcccaagcuggucucaa

SEQ ID NO: 320301 - RNA, 22 nt, Human
acuccccucccugaccccccau

SEQ ID NO: 320302 - RNA, 30 nt, Human
acucugucacccaggcuggagggcaauggg

SEQ ID NO: 320303 - RNA, 20 nt, Human
acugaugugugauaugugug

SEQ ID NO: 320304 - RNA, 19 nt, Human
acugcagccucaaccucuu

SEQ ID NO: 320305 - RNA, 19 nt, Human
acugcagccuccgccuccu

SEQ ID NO: 320306 - RNA, 19 nt, Human
agaaaaagaagagguggag

SEQ ID NO: 320307 - RNA, 23 nt, Human
agaaaaagaagagguggagaaga

SEQ ID NO: 320308 - RNA, 28 nt, Human
agaaaagaaacaaaacgcugaaugagaa

SEQ ID NO: 320309 - RNA, 22 nt, Human
agaacacucucacgccuggauu

SEQ ID NO: 320310 - RNA, 21 nt, Human
agaagacauuuugcuucuggg

SEQ ID NO: 320311 - RNA, 24 nt, Human
agaaggagacagaugaaggcaggg

SEQ ID NO: 320312 - RNA, 20 nt, Human
agacacacacacagacaggc

SEQ ID NO: 320313 - RNA, 21 nt, Human
agacaggcacacaccccaaag

SEQ ID NO: 320314 - RNA, 19 nt, Human
agagugcugggacuacagg

SEQ ID NO: 320315 - RNA, 20 nt, Human
agagugcugggacuacagga

SEQ ID NO: 320316 - RNA, 20 nt, Human
agcaauagccccgggaggga

SEQ ID NO: 320317 - RNA, 23 nt, Human
agcaauccucucgccccagccuc

SEQ ID NO: 320318 - RNA, 25 nt, Human
agcaauccucucgccccagccuccc

SEQ ID NO: 320319 - RNA, 23 nt, Human
agcuggucucaaacuccuggccu

SEQ ID NO: 320320 - RNA, 18 nt, Human
aggaaaaacgagaggaac

SEQ ID NO: 320321 - RNA, 23 nt, Human
aggaaaaacgagaggaacccggg

SEQ ID NO: 320322 - RNA, 21 nt, Human
aggagacagaugaaggcaggg

SEQ ID NO: 320323 - RNA, 22 nt, Human
aggcacacaccccaaaguaucc

SEQ ID NO: 320324 - RNA, 25 nt, Human
aggcacacaccccaaaguauccaaa

SEQ ID NO: 320325 - RNA, 19 nt, Human
aggcaugacacacucugcc

SEQ ID NO: 320326 - RNA, 22 nt, Human
agggagaaaucucuucccagga

SEQ ID NO: 320327 - RNA, 24 nt, Human
aggugaucugccugccuuggccuc

SEQ ID NO: 320328 - RNA, 24 nt, Human
agugcaguggcgcaaucuugguug

SEQ ID NO: 320329 - RNA, 19 nt, Human
agugcugucuugcacucug

SEQ ID NO: 320330 - RNA, 23 nt, Human
aguucuuuguuccaggcagauuc

SEQ ID NO: 320331 - RNA, 21 nt, Human
auaaaacccaagccagugcug

SEQ ID NO: 320332 - RNA, 20 nt, Human
auaaagucuaugagaaaaac

SEQ ID NO: 320333 - RNA, 25 nt, Human
aucauguuggccaggcuggucucaa

SEQ ID NO: 320334 - RNA, 19 nt, Human
aucccaaaccacucaacug

SEQ ID NO: 320335 - RNA, 21 nt, Human
aucuuauucccccaaacuaua

SEQ ID NO: 320336 - RNA, 21 nt, Human
augaagcgugcaaucuuaccc

SEQ ID NO: 320337 - RNA, 24 nt, Human
auggggucucgcuaugcugcccag

SEQ ID NO: 320338 - RNA, 22 nt, Human
auguugcccaagcuggucucaa

SEQ ID NO: 320339 - RNA, 23 nt, Human
auuaaaaauaggcacuccccucc

SEQ ID NO: 320340 - RNA, 21 nt, Human
auucuccugccucagccuccc

SEQ ID NO: 320341 - RNA, 21 nt, Human
auuuuuuuuuaaaauuggggg

SEQ ID NO: 320342 - RNA, 28 nt, Human
caaaaauaaaacccaagccagugcuguc

SEQ ID NO: 320343 - RNA, 18 nt, Human
caaaagcaaaaagccauu

SEQ ID NO: 320344 - RNA, 23 nt, Human
caaaccuagaaucaucaguauua

SEQ ID NO: 320345 - RNA, 27 nt, Human
caaagugcugggauugcaggcaugaca

SEQ ID NO: 320346 - RNA, 19 nt, Human
caaaucccaccugcuaaaa

SEQ ID NO: 320347 - RNA, 20 nt, Human
caacacacaacaauuuacag

SEQ ID NO: 320348 - RNA, 22 nt, Human
caacacacaacaauuuacagag

SEQ ID NO: 320349 - RNA, 24 nt, Human
caacacacaacaauuuacagagaa

SEQ ID NO: 320350 - RNA, 20 nt, Human
caagagaacacucucacgcc

SEQ ID NO: 320351 - RNA, 18 nt, Human
caagauuaaaaauaggca

SEQ ID NO: 320352 - RNA, 22 nt, Human
caagcaaucuuucugcuucagc

SEQ ID NO: 320353 - RNA, 27 nt, Human
caagcaaucuuucugcuucagcuuccc

SEQ ID NO: 320354 - RNA, 24 nt, Human
caaggguuucaucauguuggccag

SEQ ID NO: 320355 - RNA, 27 nt, Human
caagugauccucucaucucagccuccu

SEQ ID NO: 320356 - RNA, 18 nt, Human
caaugcacucaccccugc

SEQ ID NO: 320357 - RNA, 23 nt, Human
cacaaucagggcucacugcagcc

SEQ ID NO: 320358 - RNA, 22 nt, Human
cacacaacaauuuacagagaaa

SEQ ID NO: 320359 - RNA, 21 nt, Human
cacacacacacacaauuugug

SEQ ID NO: 320360 - RNA, 20 nt, Human
cacacacacacacacacaca

SEQ ID NO: 320361 - RNA, 21 nt, Human
cacacagacaggcacacaccc

SEQ ID NO: 320362 - RNA, 20 nt, Human
cacacagguacagagaaaac

SEQ ID NO: 320363 - RNA, 25 nt, Human
cacagcauccggcagcagucacagg

SEQ ID NO: 320364 - RNA, 19 nt, Human
cacaggcugaaaauagagu

SEQ ID NO: 320365 - RNA, 26 nt, Human
cacauggcaaggguauacuccacccu

SEQ ID NO: 320366 - RNA, 23 nt, Human
caccacaucuggcuaauuuuugu

SEQ ID NO: 320367 - RNA, 22 nt, Human
caccuggcuacagaguggagcc

SEQ ID NO: 320368 - RNA, 26 nt, Human
caccuucaccaagacacacacacaga

SEQ ID NO: 320369 - RNA, 23 nt, Human
cacggcugacggagacacagaga

SEQ ID NO: 320370 - RNA, 24 nt, Human
cacuauguugcccaagcuggucuc

SEQ ID NO: 320371 - RNA, 21 nt, Human
cacuccccucccugacccccc

SEQ ID NO: 320372 - RNA, 21 nt, Human
cacucugccagguaaacucuu

SEQ ID NO: 320373 - RNA, 22 nt, Human
cacucugucacccaggcuggag

SEQ ID NO: 320374 - RNA, 25 nt, Human
cacucugucacccaggcuggagggc

SEQ ID NO: 320375 - RNA, 24 nt, Human
cacuguggccuggaccuccucagg

SEQ ID NO: 320376 - RNA, 18 nt, Human
cagaaaagaaacaaaacg

SEQ ID NO: 320377 - RNA, 22 nt, Human
cagaaaagaaacaaaacgcuga

SEQ ID NO: 320378 - RNA, 19 nt, Human
cagacaggcacacacccca

SEQ ID NO: 320379 - RNA, 24 nt, Human
cagagugcugggacuacaggaaca

SEQ ID NO: 320380 - RNA, 21 nt, Human
cagcaaacaugagacuucaug

SEQ ID NO: 320381 - RNA, 23 nt, Human
cagccucaaccucuugagcucag

SEQ ID NO: 320382 - RNA, 20 nt, Human
cagccuccgccuccugaguu

SEQ ID NO: 320383 - RNA, 20 nt, Human
cagccuccugaguagcugag

SEQ ID NO: 320384 - RNA, 24 nt, Human
cagccucggagggcggcgcggcag

SEQ ID NO: 320385 - RNA, 19 nt, Human
cagcugugacagcugagca

SEQ ID NO: 320386 - RNA, 19 nt, Human
caggaacaagccacugcac

SEQ ID NO: 320387 - RNA, 20 nt, Human
cagggcaugagaaaaagaag

SEQ ID NO: 320388 - RNA, 22 nt, Human
cagggcaugagaaaaagaagag

SEQ ID NO: 320389 - RNA, 21 nt, Human
caggguucacuauguugccca

SEQ ID NO: 320390 - RNA, 22 nt, Human
cagguuuucugaauacaaugca

SEQ ID NO: 320391 - RNA, 20 nt, Human
caucaguauuauuacauaaa

SEQ ID NO: 320392 - RNA, 24 nt, Human
caucauguuggccaggcuggucuc

SEQ ID NO: 320393 - RNA, 21 nt, Human
caucucagagcacaaggacug

SEQ ID NO: 320394 - RNA, 21 nt, Human
caucucagagcacaaggacug

SEQ ID NO: 320395 - RNA, 24 nt, Human
caucucagccuccugaguagcuga

SEQ ID NO: 320396 - RNA, 21 nt, Human
caugaaucugcggaucuuccu

SEQ ID NO: 320397 - RNA, 23 nt, Human
caugacccacauuuagcaagaga

SEQ ID NO: 320398 - RNA, 18 nt, Human
cauguuggccaggcuggu

SEQ ID NO: 320399 - RNA, 21 nt, Human
cauguuggccaggcuggucuc

SEQ ID NO: 320400 - RNA, 24 nt, Human
cauguuggccaggcuggucucaaa

SEQ ID NO: 320401 - RNA, 24 nt, Human
ccaaagugcugggauugcaggcau

SEQ ID NO: 320402 - RNA, 25 nt, Human
ccaaaguguuacuuaggauuacagg

SEQ ID NO: 320403 - RNA, 28 nt, Human
ccaaaguguuacuuaggauuacaggugu

SEQ ID NO: 320404 - RNA, 20 nt, Human
ccaccacaucuggcuaauuu

SEQ ID NO: 320405 - RNA, 18 nt, Human
ccacugcaccuagccuag

SEQ ID NO: 320406 - RNA, 20 nt, Human
ccacugcaccuagccuagau

SEQ ID NO: 320407 - RNA, 26 nt, Human
ccagaccccacacccucaguuuaugc

SEQ ID NO: 320408 - RNA, 19 nt, Human
ccagagugcugggacuaca

SEQ ID NO: 320409 - RNA, 23 nt, Human
ccaguccacggagcggaaccacc

SEQ ID NO: 320410 - RNA, 18 nt, Human
ccagucucaaacucccag

SEQ ID NO: 320411 - RNA, 19 nt, Human
cccaagagaacacucucac

SEQ ID NO: 320412 - RNA, 18 nt, Human
cccaccuucaccaagaca

SEQ ID NO: 320413 - RNA, 20 nt, Human
cccaggcucaagcaaucuuu

SEQ ID NO: 320414 - RNA, 23 nt, Human
cccagggaagaacaucugggggu

SEQ ID NO: 320415 - RNA, 24 nt, Human
ccccucccugaccccccaugagaa

SEQ ID NO: 320416 - RNA, 22 nt, Human
ccccugccacagcugggcccug

SEQ ID NO: 320417 - RNA, 24 nt, Human
cccgacuaacugggauuacaggca

SEQ ID NO: 320418 - RNA, 18 nt, Human
cccucaguuuaugcugug

SEQ ID NO: 320419 - RNA, 22 nt, Human
cccuggcuggagugcaguggcg

SEQ ID NO: 320420 - RNA, 19 nt, Human
cccuucagaaaaacaaccu

SEQ ID NO: 320421 - RNA, 24 nt, Human
ccgacuaacugggauuacaggcau

SEQ ID NO: 320422 - RNA, 22 nt, Human
ccgcggcagcaucaacggaggc

SEQ ID NO: 320423 - RNA, 24 nt, Human
ccgggccaggccggagcgcucggg

SEQ ID NO: 320424 - RNA, 21 nt, Human
ccuccagcucgguggccgcgu

SEQ ID NO: 320425 - RNA, 19 nt, Human
ccucccaacccagguuccc

SEQ ID NO: 320426 - RNA, 24 nt, Human
ccucucaucucagccuccugagua

SEQ ID NO: 320427 - RNA, 19 nt, Human
ccucucgccccagccuccc

SEQ ID NO: 320428 - RNA, 18 nt, Human
ccucugggugcgcggcuc

SEQ ID NO: 320429 - RNA, 24 nt, Human
ccugaauagcugggacuacaggua

SEQ ID NO: 320430 - RNA, 21 nt, Human
ccugaccucaggugaucugcc

SEQ ID NO: 320431 - RNA, 23 nt, Human
ccugaccucaggugaucugccug

SEQ ID NO: 320432 - RNA, 24 nt, Human
ccugaguagcugagacuacaggca

SEQ ID NO: 320433 - RNA, 21 nt, Human
ccugcaauaaauucgcuccca

SEQ ID NO: 320434 - RNA, 22 nt, Human
ccugccuuggccucccaaagug

SEQ ID NO: 320435 - RNA, 24 nt, Human
ccugccuuggccucccaaagugcu

SEQ ID NO: 320436 - RNA, 18 nt, Human
ccuggccccagugccuuc

SEQ ID NO: 320437 - RNA, 23 nt, Human
ccuggccuuaagcaauccuccca

SEQ ID NO: 320438 - RNA, 20 nt, Human
ccugggcucaagcaauccuc

SEQ ID NO: 320439 - RNA, 24 nt, Human
ccuucaccaagacacacacacaga

SEQ ID NO: 320440 - RNA, 18 nt, Human
ccuucagaaaaacaaccu

SEQ ID NO: 320441 - RNA, 21 nt, Human
cgaacaacacaucccaaacca

SEQ ID NO: 320442 - RNA, 26 nt, Human
cgcccucgccucugggugcgcggcuc

SEQ ID NO: 320443 - RNA, 25 nt, Human
cgccuccugaguuccauauucuccu

SEQ ID NO: 320444 - RNA, 27 nt, Human
cgcuaugcugcccaggccagucucaaa

SEQ ID NO: 320445 - RNA, 26 nt, Human
cggcagccgcggcagcaucaacggag

SEQ ID NO: 320446 - RNA, 25 nt, Human
cggcccccggauaucuuauuccccc

SEQ ID NO: 320447 - RNA, 20 nt, Human
cggcucggcacggcugacgg

SEQ ID NO: 320448 - RNA, 23 nt, Human
cuaauuuuuguguuuuuaauaga

SEQ ID NO: 320449 - RNA, 21 nt, Human
cuacugaguugaccgucacgu

SEQ ID NO: 320450 - RNA, 18 nt, Human
cucaacaugaauauuuaa

SEQ ID NO: 320451 - RNA, 24 nt, Human
cucaagcaaucuuucugcuucagc

SEQ ID NO: 320452 - RNA, 24 nt, Human
cucacucugucacccaggcuggag

SEQ ID NO: 320453 - RNA, 20 nt, Human
cucaggcucaagugauccuc

SEQ ID NO: 320454 - RNA, 24 nt, Human
cucaucucagccuccugaguagcu

SEQ ID NO: 320455 - RNA, 25 nt, Human
cucccaggcucaagcaaucuuucug

SEQ ID NO: 320456 - RNA, 24 nt, Human
cuccugaauagcugggacuacagg

SEQ ID NO: 320457 - RNA, 26 nt, Human
cuccugaccucaggugaucugccugc

SEQ ID NO: 320458 - RNA, 19 nt, Human
cuccugaguuccauauucu

SEQ ID NO: 320459 - RNA, 23 nt, Human
cuccugggcucaagcaauccucu

SEQ ID NO: 320460 - RNA, 23 nt, Human
cucgggaagccggacuccccggg

SEQ ID NO: 320461 - RNA, 23 nt, Human
cucuacauuuugcacagugauug

SEQ ID NO: 320462 - RNA, 18 nt, Human
cucugcaugaaggucagc

SEQ ID NO: 320463 - RNA, 20 nt, Human
cucuguucacucagcagcug

SEQ ID NO: 320464 - RNA, 18 nt, Human
cugaguagcugagacuac

SEQ ID NO: 320465 - RNA, 22 nt, Human
cugcagccucaaccucuugagc

SEQ ID NO: 320466 - RNA, 23 nt, Human
cugcagccucaaccucuugagcu

SEQ ID NO: 320467 - RNA, 19 nt, Human
cuggagaaaucaaaggcug

SEQ ID NO: 320468 - RNA, 24 nt, Human
cuggagggcaauggugugaucuca

SEQ ID NO: 320469 - RNA, 22 nt, Human
cuggccuuaagcaauccuccca

SEQ ID NO: 320470 - RNA, 27 nt, Human
cuuccccaaauccuaggauuauaaaag

SEQ ID NO: 320471 - RNA, 31 nt, Human
cuucuauauauacacacacacacacacacag

SEQ ID NO: 320472 - RNA, 25 nt, Human
gaaaaaccaagacaacaccaaaaga

SEQ ID NO: 320473 - RNA, 26 nt, Human
gaaaagcuucaaaucccaccugcuaa

SEQ ID NO: 320474 - RNA, 19 nt, Human
gaaaaggugcacccucuuc

SEQ ID NO: 320475 - RNA, 21 nt, Human
gaaacaugacagagcaucccc

SEQ ID NO: 320476 - RNA, 26 nt, Human
gaaacugaauugaaaaauaaaaauaa

SEQ ID NO: 320477 - RNA, 18 nt, Human
gaacaggugagguuccuu

SEQ ID NO: 320478 - RNA, 23 nt, Human
gaccucaggugaucugccugccu

SEQ ID NO: 320479 - RNA, 23 nt, Human
gacuacaggaacaagccacugca

SEQ ID NO: 320480 - RNA, 24 nt, Human
gacuacaggcaugcuccaccaugc

SEQ ID NO: 320481 - RNA, 24 nt, Human
gacucugccacccacucacauccu

SEQ ID NO: 320482 - RNA, 25 nt, Human
gagaaaaaccaagacaacaccaaaa

SEQ ID NO: 320483 - RNA, 21 nt, Human
gagguggagaagaaagucuug

SEQ ID NO: 320484 - RNA, 24 nt, Human
gaguagcugagacuacaggcaugc

SEQ ID NO: 320485 - RNA, 18 nt, Human
gauuacaggcaugugcca

SEQ ID NO: 320486 - RNA, 21 nt, Human
gauuacaggugugagccuggc

SEQ ID NO: 320487 - RNA, 19 nt, Human
gcaacauacccuucagaug

SEQ ID NO: 320488 - RNA, 26 nt, Human
gcagggcaugagaaaaagaagaggug

SEQ ID NO: 320489 - RNA, 23 nt, Human
gccaaggggugcacaaaccugcc

SEQ ID NO: 320490 - RNA, 22 nt, Human
gcccaguuaacuuuuuuguauu

SEQ ID NO: 320491 - RNA, 24 nt, Human
gcccaguuaacuuuuuuguauuuu

SEQ ID NO: 320492 - RNA, 22 nt, Human
gccccgggagggagcagccgcu

SEQ ID NO: 320493 - RNA, 22 nt, Human
gccuuggccucccaaagugcug

SEQ ID NO: 320494 - RNA, 22 nt, Human
gcgaacaacacaucccaaacca

SEQ ID NO: 320495 - RNA, 18 nt, Human
gcucaagugauccucuca

SEQ ID NO: 320496 - RNA, 19 nt, Human
gcugacggagacacagaga

SEQ ID NO: 320497 - RNA, 28 nt, Human
gcuggagggcaauggugugaucucagau

SEQ ID NO: 320498 - RNA, 19 nt, Human
gcuggagugcaguggcgca

SEQ ID NO: 320499 - RNA, 23 nt, Human
gcuggucucaaacuccugaccuc

SEQ ID NO: 320500 - RNA, 25 nt, Human
ggacagaaaagaaacaaaacgcuga

SEQ ID NO: 320501 - RNA, 18 nt, Human
ggacuacagguaugcaca

SEQ ID NO: 320502 - RNA, 21 nt, Human
ggacuacagguaugcacaaug

SEQ ID NO: 320503 - RNA, 19 nt, Human
ggacuccccgggacgcagc

SEQ ID NO: 320504 - RNA, 18 nt, Human
ggagaaaucaaaggcugc

SEQ ID NO: 320505 - RNA, 20 nt, Human
ggagacagaugaaggcaggg

SEQ ID NO: 320506 - RNA, 19 nt, Human
ggauuacaggcaugugcca

SEQ ID NO: 320507 - RNA, 23 nt, Human
ggauuacaggugugagccuggcc

SEQ ID NO: 320508 - RNA, 22 nt, Human
ggcagcagucacaggggcccca

SEQ ID NO: 320509 - RNA, 19 nt, Human
ggcauuucaggcuuuccug

SEQ ID NO: 320510 - RNA, 22 nt, Human
ggcuggagggcaauggugugau

SEQ ID NO: 320511 - RNA, 24 nt, Human
ggcuggucucaaacuccugaccuc

SEQ ID NO: 320512 - RNA, 24 nt, Human
gggccaggccggagcgcucgggaa

SEQ ID NO: 320513 - RNA, 18 nt, Human
ggggacccaacuggcuuc

SEQ ID NO: 320514 - RNA, 22 nt, Human
gggucucgcuaugcugcccagg

SEQ ID NO: 320515 - RNA, 21 nt, Human
ggguuucaucauguuggccag

SEQ ID NO: 320516 - RNA, 22 nt, Human
ggguuucaucauguuggccagg

SEQ ID NO: 320517 - RNA, 23 nt, Human
gucauuguggauuccugcaauaa

SEQ ID NO: 320518 - RNA, 20 nt, Human
guccaaagaacuagagacca

SEQ ID NO: 320519 - RNA, 19 nt, Human
gucugugugaguguacccc

SEQ ID NO: 320520 - RNA, 23 nt, Human
gugauccucucaucucagccucc

SEQ ID NO: 320521 - RNA, 18 nt, Human
gugcagaaggagacagau

SEQ ID NO: 320522 - RNA, 22 nt, Human
gugcagccugaguugcaccugg

SEQ ID NO: 320523 - RNA, 24 nt, Human
gugcagccugaguugcaccuggcc

SEQ ID NO: 320524 - RNA, 22 nt, Human
gugcucaaguguuucauuuaug

SEQ ID NO: 320525 - RNA, 23 nt, Human
gugcugucuugcacucuguucac

SEQ ID NO: 320526 - RNA, 20 nt, Human
uaaaacccaagccagugcug

SEQ ID NO: 320527 - RNA, 21 nt, Human
uaaaaggagaaauuaggaaca

SEQ ID NO: 320528 - RNA, 22 nt, Human
uaaaauuacacauauggacuca

SEQ ID NO: 320529 - RNA, 18 nt, Human
uaaauaaugccaguucca

SEQ ID NO: 320530 - RNA, 20 nt, Human
uaacacauggcaaggguaua

SEQ ID NO: 320531 - RNA, 22 nt, Human
uaacgaaacaauuuucaaaacc

SEQ ID NO: 320532 - RNA, 21 nt, Human
uaacugggauuacaggcaugu

SEQ ID NO: 320533 - RNA, 27 nt, Human
uaagcaauccucccaacccagguuccc

SEQ ID NO: 320534 - RNA, 25 nt, Human
uaauaaaacagacaacauaaaauua

SEQ ID NO: 320535 - RNA, 25 nt, Human
uaauagagacaaggguuucaucaug

SEQ ID NO: 320536 - RNA, 22 nt, Human
uaauuuuuguguuuuuaauaga

SEQ ID NO: 320537 - RNA, 24 nt, Human
uaauuuuuguguuuuuaauagaga

SEQ ID NO: 320538 - RNA, 23 nt, Human
uacaacagcuccugaauagcugg

SEQ ID NO: 320539 - RNA, 20 nt, Human
uacacacacacacacacaca

SEQ ID NO: 320540 - RNA, 21 nt, Human
uacacauauggacucaugggu

SEQ ID NO: 320541 - RNA, 21 nt, Human
uacagacaggguucacuaugu

SEQ ID NO: 320542 - RNA, 24 nt, Human
uacagcccaccuucaccaagacac

SEQ ID NO: 320543 - RNA, 22 nt, Human
uacaggaacaagccacugcacc

SEQ ID NO: 320544 - RNA, 24 nt, Human
uacaggcaugcuccaccaugccca

SEQ ID NO: 320545 - RNA, 20 nt, Human
uacaggcaugugccaccaca

SEQ ID NO: 320546 - RNA, 23 nt, Human
uacagguaugcacaaugacaccc

SEQ ID NO: 320547 - RNA, 23 nt, Human
uacaucacugcacaauuugugca

SEQ ID NO: 320548 - RNA, 23 nt, Human
uacauuuugcacagugauuguuu

SEQ ID NO: 320549 - RNA, 19 nt, Human
uaccccuguugucaacaag

SEQ ID NO: 320550 - RNA, 19 nt, Human
uaccccuguugucaacaag

SEQ ID NO: 320551 - RNA, 20 nt, Human
uacucugggugcagaaggag

SEQ ID NO: 320552 - RNA, 19 nt, Human
uacugaguuuugagaagag

SEQ ID NO: 320553 - RNA, 22 nt, Human
uagaauguucaauaauauuauu

SEQ ID NO: 320554 - RNA, 24 nt, Human
uagaauguucaauaauauuauuac

SEQ ID NO: 320555 - RNA, 21 nt, Human
uagagacaaggguuucaucau

SEQ ID NO: 320556 - RNA, 22 nt, Human
uagagacaaggguuucaucaug

SEQ ID NO: 320557 - RNA, 23 nt, Human
uagagacaaggguuucaucaugu

SEQ ID NO: 320558 - RNA, 21 nt, Human
uagagaccauguaggucaaac

SEQ ID NO: 320559 - RNA, 18 nt, Human
uagagauggggucucgcu

SEQ ID NO: 320560 - RNA, 21 nt, Human
uagcagcaauagccccgggag

SEQ ID NO: 320561 - RNA, 19 nt, Human
uaggauuacaggugugagc

SEQ ID NO: 320562 - RNA, 20 nt, Human
uaggauuacaggugugagcc

SEQ ID NO: 320563 - RNA, 20 nt, Human
uaggauuacaggugugagcc

SEQ ID NO: 320564 - RNA, 22 nt, Human
uaggauuacaggugugagccug

SEQ ID NO: 320565 - RNA, 28 nt, Human
uaggauuacaggugugagccuggcccca

SEQ ID NO: 320566 - RNA, 27 nt, Human
uauacacacacacacacacacacaauu

SEQ ID NO: 320567 - RNA, 23 nt, Human
uauacacacagguacagagaaaa

SEQ ID NO: 320568 - RNA, 23 nt, Human
uauagagauggggucucgcuaug

SEQ ID NO: 320569 - RNA, 24 nt, Human
uauauacacacacacacacacaca

SEQ ID NO: 320570 - RNA, 23 nt, Human
uaucguaagaauuuuccucuaca

SEQ ID NO: 320571 - RNA, 20 nt, Human
uaucgugggcacgaugggag

SEQ ID NO: 320572 - RNA, 25 nt, Human
uaugaccccgccaugggcaguuucc

SEQ ID NO: 320573 - RNA, 24 nt, Human
uaugcugcccaggccagucucaaa

SEQ ID NO: 320574 - RNA, 23 nt, Human
uauguugcccaagcuggucucaa

SEQ ID NO: 320575 - RNA, 24 nt, Human
uauguugcccaagcuggucucaaa

SEQ ID NO: 320576 - RNA, 19 nt, Human
uauucuccugccucagccu

SEQ ID NO: 320577 - RNA, 21 nt, Human
uauugaacuccugggcucaag

SEQ ID NO: 320578 - RNA, 20 nt, Human
ucaaacacagaaauggcgaa

SEQ ID NO: 320579 - RNA, 19 nt, Human
ucaaacucccaggcucaag

SEQ ID NO: 320580 - RNA, 24 nt, Human
ucaaagcaaacaaauaaaaagguc

SEQ ID NO: 320581 - RNA, 20 nt, Human
ucaaugccuaugaaagcagg

SEQ ID NO: 320582 - RNA, 22 nt, Human
ucacuccuucgcccuggcugga

SEQ ID NO: 320583 - RNA, 19 nt, Human
ucacugcagccucaaccuc

SEQ ID NO: 320584 - RNA, 22 nt, Human
ucacugcagccucaaccucuug

SEQ ID NO: 320585 - RNA, 24 nt, Human
ucacuguauggcugucaugccauc

SEQ ID NO: 320586 - RNA, 22 nt, Human
ucauuguggauuccugcaauaa

SEQ ID NO: 320587 - RNA, 18 nt, Human
uccaaaaccuacuucuuc

SEQ ID NO: 320588 - RNA, 22 nt, Human
uccacauuucaccaucugaaca

SEQ ID NO: 320589 - RNA, 23 nt, Human
uccacauuucaccaucugaacau

SEQ ID NO: 320590 - RNA, 18 nt, Human
uccacggagcggaaccac

SEQ ID NO: 320591 - RNA, 18 nt, Human
uccaucagcaagagaaaa

SEQ ID NO: 320592 - RNA, 24 nt, Human
ucccaaagugcugggauugcaggc

SEQ ID NO: 320593 - RNA, 27 nt, Human
ucccaaaguguuacuuaggauuacagg

SEQ ID NO: 320594 - RNA, 30 nt, Human
ucccagacagguauugaacuccugggcuga

SEQ ID NO: 320595 - RNA, 20 nt, Human
ucccagagugcugggacuac

SEQ ID NO: 320596 - RNA, 18 nt, Human
ucccaggcucaagcaauc

SEQ ID NO: 320597 - RNA, 20 nt, Human
ucccaggcucaagcaaucuu

SEQ ID NO: 320598 - RNA, 24 nt, Human
ucccaggcucaagcaaucuuucug

SEQ ID NO: 320599 - RNA, 24 nt, Human
ucccgacuaacugggauuacaggc

SEQ ID NO: 320600 - RNA, 23 nt, Human
ucccggucucacgcccgccgcuu

SEQ ID NO: 320601 - RNA, 20 nt, Human
ucccugaccccccaugagaa

SEQ ID NO: 320602 - RNA, 18 nt, Human
ucccuugacauuuugccu

SEQ ID NO: 320603 - RNA, 25 nt, Human
uccucaggcucaagugauccucuca

SEQ ID NO: 320604 - RNA, 24 nt, Human
uccugaauagcugggacuacaggu

SEQ ID NO: 320605 - RNA, 24 nt, Human
uccugaguagcugagacuacaggc

SEQ ID NO: 320606 - RNA, 22 nt, Human
uccugaguuccauauucuccug

SEQ ID NO: 320607 - RNA, 26 nt, Human
uccugaguuccauauucuccugccuc

SEQ ID NO: 320608 - RNA, 18 nt, Human
uccugggcucaagcaauc

SEQ ID NO: 320609 - RNA, 21 nt, Human
uccugggcucaagcaauccuc

SEQ ID NO: 320610 - RNA, 24 nt, Human
ucgccccagccucccaaaguguua

SEQ ID NO: 320611 - RNA, 24 nt, Human
ucgcccuggcuggagugcaguggc

SEQ ID NO: 320612 - RNA, 21 nt, Human
ucgccucugggugcgcggcuc

SEQ ID NO: 320613 - RNA, 18 nt, Human
ucguccagccuggagugc

SEQ ID NO: 320614 - RNA, 22 nt, Human
ucuagcaugacccacauuuagc

SEQ ID NO: 320615 - RNA, 18 nt, Human
ucuaugagaaaaaccaag

SEQ ID NO: 320616 - RNA, 24 nt, Human
ucucacuccuucgcccuggcugga

SEQ ID NO: 320617 - RNA, 23 nt, Human
ucucacucugucacccaggcugg

SEQ ID NO: 320618 - RNA, 24 nt, Human
ucucacucugucacccaggcugga

SEQ ID NO: 320619 - RNA, 26 nt, Human
ucucacucugucacccaggcuggagg

SEQ ID NO: 320620 - RNA, 27 nt, Human
ucucacucugucacccaggcuggaggg

SEQ ID NO: 320621 - RNA, 24 nt, Human
ucucauuuguucuguauggcugga

SEQ ID NO: 320622 - RNA, 22 nt, Human
ucuccugccucagccucccgac

SEQ ID NO: 320623 - RNA, 26 nt, Human
ucucgcuaugcugcccaggccagucu

SEQ ID NO: 320624 - RNA, 27 nt, Human
ucucgcuaugcugcccaggccagucuc

SEQ ID NO: 320625 - RNA, 24 nt, Human
ucugcggaacagcuuuccagucca

SEQ ID NO: 320626 - RNA, 19 nt, Human
ucugcggaucuuccucgcg

SEQ ID NO: 320627 - RNA, 22 nt, Human
ucuguaggcgaacucuggccca

SEQ ID NO: 320628 - RNA, 18 nt, Human
ucugucacccaggcugga

SEQ ID NO: 320629 - RNA, 24 nt, Human
ucuugcucugucguccagccugga

SEQ ID NO: 320630 - RNA, 23 nt, Human
ucuuuuuuuuuauauagagaugg

SEQ ID NO: 320631 - RNA, 18 nt, Human
ugaaaauacagcccaccu

SEQ ID NO: 320632 - RNA, 25 nt, Human
ugaacuccugggcucaagcaauccu

SEQ ID NO: 320633 - RNA, 19 nt, Human
ugaaggaauuagaagaauu

SEQ ID NO: 320634 - RNA, 25 nt, Human
ugaauagcugggacuacagguaugc

SEQ ID NO: 320635 - RNA, 21 nt, Human
ugaaugagaaauucaguaaca

SEQ ID NO: 320636 - RNA, 21 nt, Human
ugaauguagacacccccggcc

SEQ ID NO: 320637 - RNA, 22 nt, Human
ugacacacucugccagguaaac

SEQ ID NO: 320638 - RNA, 18 nt, Human
ugaccucaggugaucugc

SEQ ID NO: 320639 - RNA, 20 nt, Human
ugaccucaggugaucugccu

SEQ ID NO: 320640 - RNA, 24 nt, Human
ugaccucaggugaucugccugccu

SEQ ID NO: 320641 - RNA, 19 nt, Human
ugacugcagccuccgccuc

SEQ ID NO: 320642 - RNA, 22 nt, Human
ugacugcagccuccgccuccug

SEQ ID NO: 320643 - RNA, 21 nt, Human
ugagaaaaaccaagacaacac

SEQ ID NO: 320644 - RNA, 25 nt, Human
ugagaaaaaccaagacaacaccaaa

SEQ ID NO: 320645 - RNA, 27 nt, Human
ugagaaaaaccaagacaacaccaaaag

SEQ ID NO: 320646 - RNA, 24 nt, Human
ugagacuacaggcaugcuccacca

SEQ ID NO: 320647 - RNA, 19 nt, Human
ugaguugaccgucacguga

SEQ ID NO: 320648 - RNA, 20 nt, Human
ugcacagcauccggcagcag

SEQ ID NO: 320649 - RNA, 19 nt, Human
ugcaccuggcuacagagug

SEQ ID NO: 320650 - RNA, 19 nt, Human
ugcaggaugaauuuuuuuu

SEQ ID NO: 320651 - RNA, 19 nt, Human
ugcaugcaacauacccuuc

SEQ ID NO: 320652 - RNA, 24 nt, Human
ugccucagccucccgacuaacugg

SEQ ID NO: 320653 - RNA, 18 nt, Human
ugccugccuuggccuccc

SEQ ID NO: 320654 - RNA, 22 nt, Human
ugcuagagggagaaaucucuuc

SEQ ID NO: 320655 - RNA, 19 nt, Human
ugcucaaguguuucauuua

SEQ ID NO: 320656 - RNA, 18 nt, Human
ugcuccaccaugcccagu

SEQ ID NO: 320657 - RNA, 24 nt, Human
ugcucugucguccagccuggagug

SEQ ID NO: 320658 - RNA, 22 nt, Human
uggaaaaacagcuccaauagca

SEQ ID NO: 320659 - RNA, 21 nt, Human
uggaaaagcuucaaaucccac

SEQ ID NO: 320660 - RNA, 19 nt, Human
uggaacagggucucacucu

SEQ ID NO: 320661 - RNA, 22 nt, Human
uggaacagggucucacucuguc

SEQ ID NO: 320662 - RNA, 19 nt, Human
uggagaagaaagucuugga

SEQ ID NO: 320663 - RNA, 23 nt, Human
uggagagggaguggggcugaacu

SEQ ID NO: 320664 - RNA, 19 nt, Human
uggagggcaauggugugau

SEQ ID NO: 320665 - RNA, 23 nt, Human
uggagugcacuggcacaaucagg

SEQ ID NO: 320666 - RNA, 23 nt, Human
uggagugcaguggcgcaaucuug

SEQ ID NO: 320667 - RNA, 24 nt, Human
uggagugcaguggcgcaaucuugg

SEQ ID NO: 320668 - RNA, 23 nt, Human
uggcacaaucagggcucacugca

SEQ ID NO: 320669 - RNA, 24 nt, Human
uggccaggcuggucucaaacuccu

SEQ ID NO: 320670 - RNA, 21 nt, Human
uggccuggaccuccucaggcu

SEQ ID NO: 320671 - RNA, 20 nt, Human
uggccuuaagcaauccuccc

SEQ ID NO: 320672 - RNA, 21 nt, Human
uggccuuaagcaauccuccca

SEQ ID NO: 320673 - RNA, 21 nt, Human
uggcgaacaacacaucccaaa

SEQ ID NO: 320674 - RNA, 23 nt, Human
uggcuacagaguggagccuugga

SEQ ID NO: 320675 - RNA, 23 nt, Human
uggcuggagugcaguggcgcaau

SEQ ID NO: 320676 - RNA, 19 nt, Human
uggcugggcggugcucacg

SEQ ID NO: 320677 - RNA, 22 nt, Human
ugggacuacaggaacaagccac

SEQ ID NO: 320678 - RNA, 22 nt, Human
ugggacuacaggaacaagccac

SEQ ID NO: 320679 - RNA, 24 nt, Human
ugggacuacaggaacaagccacug

SEQ ID NO: 320680 - RNA, 24 nt, Human
ugggacuacaggaacaagccacug

SEQ ID NO: 320681 - RNA, 18 nt, Human
ugggacuacagguaugca

SEQ ID NO: 320682 - RNA, 18 nt, Human
ugggauuacaggcaugug

SEQ ID NO: 320683 - RNA, 21 nt, Human
ugggauuacaggcaugugcca

SEQ ID NO: 320684 - RNA, 22 nt, Human
ugggauuacaggcaugugccac

SEQ ID NO: 320685 - RNA, 24 nt, Human
ugggauuacaggcaugugccacca

SEQ ID NO: 320686 - RNA, 19 nt, Human
ugggauugcaggcaugaca

SEQ ID NO: 320687 - RNA, 22 nt, Human
ugggauugcaggcaugacacac

SEQ ID NO: 320688 - RNA, 22 nt, Human
ugggauugcaggcaugacacac

SEQ ID NO: 320689 - RNA, 25 nt, Human
ugggauugcaggcaugacacacucu

SEQ ID NO: 320690 - RNA, 19 nt, Human
ugggggcaaggcagauggu

SEQ ID NO: 320691 - RNA, 24 nt, Human
uggggucucgcuaugcugcccagg

SEQ ID NO: 320692 - RNA, 22 nt, Human
ugggugcagaaggagacagaug

SEQ ID NO: 320693 - RNA, 21 nt, Human
uggugagugagaagcacaggc

SEQ ID NO: 320694 - RNA, 23 nt, Human
ugguuauaaucaaauaaguccag

SEQ ID NO: 320695 - RNA, 18 nt, Human
uguaaagaguuuauucug

SEQ ID NO: 320696 - RNA, 23 nt, Human
uguagagaugagguguuucccag

SEQ ID NO: 320697 - RNA, 23 nt, Human
uguauggcuggaggcugaucaug

SEQ ID NO: 320698 - RNA, 23 nt, Human
uuaaaaauaggcacuccccuccc

SEQ ID NO: 320699 - RNA, 25 nt, Human
uuaauagagacaaggguuucaucau

SEQ ID NO: 320700 - RNA, 28 nt, Human
uucaaaaccuuccuacaguguggaauuc

SEQ ID NO: 320701 - RNA, 19 nt, Human
uucaaaagcaaaaagccau

SEQ ID NO: 320702 - RNA, 20 nt, Human
uucaaaagcaaaaagccauu

SEQ ID NO: 320703 - RNA, 19 nt, Human
uucaccaagacacacacac

SEQ ID NO: 320704 - RNA, 23 nt, Human
uucccccaaacuauacaaugcau

SEQ ID NO: 320705 - RNA, 23 nt, Human
uugaagauuucuaaauccuucug

SEQ ID NO: 320706 - RNA, 23 nt, Human
uugacucugccacccacucacau

SEQ ID NO: 320707 - RNA, 22 nt, Human
uuggaauugcuucuaauuucuc

SEQ ID NO: 320708 - RNA, 23 nt, Human
uuggagucuuuaacaguguuaag

SEQ ID NO: 320709 - RNA, 18 nt, Human
uuggccucccaaagugcu

SEQ ID NO: 320710 - RNA, 23 nt, Human
uuggguuuuuuuuuuuuuuugga

SEQ ID NO: 320711 - RNA, 24 nt, Human
uuuaacauuuccauuuccuaaaga

SEQ ID NO: 320712 - RNA, 18 nt, Human
uuuaguauaccugcuacc

SEQ ID NO: 320713 - RNA, 24 nt, Human
uuucaucauguuggccaggcuggu

SEQ ID NO: 320714 - RNA, 24 nt, Human
uuuuauuuuuugagaugggagucu

SEQ ID NO: 320715 - RNA, 24 nt, Human
uuuuuaauagagacaaggguuuca

SEQ ID NO: 320716 - RNA, 20 nt, Human
uuuuuguguuuuuaauagag

SEQ ID NO: 320717 - RNA, 23 nt, Human
uuuuuguguuuuuaauagagaca

SEQ ID NO: 320718 - RNA, 19 nt, Human
uuuuuuguauuuuguagag

SEQ ID NO: 320719 - RNA, 21 nt, Human
uuuuuuguauuuuguagagau

SEQ ID NO: 320720 - RNA, 23 nt, Human
uuuuuuuuuuggaacagggucuc

SEQ ID NO: 320721 - RNA, 20 nt, Human
uuuuuuuuuuuggaacaggg

SEQ ID NO: 320722 - RNA, 23 nt, Human
uuuuuuuuuuuuggaacaggguc

SEQ ID NO: 320723 - RNA, 19 nt, Human
agcauggauucaaaagaga

SEQ ID NO: 320724 - RNA, 21 nt, Human
ccaagcauggauucaaaagag

SEQ ID NO: 320725 - RNA, 20 nt, Human
gagucaguuuuuauuuuuua

SEQ ID NO: 320726 - RNA, 18 nt, Human
uaaaagaagcuugcaaug

SEQ ID NO: 320727 - RNA, 21 nt, Human
uggaacggaucauuaaggacc

SEQ ID NO: 320728 - RNA, 22 nt, Human
aaagcccagcccagaaaaccgg

SEQ ID NO: 320729 - RNA, 23 nt, Human
aaagcccagcccagaaaaccggc

SEQ ID NO: 320730 - RNA, 21 nt, Human
aacagcaaaaaguaaaucuac

SEQ ID NO: 320731 - RNA, 23 nt, Human
aaggagcugggagcuuuaguagg

SEQ ID NO: 320732 - RNA, 20 nt, Human
acauaguuuuauaacuaaca

SEQ ID NO: 320733 - RNA, 21 nt, Human
agaaagaggcaagugguuaaa

SEQ ID NO: 320734 - RNA, 19 nt, Human
agaaagcccagcccagaaa

SEQ ID NO: 320735 - RNA, 18 nt, Human
agaggauauaccuauugg

SEQ ID NO: 320736 - RNA, 20 nt, Human
aggacaugaagcuccauugu

SEQ ID NO: 320737 - RNA, 19 nt, Human
auggagcaugaaaggagcu

SEQ ID NO: 320738 - RNA, 19 nt, Human
caguaagguauaggaacuu

SEQ ID NO: 320739 - RNA, 21 nt, Human
cauccucaguguucgccucca

SEQ ID NO: 320740 - RNA, 21 nt, Human
ccuccaugaauaggagaguuc

SEQ ID NO: 320741 - RNA, 19 nt, Human
ccugcacgaggacaugaag

SEQ ID NO: 320742 - RNA, 18 nt, Human
gaaagagggagaaggagu

SEQ ID NO: 320743 - RNA, 23 nt, Human
gcaauuuucauggcauuuuccua

SEQ ID NO: 320744 - RNA, 27 nt, Human
uaacagcaaaaaguaaaucuacaaauc

SEQ ID NO: 320745 - RNA, 19 nt, Human
uaacuaacagcaaaaagua

SEQ ID NO: 320746 - RNA, 23 nt, Human
uauaacuaacagcaaaaaguaaa

SEQ ID NO: 320747 - RNA, 20 nt, Human
uaucagaaguucacuucagg

SEQ ID NO: 320748 - RNA, 26 nt, Human
uaucagaaguucacuucaggguucau

SEQ ID NO: 320749 - RNA, 18 nt, Human
ucuuuugucaucuuucua

SEQ ID NO: 320750 - RNA, 24 nt, Human
ugaguaagcagaaagcccagccca

SEQ ID NO: 320751 - RNA, 23 nt, Human
ugaguacuuccugcacgaggaca

SEQ ID NO: 320752 - RNA, 22 nt, Human
ugcugcaggaaauguaucagaa

SEQ ID NO: 320753 - RNA, 19 nt, Human
uggaaagcuguuucgcgaa

SEQ ID NO: 320754 - RNA, 22 nt, Human
uggcauugucccucaagaauac

SEQ ID NO: 320755 - RNA, 21 nt, Human
ugguuaaaaauggagcaugaa

SEQ ID NO: 320756 - RNA, 19 nt, Human
uuaguuuugucagggagca

SEQ ID NO: 320757 - RNA, 24 nt, Human
uuucacguacucuguaguguuacc

SEQ ID NO: 320758 - RNA, 21 nt, Human
agccagccaaccugucagcag

SEQ ID NO: 320759 - RNA, 21 nt, Human
aggcaggaguuugguggaugu

SEQ ID NO: 320760 - RNA, 21 nt, Human
ccugucagcagguggaacucu

SEQ ID NO: 320761 - RNA, 23 nt, Human
ggcaagaggaucuugaagucugg

SEQ ID NO: 320762 - RNA, 18 nt, Human
ucagagcagggcaccacc

SEQ ID NO: 320763 - RNA, 23 nt, Human
ucagcagguggaacucugugggc

SEQ ID NO: 320764 - RNA, 21 nt, Human
uggaacucugugggcagcuga

SEQ ID NO: 320765 - RNA, 18 nt, Human
uggcaagaggaucuugaa

SEQ ID NO: 320766 - RNA, 20 nt, Human
uucaagauguggcaagagga

SEQ ID NO: 320767 - RNA, 19 nt, Human
uuccuuagcaggcuccuga

SEQ ID NO: 320768 - RNA, 21 nt, Human
uucucaggcaggaguuuggug

SEQ ID NO: 320769 - RNA, 20 nt, Human
uuggcugagccagccaaccu

SEQ ID NO: 320770 - RNA, 21 nt, Human
aagcuuuauugggcaggugac

SEQ ID NO: 320771 - RNA, 19 nt, Human
acuugguguuucgggcgac

SEQ ID NO: 320772 - RNA, 19 nt, Human
aggagggcggaggccugcc

SEQ ID NO: 320773 - RNA, 19 nt, Human
aggggaggagggcggaggc

SEQ ID NO: 320774 - RNA, 20 nt, Human
aggggaggagggcggaggcc

SEQ ID NO: 320775 - RNA, 18 nt, Human
cccuggaguaggggagga

SEQ ID NO: 320776 - RNA, 18 nt, Human
cucacucgguguuucuug

SEQ ID NO: 320777 - RNA, 22 nt, Human
cuccugggcugaggcugcagug

SEQ ID NO: 320778 - RNA, 20 nt, Human
cugaggcugcagugggcccc

SEQ ID NO: 320779 - RNA, 22 nt, Human
gagcauuugauguaggggaauu

SEQ ID NO: 320780 - RNA, 20 nt, Human
gagcauuugauguaggggag

SEQ ID NO: 320781 - RNA, 21 nt, Human
ggcugcagugggcccuggagu

SEQ ID NO: 320782 - RNA, 23 nt, Human
gggagaucugguggcuccugggc

SEQ ID NO: 320783 - RNA, 24 nt, Human
gggagaucugguggcuccugggcu

SEQ ID NO: 320784 - RNA, 23 nt, Human
gggcccuggaguaggggaggagg

SEQ ID NO: 320785 - RNA, 18 nt, Human
gguguugggagaucuggu

SEQ ID NO: 320786 - RNA, 28 nt, Human
guggcuccugggcugaggcugcaguggg

SEQ ID NO: 320787 - RNA, 19 nt, Human
uccugggcugaggcugcag

SEQ ID NO: 320788 - RNA, 18 nt, Human
ugcagugggcccuggagu

SEQ ID NO: 320789 - RNA, 18 nt, Human
ugggcaggugacuuugca

SEQ ID NO: 320790 - RNA, 19 nt, Human
ugggcuucucggcggcaac

SEQ ID NO: 320791 - RNA, 22 nt, Human
ugguguuucgggcgacuuuuuc

SEQ ID NO: 320792 - RNA, 18 nt, Human
uguugggagaucuggugg

SEQ ID NO: 320793 - RNA, 20 nt, Human
uucuuaauuuccagcugggg

SEQ ID NO: 320794 - RNA, 24 nt, Human
uugguguuucgggcgacuuuuucu

SEQ ID NO: 320795 - RNA, 23 nt, Human
uuucucuuaacuuccagcugggg

SEQ ID NO: 320796 - RNA, 23 nt, Human
uuuuucuuaauuuccagcugggg

SEQ ID NO: 320797 - RNA, 18 nt, Human
aaacaucaccccaguucu

SEQ ID NO: 320798 - RNA, 19 nt, Human
aaacuccuaagucuguccu

SEQ ID NO: 320799 - RNA, 19 nt, Human
aaagauggugaaaacagga

SEQ ID NO: 320800 - RNA, 20 nt, Human
aaagauuagaaagaugguga

SEQ ID NO: 320801 - RNA, 23 nt, Human
aaggagccagagguauccaggca

SEQ ID NO: 320802 - RNA, 23 nt, Human
aauacauaucugcuaggugacaa

SEQ ID NO: 320803 - RNA, 24 nt, Human
acaaaacaagaacaugcaaaguua

SEQ ID NO: 320804 - RNA, 23 nt, Human
acuguucugagauuuguuuuagc

SEQ ID NO: 320805 - RNA, 23 nt, Human
agccaauaauaacauugcagaaa

SEQ ID NO: 320806 - RNA, 23 nt, Human
agugcacauuguaagccuaagga

SEQ ID NO: 320807 - RNA, 24 nt, Human
aucauguggccuccuaacaaaccu

SEQ ID NO: 320808 - RNA, 24 nt, Human
augucaaaaucauucugguuucca

SEQ ID NO: 320809 - RNA, 19 nt, Human
auuuuauauacauauauau

SEQ ID NO: 320810 - RNA, 25 nt, Human
caagccaauaauaacauugcagaaa

SEQ ID NO: 320811 - RNA, 22 nt, Human
caagggcaccauucccaaacau

SEQ ID NO: 320812 - RNA, 24 nt, Human
caauuaugagacagaaauaaagaa

SEQ ID NO: 320813 - RNA, 20 nt, Human
cacaaagugcaagccaauaa

SEQ ID NO: 320814 - RNA, 24 nt, Human
caccaccacuaaaagggcugcagg

SEQ ID NO: 320815 - RNA, 21 nt, Human
cagcaucucaggucuacucua

SEQ ID NO: 320816 - RNA, 22 nt, Human
cagcgggcugagccugcauccc

SEQ ID NO: 320817 - RNA, 19 nt, Human
ccacgcaaaaggguuuccc

SEQ ID NO: 320818 - RNA, 21 nt, Human
ccagugcccaucagugccaag

SEQ ID NO: 320819 - RNA, 24 nt, Human
ccuccuaacaaaccuggcagaaau

SEQ ID NO: 320820 - RNA, 18 nt, Human
ccucggucgugaggagag

SEQ ID NO: 320821 - RNA, 18 nt, Human
cuccaagggcaccauucc

SEQ ID NO: 320822 - RNA, 19 nt, Human
cugcugaaggagccagagg

SEQ ID NO: 320823 - RNA, 22 nt, Human
gaaggagccagagguauccagg

SEQ ID NO: 320824 - RNA, 19 nt, Human
gauggugaaaacaggaaga

SEQ ID NO: 320825 - RNA, 18 nt, Human
gcacauuguaagccuaag

SEQ ID NO: 320826 - RNA, 20 nt, Human
gcagguggauaccgccuccc

SEQ ID NO: 320827 - RNA, 23 nt, Human
gccugcaucccaagagcuaagaa

SEQ ID NO: 320828 - RNA, 21 nt, Human
gcuaugaaaucucuacuaaga

SEQ ID NO: 320829 - RNA, 22 nt, Human
ggacaaaggagauuugccuuca

SEQ ID NO: 320830 - RNA, 22 nt, Human
uaacaaaacaagaacaugcaaa

SEQ ID NO: 320831 - RNA, 23 nt, Human
uaaggaccacgcaaaaggguuuc

SEQ ID NO: 320832 - RNA, 22 nt, Human
uaauuaacauuaacagaauuuc

SEQ ID NO: 320833 - RNA, 22 nt, Human
uacaugcauauuucaaagaccu

SEQ ID NO: 320834 - RNA, 22 nt, Human
uagaaaauauaaaguacaugca

SEQ ID NO: 320835 - RNA, 22 nt, Human
uagccagagguucaguguugug

SEQ ID NO: 320836 - RNA, 24 nt, Human
uauaaaguacaugcauauuucaaa

SEQ ID NO: 320837 - RNA, 23 nt, Human
uauaacaaaacaagaacaugcaa

SEQ ID NO: 320838 - RNA, 24 nt, Human
uaugucaaaaucauucugguuucc

SEQ ID NO: 320839 - RNA, 21 nt, Human
uauuuacucuuguugaacagc

SEQ ID NO: 320840 - RNA, 22 nt, Human
ucccaagagcuaagaaucucua

SEQ ID NO: 320841 - RNA, 24 nt, Human
uccuuuaaacaucuaaaaugggag

SEQ ID NO: 320842 - RNA, 24 nt, Human
ucuaaaaugggagguugccuccaa

SEQ ID NO: 320843 - RNA, 19 nt, Human
ucuagccagagguucagug

SEQ ID NO: 320844 - RNA, 23 nt, Human
ucucccuauucuuugauucaaaa

SEQ ID NO: 320845 - RNA, 21 nt, Human
ugaacagcugcuguguagccc

SEQ ID NO: 320846 - RNA, 22 nt, Human
ugaacagcugcuguguagccca

SEQ ID NO: 320847 - RNA, 21 nt, Human
ugaccuaauucugguuuuuga

SEQ ID NO: 320848 - RNA, 21 nt, Human
ugagauuuguuuuagccucaa

SEQ ID NO: 320849 - RNA, 23 nt, Human
ugagccugcaucccaagagcuaa

SEQ ID NO: 320850 - RNA, 21 nt, Human
ugcagaaaaguaauacauauc

SEQ ID NO: 320851 - RNA, 21 nt, Human
ugccaaggguauugauuagcc

SEQ ID NO: 320852 - RNA, 20 nt, Human
uggccuggcauuagcaacgg

SEQ ID NO: 320853 - RNA, 23 nt, Human
uguggccuccuaacaaaccuggc

SEQ ID NO: 320854 - RNA, 22 nt, Human
uucugguuuccagguaaaugga

SEQ ID NO: 320855 - RNA, 22 nt, Human
uucugguuuuugacaauuauga

SEQ ID NO: 320856 - RNA, 19 nt, Human
uuguaagccuaaggaccac

SEQ ID NO: 320857 - RNA, 19 nt, Human
uuguuuuagccucaaccug

SEQ ID NO: 320858 - RNA, 23 nt, Human
uuucaaagaccuguuaauggugu

SEQ ID NO: 320859 - RNA, 18 nt, Human
aaacagaguaucccccuc

SEQ ID NO: 320860 - RNA, 24 nt, Human
acagcccccccccccccccccccc

SEQ ID NO: 320861 - RNA, 24 nt, Human
acuggcaccuguaggggcgggucg

SEQ ID NO: 320862 - RNA, 20 nt, Human
agggggggggggcggggggg

SEQ ID NO: 320863 - RNA, 18 nt, Human
aucugcuccuccccaccc

SEQ ID NO: 320864 - RNA, 22 nt, Human
augucccuuuaaugucccaucc

SEQ ID NO: 320865 - RNA, 21 nt, Human
cauaaacagaguaucccccuc

SEQ ID NO: 320866 - RNA, 23 nt, Human
caugcaaaagcccagcccugcag

SEQ ID NO: 320867 - RNA, 20 nt, Human
ccaaaagagggauggaagga

SEQ ID NO: 320868 - RNA, 18 nt, Human
ccaugacagccccccccc

SEQ ID NO: 320869 - RNA, 24 nt, Human
cccauccauugccaugcaaaagcc

SEQ ID NO: 320870 - RNA, 20 nt, Human
ccccacagaguugcucuagg

SEQ ID NO: 320871 - RNA, 18 nt, Human
cccccccccccccccccc

SEQ ID NO: 320872 - RNA, 19 nt, Human
ccccccccccccccccccc

SEQ ID NO: 320873 - RNA, 19 nt, Human
ccccccccccccccccccc

SEQ ID NO: 320874 - RNA, 18 nt, Human
ccccucaacacacacagc

SEQ ID NO: 320875 - RNA, 22 nt, Human
cccucaacacacacagcuuuag

SEQ ID NO: 320876 - RNA, 24 nt, Human
ccugccgccaugacagcccccccc

SEQ ID NO: 320877 - RNA, 21 nt, Human
cguccugccgccaugacagcc

SEQ ID NO: 320878 - RNA, 20 nt, Human
cuccagaagagcccaaaaga

SEQ ID NO: 320879 - RNA, 19 nt, Human
cuccuccccaccccacaga

SEQ ID NO: 320880 - RNA, 23 nt, Human
cuuggaucugcuccuccccaccc

SEQ ID NO: 320881 - RNA, 19 nt, Human
gaucugcuccuccccaccc

SEQ ID NO: 320882 - RNA, 21 nt, Human
uaaacagaguaucccccucaa

SEQ ID NO: 320883 - RNA, 21 nt, Human
ucaguaaauguuacuucccuc

SEQ ID NO: 320884 - RNA, 18 nt, Human
ucccauccauugccaugc

SEQ ID NO: 320885 - RNA, 20 nt, Human
ugguuguguuuuuuauucuu

SEQ ID NO: 320886 - RNA, 21 nt, Human
uucccuccagaagagcccaaa

SEQ ID NO: 320887 - RNA, 25 nt, Human
uuguuacaugucccuuuaauguccc

SEQ ID NO: 320888 - RNA, 20 nt, Human
uuucgugguuguguuuuuua

SEQ ID NO: 320889 - RNA, 18 nt, Human
uuuuuuuuuuuuuuuucg

SEQ ID NO: 320890 - RNA, 21 nt, Human
uuuuuuuuuuuuuuuucgugg

SEQ ID NO: 320891 - RNA, 23 nt, Human
uuuuuuuuuuuuuuuucgugguu

SEQ ID NO: 320892 - RNA, 20 nt, Human
uuuuuuuuuuuuuuuuucgu

SEQ ID NO: 320893 - RNA, 20 nt, Human
aacgccucaggugauucugu

SEQ ID NO: 320894 - RNA, 22 nt, Human
accaaguacuuuguccaccucu

SEQ ID NO: 320895 - RNA, 26 nt, Human
acuuuguccaccucuccucuccaucu

SEQ ID NO: 320896 - RNA, 24 nt, Human
agccccuucugacggggcuggaga

SEQ ID NO: 320897 - RNA, 18 nt, Human
aggcuccggaccuggguu

SEQ ID NO: 320898 - RNA, 21 nt, Human
aggcuuccugccccaacucca

SEQ ID NO: 320899 - RNA, 25 nt, Human
caccucuccucuccaucuccccucc

SEQ ID NO: 320900 - RNA, 20 nt, Human
ccauaugacuuggauuuuac

SEQ ID NO: 320901 - RNA, 21 nt, Human
ccugaaguugaggcuccggac

SEQ ID NO: 320902 - RNA, 26 nt, Human
cuccucuccaucuccccucccucaaa

SEQ ID NO: 320903 - RNA, 21 nt, Human
cuuuguccaccucuccucucc

SEQ ID NO: 320904 - RNA, 18 nt, Human
gaugugggagaagaaagg

SEQ ID NO: 320905 - RNA, 20 nt, Human
ggccauaggcuuccugcccc

SEQ ID NO: 320906 - RNA, 20 nt, Human
gggcagaugugggagaagaa

SEQ ID NO: 320907 - RNA, 24 nt, Human
uaaauauaagaaauuuauuaauau

SEQ ID NO: 320908 - RNA, 20 nt, Human
uacuuuguccaccucuccuc

SEQ ID NO: 320909 - RNA, 21 nt, Human
uaggcuuccugccccaacucc

SEQ ID NO: 320910 - RNA, 23 nt, Human
uagguucuuagcaaaccaaguac

SEQ ID NO: 320911 - RNA, 19 nt, Human
ucacugccauaugacuugg

SEQ ID NO: 320912 - RNA, 23 nt, Human
ucagugggcagaugugggagaag

SEQ ID NO: 320913 - RNA, 18 nt, Human
ucccuugccagccuccau

SEQ ID NO: 320914 - RNA, 20 nt, Human
ucuccaucuccccucccuca

SEQ ID NO: 320915 - RNA, 20 nt, Human
ucugucuuuggaggaugggc

SEQ ID NO: 320916 - RNA, 21 nt, Human
ugccccaacuccauuaucugu

SEQ ID NO: 320917 - RNA, 19 nt, Human
uggcucgggccggcugcgg

SEQ ID NO: 320918 - RNA, 21 nt, Human
ugggcagaugugggagaagaa

SEQ ID NO: 320919 - RNA, 24 nt, Human
uuccacaaagauagauaaacauuc

SEQ ID NO: 320920 - RNA, 18 nt, Human
uuccuggcucgggccggc

SEQ ID NO: 320921 - RNA, 18 nt, Human
uuccuggcucgggccggc

SEQ ID NO: 320922 - RNA, 21 nt, Human
uuccuggcucgggccggcugc

SEQ ID NO: 320923 - RNA, 19 nt, Human
uucguguuacuucuuucua

SEQ ID NO: 320924 - RNA, 23 nt, Human
uuuuuuuauuuuuuuuuugccuu

SEQ ID NO: 320925 - RNA, 25 nt, Human
uuuuuuuuuuuuuuuuuuuauuuuu

SEQ ID NO: 320926 - RNA, 20 nt, Human
agccucugcuccugcucucc

SEQ ID NO: 320927 - RNA, 23 nt, Human
agugcccauacucugggcagggc

SEQ ID NO: 320928 - RNA, 19 nt, Human
aucagguucggcccacacc

SEQ ID NO: 320929 - RNA, 19 nt, Human
cacauucgaggagaguucc

SEQ ID NO: 320930 - RNA, 19 nt, Human
caccugagugcccauacuc

SEQ ID NO: 320931 - RNA, 21 nt, Human
cagcccggccacugcucccca

SEQ ID NO: 320932 - RNA, 22 nt, Human
cagcccggccacugcuccccaa

SEQ ID NO: 320933 - RNA, 24 nt, Human
cagguaucagguucggcccacacc

SEQ ID NO: 320934 - RNA, 19 nt, Human
caguggcugucccaggcag

SEQ ID NO: 320935 - RNA, 23 nt, Human
ccucaccuccagcagcucugcaa

SEQ ID NO: 320936 - RNA, 23 nt, Human
ccuccccagcccggccacugcuc

SEQ ID NO: 320937 - RNA, 18 nt, Human
ccugaccucaccuccagc

SEQ ID NO: 320938 - RNA, 18 nt, Human
cucgggcugugugggcug

SEQ ID NO: 320939 - RNA, 21 nt, Human
cugcuccccaaggggcucggg

SEQ ID NO: 320940 - RNA, 22 nt, Human
cuggcacuucagcugcauggug

SEQ ID NO: 320941 - RNA, 20 nt, Human
cugugugaggaugggguugg

SEQ ID NO: 320942 - RNA, 21 nt, Human
gaagguggacaauccucuagg

SEQ ID NO: 320943 - RNA, 24 nt, Human
gaagguggacaauccucuaggucc

SEQ ID NO: 320944 - RNA, 22 nt, Human
gacuucacaagcacccuggcac

SEQ ID NO: 320945 - RNA, 18 nt, Human
gaggugggggccuugggc

SEQ ID NO: 320946 - RNA, 23 nt, Human
gcugcagcuguggugauggccug

SEQ ID NO: 320947 - RNA, 20 nt, Human
gcugugugggcuggccuugg

SEQ ID NO: 320948 - RNA, 25 nt, Human
ggacaugggggucacagaggugggg

SEQ ID NO: 320949 - RNA, 20 nt, Human
ggucacagaggugggggccu

SEQ ID NO: 320950 - RNA, 20 nt, Human
gugauggccugggcgggggc

SEQ ID NO: 320951 - RNA, 18 nt, Human
gugugaggaugggguugg

SEQ ID NO: 320952 - RNA, 21 nt, Human
uagguccaaggacaugggggu

SEQ ID NO: 320953 - RNA, 20 nt, Human
uaucagguucggcccacacc

SEQ ID NO: 320954 - RNA, 20 nt, Human
uccagcagcucugcaagugu

SEQ ID NO: 320955 - RNA, 23 nt, Human
ugaagacagcaacagagugagac

SEQ ID NO: 320956 - RNA, 21 nt, Human
ugaccaggcaggccuccccag

SEQ ID NO: 320957 - RNA, 27 nt, Human
ugcagcuguggugauggccugggcggg

SEQ ID NO: 320958 - RNA, 22 nt, Human
ugcccauacucugggcagggcu

SEQ ID NO: 320959 - RNA, 23 nt, Human
uggcugcagcuguggugauggcc

SEQ ID NO: 320960 - RNA, 20 nt, Human
ugggaggcaccugaccucac

SEQ ID NO: 320961 - RNA, 22 nt, Human
uggggacccucugccggcaggg

SEQ ID NO: 320962 - RNA, 23 nt, Human
ugggggucacagaggugggggcc

SEQ ID NO: 320963 - RNA, 19 nt, Human
ugguuuauugaccaggcag

SEQ ID NO: 320964 - RNA, 18 nt, Human
ugugugaggaugggguug

SEQ ID NO: 320965 - RNA, 19 nt, Human
ugugugaggaugggguugg

SEQ ID NO: 320966 - RNA, 23 nt, Human
uuggcagaagguggacaauccuc

SEQ ID NO: 320967 - RNA, 20 nt, Human
uuuccaguggcugucccagg

SEQ ID NO: 320968 - RNA, 18 nt, Human
aacacugccugcuuagau

SEQ ID NO: 320969 - RNA, 22 nt, Human
aaggaguuguuuaaggaaacac

SEQ ID NO: 320970 - RNA, 19 nt, Human
aaggaugguggguauccug

SEQ ID NO: 320971 - RNA, 21 nt, Human
aauggaaaagcugugggaauu

SEQ ID NO: 320972 - RNA, 24 nt, Human
aauugccuucuaauaugucaauau

SEQ ID NO: 320973 - RNA, 20 nt, Human
acagaggacugcccuccuca

SEQ ID NO: 320974 - RNA, 21 nt, Human
acaggccacaagccacaggcu

SEQ ID NO: 320975 - RNA, 23 nt, Human
acucugagcaaugcacccaagag

SEQ ID NO: 320976 - RNA, 26 nt, Human
agaggggcagggcccaggaaagagag

SEQ ID NO: 320977 - RNA, 19 nt, Human
agagucuucagggggcuga

SEQ ID NO: 320978 - RNA, 19 nt, Human
agauuagauugaaccacca

SEQ ID NO: 320979 - RNA, 19 nt, Human
aggggcagggcccaggaaa

SEQ ID NO: 320980 - RNA, 19 nt, Human
agggggaauguccuuucug

SEQ ID NO: 320981 - RNA, 22 nt, Human
agggggaauguccuuucugcca

SEQ ID NO: 320982 - RNA, 20 nt, Human
aggucaccuggggaggggag

SEQ ID NO: 320983 - RNA, 21 nt, Human
aguuggugcuuuuauucuaaa

SEQ ID NO: 320984 - RNA, 23 nt, Human
augcacccaagagccugugccca

SEQ ID NO: 320985 - RNA, 22 nt, Human
cacagaccucacgugaagggcc

SEQ ID NO: 320986 - RNA, 23 nt, Human
cacugccugcuuagaugccucuc

SEQ ID NO: 320987 - RNA, 21 nt, Human
caggucaccuggggaggggag

SEQ ID NO: 320988 - RNA, 23 nt, Human
ccacagccucaagcugugacauc

SEQ ID NO: 320989 - RNA, 23 nt, Human
cccacaaauugguccucacagac

SEQ ID NO: 320990 - RNA, 27 nt, Human
ccugggacucugagcaaugcacccaag

SEQ ID NO: 320991 - RNA, 18 nt, Human
ccuuucagccccugcccu

SEQ ID NO: 320992 - RNA, 18 nt, Human
ccuuucugccauuuacca

SEQ ID NO: 320993 - RNA, 19 nt, Human
cucaagcugugacauccuc

SEQ ID NO: 320994 - RNA, 18 nt, Human
cugcccugcucccugucc

SEQ ID NO: 320995 - RNA, 19 nt, Human
cugcccugcucccuguccc

SEQ ID NO: 320996 - RNA, 21 nt, Human
cugcucccugucccuugcucc

SEQ ID NO: 320997 - RNA, 20 nt, Human
cugugugcauaugugcguag

SEQ ID NO: 320998 - RNA, 25 nt, Human
cuucagggggcugauuggccucccu

SEQ ID NO: 320999 - RNA, 18 nt, Human
gccaccuuucacaccaca

SEQ ID NO: 321000 - RNA, 19 nt, Human
gcccaggaaagagagcagg

SEQ ID NO: 321001 - RNA, 19 nt, Human
gcucccaccccaaucugga

SEQ ID NO: 321002 - RNA, 18 nt, Human
ggaaagagagcaggucac

SEQ ID NO: 321003 - RNA, 19 nt, Human
ggaagagccaaucuugagg

SEQ ID NO: 321004 - RNA, 18 nt, Human
ggaauugggggcuucagu

SEQ ID NO: 321005 - RNA, 23 nt, Human
ggcagaaauaaaaauccaggcug

SEQ ID NO: 321006 - RNA, 19 nt, Human
gggagaggggcagggccca

SEQ ID NO: 321007 - RNA, 19 nt, Human
gggagguaugucugccugu

SEQ ID NO: 321008 - RNA, 21 nt, Human
ggggaggggagggggaauguc

SEQ ID NO: 321009 - RNA, 20 nt, Human
uagaugccucucgcuucccc

SEQ ID NO: 321010 - RNA, 24 nt, Human
ucacaccacagccucaagcuguga

SEQ ID NO: 321011 - RNA, 20 nt, Human
ucagugccccuuucagcccc

SEQ ID NO: 321012 - RNA, 23 nt, Human
ucccugucccuugcucccacccc

SEQ ID NO: 321013 - RNA, 21 nt, Human
ucugagcaaugcacccaagag

SEQ ID NO: 321014 - RNA, 21 nt, Human
ucugccauuuaccaccucucu

SEQ ID NO: 321015 - RNA, 24 nt, Human
ugaacuacccacaaauugguccuc

SEQ ID NO: 321016 - RNA, 21 nt, Human
ugcccugcucccugucccuug

SEQ ID NO: 321017 - RNA, 24 nt, Human
ugcucccugucccuugcucccacc

SEQ ID NO: 321018 - RNA, 19 nt, Human
uggcagaaauaaaaaucca

SEQ ID NO: 321019 - RNA, 20 nt, Human
uggcagaaggucacagguca

SEQ ID NO: 321020 - RNA, 25 nt, Human
uggccaccuuucacaccacagccuc

SEQ ID NO: 321021 - RNA, 18 nt, Human
ugggaccagagucuucag

SEQ ID NO: 321022 - RNA, 19 nt, Human
ugggcucccuacaccugcc

SEQ ID NO: 321023 - RNA, 19 nt, Human
uggggagaggggcagggcc

SEQ ID NO: 321024 - RNA, 20 nt, Human
uggggagaggggcagggccc

SEQ ID NO: 321025 - RNA, 18 nt, Human
uggggaggggagggggaa

SEQ ID NO: 321026 - RNA, 18 nt, Human
uggguauccugagaccag

SEQ ID NO: 321027 - RNA, 22 nt, Human
uguagggacugggagagucaug

SEQ ID NO: 321028 - RNA, 24 nt, Human
ugucugccugugugcauaugugcg

SEQ ID NO: 321029 - RNA, 22 nt, Human
ugugacauccucaggccagccu

SEQ ID NO: 321030 - RNA, 18 nt, Human
uguggggagaggggcagg

SEQ ID NO: 321031 - RNA, 23 nt, Human
uguggggagaggggcagggccca

SEQ ID NO: 321032 - RNA, 21 nt, Human
uuaauggaaaagcugugggaa

SEQ ID NO: 321033 - RNA, 23 nt, Human
uuaauggaaaagcugugggaauu

SEQ ID NO: 321034 - RNA, 22 nt, Human
uucuaaagccagcagguuggug

SEQ ID NO: 321035 - RNA, 26 nt, Human
uuuauucuaaagccagcagguuggug

SEQ ID NO: 321036 - RNA, 20 nt, Human
uuugcauuuuaauggaaaag

SEQ ID NO: 321037 - RNA, 21 nt, Human
cuuauuuauuuucugccacug

SEQ ID NO: 321038 - RNA, 21 nt, Human
ucugaaggaaguuaucuucuu

SEQ ID NO: 321039 - RNA, 21 nt, Human
uuuucugccacugaauucuag

SEQ ID NO: 321040 - RNA, 22 nt, Human
aaaacaaaaauagacaggaagg

SEQ ID NO: 321041 - RNA, 19 nt, Human
aaagcacuacccagagacc

SEQ ID NO: 321042 - RNA, 24 nt, Human
aacacuugauacuagucugaugau

SEQ ID NO: 321043 - RNA, 19 nt, Human
aaucuagccaucacauuug

SEQ ID NO: 321044 - RNA, 27 nt, Human
accaaaaaucugugauccuuuccacuu

SEQ ID NO: 321045 - RNA, 22 nt, Human
accaguucuucauugcugauca

SEQ ID NO: 321046 - RNA, 22 nt, Human
agaaacuaccaaaaaucuguga

SEQ ID NO: 321047 - RNA, 23 nt, Human
aggaagggagggagucauccuug

SEQ ID NO: 321048 - RNA, 22 nt, Human
aguaaaaaacaaaaauagacag

SEQ ID NO: 321049 - RNA, 25 nt, Human
auggaccauggacuauaacgugauu

SEQ ID NO: 321050 - RNA, 22 nt, Human
auuuguuuaaaaaacucugugg

SEQ ID NO: 321051 - RNA, 25 nt, Human
cacuacccagagaccaauggugccg

SEQ ID NO: 321052 - RNA, 23 nt, Human
cagcaccaagaagucaaugguga

SEQ ID NO: 321053 - RNA, 22 nt, Human
cauccaaugggaacaaacaccc

SEQ ID NO: 321054 - RNA, 19 nt, Human
cccagaaacuaccaaaaau

SEQ ID NO: 321055 - RNA, 21 nt, Human
cgaacagcauuucucucucaa

SEQ ID NO: 321056 - RNA, 26 nt, Human
cucaagaucucucucucucuuuugaa

SEQ ID NO: 321057 - RNA, 22 nt, Human
cuggcguugcuccuggauuugg

SEQ ID NO: 321058 - RNA, 20 nt, Human
cuuguagacccagaaacuac

SEQ ID NO: 321059 - RNA, 24 nt, Human
cuuugauaaaguauaauagaugaa

SEQ ID NO: 321060 - RNA, 18 nt, Human
gaaaaucucugcgugaag

SEQ ID NO: 321061 - RNA, 23 nt, Human
gaacacuugauacuagucugaug

SEQ ID NO: 321062 - RNA, 20 nt, Human
gaagcaaaugaauauuuacc

SEQ ID NO: 321063 - RNA, 20 nt, Human
ggauuuggaaaguccuugua

SEQ ID NO: 321064 - RNA, 20 nt, Human
guagacccagaaacuaccaa

SEQ ID NO: 321065 - RNA, 24 nt, Human
uaaagcacuacccagagaccaaug

SEQ ID NO: 321066 - RNA, 25 nt, Human
uacgcagguuucucuaugauggcuu

SEQ ID NO: 321067 - RNA, 23 nt, Human
uagggaccaaacucaaagguuuc

SEQ ID NO: 321068 - RNA, 18 nt, Human
ucagaacugcaaucugca

SEQ ID NO: 321069 - RNA, 18 nt, Human
uccaugcuggacaccaga

SEQ ID NO: 321070 - RNA, 21 nt, Human
uccuaaugcaacagaaaacuc

SEQ ID NO: 321071 - RNA, 24 nt, Human
uccuuuuuauucaaaugaaucaga

SEQ ID NO: 321072 - RNA, 21 nt, Human
ucucaagaucucucucucucu

SEQ ID NO: 321073 - RNA, 20 nt, Human
ucucuaugauggcuuuugca

SEQ ID NO: 321074 - RNA, 23 nt, Human
ugaaacuccugaagcaaaugaau

SEQ ID NO: 321075 - RNA, 18 nt, Human
ugaauagugauggaccau

SEQ ID NO: 321076 - RNA, 23 nt, Human
ugaauagugauggaccauggacu

SEQ ID NO: 321077 - RNA, 20 nt, Human
ugauccuuuccacuuugagu

SEQ ID NO: 321078 - RNA, 21 nt, Human
ugauggcuuuugcaugccauu

SEQ ID NO: 321079 - RNA, 18 nt, Human
ugcaugccauuuccaagu

SEQ ID NO: 321080 - RNA, 21 nt, Human
ugccacuggcguugcuccugg

SEQ ID NO: 321081 - RNA, 19 nt, Human
ugccuuggugcccgccuga

SEQ ID NO: 321082 - RNA, 24 nt, Human
uggauuauuuucaacagcaccaag

SEQ ID NO: 321083 - RNA, 22 nt, Human
uggcaauauguuagaaucuagc

SEQ ID NO: 321084 - RNA, 23 nt, Human
ugguaacaaaagguauauacacc

SEQ ID NO: 321085 - RNA, 18 nt, Human
ugugguaacaaaagguau

SEQ ID NO: 321086 - RNA, 18 nt, Human
uguuaaacuguacaccgu

SEQ ID NO: 321087 - RNA, 18 nt, Human
uuaaaaaacucuguggua

SEQ ID NO: 321088 - RNA, 18 nt, Human
uuaaagcacuacccagag

SEQ ID NO: 321089 - RNA, 23 nt, Human
uuagggaccaaacucaaagguuu

SEQ ID NO: 321090 - RNA, 21 nt, Human
aaacaaccucacaacucuucu

SEQ ID NO: 321091 - RNA, 18 nt, Human
aaagagcauucauccaca

SEQ ID NO: 321092 - RNA, 18 nt, Human
aaccugguuuacaagugc

SEQ ID NO: 321093 - RNA, 22 nt, Human
aaucauauguccggaaaucaaa

SEQ ID NO: 321094 - RNA, 18 nt, Human
aauccuuucuucccauca

SEQ ID NO: 321095 - RNA, 21 nt, Human
aauugagcaauuccagaacca

SEQ ID NO: 321096 - RNA, 21 nt, Human
aauuuccuuuauuccagaagc

SEQ ID NO: 321097 - RNA, 21 nt, Human
acaagugcaaguaaaagaagc

SEQ ID NO: 321098 - RNA, 21 nt, Human
acuaggaggagacacgccagc

SEQ ID NO: 321099 - RNA, 24 nt, Human
acugcaaccuccauuuagggcccc

SEQ ID NO: 321100 - RNA, 26 nt, Human
acugcaaccuccauuuaggguccucc

SEQ ID NO: 321101 - RNA, 18 nt, Human
agacaccauauuccauag

SEQ ID NO: 321102 - RNA, 21 nt, Human
agacgggaagcacuaggagga

SEQ ID NO: 321103 - RNA, 19 nt, Human
agccuucggggcauucaca

SEQ ID NO: 321104 - RNA, 19 nt, Human
auagcaaguguaaccucca

SEQ ID NO: 321105 - RNA, 24 nt, Human
auuccagcuucguauacauccauc

SEQ ID NO: 321106 - RNA, 22 nt, Human
caauagcaaguguaaccuccag

SEQ ID NO: 321107 - RNA, 21 nt, Human
cacacugaaacaaccucacaa

SEQ ID NO: 321108 - RNA, 21 nt, Human
cagaaccaggauaguaggagc

SEQ ID NO: 321109 - RNA, 24 nt, Human
cagcgacccagcgagccucggcgg

SEQ ID NO: 321110 - RNA, 24 nt, Human
caucacaauagcaaguguaaccuc

SEQ ID NO: 321111 - RNA, 20 nt, Human
caucuagacgaggguuaauc

SEQ ID NO: 321112 - RNA, 24 nt, Human
cauucaaaaucuccugggauguuc

SEQ ID NO: 321113 - RNA, 20 nt, Human
ccacaucuuuacaaucuuuc

SEQ ID NO: 321114 - RNA, 18 nt, Human
ccacccaggacccucauu

SEQ ID NO: 321115 - RNA, 22 nt, Human
ccaucacagcuucuuuagcuau

SEQ ID NO: 321116 - RNA, 21 nt, Human
cccgcagcgcccacccaggac

SEQ ID NO: 321117 - RNA, 22 nt, Human
cccgcucccagcgcccagcccg

SEQ ID NO: 321118 - RNA, 20 nt, Human
ccgcucccagcgcccagccc

SEQ ID NO: 321119 - RNA, 21 nt, Human
cgacccagcgagccucggcgg

SEQ ID NO: 321120 - RNA, 22 nt, Human
cgccagcgacccagcgagccuc

SEQ ID NO: 321121 - RNA, 21 nt, Human
cgccgcggagcugcgagccug

SEQ ID NO: 321122 - RNA, 23 nt, Human
cgccgcggagcugcgagccugug

SEQ ID NO: 321123 - RNA, 18 nt, Human
cggcgccagcgacccagc

SEQ ID NO: 321124 - RNA, 23 nt, Human
cggcggaacagccgggggcggag

SEQ ID NO: 321125 - RNA, 21 nt, Human
cggcuuaaaaagggguccagg

SEQ ID NO: 321126 - RNA, 24 nt, Human
cggggcauucacauucaaaaucuc

SEQ ID NO: 321127 - RNA, 22 nt, Human
cugaaaaucugcugauuucugg

SEQ ID NO: 321128 - RNA, 23 nt, Human
cuuggcuucaaagagcauucauc

SEQ ID NO: 321129 - RNA, 22 nt, Human
gaaaaucugcugauuucuggca

SEQ ID NO: 321130 - RNA, 23 nt, Human
gaagcuuuucggagcugggggau

SEQ ID NO: 321131 - RNA, 18 nt, Human
gaagugcaaucaggagcc

SEQ ID NO: 321132 - RNA, 25 nt, Human
gaccggagcgcuaggcgccgcggag

SEQ ID NO: 321133 - RNA, 18 nt, Human
gagcaauuccagaaccag

SEQ ID NO: 321134 - RNA, 21 nt, Human
gagcacacauguucucagagc

SEQ ID NO: 321135 - RNA, 20 nt, Human
gagcugcgagccugugcgcc

SEQ ID NO: 321136 - RNA, 20 nt, Human
gaggcgccggcagggacggu

SEQ ID NO: 321137 - RNA, 23 nt, Human
gauaacaaggacauuuccaggaa

SEQ ID NO: 321138 - RNA, 21 nt, Human
gcggaacagccgggggcggag

SEQ ID NO: 321139 - RNA, 21 nt, Human
ggaacagccgggggcggagga

SEQ ID NO: 321140 - RNA, 22 nt, Human
ggccuaguaaacacugcugaga

SEQ ID NO: 321141 - RNA, 21 nt, Human
ggcgcgucgcggcggggaccg

SEQ ID NO: 321142 - RNA, 21 nt, Human
gguuuccagcaauccauuuuc

SEQ ID NO: 321143 - RNA, 23 nt, Human
guuuccagcaauccauuuuccgg

SEQ ID NO: 321144 - RNA, 22 nt, Human
uaaaaagggguccagguuuauu

SEQ ID NO: 321145 - RNA, 25 nt, Human
uaaaacaaccccugcaaaaggucac

SEQ ID NO: 321146 - RNA, 18 nt, Human
uaaaguaauucauacuuu

SEQ ID NO: 321147 - RNA, 23 nt, Human
uaggaggagacacgccagcagcg

SEQ ID NO: 321148 - RNA, 21 nt, Human
uaguaggagcccuucuccaca

SEQ ID NO: 321149 - RNA, 23 nt, Human
uauaaacaaaaguuugccucuga

SEQ ID NO: 321150 - RNA, 24 nt, Human
uauaaacaaaaguuugccucugag

SEQ ID NO: 321151 - RNA, 20 nt, Human
ucacacuuuucuccuugcca

SEQ ID NO: 321152 - RNA, 19 nt, Human
uccacagacaccauauucc

SEQ ID NO: 321153 - RNA, 21 nt, Human
uccacagacaccauauuccau

SEQ ID NO: 321154 - RNA, 23 nt, Human
uccacaguaaccaggcaaugcuu

SEQ ID NO: 321155 - RNA, 22 nt, Human
uccauuuauauuugagggaucu

SEQ ID NO: 321156 - RNA, 22 nt, Human
ugaaacaaccucacaacucuuc

SEQ ID NO: 321157 - RNA, 22 nt, Human
ugaaucauauguccggaaauca

SEQ ID NO: 321158 - RNA, 28 nt, Human
ugacugcaaccuccauuuaggguccucc

SEQ ID NO: 321159 - RNA, 20 nt, Human
ugauaacaaggacauuucca

SEQ ID NO: 321160 - RNA, 18 nt, Human
ugcacacagcugugccac

SEQ ID NO: 321161 - RNA, 20 nt, Human
ugcugaaaaucugcugauuu

SEQ ID NO: 321162 - RNA, 21 nt, Human
uggaauggcauugacacagcu

SEQ ID NO: 321163 - RNA, 24 nt, Human
uguaaccuccaggguaauugacac

SEQ ID NO: 321164 - RNA, 23 nt, Human
uguuggaggccuaguaaacacug

SEQ ID NO: 321165 - RNA, 21 nt, Human
uuucuugaauaauuuccuuua

SEQ ID NO: 321166 - RNA, 21 nt, Human
uuuucuccuugccaaccuggu

SEQ ID NO: 321167 - RNA, 21 nt, Human
aaaccaaacaaaauacuuaaa

SEQ ID NO: 321168 - RNA, 29 nt, Human
aaacuaaaggcagaaagaaaagggacccc

SEQ ID NO: 321169 - RNA, 24 nt, Human
aagaaaaugagagaaaccgguacc

SEQ ID NO: 321170 - RNA, 27 nt, Human
aagcaaacuaaaggcagaaagaaaaca

SEQ ID NO: 321171 - RNA, 23 nt, Human
aagcucgucagcugggcacagcu

SEQ ID NO: 321172 - RNA, 26 nt, Human
aaugagagaaacgugaugaggaggaa

SEQ ID NO: 321173 - RNA, 22 nt, Human
acauauccaugccucccauaca

SEQ ID NO: 321174 - RNA, 21 nt, Human
agaaagaaaacaaccaucccc

SEQ ID NO: 321175 - RNA, 20 nt, Human
aggcagaaagaaaacaacca

SEQ ID NO: 321176 - RNA, 19 nt, Human
caaaagcaaacuaaaggca

SEQ ID NO: 321177 - RNA, 27 nt, Human
caaaagcaaacuaaaggcagaaagaaa

SEQ ID NO: 321178 - RNA, 27 nt, Human
caaauucccuucauugcuaauagagac

SEQ ID NO: 321179 - RNA, 20 nt, Human
caguagaaacaagagacaca

SEQ ID NO: 321180 - RNA, 30 nt, Human
cauauccaugccucccauacacauauauag

SEQ ID NO: 321181 - RNA, 24 nt, Human
ccagcugauuucauaacauaucca

SEQ ID NO: 321182 - RNA, 18 nt, Human
cucccgcuuagaaacugu

SEQ ID NO: 321183 - RNA, 20 nt, Human
cuggaaaaggggccucgugc

SEQ ID NO: 321184 - RNA, 18 nt, Human
gaaaacaaaagaaaauga

SEQ ID NO: 321185 - RNA, 21 nt, Human
gcacagcucaagaaucccggg

SEQ ID NO: 321186 - RNA, 19 nt, Human
ggaaaacaaaagaaaauga

SEQ ID NO: 321187 - RNA, 21 nt, Human
ggcaaaagcaaacuaaaggca

SEQ ID NO: 321188 - RNA, 22 nt, Human
uacugauugaguucaaaccaaa

SEQ ID NO: 321189 - RNA, 20 nt, Human
uagacacauauaacuuggaa

SEQ ID NO: 321190 - RNA, 22 nt, Human
ucaaaaucuagacacauauaac

SEQ ID NO: 321191 - RNA, 21 nt, Human
ucaaguggaugcaucguuaaa

SEQ ID NO: 321192 - RNA, 21 nt, Human
ucauaacauauccaugccucc

SEQ ID NO: 321193 - RNA, 21 nt, Human
uccaugccucccauacacaua

SEQ ID NO: 321194 - RNA, 19 nt, Human
ucccgggaccucuuaggaa

SEQ ID NO: 321195 - RNA, 22 nt, Human
uccucagccaaccgccauuugc

SEQ ID NO: 321196 - RNA, 23 nt, Human
ugcaauggaaaacaaaagaaaau

SEQ ID NO: 321197 - RNA, 21 nt, Human
ugggaggagcggagcgcugag

SEQ ID NO: 321198 - RNA, 21 nt, Human
ugggcaaaagcaaacuaaagg

SEQ ID NO: 321199 - RNA, 21 nt, Human
uucuuagcaguagaaacaaga

SEQ ID NO: 321200 - RNA, 25 nt, Human
uuuuuuuuuuuuuuuuuuaauuugg

SEQ ID NO: 321201 - RNA, 20 nt, Human
aacccccuucuguugucuau

SEQ ID NO: 321202 - RNA, 19 nt, Human
aagcaagaaagaaaaauca

SEQ ID NO: 321203 - RNA, 20 nt, Human
aagcaagaaagaaaaaucag

SEQ ID NO: 321204 - RNA, 24 nt, Human
aagcuccaguuucccgcuccagcu

SEQ ID NO: 321205 - RNA, 21 nt, Human
caacaaaguucuuaaaaccaa

SEQ ID NO: 321206 - RNA, 20 nt, Human
caacugaaaaaaaggucauu

SEQ ID NO: 321207 - RNA, 23 nt, Human
cagaaguccacagccugcuuccc

SEQ ID NO: 321208 - RNA, 20 nt, Human
cagcuccucgaacccagccu

SEQ ID NO: 321209 - RNA, 23 nt, Human
cgaacccagccucacugggccgg

SEQ ID NO: 321210 - RNA, 27 nt, Human
cgcuccagcuccucgaacccagccuca

SEQ ID NO: 321211 - RNA, 26 nt, Human
cuggaaacuccaguuuucuucuuucc

SEQ ID NO: 321212 - RNA, 20 nt, Human
cuucuuuccucauuccuguu

SEQ ID NO: 321213 - RNA, 26 nt, Human
gaaagcaagaaagaaaaaucagcuug

SEQ ID NO: 321214 - RNA, 22 nt, Human
ggacuaauuaaaaugaaagcaa

SEQ ID NO: 321215 - RNA, 21 nt, Human
guagaacucagagacuggaaa

SEQ ID NO: 321216 - RNA, 21 nt, Human
guuuucuucuuuccucauucc

SEQ ID NO: 321217 - RNA, 20 nt, Human
uaugaaaugaaggccaacaa

SEQ ID NO: 321218 - RNA, 18 nt, Human
ucaagaguuacaucaggu

SEQ ID NO: 321219 - RNA, 23 nt, Human
uccacagccugcuucccuaaguu

SEQ ID NO: 321220 - RNA, 21 nt, Human
uccuguugguaauuccagaag

SEQ ID NO: 321221 - RNA, 27 nt, Human
ugaaauaauuaaguccauccucaaaug

SEQ ID NO: 321222 - RNA, 25 nt, Human
uuccucauuccuguugguaauucca

SEQ ID NO: 321223 - RNA, 20 nt, Human
uuucuuauuguuauuaacac

SEQ ID NO: 321224 - RNA, 19 nt, Human
aaaaaagacaaggcaugau

SEQ ID NO: 321225 - RNA, 22 nt, Human
aaaaagacaaggcaugaugaag

SEQ ID NO: 321226 - RNA, 27 nt, Human
aaaucuccuuucucaguuaaaaaagac

SEQ ID NO: 321227 - RNA, 22 nt, Human
caaaaaaucuccuuucucaguu

SEQ ID NO: 321228 - RNA, 21 nt, Human
cagcaauggggccaguggcag

SEQ ID NO: 321229 - RNA, 23 nt, Human
caggccggacucuuccaaggccu

SEQ ID NO: 321230 - RNA, 24 nt, Human
ccaguggcagggcagguucucccu

SEQ ID NO: 321231 - RNA, 20 nt, Human
ccgauccuagcccuucagaa

SEQ ID NO: 321232 - RNA, 21 nt, Human
ccuucagaaggacuggaccuc

SEQ ID NO: 321233 - RNA, 19 nt, Human
cgauccuagcccuucagaa

SEQ ID NO: 321234 - RNA, 20 nt, Human
cucuuccaaggccuccuccc

SEQ ID NO: 321235 - RNA, 22 nt, Human
cuucagugggaagccaccuugg

SEQ ID NO: 321236 - RNA, 22 nt, Human
gcccauacugggcggugaucuc

SEQ ID NO: 321237 - RNA, 23 nt, Human
ucagugggaagccaccuuggaca

SEQ ID NO: 321238 - RNA, 18 nt, Human
ucaguuaaaaaagacaag

SEQ ID NO: 321239 - RNA, 21 nt, Human
ucaguuaaaaaagacaaggca

SEQ ID NO: 321240 - RNA, 21 nt, Human
uggaccucugugucccuucag

SEQ ID NO: 321241 - RNA, 21 nt, Human
uggggccaguggcagggcagg

SEQ ID NO: 321242 - RNA, 18 nt, Human
ugucccuucagugggaag

SEQ ID NO: 321243 - RNA, 24 nt, Human
uucaaaaaaucuccuuucucaguu

SEQ ID NO: 321244 - RNA, 25 nt, Human
uuuuuuuuuuuuuuucuugacaaug

SEQ ID NO: 321245 - RNA, 26 nt, Human
uuuuuuuuuuuuuuuuuuucuugggg

SEQ ID NO: 321246 - RNA, 20 nt, Human
caggaaagggaugccuggua

SEQ ID NO: 321247 - RNA, 21 nt, Human
caggaaagggaugccugguac

SEQ ID NO: 321248 - RNA, 20 nt, Human
caggaguggucuuaggguuu

SEQ ID NO: 321249 - RNA, 18 nt, Human
ccagcgacugcuggccgg

SEQ ID NO: 321250 - RNA, 24 nt, Human
cucagacccuggcucacccacuuc

SEQ ID NO: 321251 - RNA, 25 nt, Human
cucuugacagcauuuuauuugguuc

SEQ ID NO: 321252 - RNA, 19 nt, Human
gcuggccggguagggcuug

SEQ ID NO: 321253 - RNA, 22 nt, Human
ggaguggucuuaggguuugggc

SEQ ID NO: 321254 - RNA, 18 nt, Human
gggcagggagaggccagc

SEQ ID NO: 321255 - RNA, 24 nt, Human
guagauuuguccugaggggggauc

SEQ ID NO: 321256 - RNA, 21 nt, Human
uaagccaggaaagggaugccu

SEQ ID NO: 321257 - RNA, 18 nt, Human
ugacagcauuuuauuugg

SEQ ID NO: 321258 - RNA, 18 nt, Human
ugaggggggaucauuggc

SEQ ID NO: 321259 - RNA, 21 nt, Human
ugucagggcagggagaggcca

SEQ ID NO: 321260 - RNA, 23 nt, Human
ugugaaacucagacccuggcuca

SEQ ID NO: 321261 - RNA, 19 nt, Human
aaacaagggugggguggau

SEQ ID NO: 321262 - RNA, 21 nt, Human
aaacacccucacacaacaucc

SEQ ID NO: 321263 - RNA, 23 nt, Human
aaacacccucacacaacauccuc

SEQ ID NO: 321264 - RNA, 20 nt, Human
aaaggagaauccaagcuaca

SEQ ID NO: 321265 - RNA, 21 nt, Human
aaccaccccccaccccccacc

SEQ ID NO: 321266 - RNA, 22 nt, Human
aagauagaugaagguaaagcca

SEQ ID NO: 321267 - RNA, 22 nt, Human
aagcagauggugauggaucagg

SEQ ID NO: 321268 - RNA, 19 nt, Human
aagccucagaaguuacucu

SEQ ID NO: 321269 - RNA, 22 nt, Human
aagcgaucacggcugcugcaga

SEQ ID NO: 321270 - RNA, 22 nt, Human
aaggaucaagauagaugaaggu

SEQ ID NO: 321271 - RNA, 19 nt, Human
acaaagaaaacccugaagc

SEQ ID NO: 321272 - RNA, 23 nt, Human
agauagaugaagguaaagccaaa

SEQ ID NO: 321273 - RNA, 23 nt, Human
agguacaaaggagaauccaagcu

SEQ ID NO: 321274 - RNA, 18 nt, Human
agguuugggguugcccag

SEQ ID NO: 321275 - RNA, 22 nt, Human
aucucaauccgucuuuccccag

SEQ ID NO: 321276 - RNA, 21 nt, Human
caaccaccccccaccccccac

SEQ ID NO: 321277 - RNA, 23 nt, Human
caaccaccccccaccccccaccc

SEQ ID NO: 321278 - RNA, 19 nt, Human
caaggggaaacaagggugg

SEQ ID NO: 321279 - RNA, 21 nt, Human
cacacagguacacacacuuua

SEQ ID NO: 321280 - RNA, 19 nt, Human
caccccccaccccccaccc

SEQ ID NO: 321281 - RNA, 18 nt, Human
cacuuuauuaguuuccuc

SEQ ID NO: 321282 - RNA, 21 nt, Human
cagaaugagauaaugcaggua

SEQ ID NO: 321283 - RNA, 22 nt, Human
cagcugagcuauaguuaaagcu

SEQ ID NO: 321284 - RNA, 23 nt, Human
caguaggcuaaggaagaucaagc

SEQ ID NO: 321285 - RNA, 23 nt, Human
ccaccccccacccaaugucugcu

SEQ ID NO: 321286 - RNA, 18 nt, Human
ccaccccccaccccccac

SEQ ID NO: 321287 - RNA, 19 nt, Human
cccaagaggauauuuggcc

SEQ ID NO: 321288 - RNA, 24 nt, Human
cccaccccccacccaaugucugcc

SEQ ID NO: 321289 - RNA, 23 nt, Human
ccccaccccccacccaaugucug

SEQ ID NO: 321290 - RNA, 21 nt, Human
cccccacccaaugucugcuca

SEQ ID NO: 321291 - RNA, 19 nt, Human
ccccccaccccccacccaa

SEQ ID NO: 321292 - RNA, 23 nt, Human
ccccccucaaccaccccccaccc

SEQ ID NO: 321293 - RNA, 27 nt, Human
cccucaaccaccccccaccccccaccc

SEQ ID NO: 321294 - RNA, 23 nt, Human
ccucaaccaccccccacccccca

SEQ ID NO: 321295 - RNA, 22 nt, Human
cuaaaaccuacugccucagugg

SEQ ID NO: 321296 - RNA, 21 nt, Human
cuauaguuaaagcugcaaggc

SEQ ID NO: 321297 - RNA, 21 nt, Human
cucaaccaccccccacccccc

SEQ ID NO: 321298 - RNA, 25 nt, Human
cuuccccagucacagucaaacaccc

SEQ ID NO: 321299 - RNA, 21 nt, Human
gaagcauguuugcuuuccaga

SEQ ID NO: 321300 - RNA, 22 nt, Human
gagaacuggucacacauggguu

SEQ ID NO: 321301 - RNA, 23 nt, Human
gauuuuauucucaaaaagccuca

SEQ ID NO: 321302 - RNA, 21 nt, Human
gcuacagcacaucaucuaaua

SEQ ID NO: 321303 - RNA, 20 nt, Human
ggacuagguuugggguugcc

SEQ ID NO: 321304 - RNA, 22 nt, Human
gguuugggguugcccagggcuc

SEQ ID NO: 321305 - RNA, 23 nt, Human
gucaaacacccucacacaacauc

SEQ ID NO: 321306 - RNA, 23 nt, Human
guucucaacaaagaaaacccuga

SEQ ID NO: 321307 - RNA, 18 nt, Human
uacaaaggagaauccaag

SEQ ID NO: 321308 - RNA, 20 nt, Human
uacaauguucauuugggccc

SEQ ID NO: 321309 - RNA, 19 nt, Human
uaccaaggggaaacaaggg

SEQ ID NO: 321310 - RNA, 19 nt, Human
uaccaaggggaaacaaggg

SEQ ID NO: 321311 - RNA, 24 nt, Human
uacccuaagcacuccacuaagcga

SEQ ID NO: 321312 - RNA, 21 nt, Human
uaccugaugugggauguagaa

SEQ ID NO: 321313 - RNA, 20 nt, Human
uagcaggaagcauguuugcu

SEQ ID NO: 321314 - RNA, 25 nt, Human
ucaaacacccucacacaacauccuc

SEQ ID NO: 321315 - RNA, 19 nt, Human
ucaaccaccccccaccccc

SEQ ID NO: 321316 - RNA, 23 nt, Human
ucaaccaccccccaccccccacc

SEQ ID NO: 321317 - RNA, 26 nt, Human
ucacacaacauccucaaaagucugaa

SEQ ID NO: 321318 - RNA, 24 nt, Human
ugagauaaugcagguaggaggucc

SEQ ID NO: 321319 - RNA, 24 nt, Human
ugcacugugcugccuccccccuca

SEQ ID NO: 321320 - RNA, 22 nt, Human
ugcagguaggaggucccagcag

SEQ ID NO: 321321 - RNA, 19 nt, Human
ugccucaguggcaguaggc

SEQ ID NO: 321322 - RNA, 24 nt, Human
ugccuccccccucaaccacccccc

SEQ ID NO: 321323 - RNA, 26 nt, Human
ugccuuuguugcuaguuguucucaac

SEQ ID NO: 321324 - RNA, 24 nt, Human
ugcugcagagaccggaaccgaagu

SEQ ID NO: 321325 - RNA, 20 nt, Human
uggccaacuacccuaagcac

SEQ ID NO: 321326 - RNA, 22 nt, Human
uuauucucaaaaagccucagaa

SEQ ID NO: 321327 - RNA, 20 nt, Human
uugggcccaagaggauauuu

SEQ ID NO: 321328 - RNA, 26 nt, Human
uuuuuuuuuuuuuuuuuucacacagg

SEQ ID NO: 321329 - RNA, 24 nt, Human
aaaaaaaaaaaggaaaauucaaaa

SEQ ID NO: 321330 - RNA, 20 nt, Human
aaaaaaaggaaaauucaaaa

SEQ ID NO: 321331 - RNA, 24 nt, Human
aaaaaaaggaaaauucaaaaucca

SEQ ID NO: 321332 - RNA, 21 nt, Human
aaaaauccagaaaacaaaaac

SEQ ID NO: 321333 - RNA, 26 nt, Human
aaaacaaaaacaagucagaagucaga

SEQ ID NO: 321334 - RNA, 22 nt, Human
aaacuagcucuauacauucuua

SEQ ID NO: 321335 - RNA, 21 nt, Human
aaacuggaaagaaaugaucuu

SEQ ID NO: 321336 - RNA, 22 nt, Human
aaagaccaaauaaccaccacca

SEQ ID NO: 321337 - RNA, 23 nt, Human
aaauaaccaccaccauuucccca

SEQ ID NO: 321338 - RNA, 18 nt, Human
aaaugugucaguguccau

SEQ ID NO: 321339 - RNA, 18 nt, Human
aaccaccaccauuucccc

SEQ ID NO: 321340 - RNA, 20 nt, Human
aaccaccaccauuuccccaa

SEQ ID NO: 321341 - RNA, 21 nt, Human
aagaacaaaggaagagaucac

SEQ ID NO: 321342 - RNA, 20 nt, Human
aaggucugaauuuccauugu

SEQ ID NO: 321343 - RNA, 19 nt, Human
aauacaaagguggggcuaa

SEQ ID NO: 321344 - RNA, 22 nt, Human
acaguaaccaagaugguuuauc

SEQ ID NO: 321345 - RNA, 23 nt, Human
accaaauaaccaccaccauuucc

SEQ ID NO: 321346 - RNA, 18 nt, Human
acgccaggagcagcaaga

SEQ ID NO: 321347 - RNA, 30 nt, Human
acuccgaggggcgcgcggcggcggaggagg

SEQ ID NO: 321348 - RNA, 22 nt, Human
agaaaacaaaaacaagucagaa

SEQ ID NO: 321349 - RNA, 23 nt, Human
aggagguggcggaggcaacagcg

SEQ ID NO: 321350 - RNA, 18 nt, Human
aggggcgcgcggcggcgg

SEQ ID NO: 321351 - RNA, 23 nt, Human
agucagaagucagaguaggcuug

SEQ ID NO: 321352 - RNA, 23 nt, Human
augacaaugcagguuccuauauc

SEQ ID NO: 321353 - RNA, 23 nt, Human
augcagguuccuauauccuuuuu

SEQ ID NO: 321354 - RNA, 23 nt, Human
caaauaaccaccaccauuucccc

SEQ ID NO: 321355 - RNA, 21 nt, Human
caaauuaagcacaguaaccaa

SEQ ID NO: 321356 - RNA, 22 nt, Human
caccaccauuuccccaaaaacu

SEQ ID NO: 321357 - RNA, 25 nt, Human
caccaccauuuccccaaaaacugga

SEQ ID NO: 321358 - RNA, 21 nt, Human
caggagcagcaagaaauguac

SEQ ID NO: 321359 - RNA, 21 nt, Human
cauuuccccaaaaacuggaaa

SEQ ID NO: 321360 - RNA, 18 nt, Human
ccauaggcauuaucagua

SEQ ID NO: 321361 - RNA, 22 nt, Human
ccccaaaaacuggaaagaaaug

SEQ ID NO: 321362 - RNA, 23 nt, Human
ccuacagcuaaaaauccagaaaa

SEQ ID NO: 321363 - RNA, 19 nt, Human
cgaaauauauaaacuauga

SEQ ID NO: 321364 - RNA, 24 nt, Human
cgaggggcgcgcggcggcggagga

SEQ ID NO: 321365 - RNA, 21 nt, Human
cuacagcuaaaaauccagaaa

SEQ ID NO: 321366 - RNA, 19 nt, Human
cuggacacuucccauucug

SEQ ID NO: 321367 - RNA, 18 nt, Human
cuugagcuuuagaagggg

SEQ ID NO: 321368 - RNA, 18 nt, Human
cuugcuggacacuuccca

SEQ ID NO: 321369 - RNA, 22 nt, Human
gaccaaauaaccaccaccauuu

SEQ ID NO: 321370 - RNA, 26 nt, Human
gaccaaauaaccaccaccauuucccc

SEQ ID NO: 321371 - RNA, 20 nt, Human
gagcagcaagaaauguacaa

SEQ ID NO: 321372 - RNA, 19 nt, Human
gcggcggcggaggaggugg

SEQ ID NO: 321373 - RNA, 22 nt, Human
ggagguggcggaggcaacagcg

SEQ ID NO: 321374 - RNA, 21 nt, Human
ggcgcgcggcggcggaggagg

SEQ ID NO: 321375 - RNA, 21 nt, Human
ggggcgcgcggcggcggagga

SEQ ID NO: 321376 - RNA, 20 nt, Human
guuggcuuuaggccuuggcc

SEQ ID NO: 321377 - RNA, 18 nt, Human
uaaacuaugacuuccaca

SEQ ID NO: 321378 - RNA, 19 nt, Human
uaaauuuuccaagguucac

SEQ ID NO: 321379 - RNA, 21 nt, Human
uaaccaccaccauuuccccaa

SEQ ID NO: 321380 - RNA, 24 nt, Human
uaaccaccaccauuuccccaaaaa

SEQ ID NO: 321381 - RNA, 21 nt, Human
uaaccaccaccauuuccccag

SEQ ID NO: 321382 - RNA, 24 nt, Human
uaagacaguucacuuaaagaccaa

SEQ ID NO: 321383 - RNA, 22 nt, Human
uaagcuaaauaaaauuuggucc

SEQ ID NO: 321384 - RNA, 21 nt, Human
uacccaaauguccauaggcau

SEQ ID NO: 321385 - RNA, 21 nt, Human
uaccuuuaagucaguuggcuu

SEQ ID NO: 321386 - RNA, 21 nt, Human
uagaaaccaucaguucuuaaa

SEQ ID NO: 321387 - RNA, 23 nt, Human
ucacuccaaaguaaaaggauaau

SEQ ID NO: 321388 - RNA, 27 nt, Human
ucaguauauauuuacacagaaggcuuu

SEQ ID NO: 321389 - RNA, 26 nt, Human
uccaaaaaaaaaaaaaaaaaaggaaa

SEQ ID NO: 321390 - RNA, 22 nt, Human
uccacgccaggagcagcaagaa

SEQ ID NO: 321391 - RNA, 19 nt, Human
uccagaaaacaaaaacaag

SEQ ID NO: 321392 - RNA, 19 nt, Human
uccagaaaacaaaaacaag

SEQ ID NO: 321393 - RNA, 18 nt, Human
ugaaagaacaaaggaaga

SEQ ID NO: 321394 - RNA, 21 nt, Human
ugagaucauuauuuuaaaacu

SEQ ID NO: 321395 - RNA, 23 nt, Human
ugaguuauccaaaaaaaaaaaaa

SEQ ID NO: 321396 - RNA, 28 nt, Human
ugaguuauccaaaaaaaaaaaaaaaaaa

SEQ ID NO: 321397 - RNA, 25 nt, Human
uggaaacaccaaauagucaaggucu

SEQ ID NO: 321398 - RNA, 21 nt, Human
uggaauuuuaggaugcagcau

SEQ ID NO: 321399 - RNA, 24 nt, Human
uggacaggaccaauguauuuggug

SEQ ID NO: 321400 - RNA, 18 nt, Human
uggcuaaguccagucgca

SEQ ID NO: 321401 - RNA, 22 nt, Human
uguacaaauuuugggauuaagc

SEQ ID NO: 321402 - RNA, 22 nt, Human
ugucuaauguauaccccccaaa

SEQ ID NO: 321403 - RNA, 18 nt, Human
uuaagcacaguaaccaag

SEQ ID NO: 321404 - RNA, 21 nt, Human
uuaaguuuccacgccaggagc

SEQ ID NO: 321405 - RNA, 18 nt, Human
uuggcuuuaggccuuggc

SEQ ID NO: 321406 - RNA, 22 nt, Human
aggagguccagggucgagaccc

SEQ ID NO: 321407 - RNA, 22 nt, Human
cccaucaauccgggcaaaagaa

SEQ ID NO: 321408 - RNA, 19 nt, Human
ccggcgggggaacggggag

SEQ ID NO: 321409 - RNA, 18 nt, Human
ccuggagcugaaacaacu

SEQ ID NO: 321410 - RNA, 26 nt, Human
ccuggagcugaaacaacuaaaugaac

SEQ ID NO: 321411 - RNA, 18 nt, Human
cgcucagcuucccuaacc

SEQ ID NO: 321412 - RNA, 23 nt, Human
gaacggggagagcuccgaggucc

SEQ ID NO: 321413 - RNA, 25 nt, Human
gcaaaagaagauaucuaacuccagg

SEQ ID NO: 321414 - RNA, 21 nt, Human
gcgcucagcuucccuaaccag

SEQ ID NO: 321415 - RNA, 18 nt, Human
ggagaggccaacuggaua

SEQ ID NO: 321416 - RNA, 21 nt, Human
uaccuccauuucccuggagcu

SEQ ID NO: 321417 - RNA, 20 nt, Human
uagaguuaagacuuuaugug

SEQ ID NO: 321418 - RNA, 18 nt, Human
ucaacaucaauaccucca

SEQ ID NO: 321419 - RNA, 23 nt, Human
ucaggagguccagggucgagacc

SEQ ID NO: 321420 - RNA, 24 nt, Human
ugaaagaaaaauacgauucucuau

SEQ ID NO: 321421 - RNA, 19 nt, Human
ugcuucauuuuucaauggc

SEQ ID NO: 321422 - RNA, 21 nt, Human
ugcuuuuuccauguuucccuc

SEQ ID NO: 321423 - RNA, 23 nt, Human
uggcuguaggcauagcaauuucu

SEQ ID NO: 321424 - RNA, 23 nt, Human
ugggagaggccaacuggauagua

SEQ ID NO: 321425 - RNA, 23 nt, Human
uucaacaucaauaccuccauuuc

SEQ ID NO: 321426 - RNA, 21 nt, Human
uucauuuuucaauggcuguag

SEQ ID NO: 321427 - RNA, 31 nt, Human
uucccuggagcugaaacaacuaaaugaacaa

SEQ ID NO: 321428 - RNA, 18 nt, Human
uuucuaaucugacauccu

SEQ ID NO: 321429 - RNA, 23 nt, Human
aaacacccaaaccgacauaaaaa

SEQ ID NO: 321430 - RNA, 18 nt, Human
aagagcucaauguuuuac

SEQ ID NO: 321431 - RNA, 22 nt, Human
aaugucauuuacuggacuugac

SEQ ID NO: 321432 - RNA, 19 nt, Human
acucacaaacacccaaacc

SEQ ID NO: 321433 - RNA, 22 nt, Human
acuggacuugacaguauaaucu

SEQ ID NO: 321434 - RNA, 21 nt, Human
agaaaaacacacaaacacaag

SEQ ID NO: 321435 - RNA, 23 nt, Human
agaaaaacacacaaacacaaguu

SEQ ID NO: 321436 - RNA, 18 nt, Human
agaaaggcggagcugaag

SEQ ID NO: 321437 - RNA, 23 nt, Human
agcaacuuuggaagaaggcuuug

SEQ ID NO: 321438 - RNA, 18 nt, Human
agcaagaaaggcggagcu

SEQ ID NO: 321439 - RNA, 20 nt, Human
agggaggaacaagcaugacg

SEQ ID NO: 321440 - RNA, 23 nt, Human
auuuuauuaacuuuuuaagcacu

SEQ ID NO: 321441 - RNA, 19 nt, Human
caacuaaaacgaggucuua

SEQ ID NO: 321442 - RNA, 21 nt, Human
caagaaaggcggagcugaaga

SEQ ID NO: 321443 - RNA, 21 nt, Human
caauugcagguaucauacaga

SEQ ID NO: 321444 - RNA, 22 nt, Human
cuccccaaacucacaaacaccc

SEQ ID NO: 321445 - RNA, 21 nt, Human
cuuugugagcuuacaaaucuu

SEQ ID NO: 321446 - RNA, 19 nt, Human
gaacaagcaugacgguucc

SEQ ID NO: 321447 - RNA, 18 nt, Human
gagcaagaaaggcggagc

SEQ ID NO: 321448 - RNA, 22 nt, Human
gguuacaggggagagggaggaa

SEQ ID NO: 321449 - RNA, 19 nt, Human
guuccugugaaauccaucc

SEQ ID NO: 321450 - RNA, 19 nt, Human
uaaaacgauugccaaaaca

SEQ ID NO: 321451 - RNA, 23 nt, Human
uaaacaguuacaacuaaaacgag

SEQ ID NO: 321452 - RNA, 23 nt, Human
uaagcacuuggcucaagcaacuu

SEQ ID NO: 321453 - RNA, 20 nt, Human
uaguugcagaaaauaaauac

SEQ ID NO: 321454 - RNA, 19 nt, Human
ucacaaacacccaaaccga

SEQ ID NO: 321455 - RNA, 20 nt, Human
ucagagcaagaaaggcggag

SEQ ID NO: 321456 - RNA, 21 nt, Human
ucccaccgagcagucacucuu

SEQ ID NO: 321457 - RNA, 22 nt, Human
uccccaaacucacaaacaccca

SEQ ID NO: 321458 - RNA, 21 nt, Human
ugacgguuccugugaaaucca

SEQ ID NO: 321459 - RNA, 28 nt, Human
ugccaaaacacaaaguuuuagaaaaacc

SEQ ID NO: 321460 - RNA, 19 nt, Human
uggcccucgggaguuuucc

SEQ ID NO: 321461 - RNA, 22 nt, Human
uuacaggggagagggaggaaca

SEQ ID NO: 321462 - RNA, 21 nt, Human
uuauaaaaauugcuccccaaa

SEQ ID NO: 321463 - RNA, 24 nt, Human
uuggcucaagcaacuuuggaagaa

SEQ ID NO: 321464 - RNA, 23 nt, Human
uuuauuuuaguuauaaaacgauu

SEQ ID NO: 321465 - RNA, 21 nt, Human
gacugaagagauacugggggc

SEQ ID NO: 321466 - RNA, 18 nt, Human
gguauagagacugaagag

SEQ ID NO: 321467 - RNA, 23 nt, Human
aauggcccaagcuggcaagaaaa

SEQ ID NO: 321468 - RNA, 20 nt, Human
acaaacacgaccagucccau

SEQ ID NO: 321469 - RNA, 20 nt, Human
agaagccagcgcucacccac

SEQ ID NO: 321470 - RNA, 18 nt, Human
agaagggcagagcuucug

SEQ ID NO: 321471 - RNA, 18 nt, Human
agcgcucacccacccggg

SEQ ID NO: 321472 - RNA, 26 nt, Human
aggaggagacaaaugcugacugucua

SEQ ID NO: 321473 - RNA, 19 nt, Human
caagcuggcaagaaaaagc

SEQ ID NO: 321474 - RNA, 18 nt, Human
cacacugcauacauagga

SEQ ID NO: 321475 - RNA, 21 nt, Human
cauuaguuggacuaagaugau

SEQ ID NO: 321476 - RNA, 20 nt, Human
cgacucuggcggcggcggcg

SEQ ID NO: 321477 - RNA, 22 nt, Human
cucaaacucagagucaucgugc

SEQ ID NO: 321478 - RNA, 19 nt, Human
cuccacugaacaaacaaaa

SEQ ID NO: 321479 - RNA, 21 nt, Human
gaaaagcacaaacacgaccag

SEQ ID NO: 321480 - RNA, 23 nt, Human
gaaaagcacaaacacgaccaguc

SEQ ID NO: 321481 - RNA, 20 nt, Human
gcggcggcggcgguggcggc

SEQ ID NO: 321482 - RNA, 21 nt, Human
gcggcggcgguggcggcggac

SEQ ID NO: 321483 - RNA, 22 nt, Human
gcggcgguggcggcggacaggg

SEQ ID NO: 321484 - RNA, 23 nt, Human
ggcgacucuggcggcggcggcgg

SEQ ID NO: 321485 - RNA, 33 nt, Human
ggcgacucuggcggcggcggcgguggcggcgac

SEQ ID NO: 321486 - RNA, 20 nt, Human
ggcggcggcggcgguggcgg

SEQ ID NO: 321487 - RNA, 23 nt, Human
ggcggcggcggcgguggcggcgg

SEQ ID NO: 321488 - RNA, 18 nt, Human
ggcggcggcgguggcggc

SEQ ID NO: 321489 - RNA, 24 nt, Human
guguaagaaguacuuuaauagcuc

SEQ ID NO: 321490 - RNA, 19 nt, Human
uaagcaagaauggcccaag

SEQ ID NO: 321491 - RNA, 20 nt, Human
ucaagaaggauucuguugga

SEQ ID NO: 321492 - RNA, 24 nt, Human
ucauccgucauccacgggagaguc

SEQ ID NO: 321493 - RNA, 23 nt, Human
ugaguguccuauuccagcagccc

SEQ ID NO: 321494 - RNA, 24 nt, Human
ugugcauugaccuuugggugcuga

SEQ ID NO: 321495 - RNA, 20 nt, Human
agacagggccugacauccgc

SEQ ID NO: 321496 - RNA, 21 nt, Human
agacagggccugacauccgcc

SEQ ID NO: 321497 - RNA, 18 nt, Human
agccgacugaggucccug

SEQ ID NO: 321498 - RNA, 24 nt, Human
ccacacucugauuaagccgacuga

SEQ ID NO: 321499 - RNA, 23 nt, Human
ccagacagggccugacauccgcc

SEQ ID NO: 321500 - RNA, 21 nt, Human
cccacagcgcucaguucuggc

SEQ ID NO: 321501 - RNA, 22 nt, Human
cccacagcgcucaguucuggcc

SEQ ID NO: 321502 - RNA, 23 nt, Human
cccggccauacuggcggcucaca

SEQ ID NO: 321503 - RNA, 20 nt, Human
cgcucaguucuggcccagac

SEQ ID NO: 321504 - RNA, 19 nt, Human
uaagccgacugaggucccu

SEQ ID NO: 321505 - RNA, 18 nt, Human
uagcuucuaugccacacu

SEQ ID NO: 321506 - RNA, 23 nt, Human
aaacaaaaacacagauugaagga

SEQ ID NO: 321507 - RNA, 25 nt, Human
aaacagaaggagauuagaaagacaa

SEQ ID NO: 321508 - RNA, 26 nt, Human
aaacagaaggagauuagaagggaccc

SEQ ID NO: 321509 - RNA, 27 nt, Human
aaacagagaaauagacagaagggaccc

SEQ ID NO: 321510 - RNA, 22 nt, Human
aaacuuacagcaaagccccuaa

SEQ ID NO: 321511 - RNA, 18 nt, Human
aaagacauacaaaaagcu

SEQ ID NO: 321512 - RNA, 20 nt, Human
aaagacauacaaaaagcuga

SEQ ID NO: 321513 - RNA, 22 nt, Human
aagaacagugcaaaucuauggc

SEQ ID NO: 321514 - RNA, 23 nt, Human
aagaagagcaucagagacagaaa

SEQ ID NO: 321515 - RNA, 23 nt, Human
aagagagagaggagagaaaaaga

SEQ ID NO: 321516 - RNA, 19 nt, Human
aagauaaacagagaaauag

SEQ ID NO: 321517 - RNA, 22 nt, Human
aaguaccagggagugauauuug

SEQ ID NO: 321518 - RNA, 21 nt, Human
aauaagagagauagagaagga

SEQ ID NO: 321519 - RNA, 25 nt, Human
agaaacaaaaacacagauugaagga

SEQ ID NO: 321520 - RNA, 21 nt, Human
agaaagacaaauagugacagg

SEQ ID NO: 321521 - RNA, 22 nt, Human
agaaaugaagauauucagagaa

SEQ ID NO: 321522 - RNA, 23 nt, Human
agaagaagagcaucagagacaga

SEQ ID NO: 321523 - RNA, 24 nt, Human
agaagaagagcaucagagacagaa

SEQ ID NO: 321524 - RNA, 21 nt, Human
agaaucaugaaucccuagagu

SEQ ID NO: 321525 - RNA, 19 nt, Human
agacagaaacacagagaua

SEQ ID NO: 321526 - RNA, 19 nt, Human
agacagaaauagagacaga

SEQ ID NO: 321527 - RNA, 23 nt, Human
agacagaaauagagacagagaca

SEQ ID NO: 321528 - RNA, 22 nt, Human
agacagaaauagagccucaggg

SEQ ID NO: 321529 - RNA, 22 nt, Human
agacagaaauagagccucaggg

SEQ ID NO: 321530 - RNA, 22 nt, Human
agagacacagaagaagagcauc

SEQ ID NO: 321531 - RNA, 25 nt, Human
agagacagagacagagugagaaaga

SEQ ID NO: 321532 - RNA, 23 nt, Human
agagacugagggaaagggguaca

SEQ ID NO: 321533 - RNA, 19 nt, Human
agagauagagaaggaaaag

SEQ ID NO: 321534 - RNA, 21 nt, Human
aggaagagaaauagagacaca

SEQ ID NO: 321535 - RNA, 21 nt, Human
aggagacacacagagaccaaa

SEQ ID NO: 321536 - RNA, 23 nt, Human
aggagcuggaguggcagaauuug

SEQ ID NO: 321537 - RNA, 21 nt, Human
agugaaggguguggaaggaag

SEQ ID NO: 321538 - RNA, 23 nt, Human
agugacaggaagagaaauagaga

SEQ ID NO: 321539 - RNA, 18 nt, Human
agugacaggggaaagaga

SEQ ID NO: 321540 - RNA, 20 nt, Human
agugacaggggaaagagaga

SEQ ID NO: 321541 - RNA, 24 nt, Human
agugacaggggaaagagagaggaa

SEQ ID NO: 321542 - RNA, 23 nt, Human
aguuucuucuuucaaaacaagcu

SEQ ID NO: 321543 - RNA, 22 nt, Human
caaaaacacagauugaaggaca

SEQ ID NO: 321544 - RNA, 21 nt, Human
caaagacauacaaaaagcuga

SEQ ID NO: 321545 - RNA, 22 nt, Human
caaagccccuaacccaggagcu

SEQ ID NO: 321546 - RNA, 19 nt, Human
cacagagaccaaaaaugag

SEQ ID NO: 321547 - RNA, 20 nt, Human
cagaaauagagacagagaca

SEQ ID NO: 321548 - RNA, 20 nt, Human
cagguuccugucacagcuaa

SEQ ID NO: 321549 - RNA, 19 nt, Human
caguggaaauagccauggc

SEQ ID NO: 321550 - RNA, 21 nt, Human
ccaggcccuggaagaaggaau

SEQ ID NO: 321551 - RNA, 23 nt, Human
ccuauccucccaggcccuggaag

SEQ ID NO: 321552 - RNA, 28 nt, Human
cgagggcaccagcauaaguuggagaccc

SEQ ID NO: 321553 - RNA, 21 nt, Human
gaaacaaaaacacagauugaa

SEQ ID NO: 321554 - RNA, 19 nt, Human
gaaagagagaggaagagac

SEQ ID NO: 321555 - RNA, 19 nt, Human
gaaauagccauggcagagc

SEQ ID NO: 321556 - RNA, 20 nt, Human
gaaggaaaagauuaagugac

SEQ ID NO: 321557 - RNA, 18 nt, Human
gacaaauagugacagggg

SEQ ID NO: 321558 - RNA, 26 nt, Human
gacacagaagaagagcaucagagaca

SEQ ID NO: 321559 - RNA, 18 nt, Human
gacaggaagagaaauaga

SEQ ID NO: 321560 - RNA, 22 nt, Human
gagacagagagauugaggacac

SEQ ID NO: 321561 - RNA, 22 nt, Human
gagacagagagauugaggacac

SEQ ID NO: 321562 - RNA, 22 nt, Human
gcagaggagagacagaaauaga

SEQ ID NO: 321563 - RNA, 22 nt, Human
gcagaggagagacagaaauaga

SEQ ID NO: 321564 - RNA, 19 nt, Human
gcaguggaaauagccaugg

SEQ ID NO: 321565 - RNA, 18 nt, Human
gccagaaacaaaaacaca

SEQ ID NO: 321566 - RNA, 22 nt, Human
ggagacagagagauugaggaca

SEQ ID NO: 321567 - RNA, 22 nt, Human
ggagacagagagauugaggaca

SEQ ID NO: 321568 - RNA, 19 nt, Human
gggaaagagagaggaagag

SEQ ID NO: 321569 - RNA, 25 nt, Human
ggguacagugagagaaaccgguacc

SEQ ID NO: 321570 - RNA, 24 nt, Human
ggugagugaaggguguggaaggaa

SEQ ID NO: 321571 - RNA, 20 nt, Human
uaaaguccagaaaaagaaac

SEQ ID NO: 321572 - RNA, 19 nt, Human
uacaaaaagcugagaagua

SEQ ID NO: 321573 - RNA, 24 nt, Human
uaccagggagugauauuugauugu

SEQ ID NO: 321574 - RNA, 26 nt, Human
uagaaagacaaauagugacaggggaa

SEQ ID NO: 321575 - RNA, 18 nt, Human
uagacagaaacacagaga

SEQ ID NO: 321576 - RNA, 18 nt, Human
uaggagacacacagagac

SEQ ID NO: 321577 - RNA, 20 nt, Human
uaggagacacacagagacca

SEQ ID NO: 321578 - RNA, 20 nt, Human
uauucagagaaacagaagga

SEQ ID NO: 321579 - RNA, 18 nt, Human
ucagagaaacagaaggag

SEQ ID NO: 321580 - RNA, 22 nt, Human
ucagugaacaaguauguccagg

SEQ ID NO: 321581 - RNA, 23 nt, Human
uccaccagaaucaugaaucccua

SEQ ID NO: 321582 - RNA, 19 nt, Human
uccagaaaaagaaacuuac

SEQ ID NO: 321583 - RNA, 24 nt, Human
ucccaggcccuggaagaaggaauc

SEQ ID NO: 321584 - RNA, 26 nt, Human
ucuuuaggaaagaacagugcaaaucu

SEQ ID NO: 321585 - RNA, 22 nt, Human
ugaagauauucagagaaacaga

SEQ ID NO: 321586 - RNA, 18 nt, Human
ugacaggaagagaaauag

SEQ ID NO: 321587 - RNA, 19 nt, Human
ugacaggaagagaaauaga

SEQ ID NO: 321588 - RNA, 19 nt, Human
ugacaggggaaagagagag

SEQ ID NO: 321589 - RNA, 25 nt, Human
ugacaggggaaagagagaggaagag

SEQ ID NO: 321590 - RNA, 21 nt, Human
ugagaaagaaagugacuagga

SEQ ID NO: 321591 - RNA, 22 nt, Human
ugaggacacagcagaggagaga

SEQ ID NO: 321592 - RNA, 23 nt, Human
ugaggacacagcagaggagagac

SEQ ID NO: 321593 - RNA, 24 nt, Human
ugcggaacaggugcugaauuccaa

SEQ ID NO: 321594 - RNA, 18 nt, Human
uggaaauagccauggcag

SEQ ID NO: 321595 - RNA, 18 nt, Human
uggaaauagccauggcag

SEQ ID NO: 321596 - RNA, 23 nt, Human
uggaagaaggaaucuccaccaga

SEQ ID NO: 321597 - RNA, 22 nt, Human
uggcagagcaagagagagagga

SEQ ID NO: 321598 - RNA, 24 nt, Human
ugggauuagcccuauccucccagg

SEQ ID NO: 321599 - RNA, 18 nt, Human
uuccugggaguuucuucu

SEQ ID NO: 321600 - RNA, 19 nt, Human
uugaaggacagaaagauaa

SEQ ID NO: 321601 - RNA, 23 nt, Human
uugaucuuuaggaaagaacagug

SEQ ID NO: 321602 - RNA, 25 nt, Human
uuggaagcuggaaguaccagggagu

SEQ ID NO: 321603 - RNA, 23 nt, Human
uuugaaccagaaucugaucagca

SEQ ID NO: 321604 - RNA, 21 nt, Human
gguauagagacugcagaggga

SEQ ID NO: 321605 - RNA, 23 nt, Human
aaaauuuuguuucccuggccccc

SEQ ID NO: 321606 - RNA, 23 nt, Human
agaaaagacagagaaacaauuga

SEQ ID NO: 321607 - RNA, 24 nt, Human
agcagcaaacuaaacuggaacuag

SEQ ID NO: 321608 - RNA, 21 nt, Human
agguaagaauaaaaaccuuug

SEQ ID NO: 321609 - RNA, 18 nt, Human
aguaaguaauaaaaauaa

SEQ ID NO: 321610 - RNA, 18 nt, Human
caaacuaaacuggaacua

SEQ ID NO: 321611 - RNA, 18 nt, Human
caggccugugacauaagc

SEQ ID NO: 321612 - RNA, 19 nt, Human
caucccuuuaaacaacagu

SEQ ID NO: 321613 - RNA, 22 nt, Human
cuuacaauaaauaguuucuauu

SEQ ID NO: 321614 - RNA, 20 nt, Human
uagaaaagacagagaaacaa

SEQ ID NO: 321615 - RNA, 19 nt, Human
ugacauagguaagaauaaa

SEQ ID NO: 321616 - RNA, 18 nt, Human
ugggaaaauacuaagguu

SEQ ID NO: 321617 - RNA, 23 nt, Human
ugguugggaaaauacuaagguua

SEQ ID NO: 321618 - RNA, 23 nt, Human
uucccuggcccccuagcauuuca

SEQ ID NO: 321619 - RNA, 19 nt, Human
uuuaaacaacaguaaguaa

SEQ ID NO: 321620 - RNA, 23 nt, Human
uuuuaaaguuauucuguauugcu

SEQ ID NO: 321621 - RNA, 18 nt, Human
aaaaagcacacccagaag

SEQ ID NO: 321622 - RNA, 24 nt, Human
aaacaggugggagccagggcucau

SEQ ID NO: 321623 - RNA, 20 nt, Human
aagauggggccccagccucc

SEQ ID NO: 321624 - RNA, 21 nt, Human
aagguggccccagcccagaac

SEQ ID NO: 321625 - RNA, 23 nt, Human
acccagaagaaugggcucaaaga

SEQ ID NO: 321626 - RNA, 19 nt, Human
accuaccugcccgccccuc

SEQ ID NO: 321627 - RNA, 18 nt, Human
accugcccgccccucccc

SEQ ID NO: 321628 - RNA, 19 nt, Human
agccagggcucauuuucau

SEQ ID NO: 321629 - RNA, 18 nt, Human
aggagucagggcucgggg

SEQ ID NO: 321630 - RNA, 20 nt, Human
aggcagggagcggccgcaac

SEQ ID NO: 321631 - RNA, 26 nt, Human
aggcagggagcggccgcaacgggaga

SEQ ID NO: 321632 - RNA, 21 nt, Human
agggagcggccgcaacgggag

SEQ ID NO: 321633 - RNA, 21 nt, Human
agggucccaggagcuccccag

SEQ ID NO: 321634 - RNA, 20 nt, Human
agguggccccagcccagaac

SEQ ID NO: 321635 - RNA, 20 nt, Human
auccaagcgccagcccaguu

SEQ ID NO: 321636 - RNA, 20 nt, Human
auccauccuggaaguagggc

SEQ ID NO: 321637 - RNA, 22 nt, Human
auggucccaaaaagcacaccca

SEQ ID NO: 321638 - RNA, 20 nt, Human
auuucugcccuguuacuccc

SEQ ID NO: 321639 - RNA, 26 nt, Human
caaaaagcacacccagaagaaugggc

SEQ ID NO: 321640 - RNA, 24 nt, Human
caaaggccaucagggaaggaccag

SEQ ID NO: 321641 - RNA, 24 nt, Human
caacgggagacgccuggaguaucc

SEQ ID NO: 321642 - RNA, 22 nt, Human
caagauuggggccuuuccuguc

SEQ ID NO: 321643 - RNA, 18 nt, Human
cacacccagaagaauggg

SEQ ID NO: 321644 - RNA, 20 nt, Human
cagaaacaggugggagccag

SEQ ID NO: 321645 - RNA, 19 nt, Human
cagaacacagggagagggc

SEQ ID NO: 321646 - RNA, 22 nt, Human
caggaguggcugcaccuaccug

SEQ ID NO: 321647 - RNA, 21 nt, Human
caggcccuggguccaaaggcc

SEQ ID NO: 321648 - RNA, 19 nt, Human
caucagggaaggaccaggc

SEQ ID NO: 321649 - RNA, 22 nt, Human
caucagggaaggaccaggcucc

SEQ ID NO: 321650 - RNA, 27 nt, Human
ccagugggcaagauuggggccuuuccu

SEQ ID NO: 321651 - RNA, 25 nt, Human
cccaaaaagcacacccagaagaaug

SEQ ID NO: 321652 - RNA, 18 nt, Human
cccagccucccgcagagu

SEQ ID NO: 321653 - RNA, 19 nt, Human
cccaggacaagggccccug

SEQ ID NO: 321654 - RNA, 18 nt, Human
ccccagauccaagcgcca

SEQ ID NO: 321655 - RNA, 21 nt, Human
ccccagccucccgcagagucc

SEQ ID NO: 321656 - RNA, 20 nt, Human
ccccuggggcagacuccagg

SEQ ID NO: 321657 - RNA, 18 nt, Human
cccgccccuccccuggcc

SEQ ID NO: 321658 - RNA, 19 nt, Human
cccgccccuccccuggccc

SEQ ID NO: 321659 - RNA, 22 nt, Human
ccuaccugcccgccccuccccu

SEQ ID NO: 321660 - RNA, 21 nt, Human
ccuccccuggccccgcccacu

SEQ ID NO: 321661 - RNA, 20 nt, Human
ccuggccccgcccacuggcc

SEQ ID NO: 321662 - RNA, 19 nt, Human
cucccaccccagauccaag

SEQ ID NO: 321663 - RNA, 20 nt, Human
cucccaccccagauccaagc

SEQ ID NO: 321664 - RNA, 21 nt, Human
cugcaccuaccugcccgcccc

SEQ ID NO: 321665 - RNA, 23 nt, Human
cugcaccuaccugcccgccccuc

SEQ ID NO: 321666 - RNA, 21 nt, Human
cuggccccgcccacuggcugg

SEQ ID NO: 321667 - RNA, 19 nt, Human
cuggcugggcuccgccagc

SEQ ID NO: 321668 - RNA, 25 nt, Human
cuuccagaaacaggugggagccagg

SEQ ID NO: 321669 - RNA, 18 nt, Human
gacaagggccccuggggc

SEQ ID NO: 321670 - RNA, 24 nt, Human
gagcaguguggacgagucaccagc

SEQ ID NO: 321671 - RNA, 18 nt, Human
gaguggcucaagucaggc

SEQ ID NO: 321672 - RNA, 23 nt, Human
gccagcccaguuccggugggggc

SEQ ID NO: 321673 - RNA, 24 nt, Human
gcccgccccuccccuggccccgcc

SEQ ID NO: 321674 - RNA, 18 nt, Human
gcccuggguccaaaggcc

SEQ ID NO: 321675 - RNA, 19 nt, Human
gcgcucagcggccaguggg

SEQ ID NO: 321676 - RNA, 24 nt, Human
ggcaagauuggggccuuuccuguc

SEQ ID NO: 321677 - RNA, 20 nt, Human
ggccagugggcaagauuggg

SEQ ID NO: 321678 - RNA, 20 nt, Human
ggcucaguccuccggagucc

SEQ ID NO: 321679 - RNA, 21 nt, Human
gggcagcaaguguccaaggcu

SEQ ID NO: 321680 - RNA, 21 nt, Human
gggcucgggggcgcucagcgg

SEQ ID NO: 321681 - RNA, 22 nt, Human
ggggcucaguccuccggagucc

SEQ ID NO: 321682 - RNA, 21 nt, Human
gugggugaggggccagaggcu

SEQ ID NO: 321683 - RNA, 22 nt, Human
uauccgaagcgagcagugugga

SEQ ID NO: 321684 - RNA, 23 nt, Human
ucaccagcaccgucuggccacgc

SEQ ID NO: 321685 - RNA, 22 nt, Human
uccaggagucagggcucggggg

SEQ ID NO: 321686 - RNA, 20 nt, Human
uccugacucucagugauggu

SEQ ID NO: 321687 - RNA, 19 nt, Human
uccuggaaguagggccagc

SEQ ID NO: 321688 - RNA, 24 nt, Human
ucgaagcugcacaaagguggcccc

SEQ ID NO: 321689 - RNA, 18 nt, Human
uggcugcaccuaccugcc

SEQ ID NO: 321690 - RNA, 21 nt, Human
uguggacgagucaccagcacc

SEQ ID NO: 321691 - RNA, 24 nt, Human
uuucugcccuguuacucccacccc

SEQ ID NO: 321692 - RNA, 21 nt, Human
ccucgaggguuuggagccagg

SEQ ID NO: 321693 - RNA, 18 nt, Human
cggggucccggccagcgc

SEQ ID NO: 321694 - RNA, 19 nt, Human
gagccaggcucgggguccc

SEQ ID NO: 321695 - RNA, 23 nt, Human
ugggguccagggugcacccacga

SEQ ID NO: 321696 - RNA, 18 nt, Human
aacaaugaguggcgcccc

SEQ ID NO: 321697 - RNA, 21 nt, Human
aagaaucgugggggaaaugga

SEQ ID NO: 321698 - RNA, 23 nt, Human
acaagcaccccaggaggggcuga

SEQ ID NO: 321699 - RNA, 20 nt, Human
agacacaugcagccacuccu

SEQ ID NO: 321700 - RNA, 24 nt, Human
agcagcggugaagaaucguggggg

SEQ ID NO: 321701 - RNA, 22 nt, Human
aggaggggcugaguggauggug

SEQ ID NO: 321702 - RNA, 27 nt, Human
aucauaacaaugaguggcgccccuggg

SEQ ID NO: 321703 - RNA, 18 nt, Human
cacacagagaagauccca

SEQ ID NO: 321704 - RNA, 18 nt, Human
cacacagcccugaaugcu

SEQ ID NO: 321705 - RNA, 20 nt, Human
cacacagcccugaaugcucc

SEQ ID NO: 321706 - RNA, 20 nt, Human
caccacagcgcuagggccag

SEQ ID NO: 321707 - RNA, 23 nt, Human
caccccccaagugagacacucca

SEQ ID NO: 321708 - RNA, 21 nt, Human
cagcagaacgcugcugcugcu

SEQ ID NO: 321709 - RNA, 26 nt, Human
ccacaagcaccccaggaggggcugag

SEQ ID NO: 321710 - RNA, 22 nt, Human
ccaccacagcgcuagggccagu

SEQ ID NO: 321711 - RNA, 24 nt, Human
ccagugcuagccccaccccccaag

SEQ ID NO: 321712 - RNA, 19 nt, Human
cccacagggcaaguccggc

SEQ ID NO: 321713 - RNA, 19 nt, Human
cccaccccccaagugagac

SEQ ID NO: 321714 - RNA, 21 nt, Human
cccaccccccaagugagacac

SEQ ID NO: 321715 - RNA, 18 nt, Human
cccugaaugcucauucug

SEQ ID NO: 321716 - RNA, 21 nt, Human
ccggucuccugggacaggggc

SEQ ID NO: 321717 - RNA, 19 nt, Human
ccuccaguguccccucucc

SEQ ID NO: 321718 - RNA, 22 nt, Human
ccuccaguguccccucucccac

SEQ ID NO: 321719 - RNA, 27 nt, Human
ccucccgcaggcugaggggcaggaggc

SEQ ID NO: 321720 - RNA, 21 nt, Human
cgccccuggggcaggucauuc

SEQ ID NO: 321721 - RNA, 23 nt, Human
cuggaauguugggccacacagcc

SEQ ID NO: 321722 - RNA, 24 nt, Human
gaacagguuccaaggggcugcaca

SEQ ID NO: 321723 - RNA, 18 nt, Human
gaauguacccaucauaac

SEQ ID NO: 321724 - RNA, 21 nt, Human
gagcagcggugaagaaucgug

SEQ ID NO: 321725 - RNA, 24 nt, Human
gaggagcagaaguggguauaggag

SEQ ID NO: 321726 - RNA, 22 nt, Human
gaggagggagggaguucagcag

SEQ ID NO: 321727 - RNA, 22 nt, Human
ggaagaugauucauggacagga

SEQ ID NO: 321728 - RNA, 22 nt, Human
ggcaggucauucggggggagcc

SEQ ID NO: 321729 - RNA, 24 nt, Human
gggacaggggcagcuugaggaaag

SEQ ID NO: 321730 - RNA, 25 nt, Human
gggacaggggcagcuugaggaggga

SEQ ID NO: 321731 - RNA, 19 nt, Human
gggagggaguucagcagaa

SEQ ID NO: 321732 - RNA, 24 nt, Human
ggugugguucaacaaggagcugga

SEQ ID NO: 321733 - RNA, 26 nt, Human
gugugguggugagcagcgacgacggc

SEQ ID NO: 321734 - RNA, 18 nt, Human
uacaagcacaagggacgg

SEQ ID NO: 321735 - RNA, 21 nt, Human
uaggaggccacaagcacccca

SEQ ID NO: 321736 - RNA, 21 nt, Human
uagguuacaagcacaagggac

SEQ ID NO: 321737 - RNA, 21 nt, Human
uccaggcccccagccuaccuc

SEQ ID NO: 321738 - RNA, 20 nt, Human
uccccaccacagcgcuaggg

SEQ ID NO: 321739 - RNA, 22 nt, Human
uccccaccacagcgcuagggcc

SEQ ID NO: 321740 - RNA, 24 nt, Human
uccccaccacagcgcuagggccag

SEQ ID NO: 321741 - RNA, 22 nt, Human
ucucccacagggcaaguccggc

SEQ ID NO: 321742 - RNA, 20 nt, Human
ucuccugggacaggggcagc

SEQ ID NO: 321743 - RNA, 20 nt, Human
uggggaagaugauucaugga

SEQ ID NO: 321744 - RNA, 21 nt, Human
ugguggugagcagcggugaag

SEQ ID NO: 321745 - RNA, 21 nt, Human
uggugugguucaacaaggagc

SEQ ID NO: 321746 - RNA, 18 nt, Human
ugugguggugagcagcgg

SEQ ID NO: 321747 - RNA, 18 nt, Human
uucauggacaggaugggg

SEQ ID NO: 321748 - RNA, 24 nt, Human
uucggggggagccacuugaacagg

SEQ ID NO: 321749 - RNA, 23 nt, Human
aacccuguagccugcugugcccu

SEQ ID NO: 321750 - RNA, 20 nt, Human
aacucagccaccccuggcac

SEQ ID NO: 321751 - RNA, 26 nt, Human
aagcaggcagccaucuaggaucucca

SEQ ID NO: 321752 - RNA, 22 nt, Human
aagccgcaccuccggcacagcc

SEQ ID NO: 321753 - RNA, 22 nt, Human
aagccgcaccuccggcacagcc

SEQ ID NO: 321754 - RNA, 22 nt, Human
aagccgcaccuccggcacagcc

SEQ ID NO: 321755 - RNA, 24 nt, Human
aagcggaacuugggugacuucucu

SEQ ID NO: 321756 - RNA, 19 nt, Human
acagaucgagggcaggcag

SEQ ID NO: 321757 - RNA, 22 nt, Human
accagcuucccugagaccucag

SEQ ID NO: 321758 - RNA, 22 nt, Human
acccucccaucccagccccagc

SEQ ID NO: 321759 - RNA, 21 nt, Human
accucggggaggugcacaucg

SEQ ID NO: 321760 - RNA, 20 nt, Human
accucuggaagccgcaccuc

SEQ ID NO: 321761 - RNA, 20 nt, Human
accucuggaagccgcaccuc

SEQ ID NO: 321762 - RNA, 20 nt, Human
accucuggaagccgcaccuc

SEQ ID NO: 321763 - RNA, 21 nt, Human
accuuggcuaccuuggccuca

SEQ ID NO: 321764 - RNA, 20 nt, Human
acgagcuccugcagccaccu

SEQ ID NO: 321765 - RNA, 20 nt, Human
acgcagccgaggcagcugga

SEQ ID NO: 321766 - RNA, 24 nt, Human
acuuuggcugaagcccacucgggg

SEQ ID NO: 321767 - RNA, 21 nt, Human
agaaaggaaggcaagaaggga

SEQ ID NO: 321768 - RNA, 19 nt, Human
agacacccucacccaccag

SEQ ID NO: 321769 - RNA, 20 nt, Human
agagaaacaacuuuguccag

SEQ ID NO: 321770 - RNA, 19 nt, Human
agaggaaggggcagagggu

SEQ ID NO: 321771 - RNA, 20 nt, Human
agaucgagggcaggcagcag

SEQ ID NO: 321772 - RNA, 19 nt, Human
agccccagcccuugcccuc

SEQ ID NO: 321773 - RNA, 24 nt, Human
agcccuggucagucacccaccucc

SEQ ID NO: 321774 - RNA, 25 nt, Human
agccuccaccuuggcuuuccugggg

SEQ ID NO: 321775 - RNA, 20 nt, Human
agccuggauccgaugguggg

SEQ ID NO: 321776 - RNA, 18 nt, Human
agcuggaggcgccggcgg

SEQ ID NO: 321777 - RNA, 18 nt, Human
agcuguaccucuggaagc

SEQ ID NO: 321778 - RNA, 22 nt, Human
agcuugguagcucgcccagccc

SEQ ID NO: 321779 - RNA, 21 nt, Human
aggcagagugagagaggggac

SEQ ID NO: 321780 - RNA, 22 nt, Human
aggcagggaagugugggcagag

SEQ ID NO: 321781 - RNA, 22 nt, Human
aggcccagggagagaaacaacu

SEQ ID NO: 321782 - RNA, 23 nt, Human
aucccagccccagcccuugccuu

SEQ ID NO: 321783 - RNA, 18 nt, Human
caacuucaggagcagcgg

SEQ ID NO: 321784 - RNA, 20 nt, Human
cacagcccccucugcccucc

SEQ ID NO: 321785 - RNA, 18 nt, Human
cacccgagccuuggggag

SEQ ID NO: 321786 - RNA, 22 nt, Human
caccucagggcccuccacccgc

SEQ ID NO: 321787 - RNA, 21 nt, Human
caccuccagcuccuugggccu

SEQ ID NO: 321788 - RNA, 20 nt, Human
caccugguauuggaccaggc

SEQ ID NO: 321789 - RNA, 20 nt, Human
caccuugaacuucugcuucc

SEQ ID NO: 321790 - RNA, 19 nt, Human
cacugcccucuuccuccuc

SEQ ID NO: 321791 - RNA, 25 nt, Human
cagacuuugggcagcugcaccucug

SEQ ID NO: 321792 - RNA, 22 nt, Human
cagcaggcggagccggggcucc

SEQ ID NO: 321793 - RNA, 23 nt, Human
cagccaccucagccuccaccuug

SEQ ID NO: 321794 - RNA, 20 nt, Human
cagcccccacccgagccuug

SEQ ID NO: 321795 - RNA, 20 nt, Human
cagcccccucagccucugcc

SEQ ID NO: 321796 - RNA, 18 nt, Human
cagccgggacaggacccu

SEQ ID NO: 321797 - RNA, 20 nt, Human
cagcuccaccugaggggcug

SEQ ID NO: 321798 - RNA, 19 nt, Human
cagcugcaccucuggaagc

SEQ ID NO: 321799 - RNA, 19 nt, Human
cagcuguaccucuggaagc

SEQ ID NO: 321800 - RNA, 19 nt, Human
caggccugccuccccagcc

SEQ ID NO: 321801 - RNA, 22 nt, Human
cagggcccuccacccgcucucc

SEQ ID NO: 321802 - RNA, 18 nt, Human
cagggugggcaccacuac

SEQ ID NO: 321803 - RNA, 21 nt, Human
cagugagggcaaggcaggcag

SEQ ID NO: 321804 - RNA, 23 nt, Human
cagugggaggcugggaguggaca

SEQ ID NO: 321805 - RNA, 19 nt, Human
cauggagcagcugccucug

SEQ ID NO: 321806 - RNA, 24 nt, Human
cauuuuagggaguuucaucucugg

SEQ ID NO: 321807 - RNA, 18 nt, Human
ccaagagggaaagcccaa

SEQ ID NO: 321808 - RNA, 19 nt, Human
ccacagucggugcugccac

SEQ ID NO: 321809 - RNA, 21 nt, Human
ccaccagcagcucaccaccug

SEQ ID NO: 321810 - RNA, 26 nt, Human
ccagcacucaggcuggaaucuggcuu

SEQ ID NO: 321811 - RNA, 21 nt, Human
ccaggcagagacagggucacc

SEQ ID NO: 321812 - RNA, 23 nt, Human
ccagugugggcaacuucagccuc

SEQ ID NO: 321813 - RNA, 20 nt, Human
cccaaaggugggcauucgaa

SEQ ID NO: 321814 - RNA, 22 nt, Human
ccccaaaucggggaaaacuaag

SEQ ID NO: 321815 - RNA, 19 nt, Human
ccccacgcugggcagccgc

SEQ ID NO: 321816 - RNA, 20 nt, Human
ccccagagccccaggcacca

SEQ ID NO: 321817 - RNA, 19 nt, Human
ccccaucugacuaggggcu

SEQ ID NO: 321818 - RNA, 23 nt, Human
cccccagagccccaggcaccauc

SEQ ID NO: 321819 - RNA, 20 nt, Human
cccccggauggcgagagcuc

SEQ ID NO: 321820 - RNA, 30 nt, Human
cccccuucccggggaagaguuuggggcagg

SEQ ID NO: 321821 - RNA, 21 nt, Human
ccccucagccucugccuuagc

SEQ ID NO: 321822 - RNA, 22 nt, Human
ccccugcugccaccucagggcc

SEQ ID NO: 321823 - RNA, 23 nt, Human
ccccuucccgggucucuaggcag

SEQ ID NO: 321824 - RNA, 19 nt, Human
cccuccaacucagccaccc

SEQ ID NO: 321825 - RNA, 19 nt, Human
cccuccaacucagccaccc

SEQ ID NO: 321826 - RNA, 20 nt, Human
cccucccaucccagccccag

SEQ ID NO: 321827 - RNA, 18 nt, Human
cccucuuccuccuccucc

SEQ ID NO: 321828 - RNA, 20 nt, Human
cccugaccccugcugccacc

SEQ ID NO: 321829 - RNA, 19 nt, Human
cccugggguaccugccucc

SEQ ID NO: 321830 - RNA, 20 nt, Human
ccgccucgcccgccugugcc

SEQ ID NO: 321831 - RNA, 18 nt, Human
ccgccucgccuggcuugc

SEQ ID NO: 321832 - RNA, 20 nt, Human
ccggccucucccucccccuc

SEQ ID NO: 321833 - RNA, 20 nt, Human
ccgggaggugcacaucgggc

SEQ ID NO: 321834 - RNA, 26 nt, Human
ccucagccucagcccccacccgagcc

SEQ ID NO: 321835 - RNA, 20 nt, Human
ccucagccuccaccuuggcu

SEQ ID NO: 321836 - RNA, 22 nt, Human
ccucagccuccaccuuggcuuu

SEQ ID NO: 321837 - RNA, 19 nt, Human
ccucaggugccucuccccg

SEQ ID NO: 321838 - RNA, 19 nt, Human
ccucccggcccucuuaggg

SEQ ID NO: 321839 - RNA, 21 nt, Human
ccucccugccagcccugguca

SEQ ID NO: 321840 - RNA, 22 nt, Human
ccucccuuccuccugggcgccc

SEQ ID NO: 321841 - RNA, 23 nt, Human
ccucccuuccuccugggcgccca

SEQ ID NO: 321842 - RNA, 23 nt, Human
ccuccggcacagccaucucuggc

SEQ ID NO: 321843 - RNA, 23 nt, Human
ccuccggcacagccaucucuggc

SEQ ID NO: 321844 - RNA, 23 nt, Human
ccuccggcacagccaucucuggc

SEQ ID NO: 321845 - RNA, 20 nt, Human
ccucugggaggugcacaucc

SEQ ID NO: 321846 - RNA, 20 nt, Human
ccucugggaggugcacaucg

SEQ ID NO: 321847 - RNA, 18 nt, Human
ccugcagccaccucagcc

SEQ ID NO: 321848 - RNA, 21 nt, Human
ccugccaccucuaccuugccu

SEQ ID NO: 321849 - RNA, 18 nt, Human
ccuggggggaggagcggc

SEQ ID NO: 321850 - RNA, 22 nt, Human
ccuguguccucuccccuuucug

SEQ ID NO: 321851 - RNA, 18 nt, Human
ccuugggccuccuggguc

SEQ ID NO: 321852 - RNA, 21 nt, Human
cgggagcugcacuuccgggag

SEQ ID NO: 321853 - RNA, 19 nt, Human
cggggcuccgagcccaagg

SEQ ID NO: 321854 - RNA, 22 nt, Human
cucacccaccagcagcucacca

SEQ ID NO: 321855 - RNA, 19 nt, Human
cucagcacccucgcccccc

SEQ ID NO: 321856 - RNA, 21 nt, Human
cucagccuuuucccccgggcu

SEQ ID NO: 321857 - RNA, 21 nt, Human
cucccaucccagccccagccc

SEQ ID NO: 321858 - RNA, 23 nt, Human
cuccccaaagccggucagcuccc

SEQ ID NO: 321859 - RNA, 18 nt, Human
cuccccagccccuuuggc

SEQ ID NO: 321860 - RNA, 20 nt, Human
cuccuccuccuccuccuccu

SEQ ID NO: 321861 - RNA, 19 nt, Human
cuccuugggccuccugggu

SEQ ID NO: 321862 - RNA, 24 nt, Human
cucguacacgcagccgaggcagcu

SEQ ID NO: 321863 - RNA, 19 nt, Human
cucuaucaucuccagccgc

SEQ ID NO: 321864 - RNA, 21 nt, Human
cucucugacgggggacuuggg

SEQ ID NO: 321865 - RNA, 18 nt, Human
cucuggaagggcugccuc

SEQ ID NO: 321866 - RNA, 26 nt, Human
cugagcccccuccauccuggccgggg

SEQ ID NO: 321867 - RNA, 20 nt, Human
cugagccgcugccugggugc

SEQ ID NO: 321868 - RNA, 19 nt, Human
cugagggcaggugggcauc

SEQ ID NO: 321869 - RNA, 22 nt, Human
cugcaccucggggagucgaacc

SEQ ID NO: 321870 - RNA, 19 nt, Human
cugcaccucuggaagccgc

SEQ ID NO: 321871 - RNA, 19 nt, Human
cugccaccucuaccuugcc

SEQ ID NO: 321872 - RNA, 20 nt, Human
cugccaccucuaccuugccu

SEQ ID NO: 321873 - RNA, 19 nt, Human
cugccagagagacaggagc

SEQ ID NO: 321874 - RNA, 21 nt, Human
cugcccucccuuccuccuggg

SEQ ID NO: 321875 - RNA, 18 nt, Human
cugccucagugucccggc

SEQ ID NO: 321876 - RNA, 20 nt, Human
cugccucugagccgcugccu

SEQ ID NO: 321877 - RNA, 21 nt, Human
cugccuguucugccuuggugg

SEQ ID NO: 321878 - RNA, 20 nt, Human
cugccuuagccaccuuuggc

SEQ ID NO: 321879 - RNA, 19 nt, Human
cuucucacccuccucggcc

SEQ ID NO: 321880 - RNA, 25 nt, Human
cuugcccauuuuagcggcugggacc

SEQ ID NO: 321881 - RNA, 22 nt, Human
cuuugggcagcugcaccucugg

SEQ ID NO: 321882 - RNA, 23 nt, Human
gaaccagcuucaguucugcaugg

SEQ ID NO: 321883 - RNA, 19 nt, Human
gaacuuggaagagggcuug

SEQ ID NO: 321884 - RNA, 19 nt, Human
gacccgaggccccuucccc

SEQ ID NO: 321885 - RNA, 21 nt, Human
gaccugggggacacccaccuc

SEQ ID NO: 321886 - RNA, 21 nt, Human
gagcccaaggguuggcaggug

SEQ ID NO: 321887 - RNA, 22 nt, Human
gagcccccuccauccuggccgg

SEQ ID NO: 321888 - RNA, 23 nt, Human
gagcccccuccauccuggccggg

SEQ ID NO: 321889 - RNA, 26 nt, Human
gagcuccugcagccaccucagccucc

SEQ ID NO: 321890 - RNA, 24 nt, Human
gaggcccagggagagaaacaacuu

SEQ ID NO: 321891 - RNA, 18 nt, Human
gagggcccugggcugggg

SEQ ID NO: 321892 - RNA, 18 nt, Human
gaguuuggggcagagagg

SEQ ID NO: 321893 - RNA, 23 nt, Human
gaucgagggcaggcagcaggccu

SEQ ID NO: 321894 - RNA, 24 nt, Human
gcacagccaccucugaccccuugg

SEQ ID NO: 321895 - RNA, 21 nt, Human
gcaccacuaccgacacagccc

SEQ ID NO: 321896 - RNA, 24 nt, Human
gcacuuccuccuaacaggagccca

SEQ ID NO: 321897 - RNA, 19 nt, Human
gcaucuugauggugggcag

SEQ ID NO: 321898 - RNA, 18 nt, Human
gcccaaaggaaggcaucu

SEQ ID NO: 321899 - RNA, 18 nt, Human
gcccagcggaggcauccu

SEQ ID NO: 321900 - RNA, 18 nt, Human
gcccugggcagcuucacc

SEQ ID NO: 321901 - RNA, 25 nt, Human
gcccuggucagucacccaccucccg

SEQ ID NO: 321902 - RNA, 23 nt, Human
gccgcggcccaaccagcuccacc

SEQ ID NO: 321903 - RNA, 23 nt, Human
gccucgcccgccugugccucucg

SEQ ID NO: 321904 - RNA, 20 nt, Human
gccucugaccccaaacuugg

SEQ ID NO: 321905 - RNA, 25 nt, Human
gccugccuccccagccccuuuggcc

SEQ ID NO: 321906 - RNA, 22 nt, Human
gccuuggggagcuucacuucag

SEQ ID NO: 321907 - RNA, 18 nt, Human
gcgggcaggggcagccgg

SEQ ID NO: 321908 - RNA, 18 nt, Human
gcuccaccucggggaucu

SEQ ID NO: 321909 - RNA, 20 nt, Human
gcuccuggcaggucuagcuc

SEQ ID NO: 321910 - RNA, 20 nt, Human
gcucgcccagcccccucagc

SEQ ID NO: 321911 - RNA, 22 nt, Human
gcucucccuugcccauuuuagc

SEQ ID NO: 321912 - RNA, 22 nt, Human
gcugcaccucggggaggugcac

SEQ ID NO: 321913 - RNA, 23 nt, Human
gcugccaccucagggcccuccac

SEQ ID NO: 321914 - RNA, 21 nt, Human
gcugccucagugucccggccu

SEQ ID NO: 321915 - RNA, 24 nt, Human
gcuugaccucaggagccuugggga

SEQ ID NO: 321916 - RNA, 18 nt, Human
ggagaacuuggaagaggg

SEQ ID NO: 321917 - RNA, 19 nt, Human
ggagcggcggcggccagcc

SEQ ID NO: 321918 - RNA, 22 nt, Human
ggcaccacuaccgacacagccc

SEQ ID NO: 321919 - RNA, 23 nt, Human
ggcagagaggaaggggcagaggg

SEQ ID NO: 321920 - RNA, 24 nt, Human
ggcagaggguggaauuagcuuggg

SEQ ID NO: 321921 - RNA, 22 nt, Human
ggcagagugggcagugagggca

SEQ ID NO: 321922 - RNA, 18 nt, Human
ggcagcucuaccucugga

SEQ ID NO: 321923 - RNA, 21 nt, Human
ggcaucuucagggccaccuca

SEQ ID NO: 321924 - RNA, 19 nt, Human
ggcuguggacaccuucagg

SEQ ID NO: 321925 - RNA, 19 nt, Human
gggaaacugaggcccaggg

SEQ ID NO: 321926 - RNA, 22 nt, Human
gggaagaguuuggggcagagag

SEQ ID NO: 321927 - RNA, 20 nt, Human
gggcagagaggaaggggccg

SEQ ID NO: 321928 - RNA, 21 nt, Human
gggcagaggguggaauuagcu

SEQ ID NO: 321929 - RNA, 21 nt, Human
gggcagccguaccuugagcuu

SEQ ID NO: 321930 - RNA, 19 nt, Human
gggcagcucuaccucugga

SEQ ID NO: 321931 - RNA, 20 nt, Human
ggggacccccagagccccag

SEQ ID NO: 321932 - RNA, 19 nt, Human
gggggaggagcggcggcgg

SEQ ID NO: 321933 - RNA, 18 nt, Human
gggggaugugcuggguca

SEQ ID NO: 321934 - RNA, 18 nt, Human
gggguacaggcacuccug

SEQ ID NO: 321935 - RNA, 19 nt, Human
ggugggucugucccccuuc

SEQ ID NO: 321936 - RNA, 19 nt, Human
uacaggcacuccugccaga

SEQ ID NO: 321937 - RNA, 21 nt, Human
uaccuugccugagggcaggug

SEQ ID NO: 321938 - RNA, 18 nt, Human
uacucugagccugcugcc

SEQ ID NO: 321939 - RNA, 23 nt, Human
uagggaguuucaucucugggacu

SEQ ID NO: 321940 - RNA, 18 nt, Human
ucacauggcuuggugggg

SEQ ID NO: 321941 - RNA, 19 nt, Human
ucaccauccaccucuggcu

SEQ ID NO: 321942 - RNA, 18 nt, Human
ucaccaugagugcccagg

SEQ ID NO: 321943 - RNA, 19 nt, Human
ucacccaccucccggcccu

SEQ ID NO: 321944 - RNA, 19 nt, Human
ucaggcaccuuuggaagcu

SEQ ID NO: 321945 - RNA, 18 nt, Human
uccaacucagccaccccu

SEQ ID NO: 321946 - RNA, 22 nt, Human
uccacccccacagucggugcug

SEQ ID NO: 321947 - RNA, 21 nt, Human
uccacccgcucucccuugccc

SEQ ID NO: 321948 - RNA, 21 nt, Human
uccacugaaggcagagugaga

SEQ ID NO: 321949 - RNA, 18 nt, Human
uccaggcugagcuguggg

SEQ ID NO: 321950 - RNA, 22 nt, Human
uccccacucccacuccgggccc

SEQ ID NO: 321951 - RNA, 20 nt, Human
uccgaggugggugagggccc

SEQ ID NO: 321952 - RNA, 21 nt, Human
uccgugggguucuugcugccu

SEQ ID NO: 321953 - RNA, 19 nt, Human
uccuuggcccgcaccaggc

SEQ ID NO: 321954 - RNA, 19 nt, Human
ucucaggcaccuuuggaag

SEQ ID NO: 321955 - RNA, 21 nt, Human
ucugcauggagcagcugccuc

SEQ ID NO: 321956 - RNA, 21 nt, Human
ucugcugagggggcagccuug

SEQ ID NO: 321957 - RNA, 18 nt, Human
ucugcugccucagugucc

SEQ ID NO: 321958 - RNA, 20 nt, Human
ugaaggcagagugagagagg

SEQ ID NO: 321959 - RNA, 19 nt, Human
ugaccccugcugccaccuc

SEQ ID NO: 321960 - RNA, 18 nt, Human
ugagagaggggacaccca

SEQ ID NO: 321961 - RNA, 19 nt, Human
ugaggcccagggagagaaa

SEQ ID NO: 321962 - RNA, 18 nt, Human
ugagggcaaggcaggcag

SEQ ID NO: 321963 - RNA, 19 nt, Human
ugagggcaaggcaggcagc

SEQ ID NO: 321964 - RNA, 23 nt, Human
ugcaccucuggaagccgcaccuc

SEQ ID NO: 321965 - RNA, 22 nt, Human
ugcagaaccagcuucaguucug

SEQ ID NO: 321966 - RNA, 19 nt, Human
ugccaccucuaccuugccu

SEQ ID NO: 321967 - RNA, 23 nt, Human
ugccagagagacaggagcaggcc

SEQ ID NO: 321968 - RNA, 18 nt, Human
ugcccagcggaggcaucc

SEQ ID NO: 321969 - RNA, 20 nt, Human
ugcccucccuuccuccuggg

SEQ ID NO: 321970 - RNA, 21 nt, Human
ugcccucuuccuccuccuccu

SEQ ID NO: 321971 - RNA, 19 nt, Human
ugccuugguggccuuuagc

SEQ ID NO: 321972 - RNA, 27 nt, Human
ugcugagggggcagccuugggggcuga

SEQ ID NO: 321973 - RNA, 22 nt, Human
uggcaagcggacccggacccuc

SEQ ID NO: 321974 - RNA, 24 nt, Human
uggcacagccaccucugacaccuc

SEQ ID NO: 321975 - RNA, 18 nt, Human
uggcaccuuugggaguuu

SEQ ID NO: 321976 - RNA, 18 nt, Human
uggcaccuuugggaguuu

SEQ ID NO: 321977 - RNA, 21 nt, Human
uggcaccuuugggaguuucau

SEQ ID NO: 321978 - RNA, 21 nt, Human
uggcaccuuugggaguuucau

SEQ ID NO: 321979 - RNA, 21 nt, Human
uggcaccuuugggaguuucau

SEQ ID NO: 321980 - RNA, 18 nt, Human
uggcccacgauggcgggg

SEQ ID NO: 321981 - RNA, 23 nt, Human
uggcccccagugugggcaacuuc

SEQ ID NO: 321982 - RNA, 18 nt, Human
uggccucagccucagccc

SEQ ID NO: 321983 - RNA, 18 nt, Human
uggcuguggacaccuuca

SEQ ID NO: 321984 - RNA, 23 nt, Human
uggcuguggacaccuucaggccu

SEQ ID NO: 321985 - RNA, 20 nt, Human
ugggaggcugggaguggaca

SEQ ID NO: 321986 - RNA, 22 nt, Human
ugggaggcugggaguggacagg

SEQ ID NO: 321987 - RNA, 22 nt, Human
ugggcagcucuaccucuggaag

SEQ ID NO: 321988 - RNA, 21 nt, Human
ugggcagcugcaccucuggga

SEQ ID NO: 321989 - RNA, 18 nt, Human
ugggcauggucaucuugg

SEQ ID NO: 321990 - RNA, 21 nt, Human
uggggagagcaaaccugggcc

SEQ ID NO: 321991 - RNA, 23 nt, Human
uggggaguuucaucucugagacu

SEQ ID NO: 321992 - RNA, 24 nt, Human
uggggcagagaggaaggggcagag

SEQ ID NO: 321993 - RNA, 23 nt, Human
uggggugacaauuucaacagagg

SEQ ID NO: 321994 - RNA, 20 nt, Human
uguccagggccacucagcag

SEQ ID NO: 321995 - RNA, 21 nt, Human
uuagggaguuucaucucuggg

SEQ ID NO: 321996 - RNA, 23 nt, Human
uucacccucccaucccagcccca

SEQ ID NO: 321997 - RNA, 24 nt, Human
uucagggccaccucaggugccucu

SEQ ID NO: 321998 - RNA, 20 nt, Human
uucccggggaagaguuuggg

SEQ ID NO: 321999 - RNA, 20 nt, Human
uuccuccuccuccuccuccu

SEQ ID NO: 322000 - RNA, 22 nt, Human
uuccugguccccacucccacuc

SEQ ID NO: 322001 - RNA, 23 nt, Human
uuccugguccccacucccacucc

SEQ ID NO: 322002 - RNA, 21 nt, Human
uucuagauccugauccgggau

SEQ ID NO: 322003 - RNA, 23 nt, Human
uucugcugcagaaccagcuucag

SEQ ID NO: 322004 - RNA, 22 nt, Human
uugccugucauuucaccaugaa

SEQ ID NO: 322005 - RNA, 23 nt, Human
uuucacagacuuugggcagcugc

SEQ ID NO: 322006 - RNA, 18 nt, Human
uuucggcagcugcaccuc

SEQ ID NO: 322007 - RNA, 18 nt, Human
uuucggcagcugcaccuc

SEQ ID NO: 322008 - RNA, 24 nt, Human
uuucugcugcagaaccagcuucag

SEQ ID NO: 322009 - RNA, 22 nt, Human
uuugggcagcucuaccucugga

SEQ ID NO: 322010 - RNA, 19 nt, Human
uuuggggcagagaggaagg

SEQ ID NO: 322011 - RNA, 20 nt, Human
uuuggggcagagaggaaggg

SEQ ID NO: 322012 - RNA, 24 nt, Human
agacaaaagcuuuuugguuuuaau

SEQ ID NO: 322013 - RNA, 21 nt, Human
agagcugggcccggcugcagg

SEQ ID NO: 322014 - RNA, 21 nt, Human
agcggccccgggggggccggc

SEQ ID NO: 322015 - RNA, 26 nt, Human
aggggccucaacagccucgugggcuc

SEQ ID NO: 322016 - RNA, 23 nt, Human
cacccagggaggcgucugggucc

SEQ ID NO: 322017 - RNA, 19 nt, Human
cccaaccccuccaaggguu

SEQ ID NO: 322018 - RNA, 19 nt, Human
cccgcgagcggccccgggg

SEQ ID NO: 322019 - RNA, 19 nt, Human
cuuccggcccaaccccucc

SEQ ID NO: 322020 - RNA, 19 nt, Human
gacagaagagcugggcccg

SEQ ID NO: 322021 - RNA, 19 nt, Human
ggagaaggucacuuccugg

SEQ ID NO: 322022 - RNA, 22 nt, Human
ucuauugcuguccacccaggga

SEQ ID NO: 322023 - RNA, 24 nt, Human
ucugguggccaaggacagaagagc

SEQ ID NO: 322024 - RNA, 23 nt, Human
ugcccccuuuucuauugcuguua

SEQ ID NO: 322025 - RNA, 19 nt, Human
uggguccuggugggacugg

SEQ ID NO: 322026 - RNA, 22 nt, Human
uuaauacacaaacuaaaugagg

SEQ ID NO: 322027 - RNA, 20 nt, Human
uuccugggcgucugcccccu

SEQ ID NO: 322028 - RNA, 25 nt, Human
uuccugggcgucugcccccuuuucu

SEQ ID NO: 322029 - RNA, 18 nt, Human
uuucuuaaagacaaaagc

SEQ ID NO: 322030 - RNA, 23 nt, Human
uuuuugguuuuaauacacaaacu

SEQ ID NO: 322031 - RNA, 24 nt, Human
aagcaugaaaaaaaguguuguugg

SEQ ID NO: 322032 - RNA, 18 nt, Human
aagccgcggccacucuug

SEQ ID NO: 322033 - RNA, 19 nt, Human
aaggucagaauuggaggcc

SEQ ID NO: 322034 - RNA, 24 nt, Human
accaggugacuuguagcaacggcc

SEQ ID NO: 322035 - RNA, 24 nt, Human
agaaacaagcccagaucaucugca

SEQ ID NO: 322036 - RNA, 19 nt, Human
auuuuauucaugucucucu

SEQ ID NO: 322037 - RNA, 26 nt, Human
cacuuuuguaaggucagaauuggagg

SEQ ID NO: 322038 - RNA, 19 nt, Human
cagugccccuccucaguuc

SEQ ID NO: 322039 - RNA, 21 nt, Human
cauccugggucucucagaagc

SEQ ID NO: 322040 - RNA, 20 nt, Human
ccagaaucucugccagaaac

SEQ ID NO: 322041 - RNA, 20 nt, Human
ccagggcugggaaguaaggc

SEQ ID NO: 322042 - RNA, 20 nt, Human
ccauguacucuccugggagg

SEQ ID NO: 322043 - RNA, 23 nt, Human
cccgaccccaggugucccaaagc

SEQ ID NO: 322044 - RNA, 21 nt, Human
ccucaugguggacccgacccc

SEQ ID NO: 322045 - RNA, 20 nt, Human
ccugggucucucagaagcuc

SEQ ID NO: 322046 - RNA, 24 nt, Human
cgccucuccuuucucuguaccaga

SEQ ID NO: 322047 - RNA, 19 nt, Human
cggccacucuugggcgggu

SEQ ID NO: 322048 - RNA, 23 nt, Human
cgugguuccacucagcgccucuc

SEQ ID NO: 322049 - RNA, 20 nt, Human
cucaaugccauguacucucc

SEQ ID NO: 322050 - RNA, 18 nt, Human
cuccccuggccucagccc

SEQ ID NO: 322051 - RNA, 18 nt, Human
cucuugaccucacugcau

SEQ ID NO: 322052 - RNA, 22 nt, Human
cucuugggauuguugaggccca

SEQ ID NO: 322053 - RNA, 24 nt, Human
cugcaucccuucauccugggucuc

SEQ ID NO: 322054 - RNA, 21 nt, Human
cugguguggugugcuccucuu

SEQ ID NO: 322055 - RNA, 23 nt, Human
gaagcucucucagacugaccuuu

SEQ ID NO: 322056 - RNA, 24 nt, Human
ggaaguaaggcccagggcagugcc

SEQ ID NO: 322057 - RNA, 18 nt, Human
ggccacucuugggcgggu

SEQ ID NO: 322058 - RNA, 19 nt, Human
gucuuuuccucacuuggcc

SEQ ID NO: 322059 - RNA, 18 nt, Human
ucaacuacuuuaguucuc

SEQ ID NO: 322060 - RNA, 23 nt, Human
ucacugcaucccuucauccuggg

SEQ ID NO: 322061 - RNA, 21 nt, Human
ucagaagcucucucagacuga

SEQ ID NO: 322062 - RNA, 19 nt, Human
ucagugaaagaagguuggg

SEQ ID NO: 322063 - RNA, 22 nt, Human
ucccuucauccugggucucuca

SEQ ID NO: 322064 - RNA, 21 nt, Human
uccugggucucucagaagcuc

SEQ ID NO: 322065 - RNA, 23 nt, Human
uccugggucucucagaagcucuc

SEQ ID NO: 322066 - RNA, 23 nt, Human
ucucaaugccauguacucuccug

SEQ ID NO: 322067 - RNA, 22 nt, Human
ucucugaguccuuagagguggg

SEQ ID NO: 322068 - RNA, 20 nt, Human
ucucuugggauuguugaggc

SEQ ID NO: 322069 - RNA, 25 nt, Human
ucuguaccagaaucucugccagaaa

SEQ ID NO: 322070 - RNA, 19 nt, Human
ugaaagaagguugggcucu

SEQ ID NO: 322071 - RNA, 22 nt, Human
ugaaagaagguugggcucuuga

SEQ ID NO: 322072 - RNA, 21 nt, Human
ugcaaaccacacuuugguagc

SEQ ID NO: 322073 - RNA, 18 nt, Human
ugccagaaacaagcccag

SEQ ID NO: 322074 - RNA, 24 nt, Human
ugccagaaacaagcccagaucauc

SEQ ID NO: 322075 - RNA, 21 nt, Human
ugccauguacucuccugggag

SEQ ID NO: 322076 - RNA, 21 nt, Human
uggaggccagggcugggaagu

SEQ ID NO: 322077 - RNA, 18 nt, Human
ugggaaguaaggcccagg

SEQ ID NO: 322078 - RNA, 24 nt, Human
ugggcucuugaccucacugcaucc

SEQ ID NO: 322079 - RNA, 18 nt, Human
ugggucucucagaagcuc

SEQ ID NO: 322080 - RNA, 22 nt, Human
uggugugcuccucuucgcguac

SEQ ID NO: 322081 - RNA, 24 nt, Human
uguuggagguugugaugucucccc

SEQ ID NO: 322082 - RNA, 24 nt, Human
uuggagguugugaugucuccccug

SEQ ID NO: 322083 - RNA, 22 nt, Human
uuguuggagguugugaugucuc

SEQ ID NO: 322084 - RNA, 26 nt, Human
aaaaacaaccaaccaaucaacuuucu

SEQ ID NO: 322085 - RNA, 18 nt, Human
aaaaagaggaaggcgaag

SEQ ID NO: 322086 - RNA, 26 nt, Human
aaaacaaccaaccaaucaacuuucuc

SEQ ID NO: 322087 - RNA, 18 nt, Human
aaaaguagcagcaaaggc

SEQ ID NO: 322088 - RNA, 25 nt, Human
aaacaaccaaccaaucaacuuucuc

SEQ ID NO: 322089 - RNA, 21 nt, Human
aaagaaugguaaaaaugaauc

SEQ ID NO: 322090 - RNA, 18 nt, Human
agacuggggaggggguac

SEQ ID NO: 322091 - RNA, 23 nt, Human
agaggaaggcgaagacuggggag

SEQ ID NO: 322092 - RNA, 19 nt, Human
agagggccccccuacccuc

SEQ ID NO: 322093 - RNA, 23 nt, Human
agccgcugaacccaggagacccc

SEQ ID NO: 322094 - RNA, 22 nt, Human
aggaaggcgaagacuggggagg

SEQ ID NO: 322095 - RNA, 23 nt, Human
aggaaggcgaagacuggggaggg

SEQ ID NO: 322096 - RNA, 22 nt, Human
aguagcagcaaaggcaaaauac

SEQ ID NO: 322097 - RNA, 25 nt, Human
agugucuacauauaucagugauaac

SEQ ID NO: 322098 - RNA, 22 nt, Human
auaaacauauauaaaguauguc

SEQ ID NO: 322099 - RNA, 19 nt, Human
aucugcaauaaacauguuc

SEQ ID NO: 322100 - RNA, 23 nt, Human
caaggaggaccgaacgcgugaac

SEQ ID NO: 322101 - RNA, 18 nt, Human
cagcaccuagagggcccc

SEQ ID NO: 322102 - RNA, 24 nt, Human
cagccgcugaacccaggagacccc

SEQ ID NO: 322103 - RNA, 18 nt, Human
caggagaccccacagaug

SEQ ID NO: 322104 - RNA, 18 nt, Human
ccaaggaggaccgaacgc

SEQ ID NO: 322105 - RNA, 20 nt, Human
ccgcugaacccaggagaccc

SEQ ID NO: 322106 - RNA, 23 nt, Human
cgccuggcacucuuaaaccacuc

SEQ ID NO: 322107 - RNA, 24 nt, Human
gaagacuggggaggggguacaacu

SEQ ID NO: 322108 - RNA, 20 nt, Human
gacauuaggucccaccagcu

SEQ ID NO: 322109 - RNA, 27 nt, Human
gcauaauugaaaaacaaccaaccaauc

SEQ ID NO: 322110 - RNA, 26 nt, Human
gcgaagacuggggaggggguacaacu

SEQ ID NO: 322111 - RNA, 19 nt, Human
ggcuggcguuccuggcccu

SEQ ID NO: 322112 - RNA, 19 nt, Human
ggggaaagacuuuucagca

SEQ ID NO: 322113 - RNA, 20 nt, Human
gugcggcggcgagggcggug

SEQ ID NO: 322114 - RNA, 23 nt, Human
uaaauguauagaaauauaaagua

SEQ ID NO: 322115 - RNA, 19 nt, Human
uacagaguuguggauguuu

SEQ ID NO: 322116 - RNA, 18 nt, Human
uagagggccccccuaccc

SEQ ID NO: 322117 - RNA, 18 nt, Human
uagcagcaaaggcaaaag

SEQ ID NO: 322118 - RNA, 23 nt, Human
uccccaaguuacuuuaaacuuug

SEQ ID NO: 322119 - RNA, 20 nt, Human
ugaaaaacaaccaaccaauc

SEQ ID NO: 322120 - RNA, 21 nt, Human
ugaaaaacaaccaaccaauca

SEQ ID NO: 322121 - RNA, 19 nt, Human
ugcggcggcgagggcggug

SEQ ID NO: 322122 - RNA, 24 nt, Human
ugcuguguguucccaugacuccag

SEQ ID NO: 322123 - RNA, 22 nt, Human
uggaaugcuauaaugcacaagg

SEQ ID NO: 322124 - RNA, 21 nt, Human
uggcacucuuaaaccacuccu

SEQ ID NO: 322125 - RNA, 21 nt, Human
uuaaaccacuccuccaauggu

SEQ ID NO: 322126 - RNA, 19 nt, Human
uugaaaaacaaccaaccaa

SEQ ID NO: 322127 - RNA, 24 nt, Human
uuguucuuucaaaaaagaagaauc

SEQ ID NO: 322128 - RNA, 21 nt, Human
uuuguuagaaaagcaacaaga

SEQ ID NO: 322129 - RNA, 21 nt, Human
uuuuaggacuuuaauguucuu

SEQ ID NO: 322130 - RNA, 24 nt, Human
uuuuuuuuuuuuuuuagauguuuu

SEQ ID NO: 322131 - RNA, 22 nt, Human
aaaaagccugauuauuccaggc

SEQ ID NO: 322132 - RNA, 22 nt, Human
aacaaggcaucaccaggaaaga

SEQ ID NO: 322133 - RNA, 20 nt, Human
aaccccaaacaaggcaucac

SEQ ID NO: 322134 - RNA, 23 nt, Human
aacccuuggccccacugaugucc

SEQ ID NO: 322135 - RNA, 23 nt, Human
aagaaacuguggcucaugccagc

SEQ ID NO: 322136 - RNA, 24 nt, Human
aagaccuccagugcaucaacaucc

SEQ ID NO: 322137 - RNA, 24 nt, Human
aagcacaugucagggcucagaaca

SEQ ID NO: 322138 - RNA, 19 nt, Human
aagccaccagcagcugcuu

SEQ ID NO: 322139 - RNA, 26 nt, Human
acagaaccccaaacaaggcaucacca

SEQ ID NO: 322140 - RNA, 23 nt, Human
accagcagcugcuuccaaaaucc

SEQ ID NO: 322141 - RNA, 19 nt, Human
acccaaacccacagaaccc

SEQ ID NO: 322142 - RNA, 23 nt, Human
acccaaacccacagaaccccaaa

SEQ ID NO: 322143 - RNA, 21 nt, Human
accccagcauccaauccacac

SEQ ID NO: 322144 - RNA, 21 nt, Human
acccccacaccccagcaucca

SEQ ID NO: 322145 - RNA, 23 nt, Human
agaaaugggggaggugggggagc

SEQ ID NO: 322146 - RNA, 20 nt, Human
agagagaaaaggggcacuga

SEQ ID NO: 322147 - RNA, 18 nt, Human
agcagagagaaaaggggc

SEQ ID NO: 322148 - RNA, 23 nt, Human
aggaaagacacgggaaagccaaa

SEQ ID NO: 322149 - RNA, 20 nt, Human
aggaggccaccucagaagcc

SEQ ID NO: 322150 - RNA, 21 nt, Human
caaacccacagaaccccaaac

SEQ ID NO: 322151 - RNA, 22 nt, Human
caaaucacaguugaaccaggga

SEQ ID NO: 322152 - RNA, 23 nt, Human
caacauccaucuagcagagagaa

SEQ ID NO: 322153 - RNA, 24 nt, Human
caacauccaucuagcagagagaaa

SEQ ID NO: 322154 - RNA, 21 nt, Human
caacccccacaccccagcauc

SEQ ID NO: 322155 - RNA, 22 nt, Human
caacccccacaccccagcaucc

SEQ ID NO: 322156 - RNA, 23 nt, Human
caacccccacaccccagcaucca

SEQ ID NO: 322157 - RNA, 21 nt, Human
caagaggguugauggccucca

SEQ ID NO: 322158 - RNA, 22 nt, Human
cacacaaguagaaaaaaaccaa

SEQ ID NO: 322159 - RNA, 23 nt, Human
cacagaaacuuuagugcaaaaca

SEQ ID NO: 322160 - RNA, 18 nt, Human
cacagaaccccaaacaag

SEQ ID NO: 322161 - RNA, 18 nt, Human
cacaugucagggcucaga

SEQ ID NO: 322162 - RNA, 23 nt, Human
caccagcagcugcuuccaaaauc

SEQ ID NO: 322163 - RNA, 18 nt, Human
cacccaaacccacagaac

SEQ ID NO: 322164 - RNA, 21 nt, Human
cagaaccccaaacaaggcauc

SEQ ID NO: 322165 - RNA, 22 nt, Human
cagaaccccaaacaaggcauca

SEQ ID NO: 322166 - RNA, 21 nt, Human
cagacacacaaguagaaaaaa

SEQ ID NO: 322167 - RNA, 18 nt, Human
cagagcucucuccuccuc

SEQ ID NO: 322168 - RNA, 19 nt, Human
cagccagggacauguaggc

SEQ ID NO: 322169 - RNA, 22 nt, Human
cagcuuccaacccccacacccc

SEQ ID NO: 322170 - RNA, 23 nt, Human
caggaaagacacgggaaagccaa

SEQ ID NO: 322171 - RNA, 22 nt, Human
caggcuaaaagaccuccagugc

SEQ ID NO: 322172 - RNA, 26 nt, Human
cagggacagagaacccuuggccccac

SEQ ID NO: 322173 - RNA, 23 nt, Human
cagugcaucaacauccaucuagc

SEQ ID NO: 322174 - RNA, 26 nt, Human
caucaccaggaaagacacgggaaagg

SEQ ID NO: 322175 - RNA, 22 nt, Human
cauuuaaaaagccugauuauuc

SEQ ID NO: 322176 - RNA, 23 nt, Human
ccaaacccacagaaccccaaaca

SEQ ID NO: 322177 - RNA, 24 nt, Human
ccacacccagcagacccuucggca

SEQ ID NO: 322178 - RNA, 21 nt, Human
ccacaccccagcauccaaucc

SEQ ID NO: 322179 - RNA, 21 nt, Human
ccacccaaacccacagaaccc

SEQ ID NO: 322180 - RNA, 23 nt, Human
ccagcauccaauccacacccagc

SEQ ID NO: 322181 - RNA, 24 nt, Human
cccaaacccacagaaccccaaaca

SEQ ID NO: 322182 - RNA, 22 nt, Human
cccaagugggccacagacagcu

SEQ ID NO: 322183 - RNA, 25 nt, Human
cccaagugggccacagacagcuucc

SEQ ID NO: 322184 - RNA, 22 nt, Human
cccacaccccagcauccaaucc

SEQ ID NO: 322185 - RNA, 23 nt, Human
cccacagaaccccaaacaaggca

SEQ ID NO: 322186 - RNA, 21 nt, Human
cccacccaaacccacagaacc

SEQ ID NO: 322187 - RNA, 20 nt, Human
cccagcauccaauccacacc

SEQ ID NO: 322188 - RNA, 20 nt, Human
ccccacaccccagcauccaa

SEQ ID NO: 322189 - RNA, 21 nt, Human
ccccacaccccagcauccaau

SEQ ID NO: 322190 - RNA, 21 nt, Human
ccccagcauccaauccacacc

SEQ ID NO: 322191 - RNA, 19 nt, Human
ccucagaagcccaggccca

SEQ ID NO: 322192 - RNA, 23 nt, Human
ccugaucagggcaggaggccacc

SEQ ID NO: 322193 - RNA, 21 nt, Human
cgagcaggcacagcgcggcca

SEQ ID NO: 322194 - RNA, 21 nt, Human
cuacaauaaaggacacagaaa

SEQ ID NO: 322195 - RNA, 23 nt, Human
cuaccaggaagccagaggccuag

SEQ ID NO: 322196 - RNA, 22 nt, Human
cucagaagcccaggcccaccag

SEQ ID NO: 322197 - RNA, 19 nt, Human
cugcuuccaaaaucccuau

SEQ ID NO: 322198 - RNA, 22 nt, Human
cugugcguucauucccccagac

SEQ ID NO: 322199 - RNA, 25 nt, Human
cuuccaacccccacaccccagcauc

SEQ ID NO: 322200 - RNA, 19 nt, Human
gaaaaaaaccaaugcugug

SEQ ID NO: 322201 - RNA, 19 nt, Human
gaacaaggccucaaccaag

SEQ ID NO: 322202 - RNA, 20 nt, Human
gacacacaaguagaaaaaaa

SEQ ID NO: 322203 - RNA, 18 nt, Human
gacccuucggcaugccgc

SEQ ID NO: 322204 - RNA, 21 nt, Human
gagaacccuuggccccacuga

SEQ ID NO: 322205 - RNA, 20 nt, Human
gagcaggcacagcgcggcca

SEQ ID NO: 322206 - RNA, 19 nt, Human
gagcaucuaugagacaagg

SEQ ID NO: 322207 - RNA, 21 nt, Human
gaucugugcguucauuccccc

SEQ ID NO: 322208 - RNA, 23 nt, Human
gcaaaacaaaaaucacgaagucc

SEQ ID NO: 322209 - RNA, 19 nt, Human
gcagcgccucaacagccag

SEQ ID NO: 322210 - RNA, 19 nt, Human
gcccaggcccaccagugcc

SEQ ID NO: 322211 - RNA, 20 nt, Human
ggggagggucccugaucagg

SEQ ID NO: 322212 - RNA, 23 nt, Human
ggggaggugggggagcccuauuu

SEQ ID NO: 322213 - RNA, 21 nt, Human
uagaaaaaaaccaaugcuggu

SEQ ID NO: 322214 - RNA, 22 nt, Human
uagaaaaaaaccaaugcugugg

SEQ ID NO: 322215 - RNA, 24 nt, Human
uaggggcucccuugcagacagcaa

SEQ ID NO: 322216 - RNA, 24 nt, Human
uccaauccacacccagcagacccu

SEQ ID NO: 322217 - RNA, 25 nt, Human
ucccuugcagacagcaaugcuacaa

SEQ ID NO: 322218 - RNA, 22 nt, Human
uccugcuggcuuugcuugcugu

SEQ ID NO: 322219 - RNA, 21 nt, Human
ucuccuggcaaccagaagugg

SEQ ID NO: 322220 - RNA, 21 nt, Human
ucuucccacccaaacccacag

SEQ ID NO: 322221 - RNA, 20 nt, Human
ugaaaaggucaaaaggagca

SEQ ID NO: 322222 - RNA, 25 nt, Human
ugaagcagcuaugucugccaggggc

SEQ ID NO: 322223 - RNA, 23 nt, Human
ugagacaagggaggggugcaggc

SEQ ID NO: 322224 - RNA, 20 nt, Human
ugcaaaacaaaaaucacgaa

SEQ ID NO: 322225 - RNA, 18 nt, Human
ugcagacagcaaugcuac

SEQ ID NO: 322226 - RNA, 18 nt, Human
ugccaagauggaauauuc

SEQ ID NO: 322227 - RNA, 22 nt, Human
ugccaagauggaauauuccucc

SEQ ID NO: 322228 - RNA, 21 nt, Human
ugccaggggcuaggggcuccc

SEQ ID NO: 322229 - RNA, 22 nt, Human
ugccaggggcuaggggcucccu

SEQ ID NO: 322230 - RNA, 21 nt, Human
ugccuuuguuuugcugcuuug

SEQ ID NO: 322231 - RNA, 19 nt, Human
uggcccucuucccacccaa

SEQ ID NO: 322232 - RNA, 20 nt, Human
ugggggaggugggggagccc

SEQ ID NO: 322233 - RNA, 20 nt, Human
ugucccaagccaccagcagc

SEQ ID NO: 322234 - RNA, 22 nt, Human
uucauguccugcuggcuuugcu

SEQ ID NO: 322235 - RNA, 18 nt, Human
aaaaaggcauauaaaagc

SEQ ID NO: 322236 - RNA, 19 nt, Human
aaacaguggcuuucuagaa

SEQ ID NO: 322237 - RNA, 18 nt, Human
acaguggcuuucuagaac

SEQ ID NO: 322238 - RNA, 18 nt, Human
acugccucccugccacgc

SEQ ID NO: 322239 - RNA, 18 nt, Human
agcagcagcuugcaccgc

SEQ ID NO: 322240 - RNA, 18 nt, Human
agcagcuugcaccgcagg

SEQ ID NO: 322241 - RNA, 18 nt, Human
agcagcuugcacugcagg

SEQ ID NO: 322242 - RNA, 21 nt, Human
aggcauauaaaagcuauaauc

SEQ ID NO: 322243 - RNA, 19 nt, Human
caccgcagggcgacugccu

SEQ ID NO: 322244 - RNA, 22 nt, Human
caccgcagggcgacugccuccc

SEQ ID NO: 322245 - RNA, 19 nt, Human
cacugcagggcgaccaccu

SEQ ID NO: 322246 - RNA, 21 nt, Human
cagcuugcaccgcagggcgac

SEQ ID NO: 322247 - RNA, 21 nt, Human
cagcuugcacugcagggcgac

SEQ ID NO: 322248 - RNA, 23 nt, Human
ccacgguacgcucuggagcagca

SEQ ID NO: 322249 - RNA, 23 nt, Human
ccacgguaugcucuggagcagca

SEQ ID NO: 322250 - RNA, 25 nt, Human
cccaggaccccagccacggcacgag

SEQ ID NO: 322251 - RNA, 21 nt, Human
ccgcagggcgacugccucccu

SEQ ID NO: 322252 - RNA, 24 nt, Human
ccugggccacgguaugcucuggag

SEQ ID NO: 322253 - RNA, 22 nt, Human
cgaccaccucccaggaccccag

SEQ ID NO: 322254 - RNA, 20 nt, Human
cggaggggccgcccgcggug

SEQ ID NO: 322255 - RNA, 21 nt, Human
cuaaaaauacuacuguuagaa

SEQ ID NO: 322256 - RNA, 19 nt, Human
cugcagggcgaccaccucc

SEQ ID NO: 322257 - RNA, 18 nt, Human
cugccucccugccacgcc

SEQ ID NO: 322258 - RNA, 18 nt, Human
cugccucccugccacgcc

SEQ ID NO: 322259 - RNA, 25 nt, Human
gacugccucccugccacgccuuccg

SEQ ID NO: 322260 - RNA, 19 nt, Human
gagcagcagcuugcaccgc

SEQ ID NO: 322261 - RNA, 19 nt, Human
gagcagcagcuugcacugc

SEQ ID NO: 322262 - RNA, 18 nt, Human
gcucuggagcagcagcuu

SEQ ID NO: 322263 - RNA, 19 nt, Human
uaaaacaguggcuuucuag

SEQ ID NO: 322264 - RNA, 21 nt, Human
uacgcucuggagcagcagcuu

SEQ ID NO: 322265 - RNA, 26 nt, Human
uagaacgguuaauacugccccgagug

SEQ ID NO: 322266 - RNA, 19 nt, Human
ucccaggaccccagccacg

SEQ ID NO: 322267 - RNA, 23 nt, Human
ucugcuguggagacagcggaagc

SEQ ID NO: 322268 - RNA, 24 nt, Human
ucugggccacgguacgcucuggag

SEQ ID NO: 322269 - RNA, 19 nt, Human
ucuuucugcugggguuggg

SEQ ID NO: 322270 - RNA, 19 nt, Human
uggcaugguacgaaugagg

SEQ ID NO: 322271 - RNA, 25 nt, Human
uguuuugcuauaaaacaguggcuuu

SEQ ID NO: 322272 - RNA, 20 nt, Human
uucugcugggguugggucuu

SEQ ID NO: 322273 - RNA, 23 nt, Human
aaccacagugcacgaaacucucc

SEQ ID NO: 322274 - RNA, 20 nt, Human
aagagccuugccagggagaa

SEQ ID NO: 322275 - RNA, 19 nt, Human
acucugagcccacugcagc

SEQ ID NO: 322276 - RNA, 19 nt, Human
acugcagcucccacccacc

SEQ ID NO: 322277 - RNA, 25 nt, Human
agaacagccacuuaugcccagaaaa

SEQ ID NO: 322278 - RNA, 18 nt, Human
agcacagggcuagcaggg

SEQ ID NO: 322279 - RNA, 23 nt, Human
agcucccacccacccuccugagc

SEQ ID NO: 322280 - RNA, 20 nt, Human
agcugaggaccagagagggg

SEQ ID NO: 322281 - RNA, 22 nt, Human
aggaagcugaggaccagagagg

SEQ ID NO: 322282 - RNA, 23 nt, Human
aggaagucaguccuggcccacgg

SEQ ID NO: 322283 - RNA, 23 nt, Human
aggaguuuuauucucucuuugga

SEQ ID NO: 322284 - RNA, 21 nt, Human
aggcagagagggccaagccca

SEQ ID NO: 322285 - RNA, 22 nt, Human
aggcagagcugggacugagcuc

SEQ ID NO: 322286 - RNA, 19 nt, Human
aggcgaccacauuuccugu

SEQ ID NO: 322287 - RNA, 24 nt, Human
agugcacuggggugggaggugggu

SEQ ID NO: 322288 - RNA, 27 nt, Human
augacucccagaacagccacuuaugcc

SEQ ID NO: 322289 - RNA, 20 nt, Human
auguggggguggguggggac

SEQ ID NO: 322290 - RNA, 24 nt, Human
caagcccaacccgaggacagggga

SEQ ID NO: 322291 - RNA, 22 nt, Human
cagagagcgccuucagagccga

SEQ ID NO: 322292 - RNA, 19 nt, Human
cagcaaugaugucuguggc

SEQ ID NO: 322293 - RNA, 19 nt, Human
cagcaaugaugucuguggc

SEQ ID NO: 322294 - RNA, 18 nt, Human
cagcauucuggggcuggu

SEQ ID NO: 322295 - RNA, 19 nt, Human
cagcauucuggggcugguu

SEQ ID NO: 322296 - RNA, 19 nt, Human
cagcgagucagaggcagag

SEQ ID NO: 322297 - RNA, 19 nt, Human
cagcucccacccacccucc

SEQ ID NO: 322298 - RNA, 20 nt, Human
cagcucgagguaacggggaa

SEQ ID NO: 322299 - RNA, 23 nt, Human
caggcuccuagggcagugcuccc

SEQ ID NO: 322300 - RNA, 22 nt, Human
cagugcuccuuccaccaccccu

SEQ ID NO: 322301 - RNA, 21 nt, Human
caguuuugcaagaacuagaga

SEQ ID NO: 322302 - RNA, 21 nt, Human
ccacccacccuccugagcucu

SEQ ID NO: 322303 - RNA, 23 nt, Human
ccacggccccuccuacguugagg

SEQ ID NO: 322304 - RNA, 21 nt, Human
ccagaaaauccaugaucccau

SEQ ID NO: 322305 - RNA, 28 nt, Human
ccagggagaagaaucacuuagggacccc

SEQ ID NO: 322306 - RNA, 22 nt, Human
cccacugcagcucccacccacc

SEQ ID NO: 322307 - RNA, 23 nt, Human
cccagaaaauccaugaucccauc

SEQ ID NO: 322308 - RNA, 24 nt, Human
ccccgcccagcccuguguggggag

SEQ ID NO: 322309 - RNA, 24 nt, Human
ccccuagcccagugcuccuuccac

SEQ ID NO: 322310 - RNA, 23 nt, Human
cccgggguucugucccggggucc

SEQ ID NO: 322311 - RNA, 24 nt, Human
ccgucauuuucuugagggucccac

SEQ ID NO: 322312 - RNA, 18 nt, Human
ccgugggucugagcugug

SEQ ID NO: 322313 - RNA, 21 nt, Human
ccugcagacgcccaacccaga

SEQ ID NO: 322314 - RNA, 21 nt, Human
ccugcagcugggugcccaggc

SEQ ID NO: 322315 - RNA, 22 nt, Human
ccugccaaggaauuucccucca

SEQ ID NO: 322316 - RNA, 21 nt, Human
ccuuccaccaccccuggcugc

SEQ ID NO: 322317 - RNA, 19 nt, Human
cgggcuggcccggcaagga

SEQ ID NO: 322318 - RNA, 22 nt, Human
cuccagagacaggagucucacc

SEQ ID NO: 322319 - RNA, 22 nt, Human
cucccacccacccuccugagcu

SEQ ID NO: 322320 - RNA, 26 nt, Human
cucccagaacagccacuuaugcccag

SEQ ID NO: 322321 - RNA, 23 nt, Human
cuccccagcaacguugaauccgg

SEQ ID NO: 322322 - RNA, 20 nt, Human
cuccuccaggccaggccucc

SEQ ID NO: 322323 - RNA, 20 nt, Human
cuccuuccaccaccccuggc

SEQ ID NO: 322324 - RNA, 20 nt, Human
cucuggcugcucuccucacc

SEQ ID NO: 322325 - RNA, 20 nt, Human
cucuuuggaaugacucccag

SEQ ID NO: 322326 - RNA, 21 nt, Human
cugccuccaggcggcccuccu

SEQ ID NO: 322327 - RNA, 21 nt, Human
cugcuguucgggcuggcccgg

SEQ ID NO: 322328 - RNA, 23 nt, Human
cuggagcacagggcuagcagggg

SEQ ID NO: 322329 - RNA, 19 nt, Human
cuggcaguggggcagaggc

SEQ ID NO: 322330 - RNA, 21 nt, Human
cuggcccacgggggucucgug

SEQ ID NO: 322331 - RNA, 22 nt, Human
cuggggcugguuuuccucuggc

SEQ ID NO: 322332 - RNA, 23 nt, Human
cuggggcugguuuuccucuggcu

SEQ ID NO: 322333 - RNA, 23 nt, Human
cuuagggaccccacggccccucc

SEQ ID NO: 322334 - RNA, 23 nt, Human
gaagaaucacuuagggaccccac

SEQ ID NO: 322335 - RNA, 18 nt, Human
gaagcuggagcacagggc

SEQ ID NO: 322336 - RNA, 19 nt, Human
gaagguggagucuauacug

SEQ ID NO: 322337 - RNA, 21 nt, Human
gaccccugaccccuagcccag

SEQ ID NO: 322338 - RNA, 19 nt, Human
gagacagagcuggcugccc

SEQ ID NO: 322339 - RNA, 24 nt, Human
gagcgccuucagagccgaggacac

SEQ ID NO: 322340 - RNA, 19 nt, Human
gcacuggggugggaggugg

SEQ ID NO: 322341 - RNA, 21 nt, Human
gcagagagcgccuucagagcc

SEQ ID NO: 322342 - RNA, 20 nt, Human
gcagcauucuggggcugguu

SEQ ID NO: 322343 - RNA, 24 nt, Human
gccuaguucacaggcugacaagaa

SEQ ID NO: 322344 - RNA, 22 nt, Human
gccucuggggaaaagaugaccc

SEQ ID NO: 322345 - RNA, 22 nt, Human
gcucccacccacccuccugagc

SEQ ID NO: 322346 - RNA, 18 nt, Human
gcugaggaccagagaggg

SEQ ID NO: 322347 - RNA, 19 nt, Human
gcuguucgggcuggcccgg

SEQ ID NO: 322348 - RNA, 18 nt, Human
gcuugccccgcccagccc

SEQ ID NO: 322349 - RNA, 21 nt, Human
ggaggugggucuccaggugcu

SEQ ID NO: 322350 - RNA, 21 nt, Human
ggcagagcugggacugagcuc

SEQ ID NO: 322351 - RNA, 24 nt, Human
gggaagggaguagacuaagggagu

SEQ ID NO: 322352 - RNA, 24 nt, Human
gggaaggguuggcagagauauccc

SEQ ID NO: 322353 - RNA, 24 nt, Human
gggcaggggccugcagcugggugc

SEQ ID NO: 322354 - RNA, 21 nt, Human
gggggugagaaguguuuccug

SEQ ID NO: 322355 - RNA, 19 nt, Human
ggggugagaaguguuuccu

SEQ ID NO: 322356 - RNA, 22 nt, Human
ggggugggaggugggucuccag

SEQ ID NO: 322357 - RNA, 18 nt, Human
ggguggguggggacgagg

SEQ ID NO: 322358 - RNA, 19 nt, Human
ggucucgugugcaggcuuu

SEQ ID NO: 322359 - RNA, 23 nt, Human
ggugggaggugggucuccaggug

SEQ ID NO: 322360 - RNA, 29 nt, Human
gugggaggugggucuccaggugcugcaac

SEQ ID NO: 322361 - RNA, 21 nt, Human
guuuuauucucucuuuggaau

SEQ ID NO: 322362 - RNA, 24 nt, Human
uaacaggcuccuuccugcuugccc

SEQ ID NO: 322363 - RNA, 19 nt, Human
ucagaggcagagcugggac

SEQ ID NO: 322364 - RNA, 18 nt, Human
uccaccugcuuccuugcc

SEQ ID NO: 322365 - RNA, 19 nt, Human
uccagagacaggagucuca

SEQ ID NO: 322366 - RNA, 22 nt, Human
ucccagaacagccacuuaugcc

SEQ ID NO: 322367 - RNA, 25 nt, Human
ucccagaacagccacuuaugcccuu

SEQ ID NO: 322368 - RNA, 21 nt, Human
uccccagcaacguugaauccg

SEQ ID NO: 322369 - RNA, 18 nt, Human
ucccgggguucugucccc

SEQ ID NO: 322370 - RNA, 18 nt, Human
ucccuggagacagagcug

SEQ ID NO: 322371 - RNA, 23 nt, Human
ucccuggagacagagcuggcugc

SEQ ID NO: 322372 - RNA, 23 nt, Human
uccuguagugcacguagggcagg

SEQ ID NO: 322373 - RNA, 26 nt, Human
uccuucauggaccaaugaggugacag

SEQ ID NO: 322374 - RNA, 20 nt, Human
ucuauacugcuuuucucucc

SEQ ID NO: 322375 - RNA, 24 nt, Human
ucuguggcccaaaagagugcacug

SEQ ID NO: 322376 - RNA, 19 nt, Human
ugaaaaggaagagccuugc

SEQ ID NO: 322377 - RNA, 23 nt, Human
ugacaagaaucugcggauguccu

SEQ ID NO: 322378 - RNA, 20 nt, Human
ugaccccuagcccagugcuc

SEQ ID NO: 322379 - RNA, 22 nt, Human
ugaccccuagcccagugcuccu

SEQ ID NO: 322380 - RNA, 20 nt, Human
ugaccccugaccccuagccc

SEQ ID NO: 322381 - RNA, 19 nt, Human
ugaggugacagaggcaggg

SEQ ID NO: 322382 - RNA, 18 nt, Human
ugauggaggaagcugagg

SEQ ID NO: 322383 - RNA, 21 nt, Human
ugccaaggaauuucccuccag

SEQ ID NO: 322384 - RNA, 23 nt, Human
ugccaaggaauuucccuccaggg

SEQ ID NO: 322385 - RNA, 24 nt, Human
ugcccagaaaauccaugaucccau

SEQ ID NO: 322386 - RNA, 23 nt, Human
ugcuugcagaccuccagagacag

SEQ ID NO: 322387 - RNA, 20 nt, Human
uggaagcuggagcacagggc

SEQ ID NO: 322388 - RNA, 25 nt, Human
uggaggaagcugaggaccagagagg

SEQ ID NO: 322389 - RNA, 18 nt, Human
uggcccaaaagagugcac

SEQ ID NO: 322390 - RNA, 19 nt, Human
uggcccaaaagagugcacu

SEQ ID NO: 322391 - RNA, 21 nt, Human
uggcucagccacugccuccag

SEQ ID NO: 322392 - RNA, 19 nt, Human
uggggcugguuuuccucug

SEQ ID NO: 322393 - RNA, 20 nt, Human
uggggguggguggggacgag

SEQ ID NO: 322394 - RNA, 20 nt, Human
uggggugggaggugggucuu

SEQ ID NO: 322395 - RNA, 21 nt, Human
ugggucugagcugugugugug

SEQ ID NO: 322396 - RNA, 21 nt, Human
ugucuguggcccaaaagagug

SEQ ID NO: 322397 - RNA, 19 nt, Human
uucacaggcugacaagaau

SEQ ID NO: 322398 - RNA, 21 nt, Human
uuccuguuccccugccaagga

SEQ ID NO: 322399 - RNA, 22 nt, Human
uucuuggcuucuuggauauagc

SEQ ID NO: 322400 - RNA, 21 nt, Human
uuuuuuuuuuuuuuggaucag

SEQ ID NO: 322401 - RNA, 18 nt, Human
uuuuuuuuuuuuuuuuug

SEQ ID NO: 322402 - RNA, 19 nt, Human
aaagaucacuccagcucgc

SEQ ID NO: 322403 - RNA, 21 nt, Human
acuggaaugagcaggaaccug

SEQ ID NO: 322404 - RNA, 22 nt, Human
acuggaaugagcaggaaccugg

SEQ ID NO: 322405 - RNA, 18 nt, Human
cacuauagaugugagaaa

SEQ ID NO: 322406 - RNA, 27 nt, Human
ccuaagauuuuauaacccagcaauuau

SEQ ID NO: 322407 - RNA, 22 nt, Human
ccuccgcaggagcuacugggca

SEQ ID NO: 322408 - RNA, 21 nt, Human
cgcaggagcuacugggcauaa

SEQ ID NO: 322409 - RNA, 21 nt, Human
cuccgcaggagcuacugggca

SEQ ID NO: 322410 - RNA, 23 nt, Human
cuuuguuuacaagccauuacagg

SEQ ID NO: 322411 - RNA, 20 nt, Human
gaaaggacaccacaauccgg

SEQ ID NO: 322412 - RNA, 20 nt, Human
gaaugagcaggaaccugcau

SEQ ID NO: 322413 - RNA, 21 nt, Human
uaacccagcaauuauccuaua

SEQ ID NO: 322414 - RNA, 19 nt, Human
uaagaagcauaaacuauaa

SEQ ID NO: 322415 - RNA, 23 nt, Human
uacuggaaugagcaggaaccugc

SEQ ID NO: 322416 - RNA, 23 nt, Human
uauagaugugagaaacagcugau

SEQ ID NO: 322417 - RNA, 20 nt, Human
uauccuauagaaaauagucc

SEQ ID NO: 322418 - RNA, 21 nt, Human
uauuuaguuuuccugucugcu

SEQ ID NO: 322419 - RNA, 22 nt, Human
ugaacaaauucaaaauugccua

SEQ ID NO: 322420 - RNA, 23 nt, Human
ugagcaggaaccugcaucuuugu

SEQ ID NO: 322421 - RNA, 24 nt, Human
ugagucuagagauauuugugaaau

SEQ ID NO: 322422 - RNA, 19 nt, Human
ugcuuagaaauuggcuguu

SEQ ID NO: 322423 - RNA, 23 nt, Human
ugucacuauagaugugagaaaca

SEQ ID NO: 322424 - RNA, 19 nt, Human
ugugaaauaagcuaauuug

SEQ ID NO: 322425 - RNA, 22 nt, Human
uuacuggaaugagcaggaaccu

SEQ ID NO: 322426 - RNA, 22 nt, Human
uucauacuugacuccaaaaagu

SEQ ID NO: 322427 - RNA, 22 nt, Human
uuggcuguuuagguugaaaaau

SEQ ID NO: 322428 - RNA, 18 nt, Human
uuuccaugguucucauga

SEQ ID NO: 322429 - RNA, 21 nt, Human
uuugcagcacccaucucagac

SEQ ID NO: 322430 - RNA, 18 nt, Human
uuuuuuuuuuuuuuuuug

SEQ ID NO: 322431 - RNA, 22 nt, Human
uuuuuuuuuuuuuuuuuuguuu

SEQ ID NO: 322432 - RNA, 19 nt, Human
aaaaaaaaagcaucaaaag

SEQ ID NO: 322433 - RNA, 21 nt, Human
aaagcggaagaugaccacaga

SEQ ID NO: 322434 - RNA, 20 nt, Human
aaagugcugggauugcaggc

SEQ ID NO: 322435 - RNA, 23 nt, Human
aaagugcugggauugcaggcgua

SEQ ID NO: 322436 - RNA, 24 nt, Human
aacuguguguucaagaaauuucaa

SEQ ID NO: 322437 - RNA, 24 nt, Human
aagcaucaaaaguucaggggcgcu

SEQ ID NO: 322438 - RNA, 21 nt, Human
aagcggaagaugaccacagag

SEQ ID NO: 322439 - RNA, 19 nt, Human
aagugcugggauugcaggc

SEQ ID NO: 322440 - RNA, 19 nt, Human
aagugcugggauugcaggc

SEQ ID NO: 322441 - RNA, 18 nt, Human
acaaaaaggggcucucag

SEQ ID NO: 322442 - RNA, 19 nt, Human
acaaaauugguuggggcag

SEQ ID NO: 322443 - RNA, 22 nt, Human
accccagagcccugccuugagc

SEQ ID NO: 322444 - RNA, 24 nt, Human
accccagagcccugccuugagccc

SEQ ID NO: 322445 - RNA, 23 nt, Human
accuugugauccgcccgccuggc

SEQ ID NO: 322446 - RNA, 19 nt, Human
acuccccacccuaaaccuc

SEQ ID NO: 322447 - RNA, 22 nt, Human
acucgcagcuaguuuuuguauu

SEQ ID NO: 322448 - RNA, 19 nt, Human
agaaacuugucuuucagga

SEQ ID NO: 322449 - RNA, 19 nt, Human
agacacaacaauaaagaga

SEQ ID NO: 322450 - RNA, 21 nt, Human
agagaaagaguaagcccuugg

SEQ ID NO: 322451 - RNA, 18 nt, Human
agagaggaguaaaggcca

SEQ ID NO: 322452 - RNA, 23 nt, Human
agagcccugccuugagcccaccc

SEQ ID NO: 322453 - RNA, 20 nt, Human
agcaacacggggugaggggg

SEQ ID NO: 322454 - RNA, 20 nt, Human
agcagaaacgagaaacggca

SEQ ID NO: 322455 - RNA, 22 nt, Human
agccagcaccucaucgauguca

SEQ ID NO: 322456 - RNA, 23 nt, Human
agccaggcccaagggcuggggug

SEQ ID NO: 322457 - RNA, 20 nt, Human
aggaaggaggggaaaccagc

SEQ ID NO: 322458 - RNA, 23 nt, Human
aggcacuccccacccuaaaccuc

SEQ ID NO: 322459 - RNA, 18 nt, Human
aggcccaagggcuggggu

SEQ ID NO: 322460 - RNA, 21 nt, Human
aggcccaagggcugggguggg

SEQ ID NO: 322461 - RNA, 18 nt, Human
aggccccagcccugcccu

SEQ ID NO: 322462 - RNA, 18 nt, Human
agggaauguuugacuuca

SEQ ID NO: 322463 - RNA, 19 nt, Human
aguagcugggacuacaggc

SEQ ID NO: 322464 - RNA, 19 nt, Human
aguagcugggacuacaggc

SEQ ID NO: 322465 - RNA, 19 nt, Human
aguucccggccucgaguag

SEQ ID NO: 322466 - RNA, 18 nt, Human
augggguuucacuacguu

SEQ ID NO: 322467 - RNA, 20 nt, Human
augggguuucacuacguugg

SEQ ID NO: 322468 - RNA, 24 nt, Human
auguaaacaugaagaaaacacuga

SEQ ID NO: 322469 - RNA, 24 nt, Human
caaagugcugggauugcaggcgua

SEQ ID NO: 322470 - RNA, 23 nt, Human
cacaaagcggaagaugaccacag

SEQ ID NO: 322471 - RNA, 23 nt, Human
cacacaaaaaaaaagcaucaaaa

SEQ ID NO: 322472 - RNA, 25 nt, Human
cacaucuucuuccccaccugccuca

SEQ ID NO: 322473 - RNA, 24 nt, Human
caccacucgcagcuaguuuuugua

SEQ ID NO: 322474 - RNA, 23 nt, Human
cacccagaucccagcuccgacuc

SEQ ID NO: 322475 - RNA, 22 nt, Human
caccccagagcccugccuugag

SEQ ID NO: 322476 - RNA, 18 nt, Human
cacuacguuggccaggau

SEQ ID NO: 322477 - RNA, 24 nt, Human
cacuacguuggccaggauggucuc

SEQ ID NO: 322478 - RNA, 21 nt, Human
cagagggggacugaugguguc

SEQ ID NO: 322479 - RNA, 20 nt, Human
cagcaagagaaagaguaagc

SEQ ID NO: 322480 - RNA, 21 nt, Human
cagcaggcacuccccacccua

SEQ ID NO: 322481 - RNA, 26 nt, Human
cagcaggcacuccccacccuaaaccu

SEQ ID NO: 322482 - RNA, 21 nt, Human
cagcagguccuccgaagagug

SEQ ID NO: 322483 - RNA, 19 nt, Human
cagccaccccagagcccug

SEQ ID NO: 322484 - RNA, 22 nt, Human
cagccagcaccucaucgauguc

SEQ ID NO: 322485 - RNA, 22 nt, Human
cagcccauuggggagagaggag

SEQ ID NO: 322486 - RNA, 18 nt, Human
cagcucagccccaaaucc

SEQ ID NO: 322487 - RNA, 19 nt, Human
caggacagagggggacuga

SEQ ID NO: 322488 - RNA, 21 nt, Human
caggacagagggggacugaug

SEQ ID NO: 322489 - RNA, 22 nt, Human
caggccccaggacagaggggga

SEQ ID NO: 322490 - RNA, 22 nt, Human
ccaaagugcugggauugcaggc

SEQ ID NO: 322491 - RNA, 24 nt, Human
ccaaagugcugggauugcaggcgu

SEQ ID NO: 322492 - RNA, 21 nt, Human
ccacagagcucugggccccgg

SEQ ID NO: 322493 - RNA, 24 nt, Human
ccacccagaucccagcuccgacuc

SEQ ID NO: 322494 - RNA, 20 nt, Human
ccacccuguacgaaaaagug

SEQ ID NO: 322495 - RNA, 22 nt, Human
ccacugaagcgggggaaagcca

SEQ ID NO: 322496 - RNA, 22 nt, Human
ccagagcccugccuugagccca

SEQ ID NO: 322497 - RNA, 24 nt, Human
ccagcaggcacuccccacccuaaa

SEQ ID NO: 322498 - RNA, 20 nt, Human
ccaggcccaagggcuggggu

SEQ ID NO: 322499 - RNA, 20 nt, Human
ccauauaugcuuccuagaca

SEQ ID NO: 322500 - RNA, 23 nt, Human
ccauuuggcucuagcgauucucu

SEQ ID NO: 322501 - RNA, 19 nt, Human
cccacagccaccccagagc

SEQ ID NO: 322502 - RNA, 25 nt, Human
cccacagccaccccagagcccugcc

SEQ ID NO: 322503 - RNA, 27 nt, Human
cccagagcccugccuugagcccacccc

SEQ ID NO: 322504 - RNA, 24 nt, Human
cccauguacaagguuccggcugcc

SEQ ID NO: 322505 - RNA, 18 nt, Human
ccccacagccaccccaga

SEQ ID NO: 322506 - RNA, 25 nt, Human
ccccagagcccugccuugagcccac

SEQ ID NO: 322507 - RNA, 20 nt, Human
cccccgcccacccuguacga

SEQ ID NO: 322508 - RNA, 18 nt, Human
cccccuggagcagguagc

SEQ ID NO: 322509 - RNA, 21 nt, Human
cccgcccacccuguacgaaaa

SEQ ID NO: 322510 - RNA, 27 nt, Human
cccgcccacccuguacgaaaaagugca

SEQ ID NO: 322511 - RNA, 20 nt, Human
cccgccuggccucccaaagu

SEQ ID NO: 322512 - RNA, 18 nt, Human
cccggggggaggaccagg

SEQ ID NO: 322513 - RNA, 20 nt, Human
cccucccgcccccgcccacc

SEQ ID NO: 322514 - RNA, 24 nt, Human
cccuucagaggccucaaacaccuc

SEQ ID NO: 322515 - RNA, 23 nt, Human
ccgccuggccucccaaagugcug

SEQ ID NO: 322516 - RNA, 19 nt, Human
ccucacacuggccuucucc

SEQ ID NO: 322517 - RNA, 19 nt, Human
ccucaggggcaccgugucc

SEQ ID NO: 322518 - RNA, 24 nt, Human
ccucgaguagcugggacuacaggc

SEQ ID NO: 322519 - RNA, 21 nt, Human
ccugaggcccaggccccagcc

SEQ ID NO: 322520 - RNA, 20 nt, Human
ccugccccggacaccgcguc

SEQ ID NO: 322521 - RNA, 19 nt, Human
ccugggguggggcuggcgg

SEQ ID NO: 322522 - RNA, 20 nt, Human
cgacucaagcccccuggagc

SEQ ID NO: 322523 - RNA, 23 nt, Human
cgacucaagcccccuggagcagg

SEQ ID NO: 322524 - RNA, 21 nt, Human
cgaggcugggaugagggccag

SEQ ID NO: 322525 - RNA, 21 nt, Human
cggcucccuggccgggccccu

SEQ ID NO: 322526 - RNA, 21 nt, Human
cggcugccagguagggccgag

SEQ ID NO: 322527 - RNA, 22 nt, Human
cuagacacaacaauaaagagaa

SEQ ID NO: 322528 - RNA, 18 nt, Human
cuaggcuccugaggccca

SEQ ID NO: 322529 - RNA, 21 nt, Human
cucacacuggccuucuccaca

SEQ ID NO: 322530 - RNA, 19 nt, Human
cucaggggcaccgugucca

SEQ ID NO: 322531 - RNA, 19 nt, Human
cucccgcucagccagcacc

SEQ ID NO: 322532 - RNA, 24 nt, Human
cucgaguagcugggacuacaggcg

SEQ ID NO: 322533 - RNA, 25 nt, Human
cucgucguccacaucuucuucccca

SEQ ID NO: 322534 - RNA, 24 nt, Human
cucuugaccuugugauccgcccgc

SEQ ID NO: 322535 - RNA, 22 nt, Human
cugcccugccccggacaccgcg

SEQ ID NO: 322536 - RNA, 19 nt, Human
cugcuccaaccuggggugg

SEQ ID NO: 322537 - RNA, 21 nt, Human
cuuccuagacaaaauugguug

SEQ ID NO: 322538 - RNA, 23 nt, Human
gaagaguguggccaggcgcucag

SEQ ID NO: 322539 - RNA, 21 nt, Human
gaccuugugauccgcccgccu

SEQ ID NO: 322540 - RNA, 23 nt, Human
gaccuugugauccgcccgccugg

SEQ ID NO: 322541 - RNA, 19 nt, Human
gagaaaccccacccagauc

SEQ ID NO: 322542 - RNA, 24 nt, Human
gagaugggguuucacuacguuggc

SEQ ID NO: 322543 - RNA, 22 nt, Human
gaguaagcccuuggggaggaag

SEQ ID NO: 322544 - RNA, 20 nt, Human
gaguagcugggacuacaggc

SEQ ID NO: 322545 - RNA, 24 nt, Human
gaguagcugggacuacaggcgugc

SEQ ID NO: 322546 - RNA, 23 nt, Human
gcagggccaugucauccuucagg

SEQ ID NO: 322547 - RNA, 22 nt, Human
gcagugccuggugggcccucag

SEQ ID NO: 322548 - RNA, 20 nt, Human
gccccuagccuaggcuccug

SEQ ID NO: 322549 - RNA, 21 nt, Human
gccccucccgcccccgcccac

SEQ ID NO: 322550 - RNA, 19 nt, Human
gcccuaggccgggaggccc

SEQ ID NO: 322551 - RNA, 22 nt, Human
gccucacacuggccuucuccac

SEQ ID NO: 322552 - RNA, 21 nt, Human
gcggcccauguacaagguucc

SEQ ID NO: 322553 - RNA, 20 nt, Human
gcucccuggccgggccccuu

SEQ ID NO: 322554 - RNA, 18 nt, Human
gcuggcggcccauguaca

SEQ ID NO: 322555 - RNA, 18 nt, Human
ggacgcccuuccuccacc

SEQ ID NO: 322556 - RNA, 19 nt, Human
ggacuacaggcgugcgcca

SEQ ID NO: 322557 - RNA, 19 nt, Human
ggagaugggggggccugcu

SEQ ID NO: 322558 - RNA, 22 nt, Human
ggagccaggcccaagggcuggg

SEQ ID NO: 322559 - RNA, 18 nt, Human
ggcccaagggcuggggug

SEQ ID NO: 322560 - RNA, 18 nt, Human
ggccgggccguggggcag

SEQ ID NO: 322561 - RNA, 21 nt, Human
ggcugacuuucgauggccgag

SEQ ID NO: 322562 - RNA, 22 nt, Human
gggcgcuagccccucccgcccc

SEQ ID NO: 322563 - RNA, 18 nt, Human
gggcuggggugggccugg

SEQ ID NO: 322564 - RNA, 18 nt, Human
gggcuggggugggccugg

SEQ ID NO: 322565 - RNA, 19 nt, Human
gggcuggggugggccuggg

SEQ ID NO: 322566 - RNA, 24 nt, Human
gggggggccugcucugggggcuua

SEQ ID NO: 322567 - RNA, 22 nt, Human
gggguuucacuacguuggccag

SEQ ID NO: 322568 - RNA, 22 nt, Human
ggguuucacuacguuggccagg

SEQ ID NO: 322569 - RNA, 23 nt, Human
ggugaggggggcccacgcagagg

SEQ ID NO: 322570 - RNA, 24 nt, Human
gucguccacaucuucuuccccacc

SEQ ID NO: 322571 - RNA, 20 nt, Human
gugauccgcccgccuggccu

SEQ ID NO: 322572 - RNA, 21 nt, Human
guggagaugggggggccugcu

SEQ ID NO: 322573 - RNA, 23 nt, Human
uaaaaccauauaugcuuccuaga

SEQ ID NO: 322574 - RNA, 19 nt, Human
uaauagagaugggguuuca

SEQ ID NO: 322575 - RNA, 24 nt, Human
uaauagagaugggguuucacuacg

SEQ ID NO: 322576 - RNA, 18 nt, Human
uacgaaaaagugcaaaac

SEQ ID NO: 322577 - RNA, 21 nt, Human
uagacacaacaauaaagagaa

SEQ ID NO: 322578 - RNA, 21 nt, Human
uagccccucccgcccccgccc

SEQ ID NO: 322579 - RNA, 18 nt, Human
uaggcuccugaggcccag

SEQ ID NO: 322580 - RNA, 24 nt, Human
uaguuuuuguauuuuuaauagaga

SEQ ID NO: 322581 - RNA, 20 nt, Human
ucaaacaccucgucguccac

SEQ ID NO: 322582 - RNA, 21 nt, Human
ucacugcauagacagcugugu

SEQ ID NO: 322583 - RNA, 27 nt, Human
ucagcagguccuccgaagaguguggcc

SEQ ID NO: 322584 - RNA, 21 nt, Human
ucaggggcgcuagccccuccc

SEQ ID NO: 322585 - RNA, 24 nt, Human
ucaguggccucacacuggccuucu

SEQ ID NO: 322586 - RNA, 19 nt, Human
uccaagccaggccccagga

SEQ ID NO: 322587 - RNA, 18 nt, Human
uccagagcaguuuuaauc

SEQ ID NO: 322588 - RNA, 20 nt, Human
uccagagcaguuuuaauccc

SEQ ID NO: 322589 - RNA, 23 nt, Human
uccagugucagcagguccuccga

SEQ ID NO: 322590 - RNA, 24 nt, Human
ucccaaagugcugggauugcaggc

SEQ ID NO: 322591 - RNA, 19 nt, Human
ucccacacaaaaaaaaagc

SEQ ID NO: 322592 - RNA, 21 nt, Human
uccgaagaguguggccaggcg

SEQ ID NO: 322593 - RNA, 18 nt, Human
uccuagacaaaauugguu

SEQ ID NO: 322594 - RNA, 22 nt, Human
uccucccgcucagccagcaccu

SEQ ID NO: 322595 - RNA, 18 nt, Human
ucuagcgauucucugggc

SEQ ID NO: 322596 - RNA, 19 nt, Human
ucucugggcaugagaggag

SEQ ID NO: 322597 - RNA, 22 nt, Human
ucugcauuaugggaauugagga

SEQ ID NO: 322598 - RNA, 18 nt, Human
ucugggcaugagaggaga

SEQ ID NO: 322599 - RNA, 22 nt, Human
ugaagaaagaggguugcuagag

SEQ ID NO: 322600 - RNA, 23 nt, Human
ugaagaaagaggguugcuagaga

SEQ ID NO: 322601 - RNA, 24 nt, Human
ugaagagggugcccagggugaggg

SEQ ID NO: 322602 - RNA, 19 nt, Human
ugagcuggggggguccaag

SEQ ID NO: 322603 - RNA, 23 nt, Human
ugagcuggggggguccaaggagc

SEQ ID NO: 322604 - RNA, 19 nt, Human
ugccagguagggccgagcc

SEQ ID NO: 322605 - RNA, 21 nt, Human
ugccagguagggccgagccuc

SEQ ID NO: 322606 - RNA, 21 nt, Human
ugccgaggcugggaugagggc

SEQ ID NO: 322607 - RNA, 20 nt, Human
ugccuugagcccaccccagg

SEQ ID NO: 322608 - RNA, 18 nt, Human
uggaagagauagauggca

SEQ ID NO: 322609 - RNA, 20 nt, Human
uggagccaggcccaagggcu

SEQ ID NO: 322610 - RNA, 22 nt, Human
uggagccaggcccaagggcugg

SEQ ID NO: 322611 - RNA, 19 nt, Human
uggaugcuuccagccguaa

SEQ ID NO: 322612 - RNA, 24 nt, Human
uggcauuguagauaaaagagaaca

SEQ ID NO: 322613 - RNA, 24 nt, Human
uggccaggauggucucgaucucuu

SEQ ID NO: 322614 - RNA, 22 nt, Human
uggccgggccccuucagaggcc

SEQ ID NO: 322615 - RNA, 18 nt, Human
ugggacuacaggcgugcg

SEQ ID NO: 322616 - RNA, 21 nt, Human
ugggacuacaggcgugcgcca

SEQ ID NO: 322617 - RNA, 22 nt, Human
ugggacuacaggcgugcgccac

SEQ ID NO: 322618 - RNA, 24 nt, Human
ugggacuacaggcgugcgccacca

SEQ ID NO: 322619 - RNA, 18 nt, Human
ugggaugagggccaggga

SEQ ID NO: 322620 - RNA, 18 nt, Human
ugggauugcaggcguaag

SEQ ID NO: 322621 - RNA, 19 nt, Human
ugggauugcaggcguaagc

SEQ ID NO: 322622 - RNA, 24 nt, Human
ugggauugcaggcguaagcaccau

SEQ ID NO: 322623 - RNA, 20 nt, Human
ugggccccgggugggggcug

SEQ ID NO: 322624 - RNA, 25 nt, Human
ugggccccgggugggggcugcccag

SEQ ID NO: 322625 - RNA, 18 nt, Human
ugggcccucagagcuggg

SEQ ID NO: 322626 - RNA, 21 nt, Human
ugggccugggaggagaaaccc

SEQ ID NO: 322627 - RNA, 22 nt, Human
uggggccuuggcauggacgccc

SEQ ID NO: 322628 - RNA, 25 nt, Human
uggggcuggcggcccauguacaagg

SEQ ID NO: 322629 - RNA, 24 nt, Human
ugggguuucacuacguuggccagg

SEQ ID NO: 322630 - RNA, 25 nt, Human
uggguaggcagugccuggugggccc

SEQ ID NO: 322631 - RNA, 25 nt, Human
uguaaacaugaagaaaacacugagu

SEQ ID NO: 322632 - RNA, 18 nt, Human
uguacaagguuccggcug

SEQ ID NO: 322633 - RNA, 24 nt, Human
ugucagcagguccuccgaagagug

SEQ ID NO: 322634 - RNA, 19 nt, Human
ugucagggugggggugguc

SEQ ID NO: 322635 - RNA, 20 nt, Human
ugucucggaguacuuggcug

SEQ ID NO: 322636 - RNA, 18 nt, Human
uuaauagagaugggguuu

SEQ ID NO: 322637 - RNA, 18 nt, Human
uuaaucccccuggaggcu

SEQ ID NO: 322638 - RNA, 21 nt, Human
uucagaggccucaaacaccuc

SEQ ID NO: 322639 - RNA, 24 nt, Human
uugcucaugcacaucugcauuaug

SEQ ID NO: 322640 - RNA, 19 nt, Human
uuggcauggacgcccuucc

SEQ ID NO: 322641 - RNA, 19 nt, Human
uuucacuacguuggccagg

SEQ ID NO: 322642 - RNA, 22 nt, Human
uuucacuacguuggccaggaug

SEQ ID NO: 322643 - RNA, 24 nt, Human
uuuuuaauagagaugggguuucac

SEQ ID NO: 322644 - RNA, 20 nt, Human
uuuuuguauuuuuaauagag

SEQ ID NO: 322645 - RNA, 21 nt, Human
uuuuuguauuuuuaauagaga

SEQ ID NO: 322646 - RNA, 23 nt, Human
uuuuuguauuuuuaauagagaug

SEQ ID NO: 322647 - RNA, 19 nt, Human
aagcagacccagcccaaga

SEQ ID NO: 322648 - RNA, 20 nt, Human
aagcagacccagcccaagac

SEQ ID NO: 322649 - RNA, 25 nt, Human
aagcagcagcaaacacaagagucac

SEQ ID NO: 322650 - RNA, 19 nt, Human
aaggaccgcaaaggcuguu

SEQ ID NO: 322651 - RNA, 19 nt, Human
aaggaccgcaaaggcuguu

SEQ ID NO: 322652 - RNA, 20 nt, Human
aaguuccuggacagcagcuc

SEQ ID NO: 322653 - RNA, 19 nt, Human
acacuguagaaaaugaaau

SEQ ID NO: 322654 - RNA, 21 nt, Human
acagcagcucgugacucaggu

SEQ ID NO: 322655 - RNA, 20 nt, Human
accacaacggugagaagaau

SEQ ID NO: 322656 - RNA, 20 nt, Human
acccaucccagccuccacuu

SEQ ID NO: 322657 - RNA, 18 nt, Human
acccuagaauaaugggac

SEQ ID NO: 322658 - RNA, 19 nt, Human
accuuuguccuccccagau

SEQ ID NO: 322659 - RNA, 21 nt, Human
acuccacuccaguucagacgg

SEQ ID NO: 322660 - RNA, 28 nt, Human
agaaaacaaagccucuugagguucuuuc

SEQ ID NO: 322661 - RNA, 21 nt, Human
agaaaacaagcccaaagguga

SEQ ID NO: 322662 - RNA, 23 nt, Human
agagggugcggacuucgcccaga

SEQ ID NO: 322663 - RNA, 26 nt, Human
agcuggcaaugcuuucuugaaaaugg

SEQ ID NO: 322664 - RNA, 22 nt, Human
aggaagacuuggaaggaagcug

SEQ ID NO: 322665 - RNA, 23 nt, Human
aggacagaggaggcaucuggggc

SEQ ID NO: 322666 - RNA, 25 nt, Human
aggggaaaacaagucucauuuaaaa

SEQ ID NO: 322667 - RNA, 19 nt, Human
aggugauggagauuggaag

SEQ ID NO: 322668 - RNA, 23 nt, Human
aggugauggagauuggaagagcu

SEQ ID NO: 322669 - RNA, 24 nt, Human
aguagaaaacaagcccaaagguga

SEQ ID NO: 322670 - RNA, 19 nt, Human
aguuccuggacagcagcuc

SEQ ID NO: 322671 - RNA, 21 nt, Human
auagugcaagguggucaggaa

SEQ ID NO: 322672 - RNA, 20 nt, Human
auucugcugcuggugccugc

SEQ ID NO: 322673 - RNA, 18 nt, Human
caaaguagaaaacaagcc

SEQ ID NO: 322674 - RNA, 20 nt, Human
caagcagacccagcccaaga

SEQ ID NO: 322675 - RNA, 21 nt, Human
caagcccaaaggugauggaga

SEQ ID NO: 322676 - RNA, 24 nt, Human
caaggcaccugcgcccugagacgu

SEQ ID NO: 322677 - RNA, 23 nt, Human
cacccggggcgugaggcgcggag

SEQ ID NO: 322678 - RNA, 24 nt, Human
caccucuccauuccccauucugcu

SEQ ID NO: 322679 - RNA, 22 nt, Human
caccuuuguccuccccagauuu

SEQ ID NO: 322680 - RNA, 18 nt, Human
cagaaugcucgucgcccc

SEQ ID NO: 322681 - RNA, 18 nt, Human
cagacccagcccaagacg

SEQ ID NO: 322682 - RNA, 24 nt, Human
cagacggcuacuaaucccggccca

SEQ ID NO: 322683 - RNA, 19 nt, Human
cagcaaaaaaucaaaggga

SEQ ID NO: 322684 - RNA, 23 nt, Human
caguaccuccugaaaaguucaga

SEQ ID NO: 322685 - RNA, 21 nt, Human
cauaaaaggcuguacaagaua

SEQ ID NO: 322686 - RNA, 24 nt, Human
ccauuuuacucuucuuuaauucua

SEQ ID NO: 322687 - RNA, 18 nt, Human
ccccgccgccccgcugcc

SEQ ID NO: 322688 - RNA, 21 nt, Human
ccccgcugccgccgcggcucg

SEQ ID NO: 322689 - RNA, 18 nt, Human
ccccugcccaccucucca

SEQ ID NO: 322690 - RNA, 22 nt, Human
ccccugcccaccucuccauucc

SEQ ID NO: 322691 - RNA, 19 nt, Human
cccggcccaaggcaccugc

SEQ ID NO: 322692 - RNA, 19 nt, Human
cccuagaauaagugggacc

SEQ ID NO: 322693 - RNA, 18 nt, Human
cccuagaauaaugggacc

SEQ ID NO: 322694 - RNA, 22 nt, Human
cccugcccaccucuccauuccc

SEQ ID NO: 322695 - RNA, 21 nt, Human
ccgccccgcugccgccgcggc

SEQ ID NO: 322696 - RNA, 20 nt, Human
ccgccgccccgcugccgccg

SEQ ID NO: 322697 - RNA, 19 nt, Human
ccgccgcggcucguagcuc

SEQ ID NO: 322698 - RNA, 18 nt, Human
ccgcugccgccgcggcuc

SEQ ID NO: 322699 - RNA, 19 nt, Human
ccgcugccgccgcggcucg

SEQ ID NO: 322700 - RNA, 25 nt, Human
ccuccacuauggauuaauaugccua

SEQ ID NO: 322701 - RNA, 24 nt, Human
ccugugaccacgcgucaagcugcu

SEQ ID NO: 322702 - RNA, 24 nt, Human
ccugugaccacgcgucaagcugcu

SEQ ID NO: 322703 - RNA, 22 nt, Human
cgccccuggacaaggacacacu

SEQ ID NO: 322704 - RNA, 23 nt, Human
cgcuuccucuuucuccuacucca

SEQ ID NO: 322705 - RNA, 21 nt, Human
cuacuccacuccaguucagac

SEQ ID NO: 322706 - RNA, 21 nt, Human
cucguagcucagguuccuucc

SEQ ID NO: 322707 - RNA, 21 nt, Human
cugcaaaaguccagccgggaa

SEQ ID NO: 322708 - RNA, 21 nt, Human
cuggccuugggaagaaauggc

SEQ ID NO: 322709 - RNA, 21 nt, Human
cuggccuugggaagaaauggc

SEQ ID NO: 322710 - RNA, 24 nt, Human
cuugaccucgucccucaaaucugg

SEQ ID NO: 322711 - RNA, 24 nt, Human
cuugaccucgucccucaaaucugg

SEQ ID NO: 322712 - RNA, 19 nt, Human
cuugacucaaagagagggg

SEQ ID NO: 322713 - RNA, 27 nt, Human
gaaaacaaagccucuugagguucuuuc

SEQ ID NO: 322714 - RNA, 23 nt, Human
gaaggaagcugcaaaaguccagc

SEQ ID NO: 322715 - RNA, 21 nt, Human
gacagaggaggcaucuggggc

SEQ ID NO: 322716 - RNA, 24 nt, Human
gcaaaguagaaaacaagcccaaag

SEQ ID NO: 322717 - RNA, 18 nt, Human
gcacaaaccaauuaauau

SEQ ID NO: 322718 - RNA, 21 nt, Human
gcagggcugacagcaccgauu

SEQ ID NO: 322719 - RNA, 23 nt, Human
gcccaaaggugauggagauugga

SEQ ID NO: 322720 - RNA, 21 nt, Human
gcugcuggugccugcucuucc

SEQ ID NO: 322721 - RNA, 18 nt, Human
gcuguagaaaaagacugc

SEQ ID NO: 322722 - RNA, 20 nt, Human
ggcacagcaacuuccgggcc

SEQ ID NO: 322723 - RNA, 23 nt, Human
ggggcacagcaacuuccgggccu

SEQ ID NO: 322724 - RNA, 22 nt, Human
ggugagaagaaucugagaggga

SEQ ID NO: 322725 - RNA, 23 nt, Human
gugaaaucguccugugaccacgc

SEQ ID NO: 322726 - RNA, 23 nt, Human
gugaaaucguccugugaccacgc

SEQ ID NO: 322727 - RNA, 20 nt, Human
guggucaggaagacuuggaa

SEQ ID NO: 322728 - RNA, 22 nt, Human
uaaaaaggaugagucugcagca

SEQ ID NO: 322729 - RNA, 24 nt, Human
uaaggcacaaaccaauuaauaugg

SEQ ID NO: 322730 - RNA, 21 nt, Human
uaaugagugucagugcuugag

SEQ ID NO: 322731 - RNA, 21 nt, Human
uaaugagugucagugcuugag

SEQ ID NO: 322732 - RNA, 22 nt, Human
uaccuccugaaaaguucagaau

SEQ ID NO: 322733 - RNA, 19 nt, Human
uacgcuuccccgccgcccc

SEQ ID NO: 322734 - RNA, 22 nt, Human
uacuccccuuuccucugggucu

SEQ ID NO: 322735 - RNA, 19 nt, Human
uacugaauuuggaaccuga

SEQ ID NO: 322736 - RNA, 19 nt, Human
uacugaauuuggaaccuga

SEQ ID NO: 322737 - RNA, 24 nt, Human
uauaggcaccuccuuccaaagucc

SEQ ID NO: 322738 - RNA, 20 nt, Human
ucagugcuugagaagaagaa

SEQ ID NO: 322739 - RNA, 20 nt, Human
ucagugcuugagaagaagaa

SEQ ID NO: 322740 - RNA, 25 nt, Human
uccaaaauuuacugaauuuggaacc

SEQ ID NO: 322741 - RNA, 26 nt, Human
uccaaaauuuacugaauuuggaaccu

SEQ ID NO: 322742 - RNA, 21 nt, Human
ucccagccuccacuauggauu

SEQ ID NO: 322743 - RNA, 22 nt, Human
ucgcccagaaugcucgucgccc

SEQ ID NO: 322744 - RNA, 19 nt, Human
ucgugacucagguguagag

SEQ ID NO: 322745 - RNA, 24 nt, Human
ucuacauauuugacuugacucaaa

SEQ ID NO: 322746 - RNA, 19 nt, Human
ucuauaggcaccuccuucc

SEQ ID NO: 322747 - RNA, 22 nt, Human
ucuauaggcaccuccuuccaaa

SEQ ID NO: 322748 - RNA, 21 nt, Human
ucucacccaucccagccucca

SEQ ID NO: 322749 - RNA, 18 nt, Human
ucuccuccaggccaagcu

SEQ ID NO: 322750 - RNA, 18 nt, Human
ucuccuccaggccaagcu

SEQ ID NO: 322751 - RNA, 22 nt, Human
ucugaauuauggaaaagucacc

SEQ ID NO: 322752 - RNA, 22 nt, Human
ucugagagggaagcagcagcaa

SEQ ID NO: 322753 - RNA, 28 nt, Human
ucuguggcaaaguagaaaaccggggucc

SEQ ID NO: 322754 - RNA, 24 nt, Human
ucuuucuuucauguguucuccucc

SEQ ID NO: 322755 - RNA, 24 nt, Human
ucuuucuuucauguguucuccucc

SEQ ID NO: 322756 - RNA, 23 nt, Human
ugaaaucucccaauccaaguuuu

SEQ ID NO: 322757 - RNA, 21 nt, Human
ugaauuauggaaaagucaccu

SEQ ID NO: 322758 - RNA, 21 nt, Human
ugacucaaagagaggggaaaa

SEQ ID NO: 322759 - RNA, 19 nt, Human
ugacucagguguagagcga

SEQ ID NO: 322760 - RNA, 20 nt, Human
ugagaagaaucugagaggga

SEQ ID NO: 322761 - RNA, 18 nt, Human
ugagagggaagcagcagc

SEQ ID NO: 322762 - RNA, 18 nt, Human
ugccucgagacagcccga

SEQ ID NO: 322763 - RNA, 21 nt, Human
ugcugcuggugccugcucuuc

SEQ ID NO: 322764 - RNA, 22 nt, Human
ugcuggugccugcucuuccuca

SEQ ID NO: 322765 - RNA, 20 nt, Human
uggaaaauccaaauuugacu

SEQ ID NO: 322766 - RNA, 20 nt, Human
uggaaaauccaaauuugacu

SEQ ID NO: 322767 - RNA, 20 nt, Human
uggaaaguuccuggacagca

SEQ ID NO: 322768 - RNA, 22 nt, Human
uggagcaacuguauagaaauac

SEQ ID NO: 322769 - RNA, 22 nt, Human
uggagcaacuguauagaaauac

SEQ ID NO: 322770 - RNA, 18 nt, Human
ugggaagaaauggcaauc

SEQ ID NO: 322771 - RNA, 18 nt, Human
ugggaagaaauggcaauc

SEQ ID NO: 322772 - RNA, 18 nt, Human
ugggaccaucugcuacca

SEQ ID NO: 322773 - RNA, 18 nt, Human
ugggaccaucugcuacca

SEQ ID NO: 322774 - RNA, 22 nt, Human
ugucagugcuugagaagaagaa

SEQ ID NO: 322775 - RNA, 22 nt, Human
ugucagugcuugagaagaagaa

SEQ ID NO: 322776 - RNA, 21 nt, Human
ugugugggagagaagaaugag

SEQ ID NO: 322777 - RNA, 21 nt, Human
ugugugggagagaagaaugag

SEQ ID NO: 322778 - RNA, 26 nt, Human
uuaauucuaccgcuuugggcauacau

SEQ ID NO: 322779 - RNA, 26 nt, Human
uuagguauacgcuuccccgccgcccc

SEQ ID NO: 322780 - RNA, 24 nt, Human
uuauuggguugauuuucaacgugu

SEQ ID NO: 322781 - RNA, 22 nt, Human
uucagaauucaguuaauacaga

SEQ ID NO: 322782 - RNA, 20 nt, Human
uucuauaggcaccuccuucc

SEQ ID NO: 322783 - RNA, 19 nt, Human
uucuccuacuccacuccag

SEQ ID NO: 322784 - RNA, 21 nt, Human
uucugcugcuggugccugcuc

SEQ ID NO: 322785 - RNA, 23 nt, Human
uugagaagaagaauugccaaagg

SEQ ID NO: 322786 - RNA, 23 nt, Human
uugagaagaagaauugccaaagg

SEQ ID NO: 322787 - RNA, 19 nt, Human
uugguccauaaaaggcugu

SEQ ID NO: 322788 - RNA, 23 nt, Human
uuuccaaaauuuacugaauuugg

SEQ ID NO: 322789 - RNA, 23 nt, Human
uuuccaaaauuuacugaauuugg

SEQ ID NO: 322790 - RNA, 23 nt, Human
uuucuauaggcaccuccuuccaa

SEQ ID NO: 322791 - RNA, 22 nt, Human
aagcaccacgaacacuuggggc

SEQ ID NO: 322792 - RNA, 18 nt, Human
agcucccucacaucacuc

SEQ ID NO: 322793 - RNA, 24 nt, Human
aggaaagaaaagucuuaaaaauau

SEQ ID NO: 322794 - RNA, 18 nt, Human
agggaacuggcuuuuccu

SEQ ID NO: 322795 - RNA, 18 nt, Human
auccaaugaaaauucccu

SEQ ID NO: 322796 - RNA, 21 nt, Human
augaaacagcuggcaccaaag

SEQ ID NO: 322797 - RNA, 20 nt, Human
augccugcuccgccgccgcu

SEQ ID NO: 322798 - RNA, 20 nt, Human
auuacuauuaagccacuucc

SEQ ID NO: 322799 - RNA, 21 nt, Human
auuacuauuaagccacuuccc

SEQ ID NO: 322800 - RNA, 22 nt, Human
caaagcauugggaacacuccuc

SEQ ID NO: 322801 - RNA, 23 nt, Human
caagaacaggacucaguuucuaa

SEQ ID NO: 322802 - RNA, 18 nt, Human
cacugcuggaaaugccug

SEQ ID NO: 322803 - RNA, 18 nt, Human
cagagaggucugaauccc

SEQ ID NO: 322804 - RNA, 24 nt, Human
caguucaucuggauaaaccugcug

SEQ ID NO: 322805 - RNA, 19 nt, Human
ccaaagagcugguucugcc

SEQ ID NO: 322806 - RNA, 21 nt, Human
cccaaagcgggagccaaaguc

SEQ ID NO: 322807 - RNA, 22 nt, Human
ccuccuccucaccaaguaaaca

SEQ ID NO: 322808 - RNA, 22 nt, Human
ccugcugugcuuccuguccgug

SEQ ID NO: 322809 - RNA, 22 nt, Human
cucaguucaucuggauaaaccu

SEQ ID NO: 322810 - RNA, 22 nt, Human
cuggcaccaaagagcugguucu

SEQ ID NO: 322811 - RNA, 18 nt, Human
cuggcuuucaaagagggc

SEQ ID NO: 322812 - RNA, 23 nt, Human
cuggugaugaaacagcuggcacc

SEQ ID NO: 322813 - RNA, 24 nt, Human
cuggugaugaaacagcuggcaccu

SEQ ID NO: 322814 - RNA, 23 nt, Human
cuugguuucuucuucucagcagg

SEQ ID NO: 322815 - RNA, 24 nt, Human
gccuccuccucaccaaguaaacac

SEQ ID NO: 322816 - RNA, 23 nt, Human
gcgcugguuuuuaacacgucacu

SEQ ID NO: 322817 - RNA, 22 nt, Human
gcucuguggccucaguuucuuc

SEQ ID NO: 322818 - RNA, 18 nt, Human
ggacuagcuucugucuca

SEQ ID NO: 322819 - RNA, 22 nt, Human
ggauaaaccugcugugcuuccu

SEQ ID NO: 322820 - RNA, 28 nt, Human
guaaaacuauacaacugcauccaaugaa

SEQ ID NO: 322821 - RNA, 23 nt, Human
uaaggaaagaaaagucuuaaaaa

SEQ ID NO: 322822 - RNA, 22 nt, Human
uccagccagagcacccaggugc

SEQ ID NO: 322823 - RNA, 19 nt, Human
ucccugcagcuugcagccu

SEQ ID NO: 322824 - RNA, 21 nt, Human
ucccuggcuuucaaagagggc

SEQ ID NO: 322825 - RNA, 23 nt, Human
uccugacgucugagaagucccac

SEQ ID NO: 322826 - RNA, 19 nt, Human
ucucagcccucaugccgga

SEQ ID NO: 322827 - RNA, 22 nt, Human
ucugaccuucucaguucaucug

SEQ ID NO: 322828 - RNA, 25 nt, Human
ucugaccuucucaguucaucuggau

SEQ ID NO: 322829 - RNA, 22 nt, Human
ugaaacagcuggcaccaaagag

SEQ ID NO: 322830 - RNA, 25 nt, Human
ugcauccaaugaaaauucccugcag

SEQ ID NO: 322831 - RNA, 18 nt, Human
ugccugcuccgccgccgc

SEQ ID NO: 322832 - RNA, 23 nt, Human
uggauaaaccugcugugcuuccu

SEQ ID NO: 322833 - RNA, 21 nt, Human
uggcaccaaagagcugguucu

SEQ ID NO: 322834 - RNA, 23 nt, Human
ugggcgaccuugggaaaagucac

SEQ ID NO: 322835 - RNA, 29 nt, Human
uguaaaacuauacaacugcauccaaugaa

SEQ ID NO: 322836 - RNA, 21 nt, Human
uuaacacgucacuuucuaugg

SEQ ID NO: 322837 - RNA, 27 nt, Human
uuagcucuguggccucaguuucuuccc

SEQ ID NO: 322838 - RNA, 19 nt, Human
uucccugcagcuugcagcc

SEQ ID NO: 322839 - RNA, 19 nt, Human
uuccuucagcuccaauagc

SEQ ID NO: 322840 - RNA, 21 nt, Human
uuccuucagcuccaauagcuu

SEQ ID NO: 322841 - RNA, 19 nt, Human
uucuauggucacacagcuc

SEQ ID NO: 322842 - RNA, 20 nt, Human
uucuauggucacacagcucc

SEQ ID NO: 322843 - RNA, 24 nt, Human
uucuucaucaguaaaauucagagg

SEQ ID NO: 322844 - RNA, 19 nt, Human
uucuucucagcaggcuaaa

SEQ ID NO: 322845 - RNA, 18 nt, Human
uuuuuuaaggaaagaaaa

SEQ ID NO: 322846 - RNA, 24 nt, Human
aaaucauaaaaacauuaucuucau

SEQ ID NO: 322847 - RNA, 24 nt, Human
aagaaucagcaaauuuucaaauaa

SEQ ID NO: 322848 - RNA, 21 nt, Human
aauacaauuguuuuccugacu

SEQ ID NO: 322849 - RNA, 26 nt, Human
augaaaucaauguucuuccugcuugg

SEQ ID NO: 322850 - RNA, 19 nt, Human
caaugauuucaaauguguc

SEQ ID NO: 322851 - RNA, 23 nt, Human
caauucucaugaauaguugccca

SEQ ID NO: 322852 - RNA, 19 nt, Human
caucaauguagaaaacaaa

SEQ ID NO: 322853 - RNA, 24 nt, Human
cauguaggcugucuucuaaaauuu

SEQ ID NO: 322854 - RNA, 21 nt, Human
ccucuucccagggcaggagcu

SEQ ID NO: 322855 - RNA, 18 nt, Human
ccugcuuggucuaggcug

SEQ ID NO: 322856 - RNA, 21 nt, Human
cugaaugccagauagacucca

SEQ ID NO: 322857 - RNA, 18 nt, Human
cugcuuguguguucuccu

SEQ ID NO: 322858 - RNA, 19 nt, Human
gcugucagcugugcugucc

SEQ ID NO: 322859 - RNA, 19 nt, Human
ggcagucagguagaaagca

SEQ ID NO: 322860 - RNA, 18 nt, Human
guagaaagcaaaaguaaa

SEQ ID NO: 322861 - RNA, 19 nt, Human
gucuucuaaaauuuucuuu

SEQ ID NO: 322862 - RNA, 22 nt, Human
gugcugagccucuucccagggc

SEQ ID NO: 322863 - RNA, 26 nt, Human
uaaagaaucagcaaauuuucaaauaa

SEQ ID NO: 322864 - RNA, 19 nt, Human
uacaaagaaagcagauugu

SEQ ID NO: 322865 - RNA, 25 nt, Human
ucuaaaauuuucuuuucucuaaguu

SEQ ID NO: 322866 - RNA, 23 nt, Human
ucucaugaauaguugcccaauuc

SEQ ID NO: 322867 - RNA, 24 nt, Human
ucuuccugcuuggucuaggcuggg

SEQ ID NO: 322868 - RNA, 20 nt, Human
ugaacugcuauaagcuguag

SEQ ID NO: 322869 - RNA, 24 nt, Human
ugagauuaaaucuucacaaaccuc

SEQ ID NO: 322870 - RNA, 19 nt, Human
ugcugagccucuucccagg

SEQ ID NO: 322871 - RNA, 18 nt, Human
ugcuuguguguucuccuc

SEQ ID NO: 322872 - RNA, 18 nt, Human
uggaguuucuucaaaugu

SEQ ID NO: 322873 - RNA, 22 nt, Human
uggaguuucuucaaaugugguc

SEQ ID NO: 322874 - RNA, 18 nt, Human
uguguguucuccucugug

SEQ ID NO: 322875 - RNA, 19 nt, Human
uucacaaaccucuugagaa

SEQ ID NO: 322876 - RNA, 23 nt, Human
uucaggaggagaauuugggauuu

SEQ ID NO: 322877 - RNA, 26 nt, Human
uucaggaggagaauuugggauuugcu

SEQ ID NO: 322878 - RNA, 18 nt, Human
uucauucuaucuauguuu

SEQ ID NO: 322879 - RNA, 25 nt, Human
uuuuuuuuuuuuuuuuuuuuuuagg

SEQ ID NO: 322880 - RNA, 23 nt, Human
aagaaaaaaauucauaaaucugg

SEQ ID NO: 322881 - RNA, 24 nt, Human
acuuuaccaauugcugaagaaaaa

SEQ ID NO: 322882 - RNA, 23 nt, Human
agaguccuuuucauagucuuuuc

SEQ ID NO: 322883 - RNA, 21 nt, Human
cagaagcuuccagagcacggc

SEQ ID NO: 322884 - RNA, 18 nt, Human
caugaagguaucagccug

SEQ ID NO: 322885 - RNA, 21 nt, Human
ccagaagcuuccagagcacgg

SEQ ID NO: 322886 - RNA, 18 nt, Human
cgugcauguucuccucug

SEQ ID NO: 322887 - RNA, 20 nt, Human
cugcgugcauguucuccucu

SEQ ID NO: 322888 - RNA, 22 nt, Human
cugugcuguccuuccuccugca

SEQ ID NO: 322889 - RNA, 24 nt, Human
gaaaaaaauucauaaaucuggagg

SEQ ID NO: 322890 - RNA, 18 nt, Human
ggaguucuuuucuucuuu

SEQ ID NO: 322891 - RNA, 21 nt, Human
gugcauguucuccucugugga

SEQ ID NO: 322892 - RNA, 24 nt, Human
uauuuaguccaaugaaauggaguu

SEQ ID NO: 322893 - RNA, 25 nt, Human
ugaagaaaaaaauucauaaaucugg

SEQ ID NO: 322894 - RNA, 21 nt, Human
ugcgugcauguucuccucugu

SEQ ID NO: 322895 - RNA, 23 nt, Human
ugcgugcauguucuccucugugg

SEQ ID NO: 322896 - RNA, 22 nt, Human
ugugcuguccuuccuccugcaa

SEQ ID NO: 322897 - RNA, 26 nt, Human
uucauagucuuuuccauaaaucuccu

SEQ ID NO: 322898 - RNA, 22 nt, Human
uuuuccauaaaucuccugccag

SEQ ID NO: 322899 - RNA, 18 nt, Human
uuuucuucuuugucuuga

SEQ ID NO: 322900 - RNA, 20 nt, Human
uuuuguuuacaaaaguauac

SEQ ID NO: 322901 - RNA, 21 nt, Human
aaaauguucauaaaucuggag

SEQ ID NO: 322902 - RNA, 18 nt, Human
caugaagguaucagccug

SEQ ID NO: 322903 - RNA, 22 nt, Human
cucaagaaaaaauguucauaaa

SEQ ID NO: 322904 - RNA, 21 nt, Human
cucagauagagagcaaaagga

SEQ ID NO: 322905 - RNA, 18 nt, Human
cugccuguguguucuccu

SEQ ID NO: 322906 - RNA, 22 nt, Human
cuuuccauaaaucuccugccag

SEQ ID NO: 322907 - RNA, 23 nt, Human
uauuuaguccaauaacauugagu

SEQ ID NO: 322908 - RNA, 18 nt, Human
uccugagcacggcuguca

SEQ ID NO: 322909 - RNA, 18 nt, Human
ucucugcugccugugugu

SEQ ID NO: 322910 - RNA, 25 nt, Human
ugaaacauuccaagaaucagcacau

SEQ ID NO: 322911 - RNA, 20 nt, Human
ugaaauacagaaaugacauc

SEQ ID NO: 322912 - RNA, 18 nt, Human
ugccuguguguucuccuc

SEQ ID NO: 322913 - RNA, 19 nt, Human
uggggcacucagauagaga

SEQ ID NO: 322914 - RNA, 18 nt, Human
uguguguucuccucugug

SEQ ID NO: 322915 - RNA, 18 nt, Human
uuuucuucuuugucuuga

SEQ ID NO: 322916 - RNA, 20 nt, Human
uuuuguuuacaaaaguauac

SEQ ID NO: 322917 - RNA, 24 nt, Human
aagaaaaaaagugcauaaaucugg

SEQ ID NO: 322918 - RNA, 24 nt, Human
acuuuaccaauugcugaagaaaaa

SEQ ID NO: 322919 - RNA, 23 nt, Human
agaguccuugucagagucuuuuc

SEQ ID NO: 322920 - RNA, 23 nt, Human
agagucuuuucauaaaucuccuu

SEQ ID NO: 322921 - RNA, 24 nt, Human
agcugagccuaggauccagaaacu

SEQ ID NO: 322922 - RNA, 24 nt, Human
aggaagaaugaaagcaacugucug

SEQ ID NO: 322923 - RNA, 18 nt, Human
agugguaugaucuugaag

SEQ ID NO: 322924 - RNA, 19 nt, Human
ccucuguggagcugagccu

SEQ ID NO: 322925 - RNA, 22 nt, Human
cuccugaauaguuucccaauuc

SEQ ID NO: 322926 - RNA, 24 nt, Human
cuccugaauaguuucccaauucug

SEQ ID NO: 322927 - RNA, 18 nt, Human
cugccugcguguucuccu

SEQ ID NO: 322928 - RNA, 23 nt, Human
uaccauaaacauaugaauacucc

SEQ ID NO: 322929 - RNA, 24 nt, Human
uauuuaguccaauaaaauuggguu

SEQ ID NO: 322930 - RNA, 24 nt, Human
ucagagucuuuucauaaaucuccu

SEQ ID NO: 322931 - RNA, 20 nt, Human
uccucuguggagcugagccu

SEQ ID NO: 322932 - RNA, 21 nt, Human
uccugaauaguuucccaauuc

SEQ ID NO: 322933 - RNA, 21 nt, Human
ucuccuugaacaaaaagcaau

SEQ ID NO: 322934 - RNA, 20 nt, Human
ugaaauacagaaaugacauc

SEQ ID NO: 322935 - RNA, 21 nt, Human
ugaacaaaaagcaauuuugga

SEQ ID NO: 322936 - RNA, 19 nt, Human
ugaaguaucagccuguuca

SEQ ID NO: 322937 - RNA, 18 nt, Human
ugccugcguguucuccuc

SEQ ID NO: 322938 - RNA, 20 nt, Human
uuuuguuuacaaaaguauac

SEQ ID NO: 322939 - RNA, 24 nt, Human
aaaccaucuucucugcaaacacac

SEQ ID NO: 322940 - RNA, 18 nt, Human
aggaaauggugagagcca

SEQ ID NO: 322941 - RNA, 26 nt, Human
auagaaaccaucuucucugcaaacac

SEQ ID NO: 322942 - RNA, 21 nt, Human
aucucuguguucauuucuauu

SEQ ID NO: 322943 - RNA, 22 nt, Human
caaggguuuucccaugaaauuu

SEQ ID NO: 322944 - RNA, 21 nt, Human
caccuccagcuuauagggcuu

SEQ ID NO: 322945 - RNA, 20 nt, Human
ccacacaaugugcauuuaaa

SEQ ID NO: 322946 - RNA, 18 nt, Human
cugcauuauccugccaag

SEQ ID NO: 322947 - RNA, 19 nt, Human
cugcauuauccugccaagu

SEQ ID NO: 322948 - RNA, 18 nt, Human
cugcuuguguguucuccu

SEQ ID NO: 322949 - RNA, 18 nt, Human
gaauuggaggaacuagua

SEQ ID NO: 322950 - RNA, 22 nt, Human
ggucuugcucuucgugauucca

SEQ ID NO: 322951 - RNA, 19 nt, Human
ggugaguucugaguggcuc

SEQ ID NO: 322952 - RNA, 22 nt, Human
guuuuacacuguaucucuuagg

SEQ ID NO: 322953 - RNA, 22 nt, Human
uacuacaugugaaauucuaaug

SEQ ID NO: 322954 - RNA, 20 nt, Human
uaggaaauggugagagccau

SEQ ID NO: 322955 - RNA, 22 nt, Human
uauagggcuucuggaacagagu

SEQ ID NO: 322956 - RNA, 23 nt, Human
ucaacuucuuauccugguuuaca

SEQ ID NO: 322957 - RNA, 20 nt, Human
uccaugggagaaaauggaau

SEQ ID NO: 322958 - RNA, 24 nt, Human
uccccugagauguuacguaaaagu

SEQ ID NO: 322959 - RNA, 23 nt, Human
ucuaaugacugcauuauccugcc

SEQ ID NO: 322960 - RNA, 24 nt, Human
ucuacuauaauuucagcuuuccua

SEQ ID NO: 322961 - RNA, 22 nt, Human
ucucuuaggaaauggugagagc

SEQ ID NO: 322962 - RNA, 23 nt, Human
ugagauguuacguaaaaguuuga

SEQ ID NO: 322963 - RNA, 20 nt, Human
ugcaagauggagagagccac

SEQ ID NO: 322964 - RNA, 19 nt, Human
ugccaagugaaagaggcag

SEQ ID NO: 322965 - RNA, 18 nt, Human
ugcuuguguguucuccuc

SEQ ID NO: 322966 - RNA, 20 nt, Human
ugggagcccuguaugcaaga

SEQ ID NO: 322967 - RNA, 19 nt, Human
ugggucuugcucuucguga

SEQ ID NO: 322968 - RNA, 21 nt, Human
uuggaaaaacuguccacagug

SEQ ID NO: 322969 - RNA, 24 nt, Human
aagaaaaaaaguucauaaaucugg

SEQ ID NO: 322970 - RNA, 24 nt, Human
aagaaaaagcaauuuuggacugua

SEQ ID NO: 322971 - RNA, 24 nt, Human
agaaucaaagcaacugucugccag

SEQ ID NO: 322972 - RNA, 23 nt, Human
agaguccuugucagagucuuuuc

SEQ ID NO: 322973 - RNA, 24 nt, Human
agagucuuuuccauaaaucuccuu

SEQ ID NO: 322974 - RNA, 24 nt, Human
agcugagccuaggauccagaaacu

SEQ ID NO: 322975 - RNA, 19 nt, Human
aggaagaaucaaagcaacu

SEQ ID NO: 322976 - RNA, 18 nt, Human
agugguaugaucuugaag

SEQ ID NO: 322977 - RNA, 18 nt, Human
caugaagguaucagccug

SEQ ID NO: 322978 - RNA, 22 nt, Human
ccaauaacauggaguuuuuuuc

SEQ ID NO: 322979 - RNA, 19 nt, Human
ccucuguggagcugagccu

SEQ ID NO: 322980 - RNA, 22 nt, Human
cucaagaaaaaaaguucauaaa

SEQ ID NO: 322981 - RNA, 20 nt, Human
cuccuugaagaaaaagcaau

SEQ ID NO: 322982 - RNA, 23 nt, Human
cucugcgccugcguguucuccuc

SEQ ID NO: 322983 - RNA, 21 nt, Human
gagcacggcuguaggcugugc

SEQ ID NO: 322984 - RNA, 19 nt, Human
gcuguaggcugugcugucc

SEQ ID NO: 322985 - RNA, 21 nt, Human
ggugauuguaaguaguuugag

SEQ ID NO: 322986 - RNA, 22 nt, Human
uaugaaaacauuaugcuuuuga

SEQ ID NO: 322987 - RNA, 24 nt, Human
uauuuaguccaauaacauggaguu

SEQ ID NO: 322988 - RNA, 25 nt, Human
ucagagucuuuuccauaaaucuccu

SEQ ID NO: 322989 - RNA, 20 nt, Human
uccucuguggagcugagccu

SEQ ID NO: 322990 - RNA, 19 nt, Human
uggggcacucagauagaga

SEQ ID NO: 322991 - RNA, 21 nt, Human
ugucuagaauuucaugaaggu

SEQ ID NO: 322992 - RNA, 23 nt, Human
uuuuccauaaaucuccuugaaga

SEQ ID NO: 322993 - RNA, 20 nt, Human
uuuuguuuacaaaaguauac

SEQ ID NO: 322994 - RNA, 18 nt, Human
uuuuuuuuuuuuuuuuug

SEQ ID NO: 322995 - RNA, 23 nt, Human
uuuuuuuuuuuuuuuuugaacuu

SEQ ID NO: 322996 - RNA, 23 nt, Human
cauguuuuaauccuagcacuuug

SEQ ID NO: 322997 - RNA, 18 nt, Human
cugucuguguguucuccc

SEQ ID NO: 322998 - RNA, 18 nt, Human
gugggucauguuuuaauc

SEQ ID NO: 322999 - RNA, 18 nt, Human
ucucugcugucugugugu

SEQ ID NO: 323000 - RNA, 18 nt, Human
ugucuguguguucucccc

SEQ ID NO: 323001 - RNA, 24 nt, Human
aaaccaucuucucugcaaacacac

SEQ ID NO: 323002 - RNA, 20 nt, Human
aacauuuuggugaguucuga

SEQ ID NO: 323003 - RNA, 18 nt, Human
aggaaauggugagagcca

SEQ ID NO: 323004 - RNA, 19 nt, Human
aggcaggcacaagcaagga

SEQ ID NO: 323005 - RNA, 26 nt, Human
auagaaaccaucuucucugcaaacac

SEQ ID NO: 323006 - RNA, 21 nt, Human
aucucuguguucauuucuauu

SEQ ID NO: 323007 - RNA, 23 nt, Human
cacauuuccuccugagauguuau

SEQ ID NO: 323008 - RNA, 19 nt, Human
caucuugggaaaaacuguc

SEQ ID NO: 323009 - RNA, 20 nt, Human
ccacacaaugugcauuuaaa

SEQ ID NO: 323010 - RNA, 18 nt, Human
ccuauacuacaugugaaa

SEQ ID NO: 323011 - RNA, 24 nt, Human
ccuccugagauguuauguaaaagu

SEQ ID NO: 323012 - RNA, 21 nt, Human
cuaagaggggugagagccuca

SEQ ID NO: 323013 - RNA, 18 nt, Human
cugcauuauccugccaag

SEQ ID NO: 323014 - RNA, 19 nt, Human
cugcauuauccugccaagu

SEQ ID NO: 323015 - RNA, 18 nt, Human
gaauuggaggaacuagua

SEQ ID NO: 323016 - RNA, 19 nt, Human
ggauuuucccaugaaauuu

SEQ ID NO: 323017 - RNA, 19 nt, Human
gggagaagauggaauugga

SEQ ID NO: 323018 - RNA, 22 nt, Human
ggucuugcucuuugagguucca

SEQ ID NO: 323019 - RNA, 19 nt, Human
ggugaguucugaguggcuc

SEQ ID NO: 323020 - RNA, 24 nt, Human
guuugagcagcuguuguuauggug

SEQ ID NO: 323021 - RNA, 23 nt, Human
uacaauguaucucuuaggaaaug

SEQ ID NO: 323022 - RNA, 22 nt, Human
uacuacaugugaaauucuaaug

SEQ ID NO: 323023 - RNA, 20 nt, Human
uaggaaauggugagagccau

SEQ ID NO: 323024 - RNA, 20 nt, Human
uagggcuucuggaacagagu

SEQ ID NO: 323025 - RNA, 23 nt, Human
ucuaaugacugcauuauccugcc

SEQ ID NO: 323026 - RNA, 24 nt, Human
ucuacuauaauuucagcuuuccua

SEQ ID NO: 323027 - RNA, 22 nt, Human
ucucuuaggaaauggugagagc

SEQ ID NO: 323028 - RNA, 21 nt, Human
ucugcucccugcguguucucc

SEQ ID NO: 323029 - RNA, 20 nt, Human
ugcaagauggagagagccac

SEQ ID NO: 323030 - RNA, 19 nt, Human
ugccaagugaaagaggcag

SEQ ID NO: 323031 - RNA, 21 nt, Human
ugggaaaaacuguccacagug

SEQ ID NO: 323032 - RNA, 21 nt, Human
ugggaaaaacuguccacagug

SEQ ID NO: 323033 - RNA, 22 nt, Human
ugggagaagauggaauuggagg

SEQ ID NO: 323034 - RNA, 20 nt, Human
ugggagcccuguaugcaaga

SEQ ID NO: 323035 - RNA, 26 nt, Human
ugggucuugcucuuugagguuccaug

SEQ ID NO: 323036 - RNA, 27 nt, Human
uguuuuauucugcuagaaucagucuua

SEQ ID NO: 323037 - RNA, 19 nt, Human
uucugaguggcucagacau

SEQ ID NO: 323038 - RNA, 26 nt, Human
uuuacaauguaucucuuaggaaaugg

SEQ ID NO: 323039 - RNA, 24 nt, Human
aagaaaaaaaguucauaaaucugg

SEQ ID NO: 323040 - RNA, 24 nt, Human
acuuuaccaauugcugaagaaaaa

SEQ ID NO: 323041 - RNA, 26 nt, Human
caaagaaucagcacauuuuccaauaa

SEQ ID NO: 323042 - RNA, 18 nt, Human
caugaagguaucagccug

SEQ ID NO: 323043 - RNA, 18 nt, Human
cugccuguguguucuccu

SEQ ID NO: 323044 - RNA, 19 nt, Human
gcugucagcugugcugucc

SEQ ID NO: 323045 - RNA, 24 nt, Human
uauuuaguccaauaacauugaguu

SEQ ID NO: 323046 - RNA, 20 nt, Human
ucagauagacagcaaaagca

SEQ ID NO: 323047 - RNA, 18 nt, Human
ucucugcugccugugugu

SEQ ID NO: 323048 - RNA, 23 nt, Human
ugaaaacauuauccuuuugauua

SEQ ID NO: 323049 - RNA, 20 nt, Human
ugaagaaaaaaaguucauaa

SEQ ID NO: 323050 - RNA, 20 nt, Human
ugaagguaucagccuguucu

SEQ ID NO: 323051 - RNA, 18 nt, Human
ugccuguguguucuccuc

SEQ ID NO: 323052 - RNA, 20 nt, Human
ugucugagcacggcugucag

SEQ ID NO: 323053 - RNA, 18 nt, Human
uguguguucuccucugug

SEQ ID NO: 323054 - RNA, 24 nt, Human
uugcugaagaaaaaaaguucauaa

SEQ ID NO: 323055 - RNA, 18 nt, Human
uuuucuucuuugucuuga

SEQ ID NO: 323056 - RNA, 23 nt, Human
uuuuucucagugucucaguuguu

SEQ ID NO: 323057 - RNA, 18 nt, Human
uuuuuuuuuuuuuuuuug

SEQ ID NO: 323058 - RNA, 19 nt, Human
acauagcauuccaccacuc

SEQ ID NO: 323059 - RNA, 23 nt, Human
caccuauguucuucauauaaaaa

SEQ ID NO: 323060 - RNA, 18 nt, Human
cagugagguugcuuggaa

SEQ ID NO: 323061 - RNA, 24 nt, Human
gaggugcugccgaaaguaucgcuc

SEQ ID NO: 323062 - RNA, 19 nt, Human
gguggcggcgcgggccugg

SEQ ID NO: 323063 - RNA, 24 nt, Human
guggugccuguauucuuacauauu

SEQ ID NO: 323064 - RNA, 21 nt, Human
uacagagaagucugcgggagu

SEQ ID NO: 323065 - RNA, 23 nt, Human
uagcauuccaccacucugcaacu

SEQ ID NO: 323066 - RNA, 22 nt, Human
ucaaaguauagauuauugucau

SEQ ID NO: 323067 - RNA, 21 nt, Human
uccaccacucugcaacuuuug

SEQ ID NO: 323068 - RNA, 26 nt, Human
uccaccacucugcaacuuuugguuca

SEQ ID NO: 323069 - RNA, 24 nt, Human
uccagcaaaacugagaaucaagga

SEQ ID NO: 323070 - RNA, 20 nt, Human
ucuacagagaagucugcggg

SEQ ID NO: 323071 - RNA, 22 nt, Human
ucuagaaaaugauuauacagac

SEQ ID NO: 323072 - RNA, 19 nt, Human
ucuggacugauuccuaaaa

SEQ ID NO: 323073 - RNA, 27 nt, Human
aaacaaaacauacuuuaaacauguuua

SEQ ID NO: 323074 - RNA, 27 nt, Human
auacuuuaaacauguuuaaguagauua

SEQ ID NO: 323075 - RNA, 23 nt, Human
cugcaaaacaaaacauacuuuaa

SEQ ID NO: 323076 - RNA, 21 nt, Human
ugcaaaaagucugcaaaacaa

SEQ ID NO: 323077 - RNA, 22 nt, Human
uuaaaaacagucgauuuaaacc

SEQ ID NO: 323078 - RNA, 21 nt, Human
uuuaaaccauguagaaauaag

SEQ ID NO: 323079 - RNA, 24 nt, Human
aguagaaauuuaaaauacaauaga

SEQ ID NO: 323080 - RNA, 22 nt, Human
aaggacauuauuagaacugaaa

SEQ ID NO: 323081 - RNA, 22 nt, Human
cauuuaaaaaaugcacauacaa

SEQ ID NO: 323082 - RNA, 22 nt, Human
ccagagaaguucugaggaucag

SEQ ID NO: 323083 - RNA, 20 nt, Human
ugcacauacaauggagauuu

SEQ ID NO: 323084 - RNA, 25 nt, Human
uuuaaaaaaugcacauacaauggag

SEQ ID NO: 323085 - RNA, 24 nt, Human
uuuuuuuuuuuuuuuuuuuauuuu

SEQ ID NO: 323086 - RNA, 19 nt, Human
aaacaaaaccauccaaggu

SEQ ID NO: 323087 - RNA, 20 nt, Human
aaaguacaaaaucaaccagg

SEQ ID NO: 323088 - RNA, 22 nt, Human
aacugauuggugauaagagcac

SEQ ID NO: 323089 - RNA, 19 nt, Human
acaaaaucaaccaggucug

SEQ ID NO: 323090 - RNA, 21 nt, Human
accauccaagguacaguucca

SEQ ID NO: 323091 - RNA, 20 nt, Human
caaaaccauccaagguacag

SEQ ID NO: 323092 - RNA, 19 nt, Human
caaaguacaaaaucaacca

SEQ ID NO: 323093 - RNA, 24 nt, Human
ccaagguacaguuccaaaguacaa

SEQ ID NO: 323094 - RNA, 19 nt, Human
ggugauaagagcacacaga

SEQ ID NO: 323095 - RNA, 21 nt, Human
uaaacaaaaccauccaaggua

SEQ ID NO: 323096 - RNA, 19 nt, Human
aggcagaggggauuagggg

SEQ ID NO: 323097 - RNA, 20 nt, Human
aggcagaggggauuaggggu

SEQ ID NO: 323098 - RNA, 20 nt, Human
cccuuguuccaagcucuaag

SEQ ID NO: 323099 - RNA, 21 nt, Human
gcaggcagaggggauuagggg

SEQ ID NO: 323100 - RNA, 20 nt, Human
ggcagaggggauuagggguc

SEQ ID NO: 323101 - RNA, 21 nt, Human
uguuccaagcucuaagccuca

SEQ ID NO: 323102 - RNA, 23 nt, Human
uucccccuuguuccaagcucuaa

SEQ ID NO: 323103 - RNA, 23 nt, Human
uuuguuuuuuuuuuuuuuaacug

SEQ ID NO: 323104 - RNA, 24 nt, Human
uuuuuuuuuuuuuuuuuuguuuuu

SEQ ID NO: 323105 - RNA, 23 nt, Human
uuuuuuuuuuuuuuuuuuuuggg

SEQ ID NO: 323106 - RNA, 25 nt, Human
aaaaaaauaaaggagcccaucaaaa

SEQ ID NO: 323107 - RNA, 19 nt, Human
aaaaagaucaucuucccuc

SEQ ID NO: 323108 - RNA, 24 nt, Human
aaagugcugggauuacaggcauga

SEQ ID NO: 323109 - RNA, 23 nt, Human
aagaaaagucagaccuggcaaaa

SEQ ID NO: 323110 - RNA, 22 nt, Human
aagcaggaagcagaugacugga

SEQ ID NO: 323111 - RNA, 24 nt, Human
aaguaguuggguuuacaggcgugu

SEQ ID NO: 323112 - RNA, 19 nt, Human
aagugcugggauuacaggc

SEQ ID NO: 323113 - RNA, 21 nt, Human
aagugcugggauuacaggcau

SEQ ID NO: 323114 - RNA, 26 nt, Human
aagugcugggauuacaggcaugagcc

SEQ ID NO: 323115 - RNA, 22 nt, Human
acagcacuccagccugggcuag

SEQ ID NO: 323116 - RNA, 24 nt, Human
acagcacuccagccugggcuagag

SEQ ID NO: 323117 - RNA, 20 nt, Human
acauggugagacccugucuc

SEQ ID NO: 323118 - RNA, 22 nt, Human
acauggugagacccugucucua

SEQ ID NO: 323119 - RNA, 24 nt, Human
accauguuggccaggcuggucuug

SEQ ID NO: 323120 - RNA, 24 nt, Human
accauguuggucaggauggucucg

SEQ ID NO: 323121 - RNA, 18 nt, Human
accuggaccagagggcuc

SEQ ID NO: 323122 - RNA, 22 nt, Human
acgccacagcacuccagccugg

SEQ ID NO: 323123 - RNA, 21 nt, Human
acgggguuucaccauguuggu

SEQ ID NO: 323124 - RNA, 23 nt, Human
acgggguuucaccauguugguca

SEQ ID NO: 323125 - RNA, 24 nt, Human
acgggguuucaccauguuggucag

SEQ ID NO: 323126 - RNA, 22 nt, Human
acuccagccugggcuagaguga

SEQ ID NO: 323127 - RNA, 24 nt, Human
acucuguugccaggcuggaguaca

SEQ ID NO: 323128 - RNA, 18 nt, Human
agacgggaggaucacuug

SEQ ID NO: 323129 - RNA, 24 nt, Human
agacgggaggaucacuugggcccg

SEQ ID NO: 323130 - RNA, 24 nt, Human
agcaggaagaaaagucagaccugg

SEQ ID NO: 323131 - RNA, 20 nt, Human
agccaccacacccagcucug

SEQ ID NO: 323132 - RNA, 24 nt, Human
agccaggcuggagugcaguggcau

SEQ ID NO: 323133 - RNA, 22 nt, Human
agcugaaguuuccuccaggaag

SEQ ID NO: 323134 - RNA, 21 nt, Human
aggaagggaagcaggaagcag

SEQ ID NO: 323135 - RNA, 24 nt, Human
aggcggagguugcagugagccaag

SEQ ID NO: 323136 - RNA, 24 nt, Human
aggcgugugccaccacgccuggcu

SEQ ID NO: 323137 - RNA, 24 nt, Human
aggcugagacgggaggaucacuug

SEQ ID NO: 323138 - RNA, 25 nt, Human
aggcuggagugcaguggcaugaucu

SEQ ID NO: 323139 - RNA, 20 nt, Human
aguacaguggcgcgaucuag

SEQ ID NO: 323140 - RNA, 22 nt, Human
aguagagaugggguuucaccau

SEQ ID NO: 323141 - RNA, 20 nt, Human
agugcaguggcaugaucucg

SEQ ID NO: 323142 - RNA, 23 nt, Human
agugcaguggcaugaucucggcu

SEQ ID NO: 323143 - RNA, 24 nt, Human
agugcaguggcaugaucucggcuc

SEQ ID NO: 323144 - RNA, 18 nt, Human
agugcugggauuacaggc

SEQ ID NO: 323145 - RNA, 24 nt, Human
aguggcaugaucucggcucacugc

SEQ ID NO: 323146 - RNA, 20 nt, Human
auauauuuuuuuaguagaga

SEQ ID NO: 323147 - RNA, 21 nt, Human
auauuuuuuuaguagagaugg

SEQ ID NO: 323148 - RNA, 18 nt, Human
augggguuucaccauguu

SEQ ID NO: 323149 - RNA, 22 nt, Human
augggguuucaccauguuggcc

SEQ ID NO: 323150 - RNA, 24 nt, Human
augggguuucaccauguuggccag

SEQ ID NO: 323151 - RNA, 24 nt, Human
auuacgccacagcacuccagccug

SEQ ID NO: 323152 - RNA, 20 nt, Human
caaaaaaaaguucccuggca

SEQ ID NO: 323153 - RNA, 24 nt, Human
caaaaagaaccacuacuuuagaga

SEQ ID NO: 323154 - RNA, 24 nt, Human
caaagugcugggauuacaggcaug

SEQ ID NO: 323155 - RNA, 22 nt, Human
caagcaauucuccugccucagc

SEQ ID NO: 323156 - RNA, 27 nt, Human
caagcaauucuccugccucagccuccc

SEQ ID NO: 323157 - RNA, 26 nt, Human
cacacccagcucuggaagaaauauuu

SEQ ID NO: 323158 - RNA, 22 nt, Human
cacagcacuccagccugggcua

SEQ ID NO: 323159 - RNA, 24 nt, Human
caccacgcccagcuaauuuuugua

SEQ ID NO: 323160 - RNA, 21 nt, Human
caccauguuggccaggcuggu

SEQ ID NO: 323161 - RNA, 22 nt, Human
caccauguuggccaggcugguc

SEQ ID NO: 323162 - RNA, 23 nt, Human
caccauguuggccaggcuggucu

SEQ ID NO: 323163 - RNA, 24 nt, Human
caccauguuggccaggcuggucuu

SEQ ID NO: 323164 - RNA, 18 nt, Human
caccauguuggucaggau

SEQ ID NO: 323165 - RNA, 24 nt, Human
caccauguuggucaggauggucuc

SEQ ID NO: 323166 - RNA, 20 nt, Human
cacuccagccugggcuagag

SEQ ID NO: 323167 - RNA, 20 nt, Human
cacuccagccugggcuagag

SEQ ID NO: 323168 - RNA, 22 nt, Human
cacuccagccugggcuagagug

SEQ ID NO: 323169 - RNA, 18 nt, Human
cacucuguugccaggcug

SEQ ID NO: 323170 - RNA, 23 nt, Human
cacugcaaccucccucucccggg

SEQ ID NO: 323171 - RNA, 21 nt, Human
cacugcaaccuccgccucccg

SEQ ID NO: 323172 - RNA, 23 nt, Human
cacugcaaccuccgccucccggg

SEQ ID NO: 323173 - RNA, 22 nt, Human
cagagacgggguuucaccaugu

SEQ ID NO: 323174 - RNA, 22 nt, Human
caguagcugggacuaggggugc

SEQ ID NO: 323175 - RNA, 22 nt, Human
cauguuacauuaagugcaugua

SEQ ID NO: 323176 - RNA, 24 nt, Human
cauguuggccaggcuggucuugaa

SEQ ID NO: 323177 - RNA, 23 nt, Human
ccaaagugcugggauuacaggca

SEQ ID NO: 323178 - RNA, 24 nt, Human
ccaaagugcugggauuacaggcau

SEQ ID NO: 323179 - RNA, 20 nt, Human
ccacagcacuccagccuggg

SEQ ID NO: 323180 - RNA, 21 nt, Human
ccacagcacuccagccugggc

SEQ ID NO: 323181 - RNA, 20 nt, Human
ccaccacgcccagcuaauuu

SEQ ID NO: 323182 - RNA, 24 nt, Human
cccaaagugcugggauuacaggca

SEQ ID NO: 323183 - RNA, 23 nt, Human
cccaaguaguuggguuuacaggc

SEQ ID NO: 323184 - RNA, 23 nt, Human
cccgggcucaagcaauucuccug

SEQ ID NO: 323185 - RNA, 24 nt, Human
ccgccucccggguucgaccgauuc

SEQ ID NO: 323186 - RNA, 24 nt, Human
ccucccggguucgaccgauucucc

SEQ ID NO: 323187 - RNA, 21 nt, Human
ccuguaaucccagcuacucag

SEQ ID NO: 323188 - RNA, 18 nt, Human
cgccucccggguucgacc

SEQ ID NO: 323189 - RNA, 24 nt, Human
cgccucggccucccaaagugcugg

SEQ ID NO: 323190 - RNA, 24 nt, Human
cgccuguaaucccagcuacucagg

SEQ ID NO: 323191 - RNA, 24 nt, Human
cgggaggcggagguugcagugagc

SEQ ID NO: 323192 - RNA, 24 nt, Human
cgggguuucaccauguuggucagg

SEQ ID NO: 323193 - RNA, 21 nt, Human
cgucucagccuccccaguagc

SEQ ID NO: 323194 - RNA, 25 nt, Human
cuagcugggcauugguggugugcgc

SEQ ID NO: 323195 - RNA, 24 nt, Human
cucaagcaauucuccugccucagc

SEQ ID NO: 323196 - RNA, 18 nt, Human
cucacucuguugccaggc

SEQ ID NO: 323197 - RNA, 23 nt, Human
cucacucuguugccaggcuggag

SEQ ID NO: 323198 - RNA, 23 nt, Human
cucacugcaaccucccucucccg

SEQ ID NO: 323199 - RNA, 24 nt, Human
cucacugcaaccucccucucccgg

SEQ ID NO: 323200 - RNA, 24 nt, Human
cucacugcaaccuccgccucccgg

SEQ ID NO: 323201 - RNA, 21 nt, Human
cucagccuccccaguagcugg

SEQ ID NO: 323202 - RNA, 24 nt, Human
cucagccuccccaguagcugggac

SEQ ID NO: 323203 - RNA, 25 nt, Human
cucccgggcucaagcaauucuccug

SEQ ID NO: 323204 - RNA, 23 nt, Human
cucuaugaaaaacacaaaaacua

SEQ ID NO: 323205 - RNA, 20 nt, Human
cucugucagccaggcuggag

SEQ ID NO: 323206 - RNA, 24 nt, Human
cucuugaccucgugauccgcccgc

SEQ ID NO: 323207 - RNA, 23 nt, Human
cugcaaccucccucucccgggcu

SEQ ID NO: 323208 - RNA, 24 nt, Human
cugcaaccucccucucccgggcuc

SEQ ID NO: 323209 - RNA, 23 nt, Human
cugcaaccuccgccucccggguu

SEQ ID NO: 323210 - RNA, 24 nt, Human
cugcaaccuccgccucccggguuc

SEQ ID NO: 323211 - RNA, 21 nt, Human
cugccucagccucccaaguag

SEQ ID NO: 323212 - RNA, 24 nt, Human
cuggagugcaguggcaugaucucg

SEQ ID NO: 323213 - RNA, 18 nt, Human
cugucagccaggcuggag

SEQ ID NO: 323214 - RNA, 22 nt, Human
gaaaaaaauaaaggagcccauc

SEQ ID NO: 323215 - RNA, 26 nt, Human
gaaaaaaauaaaggagcccaucaaaa

SEQ ID NO: 323216 - RNA, 19 nt, Human
gaagcaggaagcagaugac

SEQ ID NO: 323217 - RNA, 20 nt, Human
gacagagucuugcucuguca

SEQ ID NO: 323218 - RNA, 22 nt, Human
gaccucgugauccgcccgccuc

SEQ ID NO: 323219 - RNA, 22 nt, Human
gaccucgugauccgcccgccuc

SEQ ID NO: 323220 - RNA, 24 nt, Human
gaccucgugauccgcccgccucgg

SEQ ID NO: 323221 - RNA, 24 nt, Human
gacggagucucacucuguugccag

SEQ ID NO: 323222 - RNA, 23 nt, Human
gagacgggguuucaccauguugg

SEQ ID NO: 323223 - RNA, 24 nt, Human
gagacgggguuucaccauguuggu

SEQ ID NO: 323224 - RNA, 20 nt, Human
gagaugggguuucaccaugu

SEQ ID NO: 323225 - RNA, 24 nt, Human
gagaugggguuucaccauguuggc

SEQ ID NO: 323226 - RNA, 22 nt, Human
gagcaggaagaaaagucagacc

SEQ ID NO: 323227 - RNA, 18 nt, Human
gagguugcagugagccaa

SEQ ID NO: 323228 - RNA, 22 nt, Human
gagguugcagugagccaagauu

SEQ ID NO: 323229 - RNA, 18 nt, Human
gauuacaggcaugagcca

SEQ ID NO: 323230 - RNA, 21 nt, Human
gauuacaggcaugagccacca

SEQ ID NO: 323231 - RNA, 22 nt, Human
gauuacaggcaugagccaccac

SEQ ID NO: 323232 - RNA, 18 nt, Human
gauuauagggauggaaga

SEQ ID NO: 323233 - RNA, 22 nt, Human
gauucucccgucucagccuccc

SEQ ID NO: 323234 - RNA, 21 nt, Human
gcaaaaagaucaucuucccuc

SEQ ID NO: 323235 - RNA, 21 nt, Human
gcacuccagccugggcuagag

SEQ ID NO: 323236 - RNA, 22 nt, Human
gccacagcacuccagccugggc

SEQ ID NO: 323237 - RNA, 23 nt, Human
gccacagcacuccagccugggcu

SEQ ID NO: 323238 - RNA, 22 nt, Human
gcccagcuaauuuuuguauuuu

SEQ ID NO: 323239 - RNA, 21 nt, Human
gcuaguuggaaaggaagccaa

SEQ ID NO: 323240 - RNA, 23 nt, Human
gcucacugcaaccucccucuccc

SEQ ID NO: 323241 - RNA, 24 nt, Human
gcuggaguacaguggcgcgaucua

SEQ ID NO: 323242 - RNA, 20 nt, Human
ggagguugcagugagccaag

SEQ ID NO: 323243 - RNA, 24 nt, Human
ggagguugcagugagccaagauua

SEQ ID NO: 323244 - RNA, 19 nt, Human
ggauuacaggcaugagcca

SEQ ID NO: 323245 - RNA, 22 nt, Human
gggguuucaccauguuggccag

SEQ ID NO: 323246 - RNA, 23 nt, Human
gggguuucaccauguuggucagg

SEQ ID NO: 323247 - RNA, 18 nt, Human
ggguuucaccauguuggc

SEQ ID NO: 323248 - RNA, 22 nt, Human
ggguuucaccauguuggccagg

SEQ ID NO: 323249 - RNA, 20 nt, Human
ggugcgugccaccacgccca

SEQ ID NO: 323250 - RNA, 24 nt, Human
gguggugugcgccuguaaucccag

SEQ ID NO: 323251 - RNA, 23 nt, Human
guagagaugggguuucaccaugu

SEQ ID NO: 323252 - RNA, 19 nt, Human
gucagccaggcuggagugc

SEQ ID NO: 323253 - RNA, 24 nt, Human
gucucacucuguugccaggcugga

SEQ ID NO: 323254 - RNA, 24 nt, Human
gugauccgcccgccucggccuccc

SEQ ID NO: 323255 - RNA, 20 nt, Human
gugggagggaggacaugaug

SEQ ID NO: 323256 - RNA, 24 nt, Human
guggugugcgccuguaaucccagc

SEQ ID NO: 323257 - RNA, 24 nt, Human
uaauuuuuguauuuuuagcagaga

SEQ ID NO: 323258 - RNA, 24 nt, Human
uacaggcaugagccaccacaccca

SEQ ID NO: 323259 - RNA, 22 nt, Human
uacaggcgugugccaccacgcc

SEQ ID NO: 323260 - RNA, 18 nt, Human
uacauguuuuuguacugu

SEQ ID NO: 323261 - RNA, 22 nt, Human
uagaaaaaaauaaaggagccca

SEQ ID NO: 323262 - RNA, 22 nt, Human
uagagaugggguuucaccaugu

SEQ ID NO: 323263 - RNA, 23 nt, Human
uagagugagacccugucucuaaa

SEQ ID NO: 323264 - RNA, 24 nt, Human
uagcagagacgggguuucaccaug

SEQ ID NO: 323265 - RNA, 25 nt, Human
uagcagagacgggguuucaccaugu

SEQ ID NO: 323266 - RNA, 24 nt, Human
uaguagagaugggguuucaccaug

SEQ ID NO: 323267 - RNA, 26 nt, Human
uaguagagaugggguuucaccauguu

SEQ ID NO: 323268 - RNA, 18 nt, Human
uauauuuuuuuaguagag

SEQ ID NO: 323269 - RNA, 24 nt, Human
uaugaaaaacacaaaaacuagcug

SEQ ID NO: 323270 - RNA, 21 nt, Human
uauguauguauacuuuacaca

SEQ ID NO: 323271 - RNA, 23 nt, Human
ucaaaaaaaaguucccuggcaac

SEQ ID NO: 323272 - RNA, 24 nt, Human
ucaccauguuggucaggauggucu

SEQ ID NO: 323273 - RNA, 24 nt, Human
ucacugcaaccucccucucccggg

SEQ ID NO: 323274 - RNA, 23 nt, Human
ucacugcaaccuccgccucccgg

SEQ ID NO: 323275 - RNA, 24 nt, Human
ucacugcaaccuccgccucccggg

SEQ ID NO: 323276 - RNA, 25 nt, Human
ucacugcaaccuccgccucccgggu

SEQ ID NO: 323277 - RNA, 27 nt, Human
ucacugcaaccuccgccucccggguuc

SEQ ID NO: 323278 - RNA, 24 nt, Human
ucacuugggcccgggaggcggagg

SEQ ID NO: 323279 - RNA, 25 nt, Human
ucacuugggcccgggaggcggaggu

SEQ ID NO: 323280 - RNA, 23 nt, Human
ucagaccuggcaaaaagaucauc

SEQ ID NO: 323281 - RNA, 19 nt, Human
ucagccaggcuggagugca

SEQ ID NO: 323282 - RNA, 20 nt, Human
ucagccuccccaguagcugg

SEQ ID NO: 323283 - RNA, 21 nt, Human
uccagccugggcuagagugag

SEQ ID NO: 323284 - RNA, 22 nt, Human
uccagccugggcuagagugaga

SEQ ID NO: 323285 - RNA, 24 nt, Human
ucccaaagugcugggauuacaggc

SEQ ID NO: 323286 - RNA, 24 nt, Human
ucccaaguaguuggguuuacaggc

SEQ ID NO: 323287 - RNA, 21 nt, Human
ucccgggcucaagcaauucuc

SEQ ID NO: 323288 - RNA, 24 nt, Human
ucccgggcucaagcaauucuccug

SEQ ID NO: 323289 - RNA, 19 nt, Human
ucccggguucgaccgauuc

SEQ ID NO: 323290 - RNA, 21 nt, Human
ucccggguucgaccgauucuc

SEQ ID NO: 323291 - RNA, 18 nt, Human
ucccuggcaagugggagg

SEQ ID NO: 323292 - RNA, 18 nt, Human
ucggccucccaaagugcu

SEQ ID NO: 323293 - RNA, 21 nt, Human
ucucacucuguugccaggcug

SEQ ID NO: 323294 - RNA, 23 nt, Human
ucucacucuguugccaggcugga

SEQ ID NO: 323295 - RNA, 24 nt, Human
ucucccgggcucaagcaauucucc

SEQ ID NO: 323296 - RNA, 25 nt, Human
ucucccgucucagccuccccaguag

SEQ ID NO: 323297 - RNA, 19 nt, Human
ucuccugccucagccuccc

SEQ ID NO: 323298 - RNA, 18 nt, Human
ucucuaaauaaauaaaua

SEQ ID NO: 323299 - RNA, 19 nt, Human
ucugucagccaggcuggag

SEQ ID NO: 323300 - RNA, 24 nt, Human
ucugucagccaggcuggagugcag

SEQ ID NO: 323301 - RNA, 23 nt, Human
ucuugcucugucagccaggcugg

SEQ ID NO: 323302 - RNA, 24 nt, Human
ucuugcucugucagccaggcugga

SEQ ID NO: 323303 - RNA, 21 nt, Human
ugaaaaacacaaaaacuagcu

SEQ ID NO: 323304 - RNA, 20 nt, Human
ugaaugacauggugagaccc

SEQ ID NO: 323305 - RNA, 20 nt, Human
ugaaugacauggugagaccc

SEQ ID NO: 323306 - RNA, 24 nt, Human
ugaaugacauggugagacccuguc

SEQ ID NO: 323307 - RNA, 22 nt, Human
ugacauggugagacccugucuc

SEQ ID NO: 323308 - RNA, 24 nt, Human
ugacauggugagacccugucucua

SEQ ID NO: 323309 - RNA, 18 nt, Human
ugagacagagucuugcuc

SEQ ID NO: 323310 - RNA, 22 nt, Human
ugagacagagucuugcucuguc

SEQ ID NO: 323311 - RNA, 22 nt, Human
ugagacggagucucacucuguu

SEQ ID NO: 323312 - RNA, 22 nt, Human
ugagacgggaggaucacuuggg

SEQ ID NO: 323313 - RNA, 22 nt, Human
ugcaguggcaugaucucggcuc

SEQ ID NO: 323314 - RNA, 20 nt, Human
ugccaggcuggaguacagug

SEQ ID NO: 323315 - RNA, 23 nt, Human
ugccaggcuggaguacaguggcg

SEQ ID NO: 323316 - RNA, 24 nt, Human
ugccucagccucccaaguaguugg

SEQ ID NO: 323317 - RNA, 19 nt, Human
ugcgugccaccacgcccag

SEQ ID NO: 323318 - RNA, 21 nt, Human
ugcgugccaccacgcccagcu

SEQ ID NO: 323319 - RNA, 22 nt, Human
uggagggcggagcaggaagaaa

SEQ ID NO: 323320 - RNA, 19 nt, Human
uggaguacaguggcgcgau

SEQ ID NO: 323321 - RNA, 19 nt, Human
uggagugcaguggcaugau

SEQ ID NO: 323322 - RNA, 24 nt, Human
uggagugcaguggcaugaucucgg

SEQ ID NO: 323323 - RNA, 19 nt, Human
uggccaggcuggucuugaa

SEQ ID NO: 323324 - RNA, 18 nt, Human
ugggauuacaggcaugag

SEQ ID NO: 323325 - RNA, 19 nt, Human
ugggauuacaggcaugagc

SEQ ID NO: 323326 - RNA, 22 nt, Human
ugggauuacaggcaugagccac

SEQ ID NO: 323327 - RNA, 23 nt, Human
ugggauuacaggcaugagccacc

SEQ ID NO: 323328 - RNA, 24 nt, Human
ugggauuacaggcaugagccacca

SEQ ID NO: 323329 - RNA, 24 nt, Human
ugggauuacaggcaugagccacca

SEQ ID NO: 323330 - RNA, 19 nt, Human
ugggcccgggaggcggagg

SEQ ID NO: 323331 - RNA, 24 nt, Human
ugggcccgggaggcggagguugca

SEQ ID NO: 323332 - RNA, 23 nt, Human
ugggcuagagugagacccugucu

SEQ ID NO: 323333 - RNA, 24 nt, Human
ugggguuucaccauguuggccagg

SEQ ID NO: 323334 - RNA, 22 nt, Human
uggguuuacaggcgugugccac

SEQ ID NO: 323335 - RNA, 24 nt, Human
uggguuuacaggcgugugccacca

SEQ ID NO: 323336 - RNA, 24 nt, Human
uggucaggauggucucgcucucuu

SEQ ID NO: 323337 - RNA, 24 nt, Human
ugguggugugcgccuguaauccca

SEQ ID NO: 323338 - RNA, 21 nt, Human
uggugugcgccuguaauccca

SEQ ID NO: 323339 - RNA, 22 nt, Human
uggugugcgccuguaaucccag

SEQ ID NO: 323340 - RNA, 24 nt, Human
uggugugcgccuguaaucccagcu

SEQ ID NO: 323341 - RNA, 21 nt, Human
uguauuuuuagcagagacggg

SEQ ID NO: 323342 - RNA, 18 nt, Human
ugucuguauguauguaua

SEQ ID NO: 323343 - RNA, 18 nt, Human
ugugucuguauguaugua

SEQ ID NO: 323344 - RNA, 18 nt, Human
ugugucuguauguaugua

SEQ ID NO: 323345 - RNA, 26 nt, Human
uguuauauauuuuuuuaguagagaug

SEQ ID NO: 323346 - RNA, 24 nt, Human
uuagcagagacgggguuucaccau

SEQ ID NO: 323347 - RNA, 18 nt, Human
uuaguagagaugggguuu

SEQ ID NO: 323348 - RNA, 22 nt, Human
uuaguagagaugggguuucacc

SEQ ID NO: 323349 - RNA, 24 nt, Human
uuaguagagaugggguuucaccau

SEQ ID NO: 323350 - RNA, 20 nt, Human
uucuuuuuuuugagacggag

SEQ ID NO: 323351 - RNA, 24 nt, Human
uugaaugacauggugagacccugu

SEQ ID NO: 323352 - RNA, 20 nt, Human
uugcagugagccaagauuac

SEQ ID NO: 323353 - RNA, 22 nt, Human
uugggcccgggaggcggagguu

SEQ ID NO: 323354 - RNA, 24 nt, Human
uugggcccgggaggcggagguugc

SEQ ID NO: 323355 - RNA, 23 nt, Human
uuguauuuuuagcagagacgggg

SEQ ID NO: 323356 - RNA, 24 nt, Human
uuucaccauguuggccaggcuggu

SEQ ID NO: 323357 - RNA, 19 nt, Human
uuucaccauguuggucagg

SEQ ID NO: 323358 - RNA, 21 nt, Human
uuuuguauuuuuagcagagac

SEQ ID NO: 323359 - RNA, 24 nt, Human
uuuuuagcagagacgggguuucac

SEQ ID NO: 323360 - RNA, 24 nt, Human
uuuuuaguagagaugggguuucac

SEQ ID NO: 323361 - RNA, 20 nt, Human
uuuuuguauuuuuagcagag

SEQ ID NO: 323362 - RNA, 23 nt, Human
uuuuuuaguagagaugggguuuc

SEQ ID NO: 323363 - RNA, 20 nt, Human
uuuuuuuuuuugagacagag

SEQ ID NO: 323364 - RNA, 24 nt, Human
uuuuuuuuuuuugagacagagucu

SEQ ID NO: 323365 - RNA, 27 nt, Human
uuuuuuuuuuuuuuuuuuuuuuugggg

SEQ ID NO: 323366 - RNA, 21 nt, Human
aaaaaaaagugggcucuggga

SEQ ID NO: 323367 - RNA, 18 nt, Human
aaaagaaaaaaaaguggg

SEQ ID NO: 323368 - RNA, 21 nt, Human
auuucaaaaaaagaaaaaaaa

SEQ ID NO: 323369 - RNA, 24 nt, Human
ucaaaaaaagaaaaaaaagugggc

SEQ ID NO: 323370 - RNA, 24 nt, Human
caaaagaagagucuaucuuugaac

SEQ ID NO: 323371 - RNA, 20 nt, Human
uagggcaacuucaguucugg

SEQ ID NO: 323372 - RNA, 23 nt, Human
uuaaaaguagggcaacuucaguu

SEQ ID NO: 323373 - RNA, 23 nt, Human
uucaaaguuaaaaguagggcaac

SEQ ID NO: 323374 - RNA, 21 nt, Human
acaugagugucuuacugggcc

SEQ ID NO: 323375 - RNA, 21 nt, Human
caaugcucaccaccuuccaga

SEQ ID NO: 323376 - RNA, 19 nt, Human
cagaaccgcggccagccac

SEQ ID NO: 323377 - RNA, 23 nt, Human
ccagaaccgcggccagccaccca

SEQ ID NO: 323378 - RNA, 21 nt, Human
cuuacugggccucaaugcuca

SEQ ID NO: 323379 - RNA, 24 nt, Human
cuuccagaaccgcggccagccacc

SEQ ID NO: 323380 - RNA, 23 nt, Human
gcggccagccacccacugaugcc

SEQ ID NO: 323381 - RNA, 22 nt, Human
acuucaccggccuccucuggcu

SEQ ID NO: 323382 - RNA, 24 nt, Human
agaagaugcacuucaccggccucc

SEQ ID NO: 323383 - RNA, 22 nt, Human
agagaacacgcagaagaugcac

SEQ ID NO: 323384 - RNA, 25 nt, Human
ccaagaccucccagaggagaccuuu

SEQ ID NO: 323385 - RNA, 27 nt, Human
cccguacucucucuuuggcucaggcua

SEQ ID NO: 323386 - RNA, 20 nt, Human
ccucuggcugcugagcccgu

SEQ ID NO: 323387 - RNA, 21 nt, Human
cgcccagcacccagagaucug

SEQ ID NO: 323388 - RNA, 21 nt, Human
cggccaagaccucccagagga

SEQ ID NO: 323389 - RNA, 20 nt, Human
cguacucucucuuuggcuca

SEQ ID NO: 323390 - RNA, 24 nt, Human
cugagucggccaagaccucccaga

SEQ ID NO: 323391 - RNA, 23 nt, Human
gaagaugcacuucaccggccucc

SEQ ID NO: 323392 - RNA, 22 nt, Human
gaccugcccagcugccaccacc

SEQ ID NO: 323393 - RNA, 27 nt, Human
gccaagaccucccagaggagaccuuuu

SEQ ID NO: 323394 - RNA, 26 nt, Human
gggcacccagaaacuucccuggggga

SEQ ID NO: 323395 - RNA, 21 nt, Human
ucaccggccuccucuggcugc

SEQ ID NO: 323396 - RNA, 21 nt, Human
ucccugagucggccaagaccu

SEQ ID NO: 323397 - RNA, 19 nt, Human
uggcuuaggucccugaguc

SEQ ID NO: 323398 - RNA, 20 nt, Human
uuuucuuuauucuacuuagu

SEQ ID NO: 323399 - RNA, 25 nt, Human
aaagagaaggccaaaugccauuuga

SEQ ID NO: 323400 - RNA, 24 nt, Human
aaagugcugggauuauagguguga

SEQ ID NO: 323401 - RNA, 24 nt, Human
aaagugcugugauuacaggcguga

SEQ ID NO: 323402 - RNA, 21 nt, Human
aaauaagaaagagaagucugg

SEQ ID NO: 323403 - RNA, 25 nt, Human
aaaucauucaguacgugaucaccug

SEQ ID NO: 323404 - RNA, 20 nt, Human
aaccuccgccuccugggcuc

SEQ ID NO: 323405 - RNA, 18 nt, Human
aagugcugggauuauagg

SEQ ID NO: 323406 - RNA, 26 nt, Human
aagugcugggauuauaggugugagcc

SEQ ID NO: 323407 - RNA, 21 nt, Human
aaucuccagggaaacguucaa

SEQ ID NO: 323408 - RNA, 22 nt, Human
aaucucugcucaccgcaaccuc

SEQ ID NO: 323409 - RNA, 22 nt, Human
acagaguaucgcucuguuuccc

SEQ ID NO: 323410 - RNA, 22 nt, Human
accauauuggucaggcugaucu

SEQ ID NO: 323411 - RNA, 24 nt, Human
accauauuggucaggcugaucuug

SEQ ID NO: 323412 - RNA, 21 nt, Human
accgcaccuggccauaaacau

SEQ ID NO: 323413 - RNA, 18 nt, Human
acgggguuucuccauguu

SEQ ID NO: 323414 - RNA, 20 nt, Human
acgggguuucuccauguugg

SEQ ID NO: 323415 - RNA, 24 nt, Human
acgggguuucuccauguuggccag

SEQ ID NO: 323416 - RNA, 23 nt, Human
acuagucugaaacuccugaccuc

SEQ ID NO: 323417 - RNA, 23 nt, Human
acucauuucccaaugaccauacc

SEQ ID NO: 323418 - RNA, 25 nt, Human
acucugucguccagacuggagugca

SEQ ID NO: 323419 - RNA, 25 nt, Human
acuggagugcaguggcacaaucucu

SEQ ID NO: 323420 - RNA, 19 nt, Human
agaaaaccaucacagaaua

SEQ ID NO: 323421 - RNA, 20 nt, Human
agaaaaccaucacagaauac

SEQ ID NO: 323422 - RNA, 24 nt, Human
agaaacagaagugaguaggaggaa

SEQ ID NO: 323423 - RNA, 19 nt, Human
agaaagucauguaaaauuu

SEQ ID NO: 323424 - RNA, 23 nt, Human
agauacauacuuucauacuaaug

SEQ ID NO: 323425 - RNA, 22 nt, Human
agcacccaccuccccuaagcuc

SEQ ID NO: 323426 - RNA, 18 nt, Human
agcccaaaauuucagaau

SEQ ID NO: 323427 - RNA, 24 nt, Human
aggugauccgccugccuuggccuc

SEQ ID NO: 323428 - RNA, 19 nt, Human
aggugugagccaccgcacc

SEQ ID NO: 323429 - RNA, 20 nt, Human
aguaacaauaacaguugggc

SEQ ID NO: 323430 - RNA, 18 nt, Human
agucccuuuuguuuucuc

SEQ ID NO: 323431 - RNA, 24 nt, Human
agugauucuucugucucagccucc

SEQ ID NO: 323432 - RNA, 21 nt, Human
agugcaauggcgcaaucucug

SEQ ID NO: 323433 - RNA, 21 nt, Human
agugcaguggcacaaucucug

SEQ ID NO: 323434 - RNA, 24 nt, Human
aguguaguggccggaucucggcuc

SEQ ID NO: 323435 - RNA, 23 nt, Human
aucaccugucauguauagggcuc

SEQ ID NO: 323436 - RNA, 24 nt, Human
caaagugcugggauuauaggugug

SEQ ID NO: 323437 - RNA, 24 nt, Human
caaagugcugugauuacaggcgug

SEQ ID NO: 323438 - RNA, 23 nt, Human
caaccuccgccuccugggcucaa

SEQ ID NO: 323439 - RNA, 21 nt, Human
caagcaauucuccugccucag

SEQ ID NO: 323440 - RNA, 22 nt, Human
caagugauucuucugucucagc

SEQ ID NO: 323441 - RNA, 22 nt, Human
caccaagcccagcuaauuuuug

SEQ ID NO: 323442 - RNA, 23 nt, Human
caccauauuggucaggcugaucu

SEQ ID NO: 323443 - RNA, 24 nt, Human
caccauauuggucaggcugaucuu

SEQ ID NO: 323444 - RNA, 22 nt, Human
cacccaccuccccuaagcucca

SEQ ID NO: 323445 - RNA, 21 nt, Human
caccgcaaccuccgccuccug

SEQ ID NO: 323446 - RNA, 22 nt, Human
cacucugucguccagacuggag

SEQ ID NO: 323447 - RNA, 23 nt, Human
cacucugucguccagacuggagu

SEQ ID NO: 323448 - RNA, 21 nt, Human
cacugcaaacucuaccucccg

SEQ ID NO: 323449 - RNA, 21 nt, Human
cacugcaacccccgccucccg

SEQ ID NO: 323450 - RNA, 23 nt, Human
cacugcaacccccgccucccggg

SEQ ID NO: 323451 - RNA, 30 nt, Human
cagaucucuugaaaccguucagagaauuuu

SEQ ID NO: 323452 - RNA, 24 nt, Human
caggcgugagccaccgugccuggc

SEQ ID NO: 323453 - RNA, 24 nt, Human
caggcuuucaccauauuggucagg

SEQ ID NO: 323454 - RNA, 24 nt, Human
caguggagacaggcuuucaccaua

SEQ ID NO: 323455 - RNA, 18 nt, Human
cauagugcagcuaaaagc

SEQ ID NO: 323456 - RNA, 21 nt, Human
cauagugcagcuaaaagcaaa

SEQ ID NO: 323457 - RNA, 21 nt, Human
ccaaagugcugggauuauagg

SEQ ID NO: 323458 - RNA, 24 nt, Human
ccaaagugcugggauuauaggugu

SEQ ID NO: 323459 - RNA, 22 nt, Human
ccaaagugcugugauuacaggc

SEQ ID NO: 323460 - RNA, 24 nt, Human
ccaaagugcugugauuacaggcgu

SEQ ID NO: 323461 - RNA, 21 nt, Human
ccaagcccagcuaauuuuugc

SEQ ID NO: 323462 - RNA, 20 nt, Human
ccauguuggccagacuaguc

SEQ ID NO: 323463 - RNA, 23 nt, Human
cccgaguagcugggauuacaccu

SEQ ID NO: 323464 - RNA, 19 nt, Human
cccggguagcugagauuac

SEQ ID NO: 323465 - RNA, 23 nt, Human
cccggguucaagcaauucuccug

SEQ ID NO: 323466 - RNA, 21 nt, Human
cccugcaaggcaccgcucucc

SEQ ID NO: 323467 - RNA, 24 nt, Human
cccugcaaggcaccgcucuccucg

SEQ ID NO: 323468 - RNA, 18 nt, Human
ccgcaaccuccgccuccu

SEQ ID NO: 323469 - RNA, 23 nt, Human
ccgcaaccuccgccuccugggcu

SEQ ID NO: 323470 - RNA, 24 nt, Human
ccgcaaccuccgccuccugggcuc

SEQ ID NO: 323471 - RNA, 26 nt, Human
ccgccucccggguucaagcaauucuu

SEQ ID NO: 323472 - RNA, 24 nt, Human
ccgccuccugggcucaagugauuc

SEQ ID NO: 323473 - RNA, 18 nt, Human
ccgcucuccucgccgccu

SEQ ID NO: 323474 - RNA, 24 nt, Human
ccucccggguucaagcaauucucc

SEQ ID NO: 323475 - RNA, 22 nt, Human
ccuccgccuccugggcucaagu

SEQ ID NO: 323476 - RNA, 18 nt, Human
ccugaccucaggugaucc

SEQ ID NO: 323477 - RNA, 21 nt, Human
ccugaccucaggugauccgcc

SEQ ID NO: 323478 - RNA, 23 nt, Human
ccugaccucaggugauccgccug

SEQ ID NO: 323479 - RNA, 22 nt, Human
ccugccuuggccucccaaagug

SEQ ID NO: 323480 - RNA, 22 nt, Human
ccugggcucaagugauucuucu

SEQ ID NO: 323481 - RNA, 23 nt, Human
ccugggcucaagugauucuucug

SEQ ID NO: 323482 - RNA, 24 nt, Human
cgcucuguuucccaggcuggagug

SEQ ID NO: 323483 - RNA, 24 nt, Human
cgcuuugucgcccaggcuggagug

SEQ ID NO: 323484 - RNA, 19 nt, Human
cgggguuucuccauguugg

SEQ ID NO: 323485 - RNA, 20 nt, Human
cuaauuuuuuguauuuucag

SEQ ID NO: 323486 - RNA, 23 nt, Human
cucaagugauucuucugucucag

SEQ ID NO: 323487 - RNA, 24 nt, Human
cucacucugucguccagacuggag

SEQ ID NO: 323488 - RNA, 23 nt, Human
cucacugcaaacucuaccucccg

SEQ ID NO: 323489 - RNA, 24 nt, Human
cucacugcaacccccgccucccgg

SEQ ID NO: 323490 - RNA, 24 nt, Human
cucagccucccgaguagcugggau

SEQ ID NO: 323491 - RNA, 19 nt, Human
cuccucgccgccugccucg

SEQ ID NO: 323492 - RNA, 26 nt, Human
cuccugaccucaggugauccgccugc

SEQ ID NO: 323493 - RNA, 20 nt, Human
cuccugggcucaagugauuc

SEQ ID NO: 323494 - RNA, 21 nt, Human
cuccugggcucaagugauucu

SEQ ID NO: 323495 - RNA, 24 nt, Human
cucgcuuugucgcccaggcuggag

SEQ ID NO: 323496 - RNA, 23 nt, Human
cugcaacccccgccucccggguu

SEQ ID NO: 323497 - RNA, 24 nt, Human
cugcaacccccgccucccggguuc

SEQ ID NO: 323498 - RNA, 23 nt, Human
cugccucagucucgcgaguagcu

SEQ ID NO: 323499 - RNA, 23 nt, Human
cugccuuggccucccaaagugcu

SEQ ID NO: 323500 - RNA, 19 nt, Human
cuggcacuacaggugugca

SEQ ID NO: 323501 - RNA, 21 nt, Human
cugggauuauaggugugagcc

SEQ ID NO: 323502 - RNA, 23 nt, Human
cugucucagccucccgaguagcu

SEQ ID NO: 323503 - RNA, 18 nt, Human
cuguuucccaggcuggag

SEQ ID NO: 323504 - RNA, 24 nt, Human
cuuaaaagaucugcccaccuuggc

SEQ ID NO: 323505 - RNA, 19 nt, Human
cuugaaaccguucagagaa

SEQ ID NO: 323506 - RNA, 24 nt, Human
gaaacgggguuucuccauguuggc

SEQ ID NO: 323507 - RNA, 23 nt, Human
gaccucaggugauccgccugccu

SEQ ID NO: 323508 - RNA, 18 nt, Human
gagaagucuggggaaggu

SEQ ID NO: 323509 - RNA, 21 nt, Human
gagagaaggucuaaaugcuac

SEQ ID NO: 323510 - RNA, 25 nt, Human
gaguagcugggauuacaccucgugc

SEQ ID NO: 323511 - RNA, 21 nt, Human
gagucucgcuuugucgcccag

SEQ ID NO: 323512 - RNA, 24 nt, Human
gaucucuugaaaccguucagagaa

SEQ ID NO: 323513 - RNA, 18 nt, Human
gauuacaggcgugagcca

SEQ ID NO: 323514 - RNA, 20 nt, Human
gauuacaggcgugagccacc

SEQ ID NO: 323515 - RNA, 20 nt, Human
gauuacaggcgugagccacc

SEQ ID NO: 323516 - RNA, 20 nt, Human
gauuacaggcgugagccacc

SEQ ID NO: 323517 - RNA, 21 nt, Human
gauuacaggcgugagccaccg

SEQ ID NO: 323518 - RNA, 18 nt, Human
gauuacaggggugcgcca

SEQ ID NO: 323519 - RNA, 18 nt, Human
gauuauaggugugagcca

SEQ ID NO: 323520 - RNA, 22 nt, Human
gauuauaggugugagccaccgc

SEQ ID NO: 323521 - RNA, 23 nt, Human
gauuauaggugugagccaccgca

SEQ ID NO: 323522 - RNA, 22 nt, Human
gauuuuacaaugcuguauauga

SEQ ID NO: 323523 - RNA, 24 nt, Human
gcacccaccuccccuaagcuccau

SEQ ID NO: 323524 - RNA, 26 nt, Human
gcacuuugcuaggcgcuuucuuuaua

SEQ ID NO: 323525 - RNA, 22 nt, Human
gccaccgcaccuggccauaaac

SEQ ID NO: 323526 - RNA, 19 nt, Human
gcccaggcuggagugcaau

SEQ ID NO: 323527 - RNA, 20 nt, Human
gcccaggcuggagugcaaug

SEQ ID NO: 323528 - RNA, 22 nt, Human
gccuuggccucccaaagugcug

SEQ ID NO: 323529 - RNA, 20 nt, Human
gcuacugaaaaaguuuucag

SEQ ID NO: 323530 - RNA, 25 nt, Human
gcuggagugcaauggcgcaaucucu

SEQ ID NO: 323531 - RNA, 20 nt, Human
gcuuggccucccaaagugcu

SEQ ID NO: 323532 - RNA, 18 nt, Human
ggagagagagagaacuag

SEQ ID NO: 323533 - RNA, 18 nt, Human
ggcacgagggagagagag

SEQ ID NO: 323534 - RNA, 23 nt, Human
ggcugaucuugaacuccugaccu

SEQ ID NO: 323535 - RNA, 19 nt, Human
gggcucaagugauucuucu

SEQ ID NO: 323536 - RNA, 21 nt, Human
gucacugagauuagaaaacca

SEQ ID NO: 323537 - RNA, 23 nt, Human
gucccuuuuguuuucucuaggaa

SEQ ID NO: 323538 - RNA, 24 nt, Human
gugauucuucugucucagccuccc

SEQ ID NO: 323539 - RNA, 20 nt, Human
uaauucguagagcaacccuu

SEQ ID NO: 323540 - RNA, 22 nt, Human
uaauuuuugcauuuuuaguaga

SEQ ID NO: 323541 - RNA, 24 nt, Human
uaauuuuuuguauuuucaguggag

SEQ ID NO: 323542 - RNA, 25 nt, Human
uaauuuuuuguauuuucaguggaga

SEQ ID NO: 323543 - RNA, 22 nt, Human
uacaggcgugagccaccgugcc

SEQ ID NO: 323544 - RNA, 23 nt, Human
uacaggcgugagccaccgugccu

SEQ ID NO: 323545 - RNA, 24 nt, Human
uacaggggugcgccaccacaccca

SEQ ID NO: 323546 - RNA, 24 nt, Human
uaguagaaacgggguuucuccaug

SEQ ID NO: 323547 - RNA, 23 nt, Human
uauaggugugagccaccgcaccu

SEQ ID NO: 323548 - RNA, 24 nt, Human
uaucgcucuguuucccaggcugga

SEQ ID NO: 323549 - RNA, 24 nt, Human
ucaccgcaaccuccgccuccuggg

SEQ ID NO: 323550 - RNA, 25 nt, Human
ucaccgcaaccuccgccuccugggc

SEQ ID NO: 323551 - RNA, 27 nt, Human
ucaccgcaaccuccgccuccugggcuc

SEQ ID NO: 323552 - RNA, 21 nt, Human
ucacugagauuagaaaaccau

SEQ ID NO: 323553 - RNA, 21 nt, Human
ucacugcaaacucuaccuccc

SEQ ID NO: 323554 - RNA, 24 nt, Human
ucacugcaaacucuaccucccggg

SEQ ID NO: 323555 - RNA, 18 nt, Human
ucacugcaacccccgccu

SEQ ID NO: 323556 - RNA, 24 nt, Human
ucacugcaacccccgccucccggg

SEQ ID NO: 323557 - RNA, 26 nt, Human
ucacugcaacccccgccucccggguu

SEQ ID NO: 323558 - RNA, 20 nt, Human
ucagccucccgaguagcugg

SEQ ID NO: 323559 - RNA, 24 nt, Human
ucaguggagacaggcuuucaccau

SEQ ID NO: 323560 - RNA, 23 nt, Human
ucauacuaaugaaaaagggaggc

SEQ ID NO: 323561 - RNA, 23 nt, Human
ucccaaagugcugggauuauagg

SEQ ID NO: 323562 - RNA, 24 nt, Human
ucccaaagugcugugauuacaggc

SEQ ID NO: 323563 - RNA, 24 nt, Human
ucccaaugaccauaccagguuuug

SEQ ID NO: 323564 - RNA, 23 nt, Human
ucccaggcuggaguguaguggcc

SEQ ID NO: 323565 - RNA, 18 nt, Human
ucccgaguagcugggauu

SEQ ID NO: 323566 - RNA, 21 nt, Human
ucccggguucaagcaauucuc

SEQ ID NO: 323567 - RNA, 24 nt, Human
ucccggguucaagcaauucuccug

SEQ ID NO: 323568 - RNA, 19 nt, Human
ucccugagcacucauuucc

SEQ ID NO: 323569 - RNA, 21 nt, Human
uccugggcucaagugauucuu

SEQ ID NO: 323570 - RNA, 24 nt, Human
uccugggcucaagugauucuucug

SEQ ID NO: 323571 - RNA, 18 nt, Human
ucgcccaggcuggagugc

SEQ ID NO: 323572 - RNA, 24 nt, Human
ucgcgaguagcuggcacuacaggu

SEQ ID NO: 323573 - RNA, 22 nt, Human
ucgcucuguuucccaggcugga

SEQ ID NO: 323574 - RNA, 24 nt, Human
ucgcuuugucgcccaggcuggagu

SEQ ID NO: 323575 - RNA, 24 nt, Human
ucguccagacuggagugcaguggc

SEQ ID NO: 323576 - RNA, 22 nt, Human
ucucacucugucguccagacug

SEQ ID NO: 323577 - RNA, 24 nt, Human
ucucacucugucguccagacugga

SEQ ID NO: 323578 - RNA, 18 nt, Human
ucuccagggaaacguuca

SEQ ID NO: 323579 - RNA, 23 nt, Human
ucucgcuuugucgcccaggcugg

SEQ ID NO: 323580 - RNA, 24 nt, Human
ucucgcuuugucgcccaggcugga

SEQ ID NO: 323581 - RNA, 23 nt, Human
ucuguacauuuuaguuagauggu

SEQ ID NO: 323582 - RNA, 24 nt, Human
ucugucguccagacuggagugcag

SEQ ID NO: 323583 - RNA, 22 nt, Human
ucuguuucccaggcuggagugu

SEQ ID NO: 323584 - RNA, 24 nt, Human
ucuguuucccaggcuggaguguag

SEQ ID NO: 323585 - RNA, 20 nt, Human
ucuguuuuuuugagacagag

SEQ ID NO: 323586 - RNA, 23 nt, Human
ucuugaacuccugaccuuaaaag

SEQ ID NO: 323587 - RNA, 24 nt, Human
ugaagaauaggacagaucucuuga

SEQ ID NO: 323588 - RNA, 18 nt, Human
ugaccucaggugauccgc

SEQ ID NO: 323589 - RNA, 24 nt, Human
ugaccucaggugauccgccugccu

SEQ ID NO: 323590 - RNA, 19 nt, Human
ugagaagaaagucauguaa

SEQ ID NO: 323591 - RNA, 22 nt, Human
ugagacagaguaucgcucuguu

SEQ ID NO: 323592 - RNA, 25 nt, Human
ugagagaaggucuaaaugcuacuga

SEQ ID NO: 323593 - RNA, 19 nt, Human
ugagaggaugugaaagauu

SEQ ID NO: 323594 - RNA, 22 nt, Human
ugagauggagucucacucuguc

SEQ ID NO: 323595 - RNA, 22 nt, Human
ugagauuacaggggugcgccac

SEQ ID NO: 323596 - RNA, 24 nt, Human
ugagauuacaggggugcgccacca

SEQ ID NO: 323597 - RNA, 23 nt, Human
ugagauuagaaaaccaucacaga

SEQ ID NO: 323598 - RNA, 24 nt, Human
ugccucagucucgcgaguagcugg

SEQ ID NO: 323599 - RNA, 24 nt, Human
uggagucucgcuuugucgcccagg

SEQ ID NO: 323600 - RNA, 22 nt, Human
uggagugcaauggcgcaaucuc

SEQ ID NO: 323601 - RNA, 18 nt, Human
uggagugcaguggcacaa

SEQ ID NO: 323602 - RNA, 22 nt, Human
uggagugcaguggcacaaucuc

SEQ ID NO: 323603 - RNA, 24 nt, Human
uggaguguaguggccggaucucgg

SEQ ID NO: 323604 - RNA, 24 nt, Human
uggcacaaucucugcucacugcaa

SEQ ID NO: 323605 - RNA, 24 nt, Human
uggcacuacaggugugcaccacca

SEQ ID NO: 323606 - RNA, 24 nt, Human
uggccauaaacauuuaauuuaacc

SEQ ID NO: 323607 - RNA, 18 nt, Human
ugggauuauaggugugag

SEQ ID NO: 323608 - RNA, 19 nt, Human
ugggauuauaggugugagc

SEQ ID NO: 323609 - RNA, 21 nt, Human
ugggauuauaggugugagcca

SEQ ID NO: 323610 - RNA, 22 nt, Human
ugggauuauaggugugagccac

SEQ ID NO: 323611 - RNA, 23 nt, Human
ugggauuauaggugugagccacc

SEQ ID NO: 323612 - RNA, 24 nt, Human
ugggauuauaggugugagccaccg

SEQ ID NO: 323613 - RNA, 24 nt, Human
ugggcucaagugauucuucugucu

SEQ ID NO: 323614 - RNA, 24 nt, Human
uggucaggcugaucuugaacuccu

SEQ ID NO: 323615 - RNA, 19 nt, Human
ugucauguauagggcucuu

SEQ ID NO: 323616 - RNA, 20 nt, Human
ugucgcccaggcuggagugc

SEQ ID NO: 323617 - RNA, 24 nt, Human
ugucucagccucccgaguagcugg

SEQ ID NO: 323618 - RNA, 20 nt, Human
ugugaaagauugccaagagg

SEQ ID NO: 323619 - RNA, 18 nt, Human
ugugaugauuaguacuuu

SEQ ID NO: 323620 - RNA, 22 nt, Human
ugugauuacaggcgugagccac

SEQ ID NO: 323621 - RNA, 24 nt, Human
ugugauuacaggcgugagccaccg

SEQ ID NO: 323622 - RNA, 22 nt, Human
uguuuuuuuugagauggagucu

SEQ ID NO: 323623 - RNA, 24 nt, Human
uuaguagaaacgggguuucuccau

SEQ ID NO: 323624 - RNA, 21 nt, Human
uucaagcaauucuccugccuc

SEQ ID NO: 323625 - RNA, 27 nt, Human
uucaagcaauucuccugccucagucuc

SEQ ID NO: 323626 - RNA, 21 nt, Human
uucaguacgugaucaccuguc

SEQ ID NO: 323627 - RNA, 18 nt, Human
uuuaagauacauacuuuc

SEQ ID NO: 323628 - RNA, 21 nt, Human
uuuagucccuuuuguuuucuc

SEQ ID NO: 323629 - RNA, 21 nt, Human
uuucaccauauuggucaggcu

SEQ ID NO: 323630 - RNA, 24 nt, Human
uuucccaggcuggaguguaguggc

SEQ ID NO: 323631 - RNA, 21 nt, Human
uuucuccauguuggccagacu

SEQ ID NO: 323632 - RNA, 24 nt, Human
uuugucgcccaggcuggagugcaa

SEQ ID NO: 323633 - RNA, 19 nt, Human
uuuugagacagaguaucgc

SEQ ID NO: 323634 - RNA, 21 nt, Human
uuuuuguauuuucaguggaga

SEQ ID NO: 323635 - RNA, 24 nt, Human
uuuuuuauuuuugagauggagucu

SEQ ID NO: 323636 - RNA, 26 nt, Human
uuuuuuauuuuugagauggagucuca

SEQ ID NO: 323637 - RNA, 24 nt, Human
uuuuuuguauuuucaguggagaca

SEQ ID NO: 323638 - RNA, 21 nt, Human
uuuuuuuugagauggagucuc

SEQ ID NO: 323639 - RNA, 21 nt, Human
uuuuuuuuuuuugcggccuca

SEQ ID NO: 323640 - RNA, 18 nt, Human
uuuuuuuuuuuuuugcgg

SEQ ID NO: 323641 - RNA, 18 nt, Human
uuuuuuuuuuuuuuuuug

SEQ ID NO: 323642 - RNA, 23 nt, Human
uuuuuuuuuuuuuuuuuuugcgg

SEQ ID NO: 323643 - RNA, 20 nt, Human
aaagacacaggauguuuugc

SEQ ID NO: 323644 - RNA, 21 nt, Human
caacaggccacccaaugggca

SEQ ID NO: 323645 - RNA, 22 nt, Human
caacaggccacccaaugggcac

SEQ ID NO: 323646 - RNA, 23 nt, Human
caaccauuuuccugaugacagcc

SEQ ID NO: 323647 - RNA, 23 nt, Human
cacuuacacaucguacuccaaaa

SEQ ID NO: 323648 - RNA, 26 nt, Human
ccccaaccucaucccuuucagggauu

SEQ ID NO: 323649 - RNA, 20 nt, Human
cgcuuuauugggaagcagac

SEQ ID NO: 323650 - RNA, 23 nt, Human
cucccccaaccucaucccuuuca

SEQ ID NO: 323651 - RNA, 19 nt, Human
cugaugacagccaugguuc

SEQ ID NO: 323652 - RNA, 19 nt, Human
cugcugcacagugaccaac

SEQ ID NO: 323653 - RNA, 19 nt, Human
gcugccggaaguuccucca

SEQ ID NO: 323654 - RNA, 23 nt, Human
ucagugggaacagggauuccucu

SEQ ID NO: 323655 - RNA, 18 nt, Human
uccucugggcaacucccc

SEQ ID NO: 323656 - RNA, 21 nt, Human
uccucugggcaacucccccaa

SEQ ID NO: 323657 - RNA, 18 nt, Human
ucucccaaccauuuuccu

SEQ ID NO: 323658 - RNA, 19 nt, Human
ugccuuggccacuugagcu

SEQ ID NO: 323659 - RNA, 23 nt, Human
ugggaacagggauuccucugggc

SEQ ID NO: 323660 - RNA, 23 nt, Human
acacagcaccuucccuuuagagc

SEQ ID NO: 323661 - RNA, 19 nt, Human
cuccaaaagccuccgcucc

SEQ ID NO: 323662 - RNA, 21 nt, Human
ugauuacacagcaccuucccu

SEQ ID NO: 323663 - RNA, 18 nt, Human
aaagccuucucuugaccg

SEQ ID NO: 323664 - RNA, 26 nt, Human
accucuccccacaaaucccgacucuu

SEQ ID NO: 323665 - RNA, 22 nt, Human
aguggaaaaccucuccccacaa

SEQ ID NO: 323666 - RNA, 21 nt, Human
cagccgugagacuggggcugg

SEQ ID NO: 323667 - RNA, 24 nt, Human
ccuggaggagcgggcagaagaugg

SEQ ID NO: 323668 - RNA, 19 nt, Human
cgggagccgcaacgggaga

SEQ ID NO: 323669 - RNA, 22 nt, Human
cuccccacaaaucccgacucuu

SEQ ID NO: 323670 - RNA, 20 nt, Human
cuuaaagccuucucuugacc

SEQ ID NO: 323671 - RNA, 22 nt, Human
gggagauuaauaccgucuuucu

SEQ ID NO: 323672 - RNA, 19 nt, Human
ucagccgugagacuggggc

SEQ ID NO: 323673 - RNA, 22 nt, Human
ucccgacucuugaccggaccag

SEQ ID NO: 323674 - RNA, 21 nt, Human
uggcagggacccuaaaccauc

SEQ ID NO: 323675 - RNA, 18 nt, Human
uuccuggaggagcgggca

SEQ ID NO: 323676 - RNA, 20 nt, Human
uuuuuuggcagggacccuaa

SEQ ID NO: 323677 - RNA, 21 nt, Human
uuuuuuuuuuggcagggaccc

SEQ ID NO: 323678 - RNA, 21 nt, Human
uuuuuuuuuuuggcagggacc

SEQ ID NO: 323679 - RNA, 19 nt, Human
uuuuuuuuuuuuggcaggg

SEQ ID NO: 323680 - RNA, 25 nt, Human
uuuuuuuuuuuuuuuuuggcagggg

SEQ ID NO: 323681 - RNA, 22 nt, Human
uuuuuuuuuuuuuuuuuuuggc

SEQ ID NO: 323682 - RNA, 21 nt, Human
aaagggaaugagguuuuggga

SEQ ID NO: 323683 - RNA, 19 nt, Human
aagccccagccccugagug

SEQ ID NO: 323684 - RNA, 18 nt, Human
agagaagccccagccccu

SEQ ID NO: 323685 - RNA, 18 nt, Human
gaagaaaccaauccuggg

SEQ ID NO: 323686 - RNA, 22 nt, Human
gggaaugagguuuugggacaga

SEQ ID NO: 323687 - RNA, 21 nt, Human
ugggggugcgagagaagcccc

SEQ ID NO: 323688 - RNA, 18 nt, Human
uggguaaagaaaaaaggg

SEQ ID NO: 323689 - RNA, 22 nt, Human
uuuuuuuuuuuuuuggauucga

SEQ ID NO: 323690 - RNA, 18 nt, Human
uuuuuuuuuuuuuuuuug

SEQ ID NO: 323691 - RNA, 18 nt, Human
uuuuuuuuuuuuuuuuug

SEQ ID NO: 323692 - RNA, 19 nt, Human
cccacagagcuuuauugga

SEQ ID NO: 323693 - RNA, 20 nt, Human
gagcuuuauuggagagauac

SEQ ID NO: 323694 - RNA, 20 nt, Human
uacacacaaaggcuguccac

SEQ ID NO: 323695 - RNA, 18 nt, Human
aaaacaaaugauacaaaa

SEQ ID NO: 323696 - RNA, 23 nt, Human
aaacagauuuuauucaacuuuuu

SEQ ID NO: 323697 - RNA, 20 nt, Human
aacaaacauacaaauuucuu

SEQ ID NO: 323698 - RNA, 22 nt, Human
caacacuuucccuuuguaacuu

SEQ ID NO: 323699 - RNA, 24 nt, Human
caacaucugucaugcagccaucaa

SEQ ID NO: 323700 - RNA, 24 nt, Human
caauaaaugcaacuuuaacaaaca

SEQ ID NO: 323701 - RNA, 22 nt, Human
cagcaaauaugaaaagcuucaa

SEQ ID NO: 323702 - RNA, 26 nt, Human
caugcagccaucaaaaaucuuacagu

SEQ ID NO: 323703 - RNA, 22 nt, Human
cgcagcaaauaugaaaagcuuc

SEQ ID NO: 323704 - RNA, 21 nt, Human
uaacaaacauacaaauuucuu

SEQ ID NO: 323705 - RNA, 23 nt, Human
uaagaaaugcuuucuuauaccac

SEQ ID NO: 323706 - RNA, 18 nt, Human
uacaaaaugcucacgcag

SEQ ID NO: 323707 - RNA, 21 nt, Human
ucccuuuguaacuugcugcaa

SEQ ID NO: 323708 - RNA, 21 nt, Human
uuuguaacuugcugcaauaaa

SEQ ID NO: 323709 - RNA, 26 nt, Human
agcaggaggcgacaauucccccagaa

SEQ ID NO: 323710 - RNA, 18 nt, Human
cacccuuggcagcaggau

SEQ ID NO: 323711 - RNA, 26 nt, Human
cagcugcaguucagagccccuggugg

SEQ ID NO: 323712 - RNA, 23 nt, Human
gccugcugauaacaucagcugca

SEQ ID NO: 323713 - RNA, 18 nt, Human
guucagagccccuggugg

SEQ ID NO: 323714 - RNA, 22 nt, Human
uuuuuuuuuuuuuugaccuugg

SEQ ID NO: 323715 - RNA, 23 nt, Human
uuuuuuuuuuuuuuugaccuugg

SEQ ID NO: 323716 - RNA, 27 nt, Human
uuuuuuuuuuuuuuuuugaccuugggg

SEQ ID NO: 323717 - RNA, 27 nt, Human
uuuuuuuuuuuuuuuuuuuuuuugggg

SEQ ID NO: 323718 - RNA, 26 nt, Human
aaaagaaaaaaaaagauagugaagag

SEQ ID NO: 323719 - RNA, 20 nt, Human
aaagugcugggaauuauagg

SEQ ID NO: 323720 - RNA, 23 nt, Human
aacacuggaucuauuaugaccaa

SEQ ID NO: 323721 - RNA, 20 nt, Human
aaccucugccucccaggcuc

SEQ ID NO: 323722 - RNA, 19 nt, Human
aagaaaaaaacuuccaccc

SEQ ID NO: 323723 - RNA, 26 nt, Human
aagcgauucucgugccucagccuccu

SEQ ID NO: 323724 - RNA, 19 nt, Human
acacuggaucuauuaugac

SEQ ID NO: 323725 - RNA, 20 nt, Human
acaggguuuugccauauugg

SEQ ID NO: 323726 - RNA, 24 nt, Human
acaggguuuugccauauuggccag

SEQ ID NO: 323727 - RNA, 18 nt, Human
accaaaaagaaaaaaaaa

SEQ ID NO: 323728 - RNA, 22 nt, Human
agaaaaaaaaagauagugaaga

SEQ ID NO: 323729 - RNA, 25 nt, Human
agaaaaaaaaagauagugaagagaa

SEQ ID NO: 323730 - RNA, 26 nt, Human
agaaaaaaaaagauagugaagagaaa

SEQ ID NO: 323731 - RNA, 26 nt, Human
agaaauggaaaaaggaccaaaaagaa

SEQ ID NO: 323732 - RNA, 18 nt, Human
agacagagucuugcugug

SEQ ID NO: 323733 - RNA, 24 nt, Human
agcgauucucgugccucagccucc

SEQ ID NO: 323734 - RNA, 22 nt, Human
aguagagacaggguuuugccau

SEQ ID NO: 323735 - RNA, 18 nt, Human
aguagcugagauuauagg

SEQ ID NO: 323736 - RNA, 19 nt, Human
agugaagagaauccagaaa

SEQ ID NO: 323737 - RNA, 24 nt, Human
auauaacaguguugguaacaaagg

SEQ ID NO: 323738 - RNA, 23 nt, Human
auauuggccaggcuggucuugaa

SEQ ID NO: 323739 - RNA, 22 nt, Human
auggaaaaaggaccaaaaagaa

SEQ ID NO: 323740 - RNA, 31 nt, Human
caaaaagaaaaaaaaagauagugaagagaaa

SEQ ID NO: 323741 - RNA, 23 nt, Human
caaagugcugggaauuauaggug

SEQ ID NO: 323742 - RNA, 23 nt, Human
caaccucugccucccaggcucaa

SEQ ID NO: 323743 - RNA, 18 nt, Human
cacugcaaccucugccuc

SEQ ID NO: 323744 - RNA, 21 nt, Human
cacugcaaccucugccuccca

SEQ ID NO: 323745 - RNA, 24 nt, Human
cagagucuugcuguguugcccagg

SEQ ID NO: 323746 - RNA, 20 nt, Human
cagccuccugaguagcugag

SEQ ID NO: 323747 - RNA, 24 nt, Human
caggguuuugccauauuggccagg

SEQ ID NO: 323748 - RNA, 24 nt, Human
cauauuggccaggcuggucuugaa

SEQ ID NO: 323749 - RNA, 21 nt, Human
ccaaagugcugggaauuauag

SEQ ID NO: 323750 - RNA, 22 nt, Human
ccaaagugcugggaauuauagg

SEQ ID NO: 323751 - RNA, 25 nt, Human
ccaaagugcugggaauuauaggugu

SEQ ID NO: 323752 - RNA, 19 nt, Human
ccauauuggccaggcuggu

SEQ ID NO: 323753 - RNA, 21 nt, Human
ccauauuggccaggcuggucu

SEQ ID NO: 323754 - RNA, 20 nt, Human
cccaggcucaagcgauucuc

SEQ ID NO: 323755 - RNA, 20 nt, Human
cccaggcucaagcgauucuc

SEQ ID NO: 323756 - RNA, 22 nt, Human
cccaucuuggccucccaaagug

SEQ ID NO: 323757 - RNA, 22 nt, Human
ccugaguagcugagauuauagg

SEQ ID NO: 323758 - RNA, 23 nt, Human
ccugaguagcugagauuauaggu

SEQ ID NO: 323759 - RNA, 24 nt, Human
ccugaguagcugagauuauaggug

SEQ ID NO: 323760 - RNA, 24 nt, Human
cgcgcccagcccugaagcaggcuu

SEQ ID NO: 323761 - RNA, 24 nt, Human
cgugccucagccuccugaguagcu

SEQ ID NO: 323762 - RNA, 24 nt, Human
cucaagugauuugcccaucuuggc

SEQ ID NO: 323763 - RNA, 24 nt, Human
cucacugcaaccucugccucccag

SEQ ID NO: 323764 - RNA, 24 nt, Human
cucacugcaaccucugccucccag

SEQ ID NO: 323765 - RNA, 18 nt, Human
cuccuagacucaagugau

SEQ ID NO: 323766 - RNA, 23 nt, Human
cuccuaguuccacuuugcauuuc

SEQ ID NO: 323767 - RNA, 25 nt, Human
cucgugccucagccuccugaguagc

SEQ ID NO: 323768 - RNA, 21 nt, Human
cugaguagcugagauuauagg

SEQ ID NO: 323769 - RNA, 24 nt, Human
cugaguagcugagauuauaggugu

SEQ ID NO: 323770 - RNA, 24 nt, Human
cugauuuuauauuuuuaguagaga

SEQ ID NO: 323771 - RNA, 23 nt, Human
cugcaaccucugccucccaggcu

SEQ ID NO: 323772 - RNA, 24 nt, Human
cugcaaccucugccucccaggcuc

SEQ ID NO: 323773 - RNA, 22 nt, Human
cuugcuguguugcccaggcugg

SEQ ID NO: 323774 - RNA, 19 nt, Human
gacaggguuuugccauauu

SEQ ID NO: 323775 - RNA, 22 nt, Human
gacucaagugauuugcccaucu

SEQ ID NO: 323776 - RNA, 19 nt, Human
gaguagcugagauuauagg

SEQ ID NO: 323777 - RNA, 24 nt, Human
gauuauaggugugcgccaccaugc

SEQ ID NO: 323778 - RNA, 24 nt, Human
gauuuuauauuuuuaguagagaca

SEQ ID NO: 323779 - RNA, 23 nt, Human
gcgauucucgugccucagccucc

SEQ ID NO: 323780 - RNA, 20 nt, Human
ggaaaaaggaccaaaaagaa

SEQ ID NO: 323781 - RNA, 18 nt, Human
ggcuggucuugaacuccu

SEQ ID NO: 323782 - RNA, 23 nt, Human
gugcaguggcaagaucucagcuc

SEQ ID NO: 323783 - RNA, 22 nt, Human
gugccucagccuccugaguagc

SEQ ID NO: 323784 - RNA, 26 nt, Human
guuuuuauuuuauucauuuauuuuug

SEQ ID NO: 323785 - RNA, 20 nt, Human
uagagacaggguuuugccau

SEQ ID NO: 323786 - RNA, 21 nt, Human
uagccaccgcgcccagcccug

SEQ ID NO: 323787 - RNA, 25 nt, Human
uaggugugcgccaccaugccuggcu

SEQ ID NO: 323788 - RNA, 19 nt, Human
uaguagagacaggguuuug

SEQ ID NO: 323789 - RNA, 24 nt, Human
uaguagagacaggguuuugccaua

SEQ ID NO: 323790 - RNA, 20 nt, Human
uauuuuauucauuuauuuuu

SEQ ID NO: 323791 - RNA, 19 nt, Human
ucaaaugccuuaggagaag

SEQ ID NO: 323792 - RNA, 19 nt, Human
ucacugcaaccucugccuc

SEQ ID NO: 323793 - RNA, 24 nt, Human
ucacugcaaccucugccucccagg

SEQ ID NO: 323794 - RNA, 25 nt, Human
ucacugcaaccucugccucccaggc

SEQ ID NO: 323795 - RNA, 27 nt, Human
ucagcucacugcaaccucugccuccca

SEQ ID NO: 323796 - RNA, 24 nt, Human
ucccaaagugcugggaauuauagg

SEQ ID NO: 323797 - RNA, 21 nt, Human
ucccaggcucaagcgauucuc

SEQ ID NO: 323798 - RNA, 24 nt, Human
ucccaggcucaagcgauucucgug

SEQ ID NO: 323799 - RNA, 18 nt, Human
uccucuacaugagcucua

SEQ ID NO: 323800 - RNA, 24 nt, Human
uccugaguagcugagauuauaggu

SEQ ID NO: 323801 - RNA, 18 nt, Human
ucuugcuguguugcccag

SEQ ID NO: 323802 - RNA, 19 nt, Human
ucuugcuguguugcccagg

SEQ ID NO: 323803 - RNA, 23 nt, Human
ucuugcuguguugcccaggcugg

SEQ ID NO: 323804 - RNA, 24 nt, Human
ucuugcuguguugcccaggcuggu

SEQ ID NO: 323805 - RNA, 25 nt, Human
ucuugcuguguugcccaggcuggug

SEQ ID NO: 323806 - RNA, 20 nt, Human
ucuuggccucccaaagugcu

SEQ ID NO: 323807 - RNA, 22 nt, Human
ugaagagaauccagaaauaauu

SEQ ID NO: 323808 - RNA, 22 nt, Human
ugagacagagucuugcuguguu

SEQ ID NO: 323809 - RNA, 23 nt, Human
ugagacagagucuugcuguguug

SEQ ID NO: 323810 - RNA, 21 nt, Human
ugagauuauaggugugcgcca

SEQ ID NO: 323811 - RNA, 22 nt, Human
ugagauuauaggugugcgccac

SEQ ID NO: 323812 - RNA, 24 nt, Human
ugagauuauaggugugcgccacca

SEQ ID NO: 323813 - RNA, 25 nt, Human
ugagauuauaggugugcgccaccau

SEQ ID NO: 323814 - RNA, 19 nt, Human
ugagggaagaaaaaaacuu

SEQ ID NO: 323815 - RNA, 25 nt, Human
ugaguagcugagauuauuacuacag

SEQ ID NO: 323816 - RNA, 20 nt, Human
ugauaauucuuggggaaagg

SEQ ID NO: 323817 - RNA, 22 nt, Human
ugauaauucuuggggaaaggaa

SEQ ID NO: 323818 - RNA, 24 nt, Human
ugauuugcccaucuuggccuccca

SEQ ID NO: 323819 - RNA, 24 nt, Human
ugccauauuggccaggcuggucuu

SEQ ID NO: 323820 - RNA, 27 nt, Human
ugccauauuggccaggcuggucuugaa

SEQ ID NO: 323821 - RNA, 18 nt, Human
ugcccaggcuggugugca

SEQ ID NO: 323822 - RNA, 24 nt, Human
ugccucagccuccugaguagcuga

SEQ ID NO: 323823 - RNA, 21 nt, Human
ugccuuaggagaaguuuuggg

SEQ ID NO: 323824 - RNA, 21 nt, Human
ugcuguguugcccaggcuggu

SEQ ID NO: 323825 - RNA, 20 nt, Human
uggaaaaaggaccaaaaaga

SEQ ID NO: 323826 - RNA, 26 nt, Human
uggaaaaaggaccaaaaagaaaaaaa

SEQ ID NO: 323827 - RNA, 24 nt, Human
uggcaagaucucagcucacugcaa

SEQ ID NO: 323828 - RNA, 24 nt, Human
uggccaggcuggucuugaacuccu

SEQ ID NO: 323829 - RNA, 22 nt, Human
ugugcaguggcaagaucucagc

SEQ ID NO: 323830 - RNA, 23 nt, Human
ugugcaguggcaagaucucagcu

SEQ ID NO: 323831 - RNA, 24 nt, Human
uguguugcccaggcuggugugcag

SEQ ID NO: 323832 - RNA, 24 nt, Human
uuaguagagacaggguuuugccau

SEQ ID NO: 323833 - RNA, 22 nt, Human
uugagacagagucuugcugugu

SEQ ID NO: 323834 - RNA, 18 nt, Human
uugcccaggcuggugugc

SEQ ID NO: 323835 - RNA, 23 nt, Human
uuuauauuuuuaguagagacagg

SEQ ID NO: 323836 - RNA, 24 nt, Human
uuuauauuuuuaguagagacaggg

SEQ ID NO: 323837 - RNA, 19 nt, Human
uuuuauauuuuuaguagag

SEQ ID NO: 323838 - RNA, 20 nt, Human
uuuuauauuuuuaguagaga

SEQ ID NO: 323839 - RNA, 21 nt, Human
uuuuuaguagagacaggguuu

SEQ ID NO: 323840 - RNA, 24 nt, Human
uuuuuaguagagacaggguuuugc

SEQ ID NO: 323841 - RNA, 18 nt, Human
aaauaccagaaacagacc

SEQ ID NO: 323842 - RNA, 19 nt, Human
aagaacccucuagcagcac

SEQ ID NO: 323843 - RNA, 23 nt, Human
aauaccagaaacagaccccaaga

SEQ ID NO: 323844 - RNA, 19 nt, Human
agagauaaaugaaugaaga

SEQ ID NO: 323845 - RNA, 18 nt, Human
agcucuuguugggucagc

SEQ ID NO: 323846 - RNA, 21 nt, Human
caagagugaccggaggcagag

SEQ ID NO: 323847 - RNA, 26 nt, Human
cacguagcaccacagcaagagugacc

SEQ ID NO: 323848 - RNA, 24 nt, Human
cagcaagagugaccggaggcagag

SEQ ID NO: 323849 - RNA, 20 nt, Human
cauuuccccaacucacagga

SEQ ID NO: 323850 - RNA, 24 nt, Human
ccaaaauauuugguggcuucucuu

SEQ ID NO: 323851 - RNA, 20 nt, Human
ccccugaggaugccagagcu

SEQ ID NO: 323852 - RNA, 24 nt, Human
ccccugaggaugccagagcuaugg

SEQ ID NO: 323853 - RNA, 27 nt, Human
cgcaaacaccggcagcaguuggagacc

SEQ ID NO: 323854 - RNA, 20 nt, Human
gaacauaaugcaauucaugc

SEQ ID NO: 323855 - RNA, 20 nt, Human
gacuaucauuuccccaacuc

SEQ ID NO: 323856 - RNA, 23 nt, Human
gacuggcucccugccacacgccg

SEQ ID NO: 323857 - RNA, 22 nt, Human
uaagcaugucaagugaaaaaga

SEQ ID NO: 323858 - RNA, 23 nt, Human
uacaaaguaaaaaagcuauuuaa

SEQ ID NO: 323859 - RNA, 20 nt, Human
uagcagcacacugauuuagu

SEQ ID NO: 323860 - RNA, 23 nt, Human
ugaaaaagaacccucuagcagca

SEQ ID NO: 323861 - RNA, 25 nt, Human
ugaaaaagaacccucuagcagcaca

SEQ ID NO: 323862 - RNA, 18 nt, Human
ugaccggaggcagagagc

SEQ ID NO: 323863 - RNA, 20 nt, Human
ugaccggaggcagagagcuc

SEQ ID NO: 323864 - RNA, 20 nt, Human
ugaggaugccagagcuaugg

SEQ ID NO: 323865 - RNA, 20 nt, Human
ugaggaugccagagcuaugg

SEQ ID NO: 323866 - RNA, 19 nt, Human
uggcuucucuucauuuuuc

SEQ ID NO: 323867 - RNA, 21 nt, Human
uucaagaugaggaaaauucaa

SEQ ID NO: 323868 - RNA, 19 nt, Human
uuugagaucagucuccauu

SEQ ID NO: 323869 - RNA, 23 nt, Human
aaaacaaaaacaaaaacacacaa

SEQ ID NO: 323870 - RNA, 23 nt, Human
aaaacagaaagcggugugcaaga

SEQ ID NO: 323871 - RNA, 23 nt, Human
aaaaccagucccaaggaacacag

SEQ ID NO: 323872 - RNA, 22 nt, Human
aaacagcaaacauugguaaaca

SEQ ID NO: 323873 - RNA, 19 nt, Human
aaagaggccaagccuaagg

SEQ ID NO: 323874 - RNA, 19 nt, Human
aaaggagcuugcugcccuc

SEQ ID NO: 323875 - RNA, 21 nt, Human
aaaggagcuugcugcccucug

SEQ ID NO: 323876 - RNA, 22 nt, Human
aacaaaaacaaaaacacacaaa

SEQ ID NO: 323877 - RNA, 24 nt, Human
aaccuggucaacacagggagaccc

SEQ ID NO: 323878 - RNA, 22 nt, Human
aacuuucuaugaagcucuucug

SEQ ID NO: 323879 - RNA, 21 nt, Human
aagacaaguuggaaaucccua

SEQ ID NO: 323880 - RNA, 23 nt, Human
aagcauuuucaagaggucugauc

SEQ ID NO: 323881 - RNA, 22 nt, Human
aaguccagggcaagggaagaug

SEQ ID NO: 323882 - RNA, 18 nt, Human
acacugcacuccagccug

SEQ ID NO: 323883 - RNA, 20 nt, Human
acacugcacuccagccuggg

SEQ ID NO: 323884 - RNA, 21 nt, Human
acacugcacuccagccugggu

SEQ ID NO: 323885 - RNA, 24 nt, Human
acacugcacuccagccugggugac

SEQ ID NO: 323886 - RNA, 22 nt, Human
acccugucucuacaaaaaauaa

SEQ ID NO: 323887 - RNA, 19 nt, Human
acgccccagucgaccguaa

SEQ ID NO: 323888 - RNA, 18 nt, Human
acugcacuccagccuggg

SEQ ID NO: 323889 - RNA, 21 nt, Human
acugcacuccagccuggguga

SEQ ID NO: 323890 - RNA, 23 nt, Human
acugcacuccagccugggugaca

SEQ ID NO: 323891 - RNA, 18 nt, Human
agcaaaaccagucccaag

SEQ ID NO: 323892 - RNA, 21 nt, Human
agcaaggccucagugcaaaga

SEQ ID NO: 323893 - RNA, 19 nt, Human
agcccaggaguucgagacc

SEQ ID NO: 323894 - RNA, 24 nt, Human
agccugggugacaaagcaagaccu

SEQ ID NO: 323895 - RNA, 23 nt, Human
agcuaugcaugguggugcacgcc

SEQ ID NO: 323896 - RNA, 22 nt, Human
aggaguucgagaccaaccuggu

SEQ ID NO: 323897 - RNA, 18 nt, Human
aggcaggaggacugcuug

SEQ ID NO: 323898 - RNA, 24 nt, Human
aggcaggaggacugcuugagccca

SEQ ID NO: 323899 - RNA, 19 nt, Human
agggagagaagacaaguug

SEQ ID NO: 323900 - RNA, 21 nt, Human
aguccagggcaagggaagaug

SEQ ID NO: 323901 - RNA, 24 nt, Human
aguggcucacgccugugaucccag

SEQ ID NO: 323902 - RNA, 20 nt, Human
auagcgcugaucucagggca

SEQ ID NO: 323903 - RNA, 24 nt, Human
aucacgacacugcacuccagccug

SEQ ID NO: 323904 - RNA, 19 nt, Human
auccaaccacagcaaaacc

SEQ ID NO: 323905 - RNA, 22 nt, Human
auccacagcagcaaggccucag

SEQ ID NO: 323906 - RNA, 22 nt, Human
aucccagcacuuuaggaggcca

SEQ ID NO: 323907 - RNA, 24 nt, Human
augcaugguggugcacgccugugg

SEQ ID NO: 323908 - RNA, 18 nt, Human
auggcugucaggucaaau

SEQ ID NO: 323909 - RNA, 21 nt, Human
caaaguauuggcaggaauccc

SEQ ID NO: 323910 - RNA, 20 nt, Human
caacacagggagacccuguc

SEQ ID NO: 323911 - RNA, 22 nt, Human
caacacagggagacccugucuc

SEQ ID NO: 323912 - RNA, 24 nt, Human
caacacagggagacccugucucua

SEQ ID NO: 323913 - RNA, 23 nt, Human
caaccacagcaaaaccaguccca

SEQ ID NO: 323914 - RNA, 22 nt, Human
caagaacuggggaaaugaacac

SEQ ID NO: 323915 - RNA, 22 nt, Human
cacaguacugccaccacacaga

SEQ ID NO: 323916 - RNA, 23 nt, Human
cacgccugugaucccagcacuuu

SEQ ID NO: 323917 - RNA, 23 nt, Human
cacgccuguggucccagauacuu

SEQ ID NO: 323918 - RNA, 22 nt, Human
cacuccagccugggugacaaag

SEQ ID NO: 323919 - RNA, 23 nt, Human
cacuccagccugggugacaaagc

SEQ ID NO: 323920 - RNA, 19 nt, Human
cacugcacuccagccuggg

SEQ ID NO: 323921 - RNA, 19 nt, Human
cacugcacuccagccuggg

SEQ ID NO: 323922 - RNA, 19 nt, Human
cacugcacuccagccuggg

SEQ ID NO: 323923 - RNA, 20 nt, Human
cacugcacuccagccugggu

SEQ ID NO: 323924 - RNA, 22 nt, Human
cacugcacuccagccuggguga

SEQ ID NO: 323925 - RNA, 23 nt, Human
cacugcacuccagccugggugac

SEQ ID NO: 323926 - RNA, 24 nt, Human
cacugcacuccagccugggugaca

SEQ ID NO: 323927 - RNA, 25 nt, Human
cacugcacuccagccugggugacaa

SEQ ID NO: 323928 - RNA, 22 nt, Human
cagcaaaaccagucccaaggaa

SEQ ID NO: 323929 - RNA, 21 nt, Human
cagcacuguaaaacucuuuau

SEQ ID NO: 323930 - RNA, 21 nt, Human
cagcacuuuaggaggccaagg

SEQ ID NO: 323931 - RNA, 24 nt, Human
cagcacuuuaggaggccaaggcag

SEQ ID NO: 323932 - RNA, 24 nt, Human
cagcagcaaggccucagugcaaag

SEQ ID NO: 323933 - RNA, 24 nt, Human
cagcugcugaggaagcacaguacu

SEQ ID NO: 323934 - RNA, 19 nt, Human
cauagccaggagguucaau

SEQ ID NO: 323935 - RNA, 22 nt, Human
ccagaaaacaaaaacaaaaaca

SEQ ID NO: 323936 - RNA, 27 nt, Human
ccagaaaacaaaaacaaaaacacacaa

SEQ ID NO: 323937 - RNA, 24 nt, Human
ccaggaguucgagaccaaccuggu

SEQ ID NO: 323938 - RNA, 21 nt, Human
ccagggagauuacacuggugg

SEQ ID NO: 323939 - RNA, 25 nt, Human
ccaguaccugccagaauaacuuccg

SEQ ID NO: 323940 - RNA, 18 nt, Human
ccccgggccgcgacucca

SEQ ID NO: 323941 - RNA, 21 nt, Human
cccgggccgcgacuccagaga

SEQ ID NO: 323942 - RNA, 21 nt, Human
cccuguucuccaaagggagcu

SEQ ID NO: 323943 - RNA, 20 nt, Human
ccgcccacuugcccacaauc

SEQ ID NO: 323944 - RNA, 21 nt, Human
ccguaacuacggcuccgccca

SEQ ID NO: 323945 - RNA, 22 nt, Human
ccuccaggcuuucccuguucuc

SEQ ID NO: 323946 - RNA, 24 nt, Human
ccugggaagccuccaggcuuuccc

SEQ ID NO: 323947 - RNA, 22 nt, Human
ccuggucaacacagggagaccc

SEQ ID NO: 323948 - RNA, 22 nt, Human
ccuguggucccagauacuuggg

SEQ ID NO: 323949 - RNA, 19 nt, Human
cgagaccaaccuggucaac

SEQ ID NO: 323950 - RNA, 18 nt, Human
cgccugugaucccagcac

SEQ ID NO: 323951 - RNA, 22 nt, Human
cgccugugaucccagcacuuua

SEQ ID NO: 323952 - RNA, 23 nt, Human
cgcugggccaccugggaagccuc

SEQ ID NO: 323953 - RNA, 20 nt, Human
cggcugaggcagugcccaca

SEQ ID NO: 323954 - RNA, 22 nt, Human
cgugaaccccgggccgcgacuc

SEQ ID NO: 323955 - RNA, 25 nt, Human
cguggaauuagaacaugcaauuuaa

SEQ ID NO: 323956 - RNA, 22 nt, Human
cucacgccugugaucccagcac

SEQ ID NO: 323957 - RNA, 24 nt, Human
cucacgccugugaucccagcacuu

SEQ ID NO: 323958 - RNA, 20 nt, Human
cuccaaagggagcuacuaug

SEQ ID NO: 323959 - RNA, 22 nt, Human
cuccagaaaacaaaaacaaaaa

SEQ ID NO: 323960 - RNA, 18 nt, Human
cuccagagacccggcucc

SEQ ID NO: 323961 - RNA, 18 nt, Human
cucguuccuauccauacc

SEQ ID NO: 323962 - RNA, 21 nt, Human
cugcuugagcccaggaguucg

SEQ ID NO: 323963 - RNA, 23 nt, Human
cugcuugagcccaggaguucgag

SEQ ID NO: 323964 - RNA, 20 nt, Human
gaaaacaaaaacaaaaacac

SEQ ID NO: 323965 - RNA, 22 nt, Human
gagaaccuguggcuggaagcac

SEQ ID NO: 323966 - RNA, 25 nt, Human
gagaagacaaguuggaaaucccuag

SEQ ID NO: 323967 - RNA, 19 nt, Human
gagacaaaaaauaaaaggg

SEQ ID NO: 323968 - RNA, 19 nt, Human
gagagaagacaaguuggaa

SEQ ID NO: 323969 - RNA, 20 nt, Human
gagagaagacaaguuggaaa

SEQ ID NO: 323970 - RNA, 22 nt, Human
gaggaagcacaguacuuaacca

SEQ ID NO: 323971 - RNA, 24 nt, Human
gcaugguggugcacgccugugguc

SEQ ID NO: 323972 - RNA, 25 nt, Human
gccuaaguuuuuaagaaugccuuaa

SEQ ID NO: 323973 - RNA, 20 nt, Human
gcgcaguggcucacgccugu

SEQ ID NO: 323974 - RNA, 19 nt, Human
gcugggcgcaguggcucac

SEQ ID NO: 323975 - RNA, 21 nt, Human
ggcgcaguggcucacgccugu

SEQ ID NO: 323976 - RNA, 20 nt, Human
gggaauuccuauuuagggcc

SEQ ID NO: 323977 - RNA, 19 nt, Human
guggaauuagaacaugcaa

SEQ ID NO: 323978 - RNA, 23 nt, Human
guggugcacgccuguggucccag

SEQ ID NO: 323979 - RNA, 18 nt, Human
uaaaaagucaaacuagca

SEQ ID NO: 323980 - RNA, 21 nt, Human
uaaaagggaggaagaauaagc

SEQ ID NO: 323981 - RNA, 20 nt, Human
uaacuuccgcccacuugccc

SEQ ID NO: 323982 - RNA, 18 nt, Human
ucacaccaguaccugcca

SEQ ID NO: 323983 - RNA, 22 nt, Human
ucacgccugugaucccagcacu

SEQ ID NO: 323984 - RNA, 23 nt, Human
uccagaaaacaaaaacaaaaaca

SEQ ID NO: 323985 - RNA, 24 nt, Human
uccagaaaacaaaaacaaaaacac

SEQ ID NO: 323986 - RNA, 24 nt, Human
uccagccugggugacaaagcaaga

SEQ ID NO: 323987 - RNA, 20 nt, Human
ucccuagacccaaguccagg

SEQ ID NO: 323988 - RNA, 19 nt, Human
ucccugagaaccauuuuac

SEQ ID NO: 323989 - RNA, 21 nt, Human
uccguauccacagcagcaagg

SEQ ID NO: 323990 - RNA, 20 nt, Human
ucuccagaaaacaaaaacaa

SEQ ID NO: 323991 - RNA, 24 nt, Human
ucuccagaaaacaaaaacaaaaac

SEQ ID NO: 323992 - RNA, 21 nt, Human
ugaaaggagcuugcugcccuc

SEQ ID NO: 323993 - RNA, 18 nt, Human
ugaacacugauaccaugg

SEQ ID NO: 323994 - RNA, 23 nt, Human
ugaaccccgggccgcgacuccag

SEQ ID NO: 323995 - RNA, 20 nt, Human
ugacaaagcaagaccuuguc

SEQ ID NO: 323996 - RNA, 22 nt, Human
ugagaaccuguggcuggaagca

SEQ ID NO: 323997 - RNA, 23 nt, Human
ugagcccaggaguucgagaccaa

SEQ ID NO: 323998 - RNA, 20 nt, Human
ugagcuuugguuugggaggg

SEQ ID NO: 323999 - RNA, 21 nt, Human
ugaggcagugcccacagcguc

SEQ ID NO: 324000 - RNA, 20 nt, Human
uggaaaauacguggaauuag

SEQ ID NO: 324001 - RNA, 24 nt, Human
uggcucacgccugugaucccagca

SEQ ID NO: 324002 - RNA, 18 nt, Human
uggcuggaagcacacagc

SEQ ID NO: 324003 - RNA, 21 nt, Human
ugggccacaguacugccacca

SEQ ID NO: 324004 - RNA, 20 nt, Human
ugggcugggcgcaguggcuc

SEQ ID NO: 324005 - RNA, 18 nt, Human
uggugcacgccugugguc

SEQ ID NO: 324006 - RNA, 21 nt, Human
uggugcacgccugugguccca

SEQ ID NO: 324007 - RNA, 19 nt, Human
uggugggccacaguacugc

SEQ ID NO: 324008 - RNA, 24 nt, Human
ugguggugcacgccugugguccca

SEQ ID NO: 324009 - RNA, 25 nt, Human
ugucuccagaaaacaaaaacaaaaa

SEQ ID NO: 324010 - RNA, 22 nt, Human
ugugaaagaggccaagccuaag

SEQ ID NO: 324011 - RNA, 18 nt, Human
uguuuugcccaacuuucu

SEQ ID NO: 324012 - RNA, 20 nt, Human
uuagaacaugcaauuuaaac

SEQ ID NO: 324013 - RNA, 24 nt, Human
uuagcuaugcaugguggugcacgc

SEQ ID NO: 324014 - RNA, 20 nt, Human
uuggaaaucccuagacccaa

SEQ ID NO: 324015 - RNA, 21 nt, Human
uuuuuuuuuuuuuuuaacugg

SEQ ID NO: 324016 - RNA, 24 nt, Human
uuuuuuuuuuuuuuuuuaacuggg

SEQ ID NO: 324017 - RNA, 24 nt, Human
aguuuggggaaaaucuggaguccc

SEQ ID NO: 324018 - RNA, 18 nt, Human
cacagaaugggagagagg

SEQ ID NO: 324019 - RNA, 18 nt, Human
ccgcacaaggaguggagu

SEQ ID NO: 324020 - RNA, 21 nt, Human
ccugagaggcaaggugaggga

SEQ ID NO: 324021 - RNA, 22 nt, Human
gaaaaaucucaacagaagcaag

SEQ ID NO: 324022 - RNA, 18 nt, Human
ugcuguacucaucacaga

SEQ ID NO: 324023 - RNA, 23 nt, Human
cccgggcuuucgcuuucacuccc

SEQ ID NO: 324024 - RNA, 20 nt, Human
ccgggcuuucgcuuucacuc

SEQ ID NO: 324025 - RNA, 20 nt, Human
aggcgcuguggacuccaggg

SEQ ID NO: 324026 - RNA, 24 nt, Human
cccuugcuggcuuacucacugcuc

SEQ ID NO: 324027 - RNA, 23 nt, Human
cgaccgcccuugcuggcuuacuc

SEQ ID NO: 324028 - RNA, 18 nt, Human
cucgcucgcucccucccu

SEQ ID NO: 324029 - RNA, 20 nt, Human
cucgcucgcucccucccucu

SEQ ID NO: 324030 - RNA, 23 nt, Human
gcucccucccucugugccugucc

SEQ ID NO: 324031 - RNA, 23 nt, Human
gcuguggacuccagggagggggc

SEQ ID NO: 324032 - RNA, 20 nt, Human
uccagggagggggccggagg

SEQ ID NO: 324033 - RNA, 22 nt, Human
ugaccucgggacccgaccgccc

SEQ ID NO: 324034 - RNA, 19 nt, Human
aaacaaaccaaucuuugag

SEQ ID NO: 324035 - RNA, 18 nt, Human
acauuuccuccaaaucca

SEQ ID NO: 324036 - RNA, 23 nt, Human
acuacaguuaaaaacaaacaaac

SEQ ID NO: 324037 - RNA, 20 nt, Human
agcuaggaauauacauaaag

SEQ ID NO: 324038 - RNA, 18 nt, Human
auaccaaagggaaaaaaa

SEQ ID NO: 324039 - RNA, 21 nt, Human
auaccaaagggaaaaaaacca

SEQ ID NO: 324040 - RNA, 18 nt, Human
auaccauuuggcguuauc

SEQ ID NO: 324041 - RNA, 19 nt, Human
aucacauuuccuccaaauc

SEQ ID NO: 324042 - RNA, 22 nt, Human
aucacauuuccuccaaauccaa

SEQ ID NO: 324043 - RNA, 23 nt, Human
caaacaaaccaaucuuugaggaa

SEQ ID NO: 324044 - RNA, 20 nt, Human
caaagggaaaaaaaccaaua

SEQ ID NO: 324045 - RNA, 21 nt, Human
cagcucuacaaaaucagugau

SEQ ID NO: 324046 - RNA, 21 nt, Human
cauaaagaauucagauuacaa

SEQ ID NO: 324047 - RNA, 19 nt, Human
ccaaagggaaaaaaaccaa

SEQ ID NO: 324048 - RNA, 22 nt, Human
ccaaauccaaugaaagcauccc

SEQ ID NO: 324049 - RNA, 21 nt, Human
ccauuuggcguuauccuugac

SEQ ID NO: 324050 - RNA, 27 nt, Human
cuguaugacaauggauguuauucuucc

SEQ ID NO: 324051 - RNA, 26 nt, Human
uaaaaacaaacaaaccaaucuuugag

SEQ ID NO: 324052 - RNA, 18 nt, Human
uaauacuggaacuacagu

SEQ ID NO: 324053 - RNA, 23 nt, Human
uacuggaacuacaguuaaaaaca

SEQ ID NO: 324054 - RNA, 21 nt, Human
ucagugauauaccauuuggcg

SEQ ID NO: 324055 - RNA, 19 nt, Human
uccaggaaaucgauaguga

SEQ ID NO: 324056 - RNA, 19 nt, Human
uccuugacuuguugccuga

SEQ ID NO: 324057 - RNA, 23 nt, Human
ugacauaccaaagggaaaaaaac

SEQ ID NO: 324058 - RNA, 26 nt, Human
ugacauaccaaagggaaaaaaaccaa

SEQ ID NO: 324059 - RNA, 23 nt, Human
ugacucuccacucuuaaaacacu

SEQ ID NO: 324060 - RNA, 33 nt, Human
uguuauucuuccgguucucccagcagcucuaau

SEQ ID NO: 324061 - RNA, 24 nt, Human
uguuuggagcuguaugacaaugga

SEQ ID NO: 324062 - RNA, 18 nt, Human
uuaaaacacuuuguauga

SEQ ID NO: 324063 - RNA, 24 nt, Human
aaagugcugggauuacagguguga

SEQ ID NO: 324064 - RNA, 20 nt, Human
aaggggcucauuugaguucu

SEQ ID NO: 324065 - RNA, 18 nt, Human
aagugcugggauuacagg

SEQ ID NO: 324066 - RNA, 19 nt, Human
aagugcugggauuacaggu

SEQ ID NO: 324067 - RNA, 26 nt, Human
aagugcugggauuacaggugugagcc

SEQ ID NO: 324068 - RNA, 23 nt, Human
acaauguuggccaggauggucuc

SEQ ID NO: 324069 - RNA, 19 nt, Human
acuacaggcgugugccacc

SEQ ID NO: 324070 - RNA, 24 nt, Human
agcgauucuccugccucagccucc

SEQ ID NO: 324071 - RNA, 24 nt, Human
aggcgugugccaccaugcccggcu

SEQ ID NO: 324072 - RNA, 19 nt, Human
aguagcugggacuacaggc

SEQ ID NO: 324073 - RNA, 23 nt, Human
aguagcugggacuacaggcgugu

SEQ ID NO: 324074 - RNA, 20 nt, Human
agugcaauggugcaaucuag

SEQ ID NO: 324075 - RNA, 22 nt, Human
aucccuucuucccccagcucag

SEQ ID NO: 324076 - RNA, 24 nt, Human
aucucgcucuguugccaggcuaga

SEQ ID NO: 324077 - RNA, 24 nt, Human
augaucugcccaccucggccuccc

SEQ ID NO: 324078 - RNA, 24 nt, Human
augggguuuuacaauguuggccag

SEQ ID NO: 324079 - RNA, 25 nt, Human
auuuuuguauguuuuaguagagaug

SEQ ID NO: 324080 - RNA, 24 nt, Human
caaagugcugggauuacaggugug

SEQ ID NO: 324081 - RNA, 24 nt, Human
caaaucuaauggcccaccagugcc

SEQ ID NO: 324082 - RNA, 24 nt, Human
caacagccuggcucugccaucauc

SEQ ID NO: 324083 - RNA, 22 nt, Human
caagcgauucuccugccucagc

SEQ ID NO: 324084 - RNA, 24 nt, Human
caccaugcccggcuaauuuuugua

SEQ ID NO: 324085 - RNA, 24 nt, Human
caccucggccucccaaagugcugg

SEQ ID NO: 324086 - RNA, 18 nt, Human
cacugcaaccucugccuc

SEQ ID NO: 324087 - RNA, 21 nt, Human
cacugcaaccucugccuccca

SEQ ID NO: 324088 - RNA, 20 nt, Human
cagccuccugaguagcuggg

SEQ ID NO: 324089 - RNA, 28 nt, Human
caguagauaucccuucuucccccagcuc

SEQ ID NO: 324090 - RNA, 21 nt, Human
ccaaagugcugggauuacagg

SEQ ID NO: 324091 - RNA, 21 nt, Human
ccaaagugcugggauuacagg

SEQ ID NO: 324092 - RNA, 24 nt, Human
ccaaagugcugggauuacaggugu

SEQ ID NO: 324093 - RNA, 21 nt, Human
ccaacagccuggcucugccau

SEQ ID NO: 324094 - RNA, 19 nt, Human
ccagugcccacagaggugg

SEQ ID NO: 324095 - RNA, 19 nt, Human
cccacaggcggaugaaggg

SEQ ID NO: 324096 - RNA, 19 nt, Human
cccaccagugcccacagag

SEQ ID NO: 324097 - RNA, 18 nt, Human
cccagaccacaguagaua

SEQ ID NO: 324098 - RNA, 21 nt, Human
cccagcucaguccaugauguu

SEQ ID NO: 324099 - RNA, 20 nt, Human
cccagguucaagcgauucuc

SEQ ID NO: 324100 - RNA, 23 nt, Human
cccagguucaagcgauucuccug

SEQ ID NO: 324101 - RNA, 22 nt, Human
ccccaaggucugcaccuggccc

SEQ ID NO: 324102 - RNA, 24 nt, Human
ccucccagguucaagcgauucucc

SEQ ID NO: 324103 - RNA, 23 nt, Human
ccugaguagcugggacuacaggc

SEQ ID NO: 324104 - RNA, 24 nt, Human
ccugaguagcugggacuacaggcg

SEQ ID NO: 324105 - RNA, 20 nt, Human
ccugcccaggugagguagcc

SEQ ID NO: 324106 - RNA, 23 nt, Human
ccugccucagccuccugaguagc

SEQ ID NO: 324107 - RNA, 24 nt, Human
ccugccucagccuccugaguagcu

SEQ ID NO: 324108 - RNA, 21 nt, Human
cgcucuguugccaggcuagag

SEQ ID NO: 324109 - RNA, 24 nt, Human
cucagccuccugaguagcugggac

SEQ ID NO: 324110 - RNA, 23 nt, Human
cugcaaccucugccucccagguu

SEQ ID NO: 324111 - RNA, 24 nt, Human
cugcaaccucugccucccagguuc

SEQ ID NO: 324112 - RNA, 19 nt, Human
cugcgcccacucccccaaa

SEQ ID NO: 324113 - RNA, 23 nt, Human
cugcgcccacucccccaaagcuu

SEQ ID NO: 324114 - RNA, 20 nt, Human
gaaucucgcucuguugccag

SEQ ID NO: 324115 - RNA, 21 nt, Human
gacccaugaucugcccaccuc

SEQ ID NO: 324116 - RNA, 24 nt, Human
gacuacaggcgugugccaccaugc

SEQ ID NO: 324117 - RNA, 25 nt, Human
gaguagcugggacuacaggcgugug

SEQ ID NO: 324118 - RNA, 18 nt, Human
gauuacaggugugagcca

SEQ ID NO: 324119 - RNA, 22 nt, Human
gauuacaggugugagccacugc

SEQ ID NO: 324120 - RNA, 22 nt, Human
gauuacaggugugagccacugc

SEQ ID NO: 324121 - RNA, 22 nt, Human
gcaaccucugccucccagguuc

SEQ ID NO: 324122 - RNA, 22 nt, Human
gcccacagagguggugcccaga

SEQ ID NO: 324123 - RNA, 21 nt, Human
gcccacucccccaaagcuuua

SEQ ID NO: 324124 - RNA, 23 nt, Human
gcgauucuccugccucagccucc

SEQ ID NO: 324125 - RNA, 24 nt, Human
gcuagagugcaauggugcaaucua

SEQ ID NO: 324126 - RNA, 24 nt, Human
ggacuacaggcgugugccaccaug

SEQ ID NO: 324127 - RNA, 21 nt, Human
ggagaagacuucaggccugga

SEQ ID NO: 324128 - RNA, 18 nt, Human
gggguuuuacaauguugg

SEQ ID NO: 324129 - RNA, 22 nt, Human
gggguuuuacaauguuggccag

SEQ ID NO: 324130 - RNA, 22 nt, Human
ggguuuuacaauguuggccagg

SEQ ID NO: 324131 - RNA, 23 nt, Human
gugugagccacugcgcccacucc

SEQ ID NO: 324132 - RNA, 18 nt, Human
guucauggaggagaagac

SEQ ID NO: 324133 - RNA, 24 nt, Human
guuuuaguagagaugggguuuuac

SEQ ID NO: 324134 - RNA, 21 nt, Human
uaaagucuucccccaaggucu

SEQ ID NO: 324135 - RNA, 25 nt, Human
uaauuuuuguauguuuuaguagaga

SEQ ID NO: 324136 - RNA, 24 nt, Human
uacaauguuggccaggauggucuc

SEQ ID NO: 324137 - RNA, 19 nt, Human
uacaggugugagccacugc

SEQ ID NO: 324138 - RNA, 24 nt, Human
uacaggugugagccacugcgccca

SEQ ID NO: 324139 - RNA, 21 nt, Human
uaguagagaugggguuuuaca

SEQ ID NO: 324140 - RNA, 24 nt, Human
uaguagagaugggguuuuacaaug

SEQ ID NO: 324141 - RNA, 19 nt, Human
ucacugcaaccucugccuc

SEQ ID NO: 324142 - RNA, 23 nt, Human
ucacugcaaccucugccucccag

SEQ ID NO: 324143 - RNA, 24 nt, Human
ucacugcaaccucugccucccagg

SEQ ID NO: 324144 - RNA, 25 nt, Human
ucacugcaaccucugccucccaggu

SEQ ID NO: 324145 - RNA, 23 nt, Human
ucagccuccugaguagcugggac

SEQ ID NO: 324146 - RNA, 22 nt, Human
ucagucacaguuacuguaguau

SEQ ID NO: 324147 - RNA, 20 nt, Human
ucauggaggagaagacuuca

SEQ ID NO: 324148 - RNA, 23 nt, Human
ucccaaagugcugggauuacagg

SEQ ID NO: 324149 - RNA, 21 nt, Human
ucccagguucaagcgauucuc

SEQ ID NO: 324150 - RNA, 24 nt, Human
ucccagguucaagcgauucuccug

SEQ ID NO: 324151 - RNA, 20 nt, Human
ucccccagcucaguccauga

SEQ ID NO: 324152 - RNA, 24 nt, Human
uccugaguagcugggacuacaggc

SEQ ID NO: 324153 - RNA, 22 nt, Human
uccugguggugccuguagcagg

SEQ ID NO: 324154 - RNA, 18 nt, Human
ucggccucccaaagugcu

SEQ ID NO: 324155 - RNA, 24 nt, Human
ucuccugccucagccuccugagua

SEQ ID NO: 324156 - RNA, 20 nt, Human
ucucgcucuguugccaggcu

SEQ ID NO: 324157 - RNA, 22 nt, Human
ucucgcucuguugccaggcuag

SEQ ID NO: 324158 - RNA, 23 nt, Human
ucucgcucuguugccaggcuaga

SEQ ID NO: 324159 - RNA, 25 nt, Human
ucugcaccuggcccugacauuccuu

SEQ ID NO: 324160 - RNA, 18 nt, Human
ucugccaucaucccugcc

SEQ ID NO: 324161 - RNA, 23 nt, Human
ucuguugccaggcuagagugcaa

SEQ ID NO: 324162 - RNA, 22 nt, Human
ugagauggaaucucgcucuguu

SEQ ID NO: 324163 - RNA, 25 nt, Human
ugaguucuggauuuuccaacagccu

SEQ ID NO: 324164 - RNA, 24 nt, Human
ugaucugcccaccucggccuccca

SEQ ID NO: 324165 - RNA, 24 nt, Human
ugcccagaccacaguagauauccc

SEQ ID NO: 324166 - RNA, 18 nt, Human
ugccccaucggggagaac

SEQ ID NO: 324167 - RNA, 25 nt, Human
ugcccggcuaauuuuuguauguuuu

SEQ ID NO: 324168 - RNA, 24 nt, Human
ugccucagccuccugaguagcugg

SEQ ID NO: 324169 - RNA, 24 nt, Human
ugcugggauuacaggugugagcca

SEQ ID NO: 324170 - RNA, 18 nt, Human
uggaaucucgcucuguug

SEQ ID NO: 324171 - RNA, 23 nt, Human
uggaaugaucagcugguccuggu

SEQ ID NO: 324172 - RNA, 23 nt, Human
uggaggagaagacuucaggccug

SEQ ID NO: 324173 - RNA, 22 nt, Human
uggauuuuccaacagccuggcu

SEQ ID NO: 324174 - RNA, 24 nt, Human
uggccaggauggucucgaucucuu

SEQ ID NO: 324175 - RNA, 18 nt, Human
ugggacuacaggcgugug

SEQ ID NO: 324176 - RNA, 21 nt, Human
ugggacuacaggcgugugcca

SEQ ID NO: 324177 - RNA, 22 nt, Human
ugggacuacaggcgugugccac

SEQ ID NO: 324178 - RNA, 24 nt, Human
ugggacuacaggcgugugccacca

SEQ ID NO: 324179 - RNA, 25 nt, Human
ugggacuacaggcgugugccaccau

SEQ ID NO: 324180 - RNA, 18 nt, Human
ugggauuacaggugugag

SEQ ID NO: 324181 - RNA, 19 nt, Human
ugggauuacaggugugagc

SEQ ID NO: 324182 - RNA, 21 nt, Human
ugggauuacaggugugagcca

SEQ ID NO: 324183 - RNA, 22 nt, Human
ugggauuacaggugugagccac

SEQ ID NO: 324184 - RNA, 22 nt, Human
ugggauuacaggugugagccac

SEQ ID NO: 324185 - RNA, 24 nt, Human
ugggauuacaggugugagccacug

SEQ ID NO: 324186 - RNA, 24 nt, Human
ugggguuuuacaauguuggccagg

SEQ ID NO: 324187 - RNA, 18 nt, Human
ugguuuaaagucuucccc

SEQ ID NO: 324188 - RNA, 24 nt, Human
ugguuuaaagucuucccccaaggu

SEQ ID NO: 324189 - RNA, 18 nt, Human
uuaguagagaugggguuu

SEQ ID NO: 324190 - RNA, 21 nt, Human
uuaguagagaugggguuuuac

SEQ ID NO: 324191 - RNA, 24 nt, Human
uuaguagagaugggguuuuacaau

SEQ ID NO: 324192 - RNA, 21 nt, Human
uucaagcgauucuccugccuc

SEQ ID NO: 324193 - RNA, 23 nt, Human
uucaagcgauucuccugccucag

SEQ ID NO: 324194 - RNA, 24 nt, Human
uucaagcgauucuccugccucagc

SEQ ID NO: 324195 - RNA, 21 nt, Human
uuuuuguauguuuuaguagag

SEQ ID NO: 324196 - RNA, 25 nt, Human
uuuuuuuuuuuugagauggaaucuc

SEQ ID NO: 324197 - RNA, 22 nt, Human
uuuuuuuuuuuuuugagaugga

SEQ ID NO: 324198 - RNA, 23 nt, Human
aaaaaaccgcgccgccgccccuc

SEQ ID NO: 324199 - RNA, 20 nt, Human
aaaaaauaaaaucucugguc

SEQ ID NO: 324200 - RNA, 21 nt, Human
aaaaaccgcgccgccgccccu

SEQ ID NO: 324201 - RNA, 25 nt, Human
aaacugauuucucuuuaaaaaaaua

SEQ ID NO: 324202 - RNA, 19 nt, Human
aaaggggauccuaggagag

SEQ ID NO: 324203 - RNA, 19 nt, Human
aaccgcgccgccgccccuc

SEQ ID NO: 324204 - RNA, 21 nt, Human
aaccugccucuacagcgucca

SEQ ID NO: 324205 - RNA, 21 nt, Human
aauaccacaaggaaguuuaga

SEQ ID NO: 324206 - RNA, 21 nt, Human
acuggccaaccugccucuaca

SEQ ID NO: 324207 - RNA, 20 nt, Human
agaaagagcacagagaagac

SEQ ID NO: 324208 - RNA, 21 nt, Human
agaagggaaggcccugggggc

SEQ ID NO: 324209 - RNA, 26 nt, Human
agaagggaaggcccugggggcggggu

SEQ ID NO: 324210 - RNA, 24 nt, Human
agacuggccaaccugccucuacag

SEQ ID NO: 324211 - RNA, 20 nt, Human
agagcacagagaagacagga

SEQ ID NO: 324212 - RNA, 18 nt, Human
agagcccccgggacagga

SEQ ID NO: 324213 - RNA, 19 nt, Human
agcacagagaagacaggag

SEQ ID NO: 324214 - RNA, 20 nt, Human
agcaucagaggcaggcaaaa

SEQ ID NO: 324215 - RNA, 21 nt, Human
agcgcccgccuuccggguccc

SEQ ID NO: 324216 - RNA, 22 nt, Human
agcuggagcagcggggagcccg

SEQ ID NO: 324217 - RNA, 19 nt, Human
aggaagaaaaaacccugaa

SEQ ID NO: 324218 - RNA, 26 nt, Human
aggcaaaacacagaaaugaggggacc

SEQ ID NO: 324219 - RNA, 27 nt, Human
aggcaaaacacagaaaugaggggaccc

SEQ ID NO: 324220 - RNA, 23 nt, Human
aggcaaccggaggcgaugccaga

SEQ ID NO: 324221 - RNA, 24 nt, Human
aggcaaccggaggcgaugccagag

SEQ ID NO: 324222 - RNA, 20 nt, Human
aggcaggcaaaacacagaaa

SEQ ID NO: 324223 - RNA, 25 nt, Human
aggccccaccaaggcauggccccga

SEQ ID NO: 324224 - RNA, 22 nt, Human
aggcgccggaauagcaggaacc

SEQ ID NO: 324225 - RNA, 22 nt, Human
agggggcccggccgugggggcc

SEQ ID NO: 324226 - RNA, 19 nt, Human
auuuggucaacuggaaaua

SEQ ID NO: 324227 - RNA, 23 nt, Human
caacuggaaauauugcuaggcac

SEQ ID NO: 324228 - RNA, 24 nt, Human
cacagaaaugagacuuugguccaa

SEQ ID NO: 324229 - RNA, 20 nt, Human
caccccuuggguccccagga

SEQ ID NO: 324230 - RNA, 21 nt, Human
caccugcaggccccacgcccg

SEQ ID NO: 324231 - RNA, 21 nt, Human
cagcauacaagguaauaccac

SEQ ID NO: 324232 - RNA, 21 nt, Human
cagcggggagcccgccugggg

SEQ ID NO: 324233 - RNA, 21 nt, Human
caggaaggcagguuuuuuaag

SEQ ID NO: 324234 - RNA, 23 nt, Human
caggccccaccaaggcauggccc

SEQ ID NO: 324235 - RNA, 20 nt, Human
cagggcuagacaagggagga

SEQ ID NO: 324236 - RNA, 19 nt, Human
cauggccccgagggucugg

SEQ ID NO: 324237 - RNA, 20 nt, Human
cccacgcccgacacaggccc

SEQ ID NO: 324238 - RNA, 19 nt, Human
cccagcaucagaggcaggc

SEQ ID NO: 324239 - RNA, 21 nt, Human
ccccaccccuuggguccccag

SEQ ID NO: 324240 - RNA, 22 nt, Human
ccccacgcccgacacaggcccc

SEQ ID NO: 324241 - RNA, 23 nt, Human
cccccugccucucucugguguga

SEQ ID NO: 324242 - RNA, 24 nt, Human
ccccgagggucuggccccgggugu

SEQ ID NO: 324243 - RNA, 18 nt, Human
ccgccgcgccccagcugc

SEQ ID NO: 324244 - RNA, 26 nt, Human
ccgccgcgccccagcugcaugauccu

SEQ ID NO: 324245 - RNA, 21 nt, Human
ccugugccugacccacugggc

SEQ ID NO: 324246 - RNA, 22 nt, Human
cgccccagcugcaugauccugc

SEQ ID NO: 324247 - RNA, 19 nt, Human
cgccccuucccugaagcuc

SEQ ID NO: 324248 - RNA, 23 nt, Human
cgccccuucccugaagcucaggg

SEQ ID NO: 324249 - RNA, 22 nt, Human
cgccgccgccccucgggucuca

SEQ ID NO: 324250 - RNA, 20 nt, Human
cgccggaauagcaggaaccg

SEQ ID NO: 324251 - RNA, 21 nt, Human
cgccggaauagcaggaaccga

SEQ ID NO: 324252 - RNA, 18 nt, Human
cgccuuccgggucccagc

SEQ ID NO: 324253 - RNA, 19 nt, Human
cggaauagcaggaaccgac

SEQ ID NO: 324254 - RNA, 24 nt, Human
cggaauagcaggaaccgacccaac

SEQ ID NO: 324255 - RNA, 23 nt, Human
cgggacaggacgcgggggcggua

SEQ ID NO: 324256 - RNA, 22 nt, Human
cggggcgcccaccugcaggccc

SEQ ID NO: 324257 - RNA, 27 nt, Human
cguggucggggcgcccaccugcaggcc

SEQ ID NO: 324258 - RNA, 20 nt, Human
cucccgcugccacagucacc

SEQ ID NO: 324259 - RNA, 27 nt, Human
cucccgcugccacagucaccaagagcc

SEQ ID NO: 324260 - RNA, 24 nt, Human
cucucuggaaacuggguccugccu

SEQ ID NO: 324261 - RNA, 21 nt, Human
cucuggaaacuggguccugcc

SEQ ID NO: 324262 - RNA, 24 nt, Human
cuuggguccccaggacaccccggg

SEQ ID NO: 324263 - RNA, 24 nt, Human
gaaaaaacccugaaguuugagagc

SEQ ID NO: 324264 - RNA, 22 nt, Human
gaacacagggcuagacaaggga

SEQ ID NO: 324265 - RNA, 20 nt, Human
gacaagggaggaguuucuca

SEQ ID NO: 324266 - RNA, 22 nt, Human
gacccaacggcuccgaguuaua

SEQ ID NO: 324267 - RNA, 20 nt, Human
gagcaaguuuucuaggcgac

SEQ ID NO: 324268 - RNA, 22 nt, Human
gagcgcccgccuuccggguccc

SEQ ID NO: 324269 - RNA, 21 nt, Human
gauggaaguugucgccagggg

SEQ ID NO: 324270 - RNA, 19 nt, Human
gcagaagggaaggcccugg

SEQ ID NO: 324271 - RNA, 21 nt, Human
gccccagcugcaugauccugc

SEQ ID NO: 324272 - RNA, 19 nt, Human
gccgcggccgccgcgcccc

SEQ ID NO: 324273 - RNA, 24 nt, Human
gccggaauagcaggaaccgaccca

SEQ ID NO: 324274 - RNA, 22 nt, Human
gccugggggcagaagggaaggc

SEQ ID NO: 324275 - RNA, 24 nt, Human
gcgaugccagaggcggcgacacgc

SEQ ID NO: 324276 - RNA, 21 nt, Human
ggaauagcaggaaccgaccca

SEQ ID NO: 324277 - RNA, 23 nt, Human
ggaauagcaggaaccgacccaac

SEQ ID NO: 324278 - RNA, 22 nt, Human
ggcagaagggaaggcccugggg

SEQ ID NO: 324279 - RNA, 19 nt, Human
ggccaggcccccugccucu

SEQ ID NO: 324280 - RNA, 21 nt, Human
ggcugggguuggggugucgca

SEQ ID NO: 324281 - RNA, 22 nt, Human
gggacaggacgcgggggcggua

SEQ ID NO: 324282 - RNA, 18 nt, Human
gggagcccgccugggggc

SEQ ID NO: 324283 - RNA, 18 nt, Human
gggcagaagggaaggccc

SEQ ID NO: 324284 - RNA, 23 nt, Human
gggcagaagggaaggcccugggg

SEQ ID NO: 324285 - RNA, 19 nt, Human
gggcccggccgugggggcc

SEQ ID NO: 324286 - RNA, 21 nt, Human
gggcccggccgugggggccug

SEQ ID NO: 324287 - RNA, 18 nt, Human
gggggcggggugaaggga

SEQ ID NO: 324288 - RNA, 22 nt, Human
ggguggguguguggcugcagga

SEQ ID NO: 324289 - RNA, 21 nt, Human
gguggguguguggcugcagga

SEQ ID NO: 324290 - RNA, 19 nt, Human
guccacagcgaacacaggg

SEQ ID NO: 324291 - RNA, 26 nt, Human
guccacagcgaacacagggcuagaca

SEQ ID NO: 324292 - RNA, 25 nt, Human
guccccuguggcuccgcggucacaa

SEQ ID NO: 324293 - RNA, 23 nt, Human
guggcugcaggaaggcagguuuu

SEQ ID NO: 324294 - RNA, 26 nt, Human
guggucggggcgcccaccugcaggcc

SEQ ID NO: 324295 - RNA, 25 nt, Human
uaaggcaacggaaugugcguggggu

SEQ ID NO: 324296 - RNA, 21 nt, Human
uacacucauaccauuguauca

SEQ ID NO: 324297 - RNA, 21 nt, Human
uacagcguccacagcgaacac

SEQ ID NO: 324298 - RNA, 19 nt, Human
uagaaagagcacagagaag

SEQ ID NO: 324299 - RNA, 22 nt, Human
uagaaagagcacagagaagaca

SEQ ID NO: 324300 - RNA, 19 nt, Human
uagaauauuuggucaacug

SEQ ID NO: 324301 - RNA, 22 nt, Human
uagacaagggaggaguuucuca

SEQ ID NO: 324302 - RNA, 22 nt, Human
uaggagagcccccgggacagga

SEQ ID NO: 324303 - RNA, 20 nt, Human
uaggcacagacgucugcaac

SEQ ID NO: 324304 - RNA, 22 nt, Human
uccaaaauuugaaggaagaaaa

SEQ ID NO: 324305 - RNA, 27 nt, Human
uccaaaauuugaaggaagaaaaaaccc

SEQ ID NO: 324306 - RNA, 24 nt, Human
uccacagcgaacacagggcuagag

SEQ ID NO: 324307 - RNA, 24 nt, Human
uccccuguggcuccgcggucacaa

SEQ ID NO: 324308 - RNA, 19 nt, Human
ucccugaagcucaggggcu

SEQ ID NO: 324309 - RNA, 24 nt, Human
uccgcagcuggagcagcggggagc

SEQ ID NO: 324310 - RNA, 18 nt, Human
ucucuggaaugauggaag

SEQ ID NO: 324311 - RNA, 18 nt, Human
ucuugcuauaaaaaguua

SEQ ID NO: 324312 - RNA, 19 nt, Human
ugauggaaguugucgccag

SEQ ID NO: 324313 - RNA, 22 nt, Human
ugauggaaguugucgccagggg

SEQ ID NO: 324314 - RNA, 21 nt, Human
ugcaacugcaaaguauauaau

SEQ ID NO: 324315 - RNA, 21 nt, Human
ugcuaaggucacuucagcugu

SEQ ID NO: 324316 - RNA, 21 nt, Human
ugggggcagaagggaaggccc

SEQ ID NO: 324317 - RNA, 27 nt, Human
ugggggcagaagggaaggcccuggggg

SEQ ID NO: 324318 - RNA, 18 nt, Human
ugucgccagggggcccgg

SEQ ID NO: 324319 - RNA, 18 nt, Human
ugugacccccccaccccu

SEQ ID NO: 324320 - RNA, 19 nt, Human
ugugacccccccaccccuu

SEQ ID NO: 324321 - RNA, 21 nt, Human
uuagaauauuuggucaacugg

SEQ ID NO: 324322 - RNA, 21 nt, Human
uuagagggcugggguuggggu

SEQ ID NO: 324323 - RNA, 21 nt, Human
uuggguccccaggacaccccg

SEQ ID NO: 324324 - RNA, 22 nt, Human
uuuaaggcacaaggaagccaag

SEQ ID NO: 324325 - RNA, 22 nt, Human
uuucucuggaaugauggaaguu

SEQ ID NO: 324326 - RNA, 22 nt, Human
uuuuuuuuuuuuuuaaggcgga

SEQ ID NO: 324327 - RNA, 23 nt, Human
uuuuuuuuuuuuuuuuuuuaagg

SEQ ID NO: 324328 - RNA, 25 nt, Human
uuuuuuuuuuuuuuuuuuuuuaagg

SEQ ID NO: 324329 - RNA, 19 nt, Human
aaaugccccuguaacuggg

SEQ ID NO: 324330 - RNA, 22 nt, Human
agacacagccucacacagugug

SEQ ID NO: 324331 - RNA, 18 nt, Human
aggcaggacccagcugca

SEQ ID NO: 324332 - RNA, 18 nt, Human
ccacucggaaggaggcag

SEQ ID NO: 324333 - RNA, 24 nt, Human
ccagcugcagaccugaguugcggc

SEQ ID NO: 324334 - RNA, 19 nt, Human
ccccuuuuggauggcagag

SEQ ID NO: 324335 - RNA, 21 nt, Human
cugaguugcggcugggggagg

SEQ ID NO: 324336 - RNA, 18 nt, Human
cugcucccuaaaugcccc

SEQ ID NO: 324337 - RNA, 23 nt, Human
gaguugcggcugggggaggaggc

SEQ ID NO: 324338 - RNA, 19 nt, Human
gcagagacacagccucaca

SEQ ID NO: 324339 - RNA, 19 nt, Human
uaaaugccccuguaacugg

SEQ ID NO: 324340 - RNA, 18 nt, Human
ucugcucccuaaaugccc

SEQ ID NO: 324341 - RNA, 19 nt, Human
ugaguugcggcugggggag

SEQ ID NO: 324342 - RNA, 18 nt, Human
ugcggcugggggaggagg

SEQ ID NO: 324343 - RNA, 19 nt, Human
uggaucaccauucucaagg

SEQ ID NO: 324344 - RNA, 18 nt, Human
uggauggcagagacacag

SEQ ID NO: 324345 - RNA, 21 nt, Human
aagacgaauaauccuccgaac

SEQ ID NO: 324346 - RNA, 25 nt, Human
acagaacacaaaaggaaaaaauucc

SEQ ID NO: 324347 - RNA, 22 nt, Human
acuggacaacaagugucaaaac

SEQ ID NO: 324348 - RNA, 30 nt, Human
agaacacaaaaggaaaaaauuccuacguag

SEQ ID NO: 324349 - RNA, 23 nt, Human
agagagauggcagaagcugcugg

SEQ ID NO: 324350 - RNA, 23 nt, Human
agaggagagaacugagcgcaguc

SEQ ID NO: 324351 - RNA, 23 nt, Human
agaguccugccacaucaccgccc

SEQ ID NO: 324352 - RNA, 20 nt, Human
aggagagagauggcagaagg

SEQ ID NO: 324353 - RNA, 19 nt, Human
aggaggagagagauggcag

SEQ ID NO: 324354 - RNA, 21 nt, Human
aggaggagagagauggcagaa

SEQ ID NO: 324355 - RNA, 19 nt, Human
aggcgacucagacccccuc

SEQ ID NO: 324356 - RNA, 20 nt, Human
augacacagcuacacaaccu

SEQ ID NO: 324357 - RNA, 21 nt, Human
augacacagcuacacaaccuu

SEQ ID NO: 324358 - RNA, 19 nt, Human
auggcagaagcugcuggug

SEQ ID NO: 324359 - RNA, 19 nt, Human
auuauuuccuuucugagca

SEQ ID NO: 324360 - RNA, 23 nt, Human
caacaagugucaaaacccugugg

SEQ ID NO: 324361 - RNA, 22 nt, Human
cacagcggcucaacucucaaac

SEQ ID NO: 324362 - RNA, 18 nt, Human
caugacacagcuacacaa

SEQ ID NO: 324363 - RNA, 18 nt, Human
caugguguuuuaucccuc

SEQ ID NO: 324364 - RNA, 22 nt, Human
cauuagaaugguagcaaaaccu

SEQ ID NO: 324365 - RNA, 21 nt, Human
ccacaucaccgcccgccggcc

SEQ ID NO: 324366 - RNA, 23 nt, Human
cccccccgcuccaggagcgggag

SEQ ID NO: 324367 - RNA, 19 nt, Human
cccccgcuccaggagcggg

SEQ ID NO: 324368 - RNA, 27 nt, Human
cccggccucgccucacagcggcucaac

SEQ ID NO: 324369 - RNA, 22 nt, Human
ccgcccgagcccacggcuucca

SEQ ID NO: 324370 - RNA, 18 nt, Human
ccgcccgccggccugccc

SEQ ID NO: 324371 - RNA, 18 nt, Human
ccgccgccgccgccgccg

SEQ ID NO: 324372 - RNA, 18 nt, Human
ccgccgccgccgccgccg

SEQ ID NO: 324373 - RNA, 18 nt, Human
ccgccgccgccgccgcgc

SEQ ID NO: 324374 - RNA, 27 nt, Human
ccgccgccgccgccgcgccucagccgg

SEQ ID NO: 324375 - RNA, 18 nt, Human
ccgccgccgccgccgugu

SEQ ID NO: 324376 - RNA, 19 nt, Human
ccgccgcgccucagccggc

SEQ ID NO: 324377 - RNA, 19 nt, Human
ccgccgcgccucagccggc

SEQ ID NO: 324378 - RNA, 20 nt, Human
ccgccgcgccucagccggcu

SEQ ID NO: 324379 - RNA, 23 nt, Human
ccgccgcggccgccgccgccgcc

SEQ ID NO: 324380 - RNA, 24 nt, Human
ccgccgcggccgccgccgccgccg

SEQ ID NO: 324381 - RNA, 26 nt, Human
ccgccgcggccgccgccgccgccgcu

SEQ ID NO: 324382 - RNA, 18 nt, Human
ccgccgcugccgccgccg

SEQ ID NO: 324383 - RNA, 20 nt, Human
ccgccgcuucucccccccgc

SEQ ID NO: 324384 - RNA, 22 nt, Human
ccgccgcuucucccccccgcuc

SEQ ID NO: 324385 - RNA, 19 nt, Human
ccgccggccugcccgcccc

SEQ ID NO: 324386 - RNA, 23 nt, Human
ccgcgccucagccggcucccggc

SEQ ID NO: 324387 - RNA, 24 nt, Human
ccgcggccgccgccgccgccgcuu

SEQ ID NO: 324388 - RNA, 21 nt, Human
ccgcuuggcucuggaccgcag

SEQ ID NO: 324389 - RNA, 21 nt, Human
ccggccugcccgcccccuccg

SEQ ID NO: 324390 - RNA, 22 nt, Human
ccucagcagccagaggccuggc

SEQ ID NO: 324391 - RNA, 20 nt, Human
ccucgccugagcccggccuc

SEQ ID NO: 324392 - RNA, 28 nt, Human
ccucgcucugccgccgcuuggcucugga

SEQ ID NO: 324393 - RNA, 25 nt, Human
ccugagcccggccucgccucacagc

SEQ ID NO: 324394 - RNA, 22 nt, Human
cgagaaacgccgccgcugccgc

SEQ ID NO: 324395 - RNA, 22 nt, Human
cgaggggaggcgggaggcgagc

SEQ ID NO: 324396 - RNA, 20 nt, Human
cgcaaacaacaagcagugac

SEQ ID NO: 324397 - RNA, 18 nt, Human
cgccgccgccgccgcgcc

SEQ ID NO: 324398 - RNA, 20 nt, Human
cgccgccgcugccgccgccg

SEQ ID NO: 324399 - RNA, 24 nt, Human
cgccgcugccgccgccgcaggccg

SEQ ID NO: 324400 - RNA, 18 nt, Human
cgccucggaagaccgagg

SEQ ID NO: 324401 - RNA, 18 nt, Human
cgcugccgccgccgcagg

SEQ ID NO: 324402 - RNA, 21 nt, Human
cggcggcagcggaauggggag

SEQ ID NO: 324403 - RNA, 21 nt, Human
cucaacucucaaacuuccauc

SEQ ID NO: 324404 - RNA, 18 nt, Human
cuccgggccgcggccgcc

SEQ ID NO: 324405 - RNA, 19 nt, Human
cuccucagcagccagaggc

SEQ ID NO: 324406 - RNA, 23 nt, Human
cuccucagcagccagaggccugg

SEQ ID NO: 324407 - RNA, 24 nt, Human
cucuuagccaacugcaaacuuauc

SEQ ID NO: 324408 - RNA, 24 nt, Human
cugcccgcccccuccgccgccgcg

SEQ ID NO: 324409 - RNA, 18 nt, Human
cugcuucuccucagcagc

SEQ ID NO: 324410 - RNA, 20 nt, Human
cuggacaacaagugucaaaa

SEQ ID NO: 324411 - RNA, 21 nt, Human
cuguagcaugcuaaagaaagg

SEQ ID NO: 324412 - RNA, 22 nt, Human
cuguggcugaagaaaaaggagg

SEQ ID NO: 324413 - RNA, 18 nt, Human
gacucagacccccucccu

SEQ ID NO: 324414 - RNA, 21 nt, Human
gcaguagaaggggagagacca

SEQ ID NO: 324415 - RNA, 22 nt, Human
gcccgggucccuggaugugccg

SEQ ID NO: 324416 - RNA, 19 nt, Human
gccgccgccgccgccgccg

SEQ ID NO: 324417 - RNA, 19 nt, Human
gccgccgccgccgccgccg

SEQ ID NO: 324418 - RNA, 22 nt, Human
gccucgccucacagcggcucaa

SEQ ID NO: 324419 - RNA, 23 nt, Human
gcggcggcggcggacgacgacgc

SEQ ID NO: 324420 - RNA, 20 nt, Human
gcggcggcggcggacgggag

SEQ ID NO: 324421 - RNA, 24 nt, Human
gcgguagcugaugccccucgcucu

SEQ ID NO: 324422 - RNA, 19 nt, Human
gcuuccaccuucccuuuca

SEQ ID NO: 324423 - RNA, 20 nt, Human
ggacuuggcgguagcugaug

SEQ ID NO: 324424 - RNA, 26 nt, Human
ggaggagagagauggcagaagcugcu

SEQ ID NO: 324425 - RNA, 21 nt, Human
ggccgccgccgccgccgcuuc

SEQ ID NO: 324426 - RNA, 21 nt, Human
gggagguuuaaaaccggcccg

SEQ ID NO: 324427 - RNA, 23 nt, Human
ggggagagaccaacucuccggcg

SEQ ID NO: 324428 - RNA, 23 nt, Human
ggggaggcgggaggcgagcgaga

SEQ ID NO: 324429 - RNA, 20 nt, Human
ggggggugcggcggcggcgg

SEQ ID NO: 324430 - RNA, 21 nt, Human
ggugacagaacacaaaaggaa

SEQ ID NO: 324431 - RNA, 20 nt, Human
guagcaaaaccuuucggaaa

SEQ ID NO: 324432 - RNA, 20 nt, Human
guccagaguccagcauaaaa

SEQ ID NO: 324433 - RNA, 21 nt, Human
gugcggcggcggcggacggga

SEQ ID NO: 324434 - RNA, 20 nt, Human
guggcugaagaaaaaggagg

SEQ ID NO: 324435 - RNA, 20 nt, Human
guuagaaaagacgaagagga

SEQ ID NO: 324436 - RNA, 24 nt, Human
guugcuguguuucuuaccuaugac

SEQ ID NO: 324437 - RNA, 22 nt, Human
uaaagaguccugccacaucacc

SEQ ID NO: 324438 - RNA, 24 nt, Human
uaaauguccuuuugacacaaaaag

SEQ ID NO: 324439 - RNA, 20 nt, Human
uacacaucagucugucucca

SEQ ID NO: 324440 - RNA, 18 nt, Human
uagaaaagacgaagagga

SEQ ID NO: 324441 - RNA, 22 nt, Human
uagaaaagacgaagaggaggcg

SEQ ID NO: 324442 - RNA, 23 nt, Human
uauauacaugacacagcuacaca

SEQ ID NO: 324443 - RNA, 25 nt, Human
uauucaaguuuauuuucaugguguu

SEQ ID NO: 324444 - RNA, 19 nt, Human
ucaaaacccuguggaugua

SEQ ID NO: 324445 - RNA, 26 nt, Human
ucaacuggacaacaagugucaaaacc

SEQ ID NO: 324446 - RNA, 24 nt, Human
ucaccgcccgccggccugcccgcc

SEQ ID NO: 324447 - RNA, 23 nt, Human
ucagcagccagaggccuggcagc

SEQ ID NO: 324448 - RNA, 25 nt, Human
uccaccuucccuuucaggagaagcc

SEQ ID NO: 324449 - RNA, 21 nt, Human
uccaucauggcugcagcuucc

SEQ ID NO: 324450 - RNA, 21 nt, Human
uccccgagggcgcugcccccg

SEQ ID NO: 324451 - RNA, 23 nt, Human
uccccuccauugcccuaacccga

SEQ ID NO: 324452 - RNA, 27 nt, Human
ucccuggaugugccgccgccgccgccg

SEQ ID NO: 324453 - RNA, 24 nt, Human
uccggagcccgggccacggggggu

SEQ ID NO: 324454 - RNA, 21 nt, Human
uccugccgcagcgcauaaaga

SEQ ID NO: 324455 - RNA, 20 nt, Human
ucgcucugccgccgcuuggc

SEQ ID NO: 324456 - RNA, 19 nt, Human
ucucccccccgcuccagga

SEQ ID NO: 324457 - RNA, 19 nt, Human
ucuccggcguucccagccc

SEQ ID NO: 324458 - RNA, 21 nt, Human
ucucucaucucccucgccuga

SEQ ID NO: 324459 - RNA, 19 nt, Human
ugacacagcuacacaaccu

SEQ ID NO: 324460 - RNA, 19 nt, Human
ugacagaacacaaaaggaa

SEQ ID NO: 324461 - RNA, 20 nt, Human
ugacagaacacaaaaggaaa

SEQ ID NO: 324462 - RNA, 21 nt, Human
ugagaaaacauauuuaauaaa

SEQ ID NO: 324463 - RNA, 21 nt, Human
ugagaaaacauauuuaauaaa

SEQ ID NO: 324464 - RNA, 20 nt, Human
ugccauuaaaaaaaaaaagg

SEQ ID NO: 324465 - RNA, 19 nt, Human
ugcugguggcggggcuucu

SEQ ID NO: 324466 - RNA, 21 nt, Human
uggcagaagcugcugguggcg

SEQ ID NO: 324467 - RNA, 25 nt, Human
uggcagcggcggcagcggaaugggg

SEQ ID NO: 324468 - RNA, 22 nt, Human
ugguugcagcgacugggccugc

SEQ ID NO: 324469 - RNA, 21 nt, Human
uguuuuaucccucuugauaaa

SEQ ID NO: 324470 - RNA, 23 nt, Human
uuaagauguugcagaagguucau

SEQ ID NO: 324471 - RNA, 20 nt, Human
uucggaaaccucucuuagcc

SEQ ID NO: 324472 - RNA, 23 nt, Human
uuggugacagaacacaaaaggaa

SEQ ID NO: 324473 - RNA, 19 nt, Human
uuuacaauugagaaaacau

SEQ ID NO: 324474 - RNA, 18 nt, Human
aaagaggaacuggcagca

SEQ ID NO: 324475 - RNA, 23 nt, Human
aacauuagaucgcucaagaagga

SEQ ID NO: 324476 - RNA, 21 nt, Human
aacuucccuuguugcagaagc

SEQ ID NO: 324477 - RNA, 21 nt, Human
aauauacauaaggcaaacauu

SEQ ID NO: 324478 - RNA, 18 nt, Human
aggccaacuucccuggcc

SEQ ID NO: 324479 - RNA, 18 nt, Human
agggaauauacauaaggc

SEQ ID NO: 324480 - RNA, 19 nt, Human
auagauuagggagaaaaac

SEQ ID NO: 324481 - RNA, 21 nt, Human
caaaacagcaaaauguauggc

SEQ ID NO: 324482 - RNA, 26 nt, Human
caaacccuccuaguucucaucagaag

SEQ ID NO: 324483 - RNA, 18 nt, Human
caucagaaggaaaugauc

SEQ ID NO: 324484 - RNA, 25 nt, Human
cggaaagccaaagauaucaaaauca

SEQ ID NO: 324485 - RNA, 23 nt, Human
cucucucucuuucugucuuaaaa

SEQ ID NO: 324486 - RNA, 21 nt, Human
cucuguugaaaugccuggguc

SEQ ID NO: 324487 - RNA, 21 nt, Human
cuuugaucagcagaaauaucu

SEQ ID NO: 324488 - RNA, 19 nt, Human
gaacuuccggcaggccaac

SEQ ID NO: 324489 - RNA, 20 nt, Human
gcaaguuuuauacucaaggu

SEQ ID NO: 324490 - RNA, 21 nt, Human
gcucaauuaggcugaguaacu

SEQ ID NO: 324491 - RNA, 21 nt, Human
ggaaagccaaagauaucaaaa

SEQ ID NO: 324492 - RNA, 18 nt, Human
gguaaaggaaauaaaggg

SEQ ID NO: 324493 - RNA, 20 nt, Human
gguugacuacagguaacucg

SEQ ID NO: 324494 - RNA, 24 nt, Human
gguugacuacagguaacucgggua

SEQ ID NO: 324495 - RNA, 22 nt, Human
guacaacgcgcugccuucuccc

SEQ ID NO: 324496 - RNA, 19 nt, Human
uaaaaacagacucuucauc

SEQ ID NO: 324497 - RNA, 18 nt, Human
uaaaugaauugcaaugga

SEQ ID NO: 324498 - RNA, 18 nt, Human
uaacucccuagaggcaca

SEQ ID NO: 324499 - RNA, 27 nt, Human
uacaaacuuugcaaaacagcaaaaugu

SEQ ID NO: 324500 - RNA, 21 nt, Human
uacacagaaagcuugaucauc

SEQ ID NO: 324501 - RNA, 27 nt, Human
uaccaccaagagauguucuaaaaagag

SEQ ID NO: 324502 - RNA, 25 nt, Human
uaccggaaagccaaagauaucaaaa

SEQ ID NO: 324503 - RNA, 21 nt, Human
uagaaauagguacuucuguau

SEQ ID NO: 324504 - RNA, 21 nt, Human
uagauaccggaaagccaaaga

SEQ ID NO: 324505 - RNA, 24 nt, Human
uagaucgcucaagaaggaaauaau

SEQ ID NO: 324506 - RNA, 21 nt, Human
uagcaaagcucaacuucccaa

SEQ ID NO: 324507 - RNA, 24 nt, Human
uaguucucaucagaaggaaaugau

SEQ ID NO: 324508 - RNA, 26 nt, Human
uauaaaauuaaccuuucaaaauauuu

SEQ ID NO: 324509 - RNA, 18 nt, Human
uauacaaacuuugcaaaa

SEQ ID NO: 324510 - RNA, 18 nt, Human
uaucaaagaggaacuggc

SEQ ID NO: 324511 - RNA, 18 nt, Human
uaugauuaaaaacagacu

SEQ ID NO: 324512 - RNA, 23 nt, Human
uauuuuacagugccauauuauuc

SEQ ID NO: 324513 - RNA, 20 nt, Human
uccaaggaaaaacaaaaggu

SEQ ID NO: 324514 - RNA, 21 nt, Human
uccaaggaaaaacaaaaggua

SEQ ID NO: 324515 - RNA, 28 nt, Human
uccaaggaaaaacaaaagguaaaggaaa

SEQ ID NO: 324516 - RNA, 23 nt, Human
ucucaaaauuuaacuucccuugu

SEQ ID NO: 324517 - RNA, 22 nt, Human
ucuccuggcucauuccucuuug

SEQ ID NO: 324518 - RNA, 25 nt, Human
ugcaaaacagcaaaauguauggcaa

SEQ ID NO: 324519 - RNA, 22 nt, Human
uggcaaaaauagauaccggaaa

SEQ ID NO: 324520 - RNA, 23 nt, Human
ugguguuagcucuguugaaaugc

SEQ ID NO: 324521 - RNA, 21 nt, Human
uguauggcaaaaauagauacc

SEQ ID NO: 324522 - RNA, 26 nt, Human
ugugaaugcgguuucucuccucucuc

SEQ ID NO: 324523 - RNA, 22 nt, Human
ugugaauucauaagcaaccauc

SEQ ID NO: 324524 - RNA, 19 nt, Human
uguugaaaugccugggucu

SEQ ID NO: 324525 - RNA, 24 nt, Human
uuaaaaacagacucuucaucaaga

SEQ ID NO: 324526 - RNA, 19 nt, Human
uuaaagaacagcaggauaa

SEQ ID NO: 324527 - RNA, 23 nt, Human
uuguuuagaaauagguacuucug

SEQ ID NO: 324528 - RNA, 21 nt, Human
uuugugaaugcgguuucucuc

SEQ ID NO: 324529 - RNA, 18 nt, Human
uuuuuuuuuuuuuuuuug

SEQ ID NO: 324530 - RNA, 23 nt, Human
uuuuuuuuuuuuuuuuuggaauu

SEQ ID NO: 324531 - RNA, 31 nt, Human
uuuuuuuuuuuuuuuuuuuuuuuggaauuaa

SEQ ID NO: 324532 - RNA, 21 nt, Human
acagagcagagacauccagag

SEQ ID NO: 324533 - RNA, 21 nt, Human
ccagagcgugggggucaccug

SEQ ID NO: 324534 - RNA, 21 nt, Human
cuggccgggaucccagcuuca

SEQ ID NO: 324535 - RNA, 22 nt, Human
gaacagagcagagacauccaga

SEQ ID NO: 324536 - RNA, 24 nt, Human
gagccggggcaggggcucggggaa

SEQ ID NO: 324537 - RNA, 19 nt, Human
gcggggagccggggcaggg

SEQ ID NO: 324538 - RNA, 25 nt, Human
gggcaggggugcuuuggcggggagc

SEQ ID NO: 324539 - RNA, 19 nt, Human
gggcucggggaaggaacag

SEQ ID NO: 324540 - RNA, 22 nt, Human
ucaccuggcuggccgggauccc

SEQ ID NO: 324541 - RNA, 21 nt, Human
ucccagcuucagcccugggga

SEQ ID NO: 324542 - RNA, 23 nt, Human
uuuuuuuuuuuuuuuuuuaacug

SEQ ID NO: 324543 - RNA, 26 nt, Human
ccaaaggcucugcgccgcgcaccugg

SEQ ID NO: 324544 - RNA, 19 nt, Human
gggcccagcccaggguggg

SEQ ID NO: 324545 - RNA, 25 nt, Human
ucccaaaggcucugcgccgcgcacc

SEQ ID NO: 324546 - RNA, 18 nt, Human
ucguugggccucugguug

SEQ ID NO: 324547 - RNA, 19 nt, Human
ucugcgccgcgcaccuggg

SEQ ID NO: 324548 - RNA, 21 nt, Human
ugccugggauguggggucccc

SEQ ID NO: 324549 - RNA, 22 nt, Human
ugccugggauguggggucccca

SEQ ID NO: 324550 - RNA, 23 nt, Human
uggcuuagucguugggccucugg

SEQ ID NO: 324551 - RNA, 24 nt, Human
uggcuuagucguugggccucuggu

SEQ ID NO: 324552 - RNA, 19 nt, Human
aaaauaaauaaccugacaa

SEQ ID NO: 324553 - RNA, 19 nt, Human
aaacaaauuacaaaaccac

SEQ ID NO: 324554 - RNA, 23 nt, Human
aaacagugcaaauucacugaaau

SEQ ID NO: 324555 - RNA, 20 nt, Human
acaguaacuaugauuaaaca

SEQ ID NO: 324556 - RNA, 20 nt, Human
acaucuguagccuugaccac

SEQ ID NO: 324557 - RNA, 20 nt, Human
accauguuccccuaaauaaa

SEQ ID NO: 324558 - RNA, 19 nt, Human
acucagaggaaaaagggga

SEQ ID NO: 324559 - RNA, 18 nt, Human
agaaaguacagucacugu

SEQ ID NO: 324560 - RNA, 19 nt, Human
agaacuuuuaaacuacuga

SEQ ID NO: 324561 - RNA, 20 nt, Human
agagaugcgcccuccucucc

SEQ ID NO: 324562 - RNA, 18 nt, Human
agaguauuaaugagaauu

SEQ ID NO: 324563 - RNA, 20 nt, Human
agcaggcuugguugcuucca

SEQ ID NO: 324564 - RNA, 21 nt, Human
aggaaaaaggggagggaccga

SEQ ID NO: 324565 - RNA, 23 nt, Human
caaacaaauuacaaaaccacaua

SEQ ID NO: 324566 - RNA, 24 nt, Human
caaauuacaaaaccacauacuuug

SEQ ID NO: 324567 - RNA, 19 nt, Human
caacaggaaagcuuaaauc

SEQ ID NO: 324568 - RNA, 22 nt, Human
cagaggaaaaaggggagggacc

SEQ ID NO: 324569 - RNA, 24 nt, Human
cagcaggcuugguugcuuccacau

SEQ ID NO: 324570 - RNA, 25 nt, Human
cauuucuauuauuucuuguugagag

SEQ ID NO: 324571 - RNA, 19 nt, Human
ccacauacacaaacaucac

SEQ ID NO: 324572 - RNA, 23 nt, Human
ccagagcccccuucccgcaccca

SEQ ID NO: 324573 - RNA, 21 nt, Human
cccacauacacaaacaucaca

SEQ ID NO: 324574 - RNA, 19 nt, Human
cccgcacccagcgcgccga

SEQ ID NO: 324575 - RNA, 19 nt, Human
cccuccucucccggccuuu

SEQ ID NO: 324576 - RNA, 20 nt, Human
ccgcacccagcgcgccgacg

SEQ ID NO: 324577 - RNA, 22 nt, Human
ccuaaauaaaauauagacagau

SEQ ID NO: 324578 - RNA, 22 nt, Human
cgcccuccucucccggccuuua

SEQ ID NO: 324579 - RNA, 21 nt, Human
cuccaaaggccaaguaccaug

SEQ ID NO: 324580 - RNA, 23 nt, Human
cuccaaaggccaaguaccaugcu

SEQ ID NO: 324581 - RNA, 22 nt, Human
cucccacauacacaaacaucac

SEQ ID NO: 324582 - RNA, 28 nt, Human
cucucccggccuuuaccugggaggaagg

SEQ ID NO: 324583 - RNA, 22 nt, Human
cucucccggccuuuaccugggg

SEQ ID NO: 324584 - RNA, 21 nt, Human
cuuuuuauuagggcagcuuca

SEQ ID NO: 324585 - RNA, 20 nt, Human
gaccugcaguuccuggagga

SEQ ID NO: 324586 - RNA, 23 nt, Human
gcacaucuguagccuugaccaca

SEQ ID NO: 324587 - RNA, 21 nt, Human
ggaggaagagggucugagagc

SEQ ID NO: 324588 - RNA, 21 nt, Human
ggcagcuggaucuucaaugca

SEQ ID NO: 324589 - RNA, 20 nt, Human
ggccacguacauccuccccc

SEQ ID NO: 324590 - RNA, 22 nt, Human
gucaaaccauguuccccuaaau

SEQ ID NO: 324591 - RNA, 18 nt, Human
uaaaauaaauaaccugac

SEQ ID NO: 324592 - RNA, 24 nt, Human
uaaaauaaauaaccugacaacuug

SEQ ID NO: 324593 - RNA, 23 nt, Human
uaacgguaguagcaagauuaaaa

SEQ ID NO: 324594 - RNA, 20 nt, Human
uaagauaugacucacugcua

SEQ ID NO: 324595 - RNA, 18 nt, Human
uaccugggaggaagaggg

SEQ ID NO: 324596 - RNA, 21 nt, Human
ucagaggaaaaaggggaggga

SEQ ID NO: 324597 - RNA, 19 nt, Human
ucauuguucaaauaaaggg

SEQ ID NO: 324598 - RNA, 23 nt, Human
uccaguauaucugaagaaugaac

SEQ ID NO: 324599 - RNA, 20 nt, Human
ucccacauacacaaacauca

SEQ ID NO: 324600 - RNA, 23 nt, Human
ucccacauacacaaacaucacag

SEQ ID NO: 324601 - RNA, 20 nt, Human
ucccauauaagaugagucaa

SEQ ID NO: 324602 - RNA, 20 nt, Human
ucccgcacccagcgcgccga

SEQ ID NO: 324603 - RNA, 23 nt, Human
ugagagaaccauuccuaaagucu

SEQ ID NO: 324604 - RNA, 24 nt, Human
ugauguuaacccacugaguccacu

SEQ ID NO: 324605 - RNA, 23 nt, Human
uggccacguacauccucccccag

SEQ ID NO: 324606 - RNA, 24 nt, Human
uguaagaguaauacuguagugaug

SEQ ID NO: 324607 - RNA, 18 nt, Human
uguacacuauauguguau

SEQ ID NO: 324608 - RNA, 22 nt, Human
uucaaaaugaucuuccagaugc

SEQ ID NO: 324609 - RNA, 24 nt, Human
uucacugaaauauuuugaugcuga

SEQ ID NO: 324610 - RNA, 26 nt, Human
uucccauauaagaugagucaaaccau

SEQ ID NO: 324611 - RNA, 21 nt, Human
uuccuggaggaugaguaaaca

SEQ ID NO: 324612 - RNA, 19 nt, Human
uugaccacagcuuaaaugu

SEQ ID NO: 324613 - RNA, 21 nt, Human
uuuacacacuguuuucauuuc

SEQ ID NO: 324614 - RNA, 19 nt, Human
uuuaccugggaggaagagg

SEQ ID NO: 324615 - RNA, 24 nt, Human
aaacaggacauaacagcuucugga

SEQ ID NO: 324616 - RNA, 20 nt, Human
aauucacaaaacaauaggac

SEQ ID NO: 324617 - RNA, 23 nt, Human
acgcggcgcgggcggcggcggag

SEQ ID NO: 324618 - RNA, 23 nt, Human
acuggcccgggagggagccacgc

SEQ ID NO: 324619 - RNA, 25 nt, Human
agggagccacgccuuccucucuggg

SEQ ID NO: 324620 - RNA, 23 nt, Human
agguuuuaauuuccccaaaauuc

SEQ ID NO: 324621 - RNA, 18 nt, Human
agucauggagcuuccagu

SEQ ID NO: 324622 - RNA, 20 nt, Human
agucauggagcuuccaguga

SEQ ID NO: 324623 - RNA, 22 nt, Human
cagcgggagggggcagacgcgg

SEQ ID NO: 324624 - RNA, 22 nt, Human
ccgcagcgggagggggcagacg

SEQ ID NO: 324625 - RNA, 18 nt, Human
ccgcggcuggggcugggc

SEQ ID NO: 324626 - RNA, 21 nt, Human
cgggagggggcagacgcggcg

SEQ ID NO: 324627 - RNA, 19 nt, Human
cucucugggaaaccucugg

SEQ ID NO: 324628 - RNA, 18 nt, Human
gaaacaggacauaacagc

SEQ ID NO: 324629 - RNA, 22 nt, Human
gagccgcagcgggagggggcag

SEQ ID NO: 324630 - RNA, 18 nt, Human
gcggcggcggaggucggc

SEQ ID NO: 324631 - RNA, 19 nt, Human
gcggcggcggaggucggcg

SEQ ID NO: 324632 - RNA, 23 nt, Human
ggggcagacgcggcgcgggcggc

SEQ ID NO: 324633 - RNA, 21 nt, Human
guccagagagccgcagcggga

SEQ ID NO: 324634 - RNA, 22 nt, Human
uacaaaaacauguauggaaaca

SEQ ID NO: 324635 - RNA, 20 nt, Human
uacaaaaagagagucaugga

SEQ ID NO: 324636 - RNA, 25 nt, Human
uacaaaaagagagucauggagcuuc

SEQ ID NO: 324637 - RNA, 25 nt, Human
uaugcuuuauucaaauuauggaaua

SEQ ID NO: 324638 - RNA, 22 nt, Human
uccgcugcugggaccgcggccg

SEQ ID NO: 324639 - RNA, 24 nt, Human
uccgcugcugggaccgcggccgcg

SEQ ID NO: 324640 - RNA, 19 nt, Human
uccucucugggaaaccucu

SEQ ID NO: 324641 - RNA, 19 nt, Human
ugaggaggggauggcgucc

SEQ ID NO: 324642 - RNA, 20 nt, Human
uggcccgggagggagccacg

SEQ ID NO: 324643 - RNA, 19 nt, Human
uggcguccagagagccgca

SEQ ID NO: 324644 - RNA, 20 nt, Human
uggcuucgaggugaggaggg

SEQ ID NO: 324645 - RNA, 18 nt, Human
ugggggugggcuuggggg

SEQ ID NO: 324646 - RNA, 22 nt, Human
ugucaaaauaguucacagauac

SEQ ID NO: 324647 - RNA, 29 nt, Human
uucugugauuuuuuuuucuuuuacaaaaa

SEQ ID NO: 324648 - RNA, 21 nt, Human
aaacuugggaaacaagaggug

SEQ ID NO: 324649 - RNA, 23 nt, Human
agcguucaggugugaggcugugc

SEQ ID NO: 324650 - RNA, 22 nt, Human
agucccagcuuugcagugcccg

SEQ ID NO: 324651 - RNA, 27 nt, Human
caccuuguccugcucagucuggaauuu

SEQ ID NO: 324652 - RNA, 18 nt, Human
cagcagcgguggcagccu

SEQ ID NO: 324653 - RNA, 18 nt, Human
cagcgguggcagccucac

SEQ ID NO: 324654 - RNA, 23 nt, Human
cagugcccgccggucucgucugc

SEQ ID NO: 324655 - RNA, 18 nt, Human
ccuuggagugcaaggcug

SEQ ID NO: 324656 - RNA, 23 nt, Human
ccuuguccugcucagucuggaaa

SEQ ID NO: 324657 - RNA, 19 nt, Human
cgggaggacagcguucagg

SEQ ID NO: 324658 - RNA, 21 nt, Human
cuuacucgcuauuuuuuuucc

SEQ ID NO: 324659 - RNA, 20 nt, Human
gagcacagcuaaaugugacc

SEQ ID NO: 324660 - RNA, 20 nt, Human
gcagugcccgccggucucgu

SEQ ID NO: 324661 - RNA, 18 nt, Human
gcggcagcagcgguggca

SEQ ID NO: 324662 - RNA, 23 nt, Human
ggaggacagcguucaggugugag

SEQ ID NO: 324663 - RNA, 18 nt, Human
ggcagcagcgguggcagc

SEQ ID NO: 324664 - RNA, 19 nt, Human
ggcagcagcgguggcagcc

SEQ ID NO: 324665 - RNA, 20 nt, Human
gugcagcgggaugggucagu

SEQ ID NO: 324666 - RNA, 22 nt, Human
uagcccuucugagcacagcuaa

SEQ ID NO: 324667 - RNA, 23 nt, Human
ucaaagccggucucaguggcugu

SEQ ID NO: 324668 - RNA, 21 nt, Human
ugagcacagcuaaaugugaca

SEQ ID NO: 324669 - RNA, 18 nt, Human
ugcagcgggaugggucag

SEQ ID NO: 324670 - RNA, 19 nt, Human
ugcgcagccuuggagugca

SEQ ID NO: 324671 - RNA, 19 nt, Human
uggacaccgaggucagagu

SEQ ID NO: 324672 - RNA, 18 nt, Human
ugggucuguagcggcagc

SEQ ID NO: 324673 - RNA, 19 nt, Human
ugugacauguaugugucua

SEQ ID NO: 324674 - RNA, 18 nt, Human
uuuauaaggguccagaaa

SEQ ID NO: 324675 - RNA, 22 nt, Human
uuuuggacaccgaggucagagu

SEQ ID NO: 324676 - RNA, 20 nt, Human
aaagacauccaaagccaacg

SEQ ID NO: 324677 - RNA, 19 nt, Human
aaaguuccuuugaguggcu

SEQ ID NO: 324678 - RNA, 24 nt, Human
aacagagcaagacucugucuugga

SEQ ID NO: 324679 - RNA, 18 nt, Human
aacauggugaacccgucu

SEQ ID NO: 324680 - RNA, 19 nt, Human
aacauggugaacccgucuc

SEQ ID NO: 324681 - RNA, 24 nt, Human
aaucgcuugaacccgggaggcgga

SEQ ID NO: 324682 - RNA, 23 nt, Human
acacacacacacacacacacaca

SEQ ID NO: 324683 - RNA, 23 nt, Human
acacacacacacacacacacaca

SEQ ID NO: 324684 - RNA, 23 nt, Human
acacacacacacacacacacaca

SEQ ID NO: 324685 - RNA, 23 nt, Human
acacacacacacacacacacaca

SEQ ID NO: 324686 - RNA, 23 nt, Human
acacacacacacacacacacaca

SEQ ID NO: 324687 - RNA, 23 nt, Human
acacacacacacacacacacaca

SEQ ID NO: 324688 - RNA, 24 nt, Human
acacacacacacacacacacacag

SEQ ID NO: 324689 - RNA, 25 nt, Human
acacacacauacacauacacacaca

SEQ ID NO: 324690 - RNA, 28 nt, Human
acacacacgggcacacacacaggcccac

SEQ ID NO: 324691 - RNA, 28 nt, Human
acacauacacacacacgggcacacacac

SEQ ID NO: 324692 - RNA, 24 nt, Human
acagagcaagacucugucuuggaa

SEQ ID NO: 324693 - RNA, 25 nt, Human
acauacacacacacauacacauaca

SEQ ID NO: 324694 - RNA, 29 nt, Human
acauacacauacacacacacgggcacaca

SEQ ID NO: 324695 - RNA, 18 nt, Human
accccagccuugcuucca

SEQ ID NO: 324696 - RNA, 24 nt, Human
acuucacuccagcuugggcaacag

SEQ ID NO: 324697 - RNA, 25 nt, Human
acuucacuccagcuugggcaacaga

SEQ ID NO: 324698 - RNA, 24 nt, Human
acuuccauuuaaugacuaaaaauc

SEQ ID NO: 324699 - RNA, 31 nt, Human
agaaaacacacacacacacacacacacacag

SEQ ID NO: 324700 - RNA, 21 nt, Human
agacauccaaagccaacggca

SEQ ID NO: 324701 - RNA, 24 nt, Human
agcacuuugggaggccgaggccgg

SEQ ID NO: 324702 - RNA, 23 nt, Human
agcuggguauggugauacgcgcc

SEQ ID NO: 324703 - RNA, 24 nt, Human
agcuugggcaacagagcaagacuc

SEQ ID NO: 324704 - RNA, 20 nt, Human
aggaacccaagaccccagcc

SEQ ID NO: 324705 - RNA, 21 nt, Human
aggccgaggccgguggaucac

SEQ ID NO: 324706 - RNA, 26 nt, Human
aggccgguggaucacuugaggccagg

SEQ ID NO: 324707 - RNA, 19 nt, Human
aggcggaggcugcagugag

SEQ ID NO: 324708 - RNA, 24 nt, Human
aggcgggagaaucgcuugaacccg

SEQ ID NO: 324709 - RNA, 20 nt, Human
aggcugaggcgggagaaucg

SEQ ID NO: 324710 - RNA, 24 nt, Human
aggcugaggcgggagaaucgcuug

SEQ ID NO: 324711 - RNA, 22 nt, Human
aggcugcagugagccagauugu

SEQ ID NO: 324712 - RNA, 18 nt, Human
aggcugccaggaaaccag

SEQ ID NO: 324713 - RNA, 24 nt, Human
agugauucaugccugucaucccag

SEQ ID NO: 324714 - RNA, 21 nt, Human
aucacuugaggccaggaguuc

SEQ ID NO: 324715 - RNA, 24 nt, Human
auuguaccacuucacuccagcuug

SEQ ID NO: 324716 - RNA, 22 nt, Human
caaagcucccgguccuccaccc

SEQ ID NO: 324717 - RNA, 24 nt, Human
caagaccccagccuugcuuccaca

SEQ ID NO: 324718 - RNA, 20 nt, Human
cacacacacacacacacaca

SEQ ID NO: 324719 - RNA, 20 nt, Human
cacacacacacacacacaca

SEQ ID NO: 324720 - RNA, 20 nt, Human
cacacacacacacacacaca

SEQ ID NO: 324721 - RNA, 20 nt, Human
cacacacacacacacacaca

SEQ ID NO: 324722 - RNA, 20 nt, Human
cacacacacacacacacaca

SEQ ID NO: 324723 - RNA, 20 nt, Human
cacacacacacacacacaca

SEQ ID NO: 324724 - RNA, 20 nt, Human
cacacacacacacacacaca

SEQ ID NO: 324725 - RNA, 20 nt, Human
cacacacacacacacacaca

SEQ ID NO: 324726 - RNA, 20 nt, Human
cacacacacacacacacaca

SEQ ID NO: 324727 - RNA, 20 nt, Human
cacacacacacacacacaca

SEQ ID NO: 324728 - RNA, 20 nt, Human
cacacacacacacacacaca

SEQ ID NO: 324729 - RNA, 20 nt, Human
cacacacacacacacacaca

SEQ ID NO: 324730 - RNA, 22 nt, Human
cacacacacacacacacacaca

SEQ ID NO: 324731 - RNA, 22 nt, Human
cacacacacacacacacacaca

SEQ ID NO: 324732 - RNA, 22 nt, Human
cacacacacacacacacacaca

SEQ ID NO: 324733 - RNA, 22 nt, Human
cacacacacacacacacacaca

SEQ ID NO: 324734 - RNA, 22 nt, Human
cacacacacacacacacacaca

SEQ ID NO: 324735 - RNA, 26 nt, Human
cacacacacacacacacacacacaca

SEQ ID NO: 324736 - RNA, 26 nt, Human
cacacacacacacacacacacacaca

SEQ ID NO: 324737 - RNA, 26 nt, Human
cacacacacacacacacacacacaca

SEQ ID NO: 324738 - RNA, 26 nt, Human
cacacacacacacacacacacacaca

SEQ ID NO: 324739 - RNA, 26 nt, Human
cacacacacacacacacacacacaca

SEQ ID NO: 324740 - RNA, 26 nt, Human
cacacacacacacacacacacacaca

SEQ ID NO: 324741 - RNA, 26 nt, Human
cacacacacacacacacacacacaca

SEQ ID NO: 324742 - RNA, 26 nt, Human
cacacacacacacacacacacacaca

SEQ ID NO: 324743 - RNA, 26 nt, Human
cacacacacacacacacacacacacg

SEQ ID NO: 324744 - RNA, 22 nt, Human
cacacacacacacacacacacg

SEQ ID NO: 324745 - RNA, 22 nt, Human
cacacacacgggcacacacaca

SEQ ID NO: 324746 - RNA, 22 nt, Human
cacacaggcccacugugcccag

SEQ ID NO: 324747 - RNA, 26 nt, Human
cacauacacauacacacacacgggca

SEQ ID NO: 324748 - RNA, 24 nt, Human
cacccacugcccuuuggagggacu

SEQ ID NO: 324749 - RNA, 22 nt, Human
cacgggcacacacacaggccca

SEQ ID NO: 324750 - RNA, 24 nt, Human
cacuucacuccagcuugggcaaca

SEQ ID NO: 324751 - RNA, 19 nt, Human
cagaauuucuggggucagu

SEQ ID NO: 324752 - RNA, 19 nt, Human
cagcaaagacauccaaagc

SEQ ID NO: 324753 - RNA, 22 nt, Human
cagcacuuugggaggccgaggc

SEQ ID NO: 324754 - RNA, 25 nt, Human
cagcacuuugggaggccgaggccgg

SEQ ID NO: 324755 - RNA, 22 nt, Human
cagccacuucgugcaggaaucc

SEQ ID NO: 324756 - RNA, 24 nt, Human
cagcgggggcagaggagccagccc

SEQ ID NO: 324757 - RNA, 24 nt, Human
cagcuacucaggaggcugaggcgg

SEQ ID NO: 324758 - RNA, 22 nt, Human
cauacaggaacccaagacccca

SEQ ID NO: 324759 - RNA, 24 nt, Human
caugccugucaucccagcacuuug

SEQ ID NO: 324760 - RNA, 23 nt, Human
ccaaagcucccgguccuccaccc

SEQ ID NO: 324761 - RNA, 23 nt, Human
ccacuucacuccagcuugggcaa

SEQ ID NO: 324762 - RNA, 24 nt, Human
ccacuucacuccagcuugggcaac

SEQ ID NO: 324763 - RNA, 22 nt, Human
cccaaagcucccgguccuccac

SEQ ID NO: 324764 - RNA, 23 nt, Human
cccacacgcgcagcaggcugcca

SEQ ID NO: 324765 - RNA, 22 nt, Human
cccgucucuacuaaaaauacaa

SEQ ID NO: 324766 - RNA, 22 nt, Human
ccgggaggcggaggcugcagug

SEQ ID NO: 324767 - RNA, 20 nt, Human
ccucccacccacaccugagc

SEQ ID NO: 324768 - RNA, 23 nt, Human
ccucccacccacaccugagccag

SEQ ID NO: 324769 - RNA, 21 nt, Human
ccucuagauuggcugggccag

SEQ ID NO: 324770 - RNA, 21 nt, Human
ccugggcaacauggugaaccc

SEQ ID NO: 324771 - RNA, 22 nt, Human
ccugggcaacauggugaacccg

SEQ ID NO: 324772 - RNA, 21 nt, Human
ccuguaaucccagcuacucag

SEQ ID NO: 324773 - RNA, 22 nt, Human
ccuguaaucccagcuacucagg

SEQ ID NO: 324774 - RNA, 23 nt, Human
ccuguccuuggcucacccagccg

SEQ ID NO: 324775 - RNA, 26 nt, Human
cgaggccgguggaucacuugaggcca

SEQ ID NO: 324776 - RNA, 24 nt, Human
cgccuguaaucccagcuacucagg

SEQ ID NO: 324777 - RNA, 23 nt, Human
cgguggaucacuugaggccagga

SEQ ID NO: 324778 - RNA, 22 nt, Human
cuccagaugguggcugagcaca

SEQ ID NO: 324779 - RNA, 25 nt, Human
cucccacccacaccugagccagaga

SEQ ID NO: 324780 - RNA, 19 nt, Human
cugcagcaaagacauccaa

SEQ ID NO: 324781 - RNA, 21 nt, Human
cugcagugagccagauuguac

SEQ ID NO: 324782 - RNA, 21 nt, Human
cuuggcucacccagcuuccac

SEQ ID NO: 324783 - RNA, 28 nt, Human
gaaucuuaaauagagucucccuucucuc

SEQ ID NO: 324784 - RNA, 21 nt, Human
gacauccaaagccaacggcaa

SEQ ID NO: 324785 - RNA, 22 nt, Human
gaggcugcagugagccagauug

SEQ ID NO: 324786 - RNA, 24 nt, Human
gaguggcuggucacccaaagcucc

SEQ ID NO: 324787 - RNA, 18 nt, Human
gaucacuugaggccagga

SEQ ID NO: 324788 - RNA, 24 nt, Human
gaucacuugaggccaggaguucga

SEQ ID NO: 324789 - RNA, 19 nt, Human
gcaacagagcaagacucug

SEQ ID NO: 324790 - RNA, 24 nt, Human
gcccagagacccacacgcgcagca

SEQ ID NO: 324791 - RNA, 33 nt, Human
gcuaagaaacauacacacacacauacacauagu

SEQ ID NO: 324792 - RNA, 20 nt, Human
ggacucagggcccaccacaa

SEQ ID NO: 324793 - RNA, 21 nt, Human
ggaggcugcagugagccagau

SEQ ID NO: 324794 - RNA, 23 nt, Human
ggaggcugcagugagccagauug

SEQ ID NO: 324795 - RNA, 20 nt, Human
ggaucacuugaggccaggaa

SEQ ID NO: 324796 - RNA, 22 nt, Human
ggcagggguccccuggccuggc

SEQ ID NO: 324797 - RNA, 21 nt, Human
ggcccacugugcccagagacc

SEQ ID NO: 324798 - RNA, 18 nt, Human
ggcugagcuuccuguggg

SEQ ID NO: 324799 - RNA, 20 nt, Human
ggcugccaggaaaccaggag

SEQ ID NO: 324800 - RNA, 19 nt, Human
gggaggccgaggccggugg

SEQ ID NO: 324801 - RNA, 21 nt, Human
ggggucagucugaaaagucug

SEQ ID NO: 324802 - RNA, 24 nt, Human
ggguauggugauacgcgccuguaa

SEQ ID NO: 324803 - RNA, 24 nt, Human
ggugauacgcgccuguaaucccag

SEQ ID NO: 324804 - RNA, 23 nt, Human
guggaucacuugaggccaggagu

SEQ ID NO: 324805 - RNA, 20 nt, Human
guggcugagcacagugauuc

SEQ ID NO: 324806 - RNA, 21 nt, Human
uaagaaacauacacacacacc

SEQ ID NO: 324807 - RNA, 25 nt, Human
uacacacacacauacacauacacac

SEQ ID NO: 324808 - RNA, 24 nt, Human
uacacacacacgggcacacacaca

SEQ ID NO: 324809 - RNA, 31 nt, Human
uaggagaaaacacacacacacacacacacag

SEQ ID NO: 324810 - RNA, 21 nt, Human
ucacagggacucacaugggag

SEQ ID NO: 324811 - RNA, 23 nt, Human
ucacccagcuuccaccauacagg

SEQ ID NO: 324812 - RNA, 24 nt, Human
ucacuccagcuugggcaacagagc

SEQ ID NO: 324813 - RNA, 23 nt, Human
ucacuugaggccaggaguucgag

SEQ ID NO: 324814 - RNA, 22 nt, Human
ucaugccugucaucccagcacu

SEQ ID NO: 324815 - RNA, 23 nt, Human
ucaugccugucaucccagcacuu

SEQ ID NO: 324816 - RNA, 24 nt, Human
uccacagagaacuggcaggggucc

SEQ ID NO: 324817 - RNA, 24 nt, Human
uccagcuugggcaacagagcaaga

SEQ ID NO: 324818 - RNA, 21 nt, Human
ucccacccacaccugagccag

SEQ ID NO: 324819 - RNA, 22 nt, Human
ucccacccacaccugagccaga

SEQ ID NO: 324820 - RNA, 23 nt, Human
ucccgguccuccacccacugccc

SEQ ID NO: 324821 - RNA, 24 nt, Human
ucgcuugaacccgggaggcggagg

SEQ ID NO: 324822 - RNA, 22 nt, Human
ucucccuucucucuuuucacug

SEQ ID NO: 324823 - RNA, 23 nt, Human
ucucuacuaaaaauacaaaaauu

SEQ ID NO: 324824 - RNA, 19 nt, Human
ucuggggucagucugaaaa

SEQ ID NO: 324825 - RNA, 21 nt, Human
ucuuuucacuguuagggaggg

SEQ ID NO: 324826 - RNA, 21 nt, Human
ugaagauacugaagggaccag

SEQ ID NO: 324827 - RNA, 20 nt, Human
ugaagggaccagaaaguucc

SEQ ID NO: 324828 - RNA, 24 nt, Human
ugaggcgggagaaucgcuugaacc

SEQ ID NO: 324829 - RNA, 24 nt, Human
ugauucaugccugucaucccagca

SEQ ID NO: 324830 - RNA, 22 nt, Human
ugcagcaaagacauccaaagcc

SEQ ID NO: 324831 - RNA, 24 nt, Human
ugccugucaucccagcacuuuggg

SEQ ID NO: 324832 - RNA, 20 nt, Human
ugcucuguuacuuuagcuga

SEQ ID NO: 324833 - RNA, 20 nt, Human
uggaucacuugaggccagga

SEQ ID NO: 324834 - RNA, 24 nt, Human
uggaucacuugaggccaggaguuc

SEQ ID NO: 324835 - RNA, 27 nt, Human
uggaucacuugaggccaggaguucgag

SEQ ID NO: 324836 - RNA, 19 nt, Human
uggcagggguccccuggcc

SEQ ID NO: 324837 - RNA, 19 nt, Human
uggcagggguccccuggcc

SEQ ID NO: 324838 - RNA, 20 nt, Human
uggcagggguccccuggccu

SEQ ID NO: 324839 - RNA, 23 nt, Human
uggcagggguccccuggccugac

SEQ ID NO: 324840 - RNA, 23 nt, Human
uggcagggguccccuggccuggc

SEQ ID NO: 324841 - RNA, 22 nt, Human
uggccuggccaucacagggacu

SEQ ID NO: 324842 - RNA, 19 nt, Human
ugggaggagaaggcugagc

SEQ ID NO: 324843 - RNA, 24 nt, Human
ugggaggccgaggccgguggauca

SEQ ID NO: 324844 - RNA, 20 nt, Human
ugggcaacagagcaagacuc

SEQ ID NO: 324845 - RNA, 23 nt, Human
uggucacccaaagcucccggucc

SEQ ID NO: 324846 - RNA, 22 nt, Human
uguaccacuucacuccagcuug

SEQ ID NO: 324847 - RNA, 21 nt, Human
uguccuuggcucacccagcuu

SEQ ID NO: 324848 - RNA, 20 nt, Human
uuagcuggguauggugauac

SEQ ID NO: 324849 - RNA, 22 nt, Human
uuagcuggguauggugauacgc

SEQ ID NO: 324850 - RNA, 22 nt, Human
uuagggagggagagggagugau

SEQ ID NO: 324851 - RNA, 22 nt, Human
uugaggccaggaguucgagacc

SEQ ID NO: 324852 - RNA, 23 nt, Human
uuggcugggccagaauuucuggg

SEQ ID NO: 324853 - RNA, 25 nt, Human
uugggaggccgaggccgguggauca

SEQ ID NO: 324854 - RNA, 20 nt, Human
uuuuuuuuuuuggcagacac

SEQ ID NO: 324855 - RNA, 22 nt, Human
uuuuuuuuuuuuuuuuuggcag

SEQ ID NO: 324856 - RNA, 22 nt, Human
uuuuuuuuuuuuuuuuuuuggc

SEQ ID NO: 324857 - RNA, 28 nt, Human
uuuuuuuuuuuuuuuuuuuuuuuggggg

SEQ ID NO: 324858 - RNA, 23 nt, Human
aaaaaacacuuccaacaacaauc

SEQ ID NO: 324859 - RNA, 20 nt, Human
aaacauauacucagauaaca

SEQ ID NO: 324860 - RNA, 20 nt, Human
aaauaaaccaucugaaaguc

SEQ ID NO: 324861 - RNA, 24 nt, Human
aaauaaauucucugcugaaagcaa

SEQ ID NO: 324862 - RNA, 21 nt, Human
aagaucuccucaagucaguac

SEQ ID NO: 324863 - RNA, 24 nt, Human
aauaggccagaucaaaaaauaaga

SEQ ID NO: 324864 - RNA, 24 nt, Human
aauugcuuucagugugacucccau

SEQ ID NO: 324865 - RNA, 19 nt, Human
acagagcggugaucucaaa

SEQ ID NO: 324866 - RNA, 21 nt, Human
acaucaacacucuuaaguaac

SEQ ID NO: 324867 - RNA, 19 nt, Human
aggaaggauggagaauggu

SEQ ID NO: 324868 - RNA, 21 nt, Human
agguuguuauaacaaaccauc

SEQ ID NO: 324869 - RNA, 23 nt, Human
agucaucucccucucaaaacugu

SEQ ID NO: 324870 - RNA, 22 nt, Human
auaaagcaggacuaccuucccu

SEQ ID NO: 324871 - RNA, 23 nt, Human
augagaguuucuucuccaugccu

SEQ ID NO: 324872 - RNA, 22 nt, Human
augucuguguguauaugugugu

SEQ ID NO: 324873 - RNA, 22 nt, Human
caaaaacaaguugaaaauguac

SEQ ID NO: 324874 - RNA, 18 nt, Human
caaaauaggccagaucaa

SEQ ID NO: 324875 - RNA, 20 nt, Human
caaacaagcaaagaaaaagu

SEQ ID NO: 324876 - RNA, 18 nt, Human
cacaaugaggggcaaaau

SEQ ID NO: 324877 - RNA, 23 nt, Human
cacaucucucucacuccuuaaag

SEQ ID NO: 324878 - RNA, 28 nt, Human
cagaugauucacucaaagcccugaaagg

SEQ ID NO: 324879 - RNA, 18 nt, Human
cagggucaggcaaccugu

SEQ ID NO: 324880 - RNA, 23 nt, Human
caucaaugugcugagaaagagcc

SEQ ID NO: 324881 - RNA, 26 nt, Human
caucucccucucaaaacugugcagga

SEQ ID NO: 324882 - RNA, 20 nt, Human
cauuguacccagcaugauaa

SEQ ID NO: 324883 - RNA, 23 nt, Human
ccagccgggcucucugaggagca

SEQ ID NO: 324884 - RNA, 22 nt, Human
ccaucugaaagucuucugguua

SEQ ID NO: 324885 - RNA, 19 nt, Human
ccgccagccgggcucucug

SEQ ID NO: 324886 - RNA, 22 nt, Human
ccucaaggagaaggauccugga

SEQ ID NO: 324887 - RNA, 27 nt, Human
cugaaagucuucugguuacuucaccag

SEQ ID NO: 324888 - RNA, 18 nt, Human
gaaacacacuagcugcag

SEQ ID NO: 324889 - RNA, 20 nt, Human
gaagaaacacacuagcugca

SEQ ID NO: 324890 - RNA, 18 nt, Human
gagaaucugaaaucagcc

SEQ ID NO: 324891 - RNA, 28 nt, Human
gagcagaagacggagccgcucggugugc

SEQ ID NO: 324892 - RNA, 20 nt, Human
gauugcagggucaggcaacc

SEQ ID NO: 324893 - RNA, 20 nt, Human
gcaaauaaaccaucugaaaa

SEQ ID NO: 324894 - RNA, 20 nt, Human
uaaauaagacagauaagcuc

SEQ ID NO: 324895 - RNA, 21 nt, Human
uacacaaacaagcaaagaaaa

SEQ ID NO: 324896 - RNA, 30 nt, Human
uacacaucucucucacuccuuaaagccuuu

SEQ ID NO: 324897 - RNA, 23 nt, Human
uauaaagcaggacuaccuucccu

SEQ ID NO: 324898 - RNA, 24 nt, Human
uaugacaugaaaaaacacuuccaa

SEQ ID NO: 324899 - RNA, 24 nt, Human
uauguacacaucucucucacuccu

SEQ ID NO: 324900 - RNA, 21 nt, Human
uauugccaaacaugucuuaau

SEQ ID NO: 324901 - RNA, 22 nt, Human
uauuggaaaauuuggggagaga

SEQ ID NO: 324902 - RNA, 18 nt, Human
ucaugaccaugcaugugu

SEQ ID NO: 324903 - RNA, 22 nt, Human
ucccaggccgccagccgggcuc

SEQ ID NO: 324904 - RNA, 19 nt, Human
ucccucucaaaacugugca

SEQ ID NO: 324905 - RNA, 22 nt, Human
uccucaagucaguacacauggc

SEQ ID NO: 324906 - RNA, 23 nt, Human
uccuggagccccugaaugagagu

SEQ ID NO: 324907 - RNA, 18 nt, Human
ucuguguguauaugugug

SEQ ID NO: 324908 - RNA, 21 nt, Human
ucuucuccaugccucucccca

SEQ ID NO: 324909 - RNA, 22 nt, Human
ucuuggguuaacaucauuuuua

SEQ ID NO: 324910 - RNA, 19 nt, Human
ugaaagcaaauaaaccauc

SEQ ID NO: 324911 - RNA, 19 nt, Human
ugaauuacacaaacaagca

SEQ ID NO: 324912 - RNA, 20 nt, Human
ugagaaagagccuuuguuuc

SEQ ID NO: 324913 - RNA, 19 nt, Human
ugagaguuucuucuccaug

SEQ ID NO: 324914 - RNA, 19 nt, Human
ugaggggcaaaauaggcca

SEQ ID NO: 324915 - RNA, 18 nt, Human
ugaugucuguguguauau

SEQ ID NO: 324916 - RNA, 25 nt, Human
ugcacauggccauguugcaagaucu

SEQ ID NO: 324917 - RNA, 18 nt, Human
ugcauuauccaugguaga

SEQ ID NO: 324918 - RNA, 23 nt, Human
ugcuuggcaaauugccagucuuc

SEQ ID NO: 324919 - RNA, 19 nt, Human
uggaaauauucauagaagc

SEQ ID NO: 324920 - RNA, 19 nt, Human
uggagccccugaaugagag

SEQ ID NO: 324921 - RNA, 21 nt, Human
uggagccccugaaugagaguu

SEQ ID NO: 324922 - RNA, 23 nt, Human
uggagccccugaaugagaguuuc

SEQ ID NO: 324923 - RNA, 27 nt, Human
uggcaaaaacaaguugaaaauguacag

SEQ ID NO: 324924 - RNA, 23 nt, Human
uggcaaauaggccaaguagaggc

SEQ ID NO: 324925 - RNA, 21 nt, Human
uggcaauacagcaagaauucu

SEQ ID NO: 324926 - RNA, 21 nt, Human
uguaaagaagaaacacacuag

SEQ ID NO: 324927 - RNA, 24 nt, Human
ugucaugaccaugcauguguuaau

SEQ ID NO: 324928 - RNA, 22 nt, Human
ugucuguguguauaugugugua

SEQ ID NO: 324929 - RNA, 22 nt, Human
uguguguaaagaagaaacacac

SEQ ID NO: 324930 - RNA, 18 nt, Human
uguguguauaugugugua

SEQ ID NO: 324931 - RNA, 19 nt, Human
uguguguauauguguguaa

SEQ ID NO: 324932 - RNA, 26 nt, Human
uguuauaauaauccccaagugcuugg

SEQ ID NO: 324933 - RNA, 23 nt, Human
uuaauuuuuguucuagccccaca

SEQ ID NO: 324934 - RNA, 22 nt, Human
uuacacaaacaagcaaagaaaa

SEQ ID NO: 324935 - RNA, 18 nt, Human
uucaaaaccugaaucuga

SEQ ID NO: 324936 - RNA, 25 nt, Human
uuccaacaacaaucgaccuucauaa

SEQ ID NO: 324937 - RNA, 20 nt, Human
uucucugacacaaauaaugg

SEQ ID NO: 324938 - RNA, 21 nt, Human
uucuuuuguucucugacacaa

SEQ ID NO: 324939 - RNA, 22 nt, Human
uugcagggucaggcaaccuguc

SEQ ID NO: 324940 - RNA, 21 nt, Human
uuugaugucuacuucuugggu

SEQ ID NO: 324941 - RNA, 20 nt, Human
aaaaaaaaaaaaaaaagcag

SEQ ID NO: 324942 - RNA, 19 nt, Human
aaaaauacacauuccugga

SEQ ID NO: 324943 - RNA, 20 nt, Human
aaagcaaaacauaccacaaa

SEQ ID NO: 324944 - RNA, 22 nt, Human
aaagcagcagcagaagccuggg

SEQ ID NO: 324945 - RNA, 18 nt, Human
aaagggcacuggcuguua

SEQ ID NO: 324946 - RNA, 22 nt, Human
aagaacuccgcaugccaucacc

SEQ ID NO: 324947 - RNA, 24 nt, Human
aagagcacuugucgcagggguggg

SEQ ID NO: 324948 - RNA, 26 nt, Human
aagcaaaaaaaaaaaaaaaaaaagca

SEQ ID NO: 324949 - RNA, 19 nt, Human
aagccugggauguggaaga

SEQ ID NO: 324950 - RNA, 18 nt, Human
aaggaacuagguccuugg

SEQ ID NO: 324951 - RNA, 25 nt, Human
aauacaaaagaaauggaaaaggggc

SEQ ID NO: 324952 - RNA, 19 nt, Human
aaucauggcugcaggcagu

SEQ ID NO: 324953 - RNA, 21 nt, Human
acaaagcugcuccccaaagau

SEQ ID NO: 324954 - RNA, 21 nt, Human
acacacccggucagguccaaa

SEQ ID NO: 324955 - RNA, 24 nt, Human
acacacccggucagguccaaagcu

SEQ ID NO: 324956 - RNA, 21 nt, Human
acacauuccuggaaauuuaua

SEQ ID NO: 324957 - RNA, 18 nt, Human
acagagcuuuuaaagcag

SEQ ID NO: 324958 - RNA, 23 nt, Human
acaggccauucacauaacagcaa

SEQ ID NO: 324959 - RNA, 20 nt, Human
acauaccacaaaguauaccc

SEQ ID NO: 324960 - RNA, 23 nt, Human
acauggcauaucugugggucccc

SEQ ID NO: 324961 - RNA, 23 nt, Human
acauuuuuaaauuaaaauuuagc

SEQ ID NO: 324962 - RNA, 23 nt, Human
accaaugccuuugccccccacaa

SEQ ID NO: 324963 - RNA, 18 nt, Human
acccaaaucccaguuccc

SEQ ID NO: 324964 - RNA, 21 nt, Human
acccggucagguccaaagcua

SEQ ID NO: 324965 - RNA, 18 nt, Human
acuaacccccugcagugg

SEQ ID NO: 324966 - RNA, 26 nt, Human
acucaguccaugguuuuacacacacc

SEQ ID NO: 324967 - RNA, 20 nt, Human
agaaggaacuagguccuugg

SEQ ID NO: 324968 - RNA, 18 nt, Human
agagcccgggacacugag

SEQ ID NO: 324969 - RNA, 20 nt, Human
agaggaucuauaaaccagug

SEQ ID NO: 324970 - RNA, 20 nt, Human
agcagcagaagccugggaug

SEQ ID NO: 324971 - RNA, 22 nt, Human
agcagggggaaauggugagcca

SEQ ID NO: 324972 - RNA, 21 nt, Human
agcagucgggcaaagcacacc

SEQ ID NO: 324973 - RNA, 19 nt, Human
agggggaaauggugagcca

SEQ ID NO: 324974 - RNA, 18 nt, Human
agugcccaccacucgaac

SEQ ID NO: 324975 - RNA, 19 nt, Human
aguggagagccaaauugua

SEQ ID NO: 324976 - RNA, 23 nt, Human
aguggccucacaacuacuggagc

SEQ ID NO: 324977 - RNA, 20 nt, Human
aguggccuuggucugaaggc

SEQ ID NO: 324978 - RNA, 24 nt, Human
auacaaaagaaauggaaaaggggc

SEQ ID NO: 324979 - RNA, 24 nt, Human
aucaccccuuccucaccacaaccc

SEQ ID NO: 324980 - RNA, 18 nt, Human
auggggcaggugggugga

SEQ ID NO: 324981 - RNA, 20 nt, Human
auugcaauuagggcaugaga

SEQ ID NO: 324982 - RNA, 22 nt, Human
caaagagcugcacaugaauggc

SEQ ID NO: 324983 - RNA, 19 nt, Human
caaagcaagaagcaagggc

SEQ ID NO: 324984 - RNA, 22 nt, Human
caaagcacaccgcucuugacuc

SEQ ID NO: 324985 - RNA, 24 nt, Human
caaccccgcgaaacaaaagcuaua

SEQ ID NO: 324986 - RNA, 21 nt, Human
cacagaaaacaaauacaaaag

SEQ ID NO: 324987 - RNA, 18 nt, Human
caccacaaccccgcgaaa

SEQ ID NO: 324988 - RNA, 25 nt, Human
caccacgguggcaacuuccacggcc

SEQ ID NO: 324989 - RNA, 19 nt, Human
caccagugcugcugguagg

SEQ ID NO: 324990 - RNA, 23 nt, Human
caccaucgagugucugcugugac

SEQ ID NO: 324991 - RNA, 22 nt, Human
cacccaucacauuuaccaccau

SEQ ID NO: 324992 - RNA, 23 nt, Human
caccccuuccucaccacaacccc

SEQ ID NO: 324993 - RNA, 20 nt, Human
cacccggucagguccaaagc

SEQ ID NO: 324994 - RNA, 20 nt, Human
cacccuuucuuccuacuaag

SEQ ID NO: 324995 - RNA, 20 nt, Human
cagaagccugggauguggaa

SEQ ID NO: 324996 - RNA, 20 nt, Human
cagauggugagggugagggg

SEQ ID NO: 324997 - RNA, 19 nt, Human
cagcagcagaagccuggga

SEQ ID NO: 324998 - RNA, 22 nt, Human
caggaggggccuccucuaccaa

SEQ ID NO: 324999 - RNA, 27 nt, Human
caggcagucugcaaagcaagaagcaag

SEQ ID NO: 325000 - RNA, 24 nt, Human
cagucugcaaagcaagaagcaagg

SEQ ID NO: 325001 - RNA, 20 nt, Human
cagugcccaccacucgaacc

SEQ ID NO: 325002 - RNA, 23 nt, Human
cauaucugugggucccccugcaa

SEQ ID NO: 325003 - RNA, 22 nt, Human
caugcagaaaagagagagcgcc

SEQ ID NO: 325004 - RNA, 18 nt, Human
caugcagcuugggcagcc

SEQ ID NO: 325005 - RNA, 21 nt, Human
ccagcucagugcccaccacuc

SEQ ID NO: 325006 - RNA, 20 nt, Human
cccaggugcuugcaagcucc

SEQ ID NO: 325007 - RNA, 19 nt, Human
cccauggugacaaagagcu

SEQ ID NO: 325008 - RNA, 19 nt, Human
ccccaaagaugagaagcuu

SEQ ID NO: 325009 - RNA, 20 nt, Human
ccccuuccucaccacaaccc

SEQ ID NO: 325010 - RNA, 21 nt, Human
cccgcaggcucaggcucggcg

SEQ ID NO: 325011 - RNA, 23 nt, Human
cccgcgaaacaaaagcuauaaac

SEQ ID NO: 325012 - RNA, 21 nt, Human
cccggguggaaccugcccucg

SEQ ID NO: 325013 - RNA, 21 nt, Human
cccucugucacuccccucccg

SEQ ID NO: 325014 - RNA, 18 nt, Human
cccucuucugcuccuccu

SEQ ID NO: 325015 - RNA, 22 nt, Human
cccuucuuacugcccuggacag

SEQ ID NO: 325016 - RNA, 19 nt, Human
cccuucuuccucuguuguc

SEQ ID NO: 325017 - RNA, 19 nt, Human
cccuugguggggaaaacuc

SEQ ID NO: 325018 - RNA, 18 nt, Human
ccgcgcgcuggggcccac

SEQ ID NO: 325019 - RNA, 24 nt, Human
ccgugggaagaagagccgugugcu

SEQ ID NO: 325020 - RNA, 21 nt, Human
ccuacaagcugccucuucuga

SEQ ID NO: 325021 - RNA, 22 nt, Human
ccuccaacgcggaagcuggcuc

SEQ ID NO: 325022 - RNA, 21 nt, Human
ccucccacagcagcgccaggu

SEQ ID NO: 325023 - RNA, 22 nt, Human
ccucguccucuuccucuaguca

SEQ ID NO: 325024 - RNA, 18 nt, Human
ccucuagucacucaggcc

SEQ ID NO: 325025 - RNA, 23 nt, Human
ccucugucacuccccucccgggc

SEQ ID NO: 325026 - RNA, 22 nt, Human
ccugaacugcagcaucaguaug

SEQ ID NO: 325027 - RNA, 23 nt, Human
ccugcacuguguccucauaguuu

SEQ ID NO: 325028 - RNA, 21 nt, Human
ccugccaguugcccugcucgg

SEQ ID NO: 325029 - RNA, 20 nt, Human
ccugcucggcgauccacucg

SEQ ID NO: 325030 - RNA, 18 nt, Human
ccugggauuucucgcccc

SEQ ID NO: 325031 - RNA, 18 nt, Human
ccugugccaauaaaaucc

SEQ ID NO: 325032 - RNA, 20 nt, Human
ccuugcagcccuucuuacug

SEQ ID NO: 325033 - RNA, 21 nt, Human
cgaaacaaaagcuauaaacac

SEQ ID NO: 325034 - RNA, 18 nt, Human
cgaggcggaggcggcggu

SEQ ID NO: 325035 - RNA, 22 nt, Human
cgcgcgcuggggcccacgugca

SEQ ID NO: 325036 - RNA, 22 nt, Human
cgcgcuggggcccacgugcagg

SEQ ID NO: 325037 - RNA, 22 nt, Human
cgcucagcagcucucugaacac

SEQ ID NO: 325038 - RNA, 21 nt, Human
cggccuuuucuuggauuuccu

SEQ ID NO: 325039 - RNA, 24 nt, Human
cggcgggggccgcgcgcuggggcc

SEQ ID NO: 325040 - RNA, 18 nt, Human
cuaaaccccugaaaacag

SEQ ID NO: 325041 - RNA, 18 nt, Human
cucacagaaaacaaauac

SEQ ID NO: 325042 - RNA, 19 nt, Human
cuccacaaagcugcucccc

SEQ ID NO: 325043 - RNA, 24 nt, Human
cucccaggugcuugcaagcuccac

SEQ ID NO: 325044 - RNA, 25 nt, Human
cuccccuuccuugcagcccuucuua

SEQ ID NO: 325045 - RNA, 18 nt, Human
cucgccccuuccugccag

SEQ ID NO: 325046 - RNA, 22 nt, Human
cucugacccuccuggccccagc

SEQ ID NO: 325047 - RNA, 19 nt, Human
cugaaaaggucauagaaaa

SEQ ID NO: 325048 - RNA, 20 nt, Human
cugcaguugggaaaacacac

SEQ ID NO: 325049 - RNA, 20 nt, Human
cugugggggagcagggggaa

SEQ ID NO: 325050 - RNA, 18 nt, Human
cuuaaaaugaccugaagg

SEQ ID NO: 325051 - RNA, 22 nt, Human
cuugcaagcuccacaaagcugc

SEQ ID NO: 325052 - RNA, 21 nt, Human
gaaaacagggggugggguagg

SEQ ID NO: 325053 - RNA, 18 nt, Human
gaaccagggucgcugugg

SEQ ID NO: 325054 - RNA, 21 nt, Human
gagcagucgggcaaagcacac

SEQ ID NO: 325055 - RNA, 23 nt, Human
gagcccgggacacugagaggcgg

SEQ ID NO: 325056 - RNA, 21 nt, Human
gagccucagaaaacccuacug

SEQ ID NO: 325057 - RNA, 24 nt, Human
gaucaccacgguggcaacuuccac

SEQ ID NO: 325058 - RNA, 19 nt, Human
gaucucgccccucugcagc

SEQ ID NO: 325059 - RNA, 20 nt, Human
gaucucugucuacucuccua

SEQ ID NO: 325060 - RNA, 27 nt, Human
gcaaaacauaccacaaaguauaccccc

SEQ ID NO: 325061 - RNA, 24 nt, Human
gcacaacucauccggcccauggug

SEQ ID NO: 325062 - RNA, 28 nt, Human
gcagagaagcaaaaaaaaaaaaaaaaaa

SEQ ID NO: 325063 - RNA, 23 nt, Human
gcagcagcagaagccugggaugu

SEQ ID NO: 325064 - RNA, 22 nt, Human
gccaucaccccuuccucaccac

SEQ ID NO: 325065 - RNA, 24 nt, Human
gcccucgugggucagggcgaggac

SEQ ID NO: 325066 - RNA, 21 nt, Human
gcuccugguacagcugggcug

SEQ ID NO: 325067 - RNA, 19 nt, Human
gcuugggcagcccagugga

SEQ ID NO: 325068 - RNA, 21 nt, Human
ggaaaacucaaugggaaucug

SEQ ID NO: 325069 - RNA, 23 nt, Human
ggaaaaggggcagagaagcaaaa

SEQ ID NO: 325070 - RNA, 21 nt, Human
ggacauggggcaggugggugg

SEQ ID NO: 325071 - RNA, 21 nt, Human
ggaucucgccccucugcagcc

SEQ ID NO: 325072 - RNA, 19 nt, Human
ggcccgggccaaggaaagg

SEQ ID NO: 325073 - RNA, 19 nt, Human
gggcugggaaccccaccuc

SEQ ID NO: 325074 - RNA, 20 nt, Human
ggugagggggggaaagacac

SEQ ID NO: 325075 - RNA, 23 nt, Human
ggugggguagggucguaaaagcc

SEQ ID NO: 325076 - RNA, 19 nt, Human
guagcgcugcucguacccc

SEQ ID NO: 325077 - RNA, 22 nt, Human
guccaguuccuuuccuucagcc

SEQ ID NO: 325078 - RNA, 21 nt, Human
guccccauccuccccuuccuu

SEQ ID NO: 325079 - RNA, 20 nt, Human
guccccuugguggggaaaac

SEQ ID NO: 325080 - RNA, 19 nt, Human
gugcaccucccacagcagc

SEQ ID NO: 325081 - RNA, 21 nt, Human
gugcaugguccccuugguggg

SEQ ID NO: 325082 - RNA, 19 nt, Human
guggaggagaacuuaccca

SEQ ID NO: 325083 - RNA, 22 nt, Human
uaaaagccacaaauuagccuuc

SEQ ID NO: 325084 - RNA, 24 nt, Human
uaaaagccacaaauuagccuucgg

SEQ ID NO: 325085 - RNA, 22 nt, Human
uaaacacacacaagucagagga

SEQ ID NO: 325086 - RNA, 19 nt, Human
uaaaccccugaaaacaggg

SEQ ID NO: 325087 - RNA, 18 nt, Human
uaaagcagcagcagaagc

SEQ ID NO: 325088 - RNA, 20 nt, Human
uaaagcagcagcagaagccu

SEQ ID NO: 325089 - RNA, 23 nt, Human
uaagaagugcaauuccaccugug

SEQ ID NO: 325090 - RNA, 18 nt, Human
uacaaaagaaauggaaaa

SEQ ID NO: 325091 - RNA, 24 nt, Human
uacugggaugcuuccgaaaggcca

SEQ ID NO: 325092 - RNA, 27 nt, Human
uagcaguuaggauauguuaugacaugc

SEQ ID NO: 325093 - RNA, 23 nt, Human
uaguggccuuggucugaaggcug

SEQ ID NO: 325094 - RNA, 18 nt, Human
uaugaaaggaaaagguac

SEQ ID NO: 325095 - RNA, 23 nt, Human
ucacaccagugcugcugguagga

SEQ ID NO: 325096 - RNA, 20 nt, Human
ucaccacaaccccgcgaaac

SEQ ID NO: 325097 - RNA, 21 nt, Human
ucaccacauuaaaaauacaca

SEQ ID NO: 325098 - RNA, 25 nt, Human
ucaccccuuccucaccacaaccaaa

SEQ ID NO: 325099 - RNA, 20 nt, Human
ucacugaagauaaagaacuc

SEQ ID NO: 325100 - RNA, 21 nt, Human
ucagaaagugccgugggaaga

SEQ ID NO: 325101 - RNA, 19 nt, Human
ucagaacuugacaugcaga

SEQ ID NO: 325102 - RNA, 22 nt, Human
ucaggcucggcgggggccgcgc

SEQ ID NO: 325103 - RNA, 24 nt, Human
ucagugcccaccacucgaaccagg

SEQ ID NO: 325104 - RNA, 23 nt, Human
ucaguggagagccaaauuguaga

SEQ ID NO: 325105 - RNA, 20 nt, Human
ucauggcugcaggcagucug

SEQ ID NO: 325106 - RNA, 19 nt, Human
ucccaugaaacaucucaac

SEQ ID NO: 325107 - RNA, 23 nt, Human
uccccauccuccccuuccuugca

SEQ ID NO: 325108 - RNA, 21 nt, Human
ucccgcaggcucaggcucggc

SEQ ID NO: 325109 - RNA, 21 nt, Human
ucccucugucacuccccuccc

SEQ ID NO: 325110 - RNA, 21 nt, Human
ucccucuucugcuccuccugg

SEQ ID NO: 325111 - RNA, 22 nt, Human
uccuuguccccauccuccccuu

SEQ ID NO: 325112 - RNA, 22 nt, Human
ucgccccuuccugccagcccuc

SEQ ID NO: 325113 - RNA, 24 nt, Human
ucggccagcacuuuaaccugcacu

SEQ ID NO: 325114 - RNA, 23 nt, Human
ucucgccccucugcagccgcucc

SEQ ID NO: 325115 - RNA, 19 nt, Human
ucugcaaagcaagaagcaa

SEQ ID NO: 325116 - RNA, 18 nt, Human
ucugcugugacucagucc

SEQ ID NO: 325117 - RNA, 19 nt, Human
ucugcugugacucagucca

SEQ ID NO: 325118 - RNA, 21 nt, Human
ucugcugugacucaguccaug

SEQ ID NO: 325119 - RNA, 25 nt, Human
ucugugcuggggguugaacauuuca

SEQ ID NO: 325120 - RNA, 25 nt, Human
ugaaauaaaaaacaaauggugcauu

SEQ ID NO: 325121 - RNA, 21 nt, Human
ugaagucagucagucuugcaa

SEQ ID NO: 325122 - RNA, 21 nt, Human
ugacaaaaucauggcugcagg

SEQ ID NO: 325123 - RNA, 24 nt, Human
ugaccaaugccuuugccccccaca

SEQ ID NO: 325124 - RNA, 28 nt, Human
ugcagaaaagagagagcgccaagucccc

SEQ ID NO: 325125 - RNA, 20 nt, Human
ugcagcggcgaggcggaggc

SEQ ID NO: 325126 - RNA, 22 nt, Human
ugccaaaaaggcucagucuuug

SEQ ID NO: 325127 - RNA, 19 nt, Human
ugccacacuuaaaaagaaa

SEQ ID NO: 325128 - RNA, 20 nt, Human
ugcccugggauuucucgccc

SEQ ID NO: 325129 - RNA, 22 nt, Human
ugccuuaacaacuccagcccug

SEQ ID NO: 325130 - RNA, 21 nt, Human
uggcaucugugcuggggguug

SEQ ID NO: 325131 - RNA, 22 nt, Human
uggccgggccgcggugcaccuc

SEQ ID NO: 325132 - RNA, 19 nt, Human
uggcugcaggcagucugca

SEQ ID NO: 325133 - RNA, 20 nt, Human
ugggauguggaagaucucug

SEQ ID NO: 325134 - RNA, 19 nt, Human
ugggcacagcugcucgcag

SEQ ID NO: 325135 - RNA, 21 nt, Human
ugggguagggucguaaaagcc

SEQ ID NO: 325136 - RNA, 19 nt, Human
uuagccuucggcacagguc

SEQ ID NO: 325137 - RNA, 20 nt, Human
uuaggcucuuucuggggcua

SEQ ID NO: 325138 - RNA, 21 nt, Human
uuccagggcugccauuucagu

SEQ ID NO: 325139 - RNA, 27 nt, Human
uucccaccacaggcccgggccaaggaa

SEQ ID NO: 325140 - RNA, 21 nt, Human
uuccugccagcccucagguga

SEQ ID NO: 325141 - RNA, 20 nt, Human
uucuucauauucauucuuaa

SEQ ID NO: 325142 - RNA, 22 nt, Human
uugacucugcucuacaggccau

SEQ ID NO: 325143 - RNA, 21 nt, Human
uugcagcccuucuuacugccc

SEQ ID NO: 325144 - RNA, 19 nt, Human
uuuuccccuuuggaagaga

SEQ ID NO: 325145 - RNA, 20 nt, Human
aacagcagcugaucggcccc

SEQ ID NO: 325146 - RNA, 22 nt, Human
agccagcagcgacugcccugcc

SEQ ID NO: 325147 - RNA, 19 nt, Human
agggccauccccuggggac

SEQ ID NO: 325148 - RNA, 21 nt, Human
agguggaaugucucaggcccu

SEQ ID NO: 325149 - RNA, 23 nt, Human
cagagcagaccugacuguacaga

SEQ ID NO: 325150 - RNA, 21 nt, Human
ccaagccuggugggggaccag

SEQ ID NO: 325151 - RNA, 22 nt, Human
cccagaccagagcagaccugac

SEQ ID NO: 325152 - RNA, 21 nt, Human
ccccagaguuugggggccaag

SEQ ID NO: 325153 - RNA, 23 nt, Human
ccgaagacagggcagagaucaca

SEQ ID NO: 325154 - RNA, 24 nt, Human
ccgcagccaucagccaugucccug

SEQ ID NO: 325155 - RNA, 23 nt, Human
ccucacucucuucccagagccag

SEQ ID NO: 325156 - RNA, 25 nt, Human
ccucccguugccccuuugggaugcc

SEQ ID NO: 325157 - RNA, 23 nt, Human
cuuuuccaauaacugugguuuuu

SEQ ID NO: 325158 - RNA, 27 nt, Human
gagccagcacccagaccagagcagacc

SEQ ID NO: 325159 - RNA, 22 nt, Human
gagggccauccccuggggacca

SEQ ID NO: 325160 - RNA, 26 nt, Human
gaucacagggucagcuugaccggugg

SEQ ID NO: 325161 - RNA, 21 nt, Human
gcagcagccuccccuuccucc

SEQ ID NO: 325162 - RNA, 19 nt, Human
gccccagaguuugggggcc

SEQ ID NO: 325163 - RNA, 18 nt, Human
gcuggcucuuggaguggc

SEQ ID NO: 325164 - RNA, 22 nt, Human
gggaauccagggccagagcagg

SEQ ID NO: 325165 - RNA, 20 nt, Human
gggcagagaucacaggguca

SEQ ID NO: 325166 - RNA, 22 nt, Human
gggcagagaucacagggucagc

SEQ ID NO: 325167 - RNA, 18 nt, Human
guggaaugucucaggccc

SEQ ID NO: 325168 - RNA, 18 nt, Human
guggaaugucucaggccc

SEQ ID NO: 325169 - RNA, 19 nt, Human
guggaaugucucaggcccu

SEQ ID NO: 325170 - RNA, 21 nt, Human
uaaacguuuccucugucccuc

SEQ ID NO: 325171 - RNA, 22 nt, Human
uccagggccagagcaggucggc

SEQ ID NO: 325172 - RNA, 20 nt, Human
uccccuggggacuuggggug

SEQ ID NO: 325173 - RNA, 18 nt, Human
ucccucacucucuuccca

SEQ ID NO: 325174 - RNA, 23 nt, Human
uccgcagccaucagccauguccc

SEQ ID NO: 325175 - RNA, 24 nt, Human
ucuccagucuugcccaggcucucc

SEQ ID NO: 325176 - RNA, 22 nt, Human
ugcccugccgcaggagaaacag

SEQ ID NO: 325177 - RNA, 22 nt, Human
uggcuugguagagggggagggc

SEQ ID NO: 325178 - RNA, 23 nt, Human
ugggcucuccagucuugcccagg

SEQ ID NO: 325179 - RNA, 21 nt, Human
uguggagcagaaagggggcug

SEQ ID NO: 325180 - RNA, 20 nt, Human
uuccucugucccucacucuc

SEQ ID NO: 325181 - RNA, 18 nt, Human
uuuuguggagcagaaagg

SEQ ID NO: 325182 - RNA, 19 nt, Human
aaaaauccaaaaauuagcc

SEQ ID NO: 325183 - RNA, 18 nt, Human
aaaaucaguugggcgugg

SEQ ID NO: 325184 - RNA, 19 nt, Human
aaacaaaacacgucugcag

SEQ ID NO: 325185 - RNA, 19 nt, Human
aaagugcugggauuacagg

SEQ ID NO: 325186 - RNA, 21 nt, Human
aaagugcugggauuacaggca

SEQ ID NO: 325187 - RNA, 22 nt, Human
aaagugcugggauuacaggcaa

SEQ ID NO: 325188 - RNA, 22 nt, Human
aacaaaacacgucugcagacug

SEQ ID NO: 325189 - RNA, 20 nt, Human
aacauggggaaaccccgucu

SEQ ID NO: 325190 - RNA, 21 nt, Human
aacauggggaaaccccgucuc

SEQ ID NO: 325191 - RNA, 19 nt, Human
aagcaauucuggugccuca

SEQ ID NO: 325192 - RNA, 18 nt, Human
aagugcugggauuacagg

SEQ ID NO: 325193 - RNA, 19 nt, Human
aagugcugggauuacaggc

SEQ ID NO: 325194 - RNA, 22 nt, Human
aaguuuaggugccucuggcucu

SEQ ID NO: 325195 - RNA, 19 nt, Human
aauacggugaaaucccauc

SEQ ID NO: 325196 - RNA, 18 nt, Human
aauagcugggauuacagg

SEQ ID NO: 325197 - RNA, 21 nt, Human
aaucacgaggucaggaguucg

SEQ ID NO: 325198 - RNA, 22 nt, Human
aaucacgaggucaggaguucga

SEQ ID NO: 325199 - RNA, 24 nt, Human
aaucacgaggucaggaguucgaga

SEQ ID NO: 325200 - RNA, 23 nt, Human
accaauuagcugguccccaccac

SEQ ID NO: 325201 - RNA, 24 nt, Human
accccgucucuacuaaaaauacaa

SEQ ID NO: 325202 - RNA, 23 nt, Human
accucggccucccaaagugcugg

SEQ ID NO: 325203 - RNA, 18 nt, Human
acgggguuucgccauguu

SEQ ID NO: 325204 - RNA, 23 nt, Human
acgggguuucgccauguuggcca

SEQ ID NO: 325205 - RNA, 24 nt, Human
acgggguuucgccauguuggccag

SEQ ID NO: 325206 - RNA, 18 nt, Human
acggugaaaucccaucuc

SEQ ID NO: 325207 - RNA, 20 nt, Human
acggugaaaucccaucucua

SEQ ID NO: 325208 - RNA, 24 nt, Human
acugcacucuagccugggcagcag

SEQ ID NO: 325209 - RNA, 26 nt, Human
acugcacucuagccugggcagcagag

SEQ ID NO: 325210 - RNA, 20 nt, Human
acuggaucgugaucacaguu

SEQ ID NO: 325211 - RNA, 23 nt, Human
agagcuugcagugagccgagauc

SEQ ID NO: 325212 - RNA, 23 nt, Human
agcacuuugggaggcccaggcag

SEQ ID NO: 325213 - RNA, 24 nt, Human
agcacuuugggaggccgaggcggg

SEQ ID NO: 325214 - RNA, 23 nt, Human
agcagggaagugguaaugcuagc

SEQ ID NO: 325215 - RNA, 21 nt, Human
agcauggagcccccuucccca

SEQ ID NO: 325216 - RNA, 23 nt, Human
agccgggugugguggcgggugcc

SEQ ID NO: 325217 - RNA, 18 nt, Human
agccuccugaauagcugg

SEQ ID NO: 325218 - RNA, 24 nt, Human
agccugggcagcagagcgagacuc

SEQ ID NO: 325219 - RNA, 28 nt, Human
agcuauguggccccaggcaagucaccuc

SEQ ID NO: 325220 - RNA, 19 nt, Human
agcucucagccuuggccac

SEQ ID NO: 325221 - RNA, 19 nt, Human
agcugggaggcuggggcag

SEQ ID NO: 325222 - RNA, 18 nt, Human
aggaggcggcaguggggg

SEQ ID NO: 325223 - RNA, 20 nt, Human
aggaguugcucauccagcau

SEQ ID NO: 325224 - RNA, 24 nt, Human
aggcaaaucacgaggucaggaguu

SEQ ID NO: 325225 - RNA, 21 nt, Human
aggcagagcuugcagugagcc

SEQ ID NO: 325226 - RNA, 24 nt, Human
aggcagagcuugcagugagccgag

SEQ ID NO: 325227 - RNA, 18 nt, Human
aggcaggagaauggugug

SEQ ID NO: 325228 - RNA, 21 nt, Human
aggcaggagaauggugugaac

SEQ ID NO: 325229 - RNA, 22 nt, Human
aggcaggcaaaucacgagguca

SEQ ID NO: 325230 - RNA, 24 nt, Human
aggcaggcaaaucacgaggucagg

SEQ ID NO: 325231 - RNA, 24 nt, Human
aggcgggcagaucacgagcucagg

SEQ ID NO: 325232 - RNA, 19 nt, Human
aggcugaggcaggagaaug

SEQ ID NO: 325233 - RNA, 18 nt, Human
agggaagcagaucuucua

SEQ ID NO: 325234 - RNA, 22 nt, Human
agguagcuaacccacucaucuc

SEQ ID NO: 325235 - RNA, 24 nt, Human
agguggagguuguggugagcugag

SEQ ID NO: 325236 - RNA, 21 nt, Human
agugccguggcgcagucucag

SEQ ID NO: 325237 - RNA, 18 nt, Human
agugcugggauuacaggc

SEQ ID NO: 325238 - RNA, 23 nt, Human
aguugggcgugguggugugcgcc

SEQ ID NO: 325239 - RNA, 21 nt, Human
auaagcgugaaacuccgucuc

SEQ ID NO: 325240 - RNA, 24 nt, Human
aucacgccacugcacucuagccug

SEQ ID NO: 325241 - RNA, 24 nt, Human
aucgugccauugcacuccagccug

SEQ ID NO: 325242 - RNA, 19 nt, Human
augccuguaauccuagcac

SEQ ID NO: 325243 - RNA, 25 nt, Human
auggagcccccuuccccagcgaauu

SEQ ID NO: 325244 - RNA, 18 nt, Human
auguacccaaguuuaggu

SEQ ID NO: 325245 - RNA, 24 nt, Human
auugcacuccagccugggcaauaa

SEQ ID NO: 325246 - RNA, 25 nt, Human
auugcacuccagccugggcaauaag

SEQ ID NO: 325247 - RNA, 19 nt, Human
caaaggacauccugagugg

SEQ ID NO: 325248 - RNA, 24 nt, Human
caacauggggaaaccccgucucua

SEQ ID NO: 325249 - RNA, 23 nt, Human
caaccuccaccuccuggguucaa

SEQ ID NO: 325250 - RNA, 24 nt, Human
caagaccauccuggcuaauacggu

SEQ ID NO: 325251 - RNA, 22 nt, Human
caaggcauaacaaucacugcua

SEQ ID NO: 325252 - RNA, 20 nt, Human
cacacagaaagcugggaggc

SEQ ID NO: 325253 - RNA, 24 nt, Human
cacaccuguaaucccagcacuuug

SEQ ID NO: 325254 - RNA, 20 nt, Human
cacagcgucucucugggaau

SEQ ID NO: 325255 - RNA, 19 nt, Human
caccuguaaucccagcacu

SEQ ID NO: 325256 - RNA, 24 nt, Human
caccuguaaucccagcacuuuggg

SEQ ID NO: 325257 - RNA, 19 nt, Human
cacgucugcagacuggauc

SEQ ID NO: 325258 - RNA, 24 nt, Human
cacucaucucucccucuuuucuuu

SEQ ID NO: 325259 - RNA, 22 nt, Human
cacuccagccugggcaauaagc

SEQ ID NO: 325260 - RNA, 23 nt, Human
cacuccagccugggcaauaagcg

SEQ ID NO: 325261 - RNA, 21 nt, Human
cacugcaaccuccaccuccug

SEQ ID NO: 325262 - RNA, 23 nt, Human
cacugcaaccuccaccuccuggg

SEQ ID NO: 325263 - RNA, 18 nt, Human
cacugcacucuagccugg

SEQ ID NO: 325264 - RNA, 19 nt, Human
cacugcacucuagccuggg

SEQ ID NO: 325265 - RNA, 23 nt, Human
cacugcacucuagccugggcagc

SEQ ID NO: 325266 - RNA, 24 nt, Human
cacugcacucuagccugggcagca

SEQ ID NO: 325267 - RNA, 24 nt, Human
cagaaagcugggaggcuggggcag

SEQ ID NO: 325268 - RNA, 21 nt, Human
cagacaaagccugauuuugga

SEQ ID NO: 325269 - RNA, 24 nt, Human
cagagucuugcucugucgcccagg

SEQ ID NO: 325270 - RNA, 24 nt, Human
cagcacuuugggaggccgaggcgg

SEQ ID NO: 325271 - RNA, 24 nt, Human
cagccugaccaacauggggaaacc

SEQ ID NO: 325272 - RNA, 24 nt, Human
cagcuacucaggaggcugaggcag

SEQ ID NO: 325273 - RNA, 21 nt, Human
caggagguggagguuguggug

SEQ ID NO: 325274 - RNA, 24 nt, Human
caggagguggagguuguggugagc

SEQ ID NO: 325275 - RNA, 22 nt, Human
caggcaaaucacgaggucagga

SEQ ID NO: 325276 - RNA, 22 nt, Human
caggcaagucaccucaccucuc

SEQ ID NO: 325277 - RNA, 22 nt, Human
caggcugggcagaggcgagcac

SEQ ID NO: 325278 - RNA, 24 nt, Human
cagggaagcagaucuucuaaggga

SEQ ID NO: 325279 - RNA, 19 nt, Human
caguaaaucugccugcaga

SEQ ID NO: 325280 - RNA, 24 nt, Human
cauccagcauuugcuccugggaca

SEQ ID NO: 325281 - RNA, 20 nt, Human
caugccuguaauccuagcac

SEQ ID NO: 325282 - RNA, 24 nt, Human
caugccuguaauccuagcacuuug

SEQ ID NO: 325283 - RNA, 24 nt, Human
cauguuggccaggcuggucuugaa

SEQ ID NO: 325284 - RNA, 18 nt, Human
cauugcacuccagccugg

SEQ ID NO: 325285 - RNA, 19 nt, Human
cauugcacuccagccuggg

SEQ ID NO: 325286 - RNA, 21 nt, Human
cauugcacuccagccugggca

SEQ ID NO: 325287 - RNA, 24 nt, Human
cauugcacuccagccugggcaaua

SEQ ID NO: 325288 - RNA, 19 nt, Human
ccaaagugcugggauuaca

SEQ ID NO: 325289 - RNA, 23 nt, Human
ccaaagugcugggauuacaggca

SEQ ID NO: 325290 - RNA, 20 nt, Human
ccacaccagcauggagcccc

SEQ ID NO: 325291 - RNA, 20 nt, Human
ccacugcacucuagccuggg

SEQ ID NO: 325292 - RNA, 20 nt, Human
ccacugcacucuagccuggg

SEQ ID NO: 325293 - RNA, 21 nt, Human
ccacugcacucuagccugggc

SEQ ID NO: 325294 - RNA, 22 nt, Human
ccacugcacucuagccugggca

SEQ ID NO: 325295 - RNA, 22 nt, Human
ccacugcacucuagccugggca

SEQ ID NO: 325296 - RNA, 22 nt, Human
ccacugcacucuagccugggca

SEQ ID NO: 325297 - RNA, 23 nt, Human
ccacugcacucuagccugggcag

SEQ ID NO: 325298 - RNA, 24 nt, Human
ccacugcacucuagccugggcagc

SEQ ID NO: 325299 - RNA, 22 nt, Human
ccaggagguggagguuguggug

SEQ ID NO: 325300 - RNA, 18 nt, Human
ccaggcaagucaccucac

SEQ ID NO: 325301 - RNA, 19 nt, Human
ccauguuggccaggcuggu

SEQ ID NO: 325302 - RNA, 21 nt, Human
ccauguuggccaggcuggucu

SEQ ID NO: 325303 - RNA, 18 nt, Human
ccauugcacuccagccug

SEQ ID NO: 325304 - RNA, 20 nt, Human
ccauugcacuccagccuggg

SEQ ID NO: 325305 - RNA, 21 nt, Human
ccauugcacuccagccugggc

SEQ ID NO: 325306 - RNA, 23 nt, Human
ccauugcacuccagccugggcaa

SEQ ID NO: 325307 - RNA, 24 nt, Human
ccauugcacuccagccugggcaau

SEQ ID NO: 325308 - RNA, 23 nt, Human
cccaaagaacaggaguugcucau

SEQ ID NO: 325309 - RNA, 24 nt, Human
cccaaagugcugggauuacaggca

SEQ ID NO: 325310 - RNA, 18 nt, Human
cccaggagguggagguug

SEQ ID NO: 325311 - RNA, 22 nt, Human
cccagggaagcccccaaacccc

SEQ ID NO: 325312 - RNA, 21 nt, Human
cccaucucuacuaaaaaucca

SEQ ID NO: 325313 - RNA, 24 nt, Human
cccgaccucaagugauccgcccac

SEQ ID NO: 325314 - RNA, 21 nt, Human
cccuggagaaggucagggaga

SEQ ID NO: 325315 - RNA, 19 nt, Human
ccuccaccuccuggguuca

SEQ ID NO: 325316 - RNA, 22 nt, Human
ccuccuggguucaagcaauucu

SEQ ID NO: 325317 - RNA, 20 nt, Human
ccucuggcucugucagcucc

SEQ ID NO: 325318 - RNA, 21 nt, Human
ccugaagucgagaagaauugu

SEQ ID NO: 325319 - RNA, 23 nt, Human
ccugaauagcugggauuacaggc

SEQ ID NO: 325320 - RNA, 24 nt, Human
ccugaauagcugggauuacaggca

SEQ ID NO: 325321 - RNA, 23 nt, Human
ccugaccaacauggggaaacccc

SEQ ID NO: 325322 - RNA, 24 nt, Human
ccugaccaacauggggaaaccccg

SEQ ID NO: 325323 - RNA, 24 nt, Human
ccuggcuaauacggugaaauccca

SEQ ID NO: 325324 - RNA, 22 nt, Human
ccugggcagcagagcgagacuc

SEQ ID NO: 325325 - RNA, 18 nt, Human
ccuggggauauccugccu

SEQ ID NO: 325326 - RNA, 19 nt, Human
ccuggguucaagcaauucu

SEQ ID NO: 325327 - RNA, 21 nt, Human
ccuguaaucucagcuacuugg

SEQ ID NO: 325328 - RNA, 22 nt, Human
ccuguaaucucagcuacuuggg

SEQ ID NO: 325329 - RNA, 19 nt, Human
ccuguagucccagcuacuc

SEQ ID NO: 325330 - RNA, 21 nt, Human
ccuguagucccagcuacucag

SEQ ID NO: 325331 - RNA, 22 nt, Human
ccuguagucccagcuacucagg

SEQ ID NO: 325332 - RNA, 21 nt, Human
ccuuccauagcuauuucugcc

SEQ ID NO: 325333 - RNA, 18 nt, Human
cgaccucaagugauccgc

SEQ ID NO: 325334 - RNA, 24 nt, Human
cgaggcgggcagaucacgagcuca

SEQ ID NO: 325335 - RNA, 24 nt, Human
cgccauguuggccaggcuggucuu

SEQ ID NO: 325336 - RNA, 27 nt, Human
cgccauguuggccaggcuggucuugaa

SEQ ID NO: 325337 - RNA, 21 nt, Human
cgccuguaaucucagcuacuu

SEQ ID NO: 325338 - RNA, 23 nt, Human
cgccuguaaucucagcuacuugg

SEQ ID NO: 325339 - RNA, 24 nt, Human
cgccuguaaucucagcuacuuggg

SEQ ID NO: 325340 - RNA, 24 nt, Human
cggcagugggggucacccaggcgu

SEQ ID NO: 325341 - RNA, 22 nt, Human
cggcugccacucagcucuggcc

SEQ ID NO: 325342 - RNA, 24 nt, Human
cggcuugcuuccuucccuucccag

SEQ ID NO: 325343 - RNA, 22 nt, Human
cgggcagaucacgagcucagga

SEQ ID NO: 325344 - RNA, 24 nt, Human
cgggguuucgccauguuggccagg

SEQ ID NO: 325345 - RNA, 20 nt, Human
cuagcacuuugggaggccca

SEQ ID NO: 325346 - RNA, 23 nt, Human
cuagccucugggacauucagagg

SEQ ID NO: 325347 - RNA, 19 nt, Human
cuaguuuaaggauuauugg

SEQ ID NO: 325348 - RNA, 24 nt, Human
cucaagugauccgcccaccucggc

SEQ ID NO: 325349 - RNA, 22 nt, Human
cucacaccuguaaucccagcac

SEQ ID NO: 325350 - RNA, 24 nt, Human
cucacaccuguaaucccagcacuu

SEQ ID NO: 325351 - RNA, 24 nt, Human
cucaugccuguaauccuagcacuu

SEQ ID NO: 325352 - RNA, 19 nt, Human
cuccaucucaaaaaaaaaa

SEQ ID NO: 325353 - RNA, 19 nt, Human
cuccgucucaaaaaaaaaa

SEQ ID NO: 325354 - RNA, 24 nt, Human
cuccugaauagcugggauuacagg

SEQ ID NO: 325355 - RNA, 21 nt, Human
cuccuggguucaagcaauucu

SEQ ID NO: 325356 - RNA, 19 nt, Human
cucugucagcuccugaagu

SEQ ID NO: 325357 - RNA, 20 nt, Human
cugagcuuaaaaagaaagaa

SEQ ID NO: 325358 - RNA, 28 nt, Human
cugaggcccagggaagcccccaaacccc

SEQ ID NO: 325359 - RNA, 24 nt, Human
cugaguggccuuucuguggccagc

SEQ ID NO: 325360 - RNA, 18 nt, Human
cugcaaccuccaccuccu

SEQ ID NO: 325361 - RNA, 23 nt, Human
cugcaaccuccaccuccuggguu

SEQ ID NO: 325362 - RNA, 22 nt, Human
cugccuccugccaaucacagcg

SEQ ID NO: 325363 - RNA, 24 nt, Human
cugggcaauaagcgugaaacuccg

SEQ ID NO: 325364 - RNA, 22 nt, Human
cuggugccucagccuccugaau

SEQ ID NO: 325365 - RNA, 19 nt, Human
cugucccuggagaagguca

SEQ ID NO: 325366 - RNA, 19 nt, Human
cugucgcccaggcuggagu

SEQ ID NO: 325367 - RNA, 21 nt, Human
cuucuuuuuuggcuugaucag

SEQ ID NO: 325368 - RNA, 19 nt, Human
cuugcagugagccgagauc

SEQ ID NO: 325369 - RNA, 22 nt, Human
gaaaauagaaucuuuauuaaaa

SEQ ID NO: 325370 - RNA, 24 nt, Human
gaauagcugggauuacaggcacgc

SEQ ID NO: 325371 - RNA, 19 nt, Human
gacaguaaaucugccugca

SEQ ID NO: 325372 - RNA, 24 nt, Human
gaccucaagugauccgcccaccuc

SEQ ID NO: 325373 - RNA, 21 nt, Human
gagaaaagcagggaagugguu

SEQ ID NO: 325374 - RNA, 22 nt, Human
gagaccagccugaccaacaugg

SEQ ID NO: 325375 - RNA, 24 nt, Human
gagacgggguuucgccauguuggc

SEQ ID NO: 325376 - RNA, 20 nt, Human
gagaucacgccacugcacuc

SEQ ID NO: 325377 - RNA, 23 nt, Human
gagaucgugccauugcacuccag

SEQ ID NO: 325378 - RNA, 19 nt, Human
gagcaauggggcaaucugg

SEQ ID NO: 325379 - RNA, 18 nt, Human
gagcuugcagugagccga

SEQ ID NO: 325380 - RNA, 22 nt, Human
gaggcugaggcccagggaagcc

SEQ ID NO: 325381 - RNA, 19 nt, Human
gaggugagaguaacgaggu

SEQ ID NO: 325382 - RNA, 19 nt, Human
gauauccugccuccugcca

SEQ ID NO: 325383 - RNA, 22 nt, Human
gcaaccuccaccuccuggguuc

SEQ ID NO: 325384 - RNA, 22 nt, Human
gcagaagcauugcuuaaaccca

SEQ ID NO: 325385 - RNA, 24 nt, Human
gcagagcgagacuccaucucaaaa

SEQ ID NO: 325386 - RNA, 24 nt, Human
gccacugcacucuagccugggcag

SEQ ID NO: 325387 - RNA, 24 nt, Human
gccauguuggccaggcuggucuug

SEQ ID NO: 325388 - RNA, 22 nt, Human
gccauugcacuccagccugggc

SEQ ID NO: 325389 - RNA, 24 nt, Human
gccauugcacuccagccugggcaa

SEQ ID NO: 325390 - RNA, 26 nt, Human
gcccagcacaccaggguugcagccug

SEQ ID NO: 325391 - RNA, 20 nt, Human
gcccaggcuggagugccgug

SEQ ID NO: 325392 - RNA, 20 nt, Human
gccgagaucacgccacugca

SEQ ID NO: 325393 - RNA, 22 nt, Human
gccgggcaugguggcucaugcc

SEQ ID NO: 325394 - RNA, 21 nt, Human
gccguggcgcagucucaguuc

SEQ ID NO: 325395 - RNA, 24 nt, Human
gcuaauacggugaaaucccaucuc

SEQ ID NO: 325396 - RNA, 22 nt, Human
gcucaggagaucaagaccaucc

SEQ ID NO: 325397 - RNA, 27 nt, Human
gcucugucgcccaggcuggagugccgu

SEQ ID NO: 325398 - RNA, 20 nt, Human
gcuggggcaggcuggggcag

SEQ ID NO: 325399 - RNA, 23 nt, Human
gcuggucuugaacucccgaccuc

SEQ ID NO: 325400 - RNA, 23 nt, Human
ggaaaaaaaguucauuuuaaaaa

SEQ ID NO: 325401 - RNA, 18 nt, Human
ggaagugguaaugcuagc

SEQ ID NO: 325402 - RNA, 21 nt, Human
ggacugacugcugaaugacau

SEQ ID NO: 325403 - RNA, 22 nt, Human
ggagguuguggugagcugagau

SEQ ID NO: 325404 - RNA, 24 nt, Human
ggagguuguggugagcugagaucg

SEQ ID NO: 325405 - RNA, 21 nt, Human
ggcagaucacgagcucaggag

SEQ ID NO: 325406 - RNA, 19 nt, Human
ggcaggcugggcagaggcg

SEQ ID NO: 325407 - RNA, 18 nt, Human
ggcaggcuggggcaggcu

SEQ ID NO: 325408 - RNA, 23 nt, Human
ggcaugguggcucaugccuguaa

SEQ ID NO: 325409 - RNA, 23 nt, Human
ggccgggcaugguggcucaugcc

SEQ ID NO: 325410 - RNA, 23 nt, Human
ggcgcgguggcucacaccuguaa

SEQ ID NO: 325411 - RNA, 19 nt, Human
ggcgugaagauggguuucc

SEQ ID NO: 325412 - RNA, 23 nt, Human
ggcgugguggugugcgccuguaa

SEQ ID NO: 325413 - RNA, 18 nt, Human
ggcucaugccuguaaucc

SEQ ID NO: 325414 - RNA, 21 nt, Human
ggcugggcgcgguggcucaca

SEQ ID NO: 325415 - RNA, 21 nt, Human
ggcuggggcaggcuggggcag

SEQ ID NO: 325416 - RNA, 24 nt, Human
ggcuggucuugaacucccgaccuc

SEQ ID NO: 325417 - RNA, 21 nt, Human
gggaaaccccgucucuacuaa

SEQ ID NO: 325418 - RNA, 18 nt, Human
gggaaugugagcccagug

SEQ ID NO: 325419 - RNA, 23 nt, Human
gggcaaaggcaaauuuucaucac

SEQ ID NO: 325420 - RNA, 21 nt, Human
gggcagaggcgagcacgugga

SEQ ID NO: 325421 - RNA, 19 nt, Human
gggcagaucacgagcucag

SEQ ID NO: 325422 - RNA, 22 nt, Human
ggggcuggcggggcuggcgggg

SEQ ID NO: 325423 - RNA, 22 nt, Human
ggggcuggcggggcuggcgggg

SEQ ID NO: 325424 - RNA, 23 nt, Human
gggggccacuggugggaggagau

SEQ ID NO: 325425 - RNA, 23 nt, Human
gggguuucgccauguuggccagg

SEQ ID NO: 325426 - RNA, 24 nt, Human
gggucacccaggcgugaagauggg

SEQ ID NO: 325427 - RNA, 23 nt, Human
gguggcucacaccuguaauccca

SEQ ID NO: 325428 - RNA, 24 nt, Human
gguggcucacaccuguaaucccag

SEQ ID NO: 325429 - RNA, 24 nt, Human
gguggcucaugccuguaauccuag

SEQ ID NO: 325430 - RNA, 24 nt, Human
gguggugugcgccuguaaucucag

SEQ ID NO: 325431 - RNA, 23 nt, Human
guagagacgggguuucgccaugu

SEQ ID NO: 325432 - RNA, 23 nt, Human
gucagaacccuggugaagccgag

SEQ ID NO: 325433 - RNA, 24 nt, Human
gugauccgcccaccucggccuccc

SEQ ID NO: 325434 - RNA, 22 nt, Human
gugccucagccuccugaauagc

SEQ ID NO: 325435 - RNA, 20 nt, Human
guggagguuguggugagcug

SEQ ID NO: 325436 - RNA, 23 nt, Human
guggugugcgccuguaaucucag

SEQ ID NO: 325437 - RNA, 24 nt, Human
guggugugcgccuguaaucucagc

SEQ ID NO: 325438 - RNA, 22 nt, Human
uaauacggugaaaucccaucuc

SEQ ID NO: 325439 - RNA, 21 nt, Human
uaauccauagagcuuucaaug

SEQ ID NO: 325440 - RNA, 23 nt, Human
uaauuuuuuuauguuuaguagag

SEQ ID NO: 325441 - RNA, 24 nt, Human
uaauuuuuuuauguuuaguagaga

SEQ ID NO: 325442 - RNA, 22 nt, Human
uagagacgggguuucgccaugu

SEQ ID NO: 325443 - RNA, 21 nt, Human
uagcacuuugggaggcccagg

SEQ ID NO: 325444 - RNA, 21 nt, Human
uagcuaacccacucaucucuc

SEQ ID NO: 325445 - RNA, 23 nt, Human
uagcuuuucccuccccuggaccc

SEQ ID NO: 325446 - RNA, 24 nt, Human
uaguagagacgggguuucgccaug

SEQ ID NO: 325447 - RNA, 22 nt, Human
uauuaaaauagcaaggcauaac

SEQ ID NO: 325448 - RNA, 22 nt, Human
uauuucauucuugccacugagc

SEQ ID NO: 325449 - RNA, 23 nt, Human
ucaaaaaaaaaaaaaaaaaaaga

SEQ ID NO: 325450 - RNA, 24 nt, Human
ucacgagcucaggagaucaagacc

SEQ ID NO: 325451 - RNA, 18 nt, Human
ucacgaggucaggaguuc

SEQ ID NO: 325452 - RNA, 24 nt, Human
ucacgaggucaggaguucgagacc

SEQ ID NO: 325453 - RNA, 22 nt, Human
ucacgaggugagaguaacgagg

SEQ ID NO: 325454 - RNA, 23 nt, Human
ucacugcaaccuccaccuccugg

SEQ ID NO: 325455 - RNA, 23 nt, Human
ucacugcaaccuccaccuccugg

SEQ ID NO: 325456 - RNA, 24 nt, Human
ucacugcaaccuccaccuccuggg

SEQ ID NO: 325457 - RNA, 25 nt, Human
ucacugcaaccuccaccuccugggu

SEQ ID NO: 325458 - RNA, 27 nt, Human
ucacugcaaccuccaccuccuggguuc

SEQ ID NO: 325459 - RNA, 22 nt, Human
ucaguugggcgugguggugugc

SEQ ID NO: 325460 - RNA, 24 nt, Human
ucaguugggcgugguggugugcgc

SEQ ID NO: 325461 - RNA, 24 nt, Human
uccaaggaggugcgaccuuuaaag

SEQ ID NO: 325462 - RNA, 23 nt, Human
uccaucucaaaaaaaaaaaaaaa

SEQ ID NO: 325463 - RNA, 23 nt, Human
uccaucuggagaacaggcaggua

SEQ ID NO: 325464 - RNA, 24 nt, Human
ucccaaagugcugggauuacaggc

SEQ ID NO: 325465 - RNA, 18 nt, Human
ucccacuggaggcugcca

SEQ ID NO: 325466 - RNA, 19 nt, Human
ucccaucucuacuaaaaau

SEQ ID NO: 325467 - RNA, 18 nt, Human
ucccugugagugggggcc

SEQ ID NO: 325468 - RNA, 23 nt, Human
uccgucucaaaaaaaaaaaaaaa

SEQ ID NO: 325469 - RNA, 24 nt, Human
uccugaauagcugggauuacaggc

SEQ ID NO: 325470 - RNA, 23 nt, Human
uccugaguggccuuucuguggcc

SEQ ID NO: 325471 - RNA, 22 nt, Human
uccugggggugccuggaggcug

SEQ ID NO: 325472 - RNA, 19 nt, Human
uccuggguucaagcaauuc

SEQ ID NO: 325473 - RNA, 24 nt, Human
uccuggguucaagcaauucuggug

SEQ ID NO: 325474 - RNA, 22 nt, Human
ucgccauguuggccaggcuggu

SEQ ID NO: 325475 - RNA, 24 nt, Human
ucgccauguuggccaggcuggucu

SEQ ID NO: 325476 - RNA, 18 nt, Human
ucgcccaggcuggagugc

SEQ ID NO: 325477 - RNA, 18 nt, Human
ucggccucccaaagugcu

SEQ ID NO: 325478 - RNA, 23 nt, Human
ucuagaacagagaacuccacucc

SEQ ID NO: 325479 - RNA, 23 nt, Human
ucuagccugggcagcagagcgag

SEQ ID NO: 325480 - RNA, 24 nt, Human
ucuagccugggcagcagagcgaga

SEQ ID NO: 325481 - RNA, 18 nt, Human
ucucaaaaaaaaaaaaaa

SEQ ID NO: 325482 - RNA, 20 nt, Human
ucucagagccuguuucucca

SEQ ID NO: 325483 - RNA, 22 nt, Human
ucucccuccagcuaaagcuaga

SEQ ID NO: 325484 - RNA, 20 nt, Human
ucuccugcauuuucucaagu

SEQ ID NO: 325485 - RNA, 21 nt, Human
ucucuacuaaaaauacaaaaa

SEQ ID NO: 325486 - RNA, 21 nt, Human
ucucuacuaaaaauccaaaaa

SEQ ID NO: 325487 - RNA, 21 nt, Human
ucucuacuaaaaauccaaaaa

SEQ ID NO: 325488 - RNA, 23 nt, Human
ucugccugcagaguuccucgucg

SEQ ID NO: 325489 - RNA, 22 nt, Human
ucuggcucugucagcuccugaa

SEQ ID NO: 325490 - RNA, 19 nt, Human
ucugucagcuccugaaguc

SEQ ID NO: 325491 - RNA, 18 nt, Human
ucugucgcccaggcugga

SEQ ID NO: 325492 - RNA, 23 nt, Human
ucuugcucugucgcccaggcugg

SEQ ID NO: 325493 - RNA, 24 nt, Human
ucuugcucugucgcccaggcugga

SEQ ID NO: 325494 - RNA, 22 nt, Human
ucuuggcugggcgcgguggcuc

SEQ ID NO: 325495 - RNA, 23 nt, Human
ucuuugaaggcaggugagaaucu

SEQ ID NO: 325496 - RNA, 22 nt, Human
ugaaugaacucucccaaagaug

SEQ ID NO: 325497 - RNA, 21 nt, Human
ugaauugggagcagacaaagc

SEQ ID NO: 325498 - RNA, 20 nt, Human
ugacugugguuccaaggagg

SEQ ID NO: 325499 - RNA, 20 nt, Human
ugagaaagcccaucccaucc

SEQ ID NO: 325500 - RNA, 22 nt, Human
ugagcccaaagaacaggaguug

SEQ ID NO: 325501 - RNA, 22 nt, Human
ugagccgagaucacgccacugc

SEQ ID NO: 325502 - RNA, 24 nt, Human
ugaggcagaagcauugcuuaaacc

SEQ ID NO: 325503 - RNA, 25 nt, Human
ugaggcagaagcauugcuuaaaccc

SEQ ID NO: 325504 - RNA, 23 nt, Human
ugaggcaggagaauggugugaac

SEQ ID NO: 325505 - RNA, 22 nt, Human
ugaggcccagggaagcccccaa

SEQ ID NO: 325506 - RNA, 19 nt, Human
ugcacuccagccugggcaa

SEQ ID NO: 325507 - RNA, 20 nt, Human
ugcagccugcgcaagaccuu

SEQ ID NO: 325508 - RNA, 24 nt, Human
ugccauugcacuccagccugggca

SEQ ID NO: 325509 - RNA, 20 nt, Human
ugccccuguucugcaccggg

SEQ ID NO: 325510 - RNA, 18 nt, Human
ugccggcuugcuuccuuc

SEQ ID NO: 325511 - RNA, 22 nt, Human
ugccucagccuccugaauagcu

SEQ ID NO: 325512 - RNA, 26 nt, Human
ugccucagccuccugaauagcuggga

SEQ ID NO: 325513 - RNA, 20 nt, Human
ugccugcagaguuccucgug

SEQ ID NO: 325514 - RNA, 20 nt, Human
ugccuggaggcugaggccca

SEQ ID NO: 325515 - RNA, 23 nt, Human
ugccuggugggagcacaucuuuu

SEQ ID NO: 325516 - RNA, 23 nt, Human
ugccuguaauccuagcacuuugg

SEQ ID NO: 325517 - RNA, 23 nt, Human
ugccuguaauccuagcacuuugg

SEQ ID NO: 325518 - RNA, 24 nt, Human
ugccuguaauccuagcacuuuggg

SEQ ID NO: 325519 - RNA, 24 nt, Human
ugccuguagucccagcuacucagg

SEQ ID NO: 325520 - RNA, 24 nt, Human
ugcgccuguaaucucagcuacuug

SEQ ID NO: 325521 - RNA, 24 nt, Human
ugcucugucgcccaggcuggagug

SEQ ID NO: 325522 - RNA, 19 nt, Human
uggaaagaaaacuuugcag

SEQ ID NO: 325523 - RNA, 24 nt, Human
uggagugccguggcgcagucucag

SEQ ID NO: 325524 - RNA, 23 nt, Human
uggccaggcuggucuugaacucc

SEQ ID NO: 325525 - RNA, 24 nt, Human
uggcgggugccuguagucccagcu

SEQ ID NO: 325526 - RNA, 21 nt, Human
uggcucacaccuguaauccca

SEQ ID NO: 325527 - RNA, 24 nt, Human
uggcucacaccuguaaucccagca

SEQ ID NO: 325528 - RNA, 24 nt, Human
uggcucaugccuguaauccuagca

SEQ ID NO: 325529 - RNA, 21 nt, Human
ugggaagcugaggcagaagca

SEQ ID NO: 325530 - RNA, 22 nt, Human
ugggagaaaagcagggaagugg

SEQ ID NO: 325531 - RNA, 24 nt, Human
ugggaggcccaggcaggcaaauca

SEQ ID NO: 325532 - RNA, 19 nt, Human
ugggaggccgaggcgggca

SEQ ID NO: 325533 - RNA, 20 nt, Human
ugggaggccgaggcgggcag

SEQ ID NO: 325534 - RNA, 24 nt, Human
ugggaggccgaggcgggcagauca

SEQ ID NO: 325535 - RNA, 20 nt, Human
ugggaggcuggggcaggcug

SEQ ID NO: 325536 - RNA, 21 nt, Human
ugggaggcuggggcaggcugg

SEQ ID NO: 325537 - RNA, 22 nt, Human
ugggaggcuggggcaggcuggg

SEQ ID NO: 325538 - RNA, 18 nt, Human
ugggauuacaggcaagcc

SEQ ID NO: 325539 - RNA, 20 nt, Human
ugggauuacaggcacgcacc

SEQ ID NO: 325540 - RNA, 21 nt, Human
ugggauuacaggcacgcaccg

SEQ ID NO: 325541 - RNA, 24 nt, Human
ugggauuacaggcacgcaccgcca

SEQ ID NO: 325542 - RNA, 24 nt, Human
ugguggcgggugccuguaguccca

SEQ ID NO: 325543 - RNA, 22 nt, Human
ugguggcucaugccuguaaucc

SEQ ID NO: 325544 - RNA, 24 nt, Human
ugguggugugcgccuguaaucuca

SEQ ID NO: 325545 - RNA, 21 nt, Human
uggugugcgccuguaaucuca

SEQ ID NO: 325546 - RNA, 24 nt, Human
uggugugcgccuguaaucucagcu

SEQ ID NO: 325547 - RNA, 21 nt, Human
ugguuuaauagauuucagcau

SEQ ID NO: 325548 - RNA, 21 nt, Human
ugucugggcugugucuuccuu

SEQ ID NO: 325549 - RNA, 24 nt, Human
uguuuaguagagacgggguuucgc

SEQ ID NO: 325550 - RNA, 24 nt, Human
uuaaacccaggagguggagguugu

SEQ ID NO: 325551 - RNA, 21 nt, Human
uuaaucaucaaaaucaaugac

SEQ ID NO: 325552 - RNA, 24 nt, Human
uuagccgggugugguggcgggugc

SEQ ID NO: 325553 - RNA, 24 nt, Human
uuaggccgggcaugguggcucaug

SEQ ID NO: 325554 - RNA, 18 nt, Human
uuaguagagacgggguuu

SEQ ID NO: 325555 - RNA, 22 nt, Human
uuaguagagacgggguuucgcc

SEQ ID NO: 325556 - RNA, 24 nt, Human
uuaguagagacgggguuucgccau

SEQ ID NO: 325557 - RNA, 22 nt, Human
uuauugggggacugacugcuga

SEQ ID NO: 325558 - RNA, 25 nt, Human
uucaagagaagcuggacauuuugaa

SEQ ID NO: 325559 - RNA, 21 nt, Human
uucaguaucucagguaacagc

SEQ ID NO: 325560 - RNA, 18 nt, Human
uugaaugaacucucccaa

SEQ ID NO: 325561 - RNA, 18 nt, Human
uugcagugagccgagauc

SEQ ID NO: 325562 - RNA, 20 nt, Human
uugcagugagccgagaucac

SEQ ID NO: 325563 - RNA, 21 nt, Human
uugcagugagccgagaucacg

SEQ ID NO: 325564 - RNA, 24 nt, Human
uugcucauccagcauuugcuccug

SEQ ID NO: 325565 - RNA, 23 nt, Human
uugcuccugggacaguaaaucug

SEQ ID NO: 325566 - RNA, 24 nt, Human
uugcuuaaacccaggagguggagg

SEQ ID NO: 325567 - RNA, 25 nt, Human
uugggaggccgaggcgggcagauca

SEQ ID NO: 325568 - RNA, 22 nt, Human
uugguaaacaacaauauuaaaa

SEQ ID NO: 325569 - RNA, 21 nt, Human
uuuaguagagacgggguuucg

SEQ ID NO: 325570 - RNA, 21 nt, Human
uuuauuuuucauggucacuuu

SEQ ID NO: 325571 - RNA, 24 nt, Human
uuucgccauguuggccaggcuggu

SEQ ID NO: 325572 - RNA, 23 nt, Human
uuugggcaagaccugugaaaucu

SEQ ID NO: 325573 - RNA, 23 nt, Human
uuugguaaacaacaauauuaaaa

SEQ ID NO: 325574 - RNA, 23 nt, Human
uuuuuuuauguuuaguagagacg

SEQ ID NO: 325575 - RNA, 23 nt, Human
aaaauaccuucacagccacaccu

SEQ ID NO: 325576 - RNA, 18 nt, Human
aaagucccuccaggccau

SEQ ID NO: 325577 - RNA, 19 nt, Human
aaagucccuccaggccauu

SEQ ID NO: 325578 - RNA, 20 nt, Human
aaauaacugugugcuauagc

SEQ ID NO: 325579 - RNA, 24 nt, Human
aaauccacauucuagacagccaga

SEQ ID NO: 325580 - RNA, 20 nt, Human
aaauggaccaucuugucaga

SEQ ID NO: 325581 - RNA, 23 nt, Human
aacaaauggaccaucuugucaga

SEQ ID NO: 325582 - RNA, 19 nt, Human
aaccccucaucuuaccccu

SEQ ID NO: 325583 - RNA, 18 nt, Human
aaccucuagcacgcccag

SEQ ID NO: 325584 - RNA, 18 nt, Human
aagaaaggagaggauucu

SEQ ID NO: 325585 - RNA, 23 nt, Human
aagaaaggcuagccauguuccag

SEQ ID NO: 325586 - RNA, 24 nt, Human
aagacaggagacuuaaccccaagg

SEQ ID NO: 325587 - RNA, 21 nt, Human
aagcaaaagaggaauuccugg

SEQ ID NO: 325588 - RNA, 21 nt, Human
aagcaacagacacaaacucca

SEQ ID NO: 325589 - RNA, 21 nt, Human
aaucacaauauuccagauaau

SEQ ID NO: 325590 - RNA, 23 nt, Human
acaagcaacagacacaaacucca

SEQ ID NO: 325591 - RNA, 19 nt, Human
acaagcacaaagcucuccc

SEQ ID NO: 325592 - RNA, 22 nt, Human
acacugcccggagcuccagccc

SEQ ID NO: 325593 - RNA, 23 nt, Human
acaggcaagaucaggccuggaac

SEQ ID NO: 325594 - RNA, 21 nt, Human
accaauggcgugaauacagcc

SEQ ID NO: 325595 - RNA, 18 nt, Human
accagggucuuagugggg

SEQ ID NO: 325596 - RNA, 22 nt, Human
accccacuuccuugcccucuca

SEQ ID NO: 325597 - RNA, 24 nt, Human
accccacuuccuugcccucucagu

SEQ ID NO: 325598 - RNA, 25 nt, Human
accccacuuccuugcccucucagug

SEQ ID NO: 325599 - RNA, 20 nt, Human
acccccgcuccucccuccag

SEQ ID NO: 325600 - RNA, 23 nt, Human
agacaggagacuuaaccccaagg

SEQ ID NO: 325601 - RNA, 20 nt, Human
agaccagggucuuagugggg

SEQ ID NO: 325602 - RNA, 19 nt, Human
agcaggcuggaaacucagg

SEQ ID NO: 325603 - RNA, 21 nt, Human
agccagacaggcaagaucagg

SEQ ID NO: 325604 - RNA, 19 nt, Human
agcugccaucagcuccugg

SEQ ID NO: 325605 - RNA, 19 nt, Human
aggaauaccucuggaaccc

SEQ ID NO: 325606 - RNA, 22 nt, Human
aggaauuccuggaauaggccac

SEQ ID NO: 325607 - RNA, 18 nt, Human
aggagagggugucugauu

SEQ ID NO: 325608 - RNA, 20 nt, Human
agggagaaaggaaguaccag

SEQ ID NO: 325609 - RNA, 18 nt, Human
auaccuucacagccacac

SEQ ID NO: 325610 - RNA, 21 nt, Human
aucccauccuuccacccucaa

SEQ ID NO: 325611 - RNA, 20 nt, Human
caaaauaagaacccccuaac

SEQ ID NO: 325612 - RNA, 24 nt, Human
caaaauaagaacccccuaacuuuc

SEQ ID NO: 325613 - RNA, 22 nt, Human
caaaccaggaaucaagaggagc

SEQ ID NO: 325614 - RNA, 18 nt, Human
caaagcucuccccuccag

SEQ ID NO: 325615 - RNA, 20 nt, Human
caaauggaccaucuugucag

SEQ ID NO: 325616 - RNA, 23 nt, Human
caaccaauggcgugaauacagcc

SEQ ID NO: 325617 - RNA, 20 nt, Human
caaccccucaucuuaccccu

SEQ ID NO: 325618 - RNA, 27 nt, Human
caacugauuguagauguuaaucacauc

SEQ ID NO: 325619 - RNA, 22 nt, Human
caagaagaacaccccacuuccu

SEQ ID NO: 325620 - RNA, 21 nt, Human
caagaucaggccuggaacuga

SEQ ID NO: 325621 - RNA, 21 nt, Human
caagcacaaagcucuccccuc

SEQ ID NO: 325622 - RNA, 21 nt, Human
cacaccuguuacaggaacugg

SEQ ID NO: 325623 - RNA, 23 nt, Human
cacacugcccggagcuccagccc

SEQ ID NO: 325624 - RNA, 20 nt, Human
cacaggcccaccccuuggcc

SEQ ID NO: 325625 - RNA, 18 nt, Human
cacccuucccccggcucc

SEQ ID NO: 325626 - RNA, 22 nt, Human
caccuagauuacuguuugauua

SEQ ID NO: 325627 - RNA, 23 nt, Human
cacucuggaaugacaagcacaaa

SEQ ID NO: 325628 - RNA, 21 nt, Human
cacugcccggagcuccagccc

SEQ ID NO: 325629 - RNA, 20 nt, Human
cacugcuguguccccacacc

SEQ ID NO: 325630 - RNA, 19 nt, Human
cagagcagaggggguuaga

SEQ ID NO: 325631 - RNA, 24 nt, Human
caggaacuggcacauaguaaacac

SEQ ID NO: 325632 - RNA, 22 nt, Human
cagugaugggcccaaggauccc

SEQ ID NO: 325633 - RNA, 18 nt, Human
caucacauccaccaaauc

SEQ ID NO: 325634 - RNA, 22 nt, Human
caucacauccaccaaaucaaaa

SEQ ID NO: 325635 - RNA, 23 nt, Human
caucccauccuuccacccucaaa

SEQ ID NO: 325636 - RNA, 24 nt, Human
caucccauccuuccacccucaaag

SEQ ID NO: 325637 - RNA, 20 nt, Human
caucuuaccccucuguccuc

SEQ ID NO: 325638 - RNA, 23 nt, Human
ccaacacucaccaugccaaacca

SEQ ID NO: 325639 - RNA, 21 nt, Human
ccaccauucugucuuugaccc

SEQ ID NO: 325640 - RNA, 21 nt, Human
ccagauaaugggugagacuua

SEQ ID NO: 325641 - RNA, 20 nt, Human
ccagccaacuaaggagaaac

SEQ ID NO: 325642 - RNA, 18 nt, Human
ccagcccauccccucccc

SEQ ID NO: 325643 - RNA, 22 nt, Human
ccagcccauccccuccccaccc

SEQ ID NO: 325644 - RNA, 24 nt, Human
ccaucccauccuuccacccucaaa

SEQ ID NO: 325645 - RNA, 28 nt, Human
ccaucccauccuuccacccucaaagccc

SEQ ID NO: 325646 - RNA, 18 nt, Human
ccaugagucaagaccugg

SEQ ID NO: 325647 - RNA, 24 nt, Human
cccaacacucaccaugccaaacca

SEQ ID NO: 325648 - RNA, 19 nt, Human
cccaagaagaacaccccac

SEQ ID NO: 325649 - RNA, 22 nt, Human
cccaccccuuggccagaaugca

SEQ ID NO: 325650 - RNA, 18 nt, Human
cccauccuuccacccuca

SEQ ID NO: 325651 - RNA, 24 nt, Human
cccauccuuccacccucaaagccc

SEQ ID NO: 325652 - RNA, 19 nt, Human
ccccaacacucaccaugcc

SEQ ID NO: 325653 - RNA, 18 nt, Human
cccccgcuccucccucca

SEQ ID NO: 325654 - RNA, 20 nt, Human
cccccgcuccucccuccagc

SEQ ID NO: 325655 - RNA, 23 nt, Human
ccccggcuccacccccgcuccuc

SEQ ID NO: 325656 - RNA, 18 nt, Human
ccccuagccccagcugcc

SEQ ID NO: 325657 - RNA, 19 nt, Human
ccccuccccacccuucccc

SEQ ID NO: 325658 - RNA, 19 nt, Human
ccccucuguccucucucuc

SEQ ID NO: 325659 - RNA, 23 nt, Human
ccccucuguccucucucucugcu

SEQ ID NO: 325660 - RNA, 23 nt, Human
cccgcuccucccuccagcuguca

SEQ ID NO: 325661 - RNA, 24 nt, Human
cccuccccacccuucccccggcuc

SEQ ID NO: 325662 - RNA, 21 nt, Human
ccgcagggagaaaggaaguac

SEQ ID NO: 325663 - RNA, 22 nt, Human
ccuagccccagcugccaucagc

SEQ ID NO: 325664 - RNA, 22 nt, Human
ccucaaccccucaucuuacccc

SEQ ID NO: 325665 - RNA, 20 nt, Human
ccuccguucugccagcuucc

SEQ ID NO: 325666 - RNA, 19 nt, Human
ccucuggaacccaucccau

SEQ ID NO: 325667 - RNA, 19 nt, Human
ccugaaaagggcagugccu

SEQ ID NO: 325668 - RNA, 25 nt, Human
ccuggccucagcacucuggaaugac

SEQ ID NO: 325669 - RNA, 25 nt, Human
ccuucacagccacaccuagauuacu

SEQ ID NO: 325670 - RNA, 22 nt, Human
ccuuccacccucaaagcccuuc

SEQ ID NO: 325671 - RNA, 20 nt, Human
ccuuggccagaaugcacccc

SEQ ID NO: 325672 - RNA, 21 nt, Human
cgcuccucccuccagcuguca

SEQ ID NO: 325673 - RNA, 21 nt, Human
cggcuccacccccgcuccucc

SEQ ID NO: 325674 - RNA, 22 nt, Human
cuacaagaaaggcuagccaugu

SEQ ID NO: 325675 - RNA, 18 nt, Human
cuagccccagcugccauc

SEQ ID NO: 325676 - RNA, 23 nt, Human
cuccacccccgcuccucccucca

SEQ ID NO: 325677 - RNA, 22 nt, Human
cuccuccguucugccagcuucc

SEQ ID NO: 325678 - RNA, 19 nt, Human
cuccugguuggaccacggc

SEQ ID NO: 325679 - RNA, 20 nt, Human
cuccugguuggaccacggcu

SEQ ID NO: 325680 - RNA, 19 nt, Human
cucugcuuuagaggauggg

SEQ ID NO: 325681 - RNA, 20 nt, Human
cucuguaagggaggaaguug

SEQ ID NO: 325682 - RNA, 25 nt, Human
cugccagcuuccuguccuuccugcu

SEQ ID NO: 325683 - RNA, 20 nt, Human
cuggaauaggccaccggaug

SEQ ID NO: 325684 - RNA, 19 nt, Human
cugucugcccugagaucac

SEQ ID NO: 325685 - RNA, 26 nt, Human
cugugcgugcgccucgcacacugccc

SEQ ID NO: 325686 - RNA, 24 nt, Human
cuucacagccacaccuagauuacu

SEQ ID NO: 325687 - RNA, 18 nt, Human
cuuccacccucaaagccc

SEQ ID NO: 325688 - RNA, 22 nt, Human
cuucuuuuccaggaaacugcag

SEQ ID NO: 325689 - RNA, 19 nt, Human
cuugcccucucagugcagg

SEQ ID NO: 325690 - RNA, 23 nt, Human
cuuucaacuaaucaggugcagcu

SEQ ID NO: 325691 - RNA, 20 nt, Human
cuuuccaaaacacuugucug

SEQ ID NO: 325692 - RNA, 24 nt, Human
gaacaaauggaccaucuugucaga

SEQ ID NO: 325693 - RNA, 19 nt, Human
gaaugcaaaauaagaaccc

SEQ ID NO: 325694 - RNA, 24 nt, Human
gacaggcaagaucaggccuggaac

SEQ ID NO: 325695 - RNA, 21 nt, Human
gagaagggcagggauccaggc

SEQ ID NO: 325696 - RNA, 23 nt, Human
gaguagccugaauaucaggugga

SEQ ID NO: 325697 - RNA, 24 nt, Human
gauugauucacaggcccaccccuu

SEQ ID NO: 325698 - RNA, 18 nt, Human
gauuugggauacgagcca

SEQ ID NO: 325699 - RNA, 20 nt, Human
gcaaaagaggaauuccugga

SEQ ID NO: 325700 - RNA, 18 nt, Human
gcagaccaaaugagaacc

SEQ ID NO: 325701 - RNA, 27 nt, Human
gccucgcacacugcccggagcuccagc

SEQ ID NO: 325702 - RNA, 20 nt, Human
gccugcgugaggugugucac

SEQ ID NO: 325703 - RNA, 18 nt, Human
gcucacccaaauuauuua

SEQ ID NO: 325704 - RNA, 19 nt, Human
gcuccucccuccagcuguc

SEQ ID NO: 325705 - RNA, 23 nt, Human
gcugcaaccucuagcacgcccag

SEQ ID NO: 325706 - RNA, 21 nt, Human
gcuggaguggagggcugucug

SEQ ID NO: 325707 - RNA, 20 nt, Human
gcugucugcccugagaucac

SEQ ID NO: 325708 - RNA, 25 nt, Human
ggaacccaucccauccuuccacccu

SEQ ID NO: 325709 - RNA, 19 nt, Human
ggacacaagcucuucaugg

SEQ ID NO: 325710 - RNA, 20 nt, Human
ggaucaugaagaaccuuccc

SEQ ID NO: 325711 - RNA, 20 nt, Human
ggcuugauuacaagcaacag

SEQ ID NO: 325712 - RNA, 23 nt, Human
gggaaauagaaucugcaagaaag

SEQ ID NO: 325713 - RNA, 20 nt, Human
gggcccaaggaucccagcag

SEQ ID NO: 325714 - RNA, 18 nt, Human
ggggugcgggacgcagag

SEQ ID NO: 325715 - RNA, 18 nt, Human
gggucucuggucuugaga

SEQ ID NO: 325716 - RNA, 23 nt, Human
gugcagcucacccaaauuauuua

SEQ ID NO: 325717 - RNA, 22 nt, Human
gugcccccucuguuguaugcuc

SEQ ID NO: 325718 - RNA, 20 nt, Human
guuuccccuguuguuucugg

SEQ ID NO: 325719 - RNA, 19 nt, Human
uaaaaccaaccaucacauc

SEQ ID NO: 325720 - RNA, 24 nt, Human
uaaaaccaaccaucacauccacca

SEQ ID NO: 325721 - RNA, 24 nt, Human
uaaauaacugugugcuauagccca

SEQ ID NO: 325722 - RNA, 20 nt, Human
uaaggagagggugucugauu

SEQ ID NO: 325723 - RNA, 19 nt, Human
uacagcccaccuguucucu

SEQ ID NO: 325724 - RNA, 20 nt, Human
uacagugaugggcccaagga

SEQ ID NO: 325725 - RNA, 22 nt, Human
uacagugaugggcccaaggauc

SEQ ID NO: 325726 - RNA, 23 nt, Human
uagcaggcuggaaacucaggcag

SEQ ID NO: 325727 - RNA, 19 nt, Human
uaggaaaauacauauuugg

SEQ ID NO: 325728 - RNA, 20 nt, Human
uauaacagguaacuuuagaa

SEQ ID NO: 325729 - RNA, 18 nt, Human
uaugugcucuccuccccg

SEQ ID NO: 325730 - RNA, 19 nt, Human
uauuagcagaagaggggaa

SEQ ID NO: 325731 - RNA, 26 nt, Human
ucaauacuaagcaaagucuaccuaau

SEQ ID NO: 325732 - RNA, 18 nt, Human
ucacacuguuggugugag

SEQ ID NO: 325733 - RNA, 20 nt, Human
ucacucugaagaagcuuucu

SEQ ID NO: 325734 - RNA, 19 nt, Human
ucagaaagucaagauucug

SEQ ID NO: 325735 - RNA, 22 nt, Human
ucagaccagggucuuagugggg

SEQ ID NO: 325736 - RNA, 19 nt, Human
ucagcacucuggaaugaca

SEQ ID NO: 325737 - RNA, 19 nt, Human
uccaaaacacuugucugau

SEQ ID NO: 325738 - RNA, 22 nt, Human
uccacccccgcuccucccucca

SEQ ID NO: 325739 - RNA, 24 nt, Human
uccagcccauccccuccccacccu

SEQ ID NO: 325740 - RNA, 20 nt, Human
ucccauccuuccacccucaa

SEQ ID NO: 325741 - RNA, 21 nt, Human
uccccacccuucccccggcuc

SEQ ID NO: 325742 - RNA, 22 nt, Human
ucuacaaaauaccuucacagcc

SEQ ID NO: 325743 - RNA, 25 nt, Human
ucuacgucagagcaacugcaagagc

SEQ ID NO: 325744 - RNA, 18 nt, Human
ucucagagcuggagugga

SEQ ID NO: 325745 - RNA, 20 nt, Human
ucucagagcuggaguggagg

SEQ ID NO: 325746 - RNA, 22 nt, Human
ucucucucugcugccuacagaa

SEQ ID NO: 325747 - RNA, 21 nt, Human
ucugauugcccaggauugauu

SEQ ID NO: 325748 - RNA, 19 nt, Human
ucuggaucaucagccagga

SEQ ID NO: 325749 - RNA, 20 nt, Human
ucuguccucucucucugcuu

SEQ ID NO: 325750 - RNA, 22 nt, Human
ugaaaagggcagugccuggccc

SEQ ID NO: 325751 - RNA, 26 nt, Human
ugaaauuaauaagaaaggagaggauu

SEQ ID NO: 325752 - RNA, 20 nt, Human
ugaagaaccuucccucaacc

SEQ ID NO: 325753 - RNA, 22 nt, Human
ugaagggcuaacaaggaguuca

SEQ ID NO: 325754 - RNA, 23 nt, Human
ugaagggcuaacaaggaguucag

SEQ ID NO: 325755 - RNA, 19 nt, Human
ugaaugaguagccugaaua

SEQ ID NO: 325756 - RNA, 20 nt, Human
ugaaugaguagccugaauau

SEQ ID NO: 325757 - RNA, 23 nt, Human
ugaaugaguagccugaauaucag

SEQ ID NO: 325758 - RNA, 30 nt, Human
ugacaagcacaaagcucuccccuccagaaa

SEQ ID NO: 325759 - RNA, 19 nt, Human
ugacccugagccagacagg

SEQ ID NO: 325760 - RNA, 20 nt, Human
ugagaacaaaugagaauuaa

SEQ ID NO: 325761 - RNA, 21 nt, Human
ugagaagggcagggauccagg

SEQ ID NO: 325762 - RNA, 23 nt, Human
ugagagcgcaauaggggaggaca

SEQ ID NO: 325763 - RNA, 24 nt, Human
ugagagcgcaauaggggaggacag

SEQ ID NO: 325764 - RNA, 21 nt, Human
ugagccagacaggcaagauca

SEQ ID NO: 325765 - RNA, 20 nt, Human
ugaggcaaaguuucuucuuu

SEQ ID NO: 325766 - RNA, 22 nt, Human
ugagucaaaccaggaaucaaga

SEQ ID NO: 325767 - RNA, 22 nt, Human
ugcaagagcagggaaggauugc

SEQ ID NO: 325768 - RNA, 23 nt, Human
ugcaggcacagauucagggaaug

SEQ ID NO: 325769 - RNA, 19 nt, Human
ugcccccucuguuguaugc

SEQ ID NO: 325770 - RNA, 19 nt, Human
ugcccccucuguuguaugc

SEQ ID NO: 325771 - RNA, 21 nt, Human
ugccucugcuuuagaggaugg

SEQ ID NO: 325772 - RNA, 23 nt, Human
ugcucuccuccccgggugccccc

SEQ ID NO: 325773 - RNA, 18 nt, Human
uggaaacucaggcaggag

SEQ ID NO: 325774 - RNA, 26 nt, Human
uggaacccaucccauccuuccacccu

SEQ ID NO: 325775 - RNA, 21 nt, Human
uggaagaauaaacagaaucac

SEQ ID NO: 325776 - RNA, 19 nt, Human
uggaaggaaaagcuaaagu

SEQ ID NO: 325777 - RNA, 18 nt, Human
uggaauaggccaccggau

SEQ ID NO: 325778 - RNA, 22 nt, Human
uggaauaggccaccggauggaa

SEQ ID NO: 325779 - RNA, 18 nt, Human
uggaaugacaagcacaaa

SEQ ID NO: 325780 - RNA, 18 nt, Human
uggcacauaguaaacacu

SEQ ID NO: 325781 - RNA, 21 nt, Human
uggcagaccaaaugagaacca

SEQ ID NO: 325782 - RNA, 23 nt, Human
ugggaccaaaagagauauauaac

SEQ ID NO: 325783 - RNA, 20 nt, Human
uggggugcgggacgcagagu

SEQ ID NO: 325784 - RNA, 20 nt, Human
ugggugagacuuaaaguucu

SEQ ID NO: 325785 - RNA, 24 nt, Human
uguuugucugccacuggaguguga

SEQ ID NO: 325786 - RNA, 20 nt, Human
uuaaaguucuaaaugucaac

SEQ ID NO: 325787 - RNA, 22 nt, Human
uuaaauaacugugugcuauagc

SEQ ID NO: 325788 - RNA, 22 nt, Human
uucauggagacuuccagcaccc

SEQ ID NO: 325789 - RNA, 20 nt, Human
uucccccggcuccacccccg

SEQ ID NO: 325790 - RNA, 30 nt, Human
uucuaaaugucaaccccaacacucaccaau

SEQ ID NO: 325791 - RNA, 19 nt, Human
uucugccagcuuccugucc

SEQ ID NO: 325792 - RNA, 22 nt, Human
uucuuggugcauuuagccuguu

SEQ ID NO: 325793 - RNA, 27 nt, Human
uuuaagaccaucagcccuggccucagc

SEQ ID NO: 325794 - RNA, 18 nt, Human
uuuccaggaaacugcagu

SEQ ID NO: 325795 - RNA, 21 nt, Human
uuugacccugagccagacagg

SEQ ID NO: 325796 - RNA, 21 nt, Human
uuuuccaggaaacugcagugu

SEQ ID NO: 325797 - RNA, 18 nt, Human
aaaagaagaaaagaaaag

SEQ ID NO: 325798 - RNA, 19 nt, Human
aaaagaagaaaagaaaagg

SEQ ID NO: 325799 - RNA, 24 nt, Human
aaacagaauaaaaacuguuuucca

SEQ ID NO: 325800 - RNA, 21 nt, Human
aaacaucgacaguguaaaaac

SEQ ID NO: 325801 - RNA, 19 nt, Human
aaacauuuuaaaaggucag

SEQ ID NO: 325802 - RNA, 18 nt, Human
aaagaagaaaagaaaagg

SEQ ID NO: 325803 - RNA, 22 nt, Human
aaauauuaaaacccacagugcu

SEQ ID NO: 325804 - RNA, 23 nt, Human
aacagaaaaucugagaaaacaua

SEQ ID NO: 325805 - RNA, 20 nt, Human
aaccuuaaauaucucaauau

SEQ ID NO: 325806 - RNA, 19 nt, Human
aacuguacaacagaaaauc

SEQ ID NO: 325807 - RNA, 18 nt, Human
aagaaaauauaggcagag

SEQ ID NO: 325808 - RNA, 21 nt, Human
aagaagaaaagaaaaggaaca

SEQ ID NO: 325809 - RNA, 23 nt, Human
aagaagaaaagaaaaggaacagc

SEQ ID NO: 325810 - RNA, 24 nt, Human
aagcauccacagaucccucaaaac

SEQ ID NO: 325811 - RNA, 18 nt, Human
aagcauuuugaagaggua

SEQ ID NO: 325812 - RNA, 23 nt, Human
aagggccuuuuuuuuucucuuuu

SEQ ID NO: 325813 - RNA, 19 nt, Human
aauucuggaauaucucaac

SEQ ID NO: 325814 - RNA, 21 nt, Human
acauaggccuauccuaaggac

SEQ ID NO: 325815 - RNA, 20 nt, Human
acugugucucuuagcaaaau

SEQ ID NO: 325816 - RNA, 24 nt, Human
agaaaagaaaaggaacagcaugca

SEQ ID NO: 325817 - RNA, 18 nt, Human
agaaaucaaacaagcuuu

SEQ ID NO: 325818 - RNA, 18 nt, Human
agaaugggaacguaacuu

SEQ ID NO: 325819 - RNA, 23 nt, Human
agacauaaauaauaaucuucaau

SEQ ID NO: 325820 - RNA, 19 nt, Human
agacaugaaauuacuggua

SEQ ID NO: 325821 - RNA, 21 nt, Human
agcugagguuuaccugaaaac

SEQ ID NO: 325822 - RNA, 27 nt, Human
auaaaauucucugcuuuucacuuaaaa

SEQ ID NO: 325823 - RNA, 22 nt, Human
auuaaacuguacaacagaaaau

SEQ ID NO: 325824 - RNA, 24 nt, Human
auuucauuuucucccucuucccaa

SEQ ID NO: 325825 - RNA, 21 nt, Human
auuuucucccucuucccaaaa

SEQ ID NO: 325826 - RNA, 19 nt, Human
caaaacauuuuaaaagguc

SEQ ID NO: 325827 - RNA, 22 nt, Human
caaaaguacuuuaaaauuucaa

SEQ ID NO: 325828 - RNA, 21 nt, Human
caaguaaaaagacgucaaaac

SEQ ID NO: 325829 - RNA, 19 nt, Human
cacugauaccuguuuuugu

SEQ ID NO: 325830 - RNA, 22 nt, Human
cagaauaaaaacuguuuuccaa

SEQ ID NO: 325831 - RNA, 20 nt, Human
cagcaugcagguagccaggc

SEQ ID NO: 325832 - RNA, 23 nt, Human
cauaggccuauccuaaggacaaa

SEQ ID NO: 325833 - RNA, 24 nt, Human
ccccaaagaaaauauacugauugu

SEQ ID NO: 325834 - RNA, 18 nt, Human
ccuuuuuuuuucucuuuu

SEQ ID NO: 325835 - RNA, 20 nt, Human
cgaagcauccacagaucccu

SEQ ID NO: 325836 - RNA, 22 nt, Human
cggggguaggcuuugcugucug

SEQ ID NO: 325837 - RNA, 21 nt, Human
cucacugcaagucguaugaca

SEQ ID NO: 325838 - RNA, 22 nt, Human
cucacugcaagucguaugacaa

SEQ ID NO: 325839 - RNA, 18 nt, Human
cugauuuuaaaaaguaga

SEQ ID NO: 325840 - RNA, 22 nt, Human
cugauuuuaaaaaguagacaug

SEQ ID NO: 325841 - RNA, 21 nt, Human
cuggacgugcuccugacgcuc

SEQ ID NO: 325842 - RNA, 20 nt, Human
cuggcuguggagcugaagga

SEQ ID NO: 325843 - RNA, 19 nt, Human
cuuaaauaucucaauaugc

SEQ ID NO: 325844 - RNA, 21 nt, Human
cuuaaauaucucaauaugcca

SEQ ID NO: 325845 - RNA, 18 nt, Human
cuucaauaaauuaaguaa

SEQ ID NO: 325846 - RNA, 28 nt, Human
gaaaaaggaacaucacuuauaaaauauu

SEQ ID NO: 325847 - RNA, 19 nt, Human
gaacguaacuuuuuccagu

SEQ ID NO: 325848 - RNA, 21 nt, Human
gaacuacuuagauaucauuug

SEQ ID NO: 325849 - RNA, 21 nt, Human
gacaaugagauguggaaaaga

SEQ ID NO: 325850 - RNA, 22 nt, Human
gagcggcgggcagggcgcggcg

SEQ ID NO: 325851 - RNA, 24 nt, Human
gcauccaucuugguuacagauagc

SEQ ID NO: 325852 - RNA, 23 nt, Human
gcgucuggcuguggagcugaagg

SEQ ID NO: 325853 - RNA, 20 nt, Human
ggcgcggcgcggggguaggc

SEQ ID NO: 325854 - RNA, 19 nt, Human
ggcuguggagcugaaggag

SEQ ID NO: 325855 - RNA, 22 nt, Human
gggcagggcgcggcgcgggggu

SEQ ID NO: 325856 - RNA, 18 nt, Human
guggagcugaaggaggcg

SEQ ID NO: 325857 - RNA, 20 nt, Human
guugaaauucaaguaaaaag

SEQ ID NO: 325858 - RNA, 25 nt, Human
uaaaaaaaacagugaacaguguuuu

SEQ ID NO: 325859 - RNA, 20 nt, Human
uaaaaauauuaaaacccaca

SEQ ID NO: 325860 - RNA, 21 nt, Human
uaaaagaagaaaagaaaagga

SEQ ID NO: 325861 - RNA, 24 nt, Human
uaaacguaaaauuguaaagaagau

SEQ ID NO: 325862 - RNA, 20 nt, Human
uaaacuguacaacagaaaau

SEQ ID NO: 325863 - RNA, 24 nt, Human
uaaauaagaaagggcauuaauuag

SEQ ID NO: 325864 - RNA, 24 nt, Human
uaaauuugaacaauaauuugguuc

SEQ ID NO: 325865 - RNA, 22 nt, Human
uaacacugcaguggcuccacca

SEQ ID NO: 325866 - RNA, 21 nt, Human
uaacagcaacagcaaaaucuu

SEQ ID NO: 325867 - RNA, 19 nt, Human
uacacauuugucugaggca

SEQ ID NO: 325868 - RNA, 19 nt, Human
uagcuauaaauaaaauucu

SEQ ID NO: 325869 - RNA, 21 nt, Human
uaggcuuugcugucugagggc

SEQ ID NO: 325870 - RNA, 22 nt, Human
uauccuaaggacaaacauucaa

SEQ ID NO: 325871 - RNA, 22 nt, Human
uauuucauuuucucccucuucc

SEQ ID NO: 325872 - RNA, 21 nt, Human
ucagugacaaugagaugugga

SEQ ID NO: 325873 - RNA, 23 nt, Human
ucauuuucucccucuucccaaaa

SEQ ID NO: 325874 - RNA, 26 nt, Human
uccaaacuuaacagcaacagcaaaau

SEQ ID NO: 325875 - RNA, 20 nt, Human
ucccagguuuugucagcaga

SEQ ID NO: 325876 - RNA, 21 nt, Human
ucccucuucccaaaagaaaau

SEQ ID NO: 325877 - RNA, 21 nt, Human
uccuaaggacaaacauucaac

SEQ ID NO: 325878 - RNA, 26 nt, Human
uccugagcugagguuuaccugaaaac

SEQ ID NO: 325879 - RNA, 23 nt, Human
ucgcauacacaacccaaauuccc

SEQ ID NO: 325880 - RNA, 21 nt, Human
ugacauaacaaaaaaaaauca

SEQ ID NO: 325881 - RNA, 19 nt, Human
ugagacaauauucuuugug

SEQ ID NO: 325882 - RNA, 19 nt, Human
ugcauuggaaacaucgaca

SEQ ID NO: 325883 - RNA, 23 nt, Human
ugcuucaaaaguuuaaaccuaaa

SEQ ID NO: 325884 - RNA, 22 nt, Human
uggcugaacaaauuaacgaagc

SEQ ID NO: 325885 - RNA, 22 nt, Human
ugguuuuguuuuuaaauaagaa

SEQ ID NO: 325886 - RNA, 20 nt, Human
uguaaagaagauucuccuga

SEQ ID NO: 325887 - RNA, 18 nt, Human
uguggagcugaaggaggc

SEQ ID NO: 325888 - RNA, 19 nt, Human
uguggagcugaaggaggcg

SEQ ID NO: 325889 - RNA, 27 nt, Human
uuaacagcaacagcaaaaucuuuagag

SEQ ID NO: 325890 - RNA, 22 nt, Human
uuaaccuuaaacauucuaaacg

SEQ ID NO: 325891 - RNA, 24 nt, Human
uuaaccuuaaacauucuaaacgua

SEQ ID NO: 325892 - RNA, 23 nt, Human
uucaaaaguuuaaaccuaaauuu

SEQ ID NO: 325893 - RNA, 22 nt, Human
uucaaccuuaaauaucucaauu

SEQ ID NO: 325894 - RNA, 18 nt, Human
uugaaauucaaguaaaaa

SEQ ID NO: 325895 - RNA, 22 nt, Human
uugaacaauaauuugguuuucu

SEQ ID NO: 325896 - RNA, 22 nt, Human
uugcugagaacuacuuagauau

SEQ ID NO: 325897 - RNA, 18 nt, Human
uuuaaauccaagacagcu

SEQ ID NO: 325898 - RNA, 20 nt, Human
uuuacaggugauucuacccu

SEQ ID NO: 325899 - RNA, 20 nt, Human
uuuacauaauauucagagag

SEQ ID NO: 325900 - RNA, 24 nt, Human
uuugagauaacacugcaguggcuc

SEQ ID NO: 325901 - RNA, 22 nt, Human
aaaaagaauaaacaauagaaaa

SEQ ID NO: 325902 - RNA, 24 nt, Human
aaaugaauaaaaguggaaucagaa

SEQ ID NO: 325903 - RNA, 19 nt, Human
acacugucuagagcagaac

SEQ ID NO: 325904 - RNA, 18 nt, Human
acauacaaugucuuagaa

SEQ ID NO: 325905 - RNA, 23 nt, Human
cauuuuuguuuuacauuuuaagg

SEQ ID NO: 325906 - RNA, 21 nt, Human
cugucuagagcagaacucuga

SEQ ID NO: 325907 - RNA, 23 nt, Human
cuuaugaucauuacauuuuuguu

SEQ ID NO: 325908 - RNA, 22 nt, Human
gguagaagagagguuuaaaagu

SEQ ID NO: 325909 - RNA, 18 nt, Human
ucaaaugaauaaaagugg

SEQ ID NO: 325910 - RNA, 23 nt, Human
aaacaaaucagaggcgcuuccuc

SEQ ID NO: 325911 - RNA, 24 nt, Human
aaccgccuccuaaaagaagaaagu

SEQ ID NO: 325912 - RNA, 23 nt, Human
aagucagcuucuuugcgaaccgg

SEQ ID NO: 325913 - RNA, 19 nt, Human
agaaauacacuucuccagc

SEQ ID NO: 325914 - RNA, 24 nt, Human
agaaaugaaaaacacugaagaaag

SEQ ID NO: 325915 - RNA, 23 nt, Human
agauggucacuagcuucugaagc

SEQ ID NO: 325916 - RNA, 18 nt, Human
agcaaaaagggaaaaaag

SEQ ID NO: 325917 - RNA, 22 nt, Human
aggcagaagggaggcuccaaaa

SEQ ID NO: 325918 - RNA, 27 nt, Human
aggcagaagggaggcuccaaaacccag

SEQ ID NO: 325919 - RNA, 24 nt, Human
agggaaaaaagaaacaaaucagag

SEQ ID NO: 325920 - RNA, 21 nt, Human
auaauagcgaaaauaaaaugg

SEQ ID NO: 325921 - RNA, 24 nt, Human
caaaaagggaaaaaagaaacaaau

SEQ ID NO: 325922 - RNA, 19 nt, Human
caaaacccagcugagagca

SEQ ID NO: 325923 - RNA, 18 nt, Human
caaaugcuucuauauucu

SEQ ID NO: 325924 - RNA, 22 nt, Human
caaccggcuacuccaacugugc

SEQ ID NO: 325925 - RNA, 24 nt, Human
cacagccagaaagagcaaaaaggg

SEQ ID NO: 325926 - RNA, 25 nt, Human
ccaaaacccagcugagagcaccccg

SEQ ID NO: 325927 - RNA, 20 nt, Human
ccacacagccagaaagagca

SEQ ID NO: 325928 - RNA, 23 nt, Human
ccacacagccagaaagagcaaaa

SEQ ID NO: 325929 - RNA, 19 nt, Human
cuccuggguucguggaaca

SEQ ID NO: 325930 - RNA, 25 nt, Human
gaaacaaaucagaggcgcuuccucu

SEQ ID NO: 325931 - RNA, 22 nt, Human
gagcaaaaagggaaaaaagaaa

SEQ ID NO: 325932 - RNA, 23 nt, Human
gggaggcuccaaaacccagcuga

SEQ ID NO: 325933 - RNA, 22 nt, Human
ggugacgguggagaaagaggaa

SEQ ID NO: 325934 - RNA, 21 nt, Human
gguggagaaagaggaaugggc

SEQ ID NO: 325935 - RNA, 22 nt, Human
ggugugagaguaaggggaagaa

SEQ ID NO: 325936 - RNA, 19 nt, Human
guagagugguaaaggauug

SEQ ID NO: 325937 - RNA, 23 nt, Human
guaguguguuuacacgucuccca

SEQ ID NO: 325938 - RNA, 26 nt, Human
guggaacagggcuaaccgccuccuaa

SEQ ID NO: 325939 - RNA, 23 nt, Human
uaagaaaugaaaaacacugaaga

SEQ ID NO: 325940 - RNA, 21 nt, Human
uacccuagaaaaauuauuuca

SEQ ID NO: 325941 - RNA, 19 nt, Human
uaguguguuuacacgucuc

SEQ ID NO: 325942 - RNA, 20 nt, Human
uauucugaguuauucucugu

SEQ ID NO: 325943 - RNA, 22 nt, Human
ucaaugauaaguaguguguuuu

SEQ ID NO: 325944 - RNA, 24 nt, Human
uccaagccaaggcagaagggaggc

SEQ ID NO: 325945 - RNA, 25 nt, Human
uccucugaaauaauagcgaaaauaa

SEQ ID NO: 325946 - RNA, 21 nt, Human
ucuccagcaaauuaugaagau

SEQ ID NO: 325947 - RNA, 19 nt, Human
ugaaauaauagcgaaaaua

SEQ ID NO: 325948 - RNA, 22 nt, Human
ugaaauuauuugguagaguggu

SEQ ID NO: 325949 - RNA, 21 nt, Human
ugagaaaaaccuauauccuug

SEQ ID NO: 325950 - RNA, 20 nt, Human
ugagagcaccccgcugaggc

SEQ ID NO: 325951 - RNA, 22 nt, Human
ugagaguaaggggaagaaauac

SEQ ID NO: 325952 - RNA, 20 nt, Human
ugagcugguagaaaccagag

SEQ ID NO: 325953 - RNA, 19 nt, Human
uggaacagggcuaaccgcc

SEQ ID NO: 325954 - RNA, 23 nt, Human
ugggugacgguggagaaagagga

SEQ ID NO: 325955 - RNA, 25 nt, Human
ugguagagugguaaaggauugaugu

SEQ ID NO: 325956 - RNA, 26 nt, Human
uguccaagccaaggcagaagggaggc

SEQ ID NO: 325957 - RNA, 18 nt, Human
ugugugguagggggguac

SEQ ID NO: 325958 - RNA, 24 nt, Human
uguugggugacgguggagaaagag

SEQ ID NO: 325959 - RNA, 21 nt, Human
uuugguagagugguaaaggau

SEQ ID NO: 325960 - RNA, 23 nt, Human
uuuguccaagccaaggcagaagg

SEQ ID NO: 325961 - RNA, 23 nt, Human
cacccaucuuuugguccaucugu

SEQ ID NO: 325962 - RNA, 22 nt, Human
cauucaaccacccaucuuuugg

SEQ ID NO: 325963 - RNA, 22 nt, Human
cccuguuuuuccucuuggcccc

SEQ ID NO: 325964 - RNA, 21 nt, Human
cuuuugguccaucuguccauc

SEQ ID NO: 325965 - RNA, 25 nt, Human
cuuuugguccaucuguccauccacu

SEQ ID NO: 325966 - RNA, 26 nt, Human
ggaaaucauucaaccacccaucuuuu

SEQ ID NO: 325967 - RNA, 25 nt, Human
uccuuuuucuuuuuuuuuucuuuuu

SEQ ID NO: 325968 - RNA, 23 nt, Human
ucuuuuuuucccuguuuuuccuc

SEQ ID NO: 325969 - RNA, 20 nt, Human
uguuuuuccucuuggcccca

SEQ ID NO: 325970 - RNA, 18 nt, Human
uuuuucuuuuuuucccug

SEQ ID NO: 325971 - RNA, 22 nt, Human
uuuuucuuuuuuuuuucuuuuu

SEQ ID NO: 325972 - RNA, 24 nt, Human
uuuuuucuuuuuuucccuguuuuu

SEQ ID NO: 325973 - RNA, 25 nt, Human
uuuuuuucuuuuuuucccuguuuuu

SEQ ID NO: 325974 - RNA, 25 nt, Human
uuuuuuuuucuuuuuuucccuguuu

SEQ ID NO: 325975 - RNA, 25 nt, Human
aaaaguagcagaaaaaaaugaacaa

SEQ ID NO: 325976 - RNA, 24 nt, Human
aaacaagaaaaagauauagaugca

SEQ ID NO: 325977 - RNA, 25 nt, Human
aaacaagaaaaagauauagaugcag

SEQ ID NO: 325978 - RNA, 24 nt, Human
aacggcuguaggaagaagcaggga

SEQ ID NO: 325979 - RNA, 21 nt, Human
aacugaauuuucagccuuuga

SEQ ID NO: 325980 - RNA, 21 nt, Human
aacuuggcuggcccagagcaa

SEQ ID NO: 325981 - RNA, 18 nt, Human
aagaaaaagauauagaug

SEQ ID NO: 325982 - RNA, 20 nt, Human
aagaaaaagauauagaugca

SEQ ID NO: 325983 - RNA, 18 nt, Human
aagaaagagugaagaccu

SEQ ID NO: 325984 - RNA, 22 nt, Human
aagaagaaagagugaagaccug

SEQ ID NO: 325985 - RNA, 23 nt, Human
aagaagaaagagugaagaccuga

SEQ ID NO: 325986 - RNA, 18 nt, Human
aagcagggacccuccucc

SEQ ID NO: 325987 - RNA, 24 nt, Human
aggaaaaugauacacacuaaaaga

SEQ ID NO: 325988 - RNA, 19 nt, Human
caacuuggcuggcccagag

SEQ ID NO: 325989 - RNA, 24 nt, Human
caaguugccaacuuggcuggccca

SEQ ID NO: 325990 - RNA, 23 nt, Human
cacacaaccagccauuggaccag

SEQ ID NO: 325991 - RNA, 18 nt, Human
cagagcccgggagaagcu

SEQ ID NO: 325992 - RNA, 25 nt, Human
cagccaagcccucucacacaaccaa

SEQ ID NO: 325993 - RNA, 19 nt, Human
caggagccaauucauggag

SEQ ID NO: 325994 - RNA, 22 nt, Human
cagggacccuccuccagagccc

SEQ ID NO: 325995 - RNA, 22 nt, Human
caugacaugguuuacaaagaag

SEQ ID NO: 325996 - RNA, 19 nt, Human
ccacaugccauguacaaug

SEQ ID NO: 325997 - RNA, 20 nt, Human
ccagcccaugaaagucagcc

SEQ ID NO: 325998 - RNA, 19 nt, Human
cuccuccagagcccgggag

SEQ ID NO: 325999 - RNA, 20 nt, Human
gagaagcuuccaaguugcca

SEQ ID NO: 326000 - RNA, 21 nt, Human
gcagcugggguggucgggccc

SEQ ID NO: 326001 - RNA, 20 nt, Human
gcuguaggaagaagcaggga

SEQ ID NO: 326002 - RNA, 19 nt, Human
uaaaaggaaaaugauacac

SEQ ID NO: 326003 - RNA, 23 nt, Human
uaacagcucaaacaagaaaaaga

SEQ ID NO: 326004 - RNA, 23 nt, Human
uaacugaggaaaucuuuccacag

SEQ ID NO: 326005 - RNA, 22 nt, Human
uacauuaaaguaagaaauaaga

SEQ ID NO: 326006 - RNA, 23 nt, Human
uaugcacaggcaaaauaaaugca

SEQ ID NO: 326007 - RNA, 19 nt, Human
uccuuguucccaaaaacac

SEQ ID NO: 326008 - RNA, 22 nt, Human
ugaagaccugaggucuggcugg

SEQ ID NO: 326009 - RNA, 21 nt, Human
ugaaucuuuuuucuacccaaa

SEQ ID NO: 326010 - RNA, 21 nt, Human
ugagagaaagcuacagccaag

SEQ ID NO: 326011 - RNA, 21 nt, Human
uggcccagagcaaacuugugg

SEQ ID NO: 326012 - RNA, 23 nt, Human
uuccagcaaguacuuguucuuuc

SEQ ID NO: 326013 - RNA, 21 nt, Human
uuuacaaagaagaaagaguga

SEQ ID NO: 326014 - RNA, 26 nt, Human
aaaaaaacaaaacaaaaaaugaaccc

SEQ ID NO: 326015 - RNA, 23 nt, Human
aaaacaaaacaaaaaaugaaccc

SEQ ID NO: 326016 - RNA, 23 nt, Human
aaacaaaacaaaaaaugaaccca

SEQ ID NO: 326017 - RNA, 25 nt, Human
aaacaaaacaaaaaaugaacccaaa

SEQ ID NO: 326018 - RNA, 23 nt, Human
acaaaacaaaaaaugaacccaaa

SEQ ID NO: 326019 - RNA, 21 nt, Human
aggaauuaagaugucaccccu

SEQ ID NO: 326020 - RNA, 20 nt, Human
auuccggcucuccucuucca

SEQ ID NO: 326021 - RNA, 24 nt, Human
ccucgcugcugguggaaggcuaga

SEQ ID NO: 326022 - RNA, 22 nt, Human
gagugcuggcgacugaggacac

SEQ ID NO: 326023 - RNA, 22 nt, Human
gugaacauaaauuguucuucau

SEQ ID NO: 326024 - RNA, 23 nt, Human
uagcaagacgugcuccuagggga

SEQ ID NO: 326025 - RNA, 20 nt, Human
ucuuagaaaaacgccacauu

SEQ ID NO: 326026 - RNA, 24 nt, Human
uggucauucaaaaaaguuggagcu

SEQ ID NO: 326027 - RNA, 22 nt, Human
uuccucgcugcugguggaaggc

SEQ ID NO: 326028 - RNA, 24 nt, Human
uugaaaaaaacaaaacaaaaaaug

SEQ ID NO: 326029 - RNA, 20 nt, Human
aaguuaaaagaauguuuaug

SEQ ID NO: 326030 - RNA, 21 nt, Human
acaagucaaauagaaagaagu

SEQ ID NO: 326031 - RNA, 21 nt, Human
acccuguguccauagcccaga

SEQ ID NO: 326032 - RNA, 20 nt, Human
agaauggggguuggggagag

SEQ ID NO: 326033 - RNA, 22 nt, Human
agaccaaacucacauuaaauaa

SEQ ID NO: 326034 - RNA, 22 nt, Human
agagaaagaggggcaggaagag

SEQ ID NO: 326035 - RNA, 18 nt, Human
agagagcggauuuggccc

SEQ ID NO: 326036 - RNA, 21 nt, Human
agaggaggaguaagaaaagag

SEQ ID NO: 326037 - RNA, 18 nt, Human
agaggggcaggaagagag

SEQ ID NO: 326038 - RNA, 20 nt, Human
agaguccccucuguccagcu

SEQ ID NO: 326039 - RNA, 23 nt, Human
agcaagggaaaguaaaggaagaa

SEQ ID NO: 326040 - RNA, 22 nt, Human
agcuccuccccagcuucucugu

SEQ ID NO: 326041 - RNA, 24 nt, Human
aggaagagagcggauuuggcccaa

SEQ ID NO: 326042 - RNA, 26 nt, Human
aggcaggggcgaagacgcaggcaggu

SEQ ID NO: 326043 - RNA, 19 nt, Human
aggugacuccccuuggccu

SEQ ID NO: 326044 - RNA, 25 nt, Human
aguacagccagggguaggggugggg

SEQ ID NO: 326045 - RNA, 22 nt, Human
caaaacaaagcuccuccccagc

SEQ ID NO: 326046 - RNA, 22 nt, Human
caaagcuccuccccagcuucuc

SEQ ID NO: 326047 - RNA, 24 nt, Human
caaccacaagucaaauagaaagaa

SEQ ID NO: 326048 - RNA, 19 nt, Human
caagggacaucugagggcc

SEQ ID NO: 326049 - RNA, 19 nt, Human
cacagcauccugugccugg

SEQ ID NO: 326050 - RNA, 22 nt, Human
cacagcauccugugccuggacu

SEQ ID NO: 326051 - RNA, 19 nt, Human
caccaugugacaccucccc

SEQ ID NO: 326052 - RNA, 22 nt, Human
cagcagucccccucugagccau

SEQ ID NO: 326053 - RNA, 24 nt, Human
caggaagagagcggauuuggccca

SEQ ID NO: 326054 - RNA, 25 nt, Human
caggcaggggcgaagacgcaggcag

SEQ ID NO: 326055 - RNA, 19 nt, Human
caggcagguggccccaccc

SEQ ID NO: 326056 - RNA, 20 nt, Human
caggcccaucccucaucuca

SEQ ID NO: 326057 - RNA, 19 nt, Human
cagguccucccucaggagg

SEQ ID NO: 326058 - RNA, 23 nt, Human
caguccagaccaaacucacauua

SEQ ID NO: 326059 - RNA, 28 nt, Human
caucuuugucaccgucacccugugucca

SEQ ID NO: 326060 - RNA, 24 nt, Human
cauguccauauauaaagcuagggg

SEQ ID NO: 326061 - RNA, 22 nt, Human
ccagcuucucugugcaucaagg

SEQ ID NO: 326062 - RNA, 20 nt, Human
ccaggcuggcuuagggagca

SEQ ID NO: 326063 - RNA, 22 nt, Human
ccaugugacaccuccccacccc

SEQ ID NO: 326064 - RNA, 22 nt, Human
cccacaugaccaacagcaaggc

SEQ ID NO: 326065 - RNA, 22 nt, Human
ccccaaaacaaagcuccucccc

SEQ ID NO: 326066 - RNA, 24 nt, Human
ccccaaaacaaagcuccuccccag

SEQ ID NO: 326067 - RNA, 26 nt, Human
ccccaggagcccccugcauggaccag

SEQ ID NO: 326068 - RNA, 18 nt, Human
ccccagguccucccucag

SEQ ID NO: 326069 - RNA, 20 nt, Human
cccccaaaacaaagcuccuc

SEQ ID NO: 326070 - RNA, 24 nt, Human
cucacuggcugccugacccccaaa

SEQ ID NO: 326071 - RNA, 24 nt, Human
cuccagcgacuacuccucgggcac

SEQ ID NO: 326072 - RNA, 21 nt, Human
cucccaauuagcuuguuccug

SEQ ID NO: 326073 - RNA, 19 nt, Human
cugacccccaaaacaaagc

SEQ ID NO: 326074 - RNA, 21 nt, Human
cugucaguccagaccaaacuc

SEQ ID NO: 326075 - RNA, 22 nt, Human
cuuucaucugccgucuagcuug

SEQ ID NO: 326076 - RNA, 20 nt, Human
gaagaaagagaaagaggggc

SEQ ID NO: 326077 - RNA, 23 nt, Human
gaaggugacuccccuuggccuuc

SEQ ID NO: 326078 - RNA, 21 nt, Human
gacuacuccucgggcaccgcc

SEQ ID NO: 326079 - RNA, 22 nt, Human
gagaauggggguuggggagaga

SEQ ID NO: 326080 - RNA, 19 nt, Human
gagagaaagaggaggagua

SEQ ID NO: 326081 - RNA, 21 nt, Human
gagcaguacagccagggguag

SEQ ID NO: 326082 - RNA, 22 nt, Human
gagcggauuuggcccaaggucc

SEQ ID NO: 326083 - RNA, 20 nt, Human
gaggaggaguaagaaaagag

SEQ ID NO: 326084 - RNA, 22 nt, Human
gcaggcaggggcgaagacgcag

SEQ ID NO: 326085 - RNA, 20 nt, Human
gcccagaguccccucugucc

SEQ ID NO: 326086 - RNA, 24 nt, Human
ggagagaaagaggaggaguaagaa

SEQ ID NO: 326087 - RNA, 18 nt, Human
ggcaccgccaggugagcc

SEQ ID NO: 326088 - RNA, 19 nt, Human
ggccaggcagcagcagucc

SEQ ID NO: 326089 - RNA, 18 nt, Human
ggccuucucccuggaaga

SEQ ID NO: 326090 - RNA, 18 nt, Human
gggagcaguggccaggca

SEQ ID NO: 326091 - RNA, 20 nt, Human
ggggagagaaagaggaggag

SEQ ID NO: 326092 - RNA, 21 nt, Human
gggguagggguggggagaggg

SEQ ID NO: 326093 - RNA, 22 nt, Human
ggugcagaugagaauggggguu

SEQ ID NO: 326094 - RNA, 18 nt, Human
guagggguggggagaggg

SEQ ID NO: 326095 - RNA, 20 nt, Human
ucaaguguucacucugugcc

SEQ ID NO: 326096 - RNA, 24 nt, Human
ucaauauacacuguacaagaaugc

SEQ ID NO: 326097 - RNA, 21 nt, Human
ucaguccagaccaaacucaca

SEQ ID NO: 326098 - RNA, 25 nt, Human
uccauagcccagaguccccucuguc

SEQ ID NO: 326099 - RNA, 22 nt, Human
uccauauauaaagcuaggggca

SEQ ID NO: 326100 - RNA, 19 nt, Human
uccucgggcaccgccaggu

SEQ ID NO: 326101 - RNA, 18 nt, Human
ugacaccuccccaccccc

SEQ ID NO: 326102 - RNA, 21 nt, Human
ugacccccaaaacaaagcucc

SEQ ID NO: 326103 - RNA, 20 nt, Human
ugagaauggggguuggggag

SEQ ID NO: 326104 - RNA, 18 nt, Human
ugcaaaguggcaagggaa

SEQ ID NO: 326105 - RNA, 18 nt, Human
ugcaucaagggacaucug

SEQ ID NO: 326106 - RNA, 22 nt, Human
ugccauauaguuuaucaagugu

SEQ ID NO: 326107 - RNA, 22 nt, Human
ugccugacccccaaaacaaagc

SEQ ID NO: 326108 - RNA, 21 nt, Human
ugccuggacucccaauuagcu

SEQ ID NO: 326109 - RNA, 19 nt, Human
uggcaagggaaggugacuc

SEQ ID NO: 326110 - RNA, 20 nt, Human
uggcccaagguccuaucuug

SEQ ID NO: 326111 - RNA, 18 nt, Human
uggggagagaaagaggag

SEQ ID NO: 326112 - RNA, 18 nt, Human
ugguucccaaaucggccu

SEQ ID NO: 326113 - RNA, 18 nt, Human
uguacaagaaugccaggc

SEQ ID NO: 326114 - RNA, 21 nt, Human
ugucaccgucacccugugucc

SEQ ID NO: 326115 - RNA, 20 nt, Human
uuaaaagaauguuuaugcaa

SEQ ID NO: 326116 - RNA, 21 nt, Human
uucccaaaucggccugccaug

SEQ ID NO: 326117 - RNA, 18 nt, Human
uucucccuggaagaccca

SEQ ID NO: 326118 - RNA, 22 nt, Human
aaaacaaaaacaaaaacaaaaa

SEQ ID NO: 326119 - RNA, 27 nt, Human
aaaacaaaaacaaaaacaaaaaaacaa

SEQ ID NO: 326120 - RNA, 20 nt, Human
aaaacuccuucaucugccag

SEQ ID NO: 326121 - RNA, 22 nt, Human
aaaagugugggguaaggauggc

SEQ ID NO: 326122 - RNA, 22 nt, Human
aaacaaaaacaaaaaaacaaaa

SEQ ID NO: 326123 - RNA, 25 nt, Human
aaacaaaaacaaaaaaacaaaacaa

SEQ ID NO: 326124 - RNA, 22 nt, Human
aaacaaaacaaacaaaaaacga

SEQ ID NO: 326125 - RNA, 20 nt, Human
aaacuccuucaucugccagg

SEQ ID NO: 326126 - RNA, 23 nt, Human
aacaaacaaaaaacgacaacaau

SEQ ID NO: 326127 - RNA, 19 nt, Human
aagccuagcccuccccagg

SEQ ID NO: 326128 - RNA, 23 nt, Human
acaaaaaaacaaaacaaacaaaa

SEQ ID NO: 326129 - RNA, 24 nt, Human
acaaaaacaaaaaaacaaaacaaa

SEQ ID NO: 326130 - RNA, 28 nt, Human
acaaaaacaaaaaaacaaaacaaacaaa

SEQ ID NO: 326131 - RNA, 29 nt, Human
acaaaaacaaaaaaacaaaacaaacaaaa

SEQ ID NO: 326132 - RNA, 18 nt, Human
acaaaacaaacaaaaaac

SEQ ID NO: 326133 - RNA, 20 nt, Human
acaaaacaaacaaaaaacga

SEQ ID NO: 326134 - RNA, 22 nt, Human
acccuccucaucuccagggccc

SEQ ID NO: 326135 - RNA, 22 nt, Human
accucccaugcccacccacccc

SEQ ID NO: 326136 - RNA, 22 nt, Human
agaaggguggggaagacguggg

SEQ ID NO: 326137 - RNA, 19 nt, Human
agaggaagagguggcaggg

SEQ ID NO: 326138 - RNA, 19 nt, Human
agaggaggaaaggccaggc

SEQ ID NO: 326139 - RNA, 30 nt, Human
agcgaguguaaaaacaaaaacaaaaacaaa

SEQ ID NO: 326140 - RNA, 19 nt, Human
aggaagaggaggaaaggcc

SEQ ID NO: 326141 - RNA, 18 nt, Human
aggaugaggaaaggagag

SEQ ID NO: 326142 - RNA, 20 nt, Human
aggaugaggaaaggagagaa

SEQ ID NO: 326143 - RNA, 20 nt, Human
aggccagaaauugggguuac

SEQ ID NO: 326144 - RNA, 21 nt, Human
agucgcccaguuuggguccaa

SEQ ID NO: 326145 - RNA, 20 nt, Human
agugucaaaagcuccugaaa

SEQ ID NO: 326146 - RNA, 24 nt, Human
caaaaacaaaaaaacaaaacaaac

SEQ ID NO: 326147 - RNA, 23 nt, Human
caaaaagggcgguuuauauagug

SEQ ID NO: 326148 - RNA, 23 nt, Human
caccggagcgcgggcgccgcagc

SEQ ID NO: 326149 - RNA, 19 nt, Human
cagaguggggaggacucac

SEQ ID NO: 326150 - RNA, 21 nt, Human
cagcagcagccgcagccggag

SEQ ID NO: 326151 - RNA, 27 nt, Human
cagcucaucccaagccuagcccucccc

SEQ ID NO: 326152 - RNA, 21 nt, Human
ccacccaccccacgcugcaau

SEQ ID NO: 326153 - RNA, 23 nt, Human
ccaggcccugcucagaccucagc

SEQ ID NO: 326154 - RNA, 18 nt, Human
ccagggcccaccccuacc

SEQ ID NO: 326155 - RNA, 22 nt, Human
cccaagccuagcccuccccagg

SEQ ID NO: 326156 - RNA, 24 nt, Human
cccaccccuaccucccaugcccac

SEQ ID NO: 326157 - RNA, 19 nt, Human
cccaggcaaaguuggcaga

SEQ ID NO: 326158 - RNA, 21 nt, Human
ccccuaccucccaugcccacc

SEQ ID NO: 326159 - RNA, 27 nt, Human
ccccuaccucccaugcccacccacccc

SEQ ID NO: 326160 - RNA, 23 nt, Human
cccuaccucccaugcccacccac

SEQ ID NO: 326161 - RNA, 24 nt, Human
cccuaccucccaugcccacccacc

SEQ ID NO: 326162 - RNA, 22 nt, Human
ccgaccccgaggcgucccgagg

SEQ ID NO: 326163 - RNA, 20 nt, Human
ccgcagccggagcccgaccc

SEQ ID NO: 326164 - RNA, 26 nt, Human
ccgcagccggagcccgaccccgaggc

SEQ ID NO: 326165 - RNA, 22 nt, Human
ccucccaaaggaugagggugag

SEQ ID NO: 326166 - RNA, 20 nt, Human
ccucccaugcccacccaccc

SEQ ID NO: 326167 - RNA, 23 nt, Human
ccuccccaggcaaaguuggcaga

SEQ ID NO: 326168 - RNA, 21 nt, Human
ccucuauaauccuggucuaga

SEQ ID NO: 326169 - RNA, 29 nt, Human
ccugaaaacuccuucaucugccaggcacu

SEQ ID NO: 326170 - RNA, 22 nt, Human
ccuguugcacuagggcaggggc

SEQ ID NO: 326171 - RNA, 21 nt, Human
cgaccccgaggcgucccgagg

SEQ ID NO: 326172 - RNA, 22 nt, Human
cgccgcagcagcagccgcagcc

SEQ ID NO: 326173 - RNA, 23 nt, Human
cuccagggcccaccccuaccucc

SEQ ID NO: 326174 - RNA, 21 nt, Human
cucccaugcccacccacccca

SEQ ID NO: 326175 - RNA, 23 nt, Human
cuccccacaaacccagcucaucc

SEQ ID NO: 326176 - RNA, 25 nt, Human
cuccccacaaacccagcucauccca

SEQ ID NO: 326177 - RNA, 24 nt, Human
cugcaauuacauauaaaagccgcc

SEQ ID NO: 326178 - RNA, 25 nt, Human
gaaaaggagcugagggcgcacggcg

SEQ ID NO: 326179 - RNA, 19 nt, Human
gaggacucacuugcugugu

SEQ ID NO: 326180 - RNA, 21 nt, Human
gcagaguuggacccggucaag

SEQ ID NO: 326181 - RNA, 20 nt, Human
gcccagaguggggaggacuc

SEQ ID NO: 326182 - RNA, 18 nt, Human
gcccaggaggacagggau

SEQ ID NO: 326183 - RNA, 23 nt, Human
gcgccgcagcagcagccgcagcc

SEQ ID NO: 326184 - RNA, 20 nt, Human
gcucaaagcccuagucgccc

SEQ ID NO: 326185 - RNA, 24 nt, Human
ggagagaaggguggggaagacgug

SEQ ID NO: 326186 - RNA, 20 nt, Human
gggaaacugcccagcucaaa

SEQ ID NO: 326187 - RNA, 19 nt, Human
gggaagacgugggucuggg

SEQ ID NO: 326188 - RNA, 24 nt, Human
guggggaagacgugggucuggguc

SEQ ID NO: 326189 - RNA, 27 nt, Human
uaaggaacuccccacaaacccagcuca

SEQ ID NO: 326190 - RNA, 27 nt, Human
ucagaccucagcaaugccuguugcacu

SEQ ID NO: 326191 - RNA, 23 nt, Human
ucagugugcacaagcccagagug

SEQ ID NO: 326192 - RNA, 21 nt, Human
uccagggcccaccccuaccuc

SEQ ID NO: 326193 - RNA, 20 nt, Human
ucccaagccuagcccuccca

SEQ ID NO: 326194 - RNA, 19 nt, Human
uccccacaaacccagcuca

SEQ ID NO: 326195 - RNA, 23 nt, Human
uccucaucuccagggcccacccc

SEQ ID NO: 326196 - RNA, 19 nt, Human
ucgcccaguuuggguccaa

SEQ ID NO: 326197 - RNA, 21 nt, Human
ugaggaaaggagagaagggug

SEQ ID NO: 326198 - RNA, 18 nt, Human
ugaggaagaggaggaaag

SEQ ID NO: 326199 - RNA, 19 nt, Human
ugagggugaggaagaggag

SEQ ID NO: 326200 - RNA, 21 nt, Human
ugagggugaggaagaggagga

SEQ ID NO: 326201 - RNA, 26 nt, Human
ugcauacaaaaagggcgguuuauaua

SEQ ID NO: 326202 - RNA, 23 nt, Human
ugcccacccaccccacgcugcaa

SEQ ID NO: 326203 - RNA, 18 nt, Human
ugcccaggccauccugag

SEQ ID NO: 326204 - RNA, 18 nt, Human
ugggucagugugcacaag

SEQ ID NO: 326205 - RNA, 23 nt, Human
uuaggaugaggaaaggagagaag

SEQ ID NO: 326206 - RNA, 20 nt, Human
uuggcagaugaguggcagag

SEQ ID NO: 326207 - RNA, 25 nt, Human
aaaaagaaagcgagaguucagggac

SEQ ID NO: 326208 - RNA, 23 nt, Human
aaacaggccaaaaaaaauaaaca

SEQ ID NO: 326209 - RNA, 28 nt, Human
aaauacaaacaaauuuccuuuuuaaagu

SEQ ID NO: 326210 - RNA, 21 nt, Human
aacaggccaaaaaaaauaaac

SEQ ID NO: 326211 - RNA, 22 nt, Human
acaaauuuccuuuuuaaaguac

SEQ ID NO: 326212 - RNA, 22 nt, Human
acaccacaaguaaagucagaag

SEQ ID NO: 326213 - RNA, 21 nt, Human
accaucucauacaaaccaacu

SEQ ID NO: 326214 - RNA, 23 nt, Human
acccuaacaauauguacaaaaau

SEQ ID NO: 326215 - RNA, 26 nt, Human
agacaaaaaaggaaaaaaagggaccc

SEQ ID NO: 326216 - RNA, 19 nt, Human
aggaacaaugcaaagaugg

SEQ ID NO: 326217 - RNA, 24 nt, Human
aggccaaaaaaaauaaacagcaac

SEQ ID NO: 326218 - RNA, 21 nt, Human
aggcgcgcggcggaggcggcu

SEQ ID NO: 326219 - RNA, 22 nt, Human
auaaacagcaacuucauagaca

SEQ ID NO: 326220 - RNA, 24 nt, Human
caaaaaaaauaaacagcaacuuca

SEQ ID NO: 326221 - RNA, 23 nt, Human
caaaccaacuacuuauaguacag

SEQ ID NO: 326222 - RNA, 23 nt, Human
caagguuuuuuuucuccuuugag

SEQ ID NO: 326223 - RNA, 23 nt, Human
cauacaaaccaacuacuuauagu

SEQ ID NO: 326224 - RNA, 18 nt, Human
cucaugguuuggguuggg

SEQ ID NO: 326225 - RNA, 19 nt, Human
gaguccgcggcggcggagg

SEQ ID NO: 326226 - RNA, 21 nt, Human
gaugcaggggauuaaaaagaa

SEQ ID NO: 326227 - RNA, 18 nt, Human
gcgcgcggcggaggcggc

SEQ ID NO: 326228 - RNA, 20 nt, Human
gcggcggaggcggcugcggc

SEQ ID NO: 326229 - RNA, 18 nt, Human
gcggcggcggaggaggcg

SEQ ID NO: 326230 - RNA, 24 nt, Human
gcugguuuggucauccgagaucau

SEQ ID NO: 326231 - RNA, 24 nt, Human
ggucauccgagaucauuaaaaaug

SEQ ID NO: 326232 - RNA, 21 nt, Human
ggugggcgggcgggccucucu

SEQ ID NO: 326233 - RNA, 19 nt, Human
guaggacagagaacgcucc

SEQ ID NO: 326234 - RNA, 23 nt, Human
guaggacagagaacgcuccgaag

SEQ ID NO: 326235 - RNA, 21 nt, Human
uaaaaagaaagcgagaguuca

SEQ ID NO: 326236 - RNA, 26 nt, Human
uacaaacaaauuuccuuuuuaaagua

SEQ ID NO: 326237 - RNA, 26 nt, Human
uacauacacaaaaaaguuacuggaau

SEQ ID NO: 326238 - RNA, 24 nt, Human
uagacaaaaaaggaaaaaaaaaga

SEQ ID NO: 326239 - RNA, 26 nt, Human
uaggucacggcggccuuuuuuuuuuu

SEQ ID NO: 326240 - RNA, 18 nt, Human
ucacaccacaaguaaagu

SEQ ID NO: 326241 - RNA, 23 nt, Human
ucauagacaaaaaaggaaaaaaa

SEQ ID NO: 326242 - RNA, 20 nt, Human
ucucaugguuuggguugggu

SEQ ID NO: 326243 - RNA, 18 nt, Human
ugaauaggucacggcggc

SEQ ID NO: 326244 - RNA, 19 nt, Human
ugccggaguccgcggcggc

SEQ ID NO: 326245 - RNA, 19 nt, Human
ugccggaguccgcggcggc

SEQ ID NO: 326246 - RNA, 24 nt, Human
uggaaguuuugguucuuuuuuccu

SEQ ID NO: 326247 - RNA, 20 nt, Human
uggaaugcucggaauaagau

SEQ ID NO: 326248 - RNA, 24 nt, Human
uguaaauaaaaaauacaaacaaau

SEQ ID NO: 326249 - RNA, 27 nt, Human
uguaaauaaaaaauacaaacaaauuuc

SEQ ID NO: 326250 - RNA, 25 nt, Human
uuguuggacaacauuguuucacaca

SEQ ID NO: 326251 - RNA, 22 nt, Human
uuuagauucugagacgggaagu

SEQ ID NO: 326252 - RNA, 23 nt, Human
uuugguucuuuuuuccuccccug

SEQ ID NO: 326253 - RNA, 18 nt, Human
uuuuuuuuuuuuuuucug

SEQ ID NO: 326254 - RNA, 22 nt, Human
uuuuuuuuuuuuuuuuucuguu

SEQ ID NO: 326255 - RNA, 18 nt, Human
aaagaagaggguggcagc

SEQ ID NO: 326256 - RNA, 19 nt, Human
acacggcagcggcggccgc

SEQ ID NO: 326257 - RNA, 18 nt, Human
acccccaccuccagcccu

SEQ ID NO: 326258 - RNA, 19 nt, Human
agaagaggguggcagcucu

SEQ ID NO: 326259 - RNA, 23 nt, Human
agaagaggguggcagcucucggu

SEQ ID NO: 326260 - RNA, 23 nt, Human
agagagcaaagagagagaggagc

SEQ ID NO: 326261 - RNA, 22 nt, Human
agcuguggggcucggcaacccc

SEQ ID NO: 326262 - RNA, 19 nt, Human
aggcggcagaggcgcgcgg

SEQ ID NO: 326263 - RNA, 25 nt, Human
aggcggugccggcgcgcucggcgcg

SEQ ID NO: 326264 - RNA, 18 nt, Human
agggagaaagagagcaaa

SEQ ID NO: 326265 - RNA, 22 nt, Human
agggagccaggugaagaguggc

SEQ ID NO: 326266 - RNA, 19 nt, Human
agggaggggaggggggcag

SEQ ID NO: 326267 - RNA, 22 nt, Human
agggaggggaggggggcagcuc

SEQ ID NO: 326268 - RNA, 21 nt, Human
agggcccagagcagggagcca

SEQ ID NO: 326269 - RNA, 19 nt, Human
augacgcugggggaugcag

SEQ ID NO: 326270 - RNA, 20 nt, Human
caaaaagggaggggaggggg

SEQ ID NO: 326271 - RNA, 18 nt, Human
caaagagagagaggagca

SEQ ID NO: 326272 - RNA, 19 nt, Human
caaccccggccccaccccg

SEQ ID NO: 326273 - RNA, 23 nt, Human
caaccccggccccaccccggccu

SEQ ID NO: 326274 - RNA, 23 nt, Human
cacccccaccuccagcccagaga

SEQ ID NO: 326275 - RNA, 22 nt, Human
caccuccagcccagagaggccu

SEQ ID NO: 326276 - RNA, 21 nt, Human
cagggcccagagcagggagcc

SEQ ID NO: 326277 - RNA, 24 nt, Human
ccagagcagggagccaggugaaga

SEQ ID NO: 326278 - RNA, 20 nt, Human
cccaacccagccuguuggcc

SEQ ID NO: 326279 - RNA, 21 nt, Human
cccacccccaccuccagccca

SEQ ID NO: 326280 - RNA, 21 nt, Human
cccagagaggccucccaaccc

SEQ ID NO: 326281 - RNA, 18 nt, Human
cccccacccccaccucca

SEQ ID NO: 326282 - RNA, 22 nt, Human
cccccacccccaccuccagccc

SEQ ID NO: 326283 - RNA, 22 nt, Human
cccggggccgagacggagaggc

SEQ ID NO: 326284 - RNA, 19 nt, Human
cccuggacggcggagggug

SEQ ID NO: 326285 - RNA, 23 nt, Human
ccggagggcgggcggaagggcgg

SEQ ID NO: 326286 - RNA, 23 nt, Human
ccggggccggggccggggcuggc

SEQ ID NO: 326287 - RNA, 27 nt, Human
ccuccagcccagagaggccucccaacc

SEQ ID NO: 326288 - RNA, 26 nt, Human
ccucccaacccagccuguuggcaggc

SEQ ID NO: 326289 - RNA, 21 nt, Human
ccuggcgcgguggcggcggcg

SEQ ID NO: 326290 - RNA, 21 nt, Human
cgcgguggcggcggcggcggc

SEQ ID NO: 326291 - RNA, 18 nt, Human
gagaaagagagcaaagag

SEQ ID NO: 326292 - RNA, 18 nt, Human
gagaggcccuggacggcg

SEQ ID NO: 326293 - RNA, 21 nt, Human
gagggagaaagagagcaaaga

SEQ ID NO: 326294 - RNA, 22 nt, Human
gagggagaaagagagcaaagag

SEQ ID NO: 326295 - RNA, 19 nt, Human
gcaaagagagagaggagca

SEQ ID NO: 326296 - RNA, 21 nt, Human
gcccccacccccaccuccagc

SEQ ID NO: 326297 - RNA, 20 nt, Human
gccggaaccuggcgcggugg

SEQ ID NO: 326298 - RNA, 25 nt, Human
gcggcggcggcggcgacacggcagc

SEQ ID NO: 326299 - RNA, 20 nt, Human
gcgguggcggcggcggcggc

SEQ ID NO: 326300 - RNA, 20 nt, Human
gcuggggagaaagaagaggg

SEQ ID NO: 326301 - RNA, 19 nt, Human
gcugucugagaagagggga

SEQ ID NO: 326302 - RNA, 24 nt, Human
ggaaaugagaaggcuggggagaaa

SEQ ID NO: 326303 - RNA, 28 nt, Human
ggagaagaaugaggcugguaggggaggg

SEQ ID NO: 326304 - RNA, 23 nt, Human
ggagggagaaagagagcaaagag

SEQ ID NO: 326305 - RNA, 19 nt, Human
ggaggggaggggggcagcu

SEQ ID NO: 326306 - RNA, 19 nt, Human
ggaggggaggggggcagcu

SEQ ID NO: 326307 - RNA, 27 nt, Human
ggaggggaggggggcagcuguggggcu

SEQ ID NO: 326308 - RNA, 24 nt, Human
ggcaaccccggccccaccccggcc

SEQ ID NO: 326309 - RNA, 21 nt, Human
ggccggggccggggcuggcgg

SEQ ID NO: 326310 - RNA, 18 nt, Human
ggcgcgcgggguggggcg

SEQ ID NO: 326311 - RNA, 22 nt, Human
ggcgcgguggcggcggcggcgg

SEQ ID NO: 326312 - RNA, 18 nt, Human
ggcgggcggaagggcggu

SEQ ID NO: 326313 - RNA, 23 nt, Human
ggcggggaggcggggucccgggg

SEQ ID NO: 326314 - RNA, 18 nt, Human
gggaggggaggggggcag

SEQ ID NO: 326315 - RNA, 22 nt, Human
gggaggggaggggggcagcugu

SEQ ID NO: 326316 - RNA, 20 nt, Human
gggaggggggcagcuguggg

SEQ ID NO: 326317 - RNA, 20 nt, Human
gggaggggggcagcuguggg

SEQ ID NO: 326318 - RNA, 19 nt, Human
gggcagcuguggggcucgg

SEQ ID NO: 326319 - RNA, 20 nt, Human
gggccggggccggggcuggc

SEQ ID NO: 326320 - RNA, 25 nt, Human
gggccggggccggggcuggcgggga

SEQ ID NO: 326321 - RNA, 21 nt, Human
ggggaggggggcagcuguggg

SEQ ID NO: 326322 - RNA, 20 nt, Human
guggcggcggcggcggcgac

SEQ ID NO: 326323 - RNA, 18 nt, Human
uacaaaaagggaggggag

SEQ ID NO: 326324 - RNA, 22 nt, Human
ucaggagguggaacaauggcag

SEQ ID NO: 326325 - RNA, 22 nt, Human
ugacgcugggggaugcagaggu

SEQ ID NO: 326326 - RNA, 19 nt, Human
ugagggagauccagggauc

SEQ ID NO: 326327 - RNA, 23 nt, Human
ugagggagauccagggaucaggc

SEQ ID NO: 326328 - RNA, 23 nt, Human
ugaggguggagggcgcagugucu

SEQ ID NO: 326329 - RNA, 22 nt, Human
ugcccccacccccaccuccagc

SEQ ID NO: 326330 - RNA, 24 nt, Human
ugcccccacccccaccuccagccc

SEQ ID NO: 326331 - RNA, 23 nt, Human
uggaacaauggcagagugagggu

SEQ ID NO: 326332 - RNA, 19 nt, Human
uggcggcggcggcggcgac

SEQ ID NO: 326333 - RNA, 23 nt, Human
uggcggcggcggcggcgacacgg

SEQ ID NO: 326334 - RNA, 22 nt, Human
uggcuggacuuggcugccccca

SEQ ID NO: 326335 - RNA, 18 nt, Human
ugggagaggcuaccggag

SEQ ID NO: 326336 - RNA, 20 nt, Human
uggggcaggacaugacgcug

SEQ ID NO: 326337 - RNA, 18 nt, Human
uggggcgggggugggucu

SEQ ID NO: 326338 - RNA, 20 nt, Human
ugguaggggagggagaaaga

SEQ ID NO: 326339 - RNA, 23 nt, Human
uuaggugggagaggcuaccggag

SEQ ID NO: 326340 - RNA, 21 nt, Human
uuauacaaaaagggaggggag

SEQ ID NO: 326341 - RNA, 18 nt, Human
aaaaaaaaaaaaagucaa

SEQ ID NO: 326342 - RNA, 20 nt, Human
aacaagagaaguaguuuaca

SEQ ID NO: 326343 - RNA, 23 nt, Human
aagaaaacaaaugcuucugccaa

SEQ ID NO: 326344 - RNA, 21 nt, Human
auuauaagccccuacugguac

SEQ ID NO: 326345 - RNA, 23 nt, Human
cagaaaacaagauauuuucuuca

SEQ ID NO: 326346 - RNA, 27 nt, Human
cauagucauaacauuuaaauugcugcc

SEQ ID NO: 326347 - RNA, 21 nt, Human
caucaagaaaacaaaugcuuc

SEQ ID NO: 326348 - RNA, 24 nt, Human
cauuuaaaaaacgcuacuacaaaa

SEQ ID NO: 326349 - RNA, 25 nt, Human
ccccucucuccacuuuggauuuucc

SEQ ID NO: 326350 - RNA, 22 nt, Human
ccgccuucuggacggaugacuc

SEQ ID NO: 326351 - RNA, 24 nt, Human
ccgcugaguccagguacccggcuc

SEQ ID NO: 326352 - RNA, 19 nt, Human
ccgcugcugcucuccccgc

SEQ ID NO: 326353 - RNA, 23 nt, Human
cgagggagggagagcgcuuugca

SEQ ID NO: 326354 - RNA, 21 nt, Human
cgcugaguccagguacccggc

SEQ ID NO: 326355 - RNA, 23 nt, Human
cggaugacucacuggucucuuuc

SEQ ID NO: 326356 - RNA, 23 nt, Human
cgggccaggaggacgaaggcugg

SEQ ID NO: 326357 - RNA, 21 nt, Human
cugcucuggggcucucuuggc

SEQ ID NO: 326358 - RNA, 22 nt, Human
cugcugcucuccccgccuucug

SEQ ID NO: 326359 - RNA, 21 nt, Human
cugcuugggccgcugcugcuc

SEQ ID NO: 326360 - RNA, 20 nt, Human
cuuucuuccccucucuccac

SEQ ID NO: 326361 - RNA, 20 nt, Human
gaaaaauaauuucaucaaga

SEQ ID NO: 326362 - RNA, 18 nt, Human
gaacggaagggaaaugga

SEQ ID NO: 326363 - RNA, 22 nt, Human
gagaaugggagggaugagagga

SEQ ID NO: 326364 - RNA, 21 nt, Human
gauuuuuggacuggaaggcgg

SEQ ID NO: 326365 - RNA, 18 nt, Human
gccgcugcugcucucccc

SEQ ID NO: 326366 - RNA, 19 nt, Human
gcucuggggcucucuuggc

SEQ ID NO: 326367 - RNA, 24 nt, Human
ggaaaaaaaucuaggugaaaaaaa

SEQ ID NO: 326368 - RNA, 21 nt, Human
ggaaauggagaaugggaggga

SEQ ID NO: 326369 - RNA, 19 nt, Human
ggacaugcucugcuucccc

SEQ ID NO: 326370 - RNA, 21 nt, Human
ggacgaaggcugggcgaggga

SEQ ID NO: 326371 - RNA, 19 nt, Human
ggagggagagcgcuuugca

SEQ ID NO: 326372 - RNA, 25 nt, Human
gggaaaaaaaucuaggugaaaaaaa

SEQ ID NO: 326373 - RNA, 20 nt, Human
gggaacggaagggaaaugga

SEQ ID NO: 326374 - RNA, 21 nt, Human
uaggugaaaaaaauuaccuaa

SEQ ID NO: 326375 - RNA, 25 nt, Human
uaguauuuuuuuccucagauggaaa

SEQ ID NO: 326376 - RNA, 18 nt, Human
uauuggcagaaaacaaga

SEQ ID NO: 326377 - RNA, 21 nt, Human
ucaaaaaacuuaccucaauug

SEQ ID NO: 326378 - RNA, 20 nt, Human
ucagauggaaaaauaauuuc

SEQ ID NO: 326379 - RNA, 20 nt, Human
ucauuuaucauguacuauaa

SEQ ID NO: 326380 - RNA, 20 nt, Human
uccagguacccggcucgcug

SEQ ID NO: 326381 - RNA, 21 nt, Human
uccugcuugggccgcugcugc

SEQ ID NO: 326382 - RNA, 20 nt, Human
ucucuuucuuccccucucuc

SEQ ID NO: 326383 - RNA, 23 nt, Human
ucuuuaaaaaaaaaaaaagucaa

SEQ ID NO: 326384 - RNA, 21 nt, Human
ucuuuucuuuuuguuuuugcu

SEQ ID NO: 326385 - RNA, 23 nt, Human
ucuuuuuguuuuugcuuauugug

SEQ ID NO: 326386 - RNA, 19 nt, Human
ugaauacaaagccuacggu

SEQ ID NO: 326387 - RNA, 25 nt, Human
ugacucacuggucucuuucuucccc

SEQ ID NO: 326388 - RNA, 22 nt, Human
ugagaggagcgggccaggagga

SEQ ID NO: 326389 - RNA, 18 nt, Human
ugcccaaaaaauguaaaa

SEQ ID NO: 326390 - RNA, 22 nt, Human
ugccuuugacucaauuacgccc

SEQ ID NO: 326391 - RNA, 20 nt, Human
ugcucugcuuccccaccccc

SEQ ID NO: 326392 - RNA, 20 nt, Human
ugcucugcuuccccaccccc

SEQ ID NO: 326393 - RNA, 19 nt, Human
ugcuugggccgcugcugcu

SEQ ID NO: 326394 - RNA, 23 nt, Human
uggagaaugggagggaugagagg

SEQ ID NO: 326395 - RNA, 19 nt, Human
ugggaaaaaaaucuaggug

SEQ ID NO: 326396 - RNA, 19 nt, Human
ugggagggaugagaggagc

SEQ ID NO: 326397 - RNA, 20 nt, Human
ugggagggaugagaggagcg

SEQ ID NO: 326398 - RNA, 22 nt, Human
ugggcgagggagggagagcgcu

SEQ ID NO: 326399 - RNA, 22 nt, Human
uugcugacuacauuuuaaaaaa

SEQ ID NO: 326400 - RNA, 24 nt, Human
uugcugacuacauuuuaaaaaauc

SEQ ID NO: 326401 - RNA, 26 nt, Human
uuuaaaaaaucuauuggcagaaaaca

SEQ ID NO: 326402 - RNA, 21 nt, Human
uuuucuuuucuuuuuguuuuu

SEQ ID NO: 326403 - RNA, 19 nt, Human
aaaaaaaaaaagccaacua

SEQ ID NO: 326404 - RNA, 23 nt, Human
aaaaaaaaagccaacuauuucug

SEQ ID NO: 326405 - RNA, 22 nt, Human
aaaaaagccaacuauuucugag

SEQ ID NO: 326406 - RNA, 22 nt, Human
aaaaagacaggagauuucaaaa

SEQ ID NO: 326407 - RNA, 22 nt, Human
aaaaagacaggagauuucaaaa

SEQ ID NO: 326408 - RNA, 19 nt, Human
aaaaaugcuacuacaccgc

SEQ ID NO: 326409 - RNA, 22 nt, Human
aaaauaaaaacaaaacaaaagg

SEQ ID NO: 326410 - RNA, 23 nt, Human
aaaaugcugugcugagccuggcc

SEQ ID NO: 326411 - RNA, 19 nt, Human
aaacuccagcauaggaaau

SEQ ID NO: 326412 - RNA, 19 nt, Human
aaacuggcuucagcuagca

SEQ ID NO: 326413 - RNA, 23 nt, Human
aacagcgaugacuucgcgcagcc

SEQ ID NO: 326414 - RNA, 20 nt, Human
aacccagccaagaaucugca

SEQ ID NO: 326415 - RNA, 27 nt, Human
aacuacauacaaaacuuaagcagccuu

SEQ ID NO: 326416 - RNA, 22 nt, Human
aacugccuuccacaaaggagcu

SEQ ID NO: 326417 - RNA, 22 nt, Human
aagaaaaaaauugcuuuaagga

SEQ ID NO: 326418 - RNA, 25 nt, Human
aagauaagcaaaguauuuagaaucc

SEQ ID NO: 326419 - RNA, 21 nt, Human
aagcaaaguauuuagaaucca

SEQ ID NO: 326420 - RNA, 19 nt, Human
aagcaacacagucccuuca

SEQ ID NO: 326421 - RNA, 19 nt, Human
aagcauaauggaagagugu

SEQ ID NO: 326422 - RNA, 18 nt, Human
aagcauuucucaagucga

SEQ ID NO: 326423 - RNA, 23 nt, Human
aagcauuucucaagucgaaaaua

SEQ ID NO: 326424 - RNA, 21 nt, Human
acaaaaaaagggaaaaaaaaa

SEQ ID NO: 326425 - RNA, 23 nt, Human
acaauacacacacacacacacac

SEQ ID NO: 326426 - RNA, 31 nt, Human
acacaauacacacacacacacacacacacag

SEQ ID NO: 326427 - RNA, 31 nt, Human
acacacaauacacacacacacacacacacag

SEQ ID NO: 326428 - RNA, 31 nt, Human
acacacacaauacacacacacacacacacag

SEQ ID NO: 326429 - RNA, 28 nt, Human
acacacacacacacacaauacacacaca

SEQ ID NO: 326430 - RNA, 23 nt, Human
acacacacacacacacacacaca

SEQ ID NO: 326431 - RNA, 23 nt, Human
acacacacacacacacacacaca

SEQ ID NO: 326432 - RNA, 23 nt, Human
acacacacacacacacacacaca

SEQ ID NO: 326433 - RNA, 23 nt, Human
acacacacacacacacacacaca

SEQ ID NO: 326434 - RNA, 23 nt, Human
acacacacacacacacccccucc

SEQ ID NO: 326435 - RNA, 21 nt, Human
acacacacacccccucccccc

SEQ ID NO: 326436 - RNA, 18 nt, Human
acacccccuccccccaaa

SEQ ID NO: 326437 - RNA, 18 nt, Human
acacccggcccggcccgg

SEQ ID NO: 326438 - RNA, 18 nt, Human
acacuaaacccagccaag

SEQ ID NO: 326439 - RNA, 31 nt, Human
acacugcgcgugcacacacacacacacacag

SEQ ID NO: 326440 - RNA, 20 nt, Human
acaucuuuauugauggccug

SEQ ID NO: 326441 - RNA, 20 nt, Human
acauuaaaaagaccacuaaa

SEQ ID NO: 326442 - RNA, 21 nt, Human
accaacccucccccacaaaaa

SEQ ID NO: 326443 - RNA, 20 nt, Human
acuccaaaacuaggagcaaa

SEQ ID NO: 326444 - RNA, 21 nt, Human
acugauggacacugcgcgugc

SEQ ID NO: 326445 - RNA, 22 nt, Human
agagccccugauggugccccuc

SEQ ID NO: 326446 - RNA, 20 nt, Human
aggagaggaaggaaaaaaga

SEQ ID NO: 326447 - RNA, 20 nt, Human
aggcaguucacauagccggg

SEQ ID NO: 326448 - RNA, 18 nt, Human
auauaccaccaacccucc

SEQ ID NO: 326449 - RNA, 22 nt, Human
aucauuaggagagugguugagg

SEQ ID NO: 326450 - RNA, 22 nt, Human
aucauuaggagagugguugagg

SEQ ID NO: 326451 - RNA, 23 nt, Human
augcagccugaucauaacugccu

SEQ ID NO: 326452 - RNA, 20 nt, Human
auggacacugcgcgugcaca

SEQ ID NO: 326453 - RNA, 24 nt, Human
auuaaaaaaaaaaaaaagccaacu

SEQ ID NO: 326454 - RNA, 26 nt, Human
auuaaaaaaaaaaaaaagccaacuau

SEQ ID NO: 326455 - RNA, 20 nt, Human
caaaacaaaaggcucuuggc

SEQ ID NO: 326456 - RNA, 20 nt, Human
caaacuccaaaacuaggagc

SEQ ID NO: 326457 - RNA, 20 nt, Human
caaacuccaaaacuaggagc

SEQ ID NO: 326458 - RNA, 23 nt, Human
caacccucccccacaaaaaaagg

SEQ ID NO: 326459 - RNA, 21 nt, Human
caagaaucugcaaaaaugcua

SEQ ID NO: 326460 - RNA, 25 nt, Human
caaguccuaaaauaaaaauuuuaag

SEQ ID NO: 326461 - RNA, 18 nt, Human
caagucgaaaauauguga

SEQ ID NO: 326462 - RNA, 19 nt, Human
caauccuggcagaaauuca

SEQ ID NO: 326463 - RNA, 19 nt, Human
caauccuggcagaaauuca

SEQ ID NO: 326464 - RNA, 27 nt, Human
cacaaaaaaagggaaaaaaaaaauccc

SEQ ID NO: 326465 - RNA, 23 nt, Human
cacacacacaauacacacacaca

SEQ ID NO: 326466 - RNA, 18 nt, Human
cacacacacacacacaca

SEQ ID NO: 326467 - RNA, 20 nt, Human
cacacacacacacacacaca

SEQ ID NO: 326468 - RNA, 20 nt, Human
cacacacacacacacacaca

SEQ ID NO: 326469 - RNA, 20 nt, Human
cacacacacacacacacaca

SEQ ID NO: 326470 - RNA, 20 nt, Human
cacacacacacacacacaca

SEQ ID NO: 326471 - RNA, 20 nt, Human
cacacacacacacacacaca

SEQ ID NO: 326472 - RNA, 26 nt, Human
cacacacacacacacacacacacaca

SEQ ID NO: 326473 - RNA, 26 nt, Human
cacacacacacacacacacacacaca

SEQ ID NO: 326474 - RNA, 30 nt, Human
cacacacacacacacacacacacacacccu

SEQ ID NO: 326475 - RNA, 24 nt, Human
cacacacacacacacacacacacc

SEQ ID NO: 326476 - RNA, 21 nt, Human
cacacacccccuccccccaaa

SEQ ID NO: 326477 - RNA, 26 nt, Human
cacacacccccuccccccaaacaaca

SEQ ID NO: 326478 - RNA, 21 nt, Human
cacacccccuccccccaaaca

SEQ ID NO: 326479 - RNA, 25 nt, Human
cacacccccuccccccaaacaacaa

SEQ ID NO: 326480 - RNA, 22 nt, Human
caccaacccucccccacaaaaa

SEQ ID NO: 326481 - RNA, 22 nt, Human
cacccccuccccccaaacaaca

SEQ ID NO: 326482 - RNA, 22 nt, Human
cagaaaacauuaaaaagaccac

SEQ ID NO: 326483 - RNA, 23 nt, Human
cagcagaaaacauuaaaaagaag

SEQ ID NO: 326484 - RNA, 20 nt, Human
caggcaggcacugauacuga

SEQ ID NO: 326485 - RNA, 22 nt, Human
caucaguaaagacuaaaaacca

SEQ ID NO: 326486 - RNA, 21 nt, Human
ccaacccucccccacaaaaaa

SEQ ID NO: 326487 - RNA, 26 nt, Human
cccagccucggcgcgcgacacccggc

SEQ ID NO: 326488 - RNA, 23 nt, Human
cccccaaacaacaaaauucagag

SEQ ID NO: 326489 - RNA, 21 nt, Human
cccccacaaaaaaagggaaaa

SEQ ID NO: 326490 - RNA, 21 nt, Human
cccccacaaaaaaagggaaaa

SEQ ID NO: 326491 - RNA, 22 nt, Human
cccccuccccccaaacaacaaa

SEQ ID NO: 326492 - RNA, 21 nt, Human
cccggcccggcggcggcggcg

SEQ ID NO: 326493 - RNA, 22 nt, Human
ccgccacccccaccgcucucga

SEQ ID NO: 326494 - RNA, 18 nt, Human
ccgccgcugcccuguggc

SEQ ID NO: 326495 - RNA, 21 nt, Human
ccgccgcugccgcuccagccg

SEQ ID NO: 326496 - RNA, 25 nt, Human
ccgccgcugccgcuccagccgcucc

SEQ ID NO: 326497 - RNA, 20 nt, Human
ccgccgcugccuccgcugcc

SEQ ID NO: 326498 - RNA, 23 nt, Human
ccgccgcugccuccgcugccgcc

SEQ ID NO: 326499 - RNA, 25 nt, Human
ccgccgcugccuccgcugccgccgg

SEQ ID NO: 326500 - RNA, 27 nt, Human
ccgccgcugcgucuccugcugccgccg

SEQ ID NO: 326501 - RNA, 21 nt, Human
ccgcugccgcuccagccgcuc

SEQ ID NO: 326502 - RNA, 24 nt, Human
ccgcugccuccgcugccgccgcug

SEQ ID NO: 326503 - RNA, 22 nt, Human
ccgcugcgucuccugcugccgc

SEQ ID NO: 326504 - RNA, 19 nt, Human
ccggcccggcggcggcggc

SEQ ID NO: 326505 - RNA, 27 nt, Human
ccggcccggcggcggcggcggcggcga

SEQ ID NO: 326506 - RNA, 21 nt, Human
ccgucuugcugcugcugcugc

SEQ ID NO: 326507 - RNA, 23 nt, Human
ccuccccccaaacaacaaaauuc

SEQ ID NO: 326508 - RNA, 19 nt, Human
ccucgcgccgugcccggcc

SEQ ID NO: 326509 - RNA, 25 nt, Human
ccucuaaauggcacaaucaagucag

SEQ ID NO: 326510 - RNA, 25 nt, Human
ccucuaaauggcacaaucaagucag

SEQ ID NO: 326511 - RNA, 22 nt, Human
ccugcugccgccgcugccuccg

SEQ ID NO: 326512 - RNA, 22 nt, Human
cgaggaggcgccucucuccuca

SEQ ID NO: 326513 - RNA, 19 nt, Human
cgccgcugccuccgcugcc

SEQ ID NO: 326514 - RNA, 23 nt, Human
cgccgugcccggccgccgcugcc

SEQ ID NO: 326515 - RNA, 24 nt, Human
cgccgugcccggccgccgcugccg

SEQ ID NO: 326516 - RNA, 29 nt, Human
cgcgccgugcccggccgccgcugccgcuc

SEQ ID NO: 326517 - RNA, 27 nt, Human
cgcgugcacacacacacacacacaaua

SEQ ID NO: 326518 - RNA, 19 nt, Human
cggcccggcccggcggcgg

SEQ ID NO: 326519 - RNA, 22 nt, Human
cggcccggcggcggcggcggcg

SEQ ID NO: 326520 - RNA, 21 nt, Human
cggccgccgcugcgucuccug

SEQ ID NO: 326521 - RNA, 19 nt, Human
cggcgacgacuccccccca

SEQ ID NO: 326522 - RNA, 18 nt, Human
cggcggcggcggcggcgg

SEQ ID NO: 326523 - RNA, 19 nt, Human
cggcggcggcggcggcggc

SEQ ID NO: 326524 - RNA, 18 nt, Human
cggcgguagcgguggcgg

SEQ ID NO: 326525 - RNA, 19 nt, Human
cgguggcggcggcggcgac

SEQ ID NO: 326526 - RNA, 19 nt, Human
cuaaacccagccaagaauc

SEQ ID NO: 326527 - RNA, 23 nt, Human
cuaauguucugcugguuuuccuu

SEQ ID NO: 326528 - RNA, 22 nt, Human
cucagaaucgccauaaaugugc

SEQ ID NO: 326529 - RNA, 26 nt, Human
cuccaaaaaauccaacuacauacaaa

SEQ ID NO: 326530 - RNA, 23 nt, Human
cuccgcugccgccgcugcccugu

SEQ ID NO: 326531 - RNA, 18 nt, Human
cuccucagucaccucggc

SEQ ID NO: 326532 - RNA, 25 nt, Human
cucggcggcggcggcggcggcggua

SEQ ID NO: 326533 - RNA, 20 nt, Human
cucuuucucuuuucuuaaac

SEQ ID NO: 326534 - RNA, 21 nt, Human
cugcacagcaaauuccagcag

SEQ ID NO: 326535 - RNA, 19 nt, Human
cugccgccgcugccuccgc

SEQ ID NO: 326536 - RNA, 24 nt, Human
cugccuccgcugccgccgcugccc

SEQ ID NO: 326537 - RNA, 24 nt, Human
cugccuccgcugccgccgcugccc

SEQ ID NO: 326538 - RNA, 18 nt, Human
cugcuguuuuuuuggugu

SEQ ID NO: 326539 - RNA, 26 nt, Human
cuucaagauaagcaaaguauuuagaa

SEQ ID NO: 326540 - RNA, 22 nt, Human
gaaaaacagcuuuucuagauca

SEQ ID NO: 326541 - RNA, 20 nt, Human
gaaaacauuaaaaagaccac

SEQ ID NO: 326542 - RNA, 23 nt, Human
gaacacccuuucaucaguaaaga

SEQ ID NO: 326543 - RNA, 24 nt, Human
gaucgggggaaaagggagauguag

SEQ ID NO: 326544 - RNA, 22 nt, Human
gcagaaaaacagcuuuucuaga

SEQ ID NO: 326545 - RNA, 23 nt, Human
gccauuucuccacuaauuuauca

SEQ ID NO: 326546 - RNA, 20 nt, Human
gccgcugccgcuccagccgc

SEQ ID NO: 326547 - RNA, 22 nt, Human
gccuccgcugccgccgcugccc

SEQ ID NO: 326548 - RNA, 23 nt, Human
gccuccgcugccgccgcugcccu

SEQ ID NO: 326549 - RNA, 24 nt, Human
gcggcggcggcggcggcgguagcg

SEQ ID NO: 326550 - RNA, 26 nt, Human
gcgugcacacacacacacacacaaua

SEQ ID NO: 326551 - RNA, 22 nt, Human
gcuacuacaccgcuucacaagc

SEQ ID NO: 326552 - RNA, 19 nt, Human
gcugccagacugcacgcac

SEQ ID NO: 326553 - RNA, 23 nt, Human
ggaaaaauauaccaccaacccuc

SEQ ID NO: 326554 - RNA, 25 nt, Human
ggagaggaaggaaaaaagaggggaa

SEQ ID NO: 326555 - RNA, 19 nt, Human
ggagauguaggagaggaag

SEQ ID NO: 326556 - RNA, 18 nt, Human
ggcccggcccggcggcgg

SEQ ID NO: 326557 - RNA, 22 nt, Human
ggcccggcggcggcggcggcgg

SEQ ID NO: 326558 - RNA, 20 nt, Human
ggcggcggcggcggcggcgg

SEQ ID NO: 326559 - RNA, 22 nt, Human
ggcggcggcggcggcggcggua

SEQ ID NO: 326560 - RNA, 23 nt, Human
ggcgguagcgguggcggcggcgg

SEQ ID NO: 326561 - RNA, 19 nt, Human
gggaaagugaaaaaaaaaa

SEQ ID NO: 326562 - RNA, 20 nt, Human
gggagauguaggagaggaag

SEQ ID NO: 326563 - RNA, 26 nt, Human
guaggagaggaaggaaaaaagagggg

SEQ ID NO: 326564 - RNA, 19 nt, Human
guaggucacuuuccacuug

SEQ ID NO: 326565 - RNA, 19 nt, Human
guccggcgguggcgggagc

SEQ ID NO: 326566 - RNA, 23 nt, Human
guccgucuugcugcugcugcugc

SEQ ID NO: 326567 - RNA, 21 nt, Human
gucuccugcugccgccgcugc

SEQ ID NO: 326568 - RNA, 20 nt, Human
gugauggggaaagugaaaaa

SEQ ID NO: 326569 - RNA, 26 nt, Human
gugcacacacacacacacacaauaca

SEQ ID NO: 326570 - RNA, 18 nt, Human
guggcggcggcggcgacg

SEQ ID NO: 326571 - RNA, 24 nt, Human
guggcgucaccucgcgccgugccc

SEQ ID NO: 326572 - RNA, 21 nt, Human
guguaggucacuuuccacuug

SEQ ID NO: 326573 - RNA, 24 nt, Human
gugugauggggaaagugaaaaaaa

SEQ ID NO: 326574 - RNA, 24 nt, Human
uaaaaacaaaacaaaaggcucuug

SEQ ID NO: 326575 - RNA, 20 nt, Human
uaaaaggagggcuaauguuu

SEQ ID NO: 326576 - RNA, 23 nt, Human
uaaaaggagggcuaauguuucau

SEQ ID NO: 326577 - RNA, 21 nt, Human
uaaaauaaaaggagggcuaau

SEQ ID NO: 326578 - RNA, 21 nt, Human
uaaaugugcaacguauauucc

SEQ ID NO: 326579 - RNA, 24 nt, Human
uaagcaaaguauuuagaauccacu

SEQ ID NO: 326580 - RNA, 24 nt, Human
uaaggaaaaaaaauccaguuuuaa

SEQ ID NO: 326581 - RNA, 22 nt, Human
uacaaaacuuaagcagccuuua

SEQ ID NO: 326582 - RNA, 25 nt, Human
uacacacacacacacacacacacac

SEQ ID NO: 326583 - RNA, 26 nt, Human
uacagcaacaagggcuucuauuccau

SEQ ID NO: 326584 - RNA, 23 nt, Human
uaccaccaacccucccccacaaa

SEQ ID NO: 326585 - RNA, 22 nt, Human
uacuacaccgcuucacaagcaa

SEQ ID NO: 326586 - RNA, 18 nt, Human
uagcgguggcggcggcgg

SEQ ID NO: 326587 - RNA, 25 nt, Human
uagcugacgcuaacaaaaugggagg

SEQ ID NO: 326588 - RNA, 19 nt, Human
uagugcaagagccccugau

SEQ ID NO: 326589 - RNA, 23 nt, Human
uauaccaccaacccucccccaca

SEQ ID NO: 326590 - RNA, 20 nt, Human
uaucaaaauaaaaacaaaac

SEQ ID NO: 326591 - RNA, 27 nt, Human
uaucaaaauaaaaacaaaacaaaaggc

SEQ ID NO: 326592 - RNA, 22 nt, Human
uaugaagcuucucucuucaaga

SEQ ID NO: 326593 - RNA, 22 nt, Human
uauuaucaaucaguguuuucuc

SEQ ID NO: 326594 - RNA, 20 nt, Human
uauucagagcccuagaagca

SEQ ID NO: 326595 - RNA, 26 nt, Human
ucaaaacccaguggaaucaacaccau

SEQ ID NO: 326596 - RNA, 20 nt, Human
ucacauagccggucaacaug

SEQ ID NO: 326597 - RNA, 20 nt, Human
ucaccucggcggcggcggcg

SEQ ID NO: 326598 - RNA, 23 nt, Human
ucaguacacuaaacccagccaag

SEQ ID NO: 326599 - RNA, 25 nt, Human
uccaaaaaauccaacuacauacaaa

SEQ ID NO: 326600 - RNA, 23 nt, Human
uccaaauucaauuugggccucaa

SEQ ID NO: 326601 - RNA, 24 nt, Human
uccacuuguuuacuugaugcuuaa

SEQ ID NO: 326602 - RNA, 18 nt, Human
uccagauucacauuucca

SEQ ID NO: 326603 - RNA, 18 nt, Human
uccagauucacauuucca

SEQ ID NO: 326604 - RNA, 19 nt, Human
uccgcugccgccgcugccc

SEQ ID NO: 326605 - RNA, 22 nt, Human
uccgcugccgccgcugcccugu

SEQ ID NO: 326606 - RNA, 18 nt, Human
uccucagucaccucggcg

SEQ ID NO: 326607 - RNA, 24 nt, Human
uccugcugccgccgcugccuccgc

SEQ ID NO: 326608 - RNA, 23 nt, Human
ucuccugcugccgccgcugccuc

SEQ ID NO: 326609 - RNA, 23 nt, Human
ucugcacagcaaauuccagcagg

SEQ ID NO: 326610 - RNA, 19 nt, Human
ucugggauaaccacuuagc

SEQ ID NO: 326611 - RNA, 21 nt, Human
ucugggauaaccacuuagcuu

SEQ ID NO: 326612 - RNA, 23 nt, Human
ucuuaaacauuuuauucauuuua

SEQ ID NO: 326613 - RNA, 23 nt, Human
ucuuaaacauuuuauucauuuua

SEQ ID NO: 326614 - RNA, 21 nt, Human
ucuugcugcugcugcugcggc

SEQ ID NO: 326615 - RNA, 23 nt, Human
ucuugcugcugcugcugcggccg

SEQ ID NO: 326616 - RNA, 23 nt, Human
ugaaauguuucacagcagaaaac

SEQ ID NO: 326617 - RNA, 22 nt, Human
ugaagaaacuaacaugaacacc

SEQ ID NO: 326618 - RNA, 18 nt, Human
ugacacagguaauauucc

SEQ ID NO: 326619 - RNA, 18 nt, Human
ugacacagguaauauucc

SEQ ID NO: 326620 - RNA, 18 nt, Human
ugagaagagacuccucuu

SEQ ID NO: 326621 - RNA, 24 nt, Human
ugagacaaggucccggucuguucc

SEQ ID NO: 326622 - RNA, 19 nt, Human
ugagguaucaucaguguga

SEQ ID NO: 326623 - RNA, 21 nt, Human
ugaguacguaauauuuagagg

SEQ ID NO: 326624 - RNA, 18 nt, Human
ugaucauaacugccuucc

SEQ ID NO: 326625 - RNA, 26 nt, Human
ugcaauuaaaaaaaaaaaaaagccaa

SEQ ID NO: 326626 - RNA, 27 nt, Human
ugcaauuaaaaaaaaaaaaaagccaac

SEQ ID NO: 326627 - RNA, 20 nt, Human
ugcacacacacacacacaca

SEQ ID NO: 326628 - RNA, 20 nt, Human
ugcacgcacaucuacagcaa

SEQ ID NO: 326629 - RNA, 20 nt, Human
ugcccuguggcgucaccucg

SEQ ID NO: 326630 - RNA, 21 nt, Human
ugccuccgcugccgccgcugc

SEQ ID NO: 326631 - RNA, 21 nt, Human
ugcuccccaaacagaugguuu

SEQ ID NO: 326632 - RNA, 20 nt, Human
ugcugcugcugcugcggccg

SEQ ID NO: 326633 - RNA, 25 nt, Human
ugcuuuauacauccuucuccucaau

SEQ ID NO: 326634 - RNA, 24 nt, Human
uggaaauauucggacuccaaaaaa

SEQ ID NO: 326635 - RNA, 20 nt, Human
uggcacaaucaagucagccu

SEQ ID NO: 326636 - RNA, 20 nt, Human
uggcacaaucaagucagccu

SEQ ID NO: 326637 - RNA, 21 nt, Human
uggccuggaguccucccuuuu

SEQ ID NO: 326638 - RNA, 18 nt, Human
uggcgagcuggggacugg

SEQ ID NO: 326639 - RNA, 25 nt, Human
ugggaggcuuauggcucugcacagc

SEQ ID NO: 326640 - RNA, 21 nt, Human
ugggauaaccacuuagcuuca

SEQ ID NO: 326641 - RNA, 22 nt, Human
uggggaaagugaaaaaaaaaaa

SEQ ID NO: 326642 - RNA, 26 nt, Human
uggggaaagugaaaaaaaaaaaucaa

SEQ ID NO: 326643 - RNA, 22 nt, Human
ugugcugagccuggcagaaguc

SEQ ID NO: 326644 - RNA, 19 nt, Human
uguucugcugguuuuccuu

SEQ ID NO: 326645 - RNA, 19 nt, Human
uguucugcugguuuuccuu

SEQ ID NO: 326646 - RNA, 21 nt, Human
uguuguuuuuuguuuuuuuuu

SEQ ID NO: 326647 - RNA, 23 nt, Human
uuaaucucaaaaaaccuaguaau

SEQ ID NO: 326648 - RNA, 24 nt, Human
uuaaucucaaaaaaccuaguaaua

SEQ ID NO: 326649 - RNA, 24 nt, Human
uuacagcccggccgaucgcgccgc

SEQ ID NO: 326650 - RNA, 25 nt, Human
uuacuacauuuaggcacuagugaga

SEQ ID NO: 326651 - RNA, 21 nt, Human
uuagaagacaaguuucuggga

SEQ ID NO: 326652 - RNA, 22 nt, Human
uuaguuaaaaaucaaaacucca

SEQ ID NO: 326653 - RNA, 19 nt, Human
uuauuguucuuuaaaaggg

SEQ ID NO: 326654 - RNA, 23 nt, Human
uucacagcagaaaacauuaaaaa

SEQ ID NO: 326655 - RNA, 27 nt, Human
uucucuuucucuuuucuuaaacauuuu

SEQ ID NO: 326656 - RNA, 25 nt, Human
uugcacgaugucucucuucuacccu

SEQ ID NO: 326657 - RNA, 22 nt, Human
uuuacauuuccuucuacugaac

SEQ ID NO: 326658 - RNA, 18 nt, Human
uuuugaagaaacuaacau

SEQ ID NO: 326659 - RNA, 29 nt, Human
uuuuugguguuguuuuuuguuuuuuuuuu

SEQ ID NO: 326660 - RNA, 24 nt, Human
uuuuuuguuugcuuuuguuccaau

SEQ ID NO: 326661 - RNA, 27 nt, Human
uuuuuuuuuuuuuuuuuuuuuuugggg

SEQ ID NO: 326662 - RNA, 19 nt, Human
aaacaacaagcccagcuca

SEQ ID NO: 326663 - RNA, 21 nt, Human
aacaagcccagcucagaaugc

SEQ ID NO: 326664 - RNA, 22 nt, Human
aaccacagccauguaaugauca

SEQ ID NO: 326665 - RNA, 25 nt, Human
aacugcacccuauugcugagcgaca

SEQ ID NO: 326666 - RNA, 28 nt, Human
aagcacauauuuuucaucaggacacaag

SEQ ID NO: 326667 - RNA, 18 nt, Human
aagguggggggcgggggg

SEQ ID NO: 326668 - RNA, 22 nt, Human
aauccccgaccccugcagcuac

SEQ ID NO: 326669 - RNA, 19 nt, Human
acacacccaaacuacuaca

SEQ ID NO: 326670 - RNA, 23 nt, Human
acacacccaaacuacuacauaca

SEQ ID NO: 326671 - RNA, 22 nt, Human
acccugcuguaccaggacaggc

SEQ ID NO: 326672 - RNA, 23 nt, Human
accgccgcccuagccgcugcugc

SEQ ID NO: 326673 - RNA, 19 nt, Human
agcaagacccugcuguacc

SEQ ID NO: 326674 - RNA, 21 nt, Human
agcagagcagcucgcuaccuc

SEQ ID NO: 326675 - RNA, 20 nt, Human
aggacaggcugggccucacc

SEQ ID NO: 326676 - RNA, 20 nt, Human
aggagggagcccuggguggg

SEQ ID NO: 326677 - RNA, 20 nt, Human
aggagggagcccuggguggg

SEQ ID NO: 326678 - RNA, 27 nt, Human
aggcaaaaugugaaaaugcuggcaaga

SEQ ID NO: 326679 - RNA, 23 nt, Human
aggcugacaucaaaaaauuuuaa

SEQ ID NO: 326680 - RNA, 18 nt, Human
aggucaugcacaggcagg

SEQ ID NO: 326681 - RNA, 21 nt, Human
auucaaggggggggcuguugg

SEQ ID NO: 326682 - RNA, 21 nt, Human
caagaaaaugcuagugcacua

SEQ ID NO: 326683 - RNA, 18 nt, Human
caaggggggggcuguugg

SEQ ID NO: 326684 - RNA, 18 nt, Human
cacacgggggagcaguga

SEQ ID NO: 326685 - RNA, 20 nt, Human
caccauagcucugcagggug

SEQ ID NO: 326686 - RNA, 24 nt, Human
caccuaagccuuauccacaccuca

SEQ ID NO: 326687 - RNA, 24 nt, Human
cacguuacccacaauaucacuaaa

SEQ ID NO: 326688 - RNA, 22 nt, Human
cacucuccucaaaaaauggcuu

SEQ ID NO: 326689 - RNA, 19 nt, Human
cagaaccaacguccguccg

SEQ ID NO: 326690 - RNA, 23 nt, Human
cagaaugcuuacagccuggcacc

SEQ ID NO: 326691 - RNA, 21 nt, Human
cagagcagcucgcuaccucuc

SEQ ID NO: 326692 - RNA, 19 nt, Human
cagcugcucuccaaggaua

SEQ ID NO: 326693 - RNA, 26 nt, Human
caggugccucucuuccaaaucacggu

SEQ ID NO: 326694 - RNA, 22 nt, Human
ccaaagguggggggcggggggu

SEQ ID NO: 326695 - RNA, 19 nt, Human
cccuggguggggcgagccc

SEQ ID NO: 326696 - RNA, 19 nt, Human
ccgccgcccuagccgcugc

SEQ ID NO: 326697 - RNA, 19 nt, Human
ccgccgcccuagccgcugc

SEQ ID NO: 326698 - RNA, 23 nt, Human
ccgccgcccuagccgcugcugcu

SEQ ID NO: 326699 - RNA, 21 nt, Human
ccgcugcaauccccgaccccu

SEQ ID NO: 326700 - RNA, 18 nt, Human
ccucaccauagcucugca

SEQ ID NO: 326701 - RNA, 22 nt, Human
cgagccccaagacggguguagg

SEQ ID NO: 326702 - RNA, 20 nt, Human
cgcgcucuuagccccgaggc

SEQ ID NO: 326703 - RNA, 21 nt, Human
cggcaaggugaaccgggacag

SEQ ID NO: 326704 - RNA, 22 nt, Human
cggcagccggaacuacgcauca

SEQ ID NO: 326705 - RNA, 23 nt, Human
cgggacaaaguaaucucacauca

SEQ ID NO: 326706 - RNA, 22 nt, Human
cucacguuacccacaauaucac

SEQ ID NO: 326707 - RNA, 21 nt, Human
cugcgccuccuucucggccca

SEQ ID NO: 326708 - RNA, 21 nt, Human
cuguaccaggacaggcugggc

SEQ ID NO: 326709 - RNA, 23 nt, Human
gagaguagcucgggagcuacagc

SEQ ID NO: 326710 - RNA, 18 nt, Human
gaguggaggagggucagg

SEQ ID NO: 326711 - RNA, 19 nt, Human
gcccuggguggggcgagcc

SEQ ID NO: 326712 - RNA, 19 nt, Human
gcgccuccuucucggccca

SEQ ID NO: 326713 - RNA, 23 nt, Human
ggaaaacugcacccuauugcuga

SEQ ID NO: 326714 - RNA, 23 nt, Human
ggcaaaaaguaaaaggaugaggg

SEQ ID NO: 326715 - RNA, 22 nt, Human
ggcuguuggcgugccgcccgcc

SEQ ID NO: 326716 - RNA, 18 nt, Human
gggccagggcggcugcug

SEQ ID NO: 326717 - RNA, 23 nt, Human
ggguguaggccccuucccucugc

SEQ ID NO: 326718 - RNA, 23 nt, Human
gguggagguggaguggaggaggg

SEQ ID NO: 326719 - RNA, 19 nt, Human
gguggggcagacgcgccuc

SEQ ID NO: 326720 - RNA, 22 nt, Human
gguguaggccccuucccucugc

SEQ ID NO: 326721 - RNA, 23 nt, Human
guaccaggacaggcugggccuca

SEQ ID NO: 326722 - RNA, 21 nt, Human
gugccgcccgccugggaugcu

SEQ ID NO: 326723 - RNA, 19 nt, Human
guggauuugguacucaaag

SEQ ID NO: 326724 - RNA, 23 nt, Human
uaacauaauguguaacaaggugg

SEQ ID NO: 326725 - RNA, 19 nt, Human
uaagccuuauccacaccuc

SEQ ID NO: 326726 - RNA, 21 nt, Human
uaagcgggacaaaguaaucuc

SEQ ID NO: 326727 - RNA, 22 nt, Human
uacaggacuuaaaaacaacaag

SEQ ID NO: 326728 - RNA, 21 nt, Human
uaccaggacaggcugggccuc

SEQ ID NO: 326729 - RNA, 31 nt, Human
uauacacacccaaacuacuacauacauauag

SEQ ID NO: 326730 - RNA, 21 nt, Human
ucaggacacaagaagaccuua

SEQ ID NO: 326731 - RNA, 23 nt, Human
ucucacguuacccacaauaucac

SEQ ID NO: 326732 - RNA, 21 nt, Human
ucucucggcaaggugaaccgg

SEQ ID NO: 326733 - RNA, 25 nt, Human
ucuucaguucccuuugcaggaagag

SEQ ID NO: 326734 - RNA, 22 nt, Human
ugaaccgggacagagacggcgg

SEQ ID NO: 326735 - RNA, 20 nt, Human
ugagaacuagaucuagcaga

SEQ ID NO: 326736 - RNA, 23 nt, Human
ugaggguggggcagacgcgccuc

SEQ ID NO: 326737 - RNA, 21 nt, Human
ugcacuauggaugccuuuggg

SEQ ID NO: 326738 - RNA, 20 nt, Human
ugcuuacaaccguccuccuu

SEQ ID NO: 326739 - RNA, 18 nt, Human
uggagaguugcucccugc

SEQ ID NO: 326740 - RNA, 23 nt, Human
uggcaagagaguagcucgggagg

SEQ ID NO: 326741 - RNA, 19 nt, Human
uggcaccuaagccuuaucc

SEQ ID NO: 326742 - RNA, 18 nt, Human
uggggcgagccccaagac

SEQ ID NO: 326743 - RNA, 18 nt, Human
uguuaaaaagccacuuaa

SEQ ID NO: 326744 - RNA, 19 nt, Human
uguuuaaauaaauauggag

SEQ ID NO: 326745 - RNA, 22 nt, Human
uucaagcacauauuuuucauca

SEQ ID NO: 326746 - RNA, 19 nt, Human
uugacuuggaauggcggag

SEQ ID NO: 326747 - RNA, 19 nt, Human
uugguucaagaaaaugcua

SEQ ID NO: 326748 - RNA, 24 nt, Human
uuuaauacauuauugguucaagaa

SEQ ID NO: 326749 - RNA, 23 nt, Human
uuugaaaugcuacuauauauaca

SEQ ID NO: 326750 - RNA, 22 nt, Human
aauaaaaaagccuauuacuaga

SEQ ID NO: 326751 - RNA, 21 nt, Human
acagaccccccuccaggccug

SEQ ID NO: 326752 - RNA, 22 nt, Human
aggaaaaaaaaaauuaaacugg

SEQ ID NO: 326753 - RNA, 22 nt, Human
agguaaaagcaagcccugggcg

SEQ ID NO: 326754 - RNA, 22 nt, Human
auuacuagaauuugaaucccca

SEQ ID NO: 326755 - RNA, 23 nt, Human
auuacuagaauuugaauccccau

SEQ ID NO: 326756 - RNA, 20 nt, Human
caaagcauccuugcuuccuu

SEQ ID NO: 326757 - RNA, 24 nt, Human
cacagaccccccuccaggccuggg

SEQ ID NO: 326758 - RNA, 19 nt, Human
cagaccccccuccaggccu

SEQ ID NO: 326759 - RNA, 19 nt, Human
cagccggccgcgcacagac

SEQ ID NO: 326760 - RNA, 22 nt, Human
cauccuugcuuccuccuggaaa

SEQ ID NO: 326761 - RNA, 22 nt, Human
ccaaaaauagaagccaucaaaa

SEQ ID NO: 326762 - RNA, 22 nt, Human
ccaacaaugaggaaaaaaaaaa

SEQ ID NO: 326763 - RNA, 25 nt, Human
ccaauggcagugcuguagggucuuu

SEQ ID NO: 326764 - RNA, 25 nt, Human
ccacgcacaguguccaaagcauccu

SEQ ID NO: 326765 - RNA, 21 nt, Human
ccccaacaaugaggaaaaaaa

SEQ ID NO: 326766 - RNA, 18 nt, Human
ccccccuccaggccuggg

SEQ ID NO: 326767 - RNA, 20 nt, Human
cccccgugaugucaccgcuc

SEQ ID NO: 326768 - RNA, 22 nt, Human
cccgccgccacuuccugcuucc

SEQ ID NO: 326769 - RNA, 19 nt, Human
cccggcucgcuccuccucc

SEQ ID NO: 326770 - RNA, 20 nt, Human
cccggcucgcuccuccuccc

SEQ ID NO: 326771 - RNA, 20 nt, Human
cccggcucgcuccuccuccu

SEQ ID NO: 326772 - RNA, 22 nt, Human
cccuccggcuccgcgacggacc

SEQ ID NO: 326773 - RNA, 26 nt, Human
ccgcgcacagaccccccuccaggccu

SEQ ID NO: 326774 - RNA, 23 nt, Human
ccgcucgcgacgcccgccgccac

SEQ ID NO: 326775 - RNA, 20 nt, Human
ccgcucgggaccggacgcgg

SEQ ID NO: 326776 - RNA, 21 nt, Human
ccgcucgggaccggacgcggg

SEQ ID NO: 326777 - RNA, 27 nt, Human
ccgggaauggcagcgcgggggcuccuu

SEQ ID NO: 326778 - RNA, 18 nt, Human
ccuccgcccccgcccuuc

SEQ ID NO: 326779 - RNA, 20 nt, Human
ccuccgcccccgcccuucgc

SEQ ID NO: 326780 - RNA, 25 nt, Human
cgcgcacagaccccccuccaggccu

SEQ ID NO: 326781 - RNA, 22 nt, Human
cuaggaguggguagguaaaagc

SEQ ID NO: 326782 - RNA, 24 nt, Human
cuccgcgacggacccgcuccuugc

SEQ ID NO: 326783 - RNA, 23 nt, Human
cuuaauucucauuuggccaaaaa

SEQ ID NO: 326784 - RNA, 20 nt, Human
gaaaaaaaaaauuaaacugg

SEQ ID NO: 326785 - RNA, 23 nt, Human
gccaaaaauagaagccaucaaaa

SEQ ID NO: 326786 - RNA, 27 nt, Human
gcccuucgccgccgucgcccccgugau

SEQ ID NO: 326787 - RNA, 19 nt, Human
gcgcgggggcuccgcggag

SEQ ID NO: 326788 - RNA, 20 nt, Human
gcucggucacaucgggcugg

SEQ ID NO: 326789 - RNA, 25 nt, Human
ggacaggcuguggccuagaggggca

SEQ ID NO: 326790 - RNA, 19 nt, Human
gggaauggcagcgcggggg

SEQ ID NO: 326791 - RNA, 21 nt, Human
ggucaacuucugacagucuca

SEQ ID NO: 326792 - RNA, 24 nt, Human
ucagcggaggaccgagcgacggcc

SEQ ID NO: 326793 - RNA, 21 nt, Human
ucccgcccuccggcuccgcga

SEQ ID NO: 326794 - RNA, 19 nt, Human
uccuccgcccccgcccuuc

SEQ ID NO: 326795 - RNA, 23 nt, Human
ucuaggucguuguuacuuaauuu

SEQ ID NO: 326796 - RNA, 21 nt, Human
ucucaggcacuggcuuaauuc

SEQ ID NO: 326797 - RNA, 24 nt, Human
ucucauuuggccaaaaauagaagc

SEQ ID NO: 326798 - RNA, 19 nt, Human
ugaaguuuuggcagguuuu

SEQ ID NO: 326799 - RNA, 23 nt, Human
ugaggaaaugaguaauugggaag

SEQ ID NO: 326800 - RNA, 18 nt, Human
ugaguaauugggaagcag

SEQ ID NO: 326801 - RNA, 24 nt, Human
ugaguuaaaauacaguggucuuua

SEQ ID NO: 326802 - RNA, 24 nt, Human
ugcaaaauacagcgcacaauuuaa

SEQ ID NO: 326803 - RNA, 22 nt, Human
ugcagcugccccccggcccggc

SEQ ID NO: 326804 - RNA, 19 nt, Human
ugcuguuuuaacugagcau

SEQ ID NO: 326805 - RNA, 22 nt, Human
ugggaucaaaaugucccucaau

SEQ ID NO: 326806 - RNA, 24 nt, Human
ugggaucaaaaugucccucaaugc

SEQ ID NO: 326807 - RNA, 21 nt, Human
uuaacugcuuccucaauuuca

SEQ ID NO: 326808 - RNA, 21 nt, Human
uucaaacaaauucuauaaaau

SEQ ID NO: 326809 - RNA, 22 nt, Human
uugcaagccuuccaaauccaag

SEQ ID NO: 326810 - RNA, 19 nt, Human
uuguagagaugauuucuuc

SEQ ID NO: 326811 - RNA, 20 nt, Human
uuuuuuuuuuuuuuuuccag

SEQ ID NO: 326812 - RNA, 21 nt, Human
uuuuuuuuuuuuuuuuccagg

SEQ ID NO: 326813 - RNA, 22 nt, Human
aaacacacacaagcuaagagaa

SEQ ID NO: 326814 - RNA, 23 nt, Human
aaacagaaaaagaguaguccuua

SEQ ID NO: 326815 - RNA, 21 nt, Human
aaagaaacacacacaagcuaa

SEQ ID NO: 326816 - RNA, 26 nt, Human
acaaaauaaugcauacaugauaaaac

SEQ ID NO: 326817 - RNA, 24 nt, Human
agacuguauauaauauaaaaauaa

SEQ ID NO: 326818 - RNA, 20 nt, Human
aggaacaauuaggaugaaca

SEQ ID NO: 326819 - RNA, 23 nt, Human
caaauaauuuacaaauaaaguac

SEQ ID NO: 326820 - RNA, 25 nt, Human
cauacaugauaaaacagaaaaagag

SEQ ID NO: 326821 - RNA, 23 nt, Human
cuccagggcaaauaauuuacaaa

SEQ ID NO: 326822 - RNA, 23 nt, Human
cucccgcguccccccggcugcgg

SEQ ID NO: 326823 - RNA, 25 nt, Human
cuuaaacucaauauaucauaaaggu

SEQ ID NO: 326824 - RNA, 20 nt, Human
gaaaacaggaacaauuagga

SEQ ID NO: 326825 - RNA, 20 nt, Human
ggaugaacaauuagacugua

SEQ ID NO: 326826 - RNA, 21 nt, Human
guggcaccugaauuuuccagu

SEQ ID NO: 326827 - RNA, 21 nt, Human
uaaagaaacacacacaagcua

SEQ ID NO: 326828 - RNA, 20 nt, Human
uaaguguaguauaaggcagg

SEQ ID NO: 326829 - RNA, 23 nt, Human
uagacuguauauaauauaaaaau

SEQ ID NO: 326830 - RNA, 24 nt, Human
ucaaauauuaaagaaacacacaca

SEQ ID NO: 326831 - RNA, 21 nt, Human
ucaguggcaccugaauuuucc

SEQ ID NO: 326832 - RNA, 21 nt, Human
ucuacaagcagcguguaacag

SEQ ID NO: 326833 - RNA, 18 nt, Human
ugauaaaacagaaaaaga

SEQ ID NO: 326834 - RNA, 21 nt, Human
ugcccuguacauauacaaaau

SEQ ID NO: 326835 - RNA, 22 nt, Human
uguacauauacaaaauaaugca

SEQ ID NO: 326836 - RNA, 24 nt, Human
uuuucuaaaacuccagggcaaaua

SEQ ID NO: 326837 - RNA, 23 nt, Human
aaauauuggaaaacauuuuugcu

SEQ ID NO: 326838 - RNA, 23 nt, Human
aaauauuggaaaacauuuuugcu

SEQ ID NO: 326839 - RNA, 20 nt, Human
acaggaaauucuauauagua

SEQ ID NO: 326840 - RNA, 18 nt, Human
aggaaauucuauauagua

SEQ ID NO: 326841 - RNA, 22 nt, Human
aguaacaaacagauaacugaua

SEQ ID NO: 326842 - RNA, 23 nt, Human
aucaucaaaugcugccuuuaauc

SEQ ID NO: 326843 - RNA, 23 nt, Human
aucaucaaaugcugccuuuaauc

SEQ ID NO: 326844 - RNA, 18 nt, Human
caaaugcugccuuuaauc

SEQ ID NO: 326845 - RNA, 22 nt, Human
caagaagaauaccccucuaaga

SEQ ID NO: 326846 - RNA, 22 nt, Human
caagaagaauaccccucuaaga

SEQ ID NO: 326847 - RNA, 23 nt, Human
caguaacaaacagauaacugaua

SEQ ID NO: 326848 - RNA, 23 nt, Human
caguaacaaacagauaacugaua

SEQ ID NO: 326849 - RNA, 21 nt, Human
cauccagaggcucuuuucaug

SEQ ID NO: 326850 - RNA, 22 nt, Human
cgagaccggguccugcuacugg

SEQ ID NO: 326851 - RNA, 20 nt, Human
cuaugccaauauuacuguca

SEQ ID NO: 326852 - RNA, 20 nt, Human
cuaugccaauauuacuguca

SEQ ID NO: 326853 - RNA, 19 nt, Human
cugcucugugaucuuauuu

SEQ ID NO: 326854 - RNA, 23 nt, Human
cuggagguuaaggagagaaaugg

SEQ ID NO: 326855 - RNA, 18 nt, Human
uaaaguagcuguaaaaau

SEQ ID NO: 326856 - RNA, 18 nt, Human
uaaaguagcuguaaaaau

SEQ ID NO: 326857 - RNA, 23 nt, Human
uaaugauuacaaacagaugaugc

SEQ ID NO: 326858 - RNA, 23 nt, Human
uaaugauuacaaacagaugaugc

SEQ ID NO: 326859 - RNA, 19 nt, Human
uaguguuaaaauuuuguaa

SEQ ID NO: 326860 - RNA, 19 nt, Human
uaguguuaaaauuuuguaa

SEQ ID NO: 326861 - RNA, 24 nt, Human
uauaaacaagauuggugcauuaaa

SEQ ID NO: 326862 - RNA, 24 nt, Human
uauaaacaagauuggugcauuaaa

SEQ ID NO: 326863 - RNA, 23 nt, Human
uauuacaggaaauucuauauagu

SEQ ID NO: 326864 - RNA, 23 nt, Human
uauuacaggaaauucuauauagu

SEQ ID NO: 326865 - RNA, 19 nt, Human
ugaacuugcugcucuguga

SEQ ID NO: 326866 - RNA, 19 nt, Human
ugaacuugcugcucuguga

SEQ ID NO: 326867 - RNA, 25 nt, Human
ugauacaguaaacauuugcuacuuu

SEQ ID NO: 326868 - RNA, 25 nt, Human
ugauacaguaaacauuugcuacuuu

SEQ ID NO: 326869 - RNA, 25 nt, Human
uuacaaacagaugaugcaguaacaa

SEQ ID NO: 326870 - RNA, 25 nt, Human
uuacaaacagaugaugcaguaacaa

SEQ ID NO: 326871 - RNA, 24 nt, Human
uuuaagguguguuuuuauuuacaa

SEQ ID NO: 326872 - RNA, 24 nt, Human
uuuaagguguguuuuuauuuacaa

SEQ ID NO: 326873 - RNA, 22 nt, Human
agccuguuugcugccagccacc

SEQ ID NO: 326874 - RNA, 22 nt, Human
auggagcugggucccuccucca

SEQ ID NO: 326875 - RNA, 24 nt, Human
ccccugagauggccuuagcaguuu

SEQ ID NO: 326876 - RNA, 19 nt, Human
cccguggcgccccggaguc

SEQ ID NO: 326877 - RNA, 23 nt, Human
cggaaaggcuguccuucgcggcg

SEQ ID NO: 326878 - RNA, 21 nt, Human
gccccggagucccgcgcggaa

SEQ ID NO: 326879 - RNA, 19 nt, Human
ggaggugacucuccuccag

SEQ ID NO: 326880 - RNA, 21 nt, Human
gggagcagauguugucuggag

SEQ ID NO: 326881 - RNA, 22 nt, Human
guguccaugcccaguguggccc

SEQ ID NO: 326882 - RNA, 18 nt, Human
ucagagagccuguuugcu

SEQ ID NO: 326883 - RNA, 19 nt, Human
ugcccaguguggcccucug

SEQ ID NO: 326884 - RNA, 19 nt, Human
uggaagauagcugcuuaca

SEQ ID NO: 326885 - RNA, 19 nt, Human
uggagcugggucccuccuc

SEQ ID NO: 326886 - RNA, 22 nt, Human
uggagcugggucccuccuccag

SEQ ID NO: 326887 - RNA, 18 nt, Human
uggcccccguggcgcccc

SEQ ID NO: 326888 - RNA, 18 nt, Human
uggcgccccggagucccu

SEQ ID NO: 326889 - RNA, 23 nt, Human
uguggcccucuggaagauagcug

SEQ ID NO: 326890 - RNA, 20 nt, Human
aaaaaaaaaaauuagaccug

SEQ ID NO: 326891 - RNA, 25 nt, Human
aaaaaaaaaaauuagaccuguaguc

SEQ ID NO: 326892 - RNA, 22 nt, Human
aaagcccccacauuucccaccc

SEQ ID NO: 326893 - RNA, 22 nt, Human
aacauggcaaaaacucauuucu

SEQ ID NO: 326894 - RNA, 24 nt, Human
acccuagcuaccuccuccagccuc

SEQ ID NO: 326895 - RNA, 24 nt, Human
agagacguguccuccuuuuauuuc

SEQ ID NO: 326896 - RNA, 24 nt, Human
agcacuuugggaggcugaggcagg

SEQ ID NO: 326897 - RNA, 19 nt, Human
aggcaggaggauugcuuga

SEQ ID NO: 326898 - RNA, 21 nt, Human
aggcaggaggauugcuugagg

SEQ ID NO: 326899 - RNA, 24 nt, Human
aggcaggaggauugcuugagguug

SEQ ID NO: 326900 - RNA, 21 nt, Human
aggcugaggcaggaggauugc

SEQ ID NO: 326901 - RNA, 24 nt, Human
aggcugaggcaggaggauugcuug

SEQ ID NO: 326902 - RNA, 25 nt, Human
agucugggcaacauggcaaaaacuc

SEQ ID NO: 326903 - RNA, 18 nt, Human
aguguccauccacuucuc

SEQ ID NO: 326904 - RNA, 24 nt, Human
cacaccuguaaucucagcacuuug

SEQ ID NO: 326905 - RNA, 19 nt, Human
caccuguaaucucagcacu

SEQ ID NO: 326906 - RNA, 24 nt, Human
caccuguaaucucagcacuuuggg

SEQ ID NO: 326907 - RNA, 24 nt, Human
cagcacuuugggaggcugaggcag

SEQ ID NO: 326908 - RNA, 25 nt, Human
cagcacuuugggaggcugaggcagg

SEQ ID NO: 326909 - RNA, 18 nt, Human
cagcccaccugagggugg

SEQ ID NO: 326910 - RNA, 20 nt, Human
ccaccugagggugggguggg

SEQ ID NO: 326911 - RNA, 23 nt, Human
ccaccuguggacuguaucucuga

SEQ ID NO: 326912 - RNA, 19 nt, Human
ccaggcccacuguuuccau

SEQ ID NO: 326913 - RNA, 23 nt, Human
cccacccugagaaacuuuaacuu

SEQ ID NO: 326914 - RNA, 20 nt, Human
ccccugaguguccaagugag

SEQ ID NO: 326915 - RNA, 20 nt, Human
ccccuuccugaucuucuuuc

SEQ ID NO: 326916 - RNA, 20 nt, Human
cccugaguguccaagugagg

SEQ ID NO: 326917 - RNA, 19 nt, Human
ccuagauagguccugauuu

SEQ ID NO: 326918 - RNA, 19 nt, Human
ccucaccagccacuauacc

SEQ ID NO: 326919 - RNA, 24 nt, Human
ccuguagucccagcuacucggcag

SEQ ID NO: 326920 - RNA, 18 nt, Human
cggaagcucaucuguccc

SEQ ID NO: 326921 - RNA, 20 nt, Human
cggccccgcgcgcgcggcga

SEQ ID NO: 326922 - RNA, 21 nt, Human
cucaagccuugaaugcuacag

SEQ ID NO: 326923 - RNA, 22 nt, Human
cucacaccuguaaucucagcac

SEQ ID NO: 326924 - RNA, 24 nt, Human
cucacaccuguaaucucagcacuu

SEQ ID NO: 326925 - RNA, 22 nt, Human
cuccagccucaagccuugaaug

SEQ ID NO: 326926 - RNA, 19 nt, Human
cugcuuggcugugguuaug

SEQ ID NO: 326927 - RNA, 27 nt, Human
cuggucucucucucucuggcuggggau

SEQ ID NO: 326928 - RNA, 20 nt, Human
cuugagguugggaguucaag

SEQ ID NO: 326929 - RNA, 23 nt, Human
gaccuguagucccagcuacucgg

SEQ ID NO: 326930 - RNA, 18 nt, Human
gagggaggcucaggugcu

SEQ ID NO: 326931 - RNA, 24 nt, Human
gauugcuugagguugggaguucaa

SEQ ID NO: 326932 - RNA, 19 nt, Human
gcgcucagcagcaccgggg

SEQ ID NO: 326933 - RNA, 24 nt, Human
gcuugagguugggaguucaagacc

SEQ ID NO: 326934 - RNA, 25 nt, Human
ggagauguguacucauuugggggac

SEQ ID NO: 326935 - RNA, 19 nt, Human
ggaggauugcuugagguug

SEQ ID NO: 326936 - RNA, 24 nt, Human
ggaucuguuuauaucugucuaguu

SEQ ID NO: 326937 - RNA, 22 nt, Human
ggcccacuguuuccauucugcg

SEQ ID NO: 326938 - RNA, 21 nt, Human
ggcucacaccuguaaucucag

SEQ ID NO: 326939 - RNA, 19 nt, Human
gguccauccaucaagacau

SEQ ID NO: 326940 - RNA, 24 nt, Human
ggugaggagagcagucuccggaaa

SEQ ID NO: 326941 - RNA, 24 nt, Human
gguggcucacaccuguaaucucag

SEQ ID NO: 326942 - RNA, 24 nt, Human
gguuaggagucugucuggccagaa

SEQ ID NO: 326943 - RNA, 23 nt, Human
guggcucacaccuguaaucucag

SEQ ID NO: 326944 - RNA, 22 nt, Human
uacccuagcuaccuccuccagc

SEQ ID NO: 326945 - RNA, 24 nt, Human
uacccuagcuaccuccuccagccu

SEQ ID NO: 326946 - RNA, 21 nt, Human
uaggggguccaccuggcuguc

SEQ ID NO: 326947 - RNA, 23 nt, Human
uagguccugauuugcuggggguc

SEQ ID NO: 326948 - RNA, 21 nt, Human
ucagccagccagcccaccuga

SEQ ID NO: 326949 - RNA, 22 nt, Human
uccagcccggccccgcgcgcgc

SEQ ID NO: 326950 - RNA, 18 nt, Human
ucuaguaaucugacuaac

SEQ ID NO: 326951 - RNA, 19 nt, Human
ucucucucucucuggcugg

SEQ ID NO: 326952 - RNA, 18 nt, Human
ucuggccggcuggcuggg

SEQ ID NO: 326953 - RNA, 20 nt, Human
ucugucccuucuccccuuca

SEQ ID NO: 326954 - RNA, 27 nt, Human
ucugucugucugccuaucuggaggucu

SEQ ID NO: 326955 - RNA, 24 nt, Human
ucugucuuuugggggcucuguuug

SEQ ID NO: 326956 - RNA, 24 nt, Human
ugaggcaggaggauugcuugaggu

SEQ ID NO: 326957 - RNA, 24 nt, Human
ugaggcaggaggauugcuugaggu

SEQ ID NO: 326958 - RNA, 25 nt, Human
ugaggcaggaggauugcuugagguu

SEQ ID NO: 326959 - RNA, 18 nt, Human
ugaggguggggugggguc

SEQ ID NO: 326960 - RNA, 21 nt, Human
uggcucacaccuguaaucuca

SEQ ID NO: 326961 - RNA, 24 nt, Human
uggcucacaccuguaaucucagca

SEQ ID NO: 326962 - RNA, 20 nt, Human
ugggaggcugaggcaggagg

SEQ ID NO: 326963 - RNA, 22 nt, Human
ugggaggcugaggcaggaggau

SEQ ID NO: 326964 - RNA, 24 nt, Human
ugggccauuuaaaguguuucaaau

SEQ ID NO: 326965 - RNA, 28 nt, Human
ugguccccugaguguccaagugagggag

SEQ ID NO: 326966 - RNA, 24 nt, Human
ugguggcucacaccuguaaucuca

SEQ ID NO: 326967 - RNA, 20 nt, Human
uugggaggcugaggcaggag

SEQ ID NO: 326968 - RNA, 20 nt, Human
uuuccauucugcgcacggcg

SEQ ID NO: 326969 - RNA, 22 nt, Human
uuuuuuuuuuuugcacagagac

SEQ ID NO: 326970 - RNA, 23 nt, Human
uuuuuuuuuuuuuuuuugcacag

SEQ ID NO: 326971 - RNA, 27 nt, Human
uuuuuuuuuuuuuuuuuuuuuuugggg

SEQ ID NO: 326972 - RNA, 19 nt, Human
aaaauccagauagccucca

SEQ ID NO: 326973 - RNA, 22 nt, Human
aaaguaccuggagcgucggacg

SEQ ID NO: 326974 - RNA, 24 nt, Human
aauaaugggauuuacagaaaccaa

SEQ ID NO: 326975 - RNA, 21 nt, Human
aaugucuuuauuuuagacagc

SEQ ID NO: 326976 - RNA, 18 nt, Human
aauuucuuuacaaagucu

SEQ ID NO: 326977 - RNA, 19 nt, Human
acccugaaaugcuuaagaa

SEQ ID NO: 326978 - RNA, 23 nt, Human
acccugaaaugcuuaagaauaaa

SEQ ID NO: 326979 - RNA, 20 nt, Human
acugcaccguuuuugggaua

SEQ ID NO: 326980 - RNA, 19 nt, Human
aguaccuggagcgucggac

SEQ ID NO: 326981 - RNA, 18 nt, Human
auccagauagccuccaaa

SEQ ID NO: 326982 - RNA, 21 nt, Human
caacuguuuaccugacuaucc

SEQ ID NO: 326983 - RNA, 23 nt, Human
ccgcgccccgcccccacgccaag

SEQ ID NO: 326984 - RNA, 22 nt, Human
ccuaaaucauaaucuaccccaa

SEQ ID NO: 326985 - RNA, 22 nt, Human
cgccgcgccccgcccccacgcc

SEQ ID NO: 326986 - RNA, 20 nt, Human
cgcgcagacucggcgcccga

SEQ ID NO: 326987 - RNA, 23 nt, Human
cucauaucaaacuucuuuuuaga

SEQ ID NO: 326988 - RNA, 20 nt, Human
cuccaaaaacaaauccugug

SEQ ID NO: 326989 - RNA, 19 nt, Human
cugcgcgccgcgccccgcc

SEQ ID NO: 326990 - RNA, 18 nt, Human
cuggcgcgagcagagccu

SEQ ID NO: 326991 - RNA, 23 nt, Human
gaaccugcagucaagaguccuga

SEQ ID NO: 326992 - RNA, 26 nt, Human
gcaugcgcgcugcgcgccgcgccccc

SEQ ID NO: 326993 - RNA, 20 nt, Human
gcgcgccgcgccccgccccc

SEQ ID NO: 326994 - RNA, 23 nt, Human
gcugcuucuuacuuuugcuuccu

SEQ ID NO: 326995 - RNA, 19 nt, Human
ggaaaacuguaaaacauaa

SEQ ID NO: 326996 - RNA, 21 nt, Human
ggaaccugcagucaagagucc

SEQ ID NO: 326997 - RNA, 22 nt, Human
guuggucaggugaaauacugug

SEQ ID NO: 326998 - RNA, 21 nt, Human
uaaaacauaaaagaaaugcaa

SEQ ID NO: 326999 - RNA, 18 nt, Human
uaaaauccagauagccuc

SEQ ID NO: 327000 - RNA, 20 nt, Human
uaaaucauaaucuaccccaa

SEQ ID NO: 327001 - RNA, 24 nt, Human
uaacagauuuuucaaauugagcuc

SEQ ID NO: 327002 - RNA, 18 nt, Human
uaacguagauaaaaccac

SEQ ID NO: 327003 - RNA, 24 nt, Human
uaacuacaaaagauuaaauagaua

SEQ ID NO: 327004 - RNA, 28 nt, Human
uacaaaagauuaaauagauacuuauaaa

SEQ ID NO: 327005 - RNA, 21 nt, Human
uacuguguuugacauguauga

SEQ ID NO: 327006 - RNA, 25 nt, Human
uagaaagaaacugaaaaguguuuac

SEQ ID NO: 327007 - RNA, 22 nt, Human
uagccuccaaaaacaaauccuu

SEQ ID NO: 327008 - RNA, 23 nt, Human
uaguaaacugaaauuaugaauca

SEQ ID NO: 327009 - RNA, 18 nt, Human
uauugcuuauaucaagug

SEQ ID NO: 327010 - RNA, 22 nt, Human
ugacauguaugaauacaguugc

SEQ ID NO: 327011 - RNA, 21 nt, Human
uggcgcugcggcgcaugcgcg

SEQ ID NO: 327012 - RNA, 18 nt, Human
uguaaaacauaaaagaaa

SEQ ID NO: 327013 - RNA, 24 nt, Human
uuauuccaacuucuaacugcucau

SEQ ID NO: 327014 - RNA, 26 nt, Human
uuccaauaacguagauaaaaccacaa

SEQ ID NO: 327015 - RNA, 18 nt, Human
uuugggauaugaggcguu

SEQ ID NO: 327016 - RNA, 22 nt, Human
uuuuguuucuuuguuugcuuuu

SEQ ID NO: 327017 - RNA, 21 nt, Human
uuuuuaguaacagauuuuuca

SEQ ID NO: 327018 - RNA, 24 nt, Human
aaauaaauccauucuaaaaguguu

SEQ ID NO: 327019 - RNA, 22 nt, Human
aacuggcaaaaaugaaaaauaa

SEQ ID NO: 327020 - RNA, 25 nt, Human
aauacuggaagcuauuaugggaacc

SEQ ID NO: 327021 - RNA, 18 nt, Human
agguauacuccauuuagg

SEQ ID NO: 327022 - RNA, 18 nt, Human
auaaauccauucuaaaag

SEQ ID NO: 327023 - RNA, 18 nt, Human
auugucauuauuugcaca

SEQ ID NO: 327024 - RNA, 19 nt, Human
caacucaaugcaaaugaua

SEQ ID NO: 327025 - RNA, 23 nt, Human
caagagcaguuuguauugcaacc

SEQ ID NO: 327026 - RNA, 19 nt, Human
cagagcaagaaaaauaguc

SEQ ID NO: 327027 - RNA, 21 nt, Human
cuggcaaaaaugaaaaauaaa

SEQ ID NO: 327028 - RNA, 24 nt, Human
cuuuacaaaauuucuagucuggga

SEQ ID NO: 327029 - RNA, 23 nt, Human
ggcaaaaaugaaaaauaaaucca

SEQ ID NO: 327030 - RNA, 23 nt, Human
uaaaagacaauaaaaauaacugg

SEQ ID NO: 327031 - RNA, 22 nt, Human
uacauucaaauaauugucauua

SEQ ID NO: 327032 - RNA, 21 nt, Human
uacuggaagcuauuaugggaa

SEQ ID NO: 327033 - RNA, 18 nt, Human
uagcaguauucuaguagu

SEQ ID NO: 327034 - RNA, 20 nt, Human
ugaaaaauaaauccauucua

SEQ ID NO: 327035 - RNA, 20 nt, Human
ugaaaaugcaaaacuggcac

SEQ ID NO: 327036 - RNA, 21 nt, Human
ugaaaaugcaaaacuggcacu

SEQ ID NO: 327037 - RNA, 21 nt, Human
ugcagagcaagaaaaauaguc

SEQ ID NO: 327038 - RNA, 21 nt, Human
uggcauuuugcuuuucuuuua

SEQ ID NO: 327039 - RNA, 21 nt, Human
uuaacuagcaguauucuagua

SEQ ID NO: 327040 - RNA, 20 nt, Human
uuggcauuuugcuuuucuuu

SEQ ID NO: 327041 - RNA, 19 nt, Human
aaaggcagcagaaauggga

SEQ ID NO: 327042 - RNA, 23 nt, Human
aaggagcagaaccugacccagag

SEQ ID NO: 327043 - RNA, 24 nt, Human
aaggagcagaaccugacccagagc

SEQ ID NO: 327044 - RNA, 21 nt, Human
agaaccugacccagagccugc

SEQ ID NO: 327045 - RNA, 23 nt, Human
agcagaaccugacccagagccug

SEQ ID NO: 327046 - RNA, 22 nt, Human
cacgagcccagccccgccccuu

SEQ ID NO: 327047 - RNA, 22 nt, Human
caguacauuuccaccccacagg

SEQ ID NO: 327048 - RNA, 19 nt, Human
cauuuccaccccacagggg

SEQ ID NO: 327049 - RNA, 24 nt, Human
ccacaggggugcaggcugggccag

SEQ ID NO: 327050 - RNA, 22 nt, Human
cccagagccugcaguacauuuc

SEQ ID NO: 327051 - RNA, 19 nt, Human
ccccgccccuucgugccgg

SEQ ID NO: 327052 - RNA, 20 nt, Human
cccguagcugcugcagcugc

SEQ ID NO: 327053 - RNA, 19 nt, Human
cggccacccggccacuccc

SEQ ID NO: 327054 - RNA, 22 nt, Human
cugcugggugugggcagguggg

SEQ ID NO: 327055 - RNA, 22 nt, Human
gaagucacuggucacgggaggg

SEQ ID NO: 327056 - RNA, 18 nt, Human
gcaggcugggccaggcag

SEQ ID NO: 327057 - RNA, 20 nt, Human
gccacgagcccagccccgcc

SEQ ID NO: 327058 - RNA, 19 nt, Human
gggccaaaggcagcagaaa

SEQ ID NO: 327059 - RNA, 22 nt, Human
uaaaggagcagaaccugaccca

SEQ ID NO: 327060 - RNA, 23 nt, Human
uagcaaagagcugaaaaaugucg

SEQ ID NO: 327061 - RNA, 20 nt, Human
uagcugcugcagcugcuggc

SEQ ID NO: 327062 - RNA, 20 nt, Human
ucccauaaaggagcagaacc

SEQ ID NO: 327063 - RNA, 23 nt, Human
ugagaagcucugcuggguguggg

SEQ ID NO: 327064 - RNA, 21 nt, Human
ugagaugaugaugauguagug

SEQ ID NO: 327065 - RNA, 23 nt, Human
ugccggaagucacuggucacggg

SEQ ID NO: 327066 - RNA, 21 nt, Human
ugcugcagcugcuggcucagc

SEQ ID NO: 327067 - RNA, 23 nt, Human
ugugcccacugagaagcucugcu

SEQ ID NO: 327068 - RNA, 22 nt, Human
uucaauagcaaagagcugaaaa

SEQ ID NO: 327069 - RNA, 19 nt, Human
agcugugcacaguggccca

SEQ ID NO: 327070 - RNA, 21 nt, Human
agguucagguugugagucugu

SEQ ID NO: 327071 - RNA, 21 nt, Human
agguucagguugugagucugu

SEQ ID NO: 327072 - RNA, 26 nt, Human
augcagcucccagugccgggccgccu

SEQ ID NO: 327073 - RNA, 21 nt, Human
caccugaggacagcaccgcuc

SEQ ID NO: 327074 - RNA, 20 nt, Human
cagcuagucugggcaggcag

SEQ ID NO: 327075 - RNA, 23 nt, Human
cccaagccaggugaggaagaacc

SEQ ID NO: 327076 - RNA, 19 nt, Human
cccagugccgggccgccuc

SEQ ID NO: 327077 - RNA, 24 nt, Human
ccgcagggggcggggcugagccag

SEQ ID NO: 327078 - RNA, 21 nt, Human
ccucaccacccccgguggucc

SEQ ID NO: 327079 - RNA, 22 nt, Human
cgccucaccacccccggugguc

SEQ ID NO: 327080 - RNA, 25 nt, Human
cgccucaccacccccggugguccca

SEQ ID NO: 327081 - RNA, 21 nt, Human
cgcucaguaaucagccacuuc

SEQ ID NO: 327082 - RNA, 21 nt, Human
cuauauacagggucagggaga

SEQ ID NO: 327083 - RNA, 21 nt, Human
cuauauacagggucagggaga

SEQ ID NO: 327084 - RNA, 23 nt, Human
cugccuggggccuggcugggcua

SEQ ID NO: 327085 - RNA, 23 nt, Human
cugccuggggccuggcugggcua

SEQ ID NO: 327086 - RNA, 19 nt, Human
cugggcaggcagagagcuc

SEQ ID NO: 327087 - RNA, 23 nt, Human
gaaggguuggcccugccuggggc

SEQ ID NO: 327088 - RNA, 23 nt, Human
gaaggguuggcccugccuggggc

SEQ ID NO: 327089 - RNA, 19 nt, Human
gaggaagaaccgcucagua

SEQ ID NO: 327090 - RNA, 27 nt, Human
gaugcagcucccagugccgggccgccu

SEQ ID NO: 327091 - RNA, 24 nt, Human
gccucaccacccccggugguccca

SEQ ID NO: 327092 - RNA, 21 nt, Human
ggcggggcugagccagcggca

SEQ ID NO: 327093 - RNA, 21 nt, Human
gggcugagccagcggcacagc

SEQ ID NO: 327094 - RNA, 21 nt, Human
gggucagggagaggugggggg

SEQ ID NO: 327095 - RNA, 21 nt, Human
gggucagggagaggugggggg

SEQ ID NO: 327096 - RNA, 19 nt, Human
ggguuggcccugccugggg

SEQ ID NO: 327097 - RNA, 19 nt, Human
ggguuggcccugccugggg

SEQ ID NO: 327098 - RNA, 23 nt, Human
uaagccucagaugcagcucccag

SEQ ID NO: 327099 - RNA, 22 nt, Human
ucagggcugaggcauggccacc

SEQ ID NO: 327100 - RNA, 22 nt, Human
ucagggcugaggcauggccacc

SEQ ID NO: 327101 - RNA, 20 nt, Human
ucugggcaggcagagagcuc

SEQ ID NO: 327102 - RNA, 20 nt, Human
ugccuggggccuggcugggc

SEQ ID NO: 327103 - RNA, 20 nt, Human
ugccuggggccuggcugggc

SEQ ID NO: 327104 - RNA, 23 nt, Human
ugccuggggccuggcugggcuau

SEQ ID NO: 327105 - RNA, 23 nt, Human
ugccuggggccuggcugggcuau

SEQ ID NO: 327106 - RNA, 19 nt, Human
uggccaccugaggacagca

SEQ ID NO: 327107 - RNA, 19 nt, Human
uggccaccugaggacagca

SEQ ID NO: 327108 - RNA, 21 nt, Human
uggcccugccuggggccuggc

SEQ ID NO: 327109 - RNA, 21 nt, Human
uggcccugccuggggccuggc

SEQ ID NO: 327110 - RNA, 19 nt, Human
ugggggcuuccggagagga

SEQ ID NO: 327111 - RNA, 23 nt, Human
uguagggagggggaagccacggc

SEQ ID NO: 327112 - RNA, 20 nt, Human
uuuuuuuuuuuuuuuuucac

SEQ ID NO: 327113 - RNA, 22 nt, Human
uuuuuuuuuuuuuuuuucacag

SEQ ID NO: 327114 - RNA, 21 nt, Human
aacugcugcuguuccacuccc

SEQ ID NO: 327115 - RNA, 18 nt, Human
aagaauccagaaggagga

SEQ ID NO: 327116 - RNA, 18 nt, Human
aagagagaggggagagag

SEQ ID NO: 327117 - RNA, 19 nt, Human
aaggcagcugucaggggcg

SEQ ID NO: 327118 - RNA, 19 nt, Human
aaggcagcugucaggggcg

SEQ ID NO: 327119 - RNA, 22 nt, Human
aagguauaguggguccugcauu

SEQ ID NO: 327120 - RNA, 22 nt, Human
aagguauaguggguccugcauu

SEQ ID NO: 327121 - RNA, 21 nt, Human
accagaguacacagggcucug

SEQ ID NO: 327122 - RNA, 18 nt, Human
accuucauccccaucuca

SEQ ID NO: 327123 - RNA, 18 nt, Human
accuucauccccaucuca

SEQ ID NO: 327124 - RNA, 25 nt, Human
acucuuaugacacauggguggaggc

SEQ ID NO: 327125 - RNA, 24 nt, Human
acugcuuagccucccuaagaguag

SEQ ID NO: 327126 - RNA, 26 nt, Human
acugcuuagccucccuaagaguaguu

SEQ ID NO: 327127 - RNA, 20 nt, Human
agaaagcacgcagaagccau

SEQ ID NO: 327128 - RNA, 21 nt, Human
agaaggcaagggaggaaacag

SEQ ID NO: 327129 - RNA, 22 nt, Human
agaaggcaagggaggaaacaga

SEQ ID NO: 327130 - RNA, 22 nt, Human
agaaggcagucucgggguagag

SEQ ID NO: 327131 - RNA, 23 nt, Human
agacauuggagguuccccuuacu

SEQ ID NO: 327132 - RNA, 23 nt, Human
agacauuggagguuccccuuacu

SEQ ID NO: 327133 - RNA, 18 nt, Human
agaccuggaauccggccc

SEQ ID NO: 327134 - RNA, 18 nt, Human
agaccuggaauccggccc

SEQ ID NO: 327135 - RNA, 19 nt, Human
agagagaggggagagaggc

SEQ ID NO: 327136 - RNA, 20 nt, Human
agagccccccaccgagccuc

SEQ ID NO: 327137 - RNA, 20 nt, Human
agagccccccaccgagccuc

SEQ ID NO: 327138 - RNA, 21 nt, Human
agaggaagcagaggaguggcc

SEQ ID NO: 327139 - RNA, 21 nt, Human
agaggaagcagaggaguggcc

SEQ ID NO: 327140 - RNA, 22 nt, Human
agccaggcaggcgggcuccugg

SEQ ID NO: 327141 - RNA, 18 nt, Human
agccagucucagauucaa

SEQ ID NO: 327142 - RNA, 18 nt, Human
agccagucucagauucaa

SEQ ID NO: 327143 - RNA, 22 nt, Human
agccauggaagcaaaacagaga

SEQ ID NO: 327144 - RNA, 22 nt, Human
agccauggaagcaaaacagaga

SEQ ID NO: 327145 - RNA, 23 nt, Human
agcuaaccagugggccuuccccc

SEQ ID NO: 327146 - RNA, 18 nt, Human
agcugguaucaaggcagc

SEQ ID NO: 327147 - RNA, 20 nt, Human
agcugguaucaaggcagcug

SEQ ID NO: 327148 - RNA, 20 nt, Human
agcugguaucaaggcagcug

SEQ ID NO: 327149 - RNA, 23 nt, Human
aggaagcagaggaguggccagug

SEQ ID NO: 327150 - RNA, 23 nt, Human
aggaagcagaggaguggccagug

SEQ ID NO: 327151 - RNA, 18 nt, Human
aggaaggaguggcuggag

SEQ ID NO: 327152 - RNA, 18 nt, Human
aggaaggaguggcuggag

SEQ ID NO: 327153 - RNA, 19 nt, Human
aggaaggaguggcuggagu

SEQ ID NO: 327154 - RNA, 19 nt, Human
aggaaggaguggcuggagu

SEQ ID NO: 327155 - RNA, 21 nt, Human
aggcagcugucaggggcggcg

SEQ ID NO: 327156 - RNA, 21 nt, Human
aggcagcugucaggggcggcg

SEQ ID NO: 327157 - RNA, 19 nt, Human
aggccaagcagaagcauua

SEQ ID NO: 327158 - RNA, 19 nt, Human
aggccaagcagaagcauua

SEQ ID NO: 327159 - RNA, 22 nt, Human
aggcucacucagccaugagguc

SEQ ID NO: 327160 - RNA, 22 nt, Human
agggagggccuguggggcugug

SEQ ID NO: 327161 - RNA, 22 nt, Human
agggagggccuguggggcugug

SEQ ID NO: 327162 - RNA, 19 nt, Human
agggccuguggggcugugc

SEQ ID NO: 327163 - RNA, 19 nt, Human
agggccuguggggcugugc

SEQ ID NO: 327164 - RNA, 25 nt, Human
agggcucaggggagguggaggugug

SEQ ID NO: 327165 - RNA, 25 nt, Human
agggcucaggggagguggaggugug

SEQ ID NO: 327166 - RNA, 22 nt, Human
aggggaggcucacucagccaug

SEQ ID NO: 327167 - RNA, 21 nt, Human
aguaguccccacauguucccu

SEQ ID NO: 327168 - RNA, 20 nt, Human
aguggcuucuagaaacuucu

SEQ ID NO: 327169 - RNA, 23 nt, Human
auucaaggaggaggaauccugag

SEQ ID NO: 327170 - RNA, 23 nt, Human
auucaaggaggaggaauccugag

SEQ ID NO: 327171 - RNA, 20 nt, Human
caaaacagagacugcuuagc

SEQ ID NO: 327172 - RNA, 20 nt, Human
caaaacagagacugcuuagc

SEQ ID NO: 327173 - RNA, 20 nt, Human
caacugccaggccuggucac

SEQ ID NO: 327174 - RNA, 20 nt, Human
caacugccaggccuggucac

SEQ ID NO: 327175 - RNA, 23 nt, Human
caaguccauccccaaggcuguaa

SEQ ID NO: 327176 - RNA, 23 nt, Human
caaguccauccccaaggcuguaa

SEQ ID NO: 327177 - RNA, 21 nt, Human
cacuuuccccagacccaccuu

SEQ ID NO: 327178 - RNA, 21 nt, Human
cagcaggguccucuccuaacu

SEQ ID NO: 327179 - RNA, 19 nt, Human
cagcaguguuggagcuggu

SEQ ID NO: 327180 - RNA, 19 nt, Human
caggaaacugaagcucaca

SEQ ID NO: 327181 - RNA, 22 nt, Human
caggaucaggcacuugagagcc

SEQ ID NO: 327182 - RNA, 22 nt, Human
caggaucaggcacuugagagcc

SEQ ID NO: 327183 - RNA, 20 nt, Human
caggcacuugagagcccccc

SEQ ID NO: 327184 - RNA, 20 nt, Human
caggcacuugagagcccccc

SEQ ID NO: 327185 - RNA, 20 nt, Human
cagugggccuuccccugaac

SEQ ID NO: 327186 - RNA, 24 nt, Human
cauccagcccuuccgauguguggu

SEQ ID NO: 327187 - RNA, 22 nt, Human
cauggaagcaaaacagagacug

SEQ ID NO: 327188 - RNA, 22 nt, Human
cauggaagcaaaacagagacug

SEQ ID NO: 327189 - RNA, 19 nt, Human
ccaccuucccaggcuugag

SEQ ID NO: 327190 - RNA, 20 nt, Human
ccaggaaggaguggcuggag

SEQ ID NO: 327191 - RNA, 20 nt, Human
ccaggaaggaguggcuggag

SEQ ID NO: 327192 - RNA, 20 nt, Human
ccaggggaggcucacucagc

SEQ ID NO: 327193 - RNA, 21 nt, Human
ccauucuugcaucuggccugu

SEQ ID NO: 327194 - RNA, 21 nt, Human
ccauucuugcaucuggccugu

SEQ ID NO: 327195 - RNA, 21 nt, Human
cccaggggaggcucacucagc

SEQ ID NO: 327196 - RNA, 23 nt, Human
ccccagacccaccuucccaggcu

SEQ ID NO: 327197 - RNA, 20 nt, Human
ccccagcaggguccucuccu

SEQ ID NO: 327198 - RNA, 25 nt, Human
ccccaucucagaaugggcagccagu

SEQ ID NO: 327199 - RNA, 25 nt, Human
ccccaucucagaaugggcagccagu

SEQ ID NO: 327200 - RNA, 21 nt, Human
cccccagaucacucggcccac

SEQ ID NO: 327201 - RNA, 20 nt, Human
cccccagaucacucggcccc

SEQ ID NO: 327202 - RNA, 18 nt, Human
cccccaggcugccucuug

SEQ ID NO: 327203 - RNA, 19 nt, Human
ccccugaacagagaaugga

SEQ ID NO: 327204 - RNA, 22 nt, Human
ccccugaacagagaauggaggc

SEQ ID NO: 327205 - RNA, 27 nt, Human
ccccugaacagagaauggaggccucca

SEQ ID NO: 327206 - RNA, 23 nt, Human
cccuaagaguaguuggugggagu

SEQ ID NO: 327207 - RNA, 21 nt, Human
ccucauggcagcuaagcacuu

SEQ ID NO: 327208 - RNA, 21 nt, Human
ccucauggcagcuaagcacuu

SEQ ID NO: 327209 - RNA, 23 nt, Human
ccuccauaaggccaagcagaagc

SEQ ID NO: 327210 - RNA, 23 nt, Human
ccuccauaaggccaagcagaagc

SEQ ID NO: 327211 - RNA, 31 nt, Human
ccucucacagggcucaggggagguggagguu

SEQ ID NO: 327212 - RNA, 31 nt, Human; identical to SEQ ID NO: 327211

SEQ ID NO: 327213 - RNA, 28 nt, Human
cgggcuccuggaccccagcaggguccuu

SEQ ID NO: 327214 - RNA, 22 nt, Human
cuaagggaaggacaggaucuau

SEQ ID NO: 327215 - RNA, 22 nt, Human
cuccuaacugcugcuguuccac

SEQ ID NO: 327216 - RNA, 24 nt, Human
cucuuaugacacauggguggaggc

SEQ ID NO: 327217 - RNA, 24 nt, Human
cugaguaguccccacauguucccu

SEQ ID NO: 327218 - RNA, 24 nt, Human
cugaguaguccccacauguucccu

SEQ ID NO: 327219 - RNA, 18 nt, Human
cugcugaagcagcugugg

SEQ ID NO: 327220 - RNA, 19 nt, Human
cuugguuacuguucuggag

SEQ ID NO: 327221 - RNA, 22 nt, Human
gaaaauauguguucucuaggac

SEQ ID NO: 327222 - RNA, 21 nt, Human
gacacauggguggaggcaagg

SEQ ID NO: 327223 - RNA, 21 nt, Human
gacacauggguggaggcaagg

SEQ ID NO: 327224 - RNA, 23 nt, Human
gagacuuggagaucaggaccaga

SEQ ID NO: 327225 - RNA, 23 nt, Human
gagacuuggagaucaggaccaga

SEQ ID NO: 327226 - RNA, 18 nt, Human
gagcagguccaaguggga

SEQ ID NO: 327227 - RNA, 19 nt, Human
gagcccagggcaggaucag

SEQ ID NO: 327228 - RNA, 19 nt, Human
gagcccagggcaggaucag

SEQ ID NO: 327229 - RNA, 23 nt, Human
gagcugguaucaaggcagcuguc

SEQ ID NO: 327230 - RNA, 23 nt, Human
gagcugguaucaaggcagcuguc

SEQ ID NO: 327231 - RNA, 19 nt, Human
gaucaggcacuugagagcc

SEQ ID NO: 327232 - RNA, 19 nt, Human
gaucaggcacuugagagcc

SEQ ID NO: 327233 - RNA, 24 nt, Human
gcaaaacagagacugcuuagccuc

SEQ ID NO: 327234 - RNA, 24 nt, Human
gcaaaacagagacugcuuagccuc

SEQ ID NO: 327235 - RNA, 20 nt, Human
gccaggcaggcgggcuccug

SEQ ID NO: 327236 - RNA, 19 nt, Human
gccagggagggccuguggg

SEQ ID NO: 327237 - RNA, 19 nt, Human
gccagggagggccuguggg

SEQ ID NO: 327238 - RNA, 22 nt, Human
gcccacuuuccccagacccacc

SEQ ID NO: 327239 - RNA, 18 nt, Human
gcucugagcccagggcag

SEQ ID NO: 327240 - RNA, 18 nt, Human
gcugugcaguugcuuccc

SEQ ID NO: 327241 - RNA, 23 nt, Human
gcuguggcccccaggcugccucu

SEQ ID NO: 327242 - RNA, 21 nt, Human
ggaaacugaagcucacaaaga

SEQ ID NO: 327243 - RNA, 21 nt, Human
ggaaacugaagcucacaaaga

SEQ ID NO: 327244 - RNA, 18 nt, Human
ggacaccugggcuucuuu

SEQ ID NO: 327245 - RNA, 18 nt, Human
ggacaccugggcuucuuu

SEQ ID NO: 327246 - RNA, 20 nt, Human
ggacccagggcagaaggcag

SEQ ID NO: 327247 - RNA, 27 nt, Human
ggagcugguugggcagccaggcaggcg

SEQ ID NO: 327248 - RNA, 22 nt, Human
ggcagccaggcaggcgggcucc

SEQ ID NO: 327249 - RNA, 21 nt, Human
ggccagcaaccauggaggcag

SEQ ID NO: 327250 - RNA, 21 nt, Human
ggccagcaaccauggaggcag

SEQ ID NO: 327251 - RNA, 19 nt, Human
ggcgucuucuguuccccaa

SEQ ID NO: 327252 - RNA, 21 nt, Human
ggcucugagcccagggcagga

SEQ ID NO: 327253 - RNA, 26 nt, Human
gggagaaggcaagggaggaaacagaa

SEQ ID NO: 327254 - RNA, 19 nt, Human
gggagguggaggugugggc

SEQ ID NO: 327255 - RNA, 19 nt, Human
ggggagguggagguguggg

SEQ ID NO: 327256 - RNA, 19 nt, Human
ggggagguggagguguggg

SEQ ID NO: 327257 - RNA, 20 nt, Human
ggggagguggaggugugggc

SEQ ID NO: 327258 - RNA, 21 nt, Human
ggggcugugcaguugcuuccc

SEQ ID NO: 327259 - RNA, 21 nt, Human
ggggcugugcaguugcuuccc

SEQ ID NO: 327260 - RNA, 19 nt, Human
gguagagauuguggaugaa

SEQ ID NO: 327261 - RNA, 20 nt, Human
ggugcugggcccaggggagg

SEQ ID NO: 327262 - RNA, 21 nt, Human
gucgugccucucacagggcuc

SEQ ID NO: 327263 - RNA, 21 nt, Human
gucgugccucucacagggcuc

SEQ ID NO: 327264 - RNA, 23 nt, Human
gucugucuuugagggcugagaag

SEQ ID NO: 327265 - RNA, 19 nt, Human
uaaccagugggccuucccc

SEQ ID NO: 327266 - RNA, 21 nt, Human
uaaggccaagcagaagcauua

SEQ ID NO: 327267 - RNA, 19 nt, Human
uagaacaggaaacugaagc

SEQ ID NO: 327268 - RNA, 19 nt, Human
uagaacaggaaacugaagc

SEQ ID NO: 327269 - RNA, 21 nt, Human
uauagaacaggaaacugaagc

SEQ ID NO: 327270 - RNA, 21 nt, Human
uauagaacaggaaacugaagc

SEQ ID NO: 327271 - RNA, 18 nt, Human
uauuuucccacuugguua

SEQ ID NO: 327272 - RNA, 18 nt, Human
uauuuucccacuugguua

SEQ ID NO: 327273 - RNA, 20 nt, Human
ucaaggaggaggaauccuga

SEQ ID NO: 327274 - RNA, 20 nt, Human
ucacagggcucaggggaggu

SEQ ID NO: 327275 - RNA, 20 nt, Human
ucacagggcucaggggaggu

SEQ ID NO: 327276 - RNA, 19 nt, Human
ucacuggggcgucuucugu

SEQ ID NO: 327277 - RNA, 22 nt, Human
ucagguagacagugaggagucc

SEQ ID NO: 327278 - RNA, 22 nt, Human
ucagguagacagugaggagucc

SEQ ID NO: 327279 - RNA, 22 nt, Human
uccccagacccaccuucccagg

SEQ ID NO: 327280 - RNA, 24 nt, Human
uccccagacccaccuucccaggcu

SEQ ID NO: 327281 - RNA, 23 nt, Human
uccccugaacagagaauggaggc

SEQ ID NO: 327282 - RNA, 24 nt, Human
ucccuaagaguaguuggugggagu

SEQ ID NO: 327283 - RNA, 20 nt, Human
ucccucauggcagcuaagcu

SEQ ID NO: 327284 - RNA, 20 nt, Human
ucccucauggcagcuaagcu

SEQ ID NO: 327285 - RNA, 18 nt, Human
ucccucugggcuggcucu

SEQ ID NO: 327286 - RNA, 18 nt, Human
ucccucugggcuggcucu

SEQ ID NO: 327287 - RNA, 21 nt, Human
uccggccccuuguccuuacug

SEQ ID NO: 327288 - RNA, 21 nt, Human
uccggccccuuguccuuacug

SEQ ID NO: 327289 - RNA, 21 nt, Human
uccucuccuaacugcugcugu

SEQ ID NO: 327290 - RNA, 22 nt, Human
uccucuccuaacugcugcuguu

SEQ ID NO: 327291 - RNA, 23 nt, Human
uccuggaccccagcaggguccuc

SEQ ID NO: 327292 - RNA, 19 nt, Human
uccuuccccacaccaaccc

SEQ ID NO: 327293 - RNA, 21 nt, Human
ucucuagguguacucagcaaa

SEQ ID NO: 327294 - RNA, 21 nt, Human
ucucuagguguacucagcaaa

SEQ ID NO: 327295 - RNA, 23 nt, Human
ucucugagcuaaccagugggccu

SEQ ID NO: 327296 - RNA, 22 nt, Human
ucugucuuugagggcugagaag

SEQ ID NO: 327297 - RNA, 21 nt, Human
ucuuccagagauuucaacugc

SEQ ID NO: 327298 - RNA, 21 nt, Human
ucuuccagagauuucaacugc

SEQ ID NO: 327299 - RNA, 21 nt, Human
ucuuuugauuggggucaucca

SEQ ID NO: 327300 - RNA, 21 nt, Human
ucuuuugauuggggucaucca

SEQ ID NO: 327301 - RNA, 22 nt, Human
ugagagccccccaccgagccuc

SEQ ID NO: 327302 - RNA, 22 nt, Human
ugagagccccccaccgagccuc

SEQ ID NO: 327303 - RNA, 18 nt, Human
ugagaugggguugggggg

SEQ ID NO: 327304 - RNA, 18 nt, Human
ugagaugggguugggggg

SEQ ID NO: 327305 - RNA, 21 nt, Human
ugagguagaccugaggucccc

SEQ ID NO: 327306 - RNA, 21 nt, Human
ugagguagaccugaggucccc

SEQ ID NO: 327307 - RNA, 19 nt, Human
ugagguccccuggaaauug

SEQ ID NO: 327308 - RNA, 19 nt, Human
ugagguccccuggaaauug

SEQ ID NO: 327309 - RNA, 18 nt, Human
ugagguggggugcugggc

SEQ ID NO: 327310 - RNA, 24 nt, Human
ugagguggggugcugggcccaggg

SEQ ID NO: 327311 - RNA, 19 nt, Human
ugauuggggucauccagcc

SEQ ID NO: 327312 - RNA, 19 nt, Human
ugauuggggucauccagcc

SEQ ID NO: 327313 - RNA, 20 nt, Human
ugcauggaugguuaugaccc

SEQ ID NO: 327314 - RNA, 18 nt, Human
ugcucauucucucaggua

SEQ ID NO: 327315 - RNA, 22 nt, Human
uggagcuuguacccucugagcu

SEQ ID NO: 327316 - RNA, 22 nt, Human
uggagcuuguacccucugagcu

SEQ ID NO: 327317 - RNA, 22 nt, Human
uggaggugugggcaaguccauc

SEQ ID NO: 327318 - RNA, 22 nt, Human
uggaggugugggcaaguccauc

SEQ ID NO: 327319 - RNA, 23 nt, Human
uggaguggcuucuagaaacuucu

SEQ ID NO: 327320 - RNA, 20 nt, Human
uggaugguuaugacccugau

SEQ ID NO: 327321 - RNA, 20 nt, Human
uggaugguuaugacccugau

SEQ ID NO: 327322 - RNA, 20 nt, Human
uggcuggaguggcuucuaga

SEQ ID NO: 327323 - RNA, 20 nt, Human
uggcuggaguggcuucuaga

SEQ ID NO: 327324 - RNA, 21 nt, Human
uggcuggaguggcuucuagaa

SEQ ID NO: 327325 - RNA, 21 nt, Human
uggcuggaguggcuucuagaa

SEQ ID NO: 327326 - RNA, 24 nt, Human
uggcuggaguggcuucuagaaacu

SEQ ID NO: 327327 - RNA, 24 nt, Human
uggcuggaguggcuucuagaaacu

SEQ ID NO: 327328 - RNA, 18 nt, Human
ugggcaggaccucgggug

SEQ ID NO: 327329 - RNA, 18 nt, Human
ugggcaggaccucgggug

SEQ ID NO: 327330 - RNA, 22 nt, Human
ugggcuggcucugagcccaggg

SEQ ID NO: 327331 - RNA, 22 nt, Human
ugggcuggcucugagcccaggg

SEQ ID NO: 327332 - RNA, 23 nt, Human
uggggccaacagaggaagcagag

SEQ ID NO: 327333 - RNA, 24 nt, Human
uggggccaacagaggaagcagagg

SEQ ID NO: 327334 - RNA, 24 nt, Human
uggggccaacagaggaagcagagg

SEQ ID NO: 327335 - RNA, 20 nt, Human
uguaaggaaggagcagcucc

SEQ ID NO: 327336 - RNA, 20 nt, Human
uguaaggaaggagcagcucc

SEQ ID NO: 327337 - RNA, 26 nt, Human
uguacucagcaaaugcaagguauagu

SEQ ID NO: 327338 - RNA, 26 nt, Human
uguacucagcaaaugcaagguauagu

SEQ ID NO: 327339 - RNA, 21 nt, Human
ugucaggggcggcgugccugg

SEQ ID NO: 327340 - RNA, 21 nt, Human
ugucaggggcggcgugccugg

SEQ ID NO: 327341 - RNA, 18 nt, Human
ugugcaguugcuucccuc

SEQ ID NO: 327342 - RNA, 18 nt, Human
ugugcaguugcuucccuc

SEQ ID NO: 327343 - RNA, 21 nt, Human
uguggucagggagcagaguca

SEQ ID NO: 327344 - RNA, 21 nt, Human
uguggucagggagcagaguca

SEQ ID NO: 327345 - RNA, 23 nt, Human
uguucccucuuccagagauuuca

SEQ ID NO: 327346 - RNA, 23 nt, Human
uguucuuucuuuugauugggguc

SEQ ID NO: 327347 - RNA, 20 nt, Human
uuacugcugcugcuuccugu

SEQ ID NO: 327348 - RNA, 20 nt, Human
uuacugcugcugcuuccugu

SEQ ID NO: 327349 - RNA, 19 nt, Human
uuauuuucccacuugguua

SEQ ID NO: 327350 - RNA, 23 nt, Human
uucauccccaucucagaaugggc

SEQ ID NO: 327351 - RNA, 23 nt, Human
uucauccccaucucagaaugggc

SEQ ID NO: 327352 - RNA, 25 nt, Human
uuccccagacccaccuucccaggcu

SEQ ID NO: 327353 - RNA, 21 nt, Human
uugcuucccucugggcuggcu

SEQ ID NO: 327354 - RNA, 21 nt, Human
uugcuucccucugggcuggcu

SEQ ID NO: 327355 - RNA, 18 nt, Human
uugguuacuguucuggag

SEQ ID NO: 327356 - RNA, 25 nt, Human
uuguccuuacugcugcugcuuccug

SEQ ID NO: 327357 - RNA, 25 nt, Human
uuguccuuacugcugcugcuuccug

SEQ ID NO: 327358 - RNA, 22 nt, Human
uuuccacagagagcugguauca

SEQ ID NO: 327359 - RNA, 22 nt, Human
uuuccacagagagcugguauca

SEQ ID NO: 327360 - RNA, 23 nt, Human
uuucuuugucugucauaaaugcc

SEQ ID NO: 327361 - RNA, 23 nt, Human
uuucuuugucugucauaaaugcc

SEQ ID NO: 327362 - RNA, 24 nt, Human
acaaaacagaauauuacaaaauau

SEQ ID NO: 327363 - RNA, 18 nt, Human
acaccgugaacaccaggu

SEQ ID NO: 327364 - RNA, 24 nt, Human
acagugcauggugguacggggaca

SEQ ID NO: 327365 - RNA, 18 nt, Human
accaaagcacaauccagc

SEQ ID NO: 327366 - RNA, 21 nt, Human
accaaagcacaauccagccca

SEQ ID NO: 327367 - RNA, 25 nt, Human
acucugaagaguugccagugagaga

SEQ ID NO: 327368 - RNA, 26 nt, Human
aggcaucggcggcugucugcagagcu

SEQ ID NO: 327369 - RNA, 22 nt, Human
agguaauagaagccuauguacc

SEQ ID NO: 327370 - RNA, 20 nt, Human
agucuagcuucuuuuaaaaa

SEQ ID NO: 327371 - RNA, 23 nt, Human
agugauggcggcagcggccgggg

SEQ ID NO: 327372 - RNA, 18 nt, Human
agugguggggauggggga

SEQ ID NO: 327373 - RNA, 20 nt, Human
agugguggggaugggggagg

SEQ ID NO: 327374 - RNA, 23 nt, Human
auccucuguagccuuggcugcaa

SEQ ID NO: 327375 - RNA, 20 nt, Human
caaccacuuuccucgagagc

SEQ ID NO: 327376 - RNA, 19 nt, Human
cacaauccagcccaauuuc

SEQ ID NO: 327377 - RNA, 20 nt, Human
caccgugaacaccaggucag

SEQ ID NO: 327378 - RNA, 20 nt, Human
cagagcugcuacucgccccu

SEQ ID NO: 327379 - RNA, 21 nt, Human
cagagcugcuacucgccccuc

SEQ ID NO: 327380 - RNA, 19 nt, Human
cagcaacaccgugaacacc

SEQ ID NO: 327381 - RNA, 25 nt, Human
cagugcuaacacauuuacauauaaa

SEQ ID NO: 327382 - RNA, 24 nt, Human
ccccaauaaaacauuggaaaaagg

SEQ ID NO: 327383 - RNA, 21 nt, Human
ccccagcucgucuucuaggcg

SEQ ID NO: 327384 - RNA, 21 nt, Human
cccccagcucgucuucuaggc

SEQ ID NO: 327385 - RNA, 19 nt, Human
cccgcggcuccgagccccg

SEQ ID NO: 327386 - RNA, 24 nt, Human
ccgccgcccggcccgcggcuccga

SEQ ID NO: 327387 - RNA, 22 nt, Human
ccucagggccgccgcccggccc

SEQ ID NO: 327388 - RNA, 21 nt, Human
ccucuugucagggaugcggaa

SEQ ID NO: 327389 - RNA, 23 nt, Human
cgacagugauggcggcagcggcc

SEQ ID NO: 327390 - RNA, 19 nt, Human
cgccgcccggcccgcggcu

SEQ ID NO: 327391 - RNA, 27 nt, Human
cgcggcggcggcggcggccucgccucc

SEQ ID NO: 327392 - RNA, 24 nt, Human
cgcuggggacgaggacagcggcuc

SEQ ID NO: 327393 - RNA, 21 nt, Human
cugcaucauccauuaccacuc

SEQ ID NO: 327394 - RNA, 21 nt, Human
cugcaucauccauuaccacuc

SEQ ID NO: 327395 - RNA, 21 nt, Human
cugcaucauccauuaccacuc

SEQ ID NO: 327396 - RNA, 21 nt, Human
cuuagugccaguuugcuccuc

SEQ ID NO: 327397 - RNA, 25 nt, Human
cuuggccuuguagaaggcaucggcg

SEQ ID NO: 327398 - RNA, 22 nt, Human
cuuggcugcaaacucauucuug

SEQ ID NO: 327399 - RNA, 20 nt, Human
gaagcugcccaauuccuggu

SEQ ID NO: 327400 - RNA, 23 nt, Human
gagccccgcggcggcggcggcgg

SEQ ID NO: 327401 - RNA, 20 nt, Human
gagcugcuacucgccccuca

SEQ ID NO: 327402 - RNA, 20 nt, Human
gaggggcgacugggcgggcg

SEQ ID NO: 327403 - RNA, 21 nt, Human
gaggguggaguaggaacagca

SEQ ID NO: 327404 - RNA, 23 nt, Human
gcccgcggcuccgagccccgcgg

SEQ ID NO: 327405 - RNA, 27 nt, Human
gcgacagugauggcggcagcggccuuu

SEQ ID NO: 327406 - RNA, 20 nt, Human
gcggcggcggcggcggccuc

SEQ ID NO: 327407 - RNA, 22 nt, Human
ggacgaggacagcggcuccgcc

SEQ ID NO: 327408 - RNA, 18 nt, Human
ggagaagggguaccugcu

SEQ ID NO: 327409 - RNA, 18 nt, Human
ggcggcggcggcggccuc

SEQ ID NO: 327410 - RNA, 19 nt, Human
gggagggauauuuacagug

SEQ ID NO: 327411 - RNA, 20 nt, Human
gggcguugggcgggaccgcu

SEQ ID NO: 327412 - RNA, 20 nt, Human
ggggagggauauuuacagug

SEQ ID NO: 327413 - RNA, 22 nt, Human
ggggaugggggaggggaccagg

SEQ ID NO: 327414 - RNA, 20 nt, Human
gguaauagaagccuauguac

SEQ ID NO: 327415 - RNA, 20 nt, Human
gucagggaugcggaagucac

SEQ ID NO: 327416 - RNA, 21 nt, Human
gucuaggaacuggccccccag

SEQ ID NO: 327417 - RNA, 23 nt, Human
gucuaggaacuggccccccagcu

SEQ ID NO: 327418 - RNA, 24 nt, Human
gugauggcggcagcggccgggguc

SEQ ID NO: 327419 - RNA, 25 nt, Human
gugauggcggcagcggccggggucc

SEQ ID NO: 327420 - RNA, 19 nt, Human
gugguacggggacaaccac

SEQ ID NO: 327421 - RNA, 19 nt, Human
uaaaggcaauccuccuggu

SEQ ID NO: 327422 - RNA, 22 nt, Human
uaaaggcaauccuccuggucca

SEQ ID NO: 327423 - RNA, 20 nt, Human
uaccacucaguggaauucca

SEQ ID NO: 327424 - RNA, 20 nt, Human
uaccacucaguggaauucca

SEQ ID NO: 327425 - RNA, 20 nt, Human
uaccacucaguggaauucca

SEQ ID NO: 327426 - RNA, 20 nt, Human
uaccuggaauggauuuugug

SEQ ID NO: 327427 - RNA, 22 nt, Human
uaccuggaauggauuuuguguu

SEQ ID NO: 327428 - RNA, 26 nt, Human
uacucgccccucaauacgcucuucug

SEQ ID NO: 327429 - RNA, 23 nt, Human
uagcuggcucggauguggaagcu

SEQ ID NO: 327430 - RNA, 18 nt, Human
uccauggcgaggggaagc

SEQ ID NO: 327431 - RNA, 19 nt, Human
uccgaagggucaugaaaaa

SEQ ID NO: 327432 - RNA, 21 nt, Human
uccuggugauugucauccuga

SEQ ID NO: 327433 - RNA, 22 nt, Human
ucgggccgccacuagcccucag

SEQ ID NO: 327434 - RNA, 26 nt, Human
ucgggccgccacuagcccucagggcc

SEQ ID NO: 327435 - RNA, 22 nt, Human
ucuuuaggagaagggguaccug

SEQ ID NO: 327436 - RNA, 20 nt, Human
ugagagaaaucagcuugaaa

SEQ ID NO: 327437 - RNA, 20 nt, Human
uggaagcugcccaauuccug

SEQ ID NO: 327438 - RNA, 22 nt, Human
uggcaagcuucugaagaagucu

SEQ ID NO: 327439 - RNA, 23 nt, Human
uggcgaggggaagcggcugaggg

SEQ ID NO: 327440 - RNA, 19 nt, Human
ugggcugauuccgaagggu

SEQ ID NO: 327441 - RNA, 18 nt, Human
uggggacgaggacagcgg

SEQ ID NO: 327442 - RNA, 22 nt, Human
ugggggaggggaccagggagag

SEQ ID NO: 327443 - RNA, 18 nt, Human
ugggguauauuaacaaaa

SEQ ID NO: 327444 - RNA, 20 nt, Human
uguaccaauuucuaaaacag

SEQ ID NO: 327445 - RNA, 18 nt, Human
uuagugccaguuugcucc

SEQ ID NO: 327446 - RNA, 22 nt, Human
uugccagugagagaaaucagcu

SEQ ID NO: 327447 - RNA, 23 nt, Human
uugccagugagagaaaucagcuu

SEQ ID NO: 327448 - RNA, 21 nt, Human
uuguagaaggcaucggcggcu

SEQ ID NO: 327449 - RNA, 21 nt, Human
uuucgggccgccacuagcccu

SEQ ID NO: 327450 - RNA, 18 nt, Human
uuugcuccucuucaucuu

SEQ ID NO: 327451 - RNA, 20 nt, Human
uuuuuuuuuuucagggaguc

SEQ ID NO: 327452 - RNA, 19 nt, Human
aaagcuuaauauuaaacau

SEQ ID NO: 327453 - RNA, 19 nt, Human
aagaaacuacaaaauacaa

SEQ ID NO: 327454 - RNA, 23 nt, Human
caguaguuaagauccagaggaga

SEQ ID NO: 327455 - RNA, 22 nt, Human
uagcuggcaccucuguagggca

SEQ ID NO: 327456 - RNA, 24 nt, Human
uauguagaacaagucaugaacacu

SEQ ID NO: 327457 - RNA, 23 nt, Human
ugaaaaauacauauuuacagaag

SEQ ID NO: 327458 - RNA, 26 nt, Human
ugaaaaauacauauuuacagaagaaa

SEQ ID NO: 327459 - RNA, 21 nt, Human
uguagaacaagucaugaacac

SEQ ID NO: 327460 - RNA, 20 nt, Human
uuuacagaagaaacuacaaa

SEQ ID NO: 327461 - RNA, 23 nt, Human
aaaaacaaaggaaaagcaaaagc

SEQ ID NO: 327462 - RNA, 24 nt, Human
aaaaauaucucaauagucucaaag

SEQ ID NO: 327463 - RNA, 19 nt, Human
aaacacacacccauacaca

SEQ ID NO: 327464 - RNA, 21 nt, Human
aaacacacacccauacacaca

SEQ ID NO: 327465 - RNA, 20 nt, Human
aaauagcuauauuaaauuuc

SEQ ID NO: 327466 - RNA, 22 nt, Human
aacaaauauguuuguauucuuc

SEQ ID NO: 327467 - RNA, 24 nt, Human
aagaauucucucucuuucucuguc

SEQ ID NO: 327468 - RNA, 20 nt, Human
aaugaaaguuaugaauggga

SEQ ID NO: 327469 - RNA, 23 nt, Human
acacacauacauauacacacaua

SEQ ID NO: 327470 - RNA, 22 nt, Human
acacacauaccaccuuuaugua

SEQ ID NO: 327471 - RNA, 27 nt, Human
acacacccauacacacauacauauaca

SEQ ID NO: 327472 - RNA, 24 nt, Human
aguagaacaaggaggacaucuuga

SEQ ID NO: 327473 - RNA, 22 nt, Human
aguuaacacuucuaauauaaaa

SEQ ID NO: 327474 - RNA, 25 nt, Human
auaaaaacaaaggaaaagcaaaagc

SEQ ID NO: 327475 - RNA, 18 nt, Human
auacacacacauaccacc

SEQ ID NO: 327476 - RNA, 22 nt, Human
auacacacauacauauacacac

SEQ ID NO: 327477 - RNA, 25 nt, Human
augaaaaauuccauaaaaauagcua

SEQ ID NO: 327478 - RNA, 23 nt, Human
augauuaagacauuuauaaggac

SEQ ID NO: 327479 - RNA, 22 nt, Human
caaacacacacccauacacaca

SEQ ID NO: 327480 - RNA, 31 nt, Human
caaacacacacccauacacacauacauauag

SEQ ID NO: 327481 - RNA, 22 nt, Human
caagcuaaguuaacacuucuaa

SEQ ID NO: 327482 - RNA, 27 nt, Human
caaugaaaaauuccauaaaaauagcua

SEQ ID NO: 327483 - RNA, 30 nt, Human
cacacaaacacacacccauacacacauaca

SEQ ID NO: 327484 - RNA, 22 nt, Human
cacacacccauacacacauaca

SEQ ID NO: 327485 - RNA, 31 nt, Human
cacacacccauacacacauacauauacacag

SEQ ID NO: 327486 - RNA, 22 nt, Human
cacacauacauauacacacaua

SEQ ID NO: 327487 - RNA, 24 nt, Human
cacacauaccaccuuuauguacua

SEQ ID NO: 327488 - RNA, 18 nt, Human
cacaguaguaaaauauaa

SEQ ID NO: 327489 - RNA, 31 nt, Human
cacauacauauacacacauaacgauuacagu

SEQ ID NO: 327490 - RNA, 24 nt, Human
cacuguugucuuaucagacgagga

SEQ ID NO: 327491 - RNA, 24 nt, Human
cccauacacacauacauauacaca

SEQ ID NO: 327492 - RNA, 27 nt, Human
ccuuucuccacuguugucuuaucagac

SEQ ID NO: 327493 - RNA, 25 nt, Human
cucacacaaacacacacccauacac

SEQ ID NO: 327494 - RNA, 23 nt, Human
cugaaaaaagcaacauacucuua

SEQ ID NO: 327495 - RNA, 26 nt, Human
cuuccuacuucuacaaaaauagaaau

SEQ ID NO: 327496 - RNA, 20 nt, Human
gacaucuugaggucauuuca

SEQ ID NO: 327497 - RNA, 18 nt, Human
gcaaaauugaaaacccca

SEQ ID NO: 327498 - RNA, 28 nt, Human
gcauacacacacauaccaccuuuaugua

SEQ ID NO: 327499 - RNA, 20 nt, Human
gcguccuuucuccacuguug

SEQ ID NO: 327500 - RNA, 23 nt, Human
guagaacaaggaggacaucuuga

SEQ ID NO: 327501 - RNA, 22 nt, Human
gucaaguuugggaaaaguuacu

SEQ ID NO: 327502 - RNA, 20 nt, Human
uaaaaacagauccuucaagc

SEQ ID NO: 327503 - RNA, 22 nt, Human
uaaaagagaguagaaaccuguu

SEQ ID NO: 327504 - RNA, 22 nt, Human
uaaaauuaguaaaaauauaaau

SEQ ID NO: 327505 - RNA, 19 nt, Human
uaaaugcauuuuuuuauag

SEQ ID NO: 327506 - RNA, 21 nt, Human
uaaauuuuaaauauuguacag

SEQ ID NO: 327507 - RNA, 20 nt, Human
uaagaacaagugaaugucaa

SEQ ID NO: 327508 - RNA, 25 nt, Human
uaagauagauauauaugaguagaaa

SEQ ID NO: 327509 - RNA, 19 nt, Human
uaagcauacgucuguacaa

SEQ ID NO: 327510 - RNA, 24 nt, Human
uaagcucacuggaaauuuuuuaau

SEQ ID NO: 327511 - RNA, 22 nt, Human
uaauaauagaaaauuguaguua

SEQ ID NO: 327512 - RNA, 18 nt, Human
uaaugcauacugucaacc

SEQ ID NO: 327513 - RNA, 21 nt, Human
uacaaaaauagaaauaacagc

SEQ ID NO: 327514 - RNA, 24 nt, Human
uacaaugaauauuaauacauauug

SEQ ID NO: 327515 - RNA, 24 nt, Human
uacaaugaauauuaauacauauug

SEQ ID NO: 327516 - RNA, 25 nt, Human
uacacacacauaccaccuuuaugua

SEQ ID NO: 327517 - RNA, 19 nt, Human
uacauauacacacauaacg

SEQ ID NO: 327518 - RNA, 21 nt, Human
uaccacugaaaaaagcaacau

SEQ ID NO: 327519 - RNA, 24 nt, Human
uauaagauuucccaauguuaauuu

SEQ ID NO: 327520 - RNA, 23 nt, Human
uaucaagcaauaaauuuuaaaua

SEQ ID NO: 327521 - RNA, 19 nt, Human
uaucauauuuuucauauca

SEQ ID NO: 327522 - RNA, 19 nt, Human
uauuuaaguucaauuguac

SEQ ID NO: 327523 - RNA, 23 nt, Human
ucaaagguuuugcauaccacuga

SEQ ID NO: 327524 - RNA, 20 nt, Human
ucaaguuugggaaaaguuac

SEQ ID NO: 327525 - RNA, 18 nt, Human
ucaauagucucaaagguu

SEQ ID NO: 327526 - RNA, 18 nt, Human
ucauaaaaacaaaggaaa

SEQ ID NO: 327527 - RNA, 22 nt, Human
ucauaucaaugaaaaauuccau

SEQ ID NO: 327528 - RNA, 18 nt, Human
ucaugauuauaaaauuua

SEQ ID NO: 327529 - RNA, 18 nt, Human
ucauuucagaaauguaca

SEQ ID NO: 327530 - RNA, 24 nt, Human
uccuacuucuacaaaaauagaaau

SEQ ID NO: 327531 - RNA, 19 nt, Human
ucucaaagguuuugcauac

SEQ ID NO: 327532 - RNA, 19 nt, Human
ucucacacaaacacacacc

SEQ ID NO: 327533 - RNA, 21 nt, Human
ucucacacaaacacacaccca

SEQ ID NO: 327534 - RNA, 26 nt, Human
ucucacacaaacacacacccauacac

SEQ ID NO: 327535 - RNA, 22 nt, Human
ucucacacaaacacacacccuu

SEQ ID NO: 327536 - RNA, 21 nt, Human
ucucucacacaaacacacacc

SEQ ID NO: 327537 - RNA, 18 nt, Human
ucucugucucucacacaa

SEQ ID NO: 327538 - RNA, 25 nt, Human
ugaauuuauuugcagcaucucugug

SEQ ID NO: 327539 - RNA, 18 nt, Human
ugaguagaacaaggagga

SEQ ID NO: 327540 - RNA, 19 nt, Human
ugauaagcucacuggaaau

SEQ ID NO: 327541 - RNA, 18 nt, Human
ugcagcaucucuguguuu

SEQ ID NO: 327542 - RNA, 24 nt, Human
uguacaaaaccuaauuuguuguca

SEQ ID NO: 327543 - RNA, 22 nt, Human
uguaguagcauacacacacaua

SEQ ID NO: 327544 - RNA, 23 nt, Human
uuaaaauaagcauacgucuguac

SEQ ID NO: 327545 - RNA, 19 nt, Human
uucaagcuaaguuaacacu

SEQ ID NO: 327546 - RNA, 18 nt, Human
uucacuugaaagaauucu

SEQ ID NO: 327547 - RNA, 23 nt, Human
uucuacaaaaauagaaauaacag

SEQ ID NO: 327548 - RNA, 24 nt, Human
uucuccacuguugucuuaucagac

SEQ ID NO: 327549 - RNA, 19 nt, Human
uuuacuuaccuucuuaaug

SEQ ID NO: 327550 - RNA, 18 nt, Human
uuuguaguagcauacaca

SEQ ID NO: 327551 - RNA, 25 nt, Human
uuuguaguagcauacacacacauag

SEQ ID NO: 327552 - RNA, 25 nt, Human
uuuucauaucaaugaaaaauuccau

SEQ ID NO: 327553 - RNA, 18 nt, Human
uuuuuuuuuuuuuuuuug

SEQ ID NO: 327554 - RNA, 21 nt, Human
acaggcugaaggaguuuuauu

SEQ ID NO: 327555 - RNA, 20 nt, Human
aggaguuuuauuucaaaugg

SEQ ID NO: 327556 - RNA, 19 nt, Human
aggcauggucaugugggcu

SEQ ID NO: 327557 - RNA, 20 nt, Human
caucuugggaagcagaggcu

SEQ ID NO: 327558 - RNA, 18 nt, Human
cccuccgugccgggcacc

SEQ ID NO: 327559 - RNA, 21 nt, Human
cgggcacccaccuccagcucu

SEQ ID NO: 327560 - RNA, 23 nt, Human
cuccgugccgggcacccaccucc

SEQ ID NO: 327561 - RNA, 24 nt, Human
cugguaggggugacagucugaggc

SEQ ID NO: 327562 - RNA, 19 nt, Human
gaagcagaggcacggggag

SEQ ID NO: 327563 - RNA, 21 nt, Human
gaagcagaggcacggggagug

SEQ ID NO: 327564 - RNA, 20 nt, Human
ggaacugguaggggugacag

SEQ ID NO: 327565 - RNA, 22 nt, Human
ggucaugugggcugggggucca

SEQ ID NO: 327566 - RNA, 22 nt, Human
uccgcaggccccuccgugccgg

SEQ ID NO: 327567 - RNA, 21 nt, Human
ugggaacugguaggggugaca

SEQ ID NO: 327568 - RNA, 18 nt, Human
aaauucacuuuaucgaau

SEQ ID NO: 327569 - RNA, 20 nt, Human
aaauucacuuuaucgaaugg

SEQ ID NO: 327570 - RNA, 19 nt, Human
agaagagacuccauggaua

SEQ ID NO: 327571 - RNA, 22 nt, Human
caauacuaaaaaacuaaaucaa

SEQ ID NO: 327572 - RNA, 18 nt, Human
cacaguuagaaaugaagc

SEQ ID NO: 327573 - RNA, 20 nt, Human
cagaagagacuccauggaua

SEQ ID NO: 327574 - RNA, 26 nt, Human
cagcgagucuguccgaucugaaauuu

SEQ ID NO: 327575 - RNA, 22 nt, Human
cauucccuccccuuggccccua

SEQ ID NO: 327576 - RNA, 21 nt, Human
ccccuaaaauguuauuaugag

SEQ ID NO: 327577 - RNA, 20 nt, Human
ccggagccgcagcgagucug

SEQ ID NO: 327578 - RNA, 22 nt, Human
cgagcagcuuggaaucacugcc

SEQ ID NO: 327579 - RNA, 24 nt, Human
cgagucuguccgaucugggacuuu

SEQ ID NO: 327580 - RNA, 19 nt, Human
gcagcagcgugcgcgagca

SEQ ID NO: 327581 - RNA, 23 nt, Human
uaaaaaaaaguuuacacaguuag

SEQ ID NO: 327582 - RNA, 20 nt, Human
uaagaaggacuucucaagug

SEQ ID NO: 327583 - RNA, 20 nt, Human
uacacaguuagaaaugaagc

SEQ ID NO: 327584 - RNA, 19 nt, Human
uaucgaaugauacauuuug

SEQ ID NO: 327585 - RNA, 22 nt, Human
uaucgaaugauacauuuuguua

SEQ ID NO: 327586 - RNA, 19 nt, Human
uccccuuggccccuaaaau

SEQ ID NO: 327587 - RNA, 23 nt, Human
ugagcaguauggugggaaggggc

SEQ ID NO: 327588 - RNA, 19 nt, Human
ugcagcuuggcagcagcgu

SEQ ID NO: 327589 - RNA, 21 nt, Human
uggcagcagcgugcgcgagca

SEQ ID NO: 327590 - RNA, 23 nt, Human
uuguuuuguguguaauaguccca

SEQ ID NO: 327591 - RNA, 20 nt, Human
uuuaaacauucccuccccuu

SEQ ID NO: 327592 - RNA, 20 nt, Human
uuuguguguaauagucccac

SEQ ID NO: 327593 - RNA, 20 nt, Human
aggcccagccacccagccuc

SEQ ID NO: 327594 - RNA, 24 nt, Human
cauaacaaaauauauacaaagaaa

SEQ ID NO: 327595 - RNA, 21 nt, Human
ccgccgcccuccggggcgccc

SEQ ID NO: 327596 - RNA, 21 nt, Human
ccgccgccgccucggcuccag

SEQ ID NO: 327597 - RNA, 24 nt, Human
ccgccgccucggcuccagcuccgg

SEQ ID NO: 327598 - RNA, 22 nt, Human
ccggccgcgucccgccgccgcc

SEQ ID NO: 327599 - RNA, 21 nt, Human
ccuccggggcgcccggcuguc

SEQ ID NO: 327600 - RNA, 23 nt, Human
cgccugcccgccgcccuccgggg

SEQ ID NO: 327601 - RNA, 20 nt, Human
cggcuccugccgcccgcucg

SEQ ID NO: 327602 - RNA, 18 nt, Human
cucccaggcccagccacc

SEQ ID NO: 327603 - RNA, 21 nt, Human
cucccaggcccagccacccag

SEQ ID NO: 327604 - RNA, 23 nt, Human
cucccaggcccagccacccagcc

SEQ ID NO: 327605 - RNA, 18 nt, Human
gcagaaauauauauuuua

SEQ ID NO: 327606 - RNA, 25 nt, Human
gcauaacaaaauauauacaaagaaa

SEQ ID NO: 327607 - RNA, 26 nt, Human
gcauaacaaaauauauacaaagaaau

SEQ ID NO: 327608 - RNA, 24 nt, Human
gcccgccgcccuccggggcgcccg

SEQ ID NO: 327609 - RNA, 20 nt, Human
gccgccgccucggcuccagc

SEQ ID NO: 327610 - RNA, 26 nt, Human
gcucgcgccggcuccugccgcccgcu

SEQ ID NO: 327611 - RNA, 19 nt, Human
gucuucgccgggcgcgaag

SEQ ID NO: 327612 - RNA, 25 nt, Human
ucucccaggcccagccacccagccu

SEQ ID NO: 327613 - RNA, 25 nt, Human
ucucccgggcgccugcccgccgccc

SEQ ID NO: 327614 - RNA, 19 nt, Human
uggccucugugugucuccc

SEQ ID NO: 327615 - RNA, 20 nt, Human
uggucgcgcagaucgcgcug

SEQ ID NO: 327616 - RNA, 22 nt, Human
ugucucccaggcccagccaccc

SEQ ID NO: 327617 - RNA, 20 nt, Human
uuguccggccggccgcgucc

SEQ ID NO: 327618 - RNA, 23 nt, Human
aaaaaaaaaaaaaaaacaaaaca

SEQ ID NO: 327619 - RNA, 24 nt, Human
aaaaaaaaaaaaaaaacaaaacaa

SEQ ID NO: 327620 - RNA, 22 nt, Human
aaaaaaaaaaaacaaaacaaaa

SEQ ID NO: 327621 - RNA, 25 nt, Human
aaaaaaaaaaaacaaaacaaaauaa

SEQ ID NO: 327622 - RNA, 25 nt, Human
aaaaaaaacaaaacaaaauaaaccc

SEQ ID NO: 327623 - RNA, 21 nt, Human
aaaacaaaauaaaccccaacc

SEQ ID NO: 327624 - RNA, 18 nt, Human
aaaaggcuuuaaagggaa

SEQ ID NO: 327625 - RNA, 21 nt, Human
aaaaucaucuggccccugcuc

SEQ ID NO: 327626 - RNA, 24 nt, Human
aaaaucccucagucuaccccacuu

SEQ ID NO: 327627 - RNA, 19 nt, Human
aaacaaaauaaaccccaac

SEQ ID NO: 327628 - RNA, 23 nt, Human
aaacaaaauaaaccccaaccccu

SEQ ID NO: 327629 - RNA, 19 nt, Human
aaacaccacaccauacugc

SEQ ID NO: 327630 - RNA, 21 nt, Human
aaacaccacaccauacugcaa

SEQ ID NO: 327631 - RNA, 18 nt, Human
aaacagcugcaaaccagg

SEQ ID NO: 327632 - RNA, 21 nt, Human
aagggcugacucuuuuuuuuu

SEQ ID NO: 327633 - RNA, 18 nt, Human
aaguccaguagucuugcc

SEQ ID NO: 327634 - RNA, 25 nt, Human
acaaaaaaaaaaaaaaaacaaaaca

SEQ ID NO: 327635 - RNA, 26 nt, Human
acaaaaaaaaaaaaaaaacaaaacaa

SEQ ID NO: 327636 - RNA, 25 nt, Human
acaaaacaaaauaaaccccaacccc

SEQ ID NO: 327637 - RNA, 31 nt, Human
acaaaacuuaaaaaaacauugaguuuccccc

SEQ ID NO: 327638 - RNA, 22 nt, Human
accacaccauacugcaaugcug

SEQ ID NO: 327639 - RNA, 23 nt, Human
accacgucccucagcuaaaacag

SEQ ID NO: 327640 - RNA, 21 nt, Human
accccacagccuacaaacacc

SEQ ID NO: 327641 - RNA, 18 nt, Human
accgccacccgagcugga

SEQ ID NO: 327642 - RNA, 21 nt, Human
accugugcuauucaccuuggc

SEQ ID NO: 327643 - RNA, 19 nt, Human
acgcugugauccccguggg

SEQ ID NO: 327644 - RNA, 23 nt, Human
acucuuuuuuuuuuuuuuuuugg

SEQ ID NO: 327645 - RNA, 19 nt, Human
agaaaugcgggagcgcaac

SEQ ID NO: 327646 - RNA, 22 nt, Human
agcauccacaagguaaaaauga

SEQ ID NO: 327647 - RNA, 19 nt, Human
agccaggcucugugggccc

SEQ ID NO: 327648 - RNA, 21 nt, Human
agccuagcuagguuuggggac

SEQ ID NO: 327649 - RNA, 18 nt, Human
agcuaugcacccuucccc

SEQ ID NO: 327650 - RNA, 23 nt, Human
agcuaugcacccuuccccgcccc

SEQ ID NO: 327651 - RNA, 19 nt, Human
agggaggaaaaucaucugg

SEQ ID NO: 327652 - RNA, 18 nt, Human
agggauguucuaggcucu

SEQ ID NO: 327653 - RNA, 24 nt, Human
auacaaaaaaaaaaaaaaaacaaa

SEQ ID NO: 327654 - RNA, 21 nt, Human
auagaaaacagacuguguaca

SEQ ID NO: 327655 - RNA, 19 nt, Human
auggcucagaggagcuggg

SEQ ID NO: 327656 - RNA, 20 nt, Human
auggugaugaggaaugccuu

SEQ ID NO: 327657 - RNA, 22 nt, Human
caaaaaaaaaaaaaaaacaaaa

SEQ ID NO: 327658 - RNA, 22 nt, Human
caaaacaaaauaaaccccaacc

SEQ ID NO: 327659 - RNA, 25 nt, Human
caaaacuuaaaaaaacauugaguuu

SEQ ID NO: 327660 - RNA, 21 nt, Human
caaaauaaaccccaaccccua

SEQ ID NO: 327661 - RNA, 22 nt, Human
caaccccaccccaugagaagaa

SEQ ID NO: 327662 - RNA, 22 nt, Human
caagggcugacucuuuuuuuuu

SEQ ID NO: 327663 - RNA, 23 nt, Human
caaugcuggggaccaaagccagg

SEQ ID NO: 327664 - RNA, 19 nt, Human
cacagccagccacagccca

SEQ ID NO: 327665 - RNA, 18 nt, Human
caccacugucaauguggc

SEQ ID NO: 327666 - RNA, 21 nt, Human
caccauacugcaaugcugggg

SEQ ID NO: 327667 - RNA, 21 nt, Human
cacccgagcuggagccggagc

SEQ ID NO: 327668 - RNA, 19 nt, Human
caccuggucccgcucccgc

SEQ ID NO: 327669 - RNA, 18 nt, Human
cacgaggaaggcaauguu

SEQ ID NO: 327670 - RNA, 19 nt, Human
cacggccgagccuccgcuc

SEQ ID NO: 327671 - RNA, 21 nt, Human
cacuagcauccacaagguaaa

SEQ ID NO: 327672 - RNA, 24 nt, Human
cacuggccuggaccugaaaggcca

SEQ ID NO: 327673 - RNA, 24 nt, Human
cagaccccacagccuacaaacacc

SEQ ID NO: 327674 - RNA, 23 nt, Human
cagcaccaagggccgggcaccag

SEQ ID NO: 327675 - RNA, 24 nt, Human
cagccagcagcucccucgggaacc

SEQ ID NO: 327676 - RNA, 21 nt, Human
cagcccaggacaaucaaccga

SEQ ID NO: 327677 - RNA, 21 nt, Human
cagccuacaaacaccacacca

SEQ ID NO: 327678 - RNA, 24 nt, Human
cagcuaugcacccuuccccgcccc

SEQ ID NO: 327679 - RNA, 18 nt, Human
cagcugcaaaccagggag

SEQ ID NO: 327680 - RNA, 22 nt, Human
ccagaccccacagccuacaaac

SEQ ID NO: 327681 - RNA, 22 nt, Human
ccagggccuccacuccuuccgc

SEQ ID NO: 327682 - RNA, 23 nt, Human
ccagggccuccacuccuuccgcc

SEQ ID NO: 327683 - RNA, 21 nt, Human
ccccccgcaagccgcuagggc

SEQ ID NO: 327684 - RNA, 21 nt, Human
ccccgugggcugugcucugcc

SEQ ID NO: 327685 - RNA, 25 nt, Human
cccgagccggagccgaagcuggagc

SEQ ID NO: 327686 - RNA, 27 nt, Human
cccgccaccgccacccgagcuggagcc

SEQ ID NO: 327687 - RNA, 22 nt, Human
cccucagcuaaaacagcuaugc

SEQ ID NO: 327688 - RNA, 23 nt, Human
cccugaggugcaugggguguggc

SEQ ID NO: 327689 - RNA, 18 nt, Human
cccuggggcuggcucagg

SEQ ID NO: 327690 - RNA, 18 nt, Human
ccgaagcuggagccgccg

SEQ ID NO: 327691 - RNA, 20 nt, Human
ccgcaagccgcuagggccgc

SEQ ID NO: 327692 - RNA, 20 nt, Human
ccgccacccgagcuggagcc

SEQ ID NO: 327693 - RNA, 18 nt, Human
ccgccgccaccgcucccg

SEQ ID NO: 327694 - RNA, 19 nt, Human
ccgccgccaccgcucccgc

SEQ ID NO: 327695 - RNA, 21 nt, Human
ccgccgccaccgcucccgccg

SEQ ID NO: 327696 - RNA, 19 nt, Human
ccgccgccgccuccaccug

SEQ ID NO: 327697 - RNA, 25 nt, Human
ccgccgccgccuccaccuggucccg

SEQ ID NO: 327698 - RNA, 22 nt, Human
ccgccgccuccaccuggucccg

SEQ ID NO: 327699 - RNA, 26 nt, Human
ccgccucugccgccgccaccgcuccc

SEQ ID NO: 327700 - RNA, 21 nt, Human
ccgcucccgccaccgccaccc

SEQ ID NO: 327701 - RNA, 21 nt, Human
ccgggcaccagggccuccacu

SEQ ID NO: 327702 - RNA, 28 nt, Human
ccuacaaacaccacaccauacugcaaag

SEQ ID NO: 327703 - RNA, 19 nt, Human
ccuacaaacaccacaccuc

SEQ ID NO: 327704 - RNA, 21 nt, Human
ccucccggcccacggccgagc

SEQ ID NO: 327705 - RNA, 18 nt, Human
ccuccggagccccacggc

SEQ ID NO: 327706 - RNA, 21 nt, Human
ccucugccgccgccaccgcuc

SEQ ID NO: 327707 - RNA, 23 nt, Human
ccuuggccacacagccagacccc

SEQ ID NO: 327708 - RNA, 19 nt, Human
cgagcccgagccggagccg

SEQ ID NO: 327709 - RNA, 19 nt, Human
cgagccggagccgaagcug

SEQ ID NO: 327710 - RNA, 22 nt, Human
cgaggaaggcaauguucugucc

SEQ ID NO: 327711 - RNA, 21 nt, Human
cgccucugccgccgccaccgc

SEQ ID NO: 327712 - RNA, 20 nt, Human
cggagccggagcccgagccc

SEQ ID NO: 327713 - RNA, 21 nt, Human
cggagccggagccggagccgg

SEQ ID NO: 327714 - RNA, 21 nt, Human
cuaugcacccuuccccgcccc

SEQ ID NO: 327715 - RNA, 24 nt, Human
cuccucugccgccgccgccuccac

SEQ ID NO: 327716 - RNA, 25 nt, Human
cucucccagacacaucugugguucu

SEQ ID NO: 327717 - RNA, 24 nt, Human
cucugccgccgccaccgcucccgc

SEQ ID NO: 327718 - RNA, 21 nt, Human
cugccgccgccgccuccaccu

SEQ ID NO: 327719 - RNA, 22 nt, Human
cugccgccgccgccuccaccug

SEQ ID NO: 327720 - RNA, 20 nt, Human
cugcugggccauccacuugc

SEQ ID NO: 327721 - RNA, 18 nt, Human
cuggccccugcucugagg

SEQ ID NO: 327722 - RNA, 21 nt, Human
gaaaacagcugcaaaccaggg

SEQ ID NO: 327723 - RNA, 19 nt, Human
gacagaagggccacagugc

SEQ ID NO: 327724 - RNA, 26 nt, Human
gagaaaugcgggagcgcaacagagag

SEQ ID NO: 327725 - RNA, 20 nt, Human
gagccggagccgaagcugga

SEQ ID NO: 327726 - RNA, 20 nt, Human
gagccggagccggagcccga

SEQ ID NO: 327727 - RNA, 20 nt, Human
gagccggagccggagccgga

SEQ ID NO: 327728 - RNA, 20 nt, Human
gagccggagccggagccgga

SEQ ID NO: 327729 - RNA, 21 nt, Human
gaggaaggcaauguucugucc

SEQ ID NO: 327730 - RNA, 21 nt, Human
gauacggauucgcgaaaggaa

SEQ ID NO: 327731 - RNA, 22 nt, Human
gccagaccccacagccuacaag

SEQ ID NO: 327732 - RNA, 24 nt, Human
gcccacggccgagccuccgcucag

SEQ ID NO: 327733 - RNA, 22 nt, Human
gcccagaggaagaggcgcucuc

SEQ ID NO: 327734 - RNA, 24 nt, Human
gcccugaggugcaugggguguggc

SEQ ID NO: 327735 - RNA, 23 nt, Human
gcuaaaaucccucagucuacccc

SEQ ID NO: 327736 - RNA, 23 nt, Human
gcugugaauguuaaacacacacu

SEQ ID NO: 327737 - RNA, 19 nt, Human
ggcccaggucagccagcag

SEQ ID NO: 327738 - RNA, 25 nt, Human
ggcugacucuuuuuuuuuuuuuuuu

SEQ ID NO: 327739 - RNA, 23 nt, Human
gggaaaacaaaacuuaaaaaaac

SEQ ID NO: 327740 - RNA, 24 nt, Human
gggaaaacaaaacuuaaaaaaaca

SEQ ID NO: 327741 - RNA, 23 nt, Human
gggaccaaagccaggcucugugg

SEQ ID NO: 327742 - RNA, 20 nt, Human
gggcccaggucagccagcag

SEQ ID NO: 327743 - RNA, 20 nt, Human
ggggguggcggaggagaggg

SEQ ID NO: 327744 - RNA, 23 nt, Human
guccaguagucuugccacauugg

SEQ ID NO: 327745 - RNA, 20 nt, Human
gugcuauucaccuuggccac

SEQ ID NO: 327746 - RNA, 21 nt, Human
uaaaaaggaggcuuugcccca

SEQ ID NO: 327747 - RNA, 21 nt, Human
uaauaaggacugauuagagua

SEQ ID NO: 327748 - RNA, 22 nt, Human
uacaaacaccacaccauacugc

SEQ ID NO: 327749 - RNA, 19 nt, Human
uagaguaccauugauagaa

SEQ ID NO: 327750 - RNA, 21 nt, Human
uagauagcgcugcccagagga

SEQ ID NO: 327751 - RNA, 18 nt, Human
uagccuagcuagguuugg

SEQ ID NO: 327752 - RNA, 23 nt, Human
uagcugaaacaggaucucgucug

SEQ ID NO: 327753 - RNA, 18 nt, Human
uaggagggcuggacgaug

SEQ ID NO: 327754 - RNA, 20 nt, Human
uaugcaaugaugcuguaguu

SEQ ID NO: 327755 - RNA, 21 nt, Human
ucagcaagcugggauaauaag

SEQ ID NO: 327756 - RNA, 28 nt, Human
ucagcagaagucauacaaaaaaaaaaaa

SEQ ID NO: 327757 - RNA, 21 nt, Human
ucauacaaaaaaaaaaaaaaa

SEQ ID NO: 327758 - RNA, 26 nt, Human
ucauacaaaaaaaaaaaaaaaacaaa

SEQ ID NO: 327759 - RNA, 25 nt, Human
uccacagccagccacagcccaggac

SEQ ID NO: 327760 - RNA, 18 nt, Human
uccccccgcaagccgcua

SEQ ID NO: 327761 - RNA, 25 nt, Human
ucccgccaccgccacccgagcugga

SEQ ID NO: 327762 - RNA, 22 nt, Human
ucccggcccacggccgagccuc

SEQ ID NO: 327763 - RNA, 20 nt, Human
ucccucgggaaccccaggca

SEQ ID NO: 327764 - RNA, 22 nt, Human
ucccugcauuuagcugaaacag

SEQ ID NO: 327765 - RNA, 23 nt, Human
ucccuggggcuggcucaggggcc

SEQ ID NO: 327766 - RNA, 26 nt, Human
uccucugccgccgccgccuccaccug

SEQ ID NO: 327767 - RNA, 22 nt, Human
ucugccgccgccgccuccaccu

SEQ ID NO: 327768 - RNA, 19 nt, Human
ucugugggcccaggucagc

SEQ ID NO: 327769 - RNA, 25 nt, Human
ucuuggaguggaaaagagcgauuau

SEQ ID NO: 327770 - RNA, 22 nt, Human
ucuuuuuuuuuuuuuuuuuggg

SEQ ID NO: 327771 - RNA, 18 nt, Human
ugaaacgcugugaucccc

SEQ ID NO: 327772 - RNA, 23 nt, Human
ugaacucuacagcacuagcaucc

SEQ ID NO: 327773 - RNA, 24 nt, Human
ugaacucuacagcacuagcaucca

SEQ ID NO: 327774 - RNA, 19 nt, Human
ugaagcagaagccaagggc

SEQ ID NO: 327775 - RNA, 22 nt, Human
ugaagcgggcuccagguggguc

SEQ ID NO: 327776 - RNA, 19 nt, Human
ugacagcaucugcguagga

SEQ ID NO: 327777 - RNA, 21 nt, Human
ugacagcaucugcguaggagg

SEQ ID NO: 327778 - RNA, 23 nt, Human
ugacagcaucugcguaggagggc

SEQ ID NO: 327779 - RNA, 21 nt, Human
ugagaagaagcaugagaaaug

SEQ ID NO: 327780 - RNA, 23 nt, Human
ugaggugcaugggguguggcaca

SEQ ID NO: 327781 - RNA, 19 nt, Human
ugccuugccaggcucuccc

SEQ ID NO: 327782 - RNA, 19 nt, Human
ugcuauucaccuuggccac

SEQ ID NO: 327783 - RNA, 22 nt, Human
ugcuauucaccuuggccacaca

SEQ ID NO: 327784 - RNA, 21 nt, Human
uggaaaagagcgauuaucggg

SEQ ID NO: 327785 - RNA, 23 nt, Human
uggcacacacccuaaccugugcu

SEQ ID NO: 327786 - RNA, 19 nt, Human
uggcagccccagcucugca

SEQ ID NO: 327787 - RNA, 18 nt, Human
uggcccugaggugcaugg

SEQ ID NO: 327788 - RNA, 22 nt, Human
uggccuggaccugaaaggccag

SEQ ID NO: 327789 - RNA, 18 nt, Human
uggcucagaggagcuggg

SEQ ID NO: 327790 - RNA, 24 nt, Human
ugggauagacgaccagggaugagu

SEQ ID NO: 327791 - RNA, 28 nt, Human
uggggcuggcucaggggccauccagggc

SEQ ID NO: 327792 - RNA, 23 nt, Human
uuggcccugaggugcauggggug

SEQ ID NO: 327793 - RNA, 27 nt, Human
uuuaaagggaaaacaaaacuuaaaaaa

SEQ ID NO: 327794 - RNA, 25 nt, Human
uuuuauuuuugugguuuuuuguuuu

SEQ ID NO: 327795 - RNA, 26 nt, Human
uuuuuuuuuuuuggguuuuuuguuuu

SEQ ID NO: 327796 - RNA, 18 nt, Human
uuuuuuuuuuuuuugggu

SEQ ID NO: 327797 - RNA, 21 nt, Human
aaaauaaauaucaaaacuuuu

SEQ ID NO: 327798 - RNA, 22 nt, Human
aaacaaugcuauccacuccauu

SEQ ID NO: 327799 - RNA, 21 nt, Human
aaacuggccaugccuccauac

SEQ ID NO: 327800 - RNA, 19 nt, Human
aaaggagagagccgauccc

SEQ ID NO: 327801 - RNA, 21 nt, Human
aaaguacagcauugccugcua

SEQ ID NO: 327802 - RNA, 18 nt, Human
aaccagcauaaauggaac

SEQ ID NO: 327803 - RNA, 23 nt, Human
aacgcagagccacgcuggggacg

SEQ ID NO: 327804 - RNA, 23 nt, Human
aagaggaaagcagggagguaaac

SEQ ID NO: 327805 - RNA, 21 nt, Human
aagugaccgggaacgcagagc

SEQ ID NO: 327806 - RNA, 19 nt, Human
aagugcccuuucaggauuc

SEQ ID NO: 327807 - RNA, 20 nt, Human
aauagaaacggccggaggaa

SEQ ID NO: 327808 - RNA, 21 nt, Human
acggccggaggaaacggagga

SEQ ID NO: 327809 - RNA, 19 nt, Human
agacauaaaauggcaaaaa

SEQ ID NO: 327810 - RNA, 21 nt, Human
agcagccgaggauccccaacu

SEQ ID NO: 327811 - RNA, 18 nt, Human
agcggagagccccccaaa

SEQ ID NO: 327812 - RNA, 19 nt, Human
agcuccuuccagggccccg

SEQ ID NO: 327813 - RNA, 25 nt, Human
aggaaggaggcauguuugcgagagg

SEQ ID NO: 327814 - RNA, 26 nt, Human
aggaaggaggcauguuugcgagaggg

SEQ ID NO: 327815 - RNA, 22 nt, Human
aggagaggaggacugaagaaaa

SEQ ID NO: 327816 - RNA, 28 nt, Human
aggcagcuccuuccagggccccgggaag

SEQ ID NO: 327817 - RNA, 18 nt, Human
aggcaggcagcuccuucc

SEQ ID NO: 327818 - RNA, 21 nt, Human
aggcaggcagcuccuuccagg

SEQ ID NO: 327819 - RNA, 27 nt, Human
auaauaauaaaagcaauauucacuguc

SEQ ID NO: 327820 - RNA, 25 nt, Human
caaaaaaggccucaaaaaaguucuc

SEQ ID NO: 327821 - RNA, 20 nt, Human
caaaaaaguucucagucuuc

SEQ ID NO: 327822 - RNA, 21 nt, Human
cacuccauuaaaauacagaag

SEQ ID NO: 327823 - RNA, 20 nt, Human
cagacagggaccgcgggcgg

SEQ ID NO: 327824 - RNA, 23 nt, Human
cagcaauaauaauaauaaaagca

SEQ ID NO: 327825 - RNA, 23 nt, Human
cagcauaaauggaacuguuucag

SEQ ID NO: 327826 - RNA, 26 nt, Human
cagcccgagagccggcgggcggcggg

SEQ ID NO: 327827 - RNA, 18 nt, Human
caugacauuaacagaccu

SEQ ID NO: 327828 - RNA, 23 nt, Human
ccaaaauagaaacggccggagga

SEQ ID NO: 327829 - RNA, 22 nt, Human
ccacuccauuaaaauacagaag

SEQ ID NO: 327830 - RNA, 23 nt, Human
ccccccaaaauagaaacggccgg

SEQ ID NO: 327831 - RNA, 18 nt, Human
ccccgcgcucggcggccc

SEQ ID NO: 327832 - RNA, 23 nt, Human
ccgagcgccccccggaaaaucuc

SEQ ID NO: 327833 - RNA, 23 nt, Human
cgagcgccccccggaaaaucuca

SEQ ID NO: 327834 - RNA, 21 nt, Human
cgccccccggaaaaucucaaa

SEQ ID NO: 327835 - RNA, 21 nt, Human
cggcggcggggcugagcgcgg

SEQ ID NO: 327836 - RNA, 23 nt, Human
cgggcuucaggcaggcagcuccu

SEQ ID NO: 327837 - RNA, 22 nt, Human
cggggcugagcgcggcgcggcg

SEQ ID NO: 327838 - RNA, 22 nt, Human
cgucauggaaugucacaucagg

SEQ ID NO: 327839 - RNA, 18 nt, Human
cuccugaaaguuguggcu

SEQ ID NO: 327840 - RNA, 19 nt, Human
cuucagaaguuuacaaauu

SEQ ID NO: 327841 - RNA, 19 nt, Human
gagccccccaaaauagaaa

SEQ ID NO: 327842 - RNA, 21 nt, Human
gaggggagaggcagggggagc

SEQ ID NO: 327843 - RNA, 21 nt, Human
gccugcuaguagaaugcaacc

SEQ ID NO: 327844 - RNA, 23 nt, Human
gcggcgcuggaaacuggccaugc

SEQ ID NO: 327845 - RNA, 18 nt, Human
gcggcggcggggcugagc

SEQ ID NO: 327846 - RNA, 20 nt, Human
ggcggcggcgagcagccgag

SEQ ID NO: 327847 - RNA, 21 nt, Human
gggcggcggcggggcugagcg

SEQ ID NO: 327848 - RNA, 18 nt, Human
gggcuucaggcaggcagc

SEQ ID NO: 327849 - RNA, 23 nt, Human
ggggaaggggaggggagaggcag

SEQ ID NO: 327850 - RNA, 21 nt, Human
ggggaggggagaggcaggggg

SEQ ID NO: 327851 - RNA, 18 nt, Human
gucacaucaggguuugcu

SEQ ID NO: 327852 - RNA, 18 nt, Human
uaaaauacagaaggcaua

SEQ ID NO: 327853 - RNA, 25 nt, Human
uaacaaagaccuucacuguauugaa

SEQ ID NO: 327854 - RNA, 19 nt, Human
uaagacauaaaauggcaaa

SEQ ID NO: 327855 - RNA, 22 nt, Human
uaagacauaaaauggcaaaaaa

SEQ ID NO: 327856 - RNA, 21 nt, Human
uaagggaucucuuaaccagca

SEQ ID NO: 327857 - RNA, 24 nt, Human
uaauacagaguuauccuuuauuuu

SEQ ID NO: 327858 - RNA, 25 nt, Human
uacagcauugccugcuaguagaauu

SEQ ID NO: 327859 - RNA, 23 nt, Human
uaggauaccauuaagacauaaaa

SEQ ID NO: 327860 - RNA, 18 nt, Human
uccacuccauuaaaauac

SEQ ID NO: 327861 - RNA, 19 nt, Human
uccagggccccgggaagga

SEQ ID NO: 327862 - RNA, 22 nt, Human
ucgcccgcuccacgggcccccc

SEQ ID NO: 327863 - RNA, 18 nt, Human
ucggcagcgcagcacagc

SEQ ID NO: 327864 - RNA, 23 nt, Human
ucggcagcgcagcacagcccgag

SEQ ID NO: 327865 - RNA, 21 nt, Human
ucuggcaaaaaaggccucaaa

SEQ ID NO: 327866 - RNA, 23 nt, Human
ugaaaugaacagaggugcaaaug

SEQ ID NO: 327867 - RNA, 24 nt, Human
ugcaaaugcucaguaggauaccau

SEQ ID NO: 327868 - RNA, 20 nt, Human
ugccuaaaauaaaaaggaga

SEQ ID NO: 327869 - RNA, 19 nt, Human
uggaauccgggaagccgcc

SEQ ID NO: 327870 - RNA, 23 nt, Human
uggcaaaaaaggccucaaaaaag

SEQ ID NO: 327871 - RNA, 22 nt, Human
uggcuccggcgcaggcugggaa

SEQ ID NO: 327872 - RNA, 20 nt, Human
ugggaaagcuguaauacaga

SEQ ID NO: 327873 - RNA, 18 nt, Human
ugggaaggaacgaagagc

SEQ ID NO: 327874 - RNA, 24 nt, Human
ugggaaggaacgaagagcgcggcg

SEQ ID NO: 327875 - RNA, 20 nt, Human
uuccccggcucgcccgcucc

SEQ ID NO: 327876 - RNA, 20 nt, Human
uuccguuuaaaaaggagaga

SEQ ID NO: 327877 - RNA, 18 nt, Human
uuuacaaauuaagugccc

SEQ ID NO: 327878 - RNA, 21 nt, Human
uuuuuuuuuuuuuuuuacugg

SEQ ID NO: 327879 - RNA, 22 nt, Human
uuuuuuuuuuuuuuuuuacugg

SEQ ID NO: 327880 - RNA, 23 nt, Human
uuuuuuuuuuuuuuuuuacuggg

SEQ ID NO: 327881 - RNA, 25 nt, Human
aaccagaguuugggauaccagcccc

SEQ ID NO: 327882 - RNA, 18 nt, Human
accagcccccuccuccca

SEQ ID NO: 327883 - RNA, 20 nt, Human
acccaggagucugggagccc

SEQ ID NO: 327884 - RNA, 20 nt, Human
acucaucugaagcccaccag

SEQ ID NO: 327885 - RNA, 21 nt, Human
agccagaacuccagacccaaa

SEQ ID NO: 327886 - RNA, 23 nt, Human
agccuguuucuuucugcauccug

SEQ ID NO: 327887 - RNA, 24 nt, Human
aggaugccugggcugccgacccag

SEQ ID NO: 327888 - RNA, 21 nt, Human
cacagcacccaggagucuggg

SEQ ID NO: 327889 - RNA, 21 nt, Human
caccagaccacucucuccugg

SEQ ID NO: 327890 - RNA, 22 nt, Human
cacucucuccuggggaaaccag

SEQ ID NO: 327891 - RNA, 20 nt, Human
cagaauccaggccccagccu

SEQ ID NO: 327892 - RNA, 20 nt, Human
cagcacccaggagucuggga

SEQ ID NO: 327893 - RNA, 24 nt, Human
caggaauccagauccccagcuccc

SEQ ID NO: 327894 - RNA, 24 nt, Human
caucugaagcccaccagaccacuc

SEQ ID NO: 327895 - RNA, 23 nt, Human
ccaaauuccuuccugccucagaa

SEQ ID NO: 327896 - RNA, 24 nt, Human
cccagcccucugcucuuccaggaa

SEQ ID NO: 327897 - RNA, 20 nt, Human
ccccagcucccauaggacuc

SEQ ID NO: 327898 - RNA, 18 nt, Human
ccccuccucccacagcac

SEQ ID NO: 327899 - RNA, 19 nt, Human
ccucaaguagccagaacuc

SEQ ID NO: 327900 - RNA, 23 nt, Human
ccucccacagcacccaggaguug

SEQ ID NO: 327901 - RNA, 23 nt, Human
ccuuccugccucagaauccaggc

SEQ ID NO: 327902 - RNA, 18 nt, Human
ccuuccugccuuuggucc

SEQ ID NO: 327903 - RNA, 24 nt, Human
cgaccccagauuauagaagacuga

SEQ ID NO: 327904 - RNA, 24 nt, Human
cuccagacacugccggggacccag

SEQ ID NO: 327905 - RNA, 22 nt, Human
cugaaguaaaaucaaggcagga

SEQ ID NO: 327906 - RNA, 21 nt, Human
cuugaggaugccugggcugcc

SEQ ID NO: 327907 - RNA, 24 nt, Human
gaaccaggaauccagauccccagc

SEQ ID NO: 327908 - RNA, 18 nt, Human
gacccaggagucccaggc

SEQ ID NO: 327909 - RNA, 18 nt, Human
ggagcccagcccucugcu

SEQ ID NO: 327910 - RNA, 18 nt, Human
ggaugguggggugcagag

SEQ ID NO: 327911 - RNA, 18 nt, Human
ggcacagggacucccucc

SEQ ID NO: 327912 - RNA, 22 nt, Human
ucaaggcaggauccuuccugcc

SEQ ID NO: 327913 - RNA, 22 nt, Human
uccagagcuugaggaugccugg

SEQ ID NO: 327914 - RNA, 24 nt, Human
uccagagcuugaggaugccugggc

SEQ ID NO: 327915 - RNA, 19 nt, Human
uccuggaaagaccuaggga

SEQ ID NO: 327916 - RNA, 19 nt, Human
uccuuccugccuuuggucc

SEQ ID NO: 327917 - RNA, 20 nt, Human
ugccugggcugccgacccag

SEQ ID NO: 327918 - RNA, 18 nt, Human
ugcucuuccaggaaucug

SEQ ID NO: 327919 - RNA, 18 nt, Human
uggggugcagagagaccu

SEQ ID NO: 327920 - RNA, 19 nt, Human
uugggauaccagcccccuc

SEQ ID NO: 327921 - RNA, 23 nt, Human
uugggcacagggacucccuccga

SEQ ID NO: 327922 - RNA, 21 nt, Human
uugguccucaaguagccagaa

SEQ ID NO: 327923 - RNA, 22 nt, Human
aaaaaaagugaccucaucccau

SEQ ID NO: 327924 - RNA, 21 nt, Human
aacagaacaaagaauuaagau

SEQ ID NO: 327925 - RNA, 23 nt, Human
aagggggaaaaaaaaaaaaguga

SEQ ID NO: 327926 - RNA, 20 nt, Human
acacgccggagccuagcgcg

SEQ ID NO: 327927 - RNA, 22 nt, Human
accccucccugcgcaaucauca

SEQ ID NO: 327928 - RNA, 20 nt, Human
agacauggcagcggcggcgg

SEQ ID NO: 327929 - RNA, 21 nt, Human
agcccccgacagccccaauuu

SEQ ID NO: 327930 - RNA, 22 nt, Human
agcggcgcccacccccagcgcg

SEQ ID NO: 327931 - RNA, 26 nt, Human
aguacaaaaauauagaucucuacuga

SEQ ID NO: 327932 - RNA, 19 nt, Human
cacaaaacagaacaaagaa

SEQ ID NO: 327933 - RNA, 20 nt, Human
cacguaccccucccugcgca

SEQ ID NO: 327934 - RNA, 22 nt, Human
ccacccauccacagcccccgac

SEQ ID NO: 327935 - RNA, 23 nt, Human
cccacccccagcgcgcggcuacc

SEQ ID NO: 327936 - RNA, 21 nt, Human
ccccggagacauggcagcggc

SEQ ID NO: 327937 - RNA, 22 nt, Human
ccccugaucaaaugagaacaga

SEQ ID NO: 327938 - RNA, 19 nt, Human
cccgacagccccaauuugu

SEQ ID NO: 327939 - RNA, 23 nt, Human
cccugagcgcgcaggggcuucgc

SEQ ID NO: 327940 - RNA, 18 nt, Human
ccgccgugcgcccgagcc

SEQ ID NO: 327941 - RNA, 19 nt, Human
ccgccgugcgcccgagccc

SEQ ID NO: 327942 - RNA, 18 nt, Human
ccgcugccuccuccgcgc

SEQ ID NO: 327943 - RNA, 21 nt, Human
ccggagccuagcgcggcugcc

SEQ ID NO: 327944 - RNA, 20 nt, Human
ccgugcgcccgagcccgggc

SEQ ID NO: 327945 - RNA, 22 nt, Human
ccuccccugaucaaaugagaac

SEQ ID NO: 327946 - RNA, 20 nt, Human
ccuccugccgucuccuucgc

SEQ ID NO: 327947 - RNA, 18 nt, Human
ccugccgucuccuucgcc

SEQ ID NO: 327948 - RNA, 22 nt, Human
cgccccgggcuuccccggagac

SEQ ID NO: 327949 - RNA, 20 nt, Human
cgcccuggaacgugccccgg

SEQ ID NO: 327950 - RNA, 26 nt, Human
cggcggccgcggccacacgccggagc

SEQ ID NO: 327951 - RNA, 19 nt, Human
cggcucccgcgcucguccc

SEQ ID NO: 327952 - RNA, 21 nt, Human
cucaagggggaaaaaaaaaaa

SEQ ID NO: 327953 - RNA, 21 nt, Human
gaaaaaauggagcacaaauca

SEQ ID NO: 327954 - RNA, 22 nt, Human
gauuugcuccccacccauccac

SEQ ID NO: 327955 - RNA, 24 nt, Human
gcagcggcggcggcggccgcggcc

SEQ ID NO: 327956 - RNA, 20 nt, Human
gcccccgacagccccaauuu

SEQ ID NO: 327957 - RNA, 18 nt, Human
gccccgggcuuccccgga

SEQ ID NO: 327958 - RNA, 23 nt, Human
gcccuggaacgugccccggacgc

SEQ ID NO: 327959 - RNA, 18 nt, Human
ggcagcggcggcggcggc

SEQ ID NO: 327960 - RNA, 22 nt, Human
gggaagaaaaaauggagcacaa

SEQ ID NO: 327961 - RNA, 19 nt, Human
gggcaggggaagcggggcc

SEQ ID NO: 327962 - RNA, 26 nt, Human
gucccugagcgcgcaggggcuucgcg

SEQ ID NO: 327963 - RNA, 20 nt, Human
gucuuuuuaaaaaagaaauu

SEQ ID NO: 327964 - RNA, 22 nt, Human
uaaaaaagaaauuguuuuggaa

SEQ ID NO: 327965 - RNA, 24 nt, Human
uaaaaauagaccucugauacuuaa

SEQ ID NO: 327966 - RNA, 22 nt, Human
uaccccucccugcgcaaucauc

SEQ ID NO: 327967 - RNA, 18 nt, Human
uacugaggaagcaaaccu

SEQ ID NO: 327968 - RNA, 21 nt, Human
ucaagggggaaaaaaaaaaaa

SEQ ID NO: 327969 - RNA, 23 nt, Human
ucauagaucccuuuuccugguuu

SEQ ID NO: 327970 - RNA, 21 nt, Human
ucauaugcagcuucaugcccu

SEQ ID NO: 327971 - RNA, 22 nt, Human
uccaucggcuagauuccaagac

SEQ ID NO: 327972 - RNA, 19 nt, Human
uccccgcuccgcccgcccc

SEQ ID NO: 327973 - RNA, 22 nt, Human
ucccgcgcucgucccgcugccu

SEQ ID NO: 327974 - RNA, 19 nt, Human
ucccugagcgcgcaggggc

SEQ ID NO: 327975 - RNA, 23 nt, Human
ucccugagcgcgcaggggcuucg

SEQ ID NO: 327976 - RNA, 18 nt, Human
uccgcgcgucaugcggcu

SEQ ID NO: 327977 - RNA, 18 nt, Human
uggcagcggcggcggcgg

SEQ ID NO: 327978 - RNA, 21 nt, Human
uuuuccgcaauccucaagggg

SEQ ID NO: 327979 - RNA, 22 nt, Human
aaaaaaagaugauuguguggug

SEQ ID NO: 327980 - RNA, 21 nt, Human
aaaaagcuuucuucaggaaaa

SEQ ID NO: 327981 - RNA, 19 nt, Human
aaaauacuuuuaccucuca

SEQ ID NO: 327982 - RNA, 21 nt, Human
aaacaucaagagaaacauuuu

SEQ ID NO: 327983 - RNA, 23 nt, Human
aaagucucccaccccccacauua

SEQ ID NO: 327984 - RNA, 27 nt, Human
aagcuuucuucaggaaaaaaagaugau

SEQ ID NO: 327985 - RNA, 19 nt, Human
aaguguaacagguacaaca

SEQ ID NO: 327986 - RNA, 18 nt, Human
aauagauggacagguuuc

SEQ ID NO: 327987 - RNA, 20 nt, Human
acacuggaaugcuuuaguca

SEQ ID NO: 327988 - RNA, 21 nt, Human
acagccgcccgcccgcccuuu

SEQ ID NO: 327989 - RNA, 19 nt, Human
acagcuuuucuuuucuucu

SEQ ID NO: 327990 - RNA, 23 nt, Human
acccugaaagcauauauguugcc

SEQ ID NO: 327991 - RNA, 20 nt, Human
agucaauuacaaacugcaag

SEQ ID NO: 327992 - RNA, 19 nt, Human
aguuauauauauuuauaua

SEQ ID NO: 327993 - RNA, 22 nt, Human
caaacuaccucaggggcgaaag

SEQ ID NO: 327994 - RNA, 21 nt, Human
caaauguaaaagucucccacc

SEQ ID NO: 327995 - RNA, 19 nt, Human
cacaaguguaacagguaca

SEQ ID NO: 327996 - RNA, 18 nt, Human
cacaggcugaaaaacucc

SEQ ID NO: 327997 - RNA, 21 nt, Human
caccaaaccauuauuuaccua

SEQ ID NO: 327998 - RNA, 20 nt, Human
cagcaaggccuuuuaaugug

SEQ ID NO: 327999 - RNA, 18 nt, Human
caguccuuuuuauuaaga

SEQ ID NO: 328000 - RNA, 24 nt, Human
caucaaaaaaggaauguaaguaac

SEQ ID NO: 328001 - RNA, 21 nt, Human
cauguaaacaucaagagaaac

SEQ ID NO: 328002 - RNA, 24 nt, Human
cauguacacaagagaaucacuaua

SEQ ID NO: 328003 - RNA, 25 nt, Human
cauuuuaucacccugacaguuuaca

SEQ ID NO: 328004 - RNA, 24 nt, Human
cccccacauuaaaaucuuucugca

SEQ ID NO: 328005 - RNA, 20 nt, Human
cccgcccuuuuuccuucuuc

SEQ ID NO: 328006 - RNA, 18 nt, Human
cccuuuuuccuucuucgc

SEQ ID NO: 328007 - RNA, 26 nt, Human
ccggccgcggcggcagcucuccaugc

SEQ ID NO: 328008 - RNA, 21 nt, Human
cgacggaggagcgggccgggc

SEQ ID NO: 328009 - RNA, 19 nt, Human
cgccaaacuaccucagggg

SEQ ID NO: 328010 - RNA, 18 nt, Human
cuccauauagacauauuu

SEQ ID NO: 328011 - RNA, 20 nt, Human
gaccagugcugggccacagg

SEQ ID NO: 328012 - RNA, 20 nt, Human
gaggacggugagaggacagc

SEQ ID NO: 328013 - RNA, 21 nt, Human
gcacagcuuuucuuuucuucu

SEQ ID NO: 328014 - RNA, 19 nt, Human
gcccuuuuuccuucuucgc

SEQ ID NO: 328015 - RNA, 21 nt, Human
gccgcgaaauccacgacggag

SEQ ID NO: 328016 - RNA, 21 nt, Human
ggccucgcggggugaggacgg

SEQ ID NO: 328017 - RNA, 18 nt, Human
uaaaaacuaauucagucc

SEQ ID NO: 328018 - RNA, 19 nt, Human
uaaaaagaacuuuaaauga

SEQ ID NO: 328019 - RNA, 21 nt, Human
uaaaagacccaauugccaagg

SEQ ID NO: 328020 - RNA, 25 nt, Human
uaaaagucucccaccccccacauua

SEQ ID NO: 328021 - RNA, 26 nt, Human
uaagauacacaacuucauaaaaaaaa

SEQ ID NO: 328022 - RNA, 23 nt, Human
uaaguaaccaauaaauauaaugu

SEQ ID NO: 328023 - RNA, 22 nt, Human
uagaaagaggacacuggaaugc

SEQ ID NO: 328024 - RNA, 22 nt, Human
uagcuaaagaaaaagcuuucuu

SEQ ID NO: 328025 - RNA, 21 nt, Human
uauuaaaagacccaauugcca

SEQ ID NO: 328026 - RNA, 22 nt, Human
ucaagagaaacauuuuaucacc

SEQ ID NO: 328027 - RNA, 21 nt, Human
ucaagcagcuuugcaaagagc

SEQ ID NO: 328028 - RNA, 22 nt, Human
ucaauuacaaacugcaagcuga

SEQ ID NO: 328029 - RNA, 21 nt, Human
ucucccaccccccacauuaaa

SEQ ID NO: 328030 - RNA, 24 nt, Human
ugaaaaacuauacauauucagcaa

SEQ ID NO: 328031 - RNA, 19 nt, Human
ugaggacggugagaggaca

SEQ ID NO: 328032 - RNA, 20 nt, Human
ugagucuuuggcuuauguua

SEQ ID NO: 328033 - RNA, 23 nt, Human
ugagucuuuggcuuauguuauuu

SEQ ID NO: 328034 - RNA, 25 nt, Human
ugaugugaaguuacagcuuccacug

SEQ ID NO: 328035 - RNA, 21 nt, Human
ugccaagggauuuuacacaaa

SEQ ID NO: 328036 - RNA, 21 nt, Human
uggaugcacuuuaaagagucu

SEQ ID NO: 328037 - RNA, 19 nt, Human
uggcucaauagauggacag

SEQ ID NO: 328038 - RNA, 22 nt, Human
ugggagaaguuucaagcagcuu

SEQ ID NO: 328039 - RNA, 22 nt, Human
uguaaacaucaagagaaacauu

SEQ ID NO: 328040 - RNA, 22 nt, Human
uguaugaucaccaaaccauuau

SEQ ID NO: 328041 - RNA, 22 nt, Human
ugugaaguuacagcuacgugga

SEQ ID NO: 328042 - RNA, 18 nt, Human
uuaaaauuuaaaugaugc

SEQ ID NO: 328043 - RNA, 23 nt, Human
uuacaauugauuuuagcuaaaga

SEQ ID NO: 328044 - RNA, 23 nt, Human
uucacuuaagaaucccaugacaa

SEQ ID NO: 328045 - RNA, 23 nt, Human
aauuccuucauaagaauauaguu

SEQ ID NO: 328046 - RNA, 21 nt, Human
agcaaaauaagcauauugaga

SEQ ID NO: 328047 - RNA, 19 nt, Human
auuuaucuguuaguccugg

SEQ ID NO: 328048 - RNA, 25 nt, Human
caaaaacauacacucagcuguaaca

SEQ ID NO: 328049 - RNA, 23 nt, Human
caaaauaagcauauugagaaguc

SEQ ID NO: 328050 - RNA, 24 nt, Human
cauaagaauauaguugugcucuuc

SEQ ID NO: 328051 - RNA, 25 nt, Human
cauacaacauaucuuuguucauuac

SEQ ID NO: 328052 - RNA, 21 nt, Human
caucucuuuugcacaaauacc

SEQ ID NO: 328053 - RNA, 21 nt, Human
ccccaaagguacaaauuccuu

SEQ ID NO: 328054 - RNA, 21 nt, Human
gacagaaacgacgacucauac

SEQ ID NO: 328055 - RNA, 21 nt, Human
gaguccucccccaagcuuuuc

SEQ ID NO: 328056 - RNA, 20 nt, Human
gcauucuccacagaacaaaa

SEQ ID NO: 328057 - RNA, 23 nt, Human
gcauucuccacagaacaaaaaca

SEQ ID NO: 328058 - RNA, 23 nt, Human
uaaaaagagccaauuaugcaaag

SEQ ID NO: 328059 - RNA, 21 nt, Human
uauuaccauaaugccagauag

SEQ ID NO: 328060 - RNA, 19 nt, Human
ucagcuguaacaauaacga

SEQ ID NO: 328061 - RNA, 20 nt, Human
uccucccccaagcuuuuccc

SEQ ID NO: 328062 - RNA, 18 nt, Human
ucuccacagaacaaaaac

SEQ ID NO: 328063 - RNA, 21 nt, Human
ucuucaguuuaccagcugucu

SEQ ID NO: 328064 - RNA, 27 nt, Human
ugaauaaauaauuugaugaaaucaaaa

SEQ ID NO: 328065 - RNA, 26 nt, Human
ugcaaagcaaaauaagcauauugaga

SEQ ID NO: 328066 - RNA, 20 nt, Human
ugcaacauguuaaaguacaa

SEQ ID NO: 328067 - RNA, 20 nt, Human
uggaaacaauacaaaucuga

SEQ ID NO: 328068 - RNA, 18 nt, Human
ugggcucuuaaaaagagc

SEQ ID NO: 328069 - RNA, 28 nt, Human
uggguccgugaaucugauccugguccca

SEQ ID NO: 328070 - RNA, 18 nt, Human
uguaacaauaacgagggu

SEQ ID NO: 328071 - RNA, 20 nt, Human
uguguguguguuucugucag

SEQ ID NO: 328072 - RNA, 21 nt, Human
uuugugaacugaguccucccc

SEQ ID NO: 328073 - RNA, 20 nt, Human
acagaggcugggcugcccgc

SEQ ID NO: 328074 - RNA, 22 nt, Human
acaggcaaagagggacagaggc

SEQ ID NO: 328075 - RNA, 18 nt, Human
agaggcaggcccggggcu

SEQ ID NO: 328076 - RNA, 23 nt, Human
agaggcaggcccggggcugagaa

SEQ ID NO: 328077 - RNA, 21 nt, Human
agcgacgcuggcgggagccug

SEQ ID NO: 328078 - RNA, 20 nt, Human
aggcaggagaaggcucuggg

SEQ ID NO: 328079 - RNA, 21 nt, Human
aggcaggagaaggcucugggu

SEQ ID NO: 328080 - RNA, 21 nt, Human
aggcccggggcugagaagcag

SEQ ID NO: 328081 - RNA, 19 nt, Human
aggcucuggcaugcgaggc

SEQ ID NO: 328082 - RNA, 28 nt, Human
agggggagccggguguggccaggagccu

SEQ ID NO: 328083 - RNA, 19 nt, Human
caacacacuaacuuuauuc

SEQ ID NO: 328084 - RNA, 18 nt, Human
cagcgacgcuggcgggag

SEQ ID NO: 328085 - RNA, 19 nt, Human
caggagaaggcucugggua

SEQ ID NO: 328086 - RNA, 18 nt, Human
ccagaggggcugaggcgg

SEQ ID NO: 328087 - RNA, 22 nt, Human
cgagcuccgggcgcucgcuccc

SEQ ID NO: 328088 - RNA, 22 nt, Human
cgcccaagugugagucagaggc

SEQ ID NO: 328089 - RNA, 24 nt, Human
cggggcugagaagcagggggagcc

SEQ ID NO: 328090 - RNA, 22 nt, Human
cucuucuaggaagggcugagca

SEQ ID NO: 328091 - RNA, 20 nt, Human
cugcacagacaacacacuaa

SEQ ID NO: 328092 - RNA, 23 nt, Human
cugcagcacccccaugggaugcc

SEQ ID NO: 328093 - RNA, 29 nt, Human
cugccagaggggcugaggcggggcuugcc

SEQ ID NO: 328094 - RNA, 23 nt, Human
cugguacaaaaguaguuuuuucu

SEQ ID NO: 328095 - RNA, 18 nt, Human
gacagaggcugggcugcc

SEQ ID NO: 328096 - RNA, 20 nt, Human
gagaagcagggggagccggg

SEQ ID NO: 328097 - RNA, 18 nt, Human
gagagagguugagcagcg

SEQ ID NO: 328098 - RNA, 22 nt, Human
gagcuacaggagagccaggcca

SEQ ID NO: 328099 - RNA, 20 nt, Human
gaggccagggagggcagagc

SEQ ID NO: 328100 - RNA, 21 nt, Human
gaggccagggagggcagagcg

SEQ ID NO: 328101 - RNA, 18 nt, Human
gagguggcugguggggca

SEQ ID NO: 328102 - RNA, 21 nt, Human
gcucugggaugccccaggcuc

SEQ ID NO: 328103 - RNA, 21 nt, Human
gcugguggggcagugaggagg

SEQ ID NO: 328104 - RNA, 18 nt, Human
gggaacucccagaacccc

SEQ ID NO: 328105 - RNA, 22 nt, Human
gggaauguaggcaggagaaggc

SEQ ID NO: 328106 - RNA, 18 nt, Human
gggaugccccaggcucug

SEQ ID NO: 328107 - RNA, 18 nt, Human
gggaugcccugggcucug

SEQ ID NO: 328108 - RNA, 21 nt, Human
gggcagagcgcccaaguguga

SEQ ID NO: 328109 - RNA, 23 nt, Human
gggcaggcgugccccuucuggcu

SEQ ID NO: 328110 - RNA, 30 nt, Human
gggccggagccgcagcgacgcuggcgggaa

SEQ ID NO: 328111 - RNA, 18 nt, Human
gggcgugaggccagggag

SEQ ID NO: 328112 - RNA, 24 nt, Human
gggcugcccgccaaggggccccag

SEQ ID NO: 328113 - RNA, 18 nt, Human
ggguggugggaggaggcu

SEQ ID NO: 328114 - RNA, 23 nt, Human
gguggugggaggaggcugggcgu

SEQ ID NO: 328115 - RNA, 20 nt, Human
guccuuuccucuccuccugg

SEQ ID NO: 328116 - RNA, 21 nt, Human
uaggaagggcugagcaugccc

SEQ ID NO: 328117 - RNA, 20 nt, Human
uccauacuggagcauagggg

SEQ ID NO: 328118 - RNA, 23 nt, Human
ucccagaaccccaggagagcuac

SEQ ID NO: 328119 - RNA, 19 nt, Human
uccuccuggcugcagcacc

SEQ ID NO: 328120 - RNA, 21 nt, Human
ugagaagcagggggagccggg

SEQ ID NO: 328121 - RNA, 19 nt, Human
ugcccugggcucugggaug

SEQ ID NO: 328122 - RNA, 18 nt, Human
uggcugcagcacccccau

SEQ ID NO: 328123 - RNA, 27 nt, Human
uggcugguggggcagugaggagugggu

SEQ ID NO: 328124 - RNA, 24 nt, Human
uggcuuucccuuccugacucuucu

SEQ ID NO: 328125 - RNA, 19 nt, Human
ugggaggaggcugggcgug

SEQ ID NO: 328126 - RNA, 20 nt, Human
ugggaggguggugggaggag

SEQ ID NO: 328127 - RNA, 24 nt, Human
ugggaggguggugggaggaggcug

SEQ ID NO: 328128 - RNA, 25 nt, Human
ugggaggguggugggaggaggcugg

SEQ ID NO: 328129 - RNA, 22 nt, Human
ugggcgugaggccagggagggc

SEQ ID NO: 328130 - RNA, 19 nt, Human
ugggcugcccgccaagggg

SEQ ID NO: 328131 - RNA, 24 nt, Human
uggguacacagagaugcucacaca

SEQ ID NO: 328132 - RNA, 28 nt, Human
uggugggaggaggcugggcgugaggcca

SEQ ID NO: 328133 - RNA, 25 nt, Human
uggugggaggguggugggaggaggc

SEQ ID NO: 328134 - RNA, 21 nt, Human
ugugagucagaggcaggcccg

SEQ ID NO: 328135 - RNA, 23 nt, Human
ugugagucagaggcaggcccggg

SEQ ID NO: 328136 - RNA, 22 nt, Human
uuuuuugcagcugcacagacaa

SEQ ID NO: 328137 - RNA, 18 nt, Human
uuuuuuuuuuuuuuuuug

SEQ ID NO: 328138 - RNA, 21 nt, Human
uuuuuuuuuuuuuuuuugcag

SEQ ID NO: 328139 - RNA, 23 nt, Human
uuuuuuuuuuuuuuuuugcagcu

SEQ ID NO: 328140 - RNA, 21 nt, Human
aaaaaacucagcccaaccagc

SEQ ID NO: 328141 - RNA, 21 nt, Human
aaaaaacucagcccaaccagc

SEQ ID NO: 328142 - RNA, 19 nt, Human
aaaaaacucagcccaaccg

SEQ ID NO: 328143 - RNA, 18 nt, Human
aaaagauuacacaguuga

SEQ ID NO: 328144 - RNA, 18 nt, Human
aaaagauuacacaguuga

SEQ ID NO: 328145 - RNA, 19 nt, Human
aaacaaaaagaaaucucug

SEQ ID NO: 328146 - RNA, 19 nt, Human
aaacaaaaagaaaucucug

SEQ ID NO: 328147 - RNA, 20 nt, Human
aaacaaaaagaaaucucugu

SEQ ID NO: 328148 - RNA, 21 nt, Human
aaacucagcccaaccagcaaa

SEQ ID NO: 328149 - RNA, 21 nt, Human
aaacucagcccaaccagcaaa

SEQ ID NO: 328150 - RNA, 24 nt, Human
aaaguaacaggcuucacaaugcca

SEQ ID NO: 328151 - RNA, 24 nt, Human
aaaguaacaggcuucacaaugcca

SEQ ID NO: 328152 - RNA, 19 nt, Human
aaaugaaacugacaaccaa

SEQ ID NO: 328153 - RNA, 18 nt, Human
aacaaaacaaaaagaaau

SEQ ID NO: 328154 - RNA, 18 nt, Human
aacaaaacaaaaagaaau

SEQ ID NO: 328155 - RNA, 21 nt, Human
aacaaaacaaaaagaaaucuu

SEQ ID NO: 328156 - RNA, 24 nt, Human
aacagaacaaggaaugcaaagucu

SEQ ID NO: 328157 - RNA, 24 nt, Human
aacagaacaaggaaugcaaagucu

SEQ ID NO: 328158 - RNA, 22 nt, Human
aaccaaaagaauaacaaaacaa

SEQ ID NO: 328159 - RNA, 22 nt, Human
aaccaaaagaauaacaaaacaa

SEQ ID NO: 328160 - RNA, 21 nt, Human
aaccaucaagaacuagaacag

SEQ ID NO: 328161 - RNA, 21 nt, Human
aaccaucaagaacuagaacag

SEQ ID NO: 328162 - RNA, 22 nt, Human
aaccccucucuucccugaccaa

SEQ ID NO: 328163 - RNA, 22 nt, Human
aaccccucucuucccugaccaa

SEQ ID NO: 328164 - RNA, 21 nt, Human
aacuuguugacagaaaacuuc

SEQ ID NO: 328165 - RNA, 18 nt, Human
aagauuacuuacaccucc

SEQ ID NO: 328166 - RNA, 21 nt, Human
aagcuccuguuuguugccaac

SEQ ID NO: 328167 - RNA, 20 nt, Human
aaggugcauugaaacucaaa

SEQ ID NO: 328168 - RNA, 22 nt, Human
aauccuauccuucccacugguc

SEQ ID NO: 328169 - RNA, 20 nt, Human
acaaaaaaaaguagucaaau

SEQ ID NO: 328170 - RNA, 20 nt, Human
acaaaaaaaaguagucaaau

SEQ ID NO: 328171 - RNA, 23 nt, Human
acaguaagcagccuggugucaca

SEQ ID NO: 328172 - RNA, 19 nt, Human
acaguacuuguuucucccu

SEQ ID NO: 328173 - RNA, 21 nt, Human
accccucucuucccugaccaa

SEQ ID NO: 328174 - RNA, 21 nt, Human
accccucucuucccugaccaa

SEQ ID NO: 328175 - RNA, 26 nt, Human
acccugucauuggcuccucuuccccc

SEQ ID NO: 328176 - RNA, 20 nt, Human
acugaaaaacaaacacuuaa

SEQ ID NO: 328177 - RNA, 20 nt, Human
acugaaaaacaaacacuuaa

SEQ ID NO: 328178 - RNA, 20 nt, Human
acuguuguuuuugguuuuag

SEQ ID NO: 328179 - RNA, 24 nt, Human
agaaucacacacacacaaaaauua

SEQ ID NO: 328180 - RNA, 24 nt, Human
agaaucacacacacacaaaaauua

SEQ ID NO: 328181 - RNA, 24 nt, Human
agaauccauagagacauuugacaa

SEQ ID NO: 328182 - RNA, 24 nt, Human
agaauccauagagacauuugacaa

SEQ ID NO: 328183 - RNA, 18 nt, Human
agacauuugacaauauua

SEQ ID NO: 328184 - RNA, 18 nt, Human
agacauuugacaauauua

SEQ ID NO: 328185 - RNA, 20 nt, Human
aggaagaaaaccaucaagaa

SEQ ID NO: 328186 - RNA, 20 nt, Human
aggaagaaaaccaucaagaa

SEQ ID NO: 328187 - RNA, 20 nt, Human
aggcaguggcaggaagaagg

SEQ ID NO: 328188 - RNA, 23 nt, Human
agggaggaugggcgcacaucaug

SEQ ID NO: 328189 - RNA, 23 nt, Human
agggaggaugggcgcacaucaug

SEQ ID NO: 328190 - RNA, 20 nt, Human
agugaaagaguccaaaagga

SEQ ID NO: 328191 - RNA, 20 nt, Human
agugaaagaguccaaaagga

SEQ ID NO: 328192 - RNA, 20 nt, Human
agugauuuggguggagcugg

SEQ ID NO: 328193 - RNA, 23 nt, Human
aucagcuacucccucuuccaccc

SEQ ID NO: 328194 - RNA, 18 nt, Human
caaaagggccaaggaaga

SEQ ID NO: 328195 - RNA, 18 nt, Human
caaaagggccaaggaaga

SEQ ID NO: 328196 - RNA, 23 nt, Human
caaagaaaucagcuacucccucu

SEQ ID NO: 328197 - RNA, 21 nt, Human
caagugucuucaugaagcucu

SEQ ID NO: 328198 - RNA, 24 nt, Human
caccacugucaucucccuacccuu

SEQ ID NO: 328199 - RNA, 20 nt, Human
cacugguccauaugcuuccc

SEQ ID NO: 328200 - RNA, 22 nt, Human
cagcaacugguuccugaaguuu

SEQ ID NO: 328201 - RNA, 22 nt, Human
cagcccuuguaaucaauaaaau

SEQ ID NO: 328202 - RNA, 18 nt, Human
ccaaaagaauaacaaaac

SEQ ID NO: 328203 - RNA, 18 nt, Human
ccaaaagaauaacaaaac

SEQ ID NO: 328204 - RNA, 20 nt, Human
ccaaccagcaaagggccaac

SEQ ID NO: 328205 - RNA, 20 nt, Human
ccaaccagcaaagggccaac

SEQ ID NO: 328206 - RNA, 21 nt, Human
ccacauauuacaaagcagggc

SEQ ID NO: 328207 - RNA, 21 nt, Human
ccacauauuacaaagcagggc

SEQ ID NO: 328208 - RNA, 24 nt, Human
ccagcucaugucuuuuuguaaccc

SEQ ID NO: 328209 - RNA, 21 nt, Human
cccacagcaaagucacugaag

SEQ ID NO: 328210 - RNA, 22 nt, Human
cccacagcaaagucacugaagu

SEQ ID NO: 328211 - RNA, 23 nt, Human
cccagcaugcugcagucgaccuc

SEQ ID NO: 328212 - RNA, 23 nt, Human
cccagcaugcugcagucgaccuc

SEQ ID NO: 328213 - RNA, 23 nt, Human
cccaugugaggccaggagcuggg

SEQ ID NO: 328214 - RNA, 23 nt, Human
cccuacccugucauuggcuccuc

SEQ ID NO: 328215 - RNA, 21 nt, Human
cccugggcgccgagguugcuc

SEQ ID NO: 328216 - RNA, 20 nt, Human
cccuuuccuccucugcgccc

SEQ ID NO: 328217 - RNA, 22 nt, Human
ccggcggcggcucacaauggcc

SEQ ID NO: 328218 - RNA, 21 nt, Human
ccucagacccugggcgccgag

SEQ ID NO: 328219 - RNA, 20 nt, Human
ccugcgccugcucccuuucc

SEQ ID NO: 328220 - RNA, 22 nt, Human
ccugcgccugcucccuuuccuc

SEQ ID NO: 328221 - RNA, 19 nt, Human
ccugcucccuuuccuccuc

SEQ ID NO: 328222 - RNA, 24 nt, Human
ccugugaaugagacaaagaaagac

SEQ ID NO: 328223 - RNA, 22 nt, Human
ccuuccugcuccauugugcgcu

SEQ ID NO: 328224 - RNA, 18 nt, Human
ccuuuucccccuuccauu

SEQ ID NO: 328225 - RNA, 18 nt, Human
cguggagagcucuucucc

SEQ ID NO: 328226 - RNA, 22 nt, Human
cucucacuaugcucagucucac

SEQ ID NO: 328227 - RNA, 18 nt, Human
cucuccugugaaugagac

SEQ ID NO: 328228 - RNA, 29 nt, Human
cugaagucuggguuuuguucacugccgcu

SEQ ID NO: 328229 - RNA, 19 nt, Human
cugaaguuugguuuucuga

SEQ ID NO: 328230 - RNA, 20 nt, Human
cugaaguuugguuuucugac

SEQ ID NO: 328231 - RNA, 24 nt, Human
cugguccauaugcuucccagacuu

SEQ ID NO: 328232 - RNA, 18 nt, Human
cugguucugagcaaagac

SEQ ID NO: 328233 - RNA, 23 nt, Human
cuuaaaaauaaaaaacucagccc

SEQ ID NO: 328234 - RNA, 23 nt, Human
cuuaaaaauaaaaaacucagccc

SEQ ID NO: 328235 - RNA, 21 nt, Human
cuuugccuuuucccccuucca

SEQ ID NO: 328236 - RNA, 23 nt, Human
cuuuucccccuuccauuuuuuuu

SEQ ID NO: 328237 - RNA, 19 nt, Human
gaaaucagcuacucccucu

SEQ ID NO: 328238 - RNA, 19 nt, Human
gcaagggaggaugggcgca

SEQ ID NO: 328239 - RNA, 19 nt, Human
gcaagggaggaugggcgca

SEQ ID NO: 328240 - RNA, 21 nt, Human
gcaggucaacagaacaaggaa

SEQ ID NO: 328241 - RNA, 21 nt, Human
gcaggucaacagaacaaggaa

SEQ ID NO: 328242 - RNA, 19 nt, Human
gcaguggcaggaagaaggc

SEQ ID NO: 328243 - RNA, 22 nt, Human
gccacauauuacaaagcagggc

SEQ ID NO: 328244 - RNA, 18 nt, Human
gccugcucccuuuccucc

SEQ ID NO: 328245 - RNA, 20 nt, Human
gccuuuucccccuuccauuu

SEQ ID NO: 328246 - RNA, 21 nt, Human
gcuucugugagauaaauuauc

SEQ ID NO: 328247 - RNA, 21 nt, Human
gcuucugugagauaaauuauc

SEQ ID NO: 328248 - RNA, 19 nt, Human
ggacucgggggcacggcug

SEQ ID NO: 328249 - RNA, 21 nt, Human
ggacucgggggcacggcugcg

SEQ ID NO: 328250 - RNA, 31 nt, Human
ggcucacaauggcgaacuggggcugcagccc

SEQ ID NO: 328251 - RNA, 20 nt, Human
ggcugucauggcuaaagcug

SEQ ID NO: 328252 - RNA, 22 nt, Human
ggcugucauggcuaaagcuggu

SEQ ID NO: 328253 - RNA, 24 nt, Human
gggcugucauggcuaaagcuggug

SEQ ID NO: 328254 - RNA, 23 nt, Human
ggggcugucauggcuaaagcugg

SEQ ID NO: 328255 - RNA, 18 nt, Human
ggguugaucugugcaucu

SEQ ID NO: 328256 - RNA, 21 nt, Human
guaaagucaucaugaugugca

SEQ ID NO: 328257 - RNA, 18 nt, Human
guccaaaaggacacugua

SEQ ID NO: 328258 - RNA, 18 nt, Human
guccaaaaggacacugua

SEQ ID NO: 328259 - RNA, 21 nt, Human
gucuaggcaccacgauugcuc

SEQ ID NO: 328260 - RNA, 21 nt, Human
gucuaggcaccacgauugcuc

SEQ ID NO: 328261 - RNA, 22 nt, Human
gugaagcaucccccaauucaaa

SEQ ID NO: 328262 - RNA, 24 nt, Human
gugaagucagagucaauacaaaug

SEQ ID NO: 328263 - RNA, 21 nt, Human
guucaaagaguccaacuugac

SEQ ID NO: 328264 - RNA, 21 nt, Human
guucaaagaguccaacuugac

SEQ ID NO: 328265 - RNA, 21 nt, Human
uaaaaugaaacugacaaccaa

SEQ ID NO: 328266 - RNA, 21 nt, Human
uaaaaugaaacugacaaccaa

SEQ ID NO: 328267 - RNA, 23 nt, Human
uaacaaaacaaaaagaaaucucu

SEQ ID NO: 328268 - RNA, 23 nt, Human
uaacaaaacaaaaagaaaucucu

SEQ ID NO: 328269 - RNA, 18 nt, Human
uaagaaucacacacacac

SEQ ID NO: 328270 - RNA, 18 nt, Human
uaagaaucacacacacac

SEQ ID NO: 328271 - RNA, 18 nt, Human
uaagagcaccauaaagac

SEQ ID NO: 328272 - RNA, 25 nt, Human
uaagagcaccauaaagacuggagac

SEQ ID NO: 328273 - RNA, 24 nt, Human
uaagagcaccauaaagacuggagc

SEQ ID NO: 328274 - RNA, 22 nt, Human
uaagcaggugaagcauccccca

SEQ ID NO: 328275 - RNA, 25 nt, Human
uacaggacguugaauauguuacaag

SEQ ID NO: 328276 - RNA, 26 nt, Human
uacuuugccuuuucccccuuccauuu

SEQ ID NO: 328277 - RNA, 25 nt, Human
uagaaccccucucuucccugaccaa

SEQ ID NO: 328278 - RNA, 18 nt, Human
uagaaugaccauuucuuc

SEQ ID NO: 328279 - RNA, 18 nt, Human
uagaaugaccauuucuuc

SEQ ID NO: 328280 - RNA, 22 nt, Human
uagcggacucccccggcggcgg

SEQ ID NO: 328281 - RNA, 23 nt, Human
uagcggacucccccggcggcggc

SEQ ID NO: 328282 - RNA, 23 nt, Human
uauaaucugaugcuaacaaugcc

SEQ ID NO: 328283 - RNA, 23 nt, Human
uauaaucugaugcuaacaaugcc

SEQ ID NO: 328284 - RNA, 22 nt, Human
uauagucagacacucuacaguc

SEQ ID NO: 328285 - RNA, 22 nt, Human
ucagcccaaccagcaaagggcc

SEQ ID NO: 328286 - RNA, 22 nt, Human
ucagcccaaccagcaaagggcc

SEQ ID NO: 328287 - RNA, 19 nt, Human
ucauaaauucccagcucuu

SEQ ID NO: 328288 - RNA, 19 nt, Human
ucauaaauucccagcucuu

SEQ ID NO: 328289 - RNA, 19 nt, Human
ucaugcaccacugucaucu

SEQ ID NO: 328290 - RNA, 20 nt, Human
uccaaagaauaaaauguuac

SEQ ID NO: 328291 - RNA, 20 nt, Human
uccaaagaauaaaauguuac

SEQ ID NO: 328292 - RNA, 23 nt, Human
uccaacuugacacucuucugaac

SEQ ID NO: 328293 - RNA, 23 nt, Human
uccaacuugacacucuucugaac

SEQ ID NO: 328294 - RNA, 28 nt, Human
ucccaucaugcaccacugucaucucccu

SEQ ID NO: 328295 - RNA, 21 nt, Human
ucccccuuccauuuuuuuacu

SEQ ID NO: 328296 - RNA, 20 nt, Human
ucccggugcuucugugagau

SEQ ID NO: 328297 - RNA, 20 nt, Human
ucccggugcuucugugagau

SEQ ID NO: 328298 - RNA, 23 nt, Human
ucccugaccaaccuccccaaucc

SEQ ID NO: 328299 - RNA, 23 nt, Human
ucccugaccaaccuccccaaucc

SEQ ID NO: 328300 - RNA, 28 nt, Human
ucuaagacugaacacucguggagagcuc

SEQ ID NO: 328301 - RNA, 22 nt, Human
ucuacucuacuuugaagcugaa

SEQ ID NO: 328302 - RNA, 22 nt, Human
ucuacucuacuuugaagcugaa

SEQ ID NO: 328303 - RNA, 27 nt, Human
ucucccaucaugcaccacugucaucuc

SEQ ID NO: 328304 - RNA, 19 nt, Human
ucucguagucaaaacugga

SEQ ID NO: 328305 - RNA, 21 nt, Human
ucucguagucaaaacuggagu

SEQ ID NO: 328306 - RNA, 23 nt, Human
ucugaaccagaugugguuucuug

SEQ ID NO: 328307 - RNA, 23 nt, Human
ucugaaccagaugugguuucuug

SEQ ID NO: 328308 - RNA, 26 nt, Human
ucugugugcugccuccuuucuguggg

SEQ ID NO: 328309 - RNA, 23 nt, Human
ucuguugaauuugguccauuauu

SEQ ID NO: 328310 - RNA, 23 nt, Human
ucuguuuacugaacuaaaugggc

SEQ ID NO: 328311 - RNA, 20 nt, Human
ucuugagaaagaacuuggac

SEQ ID NO: 328312 - RNA, 20 nt, Human
ucuugagaaagaacuuggac

SEQ ID NO: 328313 - RNA, 21 nt, Human
ucuuucuuuauuuuuuauccu

SEQ ID NO: 328314 - RNA, 21 nt, Human
ugaaaaacaaacacuuaaaaa

SEQ ID NO: 328315 - RNA, 21 nt, Human
ugaaaaacaaacacuuaaaaa

SEQ ID NO: 328316 - RNA, 19 nt, Human
ugaaugucuuucccucucc

SEQ ID NO: 328317 - RNA, 18 nt, Human
ugaauuugguccauuauu

SEQ ID NO: 328318 - RNA, 25 nt, Human
ugacaauauuacaaaaaaaaguagu

SEQ ID NO: 328319 - RNA, 25 nt, Human
ugacaauauuacaaaaaaaaguagu

SEQ ID NO: 328320 - RNA, 20 nt, Human
ugacacuacaauuguaggca

SEQ ID NO: 328321 - RNA, 18 nt, Human
ugacagcauucaugucac

SEQ ID NO: 328322 - RNA, 18 nt, Human
ugacagcauucaugucac

SEQ ID NO: 328323 - RNA, 23 nt, Human
ugauaagaaucacacacacacaa

SEQ ID NO: 328324 - RNA, 23 nt, Human
ugauaagaaucacacacacacaa

SEQ ID NO: 328325 - RNA, 22 nt, Human
ugauauuacaggcacagaucca

SEQ ID NO: 328326 - RNA, 22 nt, Human
ugaucuguggguagaaccccuc

SEQ ID NO: 328327 - RNA, 22 nt, Human
ugaucuguggguagaaccccuc

SEQ ID NO: 328328 - RNA, 18 nt, Human
ugauuuggguggagcugg

SEQ ID NO: 328329 - RNA, 20 nt, Human
ugcacugaaaaacaaacacu

SEQ ID NO: 328330 - RNA, 20 nt, Human
ugcacugaaaaacaaacacu

SEQ ID NO: 328331 - RNA, 21 nt, Human
ugcuaauccuauccuucccac

SEQ ID NO: 328332 - RNA, 22 nt, Human
ugcugccuccuuucuguggguc

SEQ ID NO: 328333 - RNA, 22 nt, Human
uggcuaaagcuggugacacuac

SEQ ID NO: 328334 - RNA, 25 nt, Human
uggcuccucuucccccaguauaguc

SEQ ID NO: 328335 - RNA, 19 nt, Human
ugggaagaaacagcaacug

SEQ ID NO: 328336 - RNA, 21 nt, Human
ugggaagaaacagcaacuggu

SEQ ID NO: 328337 - RNA, 21 nt, Human
ugggaagaaacagcaacuggu

SEQ ID NO: 328338 - RNA, 24 nt, Human
uggguagagggaauggagguaaag

SEQ ID NO: 328339 - RNA, 18 nt, Human
uggguuuuguucacugcg

SEQ ID NO: 328340 - RNA, 18 nt, Human
ugguuuucugacuggagc

SEQ ID NO: 328341 - RNA, 27 nt, Human
ugucccagcaugcugcagucgaccuac

SEQ ID NO: 328342 - RNA, 18 nt, Human
ugugaggccaggagcugg

SEQ ID NO: 328343 - RNA, 23 nt, Human
uguugacagaaaacuucaaagaa

SEQ ID NO: 328344 - RNA, 20 nt, Human
uguuguuuuugguuuuagga

SEQ ID NO: 328345 - RNA, 25 nt, Human
uuaaaaauaaaaaacucagcccaac

SEQ ID NO: 328346 - RNA, 25 nt, Human
uuaaaaauaaaaaacucagcccaac

SEQ ID NO: 328347 - RNA, 24 nt, Human
uucauugccauaacuucauaaauu

SEQ ID NO: 328348 - RNA, 24 nt, Human
uucauugccauaacuucauaaauu

SEQ ID NO: 328349 - RNA, 25 nt, Human
uucccagacuuucaugauucuccca

SEQ ID NO: 328350 - RNA, 26 nt, Human
uuccuuccuggguuauggggcugguc

SEQ ID NO: 328351 - RNA, 26 nt, Human
uuccuuccuggguuauggggcugguc

SEQ ID NO: 328352 - RNA, 20 nt, Human
uuggaugguaguauccugau

SEQ ID NO: 328353 - RNA, 22 nt, Human
uuggguggagcugguucugagc

SEQ ID NO: 328354 - RNA, 18 nt, Human
uuucccccuuccauuuuu

SEQ ID NO: 328355 - RNA, 23 nt, Human
aaggaucauggggugaugggaug

SEQ ID NO: 328356 - RNA, 18 nt, Human
accauccccccacccccc

SEQ ID NO: 328357 - RNA, 24 nt, Human
accccccaccccggaaucugguuu

SEQ ID NO: 328358 - RNA, 19 nt, Human
agaggcauccggggccagu

SEQ ID NO: 328359 - RNA, 23 nt, Human
agcaggggaggguccugcagggg

SEQ ID NO: 328360 - RNA, 21 nt, Human
aggcgaguggggaaauccagg

SEQ ID NO: 328361 - RNA, 21 nt, Human
auggugcagaaacacagcugc

SEQ ID NO: 328362 - RNA, 25 nt, Human
caccccccaccccggaaucugguuu

SEQ ID NO: 328363 - RNA, 22 nt, Human
cacccuccucugguucugggga

SEQ ID NO: 328364 - RNA, 20 nt, Human
cauccccccaccccccaccc

SEQ ID NO: 328365 - RNA, 21 nt, Human
cauccccccaccccccacccc

SEQ ID NO: 328366 - RNA, 19 nt, Human
ccacccuccucugguucug

SEQ ID NO: 328367 - RNA, 19 nt, Human
ccagggaggucgcuggggc

SEQ ID NO: 328368 - RNA, 20 nt, Human
ccagggaggucgcuggggcg

SEQ ID NO: 328369 - RNA, 18 nt, Human
ccccaccccccaccccgg

SEQ ID NO: 328370 - RNA, 19 nt, Human
ccccaccccccaccccgga

SEQ ID NO: 328371 - RNA, 19 nt, Human
ccccccaccccccaccccg

SEQ ID NO: 328372 - RNA, 22 nt, Human
ccccccaccccccaccccggaa

SEQ ID NO: 328373 - RNA, 24 nt, Human
cccccgggucccccuaccaccgcu

SEQ ID NO: 328374 - RNA, 23 nt, Human
ccuccugcccugcccacuggggg

SEQ ID NO: 328375 - RNA, 20 nt, Human
cgaccuccgaucuccgcccu

SEQ ID NO: 328376 - RNA, 18 nt, Human
cgcugggggaggacgagg

SEQ ID NO: 328377 - RNA, 25 nt, Human
cggcggccgugccagggaggucgcu

SEQ ID NO: 328378 - RNA, 24 nt, Human
cucaccauccccccaccccccacc

SEQ ID NO: 328379 - RNA, 25 nt, Human
cucaccauccccccaccccccaccc

SEQ ID NO: 328380 - RNA, 23 nt, Human
cugcugccgcugccaccuccugc

SEQ ID NO: 328381 - RNA, 24 nt, Human
gagcaggggaggguccugcagggg

SEQ ID NO: 328382 - RNA, 22 nt, Human
gcagagcggggaggagcccccc

SEQ ID NO: 328383 - RNA, 24 nt, Human
gcccacuggggguccaggccucag

SEQ ID NO: 328384 - RNA, 18 nt, Human
gccggggccggugggggg

SEQ ID NO: 328385 - RNA, 18 nt, Human
gcggccggggccgguggg

SEQ ID NO: 328386 - RNA, 24 nt, Human
gcucaccauccccccaccccccac

SEQ ID NO: 328387 - RNA, 19 nt, Human
gcuguucaugggacaaugg

SEQ ID NO: 328388 - RNA, 24 nt, Human
ggcagagggagggucacauggagc

SEQ ID NO: 328389 - RNA, 18 nt, Human
ggcauccggggccagugg

SEQ ID NO: 328390 - RNA, 18 nt, Human
ggccaguggugucgggcc

SEQ ID NO: 328391 - RNA, 22 nt, Human
ggccggggccggugggggggcu

SEQ ID NO: 328392 - RNA, 22 nt, Human
gggcagaggcauccggggccag

SEQ ID NO: 328393 - RNA, 24 nt, Human
gggcggccggggccgguggggggg

SEQ ID NO: 328394 - RNA, 20 nt, Human
ggggccaguggugucgggcc

SEQ ID NO: 328395 - RNA, 21 nt, Human
ggugucgggccugggggggac

SEQ ID NO: 328396 - RNA, 20 nt, Human
gugccccacccuccucuggu

SEQ ID NO: 328397 - RNA, 24 nt, Human
guucuggggagcacuccuauuugc

SEQ ID NO: 328398 - RNA, 19 nt, Human
ucaccauccccccaccccc

SEQ ID NO: 328399 - RNA, 23 nt, Human
uccaggagaccuucauggaggag

SEQ ID NO: 328400 - RNA, 19 nt, Human
uccccccaccccccacccc

SEQ ID NO: 328401 - RNA, 26 nt, Human
uccccccaccccccaccccggaaucu

SEQ ID NO: 328402 - RNA, 23 nt, Human
ucccucacagagaggccucgagc

SEQ ID NO: 328403 - RNA, 21 nt, Human
ugcagaaacacagcugcugcc

SEQ ID NO: 328404 - RNA, 21 nt, Human
ugccagggaggucgcuggggc

SEQ ID NO: 328405 - RNA, 18 nt, Human
uggaggaggcagagggag

SEQ ID NO: 328406 - RNA, 23 nt, Human
uggaggaggcagagggagggucc

SEQ ID NO: 328407 - RNA, 21 nt, Human
uggccccccggucccucacag

SEQ ID NO: 328408 - RNA, 27 nt, Human
uggggcggccggggccggugggggggc

SEQ ID NO: 328409 - RNA, 18 nt, Human
uuugcucaccaucccccc

SEQ ID NO: 328410 - RNA, 19 nt, Human
uuugcucaccaucccccca

SEQ ID NO: 328411 - RNA, 21 nt, Human
aaaaaaauaccacaauuccau

SEQ ID NO: 328412 - RNA, 23 nt, Human
aaauacagcuaaaaauuugacac

SEQ ID NO: 328413 - RNA, 18 nt, Human
aaccugauaauugcuaca

SEQ ID NO: 328414 - RNA, 18 nt, Human
aacuugacucaguaguaa

SEQ ID NO: 328415 - RNA, 23 nt, Human
acaauuacacagaacuagaaaac

SEQ ID NO: 328416 - RNA, 19 nt, Human
acaugcugaaacaaaguua

SEQ ID NO: 328417 - RNA, 23 nt, Human
agaaaacugguagaguaagacca

SEQ ID NO: 328418 - RNA, 21 nt, Human
agcaaaccugauaauugcuac

SEQ ID NO: 328419 - RNA, 18 nt, Human
aguggagagggaggggga

SEQ ID NO: 328420 - RNA, 21 nt, Human
aguuuggaauuccuaaccucu

SEQ ID NO: 328421 - RNA, 18 nt, Human
auggagacacuagggcag

SEQ ID NO: 328422 - RNA, 21 nt, Human
auuccauucuuagaaauacug

SEQ ID NO: 328423 - RNA, 20 nt, Human
caaaaguuaaaauuacaugc

SEQ ID NO: 328424 - RNA, 21 nt, Human
cacagaacuagaaaacuugac

SEQ ID NO: 328425 - RNA, 18 nt, Human
cagaacuagaaaacuuga

SEQ ID NO: 328426 - RNA, 24 nt, Human
caguaguaaaauauaaaaauccua

SEQ ID NO: 328427 - RNA, 24 nt, Human
ccacaaaaguuaaaauuacaugcu

SEQ ID NO: 328428 - RNA, 21 nt, Human
cuacuguauuaaaaguuauau

SEQ ID NO: 328429 - RNA, 20 nt, Human
cuagcaaaccugauaauugc

SEQ ID NO: 328430 - RNA, 19 nt, Human
cucagaguggagagggagg

SEQ ID NO: 328431 - RNA, 23 nt, Human
gagcgaaggaaauguuuuuuuug

SEQ ID NO: 328432 - RNA, 19 nt, Human
gaguccccccaccccuuuc

SEQ ID NO: 328433 - RNA, 26 nt, Human
uaaacuaaacaauuacacagaacuag

SEQ ID NO: 328434 - RNA, 24 nt, Human
uaaguaaauuacaagucuugcaaa

SEQ ID NO: 328435 - RNA, 20 nt, Human
uacacagaacuagaaaacuu

SEQ ID NO: 328436 - RNA, 25 nt, Human
uacagaaaaaaauaccacaauucca

SEQ ID NO: 328437 - RNA, 20 nt, Human
uacagcuaaaaauuugacac

SEQ ID NO: 328438 - RNA, 22 nt, Human
uacgucauuaaacuaaacaauu

SEQ ID NO: 328439 - RNA, 19 nt, Human
uaggaagaggaaaacaaug

SEQ ID NO: 328440 - RNA, 23 nt, Human
ucaauacagaaaaaaauaccaca

SEQ ID NO: 328441 - RNA, 23 nt, Human
ucauauggaagaguguuuuauuu

SEQ ID NO: 328442 - RNA, 21 nt, Human
ucaugaaaguuacugucaggu

SEQ ID NO: 328443 - RNA, 22 nt, Human
ugaacuacgucauuaaacuaaa

SEQ ID NO: 328444 - RNA, 21 nt, Human
uguauagaucgaagugagauc

SEQ ID NO: 328445 - RNA, 19 nt, Human
uguuuuaauccuccagugu

SEQ ID NO: 328446 - RNA, 22 nt, Human
uuaaacuaaacaauuacacaga

SEQ ID NO: 328447 - RNA, 22 nt, Human
uucaaaaugaagguauuucuau

SEQ ID NO: 328448 - RNA, 23 nt, Human
uuugacacuaaaaacaaacuagg

SEQ ID NO: 328449 - RNA, 25 nt, Human
uuuucuguaguuuggaauuccuaac

SEQ ID NO: 328450 - RNA, 19 nt, Human
uuuuguuuguuuguuuuaa

SEQ ID NO: 328451 - RNA, 22 nt, Human
uuuuuuuuuuuuuuuuuaaugg

SEQ ID NO: 328452 - RNA, 20 nt, Human
aaauaaucccacaccaaaac

SEQ ID NO: 328453 - RNA, 24 nt, Human
agaaagaaacugggcuuugugcaa

SEQ ID NO: 328454 - RNA, 21 nt, Human
aucaaaaucuuuuucaaacac

SEQ ID NO: 328455 - RNA, 19 nt, Human
caaacacagaaagaaacug

SEQ ID NO: 328456 - RNA, 22 nt, Human
caccuccucccgccgcgcggcc

SEQ ID NO: 328457 - RNA, 24 nt, Human
ccgccgcgcggccggugccuccuc

SEQ ID NO: 328458 - RNA, 20 nt, Human
cucggccggcaccuccuccc

SEQ ID NO: 328459 - RNA, 25 nt, Human
gucacuugaauuuuauuucuuuaag

SEQ ID NO: 328460 - RNA, 24 nt, Human
uaaaugauuuucaggauguauauu

SEQ ID NO: 328461 - RNA, 20 nt, Human
uauuucuuuaagauucaccu

SEQ ID NO: 328462 - RNA, 19 nt, Human
ucaaauaaucccacaccaa

SEQ ID NO: 328463 - RNA, 24 nt, Human
ucccacaccaaaacauuuugugaa

SEQ ID NO: 328464 - RNA, 18 nt, Human
ucugcggugcucggccgg

SEQ ID NO: 328465 - RNA, 23 nt, Human
ugaccucuuaauauuccaagggg

SEQ ID NO: 328466 - RNA, 19 nt, Human
ugagguaauggagaaaaca

SEQ ID NO: 328467 - RNA, 22 nt, Human
ugagguaauggagaaaacaaaa

SEQ ID NO: 328468 - RNA, 26 nt, Human
uguguacguacaacaaucacguggug

SEQ ID NO: 328469 - RNA, 24 nt, Human
uugcuuucaaauaaucccacacca

SEQ ID NO: 328470 - RNA, 23 nt, Human
uuugugcaaugcuaaccccaaua

SEQ ID NO: 328471 - RNA, 24 nt, Human
aaauacacacaaacucugaagcac

SEQ ID NO: 328472 - RNA, 24 nt, Human
acacacaaacucugaagcacuaag

SEQ ID NO: 328473 - RNA, 19 nt, Human
acucugaagcacuaagaaa

SEQ ID NO: 328474 - RNA, 22 nt, Human
caaacucugaagcacuaagaaa

SEQ ID NO: 328475 - RNA, 24 nt, Human
cuguugaagaaugcuuuauuaaua

SEQ ID NO: 328476 - RNA, 22 nt, Human
uugcaggucuuaacagccgcau

SEQ ID NO: 328477 - RNA, 19 nt, Human
uuuuuuuuuuuuuuuuucu

SEQ ID NO: 328478 - RNA, 21 nt, Human
uuuuuuuuuuuuuuuuucugg

SEQ ID NO: 328479 - RNA, 22 nt, Human
uuuuuuuuuuuuuuuuucuguu

SEQ ID NO: 328480 - RNA, 20 nt, Human
aaaaaagcccaaaccccaaa

SEQ ID NO: 328481 - RNA, 21 nt, Human
aaaaaagcccaaaccccaaag

SEQ ID NO: 328482 - RNA, 21 nt, Human
aaaaagcccaaaccccaaaga

SEQ ID NO: 328483 - RNA, 22 nt, Human
aaaccguuuuauuggaaacugg

SEQ ID NO: 328484 - RNA, 18 nt, Human
aaacugguuaaaaauuaa

SEQ ID NO: 328485 - RNA, 23 nt, Human
aaagcagcucgccccgcucccuc

SEQ ID NO: 328486 - RNA, 18 nt, Human
aagcggauuuugcacgca

SEQ ID NO: 328487 - RNA, 21 nt, Human
aagcgucgggacugaugugcu

SEQ ID NO: 328488 - RNA, 23 nt, Human
aagcuuccaagggaaaaagauuc

SEQ ID NO: 328489 - RNA, 21 nt, Human
aagcuuuaugguuuccuugag

SEQ ID NO: 328490 - RNA, 21 nt, Human
aaggcuggcagguucacuggc

SEQ ID NO: 328491 - RNA, 21 nt, Human
aauggccaccccccagacagc

SEQ ID NO: 328492 - RNA, 22 nt, Human
acaagcggucuccgcccggaac

SEQ ID NO: 328493 - RNA, 21 nt, Human
acagauguacacagucaaaaa

SEQ ID NO: 328494 - RNA, 21 nt, Human
acugagcgcaagggcugacua

SEQ ID NO: 328495 - RNA, 20 nt, Human
acugaggaugccaacagggc

SEQ ID NO: 328496 - RNA, 21 nt, Human
agaaacgcaggguucugcccu

SEQ ID NO: 328497 - RNA, 21 nt, Human
agaaggucaccagucugcaag

SEQ ID NO: 328498 - RNA, 23 nt, Human
agagagaaacgcaggguucugcc

SEQ ID NO: 328499 - RNA, 20 nt, Human
agcagcucgccccgcucccu

SEQ ID NO: 328500 - RNA, 23 nt, Human
agcuuguuaguggacagagagaa

SEQ ID NO: 328501 - RNA, 20 nt, Human
aggcagcgagaggccugcag

SEQ ID NO: 328502 - RNA, 25 nt, Human
agugcgcagccucaaaaagcagcuc

SEQ ID NO: 328503 - RNA, 20 nt, Human
aucugccccgccccucgcca

SEQ ID NO: 328504 - RNA, 21 nt, Human
augaggcagaaggagcaccag

SEQ ID NO: 328505 - RNA, 23 nt, Human
augaggcagaaggagcaccagcg

SEQ ID NO: 328506 - RNA, 19 nt, Human
caaccgagcccuagcgcca

SEQ ID NO: 328507 - RNA, 26 nt, Human
caacgggcucgccucccggcgcggcu

SEQ ID NO: 328508 - RNA, 27 nt, Human
caacuccgacuccagcacaagcggucu

SEQ ID NO: 328509 - RNA, 19 nt, Human
caacuggugcugcugaggc

SEQ ID NO: 328510 - RNA, 20 nt, Human
caagacgagaggacuguccu

SEQ ID NO: 328511 - RNA, 23 nt, Human
caagaugcgcacacagacgcugu

SEQ ID NO: 328512 - RNA, 21 nt, Human
caccagcgccugcuggguggu

SEQ ID NO: 328513 - RNA, 21 nt, Human
cagacuguguacuggagcccc

SEQ ID NO: 328514 - RNA, 21 nt, Human
cagccugaagaacuggguaca

SEQ ID NO: 328515 - RNA, 19 nt, Human
cagggaauagaaggucacc

SEQ ID NO: 328516 - RNA, 22 nt, Human
ccaaaaagggccugaauuuuua

SEQ ID NO: 328517 - RNA, 20 nt, Human
ccaaagauuucuuauuucaa

SEQ ID NO: 328518 - RNA, 18 nt, Human
ccaccccccagacagccc

SEQ ID NO: 328519 - RNA, 19 nt, Human
ccaccccccagacagccca

SEQ ID NO: 328520 - RNA, 18 nt, Human
ccagacagcccaacaggc

SEQ ID NO: 328521 - RNA, 19 nt, Human
ccagagaagcccacucaga

SEQ ID NO: 328522 - RNA, 22 nt, Human
cccaaugcuauuuaauacaauu

SEQ ID NO: 328523 - RNA, 21 nt, Human
cccacaccgcuggcacacgag

SEQ ID NO: 328524 - RNA, 20 nt, Human
ccccagacagcccaacaggc

SEQ ID NO: 328525 - RNA, 18 nt, Human
cccccagacagcccaaca

SEQ ID NO: 328526 - RNA, 22 nt, Human
ccccguccuccccacaccgcug

SEQ ID NO: 328527 - RNA, 23 nt, Human
ccccgugucaucagcaaaagccg

SEQ ID NO: 328528 - RNA, 20 nt, Human
cccgccccucgccaacgggc

SEQ ID NO: 328529 - RNA, 21 nt, Human
cccggcugggcugggcugcgg

SEQ ID NO: 328530 - RNA, 19 nt, Human
cccguccccacgaucccua

SEQ ID NO: 328531 - RNA, 19 nt, Human
cccuaaauggccacccccc

SEQ ID NO: 328532 - RNA, 19 nt, Human
ccgcccggaacagccgcgg

SEQ ID NO: 328533 - RNA, 21 nt, Human
ccggaacagccgcggcgccgg

SEQ ID NO: 328534 - RNA, 20 nt, Human
ccggaaguggaccugcgagg

SEQ ID NO: 328535 - RNA, 22 nt, Human
cgaucccuaaauggccaccccc

SEQ ID NO: 328536 - RNA, 22 nt, Human
cggaacagccgcggcgccggaa

SEQ ID NO: 328537 - RNA, 22 nt, Human
cggcugggcugggcugcggagc

SEQ ID NO: 328538 - RNA, 22 nt, Human
cuacaaauacaaaugcccaaga

SEQ ID NO: 328539 - RNA, 18 nt, Human
cucagcugacucuggaca

SEQ ID NO: 328540 - RNA, 18 nt, Human
cucccggcugggcugggc

SEQ ID NO: 328541 - RNA, 18 nt, Human
cucccggcugggcugggc

SEQ ID NO: 328542 - RNA, 20 nt, Human
cucccggcugggcugggcug

SEQ ID NO: 328543 - RNA, 21 nt, Human
cucuccggccgccuguccugg

SEQ ID NO: 328544 - RNA, 24 nt, Human
cugccccguccuccccacaccgcu

SEQ ID NO: 328545 - RNA, 24 nt, Human
cuggccaaggucaggagaccgcaa

SEQ ID NO: 328546 - RNA, 20 nt, Human
cuguccuggaaggcuggcag

SEQ ID NO: 328547 - RNA, 21 nt, Human
cuguccuggaaggcuggcagg

SEQ ID NO: 328548 - RNA, 18 nt, Human
cuucaggggcagcucucc

SEQ ID NO: 328549 - RNA, 21 nt, Human
gaaacagagaugaacagggaa

SEQ ID NO: 328550 - RNA, 18 nt, Human
gaaggagcaccagcgccu

SEQ ID NO: 328551 - RNA, 19 nt, Human
gacucuggacacaccugcu

SEQ ID NO: 328552 - RNA, 20 nt, Human
gagaaugacagccacagcgc

SEQ ID NO: 328553 - RNA, 19 nt, Human
gaggacuguccuucagggg

SEQ ID NO: 328554 - RNA, 21 nt, Human
gcacgcacacuacugcauuca

SEQ ID NO: 328555 - RNA, 23 nt, Human
gcacgcacacuacugcauucaua

SEQ ID NO: 328556 - RNA, 21 nt, Human
gccaugcgagugcgcagccuc

SEQ ID NO: 328557 - RNA, 24 nt, Human
gccccguccuccccacaccgcugg

SEQ ID NO: 328558 - RNA, 18 nt, Human
gcccucagcugacucugg

SEQ ID NO: 328559 - RNA, 20 nt, Human
gccugaauuuuuauaugaag

SEQ ID NO: 328560 - RNA, 18 nt, Human
ggaccugcgagguggggc

SEQ ID NO: 328561 - RNA, 22 nt, Human
ggcagcacuuuucagugacuuc

SEQ ID NO: 328562 - RNA, 22 nt, Human
ggcccagagccgggccugugga

SEQ ID NO: 328563 - RNA, 19 nt, Human
ggcuggaagcuggacuggu

SEQ ID NO: 328564 - RNA, 25 nt, Human
uaaaaauuguccaaaaagggccuga

SEQ ID NO: 328565 - RNA, 27 nt, Human
uaaaauucaaggcaauccuccggccgg

SEQ ID NO: 328566 - RNA, 22 nt, Human
uaaaccguuuuauuggaaacug

SEQ ID NO: 328567 - RNA, 22 nt, Human
uaaaucuagaaacagagaugaa

SEQ ID NO: 328568 - RNA, 21 nt, Human
uacaaaugcccaagaggucag

SEQ ID NO: 328569 - RNA, 25 nt, Human
uacacagucaaaaaggcuuaucgag

SEQ ID NO: 328570 - RNA, 23 nt, Human
uacuggagccccgugucaucagc

SEQ ID NO: 328571 - RNA, 19 nt, Human
uagaaacagagaugaacag

SEQ ID NO: 328572 - RNA, 20 nt, Human
uauaaaaaagcccaaacccc

SEQ ID NO: 328573 - RNA, 23 nt, Human
uauaaaaaagcccaaaccccaaa

SEQ ID NO: 328574 - RNA, 21 nt, Human
ucacaaccgagcccuagcgcc

SEQ ID NO: 328575 - RNA, 24 nt, Human
ucacgcugaagacagucuucucag

SEQ ID NO: 328576 - RNA, 28 nt, Human
ucagugacuuccccgcacgcugcuuucc

SEQ ID NO: 328577 - RNA, 18 nt, Human
uccaaacuuccuuaggca

SEQ ID NO: 328578 - RNA, 22 nt, Human
uccccgcacgcugcuuucccug

SEQ ID NO: 328579 - RNA, 25 nt, Human
uccccgcacgcugcuuucccugcca

SEQ ID NO: 328580 - RNA, 27 nt, Human
uccccgcacgcugcuuucccugccacg

SEQ ID NO: 328581 - RNA, 22 nt, Human
ucccggcugggcugggcugcgg

SEQ ID NO: 328582 - RNA, 24 nt, Human
ucccggcugggcugggcugcggag

SEQ ID NO: 328583 - RNA, 26 nt, Human
ucccuaaauggccaccccccagacag

SEQ ID NO: 328584 - RNA, 19 nt, Human
uccugccccguccucccca

SEQ ID NO: 328585 - RNA, 19 nt, Human
ucgccaucugccccgcccc

SEQ ID NO: 328586 - RNA, 20 nt, Human
ucgccccgcucccucgccaa

SEQ ID NO: 328587 - RNA, 26 nt, Human
ucuugggguggaccccgucccaccag

SEQ ID NO: 328588 - RNA, 20 nt, Human
ugaaaauggaacgcauccuu

SEQ ID NO: 328589 - RNA, 19 nt, Human
ugaagugugaaaauggaac

SEQ ID NO: 328590 - RNA, 21 nt, Human
ugaauaaacaauacaaagucc

SEQ ID NO: 328591 - RNA, 19 nt, Human
ugacuaaaucuagaaacag

SEQ ID NO: 328592 - RNA, 20 nt, Human
ugcacgcacacuacugcauu

SEQ ID NO: 328593 - RNA, 23 nt, Human
ugcacgcacacuacugcauucau

SEQ ID NO: 328594 - RNA, 24 nt, Human
ugcacgcacacuacugcauucaua

SEQ ID NO: 328595 - RNA, 21 nt, Human
ugcaggcacugaggaugccag

SEQ ID NO: 328596 - RNA, 24 nt, Human
ugccugugaacuuuaguucacgcu

SEQ ID NO: 328597 - RNA, 19 nt, Human
ugcgagguggggccaugcg

SEQ ID NO: 328598 - RNA, 23 nt, Human
ugcgcacacagacgcuguccgug

SEQ ID NO: 328599 - RNA, 19 nt, Human
uggagcguuacaacuccga

SEQ ID NO: 328600 - RNA, 22 nt, Human
ugggcugggcugcggagcgugc

SEQ ID NO: 328601 - RNA, 27 nt, Human
ugggcugggcugcggagcgugcaccuc

SEQ ID NO: 328602 - RNA, 22 nt, Human
ugugaaaauggaacgcauccuu

SEQ ID NO: 328603 - RNA, 24 nt, Human
uuaguggacagagagaaacgcagg

SEQ ID NO: 328604 - RNA, 23 nt, Human
uucaggggcagcucuccggccgc

SEQ ID NO: 328605 - RNA, 24 nt, Human
uucaggggcagcucuccggccgcc

SEQ ID NO: 328606 - RNA, 24 nt, Human
uucagugacuuccccgcacgcugc

SEQ ID NO: 328607 - RNA, 21 nt, Human
uucuaguaaagauacaaauuu

SEQ ID NO: 328608 - RNA, 22 nt, Human
uugcgugugaagcuuguuaguc

SEQ ID NO: 328609 - RNA, 19 nt, Human
uuuacagaaacgugggcag

SEQ ID NO: 328610 - RNA, 19 nt, Human
uuuuaaaauucaaggcaau

SEQ ID NO: 328611 - RNA, 24 nt, Human
aacgugacauucgauuauaacaca

SEQ ID NO: 328612 - RNA, 22 nt, Human
aguauuuggccaguacaaauaa

SEQ ID NO: 328613 - RNA, 22 nt, Human
auaaagucuaguaacauuaucc

SEQ ID NO: 328614 - RNA, 18 nt, Human
caaagaaaaguaaaacaa

SEQ ID NO: 328615 - RNA, 19 nt, Human
caaaguucuuuccacagcu

SEQ ID NO: 328616 - RNA, 20 nt, Human
caauacaguccuuuuuaauu

SEQ ID NO: 328617 - RNA, 22 nt, Human
cauuuauaguuguuaagucacc

SEQ ID NO: 328618 - RNA, 22 nt, Human
ccaaaacaaaauuaaccaaaga

SEQ ID NO: 328619 - RNA, 24 nt, Human
ccucuguucaacaauacaguccuu

SEQ ID NO: 328620 - RNA, 27 nt, Human
cucaacucucucuuucauuagucucaa

SEQ ID NO: 328621 - RNA, 20 nt, Human
cugaaagcaccauggcauau

SEQ ID NO: 328622 - RNA, 19 nt, Human
cuggagagacgcaaaguuc

SEQ ID NO: 328623 - RNA, 21 nt, Human
gaaaaguaaaacaauuguccc

SEQ ID NO: 328624 - RNA, 20 nt, Human
gacauucgauuauaacacau

SEQ ID NO: 328625 - RNA, 23 nt, Human
gagagacgcaaaguucuuuccac

SEQ ID NO: 328626 - RNA, 18 nt, Human
gccaaaacaaaauuaacc

SEQ ID NO: 328627 - RNA, 19 nt, Human
gguacauaccaauaacaau

SEQ ID NO: 328628 - RNA, 23 nt, Human
guaaaauucaucucuggccaaaa

SEQ ID NO: 328629 - RNA, 19 nt, Human
gucucaacucucucuuuca

SEQ ID NO: 328630 - RNA, 21 nt, Human
gugaguuucuuucuuuggcuu

SEQ ID NO: 328631 - RNA, 23 nt, Human
uaacacauaaacuacauuuauag

SEQ ID NO: 328632 - RNA, 22 nt, Human
uaaccaaagaaaaguaaaacaa

SEQ ID NO: 328633 - RNA, 22 nt, Human
uauccucaaaagcuuuuuccaa

SEQ ID NO: 328634 - RNA, 20 nt, Human
uaugacuaucuucucaaaaa

SEQ ID NO: 328635 - RNA, 21 nt, Human
ucaacucucucuuucauuagu

SEQ ID NO: 328636 - RNA, 22 nt, Human
uccacagcuggcgggaggagac

SEQ ID NO: 328637 - RNA, 25 nt, Human
ucuggccaaaacaaaauuaaccaaa

SEQ ID NO: 328638 - RNA, 24 nt, Human
ugaaagcaccauggcauaaagucu

SEQ ID NO: 328639 - RNA, 21 nt, Human
uggcauguguuuuaaguguga

SEQ ID NO: 328640 - RNA, 22 nt, Human
uggccaaaacaaaauuaaccaa

SEQ ID NO: 328641 - RNA, 23 nt, Human
uggccaaaacaaaauuaaccaaa

SEQ ID NO: 328642 - RNA, 19 nt, Human
uggcgggaggagacucuca

SEQ ID NO: 328643 - RNA, 18 nt, Human
uguaauaagguacauacc

SEQ ID NO: 328644 - RNA, 22 nt, Human
uucuuuccacagcuggcgggag

SEQ ID NO: 328645 - RNA, 26 nt, Human
uuggccaguacaaauaaagauugguc

SEQ ID NO: 328646 - RNA, 27 nt, Human
aaacacuagugagaacucaaucuugaa

SEQ ID NO: 328647 - RNA, 23 nt, Human
aaucaaaaguauguucgacuacu

SEQ ID NO: 328648 - RNA, 18 nt, Human
acaaaauauguggccucc

SEQ ID NO: 328649 - RNA, 23 nt, Human
acaccaguaaaacagcagggcaa

SEQ ID NO: 328650 - RNA, 22 nt, Human
acacugaaugcacagggcuggc

SEQ ID NO: 328651 - RNA, 22 nt, Human
acuacaauucaaacuucucagg

SEQ ID NO: 328652 - RNA, 20 nt, Human
acucguggauuugauuccuu

SEQ ID NO: 328653 - RNA, 20 nt, Human
acucugaaaccuuuuucauu

SEQ ID NO: 328654 - RNA, 19 nt, Human
agaacauuucugguugcug

SEQ ID NO: 328655 - RNA, 23 nt, Human
agacaaaaugcaaaauacaguuc

SEQ ID NO: 328656 - RNA, 22 nt, Human
agaugacaaauaaaaccaagcu

SEQ ID NO: 328657 - RNA, 18 nt, Human
agcuauuugcaaaacuug

SEQ ID NO: 328658 - RNA, 24 nt, Human
auagaagcaagaccaaaagcagag

SEQ ID NO: 328659 - RNA, 19 nt, Human
auauauauauauauauaua

SEQ ID NO: 328660 - RNA, 19 nt, Human
auauauauauauauauaua

SEQ ID NO: 328661 - RNA, 19 nt, Human
auauauauauauauauaua

SEQ ID NO: 328662 - RNA, 19 nt, Human
auauauauauauauauaua

SEQ ID NO: 328663 - RNA, 19 nt, Human
auauauauauauauauaua

SEQ ID NO: 328664 - RNA, 22 nt, Human
aucaaaacaagaaaauacuaca

SEQ ID NO: 328665 - RNA, 19 nt, Human
auguggccucccauguaca

SEQ ID NO: 328666 - RNA, 18 nt, Human
caagaccaaaagcagagu

SEQ ID NO: 328667 - RNA, 22 nt, Human
caauucuauauucaaacaagga

SEQ ID NO: 328668 - RNA, 19 nt, Human
cacagggcuggcuaauucu

SEQ ID NO: 328669 - RNA, 20 nt, Human
caccaguaaaacagcagggc

SEQ ID NO: 328670 - RNA, 22 nt, Human
caccaguaaaacagcagggcaa

SEQ ID NO: 328671 - RNA, 22 nt, Human
cagccccccgaucuucucucuc

SEQ ID NO: 328672 - RNA, 24 nt, Human
ccauguacauugguuaccuaugua

SEQ ID NO: 328673 - RNA, 18 nt, Human
ccccuuaccuuucacccc

SEQ ID NO: 328674 - RNA, 22 nt, Human
ccucacgaacagccuucuucag

SEQ ID NO: 328675 - RNA, 20 nt, Human
ccuuuuccuuuuuuucuuuu

SEQ ID NO: 328676 - RNA, 22 nt, Human
cuagaacauuucugguugcugg

SEQ ID NO: 328677 - RNA, 22 nt, Human
cucccccuuaccuuucaccccc

SEQ ID NO: 328678 - RNA, 22 nt, Human
cucucgcucccccuuaccuuuc

SEQ ID NO: 328679 - RNA, 20 nt, Human
cucuggcgcucucgcucccc

SEQ ID NO: 328680 - RNA, 19 nt, Human
gaagauggauuucagcccc

SEQ ID NO: 328681 - RNA, 21 nt, Human
gagguggggaagagcuauuug

SEQ ID NO: 328682 - RNA, 20 nt, Human
gaguuggauuuuuuuuucuc

SEQ ID NO: 328683 - RNA, 20 nt, Human
gcaaccacuugcccgucuca

SEQ ID NO: 328684 - RNA, 21 nt, Human
gcgggaaugagggaacagcgg

SEQ ID NO: 328685 - RNA, 23 nt, Human
ggagcgguaggaugaagauggau

SEQ ID NO: 328686 - RNA, 18 nt, Human
ggaggagggaguaauccu

SEQ ID NO: 328687 - RNA, 28 nt, Human
uaaagaacauuuauuccuucaaaagaaa

SEQ ID NO: 328688 - RNA, 18 nt, Human
uacacuauauauuuauag

SEQ ID NO: 328689 - RNA, 22 nt, Human
uacagguauacaaauguacaau

SEQ ID NO: 328690 - RNA, 20 nt, Human
uacgaccauaaaaggugaga

SEQ ID NO: 328691 - RNA, 18 nt, Human
uauauauauauauauaua

SEQ ID NO: 328692 - RNA, 19 nt, Human
uauauauauauauauauau

SEQ ID NO: 328693 - RNA, 19 nt, Human
uauauauauauauauauau

SEQ ID NO: 328694 - RNA, 19 nt, Human
uauauauauauauauauau

SEQ ID NO: 328695 - RNA, 19 nt, Human
uauauauauauauauauau

SEQ ID NO: 328696 - RNA, 22 nt, Human
uauaugcaaagucuacaccaag

SEQ ID NO: 328697 - RNA, 18 nt, Human
uauguggccucccaugua

SEQ ID NO: 328698 - RNA, 18 nt, Human
ucacacccgcccagccuc

SEQ ID NO: 328699 - RNA, 20 nt, Human
uccacaugugaaauauagau

SEQ ID NO: 328700 - RNA, 22 nt, Human
ucucgcuauacuugagacuaga

SEQ ID NO: 328701 - RNA, 21 nt, Human
ucugguugcugguuggauuug

SEQ ID NO: 328702 - RNA, 21 nt, Human
ugaauaacauuuagaaagaau

SEQ ID NO: 328703 - RNA, 25 nt, Human
ugaaugcacagggcuggcuaauucu

SEQ ID NO: 328704 - RNA, 21 nt, Human
uguaaggaaagcucgggcaag

SEQ ID NO: 328705 - RNA, 21 nt, Human
uguacaccguguaguguuaca

SEQ ID NO: 328706 - RNA, 25 nt, Human
ugucacaaaaucaaaacauuacuuu

SEQ ID NO: 328707 - RNA, 19 nt, Human
ugugcuugcaaaaaaguuc

SEQ ID NO: 328708 - RNA, 25 nt, Human
uuacaaaggcuuuuccacucgugga

SEQ ID NO: 328709 - RNA, 20 nt, Human
uuacaaguagacaaaaugca

SEQ ID NO: 328710 - RNA, 23 nt, Human
uuaccaaaaaacguguuuauguu

SEQ ID NO: 328711 - RNA, 21 nt, Human
uucaaacuucucagguuuuuu

SEQ ID NO: 328712 - RNA, 21 nt, Human
uucaucuucuguacaaaaggg

SEQ ID NO: 328713 - RNA, 22 nt, Human
uucauuauauauauauauauau

SEQ ID NO: 328714 - RNA, 20 nt, Human
uuccuuuuuuggaggaggga

SEQ ID NO: 328715 - RNA, 27 nt, Human
uucucaugcuaaauaaucagauuuuac

SEQ ID NO: 328716 - RNA, 18 nt, Human
uugauuccuuuuuuggag

SEQ ID NO: 328717 - RNA, 22 nt, Human
uugcacguccuuuugacuguca

SEQ ID NO: 328718 - RNA, 21 nt, Human
uuguuuuuguuuguuuuuuac

SEQ ID NO: 328719 - RNA, 22 nt, Human
uuuaggauuaaaaaaacacuag

SEQ ID NO: 328720 - RNA, 22 nt, Human
uuuuuuucuuuuuuuuuuaaag

SEQ ID NO: 328721 - RNA, 22 nt, Human
uuuuuuuuuuuuuuuuuuucag

SEQ ID NO: 328722 - RNA, 19 nt, Human
aaaaagaucucuuccauau

SEQ ID NO: 328723 - RNA, 24 nt, Human
aaaaagcaaaauaaagcucaacac

SEQ ID NO: 328724 - RNA, 19 nt, Human
aaaagaaagcugguucaua

SEQ ID NO: 328725 - RNA, 19 nt, Human
aaaccacaucuacuguaaa

SEQ ID NO: 328726 - RNA, 24 nt, Human
aaacugguccagaaacaaucccua

SEQ ID NO: 328727 - RNA, 21 nt, Human
aaaguaaaauaacucaacacc

SEQ ID NO: 328728 - RNA, 19 nt, Human
aacaccaaacaugaaaaag

SEQ ID NO: 328729 - RNA, 20 nt, Human
aaccuuuagauuccauauug

SEQ ID NO: 328730 - RNA, 21 nt, Human
aacugguccagaaacaauccc

SEQ ID NO: 328731 - RNA, 19 nt, Human
aagagccaggacuuagaca

SEQ ID NO: 328732 - RNA, 20 nt, Human
aagagccaggacuuagacaa

SEQ ID NO: 328733 - RNA, 26 nt, Human
aagagccaggacuuagacagugggca

SEQ ID NO: 328734 - RNA, 20 nt, Human
aagcaaaaagagcuaucuga

SEQ ID NO: 328735 - RNA, 24 nt, Human
aaggagacacucaagaguaaagcc

SEQ ID NO: 328736 - RNA, 22 nt, Human
acaaacacaaggcguugcugca

SEQ ID NO: 328737 - RNA, 19 nt, Human
acaagaacagguacuuuug

SEQ ID NO: 328738 - RNA, 21 nt, Human
acaucauauacaggcauucug

SEQ ID NO: 328739 - RNA, 20 nt, Human
accaaggaaagcaucacuaa

SEQ ID NO: 328740 - RNA, 23 nt, Human
acuaaaaugcaaauguaucccag

SEQ ID NO: 328741 - RNA, 20 nt, Human
agaaagcaaaaagagcuauc

SEQ ID NO: 328742 - RNA, 21 nt, Human
agagaaaaacacaagaccagg

SEQ ID NO: 328743 - RNA, 19 nt, Human
aggaauucaacuguacaaa

SEQ ID NO: 328744 - RNA, 18 nt, Human
aggaccccaagaagaggg

SEQ ID NO: 328745 - RNA, 22 nt, Human
aggaccccaagaagaggguuua

SEQ ID NO: 328746 - RNA, 18 nt, Human
agguuucacgcaaaggaa

SEQ ID NO: 328747 - RNA, 21 nt, Human
auaaaaagaaagcugguucau

SEQ ID NO: 328748 - RNA, 24 nt, Human
auaauucaucccccaccccccaaa

SEQ ID NO: 328749 - RNA, 23 nt, Human
auacaguacucuucuguacaaag

SEQ ID NO: 328750 - RNA, 20 nt, Human
aucaaauucacuuuucagug

SEQ ID NO: 328751 - RNA, 22 nt, Human
caaaaggagacacucaagagua

SEQ ID NO: 328752 - RNA, 20 nt, Human
caaaauacaaauuuccacuc

SEQ ID NO: 328753 - RNA, 20 nt, Human
caacaugacagcuuugaucc

SEQ ID NO: 328754 - RNA, 18 nt, Human
caaggaaagcaucacuac

SEQ ID NO: 328755 - RNA, 21 nt, Human
caauaauaaaaagaaagcugg

SEQ ID NO: 328756 - RNA, 24 nt, Human
caaucccuaucaaaaggagacacu

SEQ ID NO: 328757 - RNA, 21 nt, Human
cacucaagaguaaagccuagg

SEQ ID NO: 328758 - RNA, 24 nt, Human
cacucuuucucauugcaaaccaaa

SEQ ID NO: 328759 - RNA, 25 nt, Human
caguacucuucuguacaaagaaaaa

SEQ ID NO: 328760 - RNA, 24 nt, Human
cauaugaaccaauaagagccagga

SEQ ID NO: 328761 - RNA, 18 nt, Human
caugcugaugacccagag

SEQ ID NO: 328762 - RNA, 21 nt, Human
ccaacaugacagcuuugaucc

SEQ ID NO: 328763 - RNA, 19 nt, Human
ccaacuuacuaaaagguaa

SEQ ID NO: 328764 - RNA, 20 nt, Human
cccaccccccaaauauacac

SEQ ID NO: 328765 - RNA, 25 nt, Human
cccaccccccaaauauacacaagaa

SEQ ID NO: 328766 - RNA, 23 nt, Human
ccccaagaagaggguuuaguuuc

SEQ ID NO: 328767 - RNA, 21 nt, Human
cccccaaauauacacaagaac

SEQ ID NO: 328768 - RNA, 23 nt, Human
ccugugccaacagagggcaagga

SEQ ID NO: 328769 - RNA, 18 nt, Human
cucaacacuuccucaaca

SEQ ID NO: 328770 - RNA, 20 nt, Human
cucuacuugucauuuucuaa

SEQ ID NO: 328771 - RNA, 22 nt, Human
cucuacuugucauuuucuaaaa

SEQ ID NO: 328772 - RNA, 22 nt, Human
cugccucuaugaaaaagcaaaa

SEQ ID NO: 328773 - RNA, 22 nt, Human
cugggacaugcugaugacccag

SEQ ID NO: 328774 - RNA, 21 nt, Human
cuugucauuuucuaaaauugc

SEQ ID NO: 328775 - RNA, 21 nt, Human
gaauacuguacuuuuuccuuu

SEQ ID NO: 328776 - RNA, 23 nt, Human
gaugaaaaaagcauuggccucca

SEQ ID NO: 328777 - RNA, 19 nt, Human
gcaaaaagagcuaucugaa

SEQ ID NO: 328778 - RNA, 25 nt, Human
gcaaaacaaaauacaaauuuccacu

SEQ ID NO: 328779 - RNA, 25 nt, Human
ggaauucaacuguacaaagacagga

SEQ ID NO: 328780 - RNA, 20 nt, Human
ggacuuagacaaacuggucc

SEQ ID NO: 328781 - RNA, 22 nt, Human
gguuguagaccuaccagacugu

SEQ ID NO: 328782 - RNA, 19 nt, Human
uaaaacaaaaugaucucac

SEQ ID NO: 328783 - RNA, 21 nt, Human
uaauucaucccccacccccca

SEQ ID NO: 328784 - RNA, 21 nt, Human
uaauuguauuaaaaccacauc

SEQ ID NO: 328785 - RNA, 20 nt, Human
uaauuuauaauucauccccc

SEQ ID NO: 328786 - RNA, 24 nt, Human
uacacacacaaugcauauauuuau

SEQ ID NO: 328787 - RNA, 21 nt, Human
uacagauuugcucuuacuugg

SEQ ID NO: 328788 - RNA, 22 nt, Human
uacuacacacacaaugcauaua

SEQ ID NO: 328789 - RNA, 20 nt, Human
uacugacuucaacaaaauac

SEQ ID NO: 328790 - RNA, 23 nt, Human
uagaaagcaaaaagagcuaucug

SEQ ID NO: 328791 - RNA, 24 nt, Human
uaguaaaaaaagaucucuuccaua

SEQ ID NO: 328792 - RNA, 19 nt, Human
uauacaacacuauauugcc

SEQ ID NO: 328793 - RNA, 19 nt, Human
uauacacauauggucacaa

SEQ ID NO: 328794 - RNA, 18 nt, Human
uaugucuuauguccagag

SEQ ID NO: 328795 - RNA, 25 nt, Human
uaugucuuauguccagaggaaaaaa

SEQ ID NO: 328796 - RNA, 22 nt, Human
uauuacuacacacacaaugcau

SEQ ID NO: 328797 - RNA, 21 nt, Human
uauucacacauuuuucauuuu

SEQ ID NO: 328798 - RNA, 23 nt, Human
ucacaugguuaaauuaucuucuu

SEQ ID NO: 328799 - RNA, 22 nt, Human
ucaguggccccuuuucaucucu

SEQ ID NO: 328800 - RNA, 18 nt, Human
ucaucccccaccccccaa

SEQ ID NO: 328801 - RNA, 22 nt, Human
ucugauaggucuccacucaggg

SEQ ID NO: 328802 - RNA, 20 nt, Human
ugaaaaagcaaaauaaagcu

SEQ ID NO: 328803 - RNA, 21 nt, Human
ugaaaaagcaaaauaaagcuc

SEQ ID NO: 328804 - RNA, 23 nt, Human
ugaaacaaacacaaggcguugcu

SEQ ID NO: 328805 - RNA, 26 nt, Human
ugaaacaaacacaaggcguugcugca

SEQ ID NO: 328806 - RNA, 21 nt, Human
ugaaaccaugggcugauacug

SEQ ID NO: 328807 - RNA, 21 nt, Human
ugaaaugugauuuucagauuu

SEQ ID NO: 328808 - RNA, 24 nt, Human
ugacuucaacaaaauacaaagcac

SEQ ID NO: 328809 - RNA, 21 nt, Human
ugauaaaaccuuuagauucca

SEQ ID NO: 328810 - RNA, 22 nt, Human
ugcaaauguaucccaaagagau

SEQ ID NO: 328811 - RNA, 22 nt, Human
ugcacaauacccugacuucaau

SEQ ID NO: 328812 - RNA, 19 nt, Human
uggauuuaauggucucacc

SEQ ID NO: 328813 - RNA, 27 nt, Human
uggggugggcacccaaaauggcagacu

SEQ ID NO: 328814 - RNA, 23 nt, Human
uguacaaagaaaaaagucacauc

SEQ ID NO: 328815 - RNA, 20 nt, Human
uucauaguugaguuguguuu

SEQ ID NO: 328816 - RNA, 22 nt, Human
uucaucccccaccccccaaaua

SEQ ID NO: 328817 - RNA, 19 nt, Human
uugauccugaaaccauggg

SEQ ID NO: 328818 - RNA, 22 nt, Human
uuuacaagguaaaaauuuacaa

SEQ ID NO: 328819 - RNA, 18 nt, Human
uuuacauuauacaacacu

SEQ ID NO: 328820 - RNA, 24 nt, Human
uuuucauuuucuaauuuauacaua

SEQ ID NO: 328821 - RNA, 28 nt, Human
aaaacagcaaaaauccauccugagaaaa

SEQ ID NO: 328822 - RNA, 25 nt, Human
accauccaggcggcuccaggacaca

SEQ ID NO: 328823 - RNA, 22 nt, Human
agcaccuggaugcccuccaccc

SEQ ID NO: 328824 - RNA, 20 nt, Human
agccaaaacagcaaaaaucc

SEQ ID NO: 328825 - RNA, 19 nt, Human
cagagcccgagccugacac

SEQ ID NO: 328826 - RNA, 20 nt, Human
cagcaccuggaugcccucca

SEQ ID NO: 328827 - RNA, 19 nt, Human
cagcccagggaaggaacag

SEQ ID NO: 328828 - RNA, 20 nt, Human
cagcuacagcagggucaucu

SEQ ID NO: 328829 - RNA, 20 nt, Human
caggacacaauggggcgcgg

SEQ ID NO: 328830 - RNA, 24 nt, Human
caggaccauccaaaucccacauga

SEQ ID NO: 328831 - RNA, 24 nt, Human
ccagccggcccugugccguucucc

SEQ ID NO: 328832 - RNA, 23 nt, Human
ccagcuacagcagggucaucuuu

SEQ ID NO: 328833 - RNA, 21 nt, Human
ccaggacacaauggggcgcgg

SEQ ID NO: 328834 - RNA, 18 nt, Human
cccacaugacaguagaaa

SEQ ID NO: 328835 - RNA, 26 nt, Human
cccacaugacaguagaaaucuugcuu

SEQ ID NO: 328836 - RNA, 21 nt, Human
cccagcaccuggaugcccucc

SEQ ID NO: 328837 - RNA, 21 nt, Human
ccccagagcccgagccugaca

SEQ ID NO: 328838 - RNA, 23 nt, Human
ccccgcuccguccacccucugga

SEQ ID NO: 328839 - RNA, 18 nt, Human
cccguggcgacacacuca

SEQ ID NO: 328840 - RNA, 18 nt, Human
cccugugccguucuccuc

SEQ ID NO: 328841 - RNA, 26 nt, Human
ccuccaccccgauagggcgaccaucc

SEQ ID NO: 328842 - RNA, 22 nt, Human
ccucuggagccugccagacacu

SEQ ID NO: 328843 - RNA, 19 nt, Human
ccugauggguguuagggcc

SEQ ID NO: 328844 - RNA, 19 nt, Human
ccugugcccagcaccugga

SEQ ID NO: 328845 - RNA, 21 nt, Human
cgaccauccaggcggcuccag

SEQ ID NO: 328846 - RNA, 23 nt, Human
cgguggagggugacagugucagg

SEQ ID NO: 328847 - RNA, 20 nt, Human
cucuaucucucuccucuuuu

SEQ ID NO: 328848 - RNA, 24 nt, Human
cugagagccaaaacagcaaaaauc

SEQ ID NO: 328849 - RNA, 22 nt, Human
cugcaggaacugcuccaacucc

SEQ ID NO: 328850 - RNA, 21 nt, Human
cuggaugcccuccaccccgau

SEQ ID NO: 328851 - RNA, 22 nt, Human
cuggaugcccuccaccccgaua

SEQ ID NO: 328852 - RNA, 23 nt, Human
cugugccguucuccucacccggg

SEQ ID NO: 328853 - RNA, 19 nt, Human
gagccuggccccguggcug

SEQ ID NO: 328854 - RNA, 18 nt, Human
gcgacacacucaagcacc

SEQ ID NO: 328855 - RNA, 25 nt, Human
gcuggaccgucacgucugagaugau

SEQ ID NO: 328856 - RNA, 22 nt, Human
ggaaggaacaggcuccugcagg

SEQ ID NO: 328857 - RNA, 19 nt, Human
gggcgcggguugcccgugg

SEQ ID NO: 328858 - RNA, 18 nt, Human
guccacccucuggagccu

SEQ ID NO: 328859 - RNA, 21 nt, Human
uaccaggcagaggcaaggggg

SEQ ID NO: 328860 - RNA, 22 nt, Human
ucagggcccagcuacagcaggg

SEQ ID NO: 328861 - RNA, 21 nt, Human
uccauccugagaaaacaaagu

SEQ ID NO: 328862 - RNA, 24 nt, Human
uccucuaucucucuccucuuuuuu

SEQ ID NO: 328863 - RNA, 20 nt, Human
ucgguggagggugacagugu

SEQ ID NO: 328864 - RNA, 21 nt, Human
ucuggugcacugucaggguga

SEQ ID NO: 328865 - RNA, 19 nt, Human
ucuuuuuuuuuuuuuuuaa

SEQ ID NO: 328866 - RNA, 24 nt, Human
ucuuuuuuuuuuuuuuuaaguuuu

SEQ ID NO: 328867 - RNA, 22 nt, Human
ugacaguagaaaucuugcuuuu

SEQ ID NO: 328868 - RNA, 19 nt, Human
ugagagccaaaacagcaaa

SEQ ID NO: 328869 - RNA, 19 nt, Human
ugagaugaugagguuuccu

SEQ ID NO: 328870 - RNA, 24 nt, Human
ugagguuuccugugcccagcaccu

SEQ ID NO: 328871 - RNA, 21 nt, Human
ugcccagcaccuggaugcccu

SEQ ID NO: 328872 - RNA, 19 nt, Human
uggagggugacagugucag

SEQ ID NO: 328873 - RNA, 23 nt, Human
uggggcgcggguugcccguggcg

SEQ ID NO: 328874 - RNA, 19 nt, Human
ugucagggcccagcuacag

SEQ ID NO: 328875 - RNA, 18 nt, Human
uguuagggccgggggguc

SEQ ID NO: 328876 - RNA, 22 nt, Human
uuaguucaguuccaagucaugu

SEQ ID NO: 328877 - RNA, 23 nt, Human
uuguaggccccagagcccgagcc

SEQ ID NO: 328878 - RNA, 26 nt, Human
augcauguguguguguguggggguuu

SEQ ID NO: 328879 - RNA, 18 nt, Human
ccgccgccgccugccgcu

SEQ ID NO: 328880 - RNA, 19 nt, Human
ccgccgccgccugccgcuc

SEQ ID NO: 328881 - RNA, 24 nt, Human
ccgccgccugccgcuccgcccgcc

SEQ ID NO: 328882 - RNA, 19 nt, Human
ccgcgccgccgccgccugc

SEQ ID NO: 328883 - RNA, 18 nt, Human
ccgcugccgcgccgccgc

SEQ ID NO: 328884 - RNA, 20 nt, Human
ccgcugccgcgccgccgccg

SEQ ID NO: 328885 - RNA, 22 nt, Human
ccugccgcuccgcccgccgccu

SEQ ID NO: 328886 - RNA, 18 nt, Human
cgccgccgccgccugccg

SEQ ID NO: 328887 - RNA, 20 nt, Human
cugccgcgccgccgccgccu

SEQ ID NO: 328888 - RNA, 18 nt, Human
gccgcuccgcccgccgcc

SEQ ID NO: 328889 - RNA, 25 nt, Human
guguguguguguaugcaugugugug

SEQ ID NO: 328890 - RNA, 24 nt, Human
uccgcugccgcgccgccgccgccu

SEQ ID NO: 328891 - RNA, 21 nt, Human
ucuguguguguggcugugugu

SEQ ID NO: 328892 - RNA, 19 nt, Human
uggcugugugugugugugu

SEQ ID NO: 328893 - RNA, 21 nt, Human
uguaugcaugugugugugugu

SEQ ID NO: 328894 - RNA, 19 nt, Human
uguguaugcaugugugugu

SEQ ID NO: 328895 - RNA, 21 nt, Human
uguguaugcaugugugugugu

SEQ ID NO: 328896 - RNA, 21 nt, Human
uguguaugcaugugugugugu

SEQ ID NO: 328897 - RNA, 24 nt, Human
uguguggcugugugugugugugua

SEQ ID NO: 328898 - RNA, 24 nt, Human
uguguguaugcaugugugugugug

SEQ ID NO: 328899 - RNA, 21 nt, Human
uguguguguaugcaugugugu

SEQ ID NO: 328900 - RNA, 21 nt, Human
uguguguguaugcaugugugu

SEQ ID NO: 328901 - RNA, 21 nt, Human
uguguguguaugcaugugugu

SEQ ID NO: 328902 - RNA, 19 nt, Human
uguguguguggcugugugu

SEQ ID NO: 328903 - RNA, 20 nt, Human
uguguguguggcugugugug

SEQ ID NO: 328904 - RNA, 23 nt, Human
uguguguguggcugugugugugu

SEQ ID NO: 328905 - RNA, 23 nt, Human
uguguguguggcugugugugugu

SEQ ID NO: 328906 - RNA, 25 nt, Human
uguguguguggcugugugugugugu

SEQ ID NO: 328907 - RNA, 22 nt, Human
uguguguguguaugcaugugug

SEQ ID NO: 328908 - RNA, 23 nt, Human
uguguguguguaugcaugugugu

SEQ ID NO: 328909 - RNA, 30 nt, Human
uguguguguguaugcaugugugugugugug

SEQ ID NO: 328910 - RNA, 21 nt, Human
uguguguguguguaugcaugu

SEQ ID NO: 328911 - RNA, 23 nt, Human
uguguguguguguaugcaugugu

SEQ ID NO: 328912 - RNA, 21 nt, Human
uguguguguguguguaugcau

SEQ ID NO: 328913 - RNA, 25 nt, Human
uguguguguguguguaugcaugugu

SEQ ID NO: 328914 - RNA, 18 nt, Human
agagagguggaagaccag

SEQ ID NO: 328915 - RNA, 22 nt, Human
caacucggguggggguggaggg

SEQ ID NO: 328916 - RNA, 21 nt, Human
gagccugcacugaaaggcugg

SEQ ID NO: 328917 - RNA, 20 nt, Human
gagggcuggagccugcacug

SEQ ID NO: 328918 - RNA, 19 nt, Human
ggguggggguggagggcug

SEQ ID NO: 328919 - RNA, 19 nt, Human
guggagggcuggagccugc

SEQ ID NO: 328920 - RNA, 20 nt, Human
guggagggcuggagccugca

SEQ ID NO: 328921 - RNA, 20 nt, Human
aaacaaaaaacucuggacac

SEQ ID NO: 328922 - RNA, 19 nt, Human
aacaaaaaacucuggacac

SEQ ID NO: 328923 - RNA, 23 nt, Human
aagaguucaagaccagccugggc

SEQ ID NO: 328924 - RNA, 19 nt, Human
acagacaaggagcuuacgu

SEQ ID NO: 328925 - RNA, 24 nt, Human
acagagccagacccugucucaaga

SEQ ID NO: 328926 - RNA, 20 nt, Human
accaaagcaaccaauguucc

SEQ ID NO: 328927 - RNA, 23 nt, Human
accacuguacucuagucugccaa

SEQ ID NO: 328928 - RNA, 23 nt, Human
accuguagucauagcuacucagg

SEQ ID NO: 328929 - RNA, 18 nt, Human
agaagucaaggcugcaau

SEQ ID NO: 328930 - RNA, 23 nt, Human
agccugggcaacacagggaaacc

SEQ ID NO: 328931 - RNA, 20 nt, Human
agcuacucaggaggcugagg

SEQ ID NO: 328932 - RNA, 24 nt, Human
agcuacucaggaggcugagguggg

SEQ ID NO: 328933 - RNA, 26 nt, Human
aggcagaaguaucacuuggagccaag

SEQ ID NO: 328934 - RNA, 24 nt, Human
aggcugaggugggaggaugacuug

SEQ ID NO: 328935 - RNA, 23 nt, Human
aucacuuggagccaagaguucaa

SEQ ID NO: 328936 - RNA, 25 nt, Human
aucccuucccccuuguguuggaaau

SEQ ID NO: 328937 - RNA, 24 nt, Human
aucucaccacuguacucuagucug

SEQ ID NO: 328938 - RNA, 22 nt, Human
caacugcagcgcugccuccccc

SEQ ID NO: 328939 - RNA, 25 nt, Human
caaggagcuuacgugccaccaaagc

SEQ ID NO: 328940 - RNA, 25 nt, Human
caaggcagaaguaucacuuggagcc

SEQ ID NO: 328941 - RNA, 21 nt, Human
cacacccuucuguguggucug

SEQ ID NO: 328942 - RNA, 24 nt, Human
cacacccuucuguguggucugcua

SEQ ID NO: 328943 - RNA, 19 nt, Human
cacugagcagcugggccuc

SEQ ID NO: 328944 - RNA, 21 nt, Human
cagacccugucucaagacaaa

SEQ ID NO: 328945 - RNA, 24 nt, Human
cagcacuuugggaggccaaggcag

SEQ ID NO: 328946 - RNA, 22 nt, Human
cagcucccggagcucagguccu

SEQ ID NO: 328947 - RNA, 19 nt, Human
caggugcugccuauauggc

SEQ ID NO: 328948 - RNA, 20 nt, Human
ccaaaauucucugguggccc

SEQ ID NO: 328949 - RNA, 18 nt, Human
ccacuguacucuagucug

SEQ ID NO: 328950 - RNA, 23 nt, Human
ccagcuccagucucucuccccuc

SEQ ID NO: 328951 - RNA, 20 nt, Human
cccacacuucucuguucccg

SEQ ID NO: 328952 - RNA, 19 nt, Human
ccccggggggccgcuccuc

SEQ ID NO: 328953 - RNA, 26 nt, Human
ccccggggggccgcuccuccagugcc

SEQ ID NO: 328954 - RNA, 24 nt, Human
ccccuaggcagcugcuugcggccu

SEQ ID NO: 328955 - RNA, 18 nt, Human
ccccugcaucccuucccc

SEQ ID NO: 328956 - RNA, 19 nt, Human
ccccugcaucccuuccccc

SEQ ID NO: 328957 - RNA, 23 nt, Human
ccccugccauccugcugguuccu

SEQ ID NO: 328958 - RNA, 18 nt, Human
cccggagcucagguccug

SEQ ID NO: 328959 - RNA, 22 nt, Human
ccugaauugcagccucugguga

SEQ ID NO: 328960 - RNA, 18 nt, Human
ccugagucuagugagucc

SEQ ID NO: 328961 - RNA, 21 nt, Human
ccugggcaacacagggaaacc

SEQ ID NO: 328962 - RNA, 21 nt, Human
cgggcccuuuauccucagcuc

SEQ ID NO: 328963 - RNA, 21 nt, Human
cuaguaguuuucucugcuccu

SEQ ID NO: 328964 - RNA, 21 nt, Human
cucaagacaaacaaaaaacuc

SEQ ID NO: 328965 - RNA, 18 nt, Human
cucaggaggcugaggugg

SEQ ID NO: 328966 - RNA, 20 nt, Human
cuccugggcauucaucucua

SEQ ID NO: 328967 - RNA, 20 nt, Human
cucgcucugccgcggucgcu

SEQ ID NO: 328968 - RNA, 20 nt, Human
cucuagucugccaacagagc

SEQ ID NO: 328969 - RNA, 18 nt, Human
cucuccccucucaguccc

SEQ ID NO: 328970 - RNA, 21 nt, Human
cucuuccccacacuucucugu

SEQ ID NO: 328971 - RNA, 19 nt, Human
cugcaucccuucccccuug

SEQ ID NO: 328972 - RNA, 19 nt, Human
cugccaacagagccagacc

SEQ ID NO: 328973 - RNA, 20 nt, Human
cugccucccccugcaucccu

SEQ ID NO: 328974 - RNA, 20 nt, Human
cuggaggcccacguccuugc

SEQ ID NO: 328975 - RNA, 19 nt, Human
cugucucaagacaaacaaa

SEQ ID NO: 328976 - RNA, 21 nt, Human
cuucuucaaguucacaucuag

SEQ ID NO: 328977 - RNA, 23 nt, Human
cuugcauguugucacauguugcu

SEQ ID NO: 328978 - RNA, 21 nt, Human
cuuggcccaaggucuucucuc

SEQ ID NO: 328979 - RNA, 18 nt, Human
cuugggccacucugggug

SEQ ID NO: 328980 - RNA, 24 nt, Human
gagcagcugggccuccugggucuu

SEQ ID NO: 328981 - RNA, 23 nt, Human
gagcugcuuaauucagcacuuug

SEQ ID NO: 328982 - RNA, 19 nt, Human
gaggcugaggugggaggau

SEQ ID NO: 328983 - RNA, 19 nt, Human
gagucuugggccacucugg

SEQ ID NO: 328984 - RNA, 18 nt, Human
gcaccugcccccgucguu

SEQ ID NO: 328985 - RNA, 24 nt, Human
gccaacagagccagacccugucuc

SEQ ID NO: 328986 - RNA, 21 nt, Human
gcccaaagaaagaucgggccc

SEQ ID NO: 328987 - RNA, 18 nt, Human
gccucccccugcaucccu

SEQ ID NO: 328988 - RNA, 21 nt, Human
gcugugcaccuccucccuuug

SEQ ID NO: 328989 - RNA, 21 nt, Human
gcuguuucuuguaaccacaga

SEQ ID NO: 328990 - RNA, 21 nt, Human
ggcaacacagggaaaccucga

SEQ ID NO: 328991 - RNA, 21 nt, Human
ggcaguacuucuugcauguug

SEQ ID NO: 328992 - RNA, 18 nt, Human
gggaaggggaauacccac

SEQ ID NO: 328993 - RNA, 21 nt, Human
gggagagggcagauggaagcc

SEQ ID NO: 328994 - RNA, 21 nt, Human
gggagggaggcuggucucuuu

SEQ ID NO: 328995 - RNA, 23 nt, Human
gggucaguggcuguuucuuguaa

SEQ ID NO: 328996 - RNA, 21 nt, Human
ggugcuggagacagacaagga

SEQ ID NO: 328997 - RNA, 23 nt, Human
guacucuagucugccaacagagc

SEQ ID NO: 328998 - RNA, 18 nt, Human
uaaucucuguccuuuuac

SEQ ID NO: 328999 - RNA, 24 nt, Human
uaauucagcacuuugggaggccaa

SEQ ID NO: 329000 - RNA, 24 nt, Human
uaccuguagucauagcuacucagg

SEQ ID NO: 329001 - RNA, 21 nt, Human
uagaagcucaaggccagaggc

SEQ ID NO: 329002 - RNA, 24 nt, Human
uagcuacucaggaggcugaggugg

SEQ ID NO: 329003 - RNA, 23 nt, Human
uauuuccugccagucccagcuug

SEQ ID NO: 329004 - RNA, 28 nt, Human
ucaagacaaacaaaaaacucuggacaca

SEQ ID NO: 329005 - RNA, 23 nt, Human
ucacuuggagccaagaguucaag

SEQ ID NO: 329006 - RNA, 23 nt, Human
uccccaacucuguggggucccac

SEQ ID NO: 329007 - RNA, 23 nt, Human
uccccggggggccgcuccuccag

SEQ ID NO: 329008 - RNA, 18 nt, Human
ucccggcucuuccaucuc

SEQ ID NO: 329009 - RNA, 19 nt, Human
ucccggcucuuccaucucu

SEQ ID NO: 329010 - RNA, 19 nt, Human
uccucagcuccugggcauu

SEQ ID NO: 329011 - RNA, 23 nt, Human
uccucagcuccugggcauucauc

SEQ ID NO: 329012 - RNA, 18 nt, Human
uccucgcuucccggcgcc

SEQ ID NO: 329013 - RNA, 19 nt, Human
uccugcugguuccuaucuc

SEQ ID NO: 329014 - RNA, 21 nt, Human
uccugggcauucaucucuaag

SEQ ID NO: 329015 - RNA, 21 nt, Human
ucucucuccccucucaguccc

SEQ ID NO: 329016 - RNA, 18 nt, Human
ucugguuggcaguauugg

SEQ ID NO: 329017 - RNA, 25 nt, Human
ucuuccccacacuucucuguucccg

SEQ ID NO: 329018 - RNA, 21 nt, Human
ugaccagggucaguggcuguu

SEQ ID NO: 329019 - RNA, 20 nt, Human
ugaggugggaggaugacuug

SEQ ID NO: 329020 - RNA, 22 nt, Human
ugaggugggaggaugacuuggc

SEQ ID NO: 329021 - RNA, 22 nt, Human
ugcaaugaacugugaucucacc

SEQ ID NO: 329022 - RNA, 20 nt, Human
ugcaccuccucccuuugcug

SEQ ID NO: 329023 - RNA, 21 nt, Human
ugcugugagaaucaggugcug

SEQ ID NO: 329024 - RNA, 21 nt, Human
uggagaccuaugaacuugcac

SEQ ID NO: 329025 - RNA, 20 nt, Human
uggcagaaaguggcugcagc

SEQ ID NO: 329026 - RNA, 19 nt, Human
uggcugcagaugcuggcag

SEQ ID NO: 329027 - RNA, 19 nt, Human
uggcugcagaugcuggcag

SEQ ID NO: 329028 - RNA, 18 nt, Human
uggcugcagcugacaacc

SEQ ID NO: 329029 - RNA, 21 nt, Human
uggcugcagcugacaaccuuc

SEQ ID NO: 329030 - RNA, 24 nt, Human
ugggaggccaaggcagaaguauca

SEQ ID NO: 329031 - RNA, 18 nt, Human
ugguuggcaguauuggca

SEQ ID NO: 329032 - RNA, 24 nt, Human
uguccugcuuauuuucucuugcag

SEQ ID NO: 329033 - RNA, 19 nt, Human
ugucucaagacaaacaaaa

SEQ ID NO: 329034 - RNA, 24 nt, Human
uucccggcgccagcucgcucugcc

SEQ ID NO: 329035 - RNA, 22 nt, Human
uugccagcuccagucucucucc

SEQ ID NO: 329036 - RNA, 22 nt, Human
uuggagccaagaguucaagacc

SEQ ID NO: 329037 - RNA, 20 nt, Human
uuggcaguacuucuugcaug

SEQ ID NO: 329038 - RNA, 19 nt, Human
uuggggucggguccaacuc

SEQ ID NO: 329039 - RNA, 18 nt, Human
uuugccccugccauccug

SEQ ID NO: 329040 - RNA, 22 nt, Human
uuuuuuuuuuuuuuuuuuuggg

SEQ ID NO: 329041 - RNA, 20 nt, Human
aaaccaagucucugggggcg

SEQ ID NO: 329042 - RNA, 22 nt, Human
aaccagucuggaacccuaggcc

SEQ ID NO: 329043 - RNA, 23 nt, Human
aaggcuggagccaaaaccaaguc

SEQ ID NO: 329044 - RNA, 20 nt, Human
accaagucucugggggcggg

SEQ ID NO: 329045 - RNA, 20 nt, Human
acucugugggggccgaucgg

SEQ ID NO: 329046 - RNA, 19 nt, Human
agacgaacaaguccaacca

SEQ ID NO: 329047 - RNA, 21 nt, Human
caccucccuccaagucccaag

SEQ ID NO: 329048 - RNA, 19 nt, Human
cccaugcagcccuagagac

SEQ ID NO: 329049 - RNA, 22 nt, Human
cccaugcagcccuagagacggg

SEQ ID NO: 329050 - RNA, 22 nt, Human
ccccgggcuccccaugcagccc

SEQ ID NO: 329051 - RNA, 18 nt, Human
cccgcugcgcucuagccu

SEQ ID NO: 329052 - RNA, 20 nt, Human
ccgcgggccacucugugggg

SEQ ID NO: 329053 - RNA, 22 nt, Human
ccgcugcgcucuagccucccug

SEQ ID NO: 329054 - RNA, 23 nt, Human
ccgcugcgcucuagccucccugu

SEQ ID NO: 329055 - RNA, 21 nt, Human
ccggcuccgggccgguucccg

SEQ ID NO: 329056 - RNA, 21 nt, Human
ccgggccgguucccgcugcgc

SEQ ID NO: 329057 - RNA, 23 nt, Human
ccuccaagucccaagaaaguggg

SEQ ID NO: 329058 - RNA, 22 nt, Human
ccucucuggauccccacuacuc

SEQ ID NO: 329059 - RNA, 23 nt, Human
cgcgggccacucugugggggccg

SEQ ID NO: 329060 - RNA, 23 nt, Human
cggcuccggcuccgggccgguuc

SEQ ID NO: 329061 - RNA, 19 nt, Human
cggcuccgggccgguuccc

SEQ ID NO: 329062 - RNA, 24 nt, Human
cuccccaugcagcccuagagacgg

SEQ ID NO: 329063 - RNA, 20 nt, Human
cuccccgggcuccccaugca

SEQ ID NO: 329064 - RNA, 18 nt, Human
cuggcucugucucugucu

SEQ ID NO: 329065 - RNA, 21 nt, Human
cugggggcggggguccucucu

SEQ ID NO: 329066 - RNA, 23 nt, Human
ggaggcaguguuccacuccagug

SEQ ID NO: 329067 - RNA, 20 nt, Human
ggagggccgggccuggcucu

SEQ ID NO: 329068 - RNA, 22 nt, Human
gggagaaguccagugugcuguu

SEQ ID NO: 329069 - RNA, 19 nt, Human
gggagggccgggccuggcu

SEQ ID NO: 329070 - RNA, 21 nt, Human
gggagggccgggccuggcucu

SEQ ID NO: 329071 - RNA, 21 nt, Human
gggcgggagggccgggccugg

SEQ ID NO: 329072 - RNA, 20 nt, Human
ggggccaggggaaggcugga

SEQ ID NO: 329073 - RNA, 22 nt, Human
uaacuccugagugucacggggc

SEQ ID NO: 329074 - RNA, 18 nt, Human
uccccacuacucagcucc

SEQ ID NO: 329075 - RNA, 25 nt, Human
ucucuggauccccacuacucagcuc

SEQ ID NO: 329076 - RNA, 21 nt, Human
ucugggggcggggguccucuc

SEQ ID NO: 329077 - RNA, 21 nt, Human
uggauccccacuacucagcuc

SEQ ID NO: 329078 - RNA, 18 nt, Human
ugggggccgaucggcugg

SEQ ID NO: 329079 - RNA, 21 nt, Human
uguggggcuccggcuccggcu

SEQ ID NO: 329080 - RNA, 24 nt, Human
uguuccaccucccuccaaguccca

SEQ ID NO: 329081 - RNA, 23 nt, Human
uuccaccucccuccaagucccaa

SEQ ID NO: 329082 - RNA, 24 nt, Human
uuuuuuuuuuuuuuuuuuuguuuu

SEQ ID NO: 329083 - RNA, 26 nt, Human
uuuuuuuuuuuuuuuuuuuuuugggg

SEQ ID NO: 329084 - RNA, 24 nt, Human
aaaagaucugcuuuggucaggccu

SEQ ID NO: 329085 - RNA, 21 nt, Human
aagcggucccauaacagcgag

SEQ ID NO: 329086 - RNA, 19 nt, Human
aaucaucucuucaucuucu

SEQ ID NO: 329087 - RNA, 24 nt, Human
agacaccaggccugauauucagca

SEQ ID NO: 329088 - RNA, 22 nt, Human
auaacagcgaguaaacagguac

SEQ ID NO: 329089 - RNA, 23 nt, Human
caauaaaaauguggcucgagaug

SEQ ID NO: 329090 - RNA, 20 nt, Human
cacauggccucagguaagcc

SEQ ID NO: 329091 - RNA, 19 nt, Human
caccauguaucccaaugcc

SEQ ID NO: 329092 - RNA, 20 nt, Human
caccuccacaaaaugcaggg

SEQ ID NO: 329093 - RNA, 21 nt, Human
cagguaagccacuuaccucuc

SEQ ID NO: 329094 - RNA, 19 nt, Human
caucagaugcuucaccagg

SEQ ID NO: 329095 - RNA, 20 nt, Human
cauguuccccaggggaacau

SEQ ID NO: 329096 - RNA, 23 nt, Human
cccacccaccuccacaaaaugca

SEQ ID NO: 329097 - RNA, 22 nt, Human
ccucagguaagccacuuaccuc

SEQ ID NO: 329098 - RNA, 20 nt, Human
ccugccguucugcucugcag

SEQ ID NO: 329099 - RNA, 24 nt, Human
cgagaugaacuaacauagggguug

SEQ ID NO: 329100 - RNA, 21 nt, Human
cgugcaucagaugcuucaccc

SEQ ID NO: 329101 - RNA, 21 nt, Human
cuccagggaguauggucagcu

SEQ ID NO: 329102 - RNA, 21 nt, Human
cuguauuuugggcugacucua

SEQ ID NO: 329103 - RNA, 21 nt, Human
gaacauucucccacccaccuc

SEQ ID NO: 329104 - RNA, 19 nt, Human
gcccagcaggcaggugccu

SEQ ID NO: 329105 - RNA, 19 nt, Human
ggaaaauguacagacccuu

SEQ ID NO: 329106 - RNA, 20 nt, Human
gggaacaccaagggagccac

SEQ ID NO: 329107 - RNA, 19 nt, Human
gggaccucuggcccugccg

SEQ ID NO: 329108 - RNA, 24 nt, Human
gggguugggugggggaaauaauga

SEQ ID NO: 329109 - RNA, 18 nt, Human
ggucuuacauuccauagg

SEQ ID NO: 329110 - RNA, 19 nt, Human
guaaaaggggaacaccaag

SEQ ID NO: 329111 - RNA, 18 nt, Human
gugggcccagcaggcagg

SEQ ID NO: 329112 - RNA, 21 nt, Human
uaacauagggguugggugggg

SEQ ID NO: 329113 - RNA, 20 nt, Human
uaaguaaacagagaucucaa

SEQ ID NO: 329114 - RNA, 23 nt, Human
uagaaaacagugggcccagcagg

SEQ ID NO: 329115 - RNA, 18 nt, Human
ucaagcccagcugagcgc

SEQ ID NO: 329116 - RNA, 21 nt, Human
ucaagcccagcugagcgccgg

SEQ ID NO: 329117 - RNA, 18 nt, Human
uccaagggaucagaaagu

SEQ ID NO: 329118 - RNA, 19 nt, Human
uccaagggaucagaaaguu

SEQ ID NO: 329119 - RNA, 25 nt, Human
ucccacccaccuccacaaaaugcag

SEQ ID NO: 329120 - RNA, 21 nt, Human
uccccaggggaacauucuccc

SEQ ID NO: 329121 - RNA, 22 nt, Human
uccccaggggaacauucuccca

SEQ ID NO: 329122 - RNA, 21 nt, Human
ucucccacccaccuccacaaa

SEQ ID NO: 329123 - RNA, 20 nt, Human
ucugcagucucauggaagaa

SEQ ID NO: 329124 - RNA, 19 nt, Human
ucugcucugcagucucaug

SEQ ID NO: 329125 - RNA, 19 nt, Human
ugaccagcucgugggaccu

SEQ ID NO: 329126 - RNA, 20 nt, Human
ugagucuagagacaccaggc

SEQ ID NO: 329127 - RNA, 22 nt, Human
uggcaacacaaagacuguauuu

SEQ ID NO: 329128 - RNA, 20 nt, Human
uggcaguaaaaggggaacac

SEQ ID NO: 329129 - RNA, 25 nt, Human
uggcaguaaaaggggaacaccaagg

SEQ ID NO: 329130 - RNA, 18 nt, Human
ugggugggggaaauaaug

SEQ ID NO: 329131 - RNA, 20 nt, Human
ugggugggggaaauaaugag

SEQ ID NO: 329132 - RNA, 19 nt, Human
uuagaaaacagugggccca

SEQ ID NO: 329133 - RNA, 18 nt, Human
uucaggccugacgcagag

SEQ ID NO: 329134 - RNA, 21 nt, Human
aggucuuagccggcacaaucc

SEQ ID NO: 329135 - RNA, 23 nt, Human
auccucacguuagaaaacuccau

SEQ ID NO: 329136 - RNA, 23 nt, Human
caaaguucaugugaauaccucuc

SEQ ID NO: 329137 - RNA, 18 nt, Human
cacaagggucccaucucc

SEQ ID NO: 329138 - RNA, 20 nt, Human
cacaggaaaagcaagucacu

SEQ ID NO: 329139 - RNA, 20 nt, Human
cacguuagaaaacuccaucu

SEQ ID NO: 329140 - RNA, 19 nt, Human
cauucaucaccguucacac

SEQ ID NO: 329141 - RNA, 19 nt, Human
ggaccccuccucuuugcug

SEQ ID NO: 329142 - RNA, 19 nt, Human
ggcacaauccaacgcugca

SEQ ID NO: 329143 - RNA, 24 nt, Human
ggcaggucuuagccggcacaaucc

SEQ ID NO: 329144 - RNA, 21 nt, Human
gucccaucucccuggcagguc

SEQ ID NO: 329145 - RNA, 22 nt, Human
guuaaaaauauaaauaagucuc

SEQ ID NO: 329146 - RNA, 24 nt, Human
uaagucucauacaaaguucaugug

SEQ ID NO: 329147 - RNA, 22 nt, Human
ucuggaccccuccucuuugcug

SEQ ID NO: 329148 - RNA, 24 nt, Human
uggggccaggugccagugcgugcc

SEQ ID NO: 329149 - RNA, 18 nt, Human
aaacugcauccccacaac

SEQ ID NO: 329150 - RNA, 22 nt, Human
aaguacaaugaagggagggccg

SEQ ID NO: 329151 - RNA, 23 nt, Human
aaugauaaaguacaaugaaggga

SEQ ID NO: 329152 - RNA, 21 nt, Human
accaccgcaccgcgcccaagc

SEQ ID NO: 329153 - RNA, 18 nt, Human
agccccgggcaagucacc

SEQ ID NO: 329154 - RNA, 27 nt, Human
augccaaacugcauccccacaacccca

SEQ ID NO: 329155 - RNA, 23 nt, Human
caccaccgcaccgcgcccaagca

SEQ ID NO: 329156 - RNA, 24 nt, Human
caccacguagacagcagacagggc

SEQ ID NO: 329157 - RNA, 19 nt, Human
caccgcaccgcgcccaagc

SEQ ID NO: 329158 - RNA, 24 nt, Human
caccgcaccucugugccucggucc

SEQ ID NO: 329159 - RNA, 19 nt, Human
caggcuaccuggagccccg

SEQ ID NO: 329160 - RNA, 22 nt, Human
caucagagaacaaaaccaaaag

SEQ ID NO: 329161 - RNA, 23 nt, Human
caucaggggugcggagccuggga

SEQ ID NO: 329162 - RNA, 21 nt, Human
cauccccacaacccaccacgu

SEQ ID NO: 329163 - RNA, 22 nt, Human
ccaaacugcauccccacaaccc

SEQ ID NO: 329164 - RNA, 23 nt, Human
ccaaacugcauccccacaaccca

SEQ ID NO: 329165 - RNA, 18 nt, Human
ccgccgccgccgccgcca

SEQ ID NO: 329166 - RNA, 18 nt, Human
ccgccgccgccgccgcca

SEQ ID NO: 329167 - RNA, 21 nt, Human
ccgccgccgccgccgccauga

SEQ ID NO: 329168 - RNA, 18 nt, Human
ccgccgccgccgccgccg

SEQ ID NO: 329169 - RNA, 18 nt, Human
ccgcgcccaagcagcugc

SEQ ID NO: 329170 - RNA, 18 nt, Human
ccugcaggcuaccuggag

SEQ ID NO: 329171 - RNA, 30 nt, Human
cgcccaagcagcugccgccgccgccgccgg

SEQ ID NO: 329172 - RNA, 20 nt, Human
cgccgccgccgccgccgcca

SEQ ID NO: 329173 - RNA, 22 nt, Human
cggagccugggaggcacgcgag

SEQ ID NO: 329174 - RNA, 18 nt, Human
cggccgaagcgggcucag

SEQ ID NO: 329175 - RNA, 19 nt, Human
cgucccggccgaagcgggc

SEQ ID NO: 329176 - RNA, 19 nt, Human
cuagauacugagacacauc

SEQ ID NO: 329177 - RNA, 18 nt, Human
gaaguugauuuuuaauga

SEQ ID NO: 329178 - RNA, 18 nt, Human
gaccuggcucagacauga

SEQ ID NO: 329179 - RNA, 19 nt, Human
gccugggaggcacgcgagg

SEQ ID NO: 329180 - RNA, 22 nt, Human
gcgcagcaucaggggugcggag

SEQ ID NO: 329181 - RNA, 21 nt, Human
gcucagacaugaaucaugugc

SEQ ID NO: 329182 - RNA, 23 nt, Human
gcugccgccgccgccgccgccgg

SEQ ID NO: 329183 - RNA, 21 nt, Human
ggggcuaagccuagcugucug

SEQ ID NO: 329184 - RNA, 20 nt, Human
ggggugcuguggugguggua

SEQ ID NO: 329185 - RNA, 25 nt, Human
uacaaugaagggagggcagaggggc

SEQ ID NO: 329186 - RNA, 20 nt, Human
ucagacaugaaucaugugcu

SEQ ID NO: 329187 - RNA, 20 nt, Human
ugauaaaguacaaugaaggg

SEQ ID NO: 329188 - RNA, 19 nt, Human
ugcauccccacaacccacc

SEQ ID NO: 329189 - RNA, 19 nt, Human
ugccaaacugcauccccac

SEQ ID NO: 329190 - RNA, 19 nt, Human
ugccucgguccucagcugc

SEQ ID NO: 329191 - RNA, 18 nt, Human
ugcggagccugggaggca

SEQ ID NO: 329192 - RNA, 22 nt, Human
aaaaaagccacgucagcuuaaa

SEQ ID NO: 329193 - RNA, 22 nt, Human
aaaacaaaaaaccugguccuuu

SEQ ID NO: 329194 - RNA, 23 nt, Human
aaaagaaaacugguaggacagaa

SEQ ID NO: 329195 - RNA, 25 nt, Human
aaacaaaaaaccugguccuuuacca

SEQ ID NO: 329196 - RNA, 23 nt, Human
aaacauaacaauauauuacuaac

SEQ ID NO: 329197 - RNA, 19 nt, Human
aaaggcucugccaggagaa

SEQ ID NO: 329198 - RNA, 19 nt, Human
aaauggccugugaaacaga

SEQ ID NO: 329199 - RNA, 24 nt, Human
aacauuuccuuccucaccaauacc

SEQ ID NO: 329200 - RNA, 19 nt, Human
aaccauuugaguucucagc

SEQ ID NO: 329201 - RNA, 21 nt, Human
aagaagcaggguaaccauuug

SEQ ID NO: 329202 - RNA, 24 nt, Human
aagcgacucauaaugcaugugaau

SEQ ID NO: 329203 - RNA, 22 nt, Human
aauagccugagaccuugagaac

SEQ ID NO: 329204 - RNA, 20 nt, Human
acagaaaaaaagccacguca

SEQ ID NO: 329205 - RNA, 26 nt, Human
acagaaaaaaagccacgucagcuuaa

SEQ ID NO: 329206 - RNA, 21 nt, Human
acggaagcugaggaagaucag

SEQ ID NO: 329207 - RNA, 24 nt, Human
acuccaccacaaguccuggaauaa

SEQ ID NO: 329208 - RNA, 22 nt, Human
acucugcaacuuacggaagcug

SEQ ID NO: 329209 - RNA, 23 nt, Human
agaaaaaaagccacgucagcuua

SEQ ID NO: 329210 - RNA, 18 nt, Human
agaaucuguaaaagaaaa

SEQ ID NO: 329211 - RNA, 21 nt, Human
agaccuguagccccagcccag

SEQ ID NO: 329212 - RNA, 21 nt, Human
agagaggaaaacguguugugu

SEQ ID NO: 329213 - RNA, 19 nt, Human
agagaggagguaaaaggga

SEQ ID NO: 329214 - RNA, 22 nt, Human
agagaggagguaaaagggagga

SEQ ID NO: 329215 - RNA, 23 nt, Human
agagaggagguaaaagggaggau

SEQ ID NO: 329216 - RNA, 21 nt, Human
agagucccaggucucugcccc

SEQ ID NO: 329217 - RNA, 22 nt, Human
agaugaggggaaauaggauggg

SEQ ID NO: 329218 - RNA, 24 nt, Human
agggacccaagcuauaccccuucc

SEQ ID NO: 329219 - RNA, 18 nt, Human
agggcagcgggcagacuu

SEQ ID NO: 329220 - RNA, 23 nt, Human
aggugcagacugaguuguggaag

SEQ ID NO: 329221 - RNA, 25 nt, Human
agugagaaucuguaaaagaaaacug

SEQ ID NO: 329222 - RNA, 18 nt, Human
caacugaggugcagacug

SEQ ID NO: 329223 - RNA, 22 nt, Human
caauaccauaaaacauguaagg

SEQ ID NO: 329224 - RNA, 20 nt, Human
cacuccucacucagaauauu

SEQ ID NO: 329225 - RNA, 23 nt, Human
cagaaaaagaccacacuccucac

SEQ ID NO: 329226 - RNA, 18 nt, Human
cagcaccuagagagagga

SEQ ID NO: 329227 - RNA, 21 nt, Human
cagcagaaaaggaaggcuaga

SEQ ID NO: 329228 - RNA, 21 nt, Human
cagcugagcugaccagaguac

SEQ ID NO: 329229 - RNA, 19 nt, Human
caugaagccacccauacaa

SEQ ID NO: 329230 - RNA, 25 nt, Human
caugaagccacccauacaaucacaa

SEQ ID NO: 329231 - RNA, 21 nt, Human
cauuguaggaagaagcagggu

SEQ ID NO: 329232 - RNA, 22 nt, Human
ccaauaccauaaaacauguaag

SEQ ID NO: 329233 - RNA, 21 nt, Human
ccacagaaaaaaagccacguc

SEQ ID NO: 329234 - RNA, 18 nt, Human
ccagauccaagagaggga

SEQ ID NO: 329235 - RNA, 24 nt, Human
ccagauccaagagagggaguagag

SEQ ID NO: 329236 - RNA, 18 nt, Human
ccccaaaacagugcuacu

SEQ ID NO: 329237 - RNA, 18 nt, Human
ccccuccuccccagaucc

SEQ ID NO: 329238 - RNA, 18 nt, Human
cccuccuccccagaucca

SEQ ID NO: 329239 - RNA, 20 nt, Human
cccuccuccccagauccaag

SEQ ID NO: 329240 - RNA, 21 nt, Human
ccucacucugcaacuuacgga

SEQ ID NO: 329241 - RNA, 19 nt, Human
ccugaaccaagggacagga

SEQ ID NO: 329242 - RNA, 18 nt, Human
ccugaggucaaccugcuc

SEQ ID NO: 329243 - RNA, 22 nt, Human
cgagggccccaaaacagugcua

SEQ ID NO: 329244 - RNA, 18 nt, Human
cuagagagacagaggaaa

SEQ ID NO: 329245 - RNA, 19 nt, Human
cugaagccccaugacuaua

SEQ ID NO: 329246 - RNA, 19 nt, Human
cugcagacuugugcugguc

SEQ ID NO: 329247 - RNA, 22 nt, Human
cugcucacauucaaucaaaauc

SEQ ID NO: 329248 - RNA, 21 nt, Human
cuggguucacccauaucacac

SEQ ID NO: 329249 - RNA, 19 nt, Human
gacuugugcuggucaguga

SEQ ID NO: 329250 - RNA, 18 nt, Human
gagaaaauagugacacug

SEQ ID NO: 329251 - RNA, 24 nt, Human
gagcauagugacagaccuguagcc

SEQ ID NO: 329252 - RNA, 20 nt, Human
gaggaaggucaggggcuggg

SEQ ID NO: 329253 - RNA, 22 nt, Human
gaggggaaauaggaugggcccu

SEQ ID NO: 329254 - RNA, 22 nt, Human
gaucagaaaaagaccacacucc

SEQ ID NO: 329255 - RNA, 22 nt, Human
gcagaaaccacaauggaguagg

SEQ ID NO: 329256 - RNA, 22 nt, Human
gcagcagaaaaggaaggcuaga

SEQ ID NO: 329257 - RNA, 23 nt, Human
gcuggguucacccauaucacaca

SEQ ID NO: 329258 - RNA, 24 nt, Human
ggaagcugaggaagaucagaaaaa

SEQ ID NO: 329259 - RNA, 18 nt, Human
ggcacaaagacccuggac

SEQ ID NO: 329260 - RNA, 19 nt, Human
ggcagcacacagugugaac

SEQ ID NO: 329261 - RNA, 19 nt, Human
gucaggggcuggguucacc

SEQ ID NO: 329262 - RNA, 18 nt, Human
gucucugccccuccuccc

SEQ ID NO: 329263 - RNA, 21 nt, Human
gugaaggacuggaaaacaaaa

SEQ ID NO: 329264 - RNA, 18 nt, Human
uaaaggugaacaucagug

SEQ ID NO: 329265 - RNA, 19 nt, Human
uaaaggugaacaucagugu

SEQ ID NO: 329266 - RNA, 21 nt, Human
uaauauaccucacucugcaac

SEQ ID NO: 329267 - RNA, 23 nt, Human
uaauauaccucacucugcaacuu

SEQ ID NO: 329268 - RNA, 21 nt, Human
uacagcuuaaaccuaagcuuu

SEQ ID NO: 329269 - RNA, 26 nt, Human
uaccauaacuccaccacaaguccugg

SEQ ID NO: 329270 - RNA, 21 nt, Human
uagaggaaggucaggggcugg

SEQ ID NO: 329271 - RNA, 21 nt, Human
uagcagaagugagaaucugua

SEQ ID NO: 329272 - RNA, 21 nt, Human
uagcauuucaauguugcugug

SEQ ID NO: 329273 - RNA, 20 nt, Human
uauacagcuuaaaccuaagc

SEQ ID NO: 329274 - RNA, 25 nt, Human
ucaaucaaaaucaaaauaaaaauga

SEQ ID NO: 329275 - RNA, 24 nt, Human
ucaggucccaaugguucugcugac

SEQ ID NO: 329276 - RNA, 23 nt, Human
ucagugaacaccuuuuuuuuuuu

SEQ ID NO: 329277 - RNA, 20 nt, Human
uccaagcuacuuuccugaac

SEQ ID NO: 329278 - RNA, 19 nt, Human
ucccaggucucugccccuc

SEQ ID NO: 329279 - RNA, 22 nt, Human
ucccaggucucugccccuccuc

SEQ ID NO: 329280 - RNA, 19 nt, Human
uccuggaauaauuccaaaa

SEQ ID NO: 329281 - RNA, 21 nt, Human
ucuauccuuguccaguuuuug

SEQ ID NO: 329282 - RNA, 18 nt, Human
ucucaaaggcucugccag

SEQ ID NO: 329283 - RNA, 19 nt, Human
ucucaaaggcucugccagg

SEQ ID NO: 329284 - RNA, 22 nt, Human
ucugccccuccuccccagaucc

SEQ ID NO: 329285 - RNA, 18 nt, Human
ugaaccaggacagccagc

SEQ ID NO: 329286 - RNA, 23 nt, Human
ugacacauucuugcugaagaaca

SEQ ID NO: 329287 - RNA, 20 nt, Human
ugagaaaggaaagaaagugc

SEQ ID NO: 329288 - RNA, 24 nt, Human
ugaggaagaucagaaaaagaccag

SEQ ID NO: 329289 - RNA, 18 nt, Human
ugaggggaaauaggaugg

SEQ ID NO: 329290 - RNA, 23 nt, Human
ugaggucaaccugcucacauuca

SEQ ID NO: 329291 - RNA, 24 nt, Human
ugaguuguggaagguggguguuga

SEQ ID NO: 329292 - RNA, 21 nt, Human
ugccuugggaacaaagauaaa

SEQ ID NO: 329293 - RNA, 24 nt, Human
ugccuugggaacaaagauaaagug

SEQ ID NO: 329294 - RNA, 19 nt, Human
ugcuagggucuucagagag

SEQ ID NO: 329295 - RNA, 18 nt, Human
uggaaaacaaaaaaccug

SEQ ID NO: 329296 - RNA, 26 nt, Human
uggaacccagcauuacaauauugguu

SEQ ID NO: 329297 - RNA, 19 nt, Human
uggccaguuugggugcugu

SEQ ID NO: 329298 - RNA, 24 nt, Human
ugucagaagcucaaagcgacucau

SEQ ID NO: 329299 - RNA, 18 nt, Human
uucaaggggugaaaaguu

SEQ ID NO: 329300 - RNA, 24 nt, Human
uucaaggggugaaaaguuuuaacc

SEQ ID NO: 329301 - RNA, 22 nt, Human
uuccaagcuacuuuccugaacc

SEQ ID NO: 329302 - RNA, 19 nt, Human
uucccaaauagccugagac

SEQ ID NO: 329303 - RNA, 19 nt, Human
uucucuggaagugaaacuc

SEQ ID NO: 329304 - RNA, 23 nt, Human
uucugccccauggggccuugcag

SEQ ID NO: 329305 - RNA, 19 nt, Human
uugccgggucggcagcaca

SEQ ID NO: 329306 - RNA, 19 nt, Human
uuuuuuccaucucuggcag

SEQ ID NO: 329307 - RNA, 19 nt, Human
aaaacauaauacauuaaca

SEQ ID NO: 329308 - RNA, 24 nt, Human
aaacacggugcauuuuuuuccuca

SEQ ID NO: 329309 - RNA, 19 nt, Human
agcggcgcugcggaaggca

SEQ ID NO: 329310 - RNA, 18 nt, Human
aggagccggaaguggcug

SEQ ID NO: 329311 - RNA, 23 nt, Human
agguuccagaccacuuaggaguc

SEQ ID NO: 329312 - RNA, 25 nt, Human
auccuugccucauacuugccagaag

SEQ ID NO: 329313 - RNA, 25 nt, Human
caaccuuguuuuaagaaguaguaaa

SEQ ID NO: 329314 - RNA, 21 nt, Human
cauacuugccagaagcucaga

SEQ ID NO: 329315 - RNA, 21 nt, Human
cccucaagacuggacagccua

SEQ ID NO: 329316 - RNA, 18 nt, Human
ccuguuccugcagcuccc

SEQ ID NO: 329317 - RNA, 24 nt, Human
cggaaguggcugaaaaaaaaaaga

SEQ ID NO: 329318 - RNA, 19 nt, Human
cugcagcucccucaagacu

SEQ ID NO: 329319 - RNA, 21 nt, Human
cuugccucauacuugccagaa

SEQ ID NO: 329320 - RNA, 21 nt, Human
gaagacaguggcuaggagcac

SEQ ID NO: 329321 - RNA, 18 nt, Human
gcgaaacgcccacgcucc

SEQ ID NO: 329322 - RNA, 21 nt, Human
ggaauuuuugcuccaaguucu

SEQ ID NO: 329323 - RNA, 24 nt, Human
ggcuaggagcacauuccuuauaaa

SEQ ID NO: 329324 - RNA, 18 nt, Human
uaaaugguauacuuagga

SEQ ID NO: 329325 - RNA, 19 nt, Human
uaagaaguaguaaaaugaa

SEQ ID NO: 329326 - RNA, 19 nt, Human
uagauuucagucaugccug

SEQ ID NO: 329327 - RNA, 24 nt, Human
ucugaaggucucuuuuuccuguuc

SEQ ID NO: 329328 - RNA, 21 nt, Human
ucuggaaagcuugucuuuucc

SEQ ID NO: 329329 - RNA, 19 nt, Human
ugccagaagcucagagaca

SEQ ID NO: 329330 - RNA, 24 nt, Human
ugccuggaaaggagaagacagugg

SEQ ID NO: 329331 - RNA, 21 nt, Human
ugcgcuuuagcggcgcugcgg

SEQ ID NO: 329332 - RNA, 23 nt, Human
ugggaauuuuugcuccaaguucu

SEQ ID NO: 329333 - RNA, 21 nt, Human
uuagauuucagucaugccugg

SEQ ID NO: 329334 - RNA, 23 nt, Human
uuccagaccacuuaggagucugc

SEQ ID NO: 329335 - RNA, 18 nt, Human
uuccuagccgaaucugga

SEQ ID NO: 329336 - RNA, 21 nt, Human
aaacagaacagauaaaguuca

SEQ ID NO: 329337 - RNA, 22 nt, Human
aaagagaccccaacagacccug

SEQ ID NO: 329338 - RNA, 24 nt, Human
aaagcaaucuacacaccagacacc

SEQ ID NO: 329339 - RNA, 23 nt, Human
aacauacuuccccuucuccuccc

SEQ ID NO: 329340 - RNA, 18 nt, Human
aaggggggcagagacagg

SEQ ID NO: 329341 - RNA, 23 nt, Human
acagagaaaaaauaaaaucaaaa

SEQ ID NO: 329342 - RNA, 22 nt, Human
acaggaagcagccccccaaaac

SEQ ID NO: 329343 - RNA, 20 nt, Human
acauacuuccccuucuccuc

SEQ ID NO: 329344 - RNA, 21 nt, Human
accccaacagacccugccugc

SEQ ID NO: 329345 - RNA, 20 nt, Human
acccccgggugaagucucua

SEQ ID NO: 329346 - RNA, 20 nt, Human
agaaacagaacagauaaagu

SEQ ID NO: 329347 - RNA, 19 nt, Human
agaagcaggggggcucaga

SEQ ID NO: 329348 - RNA, 22 nt, Human
agacaagcagggggaccccuca

SEQ ID NO: 329349 - RNA, 21 nt, Human
agacaggaagcagccccccaa

SEQ ID NO: 329350 - RNA, 27 nt, Human
agaccccaacagacccugccugcccuu

SEQ ID NO: 329351 - RNA, 21 nt, Human
agagaaguaaaacaucucagg

SEQ ID NO: 329352 - RNA, 18 nt, Human
agagagccccauagaagc

SEQ ID NO: 329353 - RNA, 21 nt, Human
agagguaaaucaacaagacca

SEQ ID NO: 329354 - RNA, 21 nt, Human
agcagaucuggggaagggaua

SEQ ID NO: 329355 - RNA, 21 nt, Human
aggagccugucccucugcccc

SEQ ID NO: 329356 - RNA, 26 nt, Human
aggagggaggagggggcccagaggcu

SEQ ID NO: 329357 - RNA, 19 nt, Human
aggauaaaaagagacccca

SEQ ID NO: 329358 - RNA, 20 nt, Human
aggcagaagagagagcccca

SEQ ID NO: 329359 - RNA, 23 nt, Human
aggcagaagagagagccccauag

SEQ ID NO: 329360 - RNA, 24 nt, Human
aggcaggggcagucgccaggccua

SEQ ID NO: 329361 - RNA, 18 nt, Human
agggaggagggggcccag

SEQ ID NO: 329362 - RNA, 22 nt, Human
agggaggagggggcccagaggc

SEQ ID NO: 329363 - RNA, 26 nt, Human
aggggcagucgccaggccucccaagg

SEQ ID NO: 329364 - RNA, 19 nt, Human
agggggagucacagagcug

SEQ ID NO: 329365 - RNA, 21 nt, Human
agguaaaucaacaagaccaaa

SEQ ID NO: 329366 - RNA, 22 nt, Human
agguauaaaaggggagugcggg

SEQ ID NO: 329367 - RNA, 27 nt, Human
auaaaguucagaauucuaggcccaaaa

SEQ ID NO: 329368 - RNA, 19 nt, Human
auaaucacagaacaaagac

SEQ ID NO: 329369 - RNA, 22 nt, Human
caaagcaaucuacacaccagac

SEQ ID NO: 329370 - RNA, 25 nt, Human
caaagcaaucuacacaccagacacc

SEQ ID NO: 329371 - RNA, 21 nt, Human
caacaagaccaaagagacguc

SEQ ID NO: 329372 - RNA, 23 nt, Human
cacagagcugcucccagcacacc

SEQ ID NO: 329373 - RNA, 21 nt, Human
caccaucagugaaggcccagu

SEQ ID NO: 329374 - RNA, 25 nt, Human
caccccacagacaaagcaaucuaca

SEQ ID NO: 329375 - RNA, 22 nt, Human
caccccaccccacagacaaagc

SEQ ID NO: 329376 - RNA, 24 nt, Human
cagacaggaagcagccccccaaaa

SEQ ID NO: 329377 - RNA, 19 nt, Human
cagacccugccugcccuuc

SEQ ID NO: 329378 - RNA, 23 nt, Human
cauauugcuuccccaccccaccc

SEQ ID NO: 329379 - RNA, 23 nt, Human
cauggccccuuugguucucugcc

SEQ ID NO: 329380 - RNA, 19 nt, Human
ccaaaaaggagggacccuc

SEQ ID NO: 329381 - RNA, 22 nt, Human
ccaaaacauacuuccccuucuc

SEQ ID NO: 329382 - RNA, 27 nt, Human
ccaaaacauacuuccccuucuccuccc

SEQ ID NO: 329383 - RNA, 22 nt, Human
ccauuagaccccgguggccccu

SEQ ID NO: 329384 - RNA, 21 nt, Human
cccaaaacauacuuccccuuc

SEQ ID NO: 329385 - RNA, 21 nt, Human
cccaaggccuggcuccucuuu

SEQ ID NO: 329386 - RNA, 22 nt, Human
cccaauaaucacagaacaaaga

SEQ ID NO: 329387 - RNA, 21 nt, Human
cccaccccacagacaaagcaa

SEQ ID NO: 329388 - RNA, 20 nt, Human
cccaccugugaaaggggagg

SEQ ID NO: 329389 - RNA, 18 nt, Human
cccagaaaccccaguccc

SEQ ID NO: 329390 - RNA, 20 nt, Human
ccccaacagacccugccugc

SEQ ID NO: 329391 - RNA, 18 nt, Human
ccccaauaaucacagaac

SEQ ID NO: 329392 - RNA, 19 nt, Human
ccccaauaaucacagaaca

SEQ ID NO: 329393 - RNA, 21 nt, Human
ccccacagacaaagcaaucua

SEQ ID NO: 329394 - RNA, 21 nt, Human
ccccaccccacagacaaagca

SEQ ID NO: 329395 - RNA, 18 nt, Human
ccccaccccaccccacag

SEQ ID NO: 329396 - RNA, 18 nt, Human
ccccaccccaccccacag

SEQ ID NO: 329397 - RNA, 19 nt, Human
ccccaccccaccccacaga

SEQ ID NO: 329398 - RNA, 19 nt, Human
ccccagaaaccccaguccc

SEQ ID NO: 329399 - RNA, 22 nt, Human
ccccagaaaccccagucccucu

SEQ ID NO: 329400 - RNA, 25 nt, Human
ccccagaggagccugucccucugcc

SEQ ID NO: 329401 - RNA, 21 nt, Human
ccccccaaaacauacuucccc

SEQ ID NO: 329402 - RNA, 21 nt, Human
ccccuucuccucccacagaaa

SEQ ID NO: 329403 - RNA, 23 nt, Human
cccgcaccagcggaggacaaggg

SEQ ID NO: 329404 - RNA, 19 nt, Human
cccuggggaggauggagag

SEQ ID NO: 329405 - RNA, 18 nt, Human
ccugagaaggcagaagag

SEQ ID NO: 329406 - RNA, 18 nt, Human
ccugccccccggcugcac

SEQ ID NO: 329407 - RNA, 21 nt, Human
ccugccugcccuucccugccc

SEQ ID NO: 329408 - RNA, 18 nt, Human
cgccggcucagggucgcg

SEQ ID NO: 329409 - RNA, 22 nt, Human
cgcuagcugcgucccggggcgc

SEQ ID NO: 329410 - RNA, 21 nt, Human
cgcucgucuaugccccgcaac

SEQ ID NO: 329411 - RNA, 19 nt, Human
cggcucagggucgcgcuag

SEQ ID NO: 329412 - RNA, 18 nt, Human
cuaggcccaaaagggugc

SEQ ID NO: 329413 - RNA, 22 nt, Human
cuuccccaccccaccccacaga

SEQ ID NO: 329414 - RNA, 21 nt, Human
gaaaugggaaaagccagcuug

SEQ ID NO: 329415 - RNA, 21 nt, Human
gaagagauggcuccagugugg

SEQ ID NO: 329416 - RNA, 27 nt, Human
gaaggggggcagagacaggggcagggc

SEQ ID NO: 329417 - RNA, 22 nt, Human
gacaauuaggucgggggaggaa

SEQ ID NO: 329418 - RNA, 23 nt, Human
gaccuuuggaggggcugggcuga

SEQ ID NO: 329419 - RNA, 22 nt, Human
gagcaagaggcuccugagggcu

SEQ ID NO: 329420 - RNA, 22 nt, Human
gaggauggagagugggcagccu

SEQ ID NO: 329421 - RNA, 19 nt, Human
gcagaagagagagccccau

SEQ ID NO: 329422 - RNA, 18 nt, Human
gcagguauaaaaggggag

SEQ ID NO: 329423 - RNA, 18 nt, Human
gccugcccuucccugccc

SEQ ID NO: 329424 - RNA, 18 nt, Human
gcuggggaaggggggcag

SEQ ID NO: 329425 - RNA, 26 nt, Human
ggaaaagccagcuuggaaguuuacag

SEQ ID NO: 329426 - RNA, 20 nt, Human
ggaauaaggauaaaaagaga

SEQ ID NO: 329427 - RNA, 19 nt, Human
ggacaaggguuccaguuuc

SEQ ID NO: 329428 - RNA, 22 nt, Human
ggacguacaugggcuggggugg

SEQ ID NO: 329429 - RNA, 23 nt, Human
ggagagcuacaggagggaggagg

SEQ ID NO: 329430 - RNA, 18 nt, Human
ggagccugucccucugcc

SEQ ID NO: 329431 - RNA, 18 nt, Human
ggcccagaggcucuggca

SEQ ID NO: 329432 - RNA, 21 nt, Human
gggaaggggggcagagacagg

SEQ ID NO: 329433 - RNA, 23 nt, Human
gggaaguaaagaagggguuucca

SEQ ID NO: 329434 - RNA, 19 nt, Human
gggaggauggagagugggc

SEQ ID NO: 329435 - RNA, 20 nt, Human
gggcccagaggcucuggcag

SEQ ID NO: 329436 - RNA, 22 nt, Human
gggcugaccuucccccaaaaag

SEQ ID NO: 329437 - RNA, 22 nt, Human
gggggcucagaagguucagggg

SEQ ID NO: 329438 - RNA, 21 nt, Human
ggggggcagagacaggggcag

SEQ ID NO: 329439 - RNA, 18 nt, Human
gggguggagcccccagcc

SEQ ID NO: 329440 - RNA, 27 nt, Human
ggugaugaagaagagauacaaaaggga

SEQ ID NO: 329441 - RNA, 20 nt, Human
guaaaucaacaagaccaaag

SEQ ID NO: 329442 - RNA, 23 nt, Human
uaaaacaguccugggagcuauga

SEQ ID NO: 329443 - RNA, 21 nt, Human
uaaaucaacaagaccaaagag

SEQ ID NO: 329444 - RNA, 22 nt, Human
uagaaaacauuauugcuggaga

SEQ ID NO: 329445 - RNA, 19 nt, Human
uagaagcaggggggcucag

SEQ ID NO: 329446 - RNA, 21 nt, Human
uagaagcaggggggcucagaa

SEQ ID NO: 329447 - RNA, 22 nt, Human
ucacagagcugcucccagcaca

SEQ ID NO: 329448 - RNA, 21 nt, Human
ucagaagguucagggguucac

SEQ ID NO: 329449 - RNA, 19 nt, Human
ucagaccuuuggaggggcu

SEQ ID NO: 329450 - RNA, 19 nt, Human
ucaguagaacaagagcagg

SEQ ID NO: 329451 - RNA, 23 nt, Human
uccaaauagcagcaguuuauaaa

SEQ ID NO: 329452 - RNA, 18 nt, Human
uccaggcacgccgucccg

SEQ ID NO: 329453 - RNA, 22 nt, Human
uccauggccccuuugguucucu

SEQ ID NO: 329454 - RNA, 18 nt, Human
ucccacagaaacagaaca

SEQ ID NO: 329455 - RNA, 19 nt, Human
ucccgcaccagcggaggac

SEQ ID NO: 329456 - RNA, 23 nt, Human
uccuugguaaagagcucuggggg

SEQ ID NO: 329457 - RNA, 22 nt, Human
ugaagugaaagagggggaguca

SEQ ID NO: 329458 - RNA, 26 nt, Human
ugaagugaaagagggggagucacaga

SEQ ID NO: 329459 - RNA, 23 nt, Human
ugaggaagagauggcuccagugu

SEQ ID NO: 329460 - RNA, 24 nt, Human
ugagggcuuacucagacaggaagc

SEQ ID NO: 329461 - RNA, 20 nt, Human
ugccccaaauccuaucaugc

SEQ ID NO: 329462 - RNA, 21 nt, Human
ugcuaagaaacaauaaaauac

SEQ ID NO: 329463 - RNA, 19 nt, Human
ugcuggcuggggaaggggg

SEQ ID NO: 329464 - RNA, 19 nt, Human
ugcuuccccaccccacccc

SEQ ID NO: 329465 - RNA, 25 nt, Human
ugcuuccccaccccaccccacagac

SEQ ID NO: 329466 - RNA, 23 nt, Human
uggaaguuuacagagaaaaaaua

SEQ ID NO: 329467 - RNA, 19 nt, Human
uggaccccagaaaccccag

SEQ ID NO: 329468 - RNA, 21 nt, Human
uggacugucaccauuagaccc

SEQ ID NO: 329469 - RNA, 23 nt, Human
uggagggagccggguguccccca

SEQ ID NO: 329470 - RNA, 22 nt, Human
uggccaggccaguucgugggga

SEQ ID NO: 329471 - RNA, 18 nt, Human
uggcuggggaaggggggc

SEQ ID NO: 329472 - RNA, 20 nt, Human
uggcuggggaaggggggcag

SEQ ID NO: 329473 - RNA, 24 nt, Human
uggcuggggaaggggggcagagac

SEQ ID NO: 329474 - RNA, 18 nt, Human
ugggaaaagccagcuugg

SEQ ID NO: 329475 - RNA, 19 nt, Human
ugggaaaagccagcuugga

SEQ ID NO: 329476 - RNA, 21 nt, Human
ugggaaaagccagcuuggaag

SEQ ID NO: 329477 - RNA, 21 nt, Human
ugggaaaagccagcuuggaag

SEQ ID NO: 329478 - RNA, 21 nt, Human
uggggaggauggagagugggc

SEQ ID NO: 329479 - RNA, 20 nt, Human
uggggaugcuggcuggggaa

SEQ ID NO: 329480 - RNA, 23 nt, Human
uggggugcuggccaggccaguuc

SEQ ID NO: 329481 - RNA, 20 nt, Human
ugugcuaagaaacaauaaaa

SEQ ID NO: 329482 - RNA, 25 nt, Human
uuccagacccccugagugccgaucc

SEQ ID NO: 329483 - RNA, 18 nt, Human
uugguucucugccuuugg

SEQ ID NO: 329484 - RNA, 18 nt, Human
uuuccaaauagcagcagu

SEQ ID NO: 329485 - RNA, 25 nt, Human
aaaaagcagcaccaagaaagggcau

SEQ ID NO: 329486 - RNA, 26 nt, Human
aaaaucucucugaucauuagcuacua

SEQ ID NO: 329487 - RNA, 24 nt, Human
aagaaugacagaaccaugagcacu

SEQ ID NO: 329488 - RNA, 21 nt, Human
aagcagcaccaagaaagggcc

SEQ ID NO: 329489 - RNA, 21 nt, Human
aauuucaggauggaauccugg

SEQ ID NO: 329490 - RNA, 22 nt, Human
acagcagaugaaccuccuacuu

SEQ ID NO: 329491 - RNA, 20 nt, Human
acagggcagcccgucccacu

SEQ ID NO: 329492 - RNA, 20 nt, Human
acuagaacacagacuaccca

SEQ ID NO: 329493 - RNA, 20 nt, Human
acucaccauacccccuuccc

SEQ ID NO: 329494 - RNA, 20 nt, Human
acuugcucuguccucccacc

SEQ ID NO: 329495 - RNA, 30 nt, Human
agacauuagaggcgcacagcagaugaaccu

SEQ ID NO: 329496 - RNA, 19 nt, Human
agcagaugaaccuccuacu

SEQ ID NO: 329497 - RNA, 21 nt, Human
aguuccauuuauucuucguac

SEQ ID NO: 329498 - RNA, 21 nt, Human
augagcacuccuaccaaaacu

SEQ ID NO: 329499 - RNA, 21 nt, Human
caaaacucagcucugcucagc

SEQ ID NO: 329500 - RNA, 18 nt, Human
caacuccuaacacauccc

SEQ ID NO: 329501 - RNA, 18 nt, Human
caagaaguacagcaaagg

SEQ ID NO: 329502 - RNA, 22 nt, Human
caagaaguacagcaaaggcuua

SEQ ID NO: 329503 - RNA, 25 nt, Human
caagaaugacagaaccaugagcacu

SEQ ID NO: 329504 - RNA, 23 nt, Human
caagcaaaccuuccuccuaugcc

SEQ ID NO: 329505 - RNA, 18 nt, Human
caaggaagcuggacuauc

SEQ ID NO: 329506 - RNA, 21 nt, Human
caauucaacccaacaggccaa

SEQ ID NO: 329507 - RNA, 23 nt, Human
cacaagcaaaccuuccuccuaug

SEQ ID NO: 329508 - RNA, 24 nt, Human
cagaaccaugagcacuccuaccaa

SEQ ID NO: 329509 - RNA, 24 nt, Human
cagcccgcccccuugguaggccca

SEQ ID NO: 329510 - RNA, 21 nt, Human
cagccucauuucacaagcaaa

SEQ ID NO: 329511 - RNA, 25 nt, Human
caggagagguccaagaaugacagaa

SEQ ID NO: 329512 - RNA, 20 nt, Human
caggauggaauccugggacc

SEQ ID NO: 329513 - RNA, 24 nt, Human
ccaccaacguuccugaauacagcc

SEQ ID NO: 329514 - RNA, 22 nt, Human
ccacccagccucauuucacaag

SEQ ID NO: 329515 - RNA, 27 nt, Human
ccagacacucuguagcaauuggcccuu

SEQ ID NO: 329516 - RNA, 25 nt, Human
ccccacgcguccgcccacgcguccg

SEQ ID NO: 329517 - RNA, 20 nt, Human
cccgcucccacccagccuca

SEQ ID NO: 329518 - RNA, 20 nt, Human
ccuaacacaucccauccaga

SEQ ID NO: 329519 - RNA, 23 nt, Human
ccuacguugaggcagcuccugaa

SEQ ID NO: 329520 - RNA, 19 nt, Human
ccuaugccacacacccaga

SEQ ID NO: 329521 - RNA, 23 nt, Human
ccuaugccacacacccagacacu

SEQ ID NO: 329522 - RNA, 23 nt, Human
ccuccuaugccacacacccagac

SEQ ID NO: 329523 - RNA, 22 nt, Human
cucacagggcagcccgucccac

SEQ ID NO: 329524 - RNA, 21 nt, Human
cucagagaugacacagcucau

SEQ ID NO: 329525 - RNA, 18 nt, Human
cugcucccucaucuuccu

SEQ ID NO: 329526 - RNA, 23 nt, Human
cuuaugguaacacugaaccuauu

SEQ ID NO: 329527 - RNA, 19 nt, Human
cuuauggucaucagcccgc

SEQ ID NO: 329528 - RNA, 21 nt, Human
gaaccuccuacuuacacugcc

SEQ ID NO: 329529 - RNA, 23 nt, Human
gagcgcccccacgcguccgccca

SEQ ID NO: 329530 - RNA, 24 nt, Human
gaucuagucccuccccgcucccac

SEQ ID NO: 329531 - RNA, 20 nt, Human
gcaccaagaaagggcaugau

SEQ ID NO: 329532 - RNA, 21 nt, Human
ggaaaggacagacauuacaga

SEQ ID NO: 329533 - RNA, 21 nt, Human
ggaugagggauugccgcacuc

SEQ ID NO: 329534 - RNA, 22 nt, Human
guugaggcagcuccugaaaggc

SEQ ID NO: 329535 - RNA, 22 nt, Human
uaaaaaaaaaaucucucugauc

SEQ ID NO: 329536 - RNA, 21 nt, Human
uacaaagaaaaauaaauuuca

SEQ ID NO: 329537 - RNA, 19 nt, Human
uaccaaaacucagcucugc

SEQ ID NO: 329538 - RNA, 21 nt, Human
uacccaaaaagcagcaccaag

SEQ ID NO: 329539 - RNA, 24 nt, Human
uacccaaaaagcagcaccaagaaa

SEQ ID NO: 329540 - RNA, 23 nt, Human
ucacaagcaaaccuuccuccuau

SEQ ID NO: 329541 - RNA, 25 nt, Human
ucagccaaaucaacaauucaaccca

SEQ ID NO: 329542 - RNA, 26 nt, Human
ucagccaaaucaacaauucaacccaa

SEQ ID NO: 329543 - RNA, 20 nt, Human
uccaagaaugacagaaccau

SEQ ID NO: 329544 - RNA, 20 nt, Human
uccuacuuacacugcccaag

SEQ ID NO: 329545 - RNA, 20 nt, Human
uccuccuaugccacacaccc

SEQ ID NO: 329546 - RNA, 23 nt, Human
ucuccccuagaaacauuucaaga

SEQ ID NO: 329547 - RNA, 22 nt, Human
ucuguagcuggauguacagccc

SEQ ID NO: 329548 - RNA, 28 nt, Human
ucuucguacaaauauuuuacaguuuuau

SEQ ID NO: 329549 - RNA, 25 nt, Human
ugaaccuccuacuuacacugcccaa

SEQ ID NO: 329550 - RNA, 19 nt, Human
ugccacacacccagacacu

SEQ ID NO: 329551 - RNA, 21 nt, Human
ugccacacacccagacacucu

SEQ ID NO: 329552 - RNA, 21 nt, Human
ugcucuguccucccaccaacg

SEQ ID NO: 329553 - RNA, 21 nt, Human
uggacacucacagggcagccc

SEQ ID NO: 329554 - RNA, 19 nt, Human
uggcaagauugcacuuucu

SEQ ID NO: 329555 - RNA, 24 nt, Human
ugguaggcccauuuggggagaggg

SEQ ID NO: 329556 - RNA, 23 nt, Human
uguagcuggauguacagcccuug

SEQ ID NO: 329557 - RNA, 19 nt, Human
uguaggaacuagaacacag

SEQ ID NO: 329558 - RNA, 19 nt, Human
uugcucuguccucccacca

SEQ ID NO: 329559 - RNA, 20 nt, Human
uugcucuguccucccaccaa

SEQ ID NO: 329560 - RNA, 19 nt, Human
uuucacaagcaaaccuucc

SEQ ID NO: 329561 - RNA, 23 nt, Human
aaagggccaggacagaacugaua

SEQ ID NO: 329562 - RNA, 19 nt, Human
aagagaaggugguggcagg

SEQ ID NO: 329563 - RNA, 20 nt, Human
acaguaaccacccucccaca

SEQ ID NO: 329564 - RNA, 18 nt, Human
agagaagagaagguggug

SEQ ID NO: 329565 - RNA, 23 nt, Human
agcagaaacuguggccaggucca

SEQ ID NO: 329566 - RNA, 22 nt, Human
agcuggccagcgccgaugaagc

SEQ ID NO: 329567 - RNA, 22 nt, Human
aggggccgggagggggcguggg

SEQ ID NO: 329568 - RNA, 18 nt, Human
agggggcgugggauccca

SEQ ID NO: 329569 - RNA, 21 nt, Human
aggugguggcaggaugguggg

SEQ ID NO: 329570 - RNA, 18 nt, Human
agucaggacacugggggc

SEQ ID NO: 329571 - RNA, 19 nt, Human
augaagcccacgcucaugc

SEQ ID NO: 329572 - RNA, 23 nt, Human
augaagcccacgcucaugcuguc

SEQ ID NO: 329573 - RNA, 25 nt, Human
caaggagcccuuuccccaaaugucc

SEQ ID NO: 329574 - RNA, 20 nt, Human
cacccacaguaaccacccuc

SEQ ID NO: 329575 - RNA, 22 nt, Human
caccccuguucugggcugggaa

SEQ ID NO: 329576 - RNA, 23 nt, Human
cagaugcccuccaagaugugggc

SEQ ID NO: 329577 - RNA, 25 nt, Human
cagcccaaggagcccuuuccccaaa

SEQ ID NO: 329578 - RNA, 18 nt, Human
cagcuucuucucaaugga

SEQ ID NO: 329579 - RNA, 18 nt, Human
ccaagaugugggcgggcc

SEQ ID NO: 329580 - RNA, 23 nt, Human
ccaggacagaacugauagcaccc

SEQ ID NO: 329581 - RNA, 18 nt, Human
ccaggaugaaggggauga

SEQ ID NO: 329582 - RNA, 19 nt, Human
cccaaggagcccuuucccc

SEQ ID NO: 329583 - RNA, 22 nt, Human
cccccaucuuccugagagcaga

SEQ ID NO: 329584 - RNA, 21 nt, Human
cccguccuccaccugggcgug

SEQ ID NO: 329585 - RNA, 21 nt, Human
ccuagugacaagagaagagaa

SEQ ID NO: 329586 - RNA, 19 nt, Human
ccuccaagaugugggcggg

SEQ ID NO: 329587 - RNA, 24 nt, Human
ccucccagggaggucaggagcagg

SEQ ID NO: 329588 - RNA, 18 nt, Human
ccucccguccuccaccug

SEQ ID NO: 329589 - RNA, 21 nt, Human
ccucccguccuccaccugggc

SEQ ID NO: 329590 - RNA, 22 nt, Human
ccucccguccuccaccugggcg

SEQ ID NO: 329591 - RNA, 24 nt, Human
ccuccucauguggcagacagaagu

SEQ ID NO: 329592 - RNA, 22 nt, Human
ccucuggcccuucucacacggg

SEQ ID NO: 329593 - RNA, 22 nt, Human
cgaaacgcugacagcuucuucu

SEQ ID NO: 329594 - RNA, 19 nt, Human
cuagugacaagagaagaga

SEQ ID NO: 329595 - RNA, 20 nt, Human
cucccugaauggagggcagg

SEQ ID NO: 329596 - RNA, 20 nt, Human
cucccuggcuaugucccugg

SEQ ID NO: 329597 - RNA, 19 nt, Human
cucuagaggaagguggucc

SEQ ID NO: 329598 - RNA, 21 nt, Human
cugacagcuucuucucaaugg

SEQ ID NO: 329599 - RNA, 30 nt, Human
cugagagcagaaacuguggccagguccauu

SEQ ID NO: 329600 - RNA, 20 nt, Human
cugauggugacgccggccgc

SEQ ID NO: 329601 - RNA, 21 nt, Human
cugcaccgucuccuuguugug

SEQ ID NO: 329602 - RNA, 21 nt, Human
cugcgcugaucagagccacag

SEQ ID NO: 329603 - RNA, 21 nt, Human
cuggccccugcgcugaucaga

SEQ ID NO: 329604 - RNA, 22 nt, Human
gaaacgcugacagcuucuucuc

SEQ ID NO: 329605 - RNA, 18 nt, Human
gaaacuguggccaggucc

SEQ ID NO: 329606 - RNA, 21 nt, Human
gaaggccuccacuauuccacc

SEQ ID NO: 329607 - RNA, 24 nt, Human
gaauggagggcagggaggggccgg

SEQ ID NO: 329608 - RNA, 20 nt, Human
gacaugguuugggagcagag

SEQ ID NO: 329609 - RNA, 18 nt, Human
gagguugagguuggggaa

SEQ ID NO: 329610 - RNA, 21 nt, Human
gaguaggagugggugaagacc

SEQ ID NO: 329611 - RNA, 20 nt, Human
gaucccaccucugcugagcc

SEQ ID NO: 329612 - RNA, 19 nt, Human
gcaggaggugguggccaca

SEQ ID NO: 329613 - RNA, 19 nt, Human
gcagggccucccuccucau

SEQ ID NO: 329614 - RNA, 22 nt, Human
gccagcgccgaugaagcccacg

SEQ ID NO: 329615 - RNA, 24 nt, Human
ggaagugauguggccccucccugg

SEQ ID NO: 329616 - RNA, 20 nt, Human
ggcagggaggggccgggagg

SEQ ID NO: 329617 - RNA, 21 nt, Human
gggaagcacuugcagaccaca

SEQ ID NO: 329618 - RNA, 19 nt, Human
gggaggggccgggaggggg

SEQ ID NO: 329619 - RNA, 23 nt, Human
gggcagggaggggccgggagggg

SEQ ID NO: 329620 - RNA, 20 nt, Human
gggcuguggcccuucacgcu

SEQ ID NO: 329621 - RNA, 24 nt, Human
guggcauacacgguggcccccucc

SEQ ID NO: 329622 - RNA, 20 nt, Human
gugguccugacaugguuugg

SEQ ID NO: 329623 - RNA, 25 nt, Human
ucaggagcaggaggugguggccaca

SEQ ID NO: 329624 - RNA, 20 nt, Human
ucaguugaaggccuccacua

SEQ ID NO: 329625 - RNA, 24 nt, Human
uccacccacaguaaccacccuccc

SEQ ID NO: 329626 - RNA, 19 nt, Human
uccaggaugaaggggauga

SEQ ID NO: 329627 - RNA, 19 nt, Human
ucccaccucugcugagccu

SEQ ID NO: 329628 - RNA, 22 nt, Human
uccccaaauguccaugggaucu

SEQ ID NO: 329629 - RNA, 24 nt, Human
uccccaaauguccaugggaucugc

SEQ ID NO: 329630 - RNA, 19 nt, Human
ucggcgccuauuucaucca

SEQ ID NO: 329631 - RNA, 20 nt, Human
ucuagaggaaggugguccug

SEQ ID NO: 329632 - RNA, 20 nt, Human
ucuuccugagagcagaaacu

SEQ ID NO: 329633 - RNA, 18 nt, Human
ucuugugggcagccaaga

SEQ ID NO: 329634 - RNA, 21 nt, Human
ugaaagccuuggccagggcaa

SEQ ID NO: 329635 - RNA, 18 nt, Human
uggccagggcaaaagcca

SEQ ID NO: 329636 - RNA, 18 nt, Human
uggccagggcaaaagcca

SEQ ID NO: 329637 - RNA, 19 nt, Human
ugggaucccaccucugcug

SEQ ID NO: 329638 - RNA, 19 nt, Human
ugggcugggaagcacuugc

SEQ ID NO: 329639 - RNA, 22 nt, Human
ugguggcaggaugguggucagg

SEQ ID NO: 329640 - RNA, 24 nt, Human
uguggcagacagaagucaggacac

SEQ ID NO: 329641 - RNA, 20 nt, Human
ugugucuguccucaaugucg

SEQ ID NO: 329642 - RNA, 21 nt, Human
uuacauugacauuuuaaucag

SEQ ID NO: 329643 - RNA, 23 nt, Human
uuccacccacaguaaccacccuc

SEQ ID NO: 329644 - RNA, 21 nt, Human
uuccagugggaagugaugugg

SEQ ID NO: 329645 - RNA, 22 nt, Human
aaaaaagggggaagaauccaaa

SEQ ID NO: 329646 - RNA, 18 nt, Human
aacgugaagaccuuuugg

SEQ ID NO: 329647 - RNA, 19 nt, Human
aacugggagacaagagcgg

SEQ ID NO: 329648 - RNA, 22 nt, Human
aagcagccauggguuuuccucg

SEQ ID NO: 329649 - RNA, 19 nt, Human
aagcugcaagcaucuggaa

SEQ ID NO: 329650 - RNA, 20 nt, Human
acaaguuuaacgugaagacc

SEQ ID NO: 329651 - RNA, 21 nt, Human
accuuuuggaaaauucccggg

SEQ ID NO: 329652 - RNA, 24 nt, Human
agaguugccccuuuucuaaaauuc

SEQ ID NO: 329653 - RNA, 22 nt, Human
caaaaggucaaucuucccagug

SEQ ID NO: 329654 - RNA, 22 nt, Human
caaauaaauacaaaaggucaau

SEQ ID NO: 329655 - RNA, 22 nt, Human
caacaggcagacccuaccaggg

SEQ ID NO: 329656 - RNA, 22 nt, Human
cacaaauaaauacaaaagguca

SEQ ID NO: 329657 - RNA, 24 nt, Human
caggaagcugcaagcaucuggaau

SEQ ID NO: 329658 - RNA, 20 nt, Human
cgauguggucacuaaccaag

SEQ ID NO: 329659 - RNA, 21 nt, Human
cuaguaccaacuaaaugcgaa

SEQ ID NO: 329660 - RNA, 24 nt, Human
cuuccucaccaccgccgccuucgc

SEQ ID NO: 329661 - RNA, 22 nt, Human
gacuuggcaaagucccuaucgg

SEQ ID NO: 329662 - RNA, 21 nt, Human
gccauggguuuuccucgccuu

SEQ ID NO: 329663 - RNA, 20 nt, Human
gcucaguggggaacauccug

SEQ ID NO: 329664 - RNA, 20 nt, Human
gugaagaccuuuuggaaaau

SEQ ID NO: 329665 - RNA, 19 nt, Human
uaaaugcgaagggggacug

SEQ ID NO: 329666 - RNA, 20 nt, Human
uaucuuccucaccaccgccg

SEQ ID NO: 329667 - RNA, 18 nt, Human
ucaaaaaagggggaagaa

SEQ ID NO: 329668 - RNA, 22 nt, Human
ucaaaaaagggggaagaaucca

SEQ ID NO: 329669 - RNA, 18 nt, Human
ucacgggggacacagcau

SEQ ID NO: 329670 - RNA, 21 nt, Human
uccaaaucuuuccuuuuugaa

SEQ ID NO: 329671 - RNA, 22 nt, Human
uccaaaucuuuccuuuuugaag

SEQ ID NO: 329672 - RNA, 20 nt, Human
ucccggguuuuccuggcucu

SEQ ID NO: 329673 - RNA, 26 nt, Human
uccugcugcagcuugggucgucgucg

SEQ ID NO: 329674 - RNA, 21 nt, Human
uccuggaugcaggaagcugca

SEQ ID NO: 329675 - RNA, 24 nt, Human
ucugaugagaaugcuaaaaagaag

SEQ ID NO: 329676 - RNA, 23 nt, Human
ugagaaugcuaaaaagaagaguu

SEQ ID NO: 329677 - RNA, 22 nt, Human
ugcuaaaaagaagaguugcccc

SEQ ID NO: 329678 - RNA, 22 nt, Human
ugcugcagcuuggguuccagcu

SEQ ID NO: 329679 - RNA, 27 nt, Human
uucaagcaucacugcuguagauauucc

SEQ ID NO: 329680 - RNA, 20 nt, Human
uucccggguuuuccuggcuc

SEQ ID NO: 329681 - RNA, 24 nt, Human
uuguuuuggaggaaaaggguagga

SEQ ID NO: 329682 - RNA, 23 nt, Human
uuuuuauggggaaaaugcaccuu

SEQ ID NO: 329683 - RNA, 21 nt, Human
aaaaagagccuccccgcagcc

SEQ ID NO: 329684 - RNA, 23 nt, Human
aaacaagaaaaggcuucagcuag

SEQ ID NO: 329685 - RNA, 21 nt, Human
aagaaaacaaaugcccgcugg

SEQ ID NO: 329686 - RNA, 22 nt, Human
aagaugugugcaaaguucuggg

SEQ ID NO: 329687 - RNA, 23 nt, Human
aagcugugucagccaacuucauc

SEQ ID NO: 329688 - RNA, 22 nt, Human
accaaggccucugagacagcag

SEQ ID NO: 329689 - RNA, 22 nt, Human
agacagcagacacaagcaccca

SEQ ID NO: 329690 - RNA, 21 nt, Human
agagauggaggaggaaagcgg

SEQ ID NO: 329691 - RNA, 21 nt, Human
agagccaggacagagggcagg

SEQ ID NO: 329692 - RNA, 30 nt, Human
agagccuccccgcagcccagauccagcauu

SEQ ID NO: 329693 - RNA, 19 nt, Human
agaggcucaacacuaaaga

SEQ ID NO: 329694 - RNA, 21 nt, Human
agagggcagggggcagggggc

SEQ ID NO: 329695 - RNA, 20 nt, Human
agaugugugcaaaguucugg

SEQ ID NO: 329696 - RNA, 19 nt, Human
agcacauuccuuccuuacc

SEQ ID NO: 329697 - RNA, 18 nt, Human
agccuguucccugcccuc

SEQ ID NO: 329698 - RNA, 19 nt, Human
agcgggagggcacagaccu

SEQ ID NO: 329699 - RNA, 21 nt, Human
aggaggugcaaagucagcaag

SEQ ID NO: 329700 - RNA, 23 nt, Human
aggcagguugccagccuugggga

SEQ ID NO: 329701 - RNA, 25 nt, Human
aggcuguagugcucuggugggcugu

SEQ ID NO: 329702 - RNA, 22 nt, Human
agggcacagaccugcccccugc

SEQ ID NO: 329703 - RNA, 23 nt, Human
agggggcagggggcugugaagga

SEQ ID NO: 329704 - RNA, 21 nt, Human
aggugcugaagcugcagggcu

SEQ ID NO: 329705 - RNA, 19 nt, Human
caacacuaaagacaucggc

SEQ ID NO: 329706 - RNA, 25 nt, Human
caagcacaaaagugaccaaguacaa

SEQ ID NO: 329707 - RNA, 19 nt, Human
caagcacccacacaaugcc

SEQ ID NO: 329708 - RNA, 20 nt, Human
caagcacccacacaaugccc

SEQ ID NO: 329709 - RNA, 25 nt, Human
caaugcccauuggauggcuacaaag

SEQ ID NO: 329710 - RNA, 21 nt, Human
cacaaauggguuccuccggga

SEQ ID NO: 329711 - RNA, 27 nt, Human
cacacaaugcccauuggauggcuacaa

SEQ ID NO: 329712 - RNA, 24 nt, Human
cacacgcgaacgccgggauggugc

SEQ ID NO: 329713 - RNA, 20 nt, Human
cacagcccagcacuugcccc

SEQ ID NO: 329714 - RNA, 19 nt, Human
caccaguggcuggcaaagu

SEQ ID NO: 329715 - RNA, 22 nt, Human
cacccccaccucccagugccag

SEQ ID NO: 329716 - RNA, 19 nt, Human
cacccugacccccauggcc

SEQ ID NO: 329717 - RNA, 21 nt, Human
caccgugcgcagauccuccug

SEQ ID NO: 329718 - RNA, 24 nt, Human
cagaaaaugggccuccucaagcac

SEQ ID NO: 329719 - RNA, 18 nt, Human
cagaccccagaauccaga

SEQ ID NO: 329720 - RNA, 20 nt, Human
cagaccccagaauccagagg

SEQ ID NO: 329721 - RNA, 20 nt, Human
cagcaagaaaacaaaugccc

SEQ ID NO: 329722 - RNA, 25 nt, Human
cagcaagaaaacaaaugcccgcugg

SEQ ID NO: 329723 - RNA, 24 nt, Human
caguggcuggcaaaguguuugggg

SEQ ID NO: 329724 - RNA, 22 nt, Human
ccaaccacagccacaaagguuu

SEQ ID NO: 329725 - RNA, 21 nt, Human
ccaccaguggcuggcaaagug

SEQ ID NO: 329726 - RNA, 19 nt, Human
ccacuggcccagaccccag

SEQ ID NO: 329727 - RNA, 25 nt, Human
ccagaggcucaacacuaaagacauc

SEQ ID NO: 329728 - RNA, 20 nt, Human
ccagccuuggggaggggcaa

SEQ ID NO: 329729 - RNA, 22 nt, Human
ccagugucccccucagucaucc

SEQ ID NO: 329730 - RNA, 22 nt, Human
cccagugccaggccugcugucc

SEQ ID NO: 329731 - RNA, 23 nt, Human
ccccagaauccagaggcucaaca

SEQ ID NO: 329732 - RNA, 23 nt, Human
ccccagaauccagaggcucaaca

SEQ ID NO: 329733 - RNA, 18 nt, Human
ccccauggccccuccugg

SEQ ID NO: 329734 - RNA, 19 nt, Human
ccccauggccccuccugga

SEQ ID NO: 329735 - RNA, 24 nt, Human
cccccugccaggcagaaaaugggc

SEQ ID NO: 329736 - RNA, 19 nt, Human
cccgcagcccagauccagc

SEQ ID NO: 329737 - RNA, 20 nt, Human
ccuccacagagccgcugccu

SEQ ID NO: 329738 - RNA, 18 nt, Human
ccuccucaagcacaaaag

SEQ ID NO: 329739 - RNA, 26 nt, Human
ccugacccccauggccccuccuggaa

SEQ ID NO: 329740 - RNA, 18 nt, Human
ccuuggggaggggcaagg

SEQ ID NO: 329741 - RNA, 24 nt, Human
cgggagggcacagaccugcccccu

SEQ ID NO: 329742 - RNA, 27 nt, Human
cucaaaaccacccugacccccauggcc

SEQ ID NO: 329743 - RNA, 19 nt, Human
cuccagugucccccucagu

SEQ ID NO: 329744 - RNA, 22 nt, Human
cuggcccuuguguguacaacag

SEQ ID NO: 329745 - RNA, 24 nt, Human
cuggcuuccuuuacaagaaacuag

SEQ ID NO: 329746 - RNA, 20 nt, Human
cuguagugcucuggugggcu

SEQ ID NO: 329747 - RNA, 22 nt, Human
gacagagggcagggggcagggg

SEQ ID NO: 329748 - RNA, 22 nt, Human
gaccaaggccucugagacagcc

SEQ ID NO: 329749 - RNA, 27 nt, Human
gaggcagguugccagccucccaagggg

SEQ ID NO: 329750 - RNA, 21 nt, Human
gagggcacagaccugcccccu

SEQ ID NO: 329751 - RNA, 21 nt, Human
gcacagugguggucagggugg

SEQ ID NO: 329752 - RNA, 23 nt, Human
gcagagcacaaauggguuccucc

SEQ ID NO: 329753 - RNA, 20 nt, Human
gcagagccaggacagagggc

SEQ ID NO: 329754 - RNA, 19 nt, Human
gccaaccacagccacaaag

SEQ ID NO: 329755 - RNA, 19 nt, Human
gccaggccugcuguccaag

SEQ ID NO: 329756 - RNA, 27 nt, Human
gcccagaccccagaauccagaggcucc

SEQ ID NO: 329757 - RNA, 21 nt, Human
ggacagagggcagggggcagg

SEQ ID NO: 329758 - RNA, 28 nt, Human
ggacagagggcagggggcagggggcugu

SEQ ID NO: 329759 - RNA, 18 nt, Human
ggaccaccaguggcuggc

SEQ ID NO: 329760 - RNA, 22 nt, Human
ggaccccugguccuuuuuccag

SEQ ID NO: 329761 - RNA, 21 nt, Human
ggaggaaaagagauggaggag

SEQ ID NO: 329762 - RNA, 18 nt, Human
ggcaaaguguuuggggaa

SEQ ID NO: 329763 - RNA, 19 nt, Human
ggcacagugguggucaggg

SEQ ID NO: 329764 - RNA, 20 nt, Human
ggcacagugguggucagggu

SEQ ID NO: 329765 - RNA, 22 nt, Human
ggcacuggaggccagggagaaa

SEQ ID NO: 329766 - RNA, 21 nt, Human
ggcaggaugacuggggcuaca

SEQ ID NO: 329767 - RNA, 18 nt, Human
ggccaggaggcagggcug

SEQ ID NO: 329768 - RNA, 19 nt, Human
ggccaggaggcagggcugg

SEQ ID NO: 329769 - RNA, 20 nt, Human
ggccaggaggcagggcuggg

SEQ ID NO: 329770 - RNA, 20 nt, Human
ggccagggagaaaaagagcc

SEQ ID NO: 329771 - RNA, 21 nt, Human
gggaaaaaaggaggugcaaag

SEQ ID NO: 329772 - RNA, 21 nt, Human
gggaggggcaaggcugugagg

SEQ ID NO: 329773 - RNA, 23 nt, Human
gggcacagugguggucagggugg

SEQ ID NO: 329774 - RNA, 21 nt, Human
gggcuacauggggcuuggccc

SEQ ID NO: 329775 - RNA, 24 nt, Human
ggggcugugaaggcgaugccuaga

SEQ ID NO: 329776 - RNA, 20 nt, Human
gguggggcaggugcugaagc

SEQ ID NO: 329777 - RNA, 21 nt, Human
guacaacaggaaaugcaccuc

SEQ ID NO: 329778 - RNA, 24 nt, Human
guugccagccuuggggaggggcaa

SEQ ID NO: 329779 - RNA, 21 nt, Human
uaauacauagcaagaugugug

SEQ ID NO: 329780 - RNA, 23 nt, Human
uaauacauagcaagaugugugca

SEQ ID NO: 329781 - RNA, 21 nt, Human
uacaacaggaaaugcaccuca

SEQ ID NO: 329782 - RNA, 21 nt, Human
ucaaaaccacccugaccccca

SEQ ID NO: 329783 - RNA, 21 nt, Human
ucaagcacaaaagugaccaag

SEQ ID NO: 329784 - RNA, 21 nt, Human
ucaguuuuuaucucacaaggc

SEQ ID NO: 329785 - RNA, 18 nt, Human
uccagugucccccucagu

SEQ ID NO: 329786 - RNA, 18 nt, Human
uccaugacccauauacca

SEQ ID NO: 329787 - RNA, 23 nt, Human
ucccagugccaggccugcugucc

SEQ ID NO: 329788 - RNA, 19 nt, Human
ucccggguuccaagcaccc

SEQ ID NO: 329789 - RNA, 21 nt, Human
ucccugcccucucucuugggc

SEQ ID NO: 329790 - RNA, 21 nt, Human
uccuccacagagccgcugccu

SEQ ID NO: 329791 - RNA, 22 nt, Human
uccugaccaaggccucugagac

SEQ ID NO: 329792 - RNA, 21 nt, Human
uccuuacccugcucucucaaa

SEQ ID NO: 329793 - RNA, 20 nt, Human
ucuagcacauuccuuccuua

SEQ ID NO: 329794 - RNA, 22 nt, Human
ucucucuugggcaaugggaggc

SEQ ID NO: 329795 - RNA, 21 nt, Human
ugaccaaggccucugagacag

SEQ ID NO: 329796 - RNA, 20 nt, Human
ugacccccauggccccuccu

SEQ ID NO: 329797 - RNA, 22 nt, Human
ugagacagcagacacaagcacc

SEQ ID NO: 329798 - RNA, 26 nt, Human
ugcaaaguucugggggagcccagcaa

SEQ ID NO: 329799 - RNA, 19 nt, Human
ugcagcugcucuggcgcgg

SEQ ID NO: 329800 - RNA, 20 nt, Human
ugccaggcagaaaaugggcc

SEQ ID NO: 329801 - RNA, 22 nt, Human
ugccaggcagaaaaugggccuc

SEQ ID NO: 329802 - RNA, 29 nt, Human
ugccaggcagaaaaugggccuccuucuuu

SEQ ID NO: 329803 - RNA, 22 nt, Human
ugccccacucaauaaaaggcug

SEQ ID NO: 329804 - RNA, 18 nt, Human
ugcccucucucuugggca

SEQ ID NO: 329805 - RNA, 23 nt, Human
ugcuagauuucucggcaauucca

SEQ ID NO: 329806 - RNA, 18 nt, Human
uggaggaggaaagcggcg

SEQ ID NO: 329807 - RNA, 21 nt, Human
uggccaggaggcagggcuggg

SEQ ID NO: 329808 - RNA, 19 nt, Human
uggcuggcaaaguguuugg

SEQ ID NO: 329809 - RNA, 20 nt, Human
uggcuuccuuuacaagaaac

SEQ ID NO: 329810 - RNA, 18 nt, Human
ugggaggcagguugccag

SEQ ID NO: 329811 - RNA, 18 nt, Human
uggggaggggcaaggcug

SEQ ID NO: 329812 - RNA, 21 nt, Human
uggggcuuggcccuucccugu

SEQ ID NO: 329813 - RNA, 21 nt, Human
uggguggggcaggugcugaag

SEQ ID NO: 329814 - RNA, 24 nt, Human
ugucagggcacgaccacagcccag

SEQ ID NO: 329815 - RNA, 19 nt, Human
uuccuuacccugcucucuc

SEQ ID NO: 329816 - RNA, 20 nt, Human
uuccuuccuuacccugcucu

SEQ ID NO: 329817 - RNA, 18 nt, Human
uuuuuuuuuuuuuuuuug

SEQ ID NO: 329818 - RNA, 22 nt, Human
uuuuuuuuuuuuuuuuugccaa

SEQ ID NO: 329819 - RNA, 21 nt, Human
caaguucaguaagaagcuaug

SEQ ID NO: 329820 - RNA, 21 nt, Human
gcggcgggcugcgcggcgggc

SEQ ID NO: 329821 - RNA, 25 nt, Human
ggggcggcgggcugcgcggcgggcu

SEQ ID NO: 329822 - RNA, 22 nt, Human
uauguuuucuagagacauugua

SEQ ID NO: 329823 - RNA, 18 nt, Human
aacuccaguaccccaccc

SEQ ID NO: 329824 - RNA, 18 nt, Human
aaggagcccugaagugac

SEQ ID NO: 329825 - RNA, 19 nt, Human
aaggagcccugaagugacc

SEQ ID NO: 329826 - RNA, 20 nt, Human
acagcccucacuccaccccc

SEQ ID NO: 329827 - RNA, 18 nt, Human
acauggucuucugucccu

SEQ ID NO: 329828 - RNA, 23 nt, Human
acuugggccgccaagacuggccu

SEQ ID NO: 329829 - RNA, 20 nt, Human
aggagaggggagggagaggu

SEQ ID NO: 329830 - RNA, 23 nt, Human
aggagcaggcagagugcuggauu

SEQ ID NO: 329831 - RNA, 19 nt, Human
agggaugcucagguuacug

SEQ ID NO: 329832 - RNA, 20 nt, Human
agggcaaggggaggagagga

SEQ ID NO: 329833 - RNA, 21 nt, Human
auuggggagcugucugucagu

SEQ ID NO: 329834 - RNA, 20 nt, Human
caaaaggaaccaggaccccc

SEQ ID NO: 329835 - RNA, 19 nt, Human
cacauggucuucugucccu

SEQ ID NO: 329836 - RNA, 24 nt, Human
cagcacgccccgccuccccugcaa

SEQ ID NO: 329837 - RNA, 19 nt, Human
cagggguggugugagggag

SEQ ID NO: 329838 - RNA, 22 nt, Human
caguaccccacccucugcauga

SEQ ID NO: 329839 - RNA, 22 nt, Human
ccaggccuugcacauggucuuc

SEQ ID NO: 329840 - RNA, 26 nt, Human
cccccugcaggcuguggugcaggagc

SEQ ID NO: 329841 - RNA, 27 nt, Human
cccccuguugcugucccucaaggagcc

SEQ ID NO: 329842 - RNA, 21 nt, Human
ccucacuccacccccaccgaa

SEQ ID NO: 329843 - RNA, 19 nt, Human
ccuccagccaaggagugga

SEQ ID NO: 329844 - RNA, 21 nt, Human
ccuccagccaaggaguggagc

SEQ ID NO: 329845 - RNA, 20 nt, Human
ccuccaggccuugcacaugg

SEQ ID NO: 329846 - RNA, 19 nt, Human
ccugaagugaccuuuugga

SEQ ID NO: 329847 - RNA, 23 nt, Human
ccugcagcacggggcccugggaa

SEQ ID NO: 329848 - RNA, 23 nt, Human
ccuggcuuguucacaggccugug

SEQ ID NO: 329849 - RNA, 20 nt, Human
cggaagaggugcaacuagca

SEQ ID NO: 329850 - RNA, 21 nt, Human
cucccccuguugcugucccuc

SEQ ID NO: 329851 - RNA, 18 nt, Human
cugacccacuuccuccag

SEQ ID NO: 329852 - RNA, 19 nt, Human
cugagcagcucuaggcucc

SEQ ID NO: 329853 - RNA, 20 nt, Human
gagggcaaggggaggagagg

SEQ ID NO: 329854 - RNA, 23 nt, Human
gaggugcuggggcuggcccaaga

SEQ ID NO: 329855 - RNA, 21 nt, Human
gcagcacgccccgccuccccu

SEQ ID NO: 329856 - RNA, 18 nt, Human
gcccucacuccaccccca

SEQ ID NO: 329857 - RNA, 22 nt, Human
ggacuggacugaugguagaggg

SEQ ID NO: 329858 - RNA, 21 nt, Human
ggaggagaggagaggggaggg

SEQ ID NO: 329859 - RNA, 23 nt, Human
ggaugucuuugagaaaggggccc

SEQ ID NO: 329860 - RNA, 20 nt, Human
ggcugcaggagggcgggccg

SEQ ID NO: 329861 - RNA, 21 nt, Human
gggagggucuuggccuggcag

SEQ ID NO: 329862 - RNA, 19 nt, Human
gguggugugagggagguug

SEQ ID NO: 329863 - RNA, 21 nt, Human
gugaggcagggccacagcccu

SEQ ID NO: 329864 - RNA, 18 nt, Human
guguuguggcaaaaggaa

SEQ ID NO: 329865 - RNA, 19 nt, Human
uagcagaggccacuggaug

SEQ ID NO: 329866 - RNA, 22 nt, Human
uccccugacggaagaggugcaa

SEQ ID NO: 329867 - RNA, 19 nt, Human
ucccuugucccugccuuuu

SEQ ID NO: 329868 - RNA, 20 nt, Human
ucugucaguggcugaaccag

SEQ ID NO: 329869 - RNA, 19 nt, Human
ucugucccuugucccugcc

SEQ ID NO: 329870 - RNA, 23 nt, Human
ucugucccuugucccugccuuuu

SEQ ID NO: 329871 - RNA, 21 nt, Human
ugaagugaccuuuuggagagg

SEQ ID NO: 329872 - RNA, 20 nt, Human
ugagaaaggggcccacgacc

SEQ ID NO: 329873 - RNA, 28 nt, Human
ugagcagcucuaggcucccccuguugcu

SEQ ID NO: 329874 - RNA, 22 nt, Human
ugaggcagggccacagcccuca

SEQ ID NO: 329875 - RNA, 24 nt, Human
ugaggcagggccacagcccucacu

SEQ ID NO: 329876 - RNA, 18 nt, Human
ugcaugaggugcuggggc

SEQ ID NO: 329877 - RNA, 20 nt, Human
uggcagcucagggagcuauu

SEQ ID NO: 329878 - RNA, 21 nt, Human
uggccuggcagcucagggagc

SEQ ID NO: 329879 - RNA, 21 nt, Human
uggccuggcuuguucacaggc

SEQ ID NO: 329880 - RNA, 23 nt, Human
uggcgggaggccgcuagccugca

SEQ ID NO: 329881 - RNA, 20 nt, Human
uggcucugggcagcacgccc

SEQ ID NO: 329882 - RNA, 20 nt, Human
uggcucugggcagcacgccc

SEQ ID NO: 329883 - RNA, 21 nt, Human
uggcucugggcagcacgcccc

SEQ ID NO: 329884 - RNA, 23 nt, Human
ugggagaaacugaggcauucccc

SEQ ID NO: 329885 - RNA, 21 nt, Human
ugggagggucuuggccuggca

SEQ ID NO: 329886 - RNA, 19 nt, Human
uggggcuggcccaagagag

SEQ ID NO: 329887 - RNA, 23 nt, Human
ugguuuggggucuggucuggagg

SEQ ID NO: 329888 - RNA, 23 nt, Human
uuguggcaaaaggaaccaggacc

SEQ ID NO: 329889 - RNA, 25 nt, Human
uuuggaggguuggauacaagaagga

SEQ ID NO: 329890 - RNA, 21 nt, Human
aaaaacacucccccaggggcc

SEQ ID NO: 329891 - RNA, 20 nt, Human
aaaaagacaaauaaagccca

SEQ ID NO: 329892 - RNA, 23 nt, Human
aaagacccccaccaccaccgcau

SEQ ID NO: 329893 - RNA, 19 nt, Human
aaagccaguggaaacaagg

SEQ ID NO: 329894 - RNA, 24 nt, Human
aaagccaguggaaacaaggaccaa

SEQ ID NO: 329895 - RNA, 21 nt, Human
aacaaacacaagaguugagca

SEQ ID NO: 329896 - RNA, 18 nt, Human
aacacaaaaacagcaaca

SEQ ID NO: 329897 - RNA, 22 nt, Human
aacaccccugcccuccggaucu

SEQ ID NO: 329898 - RNA, 21 nt, Human
aacagaacaacaaacacaaga

SEQ ID NO: 329899 - RNA, 20 nt, Human
aacuccaggcucuucuaccu

SEQ ID NO: 329900 - RNA, 19 nt, Human
aaggaccaagagccaaaca

SEQ ID NO: 329901 - RNA, 20 nt, Human
aaggaccaagagccaaacau

SEQ ID NO: 329902 - RNA, 23 nt, Human
aauccccauuuauucccuaaagc

SEQ ID NO: 329903 - RNA, 21 nt, Human
aauuccucuggccagaaaccu

SEQ ID NO: 329904 - RNA, 20 nt, Human
acaacacaaaaacagcaaca

SEQ ID NO: 329905 - RNA, 21 nt, Human
acagaacaacaaacacaagag

SEQ ID NO: 329906 - RNA, 19 nt, Human
acaguacaaaagaccccca

SEQ ID NO: 329907 - RNA, 22 nt, Human
acaucaaaaaaaucacccugga

SEQ ID NO: 329908 - RNA, 21 nt, Human
accaccaccgcauucugccau

SEQ ID NO: 329909 - RNA, 18 nt, Human
accacuaggucuuugcca

SEQ ID NO: 329910 - RNA, 22 nt, Human
accaucgcccagaagggguguc

SEQ ID NO: 329911 - RNA, 21 nt, Human
acuguuucugccccaugggga

SEQ ID NO: 329912 - RNA, 19 nt, Human
agaacaacaaacacaagag

SEQ ID NO: 329913 - RNA, 19 nt, Human
agagccaaacaucaaaaaa

SEQ ID NO: 329914 - RNA, 24 nt, Human
agcacgagagaggcugagaaagga

SEQ ID NO: 329915 - RNA, 20 nt, Human
agcagggucuucucuccuca

SEQ ID NO: 329916 - RNA, 23 nt, Human
agggagcagauccagcaaaaaca

SEQ ID NO: 329917 - RNA, 19 nt, Human
agggccacaccccaugccu

SEQ ID NO: 329918 - RNA, 20 nt, Human
agggguguuaggcacaggug

SEQ ID NO: 329919 - RNA, 19 nt, Human
aggguaccaccaaagucca

SEQ ID NO: 329920 - RNA, 21 nt, Human
aucaccaggcccaagaggaua

SEQ ID NO: 329921 - RNA, 25 nt, Human
aucuuccuccagccccuuuucucuu

SEQ ID NO: 329922 - RNA, 21 nt, Human
augaaagaauagcaaagagaa

SEQ ID NO: 329923 - RNA, 27 nt, Human
auggaaagccaguggaaacaaggacca

SEQ ID NO: 329924 - RNA, 25 nt, Human
auggcaaugaggaucccgccgcauc

SEQ ID NO: 329925 - RNA, 19 nt, Human
caaaaaaaucacccuggaa

SEQ ID NO: 329926 - RNA, 22 nt, Human
caaaaacacucccccaggggcc

SEQ ID NO: 329927 - RNA, 20 nt, Human
caacacaaaaacagcaacag

SEQ ID NO: 329928 - RNA, 21 nt, Human
caagaaacugccauaaccagg

SEQ ID NO: 329929 - RNA, 25 nt, Human
caagagccaaacaucaaaaaaauca

SEQ ID NO: 329930 - RNA, 19 nt, Human
caagccaggaaggcagggg

SEQ ID NO: 329931 - RNA, 22 nt, Human
caauuccucuggccagaaaccu

SEQ ID NO: 329932 - RNA, 19 nt, Human
caccaccaccgcauucugc

SEQ ID NO: 329933 - RNA, 20 nt, Human
cacccuggaagagcagggag

SEQ ID NO: 329934 - RNA, 25 nt, Human
cacuuuguuccaaaaaguaguggag

SEQ ID NO: 329935 - RNA, 19 nt, Human
cagaaggggugucaggggc

SEQ ID NO: 329936 - RNA, 18 nt, Human
cagcaaaaacacuccccc

SEQ ID NO: 329937 - RNA, 23 nt, Human
cagcaucucucaccuacugucuu

SEQ ID NO: 329938 - RNA, 18 nt, Human
cagccacacuccugggcc

SEQ ID NO: 329939 - RNA, 23 nt, Human
cagccacacuccugggccuccag

SEQ ID NO: 329940 - RNA, 28 nt, Human
cagcccaggcccccgagcugcagcaacc

SEQ ID NO: 329941 - RNA, 23 nt, Human
cagccccuuuucucuugcagcca

SEQ ID NO: 329942 - RNA, 21 nt, Human
cagcggcgggggauggaggcc

SEQ ID NO: 329943 - RNA, 24 nt, Human
caggagccacuguuucugccccau

SEQ ID NO: 329944 - RNA, 28 nt, Human
caugccugccuuccccaccccauggagg

SEQ ID NO: 329945 - RNA, 26 nt, Human
ccaaacaucaaaaaaaucacccugga

SEQ ID NO: 329946 - RNA, 25 nt, Human
ccaagagccaaacaucaaaaaaauc

SEQ ID NO: 329947 - RNA, 23 nt, Human
ccacaccccaugccugccuuccc

SEQ ID NO: 329948 - RNA, 22 nt, Human
ccacacuccugggccuccagaa

SEQ ID NO: 329949 - RNA, 25 nt, Human
ccacaggcugugacagggccucacu

SEQ ID NO: 329950 - RNA, 20 nt, Human
ccacuaggucuuugccacug

SEQ ID NO: 329951 - RNA, 22 nt, Human
ccacuguaucuugagcuggggg

SEQ ID NO: 329952 - RNA, 21 nt, Human
ccagaaggggugucaggggca

SEQ ID NO: 329953 - RNA, 19 nt, Human
ccaggaaggcaggggaaua

SEQ ID NO: 329954 - RNA, 22 nt, Human
cccaccaccaccgcauucugcc

SEQ ID NO: 329955 - RNA, 20 nt, Human
cccagaggcugcucuccucc

SEQ ID NO: 329956 - RNA, 24 nt, Human
cccaggagccacuguuucugcccc

SEQ ID NO: 329957 - RNA, 23 nt, Human
ccccaaaucaccaagaaacugcc

SEQ ID NO: 329958 - RNA, 23 nt, Human
ccccuacccacaggcugugacag

SEQ ID NO: 329959 - RNA, 21 nt, Human
ccuaaagcugucucccagagc

SEQ ID NO: 329960 - RNA, 23 nt, Human
ccuaacuucuccgagggccacac

SEQ ID NO: 329961 - RNA, 22 nt, Human
ccucaucaggccccaggcccau

SEQ ID NO: 329962 - RNA, 29 nt, Human
ccuccagccccuuuucucuuggggccgcc

SEQ ID NO: 329963 - RNA, 18 nt, Human
ccugcccaccucaauucc

SEQ ID NO: 329964 - RNA, 22 nt, Human
ccuuugaguaccauggcaauga

SEQ ID NO: 329965 - RNA, 21 nt, Human
cgagagggagcagauccagca

SEQ ID NO: 329966 - RNA, 21 nt, Human
cgagggccacaccccaugccu

SEQ ID NO: 329967 - RNA, 20 nt, Human
cggggugggggugggggguu

SEQ ID NO: 329968 - RNA, 22 nt, Human
cucaaagguugucagcuccacc

SEQ ID NO: 329969 - RNA, 24 nt, Human
cucccagagcccauaaaagggcua

SEQ ID NO: 329970 - RNA, 19 nt, Human
cucuccucccagccucaaa

SEQ ID NO: 329971 - RNA, 22 nt, Human
cugcaccaucgcccagaagggg

SEQ ID NO: 329972 - RNA, 19 nt, Human
cuucugccugcccaccuca

SEQ ID NO: 329973 - RNA, 20 nt, Human
gaaaaggagaacgagcagcg

SEQ ID NO: 329974 - RNA, 19 nt, Human
gaaagaauagcaaagagaa

SEQ ID NO: 329975 - RNA, 20 nt, Human
gagcagcggggugggggugg

SEQ ID NO: 329976 - RNA, 24 nt, Human
gaggaagcaaaggaguggguagaa

SEQ ID NO: 329977 - RNA, 21 nt, Human
gaggcugagaaaggaccagug

SEQ ID NO: 329978 - RNA, 27 nt, Human
gaguugagcagcggggugggggugggg

SEQ ID NO: 329979 - RNA, 18 nt, Human
gcaaagagaagcaacaaa

SEQ ID NO: 329980 - RNA, 19 nt, Human
gcagccacacuccugggcc

SEQ ID NO: 329981 - RNA, 22 nt, Human
gcagcggggugggggugggggg

SEQ ID NO: 329982 - RNA, 20 nt, Human
gccacacuccugggccucca

SEQ ID NO: 329983 - RNA, 23 nt, Human
gcccaagaggauaugaaagaaua

SEQ ID NO: 329984 - RNA, 22 nt, Human
gcucccaggagccacuguuucu

SEQ ID NO: 329985 - RNA, 19 nt, Human
gcugcaccaucgcccagaa

SEQ ID NO: 329986 - RNA, 19 nt, Human
ggaaaauccccauuuauuc

SEQ ID NO: 329987 - RNA, 22 nt, Human
ggaaagccaguggaaacaagga

SEQ ID NO: 329988 - RNA, 24 nt, Human
ggaaggaguuggguaagucuugga

SEQ ID NO: 329989 - RNA, 22 nt, Human
ggaaugugugcaugaacagaaa

SEQ ID NO: 329990 - RNA, 25 nt, Human
ggaccaagagccaaacaucaaaaaa

SEQ ID NO: 329991 - RNA, 19 nt, Human
ggaggaaaugagguauagg

SEQ ID NO: 329992 - RNA, 23 nt, Human
ggaucccgccgcauccccuaccc

SEQ ID NO: 329993 - RNA, 23 nt, Human
ggaucuuccuccagccccuuuuc

SEQ ID NO: 329994 - RNA, 21 nt, Human
gggcauccaucaucagcagag

SEQ ID NO: 329995 - RNA, 19 nt, Human
gggcugcaccaucgcccag

SEQ ID NO: 329996 - RNA, 18 nt, Human
gggcugggggaggagggu

SEQ ID NO: 329997 - RNA, 18 nt, Human
ggggauggaaagccagug

SEQ ID NO: 329998 - RNA, 20 nt, Human
gggggauggaggcgcccuug

SEQ ID NO: 329999 - RNA, 20 nt, Human
ggggguaggggaccacuagg

SEQ ID NO: 330000 - RNA, 19 nt, Human
ggggugggggugggggguu

SEQ ID NO: 330001 - RNA, 18 nt, Human
ggguaccaccaaagucca

SEQ ID NO: 330002 - RNA, 24 nt, Human
gggucuucucuccucaugccagga

SEQ ID NO: 330003 - RNA, 18 nt, Human
gguaccaccaaaguccag

SEQ ID NO: 330004 - RNA, 22 nt, Human
guacaaaagacccccaccacca

SEQ ID NO: 330005 - RNA, 19 nt, Human
gugggggguugccaucuac

SEQ ID NO: 330006 - RNA, 24 nt, Human
guugagcagcgggguggggguggg

SEQ ID NO: 330007 - RNA, 25 nt, Human
guugagcagcggggugggggugggg

SEQ ID NO: 330008 - RNA, 20 nt, Human
uaaaaaauaaaaaaagacaa

SEQ ID NO: 330009 - RNA, 20 nt, Human
uaacacuugacuccaaaaac

SEQ ID NO: 330010 - RNA, 22 nt, Human
uaacuucuccgagggccacacc

SEQ ID NO: 330011 - RNA, 22 nt, Human
uacccacaggcugugacagggc

SEQ ID NO: 330012 - RNA, 18 nt, Human
uagcaaagagaagcaaca

SEQ ID NO: 330013 - RNA, 21 nt, Human
uagcaaagagaagcaacaaac

SEQ ID NO: 330014 - RNA, 20 nt, Human
uagcggcagcggcgggggau

SEQ ID NO: 330015 - RNA, 24 nt, Human
uagcggcagcggcgggggauggag

SEQ ID NO: 330016 - RNA, 20 nt, Human
uagugugagggacacuggga

SEQ ID NO: 330017 - RNA, 22 nt, Human
uagugugagggacacugggaac

SEQ ID NO: 330018 - RNA, 22 nt, Human
uaucuugagcugggggacuccu

SEQ ID NO: 330019 - RNA, 24 nt, Human
ucaccaagaaacugccauaaccag

SEQ ID NO: 330020 - RNA, 18 nt, Human
ucaggggcagcccaggcc

SEQ ID NO: 330021 - RNA, 18 nt, Human
ucauggaggaaaugaggu

SEQ ID NO: 330022 - RNA, 19 nt, Human
uccaaaaacuaaggcugga

SEQ ID NO: 330023 - RNA, 23 nt, Human
ucccaggagccacuguuucugcc

SEQ ID NO: 330024 - RNA, 21 nt, Human
uccuggaucucuguagaucuc

SEQ ID NO: 330025 - RNA, 22 nt, Human
uccugggccuccagaaauagcc

SEQ ID NO: 330026 - RNA, 23 nt, Human
ucuccgagggccacaccccaugc

SEQ ID NO: 330027 - RNA, 21 nt, Human
ucucugagggggaaggaguug

SEQ ID NO: 330028 - RNA, 24 nt, Human
ucuuccuccagccccuuuucucuu

SEQ ID NO: 330029 - RNA, 21 nt, Human
ucuugcagccacacuccuggg

SEQ ID NO: 330030 - RNA, 22 nt, Human
ugaagccccaaaucaccaagaa

SEQ ID NO: 330031 - RNA, 19 nt, Human
ugagagagcgagagggagc

SEQ ID NO: 330032 - RNA, 22 nt, Human
ugagcagcgggguggggguggg

SEQ ID NO: 330033 - RNA, 18 nt, Human
ugagggggaaggaguugg

SEQ ID NO: 330034 - RNA, 21 nt, Human
ugagguauagggcucugcgcc

SEQ ID NO: 330035 - RNA, 20 nt, Human
ugcaccaucgcccagaaggg

SEQ ID NO: 330036 - RNA, 18 nt, Human
ugcagccacacuccuggg

SEQ ID NO: 330037 - RNA, 19 nt, Human
ugccauaaccaggaacucu

SEQ ID NO: 330038 - RNA, 18 nt, Human
ugccaucacuuuguucca

SEQ ID NO: 330039 - RNA, 18 nt, Human
ugcccuccggaucuuccu

SEQ ID NO: 330040 - RNA, 19 nt, Human
ugcccuccggaucuuccuc

SEQ ID NO: 330041 - RNA, 24 nt, Human
uggcaagaccccaauuccucuggc

SEQ ID NO: 330042 - RNA, 21 nt, Human
uggcaggcagugcuuaaaaaa

SEQ ID NO: 330043 - RNA, 23 nt, Human
ugggggaggaggguaccaccaaa

SEQ ID NO: 330044 - RNA, 21 nt, Human
uggguagaaaaaggggaaaau

SEQ ID NO: 330045 - RNA, 19 nt, Human
ugguaugaagaagauacgu

SEQ ID NO: 330046 - RNA, 20 nt, Human
uugaagccccaaaucaccaa

SEQ ID NO: 330047 - RNA, 21 nt, Human
uugacuccaaaaacuaaggcu

SEQ ID NO: 330048 - RNA, 21 nt, Human
agugucuauuuuauagagaca

SEQ ID NO: 330049 - RNA, 25 nt, Human
ccagaaguacauauuuauucagcaa

SEQ ID NO: 330050 - RNA, 19 nt, Human
uuugaccagaaguacauau

SEQ ID NO: 330051 - RNA, 21 nt, Human
gaauuugggguggcgagggua

SEQ ID NO: 330052 - RNA, 19 nt, Human
uagccacacccuccaggag

SEQ ID NO: 330053 - RNA, 24 nt, Human
uagcuguucuuuauugacauggaa

SEQ ID NO: 330054 - RNA, 19 nt, Human
uggaauuugggguggcgag

SEQ ID NO: 330055 - RNA, 20 nt, Human
aaaaauaacucagccuuuaa

SEQ ID NO: 330056 - RNA, 20 nt, Human
aagaagacagacaacaagug

SEQ ID NO: 330057 - RNA, 20 nt, Human
acacaggaaaaggauaccag

SEQ ID NO: 330058 - RNA, 19 nt, Human
acagggguuacagaaaaca

SEQ ID NO: 330059 - RNA, 18 nt, Human
accuaggccagaccacag

SEQ ID NO: 330060 - RNA, 18 nt, Human
agcuccgaaucgaacccu

SEQ ID NO: 330061 - RNA, 22 nt, Human
aggccagaccacaggcacaggg

SEQ ID NO: 330062 - RNA, 19 nt, Human
caaaaauaacucagccuuu

SEQ ID NO: 330063 - RNA, 21 nt, Human
caacaagugcauuuauuagga

SEQ ID NO: 330064 - RNA, 18 nt, Human
caaccacacaggaaaagg

SEQ ID NO: 330065 - RNA, 24 nt, Human
caaggacagaugaacagucacaaa

SEQ ID NO: 330066 - RNA, 23 nt, Human
caauaccaacaaaucaacaaagu

SEQ ID NO: 330067 - RNA, 19 nt, Human
cacaaaaggaguuaaggca

SEQ ID NO: 330068 - RNA, 26 nt, Human
cacacaggaaaaggauaccagggacu

SEQ ID NO: 330069 - RNA, 20 nt, Human
cagaccacaggcacaggggc

SEQ ID NO: 330070 - RNA, 25 nt, Human
cagaccacaggcacaggggcaacca

SEQ ID NO: 330071 - RNA, 22 nt, Human
cagccuuuaaaauguccccaau

SEQ ID NO: 330072 - RNA, 21 nt, Human
caggauuuaaauccacccccu

SEQ ID NO: 330073 - RNA, 29 nt, Human
ccaauaccaacaaaucaacaaaguaguca

SEQ ID NO: 330074 - RNA, 18 nt, Human
ccacaaaaggaguuaagg

SEQ ID NO: 330075 - RNA, 19 nt, Human
ccagcccggcucccgcagc

SEQ ID NO: 330076 - RNA, 22 nt, Human
ccccaauaccaacaaaucaaca

SEQ ID NO: 330077 - RNA, 20 nt, Human
ccccucauaggcacugagau

SEQ ID NO: 330078 - RNA, 21 nt, Human
cuuauaccacaaaaggaguua

SEQ ID NO: 330079 - RNA, 24 nt, Human
gauaccagggacagaguccaugua

SEQ ID NO: 330080 - RNA, 30 nt, Human
ggcacaggggcaaccacacaggaaaaggaa

SEQ ID NO: 330081 - RNA, 20 nt, Human
uaaaauguccccaauaccaa

SEQ ID NO: 330082 - RNA, 23 nt, Human
uaaaauguccccaauaccaacaa

SEQ ID NO: 330083 - RNA, 19 nt, Human
uacagaaaacacaaggcug

SEQ ID NO: 330084 - RNA, 23 nt, Human
uaccacaaaaggaguuaaggcag

SEQ ID NO: 330085 - RNA, 20 nt, Human
uaccacaaacagggguuaca

SEQ ID NO: 330086 - RNA, 22 nt, Human
uagugacuuuucuggcaggccc

SEQ ID NO: 330087 - RNA, 24 nt, Human
uauuacacuugucccuaggagagc

SEQ ID NO: 330088 - RNA, 25 nt, Human
uauuaggaacaacauucugaauaac

SEQ ID NO: 330089 - RNA, 20 nt, Human
ucccuaggagagcaaaugca

SEQ ID NO: 330090 - RNA, 20 nt, Human
ucgcauugucuuacuucaca

SEQ ID NO: 330091 - RNA, 21 nt, Human
ucuaguauacucaucucugac

SEQ ID NO: 330092 - RNA, 23 nt, Human
ucuuacuucacauaaauguauua

SEQ ID NO: 330093 - RNA, 18 nt, Human
ugccagcccggcucccgc

SEQ ID NO: 330094 - RNA, 22 nt, Human
ugcuguauauaagaugugauuu

SEQ ID NO: 330095 - RNA, 20 nt, Human
uucacauaaauguauuacac

SEQ ID NO: 330096 - RNA, 24 nt, Human
uuuaaaauguccccaauaccaaca

SEQ ID NO: 330097 - RNA, 27 nt, Human
aaaaauuaaugagcaauuuaggacaca

SEQ ID NO: 330098 - RNA, 20 nt, Human
aaagaaaucugaccgccuuc

SEQ ID NO: 330099 - RNA, 21 nt, Human
aagacacauaagaauaggaug

SEQ ID NO: 330100 - RNA, 24 nt, Human
cacacagcauuugucugaaaucag

SEQ ID NO: 330101 - RNA, 20 nt, Human
cacauaagaauaggaugauc

SEQ ID NO: 330102 - RNA, 20 nt, Human
cggugccucuuuuucaaucu

SEQ ID NO: 330103 - RNA, 18 nt, Human
cgugaugaugauccuugg

SEQ ID NO: 330104 - RNA, 24 nt, Human
guauuacauguaauagauuuccac

SEQ ID NO: 330105 - RNA, 21 nt, Human
uacauguaauagauuuccaca

SEQ ID NO: 330106 - RNA, 21 nt, Human
uccaaccgcuauuuaaguacu

SEQ ID NO: 330107 - RNA, 20 nt, Human
ugaccgccuucaaacuacau

SEQ ID NO: 330108 - RNA, 19 nt, Human
ugccuugacuuuugaauuc

SEQ ID NO: 330109 - RNA, 22 nt, Human
uuauuuugccauuuucuuuaca

SEQ ID NO: 330110 - RNA, 21 nt, Human
uuuuuuagcauuuaauucuga

SEQ ID NO: 330111 - RNA, 19 nt, Human
aaaaagugccccccucucu

SEQ ID NO: 330112 - RNA, 18 nt, Human
aaaacacaaaagugacac

SEQ ID NO: 330113 - RNA, 26 nt, Human
aaacaaaauuuacucaacuacauaaa

SEQ ID NO: 330114 - RNA, 21 nt, Human
aaacaauaacugaggaaucca

SEQ ID NO: 330115 - RNA, 22 nt, Human
aaagugccccccucucuaauca

SEQ ID NO: 330116 - RNA, 23 nt, Human
aaauuuacucaacuacauaaacc

SEQ ID NO: 330117 - RNA, 19 nt, Human
aacaauaacugaggaaucc

SEQ ID NO: 330118 - RNA, 20 nt, Human
aacacaaaagugacacaaga

SEQ ID NO: 330119 - RNA, 20 nt, Human
aacagaggcacccgagaugg

SEQ ID NO: 330120 - RNA, 18 nt, Human
aacccgagcgccgagcuu

SEQ ID NO: 330121 - RNA, 23 nt, Human
aacccgagcgccgagcuucaacc

SEQ ID NO: 330122 - RNA, 26 nt, Human
aagaaaaccaaaaugacuggugggca

SEQ ID NO: 330123 - RNA, 21 nt, Human
aagcugcucuguggcaaaaug

SEQ ID NO: 330124 - RNA, 25 nt, Human
aauaauaaaauggcuauagaagaaa

SEQ ID NO: 330125 - RNA, 25 nt, Human
acacaacuuccaggaaacugcagag

SEQ ID NO: 330126 - RNA, 18 nt, Human
acauacugaaaccaaaga

SEQ ID NO: 330127 - RNA, 27 nt, Human
agaauucuccagaaaaagugccccccc

SEQ ID NO: 330128 - RNA, 21 nt, Human
agacaaaauuugacacuacca

SEQ ID NO: 330129 - RNA, 23 nt, Human
aggcagcacuguuuaacuuaugg

SEQ ID NO: 330130 - RNA, 25 nt, Human
agugguaucugugggaccagggggc

SEQ ID NO: 330131 - RNA, 19 nt, Human
auacuaaaagaauacaugc

SEQ ID NO: 330132 - RNA, 21 nt, Human
auccacgagaaagcaaaacua

SEQ ID NO: 330133 - RNA, 19 nt, Human
caaauuacagagcaugcau

SEQ ID NO: 330134 - RNA, 23 nt, Human
cacaagaauuacaaauauauuua

SEQ ID NO: 330135 - RNA, 22 nt, Human
cacacaucaugagcaccgcaag

SEQ ID NO: 330136 - RNA, 19 nt, Human
cacccgagauggaauacca

SEQ ID NO: 330137 - RNA, 24 nt, Human
cagaauaauggaaaauuuucaagc

SEQ ID NO: 330138 - RNA, 21 nt, Human
cagagcaugcauaaaauacaa

SEQ ID NO: 330139 - RNA, 21 nt, Human
cagcagugguaucugugggac

SEQ ID NO: 330140 - RNA, 22 nt, Human
caugagcaccgcaagagacaaa

SEQ ID NO: 330141 - RNA, 23 nt, Human
caugagcaccgcaagagacaaaa

SEQ ID NO: 330142 - RNA, 21 nt, Human
ccccacacaucaugagcaccg

SEQ ID NO: 330143 - RNA, 23 nt, Human
ccccacacaucaugagcaccgca

SEQ ID NO: 330144 - RNA, 19 nt, Human
cgagaaagcaaaacuaaau

SEQ ID NO: 330145 - RNA, 22 nt, Human
cuaagagaauucuccagaaaaa

SEQ ID NO: 330146 - RNA, 22 nt, Human
cuauagaagaaaaccaaaauga

SEQ ID NO: 330147 - RNA, 22 nt, Human
cugcaaaacucaaauauuagca

SEQ ID NO: 330148 - RNA, 19 nt, Human
gaaaaaaagcugcagucau

SEQ ID NO: 330149 - RNA, 18 nt, Human
gaaaaccaaaaugacuga

SEQ ID NO: 330150 - RNA, 18 nt, Human
gaagccauagcaugaaaa

SEQ ID NO: 330151 - RNA, 19 nt, Human
gacaaaauuugacacuacc

SEQ ID NO: 330152 - RNA, 21 nt, Human
gagcaccgcaagagacaaaag

SEQ ID NO: 330153 - RNA, 22 nt, Human
gagcaccgcaagagacaaaaga

SEQ ID NO: 330154 - RNA, 18 nt, Human
gagcagcagugguaucug

SEQ ID NO: 330155 - RNA, 22 nt, Human
gagcagcagugguaucuguggg

SEQ ID NO: 330156 - RNA, 21 nt, Human
gcggccgaggagcgaaagggc

SEQ ID NO: 330157 - RNA, 22 nt, Human
gcuucauugauuucaacaaugu

SEQ ID NO: 330158 - RNA, 20 nt, Human
ggaaacugcagaguaagugc

SEQ ID NO: 330159 - RNA, 23 nt, Human
gggagcagcagugguaucugugg

SEQ ID NO: 330160 - RNA, 19 nt, Human
guagcaauuuacaaauaga

SEQ ID NO: 330161 - RNA, 21 nt, Human
gugaauauaauccaaaucaau

SEQ ID NO: 330162 - RNA, 23 nt, Human
uaaaacacaaaagugacacaaga

SEQ ID NO: 330163 - RNA, 23 nt, Human
uaaaaucaaaagacuuaggacau

SEQ ID NO: 330164 - RNA, 21 nt, Human
uaaaauggcuauagaagaaaa

SEQ ID NO: 330165 - RNA, 18 nt, Human
uaaaucucagaccuggga

SEQ ID NO: 330166 - RNA, 19 nt, Human
uaacugaggaauccaaaca

SEQ ID NO: 330167 - RNA, 20 nt, Human
uaacugaggaauccaaacau

SEQ ID NO: 330168 - RNA, 18 nt, Human
uaagcaagcccacacaua

SEQ ID NO: 330169 - RNA, 24 nt, Human
uaaguaugaaguaauaaaacacaa

SEQ ID NO: 330170 - RNA, 21 nt, Human
uacaaaaauuaaaaaacaaaa

SEQ ID NO: 330171 - RNA, 24 nt, Human
uacaaaaauuaaaaaacaaaauuu

SEQ ID NO: 330172 - RNA, 21 nt, Human
uagaagaaaaccaaaaugacu

SEQ ID NO: 330173 - RNA, 23 nt, Human
uagaagaaaaccaaaaugacuga

SEQ ID NO: 330174 - RNA, 24 nt, Human
uagcaauuuacaaauagauaauau

SEQ ID NO: 330175 - RNA, 23 nt, Human
uauuauagaucauuuaaaucuuu

SEQ ID NO: 330176 - RNA, 22 nt, Human
ucaaaagacuuaggacauggaa

SEQ ID NO: 330177 - RNA, 21 nt, Human
uccagaaaaagugccccccuc

SEQ ID NO: 330178 - RNA, 21 nt, Human
ucuaagacaaaauuugacacu

SEQ ID NO: 330179 - RNA, 23 nt, Human
ucuauaauauacugcaaaacuca

SEQ ID NO: 330180 - RNA, 22 nt, Human
ucuuaguuugauuugaucaaga

SEQ ID NO: 330181 - RNA, 29 nt, Human
ugaaaaguaaacaauaacugaggaaaacg

SEQ ID NO: 330182 - RNA, 22 nt, Human
ugacacuaccagcauuaaacca

SEQ ID NO: 330183 - RNA, 18 nt, Human
ugacugacuacagcaaug

SEQ ID NO: 330184 - RNA, 22 nt, Human
ugagcagaaauuaaccucucac

SEQ ID NO: 330185 - RNA, 18 nt, Human
ugccuuuaagugguacca

SEQ ID NO: 330186 - RNA, 23 nt, Human
uggacuauacacagccuucuagg

SEQ ID NO: 330187 - RNA, 19 nt, Human
ugugggaccagggggcguc

SEQ ID NO: 330188 - RNA, 21 nt, Human
uuaaacuaaggcuagugaagc

SEQ ID NO: 330189 - RNA, 23 nt, Human
uucagacauacugaaaccaaaga

SEQ ID NO: 330190 - RNA, 20 nt, Human
uugccugagcaauaaaaugc

SEQ ID NO: 330191 - RNA, 22 nt, Human
uugcuucauugauuucaacaau

SEQ ID NO: 330192 - RNA, 18 nt, Human
uugggcugccugaucauu

SEQ ID NO: 330193 - RNA, 23 nt, Human
uuggggauuucccaccauccuga

SEQ ID NO: 330194 - RNA, 20 nt, Human
uuuacuaagagaauucucca

SEQ ID NO: 330195 - RNA, 18 nt, Human
aaaccugaucuaguaaca

SEQ ID NO: 330196 - RNA, 23 nt, Human
aagaaagaccaugacaagugaca

SEQ ID NO: 330197 - RNA, 21 nt, Human
aguguagugccgagcuagccu

SEQ ID NO: 330198 - RNA, 19 nt, Human
aucucucuccuuccuuucc

SEQ ID NO: 330199 - RNA, 22 nt, Human
auucauuccucucccuucuccc

SEQ ID NO: 330200 - RNA, 25 nt, Human
auucauuccucucccuucucccuuc

SEQ ID NO: 330201 - RNA, 19 nt, Human
cccaggccaggaagaaguu

SEQ ID NO: 330202 - RNA, 20 nt, Human
cccucucuuccuaccuccuu

SEQ ID NO: 330203 - RNA, 18 nt, Human
cccuucucccuuccucuc

SEQ ID NO: 330204 - RNA, 20 nt, Human
cccuuuucuccuuuuucucc

SEQ ID NO: 330205 - RNA, 18 nt, Human
ccucccucucuuccuacc

SEQ ID NO: 330206 - RNA, 21 nt, Human
ccucccucucuuccuaccucc

SEQ ID NO: 330207 - RNA, 23 nt, Human
ccuccuugccuucuuucacuucc

SEQ ID NO: 330208 - RNA, 19 nt, Human
ccucucccuucucccuucc

SEQ ID NO: 330209 - RNA, 18 nt, Human
ccucucucuuccuuuuuu

SEQ ID NO: 330210 - RNA, 23 nt, Human
ccucugccguugucucccucagg

SEQ ID NO: 330211 - RNA, 18 nt, Human
ccuuccuuuccuccuccc

SEQ ID NO: 330212 - RNA, 22 nt, Human
ccuugccuucuuucacuuccuc

SEQ ID NO: 330213 - RNA, 22 nt, Human
cggcacggagcccaggccagga

SEQ ID NO: 330214 - RNA, 23 nt, Human
cggcacggagcccaggccaggaa

SEQ ID NO: 330215 - RNA, 20 nt, Human
cggguaccaugguuuuuuuu

SEQ ID NO: 330216 - RNA, 21 nt, Human
cuaugugacccuccaagcccc

SEQ ID NO: 330217 - RNA, 24 nt, Human
cuaugugacccuccaagccccucu

SEQ ID NO: 330218 - RNA, 22 nt, Human
cucccucugccguugucucccu

SEQ ID NO: 330219 - RNA, 20 nt, Human
cuccucccucucuuccuacc

SEQ ID NO: 330220 - RNA, 21 nt, Human
cucucuuccuuuuuuuccuuu

SEQ ID NO: 330221 - RNA, 20 nt, Human
cucugccguugucucccuca

SEQ ID NO: 330222 - RNA, 20 nt, Human
cucuuccuuuuuuuccuuuu

SEQ ID NO: 330223 - RNA, 19 nt, Human
cugcucacucccucugccg

SEQ ID NO: 330224 - RNA, 22 nt, Human
cuucucccuuccucucucuucc

SEQ ID NO: 330225 - RNA, 21 nt, Human
gacccuccaagccccucugcu

SEQ ID NO: 330226 - RNA, 19 nt, Human
gagcccaggccaggaagaa

SEQ ID NO: 330227 - RNA, 22 nt, Human
gcccaggccaggaagaaguuuu

SEQ ID NO: 330228 - RNA, 20 nt, Human
gguggggagcgcccggcacu

SEQ ID NO: 330229 - RNA, 20 nt, Human
gguggggaggcaagaaaggg

SEQ ID NO: 330230 - RNA, 21 nt, Human
gguuggcaaacagagcggcac

SEQ ID NO: 330231 - RNA, 22 nt, Human
uaaaucaguguauuuacauuua

SEQ ID NO: 330232 - RNA, 19 nt, Human
uaccaagaaagaccaugac

SEQ ID NO: 330233 - RNA, 20 nt, Human
uaccaagaaagaccaugaca

SEQ ID NO: 330234 - RNA, 25 nt, Human
uaccaugguuuuuuuuuuuuuuugu

SEQ ID NO: 330235 - RNA, 18 nt, Human
ucaauucauuccucuccc

SEQ ID NO: 330236 - RNA, 22 nt, Human
uccccugcucacucccucugcc

SEQ ID NO: 330237 - RNA, 18 nt, Human
ucccucucuuccuaccuc

SEQ ID NO: 330238 - RNA, 21 nt, Human
ucccucugccguugucucccu

SEQ ID NO: 330239 - RNA, 21 nt, Human
uccgggguggggaggcaagaa

SEQ ID NO: 330240 - RNA, 20 nt, Human
uccuuccuuuccuccucccu

SEQ ID NO: 330241 - RNA, 23 nt, Human
uccuugccuucuuucacuuccuc

SEQ ID NO: 330242 - RNA, 31 nt, Human
ucucccuuccucucucuuccuuuuuuucccc

SEQ ID NO: 330243 - RNA, 23 nt, Human
ucuccuuuuucuccucauucucu

SEQ ID NO: 330244 - RNA, 20 nt, Human
ugacccuccaagccccucug

SEQ ID NO: 330245 - RNA, 20 nt, Human
ugaggcaucucucuccuucc

SEQ ID NO: 330246 - RNA, 21 nt, Human
uggggaggcaagaaagggucc

SEQ ID NO: 330247 - RNA, 21 nt, Human
uguagugccgagcuagccuuu

SEQ ID NO: 330248 - RNA, 22 nt, Human
uuaauaccaagaaagaccauga

SEQ ID NO: 330249 - RNA, 24 nt, Human
uuccucucccuucucccuuccccc

SEQ ID NO: 330250 - RNA, 20 nt, Human
uucuccuuuuucuccucauu

SEQ ID NO: 330251 - RNA, 21 nt, Human
uuuuuuuuuuuuuuugugcaa

SEQ ID NO: 330252 - RNA, 23 nt, Human
aaaacaauuaugugcaaacugca

SEQ ID NO: 330253 - RNA, 22 nt, Human
aaaacacuaagcuugcaacaaa

SEQ ID NO: 330254 - RNA, 18 nt, Human
aaaaccuucaaccacaug

SEQ ID NO: 330255 - RNA, 21 nt, Human
aaaaugcugcacagucaugaa

SEQ ID NO: 330256 - RNA, 22 nt, Human
aacacaugaaugaaaaaaaucu

SEQ ID NO: 330257 - RNA, 18 nt, Human
aagauuuucauugugaca

SEQ ID NO: 330258 - RNA, 24 nt, Human
aagcaaaaagaauagcaaaagcag

SEQ ID NO: 330259 - RNA, 28 nt, Human
aaugauaggaguauuuaagcaaaaagaa

SEQ ID NO: 330260 - RNA, 19 nt, Human
acaaaacaacaaaaugaaa

SEQ ID NO: 330261 - RNA, 20 nt, Human
acaaaacaacaaaaugaaaa

SEQ ID NO: 330262 - RNA, 23 nt, Human
acaaaacacuaagcuugcaacaa

SEQ ID NO: 330263 - RNA, 21 nt, Human
acaaaaccuccacuacaaaac

SEQ ID NO: 330264 - RNA, 20 nt, Human
acacaagcuacaguuaaggu

SEQ ID NO: 330265 - RNA, 22 nt, Human
acacuaagcuugcaacaaaaca

SEQ ID NO: 330266 - RNA, 19 nt, Human
acagagaacaaacugccca

SEQ ID NO: 330267 - RNA, 22 nt, Human
acauaaaaaaacuguagacugc

SEQ ID NO: 330268 - RNA, 20 nt, Human
acauaacuaaaaaugcugca

SEQ ID NO: 330269 - RNA, 21 nt, Human
accaaguaauucagaaaauga

SEQ ID NO: 330270 - RNA, 18 nt, Human
accacauguaauguagac

SEQ ID NO: 330271 - RNA, 20 nt, Human
agaauguauaaaaccuucaa

SEQ ID NO: 330272 - RNA, 23 nt, Human
agagaucaguguaaauuaaauaa

SEQ ID NO: 330273 - RNA, 22 nt, Human
auaaaaccuucaaccacaugua

SEQ ID NO: 330274 - RNA, 21 nt, Human
auaacacaugaaugaaaaaaa

SEQ ID NO: 330275 - RNA, 24 nt, Human
auacuggaaucuuacugaggggua

SEQ ID NO: 330276 - RNA, 18 nt, Human
aucaagacaacaauccaa

SEQ ID NO: 330277 - RNA, 19 nt, Human
augauaccucuauucuucc

SEQ ID NO: 330278 - RNA, 22 nt, Human
auucaaauuuagaccaaaucaa

SEQ ID NO: 330279 - RNA, 27 nt, Human
caacaaaacaacaaaaugaaagccaca

SEQ ID NO: 330280 - RNA, 25 nt, Human
caacugagcuaaucauugaaguaaa

SEQ ID NO: 330281 - RNA, 21 nt, Human
cacacuauucauguccuccug

SEQ ID NO: 330282 - RNA, 23 nt, Human
cacacuauucauguccuccugaa

SEQ ID NO: 330283 - RNA, 23 nt, Human
cauaaauacacaaaucucaaguu

SEQ ID NO: 330284 - RNA, 22 nt, Human
caugaaguaaauuaacaaacau

SEQ ID NO: 330285 - RNA, 21 nt, Human
cauguccuccugaaaccaaaa

SEQ ID NO: 330286 - RNA, 19 nt, Human
ccuccacuacaaaacacua

SEQ ID NO: 330287 - RNA, 22 nt, Human
cucaaggagcaaaaaacaacag

SEQ ID NO: 330288 - RNA, 18 nt, Human
gaauagcaaaagcagacu

SEQ ID NO: 330289 - RNA, 21 nt, Human
gagaacaaacugcccagaaau

SEQ ID NO: 330290 - RNA, 21 nt, Human
gcaacaaaacaacaaaaugaa

SEQ ID NO: 330291 - RNA, 23 nt, Human
gcaagagauggaauuucccagag

SEQ ID NO: 330292 - RNA, 19 nt, Human
gccaaacaccacauaacua

SEQ ID NO: 330293 - RNA, 18 nt, Human
ggaaauguauauacuucc

SEQ ID NO: 330294 - RNA, 22 nt, Human
guaaccaaccuuaaaggacaaa

SEQ ID NO: 330295 - RNA, 20 nt, Human
gucaaucucaguacuacuag

SEQ ID NO: 330296 - RNA, 20 nt, Human
guggucacucacaaaaaugc

SEQ ID NO: 330297 - RNA, 23 nt, Human
uaaaaaaacuguagacugcaaac

SEQ ID NO: 330298 - RNA, 25 nt, Human
uaaaaaagaaucucaaacaucccag

SEQ ID NO: 330299 - RNA, 21 nt, Human
uaaaauagcagagaucagugu

SEQ ID NO: 330300 - RNA, 21 nt, Human
uaaaauagcaguuaaagaguu

SEQ ID NO: 330301 - RNA, 19 nt, Human
uaaaucaaguagaauguga

SEQ ID NO: 330302 - RNA, 24 nt, Human
uaacaugaacaaaucacaaguaca

SEQ ID NO: 330303 - RNA, 25 nt, Human
uacaaaacacuaagcuugcaacaaa

SEQ ID NO: 330304 - RNA, 19 nt, Human
uacaauauacaauagcaag

SEQ ID NO: 330305 - RNA, 21 nt, Human
uacaauauacaauagcaagag

SEQ ID NO: 330306 - RNA, 26 nt, Human
uacaauauacaauagcaagaggugag

SEQ ID NO: 330307 - RNA, 18 nt, Human
uaccaaguaauucagaaa

SEQ ID NO: 330308 - RNA, 21 nt, Human
uagaaaaagguuacaauauaa

SEQ ID NO: 330309 - RNA, 21 nt, Human
uagaaugugagguuuuuauau

SEQ ID NO: 330310 - RNA, 22 nt, Human
uagcaagaggugagaaaacuga

SEQ ID NO: 330311 - RNA, 26 nt, Human
uagcucaaggagcaaaaaacaacagg

SEQ ID NO: 330312 - RNA, 24 nt, Human
uaguaaccaaccuuaaaggacaaa

SEQ ID NO: 330313 - RNA, 23 nt, Human
uauagaauguauaaaaccuucaa

SEQ ID NO: 330314 - RNA, 23 nt, Human
uauaguaaccaaccuuaaaggac

SEQ ID NO: 330315 - RNA, 19 nt, Human
uauucaucaacauuacaca

SEQ ID NO: 330316 - RNA, 18 nt, Human
ucacacaucagaaucugg

SEQ ID NO: 330317 - RNA, 20 nt, Human
ucagaaagaacccaacauga

SEQ ID NO: 330318 - RNA, 25 nt, Human
ucauguccuccugaaaccaaaaugg

SEQ ID NO: 330319 - RNA, 23 nt, Human
uccuccugaaaccaaaauggggg

SEQ ID NO: 330320 - RNA, 19 nt, Human
uccugaaagaaaauuugcc

SEQ ID NO: 330321 - RNA, 20 nt, Human
ugaaaagaauuaacaaaacc

SEQ ID NO: 330322 - RNA, 19 nt, Human
ugagaaaacugaauacugu

SEQ ID NO: 330323 - RNA, 24 nt, Human
ugauauaaaacaauuaugugcaaa

SEQ ID NO: 330324 - RNA, 22 nt, Human
ugcaacaaaacaacaaaaugaa

SEQ ID NO: 330325 - RNA, 25 nt, Human
ugcaacaaaacaacaaaaugaaagc

SEQ ID NO: 330326 - RNA, 21 nt, Human
ugcugcacagucaugaaucca

SEQ ID NO: 330327 - RNA, 19 nt, Human
uggccugggcuacauucug

SEQ ID NO: 330328 - RNA, 19 nt, Human
uguauaaaaccuucaacca

SEQ ID NO: 330329 - RNA, 21 nt, Human
uguuucauuuacaaaaccucc

SEQ ID NO: 330330 - RNA, 21 nt, Human
uucaagaacuagaaaaagguu

SEQ ID NO: 330331 - RNA, 22 nt, Human
uucaagaacuagaaaaagguua

SEQ ID NO: 330332 - RNA, 23 nt, Human
uucauuuuuguuauauucaagua

SEQ ID NO: 330333 - RNA, 20 nt, Human
uugcaacaaaacaacaaaau

SEQ ID NO: 330334 - RNA, 22 nt, Human
uuuacaaaaccuccacuacaaa

SEQ ID NO: 330335 - RNA, 24 nt, Human
uuuuuuuuuuuuaacuauuacuca

SEQ ID NO: 330336 - RNA, 26 nt, Human
aaaaaaccuauucauuuuuggcuuca

SEQ ID NO: 330337 - RNA, 21 nt, Human
aaaccaaacaaaacccccuag

SEQ ID NO: 330338 - RNA, 19 nt, Human
aaauacuggaugcugcucu

SEQ ID NO: 330339 - RNA, 22 nt, Human
aaccaaacaaaacccccuagga

SEQ ID NO: 330340 - RNA, 19 nt, Human
aacccccuaggaucuugaa

SEQ ID NO: 330341 - RNA, 20 nt, Human
aacccuccuccaacaccaag

SEQ ID NO: 330342 - RNA, 21 nt, Human
aagaaucuguuguagugcagc

SEQ ID NO: 330343 - RNA, 18 nt, Human
aagggaauaaaaaaaaag

SEQ ID NO: 330344 - RNA, 20 nt, Human
acacaaagguuuaaaacagu

SEQ ID NO: 330345 - RNA, 19 nt, Human
acccucggccccucccugc

SEQ ID NO: 330346 - RNA, 18 nt, Human
acggcccagagggcggcc

SEQ ID NO: 330347 - RNA, 21 nt, Human
acucccucaccuccccacccu

SEQ ID NO: 330348 - RNA, 23 nt, Human
agacagugcgacgcaaggccagg

SEQ ID NO: 330349 - RNA, 19 nt, Human
agagcaaacgucuuccccu

SEQ ID NO: 330350 - RNA, 20 nt, Human
aggaaagcaacaaggauuac

SEQ ID NO: 330351 - RNA, 18 nt, Human
aggaaauagggaagccuu

SEQ ID NO: 330352 - RNA, 21 nt, Human
agggaauaaaaaaaaagucag

SEQ ID NO: 330353 - RNA, 20 nt, Human
aggucuagaauaccuuaguu

SEQ ID NO: 330354 - RNA, 23 nt, Human
auaaaauaguugaaucugacuga

SEQ ID NO: 330355 - RNA, 21 nt, Human
auugcaaauucauugcuguga

SEQ ID NO: 330356 - RNA, 20 nt, Human
caaaacaauacuuaucacca

SEQ ID NO: 330357 - RNA, 27 nt, Human
caaauuacaauauucugcagccacaaa

SEQ ID NO: 330358 - RNA, 21 nt, Human
caaggaagaacuagcaaauca

SEQ ID NO: 330359 - RNA, 18 nt, Human
cacacaaauggcuguguu

SEQ ID NO: 330360 - RNA, 21 nt, Human
cacccaguauucauguuuuaa

SEQ ID NO: 330361 - RNA, 19 nt, Human
cacucccucaccuccccac

SEQ ID NO: 330362 - RNA, 22 nt, Human
cacucccucaccuccccacccu

SEQ ID NO: 330363 - RNA, 18 nt, Human
cacugcagcugccgccgc

SEQ ID NO: 330364 - RNA, 24 nt, Human
caugccaauauaaacaucaaaaca

SEQ ID NO: 330365 - RNA, 21 nt, Human
cauugugcacacacaaauggc

SEQ ID NO: 330366 - RNA, 21 nt, Human
ccaacaccaaguuaagcaacu

SEQ ID NO: 330367 - RNA, 18 nt, Human
ccacucccucaccucccc

SEQ ID NO: 330368 - RNA, 18 nt, Human
ccagcagccauaucccaa

SEQ ID NO: 330369 - RNA, 18 nt, Human
cccacucccucaccuccc

SEQ ID NO: 330370 - RNA, 24 nt, Human
ccccuaggaucuugaagguccuau

SEQ ID NO: 330371 - RNA, 19 nt, Human
ccccuccccucugacucgc

SEQ ID NO: 330372 - RNA, 18 nt, Human
ccgcaccgccuggcaugc

SEQ ID NO: 330373 - RNA, 20 nt, Human
ccgccccauuccccacuccc

SEQ ID NO: 330374 - RNA, 21 nt, Human
ccgcccuugcugccgcagccg

SEQ ID NO: 330375 - RNA, 22 nt, Human
ccgccgccaccgccgcccuugc

SEQ ID NO: 330376 - RNA, 22 nt, Human
ccgccuggcaugccgggaaagg

SEQ ID NO: 330377 - RNA, 25 nt, Human
ccucggccccucccugcuccccucc

SEQ ID NO: 330378 - RNA, 24 nt, Human
cgggagagcaaacgucuuccccua

SEQ ID NO: 330379 - RNA, 22 nt, Human
cuaaaccugacaucuaaacaug

SEQ ID NO: 330380 - RNA, 22 nt, Human
cuagaauaccuuaguuugcauu

SEQ ID NO: 330381 - RNA, 18 nt, Human
cuccccacccucggcccc

SEQ ID NO: 330382 - RNA, 24 nt, Human
cucccugcuccccuccccucugac

SEQ ID NO: 330383 - RNA, 21 nt, Human
cucggccccucccugcucccc

SEQ ID NO: 330384 - RNA, 24 nt, Human
cugccgccgccgccaccgccgccc

SEQ ID NO: 330385 - RNA, 23 nt, Human
gcauugugcacacacaaauggcu

SEQ ID NO: 330386 - RNA, 22 nt, Human
gcccacaacaaaauguguugcc

SEQ ID NO: 330387 - RNA, 21 nt, Human
gccccauuccccacucccuca

SEQ ID NO: 330388 - RNA, 19 nt, Human
gccgccgccgccaccgccg

SEQ ID NO: 330389 - RNA, 22 nt, Human
gccgccgccgccaccgccgccc

SEQ ID NO: 330390 - RNA, 23 nt, Human
gccgccgccgccaccgccgcccu

SEQ ID NO: 330391 - RNA, 21 nt, Human
gccuuuacacggcccagaggg

SEQ ID NO: 330392 - RNA, 18 nt, Human
ggaaaauugaauauucug

SEQ ID NO: 330393 - RNA, 21 nt, Human
ggccccucccugcuccccucc

SEQ ID NO: 330394 - RNA, 24 nt, Human
ggcuacgcgagcugaggacagaca

SEQ ID NO: 330395 - RNA, 21 nt, Human
gggcauauuaucuagaaagca

SEQ ID NO: 330396 - RNA, 19 nt, Human
uaaaaaccaaacaaaaccc

SEQ ID NO: 330397 - RNA, 21 nt, Human
uaaaaaccaaacaaaaccccc

SEQ ID NO: 330398 - RNA, 21 nt, Human
uaaacccuccuccaacaccaa

SEQ ID NO: 330399 - RNA, 27 nt, Human
uaacucuacaaggaagaacuagcaaau

SEQ ID NO: 330400 - RNA, 19 nt, Human
uacauucuaaacuuguuuu

SEQ ID NO: 330401 - RNA, 19 nt, Human
uacgcgagcugaggacaga

SEQ ID NO: 330402 - RNA, 18 nt, Human
uagaacacaaucagcagc

SEQ ID NO: 330403 - RNA, 23 nt, Human
uagaacacaaucagcagccgccg

SEQ ID NO: 330404 - RNA, 19 nt, Human
uauaaaccagcacacaaag

SEQ ID NO: 330405 - RNA, 18 nt, Human
uauaacaucucacuaaac

SEQ ID NO: 330406 - RNA, 25 nt, Human
uauugugaaauuuucauagauggaa

SEQ ID NO: 330407 - RNA, 21 nt, Human
ucaaaacaauacuuaucacca

SEQ ID NO: 330408 - RNA, 18 nt, Human
ucacugcagcugccgccg

SEQ ID NO: 330409 - RNA, 20 nt, Human
ucacugcagcugccgccgcc

SEQ ID NO: 330410 - RNA, 21 nt, Human
ucacugcagcugccgccgccg

SEQ ID NO: 330411 - RNA, 18 nt, Human
ucagucaccuuaaaaugc

SEQ ID NO: 330412 - RNA, 19 nt, Human
ucauugcugugagaaaagg

SEQ ID NO: 330413 - RNA, 21 nt, Human
uccccuagaacacaaucagca

SEQ ID NO: 330414 - RNA, 18 nt, Human
ucccucaccuccccaccc

SEQ ID NO: 330415 - RNA, 18 nt, Human
ucccugcuccccuccccu

SEQ ID NO: 330416 - RNA, 24 nt, Human
uccgcgccacggguaaucgaaaga

SEQ ID NO: 330417 - RNA, 24 nt, Human
uccucacaauuaaaaaccaaacaa

SEQ ID NO: 330418 - RNA, 23 nt, Human
ugaaccacugaaguugguuaaau

SEQ ID NO: 330419 - RNA, 19 nt, Human
ugagauaggcuguuccggg

SEQ ID NO: 330420 - RNA, 20 nt, Human
ugcgugaagaauguuuuggc

SEQ ID NO: 330421 - RNA, 21 nt, Human
uggagacgguaagaaucuguu

SEQ ID NO: 330422 - RNA, 18 nt, Human
uggaugcugcucuaagau

SEQ ID NO: 330423 - RNA, 19 nt, Human
ugguaucaggaaagcaaca

SEQ ID NO: 330424 - RNA, 22 nt, Human
ugugcacacacaaauggcugug

SEQ ID NO: 330425 - RNA, 18 nt, Human
uguuuuggcugcuauuuc

SEQ ID NO: 330426 - RNA, 22 nt, Human
uuaagcaacuguggaggauaaa

SEQ ID NO: 330427 - RNA, 24 nt, Human
uuauaugcagaguaugaagaaacu

SEQ ID NO: 330428 - RNA, 21 nt, Human
uuccgggagagcaaacgucuu

SEQ ID NO: 330429 - RNA, 18 nt, Human
uucuaaacuuguuuuaca

SEQ ID NO: 330430 - RNA, 19 nt, Human
uucugaaaaugaaguuagc

SEQ ID NO: 330431 - RNA, 20 nt, Human
uugaccauuuacaaucucug

SEQ ID NO: 330432 - RNA, 23 nt, Human
uugccuguuuagugaaaaauaaa

SEQ ID NO: 330433 - RNA, 24 nt, Human
uuggcuuguguuuagcuuaaauuu

SEQ ID NO: 330434 - RNA, 25 nt, Human
uuugccaauuaggaaaggugcugcu

SEQ ID NO: 330435 - RNA, 19 nt, Human
aaaauaccauacaaagaug

SEQ ID NO: 330436 - RNA, 22 nt, Human
aaaaugacuucaugacauuuuc

SEQ ID NO: 330437 - RNA, 22 nt, Human
aaacaaaagauaaaacacaaaa

SEQ ID NO: 330438 - RNA, 21 nt, Human
aaacacaaaaggaguacauaa

SEQ ID NO: 330439 - RNA, 21 nt, Human
aaaccagguauauugaaagga

SEQ ID NO: 330440 - RNA, 20 nt, Human
aacauaccaugacagcugga

SEQ ID NO: 330441 - RNA, 25 nt, Human
aaccaggaagaaagcuuucgucuaa

SEQ ID NO: 330442 - RNA, 27 nt, Human
acaaauaaugaaaaaugacuucaugac

SEQ ID NO: 330443 - RNA, 21 nt, Human
acagggcaauaauuuuuucca

SEQ ID NO: 330444 - RNA, 20 nt, Human
acauuguuuaguacaaauaa

SEQ ID NO: 330445 - RNA, 20 nt, Human
acccuucaguauuauuuugu

SEQ ID NO: 330446 - RNA, 22 nt, Human
acuauacauucugaaaaagcac

SEQ ID NO: 330447 - RNA, 19 nt, Human
acugucccaagugacaaaa

SEQ ID NO: 330448 - RNA, 21 nt, Human
acuuaacaaggacacacccag

SEQ ID NO: 330449 - RNA, 18 nt, Human
agaaaagccuacaugacc

SEQ ID NO: 330450 - RNA, 21 nt, Human
agaaaagccuacaugacccaa

SEQ ID NO: 330451 - RNA, 19 nt, Human
aggcauuucauuuauguuu

SEQ ID NO: 330452 - RNA, 22 nt, Human
agguuauagaaauguugaagug

SEQ ID NO: 330453 - RNA, 25 nt, Human
auaaaacauuguuuaguacaaauaa

SEQ ID NO: 330454 - RNA, 21 nt, Human
auggaaaaacaaaagauaaaa

SEQ ID NO: 330455 - RNA, 22 nt, Human
caaaagauaaaacacaaaagga

SEQ ID NO: 330456 - RNA, 25 nt, Human
caaaagauaaaacacaaaaggagua

SEQ ID NO: 330457 - RNA, 24 nt, Human
caaaagguguuagaugcaucacca

SEQ ID NO: 330458 - RNA, 23 nt, Human
caagauuuaaggguuuacccuuc

SEQ ID NO: 330459 - RNA, 20 nt, Human
caaggacacacccaggaaau

SEQ ID NO: 330460 - RNA, 27 nt, Human
caaugcuguaaaaaccagguauauuga

SEQ ID NO: 330461 - RNA, 22 nt, Human
cagaaaagccuacaugacccaa

SEQ ID NO: 330462 - RNA, 20 nt, Human
cagcagcagcuccgccgggg

SEQ ID NO: 330463 - RNA, 18 nt, Human
cauucccuuuuacaaacc

SEQ ID NO: 330464 - RNA, 23 nt, Human
ccacacuucacaggaccuccuga

SEQ ID NO: 330465 - RNA, 19 nt, Human
ccagauucaauacuauuuc

SEQ ID NO: 330466 - RNA, 22 nt, Human
cuauacaaacaagguuauagaa

SEQ ID NO: 330467 - RNA, 19 nt, Human
cuucagcuuacuccaguac

SEQ ID NO: 330468 - RNA, 22 nt, Human
gagugauaaucaguuuuaacag

SEQ ID NO: 330469 - RNA, 22 nt, Human
gaguggcucagcagcagcuccg

SEQ ID NO: 330470 - RNA, 19 nt, Human
gaugaaaacugcuuacugc

SEQ ID NO: 330471 - RNA, 18 nt, Human
gccaaaacccugugguuu

SEQ ID NO: 330472 - RNA, 25 nt, Human
ggcaaagagaacauuuacuuuugau

SEQ ID NO: 330473 - RNA, 21 nt, Human
gggggugguggggcgcgggag

SEQ ID NO: 330474 - RNA, 19 nt, Human
gggugguggggcgcgggag

SEQ ID NO: 330475 - RNA, 22 nt, Human
ggugguggggcgcgggagucuc

SEQ ID NO: 330476 - RNA, 19 nt, Human
guaaaaaccagguauauug

SEQ ID NO: 330477 - RNA, 20 nt, Human
guaaagcacuauaaaaauua

SEQ ID NO: 330478 - RNA, 21 nt, Human
uaaaauggcaaagagaacaac

SEQ ID NO: 330479 - RNA, 19 nt, Human
uaacaaggacacacccagg

SEQ ID NO: 330480 - RNA, 20 nt, Human
uacaaagauguguaaacaaa

SEQ ID NO: 330481 - RNA, 24 nt, Human
uacauucugaaaaagcacugcaga

SEQ ID NO: 330482 - RNA, 25 nt, Human
uaccagacaucugcaugcacacccc

SEQ ID NO: 330483 - RNA, 24 nt, Human
uaccaugacagcuggauggguuuc

SEQ ID NO: 330484 - RNA, 20 nt, Human
uagaaugucauuuucuuaaa

SEQ ID NO: 330485 - RNA, 18 nt, Human
uaucaaaaagaucugcaa

SEQ ID NO: 330486 - RNA, 25 nt, Human
ucaguauuauuuugugaaaguauuc

SEQ ID NO: 330487 - RNA, 19 nt, Human
ucagugagcagcaaaaggu

SEQ ID NO: 330488 - RNA, 19 nt, Human
uccacaguauuaaaaucug

SEQ ID NO: 330489 - RNA, 19 nt, Human
ugaaaaagcacugcagagc

SEQ ID NO: 330490 - RNA, 18 nt, Human
ugagaaaggcuauacaaa

SEQ ID NO: 330491 - RNA, 22 nt, Human
ugagaaaggcuauacaaacaag

SEQ ID NO: 330492 - RNA, 21 nt, Human
ugcaauaaggcucaccuggga

SEQ ID NO: 330493 - RNA, 21 nt, Human
ugggugacuauaucaaaaaga

SEQ ID NO: 330494 - RNA, 19 nt, Human
uguaacaauauauuuaggc

SEQ ID NO: 330495 - RNA, 24 nt, Human
uugaucacuuaacaaggacacacc

SEQ ID NO: 330496 - RNA, 18 nt, Human
uuuaaacccaagcucauu

SEQ ID NO: 330497 - RNA, 20 nt, Human
uuucauuuauguuuuuccaa

SEQ ID NO: 330498 - RNA, 20 nt, Human
uuuuuaaacccaagcucauu

SEQ ID NO: 330499 - RNA, 20 nt, Human
uuuuuuuuuuuuuuacuuuu

SEQ ID NO: 330500 - RNA, 25 nt, Human
aaaaggccaaguugagugcaaggug

SEQ ID NO: 330501 - RNA, 18 nt, Human
acugaaaacaaaggcuug

SEQ ID NO: 330502 - RNA, 19 nt, Human
acugggcaacaaagucaga

SEQ ID NO: 330503 - RNA, 25 nt, Human
acuuuauucacuaggacugaaaaca

SEQ ID NO: 330504 - RNA, 20 nt, Human
agaagggccuggagacccuc

SEQ ID NO: 330505 - RNA, 18 nt, Human
agccagagccuccuagag

SEQ ID NO: 330506 - RNA, 20 nt, Human
aggcagcgggggugcuggcc

SEQ ID NO: 330507 - RNA, 19 nt, Human
aggccacaggcauccucca

SEQ ID NO: 330508 - RNA, 20 nt, Human
agucccggagcgcgccgguc

SEQ ID NO: 330509 - RNA, 20 nt, Human
cacagaccucaccuguggcc

SEQ ID NO: 330510 - RNA, 19 nt, Human
caccuggacgugcccagga

SEQ ID NO: 330511 - RNA, 20 nt, Human
caccuguggccaggccgggc

SEQ ID NO: 330512 - RNA, 21 nt, Human
cagcagagcaccguggcaaag

SEQ ID NO: 330513 - RNA, 20 nt, Human
cagcgggggugcuggccccu

SEQ ID NO: 330514 - RNA, 22 nt, Human
caggacacacagaugcacgaug

SEQ ID NO: 330515 - RNA, 19 nt, Human
caggcauccuccaagguca

SEQ ID NO: 330516 - RNA, 21 nt, Human
caggcguccucccuuagcugc

SEQ ID NO: 330517 - RNA, 19 nt, Human
ccacgggcucucagaagcc

SEQ ID NO: 330518 - RNA, 18 nt, Human
ccacugggcaacaaaguc

SEQ ID NO: 330519 - RNA, 18 nt, Human
ccaggacacacagaugca

SEQ ID NO: 330520 - RNA, 19 nt, Human
ccaggacacacagaugcac

SEQ ID NO: 330521 - RNA, 24 nt, Human
cccucaccuggacgugcccaggag

SEQ ID NO: 330522 - RNA, 23 nt, Human
cccucuguccagccuucuaggga

SEQ ID NO: 330523 - RNA, 20 nt, Human
ccgcuccccgucccgugcag

SEQ ID NO: 330524 - RNA, 26 nt, Human
ccucaccuggacgugcccaggagggg

SEQ ID NO: 330525 - RNA, 18 nt, Human
ccugagcaugugcggcug

SEQ ID NO: 330526 - RNA, 22 nt, Human
cggagcgcgccggucgggcccc

SEQ ID NO: 330527 - RNA, 21 nt, Human
cgggagcaggcagcucccagg

SEQ ID NO: 330528 - RNA, 19 nt, Human
cguggaggcagcgggggug

SEQ ID NO: 330529 - RNA, 25 nt, Human
cuggagacccucuguccagccuucu

SEQ ID NO: 330530 - RNA, 22 nt, Human
cuucugucccaggcgugggcag

SEQ ID NO: 330531 - RNA, 24 nt, Human
gcagcguggaggcagcgggggugc

SEQ ID NO: 330532 - RNA, 21 nt, Human
gcagugaagccuucuguccca

SEQ ID NO: 330533 - RNA, 18 nt, Human
ggaggaagggacaaggcu

SEQ ID NO: 330534 - RNA, 20 nt, Human
ggaggaggaagggacaaggc

SEQ ID NO: 330535 - RNA, 18 nt, Human
ggaggcagcgggggugcu

SEQ ID NO: 330536 - RNA, 21 nt, Human
ggcagcagagcaccguggcaa

SEQ ID NO: 330537 - RNA, 23 nt, Human
gggaggaggaagggacaaggcuu

SEQ ID NO: 330538 - RNA, 18 nt, Human
gggcagcguggaggcagc

SEQ ID NO: 330539 - RNA, 26 nt, Human
gggccgggagcaggcagcucccagga

SEQ ID NO: 330540 - RNA, 25 nt, Human
uaggacugaaaacaaaggcuugugc

SEQ ID NO: 330541 - RNA, 22 nt, Human
uccuccaaggucagugaggaag

SEQ ID NO: 330542 - RNA, 20 nt, Human
ucugucccaggcgugggcag

SEQ ID NO: 330543 - RNA, 23 nt, Human
ugaaaacaaaggcuugugcaauc

SEQ ID NO: 330544 - RNA, 19 nt, Human
ugaaaacagacacucgggc

SEQ ID NO: 330545 - RNA, 18 nt, Human
ugaagccuucugucccag

SEQ ID NO: 330546 - RNA, 21 nt, Human
ugaccuggggcuccugaaaac

SEQ ID NO: 330547 - RNA, 24 nt, Human
ugcaaggcccguugggcggcgcgu

SEQ ID NO: 330548 - RNA, 24 nt, Human
ugccagccccagcccucccucacc

SEQ ID NO: 330549 - RNA, 20 nt, Human
ugcccaggagggggcagcag

SEQ ID NO: 330550 - RNA, 25 nt, Human
ugccugagcaugugcggcugaagac

SEQ ID NO: 330551 - RNA, 22 nt, Human
ugggaggaggaagggacaaggc

SEQ ID NO: 330552 - RNA, 20 nt, Human
ugugcguggugccagcccca

SEQ ID NO: 330553 - RNA, 23 nt, Human
uguuguuucugguguuuucugug

SEQ ID NO: 330554 - RNA, 22 nt, Human
uguuucugguguuuucugugau

SEQ ID NO: 330555 - RNA, 24 nt, Human
uguuucugguguuuucugugauuu

SEQ ID NO: 330556 - RNA, 21 nt, Human
uuaggcacugugcguggugcc

SEQ ID NO: 330557 - RNA, 24 nt, Human
uuugagccagagccuccuagaggg

SEQ ID NO: 330558 - RNA, 21 nt, Human
uuuuuuuuuuuuuuuuccaga

SEQ ID NO: 330559 - RNA, 22 nt, Human
uuuuuuuuuuuuuuuuuuccag

SEQ ID NO: 330560 - RNA, 19 nt, Human
aaacauuugccaccauaaa

SEQ ID NO: 330561 - RNA, 22 nt, Human
aaacauuugccaccauaaaaua

SEQ ID NO: 330562 - RNA, 21 nt, Human
aaauaucaacaauacagagcc

SEQ ID NO: 330563 - RNA, 24 nt, Human
aacaucuaucuuccaccaaauagc

SEQ ID NO: 330564 - RNA, 22 nt, Human
aagagaaauguuaaagucagaa

SEQ ID NO: 330565 - RNA, 23 nt, Human
aagcaaaacaaguugcaaauauu

SEQ ID NO: 330566 - RNA, 19 nt, Human
aaggcacuuuuggcucuga

SEQ ID NO: 330567 - RNA, 21 nt, Human
aaucuuaaagaaauauuuaca

SEQ ID NO: 330568 - RNA, 18 nt, Human
aauguuaagacaaagaga

SEQ ID NO: 330569 - RNA, 20 nt, Human
acaguacccucauucauucu

SEQ ID NO: 330570 - RNA, 23 nt, Human
accaaacauuugccaccauaaaa

SEQ ID NO: 330571 - RNA, 21 nt, Human
accccaauccccuucccacca

SEQ ID NO: 330572 - RNA, 22 nt, Human
accccaauccccuucccaccaa

SEQ ID NO: 330573 - RNA, 25 nt, Human
aguacaaaugugacugcuucaauau

SEQ ID NO: 330574 - RNA, 21 nt, Human
auaaacaacuuccaugaaaca

SEQ ID NO: 330575 - RNA, 22 nt, Human
augauuuucuaaaacguuagag

SEQ ID NO: 330576 - RNA, 23 nt, Human
auucagagcaaugggaauauagc

SEQ ID NO: 330577 - RNA, 19 nt, Human
caacaauugacaacuucca

SEQ ID NO: 330578 - RNA, 21 nt, Human
caaguacaguaaaugcucaug

SEQ ID NO: 330579 - RNA, 27 nt, Human
cacauaggccaaguauaaauguacaau

SEQ ID NO: 330580 - RNA, 19 nt, Human
caccaauaaaaaagucacc

SEQ ID NO: 330581 - RNA, 23 nt, Human
caccccaauccccuucccaccaa

SEQ ID NO: 330582 - RNA, 26 nt, Human
caccccaauccccuucccaccaauaa

SEQ ID NO: 330583 - RNA, 22 nt, Human
cacuuuuggcucugaaauauuu

SEQ ID NO: 330584 - RNA, 21 nt, Human
cagcacauaggccaaguauaa

SEQ ID NO: 330585 - RNA, 22 nt, Human
cagccugccccaccccaauccc

SEQ ID NO: 330586 - RNA, 19 nt, Human
ccaccaauggaaaagcaaa

SEQ ID NO: 330587 - RNA, 19 nt, Human
cccaccccaauccccuucc

SEQ ID NO: 330588 - RNA, 19 nt, Human
ccccaauccccuucccacc

SEQ ID NO: 330589 - RNA, 19 nt, Human
ccuauauagccauuaagau

SEQ ID NO: 330590 - RNA, 21 nt, Human
ccugcugguaaagacagagau

SEQ ID NO: 330591 - RNA, 21 nt, Human
cuaccaaacauuugccaccau

SEQ ID NO: 330592 - RNA, 23 nt, Human
gaaaaagaaacuaaauauuuacu

SEQ ID NO: 330593 - RNA, 21 nt, Human
gagucuuuggaaaagcaguuc

SEQ ID NO: 330594 - RNA, 23 nt, Human
gcaaauaucaacaauacagagcc

SEQ ID NO: 330595 - RNA, 18 nt, Human
gguacaaguacaguuuag

SEQ ID NO: 330596 - RNA, 22 nt, Human
uaaaaucuaguucccugacccu

SEQ ID NO: 330597 - RNA, 24 nt, Human
uaaagaaauauuuacaaagcugca

SEQ ID NO: 330598 - RNA, 22 nt, Human
uaaaugaucuuggcaagaccca

SEQ ID NO: 330599 - RNA, 26 nt, Human
uaagacaaagagaaauguuaaaguca

SEQ ID NO: 330600 - RNA, 23 nt, Human
uaauaaauacacucuucugugac

SEQ ID NO: 330601 - RNA, 25 nt, Human
uaccuuugaauuuuauaaacaacuu

SEQ ID NO: 330602 - RNA, 18 nt, Human
uagaaugucaccuauggc

SEQ ID NO: 330603 - RNA, 22 nt, Human
uagauauagccaugauuugucc

SEQ ID NO: 330604 - RNA, 24 nt, Human
uagucguaaagucugggcuucuag

SEQ ID NO: 330605 - RNA, 23 nt, Human
uauaaauaugaagaaaaagaaac

SEQ ID NO: 330606 - RNA, 24 nt, Human
uauaacugcauguaagaucuuaaa

SEQ ID NO: 330607 - RNA, 25 nt, Human
uaugaagaaaaagaaacuaaauauu

SEQ ID NO: 330608 - RNA, 24 nt, Human
ucacugugccauguaucaaucaua

SEQ ID NO: 330609 - RNA, 23 nt, Human
ucauauuacauuaagccagccug

SEQ ID NO: 330610 - RNA, 18 nt, Human
ucauucauucuacauaau

SEQ ID NO: 330611 - RNA, 21 nt, Human
uccaaucacauguccucuuca

SEQ ID NO: 330612 - RNA, 23 nt, Human
uccaccaaauagcaaacaggcau

SEQ ID NO: 330613 - RNA, 19 nt, Human
uccaccaauggaaaagcaa

SEQ ID NO: 330614 - RNA, 19 nt, Human
ucuaccaaacauuugccac

SEQ ID NO: 330615 - RNA, 22 nt, Human
ucuaccaaacauuugccaccau

SEQ ID NO: 330616 - RNA, 19 nt, Human
ucugaaauauuucuccuaa

SEQ ID NO: 330617 - RNA, 18 nt, Human
ugaagaacucaguaguuc

SEQ ID NO: 330618 - RNA, 23 nt, Human
ugaaucuuaaagaaauauuuaca

SEQ ID NO: 330619 - RNA, 22 nt, Human
ugacugcuucaauaugaacauc

SEQ ID NO: 330620 - RNA, 20 nt, Human
ugagaagcaauuuguacaca

SEQ ID NO: 330621 - RNA, 19 nt, Human
ugcugguaaagacagagau

SEQ ID NO: 330622 - RNA, 22 nt, Human
uggaaaagcaaaacaaguugca

SEQ ID NO: 330623 - RNA, 20 nt, Human
uggcaaugcagcggaauaaa

SEQ ID NO: 330624 - RNA, 19 nt, Human
uggugagaagcaauuugua

SEQ ID NO: 330625 - RNA, 21 nt, Human
uuacaguucuaccaaacauuu

SEQ ID NO: 330626 - RNA, 18 nt, Human
acaucugguaugaacacc

SEQ ID NO: 330627 - RNA, 22 nt, Human
acccccagagugggaagaagag

SEQ ID NO: 330628 - RNA, 22 nt, Human
caccaugacuucuguaagccaa

SEQ ID NO: 330629 - RNA, 21 nt, Human
caccauucaggauggcuaccc

SEQ ID NO: 330630 - RNA, 22 nt, Human
ccacagggcuggauuucucagc

SEQ ID NO: 330631 - RNA, 18 nt, Human
ccccuccccggcuuuucc

SEQ ID NO: 330632 - RNA, 21 nt, Human
cucagcugucugguaaaccag

SEQ ID NO: 330633 - RNA, 20 nt, Human
cucauggaaggugggaagcu

SEQ ID NO: 330634 - RNA, 18 nt, Human
cuggauuucucagcuguc

SEQ ID NO: 330635 - RNA, 23 nt, Human
cuggcucccuuucugaauuucug

SEQ ID NO: 330636 - RNA, 21 nt, Human
cuugaagccuuugcuuggccc

SEQ ID NO: 330637 - RNA, 19 nt, Human
gcccuggggcucagagccc

SEQ ID NO: 330638 - RNA, 19 nt, Human
ggcacuucacugccccagg

SEQ ID NO: 330639 - RNA, 19 nt, Human
ggggugggggcagcguggg

SEQ ID NO: 330640 - RNA, 18 nt, Human
gggugggggcagcguggg

SEQ ID NO: 330641 - RNA, 20 nt, Human
uaagacaccaguucccacag

SEQ ID NO: 330642 - RNA, 22 nt, Human
uaagacaccaguucccacaggg

SEQ ID NO: 330643 - RNA, 21 nt, Human
uaagccaacggggcuuccucc

SEQ ID NO: 330644 - RNA, 18 nt, Human
uaauugccaccauucagg

SEQ ID NO: 330645 - RNA, 21 nt, Human
uagaaacccccagagugggaa

SEQ ID NO: 330646 - RNA, 25 nt, Human
ucagcggggucgggccaugggggcg

SEQ ID NO: 330647 - RNA, 18 nt, Human
ugccccaggguggcuggc

SEQ ID NO: 330648 - RNA, 20 nt, Human
ugcccuggggcucagagccu

SEQ ID NO: 330649 - RNA, 19 nt, Human
uggaaggugggaagcuaua

SEQ ID NO: 330650 - RNA, 23 nt, Human
ugggggcagcguggguccugagc

SEQ ID NO: 330651 - RNA, 27 nt, Human
uguuuugguuuauuaucuuaguguuuu

SEQ ID NO: 330652 - RNA, 22 nt, Human
uugaagccuuugcuuggcccuu

SEQ ID NO: 330653 - RNA, 19 nt, Human
uuuuucagguaguguuuug

SEQ ID NO: 330654 - RNA, 30 nt, Human
aaaaaaacaaaagcaacaugcucugcagag

SEQ ID NO: 330655 - RNA, 21 nt, Human
aaacaaaagcaacaugcucug

SEQ ID NO: 330656 - RNA, 21 nt, Human
acaagaaaaccagggccccca

SEQ ID NO: 330657 - RNA, 23 nt, Human
accaccgaagcccuaaagaagag

SEQ ID NO: 330658 - RNA, 22 nt, Human
acugaugugcaggagggauccc

SEQ ID NO: 330659 - RNA, 22 nt, Human
agaaaaccagggcccccagaug
